United States Patent Application Publication US 2013/0267429 A1 - sequence listing, part 14

SEQ ID NO: 310628 - DNA, 55 bp, Artificial
  Synthetic oligonucleotide
acatgacgcaaccactgaccggcacgactcccgcggctggtggctatctgaacgt

SEQ ID NO: 310629 - DNA, 60 bp, Artificial
  Synthetic oligonucleotide
acatgacgcgaatgtgaagaacctgtatgaaaaggtcagatcacaactaagagacaatgc

SEQ ID NO: 310630 - DNA, 55 bp, Artificial
  Synthetic oligonucleotide
acatgacggcggttgcttgtcaacctccgtactgttattttcgtaattctactac

SEQ ID NO: 310631 - DNA, 60 bp, Artificial
  Synthetic oligonucleotide
acatgacgtcaagtgacgttacgacatttattaatctggcacgtgcatcatgtgctggtg

SEQ ID NO: 310632 - DNA, 58 bp, Artificial
  Synthetic oligonucleotide
acatgactctggtcctgttaaataatgctgggaattgttatacatggacctgaatgat

SEQ ID NO: 310633 - DNA, 60 bp, Artificial
  Synthetic oligonucleotide
acatgactgccaacaacctgtctgcacctaagaatgcgtatgacgctatgattcttagtg

SEQ ID NO: 310634 - DNA, 60 bp, Artificial
  Synthetic oligonucleotide
acatgagaaagtacgccgtcctcgtgtattcaaaagacgatgcgcttgagtcagacgagt

SEQ ID NO: 310635 - DNA, 59 bp, Artificial
  Synthetic oligonucleotide
acatgagaagaaacccgaggattaaggacattttccacaatgttgccatcgagccgaga

SEQ ID NO: 310636 - DNA, 60 bp, Artificial
  Synthetic oligonucleotide
acatgagagcaaatgttaatgtgttcattacgaagtgcagcagagggtttagtgcagagt

SEQ ID NO: 310637 - DNA, 60 bp, Artificial
  Synthetic oligonucleotide
acatgagataaatcttatcactaaagagtaccgccgatctcctattgatgaagactctat

SEQ ID NO: 310638 - DNA, 60 bp, Artificial
  Synthetic oligonucleotide
acatgagattgccgactggtcgtggcacgatggagctatccttccttttgacatcgataa

SEQ ID NO: 310639 - DNA, 60 bp, Artificial
  Synthetic oligonucleotide
acatgagcaccttctgccaaatggtttcctcagttaattatgtagtgccaatggctgatc

SEQ ID NO: 310640 - DNA, 59 bp, Artificial
  Synthetic oligonucleotide
acatgaggacaagatagttctcgtgagcacaaacttccaggagaaaagcttttcaagtg

SEQ ID NO: 310641 - DNA, 52 bp, Artificial
  Synthetic oligonucleotide
acatgaggggggttgctttgtcatacgcgcgagcggtctgcaatccaaatgc

SEQ ID NO: 310642 - DNA, 52 bp, Artificial
  Synthetic oligonucleotide
acatgagtaagtacgccgtcctggtttattcgaaggacgataaactagagaa

SEQ ID NO: 310643 - DNA, 60 bp, Artificial
  Synthetic oligonucleotide
acatgagtaatgagggatcttatttcttcggagacaatgcagaggagtatgaaaactaaa

SEQ ID NO: 310644 - DNA, 60 bp, Artificial
  Synthetic oligonucleotide
acatgatccttttgacctgcagcgatattgtctagcaagatactatgatgtacgacctgg

SEQ ID NO: 310645 - DNA, 50 bp, Artificial
  Synthetic oligonucleotide
acatgatctcacgagttaacggcatccgagcccaccgaaaccagattctc

SEQ ID NO: 310646 - DNA, 55 bp, Artificial
  Synthetic oligonucleotide
acatgatgggaacacggccagtcttgtgcttaatcagtcccgtctgaccgtcgaa

SEQ ID NO: 310647 - DNA, 58 bp, Artificial
  Synthetic oligonucleotide
acatgatggtccggaaatacacttacctgtcgtccctgtcactagctctacaccgacc

SEQ ID NO: 310648 - DNA, 51 bp, Artificial
  Synthetic oligonucleotide
acatgattaagtccgatgttaagccagttgtcaccgacacgttgaacgttg

SEQ ID NO: 310649 - DNA, 54 bp, Artificial
  Synthetic oligonucleotide
acatgattagttcagctgtcacaggttattcattttcgctcgctggaatcgccg

SEQ ID NO: 310650 - DNA, 60 bp, Artificial
  Synthetic oligonucleotide
acatgcaattttaaaccagatgagagaagtccataggtggtcttcttctcgtcattgtgt

SEQ ID NO: 310651 - DNA, 60 bp, Artificial
  Synthetic oligonucleotide
acatgcacccaggctctgggaagacccacagagtcctcccggagctcattcgccaatgca

SEQ ID NO: 310652 - DNA, 59 bp, Artificial
  Synthetic oligonucleotide
acatgcaccctggagtcttgacagcgggaagaatgtcggagcttggcgtttgctttggg

SEQ ID NO: 310653 - DNA, 52 bp, Artificial
  Synthetic oligonucleotide
acatgcagaaaatgtttgttcacccagacatagctgactttgttagagcttt

SEQ ID NO: 310654 - DNA, 60 bp, Artificial
  Synthetic oligonucleotide
acatgcagagtaacgcgaagaaagcagttcttggactagctttagtatctgcaagaagac

SEQ ID NO: 310655 - DNA, 53 bp, Artificial
  Synthetic oligonucleotide
acatgcaggggcttagaccacaaagcttcctcccaagagcagacttaccagta

SEQ ID NO: 310656 - DNA, 60 bp, Artificial
  Synthetic oligonucleotide
acatgcagtacaatagtaattcataaaactgctacatatatgacattagatgtttttatc

SEQ ID NO: 310657 - DNA, 55 bp, Artificial
  Synthetic oligonucleotide
acatgcatctggccaagatcccacactctatggagcaatggagtcttggaaagtg

SEQ ID NO: 310658 - DNA, 60 bp, Artificial
  Synthetic oligonucleotide
acatgcatggagagcgtcaaaaatgggacttatgattatccaaagtactcagaagaatca

SEQ ID NO: 310659 - DNA, 60 bp, Artificial
  Synthetic oligonucleotide
acatgccaaacatacaagagaatacgctgagttttattcgcaatctaatcaattattgtc

SEQ ID NO: 310660 - DNA, 58 bp, Artificial
  Synthetic oligonucleotide
acatgccaaagcggaattacgataccgccttctctaccccgatgtcgaatgtgcggag

SEQ ID NO: 310661 - DNA, 58 bp, Artificial
  Synthetic oligonucleotide
acatgccaaccctaaaccgctttaaggcagtggagacatggtctgatggggttctgta

SEQ ID NO: 310662 - DNA, 60 bp, Artificial
  Synthetic oligonucleotide
acatgccaatcagaagtcagcttcaaccatgggtacactcaccacgagtctggaggacac

SEQ ID NO: 310663 - DNA, 55 bp, Artificial
  Synthetic oligonucleotide
acatgccacgtgtttgagggagaatgcacgttaatcatccctccgctagtgatgg

SEQ ID NO: 310664 - DNA, 52 bp, Artificial
  Synthetic oligonucleotide
acatgccatgattatagttactttgaggagtttggcctagatataacattct

SEQ ID NO: 310665 - DNA, 58 bp, Artificial
  Synthetic oligonucleotide
acatgccggtgttaacacatcagtttatgtatgtgccaccgggaggcccaattccaac

SEQ ID NO: 310666 - DNA, 55 bp, Artificial
  Synthetic oligonucleotide
acatgccgtggacattacgtcaaatgttagtgcttacaagacttcggtctgtggt

SEQ ID NO: 310667 - DNA, 60 bp, Artificial
  Synthetic oligonucleotide
acatgcctactggggatctgggaatgtatagttggattagtctgatacgacctctaatga

SEQ ID NO: 310668 - DNA, 60 bp, Artificial
  Synthetic oligonucleotide
acatgcgaaacacaattatggcctcaaagacagtgggaacatctgaggaaaagctacgga

SEQ ID NO: 310669 - DNA, 51 bp, Artificial
  Synthetic oligonucleotide
acatgcgaaatgcattggatgggaatcccataagtgttgacagaaagcaca

SEQ ID NO: 310670 - DNA, 60 bp, Artificial
  Synthetic oligonucleotide
acatgcgagaacatatcagttcttgagggagcgaaatcacagctgctcgagtttaggaat

SEQ ID NO: 310671 - DNA, 58 bp, Artificial
  Synthetic oligonucleotide
acatgcgcagatgcacactcattttgtttcactatgtacaatgaattgtctctccctt

SEQ ID NO: 310672 - DNA, 59 bp, Artificial
  Synthetic oligonucleotide
acatgcgcccgtgtcgctgtcgtggataacgcgtcatccatttgtacgtcttcccaaat

SEQ ID NO: 310673 - DNA, 60 bp, Artificial
  Synthetic oligonucleotide
acatgcgcgaataattttaagagtgttggagaatggtcacgtgagtgtctacggcgatgg

SEQ ID NO: 310674 - DNA, 56 bp, Artificial
  Synthetic oligonucleotide
acatgcggaaacatgttcgtttcgcataatttcggtgtgacggataccctgggagg

SEQ ID NO: 310675 - DNA, 52 bp, Artificial
  Synthetic oligonucleotide
acatgcggtcggtaagaaaaaagaccgagttacaaatcgaaaagttgcggta

SEQ ID NO: 310676 - DNA, 54 bp, Artificial
  Synthetic oligonucleotide
acatgcgtcgcctactgacctttcgacagaccgagttacgacggttaaaacctg

SEQ ID NO: 310677 - DNA, 55 bp, Artificial
  Synthetic oligonucleotide
acatgctactccggtttattcaatggaaatagatttgtcgatgaaggaagagaac

SEQ ID NO: 310678 - DNA, 56 bp, Artificial
  Synthetic oligonucleotide
acatgctagaaagagagttggtccgaaaaacaaggttcctcccagtggctggtgga

SEQ ID NO: 310679 - DNA, 55 bp, Artificial
  Synthetic oligonucleotide
acatgctagccagttagccatgacacttgcggctttagggaaaccgctacgacat

SEQ ID NO: 310680 - DNA, 59 bp, Artificial
  Synthetic oligonucleotide
acatgctcagttaacggagtgaacgactttagttacaatggcggtacattgccgacaga

SEQ ID NO: 310681 - DNA, 60 bp, Artificial
  Synthetic oligonucleotide
acatgctcccagagcctcggcttgatgacatcgaaagatttagacaggagggtttctatt

SEQ ID NO: 310682 - DNA, 60 bp, Artificial
  Synthetic oligonucleotide
acatgctcctacggactgcaataggccaagtatcgagacccatgtttttatatgtgagga

SEQ ID NO: 310683 - DNA, 51 bp, Artificial
  Synthetic oligonucleotide
acatgctcggcatctagagcagacgaactccgaaccttatcatgggggact

SEQ ID NO: 310684 - DNA, 60 bp, Artificial
  Synthetic oligonucleotide
acatgctctcctgggatggaccgaatacaatttcaacggacgacgatatatggtctcagt

SEQ ID NO: 310685 - DNA, 58 bp, Artificial
  Synthetic oligonucleotide
acatgctgaattacgtttttgacataccacatataactaggtcagcaacagatcgatc

SEQ ID NO: 310686 - DNA, 60 bp, Artificial
  Synthetic oligonucleotide
acatgctgatagcccatggaaaatgtgcaataaggtttcaaatagatagaagagctcgtg

SEQ ID NO: 310687 - DNA, 53 bp, Artificial
  Synthetic oligonucleotide
acatgctgccgagcatgttcgtcggacggtacagagacagtggttattgagta

SEQ ID NO: 310688 - DNA, 59 bp, Artificial
  Synthetic oligonucleotide
acatgctgggaacaaatgtacaccccaggaggggaagtaagaaatgatgatgttgacca

SEQ ID NO: 310689 - DNA, 60 bp, Artificial
  Synthetic oligonucleotide
acatgctgtaccatttcagacataatgctgattgtcctagatgtgattattgggatgatg

SEQ ID NO: 310690 - DNA, 60 bp, Artificial
  Synthetic oligonucleotide
acatgcttgagcttttttctgtaagaggggacaccatcttctttaagctgtatgatgtta

SEQ ID NO: 310691 - DNA, 57 bp, Artificial
  Synthetic oligonucleotide
acatggaaaagtctagtaaaacaccatatgtacatctcaaggaaagctaagggatgg

SEQ ID NO: 310692 - DNA, 57 bp, Artificial
  Synthetic oligonucleotide
acatggaacagtctagtaaaacatcatatgtatagaacaaagaaagctacagggtgg

SEQ ID NO: 310693 - DNA, 59 bp, Artificial
  Synthetic oligonucleotide
acatggaacagtctagtaaaataccatatgtatgcttcagggagagctaggggatggtt

SEQ ID NO: 310694 - DNA, 60 bp, Artificial
  Synthetic oligonucleotide
acatggaatagtatagtaaagcaccatatgtatgtgtcaaaaagagctacgggatggttc

SEQ ID NO: 310695 - DNA, 60 bp, Artificial
  Synthetic oligonucleotide
acatggaatagtttagtaaaacatcatatgtatgtctcaaggaaagctgatggctggttt

SEQ ID NO: 310696 - DNA, 58 bp, Artificial
  Synthetic oligonucleotide
acatggaatagtttagtaaagtatcacatgtatcggtcaaggagagtcagtggatggt

SEQ ID NO: 310697 - DNA, 57 bp, Artificial
  Synthetic oligonucleotide
acatggaatcagactaatagtacagggttcaataatggcacagtcacactcccatgc

SEQ ID NO: 310698 - DNA, 60 bp, Artificial
  Synthetic oligonucleotide
acatggacaggtgtcactcaaaacggaggaagtagcgcctgcagaaggggatcagccgat

SEQ ID NO: 310699 - DNA, 60 bp, Artificial
  Synthetic oligonucleotide
acatggacattagaagtcgaaaatattatggctgagccatgtcatcgaaggattatttgg

SEQ ID NO: 310700 - DNA, 59 bp, Artificial
  Synthetic oligonucleotide
acatggagaaggttagtagtgatagggtccatgtaattccttgtattccatgtggtgct

SEQ ID NO: 310701 - DNA, 59 bp, Artificial
  Synthetic oligonucleotide
acatggagacacaccacagctggatttgaaagctagaccaacttacggtgcgggtgaaa

SEQ ID NO: 310702 - DNA, 51 bp, Artificial
  Synthetic oligonucleotide
acatggagaggagttccgtaaaagatacgcgttaatcccttagagtctcca

SEQ ID NO: 310703 - DNA, 60 bp, Artificial
  Synthetic oligonucleotide
acatggagattccattggagtccttcaggttagcagtagatttcagacctcgattctctg

SEQ ID NO: 310704 - DNA, 60 bp, Artificial
  Synthetic oligonucleotide
acatggagcaatcacaagtagcaatacagcagctactaatgctgattgtgcctggctaga

SEQ ID NO: 310705 - DNA, 55 bp, Artificial
  Synthetic oligonucleotide
acatggagctcttacagggacctttctacttgaacaggaggcaagctgtccttgg

SEQ ID NO: 310706 - DNA, 50 bp, Artificial
  Synthetic oligonucleotide
acatggaggctaacgacttttacccagctaggtatcaatctcacatgtta

SEQ ID NO: 310707 - DNA, 60 bp, Artificial
  Synthetic oligonucleotide
acatggagggagtgagggcgcattgggcacacaagattttggctaaggagcatagagaac

SEQ ID NO: 310708 - DNA, 60 bp, Artificial
  Synthetic oligonucleotide
acatggaggtgaagatcatggaaatggagatcggcgataggagtccttatttttgtggcg

SEQ ID NO: 310709 - DNA, 58 bp, Artificial
  Synthetic oligonucleotide
acatggagtagtttagtaaagcaccctatgcatgtctcaaagaaagctaaaggatggt

SEQ ID NO: 310710 - DNA, 55 bp, Artificial
  Synthetic oligonucleotide
acatggagtgagcaatgactcagtgttaatcttgctcaataagcattataacctg

SEQ ID NO: 310711 - DNA, 60 bp, Artificial
  Synthetic oligonucleotide
acatggatgacttatatgtagggtctgatcttgacattacccaacacagacagaaggtag

SEQ ID NO: 310712 - DNA, 60 bp, Artificial
  Synthetic oligonucleotide
acatggatgacttgtatgtgggctcagatttacctatagaggaacatagaaagagagtag

SEQ ID NO: 310713 - DNA, 54 bp, Artificial
  Synthetic oligonucleotide
acatggatgatatgttaatagccagtgataggccaaaggcagaacatctagtaa

SEQ ID NO: 310714 - DNA, 60 bp, Artificial
  Synthetic oligonucleotide
acatggattaggacagtttatttatgacacttatggagatacatgggcaggtgtagaagc

SEQ ID NO: 310715 - DNA, 60 bp, Artificial
  Synthetic oligonucleotide
acatggcacagcttagtaaaacatcatatgtatgtctctaggagagctaaggactggttt

SEQ ID NO: 310716 - DNA, 60 bp, Artificial
  Synthetic oligonucleotide
acatggccaaatcattgctcctattcaccaatgtctactgtaaggatgataattcaaaaa

SEQ ID NO: 310717 - DNA, 60 bp, Artificial
  Synthetic oligonucleotide
acatggcccgagagaaacatccggagtactacaaggactgctgacatcgagctaaggact

SEQ ID NO: 310718 - DNA, 53 bp, Artificial
  Synthetic oligonucleotide
acatggccctactgcgttccggtaagttacccggtaagcgcttcgggtctcac

SEQ ID NO: 310719 - DNA, 54 bp, Artificial
  Synthetic oligonucleotide
acatggccctgagaaagttcctgtcgaaactttatctttttggacattaattcg

SEQ ID NO: 310720 - DNA, 57 bp, Artificial
  Synthetic oligonucleotide
acatggccttcaatgtagcactgatgattgtgtcagtgttgtgcattgttaaagggt

SEQ ID NO: 310721 - DNA, 54 bp, Artificial
  Synthetic oligonucleotide
acatggcggggacctcaaaggtaacccgttctagcaattattctcctcgcggtg

SEQ ID NO: 310722 - DNA, 55 bp, Artificial
  Synthetic oligonucleotide
acatggctccatggcttggggcaatatatctatgaaacatatggggacacttgga

SEQ ID NO: 310723 - DNA, 60 bp, Artificial
  Synthetic oligonucleotide
acatggctgtcgatcgtatgttgccgcccaatcttgacaaatctcttttcttcgacaata

SEQ ID NO: 310724 - DNA, 57 bp, Artificial
  Synthetic oligonucleotide
acatggcttcaaaggaaagagtaagctgtacaagcccacgggtgaactaatctgccc

SEQ ID NO: 310725 - DNA, 60 bp, Artificial
  Synthetic oligonucleotide
acatggctttagatgatactcatgcacaaattgtaacaccttggtcattggttgatgcaa

SEQ ID NO: 310726 - DNA, 60 bp, Artificial
  Synthetic oligonucleotide
acatgggacaacggcattatcgaataggcgtttcaactgttggtcatcgtttcatgatat

SEQ ID NO: 310727 - DNA, 58 bp, Artificial
  Synthetic oligonucleotide
acatgggacctttttgtggagcggagcaatgctttcagcaattgttacccgtacgatg

SEQ ID NO: 310728 - DNA, 55 bp, Artificial
  Synthetic oligonucleotide
acatgggactctttggccagaatatgtactaccactacctaggtaggtccgggta

SEQ ID NO: 310729 - DNA, 57 bp, Artificial
  Synthetic oligonucleotide
acatgggagacgttgttcttcccttcgctgttgttcaggggatggatcgcgggagtg

SEQ ID NO: 310730 - DNA, 58 bp, Artificial
  Synthetic oligonucleotide
acatgggaggcaagtggtcaaaaagtagcatagtgggatggcctcaggtcagggagag

SEQ ID NO: 310731 - DNA, 54 bp, Artificial
  Synthetic oligonucleotide
acatgggatcaggacataccctgtaaacctttaccatatactaacttacacccc

SEQ ID NO: 310732 - DNA, 52 bp, Artificial
  Synthetic oligonucleotide
acatgggatctttttgtggaacgaggtaatgctttcagcaactgctatcctt

SEQ ID NO: 310733 - DNA, 57 bp, Artificial
  Synthetic oligonucleotide
acatgggatgagtacattgagtatttgaagtcagtaaacccccagatagttcagttt

SEQ ID NO: 310734 - DNA, 52 bp, Artificial
  Synthetic oligonucleotide
acatgggatgctcttcccgattccgtccaaacccccacccccgagggtcgcc

SEQ ID NO: 310735 - DNA, 56 bp, Artificial
  Synthetic oligonucleotide
acatgggcaggagtagacaccaacagtggggtaacaaaagcttgcccttacaatag

SEQ ID NO: 310736 - DNA, 54 bp, Artificial
  Synthetic oligonucleotide
acatgggccggatgcctaaaagcagccgaattattgtttccgaaaggaaccaaa

SEQ ID NO: 310737 - DNA, 59 bp, Artificial
  Synthetic oligonucleotide
acatgggcgaaatcaatatccttatctgagaactgcttcgataagattttaactgttgg

SEQ ID NO: 310738 - DNA, 52 bp, Artificial
  Synthetic oligonucleotide
acatgggcttaccatggtagctatgaaacaaaacaaactggatcagcatcat

SEQ ID NO: 310739 - DNA, 53 bp, Artificial
  Synthetic oligonucleotide
acatggggaacagggtttcgcgcgaatcctgtaggaggttcgagtccttcccc

SEQ ID NO: 310740 - DNA, 50 bp, Artificial
  Synthetic oligonucleotide
acatgggggtttcttggaatatagggactagtacctcagagaatcttgag

SEQ ID NO: 310741 - DNA, 60 bp, Artificial
  Synthetic oligonucleotide
acatggggttggtgtcgaattctagtgctctcatagtctgagcacgacttagtgattccc

SEQ ID NO: 310742 - DNA, 58 bp, Artificial
  Synthetic oligonucleotide
acatggggtttcatgtccccaatctcaatgcccatattgcttcactcattgtgaacct

SEQ ID NO: 310743 - DNA, 55 bp, Artificial
  Synthetic oligonucleotide
acatgggttagctggaggaataaaagagctttcgcttcctatatacacaatattc

SEQ ID NO: 310744 - DNA, 57 bp, Artificial
  Synthetic oligonucleotide
acatggtaaagatctcatatacatgcctgatggggtaagatcagaaagctacaccca

SEQ ID NO: 310745 - DNA, 55 bp, Artificial
  Synthetic oligonucleotide
acatggtaacatgaatgaggaagcaaagattcaccttgaaactgtggagtgggcc

SEQ ID NO: 310746 - DNA, 57 bp, Artificial
  Synthetic oligonucleotide
acatggtcaagactggggcagtaacaacagcaaagaacggtttacttgggatgctat

SEQ ID NO: 310747 - DNA, 59 bp, Artificial
  Synthetic oligonucleotide
acatggtcattggaaactagtaatagccctatgaataatttgctgcgtacggccacgtg

SEQ ID NO: 310748 - DNA, 55 bp, Artificial
  Synthetic oligonucleotide
acatggtcgagacgaccctagccgattgcatcctcgaaggctggaacgggtccgg

SEQ ID NO: 310749 - DNA, 60 bp, Artificial
  Synthetic oligonucleotide
acatggtctattgaaatctcgtgtgaaggttaccaggccacatctagcaccacagacccc

SEQ ID NO: 310750 - DNA, 60 bp, Artificial
  Synthetic oligonucleotide
acatggtgtactatgccatccttgctttaagcatgttgaccaggtgtctcaagcgcaaat

SEQ ID NO: 310751 - DNA, 55 bp, Artificial
  Synthetic oligonucleotide
acatggtgtgtccaaatggtcaaatgttggcatcaggacaattctaagagattgg

SEQ ID NO: 310752 - DNA, 60 bp, Artificial
  Synthetic oligonucleotide
acatggttatattgggtataccggcaccacagcaagcgtgtgtagtaattggcaagcacg

SEQ ID NO: 310753 - DNA, 55 bp, Artificial
  Synthetic oligonucleotide
acatggttcgtggaccgtgaacacccttaccaatcattcaactaccacggatcgt

SEQ ID NO: 310754 - DNA, 57 bp, Artificial
  Synthetic oligonucleotide
acatggttgggcaccatatattagagaattcactagggtcttcaaaggagacaaacc

SEQ ID NO: 310755 - DNA, 60 bp, Artificial
  Synthetic oligonucleotide
acatggttttaactttgatcaaggattcagctatagttgtgcaggctacaggaacagatt

SEQ ID NO: 310756 - DNA, 56 bp, Artificial
  Synthetic oligonucleotide
acatggttttgcccgtacgactatcaccctcaataacaatacttatgggcctaata

SEQ ID NO: 310757 - DNA, 57 bp, Artificial
  Synthetic oligonucleotide
acatgtaaacgaaggaactacttctgatcctgaaatgtgttcagttcttataaaatg

SEQ ID NO: 310758 - DNA, 59 bp, Artificial
  Synthetic oligonucleotide
acatgtaacggtggtgactacgtttttagactacctgtaggccagcatccagtgatgac

SEQ ID NO: 310759 - DNA, 56 bp, Artificial
  Synthetic oligonucleotide
acatgtaactcaaatatcacaggactactactgacaagggatgggggaaagggaaa

SEQ ID NO: 310760 - DNA, 60 bp, Artificial
  Synthetic oligonucleotide
acatgtaattcaagtatcacaggattactactgacacgtgatggaggcacgaatggaggc

SEQ ID NO: 310761 - DNA, 57 bp, Artificial
  Synthetic oligonucleotide
acatgtacaatacggaattgtaataaactaggaccgagagaaaatgtggccataata

SEQ ID NO: 310762 - DNA, 60 bp, Artificial
  Synthetic oligonucleotide
acatgtacaggaattattgatgtcttgtctcgctaagttaatgattaagcctagatgctt

SEQ ID NO: 310763 - DNA, 59 bp, Artificial
  Synthetic oligonucleotide
acatgtacctcaaatatcacaggactactattgacacgggatggaggaataaaggataa

SEQ ID NO: 310764 - DNA, 60 bp, Artificial
  Synthetic oligonucleotide
acatgtactgattggtgtgtagctgcgtttggagttacaggtacagttgcagaaggattt

SEQ ID NO: 310765 - DNA, 53 bp, Artificial
  Synthetic oligonucleotide
acatgtagagaaatctgaatcttgcaaaacagagtttgcatcggcctacagag

SEQ ID NO: 310766 - DNA, 60 bp, Artificial
  Synthetic oligonucleotide
acatgtagatgattctgtggttgacatctggtcatataatgcacaactcctcgttttgct

SEQ ID NO: 310767 - DNA, 60 bp, Artificial
  Synthetic oligonucleotide
acatgtagctcaaatatcacaggactactattgacacgtgatggaggaaacaatagcaca

SEQ ID NO: 310768 - DNA, 53 bp, Artificial
  Synthetic oligonucleotide
acatgtagttgacgatttttacgaaggagacccgagaaagactctaaaagtcg

SEQ ID NO: 310769 - DNA, 54 bp, Artificial
  Synthetic oligonucleotide
acatgtagtttttggcgatgtgtctaaaactactttaggtggtatgcatttgtt

SEQ ID NO: 310770 - DNA, 54 bp, Artificial
  Synthetic oligonucleotide
acatgtataggatgcgtcattttgagcggggtatcgaaatatggattaagagag

SEQ ID NO: 310771 - DNA, 59 bp, Artificial
  Synthetic oligonucleotide
acatgtatcgacaaggaaagtcaatgcggccatactatgccgccgccctaaaggacgaa

SEQ ID NO: 310772 - DNA, 55 bp, Artificial
  Synthetic oligonucleotide
acatgtatgataacgagcctagtaccgctactgttaagcatgacaacagagatag

SEQ ID NO: 310773 - DNA, 55 bp, Artificial
  Synthetic oligonucleotide
acatgtatgttatgccgctttccacttttccgagaatttacttctcgaagattca

SEQ ID NO: 310774 - DNA, 60 bp, Artificial
  Synthetic oligonucleotide
acatgtcaccatatgcatattcggctgacagtgacccgggcgccctgtccacctggaggc

SEQ ID NO: 310775 - DNA, 60 bp, Artificial
  Synthetic oligonucleotide
acatgtcactcatatctggtatgtggttattgaccgttataccaaacgatatgtttcttc

SEQ ID NO: 310776 - DNA, 60 bp, Artificial
  Synthetic oligonucleotide
acatgtcaggtctcctgtctactgtcaagtatgcgtgccaggcagaggattcgatcctcg

SEQ ID NO: 310777 - DNA, 60 bp, Artificial
  Synthetic oligonucleotide
acatgtccatgttaacgagtgtattgtaagcatctactgcaatacctttggatactgcat

SEQ ID NO: 310778 - DNA, 50 bp, Artificial
  Synthetic oligonucleotide
acatgtcctcatagaggacggctttgatgtagagacgggctgacgttggg

SEQ ID NO: 310779 - DNA, 57 bp, Artificial
  Synthetic oligonucleotide
acatgtcgccagtgtcagttgaaggtacgaatgtcattttaaggggtggtgtttaga

SEQ ID NO: 310780 - DNA, 60 bp, Artificial
  Synthetic oligonucleotide
acatgtcgggaaggtcatgtgtatttcagatgtgacacgtggtaacggcattactcatcg

SEQ ID NO: 310781 - DNA, 55 bp, Artificial
  Synthetic oligonucleotide
acatgtcgttcgcagcctgcatctatcccgaaaacgagaaggaagtacttcgtgg

SEQ ID NO: 310782 - DNA, 55 bp, Artificial
  Synthetic oligonucleotide
acatgtctaccgttaggactacggcagtcgatttcctttcgaactacggaatatc

SEQ ID NO: 310783 - DNA, 57 bp, Artificial
  Synthetic oligonucleotide
acatgtctactgcccacggtatagaccctaacatccgtactggggttaggactatca

SEQ ID NO: 310784 - DNA, 59 bp, Artificial
  Synthetic oligonucleotide
acatgtctctttattgcagggatggcagagcttggggcattcttttctatcctgcagga

SEQ ID NO: 310785 - DNA, 53 bp, Artificial
  Synthetic oligonucleotide
acatgtctttgatgggtcctgataaatatcatctctagtaaagaatccagacg

SEQ ID NO: 310786 - DNA, 60 bp, Artificial
  Synthetic oligonucleotide
acatgtctttgctaggacggttgggccgagtatagtgtggagtcgttctgatatcgagtc

SEQ ID NO: 310787 - DNA, 60 bp, Artificial
  Synthetic oligonucleotide
acatgtgaaagcagcactaagggcatcatccgtgttaatctgggcttatggggacaacga

SEQ ID NO: 310788 - DNA, 60 bp, Artificial
  Synthetic oligonucleotide
acatgtgatctgggacataggattgcagtcctcatgtactatggtagtgccatggattag

SEQ ID NO: 310789 - DNA, 55 bp, Artificial
  Synthetic oligonucleotide
acatgtgatgatagggggaagtcagtccgctcaacgacggatagtgggaaaatca

SEQ ID NO: 310790 - DNA, 60 bp, Artificial
  Synthetic oligonucleotide
acatgtgcaaattgatacccaagaagttgaggagtccattcacatggcttagacttttag

SEQ ID NO: 310791 - DNA, 55 bp, Artificial
  Synthetic oligonucleotide
acatgtggaacatgccgtaacgatgatacagtgtgtagctgtagtattcgacagc

SEQ ID NO: 310792 - DNA, 57 bp, Artificial
  Synthetic oligonucleotide
acatgtggaacttcattagtgggatacaatacttggcgggcctgtcaacgttgcccg

SEQ ID NO: 310793 - DNA, 54 bp, Artificial
  Synthetic oligonucleotide
acatgtggagcgggaccttccccattaatgcctacaccacgggcccctgtaccc

SEQ ID NO: 310794 - DNA, 54 bp, Artificial
  Synthetic oligonucleotide
acatgtggatgattctgttcttgacatatggtcatacaacgcacagcttcttgt

SEQ ID NO: 310795 - DNA, 60 bp, Artificial
  Synthetic oligonucleotide
acatgtgtatgacgccaataagatcgtgtacacagttaaggttgagccacatacggggga

SEQ ID NO: 310796 - DNA, 60 bp, Artificial
  Synthetic oligonucleotide
acatgtgtcatcgcactgcggcgtagtgcggtttttaactgatttagcgtgcacagtaaa

SEQ ID NO: 310797 - DNA, 50 bp, Artificial
  Synthetic oligonucleotide
acatgtgtttaccacacctattccggtcgctcccactacacatcttactc

SEQ ID NO: 310798 - DNA, 60 bp, Artificial
  Synthetic oligonucleotide
acatgttacatacacatatatccaaccgtcaaactatccaactagccaaacttgcatatg

SEQ ID NO: 310799 - DNA, 59 bp, Artificial
  Synthetic oligonucleotide
acatgttatgatctggaagaacatgtccagctcaaaacgatcggggaggtaggcttacg

SEQ ID NO: 310800 - DNA, 51 bp, Artificial
  Synthetic oligonucleotide
acatgttcaccagaaaggtaattcgttgtgaactcctcatggagttgccca

SEQ ID NO: 310801 - DNA, 58 bp, Artificial
  Synthetic oligonucleotide
acatgttcttataacatagttatcattcccgataggccaaatgattcagaatctattg

SEQ ID NO: 310802 - DNA, 60 bp, Artificial
  Synthetic oligonucleotide
acatgttgaatcgataactttcactgcgtcgtataactttcactgagatgtcgatgtcga

SEQ ID NO: 310803 - DNA, 60 bp, Artificial
  Synthetic oligonucleotide
acatgttgagcactgtgctgggtgtatccatattaaacctgggccagaggaaatacacaa

SEQ ID NO: 310804 - DNA, 60 bp, Artificial
  Synthetic oligonucleotide
acatgttggtaaggtgatatgcatttcggatgtgacacgtggtaacggtattactcatcg

SEQ ID NO: 310805 - DNA, 60 bp, Artificial
  Synthetic oligonucleotide
acatgtttcgatgttgacaaatagattgacaactgcaaacgccccgactgtacgagcgat

SEQ ID NO: 310806 - DNA, 60 bp, Artificial
  Synthetic oligonucleotide
acattaaaatccatgatagatgcatacaaactaacagagtcaaggactatcaatcgtgaa

SEQ ID NO: 310807 - DNA, 55 bp, Artificial
  Synthetic oligonucleotide
acattaaccatggacttccaccgatacagaacaccagaaatgtggtgccagttgc

SEQ ID NO: 310808 - DNA, 58 bp, Artificial
  Synthetic oligonucleotide
acattaacggacctgtgaaaacgccgctctgggacccctttatcatgcagcacccaga

SEQ ID NO: 310809 - DNA, 56 bp, Artificial
  Synthetic oligonucleotide
acattaaggacaattgggctaagacgatgtcaagtcttttaacgatactaagtgta

SEQ ID NO: 310810 - DNA, 52 bp, Artificial
  Synthetic oligonucleotide
acattaagggcagactggtccctggggcggcatacgctctctatggcgtatg

SEQ ID NO: 310811 - DNA, 60 bp, Artificial
  Synthetic oligonucleotide
acattaaggggggcaatgcttcatttcagatcagctttgatgatattgcagtattgttgc

SEQ ID NO: 310812 - DNA, 51 bp, Artificial
  Synthetic oligonucleotide
acattaagttcagcggaccaactaccattttcaagttaaatcagccggtaa

SEQ ID NO: 310813 - DNA, 55 bp, Artificial
  Synthetic oligonucleotide
acattacaggaaagtctctgggttgggagaaagagaaacgcgcaagaggtgaagc

SEQ ID NO: 310814 - DNA, 58 bp, Artificial
  Synthetic oligonucleotide
acattaccaacagagatgcagtgtgttaagccctttaaaattgggaacttcactgatg

SEQ ID NO: 310815 - DNA, 60 bp, Artificial
  Synthetic oligonucleotide
acattacctaccagccacgcatgtacttctacccaactctcatcccagatcgcattctta

SEQ ID NO: 310816 - DNA, 55 bp, Artificial
  Synthetic oligonucleotide
acattacctcatactgattatgcctggacttttgttcttgcggagtctactacta

SEQ ID NO: 310817 - DNA, 60 bp, Artificial
  Synthetic oligonucleotide
acattacgctgcactgcaccaatctttgttgcacgccaactgggtaagcaccaggtgggc

SEQ ID NO: 310818 - DNA, 60 bp, Artificial
  Synthetic oligonucleotide
acattacggctaggccctaagtcattgatcaggtctataggtacagcatccgttgctgac

SEQ ID NO: 310819 - DNA, 55 bp, Artificial
  Synthetic oligonucleotide
acattactacttgataacgggtttgatgtggaagtcgatgtgagcgtcatagatc

SEQ ID NO: 310820 - DNA, 60 bp, Artificial
  Synthetic oligonucleotide
acattactaggtgagatactgaactactatgcacactggtctggtagtgtaaagctcacc

SEQ ID NO: 310821 - DNA, 60 bp, Artificial
  Synthetic oligonucleotide
acattactcctcctcctcagacagcaacgactcaagcaagccaagtacaagcagcgactc

SEQ ID NO: 310822 - DNA, 60 bp, Artificial
  Synthetic oligonucleotide
acattactctacctgatttgaaagatccagagagagtcacggaagatactaagaagctga

SEQ ID NO: 310823 - DNA, 60 bp, Artificial
  Synthetic oligonucleotide
acattagaaacagcatacggagctacctcacaaacaccacgcaatcctactaacatctta

SEQ ID NO: 310824 - DNA, 55 bp, Artificial
  Synthetic oligonucleotide
acattagaagtagagcacctttcgactggacagcaacgttagggacagaaacgtt

SEQ ID NO: 310825 - DNA, 59 bp, Artificial
  Synthetic oligonucleotide
acattagatattgatcctaagtctataactgtagaagatagtgtctttggtatagaggg

SEQ ID NO: 310826 - DNA, 60 bp, Artificial
  Synthetic oligonucleotide
acattagatgagcatgacgctaatgtaaggaatctacatgatagagtcagaagagtcctg

SEQ ID NO: 310827 - DNA, 55 bp, Artificial
  Synthetic oligonucleotide
acattagcaagaagcatctgtgagaaacttgaacaatctggacttcccgttggag

SEQ ID NO: 310828 - DNA, 59 bp, Artificial
  Synthetic oligonucleotide
acattagcaagtgttttgcaaacaaccaggatgagaggttgttaggcttcaccatggag

SEQ ID NO: 310829 - DNA, 56 bp, Artificial
  Synthetic oligonucleotide
acattagcagctggtcgtcctactattaaccacccaacctttgtgggtagtgagcg

SEQ ID NO: 310830 - DNA, 59 bp, Artificial
  Synthetic oligonucleotide
acattagccctttgtcaggaagtgctcagcatgtggaggaatgctcctgttacccccgg

SEQ ID NO: 310831 - DNA, 59 bp, Artificial
  Synthetic oligonucleotide
acattaggattgggtggaaaccgtacagtgggcgactgagtctcataatgcaacactta

SEQ ID NO: 310832 - DNA, 55 bp, Artificial
  Synthetic oligonucleotide
acattagggactttgtattgaatgagggccgtcacagacctagggagcttcaagt

SEQ ID NO: 310833 - DNA, 50 bp, Artificial
  Synthetic oligonucleotide
acattagtaagaaggttattaagtggctacttagaataatctcggctatg

SEQ ID NO: 310834 - DNA, 55 bp, Artificial
  Synthetic oligonucleotide
acattagtagagcacaatggaatagaacgttgaaccaggtaagggcaaagttaaa

SEQ ID NO: 310835 - DNA, 51 bp, Artificial
  Synthetic oligonucleotide
acattagtggaacacaatggaataaaacgctagaacgagtaaaggccaagt

SEQ ID NO: 310836 - DNA, 60 bp, Artificial
  Synthetic oligonucleotide
acattagtttataacctacttgtggcaaaaacatccatatgcatgaagtgcgtagcaccc

SEQ ID NO: 310837 - DNA, 60 bp, Artificial
  Synthetic oligonucleotide
acattataccaagagcacaagaatcaaagtgcacagaatacgtaaataatggattaccac

SEQ ID NO: 310838 - DNA, 53 bp, Artificial
  Synthetic oligonucleotide
acattataccgtttgaacaaagaccgaatttgaagttgaataacgataactta

SEQ ID NO: 310839 - DNA, 56 bp, Artificial
  Synthetic oligonucleotide
acattatagaaaactacgtagggaacacattagctttgtcccgtctctgaacagat

SEQ ID NO: 310840 - DNA, 60 bp, Artificial
  Synthetic oligonucleotide
acattatcattctggacagcgccgtattggcgagtccactgtaggcgagagtcccgttgc

SEQ ID NO: 310841 - DNA, 55 bp, Artificial
  Synthetic oligonucleotide
acattatctactcaattcacagatttcgtgtcattaaattcactgcggtttagat

SEQ ID NO: 310842 - DNA, 60 bp, Artificial
  Synthetic oligonucleotide
acattatctgtggattggtggttggagggactgtatgattcttaccatgacatgcgtgtt

SEQ ID NO: 310843 - DNA, 59 bp, Artificial
  Synthetic oligonucleotide
acattattaatatgccgccctagcggagaagctatgcttcgacgtccgacgaaggagga

SEQ ID NO: 310844 - DNA, 54 bp, Artificial
  Synthetic oligonucleotide
acattattacccgccatgcgtatcccgttcattcgaacgtggttatagcccccg

SEQ ID NO: 310845 - DNA, 51 bp, Artificial
  Synthetic oligonucleotide
acattattcagcacaattggctacgttagatataaacccaagtcctatatc

SEQ ID NO: 310846 - DNA, 60 bp, Artificial
  Synthetic oligonucleotide
acattattgtgctccagctggttatgcgattctaaagtgtaatgatacggcattcaatgg

SEQ ID NO: 310847 - DNA, 55 bp, Artificial
  Synthetic oligonucleotide
acattatttacatacgctttggaaggcgggtattttatataaaagagagacaaca

SEQ ID NO: 310848 - DNA, 60 bp, Artificial
  Synthetic oligonucleotide
acattcaaacatgttgcgcagagtgatccatcagaagccatatctataagtggagacaat

SEQ ID NO: 310849 - DNA, 55 bp, Artificial
  Synthetic oligonucleotide
acattcacagccgcacccctcgacactctgctagctggcaaggtgtgtgttgatg

SEQ ID NO: 310850 - DNA, 58 bp, Artificial
  Synthetic oligonucleotide
acattcacctggactttgtcagactcttcaggggtggagaatccaggtggttattgcc

SEQ ID NO: 310851 - DNA, 58 bp, Artificial
  Synthetic oligonucleotide
acattcacgaacctttcaaaacccttgtgtgaggtaaactcatggcacatcctatcta

SEQ ID NO: 310852 - DNA, 60 bp, Artificial
  Synthetic oligonucleotide
acattcacggacatataagcctactgggaattgaggaactccatcatttgtcaaagcctg

SEQ ID NO: 310853 - DNA, 55 bp, Artificial
  Synthetic oligonucleotide
acattcactagtttattctccctcgcacccagtgtggcacattcattggctgtcg

SEQ ID NO: 310854 - DNA, 58 bp, Artificial
  Synthetic oligonucleotide
acattcagatagatatctcgtctcgcgatgtacccggttattctttcgaaccgtggtc

SEQ ID NO: 310855 - DNA, 55 bp, Artificial
  Synthetic oligonucleotide
acattcagccgcatggggtattacttgatccatatagtggtaaaattaaggatcc

SEQ ID NO: 310856 - DNA, 55 bp, Artificial
  Synthetic oligonucleotide
acattcagttggtgaccaggttataccaaaatagggttctaggtcgatttctgct

SEQ ID NO: 310857 - DNA, 57 bp, Artificial
  Synthetic oligonucleotide
acattcatgcattattttcgcatcctaaagaatacgaatccaaacgaacctccaaag

SEQ ID NO: 310858 - DNA, 52 bp, Artificial
  Synthetic oligonucleotide
acattccagagaggataagaaatgacgttaattacatacttaatatggacag

SEQ ID NO: 310859 - DNA, 51 bp, Artificial
  Synthetic oligonucleotide
acattccagatccattaagtccgggtgaaaggggtttacaacacaagattc

SEQ ID NO: 310860 - DNA, 55 bp, Artificial
  Synthetic oligonucleotide
acattccagtgggacaggtcacagattacggcttcctaaacctaggtggcacgcc

SEQ ID NO: 310861 - DNA, 53 bp, Artificial
  Synthetic oligonucleotide
acattccagttaacccctgtaaatagttactaatatttaacagctccaattta

SEQ ID NO: 310862 - DNA, 60 bp, Artificial
  Synthetic oligonucleotide
acattccatggagctaaagaggttgcactcagttactcaaccggtgcacttgccagctgc

SEQ ID NO: 310863 - DNA, 60 bp, Artificial
  Synthetic oligonucleotide
acattcgaagcaactggaaatctagtggtgccaagatatgccttcgcaatgaaaagaggt

SEQ ID NO: 310864 - DNA, 56 bp, Artificial
  Synthetic oligonucleotide
acattcgaaggaaagccagtgaataaggttgacgcgcaaaaatggaagaacgtctg

SEQ ID NO: 310865 - DNA, 51 bp, Artificial
  Synthetic oligonucleotide
acattcgagatcactgtgagcggagcggttccggggcagatggtcgtgctc

SEQ ID NO: 310866 - DNA, 55 bp, Artificial
  Synthetic oligonucleotide
acattcggcaacctatataaaacctttcacctaaacccagggattgtgactggca

SEQ ID NO: 310867 - DNA, 60 bp, Artificial
  Synthetic oligonucleotide
acattcgggaggcttgcagattccttcacgctcattcagaacaggctccggctcgtcact

SEQ ID NO: 310868 - DNA, 58 bp, Artificial
  Synthetic oligonucleotide
acattcgtggtggggtcccagctcccttgcgagccagagcccgacgtgtctgtgttaa

SEQ ID NO: 310869 - DNA, 59 bp, Artificial
  Synthetic oligonucleotide
acattcgtgtaattgctcccttacggatgagtgctactggtccaactacctgtaatgtc

SEQ ID NO: 310870 - DNA, 53 bp, Artificial
  Synthetic oligonucleotide
acattctaaattcttctggagtgatgtgttataattggtgatagtatcatatg

SEQ ID NO: 310871 - DNA, 60 bp, Artificial
  Synthetic oligonucleotide
acattctaccgactcttacaccatgtctcgtgaactcgtctcgtcgtcatcgtatccact

SEQ ID NO: 310872 - DNA, 55 bp, Artificial
  Synthetic oligonucleotide
acattctagaggttttcaggacaactataatgctgtgatgactctgagtaaacct

SEQ ID NO: 310873 - DNA, 59 bp, Artificial
  Synthetic oligonucleotide
acattctcagtgcaacggaatctcccttttgaaagagcaaccgttatggcagctttcag

SEQ ID NO: 310874 - DNA, 58 bp, Artificial
  Synthetic oligonucleotide
acattctcccaagaaaggacaagcaggtggggttgtgaagaatttggctgcctggcaa

SEQ ID NO: 310875 - DNA, 60 bp, Artificial
  Synthetic oligonucleotide
acattctcgttccccttggacacgtcaatagagcacacagtactcacacgctagcgttga

SEQ ID NO: 310876 - DNA, 55 bp, Artificial
  Synthetic oligonucleotide
acattcttaaattttccaaccattaagcaattttcaaacggtgcatacatcgtaa

SEQ ID NO: 310877 - DNA, 51 bp, Artificial
  Synthetic oligonucleotide
acattcttctccccaagtacatccttcaggatctgaatatttaaagtaaca

SEQ ID NO: 310878 - DNA, 59 bp, Artificial
  Synthetic oligonucleotide
acattcttggaccgtagtcctgactaactcgttcaactgtcccattgatatcgtgatat

SEQ ID NO: 310879 - DNA, 55 bp, Artificial
  Synthetic oligonucleotide
acattcttggactgttgtcctaaccagctcgtttaattgggccatgctcatcgta

SEQ ID NO: 310880 - DNA, 60 bp, Artificial
  Synthetic oligonucleotide
acattcttgtgtccgaacagtatgagcaacctctacccaccataatcgatcaaggcttgt

SEQ ID NO: 310881 - DNA, 55 bp, Artificial
  Synthetic oligonucleotide
acattgaagtgttttgcccaagaccaattgtcacatataatacacaggtggcagt

SEQ ID NO: 310882 - DNA, 60 bp, Artificial
  Synthetic oligonucleotide
acattgaatgaagacaagccaatttcagatgtatacattaaagaactcgtcgctgagtta

SEQ ID NO: 310883 - DNA, 55 bp, Artificial
  Synthetic oligonucleotide
acattgacaagttggaacaagtccggcctgattttctcgcccaccccatcaattt

SEQ ID NO: 310884 - DNA, 55 bp, Artificial
  Synthetic oligonucleotide
acattgaccagacgcttgatggttcatgggcagtggctccatcaaggctggggca

SEQ ID NO: 310885 - DNA, 56 bp, Artificial
  Synthetic oligonucleotide
acattgacgagtgggcaatagctggacctcggtggctgagctttcatgagttgtta

SEQ ID NO: 310886 - DNA, 59 bp, Artificial
  Synthetic oligonucleotide
acattgactacctatgcaattcccaccacctgtatagagataaacactacttcgtacgc

SEQ ID NO: 310887 - DNA, 60 bp, Artificial
  Synthetic oligonucleotide
acattgagaaggttgcaaagcagattaaattaaaggatgaacggttcatgagtctatcaa

SEQ ID NO: 310888 - DNA, 56 bp, Artificial
  Synthetic oligonucleotide
acattgagccgcggattaacgactgggtcgccatcaccaaggtaaagaagggcgga

SEQ ID NO: 310889 - DNA, 52 bp, Artificial
  Synthetic oligonucleotide
acattgagctttagtaatgagaaaacagtgagaatagataccacaaagctac

SEQ ID NO: 310890 - DNA, 60 bp, Artificial
  Synthetic oligonucleotide
acattgaggaaccaagtggtcagacagcagactggtatactattggggtatacataattg

SEQ ID NO: 310891 - DNA, 55 bp, Artificial
  Synthetic oligonucleotide
acattgatcacaaatcgtatccactgtttcagataactgaacgggagttttgcac

SEQ ID NO: 310892 - DNA, 51 bp, Artificial
  Synthetic oligonucleotide
acattgatcgtatcgcaccgggccaagcgaatcgcaacgtacttttcgata

SEQ ID NO: 310893 - DNA, 59 bp, Artificial
  Synthetic oligonucleotide
acattgatggaaccaagtaccacctgaaaagtggccacgtgacatgcgaggtaggacta

SEQ ID NO: 310894 - DNA, 56 bp, Artificial
  Synthetic oligonucleotide
acattgattgtagcgaggacggtggaaattctgggacagagggggtgggagatcct

SEQ ID NO: 310895 - DNA, 59 bp, Artificial
  Synthetic oligonucleotide
acattgcaatattctggctaccgtgcatatcgtttcccatgcacgcaagaaatggcctg

SEQ ID NO: 310896 - DNA, 51 bp, Artificial
  Synthetic oligonucleotide
acattgcacatgcagtgccgcttgctgtcgcggcctgttttatcccattgg

SEQ ID NO: 310897 - DNA, 52 bp, Artificial
  Synthetic oligonucleotide
acattgcactttgcatggacactggacctgatcggtaaccactcatatggac

SEQ ID NO: 310898 - DNA, 55 bp, Artificial
  Synthetic oligonucleotide
acattgcagggaccactagtacagtgcaggaacaagtaatgtggatgaccacccc

SEQ ID NO: 310899 - DNA, 60 bp, Artificial
  Synthetic oligonucleotide
acattgccaggcgtgccatcagagtatgtggagagaatggtgtgctggtggaagtttatt

SEQ ID NO: 310900 - DNA, 60 bp, Artificial
  Synthetic oligonucleotide
acattgccatagataagctggttgagcgtaaaaagaaggtcaatgaccctctgctcaaaa

SEQ ID NO: 310901 - DNA, 60 bp, Artificial
  Synthetic oligonucleotide
acattgccggttcgccttggtgtcccgattgcgttgacaagatgcaagaggatgcgaaac

SEQ ID NO: 310902 - DNA, 55 bp, Artificial
  Synthetic oligonucleotide
acattgcctaccagcgcatagtgggtcaggtctcgtacagccgggaggcagacat

SEQ ID NO: 310903 - DNA, 50 bp, Artificial
  Synthetic oligonucleotide
acattgcctgcccggcggcagtcttactcccttagctcgccctcttgcat

SEQ ID NO: 310904 - DNA, 60 bp, Artificial
  Synthetic oligonucleotide
acattgcgcctgactagcctagatatttgtgacttggcgaccaagttgtgggcctataaa

SEQ ID NO: 310905 - DNA, 60 bp, Artificial
  Synthetic oligonucleotide
acattgcgctcagtacagaaacgtgtgggatgtggattattcggcctttgatgctaacca

SEQ ID NO: 310906 - DNA, 54 bp, Artificial
  Synthetic oligonucleotide
acattgcgttgcttgaggcgtacactgggcccacaagtggacttccccgcctga

SEQ ID NO: 310907 - DNA, 59 bp, Artificial
  Synthetic oligonucleotide
acattgctgctccccttgcttgggcgtccgggacaaaatgcgccataccgagcgattgt

SEQ ID NO: 310908 - DNA, 50 bp, Artificial
  Synthetic oligonucleotide
acattgctgggaattggtcttgtaaatctgatttaccacaaaattgggga

SEQ ID NO: 310909 - DNA, 58 bp, Artificial
  Synthetic oligonucleotide
acattgctgtgtgacataggggagtcgtcaccaaaccccacggttgaagcaggacgaa

SEQ ID NO: 310910 - DNA, 56 bp, Artificial
  Synthetic oligonucleotide
acattggacggcaggacccagcgtgcgtttgtggaatttgtacgaaagcgaattcc

SEQ ID NO: 310911 - DNA, 60 bp, Artificial
  Synthetic oligonucleotide
acattggaggacaaattggcagaattcaaaagacaacttgccgatctggtgtcaagtcaa

SEQ ID NO: 310912 - DNA, 60 bp, Artificial
  Synthetic oligonucleotide
acattggaggacaaattggcagagttcaagaggcagcttgcagatgtcatctcacgtcag

SEQ ID NO: 310913 - DNA, 60 bp, Artificial
  Synthetic oligonucleotide
acattggatcattgaccactgagctatcaactctgacgttacgagtaacatccatacaag

SEQ ID NO: 310914 - DNA, 60 bp, Artificial
  Synthetic oligonucleotide
acattggatctagaccctgggtaaggggccaatctggcagaataagcatctattggacag

SEQ ID NO: 310915 - DNA, 51 bp, Artificial
  Synthetic oligonucleotide
acattggatgctctctctctcattgttgttgtttgtcttcacatattggga

SEQ ID NO: 310916 - DNA, 52 bp, Artificial
  Synthetic oligonucleotide
acattggcaatggccaggtgatgggcgtcaacaaccccggcgccgcagtctg

SEQ ID NO: 310917 - DNA, 55 bp, Artificial
  Synthetic oligonucleotide
acattgggatgtgcataaacatatagccactggtcccaggaatgctctcgtggcc

SEQ ID NO: 310918 - DNA, 52 bp, Artificial
  Synthetic oligonucleotide
acattgggcttcatttaaaagtaggagacacaccggaaatggggacccccaa

SEQ ID NO: 310919 - DNA, 58 bp, Artificial
  Synthetic oligonucleotide
acattggggttgcataccgatgtgtcaactcagcaaggtttctcgaaactaagactgg

SEQ ID NO: 310920 - DNA, 60 bp, Artificial
  Synthetic oligonucleotide
acattggtatttgccttcgaattggataagcacatggagatgtggttccccattctcgtg

SEQ ID NO: 310921 - DNA, 54 bp, Artificial
  Synthetic oligonucleotide
acattgtaaatagagagcacccctaacatatccaggtacttaaggacctgggtt

SEQ ID NO: 310922 - DNA, 60 bp, Artificial
  Synthetic oligonucleotide
acattgtacgatatatggagcgtggcccaattatattttctctgcggagttagattatcg

SEQ ID NO: 310923 - DNA, 55 bp, Artificial
  Synthetic oligonucleotide
acattgtcaagcctccctaaccttcactcggtgcccggttgtctcgtgtacgcgg

SEQ ID NO: 310924 - DNA, 53 bp, Artificial
  Synthetic oligonucleotide
acattgtccactgccgtatggccgcccccacccagcgtaaggccgtcctatcc

SEQ ID NO: 310925 - DNA, 60 bp, Artificial
  Synthetic oligonucleotide
acattgtcctcattgcgctgtctatactagctgtgctgaagggtctgtacaactttgcga

SEQ ID NO: 310926 - DNA, 60 bp, Artificial
  Synthetic oligonucleotide
acattgtcgttcctctgctttgtgaacagaatacctcatcataggcctgtctgagactaa

SEQ ID NO: 310927 - DNA, 60 bp, Artificial
  Synthetic oligonucleotide
acattgtgaagtggctcctacatgtggaattgggctggcagccacctacgtggaaggaaa

SEQ ID NO: 310928 - DNA, 55 bp, Artificial
  Synthetic oligonucleotide
acattgtgaattctgtcaacatccagtcaaggaaactcttggcccggtttgggga

SEQ ID NO: 310929 - DNA, 60 bp, Artificial
  Synthetic oligonucleotide
acattgtggactgtgtgactggattataccagtcagacattggagtcggtgtagggctgg

SEQ ID NO: 310930 - DNA, 56 bp, Artificial
  Synthetic oligonucleotide
acattgttattaaacagggtgtgacttcaacaacgctagccggcaattcctctctt

SEQ ID NO: 310931 - DNA, 51 bp, Artificial
  Synthetic oligonucleotide
acattgttcattgtttcccctccctgaactgtcatgcatgcaatggttaga

SEQ ID NO: 310932 - DNA, 54 bp, Artificial
  Synthetic oligonucleotide
acattgttgagatgacgctcagtatgactgatggtcactcgactgcatacctga

SEQ ID NO: 310933 - DNA, 55 bp, Artificial
  Synthetic oligonucleotide
acattgttgtctatgggaaaaacctgccaagcagtgaaccaaattagtacatgcg

SEQ ID NO: 310934 - DNA, 50 bp, Artificial
  Synthetic oligonucleotide
acattgtttaattgcgggggtggttatggggtcgctgtggagagcaagaa

SEQ ID NO: 310935 - DNA, 50 bp, Artificial
  Synthetic oligonucleotide
acatttaaacccgaacaaaacaaaaagatggggttactccttacatttca

SEQ ID NO: 310936 - DNA, 52 bp, Artificial
  Synthetic oligonucleotide
acatttaaaccctcacaaaacgaaaagatggggatattcccttaacttcatg

SEQ ID NO: 310937 - DNA, 60 bp, Artificial
  Synthetic oligonucleotide
acatttacacctgcaaatgtacgtgcaatgcgggcagacccgccgactggcctggctcaa

SEQ ID NO: 310938 - DNA, 60 bp, Artificial
  Synthetic oligonucleotide
acatttacagagaccaccattatagctacggctgatgccaggggccttatccagtcctcc

SEQ ID NO: 310939 - DNA, 60 bp, Artificial
  Synthetic oligonucleotide
acatttacagatacagcacaaagggacttgtttgagaaggctgtcaaattgcctaagtca

SEQ ID NO: 310940 - DNA, 52 bp, Artificial
  Synthetic oligonucleotide
acatttacaggatcctcacacaggttgcactactgcggaggcctgtactcct

SEQ ID NO: 310941 - DNA, 55 bp, Artificial
  Synthetic oligonucleotide
acatttaccccatactgccgctctgatattctccaggttcctgtctagaacgtcc

SEQ ID NO: 310942 - DNA, 59 bp, Artificial
  Synthetic oligonucleotide
acatttaccttaagcacacgataacatgccagaacaggttatttttgcactatcaggta

SEQ ID NO: 310943 - DNA, 51 bp, Artificial
  Synthetic oligonucleotide
acatttactggcctttcaggctgaggtactaaacctggaaaatggcagcca

SEQ ID NO: 310944 - DNA, 60 bp, Artificial
  Synthetic oligonucleotide
acatttagtatgggcaagcagggagctggaaagattcgcgtgtaacccaggtctcatgga

SEQ ID NO: 310945 - DNA, 54 bp, Artificial
  Synthetic oligonucleotide
acatttatactgttgaaatccaacttgggctcaaggtacttttcaaaacactta

SEQ ID NO: 310946 - DNA, 55 bp, Artificial
  Synthetic oligonucleotide
acatttatcacggcgagttcagccatagctttgcactctatcacgccaaatcgga

SEQ ID NO: 310947 - DNA, 54 bp, Artificial
  Synthetic oligonucleotide
acatttatgggtgggaattattactcagagggtgggtcagttaatccgttgtgg

SEQ ID NO: 310948 - DNA, 60 bp, Artificial
  Synthetic oligonucleotide
acatttatggtcagccatcatgaggcaaacagtttcataattcgctgcaattgatgttct

SEQ ID NO: 310949 - DNA, 52 bp, Artificial
  Synthetic oligonucleotide
acatttatttggtgaagcatttacacgtcgcggaaaggtgaaaggttcaaca

SEQ ID NO: 310950 - DNA, 51 bp, Artificial
  Synthetic oligonucleotide
acatttcaccgatccatccagcatagcggccagaggatacatctcaacccg

SEQ ID NO: 310951 - DNA, 50 bp, Artificial
  Synthetic oligonucleotide
acatttcactcatgtgctcccacaggtccacgctccgggggacgggagta

SEQ ID NO: 310952 - DNA, 51 bp, Artificial
  Synthetic oligonucleotide
acatttccaggttcggaagacgttttccagaagagaggcgtggcgtcgcgt

SEQ ID NO: 310953 - DNA, 55 bp, Artificial
  Synthetic oligonucleotide
acatttcccacaacttctaccgttgccatgccagtcttagcgcttctagctccgg

SEQ ID NO: 310954 - DNA, 60 bp, Artificial
  Synthetic oligonucleotide
acatttcgccagagaatgccctaataacaaaagagatgtcaagagagtggccatttttga

SEQ ID NO: 310955 - DNA, 54 bp, Artificial
  Synthetic oligonucleotide
acatttcgcgggaggtgacgccaaccgttgtggactacgttccgcgacgggagc

SEQ ID NO: 310956 - DNA, 55 bp, Artificial
  Synthetic oligonucleotide
acatttcggcgttggaattcggtgatatgaagattgatccagttggactattgcg

SEQ ID NO: 310957 - DNA, 57 bp, Artificial
  Synthetic oligonucleotide
acatttctaccaacggattttgaaactaatggatcaataattacttcatatgatggg

SEQ ID NO: 310958 - DNA, 59 bp, Artificial
  Synthetic oligonucleotide
acatttctgatgttacaggatgtacaatgatagacccaacaaatgggccattacccgag

SEQ ID NO: 310959 - DNA, 55 bp, Artificial
  Synthetic oligonucleotide
acatttgaatggcaccggcctttcgtgtctcacaaggagattcgatggcccgtct

SEQ ID NO: 310960 - DNA, 51 bp, Artificial
  Synthetic oligonucleotide
acatttgactaagtactatataacctgtattgtacaggacattacattggt

SEQ ID NO: 310961 - DNA, 60 bp, Artificial
  Synthetic oligonucleotide
acatttgagagcgtaacattcgtcacatcaagcaacagcccaattgatagagcctcagca

SEQ ID NO: 310962 - DNA, 57 bp, Artificial
  Synthetic oligonucleotide
acatttgatgaattgtgccccgataaagtaccgggtgacatattgggactgcggagg

SEQ ID NO: 310963 - DNA, 59 bp, Artificial
  Synthetic oligonucleotide
acatttgcactgaggacttcacaagaaatttacgctagataaaacgaatgcaatgaacc

SEQ ID NO: 310964 - DNA, 52 bp, Artificial
  Synthetic oligonucleotide
acatttgctgtacaggggggaacagggcatgaacccataagtagtacaccta

SEQ ID NO: 310965 - DNA, 56 bp, Artificial
  Synthetic oligonucleotide
acatttggacctaaccaaacttgtatgtggaacacatctttaatcaaagaccctga

SEQ ID NO: 310966 - DNA, 58 bp, Artificial
  Synthetic oligonucleotide
acatttggggggttcaccacccgagtacggacagtgaccaaatcagcctatatgctca

SEQ ID NO: 310967 - DNA, 55 bp, Artificial
  Synthetic oligonucleotide
acatttggtcacatttaaaggtcagccctataattgggaacagcaataccttgtc

SEQ ID NO: 310968 - DNA, 50 bp, Artificial
  Synthetic oligonucleotide
acatttggtcccgttcacttccgaaaccaagttaaaatacgccgccgagt

SEQ ID NO: 310969 - DNA, 56 bp, Artificial
  Synthetic oligonucleotide
acatttggtgattcgaggtagagatgacgacggaattgtaaacgcgctggaaccgg

SEQ ID NO: 310970 - DNA, 60 bp, Artificial
  Synthetic oligonucleotide
acatttgtcactccataatggtgttatcatgtctgcatggattcttcagaatgttgattc

SEQ ID NO: 310971 - DNA, 60 bp, Artificial
  Synthetic oligonucleotide
acatttgtctattgagggtatcaaagaagcagatataacacctgcacatggcccaataaa

SEQ ID NO: 310972 - DNA, 57 bp, Artificial
  Synthetic oligonucleotide
acatttgtgggagcagcaattgttggacttgttggacgaacagacgcagttaccggt

SEQ ID NO: 310973 - DNA, 56 bp, Artificial
  Synthetic oligonucleotide
acatttgtgtgcaatcatccgaacatgaattaccaagatttaatacctactatgac

SEQ ID NO: 310974 - DNA, 58 bp, Artificial
  Synthetic oligonucleotide
acattttaggatcctgggtgaaaccacaatgtgtaggatatgagaccgtgttggtgac

SEQ ID NO: 310975 - DNA, 60 bp, Artificial
  Synthetic oligonucleotide
acattttatgggctatgtcattggatgttatggttcattgccacaagatcacatcataca

SEQ ID NO: 310976 - DNA, 53 bp, Artificial
  Synthetic oligonucleotide
acattttattggagagtgtgaacgaaaactggagtaaaagtagcaagagggtt

SEQ ID NO: 310977 - DNA, 60 bp, Artificial
  Synthetic oligonucleotide
acattttcagacacccattgtgtcattatttctggtacattattgaacgacgcctgctga

SEQ ID NO: 310978 - DNA, 52 bp, Artificial
  Synthetic oligonucleotide
acattttcgctggggtagtgtaaagtgtatgttatggatgagtgatcaaaga

SEQ ID NO: 310979 - DNA, 57 bp, Artificial
  Synthetic oligonucleotide
acattttcttcgaagtttcatagtttacccaagatacagcaattttgtgtcaacaga

SEQ ID NO: 310980 - DNA, 59 bp, Artificial
  Synthetic oligonucleotide
acattttgacggctataaacaacaagctgtcacaataattgacgaccttggacaagaca

SEQ ID NO: 310981 - DNA, 55 bp, Artificial
  Synthetic oligonucleotide
acattttgcatacctgacatatacagcacaaccctggaccttattgtatgggccg

SEQ ID NO: 310982 - DNA, 53 bp, Artificial
  Synthetic oligonucleotide
acattttgggtatatcgagacttgggagaaccttaaggttggattaacacgcc

SEQ ID NO: 310983 - DNA, 55 bp, Artificial
  Synthetic oligonucleotide
acatttttagtgatgattgtacgctaggagcattgctgaaaaatcacttttcaac

SEQ ID NO: 310984 - DNA, 60 bp, Artificial
  Synthetic oligonucleotide
acatttttgacgtagctagagttccagatgaccaaatgtatagattaagagatagattgc

SEQ ID NO: 310985 - DNA, 56 bp, Artificial
  Synthetic oligonucleotide
accaaaaatgatacaggactggttaacagattgctctatcgaaaaattcccactaa

SEQ ID NO: 310986 - DNA, 53 bp, Artificial
  Synthetic oligonucleotide
accaaaacaagcaaaactgtagtcaaaaaagtggaggtcctcaacaataagaa

SEQ ID NO: 310987 - DNA, 54 bp, Artificial
  Synthetic oligonucleotide
accaaaacctcccaatccttccccaacccaccttaggcagagtcatgattgtaa

SEQ ID NO: 310988 - DNA, 50 bp, Artificial
  Synthetic oligonucleotide
accaaaagaaatgattacgtctggcagtcaggcaccaatgcatccatctt

SEQ ID NO: 310989 - DNA, 53 bp, Artificial
  Synthetic oligonucleotide
accaaaagaatagattattgtggaccaagtagtaaaccggatttctactcgaa

SEQ ID NO: 310990 - DNA, 53 bp, Artificial
  Synthetic oligonucleotide
accaaaagatccaacacgcacgtccctgggtggattgtccgaaccgggcctta

SEQ ID NO: 310991 - DNA, 57 bp, Artificial
  Synthetic oligonucleotide
accaaaagcattcaattgggaattccagtcacgtggaactgacgtggtcaggtcact

SEQ ID NO: 310992 - DNA, 55 bp, Artificial
  Synthetic oligonucleotide
accaaaagcttgatcgggtagaagccttgatatctaaggtagaacgttgggttca

SEQ ID NO: 310993 - DNA, 56 bp, Artificial
  Synthetic oligonucleotide
accaaaaggagacttccgccaacaaagtgcaaaacgcagtgtggaacgctgggatg

SEQ ID NO: 310994 - DNA, 56 bp, Artificial
  Synthetic oligonucleotide
accaaaatataagaaccgaagtgtaatgttcgtgccatttccagacgtattgcaaa

SEQ ID NO: 310995 - DNA, 60 bp, Artificial
  Synthetic oligonucleotide
accaaaatcgtccgatgctagtgccgattgatggtgtctacgtctccactagtgttgagt

SEQ ID NO: 310996 - DNA, 56 bp, Artificial
  Synthetic oligonucleotide
accaaacaccacggttacattcaaggctcgcgcttccatcttcgttcgtccacaaa

SEQ ID NO: 310997 - DNA, 58 bp, Artificial
  Synthetic oligonucleotide
accaaacagagaatccgtgagttacgatagaaggcgaaggagcaatcgaagtcatacg

SEQ ID NO: 310998 - DNA, 60 bp, Artificial
  Synthetic oligonucleotide
accaaacagtgattcacccaacaataacgactcctgcagtaccaaactgcagtgacacta

SEQ ID NO: 310999 - DNA, 55 bp, Artificial
  Synthetic oligonucleotide
accaaacagtgttactaacaagtatctaagcagcttgtagaccaccctctccgca

SEQ ID NO: 311000 - DNA, 60 bp, Artificial
  Synthetic oligonucleotide
accaaacattggcagtagaccatgggtgagaggcctaagcagcaggatcagcttctactg

SEQ ID NO: 311001 - DNA, 51 bp, Artificial
  Synthetic oligonucleotide
accaaacccgagttcacgcgtcaggatggctgcttcagatggtttagcccc

SEQ ID NO: 311002 - DNA, 55 bp, Artificial
  Synthetic oligonucleotide
accaaaccgacgttcccgcaatccgatgtgaagttaatcgagtctactcctctac

SEQ ID NO: 311003 - DNA, 60 bp, Artificial
  Synthetic oligonucleotide
accaaaccgccagaacccaacaagacagtgcgtcatgtgatggccatgactaatagctgg

SEQ ID NO: 311004 - DNA, 60 bp, Artificial
  Synthetic oligonucleotide
accaaacgtgacatggtgtaacgtgatccactcattatcgaatagatctccttgtacgta

SEQ ID NO: 311005 - DNA, 58 bp, Artificial
  Synthetic oligonucleotide
accaaactccctgctattactcaggacttgctgtgggtatcaacccatacaaagattg

SEQ ID NO: 311006 - DNA, 59 bp, Artificial
  Synthetic oligonucleotide
accaaactctgagaatgggacatgctacccaggggatttcgccgactatgaggaactga

SEQ ID NO: 311007 - DNA, 51 bp, Artificial
  Synthetic oligonucleotide
accaaagaatcatagatcattatgacagacccaacttcatctacacccact

SEQ ID NO: 311008 - DNA, 56 bp, Artificial
  Synthetic oligonucleotide
accaaagaatcattctcttgttcatgttggaatggggcaaggaaatggtggatcat

SEQ ID NO: 311009 - DNA, 55 bp, Artificial
  Synthetic oligonucleotide
accaaagaccactggacagaagccaacaaggtaggagtgggagcattcgggccgg

SEQ ID NO: 311010 - DNA, 60 bp, Artificial
  Synthetic oligonucleotide
accaaagagatgcagaggttgctggatacatacggcatcaacctccctttagtcacttat

SEQ ID NO: 311011 - DNA, 51 bp, Artificial
  Synthetic oligonucleotide
accaaagcgaccgtggatggggaaaccactgcgggttttttgggaagggca

SEQ ID NO: 311012 - DNA, 51 bp, Artificial
  Synthetic oligonucleotide
accaaagctaatttgaccaatgacgagaacataaccaatgtctccatagga

SEQ ID NO: 311013 - DNA, 60 bp, Artificial
  Synthetic oligonucleotide
accaaagctgcgtgcccgactatgggagaagctcacaatgacaaacgtgctgacccagct

SEQ ID NO: 311014 - DNA, 60 bp, Artificial
  Synthetic oligonucleotide
accaaagcttctgcaatcaagtcaagatgtgagtctcagaccgcaggctttaagtccacg

SEQ ID NO: 311015 - DNA, 54 bp, Artificial
  Synthetic oligonucleotide
accaaaggaattaccgtcctgaatctaccaactgggtttgacaagccatacgtc

SEQ ID NO: 311016 - DNA, 55 bp, Artificial
  Synthetic oligonucleotide
accaaaggagtcacagtcctgaatctaccaacagggttcgacaaaccatacgtcc

SEQ ID NO: 311017 - DNA, 55 bp, Artificial
  Synthetic oligonucleotide
accaaaggataggtaatgagattcttatgtcgggagttaaatggagacttctatt

SEQ ID NO: 311018 - DNA, 52 bp, Artificial
  Synthetic oligonucleotide
accaaaggcccatccaccaaccgggattacttaaaccaacggcaaggtgcac

SEQ ID NO: 311019 - DNA, 58 bp, Artificial
  Synthetic oligonucleotide
accaaaggctgtggacaggcctaggggtgtttcgaatgaccctatgcttgggcgcaga

SEQ ID NO: 311020 - DNA, 56 bp, Artificial
  Synthetic oligonucleotide
accaaagtgtatgggaaccatcccttcagcaaaagtttcaatactccacgaagtca

SEQ ID NO: 311021 - DNA, 57 bp, Artificial
  Synthetic oligonucleotide
accaaataataaacctgcgcaccaacaactgtgctacgctagtattgccctacgtaa

SEQ ID NO: 311022 - DNA, 60 bp, Artificial
  Synthetic oligonucleotide
accaaatacgttaccagatattgtcacagaagcatcggagaaattcataccaaatagagc

SEQ ID NO: 311023 - DNA, 55 bp, Artificial
  Synthetic oligonucleotide
accaaatagatcaagaagggaggcctctccgaatagtgatggaggtaagggacaa

SEQ ID NO: 311024 - DNA, 56 bp, Artificial
  Synthetic oligonucleotide
accaaatagcaattacagcaaatgtcgttccaaataaccgaaaatgtattcttgcc

SEQ ID NO: 311025 - DNA, 56 bp, Artificial
  Synthetic oligonucleotide
accaaataggggccatacatggagttgggtccggcgtaagaaatagccatccagcg

SEQ ID NO: 311026 - DNA, 56 bp, Artificial
  Synthetic oligonucleotide
accaaatagtaatcctgttttggttgacacgccatactggtcaaaagggtatgtga

SEQ ID NO: 311027 - DNA, 58 bp, Artificial
  Synthetic oligonucleotide
accaaatataaaggatggtgtctggactgttgtcaacacactgacttaacttactgtc

SEQ ID NO: 311028 - DNA, 54 bp, Artificial
  Synthetic oligonucleotide
accaaatatttgccattggataaaggtattaaaccttattatcccgaacatcta

SEQ ID NO: 311029 - DNA, 57 bp, Artificial
  Synthetic oligonucleotide
accaaatcaatagaattggatgcacccaattttcattacgaggaatgttcctgttac

SEQ ID NO: 311030 - DNA, 53 bp, Artificial
  Synthetic oligonucleotide
accaaatcaatgggaaactgaatagggtaatcgagaaaactaacgagaaattc

SEQ ID NO: 311031 - DNA, 59 bp, Artificial
  Synthetic oligonucleotide
accaaatcacaaggaagaatgcttgcttctttaatgcagttagtgagactatcggagtt

SEQ ID NO: 311032 - DNA, 55 bp, Artificial
  Synthetic oligonucleotide
accaaatcttgttcacgatgtagtgttttcacacctcgctagcaatacagatgtg

SEQ ID NO: 311033 - DNA, 55 bp, Artificial
  Synthetic oligonucleotide
accaaatgcccctatcctatccacacttccggaaactactgttgttagaccacga

SEQ ID NO: 311034 - DNA, 53 bp, Artificial
  Synthetic oligonucleotide
accaaatgtacacttagttcatatggaaatgtcttgcaacgttccagcgaacc

SEQ ID NO: 311035 - DNA, 57 bp, Artificial
  Synthetic oligonucleotide
accaaatgtactaggttatgcccctcccatgcgattcattacaaaacgggtgcctga

SEQ ID NO: 311036 - DNA, 55 bp, Artificial
  Synthetic oligonucleotide
accaaatttcgttaagtacgaacatgctcatagaatggttagtaaataagggcaa

SEQ ID NO: 311037 - DNA, 54 bp, Artificial
  Synthetic oligonucleotide
accaacaacaccctcagacaatgtggaaaccagaacaaccttaatgcactatag

SEQ ID NO: 311038 - DNA, 55 bp, Artificial
  Synthetic oligonucleotide
accaacaaccaggatgatccgctatgactacccaacaaaaacagggcagtgcggg

SEQ ID NO: 311039 - DNA, 58 bp, Artificial
  Synthetic oligonucleotide
accaacaactcggacttgtgatgaatgttacgcaactttttggagtgctgaacgtatc

SEQ ID NO: 311040 - DNA, 58 bp, Artificial
  Synthetic oligonucleotide
accaacaacttatgaggagtttcagggggcagtggtcagcccgccatatcagaccggc

SEQ ID NO: 311041 - DNA, 55 bp, Artificial
  Synthetic oligonucleotide
accaacaagtgggtcggctggactcccaacggagcgccggagcttagtgaagtgg

SEQ ID NO: 311042 - DNA, 60 bp, Artificial
  Synthetic oligonucleotide
accaacaatgcgttgggtagcataatgttgcagactagctatcgggctaatgattctaca

SEQ ID NO: 311043 - DNA, 51 bp, Artificial
  Synthetic oligonucleotide
accaacacgtatttggtcgtaacgggcaactgtgggacggaaccgactact

SEQ ID NO: 311044 - DNA, 59 bp, Artificial
  Synthetic oligonucleotide
accaacaggaagtgacattgcggggacaactagcaccccgcaagagcaaattcactgga

SEQ ID NO: 311045 - DNA, 54 bp, Artificial
  Synthetic oligonucleotide
accaacataatcgaatttgcatgggcgttaaatatgacgcccggcgtgacatgt

SEQ ID NO: 311046 - DNA, 58 bp, Artificial
  Synthetic oligonucleotide
accaacatacaattgatttgactgattctgaaatgaacaaactattcgaaaagacgag

SEQ ID NO: 311047 - DNA, 53 bp, Artificial
  Synthetic oligonucleotide
accaacatacgaactaggggacgcaatacacgacatattcactgataacgagc

SEQ ID NO: 311048 - DNA, 58 bp, Artificial
  Synthetic oligonucleotide
accaacatcttgaatggtgatcaagaggtggacgtcgacagttctgatggaccggttt

SEQ ID NO: 311049 - DNA, 59 bp, Artificial
  Synthetic oligonucleotide
accaacatgacggcccacatcagtgtaccttttgtgggtgttaacaggtatgatcagta

SEQ ID NO: 311050 - DNA, 60 bp, Artificial
  Synthetic oligonucleotide
accaacatgccacaatcatcggcaggggtggtgtccaagacacgataatacgtactcaac

SEQ ID NO: 311051 - DNA, 55 bp, Artificial
  Synthetic oligonucleotide
accaacatgtatactgttcaggtagggcaacaaacaaaagtggctcaggaggttt

SEQ ID NO: 311052 - DNA, 56 bp, Artificial
  Synthetic oligonucleotide
accaacattagcactcgtgtgggaacgcattgttgaagggggaaagctcgcgggta

SEQ ID NO: 311053 - DNA, 60 bp, Artificial
  Synthetic oligonucleotide
accaacattagtggttgaaacagctgcaaggactcggaagacaatagcctgctacgatct

SEQ ID NO: 311054 - DNA, 53 bp, Artificial
  Synthetic oligonucleotide
accaaccaacacaaccggatgtggcgacgtgtaggttttacacacttgaatcc

SEQ ID NO: 311055 - DNA, 55 bp, Artificial
  Synthetic oligonucleotide
accaaccagccggccgatcaagtcgatgactcccctctcgctcgcgatcccagcg

SEQ ID NO: 311056 - DNA, 56 bp, Artificial
  Synthetic oligonucleotide
accaaccagtcaatttgtgttacgtcgtgccagctttggtagtgcaacaggtttcc

SEQ ID NO: 311057 - DNA, 51 bp, Artificial
  Synthetic oligonucleotide
accaaccagtgacttttgaagcctaaataactagggccttttaaatgtagg

SEQ ID NO: 311058 - DNA, 57 bp, Artificial
  Synthetic oligonucleotide
accaaccatactcgccaccaaaacacaaagcctcgttagtgtcatcctagcaaagta

SEQ ID NO: 311059 - DNA, 55 bp, Artificial
  Synthetic oligonucleotide
accaacccaaccgctagtgagtttatggatggatatgacaaccaggacatccatc

SEQ ID NO: 311060 - DNA, 60 bp, Artificial
  Synthetic oligonucleotide
accaacccactaatcaggcatgaaaacagaatggtgctagctagcactacagctaaggct

SEQ ID NO: 311061 - DNA, 58 bp, Artificial
  Synthetic oligonucleotide
accaacccagcggtcgtgatccagaccgtataccgccgaatcatcgacgaagtgccta

SEQ ID NO: 311062 - DNA, 52 bp, Artificial
  Synthetic oligonucleotide
accaacccgggtcagtctggcccaagacacgacgtccaaatcgtattgtagg

SEQ ID NO: 311063 - DNA, 53 bp, Artificial
  Synthetic oligonucleotide
accaaccctatctctccccattggagaccaggagtacttccctaaatactacc

SEQ ID NO: 311064 - DNA, 59 bp, Artificial
  Synthetic oligonucleotide
accaaccgccatcgttggatcacctgtccactatgaagctgtttatcccacaccaatgt

SEQ ID NO: 311065 - DNA, 58 bp, Artificial
  Synthetic oligonucleotide
accaacctcgaattggacatgaccaaatacaccatggccttgaagcggtatggtcttc

SEQ ID NO: 311066 - DNA, 55 bp, Artificial
  Synthetic oligonucleotide
accaacctggctgtccaattggtgagaatgatggaaggagagggtgtgatcggcc

SEQ ID NO: 311067 - DNA, 58 bp, Artificial
  Synthetic oligonucleotide
accaacctgtgagtatcaagggaatactgtctctggatttaagcggctaatggcaact

SEQ ID NO: 311068 - DNA, 60 bp, Artificial
  Synthetic oligonucleotide
accaacctgtgtcagcgcttcacgcggaccaagtgctttctgcacttgtagaggccgcta

SEQ ID NO: 311069 - DNA, 53 bp, Artificial
  Synthetic oligonucleotide
accaaccttaattgggataatgacgttaatggagtttatgacttaccaccacc

SEQ ID NO: 311070 - DNA, 52 bp, Artificial
  Synthetic oligonucleotide
accaacgaagtgtgtcgatacacatgccatggagggtatttgcggccaactc

SEQ ID NO: 311071 - DNA, 54 bp, Artificial
  Synthetic oligonucleotide
accaacgtcactttcttaaagaggtactttagagcagatgagcaataccccttt

SEQ ID NO: 311072 - DNA, 56 bp, Artificial
  Synthetic oligonucleotide
accaacgtgaaccacttgactggcacgaagttggtcgacattttcgtcgtgatact

SEQ ID NO: 311073 - DNA, 50 bp, Artificial
  Synthetic oligonucleotide
accaacgttgagagttcgtcgttcgattgttcatctatttgcaataccga

SEQ ID NO: 311074 - DNA, 58 bp, Artificial
  Synthetic oligonucleotide
accaactaatgctaactctgatcagaacgctgatggcgatcgattggttgaaaatctt

SEQ ID NO: 311075 - DNA, 55 bp, Artificial
  Synthetic oligonucleotide
accaactattcaggctttgaacctaagtgcactaaagtagtagctgcttcatgca

SEQ ID NO: 311076 - DNA, 59 bp, Artificial
  Synthetic oligonucleotide
accaactcaccagtgatatcagcgataatagactttaagacattaaaaaacctgaatga

SEQ ID NO: 311077 - DNA, 55 bp, Artificial
  Synthetic oligonucleotide
accaactggactcggatcatgctgacggcgttcccgcagcaggggaggttggtca

SEQ ID NO: 311078 - DNA, 55 bp, Artificial
  Synthetic oligonucleotide
accaactggttatgcccaaacagactgtgtcctggaagcgatggcgttccttgag

SEQ ID NO: 311079 - DNA, 60 bp, Artificial
  Synthetic oligonucleotide
accaactgtcttaatgagttctactatctagagacacagagactgtcaattgaacttggg

SEQ ID NO: 311080 - DNA, 56 bp, Artificial
  Synthetic oligonucleotide
accaactttgaggcaggcaaaagtccaggggcccgcttttgaatttgctgtggcca

SEQ ID NO: 311081 - DNA, 55 bp, Artificial
  Synthetic oligonucleotide
accaactttgtggtgcctgatggagcgcctacaagtgcttacatcatagctctag

SEQ ID NO: 311082 - DNA, 59 bp, Artificial
  Synthetic oligonucleotide
accaagaaagattgtaacctcgcatacgtatgatgaactaatctccgctttaaagctga

SEQ ID NO: 311083 - DNA, 60 bp, Artificial
  Synthetic oligonucleotide
accaagaaatgcgtggtacatagagaactcatcgtcaaggacggtcgtgtagattgcgat

SEQ ID NO: 311084 - DNA, 60 bp, Artificial
  Synthetic oligonucleotide
accaagaagaattgtcagcacttgtggaggtggggcaccatgctccggaggggcatgatg

SEQ ID NO: 311085 - DNA, 59 bp, Artificial
  Synthetic oligonucleotide
accaagaagattcagtccctcagaagcagggagcgatgtcttatgaggaaaccaggtaa

SEQ ID NO: 311086 - DNA, 55 bp, Artificial
  Synthetic oligonucleotide
accaagaatcatactaacacagttatgttctggatcgtaagagataggcgcccat

SEQ ID NO: 311087 - DNA, 55 bp, Artificial
  Synthetic oligonucleotide
accaagacctgttgctcagcacagggttgagcataatgaaccagttgctagtggt

SEQ ID NO: 311088 - DNA, 55 bp, Artificial
  Synthetic oligonucleotide
accaagacctgttgtcttgatgatatcaggcagaccaggaatagggaagacccac

SEQ ID NO: 311089 - DNA, 60 bp, Artificial
  Synthetic oligonucleotide
accaagacgcctgcatgtctctggacaagaccacaagctctggctacccccattataaga

SEQ ID NO: 311090 - DNA, 52 bp, Artificial
  Synthetic oligonucleotide
accaagactcggaataagatggaggaaggggtgtctactttccccttgggat

SEQ ID NO: 311091 - DNA, 53 bp, Artificial
  Synthetic oligonucleotide
accaagagaaaaacattttgatgatcagtcaccctattctccgtgatgtttgg

SEQ ID NO: 311092 - DNA, 59 bp, Artificial
  Synthetic oligonucleotide
accaagagaaaactgttgcacctaaacagtctcgtagcaagtccagcgtccatgaattg

SEQ ID NO: 311093 - DNA, 52 bp, Artificial
  Synthetic oligonucleotide
accaagagaagccaaaaaaccataatcccgaatatcgggtctagaccctggg

SEQ ID NO: 311094 - DNA, 57 bp, Artificial
  Synthetic oligonucleotide
accaagagcccgcaccggacgacttctaccaagcagtcgtcgaggtgtttgccgaga

SEQ ID NO: 311095 - DNA, 60 bp, Artificial
  Synthetic oligonucleotide
accaagaggattaggtgatgctgtggagaaagcattcaaggagaaacatccaagcaacac

SEQ ID NO: 311096 - DNA, 54 bp, Artificial
  Synthetic oligonucleotide
accaagaggtagagataaccttttagtgtacctggtaagaaaattgaatgatcc

SEQ ID NO: 311097 - DNA, 53 bp, Artificial
  Synthetic oligonucleotide
accaagatcacaaactgatttatgcgaccagtacataaataacggacttcctc

SEQ ID NO: 311098 - DNA, 51 bp, Artificial
  Synthetic oligonucleotide
accaagatcagatgttttgacccttcatttccacttgccaactgtggaaaa

SEQ ID NO: 311099 - DNA, 53 bp, Artificial
  Synthetic oligonucleotide
accaagattcaatcgactttttacgtgcttatggagattatcaatcacaatta

SEQ ID NO: 311100 - DNA, 54 bp, Artificial
  Synthetic oligonucleotide
accaagcaacagctctgttgcacttgtaaccacagcagtgttgtcactattagg

SEQ ID NO: 311101 - DNA, 60 bp, Artificial
  Synthetic oligonucleotide
accaagcaagacaaatttgcctacaatgggtaatatcagcactgagagcagttaggcata

SEQ ID NO: 311102 - DNA, 58 bp, Artificial
  Synthetic oligonucleotide
accaagcactccgagcgccagcgaggagtgcgaccctaggtgggtactcaacttcttc

SEQ ID NO: 311103 - DNA, 60 bp, Artificial
  Synthetic oligonucleotide
accaagcaggtggagtaacaatcacactgttctcagctaatatcgatgccatcacaagcc

SEQ ID NO: 311104 - DNA, 56 bp, Artificial
  Synthetic oligonucleotide
accaagcagttcggtcaaaattagccaaactccagaaatacaatcctaacttgcaa

SEQ ID NO: 311105 - DNA, 59 bp, Artificial
  Synthetic oligonucleotide
accaagcatcattactgtagacctttgggctcaggtccaggtgtccacataaataattg

SEQ ID NO: 311106 - DNA, 54 bp, Artificial
  Synthetic oligonucleotide
accaagccaaagctttaacttacgcaaacgttctgtccttcgtagagtcaatta

SEQ ID NO: 311107 - DNA, 54 bp, Artificial
  Synthetic oligonucleotide
accaagccagagctaaaaaaaaacttacttcttctgctgcacagcaaagcagtc

SEQ ID NO: 311108 - DNA, 60 bp, Artificial
  Synthetic oligonucleotide
accaagccatgcgtgccccagtcaccaagctaaacgccagacatccagtgcgatacgcta

SEQ ID NO: 311109 - DNA, 55 bp, Artificial
  Synthetic oligonucleotide
accaagccgcctataatgatataaaatctcgaggagatagaccagaaaacttcgt

SEQ ID NO: 311110 - DNA, 60 bp, Artificial
  Synthetic oligonucleotide
accaagcctcattgctctgatgtgtcgaagccccatatcaatcccttatgccggaacgca

SEQ ID NO: 311111 - DNA, 55 bp, Artificial
  Synthetic oligonucleotide
accaagcgcgagtttgccgagctggactctcgcctgaccggcgctggcatcatgt

SEQ ID NO: 311112 - DNA, 60 bp, Artificial
  Synthetic oligonucleotide
accaagcgtaactgtaatgttacgcagatgcgtgaattaccaactctggactcagccgtg

SEQ ID NO: 311113 - DNA, 55 bp, Artificial
  Synthetic oligonucleotide
accaagctcaaactcactccattgcctgccgctgccaacctcgacttatcgagtt

SEQ ID NO: 311114 - DNA, 53 bp, Artificial
  Synthetic oligonucleotide
accaagctgatcacggactgcaagtccagcgcgcgaaaacagttctccgtgca

SEQ ID NO: 311115 - DNA, 53 bp, Artificial
  Synthetic oligonucleotide
accaagctttctacaagggactttccgctggggactttccagagaaggcgtgg

SEQ ID NO: 311116 - DNA, 54 bp, Artificial
  Synthetic oligonucleotide
accaaggacgcacgcaatactcaagatcacgtgcgatccctatgtcttttggcg

SEQ ID NO: 311117 - DNA, 55 bp, Artificial
  Synthetic oligonucleotide
accaaggcgagggccgcttgggtaatcaacaacttgaggcgtactctaagggaga

SEQ ID NO: 311118 - DNA, 54 bp, Artificial
  Synthetic oligonucleotide
accaaggggaagtgacatagcaggaaccactagtacccctcaagaacaaatagg

SEQ ID NO: 311119 - DNA, 55 bp, Artificial
  Synthetic oligonucleotide
accaaggggaagtgacatagcaggaactactagtaaccttcaggaacaaataaca

SEQ ID NO: 311120 - DNA, 57 bp, Artificial
  Synthetic oligonucleotide
accaagggtctccttgatttggaaaagttgaagcatagggtgaggatctatcgtaga

SEQ ID NO: 311121 - DNA, 56 bp, Artificial
  Synthetic oligonucleotide
accaaggtaggctgtgtaatcctctgaacccgttcgtcagtcataaggaaattgag

SEQ ID NO: 311122 - DNA, 60 bp, Artificial
  Synthetic oligonucleotide
accaaggtggtagacgagttgaaagatatagacattgaaccagccacttatgctactata

SEQ ID NO: 311123 - DNA, 58 bp, Artificial
  Synthetic oligonucleotide
accaaggttggggaccgctttcatatgccaacataagcggcccatcagaggagaggcc

SEQ ID NO: 311124 - DNA, 56 bp, Artificial
  Synthetic oligonucleotide
accaagtcaagtgacaagaaaggcagtgtaaagagttttcatagctctttcacctt

SEQ ID NO: 311125 - DNA, 54 bp, Artificial
  Synthetic oligonucleotide
accaagtcgaagaatctgttatttttgcattggaattttccttcgaattggatg

SEQ ID NO: 311126 - DNA, 53 bp, Artificial
  Synthetic oligonucleotide
accaagtcggtcgcttcaccgaggtaatcaccagcggagtcgtcgtaaccggg

SEQ ID NO: 311127 - DNA, 55 bp, Artificial
  Synthetic oligonucleotide
accaagtcttacgtaagttcgattcaactgtcaccggaggtcaatatgcgtcgag

SEQ ID NO: 311128 - DNA, 60 bp, Artificial
  Synthetic oligonucleotide
accaagtgaccccatgtgagccaatcatagtagaaaggaacataacagagatagtgtatt

SEQ ID NO: 311129 - DNA, 55 bp, Artificial
  Synthetic oligonucleotide
accaagtgcccagagcttagggagcaaatcacgagactgtccgctcagcccgccc

SEQ ID NO: 311130 - DNA, 60 bp, Artificial
  Synthetic oligonucleotide
accaagtggatatgcacaaacggactgcgtcctggaagcaatggctttccttgaagaatc

SEQ ID NO: 311131 - DNA, 58 bp, Artificial
  Synthetic oligonucleotide
accaagtggcggcattgtgcctaaacccacacgtgcggagtatgtggcgtacaatacc

SEQ ID NO: 311132 - DNA, 55 bp, Artificial
  Synthetic oligonucleotide
accaagtggtggattttgagctcaatgatgaggttaacaatgcatactccggagg

SEQ ID NO: 311133 - DNA, 55 bp, Artificial
  Synthetic oligonucleotide
accaagttccagctccctctattgattattactatgagaataccttcccagtggg

SEQ ID NO: 311134 - DNA, 58 bp, Artificial
  Synthetic oligonucleotide
accaagtttgcagccgacgttcacttgctcacgcatcggacgttgtttgagtcgggga

SEQ ID NO: 311135 - DNA, 60 bp, Artificial
  Synthetic oligonucleotide
accaataaaattggaacagaaagtatgttgatttggatgactgagcaaggcattataaca

SEQ ID NO: 311136 - DNA, 56 bp, Artificial
  Synthetic oligonucleotide
accaataaataatagtaatacctactataggttgataagctgtaacacctcagtcc

SEQ ID NO: 311137 - DNA, 60 bp, Artificial
  Synthetic oligonucleotide
accaataaataggcttgctcaccaagtttggatccacaaacatgtgggatccattattgc

SEQ ID NO: 311138 - DNA, 52 bp, Artificial
  Synthetic oligonucleotide
accaataaattgcctttcccaaaatacccccgcttttgtgtctggaaggcgc

SEQ ID NO: 311139 - DNA, 59 bp, Artificial
  Synthetic oligonucleotide
accaataatcggagggagcccagatcctggtgtgaagggatttgcattcttagatggag

SEQ ID NO: 311140 - DNA, 57 bp, Artificial
  Synthetic oligonucleotide
accaataatgttctcaaacaaaatggcaagactaggaaaaggatacatgttcgagag

SEQ ID NO: 311141 - DNA, 56 bp, Artificial
  Synthetic oligonucleotide
accaatacgttgtgtatgtaggcgacccagctcaattaccggcacctcgtacttta

SEQ ID NO: 311142 - DNA, 58 bp, Artificial
  Synthetic oligonucleotide
accaataggagcaaatattgaagacttagtggactattcgaaagactggttgtctaga

SEQ ID NO: 311143 - DNA, 55 bp, Artificial
  Synthetic oligonucleotide
accaatataacccagaaagggacacaggagaagacacacaatgctactttttaag

SEQ ID NO: 311144 - DNA, 55 bp, Artificial
  Synthetic oligonucleotide
accaatatgacaactgacaacaagggcgccactctaccccgtattgtggcgacgt

SEQ ID NO: 311145 - DNA, 53 bp, Artificial
  Synthetic oligonucleotide
accaatatgactaactttctgtttcaagtggatcatctaacttatgtgcaact

SEQ ID NO: 311146 - DNA, 55 bp, Artificial
  Synthetic oligonucleotide
accaatattggcccaataccttttgtcatgctttataaggcttcctcttactttg

SEQ ID NO: 311147 - DNA, 54 bp, Artificial
  Synthetic oligonucleotide
accaatcaaaggttggccgcctttctaattgaactggattcagaagttacccac

SEQ ID NO: 311148 - DNA, 60 bp, Artificial
  Synthetic oligonucleotide
accaatcaattgcttctgtcgctactggaagcggtgatccgcacagtgacgactttacag

SEQ ID NO: 311149 - DNA, 55 bp, Artificial
  Synthetic oligonucleotide
accaatcacacgtcctactcggtgttggaccagcagaagccggagattgtggtgg

SEQ ID NO: 311150 - DNA, 60 bp, Artificial
  Synthetic oligonucleotide
accaatcacactggtggcctacgagaagatgacaccgctgtccatcctgaccgtagctgg

SEQ ID NO: 311151 - DNA, 60 bp, Artificial
  Synthetic oligonucleotide
accaatcactctttgctagcccctccaacaattacatctcttcaggcaatgaatagacgc

SEQ ID NO: 311152 - DNA, 57 bp, Artificial
  Synthetic oligonucleotide
accaatcagaaacacttcccctttcaaagtatataactaagtgcgcagacgaatggc

SEQ ID NO: 311153 - DNA, 60 bp, Artificial
  Synthetic oligonucleotide
accaatcagagtgtatacatacttggcttcatcagtgcatgtccagacttcaaactccgc

SEQ ID NO: 311154 - DNA, 60 bp, Artificial
  Synthetic oligonucleotide
accaatcaggtggggtaacaatcacactgttctcagccaacattgatgctatcacaagcc

SEQ ID NO: 311155 - DNA, 60 bp, Artificial
  Synthetic oligonucleotide
accaatcagtagcgatgacagtagcaatagcagttataggctaataaattgtaatacctc

SEQ ID NO: 311156 - DNA, 57 bp, Artificial
  Synthetic oligonucleotide
accaatcagtatggaggaagccatttacggcactgaagggttagaggcccttgatct

SEQ ID NO: 311157 - DNA, 60 bp, Artificial
  Synthetic oligonucleotide
accaatcagtctggttcaacggctaccagaaccagaagatactagtggtggacgagatga

SEQ ID NO: 311158 - DNA, 60 bp, Artificial
  Synthetic oligonucleotide
accaatccgctggtgccatcagatactgtgcaaacgcgccatgtcatccagaggcgaacg

SEQ ID NO: 311159 - DNA, 55 bp, Artificial
  Synthetic oligonucleotide
accaatcctgcatatgagcctatagacactacattaaccttttcaccacaggatg

SEQ ID NO: 311160 - DNA, 56 bp, Artificial
  Synthetic oligonucleotide
accaatcgactattggatgttaattgcaccaactcaaataggtagggtggcggagg

SEQ ID NO: 311161 - DNA, 58 bp, Artificial
  Synthetic oligonucleotide
accaatcgccgggtccgttgtttacagcagacctcgcgtgccacagatccgcacgaac

SEQ ID NO: 311162 - DNA, 59 bp, Artificial
  Synthetic oligonucleotide
accaatcggaggctgtgaggtcgagacagacgagtccagattcgtagaaaacactggtg

SEQ ID NO: 311163 - DNA, 56 bp, Artificial
  Synthetic oligonucleotide
accaatcgtccaactggaagtatacaatggcaggtgcgcgcttgggcgctcacgtc

SEQ ID NO: 311164 - DNA, 54 bp, Artificial
  Synthetic oligonucleotide
accaatctcgaaataccagagacctcaccactgagggtgttgaacccaacccgg

SEQ ID NO: 311165 - DNA, 57 bp, Artificial
  Synthetic oligonucleotide
accaatctcttgtcctccaatttgtcctggttatcgctggatgtgtctgcggcgttc

SEQ ID NO: 311166 - DNA, 56 bp, Artificial
  Synthetic oligonucleotide
accaatctgtgattacatggttatcactgggaacagcggaagggggggctaccttg

SEQ ID NO: 311167 - DNA, 57 bp, Artificial
  Synthetic oligonucleotide
accaatcttacctacgccggactcaatccatgggaattccacttgaccaaaggatca

SEQ ID NO: 311168 - DNA, 55 bp, Artificial
  Synthetic oligonucleotide
accaatctttgtaccacgtcagcgtagcatggctacttgcgtctgtaggtggaca

SEQ ID NO: 311169 - DNA, 54 bp, Artificial
  Synthetic oligonucleotide
accaatgacctctgttacccagggagtttcaacgactatgaagaactgaaacat

SEQ ID NO: 311170 - DNA, 60 bp, Artificial
  Synthetic oligonucleotide
accaatgacggatcagttgccgtacatcattgacctttatgcctccctccgccgctacta

SEQ ID NO: 311171 - DNA, 56 bp, Artificial
  Synthetic oligonucleotide
accaatgagacaaactccacaaccacaataatcaactacaacacccaaaacaacta

SEQ ID NO: 311172 - DNA, 58 bp, Artificial
  Synthetic oligonucleotide
accaatgcagtattcacctcaagaccgagaagagtttaaaactcagatcgaagaacta

SEQ ID NO: 311173 - DNA, 56 bp, Artificial
  Synthetic oligonucleotide
accaatgcataattacgatcggtccattctattataggggttccgggcggacttgc

SEQ ID NO: 311174 - DNA, 51 bp, Artificial
  Synthetic oligonucleotide
accaatgcggacttggttggctacgttgttagcgcgctgcggttgcgttcc

SEQ ID NO: 311175 - DNA, 58 bp, Artificial
  Synthetic oligonucleotide
accaatggagacacttttgggatggagtgggacgagcccaactggcgttggacattgc

SEQ ID NO: 311176 - DNA, 55 bp, Artificial
  Synthetic oligonucleotide
accaatggattgtgtacagcgcccatggtgtcaaaattttcggtagtgccgtgcc

SEQ ID NO: 311177 - DNA, 55 bp, Artificial
  Synthetic oligonucleotide
accaatggcacctcaaagggcaccccagatggcaccctgcgggaagaggcagggg

SEQ ID NO: 311178 - DNA, 59 bp, Artificial
  Synthetic oligonucleotide
accaatggctaaaacaccaacagctgtttttatgatagatctagcattaagattaaaga

SEQ ID NO: 311179 - DNA, 57 bp, Artificial
  Synthetic oligonucleotide
accaatggcttgtccaccgcaaccctcgtataaccattaactggcgggtcgcaatga

SEQ ID NO: 311180 - DNA, 55 bp, Artificial
  Synthetic oligonucleotide
accaatgggaatttgattgcacctgaatttggatatctactcaagggtgaaagcc

SEQ ID NO: 311181 - DNA, 55 bp, Artificial
  Synthetic oligonucleotide
accaatggtcgacaaggagatggattcaagacctcctgtcgaacccctttcccca

SEQ ID NO: 311182 - DNA, 52 bp, Artificial
  Synthetic oligonucleotide
accaatgtgactggcgtggatagcgtttcgccattccaggatcacatgaatt

SEQ ID NO: 311183 - DNA, 60 bp, Artificial
  Synthetic oligonucleotide
accaatgtgagcaccacaagtaccataaaagacgtgaggacactagtgtcctatgttagc

SEQ ID NO: 311184 - DNA, 60 bp, Artificial
  Synthetic oligonucleotide
accaatgtgtggtggggaaacaatgccacagaaccagtgtacaactgtacatggaatatg

SEQ ID NO: 311185 - DNA, 60 bp, Artificial
  Synthetic oligonucleotide
accaatgttcctgtgacacataccaaagagttgctccacacagagcacaatggaatgctg

SEQ ID NO: 311186 - DNA, 55 bp, Artificial
  Synthetic oligonucleotide
accaattagtcatacagatccatatcctgcaaacctgccctgtctcgcaagtttt

SEQ ID NO: 311187 - DNA, 60 bp, Artificial
  Synthetic oligonucleotide
accaattcccctcgctcgcagcagagatcttcaatgtatatagctttagagaccacacgt

SEQ ID NO: 311188 - DNA, 56 bp, Artificial
  Synthetic oligonucleotide
accaattctatggaattcatgttttgttgatgaaccgtgaagacatggagaaacgt

SEQ ID NO: 311189 - DNA, 53 bp, Artificial
  Synthetic oligonucleotide
accaattgagctcttcaactccccccccttgtattggtgtctggggtcttatt

SEQ ID NO: 311190 - DNA, 55 bp, Artificial
  Synthetic oligonucleotide
accaattggctatccccaaccaatccctttgctgccgaactctccaccatgcccc

SEQ ID NO: 311191 - DNA, 52 bp, Artificial
  Synthetic oligonucleotide
accaattgtatacatgattggctcagcaccttcatactggatgtatgacgta

SEQ ID NO: 311192 - DNA, 55 bp, Artificial
  Synthetic oligonucleotide
accaatttatcctctaataaccggcttaattatatagatctagtccccaagaaca

SEQ ID NO: 311193 - DNA, 55 bp, Artificial
  Synthetic oligonucleotide
accaatttcgtggaacaccgaacgatttacaggaagacctgccagagcactcccg

SEQ ID NO: 311194 - DNA, 60 bp, Artificial
  Synthetic oligonucleotide
accaatttgaatcctacatcccaggagacatagactatggaccaccaatcgataatgaat

SEQ ID NO: 311195 - DNA, 58 bp, Artificial
  Synthetic oligonucleotide
accacaaagcaagaagtgatttccatcaagttcatcaggtctgaagttgattgtaggt

SEQ ID NO: 311196 - DNA, 59 bp, Artificial
  Synthetic oligonucleotide
accacaaatgcgataacacgtgcatggaaagtgtcaaaaatgggacttatgactaccca

SEQ ID NO: 311197 - DNA, 59 bp, Artificial
  Synthetic oligonucleotide
accacaaattagcatcagtataactattatcgattactacattctcagattctgacaga

SEQ ID NO: 311198 - DNA, 60 bp, Artificial
  Synthetic oligonucleotide
accacaacaatttgtgtacaggcagagcgcgagacagcacaggccttgtttaatgtgcag

SEQ ID NO: 311199 - DNA, 59 bp, Artificial
  Synthetic oligonucleotide
accacaacacaagatctcctcacagaatctacttgtgttctttgaaggtacaagcaaaa

SEQ ID NO: 311200 - DNA, 60 bp, Artificial
  Synthetic oligonucleotide
accacaacagctagccaaacctgtactagcatttagatacaatgcacaactagacaatgg

SEQ ID NO: 311201 - DNA, 60 bp, Artificial
  Synthetic oligonucleotide
accacaacaggcctctactaaggtggatcacagcttgtgacaccatctcagagcaagaat

SEQ ID NO: 311202 - DNA, 60 bp, Artificial
  Synthetic oligonucleotide
accacaacatcaggaaaaattataggatgctttgcaacaacatcaacagagactcaccca

SEQ ID NO: 311203 - DNA, 56 bp, Artificial
  Synthetic oligonucleotide
accacaagaacctgttacatttatgttcctcaaacccaggaagctaaactacatga

SEQ ID NO: 311204 - DNA, 53 bp, Artificial
  Synthetic oligonucleotide
accacaagactccgaaccgtaacacagtggacgagtttatttggggcagcact

SEQ ID NO: 311205 - DNA, 55 bp, Artificial
  Synthetic oligonucleotide
accacaagagaataaggccatttagattgcccctagtccagaaagagtggaggac

SEQ ID NO: 311206 - DNA, 60 bp, Artificial
  Synthetic oligonucleotide
accacaagatgccactgctatagataaaccttctaagcctgacacatcttctaatagatt

SEQ ID NO: 311207 - DNA, 59 bp, Artificial
  Synthetic oligonucleotide
accacaaggagcgaatcactacggtgaagtggatagcctacgccctgtgcggtgcggtc

SEQ ID NO: 311208 - DNA, 55 bp, Artificial
  Synthetic oligonucleotide
accacaaggcacagagcgccgaaaattgtggctggtggggaactagaccacagga

SEQ ID NO: 311209 - DNA, 55 bp, Artificial
  Synthetic oligonucleotide
accacaataccatctggaagttttctactaggaaatggaactagccctgtaacca

SEQ ID NO: 311210 - DNA, 60 bp, Artificial
  Synthetic oligonucleotide
accacaattatagccacagctgatgccaggggccttatccagtcgtcccgggctcatgct

SEQ ID NO: 311211 - DNA, 56 bp, Artificial
  Synthetic oligonucleotide
accacaattatagccacggccgacgctaggggcctcattcagtcatcccgggccca

SEQ ID NO: 311212 - DNA, 54 bp, Artificial
  Synthetic oligonucleotide
accacaattatatcggtagataaaggaatagatcaaccgtggggttctttatat

SEQ ID NO: 311213 - DNA, 60 bp, Artificial
  Synthetic oligonucleotide
accacaattattcagcccagcagtcgctgaaacatgccgctagattcgttataacgccca

SEQ ID NO: 311214 - DNA, 59 bp, Artificial
  Synthetic oligonucleotide
accacaattcaaattatatgatcaaccaatagccaagtggaccaattaaatgtatgttg

SEQ ID NO: 311215 - DNA, 55 bp, Artificial
  Synthetic oligonucleotide
accacaattcttaaacgtgtaaatgaaggtatgtcaccacaaaaagcacttgaaa

SEQ ID NO: 311216 - DNA, 60 bp, Artificial
  Synthetic oligonucleotide
accacaattgtgagactatcgctaaggatatctttggcacccacactcttagtcaacatc

SEQ ID NO: 311217 - DNA, 55 bp, Artificial
  Synthetic oligonucleotide
accacacaaagaccgactatagaacgatgattgaatacagctacgccaagcgggg

SEQ ID NO: 311218 - DNA, 54 bp, Artificial
  Synthetic oligonucleotide
accacacacttcggtgctgttggacaaatttatttgaaggtaggtgctggtttt

SEQ ID NO: 311219 - DNA, 56 bp, Artificial
  Synthetic oligonucleotide
accacacagatagttatgtggacccaaagacctagcccacacagtcttccccgtcc

SEQ ID NO: 311220 - DNA, 60 bp, Artificial
  Synthetic oligonucleotide
accacacagcttgaatctcatcaaagttgtattgttgatacgacattattatcacaatgg

SEQ ID NO: 311221 - DNA, 54 bp, Artificial
  Synthetic oligonucleotide
accacacgcaaagaggccatgttaggcactcacgtaatctgggatgttggcctc

SEQ ID NO: 311222 - DNA, 55 bp, Artificial
  Synthetic oligonucleotide
accacacgccacgaagcagtctgtgatagcattgggctcacaagagggagctctg

SEQ ID NO: 311223 - DNA, 56 bp, Artificial
  Synthetic oligonucleotide
accacacgtcctttgggaccaccactataatgataatgtttcctgttattgcggtc

SEQ ID NO: 311224 - DNA, 55 bp, Artificial
  Synthetic oligonucleotide
accacactaacagcgttatgttctggttagttagggataggaggcccagcggaac

SEQ ID NO: 311225 - DNA, 55 bp, Artificial
  Synthetic oligonucleotide
accacactcgggaggggacccagaaattacaacacacagcttcaattgtggaggg

SEQ ID NO: 311226 - DNA, 55 bp, Artificial
  Synthetic oligonucleotide
accacactgaccgacctacagacggcacttacccaactggccacggacgttggtg

SEQ ID NO: 311227 - DNA, 51 bp, Artificial
  Synthetic oligonucleotide
accacactttaagctcaggtgtggtcgtccgtaggcaaaatcttttgaacg

SEQ ID NO: 311228 - DNA, 54 bp, Artificial
  Synthetic oligonucleotide
accacactttctggcataggcggccgtaatgtttattgttacagagaaggcgta

SEQ ID NO: 311229 - DNA, 56 bp, Artificial
  Synthetic oligonucleotide
accacagaaagcatagtgatatggggaaagactcctaaatttgaactacccataca

SEQ ID NO: 311230 - DNA, 60 bp, Artificial
  Synthetic oligonucleotide
accacagaaagctgcaagataaaaatgcattatagatctaccaattttgctcttatctta

SEQ ID NO: 311231 - DNA, 53 bp, Artificial
  Synthetic oligonucleotide
accacagaggtcctagcacatctccataacatggtcgctagtgtacttgacaa

SEQ ID NO: 311232 - DNA, 60 bp, Artificial
  Synthetic oligonucleotide
accacagagttaagagataagagaagaaatgaatatgcacttttttatagactagatata

SEQ ID NO: 311233 - DNA, 60 bp, Artificial
  Synthetic oligonucleotide
accacagatacaccagacacctttaagatggtcgaccaaccagtgacttcgcataatgca

SEQ ID NO: 311234 - DNA, 55 bp, Artificial
  Synthetic oligonucleotide
accacagccatgggaaataatatagagctataggtaataaagtataggtattcta

SEQ ID NO: 311235 - DNA, 60 bp, Artificial
  Synthetic oligonucleotide
accacagcgcacggatgtgacactatcgccagatgccagtgtaccaccggcgtgtacttt

SEQ ID NO: 311236 - DNA, 55 bp, Artificial
  Synthetic oligonucleotide
accacagggcttgcctactttaaccactcctgggtctggccagttcttaacaaca

SEQ ID NO: 311237 - DNA, 57 bp, Artificial
  Synthetic oligonucleotide
accacagtaactgagccctcaagccctcaggtaattcactattccagtggaaaagac

SEQ ID NO: 311238 - DNA, 59 bp, Artificial
  Synthetic oligonucleotide
accacagtgtctaatttgaaacgtatttggaatatggcaggcggtgatgacaagagaaa

SEQ ID NO: 311239 - DNA, 52 bp, Artificial
  Synthetic oligonucleotide
accacagttcggaggaatttatttcccgaccagtcttcgtccgccaacaagg

SEQ ID NO: 311240 - DNA, 55 bp, Artificial
  Synthetic oligonucleotide
accacagtttatggaataaatgtgttaaatcacatgggagtcatggccttcagag

SEQ ID NO: 311241 - DNA, 60 bp, Artificial
  Synthetic oligonucleotide
accacataaaagtggcaattgcccattattcagcccaactaatgactctagatatccaaa

SEQ ID NO: 311242 - DNA, 50 bp, Artificial
  Synthetic oligonucleotide
accacataacgtgaggcgcgctcatgaaggtcccgcaagcgcagcacata

SEQ ID NO: 311243 - DNA, 60 bp, Artificial
  Synthetic oligonucleotide
accacatactggtgggatggactccaatcctctgatgatttcgctctcatagtgaatgca

SEQ ID NO: 311244 - DNA, 60 bp, Artificial
  Synthetic oligonucleotide
accacatcaagtgcttagcaccagatgttagcatattccgaatcttgccatctcacctac

SEQ ID NO: 311245 - DNA, 57 bp, Artificial
  Synthetic oligonucleotide
accacatccaggaggattaaagcaatgtgagagaataacggtattagacatcgggga

SEQ ID NO: 311246 - DNA, 60 bp, Artificial
  Synthetic oligonucleotide
accacatgcacagtggcattagggactaatccttttgcccacatgatagcatgccatggt

SEQ ID NO: 311247 - DNA, 55 bp, Artificial
  Synthetic oligonucleotide
accacatgcatcggttctgtgatctgggcagacagccaccgggaccctggcgaac

SEQ ID NO: 311248 - DNA, 57 bp, Artificial
  Synthetic oligonucleotide
accacatggtccacccctatataaggagtacaaaaggagaggcgaatcgagtaatga

SEQ ID NO: 311249 - DNA, 55 bp, Artificial
  Synthetic oligonucleotide
accacatgttagtcaatctggccgtctacatacgtttgatgagttgtttggcgcg

SEQ ID NO: 311250 - DNA, 60 bp, Artificial
  Synthetic oligonucleotide
accacatttaatctaccaattgactattggatgctaattgcgcctactcaaataggtaga

SEQ ID NO: 311251 - DNA, 58 bp, Artificial
  Synthetic oligonucleotide
accaccaaagatatcttcgcatactcggacgcattaaaggcctggccgactacttgga

SEQ ID NO: 311252 - DNA, 56 bp, Artificial
  Synthetic oligonucleotide
accaccaaatgctcctatcttatcaacacttccggaaactactgttgttagacgac

SEQ ID NO: 311253 - DNA, 60 bp, Artificial
  Synthetic oligonucleotide
accaccaacaccacgatctttgagtgatgaaaagaacacctctgagactacacaattgca

SEQ ID NO: 311254 - DNA, 55 bp, Artificial
  Synthetic oligonucleotide
accaccaactggctgtgggcccacttgtcacgggagaaacgaccccgcttgtgca

SEQ ID NO: 311255 - DNA, 60 bp, Artificial
  Synthetic oligonucleotide
accaccaagtgttcgtagagaactcagatttcactactgatatcgatcacttgactttga

SEQ ID NO: 311256 - DNA, 55 bp, Artificial
  Synthetic oligonucleotide
accaccaatacctgaccccgaaaacacgatggaggttagtgtgcctggtaagctg

SEQ ID NO: 311257 - DNA, 55 bp, Artificial
  Synthetic oligonucleotide
accaccaatgacactctctctgaccaaagcagtaccctgaaggaagaaccagggg

SEQ ID NO: 311258 - DNA, 59 bp, Artificial
  Synthetic oligonucleotide
accaccaatgacagatggcaccataccacggaggttctcggggaactgttcttgagcaa

SEQ ID NO: 311259 - DNA, 57 bp, Artificial
  Synthetic oligonucleotide
accaccaccctctaccagtttagaagacacatataggtttttgcagtccagagctat

SEQ ID NO: 311260 - DNA, 55 bp, Artificial
  Synthetic oligonucleotide
accaccacttgagagacttcatcttgattgcagcgaggactgtgaacctactggg

SEQ ID NO: 311261 - DNA, 57 bp, Artificial
  Synthetic oligonucleotide
accaccagaggactttggaccaccaagggagccatggggtcagtggttagcagacac

SEQ ID NO: 311262 - DNA, 53 bp, Artificial
  Synthetic oligonucleotide
accaccaggcgattaaaggggtccgagtggcgtactgggttgggttcgacaca

SEQ ID NO: 311263 - DNA, 53 bp, Artificial
  Synthetic oligonucleotide
accaccagggtatttggacctaatttgtttagttgctggtagggactcctcaa

SEQ ID NO: 311264 - DNA, 59 bp, Artificial
  Synthetic oligonucleotide
accaccagtgaatgtcgataaaccgataccattaggaagaagagatgtgccagggagac

SEQ ID NO: 311265 - DNA, 56 bp, Artificial
  Synthetic oligonucleotide
accaccagttccggatcccgtactgttatgcctttcctctatctcttggagacgga

SEQ ID NO: 311266 - DNA, 60 bp, Artificial
  Synthetic oligonucleotide
accaccatggggagtgatggtttcagtggactaaatcacatcatgattgggcattcacag

SEQ ID NO: 311267 - DNA, 53 bp, Artificial
  Synthetic oligonucleotide
accaccattgaagtaacctctaatacggtgaccacgtggaccccaacctgatt

SEQ ID NO: 311268 - DNA, 50 bp, Artificial
  Synthetic oligonucleotide
accacccaatgattattggctgcttattagttcaaatacggatggagtag

SEQ ID NO: 311269 - DNA, 51 bp, Artificial
  Synthetic oligonucleotide
accacccacgcacctactcgctcaatgtccaagccctcccactcgggaagc

SEQ ID NO: 311270 - DNA, 57 bp, Artificial
  Synthetic oligonucleotide
accacccactacaaacagatgttcacttacgctgacattccgaaagttgtcggattc

SEQ ID NO: 311271 - DNA, 53 bp, Artificial
  Synthetic oligonucleotide
accacccagataataaagcttctcccctttgcagccgccccaccaaagcaaag

SEQ ID NO: 311272 - DNA, 54 bp, Artificial
  Synthetic oligonucleotide
accacccaggatattttcgcatacccctccgcactaaaggcctggccgactact

SEQ ID NO: 311273 - DNA, 50 bp, Artificial
  Synthetic oligonucleotide
accacccattgccgctaattcgcacggtttaatttcggcgctaacaaaat

SEQ ID NO: 311274 - DNA, 55 bp, Artificial
  Synthetic oligonucleotide
accaccccgaattattcagcaaccatgactacgtaattaacttcgtgattgactc

SEQ ID NO: 311275 - DNA, 55 bp, Artificial
  Synthetic oligonucleotide
accacccgagcacggaccaagaacaaaccagcctatatgttcaagcatcagggag

SEQ ID NO: 311276 - DNA, 60 bp, Artificial
  Synthetic oligonucleotide
accacccgagcattgccatttaactttgccgtcgcctttgcagatatggctctcacatgc

SEQ ID NO: 311277 - DNA, 57 bp, Artificial
  Synthetic oligonucleotide
accacccggagcacctatccctggtaaatggaatgactatacgtggcagacgtcttc

SEQ ID NO: 311278 - DNA, 51 bp, Artificial
  Synthetic oligonucleotide
accacccggtcgagcggcgaccccctgggatcgaaaaaagaaagacgaaga

SEQ ID NO: 311279 - DNA, 57 bp, Artificial
  Synthetic oligonucleotide
accaccctaacaccactcctcactaatcaatatcacccatgtgtggtagttcgtcgt

SEQ ID NO: 311280 - DNA, 51 bp, Artificial
  Synthetic oligonucleotide
accaccctccgcccagaaacttgggcgatggtcgtacccgggactcaacgg

SEQ ID NO: 311281 - DNA, 53 bp, Artificial
  Synthetic oligonucleotide
accaccctcgggcttacctcgataccggcactaagcgcggtgtccagtagctc

SEQ ID NO: 311282 - DNA, 57 bp, Artificial
  Synthetic oligonucleotide
accaccgactgaacttgagctctccgcggcccaaactgctaagtttgcggccctagc

SEQ ID NO: 311283 - DNA, 57 bp, Artificial
  Synthetic oligonucleotide
accaccgatggccagcttggacaataaaggcattctgtttactagcaactttgttct

SEQ ID NO: 311284 - DNA, 58 bp, Artificial
  Synthetic oligonucleotide
accaccgatggggagacattaggttcttacgcttagtgtggtcagctcctactctcga

SEQ ID NO: 311285 - DNA, 49 bp, Artificial
  Synthetic oligonucleotide
accaccgccccgaaggggacgaaaaatggtttttagagaacgagaagac

SEQ ID NO: 311286 - DNA, 58 bp, Artificial
  Synthetic oligonucleotide
accaccgcgcacagacttatccagacctcccttctatccctggatgcccagaaataac

SEQ ID NO: 311287 - DNA, 53 bp, Artificial
  Synthetic oligonucleotide
accaccggaggtgtcgtggtgaaaggtccgaacgatgcgaaagacgccccgcc

SEQ ID NO: 311288 - DNA, 55 bp, Artificial
  Synthetic oligonucleotide
accaccggcagtaccggagcattgggacgttgcgccgtcctggttcgtatgcaga

SEQ ID NO: 311289 - DNA, 55 bp, Artificial
  Synthetic oligonucleotide
accaccgtgaacgcccaccaggtcttgcctaaggtcttacataagaggactcttg

SEQ ID NO: 311290 - DNA, 57 bp, Artificial
  Synthetic oligonucleotide
accacctactgattattggatacttattaactcaaatacaaatggagtagtatacga

SEQ ID NO: 311291 - DNA, 60 bp, Artificial
  Synthetic oligonucleotide
accacctagtaagcagggtgattcatggctaaagaaattcactgagttctgcaatgcagc

SEQ ID NO: 311292 - DNA, 60 bp, Artificial
  Synthetic oligonucleotide
accacctatgccaattgctgacatcacccaaatgatgccagaaagctcttgtagcatgga

SEQ ID NO: 311293 - DNA, 55 bp, Artificial
  Synthetic oligonucleotide
accacctcacgcagtgcatgcataaggcagaagaaagtcacatttgacagactgc

SEQ ID NO: 311294 - DNA, 57 bp, Artificial
  Synthetic oligonucleotide
accacctctacaactcaatcgagtgtaggagtcacctacgggtactccactggagag

SEQ ID NO: 311295 - DNA, 53 bp, Artificial
  Synthetic oligonucleotide
accacctctatccggcgaccaattagaagtacagttcggaggaatttattttc

SEQ ID NO: 311296 - DNA, 54 bp, Artificial
  Synthetic oligonucleotide
accacctcttagtgcacgttatgttaagtacgttgattctagtgcactggagcc

SEQ ID NO: 311297 - DNA, 55 bp, Artificial
  Synthetic oligonucleotide
accacctggggaaaaaccgtagtatgcctgtatctattccagctctccccaccca

SEQ ID NO: 311298 - DNA, 58 bp, Artificial
  Synthetic oligonucleotide
accacgaaacaccattgattcttaggaattagcctttcaaatatcccaactgcaatga

SEQ ID NO: 311299 - DNA, 59 bp, Artificial
  Synthetic oligonucleotide
accacgacagacagggtaattggggctagaatcttgctatatgctcctagaaagtacta

SEQ ID NO: 311300 - DNA, 60 bp, Artificial
  Synthetic oligonucleotide
accacgacccagttgattttgtagagcaatatgctgagttcgtgcttctgtgtgacaaca

SEQ ID NO: 311301 - DNA, 60 bp, Artificial
  Synthetic oligonucleotide
accacgactcagccgcagattagcttcctatgtggtaatcggaccttatgaagctattgc

SEQ ID NO: 311302 - DNA, 56 bp, Artificial
  Synthetic oligonucleotide
accacgagccgtgtgctacggtccctgttttggaatgaaccggctatcggccagaa

SEQ ID NO: 311303 - DNA, 55 bp, Artificial
  Synthetic oligonucleotide
accacgatatctatgcagttgttggtggtaattctgtgtctcatgttcatgcggc

SEQ ID NO: 311304 - DNA, 60 bp, Artificial
  Synthetic oligonucleotide
accacgatgtcgatggcaaagatctgtgccctcttcagggattagatgtgagaggggacc

SEQ ID NO: 311305 - DNA, 57 bp, Artificial
  Synthetic oligonucleotide
accacgcaaaggtaacttggaactgagagaaatcctcaaatctctatacactttctc

SEQ ID NO: 311306 - DNA, 60 bp, Artificial
  Synthetic oligonucleotide
accacgcacgcaaatgggtcaacgctgttggcctgtgtggcatgtccctaactggtggta

SEQ ID NO: 311307 - DNA, 56 bp, Artificial
  Synthetic oligonucleotide
accacgcaggaggcccattcataaacccaagaatcctccacaggagccaagggtca

SEQ ID NO: 311308 - DNA, 57 bp, Artificial
  Synthetic oligonucleotide
accacgcatgcctatttcaaccgctggggtagatttgacgcggtaatcggttatggc

SEQ ID NO: 311309 - DNA, 59 bp, Artificial
  Synthetic oligonucleotide
accacgcattattagagtatacttttgggctaagatccaaatgcccacacagataattg

SEQ ID NO: 311310 - DNA, 56 bp, Artificial
  Synthetic oligonucleotide
accacgcccacttaagctaccggatgggccaccctgctctcagaggtccaaattct

SEQ ID NO: 311311 - DNA, 56 bp, Artificial
  Synthetic oligonucleotide
accacgccctctgagattaccggaagggcctccttgctctcagcggtcgaaatttc

SEQ ID NO: 311312 - DNA, 60 bp, Artificial
  Synthetic oligonucleotide
accacgcctcctaaatgactcatgcttgctgaattctgcagagcagccattttgcgcttt

SEQ ID NO: 311313 - DNA, 55 bp, Artificial
  Synthetic oligonucleotide
accacgcgcggcggtccacatcagcatgtaaacacggggtggagcgcacagccaa

SEQ ID NO: 311314 - DNA, 58 bp, Artificial
  Synthetic oligonucleotide
accacgctgaggaacgtcgtaagtccggccagcctagctgggcagatcgttttggtga

SEQ ID NO: 311315 - DNA, 56 bp, Artificial
  Synthetic oligonucleotide
accacgcttgggccttccaatatgagactgttgtacaaaccttcgtaactttcaca

SEQ ID NO: 311316 - DNA, 56 bp, Artificial
  Synthetic oligonucleotide
accacggaaatttacaacacatgcgtccttagtcaggttagaatcttataatgatt

SEQ ID NO: 311317 - DNA, 55 bp, Artificial
  Synthetic oligonucleotide
accacgggagcattagtgcacccaccatctcagacagtagggccttggcacggcg

SEQ ID NO: 311318 - DNA, 50 bp, Artificial
  Synthetic oligonucleotide
accacggggcccggaacacatagcgccgccagagagtccctactgacgtg

SEQ ID NO: 311319 - DNA, 54 bp, Artificial
  Synthetic oligonucleotide
accacggtttactaaatggaagactattatatatagttggatcgggaacatacc

SEQ ID NO: 311320 - DNA, 56 bp, Artificial
  Synthetic oligonucleotide
accacgtaaaccttgtcttaaatagagatgtctcatttcaggatttaagtgataac

SEQ ID NO: 311321 - DNA, 55 bp, Artificial
  Synthetic oligonucleotide
accacgtacgtgacaaacaatcagtaaggtttgcgctgtatgatgttgcagtcgg

SEQ ID NO: 311322 - DNA, 60 bp, Artificial
  Synthetic oligonucleotide
accacgtatgccaagagaagtgtgtagaaactatattaaccatggtcttccaccaatgca

SEQ ID NO: 311323 - DNA, 59 bp, Artificial
  Synthetic oligonucleotide
accacgtccgataccgaaatcaatacatacctactgtgcacttggcaacttgacgataa

SEQ ID NO: 311324 - DNA, 57 bp, Artificial
  Synthetic oligonucleotide
accacgtgccgacgtggatcactgggacgcctacaagggtgccagggtggtcctctg

SEQ ID NO: 311325 - DNA, 53 bp, Artificial
  Synthetic oligonucleotide
accacgtgcgtgcagacaccaggaatgtatgaactaacctcacctaaagtaga

SEQ ID NO: 311326 - DNA, 55 bp, Artificial
  Synthetic oligonucleotide
accacgtttctgtatcggttggtggcgttacacacccctcctaatgaggctgaga

SEQ ID NO: 311327 - DNA, 52 bp, Artificial
  Synthetic oligonucleotide
accacgtttgacgtaacctactgaagagtcccccggaagtttcactcaggag

SEQ ID NO: 311328 - DNA, 54 bp, Artificial
  Synthetic oligonucleotide
accactaaaagactaacagttctcggaaaagatgccggcactttaattgaagac

SEQ ID NO: 311329 - DNA, 58 bp, Artificial
  Synthetic oligonucleotide
accactaaaaggttcagccaaacacatagaagaatgttcttgttatggtcataatcaa

SEQ ID NO: 311330 - DNA, 52 bp, Artificial
  Synthetic oligonucleotide
accactaacaaaaatcccccactcagaacgctccctcaaagttaaattatta

SEQ ID NO: 311331 - DNA, 54 bp, Artificial
  Synthetic oligonucleotide
accactaatgtaccttggaacaccagttggagtaataaatctcaaacagagatt

SEQ ID NO: 311332 - DNA, 51 bp, Artificial
  Synthetic oligonucleotide
accactaatgtccgttggaatactacttggagtaataaaacctatgaggag

SEQ ID NO: 311333 - DNA, 57 bp, Artificial
  Synthetic oligonucleotide
accactaatgtgccctggaacaatacttggagtaataaaaacaagagtgagatatgg

SEQ ID NO: 311334 - DNA, 50 bp, Artificial
  Synthetic oligonucleotide
accactaatgtgccctggaactctagttggagtaacaaatctctgagggc

SEQ ID NO: 311335 - DNA, 59 bp, Artificial
  Synthetic oligonucleotide
accactaatgtgccttggaacactagttggagtaataaatccctgaatgagatatggaa

SEQ ID NO: 311336 - DNA, 54 bp, Artificial
  Synthetic oligonucleotide
accactaatgtgccttggaactccagttggagtaataaatctcgaaaggatatc

SEQ ID NO: 311337 - DNA, 60 bp, Artificial
  Synthetic oligonucleotide
accactaatgtgccttggaactccagttggagtaatagatccgctgacatatgggataac

SEQ ID NO: 311338 - DNA, 57 bp, Artificial
  Synthetic oligonucleotide
accactaatgtgccttggaataagaattggagtagtacttggaggactaaatctctg

SEQ ID NO: 311339 - DNA, 59 bp, Artificial
  Synthetic oligonucleotide
accactaatgtgccttggaatgctagttggagtaataaatctcaagagcaaatttggga

SEQ ID NO: 311340 - DNA, 59 bp, Artificial
  Synthetic oligonucleotide
accactacctgatgaggtctgggttttgcgtgcacattcaggtgaacgcgtctaaattc

SEQ ID NO: 311341 - DNA, 50 bp, Artificial
  Synthetic oligonucleotide
accactacgaggaatgctcctgctaccctgattcagggaaagtgatgtgc

SEQ ID NO: 311342 - DNA, 58 bp, Artificial
  Synthetic oligonucleotide
accactacgctacgcagcagccgccttagctacgccggggcttagctcgcccacgctt

SEQ ID NO: 311343 - DNA, 60 bp, Artificial
  Synthetic oligonucleotide
accactactgtgccctggaactctagttggagtaataatagatctctagattacatatgg

SEQ ID NO: 311344 - DNA, 60 bp, Artificial
  Synthetic oligonucleotide
accactagattacgcagcacaagcttcggagtatgtaccagtgacggtcaccattgcacc

SEQ ID NO: 311345 - DNA, 55 bp, Artificial
  Synthetic oligonucleotide
accactagcctaggtgccggccctacctctatttctgcggtcggtgtgttagccc

SEQ ID NO: 311346 - DNA, 56 bp, Artificial
  Synthetic oligonucleotide
accactagcctaggtgccggtcctacctcgatctctgcagtcggtgtcctagcccc

SEQ ID NO: 311347 - DNA, 55 bp, Artificial
  Synthetic oligonucleotide
accactagcctgggtgccggccctacctctatctccgcggttggtgtattagccc

SEQ ID NO: 311348 - DNA, 60 bp, Artificial
  Synthetic oligonucleotide
accactagctgtaaggatgggcgccatagcatcaatgcgcatacagggtcgccttgtcca

SEQ ID NO: 311349 - DNA, 60 bp, Artificial
  Synthetic oligonucleotide
accactagtgcttgatgactgttcattagagggtctaatcctaggcaatcccaaatgtga

SEQ ID NO: 311350 - DNA, 55 bp, Artificial
  Synthetic oligonucleotide
accactatgaaagaaggcaacagatctatcttgtgttatctccaacatgtgctgc

SEQ ID NO: 311351 - DNA, 50 bp, Artificial
  Synthetic oligonucleotide
accactcacgttctcggaaacccattcttcaagttcttcgggaacttgat

SEQ ID NO: 311352 - DNA, 53 bp, Artificial
  Synthetic oligonucleotide
accactcagagacatcaacgcggtggaacttaaggattaccagatctacaaga

SEQ ID NO: 311353 - DNA, 58 bp, Artificial
  Synthetic oligonucleotide
accactcatactaacgaaccggcatctatttgaacggaacaatggtgagctcttaata

SEQ ID NO: 311354 - DNA, 56 bp, Artificial
  Synthetic oligonucleotide
accactccgaactgagtcgttcctgctttattcaagttgaccgatagagttggtcc

SEQ ID NO: 311355 - DNA, 57 bp, Artificial
  Synthetic oligonucleotide
accactccgggatgtgggtgcgtagcaccattttcataacattagtctataacctac

SEQ ID NO: 311356 - DNA, 53 bp, Artificial
  Synthetic oligonucleotide
accactcctacttggagaggtgatccgaggggtatgcttgtgactaaaggacc

SEQ ID NO: 311357 - DNA, 60 bp, Artificial
  Synthetic oligonucleotide
accactcgctacgcagcagccttagctacgccggagcttagctcgccaccgttataatat

SEQ ID NO: 311358 - DNA, 55 bp, Artificial
  Synthetic oligonucleotide
accactcggagaagaacagaaaaatcacctccagaggaccccttcagcgaacaaa

SEQ ID NO: 311359 - DNA, 59 bp, Artificial
  Synthetic oligonucleotide
accactctagaaggaggtgacaagggtcattatgctgggcacgaaatagtcaggaacag

SEQ ID NO: 311360 - DNA, 57 bp, Artificial
  Synthetic oligonucleotide
accactctccctcagttgatgggtcagaatttgaccttattaactgttatggtccga

SEQ ID NO: 311361 - DNA, 60 bp, Artificial
  Synthetic oligonucleotide
accactgaagtctccatccgctgaggcttgtggttacagtgatcgcgtggcacaactcac

SEQ ID NO: 311362 - DNA, 60 bp, Artificial
  Synthetic oligonucleotide
accactgaccctcggactcgaaagcatcgtccggcctgatggttgcgccgcactggcaga

SEQ ID NO: 311363 - DNA, 55 bp, Artificial
  Synthetic oligonucleotide
accactgactatgatcgctttaccgctaaccagtggcgtgacatatgtttaggtg

SEQ ID NO: 311364 - DNA, 60 bp, Artificial
  Synthetic oligonucleotide
accactgagaccggctgcgagcgcacaagcggcgagccagccacgctgctgcacaacacc

SEQ ID NO: 311365 - DNA, 60 bp, Artificial
  Synthetic oligonucleotide
accactgagctatctacacttacattacgtgtgacctccatacaatcggatttcgaatct

SEQ ID NO: 311366 - DNA, 59 bp, Artificial
  Synthetic oligonucleotide
accactgaggggccacaacaaacatccagtgagaagggctacgccagtcagtggaccac

SEQ ID NO: 311367 - DNA, 60 bp, Artificial
  Synthetic oligonucleotide
accactgaggtcgatcttgttggggcggatactgattggtcatcccgacagcctacttgc

SEQ ID NO: 311368 - DNA, 60 bp, Artificial
  Synthetic oligonucleotide
accactgaggtggcatttggcctagtatgcgcaacctgtgaacagattgctgattctcag

SEQ ID NO: 311369 - DNA, 60 bp, Artificial
  Synthetic oligonucleotide
accactgattttagatctatggaagcacttgctagccttttaagagctcctcatggtgag

SEQ ID NO: 311370 - DNA, 59 bp, Artificial
  Synthetic oligonucleotide
accactgctgtgcattggaactccagttggagtaataaatctcaagactatatttgggg

SEQ ID NO: 311371 - DNA, 60 bp, Artificial
  Synthetic oligonucleotide
accactgctgtgcctgggaatgctagttggagtaataaatctctaagtgagatttgggat

SEQ ID NO: 311372 - DNA, 54 bp, Artificial
  Synthetic oligonucleotide
accactgctgtgccttggaacactagttggagtaatagatctctggagaatatt

SEQ ID NO: 311373 - DNA, 54 bp, Artificial
  Synthetic oligonucleotide
accactgctgtgccttggaactccagttggagtaataaatcacgtgcagatatt

SEQ ID NO: 311374 - DNA, 59 bp, Artificial
  Synthetic oligonucleotide
accactgctgtgccttggaactccagttggagtaatagatctgaaacagagatttgggg

SEQ ID NO: 311375 - DNA, 54 bp, Artificial
  Synthetic oligonucleotide
accactgctgtgccttggaatactagttagagtaataaaaatttgagtgctatt

SEQ ID NO: 311376 - DNA, 54 bp, Artificial
  Synthetic oligonucleotide
accactgctgtgccttggaatgctagttggagtaataaaaatctgacacaaatt

SEQ ID NO: 311377 - DNA, 54 bp, Artificial
  Synthetic oligonucleotide
accactgctgtgccttggaatgctagttggagtaataaaagtctaaaggggatt

SEQ ID NO: 311378 - DNA, 55 bp, Artificial
  Synthetic oligonucleotide
accactggacattgcccctgatggagcagtcttccagctggaccgtccgctgtcc

SEQ ID NO: 311379 - DNA, 60 bp, Artificial
  Synthetic oligonucleotide
accactggattgcaagcaggtttataactcttgaagattactacaccacgatgtcctcag

SEQ ID NO: 311380 - DNA, 54 bp, Artificial
  Synthetic oligonucleotide
accactggcgcacaccccctgtggacctggtggcctgacttaacccctgatcta

SEQ ID NO: 311381 - DNA, 56 bp, Artificial
  Synthetic oligonucleotide
accactgggaataccatctcaatgggcagttgaggtgaatatattgttccctcgtc

SEQ ID NO: 311382 - DNA, 53 bp, Artificial
  Synthetic oligonucleotide
accactgtacgccgctaaagctaaaagagtgttttcccttggaaaggaaatga

SEQ ID NO: 311383 - DNA, 60 bp, Artificial
  Synthetic oligonucleotide
accactgtagatatgcaggcccttttgggatgtctagaatcctctttgctcaggaaaaga

SEQ ID NO: 311384 - DNA, 55 bp, Artificial
  Synthetic oligonucleotide
accactgtatagcccattggggcggtgggataggtaattgtggggcgaagcggag

SEQ ID NO: 311385 - DNA, 52 bp, Artificial
  Synthetic oligonucleotide
accactgtctgtagtacgtcgctaggtctaactcccgcagtaggtaccgaca

SEQ ID NO: 311386 - DNA, 60 bp, Artificial
  Synthetic oligonucleotide
accactgtgactccagccccggggattactctggagcattgcttatactatttatctcat

SEQ ID NO: 311387 - DNA, 60 bp, Artificial
  Synthetic oligonucleotide
accactgtgttcggacctctaaagatcagatcatgtggcaggatgttgtggattgatttc

SEQ ID NO: 311388 - DNA, 55 bp, Artificial
  Synthetic oligonucleotide
accacttacacgacagaatacaccagctgctgaactctttgcaatgccagtcgac

SEQ ID NO: 311389 - DNA, 52 bp, Artificial
  Synthetic oligonucleotide
accacttacagaagcgccgaagaagcagttcgaagtgaattcctgtgctaat

SEQ ID NO: 311390 - DNA, 55 bp, Artificial
  Synthetic oligonucleotide
accacttcacgcagtgctagccaaaggcagaggaaagtcacatttgacagactgc

SEQ ID NO: 311391 - DNA, 60 bp, Artificial
  Synthetic oligonucleotide
accacttcatccctgagcttggccctattagcgtcactacctgcgagctctatgaacttg

SEQ ID NO: 311392 - DNA, 59 bp, Artificial
  Synthetic oligonucleotide
accacttcattgacactctcagtggttactcaggtaacaagagagtcataagcccaggg

SEQ ID NO: 311393 - DNA, 51 bp, Artificial
  Synthetic oligonucleotide
accacttccgggggataactatactcacctaaccgcttccgtatccactcc

SEQ ID NO: 311394 - DNA, 60 bp, Artificial
  Synthetic oligonucleotide
accacttcgcaacgatgctaatgccatcctaaagcggattggcgtccatgggttggccaa

SEQ ID NO: 311395 - DNA, 55 bp, Artificial
  Synthetic oligonucleotide
accacttctcatgttccctaacttacttaaggcgaggttcgatcaaacagattcg

SEQ ID NO: 311396 - DNA, 56 bp, Artificial
  Synthetic oligonucleotide
accacttctgtgccttggaacaccagttggagtaataagtctaaagcagaaatttg

SEQ ID NO: 311397 - DNA, 54 bp, Artificial
  Synthetic oligonucleotide
accacttctgtgccttggaatgatacttggagtaataaaactctgaatacaatt

SEQ ID NO: 311398 - DNA, 57 bp, Artificial
  Synthetic oligonucleotide
accacttgataagaataactctggtgggaactctagtgggcattatagattaataaa

SEQ ID NO: 311399 - DNA, 58 bp, Artificial
  Synthetic oligonucleotide
accacttgatggggagagcaactctagaggagagtatagattaataaattgtaatacc

SEQ ID NO: 311400 - DNA, 60 bp, Artificial
  Synthetic oligonucleotide
accacttgttaaatcgcaaaactatggcatgtacttaccaatcacgggatcaatggatgc

SEQ ID NO: 311401 - DNA, 59 bp, Artificial
  Synthetic oligonucleotide
accacttttgtaatatgcattttaacattgacaatctgtgttgttagcacctctgcagt

SEQ ID NO: 311402 - DNA, 51 bp, Artificial
  Synthetic oligonucleotide
accagaaagccaggtatcggggggtacacagcatacaaaggggggaggcgg

SEQ ID NO: 311403 - DNA, 60 bp, Artificial
  Synthetic oligonucleotide
accagaaatacaaacatctgctactatagttgatttgagcactgaataaattctatatga

SEQ ID NO: 311404 - DNA, 58 bp, Artificial
  Synthetic oligonucleotide
accagaaccaagatctttccctaaatggttcaatgctgagtggatgtgggcaataaaa

SEQ ID NO: 311405 - DNA, 60 bp, Artificial
  Synthetic oligonucleotide
accagaaccctgacgtgccctacaatcccgcagcttgctatgataatctgctttttactg

SEQ ID NO: 311406 - DNA, 60 bp, Artificial
  Synthetic oligonucleotide
accagaacctagaagtttaacctgtgacgagcaattagacagctcagactcagaggatga

SEQ ID NO: 311407 - DNA, 60 bp, Artificial
  Synthetic oligonucleotide
accagaacgcttgtcaacagtggttttgagagactcacaaagtctgaagtattcagactc

SEQ ID NO: 311408 - DNA, 50 bp, Artificial
  Synthetic oligonucleotide
accagaacttaggaaagccacactacagggtcccgagcatgaattcgtca

SEQ ID NO: 311409 - DNA, 60 bp, Artificial
  Synthetic oligonucleotide
accagaactttctgtattcctatggacaagactgcaagaattgtttgcttctatgcaaaa

SEQ ID NO: 311410 - DNA, 60 bp, Artificial
  Synthetic oligonucleotide
accagaagacaacccgccaatgagagtgccttatgtcgggtcgcgcactgatgagcgtag

SEQ ID NO: 311411 - DNA, 58 bp, Artificial
  Synthetic oligonucleotide
accagaagatgtgtcattccaggggcggggagtcttcgagctctcggacgaaaaggca

SEQ ID NO: 311412 - DNA, 60 bp, Artificial
  Synthetic oligonucleotide
accagaaggattgatttctgacgtacatttcgtacatccgcaagagagagccttggctcc

SEQ ID NO: 311413 - DNA, 53 bp, Artificial
  Synthetic oligonucleotide
accagaaggcccgcgccccgcttttattatggcccctccactaatttatgtcc

SEQ ID NO: 311414 - DNA, 58 bp, Artificial
  Synthetic oligonucleotide
accagaagtgttcatgaatggctgtacacacttaagcctgtttttaaccaatcccaga

SEQ ID NO: 311415 - DNA, 51 bp, Artificial
  Synthetic oligonucleotide
accagaatacgcctaccgcctcggaattctcgcagatggtatcatgccttt

SEQ ID NO: 311416 - DNA, 55 bp, Artificial
  Synthetic oligonucleotide
accagaatagagttatcttctttcaatcgcacgtctatgatgaattccattccct

SEQ ID NO: 311417 - DNA, 60 bp, Artificial
  Synthetic oligonucleotide
accagaatggtgctgccgcacatgtgagctgcctccggtcacattccgtagtgggaccga

SEQ ID NO: 311418 - DNA, 59 bp, Artificial
  Synthetic oligonucleotide
accagaatgtagggacatatgtttctgtaggcacctcaacattaaataagaggtcaatc

SEQ ID NO: 311419 - DNA, 59 bp, Artificial
  Synthetic oligonucleotide
accagaatttaggtcgcttgcaagttggattcaaagtgagttcaacaaagcatgtgaac

SEQ ID NO: 311420 - DNA, 59 bp, Artificial
  Synthetic oligonucleotide
accagaatttggctcgccttttggattggcagctcgagaatcggggcacggcttacgca

SEQ ID NO: 311421 - DNA, 56 bp, Artificial
  Synthetic oligonucleotide
accagacaaagctgggtaaggataggtatattagtaattatgacttaatacactta

SEQ ID NO: 311422 - DNA, 57 bp, Artificial
  Synthetic oligonucleotide
accagacaaagctgggtaaggatagttcttataatgactatagactggcaaacttag

SEQ ID NO: 311423 - DNA, 60 bp, Artificial
  Synthetic oligonucleotide
accagacaagacctatcgacattcaagcgcaagcaaacaaacccatttgctcacgtgttc

SEQ ID NO: 311424 - DNA, 58 bp, Artificial
  Synthetic oligonucleotide
accagacagcgtgaggaacgggagtgaagaggcctccgggtgcgcaggtaagtgcacc

SEQ ID NO: 311425 - DNA, 60 bp, Artificial
  Synthetic oligonucleotide
accagacatcaacaatctacatacgcttctactgggtacactgagcctagtgtgtcctct

SEQ ID NO: 311426 - DNA, 60 bp, Artificial
  Synthetic oligonucleotide
accagaccaagccgttacagcgggcccggaatgatgctaatcgatatcacgatgagttca

SEQ ID NO: 311427 - DNA, 55 bp, Artificial
  Synthetic oligonucleotide
accagacgaattaccagatatagtcaatggaaccgttgaagattcagtggatcca

SEQ ID NO: 311428 - DNA, 52 bp, Artificial
  Synthetic oligonucleotide
accagacggttcaatgaacattcctgatgaggataatcctcctcacatgatc

SEQ ID NO: 311429 - DNA, 60 bp, Artificial
  Synthetic oligonucleotide
accagagaaccagggcactagtgcgcacaggaatggatcccagaatgtgttctctcatgc

SEQ ID NO: 311430 - DNA, 60 bp, Artificial
  Synthetic oligonucleotide
accagagaacgagggcacttgtgcgtactgggatggatcccagaatgtgctctctaatgc

SEQ ID NO: 311431 - DNA, 53 bp, Artificial
  Synthetic oligonucleotide
accagagacctcaccactgagggtgttgaacccaacccgggccctattatggt

SEQ ID NO: 311432 - DNA, 56 bp, Artificial
  Synthetic oligonucleotide
accagagactgagttcgacgtcaaagacagaccccccacgccgcgttccccaggca

SEQ ID NO: 311433 - DNA, 60 bp, Artificial
  Synthetic oligonucleotide
accagagagagctgccgaactccagaatcctggccaactctcagaatgcaggccataccc

SEQ ID NO: 311434 - DNA, 60 bp, Artificial
  Synthetic oligonucleotide
accagagataaagcaatacgatgattctatcatggatgttgagataccattcttccacat

SEQ ID NO: 311435 - DNA, 53 bp, Artificial
  Synthetic oligonucleotide
accagagccgcgggtctaagggactgcagcatgctggtctgcggtgacgactt

SEQ ID NO: 311436 - DNA, 58 bp, Artificial
  Synthetic oligonucleotide
accagagcgtcattacctatgagaacaaaacttgggtaaatcagacatatgttaacat

SEQ ID NO: 311437 - DNA, 50 bp, Artificial
  Synthetic oligonucleotide
accagaggaattaaacgaaaacgcaaaaattagacatgaccgttttcggt

SEQ ID NO: 311438 - DNA, 50 bp, Artificial
  Synthetic oligonucleotide
accagaggaccaaggtccaccaagagaaccttaccaggaatgggcattag

SEQ ID NO: 311439 - DNA, 60 bp, Artificial
  Synthetic oligonucleotide
accagaggagctctctcgacgcaggactcggcttgctgaaagtgcactcggcaagaggcg

SEQ ID NO: 311440 - DNA, 55 bp, Artificial
  Synthetic oligonucleotide
accagaggccctattgttggcactacgcgcctaaaccgtgcggtatcgtacccgc

SEQ ID NO: 311441 - DNA, 57 bp, Artificial
  Synthetic oligonucleotide
accagaggcgaagattttggagttaataccgtcaacatccccagtaacatgtgtgga

SEQ ID NO: 311442 - DNA, 58 bp, Artificial
  Synthetic oligonucleotide
accagagggagttattgctgttaattggccagttgggacaggaagaggtggcttgcca

SEQ ID NO: 311443 - DNA, 55 bp, Artificial
  Synthetic oligonucleotide
accagaggtaccacgattgcatgctcccactctggagccaacagcttttatcgga

SEQ ID NO: 311444 - DNA, 58 bp, Artificial
  Synthetic oligonucleotide
accagagtcatagaagcaaatagtgtaaatgatactgtaatatttaggagtgtgtttg

SEQ ID NO: 311445 - DNA, 60 bp, Artificial
  Synthetic oligonucleotide
accagagtgccgtactttgtgcgcgcccaagggctcattcgtgcatgcatgttggtgcgg

SEQ ID NO: 311446 - DNA, 56 bp, Artificial
  Synthetic oligonucleotide
accagagttaccattgctaagcgaagcggacctaagcgacctcataacgtggtaag

SEQ ID NO: 311447 - DNA, 59 bp, Artificial
  Synthetic oligonucleotide
accagagttcttctatcagaaagaagcacttttatctcaagtggaggtcagcctcatac

SEQ ID NO: 311448 - DNA, 56 bp, Artificial
  Synthetic oligonucleotide
accagataatcaactaatggtacaaccacctaaattacaaagttctgcagcggctt

SEQ ID NO: 311449 - DNA, 58 bp, Artificial
  Synthetic oligonucleotide
accagatacgagatacccaagagctgcatgcaactttacgctggtgacgacatgctac

SEQ ID NO: 311450 - DNA, 50 bp, Artificial
  Synthetic oligonucleotide
accagatagtatgcctgtagaccctggagtggggggtttggatattagtg

SEQ ID NO: 311451 - DNA, 60 bp, Artificial
  Synthetic oligonucleotide
accagatcctaataagtttggatttccagacacatcattttatgatccctgcctccagcg

SEQ ID NO: 311452 - DNA, 55 bp, Artificial
  Synthetic oligonucleotide
accagatctacgtcatcacagcctggagcgaccgacccatcagagtcacaacgga

SEQ ID NO: 311453 - DNA, 60 bp, Artificial
  Synthetic oligonucleotide
accagatgaacttacagtacatgttaaaagtgatgatccagatgtggttgcagctagctc

SEQ ID NO: 311454 - DNA, 60 bp, Artificial
  Synthetic oligonucleotide
accagatgaagctagaatattccatctactcagacgcgttgaacgcgaagcatggtcagg

SEQ ID NO: 311455 - DNA, 50 bp, Artificial
  Synthetic oligonucleotide
accagatggccgcgattttttctagtgggtcctacgcactaatgttggtc

SEQ ID NO: 311456 - DNA, 60 bp, Artificial
  Synthetic oligonucleotide
accagatgtacctgaaacttcagacgctttcctaagtgatttgagacatctatacatgtg

SEQ ID NO: 311457 - DNA, 54 bp, Artificial
  Synthetic oligonucleotide
accagattactaaaagtggtgcttcgagtaatctttctagtcttactaggattt

SEQ ID NO: 311458 - DNA, 60 bp, Artificial
  Synthetic oligonucleotide
accagattagggctcaaagatcctgctttgaagattagagaagaagcccgcattagtaca

SEQ ID NO: 311459 - DNA, 55 bp, Artificial
  Synthetic oligonucleotide
accagattggaaagacttgggtgcattcttggatacgattctgaacggaacggag

SEQ ID NO: 311460 - DNA, 57 bp, Artificial
  Synthetic oligonucleotide
accagcaaaccgaaaaccgtggatataccggagaaggagagctcctgatgtgccgcg

SEQ ID NO: 311461 - DNA, 59 bp, Artificial
  Synthetic oligonucleotide
accagcaaagagaagtaagtaaatctatccatgaccaaaagcctagtatccatttcata

SEQ ID NO: 311462 - DNA, 58 bp, Artificial
  Synthetic oligonucleotide
accagcaaaggggaatttacgatgttgggagtctatgataatgtggccatcttaccaa

SEQ ID NO: 311463 - DNA, 60 bp, Artificial
  Synthetic oligonucleotide
accagcaatgctgtccattgttgtcccggtcacaggcagagattctgacaaggtcttcaa

SEQ ID NO: 311464 - DNA, 55 bp, Artificial
  Synthetic oligonucleotide
accagcaccaaacaaatcctccccccccttagtataggtctcgatcttagagaca

SEQ ID NO: 311465 - DNA, 60 bp, Artificial
  Synthetic oligonucleotide
accagcagacggggtgggagcagtatctcgagatctaggaaaacatggagcaatcacaag

SEQ ID NO: 311466 - DNA, 55 bp, Artificial
  Synthetic oligonucleotide
accagcagagcccaaccacgtacaagagcgaattataggtagcaccggggaaaaa

SEQ ID NO: 311467 - DNA, 60 bp, Artificial
  Synthetic oligonucleotide
accagcagatataatcattcccgcggccgcttcgaaagtatgccgccgtctcaacttcga

SEQ ID NO: 311468 - DNA, 55 bp, Artificial
  Synthetic oligonucleotide
accagcagattgaagtaagtcatttacatgcatcattaatgtgtcatgccttgac

SEQ ID NO: 311469 - DNA, 55 bp, Artificial
  Synthetic oligonucleotide
accagcaggcccggggacaagcctaatggtgactgttccaatccaataaccggaa

SEQ ID NO: 311470 - DNA, 60 bp, Artificial
  Synthetic oligonucleotide
accagcatagagtatttcgattgcgcttgccagaccctaacagatttgctctagcagata

SEQ ID NO: 311471 - DNA, 60 bp, Artificial
  Synthetic oligonucleotide
accagcatagtgtgctaccccatggatcatgtgttccaaacgagagattggtataccggt

SEQ ID NO: 311472 - DNA, 60 bp, Artificial
  Synthetic oligonucleotide
accagcatgggtttgaggacgacgatagagaagtgctgatgtggaagtttgacagtgccc

SEQ ID NO: 311473 - DNA, 59 bp, Artificial
  Synthetic oligonucleotide
accagcattaagcatcaatgaactgagtaaccttgcaaaaggagaaaaggctaatgtac

SEQ ID NO: 311474 - DNA, 58 bp, Artificial
  Synthetic oligonucleotide
accagccatggttatgcctttccagctgaccgtgactgactttggtgtcaaagaaacc

SEQ ID NO: 311475 - DNA, 59 bp, Artificial
  Synthetic oligonucleotide
accagcccatcatccgagatgatgtttacgtcggtcgtcgtaacgcctttgtcatcgta

SEQ ID NO: 311476 - DNA, 53 bp, Artificial
  Synthetic oligonucleotide
accagccccccaaccgatcccagggatattcgggaagttgagtgggattcgga

SEQ ID NO: 311477 - DNA, 55 bp, Artificial
  Synthetic oligonucleotide
accagccccctaatgggggcgacactccaccatgaatcactcccctgtgaggaac

SEQ ID NO: 311478 - DNA, 55 bp, Artificial
  Synthetic oligonucleotide
accagcccgatatggccaccgttaagaacatgcatagggatcggtaccaggtgtt

SEQ ID NO: 311479 - DNA, 54 bp, Artificial
  Synthetic oligonucleotide
accagccctctaatttgggcttacaatcaactaataacatctggcaaagtaatg

SEQ ID NO: 311480 - DNA, 55 bp, Artificial
  Synthetic oligonucleotide
accagccgatgagttcggggcggcactcttgaggaaaaatgtccatacgtgctat

SEQ ID NO: 311481 - DNA, 55 bp, Artificial
  Synthetic oligonucleotide
accagcgaatgctctttgaaactaacaagcacattctagttttcagagcggatcg

SEQ ID NO: 311482 - DNA, 55 bp, Artificial
  Synthetic oligonucleotide
accagcgaatgctctttgagacttacaaccacattctagtcttcagagccaaccg

SEQ ID NO: 311483 - DNA, 55 bp, Artificial
  Synthetic oligonucleotide
accagcgaatgctctttgagacttataaccatattttgatcttcaaagcgaatcg

SEQ ID NO: 311484 - DNA, 60 bp, Artificial
  Synthetic oligonucleotide
accagcgagtctttgatcagagagaccgaccccgacacctttacatccatgcaggcaaca

SEQ ID NO: 311485 - DNA, 60 bp, Artificial
  Synthetic oligonucleotide
accagcgagtgtcgggatcactatagagggggtcatgagtcagaagaaactcttgagcat

SEQ ID NO: 311486 - DNA, 60 bp, Artificial
  Synthetic oligonucleotide
accagcgatattgacattcgagcgatggttcgagactcggatcacatctggccagcaagg

SEQ ID NO: 311487 - DNA, 55 bp, Artificial
  Synthetic oligonucleotide
accagcgcatgcgcggttctttctccgtcgtggttcgggtcgagcactctttagt

SEQ ID NO: 311488 - DNA, 54 bp, Artificial
  Synthetic oligonucleotide
accagcgcgtcagccttacggttttttccttgagactgaggaggtttatcaacc

SEQ ID NO: 311489 - DNA, 60 bp, Artificial
  Synthetic oligonucleotide
accagcggagccagtaccgttggcttcagagagagaactctcacagggcacaagatgtgc

SEQ ID NO: 311490 - DNA, 57 bp, Artificial
  Synthetic oligonucleotide
accagcggttgaaccctatgcaccaactcttgagacatttccaaaaagatgcaaaag

SEQ ID NO: 311491 - DNA, 60 bp, Artificial
  Synthetic oligonucleotide
accagcgtagctattgggtagtgcaggcatacttgttacgatgttgtccactgttgatac

SEQ ID NO: 311492 - DNA, 55 bp, Artificial
  Synthetic oligonucleotide
accagctacgtccaacatgtcaaggagttcacccaacgctccttagtggtcgatc

SEQ ID NO: 311493 - DNA, 55 bp, Artificial
  Synthetic oligonucleotide
accagctgctatgacccagtatgtacagcaattgttccctgttggtggaccatac

SEQ ID NO: 311494 - DNA, 50 bp, Artificial
  Synthetic oligonucleotide
accagctggcatgttacactgtgcttgctgtgttgggctatgatatcaat

SEQ ID NO: 311495 - DNA, 60 bp, Artificial
  Synthetic oligonucleotide
accagctgtcaaaccatcattcgattatctgataagtaaatcatctacatctaaagatct

SEQ ID NO: 311496 - DNA, 55 bp, Artificial
  Synthetic oligonucleotide
accaggaagaacataaaaacttgaagacagggaaatatgccaggcaaaaggccac

SEQ ID NO: 311497 - DNA, 56 bp, Artificial
  Synthetic oligonucleotide
accaggacatcattaacaagtgtgagcaatttgtgggccctcttacggttaacgaa

SEQ ID NO: 311498 - DNA, 57 bp, Artificial
  Synthetic oligonucleotide
accaggactatgtgagtgaatacaagcgtattcatgatggggctcgccccaaggtcc

SEQ ID NO: 311499 - DNA, 55 bp, Artificial
  Synthetic oligonucleotide
accaggagaagtagcggagaacccacctccagaggaccccttctgcgaacagaaa

SEQ ID NO: 311500 - DNA, 55 bp, Artificial
  Synthetic oligonucleotide
accaggagattaattcagctgatagtgagtggaagagacgaacagtcgatagccg

SEQ ID NO: 311501 - DNA, 60 bp, Artificial
  Synthetic oligonucleotide
accaggagcccttaaagatatgagcagccaataattgcactgataattataggtttaata

SEQ ID NO: 311502 - DNA, 60 bp, Artificial
  Synthetic oligonucleotide
accaggaggtgtcctctcaactctctcattttgctggtgtcttggtgtcctatatatacc

SEQ ID NO: 311503 - DNA, 60 bp, Artificial
  Synthetic oligonucleotide
accaggagtggtagcccgataactactgatggcaacactatgctcaatgcgtttgtggta

SEQ ID NO: 311504 - DNA, 55 bp, Artificial
  Synthetic oligonucleotide
accaggatcatcctcaaccttaggcggggtgcatcatgtcaactgtgacgtgggg

SEQ ID NO: 311505 - DNA, 60 bp, Artificial
  Synthetic oligonucleotide
accaggatcccagcacctctaatgctgatcattcggattatgctgatattgagctgtatc

SEQ ID NO: 311506 - DNA, 50 bp, Artificial
  Synthetic oligonucleotide
accaggatcccagtacctctgacactgatcacccgaaccatgctgatatt

SEQ ID NO: 311507 - DNA, 56 bp, Artificial
  Synthetic oligonucleotide
accaggatctagacctagccaggtaccacggctttaagctaactctttacagacac

SEQ ID NO: 311508 - DNA, 60 bp, Artificial
  Synthetic oligonucleotide
accaggatgatgattggcagattctgtgctcaaatgcactcaaacaacggaccgcaaatt

SEQ ID NO: 311509 - DNA, 60 bp, Artificial
  Synthetic oligonucleotide
accaggatgtatgccggagtccatggagctagcttgctccataggctcagacccaagatc

SEQ ID NO: 311510 - DNA, 57 bp, Artificial
  Synthetic oligonucleotide
accaggattagtattagcttcagtagaaaatggaaagtgtgtaggttgagcttccat

SEQ ID NO: 311511 - DNA, 60 bp, Artificial
  Synthetic oligonucleotide
accaggcaacgttcagagacgtatcacctgctcgacaggctccgtttctccacacctata

SEQ ID NO: 311512 - DNA, 50 bp, Artificial
  Synthetic oligonucleotide
accaggcataccaaaggacatgacctaccgtagactcatctctatgatgg

SEQ ID NO: 311513 - DNA, 59 bp, Artificial
  Synthetic oligonucleotide
accaggcatgaattggactgagctaattactaattattcaccatctagggaagataatt

SEQ ID NO: 311514 - DNA, 60 bp, Artificial
  Synthetic oligonucleotide
accaggcatgcagacgtcgttccagctcgtagacggggcgacactcgtgcctccctgctc

SEQ ID NO: 311515 - DNA, 57 bp, Artificial
  Synthetic oligonucleotide
accaggccagatgagagaaccaaggggaagtgacatagcaggaactactagtaccct

SEQ ID NO: 311516 - DNA, 52 bp, Artificial
  Synthetic oligonucleotide
accaggcccaattgagttggtgaggaaagtttccgttacttcccaaagtgga

SEQ ID NO: 311517 - DNA, 60 bp, Artificial
  Synthetic oligonucleotide
accaggccccgatggctgcgactcgctgagcggaatccgacgtgccttatcgcgtttgtg

SEQ ID NO: 311518 - DNA, 60 bp, Artificial
  Synthetic oligonucleotide
accaggcgaaacacatgatgaccagcaccatgtcagcagaggattacctgacaacagaag

SEQ ID NO: 311519 - DNA, 54 bp, Artificial
  Synthetic oligonucleotide
accaggcgaaagttagcgggtgcgggctatgtagggagtggaaggagtacgtaa

SEQ ID NO: 311520 - DNA, 59 bp, Artificial
  Synthetic oligonucleotide
accaggcgctacggcaatttaggcgtcgagcgaaagactcactctcaaaccacaatgcg

SEQ ID NO: 311521 - DNA, 55 bp, Artificial
  Synthetic oligonucleotide
accaggcgtgtacgagccagcctaccttggaggtcgtgaccctagggtgaaaggc

SEQ ID NO: 311522 - DNA, 56 bp, Artificial
  Synthetic oligonucleotide
accaggcgtttctctcaccgtgtccaggctcgactcgtggggtccctgccattccc

SEQ ID NO: 311523 - DNA, 58 bp, Artificial
  Synthetic oligonucleotide
accaggctattcaccataagacaagaaatggcaagcagaggactttgggattcctttc

SEQ ID NO: 311524 - DNA, 51 bp, Artificial
  Synthetic oligonucleotide
accaggcttggggaacctctcgttcggacccattgggttcggttttagcat

SEQ ID NO: 311525 - DNA, 58 bp, Artificial
  Synthetic oligonucleotide
accagggaaaatgcacctactctgttccgtcttcaaatatcccatggcctcatggtac

SEQ ID NO: 311526 - DNA, 52 bp, Artificial
  Synthetic oligonucleotide
accagggacgtttatgcaacccattgaacccatttgtcagccataaagagat

SEQ ID NO: 311527 - DNA, 60 bp, Artificial
  Synthetic oligonucleotide
accagggcagactatgtaatcccctgaatccatttgtcagccataaagagattgagtccg

SEQ ID NO: 311528 - DNA, 58 bp, Artificial
  Synthetic oligonucleotide
accagggcaggctgtgtaaccctctgaatccgtttgtcagtcataaggaaattgaatc

SEQ ID NO: 311529 - DNA, 56 bp, Artificial
  Synthetic oligonucleotide
accagggcatgaacatttaccctgaggacgtgccacccctagcgcgacaaaaacta

SEQ ID NO: 311530 - DNA, 52 bp, Artificial
  Synthetic oligonucleotide
accagggcgcaagtgtaaatgctacctttgcggcatagaaggccactacgca

SEQ ID NO: 311531 - DNA, 55 bp, Artificial
  Synthetic oligonucleotide
accagggctcaacccttacctcgcccacctctcagccatgtacaccggctgggtt

SEQ ID NO: 311532 - DNA, 57 bp, Artificial
  Synthetic oligonucleotide
accaggggaccaactacgatatgtagatgggcctgtcgagtcttgcaagtggtgtgg

SEQ ID NO: 311533 - DNA, 56 bp, Artificial
  Synthetic oligonucleotide
accagggggagctctctctaaaacctaatattgctggtgtcctggtgtcccattta

SEQ ID NO: 311534 - DNA, 51 bp, Artificial
  Synthetic oligonucleotide
accagggttgactcggaaaactaaccgggtcatccggttccctagtgcgta

SEQ ID NO: 311535 - DNA, 50 bp, Artificial
  Synthetic oligonucleotide
accagggtttattgttgacctcctcagcgcatccaaagacccaaaagtca

SEQ ID NO: 311536 - DNA, 55 bp, Artificial
  Synthetic oligonucleotide
accaggtaacacaaacacatgaacaaccctgttcgaacaacacaacaaattacta

SEQ ID NO: 311537 - DNA, 51 bp, Artificial
  Synthetic oligonucleotide
accaggtaacggttcgtgacttagttaagttcggtggctcacctttcctta

SEQ ID NO: 311538 - DNA, 60 bp, Artificial
  Synthetic oligonucleotide
accaggtagggagtgtgatgctcgtcctatttttccagtcactatgacagtgtgcgaaca

SEQ ID NO: 311539 - DNA, 57 bp, Artificial
  Synthetic oligonucleotide
accaggtaggtacccttgaatgtaaagacgatgcgacgccagagccattcttcgttg

SEQ ID NO: 311540 - DNA, 57 bp, Artificial
  Synthetic oligonucleotide
accaggtcaggttggtaggtattacaatccatttaatatcgatccgctgactaagaa

SEQ ID NO: 311541 - DNA, 59 bp, Artificial
  Synthetic oligonucleotide
accaggtcgaagaatctgttattctggcacttgtatttcccttcgaactgcataagcac

SEQ ID NO: 311542 - DNA, 56 bp, Artificial
  Synthetic oligonucleotide
accaggtcggttccgcacaatagtctgtggcttattccctacacaaattcaagtcc

SEQ ID NO: 311543 - DNA, 58 bp, Artificial
  Synthetic oligonucleotide
accaggtgattgtggtgggaaattattatgtaaacatggtgttattggcataataaca

SEQ ID NO: 311544 - DNA, 60 bp, Artificial
  Synthetic oligonucleotide
accaggtggagctcaccccaaagaccgcaaggaggctatgcttggggtacatgtcatatg

SEQ ID NO: 311545 - DNA, 55 bp, Artificial
  Synthetic oligonucleotide
accaggttgagggggaggttcaagtggtgtccaccgcaacacaatctttcctggc

SEQ ID NO: 311546 - DNA, 56 bp, Artificial
  Synthetic oligonucleotide
accaggttttaaggaggttccaggcaacggtgactggtggacaatatgcagcgaag

SEQ ID NO: 311547 - DNA, 59 bp, Artificial
  Synthetic oligonucleotide
accagtacaagatattggggctcgggtgaaagatccatttaccagacagcctgctgcgt

SEQ ID NO: 311548 - DNA, 55 bp, Artificial
  Synthetic oligonucleotide
accagtacaatgtcctcccgcaagggtggaaaggctcaccagccatatttcagag

SEQ ID NO: 311549 - DNA, 57 bp, Artificial
  Synthetic oligonucleotide
accagtacatggtgtatattatcaacctaacaaagacttatgggttaatattcagaa

SEQ ID NO: 311550 - DNA, 55 bp, Artificial
  Synthetic oligonucleotide
accagtaccccgctttgactgctgagattttcaatgtttacagcttcagggacca

SEQ ID NO: 311551 - DNA, 60 bp, Artificial
  Synthetic oligonucleotide
accagtagcaccttgttgaggcctcctcatcccaaccatgtgcaggatctgtgatctttg

SEQ ID NO: 311552 - DNA, 58 bp, Artificial
  Synthetic oligonucleotide
accagtatcggtacggacatatatatgtccgtccgatgtactgattaagtcattttct

SEQ ID NO: 311553 - DNA, 60 bp, Artificial
  Synthetic oligonucleotide
accagtattgggagaacatatgcaatttgaggtccacagtgtacagactaatctattgcc

SEQ ID NO: 311554 - DNA, 55 bp, Artificial
  Synthetic oligonucleotide
accagtcaattcccgtgtttcatgtcaatatataaactgtcaggttcccgagcgg

SEQ ID NO: 311555 - DNA, 55 bp, Artificial
  Synthetic oligonucleotide
accagtcaccattatgtcagggttggtcttccattcgcaacccataaatgagaga

SEQ ID NO: 311556 - DNA, 55 bp, Artificial
  Synthetic oligonucleotide
accagtcagctcattacctcaacaatgacgggaaaatggcttcagtcaagtgccc

SEQ ID NO: 311557 - DNA, 60 bp, Artificial
  Synthetic oligonucleotide
accagtcaggtggggcaacaatcacactgctctcagccaacaccgatgccaccacaagcc

SEQ ID NO: 311558 - DNA, 54 bp, Artificial
  Synthetic oligonucleotide
accagtctatggccgtattccctagggaaggaatctccaaaccccggcgcatct

SEQ ID NO: 311559 - DNA, 54 bp, Artificial
  Synthetic oligonucleotide
accagtgaccggtcaacccgcctacccgacgactggcccgccatacggagacag

SEQ ID NO: 311560 - DNA, 57 bp, Artificial
  Synthetic oligonucleotide
accagtgagagccgtggcccatggagaacccaatgttaacgtggcaagtctaataac

SEQ ID NO: 311561 - DNA, 53 bp, Artificial
  Synthetic oligonucleotide
accagtgagtcttatgactccaatttcacgagattgggtcataaggaggcagt

SEQ ID NO: 311562 - DNA, 57 bp, Artificial
  Synthetic oligonucleotide
accagtgccaatcccttttgcagcagcccaacagaggggaccaagaaagccaattaa

SEQ ID NO: 311563 - DNA, 52 bp, Artificial
  Synthetic oligonucleotide
accagtgccggtcacttcgtggactgccacactggcaacgtaccgcagcgtg

SEQ ID NO: 311564 - DNA, 52 bp, Artificial
  Synthetic oligonucleotide
accagtgcggttatgcacacgcacaaattcaagatgcctaagaagataggtg

SEQ ID NO: 311565 - DNA, 54 bp, Artificial
  Synthetic oligonucleotide
accagtggacagtaacaggacccgggactgtgactctacaagtcaaaaccccta

SEQ ID NO: 311566 - DNA, 53 bp, Artificial
  Synthetic oligonucleotide
accagtggatgaacaggctgatagcctttgcatcacgaggcaaccacgtctcc

SEQ ID NO: 311567 - DNA, 60 bp, Artificial
  Synthetic oligonucleotide
accagtggttatagatgtttgaaatctagaaatggtatcaatgctagattcgagaaggcg

SEQ ID NO: 311568 - DNA, 60 bp, Artificial
  Synthetic oligonucleotide
accagtgtcaatcagttcgaggagcatagtgcacactagagcacaagcgaatgaggatat

SEQ ID NO: 311569 - DNA, 60 bp, Artificial
  Synthetic oligonucleotide
accagtgtcacaacacaattacagaccaggctatcatacacaaacggcaggaccctggca

SEQ ID NO: 311570 - DNA, 60 bp, Artificial
  Synthetic oligonucleotide
accagtgttaaatcgggctggagaggagagatgcgtagagggacggatcaattctctgag

SEQ ID NO: 311571 - DNA, 58 bp, Artificial
  Synthetic oligonucleotide
accagttaagcataacgatctaggttcattagactaatggatagtgaacgtaagcaaa

SEQ ID NO: 311572 - DNA, 58 bp, Artificial
  Synthetic oligonucleotide
accagttacggaatcttgatagctcgaaagggagataagatcactccggattctcttg

SEQ ID NO: 311573 - DNA, 60 bp, Artificial
  Synthetic oligonucleotide
accagttatacttatatgctatctgatggtatacatgtagcgaatgctagtggtgtattg

SEQ ID NO: 311574 - DNA, 60 bp, Artificial
  Synthetic oligonucleotide
accagttcgtgcttggcgtcgagcacccttctgtctccttccacatcgaccacactcctg

SEQ ID NO: 311575 - DNA, 56 bp, Artificial
  Synthetic oligonucleotide
accagttggaccctgccttcggagccaactcaaacaatccagattgggacttcaac

SEQ ID NO: 311576 - DNA, 56 bp, Artificial
  Synthetic oligonucleotide
accagttggagacctcgctgttccaagcccgcaagtacgctgggttcgaacggctg

SEQ ID NO: 311577 - DNA, 60 bp, Artificial
  Synthetic oligonucleotide
accagttggtgcgtggccagtgatgagtggaggtgcagtgtctttacattttgcaggagt

SEQ ID NO: 311578 - DNA, 57 bp, Artificial
  Synthetic oligonucleotide
accagttgtttcttaaggtacaacaggtggtgtatactaggtatccatcaagagata

SEQ ID NO: 311579 - DNA, 55 bp, Artificial
  Synthetic oligonucleotide
accagtttgagtatgaggggctcctgcgccgtagcgccctagctaccaaggaccg

SEQ ID NO: 311580 - DNA, 54 bp, Artificial
  Synthetic oligonucleotide
accataaactgtaatgtcgttggttgcatttaaaataattccaggagaaatggt

SEQ ID NO: 311581 - DNA, 56 bp, Artificial
  Synthetic oligonucleotide
accataaattacgggcgtggtatgagtggagcgtaagacctgaatataaaccgcga

SEQ ID NO: 311582 - DNA, 57 bp, Artificial
  Synthetic oligonucleotide
accataaattgatcaattgccacccccagttcaaagttaagcttgtcaaagggcata

SEQ ID NO: 311583 - DNA, 60 bp, Artificial
  Synthetic oligonucleotide
accataacatcacccacacagtgcagtgccaaaaccaggccctctgtgtgcaactggtgt

SEQ ID NO: 311584 - DNA, 60 bp, Artificial
  Synthetic oligonucleotide
accataacctatatggtaggatatgcattaactaatagtcatcatagcatagattatcaa

SEQ ID NO: 311585 - DNA, 52 bp, Artificial
  Synthetic oligonucleotide
accataactagtctgcttagaagactccacaattggattactgaggactgcc

SEQ ID NO: 311586 - DNA, 58 bp, Artificial
  Synthetic oligonucleotide
accataagcaaagactcaaggtcgggatacgaaatgctgaaagtcccaaatgcggaga

SEQ ID NO: 311587 - DNA, 60 bp, Artificial
  Synthetic oligonucleotide
accataagcaaagattcaagatcagggtatgagatgctaaaggttccgaatgcggaaaca

SEQ ID NO: 311588 - DNA, 57 bp, Artificial
  Synthetic oligonucleotide
accataagggcagtgtgccatcgtggtttttttaggataagaccacactgtctcgtg

SEQ ID NO: 311589 - DNA, 60 bp, Artificial
  Synthetic oligonucleotide
accataagtccaccaaggcgcacacacagcgtgtaactttggatgacatgcaggcaggtc

SEQ ID NO: 311590 - DNA, 59 bp, Artificial
  Synthetic oligonucleotide
accataatagtacagcttaatgcatctatagtaattaattgtacaaggccctacaaata

SEQ ID NO: 311591 - DNA, 58 bp, Artificial
  Synthetic oligonucleotide
accatacataccccaaattgtgactgtcaatgcaacagttaaatgtctaggggaagta

SEQ ID NO: 311592 - DNA, 56 bp, Artificial
  Synthetic oligonucleotide
accatacatgcaatcattctcctttgttctcttagaaacaactacaccgtctctgt

SEQ ID NO: 311593 - DNA, 60 bp, Artificial
  Synthetic oligonucleotide
accatacatgccacgatatggtcttcagcgcaatttaaccgacatgagcttagctcgata

SEQ ID NO: 311594 - DNA, 52 bp, Artificial
  Synthetic oligonucleotide
accatacatttgtacagaaggagaagaccaaattaccgtttgggggttccac

SEQ ID NO: 311595 - DNA, 60 bp, Artificial
  Synthetic oligonucleotide
accataccagacatagtatctgaatcgtctgaaaagtttataccgatgcgtacatacagg

SEQ ID NO: 311596 - DNA, 58 bp, Artificial
  Synthetic oligonucleotide
accataccagatgtccagcacaattcgtgtgtacttcaaacctaagcacataagggtt

SEQ ID NO: 311597 - DNA, 60 bp, Artificial
  Synthetic oligonucleotide
accatactaaatgttacagtcacttccaaacatcccactagtgacatcttcaactatgtc

SEQ ID NO: 311598 - DNA, 60 bp, Artificial
  Synthetic oligonucleotide
accatactaatgtataccagtaactcaattcgtgaacgagcttacatcattctacgataa

SEQ ID NO: 311599 - DNA, 60 bp, Artificial
  Synthetic oligonucleotide
accatactcagcagcctcactgtgacccaactcctgaggcgactgcaccagtggataagc

SEQ ID NO: 311600 - DNA, 51 bp, Artificial
  Synthetic oligonucleotide
accatactcagctccctgaccataactagcctcctccgtagactccatgag

SEQ ID NO: 311601 - DNA, 53 bp, Artificial
  Synthetic oligonucleotide
accatactccaaccactaccctacctccatttggtaaattaacagttatgccg

SEQ ID NO: 311602 - DNA, 57 bp, Artificial
  Synthetic oligonucleotide
accatactctagacttttctttaaattagctagtatagtgtctattaagctgtcact

SEQ ID NO: 311603 - DNA, 60 bp, Artificial
  Synthetic oligonucleotide
accatactgaaaacgccttgttattgtatatggcatgtacgcatgcctctaatccagtgt

SEQ ID NO: 311604 - DNA, 60 bp, Artificial
  Synthetic oligonucleotide
accatactgcaactacactaaattttggtatgtcaatgatacaatcacaggaaaacatag

SEQ ID NO: 311605 - DNA, 59 bp, Artificial
  Synthetic oligonucleotide
accatacttgtcccaaaccttgtcttcaaactgcctagcctgttctgaagtcagcttca

SEQ ID NO: 311606 - DNA, 55 bp, Artificial
  Synthetic oligonucleotide
accatagagttagttcaggcggaagcgagagagctgttctcatacgaatcaaagg

SEQ ID NO: 311607 - DNA, 52 bp, Artificial
  Synthetic oligonucleotide
accatagcataaccggagcaagagaagctatagccgggatgttggacaccac

SEQ ID NO: 311608 - DNA, 60 bp, Artificial
  Synthetic oligonucleotide
accatagctgaacctggagtccctctgatagaagaccagatcagagagtacagaaactct

SEQ ID NO: 311609 - DNA, 60 bp, Artificial
  Synthetic oligonucleotide
accatagctggtctcgagaacttggataggaatctgaggtggcaggaagtcagtcggaaa

SEQ ID NO: 311610 - DNA, 60 bp, Artificial
  Synthetic oligonucleotide
accataggtctcacaggcagatggcgactaccaccaacccactaattaggcatgagaaca

SEQ ID NO: 311611 - DNA, 56 bp, Artificial
  Synthetic oligonucleotide
accatagtgcatagtgctttcccgttcactttaatcgaacggtttgctcattggtt

SEQ ID NO: 311612 - DNA, 54 bp, Artificial
  Synthetic oligonucleotide
accatagtggaattaggagccaaattagacgccctatcccagaaggttaacgaa

SEQ ID NO: 311613 - DNA, 60 bp, Artificial
  Synthetic oligonucleotide
accatatagaccgcaatacacctgtgtgcttcgctggagatgacatgtactctcccgggg

SEQ ID NO: 311614 - DNA, 51 bp, Artificial
  Synthetic oligonucleotide
accatatagctattggattggccatccggtgtgcaatagagctgttatata

SEQ ID NO: 311615 - DNA, 55 bp, Artificial
  Synthetic oligonucleotide
accatataggtctctaatccgattcccaataggaacagccccagtactggggaac

SEQ ID NO: 311616 - DNA, 58 bp, Artificial
  Synthetic oligonucleotide
accatatcttcctctcaaggcttgaccttggacaaacccgcccacatctatctcgacc

SEQ ID NO: 311617 - DNA, 58 bp, Artificial
  Synthetic oligonucleotide
accatatgagctaataaggtacggggcagtccttgtgtgtgtgcctacgagagttttg

SEQ ID NO: 311618 - DNA, 60 bp, Artificial
  Synthetic oligonucleotide
accatatgcgccaagattaacacaaagagcagttataccaacagctgatggcttgaatac

SEQ ID NO: 311619 - DNA, 60 bp, Artificial
  Synthetic oligonucleotide
accatatgctcacagcgattggaaaatgcgggtcagcatgttacgatgacatccccgttt

SEQ ID NO: 311620 - DNA, 55 bp, Artificial
  Synthetic oligonucleotide
accatattagcaataacaacatagctattccactgtgtaatattctttgtgatag

SEQ ID NO: 311621 - DNA, 56 bp, Artificial
  Synthetic oligonucleotide
accatattcaactgtgtgccgtttaatctgccccgagtgtggagtcttgcgcgttg

SEQ ID NO: 311622 - DNA, 54 bp, Artificial
  Synthetic oligonucleotide
accatattcagatgcatggatgttgtatacttgtctcaatcacacttataatgc

SEQ ID NO: 311623 - DNA, 60 bp, Artificial
  Synthetic oligonucleotide
accatattgtgctttgcctcagcttgtaacgatttctcagtgcgcatgctcagagacaca

SEQ ID NO: 311624 - DNA, 60 bp, Artificial
  Synthetic oligonucleotide
accatatttgtcagaagttgcactaagaagattatacacatcgcaaatagccactgacaa

SEQ ID NO: 311625 - DNA, 60 bp, Artificial
  Synthetic oligonucleotide
accatcaaagacagaacaccctatagatcactgattcgatttccaataggaacagcccca

SEQ ID NO: 311626 - DNA, 55 bp, Artificial
  Synthetic oligonucleotide
accatcaaagcaagaccccatgttgaagttcccatagggtcgaaaactgtttgga

SEQ ID NO: 311627 - DNA, 60 bp, Artificial
  Synthetic oligonucleotide
accatcaaccccgaaaaactgcatatatgaagtcacctgtctatgaggactcaccctatg

SEQ ID NO: 311628 - DNA, 60 bp, Artificial
  Synthetic oligonucleotide
accatcaagaggccgctaagtatgagaatcatacggaaaatgctttgctgttgtatatgg

SEQ ID NO: 311629 - DNA, 60 bp, Artificial
  Synthetic oligonucleotide
accatcaagtatcattttggcatccctcagaacatcggtcttcaccggtgttgtgaactc

SEQ ID NO: 311630 - DNA, 60 bp, Artificial
  Synthetic oligonucleotide
accatcaatagatgctaccatggaggcagtaccaggcacgaccaacagtgtgctggaaac

SEQ ID NO: 311631 - DNA, 60 bp, Artificial
  Synthetic oligonucleotide
accatcaatgaggaagcttcagactgggatagattgcatccaccgcaggcagggcctatt

SEQ ID NO: 311632 - DNA, 51 bp, Artificial
  Synthetic oligonucleotide
accatcactgggtctgcggtgcaaatcactaactgccctttagagcacata

SEQ ID NO: 311633 - DNA, 52 bp, Artificial
  Synthetic oligonucleotide
accatcagctacccggacttgtatttcggtacagacacatgtggtgacccag

SEQ ID NO: 311634 - DNA, 58 bp, Artificial
  Synthetic oligonucleotide
accatcaggaagcctgaaattggcgatagggctcaggaatgttccacaaattcaaaac

SEQ ID NO: 311635 - DNA, 52 bp, Artificial
  Synthetic oligonucleotide
accatcagttaaacgactatatattaaccgattgtccgtgttacgaatcgta

SEQ ID NO: 311636 - DNA, 60 bp, Artificial
  Synthetic oligonucleotide
accatcatggcggcattcacagggaacactgaaggcagaacatccgacatgaggactgag

SEQ ID NO: 311637 - DNA, 52 bp, Artificial
  Synthetic oligonucleotide
accatcatgggcggacgttaggaaagacctaatatcgtatggaggaggctgg

SEQ ID NO: 311638 - DNA, 60 bp, Artificial
  Synthetic oligonucleotide
accatcatgtcatctagcatgagttgggactgtattccccataatggtccaaaccatcct

SEQ ID NO: 311639 - DNA, 55 bp, Artificial
  Synthetic oligonucleotide
accatcattgatgtcacaaacccactggtggaatcgcacaaacgcgcgcggcccg

SEQ ID NO: 311640 - DNA, 55 bp, Artificial
  Synthetic oligonucleotide
accatcattttccatatcacgaactagattaagcggtatctatggattaccagcg

SEQ ID NO: 311641 - DNA, 60 bp, Artificial
  Synthetic oligonucleotide
accatccaaaacaaattatcatctacattcactagaggtgcacagaagctcttatccgaa

SEQ ID NO: 311642 - DNA, 60 bp, Artificial
  Synthetic oligonucleotide
accatccacaccatggaccctaatataattgaaagctggcatctaaatgtcaatccccca

SEQ ID NO: 311643 - DNA, 59 bp, Artificial
  Synthetic oligonucleotide
accatccacagtgtcagacccagttaccagacttggaccctcgctttccagacattaca

SEQ ID NO: 311644 - DNA, 58 bp, Artificial
  Synthetic oligonucleotide
accatcccaaccacaatgactggtaaacaatgcttagttccatgtttctggctggaaa

SEQ ID NO: 311645 - DNA, 54 bp, Artificial
  Synthetic oligonucleotide
accatcccacttttcacccggcaaaagacttttaggcagccaaccttcagccaa

SEQ ID NO: 311646 - DNA, 59 bp, Artificial
  Synthetic oligonucleotide
accatccctgcagaggtcctctatctggcccaacgacgagaggtggacaaccgtgtcta

SEQ ID NO: 311647 - DNA, 55 bp, Artificial
  Synthetic oligonucleotide
accatccgctggttatagaacgtgtgcgggccattggatgccattttgtgctact

SEQ ID NO: 311648 - DNA, 52 bp, Artificial
  Synthetic oligonucleotide
accatccggcgcccgggtaatgaatcatgcaatcgtcatggtccttgggcgg

SEQ ID NO: 311649 - DNA, 55 bp, Artificial
  Synthetic oligonucleotide
accatcctaactgtcgtgactgtagtgatgacaggtgtttgatacattgtgcaaa

SEQ ID NO: 311650 - DNA, 57 bp, Artificial
  Synthetic oligonucleotide
accatcctatgggcttgtctatgtgcctatgggttctaccgtactttccgcctagtc

SEQ ID NO: 311651 - DNA, 57 bp, Artificial
  Synthetic oligonucleotide
accatcctcctctcccacttgccgtaccccacgtggcagaaatctatgtccttatcg

SEQ ID NO: 311652 - DNA, 58 bp, Artificial
  Synthetic oligonucleotide
accatcctcggagcccaccttaatgcctttagcggtggtgtaattgcacagtatcgtg

SEQ ID NO: 311653 - DNA, 57 bp, Artificial
  Synthetic oligonucleotide
accatcctggaagctgacaagggaatgcgcgtcgctgacacccccggttcctccacc

SEQ ID NO: 311654 - DNA, 59 bp, Artificial
  Synthetic oligonucleotide
accatcgaggagcacgtgttattctagacctctgttccagctaagatagcatgtgccgt

SEQ ID NO: 311655 - DNA, 57 bp, Artificial
  Synthetic oligonucleotide
accatcgatctcacggacgctttcttccagattcccctcccaaagcgattccagccc

SEQ ID NO: 311656 - DNA, 58 bp, Artificial
  Synthetic oligonucleotide
accatcgattggggctttgtgccccagggaaatcccagaatacaaccaatctcatgga

SEQ ID NO: 311657 - DNA, 55 bp, Artificial
  Synthetic oligonucleotide
accatcgcacacacgttcgatgaagcagttgcttcagaaagcaacctccgcattg

SEQ ID NO: 311658 - DNA, 60 bp, Artificial
  Synthetic oligonucleotide
accatcgcgtctaccacttcagatctgaggagcgaatgatggtcagtgacgctgaccaac

SEQ ID NO: 311659 - DNA, 59 bp, Artificial
  Synthetic oligonucleotide
accatcggtgggttcacaaccatctccgactgtgtgtctctactcaggaatttaagatc

SEQ ID NO: 311660 - DNA, 57 bp, Artificial
  Synthetic oligonucleotide
accatcgtcattaaacttgacgacccaaccaccgccgccgcttacagatcggagcta

SEQ ID NO: 311661 - DNA, 59 bp, Artificial
  Synthetic oligonucleotide
accatcgttcctggaaatggatgtgtggtctagccccaagttgttcataagaagatgaa

SEQ ID NO: 311662 - DNA, 56 bp, Artificial
  Synthetic oligonucleotide
accatctaaggaaaaatttcttgtgccaccagagtaccctctattgggagtagtgc

SEQ ID NO: 311663 - DNA, 57 bp, Artificial
  Synthetic oligonucleotide
accatctacgtcaccaaccgtgacggtcagaactggtatccgaataagaaggatgcg

SEQ ID NO: 311664 - DNA, 55 bp, Artificial
  Synthetic oligonucleotide
accatctagtcacttgactccggatatgtaaagatattttgggaacatgcactta

SEQ ID NO: 311665 - DNA, 55 bp, Artificial
  Synthetic oligonucleotide
accatctatgctatatacaaactactgtgtatttcacagggtgcttacacaggca

SEQ ID NO: 311666 - DNA, 53 bp, Artificial
  Synthetic oligonucleotide
accatctattcaggagctacaatggttcaatggaggtgcgatccatgcatggc

SEQ ID NO: 311667 - DNA, 50 bp, Artificial
  Synthetic oligonucleotide
accatctattttgtcaacacgtgacagaacatcgattagtgatgtcagag

SEQ ID NO: 311668 - DNA, 60 bp, Artificial
  Synthetic oligonucleotide
accatctcgtagctctagtcaagtaaaggatgctgataacattacgccatcaaagacatc

SEQ ID NO: 311669 - DNA, 60 bp, Artificial
  Synthetic oligonucleotide
accatctcttagcctacttgaacgagcacgtgtgcgtgaatgccaaggatcatgagaaag

SEQ ID NO: 311670 - DNA, 57 bp, Artificial
  Synthetic oligonucleotide
accatctggaggctaagaaattacatgacgagatggggaggttaaacggtgctatta

SEQ ID NO: 311671 - DNA, 60 bp, Artificial
  Synthetic oligonucleotide
accatctggatatcgatgagcccacaggacagactgcagactggctgagtattgttatct

SEQ ID NO: 311672 - DNA, 60 bp, Artificial
  Synthetic oligonucleotide
accatcttattcttctctcagcatcctcacaagctcaacagaagcaaagcatgtgttcag

SEQ ID NO: 311673 - DNA, 55 bp, Artificial
  Synthetic oligonucleotide
accatcttggaattgctcacaaaattggacaggacatccggtatggcacgtattc

SEQ ID NO: 311674 - DNA, 55 bp, Artificial
  Synthetic oligonucleotide
accatgaacagtttgccaattgggtagtaaaagtgaagaacattaaaggattaca

SEQ ID NO: 311675 - DNA, 55 bp, Artificial
  Synthetic oligonucleotide
accatgaaggtgagctttgcactcacgtagtagcgaattatcacaacggattacg

SEQ ID NO: 311676 - DNA, 55 bp, Artificial
  Synthetic oligonucleotide
accatgagaaggacttagacaccacggtcttatttaaggattgggtggcaaatta

SEQ ID NO: 311677 - DNA, 56 bp, Artificial
  Synthetic oligonucleotide
accatgagacttagtgtggtaacaccacgaaatgagtcaagtgttgtacgttttgt

SEQ ID NO: 311678 - DNA, 60 bp, Artificial
  Synthetic oligonucleotide
accatgagagatatcatagcaactggagagccatggctgatgaattccaactcccaccgg

SEQ ID NO: 311679 - DNA, 54 bp, Artificial
  Synthetic oligonucleotide
accatgagtttaaacaggagccaattatggcattcgattatagtaactatgatg

SEQ ID NO: 311680 - DNA, 60 bp, Artificial
  Synthetic oligonucleotide
accatgcaaacaattccacagacactgtcgacacagtgctggagaagaatgtgactgtga

SEQ ID NO: 311681 - DNA, 60 bp, Artificial
  Synthetic oligonucleotide
accatgcaaggttggcatcaaccctttctcatacgactgggacataatggcaatgaagca

SEQ ID NO: 311682 - DNA, 53 bp, Artificial
  Synthetic oligonucleotide
accatgcagcgaagatgctcagctgtacgtacggaagagcggctcaacgatag

SEQ ID NO: 311683 - DNA, 60 bp, Artificial
  Synthetic oligonucleotide
accatgcaggagtttattggaatgaccttgttacattgggaactgataatcttaatcaca

SEQ ID NO: 311684 - DNA, 60 bp, Artificial
  Synthetic oligonucleotide
accatgccaaagcggaattacgataccgccttctcatcaccgctatcagtagttcgtcga

SEQ ID NO: 311685 - DNA, 60 bp, Artificial
  Synthetic oligonucleotide
accatgccaaatagatctttcaacagcatccatagatggggcatggggttcaggggttgg

SEQ ID NO: 311686 - DNA, 59 bp, Artificial
  Synthetic oligonucleotide
accatgccaagtccttacaggtactactttaactgtgacagatctttgtcagtgactta

SEQ ID NO: 311687 - DNA, 60 bp, Artificial
  Synthetic oligonucleotide
accatgccacaaacaccatcgcttgccgatacacgtgacccgcatatgtgggtagttggt

SEQ ID NO: 311688 - DNA, 60 bp, Artificial
  Synthetic oligonucleotide
accatgccagcaaagctggggtgcatcatatgccttgggtatgcaggagataggccatcc

SEQ ID NO: 311689 - DNA, 60 bp, Artificial
  Synthetic oligonucleotide
accatgccataatgttagcacagtacaatgcacacatggaattaaaccagtggtatcgac

SEQ ID NO: 311690 - DNA, 55 bp, Artificial
  Synthetic oligonucleotide
accatgccatatcacaatttgagaaactgcagatggcctgtgaattagatcgtga

SEQ ID NO: 311691 - DNA, 58 bp, Artificial
  Synthetic oligonucleotide
accatgccctctgccccataggcttgacagaaacggtgcttgcaggtgtggtaggtat

SEQ ID NO: 311692 - DNA, 59 bp, Artificial
  Synthetic oligonucleotide
accatgccggtggctcaaaccctagtcatctcggataatcggagtatctatttctccga

SEQ ID NO: 311693 - DNA, 56 bp, Artificial
  Synthetic oligonucleotide
accatgccgtcacagtaaaggacgccaagtttgtcgtgggcccaatgtcctccgcc

SEQ ID NO: 311694 - DNA, 60 bp, Artificial
  Synthetic oligonucleotide
accatgcctatgagggagatccatgagtccattcgttggactaaggatgcacgcaacact

SEQ ID NO: 311695 - DNA, 56 bp, Artificial
  Synthetic oligonucleotide
accatgcggttggccgacaacgaattcaatttacaaccttgtagattgactttgtc

SEQ ID NO: 311696 - DNA, 60 bp, Artificial
  Synthetic oligonucleotide
accatgctaaacacagtggggggacatcaggcagccatgcaaatgttaaaagagaccatc

SEQ ID NO: 311697 - DNA, 55 bp, Artificial
  Synthetic oligonucleotide
accatgctccttggaatgttgatgatctgtagtgctacagaacaattgtgggtca

SEQ ID NO: 311698 - DNA, 59 bp, Artificial
  Synthetic oligonucleotide
accatgcttgggatctatgatagatgggcagtattaccccgccacgccaaaccaggtcc

SEQ ID NO: 311699 - DNA, 55 bp, Artificial
  Synthetic oligonucleotide
accatggacggtcaattaaggtcattggggctggttctcgagttacagggtgaag

SEQ ID NO: 311700 - DNA, 56 bp, Artificial
  Synthetic oligonucleotide
accatggacttctttgaaacgaccctccccaggatcctaaatgatctgagggccag

SEQ ID NO: 311701 - DNA, 55 bp, Artificial
  Synthetic oligonucleotide
accatggagccggctggtttttgggaggttattcgatgggctcggagtaatgttg

SEQ ID NO: 311702 - DNA, 60 bp, Artificial
  Synthetic oligonucleotide
accatggattgcgattggagatgaaacatctgtgacttcaccaggcgcgttacgtcgaat

SEQ ID NO: 311703 - DNA, 58 bp, Artificial
  Synthetic oligonucleotide
accatggcccactacgacccgagccaaaatggaattatgcacacttcccgcaagatcc

SEQ ID NO: 311704 - DNA, 55 bp, Artificial
  Synthetic oligonucleotide
accatggcgttctactttctgatcatgaagtctgggtccctccttcccatcccgc

SEQ ID NO: 311705 - DNA, 59 bp, Artificial
  Synthetic oligonucleotide
accatgggtagtattggccctgacgagacaccgaatggatcttatcagttgagcagcat

SEQ ID NO: 311706 - DNA, 60 bp, Artificial
  Synthetic oligonucleotide
accatgggtgtctttcaaccaagacctggagtatcagataggatacatttgcagtggagt

SEQ ID NO: 311707 - DNA, 55 bp, Artificial
  Synthetic oligonucleotide
accatgggtgtttgtaaattatcgattaagccaaagtcctctgtacctttgccac

SEQ ID NO: 311708 - DNA, 57 bp, Artificial
  Synthetic oligonucleotide
accatggtctgcgcaagttttgatgatcaggcttctaacagcagctcttaacaggaa

SEQ ID NO: 311709 - DNA, 55 bp, Artificial
  Synthetic oligonucleotide
accatggttgcgacaacgttagaacatagattcaaagatataccggacaaggagc

SEQ ID NO: 311710 - DNA, 60 bp, Artificial
  Synthetic oligonucleotide
accatggtttggctgggcgtatcttcgccctcatgcagcgcagacgcctagacgtcaaag

SEQ ID NO: 311711 - DNA, 60 bp, Artificial
  Synthetic oligonucleotide
accatgtacatcgtactgcacctacctgaggaggcgatgctaccaccagggtcatattcg

SEQ ID NO: 311712 - DNA, 55 bp, Artificial
  Synthetic oligonucleotide
accatgtctagagccagttttgcgtaccgcggcggaaccgccaagggctgcagga

SEQ ID NO: 311713 - DNA, 53 bp, Artificial
  Synthetic oligonucleotide
accatgtgaaaagtcaacccctccctgtgttactctaaattgtaccacgggta

SEQ ID NO: 311714 - DNA, 54 bp, Artificial
  Synthetic oligonucleotide
accatgtgaagaaacctttgtacatatgtactacccggagcggaagtcggaggg

SEQ ID NO: 311715 - DNA, 55 bp, Artificial
  Synthetic oligonucleotide
accatgtgcaagactgggagactcggtaggtacgaatggaggaataagtgggccc

SEQ ID NO: 311716 - DNA, 60 bp, Artificial
  Synthetic oligonucleotide
accatgtgctgaatcttgtgcctgttgtttggctcgattgaatggtcggtttcggtatga

SEQ ID NO: 311717 - DNA, 55 bp, Artificial
  Synthetic oligonucleotide
accatgtgggtgagaatcatcagtttgtgacgatgctcgtgtgctactgggcggg

SEQ ID NO: 311718 - DNA, 60 bp, Artificial
  Synthetic oligonucleotide
accatgtggtgtacaaccatcaggaagccgggaagtatgagaaccacacagaaaatgctc

SEQ ID NO: 311719 - DNA, 55 bp, Artificial
  Synthetic oligonucleotide
accatgtgtaaagttgaccccactatgtgtcactttaaattgtacaaagattaag

SEQ ID NO: 311720 - DNA, 57 bp, Artificial
  Synthetic oligonucleotide
accatgtgtaaagttgaccccactctgtgtcactttaaattgtacacaggcggctac

SEQ ID NO: 311721 - DNA, 56 bp, Artificial
  Synthetic oligonucleotide
accatgtgtaaagttgaccccactctgtgtcactttaaattgtggaaatgctaact

SEQ ID NO: 311722 - DNA, 60 bp, Artificial
  Synthetic oligonucleotide
accatgttaccaatgattgccctaactcgagtattgtgtacgagacggccgatagcatcc

SEQ ID NO: 311723 - DNA, 60 bp, Artificial
  Synthetic oligonucleotide
accattaagacctgggccagaaacattctgaggactcaagaatcagaatgtgtgtgccac

SEQ ID NO: 311724 - DNA, 50 bp, Artificial
  Synthetic oligonucleotide
accattaagggagagttcacaatgctcggagtgcatgataatgtggccat

SEQ ID NO: 311725 - DNA, 57 bp, Artificial
  Synthetic oligonucleotide
accattaaggtatcaagtgaccgaatttctatgttctccgcagggaatgaagttatg

SEQ ID NO: 311726 - DNA, 56 bp, Artificial
  Synthetic oligonucleotide
accattaatcgaccacgccaaacccacatttaggcaaataatggcccatttcagta

SEQ ID NO: 311727 - DNA, 60 bp, Artificial
  Synthetic oligonucleotide
accattacagaggattgtggcaagagaggcccttcggtcagaaccactactgacagcgga

SEQ ID NO: 311728 - DNA, 55 bp, Artificial
  Synthetic oligonucleotide
accattactgacgaccacgttcactaccgtgttgctggtggtaaggacgtgcgcc

SEQ ID NO: 311729 - DNA, 60 bp, Artificial
  Synthetic oligonucleotide
accattagaagcaacagtacagaaaaacctagcaaatcagtggacatacaagattcatca

SEQ ID NO: 311730 - DNA, 60 bp, Artificial
  Synthetic oligonucleotide
accattagagagtataaacatatcaagccagattcaacagaatgagtgttcacgtattat

SEQ ID NO: 311731 - DNA, 60 bp, Artificial
  Synthetic oligonucleotide
accattagatccaaagtttagacaatatacagcatttactgtgccatccattaatcatca

SEQ ID NO: 311732 - DNA, 56 bp, Artificial
  Synthetic oligonucleotide
accattaggaaggagagatgtaccaggaagacggactagaataatatttatcttac

SEQ ID NO: 311733 - DNA, 59 bp, Artificial
  Synthetic oligonucleotide
accattatacctgacttcagcaacggttgttacaagatggaaagttgacatagcgttca

SEQ ID NO: 311734 - DNA, 60 bp, Artificial
  Synthetic oligonucleotide
accattatgccgggcaactaatgtcattggatatcaacactgaacagatgtgtctagagg

SEQ ID NO: 311735 - DNA, 52 bp, Artificial
  Synthetic oligonucleotide
accattatggatgggttttcacaaccctaatcaaacttttttatgcacccgt

SEQ ID NO: 311736 - DNA, 58 bp, Artificial
  Synthetic oligonucleotide
accattcaaaaaagatcaatgcaatattcggcccgttgtttagtgagcttactaggca

SEQ ID NO: 311737 - DNA, 60 bp, Artificial
  Synthetic oligonucleotide
accattcactgcgccgccactagcgactccaacgccgattccaccctcagcgccatctac

SEQ ID NO: 311738 - DNA, 55 bp, Artificial
  Synthetic oligonucleotide
accattccaagccttggtgcctaaagctgccagaggtcaatacagtgggtttgtg

SEQ ID NO: 311739 - DNA, 58 bp, Artificial
  Synthetic oligonucleotide
accattccacatgacatagacctcggtgattcccgtgtggttatccaggactatgata

SEQ ID NO: 311740 - DNA, 60 bp, Artificial
  Synthetic oligonucleotide
accattccatagtcaacgtcgtgaatgcttggtacgatgacggagaagttaatgcaagag

SEQ ID NO: 311741 - DNA, 60 bp, Artificial
  Synthetic oligonucleotide
accattccgcgatgagatcgcaatgctagctcagttctaccacactaaagctagagatcc

SEQ ID NO: 311742 - DNA, 55 bp, Artificial
  Synthetic oligonucleotide
accattccgttatttgagtaccgatatatcggtgcctatcggtgcctattggtac

SEQ ID NO: 311743 - DNA, 57 bp, Artificial
  Synthetic oligonucleotide
accattcgcgcagactgggtacgctccggttaactggggacacggtgaattgtctga

SEQ ID NO: 311744 - DNA, 56 bp, Artificial
  Synthetic oligonucleotide
accattcggctacttcttaacggcagcagaagttacgcagcatggacggtttaggc

SEQ ID NO: 311745 - DNA, 55 bp, Artificial
  Synthetic oligonucleotide
accattctattcgggtcctgacatagtgttgcctacaggccccagtacgtggccc

SEQ ID NO: 311746 - DNA, 52 bp, Artificial
  Synthetic oligonucleotide
accattctcgcttttgagcctgaggtacaagccgctcttgcgagccactcct

SEQ ID NO: 311747 - DNA, 58 bp, Artificial
  Synthetic oligonucleotide
accattctgtggcgagagcacactttacacccgtacttggtcggaggttgatgccgtc

SEQ ID NO: 311748 - DNA, 60 bp, Artificial
  Synthetic oligonucleotide
accattgaagagataccactacatcaagtgtcactccacacatctcgcccgtgtcacatt

SEQ ID NO: 311749 - DNA, 60 bp, Artificial
  Synthetic oligonucleotide
accattgaagagctcagacggcaaaaatagtgaatttagcttgtccttcatgaaaaatgc

SEQ ID NO: 311750 - DNA, 55 bp, Artificial
  Synthetic oligonucleotide
accattgaggcaaagccacctggacacctaactctggaggataaggtcaaatatc

SEQ ID NO: 311751 - DNA, 55 bp, Artificial
  Synthetic oligonucleotide
accattgaggcactggagggaatcaaggtctccgcagagttcgctgacctcgccc

SEQ ID NO: 311752 - DNA, 52 bp, Artificial
  Synthetic oligonucleotide
accattgatggttgcctacatgctggagagggagctagtgagaaaaacacgg

SEQ ID NO: 311753 - DNA, 55 bp, Artificial
  Synthetic oligonucleotide
accattgattctgctccggcgctcggacaagtcctccctcctgaggtcgaggcgt

SEQ ID NO: 311754 - DNA, 56 bp, Artificial
  Synthetic oligonucleotide
accattgcaactttggtctactggttgtgcctattagcccgttggactttgaccaa

SEQ ID NO: 311755 - DNA, 54 bp, Artificial
  Synthetic oligonucleotide
accattgcatcacccagaggtcctgttatccagatgtataccaatgtggaccaa

SEQ ID NO: 311756 - DNA, 60 bp, Artificial
  Synthetic oligonucleotide
accattgctttcggtattcgcgttacaagagatcatgcagaaggttagacaagtacaggc

SEQ ID NO: 311757 - DNA, 57 bp, Artificial
  Synthetic oligonucleotide
accattggagcattactcggcaagttaaacactggcttagtaacaagaacaggagat

SEQ ID NO: 311758 - DNA, 60 bp, Artificial
  Synthetic oligonucleotide
accattggcacgcgctgacaatcctgactctctactcgaggtcttacccgtcttggtctc

SEQ ID NO: 311759 - DNA, 51 bp, Artificial
  Synthetic oligonucleotide
accatttagactttcatacgaaccctttgtttggggagtcaactttcgtaa

SEQ ID NO: 311760 - DNA, 57 bp, Artificial
  Synthetic oligonucleotide
accatttatacacggtcaggtgctcaaattgggtcccaggtgcatttttatcgtgac

SEQ ID NO: 311761 - DNA, 60 bp, Artificial
  Synthetic oligonucleotide
accatttatgtctatgtatggagctttagttgggcatttcagacagatttatgagtagga

SEQ ID NO: 311762 - DNA, 53 bp, Artificial
  Synthetic oligonucleotide
accatttattaaccgcgttgaatccataactttggaatacgctaagttggaaa

SEQ ID NO: 311763 - DNA, 59 bp, Artificial
  Synthetic oligonucleotide
accatttcaccgatctccgaaatcctgagattactctcaccgaccggcaacgactatgc

SEQ ID NO: 311764 - DNA, 55 bp, Artificial
  Synthetic oligonucleotide
accatttcagtagttccgcgctaaaagcgactcctttggaatcggtgatttgccg

SEQ ID NO: 311765 - DNA, 59 bp, Artificial
  Synthetic oligonucleotide
accatttcagtgatacataggtaaaactagtacatgacaaccctaagcctacagcctca

SEQ ID NO: 311766 - DNA, 60 bp, Artificial
  Synthetic oligonucleotide
accatttctcagagcacaaaattatggtattaatcttccaatcacaggctccatggacat

SEQ ID NO: 311767 - DNA, 60 bp, Artificial
  Synthetic oligonucleotide
accatttctgatgtactgacctacgtgctgtttaatccaacgcataacttgcattggtcc

SEQ ID NO: 311768 - DNA, 60 bp, Artificial
  Synthetic oligonucleotide
accatttgagatagcgccaattgaccttaggttatcgctatacgctgagcgtcgctcaat

SEQ ID NO: 311769 - DNA, 52 bp, Artificial
  Synthetic oligonucleotide
accatttgagtcagcggggaaaagttctactattagagccaacacgaccgct

SEQ ID NO: 311770 - DNA, 52 bp, Artificial
  Synthetic oligonucleotide
accatttgatgcaaacggagcgtttagaaacgcctggtggctagaaacaagg

SEQ ID NO: 311771 - DNA, 60 bp, Artificial
  Synthetic oligonucleotide
accatttgcacgactaaccttttttactggttcatgtctcagagcagcttgtctacgtga

SEQ ID NO: 311772 - DNA, 55 bp, Artificial
  Synthetic oligonucleotide
accatttgcacgggttctgaatttatcagggattaacaacctcgaacatggactc

SEQ ID NO: 311773 - DNA, 55 bp, Artificial
  Synthetic oligonucleotide
accatttgctaccacagaggctttaagactgaatgcatttataagactgttagtg

SEQ ID NO: 311774 - DNA, 60 bp, Artificial
  Synthetic oligonucleotide
accatttggagagagttacatcatcgttggtaatggagatgataaacttacataccactg

SEQ ID NO: 311775 - DNA, 55 bp, Artificial
  Synthetic oligonucleotide
accattttcaaagacaacaccccgaccactcaaaatgccaggtggtccaccctgc

SEQ ID NO: 311776 - DNA, 55 bp, Artificial
  Synthetic oligonucleotide
accattttcctcagattatgtgttagcaagcacaaatcatactctacttcaccca

SEQ ID NO: 311777 - DNA, 59 bp, Artificial
  Synthetic oligonucleotide
accattttgacggttacaaacaacaggccgttgtgatcatggatgatttatgccagaac

SEQ ID NO: 311778 - DNA, 57 bp, Artificial
  Synthetic oligonucleotide
acccaaaaaagctttacacagctggaatggagaaaaaaggctgagacaactgataca

SEQ ID NO: 311779 - DNA, 57 bp, Artificial
  Synthetic oligonucleotide
acccaaaaaggtcatgagttacacgcatccgtggatactcctcatgaccaaaaaaca

SEQ ID NO: 311780 - DNA, 60 bp, Artificial
  Synthetic oligonucleotide
acccaaaaagtgccatcattgtcagctaatgagacaggagcaaccatgcccacagtacca

SEQ ID NO: 311781 - DNA, 52 bp, Artificial
  Synthetic oligonucleotide
acccaaaacccagccgggttgtttgtgatggcctcgggcgttatctctaccc

SEQ ID NO: 311782 - DNA, 57 bp, Artificial
  Synthetic oligonucleotide
acccaaaagcagtatctcgatgcgcaaaacttcccggagggaaacacgtcagcagac

SEQ ID NO: 311783 - DNA, 58 bp, Artificial
  Synthetic oligonucleotide
acccaaaaggcaatgatcaaccagtttgagatggggaggtgggagtctctatccacat

SEQ ID NO: 311784 - DNA, 52 bp, Artificial
  Synthetic oligonucleotide
acccaaacacgtcaaagcatatgtgccacgccccccccgtttgtgtcaatac

SEQ ID NO: 311785 - DNA, 53 bp, Artificial
  Synthetic oligonucleotide
acccaaacgataggggggagctcagccaggtccacacacgggttcacgtccct

SEQ ID NO: 311786 - DNA, 58 bp, Artificial
  Synthetic oligonucleotide
acccaaacgctcgtcaccttaacgcaattagccacgctgtctgctcttttcttcaaga

SEQ ID NO: 311787 - DNA, 51 bp, Artificial
  Synthetic oligonucleotide
acccaaactaccctcctgttcaacatcttgggggggtgggtggccgcccaa

SEQ ID NO: 311788 - DNA, 53 bp, Artificial
  Synthetic oligonucleotide
acccaaactggaatgttggtaacgaagaacttggaagctcaggcaacccaaac

SEQ ID NO: 311789 - DNA, 57 bp, Artificial
  Synthetic oligonucleotide
acccaaatagtcagaataggtggagggctagggttagatgactccattttgttcaca

SEQ ID NO: 311790 - DNA, 55 bp, Artificial
  Synthetic oligonucleotide
acccaaatcaggacaggtaaacgcagaagtaggagtatggcagatggactgcacc

SEQ ID NO: 311791 - DNA, 52 bp, Artificial
  Synthetic oligonucleotide
acccaaatcgcctccggcggcacgggaacgaacatggagacctcaagtctca

SEQ ID NO: 311792 - DNA, 55 bp, Artificial
  Synthetic oligonucleotide
acccaaatctcatttcatggtgtggtctcaacctagttgactcagctccaaaggg

SEQ ID NO: 311793 - DNA, 58 bp, Artificial
  Synthetic oligonucleotide
acccaacaacaaatgtggctgtaatggaggtggaatctgtaaatgtagcacccaatgt

SEQ ID NO: 311794 - DNA, 58 bp, Artificial
  Synthetic oligonucleotide
acccaacaataacgacccctgcaataccgaactgcagtgacactataataacatacaa

SEQ ID NO: 311795 - DNA, 50 bp, Artificial
  Synthetic oligonucleotide
acccaacaatcaagtttgggtaactcgcaaagcgagtgaatggtctgcaa

SEQ ID NO: 311796 - DNA, 54 bp, Artificial
  Synthetic oligonucleotide
acccaacacgtctaccacgcaatacatcttttattcgactaacgaaaataacta

SEQ ID NO: 311797 - DNA, 54 bp, Artificial
  Synthetic oligonucleotide
acccaacagacggtgatcagagaccgcccacaagggattctatggtcagggaaa

SEQ ID NO: 311798 - DNA, 55 bp, Artificial
  Synthetic oligonucleotide
acccaaccgccagtagcctaccaatactggccgccggctgaacttcagtatcagc

SEQ ID NO: 311799 - DNA, 51 bp, Artificial
  Synthetic oligonucleotide
acccaacgtgttacaaatctcctacaaaccaatgctcctctactattcatg

SEQ ID NO: 311800 - DNA, 59 bp, Artificial
  Synthetic oligonucleotide
acccaactggatactcttaaaatgagtggactcacagtagtcaagagcagacgaaacaa

SEQ ID NO: 311801 - DNA, 53 bp, Artificial
  Synthetic oligonucleotide
acccaactgtaggtaagtgtaacgacccttatccaggcaataacaacaatggg

SEQ ID NO: 311802 - DNA, 58 bp, Artificial
  Synthetic oligonucleotide
acccaacttcacacctcatcaagggtatgccatcaacctccaaatatgggttggagat

SEQ ID NO: 311803 - DNA, 55 bp, Artificial
  Synthetic oligonucleotide
acccaacttggcgcctaatatataatggtaccaagaagggtatgcctgagtactt

SEQ ID NO: 311804 - DNA, 55 bp, Artificial
  Synthetic oligonucleotide
acccaagagatactcaatagactcgttgagaacaaactcggagccattccctgtg

SEQ ID NO: 311805 - DNA, 56 bp, Artificial
  Synthetic oligonucleotide
acccaagagtcggaatgcgtttgtatcaatgggacttgtacagtagtaatgactga

SEQ ID NO: 311806 - DNA, 56 bp, Artificial
  Synthetic oligonucleotide
acccaagatctcgggatcaaggctacacttgctgtaggttaggaaggtgtttgcgt

SEQ ID NO: 311807 - DNA, 55 bp, Artificial
  Synthetic oligonucleotide
acccaaggagccttgttgaatgacaaacattccaatggaaccgttaaggacagaa

SEQ ID NO: 311808 - DNA, 52 bp, Artificial
  Synthetic oligonucleotide
acccaaggcccccagggggctatcgacccaccactggcttaactttctccag

SEQ ID NO: 311809 - DNA, 58 bp, Artificial
  Synthetic oligonucleotide
acccaagggttttgttgcacatagtcaccgtgaggtgacgcctactgaggcagtgaag

SEQ ID NO: 311810 - DNA, 59 bp, Artificial
  Synthetic oligonucleotide
acccaagtgctcgtcaccttaactcaattagccacgctgtctgcacttttcttcaagaa

SEQ ID NO: 311811 - DNA, 60 bp, Artificial
  Synthetic oligonucleotide
acccaataaatgagacagatgatactgtagggagcaagcccaattatcaaagaaagcctc

SEQ ID NO: 311812 - DNA, 50 bp, Artificial
  Synthetic oligonucleotide
acccaataacgtttaattccagcggggcactttcagttaaagtgggaggg

SEQ ID NO: 311813 - DNA, 56 bp, Artificial
  Synthetic oligonucleotide
acccaataagcgctgaattgaacctccccactccggctgtagtaactcaagccaaa

SEQ ID NO: 311814 - DNA, 55 bp, Artificial
  Synthetic oligonucleotide
acccaatcaacccaactagcttaacaaactgcgagtggttgtacagggctgttag

SEQ ID NO: 311815 - DNA, 56 bp, Artificial
  Synthetic oligonucleotide
acccaatcatgatttattttgtttggagaaggatagggacattttcaagcgcggcg

SEQ ID NO: 311816 - DNA, 54 bp, Artificial
  Synthetic oligonucleotide
acccaatctgttaatgcttccggtacattgttaaacgtcgtcgtttggaatggc

SEQ ID NO: 311817 - DNA, 55 bp, Artificial
  Synthetic oligonucleotide
acccaatctttccgtggacgttaaacgcatagaactagtgcgcccaatactggac

SEQ ID NO: 311818 - DNA, 60 bp, Artificial
  Synthetic oligonucleotide
acccaatgcaatggacacttgctacccattcgatgtgccagattaccagagcctaaggag

SEQ ID NO: 311819 - DNA, 58 bp, Artificial
  Synthetic oligonucleotide
acccaatgctctcctgaggttgtggttgaaccgtatctgtacgtggtacactctggtc

SEQ ID NO: 311820 - DNA, 59 bp, Artificial
  Synthetic oligonucleotide
acccaatgctctcctgaggttgtggttgaaccttatctggatgtggtacactcttgtcc

SEQ ID NO: 311821 - DNA, 54 bp, Artificial
  Synthetic oligonucleotide
acccaatggaaagtggcggtttattcatgacctccgggccacaaactccctcac

SEQ ID NO: 311822 - DNA, 58 bp, Artificial
  Synthetic oligonucleotide
acccaatgtacccactatcaggacagcaaaagtgcaaggccctgggtttgattacgca

SEQ ID NO: 311823 - DNA, 60 bp, Artificial
  Synthetic oligonucleotide
acccaatgtatatcaagccagatttgaagctgtggcgtggtcagcgactgcctgccacga

SEQ ID NO: 311824 - DNA, 58 bp, Artificial
  Synthetic oligonucleotide
acccaattacaggaagcccagaatgtacagaatgtatcggagcccagatgtcccaaag

SEQ ID NO: 311825 - DNA, 60 bp, Artificial
  Synthetic oligonucleotide
acccaattattgtcacagctatctctccgagttatgtggaacagcgtaactgattggatg

SEQ ID NO: 311826 - DNA, 60 bp, Artificial
  Synthetic oligonucleotide
acccaattgatgtctaatgtcgttccaactagccttggacgctctctcccatactactca

SEQ ID NO: 311827 - DNA, 55 bp, Artificial
  Synthetic oligonucleotide
acccaattttgggactcattctataactgtattatggttgtcaccaccctagaag

SEQ ID NO: 311828 - DNA, 55 bp, Artificial
  Synthetic oligonucleotide
acccacaacattgtgcatgtgagtccgttggattatttttagttagttggaaaac

SEQ ID NO: 311829 - DNA, 51 bp, Artificial
  Synthetic oligonucleotide
acccacaactccgagacgatctagacgatatctacggccgtcgtcgcgaga

SEQ ID NO: 311830 - DNA, 60 bp, Artificial
  Synthetic oligonucleotide
acccacaccaccaaaccacaagcactgggtgccctagagattggagcaactgcagacttg

SEQ ID NO: 311831 - DNA, 51 bp, Artificial
  Synthetic oligonucleotide
acccacagaccccaacccacgagaaatagtattaaaaaatgtgacagaaaa

SEQ ID NO: 311832 - DNA, 60 bp, Artificial
  Synthetic oligonucleotide
acccacagagagtaatgctcggtcattctcaatgctactcaatacgggtgcgaccccaga

SEQ ID NO: 311833 - DNA, 58 bp, Artificial
  Synthetic oligonucleotide
acccacagctagggtttgaggtcactaagattctactagctatcttggcccctctata

SEQ ID NO: 311834 - DNA, 60 bp, Artificial
  Synthetic oligonucleotide
acccacatcgacgctcatttcctctcgcagacaaagcaggcaggggagaacttcgcatat

SEQ ID NO: 311835 - DNA, 53 bp, Artificial
  Synthetic oligonucleotide
acccaccaaattatgtacgtacccccaggaggttcagtacctagcaccgttga

SEQ ID NO: 311836 - DNA, 56 bp, Artificial
  Synthetic oligonucleotide
acccaccaccccaacaagttgttgcgaggcgactccgtggacagtgtcaactgtgg

SEQ ID NO: 311837 - DNA, 60 bp, Artificial
  Synthetic oligonucleotide
acccacccacagctggactcacgacaccgcgtggccattttagctggattgtgcggacga

SEQ ID NO: 311838 - DNA, 52 bp, Artificial
  Synthetic oligonucleotide
acccacccggaaaagagagtgctaagaagccccgacgcgagacccgcctcgg

SEQ ID NO: 311839 - DNA, 60 bp, Artificial
  Synthetic oligonucleotide
acccaccctttacctaattgtgcctgtacatgcctgtaacatgatgaagagctgcctgat

SEQ ID NO: 311840 - DNA, 57 bp, Artificial
  Synthetic oligonucleotide
acccaccctttttgatgaagcccttaacagggatctgcagggatttcgacttgatca

SEQ ID NO: 311841 - DNA, 60 bp, Artificial
  Synthetic oligonucleotide
acccaccgaaatgatggcactgactgctcactcatggttgattgatgggctgggtactcc

SEQ ID NO: 311842 - DNA, 58 bp, Artificial
  Synthetic oligonucleotide
acccaccgcgtttactccggtcacaagccagagatgagtacttgatgtattgcccgac

SEQ ID NO: 311843 - DNA, 54 bp, Artificial
  Synthetic oligonucleotide
acccacctcattaatgcggtggcgttgattaggaacctcttcaaacggtagaaa

SEQ ID NO: 311844 - DNA, 58 bp, Artificial
  Synthetic oligonucleotide
acccacctgcagttgacgccttcatgaggaaactccaaagtttcgctctcctctcctc

SEQ ID NO: 311845 - DNA, 55 bp, Artificial
  Synthetic oligonucleotide
acccacgaactctgtagccacatcgaaccatctcaacggtacggctatggacctg

SEQ ID NO: 311846 - DNA, 58 bp, Artificial
  Synthetic oligonucleotide
acccacgcaccaacatgacggcccacatcagtgtgccttttgtgggtgttaacaggta

SEQ ID NO: 311847 - DNA, 54 bp, Artificial
  Synthetic oligonucleotide
acccacgccccagtgcacccgcggcaacgacaacctgcggtccatgggaatcgg

SEQ ID NO: 311848 - DNA, 56 bp, Artificial
  Synthetic oligonucleotide
acccacggaactttcatctgagaggggtaagcttctgaaagtgaaccgtgttatgc

SEQ ID NO: 311849 - DNA, 60 bp, Artificial
  Synthetic oligonucleotide
acccacgtaacacacaagatcacgtgcggtcactgtgcctcctagcatggcataatggta

SEQ ID NO: 311850 - DNA, 55 bp, Artificial
  Synthetic oligonucleotide
acccacgtgcgcaggtgtgcgagtggctctgcgcctacaataccctgggaggtgg

SEQ ID NO: 311851 - DNA, 56 bp, Artificial
  Synthetic oligonucleotide
acccacgtggtgcagtggtcttgtattacggtacatttccataccagttttataca

SEQ ID NO: 311852 - DNA, 60 bp, Artificial
  Synthetic oligonucleotide
acccactacaagggagatatgggaagattggtggcatgagtattggcagtgtacatggat

SEQ ID NO: 311853 - DNA, 57 bp, Artificial
  Synthetic oligonucleotide
acccactacaggcgacaggttatggtagagtggatacctagccaggggcaatgggac

SEQ ID NO: 311854 - DNA, 55 bp, Artificial
  Synthetic oligonucleotide
acccactacatgttcaggaacgtcccctctagtcccgccacaaccggtaggctga

SEQ ID NO: 311855 - DNA, 53 bp, Artificial
  Synthetic oligonucleotide
acccactaccagatactttatacggtttccgttgtatgctatccgtaaaatac

SEQ ID NO: 311856 - DNA, 60 bp, Artificial
  Synthetic oligonucleotide
acccactagcgtgcagtggctcctggatgggacacttcctcttgatcccagaagggagat

SEQ ID NO: 311857 - DNA, 55 bp, Artificial
  Synthetic oligonucleotide
acccactaggtatagtgtgggaaaaggtgcctttctcattcgttgtcgactggct

SEQ ID NO: 311858 - DNA, 55 bp, Artificial
  Synthetic oligonucleotide
acccactcctgcccaccaccagtggcacaagagtgatccctgagtgttcaagatc

SEQ ID NO: 311859 - DNA, 53 bp, Artificial
  Synthetic oligonucleotide
acccagaacacgagtgctgccccccaacctcccatcgaatccaaagttacctt

SEQ ID NO: 311860 - DNA, 53 bp, Artificial
  Synthetic oligonucleotide
acccagaatgtcgacccaacgcatccacgagaatcaatatgggtcggaattta

SEQ ID NO: 311861 - DNA, 54 bp, Artificial
  Synthetic oligonucleotide
acccagacaggcttaccaaagttctgaagggctatgggctcaaacccacccgcc

SEQ ID NO: 311862 - DNA, 57 bp, Artificial
  Synthetic oligonucleotide
acccagaccacttactattataaaggagacccaataggagcttataaagatgtcata

SEQ ID NO: 311863 - DNA, 57 bp, Artificial
  Synthetic oligonucleotide
acccagacctgggcaaggtagaacctagtcgaagcagatcctatatcaagttgaaac

SEQ ID NO: 311864 - DNA, 53 bp, Artificial
  Synthetic oligonucleotide
acccagaccttgcgaagttgacttacaagaagtccagtaagtatgacctcgaa

SEQ ID NO: 311865 - DNA, 60 bp, Artificial
  Synthetic oligonucleotide
acccagactcatgcaaaacagggctgctatgtaccgcaggatcgtatgatgattatctcg

SEQ ID NO: 311866 - DNA, 54 bp, Artificial
  Synthetic oligonucleotide
acccagactttgaaaagggagtggtcattaccgcctaccacaaagatcgtggcc

SEQ ID NO: 311867 - DNA, 58 bp, Artificial
  Synthetic oligonucleotide
acccagagacctcgagacttgtctgggctctccgcggtgtagaggtgtcacgggggca

SEQ ID NO: 311868 - DNA, 60 bp, Artificial
  Synthetic oligonucleotide
acccagagactgatttggcaaaggctggtcaagggatattggcatggtctaaggaggcac

SEQ ID NO: 311869 - DNA, 57 bp, Artificial
  Synthetic oligonucleotide
acccagaggagtgtctccaagtggtgtctctcaaatcccctcttgaaactgggctta

SEQ ID NO: 311870 - DNA, 60 bp, Artificial
  Synthetic oligonucleotide
acccagataacaccctgtagtcttattctcgcatgcgtgctcttgtcaacgcactatgcg

SEQ ID NO: 311871 - DNA, 55 bp, Artificial
  Synthetic oligonucleotide
acccagatatcttcccccgacagacggagaagactaccgacaagaagaagacttc

SEQ ID NO: 311872 - DNA, 58 bp, Artificial
  Synthetic oligonucleotide
acccagatccagaaagaatgaatgtagcagcaggcctggaagggcctagtaaagagaa

SEQ ID NO: 311873 - DNA, 60 bp, Artificial
  Synthetic oligonucleotide
acccagatgggcaattcaaactcaaaggtagacagtgtagaaaggtctcaccagcatcag

SEQ ID NO: 311874 - DNA, 60 bp, Artificial
  Synthetic oligonucleotide
acccagatttggcttggacacagatcttttacactgctcctagccgcaatgtgctggcta

SEQ ID NO: 311875 - DNA, 52 bp, Artificial
  Synthetic oligonucleotide
acccagcactcaattaaagtagttaacaccccaggaccaaagtattccaact

SEQ ID NO: 311876 - DNA, 58 bp, Artificial
  Synthetic oligonucleotide
acccagccaaaggaatacaatgcctttgtgaaagagctttcgtcaacattaagcagtc

SEQ ID NO: 311877 - DNA, 58 bp, Artificial
  Synthetic oligonucleotide
acccagccaccttcgcaacgtcaaccaagccgtcccgcgccgcaacgctgccagcaac

SEQ ID NO: 311878 - DNA, 57 bp, Artificial
  Synthetic oligonucleotide
acccagcccaatttccgatctacttgcccacgattcgttcggaccaatcgcaagatg

SEQ ID NO: 311879 - DNA, 57 bp, Artificial
  Synthetic oligonucleotide
acccagcctcggttccctctccttggatccctcgtgcgaatcacgtgctctctgtct

SEQ ID NO: 311880 - DNA, 56 bp, Artificial
  Synthetic oligonucleotide
acccagcctcggttccctctccttggttcccttgtgcctttcacgtgctctctctc

SEQ ID NO: 311881 - DNA, 55 bp, Artificial
  Synthetic oligonucleotide
acccagcctgcttccacaaaaacatcccaatgccctcacccgtagtcgacccctc

SEQ ID NO: 311882 - DNA, 55 bp, Artificial
  Synthetic oligonucleotide
acccagcctgtcaagcagcaattcgcccctaccgaaagaaaacagatctaacagg

SEQ ID NO: 311883 - DNA, 58 bp, Artificial
  Synthetic oligonucleotide
acccagccttgtctacctctccttggctacctcgtgcgaatcacgtgagttttcgctc

SEQ ID NO: 311884 - DNA, 55 bp, Artificial
  Synthetic oligonucleotide
acccagctccgcgggtcatacaaccgaggaacgtaagatataatgttgaggttgg

SEQ ID NO: 311885 - DNA, 55 bp, Artificial
  Synthetic oligonucleotide
acccagctctaccgggaccacccaggcttcatgcggagtgccgaactggacagta

SEQ ID NO: 311886 - DNA, 53 bp, Artificial
  Synthetic oligonucleotide
acccaggaggttatccagtgtctgccgccgcaactcgtggccccgttcccgat

SEQ ID NO: 311887 - DNA, 55 bp, Artificial
  Synthetic oligonucleotide
acccaggatcaatgaaaaccttgacacaacgaagacagccgagagattgatgtct

SEQ ID NO: 311888 - DNA, 60 bp, Artificial
  Synthetic oligonucleotide
acccaggcaataacagcctgttggtttctggttctgctgctatcatgaatgccctggctg

SEQ ID NO: 311889 - DNA, 56 bp, Artificial
  Synthetic oligonucleotide
acccaggcaatatccaagggcatgcgtcggctagaggtagaacatgcccagaagtt

SEQ ID NO: 311890 - DNA, 53 bp, Artificial
  Synthetic oligonucleotide
acccaggcactttcaccagtttcattccttaaccggacttctgggagaggccg

SEQ ID NO: 311891 - DNA, 54 bp, Artificial
  Synthetic oligonucleotide
acccagggattaaggtaaggcaactgtgcaaactccttaggggagctaaggcac

SEQ ID NO: 311892 - DNA, 60 bp, Artificial
  Synthetic oligonucleotide
acccagggattgcagacatagaagacctaactctgcttgccagaagcatggtagttgtca

SEQ ID NO: 311893 - DNA, 55 bp, Artificial
  Synthetic oligonucleotide
acccaggggagcatctagcgattccgagaccagtgatagagaatcaggaggctct

SEQ ID NO: 311894 - DNA, 59 bp, Artificial
  Synthetic oligonucleotide
acccaggtattgtcactggatcagcagtggggtgtgatccagaggtgttttggtcaaaa

SEQ ID NO: 311895 - DNA, 58 bp, Artificial
  Synthetic oligonucleotide
acccaggtggttctgagagcagttctagctcttgtgctaccgcgcctattttacgtaa

SEQ ID NO: 311896 - DNA, 53 bp, Artificial
  Synthetic oligonucleotide
acccagtaattaagggaatttacaacaacactggaacccagccaatcctctat

SEQ ID NO: 311897 - DNA, 57 bp, Artificial
  Synthetic oligonucleotide
acccagtacccgcgggcctgaaatcagggaatggcaaggcagggaagagctcaactc

SEQ ID NO: 311898 - DNA, 55 bp, Artificial
  Synthetic oligonucleotide
acccagtcaagatgtacatgcggagagtgccccaaagtgtgtgcaagatgtatca

SEQ ID NO: 311899 - DNA, 58 bp, Artificial
  Synthetic oligonucleotide
acccagtcacaataggagagtgcccaaaatatgtcaggagtaccaaattgaggatggt

SEQ ID NO: 311900 - DNA, 55 bp, Artificial
  Synthetic oligonucleotide
acccagtccgacataattaaagggacattattgaacgtggataactgaaatggag

SEQ ID NO: 311901 - DNA, 60 bp, Artificial
  Synthetic oligonucleotide
acccagtccgtatttcagccctgtgtgtgaacaagctagcgtagaacatgaactgagtcc

SEQ ID NO: 311902 - DNA, 55 bp, Artificial
  Synthetic oligonucleotide
acccagtgaaattgagtggcgggtacaaggacataatcttatggtttagcttcgg

SEQ ID NO: 311903 - DNA, 52 bp, Artificial
  Synthetic oligonucleotide
acccagtggatgaacaggctcatagcatttgcctctaggggtaaccatgtgt

SEQ ID NO: 311904 - DNA, 52 bp, Artificial
  Synthetic oligonucleotide
acccagttgagatctgaggttgtggttgaattgtatctgtatagtcattatg

SEQ ID NO: 311905 - DNA, 55 bp, Artificial
  Synthetic oligonucleotide
acccagttgtcgatggtggctggttctctcagcagtggagttgtaggaggatgag

SEQ ID NO: 311906 - DNA, 58 bp, Artificial
  Synthetic oligonucleotide
acccagttgttccaggtgagagctgccccgatcggaggcatgtaagcgggtgctaacc

SEQ ID NO: 311907 - DNA, 50 bp, Artificial
  Synthetic oligonucleotide
acccagtttcacggggaaccgctaaattgcggtggttagtggaaaggcgt

SEQ ID NO: 311908 - DNA, 55 bp, Artificial
  Synthetic oligonucleotide
acccataataacacatggtacagaggcaatgcatacaatgacaaaattacagacc

SEQ ID NO: 311909 - DNA, 55 bp, Artificial
  Synthetic oligonucleotide
acccatacatttaattcggcctcttgtgacaagcccctcggtgaaagaacctctc

SEQ ID NO: 311910 - DNA, 58 bp, Artificial
  Synthetic oligonucleotide
acccatacgctagggggggctaccaaaactgcacctagattgggcagcgcgcgctagc

SEQ ID NO: 311911 - DNA, 59 bp, Artificial
  Synthetic oligonucleotide
acccatacgtcaattggctagtgacacgccaatatgcaaccacgcaaaaggatagtacg

SEQ ID NO: 311912 - DNA, 53 bp, Artificial
  Synthetic oligonucleotide
acccatactttcagagttcccgactacgtcgcgaaaccccctccttatgattc

SEQ ID NO: 311913 - DNA, 53 bp, Artificial
  Synthetic oligonucleotide
acccatagagtgggtaagagatcttgtgtgaagtctgtgtatgttttgggtaa

SEQ ID NO: 311914 - DNA, 55 bp, Artificial
  Synthetic oligonucleotide
acccatagcagatgtttgctgatggaagggcaaataacatgctcttctagcaaaa

SEQ ID NO: 311915 - DNA, 60 bp, Artificial
  Synthetic oligonucleotide
acccataggacgctctaatacagacacggtgcgaagagtctattgagctagttagtagtc

SEQ ID NO: 311916 - DNA, 60 bp, Artificial
  Synthetic oligonucleotide
acccatatatgaatgtgcatgggttagctctaccggcattgtgaagaaggggcttgagtg

SEQ ID NO: 311917 - DNA, 57 bp, Artificial
  Synthetic oligonucleotide
acccatcacacgcgttcaatggtgtgaaactggggggagatgctcgtcaaacccaat

SEQ ID NO: 311918 - DNA, 55 bp, Artificial
  Synthetic oligonucleotide
acccatcagaaagttctgtaggtacttcgcccagtacatctggaatgctcgcctc

SEQ ID NO: 311919 - DNA, 60 bp, Artificial
  Synthetic oligonucleotide
acccatcagagctcagcttggcccacagctaaattcatctcagcaatgcagatggtgacg

SEQ ID NO: 311920 - DNA, 51 bp, Artificial
  Synthetic oligonucleotide
acccatccgttgccgctaccctcgggttcggcaggttcatgtcacatgctt

SEQ ID NO: 311921 - DNA, 55 bp, Artificial
  Synthetic oligonucleotide
acccatcctaactatattgaatgggttgacacatatcggatccctagaggtggcg

SEQ ID NO: 311922 - DNA, 60 bp, Artificial
  Synthetic oligonucleotide
acccatcgacaatgtaatgggaatgattggaatattgcctgacatgaccccaagcaccga

SEQ ID NO: 311923 - DNA, 59 bp, Artificial
  Synthetic oligonucleotide
acccatcgcttcaggccaaggcaaggctattaaagcgtgggctggttacagcgtatcga

SEQ ID NO: 311924 - DNA, 57 bp, Artificial
  Synthetic oligonucleotide
acccatcggttatgggaagacaattgagacataccaggccagggagggatacacaag

SEQ ID NO: 311925 - DNA, 55 bp, Artificial
  Synthetic oligonucleotide
acccatctcctccatgagcattgggccaaccgtgcgactctcccgtccacggtca

SEQ ID NO: 311926 - DNA, 57 bp, Artificial
  Synthetic oligonucleotide
acccatcttaatggtggggctagctattgcgggggggatgatctacgcgtcctacac

SEQ ID NO: 311927 - DNA, 55 bp, Artificial
  Synthetic oligonucleotide
acccatctttaaatggctttctgtctaaggaacaagaagatgtcatgattgaggg

SEQ ID NO: 311928 - DNA, 54 bp, Artificial
  Synthetic oligonucleotide
acccatctttgtccttttcctgaccttagccctctatgtttcttacctatttga

SEQ ID NO: 311929 - DNA, 60 bp, Artificial
  Synthetic oligonucleotide
acccatgaattcatgctcagtgtacttgaattcataacaccgaagtctatgtttacagaa

SEQ ID NO: 311930 - DNA, 60 bp, Artificial
  Synthetic oligonucleotide
acccatgacctggccacttatacctcatgtcatattctgccacccaaaacaattaggagc

SEQ ID NO: 311931 - DNA, 60 bp, Artificial
  Synthetic oligonucleotide
acccatgcagtaggaaatgacacatccaatcatggagttacagccatgataactcccagg

SEQ ID NO: 311932 - DNA, 60 bp, Artificial
  Synthetic oligonucleotide
acccatgccaacaacatgtatgagatgggcaagtccatgcggcccgtctacacagctgcc

SEQ ID NO: 311933 - DNA, 57 bp, Artificial
  Synthetic oligonucleotide
acccatggaatcggggagccactcgaggtaaagttgattacgtgacatatgaaagga

SEQ ID NO: 311934 - DNA, 60 bp, Artificial
  Synthetic oligonucleotide
acccatggaggcttctgctaatgggttatcacatgatgataatgcgacaagatcgcaaaa

SEQ ID NO: 311935 - DNA, 50 bp, Artificial
  Synthetic oligonucleotide
acccatggcatatatgaacgcacagtcaatagccatggagttgcgggcca

SEQ ID NO: 311936 - DNA, 60 bp, Artificial
  Synthetic oligonucleotide
acccatgtatgtacgccattcgtcgcttgagctgcagtgatgtactcccctgtgcgtgaa

SEQ ID NO: 311937 - DNA, 60 bp, Artificial
  Synthetic oligonucleotide
acccatgtcaacagtgaggatgattatacagaagacagcttacagctcagtgtctcgaaa

SEQ ID NO: 311938 - DNA, 55 bp, Artificial
  Synthetic oligonucleotide
acccatgtgacaacctatgtgacgtatccgactcgatacagtaatggtgatggac

SEQ ID NO: 311939 - DNA, 60 bp, Artificial
  Synthetic oligonucleotide
acccatgttatcatttcttattgacatattggccgcgcagcggaattggctccgcaggtg

SEQ ID NO: 311940 - DNA, 58 bp, Artificial
  Synthetic oligonucleotide
acccattagggtgtaggatgtacgcattgcaccaaggaacgaccattagaaacaagca

SEQ ID NO: 311941 - DNA, 58 bp, Artificial
  Synthetic oligonucleotide
acccattaggttcactccagtgggcatgggtgataacaattggaggcagtgggaatta

SEQ ID NO: 311942 - DNA, 58 bp, Artificial
  Synthetic oligonucleotide
acccattctggtaccctctagaatgaagcaagaggcttttgctgatgtcggcaaccgt

SEQ ID NO: 311943 - DNA, 56 bp, Artificial
  Synthetic oligonucleotide
acccattgatttagtgcagcatgagtttggtaaggttagaacacgcttgttacttg

SEQ ID NO: 311944 - DNA, 60 bp, Artificial
  Synthetic oligonucleotide
acccattgtctagtgcacccagcacagacctcttcatgggatgacccccatggggagact

SEQ ID NO: 311945 - DNA, 50 bp, Artificial
  Synthetic oligonucleotide
acccatttcattcaacttgagaggcggcaatatatcttttgggtctgagt

SEQ ID NO: 311946 - DNA, 54 bp, Artificial
  Synthetic oligonucleotide
accccaaaagatgaaaggcttaagagatctaagattgaaactcctggtactagg

SEQ ID NO: 311947 - DNA, 60 bp, Artificial
  Synthetic oligonucleotide
accccaaaccacattcactgatgcgcagctggttgaaacatggcttgcagggatcgatcc

SEQ ID NO: 311948 - DNA, 55 bp, Artificial
  Synthetic oligonucleotide
accccaaaggcggcacagttgacttcttcgggtgggtgtctggactaacctcatg

SEQ ID NO: 311949 - DNA, 57 bp, Artificial
  Synthetic oligonucleotide
accccaagatgtcccttctgttacagagagctacccaaaaatctggaccttgcagag

SEQ ID NO: 311950 - DNA, 56 bp, Artificial
  Synthetic oligonucleotide
accccaagcgcttgggacaaccttcacaccttcgctctcctcaactgccaccaccg

SEQ ID NO: 311951 - DNA, 52 bp, Artificial
  Synthetic oligonucleotide
accccaagggtaacgtagtattatgtgatagtggtatgccatactacgaacc

SEQ ID NO: 311952 - DNA, 55 bp, Artificial
  Synthetic oligonucleotide
accccaatcgtccggcttccccagtcaccaccgtgtggactgtctcgcagttctt

SEQ ID NO: 311953 - DNA, 51 bp, Artificial
  Synthetic oligonucleotide
accccacatgcatgcgtggtcgaacactcaccaacaggtgtaggcagcctg

SEQ ID NO: 311954 - DNA, 53 bp, Artificial
  Synthetic oligonucleotide
accccaccaataagtccagacatagaaatacaatccttacctacctgggagtt

SEQ ID NO: 311955 - DNA, 60 bp, Artificial
  Synthetic oligonucleotide
accccaccccgcttgtatgtgcaaagcctgcattctacattgccagctgtgttttataca

SEQ ID NO: 311956 - DNA, 60 bp, Artificial
  Synthetic oligonucleotide
accccaccttcactataagcacacagactgtccctcaagacgctgtctcacgtagtcagc

SEQ ID NO: 311957 - DNA, 50 bp, Artificial
  Synthetic oligonucleotide
accccacgctggcctatgattacaaggctttcattctgcatccagaagag

SEQ ID NO: 311958 - DNA, 51 bp, Artificial
  Synthetic oligonucleotide
accccactaccctaaccgcgccggctataactcattgcttgcttcttgtat

SEQ ID NO: 311959 - DNA, 58 bp, Artificial
  Synthetic oligonucleotide
accccactctgtataccaacgaaaatgccatggggactgttagcctagccacccatca

SEQ ID NO: 311960 - DNA, 53 bp, Artificial
  Synthetic oligonucleotide
accccactctgtgtcactttaaactgtacaaatgttaatgttaccagtaaggg

SEQ ID NO: 311961 - DNA, 57 bp, Artificial
  Synthetic oligonucleotide
accccactctgtgtcactttaagatgtgaggatgttccgtttaataagagtgagacg

SEQ ID NO: 311962 - DNA, 59 bp, Artificial
  Synthetic oligonucleotide
accccactggggtgagcacccagacttgcctccttgtgagaggccgcaccttggcagta

SEQ ID NO: 311963 - DNA, 55 bp, Artificial
  Synthetic oligonucleotide
accccagaaccatcatgaagggcacaaggctccacgtctcaccagctcacactga

SEQ ID NO: 311964 - DNA, 58 bp, Artificial
  Synthetic oligonucleotide
accccagacactcacgtggtgtacaaacctggtacttcagaagaaagttctcatgcta

SEQ ID NO: 311965 - DNA, 60 bp, Artificial
  Synthetic oligonucleotide
accccagagtagttaggcgtgtagtgatcaagggatggtggccacttattcagtgtatgc

SEQ ID NO: 311966 - DNA, 60 bp, Artificial
  Synthetic oligonucleotide
accccagagtgtagcttaggccgatgagtctggacaatcctcactggcgacagtggtcca

SEQ ID NO: 311967 - DNA, 57 bp, Artificial
  Synthetic oligonucleotide
accccagatgagaagttccaaaaggaccctccataccactggatgggctatgaactg

SEQ ID NO: 311968 - DNA, 53 bp, Artificial
  Synthetic oligonucleotide
accccagcactaactcctttaactaggcgggcgtgctggttacagtaggaggg

SEQ ID NO: 311969 - DNA, 58 bp, Artificial
  Synthetic oligonucleotide
accccaggacagttgttattttggaccatctaggcaacaacagaactgtgagtgttga

SEQ ID NO: 311970 - DNA, 60 bp, Artificial
  Synthetic oligonucleotide
accccaggactctctgacttggttgaagagacactggctggaagattgagactcaatctg

SEQ ID NO: 311971 - DNA, 57 bp, Artificial
  Synthetic oligonucleotide
accccaggaggactgggtgaacaaagccgcgaagtgatccatgtaagccctcagaac

SEQ ID NO: 311972 - DNA, 60 bp, Artificial
  Synthetic oligonucleotide
accccaggcatagggcctccgacacagtgactttcattatggctgtgcggaagaggttgc

SEQ ID NO: 311973 - DNA, 56 bp, Artificial
  Synthetic oligonucleotide
accccagggagctataaacagtagtctccctttccagaatatacacccattcacaa

SEQ ID NO: 311974 - DNA, 53 bp, Artificial
  Synthetic oligonucleotide
accccagggtcaacctacggaaatccctgagttcctcggatgtccaggccgtc

SEQ ID NO: 311975 - DNA, 55 bp, Artificial
  Synthetic oligonucleotide
accccagtttgcgaaaacgtaaacgcaagcatgttattcgttaatgttttgcaga

SEQ ID NO: 311976 - DNA, 60 bp, Artificial
  Synthetic oligonucleotide
accccatacacaggcaccagagcactcacagcgggcactctgatccttacagtgaactgc

SEQ ID NO: 311977 - DNA, 58 bp, Artificial
  Synthetic oligonucleotide
accccatacggcagctcgcgttactgccggccggcgtgtcgtgatagacgaggcacct

SEQ ID NO: 311978 - DNA, 55 bp, Artificial
  Synthetic oligonucleotide
accccatctataaggccaagctggataaggatgcaacctatcccatagaatgctg

SEQ ID NO: 311979 - DNA, 57 bp, Artificial
  Synthetic oligonucleotide
accccatctcggtggggttatcatggtatcatgagggtacacaggcgtttgtcaagc

SEQ ID NO: 311980 - DNA, 55 bp, Artificial
  Synthetic oligonucleotide
accccatgaccttattaggcactttgactatacgtgaggtgcctttacttttgac

SEQ ID NO: 311981 - DNA, 59 bp, Artificial
  Synthetic oligonucleotide
accccatgcatcaactattgaggcatttccaaaaggatgcaaaggtgctgtttcaaaac

SEQ ID NO: 311982 - DNA, 55 bp, Artificial
  Synthetic oligonucleotide
accccatgctggctcatgagtacacgacctttattctatacccagaggaatttgg

SEQ ID NO: 311983 - DNA, 55 bp, Artificial
  Synthetic oligonucleotide
accccatggcagcttacttacccaccttggcccgatacttctctgcgcttctcac

SEQ ID NO: 311984 - DNA, 55 bp, Artificial
  Synthetic oligonucleotide
accccatggggtgtcaagtttgataatgttgccggtgaagtgattaaggaatcca

SEQ ID NO: 311985 - DNA, 58 bp, Artificial
  Synthetic oligonucleotide
accccatgtggtcaaaactgctactcaaggggaagtcaacgtgactggtgtgatacca

SEQ ID NO: 311986 - DNA, 52 bp, Artificial
  Synthetic oligonucleotide
accccatgttgttaaaccacacgaaaagggaataaatccgaattatctactg

SEQ ID NO: 311987 - DNA, 55 bp, Artificial
  Synthetic oligonucleotide
accccattgcacatcttaactccgtggaagaaggtccttacgagtgggagtgtgt

SEQ ID NO: 311988 - DNA, 54 bp, Artificial
  Synthetic oligonucleotide
accccattgctatttctatgacttaaaacgttgggttggcgttgataggttgtc

SEQ ID NO: 311989 - DNA, 60 bp, Artificial
  Synthetic oligonucleotide
accccattgtagcatactggacatcaaatggcagtacaaaaacatgcaattggtgcacaa

SEQ ID NO: 311990 - DNA, 53 bp, Artificial
  Synthetic oligonucleotide
acccccaaacggttcttatggttcttgagaacgcggttggcatactcaatccc

SEQ ID NO: 311991 - DNA, 57 bp, Artificial
  Synthetic oligonucleotide
acccccaaccactgctgacatcctccccggggatctcgacagtgacgggatcctcaa

SEQ ID NO: 311992 - DNA, 55 bp, Artificial
  Synthetic oligonucleotide
acccccacatccgtagagccaggcctgccccggccgctccggagccctcacaggt

SEQ ID NO: 311993 - DNA, 58 bp, Artificial
  Synthetic oligonucleotide
acccccacgttgtgtcctcagtgaacgcactccttggaaggattgctatggctcggtc

SEQ ID NO: 311994 - DNA, 55 bp, Artificial
  Synthetic oligonucleotide
acccccactttggtggaaagttcaaccacgctagatccgacgtggtgagtcgagc

SEQ ID NO: 311995 - DNA, 60 bp, Artificial
  Synthetic oligonucleotide
acccccagcgctcaggacgggacatcacgtgcctcaacaaatgcacgtgagtgatataag

SEQ ID NO: 311996 - DNA, 55 bp, Artificial
  Synthetic oligonucleotide
acccccaggatcaacacccgtctcttgcattcggtgcgtaccacccaccaatacc

SEQ ID NO: 311997 - DNA, 54 bp, Artificial
  Synthetic oligonucleotide
acccccaggatccatgttaacacatggctcagtgccctctgacttaatcccaaa

SEQ ID NO: 311998 - DNA, 57 bp, Artificial
  Synthetic oligonucleotide
acccccatacctcgggaaagaggagatgctcgaatggtgtcgcgaggagggtctgga

SEQ ID NO: 311999 - DNA, 60 bp, Artificial
  Synthetic oligonucleotide
accccccaatgctggtgctacatagacacatatctgcgtaatgctttagacggcaaccag

SEQ ID NO: 312000 - DNA, 52 bp, Artificial
  Synthetic oligonucleotide
accccccacccgcaaaactgtaggtggctcttaggagcacccacacccgttc

SEQ ID NO: 312001 - DNA, 54 bp, Artificial
  Synthetic oligonucleotide
accccccacccgctaaatcgtaggtgactcctaggagcacccacacacgttcta

SEQ ID NO: 312002 - DNA, 51 bp, Artificial
  Synthetic oligonucleotide
acccccccaaccactgctacgacccccaaggttcctccatccttcttccac

SEQ ID NO: 312003 - DNA, 57 bp, Artificial
  Synthetic oligonucleotide
accccccgtaaatacgcgggcgacggctctctgaagaagtacgcgatgccagtcaga

SEQ ID NO: 312004 - DNA, 58 bp, Artificial
  Synthetic oligonucleotide
acccccctcgcgagagccgcgtgggaaacagcaagacacactccagtcaattcctggc

SEQ ID NO: 312005 - DNA, 50 bp, Artificial
  Synthetic oligonucleotide
acccccctggcagccccaaaactatataatatgatctacgcctactttgc

SEQ ID NO: 312006 - DNA, 55 bp, Artificial
  Synthetic oligonucleotide
accccccttacagccatgggacagggacagggtacaccatggatacagttaacag

SEQ ID NO: 312007 - DNA, 58 bp, Artificial
  Synthetic oligonucleotide
acccccgcagcctttgcaatgtccacacaccgcgcaagcttgggttcactgtcgccgg

SEQ ID NO: 312008 - DNA, 60 bp, Artificial
  Synthetic oligonucleotide
acccccgccccaggatcagcggagtcatacggactcaatctcagccgttcattcagtaga

SEQ ID NO: 312009 - DNA, 60 bp, Artificial
  Synthetic oligonucleotide
acccccgctatgcgagctgcaagagctctgctgcggagagccaaacgcgtggggcgaaga

SEQ ID NO: 312010 - DNA, 57 bp, Artificial
  Synthetic oligonucleotide
acccccgcttgctaactgcgcttggtaactttatctacagtaggcatggagacaccc

SEQ ID NO: 312011 - DNA, 54 bp, Artificial
  Synthetic oligonucleotide
acccccgttctcaactgacgaatatttccttacacaacgtaagacatttggcga

SEQ ID NO: 312012 - DNA, 50 bp, Artificial
  Synthetic oligonucleotide
accccctaaagtcacccgtagtctgatgtctggtaacccggattggagta

SEQ ID NO: 312013 - DNA, 50 bp, Artificial
  Synthetic oligonucleotide
accccctagactgttcaaagaagataaacccttttacccctggctaccca

SEQ ID NO: 312014 - DNA, 50 bp, Artificial
  Synthetic oligonucleotide
accccctcgggccgtcgctctgtgtcatgatgggctcaaccggtaactcg

SEQ ID NO: 312015 - DNA, 53 bp, Artificial
  Synthetic oligonucleotide
accccctgaccaccaagtcaagtggagtgccaataacggggttgatctggggg

SEQ ID NO: 312016 - DNA, 57 bp, Artificial
  Synthetic oligonucleotide
accccctgcatcatgataaggccgaacatggtgcatgaaaagggaggcccccggaag

SEQ ID NO: 312017 - DNA, 52 bp, Artificial
  Synthetic oligonucleotide
accccctgccaagccgtcaaactatggagaagggtgtccacctgaacataat

SEQ ID NO: 312018 - DNA, 54 bp, Artificial
  Synthetic oligonucleotide
accccctgctggaaattatcatgctagatggtaaacagtgtcaagaacctatga

SEQ ID NO: 312019 - DNA, 51 bp, Artificial
  Synthetic oligonucleotide
acccccttcaacaccggttgcaagggtacaaagtacggatgaatttgttca

SEQ ID NO: 312020 - DNA, 54 bp, Artificial
  Synthetic oligonucleotide
accccctttatctgggtgatattccttgcttttctgaataaaagcttttctcat

SEQ ID NO: 312021 - DNA, 51 bp, Artificial
  Synthetic oligonucleotide
accccctttccaagtgccgttcacccggctagtccaaaacgatgttattac

SEQ ID NO: 312022 - DNA, 50 bp, Artificial
  Synthetic oligonucleotide
acccccttttcaaggccaccctgaaacgcggacgcccgattaagcctccg

SEQ ID NO: 312023 - DNA, 55 bp, Artificial
  Synthetic oligonucleotide
accccgaagctcactctcaacgcctctgacccaactgggtctggctcaaccgcca

SEQ ID NO: 312024 - DNA, 54 bp, Artificial
  Synthetic oligonucleotide
accccgaatctttgtatcaccctctaactacactcgtattttgtctaccttcta

SEQ ID NO: 312025 - DNA, 51 bp, Artificial
  Synthetic oligonucleotide
accccgacatcgattgatgatttcgatgtgtctgattttttgacgactttc

SEQ ID NO: 312026 - DNA, 57 bp, Artificial
  Synthetic oligonucleotide
accccgactaaagtgaggctaattcctacactgaacctcgagtacatcacgtgtcac

SEQ ID NO: 312027 - DNA, 55 bp, Artificial
  Synthetic oligonucleotide
accccgacttgctggacttctctaggagagtccctttcccagccctgaggcggct

SEQ ID NO: 312028 - DNA, 55 bp, Artificial
  Synthetic oligonucleotide
accccgagatctacacctacaagatatcgggtcaaacactccactatgtgccgga

SEQ ID NO: 312029 - DNA, 53 bp, Artificial
  Synthetic oligonucleotide
accccgaggccacttacaccagatgcggctcggggccttggttaacacccagg

SEQ ID NO: 312030 - DNA, 53 bp, Artificial
  Synthetic oligonucleotide
accccgaggctacttacaccaaatgcggttcgggcccctggctgacgcctagg

SEQ ID NO: 312031 - DNA, 54 bp, Artificial
  Synthetic oligonucleotide
accccgagggtgggccgcgactgggtgcatacctgcataaggacgttacctggg

SEQ ID NO: 312032 - DNA, 58 bp, Artificial
  Synthetic oligonucleotide
accccgatctgtatcggtactcaatccacaagtcgactctccattacacaccagaagg

SEQ ID NO: 312033 - DNA, 59 bp, Artificial
  Synthetic oligonucleotide
accccgattcggctctctcaaacttgctcatgcaattggggtattggggacaatatata

SEQ ID NO: 312034 - DNA, 60 bp, Artificial
  Synthetic oligonucleotide
accccgattgaggctctctcaaactggctgattatatcggtgtattggtatcctatatat

SEQ ID NO: 312035 - DNA, 56 bp, Artificial
  Synthetic oligonucleotide
accccgattgaggttctcaacactggcttatactattggtgtattgggggtcaata

SEQ ID NO: 312036 - DNA, 57 bp, Artificial
  Synthetic oligonucleotide
accccgcattactgcaaatacagacaatgttactagtgaaaccggggagtctagctg

SEQ ID NO: 312037 - DNA, 51 bp, Artificial
  Synthetic oligonucleotide
accccgccaaccaatcatcacaggacctccccttgagcctgaacctgcccc

SEQ ID NO: 312038 - DNA, 59 bp, Artificial
  Synthetic oligonucleotide
accccgccgacattggactacccaagactgcaattgttccatctacaccggacacatca

SEQ ID NO: 312039 - DNA, 51 bp, Artificial
  Synthetic oligonucleotide
accccgcctcgagaccccgagttagagaccctccgtacagttgttcttcgt

SEQ ID NO: 312040 - DNA, 53 bp, Artificial
  Synthetic oligonucleotide
accccgcctcgagactttagcccgagaccctccgtacagttttttgtgctctc

SEQ ID NO: 312041 - DNA, 51 bp, Artificial
  Synthetic oligonucleotide
accccgcctcggcacaaaaccttggcacattgactttagtcaataactctc

SEQ ID NO: 312042 - DNA, 57 bp, Artificial
  Synthetic oligonucleotide
accccgcctcgtctccctcagctaggatccctcgtgcaatccgcgtgcgttttcctc

SEQ ID NO: 312043 - DNA, 53 bp, Artificial
  Synthetic oligonucleotide
accccgcctcgttccaagacctcgttccaaaactctctatataatgggctcag

SEQ ID NO: 312044 - DNA, 60 bp, Artificial
  Synthetic oligonucleotide
accccgcctgagagcctgagtccatctgaaggatgccacattgtcagaagtcatcctggg

SEQ ID NO: 312045 - DNA, 54 bp, Artificial
  Synthetic oligonucleotide
accccgcgctctagtacgcccgtccccgggaccagttcaggagaatcatttgtc

SEQ ID NO: 312046 - DNA, 51 bp, Artificial
  Synthetic oligonucleotide
accccgcgtagacccgacggcagaggacccaaccccgccactaagaggggc

SEQ ID NO: 312047 - DNA, 55 bp, Artificial
  Synthetic oligonucleotide
accccgcgtgcgggatctgatcaggagaccaattgccagtgctctacactggcac

SEQ ID NO: 312048 - DNA, 54 bp, Artificial
  Synthetic oligonucleotide
accccgcgttagtcaacaactcttgcgcctccacaaagggcacaaactccccgc

SEQ ID NO: 312049 - DNA, 55 bp, Artificial
  Synthetic oligonucleotide
accccgctatttactcctgtgcctactcctactttcagtaggggtaggcatcttc

SEQ ID NO: 312050 - DNA, 53 bp, Artificial
  Synthetic oligonucleotide
accccgctgaaatgatccggagcctggaaaccttctacggtaccccgcacacc

SEQ ID NO: 312051 - DNA, 58 bp, Artificial
  Synthetic oligonucleotide
accccgctgagtttatcatgtccgacgggcttgcagcctacaccctgacacctcggcc

SEQ ID NO: 312052 - DNA, 57 bp, Artificial
  Synthetic oligonucleotide
accccggaaggttgatgtgactaagggtttggctaggatgaattgcgaggattcata

SEQ ID NO: 312053 - DNA, 53 bp, Artificial
  Synthetic oligonucleotide
accccggataaatactcactggcagggttcataacttgttggtaccagactaa

SEQ ID NO: 312054 - DNA, 53 bp, Artificial
  Synthetic oligonucleotide
accccggatggttatgcgcccgcccccgattttatgctgccgttcccaataaa

SEQ ID NO: 312055 - DNA, 55 bp, Artificial
  Synthetic oligonucleotide
accccggctggttatgcgattctaaagtgtaacaataagacgttcaatggaaatg

SEQ ID NO: 312056 - DNA, 57 bp, Artificial
  Synthetic oligonucleotide
accccggctggttttgcgcttctgaaatgtaacaataagacattcaatggaacagga

SEQ ID NO: 312057 - DNA, 54 bp, Artificial
  Synthetic oligonucleotide
accccgggagcggaaactgtgatgcaccgataaccggagggagcccagatcccg

SEQ ID NO: 312058 - DNA, 54 bp, Artificial
  Synthetic oligonucleotide
accccgggtcgatctgattacctgttttgctcagggtaaggccgataataatcg

SEQ ID NO: 312059 - DNA, 54 bp, Artificial
  Synthetic oligonucleotide
accccggtacctgcgaatcctgcaacgaccttcagctctactccggtaaactcc

SEQ ID NO: 312060 - DNA, 55 bp, Artificial
  Synthetic oligonucleotide
accccggtgggtgctataaattccagtatgcctttccacaatgttcatcccctta

SEQ ID NO: 312061 - DNA, 57 bp, Artificial
  Synthetic oligonucleotide
accccggttcttctacccgcatctcctctgagaccgcgaaagcgatagcagtgcttt

SEQ ID NO: 312062 - DNA, 57 bp, Artificial
  Synthetic oligonucleotide
accccggttggagtgctcagggtgaccgtgtcacgcgtagctaccgagatttgtgta

SEQ ID NO: 312063 - DNA, 53 bp, Artificial
  Synthetic oligonucleotide
accccgtatggtggggcgtcgatctcgggacaccgatgcgtgtacactatgtg

SEQ ID NO: 312064 - DNA, 51 bp, Artificial
  Synthetic oligonucleotide
accccgtggaacttaggtgcggcccaagccgtttccgaagctgtaggaacg

SEQ ID NO: 312065 - DNA, 51 bp, Artificial
  Synthetic oligonucleotide
accccgtgggttaatggagacgttcaaaccggcaccctctaccctctaata

SEQ ID NO: 312066 - DNA, 49 bp, Artificial
  Synthetic oligonucleotide
accccgttcccaacccgtgtcacaggcgcccccgaaatcccccttccga

SEQ ID NO: 312067 - DNA, 57 bp, Artificial
  Synthetic oligonucleotide
accccgttgccaggcaacggcccggtctgtgccaagtgtatgctgactcaaccccca

SEQ ID NO: 312068 - DNA, 52 bp, Artificial
  Synthetic oligonucleotide
acccctaaatttagactacccatacaaagaggaacatgggaaacatggtggg

SEQ ID NO: 312069 - DNA, 55 bp, Artificial
  Synthetic oligonucleotide
acccctaaatttgataaggccgctgcctgggttaacaggcccatgtacaggaagc

SEQ ID NO: 312070 - DNA, 56 bp, Artificial
  Synthetic oligonucleotide
acccctaagtctgtgtctggaaggcgcgtggtaatgcgctgaaaaaggtgaccttc

SEQ ID NO: 312071 - DNA, 58 bp, Artificial
  Synthetic oligonucleotide
acccctaccaacgtagagcggcaccttaatagagcggtgctggtcatgcaatcgattg

SEQ ID NO: 312072 - DNA, 60 bp, Artificial
  Synthetic oligonucleotide
acccctacgctcatccatcagagactgccgagtttctagagcgccagggcatcatttcag

SEQ ID NO: 312073 - DNA, 53 bp, Artificial
  Synthetic oligonucleotide
acccctactcgtgttacaggcggggtttttcttgttgacaagaatcctcacaa

SEQ ID NO: 312074 - DNA, 52 bp, Artificial
  Synthetic oligonucleotide
acccctagagaaaggtataaaaccttattacccagataatgtagttaatcat

SEQ ID NO: 312075 - DNA, 58 bp, Artificial
  Synthetic oligonucleotide
acccctagcacatgcaatcggagaaggtgtagactacctcctgggcgacgaggcccaa

SEQ ID NO: 312076 - DNA, 53 bp, Artificial
  Synthetic oligonucleotide
acccctagcgggggagaactccagaactgcccctgtaacactttccaggactc

SEQ ID NO: 312077 - DNA, 53 bp, Artificial
  Synthetic oligonucleotide
acccctagtaagcttcaaagaagatctcaccccaagtgacaaccccttttcta

SEQ ID NO: 312078 - DNA, 53 bp, Artificial
  Synthetic oligonucleotide
acccctatactgttttcaccgaaggttcccgattatataccaccacggcgata

SEQ ID NO: 312079 - DNA, 53 bp, Artificial
  Synthetic oligonucleotide
acccctatcatgtccaggtacttaaggacctgggttttaaagactctcaagaa

SEQ ID NO: 312080 - DNA, 54 bp, Artificial
  Synthetic oligonucleotide
acccctattcctggtgttaggcgtgtggcaggacctagattatatagtcaagcg

SEQ ID NO: 312081 - DNA, 55 bp, Artificial
  Synthetic oligonucleotide
acccctcaagttctgccaaaaagaccctcatatccttggtctccagctttacaag

SEQ ID NO: 312082 - DNA, 60 bp, Artificial
  Synthetic oligonucleotide
acccctcacattgttatgatttgtgtatacaatgtctccgacatctgttgaccgtgtagg

SEQ ID NO: 312083 - DNA, 54 bp, Artificial
  Synthetic oligonucleotide
acccctcactaagccttaatgcatatggaaactcccgatgggtgccaatagata

SEQ ID NO: 312084 - DNA, 56 bp, Artificial
  Synthetic oligonucleotide
acccctcagaacattggaccaggcttttaccgcacattgaacttattcaggtataa

SEQ ID NO: 312085 - DNA, 59 bp, Artificial
  Synthetic oligonucleotide
acccctcatgcgcgacttttagagcagggcacgaaagtgtcgggcatgacgcacccgct

SEQ ID NO: 312086 - DNA, 52 bp, Artificial
  Synthetic oligonucleotide
acccctcccctcgtaaaactttggtataagttagagacagaggccatagagg

SEQ ID NO: 312087 - DNA, 52 bp, Artificial
  Synthetic oligonucleotide
acccctccgagtacagggtaagcgagctaaaagaaaacttgattaccactac

SEQ ID NO: 312088 - DNA, 59 bp, Artificial
  Synthetic oligonucleotide
acccctccgggtgcgaagccatacacatgacaaggtgcgaagagccccgtgtgctcact

SEQ ID NO: 312089 - DNA, 53 bp, Artificial
  Synthetic oligonucleotide
acccctcctctaatttgaaccggtttcccgtatttgcaattgctttgccagtc

SEQ ID NO: 312090 - DNA, 52 bp, Artificial
  Synthetic oligonucleotide
acccctcctctagtaaaattgtggtaccagttagagaaagaccccatagtag

SEQ ID NO: 312091 - DNA, 55 bp, Artificial
  Synthetic oligonucleotide
acccctcctgcaacagcccagggacccactgaaaatgacagtcacaacgccactg

SEQ ID NO: 312092 - DNA, 51 bp, Artificial
  Synthetic oligonucleotide
acccctcgttcccgaatctacgtccaacaaagtgacccgatggtttaaatc

SEQ ID NO: 312093 - DNA, 54 bp, Artificial
  Synthetic oligonucleotide
acccctctaatccatattccaggagaagttaagaacctgttagaagttgcccaa

SEQ ID NO: 312094 - DNA, 60 bp, Artificial
  Synthetic oligonucleotide
acccctctccatgaagatgctactaaaggagcctgagatgcaatctgaggtccaacgtgt

SEQ ID NO: 312095 - DNA, 55 bp, Artificial
  Synthetic oligonucleotide
acccctctgtagcggccacccttgggttcgggtcatacatgtctactgcccacgg

SEQ ID NO: 312096 - DNA, 56 bp, Artificial
  Synthetic oligonucleotide
acccctgacaggttcgatacttgaaatgtgggatggggaaatctaccactatggac

SEQ ID NO: 312097 - DNA, 59 bp, Artificial
  Synthetic oligonucleotide
acccctgagatcagcacaaggcctaaagtaaatggtcaagctggaagaatgaccttcta

SEQ ID NO: 312098 - DNA, 60 bp, Artificial
  Synthetic oligonucleotide
acccctgagccgataccagcattgccgggaattgagcaacgtaagaataagattgttgca

SEQ ID NO: 312099 - DNA, 60 bp, Artificial
  Synthetic oligonucleotide
acccctgagcgcgaggtgatcagggtcgaggatcgtgcgcgtaacctgctgggcctgtcc

SEQ ID NO: 312100 - DNA, 55 bp, Artificial
  Synthetic oligonucleotide
acccctgcagggtttgcgcttctaaaatgtagagataaggggttcaatggaacag

SEQ ID NO: 312101 - DNA, 55 bp, Artificial
  Synthetic oligonucleotide
acccctgcgccatcttccaagaggcctaccctattctctgcgccagcgataaggc

SEQ ID NO: 312102 - DNA, 58 bp, Artificial
  Synthetic oligonucleotide
acccctgctcacaactcacattgggtcccgaggggtcttgataagagtgaggtcgaca

SEQ ID NO: 312103 - DNA, 54 bp, Artificial
  Synthetic oligonucleotide
acccctggaatggagcctcgtcgtcggtgtagacgaacgtctcgtacttgcggg

SEQ ID NO: 312104 - DNA, 53 bp, Artificial
  Synthetic oligonucleotide
acccctggacgccggacccgtccgatgtcctggtatttgtaccgtacgatcaa

SEQ ID NO: 312105 - DNA, 59 bp, Artificial
  Synthetic oligonucleotide
acccctggatgatgagaactctggtaagaactctagtaactctagtgagtattatagat

SEQ ID NO: 312106 - DNA, 56 bp, Artificial
  Synthetic oligonucleotide
acccctggccgacccatgccggttcctaagatgcgtacatgggatctaacttagaa

SEQ ID NO: 312107 - DNA, 57 bp, Artificial
  Synthetic oligonucleotide
acccctgggacctcagacgaggcatgcttagcacgagcagtattaagagaatgctcc

SEQ ID NO: 312108 - DNA, 56 bp, Artificial
  Synthetic oligonucleotide
acccctgggaggataggtaggtaccactacgctacgcagcagccttagctacgccg

SEQ ID NO: 312109 - DNA, 57 bp, Artificial
  Synthetic oligonucleotide
acccctgggagggtaggtaccatggtacactacgctacgcagcagccttagctacgc

SEQ ID NO: 312110 - DNA, 60 bp, Artificial
  Synthetic oligonucleotide
acccctgggcagccacttaggctgctgtcttgtacgcctgagcagctgccatgacagctg

SEQ ID NO: 312111 - DNA, 60 bp, Artificial
  Synthetic oligonucleotide
acccctgtgcgtgaatccatgatttgcgcaccctaatgcgacgtagatagaacacccgca

SEQ ID NO: 312112 - DNA, 55 bp, Artificial
  Synthetic oligonucleotide
acccctgtgtcgactaaagacgttctggagacttgggaaaagatgaaggagcaca

SEQ ID NO: 312113 - DNA, 50 bp, Artificial
  Synthetic oligonucleotide
acccctgttcctgtgtctagtaggcgcgtcggagtgcgcctataaagtta

SEQ ID NO: 312114 - DNA, 55 bp, Artificial
  Synthetic oligonucleotide
accccttagttctagggtaggaaatgcgttgcgaggtgtgtttggtagcgacaca

SEQ ID NO: 312115 - DNA, 54 bp, Artificial
  Synthetic oligonucleotide
accccttagttgtgtcgcctttaatctccgcaggtattttctgcgtagaaccaa

SEQ ID NO: 312116 - DNA, 56 bp, Artificial
  Synthetic oligonucleotide
accccttcattcagatgttttctcaccaacaggcaaaagatgacaccctactttgg

SEQ ID NO: 312117 - DNA, 59 bp, Artificial
  Synthetic oligonucleotide
accccttcattgactcaggaagtgactcagatggacccttctaaaagccacagacagta

SEQ ID NO: 312118 - DNA, 53 bp, Artificial
  Synthetic oligonucleotide
accccttgagagcttcgacccaaaagagaggcccgaaacacctcggtcaccca

SEQ ID NO: 312119 - DNA, 51 bp, Artificial
  Synthetic oligonucleotide
accccttgctaatggctgtgagcctgatgttgttaagcgagcctttgatgt

SEQ ID NO: 312120 - DNA, 52 bp, Artificial
  Synthetic oligonucleotide
accccttgggacgcggcattccactgttgacaggggagaacgtccctcctga

SEQ ID NO: 312121 - DNA, 52 bp, Artificial
  Synthetic oligonucleotide
accccttggtcctactgttggtttggtgtttaagtcaacacttgtgttgtcc

SEQ ID NO: 312122 - DNA, 60 bp, Artificial
  Synthetic oligonucleotide
accccttgtccgtcaaggatcaagtggtgcgctaccagcggcctcgtacagaccatgatc

SEQ ID NO: 312123 - DNA, 58 bp, Artificial
  Synthetic oligonucleotide
acccctttggctgcagagcccatgtccgatcgttctcctatgaacggtatatttgttc

SEQ ID NO: 312124 - DNA, 52 bp, Artificial
  Synthetic oligonucleotide
acccctttgggttcttcaagccagtttgcttaaagtaccctacttcgtgcgc

SEQ ID NO: 312125 - DNA, 53 bp, Artificial
  Synthetic oligonucleotide
accccttttgaggtggaaaggaaagcaaagctaaggcagttgtccttgagttg

SEQ ID NO: 312126 - DNA, 53 bp, Artificial
  Synthetic oligonucleotide
acccgaaaatcgagacaaataaatttgcagcaatatgcactcacttggaagta

SEQ ID NO: 312127 - DNA, 57 bp, Artificial
  Synthetic oligonucleotide
acccgaaatgatttaggacttctaggcatatttgaagaataagtggagacaccagcg

SEQ ID NO: 312128 - DNA, 54 bp, Artificial
  Synthetic oligonucleotide
acccgaacatacaagagattgccttgcccacgacaggggaggtccctttctacg

SEQ ID NO: 312129 - DNA, 60 bp, Artificial
  Synthetic oligonucleotide
acccgaagagcccattagtcagatcccttactgaatctggcagtggatactacgctaatc

SEQ ID NO: 312130 - DNA, 54 bp, Artificial
  Synthetic oligonucleotide
acccgaatagagctccagtccaacccgcaccagttagagttcgacccggggtca

SEQ ID NO: 312131 - DNA, 55 bp, Artificial
  Synthetic oligonucleotide
acccgaattggtttcgcgcgcataccttgacagacagtaaaggactgttttatgt

SEQ ID NO: 312132 - DNA, 59 bp, Artificial
  Synthetic oligonucleotide
acccgacaacagcagatgacacgtgttctgacgcgggatcctttagctcaatgcccccc

SEQ ID NO: 312133 - DNA, 55 bp, Artificial
  Synthetic oligonucleotide
acccgacacgccaactccgaaacgtcgtatcaacaagattaccacacgtgagatt

SEQ ID NO: 312134 - DNA, 57 bp, Artificial
  Synthetic oligonucleotide
acccgacagttgtgtccatgcccgagggaatccgacactagtctcgtcgtagaaggc

SEQ ID NO: 312135 - DNA, 52 bp, Artificial
  Synthetic oligonucleotide
acccgacctacacatgccctacaagatcctgctcatattgttgctactggat

SEQ ID NO: 312136 - DNA, 59 bp, Artificial
  Synthetic oligonucleotide
acccgacgttcttgaggcttgtcaatgagttgctgactcccaaagcttcagagttatac

SEQ ID NO: 312137 - DNA, 55 bp, Artificial
  Synthetic oligonucleotide
acccgactgaagaggagattaagagtttggacacgtggctggtgagtgacttcca

SEQ ID NO: 312138 - DNA, 56 bp, Artificial
  Synthetic oligonucleotide
acccgactgcatgcacgagggacgcatgtgacccatctgtgacgcgatctgctttc

SEQ ID NO: 312139 - DNA, 60 bp, Artificial
  Synthetic oligonucleotide
acccgactgggattgaacctgatgatcatctcaaggagagatcaagccttagatatggaa

SEQ ID NO: 312140 - DNA, 55 bp, Artificial
  Synthetic oligonucleotide
acccgacttcaccatagactgcaaaccgtagaaactagcaccttacccaacataa

SEQ ID NO: 312141 - DNA, 50 bp, Artificial
  Synthetic oligonucleotide
acccgagccgcctacggcggtcacaccatgtaggagggcacatggcgcgt

SEQ ID NO: 312142 - DNA, 59 bp, Artificial
  Synthetic oligonucleotide
acccgagccgtcttcaaggatatggtcactcgcttccagcgggagagtatgttctcacc

SEQ ID NO: 312143 - DNA, 58 bp, Artificial
  Synthetic oligonucleotide
acccgaggagaacgttgtgacttgacggacagggatagatcagagcttagcccgctgt

SEQ ID NO: 312144 - DNA, 57 bp, Artificial
  Synthetic oligonucleotide
acccgaggcacgacagtgaaaatcgccggcactacctatcagaaagtggttgactat

SEQ ID NO: 312145 - DNA, 53 bp, Artificial
  Synthetic oligonucleotide
acccgagggagacagacagtaaaagataacaaagggactaggatcaggtttaa

SEQ ID NO: 312146 - DNA, 58 bp, Artificial
  Synthetic oligonucleotide
acccgaggggagcggtgcgacttggaagacagggatagatcagagcttagcccgctac

SEQ ID NO: 312147 - DNA, 56 bp, Artificial
  Synthetic oligonucleotide
acccgaggtctagtacggatgagatgtccagtgtacttgataaatcctaaaactat

SEQ ID NO: 312148 - DNA, 60 bp, Artificial
  Synthetic oligonucleotide
acccgagtcatgagggagaggggataccgctatatgatgcaatcaaatgcatgaagacat

SEQ ID NO: 312149 - DNA, 54 bp, Artificial
  Synthetic oligonucleotide
acccgagtgccctgctcctctgttgggcagggacctcctaaccaaactaaaggc

SEQ ID NO: 312150 - DNA, 55 bp, Artificial
  Synthetic oligonucleotide
acccgatagtagcggtatgccttgtagaagggaacaaaagagtagtcaaatgggc

SEQ ID NO: 312151 - DNA, 58 bp, Artificial
  Synthetic oligonucleotide
acccgatcgtgccttccttggacatgagcaatgaagggtcttatttcttcggagacaa

SEQ ID NO: 312152 - DNA, 50 bp, Artificial
  Synthetic oligonucleotide
acccgatctatcgtacgattcgcgctgtccctgatacaatcgtaccgact

SEQ ID NO: 312153 - DNA, 55 bp, Artificial
  Synthetic oligonucleotide
acccgatctgtgctttggacggacatggtaaaaacccctggggaagcatcgcaag

SEQ ID NO: 312154 - DNA, 60 bp, Artificial
  Synthetic oligonucleotide
acccgatcttgaacggtgcaagcgaattcgctggatcgcgcatatgataaggaattataa

SEQ ID NO: 312155 - DNA, 60 bp, Artificial
  Synthetic oligonucleotide
acccgatgctccgttacgtcgagtcgactgagaaggaattgcgctcgatagagacggcaa

SEQ ID NO: 312156 - DNA, 55 bp, Artificial
  Synthetic oligonucleotide
acccgattcaactatggtctctaccatccgttggttgtccgcaatatggttcggg

SEQ ID NO: 312157 - DNA, 51 bp, Artificial
  Synthetic oligonucleotide
acccgattgacacccaaggaattccttgggttttatacgggtcgcaagtta

SEQ ID NO: 312158 - DNA, 60 bp, Artificial
  Synthetic oligonucleotide
acccgattgactctagatgaggaggagtacactctttgggacagtatacaagagttctca

SEQ ID NO: 312159 - DNA, 55 bp, Artificial
  Synthetic oligonucleotide
acccgcaaaacagctgttgaactttgacctacttcagttggcgggtgacgttgag

SEQ ID NO: 312160 - DNA, 53 bp, Artificial
  Synthetic oligonucleotide
acccgcaacggacgctcgcgttccagtcctggttcggggacgggttgcaggtg

SEQ ID NO: 312161 - DNA, 59 bp, Artificial
  Synthetic oligonucleotide
acccgcaagaatcgtcgcatccattcttctgtgtggatgggcccggccacgaagtgtgg

SEQ ID NO: 312162 - DNA, 57 bp, Artificial
  Synthetic oligonucleotide
acccgcaccgttggcggaacgcacaattataaagtgcgcaacgtcgaatctgcaggg

SEQ ID NO: 312163 - DNA, 59 bp, Artificial
  Synthetic oligonucleotide
acccgcacgttagatcaattctacgcctgcgaactggcctcctcttggctattctgtgt

SEQ ID NO: 312164 - DNA, 55 bp, Artificial
  Synthetic oligonucleotide
acccgcacttcgctattgaggtcaccgcggtgttacagcggcgtcatcgttgggg

SEQ ID NO: 312165 - DNA, 60 bp, Artificial
  Synthetic oligonucleotide
acccgcagacatggggttggtgtcgaattctagtgctctcatagtctgagcacgacttag

SEQ ID NO: 312166 - DNA, 56 bp, Artificial
  Synthetic oligonucleotide
acccgcaggaggggacctagaagttacaacacatatctttaattgcagaggagagt

SEQ ID NO: 312167 - DNA, 58 bp, Artificial
  Synthetic oligonucleotide
acccgccacacagagaagtgcgttattttagatgcccctggtttgctgcgtgaagtcg

SEQ ID NO: 312168 - DNA, 59 bp, Artificial
  Synthetic oligonucleotide
acccgccacactgtcactctaggactttgaacgggaaattcttgatgcgcataggctcg

SEQ ID NO: 312169 - DNA, 51 bp, Artificial
  Synthetic oligonucleotide
acccgcccccttatttgacttaaacgacttacaagaactcgccggttgcta

SEQ ID NO: 312170 - DNA, 54 bp, Artificial
  Synthetic oligonucleotide
acccgcccctaaaaggggcgacactccgccatgaatcactcccctgtgaggaac

SEQ ID NO: 312171 - DNA, 52 bp, Artificial
  Synthetic oligonucleotide
acccgcgagtgcccggccccacgcgagcacgttagtgcgagcgatatcgcga

SEQ ID NO: 312172 - DNA, 51 bp, Artificial
  Synthetic oligonucleotide
acccgcgatggggagtaccgagcgtttaacgtccgaatcctagaccccaag

SEQ ID NO: 312173 - DNA, 57 bp, Artificial
  Synthetic oligonucleotide
acccgcgcctcaaggccaactttgaagaggcaattttctccaagtacatcggcaatg

SEQ ID NO: 312174 - DNA, 57 bp, Artificial
  Synthetic oligonucleotide
acccgcgctgttgtcgccaggggtggctctcgtgggggtcgtgtgtgctgccatctt

SEQ ID NO: 312175 - DNA, 53 bp, Artificial
  Synthetic oligonucleotide
acccgcggcgtttatatgagagggttcgtgtctcggaccccaggttttatgac

SEQ ID NO: 312176 - DNA, 55 bp, Artificial
  Synthetic oligonucleotide
acccgcgtacgcaggggcaccatcccgactgcccgaaccctgagacggaggacta

SEQ ID NO: 312177 - DNA, 54 bp, Artificial
  Synthetic oligonucleotide
acccgcgtcggcctaccaagtacgcaactcctcgggcctttaccatgtcaccaa

SEQ ID NO: 312178 - DNA, 55 bp, Artificial
  Synthetic oligonucleotide
acccgcgtgagtgggcttttgccaacttggttctacatagagagtttgactttct

SEQ ID NO: 312179 - DNA, 55 bp, Artificial
  Synthetic oligonucleotide
acccgcgtgccggtgctttctaccgacgtgttacgacggtggatgtctcgtcacc

SEQ ID NO: 312180 - DNA, 55 bp, Artificial
  Synthetic oligonucleotide
acccgcgtggagtcagagaataaggtagtaatcctggactctttcgtcccactcc

SEQ ID NO: 312181 - DNA, 55 bp, Artificial
  Synthetic oligonucleotide
acccgctagattggactccccgggctattgaattccagtacaccactagtctgcg

SEQ ID NO: 312182 - DNA, 59 bp, Artificial
  Synthetic oligonucleotide
acccgctcaccaaggaaatgcccccagatgaagcgagcaatgtaataatggaaatatta

SEQ ID NO: 312183 - DNA, 50 bp, Artificial
  Synthetic oligonucleotide
acccgctcacttccgttaacgtaaaaatgctgggggtcgctttggacccc

SEQ ID NO: 312184 - DNA, 59 bp, Artificial
  Synthetic oligonucleotide
acccgctgttttgactcaacggtcactgagagcgacatccgtactgaggagtcaattta

SEQ ID NO: 312185 - DNA, 60 bp, Artificial
  Synthetic oligonucleotide
acccgcttatctctgagcatcgtcagcagtacacgactcttgcgaacattctgggcaaga

SEQ ID NO: 312186 - DNA, 55 bp, Artificial
  Synthetic oligonucleotide
acccgcttcacaacctcaattggaaacgctaatttatggcggcattttggcggca

SEQ ID NO: 312187 - DNA, 56 bp, Artificial
  Synthetic oligonucleotide
acccgcttcgcatgccgactacaactgcaaagtatttggcggcgtttaccctttca

SEQ ID NO: 312188 - DNA, 52 bp, Artificial
  Synthetic oligonucleotide
acccgcttgactataacctccgaagtacgggaccagtaggtaaaatccgaca

SEQ ID NO: 312189 - DNA, 54 bp, Artificial
  Synthetic oligonucleotide
acccggaactatatattccgacggcgactatcctgtagagtgtgccgttaacca

SEQ ID NO: 312190 - DNA, 56 bp, Artificial
  Synthetic oligonucleotide
acccggaattcgaattgaactgtcttcgacagagttcaaactcctcgctagatacc

SEQ ID NO: 312191 - DNA, 60 bp, Artificial
  Synthetic oligonucleotide
acccggacagactattgcatcatttatgcaagagactgttatgctgtatggcaccatggc

SEQ ID NO: 312192 - DNA, 56 bp, Artificial
  Synthetic oligonucleotide
acccggagacaccaggagcccttgcctcagccataaaagagaccttcgaggaggga

SEQ ID NO: 312193 - DNA, 56 bp, Artificial
  Synthetic oligonucleotide
acccggagtccacagcctcagaggatttaaaaccacactagtcatacatgggaaaa

SEQ ID NO: 312194 - DNA, 52 bp, Artificial
  Synthetic oligonucleotide
acccggagtcccctttttctcgtgtcaacgtgggtataggggaatctggcga

SEQ ID NO: 312195 - DNA, 49 bp, Artificial
  Synthetic oligonucleotide
acccggatgggccgcccgaaatttcgtgggtggtcccccccttgtcggc

SEQ ID NO: 312196 - DNA, 55 bp, Artificial
  Synthetic oligonucleotide
acccggatgggcgcgattttttttgtggcccccacaaagcactaattgacaatga

SEQ ID NO: 312197 - DNA, 55 bp, Artificial
  Synthetic oligonucleotide
acccggcaaacacaatgggcaacttgtgcatacgagtagtgaatgcataccagcc

SEQ ID NO: 312198 - DNA, 56 bp, Artificial
  Synthetic oligonucleotide
acccggcaacttttattaaacgtgagtctttaccaatctcagtagatacgatcaga

SEQ ID NO: 312199 - DNA, 54 bp, Artificial
  Synthetic oligonucleotide
acccggcactatttcccaccatagcatacgaagccgcaaattatgacatgtacc

SEQ ID NO: 312200 - DNA, 60 bp, Artificial
  Synthetic oligonucleotide
acccggccataaagcaagaatcttggctgaggcaatgagccaagtgacaaattcagctac

SEQ ID NO: 312201 - DNA, 55 bp, Artificial
  Synthetic oligonucleotide
acccggccccgcgtgtgatacaaccacggggccagcgatataacattgaggtcgg

SEQ ID NO: 312202 - DNA, 57 bp, Artificial
  Synthetic oligonucleotide
acccggcctcgtatccccgacctagtatcccttgtgcgattcacgtgagttcatctc

SEQ ID NO: 312203 - DNA, 55 bp, Artificial
  Synthetic oligonucleotide
acccggctcaccctatcttctcacacagtcccacattgcttgaccctagcaaccg

SEQ ID NO: 312204 - DNA, 52 bp, Artificial
  Synthetic oligonucleotide
acccggctccagaatttagacccctccccattttctctgaaataccccttgc

SEQ ID NO: 312205 - DNA, 55 bp, Artificial
  Synthetic oligonucleotide
acccgggactggtgttctatttcccaacgcataaccagcgagcgcgtgagggatg

SEQ ID NO: 312206 - DNA, 53 bp, Artificial
  Synthetic oligonucleotide
acccgggatgcaaattagagggttcgtgtacttcgttgaaactttagctagga

SEQ ID NO: 312207 - DNA, 53 bp, Artificial
  Synthetic oligonucleotide
acccgggccctcaacacccacctacaccgagcttacccaggcgagcccttgtg

SEQ ID NO: 312208 - DNA, 52 bp, Artificial
  Synthetic oligonucleotide
acccgggccctccaccagcaacaccaaaactaccaagcagacgtcccctcgg

SEQ ID NO: 312209 - DNA, 51 bp, Artificial
  Synthetic oligonucleotide
acccggggacgtgggcttgacgagcaggccaccataacccctaacaaccgt

SEQ ID NO: 312210 - DNA, 57 bp, Artificial
  Synthetic oligonucleotide
acccgggtaagagtcttttgacgattagagactatggttcttacatctctcgatgga

SEQ ID NO: 312211 - DNA, 47 bp, Artificial
  Synthetic oligonucleotide
acccggtacccgtgggaaaatgtaacggatcgaaaccgtttacacgg

SEQ ID NO: 312212 - DNA, 55 bp, Artificial
  Synthetic oligonucleotide
acccggtcactaagctcccagcgcgtggaccggtgaagcaaccgcagatcggtat

SEQ ID NO: 312213 - DNA, 56 bp, Artificial
  Synthetic oligonucleotide
acccggtcggttcaggactgcagtctgtggattatacccggcacaggttaaagcaa

SEQ ID NO: 312214 - DNA, 59 bp, Artificial
  Synthetic oligonucleotide
acccggtgacacaatcaacatgaacacaaaaacattcatccgacttgcgactcaagtag

SEQ ID NO: 312215 - DNA, 56 bp, Artificial
  Synthetic oligonucleotide
acccggtgaggatgacaagccctgggtgccactcacaagagtgccgtcacggatgt

SEQ ID NO: 312216 - DNA, 53 bp, Artificial
  Synthetic oligonucleotide
acccggtgagggtttcgaatgttgtaggacctgcagtccgacccaaaccagtc

SEQ ID NO: 312217 - DNA, 58 bp, Artificial
  Synthetic oligonucleotide
acccggtgtatactccacatattacagcgggctacggtatccccatctcaaaactgca

SEQ ID NO: 312218 - DNA, 59 bp, Artificial
  Synthetic oligonucleotide
acccggttaacaagagcgactcgaagtcgtcagaattggcgcacacggctcagatgaat

SEQ ID NO: 312219 - DNA, 58 bp, Artificial
  Synthetic oligonucleotide
acccggttatgcggggatcccatatcgagacgttaatgacgcatgcgctagtaattac

SEQ ID NO: 312220 - DNA, 51 bp, Artificial
  Synthetic oligonucleotide
acccggttcccaccttatgtccattgaaaggaccagatatatcatcccttg

SEQ ID NO: 312221 - DNA, 52 bp, Artificial
  Synthetic oligonucleotide
acccgtaaccgatcggggttcgaactcgccgcttgacacgtaaccgtgtcgc

SEQ ID NO: 312222 - DNA, 53 bp, Artificial
  Synthetic oligonucleotide
acccgtaattccgagtccggaaggcacgtgggactgcgctagaacaactaacc

SEQ ID NO: 312223 - DNA, 55 bp, Artificial
  Synthetic oligonucleotide
acccgtcaaactatagaggaggttcaggatggtacaaattaccttctctgtaaca

SEQ ID NO: 312224 - DNA, 60 bp, Artificial
  Synthetic oligonucleotide
acccgtcaccctacgtgacgcaaggaggagagattgctcttaacaagctgtcgcagccag

SEQ ID NO: 312225 - DNA, 57 bp, Artificial
  Synthetic oligonucleotide
acccgtcgataacgccgtcaagtgtgctcatcgacactttaggcgaagaaagggcta

SEQ ID NO: 312226 - DNA, 57 bp, Artificial
  Synthetic oligonucleotide
acccgtctatgttgtgttctctgtgctatctccgtcttaacgctgcttttgtctaca

SEQ ID NO: 312227 - DNA, 60 bp, Artificial
  Synthetic oligonucleotide
acccgtctcctctcatgggcggctttggacttaagcacccgcctcctcagatcctcatca

SEQ ID NO: 312228 - DNA, 54 bp, Artificial
  Synthetic oligonucleotide
acccgtgaaccccgatgacgctgagacaaccgagtctttccgggagtttattca

SEQ ID NO: 312229 - DNA, 54 bp, Artificial
  Synthetic oligonucleotide
acccgtgacaataattgcctacgagtcagtggcaacaggcagcgttctcacact

SEQ ID NO: 312230 - DNA, 58 bp, Artificial
  Synthetic oligonucleotide
acccgtgaccctacaacccccctcgcaagagctgcgtgggagacagcaagacacactc

SEQ ID NO: 312231 - DNA, 57 bp, Artificial
  Synthetic oligonucleotide
acccgtgactttagcgggagccgatgagttatgggcaactctgcggcgtttggtgcg

SEQ ID NO: 312232 - DNA, 53 bp, Artificial
  Synthetic oligonucleotide
acccgtgatccctcttgggcggctatcctacaggggctggaggaaccctattg

SEQ ID NO: 312233 - DNA, 55 bp, Artificial
  Synthetic oligonucleotide
acccgtgatgctgcactggaactatggggagaccgacccgcactgtgcttcggca

SEQ ID NO: 312234 - DNA, 58 bp, Artificial
  Synthetic oligonucleotide
acccgtgccgcagctccattaatggatgtctttgagtacgtcgggttcactcctaaca

SEQ ID NO: 312235 - DNA, 60 bp, Artificial
  Synthetic oligonucleotide
acccgtgcgactatcgccttcaatcacaatgctaatcggtctttccggcgcagcgggatc

SEQ ID NO: 312236 - DNA, 60 bp, Artificial
  Synthetic oligonucleotide
acccgtgctatatataaatatggcagattatagtattgattccagttatttgtgctcagg

SEQ ID NO: 312237 - DNA, 55 bp, Artificial
  Synthetic oligonucleotide
acccgtggagaaaccacaagctgaaggaccctacgctggccctctcgagcgacag

SEQ ID NO: 312238 - DNA, 55 bp, Artificial
  Synthetic oligonucleotide
acccgtggcttaactccgtcgagtctgttgaccagctcgttagaaacagaatgcg

SEQ ID NO: 312239 - DNA, 56 bp, Artificial
  Synthetic oligonucleotide
acccgtgggatatactggctccccggcgcttgagttcactatcgggtatgtcctga

SEQ ID NO: 312240 - DNA, 52 bp, Artificial
  Synthetic oligonucleotide
acccgtgtaaaaccaaattacaacctagtgtgttttatgatgtgttccctgg

SEQ ID NO: 312241 - DNA, 56 bp, Artificial
  Synthetic oligonucleotide
acccgttatatatctcagtaacttagaagatatcattaccgcacaatagggaccgt

SEQ ID NO: 312242 - DNA, 56 bp, Artificial
  Synthetic oligonucleotide
acccgttgattggtggaagtaaggtggtacggtcatggtatgatcgcgccttatta

SEQ ID NO: 312243 - DNA, 59 bp, Artificial
  Synthetic oligonucleotide
acccgttggcctctctcttggagatgtgccatagtacacaaattggcgggataaggatg

SEQ ID NO: 312244 - DNA, 54 bp, Artificial
  Synthetic oligonucleotide
acccgttttgtggtgaggggactctttacaccagaacttggtccatgtctggct

SEQ ID NO: 312245 - DNA, 58 bp, Artificial
  Synthetic oligonucleotide
accctaaaagagatggcacaaatcagaagaaagtgtgaattatttacatacttgagat

SEQ ID NO: 312246 - DNA, 55 bp, Artificial
  Synthetic oligonucleotide
accctaaacacatccaatacaatcttttaattggtgagggtccatgtgaacctgg

SEQ ID NO: 312247 - DNA, 54 bp, Artificial
  Synthetic oligonucleotide
accctaaatactcttaagaaacgccaggtctgaggacgtaaacgagtccagatc

SEQ ID NO: 312248 - DNA, 55 bp, Artificial
  Synthetic oligonucleotide
accctaacaagagggcagaatacagttaaagtatcagggaagggtggacatagtg

SEQ ID NO: 312249 - DNA, 54 bp, Artificial
  Synthetic oligonucleotide
accctaacactgtttgcaacagtggtattgggtcaccacgcaaagagttgtggc

SEQ ID NO: 312250 - DNA, 49 bp, Artificial
  Synthetic oligonucleotide
accctaaccctaggtcgctaccgctccgagaggggggggggcctaggga

SEQ ID NO: 312251 - DNA, 54 bp, Artificial
  Synthetic oligonucleotide
accctaaccttactccacccataagtcaataggaggtgtagttctcattggaag

SEQ ID NO: 312252 - DNA, 54 bp, Artificial
  Synthetic oligonucleotide
accctaactatactgaataaagacctgcatactacacttaatggactctgttcc

SEQ ID NO: 312253 - DNA, 51 bp, Artificial
  Synthetic oligonucleotide
accctaactcccagtactcgcattaatcgctatcaattgatttttagaagt

SEQ ID NO: 312254 - DNA, 51 bp, Artificial
  Synthetic oligonucleotide
accctaagaccgctgacccggtctacgggaaagtgttcaaccctccccgca

SEQ ID NO: 312255 - DNA, 50 bp, Artificial
  Synthetic oligonucleotide
accctaataagtttggactgcctgacgcccgcatatataaccctgacgcc

SEQ ID NO: 312256 - DNA, 59 bp, Artificial
  Synthetic oligonucleotide
accctaatgatgcagcagagcagacaaaactctatcaaaacccaaacacctatgtttcc

SEQ ID NO: 312257 - DNA, 58 bp, Artificial
  Synthetic oligonucleotide
accctaatgatgcagctgaacaaacaaaactctaccagaacccgaacacttatgtgtc

SEQ ID NO: 312258 - DNA, 58 bp, Artificial
  Synthetic oligonucleotide
accctacacaatggaatcggcaaacgagattgcgagaatgagtggggaaactggaaca

SEQ ID NO: 312259 - DNA, 60 bp, Artificial
  Synthetic oligonucleotide
accctacatcagctgcgacaatgaagcctgttggtcttttgcactagctcaaggcgcact

SEQ ID NO: 312260 - DNA, 55 bp, Artificial
  Synthetic oligonucleotide
accctacatgtggcaagggttatcatgtaatgcttataggtatagtagtagatga

SEQ ID NO: 312261 - DNA, 57 bp, Artificial
  Synthetic oligonucleotide
accctaccacagcacccgtctctaaataggtatgggagcaattgtaagcctctttgc

SEQ ID NO: 312262 - DNA, 59 bp, Artificial
  Synthetic oligonucleotide
accctacctattgtgggtgttggagcggcggcaataaagatgtcaagcgactttgatgc

SEQ ID NO: 312263 - DNA, 60 bp, Artificial
  Synthetic oligonucleotide
accctacgcatgaatgtgataacgatgtgcttacagtacgttttagctaatctgcatctt

SEQ ID NO: 312264 - DNA, 60 bp, Artificial
  Synthetic oligonucleotide
accctacgcgatactgaagaaatcgccatgaggtgctacaacgataagaagacctggcaa

SEQ ID NO: 312265 - DNA, 52 bp, Artificial
  Synthetic oligonucleotide
accctacggggttttccagggcacgaaggttgcgtctctacacgaggcgtaa

SEQ ID NO: 312266 - DNA, 52 bp, Artificial
  Synthetic oligonucleotide
accctactgtactaaccgaactagataacggtgcagtaggggtaaattctcc

SEQ ID NO: 312267 - DNA, 57 bp, Artificial
  Synthetic oligonucleotide
accctactgtcgccgaggtgggtcctaagaatcatttgctcgccactaccggattgc

SEQ ID NO: 312268 - DNA, 54 bp, Artificial
  Synthetic oligonucleotide
accctacttgaatgtaagaagttaaccctttatgaagatcaagtcaaggctttc

SEQ ID NO: 312269 - DNA, 58 bp, Artificial
  Synthetic oligonucleotide
accctagaaaaaatgtgtcttacaccaggctctacgacaggaatattgctcaaacatg

SEQ ID NO: 312270 - DNA, 53 bp, Artificial
  Synthetic oligonucleotide
accctagagcaatacaagtggcggacccggaacaaatgggaccccgctgggtg

SEQ ID NO: 312271 - DNA, 58 bp, Artificial
  Synthetic oligonucleotide
accctagaggaaggacgaagtctctaggtcaggggagatgggtgcgagagcgtcagtg

SEQ ID NO: 312272 - DNA, 60 bp, Artificial
  Synthetic oligonucleotide
accctagatttaaacatagagtgtatcagcaattgagtgccgtgactctgctcaacttga

SEQ ID NO: 312273 - DNA, 54 bp, Artificial
  Synthetic oligonucleotide
accctagcaaatttactgatccagttaaagatgttctaacaaaaggaatcccaa

SEQ ID NO: 312274 - DNA, 51 bp, Artificial
  Synthetic oligonucleotide
accctagctgttttactggggttgggaatcacggcgggaataggtactggt

SEQ ID NO: 312275 - DNA, 55 bp, Artificial
  Synthetic oligonucleotide
accctaggggaatatggagacgtctcactgctatgtagggtagccagtggcgtcg

SEQ ID NO: 312276 - DNA, 60 bp, Artificial
  Synthetic oligonucleotide
accctagggttcgagctctgctctgatctcatccgcatactgcgtgtcaagcagtatggt

SEQ ID NO: 312277 - DNA, 56 bp, Artificial
  Synthetic oligonucleotide
accctagggttcgagctctgttcggagttaatccgcatcttcagggtcaggctttc

SEQ ID NO: 312278 - DNA, 54 bp, Artificial
  Synthetic oligonucleotide
accctagggttcgagctctgttcggagttaatccgtatattcagggttcgtcat

SEQ ID NO: 312279 - DNA, 59 bp, Artificial
  Synthetic oligonucleotide
accctagggttcgagttgtgctccgatttaatccgcattctgcgagttcgtcagtatga

SEQ ID NO: 312280 - DNA, 51 bp, Artificial
  Synthetic oligonucleotide
accctaggttgcgcggcggggtttctcacacaagtcccccacagggatcca

SEQ ID NO: 312281 - DNA, 60 bp, Artificial
  Synthetic oligonucleotide
accctaggttggtcgactctagaggacgagctcatccgcatactgcgtgtcaagcagtat

SEQ ID NO: 312282 - DNA, 58 bp, Artificial
  Synthetic oligonucleotide
accctagttgagaaaacaggttgtacagagaatgcacttaaaggttattatgcatgta

SEQ ID NO: 312283 - DNA, 55 bp, Artificial
  Synthetic oligonucleotide
accctataaggtcagctcagttaaacaatgaagctattactgatgcagttgcggt

SEQ ID NO: 312284 - DNA, 60 bp, Artificial
  Synthetic oligonucleotide
accctatagtgcaaaatgcacaagggcaaatgacatatcaatccatatcacctagaacat

SEQ ID NO: 312285 - DNA, 60 bp, Artificial
  Synthetic oligonucleotide
accctatagtgcaaaatgcacaagggcagatgacacatcagtccatgtcacctaggactt

SEQ ID NO: 312286 - DNA, 58 bp, Artificial
  Synthetic oligonucleotide
accctatagtgcaaaattcacaagggcaaatggtacatcagcctctttcacctagaac

SEQ ID NO: 312287 - DNA, 55 bp, Artificial
  Synthetic oligonucleotide
accctatcaccttcactaccctgacggtagtgaagtgaccgttcgtcagggaatc

SEQ ID NO: 312288 - DNA, 58 bp, Artificial
  Synthetic oligonucleotide
accctatcatcccgctatcctgctgttttcattaatgaaagtgaaccgttttctgata

SEQ ID NO: 312289 - DNA, 55 bp, Artificial
  Synthetic oligonucleotide
accctatgaatttgtaaaactaccttgtatattgcttgtatagtggaactgttac

SEQ ID NO: 312290 - DNA, 58 bp, Artificial
  Synthetic oligonucleotide
accctatgagccagcatggaacggaggatacagaaagagaagtattacagtggaagtt

SEQ ID NO: 312291 - DNA, 50 bp, Artificial
  Synthetic oligonucleotide
accctatgcaggccacgtccactatggcacgtcaaggatgcatccaaggc

SEQ ID NO: 312292 - DNA, 60 bp, Artificial
  Synthetic oligonucleotide
accctatgggtgcgaagccatacattggacaaggtgtgaagagccccgtgtgctcatctt

SEQ ID NO: 312293 - DNA, 56 bp, Artificial
  Synthetic oligonucleotide
accctatgtgcataatcataattatgcaaagacagattcagatgacttgggtggta

SEQ ID NO: 312294 - DNA, 59 bp, Artificial
  Synthetic oligonucleotide
accctattatatcacggatagcatgctggataggctttggaggggaggtccaaagcaaa

SEQ ID NO: 312295 - DNA, 60 bp, Artificial
  Synthetic oligonucleotide
accctattctgtgcatcagacgccaaagcatatgagagagaagtacataatgtctgggct

SEQ ID NO: 312296 - DNA, 60 bp, Artificial
  Synthetic oligonucleotide
accctatttcgtgcgcgttcagggcctcctccgagtctgcgcgctagcgcggaagatggc

SEQ ID NO: 312297 - DNA, 59 bp, Artificial
  Synthetic oligonucleotide
accctcaaactggacaggaacttgtgtgttagctacccttctgccagatatagatattg

SEQ ID NO: 312298 - DNA, 54 bp, Artificial
  Synthetic oligonucleotide
accctcaaagtgctggaacttgtggagcattggatggccgtcggagttgacgct

SEQ ID NO: 312299 - DNA, 58 bp, Artificial
  Synthetic oligonucleotide
accctcaaatgtgctttgttgcccgtcatgaaaaatcaaaaggtgccaggcggaatgc

SEQ ID NO: 312300 - DNA, 60 bp, Artificial
  Synthetic oligonucleotide
accctcaagatatcgtcatgtggttacgagatcgtgtgaaacctgcaattgtgtctaagg

SEQ ID NO: 312301 - DNA, 56 bp, Artificial
  Synthetic oligonucleotide
accctcaattatattttgacccttaacacagctaaacatgggttcgcaagtatcta

SEQ ID NO: 312302 - DNA, 60 bp, Artificial
  Synthetic oligonucleotide
accctcacatgttacttgaaggcttctgcagcctgtcgagctgcgaagctccgggactgc

SEQ ID NO: 312303 - DNA, 53 bp, Artificial
  Synthetic oligonucleotide
accctcacgtgaagatgactatcctgcttgtaaccttgccttactagctaatc

SEQ ID NO: 312304 - DNA, 60 bp, Artificial
  Synthetic oligonucleotide
accctcagcccattgagtgcgagccccaacgcgctgctgacgcgacaatcctcccagaga

SEQ ID NO: 312305 - DNA, 58 bp, Artificial
  Synthetic oligonucleotide
accctcatatcaactactacgttgtgtataacggtccacacgccggtatatacgatga

SEQ ID NO: 312306 - DNA, 52 bp, Artificial
  Synthetic oligonucleotide
accctccagatccaattcacagcccggaggaacgcccttcttttggttacaa

SEQ ID NO: 312307 - DNA, 59 bp, Artificial
  Synthetic oligonucleotide
accctccagatgtcggagtccaccttgttagtgacagccgcgatgaaggacctgattcc

SEQ ID NO: 312308 - DNA, 58 bp, Artificial
  Synthetic oligonucleotide
accctccagattccatttcgtcctaatcatcgatggggagatattaggtttctgcgtc

SEQ ID NO: 312309 - DNA, 57 bp, Artificial
  Synthetic oligonucleotide
accctccatgagtggctggtccctggcgccgccacaaaataaatacggaggggcatc

SEQ ID NO: 312310 - DNA, 56 bp, Artificial
  Synthetic oligonucleotide
accctcccattcaccaatgtacggtagtggacgtgagagtcactttgaagaggcgt

SEQ ID NO: 312311 - DNA, 53 bp, Artificial
  Synthetic oligonucleotide
accctccgaaggaccacatagtcaactacccggcgtcacataccaccctcggg

SEQ ID NO: 312312 - DNA, 53 bp, Artificial
  Synthetic oligonucleotide
accctccgacggctccaaagcttagtgacgttatacaagtccccagtcccgaa

SEQ ID NO: 312313 - DNA, 49 bp, Artificial
  Synthetic oligonucleotide
accctccgtggccccccccgaggcccacgtggcttttcgtacgtgggcc

SEQ ID NO: 312314 - DNA, 55 bp, Artificial
  Synthetic oligonucleotide
accctcctaaattacttaacccctgcttttgcatgcagacgtggtggattgcgcc

SEQ ID NO: 312315 - DNA, 55 bp, Artificial
  Synthetic oligonucleotide
accctcctctgctagagtcctggaaagacccggactacgtccctccggtggtgca

SEQ ID NO: 312316 - DNA, 56 bp, Artificial
  Synthetic oligonucleotide
accctcgaaaatgtgtctgcaaggcgcgtgggagtgcggtggaaaagtggaccttc

SEQ ID NO: 312317 - DNA, 50 bp, Artificial
  Synthetic oligonucleotide
accctcgaactactaggtattaattcacacccacttgccataaccccaca

SEQ ID NO: 312318 - DNA, 53 bp, Artificial
  Synthetic oligonucleotide
accctcgaccgccactatcaaaaacgacctacgtgatcgttaccaagtcttac

SEQ ID NO: 312319 - DNA, 57 bp, Artificial
  Synthetic oligonucleotide
accctcgatacccagaagttagatgtgtttgtagagacaattggaagggctccaata

SEQ ID NO: 312320 - DNA, 58 bp, Artificial
  Synthetic oligonucleotide
accctcgatgattatactaataggtctctccggccgcgcagcgacacccattccaaaa

SEQ ID NO: 312321 - DNA, 56 bp, Artificial
  Synthetic oligonucleotide
accctcgcattatgcgtaagctgcgcgtaaccaacgtagcagtaacgacaaacccc

SEQ ID NO: 312322 - DNA, 54 bp, Artificial
  Synthetic oligonucleotide
accctcgcgtcatacagggggacgtagacgtattggtccgatcccgtagcctcc

SEQ ID NO: 312323 - DNA, 60 bp, Artificial
  Synthetic oligonucleotide
accctcgctagcgaggtagtccataagcctggtgatctggctcgccactaccaagccatc

SEQ ID NO: 312324 - DNA, 52 bp, Artificial
  Synthetic oligonucleotide
accctcgctctagatgtacaattccttcaacacgaaaacgtacgactgaagg

SEQ ID NO: 312325 - DNA, 60 bp, Artificial
  Synthetic oligonucleotide
accctcgcttgctaactgcgcttggtaactatatctatgataggcatggagacaccctcg

SEQ ID NO: 312326 - DNA, 55 bp, Artificial
  Synthetic oligonucleotide
accctcgtggaatgggtgtccgctgccgccagtggagcaacggagcgcagagccc

SEQ ID NO: 312327 - DNA, 55 bp, Artificial
  Synthetic oligonucleotide
accctcgtggtgtctacaaggtagacctgactctttccaacaaagacccgcgctg

SEQ ID NO: 312328 - DNA, 49 bp, Artificial
  Synthetic oligonucleotide
accctcgttagcgggaataaccaataagggcggaaaagttaaatatagg

SEQ ID NO: 312329 - DNA, 55 bp, Artificial
  Synthetic oligonucleotide
accctcgttagctagttcctcggctagccagctgtccgccccgtctcttaaggcc

SEQ ID NO: 312330 - DNA, 55 bp, Artificial
  Synthetic oligonucleotide
accctctataagtgatgcttccacatctttcgtatctacctgtagcactgtgaac

SEQ ID NO: 312331 - DNA, 54 bp, Artificial
  Synthetic oligonucleotide
accctctcaattcccacaaacgtttcgaccaaccatacctattgatccattagg

SEQ ID NO: 312332 - DNA, 55 bp, Artificial
  Synthetic oligonucleotide
accctctctctgtggtagtagccgagagatgcctgtgtggggagaagacatcccc

SEQ ID NO: 312333 - DNA, 55 bp, Artificial
  Synthetic oligonucleotide
accctctcttttcggcgcgaaagcgacgtgtggtcccgcgtgtggtttgtggctc

SEQ ID NO: 312334 - DNA, 53 bp, Artificial
  Synthetic oligonucleotide
accctctgacatttggatggttgtggcagttagaaccagtggcttgtgatgag

SEQ ID NO: 312335 - DNA, 55 bp, Artificial
  Synthetic oligonucleotide
accctctgcagctccgtcatcctctggactgccgtggagtcgcgtcggtgagata

SEQ ID NO: 312336 - DNA, 53 bp, Artificial
  Synthetic oligonucleotide
accctctggagtcgagtcgtgagatttggctctgggtggggcttttgggtgag

SEQ ID NO: 312337 - DNA, 54 bp, Artificial
  Synthetic oligonucleotide
accctctggcttccaacttcgggtaagatatatttgcctcctacgccaccggta

SEQ ID NO: 312338 - DNA, 60 bp, Artificial
  Synthetic oligonucleotide
accctctgtgctcgtgaaggcgagaggtgcacgaactaagctactggcaccgttcttctc

SEQ ID NO: 312339 - DNA, 57 bp, Artificial
  Synthetic oligonucleotide
accctcttggtgttcgatgtatatgttatagaagtatgtttgtcattaactttgtcc

SEQ ID NO: 312340 - DNA, 55 bp, Artificial
  Synthetic oligonucleotide
accctgaaatagagctaggttctggcacatgttacatgactggttacatattgtc

SEQ ID NO: 312341 - DNA, 56 bp, Artificial
  Synthetic oligonucleotide
accctgaaccaggtgaaagccctctttggggatttgaagccccatcttgagaagca

SEQ ID NO: 312342 - DNA, 55 bp, Artificial
  Synthetic oligonucleotide
accctgaacccgcagaccatgtggaccttgagaacccgattcctccaccgcgccc

SEQ ID NO: 312343 - DNA, 59 bp, Artificial
  Synthetic oligonucleotide
accctgaactgcatcgtgaactgaaaatgttcccagatgtcacgaagggtggcacgttc

SEQ ID NO: 312344 - DNA, 55 bp, Artificial
  Synthetic oligonucleotide
accctgaaggactgtattcaaccgaaatatttggcctcacagggagcgaggcacg

SEQ ID NO: 312345 - DNA, 55 bp, Artificial
  Synthetic oligonucleotide
accctgacaatagtatgcctcacttcagagagatttctaacaatgcaactctcat

SEQ ID NO: 312346 - DNA, 60 bp, Artificial
  Synthetic oligonucleotide
accctgacgtggcgctctctcgtccgcacactggtgttatcttggaggctgtttactgga

SEQ ID NO: 312347 - DNA, 55 bp, Artificial
  Synthetic oligonucleotide
accctgagccccgacgcgtactacagcgaacgcgtgttcaagttcaagaacgccc

SEQ ID NO: 312348 - DNA, 55 bp, Artificial
  Synthetic oligonucleotide
accctgaggaaattctgtagattctttgccccactcgtttggaattgggctctcg

SEQ ID NO: 312349 - DNA, 54 bp, Artificial
  Synthetic oligonucleotide
accctgagttgtacacgtggaacgggaccagctttgacaaggtgtggccgtcgt

SEQ ID NO: 312350 - DNA, 60 bp, Artificial
  Synthetic oligonucleotide
accctgatacacaacgattggtatgggcatgtgtaggccttgaaataggtagagggcagc

SEQ ID NO: 312351 - DNA, 60 bp, Artificial
  Synthetic oligonucleotide
accctgatattcgctcttgtggcgatcattccgacaaatgcagacaaaatttgccttgga

SEQ ID NO: 312352 - DNA, 60 bp, Artificial
  Synthetic oligonucleotide
accctgatgaatgcgcttttgctgacaagcagtggcgcaagcattacaacttccttgagg

SEQ ID NO: 312353 - DNA, 60 bp, Artificial
  Synthetic oligonucleotide
accctgatttccttgacattgtgcgtctgcatcgccctgcattaacatctcgcaggggta

SEQ ID NO: 312354 - DNA, 59 bp, Artificial
  Synthetic oligonucleotide
accctgcaaacttttaccagacacatcagctgtgagtctcctgggaggaccggcaacaa

SEQ ID NO: 312355 - DNA, 51 bp, Artificial
  Synthetic oligonucleotide
accctgcaacgcacgctggtgcggcctgacagcttccgaaccttcattgca

SEQ ID NO: 312356 - DNA, 52 bp, Artificial
  Synthetic oligonucleotide
accctgcaatacgggtccggcagctactcaggacaactcaacaggctactgg

SEQ ID NO: 312357 - DNA, 50 bp, Artificial
  Synthetic oligonucleotide
accctgcattaatgcctttgtatgcatgtatacaggcgaaacaggctttt

SEQ ID NO: 312358 - DNA, 60 bp, Artificial
  Synthetic oligonucleotide
accctgccacgcaagaatggctttctcgaatgtgggatagggtggacatgctgacttggc

SEQ ID NO: 312359 - DNA, 60 bp, Artificial
  Synthetic oligonucleotide
accctgcggtctgctaatgtgagactaaacgccgataaccaccgcatgagtcgtgcaact

SEQ ID NO: 312360 - DNA, 60 bp, Artificial
  Synthetic oligonucleotide
accctgcgtttaatgcctcggcgcatgcgtcgttagcattatggcagcctcctctagcac

SEQ ID NO: 312361 - DNA, 58 bp, Artificial
  Synthetic oligonucleotide
accctgctgttggtgtagattggatcctctactaggaacatcgtgaaatagaggggat

SEQ ID NO: 312362 - DNA, 50 bp, Artificial
  Synthetic oligonucleotide
accctgctttaatgcctctgtacgcatgtatacaagctaaacaggctttt

SEQ ID NO: 312363 - DNA, 55 bp, Artificial
  Synthetic oligonucleotide
accctggcaatacggccgtcgatactgagatccaacaagacgctatcgagttcag

SEQ ID NO: 312364 - DNA, 55 bp, Artificial
  Synthetic oligonucleotide
accctggcggagcaaatagcatggatgacaggtaacccacctatcccagtgggag

SEQ ID NO: 312365 - DNA, 60 bp, Artificial
  Synthetic oligonucleotide
accctgggcattgtggcgagagacggtcaccgcgctttcgacggagctgttgctgccgtg

SEQ ID NO: 312366 - DNA, 59 bp, Artificial
  Synthetic oligonucleotide
accctggggcttacccaggggctattgcagcccctgtggcagtcactagggtcatcaga

SEQ ID NO: 312367 - DNA, 58 bp, Artificial
  Synthetic oligonucleotide
accctgggggctgttgtcgcccttctgtggggcgtttacagcctcacagagtcatgga

SEQ ID NO: 312368 - DNA, 58 bp, Artificial
  Synthetic oligonucleotide
accctggttaaccattgaagccactaatgagaaatttgcaaactgttcagcagtgaaa

SEQ ID NO: 312369 - DNA, 50 bp, Artificial
  Synthetic oligonucleotide
accctgtatagaaccttccaaggattagggtctttcggggaaaaatacga

SEQ ID NO: 312370 - DNA, 60 bp, Artificial
  Synthetic oligonucleotide
accctgtcagacactagcagggaggtgctcctagcacctccaatgtactgcttcaaaaag

SEQ ID NO: 312371 - DNA, 58 bp, Artificial
  Synthetic oligonucleotide
accctgtgtgctatggccgtcaccgctgtcctgtttgaaacctcaggcacccgaggta

SEQ ID NO: 312372 - DNA, 54 bp, Artificial
  Synthetic oligonucleotide
accctgttaaggatgtgttagagaagggtatccccacattacaatccccaacag

SEQ ID NO: 312373 - DNA, 59 bp, Artificial
  Synthetic oligonucleotide
accctgttagcatgaattggttgcaaggcaatttaaattatctgtcttctgtttatcac

SEQ ID NO: 312374 - DNA, 54 bp, Artificial
  Synthetic oligonucleotide
accctgttatgcccatgaaagacatacacgaatcaatcagatggactaaggatc

SEQ ID NO: 312375 - DNA, 50 bp, Artificial
  Synthetic oligonucleotide
accctgttgtattagaacaacgtattgcttcattagaacaacaagtgact

SEQ ID NO: 312376 - DNA, 54 bp, Artificial
  Synthetic oligonucleotide
acccttaaagattgcaggtgcgtttggttttaaggacataatccgagccatccg

SEQ ID NO: 312377 - DNA, 60 bp, Artificial
  Synthetic oligonucleotide
acccttaacatgaactataatatgactaagctgtgcatacatagtttatgcaaccgaaat

SEQ ID NO: 312378 - DNA, 52 bp, Artificial
  Synthetic oligonucleotide
acccttaagaaacgaccagtctgaggccgtaaggtcgtccagaccttgaagt

SEQ ID NO: 312379 - DNA, 59 bp, Artificial
  Synthetic oligonucleotide
acccttacatgccaactgtgattgagcacctagaaagactacaaaggaaacatggagga

SEQ ID NO: 312380 - DNA, 55 bp, Artificial
  Synthetic oligonucleotide
acccttacccagggaacaataacaatggagtaaaaggattctcatatctagatgg

SEQ ID NO: 312381 - DNA, 55 bp, Artificial
  Synthetic oligonucleotide
acccttacctcaagtacaaccacgcggacgcagagtttcaggagaaactcgcttc

SEQ ID NO: 312382 - DNA, 53 bp, Artificial
  Synthetic oligonucleotide
acccttacgctatggaagccttgaagtttaagattggtcgtaactcagcgttt

SEQ ID NO: 312383 - DNA, 56 bp, Artificial
  Synthetic oligonucleotide
acccttagtatcatgagactctctggtgaaggtcccacttttgatgctaacactga

SEQ ID NO: 312384 - DNA, 59 bp, Artificial
  Synthetic oligonucleotide
acccttagtgcaggcaatctgccatattataatgacccgtcccctagctcttaccaatg

SEQ ID NO: 312385 - DNA, 58 bp, Artificial
  Synthetic oligonucleotide
acccttatatgtttggcgcgagtttatgacttatgtgatcctaaaatcacattcgtta

SEQ ID NO: 312386 - DNA, 54 bp, Artificial
  Synthetic oligonucleotide
acccttatcccggggttcttcggaaggtgagacttgaattccatgtagagtctc

SEQ ID NO: 312387 - DNA, 57 bp, Artificial
  Synthetic oligonucleotide
acccttcaatattcgcaaagttgagtgacccaccgccccaagtgtctgtcccattca

SEQ ID NO: 312388 - DNA, 57 bp, Artificial
  Synthetic oligonucleotide
acccttcgggtgcgaagccatatttcggacaaggtgcgaagagccccgtgtgctcgc

SEQ ID NO: 312389 - DNA, 59 bp, Artificial
  Synthetic oligonucleotide
acccttctggacgactacatacattcgacgaactatttggcgcgcggatccatagtcac

SEQ ID NO: 312390 - DNA, 58 bp, Artificial
  Synthetic oligonucleotide
acccttctgtgatatatcatcacaagaagaacaatggtccattaacattgaccataac

SEQ ID NO: 312391 - DNA, 59 bp, Artificial
  Synthetic oligonucleotide
acccttcttcgcgtgctaagattatgggattgcactgtgccggctttgctggtacaacc

SEQ ID NO: 312392 - DNA, 55 bp, Artificial
  Synthetic oligonucleotide
acccttgaaatcatctcctagatttcttcggaagggcttcgtgagaagctcgtgc

SEQ ID NO: 312393 - DNA, 60 bp, Artificial
  Synthetic oligonucleotide
acccttgaacaactcgctgcagatttaacgatctacttgtacagcagtgcggctctcact

SEQ ID NO: 312394 - DNA, 52 bp, Artificial
  Synthetic oligonucleotide
acccttgaactggaaatacgcggttacccagacgtccagggaagtgacgtac

SEQ ID NO: 312395 - DNA, 59 bp, Artificial
  Synthetic oligonucleotide
acccttgaagattactacaccacgatgtcctcagctctgaacgttgattatcgaacaaa

SEQ ID NO: 312396 - DNA, 59 bp, Artificial
  Synthetic oligonucleotide
acccttgattgaccattttctaggaattaaaccatatgatatcgttcactattgtgaca

SEQ ID NO: 312397 - DNA, 55 bp, Artificial
  Synthetic oligonucleotide
acccttgcccgccatgtatggcgctgtgccatagagcatggtgtttgggcggcac

SEQ ID NO: 312398 - DNA, 59 bp, Artificial
  Synthetic oligonucleotide
acccttgcgagtctggagacatcgggccagaagtgtccgcgctaggttgctgtcccagg

SEQ ID NO: 312399 - DNA, 56 bp, Artificial
  Synthetic oligonucleotide
acccttgcgggcccgagccgcccgctcacgtcgtccgcgcgtacaatcaacctgcc

SEQ ID NO: 312400 - DNA, 57 bp, Artificial
  Synthetic oligonucleotide
acccttggacctcgcaaccagtgctggtttcccttatgtgactatgggaatcaagaa

SEQ ID NO: 312401 - DNA, 57 bp, Artificial
  Synthetic oligonucleotide
acccttggcccctctatggcaatgagggttgcgggtgggcgggatggctcctgtctc

SEQ ID NO: 312402 - DNA, 56 bp, Artificial
  Synthetic oligonucleotide
acccttgggacggtcgggtcaaacaccagtggcaccactgagattgaggcgtgtat

SEQ ID NO: 312403 - DNA, 56 bp, Artificial
  Synthetic oligonucleotide
acccttgtccctgtgtctggtaggcgcgtgtgagtggactgaaaaagtagagtttc

SEQ ID NO: 312404 - DNA, 50 bp, Artificial
  Synthetic oligonucleotide
acccttgttctgcgatcctgatccagttattgcattagatataggaatct

SEQ ID NO: 312405 - DNA, 55 bp, Artificial
  Synthetic oligonucleotide
acccttgttgcgcttttctgtgcgtgctctacattggctgcggtcgctcacatcg

SEQ ID NO: 312406 - DNA, 57 bp, Artificial
  Synthetic oligonucleotide
accctttaatctctttgaacgatggtaatgtgtgtccggtacgcactcatgaggtaa

SEQ ID NO: 312407 - DNA, 52 bp, Artificial
  Synthetic oligonucleotide
accctttactcaaagcaaaggcgcttatccccgtcaaggaaccagaggtacc

SEQ ID NO: 312408 - DNA, 53 bp, Artificial
  Synthetic oligonucleotide
accctttagagtccagcccatgccttcccaagtatacccttgcttctttaaag

SEQ ID NO: 312409 - DNA, 57 bp, Artificial
  Synthetic oligonucleotide
accctttagatttagtcttctatcattgtatatgacgtagctttgttgaatagctta

SEQ ID NO: 312410 - DNA, 54 bp, Artificial
  Synthetic oligonucleotide
accctttagctatgacactaacgaaaggggtgggttagcgtatgcaacgattaa

SEQ ID NO: 312411 - DNA, 58 bp, Artificial
  Synthetic oligonucleotide
accctttcagaacatctcgagaatatcaattggggattgtcccaaatatgtcaaacag

SEQ ID NO: 312412 - DNA, 55 bp, Artificial
  Synthetic oligonucleotide
accctttgagagcagaagatctttcgtcaaccaagcaatttgtctaaatcgaaac

SEQ ID NO: 312413 - DNA, 57 bp, Artificial
  Synthetic oligonucleotide
accctttggtctagacatattgtggatagtttctctctcttgacaccaattggggtc

SEQ ID NO: 312414 - DNA, 59 bp, Artificial
  Synthetic oligonucleotide
acccttttacatcaatgcaacgttgttgatgagaggtttaacaacatgtggctcgagtc

SEQ ID NO: 312415 - DNA, 55 bp, Artificial
  Synthetic oligonucleotide
acccttttgatttactcaggttccaactctcttcactgatatctacaccaccttt

SEQ ID NO: 312416 - DNA, 54 bp, Artificial
  Synthetic oligonucleotide
accgaaaaattgaagaaagcgcaaaccgaaaatggaggacaaccatgccaagtg

SEQ ID NO: 312417 - DNA, 60 bp, Artificial
  Synthetic oligonucleotide
accgaaaatggacatgtcaagttatgggacatatggaccatcctcaaacatcatttatta

SEQ ID NO: 312418 - DNA, 59 bp, Artificial
  Synthetic oligonucleotide
accgaaacattcatggatatctacggttcgactgcctccgtcatatgcgcaaatatcga

SEQ ID NO: 312419 - DNA, 51 bp, Artificial
  Synthetic oligonucleotide
accgaaaggccccggttccttggcgcttcatcttagccgttcttttttgaa

SEQ ID NO: 312420 - DNA, 54 bp, Artificial
  Synthetic oligonucleotide
accgaaaggccgcgaaaatttttccccctcatcctgaccgttgatgcgtaatca

SEQ ID NO: 312421 - DNA, 60 bp, Artificial
  Synthetic oligonucleotide
accgaaatagccaatctgttagcagatgtattgaatatggtatctatgccgaccgaaaaa

SEQ ID NO: 312422 - DNA, 55 bp, Artificial
  Synthetic oligonucleotide
accgaaatcggttctggacggtctccatatacaggtaggtgccaactaaggtgag

SEQ ID NO: 312423 - DNA, 58 bp, Artificial
  Synthetic oligonucleotide
accgaaatgaaatgccgaatttaccaggtgtaatgaggtccaattatgatatacgtga

SEQ ID NO: 312424 - DNA, 58 bp, Artificial
  Synthetic oligonucleotide
accgaacaaacactacaggtgatgactacataccaacctgtgattgtactgatgcaac

SEQ ID NO: 312425 - DNA, 54 bp, Artificial
  Synthetic oligonucleotide
accgaacccattaaggacgtcctcattaagaccgctcccatgctaaactcccca

SEQ ID NO: 312426 - DNA, 60 bp, Artificial
  Synthetic oligonucleotide
accgaaccgtggtctctcataccagtgatgtgcgctttggcgaacattacattcccatgc

SEQ ID NO: 312427 - DNA, 54 bp, Artificial
  Synthetic oligonucleotide
accgaacgagcacggcgacggatcaagcgcggacttaaaggggttgcggcatga

SEQ ID NO: 312428 - DNA, 55 bp, Artificial
  Synthetic oligonucleotide
accgaacgagtatttgttagtcatcggtgttatgatttatgacctgtgacgtaac

SEQ ID NO: 312429 - DNA, 57 bp, Artificial
  Synthetic oligonucleotide
accgaagactgtacctgtaatatccattcctatataactcccgctgaaaatgaactc

SEQ ID NO: 312430 - DNA, 57 bp, Artificial
  Synthetic oligonucleotide
accgaagattcccaccatcgctcctaatgtggagtcttgtgttggagaatgtttaac

SEQ ID NO: 312431 - DNA, 58 bp, Artificial
  Synthetic oligonucleotide
accgaagccccttcggacccaacttcctgtctcgatggctctggatacgtctgatgct

SEQ ID NO: 312432 - DNA, 56 bp, Artificial
  Synthetic oligonucleotide
accgaagcgaggaggaaagcaaagaaagcaacggggctagcgagtggatgttcctc

SEQ ID NO: 312433 - DNA, 54 bp, Artificial
  Synthetic oligonucleotide
accgaagcgaggaggaaagtaaagagagcaacggggctagccgtcaggtgttcc

SEQ ID NO: 312434 - DNA, 57 bp, Artificial
  Synthetic oligonucleotide
accgaaggattttacagtgctgataacgagcaattagcgagcggtagcgtgtttttg

SEQ ID NO: 312435 - DNA, 58 bp, Artificial
  Synthetic oligonucleotide
accgaaggcactccagagtcatattaacgatgttggtctaaagcagaagaaactacga

SEQ ID NO: 312436 - DNA, 56 bp, Artificial
  Synthetic oligonucleotide
accgaagggcattgtttacggatacgatctttacactaaaatagagcagacggcat

SEQ ID NO: 312437 - DNA, 53 bp, Artificial
  Synthetic oligonucleotide
accgaagtatattaagggtttagtacaatacgtagtggagtatattactagac

SEQ ID NO: 312438 - DNA, 60 bp, Artificial
  Synthetic oligonucleotide
accgaagtgcggtgatgatggactcgcaagagccaccatacagaaaaccatcaaccgcgc

SEQ ID NO: 312439 - DNA, 51 bp, Artificial
  Synthetic oligonucleotide
accgaagtttacgtcatcgataatggaaagcgttctgcccgctgtgaaggc

SEQ ID NO: 312440 - DNA, 56 bp, Artificial
  Synthetic oligonucleotide
accgaataactagtagtatcacaactactgctagccctgcgtataccctttcggtc

SEQ ID NO: 312441 - DNA, 60 bp, Artificial
  Synthetic oligonucleotide
accgaatagcttcaattacgaagaatgcacaaattgacagagatgtcctgagctcatcca

SEQ ID NO: 312442 - DNA, 55 bp, Artificial
  Synthetic oligonucleotide
accgaatatctttccatattccgcttcttttacgttgaataggtctcaaccacag

SEQ ID NO: 312443 - DNA, 55 bp, Artificial
  Synthetic oligonucleotide
accgaatcaatgactctcaagttagagctattgcacggaataatggctatgcagg

SEQ ID NO: 312444 - DNA, 58 bp, Artificial
  Synthetic oligonucleotide
accgaatccctaaccctgtggaggcaacacgatgatcgacctagaccgtgcaagagaa

SEQ ID NO: 312445 - DNA, 54 bp, Artificial
  Synthetic oligonucleotide
accgaatggccgcccgatttttttatgtgggtcctcaaccaatgaaattcacgc

SEQ ID NO: 312446 - DNA, 55 bp, Artificial
  Synthetic oligonucleotide
accgaatggccgcgaaaattttggtgggccctcaaccaacgaaatgcaagctaca

SEQ ID NO: 312447 - DNA, 54 bp, Artificial
  Synthetic oligonucleotide
accgaatggccgcgaaaatttttccgcctcatcctgtccgttgttttgtaatca

SEQ ID NO: 312448 - DNA, 55 bp, Artificial
  Synthetic oligonucleotide
accgaatggccgcgcaaatttttaggtgggccctcgacgaatgaaatggacgcta

SEQ ID NO: 312449 - DNA, 53 bp, Artificial
  Synthetic oligonucleotide
accgaatggccgcgcaaatttttatgtgggaccccgaccaatgaaattcgacc

SEQ ID NO: 312450 - DNA, 57 bp, Artificial
  Synthetic oligonucleotide
accgaatggccgcggtgccttttgtgtgggtccagaaccaatgaaattcgagataca

SEQ ID NO: 312451 - DNA, 56 bp, Artificial
  Synthetic oligonucleotide
accgaattaacagtacgattaacaggactattgctaagttcggcgagttggataga

SEQ ID NO: 312452 - DNA, 57 bp, Artificial
  Synthetic oligonucleotide
accgacacacatggacctatcgtcgtacagtacttctccgttaaggagagttggatc

SEQ ID NO: 312453 - DNA, 60 bp, Artificial
  Synthetic oligonucleotide
accgacagagccgtaatgcagcggccctaattgcaggatgtgggctcaaactgaaggttg

SEQ ID NO: 312454 - DNA, 53 bp, Artificial
  Synthetic oligonucleotide
accgacagttggttaggaccacctaatgttccgaaaccagaaccgactggtca

SEQ ID NO: 312455 - DNA, 58 bp, Artificial
  Synthetic oligonucleotide
accgacatgttccagtatgattgtactgacgatgatgacggtacagcctacatgcaag

SEQ ID NO: 312456 - DNA, 57 bp, Artificial
  Synthetic oligonucleotide
accgaccaataggagcgtggcacccagccatgttacggtcaagcacttctgtttccc

SEQ ID NO: 312457 - DNA, 52 bp, Artificial
  Synthetic oligonucleotide
accgacccaaccagacgttgccacatgtaggttctatacccttgactctgtg

SEQ ID NO: 312458 - DNA, 51 bp, Artificial
  Synthetic oligonucleotide
accgaccccgaggaagggtcgagcgggtggtactgggtgcgggaggccgag

SEQ ID NO: 312459 - DNA, 60 bp, Artificial
  Synthetic oligonucleotide
accgaccgcacccggtacagtcaacgatactgctgccaatatagactctgtttagtgcca

SEQ ID NO: 312460 - DNA, 52 bp, Artificial
  Synthetic oligonucleotide
accgaccgcctaggaccggatgggtttaggaccggagtggattccgacgaga

SEQ ID NO: 312461 - DNA, 55 bp, Artificial
  Synthetic oligonucleotide
accgaccgtggtttcttctcgtatcggtactcactcactgagcgtccttgttacg

SEQ ID NO: 312462 - DNA, 59 bp, Artificial
  Synthetic oligonucleotide
accgaccgttcacgcgctcgccgtgctatcgaggcttgcgtatatggaacactggactt

SEQ ID NO: 312463 - DNA, 60 bp, Artificial
  Synthetic oligonucleotide
accgacctaccaccatggatgcttctaggatgatcagtctatatgtagaccccactagca

SEQ ID NO: 312464 - DNA, 58 bp, Artificial
  Synthetic oligonucleotide
accgacctcgcctgcgaccctgctcttatggctaacctgcctccgcgcgaagtatccc

SEQ ID NO: 312465 - DNA, 50 bp, Artificial
  Synthetic oligonucleotide
accgacctcgctaccggtaccaaacccgacgcgtctttccacaggacgcg

SEQ ID NO: 312466 - DNA, 55 bp, Artificial
  Synthetic oligonucleotide
accgaccttctaactgtcaacttggatgacgacgtgttttaccctcctgatacca

SEQ ID NO: 312467 - DNA, 60 bp, Artificial
  Synthetic oligonucleotide
accgacgcaaccagatgttgccacatgtagattttacactctagattccatacaatggca

SEQ ID NO: 312468 - DNA, 55 bp, Artificial
  Synthetic oligonucleotide
accgacgccgcatttgactttctgaccacacacttagttaaaacaccgtaggctg

SEQ ID NO: 312469 - DNA, 57 bp, Artificial
  Synthetic oligonucleotide
accgacgcgaccaccatcttgggcgtcggcactgttctggaccaagcggagacggct

SEQ ID NO: 312470 - DNA, 55 bp, Artificial
  Synthetic oligonucleotide
accgacgtaagatggtacccctggaagatatctactagtgctgaacgcccgttca

SEQ ID NO: 312471 - DNA, 50 bp, Artificial
  Synthetic oligonucleotide
accgacgtgtccttgtggcgatttggccccacgcaaaagcgctcaccggc

SEQ ID NO: 312472 - DNA, 55 bp, Artificial
  Synthetic oligonucleotide
accgacgttagtccaattcgggatgaactaaattatcagcgtcatgcgataatgc

SEQ ID NO: 312473 - DNA, 59 bp, Artificial
  Synthetic oligonucleotide
accgactacaatttagcacgttatgcttttgatttctacgagatcacatcacgtacaac

SEQ ID NO: 312474 - DNA, 60 bp, Artificial
  Synthetic oligonucleotide
accgactacatacacatgctaggtgaagcttttggcaatggctttgtagatagtgttaaa

SEQ ID NO: 312475 - DNA, 55 bp, Artificial
  Synthetic oligonucleotide
accgactacatggcgagaatactaaaagagaggtatttagataagggtcataggg

SEQ ID NO: 312476 - DNA, 58 bp, Artificial
  Synthetic oligonucleotide
accgactacggagccctcacattggactgctcacctagaacagggctggactttaatg

SEQ ID NO: 312477 - DNA, 55 bp, Artificial
  Synthetic oligonucleotide
accgactcagtgttgtccattgtataaagaggtgctagaagatctcagcaaggga

SEQ ID NO: 312478 - DNA, 54 bp, Artificial
  Synthetic oligonucleotide
accgactcctgggtttcttcggaaggactttgtccgtgtacttctagcacaaga

SEQ ID NO: 312479 - DNA, 54 bp, Artificial
  Synthetic oligonucleotide
accgactgctacaaaagtatcgtggtatgcgtgtaacggtatgtttaccgaagg

SEQ ID NO: 312480 - DNA, 53 bp, Artificial
  Synthetic oligonucleotide
accgactggaacatcagacagtcaagcagggcgcaatgtggttctgttgattg

SEQ ID NO: 312481 - DNA, 53 bp, Artificial
  Synthetic oligonucleotide
accgacttggggacaccaggtcgaagaatctgttatttgtgcatctgtatttc

SEQ ID NO: 312482 - DNA, 54 bp, Artificial
  Synthetic oligonucleotide
accgactttcagcgcgtcactttcgttgtcggcaccgtcgcaggtgaggcacct

SEQ ID NO: 312483 - DNA, 54 bp, Artificial
  Synthetic oligonucleotide
accgactttgaccagggctggggccctatcagttatgccaacggaagtggcccc

SEQ ID NO: 312484 - DNA, 60 bp, Artificial
  Synthetic oligonucleotide
accgagaacatgtgtattgcaattgatcactatgcaggacaattgctctcattggacata

SEQ ID NO: 312485 - DNA, 55 bp, Artificial
  Synthetic oligonucleotide
accgagacctggactgctcgggctttatgatgtacgtggtgttcccgggcaaagc

SEQ ID NO: 312486 - DNA, 58 bp, Artificial
  Synthetic oligonucleotide
accgagactcctccgttatcatggcgtcgcccacggagaacaacatacatctgtttaa

SEQ ID NO: 312487 - DNA, 60 bp, Artificial
  Synthetic oligonucleotide
accgagactgttaagcctgtgttggatcttacgaactcaatcatacagaggctggaatga

SEQ ID NO: 312488 - DNA, 60 bp, Artificial
  Synthetic oligonucleotide
accgagagaaagagacaacagtggattccatctcgatcaagtaccaggagcaggatcaat

SEQ ID NO: 312489 - DNA, 58 bp, Artificial
  Synthetic oligonucleotide
accgagagaactgaaaacaaacttgatacaacagaattcattgtgacccgttgatcaa

SEQ ID NO: 312490 - DNA, 55 bp, Artificial
  Synthetic oligonucleotide
accgagagaagcccgcagtcgcgggaaagcttttcgttcagctcacgcctggcgt

SEQ ID NO: 312491 - DNA, 55 bp, Artificial
  Synthetic oligonucleotide
accgagagaccgaccaatccgttggggtccttgtgggtctgtgcgaagaggaatc

SEQ ID NO: 312492 - DNA, 55 bp, Artificial
  Synthetic oligonucleotide
accgagagccagatacacatggtatgggtaaaatcaggtcttgtcttcttcacgc

SEQ ID NO: 312493 - DNA, 56 bp, Artificial
  Synthetic oligonucleotide
accgagagggaaaaatacgatgttagtagacacattgtatctactaaacttggcga

SEQ ID NO: 312494 - DNA, 54 bp, Artificial
  Synthetic oligonucleotide
accgagattcttattaatttgatgcaaccccggcaactggttttccgccctgag

SEQ ID NO: 312495 - DNA, 60 bp, Artificial
  Synthetic oligonucleotide
accgagcacagcaacggtgaagaacatgcatcgtgatcgttatcaagtcctacggaagtg

SEQ ID NO: 312496 - DNA, 52 bp, Artificial
  Synthetic oligonucleotide
accgagcaggactaaattggaaccaagtgtgttccaccaagtatttgagggc

SEQ ID NO: 312497 - DNA, 53 bp, Artificial
  Synthetic oligonucleotide
accgagccaagtggccatgaagtttacggtacagcgctgtcctgcagtccact

SEQ ID NO: 312498 - DNA, 55 bp, Artificial
  Synthetic oligonucleotide
accgagccggtactatgggcgaaagtgtccctgaagaacttatactgaagggcgc

SEQ ID NO: 312499 - DNA, 55 bp, Artificial
  Synthetic oligonucleotide
accgaggaacttcccagtggtgcaacccaccgcaccgccgatagagcctctcaca

SEQ ID NO: 312500 - DNA, 58 bp, Artificial
  Synthetic oligonucleotide
accgaggagaatgtggctaaggctcttaaaagcacggcgtctgaggccgtggtatgtc

SEQ ID NO: 312501 - DNA, 60 bp, Artificial
  Synthetic oligonucleotide
accgaggattatgatgaacaacgttgggagatgcttgtgaagtgtgtggacagtggactt

SEQ ID NO: 312502 - DNA, 58 bp, Artificial
  Synthetic oligonucleotide
accgaggcacgaccagaacttgagctacgcattaatggtaagcttttccgtggagtgc

SEQ ID NO: 312503 - DNA, 60 bp, Artificial
  Synthetic oligonucleotide
accgaggcacttgagacgtttacgcggacaatgatcagcagtgacagggaaatgagatca

SEQ ID NO: 312504 - DNA, 60 bp, Artificial
  Synthetic oligonucleotide
accgaggccatgtagtgaagtcaatgcgtaagcgcattgtatacgagagggaaagtaagc

SEQ ID NO: 312505 - DNA, 60 bp, Artificial
  Synthetic oligonucleotide
accgagggcaatgctagagtgagacattgctcttccatggagacgggttgcttctgcctg

SEQ ID NO: 312506 - DNA, 55 bp, Artificial
  Synthetic oligonucleotide
accgagggccgcgaaattttattccgtaatgtggtccactttgactggccaatca

SEQ ID NO: 312507 - DNA, 57 bp, Artificial
  Synthetic oligonucleotide
accgagggccgcggggttttggagtctggtcccacatgtactgctgaccaatcagct

SEQ ID NO: 312508 - DNA, 49 bp, Artificial
  Synthetic oligonucleotide
accgagggccgcgttttttttttgtggtccccccacgtgcagtactacg

SEQ ID NO: 312509 - DNA, 54 bp, Artificial
  Synthetic oligonucleotide
accgagggtttggaggctctcgacctaacaaccagtgcggggtatccatacgtg

SEQ ID NO: 312510 - DNA, 57 bp, Artificial
  Synthetic oligonucleotide
accgaggtggcgcatgagttctacgtcagaaagggcggagccagcaaaagacccgcc

SEQ ID NO: 312511 - DNA, 52 bp, Artificial
  Synthetic oligonucleotide
accgagtcccggggtaagatcactctcgaccgttcgactcacaaccccgtgt

SEQ ID NO: 312512 - DNA, 55 bp, Artificial
  Synthetic oligonucleotide
accgagtctttagcagacgatacagaattttccacatctactgtcatggacccac

SEQ ID NO: 312513 - DNA, 60 bp, Artificial
  Synthetic oligonucleotide
accgagtgaacgagcccgccgccattctttgctctggactgctagaggaccctcgctgcc

SEQ ID NO: 312514 - DNA, 53 bp, Artificial
  Synthetic oligonucleotide
accgagtgccgcgaaatttttttaaatgtggtcccacaagccagccttttgac

SEQ ID NO: 312515 - DNA, 58 bp, Artificial
  Synthetic oligonucleotide
accgagtgcggaacatggggacaatccgagcggctatcggtgagggaatgcttgaagg

SEQ ID NO: 312516 - DNA, 56 bp, Artificial
  Synthetic oligonucleotide
accgagttatcgattcgtaccttgtaatccgatctcccgcttttgaccgctctgag

SEQ ID NO: 312517 - DNA, 60 bp, Artificial
  Synthetic oligonucleotide
accgataatagctcctcaactcccagcattgccacacaagacatgggccagttatgcttc

SEQ ID NO: 312518 - DNA, 60 bp, Artificial
  Synthetic oligonucleotide
accgatagcaatactgtaggcatgggtgatgctggtattaaatctgccattcaaggctct

SEQ ID NO: 312519 - DNA, 59 bp, Artificial
  Synthetic oligonucleotide
accgataggtaaatgatcaccgatatatcggtgatcaattggggtctcataaattgcct

SEQ ID NO: 312520 - DNA, 54 bp, Artificial
  Synthetic oligonucleotide
accgatatacccttcttcgaaggatcggttttacatacgtcatgttgctaaacg

SEQ ID NO: 312521 - DNA, 51 bp, Artificial
  Synthetic oligonucleotide
accgatatgacagttggcccccatgaattctgttctcaacatacagtgttg

SEQ ID NO: 312522 - DNA, 60 bp, Artificial
  Synthetic oligonucleotide
accgatcttctttgaagaagcactcaatgtagccctggctgtggtcacattgcttgccat

SEQ ID NO: 312523 - DNA, 55 bp, Artificial
  Synthetic oligonucleotide
accgatgaaatgcgttcgtgaaatgtacgatcattcacggcgatccttgcggtgg

SEQ ID NO: 312524 - DNA, 52 bp, Artificial
  Synthetic oligonucleotide
accgatgagtggtgagagctactgatgttcccgacaccgttcaaggtgctgc

SEQ ID NO: 312525 - DNA, 60 bp, Artificial
  Synthetic oligonucleotide
accgatgcaactttaacacatggcgcaatatcccatatcaccggcgggtgcgcagtgttt

SEQ ID NO: 312526 - DNA, 57 bp, Artificial
  Synthetic oligonucleotide
accgatgcaatgagctacacttgacccccactcaaacgcgcaacgttgtagctgagg

SEQ ID NO: 312527 - DNA, 55 bp, Artificial
  Synthetic oligonucleotide
accgatgctaggtacatggccgacaatgcatgatctagcaacagcgtgttacatc

SEQ ID NO: 312528 - DNA, 52 bp, Artificial
  Synthetic oligonucleotide
accgatgctgtctctcctaatttaagaatgtcggtggaaggagctagttctc

SEQ ID NO: 312529 - DNA, 60 bp, Artificial
  Synthetic oligonucleotide
accgatggactgccgttcacccacctacagctggactcatggcaccgcgtggccacttag

SEQ ID NO: 312530 - DNA, 54 bp, Artificial
  Synthetic oligonucleotide
accgatggagacgtgggggattacctggacgagaatgttcttaagaaagccaac

SEQ ID NO: 312531 - DNA, 57 bp, Artificial
  Synthetic oligonucleotide
accgatggcatttttgtaataagaggggtgtactccgattgagctctcaaacttctg

SEQ ID NO: 312532 - DNA, 60 bp, Artificial
  Synthetic oligonucleotide
accgatggcgagacggcgcaggctcgtgcgtggattacgtacacgcgcgcgcttaagagc

SEQ ID NO: 312533 - DNA, 58 bp, Artificial
  Synthetic oligonucleotide
accgatgggaaccatgttgaactacatcaaacatgactgtggattcgttatcccgtta

SEQ ID NO: 312534 - DNA, 60 bp, Artificial
  Synthetic oligonucleotide
accgatgtcattaattcctgggcaggagacatactgaggactcaagagtcatcctgcact

SEQ ID NO: 312535 - DNA, 55 bp, Artificial
  Synthetic oligonucleotide
accgatgttcacagaatttaacgggcttaggaacataaccgtaccagctactcaa

SEQ ID NO: 312536 - DNA, 55 bp, Artificial
  Synthetic oligonucleotide
accgatgttttctcgactttatcgatcagatagcctaaaaccgatagcgcctcgt

SEQ ID NO: 312537 - DNA, 60 bp, Artificial
  Synthetic oligonucleotide
accgattataagtatttgattattcagaacacatcatgggaggatcattgcatgttctca

SEQ ID NO: 312538 - DNA, 59 bp, Artificial
  Synthetic oligonucleotide
accgattcaagttggatagaacttgatgaaataggggaagatgtcgccccaattgagca

SEQ ID NO: 312539 - DNA, 52 bp, Artificial
  Synthetic oligonucleotide
accgattcatcctttcagtccttgtccaacaacatgtatctgtggaatggtt

SEQ ID NO: 312540 - DNA, 51 bp, Artificial
  Synthetic oligonucleotide
accgattcgcccccgttccaggtcccttctttcgggatgaggtaacgttca

SEQ ID NO: 312541 - DNA, 57 bp, Artificial
  Synthetic oligonucleotide
accgattctacataagacacgtgttcaaacgtgtattgtccgtggagaaggatacga

SEQ ID NO: 312542 - DNA, 57 bp, Artificial
  Synthetic oligonucleotide
accgattgaagctccagtaagacgtaagaactagggacctctgtgactggctaggta

SEQ ID NO: 312543 - DNA, 60 bp, Artificial
  Synthetic oligonucleotide
accgattgccatttactcctgtctatcggtgaatggtgacgcatatatactagagctact

SEQ ID NO: 312544 - DNA, 57 bp, Artificial
  Synthetic oligonucleotide
accgattgggaatccgaaatccatgtatacgaagaacaccgagtagctgacggagtg

SEQ ID NO: 312545 - DNA, 60 bp, Artificial
  Synthetic oligonucleotide
accgattggtgcgctcgagtgtcacgctactgggtcgcaggctagacgccgggcaactgt

SEQ ID NO: 312546 - DNA, 54 bp, Artificial
  Synthetic oligonucleotide
accgattggtttgctgggaacgagtggtgtgaaggtagtttctgagggttgtcc

SEQ ID NO: 312547 - DNA, 53 bp, Artificial
  Synthetic oligonucleotide
accgatttaattgagattacacctagattgtttaaatacttgagaacttgggt

SEQ ID NO: 312548 - DNA, 51 bp, Artificial
  Synthetic oligonucleotide
accgatttcaatgctggtttaagcatgttggttgattgaccctactaatag

SEQ ID NO: 312549 - DNA, 55 bp, Artificial
  Synthetic oligonucleotide
accgatttgagataattgaagggagggaccgaacgatggcttggacagtggtaaa

SEQ ID NO: 312550 - DNA, 50 bp, Artificial
  Synthetic oligonucleotide
accgatttttaagggttcgggatcaacgaggaaacgtactattgtcaccc

SEQ ID NO: 312551 - DNA, 53 bp, Artificial
  Synthetic oligonucleotide
accgcaaaccagtcctctaaggactagctctatcctagttaatctaggttaaa

SEQ ID NO: 312552 - DNA, 54 bp, Artificial
  Synthetic oligonucleotide
accgcaaacggcgtccgtgttacgaacgcggcgcgaaggtgcggtgtgttatag

SEQ ID NO: 312553 - DNA, 50 bp, Artificial
  Synthetic oligonucleotide
accgcaaagctaggggtgttcggtttccgaacacccaagggaggcgaacg

SEQ ID NO: 312554 - DNA, 56 bp, Artificial
  Synthetic oligonucleotide
accgcaacacttgccaaagttacccattaagccagatttacaatttgattctccaa

SEQ ID NO: 312555 - DNA, 55 bp, Artificial
  Synthetic oligonucleotide
accgcaacgagaagtacggaaatcttgaaactgagtacactggtgggcttcaagg

SEQ ID NO: 312556 - DNA, 52 bp, Artificial
  Synthetic oligonucleotide
accgcaacggtggtctgatctcctgggcctcttggcataacaactcagctcg

SEQ ID NO: 312557 - DNA, 60 bp, Artificial
  Synthetic oligonucleotide
accgcaagagcgcgaccgctgacgtgggtatcgtctccgccgggactctgacgctgaatc

SEQ ID NO: 312558 - DNA, 56 bp, Artificial
  Synthetic oligonucleotide
accgcaaggtatccgcggttcgattgctcgctcgtgcgcttcattcgtgggtggtg

SEQ ID NO: 312559 - DNA, 55 bp, Artificial
  Synthetic oligonucleotide
accgcaaggtccctacagcgtcttttgacgtagaccgccgtgtgctgaccctacc

SEQ ID NO: 312560 - DNA, 58 bp, Artificial
  Synthetic oligonucleotide
accgcaagttgtcgctaagttggtggcaactatctgacaccaacattgttggtctaaa

SEQ ID NO: 312561 - DNA, 57 bp, Artificial
  Synthetic oligonucleotide
accgcaatacgctcaatgatatgtcaagtatgaatgacgtgctgaataacataacac

SEQ ID NO: 312562 - DNA, 60 bp, Artificial
  Synthetic oligonucleotide
accgcaatgtaagcgcttattggtcgatgaagctgggctactacactatggtcagctgct

SEQ ID NO: 312563 - DNA, 55 bp, Artificial
  Synthetic oligonucleotide
accgcaatttgtcgatacgaagtacacagccatgggatattcacaaacccctctg

SEQ ID NO: 312564 - DNA, 60 bp, Artificial
  Synthetic oligonucleotide
accgcacaagcaatccaaattagatgaaggccgctaccgcctcatcatgagtgtctctct

SEQ ID NO: 312565 - DNA, 53 bp, Artificial
  Synthetic oligonucleotide
accgcacagaatggcgtcgagggttccgggttcctccaccctttcgacgtcac

SEQ ID NO: 312566 - DNA, 53 bp, Artificial
  Synthetic oligonucleotide
accgcacataaacgtatgaatgggtctatcggctacaatgtgagtaaaggtag

SEQ ID NO: 312567 - DNA, 50 bp, Artificial
  Synthetic oligonucleotide
accgcacattctcccatgcgcatatccctcacgtttcggttgcataagca

SEQ ID NO: 312568 - DNA, 60 bp, Artificial
  Synthetic oligonucleotide
accgcacatttgacaacgcagtaggccgggtgcctgcttaatgcccaggaggcagctcga

SEQ ID NO: 312569 - DNA, 54 bp, Artificial
  Synthetic oligonucleotide
accgcaccaggtctcgctcccggtcgctctcccgggttagggccgttggctcca

SEQ ID NO: 312570 - DNA, 58 bp, Artificial
  Synthetic oligonucleotide
accgcacccaccgtggcaagatgaacttctccgttctatacggggacatgctcgcctc

SEQ ID NO: 312571 - DNA, 60 bp, Artificial
  Synthetic oligonucleotide
accgcacgtattcattttacttcacgcgctctacatactaatgagcaaagtaccactcaa

SEQ ID NO: 312572 - DNA, 60 bp, Artificial
  Synthetic oligonucleotide
accgcactataaagtgttcctcgccaggctcatatggtggttacaatacttcatcaccag

SEQ ID NO: 312573 - DNA, 60 bp, Artificial
  Synthetic oligonucleotide
accgcagccgagactttgatctcggcggtaagcttctcaaccaactagacgatagagcta

SEQ ID NO: 312574 - DNA, 55 bp, Artificial
  Synthetic oligonucleotide
accgcagctgccatggtacatggtaacactctctcatatgcagttcgcacccaag

SEQ ID NO: 312575 - DNA, 54 bp, Artificial
  Synthetic oligonucleotide
accgcaggcttgcggttaagctaactaggccgttgcctaggagatgacataaag

SEQ ID NO: 312576 - DNA, 58 bp, Artificial
  Synthetic oligonucleotide
accgcaggctttaagccattaaaataatggcctgtgttactttggatcgagatcaaca

SEQ ID NO: 312577 - DNA, 55 bp, Artificial
  Synthetic oligonucleotide
accgcagtgtcagattacagggtttgctcctttctccaaggacaactcagtccgg

SEQ ID NO: 312578 - DNA, 52 bp, Artificial
  Synthetic oligonucleotide
accgcatatcaggaggagggatcgggtgatgacacaggccccgcaaaacagt

SEQ ID NO: 312579 - DNA, 58 bp, Artificial
  Synthetic oligonucleotide
accgcatcgcggagttaacaagcgctcgtgaatccaagaaagcaagcgctccaatgct

SEQ ID NO: 312580 - DNA, 53 bp, Artificial
  Synthetic oligonucleotide
accgccaacaaggtaggagtgggagcattcgggccggggttcaccccaccgca

SEQ ID NO: 312581 - DNA, 55 bp, Artificial
  Synthetic oligonucleotide
accgccaagtcccatgtccccgggcacaccgccaagtcccatgtccccgggcaca

SEQ ID NO: 312582 - DNA, 60 bp, Artificial
  Synthetic oligonucleotide
accgccactagtggtcaatgattcaggtggctcgcgtttactgaggttactgtatgacgc

SEQ ID NO: 312583 - DNA, 60 bp, Artificial
  Synthetic oligonucleotide
accgccagagccttgtatcaggaagccctaacctctgcagaccattattcttctcaccat

SEQ ID NO: 312584 - DNA, 60 bp, Artificial
  Synthetic oligonucleotide
accgccagcagcgagtatcaaagacatctgcggataacaacaacagtgaatactcgtgga

SEQ ID NO: 312585 - DNA, 54 bp, Artificial
  Synthetic oligonucleotide
accgccaggtcacaactctggttcgtgtccacagcccaaccccggacccaacaa

SEQ ID NO: 312586 - DNA, 50 bp, Artificial
  Synthetic oligonucleotide
accgccagtggagccaacgggggccccataactacctaccttagtgcgat

SEQ ID NO: 312587 - DNA, 57 bp, Artificial
  Synthetic oligonucleotide
accgccatagatggaccttgggagtatgggacctggatttctacaggtagtcacaaa

SEQ ID NO: 312588 - DNA, 60 bp, Artificial
  Synthetic oligonucleotide
accgcccaacacattgaagaatgctcatgctatggagcaaaggaagtgatcaaatgcata

SEQ ID NO: 312589 - DNA, 55 bp, Artificial
  Synthetic oligonucleotide
accgcccaacgagccaaatctggggtggcggaggcttggaccgacttcttcgtga

SEQ ID NO: 312590 - DNA, 53 bp, Artificial
  Synthetic oligonucleotide
accgcccacgtcaggcggtaacatttcaatttgaaaatcccgcctttgaggag

SEQ ID NO: 312591 - DNA, 51 bp, Artificial
  Synthetic oligonucleotide
accgccccagtggcgttaatcggaacctgctgcctgtactctatgacgcag

SEQ ID NO: 312592 - DNA, 53 bp, Artificial
  Synthetic oligonucleotide
accgcccccacctttggctcgcggttccactctcccggggcggaggcacttgc

SEQ ID NO: 312593 - DNA, 55 bp, Artificial
  Synthetic oligonucleotide
accgcccgccagagagtcgaccgtcgtcctcttcgtctcacaagaatgcagaaac

SEQ ID NO: 312594 - DNA, 51 bp, Artificial
  Synthetic oligonucleotide
accgccgcacacatcctcacgggtaactctgccagggtctctggggttggc

SEQ ID NO: 312595 - DNA, 57 bp, Artificial
  Synthetic oligonucleotide
accgccgcgcgtgtcgtgaattgaggccggcaaccactggaaatgatagtttcaccg

SEQ ID NO: 312596 - DNA, 60 bp, Artificial
  Synthetic oligonucleotide
accgccgcgggagccctcgcccacttgcattggcttagagcaggtggctggtgagcccat

SEQ ID NO: 312597 - DNA, 54 bp, Artificial
  Synthetic oligonucleotide
accgccgctatgaatagcgacgttgatgctagcacccaaggtgaaatctggcgt

SEQ ID NO: 312598 - DNA, 60 bp, Artificial
  Synthetic oligonucleotide
accgccggaggtgttgagttgagcgtcattcaatctgccgagaatatcgttcttgctggc

SEQ ID NO: 312599 - DNA, 50 bp, Artificial
  Synthetic oligonucleotide
accgccggttcaaggaccctcttcttggggctattgctcttataggcttt

SEQ ID NO: 312600 - DNA, 57 bp, Artificial
  Synthetic oligonucleotide
accgccgtggctcgctacggtagtgatgtgagttccgttgcatagatgtaaaacctt

SEQ ID NO: 312601 - DNA, 58 bp, Artificial
  Synthetic oligonucleotide
accgccgttctcaattctacggaccagagttagtggattgtatggacttccagcggca

SEQ ID NO: 312602 - DNA, 60 bp, Artificial
  Synthetic oligonucleotide
accgcctaccaacactccatcatcctcatcgctgctcccaccgaagacatctccctcctt

SEQ ID NO: 312603 - DNA, 60 bp, Artificial
  Synthetic oligonucleotide
accgcctaccacaaagatcgtggccttggtcatcgcacgattgactcaattcagggctgc

SEQ ID NO: 312604 - DNA, 60 bp, Artificial
  Synthetic oligonucleotide
accgcctacgccattcaacatcaacactctgctccaacaacaagcggcgtatatccaatg

SEQ ID NO: 312605 - DNA, 57 bp, Artificial
  Synthetic oligonucleotide
accgcctacttacgatgtcaaagtcaagtttggaagctcgctctccggagcaactcg

SEQ ID NO: 312606 - DNA, 60 bp, Artificial
  Synthetic oligonucleotide
accgcctatgccaatcgctgacatcactcagatgatgccagagagctcttgcagcatgga

SEQ ID NO: 312607 - DNA, 60 bp, Artificial
  Synthetic oligonucleotide
accgcctcagctctgtatcgggaagccttagagtctcctgagcattgttcacctcaccat

SEQ ID NO: 312608 - DNA, 59 bp, Artificial
  Synthetic oligonucleotide
accgcctcgattgctttctccggggctgttccaagcgtggatgcgttggatgacgacac

SEQ ID NO: 312609 - DNA, 60 bp, Artificial
  Synthetic oligonucleotide
accgcctgcacttccttaatcggaatgagagaccgtgatgattggcaattctatccaaat

SEQ ID NO: 312610 - DNA, 59 bp, Artificial
  Synthetic oligonucleotide
accgcctgtgacttgcaatatccgttcggctcaccactaactgacaacccttgcgtcaa

SEQ ID NO: 312611 - DNA, 48 bp, Artificial
  Synthetic oligonucleotide
accgccttaacacacgtttttaaccgctttcccgaaaaccaaatattg

SEQ ID NO: 312612 - DNA, 52 bp, Artificial
  Synthetic oligonucleotide
accgccttagggtgggattgttgggcaacggacgacgccgtaattcagtcat

SEQ ID NO: 312613 - DNA, 55 bp, Artificial
  Synthetic oligonucleotide
accgccttcgatcaatctcaggacggagcgatgctccaatttgaagtgctgaagg

SEQ ID NO: 312614 - DNA, 56 bp, Artificial
  Synthetic oligonucleotide
accgcgaagggtatctgctaaggcggtgatcaagggtaatcacttaccagttaagc

SEQ ID NO: 312615 - DNA, 52 bp, Artificial
  Synthetic oligonucleotide
accgcgaatatcccaagcagtattgtccaacttgaacttctcgttggtataa

SEQ ID NO: 312616 - DNA, 58 bp, Artificial
  Synthetic oligonucleotide
accgcgactcgtgacgagattgaagaatacgaactttcaagaggaattcatagcgttc

SEQ ID NO: 312617 - DNA, 57 bp, Artificial
  Synthetic oligonucleotide
accgcgatcggaaaggttttctccgaagcgggtcgagcctatgcccaggatgctctc

SEQ ID NO: 312618 - DNA, 54 bp, Artificial
  Synthetic oligonucleotide
accgcgccaagtgctttgcacgggtggcttctaaaccgtttcttccacgagata

SEQ ID NO: 312619 - DNA, 53 bp, Artificial
  Synthetic oligonucleotide
accgcgccttcttttcctgcgagggcccgaagggaccgagcgatttgatttaa

SEQ ID NO: 312620 - DNA, 60 bp, Artificial
  Synthetic oligonucleotide
accgcgctatttggggagacaatagattcaagttagtgaggggtgtgtatgaatatgcga

SEQ ID NO: 312621 - DNA, 52 bp, Artificial
  Synthetic oligonucleotide
accgcggaaacgacttcttcatgtacgactcgacggggcttgcaaacctcag

SEQ ID NO: 312622 - DNA, 55 bp, Artificial
  Synthetic oligonucleotide
accgcggcaggggcaatagcattaatgctgctacgcttcaaggcccagaaaagcc

SEQ ID NO: 312623 - DNA, 54 bp, Artificial
  Synthetic oligonucleotide
accgcggctgtccccttcaaacgtatggccgtctctgtgcaagcggacgattct

SEQ ID NO: 312624 - DNA, 56 bp, Artificial
  Synthetic oligonucleotide
accgcgggctgttgctcgcaattgccttttttgtggtgtatcgtgccgttctgttt

SEQ ID NO: 312625 - DNA, 50 bp, Artificial
  Synthetic oligonucleotide
accgcggtaaattgggcgtttttaccgcggtgattctgggcttactttta

SEQ ID NO: 312626 - DNA, 55 bp, Artificial
  Synthetic oligonucleotide
accgcggtctaccttctcctcgccgttctgttctacgcggtgcttgcggtctacg

SEQ ID NO: 312627 - DNA, 56 bp, Artificial
  Synthetic oligonucleotide
accgcgtacaacggtgagtgcaagtacagtaaaaacgctgtacccagtgtgagagg

SEQ ID NO: 312628 - DNA, 55 bp, Artificial
  Synthetic oligonucleotide
accgcgtcccgtcaggcggaggttatcgcccctgccgttcagaccaactggcaaa

SEQ ID NO: 312629 - DNA, 58 bp, Artificial
  Synthetic oligonucleotide
accgcgtgcgacgttgaacctgcctttggacacagcgacgcggcctgctggggctttc

SEQ ID NO: 312630 - DNA, 50 bp, Artificial
  Synthetic oligonucleotide
accgcgttaaagaaacggaacgctgacgtgcctgagttagcagattctgt

SEQ ID NO: 312631 - DNA, 56 bp, Artificial
  Synthetic oligonucleotide
accgcgttcgcgactctagtcgtgagatggttggcatttgggggggagtcaatagc

SEQ ID NO: 312632 - DNA, 59 bp, Artificial
  Synthetic oligonucleotide
accgcgtttcgtgagttgaagcgtggggctgacatctatggtggtgagaggaatttcgc

SEQ ID NO: 312633 - DNA, 54 bp, Artificial
  Synthetic oligonucleotide
accgctaagcaggcttttgttttctcgccaacttacaaggcctttctccgtcaa

SEQ ID NO: 312634 - DNA, 59 bp, Artificial
  Synthetic oligonucleotide
accgctaaggggcacttctctgggctcgcagtgtgtgacacttggatactactccccat

SEQ ID NO: 312635 - DNA, 54 bp, Artificial
  Synthetic oligonucleotide
accgctaccgagtgcgtaacatggcacaaggtacggggaaccgcgacgctgtaa

SEQ ID NO: 312636 - DNA, 60 bp, Artificial
  Synthetic oligonucleotide
accgctagcaaaatacactctgtgtggggcgtgctagtggatagtcatgtatgtttgaga

SEQ ID NO: 312637 - DNA, 58 bp, Artificial
  Synthetic oligonucleotide
accgctagcttcatttacaatgggaggcttgtagacagtattagttcatggtccaaaa

SEQ ID NO: 312638 - DNA, 56 bp, Artificial
  Synthetic oligonucleotide
accgctatatcgggtagctatagcagtcggatagtaatatatccggcgtttcgaaa

SEQ ID NO: 312639 - DNA, 58 bp, Artificial
  Synthetic oligonucleotide
accgctatattcccccctggtggagcgccaagcgctgcgccgggtgaggtggcagcct

SEQ ID NO: 312640 - DNA, 50 bp, Artificial
  Synthetic oligonucleotide
accgctatgacacgtgccgcggaaccccttctggcgcataaccggtcata

SEQ ID NO: 312641 - DNA, 58 bp, Artificial
  Synthetic oligonucleotide
accgctatgggtttgtagctaatttcagtatggagctgcccagttttggagtatctgg

SEQ ID NO: 312642 - DNA, 55 bp, Artificial
  Synthetic oligonucleotide
accgctattgttgtggattcactcaagccatactgtgacactgtcgaaggacccc

SEQ ID NO: 312643 - DNA, 60 bp, Artificial
  Synthetic oligonucleotide
accgctcacaccccatgcgagccacggccctgtgtggcgagcggtcctgctctgccaggc

SEQ ID NO: 312644 - DNA, 60 bp, Artificial
  Synthetic oligonucleotide
accgctcacaccccatgcgagccgcggctctgtgcggcgagcggtccccggatgttctta

SEQ ID NO: 312645 - DNA, 60 bp, Artificial
  Synthetic oligonucleotide
accgctcatggtgctccaagctggcataactagggtgccgtacttcgtacgcgctcaagg

SEQ ID NO: 312646 - DNA, 55 bp, Artificial
  Synthetic oligonucleotide
accgctccacacgtcccattccagactcacctcaactatggcgcgattggccagt

SEQ ID NO: 312647 - DNA, 55 bp, Artificial
  Synthetic oligonucleotide
accgctccccaagtccctgcaggcgatcgtgactgatcgagccgcctgacggtag

SEQ ID NO: 312648 - DNA, 58 bp, Artificial
  Synthetic oligonucleotide
accgctccctcatccatgcgtatgatgccttttaaagtgacaaatatggagagacaac

SEQ ID NO: 312649 - DNA, 59 bp, Artificial
  Synthetic oligonucleotide
accgctcctgctgggggatttactgaaggatcgatccatgattatcttggtctacctac

SEQ ID NO: 312650 - DNA, 60 bp, Artificial
  Synthetic oligonucleotide
accgctcgccgtgaatggagactgcgctgttctgatggattgacggacggtcggtaacta

SEQ ID NO: 312651 - DNA, 60 bp, Artificial
  Synthetic oligonucleotide
accgctctcacttcgcatcgaactagatggctgggcccgaagttattatacacttcaagc

SEQ ID NO: 312652 - DNA, 55 bp, Artificial
  Synthetic oligonucleotide
accgctctgatggtgagctttgttttaccattcgtattgctgacgttacagcacc

SEQ ID NO: 312653 - DNA, 60 bp, Artificial
  Synthetic oligonucleotide
accgctctgctaggggctctcatcaatgtgacacaacttttaaccatggcggaattgtcc

SEQ ID NO: 312654 - DNA, 55 bp, Artificial
  Synthetic oligonucleotide
accgctgaagcgagctgcgtgggcgtgcggtttgttgtccccgctgtaaaagccc

SEQ ID NO: 312655 - DNA, 51 bp, Artificial
  Synthetic oligonucleotide
accgctgacactgcctcggtgatttctgcaatatccccgctcaccccagat

SEQ ID NO: 312656 - DNA, 60 bp, Artificial
  Synthetic oligonucleotide
accgctgcgatatccgacgcgaagttgttgttggtgaaggacgaaatgcgactgatgact

SEQ ID NO: 312657 - DNA, 60 bp, Artificial
  Synthetic oligonucleotide
accgctggctcaagatactaccagatgagttgtcttttaagtggcactcttcagattcct

SEQ ID NO: 312658 - DNA, 54 bp, Artificial
  Synthetic oligonucleotide
accgctgtaagtcttgtatccagtattgacctagtgccgacgtacttgtcttaa

SEQ ID NO: 312659 - DNA, 59 bp, Artificial
  Synthetic oligonucleotide
accgctgtaccgtcactgagtctatcacctggaatgttaaatcctggaggagtaccatg

SEQ ID NO: 312660 - DNA, 58 bp, Artificial
  Synthetic oligonucleotide
accgctgtgattactgcagcgtatctgactatctgccatcagcgctacctacgaacac

SEQ ID NO: 312661 - DNA, 60 bp, Artificial
  Synthetic oligonucleotide
accgctgtgctgtattcgacctactgagataggagcatgacaaatgacgaccgtggtgat

SEQ ID NO: 312662 - DNA, 54 bp, Artificial
  Synthetic oligonucleotide
accgctgtgtccgacgtgcgcgcagcgttggacgaccttcaaaacgaggcagtc

SEQ ID NO: 312663 - DNA, 60 bp, Artificial
  Synthetic oligonucleotide
accgctgtgttgggggaactgagacttccgtggagtgcaccatccgctggacatctcaac

SEQ ID NO: 312664 - DNA, 54 bp, Artificial
  Synthetic oligonucleotide
accgcttacgtgggaacgcactaacctcgaggaggtcaaaagacgtactcctgc

SEQ ID NO: 312665 - DNA, 60 bp, Artificial
  Synthetic oligonucleotide
accgcttgcaggtagtggacaagcattaccatgatgtactacaggagattaaggcacgag

SEQ ID NO: 312666 - DNA, 55 bp, Artificial
  Synthetic oligonucleotide
accgctttaccggctaaagtggtcagcttcgatcctgcaaaacagacagttaccc

SEQ ID NO: 312667 - DNA, 55 bp, Artificial
  Synthetic oligonucleotide
accgctttcgaggctgctggatgtacctacgaggacgcacttaccaacctccgac

SEQ ID NO: 312668 - DNA, 54 bp, Artificial
  Synthetic oligonucleotide
accggaaccaggtagtccgaaaattcaaactcgtatgattcagtaaacgcatca

SEQ ID NO: 312669 - DNA, 53 bp, Artificial
  Synthetic oligonucleotide
accggaacctccatctcgtaaatcgaaatgacgggggttatagagctggattt

SEQ ID NO: 312670 - DNA, 57 bp, Artificial
  Synthetic oligonucleotide
accggaactaatcttgtgctatatgccgccccgcttagccctctactcccacttcaa

SEQ ID NO: 312671 - DNA, 55 bp, Artificial
  Synthetic oligonucleotide
accggaacttaccatccatgcctgggacttcagacgtggcttctttggcccgaaa

SEQ ID NO: 312672 - DNA, 59 bp, Artificial
  Synthetic oligonucleotide
accggaacttctggagaggtgagaatggacgaaggacaaggattgcttatgagaggatg

SEQ ID NO: 312673 - DNA, 59 bp, Artificial
  Synthetic oligonucleotide
accggaagactcagtagtgacgcatggattattaagtggtccctacgcactaatgttga

SEQ ID NO: 312674 - DNA, 55 bp, Artificial
  Synthetic oligonucleotide
accggaagagggcataagtggcttaggggggactcagtcaagacgcatctgacac

SEQ ID NO: 312675 - DNA, 59 bp, Artificial
  Synthetic oligonucleotide
accggaagcagcaaccaggtcagccaaaatttccctatagtgcagaatcttcaggggca

SEQ ID NO: 312676 - DNA, 47 bp, Artificial
  Synthetic oligonucleotide
accggaaggcccgccgcccattttaaagtgggcccccccactaagtt

SEQ ID NO: 312677 - DNA, 56 bp, Artificial
  Synthetic oligonucleotide
accggaagtgcccgcgtacaacgcctcagaaaaataccccagcatgacttcagtta

SEQ ID NO: 312678 - DNA, 58 bp, Artificial
  Synthetic oligonucleotide
accggaatcaattttagtctttatgcataaaaagctcacatgtcaggtatgttttatg

SEQ ID NO: 312679 - DNA, 60 bp, Artificial
  Synthetic oligonucleotide
accggaatcttcagatccaaatgttatagtccataatgtcatggtagattcgaagaaaga

SEQ ID NO: 312680 - DNA, 55 bp, Artificial
  Synthetic oligonucleotide
accggaattcgactatccccagatagcagcagtggtgaaccaaaacaacgaaccc

SEQ ID NO: 312681 - DNA, 53 bp, Artificial
  Synthetic oligonucleotide
accggaattgccgggaagactgggtcctttcttggataaacccactctatgcc

SEQ ID NO: 312682 - DNA, 57 bp, Artificial
  Synthetic oligonucleotide
accggacctaatggacaaaggtgacaagatcttctctgtaacttaccttacagcata

SEQ ID NO: 312683 - DNA, 60 bp, Artificial
  Synthetic oligonucleotide
accggagagatgggagtggcttctagattatatggacagaaagcacacatgtcagctatg

SEQ ID NO: 312684 - DNA, 52 bp, Artificial
  Synthetic oligonucleotide
accggagagggggttctggttccatattccggtggaacaacccatattcacg

SEQ ID NO: 312685 - DNA, 60 bp, Artificial
  Synthetic oligonucleotide
accggagcgtgatgttttgtacatgacacacacgcgagcagataaggagaccctgatgag

SEQ ID NO: 312686 - DNA, 58 bp, Artificial
  Synthetic oligonucleotide
accggagctcgtattaaggcacttcgggtcatcgatttgctacacggtagctagtgtg

SEQ ID NO: 312687 - DNA, 57 bp, Artificial
  Synthetic oligonucleotide
accggagtatttgcagaaactggaaaccgttatgatgtccacgatccaagattggga

SEQ ID NO: 312688 - DNA, 56 bp, Artificial
  Synthetic oligonucleotide
accggagtcgccaccatcgacgtaaaatcgcaggactatggaaacatccctcttcc

SEQ ID NO: 312689 - DNA, 55 bp, Artificial
  Synthetic oligonucleotide
accggataccacatgtattcatacgccctaaacgtgggcagcgttcatccttcgg

SEQ ID NO: 312690 - DNA, 50 bp, Artificial
  Synthetic oligonucleotide
accggatagccgcgcgattttttaaagtggtcccccccactaaatgttgt

SEQ ID NO: 312691 - DNA, 60 bp, Artificial
  Synthetic oligonucleotide
accggatcctcacccacctgaggatgaagcggtctccagcagtgttatgcaaccgtgcat

SEQ ID NO: 312692 - DNA, 53 bp, Artificial
  Synthetic oligonucleotide
accggatgaccgcgccttttccttttatgtggtccccacgagaccggatgacc

SEQ ID NO: 312693 - DNA, 56 bp, Artificial
  Synthetic oligonucleotide
accggatgcccgcggagcccaaaagatgaccccacaggacacgtgcaccaataaaa

SEQ ID NO: 312694 - DNA, 60 bp, Artificial
  Synthetic oligonucleotide
accggatggaccgctcgtgctcgacataagctacatggctatcatacacgcgttccgcct

SEQ ID NO: 312695 - DNA, 53 bp, Artificial
  Synthetic oligonucleotide
accggatggcaacggccccgcgtgtgggacccaccactaaccaatgaaaacgc

SEQ ID NO: 312696 - DNA, 50 bp, Artificial
  Synthetic oligonucleotide
accggatggccccgaaaattttgcccccccaattgtaacgtgacacgtgt

SEQ ID NO: 312697 - DNA, 52 bp, Artificial
  Synthetic oligonucleotide
accggatggccccgaaaattttgccctcccatttactaaatgacacgtgtaa

SEQ ID NO: 312698 - DNA, 52 bp, Artificial
  Synthetic oligonucleotide
accggatggccccgaaaattttggccccccaattagaatgtgccacgtgtaa

SEQ ID NO: 312699 - DNA, 52 bp, Artificial
  Synthetic oligonucleotide
accggatggcccgaaaaaaatgggcacccaatcaaaacgtgacacgtggaag

SEQ ID NO: 312700 - DNA, 52 bp, Artificial
  Synthetic oligonucleotide
accggatggcccgccgatttttttaaagtgggcccccgaccaatgataatgc

SEQ ID NO: 312701 - DNA, 56 bp, Artificial
  Synthetic oligonucleotide
accggatggcccgcgcccctgcttttatgtggtccccatcacgtgggttccacaca

SEQ ID NO: 312702 - DNA, 58 bp, Artificial
  Synthetic oligonucleotide
accggatggccgcaaatttttggtgtcctccttattggacgctgacaggcccatctca

SEQ ID NO: 312703 - DNA, 51 bp, Artificial
  Synthetic oligonucleotide
accggatggccgcccgaaatttcgtggtgggcccccccttgtcgaccaata

SEQ ID NO: 312704 - DNA, 51 bp, Artificial
  Synthetic oligonucleotide
accggatggccgcccgaaatttcgtggtggtcccccccatgtcggccgtgg

SEQ ID NO: 312705 - DNA, 53 bp, Artificial
  Synthetic oligonucleotide
accggatggccgcccgaaatttcgtggtggtcccccctctgtcggccaatgaa

SEQ ID NO: 312706 - DNA, 51 bp, Artificial
  Synthetic oligonucleotide
accggatggccgcccgatttttggtgtcctcccctttagcccacggcccag

SEQ ID NO: 312707 - DNA, 56 bp, Artificial
  Synthetic oligonucleotide
accggatggccgcccgcccgccacgtgtcttaatcctggcgctccgtggagtctta

SEQ ID NO: 312708 - DNA, 56 bp, Artificial
  Synthetic oligonucleotide
accggatggccgcccgctattttacagccgtacacgtgtcccagatgtacgcttta

SEQ ID NO: 312709 - DNA, 54 bp, Artificial
  Synthetic oligonucleotide
accggatggccgccgattttttaaagtgggccccctactgcagaagatctagac

SEQ ID NO: 312710 - DNA, 54 bp, Artificial
  Synthetic oligonucleotide
accggatggccgccgattttttaaagtgggccccctatgttggctgatctagac

SEQ ID NO: 312711 - DNA, 50 bp, Artificial
  Synthetic oligonucleotide
accggatggccgccgatttttttaaagtgggcccccaaaaaaatgatcta

SEQ ID NO: 312712 - DNA, 56 bp, Artificial
  Synthetic oligonucleotide
accggatggccgccgatttttttaatgagccctcctgtcggttgatcctgaccatc

SEQ ID NO: 312713 - DNA, 53 bp, Artificial
  Synthetic oligonucleotide
accggatggccgccgatttttttgtggcccctccttgtcggctaatcctgacc

SEQ ID NO: 312714 - DNA, 57 bp, Artificial
  Synthetic oligonucleotide
accggatggccgccgattttttttgtggcccctctctgtcggctgatcctgagcgtc

SEQ ID NO: 312715 - DNA, 56 bp, Artificial
  Synthetic oligonucleotide
accggatggccgccggatcccatttgtgcggaccccacaaagtctccaaatggcat

SEQ ID NO: 312716 - DNA, 52 bp, Artificial
  Synthetic oligonucleotide
accggatggccgcgaaaaattttgggtggggccccgaccaatcaaattgcgc

SEQ ID NO: 312717 - DNA, 52 bp, Artificial
  Synthetic oligonucleotide
accggatggccgcgaaattttttaaagtgggcccttgtgtcggccactagaa

SEQ ID NO: 312718 - DNA, 54 bp, Artificial
  Synthetic oligonucleotide
accggatggccgcgaaatttttttgtggtgggccctcgaccaatagaatcgcgc

SEQ ID NO: 312719 - DNA, 55 bp, Artificial
  Synthetic oligonucleotide
accggatggccgcgaattttctaagtgggtcctacgcactaatgttggtcggcca

SEQ ID NO: 312720 - DNA, 55 bp, Artificial
  Synthetic oligonucleotide
accggatggccgcgaattttttgtggcccccgcaacgcatttacatgtggaccaa

SEQ ID NO: 312721 - DNA, 52 bp, Artificial
  Synthetic oligonucleotide
accggatggccgcgattttggaaaaagtgggccccgccactaacaaatgtcc

SEQ ID NO: 312722 - DNA, 55 bp, Artificial
  Synthetic oligonucleotide
accggatggccgcgattttttaggtgggccctctccactaacctctgtctgccaa

SEQ ID NO: 312723 - DNA, 52 bp, Artificial
  Synthetic oligonucleotide
accggatggccgcgattttttcggagtccctcggcccaggcccaaacgcaaa

SEQ ID NO: 312724 - DNA, 57 bp, Artificial
  Synthetic oligonucleotide
accggatggccgcgattttttcggagtcctgccagcctgtcatccactaagttggga

SEQ ID NO: 312725 - DNA, 54 bp, Artificial
  Synthetic oligonucleotide
accggatggccgcgattttttggagtcctggcgctggggaccatcccccgctcc

SEQ ID NO: 312726 - DNA, 54 bp, Artificial
  Synthetic oligonucleotide
accggatggccgcgattttttggagtctttaggggaccactcacaatagagggc

SEQ ID NO: 312727 - DNA, 55 bp, Artificial
  Synthetic oligonucleotide
accggatggccgcgattttttggtgtcctctattccaggcccaggcccaaacgca

SEQ ID NO: 312728 - DNA, 54 bp, Artificial
  Synthetic oligonucleotide
accggatggccgcgatttttttaccatggtcccaccacacgcactaacggacat

SEQ ID NO: 312729 - DNA, 51 bp, Artificial
  Synthetic oligonucleotide
accggatggccgcgatttttttcccttacacgctccaaagcaaaagtaaag

SEQ ID NO: 312730 - DNA, 56 bp, Artificial
  Synthetic oligonucleotide
accggatggccgcgatttttttgaaagtggtcccaccacgcacagatgtcaccgct

SEQ ID NO: 312731 - DNA, 50 bp, Artificial
  Synthetic oligonucleotide
accggatggccgcgatttttttggagtcctgcgtgggaccacgcaataaa

SEQ ID NO: 312732 - DNA, 51 bp, Artificial
  Synthetic oligonucleotide
accggatggccgcgatttttttggtgtccccgttctcggcccaggcccaac

SEQ ID NO: 312733 - DNA, 51 bp, Artificial
  Synthetic oligonucleotide
accggatggccgcgattttttttaaacaggtcccccccactcagtaatgtc

SEQ ID NO: 312734 - DNA, 56 bp, Artificial
  Synthetic oligonucleotide
accggatggccgcgattttttttaaagtgggccccttgatgtgatatgtcatctaa

SEQ ID NO: 312735 - DNA, 55 bp, Artificial
  Synthetic oligonucleotide
accggatggccgcgattttttttaaagtggtccccgcatgcgctcctgcccaatc

SEQ ID NO: 312736 - DNA, 53 bp, Artificial
  Synthetic oligonucleotide
accggatggccgcgattttttttaaagtggtcccctctggcacgtgtgtccaa

SEQ ID NO: 312737 - DNA, 53 bp, Artificial
  Synthetic oligonucleotide
accggatggccgcgattttttttacatggtccccaccactaacaaatgtcctc

SEQ ID NO: 312738 - DNA, 53 bp, Artificial
  Synthetic oligonucleotide
accggatggccgcgattttttttatgtggtccccaccacaaagaaatgtcctc

SEQ ID NO: 312739 - DNA, 52 bp, Artificial
  Synthetic oligonucleotide
accggatggccgcgattttttttatgtggtccccccactcttatttgtcggc

SEQ ID NO: 312740 - DNA, 53 bp, Artificial
  Synthetic oligonucleotide
accggatggccgcgattttttttcaagtggtccccccacgtgcgctggaccaa

SEQ ID NO: 312741 - DNA, 51 bp, Artificial
  Synthetic oligonucleotide
accggatggccgcgattttttttggacctggcccactaagggaaatagcgt

SEQ ID NO: 312742 - DNA, 53 bp, Artificial
  Synthetic oligonucleotide
accggatggccgcgattttttttggtggtcctcttccacgaactttcgtctgc

SEQ ID NO: 312743 - DNA, 53 bp, Artificial
  Synthetic oligonucleotide
accggatggccgcgattttttttgtaggcggccccaccacgcactcctgtccc

SEQ ID NO: 312744 - DNA, 54 bp, Artificial
  Synthetic oligonucleotide
accggatggccgcgatttttttttatagtggtcccaccacgcacagctgtcccc

SEQ ID NO: 312745 - DNA, 54 bp, Artificial
  Synthetic oligonucleotide
accggatggccgcgatttttttttccgtgggccccacaacgcacgtgctgacaa

SEQ ID NO: 312746 - DNA, 49 bp, Artificial
  Synthetic oligonucleotide
accggatggccgcgattttttttttgagccccatacccccctaacttac

SEQ ID NO: 312747 - DNA, 53 bp, Artificial
  Synthetic oligonucleotide
accggatggccgcgcaaaatttcgtggtggtcccccctgtcggccaatagagt

SEQ ID NO: 312748 - DNA, 51 bp, Artificial
  Synthetic oligonucleotide
accggatggccgcgcaaatttttaaagtggtcccccccactaacttatgtc

SEQ ID NO: 312749 - DNA, 50 bp, Artificial
  Synthetic oligonucleotide
accggatggccgcgcaaatttttcccccctttcactttagtggtccccac

SEQ ID NO: 312750 - DNA, 60 bp, Artificial
  Synthetic oligonucleotide
accggatggccgcgccccacatgggtcccacacacgtcgctatcatccaatcaaattgat

SEQ ID NO: 312751 - DNA, 51 bp, Artificial
  Synthetic oligonucleotide
accggatggccgcgcccccccccttttatacgcgcgcctctttagtcgtat

SEQ ID NO: 312752 - DNA, 53 bp, Artificial
  Synthetic oligonucleotide
accggatggccgcgccccccgctctgtggtggacccccccccacgtggagatg

SEQ ID NO: 312753 - DNA, 51 bp, Artificial
  Synthetic oligonucleotide
accggatggccgcgccccgcccccccactttccgtacacacccacgtgacg

SEQ ID NO: 312754 - DNA, 56 bp, Artificial
  Synthetic oligonucleotide
accggatggccgcgccccggaaaagaagtgggccccacatttgataatgatgtgcc

SEQ ID NO: 312755 - DNA, 55 bp, Artificial
  Synthetic oligonucleotide
accggatggccgcgcccctctttttagtgggtcccactcacgtcgctatcaacca

SEQ ID NO: 312756 - DNA, 54 bp, Artificial
  Synthetic oligonucleotide
accggatggccgcgcccctgaaaaagaagtggtccccgccactatactatgtcg

SEQ ID NO: 312757 - DNA, 53 bp, Artificial
  Synthetic oligonucleotide
accggatggccgcgcccgaaaaagaaggtggaccccacggatggccacgccca

SEQ ID NO: 312758 - DNA, 57 bp, Artificial
  Synthetic oligonucleotide
accggatggccgcgcccgaaaaagcaagttgaccccaccagatggccgcactcgtga

SEQ ID NO: 312759 - DNA, 54 bp, Artificial
  Synthetic oligonucleotide
accggatggccgcgcccgaaaaagcagggtgaccccacaatggcccccacgcac

SEQ ID NO: 312760 - DNA, 54 bp, Artificial
  Synthetic oligonucleotide
accggatggccgcgcccgaaaaagcaggtggaccccacaatatgaccgcgtccg

SEQ ID NO: 312761 - DNA, 55 bp, Artificial
  Synthetic oligonucleotide
accggatggccgcgcccgaaaaagcaggtggaccccataatggttgtgcccgtga

SEQ ID NO: 312762 - DNA, 54 bp, Artificial
  Synthetic oligonucleotide
accggatggccgcgcccgaaaaagcatgtggaccccacgggattggccgcgccc

SEQ ID NO: 312763 - DNA, 54 bp, Artificial
  Synthetic oligonucleotide
accggatggccgcgcccgaaaaagtaggtggaccccacatgttggacgcgcctg

SEQ ID NO: 312764 - DNA, 52 bp, Artificial
  Synthetic oligonucleotide
accggatggccgcgcccttccttttgttgtccctacttggttcctatagacg

SEQ ID NO: 312765 - DNA, 58 bp, Artificial
  Synthetic oligonucleotide
accggatggccgcgcctttctgtcactatcatggtcccctccactaaatcatttccac

SEQ ID NO: 312766 - DNA, 60 bp, Artificial
  Synthetic oligonucleotide
accggatggccgcgcctttctgtcactgtcacggtccccaccactaaatcatgtctgcca

SEQ ID NO: 312767 - DNA, 53 bp, Artificial
  Synthetic oligonucleotide
accggatggccgcgccttttccttttatgtggtccccacgagggttacacaga

SEQ ID NO: 312768 - DNA, 51 bp, Artificial
  Synthetic oligonucleotide
accggatggccgcgcctttttgacccggcccaattctggaaatttcgttgg

SEQ ID NO: 312769 - DNA, 55 bp, Artificial
  Synthetic oligonucleotide
accggatggccgcgcgaattttttgtgggcccctccactaactcctgtctgccaa

SEQ ID NO: 312770 - DNA, 51 bp, Artificial
  Synthetic oligonucleotide
accggatggccgcgcgatcaaaaagtggcccccctctccgtaaatcgcggc

SEQ ID NO: 312771 - DNA, 53 bp, Artificial
  Synthetic oligonucleotide
accggatggccgcgcgattttccccccaaaacgtggcgctctggtgaccgccc

SEQ ID NO: 312772 - DNA, 54 bp, Artificial
  Synthetic oligonucleotide
accggatggccgcgcgattttccccccccctacgtggcgcgctggtgtgcgttg

SEQ ID NO: 312773 - DNA, 60 bp, Artificial
  Synthetic oligonucleotide
accggatggccgcgcgattttcccccctcgcgcgaaagctatctacgtgcgcgcagctca

SEQ ID NO: 312774 - DNA, 50 bp, Artificial
  Synthetic oligonucleotide
accggatggccgcgcgattttcctccccctctacgtggcgctctggtgac

SEQ ID NO: 312775 - DNA, 53 bp, Artificial
  Synthetic oligonucleotide
accggatggccgcgcgattttctccccccccctacgtggcgctctggtgtccg

SEQ ID NO: 312776 - DNA, 51 bp, Artificial
  Synthetic oligonucleotide
accggatggccgcgcgatttttaaaagtggtcccccccacgattttatgtc

SEQ ID NO: 312777 - DNA, 54 bp, Artificial
  Synthetic oligonucleotide
accggatggccgcgcgatttttccgccctttgctttccacgcgcgctccgcttt

SEQ ID NO: 312778 - DNA, 56 bp, Artificial
  Synthetic oligonucleotide
accggatggccgcgcgatttttcttaactgctacgtggcgaaatcgtgtacgttgc

SEQ ID NO: 312779 - DNA, 50 bp, Artificial
  Synthetic oligonucleotide
accggatggccgcgcgattttttacccgacccggcccattaaaaaatata

SEQ ID NO: 312780 - DNA, 51 bp, Artificial
  Synthetic oligonucleotide
accggatggccgcgcgattttttacccgacccgggcccattaatgaaatat

SEQ ID NO: 312781 - DNA, 52 bp, Artificial
  Synthetic oligonucleotide
accggatggccgcgcgattttttagggtggacccccgcctgcgcttttgtcc

SEQ ID NO: 312782 - DNA, 53 bp, Artificial
  Synthetic oligonucleotide
accggatggccgcgcgattttttagggtggtccccgcacgcgcttttgtcttc

SEQ ID NO: 312783 - DNA, 54 bp, Artificial
  Synthetic oligonucleotide
accggatggccgcgcgattttttatgggccccccactaactactgtctgccaat

SEQ ID NO: 312784 - DNA, 54 bp, Artificial
  Synthetic oligonucleotide
accggatggccgcgcgattttttgccccccttcgcgcgattttactctcttgcc

SEQ ID NO: 312785 - DNA, 52 bp, Artificial
  Synthetic oligonucleotide
accggatggccgcgcgattttttgtactgggctttttactaaggcccaacta

SEQ ID NO: 312786 - DNA, 54 bp, Artificial
  Synthetic oligonucleotide
accggatggccgcgcgatttttttaaagtggtccccatgtgcgcgttcgtccaa

SEQ ID NO: 312787 - DNA, 51 bp, Artificial
  Synthetic oligonucleotide
accggatggccgcgcgatttttttaaagtggtccccggggacaggtgtatc

SEQ ID NO: 312788 - DNA, 57 bp, Artificial
  Synthetic oligonucleotide
accggatggccgcgcgatttttttaagtggtgggtccagaacgcacgacgatgcaga

SEQ ID NO: 312789 - DNA, 54 bp, Artificial
  Synthetic oligonucleotide
accggatggccgcgcgatttttttaatgggccccaccactaactgacaaagaca

SEQ ID NO: 312790 - DNA, 58 bp, Artificial
  Synthetic oligonucleotide
accggatggccgcgcgatttttttatggtggaccccatgtgaatataattgagcgcat

SEQ ID NO: 312791 - DNA, 52 bp, Artificial
  Synthetic oligonucleotide
accggatggccgcgcgatttttttcccccccacgtggacgctcgcgattttc

SEQ ID NO: 312792 - DNA, 57 bp, Artificial
  Synthetic oligonucleotide
accggatggccgcgcgatttttttgcactgggctttctactgaggcccatctaggat

SEQ ID NO: 312793 - DNA, 56 bp, Artificial
  Synthetic oligonucleotide
accggatggccgcgcgattttttttaatccgtacagtccaatactctcacatccaa

SEQ ID NO: 312794 - DNA, 54 bp, Artificial
  Synthetic oligonucleotide
accggatggccgcgcgattttttttagtggtccccctttgaatggccaatcaga

SEQ ID NO: 312795 - DNA, 54 bp, Artificial
  Synthetic oligonucleotide
accggatggccgcgcgattttttttggtggtcccctctatccttcgtccaatca

SEQ ID NO: 312796 - DNA, 58 bp, Artificial
  Synthetic oligonucleotide
accggatggccgcgcgattttttttggtggtccctctaccaatcagatgacgcgctca

SEQ ID NO: 312797 - DNA, 54 bp, Artificial
  Synthetic oligonucleotide
accggatggccgcgcgattttttttttgtgggcccccgatttatgagattgctc

SEQ ID NO: 312798 - DNA, 57 bp, Artificial
  Synthetic oligonucleotide
accggatggccgcgcttcggtgtccttcaaatcccctgacgtggcgttctgtcgcgc

SEQ ID NO: 312799 - DNA, 54 bp, Artificial
  Synthetic oligonucleotide
accggatggccgcgctttggggtacccccccgcgcgctctcattggtgccgtac

SEQ ID NO: 312800 - DNA, 53 bp, Artificial
  Synthetic oligonucleotide
accggatggccgcgctttggggtacgctcccccccctggtgacgcgcgctccc

SEQ ID NO: 312801 - DNA, 54 bp, Artificial
  Synthetic oligonucleotide
accggatggccgcgctttggtgaccccccccctgcccactcacgcgctctccct

SEQ ID NO: 312802 - DNA, 59 bp, Artificial
  Synthetic oligonucleotide
accggatggccgcgctttggtgcccgctccctctcacgcgcgctcccctggtgtggtgc

SEQ ID NO: 312803 - DNA, 56 bp, Artificial
  Synthetic oligonucleotide
accggatggccgcgctttggtggccccctggtgccctctcacgcgccctcctctgg

SEQ ID NO: 312804 - DNA, 52 bp, Artificial
  Synthetic oligonucleotide
accggatggccgcgctttggtgtccccccccccctcccgtggtggcgcactc

SEQ ID NO: 312805 - DNA, 51 bp, Artificial
  Synthetic oligonucleotide
accggatggccgcgctttttttgaccggcccaagtgcttttttgacccggc

SEQ ID NO: 312806 - DNA, 52 bp, Artificial
  Synthetic oligonucleotide
accggatggccgcgcttttttttttaggtgggccctcgaccaatgaaattca

SEQ ID NO: 312807 - DNA, 50 bp, Artificial
  Synthetic oligonucleotide
accggatggccgcggggttttttaagtgggtcctacgcactaatgttggt

SEQ ID NO: 312808 - DNA, 49 bp, Artificial
  Synthetic oligonucleotide
accggatggccgcggggtttttttaaggcccattcatttgggccgtttc

SEQ ID NO: 312809 - DNA, 57 bp, Artificial
  Synthetic oligonucleotide
accggatggccgcggttttttcgtgagggtcccgcagcgcactaaatgacaatgatg

SEQ ID NO: 312810 - DNA, 52 bp, Artificial
  Synthetic oligonucleotide
accggatggccgcgtcggtcccactacttttccgtactctctggtggtcccc

SEQ ID NO: 312811 - DNA, 55 bp, Artificial
  Synthetic oligonucleotide
accggatggccgctgatttagttttatgttcggcccgcgctagcggaagacttgg

SEQ ID NO: 312812 - DNA, 59 bp, Artificial
  Synthetic oligonucleotide
accggatggccgctttcttagtggtgggccctcgaccaatagaattgcgcgctcatcgc

SEQ ID NO: 312813 - DNA, 55 bp, Artificial
  Synthetic oligonucleotide
accggatggccgctttggtggacgcgtggacgttggcgaatgggtgggtccgaca

SEQ ID NO: 312814 - DNA, 53 bp, Artificial
  Synthetic oligonucleotide
accggatggccgtgatttttttcatgtggtccggacggccgcgatttttttca

SEQ ID NO: 312815 - DNA, 51 bp, Artificial
  Synthetic oligonucleotide
accggatggccgtgcccccaaaaaaaagtggtccccacgcactattttatg

SEQ ID NO: 312816 - DNA, 53 bp, Artificial
  Synthetic oligonucleotide
accggatgggcgcccgaaatttcgtattgggccccccttgtcggccaatgatg

SEQ ID NO: 312817 - DNA, 55 bp, Artificial
  Synthetic oligonucleotide
accggatttgtttttcataaaccgaatatatttccatactcagcatcatttacct

SEQ ID NO: 312818 - DNA, 55 bp, Artificial
  Synthetic oligonucleotide
accggcaaagacggtgagatccaatagcgactgctcgtcgaagggacagtacgct

SEQ ID NO: 312819 - DNA, 60 bp, Artificial
  Synthetic oligonucleotide
accggcaattacaagacaaacatcgcggataggatagagcagatctttgagactgccccc

SEQ ID NO: 312820 - DNA, 51 bp, Artificial
  Synthetic oligonucleotide
accggcagaacccccttcggttttcttagaacgcctaatggaggcctatag

SEQ ID NO: 312821 - DNA, 55 bp, Artificial
  Synthetic oligonucleotide
accggccacttggaaccctggaaccaccatgccgaaacaagcgcgcgagagccct

SEQ ID NO: 312822 - DNA, 59 bp, Artificial
  Synthetic oligonucleotide
accggccacttggagccacggagccatcgtctcgaaatggctgtaaggggctctgccgc

SEQ ID NO: 312823 - DNA, 59 bp, Artificial
  Synthetic oligonucleotide
accggccacttggagccacggagccccttgcagctatgcctccgcaaaagagggaagca

SEQ ID NO: 312824 - DNA, 52 bp, Artificial
  Synthetic oligonucleotide
accggccgatagttttgaagggcgggggtggcgactcctcgcacctattacg

SEQ ID NO: 312825 - DNA, 55 bp, Artificial
  Synthetic oligonucleotide
accggccgatggaatggtctccaaagggtggaggttgctggcgcctatcacggcg

SEQ ID NO: 312826 - DNA, 58 bp, Artificial
  Synthetic oligonucleotide
accggccgcaattagaaatacacgagtatggatactcaagctcctcgaaatggaggaa

SEQ ID NO: 312827 - DNA, 55 bp, Artificial
  Synthetic oligonucleotide
accggccgcttgggtcaagccgcatcacccggcctgtcatgtcgcttcagcaacg

SEQ ID NO: 312828 - DNA, 55 bp, Artificial
  Synthetic oligonucleotide
accggcggaggtacgagcgccgtgaggaccggtgtcagagaacctggttatcgac

SEQ ID NO: 312829 - DNA, 59 bp, Artificial
  Synthetic oligonucleotide
accggcggtgctgtgtcattacgactcgcgggggtaacgctatcaacacagttcactga

SEQ ID NO: 312830 - DNA, 56 bp, Artificial
  Synthetic oligonucleotide
accggcgtggcccaccttatcgcgagcactttagtgcgagcggttcagatttaaag

SEQ ID NO: 312831 - DNA, 57 bp, Artificial
  Synthetic oligonucleotide
accggcgtggccccaccttatcgcgagtgctttagcacgagcggtgcagatttaaag

SEQ ID NO: 312832 - DNA, 56 bp, Artificial
  Synthetic oligonucleotide
accggcgtggcccccccttatcgcgagtgctttagcacgagcggttcagattgaat

SEQ ID NO: 312833 - DNA, 60 bp, Artificial
  Synthetic oligonucleotide
accggctagctcagcgccaatacatgtagcatacttgcagcccggacagatatataagag

SEQ ID NO: 312834 - DNA, 50 bp, Artificial
  Synthetic oligonucleotide
accggctcatagagaaaactaatcaacaattcgagttgatagacaatgaa

SEQ ID NO: 312835 - DNA, 53 bp, Artificial
  Synthetic oligonucleotide
accggctccccccgagtcggggtgatagtgacgacgtgtgataggttgttacg

SEQ ID NO: 312836 - DNA, 55 bp, Artificial
  Synthetic oligonucleotide
accggctgagacaacgacgaggttgagggcctactacaacacaccaggcctcccc

SEQ ID NO: 312837 - DNA, 55 bp, Artificial
  Synthetic oligonucleotide
accggctgggattttgcccagcacactggggtcagtgattcaacgtttaccggac

SEQ ID NO: 312838 - DNA, 60 bp, Artificial
  Synthetic oligonucleotide
accggctttaacagcagcactaaggctgaaattgtatccagatatgttgataccagattg

SEQ ID NO: 312839 - DNA, 58 bp, Artificial
  Synthetic oligonucleotide
accgggaaagccgcgtacagagttgagcgcgtagctgacttgagtggagtgtttatcg

SEQ ID NO: 312840 - DNA, 55 bp, Artificial
  Synthetic oligonucleotide
accgggaaattgaacaggctaatagagaagacaaacacggagttcgaatccatag

SEQ ID NO: 312841 - DNA, 60 bp, Artificial
  Synthetic oligonucleotide
accgggacaggggcatgtcagctgtggtaattgatgcgctagaaatagccataaacccat

SEQ ID NO: 312842 - DNA, 55 bp, Artificial
  Synthetic oligonucleotide
accgggagtccccttcttctcatgccaacgtgggtacaagggcatctggcgggga

SEQ ID NO: 312843 - DNA, 48 bp, Artificial
  Synthetic oligonucleotide
accgggatggcccccggaaaaattggtccccaattataaaacgacacg

SEQ ID NO: 312844 - DNA, 51 bp, Artificial
  Synthetic oligonucleotide
accgggatggccgcgattttttggaggatagccctcttggcgaaccccccc

SEQ ID NO: 312845 - DNA, 60 bp, Artificial
  Synthetic oligonucleotide
accgggcaccactacgacggcctttgcgccctgtcgatcctctggatgatcgctagcacc

SEQ ID NO: 312846 - DNA, 53 bp, Artificial
  Synthetic oligonucleotide
accgggccgtcctttggggcctcaacgcttcagtacagcaaagtgtacgaacg

SEQ ID NO: 312847 - DNA, 57 bp, Artificial
  Synthetic oligonucleotide
accgggcgaattgtttctataccaccaccttttcactgctagatccttactatgatg

SEQ ID NO: 312848 - DNA, 50 bp, Artificial
  Synthetic oligonucleotide
accggggaaacgaagctccggtgctgccaagcgtgttcgtgtcagacgca

SEQ ID NO: 312849 - DNA, 53 bp, Artificial
  Synthetic oligonucleotide
accggggataagtgaggaatatatttctggccgttaggcgaaatgaattaggg

SEQ ID NO: 312850 - DNA, 53 bp, Artificial
  Synthetic oligonucleotide
accgggggaaatgtcggtcgcaccgtggacagctttactagactctttaatac

SEQ ID NO: 312851 - DNA, 57 bp, Artificial
  Synthetic oligonucleotide
accgggggcatcccagtgctgaatgcatattacaaggtgttcaaaagagcgtacaaa

SEQ ID NO: 312852 - DNA, 54 bp, Artificial
  Synthetic oligonucleotide
accgggggcgagcggattttttggtgctcaagtggatcccacgagagttgggga

SEQ ID NO: 312853 - DNA, 50 bp, Artificial
  Synthetic oligonucleotide
accgggggcgagcggggtttttggggtcgcagtgggtcccacttgaaaga

SEQ ID NO: 312854 - DNA, 54 bp, Artificial
  Synthetic oligonucleotide
accggggggacagctgcttggactacgtctacattcgttggtttcctcagtccg

SEQ ID NO: 312855 - DNA, 55 bp, Artificial
  Synthetic oligonucleotide
accgggggtccctttcatctcatgccaacgcggatacaggggagtctggcgggga

SEQ ID NO: 312856 - DNA, 57 bp, Artificial
  Synthetic oligonucleotide
accggggtcggcaatgacaacagatggaacggccaaatagtggggctgcaaccagta

SEQ ID NO: 312857 - DNA, 57 bp, Artificial
  Synthetic oligonucleotide
accgggtaatccttatgacgtcttcattaccgcagaggttgttgtgatactgtctaa

SEQ ID NO: 312858 - DNA, 52 bp, Artificial
  Synthetic oligonucleotide
accgggtaatctttataccacactccgtatacaagccacacaactgttaaca

SEQ ID NO: 312859 - DNA, 50 bp, Artificial
  Synthetic oligonucleotide
accgggtatgacgcatctcttagccccgcatggtttgaagctcttaaaat

SEQ ID NO: 312860 - DNA, 58 bp, Artificial
  Synthetic oligonucleotide
accgggtcaaccccaactgcgcagcaacttaatgatgttaggaagatctacttggcgc

SEQ ID NO: 312861 - DNA, 60 bp, Artificial
  Synthetic oligonucleotide
accgggtccacatccattccagatgacactcttgacagacattgtctgaaaacagagacc

SEQ ID NO: 312862 - DNA, 57 bp, Artificial
  Synthetic oligonucleotide
accgggtcctttatggccacgggtaagatgctcatagcttatacacctcctggcggc

SEQ ID NO: 312863 - DNA, 56 bp, Artificial
  Synthetic oligonucleotide
accgggtggccgcgaaatttttgcatacgtggaggcaggagaaccaagcaaaatca

SEQ ID NO: 312864 - DNA, 50 bp, Artificial
  Synthetic oligonucleotide
accgggtggccgcgctttttcgcttaaagtgggtcccgcggaaaataatg

SEQ ID NO: 312865 - DNA, 54 bp, Artificial
  Synthetic oligonucleotide
accggtacaggggggtacgtcatcatgtacaggggggtacgtcaccatgtacag

SEQ ID NO: 312866 - DNA, 49 bp, Artificial
  Synthetic oligonucleotide
accggtagcgagttgggggacgcgggggaaaggtgggccccaccttcta

SEQ ID NO: 312867 - DNA, 55 bp, Artificial
  Synthetic oligonucleotide
accggtagggatgctcacaccgcctttgtgagatctactcacgttggggtgtttt

SEQ ID NO: 312868 - DNA, 50 bp, Artificial
  Synthetic oligonucleotide
accggtagggatgtgtactgtcgtggactcgtctctgatgtaatatactt

SEQ ID NO: 312869 - DNA, 60 bp, Artificial
  Synthetic oligonucleotide
accggtagtgatgttggtgcatgaccatctaacagcgaaattggttggtagtatccgagc

SEQ ID NO: 312870 - DNA, 54 bp, Artificial
  Synthetic oligonucleotide
accggtatgtcacgccaggggagagaccgtcgggcatgtttgacacttctgtgc

SEQ ID NO: 312871 - DNA, 60 bp, Artificial
  Synthetic oligonucleotide
accggtccatcattgatgacattgtagacagtgagaaagagatgttgctctgcgatctca

SEQ ID NO: 312872 - DNA, 51 bp, Artificial
  Synthetic oligonucleotide
accggtcccctcttttatgaggcagccggagacgtgcgggtagcgatacgc

SEQ ID NO: 312873 - DNA, 50 bp, Artificial
  Synthetic oligonucleotide
accggtcctggcacaggtatgcgtgggatcggttccgccaagtgtgggac

SEQ ID NO: 312874 - DNA, 54 bp, Artificial
  Synthetic oligonucleotide
accggtccttcaaatgcgacggacttctttagtgagtataagtttgacgtgtat

SEQ ID NO: 312875 - DNA, 50 bp, Artificial
  Synthetic oligonucleotide
accggtcgatttataccctgggtttttgggtgtaattctgggagagggta

SEQ ID NO: 312876 - DNA, 55 bp, Artificial
  Synthetic oligonucleotide
accggtcggatggtgttctgtacaacactcgttggggcaatattccgtattctgt

SEQ ID NO: 312877 - DNA, 54 bp, Artificial
  Synthetic oligonucleotide
accggtcgttttgaaacggcactacctcgatggatagtttgtcctcggatactc

SEQ ID NO: 312878 - DNA, 60 bp, Artificial
  Synthetic oligonucleotide
accggtctcacagacagatggtaacaactaccaacccgctgatcaggcatgagaacagga

SEQ ID NO: 312879 - DNA, 55 bp, Artificial
  Synthetic oligonucleotide
accggtctttgtgacgacaaagtttctgacacattgtacgatatatggagcgtgg

SEQ ID NO: 312880 - DNA, 60 bp, Artificial
  Synthetic oligonucleotide
accggtgactattcagctataacgaatgcattacttcgggatactccaatcatattgaaa

SEQ ID NO: 312881 - DNA, 55 bp, Artificial
  Synthetic oligonucleotide
accggtgcccgccgcgcccccttttgtgggtcccacgagtaatgatggcattgct

SEQ ID NO: 312882 - DNA, 52 bp, Artificial
  Synthetic oligonucleotide
accggtgcccgccgcgccctttaaaagtgggccccacaagggaccacgcgca

SEQ ID NO: 312883 - DNA, 53 bp, Artificial
  Synthetic oligonucleotide
accggtgcccgccgcgccctttaaaagtgggccccactagaagcaatgcgtct

SEQ ID NO: 312884 - DNA, 51 bp, Artificial
  Synthetic oligonucleotide
accggtgcccgccgcgccctttaattgtgggccccacacgctttactttaa

SEQ ID NO: 312885 - DNA, 51 bp, Artificial
  Synthetic oligonucleotide
accggtgcccgccgcgcccttttaaagtgggccctacaatgggaccacgcg

SEQ ID NO: 312886 - DNA, 53 bp, Artificial
  Synthetic oligonucleotide
accggtgcccgccgcgcccttttatgtgggccctactaggggaacacgcgtca

SEQ ID NO: 312887 - DNA, 52 bp, Artificial
  Synthetic oligonucleotide
accggtgcccgcgcccgttttttgtgggccccacatgttcgctttaatcatt

SEQ ID NO: 312888 - DNA, 54 bp, Artificial
  Synthetic oligonucleotide
accggtgcccgcgccgcacttttattgtgggccccacgcgttactttaatcata

SEQ ID NO: 312889 - DNA, 54 bp, Artificial
  Synthetic oligonucleotide
accggtgcccgcgttcgttttatggtgggccccacacggcatctttaatcatta

SEQ ID NO: 312890 - DNA, 56 bp, Artificial
  Synthetic oligonucleotide
accggtgcccgttctaagtgatgaggtggttcttgaacgtatccaagatcttgtta

SEQ ID NO: 312891 - DNA, 57 bp, Artificial
  Synthetic oligonucleotide
accggtgcttccttagaccggttggcagggatgttcagcgctggtactctgccccca

SEQ ID NO: 312892 - DNA, 53 bp, Artificial
  Synthetic oligonucleotide
accggtggacaagactcgctctgtagaagccccggctggacagttcgtggacg

SEQ ID NO: 312893 - DNA, 52 bp, Artificial
  Synthetic oligonucleotide
accggtggaccgcgcgatttttttaaaatgggcccccccatgcgctgttgtc

SEQ ID NO: 312894 - DNA, 55 bp, Artificial
  Synthetic oligonucleotide
accggtggcacgctctcgctggatgtggcggcgtcctaagcaccgacgaaacaac

SEQ ID NO: 312895 - DNA, 55 bp, Artificial
  Synthetic oligonucleotide
accggtggcgagcagggtctggtgtccaaaagtgggtcccaccacacagaggaaa

SEQ ID NO: 312896 - DNA, 52 bp, Artificial
  Synthetic oligonucleotide
accggtggcgagcgatttttttggggttgcaggtgggtcccactttacagga

SEQ ID NO: 312897 - DNA, 58 bp, Artificial
  Synthetic oligonucleotide
accggtggcgagcggaattttttgcgtcgttgtgggtcccacctgatagatctgcaga

SEQ ID NO: 312898 - DNA, 52 bp, Artificial
  Synthetic oligonucleotide
accggtggcgagcggattttttggtgtccaagtgggacccacttgggaattg

SEQ ID NO: 312899 - DNA, 52 bp, Artificial
  Synthetic oligonucleotide
accggtggcgagcggggaatttgggttccaggtgggacccacgcctggaaca

SEQ ID NO: 312900 - DNA, 54 bp, Artificial
  Synthetic oligonucleotide
accggtggcgagcggggattttgctccgaaagtgggtcccactactcagaggaa

SEQ ID NO: 312901 - DNA, 54 bp, Artificial
  Synthetic oligonucleotide
accggtggcgagcggggcctttggtgttgatggtgggtcccacttatgaaattg

SEQ ID NO: 312902 - DNA, 54 bp, Artificial
  Synthetic oligonucleotide
accggtggcgagcggggtctttgccgttcagtgtggggtccacatataaaagaa

SEQ ID NO: 312903 - DNA, 55 bp, Artificial
  Synthetic oligonucleotide
accggtggcgagcggggtctttggagctgatggtgggtcccacatttgaaattgg

SEQ ID NO: 312904 - DNA, 54 bp, Artificial
  Synthetic oligonucleotide
accggtggcgagcggggttttttgcccaaatgtgggtcccacattggagatgaa

SEQ ID NO: 312905 - DNA, 55 bp, Artificial
  Synthetic oligonucleotide
accggtggcgagcggtgcctctggtgttcagttggtgggacccactttctgggga

SEQ ID NO: 312906 - DNA, 57 bp, Artificial
  Synthetic oligonucleotide
accggtggcgagctggagtcctggtgttttgtgggtcccgctgatggaattggacca

SEQ ID NO: 312907 - DNA, 60 bp, Artificial
  Synthetic oligonucleotide
accggtggcgagctggtgtcttggtgtgtctgtgggtcccactgatggatctggacttgg

SEQ ID NO: 312908 - DNA, 51 bp, Artificial
  Synthetic oligonucleotide
accggtggcgagctggttttttggcgaaaaggtgggccccagtaagtgaaa

SEQ ID NO: 312909 - DNA, 48 bp, Artificial
  Synthetic oligonucleotide
accggtggcgagttggggtacgagggggaaaggtgggccccacctttg

SEQ ID NO: 312910 - DNA, 50 bp, Artificial
  Synthetic oligonucleotide
accggtggcgatttggttccgcgggggaaaggtgggccccacctttctga

SEQ ID NO: 312911 - DNA, 48 bp, Artificial
  Synthetic oligonucleotide
accggtgggcgcgaaaaaaaaaagtggtccccgccccacgtgaaaatg

SEQ ID NO: 312912 - DNA, 55 bp, Artificial
  Synthetic oligonucleotide
accggtgtacttcactgctcgctcgtttctgctcgtttctccgaaacgtgcgggg

SEQ ID NO: 312913 - DNA, 55 bp, Artificial
  Synthetic oligonucleotide
accggtgtatgtaacgttgcctagaacctggcgcaccgttcgatatgaccaggct

SEQ ID NO: 312914 - DNA, 51 bp, Artificial
  Synthetic oligonucleotide
accggtgtgaataaccccccgactgaagcgtcagtcgttaaacggagacgg

SEQ ID NO: 312915 - DNA, 53 bp, Artificial
  Synthetic oligonucleotide
accggtgttagattctattagagaactatcagctcctttgaactccccttctg

SEQ ID NO: 312916 - DNA, 52 bp, Artificial
  Synthetic oligonucleotide
accggttaattctcgtaggccgaagttctacattctctgcgggggtccgtac

SEQ ID NO: 312917 - DNA, 51 bp, Artificial
  Synthetic oligonucleotide
accggttacaggcagataatcctggacatactctgcagcttgacaggtcca

SEQ ID NO: 312918 - DNA, 55 bp, Artificial
  Synthetic oligonucleotide
accggttcagaagatcaaacttaccggggcagaacacttaggtcgagcgagcgat

SEQ ID NO: 312919 - DNA, 45 bp, Artificial
  Synthetic oligonucleotide
accggttggccccgcccccctttaaagtggtccccgcgcactact

SEQ ID NO: 312920 - DNA, 50 bp, Artificial
  Synthetic oligonucleotide
accggttggccccgccccctttaaaatgtgggccccgcgcactggttggc

SEQ ID NO: 312921 - DNA, 52 bp, Artificial
  Synthetic oligonucleotide
accggttggccccgccccctttaatgtggtccccgcgcacatacgtatgtcg

SEQ ID NO: 312922 - DNA, 51 bp, Artificial
  Synthetic oligonucleotide
accggttggccccgcccctctttaaatgtggtccccgcgcacttatgggcc

SEQ ID NO: 312923 - DNA, 51 bp, Artificial
  Synthetic oligonucleotide
accggttggccccgccccttttgaaatgtgggccccgcgcacttgttcgcc

SEQ ID NO: 312924 - DNA, 53 bp, Artificial
  Synthetic oligonucleotide
accggttggccccgccccttttgatatatgggccccgcgcacttgttggtctc

SEQ ID NO: 312925 - DNA, 57 bp, Artificial
  Synthetic oligonucleotide
accggttggtgcgtctaccgcagaaagggtttgctaattcatgctccggacgagcaa

SEQ ID NO: 312926 - DNA, 50 bp, Artificial
  Synthetic oligonucleotide
accggttgtagacctattcttcgttggggtaccaaatcgctcagccgcag

SEQ ID NO: 312927 - DNA, 55 bp, Artificial
  Synthetic oligonucleotide
accggttgtggcattacccgtgcaccctaaattataccatcttcaaggtgcgcat

SEQ ID NO: 312928 - DNA, 56 bp, Artificial
  Synthetic oligonucleotide
accggtttggagaccgaattcgctgcgtcagcctacggattagcagaggattaagg

SEQ ID NO: 312929 - DNA, 51 bp, Artificial
  Synthetic oligonucleotide
accggttttaaataccgggagcggtcacaagagagtaggtacaacgaagga

SEQ ID NO: 312930 - DNA, 54 bp, Artificial
  Synthetic oligonucleotide
accggttttggttggtttcaatatgggtcattgtgtcgttaatagagatcgtac

SEQ ID NO: 312931 - DNA, 53 bp, Artificial
  Synthetic oligonucleotide
accgtaaacgctagctaaatccttgatagttgccaacccagagtactggtggg

SEQ ID NO: 312932 - DNA, 54 bp, Artificial
  Synthetic oligonucleotide
accgtaaaggctgttaataagaattttacggttcagctgatttgtattagcaag

SEQ ID NO: 312933 - DNA, 58 bp, Artificial
  Synthetic oligonucleotide
accgtaaatgtaagaggatctggaatgagaattcttataagaggcaattctcctgtgt

SEQ ID NO: 312934 - DNA, 55 bp, Artificial
  Synthetic oligonucleotide
accgtaaattatgacgaagaaatatgagtgtacatcattaaaagtgtgggtagtt

SEQ ID NO: 312935 - DNA, 54 bp, Artificial
  Synthetic oligonucleotide
accgtaaattcttcagtccctgtacaggtctccttgaaacctgcgagtggggca

SEQ ID NO: 312936 - DNA, 60 bp, Artificial
  Synthetic oligonucleotide
accgtaacaggcgctcggtgagtcaactctcgcctgactgcagtgacgagctacagctat

SEQ ID NO: 312937 - DNA, 53 bp, Artificial
  Synthetic oligonucleotide
accgtaacatacgaaccccagtgaaattacgtagaggtaatttcggatataga

SEQ ID NO: 312938 - DNA, 59 bp, Artificial
  Synthetic oligonucleotide
accgtaatactttgcgctcccactgcccatagtccacatgggagaagtccacatcgtta

SEQ ID NO: 312939 - DNA, 52 bp, Artificial
  Synthetic oligonucleotide
accgtaattatcgtactccttcaaaattgcgtaacagtaattttggaactaa

SEQ ID NO: 312940 - DNA, 60 bp, Artificial
  Synthetic oligonucleotide
accgtacaaacaccataggtaatgactacattcctacatgtgactgcacagaagctactt

SEQ ID NO: 312941 - DNA, 54 bp, Artificial
  Synthetic oligonucleotide
accgtacaaccattttagtggagccccttttctatacagggctagctgaaagtc

SEQ ID NO: 312942 - DNA, 57 bp, Artificial
  Synthetic oligonucleotide
accgtacactgtatcctgttcccgagtattctgcaagcgtcaaccaagtcttttcta

SEQ ID NO: 312943 - DNA, 55 bp, Artificial
  Synthetic oligonucleotide
accgtacagctaatagaaagtctaggggctaaccatcttctacttatcacccgag

SEQ ID NO: 312944 - DNA, 58 bp, Artificial
  Synthetic oligonucleotide
accgtacatggtcttaggtgtatgctagctgtcaaatacctgaaatacgttgaaagta

SEQ ID NO: 312945 - DNA, 58 bp, Artificial
  Synthetic oligonucleotide
accgtacccccttgtaggtgaatatgcgaccactctgcgtgcaccaagtgcccgagga

SEQ ID NO: 312946 - DNA, 52 bp, Artificial
  Synthetic oligonucleotide
accgtacgtcgttacgcggacagacaacacccgtcttttggccaagtttgac

SEQ ID NO: 312947 - DNA, 51 bp, Artificial
  Synthetic oligonucleotide
accgtagaacttagtgagccacagcctacggctggactcattggggaggta

SEQ ID NO: 312948 - DNA, 60 bp, Artificial
  Synthetic oligonucleotide
accgtagagcggcactagctattgagcgtccagaactacagaaggcacttactccgtctg

SEQ ID NO: 312949 - DNA, 55 bp, Artificial
  Synthetic oligonucleotide
accgtagggtcgccaaccagccgcctgctcgctggactaacgagaatgtgcccaa

SEQ ID NO: 312950 - DNA, 56 bp, Artificial
  Synthetic oligonucleotide
accgtaggtcgcgatctgatacgagaccttatactcgttatacgagctaaaaacta

SEQ ID NO: 312951 - DNA, 52 bp, Artificial
  Synthetic oligonucleotide
accgtagtagataaggacgaaagaacgaaggacctcgagtattttgatctta

SEQ ID NO: 312952 - DNA, 60 bp, Artificial
  Synthetic oligonucleotide
accgtagtgtcagatttgacacaacgcaagccttgaagctgcgtcaatgtcggaatgtcg

SEQ ID NO: 312953 - DNA, 56 bp, Artificial
  Synthetic oligonucleotide
accgtagttggtcccagtagtgtatggggtcaatagctcacgggtacgaatcaaca

SEQ ID NO: 312954 - DNA, 55 bp, Artificial
  Synthetic oligonucleotide
accgtatataagtttggtcgagaaacattaccggactccatgaggaatcggatgg

SEQ ID NO: 312955 - DNA, 55 bp, Artificial
  Synthetic oligonucleotide
accgtatatacaaggtttccagacagctcatgacttgggtgtagataacgataag

SEQ ID NO: 312956 - DNA, 55 bp, Artificial
  Synthetic oligonucleotide
accgtatcaagaagatgtaccgtcacgtcggatatatcttactatctgcgttcac

SEQ ID NO: 312957 - DNA, 60 bp, Artificial
  Synthetic oligonucleotide
accgtatctctcatgtggaccacatgaatgcagaatgtttgctctcagtcaaggtaccac

SEQ ID NO: 312958 - DNA, 53 bp, Artificial
  Synthetic oligonucleotide
accgtatctgatggtgattgcactgatgtcaccaagcgtacttttaactctgt

SEQ ID NO: 312959 - DNA, 60 bp, Artificial
  Synthetic oligonucleotide
accgtatggcacgcccatggattttggtcatgtgttcaacatgttcgacaacgagcccag

SEQ ID NO: 312960 - DNA, 52 bp, Artificial
  Synthetic oligonucleotide
accgtatttcggggccgttttacgagagtgtagttatattgtagcggagttg

SEQ ID NO: 312961 - DNA, 50 bp, Artificial
  Synthetic oligonucleotide
accgtcaatcaggaaggtaatgtacgcgtgacgtttagtgagcgatacga

SEQ ID NO: 312962 - DNA, 58 bp, Artificial
  Synthetic oligonucleotide
accgtcaatgtggttgggtcctccatgggctctggtggagtgttcaccatcgacggga

SEQ ID NO: 312963 - DNA, 51 bp, Artificial
  Synthetic oligonucleotide
accgtcacgtacgatgtgacaaacaatcagttaggtttgcggtacatgatg

SEQ ID NO: 312964 - DNA, 55 bp, Artificial
  Synthetic oligonucleotide
accgtcagagttcgcagctaccccgatgctgtgacccttgcctaaggtatgctcc

SEQ ID NO: 312965 - DNA, 60 bp, Artificial
  Synthetic oligonucleotide
accgtcaggtggggtctgtgacctcatcaatacatatgcccgagggtctgatgagggcaa

SEQ ID NO: 312966 - DNA, 55 bp, Artificial
  Synthetic oligonucleotide
accgtcatctctacagcccctacgaaacgtttggagaaaacacctcgagtgcgta

SEQ ID NO: 312967 - DNA, 53 bp, Artificial
  Synthetic oligonucleotide
accgtcatgttctatttagtccgggatagaagaccgtttggtactccccaaga

SEQ ID NO: 312968 - DNA, 56 bp, Artificial
  Synthetic oligonucleotide
accgtccaaatgcaatcgaggcgctttaaaacactttttctcgcaacaatagttga

SEQ ID NO: 312969 - DNA, 60 bp, Artificial
  Synthetic oligonucleotide
accgtccagatatacacgccattctctgattgagctgcagtgagtagttcccctgtgcgt

SEQ ID NO: 312970 - DNA, 55 bp, Artificial
  Synthetic oligonucleotide
accgtccccgtacgtaaaatgctgtggtacagctgaatgtaaggccaagaaccta

SEQ ID NO: 312971 - DNA, 51 bp, Artificial
  Synthetic oligonucleotide
accgtcccggaagcgttaattgggacttgttgtctgtactctattacacag

SEQ ID NO: 312972 - DNA, 57 bp, Artificial
  Synthetic oligonucleotide
accgtccctcaaagtgttagggaggcattcaacaatctagacagtaccacttcacta

SEQ ID NO: 312973 - DNA, 58 bp, Artificial
  Synthetic oligonucleotide
accgtccgacgtccgtagcgcccgccgatcctcgagaggacaccgccgcatgagcttc

SEQ ID NO: 312974 - DNA, 54 bp, Artificial
  Synthetic oligonucleotide
accgtcctcatagaggagggtgctgaacttctacaaaagtttggcacaagcccc

SEQ ID NO: 312975 - DNA, 58 bp, Artificial
  Synthetic oligonucleotide
accgtcgaactcagaagagagcgatcaagaagtcctccaagaaacgcaagtactccga

SEQ ID NO: 312976 - DNA, 52 bp, Artificial
  Synthetic oligonucleotide
accgtcgacgatgaagtatgctcatttgtcatggcttgtcttaaaaccacag

SEQ ID NO: 312977 - DNA, 50 bp, Artificial
  Synthetic oligonucleotide
accgtcgatctggattggccgttgacggtgggcggtgggcgtgtagcggc

SEQ ID NO: 312978 - DNA, 53 bp, Artificial
  Synthetic oligonucleotide
accgtcgcagtacccgtacccactcgctgtagtcgggtcgtatcgcggggacg

SEQ ID NO: 312979 - DNA, 50 bp, Artificial
  Synthetic oligonucleotide
accgtcgccttagatacggtttgaaaagagggccttctacggaaggagtg

SEQ ID NO: 312980 - DNA, 55 bp, Artificial
  Synthetic oligonucleotide
accgtcgcgattgaatgggaacttgaacactttactactcaccgctggaacatga

SEQ ID NO: 312981 - DNA, 55 bp, Artificial
  Synthetic oligonucleotide
accgtcgtatcgatcggtatttggtgcagacccctgatggttttctggaagcccc

SEQ ID NO: 312982 - DNA, 57 bp, Artificial
  Synthetic oligonucleotide
accgtctaagcctacaggtaacacaccgcaagacggagacccaccaagcccgcatga

SEQ ID NO: 312983 - DNA, 60 bp, Artificial
  Synthetic oligonucleotide
accgtctaatgacgattatcaaactccaatcatgaattcagttacagtgcgacaagatct

SEQ ID NO: 312984 - DNA, 59 bp, Artificial
  Synthetic oligonucleotide
accgtctagctcctctccaaggaggccgctcgatgaggcggacatcctccgaggggatc

SEQ ID NO: 312985 - DNA, 55 bp, Artificial
  Synthetic oligonucleotide
accgtctagggttaggtggattgctttcacagatttccttactggtctaggaatc

SEQ ID NO: 312986 - DNA, 50 bp, Artificial
  Synthetic oligonucleotide
accgtctcgagagtgctctggccttcgtccgtcgtcgctgacaagacccc

SEQ ID NO: 312987 - DNA, 60 bp, Artificial
  Synthetic oligonucleotide
accgtctggaggactgaggaatacaaagaaaggacaagagcattcaaagagatcactgac

SEQ ID NO: 312988 - DNA, 57 bp, Artificial
  Synthetic oligonucleotide
accgtctgtcgcgttgcatcgtagaccagggaccgacgcacttcctcgtacttgtgg

SEQ ID NO: 312989 - DNA, 55 bp, Artificial
  Synthetic oligonucleotide
accgtcttggtctgggatgactgaataataaccagtcatccctactcggtctaaa

SEQ ID NO: 312990 - DNA, 60 bp, Artificial
  Synthetic oligonucleotide
accgtctttggtccattctgcaccgtaaacagtccacacatcacgctcatagataatcac

SEQ ID NO: 312991 - DNA, 51 bp, Artificial
  Synthetic oligonucleotide
accgtgaacctaggagtagtatgcgcaggttggagtggtatagtcgttagg

SEQ ID NO: 312992 - DNA, 57 bp, Artificial
  Synthetic oligonucleotide
accgtgaagttcgcggatagtaaggacctgggtagttatgagatgcttgtgcgggac

SEQ ID NO: 312993 - DNA, 60 bp, Artificial
  Synthetic oligonucleotide
accgtgacacaactcgtcaagttcgcgcatgaatcactagaatccgagatgcaacactac

SEQ ID NO: 312994 - DNA, 60 bp, Artificial
  Synthetic oligonucleotide
accgtgacacactcagtggagctcctagaaaaccagaaggagaatagattctgcagagtc

SEQ ID NO: 312995 - DNA, 56 bp, Artificial
  Synthetic oligonucleotide
accgtgaccacccaacggctatccgcaccttctcatacaaggtggggtatggccca

SEQ ID NO: 312996 - DNA, 55 bp, Artificial
  Synthetic oligonucleotide
accgtgatcaacgtctgtgcatggacgactaccgtgctcgctgctacgctgaccg

SEQ ID NO: 312997 - DNA, 60 bp, Artificial
  Synthetic oligonucleotide
accgtgatgacgcctccactctcctcgccacccccatgattaataatgccatacgatcat

SEQ ID NO: 312998 - DNA, 55 bp, Artificial
  Synthetic oligonucleotide
accgtgcagcagccaaaaatttttccgtacactttaatttgaattgcgcggcaat

SEQ ID NO: 312999 - DNA, 60 bp, Artificial
  Synthetic oligonucleotide
accgtgcagcagcccccgcttttgccgtacgctatagccgttgcgattatgcaacgtggc

SEQ ID NO: 313000 - DNA, 60 bp, Artificial
  Synthetic oligonucleotide
accgtgcagtgatcacatacgagggggattctagtgcaggatataatcatgatgtgtcca

SEQ ID NO: 313001 - DNA, 57 bp, Artificial
  Synthetic oligonucleotide
accgtgcctctgcccccattgtccgcgtcacaaagggtcaggtatggaccaacagac

SEQ ID NO: 313002 - DNA, 53 bp, Artificial
  Synthetic oligonucleotide
accgtgcggatctgtcgcctttgctcctttccaccacgcagtggcaagtactt

SEQ ID NO: 313003 - DNA, 52 bp, Artificial
  Synthetic oligonucleotide
accgtgctgattactgatcacgtggaagcacataaatatgtccacatgaact

SEQ ID NO: 313004 - DNA, 55 bp, Artificial
  Synthetic oligonucleotide
accgtgcttagctctacgtagcccgcgcggttataagcacgacacgtgagagttg

SEQ ID NO: 313005 - DNA, 55 bp, Artificial
  Synthetic oligonucleotide
accgtggaaagatattctgacgacaggtgccattttcccagcaataaaggtctgc

SEQ ID NO: 313006 - DNA, 58 bp, Artificial
  Synthetic oligonucleotide
accgtggataagccaaacccactaccgctttgtacatgaagatgtgtacactagcgcg

SEQ ID NO: 313007 - DNA, 59 bp, Artificial
  Synthetic oligonucleotide
accgtggcaggttcatgtgcgtattcaagatgtaaagatagaagcaggttggcaaccgt

SEQ ID NO: 313008 - DNA, 57 bp, Artificial
  Synthetic oligonucleotide
accgtggcgaccggtgtcaaaagtgggacccaccatgacatatgatgacgtagcctt

SEQ ID NO: 313009 - DNA, 54 bp, Artificial
  Synthetic oligonucleotide
accgtggcgaccggtgtcaaaagtgggtcccaccatgacatatgatgacgtagc

SEQ ID NO: 313010 - DNA, 55 bp, Artificial
  Synthetic oligonucleotide
accgtggcgaccggtgtcgaaagtgggacccaccactctggtcaatgttgactat

SEQ ID NO: 313011 - DNA, 54 bp, Artificial
  Synthetic oligonucleotide
accgtggcgaccggtgttgaaagtgggacccaccactttggtcaatgaagaaga

SEQ ID NO: 313012 - DNA, 49 bp, Artificial
  Synthetic oligonucleotide
accgtgggaaagctttggttagggatttctcggaaaaggaggtcccaac

SEQ ID NO: 313013 - DNA, 50 bp, Artificial
  Synthetic oligonucleotide
accgtgggccgcgcaaattttttttttatattgggcctaatggaccttta

SEQ ID NO: 313014 - DNA, 57 bp, Artificial
  Synthetic oligonucleotide
accgtgggcgagcgaaaaatttgccgtccgaagtgggtcccacaagctgctgtgaca

SEQ ID NO: 313015 - DNA, 53 bp, Artificial
  Synthetic oligonucleotide
accgtgggcgagcgaaattttggccgtccgaggtgggtcccacttgtgaattg

SEQ ID NO: 313016 - DNA, 51 bp, Artificial
  Synthetic oligonucleotide
accgtgggcgagcgaaattttggccgtccgttgtgggacccacagggggac

SEQ ID NO: 313017 - DNA, 57 bp, Artificial
  Synthetic oligonucleotide
accgtgggcgagcggaacctgagccgttgtgggacccacaaatgaatgaagttcatg

SEQ ID NO: 313018 - DNA, 58 bp, Artificial
  Synthetic oligonucleotide
accgtgggcgagcggagatcggtgctcaaaagtgggtcccgcatggtggtggactgaa

SEQ ID NO: 313019 - DNA, 60 bp, Artificial
  Synthetic oligonucleotide
accgtgggcgagcggagtccgatggctcttgatgggtcccactgcaagtcttgactggat

SEQ ID NO: 313020 - DNA, 59 bp, Artificial
  Synthetic oligonucleotide
accgtgggcgagcggagtctgagtcgttgtgggacccacttatgaatgaagattcatgg

SEQ ID NO: 313021 - DNA, 53 bp, Artificial
  Synthetic oligonucleotide
accgtgggcgagcgggactttggcgttcgaggtgggtcccacaatatccaaag

SEQ ID NO: 313022 - DNA, 50 bp, Artificial
  Synthetic oligonucleotide
accgtgggcgagcggggtctttggcgtccgaggtgggtcccactctatgc

SEQ ID NO: 313023 - DNA, 51 bp, Artificial
  Synthetic oligonucleotide
accgtgggcgagcggggtctttggcgtttttagtgggtcccataataacag

SEQ ID NO: 313024 - DNA, 60 bp, Artificial
  Synthetic oligonucleotide
accgtgggcgagcggtgaccgatggccgcgcagtgggtcccactgcttgtcttgactgga

SEQ ID NO: 313025 - DNA, 58 bp, Artificial
  Synthetic oligonucleotide
accgtgggcgagcggtgaccgatggctctgggtgggccccacagactaccttgactga

SEQ ID NO: 313026 - DNA, 58 bp, Artificial
  Synthetic oligonucleotide
accgtgggcgagcggtgaccgatggctcttggtgggtcccgccaggcacttgactgga

SEQ ID NO: 313027 - DNA, 54 bp, Artificial
  Synthetic oligonucleotide
accgtgggcgagcggtgaccggtggcttcctagtgggtcccactttgaaggaga

SEQ ID NO: 313028 - DNA, 57 bp, Artificial
  Synthetic oligonucleotide
accgtgggcgagcggtgcctctggtgaacgcagtgggccccacttcaaacatgtgac

SEQ ID NO: 313029 - DNA, 56 bp, Artificial
  Synthetic oligonucleotide
accgtgggcgagcggtgcctctggtgaacgcagtgggtcccagttcaacaggtaaa

SEQ ID NO: 313030 - DNA, 57 bp, Artificial
  Synthetic oligonucleotide
accgtgggcgagcggtgcctggactgaaattggtgggtcccagctattgggaatgga

SEQ ID NO: 313031 - DNA, 56 bp, Artificial
  Synthetic oligonucleotide
accgtgggcgagcggtgtccgacggcttcttggtgggtcccattgctggtattgac

SEQ ID NO: 313032 - DNA, 56 bp, Artificial
  Synthetic oligonucleotide
accgtgggcgagcggtgtttttgccgtctgtgtgggtcccatctatgtggtggact

SEQ ID NO: 313033 - DNA, 52 bp, Artificial
  Synthetic oligonucleotide
accgtgggcgagcggtttttttggcgttgaaagtgggtcccacaatatccaa

SEQ ID NO: 313034 - DNA, 52 bp, Artificial
  Synthetic oligonucleotide
accgtgggcgaggggggtctttggcgttccaagtgggccccacaatatccaa

SEQ ID NO: 313035 - DNA, 52 bp, Artificial
  Synthetic oligonucleotide
accgtggggatccctgatactccggttcagttaacactctctccggttccgt

SEQ ID NO: 313036 - DNA, 60 bp, Artificial
  Synthetic oligonucleotide
accgtgggtgtctttcaatcagaatctggagtatcaactaggatacatatgcagtgggat

SEQ ID NO: 313037 - DNA, 60 bp, Artificial
  Synthetic oligonucleotide
accgtggtcgtagtctcgttctcttgcaaggatattacccgtctgctctcaggcactcac

SEQ ID NO: 313038 - DNA, 55 bp, Artificial
  Synthetic oligonucleotide
accgtggtctctcttggtccgatagaaggtactacacgtctggtccctctggcgt

SEQ ID NO: 313039 - DNA, 55 bp, Artificial
  Synthetic oligonucleotide
accgtggtgtcaatgggcaggcgggccaagggcaaagaacgagaggtggaacgag

SEQ ID NO: 313040 - DNA, 60 bp, Artificial
  Synthetic oligonucleotide
accgtgtaaccctcctctctactctcatcaatcaaggaatgtcagtggagcgcgccacaa

SEQ ID NO: 313041 - DNA, 59 bp, Artificial
  Synthetic oligonucleotide
accgtgtaaggtccagtcctttgaagcgaaacatgatatttcgcatgtcggcaaggtca

SEQ ID NO: 313042 - DNA, 56 bp, Artificial
  Synthetic oligonucleotide
accgtgtaggtagctggtaccgacgggcaaatactccgatgtataccagacggaga

SEQ ID NO: 313043 - DNA, 55 bp, Artificial
  Synthetic oligonucleotide
accgtgtcactcctctgacgcttgcctcccgcgtggctatggtttgcgctggtct

SEQ ID NO: 313044 - DNA, 55 bp, Artificial
  Synthetic oligonucleotide
accgtgtcaggccacgtaagtgccacttcgctgaggagtgcagcctgtacagccc

SEQ ID NO: 313045 - DNA, 55 bp, Artificial
  Synthetic oligonucleotide
accgtgtctcagcctgcgtggcggccagcccagcttatgctgggacgccttaagt

SEQ ID NO: 313046 - DNA, 57 bp, Artificial
  Synthetic oligonucleotide
accgtgtcttcgaatacctcgctctcattgggttctgcctctggcgtttccagaacc

SEQ ID NO: 313047 - DNA, 51 bp, Artificial
  Synthetic oligonucleotide
accgtgtgaacttagcgcggttattgccgtggggtccttctgtccaggcgc

SEQ ID NO: 313048 - DNA, 52 bp, Artificial
  Synthetic oligonucleotide
accgtgtgggggtgagatttaattggcgagaaccatgcggccgaaattaaaa

SEQ ID NO: 313049 - DNA, 59 bp, Artificial
  Synthetic oligonucleotide
accgtgttaacggctcgtaacataggcctgtgcagctccgacgtcatggagcggtcacg

SEQ ID NO: 313050 - DNA, 56 bp, Artificial
  Synthetic oligonucleotide
accgtgttcctaacaagttcgtttaattggcccattgacatcgtgatgttggactc

SEQ ID NO: 313051 - DNA, 57 bp, Artificial
  Synthetic oligonucleotide
accgtgttgttgcccccactgtccgcgtcaccagaagcaaaatatgggccaacagac

SEQ ID NO: 313052 - DNA, 60 bp, Artificial
  Synthetic oligonucleotide
accgttaaagagagggttgtcagcctgctagatcagatagcaaagctgcgacggcgcgga

SEQ ID NO: 313053 - DNA, 49 bp, Artificial
  Synthetic oligonucleotide
accgttaaggaagcgttacgaaaagcgggaagtacaaaaccaaccgtca

SEQ ID NO: 313054 - DNA, 57 bp, Artificial
  Synthetic oligonucleotide
accgttaaggtcggtagttctggaagtgcttgagtgactatgtcacgagcgtgcgct

SEQ ID NO: 313055 - DNA, 54 bp, Artificial
  Synthetic oligonucleotide
accgttaatccaggaccattcgcgcaaacaaattacgctccagttaattgggga

SEQ ID NO: 313056 - DNA, 55 bp, Artificial
  Synthetic oligonucleotide
accgttacatgaagttgcagggagttaagcgggtaaagattcaatctgatgaccc

SEQ ID NO: 313057 - DNA, 53 bp, Artificial
  Synthetic oligonucleotide
accgttactacagacgtgttcgtatcaccaacctaatgtgagttaggttacat

SEQ ID NO: 313058 - DNA, 55 bp, Artificial
  Synthetic oligonucleotide
accgttagctgaagcaaaggtggccatgttagatgatgcaacgccacaatgctgg

SEQ ID NO: 313059 - DNA, 56 bp, Artificial
  Synthetic oligonucleotide
accgttagtggattctgcgaatagatttcttgaagttgcttcccaacttctttgct

SEQ ID NO: 313060 - DNA, 52 bp, Artificial
  Synthetic oligonucleotide
accgttataaatacttaggccctaagtagttcgtttcaaaatgtgggatcca

SEQ ID NO: 313061 - DNA, 54 bp, Artificial
  Synthetic oligonucleotide
accgttattactggatatgcattgaagtacaacaaaccgtccgaaattttgggc

SEQ ID NO: 313062 - DNA, 59 bp, Artificial
  Synthetic oligonucleotide
accgttcaaaaacaatatcatatttccatgcagacaaagtgctcacttgaccgttataa

SEQ ID NO: 313063 - DNA, 57 bp, Artificial
  Synthetic oligonucleotide
accgttcagggtgctctcgctccgttcgacgaatattggtatgacaaccagcccctg

SEQ ID NO: 313064 - DNA, 53 bp, Artificial
  Synthetic oligonucleotide
accgttccctttacacgatcgtggtgaccctgtgtacaaaattgaatctctac

SEQ ID NO: 313065 - DNA, 60 bp, Artificial
  Synthetic oligonucleotide
accgttcctagtgtcaaaggatttcctccagatgctgagctttacattgtgccaatatct

SEQ ID NO: 313066 - DNA, 60 bp, Artificial
  Synthetic oligonucleotide
accgttcctatggaatggtcatcggcttctggacagactctaagagcccgcagataccga

SEQ ID NO: 313067 - DNA, 60 bp, Artificial
  Synthetic oligonucleotide
accgttcgagaatctgtcccgacagggcctatgctccgtcatgttgagcactgtggcacg

SEQ ID NO: 313068 - DNA, 55 bp, Artificial
  Synthetic oligonucleotide
accgttcggtagttatgagtcattctgccaattactcagctaccgcttggtgggg

SEQ ID NO: 313069 - DNA, 60 bp, Artificial
  Synthetic oligonucleotide
accgttctatcaagtagatggttcggaattgacagggtcatgccgccatgtgaacgtggc

SEQ ID NO: 313070 - DNA, 58 bp, Artificial
  Synthetic oligonucleotide
accgttctgaagcacagcgtactcctgacgacttcctcgacataacaccttacgaaga

SEQ ID NO: 313071 - DNA, 55 bp, Artificial
  Synthetic oligonucleotide
accgttgaagagccaccgttttcaattttacgcacacgtgtgtcaggattgtacg

SEQ ID NO: 313072 - DNA, 60 bp, Artificial
  Synthetic oligonucleotide
accgttgagaaatggctggcttgcggcgttgacaatttctgtgtgaaggtgttggctcca

SEQ ID NO: 313073 - DNA, 60 bp, Artificial
  Synthetic oligonucleotide
accgttgatcccatggtgaatgttcgtttcgccacgggccggtggatgcatccagtgcca

SEQ ID NO: 313074 - DNA, 60 bp, Artificial
  Synthetic oligonucleotide
accgttgcaaacattgctatggctggagcttttctgcgtgggggcgcgcgccatcgcatg

SEQ ID NO: 313075 - DNA, 60 bp, Artificial
  Synthetic oligonucleotide
accgttgcttcgtaatcattgcacgccattactcgtacgatttgcaacacgtgtattaca

SEQ ID NO: 313076 - DNA, 53 bp, Artificial
  Synthetic oligonucleotide
accgttggagggtaaaattttgacctttacgcaggctgacaagttcgagttgc

SEQ ID NO: 313077 - DNA, 49 bp, Artificial
  Synthetic oligonucleotide
accgttggccgaccggtgccagacccccccctttggcgtaccccaccac

SEQ ID NO: 313078 - DNA, 59 bp, Artificial
  Synthetic oligonucleotide
accgttgggtgcctctggccgccgatatggctggtttgtgtgcacgtactgatgatgtt

SEQ ID NO: 313079 - DNA, 57 bp, Artificial
  Synthetic oligonucleotide
accgttggtttttacattggtatttgccttcgaattggataagcacatggagatgtg

SEQ ID NO: 313080 - DNA, 58 bp, Artificial
  Synthetic oligonucleotide
accgttgtatgactctagtgggaagattgtcgccatacacactggtaagctgttaggg

SEQ ID NO: 313081 - DNA, 53 bp, Artificial
  Synthetic oligonucleotide
accgttgttcgagttcagatcgcgtcgcggaatcatccacaggaacgcatggt

SEQ ID NO: 313082 - DNA, 55 bp, Artificial
  Synthetic oligonucleotide
accgttgttttctcaaaccggttggtcgtgatgttcagcggtggtatactgctcc

SEQ ID NO: 313083 - DNA, 51 bp, Artificial
  Synthetic oligonucleotide
accgtttagaagaaaactagtgtggtatctccttaagagatgtctattgtt

SEQ ID NO: 313084 - DNA, 54 bp, Artificial
  Synthetic oligonucleotide
accgtttcgggattctcacccgaggctgcgagacctgccgctaggttgtccgtt

SEQ ID NO: 313085 - DNA, 55 bp, Artificial
  Synthetic oligonucleotide
accgttttcagctacagtggggtggaggacttgtgagagtccctttctcacggaa

SEQ ID NO: 313086 - DNA, 57 bp, Artificial
  Synthetic oligonucleotide
accgttttgaacaacctaagaagatgtactcacactcatgacgcttccaactcaaag

SEQ ID NO: 313087 - DNA, 53 bp, Artificial
  Synthetic oligonucleotide
accgttttttaagggtcagagatcaacgcggaaatgtattactatctcccgag

SEQ ID NO: 313088 - DNA, 52 bp, Artificial
  Synthetic oligonucleotide
accgttttttgagagttcgggaccaacgaggaaatgtactactgtctcccga

SEQ ID NO: 313089 - DNA, 57 bp, Artificial
  Synthetic oligonucleotide
acctaaaacccaaggtccaatctctaatgcacaagagagggcaatacacatgtaatc

SEQ ID NO: 313090 - DNA, 51 bp, Artificial
  Synthetic oligonucleotide
acctaaaatgatacaagattggctggttgattgttcgattgagaaatttcc

SEQ ID NO: 313091 - DNA, 54 bp, Artificial
  Synthetic oligonucleotide
acctaaacgcttccatagtgtattttacaaaagacggaaagtataagctcataa

SEQ ID NO: 313092 - DNA, 55 bp, Artificial
  Synthetic oligonucleotide
acctaaactactggactgcctctaacaacgacctagacctagccagatacctggg

SEQ ID NO: 313093 - DNA, 57 bp, Artificial
  Synthetic oligonucleotide
acctaaagaagccactgagttcaactagaatggtcacgcaacgtgaccagttgttaa

SEQ ID NO: 313094 - DNA, 56 bp, Artificial
  Synthetic oligonucleotide
acctaaagcagcccctccgcagaatgtttcttggtatgcgccgcttgttcaaacgg

SEQ ID NO: 313095 - DNA, 50 bp, Artificial
  Synthetic oligonucleotide
acctaaagccggtaacactaacggtatgagggaaaaaatactggaattta

SEQ ID NO: 313096 - DNA, 57 bp, Artificial
  Synthetic oligonucleotide
acctaaataacgaaattctcgcatacttacggctactgtctgctgccgctaaatacg

SEQ ID NO: 313097 - DNA, 50 bp, Artificial
  Synthetic oligonucleotide
acctaaataacgacgagcgcctcactattgtcaaaaagggccgtgagttt

SEQ ID NO: 313098 - DNA, 54 bp, Artificial
  Synthetic oligonucleotide
acctaaatgaacttaaaatggagtgtccacacacaattggtttgggtcagggcc

SEQ ID NO: 313099 - DNA, 55 bp, Artificial
  Synthetic oligonucleotide
acctaaatgctgcgttgatgctacgttttaccctgtgccccggcgagtgtggcag

SEQ ID NO: 313100 - DNA, 54 bp, Artificial
  Synthetic oligonucleotide
acctaacaaacctttagtgcttataagcgataaactttgcatcggtgacagata

SEQ ID NO: 313101 - DNA, 55 bp, Artificial
  Synthetic oligonucleotide
acctaaccaaaagtgctctgagagaactcaaaacagtttctgctgatcagttagc

SEQ ID NO: 313102 - DNA, 50 bp, Artificial
  Synthetic oligonucleotide
acctaaccgagtccgttcttatattaagttgaaacgactccgtttcaaag

SEQ ID NO: 313103 - DNA, 53 bp, Artificial
  Synthetic oligonucleotide
acctaaccgttctagatcatatatcaagttaaagcgacttcgttttaaaggaa

SEQ ID NO: 313104 - DNA, 52 bp, Artificial
  Synthetic oligonucleotide
acctaacgcccaggtacccatcttgttagcagtcctatgctgcgtgaaacca

SEQ ID NO: 313105 - DNA, 59 bp, Artificial
  Synthetic oligonucleotide
acctaacgctgatgaaacgcgagatcgaaaaatctcttgcattggctaacgctcgttct

SEQ ID NO: 313106 - DNA, 58 bp, Artificial
  Synthetic oligonucleotide
acctaagaatctactaccagaaaaaactgagtattcactagcttacgatggatctcac

SEQ ID NO: 313107 - DNA, 56 bp, Artificial
  Synthetic oligonucleotide
acctaagatgatacaggactggttagttgatcgttctatcgaaaaatttccattaa

SEQ ID NO: 313108 - DNA, 55 bp, Artificial
  Synthetic oligonucleotide
acctaagcgttagcccgtcgttgaaggatcgttattatatccgccacgtgtgcaa

SEQ ID NO: 313109 - DNA, 56 bp, Artificial
  Synthetic oligonucleotide
acctaagctttcgattatagaatcatttaggtagtagttcccaaatactgcgtgta

SEQ ID NO: 313110 - DNA, 54 bp, Artificial
  Synthetic oligonucleotide
acctaaggacctgggttttgaagactctcaagaaaatcccaatctgagggcgta

SEQ ID NO: 313111 - DNA, 60 bp, Artificial
  Synthetic oligonucleotide
acctaaggaggataagcctgacgcgccctcccatgcggaggacgctatggatgccaagga

SEQ ID NO: 313112 - DNA, 57 bp, Artificial
  Synthetic oligonucleotide
acctaagggcccatttcatgagttttgttgatcgcctgaagttcttacccagaatga

SEQ ID NO: 313113 - DNA, 56 bp, Artificial
  Synthetic oligonucleotide
acctaagttcacctacatacttggcactactaacagttttagtggcgcacctacac

SEQ ID NO: 313114 - DNA, 60 bp, Artificial
  Synthetic oligonucleotide
acctaatgtatgaggttgctcacgttcagtgtgttcggctcctgcgggcagcaaaagagg

SEQ ID NO: 313115 - DNA, 59 bp, Artificial
  Synthetic oligonucleotide
acctaatttgaggttgcgtattcaatacgctaccgaatatctattaatatgtgagtctc

SEQ ID NO: 313116 - DNA, 54 bp, Artificial
  Synthetic oligonucleotide
acctacaaacccatctgataatgtggaaaccaggactacatacatgcatttcag

SEQ ID NO: 313117 - DNA, 59 bp, Artificial
  Synthetic oligonucleotide
acctacaacatggggatctgggtcaacacttaaatcagcattctctacacctgaaataa

SEQ ID NO: 313118 - DNA, 52 bp, Artificial
  Synthetic oligonucleotide
acctacaactggggtgaaaatgaaacggacgttttcgtcctcaacaacacta

SEQ ID NO: 313119 - DNA, 60 bp, Artificial
  Synthetic oligonucleotide
acctacaatgtcagctgcatcaaaggggcacccatggtcgagagggtcagggagcccgac

SEQ ID NO: 313120 - DNA, 55 bp, Artificial
  Synthetic oligonucleotide
acctacaatttatgagcaaagtcattcagtcggaaggtgtgatgcatccatcacc

SEQ ID NO: 313121 - DNA, 58 bp, Artificial
  Synthetic oligonucleotide
acctacaccagagcggtccgcacactccggacttcagacccagcggcattcgtaagga

SEQ ID NO: 313122 - DNA, 56 bp, Artificial
  Synthetic oligonucleotide
acctacagcaccccgtcaccctctactacaactgttgaacagctatcgaacacccc

SEQ ID NO: 313123 - DNA, 55 bp, Artificial
  Synthetic oligonucleotide
acctacagcgggacaagcaaggcatgctcgaactcattttaccggagcatgagat

SEQ ID NO: 313124 - DNA, 57 bp, Artificial
  Synthetic oligonucleotide
acctacaggtttacgcccacagacgctaagtctctcaacatccgggatagtcctcag

SEQ ID NO: 313125 - DNA, 53 bp, Artificial
  Synthetic oligonucleotide
acctaccaggaagcgattgttcgagctaacggtaaggttgaaattccgaagaa

SEQ ID NO: 313126 - DNA, 55 bp, Artificial
  Synthetic oligonucleotide
acctacccaacgattataaagtggacatgcaaacgtccgtggtgggtcttgcgac

SEQ ID NO: 313127 - DNA, 57 bp, Artificial
  Synthetic oligonucleotide
acctaccctggacgatttctggacctctcgatggttatggtgcgtcaacgggtctca

SEQ ID NO: 313128 - DNA, 55 bp, Artificial
  Synthetic oligonucleotide
acctaccgcctcctacacgctgtcagattgatatggctcgcacagtagcgaaccc

SEQ ID NO: 313129 - DNA, 55 bp, Artificial
  Synthetic oligonucleotide
acctaccggaccacatatccggcgcctgtgtactcgcctccgattaacgtccgac

SEQ ID NO: 313130 - DNA, 54 bp, Artificial
  Synthetic oligonucleotide
acctaccgggtaacactacagcccatcttacggtataaatccatatttcgtagc

SEQ ID NO: 313131 - DNA, 54 bp, Artificial
  Synthetic oligonucleotide
acctacctaagttgttatcgttgacctttacacttgaagtttcatcgaccgata

SEQ ID NO: 313132 - DNA, 60 bp, Artificial
  Synthetic oligonucleotide
acctacctctatgggcagccttctttggatatgcagagttctgctccaaaagcacaggag

SEQ ID NO: 313133 - DNA, 57 bp, Artificial
  Synthetic oligonucleotide
acctacgaaaacaatacttgggtgaatcagacatacatcaacataagtaataccaat

SEQ ID NO: 313134 - DNA, 57 bp, Artificial
  Synthetic oligonucleotide
acctacgacggacacagtcaatgggaatccagctcgaccaaaggattattctcctgt

SEQ ID NO: 313135 - DNA, 58 bp, Artificial
  Synthetic oligonucleotide
acctacgagcccaatactttgggccacgaattgatccgcgatctgattcttgtcctcc

SEQ ID NO: 313136 - DNA, 58 bp, Artificial
  Synthetic oligonucleotide
acctacgcatttttgcagctatggccccttctgctgttagtgcttgccctacctcgta

SEQ ID NO: 313137 - DNA, 58 bp, Artificial
  Synthetic oligonucleotide
acctacggacctaatactccacatcggtaacttcatgaagtttgtagattatgtgcgc

SEQ ID NO: 313138 - DNA, 55 bp, Artificial
  Synthetic oligonucleotide
acctacgtcaaccgccggctcttgccacaagggagacagaactgggaggtggcca

SEQ ID NO: 313139 - DNA, 52 bp, Artificial
  Synthetic oligonucleotide
acctacgtccgtgagtgacgcggtttcgtgttaaaacccgcaccggttctca

SEQ ID NO: 313140 - DNA, 55 bp, Artificial
  Synthetic oligonucleotide
acctacgtctgcagttattcggcgacaccctcagtctgggacaaagacagtcagc

SEQ ID NO: 313141 - DNA, 55 bp, Artificial
  Synthetic oligonucleotide
acctacgttgtcgatgcattgaactacgtttatagtacgaatttcttccgctgcg

SEQ ID NO: 313142 - DNA, 57 bp, Artificial
  Synthetic oligonucleotide
acctactaacgttccaatggctcgcgcacgtcgtaccaaacgtgcgtctgtaactga

SEQ ID NO: 313143 - DNA, 52 bp, Artificial
  Synthetic oligonucleotide
acctactagagttggtagggttttggactgcatgttcaattgcaaattgtgt

SEQ ID NO: 313144 - DNA, 53 bp, Artificial
  Synthetic oligonucleotide
acctactgactcgcctcttgaccgggctatacaagatctgcagagacttacta

SEQ ID NO: 313145 - DNA, 60 bp, Artificial
  Synthetic oligonucleotide
acctactggcctcttctggcaaaataatcctgtcatgtggattcacttgcctgcatcgcc

SEQ ID NO: 313146 - DNA, 60 bp, Artificial
  Synthetic oligonucleotide
acctactggggtgactttacaaataaatgcaggcaatgcacatgtgggcaatttgaggat

SEQ ID NO: 313147 - DNA, 60 bp, Artificial
  Synthetic oligonucleotide
acctacttacggtgaaattgaggagttagctgatgattcctccgatagtgcgctagtgat

SEQ ID NO: 313148 - DNA, 57 bp, Artificial
  Synthetic oligonucleotide
acctactttacaagatatggaactcttccagacactagtaaattgtacattctctaa

SEQ ID NO: 313149 - DNA, 55 bp, Artificial
  Synthetic oligonucleotide
acctagaagatgagtatcggcttcatgagacctcagcagagccggaagcttctcc

SEQ ID NO: 313150 - DNA, 51 bp, Artificial
  Synthetic oligonucleotide
acctagaagggatcacactatccgaacccctcacaaaccagaccctgatag

SEQ ID NO: 313151 - DNA, 53 bp, Artificial
  Synthetic oligonucleotide
acctagaattgttcgatcgtctgtaaaagtgtctaaaggtacaaagcgtaaac

SEQ ID NO: 313152 - DNA, 60 bp, Artificial
  Synthetic oligonucleotide
acctagacagtctgagtcctcagcacagccgacaaccacaagcccaatgacttccccagc

SEQ ID NO: 313153 - DNA, 60 bp, Artificial
  Synthetic oligonucleotide
acctagagagacatggggctataacaagtaggaatactccacagacaaatgagactcttg

SEQ ID NO: 313154 - DNA, 55 bp, Artificial
  Synthetic oligonucleotide
acctagagtagttggcttttgtaattcggctcacgctcagggtttgaacgtctta

SEQ ID NO: 313155 - DNA, 56 bp, Artificial
  Synthetic oligonucleotide
acctagatatatcacgaccaagatttcgtacgcacctgtaaccggactagaatgtc

SEQ ID NO: 313156 - DNA, 55 bp, Artificial
  Synthetic oligonucleotide
acctagatgggttggggccccttacactggattagctccagtacacgaacgcgct

SEQ ID NO: 313157 - DNA, 60 bp, Artificial
  Synthetic oligonucleotide
acctagccaatagatgtcctagaagatataccaatcaggctagagcaagtctaatagatg

SEQ ID NO: 313158 - DNA, 60 bp, Artificial
  Synthetic oligonucleotide
acctagcctaagccaagtccatatgcccacctacgctgctccgggtggatgcttatacat

SEQ ID NO: 313159 - DNA, 56 bp, Artificial
  Synthetic oligonucleotide
acctagcgagttgacgtgctcttttacgtccggtccatgctcgcttagcgagttgt

SEQ ID NO: 313160 - DNA, 54 bp, Artificial
  Synthetic oligonucleotide
acctagcgtaaccggaacaaatgccacactgttaaacttggtcccactcttcta

SEQ ID NO: 313161 - DNA, 59 bp, Artificial
  Synthetic oligonucleotide
acctagcttcctcatgccatatggccacccagcatacccagtacccggatgcacgttta

SEQ ID NO: 313162 - DNA, 57 bp, Artificial
  Synthetic oligonucleotide
acctagcttggatgcgacagatagagggggcggttctaaaacccactctatctctcc

SEQ ID NO: 313163 - DNA, 57 bp, Artificial
  Synthetic oligonucleotide
acctagctttaatcctaaatggcaaactccctcttttcctgacattcatttgcagga

SEQ ID NO: 313164 - DNA, 49 bp, Artificial
  Synthetic oligonucleotide
acctaggaagagcaccgggaatacacttacaaaaaaaaccccctcgacg

SEQ ID NO: 313165 - DNA, 56 bp, Artificial
  Synthetic oligonucleotide
acctaggatatgtgaggaaatagtttttcgcacttaatttgaaaggtctaggagca

SEQ ID NO: 313166 - DNA, 57 bp, Artificial
  Synthetic oligonucleotide
acctaggcaaccttggcataagtacaggcagaggctccggtgggacctctgcttacg

SEQ ID NO: 313167 - DNA, 60 bp, Artificial
  Synthetic oligonucleotide
acctaggccggcatcattggatgcgcgctgataacgctatttcagtccggcccctcgttc

SEQ ID NO: 313168 - DNA, 60 bp, Artificial
  Synthetic oligonucleotide
acctaggctccttcctgatgccaattcactgtgagtattctcgtgtggatccctcgctca

SEQ ID NO: 313169 - DNA, 54 bp, Artificial
  Synthetic oligonucleotide
acctagggcagcggagcacctgaggaacctgggtcgaatctcgaggcgggatgg

SEQ ID NO: 313170 - DNA, 53 bp, Artificial
  Synthetic oligonucleotide
acctagggcctttgttggcaccacagggagtgcaaagaggagttcgtcttact

SEQ ID NO: 313171 - DNA, 55 bp, Artificial
  Synthetic oligonucleotide
acctagggtccatgcattatgacatcacttatgaaacgctgaagtcgaatgcgca

SEQ ID NO: 313172 - DNA, 55 bp, Artificial
  Synthetic oligonucleotide
acctagggtgctaactagaaaattcctatttatgtgagtaattgcttgcctaagc

SEQ ID NO: 313173 - DNA, 58 bp, Artificial
  Synthetic oligonucleotide
acctaggtaggtctggttacaccgtgcatgtacagtgtaacgcctccaaattccatca

SEQ ID NO: 313174 - DNA, 60 bp, Artificial
  Synthetic oligonucleotide
acctaggtcgacatcattggatgcgcgcggataacgccatctctgtcagacctctcgttc

SEQ ID NO: 313175 - DNA, 58 bp, Artificial
  Synthetic oligonucleotide
acctaggtgtaactatccagcaggacataaacaggtaggaactctacaatacttggca

SEQ ID NO: 313176 - DNA, 60 bp, Artificial
  Synthetic oligonucleotide
acctagtacagctactatcaagcaggatctgagagatcgcttgcaggttttacacaagtt

SEQ ID NO: 313177 - DNA, 54 bp, Artificial
  Synthetic oligonucleotide
acctagtacggctactgtgaagaacgatttaagggataggtaccaagtaatgag

SEQ ID NO: 313178 - DNA, 60 bp, Artificial
  Synthetic oligonucleotide
acctagtagatggaatgaccaacactatagagaatgccagacagggagcagcgagggtga

SEQ ID NO: 313179 - DNA, 58 bp, Artificial
  Synthetic oligonucleotide
acctagtagtctcgagcgaacgtatgggggatttcgccatgtatcaggctgtggtccc

SEQ ID NO: 313180 - DNA, 58 bp, Artificial
  Synthetic oligonucleotide
acctagtctgccccataggatggacgggtgttatagagtgcacggcagtaagccccac

SEQ ID NO: 313181 - DNA, 53 bp, Artificial
  Synthetic oligonucleotide
acctagtggaatgcacagcatctctcattgacccgttcgcagcctttactaag

SEQ ID NO: 313182 - DNA, 56 bp, Artificial
  Synthetic oligonucleotide
acctagtggtgattgttccaatccaataactggaagtcccagtgctccgggagtaa

SEQ ID NO: 313183 - DNA, 60 bp, Artificial
  Synthetic oligonucleotide
acctagtgtcggcctccgtgacctcgccgcctccgtgaagaccatctgccagctccggca

SEQ ID NO: 313184 - DNA, 56 bp, Artificial
  Synthetic oligonucleotide
acctagtgtttttcacgacatctttcccggagagaaagcacctgcagtactttcac

SEQ ID NO: 313185 - DNA, 53 bp, Artificial
  Synthetic oligonucleotide
acctagtttggtgtttgtagaagctagtgagtattatccagctagatatcagt

SEQ ID NO: 313186 - DNA, 54 bp, Artificial
  Synthetic oligonucleotide
acctataactcagtggaacccctccgtggtcagaaaatgcgtggtaaccggata

SEQ ID NO: 313187 - DNA, 60 bp, Artificial
  Synthetic oligonucleotide
acctataattcattgtttaatagatctgaaagtgacatatcagatctattagacgatacg

SEQ ID NO: 313188 - DNA, 59 bp, Artificial
  Synthetic oligonucleotide
acctatacagaagtgggtcctggttctatacacgtggtggctctgcagataatgttaac

SEQ ID NO: 313189 - DNA, 51 bp, Artificial
  Synthetic oligonucleotide
acctatacgacgggggggacggctagccgcactgttcgcgggtttacgtcc

SEQ ID NO: 313190 - DNA, 57 bp, Artificial
  Synthetic oligonucleotide
acctatacgatcccgctgggcgctacctgaacttcaagccctacttggcgaaattca

SEQ ID NO: 313191 - DNA, 58 bp, Artificial
  Synthetic oligonucleotide
acctatactgatgaacttaagggcgtaaatggcgaagtaccaaaatggcgatcaatca

SEQ ID NO: 313192 - DNA, 60 bp, Artificial
  Synthetic oligonucleotide
acctatacttcgactacgtactgaactacatagagagcatatgggccaactctcatgtgc

SEQ ID NO: 313193 - DNA, 52 bp, Artificial
  Synthetic oligonucleotide
acctataggcccgatgagcagtgtaaagtctttgcgggggtttacccgttta

SEQ ID NO: 313194 - DNA, 55 bp, Artificial
  Synthetic oligonucleotide
acctataggtaactgcgttaagatgttgacaccccacactggcacgggcttggct

SEQ ID NO: 313195 - DNA, 59 bp, Artificial
  Synthetic oligonucleotide
acctatagtgcatccgattcatgcttattagaagccatcgacggtcaagaatttaccgt

SEQ ID NO: 313196 - DNA, 51 bp, Artificial
  Synthetic oligonucleotide
acctatataagacgtagaaggcgccgcaaaaagaaaattaacatacaacag

SEQ ID NO: 313197 - DNA, 60 bp, Artificial
  Synthetic oligonucleotide
acctatatcatacgtctgcctttcagagactggcggggactagagaatgggcttcaacac

SEQ ID NO: 313198 - DNA, 58 bp, Artificial
  Synthetic oligonucleotide
acctatatcggtgggccacgattgatggcgtatgggatcctagggcccattccgtata

SEQ ID NO: 313199 - DNA, 55 bp, Artificial
  Synthetic oligonucleotide
acctatatctcatatcctaatctgggtaagacgcaacccaatcgatccaggtcgt

SEQ ID NO: 313200 - DNA, 58 bp, Artificial
  Synthetic oligonucleotide
acctatcaataaggcgaggcaaaagtgatggtctgctaggtacaggggttagcgcggc

SEQ ID NO: 313201 - DNA, 60 bp, Artificial
  Synthetic oligonucleotide
acctatcaattggcagcacctatacatcaccaatgcatgcgagacgtatgattagatcta

SEQ ID NO: 313202 - DNA, 55 bp, Artificial
  Synthetic oligonucleotide
acctatcagaaaagattgagctgattgcttacaatctgcagctcactaatcactg

SEQ ID NO: 313203 - DNA, 57 bp, Artificial
  Synthetic oligonucleotide
acctatccaagtcgaaacccgaaatacagcagacagtatccgctgtactctacggga

SEQ ID NO: 313204 - DNA, 60 bp, Artificial
  Synthetic oligonucleotide
acctatccacaataaatagcacccttgggggaattcccatgcaggtggctatgcacatag

SEQ ID NO: 313205 - DNA, 54 bp, Artificial
  Synthetic oligonucleotide
acctatcctccatcgactcacagagcttggagagcggacacacctccgttcttg

SEQ ID NO: 313206 - DNA, 60 bp, Artificial
  Synthetic oligonucleotide
acctatcgacaatgtgatgggaatgattgggatattacccgacatgactccaagcaccga

SEQ ID NO: 313207 - DNA, 59 bp, Artificial
  Synthetic oligonucleotide
acctatcgcaaggagggctgtcgcatgagtggggatataaacacctcgttgggcaacta

SEQ ID NO: 313208 - DNA, 58 bp, Artificial
  Synthetic oligonucleotide
acctatcgcacacgcaaggtaatgtatgataaccctgttcgtaattagcgtatacgcc

SEQ ID NO: 313209 - DNA, 60 bp, Artificial
  Synthetic oligonucleotide
acctatcgcgacgaacttgccaatggcaagtggaaagacagtagtgcgagcgacctgtgg

SEQ ID NO: 313210 - DNA, 59 bp, Artificial
  Synthetic oligonucleotide
acctatcttgctcagggccgtcctattcgtatccccacgccgttcagtgtggcgaatca

SEQ ID NO: 313211 - DNA, 60 bp, Artificial
  Synthetic oligonucleotide
acctatctttgaggcgattcatggtggcgctcatcttggacatcaaacgatccccaggga

SEQ ID NO: 313212 - DNA, 54 bp, Artificial
  Synthetic oligonucleotide
acctatgaaccagcctaccttggtggcaaggaccccagagtcaagggtggcccc

SEQ ID NO: 313213 - DNA, 58 bp, Artificial
  Synthetic oligonucleotide
acctatgactggacattaaatagaaaccaaccggctgcaactgctttggccaacacta

SEQ ID NO: 313214 - DNA, 60 bp, Artificial
  Synthetic oligonucleotide
acctatgagggcgataccagtgcaggctataaccatgatgtctccatacttcgtgcgtgg

SEQ ID NO: 313215 - DNA, 59 bp, Artificial
  Synthetic oligonucleotide
acctatgcccgaggttcagatgagggcaaccgacacaccagcgagactcttacgtacaa

SEQ ID NO: 313216 - DNA, 58 bp, Artificial
  Synthetic oligonucleotide
acctatgcccgcggatctgatgaaggaaaccgccacaccaacgagactctaacgtaca

SEQ ID NO: 313217 - DNA, 56 bp, Artificial
  Synthetic oligonucleotide
acctatgcgcatctttttaagcgaaccggtgataaatgtttcctcgtacagccagg

SEQ ID NO: 313218 - DNA, 60 bp, Artificial
  Synthetic oligonucleotide
acctatgctacgattaaatatgctaatgatacgacgatatactacctgatatataacgta

SEQ ID NO: 313219 - DNA, 55 bp, Artificial
  Synthetic oligonucleotide
acctatgctatcggcgcggtaacgggtaacaccattcagaggttcaccggcttgt

SEQ ID NO: 313220 - DNA, 51 bp, Artificial
  Synthetic oligonucleotide
acctatgctcgaaagggaacgggttgtagccatattggagtgggaccgaag

SEQ ID NO: 313221 - DNA, 56 bp, Artificial
  Synthetic oligonucleotide
acctatgctgacgatcccaattactttataggaattaaatttaatagcatacctta

SEQ ID NO: 313222 - DNA, 59 bp, Artificial
  Synthetic oligonucleotide
acctatggataaggtaattaaagctgcgttttgtggagatgatagtattctatacattc

SEQ ID NO: 313223 - DNA, 60 bp, Artificial
  Synthetic oligonucleotide
acctatgggaatgattaacgctcatgcacaatatttggcagtacagtaattgtatacaaa

SEQ ID NO: 313224 - DNA, 60 bp, Artificial
  Synthetic oligonucleotide
acctatggggcatgtcccaaatatgtcaagcagagcactctaaagttggcaactggaatg

SEQ ID NO: 313225 - DNA, 60 bp, Artificial
  Synthetic oligonucleotide
acctatgtcaacctgactagcgaccaactaccagatgtaatcccagattacatcgatgtt

SEQ ID NO: 313226 - DNA, 57 bp, Artificial
  Synthetic oligonucleotide
acctatgtgccctgccatattaggcaagtggttaatgactggtataccctggccaaa

SEQ ID NO: 313227 - DNA, 56 bp, Artificial
  Synthetic oligonucleotide
acctatgttgtgccaccgggtgattataccctgacacctctgtaactcactacccc

SEQ ID NO: 313228 - DNA, 60 bp, Artificial
  Synthetic oligonucleotide
acctattaattgtccaattacactgccccaatatccattggatgctgggcttgatataac

SEQ ID NO: 313229 - DNA, 55 bp, Artificial
  Synthetic oligonucleotide
acctattagctacgccaacggaagtggccccgaacaccgcccctactgctggcac

SEQ ID NO: 313230 - DNA, 55 bp, Artificial
  Synthetic oligonucleotide
acctattcatgcctctaccgaagaaggtacaggtagatggtcttaagtcacggag

SEQ ID NO: 313231 - DNA, 55 bp, Artificial
  Synthetic oligonucleotide
acctattcgatacagggaagactccgggagcgcggattatacattgggttcagga

SEQ ID NO: 313232 - DNA, 57 bp, Artificial
  Synthetic oligonucleotide
acctattcttctgtgataccaaattacagttcatcctttgttaggggtgatgtgcct

SEQ ID NO: 313233 - DNA, 55 bp, Artificial
  Synthetic oligonucleotide
acctattgattggaaagtgtgtcaaaggattgtcggtctgttaggctttgccgcc

SEQ ID NO: 313234 - DNA, 57 bp, Artificial
  Synthetic oligonucleotide
acctattgccaaatatggtacacgtaacgatctcgaactatgtccccttaatcgtga

SEQ ID NO: 313235 - DNA, 60 bp, Artificial
  Synthetic oligonucleotide
acctcaaacttgtactatatgtgagacagctcctgtcaatgcaatagacgctgaaatgca

SEQ ID NO: 313236 - DNA, 53 bp, Artificial
  Synthetic oligonucleotide
acctcaaagaccacttcatatacctccccggaggacacgccggggcctcctac

SEQ ID NO: 313237 - DNA, 56 bp, Artificial
  Synthetic oligonucleotide
acctcaaagggatggtgttggaaactcccagatgcacttaaggatatgggagtgtt

SEQ ID NO: 313238 - DNA, 53 bp, Artificial
  Synthetic oligonucleotide
acctcaaatttgacgacacccaatcgacgagttcttgcggaactctgtcgaag

SEQ ID NO: 313239 - DNA, 59 bp, Artificial
  Synthetic oligonucleotide
acctcaaccctcacttggagaaacagcgagctcgtaagacagacgaagcttgcgactat

SEQ ID NO: 313240 - DNA, 60 bp, Artificial
  Synthetic oligonucleotide
acctcaagagcggatttcatcaagtggctatgcaccccgactccgttccatggaccgcat

SEQ ID NO: 313241 - DNA, 60 bp, Artificial
  Synthetic oligonucleotide
acctcaagtagctccattgtaatgtgtggagtagaccatgagattgccgactggtcgtgg

SEQ ID NO: 313242 - DNA, 60 bp, Artificial
  Synthetic oligonucleotide
acctcaatattggggttgcgattgcagaagctaaaatgactgcttcactgctttctcgtc

SEQ ID NO: 313243 - DNA, 54 bp, Artificial
  Synthetic oligonucleotide
acctcaatctgggcgggcgccaaacagcccgtacccttatgtacaacttcccaa

SEQ ID NO: 313244 - DNA, 57 bp, Artificial
  Synthetic oligonucleotide
acctcaatgctccagttgactccctacggaggcacgtggacctgatggttggcgccg

SEQ ID NO: 313245 - DNA, 55 bp, Artificial
  Synthetic oligonucleotide
acctcacaaactccatcatacaacgggtggaatgaataacatgtctcgtgcatcg

SEQ ID NO: 313246 - DNA, 59 bp, Artificial
  Synthetic oligonucleotide
acctcacaagtagtacccagtgacactatgcaaactaggcacgtgaaaaattatcactc

SEQ ID NO: 313247 - DNA, 60 bp, Artificial
  Synthetic oligonucleotide
acctcacaataaaggagtgattgccttactgccgagtggagagtgattactgagcgaacc

SEQ ID NO: 313248 - DNA, 55 bp, Artificial
  Synthetic oligonucleotide
acctcaccataggctcggttgccactgaggatgttccacgcatcctcgggaggac

SEQ ID NO: 313249 - DNA, 59 bp, Artificial
  Synthetic oligonucleotide
acctcaccatggtgactccgggtgaacttctagatgaacgcgaagccttcgctatcgac

SEQ ID NO: 313250 - DNA, 56 bp, Artificial
  Synthetic oligonucleotide
acctcaccatgtgtggtacaatgacaaaccccatacagctttagccaagaacggtc

SEQ ID NO: 313251 - DNA, 58 bp, Artificial
  Synthetic oligonucleotide
acctcactcccgacaaaatgttccaacgcatggacaacattcttttcttcctgcatac

SEQ ID NO: 313252 - DNA, 59 bp, Artificial
  Synthetic oligonucleotide
acctcacttatgatgcagtccccacggtgcctatacggtcccgctgggcgctacctgaa

SEQ ID NO: 313253 - DNA, 60 bp, Artificial
  Synthetic oligonucleotide
acctcacttcttcgagtggatccatcttagactaatggacactacgatgtttgtaggaga

SEQ ID NO: 313254 - DNA, 58 bp, Artificial
  Synthetic oligonucleotide
acctcagacctaggtattgatgctgttaggttattcgatccaatgttctccgacgccg

SEQ ID NO: 313255 - DNA, 55 bp, Artificial
  Synthetic oligonucleotide
acctcagacgcgttaaccgtttctattcgaggtagatggatggctagattggctc

SEQ ID NO: 313256 - DNA, 60 bp, Artificial
  Synthetic oligonucleotide
acctcagagaaaggtgagcgaaggctcaattcagaagattggaagctgatcaataggatc

SEQ ID NO: 313257 - DNA, 55 bp, Artificial
  Synthetic oligonucleotide
acctcagcctacccaagcgctacttgacacaggagccgaccgtacggttataccc

SEQ ID NO: 313258 - DNA, 53 bp, Artificial
  Synthetic oligonucleotide
acctcagcggactgatttaacgtttgccaagctcatttatggatcaaacaacg

SEQ ID NO: 313259 - DNA, 52 bp, Artificial
  Synthetic oligonucleotide
acctcaggaccgtgtagaaggcttagctacaaaggatactttctcctcgcga

SEQ ID NO: 313260 - DNA, 57 bp, Artificial
  Synthetic oligonucleotide
acctcagtactcttactctttttctgaaaagaggagactgctggttctgccgcccaa

SEQ ID NO: 313261 - DNA, 55 bp, Artificial
  Synthetic oligonucleotide
acctcagtcactaatcacatgggcactttgtgttcaagagtagttactggcaaac

SEQ ID NO: 313262 - DNA, 57 bp, Artificial
  Synthetic oligonucleotide
acctcagtcttttcataccactaagctttcgcatcacccccgagaatgctcgaagtt

SEQ ID NO: 313263 - DNA, 55 bp, Artificial
  Synthetic oligonucleotide
acctcatatttggatttatccacaagattctcagggtggtgaaatggttttaccg

SEQ ID NO: 313264 - DNA, 60 bp, Artificial
  Synthetic oligonucleotide
acctcatcatactgcactcaggcaagccatcctttgctggggggagctaatgactctagc

SEQ ID NO: 313265 - DNA, 58 bp, Artificial
  Synthetic oligonucleotide
acctcatgatgaagctgtatcaaatagattagtatatcatgaatttccctatgttttc

SEQ ID NO: 313266 - DNA, 56 bp, Artificial
  Synthetic oligonucleotide
acctcatgggctaatggctcgcttccagactgggagaacatgacctggcaaaagtg

SEQ ID NO: 313267 - DNA, 56 bp, Artificial
  Synthetic oligonucleotide
acctcattatcttctaacaagtctttaagagggtctaagataacaagcccaatgtc

SEQ ID NO: 313268 - DNA, 60 bp, Artificial
  Synthetic oligonucleotide
acctcattccagacaggatcaatcatagttaagctcctcccgaatctgcccaaggataag

SEQ ID NO: 313269 - DNA, 57 bp, Artificial
  Synthetic oligonucleotide
acctcattcggacgcgtcaaactactgcaaacgtactcgcaatggcaacataatcgt

SEQ ID NO: 313270 - DNA, 58 bp, Artificial
  Synthetic oligonucleotide
acctcattgcttttagggacaactttattggacttatgtactacaacagcacaggcaa

SEQ ID NO: 313271 - DNA, 52 bp, Artificial
  Synthetic oligonucleotide
acctcattgggctggtgcgtaaaatgacattgcggggcccaagccggctaag

SEQ ID NO: 313272 - DNA, 59 bp, Artificial
  Synthetic oligonucleotide
acctccaatcattcaaagactccatggtcttagcgcgttttcactccacagttactctc

SEQ ID NO: 313273 - DNA, 60 bp, Artificial
  Synthetic oligonucleotide
acctccaatgcactgggacagtgctggcaagatctttcagccacaccccggtgttttgat

SEQ ID NO: 313274 - DNA, 56 bp, Artificial
  Synthetic oligonucleotide
acctccaccatattcgtagccacaccaatctccccgaccccatctccactcttaac

SEQ ID NO: 313275 - DNA, 56 bp, Artificial
  Synthetic oligonucleotide
acctccagaggaccccttcagcgaacaagaggcgcttcgagcggtaggagtaagac

SEQ ID NO: 313276 - DNA, 60 bp, Artificial
  Synthetic oligonucleotide
acctccagcgtgctaatagggaactgtcactgaaactggtcgatatgcaacctgctcggg

SEQ ID NO: 313277 - DNA, 58 bp, Artificial
  Synthetic oligonucleotide
acctccatatgcgctagtcttttattgtcgaacacaggcccttgtatctgatgtagcg

SEQ ID NO: 313278 - DNA, 55 bp, Artificial
  Synthetic oligonucleotide
acctccatgactccaatgtgaggaatttatatgagaaggtcagatcgcagttgag

SEQ ID NO: 313279 - DNA, 60 bp, Artificial
  Synthetic oligonucleotide
acctccatggtgatgcaatattcgaggtcaaggagaacgtctcagggaagatacaagaga

SEQ ID NO: 313280 - DNA, 59 bp, Artificial
  Synthetic oligonucleotide
acctcccagataaaaacgccattctgtgcctgacgagcagtgatggtttcccctgtgcg

SEQ ID NO: 313281 - DNA, 60 bp, Artificial
  Synthetic oligonucleotide
acctcccagatatagacgccactcctgagttgagctgcaatgatgctctcccctgtgcga

SEQ ID NO: 313282 - DNA, 55 bp, Artificial
  Synthetic oligonucleotide
acctccccaaaacgggaaagtcatatcttcatgggagttgtacaagagtgaaggc

SEQ ID NO: 313283 - DNA, 55 bp, Artificial
  Synthetic oligonucleotide
acctccccaaccaaagtccccaccactgatcgaacattggtactctccatctacc

SEQ ID NO: 313284 - DNA, 55 bp, Artificial
  Synthetic oligonucleotide
acctccccgagacgtgcgaccggatgaccgtgatcggagctggttcctgatggtc

SEQ ID NO: 313285 - DNA, 60 bp, Artificial
  Synthetic oligonucleotide
acctccccgcgaggctgcagctaagcgatggtgcttcaccctgaataatcccactgaaga

SEQ ID NO: 313286 - DNA, 58 bp, Artificial
  Synthetic oligonucleotide
acctccccgtgaggctgcagctaagcgatggtgcttcacgttaaacaaccccactgaa

SEQ ID NO: 313287 - DNA, 53 bp, Artificial
  Synthetic oligonucleotide
acctcccgagcgttgccgactggttcaacgacacgggtaagtcgttcaaggac

SEQ ID NO: 313288 - DNA, 52 bp, Artificial
  Synthetic oligonucleotide
acctcccgcaagtcgggaggttcgctaaaacgcctcgcgttcttagaatacc

SEQ ID NO: 313289 - DNA, 50 bp, Artificial
  Synthetic oligonucleotide
acctcccgggctcgacacagcataacatcggctcagcggtccacgcacta

SEQ ID NO: 313290 - DNA, 51 bp, Artificial
  Synthetic oligonucleotide
acctccctatgaagagtgacacccccagagcccaacaccaacaggcagccc

SEQ ID NO: 313291 - DNA, 58 bp, Artificial
  Synthetic oligonucleotide
acctccctcactccccggtgcagcactgcctggaacaggctgaaactggacaaggtaa

SEQ ID NO: 313292 - DNA, 57 bp, Artificial
  Synthetic oligonucleotide
acctccctcgccatggcatacgtggaagggaagacattggtgttcaacaccggtaca

SEQ ID NO: 313293 - DNA, 59 bp, Artificial
  Synthetic oligonucleotide
acctccctgaggtgagcgccacggtagctgggagtatcgagatgtgttttctctacgac

SEQ ID NO: 313294 - DNA, 60 bp, Artificial
  Synthetic oligonucleotide
acctccgagaacagcctcaccaggctgctgacgtactcggcaggggatgcctcggaacca

SEQ ID NO: 313295 - DNA, 50 bp, Artificial
  Synthetic oligonucleotide
acctccgaggaccaattcagaatcttatacaaaggcaatggttcctcgtc

SEQ ID NO: 313296 - DNA, 60 bp, Artificial
  Synthetic oligonucleotide
acctccgatgtaacaggtgtgtaaggcccatcgacgatatcatattggagacctctcaga

SEQ ID NO: 313297 - DNA, 59 bp, Artificial
  Synthetic oligonucleotide
acctccgcgtgtcactgctggggtcgcccaggagtggcgcatgacgtacttgcgggaac

SEQ ID NO: 313298 - DNA, 55 bp, Artificial
  Synthetic oligonucleotide
acctccggttctctccttactcgacgatccaggcgagggaacgtcgagtcaacga

SEQ ID NO: 313299 - DNA, 54 bp, Artificial
  Synthetic oligonucleotide
acctccgttctccgcgaacggcgctctacgaccctgaaacttctgttacagcaa

SEQ ID NO: 313300 - DNA, 50 bp, Artificial
  Synthetic oligonucleotide
acctccgttgacggttgggttactgtttggcaattgactcccctaaccta

SEQ ID NO: 313301 - DNA, 57 bp, Artificial
  Synthetic oligonucleotide
acctcctacatttccgttggaacatcaacactgaaccagagattggttccagaaata

SEQ ID NO: 313302 - DNA, 56 bp, Artificial
  Synthetic oligonucleotide
acctcctatggttggaagacgatgctatggagcaaggtgtgaaagactatgtcgaa

SEQ ID NO: 313303 - DNA, 53 bp, Artificial
  Synthetic oligonucleotide
acctcctattcgtggtataagaacgggagttatggcgataagtgtcttttcgt

SEQ ID NO: 313304 - DNA, 53 bp, Artificial
  Synthetic oligonucleotide
acctcctcgcggaggttccctgccaaaccttgccaggcctggcctagccgagc

SEQ ID NO: 313305 - DNA, 51 bp, Artificial
  Synthetic oligonucleotide
acctcctctatatatttgcgttactaagcaataggtaataactaaactggt

SEQ ID NO: 313306 - DNA, 50 bp, Artificial
  Synthetic oligonucleotide
acctcctgagatgggttagtgcctcgagtgaattccgacctgacactctt

SEQ ID NO: 313307 - DNA, 60 bp, Artificial
  Synthetic oligonucleotide
acctcctgatatcagagaaaaagcggagatgatagccgaggataacgccattataactgc

SEQ ID NO: 313308 - DNA, 52 bp, Artificial
  Synthetic oligonucleotide
acctcctgatgaccctttttcaacaggcgtcgggttcaaaagaccccgaatg

SEQ ID NO: 313309 - DNA, 59 bp, Artificial
  Synthetic oligonucleotide
acctcctgggagaagtaccttgtgccgactgactgctctggtttcgactggagcgttgc

SEQ ID NO: 313310 - DNA, 60 bp, Artificial
  Synthetic oligonucleotide
acctccttacaggtgcgaagtgcactgtgccattagcccctgagcccgtgctgcgttttg

SEQ ID NO: 313311 - DNA, 54 bp, Artificial
  Synthetic oligonucleotide
acctccttatccctcggcccacaaccgaggatgtatttggcccctccatcgccc

SEQ ID NO: 313312 - DNA, 60 bp, Artificial
  Synthetic oligonucleotide
acctccttctgtagccagctcctcggctagccaattgtccgctccatccctcaaggcaac

SEQ ID NO: 313313 - DNA, 57 bp, Artificial
  Synthetic oligonucleotide
acctccttgatgctacgtgtgatgggttcaacctacatctaacgtaccccaccgcac

SEQ ID NO: 313314 - DNA, 59 bp, Artificial
  Synthetic oligonucleotide
acctccttggataatgcattagctctcgctgtgcattgtctcaattttaaacaaagggg

SEQ ID NO: 313315 - DNA, 57 bp, Artificial
  Synthetic oligonucleotide
acctcctttccatggttggtaggttgtgctgccaaatggatcctgcgcgggacgtcc

SEQ ID NO: 313316 - DNA, 55 bp, Artificial
  Synthetic oligonucleotide
acctcctttctggaatcaggaagtgggtctttccagtcgtggacaccctgctacc

SEQ ID NO: 313317 - DNA, 54 bp, Artificial
  Synthetic oligonucleotide
acctcgaaaaggcatggggacgaatctttctgtccccaatccctgggattcttc

SEQ ID NO: 313318 - DNA, 58 bp, Artificial
  Synthetic oligonucleotide
acctcgaaaggctactggaaggtggaatccccagcctggcgtttatcctcctcatgca

SEQ ID NO: 313319 - DNA, 55 bp, Artificial
  Synthetic oligonucleotide
acctcgaattaggacactgtgggacgtccaaaagctagtgggagctctccagtgg

SEQ ID NO: 313320 - DNA, 53 bp, Artificial
  Synthetic oligonucleotide
acctcgaccgtttattcgaagaagattttggagacgacacacggtaagaagac

SEQ ID NO: 313321 - DNA, 52 bp, Artificial
  Synthetic oligonucleotide
acctcgagagcgcctgagcctacctcgagagcgcctgagcctacctcgagag

SEQ ID NO: 313322 - DNA, 58 bp, Artificial
  Synthetic oligonucleotide
acctcgagagtgaatttgtaactggaaccgagcggatagcgattagattgctcaaaaa

SEQ ID NO: 313323 - DNA, 60 bp, Artificial
  Synthetic oligonucleotide
acctcgaggccactggagcctgcatttgcgagatccccactgacgtctcgtgcgagggct

SEQ ID NO: 313324 - DNA, 50 bp, Artificial
  Synthetic oligonucleotide
acctcgaggtcacagggatattcaagggacccttgctaggaaaggtgatt

SEQ ID NO: 313325 - DNA, 55 bp, Artificial
  Synthetic oligonucleotide
acctcgagtgccagatgaccaaatgtacagattaagagatagacttagactgttg

SEQ ID NO: 313326 - DNA, 60 bp, Artificial
  Synthetic oligonucleotide
acctcgatcatctaatccaatacacgccggagcagacggatttgtccaacacacgttcaa

SEQ ID NO: 313327 - DNA, 58 bp, Artificial
  Synthetic oligonucleotide
acctcgatgtggtgttacatatcccagaggtaggaagacctatcaaagtcaaagcaat

SEQ ID NO: 313328 - DNA, 60 bp, Artificial
  Synthetic oligonucleotide
acctcgcatgtctcaatctgcgatggctgataagtgagtcctctactactcccatgagac

SEQ ID NO: 313329 - DNA, 57 bp, Artificial
  Synthetic oligonucleotide
acctcgcattgtgaagggtccacgaccggagtgctgagttttcctctttctcgagga

SEQ ID NO: 313330 - DNA, 55 bp, Artificial
  Synthetic oligonucleotide
acctcgcctacatgcaataacgacagataactgcaacaactccattatcctcccc

SEQ ID NO: 313331 - DNA, 55 bp, Artificial
  Synthetic oligonucleotide
acctcgcgagagcctgtctggacctggtgcattggcagccgatcggaaactaccc

SEQ ID NO: 313332 - DNA, 58 bp, Artificial
  Synthetic oligonucleotide
acctcggagactctagcctgcgagggggtgctatcaattggtcgaacgtgggctctcg

SEQ ID NO: 313333 - DNA, 53 bp, Artificial
  Synthetic oligonucleotide
acctcggagttaacgccgtagcgtattaccggggtcttgacgtgtccgtcata

SEQ ID NO: 313334 - DNA, 55 bp, Artificial
  Synthetic oligonucleotide
acctcggatttttaatcttcatgcccgatgtttcaatacatttagaccctcccac

SEQ ID NO: 313335 - DNA, 58 bp, Artificial
  Synthetic oligonucleotide
acctcggttgagggtcacattatgcatgggggagcggtgtcgattgagggacgaggat

SEQ ID NO: 313336 - DNA, 51 bp, Artificial
  Synthetic oligonucleotide
acctcgtatttcatctatacccagattatagtacatcaacaaacgtagaat

SEQ ID NO: 313337 - DNA, 57 bp, Artificial
  Synthetic oligonucleotide
acctcgtcagaacgaaatttcaagaggacgatccttttcggagcgagaaccacatca

SEQ ID NO: 313338 - DNA, 50 bp, Artificial
  Synthetic oligonucleotide
acctcgtgaatcgcttctcagttgggaagttggtaaagtaaagcctcctc

SEQ ID NO: 313339 - DNA, 57 bp, Artificial
  Synthetic oligonucleotide
acctcgtgctactgctcgtgtcgccaggcccactaggcagggtcccgggcttgcggg

SEQ ID NO: 313340 - DNA, 56 bp, Artificial
  Synthetic oligonucleotide
acctcgttcgggtttggctgtgaagcactgtatcaacgttggtgcgggggtcatcg

SEQ ID NO: 313341 - DNA, 60 bp, Artificial
  Synthetic oligonucleotide
acctcgtttgtgtgacatccctatcaatggatctcgcgactttgttgcagatcctaccag

SEQ ID NO: 313342 - DNA, 60 bp, Artificial
  Synthetic oligonucleotide
acctctaagatcaagatgaaatggggcatggaaatgagacgctgccttctacaatccctt

SEQ ID NO: 313343 - DNA, 58 bp, Artificial
  Synthetic oligonucleotide
acctctaagattctatttagaataatataaatgtgccgaaggcacatataaataatat

SEQ ID NO: 313344 - DNA, 59 bp, Artificial
  Synthetic oligonucleotide
acctctacgcctctctggtcgtcccaccagaaagctccttcaccgatctctctctctac

SEQ ID NO: 313345 - DNA, 54 bp, Artificial
  Synthetic oligonucleotide
acctctacggggtggggtcaagcatcgcgtcttgggccattaagtgggagtacg

SEQ ID NO: 313346 - DNA, 56 bp, Artificial
  Synthetic oligonucleotide
acctctacgggttgagctcggtagttacatcctgggccataaggtgggagtatgtc

SEQ ID NO: 313347 - DNA, 53 bp, Artificial
  Synthetic oligonucleotide
acctctactcgaatgtccaaccgagtgtatactcaaaggcttcacaacggcaa

SEQ ID NO: 313348 - DNA, 60 bp, Artificial
  Synthetic oligonucleotide
acctctactggcccggagccagtgacagcccattctatacctctctccaggagagaaaca

SEQ ID NO: 313349 - DNA, 59 bp, Artificial
  Synthetic oligonucleotide
acctctagctgtaacatggtggaataggaatggacctacaacaagtacagtccattatc

SEQ ID NO: 313350 - DNA, 59 bp, Artificial
  Synthetic oligonucleotide
acctctattaaggtatgtgacatggctatgtgttatggagcctcagtagtaaacctagt

SEQ ID NO: 313351 - DNA, 59 bp, Artificial
  Synthetic oligonucleotide
acctctcaaggcaaggtaaatcaaagtgttctgtgccaagatcttggctcgagaaagta

SEQ ID NO: 313352 - DNA, 55 bp, Artificial
  Synthetic oligonucleotide
acctctcacttgccgctcttcacacccatcatcttaattcggcctctgtgttgag

SEQ ID NO: 313353 - DNA, 52 bp, Artificial
  Synthetic oligonucleotide
acctctcagcagttaacgactctggggtagggatccctcagattcttgtggc

SEQ ID NO: 313354 - DNA, 55 bp, Artificial
  Synthetic oligonucleotide
acctctcagcgtagcctgcctagtccctagacccctagccagctccaaggggagg

SEQ ID NO: 313355 - DNA, 55 bp, Artificial
  Synthetic oligonucleotide
acctctcagctattaacttagaatgttttgccccactctatcatgctatggatgt

SEQ ID NO: 313356 - DNA, 56 bp, Artificial
  Synthetic oligonucleotide
acctctcatgagtatccaaacatagagttagttttaatgcaaccctttagtctttg

SEQ ID NO: 313357 - DNA, 60 bp, Artificial
  Synthetic oligonucleotide
acctctccaggacggcaccaatacccacatcatggcgactgaggcgtctaactacgccca

SEQ ID NO: 313358 - DNA, 53 bp, Artificial
  Synthetic oligonucleotide
acctctcgcatcagcgcgagcgtgttgtacagccacggctggtcaccaggcgc

SEQ ID NO: 313359 - DNA, 55 bp, Artificial
  Synthetic oligonucleotide
acctctcgctattggttggatcccgcccacgtgatttcaagactgaggttgacgt

SEQ ID NO: 313360 - DNA, 52 bp, Artificial
  Synthetic oligonucleotide
acctctcgggtggagatgaggactctgacgggtctagtgtgtccaatctttt

SEQ ID NO: 313361 - DNA, 56 bp, Artificial
  Synthetic oligonucleotide
acctctctcagtctcctggctatccttggacaacacagggccggtcccgccggtct

SEQ ID NO: 313362 - DNA, 55 bp, Artificial
  Synthetic oligonucleotide
acctctctctgtaagggtatgggtgaggatggcgaatttgtcaggatgggtgaat

SEQ ID NO: 313363 - DNA, 60 bp, Artificial
  Synthetic oligonucleotide
acctctcttcctgccatgaataggcgatttttccttgatttggacataatagttcatgac

SEQ ID NO: 313364 - DNA, 60 bp, Artificial
  Synthetic oligonucleotide
acctctgaacgctgttctgcatcaggtcccgtgtcacttgatacatgccggaatccgcgc

SEQ ID NO: 313365 - DNA, 60 bp, Artificial
  Synthetic oligonucleotide
acctctgagccatgtgatgtctgttttggatatgggtcaaggcattcttcacaacacttc

SEQ ID NO: 313366 - DNA, 55 bp, Artificial
  Synthetic oligonucleotide
acctctgcgacaacttctgccccgggatccgcaagtacgagggcggcgtcgacgc

SEQ ID NO: 313367 - DNA, 58 bp, Artificial
  Synthetic oligonucleotide
acctctgcgacgtcacgccctccggtctaggtgatcgtatcgctttcccgattgttga

SEQ ID NO: 313368 - DNA, 55 bp, Artificial
  Synthetic oligonucleotide
acctctggctcgcggttcccctctcccggggcggtggcacttgcgccgcgaccga

SEQ ID NO: 313369 - DNA, 59 bp, Artificial
  Synthetic oligonucleotide
acctctgggaatagggattactgggcatcccctatataacaggctagaggatgtggaga

SEQ ID NO: 313370 - DNA, 58 bp, Artificial
  Synthetic oligonucleotide
acctctgtcctctatgtaagtgaccctcattgcccccccgaccttgacactcatgtcc

SEQ ID NO: 313371 - DNA, 55 bp, Artificial
  Synthetic oligonucleotide
acctctgtcgacatgaactctattacttctactgatgtcaggattttggtccagc

SEQ ID NO: 313372 - DNA, 60 bp, Artificial
  Synthetic oligonucleotide
acctctgtgacatgacactcctaacgatctttgcctctgcggcggatatgcaatatccgt

SEQ ID NO: 313373 - DNA, 55 bp, Artificial
  Synthetic oligonucleotide
acctcttagttagtacaaccaccgctcatgggtgtgatactattgctaggtgccg

SEQ ID NO: 313374 - DNA, 55 bp, Artificial
  Synthetic oligonucleotide
acctcttatgatatagcgtctctcctttccgtcattaataggcgtacgtacccgt

SEQ ID NO: 313375 - DNA, 60 bp, Artificial
  Synthetic oligonucleotide
acctcttggacacaatccatgctgagttccaggcaagtctagcagatggtgactctcccc

SEQ ID NO: 313376 - DNA, 50 bp, Artificial
  Synthetic oligonucleotide
acctcttggatcacaggacatcactggggcttacgcttgtatgtctccgg

SEQ ID NO: 313377 - DNA, 53 bp, Artificial
  Synthetic oligonucleotide
acctctttaacaagacagaaataaattttaagccatcttcaggaggggaccta

SEQ ID NO: 313378 - DNA, 56 bp, Artificial
  Synthetic oligonucleotide
acctctttactgactatatgcttatcaaatggaaagttgaatttataaaaactgaa

SEQ ID NO: 313379 - DNA, 56 bp, Artificial
  Synthetic oligonucleotide
acctctttctagcttatgagactagcgatctctaccagagatctaacccgcaattg

SEQ ID NO: 313380 - DNA, 54 bp, Artificial
  Synthetic oligonucleotide
acctctttgctatgtatcggtgtattggggtacattatatagttcggtgagaat

SEQ ID NO: 313381 - DNA, 60 bp, Artificial
  Synthetic oligonucleotide
acctcttttagctactacctgaatgctgtacttgactggggtgaatcattgtttcatgct

SEQ ID NO: 313382 - DNA, 60 bp, Artificial
  Synthetic oligonucleotide
acctgaaagaccaggtgtgattatgaccggaacggataatgcaaacatatggatggcggc

SEQ ID NO: 313383 - DNA, 60 bp, Artificial
  Synthetic oligonucleotide
acctgaacacacgcatagaattctacgatggtcttgaagaactagcgaacgaacagctta

SEQ ID NO: 313384 - DNA, 54 bp, Artificial
  Synthetic oligonucleotide
acctgaaccccccgagcttaaatctctatcctttcaaactagatcccctgacac

SEQ ID NO: 313385 - DNA, 55 bp, Artificial
  Synthetic oligonucleotide
acctgaacctgggagggcgtcaaactgctcgcaccctaatgtataactttccaac

SEQ ID NO: 313386 - DNA, 60 bp, Artificial
  Synthetic oligonucleotide
acctgaacgagacccgcttttctgacgatattgaacaacaagctgacaacatgatcactg

SEQ ID NO: 313387 - DNA, 55 bp, Artificial
  Synthetic oligonucleotide
acctgaagaaagatgtgggagacgtgctcttcgccaactatgctcagatcatgca

SEQ ID NO: 313388 - DNA, 56 bp, Artificial
  Synthetic oligonucleotide
acctgaagagacgggcgacgtccctgcggcggagcgcgtccctcacctcttcgttc

SEQ ID NO: 313389 - DNA, 60 bp, Artificial
  Synthetic oligonucleotide
acctgaagtcctcgtggtgtgagtcggtgtacatgatgtggatgaggttcttgatcccct

SEQ ID NO: 313390 - DNA, 55 bp, Artificial
  Synthetic oligonucleotide
acctgaatggtttggatcagctatacgaccacaatcccaagcggacagacgttac

SEQ ID NO: 313391 - DNA, 53 bp, Artificial
  Synthetic oligonucleotide
acctgacaaccccacctgcaacccccttttgttgctggaatcctaaagttcta

SEQ ID NO: 313392 - DNA, 55 bp, Artificial
  Synthetic oligonucleotide
acctgacaatgcccctccccgcgtagtgccagccgcgttggacgcttcatcgggg

SEQ ID NO: 313393 - DNA, 54 bp, Artificial
  Synthetic oligonucleotide
acctgacaccatatctttcacatggcaggtatgccgtaaagagggacgctacgt

SEQ ID NO: 313394 - DNA, 55 bp, Artificial
  Synthetic oligonucleotide
acctgacactgtaaatgaccatcctaatgagttctatgcagcccctaagaatggc

SEQ ID NO: 313395 - DNA, 59 bp, Artificial
  Synthetic oligonucleotide
acctgaccagaatgtttgataacctaccgcaatcctgttcagtgaacaacacacaccat

SEQ ID NO: 313396 - DNA, 55 bp, Artificial
  Synthetic oligonucleotide
acctgaccattgtggtggacaaaacagatccggcagactacagaggaggcacccc

SEQ ID NO: 313397 - DNA, 57 bp, Artificial
  Synthetic oligonucleotide
acctgaccccggaaaggggattcctgagtgcctatgctgtaagactaacatggtata

SEQ ID NO: 313398 - DNA, 51 bp, Artificial
  Synthetic oligonucleotide
acctgacccctcacagtgtcatggccgtcgccctagtggccgagccccact

SEQ ID NO: 313399 - DNA, 55 bp, Artificial
  Synthetic oligonucleotide
acctgaccgcgcattggcacgctttaggggcagctcaaacagcggcaggacgtac

SEQ ID NO: 313400 - DNA, 57 bp, Artificial
  Synthetic oligonucleotide
acctgacctgacagttgaagcgttgtctaagtaccctatacctcaatctatactttg

SEQ ID NO: 313401 - DNA, 55 bp, Artificial
  Synthetic oligonucleotide
acctgactgaggccgtcgcaaacttctttggcgctctaggtaatctcggtggagc

SEQ ID NO: 313402 - DNA, 54 bp, Artificial
  Synthetic oligonucleotide
acctgactgcgacctgcgtggttaccgttcgataagctgaaaccaaaccccttg

SEQ ID NO: 313403 - DNA, 60 bp, Artificial
  Synthetic oligonucleotide
acctgagagtatcaagcttaatcagggggacaagagtgattccaagaggacaactgtcca

SEQ ID NO: 313404 - DNA, 60 bp, Artificial
  Synthetic oligonucleotide
acctgagagtgtcaagcttcatcagaggaacgagggtggtcccaaggggacagctgtcca

SEQ ID NO: 313405 - DNA, 55 bp, Artificial
  Synthetic oligonucleotide
acctgagagtgtcaagcttcatcagaggaataaaagtggttccgagaggccaatt

SEQ ID NO: 313406 - DNA, 60 bp, Artificial
  Synthetic oligonucleotide
acctgagagtgtcaagcttcatcagagggactagagtggttccaagaggacaattgtcca

SEQ ID NO: 313407 - DNA, 55 bp, Artificial
  Synthetic oligonucleotide
acctgagatccccgcgttcgggaggatggagtgaggcgctttaggtggtacccac

SEQ ID NO: 313408 - DNA, 55 bp, Artificial
  Synthetic oligonucleotide
acctgagcacaaaactagccggacacacgtaagttgcgagtaccggaagttcagc

SEQ ID NO: 313409 - DNA, 58 bp, Artificial
  Synthetic oligonucleotide
acctgagcacccttgagcttcggctcgaaactcagattcaaaactagcaaggagtaag

SEQ ID NO: 313410 - DNA, 50 bp, Artificial
  Synthetic oligonucleotide
acctgagctatccaccgtcaggcagccggatgaggtaaacacagcattta

SEQ ID NO: 313411 - DNA, 52 bp, Artificial
  Synthetic oligonucleotide
acctgagctcacaacagtcggtcaaccacctgaagctaacacggcctttagt

SEQ ID NO: 313412 - DNA, 60 bp, Artificial
  Synthetic oligonucleotide
acctgagcttccgaacgagatctggaagctgccgcagtacgcctacttccagtatcaggg

SEQ ID NO: 313413 - DNA, 56 bp, Artificial
  Synthetic oligonucleotide
acctgaggaacatcctgcagacccgcggatactggccccagggaccaccaccgtac

SEQ ID NO: 313414 - DNA, 51 bp, Artificial
  Synthetic oligonucleotide
acctgaggaccccgcgaccggaggatagggttttgcctttggggaccacgc

SEQ ID NO: 313415 - DNA, 53 bp, Artificial
  Synthetic oligonucleotide
acctgaggaccccgcgaccggtgtacgcttttgcttatggacccaccttatct

SEQ ID NO: 313416 - DNA, 53 bp, Artificial
  Synthetic oligonucleotide
acctgaggaccccgcgaccggttcatgcttttgcttttggagttggacccacc

SEQ ID NO: 313417 - DNA, 54 bp, Artificial
  Synthetic oligonucleotide
acctgaggacccgcgccggtgtcccgtctctaagaagtggtcccacaggtgtcg

SEQ ID NO: 313418 - DNA, 57 bp, Artificial
  Synthetic oligonucleotide
acctgaggacccgcgccggtgtctcgtgctcttaatgtggtcccgctcgtgacgtgg

SEQ ID NO: 313419 - DNA, 55 bp, Artificial
  Synthetic oligonucleotide
acctgaggataagtctcctagagggaactcattacatactaaggaatgtcccctc

SEQ ID NO: 313420 - DNA, 52 bp, Artificial
  Synthetic oligonucleotide
acctgaggctgctgaatatgctagcaatctgacagtacaggcaatgtatgtt

SEQ ID NO: 313421 - DNA, 55 bp, Artificial
  Synthetic oligonucleotide
acctgagggaagagtcctgcgtccccgtcatgacacctccatccgactggaccag

SEQ ID NO: 313422 - DNA, 52 bp, Artificial
  Synthetic oligonucleotide
acctgagggccgcgatttttttataaagtggtccctaccactaacaaatgtc

SEQ ID NO: 313423 - DNA, 60 bp, Artificial
  Synthetic oligonucleotide
acctgagggccgcgcttttggtgcccacctttcgaccaatcagaatgcgcgctgatagct

SEQ ID NO: 313424 - DNA, 50 bp, Artificial
  Synthetic oligonucleotide
acctgagggtctcctcccacgccgcttgggctacacccggggtaaccggg

SEQ ID NO: 313425 - DNA, 55 bp, Artificial
  Synthetic oligonucleotide
acctgagggtcttgtcgatacatcaataggcaataattttgagcccgtgaactcc

SEQ ID NO: 313426 - DNA, 56 bp, Artificial
  Synthetic oligonucleotide
acctgagggtgtcaagttttatcagagggacaaaagtgatcccaagaggacaattg

SEQ ID NO: 313427 - DNA, 58 bp, Artificial
  Synthetic oligonucleotide
acctgagtatgtcgaccgcgaatttgcggagggatactgttacatgaacttcttgtat

SEQ ID NO: 313428 - DNA, 57 bp, Artificial
  Synthetic oligonucleotide
acctgagtgccccgcgaccggtggacctggatacactcacgtgggtggtcccgctca

SEQ ID NO: 313429 - DNA, 52 bp, Artificial
  Synthetic oligonucleotide
acctgagtgccccgcgaccggtgtattgggattactttaacttttctgcttt

SEQ ID NO: 313430 - DNA, 55 bp, Artificial
  Synthetic oligonucleotide
acctgagtggaaacttgacatgccgactgctcaagtacaactaccccacacaacc

SEQ ID NO: 313431 - DNA, 58 bp, Artificial
  Synthetic oligonucleotide
acctgagtgtcagttgtggggagtgtgacccattcatacgtcttgcgatttaaactta

SEQ ID NO: 313432 - DNA, 55 bp, Artificial
  Synthetic oligonucleotide
acctgagttccctgcagtccgtaaggtatttactaaggccgatgctgtagcccgc

SEQ ID NO: 313433 - DNA, 55 bp, Artificial
  Synthetic oligonucleotide
acctgatacactcgggtacgatcttatccgagatttaatttctgtcttacgtgca

SEQ ID NO: 313434 - DNA, 55 bp, Artificial
  Synthetic oligonucleotide
acctgatctagaaaagctgatcagaataccgtttaaaggaaagataccagctgtc

SEQ ID NO: 313435 - DNA, 55 bp, Artificial
  Synthetic oligonucleotide
acctgatctcgttttacaactgcacaaaccagtaattgactcagaccacgtggtc

SEQ ID NO: 313436 - DNA, 60 bp, Artificial
  Synthetic oligonucleotide
acctgatgactgtattagctttaagaccgaaatacttagcacattgagccttacagctaa

SEQ ID NO: 313437 - DNA, 60 bp, Artificial
  Synthetic oligonucleotide
acctgatgggcctccttgctttcagcgatcaaaattcttgctgatggatgctctgaaact

SEQ ID NO: 313438 - DNA, 59 bp, Artificial
  Synthetic oligonucleotide
acctgattacgtggaagtctacttctgttgtggcatgaagcatttacaaaagtgcaaaa

SEQ ID NO: 313439 - DNA, 58 bp, Artificial
  Synthetic oligonucleotide
acctgatttgtttcggtgtagcattcactttaactatcattttgttgtctgtggtcat

SEQ ID NO: 313440 - DNA, 51 bp, Artificial
  Synthetic oligonucleotide
acctgcaacagtttgaaaaataaatgctgtctggactgattctctcacaaa

SEQ ID NO: 313441 - DNA, 57 bp, Artificial
  Synthetic oligonucleotide
acctgcaagcctttaagcgggcctgtggtgacgttgtagatctacgcgtcaacgagg

SEQ ID NO: 313442 - DNA, 56 bp, Artificial
  Synthetic oligonucleotide
acctgcaagttagtcggaatcaatatgagtaaaaagaagtcctatataaataggac

SEQ ID NO: 313443 - DNA, 56 bp, Artificial
  Synthetic oligonucleotide
acctgcacagcaggccatgtacagggtggtaacagagtgtagtaagtgtagccgtg

SEQ ID NO: 313444 - DNA, 60 bp, Artificial
  Synthetic oligonucleotide
acctgcagacttgataggcagctacactccagaatccctaaacgcctcacttccgaatga

SEQ ID NO: 313445 - DNA, 58 bp, Artificial
  Synthetic oligonucleotide
acctgcagcgacgcgttatccactactacaactgttgaacaactatcaaacaccccaa

SEQ ID NO: 313446 - DNA, 55 bp, Artificial
  Synthetic oligonucleotide
acctgcaggacctgaacataacttgcgtgttctgcaaaacagcactaacggaggc

SEQ ID NO: 313447 - DNA, 55 bp, Artificial
  Synthetic oligonucleotide
acctgccagctgtagtagcaaaagagatagtagcctgctgtgataagtgccaggt

SEQ ID NO: 313448 - DNA, 57 bp, Artificial
  Synthetic oligonucleotide
acctgccccaaatatgtaagagttaatagtctcaaactggcagtcggtctgaggaac

SEQ ID NO: 313449 - DNA, 60 bp, Artificial
  Synthetic oligonucleotide
acctgccccgagagcttattttccaggtgtggcaaaggtcctggagatactggcatgatg

SEQ ID NO: 313450 - DNA, 55 bp, Artificial
  Synthetic oligonucleotide
acctgcctgacatgtacaagtacactccagataatgtcaccgcccctactaacac

SEQ ID NO: 313451 - DNA, 55 bp, Artificial
  Synthetic oligonucleotide
acctgcgagtacatttactaatgacgtgacatttgaaggctggtggagcaatcag

SEQ ID NO: 313452 - DNA, 59 bp, Artificial
  Synthetic oligonucleotide
acctgcgatttgataggagggggaataaccacagattcaaatacaggatggaatctgac

SEQ ID NO: 313453 - DNA, 55 bp, Artificial
  Synthetic oligonucleotide
acctgcgcccatcgacctcgagcccgatactacctgtactggagcacccttgacc

SEQ ID NO: 313454 - DNA, 51 bp, Artificial
  Synthetic oligonucleotide
acctgcggcgctatgagggtgggtatacgggttatgtaagggcgcaggtaa

SEQ ID NO: 313455 - DNA, 53 bp, Artificial
  Synthetic oligonucleotide
acctgcggctcctcggacctttatttggtcacgaggcacgccgatgttatccc

SEQ ID NO: 313456 - DNA, 53 bp, Artificial
  Synthetic oligonucleotide
acctgcgtgttttcggggagcttcattttgtgggggcccaggtcccccataca

SEQ ID NO: 313457 - DNA, 59 bp, Artificial
  Synthetic oligonucleotide
acctgctaacgcgaggatggacaaatgaggatggctcaccccgctacaacccaacatgg

SEQ ID NO: 313458 - DNA, 60 bp, Artificial
  Synthetic oligonucleotide
acctgctaagaggcgagaggagctcacaagagggtgagtaaatttgctggcggtggccag

SEQ ID NO: 313459 - DNA, 60 bp, Artificial
  Synthetic oligonucleotide
acctgctagaagactctgataccccaattcccacgaccatcatggctaagaatgaagtct

SEQ ID NO: 313460 - DNA, 55 bp, Artificial
  Synthetic oligonucleotide
acctgctatcgttttcgtaccaaccataactggtgttgtattattacggtcatcc

SEQ ID NO: 313461 - DNA, 57 bp, Artificial
  Synthetic oligonucleotide
acctgctccacttgactgcctggggactttttggtgacattccggtgtgtgacaaac

SEQ ID NO: 313462 - DNA, 55 bp, Artificial
  Synthetic oligonucleotide
acctgctctggttcgctctggcgaacctccaaagatcagaaccgtgttcggagtc

SEQ ID NO: 313463 - DNA, 60 bp, Artificial
  Synthetic oligonucleotide
acctgctgcaccagtctcttgttggtaagcagtctccatttcaaaatgcctacaacgtca

SEQ ID NO: 313464 - DNA, 60 bp, Artificial
  Synthetic oligonucleotide
acctgctgcctatatctaattgacgcatggtcgattttcatacagctacgactgagtctg

SEQ ID NO: 313465 - DNA, 56 bp, Artificial
  Synthetic oligonucleotide
acctgctgttagtgcgggtcttaaggtttgcgtccatcaaacctccctacataata

SEQ ID NO: 313466 - DNA, 55 bp, Artificial
  Synthetic oligonucleotide
acctgcttacgcagatgcctacaacgagaagttgtagatgccccgttagggaagc

SEQ ID NO: 313467 - DNA, 57 bp, Artificial
  Synthetic oligonucleotide
acctgcttgtaccctccctaatgaagaaggcagccttcaccgacgcagggcacaaag

SEQ ID NO: 313468 - DNA, 55 bp, Artificial
  Synthetic oligonucleotide
acctgctttaacatccaggcgtggtactgttaggtatagtagattaggtcaaagg

SEQ ID NO: 313469 - DNA, 53 bp, Artificial
  Synthetic oligonucleotide
acctgctttatgcatgacgccctgatgtactactcccccggccagatctgtga

SEQ ID NO: 313470 - DNA, 53 bp, Artificial
  Synthetic oligonucleotide
acctggaaaataataaagcccttttggtggatcctttccctgttgtgcagaac

SEQ ID NO: 313471 - DNA, 57 bp, Artificial
  Synthetic oligonucleotide
acctggaacccggaaccttcgatcttggagggctatatgaagcaattgaggagtgcc

SEQ ID NO: 313472 - DNA, 50 bp, Artificial
  Synthetic oligonucleotide
acctggaagacgactgatgcgattcagaaaccaatagcgaacggggatga

SEQ ID NO: 313473 - DNA, 59 bp, Artificial
  Synthetic oligonucleotide
acctggaattcgcgctatcatgaggcactttggcgaattggcgtacaagtgggttcagt

SEQ ID NO: 313474 - DNA, 55 bp, Artificial
  Synthetic oligonucleotide
acctggagcagactggtagtatgatgtttgaagtgaatgtgtctggcaaggatta

SEQ ID NO: 313475 - DNA, 59 bp, Artificial
  Synthetic oligonucleotide
acctggaggctgaatgacactggtcgtgattgggacaagttttgggacctgatctggcg

SEQ ID NO: 313476 - DNA, 54 bp, Artificial
  Synthetic oligonucleotide
acctggagggaccaatgcaattcacaatgcccatggactttcaaggaacccaca

SEQ ID NO: 313477 - DNA, 57 bp, Artificial
  Synthetic oligonucleotide
acctggagtagggccagtgtccagggaactagcagctagaggaggagtaccaagttc

SEQ ID NO: 313478 - DNA, 50 bp, Artificial
  Synthetic oligonucleotide
acctggagtgctcgttaaacgttgtccagaaccaaaaaagaaacgtttcg

SEQ ID NO: 313479 - DNA, 56 bp, Artificial
  Synthetic oligonucleotide
acctggagttggcattttgaaggtcgttttgctatcgggtgataccccaattgctc

SEQ ID NO: 313480 - DNA, 56 bp, Artificial
  Synthetic oligonucleotide
acctggattgcacagcacgattggtggtattcctcctttaatttgaaccggctttc

SEQ ID NO: 313481 - DNA, 54 bp, Artificial
  Synthetic oligonucleotide
acctggattgcagaggaagatagtgggtatcccacctttaatttgaaccggctt

SEQ ID NO: 313482 - DNA, 56 bp, Artificial
  Synthetic oligonucleotide
acctggattgcagaggaagattgttgggattccacctttaatttgaattggcttcc

SEQ ID NO: 313483 - DNA, 56 bp, Artificial
  Synthetic oligonucleotide
acctggcacctatgaaccagcctatcttggtggtaaggaccccagagtcaagggtg

SEQ ID NO: 313484 - DNA, 50 bp, Artificial
  Synthetic oligonucleotide
acctggcacctatgatgacaactcagactacaatttggccgtcatttact

SEQ ID NO: 313485 - DNA, 51 bp, Artificial
  Synthetic oligonucleotide
acctggcagaacgacgaggggaaacacttacccacaaaaggaaactgggac

SEQ ID NO: 313486 - DNA, 60 bp, Artificial
  Synthetic oligonucleotide
acctggcagatgaggctagaagttccccactggcgacagtgttctagcctgcgtggctgc

SEQ ID NO: 313487 - DNA, 59 bp, Artificial
  Synthetic oligonucleotide
acctggcaggttcagaactgcagtctgtggattatacccagcccaggttaaagcaagga

SEQ ID NO: 313488 - DNA, 57 bp, Artificial
  Synthetic oligonucleotide
acctggcatcatcaccacctcccacacccaccctaaccaatccaaaaatctcgtcaa

SEQ ID NO: 313489 - DNA, 60 bp, Artificial
  Synthetic oligonucleotide
acctggccataaagcaagagttctggcggaagcaatgagccaaatgacaaatccaactac

SEQ ID NO: 313490 - DNA, 55 bp, Artificial
  Synthetic oligonucleotide
acctggcccgtgatgtccaatagcccaaacaacgtgttgaacattgaggggtgtc

SEQ ID NO: 313491 - DNA, 60 bp, Artificial
  Synthetic oligonucleotide
acctggccgattcaggactgcaatttgtggattatacccagctcaggtcaaagcaagaaa

SEQ ID NO: 313492 - DNA, 50 bp, Artificial
  Synthetic oligonucleotide
acctggcctggtggtttggcaatgtagctccgtgtgcggctcttgacggc

SEQ ID NO: 313493 - DNA, 54 bp, Artificial
  Synthetic oligonucleotide
acctggctatcaaggccggggcacaaaatttttagttggggaagtgtatgctag

SEQ ID NO: 313494 - DNA, 60 bp, Artificial
  Synthetic oligonucleotide
acctggctattatgaaacagttcacccatgtaatgtcttttgtgtgctatctggcccagg

SEQ ID NO: 313495 - DNA, 51 bp, Artificial
  Synthetic oligonucleotide
acctggctccccggcgagacaaattactcaggatcattttctctctctatg

SEQ ID NO: 313496 - DNA, 55 bp, Artificial
  Synthetic oligonucleotide
acctggctgagataaggaaagcggtggagcgatcatctaaagacttcgtccccat

SEQ ID NO: 313497 - DNA, 54 bp, Artificial
  Synthetic oligonucleotide
acctggcttggttccgaaattgacaacgggagtcgctcacttgaggaggtcccc

SEQ ID NO: 313498 - DNA, 54 bp, Artificial
  Synthetic oligonucleotide
acctggcttttagtatttggcttccgtccttttcggacgtgcatagaccacgtc

SEQ ID NO: 313499 - DNA, 58 bp, Artificial
  Synthetic oligonucleotide
acctgggaaagactaggggatttgctgctctggacttccggctctcggcacagaacgc

SEQ ID NO: 313500 - DNA, 55 bp, Artificial
  Synthetic oligonucleotide
acctgggaaggtaccaacgtcccgggcacgatgctctaccacgtccggctcaaca

SEQ ID NO: 313501 - DNA, 52 bp, Artificial
  Synthetic oligonucleotide
acctgggacaggatcgggatccaacaggggtagaaccaggggaccacctaaa

SEQ ID NO: 313502 - DNA, 60 bp, Artificial
  Synthetic oligonucleotide
acctgggacgagtactgctcatatgtggctaagattaatcctgcaacgctagaattcatt

SEQ ID NO: 313503 - DNA, 55 bp, Artificial
  Synthetic oligonucleotide
acctgggacgtatcaacatccaaacaagaagtcccaggcttcgaacaggttggga

SEQ ID NO: 313504 - DNA, 60 bp, Artificial
  Synthetic oligonucleotide
acctgggagatggttcatgcgcgccgctcaagcagtaactgcagtagtgtgcggtccaga

SEQ ID NO: 313505 - DNA, 60 bp, Artificial
  Synthetic oligonucleotide
acctgggcctagtaatgcgcaacatacagaggctatcaccactgatagaggaatattgtt

SEQ ID NO: 313506 - DNA, 55 bp, Artificial
  Synthetic oligonucleotide
acctgggctcatagggttctcgctcatgcctcggtaccagacccacaggttgccc

SEQ ID NO: 313507 - DNA, 54 bp, Artificial
  Synthetic oligonucleotide
acctggggtcgcttatctggctccgggtggggtaccctggtggtagctgcttta

SEQ ID NO: 313508 - DNA, 60 bp, Artificial
  Synthetic oligonucleotide
acctgggtaccccaaatgcgagctccatgatagcgagcgtgattacctcgagtgcaatgg

SEQ ID NO: 313509 - DNA, 56 bp, Artificial
  Synthetic oligonucleotide
acctgggtagctggtaattatccctatagtgaggttgttacgttaacagtatgcga

SEQ ID NO: 313510 - DNA, 58 bp, Artificial
  Synthetic oligonucleotide
acctgggtgggagctaatttgcaagatccagcatctagggacctagttgttacttatg

SEQ ID NO: 313511 - DNA, 55 bp, Artificial
  Synthetic oligonucleotide
acctgggtgggtaataatttggaagatccagcatccagggatctagtaagtttaa

SEQ ID NO: 313512 - DNA, 54 bp, Artificial
  Synthetic oligonucleotide
acctgggtgggtaataatttgggaagagagactgtacttgaatatttggtctct

SEQ ID NO: 313513 - DNA, 53 bp, Artificial
  Synthetic oligonucleotide
acctgggtgggtaataatttgggccttacttttggaagagagactgtacttga

SEQ ID NO: 313514 - DNA, 53 bp, Artificial
  Synthetic oligonucleotide
acctgggtgggtaataatttgggtttaaagatcaggcaactattgtggtttca

SEQ ID NO: 313515 - DNA, 54 bp, Artificial
  Synthetic oligonucleotide
acctgggtgggtagtaatttagaagatccaacatccagggacctagtagtcagt

SEQ ID NO: 313516 - DNA, 54 bp, Artificial
  Synthetic oligonucleotide
acctggtagccttttgcgcagcgtggtacgtgcggggtaaacttgtcccgctag

SEQ ID NO: 313517 - DNA, 60 bp, Artificial
  Synthetic oligonucleotide
acctggtatatgttaggttgcaaccaatctttgattgattcgttgcatagcaagtctggt

SEQ ID NO: 313518 - DNA, 60 bp, Artificial
  Synthetic oligonucleotide
acctggtattcctcacctaggtttatgtgtagtacaggtgcctcgtgcatcatgaggatg

SEQ ID NO: 313519 - DNA, 60 bp, Artificial
  Synthetic oligonucleotide
acctggtcccagtactctaatcctgcatttgatgtggtgcccggcagtgataatgctttg

SEQ ID NO: 313520 - DNA, 59 bp, Artificial
  Synthetic oligonucleotide
acctggtctagtggaagttcagcagagtgagtattaccccaagagatatcagtcccacg

SEQ ID NO: 313521 - DNA, 60 bp, Artificial
  Synthetic oligonucleotide
acctggtgcataatgctgctgagctggataagatacagatgatgataccctttagtgaac

SEQ ID NO: 313522 - DNA, 54 bp, Artificial
  Synthetic oligonucleotide
acctggtggatagggatagaacatacaactgggataccttataaccctcagagt

SEQ ID NO: 313523 - DNA, 54 bp, Artificial
  Synthetic oligonucleotide
acctggtgtccctcttgttgaggggactacaactgtacggactttccatcgtgt

SEQ ID NO: 313524 - DNA, 55 bp, Artificial
  Synthetic oligonucleotide
acctggttccattcctggtctatgatgtcaacgagctccggcggacagacgatct

SEQ ID NO: 313525 - DNA, 55 bp, Artificial
  Synthetic oligonucleotide
acctggtttccacccaaccccagagatgcacatcccaggtgaagtgaagaacctc

SEQ ID NO: 313526 - DNA, 51 bp, Artificial
  Synthetic oligonucleotide
acctgtaacgagcaattagacagctcagactcagaggatgagcgtgagcaa

SEQ ID NO: 313527 - DNA, 51 bp, Artificial
  Synthetic oligonucleotide
acctgtaagcgattgttatgtgtcatacataatgccaattgctgacccaat

SEQ ID NO: 313528 - DNA, 60 bp, Artificial
  Synthetic oligonucleotide
acctgtaagttgtgactcgtcgcagcttgcgtcatctaccgtccactcttactcagctga

SEQ ID NO: 313529 - DNA, 58 bp, Artificial
  Synthetic oligonucleotide
acctgtactcaaagaggcactagtcaattgcccttacgcactaaccgatctagaagcc

SEQ ID NO: 313530 - DNA, 60 bp, Artificial
  Synthetic oligonucleotide
acctgtactcagcaattcgtgtgggaacagttgtgactgcgtatgaagactgctcagggc

SEQ ID NO: 313531 - DNA, 58 bp, Artificial
  Synthetic oligonucleotide
acctgtactgacctgcatgtcaattagaagttgtatggctagagtgtttacaagtagg

SEQ ID NO: 313532 - DNA, 60 bp, Artificial
  Synthetic oligonucleotide
acctgtagggcccactgacgaggacgcacatcatgctgagggtgacacagaggatacacc

SEQ ID NO: 313533 - DNA, 54 bp, Artificial
  Synthetic oligonucleotide
acctgtataacagtgcccgcgcttggtggagtcgcgtttgtccacttggaaatc

SEQ ID NO: 313534 - DNA, 55 bp, Artificial
  Synthetic oligonucleotide
acctgtatgctcagaatgaatggggattcataccagattggcaagaatacacttc

SEQ ID NO: 313535 - DNA, 60 bp, Artificial
  Synthetic oligonucleotide
acctgtatgtctgcggatttggaggttatcaccagcacatgggtcctcgtgggtggagtc

SEQ ID NO: 313536 - DNA, 60 bp, Artificial
  Synthetic oligonucleotide
acctgtcacgatcgaaggccttaccgaagatctgatcgctcagtcggccgtccgcaccat

SEQ ID NO: 313537 - DNA, 55 bp, Artificial
  Synthetic oligonucleotide
acctgtccaccccggggctacctgtctgccaagaccacctagacttctgggagag

SEQ ID NO: 313538 - DNA, 56 bp, Artificial
  Synthetic oligonucleotide
acctgtccgtcaccaaagcgcgcggggaggcagggtctcggggcatcgtgcacatt

SEQ ID NO: 313539 - DNA, 55 bp, Artificial
  Synthetic oligonucleotide
acctgtccttgcggattaaccatttataacgtagttcgtgatggcgtgtagaggc

SEQ ID NO: 313540 - DNA, 57 bp, Artificial
  Synthetic oligonucleotide
acctgtctcaatttcccctgggcagaaagtttttgctgcagctaggtgtacgttctc

SEQ ID NO: 313541 - DNA, 54 bp, Artificial
  Synthetic oligonucleotide
acctgtctggattacaaagttttgtagattatgagtaaaaccactaacaaatgg

SEQ ID NO: 313542 - DNA, 55 bp, Artificial
  Synthetic oligonucleotide
acctgtctttaatcccgagtggcaaactccctcctttcctcacattcatttacag

SEQ ID NO: 313543 - DNA, 57 bp, Artificial
  Synthetic oligonucleotide
acctgtctttaatcctgactggcaaactccctcttttcctcacattcatttgaaaga

SEQ ID NO: 313544 - DNA, 58 bp, Artificial
  Synthetic oligonucleotide
acctgtgatccccaccgtcacgtcaccttctcgttcatccgcggaactccagacgatc

SEQ ID NO: 313545 - DNA, 55 bp, Artificial
  Synthetic oligonucleotide
acctgtgatgcacgaccgcccgaatgttcagcagagagggggtgatcctgtcagc

SEQ ID NO: 313546 - DNA, 59 bp, Artificial
  Synthetic oligonucleotide
acctgtgcagaaagtgactcgactgagtgctccggtggctctcgcctaccgcgaggttt

SEQ ID NO: 313547 - DNA, 53 bp, Artificial
  Synthetic oligonucleotide
acctgtgccccctgttcctaagactgttggattgcctagccccattgtacttg

SEQ ID NO: 313548 - DNA, 55 bp, Artificial
  Synthetic oligonucleotide
acctgtgcgggtctgtcttccttgtcggccaactgtttaccctctctcccaggcg

SEQ ID NO: 313549 - DNA, 60 bp, Artificial
  Synthetic oligonucleotide
acctgtgctaaccagattgactatcacttgagtcatagtgaatgcagcagggggtctcat

SEQ ID NO: 313550 - DNA, 55 bp, Artificial
  Synthetic oligonucleotide
acctgtgctaattgtataattggcgtgtagaaccactttcttatccaacaatctg

SEQ ID NO: 313551 - DNA, 54 bp, Artificial
  Synthetic oligonucleotide
acctgtggacacatccggcgaggaaattccaaaacctcccccgagggacaatga

SEQ ID NO: 313552 - DNA, 51 bp, Artificial
  Synthetic oligonucleotide
acctgtggcgccccgccatgtcagatagtcccaggagattacaatagctct

SEQ ID NO: 313553 - DNA, 55 bp, Artificial
  Synthetic oligonucleotide
acctgtggcttcgccgacctcatggggtacattcccgtcataggggcaccgcttg

SEQ ID NO: 313554 - DNA, 60 bp, Artificial
  Synthetic oligonucleotide
acctgtgggcagatgacaccaggagtgtagactacaatgagagacttgacttcgaggctc

SEQ ID NO: 313555 - DNA, 53 bp, Artificial
  Synthetic oligonucleotide
acctgtgggccgcgcaaagtgttaaagtggtcccccctccactaactgacaaa

SEQ ID NO: 313556 - DNA, 53 bp, Artificial
  Synthetic oligonucleotide
acctgtgggtcgacgatcttttgtttataggcgcggtccaaaggtacgtgtta

SEQ ID NO: 313557 - DNA, 57 bp, Artificial
  Synthetic oligonucleotide
acctgttacatctggaacgggaatacgatcgcggtactgtcggggctgaatatatac

SEQ ID NO: 313558 - DNA, 60 bp, Artificial
  Synthetic oligonucleotide
acctgttaggaggtgaagatgatggcaatgcccttatagacattggtctgtttttcaaca

SEQ ID NO: 313559 - DNA, 55 bp, Artificial
  Synthetic oligonucleotide
acctgttatcctccggcctcacaactcctccggcaggtggtcggttatgctccgg

SEQ ID NO: 313560 - DNA, 53 bp, Artificial
  Synthetic oligonucleotide
acctgttcccactagtaccaccggctccggacttggagactcctcctcgtcgg

SEQ ID NO: 313561 - DNA, 51 bp, Artificial
  Synthetic oligonucleotide
acctgttcccggagtcggtatgatctatctgtacctgttctcgctactgtg

SEQ ID NO: 313562 - DNA, 53 bp, Artificial
  Synthetic oligonucleotide
acctgttgagaaacgtgttaattcttgaaccgtacctaatgtttgtgttgtag

SEQ ID NO: 313563 - DNA, 60 bp, Artificial
  Synthetic oligonucleotide
acctgttgccgctactgctgtgggtgatatctttatgcgctacgagattgagttcattga

SEQ ID NO: 313564 - DNA, 60 bp, Artificial
  Synthetic oligonucleotide
acctgttgcctgtattcgatgacgcaatggtcgattttcatacagctccgactaagcctc

SEQ ID NO: 313565 - DNA, 60 bp, Artificial
  Synthetic oligonucleotide
acctgttgcctgtattctatgacgcaatggtcgatcttcatgcagctccggctaagtcta

SEQ ID NO: 313566 - DNA, 60 bp, Artificial
  Synthetic oligonucleotide
acctgttggacccgtcaaagctgccatggttcgctgtgatatccttaagtccatcagaag

SEQ ID NO: 313567 - DNA, 54 bp, Artificial
  Synthetic oligonucleotide
acctgttggttcctacggattgttccggtttcgactggtcagtctccgactgga

SEQ ID NO: 313568 - DNA, 60 bp, Artificial
  Synthetic oligonucleotide
acctgtttagttccctgtatggaagcatctcatcgtccatctctaaatccgcatttgtag

SEQ ID NO: 313569 - DNA, 56 bp, Artificial
  Synthetic oligonucleotide
acctgtttgggaggcaatggttggttaggactgtgcaacacgctttaaccgtgcaa

SEQ ID NO: 313570 - DNA, 57 bp, Artificial
  Synthetic oligonucleotide
acctgttttcagagccaaaaacaagcacgcctgaacctgcatttaagagaccgcggc

SEQ ID NO: 313571 - DNA, 55 bp, Artificial
  Synthetic oligonucleotide
accttaaaacattaaaaatattaaataaatcaggtatagcagcagttgaagtaca

SEQ ID NO: 313572 - DNA, 55 bp, Artificial
  Synthetic oligonucleotide
accttaaacgatggatatatttacattcaacaggtaaagctagtattgaaggtgg

SEQ ID NO: 313573 - DNA, 54 bp, Artificial
  Synthetic oligonucleotide
accttaacctttcttattctgtagtattcaaagggcacagagcttttgtttgtc

SEQ ID NO: 313574 - DNA, 50 bp, Artificial
  Synthetic oligonucleotide
accttaactattttcggcgggactactaacttggaaaaacttccaggcaa

SEQ ID NO: 313575 - DNA, 55 bp, Artificial
  Synthetic oligonucleotide
accttaagaccatgcatgagatgagacaatttgaggcaggtaaataatgagacgt

SEQ ID NO: 313576 - DNA, 53 bp, Artificial
  Synthetic oligonucleotide
accttaagagagttgtgcttgatggttccgtggcgacccctttaaccagagtt

SEQ ID NO: 313577 - DNA, 54 bp, Artificial
  Synthetic oligonucleotide
accttaatttgggtgggcgtcaaacagcccgcactcttatgtacaactttccaa

SEQ ID NO: 313578 - DNA, 59 bp, Artificial
  Synthetic oligonucleotide
accttacacgcctgtagagcacgttgtgtttaaccctgctagtcgtgaccacatcactc

SEQ ID NO: 313579 - DNA, 54 bp, Artificial
  Synthetic oligonucleotide
accttacagaaagccgggccacagtaggagatttcaagttcacttttgggtcaa

SEQ ID NO: 313580 - DNA, 60 bp, Artificial
  Synthetic oligonucleotide
accttacagctatcctatattgattctttgtgctattctaagcaccattgggatgatgag

SEQ ID NO: 313581 - DNA, 54 bp, Artificial
  Synthetic oligonucleotide
accttaccggatgaccctaacagataactgttctagatcttataaggttctgaa

SEQ ID NO: 313582 - DNA, 55 bp, Artificial
  Synthetic oligonucleotide
accttacgtcacgcttcggtaatcggtacgttgaagcctaggactgtgacttata

SEQ ID NO: 313583 - DNA, 56 bp, Artificial
  Synthetic oligonucleotide
accttacgtcgtagttggtactacgcggcatagacgcagtttagtgtactacacac

SEQ ID NO: 313584 - DNA, 60 bp, Artificial
  Synthetic oligonucleotide
accttactcatgcgacaatatatttcaatgacataatgcgtaagtatcgaggaatatttc

SEQ ID NO: 313585 - DNA, 56 bp, Artificial
  Synthetic oligonucleotide
accttactgttaaaccaattggtttggcagttaagtatcagtcctgattcagagaa

SEQ ID NO: 313586 - DNA, 55 bp, Artificial
  Synthetic oligonucleotide
accttacttctactgtctactttagcagatgtgtatactgttcttcgacccgaat

SEQ ID NO: 313587 - DNA, 59 bp, Artificial
  Synthetic oligonucleotide
accttagattcacgagccgcgtgattaattgggtttgtcactgggatccagtctatcag

SEQ ID NO: 313588 - DNA, 60 bp, Artificial
  Synthetic oligonucleotide
accttagctgatgatcgtattaaggacttctatgctaaccccaatgctcttcgtgactat

SEQ ID NO: 313589 - DNA, 59 bp, Artificial
  Synthetic oligonucleotide
accttagggttcgagctctgttcggagttaatccgtatattcagagtcaggcagtatga

SEQ ID NO: 313590 - DNA, 51 bp, Artificial
  Synthetic oligonucleotide
accttagtctttgctttgcgttagctgttgtagtccgtagactctacaggc

SEQ ID NO: 313591 - DNA, 55 bp, Artificial
  Synthetic oligonucleotide
accttagtgaagcctcttagtgcattcctgaggccattcagggcgtttatgaggg

SEQ ID NO: 313592 - DNA, 54 bp, Artificial
  Synthetic oligonucleotide
accttagtgaggttgacgggacaccttttgtaccacttgagtcccctgcacctg

SEQ ID NO: 313593 - DNA, 55 bp, Artificial
  Synthetic oligonucleotide
accttatataagagcatcggtgctaggcttgggaacgagactgcgttcgctaccc

SEQ ID NO: 313594 - DNA, 60 bp, Artificial
  Synthetic oligonucleotide
accttatatgcagaaggctccaccggaatccacattgcactgccaatatttgctggaaca

SEQ ID NO: 313595 - DNA, 60 bp, Artificial
  Synthetic oligonucleotide
accttatcttgagtcgttcaatgagaggcgcccctcagcgcttcaataattcgagtttga

SEQ ID NO: 313596 - DNA, 56 bp, Artificial
  Synthetic oligonucleotide
accttatgaggtttcatccgggaaaacagagacgtcaaacactagtaggcgctgaa

SEQ ID NO: 313597 - DNA, 57 bp, Artificial
  Synthetic oligonucleotide
accttatgtttggacgtgtctacgtcacggaattcgtccaacatatattcagaagtc

SEQ ID NO: 313598 - DNA, 54 bp, Artificial
  Synthetic oligonucleotide
accttattggttacaaaaggcccagggacacaataatggtatatgttggggcaa

SEQ ID NO: 313599 - DNA, 57 bp, Artificial
  Synthetic oligonucleotide
accttatttcttatgtgctatggttagattactccatgtgttgaagtcaaagtttac

SEQ ID NO: 313600 - DNA, 60 bp, Artificial
  Synthetic oligonucleotide
accttcaagctgcaatccagacaacccactgagccacccgctataccaagcgtattcgct

SEQ ID NO: 313601 - DNA, 53 bp, Artificial
  Synthetic oligonucleotide
accttcaaggtttcccgctcttctaactattcgcctcgtggaggtatgggccc

SEQ ID NO: 313602 - DNA, 55 bp, Artificial
  Synthetic oligonucleotide
accttcaattctctgatccaaacagacagaaactcaggatagttgagtctagacc

SEQ ID NO: 313603 - DNA, 60 bp, Artificial
  Synthetic oligonucleotide
accttcaccgtcatgtagcatataaccaaaattcacaagtcatcggagtagtgcttgaag

SEQ ID NO: 313604 - DNA, 54 bp, Artificial
  Synthetic oligonucleotide
accttcacctgcgtcatcgtttcgcatgcggaggctccgattctgcatggaatc

SEQ ID NO: 313605 - DNA, 57 bp, Artificial
  Synthetic oligonucleotide
accttcacgtccacggcgtatcgatatatcgaatacgtcgtcaaaagcacttcaccc

SEQ ID NO: 313606 - DNA, 60 bp, Artificial
  Synthetic oligonucleotide
accttcagagtactgaagagagcatgtaactcgcctgaggccgccaccccagaggaacaa

SEQ ID NO: 313607 - DNA, 56 bp, Artificial
  Synthetic oligonucleotide
accttcaggctacgcatccaccatgcaccgcgagggtttcttgtgttgcaaggtga

SEQ ID NO: 313608 - DNA, 60 bp, Artificial
  Synthetic oligonucleotide
accttcagggattcctgaatgtccgaagcaatgcgagagctgccgcccttgaagagtcgc

SEQ ID NO: 313609 - DNA, 58 bp, Artificial
  Synthetic oligonucleotide
accttcagtggttagtccgcggaagtatgccgcatcgacgacggaccactcagatcgg

SEQ ID NO: 313610 - DNA, 60 bp, Artificial
  Synthetic oligonucleotide
accttcatatcatatatcgcaactgcggtaagtgaccttgccacattcgcccaaacggtc

SEQ ID NO: 313611 - DNA, 60 bp, Artificial
  Synthetic oligonucleotide
accttcatggatatctacggttcaacagcttccatcatttgcgccaatatcgaaacgagc

SEQ ID NO: 313612 - DNA, 54 bp, Artificial
  Synthetic oligonucleotide
accttcatgtttactggatccttcatggctatcggtaagatgctcatagcctat

SEQ ID NO: 313613 - DNA, 60 bp, Artificial
  Synthetic oligonucleotide
accttccaaatgcaatactatcaatgtggcgttacttcaaggctgatcttgagtttgaac

SEQ ID NO: 313614 - DNA, 56 bp, Artificial
  Synthetic oligonucleotide
accttccaagtattgggagacttgtacaacaagtgtctcaacatagacttacccaa

SEQ ID NO: 313615 - DNA, 56 bp, Artificial
  Synthetic oligonucleotide
accttccggtcagaggcaattaatgggaaggaattccaggaatcaacgatagacca

SEQ ID NO: 313616 - DNA, 53 bp, Artificial
  Synthetic oligonucleotide
accttcctctagggtgtagtgttgtgggataccctagagtacacgtaaaacac

SEQ ID NO: 313617 - DNA, 60 bp, Artificial
  Synthetic oligonucleotide
accttcctgagcttgctgccagatggttcgaggccaataggccgacctgcccaactctca

SEQ ID NO: 313618 - DNA, 54 bp, Artificial
  Synthetic oligonucleotide
accttccttctgtgtacgttctggtcaaaaagactagtatacccctgttggtga

SEQ ID NO: 313619 - DNA, 58 bp, Artificial
  Synthetic oligonucleotide
accttcgaaggcgtggtaattccgcagctcgagatccagatacgggaggaggataaga

SEQ ID NO: 313620 - DNA, 60 bp, Artificial
  Synthetic oligonucleotide
accttcgacgcaattcaagcaactcgtggtgcagtcgttgccaagtggtgggaaagcaga

SEQ ID NO: 313621 - DNA, 60 bp, Artificial
  Synthetic oligonucleotide
accttcgatagtgggcgtgaaccgtcacacgcgactcagtgtggatctacagaccattag

SEQ ID NO: 313622 - DNA, 52 bp, Artificial
  Synthetic oligonucleotide
accttcgattctccaaacggggaaaattcttccgagatgccgagtacttaac

SEQ ID NO: 313623 - DNA, 55 bp, Artificial
  Synthetic oligonucleotide
accttcgccactacggaaagcgtctcggctacacgtggatgttcctcgcggacgc

SEQ ID NO: 313624 - DNA, 60 bp, Artificial
  Synthetic oligonucleotide
accttcgtacggtgtttttgcagcggatgatatttccgctcaactcactgccgctatcac

SEQ ID NO: 313625 - DNA, 56 bp, Artificial
  Synthetic oligonucleotide
accttctaacgtcaacccgaatgatggaggcgaacgttctgatgtacttcgacgac

SEQ ID NO: 313626 - DNA, 56 bp, Artificial
  Synthetic oligonucleotide
accttctacatatgatccttctaagtttaaggaatataccaggcacgtggaggagt

SEQ ID NO: 313627 - DNA, 60 bp, Artificial
  Synthetic oligonucleotide
accttctagcttacctcaatgagcatgtgtgcgtcaacgccaaagatcatgagagaggtt

SEQ ID NO: 313628 - DNA, 53 bp, Artificial
  Synthetic oligonucleotide
accttctccccccggcgccattggacaacgcaagactgcaactgttccatcta

SEQ ID NO: 313629 - DNA, 54 bp, Artificial
  Synthetic oligonucleotide
accttctcgcctcgccggtataacacggtacaagactgcaattgctcgctatat

SEQ ID NO: 313630 - DNA, 55 bp, Artificial
  Synthetic oligonucleotide
accttctctctccaaaaactcaccgggacggccaaactgggtgattccggcatca

SEQ ID NO: 313631 - DNA, 55 bp, Artificial
  Synthetic oligonucleotide
accttctctctcctaaaactcaccggaacctccaaactggctgattccggtgtca

SEQ ID NO: 313632 - DNA, 54 bp, Artificial
  Synthetic oligonucleotide
accttcttaccggcgttccaaacagcatgcttcaaagcccccaggttgtaccca

SEQ ID NO: 313633 - DNA, 58 bp, Artificial
  Synthetic oligonucleotide
accttcttccaagaggtgccccatatcattgaggaggtgatgaacattgttttgatca

SEQ ID NO: 313634 - DNA, 59 bp, Artificial
  Synthetic oligonucleotide
accttctttagtcccagacactattggaccatctgacataatacctgttgacactctta

SEQ ID NO: 313635 - DNA, 55 bp, Artificial
  Synthetic oligonucleotide
accttgaagagtaacgcacagcggatagtttatgatgatgagttgcagatgcacg

SEQ ID NO: 313636 - DNA, 60 bp, Artificial
  Synthetic oligonucleotide
accttgacataaccataactacatatctatcatgcctccaaatcatcggaggctttctta

SEQ ID NO: 313637 - DNA, 57 bp, Artificial
  Synthetic oligonucleotide
accttgaccataactcttagggtaggttgaagccttacgtctatgatgaacttcaga

SEQ ID NO: 313638 - DNA, 58 bp, Artificial
  Synthetic oligonucleotide
accttgaccggaatagagtggctcctcgagggtgatgaatgttgcattttttagtgcc

SEQ ID NO: 313639 - DNA, 59 bp, Artificial
  Synthetic oligonucleotide
accttgactgatgaccaggtagaagttgtcactgcccaagaattagtggaaccgcaaca

SEQ ID NO: 313640 - DNA, 58 bp, Artificial
  Synthetic oligonucleotide
accttgagatttcgtgttccttggatttctgacacaccttatcgagtgaataggtaca

SEQ ID NO: 313641 - DNA, 53 bp, Artificial
  Synthetic oligonucleotide
accttgaggcaagcgaaggtgcaaggccctgcctttgagttcgcagtagctat

SEQ ID NO: 313642 - DNA, 55 bp, Artificial
  Synthetic oligonucleotide
accttgatgatgagcccgtcggtgtgcaccgtttggaacgtgcgcggctgactgc

SEQ ID NO: 313643 - DNA, 60 bp, Artificial
  Synthetic oligonucleotide
accttgattggcacgtgagtagagtggctcggtgagggtgacgaatgccgcattctttaa

SEQ ID NO: 313644 - DNA, 59 bp, Artificial
  Synthetic oligonucleotide
accttgattggtacttgagaacagtggctcgtggagggtgacgaaggttgcattcttga

SEQ ID NO: 313645 - DNA, 53 bp, Artificial
  Synthetic oligonucleotide
accttgcagaaatgtggtttggaggttatccgaccatgttgtttgtgccgcgg

SEQ ID NO: 313646 - DNA, 54 bp, Artificial
  Synthetic oligonucleotide
accttgcagtggaactcgtaccagtagtgatgggggggattggtttggtgttag

SEQ ID NO: 313647 - DNA, 55 bp, Artificial
  Synthetic oligonucleotide
accttgcataggcctgccttaactgcacgtaggtcaggtgttagatatagtcgca

SEQ ID NO: 313648 - DNA, 60 bp, Artificial
  Synthetic oligonucleotide
accttgcattatcaaatgcgagttacttacaaagataggaatgcagcctgtcgcaacctt

SEQ ID NO: 313649 - DNA, 52 bp, Artificial
  Synthetic oligonucleotide
accttgccagaaatgagtaagctgggcaaatatgtttcagtcgactacggta

SEQ ID NO: 313650 - DNA, 56 bp, Artificial
  Synthetic oligonucleotide
accttgccatggctttgaaaccagacggtgagggagagttcccttactcgtgtgat

SEQ ID NO: 313651 - DNA, 60 bp, Artificial
  Synthetic oligonucleotide
accttgccctaagccacacagactcaaccacatgggcatctgctcatgtggtctgtataa

SEQ ID NO: 313652 - DNA, 60 bp, Artificial
  Synthetic oligonucleotide
accttgccgggataccatccacctgcagaattagatcctcatgagtgttctgcataatga

SEQ ID NO: 313653 - DNA, 57 bp, Artificial
  Synthetic oligonucleotide
accttgccttgcggctaccagctccatagggttcacgtaattacactacgcttagga

SEQ ID NO: 313654 - DNA, 52 bp, Artificial
  Synthetic oligonucleotide
accttgcggggctgtccacgttaccgggaaaccccgccgtagcctcaatgat

SEQ ID NO: 313655 - DNA, 59 bp, Artificial
  Synthetic oligonucleotide
accttgcgtatgaggggtatgagtgttttcggttctagcaacatcacagtaatgacaag

SEQ ID NO: 313656 - DNA, 60 bp, Artificial
  Synthetic oligonucleotide
accttgctgagaatgtagtatcagacgtgtaagttatattgcaatcaatacctacagcac

SEQ ID NO: 313657 - DNA, 55 bp, Artificial
  Synthetic oligonucleotide
accttggaaaggaacaggatccaacaggggttgaacctggagaccatctgaagga

SEQ ID NO: 313658 - DNA, 55 bp, Artificial
  Synthetic oligonucleotide
accttggaaccgcacagggatataactcaaagcggaatggtagtaaactacttgc

SEQ ID NO: 313659 - DNA, 56 bp, Artificial
  Synthetic oligonucleotide
accttggaatactagttggagtaataaatctctggataccatttggggtaacatga

SEQ ID NO: 313660 - DNA, 58 bp, Artificial
  Synthetic oligonucleotide
accttggacatcttgttcaaccggtaaaagagatactggctcaactcgtgatgcccaa

SEQ ID NO: 313661 - DNA, 60 bp, Artificial
  Synthetic oligonucleotide
accttggatcaatacagaccagctatggcgctgccagttgtctttattaatcacaccgtt

SEQ ID NO: 313662 - DNA, 60 bp, Artificial
  Synthetic oligonucleotide
accttggatttcatatgatcgatcattggagctattgagtgtgtacgcaaattcgcagtt

SEQ ID NO: 313663 - DNA, 52 bp, Artificial
  Synthetic oligonucleotide
accttgggagcatgatggtacgtatgcgaggatgactcaaattatactgtcc

SEQ ID NO: 313664 - DNA, 59 bp, Artificial
  Synthetic oligonucleotide
accttgggctcagaatccaggatgtccacacaagtaaattgtggtgtgtccctaagcaa

SEQ ID NO: 313665 - DNA, 57 bp, Artificial
  Synthetic oligonucleotide
accttggggctcaagtcaagatgtccgcaaagataattatgtgggcctaacgaccta

SEQ ID NO: 313666 - DNA, 53 bp, Artificial
  Synthetic oligonucleotide
accttggtaccacccaaccaaagagatatcaataccaggtcaggttaggaatt

SEQ ID NO: 313667 - DNA, 56 bp, Artificial
  Synthetic oligonucleotide
accttgtaaggtccaatccttcgaggcgaaacatgatatttcgcatctcggtaagg

SEQ ID NO: 313668 - DNA, 56 bp, Artificial
  Synthetic oligonucleotide
accttgtacctccatgttgcggccaagagagcaaaagcgtatcaaaatgcgcttaa

SEQ ID NO: 313669 - DNA, 55 bp, Artificial
  Synthetic oligonucleotide
accttgtcaaacttccggattgacatatatatcttcttattgtcccagagggatt

SEQ ID NO: 313670 - DNA, 55 bp, Artificial
  Synthetic oligonucleotide
accttgtcaaggtcttccattagctgaattcgcagctgctaggtttaaccttagc

SEQ ID NO: 313671 - DNA, 59 bp, Artificial
  Synthetic oligonucleotide
accttgtcaatcaacatcttgacaaaaatgggccaaacaccagcaaaatcaatggatgt

SEQ ID NO: 313672 - DNA, 54 bp, Artificial
  Synthetic oligonucleotide
accttgtccgtaagtacaaccaagggatttgcctcagcactcgtccctaaagtg

SEQ ID NO: 313673 - DNA, 59 bp, Artificial
  Synthetic oligonucleotide
accttgtctaaagtggccatcattatagccatcatgatagttttctccaacagagtctt

SEQ ID NO: 313674 - DNA, 55 bp, Artificial
  Synthetic oligonucleotide
accttgtggactcgaccgagcgggctaggagggcagctcaagcctgcctaagcat

SEQ ID NO: 313675 - DNA, 55 bp, Artificial
  Synthetic oligonucleotide
acctttaaaccaacagtatcgactgcaaacatagcactcagttggagctcagtgg

SEQ ID NO: 313676 - DNA, 60 bp, Artificial
  Synthetic oligonucleotide
acctttaaatgctgtcatggggaagagtgctcacaaattgggctccatgctgccgcacct

SEQ ID NO: 313677 - DNA, 59 bp, Artificial
  Synthetic oligonucleotide
acctttaagatcccttatcaggcacccacgccgtatgtaccactatttgaagcgctgca

SEQ ID NO: 313678 - DNA, 60 bp, Artificial
  Synthetic oligonucleotide
acctttaaggggatagatctggatgaactaaatatggtggcttatggggatgatgtgctg

SEQ ID NO: 313679 - DNA, 59 bp, Artificial
  Synthetic oligonucleotide
acctttaatgtgccggtacccaatgcaatctatgtcaaaagacgttgcatccttcctca

SEQ ID NO: 313680 - DNA, 55 bp, Artificial
  Synthetic oligonucleotide
acctttacaggttcctggatatgatttggaacctgggataataaatttgagagag

SEQ ID NO: 313681 - DNA, 58 bp, Artificial
  Synthetic oligonucleotide
acctttacccaccataatcgaccaaggcttgtgtgatgtgcaaactcccgagcaagaa

SEQ ID NO: 313682 - DNA, 50 bp, Artificial
  Synthetic oligonucleotide
acctttaccggtttggtcatgctgctcttttatatatcatgatgatgatt

SEQ ID NO: 313683 - DNA, 55 bp, Artificial
  Synthetic oligonucleotide
acctttagcagatactaaagtgggactactggacgatgccacctatcagtgctgg

SEQ ID NO: 313684 - DNA, 55 bp, Artificial
  Synthetic oligonucleotide
acctttaggcagatatgtgaagccttcgccccggaagccagggatgggttggtta

SEQ ID NO: 313685 - DNA, 55 bp, Artificial
  Synthetic oligonucleotide
acctttagggtagctttgaggattccatcaaggtttctggctgaaaccctgatgg

SEQ ID NO: 313686 - DNA, 59 bp, Artificial
  Synthetic oligonucleotide
acctttatcaaggaggaaacattcgagcaattggagcaggcaggactccggtatattca

SEQ ID NO: 313687 - DNA, 58 bp, Artificial
  Synthetic oligonucleotide
acctttatccactatctgaaccatgtatattggataaaacggattctaggtaccagca

SEQ ID NO: 313688 - DNA, 60 bp, Artificial
  Synthetic oligonucleotide
acctttatgtagagcgcagcaatgccttcagcaactgctatccatatgacgtgccagact

SEQ ID NO: 313689 - DNA, 51 bp, Artificial
  Synthetic oligonucleotide
acctttattgaacagtcccgtaataaccgtgttgaacaaaagaacgatccc

SEQ ID NO: 313690 - DNA, 60 bp, Artificial
  Synthetic oligonucleotide
acctttcaacctgggagatggttcatgcgtgccgctcaagcggtaactgcagtagtgtgc

SEQ ID NO: 313691 - DNA, 60 bp, Artificial
  Synthetic oligonucleotide
acctttcaggctcctctgccgatccatactgcggaactcctagccgcttgctttgctcgc

SEQ ID NO: 313692 - DNA, 50 bp, Artificial
  Synthetic oligonucleotide
acctttcccactgacggcttcttcgaggttgttagttgggtcccccgcct

SEQ ID NO: 313693 - DNA, 58 bp, Artificial
  Synthetic oligonucleotide
acctttccgaattattgtgatctgttcaatattgttatgagatctcgtaaaggaccaa

SEQ ID NO: 313694 - DNA, 54 bp, Artificial
  Synthetic oligonucleotide
acctttctatgaccagctgaaggggtctgacccccgcgagcctcgtacctttac

SEQ ID NO: 313695 - DNA, 52 bp, Artificial
  Synthetic oligonucleotide
acctttctcgcactccacgcacttgcccccgtatcgtgcctcgaaggtgtga

SEQ ID NO: 313696 - DNA, 60 bp, Artificial
  Synthetic oligonucleotide
acctttgagacaaatgattgaaaggggcccagtgcctcagcaccatcttcagatggcatc

SEQ ID NO: 313697 - DNA, 52 bp, Artificial
  Synthetic oligonucleotide
acctttgcaatgagcctgctatcatttatggggggacgggtgctctcgtttg

SEQ ID NO: 313698 - DNA, 58 bp, Artificial
  Synthetic oligonucleotide
acctttgccagcgtttaaatgcgtgccaggagaaaatactagactattatgaactgga

SEQ ID NO: 313699 - DNA, 50 bp, Artificial
  Synthetic oligonucleotide
acctttgcctttctctatctataagagaaggccttgtaactcagttgcaa

SEQ ID NO: 313700 - DNA, 55 bp, Artificial
  Synthetic oligonucleotide
acctttgcgatggatatatttgtctgctactccaactaaacatctgctcccttac

SEQ ID NO: 313701 - DNA, 55 bp, Artificial
  Synthetic oligonucleotide
acctttgctaaagtggctctgcggccggataaagtttacactattcgccgcactg

SEQ ID NO: 313702 - DNA, 60 bp, Artificial
  Synthetic oligonucleotide
acctttgctatgcattgcgtcattttgaccgcaatgattgttcaactcttaaggaaattc

SEQ ID NO: 313703 - DNA, 59 bp, Artificial
  Synthetic oligonucleotide
acctttggactaagatcaagatggccgcacaagtaattatgcctaccaagggatcttgc

SEQ ID NO: 313704 - DNA, 57 bp, Artificial
  Synthetic oligonucleotide
acctttggactaaggtccagatgtccacacaaataattatgtggacccatagaccta

SEQ ID NO: 313705 - DNA, 60 bp, Artificial
  Synthetic oligonucleotide
acctttggacttaaatcaagatgaccacacagataattgtgtggacccaatgatcgagcc

SEQ ID NO: 313706 - DNA, 57 bp, Artificial
  Synthetic oligonucleotide
acctttggacttaggtctagatgtccacataaataattatgtgggcctagagacctg

SEQ ID NO: 313707 - DNA, 59 bp, Artificial
  Synthetic oligonucleotide
acctttggagacagatccaggtgtccacatagataattatggggtcccagtgaacgagc

SEQ ID NO: 313708 - DNA, 55 bp, Artificial
  Synthetic oligonucleotide
acctttgggctcaggtccaggtgtccacataaataattgtgtgggcctaaagacc

SEQ ID NO: 313709 - DNA, 54 bp, Artificial
  Synthetic oligonucleotide
acctttggggtaccttataatccacagagccaaggggtagtggaagcgatgaac

SEQ ID NO: 313710 - DNA, 60 bp, Artificial
  Synthetic oligonucleotide
acctttgtctttggaagagaagaattggtgcgcagctacagggcagactttcatgcttgt

SEQ ID NO: 313711 - DNA, 58 bp, Artificial
  Synthetic oligonucleotide
acctttgtgactgctaaagggggttcgatatattatcttgaactgacagagttgcgag

SEQ ID NO: 313712 - DNA, 54 bp, Artificial
  Synthetic oligonucleotide
accttttacactgatgattcccggtacacccaagactacgctttccaggacagg

SEQ ID NO: 313713 - DNA, 58 bp, Artificial
  Synthetic oligonucleotide
accttttatctgtgatcgtgaggcaatgtagggccaaccgtcacccgatagacatagt

SEQ ID NO: 313714 - DNA, 59 bp, Artificial
  Synthetic oligonucleotide
accttttcaggcccgctcctggactgttggacaatctatgcaatccttggccgctctaa

SEQ ID NO: 313715 - DNA, 52 bp, Artificial
  Synthetic oligonucleotide
accttttgcaatcctgtgaattcttccaatgctgcagtgtcctttaccctag

SEQ ID NO: 313716 - DNA, 56 bp, Artificial
  Synthetic oligonucleotide
acctttttcaattttacgtacacgcgtgtcaggattatatgggttaccagcagcga

SEQ ID NO: 313717 - DNA, 53 bp, Artificial
  Synthetic oligonucleotide
acctttttcccctcttcggcatgaaacaaggattattcaagtggaaacgcgat

SEQ ID NO: 313718 - DNA, 57 bp, Artificial
  Synthetic oligonucleotide
acgaaaaacccatcgagtttgatgagcacgggaacccaatggagactctagatcaat

SEQ ID NO: 313719 - DNA, 53 bp, Artificial
  Synthetic oligonucleotide
acgaaaacagcgagcgggtagaaactaggctggcgcgcaaaaaccccaacgcc

SEQ ID NO: 313720 - DNA, 57 bp, Artificial
  Synthetic oligonucleotide
acgaaaaccacactgtactcatgcctctaaccctgtgtatgctactttgaaagttag

SEQ ID NO: 313721 - DNA, 60 bp, Artificial
  Synthetic oligonucleotide
acgaaaacgaactatgccagtgtgtgggctggtgaagagtccagaatggtgctagaacca

SEQ ID NO: 313722 - DNA, 52 bp, Artificial
  Synthetic oligonucleotide
acgaaaagatggggctactcccttaacttcatgggttatgtaattggaagtt

SEQ ID NO: 313723 - DNA, 55 bp, Artificial
  Synthetic oligonucleotide
acgaaaaggaaccggaggaaaccctacgcatgcttgaggacaacgtcatgagacc

SEQ ID NO: 313724 - DNA, 56 bp, Artificial
  Synthetic oligonucleotide
acgaaaagggtctgattccttctaaaggttatatgcatcttaagtggtgcttggtc

SEQ ID NO: 313725 - DNA, 58 bp, Artificial
  Synthetic oligonucleotide
acgaaaagtcacgtatgaaagagacatgaacgtgacggagtcaaatgtaatgaataaa

SEQ ID NO: 313726 - DNA, 55 bp, Artificial
  Synthetic oligonucleotide
acgaaaagtgtcgtgcccggctatcatgagagttccccaacgaaatttggccgca

SEQ ID NO: 313727 - DNA, 55 bp, Artificial
  Synthetic oligonucleotide
acgaaaatatccctgcttttcctctcacaaccggcgcgtgaggtgcgtgaataaa

SEQ ID NO: 313728 - DNA, 60 bp, Artificial
  Synthetic oligonucleotide
acgaaaatcagaaccctagaatgtttttggccatgatcacatatataaccagaaatcagc

SEQ ID NO: 313729 - DNA, 55 bp, Artificial
  Synthetic oligonucleotide
acgaaacaaaattctagagataagaaccaacctccagtactcagagcaaaacgta

SEQ ID NO: 313730 - DNA, 55 bp, Artificial
  Synthetic oligonucleotide
acgaaacaaatcaaaggctccgatcctttcagacataaacgaaacagttaatgac

SEQ ID NO: 313731 - DNA, 59 bp, Artificial
  Synthetic oligonucleotide
acgaaacagggcattggcctatcgggtaagtcagacagtagcagtgagacaagcgttaa

SEQ ID NO: 313732 - DNA, 56 bp, Artificial
  Synthetic oligonucleotide
acgaaaccctatactgggccactattgacgctcgcctctctctcgccacccccgaa

SEQ ID NO: 313733 - DNA, 54 bp, Artificial
  Synthetic oligonucleotide
acgaaacggattacgctgcacgtctggaagagtacgaagcgaacccgccgaagg

SEQ ID NO: 313734 - DNA, 58 bp, Artificial
  Synthetic oligonucleotide
acgaaactcagaaggaaatcgctgggcttcaatctatcacttcacgcgaaaatactaa

SEQ ID NO: 313735 - DNA, 52 bp, Artificial
  Synthetic oligonucleotide
acgaaactgcgcctgttccaaccattccccctcttgacacaaaaattgatct

SEQ ID NO: 313736 - DNA, 60 bp, Artificial
  Synthetic oligonucleotide
acgaaagactacaacgatggctagctatgcttactaataatcagcttagaagacaagtaa

SEQ ID NO: 313737 - DNA, 60 bp, Artificial
  Synthetic oligonucleotide
acgaaagcaatggcgcgatgctgagtgccagtggtcgaagtgtctaccagaccctcccac

SEQ ID NO: 313738 - DNA, 57 bp, Artificial
  Synthetic oligonucleotide
acgaaagcactttgaccgagcgcgtactgatagaggcgactgccgaggtaattgcca

SEQ ID NO: 313739 - DNA, 51 bp, Artificial
  Synthetic oligonucleotide
acgaaagcccaaggtacaccgacaggctcttatgattatcagggcttgaac

SEQ ID NO: 313740 - DNA, 55 bp, Artificial
  Synthetic oligonucleotide
acgaaaggaggaacaaatacctggaagagcatcccagtgcagggaaggacccgaa

SEQ ID NO: 313741 - DNA, 55 bp, Artificial
  Synthetic oligonucleotide
acgaaagtatttcagttcacaagagattctgcagttaagtcctcgtctgcagtct

SEQ ID NO: 313742 - DNA, 60 bp, Artificial
  Synthetic oligonucleotide
acgaaagtcgaggcagctatgactttagtagatgcgagacccataatagagttagcacct

SEQ ID NO: 313743 - DNA, 50 bp, Artificial
  Synthetic oligonucleotide
acgaaagttccaatcaatatcccggtaattgcggccatccgtataatatt

SEQ ID NO: 313744 - DNA, 54 bp, Artificial
  Synthetic oligonucleotide
acgaaagttgttagggacaaactagttggcgaacttggcaaatggcccactctg

SEQ ID NO: 313745 - DNA, 57 bp, Artificial
  Synthetic oligonucleotide
acgaaataacagccaacgaaaccgcgcgctcccttggcctcttcgaatcaagagcta

SEQ ID NO: 313746 - DNA, 52 bp, Artificial
  Synthetic oligonucleotide
acgaaatacgtagtacgcaactttccaaatggtacccgtaagttggccatag

SEQ ID NO: 313747 - DNA, 60 bp, Artificial
  Synthetic oligonucleotide
acgaaatagtgaaggctgtagagtcgaggtacgagattagtctggctaggttgatcatta

SEQ ID NO: 313748 - DNA, 60 bp, Artificial
  Synthetic oligonucleotide
acgaaatcgaggcacaattcgagtgtgctaggaggcatgtcaacaccattcgagcgagac

SEQ ID NO: 313749 - DNA, 56 bp, Artificial
  Synthetic oligonucleotide
acgaaatctaaggaagtcagtctaaaaggaacatgcacaattccaattaatgtgtt

SEQ ID NO: 313750 - DNA, 60 bp, Artificial
  Synthetic oligonucleotide
acgaaatgaacactcaaatcctggtactcgctctggtggcgatcattccgacaaatgcag

SEQ ID NO: 313751 - DNA, 60 bp, Artificial
  Synthetic oligonucleotide
acgaaatgatgtcaattatatactgaacatggatcgaaacctaccttcaacagctaggta

SEQ ID NO: 313752 - DNA, 60 bp, Artificial
  Synthetic oligonucleotide
acgaaatgctctggctccgcttctcggacccatacgacccgctcgcagtgatggccccat

SEQ ID NO: 313753 - DNA, 58 bp, Artificial
  Synthetic oligonucleotide
acgaaatgtgtatatacgacctttctatccatttaagcagagcaacttaatgttggcc

SEQ ID NO: 313754 - DNA, 52 bp, Artificial
  Synthetic oligonucleotide
acgaaattacaagtattcacgcgtaagtttgaatcaacgattggcgaaacca

SEQ ID NO: 313755 - DNA, 52 bp, Artificial
  Synthetic oligonucleotide
acgaaattacgttgcgcggggcctaatcccggcacgtcgactcggaccaaaa

SEQ ID NO: 313756 - DNA, 60 bp, Artificial
  Synthetic oligonucleotide
acgaaattgctctacctgacccatctcctagtgaagactatgtcttggttggagcacatg

SEQ ID NO: 313757 - DNA, 55 bp, Artificial
  Synthetic oligonucleotide
acgaaattgtggcaacaaccagacatcgacggtcattggtttattatactgcgat

SEQ ID NO: 313758 - DNA, 55 bp, Artificial
  Synthetic oligonucleotide
acgaacaacacatgttccaatttgttgactacgtcaaacatcagtcgaaaattgt

SEQ ID NO: 313759 - DNA, 56 bp, Artificial
  Synthetic oligonucleotide
acgaacaactgtacgttctggttagttagggataggaggccttatggcactccgca

SEQ ID NO: 313760 - DNA, 60 bp, Artificial
  Synthetic oligonucleotide
acgaacaatcaatcgctgaggcaatcattgtagcaatggtgttctcacaagaggattgta

SEQ ID NO: 313761 - DNA, 52 bp, Artificial
  Synthetic oligonucleotide
acgaacaatgtggtgaattggcagcggcaataagccaatccttctttccagt

SEQ ID NO: 313762 - DNA, 51 bp, Artificial
  Synthetic oligonucleotide
acgaacacatctatttgcgtaagccggattctccaagccaacgttgggcaa

SEQ ID NO: 313763 - DNA, 57 bp, Artificial
  Synthetic oligonucleotide
acgaacacgatttatcgttcgttgaacttcactttgtggtggatatgcagttagtac

SEQ ID NO: 313764 - DNA, 48 bp, Artificial
  Synthetic oligonucleotide
acgaacacgcccatgggggggagctccgccccccccaaaccccccctg

SEQ ID NO: 313765 - DNA, 58 bp, Artificial
  Synthetic oligonucleotide
acgaacagccaattgacggaggttatttgttgcaggcaaatagaatcctactgcctaa

SEQ ID NO: 313766 - DNA, 57 bp, Artificial
  Synthetic oligonucleotide
acgaacagcgtcatgttttggctagtacgagaccggagaccttatggaactcccatg

SEQ ID NO: 313767 - DNA, 53 bp, Artificial
  Synthetic oligonucleotide
acgaacaggtgttcactgtctgatacttccattcaagatctcaggaaaatggc

SEQ ID NO: 313768 - DNA, 55 bp, Artificial
  Synthetic oligonucleotide
acgaacagtgtaatgttttggttggttagggatcgaagaccatatggcactccca

SEQ ID NO: 313769 - DNA, 59 bp, Artificial
  Synthetic oligonucleotide
acgaacagtgtcatgttctggttggtcagggaccgtcgaccctatggcactccaatgga

SEQ ID NO: 313770 - DNA, 50 bp, Artificial
  Synthetic oligonucleotide
acgaacatagtccacgagcatattgaccgtctgaggcgttgttgagtcgg

SEQ ID NO: 313771 - DNA, 58 bp, Artificial
  Synthetic oligonucleotide
acgaacatgtggaagagtaaatgcaggacgactgcgtttctaacgaacatctaacgcc

SEQ ID NO: 313772 - DNA, 60 bp, Artificial
  Synthetic oligonucleotide
acgaacattgcatgatttgtgccaagcattggagacaactatacacaacattgaactaca

SEQ ID NO: 313773 - DNA, 60 bp, Artificial
  Synthetic oligonucleotide
acgaaccaagcggatatgcacaaacagattgtgtgttggaagcaatggctttccttgaag

SEQ ID NO: 313774 - DNA, 57 bp, Artificial
  Synthetic oligonucleotide
acgaaccaccgatttggattgtgtgaggtggaacacgatatgtcaatatcggagttt

SEQ ID NO: 313775 - DNA, 55 bp, Artificial
  Synthetic oligonucleotide
acgaaccactacctcgcgtgggctccgaacgcaccgcgatacgggactccagaga

SEQ ID NO: 313776 - DNA, 56 bp, Artificial
  Synthetic oligonucleotide
acgaaccagctcaacctaacagtgggacttaagacagaagatgtagtgccgtcatc

SEQ ID NO: 313777 - DNA, 56 bp, Artificial
  Synthetic oligonucleotide
acgaaccaggttatgttcttcctcgtgcgagatagaaggccgtatggtcctagtcc

SEQ ID NO: 313778 - DNA, 54 bp, Artificial
  Synthetic oligonucleotide
acgaacccccaggacaaagtcaacaaccagctcgtgaccaaaggagtcacggtc

SEQ ID NO: 313779 - DNA, 57 bp, Artificial
  Synthetic oligonucleotide
acgaacccctattcccgcgaatggggtcatatgttgaatcgtctcatgcgaccaaaa

SEQ ID NO: 313780 - DNA, 55 bp, Artificial
  Synthetic oligonucleotide
acgaacccctccaatagcagaaggggtgggagcagtctctcgagacctaggaaag

SEQ ID NO: 313781 - DNA, 55 bp, Artificial
  Synthetic oligonucleotide
acgaacccgatcgtgccttcctttgacatgagtaacgagggatcttatttcttcg

SEQ ID NO: 313782 - DNA, 55 bp, Artificial
  Synthetic oligonucleotide
acgaaccgttggctgccggagtatagtgcgggaattacgatgacggcactgcccc

SEQ ID NO: 313783 - DNA, 55 bp, Artificial
  Synthetic oligonucleotide
acgaacgagtgaggaaacaattaagggaaaacgctgaggaagatggcactggttg

SEQ ID NO: 313784 - DNA, 60 bp, Artificial
  Synthetic oligonucleotide
acgaacgatgataattcgtccatgtctcgagagtcagcgaacccgaaggctagagatgta

SEQ ID NO: 313785 - DNA, 55 bp, Artificial
  Synthetic oligonucleotide
acgaacgatttgattcaagttattaaagatgagaccgttggaactagcttatggc

SEQ ID NO: 313786 - DNA, 55 bp, Artificial
  Synthetic oligonucleotide
acgaacgccgtccatttaacctccggcactgccgcatcgcaccgcagatcacgtc

SEQ ID NO: 313787 - DNA, 60 bp, Artificial
  Synthetic oligonucleotide
acgaacgcgatcagagtccacagttgagtcattctttgcaagaggagcttgcgtagctat

SEQ ID NO: 313788 - DNA, 55 bp, Artificial
  Synthetic oligonucleotide
acgaacgcgcgtatacacaacttatcgggcggctgatcgtaaagtctcgttccgg

SEQ ID NO: 313789 - DNA, 52 bp, Artificial
  Synthetic oligonucleotide
acgaacggaaaagattcctttcatgtagtagttaacgaccttaagatcggac

SEQ ID NO: 313790 - DNA, 52 bp, Artificial
  Synthetic oligonucleotide
acgaacgtaaacgttccggacgagtactacaaagtcatcgaggccaaccaaa

SEQ ID NO: 313791 - DNA, 52 bp, Artificial
  Synthetic oligonucleotide
acgaacgtccgaaaccaattgacagaattcagcggaatgagcgaagatcagt

SEQ ID NO: 313792 - DNA, 60 bp, Artificial
  Synthetic oligonucleotide
acgaacgtgatgactaatgcgctattacaggcgcccagtcaaattgtatcaccgagagcc

SEQ ID NO: 313793 - DNA, 58 bp, Artificial
  Synthetic oligonucleotide
acgaacgtgcacgttacaaacatggctttggagataggcaggcctacgctccaacctc

SEQ ID NO: 313794 - DNA, 54 bp, Artificial
  Synthetic oligonucleotide
acgaacgtgcatttggtctccgtgaccgtatccctgctgcattgtacccagaac

SEQ ID NO: 313795 - DNA, 53 bp, Artificial
  Synthetic oligonucleotide
acgaactaaccccctctgaaacaaccgtcaggttgagggcctatatgaacact

SEQ ID NO: 313796 - DNA, 54 bp, Artificial
  Synthetic oligonucleotide
acgaactacataaattcagaactgcctattaccgtgacggttgggagcgggtcc

SEQ ID NO: 313797 - DNA, 60 bp, Artificial
  Synthetic oligonucleotide
acgaactagctgccgctaggcgtcgtgccgctgtctttggtcgtgccgacgtggctgaga

SEQ ID NO: 313798 - DNA, 59 bp, Artificial
  Synthetic oligonucleotide
acgaactgcaataggccaagtttcaagacccatgtttctgtatgtgacaaccaatggaa

SEQ ID NO: 313799 - DNA, 53 bp, Artificial
  Synthetic oligonucleotide
acgaacttcgaagttttaagggaacagatgaaaggcgaaccagtagaaccata

SEQ ID NO: 313800 - DNA, 60 bp, Artificial
  Synthetic oligonucleotide
acgaacttcgttatagctgactatctatcggatgaattagagacattaggagatgtcact

SEQ ID NO: 313801 - DNA, 58 bp, Artificial
  Synthetic oligonucleotide
acgaacttggaagatagcacactacttgcgcctataaagcccaactgtctgttgaccc

SEQ ID NO: 313802 - DNA, 55 bp, Artificial
  Synthetic oligonucleotide
acgaagaaatcatgcggaggtcagttatgtcctcactaaaactggtttcatccaa

SEQ ID NO: 313803 - DNA, 55 bp, Artificial
  Synthetic oligonucleotide
acgaagaaccagtacccatgtctacatatggatggaacatagttaagttaatgag

SEQ ID NO: 313804 - DNA, 59 bp, Artificial
  Synthetic oligonucleotide
acgaagacagagagacgctggtctggagatttgacagccacttggccttgaaacacaga

SEQ ID NO: 313805 - DNA, 60 bp, Artificial
  Synthetic oligonucleotide
acgaagacctgctgtcagggtcactactcaaaaggatgacagtcccaatacgcacggcca

SEQ ID NO: 313806 - DNA, 57 bp, Artificial
  Synthetic oligonucleotide
acgaagactgatttcactgcgtcccttgtgacgggcctacctaacattgtgtgggcg

SEQ ID NO: 313807 - DNA, 60 bp, Artificial
  Synthetic oligonucleotide
acgaagaggtgaaagttgaccacagtgtgaatgaagagtcagctcctagtgatagtgtca

SEQ ID NO: 313808 - DNA, 55 bp, Artificial
  Synthetic oligonucleotide
acgaagaggtggccgttgaaagcaagtcgatttacaagggacttcgcgattataa

SEQ ID NO: 313809 - DNA, 60 bp, Artificial
  Synthetic oligonucleotide
acgaagagtagtagtgcaggttacaattgcatttgatgggaatagtgaactcagcctgtt

SEQ ID NO: 313810 - DNA, 60 bp, Artificial
  Synthetic oligonucleotide
acgaagatggcacgcgagatagcagtgaaacagctcggggagtggccctcaatgatggat

SEQ ID NO: 313811 - DNA, 60 bp, Artificial
  Synthetic oligonucleotide
acgaagcacaattcgtcctgacagcgtccggcactctaacgtcacgctccattgagctga

SEQ ID NO: 313812 - DNA, 58 bp, Artificial
  Synthetic oligonucleotide
acgaagcaggagtaggaatcctcgacagagatacattaatcgggacaaaaactctgtc

SEQ ID NO: 313813 - DNA, 55 bp, Artificial
  Synthetic oligonucleotide
acgaagccatgtatagcttaggtggttattcaggcgacgttaccggcgtacgagg

SEQ ID NO: 313814 - DNA, 51 bp, Artificial
  Synthetic oligonucleotide
acgaagcccaaactatggaagaaatactaaacaaacaacaaatccccgagg

SEQ ID NO: 313815 - DNA, 53 bp, Artificial
  Synthetic oligonucleotide
acgaagccttcactccggtgttttagcctgcctagggtggagaccttaaactc

SEQ ID NO: 313816 - DNA, 59 bp, Artificial
  Synthetic oligonucleotide
acgaagctgtatgaagcggcccactctgatgttcgcgagtctttagggaggttcatccc

SEQ ID NO: 313817 - DNA, 55 bp, Artificial
  Synthetic oligonucleotide
acgaaggcaaagccggtgacgcgcaccattacgtccgcgaacattgaccgcctgc

SEQ ID NO: 313818 - DNA, 56 bp, Artificial
  Synthetic oligonucleotide
acgaaggcaactctgcaaatacagtctcccttctttgccacggcaaattttgggga

SEQ ID NO: 313819 - DNA, 60 bp, Artificial
  Synthetic oligonucleotide
acgaaggcgataagttgatctttgccaccctcaatagcgaggaggcattcgagaggagac

SEQ ID NO: 313820 - DNA, 60 bp, Artificial
  Synthetic oligonucleotide
acgaaggcgcagtgacaaacgtcgaactccaactggcgcatttgatggaggtgaagcgaa

SEQ ID NO: 313821 - DNA, 52 bp, Artificial
  Synthetic oligonucleotide
acgaagggaactatctggttactgttctaacataaagttgcaagttgtcaaa

SEQ ID NO: 313822 - DNA, 55 bp, Artificial
  Synthetic oligonucleotide
acgaagggaaggaaccgatgtgtgctaccccgggaagttcgcaaatgaagaatca

SEQ ID NO: 313823 - DNA, 60 bp, Artificial
  Synthetic oligonucleotide
acgaagggcaagttatgtgcacatcaagtgttacacgctcggtgtcacacgaggtcatcc

SEQ ID NO: 313824 - DNA, 60 bp, Artificial
  Synthetic oligonucleotide
acgaagggtgctaaaaagatattggctgaatcaataaacaaatcagccttccaggcatca

SEQ ID NO: 313825 - DNA, 50 bp, Artificial
  Synthetic oligonucleotide
acgaaggtaagttgtatgatgccaggatcaaagtcacgaagacaatgagt

SEQ ID NO: 313826 - DNA, 53 bp, Artificial
  Synthetic oligonucleotide
acgaaggtccatgcaagagcgagcaagaacagtacctgctgaagtcttgtata

SEQ ID NO: 313827 - DNA, 59 bp, Artificial
  Synthetic oligonucleotide
acgaagtctgccgcatatccagtaattaggggaacatacaacaatactggctctcaacc

SEQ ID NO: 313828 - DNA, 55 bp, Artificial
  Synthetic oligonucleotide
acgaagtgagttagggtttcagtggcatatttggtaaatatgaaccgggacacca

SEQ ID NO: 313829 - DNA, 60 bp, Artificial
  Synthetic oligonucleotide
acgaagtgctatcaaatgatacacagttggcattgatcaacgttgtagataatataagac

SEQ ID NO: 313830 - DNA, 54 bp, Artificial
  Synthetic oligonucleotide
acgaagtggacgggtaatactataccgtccacttcgttacagaatggctaacag

SEQ ID NO: 313831 - DNA, 60 bp, Artificial
  Synthetic oligonucleotide
acgaagttcatacattacatagtcggcagatttgccgacgacaaacacacacatagtgca

SEQ ID NO: 313832 - DNA, 55 bp, Artificial
  Synthetic oligonucleotide
acgaagtttccttcgtcggccctgacgctgttgctctcccagaagccgccgctct

SEQ ID NO: 313833 - DNA, 60 bp, Artificial
  Synthetic oligonucleotide
acgaataaggatgaccaaatagtgatgccgtggatagactactgtgttaagcacaggatg

SEQ ID NO: 313834 - DNA, 58 bp, Artificial
  Synthetic oligonucleotide
acgaataccgaatagcacttctggtcaggcttagtgttcctgtcatcggccttcctaa

SEQ ID NO: 313835 - DNA, 55 bp, Artificial
  Synthetic oligonucleotide
acgaatacggtgtatctatttgccacatcatcagcgaaagtgttcgctattgtgc

SEQ ID NO: 313836 - DNA, 55 bp, Artificial
  Synthetic oligonucleotide
acgaatagcagtagcagacaggatacgaacaccagatgccttatgctcacggcct

SEQ ID NO: 313837 - DNA, 60 bp, Artificial
  Synthetic oligonucleotide
acgaatagcgtcaacagtcgtttatcgggctgtgagccagctgacggattctgtttcact

SEQ ID NO: 313838 - DNA, 54 bp, Artificial
  Synthetic oligonucleotide
acgaataggttagccacattgatgatacgaacagatgggcaattcttgaccata

SEQ ID NO: 313839 - DNA, 58 bp, Artificial
  Synthetic oligonucleotide
acgaatatcaatcttgttccattcagtagcgttgaacacctcagttttaggaagtgga

SEQ ID NO: 313840 - DNA, 57 bp, Artificial
  Synthetic oligonucleotide
acgaatattctagcactgaaagagtggtcgtaagtattgatcggttcttaagagttc

SEQ ID NO: 313841 - DNA, 60 bp, Artificial
  Synthetic oligonucleotide
acgaatcaagtttcaggccatagagtattcacagctcaacgccacgtcgcacctcgcgca

SEQ ID NO: 313842 - DNA, 55 bp, Artificial
  Synthetic oligonucleotide
acgaatcacttatttgtacccggaatgaaagaacacatccaagagtggactgggg

SEQ ID NO: 313843 - DNA, 59 bp, Artificial
  Synthetic oligonucleotide
acgaatccaggtaaattatgagagaacatactgtgtttcagggcagcttgttgaaggtg

SEQ ID NO: 313844 - DNA, 57 bp, Artificial
  Synthetic oligonucleotide
acgaatcccacctcataaccacgcacgcccttgttttcgaaagcatctgccaggaag

SEQ ID NO: 313845 - DNA, 50 bp, Artificial
  Synthetic oligonucleotide
acgaatcccatacgcaaatcacgagctcacagggagtgaatgaccacacg

SEQ ID NO: 313846 - DNA, 55 bp, Artificial
  Synthetic oligonucleotide
acgaatcgttgatacggcgttatggttataaggacttagaagttcctacagacta

SEQ ID NO: 313847 - DNA, 52 bp, Artificial
  Synthetic oligonucleotide
acgaatcttagaaagcaaaggtacaactgtctgtctgatgtcaatcagtatg

SEQ ID NO: 313848 - DNA, 60 bp, Artificial
  Synthetic oligonucleotide
acgaatgaatgaggagaagatcttagaggcggtgaaatattcgcaaaatttaggctcgca

SEQ ID NO: 313849 - DNA, 60 bp, Artificial
  Synthetic oligonucleotide
acgaatgaatgaggagaagattctagaggcggtgaagtattcacaaaagttgggctcgca

SEQ ID NO: 313850 - DNA, 57 bp, Artificial
  Synthetic oligonucleotide
acgaatgacctatcccaaccccgagacaggtcaagagcaacgcatactctttcaagg

SEQ ID NO: 313851 - DNA, 56 bp, Artificial
  Synthetic oligonucleotide
acgaatgagggtagtggaggggcatgtccggatctccatttccataaaaaaacaga

SEQ ID NO: 313852 - DNA, 56 bp, Artificial
  Synthetic oligonucleotide
acgaatgatgacatatgaaaaggccttaactgtgtcctactcaaatgatgagttag

SEQ ID NO: 313853 - DNA, 58 bp, Artificial
  Synthetic oligonucleotide
acgaatgcacggcacttggtctagacacccctcacatctgggcggacggggtcttctc

SEQ ID NO: 313854 - DNA, 58 bp, Artificial
  Synthetic oligonucleotide
acgaatgccaatattgttcctctcgttgtcgacacgggagtgcagtttgggcccgcga

SEQ ID NO: 313855 - DNA, 55 bp, Artificial
  Synthetic oligonucleotide
acgaatgtgggccacgggacagcgccttatacgcgctggagggatcactgaggct

SEQ ID NO: 313856 - DNA, 51 bp, Artificial
  Synthetic oligonucleotide
acgaatgttagtagaattaaacgcctatgactacgggatttataagtctga

SEQ ID NO: 313857 - DNA, 57 bp, Artificial
  Synthetic oligonucleotide
acgaattatacaaatttgtaggctatacaacagccgcttttgaacgtcgcattacaa

SEQ ID NO: 313858 - DNA, 52 bp, Artificial
  Synthetic oligonucleotide
acgaattcagaactttataccaagttcgcttatagggaggaaaaaattcaat

SEQ ID NO: 313859 - DNA, 55 bp, Artificial
  Synthetic oligonucleotide
acgaattctccgtgacatcactggcattaccgctctgtgcggtttcctctaccac

SEQ ID NO: 313860 - DNA, 58 bp, Artificial
  Synthetic oligonucleotide
acgaattctctttggttgaggcatcagttttcgacaaactgatcaggaaggacgattc

SEQ ID NO: 313861 - DNA, 60 bp, Artificial
  Synthetic oligonucleotide
acgaattgatgtcagatggtgtccttccccagagtaacacgaaagtgcagactcataatc

SEQ ID NO: 313862 - DNA, 60 bp, Artificial
  Synthetic oligonucleotide
acgaattgtgtgaggtgctggaagaatcggtgcatgaaataaggctgcagtgtgtgcagt

SEQ ID NO: 313863 - DNA, 57 bp, Artificial
  Synthetic oligonucleotide
acgacaaacgtttactacggctacgatgcagatttcatgcaccgttccaaagctaaa

SEQ ID NO: 313864 - DNA, 57 bp, Artificial
  Synthetic oligonucleotide
acgacaacatgctaccacacctaaacagcgttgggccccgcgtaagatttccgatga

SEQ ID NO: 313865 - DNA, 51 bp, Artificial
  Synthetic oligonucleotide
acgacaacttggactaacaggtaaccggtttggttacctttcgtacatgga

SEQ ID NO: 313866 - DNA, 58 bp, Artificial
  Synthetic oligonucleotide
acgacaagatactagacactatcacctctaataaaccaggtgtggtacttagagatgg

SEQ ID NO: 313867 - DNA, 59 bp, Artificial
  Synthetic oligonucleotide
acgacaagtggcacaaaagtgctagtggtgttaaccaaacaggcatatattttatgcaa

SEQ ID NO: 313868 - DNA, 59 bp, Artificial
  Synthetic oligonucleotide
acgacaagttaactcacgagatacgcaagttttacgcgtggatgattgaacaagctcca

SEQ ID NO: 313869 - DNA, 60 bp, Artificial
  Synthetic oligonucleotide
acgacaattggtctggttacagcggaagtttcagcattagaggagagacaacaggcagga

SEQ ID NO: 313870 - DNA, 59 bp, Artificial
  Synthetic oligonucleotide
acgacacaaagataccattcctcacgcgagacgtgccggagggagtgtacgagagaata

SEQ ID NO: 313871 - DNA, 59 bp, Artificial
  Synthetic oligonucleotide
acgacacaacagcttgcgttttatatcggtacacaccaaagtctctgtgtaccgatata

SEQ ID NO: 313872 - DNA, 58 bp, Artificial
  Synthetic oligonucleotide
acgacacatacaaaccgttccacgtaggtgacgacgtgctaattctgctggatagccc

SEQ ID NO: 313873 - DNA, 59 bp, Artificial
  Synthetic oligonucleotide
acgacacatggtcctgccaggctaacatagtggcggctctgacacgggacaccctgcac

SEQ ID NO: 313874 - DNA, 60 bp, Artificial
  Synthetic oligonucleotide
acgacacatttgtcatgtgccatttgacgtcttccgcctgcagaggtctacggggttatc

SEQ ID NO: 313875 - DNA, 60 bp, Artificial
  Synthetic oligonucleotide
acgacaccatggaacctacgcaactggacacagacattgcaacactcttcttggctcaag

SEQ ID NO: 313876 - DNA, 60 bp, Artificial
  Synthetic oligonucleotide
acgacacctgtgtgcatgtggcataggtctttgtactgatcccagactgcattctcatac

SEQ ID NO: 313877 - DNA, 51 bp, Artificial
  Synthetic oligonucleotide
acgacacgatcgcccgaaacttaatgacggaacgtggataccccaagaggt

SEQ ID NO: 313878 - DNA, 60 bp, Artificial
  Synthetic oligonucleotide
acgacacggagttcaatatgcggagtatgacttctctggtgataccattcgggcgtcttc

SEQ ID NO: 313879 - DNA, 56 bp, Artificial
  Synthetic oligonucleotide
acgacacggcaatcttgggtactggctctctgttgtgtcccccttgaacgacctta

SEQ ID NO: 313880 - DNA, 55 bp, Artificial
  Synthetic oligonucleotide
acgacacggcagtgggggcctttggtccaggactagtgccaccccatggaggcct

SEQ ID NO: 313881 - DNA, 52 bp, Artificial
  Synthetic oligonucleotide
acgacacggttcgtacgctagttaagtcaggtggaggagaggttttgaaaac

SEQ ID NO: 313882 - DNA, 57 bp, Artificial
  Synthetic oligonucleotide
acgacactacctctacaaggttataggatggagggaactgtaagatcttccattgtg

SEQ ID NO: 313883 - DNA, 55 bp, Artificial
  Synthetic oligonucleotide
acgacagaggatttggtcaacctactcccggccatattatcaccaggggctttag

SEQ ID NO: 313884 - DNA, 58 bp, Artificial
  Synthetic oligonucleotide
acgacagatccatgtacgttaccttagatggagtaagctggtataggttaggatgtaa

SEQ ID NO: 313885 - DNA, 55 bp, Artificial
  Synthetic oligonucleotide
acgacagcgacttactgagcccgactcctccacaatctccccactgtccgtggac

SEQ ID NO: 313886 - DNA, 57 bp, Artificial
  Synthetic oligonucleotide
acgacaggccaggcttatcaggtcttaccctgtgtaagaactacccaggctgttgta

SEQ ID NO: 313887 - DNA, 60 bp, Artificial
  Synthetic oligonucleotide
acgacagggaatcgcatccacgtatgtgtcagtgggcgtccctctcagtcacatcccgta

SEQ ID NO: 313888 - DNA, 56 bp, Artificial
  Synthetic oligonucleotide
acgacagggccctttcttggattaaacccgctcaatgcctggagatttgggcgtgc

SEQ ID NO: 313889 - DNA, 57 bp, Artificial
  Synthetic oligonucleotide
acgacagtaccgcgcgtcgattgatgagtatcggaggtaacgaggcccttggaaatc

SEQ ID NO: 313890 - DNA, 60 bp, Artificial
  Synthetic oligonucleotide
acgacagtgacgagccagagcggaggtcgccagcaagttggatccagagtgaattcaaca

SEQ ID NO: 313891 - DNA, 60 bp, Artificial
  Synthetic oligonucleotide
acgacagttggcggtaatatacagataccagacactgagccgccaattgcccgaggtcag

SEQ ID NO: 313892 - DNA, 57 bp, Artificial
  Synthetic oligonucleotide
acgacatagacgcatttatagaaccacagcatcgcatttacggtgaggtgtcttaca

SEQ ID NO: 313893 - DNA, 60 bp, Artificial
  Synthetic oligonucleotide
acgacatagttgaagatggatggagtttggtagaccaccgctagcaaaatacactctgtg

SEQ ID NO: 313894 - DNA, 60 bp, Artificial
  Synthetic oligonucleotide
acgacatatcccatgtaggcaaggtcctctgtgtgtctgatgttacgcgtggtagtgggc

SEQ ID NO: 313895 - DNA, 60 bp, Artificial
  Synthetic oligonucleotide
acgacatatgatcagttatcatattaacacaccagatacacatggattaattgttgagtg

SEQ ID NO: 313896 - DNA, 51 bp, Artificial
  Synthetic oligonucleotide
acgacattactttgcacacctggagcaatacatcgttaattacgtgccgcg

SEQ ID NO: 313897 - DNA, 54 bp, Artificial
  Synthetic oligonucleotide
acgacattctataatgagtctggacgtgccctacgaacgcctgggccccgccac

SEQ ID NO: 313898 - DNA, 58 bp, Artificial
  Synthetic oligonucleotide
acgacattgacccagcccccacagcggtacactctatcgcggaagcatcgactccaaa

SEQ ID NO: 313899 - DNA, 60 bp, Artificial
  Synthetic oligonucleotide
acgacattgtattcatgcgaactctacttaatatgggaggctactcaaggtcaaatcaaa

SEQ ID NO: 313900 - DNA, 60 bp, Artificial
  Synthetic oligonucleotide
acgacattgtggtcatgcccattagatttcgctcgtcaagacgattccagcaagctctcg

SEQ ID NO: 313901 - DNA, 53 bp, Artificial
  Synthetic oligonucleotide
acgaccaaacgtttgttaaagtctgctatcagtgatctgtttgttgagacggg

SEQ ID NO: 313902 - DNA, 59 bp, Artificial
  Synthetic oligonucleotide
acgaccaacccactgataagacatgagaacaggatggtactggctagtaccacggctaa

SEQ ID NO: 313903 - DNA, 60 bp, Artificial
  Synthetic oligonucleotide
acgaccacagacacgctaaagcatgccaaggacccctcgttattccagcagctactaata

SEQ ID NO: 313904 - DNA, 53 bp, Artificial
  Synthetic oligonucleotide
acgaccacgacgtgtacaatacgcaactgtaaaaaactgggcccgagagaaaa

SEQ ID NO: 313905 - DNA, 58 bp, Artificial
  Synthetic oligonucleotide
acgaccatcatggccaaaaatgaggtgttctgcgtggaccctgccaaggggggcaaga

SEQ ID NO: 313906 - DNA, 60 bp, Artificial
  Synthetic oligonucleotide
acgaccatctcgcaaatcttgcgatcatgtttctcggtaactccggtgctgacaggaaca

SEQ ID NO: 313907 - DNA, 57 bp, Artificial
  Synthetic oligonucleotide
acgaccatgcaaaccactggtgcctttggacagcaatccggtgccgtgtatgtcggt

SEQ ID NO: 313908 - DNA, 52 bp, Artificial
  Synthetic oligonucleotide
acgaccatgtggctaggccttgctcccgtagggtgacagctgtatagctctg

SEQ ID NO: 313909 - DNA, 54 bp, Artificial
  Synthetic oligonucleotide
acgacccatctcggggtcgcttggggatgtatcgtcccctactccgtctgccgt

SEQ ID NO: 313910 - DNA, 55 bp, Artificial
  Synthetic oligonucleotide
acgacccggggaattgtattacagaatatttatataagactggttgagtcatcac

SEQ ID NO: 313911 - DNA, 59 bp, Artificial
  Synthetic oligonucleotide
acgaccctcctgtgcttctgttgcaaggttgcgctaacactttgaaatgctttaggcga

SEQ ID NO: 313912 - DNA, 54 bp, Artificial
  Synthetic oligonucleotide
acgaccgacctaccaaagactcccggatgtcgtcgcgggggtttgacgagagca

SEQ ID NO: 313913 - DNA, 59 bp, Artificial
  Synthetic oligonucleotide
acgaccgacttgctggacctgacggattcctatcagccgagaacagcgtgttagtactc

SEQ ID NO: 313914 - DNA, 57 bp, Artificial
  Synthetic oligonucleotide
acgaccgataggatgctgataactactgagaccgtattaagtatacggtttgtgttg

SEQ ID NO: 313915 - DNA, 55 bp, Artificial
  Synthetic oligonucleotide
acgaccgcatccatcatggaaattctcactggttttgtggtgagacgggttcgac

SEQ ID NO: 313916 - DNA, 53 bp, Artificial
  Synthetic oligonucleotide
acgaccgtctttcgtaggacggagatcttggttgttcagagattgaacataga

SEQ ID NO: 313917 - DNA, 52 bp, Artificial
  Synthetic oligonucleotide
acgaccgtgtctaacacgacccgttgggccgacagatgcccgtagtgaagcc

SEQ ID NO: 313918 - DNA, 57 bp, Artificial
  Synthetic oligonucleotide
acgacctacgtgatcgtttccaggttctacagcgatggaatgccaccgttactggtg

SEQ ID NO: 313919 - DNA, 55 bp, Artificial
  Synthetic oligonucleotide
acgacctatggcgtgagaatggacgttacgctacagatgtgtacgctgagggtga

SEQ ID NO: 313920 - DNA, 55 bp, Artificial
  Synthetic oligonucleotide
acgacctcaccgaccacatgttcgagtggtcaaaagaggaccctgacgcgatcaa

SEQ ID NO: 313921 - DNA, 56 bp, Artificial
  Synthetic oligonucleotide
acgacctccggatgatgttttgcagggcttaccctttagctatgacactaacgaaa

SEQ ID NO: 313922 - DNA, 59 bp, Artificial
  Synthetic oligonucleotide
acgacctgaaacgactacgatttgataacccataagagcatacatcttagacagttcaa

SEQ ID NO: 313923 - DNA, 60 bp, Artificial
  Synthetic oligonucleotide
acgacctgcagctagtgtttggagacagaagggctcagcaaccgatttcggtcccgcaca

SEQ ID NO: 313924 - DNA, 55 bp, Artificial
  Synthetic oligonucleotide
acgacctggaaagatcatcgggaaactcgcgaggaaacatattgctataaccaaa

SEQ ID NO: 313925 - DNA, 59 bp, Artificial
  Synthetic oligonucleotide
acgacctggcgtaacaccgtggtcgacttagtcttgcgcatcatcgacagtggtcggta

SEQ ID NO: 313926 - DNA, 53 bp, Artificial
  Synthetic oligonucleotide
acgacctggtcagaaggctcggtgtggcggagggttatgtacgctgcgatgcg

SEQ ID NO: 313927 - DNA, 54 bp, Artificial
  Synthetic oligonucleotide
acgacctgtaatgatgggatacacctctcagctccttgactaggatggaagcat

SEQ ID NO: 313928 - DNA, 54 bp, Artificial
  Synthetic oligonucleotide
acgaccttcaagcaacgttgggtgcgatcaagtggatttctccttaactaaagg

SEQ ID NO: 313929 - DNA, 60 bp, Artificial
  Synthetic oligonucleotide
acgaccttgccagcaaagctatgggatcagcttttacggctttgctcgatgccaacgagg

SEQ ID NO: 313930 - DNA, 60 bp, Artificial
  Synthetic oligonucleotide
acgaccttggaccagcaacagcccagatggctcttcaattgttcatcaaagactacagat

SEQ ID NO: 313931 - DNA, 54 bp, Artificial
  Synthetic oligonucleotide
acgaccttgtacgcgacgaagtttcaaccggccaaatttcaatcgacaatcaaa

SEQ ID NO: 313932 - DNA, 55 bp, Artificial
  Synthetic oligonucleotide
acgacgacgaattcgatacgaaagcttctgaccttaccttctctccgtgggtcga

SEQ ID NO: 313933 - DNA, 54 bp, Artificial
  Synthetic oligonucleotide
acgacgacgcggtcaattctcttcgagtattggaccgccgtccaaaggtcaact

SEQ ID NO: 313934 - DNA, 60 bp, Artificial
  Synthetic oligonucleotide
acgacgagctctgctacatgaaacgtaagatatggctcaagacggagcactatcaaaagc

SEQ ID NO: 313935 - DNA, 54 bp, Artificial
  Synthetic oligonucleotide
acgacgaggaatgcacgctaactgtcgaaactagcgatgggattagggaactta

SEQ ID NO: 313936 - DNA, 51 bp, Artificial
  Synthetic oligonucleotide
acgacgagttgcactttctaagtccatttgacatggctttcctatttgaga

SEQ ID NO: 313937 - DNA, 60 bp, Artificial
  Synthetic oligonucleotide
acgacgatcttgagacgtcattcgacgagaccatcaatgatgatatgcaaaaagacgtaa

SEQ ID NO: 313938 - DNA, 58 bp, Artificial
  Synthetic oligonucleotide
acgacgcaagggtcctattcttcgatctaacccgctcatatgcctggagatttgggcg

SEQ ID NO: 313939 - DNA, 55 bp, Artificial
  Synthetic oligonucleotide
acgacgcccgagtagttcaaataaggtgtatgatgatacaaagatgtcactccag

SEQ ID NO: 313940 - DNA, 57 bp, Artificial
  Synthetic oligonucleotide
acgacgcccgctctattggaccagccccgccaagtggttcaattcgcttggccagac

SEQ ID NO: 313941 - DNA, 57 bp, Artificial
  Synthetic oligonucleotide
acgacgccctatttagaaggggatgtattgtcgagtgattcaggaccgttgttatca

SEQ ID NO: 313942 - DNA, 52 bp, Artificial
  Synthetic oligonucleotide
acgacgccttttccgatgttcctcctttcttttccgctctcgccaatagctt

SEQ ID NO: 313943 - DNA, 60 bp, Artificial
  Synthetic oligonucleotide
acgacgctctcatgtactaccacccctcccacattctggacctcttcatgagttgcgacc

SEQ ID NO: 313944 - DNA, 58 bp, Artificial
  Synthetic oligonucleotide
acgacgctgttgcaaccacgcattcctggatccctaagaggaaccgttccattctcaa

SEQ ID NO: 313945 - DNA, 58 bp, Artificial
  Synthetic oligonucleotide
acgacgctgttgcaactacgcactcctggattcctaagaggaaccgttctatcctcaa

SEQ ID NO: 313946 - DNA, 59 bp, Artificial
  Synthetic oligonucleotide
acgacggaggctgcgaatgagatcgcacgtgtaacaggagagacgtcaacgtggggacc

SEQ ID NO: 313947 - DNA, 59 bp, Artificial
  Synthetic oligonucleotide
acgacggcacgtcgatttgctcgttggggccgctgctttctgctccgctatgtacgtgg

SEQ ID NO: 313948 - DNA, 55 bp, Artificial
  Synthetic oligonucleotide
acgacggggcgggtcaatggaattctaataatgtacagcgcagacgaccattcaa

SEQ ID NO: 313949 - DNA, 56 bp, Artificial
  Synthetic oligonucleotide
acgacgggtcgcacctctctttacgcggcctccccgtctgttccttctcatctgcc

SEQ ID NO: 313950 - DNA, 51 bp, Artificial
  Synthetic oligonucleotide
acgacggtaacctgacttgggtgcccaacggtgctcctgaggcagctctat

SEQ ID NO: 313951 - DNA, 55 bp, Artificial
  Synthetic oligonucleotide
acgacggttcactctttttcggtacgcgtgatcaagcaacaggtcaaattaacga

SEQ ID NO: 313952 - DNA, 52 bp, Artificial
  Synthetic oligonucleotide
acgacgtacccaggagaggaggtgataggctcctatgcgatactgtctcctc

SEQ ID NO: 313953 - DNA, 57 bp, Artificial
  Synthetic oligonucleotide
acgacgtagagcacgtgttggaggaaacgctgtgcgaggaccgggaggaagaagcaa

SEQ ID NO: 313954 - DNA, 59 bp, Artificial
  Synthetic oligonucleotide
acgacgtagccaggaagacagcgcgtttcgatatatcatggaactcgatttgttacctc

SEQ ID NO: 313955 - DNA, 56 bp, Artificial
  Synthetic oligonucleotide
acgacgtcactgttcggccaagcaatttccgtcttctggacggtcgcactcaaacc

SEQ ID NO: 313956 - DNA, 60 bp, Artificial
  Synthetic oligonucleotide
acgacgtctatgcggatactactcgtgagtattcagccgcgttggattctactgagtttg

SEQ ID NO: 313957 - DNA, 60 bp, Artificial
  Synthetic oligonucleotide
acgacgtgtgcctaaagcgaggtgaaacgtacagcgcaatagcgagaatcgggagtgata

SEQ ID NO: 313958 - DNA, 59 bp, Artificial
  Synthetic oligonucleotide
acgactaaaatagttggtgaccatccgctggttatagagcgtgtgcgggctatcggatg

SEQ ID NO: 313959 - DNA, 57 bp, Artificial
  Synthetic oligonucleotide
acgactaatactggtgcgctcttctttgaaaccattggatcgctgacggttaaattc

SEQ ID NO: 313960 - DNA, 60 bp, Artificial
  Synthetic oligonucleotide
acgactacatcagtggataagctcggattgcaccactccatgctccggttcctggctaag

SEQ ID NO: 313961 - DNA, 58 bp, Artificial
  Synthetic oligonucleotide
acgactacatgtaccattagacactgtaaaaagttggggccacgtgagaatgtcgcag

SEQ ID NO: 313962 - DNA, 60 bp, Artificial
  Synthetic oligonucleotide
acgactacggcagcatcacaccacgactcgcaccacactccaccgtcgccgtgaaaacca

SEQ ID NO: 313963 - DNA, 54 bp, Artificial
  Synthetic oligonucleotide
acgactacttagagttacaggtaaccggataggtgaccgttcgtacatggacaa

SEQ ID NO: 313964 - DNA, 57 bp, Artificial
  Synthetic oligonucleotide
acgactatcaccctcaataacaatactactgggtctccaaggccgcgcagcggaacc

SEQ ID NO: 313965 - DNA, 58 bp, Artificial
  Synthetic oligonucleotide
acgactcagctacatttgctaccgattccggacagggaccttctgctaatccgactac

SEQ ID NO: 313966 - DNA, 60 bp, Artificial
  Synthetic oligonucleotide
acgactccatggacttagcgcattttcactccatagttactctccaggtgagatcaatag

SEQ ID NO: 313967 - DNA, 51 bp, Artificial
  Synthetic oligonucleotide
acgactccgtaccggaacgccatattccgaagcgcgattttccccgacccg

SEQ ID NO: 313968 - DNA, 58 bp, Artificial
  Synthetic oligonucleotide
acgactccgtttcaaagggacggtgaagattgaacgtgtgcaatcggatatgaacatg

SEQ ID NO: 313969 - DNA, 59 bp, Artificial
  Synthetic oligonucleotide
acgactcctgtgcttaaggatccagacgtatggacgggattcatacaaggcgtccgtga

SEQ ID NO: 313970 - DNA, 50 bp, Artificial
  Synthetic oligonucleotide
acgactcggagcgcgggacgacaatgctaccctggagcggaaacttcctg

SEQ ID NO: 313971 - DNA, 56 bp, Artificial
  Synthetic oligonucleotide
acgactcgtattattacattgatgctttgaaccgtgtgcgtcgtaaaacgtaccaa

SEQ ID NO: 313972 - DNA, 52 bp, Artificial
  Synthetic oligonucleotide
acgactctggtcggtccgtggttcgcacaggtcgaggacttagagttgcaaa

SEQ ID NO: 313973 - DNA, 57 bp, Artificial
  Synthetic oligonucleotide
acgactgaaacagggcgggtcgtgatgatgtgggataaggattccgaggatccccca

SEQ ID NO: 313974 - DNA, 55 bp, Artificial
  Synthetic oligonucleotide
acgactgagaatggagaggcccgtccgtacatgctgcaatacatgtatgtgcccc

SEQ ID NO: 313975 - DNA, 51 bp, Artificial
  Synthetic oligonucleotide
acgactgccactaccgatcaaatctcagagataaagaaggctctgatagac

SEQ ID NO: 313976 - DNA, 55 bp, Artificial
  Synthetic oligonucleotide
acgactgccccaacgcaagcattgtgtatgaggcggcggacgtgatcatgcatgc

SEQ ID NO: 313977 - DNA, 60 bp, Artificial
  Synthetic oligonucleotide
acgactgcccgtacagcgctggacaatgtagatgcaagttctcaaaaacggaagacttca

SEQ ID NO: 313978 - DNA, 55 bp, Artificial
  Synthetic oligonucleotide
acgactgctccaactcaagcattgtgtatgaggcagctgacgtgatcatgcacac

SEQ ID NO: 313979 - DNA, 60 bp, Artificial
  Synthetic oligonucleotide
acgactgggtgagaacaaggacgtcatagtcacaagggagccctatgttagctgcgataa

SEQ ID NO: 313980 - DNA, 53 bp, Artificial
  Synthetic oligonucleotide
acgactggttttcgaaactggcccaatccgctttcagtggattggttggtgca

SEQ ID NO: 313981 - DNA, 60 bp, Artificial
  Synthetic oligonucleotide
acgactgtatggccagtattaggaacaacacttatgatcacagcaaatacagagaagaag

SEQ ID NO: 313982 - DNA, 55 bp, Artificial
  Synthetic oligonucleotide
acgactgttccaactcaagcatagtgtatgagacatcggacatgattatgcacac

SEQ ID NO: 313983 - DNA, 52 bp, Artificial
  Synthetic oligonucleotide
acgactgtttctcctactggcactgcgttccagaaactaactctcagtactc

SEQ ID NO: 313984 - DNA, 60 bp, Artificial
  Synthetic oligonucleotide
acgacttcaatcgttccccagctcctatcgactatgaagcacaataccaatcaatcaaac

SEQ ID NO: 313985 - DNA, 55 bp, Artificial
  Synthetic oligonucleotide
acgacttcatgtttcaggcaggcatcttgtatagtcaaatgacaactggagaatt

SEQ ID NO: 313986 - DNA, 60 bp, Artificial
  Synthetic oligonucleotide
acgacttcgaagatctaatgcttactgatcaagtttatatgcaccgagatatgttgccag

SEQ ID NO: 313987 - DNA, 57 bp, Artificial
  Synthetic oligonucleotide
acgacttggcggagccataaaacttgtcgtttgggtctggtgtctctcaactctctc

SEQ ID NO: 313988 - DNA, 53 bp, Artificial
  Synthetic oligonucleotide
acgacttgggggtcatgtctagcaggggcgccaattcaatagcgggcatgtcg

SEQ ID NO: 313989 - DNA, 56 bp, Artificial
  Synthetic oligonucleotide
acgactttaatcataaaggtggttacaaaaaccattgattctcacttgatgatacc

SEQ ID NO: 313990 - DNA, 60 bp, Artificial
  Synthetic oligonucleotide
acgactttcctagaacttgattacctgagcgatggatggattacaggcgtgcgcggtgat

SEQ ID NO: 313991 - DNA, 55 bp, Artificial
  Synthetic oligonucleotide
acgactttgaaagagaggggtactccctggtcggaatagatccattccgtctgct

SEQ ID NO: 313992 - DNA, 55 bp, Artificial
  Synthetic oligonucleotide
acgactttgctcgctagcatttcggtaagtccatttgacgatgtaactcaagcat

SEQ ID NO: 313993 - DNA, 58 bp, Artificial
  Synthetic oligonucleotide
acgagaaaatgtcgcagtaattcaagttggaggttctgacgttcttgatataacagcc

SEQ ID NO: 313994 - DNA, 53 bp, Artificial
  Synthetic oligonucleotide
acgagaaacctgcgcctaatgcccaggcctccactcctgttcctgaccccact

SEQ ID NO: 313995 - DNA, 57 bp, Artificial
  Synthetic oligonucleotide
acgagaaagatattcgcgtaatgatagttacacttgcccaatgttgaacgtatttaa

SEQ ID NO: 313996 - DNA, 56 bp, Artificial
  Synthetic oligonucleotide
acgagaacagtggcaagttgacacctaattgggattcgtttgaggtcgacaattat

SEQ ID NO: 313997 - DNA, 53 bp, Artificial
  Synthetic oligonucleotide
acgagaaccgtattccgacgatattaacctaaaagagttatcgggacacgctc

SEQ ID NO: 313998 - DNA, 57 bp, Artificial
  Synthetic oligonucleotide
acgagaacgttttatccctcgtagattcatgtcagacgagtaggtctctaaacacat

SEQ ID NO: 313999 - DNA, 59 bp, Artificial
  Synthetic oligonucleotide
acgagaactatgagactgacgcaaaggctgcagacgcaggcctaggtgccaagctgtcc

SEQ ID NO: 314000 - DNA, 60 bp, Artificial
  Synthetic oligonucleotide
acgagaataaagcatggtggatagcgggtcagttattgcctcccacaactggcactaatg

SEQ ID NO: 314001 - DNA, 60 bp, Artificial
  Synthetic oligonucleotide
acgagaatcacacggagaacgctctactattgtatatggcatgtactcatgcctctaacc

SEQ ID NO: 314002 - DNA, 57 bp, Artificial
  Synthetic oligonucleotide
acgagaatcctgaccttctggggaacagaaagtggataccttctgatgacacctggt

SEQ ID NO: 314003 - DNA, 55 bp, Artificial
  Synthetic oligonucleotide
acgagaatgtttcaggtaacgtcgtgcctgatccgcccgtggttggtcgggctgg

SEQ ID NO: 314004 - DNA, 54 bp, Artificial
  Synthetic oligonucleotide
acgagacaataatttgagtccttcgattagaaccattctgggttccctttgtcc

SEQ ID NO: 314005 - DNA, 60 bp, Artificial
  Synthetic oligonucleotide
acgagacagacaaatatttaactggatgcaatactatgactctataggacctgtagaaca

SEQ ID NO: 314006 - DNA, 55 bp, Artificial
  Synthetic oligonucleotide
acgagaccagagtgacagaggctggggtaaccattgtggactgttcgggaagggc

SEQ ID NO: 314007 - DNA, 50 bp, Artificial
  Synthetic oligonucleotide
acgagaccggtcggtaagttactaactttcaactcgttgaaggttggtat

SEQ ID NO: 314008 - DNA, 55 bp, Artificial
  Synthetic oligonucleotide
acgagacgactaaacctggagcccagacgccgtttgaagctagaagtaccgctta

SEQ ID NO: 314009 - DNA, 57 bp, Artificial
  Synthetic oligonucleotide
acgagacgctcattttcttcctgagccactcccctattctaagtcgaaggagaagac

SEQ ID NO: 314010 - DNA, 60 bp, Artificial
  Synthetic oligonucleotide
acgagacgtcgacgtattcataggcgcctgttcggaaccaatctatcgcatatacaacag

SEQ ID NO: 314011 - DNA, 51 bp, Artificial
  Synthetic oligonucleotide
acgagactaagagtggttccccccccccataccgctccttaagtgaggtta

SEQ ID NO: 314012 - DNA, 58 bp, Artificial
  Synthetic oligonucleotide
acgagagaacatataactacaaagcaaaagattttaagcactatttaaggcatgtgga

SEQ ID NO: 314013 - DNA, 55 bp, Artificial
  Synthetic oligonucleotide
acgagagactacgcactacagctgtggggcgatcggcaggcaatcgtgtttgggg

SEQ ID NO: 314014 - DNA, 58 bp, Artificial
  Synthetic oligonucleotide
acgagagagttaaatgtggaagaattgccaggttcactgtcaattggtgccatttcac

SEQ ID NO: 314015 - DNA, 51 bp, Artificial
  Synthetic oligonucleotide
acgagagccacgactagtatcgcgacatgctccgtcccaaccggcgtgact

SEQ ID NO: 314016 - DNA, 55 bp, Artificial
  Synthetic oligonucleotide
acgagagctgtcacgatccgaccaatctgcagtacaccgtctcggtgcagctgcg

SEQ ID NO: 314017 - DNA, 60 bp, Artificial
  Synthetic oligonucleotide
acgagaggatgtgcaacatccttaaagggaagttccagacagcagcacaacgagcaatga

SEQ ID NO: 314018 - DNA, 60 bp, Artificial
  Synthetic oligonucleotide
acgagagtatgattgaaacacgctgtgttcttaactcgcacagtacagctgagaccactc

SEQ ID NO: 314019 - DNA, 55 bp, Artificial
  Synthetic oligonucleotide
acgagagtggtcttactctcacgtttgaacagcccaccgaagctaatgttgcgct

SEQ ID NO: 314020 - DNA, 50 bp, Artificial
  Synthetic oligonucleotide
acgagagtgtgaattcacaacacaacacccagtgaagttaaaagtagagg

SEQ ID NO: 314021 - DNA, 51 bp, Artificial
  Synthetic oligonucleotide
acgagagttgaaacggagggacccacggttccggagccttttgaaatattc

SEQ ID NO: 314022 - DNA, 55 bp, Artificial
  Synthetic oligonucleotide
acgagatcaacgtgaccaatctgcggaacgcttttcgctccgtactgtacaccat

SEQ ID NO: 314023 - DNA, 60 bp, Artificial
  Synthetic oligonucleotide
acgagatcgcatacaaccaatgctaaaagagtggcccactctcaaagatgttgcaactgc

SEQ ID NO: 314024 - DNA, 60 bp, Artificial
  Synthetic oligonucleotide
acgagatcttctagataccgcttcagctctgtatcgggatgccttagagtctcctgagca

SEQ ID NO: 314025 - DNA, 53 bp, Artificial
  Synthetic oligonucleotide
acgagatggacatggtgagggcaatagaggatgctgtgctcgattttgaagct

SEQ ID NO: 314026 - DNA, 53 bp, Artificial
  Synthetic oligonucleotide
acgagatgtattgggtgtcaggtgtgtcgggaaacatcgtgagctctgtaaac

SEQ ID NO: 314027 - DNA, 60 bp, Artificial
  Synthetic oligonucleotide
acgagatgtcgacgtattcataggtgcttgctctgaaccgatctatcgcatatacaatag

SEQ ID NO: 314028 - DNA, 60 bp, Artificial
  Synthetic oligonucleotide
acgagattactgcgcagtcgtggtgttatcgactcaatgacgtcgcgtcccggccagtag

SEQ ID NO: 314029 - DNA, 59 bp, Artificial
  Synthetic oligonucleotide
acgagattcccacaaacatggggggctggttgacttctcctatagagccattgtctata

SEQ ID NO: 314030 - DNA, 54 bp, Artificial
  Synthetic oligonucleotide
acgagattccgttagcccagtagctagattctcaccttcgatttcaatctcaag

SEQ ID NO: 314031 - DNA, 55 bp, Artificial
  Synthetic oligonucleotide
acgagcaaagcgctcgcctggtggccttacttggtcgaaggaacggtgtgggtct

SEQ ID NO: 314032 - DNA, 60 bp, Artificial
  Synthetic oligonucleotide
acgagcaaccagagctgagtttgatagatggtatgatgctgtcaagaatgagtatgaagt

SEQ ID NO: 314033 - DNA, 60 bp, Artificial
  Synthetic oligonucleotide
acgagcaatacccttttctagttcacccagtgatgccgatgaaagatattcatgagtcta

SEQ ID NO: 314034 - DNA, 60 bp, Artificial
  Synthetic oligonucleotide
acgagcaatgatggatcaggtgcgggaaagcagaaatcctgggaatgctgaaattgaaga

SEQ ID NO: 314035 - DNA, 58 bp, Artificial
  Synthetic oligonucleotide
acgagcaccttattcttggtttgttaagatgtggggtgtatgctgtagcgaggtcaaa

SEQ ID NO: 314036 - DNA, 58 bp, Artificial
  Synthetic oligonucleotide
acgagcactagcaatggtgaaaacagaggtcgaacacgaaagaaagggctacgcagaa

SEQ ID NO: 314037 - DNA, 60 bp, Artificial
  Synthetic oligonucleotide
acgagcagactagtgaatactactctgctagtgattgttccgaactggatgagtcgttgc

SEQ ID NO: 314038 - DNA, 60 bp, Artificial
  Synthetic oligonucleotide
acgagcaggctatagtcaagcgattctggagggtcaacaaccatgtggtctacaatcacc

SEQ ID NO: 314039 - DNA, 60 bp, Artificial
  Synthetic oligonucleotide
acgagcatttggatgcatcagcagtctgattctccttgcactgacacaccatgagctccg

SEQ ID NO: 314040 - DNA, 56 bp, Artificial
  Synthetic oligonucleotide
acgagcccacatggttttaccggttcggctatcaccttccagaacaatactgatcg

SEQ ID NO: 314041 - DNA, 58 bp, Artificial
  Synthetic oligonucleotide
acgagcccagcactgccacggttaagaacgatctccgggatcgttaccaggttatgca

SEQ ID NO: 314042 - DNA, 60 bp, Artificial
  Synthetic oligonucleotide
acgagcccagtacagccacggtcaagaacgatctccgcgatcggtaccaggttatgcaca

SEQ ID NO: 314043 - DNA, 60 bp, Artificial
  Synthetic oligonucleotide
acgagcccagtactgccaccgtgaagaacgatctccgtgatcgctaccaggtcatgcaca

SEQ ID NO: 314044 - DNA, 60 bp, Artificial
  Synthetic oligonucleotide
acgagcccagtactgctactgtgaagaacgatcttcgtgatcgttatcaagtcatgcaca

SEQ ID NO: 314045 - DNA, 51 bp, Artificial
  Synthetic oligonucleotide
acgagccctcggggcgcggcctaaacaacctcccccgagggaaacaccaca

SEQ ID NO: 314046 - DNA, 57 bp, Artificial
  Synthetic oligonucleotide
acgagcccttcagtacggggtcttgtgtcggtggaagacctccatgctgccaattcg

SEQ ID NO: 314047 - DNA, 55 bp, Artificial
  Synthetic oligonucleotide
acgagccgcccgcttttagtatgcaaaacgaccacattgaagatagccaaatgtc

SEQ ID NO: 314048 - DNA, 54 bp, Artificial
  Synthetic oligonucleotide
acgagccgcgtgtcacggtcgatacaagcccgatgctctattacgcatacaaat

SEQ ID NO: 314049 - DNA, 60 bp, Artificial
  Synthetic oligonucleotide
acgagcctagtaccgccacgattaagaacgatctacgcgatcgttaccaggtcatgcaca

SEQ ID NO: 314050 - DNA, 54 bp, Artificial
  Synthetic oligonucleotide
acgagcgaattgcaaagtaacgcgtccacgtaacaattattcagatcccgataa

SEQ ID NO: 314051 - DNA, 55 bp, Artificial
  Synthetic oligonucleotide
acgagcgctcgtgggacttgataaagtagttcaaacctttggcgagagtactggc

SEQ ID NO: 314052 - DNA, 58 bp, Artificial
  Synthetic oligonucleotide
acgagcgtgccgcttgggatgtgttcctcagtgggaaccttaagccgctacgagagtg

SEQ ID NO: 314053 - DNA, 56 bp, Artificial
  Synthetic oligonucleotide
acgagcgtgtgccgaaagaagcactccacgcgccatacttctgtggtattgcgacc

SEQ ID NO: 314054 - DNA, 59 bp, Artificial
  Synthetic oligonucleotide
acgagctacgacactgccactccgtgctaagtattctactttctggtctggccccgcgc

SEQ ID NO: 314055 - DNA, 56 bp, Artificial
  Synthetic oligonucleotide
acgagctcacacccgccgagacctcagttaggttgcgggcttacctgaatacacca

SEQ ID NO: 314056 - DNA, 57 bp, Artificial
  Synthetic oligonucleotide
acgagctcaccgattgttacgtgccaaggttcctctccatggctacggaggttatct

SEQ ID NO: 314057 - DNA, 57 bp, Artificial
  Synthetic oligonucleotide
acgagctggacccacactgtaaactcagtgccctttcatcaaccattaacaagttcg

SEQ ID NO: 314058 - DNA, 57 bp, Artificial
  Synthetic oligonucleotide
acgagctggacccacactgtaggctcgacgccctttcctcaaccatcaataagttcg

SEQ ID NO: 314059 - DNA, 60 bp, Artificial
  Synthetic oligonucleotide
acgagctgtatccggagttctacaaagactgctgacgcagaagttgctgacaagggactt

SEQ ID NO: 314060 - DNA, 60 bp, Artificial
  Synthetic oligonucleotide
acgagctgtttggtgctaggattcacagtcatggaaatttggcaataactccattgttaa

SEQ ID NO: 314061 - DNA, 52 bp, Artificial
  Synthetic oligonucleotide
acgagcttatgcctttgaggttaactttggtaaaccacaagttgaagggaaa

SEQ ID NO: 314062 - DNA, 60 bp, Artificial
  Synthetic oligonucleotide
acgagcttctcgtgcgcatgaaacgagctgagctctactgccctagaccactgttggcag

SEQ ID NO: 314063 - DNA, 50 bp, Artificial
  Synthetic oligonucleotide
acgagcttgtccaatgcagaagggtctacttccaacacatgctggacagt

SEQ ID NO: 314064 - DNA, 54 bp, Artificial
  Synthetic oligonucleotide
acgaggaagccaaactacgcgtgctgctagctatccatcgctactcgtgcgaca

SEQ ID NO: 314065 - DNA, 53 bp, Artificial
  Synthetic oligonucleotide
acgaggaatgagaaaattatatgatggtgaggaatatacattatacaatacag

SEQ ID NO: 314066 - DNA, 60 bp, Artificial
  Synthetic oligonucleotide
acgaggacgaccgtccatctgtggtgaatgcagtcggttggttgcaagtttaccagctca

SEQ ID NO: 314067 - DNA, 57 bp, Artificial
  Synthetic oligonucleotide
acgaggacgaggcatggtgagaggtatattgggggctctcaaaactctacggaatgg

SEQ ID NO: 314068 - DNA, 57 bp, Artificial
  Synthetic oligonucleotide
acgaggacgaggcatgttgagaactgaatcgggggctctcaaaactctacggaatgg

SEQ ID NO: 314069 - DNA, 55 bp, Artificial
  Synthetic oligonucleotide
acgaggacgtagtttaacgcaactagagcaagagttacaaagcagaggtgtaaag

SEQ ID NO: 314070 - DNA, 54 bp, Artificial
  Synthetic oligonucleotide
acgaggactgtggaacttctggggcgcagggggtgggaactcctcaaatattgt

SEQ ID NO: 314071 - DNA, 59 bp, Artificial
  Synthetic oligonucleotide
acgaggagacaggagattgtgaacttgagagtacgtcgaagatattcaccagtaacttc

SEQ ID NO: 314072 - DNA, 54 bp, Artificial
  Synthetic oligonucleotide
acgaggaggatgttaaccttggaagtggaacaagagccgttgggaagccccagc

SEQ ID NO: 314073 - DNA, 54 bp, Artificial
  Synthetic oligonucleotide
acgaggagtgacgccccccaaagggcccgcaccaacaaaccatcccacacaaga

SEQ ID NO: 314074 - DNA, 59 bp, Artificial
  Synthetic oligonucleotide
acgaggatgtcactacatcgagggcgtggcgtagcatatgtggggaagccgagggcgct

SEQ ID NO: 314075 - DNA, 58 bp, Artificial
  Synthetic oligonucleotide
acgaggattggggaccctgcaacgaacatggagaacattacatcaggactcctcggac

SEQ ID NO: 314076 - DNA, 54 bp, Artificial
  Synthetic oligonucleotide
acgaggattgtggaacttctgggacgcagggggagggaagtcctcaaatattgg

SEQ ID NO: 314077 - DNA, 59 bp, Artificial
  Synthetic oligonucleotide
acgaggcaattggttgcagggtaacttgaacaagtgttcatcattgtttggtgtggcaa

SEQ ID NO: 314078 - DNA, 56 bp, Artificial
  Synthetic oligonucleotide
acgaggcatattgactatctcgtattgggggctcaagtaaacttattggaatgggg

SEQ ID NO: 314079 - DNA, 55 bp, Artificial
  Synthetic oligonucleotide
acgaggccactgacacgtccttcgtggctggcggtgagtcgatgcccggtgtgaa

SEQ ID NO: 314080 - DNA, 56 bp, Artificial
  Synthetic oligonucleotide
acgaggccgctaaaggcacggatctacaaaacgacgaatactgcacaaagggcggc

SEQ ID NO: 314081 - DNA, 50 bp, Artificial
  Synthetic oligonucleotide
acgaggcgaatcaataattgtggaatctggcgatccgaatgcattactga

SEQ ID NO: 314082 - DNA, 51 bp, Artificial
  Synthetic oligonucleotide
acgaggcgggttctagtattaccccgcctcgttacactacctcgttacatt

SEQ ID NO: 314083 - DNA, 59 bp, Artificial
  Synthetic oligonucleotide
acgaggctcccgacgtctgcaacgtgtgcaacctggaccacgtgggggagtgcttctga

SEQ ID NO: 314084 - DNA, 50 bp, Artificial
  Synthetic oligonucleotide
acgaggctccgtgtgtcgccacgccgcttcccctccatgtgcactttcgt

SEQ ID NO: 314085 - DNA, 59 bp, Artificial
  Synthetic oligonucleotide
acgagggacgaagtacttacattagttgatggtatgctatcattggagaacgctacact

SEQ ID NO: 314086 - DNA, 57 bp, Artificial
  Synthetic oligonucleotide
acgagggcccctctgggtccaaacctagagaactactgttgtgtcaggctctctgaa

SEQ ID NO: 314087 - DNA, 53 bp, Artificial
  Synthetic oligonucleotide
acgaggggaaggcagactgtcaaagagaataaagggacacggatccgtttcaa

SEQ ID NO: 314088 - DNA, 55 bp, Artificial
  Synthetic oligonucleotide
acgaggggcgtaccctaagattcagaccaccagccgtgtgctaaggtccctgttc

SEQ ID NO: 314089 - DNA, 58 bp, Artificial
  Synthetic oligonucleotide
acgagggggaccattgggcatggaggtcacaggtaatctgggcttcggaaggaatgca

SEQ ID NO: 314090 - DNA, 59 bp, Artificial
  Synthetic oligonucleotide
acgaggtgagtcgataatcgtggagtcgggcgatccaaatgcactcctaaaacatcgat

SEQ ID NO: 314091 - DNA, 58 bp, Artificial
  Synthetic oligonucleotide
acgaggttgtgtttcgtttgccaagagacaataacaacttgttggatgaagatagata

SEQ ID NO: 314092 - DNA, 57 bp, Artificial
  Synthetic oligonucleotide
acgaggttttctgcgtccagcctgagaaggggggccgtaagccagctcgcctcatcg

SEQ ID NO: 314093 - DNA, 54 bp, Artificial
  Synthetic oligonucleotide
acgagtacgctttgttaactgaagtgcccccggtatttgcattattcggcgacc

SEQ ID NO: 314094 - DNA, 60 bp, Artificial
  Synthetic oligonucleotide
acgagtagttgatgaacatcgcgccttcatacatgtagtgaacaacagcgttagagtaca

SEQ ID NO: 314095 - DNA, 60 bp, Artificial
  Synthetic oligonucleotide
acgagtatatattaatttaactgttagtcgatctttatctgtgaatagcagcaatgaaac

SEQ ID NO: 314096 - DNA, 54 bp, Artificial
  Synthetic oligonucleotide
acgagtatcactgcatttcaacttacctatttccccagccgggggctgatgcgg

SEQ ID NO: 314097 - DNA, 60 bp, Artificial
  Synthetic oligonucleotide
acgagtcagacctccggactcagactatactgccgcttataagcaaatcacctggggagc

SEQ ID NO: 314098 - DNA, 55 bp, Artificial
  Synthetic oligonucleotide
acgagtcagcactcagatggtgggataaacaatcagtaacagcccgagcacagct

SEQ ID NO: 314099 - DNA, 60 bp, Artificial
  Synthetic oligonucleotide
acgagtcagtagactaggtagaagagccagcattcgtactcgcagtggagcacaagtagg

SEQ ID NO: 314100 - DNA, 56 bp, Artificial
  Synthetic oligonucleotide
acgagtccaaatctggcaaattagaaaacactggtgtattcccaacgctttcctca

SEQ ID NO: 314101 - DNA, 59 bp, Artificial
  Synthetic oligonucleotide
acgagtccagatgcggaagattagaaaacatttgtgaatccccagagctctcctgaggt

SEQ ID NO: 314102 - DNA, 60 bp, Artificial
  Synthetic oligonucleotide
acgagtccatcaggtggaccaaagatcctaagaacacccaagaccatgtgcgatcattat

SEQ ID NO: 314103 - DNA, 60 bp, Artificial
  Synthetic oligonucleotide
acgagtcctgggtgacacagggcaacgtgtgcgggctgtgctgaattcgctgggtaatac

SEQ ID NO: 314104 - DNA, 55 bp, Artificial
  Synthetic oligonucleotide
acgagtcgtcaagttatggctcgtcacactgataacgcgcattacggctaacgct

SEQ ID NO: 314105 - DNA, 53 bp, Artificial
  Synthetic oligonucleotide
acgagtcttcacggaggctatgactaggtattctgccccccccggggacccgc

SEQ ID NO: 314106 - DNA, 55 bp, Artificial
  Synthetic oligonucleotide
acgagtgatgaatgacggggtgcctgtactcaagtcgttcttcatgcagttcccc

SEQ ID NO: 314107 - DNA, 58 bp, Artificial
  Synthetic oligonucleotide
acgagtgcagggggtgatgtgaaaacggagtttctacatttgatcgatcacctctaaa

SEQ ID NO: 314108 - DNA, 50 bp, Artificial
  Synthetic oligonucleotide
acgagtgccgatgttgagtgggacgcggcagccgagaggtacgccaatcc

SEQ ID NO: 314109 - DNA, 54 bp, Artificial
  Synthetic oligonucleotide
acgagtgcgacgacccgtgggcgtttacgtacaaaaacgccacagagtgtcaaa

SEQ ID NO: 314110 - DNA, 60 bp, Artificial
  Synthetic oligonucleotide
acgagtgcttgcattctagaagtggagccagtttgggttgatcttcttgtatggaaacac

SEQ ID NO: 314111 - DNA, 55 bp, Artificial
  Synthetic oligonucleotide
acgagtggagcatgtacaggggggtacgtcatccgtacaggggggtacgtcacaa

SEQ ID NO: 314112 - DNA, 58 bp, Artificial
  Synthetic oligonucleotide
acgagtggcgctagcgctgtcggtttcagagagaggccacccaccgagcaagagacgt

SEQ ID NO: 314113 - DNA, 56 bp, Artificial
  Synthetic oligonucleotide
acgagtgggacaaacatacagcgttggaacagaagatttgattcaacccaccctaa

SEQ ID NO: 314114 - DNA, 58 bp, Artificial
  Synthetic oligonucleotide
acgagtggtttgatgactttaaagatgattcaatccgatacgggcgaaagatccgata

SEQ ID NO: 314115 - DNA, 60 bp, Artificial
  Synthetic oligonucleotide
acgagtgttagcaaacgcactgcacgagtcgtatatggctttgtacggctttgatgtttc

SEQ ID NO: 314116 - DNA, 60 bp, Artificial
  Synthetic oligonucleotide
acgagtgttgaatgtatacaacattcaacacgctatgaaatacaagacgctatgacaaat

SEQ ID NO: 314117 - DNA, 55 bp, Artificial
  Synthetic oligonucleotide
acgagtgtttcacgtggagatcacccagacttggtggtattgccatcaggacgcc

SEQ ID NO: 314118 - DNA, 52 bp, Artificial
  Synthetic oligonucleotide
acgagttaatacgggatttaatttgtattttacgctcccgtaattatgtcga

SEQ ID NO: 314119 - DNA, 52 bp, Artificial
  Synthetic oligonucleotide
acgagttccccaagaacggttggaataacaaaagtccagcaaatttctaata

SEQ ID NO: 314120 - DNA, 54 bp, Artificial
  Synthetic oligonucleotide
acgagttccttgccagttataaccaatccaaactaacccatctgataaacaaac

SEQ ID NO: 314121 - DNA, 55 bp, Artificial
  Synthetic oligonucleotide
acgagttcgcgctccagatgtgctatcacaagttaacaaacgtttagtcgcgtac

SEQ ID NO: 314122 - DNA, 59 bp, Artificial
  Synthetic oligonucleotide
acgagttctgactcaaagtgcgggattgcaaccgttattgctcaagctccgtactgttc

SEQ ID NO: 314123 - DNA, 60 bp, Artificial
  Synthetic oligonucleotide
acgagttgattctcagacctgccctgactttgacaacttgcttaaagagatgatgctttt

SEQ ID NO: 314124 - DNA, 56 bp, Artificial
  Synthetic oligonucleotide
acgagttggaaagctctaagttataaatcacctaatcaatcaaacaagaaagacat

SEQ ID NO: 314125 - DNA, 53 bp, Artificial
  Synthetic oligonucleotide
acgagttggatgcagtagcgaggggttgccccgctcacgctcccgcgaacact

SEQ ID NO: 314126 - DNA, 60 bp, Artificial
  Synthetic oligonucleotide
acgagtttattgtacatatagacacttggcgacccgactctcaggtgcatcctcccatgt

SEQ ID NO: 314127 - DNA, 57 bp, Artificial
  Synthetic oligonucleotide
acgagtttcgtgtgttttgaacccttggcgtatgacctggctagaagaaatctgtca

SEQ ID NO: 314128 - DNA, 54 bp, Artificial
  Synthetic oligonucleotide
acgataaatgtgtggaacccggggacttcattattaccacaacaaaacaagcac

SEQ ID NO: 314129 - DNA, 55 bp, Artificial
  Synthetic oligonucleotide
acgataacagtaatgtgtcatgcgacgctgagttttatttaataccaagatcgca

SEQ ID NO: 314130 - DNA, 60 bp, Artificial
  Synthetic oligonucleotide
acgataacattcgaagcaactggaaatttagtggtgccaagatatgccttcgcaatgaaa

SEQ ID NO: 314131 - DNA, 54 bp, Artificial
  Synthetic oligonucleotide
acgataaccaggctggaaaagagatacacgggagccgggtataaaggagcttac

SEQ ID NO: 314132 - DNA, 57 bp, Artificial
  Synthetic oligonucleotide
acgataacgagcccgccactgctacagtcaagaacgacaaacgtgatcgtttccagg

SEQ ID NO: 314133 - DNA, 60 bp, Artificial
  Synthetic oligonucleotide
acgataacttgatgggtacaatgtggctcaacgcgggatcagaaattcaggtcgctggat

SEQ ID NO: 314134 - DNA, 56 bp, Artificial
  Synthetic oligonucleotide
acgataagaacactgacgtcaccgcggtacccctagtgatggagttggccactccc

SEQ ID NO: 314135 - DNA, 54 bp, Artificial
  Synthetic oligonucleotide
acgataatcccatacccgcgaatgcaaggtgaggagacgtaactattccaacgg

SEQ ID NO: 314136 - DNA, 60 bp, Artificial
  Synthetic oligonucleotide
acgataatgcccatggggtaggatcagtaccgatgcacacagacttagagctggactttt

SEQ ID NO: 314137 - DNA, 55 bp, Artificial
  Synthetic oligonucleotide
acgatacaagccggcggaaaaggtgtcggagccccgatacacgctgccgacaggt

SEQ ID NO: 314138 - DNA, 56 bp, Artificial
  Synthetic oligonucleotide
acgatacacgaccggcttgttttctggttggtaaaatgcgtgtcttcgcgtccaca

SEQ ID NO: 314139 - DNA, 56 bp, Artificial
  Synthetic oligonucleotide
acgatacggagaaatgctgcacgccccgagacggccgttggaaggcttgtctcgga

SEQ ID NO: 314140 - DNA, 57 bp, Artificial
  Synthetic oligonucleotide
acgatactatgtctctggttaacataatacaaagaggtaagttgactaagtattcca

SEQ ID NO: 314141 - DNA, 57 bp, Artificial
  Synthetic oligonucleotide
acgatactcttattggccaggaaggcattaagatggttgtaggcgagccaaataccg

SEQ ID NO: 314142 - DNA, 52 bp, Artificial
  Synthetic oligonucleotide
acgatacttcaactgacgagcctattgtagtaataagcgggttacctgaacg

SEQ ID NO: 314143 - DNA, 56 bp, Artificial
  Synthetic oligonucleotide
acgatagagaaggtcggggacatgcctaccatcaagaacagacgagcgaccaagtc

SEQ ID NO: 314144 - DNA, 57 bp, Artificial
  Synthetic oligonucleotide
acgatagatgtttcgtcagtgagtggggtcggtgcatatattttgagtttgggcggt

SEQ ID NO: 314145 - DNA, 57 bp, Artificial
  Synthetic oligonucleotide
acgatagattggaaatctagatacgaacaattagagaaacgattcgaatcgttgaag

SEQ ID NO: 314146 - DNA, 60 bp, Artificial
  Synthetic oligonucleotide
acgatagcacgatttcacattgctgtgcctcatagagaatatcagatattgtgaaaagtg

SEQ ID NO: 314147 - DNA, 60 bp, Artificial
  Synthetic oligonucleotide
acgatagcattgcatcttcactcaaggtccggttagagtccctggcaggtgtgggctaca

SEQ ID NO: 314148 - DNA, 50 bp, Artificial
  Synthetic oligonucleotide
acgatatagagggtgctccgcgattgtctccgtgacccatgcttgcaact

SEQ ID NO: 314149 - DNA, 59 bp, Artificial
  Synthetic oligonucleotide
acgatatcgcagtgatatagtataaacatagtcgaaggcatacttttccctacgtggta

SEQ ID NO: 314150 - DNA, 56 bp, Artificial
  Synthetic oligonucleotide
acgatatcggtgcaagcccgtacacagctaaagtgtctaaaatggagttacccaac

SEQ ID NO: 314151 - DNA, 58 bp, Artificial
  Synthetic oligonucleotide
acgatatgggtgctcgccttacaattaccagttaacccgcaagtgatttgggatgtgc

SEQ ID NO: 314152 - DNA, 59 bp, Artificial
  Synthetic oligonucleotide
acgatcaaggatctagagaacaagtagtcagttatgtcaacactaatatgggcctaaag

SEQ ID NO: 314153 - DNA, 53 bp, Artificial
  Synthetic oligonucleotide
acgatcaagttaatacctgtagaggttggtgcatatgcgaatagatttgggtt

SEQ ID NO: 314154 - DNA, 57 bp, Artificial
  Synthetic oligonucleotide
acgatcaatagttgctagaagagctgcagtgaacgaagacatagttatatcgaaagc

SEQ ID NO: 314155 - DNA, 56 bp, Artificial
  Synthetic oligonucleotide
acgatcacacacgttacgactactagggccttttcagtacttcaacttctccgaga

SEQ ID NO: 314156 - DNA, 52 bp, Artificial
  Synthetic oligonucleotide
acgatcacatatcataagaaagggatcgtgatgcagtcctcaccactgtttt

SEQ ID NO: 314157 - DNA, 59 bp, Artificial
  Synthetic oligonucleotide
acgatcagcgagaagttacgctcaggttatgaaaccttcaaagtcattgaaggctggtc

SEQ ID NO: 314158 - DNA, 60 bp, Artificial
  Synthetic oligonucleotide
acgatcagtcgcgtgctcatgtatagtagtgctaaggcattccaccatccgtatcatcgc

SEQ ID NO: 314159 - DNA, 59 bp, Artificial
  Synthetic oligonucleotide
acgatcatgaatcgtgttccagaggtgaaggagatcggaacggtttcaattactcgcac

SEQ ID NO: 314160 - DNA, 56 bp, Artificial
  Synthetic oligonucleotide
acgatccacggtggcaactatccaggggccctccgtcccgtcacactagtagccta

SEQ ID NO: 314161 - DNA, 54 bp, Artificial
  Synthetic oligonucleotide
acgatcccaaacaggtacagctttgtgtgatagggtgcaccccttgcattggag

SEQ ID NO: 314162 - DNA, 55 bp, Artificial
  Synthetic oligonucleotide
acgatcccacacgggcacgaaaagaccgtatccttatcaatgtggaaagcctgct

SEQ ID NO: 314163 - DNA, 55 bp, Artificial
  Synthetic oligonucleotide
acgatcccagtctcgtgggtaatcccctggatcacaccagtacggggagagtccg

SEQ ID NO: 314164 - DNA, 60 bp, Artificial
  Synthetic oligonucleotide
acgatcccctgctggaaaacaagtctctgctcgagacacatcctctctaccagaatccgg

SEQ ID NO: 314165 - DNA, 60 bp, Artificial
  Synthetic oligonucleotide
acgatcccttcatacttgctgagcgctggtgacctggtggatactaacctcatgtgaatg

SEQ ID NO: 314166 - DNA, 51 bp, Artificial
  Synthetic oligonucleotide
acgatccgcagttcacgaactgggcgtacttcccgctgcctagctacgcga

SEQ ID NO: 314167 - DNA, 54 bp, Artificial
  Synthetic oligonucleotide
acgatccgtcaagcttttacgggtcctccctatttaacgaggacaccgcatctc

SEQ ID NO: 314168 - DNA, 52 bp, Artificial
  Synthetic oligonucleotide
acgatcctaacactattaatattttaccgtttgatggacaagaaatcactga

SEQ ID NO: 314169 - DNA, 55 bp, Artificial
  Synthetic oligonucleotide
acgatcctgtacgcatgttaccgaccccttcgtcaacgtgagccgacagttgcag

SEQ ID NO: 314170 - DNA, 60 bp, Artificial
  Synthetic oligonucleotide
acgatcgagatagcatcttaaccttacttctactgtctactttagcagatgtgtatactg

SEQ ID NO: 314171 - DNA, 60 bp, Artificial
  Synthetic oligonucleotide
acgatctacggagcctgtgccccttcagctaccgccgcttgagagacttcatcttgattg

SEQ ID NO: 314172 - DNA, 55 bp, Artificial
  Synthetic oligonucleotide
acgatctcgaacatgagttctgagaatgtaccctcattccgctggactcaatccc

SEQ ID NO: 314173 - DNA, 60 bp, Artificial
  Synthetic oligonucleotide
acgatctctcacatccctatgtactggactgtggtgtccccattagccagttattggtct

SEQ ID NO: 314174 - DNA, 60 bp, Artificial
  Synthetic oligonucleotide
acgatctctgagcagatttgggaagaaagtaggtaacgcgctcacatcaaacacagcgaa

SEQ ID NO: 314175 - DNA, 60 bp, Artificial
  Synthetic oligonucleotide
acgatctgagggatagatatcaagtgttacacaaatgcaacgcgtcggttactggtggtg

SEQ ID NO: 314176 - DNA, 60 bp, Artificial
  Synthetic oligonucleotide
acgatcttacatggctaccgagttcgcttgtcgcgaatttgaagataagttcacaggtgc

SEQ ID NO: 314177 - DNA, 57 bp, Artificial
  Synthetic oligonucleotide
acgatcttcgtgatcggtttcaagtcatgcataggtttaatgctaaggttacgggtg

SEQ ID NO: 314178 - DNA, 60 bp, Artificial
  Synthetic oligonucleotide
acgatcttcgtgatcgttatcaggtagtccacagattttatgctaaggtcactggtggtc

SEQ ID NO: 314179 - DNA, 55 bp, Artificial
  Synthetic oligonucleotide
acgatgacgcaatgctcctgataacaactgggttttttagttactcgggtcgctt

SEQ ID NO: 314180 - DNA, 59 bp, Artificial
  Synthetic oligonucleotide
acgatgacgtgtgagtatagtcccagtaagaaggtgtctaggaaagctgggtgttcaga

SEQ ID NO: 314181 - DNA, 55 bp, Artificial
  Synthetic oligonucleotide
acgatgactagcataagcctgaccattgctccagaccttattcattgtggtgttc

SEQ ID NO: 314182 - DNA, 57 bp, Artificial
  Synthetic oligonucleotide
acgatgagaaatcgaaatcggacaatttccttgtgcctgaagccgttgatccttctt

SEQ ID NO: 314183 - DNA, 60 bp, Artificial
  Synthetic oligonucleotide
acgatgaggacatgaggccgtactgctggcactaccctccgaagccttgcggtatcgtct

SEQ ID NO: 314184 - DNA, 60 bp, Artificial
  Synthetic oligonucleotide
acgatgagtcacaccttaatctcaagtctgggattagggctgagattgtggattccatgg

SEQ ID NO: 314185 - DNA, 55 bp, Artificial
  Synthetic oligonucleotide
acgatgatccggccagttgttacagctttcagattcccacggctccagcttctcc

SEQ ID NO: 314186 - DNA, 58 bp, Artificial
  Synthetic oligonucleotide
acgatgattggggattatctaaagtccaggagtaatgagtgcagggacaagttggaca

SEQ ID NO: 314187 - DNA, 59 bp, Artificial
  Synthetic oligonucleotide
acgatgcacccactagcccgtgctgagtataaagagacgtcacgtgtaagtttgacgtc

SEQ ID NO: 314188 - DNA, 60 bp, Artificial
  Synthetic oligonucleotide
acgatgcactcgagacggatgagctagtacttcatgtcgacatcgagcaccaacgcattc

SEQ ID NO: 314189 - DNA, 60 bp, Artificial
  Synthetic oligonucleotide
acgatgcagcaatattgcatcagctcccgaccggtctgctggattgtatacgacgcggcc

SEQ ID NO: 314190 - DNA, 58 bp, Artificial
  Synthetic oligonucleotide
acgatgcatagtgggtaccagttcagtatccacaacaattcgtaccaaaacctcagga

SEQ ID NO: 314191 - DNA, 58 bp, Artificial
  Synthetic oligonucleotide
acgatgcccgagttctagacgctcttgcttacgctttggtcgacaggtataaaccaga

SEQ ID NO: 314192 - DNA, 60 bp, Artificial
  Synthetic oligonucleotide
acgatgccggctcagaccgagtgatggtatcacctctagctgtgacatggtggaatagga

SEQ ID NO: 314193 - DNA, 60 bp, Artificial
  Synthetic oligonucleotide
acgatgcctgtgtgcatgtgacataggtctttgtactgatcccagacagcattttcaaac

SEQ ID NO: 314194 - DNA, 60 bp, Artificial
  Synthetic oligonucleotide
acgatgcgaatccacgattacatagggtgtacggactgccgaaagagcctccaatgtatc

SEQ ID NO: 314195 - DNA, 50 bp, Artificial
  Synthetic oligonucleotide
acgatgcggctagacgaaccgtgcgaataccacgtgcgggtgcacctgga

SEQ ID NO: 314196 - DNA, 57 bp, Artificial
  Synthetic oligonucleotide
acgatgcttatgggtctcatcggccgcgcagcggaagctttcacattatctgatgcc

SEQ ID NO: 314197 - DNA, 55 bp, Artificial
  Synthetic oligonucleotide
acgatggacccctccctctcatggcttgattacgctgtccaatccaatgcatcgg

SEQ ID NO: 314198 - DNA, 60 bp, Artificial
  Synthetic oligonucleotide
acgatggattccagcactcttgaattgagaagtagatactgggccataagaaccagaagt

SEQ ID NO: 314199 - DNA, 60 bp, Artificial
  Synthetic oligonucleotide
acgatggattcctctctctcatggcttgactacgctgttcggtctaatgcgtcggtcacg

SEQ ID NO: 314200 - DNA, 58 bp, Artificial
  Synthetic oligonucleotide
acgatggcctggacggtggtaaatagcatttgcaacaccacaggggtcgagaagccca

SEQ ID NO: 314201 - DNA, 55 bp, Artificial
  Synthetic oligonucleotide
acgatggctcaacgattctaatcacctcgtgcggcacgtaatcgcagtcccacct

SEQ ID NO: 314202 - DNA, 60 bp, Artificial
  Synthetic oligonucleotide
acgatggtcgtttgacccgggctactgctgcgaaagtgattctgaggccatccactctga

SEQ ID NO: 314203 - DNA, 55 bp, Artificial
  Synthetic oligonucleotide
acgatggtctcattggtgtcagtcatggcaggagttattgcttctacagtgtctg

SEQ ID NO: 314204 - DNA, 57 bp, Artificial
  Synthetic oligonucleotide
acgatggtgtgcgtgttaattatgtggactttggaactgagtccttgacctatgggg

SEQ ID NO: 314205 - DNA, 55 bp, Artificial
  Synthetic oligonucleotide
acgatgtcagatttgactcaagacggaagaaactacgacttcatgttccagccat

SEQ ID NO: 314206 - DNA, 60 bp, Artificial
  Synthetic oligonucleotide
acgatgtcaggcctggctgaacattgaagaggtcggcaagatccatgccatgtgagaact

SEQ ID NO: 314207 - DNA, 54 bp, Artificial
  Synthetic oligonucleotide
acgatgtctggacttacttggacctcttcctaatcatatttaggaaaataacgt

SEQ ID NO: 314208 - DNA, 60 bp, Artificial
  Synthetic oligonucleotide
acgatgtgaactgagtacctctatctgaaatgatgaaaactgggacaccatgcaggcgag

SEQ ID NO: 314209 - DNA, 60 bp, Artificial
  Synthetic oligonucleotide
acgatgtgtcaccggaagatttggatcgtgttcgcactgaaggtggatctctggtggagt

SEQ ID NO: 314210 - DNA, 54 bp, Artificial
  Synthetic oligonucleotide
acgatgttccgtacgaaaccgtttacgaatgcgcaatgggggcgaggcaatact

SEQ ID NO: 314211 - DNA, 54 bp, Artificial
  Synthetic oligonucleotide
acgatgttggctaacgtaacatccattagacaagagtacgcaataccagttgga

SEQ ID NO: 314212 - DNA, 57 bp, Artificial
  Synthetic oligonucleotide
acgatgttggggccgactcgtgcgagatggacgtttggcgtgttttggctgtcccca

SEQ ID NO: 314213 - DNA, 57 bp, Artificial
  Synthetic oligonucleotide
acgattaagggccgcaggcccgtcaagatggacggtttgatcagatgtcccgagtta

SEQ ID NO: 314214 - DNA, 58 bp, Artificial
  Synthetic oligonucleotide
acgattacctaaccacaaatgttattctctcgaccggagctgatgttgtatcttgcgt

SEQ ID NO: 314215 - DNA, 60 bp, Artificial
  Synthetic oligonucleotide
acgattacgatgctacccttcgctctcactcattacagttcaaggcgccatggaattatg

SEQ ID NO: 314216 - DNA, 52 bp, Artificial
  Synthetic oligonucleotide
acgattagtagaaaccttagattaaaagagatgattgctcaaactgaaggaa

SEQ ID NO: 314217 - DNA, 55 bp, Artificial
  Synthetic oligonucleotide
acgattcaacgtacaggctgtggtgaagtacgtgcgaagaatgcgtcattcgagt

SEQ ID NO: 314218 - DNA, 60 bp, Artificial
  Synthetic oligonucleotide
acgattcaagatccgttacgcacactgcgaaaactgcatataacaacacgtgaccccaca

SEQ ID NO: 314219 - DNA, 55 bp, Artificial
  Synthetic oligonucleotide
acgattcacacttcctggtagagtcaccaattacatgcaggtggctcgtgtcccg

SEQ ID NO: 314220 - DNA, 57 bp, Artificial
  Synthetic oligonucleotide
acgattcatggtgatatctccgtgggtatcggaaaggtgaaacggattcagttcgaa

SEQ ID NO: 314221 - DNA, 60 bp, Artificial
  Synthetic oligonucleotide
acgattcgcagggcgctacctacacttataccactattattgccacagcagatgcccggg

SEQ ID NO: 314222 - DNA, 57 bp, Artificial
  Synthetic oligonucleotide
acgattcgtattattacattgacgctttaaaccgtgtgcgtcgcaaaatatatcaag

SEQ ID NO: 314223 - DNA, 58 bp, Artificial
  Synthetic oligonucleotide
acgattctgaagtgtaacaataagacgtttgatggaaaaggactatgtacaaatgtca

SEQ ID NO: 314224 - DNA, 59 bp, Artificial
  Synthetic oligonucleotide
acgattctgaatactgcagttccgatagggtcttgcgttagtaaatgccacaccgacag

SEQ ID NO: 314225 - DNA, 60 bp, Artificial
  Synthetic oligonucleotide
acgattgagtggcgaatgctacatctcacgtgtctaataccgcgttcgactcgtttccga

SEQ ID NO: 314226 - DNA, 58 bp, Artificial
  Synthetic oligonucleotide
acgattgatacactcagttaccagacggccttctctacatataaaaccaccggcttga

SEQ ID NO: 314227 - DNA, 60 bp, Artificial
  Synthetic oligonucleotide
acgattgccccatggaattagttggcaatcggcatcgatgttacgcggtagtcgttgaga

SEQ ID NO: 314228 - DNA, 60 bp, Artificial
  Synthetic oligonucleotide
acgattggacccaagtttacatgaggggagggagcatgagacatacatgcacccggcaat

SEQ ID NO: 314229 - DNA, 51 bp, Artificial
  Synthetic oligonucleotide
acgattggctatggacactatggttctgatgttcacccttgtcaggtgata

SEQ ID NO: 314230 - DNA, 56 bp, Artificial
  Synthetic oligonucleotide
acgattgtgctactctgtagtttcttgacccttataatccaaaattccaccgctgt

SEQ ID NO: 314231 - DNA, 55 bp, Artificial
  Synthetic oligonucleotide
acgattgtgtcccgtttaatctgcctcgggtgtggagtcttgcccgttgttactc

SEQ ID NO: 314232 - DNA, 55 bp, Artificial
  Synthetic oligonucleotide
acgattgtgtgccaattctagacgatgtttcattgattgaaagattagccgactc

SEQ ID NO: 314233 - DNA, 53 bp, Artificial
  Synthetic oligonucleotide
acgattgtgtgtgacataggcgagagtgacccccggcctgaggtggagaagac

SEQ ID NO: 314234 - DNA, 60 bp, Artificial
  Synthetic oligonucleotide
acgatttaactatggcaaacaacatggcgaagattgggccaaacaaggagcagcaccaga

SEQ ID NO: 314235 - DNA, 55 bp, Artificial
  Synthetic oligonucleotide
acgatttaattagggatttgatttcagttattagggctagaaattatgtcgaagc

SEQ ID NO: 314236 - DNA, 55 bp, Artificial
  Synthetic oligonucleotide
acgatttagagaaggacataaagttggatcgcgtttcgcgagtagtatttccacc

SEQ ID NO: 314237 - DNA, 60 bp, Artificial
  Synthetic oligonucleotide
acgatttatcgtctattcaggggtggctcacacaatcatcagtgcccaaagcactgatga

SEQ ID NO: 314238 - DNA, 58 bp, Artificial
  Synthetic oligonucleotide
acgatttcacccacatgactaccactttcccgtcaggctcaacggccacttctactga

SEQ ID NO: 314239 - DNA, 58 bp, Artificial
  Synthetic oligonucleotide
acgatttcgaccagctcgttgacgcgatcgttgctaggttggatcgggcctctggtgt

SEQ ID NO: 314240 - DNA, 54 bp, Artificial
  Synthetic oligonucleotide
acgatttgggaacaaaacaatagtctttaatcaatcctcaggaggggacccaga

SEQ ID NO: 314241 - DNA, 60 bp, Artificial
  Synthetic oligonucleotide
acgattttgtgttaagtctatctgggttacaggcaaaatctggatggatgagaacatcaa

SEQ ID NO: 314242 - DNA, 55 bp, Artificial
  Synthetic oligonucleotide
acgcaaaacataccagagaatacgctgagttctactcacagtcaaatcagttact

SEQ ID NO: 314243 - DNA, 56 bp, Artificial
  Synthetic oligonucleotide
acgcaaaacatgcgtcaattgttggaactgtttaccccttttgggatgactcattg

SEQ ID NO: 314244 - DNA, 60 bp, Artificial
  Synthetic oligonucleotide
acgcaaacagaagggatgaatttcgatgatatatctgctgcagtattgaagactaaaatt

SEQ ID NO: 314245 - DNA, 57 bp, Artificial
  Synthetic oligonucleotide
acgcaaacgtcagctattagtagaagattgcgactacgtgaaattactacacaaact

SEQ ID NO: 314246 - DNA, 60 bp, Artificial
  Synthetic oligonucleotide
acgcaaagaaagtatttacgtcattgggatacaggcaatctgtcgtagatcaattgatac

SEQ ID NO: 314247 - DNA, 55 bp, Artificial
  Synthetic oligonucleotide
acgcaaagcctagtaactatctggaaattacttggttggtcgctccgccataccc

SEQ ID NO: 314248 - DNA, 55 bp, Artificial
  Synthetic oligonucleotide
acgcaaagcctagtatcacctttgatgtactaagactggtcgtttcctgcaaccc

SEQ ID NO: 314249 - DNA, 59 bp, Artificial
  Synthetic oligonucleotide
acgcaaagctagttttgcacaccggacaaaccgggtacagcttgcaatgctgccacagt

SEQ ID NO: 314250 - DNA, 56 bp, Artificial
  Synthetic oligonucleotide
acgcaaagggtgaccgttctattccacacattttctggacaaagcaaacactagag

SEQ ID NO: 314251 - DNA, 55 bp, Artificial
  Synthetic oligonucleotide
acgcaaagttagtaaaagcagtggattggcgcccagtggacttctctttcaaggt

SEQ ID NO: 314252 - DNA, 58 bp, Artificial
  Synthetic oligonucleotide
acgcaaataatacaagcataatgatgcagaaaggcaactttaagggccctagaagaac

SEQ ID NO: 314253 - DNA, 50 bp, Artificial
  Synthetic oligonucleotide
acgcaaattagacgatgtggccgatagttttaatttggctatgagatacg

SEQ ID NO: 314254 - DNA, 54 bp, Artificial
  Synthetic oligonucleotide
acgcaacaatggatttccgacatgaaagcgaagactggtgctaatatttgcgct

SEQ ID NO: 314255 - DNA, 60 bp, Artificial
  Synthetic oligonucleotide
acgcaacaccagaacacgcccaggcagtgtcctactacctattgaccagaggctggactc

SEQ ID NO: 314256 - DNA, 58 bp, Artificial
  Synthetic oligonucleotide
acgcaacagagaggtacatgccacggtatggacttcaaaggaacttgaccgattatgg

SEQ ID NO: 314257 - DNA, 59 bp, Artificial
  Synthetic oligonucleotide
acgcaacaggcaagcagtgttacttctcccctcaatccagcataatgaatttttggaac

SEQ ID NO: 314258 - DNA, 60 bp, Artificial
  Synthetic oligonucleotide
acgcaaccattcgtgtgcttaagaatggtactagcgtgtaccgatacaagaacgatgctc

SEQ ID NO: 314259 - DNA, 60 bp, Artificial
  Synthetic oligonucleotide
acgcaaccattgaatggtgcgggcgaaatggcgaattgtgtgccacaatagcggtggcac

SEQ ID NO: 314260 - DNA, 57 bp, Artificial
  Synthetic oligonucleotide
acgcaacccaatcgatccaggtcgtatatcaagctgaaacgcctacgtttcaaagga

SEQ ID NO: 314261 - DNA, 54 bp, Artificial
  Synthetic oligonucleotide
acgcaacgtttgtaagactactggattgttggtttgcttatttggcggaggact

SEQ ID NO: 314262 - DNA, 60 bp, Artificial
  Synthetic oligonucleotide
acgcaactatctaactcagttagccaaaacactcaagacatatccgccatgggtgacaga

SEQ ID NO: 314263 - DNA, 60 bp, Artificial
  Synthetic oligonucleotide
acgcaactcaacaggataagaacagaatggataagcgcgtcatatgatagaactcggatt

SEQ ID NO: 314264 - DNA, 60 bp, Artificial
  Synthetic oligonucleotide
acgcaactgctggtctcactcacctgatgatctggcattccaacttgaatgatgcaacat

SEQ ID NO: 314265 - DNA, 55 bp, Artificial
  Synthetic oligonucleotide
acgcaacttccgtctggagacatccccgcctcgggtgtgggcacccgtaagctga

SEQ ID NO: 314266 - DNA, 60 bp, Artificial
  Synthetic oligonucleotide
acgcaagaaatgccgtgcgagtgcagtgaagagactgttttgtccgcaagctcatgtcga

SEQ ID NO: 314267 - DNA, 60 bp, Artificial
  Synthetic oligonucleotide
acgcaagcgaaacaatgctagcaaacgtgacatctgttagacaagaatacgcaataccag

SEQ ID NO: 314268 - DNA, 60 bp, Artificial
  Synthetic oligonucleotide
acgcaagcgcgtccctgccaagatagtggtgttgtgcgggccacctggccatggcaaatc

SEQ ID NO: 314269 - DNA, 53 bp, Artificial
  Synthetic oligonucleotide
acgcaagcggagctagctgatttgattggtgtcacaaagagaacaattatcca

SEQ ID NO: 314270 - DNA, 57 bp, Artificial
  Synthetic oligonucleotide
acgcaaggaggagaggttgctcttaacaagctgtcgcagcccgtaccccacccatcg

SEQ ID NO: 314271 - DNA, 54 bp, Artificial
  Synthetic oligonucleotide
acgcaaggtgatttgttacatggagttagtctcaacgctggcactcatctttac

SEQ ID NO: 314272 - DNA, 58 bp, Artificial
  Synthetic oligonucleotide
acgcaatccactgtttgtttgagtggtagcgagcattcttttggacggatcggaattc

SEQ ID NO: 314273 - DNA, 54 bp, Artificial
  Synthetic oligonucleotide
acgcaatcggtcaagagacaagacgcgggaagggcaacattttgatctgctctg

SEQ ID NO: 314274 - DNA, 50 bp, Artificial
  Synthetic oligonucleotide
acgcaatgatctattttcatgcagctccgactaagtttagcactaatttg

SEQ ID NO: 314275 - DNA, 56 bp, Artificial
  Synthetic oligonucleotide
acgcaatggaggtttgttgacgtatctaaaactacacagaacggaagttattcaca

SEQ ID NO: 314276 - DNA, 56 bp, Artificial
  Synthetic oligonucleotide
acgcaatgtagcgctctttcggccgaattagcgtcctactctgacactcttagtac

SEQ ID NO: 314277 - DNA, 60 bp, Artificial
  Synthetic oligonucleotide
acgcaatgtctcgctcgcttcatttacaggcatttactcgctcatcggctactgcgcgcc

SEQ ID NO: 314278 - DNA, 55 bp, Artificial
  Synthetic oligonucleotide
acgcaattgcgatccttgtgactacgcccaccggtgccgtcaacacggccgtgct

SEQ ID NO: 314279 - DNA, 60 bp, Artificial
  Synthetic oligonucleotide
acgcacaacaagcaggcataatgatgcagagaggcaattttaagggccaaaaaagaatta

SEQ ID NO: 314280 - DNA, 56 bp, Artificial
  Synthetic oligonucleotide
acgcacaacttctcttccacaccctcggtgtctgcgaccaactgatgaccacaact

SEQ ID NO: 314281 - DNA, 60 bp, Artificial
  Synthetic oligonucleotide
acgcacagatgcgcagaaaagtggagctattcacttacatgcgctttgacgcggaattca

SEQ ID NO: 314282 - DNA, 50 bp, Artificial
  Synthetic oligonucleotide
acgcacagcaactgtacagggaccaagcttggacttcgccctatctctac

SEQ ID NO: 314283 - DNA, 57 bp, Artificial
  Synthetic oligonucleotide
acgcacatgactaatatcactttggcaacttttaccgttaggtaactcacaatacaa

SEQ ID NO: 314284 - DNA, 60 bp, Artificial
  Synthetic oligonucleotide
acgcacatgtattacaggcatgagtccaagaagttgatgcaatcaaacaagagcattgac

SEQ ID NO: 314285 - DNA, 58 bp, Artificial
  Synthetic oligonucleotide
acgcaccaacatgacggctcacattaacgtgccgttcgtgggtgtcaacaggtacgac

SEQ ID NO: 314286 - DNA, 55 bp, Artificial
  Synthetic oligonucleotide
acgcaccaacttattttattatgctggcagttcacgtttgcttgcagtgggtcac

SEQ ID NO: 314287 - DNA, 49 bp, Artificial
  Synthetic oligonucleotide
acgcaccaccacggaccccggttggtcaaaccagttaaacccaagtaac

SEQ ID NO: 314288 - DNA, 52 bp, Artificial
  Synthetic oligonucleotide
acgcaccaccaggggcacaacccccaaagactcgcaaagatgctatgctggg

SEQ ID NO: 314289 - DNA, 55 bp, Artificial
  Synthetic oligonucleotide
acgcaccacgccttgaataaacagttacccatacgggctatatattctaccccga

SEQ ID NO: 314290 - DNA, 60 bp, Artificial
  Synthetic oligonucleotide
acgcaccgattgtcaaggctggatgctcatgtcatgtcaatgttaggggttggttcacac

SEQ ID NO: 314291 - DNA, 55 bp, Artificial
  Synthetic oligonucleotide
acgcacctatcgacacttgtgtttctgagtgtatcactccaaatggaagcattcc

SEQ ID NO: 314292 - DNA, 58 bp, Artificial
  Synthetic oligonucleotide
acgcacctgggctcgaagttggggaattttgccataatgcgcttctccggtgaggcta

SEQ ID NO: 314293 - DNA, 60 bp, Artificial
  Synthetic oligonucleotide
acgcacgacaatagcaatcgaggaaaagctgcctatcggaaatgcaaatgcgcaaactat

SEQ ID NO: 314294 - DNA, 55 bp, Artificial
  Synthetic oligonucleotide
acgcacgacccggattaatcagttattctgagtatatacccgttagttactcaat

SEQ ID NO: 314295 - DNA, 59 bp, Artificial
  Synthetic oligonucleotide
acgcacgcggcggcgacgcctaaaataacgtttgaatgccatgactcactgttgctaac

SEQ ID NO: 314296 - DNA, 56 bp, Artificial
  Synthetic oligonucleotide
acgcacgtcggacgtgtattacagtgggaatatgtaaaagtgagaggttcgaatcc

SEQ ID NO: 314297 - DNA, 57 bp, Artificial
  Synthetic oligonucleotide
acgcacgtcgtgttgccctccatgacgcccaacaaattgaccaatggtggttaaatc

SEQ ID NO: 314298 - DNA, 54 bp, Artificial
  Synthetic oligonucleotide
acgcacgtttaagtactaccaggttgttcgttgtcgccctctctggcgtggtag

SEQ ID NO: 314299 - DNA, 60 bp, Artificial
  Synthetic oligonucleotide
acgcactacgtgccggagagcgatgcagctactcgcgtcactgccatacttagtagcctc

SEQ ID NO: 314300 - DNA, 60 bp, Artificial
  Synthetic oligonucleotide
acgcactacgtgccggagagtgatgcagccgcccgcgtcactgccatactcggtagcctc

SEQ ID NO: 314301 - DNA, 56 bp, Artificial
  Synthetic oligonucleotide
acgcactcaaacagtaagtggcctgccatgaccgtttcgtacccgcgtagtttcac

SEQ ID NO: 314302 - DNA, 60 bp, Artificial
  Synthetic oligonucleotide
acgcacttatacggatgagtgcgtatatacatcgtatcctattacaaggtctatatcctc

SEQ ID NO: 314303 - DNA, 60 bp, Artificial
  Synthetic oligonucleotide
acgcactttaccgtcagtaatataatagatataagcaacagctaagtccatacattgaaa

SEQ ID NO: 314304 - DNA, 56 bp, Artificial
  Synthetic oligonucleotide
acgcacttttacagcagctccacttgaaacactacttggtgggaaagtttgcgtgg

SEQ ID NO: 314305 - DNA, 59 bp, Artificial
  Synthetic oligonucleotide
acgcagaatccgtatgcgtaagggatttggtgatgcgctgagaaattacgcctttaaga

SEQ ID NO: 314306 - DNA, 55 bp, Artificial
  Synthetic oligonucleotide
acgcagaatgtcaccattaatccagggccgtttgcacaaacgagttatgctccag

SEQ ID NO: 314307 - DNA, 50 bp, Artificial
  Synthetic oligonucleotide
acgcagacgcgacaccttccgagcccgccgacgttaccagatattgcccc

SEQ ID NO: 314308 - DNA, 60 bp, Artificial
  Synthetic oligonucleotide
acgcagacgcgctgtttattatgttccgaattcactcagtcgagtagacgtacacgatgt

SEQ ID NO: 314309 - DNA, 57 bp, Artificial
  Synthetic oligonucleotide
acgcagactctcccgggtctagaacgctggtccccagcctgtttaggtgtctgtatg

SEQ ID NO: 314310 - DNA, 55 bp, Artificial
  Synthetic oligonucleotide
acgcagactttaggaataggttgtattaccacaaatacagcgacatttgaagagg

SEQ ID NO: 314311 - DNA, 53 bp, Artificial
  Synthetic oligonucleotide
acgcagagaattcgttaacgcacacgacatgactgcagaggagtatctcgcaa

SEQ ID NO: 314312 - DNA, 56 bp, Artificial
  Synthetic oligonucleotide
acgcagataaaataagggtcatacccgctgaggtgggcgcttattataatcgtttc

SEQ ID NO: 314313 - DNA, 60 bp, Artificial
  Synthetic oligonucleotide
acgcagatatccgccaaccttggacaggcgaatatttcactggatgctcagaatagtgcg

SEQ ID NO: 314314 - DNA, 50 bp, Artificial
  Synthetic oligonucleotide
acgcagatgacactgctggctgggacacaaaaggcaccaattcagaccca

SEQ ID NO: 314315 - DNA, 60 bp, Artificial
  Synthetic oligonucleotide
acgcagatgtaccataactgggtacctgcccatagtgttctgcggccacactaggggcaa

SEQ ID NO: 314316 - DNA, 55 bp, Artificial
  Synthetic oligonucleotide
acgcagcacaagcttcggagtatgtaccagtgacggtcaccattgcacccatgtg

SEQ ID NO: 314317 - DNA, 60 bp, Artificial
  Synthetic oligonucleotide
acgcagcatggaacaatagtcattagagtgcagtatgaaggagaaggagcaccatgcaag

SEQ ID NO: 314318 - DNA, 55 bp, Artificial
  Synthetic oligonucleotide
acgcagcgttagtgctggacgcgcgctgtatattcctccgtacgagttactgctg

SEQ ID NO: 314319 - DNA, 60 bp, Artificial
  Synthetic oligonucleotide
acgcagctaccctgggacaagggatgcatgccagaattacctcatgacatctgggaactg

SEQ ID NO: 314320 - DNA, 60 bp, Artificial
  Synthetic oligonucleotide
acgcagctgaatagtttggcccactggattctgaccctttgtgcaatggttgaggtgacc

SEQ ID NO: 314321 - DNA, 60 bp, Artificial
  Synthetic oligonucleotide
acgcagcttcctcaatcagtagatctgcatcaataagatcagtgggtagtaatgcgacaa

SEQ ID NO: 314322 - DNA, 58 bp, Artificial
  Synthetic oligonucleotide
acgcagcttggagacaacgctattagcggaggctccaacgagggttccacggacacaa

SEQ ID NO: 314323 - DNA, 60 bp, Artificial
  Synthetic oligonucleotide
acgcaggagaagacaaaatcggctcttacgcggtgctctccccacaagcagtactgcgaa

SEQ ID NO: 314324 - DNA, 55 bp, Artificial
  Synthetic oligonucleotide
acgcaggcgacggagtagatattctaaaccgccatagagaaaagatcggttcagg

SEQ ID NO: 314325 - DNA, 60 bp, Artificial
  Synthetic oligonucleotide
acgcaggcgcagcgacaaacgtcgaactccaactagctcgtatggtggaggcgaagagac

SEQ ID NO: 314326 - DNA, 60 bp, Artificial
  Synthetic oligonucleotide
acgcaggggccgcatggtatgaactcacaccatcggagactaccgtcaggcttagagcgt

SEQ ID NO: 314327 - DNA, 59 bp, Artificial
  Synthetic oligonucleotide
acgcagggtccattaatgctccaaccgtgtcagatagtagggccttagcaaggagattc

SEQ ID NO: 314328 - DNA, 55 bp, Artificial
  Synthetic oligonucleotide
acgcaggtggcgctccattgactaattgtgttaagatgttaactcctaagactgg

SEQ ID NO: 314329 - DNA, 59 bp, Artificial
  Synthetic oligonucleotide
acgcagtagtcagctatgtcaacgttaatatgggcctaaaattcagacaactattgtgg

SEQ ID NO: 314330 - DNA, 57 bp, Artificial
  Synthetic oligonucleotide
acgcagtctgcactgctacagctcacggtctggggggttaaaaacctccaggtacga

SEQ ID NO: 314331 - DNA, 60 bp, Artificial
  Synthetic oligonucleotide
acgcagtgatattacaaaatgcatggaaagcgagttgcacaatactagcagtggtgtccg

SEQ ID NO: 314332 - DNA, 55 bp, Artificial
  Synthetic oligonucleotide
acgcagtggaagaatgtaacggacggaggagttggtgctatccagagaggagccc

SEQ ID NO: 314333 - DNA, 57 bp, Artificial
  Synthetic oligonucleotide
acgcagtgggtcccacatgttagatctgcagaattaatgggccgttaaacgttattg

SEQ ID NO: 314334 - DNA, 55 bp, Artificial
  Synthetic oligonucleotide
acgcagtgggtcccactgctggtattgacttgatttgacttatattgggccaatt

SEQ ID NO: 314335 - DNA, 54 bp, Artificial
  Synthetic oligonucleotide
acgcagtggtcgattttcatacaactacgactcagcctcgctgttatctgagat

SEQ ID NO: 314336 - DNA, 55 bp, Artificial
  Synthetic oligonucleotide
acgcagtgttagcgctggacgtgcactgtatattcctccctacgagctgcttttg

SEQ ID NO: 314337 - DNA, 60 bp, Artificial
  Synthetic oligonucleotide
acgcagtttcaggagccgtccgtgacgcagctcgtagattaatcaacgagtcgatcgaga

SEQ ID NO: 314338 - DNA, 60 bp, Artificial
  Synthetic oligonucleotide
acgcatatgccgataagctacccacatgcaatcgggaccacgagcaactgtgtgaagtgg

SEQ ID NO: 314339 - DNA, 52 bp, Artificial
  Synthetic oligonucleotide
acgcatatgttgatacaggtgcaacatcttgtacagcatccccacatataat

SEQ ID NO: 314340 - DNA, 60 bp, Artificial
  Synthetic oligonucleotide
acgcatcaccaacttatacaaagcattgcagacggaggaacaactgaggacggaagacga

SEQ ID NO: 314341 - DNA, 60 bp, Artificial
  Synthetic oligonucleotide
acgcatcagtctttaaagaacatagagaggttgaaatcaatgtgcttctccctcaagttg

SEQ ID NO: 314342 - DNA, 60 bp, Artificial
  Synthetic oligonucleotide
acgcatccaggtgaacgtggtatagatttatcatctgcaaatgaagtgggagggcctgtc

SEQ ID NO: 314343 - DNA, 60 bp, Artificial
  Synthetic oligonucleotide
acgcatccccacaactcgagggattctcagctgaatcaagaaagttgcttctaattgttc

SEQ ID NO: 314344 - DNA, 60 bp, Artificial
  Synthetic oligonucleotide
acgcatctctcagatctctagtggcctcatcaggaaccttagagttcatcaccgaaggct

SEQ ID NO: 314345 - DNA, 56 bp, Artificial
  Synthetic oligonucleotide
acgcatcttggttacaatcattacctttcgagtataaggaagaggaacgtgacgga

SEQ ID NO: 314346 - DNA, 53 bp, Artificial
  Synthetic oligonucleotide
acgcatgagcgggctaaaacgtttgtctttaaacgaaaggatttctaaagtgc

SEQ ID NO: 314347 - DNA, 54 bp, Artificial
  Synthetic oligonucleotide
acgcatgccatcatgcttgcgtggtgaaagagcagtaccacaagatactacagg

SEQ ID NO: 314348 - DNA, 59 bp, Artificial
  Synthetic oligonucleotide
acgcatggtagatatacggatataccaacagcagatccccagggaatgatcattgaaac

SEQ ID NO: 314349 - DNA, 55 bp, Artificial
  Synthetic oligonucleotide
acgcatggtcaaagagactgtggggaatgcttccctggaatgtcagaatctcaac

SEQ ID NO: 314350 - DNA, 52 bp, Artificial
  Synthetic oligonucleotide
acgcatgtatcgtcctgtttgtgagtaaagtataactctctccctaaaagtt

SEQ ID NO: 314351 - DNA, 54 bp, Artificial
  Synthetic oligonucleotide
acgcatgtgggggtcctggaatcgtgcggtggtgcgtcagggtttgaagtcagg

SEQ ID NO: 314352 - DNA, 60 bp, Artificial
  Synthetic oligonucleotide
acgcattagttgtgtactacgtgtggctgagtgattcaaatgtaacagccgaagttcacg

SEQ ID NO: 314353 - DNA, 52 bp, Artificial
  Synthetic oligonucleotide
acgcattctatcgctctaaaacttggtcttctattcgtaagattgttttgga

SEQ ID NO: 314354 - DNA, 60 bp, Artificial
  Synthetic oligonucleotide
acgcattgacgaagcagtgtgttatagatacagcataccggttggctgttcctacgcagc

SEQ ID NO: 314355 - DNA, 55 bp, Artificial
  Synthetic oligonucleotide
acgcatttcccattaaaccactacagtgtgctcaagcccgcggaggttaggcccc

SEQ ID NO: 314356 - DNA, 60 bp, Artificial
  Synthetic oligonucleotide
acgcattttgcggatcactgaaatcggttcgccccaattgcagtgcggcacccgcaacat

SEQ ID NO: 314357 - DNA, 52 bp, Artificial
  Synthetic oligonucleotide
acgccaaaaatgctcgtgatccatactggtcaggttacttgcgacaggctgc

SEQ ID NO: 314358 - DNA, 59 bp, Artificial
  Synthetic oligonucleotide
acgccaaagtaagtcaacgtataaacgatatgcccacattattggcacgtggctcaaca

SEQ ID NO: 314359 - DNA, 54 bp, Artificial
  Synthetic oligonucleotide
acgccaaatctttgtcgtgtacaaaaacttggagaattcttcggtggattgtgg

SEQ ID NO: 314360 - DNA, 54 bp, Artificial
  Synthetic oligonucleotide
acgccaacaaggtaagagtgggagcattcgggccagggttcacccctccccatg

SEQ ID NO: 314361 - DNA, 54 bp, Artificial
  Synthetic oligonucleotide
acgccaacacagttccttaactccgtggtgtatagaaacttacaagccgaggtc

SEQ ID NO: 314362 - DNA, 56 bp, Artificial
  Synthetic oligonucleotide
acgccaacatgccggacccggaaacgttgacggatgaaacgcgcacgttagtcatc

SEQ ID NO: 314363 - DNA, 58 bp, Artificial
  Synthetic oligonucleotide
acgccaacgagggtggtttcaccctcactgctatcacaccggctgagtgccgggcgga

SEQ ID NO: 314364 - DNA, 55 bp, Artificial
  Synthetic oligonucleotide
acgccaagcacatcctcgtctggtgcaaccccttcctgaggcccgagctgcagtt

SEQ ID NO: 314365 - DNA, 56 bp, Artificial
  Synthetic oligonucleotide
acgccaagtacttggaacccgagttcatgcttggacaggacattcgtaggctttcc

SEQ ID NO: 314366 - DNA, 55 bp, Artificial
  Synthetic oligonucleotide
acgccaatactgaacgggcgcccttaatagtgattgtagcttagcgtgtggtctt

SEQ ID NO: 314367 - DNA, 55 bp, Artificial
  Synthetic oligonucleotide
acgccaatatgcgttgcaacggaggcagcatacttatgctttgtttatggattgc

SEQ ID NO: 314368 - DNA, 52 bp, Artificial
  Synthetic oligonucleotide
acgccaatcgcgatgagtcagactaccgacatctcaagcattgttggtaatg

SEQ ID NO: 314369 - DNA, 60 bp, Artificial
  Synthetic oligonucleotide
acgccacaagaggagctcttgagcagattaccccaatctcagcaagaagcaattagcgga

SEQ ID NO: 314370 - DNA, 51 bp, Artificial
  Synthetic oligonucleotide
acgccacaagttttaccccccacacacctggaccggtccggaaggaagcaa

SEQ ID NO: 314371 - DNA, 58 bp, Artificial
  Synthetic oligonucleotide
acgccacccaaacgcacagatgctttctgtgaaacttccaaagcgcaagaaggctcgt

SEQ ID NO: 314372 - DNA, 60 bp, Artificial
  Synthetic oligonucleotide
acgccaccgatctgttctgcgctgggtgcgctttggaacaatggatgctgagaccccgca

SEQ ID NO: 314373 - DNA, 50 bp, Artificial
  Synthetic oligonucleotide
acgccacgaacggcctgaaggtttattggattctgcccggaggcttcggg

SEQ ID NO: 314374 - DNA, 55 bp, Artificial
  Synthetic oligonucleotide
acgccactacttcaacgatgaacagggtgaaatcgagttcattgagagctccaaa

SEQ ID NO: 314375 - DNA, 57 bp, Artificial
  Synthetic oligonucleotide
acgccactcaagtcaatgatgtaattaataaagcattaggtgctgaatggaagaatt

SEQ ID NO: 314376 - DNA, 58 bp, Artificial
  Synthetic oligonucleotide
acgccactcaccgacaaccccgtcgcctcgccaatgtacttggtactcactcatccaa

SEQ ID NO: 314377 - DNA, 60 bp, Artificial
  Synthetic oligonucleotide
acgccactctgtgcctgagctgcagtgatgagttcccctgtgcgtgaatccatggttggc

SEQ ID NO: 314378 - DNA, 58 bp, Artificial
  Synthetic oligonucleotide
acgccactgtccctaggactgctatgtgccggagcggacattacaaacgtccttctcg

SEQ ID NO: 314379 - DNA, 58 bp, Artificial
  Synthetic oligonucleotide
acgccagccagctcctttggcgccgtttccttcaacaatccgggttatgagcgcacac

SEQ ID NO: 314380 - DNA, 52 bp, Artificial
  Synthetic oligonucleotide
acgccagccagtgaggtttctggttttcagccgctaagcctaggcgtaaaca

SEQ ID NO: 314381 - DNA, 60 bp, Artificial
  Synthetic oligonucleotide
acgccagccccttcatagtctctactgtgccttacaagggcatactgatccccgagacca

SEQ ID NO: 314382 - DNA, 56 bp, Artificial
  Synthetic oligonucleotide
acgccaggcataataccaccagtaaatgttgacaaaccaataccattagggaggag

SEQ ID NO: 314383 - DNA, 57 bp, Artificial
  Synthetic oligonucleotide
acgccaggtataataccaccagtgaatgtcgataaaccgataccattaggaagaaga

SEQ ID NO: 314384 - DNA, 59 bp, Artificial
  Synthetic oligonucleotide
acgccagttcttctgtgcaggtgttccgaaacagtgctacgacgggctctggcacctat

SEQ ID NO: 314385 - DNA, 55 bp, Artificial
  Synthetic oligonucleotide
acgccagttttatatcccttcccccatgtaacttagaagtttgacacactgacca

SEQ ID NO: 314386 - DNA, 54 bp, Artificial
  Synthetic oligonucleotide
acgccagttttatattccctaccccgagtaacttagaagataagcacacaaggc

SEQ ID NO: 314387 - DNA, 55 bp, Artificial
  Synthetic oligonucleotide
acgccagttttatctcccctacccctctatgtaacttagaagtttatgcacagcg

SEQ ID NO: 314388 - DNA, 60 bp, Artificial
  Synthetic oligonucleotide
acgccatattagtttattattgttggatgtcggatgtaatgtctaaggcatcaacatttg

SEQ ID NO: 314389 - DNA, 55 bp, Artificial
  Synthetic oligonucleotide
acgccatcgtaccgctctcacttcgcatcgaactagatggctgggcccgaagtta

SEQ ID NO: 314390 - DNA, 60 bp, Artificial
  Synthetic oligonucleotide
acgccatgaacagcaaattgtcatcgcccgccagaagcttaaggatgcagagaaaacagt

SEQ ID NO: 314391 - DNA, 56 bp, Artificial
  Synthetic oligonucleotide
acgccatgggtgtagggaccgtcctagaagcttctgtcgcgaagtaccagtttgca

SEQ ID NO: 314392 - DNA, 60 bp, Artificial
  Synthetic oligonucleotide
acgccattcattgcttgaggagcagtgatgagttcccctgtgcgtaaatccatgattgga

SEQ ID NO: 314393 - DNA, 60 bp, Artificial
  Synthetic oligonucleotide
acgccattctctagctgagctgcagtgatgctcacccctgtgcgtaaatccatggttgta

SEQ ID NO: 314394 - DNA, 60 bp, Artificial
  Synthetic oligonucleotide
acgccattgctagggcgttgggaggatacgatgcatactatgcatctaactgggcagtat

SEQ ID NO: 314395 - DNA, 53 bp, Artificial
  Synthetic oligonucleotide
acgcccaccagaattagcctagactgggacacaccatggacatatgtaagata

SEQ ID NO: 314396 - DNA, 55 bp, Artificial
  Synthetic oligonucleotide
acgcccacgatgagacgcgggaggtggcgtgccggcggagggagggtgtggacga

SEQ ID NO: 314397 - DNA, 56 bp, Artificial
  Synthetic oligonucleotide
acgcccagcagacacgaggtctcttgggcgccatagtggtgagcatgacgggacgc

SEQ ID NO: 314398 - DNA, 56 bp, Artificial
  Synthetic oligonucleotide
acgcccaggtgtctggtccactattcttacaggctttggcattatccttgtaccgt

SEQ ID NO: 314399 - DNA, 59 bp, Artificial
  Synthetic oligonucleotide
acgcccagtcgtaagataataggagagacatcactgtcttacctgtttgagagggagac

SEQ ID NO: 314400 - DNA, 55 bp, Artificial
  Synthetic oligonucleotide
acgccccaacctagtgcgcgccccagaccagccactccggttacccacccaggca

SEQ ID NO: 314401 - DNA, 56 bp, Artificial
  Synthetic oligonucleotide
acgccccatggcgcttaatggcggggaccactaaagtgagtcgcaacgcaaatttc

SEQ ID NO: 314402 - DNA, 56 bp, Artificial
  Synthetic oligonucleotide
acgcccccaccttatgggcgcgtatggtcctgatgacacactttttctccgtctta

SEQ ID NO: 314403 - DNA, 55 bp, Artificial
  Synthetic oligonucleotide
acgcccccatgacaaaggctttggactggagcgggacaaggtactgggctcccga

SEQ ID NO: 314404 - DNA, 53 bp, Artificial
  Synthetic oligonucleotide
acgccccgcgaagcaagtacccaacatataacactggacaaccgttcccgttg

SEQ ID NO: 314405 - DNA, 53 bp, Artificial
  Synthetic oligonucleotide
acgcccctaacgaaataatgagttgtttgacgcaactgaacgggaaaggaata

SEQ ID NO: 314406 - DNA, 60 bp, Artificial
  Synthetic oligonucleotide
acgcccctgatactgtcggttacgacctagttcgagatctgatctcagttgttcgtgcga

SEQ ID NO: 314407 - DNA, 56 bp, Artificial
  Synthetic oligonucleotide
acgcccctgtcgacttgacgacttcgaatgaggccctctctgtagtcgaccctttc

SEQ ID NO: 314408 - DNA, 53 bp, Artificial
  Synthetic oligonucleotide
acgcccggggccagtgtctcagccgtaccaccactgggacacagataaatatg

SEQ ID NO: 314409 - DNA, 52 bp, Artificial
  Synthetic oligonucleotide
acgcccggtttacccgtgtgtcaagaccacctagagttctgggaagcggtct

SEQ ID NO: 314410 - DNA, 54 bp, Artificial
  Synthetic oligonucleotide
acgcccgtcgtctacgtttggccagcagagagttcccgcccgagttatgtaccg

SEQ ID NO: 314411 - DNA, 55 bp, Artificial
  Synthetic oligonucleotide
acgcccgtgggctgattcagtcctctagggctcatgcgattgtggctctgacccg

SEQ ID NO: 314412 - DNA, 55 bp, Artificial
  Synthetic oligonucleotide
acgcccgtggggtgaccgacgagggctcgtggactgacaacaacagcgtatacac

SEQ ID NO: 314413 - DNA, 60 bp, Artificial
  Synthetic oligonucleotide
acgccctcaaatgatctgtataaatgtacccgctctttgcattgtattcagtcgctctgc

SEQ ID NO: 314414 - DNA, 57 bp, Artificial
  Synthetic oligonucleotide
acgccctcaggttacaggaacttgctgacacctgcccccttacgctaaattgtgaca

SEQ ID NO: 314415 - DNA, 53 bp, Artificial
  Synthetic oligonucleotide
acgccctcatgacggggtatactggagactttgactccgtgatcgactgcaac

SEQ ID NO: 314416 - DNA, 54 bp, Artificial
  Synthetic oligonucleotide
acgccctcgctgggctccgggttcgacccctacttcgtctactcgggctccatc

SEQ ID NO: 314417 - DNA, 55 bp, Artificial
  Synthetic oligonucleotide
acgccctcggtgcgtattcgctgccacgtggatgcagttctcaccatggttgtcg

SEQ ID NO: 314418 - DNA, 55 bp, Artificial
  Synthetic oligonucleotide
acgccctgccgccttgacaccacccgagggtcaggccggattagggctcgcaccc

SEQ ID NO: 314419 - DNA, 57 bp, Artificial
  Synthetic oligonucleotide
acgcccttttagtttattactgctggatgtcggataatatttccaaggcatcgacat

SEQ ID NO: 314420 - DNA, 59 bp, Artificial
  Synthetic oligonucleotide
acgccgaagtgttcaaacttctgaaactcatgtcatggacgagaaagaacgacctcaca

SEQ ID NO: 314421 - DNA, 59 bp, Artificial
  Synthetic oligonucleotide
acgccgacaacatatacattgttcactccaacacgtggtactcaattgacctagagaag

SEQ ID NO: 314422 - DNA, 55 bp, Artificial
  Synthetic oligonucleotide
acgccgacgccttacaaggttgtcgaggtacccttgaaatcatctcctagatttc

SEQ ID NO: 314423 - DNA, 55 bp, Artificial
  Synthetic oligonucleotide
acgccgagggttctagctgtatcagcatactacggggttgtaatcaacggtttaa

SEQ ID NO: 314424 - DNA, 57 bp, Artificial
  Synthetic oligonucleotide
acgccgagtaagctattcgttgcatggattgtttggtgaattggactcgttcggatt

SEQ ID NO: 314425 - DNA, 57 bp, Artificial
  Synthetic oligonucleotide
acgccgattccttccgcagttttgtcgaacaactccctgacacgctaggtgcctatc

SEQ ID NO: 314426 - DNA, 60 bp, Artificial
  Synthetic oligonucleotide
acgccgcagcagaggcgatagactgcgcactcccccaggagtttgtctcctggttcgcgt

SEQ ID NO: 314427 - DNA, 60 bp, Artificial
  Synthetic oligonucleotide
acgccgcatgcaattggactcgaggggagcgttgtgacttggaggacagggataggtcag

SEQ ID NO: 314428 - DNA, 60 bp, Artificial
  Synthetic oligonucleotide
acgccgcattagatcagttaaagactgaatatactgaagacgttgatgatgaaatgtata

SEQ ID NO: 314429 - DNA, 57 bp, Artificial
  Synthetic oligonucleotide
acgccgccacccgatctaccttgccacacactggtgacaacctgcattcactgccat

SEQ ID NO: 314430 - DNA, 60 bp, Artificial
  Synthetic oligonucleotide
acgccgccgtctcaacttcgacagcccatacgccagccgtgctgctgcccccattgtccg

SEQ ID NO: 314431 - DNA, 56 bp, Artificial
  Synthetic oligonucleotide
acgccgcctacgaactacgaaagtgtcttcaagatcctcgccatcggggctcttag

SEQ ID NO: 314432 - DNA, 60 bp, Artificial
  Synthetic oligonucleotide
acgccgcgttagcgtggccggatttgatcatgaactgttttctgcattcagcttcccact

SEQ ID NO: 314433 - DNA, 57 bp, Artificial
  Synthetic oligonucleotide
acgccggcaacgagaatctgtaattcgaagtccggtgagaatggcagaggaaaatcc

SEQ ID NO: 314434 - DNA, 53 bp, Artificial
  Synthetic oligonucleotide
acgccggggttgtggacttccgcgtacctgcgcaaatttgtaccccaggacta

SEQ ID NO: 314435 - DNA, 60 bp, Artificial
  Synthetic oligonucleotide
acgccgggttatcgaagttgctgtatgactgggccaatttcaatgtgcaacactcaagtg

SEQ ID NO: 314436 - DNA, 55 bp, Artificial
  Synthetic oligonucleotide
acgccggtagaggacggtcccgttgtcgcgctagagacttccaccaagactctgg

SEQ ID NO: 314437 - DNA, 56 bp, Artificial
  Synthetic oligonucleotide
acgccggtagcgtgaaaacggggcagctgccgccaacactgacggtgaagaacgac

SEQ ID NO: 314438 - DNA, 51 bp, Artificial
  Synthetic oligonucleotide
acgccgtaagcgcacggcgcatttagttatggagaccgtgctaggtactga

SEQ ID NO: 314439 - DNA, 55 bp, Artificial
  Synthetic oligonucleotide
acgccgtatgtttgccatgccaatgtctccactagtttattcaagtcatgtagtg

SEQ ID NO: 314440 - DNA, 60 bp, Artificial
  Synthetic oligonucleotide
acgccgtcgacggaaattgaagtactatctcagttaagtcatgagagagctggtattcat

SEQ ID NO: 314441 - DNA, 56 bp, Artificial
  Synthetic oligonucleotide
acgccgttaccactgtgctcgatgtttttaacgccctctaccgagaggtcatgacc

SEQ ID NO: 314442 - DNA, 55 bp, Artificial
  Synthetic oligonucleotide
acgccgttcgcgttgtaattgaatatcatgttcccctgcacatcccattcgccag

SEQ ID NO: 314443 - DNA, 53 bp, Artificial
  Synthetic oligonucleotide
acgccgttgaaaggaaattagttaagtatgcaagaggtaaaccattagaagcg

SEQ ID NO: 314444 - DNA, 60 bp, Artificial
  Synthetic oligonucleotide
acgccgttgaagggaattgaagcataatctcggttagatcatgggaaagctgatattcat

SEQ ID NO: 314445 - DNA, 50 bp, Artificial
  Synthetic oligonucleotide
acgcctaagggggaggagcgtgctaacgcggaacgaagacccgttcctct

SEQ ID NO: 314446 - DNA, 55 bp, Artificial
  Synthetic oligonucleotide
acgcctaatgggcttgggcttctcaacagaccaaaagtccacgcagtccgcagtg

SEQ ID NO: 314447 - DNA, 60 bp, Artificial
  Synthetic oligonucleotide
acgcctacctctcagcgtatgctagacttaaatactattcaggtactggcagtgagcaag

SEQ ID NO: 314448 - DNA, 58 bp, Artificial
  Synthetic oligonucleotide
acgcctagaacttcaatggctaaatggttgtattacctctcacgattatatttgcggc

SEQ ID NO: 314449 - DNA, 55 bp, Artificial
  Synthetic oligonucleotide
acgcctaggtgcctgatccactacccgtatcggttgtggcattacccatgcaccg

SEQ ID NO: 314450 - DNA, 53 bp, Artificial
  Synthetic oligonucleotide
acgcctatagcatgttctacgacggatggtccaactttgagcaaacaggttcg

SEQ ID NO: 314451 - DNA, 55 bp, Artificial
  Synthetic oligonucleotide
acgcctcaaaagggacattcttcaagacttagacgacttctgcaggaagcttggg

SEQ ID NO: 314452 - DNA, 57 bp, Artificial
  Synthetic oligonucleotide
acgcctccggtacattgagaatgaaaacatgaactggaccaacgtggacgcccgatg

SEQ ID NO: 314453 - DNA, 55 bp, Artificial
  Synthetic oligonucleotide
acgcctcgcatggagtcacaatccttagggatggatacttttccgacgccgttcg

SEQ ID NO: 314454 - DNA, 51 bp, Artificial
  Synthetic oligonucleotide
acgcctctttcgaactgaaggtgccaagggagtatttgatgctcagtcaca

SEQ ID NO: 314455 - DNA, 59 bp, Artificial
  Synthetic oligonucleotide
acgcctgacgtcccacgaggttgtgaaggcccatgtaaggtgcagtcttatgaacagcg

SEQ ID NO: 314456 - DNA, 51 bp, Artificial
  Synthetic oligonucleotide
acgcctgcctcagtctcttgcccagccatctccactcttaccaaagcgcct

SEQ ID NO: 314457 - DNA, 60 bp, Artificial
  Synthetic oligonucleotide
acgcctgcgacacttggcaggtctattccaacttcaggagagacgctgaaggtgcttctc

SEQ ID NO: 314458 - DNA, 60 bp, Artificial
  Synthetic oligonucleotide
acgcctgctggcaagaggaagagtctcccacgactcgacgacgccacttgcaggggtatc

SEQ ID NO: 314459 - DNA, 52 bp, Artificial
  Synthetic oligonucleotide
acgcctggtcgcagcgtgtgcacttttgacactgagcgcgtgcaactcaagt

SEQ ID NO: 314460 - DNA, 54 bp, Artificial
  Synthetic oligonucleotide
acgcctgtttaatacaacacacctgtataatagtactgggaatgacacacaagg

SEQ ID NO: 314461 - DNA, 58 bp, Artificial
  Synthetic oligonucleotide
acgccttaagtatgacatggtgtgaagacccgcatgtgcttaactgtgagtcctccgg

SEQ ID NO: 314462 - DNA, 59 bp, Artificial
  Synthetic oligonucleotide
acgccttaattgtgacatggtgcgaagacccacgtgtgcttaattgtgagtcctccggc

SEQ ID NO: 314463 - DNA, 55 bp, Artificial
  Synthetic oligonucleotide
acgccttcctcccgtttcgcaaagtccatgtctacaccacggaacccgatcgcgc

SEQ ID NO: 314464 - DNA, 54 bp, Artificial
  Synthetic oligonucleotide
acgccttctggaccatcctccccgtcgagaccgtcccttaccagagcgcgtgtt

SEQ ID NO: 314465 - DNA, 60 bp, Artificial
  Synthetic oligonucleotide
acgcctttcaagagacatggtgtgaagactcgattgtgcttggttgagagtcctccggcc

SEQ ID NO: 314466 - DNA, 53 bp, Artificial
  Synthetic oligonucleotide
acgccttttatttaggcatgaatgctaaccctgtaaagaacaagtaggtaacc

SEQ ID NO: 314467 - DNA, 56 bp, Artificial
  Synthetic oligonucleotide
acgcgaaacttcattcatatgtatggagttgagcctgagaattacgccactattcg

SEQ ID NO: 314468 - DNA, 55 bp, Artificial
  Synthetic oligonucleotide
acgcgaacatactccaccagtgtgtttaaagggaaacacttacaagtagaatata

SEQ ID NO: 314469 - DNA, 55 bp, Artificial
  Synthetic oligonucleotide
acgcgaactaaatagcttgcgacgtaacgtgcacgatatgtgcacgcgttcaggc

SEQ ID NO: 314470 - DNA, 60 bp, Artificial
  Synthetic oligonucleotide
acgcgaactgcaccagccccggtggaagttgagcgcgtcaatctgcgaccactgccgtca

SEQ ID NO: 314471 - DNA, 54 bp, Artificial
  Synthetic oligonucleotide
acgcgaactggtttcgaagttcctgtgttaattaataagatcaacgaatttcga

SEQ ID NO: 314472 - DNA, 60 bp, Artificial
  Synthetic oligonucleotide
acgcgaaggcgcgttacatgattgcatacgccccgccaggcatggagccgcctaaaacac

SEQ ID NO: 314473 - DNA, 58 bp, Artificial
  Synthetic oligonucleotide
acgcgaagggtcgcttcgtgtacgccgagagcctagccgagtggttcatctcggacac

SEQ ID NO: 314474 - DNA, 56 bp, Artificial
  Synthetic oligonucleotide
acgcgaatctcaactgctctacctcaactttttacctactctaccgctaacttagc

SEQ ID NO: 314475 - DNA, 60 bp, Artificial
  Synthetic oligonucleotide
acgcgaatgtgagcggttcatctgatgatagaccgtattgctggcactaccctcctagac

SEQ ID NO: 314476 - DNA, 57 bp, Artificial
  Synthetic oligonucleotide
acgcgaatgtgtctccgagcgcacgcctccggagcgcaagtggtacaacctcacgct

SEQ ID NO: 314477 - DNA, 60 bp, Artificial
  Synthetic oligonucleotide
acgcgaccactgacggtacagcaacttagtgataagttgacagtaccagtggtagatctc

SEQ ID NO: 314478 - DNA, 56 bp, Artificial
  Synthetic oligonucleotide
acgcgactgtcctggtacgggtgaggttgatcgtttgatgaagggcgtccagggtc

SEQ ID NO: 314479 - DNA, 52 bp, Artificial
  Synthetic oligonucleotide
acgcgactttgaaaatccggatctatttttatgattcggtaacaaattaata

SEQ ID NO: 314480 - DNA, 60 bp, Artificial
  Synthetic oligonucleotide
acgcgagacgcctagcccacacatcactcattcacacagtcaggagtcatcatgaaggtc

SEQ ID NO: 314481 - DNA, 60 bp, Artificial
  Synthetic oligonucleotide
acgcgagagcaatcctagtgcgttcgagacggaggcatcacgaatgagacggttacgggc

SEQ ID NO: 314482 - DNA, 59 bp, Artificial
  Synthetic oligonucleotide
acgcgagttgcacgacaccaacgcactttccggtctgctcttcgaattctacgctgatt

SEQ ID NO: 314483 - DNA, 53 bp, Artificial
  Synthetic oligonucleotide
acgcgatagaatcgggtgttaccctcccggacctggacgtggttgttgacacg

SEQ ID NO: 314484 - DNA, 51 bp, Artificial
  Synthetic oligonucleotide
acgcgatatctttccgctaaactgctgcatatcgtccagctggatgtaaaa

SEQ ID NO: 314485 - DNA, 59 bp, Artificial
  Synthetic oligonucleotide
acgcgatccgattctatgtaccctccaacaccaagacccatgttatcatttcttactga

SEQ ID NO: 314486 - DNA, 53 bp, Artificial
  Synthetic oligonucleotide
acgcgatgccgacacgagaccgtttgttcccgggcttccgacctcccgatcgt

SEQ ID NO: 314487 - DNA, 59 bp, Artificial
  Synthetic oligonucleotide
acgcgatggtccagatacaagttgtgttctatatatctatggataaaactttagaccag

SEQ ID NO: 314488 - DNA, 60 bp, Artificial
  Synthetic oligonucleotide
acgcgatgtgctgaattacctaggattcttgttgatcatgctacgcaaaccatgcatgtc

SEQ ID NO: 314489 - DNA, 54 bp, Artificial
  Synthetic oligonucleotide
acgcgattgcacgatcgttaaatccgttgggaaagcaggcatgtgtgggagact

SEQ ID NO: 314490 - DNA, 58 bp, Artificial
  Synthetic oligonucleotide
acgcgcaaatgagcgacggcaattcctacctagggcttccggacgtgagccagaggaa

SEQ ID NO: 314491 - DNA, 59 bp, Artificial
  Synthetic oligonucleotide
acgcgcaacgatcttgaactgtgacccagaagtcttggcccatcgacgagtcttcgtgt

SEQ ID NO: 314492 - DNA, 59 bp, Artificial
  Synthetic oligonucleotide
acgcgcaatatatgttccgggctaataaggttcgagcgagaaaaccagcacatgcttgg

SEQ ID NO: 314493 - DNA, 53 bp, Artificial
  Synthetic oligonucleotide
acgcgcacaggctgtacccgacgctatgcacgtggctgctacgcttgcgacca

SEQ ID NO: 314494 - DNA, 60 bp, Artificial
  Synthetic oligonucleotide
acgcgccaacgtatcgaaagctctcttctacatggagtataacattcaaagcgacggaga

SEQ ID NO: 314495 - DNA, 58 bp, Artificial
  Synthetic oligonucleotide
acgcgccaccgaattcttttcgcacgatcccgatgcaaagtacggagtatgttttgca

SEQ ID NO: 314496 - DNA, 55 bp, Artificial
  Synthetic oligonucleotide
acgcgcccagaccctgtgacatcgtccctgcacgggacgtctgcggcccggtgta

SEQ ID NO: 314497 - DNA, 55 bp, Artificial
  Synthetic oligonucleotide
acgcgcccgaatcaatctcagagagagccgtttcgagaatccagacccacggcga

SEQ ID NO: 314498 - DNA, 56 bp, Artificial
  Synthetic oligonucleotide
acgcgcccgtgaaagaaagtggtccctgcgcactggttttggtcggccagtcatat

SEQ ID NO: 314499 - DNA, 57 bp, Artificial
  Synthetic oligonucleotide
acgcgcctcaaccatgcggtattgtacctgcgtcacaggtgtgtggtccagtgtatt

SEQ ID NO: 314500 - DNA, 54 bp, Artificial
  Synthetic oligonucleotide
acgcgcctcctggggccgacccgccaaagaggcgtaaggaggcgatgttgggga

SEQ ID NO: 314501 - DNA, 59 bp, Artificial
  Synthetic oligonucleotide
acgcgcctcgaccgtgtggtactatatccgcgttgcaggtgtgcggtccggtgtattgc

SEQ ID NO: 314502 - DNA, 58 bp, Artificial
  Synthetic oligonucleotide
acgcgcctgccttatgagttgaacccaagcaagcaaagtttcggaccgcatgccgaat

SEQ ID NO: 314503 - DNA, 52 bp, Artificial
  Synthetic oligonucleotide
acgcgcgaaggagcgcgttggcgtgggcccagcgcgtgagtgccgaggccac

SEQ ID NO: 314504 - DNA, 60 bp, Artificial
  Synthetic oligonucleotide
acgcgcgccacaaggatagcaaggcgtgcattccccacgctttctgacaggattaagcgt

SEQ ID NO: 314505 - DNA, 54 bp, Artificial
  Synthetic oligonucleotide
acgcgcgcccgtggaacgttgggcacaggtacgggaacaccaagcccatcgtaa

SEQ ID NO: 314506 - DNA, 55 bp, Artificial
  Synthetic oligonucleotide
acgcgcgctggagtcttctctcgcgatgttcagatatcagagcacatgactggcg

SEQ ID NO: 314507 - DNA, 55 bp, Artificial
  Synthetic oligonucleotide
acgcgcggagacatactgccctaggcctctgctggctcttgacactacccaggac

SEQ ID NO: 314508 - DNA, 50 bp, Artificial
  Synthetic oligonucleotide
acgcgcggcccatatttatataggcgatgcgccgacccgttttgtgcgga

SEQ ID NO: 314509 - DNA, 56 bp, Artificial
  Synthetic oligonucleotide
acgcgcggcggtgtgtacccctgggagggtaggtaccactacgctacgcagcagcc

SEQ ID NO: 314510 - DNA, 60 bp, Artificial
  Synthetic oligonucleotide
acgcgcggcgtatgattagatcaaaaactgtgcaccccatttacttaggctcgatgcatt

SEQ ID NO: 314511 - DNA, 57 bp, Artificial
  Synthetic oligonucleotide
acgcgctaaagacatcgcgaaacgtaccctgactgaacgcgtcgcagaacccctgcg

SEQ ID NO: 314512 - DNA, 56 bp, Artificial
  Synthetic oligonucleotide
acgcgctcacccctgtcgtcaccgcacagaatggcgtcgagggttccgggttcctc

SEQ ID NO: 314513 - DNA, 55 bp, Artificial
  Synthetic oligonucleotide
acgcgctccctgtctccgaacgctggcctcacaacgccaccgacgcgtacttgtt

SEQ ID NO: 314514 - DNA, 60 bp, Artificial
  Synthetic oligonucleotide
acgcgctcctcatagcagtaaggaccatcaagatcttatatcaaagcagtaagtacccat

SEQ ID NO: 314515 - DNA, 58 bp, Artificial
  Synthetic oligonucleotide
acgcgctcgatcaaagctactccgccgacgttattcggttaccgtgcttcacactgga

SEQ ID NO: 314516 - DNA, 56 bp, Artificial
  Synthetic oligonucleotide
acgcgctgagtaggcactacgagggagtcacgctggacagctactcgatgatctcc

SEQ ID NO: 314517 - DNA, 57 bp, Artificial
  Synthetic oligonucleotide
acgcgctgtctagttctactacgactcgcctaaacatggagtggggtttcgaggtca

SEQ ID NO: 314518 - DNA, 51 bp, Artificial
  Synthetic oligonucleotide
acgcgcttcccagtgatccgtcgcccacacgtagcccatcgacaaaagcag

SEQ ID NO: 314519 - DNA, 55 bp, Artificial
  Synthetic oligonucleotide
acgcgcttggtgctaaccccgaatacgttgcacatgatgtaatccgtcaacagga

SEQ ID NO: 314520 - DNA, 55 bp, Artificial
  Synthetic oligonucleotide
acgcggacaaagtacacaatgggatcaggcagcagttttatattcaaattacatt

SEQ ID NO: 314521 - DNA, 51 bp, Artificial
  Synthetic oligonucleotide
acgcggacagacgacacccgtcttttggccaagtttgacgtctccctagcc

SEQ ID NO: 314522 - DNA, 60 bp, Artificial
  Synthetic oligonucleotide
acgcggacccatggggaaagtataaattctgggatgtagattgcacagcacagatatcat

SEQ ID NO: 314523 - DNA, 55 bp, Artificial
  Synthetic oligonucleotide
acgcggacgaatgtctattaccatggtggcagttctaggctcctcactgtcggcc

SEQ ID NO: 314524 - DNA, 51 bp, Artificial
  Synthetic oligonucleotide
acgcggactccgaaccgcggatcacccatgtgaggatcgaaccggtgacca

SEQ ID NO: 314525 - DNA, 55 bp, Artificial
  Synthetic oligonucleotide
acgcggagaagagccggttggcgtcagaagaacagatcctacgggcagccacgtc

SEQ ID NO: 314526 - DNA, 51 bp, Artificial
  Synthetic oligonucleotide
acgcggaggaccttacagggtggtctgaccgggactcgttgaaggggggtg

SEQ ID NO: 314527 - DNA, 55 bp, Artificial
  Synthetic oligonucleotide
acgcggaggtgtgtacggtgattaagaagagcttagataacacgttgtacccaaa

SEQ ID NO: 314528 - DNA, 55 bp, Artificial
  Synthetic oligonucleotide
acgcggataagcgcaaggagaagagcaggagggcaagtgaagcaattattcctgc

SEQ ID NO: 314529 - DNA, 53 bp, Artificial
  Synthetic oligonucleotide
acgcggatcctccttagacaatcctccctttctaattccacggaaccatttac

SEQ ID NO: 314530 - DNA, 60 bp, Artificial
  Synthetic oligonucleotide
acgcggcagtcatcgttactgtcagtgcaggtccggactttgagttcagaatgcccatca

SEQ ID NO: 314531 - DNA, 55 bp, Artificial
  Synthetic oligonucleotide
acgcggccgatgagataaggcgccgattcccagaaccggcagtcacgagagcaat

SEQ ID NO: 314532 - DNA, 60 bp, Artificial
  Synthetic oligonucleotide
acgcggctgacgaggtaaagtgtctcagtccatattgttgtctgtgccaccgtagttagc

SEQ ID NO: 314533 - DNA, 58 bp, Artificial
  Synthetic oligonucleotide
acgcggcttggtctatgccctcgactccagagctacataagagaaggttacaacgtag

SEQ ID NO: 314534 - DNA, 53 bp, Artificial
  Synthetic oligonucleotide
acgcgggcacaattttcctgggaatggagtcagcctccccctggatgggtcgc

SEQ ID NO: 314535 - DNA, 58 bp, Artificial
  Synthetic oligonucleotide
acgcgggctttaactgtcccgagttggcacagctgctaacttggcagttgaccaacaa

SEQ ID NO: 314536 - DNA, 54 bp, Artificial
  Synthetic oligonucleotide
acgcgggtacaagggggtttggcgaggggacggtatcatgcataccacctgccc

SEQ ID NO: 314537 - DNA, 60 bp, Artificial
  Synthetic oligonucleotide
acgcggtatgccccgcggattgtccttgataggactgaagagggctatgctgagtctgat

SEQ ID NO: 314538 - DNA, 57 bp, Artificial
  Synthetic oligonucleotide
acgcggtggcaatgaatcaggtggctactattagaacgtatgggtttggacaccaaa

SEQ ID NO: 314539 - DNA, 59 bp, Artificial
  Synthetic oligonucleotide
acgcggttaatattcatgtacttacaacacctggtcttaatcacgcattctctagctta

SEQ ID NO: 314540 - DNA, 50 bp, Artificial
  Synthetic oligonucleotide
acgcggttagcgggtatcagggggccactgtaataagcccctctccggga

SEQ ID NO: 314541 - DNA, 49 bp, Artificial
  Synthetic oligonucleotide
acgcggttgaaggagaaaacgttcgttacccggccaactacttcgggaa

SEQ ID NO: 314542 - DNA, 52 bp, Artificial
  Synthetic oligonucleotide
acgcggttgaaggagaaagcgtccgttatccggctaactacttcgagaaacc

SEQ ID NO: 314543 - DNA, 56 bp, Artificial
  Synthetic oligonucleotide
acgcgtaactaagacatcacgtgttgagaacgcttttgcgtggaaaggtctggcgg

SEQ ID NO: 314544 - DNA, 53 bp, Artificial
  Synthetic oligonucleotide
acgcgtaccctaaagactctggtgagtccccgtcgttacacgacgggtctgcc

SEQ ID NO: 314545 - DNA, 54 bp, Artificial
  Synthetic oligonucleotide
acgcgtataaaaacattaccgatataataggcgaaactgcgataggtgatccgc

SEQ ID NO: 314546 - DNA, 54 bp, Artificial
  Synthetic oligonucleotide
acgcgtatggcgcggagtaggtttgaggagggtcagggaacagggcatttgcac

SEQ ID NO: 314547 - DNA, 60 bp, Artificial
  Synthetic oligonucleotide
acgcgtcaacacatgcaggccgctatgtactacatcctcaccagaggatggtccgacaac

SEQ ID NO: 314548 - DNA, 57 bp, Artificial
  Synthetic oligonucleotide
acgcgtcctataaaacttctacgggccataggatggttcattgatgaggagtccaac

SEQ ID NO: 314549 - DNA, 57 bp, Artificial
  Synthetic oligonucleotide
acgcgtcgacaagagcgtgcatcgacggcactagattcatcatgaggcgtgcggttg

SEQ ID NO: 314550 - DNA, 55 bp, Artificial
  Synthetic oligonucleotide
acgcgtgcgagatgggaaaaccttaatcgcatttgacttcgttgaggaatccacg

SEQ ID NO: 314551 - DNA, 58 bp, Artificial
  Synthetic oligonucleotide
acgcgtgctttcttgcgacctgggttttctcgtaaccagtgctcatgaccgtgaacat

SEQ ID NO: 314552 - DNA, 54 bp, Artificial
  Synthetic oligonucleotide
acgcgtggaactgggctgactcatcgagtgggtaaaaggttttgtgttaaatcc

SEQ ID NO: 314553 - DNA, 54 bp, Artificial
  Synthetic oligonucleotide
acgcgtgttaaccacgaactctacattcaaagtgtttgattcggaggactttat

SEQ ID NO: 314554 - DNA, 60 bp, Artificial
  Synthetic oligonucleotide
acgcgttgaccacgacaatctcgttgcgagagtggatactgcggaacgtaacattggatc

SEQ ID NO: 314555 - DNA, 60 bp, Artificial
  Synthetic oligonucleotide
acgcgttgatcggtacttgttgcctatattctatcacacaatggtcaattttcatgcagc

SEQ ID NO: 314556 - DNA, 52 bp, Artificial
  Synthetic oligonucleotide
acgctaaaattaggtaaagcaaacgttcctatgctcgtaacgaatcatacat

SEQ ID NO: 314557 - DNA, 56 bp, Artificial
  Synthetic oligonucleotide
acgctaaatactcatgctttagcgcgttctacggatctgtcttatcctcttacctc

SEQ ID NO: 314558 - DNA, 60 bp, Artificial
  Synthetic oligonucleotide
acgctaacatctatgctcaacgtgagtccgtccgtaataacctgattggtgctctgtcag

SEQ ID NO: 314559 - DNA, 59 bp, Artificial
  Synthetic oligonucleotide
acgctaacggtgacctaatctcaagcgcaaaacttagcgcaacagatcgacaaatttca

SEQ ID NO: 314560 - DNA, 53 bp, Artificial
  Synthetic oligonucleotide
acgctaataccgggtattactctacaactaattatgacactgttaatatgaca

SEQ ID NO: 314561 - DNA, 57 bp, Artificial
  Synthetic oligonucleotide
acgctaatagaacaatagaggataagatgggggaactaataaaaagctgctctttca

SEQ ID NO: 314562 - DNA, 53 bp, Artificial
  Synthetic oligonucleotide
acgctaatggacttatcccttccactaacctagtagttacgtcgagtaagaca

SEQ ID NO: 314563 - DNA, 60 bp, Artificial
  Synthetic oligonucleotide
acgctacaatgtttgagacggttagatgtattattaccttgtgctatgctgagaaagttc

SEQ ID NO: 314564 - DNA, 60 bp, Artificial
  Synthetic oligonucleotide
acgctacatccagcaggggttacattatctacgcagtttacagattacgtatcactcaat

SEQ ID NO: 314565 - DNA, 55 bp, Artificial
  Synthetic oligonucleotide
acgctacgatcagaaaattctgagataccaagggaacggatgatccagatgttgc

SEQ ID NO: 314566 - DNA, 50 bp, Artificial
  Synthetic oligonucleotide
acgctacgcgcttatgataataggaaatccgcaaagaacgcgaaaggagt

SEQ ID NO: 314567 - DNA, 59 bp, Artificial
  Synthetic oligonucleotide
acgctacggttcgcagtttagcacacacgccggagaaaagactaatgatatgcctctgt

SEQ ID NO: 314568 - DNA, 60 bp, Artificial
  Synthetic oligonucleotide
acgctactggaagcactcagtttggccctgtgcaggcgctaggtgcacagtactccatgt

SEQ ID NO: 314569 - DNA, 55 bp, Artificial
  Synthetic oligonucleotide
acgctagagaagcgttcacccgtctctcggataattgggctcgaaagagcacgac

SEQ ID NO: 314570 - DNA, 60 bp, Artificial
  Synthetic oligonucleotide
acgctaggaggcatcgtattcagctataatttgaatctggatacagaccagcctaatgga

SEQ ID NO: 314571 - DNA, 60 bp, Artificial
  Synthetic oligonucleotide
acgctagtctcctagcccaatcaggaaaagactatggactaaccatgactccagctgata

SEQ ID NO: 314572 - DNA, 60 bp, Artificial
  Synthetic oligonucleotide
acgctatagaaagagacgctatggctggagaaggcgctactaccgctacaggccgcgtta

SEQ ID NO: 314573 - DNA, 55 bp, Artificial
  Synthetic oligonucleotide
acgctatcatcgctggtaggatgctgcttggtggactcattgagtacatgcaggc

SEQ ID NO: 314574 - DNA, 60 bp, Artificial
  Synthetic oligonucleotide
acgctatcgcatggtgaagggtcaacgcaaagatcttcctgagaggtggttcttctacta

SEQ ID NO: 314575 - DNA, 58 bp, Artificial
  Synthetic oligonucleotide
acgctatgcccagctacttgtattctacccctcggcgagcccttctctcctaatgtcc

SEQ ID NO: 314576 - DNA, 52 bp, Artificial
  Synthetic oligonucleotide
acgctatgcttatgagactccgcctatcaccgctgttgttatgggtgttcct

SEQ ID NO: 314577 - DNA, 55 bp, Artificial
  Synthetic oligonucleotide
acgctatgtgagctgaatggcacagattggctagctaacagatttgactgggcgg

SEQ ID NO: 314578 - DNA, 56 bp, Artificial
  Synthetic oligonucleotide
acgctattaattgaactcgattaataacttgtgttgattacacaaccctctcttaa

SEQ ID NO: 314579 - DNA, 60 bp, Artificial
  Synthetic oligonucleotide
acgctattcgagctagacacatgcaagattatacaactgagaatctaagcgttatccaga

SEQ ID NO: 314580 - DNA, 56 bp, Artificial
  Synthetic oligonucleotide
acgctcaaaccattgctaggaccgaagcaggtcgacttaggtctatgggtaacgta

SEQ ID NO: 314581 - DNA, 52 bp, Artificial
  Synthetic oligonucleotide
acgctcaagcaacgttgtatgagtcacgtttaatatattacctagagtatga

SEQ ID NO: 314582 - DNA, 60 bp, Artificial
  Synthetic oligonucleotide
acgctcacaaactgcgcagccgtaacgctattgcacatgggtccggtactgccccctgta

SEQ ID NO: 314583 - DNA, 60 bp, Artificial
  Synthetic oligonucleotide
acgctcaccattcacgacaccgaaaagtacgcctctcagccagaactatgcactaactcc

SEQ ID NO: 314584 - DNA, 51 bp, Artificial
  Synthetic oligonucleotide
acgctcaccgttaatggtaccaagtcgtcaaggctcgcaaagacgtgccac

SEQ ID NO: 314585 - DNA, 50 bp, Artificial
  Synthetic oligonucleotide
acgctcacgcagagccacttaaacagaggatgattaagatacgttgcatg

SEQ ID NO: 314586 - DNA, 60 bp, Artificial
  Synthetic oligonucleotide
acgctcacgtggtgcacacgacgagtagctccacgcggtatgtgaccctcaagactgtgg

SEQ ID NO: 314587 - DNA, 57 bp, Artificial
  Synthetic oligonucleotide
acgctcagctagaaaaatccttaagaaagccagttaagctagaagactctattaata

SEQ ID NO: 314588 - DNA, 59 bp, Artificial
  Synthetic oligonucleotide
acgctcagggctactatgatgggtaacactgtcgtagtatcacctgaaggaagcctggt

SEQ ID NO: 314589 - DNA, 57 bp, Artificial
  Synthetic oligonucleotide
acgctcagttaaagacagcttcgaaagctcgatcttccgaacaaaactgcttcgtgg

SEQ ID NO: 314590 - DNA, 56 bp, Artificial
  Synthetic oligonucleotide
acgctcatggagctgataacatagacaatccacagtggtgcatcaagagactcgtg

SEQ ID NO: 314591 - DNA, 58 bp, Artificial
  Synthetic oligonucleotide
acgctcattggctagaagttaagcgtctgtttacggacgccattttgtccattgtgcg

SEQ ID NO: 314592 - DNA, 54 bp, Artificial
  Synthetic oligonucleotide
acgctccaactgccgtttgagcttgcgggtctgcttgtcggcaggccgttgccc

SEQ ID NO: 314593 - DNA, 55 bp, Artificial
  Synthetic oligonucleotide
acgctccagtggtttaatggactttggttggatctgggcacaggccccgagtgcc

SEQ ID NO: 314594 - DNA, 55 bp, Artificial
  Synthetic oligonucleotide
acgctccccattcagtggtatccccgtccttctccatatatgacttgacatcgga

SEQ ID NO: 314595 - DNA, 52 bp, Artificial
  Synthetic oligonucleotide
acgctccgaaggtggatgccagaattagttttgcgatatactatgagcccac

SEQ ID NO: 314596 - DNA, 54 bp, Artificial
  Synthetic oligonucleotide
acgctcctatttctttggagaaacgtcgcgcacaaatttccgctttactaacaa

SEQ ID NO: 314597 - DNA, 58 bp, Artificial
  Synthetic oligonucleotide
acgctcctcaatgtgggccacgacggtgtagcgttggttcaagccgcgttcgaattgc

SEQ ID NO: 314598 - DNA, 59 bp, Artificial
  Synthetic oligonucleotide
acgctcgacaattgcaagttcgctatcgtcggcgaggagaagggcgcgaatggtacgcc

SEQ ID NO: 314599 - DNA, 56 bp, Artificial
  Synthetic oligonucleotide
acgctcgagtgaatgtcccgataaaggatttagttcaatctaatgctagtgccctt

SEQ ID NO: 314600 - DNA, 52 bp, Artificial
  Synthetic oligonucleotide
acgctcgattttacgtcacagtgctcagaagttaagcggcctccagttttaa

SEQ ID NO: 314601 - DNA, 59 bp, Artificial
  Synthetic oligonucleotide
acgctcgcatcgcttatgagatgttcttccgcgtcgatccacggtggaaaaacgtcgac

SEQ ID NO: 314602 - DNA, 59 bp, Artificial
  Synthetic oligonucleotide
acgctcgcccttggactagccggttcagccatttagctatctccactggttctcttcca

SEQ ID NO: 314603 - DNA, 52 bp, Artificial
  Synthetic oligonucleotide
acgctcgcgaacacgaggagttattacagttcgccatggtgcgtcgtcagcc

SEQ ID NO: 314604 - DNA, 59 bp, Artificial
  Synthetic oligonucleotide
acgctcgctccttttgacgagtactggtatgataaccagcctttattatctcaggctgt

SEQ ID NO: 314605 - DNA, 55 bp, Artificial
  Synthetic oligonucleotide
acgctctaatacagacatggtgcgaagagtttattgagctggttagtatccctcc

SEQ ID NO: 314606 - DNA, 56 bp, Artificial
  Synthetic oligonucleotide
acgctctacggtctcccctgcgtaacagactacggtgttggggccgcttcgtgcga

SEQ ID NO: 314607 - DNA, 55 bp, Artificial
  Synthetic oligonucleotide
acgctctagaggtcctgttcagaacatccgaagttgacgtaagcgaaacgcggcg

SEQ ID NO: 314608 - DNA, 59 bp, Artificial
  Synthetic oligonucleotide
acgctctatcgtattttgtgaatttttcttggactcgcttcgctgttgcgtagtgcaat

SEQ ID NO: 314609 - DNA, 54 bp, Artificial
  Synthetic oligonucleotide
acgctctccgtaggttgtggttgaaccggacttcgatgtggtaaatcctggttc

SEQ ID NO: 314610 - DNA, 60 bp, Artificial
  Synthetic oligonucleotide
acgctctgcgtagacactatgagggagttgagctggacacgtacaccatgatctcctacg

SEQ ID NO: 314611 - DNA, 60 bp, Artificial
  Synthetic oligonucleotide
acgctctgggacaatacgctacctatgaggactttctgggctttcgggatcctgcataca

SEQ ID NO: 314612 - DNA, 60 bp, Artificial
  Synthetic oligonucleotide
acgctcttacagctagaaagaatgatgagcagtgaggagctagaaagacccgttattgag

SEQ ID NO: 314613 - DNA, 53 bp, Artificial
  Synthetic oligonucleotide
acgctcttagtgaattacctgaaaccctggaaacattactcctgttaggcctt

SEQ ID NO: 314614 - DNA, 60 bp, Artificial
  Synthetic oligonucleotide
acgctgaaatggatccaagcgacattatgggcgaaacaagcgacatgagagggagatcca

SEQ ID NO: 314615 - DNA, 55 bp, Artificial
  Synthetic oligonucleotide
acgctgaatccaaacgtgtccctagtcactgcagtggccggcgttagagccctgc

SEQ ID NO: 314616 - DNA, 51 bp, Artificial
  Synthetic oligonucleotide
acgctgaatctcccgggtccaaaacactggttcccagtctgtttaattcct

SEQ ID NO: 314617 - DNA, 60 bp, Artificial
  Synthetic oligonucleotide
acgctgagctcgtggagggagcctgttgagttctcgccgatcgggcaacacgaagtgacg

SEQ ID NO: 314618 - DNA, 57 bp, Artificial
  Synthetic oligonucleotide
acgctgatatcaacggccactttcattctcccggcagaaacttcaaaaccggtgaca

SEQ ID NO: 314619 - DNA, 56 bp, Artificial
  Synthetic oligonucleotide
acgctgatccgtaagcctccgacgctttcggacgtgttgcagggttacgacaccaa

SEQ ID NO: 314620 - DNA, 55 bp, Artificial
  Synthetic oligonucleotide
acgctgatgggtcgcagaactttagcggcgtggcgtgggagttccgtccggggac

SEQ ID NO: 314621 - DNA, 60 bp, Artificial
  Synthetic oligonucleotide
acgctgattcagcgccttgggccgagaatgtcctagtggttccttgtgataatacgtgga

SEQ ID NO: 314622 - DNA, 60 bp, Artificial
  Synthetic oligonucleotide
acgctgattctcctgggtctagaattaacgtgtccaatctgttcagatccttatatggat

SEQ ID NO: 314623 - DNA, 60 bp, Artificial
  Synthetic oligonucleotide
acgctgatttggcaaaattcgagcagcgcgagcaacgttggatgaaaatggtcgactaca

SEQ ID NO: 314624 - DNA, 60 bp, Artificial
  Synthetic oligonucleotide
acgctgcacatcgaacaatgtgatggcctacagagcgagctcacaccgcgggcggacctg

SEQ ID NO: 314625 - DNA, 56 bp, Artificial
  Synthetic oligonucleotide
acgctgcacccccttcggggggtgcagcggtggaggccctttgcagcctcaaagga

SEQ ID NO: 314626 - DNA, 52 bp, Artificial
  Synthetic oligonucleotide
acgctgcatggtacgcaatcgccaaagttaaacacaccaaggcccgcacacc

SEQ ID NO: 314627 - DNA, 60 bp, Artificial
  Synthetic oligonucleotide
acgctgccacgcaacataacgcgctctcgatgttaagacgtgctacggccgcgtcacgac

SEQ ID NO: 314628 - DNA, 51 bp, Artificial
  Synthetic oligonucleotide
acgctgcgagcgtagcttgggatactttacagtccgtttatgcgaataggt

SEQ ID NO: 314629 - DNA, 55 bp, Artificial
  Synthetic oligonucleotide
acgctgcgaggcctaccaaaatgcgaaatctaatgggcctaatgctacacgagga

SEQ ID NO: 314630 - DNA, 55 bp, Artificial
  Synthetic oligonucleotide
acgctgcggtcgctcgtgcgaccctggcagctctacaaccccgatggtctgatcc

SEQ ID NO: 314631 - DNA, 59 bp, Artificial
  Synthetic oligonucleotide
acgctgcgtgcaactggactcgaggagagcgctgcgacttggaggacagggatagatca

SEQ ID NO: 314632 - DNA, 59 bp, Artificial
  Synthetic oligonucleotide
acgctgctagaattgtcgcccaaccgttggacgcgcgggagccaggccacttcagcaac

SEQ ID NO: 314633 - DNA, 59 bp, Artificial
  Synthetic oligonucleotide
acgctgctctcccgtcgatgccacgcgcttctacttctactgcctccatcccaagcctc

SEQ ID NO: 314634 - DNA, 53 bp, Artificial
  Synthetic oligonucleotide
acgctgctgcgttgcgtcgtgtgctacgtttttacatgcgtgataaagtgggt

SEQ ID NO: 314635 - DNA, 60 bp, Artificial
  Synthetic oligonucleotide
acgctggaatccatcttcaagcacgacgctgacataatgactggcaagcgatcggccgta

SEQ ID NO: 314636 - DNA, 57 bp, Artificial
  Synthetic oligonucleotide
acgctggagacatcttggaaggggaaagaggtcggatggaagagaggaggcgggctc

SEQ ID NO: 314637 - DNA, 55 bp, Artificial
  Synthetic oligonucleotide
acgctggatttacccccagctcgaccggacttcatggtctgttcgacccaaacgc

SEQ ID NO: 314638 - DNA, 56 bp, Artificial
  Synthetic oligonucleotide
acgctggcaccgatattaactaccttagccagcgcacggctaacttttcggatacc

SEQ ID NO: 314639 - DNA, 54 bp, Artificial
  Synthetic oligonucleotide
acgctgggaagattctatgacttacgcttacagttcgtcgaagatgttttgagt

SEQ ID NO: 314640 - DNA, 59 bp, Artificial
  Synthetic oligonucleotide
acgctgggacggtcatgtttctcttttcccacgtaatcatcaacgcgtgtcgcactcca

SEQ ID NO: 314641 - DNA, 60 bp, Artificial
  Synthetic oligonucleotide
acgctgggagagaccagagatcctgctgtctccacagcatcattccaggcacagaacgcc

SEQ ID NO: 314642 - DNA, 50 bp, Artificial
  Synthetic oligonucleotide
acgctgggcgcagttttcccactggccaaaacgaaccccatcttagccgg

SEQ ID NO: 314643 - DNA, 60 bp, Artificial
  Synthetic oligonucleotide
acgctggtaccagagtaatgaaactagcatgataagttctatcgaaggctcatgccgagg

SEQ ID NO: 314644 - DNA, 55 bp, Artificial
  Synthetic oligonucleotide
acgctggtcccggtttttccgtggtcccgatggtgatggctctggctaagggtga

SEQ ID NO: 314645 - DNA, 53 bp, Artificial
  Synthetic oligonucleotide
acgctggtcttaaagttaggtcgtgggggcgtacgatatttaagttcaccata

SEQ ID NO: 314646 - DNA, 57 bp, Artificial
  Synthetic oligonucleotide
acgctgtagaacgaaagctagtcaattatgctaaaggtaaaccattagaggctgatt

SEQ ID NO: 314647 - DNA, 53 bp, Artificial
  Synthetic oligonucleotide
acgctgtcacccgcccttcacgctatttggcaggtaatgcagtattacaaggt

SEQ ID NO: 314648 - DNA, 59 bp, Artificial
  Synthetic oligonucleotide
acgctgtcccagcgtttaagtgtgtgtcaggacaaaatactagaacattacgagactga

SEQ ID NO: 314649 - DNA, 51 bp, Artificial
  Synthetic oligonucleotide
acgctgtcgcattgccgtgttaccatatgtgcacctgtcaacaatgcgccc

SEQ ID NO: 314650 - DNA, 54 bp, Artificial
  Synthetic oligonucleotide
acgctgtgacatcgaactaacattcgtcatcaccagtgcacaagatccatcgac

SEQ ID NO: 314651 - DNA, 60 bp, Artificial
  Synthetic oligonucleotide
acgctgtggttgaaccgtatctggacgtggtatatcctcgtctctgctgtgcaggacgtc

SEQ ID NO: 314652 - DNA, 55 bp, Artificial
  Synthetic oligonucleotide
acgctgttagtcccgcaaaagctggacaacttgtcacagtcgccatttcaaccgt

SEQ ID NO: 314653 - DNA, 58 bp, Artificial
  Synthetic oligonucleotide
acgctgtttgaactatgcctcattaacccaagcttatcaatattgtaataaccacaac

SEQ ID NO: 314654 - DNA, 52 bp, Artificial
  Synthetic oligonucleotide
acgcttaacaacaaaatcttataaggacgagaaaacctcagagggcaaaaac

SEQ ID NO: 314655 - DNA, 54 bp, Artificial
  Synthetic oligonucleotide
acgcttaacgacaaaatcagaaaaggagtagacacactcatctacagagcaaaa

SEQ ID NO: 314656 - DNA, 55 bp, Artificial
  Synthetic oligonucleotide
acgcttaagctagaaagctcctgcaatttcgatctgcacacaagcacatctgccc

SEQ ID NO: 314657 - DNA, 55 bp, Artificial
  Synthetic oligonucleotide
acgcttacaagagggcttacgagtatttgaagaaggggatttctgatggtaaata

SEQ ID NO: 314658 - DNA, 58 bp, Artificial
  Synthetic oligonucleotide
acgcttacaatcttatgcgtgaaactgatgtgcccataatggaattcactttcgggca

SEQ ID NO: 314659 - DNA, 60 bp, Artificial
  Synthetic oligonucleotide
acgcttacgcgctcgaagaaaatcaatcgaagaacagaacatcttatgtcctatgctggg

SEQ ID NO: 314660 - DNA, 55 bp, Artificial
  Synthetic oligonucleotide
acgcttactcgctggcggcgaccttcatcgcgcgcatcggctccggattcagcag

SEQ ID NO: 314661 - DNA, 60 bp, Artificial
  Synthetic oligonucleotide
acgcttacttcagcggcatccaactgatcaccagggtgaaagatactgttgtatattttc

SEQ ID NO: 314662 - DNA, 55 bp, Artificial
  Synthetic oligonucleotide
acgcttagttagttagaaccctttgcccactcctccatggtgatataaagaccac

SEQ ID NO: 314663 - DNA, 60 bp, Artificial
  Synthetic oligonucleotide
acgcttatgcaacaatcaggttatacatcagattaccttaccgccacggcaggcaccctg

SEQ ID NO: 314664 - DNA, 60 bp, Artificial
  Synthetic oligonucleotide
acgcttcaatacagacatggtgcgaagagcctattgagctagtcagtagtcctccggccc

SEQ ID NO: 314665 - DNA, 60 bp, Artificial
  Synthetic oligonucleotide
acgcttcagaaactttgttggcgaatgtaacatcagtacgtcaggagtatgcaataccag

SEQ ID NO: 314666 - DNA, 58 bp, Artificial
  Synthetic oligonucleotide
acgcttcagtgttaagtaacacagacgcgggtcatagtggcaccccatacttcaatgg

SEQ ID NO: 314667 - DNA, 58 bp, Artificial
  Synthetic oligonucleotide
acgcttcggtgacttccccgcatgttgccgctcgtccctttgctgactagcgagcacg

SEQ ID NO: 314668 - DNA, 57 bp, Artificial
  Synthetic oligonucleotide
acgcttctcggtgggctaccgacagaattgatttcgtcggctggtggacaattgttc

SEQ ID NO: 314669 - DNA, 55 bp, Artificial
  Synthetic oligonucleotide
acgcttgacactgcctgtcccggcgttaaagggaggtaaccgcaagcatactacc

SEQ ID NO: 314670 - DNA, 59 bp, Artificial
  Synthetic oligonucleotide
acgcttgagaacgctaacacctgtttacctgctgccttttcagacaggtatgttactga

SEQ ID NO: 314671 - DNA, 51 bp, Artificial
  Synthetic oligonucleotide
acgcttgagtgatgccatgatggctagtcctctcgggtgaatgtcaagtca

SEQ ID NO: 314672 - DNA, 53 bp, Artificial
  Synthetic oligonucleotide
acgcttgcaaaattatgcgcactcaattgtaaagctcgaatgtctattagcaa

SEQ ID NO: 314673 - DNA, 60 bp, Artificial
  Synthetic oligonucleotide
acgcttgcagaaagccgcacgccaagcccacaagtaggcgcaacgtcgattgctgttgca

SEQ ID NO: 314674 - DNA, 60 bp, Artificial
  Synthetic oligonucleotide
acgcttgcgtttcaaagggacggttaagattgaacgcatgcacactgatgttaacatgga

SEQ ID NO: 314675 - DNA, 59 bp, Artificial
  Synthetic oligonucleotide
acgcttgtaaggattcgtcttcagtcattcttttgtcatggatctctacaataaccgac

SEQ ID NO: 314676 - DNA, 52 bp, Artificial
  Synthetic oligonucleotide
acgcttgtttcacggctttcgaccccggcttctttacttttgccgaaatgca

SEQ ID NO: 314677 - DNA, 59 bp, Artificial
  Synthetic oligonucleotide
acgctttacattatgcacacacaagccgataaatgtgctatgttgcgtcatccaggtat

SEQ ID NO: 314678 - DNA, 53 bp, Artificial
  Synthetic oligonucleotide
acgctttatccagggttgaccacgggcccggaaggacgtcggcgttgcgctcc

SEQ ID NO: 314679 - DNA, 54 bp, Artificial
  Synthetic oligonucleotide
acgctttgcccctttactacggcgagcggggcgaaagctagactcccaagcctc

SEQ ID NO: 314680 - DNA, 60 bp, Artificial
  Synthetic oligonucleotide
acgctttggaggcatgttgaccaagtgagaggacccgattgaccgctcttgcaactctcc

SEQ ID NO: 314681 - DNA, 58 bp, Artificial
  Synthetic oligonucleotide
acgcttttgcatttgccaaagctagtcgagatgtggtgacgacgttgacgttacccac

SEQ ID NO: 314682 - DNA, 57 bp, Artificial
  Synthetic oligonucleotide
acgcttttggcaataggcacggtggacccgtgagggcatgccgtaaaacgtgcagac

SEQ ID NO: 314683 - DNA, 54 bp, Artificial
  Synthetic oligonucleotide
acgcttttttctaatgagatgaaccccccacagcgacatttcggaccgacccca

SEQ ID NO: 314684 - DNA, 54 bp, Artificial
  Synthetic oligonucleotide
acggaaaactatgtaagctaaggggaatagccccattacacttgggtaaatgca

SEQ ID NO: 314685 - DNA, 58 bp, Artificial
  Synthetic oligonucleotide
acggaaaatcagaggggatactgtgtttgatatgcctgagtgagctaaaaacttaaca

SEQ ID NO: 314686 - DNA, 50 bp, Artificial
  Synthetic oligonucleotide
acggaaaatcctaataggttcacgatgagaaaatcgatagtttcgagagg

SEQ ID NO: 314687 - DNA, 58 bp, Artificial
  Synthetic oligonucleotide
acggaaacagaccgttggggtatcactactgcctcttccagaaccctcagtgcagata

SEQ ID NO: 314688 - DNA, 55 bp, Artificial
  Synthetic oligonucleotide
acggaaacagcacatggtgtccgtagctgcacgatacaacgacttgcaccaaccg

SEQ ID NO: 314689 - DNA, 55 bp, Artificial
  Synthetic oligonucleotide
acggaaactcttggccagatttggggagacgagaggacccattcaggtgcctgag

SEQ ID NO: 314690 - DNA, 60 bp, Artificial
  Synthetic oligonucleotide
acggaaagatggcagaacagactctctatacatagcaggaggaaaacaattctggacacg

SEQ ID NO: 314691 - DNA, 58 bp, Artificial
  Synthetic oligonucleotide
acggaaagcctcgcggagtacctcatcgcaggatccctcgccacctactgcctcaact

SEQ ID NO: 314692 - DNA, 50 bp, Artificial
  Synthetic oligonucleotide
acggaaatcgaaacgcatggaacatctgagagaaaacacttcattgtcgc

SEQ ID NO: 314693 - DNA, 59 bp, Artificial
  Synthetic oligonucleotide
acggaaatgctcgctaaccgctcaagcttgctggggtataaccactgaaatgttgctta

SEQ ID NO: 314694 - DNA, 58 bp, Artificial
  Synthetic oligonucleotide
acggaaattgcaatgaaacagtcattagggaatacaatgaaacagtaaggattgagaa

SEQ ID NO: 314695 - DNA, 55 bp, Artificial
  Synthetic oligonucleotide
acggaaattgtgtcaactgatgcttttaacatgttggccgcaaaaactggttaca

SEQ ID NO: 314696 - DNA, 50 bp, Artificial
  Synthetic oligonucleotide
acggaacagatggaacaaccgttgttcgtacagacacatatacacttact

SEQ ID NO: 314697 - DNA, 50 bp, Artificial
  Synthetic oligonucleotide
acggaacaggaagggacctactacaaaccaggaagacccatcagagcagc

SEQ ID NO: 314698 - DNA, 55 bp, Artificial
  Synthetic oligonucleotide
acggaacatggccaattgtacgcgggcatagcgtctgacgtaaagaaacgttttc

SEQ ID NO: 314699 - DNA, 54 bp, Artificial
  Synthetic oligonucleotide
acggaacccgtgccgctttacgtgccggagttgggagatccggctagacagtac

SEQ ID NO: 314700 - DNA, 56 bp, Artificial
  Synthetic oligonucleotide
acggaacgaacttcgagcatgcgtttacacatttcgtcgcaactaatccgtaatcg

SEQ ID NO: 314701 - DNA, 55 bp, Artificial
  Synthetic oligonucleotide
acggaactatcacggctttcgagcctagtgacaacatgtcaatcaacggtgtgcc

SEQ ID NO: 314702 - DNA, 56 bp, Artificial
  Synthetic oligonucleotide
acggaagcagagtagtcgccgaatggtggcacgtccacggaagaaaccccgatcgc

SEQ ID NO: 314703 - DNA, 54 bp, Artificial
  Synthetic oligonucleotide
acggaagcgtaagcgaaaacgtgttgaggtagctagccggacttactctctaag

SEQ ID NO: 314704 - DNA, 54 bp, Artificial
  Synthetic oligonucleotide
acggaaggctagggtttgacggtcaataccatgagaaggacttagacaccacgg

SEQ ID NO: 314705 - DNA, 52 bp, Artificial
  Synthetic oligonucleotide
acggaaggtactggtttggaacccattagcaatacccccaatccaacagtac

SEQ ID NO: 314706 - DNA, 55 bp, Artificial
  Synthetic oligonucleotide
acggaagtatataccagagagagaagacgattacccagactgtaacctggctttg

SEQ ID NO: 314707 - DNA, 56 bp, Artificial
  Synthetic oligonucleotide
acggaagtgcggatgtggtgtccactgtctttaattcaaatttcagaagcggttag

SEQ ID NO: 314708 - DNA, 52 bp, Artificial
  Synthetic oligonucleotide
acggaataaacgcccaaattctctttaaggtagccagtgttaccgcactgac

SEQ ID NO: 314709 - DNA, 55 bp, Artificial
  Synthetic oligonucleotide
acggaatccctccacttgaactaggggactgtagcattgccggatggctccttgg

SEQ ID NO: 314710 - DNA, 52 bp, Artificial
  Synthetic oligonucleotide
acggaatcccttgggggcccccccttgcaaatccacgcttcaacaccccata

SEQ ID NO: 314711 - DNA, 51 bp, Artificial
  Synthetic oligonucleotide
acggaatcgcgtggtgtggcatttcgagcacggcctgcattgctccaatcg

SEQ ID NO: 314712 - DNA, 58 bp, Artificial
  Synthetic oligonucleotide
acggaatgagggtacgttctcagaactcatgttcgagatcgttagcaaagcgttatcc

SEQ ID NO: 314713 - DNA, 54 bp, Artificial
  Synthetic oligonucleotide
acggaatgtttggcggtcgataatttcagcttccctttgaattttgcgaagtgg

SEQ ID NO: 314714 - DNA, 55 bp, Artificial
  Synthetic oligonucleotide
acggaattgatatcataatgtttaaccgagaacagatagtcggaatgacagaccc

SEQ ID NO: 314715 - DNA, 57 bp, Artificial
  Synthetic oligonucleotide
acggacaaccatgttcgaacgacacgataaattactacaatgagacttttgtcaatg

SEQ ID NO: 314716 - DNA, 55 bp, Artificial
  Synthetic oligonucleotide
acggacaacccgtccgtgtgcgtgtactgcgactgcgtgttcgtgcgctactcct

SEQ ID NO: 314717 - DNA, 60 bp, Artificial
  Synthetic oligonucleotide
acggacaatgggctctatggtatgtgaagtctgccaacatgagtgtgagacagctaagga

SEQ ID NO: 314718 - DNA, 56 bp, Artificial
  Synthetic oligonucleotide
acggacacaatttttaagtcgtgtgaacattccaaaggggatacaagccactgctg

SEQ ID NO: 314719 - DNA, 52 bp, Artificial
  Synthetic oligonucleotide
acggacacccacacacatctaagacatatacgatcggtgttgacaggcacgt

SEQ ID NO: 314720 - DNA, 51 bp, Artificial
  Synthetic oligonucleotide
acggacactggtaccgtacctgtctcccctttaggcggttaaatggactag

SEQ ID NO: 314721 - DNA, 51 bp, Artificial
  Synthetic oligonucleotide
acggacactggttccgtacctgtctcccctttagaagaaaaaatggactag

SEQ ID NO: 314722 - DNA, 54 bp, Artificial
  Synthetic oligonucleotide
acggacactggttccgtacctgtctccctatgagaaggctaaacggactgattt

SEQ ID NO: 314723 - DNA, 60 bp, Artificial
  Synthetic oligonucleotide
acggacagacctctcacagttaggatggttattgatcagatatgggaggagaggcaaagt

SEQ ID NO: 314724 - DNA, 55 bp, Artificial
  Synthetic oligonucleotide
acggacagaggcaacatttccgacacactcccttcctacctttacgagtactcca

SEQ ID NO: 314725 - DNA, 55 bp, Artificial
  Synthetic oligonucleotide
acggacatgaaaaaagcgttgtagttcaaactcataaaggcgaaatgacgttaga

SEQ ID NO: 314726 - DNA, 55 bp, Artificial
  Synthetic oligonucleotide
acggacatgggataagtcaaagatgtaccaagccttgggtttcgcagcaggcggt

SEQ ID NO: 314727 - DNA, 52 bp, Artificial
  Synthetic oligonucleotide
acggacatggtaaaaacccctggggaagcatcgcaaggctacttccccaggg

SEQ ID NO: 314728 - DNA, 54 bp, Artificial
  Synthetic oligonucleotide
acggacccggccctccttctactgggatcacggctacacctaccgtgatggccc

SEQ ID NO: 314729 - DNA, 49 bp, Artificial
  Synthetic oligonucleotide
acggaccgagttcagttcggaccggtggtagccttaaacccggccacgt

SEQ ID NO: 314730 - DNA, 51 bp, Artificial
  Synthetic oligonucleotide
acggaccgataacacccattgaggcggttcgccacacgcactgggcctgga

SEQ ID NO: 314731 - DNA, 56 bp, Artificial
  Synthetic oligonucleotide
acggacctacacaaacaacccacggcgactgtggtctgccactctttgatgaggct

SEQ ID NO: 314732 - DNA, 55 bp, Artificial
  Synthetic oligonucleotide
acggacgagaagtagccaaatcagtatgtagcaaggcttgtaccgtgtatgctcg

SEQ ID NO: 314733 - DNA, 60 bp, Artificial
  Synthetic oligonucleotide
acggacgagctagtgaaggccgtagaatccaggtatgaaatcatactggcaggcctaatc

SEQ ID NO: 314734 - DNA, 57 bp, Artificial
  Synthetic oligonucleotide
acggacgcgaaaccatcgaatgtggtcaagggattctcgccacgtcgaaaggcctca

SEQ ID NO: 314735 - DNA, 51 bp, Artificial
  Synthetic oligonucleotide
acggacggtccgtcaccgggtttggtcgctacgggtaccgctcaactcgtg

SEQ ID NO: 314736 - DNA, 51 bp, Artificial
  Synthetic oligonucleotide
acggacgttctcgtccttaataacaccaggccaccgttgggtaattggttc

SEQ ID NO: 314737 - DNA, 56 bp, Artificial
  Synthetic oligonucleotide
acggactaggatacgttccaattcgttgggtaaaatgtcgtgatcctgagtatata

SEQ ID NO: 314738 - DNA, 54 bp, Artificial
  Synthetic oligonucleotide
acggactaggccagatacccagatactggcatcagagatggtaccccatcttaa

SEQ ID NO: 314739 - DNA, 58 bp, Artificial
  Synthetic oligonucleotide
acggactatcactgaagaaactcttcatagaatataacgacgttatagaaaatgctac

SEQ ID NO: 314740 - DNA, 55 bp, Artificial
  Synthetic oligonucleotide
acggactgtgcaccgcgtctctgccacaacccggcctgaaaagctccactctaac

SEQ ID NO: 314741 - DNA, 57 bp, Artificial
  Synthetic oligonucleotide
acggacttgctggtgccctccgcttgtgtgaactcgattgtctagacgcctttcccc

SEQ ID NO: 314742 - DNA, 60 bp, Artificial
  Synthetic oligonucleotide
acggacttgctgtggccagcggatatgactttgagagagagggatactccctagtcggga

SEQ ID NO: 314743 - DNA, 50 bp, Artificial
  Synthetic oligonucleotide
acggacttgttccatttgctcgagtcggaagaggtagaacggtcatccga

SEQ ID NO: 314744 - DNA, 58 bp, Artificial
  Synthetic oligonucleotide
acggactttatatcactaaagtgcatcagtaccgaaccaatgaatgcgtcaaggtaaa

SEQ ID NO: 314745 - DNA, 57 bp, Artificial
  Synthetic oligonucleotide
acggagaaacaacagtggacgaactgcgagagctagggcttgggattatggtcccag

SEQ ID NO: 314746 - DNA, 60 bp, Artificial
  Synthetic oligonucleotide
acggagaaactatcggatccattgatacttggtccattcatccagctggtgacccagctt

SEQ ID NO: 314747 - DNA, 54 bp, Artificial
  Synthetic oligonucleotide
acggagaaagaagacaaaccacctccagaggaccccttcagcgaacagaagacc

SEQ ID NO: 314748 - DNA, 60 bp, Artificial
  Synthetic oligonucleotide
acggagaaatgacagttacaacaattatattgccagagcatcaatagtgactgatcttag

SEQ ID NO: 314749 - DNA, 56 bp, Artificial
  Synthetic oligonucleotide
acggagaaccatgtaatcaaggagctcgaagcgatctcgaagaggttgtttctatc

SEQ ID NO: 314750 - DNA, 55 bp, Artificial
  Synthetic oligonucleotide
acggagaagtattgtgaatggggagccatatccgtctctatagacgaagacaacg

SEQ ID NO: 314751 - DNA, 55 bp, Artificial
  Synthetic oligonucleotide
acggagaccaatctcgtccacgaggtgccgaaaatcgcacgacggccctcccacg

SEQ ID NO: 314752 - DNA, 57 bp, Artificial
  Synthetic oligonucleotide
acggagacgattacggtggacctggcgagaaaattaccatctgcaatggttcaacca

SEQ ID NO: 314753 - DNA, 52 bp, Artificial
  Synthetic oligonucleotide
acggagacgctagaactgcaggagctaaaaggaaacggtccaacgaagggca

SEQ ID NO: 314754 - DNA, 60 bp, Artificial
  Synthetic oligonucleotide
acggagacggagatagcgaatgctaaaaatctagacccggcaatcaagcgcacgatagat

SEQ ID NO: 314755 - DNA, 60 bp, Artificial
  Synthetic oligonucleotide
acggagagaagagatgtataaaagtcagagcaagtgtataaaatgtcttgtagacatgga

SEQ ID NO: 314756 - DNA, 60 bp, Artificial
  Synthetic oligonucleotide
acggagatgatttattgctaagcgtacacccagagtatgagtatatccttgacactatgg

SEQ ID NO: 314757 - DNA, 54 bp, Artificial
  Synthetic oligonucleotide
acggagattaggttttatcgctaaagcttacgtgcaaaagcttaggtggtacga

SEQ ID NO: 314758 - DNA, 60 bp, Artificial
  Synthetic oligonucleotide
acggagcagatcggagttacaatgcatcaagatacagctcggatacatcttataaaaacg

SEQ ID NO: 314759 - DNA, 56 bp, Artificial
  Synthetic oligonucleotide
acggagcaggttcaaggtgttcgccatatggtgttgtttaaaacagagtcaggctt

SEQ ID NO: 314760 - DNA, 59 bp, Artificial
  Synthetic oligonucleotide
acggagcctggcacatccaaccgagagcaatacaaagctcgaccaggtattgcatctgt

SEQ ID NO: 314761 - DNA, 55 bp, Artificial
  Synthetic oligonucleotide
acggagcgtcagagacgcgaaagatttggagacgcagattggacgcggacgcata

SEQ ID NO: 314762 - DNA, 55 bp, Artificial
  Synthetic oligonucleotide
acggaggaacccacggtgacggagcctttgcgaatattctctctaggtttgagcg

SEQ ID NO: 314763 - DNA, 58 bp, Artificial
  Synthetic oligonucleotide
acggaggaggcatgcagtctcacacccccgcactcagcccgatctaagttcgggtacg

SEQ ID NO: 314764 - DNA, 53 bp, Artificial
  Synthetic oligonucleotide
acggaggagggactttatgtcctccccgtgtgttgtttgctggggtacaggtc

SEQ ID NO: 314765 - DNA, 53 bp, Artificial
  Synthetic oligonucleotide
acggaggcgaaggaaagtcaaccttcgcaagatatctatcattaaaacccgga

SEQ ID NO: 314766 - DNA, 56 bp, Artificial
  Synthetic oligonucleotide
acggaggctgcgaatgaaatcgcgcgtgtaacaggagaaacgtcaacgtggggacc

SEQ ID NO: 314767 - DNA, 57 bp, Artificial
  Synthetic oligonucleotide
acggagggggagcgctcgtcatcgggcttaataacgatacgcttaaagcggagtgca

SEQ ID NO: 314768 - DNA, 53 bp, Artificial
  Synthetic oligonucleotide
acggaggtctaatggagtttaatttacttgaccaaagaataatatggcaaaat

SEQ ID NO: 314769 - DNA, 55 bp, Artificial
  Synthetic oligonucleotide
acggaggtggggcgagtggctctcttctacgacaaggacagcggagatagtgggc

SEQ ID NO: 314770 - DNA, 50 bp, Artificial
  Synthetic oligonucleotide
acggaggtttgaggtgggatatcttaacaacaatactcgcgtctcttcag

SEQ ID NO: 314771 - DNA, 59 bp, Artificial
  Synthetic oligonucleotide
acggagtatcttagcaaacaatgggaaatttgagttcattgctgaggaattccaatgga

SEQ ID NO: 314772 - DNA, 59 bp, Artificial
  Synthetic oligonucleotide
acggagtcaaattagaatcaacagggacttatcagatactttcaatctattcaacagta

SEQ ID NO: 314773 - DNA, 55 bp, Artificial
  Synthetic oligonucleotide
acggagtctagcaagcgagttcgccaaccgatacctgccatgcggagccgagtgg

SEQ ID NO: 314774 - DNA, 59 bp, Artificial
  Synthetic oligonucleotide
acggagtctgctgcatacccagtaattaagggaacatacaataacactggctcccagcc

SEQ ID NO: 314775 - DNA, 60 bp, Artificial
  Synthetic oligonucleotide
acggagtgaatcaataattgtggaatctggagatcagaatgcattattgaaacaccgatt

SEQ ID NO: 314776 - DNA, 52 bp, Artificial
  Synthetic oligonucleotide
acggagtgatctcaccaaaactacgatcaccacccttgtgaagatcatctgt

SEQ ID NO: 314777 - DNA, 54 bp, Artificial
  Synthetic oligonucleotide
acggagtgccggaccctccttctcttggttgcaacgacatcgggcccttccaga

SEQ ID NO: 314778 - DNA, 57 bp, Artificial
  Synthetic oligonucleotide
acggagtgtaaaagagaaatgggttggggcgcaatatcaaggcaacgcaatatacgc

SEQ ID NO: 314779 - DNA, 55 bp, Artificial
  Synthetic oligonucleotide
acggagtgtttcgccgacgataacttcagtttgcccttgaatttagcgaaatgcg

SEQ ID NO: 314780 - DNA, 53 bp, Artificial
  Synthetic oligonucleotide
acggagttcaaaacacaaacgccggttttcttactggttctccgcgtcatcaa

SEQ ID NO: 314781 - DNA, 60 bp, Artificial
  Synthetic oligonucleotide
acggagttcgaatccatagagtctgaattcagtgaaatagaacatcagatcggtaatgta

SEQ ID NO: 314782 - DNA, 57 bp, Artificial
  Synthetic oligonucleotide
acggatacatcgtggttgacgaaaccatcgtccccgagctcttgccaagactgggat

SEQ ID NO: 314783 - DNA, 56 bp, Artificial
  Synthetic oligonucleotide
acggatacgaattattcgtacgatcctcctcctgtgaatacgaattcccagggatc

SEQ ID NO: 314784 - DNA, 60 bp, Artificial
  Synthetic oligonucleotide
acggatacgtagtgtcagcgctggtcgtgcactatatattcctccttatgacttgctttt

SEQ ID NO: 314785 - DNA, 60 bp, Artificial
  Synthetic oligonucleotide
acggatacttatgcttgaagttcacactttttcatcgcaacaagagatctctgtcatcaa

SEQ ID NO: 314786 - DNA, 60 bp, Artificial
  Synthetic oligonucleotide
acggatatagtccactgccgtatggccgctccaagccagcgaaaggctgttctctcaaca

SEQ ID NO: 314787 - DNA, 57 bp, Artificial
  Synthetic oligonucleotide
acggatatgacggcagggtcctactaccatgtggatcggccattccggtccctgagt

SEQ ID NO: 314788 - DNA, 58 bp, Artificial
  Synthetic oligonucleotide
acggatatgcgccacgtgcagatggaacaatgccggactggaataatttgggtagttt

SEQ ID NO: 314789 - DNA, 56 bp, Artificial
  Synthetic oligonucleotide
acggatatgtaaatatagctagaaatttagaaggattccaacagataaatttagag

SEQ ID NO: 314790 - DNA, 55 bp, Artificial
  Synthetic oligonucleotide
acggatcagtactccgatgtatccccgtcggcgacttgcaaccggtcccttgtac

SEQ ID NO: 314791 - DNA, 55 bp, Artificial
  Synthetic oligonucleotide
acggatcctaacaaaacaccagccataattctagagatttggggctcaggggaaa

SEQ ID NO: 314792 - DNA, 60 bp, Artificial
  Synthetic oligonucleotide
acggatcggctgtaggtcgtgggcgcttggatcgctcatgcgtggagcatatcacaagtg

SEQ ID NO: 314793 - DNA, 52 bp, Artificial
  Synthetic oligonucleotide
acggatcgtaacggtgtacggcgacaatggaaagacataacgctcatgttgc

SEQ ID NO: 314794 - DNA, 53 bp, Artificial
  Synthetic oligonucleotide
acggatcttcttggttttcaggtcctgagagcctgtaggagtatttgtcactc

SEQ ID NO: 314795 - DNA, 55 bp, Artificial
  Synthetic oligonucleotide
acggatcttttcaactgacgagggacctgagtcatacttccaaggagttgaatta

SEQ ID NO: 314796 - DNA, 60 bp, Artificial
  Synthetic oligonucleotide
acggatgaatatgtacaaaggaccaatattttctatcatgcatatagtgacagattatta

SEQ ID NO: 314797 - DNA, 59 bp, Artificial
  Synthetic oligonucleotide
acggatgacagggagacttcagtcgccgcagagatcctgaggccgactaagaggttccc

SEQ ID NO: 314798 - DNA, 60 bp, Artificial
  Synthetic oligonucleotide
acggatgactgttagtggacatatgatgtatatcctgcttggatctatgttaggagtacc

SEQ ID NO: 314799 - DNA, 56 bp, Artificial
  Synthetic oligonucleotide
acggatgagttgggtaatacattctccgtccccgatcctttacgtgagctgcaacg

SEQ ID NO: 314800 - DNA, 60 bp, Artificial
  Synthetic oligonucleotide
acggatgatcaccataattggtgttggtcggctggattcacgtgctgtgaggagagaaat

SEQ ID NO: 314801 - DNA, 60 bp, Artificial
  Synthetic oligonucleotide
acggatgccacgtccgtcttagccatcggcactgcccttgaccaagcagagactgcgggg

SEQ ID NO: 314802 - DNA, 60 bp, Artificial
  Synthetic oligonucleotide
acggatgcggatacttcagcgctcctctgagattcgacaacttcaaaggacagatctacg

SEQ ID NO: 314803 - DNA, 53 bp, Artificial
  Synthetic oligonucleotide
acggatgctatgtttaggtagagcatctttagcactctcatattcagcgactg

SEQ ID NO: 314804 - DNA, 57 bp, Artificial
  Synthetic oligonucleotide
acggatgggagggtctggttgatgggtggtatggtttcagacatcaaaattcacaag

SEQ ID NO: 314805 - DNA, 55 bp, Artificial
  Synthetic oligonucleotide
acggatgggagtgcaaatgcagcgattcaagtgatcctctcggtattgccgcaag

SEQ ID NO: 314806 - DNA, 58 bp, Artificial
  Synthetic oligonucleotide
acggatgtgactcgtggtagtggtctcactcatcgtgtcggaaaacgattttgtgtta

SEQ ID NO: 314807 - DNA, 55 bp, Artificial
  Synthetic oligonucleotide
acggatgttgtcgatggagtcaaccataaactagacgtaacaacgaatacgtgta

SEQ ID NO: 314808 - DNA, 55 bp, Artificial
  Synthetic oligonucleotide
acggattacgaacctatttgtaactatcttgatcgaagtctagtagatccccaat

SEQ ID NO: 314809 - DNA, 51 bp, Artificial
  Synthetic oligonucleotide
acggattccctgagccagggcatattattaacagccgatggctcaaagcca

SEQ ID NO: 314810 - DNA, 59 bp, Artificial
  Synthetic oligonucleotide
acggattcggcttagctacccacgtctttgcggttgggtgcagttcgcctatcatggca

SEQ ID NO: 314811 - DNA, 55 bp, Artificial
  Synthetic oligonucleotide
acggattgctagactgggatatactccagtgccatcctctgctactagtgaggca

SEQ ID NO: 314812 - DNA, 60 bp, Artificial
  Synthetic oligonucleotide
acggattgtctatgatgatgaattgcagatgcacattttgcgtggaccgatacatttcca

SEQ ID NO: 314813 - DNA, 60 bp, Artificial
  Synthetic oligonucleotide
acggatttaagcagattataccacaggtaagagatcaggctgggcatcttaagccagcag

SEQ ID NO: 314814 - DNA, 60 bp, Artificial
  Synthetic oligonucleotide
acggattttcatcacaccatatgcgctttctgaatgcatatgaggtattccagctgaact

SEQ ID NO: 314815 - DNA, 52 bp, Artificial
  Synthetic oligonucleotide
acggcaaacgaccctaaggcgggagtggagtcctggagtaaggtggaggacc

SEQ ID NO: 314816 - DNA, 54 bp, Artificial
  Synthetic oligonucleotide
acggcaaatgcgaactctagagtgttacgatctggcgacactatgacgggtaac

SEQ ID NO: 314817 - DNA, 55 bp, Artificial
  Synthetic oligonucleotide
acggcaagaggcgaggggcagcgaacggcgagtacgctaaaaatttttgactagc

SEQ ID NO: 314818 - DNA, 60 bp, Artificial
  Synthetic oligonucleotide
acggcaaggaacgattcatctacaattgcgacacgatttcatacgtctattttgattaca

SEQ ID NO: 314819 - DNA, 50 bp, Artificial
  Synthetic oligonucleotide
acggcaatgctgttgactttgagcaagattacccagaactcactgccttc

SEQ ID NO: 314820 - DNA, 55 bp, Artificial
  Synthetic oligonucleotide
acggcacacccgccacgctcaaagtgtgggtcggtaccgaagctcagtacaacgc

SEQ ID NO: 314821 - DNA, 60 bp, Artificial
  Synthetic oligonucleotide
acggcacatactacttgttcagtcaatggtgtgaataacttcagttacaatggaggatca

SEQ ID NO: 314822 - DNA, 55 bp, Artificial
  Synthetic oligonucleotide
acggcacatagccagagagcggtatccggagtacttcaaataaggacttccgggt

SEQ ID NO: 314823 - DNA, 55 bp, Artificial
  Synthetic oligonucleotide
acggcaccaaatcgacgaataacacgggggctcatgctcacagtctgagcggttc

SEQ ID NO: 314824 - DNA, 54 bp, Artificial
  Synthetic oligonucleotide
acggcaccgcgtggcccgacgagtctgccggaacccaggtccaaggccaggagg

SEQ ID NO: 314825 - DNA, 54 bp, Artificial
  Synthetic oligonucleotide
acggcacctgagtatataaccttctgtctcaaaaccattcttagagggtggtaa

SEQ ID NO: 314826 - DNA, 55 bp, Artificial
  Synthetic oligonucleotide
acggcacctgctaactgctcctccggatcccaacataagctgaccttatctgagg

SEQ ID NO: 314827 - DNA, 56 bp, Artificial
  Synthetic oligonucleotide
acggcacctttgggtcatcacttccttaatcgccgtatttggaagatactatagac

SEQ ID NO: 314828 - DNA, 56 bp, Artificial
  Synthetic oligonucleotide
acggcacggtacacttctgtctaagtcagatgagattacgttaactaggttattta

SEQ ID NO: 314829 - DNA, 56 bp, Artificial
  Synthetic oligonucleotide
acggcactaacacccatattatggcaaccgaggcgtctaattacgcccagtatcgg

SEQ ID NO: 314830 - DNA, 52 bp, Artificial
  Synthetic oligonucleotide
acggcagaaagacgccttggacttactacagcccgaaactaggacgctacgt

SEQ ID NO: 314831 - DNA, 59 bp, Artificial
  Synthetic oligonucleotide
acggcagaagaaggtcacctttgacagactgcaagtcctggacgaccattaccaggctg

SEQ ID NO: 314832 - DNA, 53 bp, Artificial
  Synthetic oligonucleotide
acggcagaaggtgttgtggtgccatgcaaagaatgtatacgctctgaaatggc

SEQ ID NO: 314833 - DNA, 60 bp, Artificial
  Synthetic oligonucleotide
acggcagagtctttaattcgcaaacagatgagctcgattgtgtacacaggtccgattaaa

SEQ ID NO: 314834 - DNA, 58 bp, Artificial
  Synthetic oligonucleotide
acggcagcacacggtgtccaaggatttggggctcgatttagtattctgtgggcgctta

SEQ ID NO: 314835 - DNA, 60 bp, Artificial
  Synthetic oligonucleotide
acggcaggcccacgatttacgaacataactcaaaatatggcaaggcagctagatatcgca

SEQ ID NO: 314836 - DNA, 50 bp, Artificial
  Synthetic oligonucleotide
acggcagggattattactaccgttcaggtaaactgtatctccctgagtta

SEQ ID NO: 314837 - DNA, 55 bp, Artificial
  Synthetic oligonucleotide
acggcaggggttgctatcaaacagatactatgcaatggtgggtgacattggaaag

SEQ ID NO: 314838 - DNA, 59 bp, Artificial
  Synthetic oligonucleotide
acggcagtcacacgtcatacgtacgctccttggtcagttggttctaaagaatgataggc

SEQ ID NO: 314839 - DNA, 55 bp, Artificial
  Synthetic oligonucleotide
acggcagtgtgtccgaatccggctgaactaatggtgtagtggccccatgtgggcc

SEQ ID NO: 314840 - DNA, 60 bp, Artificial
  Synthetic oligonucleotide
acggcataaccagaagcggttctgaactgatcacaaccctgaagaagaacactgacactg

SEQ ID NO: 314841 - DNA, 55 bp, Artificial
  Synthetic oligonucleotide
acggcatatcaagaatgtcaatatgcatgtcgggaccaaacaataatgcttcagc

SEQ ID NO: 314842 - DNA, 55 bp, Artificial
  Synthetic oligonucleotide
acggcatattcacgaccgtccttgtgtgcgacaagaggccgtccgaattctcatc

SEQ ID NO: 314843 - DNA, 55 bp, Artificial
  Synthetic oligonucleotide
acggcatcagaagactgactgccggctgatcttgggcgggagccgaaggtgagtg

SEQ ID NO: 314844 - DNA, 55 bp, Artificial
  Synthetic oligonucleotide
acggcatcgcaacaatttcttctggtccaattggtaagagaagcttttgccggta

SEQ ID NO: 314845 - DNA, 55 bp, Artificial
  Synthetic oligonucleotide
acggcatctctttagtggagtgaactcttttagcagaacagagctaataagtccc

SEQ ID NO: 314846 - DNA, 55 bp, Artificial
  Synthetic oligonucleotide
acggcatgcatatcgggacatgactacggccaatataactggaccacaccgcttg

SEQ ID NO: 314847 - DNA, 60 bp, Artificial
  Synthetic oligonucleotide
acggcatgtggtccgacgtcgaggttggcaacagcggactctccggtgtccgtctcagca

SEQ ID NO: 314848 - DNA, 52 bp, Artificial
  Synthetic oligonucleotide
acggcattaaaaaagcagggaaaggagttaaacttacagacgaatcagtact

SEQ ID NO: 314849 - DNA, 60 bp, Artificial
  Synthetic oligonucleotide
acggcattgatagaatccggactataaggcaattgattccgtccatagaccgacatcgag

SEQ ID NO: 314850 - DNA, 60 bp, Artificial
  Synthetic oligonucleotide
acggccaaacacgccacacagttgcactatgcacgtttgtgtctctcatcactaagtttg

SEQ ID NO: 314851 - DNA, 54 bp, Artificial
  Synthetic oligonucleotide
acggccaaacagtggtaaccgatttgctcgaaagctaggttaacggtatgtcaa

SEQ ID NO: 314852 - DNA, 53 bp, Artificial
  Synthetic oligonucleotide
acggccacgcttcattttgcggttgcggtgacgctgttggccatcttaatagc

SEQ ID NO: 314853 - DNA, 56 bp, Artificial
  Synthetic oligonucleotide
acggccactatgttggtcgcatcgttgtcaacgaacccgtatggttctatgggagg

SEQ ID NO: 314854 - DNA, 53 bp, Artificial
  Synthetic oligonucleotide
acggccagattacaaccctccactggtagagtcctggaagaacccggactacg

SEQ ID NO: 314855 - DNA, 54 bp, Artificial
  Synthetic oligonucleotide
acggccaggggaaaccttgaatgtggaatccaacggaaatctaatcgctccttg

SEQ ID NO: 314856 - DNA, 56 bp, Artificial
  Synthetic oligonucleotide
acggccagtagagtttcaggcacccaagttgtgtacactcgcacttccaaagtcct

SEQ ID NO: 314857 - DNA, 57 bp, Artificial
  Synthetic oligonucleotide
acggcccaacttcactctttatggcccatgattcgtttgggcctatagaacatggag

SEQ ID NO: 314858 - DNA, 55 bp, Artificial
  Synthetic oligonucleotide
acggcccacatcagtgtgccttttgtgggtgttaacaggtatgatcagtatgcgc

SEQ ID NO: 314859 - DNA, 57 bp, Artificial
  Synthetic oligonucleotide
acggcccatacccaaggctggtacgtggtattcgacactcttactctagccgatgac

SEQ ID NO: 314860 - DNA, 60 bp, Artificial
  Synthetic oligonucleotide
acggcccatccaggcacaagccgtctgattggacagctcttacatacacccctctctcga

SEQ ID NO: 314861 - DNA, 52 bp, Artificial
  Synthetic oligonucleotide
acggcccatgtatcggaagcccagaatgttccgaatgtacagaagccctgat

SEQ ID NO: 314862 - DNA, 55 bp, Artificial
  Synthetic oligonucleotide
acggccctattgctggcactaccccccaagaccatgtggtattgtgccagcaaag

SEQ ID NO: 314863 - DNA, 60 bp, Artificial
  Synthetic oligonucleotide
acggccctgaactgcaatgacagccttaacaccggctggatagcagggctcttctatcac

SEQ ID NO: 314864 - DNA, 56 bp, Artificial
  Synthetic oligonucleotide
acggccgatttgacccaggagccatgaactacacgaaattgatactgagtgagagg

SEQ ID NO: 314865 - DNA, 52 bp, Artificial
  Synthetic oligonucleotide
acggccgccatgtaccgccgccaggcagccaacgtctgaggggataggagac

SEQ ID NO: 314866 - DNA, 56 bp, Artificial
  Synthetic oligonucleotide
acggccgcccatactactccccaggactcaactgcgggtacgttggatatcggtca

SEQ ID NO: 314867 - DNA, 60 bp, Artificial
  Synthetic oligonucleotide
acggccggaaaatcagacaagatctgcattgggtatcatgccaacaattcaacaacacaa

SEQ ID NO: 314868 - DNA, 52 bp, Artificial
  Synthetic oligonucleotide
acggccggactacaaccccccgttgctggagacgtggaagaagccggattac

SEQ ID NO: 314869 - DNA, 50 bp, Artificial
  Synthetic oligonucleotide
acggccggtctatgatcgataaacgcgataaagctgtgttagacggccgt

SEQ ID NO: 314870 - DNA, 54 bp, Artificial
  Synthetic oligonucleotide
acggcctaccactccgacggagtggtagttggcttttggcgcgacccgtcaagc

SEQ ID NO: 314871 - DNA, 55 bp, Artificial
  Synthetic oligonucleotide
acggcctccctcaagccaccccaggggctcgtcagaaagcccacggaagcagaac

SEQ ID NO: 314872 - DNA, 57 bp, Artificial
  Synthetic oligonucleotide
acggcctccgcttggcaattggttcggctgtacatggatgaatagcactgggtacac

SEQ ID NO: 314873 - DNA, 53 bp, Artificial
  Synthetic oligonucleotide
acggcctgcgtttccggccgctcttcctgtgtgggcccgtccggactacaacc

SEQ ID NO: 314874 - DNA, 57 bp, Artificial
  Synthetic oligonucleotide
acggcgaaaagatgaatcaagggcaatatgacgctatggtgtctttagcctttaacg

SEQ ID NO: 314875 - DNA, 52 bp, Artificial
  Synthetic oligonucleotide
acggcgacatgaaaaagtcaatgttcggaagcaaaatgcgagtcagcaaggt

SEQ ID NO: 314876 - DNA, 60 bp, Artificial
  Synthetic oligonucleotide
acggcgactttgtgcaatgataaatgtcaagattgcaaagtggaacgacagaacattgtc

SEQ ID NO: 314877 - DNA, 60 bp, Artificial
  Synthetic oligonucleotide
acggcgattagctgacagctcattgtcaggtccaaacgctgatagcatcaattgacgact

SEQ ID NO: 314878 - DNA, 52 bp, Artificial
  Synthetic oligonucleotide
acggcgcccctgggtcgagtcctgggggcgcccttctatgcccgaaggaggg

SEQ ID NO: 314879 - DNA, 55 bp, Artificial
  Synthetic oligonucleotide
acggcgccttactttgtggtcttggaccacattcgaaaaccaatcgagctccgac

SEQ ID NO: 314880 - DNA, 59 bp, Artificial
  Synthetic oligonucleotide
acggcgctaatccgtgaggggaataccgagctactgaaggcagcgatagactacaggaa

SEQ ID NO: 314881 - DNA, 57 bp, Artificial
  Synthetic oligonucleotide
acggcgctggcacgatagaaaagtcgcttgcgtttgtctacacgcagctcgtcaacg

SEQ ID NO: 314882 - DNA, 51 bp, Artificial
  Synthetic oligonucleotide
acggcggattccggtaacgcggcagtaacgaaccaagcgggacaagttacc

SEQ ID NO: 314883 - DNA, 59 bp, Artificial
  Synthetic oligonucleotide
acggcgggaggacgatttactaacctaactcagaatatggcgcgtcagctggatattgc

SEQ ID NO: 314884 - DNA, 55 bp, Artificial
  Synthetic oligonucleotide
acggcggtggccgcaaacgctgtcaatcgtaaagttggtaatcaagttaatcgcg

SEQ ID NO: 314885 - DNA, 60 bp, Artificial
  Synthetic oligonucleotide
acggcgtcatcttgcagagttgtcgccccatccgtggtacaccatcttgcttgcttaaac

SEQ ID NO: 314886 - DNA, 56 bp, Artificial
  Synthetic oligonucleotide
acggcgtctatgacaatataagtaaaaacgccatattagtttattattgttggatg

SEQ ID NO: 314887 - DNA, 57 bp, Artificial
  Synthetic oligonucleotide
acggcgtttgtacaaattaacgacgttgtctgcatgttcgaattttgaattcatgtc

SEQ ID NO: 314888 - DNA, 58 bp, Artificial
  Synthetic oligonucleotide
acggcgttttccacggagatatgaggaatatcgatccttacttcaatgagtatcaagt

SEQ ID NO: 314889 - DNA, 56 bp, Artificial
  Synthetic oligonucleotide
acggctacatggttccaatattatactgaagaccaaggccattttccccttcaaca

SEQ ID NO: 314890 - DNA, 58 bp, Artificial
  Synthetic oligonucleotide
acggctactattgctcgcgctacctccacggctaacacgtcgggaatggtagatactg

SEQ ID NO: 314891 - DNA, 60 bp, Artificial
  Synthetic oligonucleotide
acggctagtcaggattccactaatgaggtgaacactgagaatgctcaaaacagtgctggt

SEQ ID NO: 314892 - DNA, 60 bp, Artificial
  Synthetic oligonucleotide
acggctatacttcaagcagcactgttcattgtaactatgataatcgtaggtttggcattg

SEQ ID NO: 314893 - DNA, 55 bp, Artificial
  Synthetic oligonucleotide
acggctcaagccgaccctacgtgggcctacacccctactctacagactgggtagc

SEQ ID NO: 314894 - DNA, 60 bp, Artificial
  Synthetic oligonucleotide
acggctcagatttcggctctctgacgccccttatcgcatcacggctcaggacaacatact

SEQ ID NO: 314895 - DNA, 60 bp, Artificial
  Synthetic oligonucleotide
acggctccgcttctgcgcgtgcaaggtctggcatcgctcgtagtcatcaaattgttatgg

SEQ ID NO: 314896 - DNA, 53 bp, Artificial
  Synthetic oligonucleotide
acggctcggggggatacagtcccggaaacctagacataggaagccaaaccata

SEQ ID NO: 314897 - DNA, 55 bp, Artificial
  Synthetic oligonucleotide
acggctctctccaaaccgcctgtcaaccctagagagtttttgaaatctatagacc

SEQ ID NO: 314898 - DNA, 58 bp, Artificial
  Synthetic oligonucleotide
acggctggctatgtcctatcatagctgggggccccggagtgcgaaaccctcttatata

SEQ ID NO: 314899 - DNA, 60 bp, Artificial
  Synthetic oligonucleotide
acggctgtagtaacgaataggcaagcgtcaatcgcgcaagttgtctatgtgagatgcatc

SEQ ID NO: 314900 - DNA, 50 bp, Artificial
  Synthetic oligonucleotide
acggctgtgagtactggacgcctatacgtgtcgtacactgtacagctaat

SEQ ID NO: 314901 - DNA, 60 bp, Artificial
  Synthetic oligonucleotide
acggctgtgagtactggacgcctatacgtgtcgtatactattcaactgatagagcccact

SEQ ID NO: 314902 - DNA, 56 bp, Artificial
  Synthetic oligonucleotide
acggcttaagtgagggcgagactgcaaaggtatttagtaagaccgctaccaatgga

SEQ ID NO: 314903 - DNA, 52 bp, Artificial
  Synthetic oligonucleotide
acggcttaccgtcgtccagaatcactctccactcaggtcgatacgtctctac

SEQ ID NO: 314904 - DNA, 56 bp, Artificial
  Synthetic oligonucleotide
acggctttaatatcagctgtacaggaactaggacttaaaatgtacgatgtactaaa

SEQ ID NO: 314905 - DNA, 60 bp, Artificial
  Synthetic oligonucleotide
acggctttagagacaagacaattggacgctgaccagacactgacctccttgtctgacgcg

SEQ ID NO: 314906 - DNA, 55 bp, Artificial
  Synthetic oligonucleotide
acggctttcctgatatttcgttcgtgccctttaacggccctggcattccagccgc

SEQ ID NO: 314907 - DNA, 50 bp, Artificial
  Synthetic oligonucleotide
acgggaaaaagttatagttaggtttcggcgttaccttgtagtctggatat

SEQ ID NO: 314908 - DNA, 60 bp, Artificial
  Synthetic oligonucleotide
acgggaaaacatccagtgatgggtccttgtcatgctcttgttgcgttgtcacgccacaag

SEQ ID NO: 314909 - DNA, 58 bp, Artificial
  Synthetic oligonucleotide
acgggaaagattacgccgagagagtatgcgagattaatattccttgagtatcccaagc

SEQ ID NO: 314910 - DNA, 55 bp, Artificial
  Synthetic oligonucleotide
acgggaaagcatggttgcacgtctgtgttactggggatgatagaaatgcgactgc

SEQ ID NO: 314911 - DNA, 57 bp, Artificial
  Synthetic oligonucleotide
acgggaaagcgccaataagtcttggcgattgctcctttgctgggtggattcttggga

SEQ ID NO: 314912 - DNA, 55 bp, Artificial
  Synthetic oligonucleotide
acgggaaatgcgcccgtctttacaatcaactccgcgtgcagctacgggcctatct

SEQ ID NO: 314913 - DNA, 52 bp, Artificial
  Synthetic oligonucleotide
acgggaacaatccacctagaccagaagacgagcggccgggaaaagacgggaa

SEQ ID NO: 314914 - DNA, 53 bp, Artificial
  Synthetic oligonucleotide
acgggaacaccctcctgtgacagccctcttcagggggattaggggtctgtccc

SEQ ID NO: 314915 - DNA, 52 bp, Artificial
  Synthetic oligonucleotide
acgggaacacctacgtgtcaggggggtcgcaggcccacactgtccgcgggtt

SEQ ID NO: 314916 - DNA, 55 bp, Artificial
  Synthetic oligonucleotide
acgggaaccacggccttagttaaaacccaacaatttgagcagctccaggcagcca

SEQ ID NO: 314917 - DNA, 53 bp, Artificial
  Synthetic oligonucleotide
acgggaacgtaacgttttagaatctggcgttgcaccggaagtattggctgcgg

SEQ ID NO: 314918 - DNA, 53 bp, Artificial
  Synthetic oligonucleotide
acgggaactgctggttcccccttatgtccagtccctctcccgtcctggtgaag

SEQ ID NO: 314919 - DNA, 57 bp, Artificial
  Synthetic oligonucleotide
acgggaagacagttgcgctctgttgcgcgactggagtgttcgggacggcttacctcg

SEQ ID NO: 314920 - DNA, 55 bp, Artificial
  Synthetic oligonucleotide
acgggaagctgttgaacgttctccggtgagaatgtctgaggaaaatcctagtgtt

SEQ ID NO: 314921 - DNA, 59 bp, Artificial
  Synthetic oligonucleotide
acgggacaatagtgaagacaattacggatgaccaaattgaagtgaccaatgccactgaa

SEQ ID NO: 314922 - DNA, 55 bp, Artificial
  Synthetic oligonucleotide
acgggacacaacccacgcggcgtggtgaccttgctgttcttgcacagcgggtaag

SEQ ID NO: 314923 - DNA, 60 bp, Artificial
  Synthetic oligonucleotide
acgggacatatgaccatgatatttacagagacgaagcaatcaacaatagattccagatac

SEQ ID NO: 314924 - DNA, 55 bp, Artificial
  Synthetic oligonucleotide
acgggaccagtgggcagccgaagcgcacgccatctgaccaggccagcaaacacgc

SEQ ID NO: 314925 - DNA, 57 bp, Artificial
  Synthetic oligonucleotide
acgggaccatgagaattgtaggcccaaagatgtgctctaacacctggcacggaactt

SEQ ID NO: 314926 - DNA, 52 bp, Artificial
  Synthetic oligonucleotide
acgggacggatgggttggaaccaatcgacattaacaccagtgccggttaccc

SEQ ID NO: 314927 - DNA, 51 bp, Artificial
  Synthetic oligonucleotide
acgggacggttattcgcacggagccacggttcccgcttgagacggtggtta

SEQ ID NO: 314928 - DNA, 55 bp, Artificial
  Synthetic oligonucleotide
acgggactggtcagtatctggtatcaaacaaattacgtggtcccaataggggcac

SEQ ID NO: 314929 - DNA, 53 bp, Artificial
  Synthetic oligonucleotide
acgggagacttactcgcactccacaacctaccaaaggatcctttggacgtctt

SEQ ID NO: 314930 - DNA, 60 bp, Artificial
  Synthetic oligonucleotide
acgggagctcaccactgctcgctgcgtcgagagtgttcgagtctctccaggcttggtaag

SEQ ID NO: 314931 - DNA, 55 bp, Artificial
  Synthetic oligonucleotide
acgggaggaagtgtcattcagagtaggactccacgagtacccggtggggtcgcaa

SEQ ID NO: 314932 - DNA, 58 bp, Artificial
  Synthetic oligonucleotide
acgggataagcaatgatctaccaccagctaactggcaaaggcgcaaggttgtagaagg

SEQ ID NO: 314933 - DNA, 56 bp, Artificial
  Synthetic oligonucleotide
acgggatcgagtaggttcttcccggatttagcacgatgggtgcatatattagcgat

SEQ ID NO: 314934 - DNA, 54 bp, Artificial
  Synthetic oligonucleotide
acgggatgcagattacctcgtcggagcacctgactggtcgcttcaatgaccacc

SEQ ID NO: 314935 - DNA, 50 bp, Artificial
  Synthetic oligonucleotide
acgggatgcaggaggaagctatacaagagatcgctggaatgacagcggac

SEQ ID NO: 314936 - DNA, 55 bp, Artificial
  Synthetic oligonucleotide
acgggatgctcaggatggtttctagtagaggctatagtggagaacacaaccgggc

SEQ ID NO: 314937 - DNA, 60 bp, Artificial
  Synthetic oligonucleotide
acgggattcgaaagccaaagcatctatatgtgtccttgcccaatgcccaatcaagcatga

SEQ ID NO: 314938 - DNA, 60 bp, Artificial
  Synthetic oligonucleotide
acgggcaatctgcaaacattgaaactaaaggtgcatgagggatatgaagagttcacaata

SEQ ID NO: 314939 - DNA, 60 bp, Artificial
  Synthetic oligonucleotide
acgggcaatcttcaaacattgaagataagggtgcatgagggatatgaggagttcacaatg

SEQ ID NO: 314940 - DNA, 51 bp, Artificial
  Synthetic oligonucleotide
acgggcagaaagaccagtcacggtcgatctaccgcaccgacaacaaccgag

SEQ ID NO: 314941 - DNA, 55 bp, Artificial
  Synthetic oligonucleotide
acgggccaccaatgtggatctccccaacaccggcttctcattggcccttggagtc

SEQ ID NO: 314942 - DNA, 54 bp, Artificial
  Synthetic oligonucleotide
acgggccctgatgccaatgcagtagcagtggtgcattacgggggaattcccact

SEQ ID NO: 314943 - DNA, 52 bp, Artificial
  Synthetic oligonucleotide
acgggccggaaagccctagaaggagacaacaaacccgtgaagacaccgaatc

SEQ ID NO: 314944 - DNA, 51 bp, Artificial
  Synthetic oligonucleotide
acgggccgttttgggccaagctcgaggcaaccccttacctcaagacgttcc

SEQ ID NO: 314945 - DNA, 55 bp, Artificial
  Synthetic oligonucleotide
acgggcctgcctaccgaaaggaaaagcagtatccaacacagcaatgtgttggggg

SEQ ID NO: 314946 - DNA, 51 bp, Artificial
  Synthetic oligonucleotide
acgggcgaggtgtcttgcgtttgcaggtacacgtgcaccgtctgagtcacc

SEQ ID NO: 314947 - DNA, 53 bp, Artificial
  Synthetic oligonucleotide
acgggcgcaaccctcagaaaaacgggcaggctcgaagacgaaaatttgggcaa

SEQ ID NO: 314948 - DNA, 55 bp, Artificial
  Synthetic oligonucleotide
acgggcgctatcgccgacatcccggccgtacatggtccgggctggcatctggcgg

SEQ ID NO: 314949 - DNA, 54 bp, Artificial
  Synthetic oligonucleotide
acgggcgggatggtagaaaagagcgagcctcccgattacgagattcccctgaac

SEQ ID NO: 314950 - DNA, 55 bp, Artificial
  Synthetic oligonucleotide
acgggcgttcacctaccaatatgctgttatttggtactccggctaaactgcttaa

SEQ ID NO: 314951 - DNA, 60 bp, Artificial
  Synthetic oligonucleotide
acgggctaagtatactcagatagtcaacgatcatttatcactatggcatcttcacaacct

SEQ ID NO: 314952 - DNA, 52 bp, Artificial
  Synthetic oligonucleotide
acgggctgggacttccatttggttcgttgccatcctatgcaacatgcaacgt

SEQ ID NO: 314953 - DNA, 57 bp, Artificial
  Synthetic oligonucleotide
acgggcttaacgccagaggaatacttatttctctggccttaagaccatcaatattgc

SEQ ID NO: 314954 - DNA, 55 bp, Artificial
  Synthetic oligonucleotide
acgggcttaggaacataaccgtaccagctactcaaggtctacccactatgctaac

SEQ ID NO: 314955 - DNA, 58 bp, Artificial
  Synthetic oligonucleotide
acgggctttctgcgctctgtgacttgatacgtaacgaggaggtggagtggcggttcac

SEQ ID NO: 314956 - DNA, 58 bp, Artificial
  Synthetic oligonucleotide
acggggactgtgggctaccgttgtatgactctagtgggaagattgtcgccatacacac

SEQ ID NO: 314957 - DNA, 59 bp, Artificial
  Synthetic oligonucleotide
acggggagaacccgaagatcgaaacaaacaaatttgcagcgatatgcacacacatggag

SEQ ID NO: 314958 - DNA, 51 bp, Artificial
  Synthetic oligonucleotide
acggggaggaatccaccccgagaggggttacctggcaaagagcgaggaaag

SEQ ID NO: 314959 - DNA, 57 bp, Artificial
  Synthetic oligonucleotide
acggggaggatgtcgtcgtcttggacgatttctatgggtggctaccgtattgcgaga

SEQ ID NO: 314960 - DNA, 51 bp, Artificial
  Synthetic oligonucleotide
acggggaggttaaagtgtgtagccccaacggttactcgttcaggatcctac

SEQ ID NO: 314961 - DNA, 53 bp, Artificial
  Synthetic oligonucleotide
acggggatgggaaggccttaaatatctggggaatcttctgttatattggagcc

SEQ ID NO: 314962 - DNA, 56 bp, Artificial
  Synthetic oligonucleotide
acggggcaaaagacgtccgttgccatgccaggaaggccgtagcccacatcaactcc

SEQ ID NO: 314963 - DNA, 60 bp, Artificial
  Synthetic oligonucleotide
acggggcagtcgaattactaggttgagcacacacacgtgaatcacacaacataacagtgt

SEQ ID NO: 314964 - DNA, 58 bp, Artificial
  Synthetic oligonucleotide
acggggcatggggttcagagacaggattttcactaaattgtaaagtctcattgcttga

SEQ ID NO: 314965 - DNA, 58 bp, Artificial
  Synthetic oligonucleotide
acggggctactacagacgctaccgacgcaggagacgctacaagagacgcttactaata

SEQ ID NO: 314966 - DNA, 53 bp, Artificial
  Synthetic oligonucleotide
acggggctagccgacgggtgttccacctcccgagaggggacgagtgaggctta

SEQ ID NO: 314967 - DNA, 59 bp, Artificial
  Synthetic oligonucleotide
acggggcttctgtcatatgccatgcccgtacatctgaaggatgacgtcgggttacgcct

SEQ ID NO: 314968 - DNA, 55 bp, Artificial
  Synthetic oligonucleotide
acgggggacggtacaccctaccgcatcaactgcggatgagggacgtggcgccctc

SEQ ID NO: 314969 - DNA, 58 bp, Artificial
  Synthetic oligonucleotide
acgggggatataaattggaagcaagttgcgagaaaagctactagtcgagcgaatatca

SEQ ID NO: 314970 - DNA, 57 bp, Artificial
  Synthetic oligonucleotide
acggggggcccatgtcttagacgttgagaatccgtgccgctattacgaaatcaatga

SEQ ID NO: 314971 - DNA, 51 bp, Artificial
  Synthetic oligonucleotide
acggggggggcgcaggcccgtagcacctacggtttcacgtccctctttaca

SEQ ID NO: 314972 - DNA, 52 bp, Artificial
  Synthetic oligonucleotide
acggggggtacggcagcccataccacccacgggtttgcgggcctcttcacgc

SEQ ID NO: 314973 - DNA, 56 bp, Artificial
  Synthetic oligonucleotide
acggggggtaggaagatactaggtgtatctaatcctgataccatagaactcgtgga

SEQ ID NO: 314974 - DNA, 54 bp, Artificial
  Synthetic oligonucleotide
acggggggtattgcttatgcgacggggaaaatgagacccgacgagcaacagtac

SEQ ID NO: 314975 - DNA, 50 bp, Artificial
  Synthetic oligonucleotide
acgggggtaactgcttcttttatccgtaacatgttttttttggctaattg

SEQ ID NO: 314976 - DNA, 51 bp, Artificial
  Synthetic oligonucleotide
acggggtaatcctcgaaccagtacccgtggccctcgtgttctcgggtatcc

SEQ ID NO: 314977 - DNA, 56 bp, Artificial
  Synthetic oligonucleotide
acggggtacaatatatactagaaccctcaatagaactttcaatcgtgttcgcacac

SEQ ID NO: 314978 - DNA, 56 bp, Artificial
  Synthetic oligonucleotide
acggggtaggaagcactactggatgttcggggcagttctatcgagctaatcttagg

SEQ ID NO: 314979 - DNA, 53 bp, Artificial
  Synthetic oligonucleotide
acggggtcaacctcagttatgtgatccaacagaccttgaatggtggtgttaac

SEQ ID NO: 314980 - DNA, 56 bp, Artificial
  Synthetic oligonucleotide
acggggtcatttggtggcccctcaatgtcaatccatgttgtatcattgataagcag

SEQ ID NO: 314981 - DNA, 58 bp, Artificial
  Synthetic oligonucleotide
acggggtgaatcaatagtcgtagagtctggcgacccgaatgcactattgaaacaccga

SEQ ID NO: 314982 - DNA, 51 bp, Artificial
  Synthetic oligonucleotide
acggggtgtatgggtacaacgcgttaaacaacatgggcaaattgtacgcac

SEQ ID NO: 314983 - DNA, 60 bp, Artificial
  Synthetic oligonucleotide
acggggtgtgcactcgaactctactctctaccctgcgtgtgagtgtgcagaattcacacc

SEQ ID NO: 314984 - DNA, 54 bp, Artificial
  Synthetic oligonucleotide
acggggtgtgtcacaccacttgtacctgtggggccgtaattgctggacacgtca

SEQ ID NO: 314985 - DNA, 55 bp, Artificial
  Synthetic oligonucleotide
acggggttaacgccatcacgatatgatattaatgtatcgggagacgaaagggtac

SEQ ID NO: 314986 - DNA, 53 bp, Artificial
  Synthetic oligonucleotide
acgggtaaaggaagctagcttccttttcctcgatgccttgggctttacgaaga

SEQ ID NO: 314987 - DNA, 60 bp, Artificial
  Synthetic oligonucleotide
acgggtaagtcacttgccacaggcatcattgctagggccattgctgataaataccactct

SEQ ID NO: 314988 - DNA, 56 bp, Artificial
  Synthetic oligonucleotide
acgggtaccatactttgtgagggcccacgccctgctacgagtgtgtaccctggtga

SEQ ID NO: 314989 - DNA, 50 bp, Artificial
  Synthetic oligonucleotide
acgggtagtgggtcgaaaagactagggacgactaaagaagtgttaacggc

SEQ ID NO: 314990 - DNA, 55 bp, Artificial
  Synthetic oligonucleotide
acgggtatgcatatacctatacaaattatgccgttgacactacgttaagtgttag

SEQ ID NO: 314991 - DNA, 55 bp, Artificial
  Synthetic oligonucleotide
acgggtattacgtgggttatgagttttgatgcttataatcgtataaccagtagta

SEQ ID NO: 314992 - DNA, 55 bp, Artificial
  Synthetic oligonucleotide
acgggtattccctcccaattcattcctgatccttttgtaaaccttgagactatgc

SEQ ID NO: 314993 - DNA, 56 bp, Artificial
  Synthetic oligonucleotide
acgggtcaagtgctaacacggtagcagacttaacggcaaaactagcgcgttctgac

SEQ ID NO: 314994 - DNA, 56 bp, Artificial
  Synthetic oligonucleotide
acgggtcaccatattcttgggaacaagagctacatcaagggaggttggttagccaa

SEQ ID NO: 314995 - DNA, 55 bp, Artificial
  Synthetic oligonucleotide
acgggtcagccggttgggtcaacgtgctaccttgcgtacacgtagtggcaaacgc

SEQ ID NO: 314996 - DNA, 60 bp, Artificial
  Synthetic oligonucleotide
acgggtcatcgcgctgcctactcttgtacagaatggtaagcacgtgtaataggaggtaca

SEQ ID NO: 314997 - DNA, 58 bp, Artificial
  Synthetic oligonucleotide
acgggtcatgtttcaccataatgaccgatggcccgagtaatggggcagcctcgtacaa

SEQ ID NO: 314998 - DNA, 53 bp, Artificial
  Synthetic oligonucleotide
acgggtcgaggttacaacgggtggggggtagttgatgttcagagagtccagcc

SEQ ID NO: 314999 - DNA, 57 bp, Artificial
  Synthetic oligonucleotide
acgggtcgcacctctctttacgcggactccccgcctgtgccttctcatctgccggcc

SEQ ID NO: 315000 - DNA, 55 bp, Artificial
  Synthetic oligonucleotide
acgggtcggtggatgcgtcctgtgcctgagggagttgtttattccgtcggtttca

SEQ ID NO: 315001 - DNA, 55 bp, Artificial
  Synthetic oligonucleotide
acgggtctccccgccctcatagatgaggccaccctccccgcctggagccaaggcg

SEQ ID NO: 315002 - DNA, 51 bp, Artificial
  Synthetic oligonucleotide
acgggtctcggttgcgctcgcgtctccagcgttcaatgcactcagcgtgaa

SEQ ID NO: 315003 - DNA, 57 bp, Artificial
  Synthetic oligonucleotide
acgggtcttcagtccaatacttagcgggcactttggccttgaccgcagcgttcacca

SEQ ID NO: 315004 - DNA, 58 bp, Artificial
  Synthetic oligonucleotide
acgggtgctcctcccatcaattacgtgatcgagtacgttgactccacgtccgagactg

SEQ ID NO: 315005 - DNA, 56 bp, Artificial
  Synthetic oligonucleotide
acgggtggactgactatttggccacaggagacgtgttgcttaaacacttaacgcgc

SEQ ID NO: 315006 - DNA, 55 bp, Artificial
  Synthetic oligonucleotide
acgggtggccaagagccgggcattcgcccacgcctatacgcccaagaaacaggct

SEQ ID NO: 315007 - DNA, 54 bp, Artificial
  Synthetic oligonucleotide
acgggtgggatctgaagggtgacggctctctgcgggatggtaaggagtatgtct

SEQ ID NO: 315008 - DNA, 53 bp, Artificial
  Synthetic oligonucleotide
acgggtggtacgcgattgatgacgaggacttttacccctggacgccggatccg

SEQ ID NO: 315009 - DNA, 53 bp, Artificial
  Synthetic oligonucleotide
acgggttaggggtggtagggactccatcatcttacttacctgcttgttacacc

SEQ ID NO: 315010 - DNA, 58 bp, Artificial
  Synthetic oligonucleotide
acgggttattatcctgtagatggttccaattatcgaaacctagctctcacaggcacta

SEQ ID NO: 315011 - DNA, 57 bp, Artificial
  Synthetic oligonucleotide
acgggttcagagtcaatagcgtttgcaggggatgatatgtgtgctaacagaaggttg

SEQ ID NO: 315012 - DNA, 54 bp, Artificial
  Synthetic oligonucleotide
acgggttcctctgggctcgacgggactacccgctatcttcaaatgaccaacgta

SEQ ID NO: 315013 - DNA, 60 bp, Artificial
  Synthetic oligonucleotide
acgggttgaggacggctatactgaacagaactacactgccgaatatgctgccacccatct

SEQ ID NO: 315014 - DNA, 59 bp, Artificial
  Synthetic oligonucleotide
acgggttggcagacatggtatccggggggcagtgaccactcgtagtggcgtgcagcttg

SEQ ID NO: 315015 - DNA, 55 bp, Artificial
  Synthetic oligonucleotide
acgggtttgttggtgtgttattacacgtaaggcaatctcgtactgggacttcatg

SEQ ID NO: 315016 - DNA, 52 bp, Artificial
  Synthetic oligonucleotide
acgggttttacgacgatccgaattgcggttacagacataagttttcttcgct

SEQ ID NO: 315017 - DNA, 55 bp, Artificial
  Synthetic oligonucleotide
acggtaaagacatggtctgctcgagctcacttatagctcacaaacgttttgaggt

SEQ ID NO: 315018 - DNA, 59 bp, Artificial
  Synthetic oligonucleotide
acggtaaagatattgcaagcatagttgtagatgttggtaaattaagtggagcaattgga

SEQ ID NO: 315019 - DNA, 52 bp, Artificial
  Synthetic oligonucleotide
acggtaacatcgattaacatacacgttaatcgacaaaacaggaaacaagtcg

SEQ ID NO: 315020 - DNA, 55 bp, Artificial
  Synthetic oligonucleotide
acggtaactcaactttactaatcggtaggacaaagatcggaccattgatattgaa

SEQ ID NO: 315021 - DNA, 52 bp, Artificial
  Synthetic oligonucleotide
acggtaactgaagataccgaaagactgtttatcacgtcatttacagcagaag

SEQ ID NO: 315022 - DNA, 55 bp, Artificial
  Synthetic oligonucleotide
acggtaagtaccacctctgcaggggccggactggttgcgctggcatctgccacac

SEQ ID NO: 315023 - DNA, 60 bp, Artificial
  Synthetic oligonucleotide
acggtaatctagagtgcgagtgcatatattgttgggagcatgacgctcagtgtcaggcca

SEQ ID NO: 315024 - DNA, 55 bp, Artificial
  Synthetic oligonucleotide
acggtaatgtcaaactggcatccaacaagccctttccaacaaggaacgaacttga

SEQ ID NO: 315025 - DNA, 60 bp, Artificial
  Synthetic oligonucleotide
acggtaccctcgatttaccacagagccccacagatgcccatatgaccttgatcacaattc

SEQ ID NO: 315026 - DNA, 56 bp, Artificial
  Synthetic oligonucleotide
acggtacctgcagagatccggtttgtattactcgcgtatatctagagggagcgttt

SEQ ID NO: 315027 - DNA, 55 bp, Artificial
  Synthetic oligonucleotide
acggtaccttccctatcaatgggtacaccactggtcctagcacgccagccccctc

SEQ ID NO: 315028 - DNA, 59 bp, Artificial
  Synthetic oligonucleotide
acggtacgatgcaagatacatacgcaagatgagggcccggtttcagcccgataatatct

SEQ ID NO: 315029 - DNA, 54 bp, Artificial
  Synthetic oligonucleotide
acggtacgccactttactccgatcttaagagcccaacgaagaggcacctggtcg

SEQ ID NO: 315030 - DNA, 54 bp, Artificial
  Synthetic oligonucleotide
acggtacggagaggacgtgtcgtataactcgtactcggtgtccgctgtatgctg

SEQ ID NO: 315031 - DNA, 60 bp, Artificial
  Synthetic oligonucleotide
acggtactcagatgcacacgcggaggatgataagatctaagacggtgcaccccatttatt

SEQ ID NO: 315032 - DNA, 60 bp, Artificial
  Synthetic oligonucleotide
acggtactgcatccaaggccgcatcagacctggcggaaacggttacgagccatatcgcat

SEQ ID NO: 315033 - DNA, 55 bp, Artificial
  Synthetic oligonucleotide
acggtagaagcttcgcaagacgccacgggcattcctcgttctaccatgtgcggag

SEQ ID NO: 315034 - DNA, 57 bp, Artificial
  Synthetic oligonucleotide
acggtagagaacacggagaggcatacgaccgaggacgttaatcggaacatgcacaac

SEQ ID NO: 315035 - DNA, 56 bp, Artificial
  Synthetic oligonucleotide
acggtaggaatgtgggataaataggctctctgctggtcgaaagagggttttgcgaa

SEQ ID NO: 315036 - DNA, 55 bp, Artificial
  Synthetic oligonucleotide
acggtagtgaaaagggcctaaagtctgacttggcagagcaccccacctatgtgcg

SEQ ID NO: 315037 - DNA, 55 bp, Artificial
  Synthetic oligonucleotide
acggtatacgttggcttagtcacgctagtgactcccatgttgcaccattggatta

SEQ ID NO: 315038 - DNA, 60 bp, Artificial
  Synthetic oligonucleotide
acggtatcactcatcgtgtaggcaagcgtttctgcgtcaagtctgcatacgttctgggta

SEQ ID NO: 315039 - DNA, 55 bp, Artificial
  Synthetic oligonucleotide
acggtatggaaccagggcgtgtggggtcaggtggattttgagcagatgccgccgc

SEQ ID NO: 315040 - DNA, 50 bp, Artificial
  Synthetic oligonucleotide
acggtatggtgtacaacccacctaggaccaactaccccgggcggtttaca

SEQ ID NO: 315041 - DNA, 47 bp, Artificial
  Synthetic oligonucleotide
acggtatttccgtcggttctaacgttttccttaaaacgtaatcgtcg

SEQ ID NO: 315042 - DNA, 52 bp, Artificial
  Synthetic oligonucleotide
acggtcacaaccccggttttgagggggctcgtttgctaggaatttctgggca

SEQ ID NO: 315043 - DNA, 59 bp, Artificial
  Synthetic oligonucleotide
acggtcacctgacgcgcgctggccaaaattccactcgcatgatgcctttagacggttta

SEQ ID NO: 315044 - DNA, 57 bp, Artificial
  Synthetic oligonucleotide
acggtcagccaaaactaccctatagtgcaaaacatccaggggcaaatggtacatcag

SEQ ID NO: 315045 - DNA, 58 bp, Artificial
  Synthetic oligonucleotide
acggtcaggaatagacactagcgcctattacgttatgtcagttggtgcgaagtccttc

SEQ ID NO: 315046 - DNA, 57 bp, Artificial
  Synthetic oligonucleotide
acggtcattaattcacagctttttactatagggtttgatatatcttagcataacaat

SEQ ID NO: 315047 - DNA, 56 bp, Artificial
  Synthetic oligonucleotide
acggtcattttgaggacgtggagttgggttgcccaacttctgggatgttggctcaa

SEQ ID NO: 315048 - DNA, 58 bp, Artificial
  Synthetic oligonucleotide
acggtccaaaagatcgttgactggctcatgtcgtggttcaaacaagaagagacacacc

SEQ ID NO: 315049 - DNA, 52 bp, Artificial
  Synthetic oligonucleotide
acggtccagattaattccttagcgacgaagaaaggaatcttaaaggggacca

SEQ ID NO: 315050 - DNA, 55 bp, Artificial
  Synthetic oligonucleotide
acggtcccacggttggctagagcttgggaatagtattggcccagcgttggtcatg

SEQ ID NO: 315051 - DNA, 60 bp, Artificial
  Synthetic oligonucleotide
acggtccctaaactagattgcaatccaatcgaggctacagtcatagatcgattggctttc

SEQ ID NO: 315052 - DNA, 60 bp, Artificial
  Synthetic oligonucleotide
acggtccgctagctctcgaagactctacacctgacatagcgttcacacgaacacaactat

SEQ ID NO: 315053 - DNA, 60 bp, Artificial
  Synthetic oligonucleotide
acggtcgacaggcggctcagtgcaccaactgagtcatgaccaagcacttctgttaccccg

SEQ ID NO: 315054 - DNA, 55 bp, Artificial
  Synthetic oligonucleotide
acggtcggcgttccgcagcctggtctatgcgctacgcggtcagcagaagccgctg

SEQ ID NO: 315055 - DNA, 55 bp, Artificial
  Synthetic oligonucleotide
acggtcgtttggcaagtttgtacacgacaccgctggaatgcgaatgtgacgcggg

SEQ ID NO: 315056 - DNA, 52 bp, Artificial
  Synthetic oligonucleotide
acggtctaccatggtgctggggcgaagacgttggccggcccgaaagggcccg

SEQ ID NO: 315057 - DNA, 60 bp, Artificial
  Synthetic oligonucleotide
acggtctaccgagaggtttgatgcttgaaagtcacaccaatgttgagatagctgaatatc

SEQ ID NO: 315058 - DNA, 57 bp, Artificial
  Synthetic oligonucleotide
acggtctaccgcccgaaataatcgtttgccgcatcgcgacagtctgatacgcttgct

SEQ ID NO: 315059 - DNA, 59 bp, Artificial
  Synthetic oligonucleotide
acggtctacgcctgctcgctcccgatgtttcgtctgaggcgctttccaaatatctagat

SEQ ID NO: 315060 - DNA, 55 bp, Artificial
  Synthetic oligonucleotide
acggtctagagcactcagcatgtctggagctatgaagcgtaagcgttcggatgag

SEQ ID NO: 315061 - DNA, 54 bp, Artificial
  Synthetic oligonucleotide
acggtctagaggctttagatctgaccaccagtgcaggttacccctacgtggccc

SEQ ID NO: 315062 - DNA, 60 bp, Artificial
  Synthetic oligonucleotide
acggtctccattcagatggcggtcgaagccggttatgatacgtggaatgctgaaatcaac

SEQ ID NO: 315063 - DNA, 60 bp, Artificial
  Synthetic oligonucleotide
acggtctcggattcaagaatattgcagacagtcgttcagtacctaatgcaatcatggtgg

SEQ ID NO: 315064 - DNA, 58 bp, Artificial
  Synthetic oligonucleotide
acggtctctgcccgagaatgaggagtatgagaccgaccaaatactcccagacctagct

SEQ ID NO: 315065 - DNA, 55 bp, Artificial
  Synthetic oligonucleotide
acggtctctggccaggtttccttggtcccgtctggcttgacgcgtgcgtaggtcc

SEQ ID NO: 315066 - DNA, 54 bp, Artificial
  Synthetic oligonucleotide
acggtctctttgccgtgtacagcttctttgagcgcgactacgtggatgaaatcg

SEQ ID NO: 315067 - DNA, 60 bp, Artificial
  Synthetic oligonucleotide
acggtctgcactcattctgagagggtcagtggctcataagtcctgcttgcctgcttgtgt

SEQ ID NO: 315068 - DNA, 60 bp, Artificial
  Synthetic oligonucleotide
acggtctgcatacccttgtgctgcagagtactccctgggataactccgtagatgtacgga

SEQ ID NO: 315069 - DNA, 60 bp, Artificial
  Synthetic oligonucleotide
acggtgaagaacatgcatcgtgatcgttatcaagtcttacggaagtggcatgcgaccgtg

SEQ ID NO: 315070 - DNA, 49 bp, Artificial
  Synthetic oligonucleotide
acggtgaagaagcgggggaaacgttagtgaccccggtttactagtccat

SEQ ID NO: 315071 - DNA, 53 bp, Artificial
  Synthetic oligonucleotide
acggtgaagaatgatttgagggacagatatcaggtcatgaggaaatttcattc

SEQ ID NO: 315072 - DNA, 51 bp, Artificial
  Synthetic oligonucleotide
acggtgaatcatacagtgttccatgggatagctatgctcctgtacagaaga

SEQ ID NO: 315073 - DNA, 58 bp, Artificial
  Synthetic oligonucleotide
acggtgacaaggatagtttcgatccggagcataggcagcacggtattcactgtgtagc

SEQ ID NO: 315074 - DNA, 58 bp, Artificial
  Synthetic oligonucleotide
acggtgactaggccgaaacgtgtgtcagagcgcgaacactccaacctactctgacgtc

SEQ ID NO: 315075 - DNA, 50 bp, Artificial
  Synthetic oligonucleotide
acggtgagtattggtcttgatttatgcggcgaaaaatcgccgcatcttct

SEQ ID NO: 315076 - DNA, 60 bp, Artificial
  Synthetic oligonucleotide
acggtgatgtgattgccacatttaatgatgggcaaatagatgtgattccacctaattggg

SEQ ID NO: 315077 - DNA, 60 bp, Artificial
  Synthetic oligonucleotide
acggtgcaatgttggtatttgggatgaattacagtcctgaagtcttcgacagatgggcat

SEQ ID NO: 315078 - DNA, 60 bp, Artificial
  Synthetic oligonucleotide
acggtgcacgcggaccaggcattccaagcgaagcaggagatccgtgtcggtccaaacaca

SEQ ID NO: 315079 - DNA, 57 bp, Artificial
  Synthetic oligonucleotide
acggtggaatccgtaactctgtattagaggcttacatgcctaatgagagttcttcac

SEQ ID NO: 315080 - DNA, 52 bp, Artificial
  Synthetic oligonucleotide
acggtggataataactcccaaagtgtgtgtcaacctaacttccggtttaata

SEQ ID NO: 315081 - DNA, 55 bp, Artificial
  Synthetic oligonucleotide
acggtggatcctagtcttgattctcggttaacatgcatcaatgtacccgcaaatg

SEQ ID NO: 315082 - DNA, 52 bp, Artificial
  Synthetic oligonucleotide
acggtggccaatcgcaaggatccctggcccaacagaatcagaacactcggcg

SEQ ID NO: 315083 - DNA, 60 bp, Artificial
  Synthetic oligonucleotide
acggtggcgcctctgcgctaaatagcaacagctctggaggggaatcgctagtgtctacac

SEQ ID NO: 315084 - DNA, 53 bp, Artificial
  Synthetic oligonucleotide
acggtggcttcagttcgctaaagtgggagggtccgtggtcggattaccgtatg

SEQ ID NO: 315085 - DNA, 51 bp, Artificial
  Synthetic oligonucleotide
acggtgggagagtttgggggggttgccagcattgctcaggtatggtgagga

SEQ ID NO: 315086 - DNA, 55 bp, Artificial
  Synthetic oligonucleotide
acggtgggatcatcaccatcgtgtaatacgttgacggattgggtgaattatccgt

SEQ ID NO: 315087 - DNA, 58 bp, Artificial
  Synthetic oligonucleotide
acggtggttatggtgtgttaacggtgcgcaaaatcgtgcatccgaccgctctctcaac

SEQ ID NO: 315088 - DNA, 55 bp, Artificial
  Synthetic oligonucleotide
acggtgtaacactggaaatcgattgcttagtggactttggtacgaaagtggttgc

SEQ ID NO: 315089 - DNA, 51 bp, Artificial
  Synthetic oligonucleotide
acggtgtcacggtctgcatacccttgtgctgcagagtactccctgggataa

SEQ ID NO: 315090 - DNA, 51 bp, Artificial
  Synthetic oligonucleotide
acggtgtcagggtaatcgaagacggggtaaattatgcaacggggaatttac

SEQ ID NO: 315091 - DNA, 60 bp, Artificial
  Synthetic oligonucleotide
acggtgtctgtccataactgcatggagatacctgttaggaactttggagtctcaatgctg

SEQ ID NO: 315092 - DNA, 56 bp, Artificial
  Synthetic oligonucleotide
acggtgtgaaaggttttggattccggcagggaaatgatgtatggatggggcggaca

SEQ ID NO: 315093 - DNA, 58 bp, Artificial
  Synthetic oligonucleotide
acggtgtgccggagacgcccttcgagctcctccaacacatccagcgggaccgcgacaa

SEQ ID NO: 315094 - DNA, 56 bp, Artificial
  Synthetic oligonucleotide
acggtgttgacactcccgaggaagtcgcttttattagacgtcgtgatgccaatcct

SEQ ID NO: 315095 - DNA, 60 bp, Artificial
  Synthetic oligonucleotide
acggtgttgttcagtacatgagattagtccaggctgagataagttatgttcgagagcact

SEQ ID NO: 315096 - DNA, 58 bp, Artificial
  Synthetic oligonucleotide
acggtgtttgatatgtctgagtgagctagaaacttaacacaccagtcatgatgtgacc

SEQ ID NO: 315097 - DNA, 55 bp, Artificial
  Synthetic oligonucleotide
acggtgttttggcaactgtctacaacggcaactgcaagtacagcacaacccaacg

SEQ ID NO: 315098 - DNA, 52 bp, Artificial
  Synthetic oligonucleotide
acggttaacggcacattggttcccgggttgaaaagcctcgtgttgggtggca

SEQ ID NO: 315099 - DNA, 52 bp, Artificial
  Synthetic oligonucleotide
acggttaagcggtcgcgcaacatgtgccgcatcgtggtcacgttcgaagtcg

SEQ ID NO: 315100 - DNA, 51 bp, Artificial
  Synthetic oligonucleotide
acggttacagttgggtttcacgacgggcctaaccgccatacgtgcacagtt

SEQ ID NO: 315101 - DNA, 60 bp, Artificial
  Synthetic oligonucleotide
acggttatcaacgtcagaagttcattcccactactggatgaaacaatgaagatcagaatc

SEQ ID NO: 315102 - DNA, 59 bp, Artificial
  Synthetic oligonucleotide
acggttattggcagaggctaaagaccctccagtagtaatattgcgtggagatgctaatg

SEQ ID NO: 315103 - DNA, 54 bp, Artificial
  Synthetic oligonucleotide
acggttcaaatcgaccttgggtgtctttcaatcaaaacctggattatcaaatag

SEQ ID NO: 315104 - DNA, 60 bp, Artificial
  Synthetic oligonucleotide
acggttcacacgggttcgcagcagccctgaagcgatcatacttcacccagagtcaaggtg

SEQ ID NO: 315105 - DNA, 52 bp, Artificial
  Synthetic oligonucleotide
acggttcagaggtttaccttaccgttggcccactgctaattactggacttag

SEQ ID NO: 315106 - DNA, 57 bp, Artificial
  Synthetic oligonucleotide
acggttcaggttgtggagggaataatttgttggctgaatattccagccattgaagct

SEQ ID NO: 315107 - DNA, 53 bp, Artificial
  Synthetic oligonucleotide
acggttccgcgatcactcccatgttcctgtccgaagaattattcactcgcaac

SEQ ID NO: 315108 - DNA, 53 bp, Artificial
  Synthetic oligonucleotide
acggttccggagcctttgtaaagatcttttctaggttggagcggatgttatgg

SEQ ID NO: 315109 - DNA, 56 bp, Artificial
  Synthetic oligonucleotide
acggttccgtacaatagtatgtggcttattccctacacagatacaagttcgtaaca

SEQ ID NO: 315110 - DNA, 55 bp, Artificial
  Synthetic oligonucleotide
acggttcctttgtcccacagacgacttatggaacacaagtggccaacacgattgc

SEQ ID NO: 315111 - DNA, 57 bp, Artificial
  Synthetic oligonucleotide
acggttcgaagtcagccatatctagactaatatcaaagtattcagtttataagccat

SEQ ID NO: 315112 - DNA, 53 bp, Artificial
  Synthetic oligonucleotide
acggttcgatagctctcctcccgcgcccgtagctcggcgtggaagaaacgaga

SEQ ID NO: 315113 - DNA, 54 bp, Artificial
  Synthetic oligonucleotide
acggttgaaaacaatagatccgttatccgcttttgtacttcgagaagcccagta

SEQ ID NO: 315114 - DNA, 56 bp, Artificial
  Synthetic oligonucleotide
acggttgaaaccacagtaaccactgcgcaggaaactaagcgcggcagaattcaaac

SEQ ID NO: 315115 - DNA, 55 bp, Artificial
  Synthetic oligonucleotide
acggttgacccggacttttggacttacccgcttgagcgacgttctgatgattctc

SEQ ID NO: 315116 - DNA, 55 bp, Artificial
  Synthetic oligonucleotide
acggttgctacaggaacaaccccgtgtaattgcttacgatcacgaacattaccca

SEQ ID NO: 315117 - DNA, 54 bp, Artificial
  Synthetic oligonucleotide
acggttggatcaaatacgacgaactcctgaaaataacggaccgctacccataca

SEQ ID NO: 315118 - DNA, 58 bp, Artificial
  Synthetic oligonucleotide
acggttgggccattgttggtcgcaactggtgattcgtgtaccaccactgatgacggtg

SEQ ID NO: 315119 - DNA, 52 bp, Artificial
  Synthetic oligonucleotide
acggttggtaggaacgcaacatttaaactgaaaccttctgaccttggtggac

SEQ ID NO: 315120 - DNA, 58 bp, Artificial
  Synthetic oligonucleotide
acggttgtcctgacagaatccactgtgtcttctgccctggcggagctagccacaaaga

SEQ ID NO: 315121 - DNA, 60 bp, Artificial
  Synthetic oligonucleotide
acggtttagaagagtgttgtggcacgtatatgatccaatagcaccagaatctttagattc

SEQ ID NO: 315122 - DNA, 58 bp, Artificial
  Synthetic oligonucleotide
acggtttaggcagcgcgcgggacagaatatcacaactgcgatcgtttcgtcaactttg

SEQ ID NO: 315123 - DNA, 55 bp, Artificial
  Synthetic oligonucleotide
acggtttagggctaaacacggatattcctttcaacaagcagccgctgcgtatcga

SEQ ID NO: 315124 - DNA, 54 bp, Artificial
  Synthetic oligonucleotide
acggtttcaaccgaaatcggtgatatataaaccagcccacaaattaagcaagcg

SEQ ID NO: 315125 - DNA, 59 bp, Artificial
  Synthetic oligonucleotide
acggtttcagctcatgagaatagtctcagctcgaaccaattttacagtggagtcttaac

SEQ ID NO: 315126 - DNA, 56 bp, Artificial
  Synthetic oligonucleotide
acggtttccggtgtatgcttgccgtgaaatatcttcagctagttgaaggtacgtat

SEQ ID NO: 315127 - DNA, 54 bp, Artificial
  Synthetic oligonucleotide
acggtttgcacataaatgcctgagcgggtttgaagttcttcccagggtcattgt

SEQ ID NO: 315128 - DNA, 56 bp, Artificial
  Synthetic oligonucleotide
acggtttggcggttcctagtacggaagtgtgaacatgcaaatatgaacccaactga

SEQ ID NO: 315129 - DNA, 59 bp, Artificial
  Synthetic oligonucleotide
acgtaaactttgatgacgagatgaatgttctgcgtaggcgtggacgtattggggatgaa

SEQ ID NO: 315130 - DNA, 60 bp, Artificial
  Synthetic oligonucleotide
acgtaaagcgatcatgagcctcagtgagtctgagtgagtctcagtgagcctgtcgccata

SEQ ID NO: 315131 - DNA, 52 bp, Artificial
  Synthetic oligonucleotide
acgtaacgccacctcaggccggtctacctacggatatttcgctcgtgctgtt

SEQ ID NO: 315132 - DNA, 55 bp, Artificial
  Synthetic oligonucleotide
acgtaacgctatggcgtgtacaagtggtatctatatcactcgtgcccctactgag

SEQ ID NO: 315133 - DNA, 56 bp, Artificial
  Synthetic oligonucleotide
acgtaactcccacggtcagttgtctacagagattaatagaattaaggaggctgagg

SEQ ID NO: 315134 - DNA, 53 bp, Artificial
  Synthetic oligonucleotide
acgtaactcgaaggtccgagaggtaaacttggccagggctttcaggaagtcca

SEQ ID NO: 315135 - DNA, 55 bp, Artificial
  Synthetic oligonucleotide
acgtaactgtaacaagctaggaccacgagagaatgttgctatcattcaagttggt

SEQ ID NO: 315136 - DNA, 52 bp, Artificial
  Synthetic oligonucleotide
acgtaacttacaacttttaaacacaagaccaatagtaggcaactctccaggt

SEQ ID NO: 315137 - DNA, 57 bp, Artificial
  Synthetic oligonucleotide
acgtaagcatttcggagtaacgtcgtagcaagcgctagtccgccgcgagcggttctc

SEQ ID NO: 315138 - DNA, 52 bp, Artificial
  Synthetic oligonucleotide
acgtaaggattgtgaccgaaagaaaccttactggatggttagcgggggtgct

SEQ ID NO: 315139 - DNA, 58 bp, Artificial
  Synthetic oligonucleotide
acgtaagtatgtttcgaggttttactcaatgatatcggtgatgcctctatttcgctac

SEQ ID NO: 315140 - DNA, 59 bp, Artificial
  Synthetic oligonucleotide
acgtaagttatttaccagggtgtatgagttagcagaaactgcatgcagattccgtaaga

SEQ ID NO: 315141 - DNA, 58 bp, Artificial
  Synthetic oligonucleotide
acgtaagttctgaccctgaagataatcagacaggttatctcctaatgtggaacaacaa

SEQ ID NO: 315142 - DNA, 56 bp, Artificial
  Synthetic oligonucleotide
acgtaataaaacttggatacttggaattggaacactcggcaccattgtgtccctca

SEQ ID NO: 315143 - DNA, 60 bp, Artificial
  Synthetic oligonucleotide
acgtaatacatggcactagagagagtggctggctcgaagttggaagtgactttgtgagca

SEQ ID NO: 315144 - DNA, 60 bp, Artificial
  Synthetic oligonucleotide
acgtaatagctacacccacaggttagatcaattcgagatcgtcgaattgctctcttcttg

SEQ ID NO: 315145 - DNA, 52 bp, Artificial
  Synthetic oligonucleotide
acgtaatcgagaaaaccaaagtagatcctcctcgcctagggaatagggaccc

SEQ ID NO: 315146 - DNA, 57 bp, Artificial
  Synthetic oligonucleotide
acgtaatcgtggagattatcaaccactcatcgatagtttattacaaactaattcagt

SEQ ID NO: 315147 - DNA, 53 bp, Artificial
  Synthetic oligonucleotide
acgtaatgagtggatggagcgtattgctagcggtgcaacagttactgactacc

SEQ ID NO: 315148 - DNA, 60 bp, Artificial
  Synthetic oligonucleotide
acgtaatggcactcacatacaggagtcccatcgagaatgtgctaacaacatttacgacaa

SEQ ID NO: 315149 - DNA, 60 bp, Artificial
  Synthetic oligonucleotide
acgtaatggccctctcttataggcctgctgttgaagaggtgctcgcaaaattcacctctg

SEQ ID NO: 315150 - DNA, 60 bp, Artificial
  Synthetic oligonucleotide
acgtaatgtactttactatgacagatgctacagaggcgcgggcttccggtatcatgaaag

SEQ ID NO: 315151 - DNA, 55 bp, Artificial
  Synthetic oligonucleotide
acgtaattactgagaatgtgttcatacaacaaccgtttaaattaaaagcatcaag

SEQ ID NO: 315152 - DNA, 60 bp, Artificial
  Synthetic oligonucleotide
acgtacaacggtgtctctgcgcttctacagatgcgacgagacatggtcaatgacgacgca

SEQ ID NO: 315153 - DNA, 60 bp, Artificial
  Synthetic oligonucleotide
acgtacaatcatcaggaagccgctaagtatgagaatcatacggagaatgctgttttattg

SEQ ID NO: 315154 - DNA, 60 bp, Artificial
  Synthetic oligonucleotide
acgtacacaagcaactgtcgcaggcaccatttcatcagaacacgactcttcgaatgcgtg

SEQ ID NO: 315155 - DNA, 50 bp, Artificial
  Synthetic oligonucleotide
acgtacacactaacccgccttagtcgggtaagtcaaccccgacattaacg

SEQ ID NO: 315156 - DNA, 60 bp, Artificial
  Synthetic oligonucleotide
acgtacaccgctcacactggagttgattgggcgccgatgactttgatgtatccatgtttg

SEQ ID NO: 315157 - DNA, 57 bp, Artificial
  Synthetic oligonucleotide
acgtacacggtcatcacagagctccgatattagaagtcgcttcggatgtggaattgc

SEQ ID NO: 315158 - DNA, 57 bp, Artificial
  Synthetic oligonucleotide
acgtacacgttaacagagcgttcagatacgtttatgggcccgagcaacacctatgac

SEQ ID NO: 315159 - DNA, 57 bp, Artificial
  Synthetic oligonucleotide
acgtacagaaaaccgaggatgtaccgaatgtatcgcagcccagatgtcccaaaggga

SEQ ID NO: 315160 - DNA, 59 bp, Artificial
  Synthetic oligonucleotide
acgtacattatcaactttccacgccagcactggaacatcatgacttttccaaaccagtc

SEQ ID NO: 315161 - DNA, 60 bp, Artificial
  Synthetic oligonucleotide
acgtacattggatatcctaaagcaaacatcaccttggatcaattcagcgtccagatatat

SEQ ID NO: 315162 - DNA, 57 bp, Artificial
  Synthetic oligonucleotide
acgtaccagatgggcaaggataccttaaggcagataaaatagagtcgagactcggcc

SEQ ID NO: 315163 - DNA, 51 bp, Artificial
  Synthetic oligonucleotide
acgtaccagccctaaactcagtcacagtggagtatgcacctacactacaca

SEQ ID NO: 315164 - DNA, 50 bp, Artificial
  Synthetic oligonucleotide
acgtacccttttaggtattttgcgtttcttaacgagtgtacccgcctgtg

SEQ ID NO: 315165 - DNA, 53 bp, Artificial
  Synthetic oligonucleotide
acgtacctgtacctcagggtgattgtcctcctttggaacttgtgtctactatt

SEQ ID NO: 315166 - DNA, 57 bp, Artificial
  Synthetic oligonucleotide
acgtaccttccatcgggtccactctcaccttagatgaaccattgactgtgtccgttc

SEQ ID NO: 315167 - DNA, 55 bp, Artificial
  Synthetic oligonucleotide
acgtacgaagcgcatctcgacattcacgagctactactggggtgagttttggtgc

SEQ ID NO: 315168 - DNA, 60 bp, Artificial
  Synthetic oligonucleotide
acgtacgagcccaatactctgggccacgaattgatccgtgatctcatctgtgtcgttaga

SEQ ID NO: 315169 - DNA, 56 bp, Artificial
  Synthetic oligonucleotide
acgtacgcaacagagccgcgccttcagacctgaactcgttacgcgtcctcctcata

SEQ ID NO: 315170 - DNA, 60 bp, Artificial
  Synthetic oligonucleotide
acgtacgcatatatgtttaaccaagaacaattgaatatgctgtcaggaacatctggttta

SEQ ID NO: 315171 - DNA, 59 bp, Artificial
  Synthetic oligonucleotide
acgtacgctcggaagacaacacgctacgttacaactggatgctaggtgtgtacgcacgc

SEQ ID NO: 315172 - DNA, 53 bp, Artificial
  Synthetic oligonucleotide
acgtacggggagtccttcgaagggaagattttagatgaattatcgggagcttg

SEQ ID NO: 315173 - DNA, 54 bp, Artificial
  Synthetic oligonucleotide
acgtacggggtagccaccatgccatcatggtaatcgcgacgtggctcgggcaac

SEQ ID NO: 315174 - DNA, 55 bp, Artificial
  Synthetic oligonucleotide
acgtacggtctttgtagtaggtgagtcctcagcgtgactactgttcccgaacacc

SEQ ID NO: 315175 - DNA, 58 bp, Artificial
  Synthetic oligonucleotide
acgtacgtaaatacacaagtgaataggtagctccatcgcgacgaaagattgtaatggc

SEQ ID NO: 315176 - DNA, 55 bp, Artificial
  Synthetic oligonucleotide
acgtacgtgttacgtactcaattacagctgcgtttccggactcacagttgctgtc

SEQ ID NO: 315177 - DNA, 59 bp, Artificial
  Synthetic oligonucleotide
acgtacgtttatgaccatcttactccactgcaggactgggcccactcgggcttgcgaga

SEQ ID NO: 315178 - DNA, 59 bp, Artificial
  Synthetic oligonucleotide
acgtactacacccagactccttgcgagggttgacaagcaagtctgacgtgggtatgctc

SEQ ID NO: 315179 - DNA, 60 bp, Artificial
  Synthetic oligonucleotide
acgtactacttctcagacctggaggttgcgattgctcacacaggctcggtcacatgggtg

SEQ ID NO: 315180 - DNA, 58 bp, Artificial
  Synthetic oligonucleotide
acgtactagaattattgagcagacatacgatgccctcggaggattctgaagtaacgtt

SEQ ID NO: 315181 - DNA, 50 bp, Artificial
  Synthetic oligonucleotide
acgtactagtgatcttaaattgcctgctacagatatactgtatgggccca

SEQ ID NO: 315182 - DNA, 60 bp, Artificial
  Synthetic oligonucleotide
acgtactctcgagaccgtgtgtgcgggcaataatatatacgtactgacaggtaatgatac

SEQ ID NO: 315183 - DNA, 57 bp, Artificial
  Synthetic oligonucleotide
acgtactctggttactggtcacatatttagtcttatcagaacaaagggcctccggca

SEQ ID NO: 315184 - DNA, 55 bp, Artificial
  Synthetic oligonucleotide
acgtactgatgcacctggactcgttcgtccgacagcgggcggcacgcgcccctga

SEQ ID NO: 315185 - DNA, 52 bp, Artificial
  Synthetic oligonucleotide
acgtactggttctgttgcgtgaaacggggggtcacctccccccacatacctc

SEQ ID NO: 315186 - DNA, 55 bp, Artificial
  Synthetic oligonucleotide
acgtacttcacataagtttatttacgtatttcaaagatgcgaaaatgaaacgcat

SEQ ID NO: 315187 - DNA, 53 bp, Artificial
  Synthetic oligonucleotide
acgtactttggcatgggaaagtgggttgacggttccggatacatccccatccc

SEQ ID NO: 315188 - DNA, 55 bp, Artificial
  Synthetic oligonucleotide
acgtagaaaagtaagcgctgatatgaattctcctatcgttaatcgtaagattgat

SEQ ID NO: 315189 - DNA, 59 bp, Artificial
  Synthetic oligonucleotide
acgtagaattgagtgtgcagaagttgagtatgattcatggtacccaaatcccttggacc

SEQ ID NO: 315190 - DNA, 60 bp, Artificial
  Synthetic oligonucleotide
acgtagactgccacggtgactgatgtaatgtgccaactgcggttgaacaacagattcttt

SEQ ID NO: 315191 - DNA, 55 bp, Artificial
  Synthetic oligonucleotide
acgtagagagtggacaacagcgataggcggtaacatccagttagtagtaaacgga

SEQ ID NO: 315192 - DNA, 59 bp, Artificial
  Synthetic oligonucleotide
acgtagatatgttgcgcaacgacatggtagacgtgaaaacgagattagccgttgccgag

SEQ ID NO: 315193 - DNA, 54 bp, Artificial
  Synthetic oligonucleotide
acgtagcagccgcaacttgcatgttactgttcaggcccgctcagtctatatctg

SEQ ID NO: 315194 - DNA, 56 bp, Artificial
  Synthetic oligonucleotide
acgtagcgattgcgtggggaggggctaagtactgcgaattcacttgcgtaactgcg

SEQ ID NO: 315195 - DNA, 55 bp, Artificial
  Synthetic oligonucleotide
acgtaggacgcagcaatcccacgagtacgcccatattcattaacgtccttgaccg

SEQ ID NO: 315196 - DNA, 60 bp, Artificial
  Synthetic oligonucleotide
acgtaggatcgaagatttattcacaagataaatatcgcatactagagtcatacgtataca

SEQ ID NO: 315197 - DNA, 60 bp, Artificial
  Synthetic oligonucleotide
acgtaggcgcgctaggcgcatgaatgtgtgtaagtgtggtgctataatgcacaataataa

SEQ ID NO: 315198 - DNA, 55 bp, Artificial
  Synthetic oligonucleotide
acgtagggatcatagaattgcattctccagcaacgactaagtcacgccgggtctg

SEQ ID NO: 315199 - DNA, 55 bp, Artificial
  Synthetic oligonucleotide
acgtagggcgatgaaaattggccgatgtcctcgctgttatagagtaagcccaggg

SEQ ID NO: 315200 - DNA, 53 bp, Artificial
  Synthetic oligonucleotide
acgtagggcttggtctagaaacaagaaccgaaacgtggacgtcctctgaaggc

SEQ ID NO: 315201 - DNA, 56 bp, Artificial
  Synthetic oligonucleotide
acgtagtacaaacgtaggacgcagcaatcccacgagtacgcccatattcattaacg

SEQ ID NO: 315202 - DNA, 53 bp, Artificial
  Synthetic oligonucleotide
acgtagtggagcacgtattggctcccgtgtacatttttacacagatttaagta

SEQ ID NO: 315203 - DNA, 59 bp, Artificial
  Synthetic oligonucleotide
acgtagtggcttctcggagcctgataaggcttatcgcgcagctaggggcggagcgtcgg

SEQ ID NO: 315204 - DNA, 60 bp, Artificial
  Synthetic oligonucleotide
acgtagtgtcgttgagtatggacccttacttttgctctcagcgagtcaccttgacatcat

SEQ ID NO: 315205 - DNA, 58 bp, Artificial
  Synthetic oligonucleotide
acgtagttcgagcagccaccctagatctccctcgcctaggaaatagattacctgctag

SEQ ID NO: 315206 - DNA, 55 bp, Artificial
  Synthetic oligonucleotide
acgtagttctttcgctagcaccgacaattggtgtggcaattccaggacacgtcac

SEQ ID NO: 315207 - DNA, 60 bp, Artificial
  Synthetic oligonucleotide
acgtataaacgcgatcttgctttgcctgaccgctccccaatactgatcacgacagtagag

SEQ ID NO: 315208 - DNA, 50 bp, Artificial
  Synthetic oligonucleotide
acgtataacgctttacggtcacttaatccgttagtcccaccgttaataag

SEQ ID NO: 315209 - DNA, 60 bp, Artificial
  Synthetic oligonucleotide
acgtatacaagcagcttggaagtagtccttttcacctgtcaccaaatttgcgcatgcgag

SEQ ID NO: 315210 - DNA, 60 bp, Artificial
  Synthetic oligonucleotide
acgtatacgatccgtttcatgactggatcaccgatcaagagacagcatatgaatcagccg

SEQ ID NO: 315211 - DNA, 56 bp, Artificial
  Synthetic oligonucleotide
acgtatactttgaaggtgagttagacggcgcaccctatatgtttccagaccagaac

SEQ ID NO: 315212 - DNA, 59 bp, Artificial
  Synthetic oligonucleotide
acgtatagtgaatttcttgaatggataactcctgtgtatatggctaatcgtcgtaaggc

SEQ ID NO: 315213 - DNA, 57 bp, Artificial
  Synthetic oligonucleotide
acgtatagttaaaaccgatgcatacagccgtgtgtggtacgtttgtacagccatcgg

SEQ ID NO: 315214 - DNA, 60 bp, Artificial
  Synthetic oligonucleotide
acgtatagttagatctaggtgtgagtatcaagcaggacatacaaaggtaggatccctaca

SEQ ID NO: 315215 - DNA, 54 bp, Artificial
  Synthetic oligonucleotide
acgtatatctggaggcgctctcagcctcaacgacaacacactgcctcggcaggt

SEQ ID NO: 315216 - DNA, 55 bp, Artificial
  Synthetic oligonucleotide
acgtatatttacagcagcatccatccggagcatgattattaagtagagattaggc

SEQ ID NO: 315217 - DNA, 60 bp, Artificial
  Synthetic oligonucleotide
acgtatcagagaacaagagctttagtgcgtactggaatggaccccagaatgtgttctctg

SEQ ID NO: 315218 - DNA, 55 bp, Artificial
  Synthetic oligonucleotide
acgtatcagattgtgtagtttttgttacttggtgtcacggcctagaactaactac

SEQ ID NO: 315219 - DNA, 60 bp, Artificial
  Synthetic oligonucleotide
acgtatcagcctggtcgttggtttatgcgagctgcgcaggccgtaactgccgtggagtgt

SEQ ID NO: 315220 - DNA, 60 bp, Artificial
  Synthetic oligonucleotide
acgtatcatagagggtactaaggtatcacatgcagctattttgacagaattggataggat

SEQ ID NO: 315221 - DNA, 55 bp, Artificial
  Synthetic oligonucleotide
acgtatctggacgtgacaaaacgtgacaggggtaaatttagcacaaccagagtgc

SEQ ID NO: 315222 - DNA, 59 bp, Artificial
  Synthetic oligonucleotide
acgtatgaactagatcctccaggtgaagaattaccgactgtcaagcgagagatacaaaa

SEQ ID NO: 315223 - DNA, 60 bp, Artificial
  Synthetic oligonucleotide
acgtatgaggcagcgatgttacaagcaaatatgggacaattcaaagctgctctgcggggt

SEQ ID NO: 315224 - DNA, 58 bp, Artificial
  Synthetic oligonucleotide
acgtatgccacataggttcgcacaaaaattctcaactggtgtatcccgcacaccccca

SEQ ID NO: 315225 - DNA, 57 bp, Artificial
  Synthetic oligonucleotide
acgtatgccgtcgtgaactatcagtgtcagtcggcagcgcgtgacgtcctggggcaa

SEQ ID NO: 315226 - DNA, 59 bp, Artificial
  Synthetic oligonucleotide
acgtatgcgtgccaaacacgtggctgatagtacgtaaagcgacggatcagagggccgtc

SEQ ID NO: 315227 - DNA, 57 bp, Artificial
  Synthetic oligonucleotide
acgtatggacttccagttataaccaacaacgtgtctacaagcattctaggcaacgta

SEQ ID NO: 315228 - DNA, 55 bp, Artificial
  Synthetic oligonucleotide
acgtatgtacttaaagcgtgaaccagtctgcaggacacagggttggacccagtgt

SEQ ID NO: 315229 - DNA, 55 bp, Artificial
  Synthetic oligonucleotide
acgtatgtatcagtcacgtaagctatgctaatagtttcatagataagcacaattg

SEQ ID NO: 315230 - DNA, 60 bp, Artificial
  Synthetic oligonucleotide
acgtatgtcaaccaacacgcacatctcagacagtccaggcgtttctttcgttgctaaaga

SEQ ID NO: 315231 - DNA, 56 bp, Artificial
  Synthetic oligonucleotide
acgtattagaccatgtgcaaacaatggaggagataaacaccctccagcaacaggga

SEQ ID NO: 315232 - DNA, 60 bp, Artificial
  Synthetic oligonucleotide
acgtattagatgtgcctatcattttcaatgaagaatcgacacataataggagtgaaccta

SEQ ID NO: 315233 - DNA, 60 bp, Artificial
  Synthetic oligonucleotide
acgtattatcaccgagacaactgttcttcctatcagataatccagtatctgcagaaagat

SEQ ID NO: 315234 - DNA, 60 bp, Artificial
  Synthetic oligonucleotide
acgtattcacgagaaccagtttggtcaagagtttgtgatggtccataattctgccatatc

SEQ ID NO: 315235 - DNA, 58 bp, Artificial
  Synthetic oligonucleotide
acgtattcagataagctccacttaatgcggggactgtaagagctttactttgacaaca

SEQ ID NO: 315236 - DNA, 56 bp, Artificial
  Synthetic oligonucleotide
acgtattctacctacggtcggttccttgccaatcctaggcagatgctacgaggtgt

SEQ ID NO: 315237 - DNA, 58 bp, Artificial
  Synthetic oligonucleotide
acgtattctcccgatacgttggggtacgatcttatacgagatctcatactggtattgc

SEQ ID NO: 315238 - DNA, 58 bp, Artificial
  Synthetic oligonucleotide
acgtattctccggatacggtgggttacgatctgatacgtgatctcataggtgtaattc

SEQ ID NO: 315239 - DNA, 55 bp, Artificial
  Synthetic oligonucleotide
acgtattggctgaattgcgtggggcggataatttccacctagtcttaccggctgg

SEQ ID NO: 315240 - DNA, 59 bp, Artificial
  Synthetic oligonucleotide
acgtatttcccttcgaactggataagcacgtggagatgagggctcccatcttcgtgcaa

SEQ ID NO: 315241 - DNA, 51 bp, Artificial
  Synthetic oligonucleotide
acgtatttggaaagtattcagtcttcgctcgtgttttcggtgttgtaaagt

SEQ ID NO: 315242 - DNA, 50 bp, Artificial
  Synthetic oligonucleotide
acgtatttgtgtcaagttgacgtgttcggccgatacataggtgtcggtga

SEQ ID NO: 315243 - DNA, 60 bp, Artificial
  Synthetic oligonucleotide
acgtcaaaagaaacttgactggcctttcaatcatgctaataagagaggaatcatgccaga

SEQ ID NO: 315244 - DNA, 56 bp, Artificial
  Synthetic oligonucleotide
acgtcaaacttactgggataaacaagggatattcctgtacatacactgttaagcaa

SEQ ID NO: 315245 - DNA, 58 bp, Artificial
  Synthetic oligonucleotide
acgtcaaaggagaagccatcgccaccaaaagcatggtgaaaacagcgattcgagggct

SEQ ID NO: 315246 - DNA, 53 bp, Artificial
  Synthetic oligonucleotide
acgtcaaattggctcacattccaacaccgcaatcgggtaacaattcttacctg

SEQ ID NO: 315247 - DNA, 60 bp, Artificial
  Synthetic oligonucleotide
acgtcaaatttagcaaacgctatatcagatttgacgaatagcatgtcagatgcggcttcc

SEQ ID NO: 315248 - DNA, 59 bp, Artificial
  Synthetic oligonucleotide
acgtcaagaaactcgagaaggtcagtgccggacacccagggctgcttaagcagcttagc

SEQ ID NO: 315249 - DNA, 60 bp, Artificial
  Synthetic oligonucleotide
acgtcaagctataacatcacgactcccttcccacaagcgactgtcgtgcggattgtcttg

SEQ ID NO: 315250 - DNA, 55 bp, Artificial
  Synthetic oligonucleotide
acgtcaagtttcaccccggaggtgtatcaggtccactcaaaggtggtgaccgaca

SEQ ID NO: 315251 - DNA, 55 bp, Artificial
  Synthetic oligonucleotide
acgtcacacgtggtagccgaggagcgccctcccggggtcacccgagagcacaggc

SEQ ID NO: 315252 - DNA, 57 bp, Artificial
  Synthetic oligonucleotide
acgtcacagccaatcagaagctgccacgtttcgaaagtgacgtttcgaaaatgggcg

SEQ ID NO: 315253 - DNA, 52 bp, Artificial
  Synthetic oligonucleotide
acgtcacaggagggggcgtagtcccacccgcccacccgggtccgtcactcag

SEQ ID NO: 315254 - DNA, 57 bp, Artificial
  Synthetic oligonucleotide
acgtcaccaccattacttccggtcgcatgatacgtgccttcgaaggtcggcccgagc

SEQ ID NO: 315255 - DNA, 58 bp, Artificial
  Synthetic oligonucleotide
acgtcaccgcacgttacgcgggaacaggtgaacaatatattggcgcatgtcccggcaa

SEQ ID NO: 315256 - DNA, 56 bp, Artificial
  Synthetic oligonucleotide
acgtcaccgggggaagtgccggccgcaccacacttgggtttgctagtctcttcaca

SEQ ID NO: 315257 - DNA, 55 bp, Artificial
  Synthetic oligonucleotide
acgtcaccggggggactgccgccctcgccgcgtctggacttactgagctctttac

SEQ ID NO: 315258 - DNA, 58 bp, Artificial
  Synthetic oligonucleotide
acgtcacgccggaacatccacccgttaggagagcagctaaattcatcgctaggacgtg

SEQ ID NO: 315259 - DNA, 60 bp, Artificial
  Synthetic oligonucleotide
acgtcacggcagacgtggtgtatgcttaccctgaacacagtcgacgtctcgcttacagcg

SEQ ID NO: 315260 - DNA, 53 bp, Artificial
  Synthetic oligonucleotide
acgtcacggccgccattttaagtaaggcggaagcagctccaccctctcacata

SEQ ID NO: 315261 - DNA, 55 bp, Artificial
  Synthetic oligonucleotide
acgtcacgggcgccatcttgtaaggggtcgaaggtcagaccacgtggtaagtcac

SEQ ID NO: 315262 - DNA, 54 bp, Artificial
  Synthetic oligonucleotide
acgtcacggtacccagcctactcaccaaaaaaggaggcaggagatacctaagac

SEQ ID NO: 315263 - DNA, 56 bp, Artificial
  Synthetic oligonucleotide
acgtcacggttattgggaaaggtggcgtcaaacatgagaagattagaaccagcacc

SEQ ID NO: 315264 - DNA, 57 bp, Artificial
  Synthetic oligonucleotide
acgtcacgtttggaagaaagtaatatctgttgagaaggatacaaccatggttgatgt

SEQ ID NO: 315265 - DNA, 54 bp, Artificial
  Synthetic oligonucleotide
acgtcactgtcacgtggggagggaacacgtgaacccggaagtgtccctggtcac

SEQ ID NO: 315266 - DNA, 57 bp, Artificial
  Synthetic oligonucleotide
acgtcagaaaccggcgagcgaggggttacaaaagtcccagcgagagagcgcgatcta

SEQ ID NO: 315267 - DNA, 54 bp, Artificial
  Synthetic oligonucleotide
acgtcagaaagggcggagccagcaaaagacccgcccccgatgacgcggataaaa

SEQ ID NO: 315268 - DNA, 56 bp, Artificial
  Synthetic oligonucleotide
acgtcagaaagggtggagctaagaaacgccccgcctccaatgacgcggatgtaagc

SEQ ID NO: 315269 - DNA, 58 bp, Artificial
  Synthetic oligonucleotide
acgtcagacagcaactacctcgcggtctatgatacgttgttctgtaagggcgacggaa

SEQ ID NO: 315270 - DNA, 56 bp, Artificial
  Synthetic oligonucleotide
acgtcagacatgggcggggcttgcacaacctttcactattggttggttcccaccca

SEQ ID NO: 315271 - DNA, 60 bp, Artificial
  Synthetic oligonucleotide
acgtcagagctgtttaaatcggctgaagaatacacggattcactgatggatccagcgatc

SEQ ID NO: 315272 - DNA, 53 bp, Artificial
  Synthetic oligonucleotide
acgtcagagggtaggttccctttttgagtaaagctgtacgttgtggccctata

SEQ ID NO: 315273 - DNA, 60 bp, Artificial
  Synthetic oligonucleotide
acgtcaggaagtgaaggctctatagcgaatttgggctctctcgtgatctccgttgcgaac

SEQ ID NO: 315274 - DNA, 58 bp, Artificial
  Synthetic oligonucleotide
acgtcatacgatggttgtctaggtatgtttggtttatcaatatcattagcttccaaac

SEQ ID NO: 315275 - DNA, 54 bp, Artificial
  Synthetic oligonucleotide
acgtcatatgttgtgaagtcaactagactgttataataattatgtgtccctaga

SEQ ID NO: 315276 - DNA, 60 bp, Artificial
  Synthetic oligonucleotide
acgtcatcaaaagggctctactcatgattgaaagtcatcatgagcagagtttgtcggtta

SEQ ID NO: 315277 - DNA, 55 bp, Artificial
  Synthetic oligonucleotide
acgtcatcaaaggaagtgcgtcaccggaagtcacgtgacaggagacacgtcaccg

SEQ ID NO: 315278 - DNA, 60 bp, Artificial
  Synthetic oligonucleotide
acgtcatcaatgacgttataccatgcatcattcctgtatacctttggactgagatccaaa

SEQ ID NO: 315279 - DNA, 58 bp, Artificial
  Synthetic oligonucleotide
acgtcatcaatgacgttgtaacttgcctcgttgtcgaatacggctccgttgaggtcca

SEQ ID NO: 315280 - DNA, 55 bp, Artificial
  Synthetic oligonucleotide
acgtcatcaccagcaatgaagctccggaggcctggtatgcgtcggcggaccctca

SEQ ID NO: 315281 - DNA, 60 bp, Artificial
  Synthetic oligonucleotide
acgtcatctcataatctttactttcttatagatttctgaaacaaattgaatttgccagca

SEQ ID NO: 315282 - DNA, 55 bp, Artificial
  Synthetic oligonucleotide
acgtcatgacgtgtctcatgttggcaaggttatttgtatatccgacgtcactcgt

SEQ ID NO: 315283 - DNA, 60 bp, Artificial
  Synthetic oligonucleotide
acgtcatgcatgacgtttaacatgcaatgtatccagatcctccctggctatataaaggga

SEQ ID NO: 315284 - DNA, 60 bp, Artificial
  Synthetic oligonucleotide
acgtcatggactcgggatgcacgtggctggcagcaatacccccacccatgggtgcatgct

SEQ ID NO: 315285 - DNA, 57 bp, Artificial
  Synthetic oligonucleotide
acgtccaacctacgacgttccagaccccacagagggccttgttcgcacagtctcaga

SEQ ID NO: 315286 - DNA, 51 bp, Artificial
  Synthetic oligonucleotide
acgtccaccctgcagcatgcactctcgctgcaacccaagggcacggcactg

SEQ ID NO: 315287 - DNA, 56 bp, Artificial
  Synthetic oligonucleotide
acgtccactaacccaagtatcttctggacagaaggtaacgcccctccgcgcatgtc

SEQ ID NO: 315288 - DNA, 52 bp, Artificial
  Synthetic oligonucleotide
acgtccagcccctccccggttctggcgaagggggactccggaacaccttgca

SEQ ID NO: 315289 - DNA, 55 bp, Artificial
  Synthetic oligonucleotide
acgtccagtacaatttgcatggatggtttgactattaacatgctgtatgtgcccc

SEQ ID NO: 315290 - DNA, 55 bp, Artificial
  Synthetic oligonucleotide
acgtccattgtctttgttccgatgctgcgtcattcgaccttcaccctgtctggaa

SEQ ID NO: 315291 - DNA, 54 bp, Artificial
  Synthetic oligonucleotide
acgtcccaattttcttggggcgagatttgggactactgtggccttagacgcgtc

SEQ ID NO: 315292 - DNA, 55 bp, Artificial
  Synthetic oligonucleotide
acgtcccaccgcacacaccttttactccattagatcctgcactgcctgacatcat

SEQ ID NO: 315293 - DNA, 51 bp, Artificial
  Synthetic oligonucleotide
acgtccccacatagcagatcccaggaccccctttcgaaaagaccgaggggg

SEQ ID NO: 315294 - DNA, 60 bp, Artificial
  Synthetic oligonucleotide
acgtcccccgcacaccatcgcctgcacttatctcggttacggagagcagctcagatgaga

SEQ ID NO: 315295 - DNA, 53 bp, Artificial
  Synthetic oligonucleotide
acgtcccgataactgtgacagttgcccccatgtgtgccgaatacaatggacta

SEQ ID NO: 315296 - DNA, 58 bp, Artificial
  Synthetic oligonucleotide
acgtcccggaagtctgcctgaaatgggagctaatggatgaagattatcagggaaggct

SEQ ID NO: 315297 - DNA, 53 bp, Artificial
  Synthetic oligonucleotide
acgtcccggggaggatgacgtacagcatgtggccgccgtaggtggggtccggg

SEQ ID NO: 315298 - DNA, 54 bp, Artificial
  Synthetic oligonucleotide
acgtcccgttggattcgcgccttcattagcaactcctaccgttacgatgttcgg

SEQ ID NO: 315299 - DNA, 57 bp, Artificial
  Synthetic oligonucleotide
acgtccgacattccgttagtggaactttgttccgcattacgatgccatggtgttaga

SEQ ID NO: 315300 - DNA, 56 bp, Artificial
  Synthetic oligonucleotide
acgtccgactggtgtaaacatcacacctcgaattaggacactgtgggacgtccaaa

SEQ ID NO: 315301 - DNA, 58 bp, Artificial
  Synthetic oligonucleotide
acgtccgagctagacttagctccctgaatgttcggatggaaatgtgttgacctacttg

SEQ ID NO: 315302 - DNA, 53 bp, Artificial
  Synthetic oligonucleotide
acgtccgggacccccgccctgtatgaatgtaccccccttgtcatgtgtactgt

SEQ ID NO: 315303 - DNA, 55 bp, Artificial
  Synthetic oligonucleotide
acgtccgtggaagagccagaggccgctgctactcttgctctagtgatggtcgccg

SEQ ID NO: 315304 - DNA, 55 bp, Artificial
  Synthetic oligonucleotide
acgtccgtttcgcgtggggagcatcctgatctggtggtcataccatcagggcgcc

SEQ ID NO: 315305 - DNA, 54 bp, Artificial
  Synthetic oligonucleotide
acgtcctagtgagcgagtcttgtacgagtaccctttttgggacggtccaggata

SEQ ID NO: 315306 - DNA, 59 bp, Artificial
  Synthetic oligonucleotide
acgtcctcgccaggagtaccgctagctaacattgaaaatcagaacgcagcggtactgaa

SEQ ID NO: 315307 - DNA, 56 bp, Artificial
  Synthetic oligonucleotide
acgtcctctgcgacggagaacacgcctttccttggacgcagctaccttgggacaaa

SEQ ID NO: 315308 - DNA, 57 bp, Artificial
  Synthetic oligonucleotide
acgtcctggtcgagtgggaatgacccctactcgccgcgaatgatttgatacacccgc

SEQ ID NO: 315309 - DNA, 55 bp, Artificial
  Synthetic oligonucleotide
acgtccttagccacaggccgattcggtagtctggattactagattccttcattct

SEQ ID NO: 315310 - DNA, 56 bp, Artificial
  Synthetic oligonucleotide
acgtccttcaactagtcaccaccgatctccctcgcctaggaaataaagaacctgca

SEQ ID NO: 315311 - DNA, 54 bp, Artificial
  Synthetic oligonucleotide
acgtcctttgtctacgtcccgtcagcgctgaatcccgcggacgacccgtctcgg

SEQ ID NO: 315312 - DNA, 55 bp, Artificial
  Synthetic oligonucleotide
acgtcctttgtggttccaatactcctaaaggccctttatatgctgacaacaagag

SEQ ID NO: 315313 - DNA, 60 bp, Artificial
  Synthetic oligonucleotide
acgtcgaacacacggtatcatgtggtgcgacaccacacttagaggcgcggagatgctcgg

SEQ ID NO: 315314 - DNA, 53 bp, Artificial
  Synthetic oligonucleotide
acgtcgaagacaaaggtctcacgtcagaaaccggcgagcgaggggttacaaaa

SEQ ID NO: 315315 - DNA, 59 bp, Artificial
  Synthetic oligonucleotide
acgtcgaccgcgtctccacgtcctcagtcgttggcggctaatgcatccgggcggataga

SEQ ID NO: 315316 - DNA, 55 bp, Artificial
  Synthetic oligonucleotide
acgtcgacttccagcgtcgtactggagacgcgctcacatacttgggaaacacaat

SEQ ID NO: 315317 - DNA, 56 bp, Artificial
  Synthetic oligonucleotide
acgtcgagcctgcttaccgcaacgtggagaaaactaacagtcccgattacagtcta

SEQ ID NO: 315318 - DNA, 55 bp, Artificial
  Synthetic oligonucleotide
acgtcgaggataaccctgaaacgtggtttacgctccaagagcttgccgcaaaatc

SEQ ID NO: 315319 - DNA, 51 bp, Artificial
  Synthetic oligonucleotide
acgtcgatctgatgagttacttcacagtgtagatgtaggaaaatccaccac

SEQ ID NO: 315320 - DNA, 58 bp, Artificial
  Synthetic oligonucleotide
acgtcgatgtgatccagggggtagtttcgaaatattcatccgagacattcgaagttgc

SEQ ID NO: 315321 - DNA, 60 bp, Artificial
  Synthetic oligonucleotide
acgtcgattctcttgcagttatggatacgctccttgacacctctttctgaagcgggctta

SEQ ID NO: 315322 - DNA, 54 bp, Artificial
  Synthetic oligonucleotide
acgtcgcatgattcctttctctacgcggatgtaactcctgttcatgcctgatgt

SEQ ID NO: 315323 - DNA, 59 bp, Artificial
  Synthetic oligonucleotide
acgtcgcctcctcagtagtgagtgagcctcctcacgagtgtaaccccgatgatggtggg

SEQ ID NO: 315324 - DNA, 60 bp, Artificial
  Synthetic oligonucleotide
acgtcgcgattgtagtgagcgcatagagatttcattctattaacttcgctgttatacgcg

SEQ ID NO: 315325 - DNA, 55 bp, Artificial
  Synthetic oligonucleotide
acgtcggaaatacagctgaccgactacggaacccttacattagattgttcaccta

SEQ ID NO: 315326 - DNA, 60 bp, Artificial
  Synthetic oligonucleotide
acgtcggaaatacagctgactgactacggagccctcacattggactgctcacctagaaca

SEQ ID NO: 315327 - DNA, 55 bp, Artificial
  Synthetic oligonucleotide
acgtcggaccgcacaacgttgagcgcatcagtctgtcccgacagggtgtggcgtt

SEQ ID NO: 315328 - DNA, 58 bp, Artificial
  Synthetic oligonucleotide
acgtcggacgacgatttagctccctgaatgttcggatggaaatgtgctgaccttgttg

SEQ ID NO: 315329 - DNA, 58 bp, Artificial
  Synthetic oligonucleotide
acgtcggacgatgatttagctccctgtatgttaggatggaaatgtgttgacctggttg

SEQ ID NO: 315330 - DNA, 59 bp, Artificial
  Synthetic oligonucleotide
acgtcggagctggacttagcgctctgtatgtcggggtggaaactggtgctactgcttgg

SEQ ID NO: 315331 - DNA, 55 bp, Artificial
  Synthetic oligonucleotide
acgtcggagctggatttcgctctctgaatgtttgggtggaaatgtgctgaccggg

SEQ ID NO: 315332 - DNA, 53 bp, Artificial
  Synthetic oligonucleotide
acgtcggcgctcggtttcgtgctaccgccgcgagactaagcgcagctaacgcc

SEQ ID NO: 315333 - DNA, 51 bp, Artificial
  Synthetic oligonucleotide
acgtcgtcacaacagtcttcggtcccttacgttaccacgtaggtgcccttt

SEQ ID NO: 315334 - DNA, 60 bp, Artificial
  Synthetic oligonucleotide
acgtcgtctgttgctcaatgtcctacacatggacaggtgccctgatcacaccatgcgctg

SEQ ID NO: 315335 - DNA, 58 bp, Artificial
  Synthetic oligonucleotide
acgtcgtgaggcgcgtacgtaagatgacctccacgtttacagtttctaatcatgacgc

SEQ ID NO: 315336 - DNA, 60 bp, Artificial
  Synthetic oligonucleotide
acgtcgtggatggagtcaatcataagattaatattacagtgaatacatgtactatacgga

SEQ ID NO: 315337 - DNA, 59 bp, Artificial
  Synthetic oligonucleotide
acgtcgtgtgggtaattcctcgaagcccaatattgagcccaagatgaaagcccagtgca

SEQ ID NO: 315338 - DNA, 52 bp, Artificial
  Synthetic oligonucleotide
acgtcgtgtgttgttccatgtcctattcctggacgggggctctaataacacc

SEQ ID NO: 315339 - DNA, 55 bp, Artificial
  Synthetic oligonucleotide
acgtcgttgactcgtatggttcgctgtcaactgggtatcacattctcaagactaa

SEQ ID NO: 315340 - DNA, 60 bp, Artificial
  Synthetic oligonucleotide
acgtcgtttcatgattatggtcgtcatgtgaggcgataaggttttctgacacattgtacg

SEQ ID NO: 315341 - DNA, 54 bp, Artificial
  Synthetic oligonucleotide
acgtctaacggaacgtacactcaatactcaaccttgttaacaccgcataagtta

SEQ ID NO: 315342 - DNA, 59 bp, Artificial
  Synthetic oligonucleotide
acgtctaaggagttcggccttgtttataatcgctgtagacgctattgcgaggtcgctga

SEQ ID NO: 315343 - DNA, 53 bp, Artificial
  Synthetic oligonucleotide
acgtctaagtataaacgtggttcgtctaactatcaacgacgaggttattcacg

SEQ ID NO: 315344 - DNA, 56 bp, Artificial
  Synthetic oligonucleotide
acgtctacgctgtacacgcacccacgtcgctataccaccaggcgattaaaggggta

SEQ ID NO: 315345 - DNA, 57 bp, Artificial
  Synthetic oligonucleotide
acgtctatccttcagctgtaggtccaacgagatatacgtcctcaggacctcctttct

SEQ ID NO: 315346 - DNA, 57 bp, Artificial
  Synthetic oligonucleotide
acgtctatgccaactgcaaattacgcagttaacgctacggttcttgccttcgactcg

SEQ ID NO: 315347 - DNA, 55 bp, Artificial
  Synthetic oligonucleotide
acgtctattatgaacttaatacccctcccgttgttatatgtgatcgtcatttctg

SEQ ID NO: 315348 - DNA, 60 bp, Artificial
  Synthetic oligonucleotide
acgtctcaacttcgacagcccatatgcgagccgtgctcctgcccccattgtccgcgtcac

SEQ ID NO: 315349 - DNA, 53 bp, Artificial
  Synthetic oligonucleotide
acgtctcatcctttgcatactatgcactccttccaagcgtattcaaatttact

SEQ ID NO: 315350 - DNA, 53 bp, Artificial
  Synthetic oligonucleotide
acgtctccggggggagtgccggacacaccgcactgggactcactaggctcctt

SEQ ID NO: 315351 - DNA, 56 bp, Artificial
  Synthetic oligonucleotide
acgtctcgatcacttggcgcgagccaagctaggagcgggcccaagcgaccagtcta

SEQ ID NO: 315352 - DNA, 53 bp, Artificial
  Synthetic oligonucleotide
acgtctcgccaaacgacgtggaaagtttggacaaaaatacagtggaaggtgga

SEQ ID NO: 315353 - DNA, 54 bp, Artificial
  Synthetic oligonucleotide
acgtctcgctaaaaatacaagctcgggtttctcaactagtattgatgtttttaa

SEQ ID NO: 315354 - DNA, 55 bp, Artificial
  Synthetic oligonucleotide
acgtctctcgtaatgcttttcactgcgattacgactcagcgtatgtgaggagtct

SEQ ID NO: 315355 - DNA, 60 bp, Artificial
  Synthetic oligonucleotide
acgtctgaactggatttagctccctgaatgtttggatggaaatgtgctgccctgcttggg

SEQ ID NO: 315356 - DNA, 60 bp, Artificial
  Synthetic oligonucleotide
acgtctgaaggaatatgattacacactgttcgatgaatttcatgtggacgattcaaatgc

SEQ ID NO: 315357 - DNA, 52 bp, Artificial
  Synthetic oligonucleotide
acgtctgaaggaggatcgtatgcaggttcgggagtgaatatcgaagccacga

SEQ ID NO: 315358 - DNA, 59 bp, Artificial
  Synthetic oligonucleotide
acgtctgccaattagaaaagtgttgcatgagcccaagagtaggttgttcacagtattac

SEQ ID NO: 315359 - DNA, 59 bp, Artificial
  Synthetic oligonucleotide
acgtctgctcttatttagctggagccatggtcttgtttgagggtatatgcccggaagac

SEQ ID NO: 315360 - DNA, 55 bp, Artificial
  Synthetic oligonucleotide
acgtctgtacactgatggtgataacggcgtatttgatgacggttattcatggtct

SEQ ID NO: 315361 - DNA, 55 bp, Artificial
  Synthetic oligonucleotide
acgtctgtgacgacgaggttgctcagcagtctggcgccgtgctaacgtccctgca

SEQ ID NO: 315362 - DNA, 55 bp, Artificial
  Synthetic oligonucleotide
acgtctgtgtgtgcgcggggaccgctggactaccgttcacccacctacggttgga

SEQ ID NO: 315363 - DNA, 57 bp, Artificial
  Synthetic oligonucleotide
acgtcttaaaggtcaacgtcatttgatgtggatgcaaggttctttaacaatggctac

SEQ ID NO: 315364 - DNA, 55 bp, Artificial
  Synthetic oligonucleotide
acgtcttagaaagcgactggaaaggttcgaattattcaaaacgtatatggtctga

SEQ ID NO: 315365 - DNA, 56 bp, Artificial
  Synthetic oligonucleotide
acgtcttattggagggagaaccttccaagagagaagatcatttctgtaaaacagaa

SEQ ID NO: 315366 - DNA, 60 bp, Artificial
  Synthetic oligonucleotide
acgtcttattgtcatcaactgagtatcaatctattgatcaggatttcattggagcatggg

SEQ ID NO: 315367 - DNA, 51 bp, Artificial
  Synthetic oligonucleotide
acgtcttctcgggcaacgttaagcagcagtcaacgtgggcaccgctgaccg

SEQ ID NO: 315368 - DNA, 50 bp, Artificial
  Synthetic oligonucleotide
acgtcttgacgaggaggaatacaacgttattcgatcacgtttcctcacgc

SEQ ID NO: 315369 - DNA, 54 bp, Artificial
  Synthetic oligonucleotide
acgtcttgcagtccaaatggtgagccaccggaacccaacgccaaagtaattttg

SEQ ID NO: 315370 - DNA, 53 bp, Artificial
  Synthetic oligonucleotide
acgtcttggtatttgtcccgtacgaccaagaaccactcaacggagactggaaa

SEQ ID NO: 315371 - DNA, 60 bp, Artificial
  Synthetic oligonucleotide
acgtctttgggaacgatgaaatgctaacaaagttactcaatgtatgacctgcgtgactgc

SEQ ID NO: 315372 - DNA, 55 bp, Artificial
  Synthetic oligonucleotide
acgtctttgtcattgacgtactaccagatgcaagcccggtacgcgaacggagttt

SEQ ID NO: 315373 - DNA, 55 bp, Artificial
  Synthetic oligonucleotide
acgtgaaatacaagaacccgtattggaatcaggatgggaatatcaaccaagaaac

SEQ ID NO: 315374 - DNA, 57 bp, Artificial
  Synthetic oligonucleotide
acgtgaaatggcatataatccgcccgatttcaagtataatttacttaatcgcaattg

SEQ ID NO: 315375 - DNA, 56 bp, Artificial
  Synthetic oligonucleotide
acgtgaaattagtcgaactatttgtggatcttcaaaggatcgctcaccctggttgt

SEQ ID NO: 315376 - DNA, 55 bp, Artificial
  Synthetic oligonucleotide
acgtgaacatattccaccaaaaggaggttctagaggctatagtacaaagcggacc

SEQ ID NO: 315377 - DNA, 60 bp, Artificial
  Synthetic oligonucleotide
acgtgaagcatccatttgactatggcaattcgtacactgcagcatacaaacatgctttgc

SEQ ID NO: 315378 - DNA, 52 bp, Artificial
  Synthetic oligonucleotide
acgtgaagtctggaaaacttaaggttcttgtggcaacaactgtcctagacga

SEQ ID NO: 315379 - DNA, 57 bp, Artificial
  Synthetic oligonucleotide
acgtgaagttatctggactcttggtgcatcgttctgttcgtttggaaaccaccagga

SEQ ID NO: 315380 - DNA, 55 bp, Artificial
  Synthetic oligonucleotide
acgtgaccaaccctcttgcggaatctcacaagcgcgcccgtcctgggacagctgt

SEQ ID NO: 315381 - DNA, 51 bp, Artificial
  Synthetic oligonucleotide
acgtgaccttggaaaccgacctggttagggtacacccggacagttgcttag

SEQ ID NO: 315382 - DNA, 59 bp, Artificial
  Synthetic oligonucleotide
acgtgacgaattcataatactggtcgaccaaccagcatatgactcagtgagacgaaatg

SEQ ID NO: 315383 - DNA, 55 bp, Artificial
  Synthetic oligonucleotide
acgtgacgggcatgaccactgacaacctaaagtgcccatgtcaggttccagcccc

SEQ ID NO: 315384 - DNA, 52 bp, Artificial
  Synthetic oligonucleotide
acgtgactaatcacgtgactgctacgtcatcggcgccatcttgttttacaaa

SEQ ID NO: 315385 - DNA, 53 bp, Artificial
  Synthetic oligonucleotide
acgtgactacctacgtcacggccgccactttagtttacaaaatggccgacttc

SEQ ID NO: 315386 - DNA, 59 bp, Artificial
  Synthetic oligonucleotide
acgtgactgtcgccccaagcaacttcgctaacggggtcgctgaatggatcagctctaac

SEQ ID NO: 315387 - DNA, 55 bp, Artificial
  Synthetic oligonucleotide
acgtgacttgccgtatgtttaccggtatgaaccaggccccgatggctgcgactcg

SEQ ID NO: 315388 - DNA, 55 bp, Artificial
  Synthetic oligonucleotide
acgtgagaaatctcggcgcgccgcgagtgatctaaaggttcgtggtcacgcattg

SEQ ID NO: 315389 - DNA, 55 bp, Artificial
  Synthetic oligonucleotide
acgtgagaatcgagtacaataacaagactcggaacaatactctcgcgtccgtgtg

SEQ ID NO: 315390 - DNA, 57 bp, Artificial
  Synthetic oligonucleotide
acgtgagactgcctcctcagactgtgataccggagtcatgggggctgcagtcaaaag

SEQ ID NO: 315391 - DNA, 57 bp, Artificial
  Synthetic oligonucleotide
acgtgagctcgccgagtacagacgtggtaacaatggatcccatagtgattgtaagta

SEQ ID NO: 315392 - DNA, 55 bp, Artificial
  Synthetic oligonucleotide
acgtgagctggtccgaaacaatgcgatactacttatctactgcgcgattttggtg

SEQ ID NO: 315393 - DNA, 60 bp, Artificial
  Synthetic oligonucleotide
acgtgagcttcgacaaaagattaagaatgagcgtgagatggcaccgcgcccacaggttca

SEQ ID NO: 315394 - DNA, 54 bp, Artificial
  Synthetic oligonucleotide
acgtgagttgaggagctccgtcccgggagggacagcgtgcggtggggaacgtta

SEQ ID NO: 315395 - DNA, 54 bp, Artificial
  Synthetic oligonucleotide
acgtgataacacccttagcgagttgattctttcctagcggggtgtcaatttccg

SEQ ID NO: 315396 - DNA, 60 bp, Artificial
  Synthetic oligonucleotide
acgtgatacttacggcattagtgatgatatcatatacaaattagtggcatctgacgctcc

SEQ ID NO: 315397 - DNA, 51 bp, Artificial
  Synthetic oligonucleotide
acgtgatagacaatggaggacaatcgaacatcacgcctactgtagttattg

SEQ ID NO: 315398 - DNA, 55 bp, Artificial
  Synthetic oligonucleotide
acgtgatcataaatgatgaccaaggactgttcaaggttctgtagaccgcagtgcc

SEQ ID NO: 315399 - DNA, 55 bp, Artificial
  Synthetic oligonucleotide
acgtgatcccgcattcacactcgtgcgttcgccgggcaatgtgcccgtcggtcat

SEQ ID NO: 315400 - DNA, 55 bp, Artificial
  Synthetic oligonucleotide
acgtgatcgacatatagcgcgacgatcgagcgataacgcggcctttgcagtgcgg

SEQ ID NO: 315401 - DNA, 55 bp, Artificial
  Synthetic oligonucleotide
acgtgatcgttatcaagtcatgcataagttttatgctaaggtgactggtggacag

SEQ ID NO: 315402 - DNA, 60 bp, Artificial
  Synthetic oligonucleotide
acgtgatcttattgccgttatacgtgccaagaactatgtcgaagcgtcctgccgatatag

SEQ ID NO: 315403 - DNA, 55 bp, Artificial
  Synthetic oligonucleotide
acgtgatgcagtacagcggctcgcgctcaccgttcatgatcgaggagacgtggcc

SEQ ID NO: 315404 - DNA, 55 bp, Artificial
  Synthetic oligonucleotide
acgtgatgcatgaaaaaatctatgtggatcgtttaaagcaggaatggcgcgcttt

SEQ ID NO: 315405 - DNA, 55 bp, Artificial
  Synthetic oligonucleotide
acgtgatgcccaaagcgatgcaaggttgtcggtaccacagctagatgtcaagaac

SEQ ID NO: 315406 - DNA, 57 bp, Artificial
  Synthetic oligonucleotide
acgtgattgagaaggctcttaaggcttatcctcgaaatccgattcttaagtgggcga

SEQ ID NO: 315407 - DNA, 60 bp, Artificial
  Synthetic oligonucleotide
acgtgattgggaagatatggatggatgagaatattaaagtcaagaaccacacaaacactg

SEQ ID NO: 315408 - DNA, 60 bp, Artificial
  Synthetic oligonucleotide
acgtgattttgatttacgcgaagtgctatccccaaggcgactttgcgatgtattgcgcaa

SEQ ID NO: 315409 - DNA, 58 bp, Artificial
  Synthetic oligonucleotide
acgtgcaaccgcatcgtgttgggccggtacagcgtccaagccctagcgcgggcgatcg

SEQ ID NO: 315410 - DNA, 55 bp, Artificial
  Synthetic oligonucleotide
acgtgcaagagtcggatgcaaaagactacacgcaaatggtcagggacaaagtcgt

SEQ ID NO: 315411 - DNA, 60 bp, Artificial
  Synthetic oligonucleotide
acgtgcaaggtgggtacataagataatgctcaaagaagcaagggaagtgcggatgggtga

SEQ ID NO: 315412 - DNA, 59 bp, Artificial
  Synthetic oligonucleotide
acgtgcaatacctgtacggtatagggtcagcagttgtttccattgcaatcaaatgggag

SEQ ID NO: 315413 - DNA, 56 bp, Artificial
  Synthetic oligonucleotide
acgtgcaatacctgtacggtatagggtcagcggttgtctcctacgcaattaagtgg

SEQ ID NO: 315414 - DNA, 56 bp, Artificial
  Synthetic oligonucleotide
acgtgcaatatttgtacggggtggggtcaagcattgcgtcctgggccattaagtgg

SEQ ID NO: 315415 - DNA, 56 bp, Artificial
  Synthetic oligonucleotide
acgtgcacatcggggaacttgggtgtggtaccggccatcagtagccaccctcgcgt

SEQ ID NO: 315416 - DNA, 51 bp, Artificial
  Synthetic oligonucleotide
acgtgcacgtgcagagcacccctcaggcagtgaccacgatcaagcatgacc

SEQ ID NO: 315417 - DNA, 55 bp, Artificial
  Synthetic oligonucleotide
acgtgcactggatgacaccacaaagaatgatgtgaaagtgtttgctaagcccaaa

SEQ ID NO: 315418 - DNA, 60 bp, Artificial
  Synthetic oligonucleotide
acgtgcagaacttacggcggttacacctgagattggaggacctgagtcaatcactcagtc

SEQ ID NO: 315419 - DNA, 58 bp, Artificial
  Synthetic oligonucleotide
acgtgcatcggccacccaattatatcaaacctgtaaggtgtcaggtacatgtccctct

SEQ ID NO: 315420 - DNA, 56 bp, Artificial
  Synthetic oligonucleotide
acgtgcccacatggttttacccgtgcgactatctccttcaataactatactaatag

SEQ ID NO: 315421 - DNA, 59 bp, Artificial
  Synthetic oligonucleotide
acgtgcccacattattttacccgtgcgactatcgccttcaatcacaatgctaatcggtc

SEQ ID NO: 315422 - DNA, 55 bp, Artificial
  Synthetic oligonucleotide
acgtgcccgagcagagtcttcgacttgaggagctgccggatctgagcgttgctcc

SEQ ID NO: 315423 - DNA, 60 bp, Artificial
  Synthetic oligonucleotide
acgtgcccgttatcacaaaatctcgtatgacacaattcatgacatctgctcagaacgtgt

SEQ ID NO: 315424 - DNA, 60 bp, Artificial
  Synthetic oligonucleotide
acgtgccgcaaggttgattaaacatcatgatggtgacataacgctaattagtagtgtaga

SEQ ID NO: 315425 - DNA, 59 bp, Artificial
  Synthetic oligonucleotide
acgtgccgctgtgatacagtggtttcgtgtgaaggctatgtcgttaagagaataacgat

SEQ ID NO: 315426 - DNA, 55 bp, Artificial
  Synthetic oligonucleotide
acgtgccggaaaatcactcatccggttcgtacaatcaacccctcagcgcactcag

SEQ ID NO: 315427 - DNA, 60 bp, Artificial
  Synthetic oligonucleotide
acgtgcgaccaggtcgtcactcatcaacctatgcaatcggttttgtgcgccaaaaggcat

SEQ ID NO: 315428 - DNA, 55 bp, Artificial
  Synthetic oligonucleotide
acgtgcgcagcctccaacctagcgcgcgggtccgactcccggacctcgtccatct

SEQ ID NO: 315429 - DNA, 54 bp, Artificial
  Synthetic oligonucleotide
acgtgcgccgttgcattacggttccgatgttccctcacgtagaagcggcgcttg

SEQ ID NO: 315430 - DNA, 59 bp, Artificial
  Synthetic oligonucleotide
acgtgcgtaccccatgtttgaggtggaacctaggcaggtcacaccgaatgaccatgcta

SEQ ID NO: 315431 - DNA, 52 bp, Artificial
  Synthetic oligonucleotide
acgtgcgtggcttactgggttaattatctatttgcgcattgttgtctaatct

SEQ ID NO: 315432 - DNA, 55 bp, Artificial
  Synthetic oligonucleotide
acgtgcgttttctgcactaactgccattgtgtgttcttgagtagcactagctgat

SEQ ID NO: 315433 - DNA, 60 bp, Artificial
  Synthetic oligonucleotide
acgtgctaggagatgtggagatatggctccacgacagcatcctcccccacctcgggagcg

SEQ ID NO: 315434 - DNA, 53 bp, Artificial
  Synthetic oligonucleotide
acgtgctagtttcagggtacaggtggcgtccactttcgtgggggcctccaaag

SEQ ID NO: 315435 - DNA, 59 bp, Artificial
  Synthetic oligonucleotide
acgtgctcatgccaactggggaagtcaccattcaaatgcgtggtaacccctcaggccaa

SEQ ID NO: 315436 - DNA, 60 bp, Artificial
  Synthetic oligonucleotide
acgtgctctagatgtgggactaatgtgtcaggatgacataacgtatctgtgcccaaagtt

SEQ ID NO: 315437 - DNA, 59 bp, Artificial
  Synthetic oligonucleotide
acgtgctgagaattcaccaatgtattcgggggtcggaccgctaaatacatcgcgtgagc

SEQ ID NO: 315438 - DNA, 60 bp, Artificial
  Synthetic oligonucleotide
acgtgctgctctatgacttgggcttaacttccatcgcggtcagtggttgccaagtagatg

SEQ ID NO: 315439 - DNA, 59 bp, Artificial
  Synthetic oligonucleotide
acgtgctgtgaagcggctatcgaatctctagaaaatgaagattaccgaatcattttagc

SEQ ID NO: 315440 - DNA, 60 bp, Artificial
  Synthetic oligonucleotide
acgtgcttattgatgcccgcggcggtatcccgcttgaggtaacattggaggatatccgca

SEQ ID NO: 315441 - DNA, 55 bp, Artificial
  Synthetic oligonucleotide
acgtgcttcagataaaattgcgcagggtgttatcatcgcatatcgtgatatgcag

SEQ ID NO: 315442 - DNA, 57 bp, Artificial
  Synthetic oligonucleotide
acgtgcttttggtgactacactagtgttgtggttatcaatgtcattgtgtggtgtat

SEQ ID NO: 315443 - DNA, 51 bp, Artificial
  Synthetic oligonucleotide
acgtggaaggactagcgcttatgcgtgccagaaatcccgcccctctcgcat

SEQ ID NO: 315444 - DNA, 55 bp, Artificial
  Synthetic oligonucleotide
acgtggaaggctggcgcgattccagccctacccaaacgcgcgttcgattaaccgc

SEQ ID NO: 315445 - DNA, 55 bp, Artificial
  Synthetic oligonucleotide
acgtggaagggtccaccactctctctaacaggcgatataactgttggtccacgtt

SEQ ID NO: 315446 - DNA, 55 bp, Artificial
  Synthetic oligonucleotide
acgtggacaccccgaagctcactctcaacgcctctgacccaactgggtctggctc

SEQ ID NO: 315447 - DNA, 56 bp, Artificial
  Synthetic oligonucleotide
acgtggaccggggtagatactaatagcggagttacgagcgcttgctcctacaatgg

SEQ ID NO: 315448 - DNA, 60 bp, Artificial
  Synthetic oligonucleotide
acgtggactattcggccttcgatgctaaccactgcagtgacgcaatgaacatcatgtttg

SEQ ID NO: 315449 - DNA, 53 bp, Artificial
  Synthetic oligonucleotide
acgtggactcaacattggctatggcaacctagtaaaatcgcgtggggcacgct

SEQ ID NO: 315450 - DNA, 51 bp, Artificial
  Synthetic oligonucleotide
acgtggagctaaactgcgcccactagtgccaactcccgacccgcaaggggg

SEQ ID NO: 315451 - DNA, 60 bp, Artificial
  Synthetic oligonucleotide
acgtggatacaagattctgaagaagccaccggtttcatatagatatataagtgcccagtc

SEQ ID NO: 315452 - DNA, 57 bp, Artificial
  Synthetic oligonucleotide
acgtggatagtatgtgcacagaaggtcttgcaacctccgtgacttttgagtcctacg

SEQ ID NO: 315453 - DNA, 54 bp, Artificial
  Synthetic oligonucleotide
acgtggcactttgtatgatgaccctgaaatttagtggcacgtctttctagatgt

SEQ ID NO: 315454 - DNA, 56 bp, Artificial
  Synthetic oligonucleotide
acgtggcagggagataagacgacataccctgcagctggaatggcgtaataacgtac

SEQ ID NO: 315455 - DNA, 60 bp, Artificial
  Synthetic oligonucleotide
acgtggcatacctgtaaggaaggccatcacgtgcgcagttattacaaaatgtatcaggac

SEQ ID NO: 315456 - DNA, 52 bp, Artificial
  Synthetic oligonucleotide
acgtggcccaaataaaggttacggctgatggcgttacgacgattgctaagaa

SEQ ID NO: 315457 - DNA, 59 bp, Artificial
  Synthetic oligonucleotide
acgtggccgacaaatgctcgtaaccctcctggtcatggttgccgcctcgctcatgtacc

SEQ ID NO: 315458 - DNA, 57 bp, Artificial
  Synthetic oligonucleotide
acgtggcctcgcactgcgctgtttaccccccgatggttcggcgagcgagtgcgaccc

SEQ ID NO: 315459 - DNA, 59 bp, Artificial
  Synthetic oligonucleotide
acgtggcgcactatggagtctcgctcgaagcttgtttattgaacgactacttagagtta

SEQ ID NO: 315460 - DNA, 57 bp, Artificial
  Synthetic oligonucleotide
acgtggcggatgcttcctccaagttcgtaactccgttgaggttgtatcactggctcg

SEQ ID NO: 315461 - DNA, 59 bp, Artificial
  Synthetic oligonucleotide
acgtggcggatttgcgcacgtggtttcaaatgattctcacgtggagtgtcttaggagcg

SEQ ID NO: 315462 - DNA, 53 bp, Artificial
  Synthetic oligonucleotide
acgtggcttgaaagactggggagacgtaaacgtatgaccttttcgcaggagtt

SEQ ID NO: 315463 - DNA, 58 bp, Artificial
  Synthetic oligonucleotide
acgtgggacaaggggaaggcgcggtccaatggatgaataggctcattgcctttgcgtc

SEQ ID NO: 315464 - DNA, 58 bp, Artificial
  Synthetic oligonucleotide
acgtgggacctttttgtggagcgaagcaatgctttcagcaactgttacccttatgata

SEQ ID NO: 315465 - DNA, 53 bp, Artificial
  Synthetic oligonucleotide
acgtgggatggactccgtcgtttaggccgtaaccttcctgcatttgaggaggg

SEQ ID NO: 315466 - DNA, 55 bp, Artificial
  Synthetic oligonucleotide
acgtgggattagtgccagaatcgtggactccatggcctcggtagtgcataccgat

SEQ ID NO: 315467 - DNA, 52 bp, Artificial
  Synthetic oligonucleotide
acgtggggagggttgccgtgtaacccggaagtcaatcctcccacgtggcctg

SEQ ID NO: 315468 - DNA, 55 bp, Artificial
  Synthetic oligonucleotide
acgtgggtcactggataaggacctggagccggcttaactgggttcctgagcccac

SEQ ID NO: 315469 - DNA, 56 bp, Artificial
  Synthetic oligonucleotide
acgtgggtgacttgcaacatagtctaccgcacggaggtcggtacagggacgggaca

SEQ ID NO: 315470 - DNA, 57 bp, Artificial
  Synthetic oligonucleotide
acgtgggtgataacctgcattcactaccacacggagggacgtactgtgacggaacca

SEQ ID NO: 315471 - DNA, 53 bp, Artificial
  Synthetic oligonucleotide
acgtggtacagttagatttagtagattgggtaaaaaactaactatgtctactc

SEQ ID NO: 315472 - DNA, 51 bp, Artificial
  Synthetic oligonucleotide
acgtggtagaccctggtcctcgtgtataacggttcctctactcggtacatc

SEQ ID NO: 315473 - DNA, 56 bp, Artificial
  Synthetic oligonucleotide
acgtggtattggcactcccgtctcgacccaagcccgatagccgccaggatacggcg

SEQ ID NO: 315474 - DNA, 55 bp, Artificial
  Synthetic oligonucleotide
acgtggtcaaagccgcatacatgcggttcttcaaagagcaccaacgaacggagtt

SEQ ID NO: 315475 - DNA, 56 bp, Artificial
  Synthetic oligonucleotide
acgtggtgcaattccttaactatcaggttcactagccttggaaaacaggccacctc

SEQ ID NO: 315476 - DNA, 55 bp, Artificial
  Synthetic oligonucleotide
acgtggtgccagcagctgtaaacccggaagtcgctgacacacgtgtcttgtcacg

SEQ ID NO: 315477 - DNA, 53 bp, Artificial
  Synthetic oligonucleotide
acgtggtggagttgcccataaagattggaatgaatgccattgaggatggacct

SEQ ID NO: 315478 - DNA, 55 bp, Artificial
  Synthetic oligonucleotide
acgtggtggtacttccgaaccaactgcaattcttcacaaacgcatgggcggatcc

SEQ ID NO: 315479 - DNA, 60 bp, Artificial
  Synthetic oligonucleotide
acgtggttcaataattatcatatgaagtggagttgatttagatatggttgatagttacat

SEQ ID NO: 315480 - DNA, 59 bp, Artificial
  Synthetic oligonucleotide
acgtggttgcgtatgcgcggttgggaggacacatacgatgcctccgggatctatcgcga

SEQ ID NO: 315481 - DNA, 53 bp, Artificial
  Synthetic oligonucleotide
acgtgtaactagaattaattggaaaaggtggtggcaagtattttataccattg

SEQ ID NO: 315482 - DNA, 58 bp, Artificial
  Synthetic oligonucleotide
acgtgtaatgtacatgttgtagtaatggctaatttccttcctgattatgaaaggatta

SEQ ID NO: 315483 - DNA, 60 bp, Artificial
  Synthetic oligonucleotide
acgtgtactcaactttcctgacgattccaccgtcgacgcacatctcgccactctcactgg

SEQ ID NO: 315484 - DNA, 52 bp, Artificial
  Synthetic oligonucleotide
acgtgtagtgttggcagtgatctggcatttcggataattatgacttgtaacg

SEQ ID NO: 315485 - DNA, 55 bp, Artificial
  Synthetic oligonucleotide
acgtgtagttacgagtcaagttgtcagtgtcagccacgagagtccttgaccgcca

SEQ ID NO: 315486 - DNA, 58 bp, Artificial
  Synthetic oligonucleotide
acgtgtatacgtttaggctcttaattgacgatgaccggagttcagcgactcacctatc

SEQ ID NO: 315487 - DNA, 55 bp, Artificial
  Synthetic oligonucleotide
acgtgtatagcggaggatcctaggttttatgcgggcgagggcaacttaatacagg

SEQ ID NO: 315488 - DNA, 54 bp, Artificial
  Synthetic oligonucleotide
acgtgtattcacatctgactatgtcatctgcacgtccaactatccaacatctgt

SEQ ID NO: 315489 - DNA, 57 bp, Artificial
  Synthetic oligonucleotide
acgtgtcaagttcacgtagagcgggtctacggcgtagctaacccctgcaccagcctc

SEQ ID NO: 315490 - DNA, 60 bp, Artificial
  Synthetic oligonucleotide
acgtgtcaatggatgccgtgactcgagaattattcaagcgcgaagtgaaataccggctga

SEQ ID NO: 315491 - DNA, 57 bp, Artificial
  Synthetic oligonucleotide
acgtgtcacttcctcatggtcatctggtaattgggtctcggtttttaaatgagactg

SEQ ID NO: 315492 - DNA, 56 bp, Artificial
  Synthetic oligonucleotide
acgtgtcagacacctttgaagtgaggggaaccaaaaacaagtgtgttctgctaaga

SEQ ID NO: 315493 - DNA, 52 bp, Artificial
  Synthetic oligonucleotide
acgtgtcagcaaccccccgagatggcagttcatgcccggatgcaacacgcaa

SEQ ID NO: 315494 - DNA, 55 bp, Artificial
  Synthetic oligonucleotide
acgtgtcagcatttcatatggcgagcgtattcagaggctcggtcgcgttggtagg

SEQ ID NO: 315495 - DNA, 51 bp, Artificial
  Synthetic oligonucleotide
acgtgtcagcgctgtgctcccgtctgaaccgcttgctgtctcaccgcttcg

SEQ ID NO: 315496 - DNA, 55 bp, Artificial
  Synthetic oligonucleotide
acgtgtcaggagcaagaagtaacatcacattcacagtcaatcagacatcacgcct

SEQ ID NO: 315497 - DNA, 60 bp, Artificial
  Synthetic oligonucleotide
acgtgtcagttctgtgtcgctggagtgttcggctgagcgttccgtctcttgaaacacctg

SEQ ID NO: 315498 - DNA, 55 bp, Artificial
  Synthetic oligonucleotide
acgtgtccccactggtgttctctctcccctggtgtccgttggatttcctctacgc

SEQ ID NO: 315499 - DNA, 52 bp, Artificial
  Synthetic oligonucleotide
acgtgtccctcccgagctgtaactatcgacgccaggtctggcgttactcgtt

SEQ ID NO: 315500 - DNA, 55 bp, Artificial
  Synthetic oligonucleotide
acgtgtccgtaacattgtcaataagcaactcaggaaacagggtgtcacaggacca

SEQ ID NO: 315501 - DNA, 51 bp, Artificial
  Synthetic oligonucleotide
acgtgtctacaggtagtaggcaacgaatggtagcacactaaatatcggttg

SEQ ID NO: 315502 - DNA, 60 bp, Artificial
  Synthetic oligonucleotide
acgtgtctgagtggttggcggagaagacttctgttcgtgacacagtagtggtgtgttctg

SEQ ID NO: 315503 - DNA, 60 bp, Artificial
  Synthetic oligonucleotide
acgtgtgaaacgaggaagattaagctcttcactgtttgacatgagtatgagaccagctca

SEQ ID NO: 315504 - DNA, 56 bp, Artificial
  Synthetic oligonucleotide
acgtgtgaagggcggtccgtctctgcaacaggtcatgagagaccaacttaaacctt

SEQ ID NO: 315505 - DNA, 57 bp, Artificial
  Synthetic oligonucleotide
acgtgtgcatgcccgcacactatttggacgagataacgagtgaacacacgttgtact

SEQ ID NO: 315506 - DNA, 55 bp, Artificial
  Synthetic oligonucleotide
acgtgtgcgccttcgctccagcttccatgtcccgcgctgaccctcgcgtcataca

SEQ ID NO: 315507 - DNA, 60 bp, Artificial
  Synthetic oligonucleotide
acgtgtggactcgctgcttctgtgtttttccgtgtatgcctccgtgttgctgcttatgct

SEQ ID NO: 315508 - DNA, 50 bp, Artificial
  Synthetic oligonucleotide
acgtgtggctaaaaccaccgtaagagaggtagaagagatagcttttcgat

SEQ ID NO: 315509 - DNA, 60 bp, Artificial
  Synthetic oligonucleotide
acgtgtgttatctgtggagaaggatacgctgatggtagacgtggaaggatccatacctcc

SEQ ID NO: 315510 - DNA, 60 bp, Artificial
  Synthetic oligonucleotide
acgtgtgttcaagactacgttagataaatatctgagcttatcagaagcggagcgtgcgca

SEQ ID NO: 315511 - DNA, 50 bp, Artificial
  Synthetic oligonucleotide
acgtgttaaagaagtggacctcaagtcttctgacgatatctctattcgcg

SEQ ID NO: 315512 - DNA, 60 bp, Artificial
  Synthetic oligonucleotide
acgtgttattctctgacccatatcaaaatatcagtgttccaagggaggctcacttcataa

SEQ ID NO: 315513 - DNA, 55 bp, Artificial
  Synthetic oligonucleotide
acgtgttcgccgaagcaggacagaaccggctgaccacctattgaggaaaggccag

SEQ ID NO: 315514 - DNA, 55 bp, Artificial
  Synthetic oligonucleotide
acgtgttgacgagacagcaaccagtttagccaaagctaagtcatcaatgaccggc

SEQ ID NO: 315515 - DNA, 54 bp, Artificial
  Synthetic oligonucleotide
acgtgttgtagtgggtgtggcgtttccagcgtgcgtcctgatccggaggggggt

SEQ ID NO: 315516 - DNA, 60 bp, Artificial
  Synthetic oligonucleotide
acgttaaacgagttggacatcatgtaggtctcgagcttgtggagcgaggtgagcctgtga

SEQ ID NO: 315517 - DNA, 60 bp, Artificial
  Synthetic oligonucleotide
acgttaactatatactcaatatggatagaaatttgccatcaacagccagatatataagac

SEQ ID NO: 315518 - DNA, 59 bp, Artificial
  Synthetic oligonucleotide
acgttaagaaattgtttgacattaatgtcataaaatgtggctcatctttgcggatagtg

SEQ ID NO: 315519 - DNA, 56 bp, Artificial
  Synthetic oligonucleotide
acgttaagaactcccgaattggcgcattactccgacagcagggcaaggattggggc

SEQ ID NO: 315520 - DNA, 54 bp, Artificial
  Synthetic oligonucleotide
acgttaagccgaacctcaaaaccccaatgagaatcttcctgtcattaacactcc

SEQ ID NO: 315521 - DNA, 57 bp, Artificial
  Synthetic oligonucleotide
acgttaagttcaataaccgcattacttcgcgaatacggtgtggaaatagctcataca

SEQ ID NO: 315522 - DNA, 57 bp, Artificial
  Synthetic oligonucleotide
acgttaagttcgactggtcgggtacggctagtgttgctgctctgaaggttagttgca

SEQ ID NO: 315523 - DNA, 51 bp, Artificial
  Synthetic oligonucleotide
acgttaatgagggccgtcaggcagtgtccgcgtaaccagacacagccgtgc

SEQ ID NO: 315524 - DNA, 60 bp, Artificial
  Synthetic oligonucleotide
acgttaatgctcctagctctgatagctgtgctgactggtggagtgacactgttcttccta

SEQ ID NO: 315525 - DNA, 60 bp, Artificial
  Synthetic oligonucleotide
acgttaatggagtttgaggaaccacacgccacaaagcagtctgtgatagcattgggctca

SEQ ID NO: 315526 - DNA, 55 bp, Artificial
  Synthetic oligonucleotide
acgttacaaccttcgatccaattggtgattttaagcggcactgtctacaacgatg

SEQ ID NO: 315527 - DNA, 57 bp, Artificial
  Synthetic oligonucleotide
acgttacacctggaactaaacttactgtggcttatcttaatgagttatccaagcata

SEQ ID NO: 315528 - DNA, 58 bp, Artificial
  Synthetic oligonucleotide
acgttacaggactgtaactgttcaatctatcccggccacgtaacaggtcatcgcatgg

SEQ ID NO: 315529 - DNA, 55 bp, Artificial
  Synthetic oligonucleotide
acgttaccaacataaccgaagagcgcaccactattaacaaagtccccactgagga

SEQ ID NO: 315530 - DNA, 58 bp, Artificial
  Synthetic oligonucleotide
acgttaccaccagagaggagttcgcgtctgttgactcggattatgacatatccttaaa

SEQ ID NO: 315531 - DNA, 60 bp, Artificial
  Synthetic oligonucleotide
acgttacggcaatcttggaattgtgcgaaagagatatacacgtgctggcatgcgcaggta

SEQ ID NO: 315532 - DNA, 55 bp, Artificial
  Synthetic oligonucleotide
acgttactgtggtcacggaaacagaatggccatcctcgtggcccgcggaggcctc

SEQ ID NO: 315533 - DNA, 55 bp, Artificial
  Synthetic oligonucleotide
acgttagaagaccgagtcatgaaatctcttcacagggccggtatgttgactcgtg

SEQ ID NO: 315534 - DNA, 50 bp, Artificial
  Synthetic oligonucleotide
acgttagaatcttcaaccttgtatactagctcccatggtgtctcgtcttt

SEQ ID NO: 315535 - DNA, 54 bp, Artificial
  Synthetic oligonucleotide
acgttagacgccgaggggattcccaatgaggaacatctcccgacgtccagggaa

SEQ ID NO: 315536 - DNA, 59 bp, Artificial
  Synthetic oligonucleotide
acgttagacgtcagttcatgggacgtcatagtgaagtggcttttcgactgtatcgcaac

SEQ ID NO: 315537 - DNA, 52 bp, Artificial
  Synthetic oligonucleotide
acgttagagcttaacgtgatggccggatagacgaccggttttaaacgcacta

SEQ ID NO: 315538 - DNA, 57 bp, Artificial
  Synthetic oligonucleotide
acgttagaggaattggtagggaccagcgtgactcggtaatgactaagaccgcacata

SEQ ID NO: 315539 - DNA, 57 bp, Artificial
  Synthetic oligonucleotide
acgttagcaaggagcatttgtgagaagcttgaacaatccgggcttccagtcgggggc

SEQ ID NO: 315540 - DNA, 53 bp, Artificial
  Synthetic oligonucleotide
acgttagtggagcaaaatggaatgaaacattagaacgggtaaagacaaaatta

SEQ ID NO: 315541 - DNA, 55 bp, Artificial
  Synthetic oligonucleotide
acgttataccaagcactattactgtacactcttggactcagatccaagtgcccac

SEQ ID NO: 315542 - DNA, 55 bp, Artificial
  Synthetic oligonucleotide
acgttatcagctggtcgtccaaccattaaccacccaacctttgtagggagtgagc

SEQ ID NO: 315543 - DNA, 58 bp, Artificial
  Synthetic oligonucleotide
acgttatcgcgctatgttatttgaattttgaattggttgcacggatatctataattgg

SEQ ID NO: 315544 - DNA, 56 bp, Artificial
  Synthetic oligonucleotide
acgttatcttaaagatcgtgaaggtaaacagttgaagcgtgtaggagttgctgaat

SEQ ID NO: 315545 - DNA, 51 bp, Artificial
  Synthetic oligonucleotide
acgttatgagtaactaccgtaattacacaccagacgaaattaaggatgctg

SEQ ID NO: 315546 - DNA, 55 bp, Artificial
  Synthetic oligonucleotide
acgttatgtgaggcttgtaatcaggataatcgtatgtagcacctaagatgcgaga

SEQ ID NO: 315547 - DNA, 56 bp, Artificial
  Synthetic oligonucleotide
acgttattcgatcgcgtttcctgacgcacgaggtttttgatctgacgtccgactta

SEQ ID NO: 315548 - DNA, 55 bp, Artificial
  Synthetic oligonucleotide
acgttatttcaagaaacccatatgcgacagttatggcaggtttggcggagaaagg

SEQ ID NO: 315549 - DNA, 57 bp, Artificial
  Synthetic oligonucleotide
acgttcaaagcacatgcgacatcttgtgcttcgtatcggcatgcaatgatttctctg

SEQ ID NO: 315550 - DNA, 57 bp, Artificial
  Synthetic oligonucleotide
acgttcaacaagcaggtataatgatgcagagaggcaattttaaggccccgagaaaaa

SEQ ID NO: 315551 - DNA, 60 bp, Artificial
  Synthetic oligonucleotide
acgttcacatcgccaatgcatgcacggcgtatgattaggtcgaaaactgttcaccccatt

SEQ ID NO: 315552 - DNA, 55 bp, Artificial
  Synthetic oligonucleotide
acgttcacgatggacttccggcacggcaagtccgacccgctcccctacactgcca

SEQ ID NO: 315553 - DNA, 57 bp, Artificial
  Synthetic oligonucleotide
acgttcactgctgtatgccgaatttggatgttcgcgatatagctcgtcacgaagggc

SEQ ID NO: 315554 - DNA, 60 bp, Artificial
  Synthetic oligonucleotide
acgttcagaaacaagcgctctagcaaggctatgataaatcctagccttctatgtgataac

SEQ ID NO: 315555 - DNA, 55 bp, Artificial
  Synthetic oligonucleotide
acgttcaggccaaaatattcagccatgcatcacctgcatccaatgatagtatgca

SEQ ID NO: 315556 - DNA, 54 bp, Artificial
  Synthetic oligonucleotide
acgttcagtgtctttggataaaactattgacaactttttgcgtttaactgaaca

SEQ ID NO: 315557 - DNA, 53 bp, Artificial
  Synthetic oligonucleotide
acgttcagttcttggacgaaacggccgattgggcaaggtacaaaagtgagttc

SEQ ID NO: 315558 - DNA, 53 bp, Artificial
  Synthetic oligonucleotide
acgttcatccttttactgcctggaatatttcccttctcagatgctgagaacgg

SEQ ID NO: 315559 - DNA, 54 bp, Artificial
  Synthetic oligonucleotide
acgttcatgtatgtacgcatgccagttatgcaaacgcatcaagaacggtgattt

SEQ ID NO: 315560 - DNA, 60 bp, Artificial
  Synthetic oligonucleotide
acgttcatttccagatatcgtcagattgcgtattacttttacaacccggatgcagctgat

SEQ ID NO: 315561 - DNA, 60 bp, Artificial
  Synthetic oligonucleotide
acgttcatttgtcgagacagtcctacgtgctcagcgtacaaaggacatctattctctccg

SEQ ID NO: 315562 - DNA, 53 bp, Artificial
  Synthetic oligonucleotide
acgttccaaacgcaagtgtccacaacctcacttccgcaatatttctacgccta

SEQ ID NO: 315563 - DNA, 58 bp, Artificial
  Synthetic oligonucleotide
acgttccaaagaggggacctgtcagcaaagagcacattgactgggccagagatcttgc

SEQ ID NO: 315564 - DNA, 58 bp, Artificial
  Synthetic oligonucleotide
acgttccaaggggatgtgaaggcccctgtaaagtgcagtctgttgaatcgaggcacga

SEQ ID NO: 315565 - DNA, 60 bp, Artificial
  Synthetic oligonucleotide
acgttccactcattatcggacctttagacgatcgatactcacgtccaatgccatatgttc

SEQ ID NO: 315566 - DNA, 58 bp, Artificial
  Synthetic oligonucleotide
acgttccagaccccacagagggccttgttcgcacagtctcagactaccgcctcactta

SEQ ID NO: 315567 - DNA, 51 bp, Artificial
  Synthetic oligonucleotide
acgttccagacgttaatgaaaataatccgattccattaggaagacgtgatg

SEQ ID NO: 315568 - DNA, 58 bp, Artificial
  Synthetic oligonucleotide
acgttcccgatgtggctgagttagctcttcaaatagacagacttaccttatcgtgtgt

SEQ ID NO: 315569 - DNA, 60 bp, Artificial
  Synthetic oligonucleotide
acgttccgaagtcaaacgatttaagtgagatggtgcaacatgagagcgcgttactacaca

SEQ ID NO: 315570 - DNA, 55 bp, Artificial
  Synthetic oligonucleotide
acgttccgctgttctaacccagtatgggatggatgcacttcttgaagctagactg

SEQ ID NO: 315571 - DNA, 60 bp, Artificial
  Synthetic oligonucleotide
acgttccgttcactactttcaacatcgatgtcgctgaattcagacgctgcataacacatg

SEQ ID NO: 315572 - DNA, 59 bp, Artificial
  Synthetic oligonucleotide
acgttcctcggagttcgattgctaacctcattatgaacatagcgacgtgcttgccaacg

SEQ ID NO: 315573 - DNA, 58 bp, Artificial
  Synthetic oligonucleotide
acgttcgagaggcaatcttccctgaagatcctgagggagagatagcctcgaagtttat

SEQ ID NO: 315574 - DNA, 53 bp, Artificial
  Synthetic oligonucleotide
acgttcgagctgcctttgggttttactccttgaacccttcagaagaattcttc

SEQ ID NO: 315575 - DNA, 55 bp, Artificial
  Synthetic oligonucleotide
acgttcgagtacatgttgtccaccgtcaacggaatggaccttgcgcggcactact

SEQ ID NO: 315576 - DNA, 53 bp, Artificial
  Synthetic oligonucleotide
acgttcgcgtgcacgcgggacccgatggactttcgttcacccacctacggttg

SEQ ID NO: 315577 - DNA, 52 bp, Artificial
  Synthetic oligonucleotide
acgttcggaagatataagagaccccgatgttaagattttaacgtataaccga

SEQ ID NO: 315578 - DNA, 60 bp, Artificial
  Synthetic oligonucleotide
acgttcgtaaaatacaatagcgcactggaaaatgatacatccaggtcagcgcaacgctct

SEQ ID NO: 315579 - DNA, 59 bp, Artificial
  Synthetic oligonucleotide
acgttcgtgtccgggctctttcgcgagagctgcagcgcgcacttttaccgtggtgtcga

SEQ ID NO: 315580 - DNA, 56 bp, Artificial
  Synthetic oligonucleotide
acgttcgttacccggctgtctacttcgggaaacctagtaccatcatgaagactgca

SEQ ID NO: 315581 - DNA, 55 bp, Artificial
  Synthetic oligonucleotide
acgttctcatgtttgtgaacgtatgaatactaatgaagtcgttggaatagcagac

SEQ ID NO: 315582 - DNA, 53 bp, Artificial
  Synthetic oligonucleotide
acgttctgactgaacgtaccctcccacggacaaaccctcgctttcatttctta

SEQ ID NO: 315583 - DNA, 53 bp, Artificial
  Synthetic oligonucleotide
acgttctgagaacgtcagaatacgtcaggttgaagttgtgttcatcgtagacg

SEQ ID NO: 315584 - DNA, 50 bp, Artificial
  Synthetic oligonucleotide
acgttcttaaagcgagtagcgtcacgcgcgctccatatgtttttgggcga

SEQ ID NO: 315585 - DNA, 49 bp, Artificial
  Synthetic oligonucleotide
acgttgaaggacccaaagggctacagcccccacccaaaccagaacccgg

SEQ ID NO: 315586 - DNA, 50 bp, Artificial
  Synthetic oligonucleotide
acgttgaatagtatcaggcatccagcgaattatacgcggtggggtttcga

SEQ ID NO: 315587 - DNA, 56 bp, Artificial
  Synthetic oligonucleotide
acgttgacggcaacactagccctgattgggtgccacgggagcccttgggcctggat

SEQ ID NO: 315588 - DNA, 53 bp, Artificial
  Synthetic oligonucleotide
acgttgacggtaggaatgttaaactatggagatctagtccgttcgtagcgagt

SEQ ID NO: 315589 - DNA, 59 bp, Artificial
  Synthetic oligonucleotide
acgttgagcagcgctctgctccgttcacaagagctcgccttacaaaagcaggccttaga

SEQ ID NO: 315590 - DNA, 55 bp, Artificial
  Synthetic oligonucleotide
acgttgagtacagcgccacaggcgaccagacatcaggcaacaaccgtgtgatagt

SEQ ID NO: 315591 - DNA, 59 bp, Artificial
  Synthetic oligonucleotide
acgttgatatgcctccagaaattagcaagaaaatgtacatcgctaaggaaggatattgt

SEQ ID NO: 315592 - DNA, 56 bp, Artificial
  Synthetic oligonucleotide
acgttgattgcggcggagacaaaattaggcgatgtttactttactctacgatcttg

SEQ ID NO: 315593 - DNA, 57 bp, Artificial
  Synthetic oligonucleotide
acgttgatttattgatggctaggcatgactactttggaaaggaattatgtaaatctt

SEQ ID NO: 315594 - DNA, 53 bp, Artificial
  Synthetic oligonucleotide
acgttgcaacaaattaaaggtcagtttagaaccttgtctaacgagatgagtcg

SEQ ID NO: 315595 - DNA, 58 bp, Artificial
  Synthetic oligonucleotide
acgttgcaagttacaatgacgtagattcgttatcccatgctctaactgaacttaagta

SEQ ID NO: 315596 - DNA, 52 bp, Artificial
  Synthetic oligonucleotide
acgttgcaccgtacgggctaattggttactgatcggcaatattcctgcgacc

SEQ ID NO: 315597 - DNA, 60 bp, Artificial
  Synthetic oligonucleotide
acgttgcgagtggtaagagccccactgcgacgatcttgaatcctttgatctgcgtaggga

SEQ ID NO: 315598 - DNA, 55 bp, Artificial
  Synthetic oligonucleotide
acgttgcggagggtgaacgatggcgcgcaaaccgcttgacatgcccaactcggag

SEQ ID NO: 315599 - DNA, 51 bp, Artificial
  Synthetic oligonucleotide
acgttgcgttcgtgaagaacaaacgatattccgtgcaggactcgggtgggc

SEQ ID NO: 315600 - DNA, 55 bp, Artificial
  Synthetic oligonucleotide
acgttgctatgcctattgcttgattctggctctctatgatttctatggtgcggat

SEQ ID NO: 315601 - DNA, 58 bp, Artificial
  Synthetic oligonucleotide
acgttgctggtgacccctgacgttacgtgtggttcagagcaagtatactggagtgttc

SEQ ID NO: 315602 - DNA, 54 bp, Artificial
  Synthetic oligonucleotide
acgttggcagctggtcgtcctaccattaaccacccaacctttgtggggagtgaa

SEQ ID NO: 315603 - DNA, 59 bp, Artificial
  Synthetic oligonucleotide
acgttggccatagaatagacaatccacaagatgctattgaagcccaagttaaagttgaa

SEQ ID NO: 315604 - DNA, 52 bp, Artificial
  Synthetic oligonucleotide
acgttgtaaacctgggtacacgttcacatctattaccctaaagccaccaaaa

SEQ ID NO: 315605 - DNA, 60 bp, Artificial
  Synthetic oligonucleotide
acgttgtaccaggcgtcattactgtagaccttagggctagaatctagatgaccacacaga

SEQ ID NO: 315606 - DNA, 54 bp, Artificial
  Synthetic oligonucleotide
acgttgtacgcaagacatgtcaataccgggagtaccggacccataaagagcact

SEQ ID NO: 315607 - DNA, 55 bp, Artificial
  Synthetic oligonucleotide
acgttgtaggtaattttcatgcttatatgcagaagtgggcggcctctgggctctc

SEQ ID NO: 315608 - DNA, 56 bp, Artificial
  Synthetic oligonucleotide
acgttgtatcatctctaaagatacaatcccctttttatgcaactgcaaattttggg

SEQ ID NO: 315609 - DNA, 56 bp, Artificial
  Synthetic oligonucleotide
acgttgtatggtagaaagctgcagaggcctaacggccaccaaacaaaagactccag

SEQ ID NO: 315610 - DNA, 55 bp, Artificial
  Synthetic oligonucleotide
acgttgtattactatcaacagacggacgaagcgaacaaatggattgcgatgggag

SEQ ID NO: 315611 - DNA, 60 bp, Artificial
  Synthetic oligonucleotide
acgttgtcggttcgagtcagcgcaacatatcgcagatcatgtgacggatataccctgcgc

SEQ ID NO: 315612 - DNA, 56 bp, Artificial
  Synthetic oligonucleotide
acgttgttatccagcggttacgaactagaatatcagaaggctttgaatagttggat

SEQ ID NO: 315613 - DNA, 59 bp, Artificial
  Synthetic oligonucleotide
acgttgttgaagtcgtcttcagcgacctcaccgctcaaagagctggtgataaattggtc

SEQ ID NO: 315614 - DNA, 51 bp, Artificial
  Synthetic oligonucleotide
acgttgttgctaggccacctgtggttgtggatactgttgcaccctccgatc

SEQ ID NO: 315615 - DNA, 55 bp, Artificial
  Synthetic oligonucleotide
acgttgtttgactctacctgcgttctcaaccattcgtaggaagtggttggactct

SEQ ID NO: 315616 - DNA, 57 bp, Artificial
  Synthetic oligonucleotide
acgttgttttcactgcgcgtcatggtggctcggatctggaaatccccaacctgacga

SEQ ID NO: 315617 - DNA, 52 bp, Artificial
  Synthetic oligonucleotide
acgtttaaagatactagtttacggcatgcagtattagattatgttagggtag

SEQ ID NO: 315618 - DNA, 52 bp, Artificial
  Synthetic oligonucleotide
acgtttaacccaccaatagattattggatgttgttagcgcctacgacagctg

SEQ ID NO: 315619 - DNA, 59 bp, Artificial
  Synthetic oligonucleotide
acgtttaaggatcttgatcacgattcatgtaacggtgtttatggcaacattagcaagaa

SEQ ID NO: 315620 - DNA, 59 bp, Artificial
  Synthetic oligonucleotide
acgtttaatgtctacgggctttcgtggactgatgaaggattgtcaggactagtagctgc

SEQ ID NO: 315621 - DNA, 58 bp, Artificial
  Synthetic oligonucleotide
acgtttacaaagcattgtcgatatacagctgcattgcaagcagtgttgtgctagtagg

SEQ ID NO: 315622 - DNA, 54 bp, Artificial
  Synthetic oligonucleotide
acgtttacaacccgcaggacaagtagaaaattaacaccaatcttgcgcgcttgg

SEQ ID NO: 315623 - DNA, 55 bp, Artificial
  Synthetic oligonucleotide
acgtttacacaatctgagaaagccgatctgtacaaagcgttgcgtgcgaaaggac

SEQ ID NO: 315624 - DNA, 55 bp, Artificial
  Synthetic oligonucleotide
acgtttactaccactggtataacatctgctacgatacagtgcaatcgtgctacgc

SEQ ID NO: 315625 - DNA, 54 bp, Artificial
  Synthetic oligonucleotide
acgtttactattggttcgcaatgtttataaatacccgcgaagctcaagggtatg

SEQ ID NO: 315626 - DNA, 57 bp, Artificial
  Synthetic oligonucleotide
acgtttagtcacgatggtaatcctcccatgcaacatttaactcgacaacgtcaagta

SEQ ID NO: 315627 - DNA, 55 bp, Artificial
  Synthetic oligonucleotide
acgtttagtctcacgccgtcttccaacgcttctgccgccccacgacgtacggtgc

SEQ ID NO: 315628 - DNA, 52 bp, Artificial
  Synthetic oligonucleotide
acgtttagtgccggatccttatgtagcgtattccgggcagactatacgtcaa

SEQ ID NO: 315629 - DNA, 58 bp, Artificial
  Synthetic oligonucleotide
acgtttatataccgatgctcgtctttcagactgttgcatccggctgtcgtaatcacta

SEQ ID NO: 315630 - DNA, 55 bp, Artificial
  Synthetic oligonucleotide
acgtttatgaccatcttactccactgcgggactgggcccacatgggcctacgcga

SEQ ID NO: 315631 - DNA, 60 bp, Artificial
  Synthetic oligonucleotide
acgtttattgccagtagaaatcagaagattggatatcttcaatctaatattaatgaacat

SEQ ID NO: 315632 - DNA, 56 bp, Artificial
  Synthetic oligonucleotide
acgtttcaaatttacttcacggaagcagattagataatttatagacgatacttgta

SEQ ID NO: 315633 - DNA, 58 bp, Artificial
  Synthetic oligonucleotide
acgtttcaagggaactgtgaagatacaacgtgttcaagctgatgttaatatggatggt

SEQ ID NO: 315634 - DNA, 52 bp, Artificial
  Synthetic oligonucleotide
acgtttcaatagaattgttaatgcatggctcgcgcacgcagaacaaagcgtg

SEQ ID NO: 315635 - DNA, 60 bp, Artificial
  Synthetic oligonucleotide
acgtttcagacgaactcgttgggtgctgatcgatcccatcgtgcgagaagagggctggcc

SEQ ID NO: 315636 - DNA, 55 bp, Artificial
  Synthetic oligonucleotide
acgtttcctgaggaagccttgcccatagttcctacaaaatgcagaactctccctt

SEQ ID NO: 315637 - DNA, 56 bp, Artificial
  Synthetic oligonucleotide
acgtttctacaaggtcaatggtagcggaaggtaagctaccgatggaagggctgatc

SEQ ID NO: 315638 - DNA, 60 bp, Artificial
  Synthetic oligonucleotide
acgtttgaagtgcaacgctttgatttctgcccaatatcacttcgtgagcttgccacccca

SEQ ID NO: 315639 - DNA, 58 bp, Artificial
  Synthetic oligonucleotide
acgtttgacgaactatttggtgcgataatccacagccatggaaccctgtctatagttc

SEQ ID NO: 315640 - DNA, 59 bp, Artificial
  Synthetic oligonucleotide
acgtttgacgacttatttggagcgaggatccatagtcacggcaatttgacaatcactcc

SEQ ID NO: 315641 - DNA, 55 bp, Artificial
  Synthetic oligonucleotide
acgtttgatgcagggaagccacaccaccagttcttgcatcagaatatacttgcac

SEQ ID NO: 315642 - DNA, 53 bp, Artificial
  Synthetic oligonucleotide
acgtttgcagaggtttagaacgcacgtacctaagatcaaagttcttaagaagt

SEQ ID NO: 315643 - DNA, 56 bp, Artificial
  Synthetic oligonucleotide
acgtttgcataggcctgccttaacatctcgcaggggtactgtgcgtttcagtcgcc

SEQ ID NO: 315644 - DNA, 55 bp, Artificial
  Synthetic oligonucleotide
acgtttggcctggttgtcgtctctaggtatcttgaacccactaggtatagtgtgg

SEQ ID NO: 315645 - DNA, 50 bp, Artificial
  Synthetic oligonucleotide
acgtttggtgcacataggccacttcacgtgccatgttcgatatgatagtt

SEQ ID NO: 315646 - DNA, 51 bp, Artificial
  Synthetic oligonucleotide
acgtttgtacgagccacgctcccggctgactcgatgcgaccgcgagtattg

SEQ ID NO: 315647 - DNA, 60 bp, Artificial
  Synthetic oligonucleotide
acgtttgtcaacagtggtcttcagagactcacagagcctgaagtactcagactcctcaaa

SEQ ID NO: 315648 - DNA, 54 bp, Artificial
  Synthetic oligonucleotide
acgtttgtgaaggaggagagttgaaacggaggaacccatggttctggagacttg

SEQ ID NO: 315649 - DNA, 59 bp, Artificial
  Synthetic oligonucleotide
acgttttaagagcgccatattcttggtttgtgaagatgtggggtgtcggagcagatcca

SEQ ID NO: 315650 - DNA, 55 bp, Artificial
  Synthetic oligonucleotide
acgttttagattggtgcacgcagacatactggtgggaaacgtcacagatcttccc

SEQ ID NO: 315651 - DNA, 53 bp, Artificial
  Synthetic oligonucleotide
acgttttagcagactgggaacaaagggtaagatttctaccagaagtggtaata

SEQ ID NO: 315652 - DNA, 60 bp, Artificial
  Synthetic oligonucleotide
acgttttagcctccaccaactccagtcggatcacaccacccacagtggctcacagtgatg

SEQ ID NO: 315653 - DNA, 60 bp, Artificial
  Synthetic oligonucleotide
acgttttcaatagtccacaggcgcgaagcaagatatcagcagcgttcggcataaagccta

SEQ ID NO: 315654 - DNA, 55 bp, Artificial
  Synthetic oligonucleotide
acgttttccaagcctcagccgaaggttggacgtgctcggagattcctggtcaacc

SEQ ID NO: 315655 - DNA, 49 bp, Artificial
  Synthetic oligonucleotide
acgttttcgaaacggtggtaaacggttggagcggccgggtgccgtgtac

SEQ ID NO: 315656 - DNA, 52 bp, Artificial
  Synthetic oligonucleotide
acgttttcgacgtattccctttcgttttgcaatcctgtgtttaggtttgata

SEQ ID NO: 315657 - DNA, 54 bp, Artificial
  Synthetic oligonucleotide
acgttttgccgaaccgtgtaacgtgttcgccgaagcaggacagaaccggctgac

SEQ ID NO: 315658 - DNA, 55 bp, Artificial
  Synthetic oligonucleotide
acgttttggcaattcttggaaaacctgcacacgaggacttatttgatgaggtttc

SEQ ID NO: 315659 - DNA, 50 bp, Artificial
  Synthetic oligonucleotide
acgttttggctcctcgacaccctttaaattaataggcaccagcgtcactg

SEQ ID NO: 315660 - DNA, 54 bp, Artificial
  Synthetic oligonucleotide
acgttttgtaggcgtagcctgaaacggcaccactcctagcggaagatcaactca

SEQ ID NO: 315661 - DNA, 53 bp, Artificial
  Synthetic oligonucleotide
acgttttgtctcaagttatgaaaagagcgtttagcaggaaaaacgagattctt

SEQ ID NO: 315662 - DNA, 54 bp, Artificial
  Synthetic oligonucleotide
acgttttgttagggttaataattatgttgtctataatcaacaagaggccggcaa

SEQ ID NO: 315663 - DNA, 52 bp, Artificial
  Synthetic oligonucleotide
acgtttttactatcgacgttctcccaaactttgtcccaatcctctgctttgt

SEQ ID NO: 315664 - DNA, 57 bp, Artificial
  Synthetic oligonucleotide
acgtttttggatccccaccctttataatgtcgagagcctctcccgcacttgctgcat

SEQ ID NO: 315665 - DNA, 54 bp, Artificial
  Synthetic oligonucleotide
actaaaaatagtttaagtaactatctattgtagttccattcctatctattgtag

SEQ ID NO: 315666 - DNA, 57 bp, Artificial
  Synthetic oligonucleotide
actaaaacgacctgatcttggcattttggctgtcgttctgaatcgggggacactcaa

SEQ ID NO: 315667 - DNA, 49 bp, Artificial
  Synthetic oligonucleotide
actaaaactcacttcaaaaacgctgtacccaaaacaggttaaaggggat

SEQ ID NO: 315668 - DNA, 59 bp, Artificial
  Synthetic oligonucleotide
actaaaatctgggtacaaagactggatcttatggatatcctttgccatatcatgctttt

SEQ ID NO: 315669 - DNA, 56 bp, Artificial
  Synthetic oligonucleotide
actaaaatttcatgggcacgtctttgggaacgatgaaatgctaacaaagttactca

SEQ ID NO: 315670 - DNA, 60 bp, Artificial
  Synthetic oligonucleotide
actaaacaagcaaaacagtggttctataggcatcactatgaagcagtcaatcctagggta

SEQ ID NO: 315671 - DNA, 54 bp, Artificial
  Synthetic oligonucleotide
actaaacacagcttgactgaggaaggcatgcagatctacaggaaagtctttagg

SEQ ID NO: 315672 - DNA, 56 bp, Artificial
  Synthetic oligonucleotide
actaaacacgtacaaaggctactggatataaaggttatcagaccatctactagtaa

SEQ ID NO: 315673 - DNA, 56 bp, Artificial
  Synthetic oligonucleotide
actaaacacgtttgggatctcatgccaacctgtaattatggtttattcgggtatgc

SEQ ID NO: 315674 - DNA, 56 bp, Artificial
  Synthetic oligonucleotide
actaaacagcctgcaatcctcgtccacaccccagggcccaagatgcccgggcctcg

SEQ ID NO: 315675 - DNA, 57 bp, Artificial
  Synthetic oligonucleotide
actaaacatagcaatgggaccattaaagacagaacaccatataggtctctaattcgt

SEQ ID NO: 315676 - DNA, 58 bp, Artificial
  Synthetic oligonucleotide
actaaaccactatagtgtgctcaagcccgcggaggtgaggcccccgcggggcatgtgc

SEQ ID NO: 315677 - DNA, 55 bp, Artificial
  Synthetic oligonucleotide
actaaaccatattactcctacttcgttatgaaagccacaagctctgctgacggtt

SEQ ID NO: 315678 - DNA, 53 bp, Artificial
  Synthetic oligonucleotide
actaaacctaatcgccaaggcctaggttactattccgcttcctactctgaccc

SEQ ID NO: 315679 - DNA, 60 bp, Artificial
  Synthetic oligonucleotide
actaaacctgttcctgcaaggtgggaagatgcttcattcacagattctagtgtggaagag

SEQ ID NO: 315680 - DNA, 54 bp, Artificial
  Synthetic oligonucleotide
actaaacgttatctaggcacttactcgagcgctgatgatacgcagttacaaaat

SEQ ID NO: 315681 - DNA, 53 bp, Artificial
  Synthetic oligonucleotide
actaaagagcccggaggctgcgtgactttcacggtgcgtcgctacaatcccca

SEQ ID NO: 315682 - DNA, 54 bp, Artificial
  Synthetic oligonucleotide
actaaagcaaatttctacgctaggacactatggaacgaaacaacttcggacaag

SEQ ID NO: 315683 - DNA, 60 bp, Artificial
  Synthetic oligonucleotide
actaaagccaacacttccgtgatagctcgatatctgcgcaataactgtgatcacgaatag

SEQ ID NO: 315684 - DNA, 55 bp, Artificial
  Synthetic oligonucleotide
actaaagccaggccagacattgcgaataagatccaatggaaatctaattgcccca

SEQ ID NO: 315685 - DNA, 55 bp, Artificial
  Synthetic oligonucleotide
actaaagccgggtacccttataattataacaccactgctagtgaccaactgctcg

SEQ ID NO: 315686 - DNA, 56 bp, Artificial
  Synthetic oligonucleotide
actaaagcgttgggaggtccttagcaactcgctagagcacagggttacgatggtta

SEQ ID NO: 315687 - DNA, 53 bp, Artificial
  Synthetic oligonucleotide
actaaaggaaactcatatatatgacctttgaagtagatatcgtatatttcaat

SEQ ID NO: 315688 - DNA, 54 bp, Artificial
  Synthetic oligonucleotide
actaaaggtcgaaccgttgggcgacaagcgacaagtcttgacgataaagcccaa

SEQ ID NO: 315689 - DNA, 59 bp, Artificial
  Synthetic oligonucleotide
actaaagtagtagctgcttcatgcacaaggatgatggaaacgcaaacttctacttggtt

SEQ ID NO: 315690 - DNA, 53 bp, Artificial
  Synthetic oligonucleotide
actaaagtcagatccgaaaaccttgagagatttcgtaaatcaaaataacccaa

SEQ ID NO: 315691 - DNA, 57 bp, Artificial
  Synthetic oligonucleotide
actaaagtgggagcccaaaccgagcgaaatctcaatcggaggagggctctctgcgag

SEQ ID NO: 315692 - DNA, 56 bp, Artificial
  Synthetic oligonucleotide
actaaagtgttcaggggtgaacaccactgggtaaaggaagcgcacgaggcatccta

SEQ ID NO: 315693 - DNA, 58 bp, Artificial
  Synthetic oligonucleotide
actaaagttgtgaatgtcaaaacaattaatggatcaccgtcagtaacacaagctgtta

SEQ ID NO: 315694 - DNA, 54 bp, Artificial
  Synthetic oligonucleotide
actaaatactaattttggtacaacagtaataactctagaacctgatcctactaa

SEQ ID NO: 315695 - DNA, 55 bp, Artificial
  Synthetic oligonucleotide
actaaatactcccggtggttgtctcaatcaagagtgcgtaactcagtcagctgtc

SEQ ID NO: 315696 - DNA, 60 bp, Artificial
  Synthetic oligonucleotide
actaaatataaaggatggtgcttggattgttgtcagcatactgatctaacatattgtcga

SEQ ID NO: 315697 - DNA, 57 bp, Artificial
  Synthetic oligonucleotide
actaaatcactatctgctggggtacgctcggtgtacaataacgttaccgccactcaa

SEQ ID NO: 315698 - DNA, 60 bp, Artificial
  Synthetic oligonucleotide
actaaatctacatttcatgctgtcccggttcatatctgggatcggctcatgctttttggt

SEQ ID NO: 315699 - DNA, 60 bp, Artificial
  Synthetic oligonucleotide
actaaatctggactgtgcattaaaaccatgcaatcatgagttaaaggttggaaatgcaag

SEQ ID NO: 315700 - DNA, 55 bp, Artificial
  Synthetic oligonucleotide
actaaatgatttcgatgccgtaaccatgcggttgagggacaacgaatttaactta

SEQ ID NO: 315701 - DNA, 59 bp, Artificial
  Synthetic oligonucleotide
actaaatgcatctagtgctaacttaggaaacacatacccagccgatacttcttacatag

SEQ ID NO: 315702 - DNA, 58 bp, Artificial
  Synthetic oligonucleotide
actaaatgtaaaggatggtgtttagattgctgtcaacatactgacttaacttattgta

SEQ ID NO: 315703 - DNA, 59 bp, Artificial
  Synthetic oligonucleotide
actaaatgtccaattcaagctgtgatagtcgttcctcgtgcttagtaactaaggatgaa

SEQ ID NO: 315704 - DNA, 59 bp, Artificial
  Synthetic oligonucleotide
actaaattcacacgcagcaggaccaggtttaatcactcgcgactacagttctttcacag

SEQ ID NO: 315705 - DNA, 60 bp, Artificial
  Synthetic oligonucleotide
actaaattgatggctcctgatactgtgtctgacaatgtatctatagttgtttggaagtgg

SEQ ID NO: 315706 - DNA, 55 bp, Artificial
  Synthetic oligonucleotide
actaaatttacatgacaacttcgaatctttatgggatacgataacaacttcgaat

SEQ ID NO: 315707 - DNA, 60 bp, Artificial
  Synthetic oligonucleotide
actaacaacaggcactacaccagctgataaacaacgtcgagtcttagttgcatacacgct

SEQ ID NO: 315708 - DNA, 58 bp, Artificial
  Synthetic oligonucleotide
actaacaacatactgccatatactccagctgcgccgttgggggaaacactgggctttg

SEQ ID NO: 315709 - DNA, 59 bp, Artificial
  Synthetic oligonucleotide
actaacaagaattgatactttcatcccatagtgcctcattagggcccatgaggttacag

SEQ ID NO: 315710 - DNA, 59 bp, Artificial
  Synthetic oligonucleotide
actaacaatactgctttgctactaacactatggttcgagcacgtagaaccaaacgtgca

SEQ ID NO: 315711 - DNA, 60 bp, Artificial
  Synthetic oligonucleotide
actaacaattctcccaacttccactactgctagcaagctttcttgcgacatgaaatctgt

SEQ ID NO: 315712 - DNA, 58 bp, Artificial
  Synthetic oligonucleotide
actaacaattgttgcgccaaaggcgtccggaaagtcatatttcagtaattatatggca

SEQ ID NO: 315713 - DNA, 58 bp, Artificial
  Synthetic oligonucleotide
actaacacccacattatggctactgaggcttccaactacgcccagtatcgtgttatcc

SEQ ID NO: 315714 - DNA, 60 bp, Artificial
  Synthetic oligonucleotide
actaacaccgcagagcaggggcgcgatatatataggccgcagggaccgataaggatgtcc

SEQ ID NO: 315715 - DNA, 60 bp, Artificial
  Synthetic oligonucleotide
actaacacgactattacgaagcatatgaagtttgatatggcgctaatgggcagttctagt

SEQ ID NO: 315716 - DNA, 57 bp, Artificial
  Synthetic oligonucleotide
actaacacggatacgccagtgctaacccatcaaattatgtatgtgcctcccggtggt

SEQ ID NO: 315717 - DNA, 55 bp, Artificial
  Synthetic oligonucleotide
actaacacggatgagacacaggtagatgccgtgatgtttgacaatggcgacggtc

SEQ ID NO: 315718 - DNA, 55 bp, Artificial
  Synthetic oligonucleotide
actaacacgtgtctgttctggttagttagagatagacgtccttacggaagtagtc

SEQ ID NO: 315719 - DNA, 53 bp, Artificial
  Synthetic oligonucleotide
actaacactaactcaacacattcctacctcatcccaatacccttcccttttat

SEQ ID NO: 315720 - DNA, 57 bp, Artificial
  Synthetic oligonucleotide
actaacactggtaagtatagagtgaatccctctaataatgctttattcacctggtta

SEQ ID NO: 315721 - DNA, 57 bp, Artificial
  Synthetic oligonucleotide
actaacatccaagtagaagagagggcaaatagagaattcaataatttgaccaaaaga

SEQ ID NO: 315722 - DNA, 60 bp, Artificial
  Synthetic oligonucleotide
actaacatcgaattggacatgaccaagtacaccatggctctcaagcggtatggtcttctc

SEQ ID NO: 315723 - DNA, 60 bp, Artificial
  Synthetic oligonucleotide
actaacatgtggatatatatagaatgtaacactaacatataaatctatataatgtgaaat

SEQ ID NO: 315724 - DNA, 54 bp, Artificial
  Synthetic oligonucleotide
actaacatgttgctgaacgttcccctactgggccgcacagtgactcgtcctata

SEQ ID NO: 315725 - DNA, 56 bp, Artificial
  Synthetic oligonucleotide
actaaccactcaggaggggatatagaaattacaacacatagttttaactgcagagg

SEQ ID NO: 315726 - DNA, 60 bp, Artificial
  Synthetic oligonucleotide
actaaccagcaaagagcatctgcagggcaaatcagcgtgcagcccacattctctgtgcag

SEQ ID NO: 315727 - DNA, 54 bp, Artificial
  Synthetic oligonucleotide
actaaccagggtgcaaatgggcttactgcgacagttccggtcaactcaaccttt

SEQ ID NO: 315728 - DNA, 50 bp, Artificial
  Synthetic oligonucleotide
actaacccataaatttggaataccccaactagtagcaagacagatagtaa

SEQ ID NO: 315729 - DNA, 51 bp, Artificial
  Synthetic oligonucleotide
actaaccggacctccacacccgtttaagctcactatacgaaatcctcgtcc

SEQ ID NO: 315730 - DNA, 54 bp, Artificial
  Synthetic oligonucleotide
actaaccggttctgccgttggttgtgatccagacaccttttggtcagttatacc

SEQ ID NO: 315731 - DNA, 53 bp, Artificial
  Synthetic oligonucleotide
actaacctacaacaaaactacctcatccactacccctccccttatctacctca

SEQ ID NO: 315732 - DNA, 56 bp, Artificial
  Synthetic oligonucleotide
actaacctagacaaacttggcttagtagactacatgaacgctaagaaaatggactc

SEQ ID NO: 315733 - DNA, 53 bp, Artificial
  Synthetic oligonucleotide
actaacctccctctccattcaagagggcgtccggtatcccctacgacaggaaa

SEQ ID NO: 315734 - DNA, 60 bp, Artificial
  Synthetic oligonucleotide
actaacgaatcgatggctctctagtttcgtgagtcaggttatgtcggatggcgtgaatga

SEQ ID NO: 315735 - DNA, 53 bp, Artificial
  Synthetic oligonucleotide
actaacgacacacaatgcagcacgagtggcatacaagctgcgcactgatgagc

SEQ ID NO: 315736 - DNA, 59 bp, Artificial
  Synthetic oligonucleotide
actaacgatgggacagccgttagtcatcttggccccccatgcggtagaagcactggtca

SEQ ID NO: 315737 - DNA, 56 bp, Artificial
  Synthetic oligonucleotide
actaacgccacccgcggactattctaagtctgtactagccttctcagttgggtgtg

SEQ ID NO: 315738 - DNA, 54 bp, Artificial
  Synthetic oligonucleotide
actaacggacaattctacctaacaataagtggagttaacatgttgaaccgaaga

SEQ ID NO: 315739 - DNA, 55 bp, Artificial
  Synthetic oligonucleotide
actaacgggccccactcctctgttgtacagactgggggccgtgcaaaatgaggtc

SEQ ID NO: 315740 - DNA, 52 bp, Artificial
  Synthetic oligonucleotide
actaacgtcacttttctaaagaggtactttagggcagatgaacagtacccct

SEQ ID NO: 315741 - DNA, 60 bp, Artificial
  Synthetic oligonucleotide
actaacgtcattagatcatattacagtataaacgcaccagctattgtgccacaagtggaa

SEQ ID NO: 315742 - DNA, 57 bp, Artificial
  Synthetic oligonucleotide
actaactaacctataggttactttgctttgatatactgatgtaggaatacaggatac

SEQ ID NO: 315743 - DNA, 55 bp, Artificial
  Synthetic oligonucleotide
actaactacaacaggagagtgaatcctaactctgaagacagtacacttaccaggg

SEQ ID NO: 315744 - DNA, 52 bp, Artificial
  Synthetic oligonucleotide
actaactattaaccaaattcttaccagagacttcaaggaactaagatgcctt

SEQ ID NO: 315745 - DNA, 55 bp, Artificial
  Synthetic oligonucleotide
actaactccctactgttaaaacaattgtgccttgaatgtggagaccctccaatag

SEQ ID NO: 315746 - DNA, 56 bp, Artificial
  Synthetic oligonucleotide
actaactccctgccaagtgaaactcggggacgagtgagtgcgggacatcccgtgta

SEQ ID NO: 315747 - DNA, 50 bp, Artificial
  Synthetic oligonucleotide
actaactcctacgatgaatagcgcaaaaccgatgaccattatcaaaacgg

SEQ ID NO: 315748 - DNA, 56 bp, Artificial
  Synthetic oligonucleotide
actaactctcctgaaactcaatcgaaatgaaaagtttagagacatcagagggtttc

SEQ ID NO: 315749 - DNA, 59 bp, Artificial
  Synthetic oligonucleotide
actaactggcaaagactcgaggccttttgggcgaagcacatgtggaacttcatcagtgg

SEQ ID NO: 315750 - DNA, 60 bp, Artificial
  Synthetic oligonucleotide
actaacttctggcttacattccgtgaccacagttattgcacacagtgatgaaggtggtat

SEQ ID NO: 315751 - DNA, 53 bp, Artificial
  Synthetic oligonucleotide
actaagaaagacaaggtggaggaacgtttgccttgtcccttagatttttgtga

SEQ ID NO: 315752 - DNA, 57 bp, Artificial
  Synthetic oligonucleotide
actaagaaatgttccacagattgaaactagaggactcttcggagctattgcagggtt

SEQ ID NO: 315753 - DNA, 55 bp, Artificial
  Synthetic oligonucleotide
actaagaacatttggagagtatagccatgaatatactgtagtagatgacctagcc

SEQ ID NO: 315754 - DNA, 60 bp, Artificial
  Synthetic oligonucleotide
actaagagatctaatgtcgcagtcccgcactcgcgagatactcactaagaccactgtgga

SEQ ID NO: 315755 - DNA, 60 bp, Artificial
  Synthetic oligonucleotide
actaagagatctgatgtcacagtctcgcacccgcgagatactaaccaaaaccactgtgga

SEQ ID NO: 315756 - DNA, 60 bp, Artificial
  Synthetic oligonucleotide
actaagagatttattgtcacagtctcgcactcgcgagatactgacaaaaaccactgtgga

SEQ ID NO: 315757 - DNA, 60 bp, Artificial
  Synthetic oligonucleotide
actaagagatttgatgtcacaatcccgcactcgcgagatactaacaacaaccaccgtgga

SEQ ID NO: 315758 - DNA, 55 bp, Artificial
  Synthetic oligonucleotide
actaagagggaggaggaagtacttacgggcaatctccaaacattgaagataagag

SEQ ID NO: 315759 - DNA, 55 bp, Artificial
  Synthetic oligonucleotide
actaagattgaggcatctatggcccttgtcgatgcaaaacctatcatagaactag

SEQ ID NO: 315760 - DNA, 55 bp, Artificial
  Synthetic oligonucleotide
actaagcactgcgagcgcaagcgagcagtgcgaccctcctgcccggtagcaactt

SEQ ID NO: 315761 - DNA, 54 bp, Artificial
  Synthetic oligonucleotide
actaagcaggggcctatgaagttacttactgtgtatcctaacacggctggtgat

SEQ ID NO: 315762 - DNA, 53 bp, Artificial
  Synthetic oligonucleotide
actaagcatggtctaacacttgcacctatagggtttaagtcacactcccatcc

SEQ ID NO: 315763 - DNA, 55 bp, Artificial
  Synthetic oligonucleotide
actaagcatgtggtgaaaggacagtgcccattgttccagctgtatctctcgacac

SEQ ID NO: 315764 - DNA, 60 bp, Artificial
  Synthetic oligonucleotide
actaagcattgaagacccaagtcacgagggagaggggataccactatacgatgcaatcaa

SEQ ID NO: 315765 - DNA, 60 bp, Artificial
  Synthetic oligonucleotide
actaagcattgaagacccaagtcatgaaggcgagggaataccgctatatgatgcaatcaa

SEQ ID NO: 315766 - DNA, 51 bp, Artificial
  Synthetic oligonucleotide
actaagccgttgaccatcgcttggtgcttggcttcctacatctggccagac

SEQ ID NO: 315767 - DNA, 60 bp, Artificial
  Synthetic oligonucleotide
actaagcgcatcgagactctccttgacaacgtgcgagtgcttcaacagatacatgcgaaa

SEQ ID NO: 315768 - DNA, 57 bp, Artificial
  Synthetic oligonucleotide
actaagctacgggaccccgaagtcctctatgggaaactcctgagtatgctgatcctg

SEQ ID NO: 315769 - DNA, 50 bp, Artificial
  Synthetic oligonucleotide
actaagctagaaaacatcatgcgtgcgcacacggccggctacgtcctatc

SEQ ID NO: 315770 - DNA, 60 bp, Artificial
  Synthetic oligonucleotide
actaagctgcatacaagcaattgtgggaggcgcggttagtagaggtgatatcaaccctac

SEQ ID NO: 315771 - DNA, 55 bp, Artificial
  Synthetic oligonucleotide
actaaggaagagttcgatagatggtacgacgccataaagaaggagtacgagatcg

SEQ ID NO: 315772 - DNA, 60 bp, Artificial
  Synthetic oligonucleotide
actaaggacaacaagggaatgaggattcgcttcaaggatgacagctcgtttgaggatgtg

SEQ ID NO: 315773 - DNA, 51 bp, Artificial
  Synthetic oligonucleotide
actaaggacagtcggtctgtaaatgactgctattcagtctattctggaact

SEQ ID NO: 315774 - DNA, 50 bp, Artificial
  Synthetic oligonucleotide
actaaggacccaacggcgttcaagctgttgggtacaacttaccggaacgg

SEQ ID NO: 315775 - DNA, 59 bp, Artificial
  Synthetic oligonucleotide
actaaggataggatgtccgaggcttcactacaacttttcatgaggagggttgctgcaaa

SEQ ID NO: 315776 - DNA, 60 bp, Artificial
  Synthetic oligonucleotide
actaaggattaatttctattactttgtctgcatcatgaattatgcagtgacctgggggct

SEQ ID NO: 315777 - DNA, 58 bp, Artificial
  Synthetic oligonucleotide
actaagggaaagagggcaattgatcttggccagtgtggcttacttggaattgtcacag

SEQ ID NO: 315778 - DNA, 55 bp, Artificial
  Synthetic oligonucleotide
actaagggaccctgatgtctggaccggttttgttcaaggtgttagagatggtatc

SEQ ID NO: 315779 - DNA, 59 bp, Artificial
  Synthetic oligonucleotide
actaagggctttctagctaggttaagtgcaagaatccaagctcgcatcaggtccctcac

SEQ ID NO: 315780 - DNA, 55 bp, Artificial
  Synthetic oligonucleotide
actaaggtccctgcggcttacgccagtcagggatataaggtgttagtgctaaacc

SEQ ID NO: 315781 - DNA, 52 bp, Artificial
  Synthetic oligonucleotide
actaaggtctctagaggtttctctcatgacctagctgtcgacatcttacttt

SEQ ID NO: 315782 - DNA, 59 bp, Artificial
  Synthetic oligonucleotide
actaaggtgctgattctggcagttgaccctgacgaagcgaaacttgccgtgaacgcacg

SEQ ID NO: 315783 - DNA, 54 bp, Artificial
  Synthetic oligonucleotide
actaaggtgttggagtatcgggaacccccatattggtcattacggtgaaagata

SEQ ID NO: 315784 - DNA, 55 bp, Artificial
  Synthetic oligonucleotide
actaagtaatatcttttgctattgtcagtgtcatccagcccttggcagtacgccg

SEQ ID NO: 315785 - DNA, 60 bp, Artificial
  Synthetic oligonucleotide
actaagtatcttatgaacaatgagtagctgatttctgattatcagtaacaagtatcgtta

SEQ ID NO: 315786 - DNA, 55 bp, Artificial
  Synthetic oligonucleotide
actaagtctaaatgttttgatctctgattaacacttaatgggttgtaattcttat

SEQ ID NO: 315787 - DNA, 56 bp, Artificial
  Synthetic oligonucleotide
actaagtctaagccatcttccactgacgttaaagaatccgtagaaaacgccacaga

SEQ ID NO: 315788 - DNA, 56 bp, Artificial
  Synthetic oligonucleotide
actaagtgcatcattccgtttggtaaagaggtgggtcgtgttcctcactctcgatt

SEQ ID NO: 315789 - DNA, 52 bp, Artificial
  Synthetic oligonucleotide
actaagtgccacacatgtgtgtttacttaaggtgatgtcagtatttataggg

SEQ ID NO: 315790 - DNA, 59 bp, Artificial
  Synthetic oligonucleotide
actaagttgggtatagggaacaatcaactcagctcattaattggtagcggcctgatcac

SEQ ID NO: 315791 - DNA, 55 bp, Artificial
  Synthetic oligonucleotide
actaagttgtttagaatattcgaaccacgacaactacctatttatagagcaaatg

SEQ ID NO: 315792 - DNA, 52 bp, Artificial
  Synthetic oligonucleotide
actaagtttaaattcaaaacatgtgggatccactattaaacgagttcccgga

SEQ ID NO: 315793 - DNA, 53 bp, Artificial
  Synthetic oligonucleotide
actaataaagtaattgactaaactacccctgcttttatgttattcaggcgcgt

SEQ ID NO: 315794 - DNA, 52 bp, Artificial
  Synthetic oligonucleotide
actaataacagttgggagttccaattaccaacagtcttttgtaccgagtccg

SEQ ID NO: 315795 - DNA, 60 bp, Artificial
  Synthetic oligonucleotide
actaataactacatgtggagaccgttggacatcagcgcagtacataacttcagatgccta

SEQ ID NO: 315796 - DNA, 60 bp, Artificial
  Synthetic oligonucleotide
actaataatacagatgtatgggtagctatcatatctattgaaccaaatgttaattcagag

SEQ ID NO: 315797 - DNA, 51 bp, Artificial
  Synthetic oligonucleotide
actaataatgaactgaaaccttattcagttctttccctttccccctaccca

SEQ ID NO: 315798 - DNA, 58 bp, Artificial
  Synthetic oligonucleotide
actaatacgtaaagggcgctatatgactgaggagcaagtagatatctccaagaggctg

SEQ ID NO: 315799 - DNA, 60 bp, Artificial
  Synthetic oligonucleotide
actaataggtgcagggatggcgacagctgtggccacgggtagggccatcgagggagctta

SEQ ID NO: 315800 - DNA, 55 bp, Artificial
  Synthetic oligonucleotide
actaatataccctatgaatacgatgttaaagtcccgcatttaacacttggagtac

SEQ ID NO: 315801 - DNA, 56 bp, Artificial
  Synthetic oligonucleotide
actaatataggttcgaaattaactggagcgtttaatagtgctggatcaaaagcgtc

SEQ ID NO: 315802 - DNA, 60 bp, Artificial
  Synthetic oligonucleotide
actaatattgatggatatatagatacctgtatttctgctacttttagaaggggagcttgc

SEQ ID NO: 315803 - DNA, 60 bp, Artificial
  Synthetic oligonucleotide
actaatcagagggcgacccaaagagaacacaatctggactagtgggagctgcatatcctt

SEQ ID NO: 315804 - DNA, 57 bp, Artificial
  Synthetic oligonucleotide
actaatcagatacaataaaactaaaacacacccagtggtgacgtatactactacatg

SEQ ID NO: 315805 - DNA, 55 bp, Artificial
  Synthetic oligonucleotide
actaatcaggtggttgctgatgctaggttgatgttcccgtaagagtcggtggggc

SEQ ID NO: 315806 - DNA, 55 bp, Artificial
  Synthetic oligonucleotide
actaatcgaggagaatgttgaagaggttatggacaattcttggtttgggctcggg

SEQ ID NO: 315807 - DNA, 53 bp, Artificial
  Synthetic oligonucleotide
actaatcggtctccatggccgcgcagcggaagactttacgttttctgcagccc

SEQ ID NO: 315808 - DNA, 51 bp, Artificial
  Synthetic oligonucleotide
actaatcttggcacccacaagagttgtcgcctctgaaatggcggaggcgct

SEQ ID NO: 315809 - DNA, 60 bp, Artificial
  Synthetic oligonucleotide
actaatgagccccacagagtgtttctaagcgcaggaaaggatgtggataataatatcacg

SEQ ID NO: 315810 - DNA, 51 bp, Artificial
  Synthetic oligonucleotide
actaatgctacagaggggagtagttcaaatggaacaatcacactcccatgc

SEQ ID NO: 315811 - DNA, 58 bp, Artificial
  Synthetic oligonucleotide
actaatggcaaaaaagcacatagagataggggaattcaacttattgggaatgatccag

SEQ ID NO: 315812 - DNA, 57 bp, Artificial
  Synthetic oligonucleotide
actaatggctctagctacctgggtgggtggtaatttggaagaaccagcatccaggga

SEQ ID NO: 315813 - DNA, 51 bp, Artificial
  Synthetic oligonucleotide
actaatggtctcaacaacaatatcctcgatattgattgtatcacagacatg

SEQ ID NO: 315814 - DNA, 54 bp, Artificial
  Synthetic oligonucleotide
actaatggttccacattagtggacggggtctctagactttatcaaccactccgt

SEQ ID NO: 315815 - DNA, 58 bp, Artificial
  Synthetic oligonucleotide
actaatgtttacccattatagaattggatgtcaacatagtaggataggaattatccca

SEQ ID NO: 315816 - DNA, 54 bp, Artificial
  Synthetic oligonucleotide
actaatgttttcagacatttgtatactaaagtctctacgggcaaagatgataga

SEQ ID NO: 315817 - DNA, 60 bp, Artificial
  Synthetic oligonucleotide
actaattatgatagccgcctctgacacttataatggcagaatatggtggacaaatccgta

SEQ ID NO: 315818 - DNA, 60 bp, Artificial
  Synthetic oligonucleotide
actaattcacaagacacagagctctctttcacaatcacaggagacaacaccaaatggaat

SEQ ID NO: 315819 - DNA, 55 bp, Artificial
  Synthetic oligonucleotide
actaattcgtgttagtgtagtcgtcaaagtgagagtgtcgttcacggaatataga

SEQ ID NO: 315820 - DNA, 60 bp, Artificial
  Synthetic oligonucleotide
actaattgatacatgccatacagatatcaacaatgctattcgtagtatttttgtggcacc

SEQ ID NO: 315821 - DNA, 54 bp, Artificial
  Synthetic oligonucleotide
actaattgcctcgtcaggtaccttggagtttaccaatgaaggtttcaattggac

SEQ ID NO: 315822 - DNA, 58 bp, Artificial
  Synthetic oligonucleotide
actaattggtctactgtagaaccgtatatattggcaaatcgttgtagtgactcattga

SEQ ID NO: 315823 - DNA, 60 bp, Artificial
  Synthetic oligonucleotide
actaatttcaggcatgtggttgctaactgtagtaccaaatgacatgttcataagagaatc

SEQ ID NO: 315824 - DNA, 57 bp, Artificial
  Synthetic oligonucleotide
actaatttggcctaattggaagaccctgtcacgtatctggacgtgacaaaagcgtga

SEQ ID NO: 315825 - DNA, 50 bp, Artificial
  Synthetic oligonucleotide
actacaaaacatttgtgaccctcatttacaggaaacattccctgtacccg

SEQ ID NO: 315826 - DNA, 49 bp, Artificial
  Synthetic oligonucleotide
actacaaagcaaaacctgcttttagacgaaagttttttcgaaaacgaaa

SEQ ID NO: 315827 - DNA, 51 bp, Artificial
  Synthetic oligonucleotide
actacaaccccccgctggtagagacgtggaaaaggcccgactacgaaccac

SEQ ID NO: 315828 - DNA, 52 bp, Artificial
  Synthetic oligonucleotide
actacaaccctccattattagagtcctggaaagacccggactacgtccctcc

SEQ ID NO: 315829 - DNA, 52 bp, Artificial
  Synthetic oligonucleotide
actacaacctggaacttgagggtcctttttgacgaacaccaaaaacaccaca

SEQ ID NO: 315830 - DNA, 52 bp, Artificial
  Synthetic oligonucleotide
actacaactaccggtcgttctccgagtgggcgtacgcgttcgggatggttcc

SEQ ID NO: 315831 - DNA, 56 bp, Artificial
  Synthetic oligonucleotide
actacaactgtgctgagaatgtttcacggactgtcggacacatcgcggtaccgtcg

SEQ ID NO: 315832 - DNA, 56 bp, Artificial
  Synthetic oligonucleotide
actacaagtactttcccttgactccaactggacttgcgcgtgtgattcaagaggcg

SEQ ID NO: 315833 - DNA, 54 bp, Artificial
  Synthetic oligonucleotide
actacaatcccctggacccaacgataaattcggaatctaagaacacagagggaa

SEQ ID NO: 315834 - DNA, 56 bp, Artificial
  Synthetic oligonucleotide
actacaattaaaacacatctacaacctaacaactcagcaataaacccaaacactca

SEQ ID NO: 315835 - DNA, 55 bp, Artificial
  Synthetic oligonucleotide
actacaattattgccacggcggacgcccgcgggctgattcaatcctctagggctc

SEQ ID NO: 315836 - DNA, 60 bp, Artificial
  Synthetic oligonucleotide
actacaattgggaaaatgcagcatcgctggatggatattagggaacccagaatgtgaatc

SEQ ID NO: 315837 - DNA, 60 bp, Artificial
  Synthetic oligonucleotide
actacacaaaattgatactgagtgagagggaccgccttggcatcaagacagtctggccga

SEQ ID NO: 315838 - DNA, 54 bp, Artificial
  Synthetic oligonucleotide
actacacaaccttggccgaatctccgaacggtttggccagaacctcaaaactgc

SEQ ID NO: 315839 - DNA, 60 bp, Artificial
  Synthetic oligonucleotide
actacacaagaagcggcaaacataatagttggctatggtgagtggccttcctactgctct

SEQ ID NO: 315840 - DNA, 55 bp, Artificial
  Synthetic oligonucleotide
actacacaagaggcagcgaatatagttcttggatatggtgagtggcccgactact

SEQ ID NO: 315841 - DNA, 54 bp, Artificial
  Synthetic oligonucleotide
actacacaccacatcttcagggaccaaatctatgtagtagagggcggtatgcca

SEQ ID NO: 315842 - DNA, 59 bp, Artificial
  Synthetic oligonucleotide
actacaccacacttgggttcactatgaaggtggagcctacagtggatgtgttggaaaga

SEQ ID NO: 315843 - DNA, 50 bp, Artificial
  Synthetic oligonucleotide
actacaccagaaatgcccactaccaatgaaggctgtgggctattagtgtt

SEQ ID NO: 315844 - DNA, 55 bp, Artificial
  Synthetic oligonucleotide
actacaccagcagccactacatccccgtagtggcacctgaacgccgcgtcgtgct

SEQ ID NO: 315845 - DNA, 59 bp, Artificial
  Synthetic oligonucleotide
actacacccagtggagcgggtctgtcgagatcacttgcatgttcaccggaacctttatg

SEQ ID NO: 315846 - DNA, 56 bp, Artificial
  Synthetic oligonucleotide
actacacccgtacaaaaaggtgggcattgtgtccacgcctcgaaggggcagaagca

SEQ ID NO: 315847 - DNA, 55 bp, Artificial
  Synthetic oligonucleotide
actacaccgggcggcagttgatcctctactggaaggaagcgcaggccgctgagag

SEQ ID NO: 315848 - DNA, 54 bp, Artificial
  Synthetic oligonucleotide
actacacgaagaacgccaacatgccggacccggaaacgttgacggatgaaacgc

SEQ ID NO: 315849 - DNA, 60 bp, Artificial
  Synthetic oligonucleotide
actacacgcctacataccacgtggatccaacaggagcatacatccagcccacgtcatatg

SEQ ID NO: 315850 - DNA, 55 bp, Artificial
  Synthetic oligonucleotide
actacacttatgccaaactggataggaacaatgtatcagagtgcacgtggcatgt

SEQ ID NO: 315851 - DNA, 51 bp, Artificial
  Synthetic oligonucleotide
actacagaggacagggatgtccttcatacacatcggtattctccaagtaag

SEQ ID NO: 315852 - DNA, 60 bp, Artificial
  Synthetic oligonucleotide
actacagatacacataccgatgccacaggggggatacacaaatcccaacgaggagatcat

SEQ ID NO: 315853 - DNA, 56 bp, Artificial
  Synthetic oligonucleotide
actacagatacacctaccgatgccacaggagggatacacaaatccaaacgggaaaa

SEQ ID NO: 315854 - DNA, 60 bp, Artificial
  Synthetic oligonucleotide
actacagataccattcttcatgcttgaaaacagcgaccatgaagtattaagaacaggaga

SEQ ID NO: 315855 - DNA, 59 bp, Artificial
  Synthetic oligonucleotide
actacagatttatgggaagtaggataggatcatggtgccaaatggtcagtttaatagga

SEQ ID NO: 315856 - DNA, 60 bp, Artificial
  Synthetic oligonucleotide
actacagcaagttcgatggcacattcttgcgctttatgcgtgagtgcgtcgagtttgcta

SEQ ID NO: 315857 - DNA, 58 bp, Artificial
  Synthetic oligonucleotide
actacagctgtcttgaaggaagcgaccacacacgtgactgccataggcagcataacgc

SEQ ID NO: 315858 - DNA, 60 bp, Artificial
  Synthetic oligonucleotide
actacagcttccagctaccttgaagatcaattacatcaaggacgcaaaatataggatttg

SEQ ID NO: 315859 - DNA, 58 bp, Artificial
  Synthetic oligonucleotide
actacagggtacaaacaacagtgaccagcatcggtccgatactgggtgaccactcgac

SEQ ID NO: 315860 - DNA, 52 bp, Artificial
  Synthetic oligonucleotide
actacagtgacccaagaatagtccacgcattatgcaccccgggtttgaagga

SEQ ID NO: 315861 - DNA, 54 bp, Artificial
  Synthetic oligonucleotide
actacagttgaatattcaattggtggggaaatatcctctaaaattcttgtaaat

SEQ ID NO: 315862 - DNA, 60 bp, Artificial
  Synthetic oligonucleotide
actacatacccatcactgttcatcctcgctcctacagtgaggaggtgttgggtactgatg

SEQ ID NO: 315863 - DNA, 60 bp, Artificial
  Synthetic oligonucleotide
actacatactgagaactcaagagtctgaatgtgcgtgtgtaaatggctcttgctttaccg

SEQ ID NO: 315864 - DNA, 55 bp, Artificial
  Synthetic oligonucleotide
actacatcaaacatgactgtggattcgttatcccgttagaggacccacgtcatag

SEQ ID NO: 315865 - DNA, 56 bp, Artificial
  Synthetic oligonucleotide
actacatcaatgccacccaccgaaactcaaagttcctagcgaacaaactgggtgtc

SEQ ID NO: 315866 - DNA, 50 bp, Artificial
  Synthetic oligonucleotide
actacatctatatgccaaattggaagttataaatcatgcaattaagaatg

SEQ ID NO: 315867 - DNA, 60 bp, Artificial
  Synthetic oligonucleotide
actacattcggcacgtacacaaacgtgtcgtatcttatgagaaggattctatcatgatga

SEQ ID NO: 315868 - DNA, 60 bp, Artificial
  Synthetic oligonucleotide
actacattgtgcataaatctatgttgaggttcggagaaactccattgattgcagattgcg

SEQ ID NO: 315869 - DNA, 53 bp, Artificial
  Synthetic oligonucleotide
actacatttaggggaaaattgtacgttactaaaggtactgattcgatacctca

SEQ ID NO: 315870 - DNA, 56 bp, Artificial
  Synthetic oligonucleotide
actaccaaaggacaccggggacatctcacaaacagccatcctgcaaggggacccaa

SEQ ID NO: 315871 - DNA, 59 bp, Artificial
  Synthetic oligonucleotide
actaccaacaaaatatgcggatagacgaattcctactgatgagctacaaacgaacatta

SEQ ID NO: 315872 - DNA, 54 bp, Artificial
  Synthetic oligonucleotide
actaccaaggataataaagggacccggattcgatttaaggatgatagctcgttc

SEQ ID NO: 315873 - DNA, 54 bp, Artificial
  Synthetic oligonucleotide
actaccaagtttactctgagaatcctctacgacgagtttaccaggtttatgaac

SEQ ID NO: 315874 - DNA, 56 bp, Artificial
  Synthetic oligonucleotide
actaccacactaccccattggcaagtgtaaattggagaacgagactggttacaggc

SEQ ID NO: 315875 - DNA, 55 bp, Artificial
  Synthetic oligonucleotide
actaccaccccaagtattatgaattacttgactcgacgatgcactgcccacaagg

SEQ ID NO: 315876 - DNA, 55 bp, Artificial
  Synthetic oligonucleotide
actaccactcgaggatgtagtctatggcatggaaggactggaagctttagatttg

SEQ ID NO: 315877 - DNA, 55 bp, Artificial
  Synthetic oligonucleotide
actaccagagacgtaggcttcgcgcccctctgccctagcgtctcgtacctatgcg

SEQ ID NO: 315878 - DNA, 57 bp, Artificial
  Synthetic oligonucleotide
actaccaggctctgcttctggacacggaccgagtccagttcggaccaatagtggccc

SEQ ID NO: 315879 - DNA, 57 bp, Artificial
  Synthetic oligonucleotide
actaccagtatgaaacaagttggagctgtaatccgccagactgtccaggggtaggta

SEQ ID NO: 315880 - DNA, 60 bp, Artificial
  Synthetic oligonucleotide
actaccatactcagcagcctcactgtgacccagctcctgaggcgactacaccaatggata

SEQ ID NO: 315881 - DNA, 58 bp, Artificial
  Synthetic oligonucleotide
actaccatatgagtattttatagcacaacacgctgtagttgaaaaaatgttaatatac

SEQ ID NO: 315882 - DNA, 56 bp, Artificial
  Synthetic oligonucleotide
actaccatgaggtcccctgtgttcaccgacaattccacccctcctgcggtgcccca

SEQ ID NO: 315883 - DNA, 58 bp, Artificial
  Synthetic oligonucleotide
actaccattgcgcaaaagatcattaagcgggtttacgatgtttctccggtgcttgaca

SEQ ID NO: 315884 - DNA, 57 bp, Artificial
  Synthetic oligonucleotide
actacccaagtagataccaacaaggagtcatgaagggtgttggccctgcagaaccag

SEQ ID NO: 315885 - DNA, 57 bp, Artificial
  Synthetic oligonucleotide
actacccagctaggtaccagtcacacatgctaatcggtcgcgggttcgcgtcccctg

SEQ ID NO: 315886 - DNA, 56 bp, Artificial
  Synthetic oligonucleotide
actaccccaatccttggaaagatgccggccgtattctcaggaatgttgactgggaa

SEQ ID NO: 315887 - DNA, 57 bp, Artificial
  Synthetic oligonucleotide
actacccgttcccgcgcgccgtgcgtggatgtccctgccgaggagtcctgtaagtca

SEQ ID NO: 315888 - DNA, 53 bp, Artificial
  Synthetic oligonucleotide
actacccttaaggcaggcaaagggtcttactatctagttgcccccacaggaac

SEQ ID NO: 315889 - DNA, 56 bp, Artificial
  Synthetic oligonucleotide
actaccgaaagattacaattaacttccgtcacatccttatgcatgttaattggaaa

SEQ ID NO: 315890 - DNA, 55 bp, Artificial
  Synthetic oligonucleotide
actaccgacatggttgtgcccacagcaggataggatcatgaatcccatagatcct

SEQ ID NO: 315891 - DNA, 60 bp, Artificial
  Synthetic oligonucleotide
actaccgatacacataccgatgtcacagaggtgatacacaaattcagacgaggagatcat

SEQ ID NO: 315892 - DNA, 59 bp, Artificial
  Synthetic oligonucleotide
actaccgcaaaagtggaatgatggaggaagccgcgaagcaacctgctctgattaattcg

SEQ ID NO: 315893 - DNA, 55 bp, Artificial
  Synthetic oligonucleotide
actaccgcaacttgtactattagaaattgcaagaaactgggaccaagagagaacg

SEQ ID NO: 315894 - DNA, 57 bp, Artificial
  Synthetic oligonucleotide
actaccgcaccgaatcagtttgagcgctgtctaaacgattccgtgtgggaaagcgta

SEQ ID NO: 315895 - DNA, 57 bp, Artificial
  Synthetic oligonucleotide
actaccgccggttaaggtgttcgggtcagatccatggatattctcctggtacatgcc

SEQ ID NO: 315896 - DNA, 60 bp, Artificial
  Synthetic oligonucleotide
actaccgctacagaccgcgcatctactatcggagacgatggctggtaaatcaaggctcgg

SEQ ID NO: 315897 - DNA, 59 bp, Artificial
  Synthetic oligonucleotide
actaccggacagtggctagtaccgtgcaccaggctcaggtgcaaggaacgacgctcagg

SEQ ID NO: 315898 - DNA, 53 bp, Artificial
  Synthetic oligonucleotide
actaccggactttgttatcctctctccacctactgcgtctttcggtccggtta

SEQ ID NO: 315899 - DNA, 60 bp, Artificial
  Synthetic oligonucleotide
actaccggctcactcaagcctgcggttataggtatagattgcgctcaagctcacccagtt

SEQ ID NO: 315900 - DNA, 50 bp, Artificial
  Synthetic oligonucleotide
actaccggctgaaaaattctatgtggtctacaatggtgatcacccaggaa

SEQ ID NO: 315901 - DNA, 55 bp, Artificial
  Synthetic oligonucleotide
actaccgtaattacacaccagacgaaattaaggatgctgtgaatgtaggttatgg

SEQ ID NO: 315902 - DNA, 56 bp, Artificial
  Synthetic oligonucleotide
actaccgtttccatctctaacacatttagaacccatactcttacaaaatcctatga

SEQ ID NO: 315903 - DNA, 59 bp, Artificial
  Synthetic oligonucleotide
actacctacagctcccccaatggaggaaacgccactactccagctgtaagagctgtatg

SEQ ID NO: 315904 - DNA, 57 bp, Artificial
  Synthetic oligonucleotide
actacctacttaactgtggatgcagtggaagttattccgatttgattcgtccgcaag

SEQ ID NO: 315905 - DNA, 54 bp, Artificial
  Synthetic oligonucleotide
actacctatagagtcaccaatacaaccgttcgaactcctcctaatgttacgttg

SEQ ID NO: 315906 - DNA, 57 bp, Artificial
  Synthetic oligonucleotide
actacctcacccgtgatcccactaccccccttgcacgggctgcgtgggagacagcta

SEQ ID NO: 315907 - DNA, 55 bp, Artificial
  Synthetic oligonucleotide
actacctgaatgctgtacttgactggggtgaatcattgtttcatgctgtgggcac

SEQ ID NO: 315908 - DNA, 60 bp, Artificial
  Synthetic oligonucleotide
actacctgaccacataccgcatgaggagccgtgggtatattcacgattctattctctccc

SEQ ID NO: 315909 - DNA, 52 bp, Artificial
  Synthetic oligonucleotide
actacctgatggttggttgtactgtgatgcggatggttcgaggtttgacagc

SEQ ID NO: 315910 - DNA, 55 bp, Artificial
  Synthetic oligonucleotide
actacctgggcagattaacgttatgaaagagaacgtgccactgtaccgtaaggaa

SEQ ID NO: 315911 - DNA, 50 bp, Artificial
  Synthetic oligonucleotide
actaccttcatcaacacagtattaaattggtgctacacacaaatggtcgg

SEQ ID NO: 315912 - DNA, 53 bp, Artificial
  Synthetic oligonucleotide
actacgagccggctcctttgtgggagcaggataccgtagtttaccccgtacag

SEQ ID NO: 315913 - DNA, 54 bp, Artificial
  Synthetic oligonucleotide
actacgaggaccgaaaccgggagcaaacgctcaacgcggcgggagacttctcag

SEQ ID NO: 315914 - DNA, 50 bp, Artificial
  Synthetic oligonucleotide
actacgataacaaatgatacgttgaatacgggactggtatttatgcagaa

SEQ ID NO: 315915 - DNA, 60 bp, Artificial
  Synthetic oligonucleotide
actacgattattaagcacaatattacaagtatcagaagtgcaggtattggcagatcctcc

SEQ ID NO: 315916 - DNA, 58 bp, Artificial
  Synthetic oligonucleotide
actacgccggccgcatagtgtcgagcgtgttcttgcaatacccctacacgaaaatcac

SEQ ID NO: 315917 - DNA, 54 bp, Artificial
  Synthetic oligonucleotide
actacgcctggcgaacatttgtgttcgttaccttcggtttgctaatagccgtag

SEQ ID NO: 315918 - DNA, 55 bp, Artificial
  Synthetic oligonucleotide
actacgctaacatctatgttgttagtgatccctctcgtcctcagaacgaaggtcg

SEQ ID NO: 315919 - DNA, 53 bp, Artificial
  Synthetic oligonucleotide
actacggccccacgaaagtggacccggtgtcggttgagctaacatttgccaac

SEQ ID NO: 315920 - DNA, 56 bp, Artificial
  Synthetic oligonucleotide
actacgggcgatccggcctgaacaaagtcgtgtcgcacctgcccggtgtggtccac

SEQ ID NO: 315921 - DNA, 54 bp, Artificial
  Synthetic oligonucleotide
actacgtaggataaggttgtattctattatttaatgggcccgaacatgtgaaac

SEQ ID NO: 315922 - DNA, 59 bp, Artificial
  Synthetic oligonucleotide
actacgtataaggaagataagactgtacaagagtatgctgtttctagcgtatttgaaga

SEQ ID NO: 315923 - DNA, 60 bp, Artificial
  Synthetic oligonucleotide
actacgtccagcaacgatactcgtgcagagtttagcgcaaacaggacaccggtagctagc

SEQ ID NO: 315924 - DNA, 52 bp, Artificial
  Synthetic oligonucleotide
actacgtcgtccttatggtagaccatacaagtcgtatgtaccaacgacgcga

SEQ ID NO: 315925 - DNA, 60 bp, Artificial
  Synthetic oligonucleotide
actacgtctcaggtccgcgagcgaacatcgtcggctcagtttatcacgtcttaggagctc

SEQ ID NO: 315926 - DNA, 57 bp, Artificial
  Synthetic oligonucleotide
actacgtgagagtgttagaaatatatactttagtaacattaacgtgcataacgtgaa

SEQ ID NO: 315927 - DNA, 59 bp, Artificial
  Synthetic oligonucleotide
actacgttgtattacactcatcgagatggcacctaaggcactcccgaagaatgttccta

SEQ ID NO: 315928 - DNA, 55 bp, Artificial
  Synthetic oligonucleotide
actactaaccacgcatagataataaattatacgatacgcgcgcctacgcgcgagt

SEQ ID NO: 315929 - DNA, 59 bp, Artificial
  Synthetic oligonucleotide
actactaagagtgatggaatatcccgtcattttatgagtgaatatggagcactcgaggc

SEQ ID NO: 315930 - DNA, 60 bp, Artificial
  Synthetic oligonucleotide
actactacacagaaagtactggtatccatcactatatggtcaaagagatagcatatcaca

SEQ ID NO: 315931 - DNA, 55 bp, Artificial
  Synthetic oligonucleotide
actactacggaatggacctccgggacttgttctcggaggaacatccacttgagcc

SEQ ID NO: 315932 - DNA, 55 bp, Artificial
  Synthetic oligonucleotide
actactacgttctgtacaaattattaactaaaggatctgaccctaattgcgtcga

SEQ ID NO: 315933 - DNA, 59 bp, Artificial
  Synthetic oligonucleotide
actactactctgacacggcctccttccacacacgcgtcagatgcctccccccctctcaa

SEQ ID NO: 315934 - DNA, 56 bp, Artificial
  Synthetic oligonucleotide
actactagacccagtattgttagcgttcgccatagagtccccctacatgccggaaa

SEQ ID NO: 315935 - DNA, 59 bp, Artificial
  Synthetic oligonucleotide
actactagcaagctaccacttgctgacatcccaacgttcgatgttcctggactgtttag

SEQ ID NO: 315936 - DNA, 55 bp, Artificial
  Synthetic oligonucleotide
actactagcacccctattcctggcacgcgtgttcctgcgagactagggctatatg

SEQ ID NO: 315937 - DNA, 54 bp, Artificial
  Synthetic oligonucleotide
actactagtacagaatgccaacccagactgtaaattagtactaaaaggactagg

SEQ ID NO: 315938 - DNA, 58 bp, Artificial
  Synthetic oligonucleotide
actactataattcctagtcctttatcacgtgggtatttctatatcttgcggagcatac

SEQ ID NO: 315939 - DNA, 58 bp, Artificial
  Synthetic oligonucleotide
actactatgcattttatattcatcgaatttgcggggtcagcgtctggagtcgaaccga

SEQ ID NO: 315940 - DNA, 60 bp, Artificial
  Synthetic oligonucleotide
actactcacagtaagctcatggtcttacattgtggaaacatcgaaatcagacaatgggac

SEQ ID NO: 315941 - DNA, 55 bp, Artificial
  Synthetic oligonucleotide
actactcagattaccgacagtttcattgcatcacgataatcgctccgagtcggtt

SEQ ID NO: 315942 - DNA, 60 bp, Artificial
  Synthetic oligonucleotide
actactcaggatatgatgcaagccttagtcctgtgtggttcagagctctagagttggttc

SEQ ID NO: 315943 - DNA, 60 bp, Artificial
  Synthetic oligonucleotide
actactccacctgcgccaccgagtcaccgcacattctcccatgcgcatatccctcacgtt

SEQ ID NO: 315944 - DNA, 57 bp, Artificial
  Synthetic oligonucleotide
actactccatgcaagggaattgggccaaggtgtttctcgtgttatgtctattctccg

SEQ ID NO: 315945 - DNA, 58 bp, Artificial
  Synthetic oligonucleotide
actactcccccgtgatcaaacttgtacgctcgtaatgctgagtcttaagcacgtgagt

SEQ ID NO: 315946 - DNA, 55 bp, Artificial
  Synthetic oligonucleotide
actactcctccggatctcgcttgccctggtctctgtatgccaacaagctgaagga

SEQ ID NO: 315947 - DNA, 56 bp, Artificial
  Synthetic oligonucleotide
actactcctttgttatggacatagacaagggtagcaaattttgggagcaggagttc

SEQ ID NO: 315948 - DNA, 57 bp, Artificial
  Synthetic oligonucleotide
actactcgatagtataaattttgacagaatggcatttttaccattaacattacaaca

SEQ ID NO: 315949 - DNA, 55 bp, Artificial
  Synthetic oligonucleotide
actactcgtcttaataaggaggaaaaggtgaaagagtggtcgttgtgcgtcgcta

SEQ ID NO: 315950 - DNA, 54 bp, Artificial
  Synthetic oligonucleotide
actactcgttgtcgctctgttaataactctacatcacgctatagcattctgcaa

SEQ ID NO: 315951 - DNA, 60 bp, Artificial
  Synthetic oligonucleotide
actactctagtcgcatgaactggctaagtgccggcccccatatgattgggcgcgtaaatg

SEQ ID NO: 315952 - DNA, 55 bp, Artificial
  Synthetic oligonucleotide
actactctcccagtctccggacccgtgaagtcccctccgctcggtctcaccgatc

SEQ ID NO: 315953 - DNA, 57 bp, Artificial
  Synthetic oligonucleotide
actactctcgtgcctcacaacgccagcttcggccctcacttacggtaactccagcgg

SEQ ID NO: 315954 - DNA, 59 bp, Artificial
  Synthetic oligonucleotide
actactcttagagactactcttagtgactactcttagagtctactcttagtgactactc

SEQ ID NO: 315955 - DNA, 55 bp, Artificial
  Synthetic oligonucleotide
actactgaataccggggctgatgattcaatagtagcagggattaaattagaacca

SEQ ID NO: 315956 - DNA, 56 bp, Artificial
  Synthetic oligonucleotide
actactgacaatcttaagtgcccgtgccaggttccaccgcccgaatttttcacaga

SEQ ID NO: 315957 - DNA, 60 bp, Artificial
  Synthetic oligonucleotide
actactgaggaatcaatgcgactggtcgccgaatccttgattgacatcacttgctcacgt

SEQ ID NO: 315958 - DNA, 53 bp, Artificial
  Synthetic oligonucleotide
actactgataatatctctggagaaatgaacaattgctctttcaatgcaacctc

SEQ ID NO: 315959 - DNA, 60 bp, Artificial
  Synthetic oligonucleotide
actactgatcctgttatgtgcactttccgctacagatgcagacacaatatgtataggcta

SEQ ID NO: 315960 - DNA, 50 bp, Artificial
  Synthetic oligonucleotide
actactgatggtgtttacagcacatgctttagagttagaaccccactagc

SEQ ID NO: 315961 - DNA, 60 bp, Artificial
  Synthetic oligonucleotide
actactgccaaaggaaacagtgttgcgctaaattatacacacgtagttctatcgcttgca

SEQ ID NO: 315962 - DNA, 60 bp, Artificial
  Synthetic oligonucleotide
actactggcgtagaatcaccatacttaggagcttgtgagggtgttaggatggtgcataag

SEQ ID NO: 315963 - DNA, 60 bp, Artificial
  Synthetic oligonucleotide
actactggggggaactgctttgcgaatcgaccgcaagtgcatgcaatctattgaggttaa

SEQ ID NO: 315964 - DNA, 60 bp, Artificial
  Synthetic oligonucleotide
actactggtgcgtgtttcaatcattgtatacactacagagctacaacacaccgaggatgg

SEQ ID NO: 315965 - DNA, 60 bp, Artificial
  Synthetic oligonucleotide
actactgtaacattgcatttcaagcaatatgaatgcgattcccctgcaaacaaccaagta

SEQ ID NO: 315966 - DNA, 51 bp, Artificial
  Synthetic oligonucleotide
actactgtactaaactcattgtgtaatctgatgatgtgcatttacaccacc

SEQ ID NO: 315967 - DNA, 51 bp, Artificial
  Synthetic oligonucleotide
actactgtcagtatagttgtcaatggcgaggtaacatctacacaagttaat

SEQ ID NO: 315968 - DNA, 57 bp, Artificial
  Synthetic oligonucleotide
actactgttcggagcacgtcgcttcgtggttcgaaaattatctgtcaattctaatac

SEQ ID NO: 315969 - DNA, 54 bp, Artificial
  Synthetic oligonucleotide
actactgttgggctctgtaaaggtctctcctaagaaaactactgtttcaccaac

SEQ ID NO: 315970 - DNA, 51 bp, Artificial
  Synthetic oligonucleotide
actactgttgtaggtaattactcagatggtcgcgctaaaataacattactc

SEQ ID NO: 315971 - DNA, 56 bp, Artificial
  Synthetic oligonucleotide
actacttagatcctatttcagtgaaacacagggacaaattacaaagacaacaagtg

SEQ ID NO: 315972 - DNA, 58 bp, Artificial
  Synthetic oligonucleotide
actacttaggacttatgaagcccatcaacccaacctagtggtcgggctgcagttcatc

SEQ ID NO: 315973 - DNA, 57 bp, Artificial
  Synthetic oligonucleotide
actacttaggggggccagggcactaacagacatagtaccactaactgaagaggcaga

SEQ ID NO: 315974 - DNA, 59 bp, Artificial
  Synthetic oligonucleotide
actacttcaactaccacgaaaactgcaggcgcaactcctgccacagcttcaggactgtt

SEQ ID NO: 315975 - DNA, 60 bp, Artificial
  Synthetic oligonucleotide
actacttcacagcagaagtgtcccattgcagggccacggaatacataatgaaaggagtct

SEQ ID NO: 315976 - DNA, 57 bp, Artificial
  Synthetic oligonucleotide
actacttccggtgaaggacgcgctaaacgattaggaaaggaggcgagcacgacagca

SEQ ID NO: 315977 - DNA, 56 bp, Artificial
  Synthetic oligonucleotide
actacttctctgacctggagattgtggtacgacacaacggcaacctaacctgggta

SEQ ID NO: 315978 - DNA, 57 bp, Artificial
  Synthetic oligonucleotide
actacttgaattccccttggtacaagatattggtgctcgagtgaaagatccatttac

SEQ ID NO: 315979 - DNA, 60 bp, Artificial
  Synthetic oligonucleotide
actacttggacatctattccaactttggctgctcagtttccatttaatgcttcagactca

SEQ ID NO: 315980 - DNA, 58 bp, Artificial
  Synthetic oligonucleotide
actacttggagacccctcctatcactgctactgtcaccacttatggcgacggactccc

SEQ ID NO: 315981 - DNA, 55 bp, Artificial
  Synthetic oligonucleotide
actacttggtatccgaacttggtaagtatgtagctatatcaagctggctgaactc

SEQ ID NO: 315982 - DNA, 57 bp, Artificial
  Synthetic oligonucleotide
actacttgtaaaagctgggcaaataattggattgcatgtagggggtgacggatacaa

SEQ ID NO: 315983 - DNA, 50 bp, Artificial
  Synthetic oligonucleotide
actactttaactccactaacctctggaactgtaaccgttaaaggaacgtc

SEQ ID NO: 315984 - DNA, 59 bp, Artificial
  Synthetic oligonucleotide
actactttacagcggaagtgtctcattgccgggccactgagtacataatgaagggagta

SEQ ID NO: 315985 - DNA, 51 bp, Artificial
  Synthetic oligonucleotide
actactttccatggggcttcatcccgaaccattgctacccccgtgggggcc

SEQ ID NO: 315986 - DNA, 56 bp, Artificial
  Synthetic oligonucleotide
actactttggatgtgagtaagcttggtaagaagtggtacccgtacaagactagcac

SEQ ID NO: 315987 - DNA, 57 bp, Artificial
  Synthetic oligonucleotide
actagaaaagaatgtaacagtaacacattctgttaaccttctagaagacagacataa

SEQ ID NO: 315988 - DNA, 55 bp, Artificial
  Synthetic oligonucleotide
actagaacaactggtttcttcaagccttatcagtcctggaacaagaagccactcc

SEQ ID NO: 315989 - DNA, 55 bp, Artificial
  Synthetic oligonucleotide
actagaacacccggttaatcgcgatcgacagtatgctgggtagtatcggtgggcc

SEQ ID NO: 315990 - DNA, 52 bp, Artificial
  Synthetic oligonucleotide
actagaacataggtcgtgtgataaattaatataagccgtcccgggtgcagtt

SEQ ID NO: 315991 - DNA, 60 bp, Artificial
  Synthetic oligonucleotide
actagaaccctcaatctcgtgaattacgagattcacacacgtggcggccatccgatataa

SEQ ID NO: 315992 - DNA, 54 bp, Artificial
  Synthetic oligonucleotide
actagaactacagctagactagatgaagatgtgaataaacttagaatgatgcta

SEQ ID NO: 315993 - DNA, 60 bp, Artificial
  Synthetic oligonucleotide
actagaagaggcggcagtctccttaacgccctctcaactgctcgctgcgatccaagatat

SEQ ID NO: 315994 - DNA, 55 bp, Artificial
  Synthetic oligonucleotide
actagaagatacttatagtaagcaaccagcaacgcttatggatgttgataaggcg

SEQ ID NO: 315995 - DNA, 60 bp, Artificial
  Synthetic oligonucleotide
actagaagatattagagatgctgaagactggaacggaggccctatagacttgactcaaga

SEQ ID NO: 315996 - DNA, 55 bp, Artificial
  Synthetic oligonucleotide
actagaaggacaatcattgtctcccaccgacccgggcaatgcccgggtcggtgtg

SEQ ID NO: 315997 - DNA, 60 bp, Artificial
  Synthetic oligonucleotide
actagaatatcagaaggctttgaacagttggattgcgcaagtttcaatgcgtctgggaga

SEQ ID NO: 315998 - DNA, 60 bp, Artificial
  Synthetic oligonucleotide
actagaatgctttatgctttatgagttgtaacgcattatagaggaataacatgattgacg

SEQ ID NO: 315999 - DNA, 58 bp, Artificial
  Synthetic oligonucleotide
actagaccaaagaataatttggcagaactggtatgcgtttacatcttccatgaaacaa

SEQ ID NO: 316000 - DNA, 56 bp, Artificial
  Synthetic oligonucleotide
actagaccaatccaagtggcgcagggaggcagaaataaaactcagggagttagaaa

SEQ ID NO: 316001 - DNA, 57 bp, Artificial
  Synthetic oligonucleotide
actagaccaatccaagtggctcaaggcagcagaaatcaaactaagggagttagaaaa

SEQ ID NO: 316002 - DNA, 54 bp, Artificial
  Synthetic oligonucleotide
actagaccaatccaagtggctcagggaggccgaaaaacaacttcgggtactaga

SEQ ID NO: 316003 - DNA, 58 bp, Artificial
  Synthetic oligonucleotide
actagaccttggtctcttgttgtgtttaaacacagaaatcttgctgcttggttatgaa

SEQ ID NO: 316004 - DNA, 55 bp, Artificial
  Synthetic oligonucleotide
actagacgcgtcaaaggagttgtgcaagacataacatttcaaacaccagttggat

SEQ ID NO: 316005 - DNA, 58 bp, Artificial
  Synthetic oligonucleotide
actagactccggacttctgttgtgtttaaacacagaaatttgaatgtctggctatgaa

SEQ ID NO: 316006 - DNA, 60 bp, Artificial
  Synthetic oligonucleotide
actagactgagtggtatatatggattaccagcagcaaatcctaacaataacgtagagtat

SEQ ID NO: 316007 - DNA, 54 bp, Artificial
  Synthetic oligonucleotide
actagagaaggttgtgctaggtacacgtttccagttagtacaagttaagatggg

SEQ ID NO: 316008 - DNA, 58 bp, Artificial
  Synthetic oligonucleotide
actagagagaatggcacgaggactgtgtcttgggtaaggtaagggctccgaggtgcca

SEQ ID NO: 316009 - DNA, 51 bp, Artificial
  Synthetic oligonucleotide
actagagagcaatagcggatgattttaacctgccacctgtagtagcaaaag

SEQ ID NO: 316010 - DNA, 60 bp, Artificial
  Synthetic oligonucleotide
actagagagtacgcagaattttactcacaatcaaatcaattgctatcatatggtgatgtt

SEQ ID NO: 316011 - DNA, 59 bp, Artificial
  Synthetic oligonucleotide
actagagattctagaggagttaaagcaaggagctgttagacactttcctagaccatggc

SEQ ID NO: 316012 - DNA, 58 bp, Artificial
  Synthetic oligonucleotide
actagagcactagtgcgcacagggatggatcccaggatgtgctccctcatgcagggct

SEQ ID NO: 316013 - DNA, 55 bp, Artificial
  Synthetic oligonucleotide
actagagcgagttactgaagtctgcaatatgcttgaccaagatctatacatggtg

SEQ ID NO: 316014 - DNA, 60 bp, Artificial
  Synthetic oligonucleotide
actagagctattcctgatagcgcgttagcagtaagtgtcctgtcgaagaatcgtgcaatc

SEQ ID NO: 316015 - DNA, 60 bp, Artificial
  Synthetic oligonucleotide
actagaggatgccaaaaatgttagattggatgacaagaatgaaatacagtctctgatcag

SEQ ID NO: 316016 - DNA, 60 bp, Artificial
  Synthetic oligonucleotide
actagaggggagcgttgcaacttggatgatagagataggtcagagcttagcccgctgctg

SEQ ID NO: 316017 - DNA, 60 bp, Artificial
  Synthetic oligonucleotide
actagagttagtgggctatatggactgcctgcagctaatccaaataatgggagagaatat

SEQ ID NO: 316018 - DNA, 53 bp, Artificial
  Synthetic oligonucleotide
actagatacttacgttctatcgtccgactatccggggtttaaatgaagctact

SEQ ID NO: 316019 - DNA, 57 bp, Artificial
  Synthetic oligonucleotide
actagatatgatccgttagaaacttactgtttagtacttccgagcaatcgtcgacga

SEQ ID NO: 316020 - DNA, 60 bp, Artificial
  Synthetic oligonucleotide
actagatcatgatgctttagggatggacgtcactagtatgtcttcatcactaagtccagc

SEQ ID NO: 316021 - DNA, 60 bp, Artificial
  Synthetic oligonucleotide
actagatctacctccaatcattcaaagactccatggcctcagcgcgttttcactccacag

SEQ ID NO: 316022 - DNA, 59 bp, Artificial
  Synthetic oligonucleotide
actagatctaggagactgcaccactgagggttggatacttggaaacccccgatgtgaca

SEQ ID NO: 316023 - DNA, 50 bp, Artificial
  Synthetic oligonucleotide
actagatctcttttctagcggttaaacagtgagatcatccccgatagcca

SEQ ID NO: 316024 - DNA, 56 bp, Artificial
  Synthetic oligonucleotide
actagatcttgcgcgtggtctaccctgatccgaaataaaaccgtcgtacatactgt

SEQ ID NO: 316025 - DNA, 57 bp, Artificial
  Synthetic oligonucleotide
actagatgaagacacttgaggtaactcaaccaccatatacgaacttgaaccattaaa

SEQ ID NO: 316026 - DNA, 60 bp, Artificial
  Synthetic oligonucleotide
actagatgacatttggacagtgttaaataatgcgagtgatatgattctcaaattatttga

SEQ ID NO: 316027 - DNA, 57 bp, Artificial
  Synthetic oligonucleotide
actagatgttgcgtgaagatatttcttcatttgccctaccaaaaggtaggatgcccc

SEQ ID NO: 316028 - DNA, 57 bp, Artificial
  Synthetic oligonucleotide
actagatttaaccttcaccaacgaagcggacacgcttctgagaacttagaataatga

SEQ ID NO: 316029 - DNA, 60 bp, Artificial
  Synthetic oligonucleotide
actagcaaaatctgtattcaacagcctatatgcatctccacaactcgaggggttctcagc

SEQ ID NO: 316030 - DNA, 59 bp, Artificial
  Synthetic oligonucleotide
actagcaaagttccttctggaccgagaattggttatgccacgtgtggcacatacagtct

SEQ ID NO: 316031 - DNA, 60 bp, Artificial
  Synthetic oligonucleotide
actagcaagatagttaaatggataatcagaatcatatcagcagtcacaatcatcattaga

SEQ ID NO: 316032 - DNA, 55 bp, Artificial
  Synthetic oligonucleotide
actagcaagggagagttcactatgttaggagtccacgacaacgtggctattttac

SEQ ID NO: 316033 - DNA, 60 bp, Artificial
  Synthetic oligonucleotide
actagcaatgtccaaccagaggatatgattgagactcgatatgttcagacatcgcagacg

SEQ ID NO: 316034 - DNA, 56 bp, Artificial
  Synthetic oligonucleotide
actagcacagacccctttagtagtacccctttgcctggtgttcgtcgccttgcaca

SEQ ID NO: 316035 - DNA, 56 bp, Artificial
  Synthetic oligonucleotide
actagcacccagttgccaactgggtgtggaacactatgtggggcgaaaaccccata

SEQ ID NO: 316036 - DNA, 55 bp, Artificial
  Synthetic oligonucleotide
actagcacgcagacatatagcccgtgagctacatccggagtattacaagaactgc

SEQ ID NO: 316037 - DNA, 60 bp, Artificial
  Synthetic oligonucleotide
actagcatcatcaacacaattctgaacaacatctacgtgctctacgcgctgcgtagacac

SEQ ID NO: 316038 - DNA, 54 bp, Artificial
  Synthetic oligonucleotide
actagccaatatgaccaatgatgccagagttattcagacgttaaatttatacaa

SEQ ID NO: 316039 - DNA, 54 bp, Artificial
  Synthetic oligonucleotide
actagcccaccccctgactgcattaatgatttgctccaatcagtggactcacag

SEQ ID NO: 316040 - DNA, 55 bp, Artificial
  Synthetic oligonucleotide
actagcccccgactttccagggttctacacagaggtcatatataacccagcaaac

SEQ ID NO: 316041 - DNA, 56 bp, Artificial
  Synthetic oligonucleotide
actagccctgttgtagcaaatcagaccattctcaataaagtatccatttagatcat

SEQ ID NO: 316042 - DNA, 54 bp, Artificial
  Synthetic oligonucleotide
actagccgtagacgtctcgcaggtagacaggggaacgcaatccctacaaaagtt

SEQ ID NO: 316043 - DNA, 59 bp, Artificial
  Synthetic oligonucleotide
actagcctatgaaaatgctaacccagcctgtcaagcagcaattcgtccttaccgaaaga

SEQ ID NO: 316044 - DNA, 58 bp, Artificial
  Synthetic oligonucleotide
actagccttatgaccttatataatgtggatgccggtagagcacctatcaccgccgggt

SEQ ID NO: 316045 - DNA, 53 bp, Artificial
  Synthetic oligonucleotide
actagcgaacatgacgaatctcaacattgagtcgctagtggaaacccagccag

SEQ ID NO: 316046 - DNA, 60 bp, Artificial
  Synthetic oligonucleotide
actagcgaatgggcagcgacaagccatgtgatgcccagtattaatgaagtagtcagttca

SEQ ID NO: 316047 - DNA, 52 bp, Artificial
  Synthetic oligonucleotide
actagcgaccaggtgaaagtgaattggcccgttatcgagattggcgactaca

SEQ ID NO: 316048 - DNA, 59 bp, Artificial
  Synthetic oligonucleotide
actagcgaccgcctgatggaccacatgagccccaatgacttagcgtatttacaagccct

SEQ ID NO: 316049 - DNA, 59 bp, Artificial
  Synthetic oligonucleotide
actagcgacgatttgttgacaggcgattctacgatcgtcaagtccattcccgtccgctc

SEQ ID NO: 316050 - DNA, 60 bp, Artificial
  Synthetic oligonucleotide
actagcgatgtgcactgtcaagcaagcacggacgatgcaacagtttgaattatccccgtt

SEQ ID NO: 316051 - DNA, 51 bp, Artificial
  Synthetic oligonucleotide
actagcgattctcagttatttaataggccttattggcttagacgagcccag

SEQ ID NO: 316052 - DNA, 60 bp, Artificial
  Synthetic oligonucleotide
actagcgcaggcgatgttcgtctaactgagacgggctgctcccccgtctccgctgcctca

SEQ ID NO: 316053 - DNA, 56 bp, Artificial
  Synthetic oligonucleotide
actagcgccccttggcctagtagagacccctgtcggcaaaacgtctgaaaagcaca

SEQ ID NO: 316054 - DNA, 60 bp, Artificial
  Synthetic oligonucleotide
actagcgctatcaaatgtgatgggtacatatcatttcaggccaatagcattggtgaagca

SEQ ID NO: 316055 - DNA, 59 bp, Artificial
  Synthetic oligonucleotide
actagcggaggctagaaggagagagatgggtgcgagagcgtcagtattaagcgggggaa

SEQ ID NO: 316056 - DNA, 60 bp, Artificial
  Synthetic oligonucleotide
actagcggtgacaatggcgggtggagatacctcgctgccgagagcactgaacagaagggt

SEQ ID NO: 316057 - DNA, 58 bp, Artificial
  Synthetic oligonucleotide
actagctaacatgactaatgatgctaaagttattcagacgttaaatttatataaacaa

SEQ ID NO: 316058 - DNA, 60 bp, Artificial
  Synthetic oligonucleotide
actagctaccggaggagttcaaatagcttcgaatgagaacatggagacaatggactccag

SEQ ID NO: 316059 - DNA, 51 bp, Artificial
  Synthetic oligonucleotide
actagctcgactagtctctgtttactcccacaataatgtttatcttaaact

SEQ ID NO: 316060 - DNA, 59 bp, Artificial
  Synthetic oligonucleotide
actagctcgagctgcatgggagacagctagacacactccagtgaactcctggttgggga

SEQ ID NO: 316061 - DNA, 53 bp, Artificial
  Synthetic oligonucleotide
actagctctggtgcagaacattgaaagtgctctgtacgaagctagtattcatg

SEQ ID NO: 316062 - DNA, 60 bp, Artificial
  Synthetic oligonucleotide
actagctgagtactcaaagtaggacagttttgttgcccagtcatacggcaggctgctctg

SEQ ID NO: 316063 - DNA, 60 bp, Artificial
  Synthetic oligonucleotide
actagctgagtactcaaagtatgacagttttgtggcccagtcgtaaggcagtgaagtctg

SEQ ID NO: 316064 - DNA, 60 bp, Artificial
  Synthetic oligonucleotide
actagctgcacttccgagtggctgagttttccacgcccgtccgcagcgagtgagccacgg

SEQ ID NO: 316065 - DNA, 60 bp, Artificial
  Synthetic oligonucleotide
actagctgcggtaataccctcacatgttacttgaaggcctctgcggcctgtcgagctgca

SEQ ID NO: 316066 - DNA, 51 bp, Artificial
  Synthetic oligonucleotide
actagcttgcttaacactatagctataacagtagctgagggaacagatagg

SEQ ID NO: 316067 - DNA, 55 bp, Artificial
  Synthetic oligonucleotide
actaggaaaactcccgagaatataactataagtggcagaaaattgctaggtgcaa

SEQ ID NO: 316068 - DNA, 60 bp, Artificial
  Synthetic oligonucleotide
actaggaaattacaaggagatatgcgttgcttggtcgagcagcagttgctttgacgggaa

SEQ ID NO: 316069 - DNA, 55 bp, Artificial
  Synthetic oligonucleotide
actaggaattatgaagacaccaccacagttctggccactcttgctctcttagggt

SEQ ID NO: 316070 - DNA, 53 bp, Artificial
  Synthetic oligonucleotide
actaggaccttggcgttcttgaatgctccttttcaaacgtataccgttagtcg

SEQ ID NO: 316071 - DNA, 55 bp, Artificial
  Synthetic oligonucleotide
actaggatcaccactagtactagatgactgttcattagagggtctaatcctaggc

SEQ ID NO: 316072 - DNA, 51 bp, Artificial
  Synthetic oligonucleotide
actaggattaaaatagctgttgggtggctctactcactaggaatcagactt

SEQ ID NO: 316073 - DNA, 56 bp, Artificial
  Synthetic oligonucleotide
actaggattagaaatttgtgttatgtgcctcacgctacttactacgctttacgcgg

SEQ ID NO: 316074 - DNA, 53 bp, Artificial
  Synthetic oligonucleotide
actaggcaaggaacaggaactagcgaaaactatagacctaagcctaacggaat

SEQ ID NO: 316075 - DNA, 52 bp, Artificial
  Synthetic oligonucleotide
actaggccccgtatggctcactgtgcgctgtgtgttgtaccgatgtcgctac

SEQ ID NO: 316076 - DNA, 60 bp, Artificial
  Synthetic oligonucleotide
actaggctactgcattgcgttgtataagacctgtcagcaggtgtgcatatcactagggat

SEQ ID NO: 316077 - DNA, 60 bp, Artificial
  Synthetic oligonucleotide
actaggctggtcagcaacgtacagcaaagatctcgggatctacgtgccagtacttgacaa

SEQ ID NO: 316078 - DNA, 59 bp, Artificial
  Synthetic oligonucleotide
actagggaaatgcaacgtggcggggtggctcctcggcaacccagaatgtgacctgctgc

SEQ ID NO: 316079 - DNA, 52 bp, Artificial
  Synthetic oligonucleotide
actagggattctatcagtacatatgggttgggacccagatttggtggagtgt

SEQ ID NO: 316080 - DNA, 55 bp, Artificial
  Synthetic oligonucleotide
actagggggagatgtagacgcctacatctctaaggtatggaaaaacttttgtgtg

SEQ ID NO: 316081 - DNA, 55 bp, Artificial
  Synthetic oligonucleotide
actaggggggccccgcgcgtagaccttcggcctcgctgctaccgctctcgctacc

SEQ ID NO: 316082 - DNA, 52 bp, Artificial
  Synthetic oligonucleotide
actagggttaagggccattattctatatttgcactaatggggtaaggttaaa

SEQ ID NO: 316083 - DNA, 55 bp, Artificial
  Synthetic oligonucleotide
actaggtcaggctttaaggagccacaggttatgttcgatttcgcatcgggcttag

SEQ ID NO: 316084 - DNA, 55 bp, Artificial
  Synthetic oligonucleotide
actaggtctctcttgctagaccagatctgagcctaggagctctctggctagttaa

SEQ ID NO: 316085 - DNA, 55 bp, Artificial
  Synthetic oligonucleotide
actaggtgacgtttattcgatgatgcgttcatggtatgattggagtgttcgacca

SEQ ID NO: 316086 - DNA, 55 bp, Artificial
  Synthetic oligonucleotide
actaggtgatgacggaattcttacacagtcatctaacgttagtaaaagtggtagc

SEQ ID NO: 316087 - DNA, 59 bp, Artificial
  Synthetic oligonucleotide
actaggtgcatcttagagcgaatagtagaataacttccagtcggcgaagcaacgtgtag

SEQ ID NO: 316088 - DNA, 53 bp, Artificial
  Synthetic oligonucleotide
actaggtggtaacatcaattctatccaagctgccgaaggatattacattggag

SEQ ID NO: 316089 - DNA, 58 bp, Artificial
  Synthetic oligonucleotide
actaggtgtccgcggagcggactatacatacaacctagagctgggtctaccggcaaca

SEQ ID NO: 316090 - DNA, 54 bp, Artificial
  Synthetic oligonucleotide
actaggttacttaattgggaaagtgtttcttctttggtgagagagcagtgtggg

SEQ ID NO: 316091 - DNA, 55 bp, Artificial
  Synthetic oligonucleotide
actagtaaatgttaccaatttgcacttgggcaggggaccacgctggacaacaaac

SEQ ID NO: 316092 - DNA, 55 bp, Artificial
  Synthetic oligonucleotide
actagtaagctttgtgtttagatccccaacataaagttctctattgcttccaacc

SEQ ID NO: 316093 - DNA, 50 bp, Artificial
  Synthetic oligonucleotide
actagtaatgctatcaggtgggtcggatttttcttaccgcctcccaattg

SEQ ID NO: 316094 - DNA, 58 bp, Artificial
  Synthetic oligonucleotide
actagtaattgtgtacttaccgcgcgtgaacgctggaatgctcctgacgttcatcccg

SEQ ID NO: 316095 - DNA, 60 bp, Artificial
  Synthetic oligonucleotide
actagtacagggaagtgttcattcaattatcacaggagaatcatatggtgaatccgtaaa

SEQ ID NO: 316096 - DNA, 54 bp, Artificial
  Synthetic oligonucleotide
actagtacggtttgacgtgattaacaaattgtcaaagtttcataatgtatttgt

SEQ ID NO: 316097 - DNA, 55 bp, Artificial
  Synthetic oligonucleotide
actagtagaaggtaattctactacccggcatatgcaagatattatgtccgaggcc

SEQ ID NO: 316098 - DNA, 58 bp, Artificial
  Synthetic oligonucleotide
actagtagagcctggagacacaataacattcgaggcaactggaaacctagtggtacca

SEQ ID NO: 316099 - DNA, 50 bp, Artificial
  Synthetic oligonucleotide
actagtagatggttagcgattattttagtcgaaccaaacgtatctcagga

SEQ ID NO: 316100 - DNA, 54 bp, Artificial
  Synthetic oligonucleotide
actagtagtggcgggaaagaatctaatgccactagtagtagcgagggaggagac

SEQ ID NO: 316101 - DNA, 58 bp, Artificial
  Synthetic oligonucleotide
actagtatcatgttagctcgaggtggtaaccataccgtacggtggtcagccatactct

SEQ ID NO: 316102 - DNA, 58 bp, Artificial
  Synthetic oligonucleotide
actagtcaaacaagtgtaataccaaatattggcagtagaccatgggtgagaggccaaa

SEQ ID NO: 316103 - DNA, 60 bp, Artificial
  Synthetic oligonucleotide
actagtcagatcaattcaattgtccattggatactgtggtccgcaaccgtgcgcaagtgc

SEQ ID NO: 316104 - DNA, 60 bp, Artificial
  Synthetic oligonucleotide
actagtcattgcagagttgaaggaaggtggcatggacttttacgtgcccaggcaagagcc

SEQ ID NO: 316105 - DNA, 55 bp, Artificial
  Synthetic oligonucleotide
actagtcctggtggcctggtgcaatttgactatgataatcctgcctttgatccct

SEQ ID NO: 316106 - DNA, 55 bp, Artificial
  Synthetic oligonucleotide
actagtcgaactagatggggaatttacactctcgtgtagaggaatcatgatgggg

SEQ ID NO: 316107 - DNA, 58 bp, Artificial
  Synthetic oligonucleotide
actagtcgaattgatcaatccaaatatggatgggccttttcagttggtacaagggcaa

SEQ ID NO: 316108 - DNA, 59 bp, Artificial
  Synthetic oligonucleotide
actagtcgccgacatggtgctaacggagggagtggagatgatcgtgggatgtaacttcc

SEQ ID NO: 316109 - DNA, 54 bp, Artificial
  Synthetic oligonucleotide
actagtctttggacttttgttgtgtttaaacacagaaattttgctatttggcta

SEQ ID NO: 316110 - DNA, 57 bp, Artificial
  Synthetic oligonucleotide
actagtgacgagagtatgattgaaacacgatgcgttcttaactcacatagcacagct

SEQ ID NO: 316111 - DNA, 58 bp, Artificial
  Synthetic oligonucleotide
actagtgagtgggtgcgtagtcaaaatagggcactggagccttacatgaggggggcgc

SEQ ID NO: 316112 - DNA, 57 bp, Artificial
  Synthetic oligonucleotide
actagtggaaaagcagaagtcagcgcgcagacgtcaccgacaaaacaggaaggcccg

SEQ ID NO: 316113 - DNA, 55 bp, Artificial
  Synthetic oligonucleotide
actagtggataagcactattctgcgttgttacctgtggagtacagtccggcggcc

SEQ ID NO: 316114 - DNA, 53 bp, Artificial
  Synthetic oligonucleotide
actagtgggagtattaaactgggcagctcaacttttccccggaatcaaaacaa

SEQ ID NO: 316115 - DNA, 60 bp, Artificial
  Synthetic oligonucleotide
actagtgggtacgctttacactattatgcaaacaatccagcaatgatgaaagagtataag

SEQ ID NO: 316116 - DNA, 59 bp, Artificial
  Synthetic oligonucleotide
actagtggtagatcgggctttgaaatcatcaaagttacagagggatggatcaactctcc

SEQ ID NO: 316117 - DNA, 60 bp, Artificial
  Synthetic oligonucleotide
actagtggtggaacaactatggtgccaatcactgtctctatagcccctatgtgttgtgag

SEQ ID NO: 316118 - DNA, 55 bp, Artificial
  Synthetic oligonucleotide
actagtgttccaggccctgatgtgatcccgtgttgtgattgcactgctggttgct

SEQ ID NO: 316119 - DNA, 60 bp, Artificial
  Synthetic oligonucleotide
actagtgttcgccatggtgtcaccgtgtgtgttaatggcaatgttcaatagtggatctct

SEQ ID NO: 316120 - DNA, 51 bp, Artificial
  Synthetic oligonucleotide
actagttattaagaggttcgctaaaattgcaccattgacggttaacggcgt

SEQ ID NO: 316121 - DNA, 54 bp, Artificial
  Synthetic oligonucleotide
actagttcaggtgtattgccacaagataaacatgttaagaaactttcccgttat

SEQ ID NO: 316122 - DNA, 60 bp, Artificial
  Synthetic oligonucleotide
actagttcagtgctgtgcgatcttcagttcattattgatgccgagtgacgacggctaggg

SEQ ID NO: 316123 - DNA, 56 bp, Artificial
  Synthetic oligonucleotide
actagttcccttcgtggatctgcgttgcaaactaaattggccacttcccgtgtcat

SEQ ID NO: 316124 - DNA, 60 bp, Artificial
  Synthetic oligonucleotide
actagttgcagcacgtgggtcaacaaaagctggcttcaactactcgtcagtggtggagag

SEQ ID NO: 316125 - DNA, 52 bp, Artificial
  Synthetic oligonucleotide
actagttggagtaataaagctctggatgagatttggaataacatgacctgga

SEQ ID NO: 316126 - DNA, 59 bp, Artificial
  Synthetic oligonucleotide
actagtttcttacatttctatagacttacacactagaagagtgcagacacgtccattgg

SEQ ID NO: 316127 - DNA, 57 bp, Artificial
  Synthetic oligonucleotide
actagtttggtagatagagccactaatgttagatacagtttagaccaattggttaca

SEQ ID NO: 316128 - DNA, 53 bp, Artificial
  Synthetic oligonucleotide
actagttttccgcctataataatttaaatgcttatgggcatgtattttttggc

SEQ ID NO: 316129 - DNA, 53 bp, Artificial
  Synthetic oligonucleotide
actataaaatatctcgggcttttactgcgcagactgcgtgagggttaccgcgc

SEQ ID NO: 316130 - DNA, 54 bp, Artificial
  Synthetic oligonucleotide
actataaaggtttatgttaggcgtatagatgggactttagtagaacagaccgac

SEQ ID NO: 316131 - DNA, 60 bp, Artificial
  Synthetic oligonucleotide
actataacattgcatttcaagcaatatgagtgcaattcccccgcaaacaaccaagtaatg

SEQ ID NO: 316132 - DNA, 52 bp, Artificial
  Synthetic oligonucleotide
actataaccccccgctaatagagccgtggaaaaagcctgactacgaaccacc

SEQ ID NO: 316133 - DNA, 52 bp, Artificial
  Synthetic oligonucleotide
actataactagtctactcaggagacttcacaactggatcactgaggattgcc

SEQ ID NO: 316134 - DNA, 57 bp, Artificial
  Synthetic oligonucleotide
actataagatgggtggcaagtggtcaaaacgtagtgggggaggatgggctgctgtaa

SEQ ID NO: 316135 - DNA, 59 bp, Artificial
  Synthetic oligonucleotide
actataagatgggtggcaagtggtcaaaatgtagaggggcggatgacactccagcaagg

SEQ ID NO: 316136 - DNA, 58 bp, Artificial
  Synthetic oligonucleotide
actataaggagaaccgatttattgaaattggtgtgacaagaagagaagtccgcatata

SEQ ID NO: 316137 - DNA, 59 bp, Artificial
  Synthetic oligonucleotide
actataaggcatttgttgagcacccagaagagtttggtagtcagtcaggcttgtcaaag

SEQ ID NO: 316138 - DNA, 54 bp, Artificial
  Synthetic oligonucleotide
actataagggaaagaataagacgaacccctccaatagcagaaggggtgggagca

SEQ ID NO: 316139 - DNA, 53 bp, Artificial
  Synthetic oligonucleotide
actataataggagacttaccactaccattaaaccttgggctaggaacattcta

SEQ ID NO: 316140 - DNA, 56 bp, Artificial
  Synthetic oligonucleotide
actatacaaacgttaaccctatttctcacatcagggggagtattattatcactata

SEQ ID NO: 316141 - DNA, 56 bp, Artificial
  Synthetic oligonucleotide
actatacacgcggtaccctcagacctactaacggtccttgacatcacagttgggaa

SEQ ID NO: 316142 - DNA, 54 bp, Artificial
  Synthetic oligonucleotide
actatacagacgctacagacggtacagacgaaaacgaaagagggctaaaataac

SEQ ID NO: 316143 - DNA, 53 bp, Artificial
  Synthetic oligonucleotide
actatacatttggggggttcaccacccgagcacggaccaagaacaaaccagcc

SEQ ID NO: 316144 - DNA, 57 bp, Artificial
  Synthetic oligonucleotide
actataccacacttacactaattttgagcgggatgacatcagtatgttagcctatgg

SEQ ID NO: 316145 - DNA, 51 bp, Artificial
  Synthetic oligonucleotide
actatacgacagatttatgagatattaaaaggtcatactgatcctatattt

SEQ ID NO: 316146 - DNA, 59 bp, Artificial
  Synthetic oligonucleotide
actatagaaatggagacccacagacaccattccagatagcggaacagcaaatacaaaac

SEQ ID NO: 316147 - DNA, 51 bp, Artificial
  Synthetic oligonucleotide
actatagacaagctgagtcccttccgagtacatggaaccgtgtccaatctt

SEQ ID NO: 316148 - DNA, 60 bp, Artificial
  Synthetic oligonucleotide
actatagacagcattagaaagaaaaggccgcaacatatcaggaaaatcattagggacaga

SEQ ID NO: 316149 - DNA, 55 bp, Artificial
  Synthetic oligonucleotide
actatagaccccgagatgatgacccatacaagcaagtatttatgctcaaaggtcc

SEQ ID NO: 316150 - DNA, 57 bp, Artificial
  Synthetic oligonucleotide
actatagaggttttggtgtatatgcgaggaggaaagaattacgcattgcacggttta

SEQ ID NO: 316151 - DNA, 50 bp, Artificial
  Synthetic oligonucleotide
actatagattggaaatctagatatgaacaacttgagaaacgatttgagtc

SEQ ID NO: 316152 - DNA, 59 bp, Artificial
  Synthetic oligonucleotide
actatagcacccatgtgttgtgaattcaatggtcttagaaacctaaccattcctgccac

SEQ ID NO: 316153 - DNA, 55 bp, Artificial
  Synthetic oligonucleotide
actatagcgggcatagtaccatcctctccaagcagcccctctagcccaagtagcc

SEQ ID NO: 316154 - DNA, 58 bp, Artificial
  Synthetic oligonucleotide
actataggcctcgtcgtgctccttagcgtctgcgtctatttcattagttggtggtccc

SEQ ID NO: 316155 - DNA, 55 bp, Artificial
  Synthetic oligonucleotide
actatataagctgatgtgcattgcccaaggaccttacactggtttaccacagccc

SEQ ID NO: 316156 - DNA, 52 bp, Artificial
  Synthetic oligonucleotide
actatatactagaccgcccattttacccctacgtaccaactcctccacaaaa

SEQ ID NO: 316157 - DNA, 60 bp, Artificial
  Synthetic oligonucleotide
actatatagataaacagttgttacccattgtgaacaagcaaagctgcagcatatcaaaca

SEQ ID NO: 316158 - DNA, 59 bp, Artificial
  Synthetic oligonucleotide
actatatatactagaaccctcaatagaaccctcattctcgttcgcacacgtggcggcca

SEQ ID NO: 316159 - DNA, 50 bp, Artificial
  Synthetic oligonucleotide
actatatctcgacgccaaactggcgtatgcgttaaacaaggcaatcctca

SEQ ID NO: 316160 - DNA, 58 bp, Artificial
  Synthetic oligonucleotide
actatatgcgtaacctgatggacgtagctaacagtcctcgcaagggggacttggaggc

SEQ ID NO: 316161 - DNA, 60 bp, Artificial
  Synthetic oligonucleotide
actatatggacatttatatgcgcaatgcattagatggcaatcctatgtgctttgatagaa

SEQ ID NO: 316162 - DNA, 60 bp, Artificial
  Synthetic oligonucleotide
actatcaacagacggatgaggcaaacaagtggatatcaatgggagactcatgtacgatca

SEQ ID NO: 316163 - DNA, 54 bp, Artificial
  Synthetic oligonucleotide
actatcaactttaatttttagtgtatggcttgttaccgttgtgactccagcccc

SEQ ID NO: 316164 - DNA, 58 bp, Artificial
  Synthetic oligonucleotide
actatcaattgtgtctctcctccctttgtgcctgtccacgacatctcaaaaaacgaca

SEQ ID NO: 316165 - DNA, 57 bp, Artificial
  Synthetic oligonucleotide
actatcaccaagatgtcttcgaaaacctgggatgatgatttcgttcgccaggtcccg

SEQ ID NO: 316166 - DNA, 60 bp, Artificial
  Synthetic oligonucleotide
actatcaccctcaatgactatacttatcggtcttaaaggccgcgcagcggcactgacaac

SEQ ID NO: 316167 - DNA, 60 bp, Artificial
  Synthetic oligonucleotide
actatcaccctctatcacaatacccatgggtctcaaagtccgcgcagcggcaccaacaac

SEQ ID NO: 316168 - DNA, 52 bp, Artificial
  Synthetic oligonucleotide
actatcaccggcgggagttacgttgtcgacgcaatttactgactatgtatcg

SEQ ID NO: 316169 - DNA, 60 bp, Artificial
  Synthetic oligonucleotide
actatcacgaacgactatgaagttcaggtgaatcgaaaagcggaagctgcttactactgc

SEQ ID NO: 316170 - DNA, 60 bp, Artificial
  Synthetic oligonucleotide
actatcacgcacgaggaagtatagaatcattgggaattcaggtggcggcgattgcttctg

SEQ ID NO: 316171 - DNA, 55 bp, Artificial
  Synthetic oligonucleotide
actatcagagagcgttacgttgtttcgctaattggctttcgtacgtgcatggcac

SEQ ID NO: 316172 - DNA, 55 bp, Artificial
  Synthetic oligonucleotide
actatcagtgagcagcagacctcgggagtacccctcatctttacctgcttacagg

SEQ ID NO: 316173 - DNA, 60 bp, Artificial
  Synthetic oligonucleotide
actatcattaatgtgcgacaggtaatggaatcaaggcccgatagtgacatggaagacgag

SEQ ID NO: 316174 - DNA, 60 bp, Artificial
  Synthetic oligonucleotide
actatccatatgacgtcaagttgacaatctcggactgcgggaaagaacagttcgtgataa

SEQ ID NO: 316175 - DNA, 60 bp, Artificial
  Synthetic oligonucleotide
actatccatcctagcaattctgaagggactatacaatgttgccacgtgtggcttgatagg

SEQ ID NO: 316176 - DNA, 57 bp, Artificial
  Synthetic oligonucleotide
actatcccaccactggaatatgacctaagtactacaagtgcctacaaaagtgtgtcc

SEQ ID NO: 316177 - DNA, 53 bp, Artificial
  Synthetic oligonucleotide
actatcccataactagattcgcccgagtaatgattctgcccagcacctcgcta

SEQ ID NO: 316178 - DNA, 51 bp, Artificial
  Synthetic oligonucleotide
actatcccggaacgggcgtgtaatgatatgcgaaccaacccgtgtgttagt

SEQ ID NO: 316179 - DNA, 60 bp, Artificial
  Synthetic oligonucleotide
actatccttgcagactttagcaagacacgccggcttgtagaggatagttcagacgggtgc

SEQ ID NO: 316180 - DNA, 58 bp, Artificial
  Synthetic oligonucleotide
actatcgaacacataaacggaaaggagaaccagttagcagatacactaagcagactag

SEQ ID NO: 316181 - DNA, 60 bp, Artificial
  Synthetic oligonucleotide
actatcgatggattagttcagggtagcgtacactcgatcatgacgggagaatcatacggt

SEQ ID NO: 316182 - DNA, 58 bp, Artificial
  Synthetic oligonucleotide
actatcgcggtaaatatctaaatcgctggcccactccgataggtcaattgtaagccat

SEQ ID NO: 316183 - DNA, 60 bp, Artificial
  Synthetic oligonucleotide
actatcgctgcaagagcactcactgtgatgcgagcatgtgctacgcttcaggaagcaaga

SEQ ID NO: 316184 - DNA, 50 bp, Artificial
  Synthetic oligonucleotide
actatcggaaactccacaataactactcaagatgcacttaatacagtctt

SEQ ID NO: 316185 - DNA, 55 bp, Artificial
  Synthetic oligonucleotide
actatcggaactggcagccccaaatttgattatatatgccatgctatgagaagga

SEQ ID NO: 316186 - DNA, 55 bp, Artificial
  Synthetic oligonucleotide
actatcggagactgtcccaaatatgtgaatgtcaagtctctaaagcttgccacgg

SEQ ID NO: 316187 - DNA, 55 bp, Artificial
  Synthetic oligonucleotide
actatcggggtgcgcacaatcgagaaaggcccccgggaaggtatgacggagctat

SEQ ID NO: 316188 - DNA, 54 bp, Artificial
  Synthetic oligonucleotide
actatcgtcagctatcattgcggtgatgacgtactcttgtgtggtgactacgac

SEQ ID NO: 316189 - DNA, 56 bp, Artificial
  Synthetic oligonucleotide
actatcgtgccttccccgaaagtgaaatgctgcggttcccttgagtgccaacccgc

SEQ ID NO: 316190 - DNA, 55 bp, Artificial
  Synthetic oligonucleotide
actatcgtgtagcacacagcaaggagaacgatatgtatacagttgggtttggttg

SEQ ID NO: 316191 - DNA, 56 bp, Artificial
  Synthetic oligonucleotide
actatcgttattcgcttagtatgctgaacttttaggcaggtggccgtttgtgttcg

SEQ ID NO: 316192 - DNA, 59 bp, Artificial
  Synthetic oligonucleotide
actatcgttcacccacctacagctggactcacggcaccgcgtggccattttagctggac

SEQ ID NO: 316193 - DNA, 56 bp, Artificial
  Synthetic oligonucleotide
actatctatagaggcgcatcgattagataagagaaaacaatgcggtaaattccagt

SEQ ID NO: 316194 - DNA, 57 bp, Artificial
  Synthetic oligonucleotide
actatctattacaacacgctcttttcaaatgagatgaaccccccacagcgacatttc

SEQ ID NO: 316195 - DNA, 60 bp, Artificial
  Synthetic oligonucleotide
actatctcagttaagtcatgagagagctggtattcatctctatgtgattctatatagtta

SEQ ID NO: 316196 - DNA, 58 bp, Artificial
  Synthetic oligonucleotide
actatctcatggcaaagtagagaatttgtgaccgtctgttggtaaaaattatatcaaa

SEQ ID NO: 316197 - DNA, 58 bp, Artificial
  Synthetic oligonucleotide
actatctccaccggcgctaagcgcgggaagagggggtaacgcatggctggcaagcttc

SEQ ID NO: 316198 - DNA, 60 bp, Artificial
  Synthetic oligonucleotide
actatctccttcaatgactatactaataggtctctccggccgcgcagcggcatccttcac

SEQ ID NO: 316199 - DNA, 55 bp, Artificial
  Synthetic oligonucleotide
actatctgtcttgtacttagagtggaacgagtcatgcaaagaacagcgctcaccc

SEQ ID NO: 316200 - DNA, 60 bp, Artificial
  Synthetic oligonucleotide
actatctgtgacagtgttcagcaagacataattgtcttcactataaatgagccagatcta

SEQ ID NO: 316201 - DNA, 60 bp, Artificial
  Synthetic oligonucleotide
actatcttaaaaggatgctgtctgacaacgagtggggatcaactctagaggcatctatgt

SEQ ID NO: 316202 - DNA, 60 bp, Artificial
  Synthetic oligonucleotide
actatcttaagagctctgcatttttctatacacatcaagtgctaatccaacaacgactgt

SEQ ID NO: 316203 - DNA, 59 bp, Artificial
  Synthetic oligonucleotide
actatcttcaccctcaccccggcatacaaaccacttctcataagcacgctctggtggat

SEQ ID NO: 316204 - DNA, 57 bp, Artificial
  Synthetic oligonucleotide
actatcttcttcctgtccgctactgctccagatttggtacccttgttcgaaaacaca

SEQ ID NO: 316205 - DNA, 54 bp, Artificial
  Synthetic oligonucleotide
actatgaacctacccctctcatccacattccaggtcgagttaccaatctcttgg

SEQ ID NO: 316206 - DNA, 60 bp, Artificial
  Synthetic oligonucleotide
actatgacaaagcatctggctcaagcagtggaactatccaaaaagtccaatgccctgcgt

SEQ ID NO: 316207 - DNA, 53 bp, Artificial
  Synthetic oligonucleotide
actatgacagcgacccccctcaccaacctgttcttacgggccccggacataac

SEQ ID NO: 316208 - DNA, 60 bp, Artificial
  Synthetic oligonucleotide
actatgaccctgatcttcccgaagctaattggactgtggccaccacggatgtaattgcaa

SEQ ID NO: 316209 - DNA, 60 bp, Artificial
  Synthetic oligonucleotide
actatgacttcagagccagacatacactccacttttaatttggacagtagatccacgtgg

SEQ ID NO: 316210 - DNA, 53 bp, Artificial
  Synthetic oligonucleotide
actatgactttgtgggttatgaacacacttatggtttgttactattttgacaa

SEQ ID NO: 316211 - DNA, 56 bp, Artificial
  Synthetic oligonucleotide
actatgagtttatgttagccacacgatttaattatgtatacgtctaaatataaacg

SEQ ID NO: 316212 - DNA, 57 bp, Artificial
  Synthetic oligonucleotide
actatgatactattatatcttaaaggccgcgcagcggcatcaaccccaaaatatgca

SEQ ID NO: 316213 - DNA, 60 bp, Artificial
  Synthetic oligonucleotide
actatgatccctatgatagggtactacaacatggcagtgtcaaagcacggatacagggcc

SEQ ID NO: 316214 - DNA, 60 bp, Artificial
  Synthetic oligonucleotide
actatgatctaagcacaatagacagtggagaagcaattgaattaggggttttgggagagc

SEQ ID NO: 316215 - DNA, 60 bp, Artificial
  Synthetic oligonucleotide
actatgatggtggatcttgaaggatcgaccacgatatctaataggcgttataactgttgg

SEQ ID NO: 316216 - DNA, 55 bp, Artificial
  Synthetic oligonucleotide
actatgattgcatctgctgtgggagtaatgaatcaagttattcatggagtaacgg

SEQ ID NO: 316217 - DNA, 57 bp, Artificial
  Synthetic oligonucleotide
actatgcaatacgctttaggcgctcaccccgactacgttccccatgacgttattcgc

SEQ ID NO: 316218 - DNA, 59 bp, Artificial
  Synthetic oligonucleotide
actatgcaatccctcagtcccatgaggaacccgaaggttgcgatacgaaccagctcaac

SEQ ID NO: 316219 - DNA, 56 bp, Artificial
  Synthetic oligonucleotide
actatgcagcgcctagtaaacaaagggaataaacactttattgaatttgactggac

SEQ ID NO: 316220 - DNA, 58 bp, Artificial
  Synthetic oligonucleotide
actatgcatccttcttggcataacctactgaagccgtacaaactaagggattcaaatg

SEQ ID NO: 316221 - DNA, 55 bp, Artificial
  Synthetic oligonucleotide
actatgccaaacaatgacaattttgacaaactatacatttggggggttcaccacc

SEQ ID NO: 316222 - DNA, 58 bp, Artificial
  Synthetic oligonucleotide
actatgcccgtatggaatcatgaatctccttgttgctagccccggagatcgtgttgag

SEQ ID NO: 316223 - DNA, 60 bp, Artificial
  Synthetic oligonucleotide
actatgcgctcatttgggcccttcgaagcgacggcgtgcaatggcttggatcccctcact

SEQ ID NO: 316224 - DNA, 60 bp, Artificial
  Synthetic oligonucleotide
actatgcggcctctcgaccggctgtcatgagtgtcaaagcctacacaattggtggaaagg

SEQ ID NO: 316225 - DNA, 57 bp, Artificial
  Synthetic oligonucleotide
actatgcggcttcgcaaccaaatgtgagagaagtgaaggcctacacgctaggaactt

SEQ ID NO: 316226 - DNA, 54 bp, Artificial
  Synthetic oligonucleotide
actatgcggtctccggtcttcacagacaactcgtcccccccggccgtaccgcaa

SEQ ID NO: 316227 - DNA, 59 bp, Artificial
  Synthetic oligonucleotide
actatgcgtgttacagccctggtcacgctcaataaatatacaagttttgctcttaagct

SEQ ID NO: 316228 - DNA, 60 bp, Artificial
  Synthetic oligonucleotide
actatgcgttatgttttcccgaatactgactcgacgattgcactgatgatcatgcttctg

SEQ ID NO: 316229 - DNA, 54 bp, Artificial
  Synthetic oligonucleotide
actatgcgtttgtgtgcaatagacggtgtattaccgtatgcgatgcttgtcaat

SEQ ID NO: 316230 - DNA, 50 bp, Artificial
  Synthetic oligonucleotide
actatgctaggcatctacgacaggtgggctgttttaccacgccacgctaa

SEQ ID NO: 316231 - DNA, 60 bp, Artificial
  Synthetic oligonucleotide
actatgctataacatcatactaaagctttgcaatcaagtcaggatgtgagtctcagaccg

SEQ ID NO: 316232 - DNA, 60 bp, Artificial
  Synthetic oligonucleotide
actatgctatgcatggtcagatgaaatggtgggacatggtggtagaactcgacgtgatgt

SEQ ID NO: 316233 - DNA, 51 bp, Artificial
  Synthetic oligonucleotide
actatgctctcgagccttatgcagggttgcccgccctccaatttaccgcgt

SEQ ID NO: 316234 - DNA, 59 bp, Artificial
  Synthetic oligonucleotide
actatgctcttctatttatgtccttttatatagtggtggtttgtgggttgtgtgtctca

SEQ ID NO: 316235 - DNA, 53 bp, Artificial
  Synthetic oligonucleotide
actatgctgcctcaggggatccaacatcacctgacaacatcgaatcccctaat

SEQ ID NO: 316236 - DNA, 60 bp, Artificial
  Synthetic oligonucleotide
actatggagacaattaagagtattgcagatatggcgactggagtagtcagttcagttgat

SEQ ID NO: 316237 - DNA, 60 bp, Artificial
  Synthetic oligonucleotide
actatggagataattgtacactctgagagagcctcgactgacgtaccgtttcagctggtt

SEQ ID NO: 316238 - DNA, 60 bp, Artificial
  Synthetic oligonucleotide
actatggaggagtacctactgatgtcattaattcctgggcaggagatatattgagaactc

SEQ ID NO: 316239 - DNA, 52 bp, Artificial
  Synthetic oligonucleotide
actatggaggtgagcaataaggccctacttatccgtagtatcatcaacacca

SEQ ID NO: 316240 - DNA, 54 bp, Artificial
  Synthetic oligonucleotide
actatggatctaacctcaaaccaaccgtcaggcgccttcaagaccacaaaacta

SEQ ID NO: 316241 - DNA, 53 bp, Artificial
  Synthetic oligonucleotide
actatggatgtcctacatgcgatgtagggccacccttcacctgaaagacacac

SEQ ID NO: 316242 - DNA, 59 bp, Artificial
  Synthetic oligonucleotide
actatggccaatgatgtatatggcgatgcatgtttcttttttgcaagacgagagcaatg

SEQ ID NO: 316243 - DNA, 55 bp, Artificial
  Synthetic oligonucleotide
actatggcgaatgaaaagaccctattttacgccctattaggtgtaggagcaatta

SEQ ID NO: 316244 - DNA, 55 bp, Artificial
  Synthetic oligonucleotide
actatggcgcgcccaaacgcccgctcgccaaattagtcgctcaactgtgctaccc

SEQ ID NO: 316245 - DNA, 53 bp, Artificial
  Synthetic oligonucleotide
actatggctggacttactggtctcttcacgcagggcgcccaacagaaagtcca

SEQ ID NO: 316246 - DNA, 53 bp, Artificial
  Synthetic oligonucleotide
actatggctggtgtcaacacaaggtcctcgttgagcactccaacagccatcag

SEQ ID NO: 316247 - DNA, 59 bp, Artificial
  Synthetic oligonucleotide
actatggcttatcttaagctaagagctatcaacctcttccgtcccaatgaggcttcgaa

SEQ ID NO: 316248 - DNA, 60 bp, Artificial
  Synthetic oligonucleotide
actatggtgccattaaggcaacccgggtgactgagctgctctaccgcatgaagagggccg

SEQ ID NO: 316249 - DNA, 60 bp, Artificial
  Synthetic oligonucleotide
actatgtaaaatcaatgaggacaaatataaagacatgctggacagaatgattcagggtgg

SEQ ID NO: 316250 - DNA, 55 bp, Artificial
  Synthetic oligonucleotide
actatgtagactgaaaggaatagccccactacaattggggaaatgcagcatcgct

SEQ ID NO: 316251 - DNA, 55 bp, Artificial
  Synthetic oligonucleotide
actatgtatcatacttcgcagatgaccgataccgcatagacgcgcgacttctccc

SEQ ID NO: 316252 - DNA, 60 bp, Artificial
  Synthetic oligonucleotide
actatgtatggtgccgcctgaagtttcatatcgtaactgatgccgtttataggtctagcc

SEQ ID NO: 316253 - DNA, 60 bp, Artificial
  Synthetic oligonucleotide
actatgtattttgttcctcgtgctaaatcttgtgtttcgcgcataggtgatgcaatcttt

SEQ ID NO: 316254 - DNA, 54 bp, Artificial
  Synthetic oligonucleotide
actatgtccgcggcgtcagctatgtgatcgaaacgaagtacgacggacggacgt

SEQ ID NO: 316255 - DNA, 60 bp, Artificial
  Synthetic oligonucleotide
actatgtctggttaagcgatgtaccctcacaggtcgatctatatagcaatgtaattctta

SEQ ID NO: 316256 - DNA, 58 bp, Artificial
  Synthetic oligonucleotide
actatgtcttacattcatgagtggaagaacataaagtctttcttgacggatcaaactt

SEQ ID NO: 316257 - DNA, 51 bp, Artificial
  Synthetic oligonucleotide
actatgtgacatcacagattctggaaaccaagggtgcaaatcaccttttcg

SEQ ID NO: 316258 - DNA, 60 bp, Artificial
  Synthetic oligonucleotide
actatgtgcgtatgagatcgtgtatatcttctttgccagtgctggagattttgttgatat

SEQ ID NO: 316259 - DNA, 53 bp, Artificial
  Synthetic oligonucleotide
actatgtgtcccactgaggagccccccaaaaagaaggaggacccctacgacgc

SEQ ID NO: 316260 - DNA, 60 bp, Artificial
  Synthetic oligonucleotide
actatgtgttagatttgcaacctgaggcaactgacctccactgttatgagcaattacccg

SEQ ID NO: 316261 - DNA, 59 bp, Artificial
  Synthetic oligonucleotide
actatgtgttagcgaggtttcacctccaacattttaaattcagtatgtgtatcattctc

SEQ ID NO: 316262 - DNA, 56 bp, Artificial
  Synthetic oligonucleotide
actatgttacaggatcctaccacgcccctccagtattacctctggaactttgacga

SEQ ID NO: 316263 - DNA, 59 bp, Artificial
  Synthetic oligonucleotide
actatgttggatgaataacaatgtactgaacaagaatatttgaacaagcaaatttgaac

SEQ ID NO: 316264 - DNA, 56 bp, Artificial
  Synthetic oligonucleotide
actatgttgtcacaacagacatttccgaaatgggggcaaacttccgggctgacagg

SEQ ID NO: 316265 - DNA, 58 bp, Artificial
  Synthetic oligonucleotide
actattaacaagagatggtggtaataacagggctgataacgagaccgagaccttcaga

SEQ ID NO: 316266 - DNA, 53 bp, Artificial
  Synthetic oligonucleotide
actattaaccacccaacctttgtagggagtgagcgttgtaaacctggatacac

SEQ ID NO: 316267 - DNA, 52 bp, Artificial
  Synthetic oligonucleotide
actattaacccaattgatccctacatcctggaaacctttgttgaagtccccg

SEQ ID NO: 316268 - DNA, 60 bp, Artificial
  Synthetic oligonucleotide
actattaagagttggagaaacgatatattgagaacacaagagtctgaatgtgcctgcatt

SEQ ID NO: 316269 - DNA, 59 bp, Artificial
  Synthetic oligonucleotide
actattaagattcgaatctgaaagttatcaggtaagcatcttagatgttatcgatcgtt

SEQ ID NO: 316270 - DNA, 58 bp, Artificial
  Synthetic oligonucleotide
actattaaggaaaatgcgatgtatcgcgacagaaagtttgattcgaacgacgaggatg

SEQ ID NO: 316271 - DNA, 52 bp, Artificial
  Synthetic oligonucleotide
actattaccactcaggaagctgctaacatcactgtcggctacggtgtttggc

SEQ ID NO: 316272 - DNA, 55 bp, Artificial
  Synthetic oligonucleotide
actattactgacccagttgcgtttatggggacctgttgtctatactcgataacgc

SEQ ID NO: 316273 - DNA, 60 bp, Artificial
  Synthetic oligonucleotide
actattagattgtcattccagctaatgagaccaccaaatatgacaccaacagtagctgca

SEQ ID NO: 316274 - DNA, 55 bp, Artificial
  Synthetic oligonucleotide
actattaggggaacattctggtgatgctactattgtccaaggcccagtagaaagc

SEQ ID NO: 316275 - DNA, 59 bp, Artificial
  Synthetic oligonucleotide
actattatacacaatacacggataactctggctatagtcgaacagtatggaggacttac

SEQ ID NO: 316276 - DNA, 57 bp, Artificial
  Synthetic oligonucleotide
actattatacggacttgcattaggacacgaaatcgctccttcccgcatgggattaac

SEQ ID NO: 316277 - DNA, 54 bp, Artificial
  Synthetic oligonucleotide
actattatcatcctatccaaaaagttaggtggagacgttaacggtcgtgtataa

SEQ ID NO: 316278 - DNA, 58 bp, Artificial
  Synthetic oligonucleotide
actattatgctaacaaacatttgtccgccgacgaatgtcaacgtattctcggtcatcg

SEQ ID NO: 316279 - DNA, 56 bp, Artificial
  Synthetic oligonucleotide
actattatggtaaggctgatctcggtcaagtctttttgaataattacgtggtcgaa

SEQ ID NO: 316280 - DNA, 60 bp, Artificial
  Synthetic oligonucleotide
actattatttgtgcatctctctatattggaaatgcttgaaacaaggtcttgacagggttc

SEQ ID NO: 316281 - DNA, 52 bp, Artificial
  Synthetic oligonucleotide
actattcaaacaactacctctaaattggtttgttaaggactcaaaatagtcc

SEQ ID NO: 316282 - DNA, 58 bp, Artificial
  Synthetic oligonucleotide
actattcaaatcaatagcctgcccacaaccaccaagtagcacctttcaaacgagcgtg

SEQ ID NO: 316283 - DNA, 57 bp, Artificial
  Synthetic oligonucleotide
actattcaacccccatccttcctaaagcgtgtcgcgtctcgagctctccatatgttt

SEQ ID NO: 316284 - DNA, 52 bp, Artificial
  Synthetic oligonucleotide
actattcaagggaacggaacctggagacaccggccgagttcttagtaagcgg

SEQ ID NO: 316285 - DNA, 58 bp, Artificial
  Synthetic oligonucleotide
actattcaagggttacatatgctttccacctggactatgaaaagtggaacaatcacca

SEQ ID NO: 316286 - DNA, 56 bp, Artificial
  Synthetic oligonucleotide
actattcaatacctcccaccacctgagtgatttctccacccagtccaagcccgttg

SEQ ID NO: 316287 - DNA, 57 bp, Artificial
  Synthetic oligonucleotide
actattcagaattggcccttaatgttacagaggccttcgatgcttgggataatacag

SEQ ID NO: 316288 - DNA, 54 bp, Artificial
  Synthetic oligonucleotide
actattcagatttctctaagcaaaacttaattagtaaatacaagtctaaaagtc

SEQ ID NO: 316289 - DNA, 59 bp, Artificial
  Synthetic oligonucleotide
actattcatactatactaacaatgaaatccgaactgaccagcattgggtaacgaagaca

SEQ ID NO: 316290 - DNA, 60 bp, Artificial
  Synthetic oligonucleotide
actattcatcaaagaggggaaaattgttcacattagtccattgtcagggagtgctcaaca

SEQ ID NO: 316291 - DNA, 58 bp, Artificial
  Synthetic oligonucleotide
actattccaacaaatgcgtgacgtattggggacatttgatactgtccagataataaaa

SEQ ID NO: 316292 - DNA, 60 bp, Artificial
  Synthetic oligonucleotide
actattccagtgtgcattttgcacagccaaccatacctgtcccacactttgtcctcatat

SEQ ID NO: 316293 - DNA, 56 bp, Artificial
  Synthetic oligonucleotide
actattccgcgccgccgtttgtaccaggggagtcgccaaggcaatagacttcgtgc

SEQ ID NO: 316294 - DNA, 59 bp, Artificial
  Synthetic oligonucleotide
actattcctacttatcaagctcaagcaacaactttagcaagtatttcatcaatagtagg

SEQ ID NO: 316295 - DNA, 50 bp, Artificial
  Synthetic oligonucleotide
actattcgcatgtacaaaattcaacatgtcccggaattccattgggtgat

SEQ ID NO: 316296 - DNA, 59 bp, Artificial
  Synthetic oligonucleotide
actattcgcccccactcgattggagagcgttgtcatattgagtaccgcaatctacaaaa

SEQ ID NO: 316297 - DNA, 60 bp, Artificial
  Synthetic oligonucleotide
actattcggcctttgatgccaaccactgcagtgatgcgatgaacatcatgtttgaggagg

SEQ ID NO: 316298 - DNA, 58 bp, Artificial
  Synthetic oligonucleotide
actattcgtactctgactacgtgttgtcttacggacaactgcagctgaaaattttatg

SEQ ID NO: 316299 - DNA, 59 bp, Artificial
  Synthetic oligonucleotide
actattctaagctaagatccatggggtatgctctaacaggggcagttcaaacattagcc

SEQ ID NO: 316300 - DNA, 55 bp, Artificial
  Synthetic oligonucleotide
actattctagaacagagtaagaaactagcccgccgtggtatcgtagttcctaagc

SEQ ID NO: 316301 - DNA, 57 bp, Artificial
  Synthetic oligonucleotide
actattctcgcacttcagaatgtcgatttaaatataagaaagttaatggtacggcac

SEQ ID NO: 316302 - DNA, 58 bp, Artificial
  Synthetic oligonucleotide
actattctgaacgtaattgagaaattgggaactaatcactcagtgggagatttagtca

SEQ ID NO: 316303 - DNA, 60 bp, Artificial
  Synthetic oligonucleotide
actattctgacagtgattcttgctgaactactggttactgtatcacttgcaatcactcac

SEQ ID NO: 316304 - DNA, 55 bp, Artificial
  Synthetic oligonucleotide
actattctgggattcaagtaaatggcagcccctatgtggcccgtgccacggccgg

SEQ ID NO: 316305 - DNA, 59 bp, Artificial
  Synthetic oligonucleotide
actattcttaattatgtgggatacgatagagcttctgtgctggatgttaaacgtggaat

SEQ ID NO: 316306 - DNA, 55 bp, Artificial
  Synthetic oligonucleotide
actattgaaggaactgaaaccgctgaaggtatagagagtgcatatatagaatctg

SEQ ID NO: 316307 - DNA, 60 bp, Artificial
  Synthetic oligonucleotide
actattgaatgaccgctaatagtccagaatatgcggagcactgagttaccgacttaattg

SEQ ID NO: 316308 - DNA, 55 bp, Artificial
  Synthetic oligonucleotide
actattgacaagagatggtggaggtaataatgactcgagtcagaacgagaccttc

SEQ ID NO: 316309 - DNA, 60 bp, Artificial
  Synthetic oligonucleotide
actattgacagagaccatcacggaaagccctgctctggcagaatggaccacttcccgaag

SEQ ID NO: 316310 - DNA, 57 bp, Artificial
  Synthetic oligonucleotide
actattgatgggatgccacctttaatttgaactggctttccatatttacagtttgac

SEQ ID NO: 316311 - DNA, 58 bp, Artificial
  Synthetic oligonucleotide
actattgcaaaagtcgatcgaggctcaggccaacgacgctacttccgagatcggaaaa

SEQ ID NO: 316312 - DNA, 59 bp, Artificial
  Synthetic oligonucleotide
actattgcgcagcacaaacaccagtaaggaaagtcaatgcttataccttaggtactgga

SEQ ID NO: 316313 - DNA, 57 bp, Artificial
  Synthetic oligonucleotide
actattggacactattagaccaaggagacaccataacattcgaggccactgggaatt

SEQ ID NO: 316314 - DNA, 56 bp, Artificial
  Synthetic oligonucleotide
actattggcaagccacatggattcctgagtgggagtttgttaacaccccaccccta

SEQ ID NO: 316315 - DNA, 60 bp, Artificial
  Synthetic oligonucleotide
actattggcaagtcagaattcgcctattgattggaactatcatgatgaagagatgcataa

SEQ ID NO: 316316 - DNA, 55 bp, Artificial
  Synthetic oligonucleotide
actattgtcacccgaagaagttagcgaaacacaagggacagaaaagttgacaata

SEQ ID NO: 316317 - DNA, 60 bp, Artificial
  Synthetic oligonucleotide
actattgtcagcatgaatgggaggagaatcaacccattgatgattcagcatatgttcgat

SEQ ID NO: 316318 - DNA, 60 bp, Artificial
  Synthetic oligonucleotide
actattgtctcccgaagaagtcagtgagacacaaggaacagagaagctgaccataactta

SEQ ID NO: 316319 - DNA, 60 bp, Artificial
  Synthetic oligonucleotide
actattgtcttcacgcagaaagcgtctagccatggcgttagtatgagcgttgtacaacct

SEQ ID NO: 316320 - DNA, 58 bp, Artificial
  Synthetic oligonucleotide
actattgtggctgcttaacagctaaactgcaatgggattgtaaaaaataactgcttaa

SEQ ID NO: 316321 - DNA, 52 bp, Artificial
  Synthetic oligonucleotide
actattgtgtcttttaatcaagcagggtttaaccttgagcgaaaacggttaa

SEQ ID NO: 316322 - DNA, 50 bp, Artificial
  Synthetic oligonucleotide
actatttaagcgagcattgcaaccgaagaaatttactatagacatcgtca

SEQ ID NO: 316323 - DNA, 55 bp, Artificial
  Synthetic oligonucleotide
actatttatctagtctgctgaacttaccaacctccaaccgattcgccctcctgtg

SEQ ID NO: 316324 - DNA, 55 bp, Artificial
  Synthetic oligonucleotide
actatttcaggtgcaagtggactggtagcagctgggattcgctacggatatgcca

SEQ ID NO: 316325 - DNA, 60 bp, Artificial
  Synthetic oligonucleotide
actatttcagtcaatttttccgaatcgactatatctgattgaacactcaatttcagcagt

SEQ ID NO: 316326 - DNA, 50 bp, Artificial
  Synthetic oligonucleotide
actatttcctctgttgttactagctcatcaaagcagtcctcaagggggta

SEQ ID NO: 316327 - DNA, 59 bp, Artificial
  Synthetic oligonucleotide
actatttcgacatatagaggtagtaccgcatgcgtatgatccactcgaagtaagtgtcg

SEQ ID NO: 316328 - DNA, 60 bp, Artificial
  Synthetic oligonucleotide
actatttcgtcatttgtgatgagcggatatattataatggtaagtcgttgacatttgtac

SEQ ID NO: 316329 - DNA, 51 bp, Artificial
  Synthetic oligonucleotide
actatttgatttctacagaactggtatgtaggactcagatatctaatctat

SEQ ID NO: 316330 - DNA, 56 bp, Artificial
  Synthetic oligonucleotide
actatttgcctggaccttaaacataaggctccattgcaaataagatgtccgccatt

SEQ ID NO: 316331 - DNA, 55 bp, Artificial
  Synthetic oligonucleotide
actatttgggacttcgacaaccacatgatgcctgaccgagacgtcaaactcgtag

SEQ ID NO: 316332 - DNA, 60 bp, Artificial
  Synthetic oligonucleotide
actatttggggctatagcaggcttcatagagggaggatggcaaggaatggtagacggatg

SEQ ID NO: 316333 - DNA, 50 bp, Artificial
  Synthetic oligonucleotide
actatttgtcaatgcgcccgctgggattgagcctagctccgggcggtata

SEQ ID NO: 316334 - DNA, 57 bp, Artificial
  Synthetic oligonucleotide
actatttttggtcggccaatgagaatacgcgctcaaagcttagataaccgtgtggtc

SEQ ID NO: 316335 - DNA, 58 bp, Artificial
  Synthetic oligonucleotide
actatttttggtgttcaagaacagttatcagttgaaaacacctcacaagatcagtgga

SEQ ID NO: 316336 - DNA, 53 bp, Artificial
  Synthetic oligonucleotide
actcaaaaccaacaagctggatgacaggacctggcctgctcagtgcacaaaga

SEQ ID NO: 316337 - DNA, 55 bp, Artificial
  Synthetic oligonucleotide
actcaaaagcccgctacatggtggcctacatcccgcctggggtggaagtgccacc

SEQ ID NO: 316338 - DNA, 54 bp, Artificial
  Synthetic oligonucleotide
actcaaaagtaccagcgtggttgatccgtgttgcgtttgatatcgtaaaacaga

SEQ ID NO: 316339 - DNA, 57 bp, Artificial
  Synthetic oligonucleotide
actcaaacaatccagattgggacttcaaccccaacaaggatcactggccggaggcaa

SEQ ID NO: 316340 - DNA, 53 bp, Artificial
  Synthetic oligonucleotide
actcaaaccagagagttccaacccaaacaaccccaacccaagctcctcggcag

SEQ ID NO: 316341 - DNA, 58 bp, Artificial
  Synthetic oligonucleotide
actcaaacggttatgttgttcagagcgggataggagggataagagagagcaaagtgaa

SEQ ID NO: 316342 - DNA, 55 bp, Artificial
  Synthetic oligonucleotide
actcaaacgtcaagaacctttacgacaaggttcgactacagcttaaggataatgc

SEQ ID NO: 316343 - DNA, 60 bp, Artificial
  Synthetic oligonucleotide
actcaaactgctcttcaagctcggccctgtcgagcgctctgttgttgaagcagtccaaga

SEQ ID NO: 316344 - DNA, 58 bp, Artificial
  Synthetic oligonucleotide
actcaaaggcagggctgttggtatcagatggaggaccaaacctgtacaacattaggaa

SEQ ID NO: 316345 - DNA, 59 bp, Artificial
  Synthetic oligonucleotide
actcaaagtgggactccactatgtcaccgtgtgttgttaggttggcaattgacatcttg

SEQ ID NO: 316346 - DNA, 57 bp, Artificial
  Synthetic oligonucleotide
actcaaataggaggggtaagaatggtggacatactcaggcagaatccaacggaggaa

SEQ ID NO: 316347 - DNA, 60 bp, Artificial
  Synthetic oligonucleotide
actcaaatatcacagggctactattgctacgtgatggaggaaacgtggatagctcagagg

SEQ ID NO: 316348 - DNA, 60 bp, Artificial
  Synthetic oligonucleotide
actcaaatttagggatgcctttgacagaaaaataggccgtgaggtgtatgcagatgacta

SEQ ID NO: 316349 - DNA, 58 bp, Artificial
  Synthetic oligonucleotide
actcaacaaccctgacaggcaactgcgtcataacgcccgaacttctaacaagccttca

SEQ ID NO: 316350 - DNA, 59 bp, Artificial
  Synthetic oligonucleotide
actcaacattgctactccgtatgacgaatccacaacgcggacacgtaacaagcgtagtg

SEQ ID NO: 316351 - DNA, 60 bp, Artificial
  Synthetic oligonucleotide
actcaacattgctacttcatcatgacgaacccgtgacgcggacacgtaacaagcgtagtg

SEQ ID NO: 316352 - DNA, 55 bp, Artificial
  Synthetic oligonucleotide
actcaacattgctgccaacgtatagatgaacatttctgtggagcccttcaccctg

SEQ ID NO: 316353 - DNA, 60 bp, Artificial
  Synthetic oligonucleotide
actcaacattttcactccgtcatgacgaactcataacgcggacatataacaagcgtaatg

SEQ ID NO: 316354 - DNA, 60 bp, Artificial
  Synthetic oligonucleotide
actcaacccagctgctatgagtgtcgagcgctttagtatcttggattacccgcaatattg

SEQ ID NO: 316355 - DNA, 60 bp, Artificial
  Synthetic oligonucleotide
actcaacccgattgatggaccactacctgaggacaatgagccaagtgggtacgcacagac

SEQ ID NO: 316356 - DNA, 51 bp, Artificial
  Synthetic oligonucleotide
actcaaccctcggcacggttggatccaacgggagtgagcaaatagagtgcg

SEQ ID NO: 316357 - DNA, 57 bp, Artificial
  Synthetic oligonucleotide
actcaaccgggatcctcaaattcggaccgaacttatctcagtacgcagcgttcaaca

SEQ ID NO: 316358 - DNA, 56 bp, Artificial
  Synthetic oligonucleotide
actcaaccttgtttgagtaaaccctagaattgagatccaaatgcccgctcaaataa

SEQ ID NO: 316359 - DNA, 56 bp, Artificial
  Synthetic oligonucleotide
actcaacgaggattgtgaaattactcccgacgatcttcgtgtattggttgctacct

SEQ ID NO: 316360 - DNA, 60 bp, Artificial
  Synthetic oligonucleotide
actcaactactattaaatggcagcctagcagaagaagaggtggtaattagatctagcaat

SEQ ID NO: 316361 - DNA, 52 bp, Artificial
  Synthetic oligonucleotide
actcaactatatattaaaatcggtgactcgaataatggactacattatatat

SEQ ID NO: 316362 - DNA, 55 bp, Artificial
  Synthetic oligonucleotide
actcaactggatataccaaagtgtgcggagcgcctccctgtgccatcggaggagt

SEQ ID NO: 316363 - DNA, 56 bp, Artificial
  Synthetic oligonucleotide
actcaacttgatttgagtagacccgggaattgaaatctaaatggccactcaagtaa

SEQ ID NO: 316364 - DNA, 60 bp, Artificial
  Synthetic oligonucleotide
actcaacttgtgcatcagcggcgctaaacgtacacagcgtattgcccatggaattcttct

SEQ ID NO: 316365 - DNA, 57 bp, Artificial
  Synthetic oligonucleotide
actcaagaaagacgtgtgaacgttattctcacgcgtaacattggaatactctcgact

SEQ ID NO: 316366 - DNA, 60 bp, Artificial
  Synthetic oligonucleotide
actcaagaccagactactgctgactactggcacatctatcagaccatcaaaggtgacttg

SEQ ID NO: 316367 - DNA, 58 bp, Artificial
  Synthetic oligonucleotide
actcaagagttcgtttgttaggattgacagttgatcactccacggtcggagcaagtgg

SEQ ID NO: 316368 - DNA, 51 bp, Artificial
  Synthetic oligonucleotide
actcaagatgggtgtcccaatctaaagtgaggaagtctgttacttcgcgtg

SEQ ID NO: 316369 - DNA, 55 bp, Artificial
  Synthetic oligonucleotide
actcaagattacctcagagacatgttaaaggatgcatttagacaagctcgtgaac

SEQ ID NO: 316370 - DNA, 60 bp, Artificial
  Synthetic oligonucleotide
actcaagctcagcttagtgttcactattagatggaaccattccatgctagtccacttatg

SEQ ID NO: 316371 - DNA, 50 bp, Artificial
  Synthetic oligonucleotide
actcaagctgagattgtagcctgaaatgttgatactggattgctgttctg

SEQ ID NO: 316372 - DNA, 57 bp, Artificial
  Synthetic oligonucleotide
actcaagcttactgaagaagttttccttgaaagctaaagtggacttcactcgctctc

SEQ ID NO: 316373 - DNA, 55 bp, Artificial
  Synthetic oligonucleotide
actcaaggaccatctgcggggaggccatccgctcctccccgaccccccatctacc

SEQ ID NO: 316374 - DNA, 58 bp, Artificial
  Synthetic oligonucleotide
actcaaggattggacaaccagggggaggaaatcctctctcagctacaccgccctctga

SEQ ID NO: 316375 - DNA, 52 bp, Artificial
  Synthetic oligonucleotide
actcaaggtaaacttttgcggagtgtaaggaatgataacgattttaaaagtc

SEQ ID NO: 316376 - DNA, 57 bp, Artificial
  Synthetic oligonucleotide
actcaaggtgaacccagcttagtggaggagcaagacaaaaggttcgtctgcaaacac

SEQ ID NO: 316377 - DNA, 57 bp, Artificial
  Synthetic oligonucleotide
actcaaggttccctactcaatgacaaacattctaatggcacagtgaaagaccggacc

SEQ ID NO: 316378 - DNA, 57 bp, Artificial
  Synthetic oligonucleotide
actcaagtcaagcgaaattagtcgaatttaatacgtagtttgataatgagtcagtgg

SEQ ID NO: 316379 - DNA, 54 bp, Artificial
  Synthetic oligonucleotide
actcaagtcgattaccccatcaaacctttaattgagcacgcaactccttcgttt

SEQ ID NO: 316380 - DNA, 57 bp, Artificial
  Synthetic oligonucleotide
actcaagtcgtagacttcagcctggaccccactttcactataaccacacagaccgtc

SEQ ID NO: 316381 - DNA, 57 bp, Artificial
  Synthetic oligonucleotide
actcaataatgtcatcgacaaaatgaacaaacaatttgaagtggtgaaccgtgagtt

SEQ ID NO: 316382 - DNA, 60 bp, Artificial
  Synthetic oligonucleotide
actcaatatgatcaacaataagattgatgaccaaatacaggacatctgggcgtacaatgc

SEQ ID NO: 316383 - DNA, 55 bp, Artificial
  Synthetic oligonucleotide
actcaatcaggtgataatatacataaatttgctaacggtggccagtacagggacg

SEQ ID NO: 316384 - DNA, 54 bp, Artificial
  Synthetic oligonucleotide
actcaatcattcctcgggacgacaatctcgggaatcctgtggacggtcttccac

SEQ ID NO: 316385 - DNA, 60 bp, Artificial
  Synthetic oligonucleotide
actcaatcctaggcatgggtacagtcaaatttgattatgtctgccacggcgctagtagga

SEQ ID NO: 316386 - DNA, 58 bp, Artificial
  Synthetic oligonucleotide
actcaatgaagacagtctccccaagtcagtggtttccgacagctcaaccacccccatg

SEQ ID NO: 316387 - DNA, 56 bp, Artificial
  Synthetic oligonucleotide
actcaatggttaggtttgaagtattatggtatacaacttttgatcgaacgccaaca

SEQ ID NO: 316388 - DNA, 55 bp, Artificial
  Synthetic oligonucleotide
actcaattggtacctctggagtctgataaagtccttgtttaccattttgccccta

SEQ ID NO: 316389 - DNA, 60 bp, Artificial
  Synthetic oligonucleotide
actcaatttggaacctatgagtgcaaaatgcatcttgtggcttcttgctatttcatctat

SEQ ID NO: 316390 - DNA, 59 bp, Artificial
  Synthetic oligonucleotide
actcacaagcatcacacgtcacgtagcctatttgtatgtatggaagttggcgtctccat

SEQ ID NO: 316391 - DNA, 52 bp, Artificial
  Synthetic oligonucleotide
actcacaatctacaagtgaccgacaccacgagtcttattccctgaaagagcc

SEQ ID NO: 316392 - DNA, 59 bp, Artificial
  Synthetic oligonucleotide
actcacacaacgttgacccatgaacacgaacaaatatactatttctcacacgcactacc

SEQ ID NO: 316393 - DNA, 60 bp, Artificial
  Synthetic oligonucleotide
actcacacatcttttgcacaagttctttgcaacaacttgcaagaagatgtgatcatttac

SEQ ID NO: 316394 - DNA, 54 bp, Artificial
  Synthetic oligonucleotide
actcacaccactgggggagctgtggctagcaccacggctagactcgccagcctc

SEQ ID NO: 316395 - DNA, 60 bp, Artificial
  Synthetic oligonucleotide
actcacacgccgactgctatcagtatttttgtgtgcctgagtatggtacagctaatggcc

SEQ ID NO: 316396 - DNA, 57 bp, Artificial
  Synthetic oligonucleotide
actcacagacccaactcttaggcatacagataaatttaccctcagtcgggagcctaa

SEQ ID NO: 316397 - DNA, 59 bp, Artificial
  Synthetic oligonucleotide
actcacagaccccacatgcactgaagggcggttaccatgttccggaatgactcacgaaa

SEQ ID NO: 316398 - DNA, 55 bp, Artificial
  Synthetic oligonucleotide
actcacagatggaacatgagaagcatgatttcgtacgagaccaccgatgccaaag

SEQ ID NO: 316399 - DNA, 56 bp, Artificial
  Synthetic oligonucleotide
actcacagcgtccgcaaggactttgtgcactccgtcaagttaacccttgcacggag

SEQ ID NO: 316400 - DNA, 58 bp, Artificial
  Synthetic oligonucleotide
actcacagtcaaatcagttactgtcttatggtgatgttacacgttttttatctaataa

SEQ ID NO: 316401 - DNA, 55 bp, Artificial
  Synthetic oligonucleotide
actcacatacgaacgcgcctgccttaagccatccaccgacaccgtgatctttgac

SEQ ID NO: 316402 - DNA, 60 bp, Artificial
  Synthetic oligonucleotide
actcacatggatgacattccacccaagaatgcatcctacgggggcaacttcaccaacttg

SEQ ID NO: 316403 - DNA, 60 bp, Artificial
  Synthetic oligonucleotide
actcacattatgatttggcactccaatctcaatgacaccacttaccagagaacaagggct

SEQ ID NO: 316404 - DNA, 55 bp, Artificial
  Synthetic oligonucleotide
actcaccaacctcctgtcctccaacttgtcctggttatcgctggatgtgtctgcg

SEQ ID NO: 316405 - DNA, 58 bp, Artificial
  Synthetic oligonucleotide
actcaccatacccgctctgaccgcagtcaatactgcctacggactcacgagggggtgg

SEQ ID NO: 316406 - DNA, 55 bp, Artificial
  Synthetic oligonucleotide
actcacccaaacagcgggtggaccgtctgctcaaggtgtggcgctccaagaagac

SEQ ID NO: 316407 - DNA, 56 bp, Artificial
  Synthetic oligonucleotide
actcaccccggggtataagacccttctcagtcggtgtctgtggtggttatgctatc

SEQ ID NO: 316408 - DNA, 54 bp, Artificial
  Synthetic oligonucleotide
actcacccgagcactcattcgtgcaaagaggttgcgaaggaagcccaccttccc

SEQ ID NO: 316409 - DNA, 57 bp, Artificial
  Synthetic oligonucleotide
actcaccgggccttaattctattgggctgtgcaacccaaatccggatatggatgtgg

SEQ ID NO: 316410 - DNA, 54 bp, Artificial
  Synthetic oligonucleotide
actcacctacccctggccgactcaacccttacctcgcatcaccgtcggtcctac

SEQ ID NO: 316411 - DNA, 55 bp, Artificial
  Synthetic oligonucleotide
actcacctccctggctaacaccaggcagaatatcccctgaaaccccaggacttta

SEQ ID NO: 316412 - DNA, 58 bp, Artificial
  Synthetic oligonucleotide
actcacctggccttatttcaattgggctaggaagcccaactctggataaggatgtgga

SEQ ID NO: 316413 - DNA, 59 bp, Artificial
  Synthetic oligonucleotide
actcacctgtatcgttacagacccttggcctgaacggggatccagcaggaatagcacca

SEQ ID NO: 316414 - DNA, 56 bp, Artificial
  Synthetic oligonucleotide
actcacgatggacgtactatttcggtcttactaagtcatactgaaagtggttattc

SEQ ID NO: 316415 - DNA, 56 bp, Artificial
  Synthetic oligonucleotide
actcacgggctgcatagtctacgtcccaattttcttggggcgagatttgggactac

SEQ ID NO: 316416 - DNA, 55 bp, Artificial
  Synthetic oligonucleotide
actcacgtgtctctgtcggtgagtgatcttgaggtcgaccgattcgtctgtgagc

SEQ ID NO: 316417 - DNA, 51 bp, Artificial
  Synthetic oligonucleotide
actcactatgtgagcgtccaataggacggccccttcgggggctctctctct

SEQ ID NO: 316418 - DNA, 55 bp, Artificial
  Synthetic oligonucleotide
actcactcaacttcacgctgtcgtctctcccagtgctgtatccattgggcacccc

SEQ ID NO: 316419 - DNA, 60 bp, Artificial
  Synthetic oligonucleotide
actcactcattgatccctttctgttacgatttcgatgatttcaacagccaacattcaaag

SEQ ID NO: 316420 - DNA, 60 bp, Artificial
  Synthetic oligonucleotide
actcactgaattgactttttgtcacggatgttcattagctcatgtttgtcagtggtgtat

SEQ ID NO: 316421 - DNA, 60 bp, Artificial
  Synthetic oligonucleotide
actcactgagtgacatccacatcatggcgtctcaaggcaccaaacgatcttatgaacaaa

SEQ ID NO: 316422 - DNA, 52 bp, Artificial
  Synthetic oligonucleotide
actcactgccccgattgacagcgcccccgacatgtcgcaaagttggccgcag

SEQ ID NO: 316423 - DNA, 56 bp, Artificial
  Synthetic oligonucleotide
actcactggttcttaactccaactaatctcgaatacatcggatcctactcccttcc

SEQ ID NO: 316424 - DNA, 54 bp, Artificial
  Synthetic oligonucleotide
actcactgtaaacatgtgggatccgcttttaaacgagttccctgaaaccgtaca

SEQ ID NO: 316425 - DNA, 58 bp, Artificial
  Synthetic oligonucleotide
actcactttctcaatcgacacgtagggggtggctcccgccgtcgagaacagctattca

SEQ ID NO: 316426 - DNA, 57 bp, Artificial
  Synthetic oligonucleotide
actcagaactagtcaagatttggccaaaaatcatatccaacgttaactgtcctcaaa

SEQ ID NO: 316427 - DNA, 60 bp, Artificial
  Synthetic oligonucleotide
actcagaatgttggtatcaacgttcctcaagctgagaagatagcactaggtaatagttta

SEQ ID NO: 316428 - DNA, 59 bp, Artificial
  Synthetic oligonucleotide
actcagacccattgagaaggtgcgcgcaaataagacgcgaacttttacagcagcgccct

SEQ ID NO: 316429 - DNA, 58 bp, Artificial
  Synthetic oligonucleotide
actcagacccttgttccctaaagtgcccatacctcggatgccaatcatggacctgccc

SEQ ID NO: 316430 - DNA, 57 bp, Artificial
  Synthetic oligonucleotide
actcagacggggagtccactgggacccaggcctatagtactgcctccagagcctatt

SEQ ID NO: 316431 - DNA, 60 bp, Artificial
  Synthetic oligonucleotide
actcagagacagggatattcaatatcagttcaccgacatgcttagttaataaggttcaaa

SEQ ID NO: 316432 - DNA, 60 bp, Artificial
  Synthetic oligonucleotide
actcagagactcagaattgctttccctctcgctgattctcacgtcctcttctaacttacc

SEQ ID NO: 316433 - DNA, 57 bp, Artificial
  Synthetic oligonucleotide
actcagagatccacgggattaatcggatgacccagacacctcaaagggtcgggagag

SEQ ID NO: 316434 - DNA, 60 bp, Artificial
  Synthetic oligonucleotide
actcagagatctgtaggtttggaagtggtaggtggtgctgctgtaatgaatccggtcact

SEQ ID NO: 316435 - DNA, 59 bp, Artificial
  Synthetic oligonucleotide
actcagaggacgtacaggtagatgcagttgagtatgatgacactgtggggccgcggggg

SEQ ID NO: 316436 - DNA, 56 bp, Artificial
  Synthetic oligonucleotide
actcagatcaacctacctcgaccagctccgtacttatacgaccaactcgttaacaa

SEQ ID NO: 316437 - DNA, 59 bp, Artificial
  Synthetic oligonucleotide
actcagatctaaatgaccacacagataattatgtggacctaaagacctagcccaaactg

SEQ ID NO: 316438 - DNA, 56 bp, Artificial
  Synthetic oligonucleotide
actcagatctggtttagtcaaaatagagatggctgatgagactgcggacctggtca

SEQ ID NO: 316439 - DNA, 60 bp, Artificial
  Synthetic oligonucleotide
actcagcaaaatgggcgcgcaagtctccacgcagaagaccggtgctcatgagactgggtt

SEQ ID NO: 316440 - DNA, 57 bp, Artificial
  Synthetic oligonucleotide
actcagcaaggatcttcttaactccttttgtgaagtttctggaaagtttggactgca

SEQ ID NO: 316441 - DNA, 60 bp, Artificial
  Synthetic oligonucleotide
actcagcactcgtggaaacaagcgacgctcttgaagcagttcagtcgacttccgtgtaca

SEQ ID NO: 316442 - DNA, 60 bp, Artificial
  Synthetic oligonucleotide
actcagcagcctcactgtgacccagctcttgaggcgactgcaccagtggataagctcgga

SEQ ID NO: 316443 - DNA, 60 bp, Artificial
  Synthetic oligonucleotide
actcagcatcaatccggtgaagctctcttctgggtacaaagatgttatactatggtttag

SEQ ID NO: 316444 - DNA, 54 bp, Artificial
  Synthetic oligonucleotide
actcagccagcatactaaataccctgtatcgggggccttataaatctactcttg

SEQ ID NO: 316445 - DNA, 60 bp, Artificial
  Synthetic oligonucleotide
actcagcccgagctgcagtgggcgtggactaacatggaggagtatataagcgcgtgttta

SEQ ID NO: 316446 - DNA, 59 bp, Artificial
  Synthetic oligonucleotide
actcagcgacccgaacgcccatcgtatgcgaaactttctcgcaaacgcaccacaagcag

SEQ ID NO: 316447 - DNA, 57 bp, Artificial
  Synthetic oligonucleotide
actcagcgggttttgacgtggttgtacgagctggatgagaattcaactgaaccaaac

SEQ ID NO: 316448 - DNA, 59 bp, Artificial
  Synthetic oligonucleotide
actcagctacctcaccgagttcaccaccggacacctccttggcgaatcactatggcacc

SEQ ID NO: 316449 - DNA, 57 bp, Artificial
  Synthetic oligonucleotide
actcagctccaggaggagcacatcaaagagtctgccctgactggatgttgcctctgg

SEQ ID NO: 316450 - DNA, 51 bp, Artificial
  Synthetic oligonucleotide
actcagctgttgaagaggctccaccggtggattaacgaagactgctccacg

SEQ ID NO: 316451 - DNA, 60 bp, Artificial
  Synthetic oligonucleotide
actcagctttctctatgccagacgatcagtttaatgtgttattagcgaatatggtggcag

SEQ ID NO: 316452 - DNA, 60 bp, Artificial
  Synthetic oligonucleotide
actcaggaaaattcgtgtacacgcgatacagtccgtataacaagccatcacagtggatgc

SEQ ID NO: 316453 - DNA, 58 bp, Artificial
  Synthetic oligonucleotide
actcaggaaagaaaatacccgattctcataaatcgagactagccaatgatcctaacaa

SEQ ID NO: 316454 - DNA, 58 bp, Artificial
  Synthetic oligonucleotide
actcaggaacgaagagatcaactctctcggactttcaactgaacacctcaccgcgttg

SEQ ID NO: 316455 - DNA, 57 bp, Artificial
  Synthetic oligonucleotide
actcaggaagcagcgaatgcagtggttgcatacgggaggtggccctcatacctcaaa

SEQ ID NO: 316456 - DNA, 57 bp, Artificial
  Synthetic oligonucleotide
actcaggaatgtccctcaaagagaaacaagaggactatttggggctatagcaggctt

SEQ ID NO: 316457 - DNA, 60 bp, Artificial
  Synthetic oligonucleotide
actcaggaggagacatcgtagacaatgtgaatgtttgttctacgattccaaagattgtaa

SEQ ID NO: 316458 - DNA, 55 bp, Artificial
  Synthetic oligonucleotide
actcaggcccaacagcacggacgaacagcttcacaccgtagctgacggccagggt

SEQ ID NO: 316459 - DNA, 54 bp, Artificial
  Synthetic oligonucleotide
actcaggcgggactttttacactttccgcaaggtagcgttgattattttatcga

SEQ ID NO: 316460 - DNA, 60 bp, Artificial
  Synthetic oligonucleotide
actcagggaaccactcgtgtgactctggtgctggaactgggaggatgcgtcaccataaca

SEQ ID NO: 316461 - DNA, 58 bp, Artificial
  Synthetic oligonucleotide
actcagggattcagaaatggtgctcaacaaggttgcattacctcaccaatttgtgagt

SEQ ID NO: 316462 - DNA, 60 bp, Artificial
  Synthetic oligonucleotide
actcaggggacatgctgggagcaaatgtacaccccaggaggggaagtgaggaatgatgat

SEQ ID NO: 316463 - DNA, 60 bp, Artificial
  Synthetic oligonucleotide
actcaggtagcgatttcataacacgctctgtttcacgagcttcgaatctcgatgtccagc

SEQ ID NO: 316464 - DNA, 60 bp, Artificial
  Synthetic oligonucleotide
actcaggtccaaatgcccacacagataattatgtgggcctaatgatctagcccaaactgt

SEQ ID NO: 316465 - DNA, 58 bp, Artificial
  Synthetic oligonucleotide
actcaggtcctttttcagttctgctcgctcctacaaaagactcctgctctttccagac

SEQ ID NO: 316466 - DNA, 53 bp, Artificial
  Synthetic oligonucleotide
actcaggtgagcgccccctctgaggtttacaccccggaagcacctgaacaacc

SEQ ID NO: 316467 - DNA, 53 bp, Artificial
  Synthetic oligonucleotide
actcaggtgttatcttccgggctgtggtaatctcgtaccccgaagtacctatg

SEQ ID NO: 316468 - DNA, 51 bp, Artificial
  Synthetic oligonucleotide
actcaggtgttccgggacgagtgaaatggcccgggctccgacgatctgctc

SEQ ID NO: 316469 - DNA, 60 bp, Artificial
  Synthetic oligonucleotide
actcagtaatcgactgcaatacatgcgtcacccagacagtcgatttcagtctggacccta

SEQ ID NO: 316470 - DNA, 51 bp, Artificial
  Synthetic oligonucleotide
actcagtacttgcgaaatttgtccgtgcttcgtcacaagcgtacgatttat

SEQ ID NO: 316471 - DNA, 56 bp, Artificial
  Synthetic oligonucleotide
actcagtagagttctcccctaggggtctcatctcgacctttacaagaacaatctta

SEQ ID NO: 316472 - DNA, 56 bp, Artificial
  Synthetic oligonucleotide
actcagtattaaggcttgttgtgttggacaaggtgccctatttagggtgaggagcc

SEQ ID NO: 316473 - DNA, 60 bp, Artificial
  Synthetic oligonucleotide
actcagtgattatgagggacgactgattcagaacagcataacaatagagagaatggtgct

SEQ ID NO: 316474 - DNA, 60 bp, Artificial
  Synthetic oligonucleotide
actcagtgtgcagtaaagaggactatcacagggagaaagcaattgttaaaatgtcagaat

SEQ ID NO: 316475 - DNA, 60 bp, Artificial
  Synthetic oligonucleotide
actcagttagatcatgagacagctgatattcatccctatgagactctatataattaaagg

SEQ ID NO: 316476 - DNA, 55 bp, Artificial
  Synthetic oligonucleotide
actcagttcacagattatgtatctctcaattcactgagattcaggttcaggttgg

SEQ ID NO: 316477 - DNA, 58 bp, Artificial
  Synthetic oligonucleotide
actcagttgtgaataacatcttgatagattatcttgcggactgccagcagctagagat

SEQ ID NO: 316478 - DNA, 57 bp, Artificial
  Synthetic oligonucleotide
actcataacgcttttagggcgatgccaattaacgatctcttatttgacgaggttcca

SEQ ID NO: 316479 - DNA, 60 bp, Artificial
  Synthetic oligonucleotide
actcataagataggccaagtctttgttactcctgagctcgtcattgtgacacatacagat

SEQ ID NO: 316480 - DNA, 60 bp, Artificial
  Synthetic oligonucleotide
actcatacatggttcttggcagtgcaaagacgatagtagagcagaccccaagaatggcta

SEQ ID NO: 316481 - DNA, 57 bp, Artificial
  Synthetic oligonucleotide
actcatactcgaccacgaatagttcctaagcattcaaagaaatgcctaaggacctat

SEQ ID NO: 316482 - DNA, 60 bp, Artificial
  Synthetic oligonucleotide
actcatagaaccccgattttatggcctgttagcgcgccatatggccagtgcgcgttgttc

SEQ ID NO: 316483 - DNA, 55 bp, Artificial
  Synthetic oligonucleotide
actcatagacaatgagttcactgaagtggagcagcagataggcaatgtaataaac

SEQ ID NO: 316484 - DNA, 60 bp, Artificial
  Synthetic oligonucleotide
actcatagcacaagcatagctcacagcgtctgagtcaacagtccggcatcgtgatgttag

SEQ ID NO: 316485 - DNA, 60 bp, Artificial
  Synthetic oligonucleotide
actcatagcatttgattgtgtctgagatatagagtctcctgggtctaaggatgactcatg

SEQ ID NO: 316486 - DNA, 60 bp, Artificial
  Synthetic oligonucleotide
actcatataacggtgtttcagtccaatatcttgatggcagactaggtcgatgtagattct

SEQ ID NO: 316487 - DNA, 58 bp, Artificial
  Synthetic oligonucleotide
actcatatgataaatacaatgctgttgaaaggaaattagttaagtatgcgaggggtaa

SEQ ID NO: 316488 - DNA, 57 bp, Artificial
  Synthetic oligonucleotide
actcatattgacacattaattggcaataattggaagcttacataagcttaattcgac

SEQ ID NO: 316489 - DNA, 60 bp, Artificial
  Synthetic oligonucleotide
actcatcaaaccatgagtccctatacatgatatccaagatattcctaatcccctcttcca

SEQ ID NO: 316490 - DNA, 60 bp, Artificial
  Synthetic oligonucleotide
actcatcctcaggccatgcagtggaactccaccactttccaccaaactcttcaagatccc

SEQ ID NO: 316491 - DNA, 57 bp, Artificial
  Synthetic oligonucleotide
actcatcgtatactgagcattatagtgtgtcacaaagatgtaagttgtttactaagt

SEQ ID NO: 316492 - DNA, 60 bp, Artificial
  Synthetic oligonucleotide
actcatcgtcagtcattctcttgtcgtgaatctccactaccaccgtaccggaggcgttga

SEQ ID NO: 316493 - DNA, 60 bp, Artificial
  Synthetic oligonucleotide
actcatctcagcacaatacgcagccgtttaggaaagggataattatgggattggacatgt

SEQ ID NO: 316494 - DNA, 59 bp, Artificial
  Synthetic oligonucleotide
actcatctcatgagtggtggtggataccataatccataacgttgtaggaagcgtttaaa

SEQ ID NO: 316495 - DNA, 60 bp, Artificial
  Synthetic oligonucleotide
actcatctgatgatctggcactccaatctgaatgatgctacctatcagagaacaagagct

SEQ ID NO: 316496 - DNA, 60 bp, Artificial
  Synthetic oligonucleotide
actcatctgtctactcattaccaccagaccctaaacattttgatggatatcagcaacaag

SEQ ID NO: 316497 - DNA, 59 bp, Artificial
  Synthetic oligonucleotide
actcatctgttttgttttcgatagtatatttgagcggcgcgaccaattgcgtgaggttg

SEQ ID NO: 316498 - DNA, 57 bp, Artificial
  Synthetic oligonucleotide
actcatctttgccctatccgtctgccccgcgggtaccctctgcagctccgtccgccg

SEQ ID NO: 316499 - DNA, 60 bp, Artificial
  Synthetic oligonucleotide
actcatgacgtccatttagcgccaggtgtaggtaacattgaccctgagatctataacgaa

SEQ ID NO: 316500 - DNA, 58 bp, Artificial
  Synthetic oligonucleotide
actcatgagaatctgagtgtgttgcatagtgctagagcacaactgttggagttcaaga

SEQ ID NO: 316501 - DNA, 60 bp, Artificial
  Synthetic oligonucleotide
actcatgcaacgtccatttgacgttagcttccgtcagggtatgtcactatacagtcccag

SEQ ID NO: 316502 - DNA, 55 bp, Artificial
  Synthetic oligonucleotide
actcatgcacaaattgtaacaccttggtcattggttgatgcaaatgcttggggag

SEQ ID NO: 316503 - DNA, 60 bp, Artificial
  Synthetic oligonucleotide
actcatgcatctaatcctgtgtatgctacgttaaagatacggatctacttctatgattcg

SEQ ID NO: 316504 - DNA, 60 bp, Artificial
  Synthetic oligonucleotide
actcatgcttgctggaggtactttgacacatacctcagaaatgcattggatggctaccct

SEQ ID NO: 316505 - DNA, 51 bp, Artificial
  Synthetic oligonucleotide
actcatggagaacactgttgccaacgcctctattcctaaagctaattacaa

SEQ ID NO: 316506 - DNA, 60 bp, Artificial
  Synthetic oligonucleotide
actcatggcagcaaagaaagcacatgggtagaggcggtgggcgtgagtaccacatttcca

SEQ ID NO: 316507 - DNA, 60 bp, Artificial
  Synthetic oligonucleotide
actcatggtagtaacatccaacgcagatcgaatctgcactgggataacatcttcaaactc

SEQ ID NO: 316508 - DNA, 54 bp, Artificial
  Synthetic oligonucleotide
actcatggtgctacaccgtgggaatcgcgtgcgtgacatcacgaagcacttccg

SEQ ID NO: 316509 - DNA, 60 bp, Artificial
  Synthetic oligonucleotide
actcatgtaatatgggatgtaggtcttcaatctacaatatcaatggtggtaccatggatc

SEQ ID NO: 316510 - DNA, 60 bp, Artificial
  Synthetic oligonucleotide
actcatgtcatatgggacctgggactgcagtcgagctgtgttctgtgtgtaccgtggata

SEQ ID NO: 316511 - DNA, 60 bp, Artificial
  Synthetic oligonucleotide
actcatgtcctcaccatctgtagcgtactcaactacgctcgatatgatccggcacgacct

SEQ ID NO: 316512 - DNA, 54 bp, Artificial
  Synthetic oligonucleotide
actcattaggccgcccgaatcttgttgctttgacccgcgctacaactaaattga

SEQ ID NO: 316513 - DNA, 54 bp, Artificial
  Synthetic oligonucleotide
actcattccaaacatgtgggatccgcttttaaacgagtttcccgaaactgttca

SEQ ID NO: 316514 - DNA, 60 bp, Artificial
  Synthetic oligonucleotide
actcattctcgcgagagaatgagtcactatgacatcaaaaggggtggagacaacacacta

SEQ ID NO: 316515 - DNA, 60 bp, Artificial
  Synthetic oligonucleotide
actcattgtcggctcagacacgttcccccatcactagagttgctgaaagggctactgcca

SEQ ID NO: 316516 - DNA, 58 bp, Artificial
  Synthetic oligonucleotide
actcatttatggcaaataggatgagtaattctgctactaggttagttgtttcgacaaa

SEQ ID NO: 316517 - DNA, 51 bp, Artificial
  Synthetic oligonucleotide
actcatttcatgattggaactgtcccttcgaaatctgaacttgacgatgat

SEQ ID NO: 316518 - DNA, 60 bp, Artificial
  Synthetic oligonucleotide
actcatttggtgtctctcaactttctctatgtaattggtgtctggagtcccatatatagg

SEQ ID NO: 316519 - DNA, 59 bp, Artificial
  Synthetic oligonucleotide
actccaaatggaagcattcccaatggcaaaccatttcaaaatgtaaacaggatcacata

SEQ ID NO: 316520 - DNA, 55 bp, Artificial
  Synthetic oligonucleotide
actccaaattgcagataaataggcaagtcatagttgacagaggtaataggtccgg

SEQ ID NO: 316521 - DNA, 60 bp, Artificial
  Synthetic oligonucleotide
actccaagaggagaagatagtcagttcacgggatcatgcactagcccaatgggaaatcag

SEQ ID NO: 316522 - DNA, 60 bp, Artificial
  Synthetic oligonucleotide
actccaagcacagagatgtcaatgagaggaataagagtcagcaaaatgggcgtggatgaa

SEQ ID NO: 316523 - DNA, 58 bp, Artificial
  Synthetic oligonucleotide
actccaatattatcctttaatgtgatgggtgtttaacagggtatatattatgagaaca

SEQ ID NO: 316524 - DNA, 60 bp, Artificial
  Synthetic oligonucleotide
actccaatcatgaattcaattacagtgcgacaagatcttgaacgtcaactaggtgattta

SEQ ID NO: 316525 - DNA, 59 bp, Artificial
  Synthetic oligonucleotide
actccaatcttccgagtggaacccaggctatagcatgcctacactttacaaaatacagc

SEQ ID NO: 316526 - DNA, 60 bp, Artificial
  Synthetic oligonucleotide
actccaatgttagcgatctcattcaacaatttaatcaaatgatagtgactatgaatggaa

SEQ ID NO: 316527 - DNA, 58 bp, Artificial
  Synthetic oligonucleotide
actccaattatgaattcagtaacagtaaggcaggatttagaacgccagcttaatgatt

SEQ ID NO: 316528 - DNA, 59 bp, Artificial
  Synthetic oligonucleotide
actccaattgcaagttggacagatgttccgtacgtgggaaagcgtgaggacatctggtg

SEQ ID NO: 316529 - DNA, 56 bp, Artificial
  Synthetic oligonucleotide
actccacaactggattaacggggattggacaacaccgtgtgccacaagttggttga

SEQ ID NO: 316530 - DNA, 60 bp, Artificial
  Synthetic oligonucleotide
actccacaagtccaagccagatgaccccgatgcagactggtttgaaagatcagaaactct

SEQ ID NO: 316531 - DNA, 58 bp, Artificial
  Synthetic oligonucleotide
actccacaagtctaagcccgacgaccccgatgcagactggtttgagcgatcagaaacc

SEQ ID NO: 316532 - DNA, 57 bp, Artificial
  Synthetic oligonucleotide
actccacaccgataacagtgggcatcgttgattgcgacacgtttttgaaagccgaag

SEQ ID NO: 316533 - DNA, 56 bp, Artificial
  Synthetic oligonucleotide
actccacacttacgcccgtgcactcgcgggaaccgatggactgtcgttcacccacc

SEQ ID NO: 316534 - DNA, 60 bp, Artificial
  Synthetic oligonucleotide
actccacatacactctggatctatccgtagcggatctagtaatgtgtggtagatcaaaag

SEQ ID NO: 316535 - DNA, 60 bp, Artificial
  Synthetic oligonucleotide
actccacccaagacggtcccatgcctatgccgatatgccatgacaccggagagagtcaca

SEQ ID NO: 316536 - DNA, 60 bp, Artificial
  Synthetic oligonucleotide
actccaccgggacacgctgtacttgagatagtacacccagacgactctcacatgggatac

SEQ ID NO: 316537 - DNA, 60 bp, Artificial
  Synthetic oligonucleotide
actccacgattcgccaaggatggcagcaagtgctcaaacgcttttctatcccagcatccg

SEQ ID NO: 316538 - DNA, 60 bp, Artificial
  Synthetic oligonucleotide
actccacgctcgatccactagcgagtgttagtagcggtactgctgtctcgtagcggagca

SEQ ID NO: 316539 - DNA, 50 bp, Artificial
  Synthetic oligonucleotide
actccacggacacatcaaacgcctgatgacatttaccagggcaatctacg

SEQ ID NO: 316540 - DNA, 56 bp, Artificial
  Synthetic oligonucleotide
actccacggcttgagcgcatttacactccatgggtactctccgcacgaactcaatc

SEQ ID NO: 316541 - DNA, 59 bp, Artificial
  Synthetic oligonucleotide
actccacttcccctcactcttctaaccatcagctgcagtccgagaccacccgacttctc

SEQ ID NO: 316542 - DNA, 55 bp, Artificial
  Synthetic oligonucleotide
actccacttcgttcgagtagacctttgggttgaagtccagatgaccacttaggta

SEQ ID NO: 316543 - DNA, 57 bp, Artificial
  Synthetic oligonucleotide
actccactttgcctactgttcacgatagggatatttctggaactttgggagagatta

SEQ ID NO: 316544 - DNA, 60 bp, Artificial
  Synthetic oligonucleotide
actccagaattcgctgccttatggctgagctcattggctccccgtggtgtatcgccatgg

SEQ ID NO: 316545 - DNA, 55 bp, Artificial
  Synthetic oligonucleotide
actccagaccgcgaccgtgcgttggccgcaaagcgacgttgggaggacgacactg

SEQ ID NO: 316546 - DNA, 60 bp, Artificial
  Synthetic oligonucleotide
actccagagtccgctgccttatggcagagatcattgggtccccgtggtgtatagccatgg

SEQ ID NO: 316547 - DNA, 52 bp, Artificial
  Synthetic oligonucleotide
actccagccggctcgcatctccgcagtggcagtggagtacaaagtccgctcc

SEQ ID NO: 316548 - DNA, 60 bp, Artificial
  Synthetic oligonucleotide
actccagcggtgagggtctaatggagtgtcattgtcgctgtaatctgtgcacccctcacc

SEQ ID NO: 316549 - DNA, 55 bp, Artificial
  Synthetic oligonucleotide
actccaggagcagtcccggccccggtactgacttgcccgactagggcgggcatgt

SEQ ID NO: 316550 - DNA, 60 bp, Artificial
  Synthetic oligonucleotide
actccaggatccagccaatatttgacatctgatgacttccagtctccatgtgccttacca

SEQ ID NO: 316551 - DNA, 59 bp, Artificial
  Synthetic oligonucleotide
actccaggggaacggccttcgggcatgttcgattcttcggtcctgtgtgaatgctatga

SEQ ID NO: 316552 - DNA, 60 bp, Artificial
  Synthetic oligonucleotide
actccaggtgtgccgggttcggtacatacttgtcaatgggcatacttccatatgtgtcat

SEQ ID NO: 316553 - DNA, 56 bp, Artificial
  Synthetic oligonucleotide
actccagtattacgaactgctatgcctgagaaaagacaagggggtctagtggaaag

SEQ ID NO: 316554 - DNA, 52 bp, Artificial
  Synthetic oligonucleotide
actccagtattggagtaggtgtcttgtggttggtgtatgacgcacaacccag

SEQ ID NO: 316555 - DNA, 51 bp, Artificial
  Synthetic oligonucleotide
actccagttaatgtacggggtagccggttccagccagcatttccgtagcgg

SEQ ID NO: 316556 - DNA, 60 bp, Artificial
  Synthetic oligonucleotide
actccatcactaggggtaccgcgaagcgcctcccacgctgccgcgtcagcgctgacgtaa

SEQ ID NO: 316557 - DNA, 60 bp, Artificial
  Synthetic oligonucleotide
actccatcattgtatgtgtgtcagaaggactaaatgacttcagcgtgtcacacggtgtac

SEQ ID NO: 316558 - DNA, 60 bp, Artificial
  Synthetic oligonucleotide
actccatgaacgctaagatgtctatcgttgaatctcgccgcgctagcaacatggtctcta

SEQ ID NO: 316559 - DNA, 52 bp, Artificial
  Synthetic oligonucleotide
actccatgcccacaaggaatccagacaatagaggtcctctcccaaaccaaat

SEQ ID NO: 316560 - DNA, 60 bp, Artificial
  Synthetic oligonucleotide
actccatggccattccaatgactatcgcagggctcatgtttgctgcttttgtgatctctg

SEQ ID NO: 316561 - DNA, 57 bp, Artificial
  Synthetic oligonucleotide
actccattacctaatgttcaatccgcaattacatctatacagaatgtaggctatcta

SEQ ID NO: 316562 - DNA, 55 bp, Artificial
  Synthetic oligonucleotide
actccattcactacgttcgtgttctcaactttgtactcaactctccaaggatttc

SEQ ID NO: 316563 - DNA, 55 bp, Artificial
  Synthetic oligonucleotide
actccattgacctagaagaaccgaacggccagacagctgattggaagtctattgg

SEQ ID NO: 316564 - DNA, 52 bp, Artificial
  Synthetic oligonucleotide
actccatttcgaatgcaactgtgatgcatttattggcccggcgcctttttat

SEQ ID NO: 316565 - DNA, 55 bp, Artificial
  Synthetic oligonucleotide
actcccaacttgttccttatatgataatccaaacttcagctttcctgtactggat

SEQ ID NO: 316566 - DNA, 57 bp, Artificial
  Synthetic oligonucleotide
actcccaccagccgagcagagtgtccccaacactaaccaaacaactccagaacactc

SEQ ID NO: 316567 - DNA, 60 bp, Artificial
  Synthetic oligonucleotide
actcccacgggtcgaatgagtgatccggtttgcgccactgggtggatagcacactgcgcg

SEQ ID NO: 316568 - DNA, 60 bp, Artificial
  Synthetic oligonucleotide
actcccagacgtcagtctgtgtcgactgtaccctgaggcggctgctgcgtcgatcgccaa

SEQ ID NO: 316569 - DNA, 55 bp, Artificial
  Synthetic oligonucleotide
actcccagccctgtcgtggtcggaacaactgatcgccgcggggtccctacttaca

SEQ ID NO: 316570 - DNA, 57 bp, Artificial
  Synthetic oligonucleotide
actcccagtatgatggttctcttagttcaatgctattgtgggaggccgtggaagttt

SEQ ID NO: 316571 - DNA, 55 bp, Artificial
  Synthetic oligonucleotide
actcccagtccggtagtggtcggcacgaccgatagggccggcgcaccaacctaca

SEQ ID NO: 316572 - DNA, 58 bp, Artificial
  Synthetic oligonucleotide
actcccagtgcttgcagcggactacgtcgcccaatttacacggatcctgccgtccacc

SEQ ID NO: 316573 - DNA, 56 bp, Artificial
  Synthetic oligonucleotide
actcccagtggttctctagtatccagtgaagctactttatttaacagaccttattg

SEQ ID NO: 316574 - DNA, 55 bp, Artificial
  Synthetic oligonucleotide
actcccatcctcaaaggtttgtaaggaagaattctcagtccaaagcctcaacaag

SEQ ID NO: 316575 - DNA, 52 bp, Artificial
  Synthetic oligonucleotide
actcccatttgtggatgatctgactttagatatcacgagaagtgcaccgtac

SEQ ID NO: 316576 - DNA, 55 bp, Artificial
  Synthetic oligonucleotide
actccccacaacgcagcttcgacggcatatcgatctacttgtcgggagcgccacc

SEQ ID NO: 316577 - DNA, 51 bp, Artificial
  Synthetic oligonucleotide
actccccagaattttaccccgggctgttaccgtaccttaaatctgttcaga

SEQ ID NO: 316578 - DNA, 59 bp, Artificial
  Synthetic oligonucleotide
actccccatgcattcagaccctggtgatgtcgtatcggtagaaggtaaggaaatggatg

SEQ ID NO: 316579 - DNA, 57 bp, Artificial
  Synthetic oligonucleotide
actcccccactctaacctagaccacatcctcgagccctctataccatggaaatcaaa

SEQ ID NO: 316580 - DNA, 50 bp, Artificial
  Synthetic oligonucleotide
actcccccctgacgtattccacctacggaaggtttttggccaaccctaga

SEQ ID NO: 316581 - DNA, 51 bp, Artificial
  Synthetic oligonucleotide
actcccccgagcccgtttcccagtctgctgggggggttcagcgaccctccg

SEQ ID NO: 316582 - DNA, 54 bp, Artificial
  Synthetic oligonucleotide
actccccctattctatgtccaaacgtttttcgtttgcagggaacagacctcaca

SEQ ID NO: 316583 - DNA, 55 bp, Artificial
  Synthetic oligonucleotide
actccccggagacgatgaaactcggtcttcccggcctcaatttgcgacacgcgcg

SEQ ID NO: 316584 - DNA, 57 bp, Artificial
  Synthetic oligonucleotide
actccccgtattgaccggaattgggtcctgatgctcttaaggacttctggcctcgca

SEQ ID NO: 316585 - DNA, 52 bp, Artificial
  Synthetic oligonucleotide
actccccgtctgtcaagaccacctagaattttgggagggcgtgtttacaggg

SEQ ID NO: 316586 - DNA, 53 bp, Artificial
  Synthetic oligonucleotide
actcccctactggggcaccatccggcagatgggctgggggatcagcgacttcc

SEQ ID NO: 316587 - DNA, 60 bp, Artificial
  Synthetic oligonucleotide
actcccctcaggtccaatggttctggtgatgatgtgttcacagtctcttgcagggtgttg

SEQ ID NO: 316588 - DNA, 51 bp, Artificial
  Synthetic oligonucleotide
actcccctcgttacactcgttagcggtcgtactcgctactctctaacggtc

SEQ ID NO: 316589 - DNA, 53 bp, Artificial
  Synthetic oligonucleotide
actcccctggaggacttcctcccaggtccggagtctacctccatctggtccgt

SEQ ID NO: 316590 - DNA, 57 bp, Artificial
  Synthetic oligonucleotide
actccccttgctgcgggagctaagttggtagttacattactctaaactgcctgaaga

SEQ ID NO: 316591 - DNA, 58 bp, Artificial
  Synthetic oligonucleotide
actcccgaagcaacaggatagcttacctgatactaaggccagtggcccggcgcattcc

SEQ ID NO: 316592 - DNA, 53 bp, Artificial
  Synthetic oligonucleotide
actcccgacgattgtgaaggttatgtctttgtcccttccgaaccaacgtccaa

SEQ ID NO: 316593 - DNA, 60 bp, Artificial
  Synthetic oligonucleotide
actcccgcatcgaaagtacgccgacgtctcaacttcgacagcccctatggagctcgtgca

SEQ ID NO: 316594 - DNA, 56 bp, Artificial
  Synthetic oligonucleotide
actcccggctccaacgtatagcgacacccagtctgcttccggaccgcgtgaccctg

SEQ ID NO: 316595 - DNA, 52 bp, Artificial
  Synthetic oligonucleotide
actcccgtagtactatcgtgtttgtttgtattgtctttacgtttagtacgcg

SEQ ID NO: 316596 - DNA, 56 bp, Artificial
  Synthetic oligonucleotide
actcccgtagtattatcgtatttgtctgtactgtgtttactatatattacgtatta

SEQ ID NO: 316597 - DNA, 55 bp, Artificial
  Synthetic oligonucleotide
actcccgtattcagtgatcgcagtgactgacagtttcgagaatgctgacatgtct

SEQ ID NO: 316598 - DNA, 57 bp, Artificial
  Synthetic oligonucleotide
actcccgtcactcgggagagtcggtgttattgcgcttgagtcgactaccgtgtgtcc

SEQ ID NO: 316599 - DNA, 54 bp, Artificial
  Synthetic oligonucleotide
actcccgtctcgacccaagcccgatagccgccaggatacggcggagagcccttt

SEQ ID NO: 316600 - DNA, 54 bp, Artificial
  Synthetic oligonucleotide
actccctatccccgtaacccttaggattctgaaccgttcagactctgagagtag

SEQ ID NO: 316601 - DNA, 60 bp, Artificial
  Synthetic oligonucleotide
actccctcttcttgatgtgcgtcgagttctttggcatgctacccaggatcaggaggaatc

SEQ ID NO: 316602 - DNA, 55 bp, Artificial
  Synthetic oligonucleotide
actccctgactcccgactccctgactcccgactccctgactcccgactccctgac

SEQ ID NO: 316603 - DNA, 55 bp, Artificial
  Synthetic oligonucleotide
actccctggatatgttggtcactgagatgttccgagagtacaaccacagacacag

SEQ ID NO: 316604 - DNA, 53 bp, Artificial
  Synthetic oligonucleotide
actccctggggcagcgggaaacccaggaattttcctcaggcctcgctgacccc

SEQ ID NO: 316605 - DNA, 53 bp, Artificial
  Synthetic oligonucleotide
actcccttaacttcatggggtatgtgattggaagttggggtactttaccgcag

SEQ ID NO: 316606 - DNA, 60 bp, Artificial
  Synthetic oligonucleotide
actcccttggagatcatatcaagaacgtcacctcatgttttggtggcgttgacaaggcac

SEQ ID NO: 316607 - DNA, 55 bp, Artificial
  Synthetic oligonucleotide
actccctttaatctggaggggcctaattgatttaacgggatactatgaggcagtc

SEQ ID NO: 316608 - DNA, 60 bp, Artificial
  Synthetic oligonucleotide
actccgaagggcctggatcgagagttgcatcttgtagttgatgcaaatgtctatatggat

SEQ ID NO: 316609 - DNA, 60 bp, Artificial
  Synthetic oligonucleotide
actccgaatgattggcgctatgacgttacatgtggtgacgagtatacatttgttcctggt

SEQ ID NO: 316610 - DNA, 53 bp, Artificial
  Synthetic oligonucleotide
actccgaattagaaaacgtgcggaacaccccgctgtaagaacgtacgcctctg

SEQ ID NO: 316611 - DNA, 55 bp, Artificial
  Synthetic oligonucleotide
actccgacacgaattcgatacgaggcatattcggtaacttgaataatactcaact

SEQ ID NO: 316612 - DNA, 52 bp, Artificial
  Synthetic oligonucleotide
actccgacgctgagtcctgttcttccatgccccccctagagggggagcctgg

SEQ ID NO: 316613 - DNA, 54 bp, Artificial
  Synthetic oligonucleotide
actccgacggagtggtagttggcttttggcgcgacccgtcaagcgggggagcca

SEQ ID NO: 316614 - DNA, 59 bp, Artificial
  Synthetic oligonucleotide
actccgagaagcctagtacctaattgaacttatcaatggagttgcgctcagcaggtgac

SEQ ID NO: 316615 - DNA, 52 bp, Artificial
  Synthetic oligonucleotide
actccgaggaacgtaaagatggcgggatgttcaccactgatagtgtaatacc

SEQ ID NO: 316616 - DNA, 55 bp, Artificial
  Synthetic oligonucleotide
actccgatcgctcgaagtgaatcccgcaccctggacagaggaaggggtaggtcgg

SEQ ID NO: 316617 - DNA, 60 bp, Artificial
  Synthetic oligonucleotide
actccgattgagctctcaaacttctgtctatgtaattggggtaatggtgtacaatatata

SEQ ID NO: 316618 - DNA, 54 bp, Artificial
  Synthetic oligonucleotide
actccgcataggcccgcgacatatactgggcgtagttcgtgctctcctcggggt

SEQ ID NO: 316619 - DNA, 56 bp, Artificial
  Synthetic oligonucleotide
actccgcccgtcttcgatgatattgaggatacgaggtcaaccacccgtactgaaag

SEQ ID NO: 316620 - DNA, 55 bp, Artificial
  Synthetic oligonucleotide
actccgccctggcgaatgctgtggtggttcggcctttcttgtcccggctccagac

SEQ ID NO: 316621 - DNA, 56 bp, Artificial
  Synthetic oligonucleotide
actccgccgtagttcatgtgctcagccattgcccggagtgtcttgtgtgcctcacg

SEQ ID NO: 316622 - DNA, 54 bp, Artificial
  Synthetic oligonucleotide
actccgccttggcgaatgctgtggtggtccggccgttcttatcccgcacccaga

SEQ ID NO: 316623 - DNA, 60 bp, Artificial
  Synthetic oligonucleotide
actccgcgtagcggcatgtttagtgacgataggattgtgtatgtatatgcatgacgtcat

SEQ ID NO: 316624 - DNA, 60 bp, Artificial
  Synthetic oligonucleotide
actccgcttatggcatgttctatgatggattcgctgggttcgaaaagacggccaatggcc

SEQ ID NO: 316625 - DNA, 54 bp, Artificial
  Synthetic oligonucleotide
actccggaaccttctgcaatattaccgggctagaacaccaactgtcagagggta

SEQ ID NO: 316626 - DNA, 58 bp, Artificial
  Synthetic oligonucleotide
actccggacaaatattgggaacatgcacttctacgggctcaagtgaattatgcggaga

SEQ ID NO: 316627 - DNA, 55 bp, Artificial
  Synthetic oligonucleotide
actccggatattttgcattccgcattgcccaatgaggctggtttgataattggac

SEQ ID NO: 316628 - DNA, 55 bp, Artificial
  Synthetic oligonucleotide
actccggcccaaaggttgagagtacccagagggaggagatccactcggagaaagc

SEQ ID NO: 316629 - DNA, 56 bp, Artificial
  Synthetic oligonucleotide
actccggcccgaagggttgagtagcacacagagggaggaatccacacggagtagaa

SEQ ID NO: 316630 - DNA, 55 bp, Artificial
  Synthetic oligonucleotide
actccgggccgaatggtcgagtagctcccagagggaggaagccacacggagttga

SEQ ID NO: 316631 - DNA, 53 bp, Artificial
  Synthetic oligonucleotide
actccgggccgtacggtcgagtgttccccagagggaggaagccacacggagta

SEQ ID NO: 316632 - DNA, 58 bp, Artificial
  Synthetic oligonucleotide
actccggtagagtccctcaacttctgtcatatattgtggagtcctggagtcccttata

SEQ ID NO: 316633 - DNA, 57 bp, Artificial
  Synthetic oligonucleotide
actccgtcaaggagttaaaacctctcacagcccaggagctggtagccacactccgaa

SEQ ID NO: 316634 - DNA, 58 bp, Artificial
  Synthetic oligonucleotide
actccgtctgcagtaggaacagagggtgagataaccatgtttgttggtgacgcaaaaa

SEQ ID NO: 316635 - DNA, 55 bp, Artificial
  Synthetic oligonucleotide
actccgtgaacgttataaactggtcccatgaacccccaaaatcaatgacacaagc

SEQ ID NO: 316636 - DNA, 55 bp, Artificial
  Synthetic oligonucleotide
actccgtttacgtgctcacggttccgcctcagcctgccatgaatccccatgattg

SEQ ID NO: 316637 - DNA, 57 bp, Artificial
  Synthetic oligonucleotide
actcctaaagttaagaagtatcccgatgattacaacaacgaagaactgagtgcaatg

SEQ ID NO: 316638 - DNA, 50 bp, Artificial
  Synthetic oligonucleotide
actcctaaattatctaaatacttaataacttgggtcttaaagacccttaa

SEQ ID NO: 316639 - DNA, 54 bp, Artificial
  Synthetic oligonucleotide
actcctaatgccactgccactcaaaacggaacaaccctgaaggaagaaccaggg

SEQ ID NO: 316640 - DNA, 57 bp, Artificial
  Synthetic oligonucleotide
actcctaattattgatgaaatgagacctggccgtgcatactcaacatcttttagtaa

SEQ ID NO: 316641 - DNA, 57 bp, Artificial
  Synthetic oligonucleotide
actcctacccaacaggtgcgaagagcgttcgttgtaggtgcgtattcgactgcctac

SEQ ID NO: 316642 - DNA, 60 bp, Artificial
  Synthetic oligonucleotide
actcctagccgcctgttttgctcgcagcaggtctggagcaaaactcatcgggactgacaa

SEQ ID NO: 316643 - DNA, 60 bp, Artificial
  Synthetic oligonucleotide
actcctaggggagaggatagtcaattcacaggctcatgcacaagccctttgggaaatcaa

SEQ ID NO: 316644 - DNA, 57 bp, Artificial
  Synthetic oligonucleotide
actcctatcttagtaacatggccgccctcaaaggtcaatggtggtgtttcactatct

SEQ ID NO: 316645 - DNA, 58 bp, Artificial
  Synthetic oligonucleotide
actcctatgataaatataatgctgtcgaacgcaagttagttaagtatgcaaaaggtaa

SEQ ID NO: 316646 - DNA, 58 bp, Artificial
  Synthetic oligonucleotide
actcctatggattttggccaggtgttcaacatgttcgacaacgaacccagtacagcta

SEQ ID NO: 316647 - DNA, 60 bp, Artificial
  Synthetic oligonucleotide
actcctcaaaagtctaatggatggcatgacgggaattgtgtcacataactcaactcatga

SEQ ID NO: 316648 - DNA, 50 bp, Artificial
  Synthetic oligonucleotide
actcctcaaccccctcgggccgtcgctctgtgtcatgatgggctcaaccg

SEQ ID NO: 316649 - DNA, 53 bp, Artificial
  Synthetic oligonucleotide
actcctcaaccgatgaaatactacgcagaaccgttctttaattggtctaaaaa

SEQ ID NO: 316650 - DNA, 55 bp, Artificial
  Synthetic oligonucleotide
actcctcaattgattagattgtggtacaaattagtaaaagatcccatcccaggag

SEQ ID NO: 316651 - DNA, 55 bp, Artificial
  Synthetic oligonucleotide
actcctcaggaggggacctagaaattgtaatgcacagttttaattgtggagggga

SEQ ID NO: 316652 - DNA, 60 bp, Artificial
  Synthetic oligonucleotide
actcctcaggggagccaaagcgctaacagatatagtaccactgactgaggaggcagaatt

SEQ ID NO: 316653 - DNA, 58 bp, Artificial
  Synthetic oligonucleotide
actcctccagttgattacatgcccttacccattacagatttagttgagcttgctaaag

SEQ ID NO: 316654 - DNA, 56 bp, Artificial
  Synthetic oligonucleotide
actcctcccgttgctgggtagcgcttacccccacgctagcggccaggaatacaagc

SEQ ID NO: 316655 - DNA, 58 bp, Artificial
  Synthetic oligonucleotide
actcctccgcatgagatactcagctgaaatgcggggagcaacctccatcagtggggtt

SEQ ID NO: 316656 - DNA, 55 bp, Artificial
  Synthetic oligonucleotide
actcctcctccttcgacactgaggaacaacagttacccgggccctccaccagcta

SEQ ID NO: 316657 - DNA, 58 bp, Artificial
  Synthetic oligonucleotide
actcctcctgccttcttataggacgtcttgatgggctgggccgcatgttcttgggcct

SEQ ID NO: 316658 - DNA, 55 bp, Artificial
  Synthetic oligonucleotide
actcctcgagttcctgaggtacctggtcattccggggtttgatggcgcggagacc

SEQ ID NO: 316659 - DNA, 60 bp, Artificial
  Synthetic oligonucleotide
actcctcgctagatactctaacgagtgtcttgaggactctctatggagagtcagtaaaga

SEQ ID NO: 316660 - DNA, 57 bp, Artificial
  Synthetic oligonucleotide
actcctctcacgtatcgcgtgagccggatgcttccgttccccgactacaacgcctac

SEQ ID NO: 316661 - DNA, 60 bp, Artificial
  Synthetic oligonucleotide
actcctcttgattatgaggagccatcaccctacaaacatactttggattgtgatggacaa

SEQ ID NO: 316662 - DNA, 60 bp, Artificial
  Synthetic oligonucleotide
actcctgaagatagaccaggtgcagatgttgtagtagtgccagaagacagtgttgattat

SEQ ID NO: 316663 - DNA, 51 bp, Artificial
  Synthetic oligonucleotide
actcctgagcttgggcggcacccggttgtccacgaatgggaaccaactacc

SEQ ID NO: 316664 - DNA, 60 bp, Artificial
  Synthetic oligonucleotide
actcctgctacaacaactagcaggccgcatgattccgaaagggactgtaacatggtcagg

SEQ ID NO: 316665 - DNA, 60 bp, Artificial
  Synthetic oligonucleotide
actcctggacaggagccctcataacaccatgtgggcccgaggaggagaagttgccaatca

SEQ ID NO: 316666 - DNA, 54 bp, Artificial
  Synthetic oligonucleotide
actcctggagtcgcaaaggtgagtcgccgtttgaattactcccctcgtggggga

SEQ ID NO: 316667 - DNA, 57 bp, Artificial
  Synthetic oligonucleotide
actcctgtgactctgatttcacaggtgataatcaatactcatcgtctgatggtgccg

SEQ ID NO: 316668 - DNA, 50 bp, Artificial
  Synthetic oligonucleotide
actccttacgttctgtacttccaaccgtacgacgtttcaccctcctccct

SEQ ID NO: 316669 - DNA, 55 bp, Artificial
  Synthetic oligonucleotide
actccttatagattggacttatgaaagacgtaaagatgttcgtagtgtggatgag

SEQ ID NO: 316670 - DNA, 60 bp, Artificial
  Synthetic oligonucleotide
actccttcattcaggcaaatcatggctcactttagcaacgcggcagaggcatacattgcg

SEQ ID NO: 316671 - DNA, 55 bp, Artificial
  Synthetic oligonucleotide
actccttcccccctgtggggcccccccataagatggcgagatctccactcattgg

SEQ ID NO: 316672 - DNA, 60 bp, Artificial
  Synthetic oligonucleotide
actccttcgtttagacagatcatggctcactttagtaacgcggcagaagcatacattgcg

SEQ ID NO: 316673 - DNA, 55 bp, Artificial
  Synthetic oligonucleotide
actccttgaacccttcagaagaattcttcggagttcgtaccagtacctcacatag

SEQ ID NO: 316674 - DNA, 57 bp, Artificial
  Synthetic oligonucleotide
actccttgagcgtggccggctggctggacaccatttgggacgccattaagcggttct

SEQ ID NO: 316675 - DNA, 52 bp, Artificial
  Synthetic oligonucleotide
actccttgcaaaaattactgaactaactcgtcagaatagggaattacttctg

SEQ ID NO: 316676 - DNA, 60 bp, Artificial
  Synthetic oligonucleotide
actccttgcgcctatcacggcctattcccaacagacgcggggtctactgggctgcatcat

SEQ ID NO: 316677 - DNA, 60 bp, Artificial
  Synthetic oligonucleotide
actccttgctgcgtcaccacaacatggtctatgctacaacatcccgcagtgcaagcctac

SEQ ID NO: 316678 - DNA, 58 bp, Artificial
  Synthetic oligonucleotide
actccttgtcctaagtgctattgtaaacactgtacctatcattgtcaagtttgctttc

SEQ ID NO: 316679 - DNA, 53 bp, Artificial
  Synthetic oligonucleotide
actcctttagttaatgaagcgtttacattcgattttatacattgttctaccgt

SEQ ID NO: 316680 - DNA, 56 bp, Artificial
  Synthetic oligonucleotide
actccttttgtgctccaataaggtgcttccagtgtttcatctttaagtaagtggga

SEQ ID NO: 316681 - DNA, 55 bp, Artificial
  Synthetic oligonucleotide
actcgaaaataggtccaagatctcttctgccttcaggtttgtattgaggtcttgc

SEQ ID NO: 316682 - DNA, 55 bp, Artificial
  Synthetic oligonucleotide
actcgaaagatgttgtcgctgctatgtaccccgaggcgtttaagggcataaccct

SEQ ID NO: 316683 - DNA, 57 bp, Artificial
  Synthetic oligonucleotide
actcgaacaagccccagtacgcatgggtttcgtctcaagcttgggacaatctccaaa

SEQ ID NO: 316684 - DNA, 52 bp, Artificial
  Synthetic oligonucleotide
actcgaaccctcatggatgtttgacgcttcaacctccatggggtcgtcgtcc

SEQ ID NO: 316685 - DNA, 58 bp, Artificial
  Synthetic oligonucleotide
actcgaattcaaccctatgctaaacctacaagctggatgactgggccaggtttactca

SEQ ID NO: 316686 - DNA, 57 bp, Artificial
  Synthetic oligonucleotide
actcgacccgggcagtggatcagttctcaaacgcacactattgggagaaatactaaa

SEQ ID NO: 316687 - DNA, 55 bp, Artificial
  Synthetic oligonucleotide
actcgacgtcccagacgccgctctcccgtcgatgccacgcgcttctacttctact

SEQ ID NO: 316688 - DNA, 51 bp, Artificial
  Synthetic oligonucleotide
actcgacgtctacccgtcaagaggcccctgcgcgacagtttcgaacctgaa

SEQ ID NO: 316689 - DNA, 57 bp, Artificial
  Synthetic oligonucleotide
actcgactatgtctatcgtccaccacttgtcgcccaagttctgggttatggcgaaac

SEQ ID NO: 316690 - DNA, 53 bp, Artificial
  Synthetic oligonucleotide
actcgactgaaacggtaaacacactaattgaacaaaacgttccggtgacacaa

SEQ ID NO: 316691 - DNA, 53 bp, Artificial
  Synthetic oligonucleotide
actcgagaattatgggggagaggttacaacgaaaccagactagccttttcgga

SEQ ID NO: 316692 - DNA, 55 bp, Artificial
  Synthetic oligonucleotide
actcgagcgctgaacggggattacaggcccagaaggcggagagctgctgttgctc

SEQ ID NO: 316693 - DNA, 52 bp, Artificial
  Synthetic oligonucleotide
actcgaggagaacaatgtagttgccgagtggctgtgggacgcggtgcgaccg

SEQ ID NO: 316694 - DNA, 60 bp, Artificial
  Synthetic oligonucleotide
actcgaggagagcgttgtgacttggaggacagggacagatcggagcttagcccgttgctg

SEQ ID NO: 316695 - DNA, 60 bp, Artificial
  Synthetic oligonucleotide
actcgaggagagcgttgtgacttggaggacagggatagatcagagctcagtccgctactg

SEQ ID NO: 316696 - DNA, 53 bp, Artificial
  Synthetic oligonucleotide
actcgagggctcttcctcgctaaaaagggggtagccaggttgaaaactggcat

SEQ ID NO: 316697 - DNA, 60 bp, Artificial
  Synthetic oligonucleotide
actcgaggtactttatatcacctactcctggtgattgtgaagagccgtgtacaatgtaca

SEQ ID NO: 316698 - DNA, 54 bp, Artificial
  Synthetic oligonucleotide
actcgagtaaagcgaaattagtcgaatttaatacgtagattggtaatgagtcgg

SEQ ID NO: 316699 - DNA, 58 bp, Artificial
  Synthetic oligonucleotide
actcgagtctgccccttgactcttgcttcccgaatcagtctcgccgcctcgggcttta

SEQ ID NO: 316700 - DNA, 60 bp, Artificial
  Synthetic oligonucleotide
actcgagtggcgctgagctcgtacacttttgaccgtatctagcactttcacctgtcgcaa

SEQ ID NO: 316701 - DNA, 60 bp, Artificial
  Synthetic oligonucleotide
actcgataaaattatcatacaatggcatttcaaaacctaaatcatgcgatgttagtgaga

SEQ ID NO: 316702 - DNA, 52 bp, Artificial
  Synthetic oligonucleotide
actcgataacgtttcagtaacgagcgattatgatgcgcttatgcgatttttc

SEQ ID NO: 316703 - DNA, 54 bp, Artificial
  Synthetic oligonucleotide
actcgatagtgggtgtgactaggcacaggcgatcattggtctactacacggcta

SEQ ID NO: 316704 - DNA, 60 bp, Artificial
  Synthetic oligonucleotide
actcgatcttgtccgagccctccaaccaactggcagagaatcccagtctccattgttgag

SEQ ID NO: 316705 - DNA, 58 bp, Artificial
  Synthetic oligonucleotide
actcgatggacccgagacggggtacaagaggccgctatcctcatggatgataaactac

SEQ ID NO: 316706 - DNA, 55 bp, Artificial
  Synthetic oligonucleotide
actcgatggtccaggcctcgactcacgagaacgcgagattcctgccgccggatta

SEQ ID NO: 316707 - DNA, 59 bp, Artificial
  Synthetic oligonucleotide
actcgattatgtatccaacgcgtatgggtacgccgaacgtgtcaaagatatgcaatttc

SEQ ID NO: 316708 - DNA, 59 bp, Artificial
  Synthetic oligonucleotide
actcgattccagtttgtgtagcgcaaccaaccctttatgtatgattccgcctggacaca

SEQ ID NO: 316709 - DNA, 60 bp, Artificial
  Synthetic oligonucleotide
actcgcaatccctaggaggatcagacaagagcttgagcttactctcttgtgagggacaga

SEQ ID NO: 316710 - DNA, 55 bp, Artificial
  Synthetic oligonucleotide
actcgcaatgtctcaattagcacctcgggtctcagaatatcaagggcgggtcctc

SEQ ID NO: 316711 - DNA, 56 bp, Artificial
  Synthetic oligonucleotide
actcgcaatttcgtgcatctgtatgggtttgaccccagtgagtacacatttgtgcg

SEQ ID NO: 316712 - DNA, 59 bp, Artificial
  Synthetic oligonucleotide
actcgcacaaaagggatgggtcgcaagtccagaaatttcatacacttgtatggagttga

SEQ ID NO: 316713 - DNA, 55 bp, Artificial
  Synthetic oligonucleotide
actcgcacaatacaaagtttcttggagtgtcttaaagatgcaatttgtggggcct

SEQ ID NO: 316714 - DNA, 53 bp, Artificial
  Synthetic oligonucleotide
actcgcagacctttggccgactgaacctgacggggagtcataccctcgggagc

SEQ ID NO: 316715 - DNA, 53 bp, Artificial
  Synthetic oligonucleotide
actcgcatcgtattttttaccgcgcggtgtccacaaataaccgccccgacaaa

SEQ ID NO: 316716 - DNA, 57 bp, Artificial
  Synthetic oligonucleotide
actcgccctctcattggtgcggtgaacccgacgctcctcactttaatgctctttaat

SEQ ID NO: 316717 - DNA, 55 bp, Artificial
  Synthetic oligonucleotide
actcgccggtgggagtgggtcgtcacgaacatgccagtgaccgcagtgaccggca

SEQ ID NO: 316718 - DNA, 59 bp, Artificial
  Synthetic oligonucleotide
actcgccggtgtgcttctaacaaaacactcaagaaggatgagggaattatcaatcagct

SEQ ID NO: 316719 - DNA, 59 bp, Artificial
  Synthetic oligonucleotide
actcgcgcgagtggtgggtccagaacgcacgactatgcagactcaaagcttagataacg

SEQ ID NO: 316720 - DNA, 53 bp, Artificial
  Synthetic oligonucleotide
actcgcggacgcccgtacctcgggtttccgtcttgctcgtaccgcgaaagagc

SEQ ID NO: 316721 - DNA, 57 bp, Artificial
  Synthetic oligonucleotide
actcgcggtactgggctgacccatagagttgggaagcgtttctgtgttaagtctgtc

SEQ ID NO: 316722 - DNA, 60 bp, Artificial
  Synthetic oligonucleotide
actcgctacactgctagatgtagtttagtctattcctgtgttaggcgtttctacgatgta

SEQ ID NO: 316723 - DNA, 60 bp, Artificial
  Synthetic oligonucleotide
actcgctactgaatcaggtggtacgatagcaatattggcggccacaggcacactcacttg

SEQ ID NO: 316724 - DNA, 50 bp, Artificial
  Synthetic oligonucleotide
actcgctatcataaactggtggaagactacatcaacaatgagttggacac

SEQ ID NO: 316725 - DNA, 60 bp, Artificial
  Synthetic oligonucleotide
actcgctctaccctggtgctcttctcacacgcgctctcccattggtgcgggtccttcacg

SEQ ID NO: 316726 - DNA, 60 bp, Artificial
  Synthetic oligonucleotide
actcgctgccactgtggagctgagatcaccggacatgtcaaaaatgggacgatgaggatc

SEQ ID NO: 316727 - DNA, 55 bp, Artificial
  Synthetic oligonucleotide
actcgctttgtcattatacgccatcactcttccttcgtgtgttatgcttgctcct

SEQ ID NO: 316728 - DNA, 56 bp, Artificial
  Synthetic oligonucleotide
actcggaaacattggattgtaaagtccaatgagatttttgaggtggacttatattg

SEQ ID NO: 316729 - DNA, 57 bp, Artificial
  Synthetic oligonucleotide
actcggaaggtaattgggagctattctttgaattagtacatactactgtgttggcta

SEQ ID NO: 316730 - DNA, 55 bp, Artificial
  Synthetic oligonucleotide
actcggaccgggtggcatgacgggatggtataacagaactatgcagcaagcacca

SEQ ID NO: 316731 - DNA, 51 bp, Artificial
  Synthetic oligonucleotide
actcggactcagtaaccacacgcagcatgtgacgcttcttgcaccgtaatg

SEQ ID NO: 316732 - DNA, 55 bp, Artificial
  Synthetic oligonucleotide
actcggagacgtacgacacgccgcgcttcaaggtgtcggtcaactggaacctgga

SEQ ID NO: 316733 - DNA, 56 bp, Artificial
  Synthetic oligonucleotide
actcggataccctcattcgacatgagtgttacccactactgctatactcacaatgt

SEQ ID NO: 316734 - DNA, 60 bp, Artificial
  Synthetic oligonucleotide
actcggatctcattccgcatgatgacaggcttggccaattatttcaagcgtttctgcctc

SEQ ID NO: 316735 - DNA, 57 bp, Artificial
  Synthetic oligonucleotide
actcggatgtacgtcggcttgacgacagaccatggcaagtcccgaagcaactgcaga

SEQ ID NO: 316736 - DNA, 51 bp, Artificial
  Synthetic oligonucleotide
actcggcagtttcatcagaaacaccttaagtccatagttaatactaggggc

SEQ ID NO: 316737 - DNA, 51 bp, Artificial
  Synthetic oligonucleotide
actcggccagcgtgttttcgaggtcagggtgggcaccggttctagtgctgt

SEQ ID NO: 316738 - DNA, 54 bp, Artificial
  Synthetic oligonucleotide
actcggccagtggtcgtggtccgggctcccccaggacctagacgagtacgacga

SEQ ID NO: 316739 - DNA, 55 bp, Artificial
  Synthetic oligonucleotide
actcggcccacgaacgaatgcaacccggtactagctcgttgtgatgtagatcaca

SEQ ID NO: 316740 - DNA, 60 bp, Artificial
  Synthetic oligonucleotide
actcggcgaatgataatgtacattatgttgaagcggatggttgctttactgaaaggaaga

SEQ ID NO: 316741 - DNA, 60 bp, Artificial
  Synthetic oligonucleotide
actcggctgagttgaggaagtgcgtgggcatgaccgtcccttacgtggcaaccactgtca

SEQ ID NO: 316742 - DNA, 55 bp, Artificial
  Synthetic oligonucleotide
actcggcttcgaatctaaatctacagtggtgttatcccaagccctcccttgaact

SEQ ID NO: 316743 - DNA, 56 bp, Artificial
  Synthetic oligonucleotide
actcgggaacatttacccatggttcatatcctaaatggatagtagaacaaacatta

SEQ ID NO: 316744 - DNA, 55 bp, Artificial
  Synthetic oligonucleotide
actcgggactgtaacccagtccaatagcgagaagcaaaaccaatggagccaccga

SEQ ID NO: 316745 - DNA, 56 bp, Artificial
  Synthetic oligonucleotide
actcgggatctccggcaagagcttccgaatgtctactcctccaactaatccccaaa

SEQ ID NO: 316746 - DNA, 57 bp, Artificial
  Synthetic oligonucleotide
actcgggctggcaccagaattaaggacggtaacctcaaataagttcatgtatgatcc

SEQ ID NO: 316747 - DNA, 55 bp, Artificial
  Synthetic oligonucleotide
actcggggatcaccagtttaggaacagcaatctcggggaaggtctcgctccacat

SEQ ID NO: 316748 - DNA, 53 bp, Artificial
  Synthetic oligonucleotide
actcggtaaaaccctccctaatcgatcccgtgcatatatcaagttaaaacgac

SEQ ID NO: 316749 - DNA, 59 bp, Artificial
  Synthetic oligonucleotide
actcggtccggctcatcccggcaagaggcggcagtcctcagtgctcttactctttccta

SEQ ID NO: 316750 - DNA, 57 bp, Artificial
  Synthetic oligonucleotide
actcggtgaaatgtacaggtggaagttacgactttagtatacctgtaggtgcatggc

SEQ ID NO: 316751 - DNA, 55 bp, Artificial
  Synthetic oligonucleotide
actcggtgactcgggagacgttgactcggaccgacagcacgcagcggtaagactc

SEQ ID NO: 316752 - DNA, 50 bp, Artificial
  Synthetic oligonucleotide
actcggtgcatgggcttagatgtatgcttgcaattaaatatctgcaggcc

SEQ ID NO: 316753 - DNA, 56 bp, Artificial
  Synthetic oligonucleotide
actcggtggctggatagccactcaagtggctcccccccccgcgtctacagcttttg

SEQ ID NO: 316754 - DNA, 58 bp, Artificial
  Synthetic oligonucleotide
actcggtgttgtcggtcctgcgaacctgcccgctcggtgccagctcgtcgtagccacg

SEQ ID NO: 316755 - DNA, 56 bp, Artificial
  Synthetic oligonucleotide
actcggttagatcctacccaggtgatcactaacgtgatggtatccccgcgtggacc

SEQ ID NO: 316756 - DNA, 56 bp, Artificial
  Synthetic oligonucleotide
actcggttgtatgcaacccttcatctccccccggaggtattgcttcctcctggcac

SEQ ID NO: 316757 - DNA, 58 bp, Artificial
  Synthetic oligonucleotide
actcgtaacctgtcacaggctgcgtactcagcgaatggtatgcgtgctatccaccgtg

SEQ ID NO: 316758 - DNA, 55 bp, Artificial
  Synthetic oligonucleotide
actcgtaaggatctggaactatgacccattagttttgaaccgtctactagtctcc

SEQ ID NO: 316759 - DNA, 59 bp, Artificial
  Synthetic oligonucleotide
actcgtacaaaagggatgggtcgcaagtcgaggaacttcatacatctgtatggagttga

SEQ ID NO: 316760 - DNA, 55 bp, Artificial
  Synthetic oligonucleotide
actcgtagtgttggaagtgacgttaatgtccgtgccgtggtacgtacagcggacc

SEQ ID NO: 316761 - DNA, 51 bp, Artificial
  Synthetic oligonucleotide
actcgtattcaagacggagcgaggccaatatttcatcagatcccaagtggc

SEQ ID NO: 316762 - DNA, 54 bp, Artificial
  Synthetic oligonucleotide
actcgtccatttcagattttactaactcagattaactagggacctttgtgtccc

SEQ ID NO: 316763 - DNA, 55 bp, Artificial
  Synthetic oligonucleotide
actcgtcggaactccgattaaggcacttccggtcaccaatttgcgacacgcgcgg

SEQ ID NO: 316764 - DNA, 60 bp, Artificial
  Synthetic oligonucleotide
actcgtcggtgtctacctctaaaggtcactaagcactccgagcgccagcgaggagtgcga

SEQ ID NO: 316765 - DNA, 60 bp, Artificial
  Synthetic oligonucleotide
actcgtctgcactacgtgcacagggtgcacagattgacactgctttcagctcatactact

SEQ ID NO: 316766 - DNA, 60 bp, Artificial
  Synthetic oligonucleotide
actcgtctgctctccgtgcacagggtgcacagattgataccgtcttcagctcgtactact

SEQ ID NO: 316767 - DNA, 59 bp, Artificial
  Synthetic oligonucleotide
actcgtgaaattgatgtggaatcgggattgcaggggtcaaatgaaccagaagcctgtta

SEQ ID NO: 316768 - DNA, 55 bp, Artificial
  Synthetic oligonucleotide
actcgtgacaaagcacacagtcaagggtaagtgcatgatgttcgagttatacctg

SEQ ID NO: 316769 - DNA, 54 bp, Artificial
  Synthetic oligonucleotide
actcgtggtgtcggttgccccatcgtttggtcaacgtttttgtgtcaagtcagt

SEQ ID NO: 316770 - DNA, 60 bp, Artificial
  Synthetic oligonucleotide
actcgtgtagtgaatctggaccaaatcgctccgatgaggtttgtattagatctaggagga

SEQ ID NO: 316771 - DNA, 50 bp, Artificial
  Synthetic oligonucleotide
actcgttactattcgccagacgattggcgtttaatgcaggagtcaaggtt

SEQ ID NO: 316772 - DNA, 60 bp, Artificial
  Synthetic oligonucleotide
actcgttaggaccgcatactccaggaactgcactctcggtcagacctcatgattcaggag

SEQ ID NO: 316773 - DNA, 52 bp, Artificial
  Synthetic oligonucleotide
actcgttcgggtgaatatactaaccaatccatagatgaggcgttcgaatcat

SEQ ID NO: 316774 - DNA, 60 bp, Artificial
  Synthetic oligonucleotide
actcgttgataatgttaacacagctcttgttgagttatatctgcatcaagatagggagta

SEQ ID NO: 316775 - DNA, 57 bp, Artificial
  Synthetic oligonucleotide
actcgttgcaatctctatggtgtatgtcaggagacgcctctttcgtggcaggtgcag

SEQ ID NO: 316776 - DNA, 55 bp, Artificial
  Synthetic oligonucleotide
actcgttggaataaacatgtcaccgagtaaatgcattctgataagtcctgcaggt

SEQ ID NO: 316777 - DNA, 50 bp, Artificial
  Synthetic oligonucleotide
actcgtttcgtttacgagttggcggaccgggggccgtatccttggagcgg

SEQ ID NO: 316778 - DNA, 50 bp, Artificial
  Synthetic oligonucleotide
actcgttttccctaaaataccgctcgaactggactcccggtcgatttaat

SEQ ID NO: 316779 - DNA, 55 bp, Artificial
  Synthetic oligonucleotide
actctaaacaaaactgacggacttatggttgttagagttaaaaatgccatctcaa

SEQ ID NO: 316780 - DNA, 59 bp, Artificial
  Synthetic oligonucleotide
actctaacaagtgacgaactacggatgaagtaaatgaatcaaggtagagtgaacactgc

SEQ ID NO: 316781 - DNA, 52 bp, Artificial
  Synthetic oligonucleotide
actctaacccgaggtttggttacgagtcaagtgggtatccaaaagaatttca

SEQ ID NO: 316782 - DNA, 55 bp, Artificial
  Synthetic oligonucleotide
actctaaccgatttcggtcgtcctggcatgatttttgggcaatttgcaacaaaac

SEQ ID NO: 316783 - DNA, 60 bp, Artificial
  Synthetic oligonucleotide
actctaactaatgtagagaaggacaagcatgacttgttcaactatgcattgcctgagttc

SEQ ID NO: 316784 - DNA, 51 bp, Artificial
  Synthetic oligonucleotide
actctaactgttgacatatctatagatacctcatctacagcaggtcttcta

SEQ ID NO: 316785 - DNA, 60 bp, Artificial
  Synthetic oligonucleotide
actctaagagagttactgcacatggagacacaccacaattagatctgaaagctaggccaa

SEQ ID NO: 316786 - DNA, 60 bp, Artificial
  Synthetic oligonucleotide
actctaagagtataagcaagtactcagcatgtatagaataattgatgacgtcacaactat

SEQ ID NO: 316787 - DNA, 54 bp, Artificial
  Synthetic oligonucleotide
actctaatactggtttctcaaaagtaacacgatgattatagatcatgaactctg

SEQ ID NO: 316788 - DNA, 55 bp, Artificial
  Synthetic oligonucleotide
actctaatcaacagtgccaactatctgagaatggtggcagttattgacatgttct

SEQ ID NO: 316789 - DNA, 60 bp, Artificial
  Synthetic oligonucleotide
actctaatcgaactcctcccaaatgatatagtggaatcagtaactcacgcaatcgcctcc

SEQ ID NO: 316790 - DNA, 55 bp, Artificial
  Synthetic oligonucleotide
actctaatgagtgtagaaatagggcaatcacctaatgtgtaccaggcaaggtttg

SEQ ID NO: 316791 - DNA, 50 bp, Artificial
  Synthetic oligonucleotide
actctaatttaagattcgagacgtgggatccattagacacgccatattct

SEQ ID NO: 316792 - DNA, 60 bp, Artificial
  Synthetic oligonucleotide
actctacaaacgatagctcaataaaccctataagcacagagaaccctaacagcatagaga

SEQ ID NO: 316793 - DNA, 59 bp, Artificial
  Synthetic oligonucleotide
actctacacattttggagactgatccggagaccctagttagaaatgaagagatatccgc

SEQ ID NO: 316794 - DNA, 59 bp, Artificial
  Synthetic oligonucleotide
actctacatacaacaccacatactaaaacactgcaggattatgttcgacccttactcat

SEQ ID NO: 316795 - DNA, 54 bp, Artificial
  Synthetic oligonucleotide
actctacccccaggatgttatgggcgtgtggcacctcgttcgggtttggctgtg

SEQ ID NO: 316796 - DNA, 58 bp, Artificial
  Synthetic oligonucleotide
actctacctggtccagcacgaagtctggagaccgttggcggcagcttaccaagaacaa

SEQ ID NO: 316797 - DNA, 58 bp, Artificial
  Synthetic oligonucleotide
actctacctgttacggcgatcgtgtccaccttgcactaccaagggaagatgagaacga

SEQ ID NO: 316798 - DNA, 60 bp, Artificial
  Synthetic oligonucleotide
actctacgaagaagatagatgcacgaatgtttgctgcgaacgcatgtactagctccgtta

SEQ ID NO: 316799 - DNA, 50 bp, Artificial
  Synthetic oligonucleotide
actctacgatcaagtggtgagatgtatggaatgtgaaactcctcactacc

SEQ ID NO: 316800 - DNA, 55 bp, Artificial
  Synthetic oligonucleotide
actctacggatgacatagaagagtccacggagaaagaatacacgtctacggctac

SEQ ID NO: 316801 - DNA, 57 bp, Artificial
  Synthetic oligonucleotide
actctactacaaccggttttgcgaatcgaaatgcagcgtccctcctgcggctttata

SEQ ID NO: 316802 - DNA, 60 bp, Artificial
  Synthetic oligonucleotide
actctactggtgcacttgcaagttgcatgggtctcatatacaacagaatgggaactgtga

SEQ ID NO: 316803 - DNA, 55 bp, Artificial
  Synthetic oligonucleotide
actctacttaatatgggaggctactcaaggtcaaatcaaattactgactttaagg

SEQ ID NO: 316804 - DNA, 59 bp, Artificial
  Synthetic oligonucleotide
actctagattttgggtgaaagcagcatacccttcagctcggactgtcaacctcgcttgt

SEQ ID NO: 316805 - DNA, 55 bp, Artificial
  Synthetic oligonucleotide
actctagctacctaggtaagtgtaaatttagaagatccagcatccgaggacctag

SEQ ID NO: 316806 - DNA, 60 bp, Artificial
  Synthetic oligonucleotide
actctaggctctttcttgaaaactctgatctggattctgtcccatgataagaacctccca

SEQ ID NO: 316807 - DNA, 60 bp, Artificial
  Synthetic oligonucleotide
actctagggtgacgaaggagcaaagcaccgctcacatacgtggagagtggtggaacttga

SEQ ID NO: 316808 - DNA, 55 bp, Artificial
  Synthetic oligonucleotide
actctagtaatgatgcaaagtaccgtaccctcaacaaagagtactccactctagt

SEQ ID NO: 316809 - DNA, 60 bp, Artificial
  Synthetic oligonucleotide
actctagtcaatcagggcattagtaaggatcgtgcgacttacattagtatgtcagcatat

SEQ ID NO: 316810 - DNA, 60 bp, Artificial
  Synthetic oligonucleotide
actctataaacatgcagattgcccattgatctcagcagccgagctcggtcccgggagtag

SEQ ID NO: 316811 - DNA, 60 bp, Artificial
  Synthetic oligonucleotide
actctatagtttgtataagcggtcacataagtgcggcgtgacacagactatagagtaatg

SEQ ID NO: 316812 - DNA, 57 bp, Artificial
  Synthetic oligonucleotide
actctatataattaaaagcgtttgggggattagctaattgagaatccatatagagaa

SEQ ID NO: 316813 - DNA, 55 bp, Artificial
  Synthetic oligonucleotide
actctatcaatctttcaattttagtaccgcagcttatagtaacgttacccttgaa

SEQ ID NO: 316814 - DNA, 60 bp, Artificial
  Synthetic oligonucleotide
actctatcataagagatgtatatgaagggaaacaaatcaagatccccgattggtttgcta

SEQ ID NO: 316815 - DNA, 60 bp, Artificial
  Synthetic oligonucleotide
actctatctgccattggttactttggtctgcggccgtttacaagtcttgtgctgagattg

SEQ ID NO: 316816 - DNA, 60 bp, Artificial
  Synthetic oligonucleotide
actctatgacacaatgatctatcttcatgcagctacggctgagtcttgccgtcaactgtg

SEQ ID NO: 316817 - DNA, 60 bp, Artificial
  Synthetic oligonucleotide
actctatgcacctcccaggaaaggtaacctaacatgcagctcactcataactggaatgat

SEQ ID NO: 316818 - DNA, 54 bp, Artificial
  Synthetic oligonucleotide
actctatgcatgtgtctgaccaaccattccctggtgccactcatgtgctgacta

SEQ ID NO: 316819 - DNA, 60 bp, Artificial
  Synthetic oligonucleotide
actctatgcttgagtttgggtagatgccacagcatgttcccctacattagaccaaatagg

SEQ ID NO: 316820 - DNA, 60 bp, Artificial
  Synthetic oligonucleotide
actctatgtaattgaaggcatgtggaggattgactagctgagattccatatgaagaagaa

SEQ ID NO: 316821 - DNA, 52 bp, Artificial
  Synthetic oligonucleotide
actctatgtcgtacgatgggtatgctacctttgggaacactggtggtgacaa

SEQ ID NO: 316822 - DNA, 55 bp, Artificial
  Synthetic oligonucleotide
actctattaccaagcacccagacatgcttaaaatggctgctgaccgttatgggaa

SEQ ID NO: 316823 - DNA, 60 bp, Artificial
  Synthetic oligonucleotide
actctcaaaccagcgacacatcgtttgaacttgccagcgtacacgaagttgattcatgaa

SEQ ID NO: 316824 - DNA, 53 bp, Artificial
  Synthetic oligonucleotide
actctcaaatggtgctgacactacatacaacaacgacctaacagctggtgttc

SEQ ID NO: 316825 - DNA, 53 bp, Artificial
  Synthetic oligonucleotide
actctcaactgtcacccaactggaagagagctctacagcattcagcgttcccc

SEQ ID NO: 316826 - DNA, 55 bp, Artificial
  Synthetic oligonucleotide
actctcaatagatagcatgacaaagcacaacaactggggaattgccatcctcccc

SEQ ID NO: 316827 - DNA, 60 bp, Artificial
  Synthetic oligonucleotide
actctcagatcgtgagttgattctatcatgggagccaggtaagaccaggcctccattgaa

SEQ ID NO: 316828 - DNA, 56 bp, Artificial
  Synthetic oligonucleotide
actctcagcccttggatgatctttgagatccgaggttttgaaaaactcccttccta

SEQ ID NO: 316829 - DNA, 59 bp, Artificial
  Synthetic oligonucleotide
actctcaggggtcatctcaaagaagagtattcacttcctctaactgaggaagtttctca

SEQ ID NO: 316830 - DNA, 54 bp, Artificial
  Synthetic oligonucleotide
actctcatagacgatttgtttcacgtaatccctcttttaagcgtggaactttgg

SEQ ID NO: 316831 - DNA, 56 bp, Artificial
  Synthetic oligonucleotide
actctcatggaaggcatgaagtatggactcacaaaagaggacctgcctgggaatga

SEQ ID NO: 316832 - DNA, 55 bp, Artificial
  Synthetic oligonucleotide
actctccaggcgaactcaatcgggtggcatcatgcctcagaaaacttggggctcc

SEQ ID NO: 316833 - DNA, 57 bp, Artificial
  Synthetic oligonucleotide
actctccaggtgagatcaacagggtggcttcgtgcctcaggaaacttggggtaccac

SEQ ID NO: 316834 - DNA, 60 bp, Artificial
  Synthetic oligonucleotide
actctccagtgttgagttcttcgcaagaagttctctgaagagcacatcctatccctatat

SEQ ID NO: 316835 - DNA, 55 bp, Artificial
  Synthetic oligonucleotide
actctcccaggacataaggtgagtgatgacgtgaactccgagcccaccaaacctg

SEQ ID NO: 316836 - DNA, 59 bp, Artificial
  Synthetic oligonucleotide
actctccccacgactccgaaatgacgtcctactccagctaacaaagcgctccctcatga

SEQ ID NO: 316837 - DNA, 58 bp, Artificial
  Synthetic oligonucleotide
actctcccgaaaatcttttcgctagattgaggttcgatgattattacgatgagtggaa

SEQ ID NO: 316838 - DNA, 56 bp, Artificial
  Synthetic oligonucleotide
actctccctccagagtatatggggggctgtcctagattacagatatactaggaatc

SEQ ID NO: 316839 - DNA, 56 bp, Artificial
  Synthetic oligonucleotide
actctccctgacttctttgctgtatctaagtcccatcctaaatcccaaccaagatt

SEQ ID NO: 316840 - DNA, 55 bp, Artificial
  Synthetic oligonucleotide
actctccgggccacatcaagcaccaggaaggccgctcgacgtcatagtagggacg

SEQ ID NO: 316841 - DNA, 53 bp, Artificial
  Synthetic oligonucleotide
actctccggggtgtgtcccttgcgtccgcgagggtaacgcctcgaagtgttgg

SEQ ID NO: 316842 - DNA, 60 bp, Artificial
  Synthetic oligonucleotide
actctcctggatctaggatgtctgtccccagcctgcttatgtgtctatacggatgaagct

SEQ ID NO: 316843 - DNA, 54 bp, Artificial
  Synthetic oligonucleotide
actctccttactcaggaaaaatatagtaactgtgaccactgataagggggagtt

SEQ ID NO: 316844 - DNA, 51 bp, Artificial
  Synthetic oligonucleotide
actctcgaaactcaaagtgagcttgacgaaaggcttaacactttaagtcga

SEQ ID NO: 316845 - DNA, 58 bp, Artificial
  Synthetic oligonucleotide
actctcgaatagtgatggacaccttggtgagtgagctccaaagactcggatacactag

SEQ ID NO: 316846 - DNA, 60 bp, Artificial
  Synthetic oligonucleotide
actctcgacgcaggactcggcttgctgaagtgcactcggcaagaggcgagagcggcgact

SEQ ID NO: 316847 - DNA, 59 bp, Artificial
  Synthetic oligonucleotide
actctcgaggggtcccatgtccttctgctgcttgtagagccgtaagggtctatcgacca

SEQ ID NO: 316848 - DNA, 60 bp, Artificial
  Synthetic oligonucleotide
actctcgatcgtgtcttctgataaagtcaccatgcatgagtgttcagggtagatcacctc

SEQ ID NO: 316849 - DNA, 60 bp, Artificial
  Synthetic oligonucleotide
actctcgatggattagtcgtagctccaccacaagttttggctcagcccgctttgcaagca

SEQ ID NO: 316850 - DNA, 59 bp, Artificial
  Synthetic oligonucleotide
actctcgcaaccagtgcaacatccctctgagttgattaaacccgccatggtaagcgggc

SEQ ID NO: 316851 - DNA, 60 bp, Artificial
  Synthetic oligonucleotide
actctcgcattcaattggagactggagtacaatatatactagaaccctcaatctcgtgaa

SEQ ID NO: 316852 - DNA, 60 bp, Artificial
  Synthetic oligonucleotide
actctcgcccaaggtcatacataagaggactcttggacactcggcaatgtcaacgaccga

SEQ ID NO: 316853 - DNA, 60 bp, Artificial
  Synthetic oligonucleotide
actctcgcggaattccacgcatgagatgtactgggtgtcaaatgcctccgggaacattgt

SEQ ID NO: 316854 - DNA, 54 bp, Artificial
  Synthetic oligonucleotide
actctcgcggggaacgcggcgttcccatttctgggggggaagagctcgcgcgaa

SEQ ID NO: 316855 - DNA, 59 bp, Artificial
  Synthetic oligonucleotide
actctcggcctcgtttggtgctttgtcgttcgcacctcaatcagccgcatgatgcttgg

SEQ ID NO: 316856 - DNA, 57 bp, Artificial
  Synthetic oligonucleotide
actctcgtatggagacgttactaggtttttatcaaacaatgctatggtattatacac

SEQ ID NO: 316857 - DNA, 51 bp, Artificial
  Synthetic oligonucleotide
actctcgtgtcaacaacttaaaccctttaaacgtgagtgatgttctgtccg

SEQ ID NO: 316858 - DNA, 59 bp, Artificial
  Synthetic oligonucleotide
actctctacgaagagaaccagactacgttctacgagcgtgctaccgagaccagtcgctg

SEQ ID NO: 316859 - DNA, 54 bp, Artificial
  Synthetic oligonucleotide
actctctacgctaagacttgcatgtctatgcctagctaactcttggagacacgc

SEQ ID NO: 316860 - DNA, 55 bp, Artificial
  Synthetic oligonucleotide
actctctcaatcactgtatgtatgttgggtgtgctatccttcaagctctcgaagc

SEQ ID NO: 316861 - DNA, 52 bp, Artificial
  Synthetic oligonucleotide
actctctcggcgactctctttggtccgccctccccctgtccgccgtcccctt

SEQ ID NO: 316862 - DNA, 57 bp, Artificial
  Synthetic oligonucleotide
actctctcgtgggacctaatgattctggtgggggtcttattgagactagacgtggga

SEQ ID NO: 316863 - DNA, 55 bp, Artificial
  Synthetic oligonucleotide
actctctctcttgcctcctgaccccgcgctccaagggcgtctggcttgcacccgc

SEQ ID NO: 316864 - DNA, 54 bp, Artificial
  Synthetic oligonucleotide
actctctgtgtcaatacaggcagccccaactcatacacatgcgtacgacttatc

SEQ ID NO: 316865 - DNA, 56 bp, Artificial
  Synthetic oligonucleotide
actctcttcagaaggggttttttacctcagtataggaatggcaagatgtttactca

SEQ ID NO: 316866 - DNA, 60 bp, Artificial
  Synthetic oligonucleotide
actctcttcgcattgcaatcacagaatcgatcatgagtgaataatacagtccgtcattaa

SEQ ID NO: 316867 - DNA, 55 bp, Artificial
  Synthetic oligonucleotide
actctgaaagtgggattttcaatatcagttcacctacatgccttgtcaacaaagt

SEQ ID NO: 316868 - DNA, 53 bp, Artificial
  Synthetic oligonucleotide
actctgaacctcaacccgcgtggggtaaatcccaccaacggtgttgccgcgct

SEQ ID NO: 316869 - DNA, 60 bp, Artificial
  Synthetic oligonucleotide
actctgaagttggcaacagggatgcggaatataccagaaagacaaactagaggcatattc

SEQ ID NO: 316870 - DNA, 59 bp, Artificial
  Synthetic oligonucleotide
actctgaatacattgaaaattggaatttacagcatcggagacaaagaactggattcgta

SEQ ID NO: 316871 - DNA, 57 bp, Artificial
  Synthetic oligonucleotide
actctgaattacgtcctttctaacaacccgtgtagtaatatgaatctcgcgatagga

SEQ ID NO: 316872 - DNA, 60 bp, Artificial
  Synthetic oligonucleotide
actctgacaaatgagacatatatacatattcgtactattcctaataatttctatgagcgt

SEQ ID NO: 316873 - DNA, 53 bp, Artificial
  Synthetic oligonucleotide
actctgacgtacaagattgccatcgactaccacttcgttgctgacgcggcagc

SEQ ID NO: 316874 - DNA, 55 bp, Artificial
  Synthetic oligonucleotide
actctgagccgaccccggggatcccaccagccctgttacaacgggccgccactca

SEQ ID NO: 316875 - DNA, 60 bp, Artificial
  Synthetic oligonucleotide
actctgatgagcagccccgtcaaatcctgctgcctgttggcactgtctgcaccagggttg

SEQ ID NO: 316876 - DNA, 59 bp, Artificial
  Synthetic oligonucleotide
actctgcagatagaagctcaagttagcggatcgtattccaggaatataacggtcgggaa

SEQ ID NO: 316877 - DNA, 60 bp, Artificial
  Synthetic oligonucleotide
actctgcagcctgaatggaatatcccccttacaattggggaattgcaacgtagcaggatg

SEQ ID NO: 316878 - DNA, 60 bp, Artificial
  Synthetic oligonucleotide
actctgcaggacactgcatcacgtcatgtaggcaactcaaaatctcagatcgcaaccagc

SEQ ID NO: 316879 - DNA, 56 bp, Artificial
  Synthetic oligonucleotide
actctgcatcctacgcactcatacgccactatatcttacgactacgttctgcctaa

SEQ ID NO: 316880 - DNA, 53 bp, Artificial
  Synthetic oligonucleotide
actctgccataagaaatgccctattgggacgcatagttagtcctagttgtaat

SEQ ID NO: 316881 - DNA, 59 bp, Artificial
  Synthetic oligonucleotide
actctgccataaggaaagccatattaggacatatagttagccctaggtgtgaataccaa

SEQ ID NO: 316882 - DNA, 60 bp, Artificial
  Synthetic oligonucleotide
actctgccctcagagtaggtacagtggtgacggcttatgaagactgctcaggattggtat

SEQ ID NO: 316883 - DNA, 57 bp, Artificial
  Synthetic oligonucleotide
actctgcgcaaccacattaatgcccgatggtccctcgccacccaaggggtacccata

SEQ ID NO: 316884 - DNA, 50 bp, Artificial
  Synthetic oligonucleotide
actctgcggcagcgctaacgagacagaaaaggctctcttcgagctgtttt

SEQ ID NO: 316885 - DNA, 55 bp, Artificial
  Synthetic oligonucleotide
actctgcgtcacgtgtatcgatggagcctgcgacctgaatacggtcagcgggaac

SEQ ID NO: 316886 - DNA, 56 bp, Artificial
  Synthetic oligonucleotide
actctgctataagaaaggccctattaggacatatagttagacctaggtgtgagtat

SEQ ID NO: 316887 - DNA, 53 bp, Artificial
  Synthetic oligonucleotide
actctgctataagaaataccctattaggacgagtagttagacctaggtgtgat

SEQ ID NO: 316888 - DNA, 60 bp, Artificial
  Synthetic oligonucleotide
actctgctcctgctgtacagtggttcctctactctgtatatcttgaaatagaggggattt

SEQ ID NO: 316889 - DNA, 55 bp, Artificial
  Synthetic oligonucleotide
actctgctctcagagagaacggacctcaggtcggagagatggcactttctaggcc

SEQ ID NO: 316890 - DNA, 53 bp, Artificial
  Synthetic oligonucleotide
actctgcttggtcagagtgctgggacggagcggccaaaaaggacgacatggca

SEQ ID NO: 316891 - DNA, 53 bp, Artificial
  Synthetic oligonucleotide
actctggaactaaacatggagacactcaatatgaccatgcctctctcttgcac

SEQ ID NO: 316892 - DNA, 57 bp, Artificial
  Synthetic oligonucleotide
actctggacggaagatggagtgccctgacccccggacctccaatggccacggctgga

SEQ ID NO: 316893 - DNA, 52 bp, Artificial
  Synthetic oligonucleotide
actctggacgggccggtcaattcgttggccggttccgtcttcataccccgac

SEQ ID NO: 316894 - DNA, 57 bp, Artificial
  Synthetic oligonucleotide
actctggatttcaccaatgagctgactaattggcgtgctcgtgtctgcgagctcatg

SEQ ID NO: 316895 - DNA, 55 bp, Artificial
  Synthetic oligonucleotide
actctggcatcctgggtgggcagtaatttggaagatccagcatccagggaacaag

SEQ ID NO: 316896 - DNA, 57 bp, Artificial
  Synthetic oligonucleotide
actctgggaaagtctatctaagtcagatgaatttgggtacttcgcggtgtaaatcag

SEQ ID NO: 316897 - DNA, 60 bp, Artificial
  Synthetic oligonucleotide
actctgggcgccatctgcaccctcctatttgctggcttacttgcttgctgtgccaaatgc

SEQ ID NO: 316898 - DNA, 56 bp, Artificial
  Synthetic oligonucleotide
actctggggagagaagggtggatcggatgggaagagtatatcctatgggaatcccc

SEQ ID NO: 316899 - DNA, 55 bp, Artificial
  Synthetic oligonucleotide
actctggttccgctgttgagattgggagtctacacgatatcgatacaactcaagg

SEQ ID NO: 316900 - DNA, 59 bp, Artificial
  Synthetic oligonucleotide
actctgtaaggttcagacatgttgtagtttgctttagtgttatctacacaactgtgcga

SEQ ID NO: 316901 - DNA, 56 bp, Artificial
  Synthetic oligonucleotide
actctgtccctatggaaattgctggtttcccctgacgtccagtccatccccgtgtc

SEQ ID NO: 316902 - DNA, 60 bp, Artificial
  Synthetic oligonucleotide
actctgtgaagatctatggagtaggggctacgaatccagaagttattgcggccatccacc

SEQ ID NO: 316903 - DNA, 60 bp, Artificial
  Synthetic oligonucleotide
actctgtgattatcgctgattcccgcgaccaggactgcgccgtagtcgcccttgccaccg

SEQ ID NO: 316904 - DNA, 60 bp, Artificial
  Synthetic oligonucleotide
actctgtgccgtgatggcgaagctgaatgctgctagagctatttgttttggtgattccga

SEQ ID NO: 316905 - DNA, 55 bp, Artificial
  Synthetic oligonucleotide
actctgtggacaatgtaaatgactggtgtttaatagaggcggaatgtgtgaacag

SEQ ID NO: 316906 - DNA, 60 bp, Artificial
  Synthetic oligonucleotide
actctgttctgtttgtggattaatcgcatatcaatgtcctcattacgatatcaatagtct

SEQ ID NO: 316907 - DNA, 55 bp, Artificial
  Synthetic oligonucleotide
actctgttgttctgtcgcggaaatatacgtcctttccatggctgctcggttgtgc

SEQ ID NO: 316908 - DNA, 59 bp, Artificial
  Synthetic oligonucleotide
actctgtttctaattcctatggcagcgtccgcttttaatattcacaagctagtcgcctc

SEQ ID NO: 316909 - DNA, 54 bp, Artificial
  Synthetic oligonucleotide
actcttaaaagcaacacccgctgtgttggcggaccaaggacacccagagtatca

SEQ ID NO: 316910 - DNA, 60 bp, Artificial
  Synthetic oligonucleotide
actcttaaagatgccagagacaaaatcgtcgaaggcactctctactctaatgttagtgac

SEQ ID NO: 316911 - DNA, 58 bp, Artificial
  Synthetic oligonucleotide
actcttaatataggacccgtgcgaggactagtactgcgacaactgatgaaccaagaaa

SEQ ID NO: 316912 - DNA, 60 bp, Artificial
  Synthetic oligonucleotide
actcttagagtataagcaagtactcagcatgtatagagtacttgatgacgtcatcagtga

SEQ ID NO: 316913 - DNA, 57 bp, Artificial
  Synthetic oligonucleotide
actcttatcatacaccccacctgaaagacttaaccactcttatcacgaaaacaatca

SEQ ID NO: 316914 - DNA, 60 bp, Artificial
  Synthetic oligonucleotide
actcttcacttacgtgaaatctgtcaagaatccaactgagagagacatttatgctaagat

SEQ ID NO: 316915 - DNA, 51 bp, Artificial
  Synthetic oligonucleotide
actcttccactcaaaagatttactaattaaatcagtgcttatagctattgg

SEQ ID NO: 316916 - DNA, 55 bp, Artificial
  Synthetic oligonucleotide
actcttcgcagacgctggctcgactctttttagagtaaccctacctcacccgaat

SEQ ID NO: 316917 - DNA, 56 bp, Artificial
  Synthetic oligonucleotide
actcttcggagacctcaaccctcacttggagaaacagcgagctcgtaagaccgacg

SEQ ID NO: 316918 - DNA, 59 bp, Artificial
  Synthetic oligonucleotide
actcttcggtgcaggtctgaccatcatttttgcaggagtagcattggggttaacaatta

SEQ ID NO: 316919 - DNA, 52 bp, Artificial
  Synthetic oligonucleotide
actcttgaaccctcacacgttttggagtaaccagtacacccttttaggtgga

SEQ ID NO: 316920 - DNA, 56 bp, Artificial
  Synthetic oligonucleotide
actcttgaattgagaagtaaatactgggcaataaagacccgaagcggaggaaatgc

SEQ ID NO: 316921 - DNA, 55 bp, Artificial
  Synthetic oligonucleotide
actcttgaggagtattttggatcagcttacaccaagaagggtaaaggcaaaggta

SEQ ID NO: 316922 - DNA, 58 bp, Artificial
  Synthetic oligonucleotide
actcttgagttgaggagcaggtattgggccataaggaccagaagtggaggaaacacca

SEQ ID NO: 316923 - DNA, 60 bp, Artificial
  Synthetic oligonucleotide
actcttgcaccagatataccaacttccttctggacactaagggcagactctatcgttggc

SEQ ID NO: 316924 - DNA, 59 bp, Artificial
  Synthetic oligonucleotide
actcttgctattgtaaaaggtgttgctttcattgtcaagtgtgcttcataacaaaggcc

SEQ ID NO: 316925 - DNA, 51 bp, Artificial
  Synthetic oligonucleotide
actcttgctgcaatcccgccaaactgcagtatcaaaagtctgcaaagatat

SEQ ID NO: 316926 - DNA, 58 bp, Artificial
  Synthetic oligonucleotide
actcttggactaagcttatttgctacctccaaacttgatgctgaacaaatagaacgtg

SEQ ID NO: 316927 - DNA, 55 bp, Artificial
  Synthetic oligonucleotide
actcttggctcactcgcccgcccctctcacggccaagacgatcccctctggcacc

SEQ ID NO: 316928 - DNA, 60 bp, Artificial
  Synthetic oligonucleotide
actctttaaagaaggagatctccgatctaaggtctgaagttgagagattgactgctgaga

SEQ ID NO: 316929 - DNA, 54 bp, Artificial
  Synthetic oligonucleotide
actctttacatcgataacgcttggggtcgtcctcacattgcattacagagtggt

SEQ ID NO: 316930 - DNA, 55 bp, Artificial
  Synthetic oligonucleotide
actctttccagacagaacttggaatgtgacttacactgggacaagcaaagcatgc

SEQ ID NO: 316931 - DNA, 60 bp, Artificial
  Synthetic oligonucleotide
actctttccagacgaccaatagaaagtatattggtcaatgggcaaccagtgtcagcactg

SEQ ID NO: 316932 - DNA, 60 bp, Artificial
  Synthetic oligonucleotide
actctttccagcaaaacaggatctatatgcaccctgctgtgttgacagccggtagaatca

SEQ ID NO: 316933 - DNA, 55 bp, Artificial
  Synthetic oligonucleotide
actctttctcaggttaagtcgttgttcggtgacctgaatccgcatctggagaaac

SEQ ID NO: 316934 - DNA, 55 bp, Artificial
  Synthetic oligonucleotide
actctttgtgggaaggtgattgtgaaatctacagaaataacgtgactaaacaccc

SEQ ID NO: 316935 - DNA, 55 bp, Artificial
  Synthetic oligonucleotide
actcttttaccagatgcagaaagattcagttttccaagagtgatcaattcagccg

SEQ ID NO: 316936 - DNA, 55 bp, Artificial
  Synthetic oligonucleotide
actcttttgcttacatgaggaacggctgggacgtggaggtgtctgccgttggcaa

SEQ ID NO: 316937 - DNA, 54 bp, Artificial
  Synthetic oligonucleotide
actcttttgttcttaggtccactagaacaagggggaatcattcttaagcaatgg

SEQ ID NO: 316938 - DNA, 55 bp, Artificial
  Synthetic oligonucleotide
actgaaaaagtagagtttctctctcctaaaactcctccgacctccgattgaggca

SEQ ID NO: 316939 - DNA, 55 bp, Artificial
  Synthetic oligonucleotide
actgaaaaatctgaaccaatagcaactaaacgaccctcaaagtctaatggcggta

SEQ ID NO: 316940 - DNA, 56 bp, Artificial
  Synthetic oligonucleotide
actgaaaacccagcacccgatactaaatgggttgccggagtgagaggtagacctgc

SEQ ID NO: 316941 - DNA, 59 bp, Artificial
  Synthetic oligonucleotide
actgaaaagatatagaacacaagtagaccctggtctggcagaccaactaattcatatgc

SEQ ID NO: 316942 - DNA, 60 bp, Artificial
  Synthetic oligonucleotide
actgaaaatgttcaccccaactagactggagagcgtagtcatacttagcaccacaatata

SEQ ID NO: 316943 - DNA, 55 bp, Artificial
  Synthetic oligonucleotide
actgaaaattccaacacatatagggcccaggcaaattccactgatgacagacaaa

SEQ ID NO: 316944 - DNA, 56 bp, Artificial
  Synthetic oligonucleotide
actgaaacagtaaacacactaattgaacaaaacgttccagtgacacaagtggaaga

SEQ ID NO: 316945 - DNA, 60 bp, Artificial
  Synthetic oligonucleotide
actgaaacctctcattctatggagactgaaaccaactccattgacattatgggtttgcag

SEQ ID NO: 316946 - DNA, 59 bp, Artificial
  Synthetic oligonucleotide
actgaaatgccgtgggtgagttacagtaagttggctggcaggcttgcaaataggaaagc

SEQ ID NO: 316947 - DNA, 60 bp, Artificial
  Synthetic oligonucleotide
actgaacaagtatttggagctggagtgaacgtcgattacattgccagaccaactgaagga

SEQ ID NO: 316948 - DNA, 60 bp, Artificial
  Synthetic oligonucleotide
actgaacagggatatctaaatctcggtgggcgccaaactgctcgtactctaatgtacagc

SEQ ID NO: 316949 - DNA, 56 bp, Artificial
  Synthetic oligonucleotide
actgaaccaaacacttaatgataatattaggaatggacaagttattaatcaactaa

SEQ ID NO: 316950 - DNA, 55 bp, Artificial
  Synthetic oligonucleotide
actgaaccagttggatgccgcttttggtgtggagtccagatctgatcaacgcatg

SEQ ID NO: 316951 - DNA, 57 bp, Artificial
  Synthetic oligonucleotide
actgaacgacattgaaaccgaaagacagttcaactgaaagacagtttgaccttatga

SEQ ID NO: 316952 - DNA, 59 bp, Artificial
  Synthetic oligonucleotide
actgaacttcgggagtccctcccgtctcattgccagtgccgtcactgccccagacatgg

SEQ ID NO: 316953 - DNA, 60 bp, Artificial
  Synthetic oligonucleotide
actgaacttttcattcttactggagactcgcggcaaagtgtatatcatgagtccaacaat

SEQ ID NO: 316954 - DNA, 55 bp, Artificial
  Synthetic oligonucleotide
actgaagacccagacgagggaacagctggggtagaatctgcagtattgaggggat

SEQ ID NO: 316955 - DNA, 55 bp, Artificial
  Synthetic oligonucleotide
actgaagaggtgattaaatactgtaaggcgcagggttggttgattccggctggag

SEQ ID NO: 316956 - DNA, 58 bp, Artificial
  Synthetic oligonucleotide
actgaagagtagcggcggtacaaactacgtaccagtcacgatcaccgtcgcacctatg

SEQ ID NO: 316957 - DNA, 51 bp, Artificial
  Synthetic oligonucleotide
actgaagatgtagatagtgagatgtacaatgagtatacgatgttaattaga

SEQ ID NO: 316958 - DNA, 53 bp, Artificial
  Synthetic oligonucleotide
actgaagccaaatgtaccgttccgcttgctccagaacccgtcgttaagtacgg

SEQ ID NO: 316959 - DNA, 60 bp, Artificial
  Synthetic oligonucleotide
actgaagcgaatcgactagcggtctcaaaatggcttgtccaatactgcaaagagagacat

SEQ ID NO: 316960 - DNA, 55 bp, Artificial
  Synthetic oligonucleotide
actgaagcggattaaataccaggatgaaactaaacctggttggaacagattggag

SEQ ID NO: 316961 - DNA, 60 bp, Artificial
  Synthetic oligonucleotide
actgaaggaagagtgtcagttttcgggcattcttatcagcgtggtgtgcttatcatcgcg

SEQ ID NO: 316962 - DNA, 60 bp, Artificial
  Synthetic oligonucleotide
actgaaggacctaaacttcggtgcgcatgtggaaaagatgctgagatagctgtctcccac

SEQ ID NO: 316963 - DNA, 60 bp, Artificial
  Synthetic oligonucleotide
actgaaggcccgtcaattgagcttgcagaggcccatgtttctcctgggccgatagtgggc

SEQ ID NO: 316964 - DNA, 57 bp, Artificial
  Synthetic oligonucleotide
actgaaggtcaacattatcttggtgcctcttaaggacatgtctaaacctaaacctga

SEQ ID NO: 316965 - DNA, 55 bp, Artificial
  Synthetic oligonucleotide
actgaagtaatgacgactgtaacatcagcccaggcgaataagctgtatcaggtgg

SEQ ID NO: 316966 - DNA, 57 bp, Artificial
  Synthetic oligonucleotide
actgaagtaggcaactttcgtgtagttgattggacggtgtctggaatgtctaggtac

SEQ ID NO: 316967 - DNA, 54 bp, Artificial
  Synthetic oligonucleotide
actgaagtatgggattaaaatacttacccaaccggatgacgtttccgtcatgct

SEQ ID NO: 316968 - DNA, 53 bp, Artificial
  Synthetic oligonucleotide
actgaagtgactaatgctactgagctagttcagagctcctcaacggggaaaat

SEQ ID NO: 316969 - DNA, 59 bp, Artificial
  Synthetic oligonucleotide
actgaagtgattccagtggatggccttggtggtcgtagagtcggtgtggtcccagcacc

SEQ ID NO: 316970 - DNA, 56 bp, Artificial
  Synthetic oligonucleotide
actgaataaattagtgagaatgtacagtcctgttagtattttggacataaaacaag

SEQ ID NO: 316971 - DNA, 59 bp, Artificial
  Synthetic oligonucleotide
actgaatcccaatgacacagtcacgggcagcttcaacggggcttttatagctccagatc

SEQ ID NO: 316972 - DNA, 56 bp, Artificial
  Synthetic oligonucleotide
actgaatcggatgagcagttgcaacagctaaaacgaaagtatttagctagcccaga

SEQ ID NO: 316973 - DNA, 60 bp, Artificial
  Synthetic oligonucleotide
actgaatgacaatattcggaatggacatgtcattaaccaattaatggaggctctaatgca

SEQ ID NO: 316974 - DNA, 60 bp, Artificial
  Synthetic oligonucleotide
actgaatgagtggttatgtaatccaatggatataacgttatattattatcagcaaactgg

SEQ ID NO: 316975 - DNA, 60 bp, Artificial
  Synthetic oligonucleotide
actgaatgcaccgccagacgatgagatgaggtacatagatgtgaagatgcacgccgggtt

SEQ ID NO: 316976 - DNA, 51 bp, Artificial
  Synthetic oligonucleotide
actgaatgcgccgcgcctgtttatccgtttataacgtggcgggatttggtg

SEQ ID NO: 316977 - DNA, 60 bp, Artificial
  Synthetic oligonucleotide
actgaatgctctattgcctacaacgccaccagataccatattaatgaagacgtcacccaa

SEQ ID NO: 316978 - DNA, 60 bp, Artificial
  Synthetic oligonucleotide
actgaatggaagaacactctgtctcaattattcctgactaaagggtggccaactggatca

SEQ ID NO: 316979 - DNA, 60 bp, Artificial
  Synthetic oligonucleotide
actgaatgtgacaatgcctaataatgacaatttcgataaactatacgtctgggggatcca

SEQ ID NO: 316980 - DNA, 55 bp, Artificial
  Synthetic oligonucleotide
actgaattcatccccaccagtctagcggcatggaatatgccgcgtcatcgcgaat

SEQ ID NO: 316981 - DNA, 57 bp, Artificial
  Synthetic oligonucleotide
actgaattcttgcgagtcgcctcagagagtaggtactcttacggctacctggctcgc

SEQ ID NO: 316982 - DNA, 54 bp, Artificial
  Synthetic oligonucleotide
actgaattgcgtgcgaaggtactaagtaggtctctatttgagggtacaaccggg

SEQ ID NO: 316983 - DNA, 57 bp, Artificial
  Synthetic oligonucleotide
actgaattgctttaccgcatgaagagggctgaaacatactgcccccggcctcttttg

SEQ ID NO: 316984 - DNA, 53 bp, Artificial
  Synthetic oligonucleotide
actgacaacccctgggtggtagcgggttttgtagcgctaggagtagttgcggg

SEQ ID NO: 316985 - DNA, 50 bp, Artificial
  Synthetic oligonucleotide
actgacaaggttcaatatgttaatctagcggttgagattgtagctcaaag

SEQ ID NO: 316986 - DNA, 60 bp, Artificial
  Synthetic oligonucleotide
actgacaataacttactcgtcatcaatgatgtgggagattaatggtcctgagtcagtgtt

SEQ ID NO: 316987 - DNA, 55 bp, Artificial
  Synthetic oligonucleotide
actgacaatgagcggtctatctcgcaactgtcaggagacgtgggcgcaatcaatg

SEQ ID NO: 316988 - DNA, 60 bp, Artificial
  Synthetic oligonucleotide
actgacaattctgtcgtgctctcccgcaagtatacatcatttccatggttggtaggctgt

SEQ ID NO: 316989 - DNA, 60 bp, Artificial
  Synthetic oligonucleotide
actgacactctggaaagaatcctatctatccaagttcagatatgggtcacagtagcaaag

SEQ ID NO: 316990 - DNA, 60 bp, Artificial
  Synthetic oligonucleotide
actgacagctgtcgctccttcaatgacaatgcgctgtataggaatatcaaatagagactt

SEQ ID NO: 316991 - DNA, 57 bp, Artificial
  Synthetic oligonucleotide
actgacagttgatgccataaaagaaacagaaggaccatttaaagggacaacaatgct

SEQ ID NO: 316992 - DNA, 58 bp, Artificial
  Synthetic oligonucleotide
actgacatcatcgatgacgttgtactccgctttattcgagtaaaccctagaattgaag

SEQ ID NO: 316993 - DNA, 50 bp, Artificial
  Synthetic oligonucleotide
actgacatggttgggattaaattcaaggagcacgtcactttcgatgacgt

SEQ ID NO: 316994 - DNA, 59 bp, Artificial
  Synthetic oligonucleotide
actgacattgctgtgaacagcaagggccgcgtacttgttgctgtttccgccgggcctga

SEQ ID NO: 316995 - DNA, 59 bp, Artificial
  Synthetic oligonucleotide
actgaccaatcgcgttgcgtctgaaaagcttagttagtgcgtcccgcactataaagata

SEQ ID NO: 316996 - DNA, 58 bp, Artificial
  Synthetic oligonucleotide
actgaccaatgatattgcgtttgacgagcctagatattcgtaaaacttggcgactaag

SEQ ID NO: 316997 - DNA, 59 bp, Artificial
  Synthetic oligonucleotide
actgaccacaaaggtgtctacggcagcctgaccgactcatacgcctacatgagaaacgg

SEQ ID NO: 316998 - DNA, 57 bp, Artificial
  Synthetic oligonucleotide
actgaccacccagaaccaattcaactcgcgtataacagttacgagacacaggtgccg

SEQ ID NO: 316999 - DNA, 60 bp, Artificial
  Synthetic oligonucleotide
actgaccactacgctgaccatgtcaaagatcgaatttgacgggaccagccgggctagctc

SEQ ID NO: 317000 - DNA, 53 bp, Artificial
  Synthetic oligonucleotide
actgaccaggtgactgagccgctacccgtgtgggctcgctacctggaccacct

SEQ ID NO: 317001 - DNA, 60 bp, Artificial
  Synthetic oligonucleotide
actgacccccgcatccttgcaatgaattgtgtcactgccctcaaaccaacagtcctcacc

SEQ ID NO: 317002 - DNA, 56 bp, Artificial
  Synthetic oligonucleotide
actgaccggcacggagaaaaactataatgccatgtcgtataacggctaggcacccc

SEQ ID NO: 317003 - DNA, 55 bp, Artificial
  Synthetic oligonucleotide
actgaccggggcatatgcaggcggatccggagacagttcgcggggttatgacgca

SEQ ID NO: 317004 - DNA, 55 bp, Artificial
  Synthetic oligonucleotide
actgaccggtctcggtgtgaatccacccacggtcgggtccgttggtcgtatgcac

SEQ ID NO: 317005 - DNA, 58 bp, Artificial
  Synthetic oligonucleotide
actgacctacaactcatgagggagggtgtgtatagagaattaggcctggatatcagtc

SEQ ID NO: 317006 - DNA, 60 bp, Artificial
  Synthetic oligonucleotide
actgacctgatagacttctccgttccgactgatgaactgtaaatgacacgtgatgcagtg

SEQ ID NO: 317007 - DNA, 60 bp, Artificial
  Synthetic oligonucleotide
actgacgaagctcgtgattattgtatgaaagatgatactagggtttctggtccatttgaa

SEQ ID NO: 317008 - DNA, 56 bp, Artificial
  Synthetic oligonucleotide
actgacgaataccgtgttggaaacataattggtggaatctatcaaacgttatctgg

SEQ ID NO: 317009 - DNA, 60 bp, Artificial
  Synthetic oligonucleotide
actgacgatccagcctccttacgtctcatgacgacacgagatgtgccctcttctctgacc

SEQ ID NO: 317010 - DNA, 60 bp, Artificial
  Synthetic oligonucleotide
actgacgatcgacggtggcttactgctttatctcgattcagccataatttggatttggtg

SEQ ID NO: 317011 - DNA, 53 bp, Artificial
  Synthetic oligonucleotide
actgacgggccgtggggcggtgacacccagggagggtatgctggtaaccctgg

SEQ ID NO: 317012 - DNA, 55 bp, Artificial
  Synthetic oligonucleotide
actgacgggtattttacccaatctcgtacactggatgattttcagccacgtactc

SEQ ID NO: 317013 - DNA, 59 bp, Artificial
  Synthetic oligonucleotide
actgacggtttaccattgtaacatgctagaaaactatctttccctgtatcattgtcgca

SEQ ID NO: 317014 - DNA, 56 bp, Artificial
  Synthetic oligonucleotide
actgacgtggcccacgctaccataaataggtatgcgttaaagttctgcgaggaact

SEQ ID NO: 317015 - DNA, 60 bp, Artificial
  Synthetic oligonucleotide
actgactaaagtggataaggagctgtacataggcaatccagcaaaggcaacaccctgcat

SEQ ID NO: 317016 - DNA, 60 bp, Artificial
  Synthetic oligonucleotide
actgactaccgcgcaggaatgcattaggcagtgggtggtagctggtctggtgtcagcggc

SEQ ID NO: 317017 - DNA, 60 bp, Artificial
  Synthetic oligonucleotide
actgactagactcactgtcgctctcggtgctgctaaaggtgaaggggcgcagtccaggaa

SEQ ID NO: 317018 - DNA, 55 bp, Artificial
  Synthetic oligonucleotide
actgactatgtgtcgttgaactcactaaggttcagattcagatgtgcagtgagcg

SEQ ID NO: 317019 - DNA, 55 bp, Artificial
  Synthetic oligonucleotide
actgactattggcaggcgtcctggattcctgagtgggaatttattagtacacccc

SEQ ID NO: 317020 - DNA, 55 bp, Artificial
  Synthetic oligonucleotide
actgactcagatcacaatgaactactgatgccggagcttgaaagcgacagcaacc

SEQ ID NO: 317021 - DNA, 56 bp, Artificial
  Synthetic oligonucleotide
actgactcagccttgacgtactgtacctacgggaggtttcttgccaatcctaggtc

SEQ ID NO: 317022 - DNA, 60 bp, Artificial
  Synthetic oligonucleotide
actgactcgccatcttttctgggctgtaggataatgaatgggcgtcagctagtcccaaac

SEQ ID NO: 317023 - DNA, 60 bp, Artificial
  Synthetic oligonucleotide
actgactcgcctcttgatcgggctatacaacatctgcagagacttactatccaagaactc

SEQ ID NO: 317024 - DNA, 59 bp, Artificial
  Synthetic oligonucleotide
actgactcgtctgatctagggcaattgcgggtctatgtttggactcctctttcagtacc

SEQ ID NO: 317025 - DNA, 55 bp, Artificial
  Synthetic oligonucleotide
actgactgcaataaacccgttgtcagactatcgcatcgttcccgtctggtgtctg

SEQ ID NO: 317026 - DNA, 60 bp, Artificial
  Synthetic oligonucleotide
actgactgtgtgtgggaatttacttctaggaaatcacaatatataggcaagatctccatg

SEQ ID NO: 317027 - DNA, 52 bp, Artificial
  Synthetic oligonucleotide
actgacttggcatatgcacaaacttgttgaagttcctttccctgttgtgaac

SEQ ID NO: 317028 - DNA, 55 bp, Artificial
  Synthetic oligonucleotide
actgagaacaatttagcggacaaaacactgcaggtggtgagtcatttattgagca

SEQ ID NO: 317029 - DNA, 60 bp, Artificial
  Synthetic oligonucleotide
actgagaacgaaagacatacacaatagcatacatgttcacgatatatgacataatgtaac

SEQ ID NO: 317030 - DNA, 60 bp, Artificial
  Synthetic oligonucleotide
actgagaatgcgttgttattgtatatggcatgtactcatgcttcaaaccctgtgtatgcg

SEQ ID NO: 317031 - DNA, 58 bp, Artificial
  Synthetic oligonucleotide
actgagagacctaatgtcacagtcccgcacccgcgagatactaacaaaaactactgtg

SEQ ID NO: 317032 - DNA, 50 bp, Artificial
  Synthetic oligonucleotide
actgagatagtaagtattggatctctaattagtgttcacttactagaagc

SEQ ID NO: 317033 - DNA, 60 bp, Artificial
  Synthetic oligonucleotide
actgagatgggcgattcaatcgcacggtttatcgaacatgaattgctgaagggtactccg

SEQ ID NO: 317034 - DNA, 59 bp, Artificial
  Synthetic oligonucleotide
actgagatgtcgctgaggggggtaagggtcagtaagatgggagtagatgaatactccag

SEQ ID NO: 317035 - DNA, 58 bp, Artificial
  Synthetic oligonucleotide
actgagcaaaacattctgtatggttctggtaatcgatacgttagaatgggaactgaaa

SEQ ID NO: 317036 - DNA, 52 bp, Artificial
  Synthetic oligonucleotide
actgagcagaatgttcctgatccccaagtcggtataacaaccatgagggacc

SEQ ID NO: 317037 - DNA, 60 bp, Artificial
  Synthetic oligonucleotide
actgagcagggctgtccacgcaattcactttatcaacacaggagtggacaacgatgcatt

SEQ ID NO: 317038 - DNA, 60 bp, Artificial
  Synthetic oligonucleotide
actgagccaggatttcacgttacatacgttacgaatgttaatgactctgaagctgataat

SEQ ID NO: 317039 - DNA, 60 bp, Artificial
  Synthetic oligonucleotide
actgagccatcaacccaggagtacacaacgactaagcacacttatgttgacacagtcctg

SEQ ID NO: 317040 - DNA, 57 bp, Artificial
  Synthetic oligonucleotide
actgagcctagtgtccctaatggtaacgataacagaaccttgtgcattaaagggcac

SEQ ID NO: 317041 - DNA, 54 bp, Artificial
  Synthetic oligonucleotide
actgagctaaaagttgacgtcccgaaaatagaacaacttgctaattaccaacag

SEQ ID NO: 317042 - DNA, 55 bp, Artificial
  Synthetic oligonucleotide
actgaggaacaccacatatgaacaatgcaagtgggctatggacatactgggagtg

SEQ ID NO: 317043 - DNA, 57 bp, Artificial
  Synthetic oligonucleotide
actgaggaagaaggtccagaggacagaagggggtggtcaaccaggtgtatatgcagg

SEQ ID NO: 317044 - DNA, 53 bp, Artificial
  Synthetic oligonucleotide
actgaggacgcatccgaaagtggctacgaccgaaatatgtacctgaatactct

SEQ ID NO: 317045 - DNA, 55 bp, Artificial
  Synthetic oligonucleotide
actgaggagtggacactgcaagatacaagtttggaaatgtggcgcacggagccac

SEQ ID NO: 317046 - DNA, 59 bp, Artificial
  Synthetic oligonucleotide
actgaggcgtaaggttaattttcataggaagtgtgctttgtatgaggagatatacaaga

SEQ ID NO: 317047 - DNA, 60 bp, Artificial
  Synthetic oligonucleotide
actgagggggctactcagtggatgaacaggctcatagcgttcgcctctagaggcaaccac

SEQ ID NO: 317048 - DNA, 60 bp, Artificial
  Synthetic oligonucleotide
actgaggtatggtcgtataatgctgagctgttggtggcaatggagaatcagcatacaata

SEQ ID NO: 317049 - DNA, 53 bp, Artificial
  Synthetic oligonucleotide
actgaggtgatcccttggtagtcttattttgtccggcgacgaggggtttggcc

SEQ ID NO: 317050 - DNA, 57 bp, Artificial
  Synthetic oligonucleotide
actgaggtgtaaggtcaactttcataggaagtgttcgttgtatgaggaaatatacaa

SEQ ID NO: 317051 - DNA, 55 bp, Artificial
  Synthetic oligonucleotide
actgaggttagtgaggataacgtgagcgtacgcggtcgggctaggaggggcactg

SEQ ID NO: 317052 - DNA, 60 bp, Artificial
  Synthetic oligonucleotide
actgaggtttggatatttgactgtataaagcaggccaaggtctgtgagtgcctgcacaac

SEQ ID NO: 317053 - DNA, 60 bp, Artificial
  Synthetic oligonucleotide
actgagtcccctgcttatatcgctcggacactcaacccaagtgaccctgcaacattcaat

SEQ ID NO: 317054 - DNA, 59 bp, Artificial
  Synthetic oligonucleotide
actgagtctggaagctaattgcgacactgtggaaggaaattgaaggattaactcagtta

SEQ ID NO: 317055 - DNA, 53 bp, Artificial
  Synthetic oligonucleotide
actgagtgcacgcagtaagaggcgaggcgactcctgaggtgagtatttatttt

SEQ ID NO: 317056 - DNA, 58 bp, Artificial
  Synthetic oligonucleotide
actgagtgcggaattaaaacatattcccttagggatgcaagttatggctgactttgta

SEQ ID NO: 317057 - DNA, 60 bp, Artificial
  Synthetic oligonucleotide
actgagtgtgacctaggccggcatcattggatgcgcgctgataacgctatttcagtccgg

SEQ ID NO: 317058 - DNA, 53 bp, Artificial
  Synthetic oligonucleotide
actgagttataaggcaacccgatgtctaaaactggtctttccgaggaattacg

SEQ ID NO: 317059 - DNA, 60 bp, Artificial
  Synthetic oligonucleotide
actgataacgtattcatacaatcaccatttaagattagaacatctgtgagtgattatata

SEQ ID NO: 317060 - DNA, 60 bp, Artificial
  Synthetic oligonucleotide
actgatactcaacttaatttcttacctggtgcatatgcacaaatatcgaatgcggctcgg

SEQ ID NO: 317061 - DNA, 57 bp, Artificial
  Synthetic oligonucleotide
actgatatcctttgttgttgcatgagcctgacttctactttgaacaatatgccctcc

SEQ ID NO: 317062 - DNA, 60 bp, Artificial
  Synthetic oligonucleotide
actgatcaacaatggggatgactgcgtgcttatttgcgaaagaacagacatcgactacgt

SEQ ID NO: 317063 - DNA, 60 bp, Artificial
  Synthetic oligonucleotide
actgatcaagtatatatgcacagagatatgctcccagaacctcggcttgatgacatcgaa

SEQ ID NO: 317064 - DNA, 60 bp, Artificial
  Synthetic oligonucleotide
actgatcaggggaaagatgaccctgacagaagaggtacagtggacagaactagcagaggc

SEQ ID NO: 317065 - DNA, 54 bp, Artificial
  Synthetic oligonucleotide
actgatcatccggggtggtccgaagacgttaaactacttcagaacgtttctgat

SEQ ID NO: 317066 - DNA, 56 bp, Artificial
  Synthetic oligonucleotide
actgatccaaaaacgcggctcgtgtggatttaccccgcagaaatgttggtagtcga

SEQ ID NO: 317067 - DNA, 55 bp, Artificial
  Synthetic oligonucleotide
actgatccgcattgccgttcaaagtggtcttatttgaaaaacacttgggcgttgg

SEQ ID NO: 317068 - DNA, 55 bp, Artificial
  Synthetic oligonucleotide
actgatcctgatgagatatacgactccctgaatatgaaagctgcagttggtgcac

SEQ ID NO: 317069 - DNA, 51 bp, Artificial
  Synthetic oligonucleotide
actgatctcagaccataccgaaaattagcagtccaccaaggtcccataaca

SEQ ID NO: 317070 - DNA, 60 bp, Artificial
  Synthetic oligonucleotide
actgatctgcatacggaccgatatcctttgatgctgcatgggccttacatctgctttgaa

SEQ ID NO: 317071 - DNA, 60 bp, Artificial
  Synthetic oligonucleotide
actgatctggcttccttgaatacgcgggtcacgacggagctcgatgatatacgtgcgaac

SEQ ID NO: 317072 - DNA, 59 bp, Artificial
  Synthetic oligonucleotide
actgatcttatcgtaacagccaacaagaagtcagcacaggacgttcgaatggctctttt

SEQ ID NO: 317073 - DNA, 56 bp, Artificial
  Synthetic oligonucleotide
actgatgaatcaaacgacccggggaattgtattacagaatatttatataagactgg

SEQ ID NO: 317074 - DNA, 53 bp, Artificial
  Synthetic oligonucleotide
actgatgacatcagaagccaccaagatatctaaagttagagcaaagtgctccc

SEQ ID NO: 317075 - DNA, 60 bp, Artificial
  Synthetic oligonucleotide
actgatgattctatcatagttagagatatcccagaccaacggtttagatacgttgagaac

SEQ ID NO: 317076 - DNA, 57 bp, Artificial
  Synthetic oligonucleotide
actgatgcaagatggatcgaagtcttcaacttgatggaatgatatttcagaaaggat

SEQ ID NO: 317077 - DNA, 60 bp, Artificial
  Synthetic oligonucleotide
actgatgcagctagttcaatttctagatcatcaacgctgcgatcggtcaacagcgcggct

SEQ ID NO: 317078 - DNA, 56 bp, Artificial
  Synthetic oligonucleotide
actgatggcatcgcaaggggccacaacgggccgtgttagcgccaaggaaccgaact

SEQ ID NO: 317079 - DNA, 58 bp, Artificial
  Synthetic oligonucleotide
actgatggccgcgcgaagtcccggtatgccttttcagccgttggatctggagccgtac

SEQ ID NO: 317080 - DNA, 56 bp, Artificial
  Synthetic oligonucleotide
actgatggtcctaaagaaggatgtagttcttggtgtttattagaagctgcttgctc

SEQ ID NO: 317081 - DNA, 52 bp, Artificial
  Synthetic oligonucleotide
actgatggtcttgaagctctggatcttagcactagtgctggatacccttatg

SEQ ID NO: 317082 - DNA, 60 bp, Artificial
  Synthetic oligonucleotide
actgatgtgggaggctgtaacagtacaaacagaggtcattggaataactagcatgcttaa

SEQ ID NO: 317083 - DNA, 58 bp, Artificial
  Synthetic oligonucleotide
actgatgttgatagcacagactatggcaagctcacattacgttttctcgggacattaa

SEQ ID NO: 317084 - DNA, 57 bp, Artificial
  Synthetic oligonucleotide
actgatgttgatggaatggcttggtttactcccgttgggttggcagtagacacccca

SEQ ID NO: 317085 - DNA, 58 bp, Artificial
  Synthetic oligonucleotide
actgatgttgtagacggagtcaatcacaaattaagtgtaacaacggatacttgtacga

SEQ ID NO: 317086 - DNA, 60 bp, Artificial
  Synthetic oligonucleotide
actgattacatgtgatcccaaccgtaaacgtgggtggcccgcaactgaagtgatgacagc

SEQ ID NO: 317087 - DNA, 53 bp, Artificial
  Synthetic oligonucleotide
actgattctgctcacgtaggtactaatagttgtcttggccttatcaagatcct

SEQ ID NO: 317088 - DNA, 58 bp, Artificial
  Synthetic oligonucleotide
actgattgacaaccgaatgcaacaagagcttaacctgaacgaacttgaacactttatc

SEQ ID NO: 317089 - DNA, 58 bp, Artificial
  Synthetic oligonucleotide
actgattgaggacaagtattcttttaaaattgtggggcctgagagattggacactcca

SEQ ID NO: 317090 - DNA, 57 bp, Artificial
  Synthetic oligonucleotide
actgattgcaagaagggtacggtgatttgggtctcgtagggatttccgcttggatca

SEQ ID NO: 317091 - DNA, 60 bp, Artificial
  Synthetic oligonucleotide
actgattgtatggcaagtggacagacagaaagtgaaagtatggaacagcttggtgaaata

SEQ ID NO: 317092 - DNA, 55 bp, Artificial
  Synthetic oligonucleotide
actgatttggagctagattttgcattggcatcatcctcctcatacagctatagaa

SEQ ID NO: 317093 - DNA, 50 bp, Artificial
  Synthetic oligonucleotide
actgcaaactggtgaaatatcatattcagaggtcatacaaggaataggct

SEQ ID NO: 317094 - DNA, 60 bp, Artificial
  Synthetic oligonucleotide
actgcaaagagaagaggcctggtactcagcttttcttagctcgcattctacattttgcgg

SEQ ID NO: 317095 - DNA, 60 bp, Artificial
  Synthetic oligonucleotide
actgcaaatagcttgtcagtgctcatataatcattgtgcaaatccactgacatatcaagc

SEQ ID NO: 317096 - DNA, 60 bp, Artificial
  Synthetic oligonucleotide
actgcaaatattcgacgtttcgagagttccagatgatcaaatgtatagactcagggacag

SEQ ID NO: 317097 - DNA, 54 bp, Artificial
  Synthetic oligonucleotide
actgcaacactccggtagaccgagagaccgaccaatccgttggggtccttgtgg

SEQ ID NO: 317098 - DNA, 58 bp, Artificial
  Synthetic oligonucleotide
actgcaagattgcccctttgatggtcgcatacatgttagaaagggagttggtccgtaa

SEQ ID NO: 317099 - DNA, 53 bp, Artificial
  Synthetic oligonucleotide
actgcaagcaatcgctgatacagcccctttaacactcaactgtgaccgaatag

SEQ ID NO: 317100 - DNA, 55 bp, Artificial
  Synthetic oligonucleotide
actgcaagcacaattaagatatggtccacggaacgatgtcagatttcccacagac

SEQ ID NO: 317101 - DNA, 60 bp, Artificial
  Synthetic oligonucleotide
actgcaagcgcgggcacgagctctctggaggcaaccttcagaaccactccggtacgagtc

SEQ ID NO: 317102 - DNA, 55 bp, Artificial
  Synthetic oligonucleotide
actgcaagctgttcgagctagaatgcatgggagcggagtgcgagaagagagtagt

SEQ ID NO: 317103 - DNA, 51 bp, Artificial
  Synthetic oligonucleotide
actgcaaggtcaaattacactggaggaaatgacaatatcacactcccatgc

SEQ ID NO: 317104 - DNA, 55 bp, Artificial
  Synthetic oligonucleotide
actgcaatacatgattgcgagtactctcctagatgttcgtatgaatggacaaggt

SEQ ID NO: 317105 - DNA, 60 bp, Artificial
  Synthetic oligonucleotide
actgcaatggaggatgcatggcattacaaaaagacacttgcgatgtgcaacagcgagaga

SEQ ID NO: 317106 - DNA, 58 bp, Artificial
  Synthetic oligonucleotide
actgcaatggcgaagagcggcaactactcgtacaagaggtgggtctttaccattaata

SEQ ID NO: 317107 - DNA, 60 bp, Artificial
  Synthetic oligonucleotide
actgcaattgattatgcctgctagattttatccaaatgtcaccaaatatttgccattgga

SEQ ID NO: 317108 - DNA, 59 bp, Artificial
  Synthetic oligonucleotide
actgcacacaggctcgtcggtgcggaacccagacctcccgtcagtggaaccaggtatgc

SEQ ID NO: 317109 - DNA, 57 bp, Artificial
  Synthetic oligonucleotide
actgcacataccacttgttcagtaaatggagtaaacaattttagctataatggaggt

SEQ ID NO: 317110 - DNA, 59 bp, Artificial
  Synthetic oligonucleotide
actgcaccacaaactgaaagaatgatgcgtgtaaattggaagaagtggtggcaagtatt

SEQ ID NO: 317111 - DNA, 59 bp, Artificial
  Synthetic oligonucleotide
actgcacgtcgtttgaatagaccctggtattgaagtccaaatgtccactcagataatta

SEQ ID NO: 317112 - DNA, 56 bp, Artificial
  Synthetic oligonucleotide
actgcacgtgtgggttccccccctcaacgtccgaggggggcgtgatgctgtcatcc

SEQ ID NO: 317113 - DNA, 60 bp, Artificial
  Synthetic oligonucleotide
actgcactactggtcacatagggacttaatcacaatgttagaagtgctgaagcctgataa

SEQ ID NO: 317114 - DNA, 60 bp, Artificial
  Synthetic oligonucleotide
actgcactagctaatactatagagatattcagatcgaacagtctgacagctaatgaatca

SEQ ID NO: 317115 - DNA, 55 bp, Artificial
  Synthetic oligonucleotide
actgcactgatggtttatcaccacgtgaaattcaaaaggcattgaatagacaacg

SEQ ID NO: 317116 - DNA, 60 bp, Artificial
  Synthetic oligonucleotide
actgcacttgacaggtgcaaccatcctgcaaccaactttaagcactgctgtcctcttatc

SEQ ID NO: 317117 - DNA, 50 bp, Artificial
  Synthetic oligonucleotide
actgcagaggaccagccgacacaaccagacgtagcaacgtgtagattcta

SEQ ID NO: 317118 - DNA, 60 bp, Artificial
  Synthetic oligonucleotide
actgcagagggcaatgagaagttgttacaacagttagaaccagctctcaagacagggtca

SEQ ID NO: 317119 - DNA, 57 bp, Artificial
  Synthetic oligonucleotide
actgcagaggtgtcccattgtagagccactgaatacataatgaagggggtatacatt

SEQ ID NO: 317120 - DNA, 60 bp, Artificial
  Synthetic oligonucleotide
actgcagctatagttgtcgggctagttatactggcactcattataattgtcattgcagtc

SEQ ID NO: 317121 - DNA, 60 bp, Artificial
  Synthetic oligonucleotide
actgcagctgataaaagtgagcagattgactggcgtgacatcacccagtgcacgttcctt

SEQ ID NO: 317122 - DNA, 57 bp, Artificial
  Synthetic oligonucleotide
actgcaggtattaacaaataacgcctattcaattcgtacacttgggcattcgaagtg

SEQ ID NO: 317123 - DNA, 50 bp, Artificial
  Synthetic oligonucleotide
actgcagtccaaacatttggagggcaggattccaagcaattattctcggg

SEQ ID NO: 317124 - DNA, 60 bp, Artificial
  Synthetic oligonucleotide
actgcagtgccaatcagtctgcaacagactgcacctgtgcagccatcagctccaccaatg

SEQ ID NO: 317125 - DNA, 60 bp, Artificial
  Synthetic oligonucleotide
actgcagtggcagatgatgagacgcctataattcccagcatccatacagttattaagggg

SEQ ID NO: 317126 - DNA, 59 bp, Artificial
  Synthetic oligonucleotide
actgcagtggtgaaaatgtatgcccaatagtctgtgtatcaggagtttatcttgatccc

SEQ ID NO: 317127 - DNA, 53 bp, Artificial
  Synthetic oligonucleotide
actgcagttagggttatgacgaatgatggagcatatttgtcaacgttaacaga

SEQ ID NO: 317128 - DNA, 57 bp, Artificial
  Synthetic oligonucleotide
actgcagttccgatagggtcttgcgttagtaaatgccacaccgacaggggttcaatc

SEQ ID NO: 317129 - DNA, 55 bp, Artificial
  Synthetic oligonucleotide
actgcagttcctttctatagtttaactccagttaggtctttgtctaaacctgatc

SEQ ID NO: 317130 - DNA, 56 bp, Artificial
  Synthetic oligonucleotide
actgcataactagcaagtaagggaccagctgcttaccgtacccggaatggaaagtg

SEQ ID NO: 317131 - DNA, 60 bp, Artificial
  Synthetic oligonucleotide
actgcataccacggattgggatagcgctgagttgcgtgccgtcacacctgcactgcaata

SEQ ID NO: 317132 - DNA, 60 bp, Artificial
  Synthetic oligonucleotide
actgcatccggcttcttggtcagatctacgctcgtgttgtcccaggatcgccccataatt

SEQ ID NO: 317133 - DNA, 51 bp, Artificial
  Synthetic oligonucleotide
actgcatgattcctagacttagtttctgctcacctgtagttagaaaggcct

SEQ ID NO: 317134 - DNA, 54 bp, Artificial
  Synthetic oligonucleotide
actgcatgcagtttaagttagagatggacgacctggcacataacagcgtagagc

SEQ ID NO: 317135 - DNA, 60 bp, Artificial
  Synthetic oligonucleotide
actgcatgggcatcacgatagtccgtattataagagcggggaatacactgtttctcgttc

SEQ ID NO: 317136 - DNA, 60 bp, Artificial
  Synthetic oligonucleotide
actgcatgtttaattgcaaactgtgtgttgaaatatcagctgacactctaattctgcgac

SEQ ID NO: 317137 - DNA, 58 bp, Artificial
  Synthetic oligonucleotide
actgcattaatgggtacctgactgcggtattctagtacgatgtgatcaattttcatgc

SEQ ID NO: 317138 - DNA, 60 bp, Artificial
  Synthetic oligonucleotide
actgcattagctaacactatagaagtttttagatcgaatggtctgacagctaatgaatca

SEQ ID NO: 317139 - DNA, 50 bp, Artificial
  Synthetic oligonucleotide
actgcattgaatggaccggaggtgtcaactctaagggttatggtcgtaag

SEQ ID NO: 317140 - DNA, 57 bp, Artificial
  Synthetic oligonucleotide
actgccaaggttaacgccgcatcgcgagaaatggatattctcaggacgtatggggag

SEQ ID NO: 317141 - DNA, 58 bp, Artificial
  Synthetic oligonucleotide
actgccaagtttggagagcactccgggccgaatggtcgagtagctcccagagggagga

SEQ ID NO: 317142 - DNA, 51 bp, Artificial
  Synthetic oligonucleotide
actgccaattccacaggatcagttggagggccctcaatgtccatccaaatt

SEQ ID NO: 317143 - DNA, 55 bp, Artificial
  Synthetic oligonucleotide
actgccacaaacacaggaaggcagccaagagacaagaggaagccagccaaatccc

SEQ ID NO: 317144 - DNA, 60 bp, Artificial
  Synthetic oligonucleotide
actgccacaagcccatccttcctctctaaagacctttgagaagagtctgctcacgccagc

SEQ ID NO: 317145 - DNA, 60 bp, Artificial
  Synthetic oligonucleotide
actgccactctgttagatgcttatcaaagagaagtaacaaacatatacaggacatcttgt

SEQ ID NO: 317146 - DNA, 60 bp, Artificial
  Synthetic oligonucleotide
actgccagactcacttgaaaatccacatgcagcttgggtctttgcatgtgctcctgaccg

SEQ ID NO: 317147 - DNA, 60 bp, Artificial
  Synthetic oligonucleotide
actgccagagactcatttgcatggcagtccgccacaaatccgtccgtgtttgtcaaagca

SEQ ID NO: 317148 - DNA, 53 bp, Artificial
  Synthetic oligonucleotide
actgccaggattggggggcactccggcccgtaaggtggaactatccccagagg

SEQ ID NO: 317149 - DNA, 53 bp, Artificial
  Synthetic oligonucleotide
actgccagtccctttgggacccgattaattctttccagtgctttaactttaga

SEQ ID NO: 317150 - DNA, 60 bp, Artificial
  Synthetic oligonucleotide
actgccattggagtatccacaaggagctcctttgaagttgagtctagcaatgaagtttgc

SEQ ID NO: 317151 - DNA, 60 bp, Artificial
  Synthetic oligonucleotide
actgcccaacacctacgcaatggctgagatcggcgataggactgacagtgttacccagtt

SEQ ID NO: 317152 - DNA, 59 bp, Artificial
  Synthetic oligonucleotide
actgcccagtagtcgtattacgcattccagtgaacgcagagtccaggggcaccaaatag

SEQ ID NO: 317153 - DNA, 55 bp, Artificial
  Synthetic oligonucleotide
actgccccctctaaatagtccctgagattgtcaaggttaatcattcccaggccct

SEQ ID NO: 317154 - DNA, 60 bp, Artificial
  Synthetic oligonucleotide
actgccccgtgcagtcaccactggaagagtttatgacatgaatactggcacactgcgcaa

SEQ ID NO: 317155 - DNA, 60 bp, Artificial
  Synthetic oligonucleotide
actgcccctcaggtagaataaagcccataagtattgaaccctgacatctgcctgagagtg

SEQ ID NO: 317156 - DNA, 55 bp, Artificial
  Synthetic oligonucleotide
actgcccctggactgccatgcacgacacccacgcctactacaactgtggttggcg

SEQ ID NO: 317157 - DNA, 54 bp, Artificial
  Synthetic oligonucleotide
actgcccgacagggtactgttcgggttagtcgtattggtcagcgggcctcctta

SEQ ID NO: 317158 - DNA, 55 bp, Artificial
  Synthetic oligonucleotide
actgcccgcatgctcttcggctccgagcttaaacgagcctaccaaaagctgtcct

SEQ ID NO: 317159 - DNA, 56 bp, Artificial
  Synthetic oligonucleotide
actgcccgttctgtggttggaaaattgctatttccactggatcattaaatctaccc

SEQ ID NO: 317160 - DNA, 52 bp, Artificial
  Synthetic oligonucleotide
actgcccttgaggctagacgctctgcgaagaacgctgtacgaattgcattca

SEQ ID NO: 317161 - DNA, 51 bp, Artificial
  Synthetic oligonucleotide
actgccgaaacctccggcgttgaaagtcccggttgcaaaaccgacgaacac

SEQ ID NO: 317162 - DNA, 60 bp, Artificial
  Synthetic oligonucleotide
actgccgcgtcttggaccgttgacttggtgtgatccacaagcactgtatctccatcgcac

SEQ ID NO: 317163 - DNA, 60 bp, Artificial
  Synthetic oligonucleotide
actgccgctgttaagcgctttggcgtaagcatcattcgctgattgttgaccgcctctagc

SEQ ID NO: 317164 - DNA, 51 bp, Artificial
  Synthetic oligonucleotide
actgccgtgcgcgtggggatgagggaagccgctgtgctcctgatccttgta

SEQ ID NO: 317165 - DNA, 55 bp, Artificial
  Synthetic oligonucleotide
actgcctcgcgacccagcgaggtgtgcatggttgacggtacggacatgtgtctgg

SEQ ID NO: 317166 - DNA, 60 bp, Artificial
  Synthetic oligonucleotide
actgcctcgctagttgtaccatgggttagtgctagccatttcagattcactacacctgat

SEQ ID NO: 317167 - DNA, 55 bp, Artificial
  Synthetic oligonucleotide
actgcctcttctggaaagccaaattgccacaattgaacaaagtgcaccatctcag

SEQ ID NO: 317168 - DNA, 53 bp, Artificial
  Synthetic oligonucleotide
actgcctctttaggtagcactcttcgcggtgggtctctcaggggtaatctggg

SEQ ID NO: 317169 - DNA, 56 bp, Artificial
  Synthetic oligonucleotide
actgcctgaagtctctaaacgtgttgttgcacggggaacgggttgtccatccagct

SEQ ID NO: 317170 - DNA, 55 bp, Artificial
  Synthetic oligonucleotide
actgcgaccgattacctgataggaaaaggccctgtcctggacataactaagaata

SEQ ID NO: 317171 - DNA, 59 bp, Artificial
  Synthetic oligonucleotide
actgcgacggattttactgatgtgaagcattggttggatctgggaactggacccgaagc

SEQ ID NO: 317172 - DNA, 60 bp, Artificial
  Synthetic oligonucleotide
actgcgagaaataagtcgatccttgaaacttatcatagggttgacgatatgatcaatttg

SEQ ID NO: 317173 - DNA, 60 bp, Artificial
  Synthetic oligonucleotide
actgcgaggttatcgggtccatcataatggctgcctgtacaaacaacagagacctgagac

SEQ ID NO: 317174 - DNA, 60 bp, Artificial
  Synthetic oligonucleotide
actgcgcacacgagaacgcgagtgagccatgcgttatttaactgtacggttaggctgcat

SEQ ID NO: 317175 - DNA, 60 bp, Artificial
  Synthetic oligonucleotide
actgcgcacgctctgcattcgataagataggactagcctatgactctgctccggaaagtg

SEQ ID NO: 317176 - DNA, 60 bp, Artificial
  Synthetic oligonucleotide
actgcgcatagtgaacttcgatcgatccgtggcaccgtgcagcgaggatgctcagctgta

SEQ ID NO: 317177 - DNA, 50 bp, Artificial
  Synthetic oligonucleotide
actgcgccagatgtacagcacaaagcgcgatcccacgtggaagcccggcc

SEQ ID NO: 317178 - DNA, 55 bp, Artificial
  Synthetic oligonucleotide
actgcgccggtctgcgagagtggagaagttattaaccttgctgcacgtatgtcgc

SEQ ID NO: 317179 - DNA, 52 bp, Artificial
  Synthetic oligonucleotide
actgcgccgtagccgaactttcatgggaggtcgcccaacattgcgggcacca

SEQ ID NO: 317180 - DNA, 60 bp, Artificial
  Synthetic oligonucleotide
actgcgctggagaacccttacccgccatgtatggagctgtgccatagagcatggtgtttg

SEQ ID NO: 317181 - DNA, 60 bp, Artificial
  Synthetic oligonucleotide
actgcggacatgttccgtgtgccaacgagcacgggattcattggggacacactacatttc

SEQ ID NO: 317182 - DNA, 53 bp, Artificial
  Synthetic oligonucleotide
actgcggagcacgtgcttccaatccaggaggtggcgtgtcgtaacgggtaact

SEQ ID NO: 317183 - DNA, 60 bp, Artificial
  Synthetic oligonucleotide
actgcggagcatgtgccctcaatccagagggtggcatgtcgtaacgggcaactctgcagc

SEQ ID NO: 317184 - DNA, 55 bp, Artificial
  Synthetic oligonucleotide
actgcggattccagtgtgtgagtcttacttgacgtaagtagtaccgggatcgtgc

SEQ ID NO: 317185 - DNA, 60 bp, Artificial
  Synthetic oligonucleotide
actgcggcaagacacccaaccaacttcgagattggtgccaggaacatctcactcattcca

SEQ ID NO: 317186 - DNA, 60 bp, Artificial
  Synthetic oligonucleotide
actgcggcagagttgcagcgataatgacacacagtattttaccgtgctataagataacct

SEQ ID NO: 317187 - DNA, 60 bp, Artificial
  Synthetic oligonucleotide
actgcggcagattacaagagcactcagtcggcaattgatcaaataacagggaagttaaac

SEQ ID NO: 317188 - DNA, 60 bp, Artificial
  Synthetic oligonucleotide
actgcggccattgacatacttgcaccccaacagtgcgctgaacccatcacgtggaaatca

SEQ ID NO: 317189 - DNA, 53 bp, Artificial
  Synthetic oligonucleotide
actgcgggactttccaaactgctgacactgtggggactttccagcgtgggagg

SEQ ID NO: 317190 - DNA, 55 bp, Artificial
  Synthetic oligonucleotide
actgcgggcccagctggtctttccggtacgagttggtccgcagatgtagagggag

SEQ ID NO: 317191 - DNA, 57 bp, Artificial
  Synthetic oligonucleotide
actgcgggttgcagaggttgggcctcccgtcgagggatagtcggacatttcactagc

SEQ ID NO: 317192 - DNA, 51 bp, Artificial
  Synthetic oligonucleotide
actgcggttaaattgagaagggtcttactctttgatttacccgaaggtaaa

SEQ ID NO: 317193 - DNA, 54 bp, Artificial
  Synthetic oligonucleotide
actgcggttgagacaggggctaccaatccgttaaccccatctgataccgtgcaa

SEQ ID NO: 317194 - DNA, 60 bp, Artificial
  Synthetic oligonucleotide
actgcgtcgctccacgcctcgcatacagcttacctccatccttccgctcgactacatgag

SEQ ID NO: 317195 - DNA, 55 bp, Artificial
  Synthetic oligonucleotide
actgcgtcgtcgagaccaagcgtggctccggcaagggtgggcagaaccgcaacaa

SEQ ID NO: 317196 - DNA, 60 bp, Artificial
  Synthetic oligonucleotide
actgcgtgctttaattggtgtggcgtaagcgtcgttggctgtgtgctgtccccctcttgc

SEQ ID NO: 317197 - DNA, 54 bp, Artificial
  Synthetic oligonucleotide
actgcgtgggcccatacattttcaaagacgggcgatcctgggagcgttaaagtt

SEQ ID NO: 317198 - DNA, 60 bp, Artificial
  Synthetic oligonucleotide
actgcgttaagcgccttggcatatgaatcgtttgcagtctgctgacctcctctagcagat

SEQ ID NO: 317199 - DNA, 60 bp, Artificial
  Synthetic oligonucleotide
actgcgttacgcaaattatatacagaccaagacgctgcagaatctgccttagaggagtac

SEQ ID NO: 317200 - DNA, 57 bp, Artificial
  Synthetic oligonucleotide
actgcgttaggtactgtgacagggatgccctgttacctgtagctatcgggctttgtt

SEQ ID NO: 317201 - DNA, 51 bp, Artificial
  Synthetic oligonucleotide
actgcgttcaccgagaaccattttaacacgattcatgatatacggaacgtc

SEQ ID NO: 317202 - DNA, 51 bp, Artificial
  Synthetic oligonucleotide
actgctaagttagaagtccagaaggagaatgaagctcagctagtgaacatg

SEQ ID NO: 317203 - DNA, 60 bp, Artificial
  Synthetic oligonucleotide
actgctacatatatcacattacatggttttgtcgttgccacacatttcccatcccagaga

SEQ ID NO: 317204 - DNA, 60 bp, Artificial
  Synthetic oligonucleotide
actgctagccttatgcggttgctgtgtattgagagggcttatatgtagcttttatgcttc

SEQ ID NO: 317205 - DNA, 59 bp, Artificial
  Synthetic oligonucleotide
actgctagcttcatttacggtgggaggcttgtagatagcattggttcatggtccaaaaa

SEQ ID NO: 317206 - DNA, 60 bp, Artificial
  Synthetic oligonucleotide
actgctaggtccaggaattgggctcaatctcgagccaatgctgcccgatctagaccacaa

SEQ ID NO: 317207 - DNA, 60 bp, Artificial
  Synthetic oligonucleotide
actgctataggccaggtgtcaaggcccatgttcctgtatgtgaggaccaatggaacctcc

SEQ ID NO: 317208 - DNA, 60 bp, Artificial
  Synthetic oligonucleotide
actgctatgagcttctggagacctccggtgcacaatgccacggggatccagcgcctgtgg

SEQ ID NO: 317209 - DNA, 55 bp, Artificial
  Synthetic oligonucleotide
actgctcaacggagaatccgagcatgcaatttgaaccaagtaagtacgaccttaa

SEQ ID NO: 317210 - DNA, 55 bp, Artificial
  Synthetic oligonucleotide
actgctcaactaaccacgattacaccatttggatgcctgagaatccaagactcgg

SEQ ID NO: 317211 - DNA, 59 bp, Artificial
  Synthetic oligonucleotide
actgctcaagatttaaatggagttcttatggaacgttggattcttggtgagttcacagc

SEQ ID NO: 317212 - DNA, 60 bp, Artificial
  Synthetic oligonucleotide
actgctcaatacgccaatgcctattgttcacatgctaatgggtcaggagttgtgcagata

SEQ ID NO: 317213 - DNA, 55 bp, Artificial
  Synthetic oligonucleotide
actgctccaactcaagcatagtatatgaagtggcggacatgatcatgcacacccc

SEQ ID NO: 317214 - DNA, 59 bp, Artificial
  Synthetic oligonucleotide
actgctccgaatatcgagacaaggacgaaaactgatggttgttgatacacgggtgatta

SEQ ID NO: 317215 - DNA, 59 bp, Artificial
  Synthetic oligonucleotide
actgctctaatgttgctagaggatttgggggtggatcatcccctgttggacttgataga

SEQ ID NO: 317216 - DNA, 60 bp, Artificial
  Synthetic oligonucleotide
actgctctcacttagagggcatttactggccgcctagtgatccggggctgacggctagca

SEQ ID NO: 317217 - DNA, 60 bp, Artificial
  Synthetic oligonucleotide
actgctcttatcaactctactatctgagggtaagaggcctaaacaatatcgtcctatata

SEQ ID NO: 317218 - DNA, 60 bp, Artificial
  Synthetic oligonucleotide
actgctctttgaatgggatcagcccaattcatcttggtgactgcagctttgagggatgga

SEQ ID NO: 317219 - DNA, 59 bp, Artificial
  Synthetic oligonucleotide
actgctgaaattgattacgacaaccggtgcgttaattacacaaagaccagcatttcata

SEQ ID NO: 317220 - DNA, 54 bp, Artificial
  Synthetic oligonucleotide
actgctgactctgcgggactttccaagggactttccggggagaggtggtcggga

SEQ ID NO: 317221 - DNA, 60 bp, Artificial
  Synthetic oligonucleotide
actgctgagaacaacatgttacgttctcatgtttgtgaacgtatgaatactaatgaagtc

SEQ ID NO: 317222 - DNA, 55 bp, Artificial
  Synthetic oligonucleotide
actgctgataacttccagtcgccgtgtgcattgcctgagtttgacgtgaccccac

SEQ ID NO: 317223 - DNA, 56 bp, Artificial
  Synthetic oligonucleotide
actgctgcaaacaccaactccctcaagagcttggtggctactaccacaacacagag

SEQ ID NO: 317224 - DNA, 60 bp, Artificial
  Synthetic oligonucleotide
actgctgcataatcgtatgtactaagtgggttgcccaactcatccagttttggcaccaca

SEQ ID NO: 317225 - DNA, 60 bp, Artificial
  Synthetic oligonucleotide
actgctgcatgcctaatttggacgtgcgtgacattgctcgccacgagggacacaaggaag

SEQ ID NO: 317226 - DNA, 53 bp, Artificial
  Synthetic oligonucleotide
actgctgcatttggtttgagagtgcgtactcctttactggctcaggtattacg

SEQ ID NO: 317227 - DNA, 60 bp, Artificial
  Synthetic oligonucleotide
actgctgcgctcagtgctgtggagtcttatactatggctatagacccattaacctgtatc

SEQ ID NO: 317228 - DNA, 58 bp, Artificial
  Synthetic oligonucleotide
actgctggcactaccccccaaagccttgcactatcgtgcctgcacagaatgtatgtgg

SEQ ID NO: 317229 - DNA, 60 bp, Artificial
  Synthetic oligonucleotide
actgctgggcgatcagacataaatttgatacttaaacctataatagatccagtgtcaatg

SEQ ID NO: 317230 - DNA, 60 bp, Artificial
  Synthetic oligonucleotide
actgctggtggagagggacatgtagcatttatcgatcttagacactttcactgtgctgag

SEQ ID NO: 317231 - DNA, 56 bp, Artificial
  Synthetic oligonucleotide
actgctggtttcagatggggggccaaacctgtacaatatccggaatctccacgtcc

SEQ ID NO: 317232 - DNA, 60 bp, Artificial
  Synthetic oligonucleotide
actgctgtatcaggatgacccatacgcaatgcaagccttgaagttcaataccgggcgtaa

SEQ ID NO: 317233 - DNA, 60 bp, Artificial
  Synthetic oligonucleotide
actgctgtctacaacagagtggcaggtactgccctgttgcttcaccaccctaccggctct

SEQ ID NO: 317234 - DNA, 59 bp, Artificial
  Synthetic oligonucleotide
actgctgtgccccgcaggacacgctgtaggcatatttagggccgcggtgtgtacccgtg

SEQ ID NO: 317235 - DNA, 54 bp, Artificial
  Synthetic oligonucleotide
actgctgtggccaaatgtaatttggaacataattcagagttctgtgatatgctc

SEQ ID NO: 317236 - DNA, 58 bp, Artificial
  Synthetic oligonucleotide
actgctgttaaacagacgtctaaatctcgtgtaccgcgaaagttggcgtatgaatcgc

SEQ ID NO: 317237 - DNA, 52 bp, Artificial
  Synthetic oligonucleotide
actgctgttaaatggcagcctagcagaaggagagatagtagtcagatctgaa

SEQ ID NO: 317238 - DNA, 56 bp, Artificial
  Synthetic oligonucleotide
actgctgtttacgtcagcgtaaaccggatattgagatggacgtccgaatagccgtt

SEQ ID NO: 317239 - DNA, 60 bp, Artificial
  Synthetic oligonucleotide
actgcttactggtgggacggtctccaatcttctgatgattttgctctgattgttaacgca

SEQ ID NO: 317240 - DNA, 59 bp, Artificial
  Synthetic oligonucleotide
actgcttattcagtaaccaactccctaaagtggcagtgtgtgtctactcccactacagc

SEQ ID NO: 317241 - DNA, 60 bp, Artificial
  Synthetic oligonucleotide
actgcttcccaagcaggacgattacgtggcgtcacttactgtcgacgctactgagctggc

SEQ ID NO: 317242 - DNA, 59 bp, Artificial
  Synthetic oligonucleotide
actgcttggaggcccgttaggccaatatacattaatgtcattcaggcccacttagccca

SEQ ID NO: 317243 - DNA, 60 bp, Artificial
  Synthetic oligonucleotide
actgcttggagtggctcgtgattgttatgtcacaggcacaactcggctgtatatacccaa

SEQ ID NO: 317244 - DNA, 52 bp, Artificial
  Synthetic oligonucleotide
actgcttgggggtgtccccgacccccttaattcaacgtctagcccacgatac

SEQ ID NO: 317245 - DNA, 55 bp, Artificial
  Synthetic oligonucleotide
actgctttgtgtacaacacgtttgacgccgacattatcacacgtgtcaagcagcg

SEQ ID NO: 317246 - DNA, 55 bp, Artificial
  Synthetic oligonucleotide
actgcttttgcaggcattccatcttactcatcaacaagtatcttggctgcatcag

SEQ ID NO: 317247 - DNA, 57 bp, Artificial
  Synthetic oligonucleotide
actggaaaatgagaggactttggacatgcatgatgctaatgtaaagaatctacatga

SEQ ID NO: 317248 - DNA, 59 bp, Artificial
  Synthetic oligonucleotide
actggaaacactgaggggaggacttccgacatgagaacggaaatcataaggatgatgga

SEQ ID NO: 317249 - DNA, 55 bp, Artificial
  Synthetic oligonucleotide
actggaaatgactgcttaagcacaaatggagttaaagtctgtcttctaagcacca

SEQ ID NO: 317250 - DNA, 59 bp, Artificial
  Synthetic oligonucleotide
actggaaatttagtggcaccaagatatgctttcgcactgaatagaggttctggatccgg

SEQ ID NO: 317251 - DNA, 58 bp, Artificial
  Synthetic oligonucleotide
actggaacagcttatggtggtcgtgacacgtataagggtccgtctatgccgaattaca

SEQ ID NO: 317252 - DNA, 50 bp, Artificial
  Synthetic oligonucleotide
actggaaccagcaaggcctgcaataatacatcaaaccagggctcattcta

SEQ ID NO: 317253 - DNA, 54 bp, Artificial
  Synthetic oligonucleotide
actggaaccgctgccttaatccagaccccccgatactttgaggaattacgtaca

SEQ ID NO: 317254 - DNA, 50 bp, Artificial
  Synthetic oligonucleotide
actggaacgaatcaccgtacttaatagatggtccgagaccccgcgatgtg

SEQ ID NO: 317255 - DNA, 60 bp, Artificial
  Synthetic oligonucleotide
actggaacttacccagtggccaagtgtcttgctgcacctggatctggaccaatcctggtc

SEQ ID NO: 317256 - DNA, 58 bp, Artificial
  Synthetic oligonucleotide
actggaagaagggtatttcgttctcgtgttctgcacttaagagctgtaagatgtatac

SEQ ID NO: 317257 - DNA, 55 bp, Artificial
  Synthetic oligonucleotide
actggaagcccggtgcatgcagctgcctgcctcacgcctaatgctactccggtga

SEQ ID NO: 317258 - DNA, 52 bp, Artificial
  Synthetic oligonucleotide
actggaattaccagaagtcactgcaagaggaggagtagtaacatgtatgccg

SEQ ID NO: 317259 - DNA, 60 bp, Artificial
  Synthetic oligonucleotide
actggaatttcagcagacctagcttggctaatgactacacagctttcgaccagtctcagg

SEQ ID NO: 317260 - DNA, 55 bp, Artificial
  Synthetic oligonucleotide
actggaatttgactcattggaaacccgtacgtgtggcgaagaccaccgtaagaga

SEQ ID NO: 317261 - DNA, 58 bp, Artificial
  Synthetic oligonucleotide
actggaattttggcaggcctagtttggctaatgactatacggctttcgaccaatctca

SEQ ID NO: 317262 - DNA, 55 bp, Artificial
  Synthetic oligonucleotide
actggacaaagacgcgtacctccctggtggcgcatgttggcacggtattggccgc

SEQ ID NO: 317263 - DNA, 55 bp, Artificial
  Synthetic oligonucleotide
actggacaacactaccaacccaacagcttaccacaaggaacccctcacacggctg

SEQ ID NO: 317264 - DNA, 59 bp, Artificial
  Synthetic oligonucleotide
actggacaacttgacgcattcctaggcgcaactaactatgccagacttgcaaagactga

SEQ ID NO: 317265 - DNA, 59 bp, Artificial
  Synthetic oligonucleotide
actggacagagtgtgatggttacatctggtacatctcggaaatctacgtttattaacac

SEQ ID NO: 317266 - DNA, 59 bp, Artificial
  Synthetic oligonucleotide
actggacattaaatagaaaccagccggctgcaactgctttagccaacactatagaggtc

SEQ ID NO: 317267 - DNA, 52 bp, Artificial
  Synthetic oligonucleotide
actggacccaagactacctctgcgggggtagtccctcgacggtaacccgtca

SEQ ID NO: 317268 - DNA, 60 bp, Artificial
  Synthetic oligonucleotide
actggaccgggacggcattcgttggtgagcttggtgatcaagctacccatgctaacaaca

SEQ ID NO: 317269 - DNA, 55 bp, Artificial
  Synthetic oligonucleotide
actggacgaggggcgaacgttgcaatctggaggacagggataggtccgagctcag

SEQ ID NO: 317270 - DNA, 55 bp, Artificial
  Synthetic oligonucleotide
actggacggaccgtttccgagctattcggaagctgtggtagacggcgcgcccctc

SEQ ID NO: 317271 - DNA, 58 bp, Artificial
  Synthetic oligonucleotide
actggacggggtgcgcctacatagatttgcgcccccttgcaagcccttgctacgtgag

SEQ ID NO: 317272 - DNA, 57 bp, Artificial
  Synthetic oligonucleotide
actggacgtcagcggtaccatcctgccgtttcaggaaaacaacgacctctcgtcagc

SEQ ID NO: 317273 - DNA, 56 bp, Artificial
  Synthetic oligonucleotide
actggactggtagcctacggtttagtttcatgttttgtggtactgctaatacaaca

SEQ ID NO: 317274 - DNA, 55 bp, Artificial
  Synthetic oligonucleotide
actggagacaacactaaatggaatgagaatcaaaatcctcggatgtttctagcaa

SEQ ID NO: 317275 - DNA, 56 bp, Artificial
  Synthetic oligonucleotide
actggagagaaagtatctctagggagaagattttgtctgttaagcaaaagtgttta

SEQ ID NO: 317276 - DNA, 59 bp, Artificial
  Synthetic oligonucleotide
actggagagaaccaccaccacacttatgcgacactggagaggtaacgaatgctggaatt

SEQ ID NO: 317277 - DNA, 58 bp, Artificial
  Synthetic oligonucleotide
actggagagaatgaaactttcagtaacgtcataaacaagtacgaagacgaagagcatc

SEQ ID NO: 317278 - DNA, 57 bp, Artificial
  Synthetic oligonucleotide
actggagcacatctgaaactcaggggaagatactctttaaacaatccttaggaccat

SEQ ID NO: 317279 - DNA, 57 bp, Artificial
  Synthetic oligonucleotide
actggagcaccacaacttaacccaattgacggaccattacctgaggacaacgagcca

SEQ ID NO: 317280 - DNA, 55 bp, Artificial
  Synthetic oligonucleotide
actggagccacttcgcaagctagtgttgagtccaccattgagacgcgggccgtgc

SEQ ID NO: 317281 - DNA, 60 bp, Artificial
  Synthetic oligonucleotide
actggagctcctgcggacgtcactgatcagttggttggctacacccctagccttggcgaa

SEQ ID NO: 317282 - DNA, 60 bp, Artificial
  Synthetic oligonucleotide
actggagcttagttataatcccaatatgtcccttagaggctagcggtgctgatgtaacag

SEQ ID NO: 317283 - DNA, 55 bp, Artificial
  Synthetic oligonucleotide
actggagcttcattacgctcaggataccgtacgaagaggttgtctttgtgtgacg

SEQ ID NO: 317284 - DNA, 60 bp, Artificial
  Synthetic oligonucleotide
actggaggcccaatctatagaagaagagacggaaaatggatgagagaactgatcctatat

SEQ ID NO: 317285 - DNA, 55 bp, Artificial
  Synthetic oligonucleotide
actggaggccttccaaattccagtctcaactggatcacactcaggagagggtgcc

SEQ ID NO: 317286 - DNA, 52 bp, Artificial
  Synthetic oligonucleotide
actggagggattggcaacttacccgttagaaattggaacttcgattttggtc

SEQ ID NO: 317287 - DNA, 55 bp, Artificial
  Synthetic oligonucleotide
actggagggcccatatacaggagagtagatggaaaatggattagggaactcgtcc

SEQ ID NO: 317288 - DNA, 53 bp, Artificial
  Synthetic oligonucleotide
actggagtgacccagaatggagtgatgatgcctcacttggctctgacttctat

SEQ ID NO: 317289 - DNA, 60 bp, Artificial
  Synthetic oligonucleotide
actggagtgttgctcaaatcacttgctggtgttcctgtggcgcacattgatggaaccaag

SEQ ID NO: 317290 - DNA, 53 bp, Artificial
  Synthetic oligonucleotide
actggatacgagtggataaccgagtacgtcggaaagactgtttggttcgttcc

SEQ ID NO: 317291 - DNA, 56 bp, Artificial
  Synthetic oligonucleotide
actggatatgctccggttaattgggggccaggagagacgaatgactcaactttagt

SEQ ID NO: 317292 - DNA, 56 bp, Artificial
  Synthetic oligonucleotide
actggatgcacaatacttaggctacaaagttgtaaaaagatttaatgtggtcggac

SEQ ID NO: 317293 - DNA, 54 bp, Artificial
  Synthetic oligonucleotide
actggatgcactgcttgtggtgtttatctcgataaactaaaatctgttgggaag

SEQ ID NO: 317294 - DNA, 59 bp, Artificial
  Synthetic oligonucleotide
actggatgcagctaaagaccccccagtaatattgctaagaggggcatccaacacattaa

SEQ ID NO: 317295 - DNA, 55 bp, Artificial
  Synthetic oligonucleotide
actggatgctgcctctaattttaggcctgtatggtgatatctctccttcctgggg

SEQ ID NO: 317296 - DNA, 54 bp, Artificial
  Synthetic oligonucleotide
actggatggccgaccgttttttggagtcctgcctttacgcatggggcgctcctt

SEQ ID NO: 317297 - DNA, 55 bp, Artificial
  Synthetic oligonucleotide
actggatggccgcccgagtttggtgcctctatccgtactgccacgtgcttctccc

SEQ ID NO: 317298 - DNA, 57 bp, Artificial
  Synthetic oligonucleotide
actggatggccgcgatttttttggagtcctgccagcctggaccgcattattttggga

SEQ ID NO: 317299 - DNA, 55 bp, Artificial
  Synthetic oligonucleotide
actggatggccgcgcaaaaatttggacttgggccgctttttctggcccaattaga

SEQ ID NO: 317300 - DNA, 57 bp, Artificial
  Synthetic oligonucleotide
actggatggccgcgcgatttttggagtcctttactctagagaggcccattacgctac

SEQ ID NO: 317301 - DNA, 54 bp, Artificial
  Synthetic oligonucleotide
actggattcacctttcataaaccgaatatctttccatattccgcttcttttacg

SEQ ID NO: 317302 - DNA, 59 bp, Artificial
  Synthetic oligonucleotide
actggattccaatgacacagttacttttagtttcaatggggctttcatagctccagatc

SEQ ID NO: 317303 - DNA, 60 bp, Artificial
  Synthetic oligonucleotide
actggattccaatggcaacgtttacaaaatactgtcaatttacagctgcattgcaagcag

SEQ ID NO: 317304 - DNA, 60 bp, Artificial
  Synthetic oligonucleotide
actggattcccagtcgtgtaaagaccttggcaggatatgccgctgagggcataattgagg

SEQ ID NO: 317305 - DNA, 54 bp, Artificial
  Synthetic oligonucleotide
actggatttgacttctaattgggctaatttaatgggcttgaaagtctttgggcc

SEQ ID NO: 317306 - DNA, 57 bp, Artificial
  Synthetic oligonucleotide
actggcaaaagactgagggacatttggactatcatggtgcctattttatggatggat

SEQ ID NO: 317307 - DNA, 51 bp, Artificial
  Synthetic oligonucleotide
actggcaaaagactggagtgaccgcattgaacagtggctaagtgagccctg

SEQ ID NO: 317308 - DNA, 55 bp, Artificial
  Synthetic oligonucleotide
actggcaaatgtctcaagtattacacccaaggtcctgtcattagccctcccatcc

SEQ ID NO: 317309 - DNA, 60 bp, Artificial
  Synthetic oligonucleotide
actggcaacagccggaaggtctgacaagatctgcattggatatcatgccaacaattcaac

SEQ ID NO: 317310 - DNA, 60 bp, Artificial
  Synthetic oligonucleotide
actggcaacgaaatcaagtgatctgtgaactgcagatcaaaaaccctgagttgacgatag

SEQ ID NO: 317311 - DNA, 55 bp, Artificial
  Synthetic oligonucleotide
actggcaacttttgataattacccttttgatttactcaggttccaactctcttca

SEQ ID NO: 317312 - DNA, 55 bp, Artificial
  Synthetic oligonucleotide
actggcaagcaacttggatccctgaatgggaatatgttaacacccctcccctggt

SEQ ID NO: 317313 - DNA, 58 bp, Artificial
  Synthetic oligonucleotide
actggcaagctgtcgttgaactgtatgctgaattggaagaagcctcctcttttcttgg

SEQ ID NO: 317314 - DNA, 55 bp, Artificial
  Synthetic oligonucleotide
actggcaagctgttaatttcgtactccccacctggggcttctgtccccacgtcgc

SEQ ID NO: 317315 - DNA, 60 bp, Artificial
  Synthetic oligonucleotide
actggcaaggtggcaatgtctcaccataatccgggcgtggttataacacagctggtacca

SEQ ID NO: 317316 - DNA, 55 bp, Artificial
  Synthetic oligonucleotide
actggcacggctggcggaccggtgtcaacacctcacctgtcggtgatttcgggaa

SEQ ID NO: 317317 - DNA, 59 bp, Artificial
  Synthetic oligonucleotide
actggcactatggcggcataagcgacacacggagccacacttcggtggggctataaggt

SEQ ID NO: 317318 - DNA, 55 bp, Artificial
  Synthetic oligonucleotide
actggcactgccctacacggctccacaccgcgtcctagcgaccgtctacaatggg

SEQ ID NO: 317319 - DNA, 53 bp, Artificial
  Synthetic oligonucleotide
actggcagaatgcgccaggaggcgcctacgaacactagtgctggcgcctaccc

SEQ ID NO: 317320 - DNA, 59 bp, Artificial
  Synthetic oligonucleotide
actggcagagtactctgaacagcatcgtgggtctgggcgtacagagtgtaaagcgccgt

SEQ ID NO: 317321 - DNA, 54 bp, Artificial
  Synthetic oligonucleotide
actggcagggggaagccgggcatctacagatttgtggcaccgggggaacgcccc

SEQ ID NO: 317322 - DNA, 56 bp, Artificial
  Synthetic oligonucleotide
actggcagtgtgggaggggggaaaggttctggtgtgggtatatccacaggcggatg

SEQ ID NO: 317323 - DNA, 50 bp, Artificial
  Synthetic oligonucleotide
actggcatatctggtgggaagatcaacaccggatactacaagcaagacac

SEQ ID NO: 317324 - DNA, 54 bp, Artificial
  Synthetic oligonucleotide
actggcatgctcctgactggctctaacgccaaagcccaagatcttgggactatt

SEQ ID NO: 317325 - DNA, 59 bp, Artificial
  Synthetic oligonucleotide
actggcatgtgaagaaagttgctggcaatgtgggaacacctgcggggtggtttcactgg

SEQ ID NO: 317326 - DNA, 55 bp, Artificial
  Synthetic oligonucleotide
actggccagatggggctaaaatagagtacttcctctaagatgtagaaaaagaccc

SEQ ID NO: 317327 - DNA, 60 bp, Artificial
  Synthetic oligonucleotide
actggccagcttgccctcgagaacgggcctatgttctcacaaggtgctgagtacgtatgg

SEQ ID NO: 317328 - DNA, 51 bp, Artificial
  Synthetic oligonucleotide
actggccatacctcgcaagtgacaccaggcgacacaatgcaaacacgccat

SEQ ID NO: 317329 - DNA, 60 bp, Artificial
  Synthetic oligonucleotide
actggcccaacatcagggataaatactaaacatgacgaattgtgtactggcccatgccca

SEQ ID NO: 317330 - DNA, 55 bp, Artificial
  Synthetic oligonucleotide
actggccccaacccggcgtgatccagtatggcaggtcacgtctgggttcagcgaa

SEQ ID NO: 317331 - DNA, 55 bp, Artificial
  Synthetic oligonucleotide
actggccgaacattgcgatgtacccactgcaccgacgtgcacacgttgggaagac

SEQ ID NO: 317332 - DNA, 57 bp, Artificial
  Synthetic oligonucleotide
actggcctggttggttgcgcttaatcaaccagaccgctacgcggtctggttgattaa

SEQ ID NO: 317333 - DNA, 60 bp, Artificial
  Synthetic oligonucleotide
actggcgacaagtatcctgttatctcgcttggtaacgactatgatgtagttggcaaacta

SEQ ID NO: 317334 - DNA, 54 bp, Artificial
  Synthetic oligonucleotide
actggcgaggtcaaacccggtgtcaacatcaaccggatgtcccgcctccacccc

SEQ ID NO: 317335 - DNA, 55 bp, Artificial
  Synthetic oligonucleotide
actggcgcccttacctatgataacgcaagttttccaggtacgggaactagtatga

SEQ ID NO: 317336 - DNA, 60 bp, Artificial
  Synthetic oligonucleotide
actggcgcgaagctaggttaaacataattgaacatgccactagcgtgttgagccaggtgt

SEQ ID NO: 317337 - DNA, 54 bp, Artificial
  Synthetic oligonucleotide
actggcgcttgcctcaaaaacacaaccgcatggcgattagcaaggcaggtgctg

SEQ ID NO: 317338 - DNA, 55 bp, Artificial
  Synthetic oligonucleotide
actggcggatgactgaggccgacatagaggccgctctcgaatcgttccgcgtcgc

SEQ ID NO: 317339 - DNA, 59 bp, Artificial
  Synthetic oligonucleotide
actggcgtcactcaattacacgatggcctccgaccgcgctctccgtctatggacgtccc

SEQ ID NO: 317340 - DNA, 57 bp, Artificial
  Synthetic oligonucleotide
actggcgtggaaagatttagcaattgtgaaagtgcctcttctttggttagtagaaca

SEQ ID NO: 317341 - DNA, 57 bp, Artificial
  Synthetic oligonucleotide
actggctaaggattggagtgaccgtattgagcagtggctaagtgagccttgcaaact

SEQ ID NO: 317342 - DNA, 58 bp, Artificial
  Synthetic oligonucleotide
actggctccatgacttagggcaacacatctacaacacttatggggatacttgggaagg

SEQ ID NO: 317343 - DNA, 52 bp, Artificial
  Synthetic oligonucleotide
actggctcgagtctgagcgcctcttgtgaggcctctttgtgctgtccttagt

SEQ ID NO: 317344 - DNA, 51 bp, Artificial
  Synthetic oligonucleotide
actggctgcgcatcgagattgagtttggcaacaaggatcgcgtgatcccgc

SEQ ID NO: 317345 - DNA, 51 bp, Artificial
  Synthetic oligonucleotide
actggctgtgggcctttttagcccgcgataagaaacccaggatgtgttccc

SEQ ID NO: 317346 - DNA, 55 bp, Artificial
  Synthetic oligonucleotide
actggctgttccggcatcaatttacgacacgcgcggcggtgtgtacccctgggag

SEQ ID NO: 317347 - DNA, 56 bp, Artificial
  Synthetic oligonucleotide
actggcttcacgcagggacagacggtcattcagtgaaccgttgaccgttgtggggg

SEQ ID NO: 317348 - DNA, 59 bp, Artificial
  Synthetic oligonucleotide
actggcttgatccatcttcaccggaacatcgtggacgtgcaatacctgtacggtatagg

SEQ ID NO: 317349 - DNA, 53 bp, Artificial
  Synthetic oligonucleotide
actgggaagactaccaaaaccctaagtatggtaaagactcaaattggtgtcga

SEQ ID NO: 317350 - DNA, 59 bp, Artificial
  Synthetic oligonucleotide
actgggaatttgatagcaccatggtatgccttcgcgctaaataaggggtcagactcagg

SEQ ID NO: 317351 - DNA, 58 bp, Artificial
  Synthetic oligonucleotide
actgggacaggctcccctacctcaacctgccataccttccacccaatgcaggacgcca

SEQ ID NO: 317352 - DNA, 55 bp, Artificial
  Synthetic oligonucleotide
actgggacaggggccaaacaggatatctgtagtcaggcacctgggccccggctca

SEQ ID NO: 317353 - DNA, 60 bp, Artificial
  Synthetic oligonucleotide
actgggacatactgctcattgaatggggtcagcccggtccatcttggtgattgcagcttt

SEQ ID NO: 317354 - DNA, 55 bp, Artificial
  Synthetic oligonucleotide
actgggacatgggacactctcattgagcgaaagaatgccattgcctactgttacc

SEQ ID NO: 317355 - DNA, 60 bp, Artificial
  Synthetic oligonucleotide
actgggacccgcggatgatatgcagcgcggaggctggaagcttttagctcccatcaccgc

SEQ ID NO: 317356 - DNA, 60 bp, Artificial
  Synthetic oligonucleotide
actgggactccattcgctatggcttggtcagcaatcgtgtctattgtttcacaaagttga

SEQ ID NO: 317357 - DNA, 58 bp, Artificial
  Synthetic oligonucleotide
actgggaggcactagtaatataagtcggtctgcacctttccgagtgatgttttacatc

SEQ ID NO: 317358 - DNA, 55 bp, Artificial
  Synthetic oligonucleotide
actgggataacatcttcaaactcacctcatgtggtcaaaacagctactcaagggg

SEQ ID NO: 317359 - DNA, 60 bp, Artificial
  Synthetic oligonucleotide
actgggatatagtcgcagctatgatagatatgagcactccacatccattaagtcttgctg

SEQ ID NO: 317360 - DNA, 60 bp, Artificial
  Synthetic oligonucleotide
actgggatgaggaaaagaccattctggcattatggagagatctgacctcagtagatatag

SEQ ID NO: 317361 - DNA, 59 bp, Artificial
  Synthetic oligonucleotide
actgggatgcatacaaaggtgaaagagtcgttctctgggacgactacgggatgagcaac

SEQ ID NO: 317362 - DNA, 55 bp, Artificial
  Synthetic oligonucleotide
actgggatttcattcctacacttaagctatcacaatcttcagacattaaactggt

SEQ ID NO: 317363 - DNA, 55 bp, Artificial
  Synthetic oligonucleotide
actgggcaacgtgtttagaactttcggtgtattgcgcttgtgtggaacttacgtg

SEQ ID NO: 317364 - DNA, 60 bp, Artificial
  Synthetic oligonucleotide
actgggcaatgggactgcattgcatatccctaggcacctattgagatttctctggggccc

SEQ ID NO: 317365 - DNA, 60 bp, Artificial
  Synthetic oligonucleotide
actgggcactaggtcaaggcctgctgtagctacctctaaaaagcgatctgctcctacctc

SEQ ID NO: 317366 - DNA, 60 bp, Artificial
  Synthetic oligonucleotide
actgggcctggcagttccattcctctaggaagttcactgagtgctgccagtagtgatgag

SEQ ID NO: 317367 - DNA, 58 bp, Artificial
  Synthetic oligonucleotide
actgggcgcctgataacttccataaacgtgaattctgtctcaccattctgccctctct

SEQ ID NO: 317368 - DNA, 54 bp, Artificial
  Synthetic oligonucleotide
actgggcggtatttatgatttccgcgttgtttgtgacgaaagcaacaacactcc

SEQ ID NO: 317369 - DNA, 55 bp, Artificial
  Synthetic oligonucleotide
actgggcgtaagcacactggtattacggtacctttgtgcgcctgttttatacacc

SEQ ID NO: 317370 - DNA, 57 bp, Artificial
  Synthetic oligonucleotide
actgggctcgtgtatagcggtgggacaaaaatacagatcggttgcaagttggtatgt

SEQ ID NO: 317371 - DNA, 59 bp, Artificial
  Synthetic oligonucleotide
actgggcttcctcgtcataagaagcccagtctacattattttgccagtaattatgtcta

SEQ ID NO: 317372 - DNA, 56 bp, Artificial
  Synthetic oligonucleotide
actggggaagatctctttagaacaggagaagttgacttagccaagaaagtgcaaac

SEQ ID NO: 317373 - DNA, 57 bp, Artificial
  Synthetic oligonucleotide
actggggaagtttaaagaggtgtatggcatagggttcaatgagctggtgcggtgctt

SEQ ID NO: 317374 - DNA, 59 bp, Artificial
  Synthetic oligonucleotide
actggggactaagaggtttatgtatactcagagataacatgcacttaggaagccaggaa

SEQ ID NO: 317375 - DNA, 51 bp, Artificial
  Synthetic oligonucleotide
actggggagcaatcaccgactggtttagcgataaatgggacgggctgaaaa

SEQ ID NO: 317376 - DNA, 58 bp, Artificial
  Synthetic oligonucleotide
actggggagtattcatttaatttgacgtcaaatttgtctgatcccacagccacttcaa

SEQ ID NO: 317377 - DNA, 60 bp, Artificial
  Synthetic oligonucleotide
actggggataggatgtcagaccacaaatactgggacatttgaagaggtagcaacagctga

SEQ ID NO: 317378 - DNA, 60 bp, Artificial
  Synthetic oligonucleotide
actggggatgatagaaatgcgactgctagcttcatttatgatgggatgcttgccgacagt

SEQ ID NO: 317379 - DNA, 56 bp, Artificial
  Synthetic oligonucleotide
actggggattatgcaaattttggtccttgtgttagttcacagatcgtttatagttg

SEQ ID NO: 317380 - DNA, 55 bp, Artificial
  Synthetic oligonucleotide
actggggctatttaaattcctgatgaaactctccgatgagacttttcaacatgag

SEQ ID NO: 317381 - DNA, 60 bp, Artificial
  Synthetic oligonucleotide
actgggggattgaatcaattgacaatgtaatgggaatgatcggaatacttcccgatatga

SEQ ID NO: 317382 - DNA, 54 bp, Artificial
  Synthetic oligonucleotide
actgggggggcggccgccaaaaccgcgagtgggcttgctaagctcttcgcatca

SEQ ID NO: 317383 - DNA, 54 bp, Artificial
  Synthetic oligonucleotide
actggggtgggaaggcctcaagtatctggggaatcttctgttatattggggtcg

SEQ ID NO: 317384 - DNA, 60 bp, Artificial
  Synthetic oligonucleotide
actggggtttgctgcctttctgttctgggccatgtccaatggatcttgcagatgcaacat

SEQ ID NO: 317385 - DNA, 60 bp, Artificial
  Synthetic oligonucleotide
actgggtaattacaaggagatatgcgttgcttggtcaagtagcagttgcttcgatggaaa

SEQ ID NO: 317386 - DNA, 58 bp, Artificial
  Synthetic oligonucleotide
actgggtacctgcccatagtgttctgcggccacactaggggcaataaaaactatgcac

SEQ ID NO: 317387 - DNA, 60 bp, Artificial
  Synthetic oligonucleotide
actgggtatattccattaggaacaaggcctcccacagctacagatacacttgctcctgta

SEQ ID NO: 317388 - DNA, 58 bp, Artificial
  Synthetic oligonucleotide
actgggtcaatgcaattgggccttaaatgaaatgggcttggaccagtagattcgtgac

SEQ ID NO: 317389 - DNA, 55 bp, Artificial
  Synthetic oligonucleotide
actgggtctgtagccttttgctccctggtgtccagagatgcgctagagcgcactc

SEQ ID NO: 317390 - DNA, 60 bp, Artificial
  Synthetic oligonucleotide
actgggtctgttttccgcatatccctaaacatggcacagtcacctggagccacatcatgg

SEQ ID NO: 317391 - DNA, 60 bp, Artificial
  Synthetic oligonucleotide
actgggtgttccatttcacttgggaaccagacaagtttgcatagcatggtccagctcaag

SEQ ID NO: 317392 - DNA, 55 bp, Artificial
  Synthetic oligonucleotide
actgggttaccaaagccgttgaggcccccacggcccaagcctcgtctaggatgca

SEQ ID NO: 317393 - DNA, 54 bp, Artificial
  Synthetic oligonucleotide
actgggttctggccgttgagctacggacactggttccgtacctgtctccccttc

SEQ ID NO: 317394 - DNA, 55 bp, Artificial
  Synthetic oligonucleotide
actggtaaaagccacctagcatacgctatcgcaaaagcagtcaaagctaaagggc

SEQ ID NO: 317395 - DNA, 52 bp, Artificial
  Synthetic oligonucleotide
actggtaaaccgcttcctaagtatcctcgcattaagacacctaaaatcggag

SEQ ID NO: 317396 - DNA, 58 bp, Artificial
  Synthetic oligonucleotide
actggtaaatgtgtcgtgttttcagctcctcgtacgagtcagaatttaactatacata

SEQ ID NO: 317397 - DNA, 60 bp, Artificial
  Synthetic oligonucleotide
actggtaaccagactggtaaccagactgagtctaataatactgagatcttcagacctgga

SEQ ID NO: 317398 - DNA, 50 bp, Artificial
  Synthetic oligonucleotide
actggtaatacaagtactactggaggtatccaatagtgaaagcacgagag

SEQ ID NO: 317399 - DNA, 57 bp, Artificial
  Synthetic oligonucleotide
actggtactggttatggaggcaaggagacttacaaggctccttcaatgccgaattac

SEQ ID NO: 317400 - DNA, 55 bp, Artificial
  Synthetic oligonucleotide
actggtactttatgaacaatgacgttcaggatgaataccccttgaaaccagtgat

SEQ ID NO: 317401 - DNA, 54 bp, Artificial
  Synthetic oligonucleotide
actggtagggggaggttgggcatataccggtatgtcaccccaggggagagacca

SEQ ID NO: 317402 - DNA, 60 bp, Artificial
  Synthetic oligonucleotide
actggtagtcctaggcttagcgttgttggaactactgtgccaccaactgcagacgcgagc

SEQ ID NO: 317403 - DNA, 58 bp, Artificial
  Synthetic oligonucleotide
actggtagtgggctactggtggtcgagaggacaatcaaccccagcaacgtactcagct

SEQ ID NO: 317404 - DNA, 58 bp, Artificial
  Synthetic oligonucleotide
actggtatacaattggggtgtatgttataggcttcacacttcctattatcctgaaggc

SEQ ID NO: 317405 - DNA, 55 bp, Artificial
  Synthetic oligonucleotide
actggtatacccatagggtatgttcatttcactaactgcactagcatccaggagg

SEQ ID NO: 317406 - DNA, 60 bp, Artificial
  Synthetic oligonucleotide
actggtatcaaggagcgacaccgaacgcatcagagagctattacttgaccataaacaatg

SEQ ID NO: 317407 - DNA, 59 bp, Artificial
  Synthetic oligonucleotide
actggtatcacagtcctgattgacactgaaggcggttcagccaaaaaggtgagggtgaa

SEQ ID NO: 317408 - DNA, 51 bp, Artificial
  Synthetic oligonucleotide
actggtatcacggtacccttgtacgcctgttttatactcccttcccccgta

SEQ ID NO: 317409 - DNA, 54 bp, Artificial
  Synthetic oligonucleotide
actggtatcatggtacctttatgtgcctgttttatccaccctcccccaacgtaa

SEQ ID NO: 317410 - DNA, 55 bp, Artificial
  Synthetic oligonucleotide
actggtatgcagtggcgagttagaggctccagttggcggagggacaacagatgtg

SEQ ID NO: 317411 - DNA, 56 bp, Artificial
  Synthetic oligonucleotide
actggtattggcaatggaagtcgtactatgaaagatcctggtaaggttgttgttaa

SEQ ID NO: 317412 - DNA, 54 bp, Artificial
  Synthetic oligonucleotide
actggtcacttccagacatgatgcaggaccctgtcacattccgttccacgagac

SEQ ID NO: 317413 - DNA, 53 bp, Artificial
  Synthetic oligonucleotide
actggtcatggccccgaggaacaatcgcagcaacaaagcaggccttcctcacc

SEQ ID NO: 317414 - DNA, 52 bp, Artificial
  Synthetic oligonucleotide
actggtccagggccccgcccccccccgaagagcggcaagaaagtcgctccca

SEQ ID NO: 317415 - DNA, 60 bp, Artificial
  Synthetic oligonucleotide
actggtcgatatgcaacctgctcgggaggaccacctgctgtcttatctcaatgaacacgt

SEQ ID NO: 317416 - DNA, 52 bp, Artificial
  Synthetic oligonucleotide
actggtcgcgtatgcgccggtcccgtcccgagtcgacgtgttcgtgtaccga

SEQ ID NO: 317417 - DNA, 55 bp, Artificial
  Synthetic oligonucleotide
actggtctcgacgaggccaaaccctggtacaagctcatcaagctactgagccgcc

SEQ ID NO: 317418 - DNA, 54 bp, Artificial
  Synthetic oligonucleotide
actggtctgaggcaagacctcgtcctagacttcggtggtagttgggtcacacat

SEQ ID NO: 317419 - DNA, 51 bp, Artificial
  Synthetic oligonucleotide
actggtctgttttaaaaccaggggaaaccttaaatgtggaatctaatggaa

SEQ ID NO: 317420 - DNA, 57 bp, Artificial
  Synthetic oligonucleotide
actggtcttcatggacactggcagatctgttctttcaaccccccagaaccaaagagt

SEQ ID NO: 317421 - DNA, 57 bp, Artificial
  Synthetic oligonucleotide
actggtcttgggatagacgtaacgtttgagcacattgacggcaaggataaccagttg

SEQ ID NO: 317422 - DNA, 59 bp, Artificial
  Synthetic oligonucleotide
actggtctttcttctcagagtggtttgctccgcgcttctccgttcgcgctctgccgttc

SEQ ID NO: 317423 - DNA, 54 bp, Artificial
  Synthetic oligonucleotide
actggtgactaccccacgtgaggagttgtactcactttacaatccaaaacaacc

SEQ ID NO: 317424 - DNA, 54 bp, Artificial
  Synthetic oligonucleotide
actggtgcagtataacccgttatacacgtaaaattatgagggattcgaattccc

SEQ ID NO: 317425 - DNA, 60 bp, Artificial
  Synthetic oligonucleotide
actggtgccctaccacatgacgtcatggccccattcatgtgcgctactactaatgacccg

SEQ ID NO: 317426 - DNA, 58 bp, Artificial
  Synthetic oligonucleotide
actggtgccctcggcttacttgattttgcactcgagctcgagttccgtaacttgacac

SEQ ID NO: 317427 - DNA, 59 bp, Artificial
  Synthetic oligonucleotide
actggtggagaacgccagaatgctaccgaaatcagagcatctgttgggggaatggtcgg

SEQ ID NO: 317428 - DNA, 60 bp, Artificial
  Synthetic oligonucleotide
actggtggagagcgccagaatgcaagcgaaattagagcatctgtcgggagaatggttgga

SEQ ID NO: 317429 - DNA, 60 bp, Artificial
  Synthetic oligonucleotide
actggtggagagcgccagaatgccactgaaatcagagcatctgttgggaggatggttggt

SEQ ID NO: 317430 - DNA, 54 bp, Artificial
  Synthetic oligonucleotide
actggtggccaatatgcctgtaaggaacaggcgttagttaggcgtttttacaaa

SEQ ID NO: 317431 - DNA, 59 bp, Artificial
  Synthetic oligonucleotide
actggtggcgctgtgtcattacgacccgcaggagtaacactatcaacacaatttacgga

SEQ ID NO: 317432 - DNA, 60 bp, Artificial
  Synthetic oligonucleotide
actggtggctcagaaggcactcgaccaaggcccagatgatagaactatcatatgggtgta

SEQ ID NO: 317433 - DNA, 55 bp, Artificial
  Synthetic oligonucleotide
actggtggggctgatgagtgtggcctttactacacagacatgacggcggttcgcc

SEQ ID NO: 317434 - DNA, 55 bp, Artificial
  Synthetic oligonucleotide
actggtggtgtctatgcatcgaaggaacaggcgataatcagaagttctacagagt

SEQ ID NO: 317435 - DNA, 55 bp, Artificial
  Synthetic oligonucleotide
actggtgtcatatttctagccggaggatcttctctattgaagactgtccaagatg

SEQ ID NO: 317436 - DNA, 56 bp, Artificial
  Synthetic oligonucleotide
actggtgtctatgatctatccggttacacggtccaacctgttggagttgtgtaccg

SEQ ID NO: 317437 - DNA, 56 bp, Artificial
  Synthetic oligonucleotide
actggtgtgaacgatactcagcggaagagttaagaggggcgtttaagtctcaaata

SEQ ID NO: 317438 - DNA, 57 bp, Artificial
  Synthetic oligonucleotide
actggttacacaaggcccagggacacaataatggcatatgttggggcaatactttgt

SEQ ID NO: 317439 - DNA, 53 bp, Artificial
  Synthetic oligonucleotide
actggttactagggcttaccctgagttcaatgtacaatttaccggtacaacca

SEQ ID NO: 317440 - DNA, 57 bp, Artificial
  Synthetic oligonucleotide
actggttactccttgatcctaatgacaccgttaccttcactttcaatggggcattca

SEQ ID NO: 317441 - DNA, 52 bp, Artificial
  Synthetic oligonucleotide
actggttataggtctggcggtaggattctggcttggagactcctatcgcgct

SEQ ID NO: 317442 - DNA, 60 bp, Artificial
  Synthetic oligonucleotide
actggttcttcatctaccaatttgccatccataactgattgatacatgatgcagtctaat

SEQ ID NO: 317443 - DNA, 59 bp, Artificial
  Synthetic oligonucleotide
actggttgtcataaaggaaacgccaattgtcagtggcatgattgggactcttaactcaa

SEQ ID NO: 317444 - DNA, 56 bp, Artificial
  Synthetic oligonucleotide
actggttgtgctcgccaccgctactcctccgggctccgtcactgtgccccatccta

SEQ ID NO: 317445 - DNA, 49 bp, Artificial
  Synthetic oligonucleotide
actggttgttaccgacggggagacacccttccccgaaccaaaagactac

SEQ ID NO: 317446 - DNA, 54 bp, Artificial
  Synthetic oligonucleotide
actggtttctacaataatcacatttaccattagtaaagtcggaagccccacagg

SEQ ID NO: 317447 - DNA, 56 bp, Artificial
  Synthetic oligonucleotide
actggtttgaactgtttcctaaacagtagagtcattggtctaagcaatgggttgta

SEQ ID NO: 317448 - DNA, 56 bp, Artificial
  Synthetic oligonucleotide
actggttttaggtctctcacccctttaccatgtctgggattcttgatcggtgcacg

SEQ ID NO: 317449 - DNA, 55 bp, Artificial
  Synthetic oligonucleotide
actgtaaagaatgtggtgctgagagcatctggatccatcgagggccatcaatttt

SEQ ID NO: 317450 - DNA, 55 bp, Artificial
  Synthetic oligonucleotide
actgtaaagatattagtgacctgaaacagtatgatagcgatgagccagagccccg

SEQ ID NO: 317451 - DNA, 54 bp, Artificial
  Synthetic oligonucleotide
actgtaacaacccgattactgggagtccgggagctcctggagtcaaaggattcg

SEQ ID NO: 317452 - DNA, 54 bp, Artificial
  Synthetic oligonucleotide
actgtaacatacaatcttttagttccattgtttgagagtaagttagaccggccg

SEQ ID NO: 317453 - DNA, 54 bp, Artificial
  Synthetic oligonucleotide
actgtaaccgacatccacttgttttccgcctccgacttcgtcgtcattgtaaat

SEQ ID NO: 317454 - DNA, 59 bp, Artificial
  Synthetic oligonucleotide
actgtaactcacccagacacagcaggaggcctttctcgcacgcctcactggccagggca

SEQ ID NO: 317455 - DNA, 60 bp, Artificial
  Synthetic oligonucleotide
actgtaagattgcccctttaatggtggcatacatgttggaaagagagctggttcgcaaga

SEQ ID NO: 317456 - DNA, 57 bp, Artificial
  Synthetic oligonucleotide
actgtaagctcactttagtcctagtgaaaaatggaggactggtaaatggatatgtaa

SEQ ID NO: 317457 - DNA, 54 bp, Artificial
  Synthetic oligonucleotide
actgtaataatccgatcactgggagtccgggagcccctggggtcaaaggattcg

SEQ ID NO: 317458 - DNA, 60 bp, Artificial
  Synthetic oligonucleotide
actgtaatacaacacagctgtttaatagcacttggcctaatagtagtgagaattccaata

SEQ ID NO: 317459 - DNA, 58 bp, Artificial
  Synthetic oligonucleotide
actgtaatacagcacaactgtttaatagtacttggaatactaatgatactagggatag

SEQ ID NO: 317460 - DNA, 55 bp, Artificial
  Synthetic oligonucleotide
actgtaatacatcaaaactgtttaatggaacctggaatagtactaaaagagcaaa

SEQ ID NO: 317461 - DNA, 55 bp, Artificial
  Synthetic oligonucleotide
actgtacaagagtcgtgacattccctatgtctcctggcatttactcctgtctgag

SEQ ID NO: 317462 - DNA, 58 bp, Artificial
  Synthetic oligonucleotide
actgtacactttcgtttctatcaatatcttgagggtatcctccaggttttcatcacaa

SEQ ID NO: 317463 - DNA, 60 bp, Artificial
  Synthetic oligonucleotide
actgtacatcaagactccagcttgcttgttaccgctcaatgattacatgagagcgcaaca

SEQ ID NO: 317464 - DNA, 58 bp, Artificial
  Synthetic oligonucleotide
actgtaccatattgcttgccattccacccgaaggaaggaggagatgtgaaatcggacc

SEQ ID NO: 317465 - DNA, 56 bp, Artificial
  Synthetic oligonucleotide
actgtaccctggaactctagttggagtaatagatctgtagagtatatttgggggaa

SEQ ID NO: 317466 - DNA, 59 bp, Artificial
  Synthetic oligonucleotide
actgtacctctctcagcatctgcacccaattgtcgtgaaaacccttccattcttggccc

SEQ ID NO: 317467 - DNA, 57 bp, Artificial
  Synthetic oligonucleotide
actgtaccttttttggcccgcagcattctgattaccagcaatcagaccccgttggaa

SEQ ID NO: 317468 - DNA, 57 bp, Artificial
  Synthetic oligonucleotide
actgtacgctctcatgggttgccgcatccccaacactagccgccaccctccggtcgg

SEQ ID NO: 317469 - DNA, 55 bp, Artificial
  Synthetic oligonucleotide
actgtacgttatagtagggttgggcaaaaggctacacttcgtactcgcagtggaa

SEQ ID NO: 317470 - DNA, 60 bp, Artificial
  Synthetic oligonucleotide
actgtactgactatctcatagtttcccgttcccgagcatttagccatggatgaaaatctc

SEQ ID NO: 317471 - DNA, 58 bp, Artificial
  Synthetic oligonucleotide
actgtacttcttgaagcccacgactcaccaggcctgatttcaattgggcctcgaagcc

SEQ ID NO: 317472 - DNA, 55 bp, Artificial
  Synthetic oligonucleotide
actgtactttcaatgtgaccacagaaataagagataagaagcagaaagtacgggc

SEQ ID NO: 317473 - DNA, 58 bp, Artificial
  Synthetic oligonucleotide
actgtagacacaaaaatagatattacccaattaaagttactagccatgattggtatga

SEQ ID NO: 317474 - DNA, 57 bp, Artificial
  Synthetic oligonucleotide
actgtagagagtacagcgcaggttgagttccccatttacggtggactctacctccca

SEQ ID NO: 317475 - DNA, 58 bp, Artificial
  Synthetic oligonucleotide
actgtagcagctgagtttctcgagtcgttgttagcggagaaaacctcataactcggct

SEQ ID NO: 317476 - DNA, 55 bp, Artificial
  Synthetic oligonucleotide
actgtagcccagccatgcagcccagggacacataactccacagcaatagagtgtg

SEQ ID NO: 317477 - DNA, 58 bp, Artificial
  Synthetic oligonucleotide
actgtagcggtgaaaacgtgtgcccaactgcttgtgtgtcaggggtttatcttgatcc

SEQ ID NO: 317478 - DNA, 55 bp, Artificial
  Synthetic oligonucleotide
actgtaggactaacattacgaattgaatctgcaatttgtgaatcagtgcttgctg

SEQ ID NO: 317479 - DNA, 60 bp, Artificial
  Synthetic oligonucleotide
actgtaggatgtacagaaagatgcgcgggcctgagcgcatacacaaaatcgtctcttaaa

SEQ ID NO: 317480 - DNA, 60 bp, Artificial
  Synthetic oligonucleotide
actgtaggtatcgttatcacagaatgaagacaagaacagctttgctgaacatacttagca

SEQ ID NO: 317481 - DNA, 60 bp, Artificial
  Synthetic oligonucleotide
actgtaggtgcaagtggagtctatccttcattgatgtctagagttgtttataaacattat

SEQ ID NO: 317482 - DNA, 54 bp, Artificial
  Synthetic oligonucleotide
actgtagttactggccaaggtcttacgataaacggaacagccctacaaactaga

SEQ ID NO: 317483 - DNA, 50 bp, Artificial
  Synthetic oligonucleotide
actgtatagcctgtcacacaaccttcttgggttagtccagatcgggatac

SEQ ID NO: 317484 - DNA, 51 bp, Artificial
  Synthetic oligonucleotide
actgtatatctgattgcacctgtactgacatgcatgtcaattagaagttgt

SEQ ID NO: 317485 - DNA, 59 bp, Artificial
  Synthetic oligonucleotide
actgtatcaaaacggaaccgcggatataatcgctccagctatcgaagcgtcctctactg

SEQ ID NO: 317486 - DNA, 59 bp, Artificial
  Synthetic oligonucleotide
actgtatccggccttaagcatccttacgaatctcttccgtctcattatgcgggtatcgc

SEQ ID NO: 317487 - DNA, 52 bp, Artificial
  Synthetic oligonucleotide
actgtatcgggaagccttagagtcgccagaacattgttcacccaaccataca

SEQ ID NO: 317488 - DNA, 55 bp, Artificial
  Synthetic oligonucleotide
actgtatgcgttggctctgaagcctctagctccattgggtgcactgcgcatgtgc

SEQ ID NO: 317489 - DNA, 60 bp, Artificial
  Synthetic oligonucleotide
actgtatggaatatggcagttatagcacattgttatgagtttcgtgacctaaaagttgcg

SEQ ID NO: 317490 - DNA, 58 bp, Artificial
  Synthetic oligonucleotide
actgtatgggcagaaagggcaggcatgggactagccaatcgagtcccaccggtggtag

SEQ ID NO: 317491 - DNA, 56 bp, Artificial
  Synthetic oligonucleotide
actgtatgggtttaaaaatttgttcgtttctgtagtgaaatgaacatccacagatg

SEQ ID NO: 317492 - DNA, 60 bp, Artificial
  Synthetic oligonucleotide
actgtatgttgggaattatgccggtgctaatcctaatacagcactatccctgtacagtcg

SEQ ID NO: 317493 - DNA, 60 bp, Artificial
  Synthetic oligonucleotide
actgtattatcttgatacctctgacacatggcacaaaaccaccagttcggtggattatga

SEQ ID NO: 317494 - DNA, 57 bp, Artificial
  Synthetic oligonucleotide
actgtattcatcactctatattcgaatttctttctacgacttgactgcaggacggac

SEQ ID NO: 317495 - DNA, 55 bp, Artificial
  Synthetic oligonucleotide
actgtattgctaaaagtatatataagtgaagtccaactttcaggccgataggctg

SEQ ID NO: 317496 - DNA, 60 bp, Artificial
  Synthetic oligonucleotide
actgtatttgaaccagaatagagttatcttctttcaatcgcacgtctatgatgaattcca

SEQ ID NO: 317497 - DNA, 51 bp, Artificial
  Synthetic oligonucleotide
actgtcaactttgcttcacgaagaaaggcttaggtatttcctatggcagga

SEQ ID NO: 317498 - DNA, 60 bp, Artificial
  Synthetic oligonucleotide
actgtcaagagcagtacatggtcatttgcagtatgccaaggcttatattattacacaagt

SEQ ID NO: 317499 - DNA, 54 bp, Artificial
  Synthetic oligonucleotide
actgtcaatgacatacaaaagttagtgggaaaattaaactgggcaagtcaaatt

SEQ ID NO: 317500 - DNA, 51 bp, Artificial
  Synthetic oligonucleotide
actgtcaattgtatctctcttccccttatgcctgtccacgacctcccaaaa

SEQ ID NO: 317501 - DNA, 58 bp, Artificial
  Synthetic oligonucleotide
actgtcaatttggtgacgcatgtggaagggttatgccgcacctaaaggcaagtataaa

SEQ ID NO: 317502 - DNA, 60 bp, Artificial
  Synthetic oligonucleotide
actgtcacacctagatatcatgaagaattctgagtccttgaatagatcttcttcattttg

SEQ ID NO: 317503 - DNA, 60 bp, Artificial
  Synthetic oligonucleotide
actgtcacggatcagacgctatagagttcagaaatgtgcccttgtacgtcgagattacgg

SEQ ID NO: 317504 - DNA, 60 bp, Artificial
  Synthetic oligonucleotide
actgtcactggaggtcagtatgcgagcaaggaacaagccctggtcaagaagtatatgaag

SEQ ID NO: 317505 - DNA, 50 bp, Artificial
  Synthetic oligonucleotide
actgtcagactgggctgctgacggcctcaaggacctagcggtggccctag

SEQ ID NO: 317506 - DNA, 54 bp, Artificial
  Synthetic oligonucleotide
actgtcatgacccttgtacgtaataatgaacctgcgaccccggtgtacgttgat

SEQ ID NO: 317507 - DNA, 60 bp, Artificial
  Synthetic oligonucleotide
actgtcatgatggagcgttatgtgtcattggctatagatgcgtaccctctaacaaagcat

SEQ ID NO: 317508 - DNA, 55 bp, Artificial
  Synthetic oligonucleotide
actgtccagataataaaactcctcccctttgctgctgccccaccggaacaaagta

SEQ ID NO: 317509 - DNA, 58 bp, Artificial
  Synthetic oligonucleotide
actgtcccaactttgcaagtgttgttctcggaaatgcctcaggcttaggcataatcgg

SEQ ID NO: 317510 - DNA, 55 bp, Artificial
  Synthetic oligonucleotide
actgtccccttggttataacggtggcaaccctgagaacggctaagatgactaatg

SEQ ID NO: 317511 - DNA, 55 bp, Artificial
  Synthetic oligonucleotide
actgtccctctgagtgcgcgcattttggtttcagtttgttccgggctgatcgctc

SEQ ID NO: 317512 - DNA, 59 bp, Artificial
  Synthetic oligonucleotide
actgtccgaagcaaaactgtttactctttcatggtccacctgacactggcaagtctatg

SEQ ID NO: 317513 - DNA, 58 bp, Artificial
  Synthetic oligonucleotide
actgtccgagtctgaggccccttgttttacgtcaccagcggaagcataccatgatttc

SEQ ID NO: 317514 - DNA, 60 bp, Artificial
  Synthetic oligonucleotide
actgtccgcgataccagattcccatcagtagcaggtcgaaccagccgggtgtacatcaag

SEQ ID NO: 317515 - DNA, 55 bp, Artificial
  Synthetic oligonucleotide
actgtccgtcgtgtggacatgttgctcacacccgtcgcgcacatttcatggacga

SEQ ID NO: 317516 - DNA, 50 bp, Artificial
  Synthetic oligonucleotide
actgtccgtgcaacttgtgcagtccgcaccggatgccccaacacaacgtg

SEQ ID NO: 317517 - DNA, 58 bp, Artificial
  Synthetic oligonucleotide
actgtcctgaacttttgcttatgcttgaaggtcaaccaggtggggcacgcttaataga

SEQ ID NO: 317518 - DNA, 57 bp, Artificial
  Synthetic oligonucleotide
actgtcctgctggttctcacaaacgacgacaacgagaatctgtaattcgaagtccgg

SEQ ID NO: 317519 - DNA, 55 bp, Artificial
  Synthetic oligonucleotide
actgtcctggtgtccggacgcagcggtttcaggcaccagcccaaggcttgatgtg

SEQ ID NO: 317520 - DNA, 56 bp, Artificial
  Synthetic oligonucleotide
actgtccttactcaggaagaatattgtaaccatcacaacagagaaaggagagttca

SEQ ID NO: 317521 - DNA, 50 bp, Artificial
  Synthetic oligonucleotide
actgtcgaagaaccagttgctcatttcctgcaagagaaagatagtaccgg

SEQ ID NO: 317522 - DNA, 59 bp, Artificial
  Synthetic oligonucleotide
actgtcgaggtacagagtgttgctttgcacgacacctttgggtgaacctcagtcttaga

SEQ ID NO: 317523 - DNA, 58 bp, Artificial
  Synthetic oligonucleotide
actgtcgcctccttcatgcaggaaactgtcatgctctacggcacgatggccaggtatc

SEQ ID NO: 317524 - DNA, 55 bp, Artificial
  Synthetic oligonucleotide
actgtcgcgatttcagaagaaccgaaccgataatatagttaaaggtgacctgcga

SEQ ID NO: 317525 - DNA, 60 bp, Artificial
  Synthetic oligonucleotide
actgtcggattaacagagtgcccgagttttatgacatcaattaaggcatgtgatcttgct

SEQ ID NO: 317526 - DNA, 50 bp, Artificial
  Synthetic oligonucleotide
actgtcgtcttaacgagctcgttgagttgggccagcgacagtgttatgtt

SEQ ID NO: 317527 - DNA, 56 bp, Artificial
  Synthetic oligonucleotide
actgtctaccacggagctggcaacaagaccctagccggctcacggggtccggtcac

SEQ ID NO: 317528 - DNA, 60 bp, Artificial
  Synthetic oligonucleotide
actgtctacctatggatagcatgcttagacataataacctaacactactcattattcctc

SEQ ID NO: 317529 - DNA, 59 bp, Artificial
  Synthetic oligonucleotide
actgtctacgctaccctacagatgtggcccttactcctactagtattggctctacctca

SEQ ID NO: 317530 - DNA, 57 bp, Artificial
  Synthetic oligonucleotide
actgtctagctgcgggcattagactggaaaactaatgctctttgggtaaccactaaa

SEQ ID NO: 317531 - DNA, 52 bp, Artificial
  Synthetic oligonucleotide
actgtctcctatgtgttcagtaatggtactgtggtgacgagaactgaccctg

SEQ ID NO: 317532 - DNA, 60 bp, Artificial
  Synthetic oligonucleotide
actgtgaaatctgtaatagtctggaacgaaatgttggatcaggctagtgtaggttccata

SEQ ID NO: 317533 - DNA, 54 bp, Artificial
  Synthetic oligonucleotide
actgtgacgtaacacgcggacctgattgaggacagtcaaaaggggggggctacg

SEQ ID NO: 317534 - DNA, 57 bp, Artificial
  Synthetic oligonucleotide
actgtgacgtacaatcccaaagaagtgcgtttcgggagtggtgactaatggcgtaca

SEQ ID NO: 317535 - DNA, 57 bp, Artificial
  Synthetic oligonucleotide
actgtgagccttgtattttacgaatacacagtttttatcctaacaggctcgttcaca

SEQ ID NO: 317536 - DNA, 55 bp, Artificial
  Synthetic oligonucleotide
actgtgataagagtgcaataccacttacatggactgggatgattgatttacctgg

SEQ ID NO: 317537 - DNA, 50 bp, Artificial
  Synthetic oligonucleotide
actgtgatatgtaattccatcttcaatgaaattctcatacgctacagttt

SEQ ID NO: 317538 - DNA, 55 bp, Artificial
  Synthetic oligonucleotide
actgtgatgttcaaattggttcgtgataggcgtccttttggaacgccccaggact

SEQ ID NO: 317539 - DNA, 55 bp, Artificial
  Synthetic oligonucleotide
actgtgattgactccacgctcggtccactggcgggtgcgagtaacaggactgttg

SEQ ID NO: 317540 - DNA, 59 bp, Artificial
  Synthetic oligonucleotide
actgtgcaccccatttacttaggctcgatgcattacgatattacttatgagacgttaaa

SEQ ID NO: 317541 - DNA, 58 bp, Artificial
  Synthetic oligonucleotide
actgtgcagttactctcgtttttgcctgctgacttctttccttcggtacgagatcttc

SEQ ID NO: 317542 - DNA, 53 bp, Artificial
  Synthetic oligonucleotide
actgtgcatggtgttcgtagttgtgcgccaactcttttcgtgtgtcgtcgtag

SEQ ID NO: 317543 - DNA, 60 bp, Artificial
  Synthetic oligonucleotide
actgtgccattactcatattgactatggtgtcataaaggttcaattacgtgattatcagc

SEQ ID NO: 317544 - DNA, 54 bp, Artificial
  Synthetic oligonucleotide
actgtgccctggaactctagctggagtaatagatctctagatgagatttggggg

SEQ ID NO: 317545 - DNA, 60 bp, Artificial
  Synthetic oligonucleotide
actgtgccgcggactgtgttcatacgtcccatgaatatgtcatgattaccgtacatgtac

SEQ ID NO: 317546 - DNA, 60 bp, Artificial
  Synthetic oligonucleotide
actgtgccgttgatgttgcagctgaaaatcacctcgtcatatcaggtaaacgatctgttg

SEQ ID NO: 317547 - DNA, 55 bp, Artificial
  Synthetic oligonucleotide
actgtgcctgactccacgctcggtccactggcgagtgttagtagcggcactgttg

SEQ ID NO: 317548 - DNA, 55 bp, Artificial
  Synthetic oligonucleotide
actgtgcctgtctttggaggcgtagccagagtgaatgttggaggtactttgtacc

SEQ ID NO: 317549 - DNA, 54 bp, Artificial
  Synthetic oligonucleotide
actgtgctagcagagcatgagggcaaaccctactacttaccatacccagatgtc

SEQ ID NO: 317550 - DNA, 59 bp, Artificial
  Synthetic oligonucleotide
actgtgctgggccacccttaatgaggtggcgagaggagccccgggcactgccaccagcg

SEQ ID NO: 317551 - DNA, 57 bp, Artificial
  Synthetic oligonucleotide
actgtgcttggtaataagacctttcggacgacggtggttgatggcgcccatcttgaa

SEQ ID NO: 317552 - DNA, 51 bp, Artificial
  Synthetic oligonucleotide
actgtggacgcagactacaaaaagtgcactaagggtctttccattgctgac

SEQ ID NO: 317553 - DNA, 60 bp, Artificial
  Synthetic oligonucleotide
actgtggagctcacaacagcagatgtaataccagggtcggtctggaatctaggcaaatat

SEQ ID NO: 317554 - DNA, 50 bp, Artificial
  Synthetic oligonucleotide
actgtggagctgattgaacctcaacaagccttgttttcatcccaactgta

SEQ ID NO: 317555 - DNA, 52 bp, Artificial
  Synthetic oligonucleotide
actgtggattgattcatttaaaacaaggtttgatcttagagcaagggtttac

SEQ ID NO: 317556 - DNA, 50 bp, Artificial
  Synthetic oligonucleotide
actgtggcccttatcccgtctgtcgggaccagcgacgtcgtgcaagtgaa

SEQ ID NO: 317557 - DNA, 56 bp, Artificial
  Synthetic oligonucleotide
actgtgggaaaaccccatctcaattggcctcatggagtcaaagtttcctttctggc

SEQ ID NO: 317558 - DNA, 58 bp, Artificial
  Synthetic oligonucleotide
actgtgggagaggtgcgccgccgaagtgcagcaaacgtatctttccaagtccctccaa

SEQ ID NO: 317559 - DNA, 53 bp, Artificial
  Synthetic oligonucleotide
actgtggtaattgtggaccatcttggcaacaatagaaccgtgagtattgataa

SEQ ID NO: 317560 - DNA, 60 bp, Artificial
  Synthetic oligonucleotide
actgtggtatagttccccaaaacaggctcgagatggccatgtggaggagctcggtatcag

SEQ ID NO: 317561 - DNA, 56 bp, Artificial
  Synthetic oligonucleotide
actgtggtccctggtttcggacattcccaactgctggatcgaccgcgtaccaggta

SEQ ID NO: 317562 - DNA, 55 bp, Artificial
  Synthetic oligonucleotide
actgtggtcgcggatcaggagctcgctgtcgagagctccgttgagggccgaggaa

SEQ ID NO: 317563 - DNA, 53 bp, Artificial
  Synthetic oligonucleotide
actgtggtgttgaacccgggtcttaaaccagaccttactggtacatccaaatc

SEQ ID NO: 317564 - DNA, 50 bp, Artificial
  Synthetic oligonucleotide
actgtggttcgatatgcatatgtgttctagagttgatgatcggcatactt

SEQ ID NO: 317565 - DNA, 60 bp, Artificial
  Synthetic oligonucleotide
actgtgtaaactcctcaggggagccaaagcactaacagatataataacactgactgagga

SEQ ID NO: 317566 - DNA, 60 bp, Artificial
  Synthetic oligonucleotide
actgtgtaatccttggctctatgcgcttacagttgaaactgaacatgcgcgataagaaag

SEQ ID NO: 317567 - DNA, 54 bp, Artificial
  Synthetic oligonucleotide
actgtgtagtttggtagttgagaacgaggattcagattaccggtccgacccacc

SEQ ID NO: 317568 - DNA, 60 bp, Artificial
  Synthetic oligonucleotide
actgtgtatgcggggccaaatttgaaacatctgatagaatgaggatacacaggcagtctg

SEQ ID NO: 317569 - DNA, 60 bp, Artificial
  Synthetic oligonucleotide
actgtgtccagacggaagacacaaccattcagctgttttcgcatcaacaggcaaaagatg

SEQ ID NO: 317570 - DNA, 55 bp, Artificial
  Synthetic oligonucleotide
actgtgtcgaagttagtcgaaaagactactgactaggcacgcgcaaaggtgtggc

SEQ ID NO: 317571 - DNA, 60 bp, Artificial
  Synthetic oligonucleotide
actgtgtgtgcagccactacatcatctctttcagacacatataaggccacagaatataaa

SEQ ID NO: 317572 - DNA, 57 bp, Artificial
  Synthetic oligonucleotide
actgtgttgttgactttggctatactatgcgaccctccctcgatctaaaccacaaaa

SEQ ID NO: 317573 - DNA, 55 bp, Artificial
  Synthetic oligonucleotide
actgtgtttgctcctgtcactagctccacaccaccggccgcggagctacggggat

SEQ ID NO: 317574 - DNA, 52 bp, Artificial
  Synthetic oligonucleotide
actgttaaatatgtccaatcactgaggtatcatacgccatttagttggttgt

SEQ ID NO: 317575 - DNA, 59 bp, Artificial
  Synthetic oligonucleotide
actgttaatacattcttgaactgtcgccttaacaatctcgcttaattgggtcattgaca

SEQ ID NO: 317576 - DNA, 60 bp, Artificial
  Synthetic oligonucleotide
actgttacagacgctgtgtttctcagggacatggtatgtcttcttgtaaagctcacttct

SEQ ID NO: 317577 - DNA, 60 bp, Artificial
  Synthetic oligonucleotide
actgttacctacaaggtggctctcgactaccattttgttgcgagttcagcagcctgcaag

SEQ ID NO: 317578 - DNA, 53 bp, Artificial
  Synthetic oligonucleotide
actgttacgtgtcctaatgcggaatgtcaatctattcaattagatcacggatc

SEQ ID NO: 317579 - DNA, 55 bp, Artificial
  Synthetic oligonucleotide
actgttagattgctaagggacaccacacacatcaagcaagatgctatgccccagg

SEQ ID NO: 317580 - DNA, 55 bp, Artificial
  Synthetic oligonucleotide
actgttagcacagagcagtggagtgaaggtgagtggtgcgcacactgaagtgcgc

SEQ ID NO: 317581 - DNA, 60 bp, Artificial
  Synthetic oligonucleotide
actgttagccttgaaagattcaggtcctagggcaaatatagtcacagactcacaatatgc

SEQ ID NO: 317582 - DNA, 57 bp, Artificial
  Synthetic oligonucleotide
actgttagcgcacatagttacgaagaaattcccatggacacatttgtggtaactggg

SEQ ID NO: 317583 - DNA, 56 bp, Artificial
  Synthetic oligonucleotide
actgttatgtacgggggttccgtccatgaaggccggtctatgctcgctaaacgcga

SEQ ID NO: 317584 - DNA, 60 bp, Artificial
  Synthetic oligonucleotide
actgttattccaaacgatatgttcataagagaatccttagttgcatgtcaattagcgata

SEQ ID NO: 317585 - DNA, 55 bp, Artificial
  Synthetic oligonucleotide
actgttcaagaggactcgggaccaaccccctcttgcctctggctccgggggagca

SEQ ID NO: 317586 - DNA, 60 bp, Artificial
  Synthetic oligonucleotide
actgttcaagcctccaagctgtgccttggatggctttagggcatggacattgacccgtat

SEQ ID NO: 317587 - DNA, 55 bp, Artificial
  Synthetic oligonucleotide
actgttcaaggccgtgggactttcacttgtcggtgtctacctctaaaggtcacta

SEQ ID NO: 317588 - DNA, 55 bp, Artificial
  Synthetic oligonucleotide
actgttcaccgacggccttgcagccgtccttatttatcagcacgttcccaccggt

SEQ ID NO: 317589 - DNA, 60 bp, Artificial
  Synthetic oligonucleotide
actgttcatcgtttccccaccttggacagtcatgcaagcaattgtgagagctggcatgga

SEQ ID NO: 317590 - DNA, 60 bp, Artificial
  Synthetic oligonucleotide
actgttcatgagtctcaaggcatctcagaagatcatgtgacccttgttaggctgaagagc

SEQ ID NO: 317591 - DNA, 59 bp, Artificial
  Synthetic oligonucleotide
actgttccggagattcactcgtgtatggtggtggcatattgacaagttggaacaagtcc

SEQ ID NO: 317592 - DNA, 50 bp, Artificial
  Synthetic oligonucleotide
actgttccgttgacaacctcgaccggccatccccacccactcagcacggt

SEQ ID NO: 317593 - DNA, 55 bp, Artificial
  Synthetic oligonucleotide
actgttccttctcctcttggaactcaaacatggatacacccggtttgttctcttc

SEQ ID NO: 317594 - DNA, 60 bp, Artificial
  Synthetic oligonucleotide
actgttcgactagcggagatagtggtgaatcgtctaatcgtcgagtgaagcgcgactcat

SEQ ID NO: 317595 - DNA, 52 bp, Artificial
  Synthetic oligonucleotide
actgttcgcaggaatctcttcttcgtgtgcctcgacgttgctatgcttgctc

SEQ ID NO: 317596 - DNA, 54 bp, Artificial
  Synthetic oligonucleotide
actgttcggttgagtaagacatggggggccttgagtaaaggggctagtgcctcg

SEQ ID NO: 317597 - DNA, 57 bp, Artificial
  Synthetic oligonucleotide
actgttcgtgcacttattctgtcaagacctatgcaccctagttcgtcaagcaaacta

SEQ ID NO: 317598 - DNA, 55 bp, Artificial
  Synthetic oligonucleotide
actgttctaaatctggtgaggtttggtcacacggagaaccatgtaatcaaggagc

SEQ ID NO: 317599 - DNA, 60 bp, Artificial
  Synthetic oligonucleotide
actgttctcagccaacattgatgctatcacaagcctcagcgttgggggagagctcgtgtt

SEQ ID NO: 317600 - DNA, 60 bp, Artificial
  Synthetic oligonucleotide
actgttcttgagtatttggtgtctttcggagtgtggattcgcactcctcccgcatataga

SEQ ID NO: 317601 - DNA, 55 bp, Artificial
  Synthetic oligonucleotide
actgttgaaaactacggcggtgagacacaagtccaacgacgtcagcacaccgacg

SEQ ID NO: 317602 - DNA, 53 bp, Artificial
  Synthetic oligonucleotide
actgttgaaactaagcctggaccagatttcaagttccatctactaaaaccccc

SEQ ID NO: 317603 - DNA, 55 bp, Artificial
  Synthetic oligonucleotide
actgttgaagatgtcggtcgctttgaaggctttgcggggtctgctgaaagtgcag

SEQ ID NO: 317604 - DNA, 60 bp, Artificial
  Synthetic oligonucleotide
actgttgacttatccgcagcaagtgattcaatcagccttaagctggtggagttactacta

SEQ ID NO: 317605 - DNA, 54 bp, Artificial
  Synthetic oligonucleotide
actgttgcaccagctgagctacccttttgaactgtgctctgtgactctttctcc

SEQ ID NO: 317606 - DNA, 59 bp, Artificial
  Synthetic oligonucleotide
actgttgctctgctttcggcgataactgggccgacagtatcaccaggaaccggactcaa

SEQ ID NO: 317607 - DNA, 60 bp, Artificial
  Synthetic oligonucleotide
actgttgcttgaatcttgtttagagcagttcgcggctaacgtgagagctagaccagcgca

SEQ ID NO: 317608 - DNA, 55 bp, Artificial
  Synthetic oligonucleotide
actgttggcactaccccccaaaaccttgtggcatcgtgccggcacgaaacgtatg

SEQ ID NO: 317609 - DNA, 55 bp, Artificial
  Synthetic oligonucleotide
actgttggggcactaatgactgaatgtagactatttcctgggaaaataaaagtgg

SEQ ID NO: 317610 - DNA, 57 bp, Artificial
  Synthetic oligonucleotide
actgttggtacgggtactcgtgttgtacggcctcctgtacccattgatgtgcttggc

SEQ ID NO: 317611 - DNA, 59 bp, Artificial
  Synthetic oligonucleotide
actgttgtaacagcaccccacccagtgattgtcatttgtgactcctcccgagctttcta

SEQ ID NO: 317612 - DNA, 60 bp, Artificial
  Synthetic oligonucleotide
actgttgtggatacaactcgcagcactaacttaaccttgtgtgcatccactgagtctgtg

SEQ ID NO: 317613 - DNA, 60 bp, Artificial
  Synthetic oligonucleotide
actgttgtggatggccagtgtggagcctcatcggatagcggcctctatcatgctggagtt

SEQ ID NO: 317614 - DNA, 56 bp, Artificial
  Synthetic oligonucleotide
actgttgtgtgggatgttggtgggaactggttaacgcatgtaaagtattccactaa

SEQ ID NO: 317615 - DNA, 53 bp, Artificial
  Synthetic oligonucleotide
actgttgttagacgacggaaccgaggcaggtcccctagaagaagaactccctc

SEQ ID NO: 317616 - DNA, 60 bp, Artificial
  Synthetic oligonucleotide
actgttgttcacccacctacagctgaactcacagcaccgcgtggccattttagctggctt

SEQ ID NO: 317617 - DNA, 54 bp, Artificial
  Synthetic oligonucleotide
actgttgttccagccgatggccatgtggttcgcacttaccggtttttcgatgcc

SEQ ID NO: 317618 - DNA, 54 bp, Artificial
  Synthetic oligonucleotide
actgttgtttctctgatgtctacgcttctataggaactgagtacagctacattg

SEQ ID NO: 317619 - DNA, 55 bp, Artificial
  Synthetic oligonucleotide
actgtttaatgacacaggatccaatggcactatcactaatgacactattactctc

SEQ ID NO: 317620 - DNA, 58 bp, Artificial
  Synthetic oligonucleotide
actgtttatagcagcctgcattggtcggtcgaagctagacacaacctcgctctttgag

SEQ ID NO: 317621 - DNA, 57 bp, Artificial
  Synthetic oligonucleotide
actgtttcaagaactcccacatgaccggagctcacccctggccttatttgaactgac

SEQ ID NO: 317622 - DNA, 60 bp, Artificial
  Synthetic oligonucleotide
actgtttccggtgcttcagagagactactagccactattgatgtcagtttagtgtcacat

SEQ ID NO: 317623 - DNA, 55 bp, Artificial
  Synthetic oligonucleotide
actgtttggacagtatctttaccgtcggtgcccggaagggaatatccactgagtg

SEQ ID NO: 317624 - DNA, 55 bp, Artificial
  Synthetic oligonucleotide
actgtttggcggcaccccgcgtacttcgcttcctcctgctcggtaagatcccacc

SEQ ID NO: 317625 - DNA, 58 bp, Artificial
  Synthetic oligonucleotide
actgttttaacactgattgtagacttctccacaaaagaggcgtgcgattcgtttgcaa

SEQ ID NO: 317626 - DNA, 55 bp, Artificial
  Synthetic oligonucleotide
actgttttcatagtcacaacgaccatccactattggaactagtgtgatgcccgca

SEQ ID NO: 317627 - DNA, 55 bp, Artificial
  Synthetic oligonucleotide
actgttttcgaacgcagtgccgaggcctacatggtccacatttgcagaggtttgt

SEQ ID NO: 317628 - DNA, 60 bp, Artificial
  Synthetic oligonucleotide
actgtttttatcaactctactatctgagagtgagaggcctaaacaacattgtcctataca

SEQ ID NO: 317629 - DNA, 60 bp, Artificial
  Synthetic oligonucleotide
acttaaaaatttcacagctgcagtgcagagatgctgtcagatgaaagatagtgccaaaac

SEQ ID NO: 317630 - DNA, 55 bp, Artificial
  Synthetic oligonucleotide
acttaaaacgaattcttccatagtaagtacagcatcaacttctcactttcaatgt

SEQ ID NO: 317631 - DNA, 55 bp, Artificial
  Synthetic oligonucleotide
acttaaaactggagggggagtgcgtgtagacagtgtaaataggcgtcttatactc

SEQ ID NO: 317632 - DNA, 60 bp, Artificial
  Synthetic oligonucleotide
acttaaaagcaaggccgacctacggtgcaggtgagatcactgtgctggttgaggttgctg

SEQ ID NO: 317633 - DNA, 50 bp, Artificial
  Synthetic oligonucleotide
acttaaacaacggaggactagcgtatcccttcgcatagggtttgagttag

SEQ ID NO: 317634 - DNA, 56 bp, Artificial
  Synthetic oligonucleotide
acttaaacaattagtaccattaactagaaatgctggagccgatagtatgactgaaa

SEQ ID NO: 317635 - DNA, 55 bp, Artificial
  Synthetic oligonucleotide
acttaaaccacctggatattgtagagccgacaggacagacagcagattggctgag

SEQ ID NO: 317636 - DNA, 60 bp, Artificial
  Synthetic oligonucleotide
acttaaactgtaagtggctgagccattcatttactcagggcattatattatcagggtcat

SEQ ID NO: 317637 - DNA, 55 bp, Artificial
  Synthetic oligonucleotide
acttaaagtgtatagaaatgatcaagttgttgcatcttcagaaggagaagggcgt

SEQ ID NO: 317638 - DNA, 53 bp, Artificial
  Synthetic oligonucleotide
acttaaatgtcgttgttaaccgggacctatcctttcaagatctaagtgataac

SEQ ID NO: 317639 - DNA, 51 bp, Artificial
  Synthetic oligonucleotide
acttaacaagacgttagcagccggtcgtccaactattaaccacccaacctt

SEQ ID NO: 317640 - DNA, 58 bp, Artificial
  Synthetic oligonucleotide
acttaacatccaattacatgacaaattacgcgatcatttatttcaaggctcttcgtaa

SEQ ID NO: 317641 - DNA, 55 bp, Artificial
  Synthetic oligonucleotide
acttaaccccgttgtgtccattattaagatctttggacatagcgcacctctggcg

SEQ ID NO: 317642 - DNA, 55 bp, Artificial
  Synthetic oligonucleotide
acttaaccctgatggagatacaccatgtccgaagtacaaaccgcctctaccgtta

SEQ ID NO: 317643 - DNA, 58 bp, Artificial
  Synthetic oligonucleotide
acttaacgcttttgtgacacaaactctcactagacaagctgaggttagagccagcaga

SEQ ID NO: 317644 - DNA, 54 bp, Artificial
  Synthetic oligonucleotide
acttaacggttaagcaaagcatatggataagaatctttcttccgaaggaaggaa

SEQ ID NO: 317645 - DNA, 51 bp, Artificial
  Synthetic oligonucleotide
acttaactaagggagagtttattttagtaattcctaccgaaatgacagaaa

SEQ ID NO: 317646 - DNA, 53 bp, Artificial
  Synthetic oligonucleotide
acttaacttaacacgtaaagacaatcacggaactgaactaacttccggctgta

SEQ ID NO: 317647 - DNA, 55 bp, Artificial
  Synthetic oligonucleotide
acttaacttaattgaaacggggctatctccattagatgacgttgtgaccattaga

SEQ ID NO: 317648 - DNA, 51 bp, Artificial
  Synthetic oligonucleotide
acttaagaaactccaggaaagtgcgtctatggctaacagaagcaggtacca

SEQ ID NO: 317649 - DNA, 58 bp, Artificial
  Synthetic oligonucleotide
acttaagatagttcttaatctatagtctataggtgagcgtagtatagtcgccaactta

SEQ ID NO: 317650 - DNA, 55 bp, Artificial
  Synthetic oligonucleotide
acttaagccattgaacctgctacacttgcttgcgtcatgcgattggacgtttgca

SEQ ID NO: 317651 - DNA, 59 bp, Artificial
  Synthetic oligonucleotide
acttaagtctagatggccacacaaatagttgtgtgggcctagcgacctagcccacatcg

SEQ ID NO: 317652 - DNA, 51 bp, Artificial
  Synthetic oligonucleotide
acttaagtggttcagttcgtgtctgggttggaaacgctggagctagggtct

SEQ ID NO: 317653 - DNA, 54 bp, Artificial
  Synthetic oligonucleotide
acttaagtgtcactataagttaatacttgagttcgaacttaagtacgaacttca

SEQ ID NO: 317654 - DNA, 55 bp, Artificial
  Synthetic oligonucleotide
acttaagtgtgggtcgtcgaatttcgtcgttgactatatacggctatacgtgacg

SEQ ID NO: 317655 - DNA, 60 bp, Artificial
  Synthetic oligonucleotide
acttaatacacaaactcttggaattggatgcttgacaactgatgctacaacttttgaaga

SEQ ID NO: 317656 - DNA, 56 bp, Artificial
  Synthetic oligonucleotide
acttaatgtcggacggggaggtgtgcttagaggctatcgaatttcaaggcgacatt

SEQ ID NO: 317657 - DNA, 60 bp, Artificial
  Synthetic oligonucleotide
acttacaaagtggcgtgcagtcacgaccagagcattcagagtgcataatgccaagtggct

SEQ ID NO: 317658 - DNA, 59 bp, Artificial
  Synthetic oligonucleotide
acttacaaccgcactaaggttccacaaggattcaggccaatagaggtagcacagatcaa

SEQ ID NO: 317659 - DNA, 58 bp, Artificial
  Synthetic oligonucleotide
acttacaacgatcttcgaacgtgctaaacattagacgcagaattgaagaatctagaag

SEQ ID NO: 317660 - DNA, 57 bp, Artificial
  Synthetic oligonucleotide
acttacaacgtcctagccgctcggagaggcgacgccacgtgcgacgctatacaaaaa

SEQ ID NO: 317661 - DNA, 57 bp, Artificial
  Synthetic oligonucleotide
acttacaagaatttgtgccttctgatacttccaccatttatgtcttagacgattggg

SEQ ID NO: 317662 - DNA, 59 bp, Artificial
  Synthetic oligonucleotide
acttacaaggaaggagtactgtcttcgacttcttgatcactcgtgatattgaagagagg

SEQ ID NO: 317663 - DNA, 59 bp, Artificial
  Synthetic oligonucleotide
acttacacagcggtggtgggcccttcttcacttgcagaggtctcactctcccaggtcgc

SEQ ID NO: 317664 - DNA, 52 bp, Artificial
  Synthetic oligonucleotide
acttacacatcaacaatccagtttggttccattgaatgcaaacttccatact

SEQ ID NO: 317665 - DNA, 53 bp, Artificial
  Synthetic oligonucleotide
acttacacgaacgtttgttatccgaatacgaaaaagtaggcaagagcgttagc

SEQ ID NO: 317666 - DNA, 55 bp, Artificial
  Synthetic oligonucleotide
acttacactcacccggtaaagttgccattgaaggtggcagatactacgaacatgc

SEQ ID NO: 317667 - DNA, 53 bp, Artificial
  Synthetic oligonucleotide
acttacaggacacacgatggatgaaagtccaagggtcgacattcgtatagtac

SEQ ID NO: 317668 - DNA, 60 bp, Artificial
  Synthetic oligonucleotide
acttacagggcaaccttctctgtcactgctctaaagaccatgtctctgggcaacacagcc

SEQ ID NO: 317669 - DNA, 56 bp, Artificial
  Synthetic oligonucleotide
acttacagtcctcgggaaggatgcaggagcactaacggaagatccggaagagggaa

SEQ ID NO: 317670 - DNA, 47 bp, Artificial
  Synthetic oligonucleotide
acttaccaaaatgaccctcccttttacccctggttaccacccgaacc

SEQ ID NO: 317671 - DNA, 55 bp, Artificial
  Synthetic oligonucleotide
acttaccagtaatggctagtaatgtcacgacaagtataatcgcaaactgcacggt

SEQ ID NO: 317672 - DNA, 60 bp, Artificial
  Synthetic oligonucleotide
acttaccataccacctcatacctcctaattcatgatggggaccgtgcagtgattacatac

SEQ ID NO: 317673 - DNA, 52 bp, Artificial
  Synthetic oligonucleotide
acttacccacggttgctcaaatagaagagtggtatgcctcatgccggggaag

SEQ ID NO: 317674 - DNA, 60 bp, Artificial
  Synthetic oligonucleotide
acttaccgcacccttatggatgcgagcacttcatgtcaaccacagcccctaattccagtc

SEQ ID NO: 317675 - DNA, 55 bp, Artificial
  Synthetic oligonucleotide
acttacctgaaaggatccgaatttgtcgatgccaaccttactaacgtgagacagt

SEQ ID NO: 317676 - DNA, 57 bp, Artificial
  Synthetic oligonucleotide
acttacgagcccaatacattgggccacgatttaattagggatcttatatctgttgta

SEQ ID NO: 317677 - DNA, 56 bp, Artificial
  Synthetic oligonucleotide
acttacgtaccacaacaagttatacatcgcaatgttgtgaagttaaatcagttttc

SEQ ID NO: 317678 - DNA, 56 bp, Artificial
  Synthetic oligonucleotide
acttacgtcaaatgcggttcggggccctggctgacacctaggtgtctagttgacta

SEQ ID NO: 317679 - DNA, 55 bp, Artificial
  Synthetic oligonucleotide
acttacgttcgcgcgcgcgcgggacccgatggactttcgttcaccacctacagct

SEQ ID NO: 317680 - DNA, 56 bp, Artificial
  Synthetic oligonucleotide
acttacgttgtgcgtacgcggggcccgatggactatcgttcacccacctacagctg

SEQ ID NO: 317681 - DNA, 55 bp, Artificial
  Synthetic oligonucleotide
acttactaagaagatgagatcctgtcaagtaatttgtgagtccctgcttgccaat

SEQ ID NO: 317682 - DNA, 52 bp, Artificial
  Synthetic oligonucleotide
acttactacaagtccaggttggagttaatctttaggaaagcgaattacccaa

SEQ ID NO: 317683 - DNA, 53 bp, Artificial
  Synthetic oligonucleotide
acttactaggggcacagtttccagggctgacgttaccgggtgtgacaatcccg

SEQ ID NO: 317684 - DNA, 57 bp, Artificial
  Synthetic oligonucleotide
acttactccaacgtgttatctttcgtcgaatcaattcgttcgagagtgatcattaac

SEQ ID NO: 317685 - DNA, 55 bp, Artificial
  Synthetic oligonucleotide
acttactcgtatgaacgtgatggccaagtagtgaacgccaccactgtgacctatg

SEQ ID NO: 317686 - DNA, 51 bp, Artificial
  Synthetic oligonucleotide
acttactctatcactcgtggtactgtttgtgtatacaacttgttactacga

SEQ ID NO: 317687 - DNA, 55 bp, Artificial
  Synthetic oligonucleotide
acttactgatgcatcctcaaaattgagcgtagtatccgattcggtcgaccaactg

SEQ ID NO: 317688 - DNA, 55 bp, Artificial
  Synthetic oligonucleotide
acttactgccgccgagtatgatcagactacctacggctcttctaccaatcccatg

SEQ ID NO: 317689 - DNA, 60 bp, Artificial
  Synthetic oligonucleotide
acttactggtgggatgggctccaatcctctgatgattttgctctcatagtgaatgcacca

SEQ ID NO: 317690 - DNA, 55 bp, Artificial
  Synthetic oligonucleotide
acttagaattaagagaagaggatggtggagacacaggaaacattaacacaacgtt

SEQ ID NO: 317691 - DNA, 53 bp, Artificial
  Synthetic oligonucleotide
acttagacaaatcttagctggcaacacgcaggttcacgcaacgccacacatgc

SEQ ID NO: 317692 - DNA, 60 bp, Artificial
  Synthetic oligonucleotide
acttagagcaccactgtgttcgggcctctaaagatcaggtcatgtggcaggatgttatga

SEQ ID NO: 317693 - DNA, 55 bp, Artificial
  Synthetic oligonucleotide
acttagagccctggaaccatccgggaagtcagcctgaaactccttgtaatacatg

SEQ ID NO: 317694 - DNA, 57 bp, Artificial
  Synthetic oligonucleotide
acttagaggatttgaaactgatagggagtttattttaactaagataatgcagatgac

SEQ ID NO: 317695 - DNA, 56 bp, Artificial
  Synthetic oligonucleotide
acttagagtctgctccgaaggttgagtctgtggatttcggtggtagtgctaaagtg

SEQ ID NO: 317696 - DNA, 60 bp, Artificial
  Synthetic oligonucleotide
acttagatctatgggatatgctttaactggagctgttcaaactttatctcaaatatctga

SEQ ID NO: 317697 - DNA, 56 bp, Artificial
  Synthetic oligonucleotide
acttagattattgccagttgaaagacgaagacttgatatatttaacgtaatattaa

SEQ ID NO: 317698 - DNA, 55 bp, Artificial
  Synthetic oligonucleotide
acttagcaaccaaagcactgcagaaaagacaactgccgcagatgttggggcgcag

SEQ ID NO: 317699 - DNA, 59 bp, Artificial
  Synthetic oligonucleotide
acttagcggtgtctacctctaaaagtcaccaagcactccgagcgaagcgaggagtgcga

SEQ ID NO: 317700 - DNA, 54 bp, Artificial
  Synthetic oligonucleotide
acttagcgtaggagtaggcatctttttactccccgctcggtagagcggcaaacc

SEQ ID NO: 317701 - DNA, 59 bp, Artificial
  Synthetic oligonucleotide
acttagcgtgtccgtagctcgcaacctcatcagcactgcttctaggtatccccgtaagt

SEQ ID NO: 317702 - DNA, 55 bp, Artificial
  Synthetic oligonucleotide
acttagctcatcggatgagagatcgtagcactcaaataaagtactctagttcatc

SEQ ID NO: 317703 - DNA, 55 bp, Artificial
  Synthetic oligonucleotide
acttagctggagttcagttgaacacaggggcaacaaaatcctagtttcgggcagg

SEQ ID NO: 317704 - DNA, 59 bp, Artificial
  Synthetic oligonucleotide
acttagcttcgctatgcggcggttattcggatggattgctttggtacctgccaattaca

SEQ ID NO: 317705 - DNA, 55 bp, Artificial
  Synthetic oligonucleotide
acttaggaccattttgaataagccgctaccccaaccgccgtcacgagaatctctc

SEQ ID NO: 317706 - DNA, 60 bp, Artificial
  Synthetic oligonucleotide
acttaggagttgatatcagaggtgctgactacaactcaaacaaatcatttgtggacgcaa

SEQ ID NO: 317707 - DNA, 50 bp, Artificial
  Synthetic oligonucleotide
acttaggtctcgggagtgtttctactctagataacgtccctattgctagc

SEQ ID NO: 317708 - DNA, 57 bp, Artificial
  Synthetic oligonucleotide
acttaggttttggctctagaggaagaggacctggctcaatggttagcaggatccgta

SEQ ID NO: 317709 - DNA, 52 bp, Artificial
  Synthetic oligonucleotide
acttagtaactgttagaaataatagaacctttggaataacaagatagttagt

SEQ ID NO: 317710 - DNA, 57 bp, Artificial
  Synthetic oligonucleotide
acttagtcaatgggtacctattgagaggatttcattctactcagggtatcggtacat

SEQ ID NO: 317711 - DNA, 59 bp, Artificial
  Synthetic oligonucleotide
acttagtgaagtacatcgctctccaattagtggtgacgtccggtgttttgtggcagcag

SEQ ID NO: 317712 - DNA, 50 bp, Artificial
  Synthetic oligonucleotide
acttagtgggaagtctccttattcatccaatgcggtagggcatgtgttta

SEQ ID NO: 317713 - DNA, 50 bp, Artificial
  Synthetic oligonucleotide
acttagtgtcctgtagtttggctacatgaaatacggaacattttggtggg

SEQ ID NO: 317714 - DNA, 51 bp, Artificial
  Synthetic oligonucleotide
acttagtgttgacacaggcagtagtcggtagtacattacagtcatcgggag

SEQ ID NO: 317715 - DNA, 58 bp, Artificial
  Synthetic oligonucleotide
acttagttggtgaaacttgaaagaccagataacgctattggcatggcaaccagagacc

SEQ ID NO: 317716 - DNA, 58 bp, Artificial
  Synthetic oligonucleotide
acttagttttcaacacagtcatacatgagaaaataggggaccaacaaacagtgattca

SEQ ID NO: 317717 - DNA, 55 bp, Artificial
  Synthetic oligonucleotide
acttataagtcgctccaaccagataaaatgagtttattgttacgtcggaatgcgg

SEQ ID NO: 317718 - DNA, 52 bp, Artificial
  Synthetic oligonucleotide
acttataccccaattgccatctacagccttaaggtttttcgtggcactttgg

SEQ ID NO: 317719 - DNA, 58 bp, Artificial
  Synthetic oligonucleotide
acttatagtgccatggatataattggaagccctagtaatacggctccgcaaacggcat

SEQ ID NO: 317720 - DNA, 60 bp, Artificial
  Synthetic oligonucleotide
acttatatgtcccaatgccaactgcacagtccacaatgaaggcagatgaactcactcctg

SEQ ID NO: 317721 - DNA, 58 bp, Artificial
  Synthetic oligonucleotide
acttatcaagctaatgaaaagcgtactaagtgtgtcggacatccaaattctcgccgac

SEQ ID NO: 317722 - DNA, 60 bp, Artificial
  Synthetic oligonucleotide
acttatcagagaacaagagcgcttgtccgcactgggatggatcccagaatgtgttcccta

SEQ ID NO: 317723 - DNA, 60 bp, Artificial
  Synthetic oligonucleotide
acttatcccgcaagataccatcgcacacacgttcgatgaagcagttgcttcagaaagcaa

SEQ ID NO: 317724 - DNA, 59 bp, Artificial
  Synthetic oligonucleotide
acttatcgatacaaggcttgctgagctccggagttagtgccgctttagggaactgcgaa

SEQ ID NO: 317725 - DNA, 55 bp, Artificial
  Synthetic oligonucleotide
acttatcggtcgtaatggccgcgcagcggaactgacgacgttctctgcagcccac

SEQ ID NO: 317726 - DNA, 60 bp, Artificial
  Synthetic oligonucleotide
acttatgaacaggtgaataaagataatttatgggcggcatttggtgaagattgcgatata

SEQ ID NO: 317727 - DNA, 60 bp, Artificial
  Synthetic oligonucleotide
acttatgagggcgatactagtgcaggctacaatcacgatgtttccatacttcgtgcgtgg

SEQ ID NO: 317728 - DNA, 60 bp, Artificial
  Synthetic oligonucleotide
acttatgagggggacactagtgcgggctataatcatgatgtgtccatcctccgtgcatgg

SEQ ID NO: 317729 - DNA, 60 bp, Artificial
  Synthetic oligonucleotide
acttatgcaaggcacttgcacattatgatgatgagatctttggattagcaatactagact

SEQ ID NO: 317730 - DNA, 59 bp, Artificial
  Synthetic oligonucleotide
acttatgcgagcattgatcccgaaaactcttcaaaagaacccatacagcatttcgaaga

SEQ ID NO: 317731 - DNA, 60 bp, Artificial
  Synthetic oligonucleotide
acttatggaatcaatctgcctttggtcacttatgtgaaagatgagctgaggagtaagagc

SEQ ID NO: 317732 - DNA, 60 bp, Artificial
  Synthetic oligonucleotide
acttatggagatggggcaccatgctccttgggttattgatgatcagtagtgctgcagaac

SEQ ID NO: 317733 - DNA, 57 bp, Artificial
  Synthetic oligonucleotide
acttatggggatacttgggagggagttgaagctataataagaattctgcaacagcta

SEQ ID NO: 317734 - DNA, 60 bp, Artificial
  Synthetic oligonucleotide
acttatggtgacaattgagagactgtaaccatattgctatcgggttggccacctggtgaa

SEQ ID NO: 317735 - DNA, 59 bp, Artificial
  Synthetic oligonucleotide
acttatgtaatgtttgggcggggcttagagcggttgcgtcagctgatcgtggagaccgc

SEQ ID NO: 317736 - DNA, 60 bp, Artificial
  Synthetic oligonucleotide
acttatgtcgggacgcctattaatagacatggtgtgaagatcctattgcgcttagctgtg

SEQ ID NO: 317737 - DNA, 51 bp, Artificial
  Synthetic oligonucleotide
acttattaagccccttggttgacaaggataaggataggctgtttttagggg

SEQ ID NO: 317738 - DNA, 57 bp, Artificial
  Synthetic oligonucleotide
acttattatgttttagatcgagtctatttaaatgccacactattgcttactggttat

SEQ ID NO: 317739 - DNA, 55 bp, Artificial
  Synthetic oligonucleotide
acttattcaaagccaacccaaattatgctggcaactccattaagccaactggcgc

SEQ ID NO: 317740 - DNA, 60 bp, Artificial
  Synthetic oligonucleotide
acttattcagtactataatcactctcgtttcaaattaataagatgtgcatgattgcccta

SEQ ID NO: 317741 - DNA, 57 bp, Artificial
  Synthetic oligonucleotide
acttattctcgctggtcaagctaccgccctagacatccttgattacgggttaagaga

SEQ ID NO: 317742 - DNA, 57 bp, Artificial
  Synthetic oligonucleotide
acttattggaccgatgtcattgattgccgcagttggtttacttcttttaggcgttgc

SEQ ID NO: 317743 - DNA, 60 bp, Artificial
  Synthetic oligonucleotide
acttattgtggacataattgaattgacagcagaagtcactgctgctacaggatttactgt

SEQ ID NO: 317744 - DNA, 57 bp, Artificial
  Synthetic oligonucleotide
acttatttatttgtgtctccatgaaattgaggttcagataaaattccgacgtctgct

SEQ ID NO: 317745 - DNA, 52 bp, Artificial
  Synthetic oligonucleotide
acttatttcggaaaggaagtgcagcagtcggaatgaccaaaagtttaggcca

SEQ ID NO: 317746 - DNA, 55 bp, Artificial
  Synthetic oligonucleotide
acttatttgtgaagagcagaggtggaagtgagatgcatatactgtcttacacctc

SEQ ID NO: 317747 - DNA, 53 bp, Artificial
  Synthetic oligonucleotide
acttattttgaaagccctaggaggagccatcaaaacgcgcgttttgaatcggg

SEQ ID NO: 317748 - DNA, 54 bp, Artificial
  Synthetic oligonucleotide
acttcaaacctaaagggaaattgtgggccgacgacaacagaagtgttgactaca

SEQ ID NO: 317749 - DNA, 59 bp, Artificial
  Synthetic oligonucleotide
acttcaaagccgacactacaggggaagaaaactccgtgcaagctgcagtatggaatgcg

SEQ ID NO: 317750 - DNA, 56 bp, Artificial
  Synthetic oligonucleotide
acttcaaatcttacgataaccgactagagtttgtcgagaatgttgacttagacagg

SEQ ID NO: 317751 - DNA, 60 bp, Artificial
  Synthetic oligonucleotide
acttcaacaacgcctgtgcgtgcacgtgaagctcatatacagatgaaggcagcagcattg

SEQ ID NO: 317752 - DNA, 55 bp, Artificial
  Synthetic oligonucleotide
acttcaacacaccaggccttcctgtgtgccaagaccacctggagttctgggagag

SEQ ID NO: 317753 - DNA, 60 bp, Artificial
  Synthetic oligonucleotide
acttcaacacatcctggatgtcttgggatggttgtgacctagactactactgtaacatgg

SEQ ID NO: 317754 - DNA, 57 bp, Artificial
  Synthetic oligonucleotide
acttcaacccttgaacttatgggtattcaatatgattataatgaagtttacactaga

SEQ ID NO: 317755 - DNA, 59 bp, Artificial
  Synthetic oligonucleotide
acttcaacgcatcacacggtattgcttcaaggtttagtgcgagggaatgaactgaagag

SEQ ID NO: 317756 - DNA, 54 bp, Artificial
  Synthetic oligonucleotide
acttcaactacgaaagtgtataaacaagtgccacaaccgtttgactttagagcg

SEQ ID NO: 317757 - DNA, 60 bp, Artificial
  Synthetic oligonucleotide
acttcaatgcatgggaaaacaatatggtagagcaaatgcatgaggatatagtcaatcttt

SEQ ID NO: 317758 - DNA, 55 bp, Artificial
  Synthetic oligonucleotide
acttcaattgaacgaaattttggctcaacatggacaaataatcttggaccagcag

SEQ ID NO: 317759 - DNA, 59 bp, Artificial
  Synthetic oligonucleotide
acttcaatttctggccttagtggtagtgcaacaaaatgacagaccccagagagacagta

SEQ ID NO: 317760 - DNA, 53 bp, Artificial
  Synthetic oligonucleotide
acttcacaagccctttgaaaaaccctactgtggacgcgtataacgctgaaatt

SEQ ID NO: 317761 - DNA, 59 bp, Artificial
  Synthetic oligonucleotide
acttcacacggttaatagacgctgcctacgacgcaagtgggaatggagtcgcacaatcg

SEQ ID NO: 317762 - DNA, 60 bp, Artificial
  Synthetic oligonucleotide
acttcacagaaggtggatacatcagcatgttttaccagacgcgtgtggttgttccagcgt

SEQ ID NO: 317763 - DNA, 60 bp, Artificial
  Synthetic oligonucleotide
acttcacagcggaagtatcccattgcagggctactgaatacataatgaagggagtgtaca

SEQ ID NO: 317764 - DNA, 54 bp, Artificial
  Synthetic oligonucleotide
acttcacagtcaagcctgtaatgtttgtcgtgtcagcaagacaacggcacacac

SEQ ID NO: 317765 - DNA, 55 bp, Artificial
  Synthetic oligonucleotide
acttcaccgaaggaacactcggctcaagatgtcaagcaagccacatacacgcccc

SEQ ID NO: 317766 - DNA, 60 bp, Artificial
  Synthetic oligonucleotide
acttcacgaatccctgtacggagctattcgcacttgagtcaagaattcttggatgagatt

SEQ ID NO: 317767 - DNA, 50 bp, Artificial
  Synthetic oligonucleotide
acttcacgcctgcagatggtacaataatgaatgcaggtgcctcgggagga

SEQ ID NO: 317768 - DNA, 56 bp, Artificial
  Synthetic oligonucleotide
acttcacgtcaaacggtgatattgtcttacagccgtataaggctaaagttcataag

SEQ ID NO: 317769 - DNA, 52 bp, Artificial
  Synthetic oligonucleotide
acttcactcagagtcaaggtgaaattcagtggatgaaaccgtccaaagaggt

SEQ ID NO: 317770 - DNA, 60 bp, Artificial
  Synthetic oligonucleotide
acttcagacgcgctaaccgtctcaattcgaggtcgatggatggctagactagctcgcatg

SEQ ID NO: 317771 - DNA, 60 bp, Artificial
  Synthetic oligonucleotide
acttcagactatgtgttggcctcaacaaactcacatactattacacctccaacagtctca

SEQ ID NO: 317772 - DNA, 60 bp, Artificial
  Synthetic oligonucleotide
acttcagagtgctctgaggagctcgaaggaaagagtcctcagcctctcctctccgaggag

SEQ ID NO: 317773 - DNA, 59 bp, Artificial
  Synthetic oligonucleotide
acttcagcctagatcccaccttctccatagagactacaactgtcccccaggacgcagtg

SEQ ID NO: 317774 - DNA, 57 bp, Artificial
  Synthetic oligonucleotide
acttcagtaggggctgtacccgggcggtcccactcttcacaggaatctgcacaggtg

SEQ ID NO: 317775 - DNA, 59 bp, Artificial
  Synthetic oligonucleotide
acttcagtgacattggccggcaattcatctctttgttctatcagtggatgggctatata

SEQ ID NO: 317776 - DNA, 51 bp, Artificial
  Synthetic oligonucleotide
acttcagttatttccagcccgatttcataacacctctcagcatggcatcaa

SEQ ID NO: 317777 - DNA, 60 bp, Artificial
  Synthetic oligonucleotide
acttcataagcactgcggatctgcttaacgggtacacgttgcatctttccatcagtacaa

SEQ ID NO: 317778 - DNA, 57 bp, Artificial
  Synthetic oligonucleotide
acttcatacccgtcgagtctatggaaactactatgcggtctccggtctttacagaca

SEQ ID NO: 317779 - DNA, 60 bp, Artificial
  Synthetic oligonucleotide
acttcatatgaacagtgtatcaatacagtcaagtagcttgaccacattagacagcctaga

SEQ ID NO: 317780 - DNA, 60 bp, Artificial
  Synthetic oligonucleotide
acttcatcatcttgtactccaaggaagttcctgaatccctcagataatatgtttgcttga

SEQ ID NO: 317781 - DNA, 55 bp, Artificial
  Synthetic oligonucleotide
acttcatcgggcctggaaattatcccgcccaagttggtgaaaattatccgtctgc

SEQ ID NO: 317782 - DNA, 60 bp, Artificial
  Synthetic oligonucleotide
acttcatgcctttttcacttggtcattaactgactccataggctctgatgtgccaggtgg

SEQ ID NO: 317783 - DNA, 58 bp, Artificial
  Synthetic oligonucleotide
acttcatgtaaatgcaccatttgtttgtcaaaataattgtcctggtcaattatttgta

SEQ ID NO: 317784 - DNA, 58 bp, Artificial
  Synthetic oligonucleotide
acttcatgtctagatacgccaagttcagcacgatagaactaaggaggagctctgtata

SEQ ID NO: 317785 - DNA, 58 bp, Artificial
  Synthetic oligonucleotide
acttcattaatcgcgtaatcattatataaagtttgaataccatatgcttttgctacgt

SEQ ID NO: 317786 - DNA, 60 bp, Artificial
  Synthetic oligonucleotide
acttcattgacgaacgaggcgaatcaacaattgtagaatctggcgatccaaatgcgttat

SEQ ID NO: 317787 - DNA, 55 bp, Artificial
  Synthetic oligonucleotide
acttccaagagaagtacatatcaaccactttgtctgagacaagctccacatttcc

SEQ ID NO: 317788 - DNA, 60 bp, Artificial
  Synthetic oligonucleotide
acttccaccgctagtgatgagtcaatgatagagacgcgatgtgtcgtgaacaaacacagt

SEQ ID NO: 317789 - DNA, 54 bp, Artificial
  Synthetic oligonucleotide
acttccacctgcaactacgtcccgagtggaggaacgagataacacccccctcta

SEQ ID NO: 317790 - DNA, 58 bp, Artificial
  Synthetic oligonucleotide
acttccactatcaggaaagaaattctatgtgttattcaacacacccagaaaaggcatc

SEQ ID NO: 317791 - DNA, 55 bp, Artificial
  Synthetic oligonucleotide
acttccagacaccgtactttagttgcatatttaaaacatgttgagctacagcacc

SEQ ID NO: 317792 - DNA, 53 bp, Artificial
  Synthetic oligonucleotide
acttccaggagatgactcctgaacaactagtgagagaaggattgtgcgatccg

SEQ ID NO: 317793 - DNA, 52 bp, Artificial
  Synthetic oligonucleotide
acttccagggtgtgggattcactgcacctactacggaggagtcctactatac

SEQ ID NO: 317794 - DNA, 59 bp, Artificial
  Synthetic oligonucleotide
acttccatctaagtaatctcttaagcaatcaaggttgtttatgccatgccctgaaggta

SEQ ID NO: 317795 - DNA, 58 bp, Artificial
  Synthetic oligonucleotide
acttccatgaaactagaggttgtgacctacaagattggcggcaccgctggtgacccaa

SEQ ID NO: 317796 - DNA, 60 bp, Artificial
  Synthetic oligonucleotide
acttccatgctcaccgacccctcccacatcacggcagagacggctaagcgtaggctggcc

SEQ ID NO: 317797 - DNA, 56 bp, Artificial
  Synthetic oligonucleotide
acttccatggaattgggtctttcaaggagaagaacgaagccgagaaatagtggaga

SEQ ID NO: 317798 - DNA, 54 bp, Artificial
  Synthetic oligonucleotide
acttccatgtacccacctgaaccggttcgggtcgggactgcaccagctaaactg

SEQ ID NO: 317799 - DNA, 54 bp, Artificial
  Synthetic oligonucleotide
acttcccattctattccaaatataatctaggtaaaacattcattaccaacactt

SEQ ID NO: 317800 - DNA, 50 bp, Artificial
  Synthetic oligonucleotide
acttcccccgttgtaccgcccctcaacactacgcaccggggtacattgcc

SEQ ID NO: 317801 - DNA, 59 bp, Artificial
  Synthetic oligonucleotide
acttccccggagaagactgttgccatcgtgcggcaaggcgctcgccacacccttggtga

SEQ ID NO: 317802 - DNA, 51 bp, Artificial
  Synthetic oligonucleotide
acttccccgtctgtggcggtggcgagttctacggctacacaggcgacgtgt

SEQ ID NO: 317803 - DNA, 55 bp, Artificial
  Synthetic oligonucleotide
acttcccgtaggaatttcgacatgagcaaaggcttattggaaccgtctcggcgag

SEQ ID NO: 317804 - DNA, 59 bp, Artificial
  Synthetic oligonucleotide
acttccctaatttgtgatgtggaacttgagatgctgcaatttcaaggaactgggacttc

SEQ ID NO: 317805 - DNA, 58 bp, Artificial
  Synthetic oligonucleotide
acttccctagggtctggctccatggtttaggacaatatatctatgaaacatatgggga

SEQ ID NO: 317806 - DNA, 55 bp, Artificial
  Synthetic oligonucleotide
acttccctgtctgaagttgtcctacagaatcgaaggggcctagacttgttatttc

SEQ ID NO: 317807 - DNA, 55 bp, Artificial
  Synthetic oligonucleotide
acttccgaagaagaaggaggtactggagaccaaagtggcgcaggagaggctactg

SEQ ID NO: 317808 - DNA, 53 bp, Artificial
  Synthetic oligonucleotide
acttccgacgatatttcgaaggaaagtacaaatgggaggtaccagcctcccca

SEQ ID NO: 317809 - DNA, 56 bp, Artificial
  Synthetic oligonucleotide
acttccgcctaatattttctatggcgacgcttatgaggagtcagtgtttgctgccg

SEQ ID NO: 317810 - DNA, 54 bp, Artificial
  Synthetic oligonucleotide
acttccgcgttctcacttcctcgtatcgatttcgtgactcaacttccgggttcc

SEQ ID NO: 317811 - DNA, 55 bp, Artificial
  Synthetic oligonucleotide
acttccggcattcatgactaaggtcaagagtgttagaatatcgactgtggacaag

SEQ ID NO: 317812 - DNA, 51 bp, Artificial
  Synthetic oligonucleotide
acttccgggtcacgcccggtagttccgggtcaagtgacgtagttccggtga

SEQ ID NO: 317813 - DNA, 53 bp, Artificial
  Synthetic oligonucleotide
acttccggtgggcgggacttccggaattagggttggctctgggccagcttgct

SEQ ID NO: 317814 - DNA, 60 bp, Artificial
  Synthetic oligonucleotide
acttccgtggcttgacaggtgtatcctgcgagtgctgcagtcactcgagaaagggttaaa

SEQ ID NO: 317815 - DNA, 60 bp, Artificial
  Synthetic oligonucleotide
acttcctaatgatgctggtttgatcttggctaacaaagcaactaaactggctgacgctat

SEQ ID NO: 317816 - DNA, 56 bp, Artificial
  Synthetic oligonucleotide
acttcctataaatagacctattgattggaaagtatgtcaacgaattgtgggtcttc

SEQ ID NO: 317817 - DNA, 60 bp, Artificial
  Synthetic oligonucleotide
acttcctatccatggctgctagggtgtgctgccaactggatcctgcgcgggacgtccttt

SEQ ID NO: 317818 - DNA, 59 bp, Artificial
  Synthetic oligonucleotide
acttcctatccggtatcaaacctccgcggtgcacagggagcacaatgggagcgagattg

SEQ ID NO: 317819 - DNA, 55 bp, Artificial
  Synthetic oligonucleotide
acttcctccaccccacgcagttatcatcattgaatctgacggttgcatggaagga

SEQ ID NO: 317820 - DNA, 57 bp, Artificial
  Synthetic oligonucleotide
acttcctccgcaacctactagaaaggaattcttggatgttgtcacgacagaatacat

SEQ ID NO: 317821 - DNA, 56 bp, Artificial
  Synthetic oligonucleotide
acttcctcttagcacgctgcccggaaggagactctattactatggagtttagaaag

SEQ ID NO: 317822 - DNA, 59 bp, Artificial
  Synthetic oligonucleotide
acttcctcttgtacccagaaaggggattggacatcgcagaatatagcgtttgctgttgc

SEQ ID NO: 317823 - DNA, 55 bp, Artificial
  Synthetic oligonucleotide
acttcctgatgcagagagatttagttttccaagagttgtcaattctgcagacggc

SEQ ID NO: 317824 - DNA, 60 bp, Artificial
  Synthetic oligonucleotide
acttcctgatgtcatcggatccttgagtagtcacaaccatgtctggaggcagcaagccga

SEQ ID NO: 317825 - DNA, 51 bp, Artificial
  Synthetic oligonucleotide
acttcctgggcagaacgggaacttctggtcatgggatttgcattcctgtgt

SEQ ID NO: 317826 - DNA, 55 bp, Artificial
  Synthetic oligonucleotide
acttcgaaatgcctaagcgggatgccccgtggcgttcaatggcggggacctctaa

SEQ ID NO: 317827 - DNA, 50 bp, Artificial
  Synthetic oligonucleotide
acttcgaagttttaagggaacagatgaaaggcgaaccggtagacccgtac

SEQ ID NO: 317828 - DNA, 59 bp, Artificial
  Synthetic oligonucleotide
acttcgacctttgttcacaaatgcacttcgtgcggctttgtgcagatggtccaccgtaa

SEQ ID NO: 317829 - DNA, 60 bp, Artificial
  Synthetic oligonucleotide
acttcgacgtgcttacgaatcgtgcgcagccgggtgcacacgcccttgatgaggtcttgc

SEQ ID NO: 317830 - DNA, 52 bp, Artificial
  Synthetic oligonucleotide
acttcgactcttatcaagattagtcccaatagcaaatttatcataagtctta

SEQ ID NO: 317831 - DNA, 60 bp, Artificial
  Synthetic oligonucleotide
acttcgagaagattagtcaggatagagtccatgtaatcccatgtataccatgtggtgttt

SEQ ID NO: 317832 - DNA, 59 bp, Artificial
  Synthetic oligonucleotide
acttcgagaagcctagtaccacctttggatcttcgacgcgttgcgctcagcactctacc

SEQ ID NO: 317833 - DNA, 59 bp, Artificial
  Synthetic oligonucleotide
acttcgaggaaccccgtgaggttcagaatgacgatcttctcagagatagaggaattgta

SEQ ID NO: 317834 - DNA, 59 bp, Artificial
  Synthetic oligonucleotide
acttcgagtatgatgatggtatatatccgaccgttctcggtagtgtccagcaagggtac

SEQ ID NO: 317835 - DNA, 50 bp, Artificial
  Synthetic oligonucleotide
acttcgatgactgctaggaaatgaagcttgcgaatcgggctgtcacggga

SEQ ID NO: 317836 - DNA, 60 bp, Artificial
  Synthetic oligonucleotide
acttcgatgactgctgatgcatttcgcatcgcgtatctgcggtcagagatccttagtaag

SEQ ID NO: 317837 - DNA, 60 bp, Artificial
  Synthetic oligonucleotide
acttcgcaagaatgtgcatacactctacgctgcttttcactttgccgaggagttactcct

SEQ ID NO: 317838 - DNA, 60 bp, Artificial
  Synthetic oligonucleotide
acttcgcaatggcgcagggtaactcacagcaaactcaagcaggcgtgactgttagcgttg

SEQ ID NO: 317839 - DNA, 55 bp, Artificial
  Synthetic oligonucleotide
acttcgcagtgcgccctatcgctgacggtggcaaggggtacatcccgcattcgtg

SEQ ID NO: 317840 - DNA, 60 bp, Artificial
  Synthetic oligonucleotide
acttcgcattgcgagattatgtaatcttgtcgctatttctgatttactatccaaatgctg

SEQ ID NO: 317841 - DNA, 52 bp, Artificial
  Synthetic oligonucleotide
acttcgcatttatcagtgtgttacatttccgtgaaagtcttggacttagggg

SEQ ID NO: 317842 - DNA, 58 bp, Artificial
  Synthetic oligonucleotide
acttcgccaaaggattcctctcgatagattcaggttactactcagccaaatgttactc

SEQ ID NO: 317843 - DNA, 60 bp, Artificial
  Synthetic oligonucleotide
acttcgccctcatagtgaatgcacctaatcatgtaggaatacaagcaggagtggataggt

SEQ ID NO: 317844 - DNA, 55 bp, Artificial
  Synthetic oligonucleotide
acttcgcctacgatgttcataacttctaagcggtcggatggattcatcttagagc

SEQ ID NO: 317845 - DNA, 58 bp, Artificial
  Synthetic oligonucleotide
acttcgcgtcgacccaacgtggcagttcgtgaactcggttgcaactgcgatgcaactt

SEQ ID NO: 317846 - DNA, 56 bp, Artificial
  Synthetic oligonucleotide
acttcgcgtgaccggttagtacacttatcactatccgcctacttggtcgttagcgc

SEQ ID NO: 317847 - DNA, 59 bp, Artificial
  Synthetic oligonucleotide
acttcgctagaaaatctgtgggacttcttcattcttgcgctcgccctaccattgacaac

SEQ ID NO: 317848 - DNA, 60 bp, Artificial
  Synthetic oligonucleotide
acttcgctatgcctcaaggtaattcgcagcaaacgctagccggcgttactgtgagcgttg

SEQ ID NO: 317849 - DNA, 59 bp, Artificial
  Synthetic oligonucleotide
acttcgctgcggctggggggactaatcaggtggttgctgatgctaggttgatgttcccg

SEQ ID NO: 317850 - DNA, 60 bp, Artificial
  Synthetic oligonucleotide
acttcgcttcacctctgcacgtcgcatggagaccaccgtgaacacccacatgatcttgcc

SEQ ID NO: 317851 - DNA, 57 bp, Artificial
  Synthetic oligonucleotide
acttcggaggggtgagattcgatgggtaatcactcagcgaagaccctggtccgcttc

SEQ ID NO: 317852 - DNA, 59 bp, Artificial
  Synthetic oligonucleotide
acttcgggatccgacttcatccagttgttggcgataggttgcttcatcgcactctgggg

SEQ ID NO: 317853 - DNA, 52 bp, Artificial
  Synthetic oligonucleotide
acttcggtagctaaaccgtcgccaccttggtttccgcaggggcttccgaggc

SEQ ID NO: 317854 - DNA, 58 bp, Artificial
  Synthetic oligonucleotide
acttcggtgctgcagtgagaacaaattggacgttgtgagaggaagggttagaggagtc

SEQ ID NO: 317855 - DNA, 60 bp, Artificial
  Synthetic oligonucleotide
acttcgtacctatatctgttgacgacaatgtagaaaagctccaatgttatgcttcacagt

SEQ ID NO: 317856 - DNA, 55 bp, Artificial
  Synthetic oligonucleotide
acttcgtatgtcacctatcctgctaaatcccgaactggaacggataacagggttc

SEQ ID NO: 317857 - DNA, 60 bp, Artificial
  Synthetic oligonucleotide
acttcgtattggattcacagagaaaggactcactcaaataccctcgataattgcaacaga

SEQ ID NO: 317858 - DNA, 52 bp, Artificial
  Synthetic oligonucleotide
acttcgtcgtctccaaccctattttccagggccaggccgacccccgtcttga

SEQ ID NO: 317859 - DNA, 59 bp, Artificial
  Synthetic oligonucleotide
acttcgtgccgtctacaggcctgcgctgaggttcaagcccggcctttgcgtcacgccat

SEQ ID NO: 317860 - DNA, 55 bp, Artificial
  Synthetic oligonucleotide
acttcgtgcgcgttcaaggcctcctccgagtctgcgcgttagtgcggaagctggt

SEQ ID NO: 317861 - DNA, 60 bp, Artificial
  Synthetic oligonucleotide
acttcgtgctcacagcagaggcctgccgctactcgtccatcggtgtaggggtggcttggt

SEQ ID NO: 317862 - DNA, 59 bp, Artificial
  Synthetic oligonucleotide
acttcgtgctgacgtacccactgatagccaactgcgaggattttgccggggcaacgctg

SEQ ID NO: 317863 - DNA, 55 bp, Artificial
  Synthetic oligonucleotide
acttcgttgatgcgtggcttgctattcagccggttatctcatctggtcgtcgttc

SEQ ID NO: 317864 - DNA, 56 bp, Artificial
  Synthetic oligonucleotide
acttctaaggccaactaaatgtcaccctagttcatacatgaactgtgtaaaggtta

SEQ ID NO: 317865 - DNA, 51 bp, Artificial
  Synthetic oligonucleotide
acttctacaaggaactttccgttggggactttccaggggaggcgtgacctg

SEQ ID NO: 317866 - DNA, 55 bp, Artificial
  Synthetic oligonucleotide
acttctacagaagatggttccctcgtagaagacgctttagacggtcttggagacg

SEQ ID NO: 317867 - DNA, 59 bp, Artificial
  Synthetic oligonucleotide
acttctacgcaagaactttatggaatgatactatcacagataaaagcgctttcaaacca

SEQ ID NO: 317868 - DNA, 55 bp, Artificial
  Synthetic oligonucleotide
acttctacgggtggcttcccttctgtgagctgctccgtgttactgaccggtaccc

SEQ ID NO: 317869 - DNA, 60 bp, Artificial
  Synthetic oligonucleotide
acttctagaactccgatacgtgcgagagaggcacacatccagatgaaagcagcagcactg

SEQ ID NO: 317870 - DNA, 60 bp, Artificial
  Synthetic oligonucleotide
acttctagtttgcatagatctgacccaaatctgctagaaggtcagggccctgatttcaca

SEQ ID NO: 317871 - DNA, 60 bp, Artificial
  Synthetic oligonucleotide
acttctcatcgtcgatttaattcacgtaatacattgtttaagcgtcagcatcctagcagg

SEQ ID NO: 317872 - DNA, 59 bp, Artificial
  Synthetic oligonucleotide
acttctcccctttgctgctgctccaccggaacagagtaggatgcagttctcctccctaa

SEQ ID NO: 317873 - DNA, 55 bp, Artificial
  Synthetic oligonucleotide
acttctccggattcaggcgaattcgtggcttctagatttccacccaaccacgaat

SEQ ID NO: 317874 - DNA, 60 bp, Artificial
  Synthetic oligonucleotide
acttctccgtgcgtttgctgaaagatacgccatttatagatcagaaggccattttgcaaa

SEQ ID NO: 317875 - DNA, 56 bp, Artificial
  Synthetic oligonucleotide
acttctcctagacctaaaggaacaacagagaatgctacaactacaaacagggatat

SEQ ID NO: 317876 - DNA, 52 bp, Artificial
  Synthetic oligonucleotide
acttctcctggcaacatagagtaaatgctgagtgattgaacctggattgctg

SEQ ID NO: 317877 - DNA, 55 bp, Artificial
  Synthetic oligonucleotide
acttctccttttggtgttcgggtcaattcaatgacgcctgctaacgtgaaccagt

SEQ ID NO: 317878 - DNA, 60 bp, Artificial
  Synthetic oligonucleotide
acttctcgatgtgtggatggaaggtgagtatcgcgctagggcgactactttggatggtca

SEQ ID NO: 317879 - DNA, 55 bp, Artificial
  Synthetic oligonucleotide
acttctcgtatactgatcgattatgccgttaaacttctgtgtttgcgttttagtt

SEQ ID NO: 317880 - DNA, 54 bp, Artificial
  Synthetic oligonucleotide
acttctctaaccaagtaaaccaattcaaagccatatgttccggtcaaacaatta

SEQ ID NO: 317881 - DNA, 60 bp, Artificial
  Synthetic oligonucleotide
acttctctgacttccggctggcatgcgctgcttggctatataatggttgtgtccagacat

SEQ ID NO: 317882 - DNA, 58 bp, Artificial
  Synthetic oligonucleotide
acttctctgatcgatcaccaatcgttgattcggctgccaacaccttaaaaagtccacc

SEQ ID NO: 317883 - DNA, 55 bp, Artificial
  Synthetic oligonucleotide
acttctctttccctgataaggagggttgctgttttaacagtgagagaagtttcat

SEQ ID NO: 317884 - DNA, 53 bp, Artificial
  Synthetic oligonucleotide
acttctgaaaacgtgtttaaactgttcaccgacggccttgcagccgtccttat

SEQ ID NO: 317885 - DNA, 60 bp, Artificial
  Synthetic oligonucleotide
acttctgagggtgcacaaggcgccgagagcttgaaaaaagactctatcactgaggccgca

SEQ ID NO: 317886 - DNA, 60 bp, Artificial
  Synthetic oligonucleotide
acttctgcgaacagcattgaacagactatacctctgttaactgcttcaccatgttccgga

SEQ ID NO: 317887 - DNA, 55 bp, Artificial
  Synthetic oligonucleotide
acttctggaggggtgaaaatggacggaggacaaggattgcatatgaaagaatgtg

SEQ ID NO: 317888 - DNA, 53 bp, Artificial
  Synthetic oligonucleotide
acttctggcagcccatgattctcctggtcctatttctattgggccgttaagcc

SEQ ID NO: 317889 - DNA, 55 bp, Artificial
  Synthetic oligonucleotide
acttctgggaaggtatgcctatcagatccacgtcaactacagaaggcgatcgagc

SEQ ID NO: 317890 - DNA, 58 bp, Artificial
  Synthetic oligonucleotide
acttctgggaccgacgggagccgatcctcaacctactgctgtccagatagccgagtct

SEQ ID NO: 317891 - DNA, 54 bp, Artificial
  Synthetic oligonucleotide
acttctgggacgcagcagtctcaggggactacagaaggggtgggaaacccttaa

SEQ ID NO: 317892 - DNA, 60 bp, Artificial
  Synthetic oligonucleotide
acttctgggagatgtagcatcgccttccttgcgtcacgtaccacatgccttctactcgga

SEQ ID NO: 317893 - DNA, 53 bp, Artificial
  Synthetic oligonucleotide
acttctgtcggcacggcgttgtgaatgtttgcgcgcatttttccctccctagt

SEQ ID NO: 317894 - DNA, 58 bp, Artificial
  Synthetic oligonucleotide
acttcttaagaaaccttgactggactcaggtgatggctggtcagtatgtgaccaaccc

SEQ ID NO: 317895 - DNA, 55 bp, Artificial
  Synthetic oligonucleotide
acttcttatacgcttatggtgaaggcagacgtaaaacccaagttagataacacac

SEQ ID NO: 317896 - DNA, 60 bp, Artificial
  Synthetic oligonucleotide
acttcttcagacatccctggagaagctacattataacttgggaccaggacattccttgca

SEQ ID NO: 317897 - DNA, 51 bp, Artificial
  Synthetic oligonucleotide
acttcttggataaggcctggtttcagttttggcatgtcttcgtctgaaaga

SEQ ID NO: 317898 - DNA, 55 bp, Artificial
  Synthetic oligonucleotide
acttcttggcatgggctccccgcagtaaagattgggtcaactgatcacagttagc

SEQ ID NO: 317899 - DNA, 60 bp, Artificial
  Synthetic oligonucleotide
acttcttggctctacccagcttgacatcgcccctgaaggagccgtctattcattagatcg

SEQ ID NO: 317900 - DNA, 52 bp, Artificial
  Synthetic oligonucleotide
acttctttacattccaccacttggtaccttacagaccctaattgattctgtc

SEQ ID NO: 317901 - DNA, 54 bp, Artificial
  Synthetic oligonucleotide
acttctttaccccagtttataggtagtgcccctgctcggagagcccctgactgg

SEQ ID NO: 317902 - DNA, 53 bp, Artificial
  Synthetic oligonucleotide
acttctttccgtcgggccgtggtctccttgacaccgcctcagctctttaccgg

SEQ ID NO: 317903 - DNA, 59 bp, Artificial
  Synthetic oligonucleotide
acttctttccgtcggtgcgagatctcctagataccgccgctgctctgtttcgggatgcc

SEQ ID NO: 317904 - DNA, 58 bp, Artificial
  Synthetic oligonucleotide
acttctttccgtcggttcgtgatcttcttgacacagcctcagctctttatcgggaagc

SEQ ID NO: 317905 - DNA, 59 bp, Artificial
  Synthetic oligonucleotide
acttctttccttctgttcgagatctcgtcgacaccgccacagctctgtatcgggaggcc

SEQ ID NO: 317906 - DNA, 59 bp, Artificial
  Synthetic oligonucleotide
acttgaaaagagacgtgcacagatatcggcattactaacaatgttacagaaaccagtta

SEQ ID NO: 317907 - DNA, 57 bp, Artificial
  Synthetic oligonucleotide
acttgaaatcgatgtcatcacaggccccctgttcccagagttggaagtccgcccgct

SEQ ID NO: 317908 - DNA, 52 bp, Artificial
  Synthetic oligonucleotide
acttgaaccctaaatacccttaagaaacgaccagtctgagggcgtaagctcg

SEQ ID NO: 317909 - DNA, 60 bp, Artificial
  Synthetic oligonucleotide
acttgaagcactcaaagcagatcccaacctgtggtgtgattgatgtacgtgcatcagagc

SEQ ID NO: 317910 - DNA, 55 bp, Artificial
  Synthetic oligonucleotide
acttgaaggtcccagagtcgcccccactcaaataagcatagccggactgataacc

SEQ ID NO: 317911 - DNA, 57 bp, Artificial
  Synthetic oligonucleotide
acttgaagttggagtaagctgaaccaacctgcatgtagccatttttacgagttgcct

SEQ ID NO: 317912 - DNA, 57 bp, Artificial
  Synthetic oligonucleotide
acttgaataagaaaatggaagatgggtttttagatgtatggacttacaatgcagaac

SEQ ID NO: 317913 - DNA, 55 bp, Artificial
  Synthetic oligonucleotide
acttgaatgtgtttcgccgtaaggggcgagagcggctgccgattgaggtggttcg

SEQ ID NO: 317914 - DNA, 60 bp, Artificial
  Synthetic oligonucleotide
acttgaattaggggattgcagcattgccggatggctccttggaaatccagaatgtgatag

SEQ ID NO: 317915 - DNA, 57 bp, Artificial
  Synthetic oligonucleotide
acttgaattatttacgtggttgattgttgttcatatggatttacgtggagatattta

SEQ ID NO: 317916 - DNA, 58 bp, Artificial
  Synthetic oligonucleotide
acttgacaaggtgtgaagagtcccgtgtgctcgtcttgagtcctccggcccctgaatg

SEQ ID NO: 317917 - DNA, 56 bp, Artificial
  Synthetic oligonucleotide
acttgacactaggtggttttctattcagcgtggagatgtatgaggtgcgtatgggc

SEQ ID NO: 317918 - DNA, 50 bp, Artificial
  Synthetic oligonucleotide
acttgacactggacgtaaacaatcgcccgatatgcaaagattatgatgga

SEQ ID NO: 317919 - DNA, 58 bp, Artificial
  Synthetic oligonucleotide
acttgacagacaaggagttgtacatcttatattttcatgatgttcttaggttcgtaag

SEQ ID NO: 317920 - DNA, 57 bp, Artificial
  Synthetic oligonucleotide
acttgacatcggacgaggatttagctccctggaaatttggatggaattgggtggagc

SEQ ID NO: 317921 - DNA, 56 bp, Artificial
  Synthetic oligonucleotide
acttgaccccaattcaaaaacctggatggatattgaggggagaccagaggatccag

SEQ ID NO: 317922 - DNA, 53 bp, Artificial
  Synthetic oligonucleotide
acttgaccccccccattgagaggaccgtctaccggatggtcgacttgcccgtg

SEQ ID NO: 317923 - DNA, 60 bp, Artificial
  Synthetic oligonucleotide
acttgacccttcattaatcagcacttttgcagggagcacgctccccagaagatcaggtac

SEQ ID NO: 317924 - DNA, 57 bp, Artificial
  Synthetic oligonucleotide
acttgacgtcggaacacgacttagctccctgaacgtttggatggaaatgtgttgatc

SEQ ID NO: 317925 - DNA, 58 bp, Artificial
  Synthetic oligonucleotide
acttgactctcaagacaactgtatttgattcaattaactccagaataagtacgattga

SEQ ID NO: 317926 - DNA, 57 bp, Artificial
  Synthetic oligonucleotide
acttgagaaaagacgtgcgcaaatatcagctttactgactatgctacaaaaaccggt

SEQ ID NO: 317927 - DNA, 55 bp, Artificial
  Synthetic oligonucleotide
acttgagaagaaagtaaaggagatttcaagtcaggagcctattaaactgtaatta

SEQ ID NO: 317928 - DNA, 57 bp, Artificial
  Synthetic oligonucleotide
acttgagaagccagaactcttattttcatatatcacggacgccgaacctttagcaac

SEQ ID NO: 317929 - DNA, 60 bp, Artificial
  Synthetic oligonucleotide
acttgagaggcgttttgaggcttccaggcagagaatactcacagaccccacacagtctag

SEQ ID NO: 317930 - DNA, 56 bp, Artificial
  Synthetic oligonucleotide
acttgagcaatctggactccccgttggggggaatgagaagaaggctaaattggcaa

SEQ ID NO: 317931 - DNA, 56 bp, Artificial
  Synthetic oligonucleotide
acttgaggaaaattaaaggagagaccgtatttgatatgtcagagtgagctaaaaac

SEQ ID NO: 317932 - DNA, 60 bp, Artificial
  Synthetic oligonucleotide
acttgagggactttatattggtgacagcgagagcagtggaacttctgggacgcagcagcc

SEQ ID NO: 317933 - DNA, 59 bp, Artificial
  Synthetic oligonucleotide
acttgagtcccactcagttggttgagttagggtattgcgatccagtgcgcatctttgtt

SEQ ID NO: 317934 - DNA, 56 bp, Artificial
  Synthetic oligonucleotide
acttgatccgggtggacattgcggtagaccgtggtcacgtgcttgtcggtagggtc

SEQ ID NO: 317935 - DNA, 59 bp, Artificial
  Synthetic oligonucleotide
acttgatcgcaaccaagtccaattatgagcctgttagccggtatgtggggttgagtgac

SEQ ID NO: 317936 - DNA, 58 bp, Artificial
  Synthetic oligonucleotide
acttgatgacatcgaaagatttagacaggagggtttctattacacaaatatgttagag

SEQ ID NO: 317937 - DNA, 50 bp, Artificial
  Synthetic oligonucleotide
acttgatgagtcatgctgaactgtataaatgcttctttggaacagtcaac

SEQ ID NO: 317938 - DNA, 60 bp, Artificial
  Synthetic oligonucleotide
acttgatgggtacaatgtggctgaacgcaggatcagaaattcaggtcgctggatttgact

SEQ ID NO: 317939 - DNA, 59 bp, Artificial
  Synthetic oligonucleotide
acttgatgtccacactcgttgtggctgagtggcacaaagccggaaggccaaacccgatg

SEQ ID NO: 317940 - DNA, 58 bp, Artificial
  Synthetic oligonucleotide
acttgattagtgacaagtggtttggaacccagaagagcaagattgggagaactgcatt

SEQ ID NO: 317941 - DNA, 60 bp, Artificial
  Synthetic oligonucleotide
acttgattgatgatcccggtgttccatggaaggtctgggtcctgcgcatgtcttgtattg

SEQ ID NO: 317942 - DNA, 54 bp, Artificial
  Synthetic oligonucleotide
acttgattgtgaggagtttagtgctcagtcttacggtgttgtcagacccacaaa

SEQ ID NO: 317943 - DNA, 60 bp, Artificial
  Synthetic oligonucleotide
acttgattttcactactggcataaagatgggggtgtgtggctccctgcggaccatggagc

SEQ ID NO: 317944 - DNA, 54 bp, Artificial
  Synthetic oligonucleotide
acttgcaacatagtctaccgcacggaggtcggtacagggacgggacaaagtcgg

SEQ ID NO: 317945 - DNA, 52 bp, Artificial
  Synthetic oligonucleotide
acttgcaatcggcaaattaatagtcccaacgaacttcgaagttttaagggaa

SEQ ID NO: 317946 - DNA, 59 bp, Artificial
  Synthetic oligonucleotide
acttgcacttcatgttcactgggccgaccgacgcgaaagctcggtacatggtggcgtac

SEQ ID NO: 317947 - DNA, 60 bp, Artificial
  Synthetic oligonucleotide
acttgcagactcgttatcttcacccactattgagacacgaacgcgtcagtataccttaca

SEQ ID NO: 317948 - DNA, 60 bp, Artificial
  Synthetic oligonucleotide
acttgcagggacatttacttggacactgtctgattcatcaggtacagagactcctggtgg

SEQ ID NO: 317949 - DNA, 59 bp, Artificial
  Synthetic oligonucleotide
acttgcaggggtatctccaattgaagggtgagagaaccttgaatcaggtgaagtcgata

SEQ ID NO: 317950 - DNA, 60 bp, Artificial
  Synthetic oligonucleotide
acttgcagggtgctgctcccggtgcttggcaagcgatgccccgcttgcagcgctgggttg

SEQ ID NO: 317951 - DNA, 60 bp, Artificial
  Synthetic oligonucleotide
acttgcaggtctacacgatttgttgcccgcagaaacatcaattttgtccagacggatcac

SEQ ID NO: 317952 - DNA, 53 bp, Artificial
  Synthetic oligonucleotide
acttgcagtgctcaagcgcagtatcgaggtcacccattttgcctaccccgctg

SEQ ID NO: 317953 - DNA, 60 bp, Artificial
  Synthetic oligonucleotide
acttgcatgatgtgctacaagcgcaatcgtgctacgcgcgttgagtgtacaactatagtt

SEQ ID NO: 317954 - DNA, 60 bp, Artificial
  Synthetic oligonucleotide
acttgccaataactggatcaatggatgtgtcatatgtgaacgctacaaaggacgaaccat

SEQ ID NO: 317955 - DNA, 59 bp, Artificial
  Synthetic oligonucleotide
acttgccagagttaacaactttattggctaatgagatccaagcacctgctgttacacga

SEQ ID NO: 317956 - DNA, 59 bp, Artificial
  Synthetic oligonucleotide
acttgcccaccaagtttggatccacaaacatgtgggatccattattgcacgaatttcca

SEQ ID NO: 317957 - DNA, 56 bp, Artificial
  Synthetic oligonucleotide
acttgccctcccacgtagtgttagtgaagccgagacgttcattctcacccacggta

SEQ ID NO: 317958 - DNA, 58 bp, Artificial
  Synthetic oligonucleotide
acttgccgcttacttggatggtatatctaaaagcaaaggatgttactagctttggaca

SEQ ID NO: 317959 - DNA, 55 bp, Artificial
  Synthetic oligonucleotide
acttgcctaggaaatgaaaccatggcggggtgtaatgacactatcacacttccat

SEQ ID NO: 317960 - DNA, 60 bp, Artificial
  Synthetic oligonucleotide
acttgcctcatactactaccagcgacggtgattggactgagtccgctgatccaggtagga

SEQ ID NO: 317961 - DNA, 60 bp, Artificial
  Synthetic oligonucleotide
acttgcctctattgggaatggaaggatagtagagaggttgcttggtatgatagctatgtc

SEQ ID NO: 317962 - DNA, 57 bp, Artificial
  Synthetic oligonucleotide
acttgcgacagatgagctctctaatgaggcaagttttgggtgggcatggagaagata

SEQ ID NO: 317963 - DNA, 60 bp, Artificial
  Synthetic oligonucleotide
acttgcgaggcaatgcaactatgaatgtacgtacgaatagtcacataatacagactatat

SEQ ID NO: 317964 - DNA, 55 bp, Artificial
  Synthetic oligonucleotide
acttgcgagttcacgtaacgctcggtgagtccattccattggccatagacccgga

SEQ ID NO: 317965 - DNA, 59 bp, Artificial
  Synthetic oligonucleotide
acttgcgcactacgttttgcgcatttaatcatgtgggatccgctgttgaacgactttcc

SEQ ID NO: 317966 - DNA, 60 bp, Artificial
  Synthetic oligonucleotide
acttgcgccagatagccctaaagctcggacctcacttggaatcgaaacagcgcgtgcgtc

SEQ ID NO: 317967 - DNA, 60 bp, Artificial
  Synthetic oligonucleotide
acttgcggccataaaactcttaatgttcatgcgtgcttcaggcaacataagtcatgtatt

SEQ ID NO: 317968 - DNA, 58 bp, Artificial
  Synthetic oligonucleotide
acttgcgggattggattggcagttagctacgtcgaaggcaatgaaagcgtgaacttgg

SEQ ID NO: 317969 - DNA, 55 bp, Artificial
  Synthetic oligonucleotide
acttgcgtgcctattctgttgccgcaaggggtaggggctttacaatcagataccc

SEQ ID NO: 317970 - DNA, 56 bp, Artificial
  Synthetic oligonucleotide
acttgctaccttaaggcgtccgcggccattaaggcggcgggcttgaaagactgcac

SEQ ID NO: 317971 - DNA, 52 bp, Artificial
  Synthetic oligonucleotide
acttgctatatacgctacagttgcaggctccttgtcactggcaatcatgata

SEQ ID NO: 317972 - DNA, 55 bp, Artificial
  Synthetic oligonucleotide
acttgctcaagaggctgtttgacacgtttgaggactccgtccccacgggaccaac

SEQ ID NO: 317973 - DNA, 58 bp, Artificial
  Synthetic oligonucleotide
acttgctgcattgacggcgttgtgatatacgtcgtctttattggactttgtaccccca

SEQ ID NO: 317974 - DNA, 55 bp, Artificial
  Synthetic oligonucleotide
acttgctgctgccagaccaggagaccgcacatgtgactgcggacagcgctcgcga

SEQ ID NO: 317975 - DNA, 58 bp, Artificial
  Synthetic oligonucleotide
acttgctggactgttaacggtaaaagtctagaaggcagttttgtgctcagatactctg

SEQ ID NO: 317976 - DNA, 60 bp, Artificial
  Synthetic oligonucleotide
acttgcttgctgtgccaaatgcttgtactacttgcgcggcgctatagcgccgcgctagtg

SEQ ID NO: 317977 - DNA, 56 bp, Artificial
  Synthetic oligonucleotide
acttgctttacctttgggtgcttagagatcttatcttagttttgaaggcaagacgc

SEQ ID NO: 317978 - DNA, 57 bp, Artificial
  Synthetic oligonucleotide
acttggaaccaccggaggaagtccagcgaagcgaagacgagcagaagcccctgactc

SEQ ID NO: 317979 - DNA, 56 bp, Artificial
  Synthetic oligonucleotide
acttggaagttgaagtaggctttgtggagacccaacgctgtcctcatgttgtggtt

SEQ ID NO: 317980 - DNA, 58 bp, Artificial
  Synthetic oligonucleotide
acttggaagttgaggtaggccttgtggagacccaatgctctcctgaggttgtggttga

SEQ ID NO: 317981 - DNA, 55 bp, Artificial
  Synthetic oligonucleotide
acttggaatagtacttggaatgatactggagggtcaaatgacactatcagactcc

SEQ ID NO: 317982 - DNA, 55 bp, Artificial
  Synthetic oligonucleotide
acttggaatgtaactggtacttggaatgttactgcaaggtcaaattacactggag

SEQ ID NO: 317983 - DNA, 60 bp, Artificial
  Synthetic oligonucleotide
acttggactcacgtacgaatttgatgacatcactagcgacatttgcgagaatccttatat

SEQ ID NO: 317984 - DNA, 58 bp, Artificial
  Synthetic oligonucleotide
acttggagatcgattggacgtacccctcttcttacgaaatgcatgaacgcagcgacgg

SEQ ID NO: 317985 - DNA, 54 bp, Artificial
  Synthetic oligonucleotide
acttggagccacaaagtaaatagacctagctgaaaagggatagtcgagtgaatc

SEQ ID NO: 317986 - DNA, 60 bp, Artificial
  Synthetic oligonucleotide
acttggagcgcaagggagccggtggagccatgggatgctcctcccgatgctcgatccctt

SEQ ID NO: 317987 - DNA, 60 bp, Artificial
  Synthetic oligonucleotide
acttggagctgataacatcgtgctcctctaacgtctccgtagcccatgaccatactggac

SEQ ID NO: 317988 - DNA, 55 bp, Artificial
  Synthetic oligonucleotide
acttggattgggaattctctggtcactctaggcattctctcgttatattacgacg

SEQ ID NO: 317989 - DNA, 54 bp, Artificial
  Synthetic oligonucleotide
acttggcaaagactttgatagggaacatactgtccctaacaggaccctcttttc

SEQ ID NO: 317990 - DNA, 59 bp, Artificial
  Synthetic oligonucleotide
acttggcacaggtgctgataccacaactgtggtcggtcccactgttgtaaactccacaa

SEQ ID NO: 317991 - DNA, 54 bp, Artificial
  Synthetic oligonucleotide
acttggcagatgcagtaagtggatggcaagataaattgcaaggttggactgata

SEQ ID NO: 317992 - DNA, 55 bp, Artificial
  Synthetic oligonucleotide
acttggccccggatcatcacaaactggcccagcgacctgacaccccgaataacag

SEQ ID NO: 317993 - DNA, 58 bp, Artificial
  Synthetic oligonucleotide
acttggcccctgtaataagcagccatagctatggccgcgttaggtcataaggctaaat

SEQ ID NO: 317994 - DNA, 59 bp, Artificial
  Synthetic oligonucleotide
acttggccgtgatcgatggcagaaattggttggctacacggagaaatctccaccttcgc

SEQ ID NO: 317995 - DNA, 59 bp, Artificial
  Synthetic oligonucleotide
acttggcgtgatccgtgacatgcgtagtgtgacacctgcccccaggtcaatgggggtag

SEQ ID NO: 317996 - DNA, 60 bp, Artificial
  Synthetic oligonucleotide
acttggcgtggtccccatgtgttaaccaatcatatttcagctgcagagtcttgttatttc

SEQ ID NO: 317997 - DNA, 60 bp, Artificial
  Synthetic oligonucleotide
acttggcgttgacgtcatatgttgtgaactcaactagactgttataataattatgtgtcc

SEQ ID NO: 317998 - DNA, 52 bp, Artificial
  Synthetic oligonucleotide
acttggctcgacgcagacgatgcaatcaatctgggcctagccgatgagaaat

SEQ ID NO: 317999 - DNA, 60 bp, Artificial
  Synthetic oligonucleotide
acttggctgcatcacagtctcgttgtgtaaaagctctagacatgggagcatcacctcagg

SEQ ID NO: 318000 - DNA, 55 bp, Artificial
  Synthetic oligonucleotide
acttggctgttctactatatcatcggtagtgaaagttggaactacaaacgtggtt

SEQ ID NO: 318001 - DNA, 58 bp, Artificial
  Synthetic oligonucleotide
acttgggaatgcatatgtgtgcactagatgctgtggcgtattgcactatggggagatg

SEQ ID NO: 318002 - DNA, 60 bp, Artificial
  Synthetic oligonucleotide
acttgggagcgagaccatctgcgggggtcaatagagcgtgtaacgtagctatggccttca

SEQ ID NO: 318003 - DNA, 52 bp, Artificial
  Synthetic oligonucleotide
acttgggatctagaactattggacatccatctctatcactcatttgtaccct

SEQ ID NO: 318004 - DNA, 59 bp, Artificial
  Synthetic oligonucleotide
acttgggatgcccaaatattccattgctaggtcaaacggctatatatgtctgtagaatg

SEQ ID NO: 318005 - DNA, 60 bp, Artificial
  Synthetic oligonucleotide
acttgggccttctataacaatactaatgggcctatctggccgcgcagcggaatccatgac

SEQ ID NO: 318006 - DNA, 51 bp, Artificial
  Synthetic oligonucleotide
acttggggacatgagagcactgttggctagggcaacagaccacgtgactat

SEQ ID NO: 318007 - DNA, 60 bp, Artificial
  Synthetic oligonucleotide
acttggggagatggggcatcttattcttggggatattgataatctgtagtgctacaaaca

SEQ ID NO: 318008 - DNA, 60 bp, Artificial
  Synthetic oligonucleotide
acttggggggctcatcatcacagttttgctggactattattaagagcacaatgtagattt

SEQ ID NO: 318009 - DNA, 53 bp, Artificial
  Synthetic oligonucleotide
acttgggggttcgtgtgtgcgagaagatggctctttacgacgtggtctccacc

SEQ ID NO: 318010 - DNA, 56 bp, Artificial
  Synthetic oligonucleotide
acttgggtgcccaacggtgctcctgaagcagctttgttaaacaccagcaaccccac

SEQ ID NO: 318011 - DNA, 60 bp, Artificial
  Synthetic oligonucleotide
acttggtcaatgggtttcagtttgcaacagagtcatatcacatatgcctgaaggatcact

SEQ ID NO: 318012 - DNA, 57 bp, Artificial
  Synthetic oligonucleotide
acttggtcagtcgcggacgccccgggcagcatactttacaccgtccaacattctcca

SEQ ID NO: 318013 - DNA, 60 bp, Artificial
  Synthetic oligonucleotide
acttggtcctgattgccagctaatgcagccttataatgatttaaactgagtggaggcaca

SEQ ID NO: 318014 - DNA, 60 bp, Artificial
  Synthetic oligonucleotide
acttggtgactacctcatcaaggagtggacccaggaaagcattgatgaaatgatggcttc

SEQ ID NO: 318015 - DNA, 56 bp, Artificial
  Synthetic oligonucleotide
acttggtgcagccaaaggtaatctagcatacggtaagtttatgtttactgtatacc

SEQ ID NO: 318016 - DNA, 57 bp, Artificial
  Synthetic oligonucleotide
acttggtggcgcttatggcaggtttggccggatacttcctatcctagatttactata

SEQ ID NO: 318017 - DNA, 52 bp, Artificial
  Synthetic oligonucleotide
acttggttccctaacggcacgcaggagtcaaatagcacaagtgacaatataa

SEQ ID NO: 318018 - DNA, 60 bp, Artificial
  Synthetic oligonucleotide
acttggttggtcgctcagctgtgcacccgacagtagacctggcagatgaggctagaagta

SEQ ID NO: 318019 - DNA, 51 bp, Artificial
  Synthetic oligonucleotide
acttggtttacccagtatccatacaccaagtaaaaccaaattacaacctag

SEQ ID NO: 318020 - DNA, 60 bp, Artificial
  Synthetic oligonucleotide
acttggtttatgttgtcaatcatgcatattcttcagtgtggttcccaccataagttatgt

SEQ ID NO: 318021 - DNA, 60 bp, Artificial
  Synthetic oligonucleotide
acttgtaaccatcaggaatgatgagtggtaatcccgggcagacgattccagactctatta

SEQ ID NO: 318022 - DNA, 60 bp, Artificial
  Synthetic oligonucleotide
acttgtaagagtgttgacagtaatgattgtctggttaccacgtcagtcaaggtatgcttg

SEQ ID NO: 318023 - DNA, 58 bp, Artificial
  Synthetic oligonucleotide
acttgtaatcccgaatatcggatctagacccagggtaagggatgtctccagcagaata

SEQ ID NO: 318024 - DNA, 55 bp, Artificial
  Synthetic oligonucleotide
acttgtacaaacacgatctacgcaggttcccccaactgacaccaaccgtgcaact

SEQ ID NO: 318025 - DNA, 60 bp, Artificial
  Synthetic oligonucleotide
acttgtacagatctggcttctgcatacacgtccagtgtaatgccagcaaattccatcaag

SEQ ID NO: 318026 - DNA, 56 bp, Artificial
  Synthetic oligonucleotide
acttgtaccagactggtttgcttttaaagactgtagactctgttacagtaggtcta

SEQ ID NO: 318027 - DNA, 57 bp, Artificial
  Synthetic oligonucleotide
acttgtaccatctaacgatgactaccaaacgccaataatgaattctgttactgtaag

SEQ ID NO: 318028 - DNA, 53 bp, Artificial
  Synthetic oligonucleotide
acttgtacgggaaagccctcacaaacgctattcctcttagtgttgggttctgt

SEQ ID NO: 318029 - DNA, 60 bp, Artificial
  Synthetic oligonucleotide
acttgtagtgagttgtcgaacacatgtcaggctgtacgcttttacaacacgctcctcagc

SEQ ID NO: 318030 - DNA, 58 bp, Artificial
  Synthetic oligonucleotide
acttgtattgtgatgatgtcgttgttcatcagaaatggtctctcgtcgtggctgatta

SEQ ID NO: 318031 - DNA, 58 bp, Artificial
  Synthetic oligonucleotide
acttgtattgtgattatgtcgtgtttcgtcagaaatggtctctcgtcgtggttggtta

SEQ ID NO: 318032 - DNA, 55 bp, Artificial
  Synthetic oligonucleotide
acttgtcaacgagagatggtgaacccctcatgatagtggcgaaacacgaaagggg

SEQ ID NO: 318033 - DNA, 58 bp, Artificial
  Synthetic oligonucleotide
acttgtcaccaaattctctctggctatcaggggccattgttatgttacaccctttagc

SEQ ID NO: 318034 - DNA, 59 bp, Artificial
  Synthetic oligonucleotide
acttgtcattcaagaaaggagaacgcctgcagattgtcaacaacacggaaggcaactgg

SEQ ID NO: 318035 - DNA, 55 bp, Artificial
  Synthetic oligonucleotide
acttgtccgataggcttattaaagtactgggccctaatagctagttcagggtgaa

SEQ ID NO: 318036 - DNA, 50 bp, Artificial
  Synthetic oligonucleotide
acttgtcctgactgttatagtaggaagatgacatttcagcgtcagattgt

SEQ ID NO: 318037 - DNA, 54 bp, Artificial
  Synthetic oligonucleotide
acttgtccttggtttccgcaagagggaaccatagatattaaacggtggcgtaga

SEQ ID NO: 318038 - DNA, 53 bp, Artificial
  Synthetic oligonucleotide
acttgtcgggatggtttgttgccggttacagcgggggggacatttttcacagc

SEQ ID NO: 318039 - DNA, 57 bp, Artificial
  Synthetic oligonucleotide
acttgtgaagccccagtgctttcctcaggttgtggttgaactgtatttggactgtta

SEQ ID NO: 318040 - DNA, 55 bp, Artificial
  Synthetic oligonucleotide
acttgtgaattgtacgagctagttgaggccatggtcgagaagggccaagatggct

SEQ ID NO: 318041 - DNA, 60 bp, Artificial
  Synthetic oligonucleotide
acttgtgagcatccagaactgcattgaaatcctcttggtcgaggcttgggtcaatgagac

SEQ ID NO: 318042 - DNA, 57 bp, Artificial
  Synthetic oligonucleotide
acttgtgcaaatgccaattgaggaggttttcaataggacccttgtcaattgaggtcc

SEQ ID NO: 318043 - DNA, 60 bp, Artificial
  Synthetic oligonucleotide
acttgtgcagtcccaaagctttccgagtgttgtagttgaactggatcctgatcgtgagta

SEQ ID NO: 318044 - DNA, 57 bp, Artificial
  Synthetic oligonucleotide
acttgtgctctcagaagggataaaaacctgataccctcctgaagtgtccaaatcaaa

SEQ ID NO: 318045 - DNA, 57 bp, Artificial
  Synthetic oligonucleotide
acttgtggaaatatactgatgtgggaagcagtcactgtaaaaacagaagtccttggg

SEQ ID NO: 318046 - DNA, 60 bp, Artificial
  Synthetic oligonucleotide
acttgtgggtatctcgagtcaggtcacgcaattatctaactcagttagccagaacactca

SEQ ID NO: 318047 - DNA, 56 bp, Artificial
  Synthetic oligonucleotide
acttgtggtcgatggagtgcttgtggttgcttctcttggaattctttcaggtatct

SEQ ID NO: 318048 - DNA, 60 bp, Artificial
  Synthetic oligonucleotide
acttgtgtaaaatcaagggagtctgcaatgagctttgcatcattgaggacacttgttttg

SEQ ID NO: 318049 - DNA, 60 bp, Artificial
  Synthetic oligonucleotide
acttgtgttctgacaattgggactcagattctgcggtctgagtcccttctctgctgggct

SEQ ID NO: 318050 - DNA, 56 bp, Artificial
  Synthetic oligonucleotide
acttgttaacatactaacatggagctatttagaggggtgcttcaggtttcttctaa

SEQ ID NO: 318051 - DNA, 55 bp, Artificial
  Synthetic oligonucleotide
acttgttgagatggggaactataatcttgggtttgataataatctgtagtactaa

SEQ ID NO: 318052 - DNA, 55 bp, Artificial
  Synthetic oligonucleotide
acttgttgagctctatgctattctccaggtgttcacagttctagctcaccaaccg

SEQ ID NO: 318053 - DNA, 55 bp, Artificial
  Synthetic oligonucleotide
acttgtttaaagcctttcacgcaaatccaggcatagtaacagggtgtgcagttgg

SEQ ID NO: 318054 - DNA, 58 bp, Artificial
  Synthetic oligonucleotide
acttgtttccattaagcatccgatcaagattggacccatcttatttctatggaggact

SEQ ID NO: 318055 - DNA, 55 bp, Artificial
  Synthetic oligonucleotide
acttgtttcgcgcatacaaattcgagttaatcctttgccgaaatttgattctacc

SEQ ID NO: 318056 - DNA, 60 bp, Artificial
  Synthetic oligonucleotide
acttgtttctagacgagagatgcttagcaaaacgcaaaatgctaggcaaaagagcgtgtc

SEQ ID NO: 318057 - DNA, 53 bp, Artificial
  Synthetic oligonucleotide
acttgttttggttggttctgtgaatgtccctagttccctccttaaagattgag

SEQ ID NO: 318058 - DNA, 51 bp, Artificial
  Synthetic oligonucleotide
actttaaacgctgcagcccactagtgtgtgggaaggctatccaacttagag

SEQ ID NO: 318059 - DNA, 55 bp, Artificial
  Synthetic oligonucleotide
actttaaacggtgcagtccattggtctgcgggaaagcaatccagcttagggatag

SEQ ID NO: 318060 - DNA, 51 bp, Artificial
  Synthetic oligonucleotide
actttaaccccttctccggctctcctggccagtacccggacgagtttatac

SEQ ID NO: 318061 - DNA, 55 bp, Artificial
  Synthetic oligonucleotide
actttaaggaccctcaatatcctgtttgggagttgactattagagtttggtctga

SEQ ID NO: 318062 - DNA, 53 bp, Artificial
  Synthetic oligonucleotide
actttaagtacttcgcccagatggtttcaaccacggggttcatcccgcccatg

SEQ ID NO: 318063 - DNA, 55 bp, Artificial
  Synthetic oligonucleotide
actttaatactctgggagaacccataatactggccatcagttcctgtgccaggct

SEQ ID NO: 318064 - DNA, 57 bp, Artificial
  Synthetic oligonucleotide
actttacacccgcacttggtcggaggttgatgctgtttctagtccagcccagcccga

SEQ ID NO: 318065 - DNA, 58 bp, Artificial
  Synthetic oligonucleotide
actttacattcttttctggtggctccatcttagccctagtcacggctagctgtgaaag

SEQ ID NO: 318066 - DNA, 55 bp, Artificial
  Synthetic oligonucleotide
actttaccgcaagaacatattgtacaaaaactcaagcaatgttttcggaaattgc

SEQ ID NO: 318067 - DNA, 53 bp, Artificial
  Synthetic oligonucleotide
actttaccgcaggaacagagtggactaaaactcaagcaatgttttcgaaaacc

SEQ ID NO: 318068 - DNA, 54 bp, Artificial
  Synthetic oligonucleotide
actttactcagcaaagattggctgcagcgttcaataatcctactacctggcctc

SEQ ID NO: 318069 - DNA, 54 bp, Artificial
  Synthetic oligonucleotide
actttactgggctttattcttctactgtacctgtctttaatccggagtggcaaa

SEQ ID NO: 318070 - DNA, 60 bp, Artificial
  Synthetic oligonucleotide
actttactgtattcgtaggtccttcatctgatacatctactcatacctttgtaagtgcca

SEQ ID NO: 318071 - DNA, 55 bp, Artificial
  Synthetic oligonucleotide
actttactttacagagactactggaccaaactcgagtgccacaactgccacgaag

SEQ ID NO: 318072 - DNA, 50 bp, Artificial
  Synthetic oligonucleotide
actttagaaacacaggcgggcgcttggtccacaaccgacccatacgcggg

SEQ ID NO: 318073 - DNA, 53 bp, Artificial
  Synthetic oligonucleotide
actttagacgcggcgcttaaggccggaaggaatcacacatggcagacatcgta

SEQ ID NO: 318074 - DNA, 60 bp, Artificial
  Synthetic oligonucleotide
actttagatcaatggaagcattctcagggatctttagatcaccacatggggaggaccatg

SEQ ID NO: 318075 - DNA, 56 bp, Artificial
  Synthetic oligonucleotide
actttagcgctgtcgaaagacgtaaatctacgccagtctgggaatcggccgtctac

SEQ ID NO: 318076 - DNA, 56 bp, Artificial
  Synthetic oligonucleotide
actttaggaattggatgtacgacaaccgacgtcacaacatttgaagaggtagcaaa

SEQ ID NO: 318077 - DNA, 55 bp, Artificial
  Synthetic oligonucleotide
actttagggaagatttggatggatgagaacatcaagctcaagaaccacacgaaca

SEQ ID NO: 318078 - DNA, 54 bp, Artificial
  Synthetic oligonucleotide
actttaggtcctacaattgtgaagagggaaggaggactttaaccatgatggatc

SEQ ID NO: 318079 - DNA, 57 bp, Artificial
  Synthetic oligonucleotide
actttagtcgaaatttggagattgtggacgctagtaacatgccagtttttgagagaa

SEQ ID NO: 318080 - DNA, 57 bp, Artificial
  Synthetic oligonucleotide
actttataccttcggaagagcttaggataggtgagaaatccttttgagactgactca

SEQ ID NO: 318081 - DNA, 60 bp, Artificial
  Synthetic oligonucleotide
actttatagcccctgagtatgcatacaagatagttaaaagaggaaattcggcagtcatga

SEQ ID NO: 318082 - DNA, 56 bp, Artificial
  Synthetic oligonucleotide
actttatagtacgaggtcgacacgaggataaactatacgatgcccgaattcgtatc

SEQ ID NO: 318083 - DNA, 55 bp, Artificial
  Synthetic oligonucleotide
actttatatgttgtcaacccgaggacgtcaaactgtgaaagagaacaaagggaca

SEQ ID NO: 318084 - DNA, 50 bp, Artificial
  Synthetic oligonucleotide
actttatcaacgtacactcgggtgacccaatcaacgtgcgccttatcttg

SEQ ID NO: 318085 - DNA, 55 bp, Artificial
  Synthetic oligonucleotide
actttatcaagcagattagggcgtacatggatggtaaaataccggttgccactgt

SEQ ID NO: 318086 - DNA, 55 bp, Artificial
  Synthetic oligonucleotide
actttatcgattaccatgaactttgtcacctaccggatgtgtgacagtgacgtag

SEQ ID NO: 318087 - DNA, 58 bp, Artificial
  Synthetic oligonucleotide
actttatgctcaagatggacaaataccctttctttaatgcattcataggtcacaaaac

SEQ ID NO: 318088 - DNA, 55 bp, Artificial
  Synthetic oligonucleotide
actttatgtcatttggtcttctataacaatggatgtacctctgtgactctggttg

SEQ ID NO: 318089 - DNA, 56 bp, Artificial
  Synthetic oligonucleotide
actttattacacaaacacattcaacagaccctaaaaatgtacccataggatctcta

SEQ ID NO: 318090 - DNA, 51 bp, Artificial
  Synthetic oligonucleotide
actttattgaacgatctattcaaatcactaagtaatgcgatggactttata

SEQ ID NO: 318091 - DNA, 58 bp, Artificial
  Synthetic oligonucleotide
actttattggacttatgtactataacagtactggtaacatgggggtgctggctggtca

SEQ ID NO: 318092 - DNA, 55 bp, Artificial
  Synthetic oligonucleotide
actttattttcgtagatagcccaggctaattgtaagacctccattagagtgcgag

SEQ ID NO: 318093 - DNA, 60 bp, Artificial
  Synthetic oligonucleotide
actttcaagcgtatccgatagactaccgtagatcagtgcaacgaggaatattgctactcg

SEQ ID NO: 318094 - DNA, 58 bp, Artificial
  Synthetic oligonucleotide
actttcaatatcaggagggaatgttagaacaactgatggcaaacccgtgggatcagta

SEQ ID NO: 318095 - DNA, 58 bp, Artificial
  Synthetic oligonucleotide
actttcaatcgagccctaatgtgaaggaaccagggacactgaagttaggattatcaca

SEQ ID NO: 318096 - DNA, 60 bp, Artificial
  Synthetic oligonucleotide
actttcacaagtatgagaccttagactggcttaaatattccagattcataggacatgatc

SEQ ID NO: 318097 - DNA, 58 bp, Artificial
  Synthetic oligonucleotide
actttcaggttcgaccactcaccaacaggacggcacttatttttcatcagatggttca

SEQ ID NO: 318098 - DNA, 55 bp, Artificial
  Synthetic oligonucleotide
actttcatcaatgctgacgccactatagacgccaaccttaatgatgggttgcttc

SEQ ID NO: 318099 - DNA, 60 bp, Artificial
  Synthetic oligonucleotide
actttcatgattccaatgtgaggaatttatatgagaaggtcagatcacaactgaggaata

SEQ ID NO: 318100 - DNA, 58 bp, Artificial
  Synthetic oligonucleotide
actttccaactggtccagaaaccttaagacaagtcagagaagcaatcgcaaccctgca

SEQ ID NO: 318101 - DNA, 57 bp, Artificial
  Synthetic oligonucleotide
actttccaagggaggcgtgacatgggcgggaccggggagtggcgagccctcagatgc

SEQ ID NO: 318102 - DNA, 56 bp, Artificial
  Synthetic oligonucleotide
actttccaccaaactcttcaagatcccagagtcagggccctgtactttcctgctgg

SEQ ID NO: 318103 - DNA, 50 bp, Artificial
  Synthetic oligonucleotide
actttccaccctatggatcaggtcagccgggtagattcggagacattcag

SEQ ID NO: 318104 - DNA, 53 bp, Artificial
  Synthetic oligonucleotide
actttccaggggaggcgtaacctgggcgggactgggagtggctaaccctcaga

SEQ ID NO: 318105 - DNA, 53 bp, Artificial
  Synthetic oligonucleotide
actttcccaggggaggcgtggactgggcgggactggggagtggctaaccctca

SEQ ID NO: 318106 - DNA, 53 bp, Artificial
  Synthetic oligonucleotide
actttccccactgatggcttctttgaggtcgtcagctgggttccccgcctttt

SEQ ID NO: 318107 - DNA, 56 bp, Artificial
  Synthetic oligonucleotide
actttccccctggtgatcacagtggcaaccctaagaacagctaagataaccagtgg

SEQ ID NO: 318108 - DNA, 60 bp, Artificial
  Synthetic oligonucleotide
actttccgcaatgccttacatctacgtgccaatcaatgatggtcaaattgttaatccgac

SEQ ID NO: 318109 - DNA, 55 bp, Artificial
  Synthetic oligonucleotide
actttccggatattggaaatagctgagttaataaaaacgataggataacctctga

SEQ ID NO: 318110 - DNA, 55 bp, Artificial
  Synthetic oligonucleotide
actttcctaaagaggtactttagagcagatgaacaataccccttcttagtgcacc

SEQ ID NO: 318111 - DNA, 56 bp, Artificial
  Synthetic oligonucleotide
actttcctcttattatgtggaaggtcttgctcatccaacctctacaagggggtcta

SEQ ID NO: 318112 - DNA, 55 bp, Artificial
  Synthetic oligonucleotide
actttcctgaaggagctaccgcatctatactcgcccccttcgtgaaacactgggg

SEQ ID NO: 318113 - DNA, 56 bp, Artificial
  Synthetic oligonucleotide
actttcctgctcgtggctcaagttcctggacagtaaaccctgttccgactactgcc

SEQ ID NO: 318114 - DNA, 54 bp, Artificial
  Synthetic oligonucleotide
actttcctgggtccaatgcgtctgggttgagccggtttagttggctgtaaggcc

SEQ ID NO: 318115 - DNA, 58 bp, Artificial
  Synthetic oligonucleotide
actttccttggggctatccaccttggcccacgcatcaacccatacaccgctcacctga

SEQ ID NO: 318116 - DNA, 60 bp, Artificial
  Synthetic oligonucleotide
actttcgagcttgagtcgcttattttcgcggcgctcgcaagaagtgtgtgcgagttacta

SEQ ID NO: 318117 - DNA, 57 bp, Artificial
  Synthetic oligonucleotide
actttcgcccttctgaccctatcacccactctaataaatggctggccttctcatcag

SEQ ID NO: 318118 - DNA, 52 bp, Artificial
  Synthetic oligonucleotide
actttcggtggatgggccctcagcgcctcatgttcctcgtgttgtggaagct

SEQ ID NO: 318119 - DNA, 55 bp, Artificial
  Synthetic oligonucleotide
actttcgtgaaagctgagaagattaacttttcagcgaaaccagacccggctccta

SEQ ID NO: 318120 - DNA, 60 bp, Artificial
  Synthetic oligonucleotide
actttcgtgagaaccgccgattctattctcctcaatgatgctcccgcggtctcacgtgtg

SEQ ID NO: 318121 - DNA, 51 bp, Artificial
  Synthetic oligonucleotide
actttctcagcaggattacatcgtcaacttgcgacgttgccgtatgacttt

SEQ ID NO: 318122 - DNA, 60 bp, Artificial
  Synthetic oligonucleotide
actttcttatattcattcttgggccaatcttggttcatttttgactgagtcagtgcatgt

SEQ ID NO: 318123 - DNA, 58 bp, Artificial
  Synthetic oligonucleotide
actttcttgcttggcaccacgttgaatacaaattgccttgccaagttcgtggtgccac

SEQ ID NO: 318124 - DNA, 57 bp, Artificial
  Synthetic oligonucleotide
actttctttcaatatttccgcactgctgaggggtggattaacaggtgtgacctcttg

SEQ ID NO: 318125 - DNA, 58 bp, Artificial
  Synthetic oligonucleotide
actttctttgtgtaggatggtccagtaccagttgccatgacggtatcggacggatgac

SEQ ID NO: 318126 - DNA, 60 bp, Artificial
  Synthetic oligonucleotide
actttgaaagcatgtgagatattttatatgactaagttcgttattgacgatgatacgccc

SEQ ID NO: 318127 - DNA, 57 bp, Artificial
  Synthetic oligonucleotide
actttgaagaatacggtgatggagctaatttggaagattttgacattaacgatgtta

SEQ ID NO: 318128 - DNA, 55 bp, Artificial
  Synthetic oligonucleotide
actttgaagacttaaccagccattggcacgcattggggttagcgcaagaggcgag

SEQ ID NO: 318129 - DNA, 55 bp, Artificial
  Synthetic oligonucleotide
actttgaagatttaaccagccattggcacgcgttgggactagcacaagaagcgag

SEQ ID NO: 318130 - DNA, 52 bp, Artificial
  Synthetic oligonucleotide
actttgaatgaggcatatcgcgaattcttaaatttagcgatcagtagcacct

SEQ ID NO: 318131 - DNA, 54 bp, Artificial
  Synthetic oligonucleotide
actttgaatgtggaatctaatggaaatctaatcgctccttggtatgcatacaaa

SEQ ID NO: 318132 - DNA, 54 bp, Artificial
  Synthetic oligonucleotide
actttgacgcattacgtctgggaagctttgggtatcaaaacctcttttttgcga

SEQ ID NO: 318133 - DNA, 56 bp, Artificial
  Synthetic oligonucleotide
actttgactaacgatttggcgtcattgaataccaaagttaccacagaggtgggagc

SEQ ID NO: 318134 - DNA, 59 bp, Artificial
  Synthetic oligonucleotide
actttgactgtttttcagactctgccataaggaaagccatattaggacacatagttagc

SEQ ID NO: 318135 - DNA, 59 bp, Artificial
  Synthetic oligonucleotide
actttgagaacgtccgtactgcatacgagctgtctaagactaacaacttgtcagatact

SEQ ID NO: 318136 - DNA, 56 bp, Artificial
  Synthetic oligonucleotide
actttgagattgaaatacgttctccctatcatcgaactccactacgtttattggac

SEQ ID NO: 318137 - DNA, 52 bp, Artificial
  Synthetic oligonucleotide
actttgagcttgcatttaagcaatgttggctcagtaagtgcaagtgtgctgg

SEQ ID NO: 318138 - DNA, 60 bp, Artificial
  Synthetic oligonucleotide
actttgaggattgcaaagatgttagcgatctaaaacagtatgatagtgatgagccagagc

SEQ ID NO: 318139 - DNA, 57 bp, Artificial
  Synthetic oligonucleotide
actttgagtcagagaaaacttggcattaccactttcgttactggctgcttgcctttg

SEQ ID NO: 318140 - DNA, 51 bp, Artificial
  Synthetic oligonucleotide
actttgatcattgggttggggataatttgtagtgcctcgaataacttgtgg

SEQ ID NO: 318141 - DNA, 60 bp, Artificial
  Synthetic oligonucleotide
actttgatcctccatcttatagctcagctttggaacattacaacagccagttcaatggtg

SEQ ID NO: 318142 - DNA, 57 bp, Artificial
  Synthetic oligonucleotide
actttgattcaaaacacttcgctgaccatcaccaatttgatcgtatcaatttttacc

SEQ ID NO: 318143 - DNA, 60 bp, Artificial
  Synthetic oligonucleotide
actttgattggaacctgagtagagtggttctgtgagggtgatgaagattgcattctttaa

SEQ ID NO: 318144 - DNA, 60 bp, Artificial
  Synthetic oligonucleotide
actttgcacagctgcaggccgataagtcaggtgcccccctggatatagttcagtcaattt

SEQ ID NO: 318145 - DNA, 53 bp, Artificial
  Synthetic oligonucleotide
actttgcactcgagcttgaatttagaaatttgacccccgggaacactaacacc

SEQ ID NO: 318146 - DNA, 60 bp, Artificial
  Synthetic oligonucleotide
actttgccatctcgcgtatgcaatatagcatataaagaggcaacggtcacgaactatgtg

SEQ ID NO: 318147 - DNA, 51 bp, Artificial
  Synthetic oligonucleotide
actttgcccaggggtcggcagtgctcggcacacataaaagcatgcgcgtca

SEQ ID NO: 318148 - DNA, 59 bp, Artificial
  Synthetic oligonucleotide
actttgccctcgaattgaataagggcatgcagatgcggttccccattgtcgtgtaactc

SEQ ID NO: 318149 - DNA, 55 bp, Artificial
  Synthetic oligonucleotide
actttgccgccaagagcagactcgacccaacgatgacttcgttcgtacttgatca

SEQ ID NO: 318150 - DNA, 60 bp, Artificial
  Synthetic oligonucleotide
actttgcgtgattcacatcacgtcttactcacgatactagtaccgcgagttatcttgtgg

SEQ ID NO: 318151 - DNA, 60 bp, Artificial
  Synthetic oligonucleotide
actttgcgtgcgagctcctcagcttgttaaacgtcgtgggccatataatcctcatgaata

SEQ ID NO: 318152 - DNA, 55 bp, Artificial
  Synthetic oligonucleotide
actttggaagcaacgagttcatcattaacaactgatctggcttccttgaatacgc

SEQ ID NO: 318153 - DNA, 53 bp, Artificial
  Synthetic oligonucleotide
actttggaagtcactggagctttgtctgatagcgactgcgtgtatattggtca

SEQ ID NO: 318154 - DNA, 55 bp, Artificial
  Synthetic oligonucleotide
actttggaccggacttcgcgtcgacccaacgtggcagttcgtgaactcggttgca

SEQ ID NO: 318155 - DNA, 55 bp, Artificial
  Synthetic oligonucleotide
actttggatcccggggttcgctgaacttgctcagcccctatatgcggcaacgcgg

SEQ ID NO: 318156 - DNA, 50 bp, Artificial
  Synthetic oligonucleotide
actttggattaccatgattcaaatgtgaagaacctatatgagagagtaag

SEQ ID NO: 318157 - DNA, 54 bp, Artificial
  Synthetic oligonucleotide
actttggcagagtggttggagggggagtaacccctccagttgtgtcctatggga

SEQ ID NO: 318158 - DNA, 57 bp, Artificial
  Synthetic oligonucleotide
actttggcaggggcaaaatgcccggaggcagcagcgaggtacccataagaatgagag

SEQ ID NO: 318159 - DNA, 59 bp, Artificial
  Synthetic oligonucleotide
actttggccaaatcttcactatgtacgacaacgagcccactactgctaagatccgaatg

SEQ ID NO: 318160 - DNA, 60 bp, Artificial
  Synthetic oligonucleotide
actttggccaagtgttcaccatgtacgataatgagcccacaactgctaagatccgaatgg

SEQ ID NO: 318161 - DNA, 53 bp, Artificial
  Synthetic oligonucleotide
actttggcgcggttttacgacattcgtcccgctttaagaggacaggcgctttc

SEQ ID NO: 318162 - DNA, 56 bp, Artificial
  Synthetic oligonucleotide
actttgggaaagcctgtccaggtcggaactgttagggtacttagctgtgtatatca

SEQ ID NO: 318163 - DNA, 55 bp, Artificial
  Synthetic oligonucleotide
actttgggaactcaagaattagacgatgaaactaccatgttaagcctattcggac

SEQ ID NO: 318164 - DNA, 60 bp, Artificial
  Synthetic oligonucleotide
actttgggactcaggtctagatgtccacataagtagttgtgtgggcctaatgatctggcc

SEQ ID NO: 318165 - DNA, 59 bp, Artificial
  Synthetic oligonucleotide
actttgggatgcaggttgggcggatttgccattatgagattcactggtgaattttcaac

SEQ ID NO: 318166 - DNA, 55 bp, Artificial
  Synthetic oligonucleotide
actttggtaccaacagctccggtgcatcccggaccattcgttcctggtcagggat

SEQ ID NO: 318167 - DNA, 59 bp, Artificial
  Synthetic oligonucleotide
actttggtagccaggcaagaggaagcctctaacttgatgacatctgtctcagaaggtgg

SEQ ID NO: 318168 - DNA, 54 bp, Artificial
  Synthetic oligonucleotide
actttggtatatggaaacctcaagtagtaatttgggagaatgttccaaatgtat

SEQ ID NO: 318169 - DNA, 55 bp, Artificial
  Synthetic oligonucleotide
actttggtctgcggccgtttacaagtcttgtgctgagattggtctacactgttcc

SEQ ID NO: 318170 - DNA, 55 bp, Artificial
  Synthetic oligonucleotide
actttggtgacggaaaatggactgacggacggggcaaaatagagccctactggca

SEQ ID NO: 318171 - DNA, 56 bp, Artificial
  Synthetic oligonucleotide
actttgtacataaattgtatgcgctaatacattccataatacatgatcgactgctc

SEQ ID NO: 318172 - DNA, 54 bp, Artificial
  Synthetic oligonucleotide
actttgtacatcgcgggttttggggagataacacgcgtctttcaaagtgataaa

SEQ ID NO: 318173 - DNA, 55 bp, Artificial
  Synthetic oligonucleotide
actttgtacccgtcgagtctatggaaactaccatgcggtctccggtcttcacgga

SEQ ID NO: 318174 - DNA, 55 bp, Artificial
  Synthetic oligonucleotide
actttgtacctatcttgtatccttctcaactggacattgttgtctgattggttcc

SEQ ID NO: 318175 - DNA, 54 bp, Artificial
  Synthetic oligonucleotide
actttgtagaatggctttctacgggggtctgggagcccaccggaatatggaata

SEQ ID NO: 318176 - DNA, 59 bp, Artificial
  Synthetic oligonucleotide
actttgtcacaactatttctgactaaaggatggccaactggatctgtgtacttcaaaga

SEQ ID NO: 318177 - DNA, 57 bp, Artificial
  Synthetic oligonucleotide
actttgtcagctcgtttggtgacctcgacttatccagtgccaagcgcccttctttcg

SEQ ID NO: 318178 - DNA, 57 bp, Artificial
  Synthetic oligonucleotide
actttgtcgaaaggctaaatgggttgcttttgattttgcatctgggttgttgattga

SEQ ID NO: 318179 - DNA, 60 bp, Artificial
  Synthetic oligonucleotide
actttgtctagtcaggtgggaattgttgtgggttctcgtgagtgggatgatcttgcagct

SEQ ID NO: 318180 - DNA, 60 bp, Artificial
  Synthetic oligonucleotide
actttgtctcctggcatgcaaatcgtcaacttggcatgccaagcaaggacctttggactc

SEQ ID NO: 318181 - DNA, 59 bp, Artificial
  Synthetic oligonucleotide
actttgtgagcatggaattttctctcactgacccgaggctagaaccacacaaatgggaa

SEQ ID NO: 318182 - DNA, 56 bp, Artificial
  Synthetic oligonucleotide
actttgtgcctgttgagtccctcgagacctccatgagatccccggtcttcactgac

SEQ ID NO: 318183 - DNA, 55 bp, Artificial
  Synthetic oligonucleotide
actttgtgcgcgttcagggcctcctccggacctgcgcgctagcgcggaagatggt

SEQ ID NO: 318184 - DNA, 60 bp, Artificial
  Synthetic oligonucleotide
actttgtgtcttatgccatgtttacgatcttggcgatgcaaatgtgctatcggtcgtagc

SEQ ID NO: 318185 - DNA, 51 bp, Artificial
  Synthetic oligonucleotide
actttgttaaagacggacctttcgggggggggatgactaccatgcaattta

SEQ ID NO: 318186 - DNA, 56 bp, Artificial
  Synthetic oligonucleotide
actttgttacctgatgcggaaagattcagttttccaagagttattaattcagcgga

SEQ ID NO: 318187 - DNA, 59 bp, Artificial
  Synthetic oligonucleotide
actttgttctcttgctcacggcagccccggagccatcacctatgccttatgtcccctac

SEQ ID NO: 318188 - DNA, 58 bp, Artificial
  Synthetic oligonucleotide
actttgttgccgctcgatactgtaggtttagaatattctagtgttagcttttactgca

SEQ ID NO: 318189 - DNA, 52 bp, Artificial
  Synthetic oligonucleotide
actttgtttgtcaggcaatgactatatcccgttagttgggcagaatctggag

SEQ ID NO: 318190 - DNA, 57 bp, Artificial
  Synthetic oligonucleotide
acttttaagaaatgaccagtctgaggctgtaaggttgtccagattcggaagttgaga

SEQ ID NO: 318191 - DNA, 54 bp, Artificial
  Synthetic oligonucleotide
acttttaagttatatcgcgcgtcgaagtgcgcttaaaaagttattctccctctc

SEQ ID NO: 318192 - DNA, 55 bp, Artificial
  Synthetic oligonucleotide
acttttacgcctccaaaactcatgaatgctcagattagaagaacgttcggcatac

SEQ ID NO: 318193 - DNA, 55 bp, Artificial
  Synthetic oligonucleotide
acttttagagctatctgcaacatacctagaagaataagacagggctttgaaacag

SEQ ID NO: 318194 - DNA, 57 bp, Artificial
  Synthetic oligonucleotide
acttttataagccaggcagtccagttgttggatgagagttacccagattttaagcac

SEQ ID NO: 318195 - DNA, 60 bp, Artificial
  Synthetic oligonucleotide
acttttatcacacactgaatgcagcagtgttgatccaagattcaaccgcttgcacgttat

SEQ ID NO: 318196 - DNA, 50 bp, Artificial
  Synthetic oligonucleotide
acttttattcggggacaaggtctctaaggaacccagggtttatacctaca

SEQ ID NO: 318197 - DNA, 50 bp, Artificial
  Synthetic oligonucleotide
acttttcactggtgcccacagaactggctcttgtactacgttcgccgtgt

SEQ ID NO: 318198 - DNA, 56 bp, Artificial
  Synthetic oligonucleotide
acttttcagcgttggagtgtgtaactcaccagaatgccaacgaagttagtaaacaa

SEQ ID NO: 318199 - DNA, 55 bp, Artificial
  Synthetic oligonucleotide
acttttcatatgggatgtatcgtcagatcgatcgcagatggacgatgatgagtgg

SEQ ID NO: 318200 - DNA, 59 bp, Artificial
  Synthetic oligonucleotide
acttttccttccctgacaatcaccatcagacaggacacgtccgggcgtgatctcgtgtc

SEQ ID NO: 318201 - DNA, 57 bp, Artificial
  Synthetic oligonucleotide
acttttcgggtgagcccctaagccatggttgtactgcactatcaatctaagacggtc

SEQ ID NO: 318202 - DNA, 54 bp, Artificial
  Synthetic oligonucleotide
acttttcggtaccaccgctactaatcgtgccgatcaagttgccgcctttaggta

SEQ ID NO: 318203 - DNA, 60 bp, Artificial
  Synthetic oligonucleotide
acttttgaaggccgtcgagtcacgctatgaggtacaagaggttcagccagtgctgttagc

SEQ ID NO: 318204 - DNA, 60 bp, Artificial
  Synthetic oligonucleotide
acttttgactctgacacagcatgggtcctcgctgctagaaaagctaaattggtgtattca

SEQ ID NO: 318205 - DNA, 59 bp, Artificial
  Synthetic oligonucleotide
acttttgagagcatcgcccagctacttgacatcacactaccggtaggcccacccggtga

SEQ ID NO: 318206 - DNA, 55 bp, Artificial
  Synthetic oligonucleotide
acttttgagcacgagggagtatcctccaataagagagttgaaaccttcgctactc

SEQ ID NO: 318207 - DNA, 57 bp, Artificial
  Synthetic oligonucleotide
acttttgatccaataagtgatttcaagcggcactgtgttcaacgctggaaactaagt

SEQ ID NO: 318208 - DNA, 60 bp, Artificial
  Synthetic oligonucleotide
acttttgcggaagcctacgtagccaaagctgctacattgacttatggaattctagctgag

SEQ ID NO: 318209 - DNA, 53 bp, Artificial
  Synthetic oligonucleotide
acttttggaagggaaattgtcgtagagtatttggtgtcttttggagtgtggat

SEQ ID NO: 318210 - DNA, 55 bp, Artificial
  Synthetic oligonucleotide
acttttggctttgctaatcccatgtttgagatctaaggacctgtatgcaacagtc

SEQ ID NO: 318211 - DNA, 55 bp, Artificial
  Synthetic oligonucleotide
acttttgggcttagatctaaatgcccacacaaataattgtgagggcccaaagacc

SEQ ID NO: 318212 - DNA, 55 bp, Artificial
  Synthetic oligonucleotide
acttttgggtctttttacatggactttgagtgactcggaagggaacgacatgcca

SEQ ID NO: 318213 - DNA, 50 bp, Artificial
  Synthetic oligonucleotide
acttttggtttaagtttattcgcaacttcgaagttggatgcagaacaaat

SEQ ID NO: 318214 - DNA, 51 bp, Artificial
  Synthetic oligonucleotide
acttttgtatcgtttgaccttgactatgttggatgaataacaatgtactga

SEQ ID NO: 318215 - DNA, 55 bp, Artificial
  Synthetic oligonucleotide
acttttgtcgcaggattattctccagatacgcttgggtacgagttaataagggat

SEQ ID NO: 318216 - DNA, 55 bp, Artificial
  Synthetic oligonucleotide
acttttgtgaatgtgtgctacgagggcttgatgtacgaagcgaaagttcgttaca

SEQ ID NO: 318217 - DNA, 58 bp, Artificial
  Synthetic oligonucleotide
actttttcattcgaaagaactactcttaaaatctgtgttgatagctattggtcagtca

SEQ ID NO: 318218 - DNA, 54 bp, Artificial
  Synthetic oligonucleotide
actttttcggagctaatatgaaacatattgctaatgcaatttctcaacttactc

SEQ ID NO: 318219 - DNA, 54 bp, Artificial
  Synthetic oligonucleotide
actttttgttgtacggaatctatgttaccttcttcaaccaggaagccgcccatc

SEQ ID NO: 318220 - DNA, 56 bp, Artificial
  Synthetic oligonucleotide
acttttttagacatccttggagaaactatattgtgacttgggatcaggacattccg

SEQ ID NO: 318221 - DNA, 60 bp, Artificial
  Synthetic oligonucleotide
agaaaaactatacctccatgcacgatgtttgttgcttagccatagccacaagatctttcc

SEQ ID NO: 318222 - DNA, 57 bp, Artificial
  Synthetic oligonucleotide
agaaaaagacaactgcattttacagaacctccaagaaatctgccaagcgccacaaaa

SEQ ID NO: 318223 - DNA, 55 bp, Artificial
  Synthetic oligonucleotide
agaaaaagaggtgaatgttcctaacaacatcccttattcacttcgtgatattaac

SEQ ID NO: 318224 - DNA, 52 bp, Artificial
  Synthetic oligonucleotide
agaaaaagattttcttaggctcgtttgagtactttgaaacgcaattacgtac

SEQ ID NO: 318225 - DNA, 57 bp, Artificial
  Synthetic oligonucleotide
agaaaaagtggacttcgaggattgcaaagacgttagcgatctaaaacagtatgatag

SEQ ID NO: 318226 - DNA, 58 bp, Artificial
  Synthetic oligonucleotide
agaaaaagtggactttgaggactgtaaagatattagtgacctgaaacagtatgatagc

SEQ ID NO: 318227 - DNA, 59 bp, Artificial
  Synthetic oligonucleotide
agaaaaagtggctctcccttagccatcagagtggacgtctgtcctccttagaatgccca

SEQ ID NO: 318228 - DNA, 54 bp, Artificial
  Synthetic oligonucleotide
agaaaacacagggtggtcgtcagggtgggcgccccaagactctttcaggacaag

SEQ ID NO: 318229 - DNA, 55 bp, Artificial
  Synthetic oligonucleotide
agaaaacacctgaacaagagcagctcaatattcaaaccatcctcaggaggggaca

SEQ ID NO: 318230 - DNA, 57 bp, Artificial
  Synthetic oligonucleotide
agaaaacacttgtgaagccccagtgctttccgcaggttgtggttgaattgtatttga

SEQ ID NO: 318231 - DNA, 53 bp, Artificial
  Synthetic oligonucleotide
agaaaacacttgttcaagcttgttaaagtggtattcaaaccttttagctagga

SEQ ID NO: 318232 - DNA, 59 bp, Artificial
  Synthetic oligonucleotide
agaaaacagagcaattctagcagaggagacccatggttcatattacaaggaaggagaac

SEQ ID NO: 318233 - DNA, 55 bp, Artificial
  Synthetic oligonucleotide
agaaaacataatagtacagcttaccgagcctgtaaacattacttgtatcagacct

SEQ ID NO: 318234 - DNA, 50 bp, Artificial
  Synthetic oligonucleotide
agaaaacattctgtacacacgagcctcctactggaactcgttccacgcca

SEQ ID NO: 318235 - DNA, 54 bp, Artificial
  Synthetic oligonucleotide
agaaaacatttgtgtatccccaacgctttcctcaggttgtagttgaattgtact

SEQ ID NO: 318236 - DNA, 55 bp, Artificial
  Synthetic oligonucleotide
agaaaaccaatggatgaatacaatcttcaacacccacgacttaatgtgcggatgc

SEQ ID NO: 318237 - DNA, 59 bp, Artificial
  Synthetic oligonucleotide
agaaaaccatatggactagcggtagtagtattgcattctgtggtgttaattctgatacc

SEQ ID NO: 318238 - DNA, 56 bp, Artificial
  Synthetic oligonucleotide
agaaaaccctagaattgaaatcaagatggccactcaagtaattatgtgggcctaac

SEQ ID NO: 318239 - DNA, 51 bp, Artificial
  Synthetic oligonucleotide
agaaaacctgtgcaaggtaattgacatgaatgactgctttgtatcaagaca

SEQ ID NO: 318240 - DNA, 51 bp, Artificial
  Synthetic oligonucleotide
agaaaacggataaggaccgcggagtttggccctccgcggtgtccggtggtc

SEQ ID NO: 318241 - DNA, 54 bp, Artificial
  Synthetic oligonucleotide
agaaaactccctgttaatagacccattgattggaaagtatgtcaaagaatttcg

SEQ ID NO: 318242 - DNA, 55 bp, Artificial
  Synthetic oligonucleotide
agaaaagaacctccctcgctggtatgaagaagttaattccaggtgctcatttcga

SEQ ID NO: 318243 - DNA, 53 bp, Artificial
  Synthetic oligonucleotide
agaaaagcaaccagaaggctcattcagttgatagtgagtgggagggatgagca

SEQ ID NO: 318244 - DNA, 50 bp, Artificial
  Synthetic oligonucleotide
agaaaagccactctggggagttacctgcgggagagatacagttcatccct

SEQ ID NO: 318245 - DNA, 55 bp, Artificial
  Synthetic oligonucleotide
agaaaaggaaagtgctactgccctcactgcgagctccacaggcgtctcgcagggc

SEQ ID NO: 318246 - DNA, 51 bp, Artificial
  Synthetic oligonucleotide
agaaaaggctttacaataacatggggggcaaatggtcaaaaagtagcctag

SEQ ID NO: 318247 - DNA, 56 bp, Artificial
  Synthetic oligonucleotide
agaaaagggaaaatagtaagtgtgaaggatgtgaatgcaacagggtttcattttga

SEQ ID NO: 318248 - DNA, 52 bp, Artificial
  Synthetic oligonucleotide
agaaaagggaactctataatttcaaaaatgttgagcctatttgatacattta

SEQ ID NO: 318249 - DNA, 54 bp, Artificial
  Synthetic oligonucleotide
agaaaaggggagggtagtcaaatcagttgagttgaacgcccctaattatcatta

SEQ ID NO: 318250 - DNA, 55 bp, Artificial
  Synthetic oligonucleotide
agaaaaggggttgaaaggtgttaagggaatgactaatgcaagtcgtgatgatagc

SEQ ID NO: 318251 - DNA, 59 bp, Artificial
  Synthetic oligonucleotide
agaaaaggtgtgctatgtcccccaccataaggtggggtgggcatggtggacttgcagca

SEQ ID NO: 318252 - DNA, 60 bp, Artificial
  Synthetic oligonucleotide
agaaaagttagatatctgctgttccaatcaaccatttcacaaggttagagatcattggaa

SEQ ID NO: 318253 - DNA, 57 bp, Artificial
  Synthetic oligonucleotide
agaaaagttcgagcgtgcccatcattaccccggcaagaagaagtactgcagcaaccg

SEQ ID NO: 318254 - DNA, 60 bp, Artificial
  Synthetic oligonucleotide
agaaaatatccaggtggctatcaaccaagtcagagcaatcattggagatgagaagtatgt

SEQ ID NO: 318255 - DNA, 50 bp, Artificial
  Synthetic oligonucleotide
agaaaatcagtagcgtatgttacttgcgggacgttattaagaatgtcaac

SEQ ID NO: 318256 - DNA, 56 bp, Artificial
  Synthetic oligonucleotide
agaaaatcccagtcggcgggcgtaagcccgtccagatctggaacattagaacacat

SEQ ID NO: 318257 - DNA, 55 bp, Artificial
  Synthetic oligonucleotide
agaaaatccgccatggtgagtctagatagagacatggcgaggcaagtctccgggg

SEQ ID NO: 318258 - DNA, 55 bp, Artificial
  Synthetic oligonucleotide
agaaaatgacgcctaacggcgtcgtaatctccggaggatcacactcgcccgggaa

SEQ ID NO: 318259 - DNA, 60 bp, Artificial
  Synthetic oligonucleotide
agaaaattaagattctgcccagagatcaatggactcaacacacgacgactggtggttctc

SEQ ID NO: 318260 - DNA, 57 bp, Artificial
  Synthetic oligonucleotide
agaaaattagtcgatttcagagaactcaataagaggactcaagacttctgggaggtc

SEQ ID NO: 318261 - DNA, 55 bp, Artificial
  Synthetic oligonucleotide
agaaaattccatggcagtgttcaatgtggaaaccaactctgcagctttccaaatt

SEQ ID NO: 318262 - DNA, 58 bp, Artificial
  Synthetic oligonucleotide
agaaaatttattcaaccattgggaaagcagcggagcgatttgctgagagtgaaatcgg

SEQ ID NO: 318263 - DNA, 52 bp, Artificial
  Synthetic oligonucleotide
agaaacaaatcttggattagtttattttgtaattacccaaagtccgaaatga

SEQ ID NO: 318264 - DNA, 58 bp, Artificial
  Synthetic oligonucleotide
agaaacaattgcacgataccaccgtttcaaatcttcaacgaatttggtgcatggcagg

SEQ ID NO: 318265 - DNA, 60 bp, Artificial
  Synthetic oligonucleotide
agaaacacaaatgcagttgattgagaaagctagtgataagttgcaagatcatatactgta

SEQ ID NO: 318266 - DNA, 55 bp, Artificial
  Synthetic oligonucleotide
agaaacaccgtcgcagatgcacgcgttgaaaatgcctacgctcgggatctcgaat

SEQ ID NO: 318267 - DNA, 58 bp, Artificial
  Synthetic oligonucleotide
agaaacactggcgagaagcatctgtgagaaacttgagcagtctgggctccctgttgga

SEQ ID NO: 318268 - DNA, 58 bp, Artificial
  Synthetic oligonucleotide
agaaacagcgagctcgtaaaacagacgatgctcgcgactattgtatgaaacccgaaac

SEQ ID NO: 318269 - DNA, 59 bp, Artificial
  Synthetic oligonucleotide
agaaacagcgtcagttgttacgctatagtggtataggcggccatttattaatcggcatc

SEQ ID NO: 318270 - DNA, 60 bp, Artificial
  Synthetic oligonucleotide
agaaacagtcatcccaatctgcggagtggacatcaaagccatggccgcccatgaacacgg

SEQ ID NO: 318271 - DNA, 51 bp, Artificial
  Synthetic oligonucleotide
agaaacatacagtctgcaaccgatagcattttcgggaagacaatcaagaac

SEQ ID NO: 318272 - DNA, 60 bp, Artificial
  Synthetic oligonucleotide
agaaacatcacgtaatgattgacttagcaaagactgttctggaaatagagatgaaccaaa

SEQ ID NO: 318273 - DNA, 55 bp, Artificial
  Synthetic oligonucleotide
agaaacatcccatagttgtgaaatcagggtacgatataaacgcgagtgcgaacct

SEQ ID NO: 318274 - DNA, 60 bp, Artificial
  Synthetic oligonucleotide
agaaacatcctgagcatcgcacccataatgttctcaaacaaaatggcgagactagggaaa

SEQ ID NO: 318275 - DNA, 60 bp, Artificial
  Synthetic oligonucleotide
agaaacatctttgaggcaaagctacatagagaagggttcatcactgtggcaaattctgga

SEQ ID NO: 318276 - DNA, 55 bp, Artificial
  Synthetic oligonucleotide
agaaacatgggaagtatggtggacagagtactggcaggccgcctggattcctgag

SEQ ID NO: 318277 - DNA, 60 bp, Artificial
  Synthetic oligonucleotide
agaaacattctcaacccagcccccaccacacctagaatctatgcgcccctctgcttgcat

SEQ ID NO: 318278 - DNA, 56 bp, Artificial
  Synthetic oligonucleotide
agaaaccaaagatggacagatctccgcaacacgagtacggtgctttgcaaactgtg

SEQ ID NO: 318279 - DNA, 59 bp, Artificial
  Synthetic oligonucleotide
agaaaccaacctgaatggtttaggaatgtcttgagcattgcacctataatgttctcgaa

SEQ ID NO: 318280 - DNA, 50 bp, Artificial
  Synthetic oligonucleotide
agaaaccaccgtccggttacgggcataccttaacacgcctgggctccccg

SEQ ID NO: 318281 - DNA, 53 bp, Artificial
  Synthetic oligonucleotide
agaaaccagactggggatacgtaccttacgactataactttgctcaaaccaaa

SEQ ID NO: 318282 - DNA, 55 bp, Artificial
  Synthetic oligonucleotide
agaaaccagtccttagaacagctacagtgcagggaccgagtctagacttcgctct

SEQ ID NO: 318283 - DNA, 55 bp, Artificial
  Synthetic oligonucleotide
agaaacccgcggattaaggacattttccacaatgttgctattgaaccaagagacg

SEQ ID NO: 318284 - DNA, 51 bp, Artificial
  Synthetic oligonucleotide
agaaaccggccgaaggacccggaggacgacgtgtcccagtcccaaggccag

SEQ ID NO: 318285 - DNA, 54 bp, Artificial
  Synthetic oligonucleotide
agaaaccggcgttgcttacgccattggtggcgcgtgtccccggaactcttctgg

SEQ ID NO: 318286 - DNA, 58 bp, Artificial
  Synthetic oligonucleotide
agaaaccggtcccgggcactataaattgcctaacaagtgcgattcattcatggatcca

SEQ ID NO: 318287 - DNA, 55 bp, Artificial
  Synthetic oligonucleotide
agaaacctacgaacctaatacccttggtcacgacctaatcagggatctcatctcc

SEQ ID NO: 318288 - DNA, 52 bp, Artificial
  Synthetic oligonucleotide
agaaaccttgttggtccaaaatgcgaacccagactgtaagaccattttaagg

SEQ ID NO: 318289 - DNA, 52 bp, Artificial
  Synthetic oligonucleotide
agaaaccttgttggtccagaatgcaaacccagactgtaagactatcttaaaa

SEQ ID NO: 318290 - DNA, 55 bp, Artificial
  Synthetic oligonucleotide
agaaacgaccagtctgaggccgtaaggtcgtccagaccttgaagttgagaaaaca

SEQ ID NO: 318291 - DNA, 56 bp, Artificial
  Synthetic oligonucleotide
agaaacgaccagtctgaggctgtaatgtcgtccaaattcggaagttgagaaaacat

SEQ ID NO: 318292 - DNA, 59 bp, Artificial
  Synthetic oligonucleotide
agaaacgaccagtctgaggctgtgaagtcatccagattcggtagactaggaaacatttg

SEQ ID NO: 318293 - DNA, 55 bp, Artificial
  Synthetic oligonucleotide
agaaacgagcatgatgcttctggtgatgctgttatgacacgttgtttggcagtac

SEQ ID NO: 318294 - DNA, 56 bp, Artificial
  Synthetic oligonucleotide
agaaacgccaggtctgaggacgtaaacgagtccagatccggcaggtcagaaaacac

SEQ ID NO: 318295 - DNA, 59 bp, Artificial
  Synthetic oligonucleotide
agaaacgcgaagcgccacgttctaatgcttggagggctagggcagagtcgtctaatgaa

SEQ ID NO: 318296 - DNA, 55 bp, Artificial
  Synthetic oligonucleotide
agaaacgcgggcttaatcctacgagatgatactggtgactaccccacgtgaggag

SEQ ID NO: 318297 - DNA, 53 bp, Artificial
  Synthetic oligonucleotide
agaaacggaaagtctttgctctaacagtcgttgtatgttactttcagaggggg

SEQ ID NO: 318298 - DNA, 58 bp, Artificial
  Synthetic oligonucleotide
agaaacggttgagaccacagtaaccacagcgcaggaaactaagcgcggcagaattcaa

SEQ ID NO: 318299 - DNA, 55 bp, Artificial
  Synthetic oligonucleotide
agaaacgtcacgagaaccccccttaatgagctcagaaatgcgggaacgacataaa

SEQ ID NO: 318300 - DNA, 59 bp, Artificial
  Synthetic oligonucleotide
agaaacgtcttgagcatagcacctataatgttctcaaacaaaatggcaagattaggaaa

SEQ ID NO: 318301 - DNA, 59 bp, Artificial
  Synthetic oligonucleotide
agaaacgtcttgagcattgcacctataatgttctcgaataaaatggcgaggctagggaa

SEQ ID NO: 318302 - DNA, 57 bp, Artificial
  Synthetic oligonucleotide
agaaactacagaaagcgattttgaccgtcgcgaagtggatagaggctcaccccgatg

SEQ ID NO: 318303 - DNA, 55 bp, Artificial
  Synthetic oligonucleotide
agaaactacaggaatgggcaaagagccctgtatgaagctcaaaatatagtggccc

SEQ ID NO: 318304 - DNA, 55 bp, Artificial
  Synthetic oligonucleotide
agaaactccagatgctgacacaactgtatgttacagcctggcagaaattgctccc

SEQ ID NO: 318305 - DNA, 59 bp, Artificial
  Synthetic oligonucleotide
agaaactcctggggtccatcaggagacggatcgctaacgcgaactggatattagagtca

SEQ ID NO: 318306 - DNA, 60 bp, Artificial
  Synthetic oligonucleotide
agaaactctcacgccgttgcctggaggatgttcacagtgggccgtcttatgcacttatga

SEQ ID NO: 318307 - DNA, 56 bp, Artificial
  Synthetic oligonucleotide
agaaactcttcgactcttgaacgtccatagtcttcaccatctactgtaacaaaacg

SEQ ID NO: 318308 - DNA, 60 bp, Artificial
  Synthetic oligonucleotide
agaaactgccatgttaggcactcacatcgtctgggactttggattacaatctagtatcac

SEQ ID NO: 318309 - DNA, 53 bp, Artificial
  Synthetic oligonucleotide
agaaactggcctgtcgtaatgcgtaagtccgtggcggaaccgactactttggg

SEQ ID NO: 318310 - DNA, 53 bp, Artificial
  Synthetic oligonucleotide
agaaacttatacgaattccttttaaaggcaagataccagccgtaacatttata

SEQ ID NO: 318311 - DNA, 58 bp, Artificial
  Synthetic oligonucleotide
agaaacttgtgcgtgcctgaaactttgacgattagttctgcacacgcttctttcccaa

SEQ ID NO: 318312 - DNA, 55 bp, Artificial
  Synthetic oligonucleotide
agaaagaagtccttgtactatggggtgttcaccacccgtctaacatagagaacca

SEQ ID NO: 318313 - DNA, 60 bp, Artificial
  Synthetic oligonucleotide
agaaagacggcatggatatgtggtcttggatggatggaagaataacaggattagtcctat

SEQ ID NO: 318314 - DNA, 52 bp, Artificial
  Synthetic oligonucleotide
agaaagacgtggaactaaacgacataattcccgacgaaagaattaaacaaca

SEQ ID NO: 318315 - DNA, 55 bp, Artificial
  Synthetic oligonucleotide
agaaagactaacagcacactacttagcggcttatattacacatcactatctggtg

SEQ ID NO: 318316 - DNA, 60 bp, Artificial
  Synthetic oligonucleotide
agaaagactgacagtgataggagagcacgcctgggacttcggttctgctggaggctttct

SEQ ID NO: 318317 - DNA, 57 bp, Artificial
  Synthetic oligonucleotide
agaaagacttagagagcgtcgtaacgtacgtcgactccatctgccagagagaacttt

SEQ ID NO: 318318 - DNA, 59 bp, Artificial
  Synthetic oligonucleotide
agaaagacttctgttgaacgcctcatgtccccagggcctaagtgcctagacatgggaga

SEQ ID NO: 318319 - DNA, 60 bp, Artificial
  Synthetic oligonucleotide
agaaagagaagtgttacagtggaagtttgacagccgcctagcatttcatcacatggcccg

SEQ ID NO: 318320 - DNA, 55 bp, Artificial
  Synthetic oligonucleotide
agaaagagaattggttcgcaagacgagattcctaccagtagcaggcggaacaagc

SEQ ID NO: 318321 - DNA, 52 bp, Artificial
  Synthetic oligonucleotide
agaaagagatacctgggaacagtggtgggataactactggcaagtgacatgg

SEQ ID NO: 318322 - DNA, 60 bp, Artificial
  Synthetic oligonucleotide
agaaagagcagtccacatttctcatccgtgagtttggccctgccgtcagaaacctagtga

SEQ ID NO: 318323 - DNA, 55 bp, Artificial
  Synthetic oligonucleotide
agaaagaggagatctccccacgacgctggtgaagctctaggaagcggaagaagga

SEQ ID NO: 318324 - DNA, 58 bp, Artificial
  Synthetic oligonucleotide
agaaagataatgaggtattagtttcaggtacatcatcatcaaaccaggcgtattcttt

SEQ ID NO: 318325 - DNA, 52 bp, Artificial
  Synthetic oligonucleotide
agaaagatacctcccccggattgccctacacccaacaaggcctaagaaggac

SEQ ID NO: 318326 - DNA, 58 bp, Artificial
  Synthetic oligonucleotide
agaaagatggcttggtaaaagattatcgcagtttgacattggtcaatacaaaaatatg

SEQ ID NO: 318327 - DNA, 60 bp, Artificial
  Synthetic oligonucleotide
agaaagcaatacttgtgatgttatcccaataaacagagccaaagtgatcaaatctgctgc

SEQ ID NO: 318328 - DNA, 54 bp, Artificial
  Synthetic oligonucleotide
agaaagcacgggaagcctttcgtcgttatcaagaagagagaccaccggaaacca

SEQ ID NO: 318329 - DNA, 55 bp, Artificial
  Synthetic oligonucleotide
agaaagcactacttgcaacagctacatggttccaatattacactgaggatcagtc

SEQ ID NO: 318330 - DNA, 56 bp, Artificial
  Synthetic oligonucleotide
agaaagcactgatttcaccagccctccagctctgtcggcccggaaacccgggccga

SEQ ID NO: 318331 - DNA, 60 bp, Artificial
  Synthetic oligonucleotide
agaaagcagaactaacagctgtttatctggcattgcaggatgcagaacatatagtcaata

SEQ ID NO: 318332 - DNA, 59 bp, Artificial
  Synthetic oligonucleotide
agaaagcagtcctttagcaaagtcgccattacaggaattatcactaaatgtaagcagta

SEQ ID NO: 318333 - DNA, 52 bp, Artificial
  Synthetic oligonucleotide
agaaagcccgtattcaagtctaagctaccaaataagactaagagaaatgttg

SEQ ID NO: 318334 - DNA, 60 bp, Artificial
  Synthetic oligonucleotide
agaaagccgacaatgtggttgccggctaacagacacagagacggcgactgccaaatcatc

SEQ ID NO: 318335 - DNA, 54 bp, Artificial
  Synthetic oligonucleotide
agaaagcctcagatgagtgatttcgtgcaaattacgagctgtgaagtgactttt

SEQ ID NO: 318336 - DNA, 57 bp, Artificial
  Synthetic oligonucleotide
agaaagcgcctcaggttcaccggccaaaagaccccgtatctggtcagaagagagtca

SEQ ID NO: 318337 - DNA, 60 bp, Artificial
  Synthetic oligonucleotide
agaaagcgctaaagggcatgctgagaatcggaaaagatcaatctgaacgtatcacacggt

SEQ ID NO: 318338 - DNA, 57 bp, Artificial
  Synthetic oligonucleotide
agaaagcgttgacttctgatacagcaaaaaggatgtataaaatggcagggaaaacat

SEQ ID NO: 318339 - DNA, 58 bp, Artificial
  Synthetic oligonucleotide
agaaagcgttgtgaggagagggtgagaacagtgcactcctttatgcttaaacccttga

SEQ ID NO: 318340 - DNA, 55 bp, Artificial
  Synthetic oligonucleotide
agaaagctactacagctttgcatgcactaatcaaggcagacacatgctacaaaca

SEQ ID NO: 318341 - DNA, 51 bp, Artificial
  Synthetic oligonucleotide
agaaagctcgtgttcgtgtaggcgacattgctacaattgataagtccagca

SEQ ID NO: 318342 - DNA, 54 bp, Artificial
  Synthetic oligonucleotide
agaaaggaaatttgtacgcaactattaacggcgaatcgaagatcccgaagacac

SEQ ID NO: 318343 - DNA, 58 bp, Artificial
  Synthetic oligonucleotide
agaaaggaacgcccgctgttgggaagtatacagtgctgctctggttactgcggggcgc

SEQ ID NO: 318344 - DNA, 60 bp, Artificial
  Synthetic oligonucleotide
agaaaggcaaagctacgctatgcctgaggcagctgcaccagcagcctatgcggccaactg

SEQ ID NO: 318345 - DNA, 54 bp, Artificial
  Synthetic oligonucleotide
agaaaggcaatatgagaaggatccagatgagttgaaccaaagagcattaacaga

SEQ ID NO: 318346 - DNA, 58 bp, Artificial
  Synthetic oligonucleotide
agaaagggaggtctatccgagcaggcctgcttaagacagttcataggggttcaccaca

SEQ ID NO: 318347 - DNA, 60 bp, Artificial
  Synthetic oligonucleotide
agaaaggggatgtgcctagagctttgaatcgcctggcaacattagtgacaactgtaaatg

SEQ ID NO: 318348 - DNA, 60 bp, Artificial
  Synthetic oligonucleotide
agaaagggggcaagctttctatacatagcgattatattaatcagattgggcaagtatgtc

SEQ ID NO: 318349 - DNA, 50 bp, Artificial
  Synthetic oligonucleotide
agaaagggtttaccacacgaataccgccggagggaaactcccgtgacacc

SEQ ID NO: 318350 - DNA, 60 bp, Artificial
  Synthetic oligonucleotide
agaaaggtatgtattttgactccagattaataattgcgagcagtaactttcttgctgcca

SEQ ID NO: 318351 - DNA, 57 bp, Artificial
  Synthetic oligonucleotide
agaaagtaccatgaaggttctgacccttggcgtgtcagagtacttggagagtttcca

SEQ ID NO: 318352 - DNA, 59 bp, Artificial
  Synthetic oligonucleotide
agaaagtacgtgccggcaagactcgcattgtcgacgtcctgcccgttgagcatattctt

SEQ ID NO: 318353 - DNA, 52 bp, Artificial
  Synthetic oligonucleotide
agaaagtagactttgacaactgcagagacataagcgatttgaagcaatatga

SEQ ID NO: 318354 - DNA, 60 bp, Artificial
  Synthetic oligonucleotide
agaaagtagggctagaatcaaaaccaggctattcaccataagacaagagatggctagcag

SEQ ID NO: 318355 - DNA, 60 bp, Artificial
  Synthetic oligonucleotide
agaaagtcaagattttgcccagagatcaatggacccagcacacgacaactggtggttctc

SEQ ID NO: 318356 - DNA, 60 bp, Artificial
  Synthetic oligonucleotide
agaaagtcagattgccaccatagaacagagtgcaccgtcacaaagtgatcaagagcagct

SEQ ID NO: 318357 - DNA, 55 bp, Artificial
  Synthetic oligonucleotide
agaaagtcctcattgaggagccatacttgctaataatgagcattctgtcaccggg

SEQ ID NO: 318358 - DNA, 55 bp, Artificial
  Synthetic oligonucleotide
agaaagtctggtatcggaacggcgatcagcgcacgcgcaacatcctgaaatcgcg

SEQ ID NO: 318359 - DNA, 59 bp, Artificial
  Synthetic oligonucleotide
agaaagtcttaacaaatcaagattctcattttctgtgcatttgactaaattcacagtgg

SEQ ID NO: 318360 - DNA, 60 bp, Artificial
  Synthetic oligonucleotide
agaaagtgacggccgatgaagtagtaccagattgcaacccttattcggatgctatatctg

SEQ ID NO: 318361 - DNA, 57 bp, Artificial
  Synthetic oligonucleotide
agaaagtgccgaagaaagaagctacccaattgaagggtgccttgatccaatcccaca

SEQ ID NO: 318362 - DNA, 57 bp, Artificial
  Synthetic oligonucleotide
agaaagtggcacctatgttgtataaaagtgcaaaatcacgggttgtcattgtccagg

SEQ ID NO: 318363 - DNA, 60 bp, Artificial
  Synthetic oligonucleotide
agaaagtggcgttaatggtgttgtatacgagtgtgctgatgtgaagggcatggatgctgc

SEQ ID NO: 318364 - DNA, 60 bp, Artificial
  Synthetic oligonucleotide
agaaagtgtcaatcagctatggcgaaagacttcaacgacttggtagagtaggacgcgtca

SEQ ID NO: 318365 - DNA, 60 bp, Artificial
  Synthetic oligonucleotide
agaaagttaagattctacccagagatcaatggactcagcacacgacaattggtgtcactc

SEQ ID NO: 318366 - DNA, 56 bp, Artificial
  Synthetic oligonucleotide
agaaagttatcaatcaaaaggacaacgtgatgtaccaataaaagctactagaatta

SEQ ID NO: 318367 - DNA, 58 bp, Artificial
  Synthetic oligonucleotide
agaaagtttgtggagatagtacatgccatcaaccagaaaagagattggggtgttgtgg

SEQ ID NO: 318368 - DNA, 55 bp, Artificial
  Synthetic oligonucleotide
agaaataaggcgaatttggcgccaagccaacaatggtgatgatgcaacggctggt

SEQ ID NO: 318369 - DNA, 59 bp, Artificial
  Synthetic oligonucleotide
agaaatacacctgcgacttaacagatttatacaacggcgatctttcaagcactgtattg

SEQ ID NO: 318370 - DNA, 58 bp, Artificial
  Synthetic oligonucleotide
agaaatacgccaccgcttaccttacagagattagcagctttgcagctaggaagaaaat

SEQ ID NO: 318371 - DNA, 55 bp, Artificial
  Synthetic oligonucleotide
agaaatagaagggcaaatttaatatcgcagtgtaggttgtaactgtctattttaa

SEQ ID NO: 318372 - DNA, 55 bp, Artificial
  Synthetic oligonucleotide
agaaatagtagcttgctgtgataagtgccagctaaaaggggaagccatacatgga

SEQ ID NO: 318373 - DNA, 60 bp, Artificial
  Synthetic oligonucleotide
agaaatagtggagatctatgttgcatctgatcggaaaagtccacgacgcctgtaaagact

SEQ ID NO: 318374 - DNA, 56 bp, Artificial
  Synthetic oligonucleotide
agaaatagttcttagcgtttatcttaaaacgactcgcatttgccatttgcaacgtc

SEQ ID NO: 318375 - DNA, 60 bp, Artificial
  Synthetic oligonucleotide
agaaatatagtaagaagagcaacagtatcagcagacccactagcgtctttattggagatg

SEQ ID NO: 318376 - DNA, 52 bp, Artificial
  Synthetic oligonucleotide
agaaatattatacgattggttacggacattatggttctgatgttcgtgttga

SEQ ID NO: 318377 - DNA, 60 bp, Artificial
  Synthetic oligonucleotide
agaaatcaatccagtcggatcccactccaatggcgctgcaacctctgctatctcagttgc

SEQ ID NO: 318378 - DNA, 56 bp, Artificial
  Synthetic oligonucleotide
agaaatcactgacgtctgggcggatattaccatcaaccgggataatgaaccaaacc

SEQ ID NO: 318379 - DNA, 60 bp, Artificial
  Synthetic oligonucleotide
agaaatcatcattctatcaatcatacctcaggcgcacacaatcaatgggaatacaactgg

SEQ ID NO: 318380 - DNA, 59 bp, Artificial
  Synthetic oligonucleotide
agaaatccgaacactcgctgcaattcttgccgaggagatcaactctcgacccaacgaaa

SEQ ID NO: 318381 - DNA, 60 bp, Artificial
  Synthetic oligonucleotide
agaaatcctcaggtaaccttgacagttctatttatgctgcaactcctagtggctctatgg

SEQ ID NO: 318382 - DNA, 51 bp, Artificial
  Synthetic oligonucleotide
agaaatcctgtcactatttggccccagcttacgggaccccatatctgcgga

SEQ ID NO: 318383 - DNA, 51 bp, Artificial
  Synthetic oligonucleotide
agaaatcgggagtgtgggacgttagaagaggacgttggttacttaaaccta

SEQ ID NO: 318384 - DNA, 59 bp, Artificial
  Synthetic oligonucleotide
agaaatctggcgatgagtgttatgccttattagagaggttcacaaagtactccaccaat

SEQ ID NO: 318385 - DNA, 55 bp, Artificial
  Synthetic oligonucleotide
agaaatgaggcttctaaccttacagtgcctacagtaaatggagggccttatacgg

SEQ ID NO: 318386 - DNA, 50 bp, Artificial
  Synthetic oligonucleotide
agaaatgagtatctgttagaatggtataatcacttactaatgccaataac

SEQ ID NO: 318387 - DNA, 58 bp, Artificial
  Synthetic oligonucleotide
agaaatgagtgcgatgataccttatttaaggcgggcttttcaagttacagcacgagtg

SEQ ID NO: 318388 - DNA, 57 bp, Artificial
  Synthetic oligonucleotide
agaaatgagtggatcttggaaagtgatcacctaatagcagagatgctaagtaaagag

SEQ ID NO: 318389 - DNA, 60 bp, Artificial
  Synthetic oligonucleotide
agaaatgatgacagcatgtcagggagtgggaggacctggccataaagcaagagtgttggc

SEQ ID NO: 318390 - DNA, 60 bp, Artificial
  Synthetic oligonucleotide
agaaatgcatccagagtactataaagactgctgacgaaggagtatcaaactagagacttc

SEQ ID NO: 318391 - DNA, 56 bp, Artificial
  Synthetic oligonucleotide
agaaatgccaatcggcaactctgcaccaatcacttacgttccaaacgccggaaacg

SEQ ID NO: 318392 - DNA, 54 bp, Artificial
  Synthetic oligonucleotide
agaaatgctcgttgacgattccggctgataatcaatggcgattcatagctgaca

SEQ ID NO: 318393 - DNA, 50 bp, Artificial
  Synthetic oligonucleotide
agaaatgctttccaatatgcgcaaccaaatagcctaggatcccctgtgcg

SEQ ID NO: 318394 - DNA, 55 bp, Artificial
  Synthetic oligonucleotide
agaaatggactacatcaaggaaggaaaagaatccttcactaagaatgagatgggc

SEQ ID NO: 318395 - DNA, 51 bp, Artificial
  Synthetic oligonucleotide
agaaatggtgaggtccataaaccgtgggataatttaaagctgcaaactatg

SEQ ID NO: 318396 - DNA, 56 bp, Artificial
  Synthetic oligonucleotide
agaaatgtatctggccgtagcttaaccgctaaacaccagtgaggtattccagttcc

SEQ ID NO: 318397 - DNA, 59 bp, Artificial
  Synthetic oligonucleotide
agaaatgtcttgagtattgctcctataatgttctcaaacaaaatggcgagattagggaa

SEQ ID NO: 318398 - DNA, 57 bp, Artificial
  Synthetic oligonucleotide
agaaatgtgacgtgaaaacaaatttgtgcgttggcaccagacacatactgaatatta

SEQ ID NO: 318399 - DNA, 57 bp, Artificial
  Synthetic oligonucleotide
agaaatgtggttgagtaccaaatccgtacaggtggattcttttcgtgcctggccatg

SEQ ID NO: 318400 - DNA, 57 bp, Artificial
  Synthetic oligonucleotide
agaaatgttaaaaccaatgtatgctgctataactaaccaagtgaattttagcttctc

SEQ ID NO: 318401 - DNA, 54 bp, Artificial
  Synthetic oligonucleotide
agaaatgttaatctgtgactcctcttgggtgatcactttgagagaagggtgctt

SEQ ID NO: 318402 - DNA, 60 bp, Artificial
  Synthetic oligonucleotide
agaaattcaagtggctggatttgactactcgtgtgccctaaatgctccagcaaatattca

SEQ ID NO: 318403 - DNA, 56 bp, Artificial
  Synthetic oligonucleotide
agaaattccacgcctattcaatgtgactatacccggcgttgtttcgggtaagcaca

SEQ ID NO: 318404 - DNA, 56 bp, Artificial
  Synthetic oligonucleotide
agaaattccccaggatttctcgacctagttcgttgttatctggtgacttgcgctaa

SEQ ID NO: 318405 - DNA, 53 bp, Artificial
  Synthetic oligonucleotide
agaaattctcgaaactgccaactggagtcttaggctcgagtgctgaacagata

SEQ ID NO: 318406 - DNA, 54 bp, Artificial
  Synthetic oligonucleotide
agaaattctgcggaagtcccggaggttcgccccggccttgcccatctgggcgcg

SEQ ID NO: 318407 - DNA, 56 bp, Artificial
  Synthetic oligonucleotide
agaaattctgcggaagtctcggaggtttgcctcggccctgcccgtatgggcgcggc

SEQ ID NO: 318408 - DNA, 55 bp, Artificial
  Synthetic oligonucleotide
agaaattgctagggaatttagtgtaaatgctggtattaccacacctctcagtaca

SEQ ID NO: 318409 - DNA, 60 bp, Artificial
  Synthetic oligonucleotide
agaaattgctcagtactacacacactggtcaggttccatcaggatctctctaatgtatac

SEQ ID NO: 318410 - DNA, 54 bp, Artificial
  Synthetic oligonucleotide
agaaattgctggagaacgggtatgcgaattttctccgtattcaaaaggccaggg

SEQ ID NO: 318411 - DNA, 55 bp, Artificial
  Synthetic oligonucleotide
agaaattgtgggaacagacccgctcaaaagcaggactgctggtctcagatggagg

SEQ ID NO: 318412 - DNA, 57 bp, Artificial
  Synthetic oligonucleotide
agaaattgttctaacatatcatacaattggtcccaatttggcttgtccgttgacgcc

SEQ ID NO: 318413 - DNA, 56 bp, Artificial
  Synthetic oligonucleotide
agaaatttgggcgtgcccccgcgagatcactagccgagtagtgttgggtcgcgaaa

SEQ ID NO: 318414 - DNA, 60 bp, Artificial
  Synthetic oligonucleotide
agaaatttgtcagtacatggatgacctatatgtaggatcagatttacccctgacagaaca

SEQ ID NO: 318415 - DNA, 55 bp, Artificial
  Synthetic oligonucleotide
agaaattttacccagagctgagtggggatgaaacagatatgaccaaactagaaag

SEQ ID NO: 318416 - DNA, 59 bp, Artificial
  Synthetic oligonucleotide
agaacaaaagttgcccatcaacgcactaagcaactcgttactgcgtcaccacaatcttg

SEQ ID NO: 318417 - DNA, 55 bp, Artificial
  Synthetic oligonucleotide
agaacaaagcacccgcacatgcttatatggtaataacggatgtagatgcaagaag

SEQ ID NO: 318418 - DNA, 57 bp, Artificial
  Synthetic oligonucleotide
agaacaaaggagaatagataggttaattaggagaataagtgaaagagcagaagacag

SEQ ID NO: 318419 - DNA, 60 bp, Artificial
  Synthetic oligonucleotide
agaacaacagcttgttacaccctatgtgccaacatggagtggattcaggaggagaagtgc

SEQ ID NO: 318420 - DNA, 57 bp, Artificial
  Synthetic oligonucleotide
agaacaacatcctgaattctataaggactgctgacaaagaagtttctaaataggact

SEQ ID NO: 318421 - DNA, 59 bp, Artificial
  Synthetic oligonucleotide
agaacaaccgtgcgggaaatcctagacatgctacaagccaagcgtcaaggagccacacc

SEQ ID NO: 318422 - DNA, 54 bp, Artificial
  Synthetic oligonucleotide
agaacaactccagaaccaacagggaccgctggtccaccgcccaaacaacagagg

SEQ ID NO: 318423 - DNA, 53 bp, Artificial
  Synthetic oligonucleotide
agaacaactgcttgttacaccctatatgccaacatggcatagaggactcagaa

SEQ ID NO: 318424 - DNA, 58 bp, Artificial
  Synthetic oligonucleotide
agaacaacttttcaactaccagcaggctgctctcaagtggaggaaagacataggtttc

SEQ ID NO: 318425 - DNA, 55 bp, Artificial
  Synthetic oligonucleotide
agaacaagagctctcgtgcgtactggaatggaccccagaatgtgctccctgatgc

SEQ ID NO: 318426 - DNA, 60 bp, Artificial
  Synthetic oligonucleotide
agaacaagtagtcggttatgtcaactctcatatgggcctcaagttcagacaactcttgtg

SEQ ID NO: 318427 - DNA, 60 bp, Artificial
  Synthetic oligonucleotide
agaacaagttatttgacggcgagagattggcagacaagaaaattgctgaactattctcaa

SEQ ID NO: 318428 - DNA, 58 bp, Artificial
  Synthetic oligonucleotide
agaacaatatagtatctaagggaatagctttgactgagaaagcaaaattaaattcata

SEQ ID NO: 318429 - DNA, 60 bp, Artificial
  Synthetic oligonucleotide
agaacaatggcggatgcatcaacacaaatctcaaatgttagtaggagtttacgattgcgt

SEQ ID NO: 318430 - DNA, 57 bp, Artificial
  Synthetic oligonucleotide
agaacacaacggcaagggtctggtgaagaccacggtcatccctaccgagatgtccaa

SEQ ID NO: 318431 - DNA, 50 bp, Artificial
  Synthetic oligonucleotide
agaacacacccagtacatgcaggacctattcaaccaggccaaatgagaga

SEQ ID NO: 318432 - DNA, 57 bp, Artificial
  Synthetic oligonucleotide
agaacacagaggcaataagattcttgttacaggtagatcagagtcgattatgaaact

SEQ ID NO: 318433 - DNA, 60 bp, Artificial
  Synthetic oligonucleotide
agaacaccaggcatgcgggttgtacattggacgcaggagctaactatggagtcgcagacg

SEQ ID NO: 318434 - DNA, 58 bp, Artificial
  Synthetic oligonucleotide
agaacaccatacaggtcattaatccgattcccaataggagcagccccagtactgggga

SEQ ID NO: 318435 - DNA, 60 bp, Artificial
  Synthetic oligonucleotide
agaacacgaacgagatgtttgtgaagatgcatattcagtgcgtgcatttggctataagtt

SEQ ID NO: 318436 - DNA, 60 bp, Artificial
  Synthetic oligonucleotide
agaacacgcacggtaagaaattactacatgcagtgacgcaacacgagatgaagcgtatta

SEQ ID NO: 318437 - DNA, 60 bp, Artificial
  Synthetic oligonucleotide
agaacacgctcctcacggacttgctggtgccctccgcttgtgtgaaacactcgactgtct

SEQ ID NO: 318438 - DNA, 60 bp, Artificial
  Synthetic oligonucleotide
agaacacggagaggcatactgtcgaagatgttaaccgtgacatgcataccctactcggta

SEQ ID NO: 318439 - DNA, 59 bp, Artificial
  Synthetic oligonucleotide
agaacacgtatgcttatttatacccaacggtccgctgcctagctacatcctgttttgca

SEQ ID NO: 318440 - DNA, 59 bp, Artificial
  Synthetic oligonucleotide
agaacactaactgcgacggcctccactgctgcaccccttttgggggtgcagcagtggag

SEQ ID NO: 318441 - DNA, 55 bp, Artificial
  Synthetic oligonucleotide
agaacactagcagtcaatagggatggtggactttacagagcccaggtgccacccg

SEQ ID NO: 318442 - DNA, 60 bp, Artificial
  Synthetic oligonucleotide
agaacactagccaagcacacacgagttgcaagcattggaagtctgagtctcgttaccaag

SEQ ID NO: 318443 - DNA, 54 bp, Artificial
  Synthetic oligonucleotide
agaacactattccagcaaatgcgtgacgtgctgggaacatttgacactgcccaa

SEQ ID NO: 318444 - DNA, 57 bp, Artificial
  Synthetic oligonucleotide
agaacacttttacatcaccacttttgtaagaatcagatgttttcggaagcaatttga

SEQ ID NO: 318445 - DNA, 50 bp, Artificial
  Synthetic oligonucleotide
agaacagaaagtagcgccagcgttttcgagctttgcgtctcctcatattc

SEQ ID NO: 318446 - DNA, 60 bp, Artificial
  Synthetic oligonucleotide
agaacagagaaatcacctccagaggaccccttcagcgaacagagggcgcatcgcgagagg

SEQ ID NO: 318447 - DNA, 55 bp, Artificial
  Synthetic oligonucleotide
agaacagatccagtggatgtttagagcacaaaatcctataccagtagggaacatc

SEQ ID NO: 318448 - DNA, 54 bp, Artificial
  Synthetic oligonucleotide
agaacagcaaccgacagcgggtgcagtgagatgaggagacccgggcaggaacgc

SEQ ID NO: 318449 - DNA, 60 bp, Artificial
  Synthetic oligonucleotide
agaacaggcagacccggcagtaaaaaattggatgacacaatcactgctgatacaaaatgc

SEQ ID NO: 318450 - DNA, 55 bp, Artificial
  Synthetic oligonucleotide
agaacaggctggagtccgccaactacgaggaagtcgagcttccacccccctcaaa

SEQ ID NO: 318451 - DNA, 55 bp, Artificial
  Synthetic oligonucleotide
agaacaggcttgaagaggaatggagactttacgaacaagtgcaggcaatgtacat

SEQ ID NO: 318452 - DNA, 54 bp, Artificial
  Synthetic oligonucleotide
agaacagggtcggccttacacaggttcaagtccgccaggtatagcgagggaggg

SEQ ID NO: 318453 - DNA, 58 bp, Artificial
  Synthetic oligonucleotide
agaacaggttaagaatagggtaatggtgaatactaagtatgagccatgtgtaatgcgg

SEQ ID NO: 318454 - DNA, 49 bp, Artificial
  Synthetic oligonucleotide
agaacaggtttgggggtaaagtaccgggagtggtaggagaagggctggg

SEQ ID NO: 318455 - DNA, 55 bp, Artificial
  Synthetic oligonucleotide
agaacagtccgacctcagtacacccgcacgctcctctggacctcgtcgggaaagg

SEQ ID NO: 318456 - DNA, 60 bp, Artificial
  Synthetic oligonucleotide
agaacagtgggcaattgtctgggctggcatcaaatgttttgacaattctgttatggccaa

SEQ ID NO: 318457 - DNA, 55 bp, Artificial
  Synthetic oligonucleotide
agaacatatgcaggcaccatggctttagtagtcttcagagatacaaggtggacac

SEQ ID NO: 318458 - DNA, 55 bp, Artificial
  Synthetic oligonucleotide
agaacatcaacaagggactgcaactgttgaatgaactcagagcacgctgctgggg

SEQ ID NO: 318459 - DNA, 54 bp, Artificial
  Synthetic oligonucleotide
agaacatctgtggggactttccgctggggactttccaggggaggtgtggcctgg

SEQ ID NO: 318460 - DNA, 55 bp, Artificial
  Synthetic oligonucleotide
agaacatgcccacgttaggaaaaagtttgagatgtttacttatgtcaggtttgac

SEQ ID NO: 318461 - DNA, 57 bp, Artificial
  Synthetic oligonucleotide
agaacatgcctgggattttggctctactggtggtctcctgacttcggttggtaaggc

SEQ ID NO: 318462 - DNA, 59 bp, Artificial
  Synthetic oligonucleotide
agaacatggagtgtacctcatggatctcgatcctattagacttgggccctgtaccagtt

SEQ ID NO: 318463 - DNA, 55 bp, Artificial
  Synthetic oligonucleotide
agaacatggcctgaaattgtctgatttgcttgataacattgatgtctacaactcc

SEQ ID NO: 318464 - DNA, 60 bp, Artificial
  Synthetic oligonucleotide
agaacatggtgtaatccttggattagcctctgtacgcgccgatctcaactatcagcaagg

SEQ ID NO: 318465 - DNA, 53 bp, Artificial
  Synthetic oligonucleotide
agaacatgtaagtgaggaatgccatcttcatgaagttctctgcaaattcggat

SEQ ID NO: 318466 - DNA, 60 bp, Artificial
  Synthetic oligonucleotide
agaacatgttgtaccactatctaggtagatcaggatacacaatacacgtacagtgcaacg

SEQ ID NO: 318467 - DNA, 59 bp, Artificial
  Synthetic oligonucleotide
agaacattaacacatgagggtcatttaacatttaaagatatcagcgcacataaagttgg

SEQ ID NO: 318468 - DNA, 55 bp, Artificial
  Synthetic oligonucleotide
agaacatttacggcaactggttcgtaaaaggcaatcctaatggcgaatatttcta

SEQ ID NO: 318469 - DNA, 60 bp, Artificial
  Synthetic oligonucleotide
agaacattttaagagcattaggaccaggggctacactagaagaaatgatgacagcatgtc

SEQ ID NO: 318470 - DNA, 55 bp, Artificial
  Synthetic oligonucleotide
agaaccaaagaccgggtattatcaaagctagctttggtactattgcctaatcgaa

SEQ ID NO: 318471 - DNA, 54 bp, Artificial
  Synthetic oligonucleotide
agaaccaaagttaaagtttgactcagtcctggtcaacccctccaacagtatgga

SEQ ID NO: 318472 - DNA, 55 bp, Artificial
  Synthetic oligonucleotide
agaaccaaggggaagtgacatagcaggaactactagtacccttcaggaacaaata

SEQ ID NO: 318473 - DNA, 55 bp, Artificial
  Synthetic oligonucleotide
agaaccaagtgatgaagctagcttatttagataggggtttctacaaacactatgg

SEQ ID NO: 318474 - DNA, 55 bp, Artificial
  Synthetic oligonucleotide
agaaccaagttacctactctggtggtagttgtcaagtcgtgcctaccgcggtaga

SEQ ID NO: 318475 - DNA, 54 bp, Artificial
  Synthetic oligonucleotide
agaaccacactaacacagttctgttttggatagttagggatcgacgcccgaccg

SEQ ID NO: 318476 - DNA, 55 bp, Artificial
  Synthetic oligonucleotide
agaaccaccactgaaatcgggtttggacaaacccctgctagaaaccaggatcatc

SEQ ID NO: 318477 - DNA, 58 bp, Artificial
  Synthetic oligonucleotide
agaaccacgtgggctctatgcgaagccctaaccctagcaacagggcccatatcaacac

SEQ ID NO: 318478 - DNA, 60 bp, Artificial
  Synthetic oligonucleotide
agaaccagacgtggccgtgttaacatccatgcttacagacccatcccacatcaccgcgga

SEQ ID NO: 318479 - DNA, 60 bp, Artificial
  Synthetic oligonucleotide
agaaccagctaagccatggacctactctcaagcctgcgcttcactggataaaacaacatc

SEQ ID NO: 318480 - DNA, 59 bp, Artificial
  Synthetic oligonucleotide
agaaccagctcaggtggctcctatagtagccggaccaatgggagcaacttacacagctt

SEQ ID NO: 318481 - DNA, 57 bp, Artificial
  Synthetic oligonucleotide
agaaccagggcagacctttactataagaaaccgctcccgatctatgcgagtagatcg

SEQ ID NO: 318482 - DNA, 59 bp, Artificial
  Synthetic oligonucleotide
agaaccattaaagtcgaatgggatgaagacatcagcgaagtggtatggaatgataaacg

SEQ ID NO: 318483 - DNA, 58 bp, Artificial
  Synthetic oligonucleotide
agaaccattggaactcatccaagttccagtgctggtttgaaagatgacctccttgaaa

SEQ ID NO: 318484 - DNA, 59 bp, Artificial
  Synthetic oligonucleotide
agaaccattggatctacctccaatcattcaaagactccacggcctcagcgcgttttcac

SEQ ID NO: 318485 - DNA, 58 bp, Artificial
  Synthetic oligonucleotide
agaacccataccccattgccagcatactcacatctttgtttaccaattccctgccacc

SEQ ID NO: 318486 - DNA, 53 bp, Artificial
  Synthetic oligonucleotide
agaaccccagtaatgaaacttgaaggttgatgtgatcgttccttctaacccgt

SEQ ID NO: 318487 - DNA, 54 bp, Artificial
  Synthetic oligonucleotide
agaacccccgccgacaggagtccccatcgatagttgattgtttgctccgaaacc

SEQ ID NO: 318488 - DNA, 54 bp, Artificial
  Synthetic oligonucleotide
agaacccggcccgcagtcgctctcggaagctgggtcggtgggtccggggcgatc

SEQ ID NO: 318489 - DNA, 60 bp, Artificial
  Synthetic oligonucleotide
agaaccctacaatgcatggatattagctgttagacattttcctatgacctggctccatgg

SEQ ID NO: 318490 - DNA, 60 bp, Artificial
  Synthetic oligonucleotide
agaaccctctcccaactaatagggatgagatgcctgcatctagcatgcagatgaatgccc

SEQ ID NO: 318491 - DNA, 57 bp, Artificial
  Synthetic oligonucleotide
agaaccctttagagactatgtagatcggttctataaaacactaagagccgagcaagc

SEQ ID NO: 318492 - DNA, 57 bp, Artificial
  Synthetic oligonucleotide
agaaccgacagctttccacataagtgcaccagtatccaagttcattctcggggggat

SEQ ID NO: 318493 - DNA, 59 bp, Artificial
  Synthetic oligonucleotide
agaaccgatgccggtacaacatgcacgcggccaagtgggcatcgttgcattgggacaag

SEQ ID NO: 318494 - DNA, 56 bp, Artificial
  Synthetic oligonucleotide
agaaccgatgtcaacttgtcccatgtttggatcattcccgtgtcgttttatcgact

SEQ ID NO: 318495 - DNA, 51 bp, Artificial
  Synthetic oligonucleotide
agaaccgcacgttcccggttatcgtggactttaccgaaatcactaacaact

SEQ ID NO: 318496 - DNA, 53 bp, Artificial
  Synthetic oligonucleotide
agaaccgccagttaagcaatcagtcattggtcgcattgtccgtagagtggctc

SEQ ID NO: 318497 - DNA, 55 bp, Artificial
  Synthetic oligonucleotide
agaaccggatactcatggggtgagaagcagtgttaataggtatcacaatgggttc

SEQ ID NO: 318498 - DNA, 57 bp, Artificial
  Synthetic oligonucleotide
agaaccggtaggggcaggagaggcatctacaggtttgtgactccaggagagcggccc

SEQ ID NO: 318499 - DNA, 55 bp, Artificial
  Synthetic oligonucleotide
agaaccggtgcctgcacatgaatcgcaaataccaatggcgcaagaacgaccagcc

SEQ ID NO: 318500 - DNA, 55 bp, Artificial
  Synthetic oligonucleotide
agaaccgtacataatgatgttgtccttggtctcaccaggtgttctcatggctatg

SEQ ID NO: 318501 - DNA, 56 bp, Artificial
  Synthetic oligonucleotide
agaaccgtcaataaggaattcgatatctttactacgtggttagctagcacttacga

SEQ ID NO: 318502 - DNA, 59 bp, Artificial
  Synthetic oligonucleotide
agaaccgtggacggaagacaaagccaatatccatagaagcaccaggtgtcactgtgaaa

SEQ ID NO: 318503 - DNA, 55 bp, Artificial
  Synthetic oligonucleotide
agaaccgttaaacgactgcattaatcgtagattttcgattcttgaaaggaatatg

SEQ ID NO: 318504 - DNA, 54 bp, Artificial
  Synthetic oligonucleotide
agaacctacctaggaaaggtgactgtaggagtggaaatcacctaggaccagtta

SEQ ID NO: 318505 - DNA, 55 bp, Artificial
  Synthetic oligonucleotide
agaacctcagtactctgttttgatatcgttcgggagaagtttgtgtctaggcggt

SEQ ID NO: 318506 - DNA, 54 bp, Artificial
  Synthetic oligonucleotide
agaacctccagaaatggattttacttcaattccctccgagagacgtgtaagtct

SEQ ID NO: 318507 - DNA, 51 bp, Artificial
  Synthetic oligonucleotide
agaacctctgctccatgctccatttgtctgtaatctccacatactcctcca

SEQ ID NO: 318508 - DNA, 60 bp, Artificial
  Synthetic oligonucleotide
agaacctgaacacctatgtgtcagtgggaacatcaacactgaatcagaggtcaatcccaa

SEQ ID NO: 318509 - DNA, 58 bp, Artificial
  Synthetic oligonucleotide
agaacctgaattcttaaacaacacagaacctctctgtaatgtatccggatttgcaata

SEQ ID NO: 318510 - DNA, 53 bp, Artificial
  Synthetic oligonucleotide
agaacctgcgcgtctgattgagttggaagtaggatatcaacgaacgttactga

SEQ ID NO: 318511 - DNA, 56 bp, Artificial
  Synthetic oligonucleotide
agaacctggtagtcctcaatgcggcgtctgtggccggagcccatggtgtcctctcc

SEQ ID NO: 318512 - DNA, 54 bp, Artificial
  Synthetic oligonucleotide
agaaccttctattgttcagtcacaaccctcagttgaagcaagtggacacgttct

SEQ ID NO: 318513 - DNA, 60 bp, Artificial
  Synthetic oligonucleotide
agaaccttggcataagtgtcgtttgcagattggcaacctcctctagctgatcttccatcg

SEQ ID NO: 318514 - DNA, 57 bp, Artificial
  Synthetic oligonucleotide
agaaccttgtgctactcaacgcggcgtctctggccgggacgcacggtcttgcgtcct

SEQ ID NO: 318515 - DNA, 54 bp, Artificial
  Synthetic oligonucleotide
agaacctttggaataacaagatagttagttggttaatgttagatagaataagaa

SEQ ID NO: 318516 - DNA, 60 bp, Artificial
  Synthetic oligonucleotide
agaacctttggcagatgccaaaattgctatgctagacgatgctacaacacaatgctggaa

SEQ ID NO: 318517 - DNA, 60 bp, Artificial
  Synthetic oligonucleotide
agaacgaagcggaaaaatagtggagatctatgttgcatctgatcggaaatgtccaggacg

SEQ ID NO: 318518 - DNA, 52 bp, Artificial
  Synthetic oligonucleotide
agaacgaaggaagatggacgtcgaagcaagaaaccctaacgaagaagaaacc

SEQ ID NO: 318519 - DNA, 60 bp, Artificial
  Synthetic oligonucleotide
agaacgaattggacagtctatgttagtaaatcatgtgtataagattaagcgtatggatag

SEQ ID NO: 318520 - DNA, 52 bp, Artificial
  Synthetic oligonucleotide
agaacgacaccccgtactcgaccgggccggcaccccggacctcacaggtcac

SEQ ID NO: 318521 - DNA, 55 bp, Artificial
  Synthetic oligonucleotide
agaacgaccaattatccgggctttacatcgatgttcggtactacagcgacatcca

SEQ ID NO: 318522 - DNA, 55 bp, Artificial
  Synthetic oligonucleotide
agaacgaccgttccaatgttttgtggatggaggttatgccaggacggattgataa

SEQ ID NO: 318523 - DNA, 50 bp, Artificial
  Synthetic oligonucleotide
agaacgacgcagcccaactccgcagagttcattctgtgcgtcaagcccgg

SEQ ID NO: 318524 - DNA, 59 bp, Artificial
  Synthetic oligonucleotide
agaacgacgccgtatctggatggagacgtgttgtctaacgactcaggtccactattatc

SEQ ID NO: 318525 - DNA, 57 bp, Artificial
  Synthetic oligonucleotide
agaacgagagactaattgcatcagcagcctacccaaaggggctagagaacaaaaccc

SEQ ID NO: 318526 - DNA, 57 bp, Artificial
  Synthetic oligonucleotide
agaacgagagtggtttccctcagcgtcccgatgttacgcacacctggacagctaagg

SEQ ID NO: 318527 - DNA, 59 bp, Artificial
  Synthetic oligonucleotide
agaacgagcgaagaagaggactcgtgcggaatcaatcgacaaacctcaaagcataatac

SEQ ID NO: 318528 - DNA, 55 bp, Artificial
  Synthetic oligonucleotide
agaacgaggaatctgcccctaacttgtataagacggagttcagcgggaccaaatg

SEQ ID NO: 318529 - DNA, 57 bp, Artificial
  Synthetic oligonucleotide
agaacgaggttacccttcagcccggatggcttcatccttcttcaagctagcttcgtc

SEQ ID NO: 318530 - DNA, 55 bp, Artificial
  Synthetic oligonucleotide
agaacgagtcaggatggtattgcctggtttaagcataatgccagagtagatggag

SEQ ID NO: 318531 - DNA, 55 bp, Artificial
  Synthetic oligonucleotide
agaacgatcgtcggaaggcagcctcgagagcatactttggctctcctgatgaacc

SEQ ID NO: 318532 - DNA, 58 bp, Artificial
  Synthetic oligonucleotide
agaacgatctgcgtgatcgttaccaagttatgtacaggttctcggctaaggtgacagg

SEQ ID NO: 318533 - DNA, 60 bp, Artificial
  Synthetic oligonucleotide
agaacgatgttcccgaggtgcttctgcgctacaagcaagtgagaggtatcgcatgagcaa

SEQ ID NO: 318534 - DNA, 54 bp, Artificial
  Synthetic oligonucleotide
agaacgatttaagggataggtaccaagtaatgaggaagttccatgccacggtgg

SEQ ID NO: 318535 - DNA, 59 bp, Artificial
  Synthetic oligonucleotide
agaacgcaaatcttgactgctctacctcaacttaatacctactctacatggattaccta

SEQ ID NO: 318536 - DNA, 55 bp, Artificial
  Synthetic oligonucleotide
agaacgcaatattagttagttatgcgtttgttgggatggactctttaaaggtcga

SEQ ID NO: 318537 - DNA, 60 bp, Artificial
  Synthetic oligonucleotide
agaacgcacacataacttcaaactaaaagaactagcctcaggcctcgcagtcacacttga

SEQ ID NO: 318538 - DNA, 60 bp, Artificial
  Synthetic oligonucleotide
agaacgccagaatgccactgaaatcagagcatctgttgggaggatggttggtggaatcgg

SEQ ID NO: 318539 - DNA, 60 bp, Artificial
  Synthetic oligonucleotide
agaacgccatattagtctattattgttggatgtctgatacagtgtccaaggcatctacat

SEQ ID NO: 318540 - DNA, 52 bp, Artificial
  Synthetic oligonucleotide
agaacgcccccggattaaggcgtatttgtcgtttgggtcttgtgagacccta

SEQ ID NO: 318541 - DNA, 60 bp, Artificial
  Synthetic oligonucleotide
agaacgcgacagccatgcagaacaacattaacgccatcctggggacaaatgttagcatac

SEQ ID NO: 318542 - DNA, 56 bp, Artificial
  Synthetic oligonucleotide
agaacgcgattcatggcaaatagcgaaattgttaaatgagtcacctcaacttttga

SEQ ID NO: 318543 - DNA, 53 bp, Artificial
  Synthetic oligonucleotide
agaacgctgtggcttcagtaacattagcgggcaactcatctctttgccccgtt

SEQ ID NO: 318544 - DNA, 56 bp, Artificial
  Synthetic oligonucleotide
agaacggaaacgtagctacacgagacgtcgacgtattcataggcgcttgttcggaa

SEQ ID NO: 318545 - DNA, 55 bp, Artificial
  Synthetic oligonucleotide
agaacggacgagctgtcgcactcaaggggattgattcacactctactggttctgc

SEQ ID NO: 318546 - DNA, 60 bp, Artificial
  Synthetic oligonucleotide
agaacggagcagtccgacccacagacatgggattgtcgaagaattcgactgctctcatag

SEQ ID NO: 318547 - DNA, 59 bp, Artificial
  Synthetic oligonucleotide
agaacggcacatacgactatcccaagtattcagaagagtccaaattgaatcgagaagaa

SEQ ID NO: 318548 - DNA, 55 bp, Artificial
  Synthetic oligonucleotide
agaacggcatttgggggcaagcacatgaggtcaggttatggctggacggacgcct

SEQ ID NO: 318549 - DNA, 50 bp, Artificial
  Synthetic oligonucleotide
agaacggccatcgcgttccttaagggttacatggagacaaccggagcaac

SEQ ID NO: 318550 - DNA, 57 bp, Artificial
  Synthetic oligonucleotide
agaacgggttgtattacacatcagcaatcaactaacaggcaagcctaacttgtttac

SEQ ID NO: 318551 - DNA, 57 bp, Artificial
  Synthetic oligonucleotide
agaacgtagagtagtaacgcagggaccagtagaagaatttggcagaagcttgataaa

SEQ ID NO: 318552 - DNA, 57 bp, Artificial
  Synthetic oligonucleotide
agaacgtcacagacgggaaggacggcgccattaagaagggcggcttgtacattgtca

SEQ ID NO: 318553 - DNA, 50 bp, Artificial
  Synthetic oligonucleotide
agaacgtcaggtcacccaaacgctctaaggaggttcatgcgatctagtct

SEQ ID NO: 318554 - DNA, 53 bp, Artificial
  Synthetic oligonucleotide
agaacgtcctgtttagagtgtaacgttacggtttagtaacatagatccaccaa

SEQ ID NO: 318555 - DNA, 56 bp, Artificial
  Synthetic oligonucleotide
agaacgtcgtgtatttcaggttaactcgtactgacaacgatttgtataccaggaga

SEQ ID NO: 318556 - DNA, 58 bp, Artificial
  Synthetic oligonucleotide
agaacgtgggcgagctaagctccggcgtagctaaaccgccgcgcgtgtcgtgaattga

SEQ ID NO: 318557 - DNA, 60 bp, Artificial
  Synthetic oligonucleotide
agaacgtgtcgggtgtgatgtacgatctggccatgaagctcactcgcctgggcttcccga

SEQ ID NO: 318558 - DNA, 58 bp, Artificial
  Synthetic oligonucleotide
agaacgtttactgcaagggataggggcttatctctcggctgaacctcagcctgtagag

SEQ ID NO: 318559 - DNA, 57 bp, Artificial
  Synthetic oligonucleotide
agaactaaacagggtgactcaagatttcacagaaattcagctaggaattccacaccc

SEQ ID NO: 318560 - DNA, 55 bp, Artificial
  Synthetic oligonucleotide
agaactaaagagcctgcgactgcaggcttcacggtggctggaacgcgcccagtcc

SEQ ID NO: 318561 - DNA, 59 bp, Artificial
  Synthetic oligonucleotide
agaactaaccactacagatacaacacagtctgcggagtcatccaagactatccatgcga

SEQ ID NO: 318562 - DNA, 57 bp, Artificial
  Synthetic oligonucleotide
agaactaagatcttgttaacgaaggtcatggctgggggaaagattttgtacacagca

SEQ ID NO: 318563 - DNA, 58 bp, Artificial
  Synthetic oligonucleotide
agaactacaatatacgtggtgatggtaatgtgtttcgtccgacggcggatcaacgatc

SEQ ID NO: 318564 - DNA, 52 bp, Artificial
  Synthetic oligonucleotide
agaactaccaatatcagcaaaattattgcaccacccaactacagaagttaga

SEQ ID NO: 318565 - DNA, 51 bp, Artificial
  Synthetic oligonucleotide
agaactacgtcccggctaacgaccgtacgttctacaccactccagacgtgt

SEQ ID NO: 318566 - DNA, 58 bp, Artificial
  Synthetic oligonucleotide
agaactataatagctaactattcaggtgtcaacactttattccgaatcttcttcacta

SEQ ID NO: 318567 - DNA, 60 bp, Artificial
  Synthetic oligonucleotide
agaactatcagcacttgtggagatgggggtggaaatggggcatcatgctccttgggatgt

SEQ ID NO: 318568 - DNA, 52 bp, Artificial
  Synthetic oligonucleotide
agaactatcgattcatttctcatgaatcctattcctctatcttatgataagg

SEQ ID NO: 318569 - DNA, 54 bp, Artificial
  Synthetic oligonucleotide
agaactatgttttcctcttatcacattgaccgtggccgcgtatgatctcttcgt

SEQ ID NO: 318570 - DNA, 60 bp, Artificial
  Synthetic oligonucleotide
agaactcaagtgttttgggaacacagctgttgcaaaatgcaatgtcaatcatgacgaaga

SEQ ID NO: 318571 - DNA, 56 bp, Artificial
  Synthetic oligonucleotide
agaactcagctagttaaaacggaggttgcagaaattcatgaggacagttacggtgg

SEQ ID NO: 318572 - DNA, 60 bp, Artificial
  Synthetic oligonucleotide
agaactcaggaatcagaatgtgtgtgccataatggaatatgccctgtggtgatgacggat

SEQ ID NO: 318573 - DNA, 58 bp, Artificial
  Synthetic oligonucleotide
agaactcaggacgaccacacgggtcgctgtcatcttgtcacatcgtcacaatggcgga

SEQ ID NO: 318574 - DNA, 60 bp, Artificial
  Synthetic oligonucleotide
agaactcaggagtcagaatgtgtttgcatcaatggaacttgtacagtagtaatgactgat

SEQ ID NO: 318575 - DNA, 51 bp, Artificial
  Synthetic oligonucleotide
agaactccacccacgcaagtaccccgaaaacaccgccactttccttacgag

SEQ ID NO: 318576 - DNA, 55 bp, Artificial
  Synthetic oligonucleotide
agaactccgcctgcttgagggcccagacgagtggcttttggtcactgctcgccag

SEQ ID NO: 318577 - DNA, 55 bp, Artificial
  Synthetic oligonucleotide
agaactccggacacttgcacaaagtctcattgaccaaaaggtcaaagagatatct

SEQ ID NO: 318578 - DNA, 60 bp, Artificial
  Synthetic oligonucleotide
agaactcgaacacttatgtgtctgtagggacatcaacactgaatcagaggtcaaccccaa

SEQ ID NO: 318579 - DNA, 60 bp, Artificial
  Synthetic oligonucleotide
agaactcgatgagataggagaagatgttgccccaattgagcacattgcaagtatgaggag

SEQ ID NO: 318580 - DNA, 55 bp, Artificial
  Synthetic oligonucleotide
agaactcgatgagataggggaagacgtcgccccaattgaacatattgcaagcatg

SEQ ID NO: 318581 - DNA, 57 bp, Artificial
  Synthetic oligonucleotide
agaactcgccgactactactttcaatcagtagtctccgtgaacaagtctgaagtacg

SEQ ID NO: 318582 - DNA, 56 bp, Artificial
  Synthetic oligonucleotide
agaactctcatcaacattaagtagtcatgaaattgaattcctcttaccagctgtca

SEQ ID NO: 318583 - DNA, 55 bp, Artificial
  Synthetic oligonucleotide
agaactctgaaaggggcttgtaagttgacattatgtggaaagccaggactgagat

SEQ ID NO: 318584 - DNA, 55 bp, Artificial
  Synthetic oligonucleotide
agaactgaacgaactgtagaagattggtttagagaatacgaaaattcaagaacta

SEQ ID NO: 318585 - DNA, 55 bp, Artificial
  Synthetic oligonucleotide
agaactgaggaactggtgattgaggacaagcctaagaattctaaagttcccagct

SEQ ID NO: 318586 - DNA, 60 bp, Artificial
  Synthetic oligonucleotide
agaactgatctggtgtctctcaacttatctatataattggtgtatggagtcctatatata

SEQ ID NO: 318587 - DNA, 60 bp, Artificial
  Synthetic oligonucleotide
agaactgatgtagcatgctgggccccaagaagctggcaactctccaagagagtaaaagtc

SEQ ID NO: 318588 - DNA, 59 bp, Artificial
  Synthetic oligonucleotide
agaactgattcagatgatttaggaggcatttacatttgggtttggtcagctcttacagt

SEQ ID NO: 318589 - DNA, 60 bp, Artificial
  Synthetic oligonucleotide
agaactgcaagatcgctcctttaatggtggcatacatgttggaaagggaactggttcgca

SEQ ID NO: 318590 - DNA, 55 bp, Artificial
  Synthetic oligonucleotide
agaactgcagatttgcaacttacacagtgctcgatccgattcctaacggtcctcc

SEQ ID NO: 318591 - DNA, 53 bp, Artificial
  Synthetic oligonucleotide
agaactgcaggtagggaacatcacgtggatgccatcattttggtcatgttatc

SEQ ID NO: 318592 - DNA, 55 bp, Artificial
  Synthetic oligonucleotide
agaactgctgatcaacatttgctgacaagggactttccaagggactttccagggg

SEQ ID NO: 318593 - DNA, 55 bp, Artificial
  Synthetic oligonucleotide
agaactgggactacgacccaacatcgagcgaccgggcatcaggatcactcgccgc

SEQ ID NO: 318594 - DNA, 53 bp, Artificial
  Synthetic oligonucleotide
agaactggtgctgtacttggaatttgctcgtttagccgacgaacaaactaaaa

SEQ ID NO: 318595 - DNA, 50 bp, Artificial
  Synthetic oligonucleotide
agaactggtgttgcggttggaagttgaatacatcacaaattggatgggat

SEQ ID NO: 318596 - DNA, 59 bp, Artificial
  Synthetic oligonucleotide
agaactggttcgcaaaaccagattcctaccagtagctggcgggacaagcagcgtgtatg

SEQ ID NO: 318597 - DNA, 55 bp, Artificial
  Synthetic oligonucleotide
agaactgtacccgtttgcctccctcaaatccctctttgggacagaccaatagtca

SEQ ID NO: 318598 - DNA, 55 bp, Artificial
  Synthetic oligonucleotide
agaactgtcgtccgattcatgctatttaaacgaatagccatttatggacggtcca

SEQ ID NO: 318599 - DNA, 55 bp, Artificial
  Synthetic oligonucleotide
agaactgtgcgtgcctcgattcgatttgatgtcggacgcatatgacgacgacggc

SEQ ID NO: 318600 - DNA, 60 bp, Artificial
  Synthetic oligonucleotide
agaacttaataatgtgaaatatgctctgtttaatcatgaggtaaattgggatgtcattaa

SEQ ID NO: 318601 - DNA, 52 bp, Artificial
  Synthetic oligonucleotide
agaacttaggttgaattattgtgatcataaatttgaagattgcgatgtttcc

SEQ ID NO: 318602 - DNA, 60 bp, Artificial
  Synthetic oligonucleotide
agaacttgatgaaataggagaagatgttgccccgattgaacatatcgcaagcatgaggag

SEQ ID NO: 318603 - DNA, 58 bp, Artificial
  Synthetic oligonucleotide
agaacttggagtttctctctctagaactgcgtggcattttggcaatcggtgtaaggtc

SEQ ID NO: 318604 - DNA, 55 bp, Artificial
  Synthetic oligonucleotide
agaactttcagatgtcgagtaaatgtggtcatgattacgccaacacaagactctc

SEQ ID NO: 318605 - DNA, 59 bp, Artificial
  Synthetic oligonucleotide
agaactttcccaacactcgttccgaattctgatactcaattgcatttcgaatcgatgac

SEQ ID NO: 318606 - DNA, 55 bp, Artificial
  Synthetic oligonucleotide
agaactttgttgtactcactgtatgtcaggctgtggatccttgggctaattggtt

SEQ ID NO: 318607 - DNA, 60 bp, Artificial
  Synthetic oligonucleotide
agaagaaatgatgtcagcatgtcggggagtgggaggacctagccacaaagcaagagtgtt

SEQ ID NO: 318608 - DNA, 57 bp, Artificial
  Synthetic oligonucleotide
agaagaacctgctggaccgacaactttaagggtaccatggatgacatttcctggata

SEQ ID NO: 318609 - DNA, 60 bp, Artificial
  Synthetic oligonucleotide
agaagaagagccatcagtcaggagatacagccccaatactactactgagggccaggtgaa

SEQ ID NO: 318610 - DNA, 60 bp, Artificial
  Synthetic oligonucleotide
agaagaaggatgtacatatgtacgcttgtaacgcatgtacaagctccgttagcggagatg

SEQ ID NO: 318611 - DNA, 55 bp, Artificial
  Synthetic oligonucleotide
agaagaagtcgctgctgctactattatagcgcacggcagtattcaagatgggcga

SEQ ID NO: 318612 - DNA, 55 bp, Artificial
  Synthetic oligonucleotide
agaagaataggccgcgcagcggaatgtttaggcgaattggacaaggttataattg

SEQ ID NO: 318613 - DNA, 56 bp, Artificial
  Synthetic oligonucleotide
agaagaatcaacatgtaccgagtacattaataacgggttacctccgattcagaata

SEQ ID NO: 318614 - DNA, 55 bp, Artificial
  Synthetic oligonucleotide
agaagaatcagacaaggctttgagagggctctcctataacatgggtggcaagtgg

SEQ ID NO: 318615 - DNA, 52 bp, Artificial
  Synthetic oligonucleotide
agaagaatgcaggtgtttggccacgtgtcaaagtagatacgatatatgggaa

SEQ ID NO: 318616 - DNA, 58 bp, Artificial
  Synthetic oligonucleotide
agaagacaacactatcaccaactaatgcggaattcctctctacgttctttgaaagctg

SEQ ID NO: 318617 - DNA, 50 bp, Artificial
  Synthetic oligonucleotide
agaagacacatagcaagagagctgcatccggacttctacaagaactgctg

SEQ ID NO: 318618 - DNA, 56 bp, Artificial
  Synthetic oligonucleotide
agaagacatgagaggcctaataacaggtaagaagaagcactgggtaagtattaacc

SEQ ID NO: 318619 - DNA, 50 bp, Artificial
  Synthetic oligonucleotide
agaagacatgcccgcacccgctaaacaaattcgtgaaggggtccaatctc

SEQ ID NO: 318620 - DNA, 55 bp, Artificial
  Synthetic oligonucleotide
agaagacatgttgtcagtgtggaatagggtttggatagaggaaaacccatggatg

SEQ ID NO: 318621 - DNA, 59 bp, Artificial
  Synthetic oligonucleotide
agaagacattagatgagcatgacgctaatgtaaggaatctacatgatcgggtcagaaga

SEQ ID NO: 318622 - DNA, 58 bp, Artificial
  Synthetic oligonucleotide
agaagaccccaatggggttttcatatgatacccgctgctttgactccacggtcactga

SEQ ID NO: 318623 - DNA, 60 bp, Artificial
  Synthetic oligonucleotide
agaagacctttgaccacaccctcatgagcatagtgtccagcctacaccttagtatcagag

SEQ ID NO: 318624 - DNA, 60 bp, Artificial
  Synthetic oligonucleotide
agaagacgcaactgccggtatcactcatttgatgatctggcattccaatctaaacgacgc

SEQ ID NO: 318625 - DNA, 60 bp, Artificial
  Synthetic oligonucleotide
agaagacgccatgtatggcactgatggtttagaagctctagacctcactaccagtgcagg

SEQ ID NO: 318626 - DNA, 57 bp, Artificial
  Synthetic oligonucleotide
agaagacgcctactatttactcaaagcactccaaaaagagcaagagagcagccagtc

SEQ ID NO: 318627 - DNA, 55 bp, Artificial
  Synthetic oligonucleotide
agaagacgtcctgagagtgcctcttacagcacgggcagtccttcgtggcgattac

SEQ ID NO: 318628 - DNA, 50 bp, Artificial
  Synthetic oligonucleotide
agaagacgtgctgtaagtaaggataccttaggacgtctttcgctggtata

SEQ ID NO: 318629 - DNA, 60 bp, Artificial
  Synthetic oligonucleotide
agaagactatcgtggtaatggctggttggtttggaaagatcaggaccagtatatggtgca

SEQ ID NO: 318630 - DNA, 60 bp, Artificial
  Synthetic oligonucleotide
agaagacttgcagatgcggcgacttgcgacggctttacagaaagaagtgggcgagaggac

SEQ ID NO: 318631 - DNA, 55 bp, Artificial
  Synthetic oligonucleotide
agaagacttgcaggcacatttacctggactctgtcagactcttcaggggtggaga

SEQ ID NO: 318632 - DNA, 60 bp, Artificial
  Synthetic oligonucleotide
agaagagagctcatggtgacgcgcagagagagggcgtcgaggaagaaaagacgtctgagg

SEQ ID NO: 318633 - DNA, 55 bp, Artificial
  Synthetic oligonucleotide
agaagagatcattacgtgatgagtaacggaaaccagtatcctcgcgtaaatactg

SEQ ID NO: 318634 - DNA, 56 bp, Artificial
  Synthetic oligonucleotide
agaagagccgctgaaagtgttaacgaagattctatgaaatttaaactgtcgaccac

SEQ ID NO: 318635 - DNA, 55 bp, Artificial
  Synthetic oligonucleotide
agaagaggagtcagttagaagaaagcgattttgtgtaacgatcatcagaagtccg

SEQ ID NO: 318636 - DNA, 52 bp, Artificial
  Synthetic oligonucleotide
agaagaggttagtcccggctgaacgttaaaaaggtcagtaaggtccatccca

SEQ ID NO: 318637 - DNA, 60 bp, Artificial
  Synthetic oligonucleotide
agaagaggttgcttcatattcaattgttggacctgccaatgcaaaagttccacatagtgc

SEQ ID NO: 318638 - DNA, 60 bp, Artificial
  Synthetic oligonucleotide
agaagagtgagagtcttcgggacacagctgagtgaaggcagtaagggcggcaggaatcaa

SEQ ID NO: 318639 - DNA, 60 bp, Artificial
  Synthetic oligonucleotide
agaagagtgttcctgctatgtggacattgatgtctactgtatatgtagggacaattggaa

SEQ ID NO: 318640 - DNA, 60 bp, Artificial
  Synthetic oligonucleotide
agaagagttagtggatgttgacaccgaccatgatgctacccaagcatgtatatttgctgg

SEQ ID NO: 318641 - DNA, 55 bp, Artificial
  Synthetic oligonucleotide
agaagataagcggagggagcatctctcctttctgcgacacttgagacgccaagcg

SEQ ID NO: 318642 - DNA, 60 bp, Artificial
  Synthetic oligonucleotide
agaagatacgcagtgtaagcgctggtcgtgcactgtacatccctccgtatgatttgcttt

SEQ ID NO: 318643 - DNA, 56 bp, Artificial
  Synthetic oligonucleotide
agaagatcactcgagattcaagcggtgaggggggacccccgagacgctggtgaacc

SEQ ID NO: 318644 - DNA, 58 bp, Artificial
  Synthetic oligonucleotide
agaagatcagaaagctcgcgaagcttttcgtcgttatcaagaagagagaccaccggaa

SEQ ID NO: 318645 - DNA, 59 bp, Artificial
  Synthetic oligonucleotide
agaagatcgcatcaaattagattttcagaatccgcgacgtcatattcgggatatatttt

SEQ ID NO: 318646 - DNA, 60 bp, Artificial
  Synthetic oligonucleotide
agaagatctaccgctactaaaagtggcattaagatctcctacagagaggatcgaggaaca

SEQ ID NO: 318647 - DNA, 58 bp, Artificial
  Synthetic oligonucleotide
agaagatctgaagtcacagtgctcttaagttaaaatccccaggatacgaacacacgag

SEQ ID NO: 318648 - DNA, 51 bp, Artificial
  Synthetic oligonucleotide
agaagatgatagggttaatgtatgtatggaccccaagcaagttcagctttt

SEQ ID NO: 318649 - DNA, 60 bp, Artificial
  Synthetic oligonucleotide
agaagatgcaactgctggtctcacccatttgatgatctggcattccaatctgaatgatgc

SEQ ID NO: 318650 - DNA, 52 bp, Artificial
  Synthetic oligonucleotide
agaagatggccctgtacgacgtagtttccaagctccccctggccgtgatggg

SEQ ID NO: 318651 - DNA, 60 bp, Artificial
  Synthetic oligonucleotide
agaagatggtggacggaatgcaaggagaggtgaaattcattgtcgcaactaatatcatcg

SEQ ID NO: 318652 - DNA, 60 bp, Artificial
  Synthetic oligonucleotide
agaagatgtagatgacgaaatgtatcgcgagtacacgatgttaataagagatgaagttgt

SEQ ID NO: 318653 - DNA, 55 bp, Artificial
  Synthetic oligonucleotide
agaagattagtgagtgcgttaaggcgcagtctttacgtaacgatttttgtggtaa

SEQ ID NO: 318654 - DNA, 55 bp, Artificial
  Synthetic oligonucleotide
agaagattggcagggacttttacctggacattgtcggattcttcgggaactgaaa

SEQ ID NO: 318655 - DNA, 58 bp, Artificial
  Synthetic oligonucleotide
agaagatttggtttcgatttagacatgtgcttacattccactttcacaaaatcaggta

SEQ ID NO: 318656 - DNA, 55 bp, Artificial
  Synthetic oligonucleotide
agaagcaaacccaatactattctgtgcttccgatgctaacttaacaagcactgag

SEQ ID NO: 318657 - DNA, 51 bp, Artificial
  Synthetic oligonucleotide
agaagcaaccaatgttgaactatgcttgacttttgcagacaagacctactg

SEQ ID NO: 318658 - DNA, 58 bp, Artificial
  Synthetic oligonucleotide
agaagcaacgtgacgggtcaacagaacggctgacacgactgagccccgggcggagcac

SEQ ID NO: 318659 - DNA, 60 bp, Artificial
  Synthetic oligonucleotide
agaagcaagtcaagtgtgtgttcccatctctcctagtcgccgcctggtcagtcggtgttc

SEQ ID NO: 318660 - DNA, 60 bp, Artificial
  Synthetic oligonucleotide
agaagcaccaagctcgctactgcacaccgacttggccttaggttggctggtcccggagca

SEQ ID NO: 318661 - DNA, 58 bp, Artificial
  Synthetic oligonucleotide
agaagcacgtgagtagggcgtttatatgcttgcaggccctaacgacgtttgtctcagt

SEQ ID NO: 318662 - DNA, 60 bp, Artificial
  Synthetic oligonucleotide
agaagcactgcgagtcgcatcttacgacacatccgaccaccggatatacctgtttgcggt

SEQ ID NO: 318663 - DNA, 57 bp, Artificial
  Synthetic oligonucleotide
agaagcagaagtgatcccgcaggaaactggtaggcaaacagccctgttcctactaaa

SEQ ID NO: 318664 - DNA, 50 bp, Artificial
  Synthetic oligonucleotide
agaagcagacattactattatagagagctcactacctacagaatcaaaca

SEQ ID NO: 318665 - DNA, 55 bp, Artificial
  Synthetic oligonucleotide
agaagcagactccagtttctcctgttgagaaagcttcagttcccgttgagcggac

SEQ ID NO: 318666 - DNA, 55 bp, Artificial
  Synthetic oligonucleotide
agaagcagcgttcctctgtttcacttatggattaaaggtggttacacacaacgtt

SEQ ID NO: 318667 - DNA, 58 bp, Artificial
  Synthetic oligonucleotide
agaagcaggaccgagtggcactcaacctttagaaacagcgcaagagtcaccacccgta

SEQ ID NO: 318668 - DNA, 52 bp, Artificial
  Synthetic oligonucleotide
agaagcagtcaaaattgtgaaaatgaaactaactgtacagaaaaataactcc

SEQ ID NO: 318669 - DNA, 55 bp, Artificial
  Synthetic oligonucleotide
agaagcatatgaacggcgaagacatgcggtgattagagtctctctaaagccgggg

SEQ ID NO: 318670 - DNA, 55 bp, Artificial
  Synthetic oligonucleotide
agaagcatccggacgccaacctaaccgggcaagtatccgaacaatcggacatttg

SEQ ID NO: 318671 - DNA, 60 bp, Artificial
  Synthetic oligonucleotide
agaagcatgcttgttaagtgagggctgaactaacaattcagtatccgatcttaaccggca

SEQ ID NO: 318672 - DNA, 60 bp, Artificial
  Synthetic oligonucleotide
agaagcatgttgattaagtgaggaccagaccaaacatctggtatccaatctaagttagca

SEQ ID NO: 318673 - DNA, 55 bp, Artificial
  Synthetic oligonucleotide
agaagcattcagcagctatatatgcccttccgatccaggatttgtactaaaccac

SEQ ID NO: 318674 - DNA, 60 bp, Artificial
  Synthetic oligonucleotide
agaagcattgaagacgttcagaaacaagcgctctagcaaggctatgataaatcctagcct

SEQ ID NO: 318675 - DNA, 60 bp, Artificial
  Synthetic oligonucleotide
agaagccatctgtgtacttaaaacatgccttgtgctaaattgcatgcagtttaaactcga

SEQ ID NO: 318676 - DNA, 53 bp, Artificial
  Synthetic oligonucleotide
agaagcccaacaggaagactacattccaatagaagatccatatatggattatc

SEQ ID NO: 318677 - DNA, 59 bp, Artificial
  Synthetic oligonucleotide
agaagcccatgactctccaggccttatttcaattgggcctctaagcccaactctggaca

SEQ ID NO: 318678 - DNA, 55 bp, Artificial
  Synthetic oligonucleotide
agaagcccccaaagtatcctccggcccttcccatctgggctaggccagactacaa

SEQ ID NO: 318679 - DNA, 55 bp, Artificial
  Synthetic oligonucleotide
agaagccctctaccaaggggttcccaatgtaccagtggtgatcctggaaagtata

SEQ ID NO: 318680 - DNA, 56 bp, Artificial
  Synthetic oligonucleotide
agaagccgacgggtgtgtttatgtgggaaccggcttctctcatcggtgtagatggg

SEQ ID NO: 318681 - DNA, 55 bp, Artificial
  Synthetic oligonucleotide
agaagccgatatgtttgtcacaaatgactttcaaattggtgacgccattatgggg

SEQ ID NO: 318682 - DNA, 58 bp, Artificial
  Synthetic oligonucleotide
agaagcctaatatacctaggtagaatcgagatgccagaggtaactatcccaaactgga

SEQ ID NO: 318683 - DNA, 55 bp, Artificial
  Synthetic oligonucleotide
agaagcctgactatcaatgcaaggtttacacaggcgtgtacccattcatgtgggg

SEQ ID NO: 318684 - DNA, 58 bp, Artificial
  Synthetic oligonucleotide
agaagcctgagagctctctccttagactctgagtccaaaggaaagatttcacctcctt

SEQ ID NO: 318685 - DNA, 60 bp, Artificial
  Synthetic oligonucleotide
agaagcctgcttcatgtattcagatttccacttcattgacgaacggggtgaatcaacaat

SEQ ID NO: 318686 - DNA, 57 bp, Artificial
  Synthetic oligonucleotide
agaagccttgctcaggtgaaatctctcttcggtgacttgaacccccatttggagaaa

SEQ ID NO: 318687 - DNA, 53 bp, Artificial
  Synthetic oligonucleotide
agaagcgaaccggaaggaacggagacgaggacggccgcataccctggtgggga

SEQ ID NO: 318688 - DNA, 56 bp, Artificial
  Synthetic oligonucleotide
agaagcgaacgatgggttcaacttggccaaaaacattgaatgggcaatcaagacgg

SEQ ID NO: 318689 - DNA, 53 bp, Artificial
  Synthetic oligonucleotide
agaagcgagtactgatggtaaatttttcgcatacagagtagacacgtttgagg

SEQ ID NO: 318690 - DNA, 59 bp, Artificial
  Synthetic oligonucleotide
agaagcgccattctgggcgcggtcattacgtgatgccgacgttaaaagttcatctaagc

SEQ ID NO: 318691 - DNA, 60 bp, Artificial
  Synthetic oligonucleotide
agaagcggagacagcgacgaagcactcctccaagcagtgaagatcatcaaaatcctatat

SEQ ID NO: 318692 - DNA, 60 bp, Artificial
  Synthetic oligonucleotide
agaagcggattgatactgcgttacctgccatgacatcaatcattggagggacctttggac

SEQ ID NO: 318693 - DNA, 55 bp, Artificial
  Synthetic oligonucleotide
agaagcgtgacgaaggtgacgatgaaacagctagggctatcattagaaaccaatg

SEQ ID NO: 318694 - DNA, 55 bp, Artificial
  Synthetic oligonucleotide
agaagcgtgactgaagcgaggtggattttgtttaaggtcagatccgtttcgggac

SEQ ID NO: 318695 - DNA, 60 bp, Artificial
  Synthetic oligonucleotide
agaagctaattactcttgtgctaaccataccctgccatggggagaaatatgtactcatcc

SEQ ID NO: 318696 - DNA, 57 bp, Artificial
  Synthetic oligonucleotide
agaagctaccaatcttataggtacggtagccgagagtcaaggagagacatatgctag

SEQ ID NO: 318697 - DNA, 53 bp, Artificial
  Synthetic oligonucleotide
agaagctacgtgttctcccctggtctcgggttgagcaagagcttcggaccttt

SEQ ID NO: 318698 - DNA, 55 bp, Artificial
  Synthetic oligonucleotide
agaagctactgtgatacaggctatgcactcacgcctctttcgaacagagggcgcg

SEQ ID NO: 318699 - DNA, 56 bp, Artificial
  Synthetic oligonucleotide
agaagctatagtacattcagtgttcgtgttgagctattatactggtcacgatctac

SEQ ID NO: 318700 - DNA, 58 bp, Artificial
  Synthetic oligonucleotide
agaagctcaaatttagggatgcctttgacagaaaagtaggccgtgaggtgtacgcaga

SEQ ID NO: 318701 - DNA, 55 bp, Artificial
  Synthetic oligonucleotide
agaagctcagctgtttaacaagccatactggttacagagggcccaaggccacaac

SEQ ID NO: 318702 - DNA, 57 bp, Artificial
  Synthetic oligonucleotide
agaagctccaaccttccaaacactcggcccaatatactggtcattagaaaactcata

SEQ ID NO: 318703 - DNA, 55 bp, Artificial
  Synthetic oligonucleotide
agaagctcgggaaggtatcagaccccacatccagaagttcctagacctaggggtc

SEQ ID NO: 318704 - DNA, 54 bp, Artificial
  Synthetic oligonucleotide
agaagctctgctagacacaggagctgatgatacagtaatagataatgtacaact

SEQ ID NO: 318705 - DNA, 55 bp, Artificial
  Synthetic oligonucleotide
agaagctgaatactcaaggtattgtagtttcgtagcccactcgtatggtaatgcc

SEQ ID NO: 318706 - DNA, 50 bp, Artificial
  Synthetic oligonucleotide
agaagctgaattgaggcaaacaggtccaccgagaacaatcttagctgacc

SEQ ID NO: 318707 - DNA, 60 bp, Artificial
  Synthetic oligonucleotide
agaagctgaccataacttattcgtcatcaatgatgtgggagatcaacggtcctgagtcag

SEQ ID NO: 318708 - DNA, 59 bp, Artificial
  Synthetic oligonucleotide
agaagctgcacttccgaatggctgagttttccacgcccgtccgcagcggtatcgccacg

SEQ ID NO: 318709 - DNA, 60 bp, Artificial
  Synthetic oligonucleotide
agaagctgctaagcatgctaagtgactactggtacttatcatgtgggcttttgttcccca

SEQ ID NO: 318710 - DNA, 57 bp, Artificial
  Synthetic oligonucleotide
agaagctgctttagaatccctaggtaagatcttcgctagtaagaccttgtgtaagga

SEQ ID NO: 318711 - DNA, 58 bp, Artificial
  Synthetic oligonucleotide
agaagcttagtcagtgtctttcacaagagttgcaaagtgttgaaagtttccgccacac

SEQ ID NO: 318712 - DNA, 55 bp, Artificial
  Synthetic oligonucleotide
agaagcttctagcctaaatgactctgtcgctatgcggatggcatttggcaacctg

SEQ ID NO: 318713 - DNA, 51 bp, Artificial
  Synthetic oligonucleotide
agaagcttgtcgaagggtatgagagctaacctgcaacaactgagttctttg

SEQ ID NO: 318714 - DNA, 60 bp, Artificial
  Synthetic oligonucleotide
agaagctttgtatggcacagatggcttggaacccattgaccttaataccagtgcaggata

SEQ ID NO: 318715 - DNA, 58 bp, Artificial
  Synthetic oligonucleotide
agaaggaaacccgatttcgctgtgtcgtccattcgtacaggtctcgagatgcctcgaa

SEQ ID NO: 318716 - DNA, 55 bp, Artificial
  Synthetic oligonucleotide
agaaggaacttgatcctcaacagaggtggcgatgagaacccacgcggcccggtga

SEQ ID NO: 318717 - DNA, 60 bp, Artificial
  Synthetic oligonucleotide
agaaggaataccgctatatgatgcaatcaaatgcatgaagacatttttcggttggaagga

SEQ ID NO: 318718 - DNA, 50 bp, Artificial
  Synthetic oligonucleotide
agaaggacacacgatatctcagactgtgtagctttcgtaggcatctgcac

SEQ ID NO: 318719 - DNA, 55 bp, Artificial
  Synthetic oligonucleotide
agaaggacttgactgctagaaggcggcagaaggtaaggagagtaagacctcaccg

SEQ ID NO: 318720 - DNA, 55 bp, Artificial
  Synthetic oligonucleotide
agaaggagacgcgttgaacacgtttaaaacaaggaatcgtgatgcgtttaggatg

SEQ ID NO: 318721 - DNA, 60 bp, Artificial
  Synthetic oligonucleotide
agaaggagagagatgggtgcgagagcgtcagtattaagtgggggaaaattagatgcatgg

SEQ ID NO: 318722 - DNA, 52 bp, Artificial
  Synthetic oligonucleotide
agaaggaggacttatgtacgcagacgacacggctggatgggacactagaata

SEQ ID NO: 318723 - DNA, 53 bp, Artificial
  Synthetic oligonucleotide
agaaggaggattctgtttggaatccgatctaatgcggctattccagccggggc

SEQ ID NO: 318724 - DNA, 55 bp, Artificial
  Synthetic oligonucleotide
agaaggaggttacatcagcatgttttatcaaactagggttgttgttccgttgtcc

SEQ ID NO: 318725 - DNA, 56 bp, Artificial
  Synthetic oligonucleotide
agaaggagttccctgtctgaattttactccctgggtgaactgccgtcagcatgggg

SEQ ID NO: 318726 - DNA, 56 bp, Artificial
  Synthetic oligonucleotide
agaaggataaacgtgtcgaaccggctaacacagaagatatccgcaataggttcaaa

SEQ ID NO: 318727 - DNA, 60 bp, Artificial
  Synthetic oligonucleotide
agaaggataacatttgatgcgtcgaaacaggtgtatgtgaggaggtcgatagaggatgtt

SEQ ID NO: 318728 - DNA, 59 bp, Artificial
  Synthetic oligonucleotide
agaaggatccgttcgactagtgaatggattcttagcacttatctgggacgatctacgga

SEQ ID NO: 318729 - DNA, 55 bp, Artificial
  Synthetic oligonucleotide
agaaggcacgtatgtgtggaagtcttcaaagacgacactctgccatttaagcccg

SEQ ID NO: 318730 - DNA, 56 bp, Artificial
  Synthetic oligonucleotide
agaaggcagagaccagctgtggaaaggacccggtgagctattgtggaaaggggaag

SEQ ID NO: 318731 - DNA, 53 bp, Artificial
  Synthetic oligonucleotide
agaaggccatcagggagggaagaccacctcagtatctgttataaggtttggtg

SEQ ID NO: 318732 - DNA, 60 bp, Artificial
  Synthetic oligonucleotide
agaaggccccctggatcatgtgaacttcattccggcaccagttacgactactggatgcac

SEQ ID NO: 318733 - DNA, 50 bp, Artificial
  Synthetic oligonucleotide
agaaggcccgttttgaggttgttgtacaaccttcttaagaaggaccttac

SEQ ID NO: 318734 - DNA, 50 bp, Artificial
  Synthetic oligonucleotide
agaaggcctgcaattctaactagaccgagtgcacctgtagcgagggacct

SEQ ID NO: 318735 - DNA, 60 bp, Artificial
  Synthetic oligonucleotide
agaaggcgaagacaatcaggcccatctcagagatgaagaaggactgccggaagttcctac

SEQ ID NO: 318736 - DNA, 58 bp, Artificial
  Synthetic oligonucleotide
agaaggcgaggttttataagtatgttgatcatatgatcttgaagggaagtccattagt

SEQ ID NO: 318737 - DNA, 57 bp, Artificial
  Synthetic oligonucleotide
agaaggcgatttttcatacctgaccaacaacacttgggagacattgagtaaatccgc

SEQ ID NO: 318738 - DNA, 55 bp, Artificial
  Synthetic oligonucleotide
agaaggcgccgacgttattggagtcacccccaaatccggcttgaggagtcaccag

SEQ ID NO: 318739 - DNA, 54 bp, Artificial
  Synthetic oligonucleotide
agaaggctagaactcgagcaattaaaactgtttattggttcatacctgacatat

SEQ ID NO: 318740 - DNA, 60 bp, Artificial
  Synthetic oligonucleotide
agaaggctcatggggacatttacttggactctctcagattctgagggcaatgatctacca

SEQ ID NO: 318741 - DNA, 58 bp, Artificial
  Synthetic oligonucleotide
agaaggctgatgcgacactttagcaacgtccggtaaggcacgcgtcgtgttatttggc

SEQ ID NO: 318742 - DNA, 55 bp, Artificial
  Synthetic oligonucleotide
agaagggagcgttccgtaatcacccttgtactatctgggcaaacgagactgtagc

SEQ ID NO: 318743 - DNA, 57 bp, Artificial
  Synthetic oligonucleotide
agaagggccatgtgaaccaggtgattgtggagggaaactattatgtaaacatggtgt

SEQ ID NO: 318744 - DNA, 60 bp, Artificial
  Synthetic oligonucleotide
agaagggcgaggcaaactgcacccgccaacacatgcaagccgcaatgtactacatcctca

SEQ ID NO: 318745 - DNA, 57 bp, Artificial
  Synthetic oligonucleotide
agaagggctccaggactgtaaaattgctcctttaatggtggcatacatgttggaaag

SEQ ID NO: 318746 - DNA, 55 bp, Artificial
  Synthetic oligonucleotide
agaaggggatgtattgtcgagtgattcaggaccgttgttatcagtgttcgcgtta

SEQ ID NO: 318747 - DNA, 57 bp, Artificial
  Synthetic oligonucleotide
agaagggggctagagacgggatgggcttacacgcaccaaggagggatcagctcggta

SEQ ID NO: 318748 - DNA, 59 bp, Artificial
  Synthetic oligonucleotide
agaagggtggatcaactctcctaaccatgtcaaatcaattacacaaacactagtgtcca

SEQ ID NO: 318749 - DNA, 57 bp, Artificial
  Synthetic oligonucleotide
agaagggtgtacaccgattggagctctttaacctgtgctgatggtatcggtgtattg

SEQ ID NO: 318750 - DNA, 55 bp, Artificial
  Synthetic oligonucleotide
agaagggttagggacaatatgaccaagaaaatggtcacacaacgaacaataggaa

SEQ ID NO: 318751 - DNA, 52 bp, Artificial
  Synthetic oligonucleotide
agaagggttagttgaagttcaaggtagaagagaagagtcctttgttttgcgt

SEQ ID NO: 318752 - DNA, 55 bp, Artificial
  Synthetic oligonucleotide
agaaggtaaatatatgggaaccatgtgaaaagtggtttgcacaggtggtatgggg

SEQ ID NO: 318753 - DNA, 59 bp, Artificial
  Synthetic oligonucleotide
agaaggtaatcgaccctgcgattatggtcacagagcgaggtctaatttcggacatcgac

SEQ ID NO: 318754 - DNA, 60 bp, Artificial
  Synthetic oligonucleotide
agaaggtaatgtctgcaagcacggtttgtaagctgcaaagctgtactcatggtgtgcctg

SEQ ID NO: 318755 - DNA, 60 bp, Artificial
  Synthetic oligonucleotide
agaaggtagtgttgcagcagacggagaatggagtgctaccaatcgtactcggtaatcgag

SEQ ID NO: 318756 - DNA, 60 bp, Artificial
  Synthetic oligonucleotide
agaaggtcagaggtcaaggtcactgatgacgtcatcaagtactctatacatgctgagtac

SEQ ID NO: 318757 - DNA, 54 bp, Artificial
  Synthetic oligonucleotide
agaaggtctcatgagactggcactatagccttaatattagcatgctttaacaac

SEQ ID NO: 318758 - DNA, 54 bp, Artificial
  Synthetic oligonucleotide
agaaggtctctaaacttaaaatttacccactccggcatgaaagtattgtcataa

SEQ ID NO: 318759 - DNA, 57 bp, Artificial
  Synthetic oligonucleotide
agaaggtggcgaaagggaaatctaggctaattgaggcatccagtttgaatgactccg

SEQ ID NO: 318760 - DNA, 54 bp, Artificial
  Synthetic oligonucleotide
agaaggtgttaagtatggattaacaataacccctgcagataagtctagcacttt

SEQ ID NO: 318761 - DNA, 55 bp, Artificial
  Synthetic oligonucleotide
agaaggtgttggtacccgaaatgcaggcgcgtatgcgtgcaataaatgtgagcgg

SEQ ID NO: 318762 - DNA, 54 bp, Artificial
  Synthetic oligonucleotide
agaaggtgtttatgagcacaccgcacattgttgatccatttgtccaattggcaa

SEQ ID NO: 318763 - DNA, 52 bp, Artificial
  Synthetic oligonucleotide
agaaggttaacgcacacaacacagggctccgggccaccaacaaaacaggcgc

SEQ ID NO: 318764 - DNA, 58 bp, Artificial
  Synthetic oligonucleotide
agaaggttggagcaccgttgattcccgtggtacgaacggcagcagaaatgcctcgcca

SEQ ID NO: 318765 - DNA, 55 bp, Artificial
  Synthetic oligonucleotide
agaaggtttcggaaatgcattttacagtacactaggatatgaggcagataaagac

SEQ ID NO: 318766 - DNA, 58 bp, Artificial
  Synthetic oligonucleotide
agaagtaaacgcagggtggacattggcacacatggaatacccagtcaaggttagacta

SEQ ID NO: 318767 - DNA, 55 bp, Artificial
  Synthetic oligonucleotide
agaagtaacaacagggaggttaattacatatgagtaaggttcaatccaagcctcg

SEQ ID NO: 318768 - DNA, 56 bp, Artificial
  Synthetic oligonucleotide
agaagtaacttctgccttccccacttagacgcgcggctggaaaaatctcgcaagaa

SEQ ID NO: 318769 - DNA, 60 bp, Artificial
  Synthetic oligonucleotide
agaagtaagccatgacgttgatgataatcaaccgagcgacttcaaagcgccgcaatcaca

SEQ ID NO: 318770 - DNA, 55 bp, Artificial
  Synthetic oligonucleotide
agaagtaatgccttttaagtcacccgaacagcgcaagtacttgtacgccgctaag

SEQ ID NO: 318771 - DNA, 56 bp, Artificial
  Synthetic oligonucleotide
agaagtacatccggtcccaatagacaatgtggaacttgacacacctttagtttctg

SEQ ID NO: 318772 - DNA, 55 bp, Artificial
  Synthetic oligonucleotide
agaagtactcagcatggaactggttacgtatctcacgtaacgaccacatccgtca

SEQ ID NO: 318773 - DNA, 55 bp, Artificial
  Synthetic oligonucleotide
agaagtaggctttccagtcaaacctcaggtgcctttaagaccaatgacctataag

SEQ ID NO: 318774 - DNA, 58 bp, Artificial
  Synthetic oligonucleotide
agaagtagtacaaagagtttatagagctattctccatatacctacaagaataagacag

SEQ ID NO: 318775 - DNA, 50 bp, Artificial
  Synthetic oligonucleotide
agaagtagttgtctgaaagacccaccggctatttagtatcagattcacta

SEQ ID NO: 318776 - DNA, 60 bp, Artificial
  Synthetic oligonucleotide
agaagtatgaggatgagtagtagtggatattgcagttacaccctatgggtattgtgaact

SEQ ID NO: 318777 - DNA, 60 bp, Artificial
  Synthetic oligonucleotide
agaagtatggggtagagatattggaccagaaacatgtctacacaggaggcacttgggatg

SEQ ID NO: 318778 - DNA, 55 bp, Artificial
  Synthetic oligonucleotide
agaagtattggccatgatgccaggaaatagagctcaaaaggagctaattcaaggg

SEQ ID NO: 318779 - DNA, 52 bp, Artificial
  Synthetic oligonucleotide
agaagtcaaacgattaggggataataggaaggttttgactattcaaccgaaa

SEQ ID NO: 318780 - DNA, 60 bp, Artificial
  Synthetic oligonucleotide
agaagtcaagcccgttgagaaggctggttgcatctttgataacagcagctttcacattgg

SEQ ID NO: 318781 - DNA, 60 bp, Artificial
  Synthetic oligonucleotide
agaagtcaccgagagctcctggaacatctcaccggctgacctggtccgcactgtcgtgtc

SEQ ID NO: 318782 - DNA, 55 bp, Artificial
  Synthetic oligonucleotide
agaagtcatttacgaagctactatcgacacgtttatgagtaagattgctcagtgc

SEQ ID NO: 318783 - DNA, 54 bp, Artificial
  Synthetic oligonucleotide
agaagtccatgactataaaaactgataggcctgacgatcatttaaggatattaa

SEQ ID NO: 318784 - DNA, 53 bp, Artificial
  Synthetic oligonucleotide
agaagtcctaggtaaaaaggtaagggccaccataatgacaggtgataccccaa

SEQ ID NO: 318785 - DNA, 57 bp, Artificial
  Synthetic oligonucleotide
agaagtccttgtactatggggtgtacaccacccatctaacatagagaatcaaagggc

SEQ ID NO: 318786 - DNA, 60 bp, Artificial
  Synthetic oligonucleotide
agaagtcgccctgaaataatggaagattgtcaagttcaggtagcacttgtgcatttgcag

SEQ ID NO: 318787 - DNA, 53 bp, Artificial
  Synthetic oligonucleotide
agaagtcgctcccgaatccgggtgggaaaggtccatttggactcatcttaccc

SEQ ID NO: 318788 - DNA, 60 bp, Artificial
  Synthetic oligonucleotide
agaagtcggtgatgatctctcactccacactgaatcctatgtctgcagtgctgattgcac

SEQ ID NO: 318789 - DNA, 58 bp, Artificial
  Synthetic oligonucleotide
agaagtctaagttgatggtatctgagaattctgaaatagctctctacacgtcggctaa

SEQ ID NO: 318790 - DNA, 60 bp, Artificial
  Synthetic oligonucleotide
agaagtctatatataccagtgtcgatatattgcctagatatcaaatggcgaggtttccga

SEQ ID NO: 318791 - DNA, 55 bp, Artificial
  Synthetic oligonucleotide
agaagtctccgtcccagtggattcggaagatcttgtccgcaccacgcttgtccga

SEQ ID NO: 318792 - DNA, 60 bp, Artificial
  Synthetic oligonucleotide
agaagtctggtcgtgattacatccccggccgccaacttcagttctatgctcagtgtcggc

SEQ ID NO: 318793 - DNA, 60 bp, Artificial
  Synthetic oligonucleotide
agaagtcttattatagtggaggtagggtgcttacgaagaacacaactctgagatctatga

SEQ ID NO: 318794 - DNA, 56 bp, Artificial
  Synthetic oligonucleotide
agaagtgatactttggtttagcttcggggcgtcatgtttcatacttctggccattg

SEQ ID NO: 318795 - DNA, 55 bp, Artificial
  Synthetic oligonucleotide
agaagtgcccctccgttaacattttacgagtactgtgcgaggtcggagctctggg

SEQ ID NO: 318796 - DNA, 60 bp, Artificial
  Synthetic oligonucleotide
agaagtgctaatgtggagatttgacagccgactagcatttaaacacagagcccgagagct

SEQ ID NO: 318797 - DNA, 55 bp, Artificial
  Synthetic oligonucleotide
agaagtgctcgtgcagaagctattagagtgttttcgtgtgtggattgggtgcaca

SEQ ID NO: 318798 - DNA, 58 bp, Artificial
  Synthetic oligonucleotide
agaagtgctctaggacctagacaggggtggtggaatgttgatcccggtgacagcccaa

SEQ ID NO: 318799 - DNA, 59 bp, Artificial
  Synthetic oligonucleotide
agaagtggcactctcgcggtgatggagggaaattcacgtccacttctccattcggtgag

SEQ ID NO: 318800 - DNA, 60 bp, Artificial
  Synthetic oligonucleotide
agaagtggcggatcataatccgacaaatgatttcgtgtatgcacgcttctctgagattaa

SEQ ID NO: 318801 - DNA, 54 bp, Artificial
  Synthetic oligonucleotide
agaagtgggcggcctctgggctctcctacgatgacttacccgacttacacgctg

SEQ ID NO: 318802 - DNA, 56 bp, Artificial
  Synthetic oligonucleotide
agaagtgggggatctggaacacctagggtggattttgagaggacctgccgtgtgta

SEQ ID NO: 318803 - DNA, 60 bp, Artificial
  Synthetic oligonucleotide
agaagtgggggtgtttgccactcgactcatcatcaccagaaccatcgaagttattccaga

SEQ ID NO: 318804 - DNA, 53 bp, Artificial
  Synthetic oligonucleotide
agaagtggtccagctgcgctgtactggtacaagaccggcatgtctagctgtag

SEQ ID NO: 318805 - DNA, 59 bp, Artificial
  Synthetic oligonucleotide
agaagtggttccgggtgagcatgtttatcacagatatacaacattatgtcacactcttt

SEQ ID NO: 318806 - DNA, 59 bp, Artificial
  Synthetic oligonucleotide
agaagtgtaagtggtgtggctacgacttctacaactcagagggactgccacactaccca

SEQ ID NO: 318807 - DNA, 60 bp, Artificial
  Synthetic oligonucleotide
agaagtgtgtggtggtcgacgcaccggggctcctccgtgaggtgggcatttctgatgcca

SEQ ID NO: 318808 - DNA, 58 bp, Artificial
  Synthetic oligonucleotide
agaagtgttacagagacaacccatgagagctctggtggagaacattgggattatagtg

SEQ ID NO: 318809 - DNA, 55 bp, Artificial
  Synthetic oligonucleotide
agaagttaagccctatgactggtatgaaatccaagaatcagattactaccccaga

SEQ ID NO: 318810 - DNA, 57 bp, Artificial
  Synthetic oligonucleotide
agaagttagtggaaatagtacagtatatccttcaggaggaaacatggttaatctctg

SEQ ID NO: 318811 - DNA, 56 bp, Artificial
  Synthetic oligonucleotide
agaagttatcaatctcgctgcgcgtatgtctcagatgtggatggagtattagttac

SEQ ID NO: 318812 - DNA, 54 bp, Artificial
  Synthetic oligonucleotide
agaagttatgggaacaaacccgctcaaaggcagggctactggtttctgacggag

SEQ ID NO: 318813 - DNA, 60 bp, Artificial
  Synthetic oligonucleotide
agaagttcaaattgcatcccttgctactgtagagggcataacaagtacctcagaggctat

SEQ ID NO: 318814 - DNA, 51 bp, Artificial
  Synthetic oligonucleotide
agaagttcaacaataataccccacaccaagtaacttcagcacttgaaggct

SEQ ID NO: 318815 - DNA, 55 bp, Artificial
  Synthetic oligonucleotide
agaagttcatcacacgtggtcaataggtggctcagtatgccaactgggttctgac

SEQ ID NO: 318816 - DNA, 60 bp, Artificial
  Synthetic oligonucleotide
agaagttcatctgtgtgaactttgtgattgacagctcaacacaagtgcggactaccgtaa

SEQ ID NO: 318817 - DNA, 57 bp, Artificial
  Synthetic oligonucleotide
agaagttcatggaaattactctgtctcacggggaatacattctcatgcctaaaggtt

SEQ ID NO: 318818 - DNA, 60 bp, Artificial
  Synthetic oligonucleotide
agaagttccattacatcaggtttcattacacacatctcggccttgccacattattgatgg

SEQ ID NO: 318819 - DNA, 60 bp, Artificial
  Synthetic oligonucleotide
agaagttctctcgacgcaggactcggcttgctgaggtgctcacagcaagaggcgagagcg

SEQ ID NO: 318820 - DNA, 51 bp, Artificial
  Synthetic oligonucleotide
agaagttctcttctaaagctgtttaattttcagcgttatttaaggggcgct

SEQ ID NO: 318821 - DNA, 56 bp, Artificial
  Synthetic oligonucleotide
agaagttctgactgactttaggagacaggacacgatttgggttttagccttacagc

SEQ ID NO: 318822 - DNA, 53 bp, Artificial
  Synthetic oligonucleotide
agaagttcttacttccggtgaatggcatttttgtaataagaagtgtgtacccc

SEQ ID NO: 318823 - DNA, 60 bp, Artificial
  Synthetic oligonucleotide
agaagttgatgtctagtatcagtaatgtaccagttgatgcacgcacactacagtcagcca

SEQ ID NO: 318824 - DNA, 52 bp, Artificial
  Synthetic oligonucleotide
agaagttgcgccccctcagaggacattactcatggtgacgggtagcagcgga

SEQ ID NO: 318825 - DNA, 53 bp, Artificial
  Synthetic oligonucleotide
agaagttggacgcttcttttgtcgggttcagtgagagctctaacccagaaact

SEQ ID NO: 318826 - DNA, 58 bp, Artificial
  Synthetic oligonucleotide
agaagttggtcggaagccctctgagtaaatcgcagagggtcagaacctgtgactcatt

SEQ ID NO: 318827 - DNA, 60 bp, Artificial
  Synthetic oligonucleotide
agaagttggtctccatgctggattacgcgatttatagctgtgaagaagtacactatgtgg

SEQ ID NO: 318828 - DNA, 60 bp, Artificial
  Synthetic oligonucleotide
agaagtttcaaaatacagctcaatagacagtagtgcaaaccagtactgctacgagcaagt

SEQ ID NO: 318829 - DNA, 55 bp, Artificial
  Synthetic oligonucleotide
agaagtttgacggtaaatgctttttagcaatactgtcctacgacaatgagaaccc

SEQ ID NO: 318830 - DNA, 60 bp, Artificial
  Synthetic oligonucleotide
agaataaaagaactaagagatttgatgtcgcaatctcgcacacgcgagatactgacaaaa

SEQ ID NO: 318831 - DNA, 58 bp, Artificial
  Synthetic oligonucleotide
agaataacaggagctcctgtaaagaagaggtcaggggttagcaagatagctatggtta

SEQ ID NO: 318832 - DNA, 56 bp, Artificial
  Synthetic oligonucleotide
agaataacggatgcttctggtagttgtggagtagtgaccctagaaactaatcccca

SEQ ID NO: 318833 - DNA, 59 bp, Artificial
  Synthetic oligonucleotide
agaataagataccacgccattattatcagcttaaggcgcatgttggggctcagaaaaaa

SEQ ID NO: 318834 - DNA, 60 bp, Artificial
  Synthetic oligonucleotide
agaataatttgtgctgtgcatactatagttaatagagttaggcaagactactcaccgtcg

SEQ ID NO: 318835 - DNA, 50 bp, Artificial
  Synthetic oligonucleotide
agaatacataactatggtatcggatccctacggatttaaacccatatggg

SEQ ID NO: 318836 - DNA, 55 bp, Artificial
  Synthetic oligonucleotide
agaataccagacctcgctataaatttcgagctgaaggagttcaccaatccagcgg

SEQ ID NO: 318837 - DNA, 52 bp, Artificial
  Synthetic oligonucleotide
agaatacccagagtggatagcaaatcaaacattgctttctcatcaggaatat

SEQ ID NO: 318838 - DNA, 56 bp, Artificial
  Synthetic oligonucleotide
agaatacccgatagactgtggtctagtattaaaatgactcgagggctcttcctcgt

SEQ ID NO: 318839 - DNA, 58 bp, Artificial
  Synthetic oligonucleotide
agaataccctaagacaaagaacaacgaatgggattttgttgtgactactgatatatca

SEQ ID NO: 318840 - DNA, 55 bp, Artificial
  Synthetic oligonucleotide
agaatacctacttcctcccaaatttgggagatgtcccttggctgcaaaggaagaa

SEQ ID NO: 318841 - DNA, 60 bp, Artificial
  Synthetic oligonucleotide
agaatacgatgaaggtaagtcagtatcttgcctctcagatgtagaaattctgggagaaca

SEQ ID NO: 318842 - DNA, 60 bp, Artificial
  Synthetic oligonucleotide
agaatacgatgctttgcattctgagtccttaaaatcgattattcagcatctgatcaatga

SEQ ID NO: 318843 - DNA, 60 bp, Artificial
  Synthetic oligonucleotide
agaatactcaacatacactttactcctgtccacagccgatcgtgttatgtgtgggtagtc

SEQ ID NO: 318844 - DNA, 58 bp, Artificial
  Synthetic oligonucleotide
agaatactgtcgtgacctagttgattgcgatcgtaaggatcactacgtcattggtgtt

SEQ ID NO: 318845 - DNA, 53 bp, Artificial
  Synthetic oligonucleotide
agaatacttcacagacgcaatggaggtttgttgatgtatctaaaactacgcaa

SEQ ID NO: 318846 - DNA, 59 bp, Artificial
  Synthetic oligonucleotide
agaatagtcagttgagagttcatacctctggaattgttaaacaccgtgtatgcgacaag

SEQ ID NO: 318847 - DNA, 55 bp, Artificial
  Synthetic oligonucleotide
agaatagttaaggaggtgggtgccagagtgtatactatgaagctcaacagctggg

SEQ ID NO: 318848 - DNA, 50 bp, Artificial
  Synthetic oligonucleotide
agaatatatccgagacaaccatgagagattacttgaagctgcgattgatc

SEQ ID NO: 318849 - DNA, 53 bp, Artificial
  Synthetic oligonucleotide
agaatatgcaccgctggttttaccacccgtccctcaaccaaaaaggaatttca

SEQ ID NO: 318850 - DNA, 57 bp, Artificial
  Synthetic oligonucleotide
agaatatgcgctgctagttcaaggcaagccgtgccagataaataacgcgtgctagcg

SEQ ID NO: 318851 - DNA, 60 bp, Artificial
  Synthetic oligonucleotide
agaatatggatttagaactgcacttgccaccattggggaatctgacccagtaaatgctat

SEQ ID NO: 318852 - DNA, 51 bp, Artificial
  Synthetic oligonucleotide
agaatatgggggggtcctactgtactaaaggggtacacagtggagcaactg

SEQ ID NO: 318853 - DNA, 58 bp, Artificial
  Synthetic oligonucleotide
agaatattgacagcattcttttcttaccgtggcgggtcgtcaagtttggtgtgcagtg

SEQ ID NO: 318854 - DNA, 58 bp, Artificial
  Synthetic oligonucleotide
agaatattgggatgttgcaaagccttgtaaaccaggcgctaaaggtgactgtccacca

SEQ ID NO: 318855 - DNA, 51 bp, Artificial
  Synthetic oligonucleotide
agaatattgtgacctcgctcatgtccaacggggtgactctgcctcaaatca

SEQ ID NO: 318856 - DNA, 60 bp, Artificial
  Synthetic oligonucleotide
agaatcaaaatcccaggatgttcctagcaatgataacatacatcacaagaaaccaacctg

SEQ ID NO: 318857 - DNA, 51 bp, Artificial
  Synthetic oligonucleotide
agaatcaaaggaagtcgggagcttcgaacacttggattggtaactctctcg

SEQ ID NO: 318858 - DNA, 60 bp, Artificial
  Synthetic oligonucleotide
agaatcaaataagccgatatcaatgggatcatcatgtactgtaaaagtgtgtccactgaa

SEQ ID NO: 318859 - DNA, 58 bp, Artificial
  Synthetic oligonucleotide
agaatcaagcttgcactagcaaacataaccattagtgataagctagatgctgtgaggc

SEQ ID NO: 318860 - DNA, 59 bp, Artificial
  Synthetic oligonucleotide
agaatcaatgccaccaattccttcataagaggtccgttttctgcgcagtggggccttga

SEQ ID NO: 318861 - DNA, 58 bp, Artificial
  Synthetic oligonucleotide
agaatcaatgggagtttaccagattttggcgatctactccacagtcgccagttcccta

SEQ ID NO: 318862 - DNA, 60 bp, Artificial
  Synthetic oligonucleotide
agaatcaatgggcttcacatacagtggaatacggacaaatggagtaacgagtgcctgcag

SEQ ID NO: 318863 - DNA, 60 bp, Artificial
  Synthetic oligonucleotide
agaatcacacgaatactgtgatgttcaagttagtgcgtgacagacgtccatttggcacgc

SEQ ID NO: 318864 - DNA, 60 bp, Artificial
  Synthetic oligonucleotide
agaatcacacggagaacgctctgttattgtatatggcatgtacacatgcttctaaccccg

SEQ ID NO: 318865 - DNA, 59 bp, Artificial
  Synthetic oligonucleotide
agaatcacatcgagctagcgcctttttcccaggacctaatcgaagtgattggcgaccta

SEQ ID NO: 318866 - DNA, 60 bp, Artificial
  Synthetic oligonucleotide
agaatcactaatggtgcattcccaacacgcgccgctagagtgaggcgcagtgtctacaat

SEQ ID NO: 318867 - DNA, 60 bp, Artificial
  Synthetic oligonucleotide
agaatcagatatgaatatatccagtcgccgagacagttgttcttcattaataattctccg

SEQ ID NO: 318868 - DNA, 60 bp, Artificial
  Synthetic oligonucleotide
agaatcagccttgcgtttcgttgcttcttgcatcggtgaatctgaaagagtttcttcttg

SEQ ID NO: 318869 - DNA, 58 bp, Artificial
  Synthetic oligonucleotide
agaatcaggaccatatgtacctagactagaaaatcaaaaaagctctacatgggaacta

SEQ ID NO: 318870 - DNA, 57 bp, Artificial
  Synthetic oligonucleotide
agaatcagtcgtggaccccgcgtgatcgagtcacgctacccgatgaaccgggtttca

SEQ ID NO: 318871 - DNA, 57 bp, Artificial
  Synthetic oligonucleotide
agaatcagttcggtccggactttgttatggcccataattcagccatttcaacgttca

SEQ ID NO: 318872 - DNA, 60 bp, Artificial
  Synthetic oligonucleotide
agaatcatcatgcacttgcattcagggcgagtgttattgggtaatgacagatgggccagc

SEQ ID NO: 318873 - DNA, 50 bp, Artificial
  Synthetic oligonucleotide
agaatcattccgtctctagatgaagactaataaacgatgtgtccgaaaaa

SEQ ID NO: 318874 - DNA, 51 bp, Artificial
  Synthetic oligonucleotide
agaatccagacctctgccctgttcggttctgactcgtcggataaggccgat

SEQ ID NO: 318875 - DNA, 60 bp, Artificial
  Synthetic oligonucleotide
agaatccagcacataaaagtcaattggtgtggatggcatgccattccgcagcatttgaag

SEQ ID NO: 318876 - DNA, 58 bp, Artificial
  Synthetic oligonucleotide
agaatccatgtgggttctgatactagcatagtgctacaatattgggcggtctttgtgt

SEQ ID NO: 318877 - DNA, 55 bp, Artificial
  Synthetic oligonucleotide
agaatcccacccaggaatctttgaaaactcgtgtcttgaaacgatggaagttgtc

SEQ ID NO: 318878 - DNA, 55 bp, Artificial
  Synthetic oligonucleotide
agaatcccctcaattgttagcgagtctgagttgtgagtgcagttgttagcttccg

SEQ ID NO: 318879 - DNA, 60 bp, Artificial
  Synthetic oligonucleotide
agaatccgcatcgttgtgtcctatggtactacgagaggcccatgattcgcctggtcttaa

SEQ ID NO: 318880 - DNA, 60 bp, Artificial
  Synthetic oligonucleotide
agaatccgcgccagatcctttgagtcctggagaacaaatcttatatggcaaggttcatga

SEQ ID NO: 318881 - DNA, 58 bp, Artificial
  Synthetic oligonucleotide
agaatccggagacccgaatgcccttttgaagcacagatttgagataattgaggggaga

SEQ ID NO: 318882 - DNA, 53 bp, Artificial
  Synthetic oligonucleotide
agaatccgtccccatggttcaagccccatttcccgaagtgccagccccccaag

SEQ ID NO: 318883 - DNA, 55 bp, Artificial
  Synthetic oligonucleotide
agaatcctgctcatcataccttgccgagtgtaacgtagggactgaacgagtctgg

SEQ ID NO: 318884 - DNA, 60 bp, Artificial
  Synthetic oligonucleotide
agaatcctgtgacaaacattattgggatgctattagatttagatattgtgcaccgccagg

SEQ ID NO: 318885 - DNA, 55 bp, Artificial
  Synthetic oligonucleotide
agaatcgcaatatgtttgcgagtagtaaataaaatcgaacgtgggtggatctacc

SEQ ID NO: 318886 - DNA, 55 bp, Artificial
  Synthetic oligonucleotide
agaatcgcagcctccctcacaggagaccagcgtgtgggcctcatcccacgcaatg

SEQ ID NO: 318887 - DNA, 55 bp, Artificial
  Synthetic oligonucleotide
agaatcgcttgtaaccaacgacttaaaccgaggctatccgatagaccagtccagt

SEQ ID NO: 318888 - DNA, 60 bp, Artificial
  Synthetic oligonucleotide
agaatcgggaaaggtttgagactcgactgcgacatgaggctagtgctgagtgggaacctc

SEQ ID NO: 318889 - DNA, 54 bp, Artificial
  Synthetic oligonucleotide
agaatcgggaaattcgtgtgtccaattcagaaaagaccaagccaatttttggga

SEQ ID NO: 318890 - DNA, 60 bp, Artificial
  Synthetic oligonucleotide
agaatcgttgattggtgcactggtactttccttcgaactggatgagaacgtggagatgag

SEQ ID NO: 318891 - DNA, 58 bp, Artificial
  Synthetic oligonucleotide
agaatcgtttcattgaaattggagtgaccaggagggaggtccatatatactatttaga

SEQ ID NO: 318892 - DNA, 60 bp, Artificial
  Synthetic oligonucleotide
agaatctaaagtatttgatggtcaagctatcctgcgcgacttggcggccttagtagagaa

SEQ ID NO: 318893 - DNA, 51 bp, Artificial
  Synthetic oligonucleotide
agaatctaagtgcgcttgtattagctgtaagctgtctagacagcatcacag

SEQ ID NO: 318894 - DNA, 50 bp, Artificial
  Synthetic oligonucleotide
agaatctatctgtcagcaatccgctgggattcttccccgagcatcagttg

SEQ ID NO: 318895 - DNA, 51 bp, Artificial
  Synthetic oligonucleotide
agaatctcaaatctgtcagggacagctttcaatgtgaacaacagcttgaga

SEQ ID NO: 318896 - DNA, 53 bp, Artificial
  Synthetic oligonucleotide
agaatctgcttataccgagtgcttcctttttgacattctggaaataagctaat

SEQ ID NO: 318897 - DNA, 55 bp, Artificial
  Synthetic oligonucleotide
agaatcttaaaatgtataagatccttgaggaagaaggtaaccccttactatatga

SEQ ID NO: 318898 - DNA, 55 bp, Artificial
  Synthetic oligonucleotide
agaatcttcggattcacgatcttcaactatagaatcttcggattcacagtcttca

SEQ ID NO: 318899 - DNA, 59 bp, Artificial
  Synthetic oligonucleotide
agaatgaacgtttaactgtcgagggcgcctcacaaaggaatttagcgtgtgatatgcta

SEQ ID NO: 318900 - DNA, 60 bp, Artificial
  Synthetic oligonucleotide
agaatgaagcagctcaaccaatctttgtaccacgtcagcgtagcatggctacttgcgtct

SEQ ID NO: 318901 - DNA, 56 bp, Artificial
  Synthetic oligonucleotide
agaatgaatgcgaaagtaaaagctttggtctcgacggtcggcattgaaatagcgaa

SEQ ID NO: 318902 - DNA, 60 bp, Artificial
  Synthetic oligonucleotide
agaatgacataaaagatgagtatgaggtagaagattttgacttgtctgacatagatttgt

SEQ ID NO: 318903 - DNA, 56 bp, Artificial
  Synthetic oligonucleotide
agaatgaccaagcgcttcgggagtcaggcgcttttaatggtcagggggatttctaa

SEQ ID NO: 318904 - DNA, 58 bp, Artificial
  Synthetic oligonucleotide
agaatgacgatggggcccgagatgtgcacccggttctctaaattgcctatataaggat

SEQ ID NO: 318905 - DNA, 60 bp, Artificial
  Synthetic oligonucleotide
agaatgagcagggatctggctatgctgcggaccaaaaaagcacacaaaatgccattaacg

SEQ ID NO: 318906 - DNA, 60 bp, Artificial
  Synthetic oligonucleotide
agaatgagcgttggactggcttggccagtaattctgaaatactgcttcttacatgtgtca

SEQ ID NO: 318907 - DNA, 51 bp, Artificial
  Synthetic oligonucleotide
agaatgagggttataaggttgccggcggcatgccatcaggctgctcgggaa

SEQ ID NO: 318908 - DNA, 60 bp, Artificial
  Synthetic oligonucleotide
agaatgatcatcagcgttgcagttccattggtgttgagtcccgacatgtatgatatatct

SEQ ID NO: 318909 - DNA, 58 bp, Artificial
  Synthetic oligonucleotide
agaatgcaacattagacaacacaggagaaggaaccttaggaggtgtagctaataagaa

SEQ ID NO: 318910 - DNA, 60 bp, Artificial
  Synthetic oligonucleotide
agaatgcaacattcaccatttgattatctacctagtatgtacttttatatagcggaagaa

SEQ ID NO: 318911 - DNA, 60 bp, Artificial
  Synthetic oligonucleotide
agaatgcagaattgacgtcaagcatagagacagtgtacttttaactcaaacacctgtaat

SEQ ID NO: 318912 - DNA, 60 bp, Artificial
  Synthetic oligonucleotide
agaatgcagctacagatgacgatgcaataatagagtatatctactcaaatgaattagatt

SEQ ID NO: 318913 - DNA, 57 bp, Artificial
  Synthetic oligonucleotide
agaatgcaggtgtgtcaggttggtgctacgtgtatgacaatagatgggagacatttg

SEQ ID NO: 318914 - DNA, 53 bp, Artificial
  Synthetic oligonucleotide
agaatgcatagatctactggataggctctatgctgtcagacatgatctagttg

SEQ ID NO: 318915 - DNA, 50 bp, Artificial
  Synthetic oligonucleotide
agaatgccacaagattttccaccgctaaaacgctgcgcaaccattagaga

SEQ ID NO: 318916 - DNA, 56 bp, Artificial
  Synthetic oligonucleotide
agaatgcggaatctcagcacgtttggttccagcccaattactgtcatgacgactgg

SEQ ID NO: 318917 - DNA, 57 bp, Artificial
  Synthetic oligonucleotide
agaatgctattaccttccttgggcagtacgatattataaacataagcaccgatcatc

SEQ ID NO: 318918 - DNA, 50 bp, Artificial
  Synthetic oligonucleotide
agaatgctcccagctatgtcacaacgtctgagatagcagtcggcgcaatg

SEQ ID NO: 318919 - DNA, 58 bp, Artificial
  Synthetic oligonucleotide
agaatgctcgaagtcgtagggcatcatctacctaaagaacctgttactttaatgagcc

SEQ ID NO: 318920 - DNA, 60 bp, Artificial
  Synthetic oligonucleotide
agaatgctctgatgaccaaagagcatggaacatctgggaagttgaagactatggatttgg

SEQ ID NO: 318921 - DNA, 60 bp, Artificial
  Synthetic oligonucleotide
agaatgctctgttattgtacatggcatctacgcatgcctctaaccctgtgtatgcaactt

SEQ ID NO: 318922 - DNA, 50 bp, Artificial
  Synthetic oligonucleotide
agaatgctttactattgtacatggcatgtactcatgcctcaaaccccgtg

SEQ ID NO: 318923 - DNA, 54 bp, Artificial
  Synthetic oligonucleotide
agaatggaccagataggtcgttatcaaaacattagtcctatgataccgtacacc

SEQ ID NO: 318924 - DNA, 59 bp, Artificial
  Synthetic oligonucleotide
agaatggataaacgcgtcatatgatagaactcggattagggcgttggagttgtgtaata

SEQ ID NO: 318925 - DNA, 54 bp, Artificial
  Synthetic oligonucleotide
agaatggccaacctttaacgttggatggccgcaagacggcactttcaaccggga

SEQ ID NO: 318926 - DNA, 56 bp, Artificial
  Synthetic oligonucleotide
agaatggccagctgtcgaccccttgacagttttgcccagggctggggccctatcgg

SEQ ID NO: 318927 - DNA, 56 bp, Artificial
  Synthetic oligonucleotide
agaatggccgacctttaacgtcggatggccgcaggacggcactttcgaccgaggca

SEQ ID NO: 318928 - DNA, 57 bp, Artificial
  Synthetic oligonucleotide
agaatggcgttcgggaatctatacgctgctttccacaagaatccaggagtggtgaca

SEQ ID NO: 318929 - DNA, 58 bp, Artificial
  Synthetic oligonucleotide
agaatggcttttggcagactcttctctgtttttcaccaaaatcctggtataatcactg

SEQ ID NO: 318930 - DNA, 60 bp, Artificial
  Synthetic oligonucleotide
agaatgggagagttgtaaatcaaacaatcatggttgttcctctgtacaaaactgatgtgc

SEQ ID NO: 318931 - DNA, 55 bp, Artificial
  Synthetic oligonucleotide
agaatgggagtaggtaacattgtcaaggtgctctttaacgggaggcccgaagtca

SEQ ID NO: 318932 - DNA, 53 bp, Artificial
  Synthetic oligonucleotide
agaatggggatgtatggctataaatgatgggtgtgtttacgggtcgtgtcagg

SEQ ID NO: 318933 - DNA, 59 bp, Artificial
  Synthetic oligonucleotide
agaatggtcgtacttaattgaagatccttctgctcctcatggactatgttacccaggag

SEQ ID NO: 318934 - DNA, 60 bp, Artificial
  Synthetic oligonucleotide
agaatggtgctgtagataagtaagagatctaaacaatctctatacggactacgcaccatg

SEQ ID NO: 318935 - DNA, 55 bp, Artificial
  Synthetic oligonucleotide
agaatggtggtgtttccgtttctacacaagtgcccactagacagcaatggagacc

SEQ ID NO: 318936 - DNA, 58 bp, Artificial
  Synthetic oligonucleotide
agaatggttctactgcagatgtaagcaaaactattaaggtgacgagcgaagcacaaca

SEQ ID NO: 318937 - DNA, 57 bp, Artificial
  Synthetic oligonucleotide
agaatggtttcggaatgtcttaagcattgcccctataatgttctcaaacaaaatggc

SEQ ID NO: 318938 - DNA, 57 bp, Artificial
  Synthetic oligonucleotide
agaatgtaaccgtaacacactctgttaatctgcttgaagacagacacaacgggaaac

SEQ ID NO: 318939 - DNA, 60 bp, Artificial
  Synthetic oligonucleotide
agaatgtagctgtcatacaagttggtggctctaatatattagacataacagcggatccaa

SEQ ID NO: 318940 - DNA, 57 bp, Artificial
  Synthetic oligonucleotide
agaatgtaggaaaccatacaaagaattgagattggaggttggcaaacaaagactcaa

SEQ ID NO: 318941 - DNA, 60 bp, Artificial
  Synthetic oligonucleotide
agaatgtatgcacaatatcggggtgatgtcataataactctgacattctgtggaacagca

SEQ ID NO: 318942 - DNA, 60 bp, Artificial
  Synthetic oligonucleotide
agaatgtcagtgggcaccccgcatctgtttggtggcacagcgccccagaagtgggtgcta

SEQ ID NO: 318943 - DNA, 55 bp, Artificial
  Synthetic oligonucleotide
agaatgtccaccgacaacttggtggtgatccttttatggttcaaactacactcag

SEQ ID NO: 318944 - DNA, 51 bp, Artificial
  Synthetic oligonucleotide
agaatgtgaattcacaacacagtacccagtcaaactaaagatagaggaaag

SEQ ID NO: 318945 - DNA, 55 bp, Artificial
  Synthetic oligonucleotide
agaatgtgctgcgcctgatctgcaactcgttcgcgcagtcgctcagtgtggttgg

SEQ ID NO: 318946 - DNA, 60 bp, Artificial
  Synthetic oligonucleotide
agaatgtggaagccatggattccaataccttagagctgagaagcagatactgggccataa

SEQ ID NO: 318947 - DNA, 55 bp, Artificial
  Synthetic oligonucleotide
agaatgtggcattcccgggttggatgataactccgttattgtctggcactgtgcc

SEQ ID NO: 318948 - DNA, 60 bp, Artificial
  Synthetic oligonucleotide
agaatgtggccgaaattatgttatgatagtattggttatgccttagcagtgttgtattct

SEQ ID NO: 318949 - DNA, 59 bp, Artificial
  Synthetic oligonucleotide
agaatgtggttgatcattactttaaaacgagacattatttgcatactttgtggaaggca

SEQ ID NO: 318950 - DNA, 60 bp, Artificial
  Synthetic oligonucleotide
agaatgttacttgttatcacacgtattgcctcgagcgaggccgcacgaatactaaagcca

SEQ ID NO: 318951 - DNA, 56 bp, Artificial
  Synthetic oligonucleotide
agaatgttataaatagttttgagcgttatgataacctgaaagacgagtatccgtta

SEQ ID NO: 318952 - DNA, 60 bp, Artificial
  Synthetic oligonucleotide
agaatgttcatcaactggcctccaagccagtgcaccacatttggataaagtaaatggtat

SEQ ID NO: 318953 - DNA, 51 bp, Artificial
  Synthetic oligonucleotide
agaatgttgcagtaattcaggtaggtggcgcgaatgtactagacataacag

SEQ ID NO: 318954 - DNA, 60 bp, Artificial
  Synthetic oligonucleotide
agaattaacaggactggactgcatgagaccttgcttctgggttgaactgatcagaggaag

SEQ ID NO: 318955 - DNA, 55 bp, Artificial
  Synthetic oligonucleotide
agaattaacgtgtccaatctgttcagatccttatatggatgtagatcgttgcccc

SEQ ID NO: 318956 - DNA, 60 bp, Artificial
  Synthetic oligonucleotide
agaattaagagatctaatgtcgcaatcccgcactcgcgagatactaacaaagaccactgt

SEQ ID NO: 318957 - DNA, 58 bp, Artificial
  Synthetic oligonucleotide
agaattaaggacttaccctttgttcgatcattgaggtatcccactgatcatcaaagga

SEQ ID NO: 318958 - DNA, 54 bp, Artificial
  Synthetic oligonucleotide
agaattaatttatgcgcgcagatcagcaaaagagttcgctacattgcaggatga

SEQ ID NO: 318959 - DNA, 58 bp, Artificial
  Synthetic oligonucleotide
agaattacacaccaggaccaggagtcagatatccactaacatttgggtggtgctttaa

SEQ ID NO: 318960 - DNA, 60 bp, Artificial
  Synthetic oligonucleotide
agaattacagcggagtgaggtatatgactttgcatgctatgatttgtgtatagtatatag

SEQ ID NO: 318961 - DNA, 59 bp, Artificial
  Synthetic oligonucleotide
agaattacagttcaagacaattgatatcaagagtttaccgaacctagtagcagtcacta

SEQ ID NO: 318962 - DNA, 53 bp, Artificial
  Synthetic oligonucleotide
agaattactcgcggtaaaacaggtaattaccaagttcagtatttatctaactc

SEQ ID NO: 318963 - DNA, 52 bp, Artificial
  Synthetic oligonucleotide
agaattactgggagggaaggtaaagggcatgttatttaccactatccgggga

SEQ ID NO: 318964 - DNA, 53 bp, Artificial
  Synthetic oligonucleotide
agaattagaaaagagatgtatcgagtttcatgctaaatgtgttgacagctcta

SEQ ID NO: 318965 - DNA, 55 bp, Artificial
  Synthetic oligonucleotide
agaattagagacacccgatggtgactgcgtgtacgtctgtggtagtggcgagcgt

SEQ ID NO: 318966 - DNA, 55 bp, Artificial
  Synthetic oligonucleotide
agaattagatagtcgcttctgtgcatacacagctggtgtagaggaccaaccaagg

SEQ ID NO: 318967 - DNA, 55 bp, Artificial
  Synthetic oligonucleotide
agaattagtagaaagacctttggtgagcaacccaatggctgtttcattagtccca

SEQ ID NO: 318968 - DNA, 51 bp, Artificial
  Synthetic oligonucleotide
agaattagttgataatatatatcattcatatggatattatgtgtatacaag

SEQ ID NO: 318969 - DNA, 53 bp, Artificial
  Synthetic oligonucleotide
agaattcaaccttaacctttcttattctgtagtattcaaagggcacagaacgg

SEQ ID NO: 318970 - DNA, 51 bp, Artificial
  Synthetic oligonucleotide
agaattcacaatttgatgttggacagttcaaaaatatgtgtaatgtgctat

SEQ ID NO: 318971 - DNA, 55 bp, Artificial
  Synthetic oligonucleotide
agaattccatacttgtcccagactttatcctcgaattgtctcgcttgctctgttg

SEQ ID NO: 318972 - DNA, 55 bp, Artificial
  Synthetic oligonucleotide
agaattccgccgctgtgcagccgttggaggggttaattcggaggcctacgcctcg

SEQ ID NO: 318973 - DNA, 55 bp, Artificial
  Synthetic oligonucleotide
agaattccttggacaatggaactggccggatggggctaaaatagagtacttcctc

SEQ ID NO: 318974 - DNA, 55 bp, Artificial
  Synthetic oligonucleotide
agaattcgcggattataatcaacgccttagtgacaatgcagtctcaaatcttcgc

SEQ ID NO: 318975 - DNA, 59 bp, Artificial
  Synthetic oligonucleotide
agaattcgcttcaaagacgacagctcatttgaggatgtgaatggaatccggaaaccaaa

SEQ ID NO: 318976 - DNA, 54 bp, Artificial
  Synthetic oligonucleotide
agaattcggaaacaaaatcggattctcaaaatcgttcgtagaacacggatatgt

SEQ ID NO: 318977 - DNA, 53 bp, Artificial
  Synthetic oligonucleotide
agaattcgtcacccgggcgcgatgtaatttcctctcgcctgacgtcttctcta

SEQ ID NO: 318978 - DNA, 52 bp, Artificial
  Synthetic oligonucleotide
agaattcgtcccaggccccccaaagtctactcgaaagctaccgctccaacct

SEQ ID NO: 318979 - DNA, 52 bp, Artificial
  Synthetic oligonucleotide
agaattcgttctaggccccccctgtctacacgaaagcaacccgctccaacct

SEQ ID NO: 318980 - DNA, 51 bp, Artificial
  Synthetic oligonucleotide
agaattctagatggtaatggtgcaatcctatttctaatgtggaagtaccca

SEQ ID NO: 318981 - DNA, 52 bp, Artificial
  Synthetic oligonucleotide
agaattctatgacgtccccattatgcttatattatccaagttcagtcacgac

SEQ ID NO: 318982 - DNA, 60 bp, Artificial
  Synthetic oligonucleotide
agaattctgcaacacctccacaaacattattaaccagatagttgacatagatggattgaa

SEQ ID NO: 318983 - DNA, 60 bp, Artificial
  Synthetic oligonucleotide
agaattctgctgctctcgtaatctgtgcatgacttagtgactccccggtgcgtgaatcca

SEQ ID NO: 318984 - DNA, 60 bp, Artificial
  Synthetic oligonucleotide
agaattgaaatccaggtgtccactaagataattgtgtggtcctaatgcacgagcccacat

SEQ ID NO: 318985 - DNA, 60 bp, Artificial
  Synthetic oligonucleotide
agaattgaatctgcaatttgtgagtctgtactagctgatgcaagtgaaaccctgttagca

SEQ ID NO: 318986 - DNA, 57 bp, Artificial
  Synthetic oligonucleotide
agaattgatttcgtcggctggaggccagctattttactcccgccccgttgtctcagc

SEQ ID NO: 318987 - DNA, 52 bp, Artificial
  Synthetic oligonucleotide
agaattgcacaattctgtggtgatggcaggatcaaatggatcccgtagagcg

SEQ ID NO: 318988 - DNA, 60 bp, Artificial
  Synthetic oligonucleotide
agaattgcagctggagacttggagtcatcagtggatgatcctagatcagaggaagataaa

SEQ ID NO: 318989 - DNA, 58 bp, Artificial
  Synthetic oligonucleotide
agaattgccgatatcagcaaaattattacatcatccaactacagagactagatcagaa

SEQ ID NO: 318990 - DNA, 56 bp, Artificial
  Synthetic oligonucleotide
agaattgccggattcaactttagtacaaccagtgcttgatggtccttaccaaccta

SEQ ID NO: 318991 - DNA, 60 bp, Artificial
  Synthetic oligonucleotide
agaattgcgcttgaattattgctccaatagattcgaagattgtgacgtttccgcaccttg

SEQ ID NO: 318992 - DNA, 50 bp, Artificial
  Synthetic oligonucleotide
agaattgctcagtgaaagtgtaagacactatgcctaggatcctccgtgcg

SEQ ID NO: 318993 - DNA, 60 bp, Artificial
  Synthetic oligonucleotide
agaattggaatatctgatgatgcaaattccctacggatcattgacatatgatatcggagg

SEQ ID NO: 318994 - DNA, 53 bp, Artificial
  Synthetic oligonucleotide
agaattggaatatgctccacgaactacctggagacaaatggactgctggagat

SEQ ID NO: 318995 - DNA, 55 bp, Artificial
  Synthetic oligonucleotide
agaattggcatgatcctcaagaagcaacccaacgactggcgcctttcctttgccg

SEQ ID NO: 318996 - DNA, 53 bp, Artificial
  Synthetic oligonucleotide
agaattgggagagttattgcgttcaaaccagttaagaatccagaaccaaaagg

SEQ ID NO: 318997 - DNA, 60 bp, Artificial
  Synthetic oligonucleotide
agaattggttcgcaagaccagattcctaccagtggctggtgggacaagcagcgtatatat

SEQ ID NO: 318998 - DNA, 55 bp, Artificial
  Synthetic oligonucleotide
agaattgtcaagactacgctcacggtctctattactatgcccaaggtggacctgt

SEQ ID NO: 318999 - DNA, 53 bp, Artificial
  Synthetic oligonucleotide
agaattgtgggtcttttaggctttgctgccccttttacacaatgtggttaccc

SEQ ID NO: 319000 - DNA, 55 bp, Artificial
  Synthetic oligonucleotide
agaattgtgtgtgggaagattacaacagggatctcctcgtgagcaccactaccgc

SEQ ID NO: 319001 - DNA, 52 bp, Artificial
  Synthetic oligonucleotide
agaatttaactgtagcactgtggcccaatggcggagaagacaacgctatcag

SEQ ID NO: 319002 - DNA, 55 bp, Artificial
  Synthetic oligonucleotide
agaatttaatgtattcgacctcttggatggtcgttcggaactggtcaaggcgatt

SEQ ID NO: 319003 - DNA, 58 bp, Artificial
  Synthetic oligonucleotide
agaatttaccaaattactgggttggatagtggcatcaattttggcgtgcacaacaata

SEQ ID NO: 319004 - DNA, 60 bp, Artificial
  Synthetic oligonucleotide
agaatttacggttgctggagcttctcagtccgcaatattcgaaatattctatcggcttga

SEQ ID NO: 319005 - DNA, 60 bp, Artificial
  Synthetic oligonucleotide
agaatttctgatgccgctgaaattgaacaagttacattagcatttctaactatgaattca

SEQ ID NO: 319006 - DNA, 58 bp, Artificial
  Synthetic oligonucleotide
agaatttcttagtagtattagggcctacctcatgaaccggcaggctgtcttggatgaa

SEQ ID NO: 319007 - DNA, 56 bp, Artificial
  Synthetic oligonucleotide
agaatttcttcgtacgtatgccaagcgttcaccaattcagaagccagaaaacttac

SEQ ID NO: 319008 - DNA, 60 bp, Artificial
  Synthetic oligonucleotide
agaatttgattgcaacaaagttgacatcaacaacctgcacaatgttgagggtataggcat

SEQ ID NO: 319009 - DNA, 58 bp, Artificial
  Synthetic oligonucleotide
agaatttgctatgttacaaaatgacttaacggtattgagatacgctaatgaaattgaa

SEQ ID NO: 319010 - DNA, 55 bp, Artificial
  Synthetic oligonucleotide
agaatttgtagaggaagaccctttaatctctttgaacgatggtaatgtgtgtccg

SEQ ID NO: 319011 - DNA, 59 bp, Artificial
  Synthetic oligonucleotide
agaatttttctattgtaatacatcaggcctgtttaatagcactattttgaatagcacta

SEQ ID NO: 319012 - DNA, 56 bp, Artificial
  Synthetic oligonucleotide
agacaaaaaattttcttcaacccttgttgcatactgcgaacgagagacctagaatc

SEQ ID NO: 319013 - DNA, 58 bp, Artificial
  Synthetic oligonucleotide
agacaaaacgtggtcgtggtgcaagagtgaacttgggcaacgacgagtacgatgaatg

SEQ ID NO: 319014 - DNA, 57 bp, Artificial
  Synthetic oligonucleotide
agacaaaagaatcaaaggccatacgccagcatgctgagaccgcaggttgtagcatga

SEQ ID NO: 319015 - DNA, 60 bp, Artificial
  Synthetic oligonucleotide
agacaaaatcagtggacttcaagctattcatatcagtgttaccagggtcagtgcaatgga

SEQ ID NO: 319016 - DNA, 60 bp, Artificial
  Synthetic oligonucleotide
agacaaacacacaacaattgatccttttgacggatcaatagccatggatcatccaccagg

SEQ ID NO: 319017 - DNA, 60 bp, Artificial
  Synthetic oligonucleotide
agacaaacactcaaaaggctctaatcatggagcatgaagaagtagtgtataactacgagt

SEQ ID NO: 319018 - DNA, 53 bp, Artificial
  Synthetic oligonucleotide
agacaaactcgcgtaaccgttgtccgttatacgtcacgttactaatattccac

SEQ ID NO: 319019 - DNA, 54 bp, Artificial
  Synthetic oligonucleotide
agacaaagaattgtgcgaagtgccagaatttaaaccaacggcgggtagtagtaa

SEQ ID NO: 319020 - DNA, 53 bp, Artificial
  Synthetic oligonucleotide
agacaaataatctcggaaacccgggcgtgtttagtggattcattaactcaatt

SEQ ID NO: 319021 - DNA, 52 bp, Artificial
  Synthetic oligonucleotide
agacaaatacacagctacacttactggcaagactactacatacaccctcgat

SEQ ID NO: 319022 - DNA, 55 bp, Artificial
  Synthetic oligonucleotide
agacaaatgcagatgctggcgtgtctatggattcatcaacgcaatcacgaccttc

SEQ ID NO: 319023 - DNA, 57 bp, Artificial
  Synthetic oligonucleotide
agacaaatgccgggcagttacatttatgcccccactcctagtgggtctatggtgtcg

SEQ ID NO: 319024 - DNA, 60 bp, Artificial
  Synthetic oligonucleotide
agacaaatggctactaccaccaacccactaatcaggcatgaaaacagaatggtgctggct

SEQ ID NO: 319025 - DNA, 59 bp, Artificial
  Synthetic oligonucleotide
agacaaatgggcaagtctgtggaattggtttagcataacaaactggctgtggtatataa

SEQ ID NO: 319026 - DNA, 55 bp, Artificial
  Synthetic oligonucleotide
agacaaatggtgcaagaattttgtccgaaccttggacggaaccgactcagattac

SEQ ID NO: 319027 - DNA, 50 bp, Artificial
  Synthetic oligonucleotide
agacaaattaggacaagaagcagctattagattatttgtgctagcacacc

SEQ ID NO: 319028 - DNA, 60 bp, Artificial
  Synthetic oligonucleotide
agacaacactgaggttgtccatgcaagaaagagcgcgattagtaccagctgaagtactgt

SEQ ID NO: 319029 - DNA, 55 bp, Artificial
  Synthetic oligonucleotide
agacaacactggaaaggtacctggcgcctccaagagagacatttaagaaaggagg

SEQ ID NO: 319030 - DNA, 54 bp, Artificial
  Synthetic oligonucleotide
agacaacataaacttgtcctttcaaaaagagactgtaaccctagcaaaaaagca

SEQ ID NO: 319031 - DNA, 60 bp, Artificial
  Synthetic oligonucleotide
agacaacatagccaagagcgaggacagttgggctattttatgtacgagaggcaagatgaa

SEQ ID NO: 319032 - DNA, 60 bp, Artificial
  Synthetic oligonucleotide
agacaacatatcagggcttccatccaggacatcagcacttgagtcactaagaatagacac

SEQ ID NO: 319033 - DNA, 57 bp, Artificial
  Synthetic oligonucleotide
agacaacatttacattgtccactcaaacacgtggtactcaattgacctagagaaggg

SEQ ID NO: 319034 - DNA, 55 bp, Artificial
  Synthetic oligonucleotide
agacaaccaaccacagggttctggactcagatggacacccagaactaacctaaac

SEQ ID NO: 319035 - DNA, 59 bp, Artificial
  Synthetic oligonucleotide
agacaacgacagatccgtgcgcttagtgagcggattcttaccacttgcctgggacgacc

SEQ ID NO: 319036 - DNA, 59 bp, Artificial
  Synthetic oligonucleotide
agacaacgataattggtctggttacagcggaagcttcagcattagaggggagacaacag

SEQ ID NO: 319037 - DNA, 58 bp, Artificial
  Synthetic oligonucleotide
agacaacgattaccgtataccgttactcatctttgacgatgcggggatttggctctca

SEQ ID NO: 319038 - DNA, 60 bp, Artificial
  Synthetic oligonucleotide
agacaacgctgccgcacaactaagaagcctcgacaggaggatatcggagctcgaaacggc

SEQ ID NO: 319039 - DNA, 56 bp, Artificial
  Synthetic oligonucleotide
agacaacgtctatagcttatacttaagttacgtcttaccatattatgacgaacttg

SEQ ID NO: 319040 - DNA, 58 bp, Artificial
  Synthetic oligonucleotide
agacaacgtgtacaagctgatagaaacgtcgttaattacccatcaatattacatccaa

SEQ ID NO: 319041 - DNA, 55 bp, Artificial
  Synthetic oligonucleotide
agacaacgtgtatgtcgttccaggaacgggcgagcgtcggtgccgcacctgcatc

SEQ ID NO: 319042 - DNA, 54 bp, Artificial
  Synthetic oligonucleotide
agacaacgttttcttgtcactgacagacagatggtctaccaagcatagcacaaa

SEQ ID NO: 319043 - DNA, 60 bp, Artificial
  Synthetic oligonucleotide
agacaactaaaggcctacgatcatggttaggaattcttaattatgctcgtgcatacatgc

SEQ ID NO: 319044 - DNA, 52 bp, Artificial
  Synthetic oligonucleotide
agacaactagtaataagacgggtggaataaggatgcttaaagcatggcgtaa

SEQ ID NO: 319045 - DNA, 55 bp, Artificial
  Synthetic oligonucleotide
agacaactatcctcaagtgtttgactcgatgttggatgccacaaatgactggttg

SEQ ID NO: 319046 - DNA, 55 bp, Artificial
  Synthetic oligonucleotide
agacaactgactggatgtttgggagtgatcttgagtatgatcaagacaatatgtt

SEQ ID NO: 319047 - DNA, 58 bp, Artificial
  Synthetic oligonucleotide
agacaactgactgtttcaacgttttgctcgagatcatttacaggttcaggcacacgtt

SEQ ID NO: 319048 - DNA, 50 bp, Artificial
  Synthetic oligonucleotide
agacaacttcgtcaagtacatgaggggagagccctacgagcccattcatc

SEQ ID NO: 319049 - DNA, 60 bp, Artificial
  Synthetic oligonucleotide
agacaagaaggattttactacactaatatgttagatgggccacctgcgattgatcgagtg

SEQ ID NO: 319050 - DNA, 59 bp, Artificial
  Synthetic oligonucleotide
agacaagaatatgcaataccagtcggaccagtttttccaccaggtatgaattggactga

SEQ ID NO: 319051 - DNA, 58 bp, Artificial
  Synthetic oligonucleotide
agacaagatctttcactgcggcacctctcgacactttgttgggagccaaagtttgtgt

SEQ ID NO: 319052 - DNA, 59 bp, Artificial
  Synthetic oligonucleotide
agacaagattgggcgatgtttactggactctaaggcatacttacgactggagtgttaga

SEQ ID NO: 319053 - DNA, 60 bp, Artificial
  Synthetic oligonucleotide
agacaagcacaatacagagcattcaaagctaaacaggggaagataattgggcaagttgag

SEQ ID NO: 319054 - DNA, 60 bp, Artificial
  Synthetic oligonucleotide
agacaagcacacagggtgggcggtccacattgggaatgggcgcttggtcacttgcacaca

SEQ ID NO: 319055 - DNA, 55 bp, Artificial
  Synthetic oligonucleotide
agacaagcacattgtaatgttagtagtaaaaattggactagcactttaaaacagg

SEQ ID NO: 319056 - DNA, 60 bp, Artificial
  Synthetic oligonucleotide
agacaagcatattgtaacattagtaaagcaaactggactgacactttagaacagatagct

SEQ ID NO: 319057 - DNA, 57 bp, Artificial
  Synthetic oligonucleotide
agacaagcatattgtacccttaatataacagcatggaacaacactctaaaccagata

SEQ ID NO: 319058 - DNA, 50 bp, Artificial
  Synthetic oligonucleotide
agacaagcctgtcgattgaggccccatggggagcaatcaatgttcagtca

SEQ ID NO: 319059 - DNA, 52 bp, Artificial
  Synthetic oligonucleotide
agacaaggaccaaagaaaccctttaaagattatgtagatcggttctataaaa

SEQ ID NO: 319060 - DNA, 59 bp, Artificial
  Synthetic oligonucleotide
agacaaggccgacgcaccctcccatacggaggatgccatggatgcaagggagcccgtgg

SEQ ID NO: 319061 - DNA, 60 bp, Artificial
  Synthetic oligonucleotide
agacaagtaattagggaagcacagatctggatgtggaaacataagggagctgcagttaga

SEQ ID NO: 319062 - DNA, 53 bp, Artificial
  Synthetic oligonucleotide
agacaagtcatacctaagaggacttggacctctggtacaacgtatgatatgta

SEQ ID NO: 319063 - DNA, 55 bp, Artificial
  Synthetic oligonucleotide
agacaagttcgacgcctgtgcctttggtccaatcaatcagtgctaggtgggctgg

SEQ ID NO: 319064 - DNA, 55 bp, Artificial
  Synthetic oligonucleotide
agacaataataggggctttgtacttcctggctataagtatgttgggcctggtaac

SEQ ID NO: 319065 - DNA, 53 bp, Artificial
  Synthetic oligonucleotide
agacaataatcttgtagatttaccacctcttgagcaacttagcctcaaagatc

SEQ ID NO: 319066 - DNA, 60 bp, Artificial
  Synthetic oligonucleotide
agacaatagcgcatggcaaagttggccaggggatatctgcatggagtaaaaccttttgtg

SEQ ID NO: 319067 - DNA, 60 bp, Artificial
  Synthetic oligonucleotide
agacaatagctttgaaatcaccataccatacactttttcaacatggatgaggaagaccaa

SEQ ID NO: 319068 - DNA, 60 bp, Artificial
  Synthetic oligonucleotide
agacaatatcaaaatggaggacggaagtgtaattctgcttagtcatagttatataacaca

SEQ ID NO: 319069 - DNA, 55 bp, Artificial
  Synthetic oligonucleotide
agacaatatgacagtgatgaaccggagtctagatcgatagcaagctggatccaga

SEQ ID NO: 319070 - DNA, 53 bp, Artificial
  Synthetic oligonucleotide
agacaatctaaatatgctacttacaatgtaaatacctatgcatgcagctgcta

SEQ ID NO: 319071 - DNA, 55 bp, Artificial
  Synthetic oligonucleotide
agacaatgcagtaagaattggagagaactcagatgttttagtcacaagagaaccc

SEQ ID NO: 319072 - DNA, 60 bp, Artificial
  Synthetic oligonucleotide
agacaatgggacatgttacccaggagatttcatcaattatgaagagctaagagagcagtt

SEQ ID NO: 319073 - DNA, 57 bp, Artificial
  Synthetic oligonucleotide
agacaatgtcaagtaaccgggaattgtccacctgatgtagtcaataaagtcgaagga

SEQ ID NO: 319074 - DNA, 55 bp, Artificial
  Synthetic oligonucleotide
agacaattagcagaagtactccagagggtgtctcaagaggctataattatctggg

SEQ ID NO: 319075 - DNA, 60 bp, Artificial
  Synthetic oligonucleotide
agacaattagcggtgtttgtgatgcattaaccgataggacttcactcgcgctattgaaac

SEQ ID NO: 319076 - DNA, 56 bp, Artificial
  Synthetic oligonucleotide
agacaattattagagtgtcagattacccgttcaaaatcacagcaggacacaaatca

SEQ ID NO: 319077 - DNA, 60 bp, Artificial
  Synthetic oligonucleotide
agacaattattgtctggtatagtgcaacagcaaaacaatttgctgagggcaattcaggca

SEQ ID NO: 319078 - DNA, 53 bp, Artificial
  Synthetic oligonucleotide
agacaattcaaagcagacaactgtagcgaacgaagatttacgcagtaataaag

SEQ ID NO: 319079 - DNA, 60 bp, Artificial
  Synthetic oligonucleotide
agacaattcacacatgtctagaaaatagccatgttgttgcttcgtaccactgcacattac

SEQ ID NO: 319080 - DNA, 57 bp, Artificial
  Synthetic oligonucleotide
agacaattgaggcataccgggccagggaagggtacacaagtatatgcctctttgtac

SEQ ID NO: 319081 - DNA, 60 bp, Artificial
  Synthetic oligonucleotide
agacaattgatattcgtctctgtgtgactctacataattgaatgcatttggaggatttgc

SEQ ID NO: 319082 - DNA, 55 bp, Artificial
  Synthetic oligonucleotide
agacaattgctgggtgattatggacccactcagggaacaatcttgaaagagcgcc

SEQ ID NO: 319083 - DNA, 51 bp, Artificial
  Synthetic oligonucleotide
agacacaaattgggcaaagtatcgaagatcagtttttcatacgtgcacagc

SEQ ID NO: 319084 - DNA, 56 bp, Artificial
  Synthetic oligonucleotide
agacacaagatcctgctacccagctacgaaactaaacccaagggcaggccaaagat

SEQ ID NO: 319085 - DNA, 58 bp, Artificial
  Synthetic oligonucleotide
agacacaagatccttaggggatgggcaggaagtgccgttagatttgttcgtgcaacaa

SEQ ID NO: 319086 - DNA, 59 bp, Artificial
  Synthetic oligonucleotide
agacacaatcttggttatcagaaccttgttatctcaccaaggcgtagcctaaaggagca

SEQ ID NO: 319087 - DNA, 54 bp, Artificial
  Synthetic oligonucleotide
agacacacttcgggaaaattcggaatgtccactaagcaacggggaacgtcacgc

SEQ ID NO: 319088 - DNA, 60 bp, Artificial
  Synthetic oligonucleotide
agacacagagctttctttcacaatcactggggacaacactaagtggaatgagaatcaaaa

SEQ ID NO: 319089 - DNA, 60 bp, Artificial
  Synthetic oligonucleotide
agacacaggaaagtcatgttttggaatgagcctgatgcactttatgcaaggtacaataat

SEQ ID NO: 319090 - DNA, 60 bp, Artificial
  Synthetic oligonucleotide
agacacaggacaaactgcaaacgctagtcctaattggaatgaggtccagaatacagcagc

SEQ ID NO: 319091 - DNA, 55 bp, Artificial
  Synthetic oligonucleotide
agacacaggcgctgttcccaaacgccagttccaaccagtggactacttgtttggg

SEQ ID NO: 319092 - DNA, 55 bp, Artificial
  Synthetic oligonucleotide
agacacagtgtggctcaggtatatgcagacactcaggtctacactcatgatgaca

SEQ ID NO: 319093 - DNA, 60 bp, Artificial
  Synthetic oligonucleotide
agacacatggacctgattccagttatcatcttaacctgtcgcattgtgcacatatggctg

SEQ ID NO: 319094 - DNA, 57 bp, Artificial
  Synthetic oligonucleotide
agacaccaataggtaaatgagacaccgatatatcgggggctcaattggggtctctta

SEQ ID NO: 319095 - DNA, 55 bp, Artificial
  Synthetic oligonucleotide
agacaccaccacagttcttgctacactagcactcctagggtgtgatgtgtcacca

SEQ ID NO: 319096 - DNA, 54 bp, Artificial
  Synthetic oligonucleotide
agacaccacgaggacacatcagggtaacaagttacccgggtgaggaaaagatcg

SEQ ID NO: 319097 - DNA, 52 bp, Artificial
  Synthetic oligonucleotide
agacaccagatagccggcaacgtttgactccggttcgggagacagaggcgta

SEQ ID NO: 319098 - DNA, 60 bp, Artificial
  Synthetic oligonucleotide
agacaccagttgacagtttcacaaatggagccgtcgtaggcactccagtttgtgtcaatg

SEQ ID NO: 319099 - DNA, 60 bp, Artificial
  Synthetic oligonucleotide
agacaccatattggcgtccctcaactttctctatgtaattggcgtctggcgtcccatata

SEQ ID NO: 319100 - DNA, 60 bp, Artificial
  Synthetic oligonucleotide
agacaccatttcagatagcagagcaacaaatacagaactttcaggtagcgaattggctgc

SEQ ID NO: 319101 - DNA, 60 bp, Artificial
  Synthetic oligonucleotide
agacacccaaacccaaatactactatggtgctagttcatcatctagtagctcagaaagtg

SEQ ID NO: 319102 - DNA, 60 bp, Artificial
  Synthetic oligonucleotide
agacaccccagaagttcagaccagtattcctaactatcaccatgctgactgactcggggc

SEQ ID NO: 319103 - DNA, 55 bp, Artificial
  Synthetic oligonucleotide
agacaccccgcgatatcccaacacttcaacctctctccccgacaccgagaccgcc

SEQ ID NO: 319104 - DNA, 56 bp, Artificial
  Synthetic oligonucleotide
agacacccttcgtcaaatgaatgtacttacggtcggtaataaatctctacatataa

SEQ ID NO: 319105 - DNA, 55 bp, Artificial
  Synthetic oligonucleotide
agacaccgataggtaaatgagacaccgataggtaaatgggacaccgatatatcgg

SEQ ID NO: 319106 - DNA, 56 bp, Artificial
  Synthetic oligonucleotide
agacaccgtttcgacgtctccaatgtcggtctgtttgtacgcgcgggtgctgtcta

SEQ ID NO: 319107 - DNA, 53 bp, Artificial
  Synthetic oligonucleotide
agacacctaaacttttggacacgtagtaaccaggatttagaacttgtaagata

SEQ ID NO: 319108 - DNA, 58 bp, Artificial
  Synthetic oligonucleotide
agacacctaagggcgggtctagccaggtctccacgccatgatcaattggaaacgattg

SEQ ID NO: 319109 - DNA, 60 bp, Artificial
  Synthetic oligonucleotide
agacacctacaggtatctgcaatcccaagcgataacatgtcagaagcccacaccccctaa

SEQ ID NO: 319110 - DNA, 59 bp, Artificial
  Synthetic oligonucleotide
agacacctctaccacgtggtcttcactggatcacgcaattcctttggagttgttatcta

SEQ ID NO: 319111 - DNA, 59 bp, Artificial
  Synthetic oligonucleotide
agacacctcttaaagagctcagagaagttaggatgttgaaatgtgaacactttgtagtg

SEQ ID NO: 319112 - DNA, 60 bp, Artificial
  Synthetic oligonucleotide
agacacctgcaagaacctccagatctcgtgccacctagatctatctggatagacctgcct

SEQ ID NO: 319113 - DNA, 59 bp, Artificial
  Synthetic oligonucleotide
agacacctgtaccattgaaggactaatctatggcaacccttcttgtgatctactgttgg

SEQ ID NO: 319114 - DNA, 60 bp, Artificial
  Synthetic oligonucleotide
agacacctgtacttgataagctgaggaagatcaccctacaaagatggaatctgtggttca

SEQ ID NO: 319115 - DNA, 60 bp, Artificial
  Synthetic oligonucleotide
agacaccttataaagtgactgcagctgataagagtgaacagatcgactggcgtgacatca

SEQ ID NO: 319116 - DNA, 56 bp, Artificial
  Synthetic oligonucleotide
agacacgccggcttgtggaggatagttcagacgggtgctccgggttttggagacac

SEQ ID NO: 319117 - DNA, 60 bp, Artificial
  Synthetic oligonucleotide
agacacgcgcctttgttttatgggaccacacagcatcaacaaccaatcatattatgatta

SEQ ID NO: 319118 - DNA, 54 bp, Artificial
  Synthetic oligonucleotide
agacacgggagcaagcttatgcatagcatccaagttcgtcataccagaagaaca

SEQ ID NO: 319119 - DNA, 60 bp, Artificial
  Synthetic oligonucleotide
agacacgtgtttagtggagctaggcgctgacattcgtgcggtcaaggtgtcagttcattg

SEQ ID NO: 319120 - DNA, 54 bp, Artificial
  Synthetic oligonucleotide
agacacgttacttaagagagcaagtgattataagttggctgtggagagcaagaa

SEQ ID NO: 319121 - DNA, 58 bp, Artificial
  Synthetic oligonucleotide
agacacgttgcagtacaccattgacaaaccaccgggcttttacaactggcaccatggc

SEQ ID NO: 319122 - DNA, 60 bp, Artificial
  Synthetic oligonucleotide
agacactaaaatagatctctggtcttacaacgcagagcttcttgtcgctctggagaacca

SEQ ID NO: 319123 - DNA, 58 bp, Artificial
  Synthetic oligonucleotide
agacactaacactaccacagtaactatgttaacctgtaatgactcctggtacagagga

SEQ ID NO: 319124 - DNA, 55 bp, Artificial
  Synthetic oligonucleotide
agacactaaccacctatggtttcggacatcagaacaagggagtgttcgtggcggg

SEQ ID NO: 319125 - DNA, 55 bp, Artificial
  Synthetic oligonucleotide
agacactaatggtgtttatagtgaacctcgccctattggaacccggtatctcaca

SEQ ID NO: 319126 - DNA, 55 bp, Artificial
  Synthetic oligonucleotide
agacactaccatctggcgatgtgtaagagaatacacgaaaacggcctaccgggtc

SEQ ID NO: 319127 - DNA, 53 bp, Artificial
  Synthetic oligonucleotide
agacactaccgatcaaccctccaaagaacgaggacccagacctccggtgggcc

SEQ ID NO: 319128 - DNA, 55 bp, Artificial
  Synthetic oligonucleotide
agacactagcgcctattacgttatgtcagttggtgcgaagtccttcctggttcac

SEQ ID NO: 319129 - DNA, 51 bp, Artificial
  Synthetic oligonucleotide
agacactcacggctcttataaatcaagttggcacgattatactaaacgcag

SEQ ID NO: 319130 - DNA, 59 bp, Artificial
  Synthetic oligonucleotide
agacactggctttaatgcatgactacatcatcctagtccttggaccagtgaagaagtat

SEQ ID NO: 319131 - DNA, 58 bp, Artificial
  Synthetic oligonucleotide
agacacttccgcctttctgtgcccactaacgagctcagaaccgagtggaaatcggaca

SEQ ID NO: 319132 - DNA, 60 bp, Artificial
  Synthetic oligonucleotide
agacacttctaatgcagagcctactggcctgtactcaaatgtatctaagaacgcattagt

SEQ ID NO: 319133 - DNA, 54 bp, Artificial
  Synthetic oligonucleotide
agacactttagaggttgacacacctatggtgtctggagatcgtcacgccatttt

SEQ ID NO: 319134 - DNA, 55 bp, Artificial
  Synthetic oligonucleotide
agacactttcaaaaggatgcaaaggtgctgtttcaaaactgggggattgaaccca

SEQ ID NO: 319135 - DNA, 54 bp, Artificial
  Synthetic oligonucleotide
agacagaaaaccctatctacctgaaggtgtgaacacgcttcctgggttttttga

SEQ ID NO: 319136 - DNA, 55 bp, Artificial
  Synthetic oligonucleotide
agacagaacgctcgctcgtatatgccataggacaacccacaaacattgccacctg

SEQ ID NO: 319137 - DNA, 50 bp, Artificial
  Synthetic oligonucleotide
agacagaactctccagtatgtggcagaatcatgcacagcttgtgctcaag

SEQ ID NO: 319138 - DNA, 53 bp, Artificial
  Synthetic oligonucleotide
agacagaaggtcatttggaaaggataggaccggaaaatccatacaacactcca

SEQ ID NO: 319139 - DNA, 50 bp, Artificial
  Synthetic oligonucleotide
agacagaatacgcgcttttctatcgacctgatgtaatgcaagttgatggt

SEQ ID NO: 319140 - DNA, 60 bp, Artificial
  Synthetic oligonucleotide
agacagactcttataccgagacagtggcagccagatgttactaaaaagtgcttcattact

SEQ ID NO: 319141 - DNA, 53 bp, Artificial
  Synthetic oligonucleotide
agacagaggagtgagggttatgtttaagaatggtcagttggttaaatactccg

SEQ ID NO: 319142 - DNA, 50 bp, Artificial
  Synthetic oligonucleotide
agacagatcaccacatcatgcacttgccggggtgcgtcccttgcgtaaaa

SEQ ID NO: 319143 - DNA, 58 bp, Artificial
  Synthetic oligonucleotide
agacagatggcgaactatttggactacttgtctgctagcctaacggctacgataggta

SEQ ID NO: 319144 - DNA, 56 bp, Artificial
  Synthetic oligonucleotide
agacagattactaaatctagtacagggagcttaccaggcactcaaccttaccaacc

SEQ ID NO: 319145 - DNA, 55 bp, Artificial
  Synthetic oligonucleotide
agacagatttaagaacaaggtcaagaaatcgtgtaggttgtttttatcaatgccc

SEQ ID NO: 319146 - DNA, 59 bp, Artificial
  Synthetic oligonucleotide
agacagcaagctagagctggtgagggacgccatcctttcggcactgaacgggctagtgt

SEQ ID NO: 319147 - DNA, 60 bp, Artificial
  Synthetic oligonucleotide
agacagcactccgcaagttatacactgacaagggagcggaaacaagtgaactggcacgct

SEQ ID NO: 319148 - DNA, 60 bp, Artificial
  Synthetic oligonucleotide
agacagcactctacgcattgtggctgctgtgcacatcactctttcgagcgacgtgatccg

SEQ ID NO: 319149 - DNA, 60 bp, Artificial
  Synthetic oligonucleotide
agacagcacttttgacagggaacacagcaacatagtcatggctagatctgcctaaaaatg

SEQ ID NO: 319150 - DNA, 56 bp, Artificial
  Synthetic oligonucleotide
agacagcagagaccccatttggaaaggaccggcccagctcctgtggaaaggtgagg

SEQ ID NO: 319151 - DNA, 60 bp, Artificial
  Synthetic oligonucleotide
agacagcatcttcgcataactctcttagcgcacaattgcgccgagctgcgaacacaagaa

SEQ ID NO: 319152 - DNA, 55 bp, Artificial
  Synthetic oligonucleotide
agacagccagttgtatcagagacagaagacctatagcacaaagagaggggataga

SEQ ID NO: 319153 - DNA, 54 bp, Artificial
  Synthetic oligonucleotide
agacagccccagattcctactagcccatgccttccatacaataagggatattag

SEQ ID NO: 319154 - DNA, 58 bp, Artificial
  Synthetic oligonucleotide
agacagccggagatatttgcagtaggtatccagttttgccctctaccggagcaacgta

SEQ ID NO: 319155 - DNA, 60 bp, Artificial
  Synthetic oligonucleotide
agacagccgtaagagggattatcagtaagcagattgcggtgataacgtttggaatgtaga

SEQ ID NO: 319156 - DNA, 60 bp, Artificial
  Synthetic oligonucleotide
agacagccgttgcattctaatctagttgaagttatagatggcttctttggagctacttta

SEQ ID NO: 319157 - DNA, 60 bp, Artificial
  Synthetic oligonucleotide
agacagcctatcgctttaatcagccttcaacttctgctgatggcaatgtgctcacctacc

SEQ ID NO: 319158 - DNA, 57 bp, Artificial
  Synthetic oligonucleotide
agacagcggacggctgtagacaaatactggtacagttacaaccatcccttaagacag

SEQ ID NO: 319159 - DNA, 55 bp, Artificial
  Synthetic oligonucleotide
agacagctaaactatccgcttctaaaagtgtgggtaccgatatggtgatagacta

SEQ ID NO: 319160 - DNA, 60 bp, Artificial
  Synthetic oligonucleotide
agacagctgatattcatctctatgagactcaatgtaattaaaggcactcggtggacaagc

SEQ ID NO: 319161 - DNA, 60 bp, Artificial
  Synthetic oligonucleotide
agacagctgattggaagtctattgggctatatattttgagttttgcactaccaattatcc

SEQ ID NO: 319162 - DNA, 51 bp, Artificial
  Synthetic oligonucleotide
agacagctgcgaaataatccgcccaccccctgctgccttttatagtgtgtt

SEQ ID NO: 319163 - DNA, 60 bp, Artificial
  Synthetic oligonucleotide
agacagcttgtctgagcaaatcttacgctcagatgtggttgctaatgtacttccacaggc

SEQ ID NO: 319164 - DNA, 53 bp, Artificial
  Synthetic oligonucleotide
agacagctttgggacgggggaagggataaccccctccccgaagcaggagatga

SEQ ID NO: 319165 - DNA, 53 bp, Artificial
  Synthetic oligonucleotide
agacaggaagccacacggttcctccttaaacaatcctccttttctaattccac

SEQ ID NO: 319166 - DNA, 57 bp, Artificial
  Synthetic oligonucleotide
agacaggagtcccttccgcacattaatgagttgtcccataggagttgccccctctcc

SEQ ID NO: 319167 - DNA, 56 bp, Artificial
  Synthetic oligonucleotide
agacaggatttagaaaggcaacttggtgagctaagggaagagttcaactcactatc

SEQ ID NO: 319168 - DNA, 60 bp, Artificial
  Synthetic oligonucleotide
agacaggcgacattccattagaagtcttgattaaatattgcgattcgcttactacattcg

SEQ ID NO: 319169 - DNA, 60 bp, Artificial
  Synthetic oligonucleotide
agacaggcgcaatgtcaaccttgcgagccttctcaattcataaagacgctggaatcaatt

SEQ ID NO: 319170 - DNA, 60 bp, Artificial
  Synthetic oligonucleotide
agacaggcgtccatttggcagtccaatggacctgggccaagtctttaacatgtatgataa

SEQ ID NO: 319171 - DNA, 56 bp, Artificial
  Synthetic oligonucleotide
agacaggctataaggtcgctcacggagcggctttatatcgggggtcccctgactaa

SEQ ID NO: 319172 - DNA, 59 bp, Artificial
  Synthetic oligonucleotide
agacaggctgaggacgatgtgtataggtctctaccacataggcttgtgggattaacccg

SEQ ID NO: 319173 - DNA, 60 bp, Artificial
  Synthetic oligonucleotide
agacaggctttacctctcatctcacagaggtgtcatcgctgacaatcaagcaaaatgggc

SEQ ID NO: 319174 - DNA, 57 bp, Artificial
  Synthetic oligonucleotide
agacagggcaggtgggtatatattctcgtcggacaccggtccaggtcatttacaaca

SEQ ID NO: 319175 - DNA, 55 bp, Artificial
  Synthetic oligonucleotide
agacagggcccaagaagaacatgaaaggtatcatagtaattggaaagctatggct

SEQ ID NO: 319176 - DNA, 55 bp, Artificial
  Synthetic oligonucleotide
agacagggcctcgaaatggctttgctataaaatgggtggcaagtgggcaaaaggt

SEQ ID NO: 319177 - DNA, 55 bp, Artificial
  Synthetic oligonucleotide
agacaggggtcccctcagaaagtagaggtgcttctgcatagggagggggaaatgt

SEQ ID NO: 319178 - DNA, 55 bp, Artificial
  Synthetic oligonucleotide
agacaggtgtttccattccatgtgtgtgtggtcgtgatgctacacaatatctagt

SEQ ID NO: 319179 - DNA, 60 bp, Artificial
  Synthetic oligonucleotide
agacagtcggctgtgatgcgtggctctgacacgccatataccaccccaatcgaaccatgt

SEQ ID NO: 319180 - DNA, 56 bp, Artificial
  Synthetic oligonucleotide
agacagtgcctttgacgtgtatacgctgaacttaacgcacagggactttaagttac

SEQ ID NO: 319181 - DNA, 55 bp, Artificial
  Synthetic oligonucleotide
agacagtgggaaacaagggccctgttagaaggaaggcctctgtttgagggcaatg

SEQ ID NO: 319182 - DNA, 60 bp, Artificial
  Synthetic oligonucleotide
agacagtgtaaatgggggaacccgtctgaatgttcctctctagcgactctgatgtatgtg

SEQ ID NO: 319183 - DNA, 60 bp, Artificial
  Synthetic oligonucleotide
agacataagaactgatagaggtagtatggattggaaagagtggagaaagatagtagaaca

SEQ ID NO: 319184 - DNA, 59 bp, Artificial
  Synthetic oligonucleotide
agacataagacaagcacactgcaatctcagtagagcagactggaacagcactttacaac

SEQ ID NO: 319185 - DNA, 60 bp, Artificial
  Synthetic oligonucleotide
agacataagacaagcgcattgtaacattacaagagatgcctggaacacaaatttaacaaa

SEQ ID NO: 319186 - DNA, 56 bp, Artificial
  Synthetic oligonucleotide
agacataagacaagggccaaaggaaccctctagagactatgtagaccggttcttca

SEQ ID NO: 319187 - DNA, 53 bp, Artificial
  Synthetic oligonucleotide
agacatagccgtggacaaatggacagcacagcgagagtcggaggcgcctagcg

SEQ ID NO: 319188 - DNA, 55 bp, Artificial
  Synthetic oligonucleotide
agacatataaatactactcggaaaagaaagtctatcacaacatcgaagggcgtgc

SEQ ID NO: 319189 - DNA, 57 bp, Artificial
  Synthetic oligonucleotide
agacatatcggggtttgactggtccgttcaggactgggagttgtggtcagacctcgc

SEQ ID NO: 319190 - DNA, 56 bp, Artificial
  Synthetic oligonucleotide
agacatatgcttacgagtttttcagttaactccttagaaacacttatgttctcgac

SEQ ID NO: 319191 - DNA, 55 bp, Artificial
  Synthetic oligonucleotide
agacatattcagtacaatcttctaattggagagggacaatcagccccgggtgatt

SEQ ID NO: 319192 - DNA, 60 bp, Artificial
  Synthetic oligonucleotide
agacatcaacagctacttcgagctaactgatttcaccagttttgaacaacttgcagatgg

SEQ ID NO: 319193 - DNA, 60 bp, Artificial
  Synthetic oligonucleotide
agacatcaactgcggaaaacgcaagtctgcagacatcactagagattgtgcgtttaacgc

SEQ ID NO: 319194 - DNA, 60 bp, Artificial
  Synthetic oligonucleotide
agacatcagcgaagtgatatggtatgataaacgttgatttcctcagatatgattcttttg

SEQ ID NO: 319195 - DNA, 60 bp, Artificial
  Synthetic oligonucleotide
agacatcattatgaaagccagcatccaaagataagctcagaagtacacatcccactagga

SEQ ID NO: 319196 - DNA, 60 bp, Artificial
  Synthetic oligonucleotide
agacatccatcctactgtgccaaatccatataacctccttagcaccctcccgccgtctca

SEQ ID NO: 319197 - DNA, 60 bp, Artificial
  Synthetic oligonucleotide
agacatccttaggcaaaacccaactgaggagcaagcagtggagatatgtaaggcagcgat

SEQ ID NO: 319198 - DNA, 59 bp, Artificial
  Synthetic oligonucleotide
agacatcgcccaccccgtatccacgcgcacggaaggctacccgaacgatctgctcggca

SEQ ID NO: 319199 - DNA, 60 bp, Artificial
  Synthetic oligonucleotide
agacatcgcgctgcgtggagcaaatcgcaatcaagcgttcagctctctcaatgccgaggt

SEQ ID NO: 319200 - DNA, 60 bp, Artificial
  Synthetic oligonucleotide
agacatcgtcggcactatcaacgccatactggctagaatagcagccgctaggtccctcct

SEQ ID NO: 319201 - DNA, 55 bp, Artificial
  Synthetic oligonucleotide
agacatctacacctccttctagaggtagttccccgcagtcagtaaagcgagaggc

SEQ ID NO: 319202 - DNA, 59 bp, Artificial
  Synthetic oligonucleotide
agacatctcgctgtgtcggttcgttggactacgcgtggagtcgtccgtgctgcgggtac

SEQ ID NO: 319203 - DNA, 58 bp, Artificial
  Synthetic oligonucleotide
agacatcttaacaaatggtgaacttctgttgccaggttatgagacacgtccgcctaaa

SEQ ID NO: 319204 - DNA, 58 bp, Artificial
  Synthetic oligonucleotide
agacatgaaccacagtagttcggcaatacaagctttccatgcaagcttcttggttgtt

SEQ ID NO: 319205 - DNA, 60 bp, Artificial
  Synthetic oligonucleotide
agacatgagactcatggttatatgtccatacacagagccacaactagtagacccccaaga

SEQ ID NO: 319206 - DNA, 54 bp, Artificial
  Synthetic oligonucleotide
agacatgatttaggaatttgtcattcaggtcttcatcacaagatacaaatgtgg

SEQ ID NO: 319207 - DNA, 60 bp, Artificial
  Synthetic oligonucleotide
agacatgcaacccagactgggtcgtggtggcatttggagtgcaccacaacacctatagcg

SEQ ID NO: 319208 - DNA, 60 bp, Artificial
  Synthetic oligonucleotide
agacatgcacgacgctaatgttagaaacctgcatgatcaagtccgtagagtgctaaagac

SEQ ID NO: 319209 - DNA, 60 bp, Artificial
  Synthetic oligonucleotide
agacatgcagttagaaagagacgaaatgtatggctatgttaatatagctcgaaatttaga

SEQ ID NO: 319210 - DNA, 60 bp, Artificial
  Synthetic oligonucleotide
agacatgctatggaagaactaccagacaccatagaaacgttgatgctcctagctttgata

SEQ ID NO: 319211 - DNA, 60 bp, Artificial
  Synthetic oligonucleotide
agacatgctcctacggactgcaataggccaagtttcaaggcccatgttcctgtatgtgag

SEQ ID NO: 319212 - DNA, 60 bp, Artificial
  Synthetic oligonucleotide
agacatgcttctacggacttcaattggccaagtgtcgagaccaatgtttctgtatgtgag

SEQ ID NO: 319213 - DNA, 60 bp, Artificial
  Synthetic oligonucleotide
agacatggagcaatcacaagcagtaatacatcaagtactaatgctgattgtgcctggctg

SEQ ID NO: 319214 - DNA, 60 bp, Artificial
  Synthetic oligonucleotide
agacatgggatctttttgtggagcgaagcaatgccttcagcaattgctacccttacgatg

SEQ ID NO: 319215 - DNA, 60 bp, Artificial
  Synthetic oligonucleotide
agacatgggcatgtcttgagtaccgtcccaatccaaatgccatgttataccaatttggcc

SEQ ID NO: 319216 - DNA, 54 bp, Artificial
  Synthetic oligonucleotide
agacatggggcttcttcgctccgggaaactacccggtcgtcgcttcgggtctca

SEQ ID NO: 319217 - DNA, 56 bp, Artificial
  Synthetic oligonucleotide
agacatggggggccttgagtaaaggggctagtgcctcggagtgagacgagtattaa

SEQ ID NO: 319218 - DNA, 52 bp, Artificial
  Synthetic oligonucleotide
agacatggtcaatgagactagttcttgtatagcccaggataattgcacaggc

SEQ ID NO: 319219 - DNA, 60 bp, Artificial
  Synthetic oligonucleotide
agacatgtgaacatcagccgatgcagcaatcaggcagagtgtatgccattgcgctacaca

SEQ ID NO: 319220 - DNA, 59 bp, Artificial
  Synthetic oligonucleotide
agacatgttacttccatcaaaacttgcattccaggacttgaaactctgtacgttgagaa

SEQ ID NO: 319221 - DNA, 57 bp, Artificial
  Synthetic oligonucleotide
agacatgttcggtatgaataccatgtctaacgtgttggacaagggacgaaggaaaga

SEQ ID NO: 319222 - DNA, 56 bp, Artificial
  Synthetic oligonucleotide
agacatgttttcccacatactgcgtggtaaaccgtaaatagcacaggagagggtaa

SEQ ID NO: 319223 - DNA, 59 bp, Artificial
  Synthetic oligonucleotide
agacattaaaaaacctgaatgacaattatgggataactagagagcaagcatttaatctg

SEQ ID NO: 319224 - DNA, 60 bp, Artificial
  Synthetic oligonucleotide
agacattaatggcatgcattacaatgaatatgcaacatgttcaaaccttaacgacagaaa

SEQ ID NO: 319225 - DNA, 52 bp, Artificial
  Synthetic oligonucleotide
agacattattacaccagagcaggaacaatgggagatgccattccaggacctt

SEQ ID NO: 319226 - DNA, 55 bp, Artificial
  Synthetic oligonucleotide
agacattcaatggaacaggaccgtgtcagaatgtcagcacagtacagtgtacaca

SEQ ID NO: 319227 - DNA, 55 bp, Artificial
  Synthetic oligonucleotide
agacattcccacctggggtgtcagacaccctttgggggtgctttggcaccataag

SEQ ID NO: 319228 - DNA, 56 bp, Artificial
  Synthetic oligonucleotide
agacattctattgtaccgtaacgttctaattagaataaatcaccttaacaatatgc

SEQ ID NO: 319229 - DNA, 60 bp, Artificial
  Synthetic oligonucleotide
agacattgacatggccggcccaactggatatgccccggctacgtctcagcaaggactatt

SEQ ID NO: 319230 - DNA, 50 bp, Artificial
  Synthetic oligonucleotide
agacattgagagcaaaatttgacttaactcaagctaaggctggtgctaag

SEQ ID NO: 319231 - DNA, 60 bp, Artificial
  Synthetic oligonucleotide
agacattgcaacactcttcttagctcaaggcagcccaatgtgggcaccctacaaattcgg

SEQ ID NO: 319232 - DNA, 59 bp, Artificial
  Synthetic oligonucleotide
agacattggcctgttcttcaatatcttgcaaccctctctgggcggttggataaccaaga

SEQ ID NO: 319233 - DNA, 55 bp, Artificial
  Synthetic oligonucleotide
agacatttacgaggcattgtccagatctctgtacggccagatcgcaccttcggcg

SEQ ID NO: 319234 - DNA, 58 bp, Artificial
  Synthetic oligonucleotide
agacatttactccactttagatttctataggtcatggttagcatacattcaaaggtta

SEQ ID NO: 319235 - DNA, 53 bp, Artificial
  Synthetic oligonucleotide
agaccaaactatatgggagtgggaataaactaataacagttgggagttctaac

SEQ ID NO: 319236 - DNA, 56 bp, Artificial
  Synthetic oligonucleotide
agaccaaagttctagattttggattgactgggatggacaattacgccccagatagt

SEQ ID NO: 319237 - DNA, 60 bp, Artificial
  Synthetic oligonucleotide
agaccaacatcagattgagttttgctgaagttttgagaaaaactgctaagagtgacagat

SEQ ID NO: 319238 - DNA, 51 bp, Artificial
  Synthetic oligonucleotide
agaccaacattatcatgacactcttaaggagatcaagctccgagcgtccaa

SEQ ID NO: 319239 - DNA, 55 bp, Artificial
  Synthetic oligonucleotide
agaccaaccaagagcgatacgctgctaggaagctagaagcacgagactactgggt

SEQ ID NO: 319240 - DNA, 52 bp, Artificial
  Synthetic oligonucleotide
agaccaacccagctctggcttacgccctccccaagcgcattgtgacgtgctc

SEQ ID NO: 319241 - DNA, 51 bp, Artificial
  Synthetic oligonucleotide
agaccaacgaatacaagatatatcggtagagttacgtgtagaggaacacac

SEQ ID NO: 319242 - DNA, 59 bp, Artificial
  Synthetic oligonucleotide
agaccaacgcagcaggcggaaggtaccactccatggccgcaggagggcgccacaaagac

SEQ ID NO: 319243 - DNA, 52 bp, Artificial
  Synthetic oligonucleotide
agaccaagaaccacactaacagtgttatgttttttttagttagggatcgtag

SEQ ID NO: 319244 - DNA, 52 bp, Artificial
  Synthetic oligonucleotide
agaccaagaagaacccgaaaggtgtcaaggagaaatccccatacgtcgccgg

SEQ ID NO: 319245 - DNA, 60 bp, Artificial
  Synthetic oligonucleotide
agaccaatgttggaatatggaaatatctatgaaggaagatactataatatgtcatctaaa

SEQ ID NO: 319246 - DNA, 55 bp, Artificial
  Synthetic oligonucleotide
agaccaattacttagacaaatgtctaaaaacgtagatagcttaaggactaagcta

SEQ ID NO: 319247 - DNA, 59 bp, Artificial
  Synthetic oligonucleotide
agaccaattttggatgctctacaaggccaatggaacaaccactgacacggcaggacaat

SEQ ID NO: 319248 - DNA, 56 bp, Artificial
  Synthetic oligonucleotide
agaccacaagattccggttgggcccgctcgtggtagtgctgcggcgtcgcttgtgt

SEQ ID NO: 319249 - DNA, 59 bp, Artificial
  Synthetic oligonucleotide
agaccacagtgaacgctcaccaactctcgcccaaggtcggtcataagaggactcttgga

SEQ ID NO: 319250 - DNA, 60 bp, Artificial
  Synthetic oligonucleotide
agaccacatgtacggggcgagagtcgccaagatctctgtgaacctgaaagagttcctgct

SEQ ID NO: 319251 - DNA, 58 bp, Artificial
  Synthetic oligonucleotide
agaccaccagtaacggtagctcaccggccaaccgtgcccgcattgctacgctgaccaa

SEQ ID NO: 319252 - DNA, 60 bp, Artificial
  Synthetic oligonucleotide
agaccaccctattttgtgcatcagatgctaaatcatatagcacagaaagccataatgtct

SEQ ID NO: 319253 - DNA, 55 bp, Artificial
  Synthetic oligonucleotide
agaccaccggagcagtacgagtagcagcatggaagtctcggtagacgtagacaag

SEQ ID NO: 319254 - DNA, 55 bp, Artificial
  Synthetic oligonucleotide
agaccacgaatctgtgaccaacctatgttagccagtgagtagttaggtgcaacta

SEQ ID NO: 319255 - DNA, 55 bp, Artificial
  Synthetic oligonucleotide
agaccacgccgcttgtccccattactgtgactatcgcaccgatggagacggagta

SEQ ID NO: 319256 - DNA, 55 bp, Artificial
  Synthetic oligonucleotide
agaccacgctacggcgtgctactcagcggagagtgcagtctgcgatagtgcccca

SEQ ID NO: 319257 - DNA, 54 bp, Artificial
  Synthetic oligonucleotide
agaccacgctccttcttcttaccctctggcatggtctttttagttatttggaag

SEQ ID NO: 319258 - DNA, 60 bp, Artificial
  Synthetic oligonucleotide
agaccactgacggtgcagcaacttagtgataagttgacagtacctgtagtagatctttta

SEQ ID NO: 319259 - DNA, 60 bp, Artificial
  Synthetic oligonucleotide
agaccactgatctgattaacaggaccatagagagcaatcaagcccaccttcagggagagc

SEQ ID NO: 319260 - DNA, 55 bp, Artificial
  Synthetic oligonucleotide
agaccactgtggttcatactcccaagaaggtttatgaccatatgagatccaagag

SEQ ID NO: 319261 - DNA, 58 bp, Artificial
  Synthetic oligonucleotide
agaccactgttacttctctcaatgccaggatgaacagtgatcagtttgcagttaatat

SEQ ID NO: 319262 - DNA, 53 bp, Artificial
  Synthetic oligonucleotide
agaccagaatatgatgcgagatgcttagagaggtttatcagggcctgtgatac

SEQ ID NO: 319263 - DNA, 57 bp, Artificial
  Synthetic oligonucleotide
agaccagacattttaaaacgattgggactagatgtatcaggacatttatttgtcagt

SEQ ID NO: 319264 - DNA, 51 bp, Artificial
  Synthetic oligonucleotide
agaccagacccgctggttagaggtccgtggctaatggcctcagaaggcgat

SEQ ID NO: 319265 - DNA, 57 bp, Artificial
  Synthetic oligonucleotide
agaccagaccttctgctgatttcaccttcgctttgctgaaaccccctggttctctta

SEQ ID NO: 319266 - DNA, 58 bp, Artificial
  Synthetic oligonucleotide
agaccagcatcttagcggagaaattgaagagctaggaaattctgtaacaaagataaaa

SEQ ID NO: 319267 - DNA, 60 bp, Artificial
  Synthetic oligonucleotide
agaccagctccagacgctattagcgacctcctcgctagtgtagatagtgaagaagtgcgc

SEQ ID NO: 319268 - DNA, 52 bp, Artificial
  Synthetic oligonucleotide
agaccaggactccgggtttcctctcctcaaaaacttaatattcgtggagtcc

SEQ ID NO: 319269 - DNA, 58 bp, Artificial
  Synthetic oligonucleotide
agaccagtacgcattctaccacttccatatttacgaaggtcaaccgctgaattcaaca

SEQ ID NO: 319270 - DNA, 57 bp, Artificial
  Synthetic oligonucleotide
agaccagtggaactgtcattgacagcataattacggcccaggggaaaccggtagaga

SEQ ID NO: 319271 - DNA, 60 bp, Artificial
  Synthetic oligonucleotide
agaccagtggacatatcaaatatatcaggagccattcaaaaacctgaagacagggaagta

SEQ ID NO: 319272 - DNA, 55 bp, Artificial
  Synthetic oligonucleotide
agaccagttctggctactatacaaggcaaatgggacaactactgacactgctgga

SEQ ID NO: 319273 - DNA, 60 bp, Artificial
  Synthetic oligonucleotide
agaccatactaatagtctatccctgatttcaatactaggttaagtatgttcgctgacaga

SEQ ID NO: 319274 - DNA, 59 bp, Artificial
  Synthetic oligonucleotide
agaccatattggattcgcagagctcagggtacgaacaattgtatttgttggggtaatga

SEQ ID NO: 319275 - DNA, 60 bp, Artificial
  Synthetic oligonucleotide
agaccatcatccccggatgctcctatcatactactctgcataggagcattaatcttcacg

SEQ ID NO: 319276 - DNA, 60 bp, Artificial
  Synthetic oligonucleotide
agaccatctgaaagagagatcaatgcttagttatggaaatgtattggatttgaaccacct

SEQ ID NO: 319277 - DNA, 59 bp, Artificial
  Synthetic oligonucleotide
agaccatgaaacaaaaatggagtttggtgcatttactaatctaccacatgtgttaatga

SEQ ID NO: 319278 - DNA, 60 bp, Artificial
  Synthetic oligonucleotide
agaccatgcagtctttgaatgcgctggccgcctttgtcgcctagagcagggtcgtaggct

SEQ ID NO: 319279 - DNA, 60 bp, Artificial
  Synthetic oligonucleotide
agaccatggctccacagtttaggacaatatatctatgacacctatggagatacttggaca

SEQ ID NO: 319280 - DNA, 60 bp, Artificial
  Synthetic oligonucleotide
agaccattaaagggtcgtatgggtcaaattgtgacacttgttgaggctctgcctcatgtg

SEQ ID NO: 319281 - DNA, 52 bp, Artificial
  Synthetic oligonucleotide
agaccattaggtccaggtactatagccgtagccagcctgaaaaccccttggt

SEQ ID NO: 319282 - DNA, 60 bp, Artificial
  Synthetic oligonucleotide
agaccattttaagaggattaggacaaggggcttcattggaagaaatgatgacagcatgtc

SEQ ID NO: 319283 - DNA, 56 bp, Artificial
  Synthetic oligonucleotide
agacccaacaaccacgacaactgttggttgaacaccatcctccagttgttcaggta

SEQ ID NO: 319284 - DNA, 56 bp, Artificial
  Synthetic oligonucleotide
agacccaacaataataccagaacaagtgtaaagataagaccaagacaaacattcta

SEQ ID NO: 319285 - DNA, 58 bp, Artificial
  Synthetic oligonucleotide
agacccaagccaccatagtcgccaaccacacccgctccgaccctgactggcgcttcac

SEQ ID NO: 319286 - DNA, 51 bp, Artificial
  Synthetic oligonucleotide
agacccaagtcgccaactaaatcaccaaacgagtaaggttcgatgcacatg

SEQ ID NO: 319287 - DNA, 60 bp, Artificial
  Synthetic oligonucleotide
agacccaatacgaatgttctttggacgcttacgatctcgatccatatagcgccgtggcat

SEQ ID NO: 319288 - DNA, 51 bp, Artificial
  Synthetic oligonucleotide
agacccacaccaccacaacggtcacgacaaagaaaacgatccccagcgggg

SEQ ID NO: 319289 - DNA, 55 bp, Artificial
  Synthetic oligonucleotide
agacccactataatttgcttaatgtggcctctgtggtcgcccagaaccgacgggg

SEQ ID NO: 319290 - DNA, 53 bp, Artificial
  Synthetic oligonucleotide
agacccactgttaacctgtagtgctgccctgtagttgtctataatatccaacg

SEQ ID NO: 319291 - DNA, 55 bp, Artificial
  Synthetic oligonucleotide
agacccagaccactttgacggataccaacaacagatcgtcactgctatggacgac

SEQ ID NO: 319292 - DNA, 54 bp, Artificial
  Synthetic oligonucleotide
agacccagatgagggaacagccggagtagaatcagcagtattgaggggattcct

SEQ ID NO: 319293 - DNA, 57 bp, Artificial
  Synthetic oligonucleotide
agacccagcagagttcaagctcctgggtaccaagtatcgtagcggaagggtgcaccg

SEQ ID NO: 319294 - DNA, 57 bp, Artificial
  Synthetic oligonucleotide
agacccaggatgtgcgcctttcacccgtagcactagtgaaatgttttaccactagga

SEQ ID NO: 319295 - DNA, 60 bp, Artificial
  Synthetic oligonucleotide
agacccaggctatggagcgagtaattccgacaacgtgggaatcagaaattgtcgatgcgc

SEQ ID NO: 319296 - DNA, 56 bp, Artificial
  Synthetic oligonucleotide
agacccataaggaagtgcatgaaaaccgattttttatcggattggcgtggcactta

SEQ ID NO: 319297 - DNA, 60 bp, Artificial
  Synthetic oligonucleotide
agacccatccttatgaggcatacgttaagctaagggagttggtagatgaacataagatga

SEQ ID NO: 319298 - DNA, 54 bp, Artificial
  Synthetic oligonucleotide
agacccatcttcgtgtagttccctgcaaatacgtatgaattttttgttggtagg

SEQ ID NO: 319299 - DNA, 55 bp, Artificial
  Synthetic oligonucleotide
agacccatgacagccggaggctatatgaccgcgcgtctaaggcgcgagatccgtg

SEQ ID NO: 319300 - DNA, 55 bp, Artificial
  Synthetic oligonucleotide
agacccattgccttcccacagtccatttaattgcccctgtccagacatgcatgtc

SEQ ID NO: 319301 - DNA, 56 bp, Artificial
  Synthetic oligonucleotide
agaccccacaagtgccgttattgaggcacaacctcctacatctactcctaagcgtg

SEQ ID NO: 319302 - DNA, 59 bp, Artificial
  Synthetic oligonucleotide
agaccccacagagggccttgttcgcacagtctcagactaccgcctcacttataaggcga

SEQ ID NO: 319303 - DNA, 55 bp, Artificial
  Synthetic oligonucleotide
agaccccacggaccagcctctcccagatgctgactacacttggtacacggacggg

SEQ ID NO: 319304 - DNA, 50 bp, Artificial
  Synthetic oligonucleotide
agaccccatggaaactatggtgccacattcgcaaagagcagtacaattga

SEQ ID NO: 319305 - DNA, 60 bp, Artificial
  Synthetic oligonucleotide
agaccccccagcacaggtttcagttccattcatgtcacctgcgagcgcctatcagtggtt

SEQ ID NO: 319306 - DNA, 48 bp, Artificial
  Synthetic oligonucleotide
agacccccctcactacccctggctaccaaaaaagccccctacccctcc

SEQ ID NO: 319307 - DNA, 51 bp, Artificial
  Synthetic oligonucleotide
agaccccgagacagaaccggcggactcgggacaccccctaagtccgccagg

SEQ ID NO: 319308 - DNA, 60 bp, Artificial
  Synthetic oligonucleotide
agaccccgcaggaacgctcagcagtctttgtgaatgaggatgagtgatggcgcagcgcca

SEQ ID NO: 319309 - DNA, 50 bp, Artificial
  Synthetic oligonucleotide
agaccccgtcttcgtagaaatctgccggatttttctgacagtattccaga

SEQ ID NO: 319310 - DNA, 51 bp, Artificial
  Synthetic oligonucleotide
agacccctacacccgccccggtgtttaggaggacgtccgaggcatacctcc

SEQ ID NO: 319311 - DNA, 55 bp, Artificial
  Synthetic oligonucleotide
agacccctagcatgcttgaaaggctcttcgggcggtcccatcatgtgcccctctg

SEQ ID NO: 319312 - DNA, 53 bp, Artificial
  Synthetic oligonucleotide
agacccctcattccggaatctacgtccaataaagtgacccgatggtttaaatc

SEQ ID NO: 319313 - DNA, 56 bp, Artificial
  Synthetic oligonucleotide
agacccctgccttccgcacgttcaaactcgccgtccccacgaccgagctgagagac

SEQ ID NO: 319314 - DNA, 55 bp, Artificial
  Synthetic oligonucleotide
agacccctggattcagttgatgaatagaacccaagcgaacttgacaggaggcccc

SEQ ID NO: 319315 - DNA, 60 bp, Artificial
  Synthetic oligonucleotide
agacccgactatagtgccactggtcacaatagttgcatcattgagagtcaccggattgac

SEQ ID NO: 319316 - DNA, 59 bp, Artificial
  Synthetic oligonucleotide
agacccgaggtgcaagtctctcttagccgcttgttcggccagtctggaggggagctgta

SEQ ID NO: 319317 - DNA, 51 bp, Artificial
  Synthetic oligonucleotide
agacccggaacatatggagcgcgccctacccaacacacctattgctatcaa

SEQ ID NO: 319318 - DNA, 50 bp, Artificial
  Synthetic oligonucleotide
agacccgtccgttcctactacacggacacccccttctacccagaggttcc

SEQ ID NO: 319319 - DNA, 55 bp, Artificial
  Synthetic oligonucleotide
agaccctagaaacatcaatgacgatgaacaagacgatagcacaaaagattctatc

SEQ ID NO: 319320 - DNA, 55 bp, Artificial
  Synthetic oligonucleotide
agaccctcattaaaacgacaggggtgacttgtagcttggtgaatcgtgtggttaa

SEQ ID NO: 319321 - DNA, 54 bp, Artificial
  Synthetic oligonucleotide
agaccctcgccctcatgcatgattacttgatcctggtcctcggcccagtgaaaa

SEQ ID NO: 319322 - DNA, 59 bp, Artificial
  Synthetic oligonucleotide
agaccctgtcattgccacgctactaaggactccctgaataccgtggccgacgtcagaca

SEQ ID NO: 319323 - DNA, 58 bp, Artificial
  Synthetic oligonucleotide
agacccttataattacgtctaatagggagccgcgtgattggtataagtgtgagtgtga

SEQ ID NO: 319324 - DNA, 60 bp, Artificial
  Synthetic oligonucleotide
agacccttgtgaacacggagcacgcctatgagaacaaacgcatcactgttgagggcggga

SEQ ID NO: 319325 - DNA, 53 bp, Artificial
  Synthetic oligonucleotide
agaccctttaggattggtatatacctgagttgttgtggaaaatacttagtacc

SEQ ID NO: 319326 - DNA, 55 bp, Artificial
  Synthetic oligonucleotide
agaccgaacacgagcatttggatgcatcagcagtctgattctccttgcactgaca

SEQ ID NO: 319327 - DNA, 54 bp, Artificial
  Synthetic oligonucleotide
agaccgaagccctggtagatggctctgctaggaccagttactccgtattgggtt

SEQ ID NO: 319328 - DNA, 57 bp, Artificial
  Synthetic oligonucleotide
agaccgaagcgaggaggaaagtaaagagagcagcggggctagtcgtcaggtgttcca

SEQ ID NO: 319329 - DNA, 54 bp, Artificial
  Synthetic oligonucleotide
agaccgaccaactaaacacaaccgataccgttgttgaattaccatccattccgc

SEQ ID NO: 319330 - DNA, 55 bp, Artificial
  Synthetic oligonucleotide
agaccgatccccaaacaactaacaaaccgctggctttccagcttcgtgagtcaag

SEQ ID NO: 319331 - DNA, 55 bp, Artificial
  Synthetic oligonucleotide
agaccgcaggccccgttgagcactttgaacgagcaggacccccccatagcccaac

SEQ ID NO: 319332 - DNA, 53 bp, Artificial
  Synthetic oligonucleotide
agaccgcgaccaaaacactcttggggctagtatccctacccgggtgcgagcgt

SEQ ID NO: 319333 - DNA, 59 bp, Artificial
  Synthetic oligonucleotide
agaccgctattgcgcatgcgcccctcgctgtgacgttccacgcgaacgtccccccgcac

SEQ ID NO: 319334 - DNA, 58 bp, Artificial
  Synthetic oligonucleotide
agaccgcttagtaacatgccacacataaagcccaatttcaagtcaataaatgttcaag

SEQ ID NO: 319335 - DNA, 54 bp, Artificial
  Synthetic oligonucleotide
agaccgcttttacgtaagacacgtgttcaaacgtgtactgtccgtggagaagga

SEQ ID NO: 319336 - DNA, 55 bp, Artificial
  Synthetic oligonucleotide
agaccggacaatggcttggacagtagtgaatagcatctgcaacactacaggagtc

SEQ ID NO: 319337 - DNA, 56 bp, Artificial
  Synthetic oligonucleotide
agaccggcctgaggctaccttcagagctcggctggatttaggcatcccaggtgatg

SEQ ID NO: 319338 - DNA, 58 bp, Artificial
  Synthetic oligonucleotide
agaccgggtaatcgcagtttattcgttatgccaacaagcccagattggaatatggatg

SEQ ID NO: 319339 - DNA, 54 bp, Artificial
  Synthetic oligonucleotide
agaccggtaatcgaaggagcttcaatggctaacgacaacgtgctctggcacccc

SEQ ID NO: 319340 - DNA, 60 bp, Artificial
  Synthetic oligonucleotide
agaccggtccagctcactcctgatgtatgcacgatggtaagacatcccagattagcaatg

SEQ ID NO: 319341 - DNA, 58 bp, Artificial
  Synthetic oligonucleotide
agaccggttgagcacccaatctaccatgctatagacaagatttggggtggtccgacta

SEQ ID NO: 319342 - DNA, 53 bp, Artificial
  Synthetic oligonucleotide
agaccgtacttaagaatttctgggtccaatgttgagacggtggtagaaattca

SEQ ID NO: 319343 - DNA, 59 bp, Artificial
  Synthetic oligonucleotide
agaccgtagaattacattaatatgtgttgtctctcagaagtctccactagggagcgcct

SEQ ID NO: 319344 - DNA, 55 bp, Artificial
  Synthetic oligonucleotide
agaccgtccaaatgcaatctaggtgctgtaaaacactttttctcgcaacaaaacc

SEQ ID NO: 319345 - DNA, 56 bp, Artificial
  Synthetic oligonucleotide
agaccgtcgtatacctaagttaaatgctttccttgtaatgtctcctccgagtgctg

SEQ ID NO: 319346 - DNA, 57 bp, Artificial
  Synthetic oligonucleotide
agaccgtctcatttctggaaggcggtgttgaatgatagccccgaagcggtcaaggcc

SEQ ID NO: 319347 - DNA, 51 bp, Artificial
  Synthetic oligonucleotide
agaccgtctcttgtctcacaagagaggaaaaggttggtacgagcacaaact

SEQ ID NO: 319348 - DNA, 56 bp, Artificial
  Synthetic oligonucleotide
agaccgtgtgagcttctttaaaggggaatccacagggattcaaagtgaagtgccag

SEQ ID NO: 319349 - DNA, 51 bp, Artificial
  Synthetic oligonucleotide
agaccgttagcgcatcgtacattacgtctaactatatagagcgcataagta

SEQ ID NO: 319350 - DNA, 59 bp, Artificial
  Synthetic oligonucleotide
agaccgttagcggagaatgtcagtaagcagttgagctttgaacctttctatcataatgt

SEQ ID NO: 319351 - DNA, 52 bp, Artificial
  Synthetic oligonucleotide
agaccgttcctaatccaagttgttcctgactcccggttcgcttgttacgtct

SEQ ID NO: 319352 - DNA, 57 bp, Artificial
  Synthetic oligonucleotide
agaccgtttctacatacgccacgtgttgaagcgagtattgtccgtggagaaggacag

SEQ ID NO: 319353 - DNA, 60 bp, Artificial
  Synthetic oligonucleotide
agacctaaacgtgagatatctagtgttgttgtgtggttgtgagtgatccattattatgtg

SEQ ID NO: 319354 - DNA, 58 bp, Artificial
  Synthetic oligonucleotide
agacctaaagtcagaggacaagcaggcagaatgaattattattggacactgttagatc

SEQ ID NO: 319355 - DNA, 50 bp, Artificial
  Synthetic oligonucleotide
agacctaaggcgtgtccgagcaatagagaggctgtagtagaatgttcact

SEQ ID NO: 319356 - DNA, 56 bp, Artificial
  Synthetic oligonucleotide
agacctaatgtctcgtagtcgtcgcttgcatgaactagcttgcactgaccccactt

SEQ ID NO: 319357 - DNA, 51 bp, Artificial
  Synthetic oligonucleotide
agacctaccaagtagggtacctccacgcccccaccgggagtggtaagagca

SEQ ID NO: 319358 - DNA, 57 bp, Artificial
  Synthetic oligonucleotide
agacctagatcaatatcccttaggccgtaagtttctgtttcaaattggagtgcagcg

SEQ ID NO: 319359 - DNA, 58 bp, Artificial
  Synthetic oligonucleotide
agacctagcccacattgtcttcccagtacgactatcaccctcaattactatactttga

SEQ ID NO: 319360 - DNA, 60 bp, Artificial
  Synthetic oligonucleotide
agacctagggttgtcgactgtcacactgcaagactttgataaccagcacctccaggatag

SEQ ID NO: 319361 - DNA, 54 bp, Artificial
  Synthetic oligonucleotide
agacctagtgaattttatatagttctaacttgctcacagtttaaagttctttta

SEQ ID NO: 319362 - DNA, 60 bp, Artificial
  Synthetic oligonucleotide
agacctatgattggacactaaacaggaatcagccggctgcaactgcattagctaatacta

SEQ ID NO: 319363 - DNA, 57 bp, Artificial
  Synthetic oligonucleotide
agacctattgattggaaagtatgtcaacgaattgtgggtttgttgggctttgctgcc

SEQ ID NO: 319364 - DNA, 51 bp, Artificial
  Synthetic oligonucleotide
agacctatttcacggtggacgatgccccatgggcagggcaggttcttttgg

SEQ ID NO: 319365 - DNA, 55 bp, Artificial
  Synthetic oligonucleotide
agacctcacacaatttccattttctgtgaggaccctaagccaaatgacttctttt

SEQ ID NO: 319366 - DNA, 53 bp, Artificial
  Synthetic oligonucleotide
agacctcactactgagggtgtcgaatccaacccgggccctattatggttgttg

SEQ ID NO: 319367 - DNA, 55 bp, Artificial
  Synthetic oligonucleotide
agacctcagcttatgaccacgttcctttaaactgccagggggcgggctcgagcct

SEQ ID NO: 319368 - DNA, 51 bp, Artificial
  Synthetic oligonucleotide
agacctcatgatgtctaactcatgcgtgattgctcatgtacgaaataaatg

SEQ ID NO: 319369 - DNA, 58 bp, Artificial
  Synthetic oligonucleotide
agacctccaacctccatctcaaagagggtccttcatacgaactctctccggacacaga

SEQ ID NO: 319370 - DNA, 54 bp, Artificial
  Synthetic oligonucleotide
agacctcgcgatccgtataaacagagggaattttcggggaaacctcaggagagc

SEQ ID NO: 319371 - DNA, 53 bp, Artificial
  Synthetic oligonucleotide
agacctcggaggaggggccccatttttcggggtagcagggcatgtagtggctt

SEQ ID NO: 319372 - DNA, 59 bp, Artificial
  Synthetic oligonucleotide
agacctctatgactcaactatctctcttttacgagatgaaataccgaaagtctggtgac

SEQ ID NO: 319373 - DNA, 59 bp, Artificial
  Synthetic oligonucleotide
agacctctgggtttatcatactcaaggaatcttccctgactggcagaactacactccag

SEQ ID NO: 319374 - DNA, 58 bp, Artificial
  Synthetic oligonucleotide
agacctgaatgtggtttaattgtactattgaaccagtgctactactttgctaaagcaa

SEQ ID NO: 319375 - DNA, 54 bp, Artificial
  Synthetic oligonucleotide
agacctgatctactccctgtagcagtaagcatgacaggacaatcagaagctgtc

SEQ ID NO: 319376 - DNA, 56 bp, Artificial
  Synthetic oligonucleotide
agacctggatgacctacatgggtccctccagccctcactacttcaacaggaacggt

SEQ ID NO: 319377 - DNA, 60 bp, Artificial
  Synthetic oligonucleotide
agacctggcagatgaggctggacattccccactggcgacagtggttcagcctgcgtggct

SEQ ID NO: 319378 - DNA, 53 bp, Artificial
  Synthetic oligonucleotide
agacctggctccagtctaagctcctgccgcgactaccgggagtccctttcttc

SEQ ID NO: 319379 - DNA, 60 bp, Artificial
  Synthetic oligonucleotide
agacctgggccagaaacattctgaggactcaagaatcagaatgtgtgtgccacaatggca

SEQ ID NO: 319380 - DNA, 53 bp, Artificial
  Synthetic oligonucleotide
agacctggtggtaaggtggggttggttccccgtgaagctgtcgaccactggga

SEQ ID NO: 319381 - DNA, 60 bp, Artificial
  Synthetic oligonucleotide
agacctgtacagaagtgggtcctggttctatacacgtggaggatctgcagataatgtagc

SEQ ID NO: 319382 - DNA, 52 bp, Artificial
  Synthetic oligonucleotide
agacctgtagggttgagtttttaaaggtacatgactttaagattgtataccc

SEQ ID NO: 319383 - DNA, 55 bp, Artificial
  Synthetic oligonucleotide
agacctgtggctccgtgcgcttagcttcccagattggacggaccgcgcccaactt

SEQ ID NO: 319384 - DNA, 53 bp, Artificial
  Synthetic oligonucleotide
agaccttaagtataccgctcccacagattatacgggcgaccccgactgccctc

SEQ ID NO: 319385 - DNA, 60 bp, Artificial
  Synthetic oligonucleotide
agaccttcaagcgagggttctttgaattcgtctcgataagacgcatgcaatgagctctca

SEQ ID NO: 319386 - DNA, 59 bp, Artificial
  Synthetic oligonucleotide
agaccttcacgggccctctggcagaccaggcctcaaaggctaatctcctctacgagcag

SEQ ID NO: 319387 - DNA, 55 bp, Artificial
  Synthetic oligonucleotide
agaccttccattggcatatttgaggtcgtttttgtatcggtgtacaccgattact

SEQ ID NO: 319388 - DNA, 59 bp, Artificial
  Synthetic oligonucleotide
agaccttcgggtatgcagagcagacacagacaggaaagagtcagaagggggaggagagt

SEQ ID NO: 319389 - DNA, 60 bp, Artificial
  Synthetic oligonucleotide
agaccttggagcaggtagtagatcctgaggtagctttacagttatctatgcaggaacgtg

SEQ ID NO: 319390 - DNA, 56 bp, Artificial
  Synthetic oligonucleotide
agacgaaagcagctcacaacacccatttataaaccctggcttcatttcccctaatg

SEQ ID NO: 319391 - DNA, 55 bp, Artificial
  Synthetic oligonucleotide
agacgaagagttcgggttggaactccacgaggcagacgacgtctctctccgccgg

SEQ ID NO: 319392 - DNA, 57 bp, Artificial
  Synthetic oligonucleotide
agacgaaggtatgagcaggcatgtaggtaagtgtcctaaaagattagaaagacttaa

SEQ ID NO: 319393 - DNA, 54 bp, Artificial
  Synthetic oligonucleotide
agacgaatcaagattcaccaacctggaattacttgaccaagatgaagcactagg

SEQ ID NO: 319394 - DNA, 60 bp, Artificial
  Synthetic oligonucleotide
agacgaatggctgagtttatcacgccagacggagacggcaacacaacagtggcagccggc

SEQ ID NO: 319395 - DNA, 54 bp, Artificial
  Synthetic oligonucleotide
agacgacaacattaaactggttttgtgtgtcgcgagggggaacccggagcacgc

SEQ ID NO: 319396 - DNA, 55 bp, Artificial
  Synthetic oligonucleotide
agacgaccacaaggtttggggagcaacacaccatacatactacgttgagggagcg

SEQ ID NO: 319397 - DNA, 54 bp, Artificial
  Synthetic oligonucleotide
agacgaccacacctttggagtcccccttgaacatcattggaaccccaacctgta

SEQ ID NO: 319398 - DNA, 60 bp, Artificial
  Synthetic oligonucleotide
agacgacccaattggctctgttataagagcagtatccggaatggctaatgctgtattagg

SEQ ID NO: 319399 - DNA, 60 bp, Artificial
  Synthetic oligonucleotide
agacgaccgcagggccaaactagcacaggccaagcgcctatttggactgagcgtatgacc

SEQ ID NO: 319400 - DNA, 56 bp, Artificial
  Synthetic oligonucleotide
agacgacgaagagtaaggagacgcagacggtggaggagggggcgacccagacgcag

SEQ ID NO: 319401 - DNA, 58 bp, Artificial
  Synthetic oligonucleotide
agacgacgccgtttggtggctgtctgtcgcgggtgtagtcataaaagtggcagactga

SEQ ID NO: 319402 - DNA, 56 bp, Artificial
  Synthetic oligonucleotide
agacgactccccccggtggatcccgtggcgattcctgaaaaaagctgcatgcccaa

SEQ ID NO: 319403 - DNA, 60 bp, Artificial
  Synthetic oligonucleotide
agacgactcccttgcctaacgatgaaacctcacatgtcgcatcattccagctcgtaactt

SEQ ID NO: 319404 - DNA, 60 bp, Artificial
  Synthetic oligonucleotide
agacgacttatcgtttgggacaagagactgcttcgctttgcagcaagcagggtaacagaa

SEQ ID NO: 319405 - DNA, 57 bp, Artificial
  Synthetic oligonucleotide
agacgacttctcttttgtaaggtatgtggatcctctcactggatttacgttggacga

SEQ ID NO: 319406 - DNA, 55 bp, Artificial
  Synthetic oligonucleotide
agacgagaaatacccatttcttattcatccagtgatgccaatgaaggaaattcat

SEQ ID NO: 319407 - DNA, 60 bp, Artificial
  Synthetic oligonucleotide
agacgagccggcactccttcaactcagggtgtggatagagagatgccagcgcctgtgaag

SEQ ID NO: 319408 - DNA, 60 bp, Artificial
  Synthetic oligonucleotide
agacgagggtatagtcttcacgtatgccatatatagtaacgactttgatgatttagtgag

SEQ ID NO: 319409 - DNA, 57 bp, Artificial
  Synthetic oligonucleotide
agacgagtccgaaagagtactggtgacaaagattcgtgagcctccaccgccttacga

SEQ ID NO: 319410 - DNA, 55 bp, Artificial
  Synthetic oligonucleotide
agacgagtctccggttaatgatagtaaaccgaagattgctatgtccgccaaatct

SEQ ID NO: 319411 - DNA, 55 bp, Artificial
  Synthetic oligonucleotide
agacgatatacctcaactagctccatcacctctattacctctagtgtctcatgct

SEQ ID NO: 319412 - DNA, 55 bp, Artificial
  Synthetic oligonucleotide
agacgatctcccttttacgttctctggctcaggcactacaaaagcttgtgcgcgt

SEQ ID NO: 319413 - DNA, 56 bp, Artificial
  Synthetic oligonucleotide
agacgatctgtcctatttagatttacaggattggggtaggtttcgcgctaccatta

SEQ ID NO: 319414 - DNA, 59 bp, Artificial
  Synthetic oligonucleotide
agacgatggctagcgaaatgaacccgcttggcttcactcttgccggtcgaatgccgtat

SEQ ID NO: 319415 - DNA, 60 bp, Artificial
  Synthetic oligonucleotide
agacgatgggacgcacccattgagtcgtggctggatatgctgcaacgtctatagaatgtg

SEQ ID NO: 319416 - DNA, 57 bp, Artificial
  Synthetic oligonucleotide
agacgatgggccccagaccgatgtctcccaaagcgatgtgcccggttacactttcga

SEQ ID NO: 319417 - DNA, 55 bp, Artificial
  Synthetic oligonucleotide
agacgatgtctttggctgtgggcgctctgccctcaaaaggctcttttctcggcct

SEQ ID NO: 319418 - DNA, 60 bp, Artificial
  Synthetic oligonucleotide
agacgattgcggaattcatggctttattgcctgtccaactcagatctagctttatctgac

SEQ ID NO: 319419 - DNA, 51 bp, Artificial
  Synthetic oligonucleotide
agacgcaagtcgccgtctcgcaagtctccctctagacggtccacgtcacca

SEQ ID NO: 319420 - DNA, 53 bp, Artificial
  Synthetic oligonucleotide
agacgcacaagcgaacactaacgcatgcttacgctttatgcagatgattgctg

SEQ ID NO: 319421 - DNA, 56 bp, Artificial
  Synthetic oligonucleotide
agacgcactattactggattcgagtgatcgataaggctgggcgaatcggcccgtgg

SEQ ID NO: 319422 - DNA, 56 bp, Artificial
  Synthetic oligonucleotide
agacgcagactgtacagacgcgggagacggtacagacgaaaacggaagagggctaa

SEQ ID NO: 319423 - DNA, 59 bp, Artificial
  Synthetic oligonucleotide
agacgcagagggcgacgaaagagacacagaccgaccctaatactgaggcagtggcaacc

SEQ ID NO: 319424 - DNA, 58 bp, Artificial
  Synthetic oligonucleotide
agacgcaggagggaacgcaaggtgtgctggagctgcttaaggcgagcaacataagggc

SEQ ID NO: 319425 - DNA, 50 bp, Artificial
  Synthetic oligonucleotide
agacgcatattaataccctctctagagacccggccgagcagaaaacacag

SEQ ID NO: 319426 - DNA, 57 bp, Artificial
  Synthetic oligonucleotide
agacgcatgccactaacgtgctggataccgttaaacgtatacgccgtcaacgttaca

SEQ ID NO: 319427 - DNA, 54 bp, Artificial
  Synthetic oligonucleotide
agacgcccctcgaacgggacccagatgaccgcactatcttctgggtttacggac

SEQ ID NO: 319428 - DNA, 57 bp, Artificial
  Synthetic oligonucleotide
agacgccctattgatgaaacaaattgttgtatcccgtactggtatcgacgaagacac

SEQ ID NO: 319429 - DNA, 53 bp, Artificial
  Synthetic oligonucleotide
agacgccctgtttccgttccttatggtttccaagaggcgtttaatatgtacga

SEQ ID NO: 319430 - DNA, 55 bp, Artificial
  Synthetic oligonucleotide
agacgcccttcgagctcctccaacacatccagcgggaccgcgacaagcggcgaga

SEQ ID NO: 319431 - DNA, 50 bp, Artificial
  Synthetic oligonucleotide
agacgccgtactacgcagtcctacccacacactttcctctgcatgagtac

SEQ ID NO: 319432 - DNA, 60 bp, Artificial
  Synthetic oligonucleotide
agacgccgttccaacgagcaagtacggcattatgcagtcgcagtgtcgagcagatgcaag

SEQ ID NO: 319433 - DNA, 60 bp, Artificial
  Synthetic oligonucleotide
agacgcctagcaaatcagctgagaagggtgtagcaagtctgagcaccagtgcacccccta

SEQ ID NO: 319434 - DNA, 59 bp, Artificial
  Synthetic oligonucleotide
agacgcctctattccagggcgcagaacagtttagtaagttcttgcgcgtctggactcgc

SEQ ID NO: 319435 - DNA, 60 bp, Artificial
  Synthetic oligonucleotide
agacgccttacaaagtgactgcagctgataagagtgagcaaattgactggcgcgacatca

SEQ ID NO: 319436 - DNA, 50 bp, Artificial
  Synthetic oligonucleotide
agacgcctttaagggatatgtcgctaatgttactgcttgctataacgaca

SEQ ID NO: 319437 - DNA, 57 bp, Artificial
  Synthetic oligonucleotide
agacgcgatcaagcagaataacccgggttgggctggctttcgaatgccgtcgtggta

SEQ ID NO: 319438 - DNA, 60 bp, Artificial
  Synthetic oligonucleotide
agacgcgatgctctatacagaagacgtgaccctcgaggcaccggacacgcacttagtata

SEQ ID NO: 319439 - DNA, 55 bp, Artificial
  Synthetic oligonucleotide
agacgcgtattcaccgacccccccctcgcaacatgacaacgacgcccctctcgaa

SEQ ID NO: 319440 - DNA, 55 bp, Artificial
  Synthetic oligonucleotide
agacgcgtcgttggtggcgtgtgtggggtgaggatagtcgcgcgccgtatgtgtc

SEQ ID NO: 319441 - DNA, 57 bp, Artificial
  Synthetic oligonucleotide
agacgcgtttaacaagaatgcaatctttagacacaaccataacaactaacactcaac

SEQ ID NO: 319442 - DNA, 60 bp, Artificial
  Synthetic oligonucleotide
agacgctcatagcggctggtgacactatgatcacggtgccgtctggcggcatctgcagtc

SEQ ID NO: 319443 - DNA, 60 bp, Artificial
  Synthetic oligonucleotide
agacgctgaaagaggcaaattaaagagaagagcaattgcaacacccgggatgcaaatcag

SEQ ID NO: 319444 - DNA, 60 bp, Artificial
  Synthetic oligonucleotide
agacgctgacacgtatgttggatcaaagatttattctcaagataagtatagaatactaga

SEQ ID NO: 319445 - DNA, 55 bp, Artificial
  Synthetic oligonucleotide
agacgctgccaatgactattaacacgtaactactatcacctagtatttataggtg

SEQ ID NO: 319446 - DNA, 55 bp, Artificial
  Synthetic oligonucleotide
agacgctgcgcctcccaccatcaaggcgcgtcgtcccagacgactaccctgtcgt

SEQ ID NO: 319447 - DNA, 56 bp, Artificial
  Synthetic oligonucleotide
agacgctgctactacatttactgttccgactgacgcgaacaacctccccgtccaaa

SEQ ID NO: 319448 - DNA, 60 bp, Artificial
  Synthetic oligonucleotide
agacgctgtgttatctggagatgtcccagacgcgtggaacgctgtgaaaacagtgttcgg

SEQ ID NO: 319449 - DNA, 57 bp, Artificial
  Synthetic oligonucleotide
agacgcttgggatgctgtcactacgttgactcccctcacttcgggtaccgtgactgt

SEQ ID NO: 319450 - DNA, 52 bp, Artificial
  Synthetic oligonucleotide
agacggaactgtaatctacagccctggtttgttccctaaattaaaccaatcc

SEQ ID NO: 319451 - DNA, 51 bp, Artificial
  Synthetic oligonucleotide
agacggacccgagactaaggaatgtcccaccgtgagcagagcgtggaacag

SEQ ID NO: 319452 - DNA, 60 bp, Artificial
  Synthetic oligonucleotide
agacggagggggctacatccccctgcacgagaggacaaagtggtacgtgatgctcagata

SEQ ID NO: 319453 - DNA, 53 bp, Artificial
  Synthetic oligonucleotide
agacggagttccttcatttaattgatcacctctaaagggtccagggtaccttc

SEQ ID NO: 319454 - DNA, 55 bp, Artificial
  Synthetic oligonucleotide
agacggcaccggtgaacggagcctgcagcagaacagactatcccacgctcgcctt

SEQ ID NO: 319455 - DNA, 55 bp, Artificial
  Synthetic oligonucleotide
agacggcattagatcaggaatcgacagaagaagagactaagttagtaagtatgcg

SEQ ID NO: 319456 - DNA, 57 bp, Artificial
  Synthetic oligonucleotide
agacggcccttcccaaccaatagagggaatgaattatcatatgtttgcagttggagg

SEQ ID NO: 319457 - DNA, 60 bp, Artificial
  Synthetic oligonucleotide
agacggcgaatcagctgataagtatcaaggtgaatgcgcaatcaaataacgttgagggta

SEQ ID NO: 319458 - DNA, 58 bp, Artificial
  Synthetic oligonucleotide
agacggctggacttgccgcggtgtgcccgcccatccaggcacccgctgccccgaactg

SEQ ID NO: 319459 - DNA, 55 bp, Artificial
  Synthetic oligonucleotide
agacgggactgaatatcttgctacggttggtgttatcaactttaagccgaacagc

SEQ ID NO: 319460 - DNA, 57 bp, Artificial
  Synthetic oligonucleotide
agacgggagattgtaaaaacccaacctgagctcattaatctggacgttgcaggagta

SEQ ID NO: 319461 - DNA, 55 bp, Artificial
  Synthetic oligonucleotide
agacgggattacaaataaggtcaattccattatagacaagatgaacacacaattc

SEQ ID NO: 319462 - DNA, 55 bp, Artificial
  Synthetic oligonucleotide
agacgggcaaaatggcgactggcaaagtaacagtagtcaatcaagtggggtgggg

SEQ ID NO: 319463 - DNA, 53 bp, Artificial
  Synthetic oligonucleotide
agacgggcaagccgacaccgacatatttttcgacgtcttaaccaataacaaaa

SEQ ID NO: 319464 - DNA, 55 bp, Artificial
  Synthetic oligonucleotide
agacgggcgagatgggagcggggcgatcagcaccgttaacggggaaagctttaga

SEQ ID NO: 319465 - DNA, 60 bp, Artificial
  Synthetic oligonucleotide
agacgggctagagtatatatggggcaatcacgaaccggtgagagtatatgcacaagagtc

SEQ ID NO: 319466 - DNA, 60 bp, Artificial
  Synthetic oligonucleotide
agacgggcttgatacgtgctatgtatctgaacggcttcgtcacgcaacctccagcgtgga

SEQ ID NO: 319467 - DNA, 54 bp, Artificial
  Synthetic oligonucleotide
agacggggagacgcggtatttacgcatggaggattaagtgggccctacgtacta

SEQ ID NO: 319468 - DNA, 60 bp, Artificial
  Synthetic oligonucleotide
agacggggcgcggaggttgagttcatccactgcttgtgagatcaaggagagcgtaccacc

SEQ ID NO: 319469 - DNA, 60 bp, Artificial
  Synthetic oligonucleotide
agacggtatagaaggggcattcataacagccagtatcccagccgctgggggcactagcat

SEQ ID NO: 319470 - DNA, 60 bp, Artificial
  Synthetic oligonucleotide
agacggtcacgaacggctggacagatgacgacttcgctcagacgcgccgccaaggcgacg

SEQ ID NO: 319471 - DNA, 53 bp, Artificial
  Synthetic oligonucleotide
agacggtcactcctcaaaattttacacctggctgctataggacactaaacctg

SEQ ID NO: 319472 - DNA, 50 bp, Artificial
  Synthetic oligonucleotide
agacggtccacgagaaacccagtggtaaacttaggaccggaagcatatga

SEQ ID NO: 319473 - DNA, 60 bp, Artificial
  Synthetic oligonucleotide
agacggtcccatgcctatgccgatatgccatgacaccggagagagtcacaagactacgga

SEQ ID NO: 319474 - DNA, 59 bp, Artificial
  Synthetic oligonucleotide
agacggtctctacgctcgtagtagtttctgcttatattgttggggtctccatgctcgta

SEQ ID NO: 319475 - DNA, 60 bp, Artificial
  Synthetic oligonucleotide
agacggttggtatggataccaccatagcaacgagcaggggagtggatacgctgcagacaa

SEQ ID NO: 319476 - DNA, 54 bp, Artificial
  Synthetic oligonucleotide
agacggtttagatcgatctcgcctcaaaggatttcaaaagcgtccaaatgattt

SEQ ID NO: 319477 - DNA, 59 bp, Artificial
  Synthetic oligonucleotide
agacggtttgaggaccactgttactgcacttcaggattccgtctccattctgtctacaa

SEQ ID NO: 319478 - DNA, 60 bp, Artificial
  Synthetic oligonucleotide
agacggtttttgaggatcaaagagcaatcgatccgcttgacttttgtgcaatgatttcac

SEQ ID NO: 319479 - DNA, 55 bp, Artificial
  Synthetic oligonucleotide
agacgtaaagccgaacaattcggccacggtatcggggtgcatcccctcactggcc

SEQ ID NO: 319480 - DNA, 60 bp, Artificial
  Synthetic oligonucleotide
agacgtaatggtggcatccgatggaagacacctgagaccgacgaggctccttcacttgct

SEQ ID NO: 319481 - DNA, 60 bp, Artificial
  Synthetic oligonucleotide
agacgtaatggtggcattcggtggaagacacctgacaccgatgaggctccttcgctcgca

SEQ ID NO: 319482 - DNA, 51 bp, Artificial
  Synthetic oligonucleotide
agacgtaattactcttgatcgtcatggggtcaaaaggtctacagttcacaa

SEQ ID NO: 319483 - DNA, 60 bp, Artificial
  Synthetic oligonucleotide
agacgtacaatttgagctacctgtgcttcaggctgagtatgctatactggatggtcaggc

SEQ ID NO: 319484 - DNA, 50 bp, Artificial
  Synthetic oligonucleotide
agacgtagcacaatgaatgtccctacacttccacctggtgtggctcttag

SEQ ID NO: 319485 - DNA, 53 bp, Artificial
  Synthetic oligonucleotide
agacgtaggatcctcacttaccaccgcagatgagatgcgtgtgaggaatgtgc

SEQ ID NO: 319486 - DNA, 60 bp, Artificial
  Synthetic oligonucleotide
agacgtatcatagagttgactgtttgataaatgctcatattgccggttcgggttggctgt

SEQ ID NO: 319487 - DNA, 55 bp, Artificial
  Synthetic oligonucleotide
agacgtatcgaactgctccatcgtttcgtctgtgccgagaaccttaaccgcgtgg

SEQ ID NO: 319488 - DNA, 55 bp, Artificial
  Synthetic oligonucleotide
agacgtatgacttgtgataagtggtggcagcgtaagctcaacagggcgcgcgata

SEQ ID NO: 319489 - DNA, 54 bp, Artificial
  Synthetic oligonucleotide
agacgtatgtttacgaacttctgagtttcttgaaacgttccatccgccggcttg

SEQ ID NO: 319490 - DNA, 59 bp, Artificial
  Synthetic oligonucleotide
agacgtcactgttattagagtatgaaaaatctgtaggtacaaaacaagatgtgatggta

SEQ ID NO: 319491 - DNA, 55 bp, Artificial
  Synthetic oligonucleotide
agacgtcattaaccacttataataaatcgaattcatacgcttactcttattgtgt

SEQ ID NO: 319492 - DNA, 54 bp, Artificial
  Synthetic oligonucleotide
agacgtccgatgatgtaaacggagtagatacttaagtgtattccttcgttattt

SEQ ID NO: 319493 - DNA, 59 bp, Artificial
  Synthetic oligonucleotide
agacgtcgtgatttcgacaacggcgaatatataaatacagggtacagtgcatagagttc

SEQ ID NO: 319494 - DNA, 60 bp, Artificial
  Synthetic oligonucleotide
agacgtctctgcatggagtatgagatggactacggtgggtacaatatgctggatggagat

SEQ ID NO: 319495 - DNA, 54 bp, Artificial
  Synthetic oligonucleotide
agacgtgaaagttacccctggcactaaacataccgaggaacgcccaaaggtgca

SEQ ID NO: 319496 - DNA, 60 bp, Artificial
  Synthetic oligonucleotide
agacgtgacaaccgactacggtgcatataaaagagctgatcagcacagatttgaaggaga

SEQ ID NO: 319497 - DNA, 59 bp, Artificial
  Synthetic oligonucleotide
agacgtggacctagcagtccttataaggcccatgacgaatccaagatgacggcccaatg

SEQ ID NO: 319498 - DNA, 56 bp, Artificial
  Synthetic oligonucleotide
agacgtggactgtttagctcggcaagtcttaaaagagtgtcagaataccaacctcc

SEQ ID NO: 319499 - DNA, 53 bp, Artificial
  Synthetic oligonucleotide
agacgtggtattgcccgaccgactgtttcaggaaacacccggacacaacctac

SEQ ID NO: 319500 - DNA, 57 bp, Artificial
  Synthetic oligonucleotide
agacgtggtgttagtaatgaaacggaaacgggactctagcatacttactgacagcca

SEQ ID NO: 319501 - DNA, 57 bp, Artificial
  Synthetic oligonucleotide
agacgtgtgcgacaggtcatgacccgtaacactgacttccttacgcgggccccgcag

SEQ ID NO: 319502 - DNA, 53 bp, Artificial
  Synthetic oligonucleotide
agacgttaaaactcgacgacctagtgcaagtcgttaaactgactcgggtggat

SEQ ID NO: 319503 - DNA, 51 bp, Artificial
  Synthetic oligonucleotide
agacgttaaatatcccctccgcaccgacgatggaaacaccgtcccttggtt

SEQ ID NO: 319504 - DNA, 53 bp, Artificial
  Synthetic oligonucleotide
agacgttacactgtggcacaccgacaaacggctacatcgctacgcgcacacgc

SEQ ID NO: 319505 - DNA, 55 bp, Artificial
  Synthetic oligonucleotide
agacgttcaaggagatcgtccacatcgagagcgggacgggtcatccgtactgcca

SEQ ID NO: 319506 - DNA, 56 bp, Artificial
  Synthetic oligonucleotide
agacgttcggtgtgggctacacggtgggctacgatcgaaacatcaacctgtactcg

SEQ ID NO: 319507 - DNA, 50 bp, Artificial
  Synthetic oligonucleotide
agacgttctcgctatacgctcttcaaccttaagccaccgctccttaggag

SEQ ID NO: 319508 - DNA, 55 bp, Artificial
  Synthetic oligonucleotide
agacgttgagggttccactttgttgtctaataagcgttgtaatatgtggtctacg

SEQ ID NO: 319509 - DNA, 54 bp, Artificial
  Synthetic oligonucleotide
agacgttgatggtgataattcactggttttaatactttccgtaaagtataatcg

SEQ ID NO: 319510 - DNA, 60 bp, Artificial
  Synthetic oligonucleotide
agacgttgctctgtctagtcgcctcacttactcggattacttacactgagagaaggatct

SEQ ID NO: 319511 - DNA, 54 bp, Artificial
  Synthetic oligonucleotide
agacgttgttaagctgcttaaaggacggtgagcccgtaccttcggatgcgaaag

SEQ ID NO: 319512 - DNA, 60 bp, Artificial
  Synthetic oligonucleotide
agacgtttagacaatactacagaggctataaattacgagctagcgcgagcctcaactagc

SEQ ID NO: 319513 - DNA, 55 bp, Artificial
  Synthetic oligonucleotide
agacgtttcaattcctgggctatgtttaaggatctagatcatgactcgtgcaagg

SEQ ID NO: 319514 - DNA, 57 bp, Artificial
  Synthetic oligonucleotide
agacgtttcctcccacagatcttggccgagtgcgcacggagacgcttgcgcactctt

SEQ ID NO: 319515 - DNA, 57 bp, Artificial
  Synthetic oligonucleotide
agacgtttcgaacccatcgcccgttcagatttactcgaggcggctcctctgattgaa

SEQ ID NO: 319516 - DNA, 51 bp, Artificial
  Synthetic oligonucleotide
agacgtttggggttaaccaatccggcaccccaagaacctcctcagccccag

SEQ ID NO: 319517 - DNA, 53 bp, Artificial
  Synthetic oligonucleotide
agactaaatgaagtaataaggctctatttccggggtcaagtaccagtagccgt

SEQ ID NO: 319518 - DNA, 55 bp, Artificial
  Synthetic oligonucleotide
agactaacgagattcaagtcgcatgaaacttcagcgagtttaagttcgagaatga

SEQ ID NO: 319519 - DNA, 58 bp, Artificial
  Synthetic oligonucleotide
agactaagcttgacacgttagctagattaactaaaccgaattacattctgtcaaatca

SEQ ID NO: 319520 - DNA, 55 bp, Artificial
  Synthetic oligonucleotide
agactaagggatatatctgttccagctggtttctccaattttgaagggatgagga

SEQ ID NO: 319521 - DNA, 60 bp, Artificial
  Synthetic oligonucleotide
agactacacccttgatgaagagagcagagcaagaatcaagaccagactattcaccataag

SEQ ID NO: 319522 - DNA, 53 bp, Artificial
  Synthetic oligonucleotide
agactacactgctttcgattcgtcccaggaccacgtcattctggccttcgaga

SEQ ID NO: 319523 - DNA, 60 bp, Artificial
  Synthetic oligonucleotide
agactacagatttttgatgtacctcgagtgccagatgaccaaatgtacagattaagagat

SEQ ID NO: 319524 - DNA, 60 bp, Artificial
  Synthetic oligonucleotide
agactacatagtcacctacagcagaacgggaccctttgagatcagccacatgacctacct

SEQ ID NO: 319525 - DNA, 57 bp, Artificial
  Synthetic oligonucleotide
agactacatgggccctgtctaccatagagccccattagagttttttggtgaggccca

SEQ ID NO: 319526 - DNA, 56 bp, Artificial
  Synthetic oligonucleotide
agactaccagggaaggctttgtaatcccctgaacccattcgtcagtcataaggaga

SEQ ID NO: 319527 - DNA, 58 bp, Artificial
  Synthetic oligonucleotide
agactaccatgccgctgagacttcctttcgtaacgaagggaagcacgtgagatacgtc

SEQ ID NO: 319528 - DNA, 50 bp, Artificial
  Synthetic oligonucleotide
agactacccccttttagcgacctccggtcgcccaggtaggtaccgaacga

SEQ ID NO: 319529 - DNA, 60 bp, Artificial
  Synthetic oligonucleotide
agactaccgtgcgtgcctctctgctggtgttgcccgcactgacattaaatatttgaagat

SEQ ID NO: 319530 - DNA, 58 bp, Artificial
  Synthetic oligonucleotide
agactacctggaaaaacttaagccgcactacaagacagagctgcttaaggttgctcaa

SEQ ID NO: 319531 - DNA, 52 bp, Artificial
  Synthetic oligonucleotide
agactacgaacagttaggttctgacttgtgttccctggaagaccgttgtaag

SEQ ID NO: 319532 - DNA, 59 bp, Artificial
  Synthetic oligonucleotide
agactacggtgcaagtcaatgacctacagaagcgcgttgccgtgaggcgcacaaagagg

SEQ ID NO: 319533 - DNA, 54 bp, Artificial
  Synthetic oligonucleotide
agactacgtgtcacttaattctttacgatttagatttagtttagaagtactaga

SEQ ID NO: 319534 - DNA, 55 bp, Artificial
  Synthetic oligonucleotide
agactactacaagtgggtagacacatcgcagttaaacccgaagaagagaggtcct

SEQ ID NO: 319535 - DNA, 59 bp, Artificial
  Synthetic oligonucleotide
agactactactgcaacatgggggattggccttcttgcacatacacaggagtgacccagc

SEQ ID NO: 319536 - DNA, 60 bp, Artificial
  Synthetic oligonucleotide
agactactatcatagccacggccgacgctagaggtcttattcaatcttcccgcgcacatg

SEQ ID NO: 319537 - DNA, 56 bp, Artificial
  Synthetic oligonucleotide
agactactctcttgcttcggaaagcgtgtttaagctcttcacagatggtaatgcag

SEQ ID NO: 319538 - DNA, 53 bp, Artificial
  Synthetic oligonucleotide
agactactggaccggttggtcaggttaattggaaacccggatgtgagcgggcc

SEQ ID NO: 319539 - DNA, 60 bp, Artificial
  Synthetic oligonucleotide
agactactggcaatgggcctgcatcagcctactctgatccacatggatgatgagacccca

SEQ ID NO: 319540 - DNA, 58 bp, Artificial
  Synthetic oligonucleotide
agactactgtcgccgaatcggattcgttttaaatatgtcttacagtatcactactcca

SEQ ID NO: 319541 - DNA, 53 bp, Artificial
  Synthetic oligonucleotide
agactactttcctatccctccgttgattattagaccggctattagtttttgga

SEQ ID NO: 319542 - DNA, 55 bp, Artificial
  Synthetic oligonucleotide
agactacttttactgtttatcgtaagttggcagagcgggcttatcgaccatttgt

SEQ ID NO: 319543 - DNA, 59 bp, Artificial
  Synthetic oligonucleotide
agactagcgttcccaaatgttggcttgtcagcaatggctcttacttaaatgagacccat

SEQ ID NO: 319544 - DNA, 57 bp, Artificial
  Synthetic oligonucleotide
agactaggaaacatttgtgtatccccaacactttcctcaggttgtgattgaactgta

SEQ ID NO: 319545 - DNA, 51 bp, Artificial
  Synthetic oligonucleotide
agactaggggcaaacccggaaccaaccactgaatggatcgtcggaaagacg

SEQ ID NO: 319546 - DNA, 51 bp, Artificial
  Synthetic oligonucleotide
agactagggtgggaagccctcagatatctgtggaatcttctatcatactgg

SEQ ID NO: 319547 - DNA, 53 bp, Artificial
  Synthetic oligonucleotide
agactaggtgctggatggatgcgccacacgatccctattggaattactgtttt

SEQ ID NO: 319548 - DNA, 60 bp, Artificial
  Synthetic oligonucleotide
agactagtgatgcggacactacattccgtagtccacaagacgtcgtgccacttgtgcgtt

SEQ ID NO: 319549 - DNA, 57 bp, Artificial
  Synthetic oligonucleotide
agactataatccctaacattggatctagaccctgggtaaggggtcaatctggcagaa

SEQ ID NO: 319550 - DNA, 52 bp, Artificial
  Synthetic oligonucleotide
agactatcagggaagactttgtaaccccctgaacccatttgtcagccacaag

SEQ ID NO: 319551 - DNA, 60 bp, Artificial
  Synthetic oligonucleotide
agactatcgaagaggccttcaattggctagacaggacgatagaagccataaacagagagg

SEQ ID NO: 319552 - DNA, 60 bp, Artificial
  Synthetic oligonucleotide
agactatcgcaacagtggaatacccaaagcgtgacaccatgcagctctggaacagaggac

SEQ ID NO: 319553 - DNA, 53 bp, Artificial
  Synthetic oligonucleotide
agactatcttatcaaaccaggggccattcaaagggtttaatgaagtttctacg

SEQ ID NO: 319554 - DNA, 60 bp, Artificial
  Synthetic oligonucleotide
agactatgtccaggggttcatgagttatgcagtgtcttattacagagagatactcatcat

SEQ ID NO: 319555 - DNA, 57 bp, Artificial
  Synthetic oligonucleotide
agactatgttttgtttgctatactaggcataaacatggtcttttatatttcgtccca

SEQ ID NO: 319556 - DNA, 59 bp, Artificial
  Synthetic oligonucleotide
agactattcaccataagacaagaaatggccagtagaggcctctgggattcctttcgtca

SEQ ID NO: 319557 - DNA, 58 bp, Artificial
  Synthetic oligonucleotide
agactattggcaggccacctggattcctgattgggaatttgtcaatacccctcctcta

SEQ ID NO: 319558 - DNA, 52 bp, Artificial
  Synthetic oligonucleotide
agactcaagaagccttcttatgtcatccgagccttggcaactaaggaccatc

SEQ ID NO: 319559 - DNA, 53 bp, Artificial
  Synthetic oligonucleotide
agactcaaggtcgggatacgaaatgctgaaagtcccgaatgcggaaacagaca

SEQ ID NO: 319560 - DNA, 60 bp, Artificial
  Synthetic oligonucleotide
agactcactccaatcccggctgcgtctcagctggacttgtccagctggttcgttgccggc

SEQ ID NO: 319561 - DNA, 60 bp, Artificial
  Synthetic oligonucleotide
agactcagagctatgttccttaggttcttaggagcagcaggaagcactataggcgcggcg

SEQ ID NO: 319562 - DNA, 54 bp, Artificial
  Synthetic oligonucleotide
agactcagagggcggagccttccgtaccgtagtgggccagatggtaaccgacgc

SEQ ID NO: 319563 - DNA, 60 bp, Artificial
  Synthetic oligonucleotide
agactcagggattataacatcagatgctccagttcacaattgcgacacaaggtgccagac

SEQ ID NO: 319564 - DNA, 58 bp, Artificial
  Synthetic oligonucleotide
agactcaggggacccaacaccgcctgactccatcaagtccccacaggcaccatgggta

SEQ ID NO: 319565 - DNA, 58 bp, Artificial
  Synthetic oligonucleotide
agactcatatagggtgacaaatcagaccagctgccacctgtagtgtcacccgtttttt

SEQ ID NO: 319566 - DNA, 60 bp, Artificial
  Synthetic oligonucleotide
agactcatattaaatttagaacagatgttaaacagatcacaacagttggtccatctgatc

SEQ ID NO: 319567 - DNA, 58 bp, Artificial
  Synthetic oligonucleotide
agactcatcctctttaccagaatccggagccggccgtgcctgtgataaagactcctcc

SEQ ID NO: 319568 - DNA, 55 bp, Artificial
  Synthetic oligonucleotide
agactcatcgcattcgcgtcccggggcaaccacgtctcaccgacgcactacgttc

SEQ ID NO: 319569 - DNA, 60 bp, Artificial
  Synthetic oligonucleotide
agactcatgaagcgtaaacaccacaacttcagttctcataatcaatctcatgttatcgag

SEQ ID NO: 319570 - DNA, 54 bp, Artificial
  Synthetic oligonucleotide
agactccaacaaggtgcgagtgggagcattcgggccaaggttcactcctcccca

SEQ ID NO: 319571 - DNA, 56 bp, Artificial
  Synthetic oligonucleotide
agactccacaagatattggagcactattttagtcggaggatgcggcgttttaacgt

SEQ ID NO: 319572 - DNA, 57 bp, Artificial
  Synthetic oligonucleotide
agactcccgcattagtaagtatatttctagcattgcttcctcccgccatgtgtatgg

SEQ ID NO: 319573 - DNA, 60 bp, Artificial
  Synthetic oligonucleotide
agactccgaacagatagctttctcctctcgtgacgcttcgttcgacatgcgtttctctaa

SEQ ID NO: 319574 - DNA, 56 bp, Artificial
  Synthetic oligonucleotide
agactcctcactaaggtcgtcatagagtaccttactttttgaagtggacaagagtc

SEQ ID NO: 319575 - DNA, 60 bp, Artificial
  Synthetic oligonucleotide
agactcctccgctaagtgtctcagccgtgttgtggcaggtgtggctgacactaccagcct

SEQ ID NO: 319576 - DNA, 55 bp, Artificial
  Synthetic oligonucleotide
agactcctgcggagcagcgagaggcgagtcgaggggcaattcgggcaagggccac

SEQ ID NO: 319577 - DNA, 57 bp, Artificial
  Synthetic oligonucleotide
agactcctggtgtctttagaactacaggaactgacggattcagtgtacaattagctt

SEQ ID NO: 319578 - DNA, 54 bp, Artificial
  Synthetic oligonucleotide
agactccttcaaaggtgccgcgactcccgtgggtacggccaagttggtacaggc

SEQ ID NO: 319579 - DNA, 58 bp, Artificial
  Synthetic oligonucleotide
agactccttcataagggacctcggaaaagctgcaacatcagccgacccagaggcggac

SEQ ID NO: 319580 - DNA, 50 bp, Artificial
  Synthetic oligonucleotide
agactcgcccatccctgcgatgattacacaccacctgccgccctgctaca

SEQ ID NO: 319581 - DNA, 60 bp, Artificial
  Synthetic oligonucleotide
agactcgcgctctatcggcaccatatctgtttggagctccaatcaatatgctcgccccag

SEQ ID NO: 319582 - DNA, 55 bp, Artificial
  Synthetic oligonucleotide
agactcgctccgatccagttctcgaaagattgcaagcctctggggccatgggtct

SEQ ID NO: 319583 - DNA, 59 bp, Artificial
  Synthetic oligonucleotide
agactcggacgcttacgagaagctatattccgaaacgatctctaagcacgtctctgacg

SEQ ID NO: 319584 - DNA, 60 bp, Artificial
  Synthetic oligonucleotide
agactctaacgacggaaaaattgcaattgacttcagtcacatcgttgtgtatgcttattg

SEQ ID NO: 319585 - DNA, 54 bp, Artificial
  Synthetic oligonucleotide
agactctaaggttcaacgagtcctgaagttgggggtggatgagggtcaataccc

SEQ ID NO: 319586 - DNA, 57 bp, Artificial
  Synthetic oligonucleotide
agactctaatacaacgacacggtacacttctgtctaaatcagacgaaattacgttga

SEQ ID NO: 319587 - DNA, 57 bp, Artificial
  Synthetic oligonucleotide
agactctactcaccgctgtttattaagtatttaccaaagtgctctatccgttcgata

SEQ ID NO: 319588 - DNA, 60 bp, Artificial
  Synthetic oligonucleotide
agactctagttctaccttacaacagattatctgagctttcaggtccatcagctgtagttc

SEQ ID NO: 319589 - DNA, 50 bp, Artificial
  Synthetic oligonucleotide
agactctatctctacggatatactgttgaggcatcacctccaacaaataa

SEQ ID NO: 319590 - DNA, 60 bp, Artificial
  Synthetic oligonucleotide
agactctattagctgatatcgttccgaggaatgctattgctgctcagaaattgacaatgc

SEQ ID NO: 319591 - DNA, 50 bp, Artificial
  Synthetic oligonucleotide
agactctcatagcccaggcagaaacccaaggtataacaggctataacccc

SEQ ID NO: 319592 - DNA, 60 bp, Artificial
  Synthetic oligonucleotide
agactctccggacgaacaccaaacttcaccattacagatcatggtgaccactggcacatc

SEQ ID NO: 319593 - DNA, 60 bp, Artificial
  Synthetic oligonucleotide
agactctcctgggtctagtactgttgtcccgagcctgctcaggtgtctgtatggatgcag

SEQ ID NO: 319594 - DNA, 53 bp, Artificial
  Synthetic oligonucleotide
agactctcgtggacatcaaagttagggaaatttctaaccaggaaccacttaag

SEQ ID NO: 319595 - DNA, 60 bp, Artificial
  Synthetic oligonucleotide
agactctgaggttaagtatcctgtgaagtttggaagttcgttatgcgatacagcatcgat

SEQ ID NO: 319596 - DNA, 60 bp, Artificial
  Synthetic oligonucleotide
agactctgcagcatgcaggtactccaaccgcggtacaggtgtgatgtggctggtgtacga

SEQ ID NO: 319597 - DNA, 55 bp, Artificial
  Synthetic oligonucleotide
agactctgccataagaaaagccatactaggagaaatagttagacctaggtgtgag

SEQ ID NO: 319598 - DNA, 53 bp, Artificial
  Synthetic oligonucleotide
agactctgccataaggagagccatcttaggacaagtagttagatataggtgtg

SEQ ID NO: 319599 - DNA, 54 bp, Artificial
  Synthetic oligonucleotide
agactctgtaaccccggatggggaagtcaagtaagggatgttgaactgtgaaag

SEQ ID NO: 319600 - DNA, 55 bp, Artificial
  Synthetic oligonucleotide
agactcttccgtggctagaagagcctttaaactgccagcgggcggcagggttgcg

SEQ ID NO: 319601 - DNA, 53 bp, Artificial
  Synthetic oligonucleotide
agactcttcttccaagattatcgattctgtagtgctgtccatatatccatccc

SEQ ID NO: 319602 - DNA, 50 bp, Artificial
  Synthetic oligonucleotide
agactctttccgacgagggtgttcaaaagtgtggtacatgaagagatccg

SEQ ID NO: 319603 - DNA, 51 bp, Artificial
  Synthetic oligonucleotide
agactgaaccgaatcgatcaaagagctttattaagttaaaacgtttacgtt

SEQ ID NO: 319604 - DNA, 55 bp, Artificial
  Synthetic oligonucleotide
agactgaatattgttcccaagtaagatctctattccttcaaagtcagcaacgtcg

SEQ ID NO: 319605 - DNA, 57 bp, Artificial
  Synthetic oligonucleotide
agactgacactaatatgcccctacaccgaccccatgttattcaaaccccaggatcca

SEQ ID NO: 319606 - DNA, 54 bp, Artificial
  Synthetic oligonucleotide
agactgactccacgatcggtctactagcgggtgttagtaacactcattttgctt

SEQ ID NO: 319607 - DNA, 57 bp, Artificial
  Synthetic oligonucleotide
agactgactgtcgacttgtgagtttgtcatggaacaaagacgaggaaggaaatttcg

SEQ ID NO: 319608 - DNA, 55 bp, Artificial
  Synthetic oligonucleotide
agactgagaataagactgagatcttcaggcctggaggaggagatatgagggacaa

SEQ ID NO: 319609 - DNA, 58 bp, Artificial
  Synthetic oligonucleotide
agactgagaatggctgttggtatggaatggaaattcgacctacgcggcacgacgaaaa

SEQ ID NO: 319610 - DNA, 52 bp, Artificial
  Synthetic oligonucleotide
agactgagacctgagtctagtcaagcaattcaggcacagatagtgatctgag

SEQ ID NO: 319611 - DNA, 55 bp, Artificial
  Synthetic oligonucleotide
agactgagcacacccgctaccctctcttctgcggctattacctgactcctcaggg

SEQ ID NO: 319612 - DNA, 55 bp, Artificial
  Synthetic oligonucleotide
agactgagctacggaaccccgttagcgttgcctgcacctgctgccagtgcccaag

SEQ ID NO: 319613 - DNA, 58 bp, Artificial
  Synthetic oligonucleotide
agactgatacagcggaaataagattgatgtgcacagagacttatttggacacccccag

SEQ ID NO: 319614 - DNA, 55 bp, Artificial
  Synthetic oligonucleotide
agactgcaagaatgaagacaccacaaagtgcattgaggtggagctccaaccacca

SEQ ID NO: 319615 - DNA, 51 bp, Artificial
  Synthetic oligonucleotide
agactgcaccttacccgttgctaagtttagtctggctaggatagtgtctag

SEQ ID NO: 319616 - DNA, 58 bp, Artificial
  Synthetic oligonucleotide
agactgcaggcattctattgatcggttgcccctcaacaaagcccctgctaaccgtagg

SEQ ID NO: 319617 - DNA, 55 bp, Artificial
  Synthetic oligonucleotide
agactgcatgtggcagtcttgaaacgtgtggtttgacgtctatccgttatggcag

SEQ ID NO: 319618 - DNA, 60 bp, Artificial
  Synthetic oligonucleotide
agactgcctggagactattgtgtacgctgctattactgtggctgcgtgttgtcagacagt

SEQ ID NO: 319619 - DNA, 51 bp, Artificial
  Synthetic oligonucleotide
agactgcgagacctatgaggctataaaacgacgctacacatatatacaagt

SEQ ID NO: 319620 - DNA, 60 bp, Artificial
  Synthetic oligonucleotide
agactgcgatgtggaatcacagaatatagtcgccgtccaagtttatgatatgagcctgaa

SEQ ID NO: 319621 - DNA, 60 bp, Artificial
  Synthetic oligonucleotide
agactgcgggagcgaggctggttgtgctcgctaccgctacccctccgggctctatcactg

SEQ ID NO: 319622 - DNA, 55 bp, Artificial
  Synthetic oligonucleotide
agactgctaacgcggttgaaaacagctgatccgttatccgcttgtgtacttcgag

SEQ ID NO: 319623 - DNA, 55 bp, Artificial
  Synthetic oligonucleotide
agactgctctctttgattcagccgtcaaccacccccccaccccggtctcctatcc

SEQ ID NO: 319624 - DNA, 60 bp, Artificial
  Synthetic oligonucleotide
agactgctgacctcctcttgcagatctgccgtcgacttggaattgtccccattcgattgt

SEQ ID NO: 319625 - DNA, 59 bp, Artificial
  Synthetic oligonucleotide
agactggaatttcctaacatcttttgcagttgaaaatgagttagatgatcctcttgtaa

SEQ ID NO: 319626 - DNA, 60 bp, Artificial
  Synthetic oligonucleotide
agactggacaggcccgataggcgaaatcagagttttgaaagatacaacgagctctatcgc

SEQ ID NO: 319627 - DNA, 60 bp, Artificial
  Synthetic oligonucleotide
agactggagcaccccaactcaacccgattgatggaccactacctgaggacaatgagccaa

SEQ ID NO: 319628 - DNA, 53 bp, Artificial
  Synthetic oligonucleotide
agactggagtaaaactgttcgcaagttgaccaaattcggaaataaggttattg

SEQ ID NO: 319629 - DNA, 55 bp, Artificial
  Synthetic oligonucleotide
agactggatgatggtataacccagatgacatttacccctgcatctctctacagag

SEQ ID NO: 319630 - DNA, 55 bp, Artificial
  Synthetic oligonucleotide
agactgggagactcggtagttacgaaaggaggatgaagtggtccctacgcactaa

SEQ ID NO: 319631 - DNA, 58 bp, Artificial
  Synthetic oligonucleotide
agactgggctacaaggctgcacatttgtcctccaggtggacctaggccttacggactg

SEQ ID NO: 319632 - DNA, 60 bp, Artificial
  Synthetic oligonucleotide
agactgggtcgcagagcctccatacgcacgcgtagtggagcacaggtgggagctcaagta

SEQ ID NO: 319633 - DNA, 60 bp, Artificial
  Synthetic oligonucleotide
agactgggtgctgttcagaatgaaatcaccctgacgcacccagtcaccaaatacatcatg

SEQ ID NO: 319634 - DNA, 57 bp, Artificial
  Synthetic oligonucleotide
agactggtatactattggagtgtatgtaatagggtttacactgcctattattttgaa

SEQ ID NO: 319635 - DNA, 57 bp, Artificial
  Synthetic oligonucleotide
agactggtattaagggaccaatcggcattgctttcccatttggacacgaaattgtgc

SEQ ID NO: 319636 - DNA, 53 bp, Artificial
  Synthetic oligonucleotide
agactggtccacgcggaggttcgataccgtttgtactgttagaaacttgggaa

SEQ ID NO: 319637 - DNA, 60 bp, Artificial
  Synthetic oligonucleotide
agactggtctgctatcatggcgaaacccgagctggtgttcacttacgcgatgcaggtgtc

SEQ ID NO: 319638 - DNA, 57 bp, Artificial
  Synthetic oligonucleotide
agactggttaccgttacgtggacgacaccacctgtaatagagatggagtggcaataa

SEQ ID NO: 319639 - DNA, 57 bp, Artificial
  Synthetic oligonucleotide
agactggttagattgcctttgaaagattgacccctgtaaagcttattgaatttgaca

SEQ ID NO: 319640 - DNA, 60 bp, Artificial
  Synthetic oligonucleotide
agactgtaaaacctctggacgtactgcgcacgtacacgagtccacaaaacactcatgcaa

SEQ ID NO: 319641 - DNA, 58 bp, Artificial
  Synthetic oligonucleotide
agactgtaagagaggctagtctggagagctccggctaacaggctgcccctcaggtaga

SEQ ID NO: 319642 - DNA, 60 bp, Artificial
  Synthetic oligonucleotide
agactgtaagagcggctagtctggaaagcttaagctgacaggctgcccctcaggtagaat

SEQ ID NO: 319643 - DNA, 58 bp, Artificial
  Synthetic oligonucleotide
agactgtcatcttttactacttaccaaatgcacgatatgaccgtcacatgtttaaagg

SEQ ID NO: 319644 - DNA, 56 bp, Artificial
  Synthetic oligonucleotide
agactgtcgaggcgtatgtgaacggtgaccatgccgtaacgattgccgggacgaag

SEQ ID NO: 319645 - DNA, 60 bp, Artificial
  Synthetic oligonucleotide
agactgtgacgttatcattctagaccacatatcaatcgtagtgtcagcctcagaggaatc

SEQ ID NO: 319646 - DNA, 55 bp, Artificial
  Synthetic oligonucleotide
agactgtgcgcgtcgggatctgagcagtggctgaacgttaggtgtcccagtagtg

SEQ ID NO: 319647 - DNA, 57 bp, Artificial
  Synthetic oligonucleotide
agactgtgtcaaagacagtgatgaaatcatccaagcatggattggttacattgcaaa

SEQ ID NO: 319648 - DNA, 57 bp, Artificial
  Synthetic oligonucleotide
agactgtgtgattgactttgggctcaaagttgtagcagttttagatacagataatcg

SEQ ID NO: 319649 - DNA, 54 bp, Artificial
  Synthetic oligonucleotide
agactgttacacggctaaatttatactacggtttgcgattcaacgcgaaaacta

SEQ ID NO: 319650 - DNA, 57 bp, Artificial
  Synthetic oligonucleotide
agactgttcaacacaactagcacaagagagtcaaacaaaaccatcacactcccatgc

SEQ ID NO: 319651 - DNA, 51 bp, Artificial
  Synthetic oligonucleotide
agactgttcaagaacagattaacgcaggccaaatcgagatatcagactttt

SEQ ID NO: 319652 - DNA, 60 bp, Artificial
  Synthetic oligonucleotide
agactgttccggaatgatactttaagccacctcgctgatgttcacatgtacgtgttggat

SEQ ID NO: 319653 - DNA, 54 bp, Artificial
  Synthetic oligonucleotide
agactgttgaccacaaggttgtccgcgtcatcacgagtggcagtgagtataaga

SEQ ID NO: 319654 - DNA, 59 bp, Artificial
  Synthetic oligonucleotide
agactgttggacgagtatggcgagaattcttggctatcccccgacgcatcagacagggg

SEQ ID NO: 319655 - DNA, 55 bp, Artificial
  Synthetic oligonucleotide
agacttaaatgatctggcggtcctatcatattccaggaattaacctggtttaggg

SEQ ID NO: 319656 - DNA, 55 bp, Artificial
  Synthetic oligonucleotide
agacttaacaagtctctgaggcgcctttgaaaccatctcctaggtttcttcggaa

SEQ ID NO: 319657 - DNA, 57 bp, Artificial
  Synthetic oligonucleotide
agacttaatgcatttttagtcttccagatgagccatgatataggaaatgcgatcatg

SEQ ID NO: 319658 - DNA, 55 bp, Artificial
  Synthetic oligonucleotide
agacttagaaaggggtttgagatggtttgggatcctaatggatggacagataccg

SEQ ID NO: 319659 - DNA, 55 bp, Artificial
  Synthetic oligonucleotide
agacttagctccctgaatgttcggatggaaatgtgttgacctacttggggagacc

SEQ ID NO: 319660 - DNA, 55 bp, Artificial
  Synthetic oligonucleotide
agacttagttctaaggagctagaactagataggattcgaatggagtctatactag

SEQ ID NO: 319661 - DNA, 58 bp, Artificial
  Synthetic oligonucleotide
agacttattgaggctggtatacccgcccccacgcatcccacgcatggcgggtttgaca

SEQ ID NO: 319662 - DNA, 60 bp, Artificial
  Synthetic oligonucleotide
agacttcaaggcccaaatggtgacactggcgaaccagctcaagattgatcttaaagtgaa

SEQ ID NO: 319663 - DNA, 60 bp, Artificial
  Synthetic oligonucleotide
agacttcatcaacgcgctgacaacaggaaagggaacttcaacgagcttatgcatgtgcca

SEQ ID NO: 319664 - DNA, 54 bp, Artificial
  Synthetic oligonucleotide
agacttcatctagctgctcaacttcaccactcttaccacctccctgcttatcct

SEQ ID NO: 319665 - DNA, 51 bp, Artificial
  Synthetic oligonucleotide
agacttcattgaaggtaagtctgtctcctgcctctcaggatttgaggtcga

SEQ ID NO: 319666 - DNA, 57 bp, Artificial
  Synthetic oligonucleotide
agacttcgtaggcgcgttatgaaacgagtagaccccaccatgcacgagagtccccaa

SEQ ID NO: 319667 - DNA, 57 bp, Artificial
  Synthetic oligonucleotide
agacttctaatctctcaggggtagattgtactctttagattgttagatttaaattga

SEQ ID NO: 319668 - DNA, 53 bp, Artificial
  Synthetic oligonucleotide
agacttcttcgaagttcaattagggataccacatcccgcagggttaaaaagga

SEQ ID NO: 319669 - DNA, 60 bp, Artificial
  Synthetic oligonucleotide
agacttgaaccacacaaatgggagaagtactgtgttcttgagataggagatatgctttta

SEQ ID NO: 319670 - DNA, 54 bp, Artificial
  Synthetic oligonucleotide
agacttgaagatgtgtttgtagggaagaacaccgatcttgaggcactcatggaa

SEQ ID NO: 319671 - DNA, 60 bp, Artificial
  Synthetic oligonucleotide
agacttgacactatcggatgactgggtgcccattcgtgatcatacaggtatgttcgaaat

SEQ ID NO: 319672 - DNA, 59 bp, Artificial
  Synthetic oligonucleotide
agacttgacgtcggaactggatttagctccctgaatgtttggatggaaatgtgctgccc

SEQ ID NO: 319673 - DNA, 59 bp, Artificial
  Synthetic oligonucleotide
agacttgcatgacgcgaatgtgaagaacctgtatgaaagagtcaggtcacagctacggg

SEQ ID NO: 319674 - DNA, 59 bp, Artificial
  Synthetic oligonucleotide
agacttgcattcagtgttttcactaccagatgatatgtttaatgcgttactccccgatt

SEQ ID NO: 319675 - DNA, 55 bp, Artificial
  Synthetic oligonucleotide
agacttgcgtcccaacatgtaccacccaaccggtgaccctggccttgtacctaca

SEQ ID NO: 319676 - DNA, 50 bp, Artificial
  Synthetic oligonucleotide
agacttgctgaccagtaaaggtagacaatttgcctaggatccactgtgcg

SEQ ID NO: 319677 - DNA, 60 bp, Artificial
  Synthetic oligonucleotide
agacttggccagctagttgatttaactagattgctagcttacaattatgaaacgctaatg

SEQ ID NO: 319678 - DNA, 60 bp, Artificial
  Synthetic oligonucleotide
agacttggcgcgcaggatgctacggatttaaactacacacctaacatatcagcgagcgac

SEQ ID NO: 319679 - DNA, 60 bp, Artificial
  Synthetic oligonucleotide
agacttgtcaggtggcaacaatggctatccagatacagtttcaaggttgagcacattaca

SEQ ID NO: 319680 - DNA, 53 bp, Artificial
  Synthetic oligonucleotide
agacttgtctgggctctccgcggtgtagaggtgtcacgggggcagcctctggg

SEQ ID NO: 319681 - DNA, 54 bp, Artificial
  Synthetic oligonucleotide
agactttacccaaccgaaacaggtcatatattaagttgaaacgcttgcgtttca

SEQ ID NO: 319682 - DNA, 55 bp, Artificial
  Synthetic oligonucleotide
agactttagatatagtatgcttttacccgaattttcaatgggaacgcgaaatgcg

SEQ ID NO: 319683 - DNA, 55 bp, Artificial
  Synthetic oligonucleotide
agactttagtgggtcacagttagtagttggtgggcgccgttctacttccacatat

SEQ ID NO: 319684 - DNA, 60 bp, Artificial
  Synthetic oligonucleotide
agactttatcattatgtcacaataacaacatgcggtatgatcatggaccgtgcgtccatg

SEQ ID NO: 319685 - DNA, 59 bp, Artificial
  Synthetic oligonucleotide
agactttccaaccggggagatggttcatgcgtgccgctcaagcagtaactgcggtagtg

SEQ ID NO: 319686 - DNA, 57 bp, Artificial
  Synthetic oligonucleotide
agactttccaatcgctatacacggagaaagagggtacgccgagacgtctggatccta

SEQ ID NO: 319687 - DNA, 55 bp, Artificial
  Synthetic oligonucleotide
agactttcgcgatgcgaacttcaaagaggccatatctagatcctccgtggccgca

SEQ ID NO: 319688 - DNA, 60 bp, Artificial
  Synthetic oligonucleotide
agactttctttgtgagcggagactactccgcagcgactgattgcctgtctcccgtcctat

SEQ ID NO: 319689 - DNA, 60 bp, Artificial
  Synthetic oligonucleotide
agactttgccgccctgctcacatcttagatgtcaagcacggatatccttacaagtggaac

SEQ ID NO: 319690 - DNA, 54 bp, Artificial
  Synthetic oligonucleotide
agactttggttgggaaggagtacagttattgttaatacactcttgggtcgctgt

SEQ ID NO: 319691 - DNA, 60 bp, Artificial
  Synthetic oligonucleotide
agactttgtagaggtgtctgcgaaattgttagtctcttgcactcgacgtgtggtctcagg

SEQ ID NO: 319692 - DNA, 55 bp, Artificial
  Synthetic oligonucleotide
agacttttaagagtctgtcattatattggaatgtgactagtcgacttttttcctt

SEQ ID NO: 319693 - DNA, 55 bp, Artificial
  Synthetic oligonucleotide
agacttttcccttcaattagctcctttactttggctgcgctgaaaggaaacttga

SEQ ID NO: 319694 - DNA, 57 bp, Artificial
  Synthetic oligonucleotide
agacttttcgatgtgcaccgaaacgtcgacacagtcgtgaacgtgaacctccaccgc

SEQ ID NO: 319695 - DNA, 55 bp, Artificial
  Synthetic oligonucleotide
agacttttggcagactactcagggtatgcatgaaattgctgaatccttaagagct

SEQ ID NO: 319696 - DNA, 58 bp, Artificial
  Synthetic oligonucleotide
agagaaaaatcgaggcaactcctgttatgattataagagaagagatagatcccaaaaa

SEQ ID NO: 319697 - DNA, 59 bp, Artificial
  Synthetic oligonucleotide
agagaaaacatacaactgcctgaagtcgggcccgacttctattccagaatatggtgaga

SEQ ID NO: 319698 - DNA, 58 bp, Artificial
  Synthetic oligonucleotide
agagaaaattcaatcataagttattttgaacaagaaatgcttcacgatcccaacttga

SEQ ID NO: 319699 - DNA, 57 bp, Artificial
  Synthetic oligonucleotide
agagaaacatccggagttttacaaggactgctgacatcgagatttctacaagggact

SEQ ID NO: 319700 - DNA, 57 bp, Artificial
  Synthetic oligonucleotide
agagaaacatctctatcgcagaagacacaatatgtgaatctgtgtctacccttgatt

SEQ ID NO: 319701 - DNA, 50 bp, Artificial
  Synthetic oligonucleotide
agagaaacatggcgttgcaagtcacttataacgtggtatgaagtccaaaa

SEQ ID NO: 319702 - DNA, 60 bp, Artificial
  Synthetic oligonucleotide
agagaaacgctagtactgtgaagaccgagtacggtgagttcacaatgcttgggatctatg

SEQ ID NO: 319703 - DNA, 60 bp, Artificial
  Synthetic oligonucleotide
agagaaactccagcacagtgaagactgagtatggtgagtttacaatgttgggcatctacg

SEQ ID NO: 319704 - DNA, 60 bp, Artificial
  Synthetic oligonucleotide
agagaaagagatctgttcgaaagtagtagactacagaagttggtcaaagccgcaatgtca

SEQ ID NO: 319705 - DNA, 59 bp, Artificial
  Synthetic oligonucleotide
agagaaagccggaacccaggaaatgctgagattgaagatctcacttttctggcacggtc

SEQ ID NO: 319706 - DNA, 59 bp, Artificial
  Synthetic oligonucleotide
agagaaagctgtggtatggtgcctcaacactaacaaacgtgctgagaagcgggtaagat

SEQ ID NO: 319707 - DNA, 60 bp, Artificial
  Synthetic oligonucleotide
agagaaagtagactttgaggattgcaaagatgttagcgatctaaggcaatatgacagtga

SEQ ID NO: 319708 - DNA, 56 bp, Artificial
  Synthetic oligonucleotide
agagaaagtcggaacccaggaaatgctgaaatcgaagatcttattttcctagcacg

SEQ ID NO: 319709 - DNA, 59 bp, Artificial
  Synthetic oligonucleotide
agagaaatatggaattgctactaatccattcgcagtgaaagtacactcccatggggcgg

SEQ ID NO: 319710 - DNA, 55 bp, Artificial
  Synthetic oligonucleotide
agagaaatcacctccagaggaccccttcagcgaacaaaagagactttccggaata

SEQ ID NO: 319711 - DNA, 55 bp, Artificial
  Synthetic oligonucleotide
agagaaattatgagaagccatatatgccgaggtacggtattcaacggaacctcac

SEQ ID NO: 319712 - DNA, 59 bp, Artificial
  Synthetic oligonucleotide
agagaaattgccccgtactgaagtgcggggcattcttaacataatgtgtacataagtga

SEQ ID NO: 319713 - DNA, 55 bp, Artificial
  Synthetic oligonucleotide
agagaaccaaccgaacccgaattgaaggtcagtcttaaacataggtctctcaatg

SEQ ID NO: 319714 - DNA, 60 bp, Artificial
  Synthetic oligonucleotide
agagaaccaagaggtagtgacatagcaggaactactagtacacttcaggaacaaatagca

SEQ ID NO: 319715 - DNA, 57 bp, Artificial
  Synthetic oligonucleotide
agagaaccaaggggaagtgacatagcaggaactactagtacccttgcggagcaaata

SEQ ID NO: 319716 - DNA, 53 bp, Artificial
  Synthetic oligonucleotide
agagaaccggtgtcgttaacattggccctattgttgggtggactaaccatggg

SEQ ID NO: 319717 - DNA, 58 bp, Artificial
  Synthetic oligonucleotide
agagaacctaaaatgcatgagtttagtagatcatttctaaaaaaatgcactgaccacg

SEQ ID NO: 319718 - DNA, 51 bp, Artificial
  Synthetic oligonucleotide
agagaacctcgtggtactcaacgcatcatccctggccgggacgcacggtct

SEQ ID NO: 319719 - DNA, 60 bp, Artificial
  Synthetic oligonucleotide
agagaacgtttcgatgtgttacaagatcaactaatgaacatttatgaagttgctagtgat

SEQ ID NO: 319720 - DNA, 57 bp, Artificial
  Synthetic oligonucleotide
agagaactactgttgtgtcaggctctctgaacaagatgtccaacggtaggagtcttc

SEQ ID NO: 319721 - DNA, 57 bp, Artificial
  Synthetic oligonucleotide
agagaactagcaaagatgcctttactaagattaggagtaagctttatagacttaaca

SEQ ID NO: 319722 - DNA, 58 bp, Artificial
  Synthetic oligonucleotide
agagaactctcccggggcacaaggcgagtgatgacgtgaactccgagcctgccaaact

SEQ ID NO: 319723 - DNA, 54 bp, Artificial
  Synthetic oligonucleotide
agagaactctctgccaagcccatccagagagttgagccttgcacaacttgtata

SEQ ID NO: 319724 - DNA, 59 bp, Artificial
  Synthetic oligonucleotide
agagaactcttagagaaaggtctagatcgtgaaacattccttgatcttatagaccgcat

SEQ ID NO: 319725 - DNA, 60 bp, Artificial
  Synthetic oligonucleotide
agagaactgatcctgtacgacaaagaggaaatcaggagaatctggcaccaagcgaataat

SEQ ID NO: 319726 - DNA, 60 bp, Artificial
  Synthetic oligonucleotide
agagaactgatcctgtatgataaagaagagatcagaaggatttggcgtcaagcgaatagt

SEQ ID NO: 319727 - DNA, 55 bp, Artificial
  Synthetic oligonucleotide
agagaactggttaacattctcccaagaaaggacaagcaggtggggttgtgaagaa

SEQ ID NO: 319728 - DNA, 59 bp, Artificial
  Synthetic oligonucleotide
agagaagaacgccctcacgtattcgccaataaagataaggacggtgaggacatgatcac

SEQ ID NO: 319729 - DNA, 60 bp, Artificial
  Synthetic oligonucleotide
agagaagaagcaatgcaaaataggatacagattgacccagtcaaactgagcagcggctac

SEQ ID NO: 319730 - DNA, 58 bp, Artificial
  Synthetic oligonucleotide
agagaagacaggttactgatcttcgctaactcagggcgggagccgaaggtgagtgaaa

SEQ ID NO: 319731 - DNA, 58 bp, Artificial
  Synthetic oligonucleotide
agagaagaccagtccagccaatgacctctgttacccaggggatttcaacgactatgaa

SEQ ID NO: 319732 - DNA, 55 bp, Artificial
  Synthetic oligonucleotide
agagaagactatttatccagaagacctctgtctaagcaagacgtggaggagcttg

SEQ ID NO: 319733 - DNA, 55 bp, Artificial
  Synthetic oligonucleotide
agagaagaggcactcctgaacagactcaacattaatccggtgaaactctcttctg

SEQ ID NO: 319734 - DNA, 54 bp, Artificial
  Synthetic oligonucleotide
agagaagatcgtcctttgttcattagcgattctattggcggtattttttatcgt

SEQ ID NO: 319735 - DNA, 60 bp, Artificial
  Synthetic oligonucleotide
agagaagcaatcgcaaccctgcaatacgggtccggcagctactcaggacaactcaacagg

SEQ ID NO: 319736 - DNA, 60 bp, Artificial
  Synthetic oligonucleotide
agagaagccacagtccctactacatgctgaaccgggatcgaacactgaaaaatatcattg

SEQ ID NO: 319737 - DNA, 55 bp, Artificial
  Synthetic oligonucleotide
agagaaggacaagcatgacttgttcaactatgcattgcctgagttcgcaaagatc

SEQ ID NO: 319738 - DNA, 55 bp, Artificial
  Synthetic oligonucleotide
agagaagtgctacggtggaaatttgacagtcgcctggcactgacacacagagccc

SEQ ID NO: 319739 - DNA, 57 bp, Artificial
  Synthetic oligonucleotide
agagaagtgttgcagcccgttgcaagtgccgtccatatcagctgacagtctgctaac

SEQ ID NO: 319740 - DNA, 60 bp, Artificial
  Synthetic oligonucleotide
agagaataagacgaactgagccagcggcagatggggtgggagcagtatctcgagacctgg

SEQ ID NO: 319741 - DNA, 55 bp, Artificial
  Synthetic oligonucleotide
agagaataggatgggttgaccatcatgatgtagagagaccaaggcacagagaacc

SEQ ID NO: 319742 - DNA, 55 bp, Artificial
  Synthetic oligonucleotide
agagaatatcagatattgtgaacgcgtacgctggggttagaagtcacgcccgtct

SEQ ID NO: 319743 - DNA, 59 bp, Artificial
  Synthetic oligonucleotide
agagaatatgaaagaacacacccttcagatggtcctagaccactgccatatcctactgc

SEQ ID NO: 319744 - DNA, 60 bp, Artificial
  Synthetic oligonucleotide
agagaatcaacaatcatgttgagatcaaatgccattccttacactaatgtacaccactgg

SEQ ID NO: 319745 - DNA, 59 bp, Artificial
  Synthetic oligonucleotide
agagaatcagtgttggattcaatcaaagacaaagcgttccattactctgaaggcttctt

SEQ ID NO: 319746 - DNA, 55 bp, Artificial
  Synthetic oligonucleotide
agagaatcctgggccttccctctctaaattataccagatcctgaaagatccagca

SEQ ID NO: 319747 - DNA, 60 bp, Artificial
  Synthetic oligonucleotide
agagaatgactacatctcttccaattgctagattgtcaaatcgtgtgtttagagataaat

SEQ ID NO: 319748 - DNA, 60 bp, Artificial
  Synthetic oligonucleotide
agagaatgctttgcttgtgtacatggcatgtactcatgcctccaatcctgtatatgcgac

SEQ ID NO: 319749 - DNA, 60 bp, Artificial
  Synthetic oligonucleotide
agagaatggaaccgcaagtatgcaggaagaggaggtctctcaggatctcgatgaatcaca

SEQ ID NO: 319750 - DNA, 52 bp, Artificial
  Synthetic oligonucleotide
agagaatgtatcttctggagtggctatggtagcaggactcaaacaaggagtt

SEQ ID NO: 319751 - DNA, 53 bp, Artificial
  Synthetic oligonucleotide
agagaattaaatcatcagtggatggacaccacaaaggccatgcaaattgaggc

SEQ ID NO: 319752 - DNA, 60 bp, Artificial
  Synthetic oligonucleotide
agagaattgattctatatgacaaagaagagatcagaaggatttggcgtcaagctaataat

SEQ ID NO: 319753 - DNA, 55 bp, Artificial
  Synthetic oligonucleotide
agagaatttggacacgtagctggacaaaatattaacgcagaccaagaagtaaatt

SEQ ID NO: 319754 - DNA, 56 bp, Artificial
  Synthetic oligonucleotide
agagacaaaaactatttgagtcgagccaaggatggttcgaaggatggtttaacaga

SEQ ID NO: 319755 - DNA, 51 bp, Artificial
  Synthetic oligonucleotide
agagacaatctagagagaaacaacactaaccttccccactaaaagcgaaac

SEQ ID NO: 319756 - DNA, 55 bp, Artificial
  Synthetic oligonucleotide
agagacactggctggatgattaagagatcaatctgatttctaggaaactaggagg

SEQ ID NO: 319757 - DNA, 59 bp, Artificial
  Synthetic oligonucleotide
agagacagactgcgtcagtgcaggctatacagggatccacatgtcaccttagagcagca

SEQ ID NO: 319758 - DNA, 59 bp, Artificial
  Synthetic oligonucleotide
agagacataagtgttgttagaagtatgtaacaggttctttatagatgtatcgaatgtcc

SEQ ID NO: 319759 - DNA, 60 bp, Artificial
  Synthetic oligonucleotide
agagacatctggagcggaagcgaaagtacagaaagctcctcagactggtcgagcgactag

SEQ ID NO: 319760 - DNA, 55 bp, Artificial
  Synthetic oligonucleotide
agagacatgcccgtcgcagctgaatttgggcccgatgaaagtctggcagaccaca

SEQ ID NO: 319761 - DNA, 60 bp, Artificial
  Synthetic oligonucleotide
agagacatggttcaattacgcagaaagtgcgagatgttcacctatctccgctttgaccta

SEQ ID NO: 319762 - DNA, 59 bp, Artificial
  Synthetic oligonucleotide
agagacattactagagtctgagtttggtatggaaccatggactttacaagatacaagtc

SEQ ID NO: 319763 - DNA, 60 bp, Artificial
  Synthetic oligonucleotide
agagacattaggagatatataccagagagggaagatgattaccctgagtgtaacctagca

SEQ ID NO: 319764 - DNA, 58 bp, Artificial
  Synthetic oligonucleotide
agagacattgtgcagaccgggccctggagctataaagacgaaagcaaaaactgtgttc

SEQ ID NO: 319765 - DNA, 54 bp, Artificial
  Synthetic oligonucleotide
agagaccaatctaataccatgccagacatatagtggtgtcggcctagagatctt

SEQ ID NO: 319766 - DNA, 51 bp, Artificial
  Synthetic oligonucleotide
agagaccagactcgagcttcgctgtgaggtagggagacttgccagagagag

SEQ ID NO: 319767 - DNA, 60 bp, Artificial
  Synthetic oligonucleotide
agagaccagataagataacacttgctgagtttagacaactgtctacttagctcctagtta

SEQ ID NO: 319768 - DNA, 50 bp, Artificial
  Synthetic oligonucleotide
agagaccatggagtctgcggcacgccaccgtttagaggcatcggcacagg

SEQ ID NO: 319769 - DNA, 58 bp, Artificial
  Synthetic oligonucleotide
agagaccctatcgaatagaacggaggctacccacgtattacagattcgagtcgtctca

SEQ ID NO: 319770 - DNA, 59 bp, Artificial
  Synthetic oligonucleotide
agagaccgagttttacgagtggacacctactatgaagagatgtcgcaggttggagatgt

SEQ ID NO: 319771 - DNA, 60 bp, Artificial
  Synthetic oligonucleotide
agagaccgttgacggtttaaccatcatagatacatcgatcgtttggccaatactatgtca

SEQ ID NO: 319772 - DNA, 55 bp, Artificial
  Synthetic oligonucleotide
agagacctctccaaggtgttagttcattcgtgagctgccaagacccgacctctct

SEQ ID NO: 319773 - DNA, 60 bp, Artificial
  Synthetic oligonucleotide
agagacctggcccacatagtcttacctgtcctgctatccccctctatcacaatactcatg

SEQ ID NO: 319774 - DNA, 55 bp, Artificial
  Synthetic oligonucleotide
agagaccttgtaactttaagcagaccctattacagcagaacagatctacaagggg

SEQ ID NO: 319775 - DNA, 53 bp, Artificial
  Synthetic oligonucleotide
agagaccttttggtcaaaagtaccagtaatgttagatggtgagtgcataatgg

SEQ ID NO: 319776 - DNA, 60 bp, Artificial
  Synthetic oligonucleotide
agagacgaagctctctgaagcagatgagagccttctttcctggcgcacaccttgagaaac

SEQ ID NO: 319777 - DNA, 56 bp, Artificial
  Synthetic oligonucleotide
agagacgacggaagaatcacacaagaggaaagacgcatactgtcagaaattgacgc

SEQ ID NO: 319778 - DNA, 59 bp, Artificial
  Synthetic oligonucleotide
agagacgactgcacttagaatgattcagtactcagttgcagatcgtttctggcgtggct

SEQ ID NO: 319779 - DNA, 58 bp, Artificial
  Synthetic oligonucleotide
agagacgagtggaaaggcctcatggagcctcgggaccaggacaagtggcgtttcggca

SEQ ID NO: 319780 - DNA, 60 bp, Artificial
  Synthetic oligonucleotide
agagacgctaaggcaggtgagagaggcaatcgcaaccctgcaatatgggtccggtagcta

SEQ ID NO: 319781 - DNA, 57 bp, Artificial
  Synthetic oligonucleotide
agagacggtcaccgcgcgttcgacggagctgttgctgccgtgatgtccggacgcaaa

SEQ ID NO: 319782 - DNA, 58 bp, Artificial
  Synthetic oligonucleotide
agagacgtaacttagtgatgcctttacctggttctgagagatttgctagagccgtcga

SEQ ID NO: 319783 - DNA, 56 bp, Artificial
  Synthetic oligonucleotide
agagactaaaaatcaagcagagtcacgttgactggtataaggacccggacaaattc

SEQ ID NO: 319784 - DNA, 60 bp, Artificial
  Synthetic oligonucleotide
agagactaacatctcgctgctctaggcatgcaactttgcaataaatcctaggtagtcagc

SEQ ID NO: 319785 - DNA, 55 bp, Artificial
  Synthetic oligonucleotide
agagactaaccatggtacccaatttcactgatactcgatctgggaccactctggg

SEQ ID NO: 319786 - DNA, 55 bp, Artificial
  Synthetic oligonucleotide
agagactaccatgaggtccccggtgttcacggacaactcctctccgccagccgtg

SEQ ID NO: 319787 - DNA, 60 bp, Artificial
  Synthetic oligonucleotide
agagactcagtataatccactgcctggggcatcaaaaaggagatagtgccgaggctaggg

SEQ ID NO: 319788 - DNA, 60 bp, Artificial
  Synthetic oligonucleotide
agagactcatggatcacacaatgaaactagacacaataaaacagacaccatgacaacacc

SEQ ID NO: 319789 - DNA, 60 bp, Artificial
  Synthetic oligonucleotide
agagactcatggatcatacaatgaaactggacacaataaaacagacgttatgacaacgcc

SEQ ID NO: 319790 - DNA, 60 bp, Artificial
  Synthetic oligonucleotide
agagactcctcctcccctcccggatgtgagtcaagtgccaagaagccctgcagcaataaa

SEQ ID NO: 319791 - DNA, 60 bp, Artificial
  Synthetic oligonucleotide
agagactgaacccaatggatcatgaaggtaatgagtatcaaacatatcgccatccagcta

SEQ ID NO: 319792 - DNA, 60 bp, Artificial
  Synthetic oligonucleotide
agagactgcgctttccggtctcagcccaagcaggaaagggcgagttgtgtgcagtcttta

SEQ ID NO: 319793 - DNA, 60 bp, Artificial
  Synthetic oligonucleotide
agagactgtcaggatagtggaatgtgactatttcagtctatgcctttaaattccactatc

SEQ ID NO: 319794 - DNA, 60 bp, Artificial
  Synthetic oligonucleotide
agagacttaatgggggtgccatactgcaactactcaaaattttggtatctggagcatgca

SEQ ID NO: 319795 - DNA, 60 bp, Artificial
  Synthetic oligonucleotide
agagacttcaacaatctgaccaaagggctctgcacaataaattcgtggcatatattcggg

SEQ ID NO: 319796 - DNA, 60 bp, Artificial
  Synthetic oligonucleotide
agagacttgagaggactgtgcctaagagtatgctcagagcaggagacatactacagatgg

SEQ ID NO: 319797 - DNA, 58 bp, Artificial
  Synthetic oligonucleotide
agagactttctatgtagatggggcgtctaatagagagactaagctaggaaaggctggg

SEQ ID NO: 319798 - DNA, 60 bp, Artificial
  Synthetic oligonucleotide
agagagaactagcaataggatcattgattgttccaatgagcttgagtcgagctcgaaccg

SEQ ID NO: 319799 - DNA, 60 bp, Artificial
  Synthetic oligonucleotide
agagagaaggcactgagggaatcacaccttgcagagattgatgacctaattgatcttgca

SEQ ID NO: 319800 - DNA, 60 bp, Artificial
  Synthetic oligonucleotide
agagagaagtgctagtgtggaggtttgacaaccgcctagcatttcatcacatggcccgag

SEQ ID NO: 319801 - DNA, 59 bp, Artificial
  Synthetic oligonucleotide
agagagaataagaaatgatgtcaactatatattaaatatggacaggaatttaccgtcta

SEQ ID NO: 319802 - DNA, 60 bp, Artificial
  Synthetic oligonucleotide
agagagaatggtgacgttcaaggttcctcatgccaagagacaggatgtgacagtgctagg

SEQ ID NO: 319803 - DNA, 60 bp, Artificial
  Synthetic oligonucleotide
agagagacaaataaccaccatgcatatctcgaatccaacacaggaaaaacgagagcagtt

SEQ ID NO: 319804 - DNA, 56 bp, Artificial
  Synthetic oligonucleotide
agagagacaccgataggtaaatgagaccccaatatattggggactcaatcgggtcc

SEQ ID NO: 319805 - DNA, 60 bp, Artificial
  Synthetic oligonucleotide
agagagacatgtcgtagacagccacatcagaacgatagtcaatacggctcttcctagagt

SEQ ID NO: 319806 - DNA, 60 bp, Artificial
  Synthetic oligonucleotide
agagagaccatcaggcatgtttgacactgcagagctttgcgagtgctacgatgccgggtg

SEQ ID NO: 319807 - DNA, 58 bp, Artificial
  Synthetic oligonucleotide
agagagacccgacaactgtccccttggttataacagtggcagccctgagaacagctaa

SEQ ID NO: 319808 - DNA, 56 bp, Artificial
  Synthetic oligonucleotide
agagagacgtgttgtgacacaaggaccacaggaggaattcggacgtagtttaatta

SEQ ID NO: 319809 - DNA, 60 bp, Artificial
  Synthetic oligonucleotide
agagagagaagcaatcggtgtatagccatttagctctatgtatcggtgtatcggtgtctt

SEQ ID NO: 319810 - DNA, 60 bp, Artificial
  Synthetic oligonucleotide
agagagagacaattccatcgcctactgttatccgggtgccactgtgaatgaagaagcatt

SEQ ID NO: 319811 - DNA, 60 bp, Artificial
  Synthetic oligonucleotide
agagagagcccgccaatgcgtcctgactttcagggcgacgtcatagccgatctttccgcc

SEQ ID NO: 319812 - DNA, 58 bp, Artificial
  Synthetic oligonucleotide
agagagagggatactcccttgtcgggattgaccctttccgtctgctccagaacagtca

SEQ ID NO: 319813 - DNA, 58 bp, Artificial
  Synthetic oligonucleotide
agagagagtgtcaaaaccatgccccacaatatagtgaccactggcccaggcttcgggg

SEQ ID NO: 319814 - DNA, 60 bp, Artificial
  Synthetic oligonucleotide
agagagagttgctagccatggtctcctccatccaaataaattggtcagtcacagaatccg

SEQ ID NO: 319815 - DNA, 60 bp, Artificial
  Synthetic oligonucleotide
agagagataccaaagagcagttgagtcgttagagatgcatcccgtaagggaaaaggatgc

SEQ ID NO: 319816 - DNA, 55 bp, Artificial
  Synthetic oligonucleotide
agagagataccatgtagaccctaaagcgaactggattcaaatgttaatgaatggt

SEQ ID NO: 319817 - DNA, 60 bp, Artificial
  Synthetic oligonucleotide
agagagatccagcgcttagctaagcgaaagattctgcgtgatgaacagatgctcagagca

SEQ ID NO: 319818 - DNA, 55 bp, Artificial
  Synthetic oligonucleotide
agagagatcctcgcgtcccgagggcgggtaccggaggtgagtttacacaccgcag

SEQ ID NO: 319819 - DNA, 59 bp, Artificial
  Synthetic oligonucleotide
agagagatggggctcttcaagctactgcgttacgcgtacggcaatcggctggtaaagca

SEQ ID NO: 319820 - DNA, 53 bp, Artificial
  Synthetic oligonucleotide
agagagatggtgtaagccccaaagaacctctaacacaacctagtaccgggtct

SEQ ID NO: 319821 - DNA, 60 bp, Artificial
  Synthetic oligonucleotide
agagagcaaccatcatggcggcattcacgggaaacactgaaggcagaacttcagacatga

SEQ ID NO: 319822 - DNA, 60 bp, Artificial
  Synthetic oligonucleotide
agagagcacgatcgcactagtgtcattcaagacacggctcactatctcgtagacgggatg

SEQ ID NO: 319823 - DNA, 60 bp, Artificial
  Synthetic oligonucleotide
agagagccctacttatcctgtgatccacaaggctgcagaatgtttgctctaagccaaggc

SEQ ID NO: 319824 - DNA, 58 bp, Artificial
  Synthetic oligonucleotide
agagagcgcagaaacgtccacgctcttaatagaggattcgtccccgtatactcccagc

SEQ ID NO: 319825 - DNA, 59 bp, Artificial
  Synthetic oligonucleotide
agagagcgttgatcacgaagcaaaatcattgacgcgtgggttgagggactacaacggag

SEQ ID NO: 319826 - DNA, 51 bp, Artificial
  Synthetic oligonucleotide
agagagctcctctcaaaactacacagggaaccctgtgatatgtatgggaca

SEQ ID NO: 319827 - DNA, 60 bp, Artificial
  Synthetic oligonucleotide
agagagctgcagcgcatgatgtgctacaagaagactcacagaacagaacctgtttgcata

SEQ ID NO: 319828 - DNA, 57 bp, Artificial
  Synthetic oligonucleotide
agagagcttagaggaaacaacccctgctccgaagcaggagatgaaagacagggaacc

SEQ ID NO: 319829 - DNA, 58 bp, Artificial
  Synthetic oligonucleotide
agagagcttcaaattcgaggagataaaccccactctgcagaaggagtcgaaagacagg

SEQ ID NO: 319830 - DNA, 60 bp, Artificial
  Synthetic oligonucleotide
agagagcttcaaggagatagcacacgctccgaggcaggagatgaaagacagggaaccctt

SEQ ID NO: 319831 - DNA, 51 bp, Artificial
  Synthetic oligonucleotide
agagagcttcagaggtttcacagaaatctgtgcgggtgtggtgtaaacggg

SEQ ID NO: 319832 - DNA, 58 bp, Artificial
  Synthetic oligonucleotide
agagagcttcagattcgaggagacaacccccgctctgaagcaggaaccaaaagacaag

SEQ ID NO: 319833 - DNA, 55 bp, Artificial
  Synthetic oligonucleotide
agagagcttcagggagaccacccccgccccgaagcaagagccgagggacagggaa

SEQ ID NO: 319834 - DNA, 58 bp, Artificial
  Synthetic oligonucleotide
agagagcttcaggttcgaagaggcaacccctgccccgaagcaggagccgagagacagg

SEQ ID NO: 319835 - DNA, 57 bp, Artificial
  Synthetic oligonucleotide
agagagcttcaggttcgaggggacaactcccactccgaagccggagacgagagacag

SEQ ID NO: 319836 - DNA, 60 bp, Artificial
  Synthetic oligonucleotide
agagagcttcaggttcgaggggacagctcccgctccgaagcaggagttgaaagacagaga

SEQ ID NO: 319837 - DNA, 54 bp, Artificial
  Synthetic oligonucleotide
agagagcttcaggttcggggagacaacccccactccaaagcaggaaccgaaaga

SEQ ID NO: 319838 - DNA, 51 bp, Artificial
  Synthetic oligonucleotide
agagagcttcgggttcggggaggagacaaccccctccccgaaacaggagcc

SEQ ID NO: 319839 - DNA, 56 bp, Artificial
  Synthetic oligonucleotide
agagagcttgttattaacactcttgttaaccagggcattagcagggagcgtgctac

SEQ ID NO: 319840 - DNA, 57 bp, Artificial
  Synthetic oligonucleotide
agagagctttgggatgggggaagagataacctcctccccgaagcaggggcagagaga

SEQ ID NO: 319841 - DNA, 60 bp, Artificial
  Synthetic oligonucleotide
agagagctttgtttacccactatcgccatggttgtatccacagcagaataggatcatgaa

SEQ ID NO: 319842 - DNA, 58 bp, Artificial
  Synthetic oligonucleotide
agagaggaagaatgacatgaacggggtcattatcgttgacatcacttttattagcggt

SEQ ID NO: 319843 - DNA, 60 bp, Artificial
  Synthetic oligonucleotide
agagaggatgaggcggtggcagatgatatgtttggataacgacgtcaacatttatttaag

SEQ ID NO: 319844 - DNA, 57 bp, Artificial
  Synthetic oligonucleotide
agagaggatggtaggttacattggtgaggataactggctaacaaccaagggtgcacg

SEQ ID NO: 319845 - DNA, 60 bp, Artificial
  Synthetic oligonucleotide
agagaggcacttcgaggtgaagagatagagagggagcccctgactgaagcatgtgttagt

SEQ ID NO: 319846 - DNA, 57 bp, Artificial
  Synthetic oligonucleotide
agagaggccgcaatacggcaggtgggagctccacgtattacaacttagttggggatg

SEQ ID NO: 319847 - DNA, 59 bp, Artificial
  Synthetic oligonucleotide
agagaggctctgtgagtgtgacgaactctgcatttttcaaagcccaagtctttagtgcg

SEQ ID NO: 319848 - DNA, 57 bp, Artificial
  Synthetic oligonucleotide
agagagggaccatcttcaaacgtgaaccttgactcccaggagtcatcgggtcctcca

SEQ ID NO: 319849 - DNA, 60 bp, Artificial
  Synthetic oligonucleotide
agagagggacggttaccaatgaatttgcatcacggttcagaactatcatagctacattgg

SEQ ID NO: 319850 - DNA, 55 bp, Artificial
  Synthetic oligonucleotide
agagaggtaaacatcttggacaccaataggtaaattgtccccaatatattgggga

SEQ ID NO: 319851 - DNA, 55 bp, Artificial
  Synthetic oligonucleotide
agagaggtaataataagggaccacattggcaacgaaccgattcagaagattaagt

SEQ ID NO: 319852 - DNA, 60 bp, Artificial
  Synthetic oligonucleotide
agagaggtgagcgacagcatacgtttgtattcgaatcgactgatgtatcatcgatattac

SEQ ID NO: 319853 - DNA, 53 bp, Artificial
  Synthetic oligonucleotide
agagaggtggttggcccggtggatggttttgcttccatgggctggaatgtgcg

SEQ ID NO: 319854 - DNA, 55 bp, Artificial
  Synthetic oligonucleotide
agagaggtgtaaatcaaccaccagagaagattacgtctttaccgcccaattacga

SEQ ID NO: 319855 - DNA, 55 bp, Artificial
  Synthetic oligonucleotide
agagagtagggcaaggatcaaaacaaggctgttcaccataagacaggaaatggcc

SEQ ID NO: 319856 - DNA, 60 bp, Artificial
  Synthetic oligonucleotide
agagagtgatcatttcatgaacaatacagagtcattgtgtgacgctaagggttttgcacc

SEQ ID NO: 319857 - DNA, 60 bp, Artificial
  Synthetic oligonucleotide
agagagtgcgcggaatcgaccgacgcacctcgtaccagaagtcccgccagaactgcctca

SEQ ID NO: 319858 - DNA, 55 bp, Artificial
  Synthetic oligonucleotide
agagagtggaattgaggtaacgcaaaaccgatgggaggagtggagtttcgaagcg

SEQ ID NO: 319859 - DNA, 59 bp, Artificial
  Synthetic oligonucleotide
agagagtgtgcctatggtgcttgctccaattataaagaacggtgtcctttattgtgagg

SEQ ID NO: 319860 - DNA, 55 bp, Artificial
  Synthetic oligonucleotide
agagagttatctccgttgagaaggacactatgatgctggatctagaaggatccac

SEQ ID NO: 319861 - DNA, 60 bp, Artificial
  Synthetic oligonucleotide
agagagttctaaagcttgtataagaaatgatgttcattccaatcttgttgctgctcttga

SEQ ID NO: 319862 - DNA, 54 bp, Artificial
  Synthetic oligonucleotide
agagagttggttaaaggacaaagtgaacttaagtccttcaatatagaagtcctc

SEQ ID NO: 319863 - DNA, 60 bp, Artificial
  Synthetic oligonucleotide
agagataacatgcacttaggaagccaagaattagatgatgaatgcacaatgctaacattg

SEQ ID NO: 319864 - DNA, 60 bp, Artificial
  Synthetic oligonucleotide
agagatagggcagtcacccaatgtataccaagcaaggtttgaagcagtagcatggtcagc

SEQ ID NO: 319865 - DNA, 60 bp, Artificial
  Synthetic oligonucleotide
agagatataatcatacgtttcaagtttgcgaacgccataatcaaatctggaggtctagga

SEQ ID NO: 319866 - DNA, 59 bp, Artificial
  Synthetic oligonucleotide
agagatatactttggccagatactatgatattcgtcccggactaatgggtcgttcgcta

SEQ ID NO: 319867 - DNA, 60 bp, Artificial
  Synthetic oligonucleotide
agagatatggcccagcattgagtatcaatgagttgagcaatcttgcaaaaggagagaagg

SEQ ID NO: 319868 - DNA, 60 bp, Artificial
  Synthetic oligonucleotide
agagatatgggccagcactaagcatcaatgaactgagcaaccttgcgaaaggagagaagg

SEQ ID NO: 319869 - DNA, 60 bp, Artificial
  Synthetic oligonucleotide
agagatcacttcatttcagccagcaaaataagcagctttcctgacgatccctcagtttcg

SEQ ID NO: 319870 - DNA, 60 bp, Artificial
  Synthetic oligonucleotide
agagatcatatctctagacgatctgcagctatttcgagatgtgtcataaaaggaccagaa

SEQ ID NO: 319871 - DNA, 60 bp, Artificial
  Synthetic oligonucleotide
agagatcattcttatacaattgacatgaattactgggacgacacagatattgtacatgca

SEQ ID NO: 319872 - DNA, 60 bp, Artificial
  Synthetic oligonucleotide
agagatcctcagacaggctctcaacaatactgaggtccagcccaaggaacgaaggatcct

SEQ ID NO: 319873 - DNA, 58 bp, Artificial
  Synthetic oligonucleotide
agagatcctgcggaagtctcggagattcactccggccctgcccatttgggcacggccg

SEQ ID NO: 319874 - DNA, 55 bp, Artificial
  Synthetic oligonucleotide
agagatcctggatcaggtattataacttcggatgcaccagttcatgattgtaaca

SEQ ID NO: 319875 - DNA, 55 bp, Artificial
  Synthetic oligonucleotide
agagatcgaaagcaagggcagcagatcaaagcgacactttattgtggcaacaaac

SEQ ID NO: 319876 - DNA, 50 bp, Artificial
  Synthetic oligonucleotide
agagatcgctagcaagttggattcaaagtgagttcaacaaagcttgtgaa

SEQ ID NO: 319877 - DNA, 55 bp, Artificial
  Synthetic oligonucleotide
agagatcgggcggtcccctagggtggcagactagcgtgggacgggaacctatcca

SEQ ID NO: 319878 - DNA, 53 bp, Artificial
  Synthetic oligonucleotide
agagatcgtcacaaaagggaccagtgtaaaaccgcacttcgttgtagcaacta

SEQ ID NO: 319879 - DNA, 53 bp, Artificial
  Synthetic oligonucleotide
agagatcgtccgacggcactgggaacgtgagcaagaagaagtccaggaaggac

SEQ ID NO: 319880 - DNA, 60 bp, Artificial
  Synthetic oligonucleotide
agagatctacataccggcttatgttgcatcctacccttgagcttggctaggctcttgggc

SEQ ID NO: 319881 - DNA, 60 bp, Artificial
  Synthetic oligonucleotide
agagatctagatcacttaattcgtcagcgttctattacagagtataggtacatgttagat

SEQ ID NO: 319882 - DNA, 60 bp, Artificial
  Synthetic oligonucleotide
agagatctcctagacaccgcctcagctctgtatcgggaagccttagagtctcctgagcat

SEQ ID NO: 319883 - DNA, 60 bp, Artificial
  Synthetic oligonucleotide
agagatctctatagttcacccaccactttacaggctgtaggctcttgtgttgtgtgtcac

SEQ ID NO: 319884 - DNA, 60 bp, Artificial
  Synthetic oligonucleotide
agagatgaatacgtctatcgtgtagtcgtagaccttcgtgaccagactgaggctacttta

SEQ ID NO: 319885 - DNA, 60 bp, Artificial
  Synthetic oligonucleotide
agagatgacatcaagttggtacaggcgctctatgctgcgaaacctaatatcaagacccga

SEQ ID NO: 319886 - DNA, 60 bp, Artificial
  Synthetic oligonucleotide
agagatgagcgagaattgtgatgagagaggctttactcacgaacaaattccatcatgtga

SEQ ID NO: 319887 - DNA, 55 bp, Artificial
  Synthetic oligonucleotide
agagatgatcccaaagtagtaactgctggaccaagtgatatgtatgtccatgttg

SEQ ID NO: 319888 - DNA, 60 bp, Artificial
  Synthetic oligonucleotide
agagatgatgatgaactccacgattcgtcaaggatggcagcaagtgctcaaacgcttttc

SEQ ID NO: 319889 - DNA, 55 bp, Artificial
  Synthetic oligonucleotide
agagatgcatgattcaatcttagtctcctattcctcagacttagtcatataccgc

SEQ ID NO: 319890 - DNA, 58 bp, Artificial
  Synthetic oligonucleotide
agagatgccccatggcgtttaatggcggggacctcaaaggtctcacgctctgctaact

SEQ ID NO: 319891 - DNA, 60 bp, Artificial
  Synthetic oligonucleotide
agagatgcggctgcacatcgtcaacctgcctttacaaggagtggccacattcgagaaact

SEQ ID NO: 319892 - DNA, 53 bp, Artificial
  Synthetic oligonucleotide
agagatgctttgacgcgcgtgccatatttcgtcagagctcacgctctgctgag

SEQ ID NO: 319893 - DNA, 56 bp, Artificial
  Synthetic oligonucleotide
agagatggcacatctgacggcacgcccaggtcattttgagttacgcaacgttatcg

SEQ ID NO: 319894 - DNA, 56 bp, Artificial
  Synthetic oligonucleotide
agagatggctccccctccgaagcaggagcagaacgacaggggacagggcccacctt

SEQ ID NO: 319895 - DNA, 54 bp, Artificial
  Synthetic oligonucleotide
agagatggcttgagaataacaatataccgtcggatattcaagtcgccgggaaaa

SEQ ID NO: 319896 - DNA, 57 bp, Artificial
  Synthetic oligonucleotide
agagatgggtgcgagagcgtcagtattaagcgggggaaaattagataggtgggagaa

SEQ ID NO: 319897 - DNA, 60 bp, Artificial
  Synthetic oligonucleotide
agagatgggtgcgagagcgtcagtattacgcgggggacaattagatgcatgggagagaat

SEQ ID NO: 319898 - DNA, 52 bp, Artificial
  Synthetic oligonucleotide
agagatggtgaagaggtaacagcgcataccacatgttcggttaatggtgtga

SEQ ID NO: 319899 - DNA, 59 bp, Artificial
  Synthetic oligonucleotide
agagatggtggaactaatgaaactagggagaatgagaccttcagacctataggaggaga

SEQ ID NO: 319900 - DNA, 60 bp, Artificial
  Synthetic oligonucleotide
agagatggtggtaatcatagtaggagtgacaacaacactgagatcttcagacctataggg

SEQ ID NO: 319901 - DNA, 55 bp, Artificial
  Synthetic oligonucleotide
agagatggtggtgcaaatagtaccagtcagaaagaaaccttcagacctggagggg

SEQ ID NO: 319902 - DNA, 59 bp, Artificial
  Synthetic oligonucleotide
agagatggttaatccatggtggtatgccatcgggttccccatgtaccactgtgctaaat

SEQ ID NO: 319903 - DNA, 50 bp, Artificial
  Synthetic oligonucleotide
agagatgtaacgtatgcttctctcactctaccaagatcaagtggctatgt

SEQ ID NO: 319904 - DNA, 59 bp, Artificial
  Synthetic oligonucleotide
agagatgtagttttagagtatttggtgtctttcggagtgtggattcgcactcctccagc

SEQ ID NO: 319905 - DNA, 60 bp, Artificial
  Synthetic oligonucleotide
agagatgtatcgaatttcatgctaaatgtgttgacagttctaagaaaggtttgtcattaa

SEQ ID NO: 319906 - DNA, 57 bp, Artificial
  Synthetic oligonucleotide
agagattaccagggaatttagtgtcaatgcaggtgtaactacacctgtaagcactta

SEQ ID NO: 319907 - DNA, 56 bp, Artificial
  Synthetic oligonucleotide
agagattacgaatacgaccaaacagtcacactgtacggtcgtttcaacaacgagga

SEQ ID NO: 319908 - DNA, 54 bp, Artificial
  Synthetic oligonucleotide
agagattcgaggcgacacctttgccacggaacctcacgaactggtaataaaacc

SEQ ID NO: 319909 - DNA, 55 bp, Artificial
  Synthetic oligonucleotide
agagattcgttgaaaataacattaaaaccacgcacgaatcccagggcatatctga

SEQ ID NO: 319910 - DNA, 60 bp, Artificial
  Synthetic oligonucleotide
agagattctagaggagctcaagcaagaagctgtcaggcactttcctaggccgtggctcca

SEQ ID NO: 319911 - DNA, 56 bp, Artificial
  Synthetic oligonucleotide
agagattgcatcctcgagggtataacaggtaggttgaaggagcatgtaagcttcgg

SEQ ID NO: 319912 - DNA, 53 bp, Artificial
  Synthetic oligonucleotide
agagattgcgcacatcgtaggtcaacctaccctagttgcgaccggcttgaccc

SEQ ID NO: 319913 - DNA, 60 bp, Artificial
  Synthetic oligonucleotide
agagattgctgatagctcatggaaagatacactatcgcaattgttcttgacaaaaggatg

SEQ ID NO: 319914 - DNA, 60 bp, Artificial
  Synthetic oligonucleotide
agagattgtaacgtccaggctgactgggcgatatgtattcacggtggttatgacatgggt

SEQ ID NO: 319915 - DNA, 57 bp, Artificial
  Synthetic oligonucleotide
agagattgtagctcgtggtgaagaggctttttattctttacctgcgaatattcgagt

SEQ ID NO: 319916 - DNA, 55 bp, Artificial
  Synthetic oligonucleotide
agagattgtataccctgatcctggcacaacattatctcggtcgcttagcgtcgca

SEQ ID NO: 319917 - DNA, 57 bp, Artificial
  Synthetic oligonucleotide
agagatttaccatgaagcaaggtggttaggtcaccggctcaaacaaaatggcaaagc

SEQ ID NO: 319918 - DNA, 56 bp, Artificial
  Synthetic oligonucleotide
agagatttgatgggggtaccatactgtaattactcaaaattttggtatttagagca

SEQ ID NO: 319919 - DNA, 60 bp, Artificial
  Synthetic oligonucleotide
agagatttgatgggggtgccatactgcaattactcaaaattttggtatctgaagcacgta

SEQ ID NO: 319920 - DNA, 55 bp, Artificial
  Synthetic oligonucleotide
agagatttgcacagtagcttaaagtcagctctggatgttgacttggacacagagg

SEQ ID NO: 319921 - DNA, 54 bp, Artificial
  Synthetic oligonucleotide
agagatttgtagtacttgtaaaattgatcaaagaaacgctctctcccttttgat

SEQ ID NO: 319922 - DNA, 55 bp, Artificial
  Synthetic oligonucleotide
agagatttgtgcgcattccctcacgtttaaaggatgcccgaaatgttctgccctg

SEQ ID NO: 319923 - DNA, 56 bp, Artificial
  Synthetic oligonucleotide
agagcaaaccaacttatacaagaataaccctggaagtgtcactgtgtctaccaaaa

SEQ ID NO: 319924 - DNA, 57 bp, Artificial
  Synthetic oligonucleotide
agagcaaagtcaccaaagtccatccaatccgatagggattttagtacttcagtgaac

SEQ ID NO: 319925 - DNA, 52 bp, Artificial
  Synthetic oligonucleotide
agagcaaattgggtcagaaaaaactcaaaacgtaactgtaaatccaggtccg

SEQ ID NO: 319926 - DNA, 60 bp, Artificial
  Synthetic oligonucleotide
agagcaacagtatccgaatcatcaatcatagtgcctgaaggggtcggatcattttggatc

SEQ ID NO: 319927 - DNA, 55 bp, Artificial
  Synthetic oligonucleotide
agagcaaccaacgcgtaattcgtcttcggccttatagttttcgtgcattacgtat

SEQ ID NO: 319928 - DNA, 56 bp, Artificial
  Synthetic oligonucleotide
agagcaatacacgggtagaacggtcagaggagccacccttcaatcgggaattaggc

SEQ ID NO: 319929 - DNA, 60 bp, Artificial
  Synthetic oligonucleotide
agagcaatagtatcagcagatccactggcatcattattggagatgtgtcacagcacacaa

SEQ ID NO: 319930 - DNA, 60 bp, Artificial
  Synthetic oligonucleotide
agagcaatcagtgcatcagaaatattacctataacacattttactaagattttatcaatt

SEQ ID NO: 319931 - DNA, 58 bp, Artificial
  Synthetic oligonucleotide
agagcaatcggggcatctaataattctagaaaaacaacgatatactcaagaaatacta

SEQ ID NO: 319932 - DNA, 60 bp, Artificial
  Synthetic oligonucleotide
agagcaatcggtgcagcaatcaaatatccatttacaacttctgccaattgaaaagtaacc

SEQ ID NO: 319933 - DNA, 58 bp, Artificial
  Synthetic oligonucleotide
agagcaatcgtgtcataattttattcttaatcaaacctcacttagaaaatcacaatac

SEQ ID NO: 319934 - DNA, 60 bp, Artificial
  Synthetic oligonucleotide
agagcaatgatggatcaggtgcgggagagccggaatccggggaatgctgaaattgaagat

SEQ ID NO: 319935 - DNA, 55 bp, Artificial
  Synthetic oligonucleotide
agagcaatgcttcatggccaagactctagccactccatctacgataactcggatg

SEQ ID NO: 319936 - DNA, 60 bp, Artificial
  Synthetic oligonucleotide
agagcaatggtggatcaagtgcgagagagcagaaatcctgggaatgctgaaattgaagat

SEQ ID NO: 319937 - DNA, 53 bp, Artificial
  Synthetic oligonucleotide
agagcaattaatatcacagtgtagattgtgagagctctattgaggatgtgacc

SEQ ID NO: 319938 - DNA, 60 bp, Artificial
  Synthetic oligonucleotide
agagcacaagagaccattacgggtacttgatgtggcatgttgtcaatcgactcactgtga

SEQ ID NO: 319939 - DNA, 55 bp, Artificial
  Synthetic oligonucleotide
agagcacaattacaatgatcggatttaatgcccttggtaggatgggcagacttgc

SEQ ID NO: 319940 - DNA, 60 bp, Artificial
  Synthetic oligonucleotide
agagcacataatatcccaaatggcatatataaccggttccaccacaggacatctcacaca

SEQ ID NO: 319941 - DNA, 57 bp, Artificial
  Synthetic oligonucleotide
agagcacatgcgtccagtggttttacacaccttcaacccgaagaaagtgagcggctt

SEQ ID NO: 319942 - DNA, 57 bp, Artificial
  Synthetic oligonucleotide
agagcaccaccctgtcacggtcgtaagaaatttacgcaggctgcctgaacttttgaa

SEQ ID NO: 319943 - DNA, 58 bp, Artificial
  Synthetic oligonucleotide
agagcaccagatcatcctaccagagtcacatctatcctctccattagtcaagcacaaa

SEQ ID NO: 319944 - DNA, 54 bp, Artificial
  Synthetic oligonucleotide
agagcaccagtcaccggattatatgttgacattgaaggagtaactgtttcaacc

SEQ ID NO: 319945 - DNA, 58 bp, Artificial
  Synthetic oligonucleotide
agagcacgaccaattttggttaccagatccaaggagtcacggactacctcacaagcca

SEQ ID NO: 319946 - DNA, 58 bp, Artificial
  Synthetic oligonucleotide
agagcacgccaaaactggtgagactagtgtacctaaatgttggcttgtcaccaatggt

SEQ ID NO: 319947 - DNA, 51 bp, Artificial
  Synthetic oligonucleotide
agagcacgtcacgcagaattggccgctctactcggactttgtgcgagagtc

SEQ ID NO: 319948 - DNA, 60 bp, Artificial
  Synthetic oligonucleotide
agagcacgtgggtggtccctctaatacgtggcgcactatggagtctcgctcgaagcttgt

SEQ ID NO: 319949 - DNA, 55 bp, Artificial
  Synthetic oligonucleotide
agagcactctgaaactggcaacaggaatgaggaacgtacctgagaaacaaaccag

SEQ ID NO: 319950 - DNA, 59 bp, Artificial
  Synthetic oligonucleotide
agagcactgtggataagtgaggaagtaattcttcgcatttatttgaaatcgcttgggag

SEQ ID NO: 319951 - DNA, 56 bp, Artificial
  Synthetic oligonucleotide
agagcacttgggataagtgacgaagtaattcttcgcagaaattctaaaacgacgtg

SEQ ID NO: 319952 - DNA, 59 bp, Artificial
  Synthetic oligonucleotide
agagcacttgtccgttattacccacactacacaatagataacctgtatgaatggtgtgt

SEQ ID NO: 319953 - DNA, 60 bp, Artificial
  Synthetic oligonucleotide
agagcagaactgttttactatgcacactcaagatgtcatacattatcaaattgtcccagg

SEQ ID NO: 319954 - DNA, 59 bp, Artificial
  Synthetic oligonucleotide
agagcagaagcgcaactgcatatgtgggttccccccctcaatgtccgaggggggcgtga

SEQ ID NO: 319955 - DNA, 55 bp, Artificial
  Synthetic oligonucleotide
agagcagattagaaaacaggtagttgttgacaatttgaattggtcgggatacagt

SEQ ID NO: 319956 - DNA, 60 bp, Artificial
  Synthetic oligonucleotide
agagcagcaaggatcatcggaatcctataccaaagcagtgagtagtggcaattagtatat

SEQ ID NO: 319957 - DNA, 57 bp, Artificial
  Synthetic oligonucleotide
agagcagcaagtctagccggggctgttccagagactgtgaagaacccttaacctccc

SEQ ID NO: 319958 - DNA, 55 bp, Artificial
  Synthetic oligonucleotide
agagcagcagctcgcatgctggatgcggcgccccatgcgcttctatccaacagac

SEQ ID NO: 319959 - DNA, 55 bp, Artificial
  Synthetic oligonucleotide
agagcagcggggctagccggtgggtgttccgcctcccgagggggacgagtgaggc

SEQ ID NO: 319960 - DNA, 60 bp, Artificial
  Synthetic oligonucleotide
agagcagctcaaacacttcatatgaacagtgtatcgatacagtcaagtagcttaaccaca

SEQ ID NO: 319961 - DNA, 60 bp, Artificial
  Synthetic oligonucleotide
agagcagctttagtggatgatgctactcatgcctgctggaggtactttgacacatacctc

SEQ ID NO: 319962 - DNA, 60 bp, Artificial
  Synthetic oligonucleotide
agagcaggatgtggcatggtgaggtgtcgggtgctccatcgctcattaaaactgtgctgg

SEQ ID NO: 319963 - DNA, 53 bp, Artificial
  Synthetic oligonucleotide
agagcaggcctcggttgggtacgggacggtcctcgctcgcacccctacaattt

SEQ ID NO: 319964 - DNA, 60 bp, Artificial
  Synthetic oligonucleotide
agagcagtaggactgggaatgctgttctttggggtactaagtgcagcaggtagcactatg

SEQ ID NO: 319965 - DNA, 53 bp, Artificial
  Synthetic oligonucleotide
agagcagtataggcggattcttgtattccgtgtgatagctggttggatcgtta

SEQ ID NO: 319966 - DNA, 57 bp, Artificial
  Synthetic oligonucleotide
agagcagtctcctgtacggaggaaatgccattagcctcagtacatagagcatattgg

SEQ ID NO: 319967 - DNA, 60 bp, Artificial
  Synthetic oligonucleotide
agagcagtttatggacctgtgcgttatgtgcggcacagactttaaccagagggtgcacaa

SEQ ID NO: 319968 - DNA, 60 bp, Artificial
  Synthetic oligonucleotide
agagcatacctataaggtcgagatgtgctacaatcaagctttgggcaaagtgaatgtact

SEQ ID NO: 319969 - DNA, 60 bp, Artificial
  Synthetic oligonucleotide
agagcatatcaagaaatgccctatcaatataccgagctatagaggaaggagcatccaagc

SEQ ID NO: 319970 - DNA, 59 bp, Artificial
  Synthetic oligonucleotide
agagcatcctgactctgactttgactaacttgtagacagaaagcccaaatcgtaagtta

SEQ ID NO: 319971 - DNA, 52 bp, Artificial
  Synthetic oligonucleotide
agagcatcgaataatcctacccgaatctcacttatcgtctccacttgtcaaa

SEQ ID NO: 319972 - DNA, 60 bp, Artificial
  Synthetic oligonucleotide
agagcatcggcaggacagataagcgtgcagcccactttctcggtgcaaagaaaccttccc

SEQ ID NO: 319973 - DNA, 51 bp, Artificial
  Synthetic oligonucleotide
agagcatcggttttacatcctgtcaccagaatgtgtacactccaacacact

SEQ ID NO: 319974 - DNA, 60 bp, Artificial
  Synthetic oligonucleotide
agagcatctgcaggacaaatcagtgtacaacctaccttctcagtacaaaggaatcttccc

SEQ ID NO: 319975 - DNA, 52 bp, Artificial
  Synthetic oligonucleotide
agagcatgagggcacgttgttaagagaggaaacactaattgatgtagacaat

SEQ ID NO: 319976 - DNA, 60 bp, Artificial
  Synthetic oligonucleotide
agagcatgcaattaccaacttcactaaagctgagatggcgcttgaattcaatcgtgagtt

SEQ ID NO: 319977 - DNA, 57 bp, Artificial
  Synthetic oligonucleotide
agagcatgctccacattacgagttagagattcttataagaatcgatttagtgttgtc

SEQ ID NO: 319978 - DNA, 60 bp, Artificial
  Synthetic oligonucleotide
agagcatggcgttattatcggactagttaacgtccgctctgatattacatacagccaagg

SEQ ID NO: 319979 - DNA, 60 bp, Artificial
  Synthetic oligonucleotide
agagcatggctccataacttaggacaatacatctataacacatatggggatacttgggcg

SEQ ID NO: 319980 - DNA, 60 bp, Artificial
  Synthetic oligonucleotide
agagcattacaaattcatgggaagtaggataggttcatggtgccaaatggtcagtttgat

SEQ ID NO: 319981 - DNA, 53 bp, Artificial
  Synthetic oligonucleotide
agagcattcaaagagatcactgacttcactagtgacctaccaacctcaaaggc

SEQ ID NO: 319982 - DNA, 60 bp, Artificial
  Synthetic oligonucleotide
agagcattgaaatgcagtccaaaactgtgcaggaaggcctggacacctactacagccgag

SEQ ID NO: 319983 - DNA, 51 bp, Artificial
  Synthetic oligonucleotide
agagcattgggaacaactcatgttgccctacagaagcacccggaactgttt

SEQ ID NO: 319984 - DNA, 51 bp, Artificial
  Synthetic oligonucleotide
agagccaaacgcagtgtcacagacacctactcaatgactgaaccgtatctt

SEQ ID NO: 319985 - DNA, 56 bp, Artificial
  Synthetic oligonucleotide
agagccaactagaccgttagcggagaacgtcagtaagcagttgagctttgaacctt

SEQ ID NO: 319986 - DNA, 58 bp, Artificial
  Synthetic oligonucleotide
agagccaactaggcctctagctgaaaatgtgtttggacaattacggagccatcctttc

SEQ ID NO: 319987 - DNA, 56 bp, Artificial
  Synthetic oligonucleotide
agagccacttctcaaactacaatatctctatgacggtgtttatgaatgacccgtta

SEQ ID NO: 319988 - DNA, 58 bp, Artificial
  Synthetic oligonucleotide
agagccagccgtccggcattaactcctcggacgattggacccaggccatgcaacgtat

SEQ ID NO: 319989 - DNA, 56 bp, Artificial
  Synthetic oligonucleotide
agagccaggttctaagttaagactggcacagtgtaaatttgtaggacaatggggaa

SEQ ID NO: 319990 - DNA, 59 bp, Artificial
  Synthetic oligonucleotide
agagccatcccacacagaatttatattattctcaacagtaatcgtagccaccttagtaa

SEQ ID NO: 319991 - DNA, 54 bp, Artificial
  Synthetic oligonucleotide
agagccatgcatcgtaacaattcaacgatgaagatgctgagcttgtacgtagcg

SEQ ID NO: 319992 - DNA, 58 bp, Artificial
  Synthetic oligonucleotide
agagccatggtggagtactgcccagaccaaacaggcctgggtagaccgaaccaagctc

SEQ ID NO: 319993 - DNA, 60 bp, Artificial
  Synthetic oligonucleotide
agagccattcatctcatgctcccacttagaatgcagaactttcttcttgactcaaggggc

SEQ ID NO: 319994 - DNA, 58 bp, Artificial
  Synthetic oligonucleotide
agagcccactgctttggccttgaacaactgaggagttgtataataatacctgcacccc

SEQ ID NO: 319995 - DNA, 60 bp, Artificial
  Synthetic oligonucleotide
agagcccagatcagattacaaattcatgtacatgggagttatgcccttgtcttccaagta

SEQ ID NO: 319996 - DNA, 55 bp, Artificial
  Synthetic oligonucleotide
agagccccaacagcccgctcaagatgacctactgctgcgcccgtgactgtgtgtg

SEQ ID NO: 319997 - DNA, 55 bp, Artificial
  Synthetic oligonucleotide
agagcccccggtccttctgtcgactccgtaggaggcacatgaagatccgacacag

SEQ ID NO: 319998 - DNA, 58 bp, Artificial
  Synthetic oligonucleotide
agagcccctatcactacttctaacttggtggagatggatacctggctttcttttgcta

SEQ ID NO: 319999 - DNA, 51 bp, Artificial
  Synthetic oligonucleotide
agagcccctggcgatgtgaatgcagtgaaagctgccatgaggcccgattac

SEQ ID NO: 320000 - DNA, 57 bp, Artificial
  Synthetic oligonucleotide
agagcccgcaaacgactatattgatcccttacccaggtttatcatccgcctctggag

SEQ ID NO: 320001 - DNA, 53 bp, Artificial
  Synthetic oligonucleotide
agagcccgcagctgccaaccgactttacgcgttttaacgggcgtaactgcccc

SEQ ID NO: 320002 - DNA, 60 bp, Artificial
  Synthetic oligonucleotide
agagcccgtcgccttatatcgcgcgggcttggcctgagacaataagtaatgtcaggcttg

SEQ ID NO: 320003 - DNA, 55 bp, Artificial
  Synthetic oligonucleotide
agagccctacaatgaatgggcattagaactgttagaagggcttaagaatgaagca

SEQ ID NO: 320004 - DNA, 59 bp, Artificial
  Synthetic oligonucleotide
agagccctcagagaatcaggtcaacagcatcttcacataggcctgatcatgattcgtgt

SEQ ID NO: 320005 - DNA, 57 bp, Artificial
  Synthetic oligonucleotide
agagcccttaccacctcggctcttgtcaccaaggggctccaaggttcagagtctcca

SEQ ID NO: 320006 - DNA, 55 bp, Artificial
  Synthetic oligonucleotide
agagcccttctcgacaagaacaccatcttcacatgtgtaaattgagtagcatcct

SEQ ID NO: 320007 - DNA, 51 bp, Artificial
  Synthetic oligonucleotide
agagccgaaaatttctctaggtgtcggcacaacgttaaatagtacgtttct

SEQ ID NO: 320008 - DNA, 56 bp, Artificial
  Synthetic oligonucleotide
agagccgaacaagctacacaggaggtgaaaaattggatgacagaaaccttgttggt

SEQ ID NO: 320009 - DNA, 59 bp, Artificial
  Synthetic oligonucleotide
agagccgactgccgacggcccaacaaggggccggatcttggtccgataatgtcatctca

SEQ ID NO: 320010 - DNA, 56 bp, Artificial
  Synthetic oligonucleotide
agagccgcaaccaaagctggttactgcggaggagccgtccttgctaaggacggggc

SEQ ID NO: 320011 - DNA, 60 bp, Artificial
  Synthetic oligonucleotide
agagccgcgtgggagacatcaaaacacactccagtcaattcctggctaggcaatataatc

SEQ ID NO: 320012 - DNA, 56 bp, Artificial
  Synthetic oligonucleotide
agagccgtagtggagtacgtccatgacgaaccctcgtgcatcttcgtcggtcgaaa

SEQ ID NO: 320013 - DNA, 55 bp, Artificial
  Synthetic oligonucleotide
agagccgtggaagaagcctgactacgaaccacctgtggtccatggctgcccgcta

SEQ ID NO: 320014 - DNA, 53 bp, Artificial
  Synthetic oligonucleotide
agagccgtggtctacttgcttagaatagctaattccaaagttagttcattcaa

SEQ ID NO: 320015 - DNA, 60 bp, Artificial
  Synthetic oligonucleotide
agagcctactccggcagagtctccaaagaaagtgaccgctactcagggcactcagaccga

SEQ ID NO: 320016 - DNA, 57 bp, Artificial
  Synthetic oligonucleotide
agagcctatcgtatgcttggacttaacgttcaaacagtagactcctctcaaggttca

SEQ ID NO: 320017 - DNA, 60 bp, Artificial
  Synthetic oligonucleotide
agagcctatgcaacgctatcaatggagagttctcccgcaaggaatgactaatagccctac

SEQ ID NO: 320018 - DNA, 55 bp, Artificial
  Synthetic oligonucleotide
agagcctccgacttacttcctgtgttaattgctttggcgtaagcatcattggccg

SEQ ID NO: 320019 - DNA, 60 bp, Artificial
  Synthetic oligonucleotide
agagcctctgacttactgccgctgttaagcgctttggcgtaagcatcattcgctgattgt

SEQ ID NO: 320020 - DNA, 60 bp, Artificial
  Synthetic oligonucleotide
agagcctctgacttactgcctgagttaagagctgcggcgtaagcgtcattggctgattgc

SEQ ID NO: 320021 - DNA, 60 bp, Artificial
  Synthetic oligonucleotide
agagcctggacgccacacttgaaacattgaatagtatattaagatatgcaaaaatgacac

SEQ ID NO: 320022 - DNA, 53 bp, Artificial
  Synthetic oligonucleotide
agagcctgtcaggatagtggaatgtgactagtctggtatttgcctttaaattc

SEQ ID NO: 320023 - DNA, 52 bp, Artificial
  Synthetic oligonucleotide
agagcgaaaggcgtgccccttcgaggaactaccgggtcgtcgaatccaccaa

SEQ ID NO: 320024 - DNA, 59 bp, Artificial
  Synthetic oligonucleotide
agagcgaacgacaattaaccaatgattatctgacgaatggttataagagtgaagttgta

SEQ ID NO: 320025 - DNA, 60 bp, Artificial
  Synthetic oligonucleotide
agagcgacaaaggataatgtaagaactgtggattcgttcttaatgcatctgaagcctaag

SEQ ID NO: 320026 - DNA, 58 bp, Artificial
  Synthetic oligonucleotide
agagcgagacgtcagttcatcaccccactggcccagaatcagacactatgtagtgggg

SEQ ID NO: 320027 - DNA, 60 bp, Artificial
  Synthetic oligonucleotide
agagcgatatgtcaccactaccgaacgattgaaggctactaaaatggcatacgatatgat

SEQ ID NO: 320028 - DNA, 60 bp, Artificial
  Synthetic oligonucleotide
agagcgatgaagtatgaacagccacaaggtagatcaactctccggcgtctggttgttctc

SEQ ID NO: 320029 - DNA, 60 bp, Artificial
  Synthetic oligonucleotide
agagcgatgatgtagttgaagtttcaatgcaaatgtggaaagatcaggttgcgcaaaagt

SEQ ID NO: 320030 - DNA, 60 bp, Artificial
  Synthetic oligonucleotide
agagcgatgccagcttctatgagaggccactactcctttcgggcgtttgttagtggtgac

SEQ ID NO: 320031 - DNA, 60 bp, Artificial
  Synthetic oligonucleotide
agagcgcaagcttacatatggctgcttgtgggcgtttcgcactaagaaagtgcactcgtt

SEQ ID NO: 320032 - DNA, 60 bp, Artificial
  Synthetic oligonucleotide
agagcgcagcaatgccttcagcaactgctacccgtatgacgtgccagactatgcatctct

SEQ ID NO: 320033 - DNA, 60 bp, Artificial
  Synthetic oligonucleotide
agagcgcatcgcgagagggagtagaccatagcgataggaggggatgctaggagttggggg

SEQ ID NO: 320034 - DNA, 57 bp, Artificial
  Synthetic oligonucleotide
agagcgcgatcgtaaaaacgcaacctccaccggtcagtgtagtgaaggtggagtgcg

SEQ ID NO: 320035 - DNA, 60 bp, Artificial
  Synthetic oligonucleotide
agagcgcgtcaggaactcgcacgactgaagccaggtgggcgtttatgtgctggaggccgc

SEQ ID NO: 320036 - DNA, 60 bp, Artificial
  Synthetic oligonucleotide
agagcggagtacctcatgtttatcattgccacgtagtggagtgatatttgagaagtgagc

SEQ ID NO: 320037 - DNA, 60 bp, Artificial
  Synthetic oligonucleotide
agagcggatggaagcaactcatattagtcaagtgttctgccttcttatgggaatatgcta

SEQ ID NO: 320038 - DNA, 60 bp, Artificial
  Synthetic oligonucleotide
agagcggatttcatcaagtagcaatggaagaagaatcaatcgaatggacagctttttggg

SEQ ID NO: 320039 - DNA, 55 bp, Artificial
  Synthetic oligonucleotide
agagcggcacactgcaacagatgttaatcgtaacatgcatcacctacttggtgtg

SEQ ID NO: 320040 - DNA, 60 bp, Artificial
  Synthetic oligonucleotide
agagcggcacactgcatcagtccagcctgtagtcacgtcttgcatgcttccttttggctg

SEQ ID NO: 320041 - DNA, 55 bp, Artificial
  Synthetic oligonucleotide
agagcggcatctaatgaatttccggtcgatcgataacgaagtttcgaggcagggt

SEQ ID NO: 320042 - DNA, 50 bp, Artificial
  Synthetic oligonucleotide
agagcggcatggaatacccttagtcttcattaagaccatggcatatagaa

SEQ ID NO: 320043 - DNA, 50 bp, Artificial
  Synthetic oligonucleotide
agagcggcgctctttacttagtgttggctccggctaacggattaactttt

SEQ ID NO: 320044 - DNA, 60 bp, Artificial
  Synthetic oligonucleotide
agagcgggaatggatgtgttcagcatgcaaccacaccgagctgataccatcatgtgtgac

SEQ ID NO: 320045 - DNA, 60 bp, Artificial
  Synthetic oligonucleotide
agagcgtctcgggagatgatgagtaagatagatttgaggttgcttgagctaatgatgcct

SEQ ID NO: 320046 - DNA, 50 bp, Artificial
  Synthetic oligonucleotide
agagcgtgaagaacggcacatatgactatcctaagtactcagaggagtcc

SEQ ID NO: 320047 - DNA, 56 bp, Artificial
  Synthetic oligonucleotide
agagcgtgcaacactccctgacatccattgaggaggagctgttggccagcaggaag

SEQ ID NO: 320048 - DNA, 60 bp, Artificial
  Synthetic oligonucleotide
agagcgtgctatgacaacaatgtataaagaagcgcgtgtcactgatagaagagcaaaatt

SEQ ID NO: 320049 - DNA, 55 bp, Artificial
  Synthetic oligonucleotide
agagcgtggaacatttgggaagttgaggactatgggtttggaattttcacgacta

SEQ ID NO: 320050 - DNA, 58 bp, Artificial
  Synthetic oligonucleotide
agagcgtggatcacgacacagtagaacaacgaaccgagaaaacatggccgaggtggaa

SEQ ID NO: 320051 - DNA, 57 bp, Artificial
  Synthetic oligonucleotide
agagcgtgtcgttttgaatcggtgtacaccgattcattctctagccccctatcggtg

SEQ ID NO: 320052 - DNA, 58 bp, Artificial
  Synthetic oligonucleotide
agagcgttgctgtgaccaaaccgttcgttgttgaggaggctccgaaattgattagtga

SEQ ID NO: 320053 - DNA, 52 bp, Artificial
  Synthetic oligonucleotide
agagcgttggtttcaagaatgtgcaaacactcgttgagagagcagttagcga

SEQ ID NO: 320054 - DNA, 57 bp, Artificial
  Synthetic oligonucleotide
agagctaaccagatacttgggggcttcagtaaaaatatacaggcacccagaccaaga

SEQ ID NO: 320055 - DNA, 55 bp, Artificial
  Synthetic oligonucleotide
agagctaatgagattgcagatagggcatctgtgggctgacgtcacaccaacgaac

SEQ ID NO: 320056 - DNA, 55 bp, Artificial
  Synthetic oligonucleotide
agagctaatgcggagcttaacgatggtggaattgtaccatgttttacaaggtgcc

SEQ ID NO: 320057 - DNA, 60 bp, Artificial
  Synthetic oligonucleotide
agagctacagcatgggagcacctctatcaacgactcgaagaggcatgggacagaatctct

SEQ ID NO: 320058 - DNA, 60 bp, Artificial
  Synthetic oligonucleotide
agagctacgccccatccagcagttcaggtatcgatgcaagttcgagggctgcgaccggcc

SEQ ID NO: 320059 - DNA, 57 bp, Artificial
  Synthetic oligonucleotide
agagctagaactggcagaaaacagggagattttaaaagaaccagtacatggagcgta

SEQ ID NO: 320060 - DNA, 60 bp, Artificial
  Synthetic oligonucleotide
agagctagagacagcacaggcattgtttcatgcgcaggaggtccacaatgatgcacaagt

SEQ ID NO: 320061 - DNA, 60 bp, Artificial
  Synthetic oligonucleotide
agagctaggggcaatgcgactcgagctcaatttgcaaagatagacaactggaaggagtgg

SEQ ID NO: 320062 - DNA, 60 bp, Artificial
  Synthetic oligonucleotide
agagctaggtgcattctttgcttgcctccaggacatgaggaacaccatcatggcatcaaa

SEQ ID NO: 320063 - DNA, 60 bp, Artificial
  Synthetic oligonucleotide
agagctatagaggcgcaacaacatatgttgcaactcacagtctggggcattaagcagctc

SEQ ID NO: 320064 - DNA, 53 bp, Artificial
  Synthetic oligonucleotide
agagctatggttcaagaagattccgactgaacttctcgttcgttcacacattt

SEQ ID NO: 320065 - DNA, 55 bp, Artificial
  Synthetic oligonucleotide
agagctattcaacagaagtattttaacgtgacagcatcagcaaacttcttaggag

SEQ ID NO: 320066 - DNA, 58 bp, Artificial
  Synthetic oligonucleotide
agagctcaatgggtgtgggtcccttgcaatgcgtggcacctcccgaacccgccaggct

SEQ ID NO: 320067 - DNA, 60 bp, Artificial
  Synthetic oligonucleotide
agagctcaggtggtggacgtcgaaccaatgatcacggttcaaccaaagaagtgtgcacag

SEQ ID NO: 320068 - DNA, 53 bp, Artificial
  Synthetic oligonucleotide
agagctcataataaaatcgcgacacggcgagtttgtgattagaaacacaacgc

SEQ ID NO: 320069 - DNA, 60 bp, Artificial
  Synthetic oligonucleotide
agagctcctggtttaatcaagtacaagcctatgacagatcaaatagaatgtactgcatct

SEQ ID NO: 320070 - DNA, 60 bp, Artificial
  Synthetic oligonucleotide
agagctgacatatgaccattggtatcacagcagctattaggcatttcttatcaccggaaa

SEQ ID NO: 320071 - DNA, 58 bp, Artificial
  Synthetic oligonucleotide
agagctgataccaaaatactattcattgaggaggggaaaatcgttcatactagcaaat

SEQ ID NO: 320072 - DNA, 60 bp, Artificial
  Synthetic oligonucleotide
agagctgcatccggagtactacaaggactgctgacaccgagctttctacaagggactttc

SEQ ID NO: 320073 - DNA, 59 bp, Artificial
  Synthetic oligonucleotide
agagctgcgtgagtccgttccactttttgatcatgctgttaacctaggttactgcatat

SEQ ID NO: 320074 - DNA, 58 bp, Artificial
  Synthetic oligonucleotide
agagctgctcagtgaggggggagttcccggaattgtggcactgtttgtggtcctcgaa

SEQ ID NO: 320075 - DNA, 60 bp, Artificial
  Synthetic oligonucleotide
agagctggatccggacgattagtgacaggattcttagcgatcatctgggacgacctacgg

SEQ ID NO: 320076 - DNA, 59 bp, Artificial
  Synthetic oligonucleotide
agagctgttaatgggctcatttggaatcgtgtgccccaactgttctactagactgtaac

SEQ ID NO: 320077 - DNA, 60 bp, Artificial
  Synthetic oligonucleotide
agagcttaagagagaagcagttagacattttcctagggcatggcttcatagcttaggaca

SEQ ID NO: 320078 - DNA, 60 bp, Artificial
  Synthetic oligonucleotide
agagcttaatatggagtgaattaaatgataagtccattggattagtacattgtgatatgg

SEQ ID NO: 320079 - DNA, 52 bp, Artificial
  Synthetic oligonucleotide
agagcttattcaatgaaagaagatacaaggcttgaaggtccatgggagtatg

SEQ ID NO: 320080 - DNA, 52 bp, Artificial
  Synthetic oligonucleotide
agagcttcaatatgtaattctaaatgcgtcccacatcacaccttatgtgcca

SEQ ID NO: 320081 - DNA, 55 bp, Artificial
  Synthetic oligonucleotide
agagcttctagaagaacttaagagtgaagctgttaggcattttcctaggccatgg

SEQ ID NO: 320082 - DNA, 59 bp, Artificial
  Synthetic oligonucleotide
agagcttctggattgtgccctggttataaaagcctaagagctgccagagtcatgtgcaa

SEQ ID NO: 320083 - DNA, 60 bp, Artificial
  Synthetic oligonucleotide
agagcttcttctgcagatgctgaatttaacgccttagcatatgtgtcattagcagactgc

SEQ ID NO: 320084 - DNA, 51 bp, Artificial
  Synthetic oligonucleotide
agagcttgacctgttaggctggtcggccatctacagccgccagatggagat

SEQ ID NO: 320085 - DNA, 59 bp, Artificial
  Synthetic oligonucleotide
agagcttgggacgaacttggaagatagcacactacttgcgcctataaagcccaactgtc

SEQ ID NO: 320086 - DNA, 60 bp, Artificial
  Synthetic oligonucleotide
agagcttgtcaagagataggatcaacagcatataagatgaacatgcttgctcaggcttta

SEQ ID NO: 320087 - DNA, 50 bp, Artificial
  Synthetic oligonucleotide
agagctttactcgccttctagaagatcctaccaccttaaatataaaggga

SEQ ID NO: 320088 - DNA, 55 bp, Artificial
  Synthetic oligonucleotide
agagctttagtggaatgccaacaagctctttccgttggtaaatggaggaagacgc

SEQ ID NO: 320089 - DNA, 59 bp, Artificial
  Synthetic oligonucleotide
agagctttggcagctccacaacttccggtatcacgggcgacgatacaacagcgtcctct

SEQ ID NO: 320090 - DNA, 55 bp, Artificial
  Synthetic oligonucleotide
agagctttgggacaagggaagaaataacctcctctccgcagcaggaaccgaggga

SEQ ID NO: 320091 - DNA, 57 bp, Artificial
  Synthetic oligonucleotide
agagcttttagaggagcttaagaatgaagctgttagacattttcctagggtgtggct

SEQ ID NO: 320092 - DNA, 60 bp, Artificial
  Synthetic oligonucleotide
agagcttttcttcacatacctagaagaatcagacagggcctagaaaggcttctgctataa

SEQ ID NO: 320093 - DNA, 52 bp, Artificial
  Synthetic oligonucleotide
agaggaaagactacaaggagatccctggcttaagagcatgattgacctagca

SEQ ID NO: 320094 - DNA, 55 bp, Artificial
  Synthetic oligonucleotide
agaggaaattcacggagctagccggcttcagattgtgccatataccggcagagct

SEQ ID NO: 320095 - DNA, 60 bp, Artificial
  Synthetic oligonucleotide
agaggaacaagtactcattgtacaagaaccagcaccctacattgacagacccttcatgac

SEQ ID NO: 320096 - DNA, 60 bp, Artificial
  Synthetic oligonucleotide
agaggaacataacagagatagtatatttgaacagcaccactatagagagagagatttgcc

SEQ ID NO: 320097 - DNA, 59 bp, Artificial
  Synthetic oligonucleotide
agaggaacgatctctgtcgggtctacaccatcaaacgacgctccgaacgatggtgataa

SEQ ID NO: 320098 - DNA, 55 bp, Artificial
  Synthetic oligonucleotide
agaggaacggcgcaagttacgcagagattgtcgggattggcacgaagccctgtcg

SEQ ID NO: 320099 - DNA, 55 bp, Artificial
  Synthetic oligonucleotide
agaggaacgtgcgcacgaagaagagaagcggtgtccgccctatgccgatcggcga

SEQ ID NO: 320100 - DNA, 51 bp, Artificial
  Synthetic oligonucleotide
agaggaactagaaagcgagcttgtagcgctcgctaaggaggaagcaaagtt

SEQ ID NO: 320101 - DNA, 57 bp, Artificial
  Synthetic oligonucleotide
agaggaactttgaagttttatgtggtggcccgtgccagttctgattatatgagttac

SEQ ID NO: 320102 - DNA, 52 bp, Artificial
  Synthetic oligonucleotide
agaggaagattgttggtatcccgcctttaatttgaactggcttcccgtactt

SEQ ID NO: 320103 - DNA, 58 bp, Artificial
  Synthetic oligonucleotide
agaggaagcgcgccgatgaagcgcaatggaataagcggtccaccaagaagaaaggttc

SEQ ID NO: 320104 - DNA, 56 bp, Artificial
  Synthetic oligonucleotide
agaggaagtactagttacttaatatctaaagtcctccatgagaaaaaatatgacca

SEQ ID NO: 320105 - DNA, 57 bp, Artificial
  Synthetic oligonucleotide
agaggaatacttgaagacgagcaaatgtaccaaaaatgctgcaacctatttgaaaat

SEQ ID NO: 320106 - DNA, 60 bp, Artificial
  Synthetic oligonucleotide
agaggaatctggaacgcatatcgaccagagacattctccagacgcgcgacttgcactcac

SEQ ID NO: 320107 - DNA, 55 bp, Artificial
  Synthetic oligonucleotide
agaggaatgctcgtgctatgggcacaattcaaaggtaacttgtgtatgcagggac

SEQ ID NO: 320108 - DNA, 55 bp, Artificial
  Synthetic oligonucleotide
agaggaatggcagttaggatttgtgcctactccagacaaccctattcaggataca

SEQ ID NO: 320109 - DNA, 55 bp, Artificial
  Synthetic oligonucleotide
agaggaatgtaatagcggaactagtcccaggaccaacatattataccgatggagg

SEQ ID NO: 320110 - DNA, 60 bp, Artificial
  Synthetic oligonucleotide
agaggaattcggaaagtcgcagctcctgtactgtccacgctgtttccaatggcagcacca

SEQ ID NO: 320111 - DNA, 60 bp, Artificial
  Synthetic oligonucleotide
agaggaattgtgctaggaaagtagccatcatccatcatctcccagagcgagtcgtagatc

SEQ ID NO: 320112 - DNA, 58 bp, Artificial
  Synthetic oligonucleotide
agaggaatttaattcattgtcacaagaaatagctatgtcacaattgattgatttagcg

SEQ ID NO: 320113 - DNA, 60 bp, Artificial
  Synthetic oligonucleotide
agaggacaagctcctgggggtgtgaagaatttggctgcctggcaattagcgatgggtgtg

SEQ ID NO: 320114 - DNA, 60 bp, Artificial
  Synthetic oligonucleotide
agaggacaaggctcaagtattaatgatggcatgctttggacttgcttatgaagacttcag

SEQ ID NO: 320115 - DNA, 58 bp, Artificial
  Synthetic oligonucleotide
agaggacaagtggtacacccagcaggacctgtgcgacgttaacctgttgcaacttgtg

SEQ ID NO: 320116 - DNA, 60 bp, Artificial
  Synthetic oligonucleotide
agaggacattgcagtggcacagagccgaaaaccgaacagatatgatgttgctcagtacaa

SEQ ID NO: 320117 - DNA, 60 bp, Artificial
  Synthetic oligonucleotide
agaggaccccacatgttgtagcttcaaggcccaatgtcagaccacgccatggcgtgccac

SEQ ID NO: 320118 - DNA, 60 bp, Artificial
  Synthetic oligonucleotide
agaggaccgactctgctatggagggccatggaaactccaacataaatggaatggacatga

SEQ ID NO: 320119 - DNA, 55 bp, Artificial
  Synthetic oligonucleotide
agaggacctgcgtgttgtacaacagctgcttatgggtgcgttaacagtaacgtgc

SEQ ID NO: 320120 - DNA, 55 bp, Artificial
  Synthetic oligonucleotide
agaggacgaacaccggaagagcgaacggagactacatgcaacaagtggtgacccc

SEQ ID NO: 320121 - DNA, 54 bp, Artificial
  Synthetic oligonucleotide
agaggacgaactagacccaaatgagttgcgcacgaatagaacgatccaggccta

SEQ ID NO: 320122 - DNA, 60 bp, Artificial
  Synthetic oligonucleotide
agaggacgcataggaagaaacccatcacaagttggtgatgagtattgctatggagggcac

SEQ ID NO: 320123 - DNA, 55 bp, Artificial
  Synthetic oligonucleotide
agaggacgcgtcaaagggatgtttgcatacgagaaccatgatgtggaaccacctg

SEQ ID NO: 320124 - DNA, 58 bp, Artificial
  Synthetic oligonucleotide
agaggacgtcatccaggaattagttaagctggtgacgcggaaatataagcattcggga

SEQ ID NO: 320125 - DNA, 59 bp, Artificial
  Synthetic oligonucleotide
agaggacgtgtctttgtagatcacgcggttatacatcttatgtacatacccgtgatatt

SEQ ID NO: 320126 - DNA, 59 bp, Artificial
  Synthetic oligonucleotide
agaggactatttggggccatagctggattcatagaaggaggttggtcagggctagtcgc

SEQ ID NO: 320127 - DNA, 57 bp, Artificial
  Synthetic oligonucleotide
agaggacttttcggagccatcgcaggttttattgaaggagggtggactggaatgata

SEQ ID NO: 320128 - DNA, 58 bp, Artificial
  Synthetic oligonucleotide
agaggagaaagcttttagtccagaggtaatacccatgtttacagcattgtcagaggga

SEQ ID NO: 320129 - DNA, 60 bp, Artificial
  Synthetic oligonucleotide
agaggagaatgccaaactgaaacaagagaatgaagctctgaaggctaagcttcatcgtct

SEQ ID NO: 320130 - DNA, 58 bp, Artificial
  Synthetic oligonucleotide
agaggagaccttcacgcacaacaagtggatgctcttcgcttcttcaaaaactacctat

SEQ ID NO: 320131 - DNA, 57 bp, Artificial
  Synthetic oligonucleotide
agaggagatagatggagtaaagttggagtcaacaagaatttaccagattttggcgat

SEQ ID NO: 320132 - DNA, 53 bp, Artificial
  Synthetic oligonucleotide
agaggagatgtcatgtttttctccatgacggatgcgacggaagctaggatgca

SEQ ID NO: 320133 - DNA, 60 bp, Artificial
  Synthetic oligonucleotide
agaggagattgggcttcctactgtgaaatctctctggttcagagtgctaaggacaccaca

SEQ ID NO: 320134 - DNA, 60 bp, Artificial
  Synthetic oligonucleotide
agaggagccaaagtatcgctctgctgatatctgtactatccaacttggagttacttccca

SEQ ID NO: 320135 - DNA, 60 bp, Artificial
  Synthetic oligonucleotide
agaggagcccgagataaccgatgggagatggtctcgagaattggcagtgatcttcccagg

SEQ ID NO: 320136 - DNA, 52 bp, Artificial
  Synthetic oligonucleotide
agaggagcctggggcacgacggccctctcaacggttttttgacggtttttgc

SEQ ID NO: 320137 - DNA, 55 bp, Artificial
  Synthetic oligonucleotide
agaggagctaataaagaaggaaaaggtctacctgtcatgggtaccggcacacaag

SEQ ID NO: 320138 - DNA, 59 bp, Artificial
  Synthetic oligonucleotide
agaggagctgagaataatgtatcctacaaagtttaggcgtgggacttcttactctcata

SEQ ID NO: 320139 - DNA, 56 bp, Artificial
  Synthetic oligonucleotide
agaggaggacactgaaggcctactagaatggtgtaagagaaatcttggtcttgact

SEQ ID NO: 320140 - DNA, 57 bp, Artificial
  Synthetic oligonucleotide
agaggaggacatgttggtgaacgtccttcgccaagccggtttcatcgtacctgagaa

SEQ ID NO: 320141 - DNA, 60 bp, Artificial
  Synthetic oligonucleotide
agaggaggccaataaaggggagaacaactggttgctacaccccatgagccagcatggagc

SEQ ID NO: 320142 - DNA, 55 bp, Artificial
  Synthetic oligonucleotide
agaggaggtgtcgttcagagtaggactacacgattacccggtggggtcgcaatta

SEQ ID NO: 320143 - DNA, 55 bp, Artificial
  Synthetic oligonucleotide
agaggagtctgttagcaacctagaagagtccctgacttctttgtctggagtggtt

SEQ ID NO: 320144 - DNA, 58 bp, Artificial
  Synthetic oligonucleotide
agaggagtgtacaattatgggaaatatagaatggggtcggtttatcacgcaatgcgaa

SEQ ID NO: 320145 - DNA, 51 bp, Artificial
  Synthetic oligonucleotide
agaggagtttgcctttcatcacggggagaataggtttcaggacgaaattgc

SEQ ID NO: 320146 - DNA, 55 bp, Artificial
  Synthetic oligonucleotide
agaggatacgaggtcaaagaatcggttgttcgtgcattggtattttccttcgaac

SEQ ID NO: 320147 - DNA, 55 bp, Artificial
  Synthetic oligonucleotide
agaggatccgcatccagcaatagagactattgcacaaaggatgcttctcggaccg

SEQ ID NO: 320148 - DNA, 57 bp, Artificial
  Synthetic oligonucleotide
agaggatccggtgtcaagagccggcggagggtaagtgaggtgcccttagcccatgtc

SEQ ID NO: 320149 - DNA, 55 bp, Artificial
  Synthetic oligonucleotide
agaggatcgtttcacctgggaaagtaccaacgtcccgggcacgatgctctaccac

SEQ ID NO: 320150 - DNA, 60 bp, Artificial
  Synthetic oligonucleotide
agaggatcttgactgttggagccctgaatgggatatcaactgaatgtttggccgttgata

SEQ ID NO: 320151 - DNA, 59 bp, Artificial
  Synthetic oligonucleotide
agaggatgtctggaacctatttgagacatcaataaaaccatgtgtcaaactaacacctc

SEQ ID NO: 320152 - DNA, 60 bp, Artificial
  Synthetic oligonucleotide
agaggatgttcacagtggggcgaatatgcagttgtctaaccagggtgatcaaacgtcgta

SEQ ID NO: 320153 - DNA, 57 bp, Artificial
  Synthetic oligonucleotide
agaggattgatatcaactcctttaggaagcccccctatagttagcaatagtgacttc

SEQ ID NO: 320154 - DNA, 55 bp, Artificial
  Synthetic oligonucleotide
agaggatttctctcgtgccttgttacgggtttgaagggcgagcctatcttcggag

SEQ ID NO: 320155 - DNA, 55 bp, Artificial
  Synthetic oligonucleotide
agaggatttcttgatgtccatggccagaataatttatctagacccatctctgggg

SEQ ID NO: 320156 - DNA, 57 bp, Artificial
  Synthetic oligonucleotide
agaggattttctcgtgagtaatgatgcttaccttttaggacgtgaaaaggcattgag

SEQ ID NO: 320157 - DNA, 60 bp, Artificial
  Synthetic oligonucleotide
agaggcaaagcgacaagagacaacgcatatgccgataaactgcccacatgcaatagggac

SEQ ID NO: 320158 - DNA, 56 bp, Artificial
  Synthetic oligonucleotide
agaggcaactggcagataggattgcaaccgggaaaaatcttggaaaggaacaagac

SEQ ID NO: 320159 - DNA, 57 bp, Artificial
  Synthetic oligonucleotide
agaggcaagactgaacagagaggaaataagtggggtcaaattggaatcaatgggaac

SEQ ID NO: 320160 - DNA, 54 bp, Artificial
  Synthetic oligonucleotide
agaggcaattttaagaaccaaagaaggactgttaagtgtttcaattgtggcaaa

SEQ ID NO: 320161 - DNA, 59 bp, Artificial
  Synthetic oligonucleotide
agaggcacatcatataaccaggtataggtgcccccttagaggcacactaacaataggta

SEQ ID NO: 320162 - DNA, 59 bp, Artificial
  Synthetic oligonucleotide
agaggcacctccacaagattagtgaatggcttattagcactcatctgggacgacctgag

SEQ ID NO: 320163 - DNA, 55 bp, Artificial
  Synthetic oligonucleotide
agaggcacgaacgtatggggaaactggacaatggaacgttgttatgggctcaaac

SEQ ID NO: 320164 - DNA, 54 bp, Artificial
  Synthetic oligonucleotide
agaggcactacagacaaatcaacttaaactgacaaccaatgaaagacgtagtac

SEQ ID NO: 320165 - DNA, 60 bp, Artificial
  Synthetic oligonucleotide
agaggcagcgaacatcacagttgcctatggtgaatggccatcgtacttaagtgatttgga

SEQ ID NO: 320166 - DNA, 58 bp, Artificial
  Synthetic oligonucleotide
agaggcagtgcagaaaatagctgtggaaagcatagtaatatgggggaagacccctaaa

SEQ ID NO: 320167 - DNA, 60 bp, Artificial
  Synthetic oligonucleotide
agaggcatcggaagtggactttcgtccatccaagaagaggcgtgtgatttcagcaactcc

SEQ ID NO: 320168 - DNA, 55 bp, Artificial
  Synthetic oligonucleotide
agaggcatctagcttgaatgattcagtagccatgcggtgctactttgggaacctc

SEQ ID NO: 320169 - DNA, 60 bp, Artificial
  Synthetic oligonucleotide
agaggcatgccccaaatgtcaggtccaaggagaaccaaagacaggacagaccaacgcagc

SEQ ID NO: 320170 - DNA, 51 bp, Artificial
  Synthetic oligonucleotide
agaggcatggtgcgcttacaagcagtaatacacccagcaataatgctgatt

SEQ ID NO: 320171 - DNA, 57 bp, Artificial
  Synthetic oligonucleotide
agaggcattagccggaatcgacacagtcttcacaaggcgaatatggaacgtttaccg

SEQ ID NO: 320172 - DNA, 60 bp, Artificial
  Synthetic oligonucleotide
agaggcatttatggcaactaacaaagcttacttcctcaacagacaaaagcaagttgatga

SEQ ID NO: 320173 - DNA, 60 bp, Artificial
  Synthetic oligonucleotide
agaggccagaaagtgatcatttcatgaacaataccgaaccactgtgtgatgccaagggtt

SEQ ID NO: 320174 - DNA, 55 bp, Artificial
  Synthetic oligonucleotide
agaggccattgtgaaggtagacgaaggttaacctgatggttaacctgtagccgtc

SEQ ID NO: 320175 - DNA, 58 bp, Artificial
  Synthetic oligonucleotide
agaggcccgttatcggtggagcccataccgtggaggtgagagaatggctagttctcga

SEQ ID NO: 320176 - DNA, 53 bp, Artificial
  Synthetic oligonucleotide
agaggccgtctacggatgggtttctttccaaatgccaccgaagatagtacttc

SEQ ID NO: 320177 - DNA, 52 bp, Artificial
  Synthetic oligonucleotide
agaggccgtggtgccttcccgcaaagaccctacccatgaaaaagtgctaact

SEQ ID NO: 320178 - DNA, 52 bp, Artificial
  Synthetic oligonucleotide
agaggcctccggaggcctctccctctatgtctgtgtcaagagggggcaggaa

SEQ ID NO: 320179 - DNA, 51 bp, Artificial
  Synthetic oligonucleotide
agaggcgagccgggggggtcgagtgggcctcgcactttacgcgcacacgcc

SEQ ID NO: 320180 - DNA, 57 bp, Artificial
  Synthetic oligonucleotide
agaggcggaaggcccattcgggtggttacatttccgaataccattgtgcagattgaa

SEQ ID NO: 320181 - DNA, 58 bp, Artificial
  Synthetic oligonucleotide
agaggcggcgtcaagtggtagatgttatggcagctatctttcagggtcctataaccct

SEQ ID NO: 320182 - DNA, 54 bp, Artificial
  Synthetic oligonucleotide
agaggcggtgggtcgtggaggtgtcccttcttacaggacaactctgggaggacc

SEQ ID NO: 320183 - DNA, 59 bp, Artificial
  Synthetic oligonucleotide
agaggcgtacacccgatttacctaggcgctgtgcattatgaagtttcatatcgagaatt

SEQ ID NO: 320184 - DNA, 53 bp, Artificial
  Synthetic oligonucleotide
agaggcgttgggtacgtggccgatgacatagaaaaatgcgacgccaatcgagg

SEQ ID NO: 320185 - DNA, 57 bp, Artificial
  Synthetic oligonucleotide
agaggctaatcaattccttagccaactcctggtcaccacctttatcagggtgcaaaa

SEQ ID NO: 320186 - DNA, 54 bp, Artificial
  Synthetic oligonucleotide
agaggctacatcatgagccgtctttaggtatctaggatacttgctgacaccctt

SEQ ID NO: 320187 - DNA, 60 bp, Artificial
  Synthetic oligonucleotide
agaggctatgagcagccagtatggcatcctgagtttcaggcgggagagttgtgtccacaa

SEQ ID NO: 320188 - DNA, 56 bp, Artificial
  Synthetic oligonucleotide
agaggctcacgcgacaaaacagtctgtcgtcgcgcttggatcacaagagggagcct

SEQ ID NO: 320189 - DNA, 60 bp, Artificial
  Synthetic oligonucleotide
agaggctcagaacagaggattaacttcatgtgccaaagagttgatcaagatgtagttgtc

SEQ ID NO: 320190 - DNA, 60 bp, Artificial
  Synthetic oligonucleotide
agaggctccgcaagcaatgcacgcagaatatgtctccctgttgatcagatcagcggaccg

SEQ ID NO: 320191 - DNA, 55 bp, Artificial
  Synthetic oligonucleotide
agaggctccgcacctcggaggctatcggaggccctttgttgccgtaagcgcgggc

SEQ ID NO: 320192 - DNA, 58 bp, Artificial
  Synthetic oligonucleotide
agaggctcgcataaagtggccgctacacaagacaccgtcaatgaaggaaaagacggta

SEQ ID NO: 320193 - DNA, 57 bp, Artificial
  Synthetic oligonucleotide
agaggctcgtatctagtctttctgccttggaaaatcaaagtctcggacttgaatccc

SEQ ID NO: 320194 - DNA, 52 bp, Artificial
  Synthetic oligonucleotide
agaggctgccaattcggtggttgcctacggacgatggcctgagtacctgaga

SEQ ID NO: 320195 - DNA, 56 bp, Artificial
  Synthetic oligonucleotide
agaggctgtgaagggccctgtaaggtccagtcctacgagcagcgtcacgacatctc

SEQ ID NO: 320196 - DNA, 60 bp, Artificial
  Synthetic oligonucleotide
agaggcttgcctccaacatggttttccatgatgtgtggtagtgtctcatcgttcgtgatg

SEQ ID NO: 320197 - DNA, 55 bp, Artificial
  Synthetic oligonucleotide
agagggaaatcgacgaaatgtgatctgtttaccgataaaatggaactacgctttg

SEQ ID NO: 320198 - DNA, 60 bp, Artificial
  Synthetic oligonucleotide
agagggaactcaaactacaaggcagtatcctgtgatttcaacaatggcatcatcattcag

SEQ ID NO: 320199 - DNA, 54 bp, Artificial
  Synthetic oligonucleotide
agagggaagacgaaagaccaatttgtacggattcataataaaaggaagatccca

SEQ ID NO: 320200 - DNA, 55 bp, Artificial
  Synthetic oligonucleotide
agagggaagccccatggcgattactggcgggaacctcgaaggttagccgaaatgc

SEQ ID NO: 320201 - DNA, 55 bp, Artificial
  Synthetic oligonucleotide
agagggaagtttgtgttcagctaggtaactataatgagtgtaaacgagttactgg

SEQ ID NO: 320202 - DNA, 52 bp, Artificial
  Synthetic oligonucleotide
agagggacgacttgtacgagaaagcttgtcagtttaagagggataggaatac

SEQ ID NO: 320203 - DNA, 53 bp, Artificial
  Synthetic oligonucleotide
agagggacgagacggacgcgagacgtgttgccaaacaagcgcatctttattgt

SEQ ID NO: 320204 - DNA, 60 bp, Artificial
  Synthetic oligonucleotide
agagggacgtcaagcgtagcgaggtaggcagttatctatatgccttactccgcgatcgcg

SEQ ID NO: 320205 - DNA, 55 bp, Artificial
  Synthetic oligonucleotide
agagggactagctccactttgattgtcactgacattttctgaagaatactcgctt

SEQ ID NO: 320206 - DNA, 59 bp, Artificial
  Synthetic oligonucleotide
agagggagaaagccacacggagatgagcggagaaatcacctccagaggaccccttcagc

SEQ ID NO: 320207 - DNA, 60 bp, Artificial
  Synthetic oligonucleotide
agagggagataacattccatggggccaaagaaatagcactcagttattctgctggtgcac

SEQ ID NO: 320208 - DNA, 60 bp, Artificial
  Synthetic oligonucleotide
agagggagcctcgattgattcgtggctagaattactgcgtcacttataacgcgtgactgc

SEQ ID NO: 320209 - DNA, 60 bp, Artificial
  Synthetic oligonucleotide
agagggagccttgtattacgccaatttatggtgtctgagtgcaagagagcggcatcaatg

SEQ ID NO: 320210 - DNA, 60 bp, Artificial
  Synthetic oligonucleotide
agagggagctactccctatgatgtcaatactatgctaaatgccatagggggacaccaagg

SEQ ID NO: 320211 - DNA, 55 bp, Artificial
  Synthetic oligonucleotide
agagggagggatactccctagtcggaattgattctttccgcatgctccaaaacag

SEQ ID NO: 320212 - DNA, 50 bp, Artificial
  Synthetic oligonucleotide
agagggaggggcgaaatctcaagattcattggacttacgacgaagaatgg

SEQ ID NO: 320213 - DNA, 56 bp, Artificial
  Synthetic oligonucleotide
agagggatactctctagtgggaatagatcctttccgtctactccaaaacagccaag

SEQ ID NO: 320214 - DNA, 55 bp, Artificial
  Synthetic oligonucleotide
agagggatagagataggtagaggccagcctttaggtataggaataacgggccacc

SEQ ID NO: 320215 - DNA, 55 bp, Artificial
  Synthetic oligonucleotide
agagggatattccctcgtaggaattgaccctttccgtctgctccaaaacagccaa

SEQ ID NO: 320216 - DNA, 60 bp, Artificial
  Synthetic oligonucleotide
agagggatgatgtgaagcatactggtattgttcgttgtgttagtgatgttacgcgtggtt

SEQ ID NO: 320217 - DNA, 57 bp, Artificial
  Synthetic oligonucleotide
agagggattatttcaaagatgcttctgagcaagacaagggggattttataaaagcta

SEQ ID NO: 320218 - DNA, 55 bp, Artificial
  Synthetic oligonucleotide
agagggattcagggtgtcaagactattctaaaattggacagtagcaaggtccatg

SEQ ID NO: 320219 - DNA, 50 bp, Artificial
  Synthetic oligonucleotide
agagggcaatctcaaggcatgtgcgaaagctgacagcgctttagtgacaa

SEQ ID NO: 320220 - DNA, 53 bp, Artificial
  Synthetic oligonucleotide
agagggcaccacgaccgctgaccttcttttaaagtacggtagctccgccgtat

SEQ ID NO: 320221 - DNA, 53 bp, Artificial
  Synthetic oligonucleotide
agagggcagcatccatgggtagcgagacctctagcccccacgctatggtgggt

SEQ ID NO: 320222 - DNA, 55 bp, Artificial
  Synthetic oligonucleotide
agagggcatatgctatggatcgggaggtggcgggttccataggtggcggcgtcct

SEQ ID NO: 320223 - DNA, 56 bp, Artificial
  Synthetic oligonucleotide
agagggccctcggacaactcctaagacgtatcaagctgtcccatcaggaagaactc

SEQ ID NO: 320224 - DNA, 54 bp, Artificial
  Synthetic oligonucleotide
agagggccctgtggagggtgtccgcagaggagtacgtcgaggtagtgaggatgg

SEQ ID NO: 320225 - DNA, 57 bp, Artificial
  Synthetic oligonucleotide
agagggcctccaaaccaagaacttaatcctgatagccagcccaagaagtccactcca

SEQ ID NO: 320226 - DNA, 58 bp, Artificial
  Synthetic oligonucleotide
agagggcgctccgtacacaccagtagagcacgttgtgttcaacccaagtagtcgagac

SEQ ID NO: 320227 - DNA, 55 bp, Artificial
  Synthetic oligonucleotide
agaggggaaccaccaacgtccgactcaacagcagggaagtcaacccagccgcgga

SEQ ID NO: 320228 - DNA, 60 bp, Artificial
  Synthetic oligonucleotide
agaggggattgttcacctcccagatatacacgccacgctctagttccgattgtgtgagta

SEQ ID NO: 320229 - DNA, 57 bp, Artificial
  Synthetic oligonucleotide
agaggggcaaagctcggcgaacgtcatgctaccaattgcctccggttttagctcgcc

SEQ ID NO: 320230 - DNA, 57 bp, Artificial
  Synthetic oligonucleotide
agaggggcaaggaaagttgcaagatctagtcaacccaattaagacatgggtttcaga

SEQ ID NO: 320231 - DNA, 55 bp, Artificial
  Synthetic oligonucleotide
agaggggcgcatcgcgagagggagtagaccatagcgatgggaggggatgctagga

SEQ ID NO: 320232 - DNA, 60 bp, Artificial
  Synthetic oligonucleotide
agaggggcggttgcacataagtcctgtctgcctgcttgtgtgtatgggcttgcagtagca

SEQ ID NO: 320233 - DNA, 57 bp, Artificial
  Synthetic oligonucleotide
agagggggatagtcgaggaaaaccacatgaggtttagtgaagaagatcaactagaga

SEQ ID NO: 320234 - DNA, 56 bp, Artificial
  Synthetic oligonucleotide
agaggggtaagcttctgaaagtgaaccgtgttatgctctggatgggcctgttacct

SEQ ID NO: 320235 - DNA, 60 bp, Artificial
  Synthetic oligonucleotide
agaggggtgacgcaaccgtgtatggcactcgctcgagtgcgtactggagcactcaaccgg

SEQ ID NO: 320236 - DNA, 58 bp, Artificial
  Synthetic oligonucleotide
agaggggttacaggggagagtggcgtggagatggcgtgatgcacaccacatgcccctg

SEQ ID NO: 320237 - DNA, 55 bp, Artificial
  Synthetic oligonucleotide
agagggtaatctgcgtccgaagcgcttgtgttgtctaaaatactgggcctgtcgt

SEQ ID NO: 320238 - DNA, 55 bp, Artificial
  Synthetic oligonucleotide
agagggtaatgtggagggtacagctgagtcaatttgcagctattggcttagaagc

SEQ ID NO: 320239 - DNA, 60 bp, Artificial
  Synthetic oligonucleotide
agagggtcaaattgtgagtccaacatttatatcgagatatcgccaaatcgcatactattt

SEQ ID NO: 320240 - DNA, 60 bp, Artificial
  Synthetic oligonucleotide
agagggtcacgaatattgcatcttttatcaagctgtataagacagtgaagatgaggggag

SEQ ID NO: 320241 - DNA, 51 bp, Artificial
  Synthetic oligonucleotide
agagggtcacgtgaaaatcgtgaggtggtgtttaccatataacataatgtc

SEQ ID NO: 320242 - DNA, 56 bp, Artificial
  Synthetic oligonucleotide
agagggtcaggaaacacgcagttgcactgccagtttcccctgattacccacccctc

SEQ ID NO: 320243 - DNA, 60 bp, Artificial
  Synthetic oligonucleotide
agagggtgtggcatctggaacgatgagggatggcaggagggtattttcatgcttggacgc

SEQ ID NO: 320244 - DNA, 60 bp, Artificial
  Synthetic oligonucleotide
agagggttactggattcaatcaggttgactcagataaagtctatgatgatggtgcacctc

SEQ ID NO: 320245 - DNA, 57 bp, Artificial
  Synthetic oligonucleotide
agagggttatggaaatgccttttacagcactttaggatatgaagctaataaattaca

SEQ ID NO: 320246 - DNA, 55 bp, Artificial
  Synthetic oligonucleotide
agagggttctcatcggctgtggccgtcactagggcgaccgtggctaaacgtcaag

SEQ ID NO: 320247 - DNA, 53 bp, Artificial
  Synthetic oligonucleotide
agagggtttcagtttcgaggaaacaccccctgctccgaggcaggagccgaaaa

SEQ ID NO: 320248 - DNA, 50 bp, Artificial
  Synthetic oligonucleotide
agagggttttcgccagtgggtcacccttgctctgtttcgagacgtggccg

SEQ ID NO: 320249 - DNA, 54 bp, Artificial
  Synthetic oligonucleotide
agaggtaaataattgggacaccaatggtaattgggacaccgatacatcggttcc

SEQ ID NO: 320250 - DNA, 55 bp, Artificial
  Synthetic oligonucleotide
agaggtaagtggaataagtcactaattacacgtgatatcttagttttgttaggtg

SEQ ID NO: 320251 - DNA, 58 bp, Artificial
  Synthetic oligonucleotide
agaggtaatattcgctgtttggaaactaaaagatggtctagagtgacttgtgtcacta

SEQ ID NO: 320252 - DNA, 56 bp, Artificial
  Synthetic oligonucleotide
agaggtacgtgcatgaagtcatagaacgagtcaggcagcaaggggactacactgga

SEQ ID NO: 320253 - DNA, 60 bp, Artificial
  Synthetic oligonucleotide
agaggtactcgtgcttgttggtggagtgttgaatgatatcgcgaacgatatcatcctttg

SEQ ID NO: 320254 - DNA, 55 bp, Artificial
  Synthetic oligonucleotide
agaggtaggcgccagcccataccaaaggcgcgccagtctcagggccggcactggg

SEQ ID NO: 320255 - DNA, 57 bp, Artificial
  Synthetic oligonucleotide
agaggtagggataatctattagtatatttggtaaggaagttgaatgatcctagtata

SEQ ID NO: 320256 - DNA, 55 bp, Artificial
  Synthetic oligonucleotide
agaggtatagaggtaattagaggaggtcctttaggaataggatctacaggccatc

SEQ ID NO: 320257 - DNA, 57 bp, Artificial
  Synthetic oligonucleotide
agaggtatagcactaactgaaaaagcaaagttaaattcatatgcacctatttcctta

SEQ ID NO: 320258 - DNA, 55 bp, Artificial
  Synthetic oligonucleotide
agaggtatggttatcttggacatcccgggagtaccgcaagtgtatgcagtaattg

SEQ ID NO: 320259 - DNA, 55 bp, Artificial
  Synthetic oligonucleotide
agaggtcagacaggaggtagacccagtgccaggtccgggtttatctaatgggtgt

SEQ ID NO: 320260 - DNA, 55 bp, Artificial
  Synthetic oligonucleotide
agaggtcatatattaagctaaaacgacttcgtttcaagggtatagtgaaagtgga

SEQ ID NO: 320261 - DNA, 60 bp, Artificial
  Synthetic oligonucleotide
agaggtcgtatatgctgcacgtaattttgccatcgctcttcgtcaatggataatccccac

SEQ ID NO: 320262 - DNA, 59 bp, Artificial
  Synthetic oligonucleotide
agaggtcgtcactgcccaggaattagtggaatcgcaacatctaccggagttgtgtccta

SEQ ID NO: 320263 - DNA, 55 bp, Artificial
  Synthetic oligonucleotide
agaggtcgtcccagctttagccccagcatcggggttaagttgccagaaatttcga

SEQ ID NO: 320264 - DNA, 58 bp, Artificial
  Synthetic oligonucleotide
agaggtgaaaccggccgaaggacgagaattgcgtatgaaaggatgtgcaacatcctta

SEQ ID NO: 320265 - DNA, 58 bp, Artificial
  Synthetic oligonucleotide
agaggtgcgtgaaatcatacctcagaaactcgtttaatatgagtttcgtagacttgtc

SEQ ID NO: 320266 - DNA, 55 bp, Artificial
  Synthetic oligonucleotide
agaggtgctacggaaaagatggacaggccggatggccggtccagcactggtgggt

SEQ ID NO: 320267 - DNA, 60 bp, Artificial
  Synthetic oligonucleotide
agaggtggatccagtccattagtggatggattcttaacactcatctgggtcgacctgagg

SEQ ID NO: 320268 - DNA, 57 bp, Artificial
  Synthetic oligonucleotide
agaggtgggctaaacaggatcgtggagtggataatggctccggatgaacccaaggcc

SEQ ID NO: 320269 - DNA, 54 bp, Artificial
  Synthetic oligonucleotide
agaggtggtcattggaactgtcgtctacccacccgaactcttggttggtagtaa

SEQ ID NO: 320270 - DNA, 52 bp, Artificial
  Synthetic oligonucleotide
agaggtggtgatcaccccaaacgttatcagctattccctttaaccggacccc

SEQ ID NO: 320271 - DNA, 58 bp, Artificial
  Synthetic oligonucleotide
agaggtgtgcaaaataagttatttggattagacggaaatgtcagcacaatggaagaaa

SEQ ID NO: 320272 - DNA, 53 bp, Artificial
  Synthetic oligonucleotide
agaggtgtttgttcgctcgatattcggcccgggcggctcgccctctctttttc

SEQ ID NO: 320273 - DNA, 55 bp, Artificial
  Synthetic oligonucleotide
agaggttactcacacgtggatcgccacatgcatccagacgcttccgtgacgaaag

SEQ ID NO: 320274 - DNA, 56 bp, Artificial
  Synthetic oligonucleotide
agaggttcaagtggtctccaccgcaacacaatctttcctggcgacctgtgttaacg

SEQ ID NO: 320275 - DNA, 56 bp, Artificial
  Synthetic oligonucleotide
agaggttcaggtggtttccaccgcaacgcaatccttcctggcgacctgcgtcaacg

SEQ ID NO: 320276 - DNA, 55 bp, Artificial
  Synthetic oligonucleotide
agaggttgctgaggcctctgctgaagcccttcgtctgaagaaggccacgcgcgct

SEQ ID NO: 320277 - DNA, 58 bp, Artificial
  Synthetic oligonucleotide
agaggttggacgcctagcacttacgcacaagttgcaacggcgaacggaatcagagggc

SEQ ID NO: 320278 - DNA, 54 bp, Artificial
  Synthetic oligonucleotide
agaggttggctagctgccgaccccttaccacttttgcccagggctggggcccta

SEQ ID NO: 320279 - DNA, 55 bp, Artificial
  Synthetic oligonucleotide
agaggttgtcactagagccgttaacattcagagttccgtgcaaaccgggatccct

SEQ ID NO: 320280 - DNA, 60 bp, Artificial
  Synthetic oligonucleotide
agaggtttctatagaactctcaatctcgttcgcacacgtggcggccatccgatataatat

SEQ ID NO: 320281 - DNA, 57 bp, Artificial
  Synthetic oligonucleotide
agaggtttgagggactacaatccaattgcgagctcaatatgccagctgacgaattca

SEQ ID NO: 320282 - DNA, 50 bp, Artificial
  Synthetic oligonucleotide
agaggttttcgatgaatgtatgaaactagttgagaatcgtgggaacatgc

SEQ ID NO: 320283 - DNA, 56 bp, Artificial
  Synthetic oligonucleotide
agagtaacattcacagaacagggttataacagtacgaccgacgtagaagtgccgtg

SEQ ID NO: 320284 - DNA, 57 bp, Artificial
  Synthetic oligonucleotide
agagtaacccatgacacgtctaaacttgacgagagacatctcatccggtagatgggt

SEQ ID NO: 320285 - DNA, 55 bp, Artificial
  Synthetic oligonucleotide
agagtaacggtggacttttagctccaagatatgggtacataattgaagagtatgg

SEQ ID NO: 320286 - DNA, 58 bp, Artificial
  Synthetic oligonucleotide
agagtaactgtccagactcaaaggccaggcgcgctagaactcgcgccacgatcgagtt

SEQ ID NO: 320287 - DNA, 60 bp, Artificial
  Synthetic oligonucleotide
agagtaatgcttcctgtgggcgcagtcacagcctttggtttcctatctctgtcttttctc

SEQ ID NO: 320288 - DNA, 59 bp, Artificial
  Synthetic oligonucleotide
agagtaatgggaacttcatagctccaagatatgcatacaaaatcgtcaagaagggggac

SEQ ID NO: 320289 - DNA, 50 bp, Artificial
  Synthetic oligonucleotide
agagtacacccagtccatgcagggcccgttgcaccaggccaaatgagaga

SEQ ID NO: 320290 - DNA, 60 bp, Artificial
  Synthetic oligonucleotide
agagtacacctgctgtaaattctgggacaggcctcccagaaagctacacacagatacacc

SEQ ID NO: 320291 - DNA, 50 bp, Artificial
  Synthetic oligonucleotide
agagtacatcggcgctcctacccagacggggtccgagagggttcccgtcg

SEQ ID NO: 320292 - DNA, 60 bp, Artificial
  Synthetic oligonucleotide
agagtaccccagctcagtgtcacgtgtgtttagtgacgcgtctgtaactgtggactatgg

SEQ ID NO: 320293 - DNA, 57 bp, Artificial
  Synthetic oligonucleotide
agagtagatacttggttacaagggaaagtaaatatatcattatgcctaacaggagga

SEQ ID NO: 320294 - DNA, 58 bp, Artificial
  Synthetic oligonucleotide
agagtagatcctctcgcgttattgaatgaaagtattcagactgaatgtgctaaaggta

SEQ ID NO: 320295 - DNA, 60 bp, Artificial
  Synthetic oligonucleotide
agagtagattatagaataggagtaggagctctgataatagcactaatcttagcaataatt

SEQ ID NO: 320296 - DNA, 60 bp, Artificial
  Synthetic oligonucleotide
agagtagattgtatctctcccagatctcatcctcaaaggtgcgtgcttgctcggcactga

SEQ ID NO: 320297 - DNA, 60 bp, Artificial
  Synthetic oligonucleotide
agagtaggatgcagttctcctcactgactgtgaatgtgagagggtcaggaatgaggatac

SEQ ID NO: 320298 - DNA, 60 bp, Artificial
  Synthetic oligonucleotide
agagtaggcacacatctgtccaggcacatgcacattgttgtgattgctccagactagttc

SEQ ID NO: 320299 - DNA, 56 bp, Artificial
  Synthetic oligonucleotide
agagtaggtacgacgaaggaggtccttacagctatcaagaaacgtaatgctgacgt

SEQ ID NO: 320300 - DNA, 60 bp, Artificial
  Synthetic oligonucleotide
agagtagtacaatatgagtcgacgatttctaagatgtttacatcgtatgtaagtagagca

SEQ ID NO: 320301 - DNA, 56 bp, Artificial
  Synthetic oligonucleotide
agagtagtgcggatcatcaaaatcctctaccaaagcagtaagtaataagtagatgt

SEQ ID NO: 320302 - DNA, 60 bp, Artificial
  Synthetic oligonucleotide
agagtagtgtattgtggacatccaatagtatagtagcactctgtggatccaaggagcgat

SEQ ID NO: 320303 - DNA, 55 bp, Artificial
  Synthetic oligonucleotide
agagtagttgtatccgtaaattgatcaatcttgattctcgtttcatcgcagcgac

SEQ ID NO: 320304 - DNA, 55 bp, Artificial
  Synthetic oligonucleotide
agagtagtttctctcggtcatcatcacacgatgatcctgtggggtgcaaatcccc

SEQ ID NO: 320305 - DNA, 60 bp, Artificial
  Synthetic oligonucleotide
agagtataaggaacaatacttatgaccattcacaatacagagaggaggctcttctgaata

SEQ ID NO: 320306 - DNA, 60 bp, Artificial
  Synthetic oligonucleotide
agagtataagtttgtcataatagatgagtgtcatgtacatgatgcaagtgcaattgcctt

SEQ ID NO: 320307 - DNA, 56 bp, Artificial
  Synthetic oligonucleotide
agagtatatagaaaattggaatttacaaaacagaagacagcgcactggatttgttt

SEQ ID NO: 320308 - DNA, 54 bp, Artificial
  Synthetic oligonucleotide
agagtatatcctatggaaatccctggtttcccctgatgtccagcccctccccgg

SEQ ID NO: 320309 - DNA, 58 bp, Artificial
  Synthetic oligonucleotide
agagtatcaagcttcatcagagggacaaaagtgatcccaagggggaagctttccacca

SEQ ID NO: 320310 - DNA, 58 bp, Artificial
  Synthetic oligonucleotide
agagtatcgcactagagctattcctgatagcgcgttagcagtaagtgtcctgtcgaag

SEQ ID NO: 320311 - DNA, 53 bp, Artificial
  Synthetic oligonucleotide
agagtatgccgcttatgagaagcaattacacgacaccacggtgtctaatttga

SEQ ID NO: 320312 - DNA, 60 bp, Artificial
  Synthetic oligonucleotide
agagtatgctataccagttggaccagtatttccaccaggcatgaattggactgagctaat

SEQ ID NO: 320313 - DNA, 60 bp, Artificial
  Synthetic oligonucleotide
agagtatggactcttcacgctgcatcaacgagttgtattgcgaggagacagcagaagcca

SEQ ID NO: 320314 - DNA, 59 bp, Artificial
  Synthetic oligonucleotide
agagtatggctccatagcttaggacagcatatcaatgaaacctatggagatacttggac

SEQ ID NO: 320315 - DNA, 59 bp, Artificial
  Synthetic oligonucleotide
agagtatttggtgtctttcggagtgtggattcgcactcctccagcttatagacctccaa

SEQ ID NO: 320316 - DNA, 55 bp, Artificial
  Synthetic oligonucleotide
agagtcacacctagtggtactttagtaaggcctacagtgcctgtggaaagtttgg

SEQ ID NO: 320317 - DNA, 60 bp, Artificial
  Synthetic oligonucleotide
agagtcacatgccagacaacactttcttccacgcaaattaatgcaccaaatacaggccct

SEQ ID NO: 320318 - DNA, 51 bp, Artificial
  Synthetic oligonucleotide
agagtcacccagttctctgggcccacgtcatgctgctgcgactagccgcgt

SEQ ID NO: 320319 - DNA, 59 bp, Artificial
  Synthetic oligonucleotide
agagtcacttataacagccctcgttgaggaataccaaaatcctgtctcagctaaggagc

SEQ ID NO: 320320 - DNA, 50 bp, Artificial
  Synthetic oligonucleotide
agagtcagacatgctacaactgcggcaaaccgggtcatctagcaagacaa

SEQ ID NO: 320321 - DNA, 60 bp, Artificial
  Synthetic oligonucleotide
agagtcagatcacctgacattgtatcactagcgtccgatcttaagaacgaagcagaacta

SEQ ID NO: 320322 - DNA, 60 bp, Artificial
  Synthetic oligonucleotide
agagtcagcaaaatgggagtggatgaatactccagcacagaaagagtggtggtgagcatt

SEQ ID NO: 320323 - DNA, 56 bp, Artificial
  Synthetic oligonucleotide
agagtcagcaaaatggtcgtggatgaatactccagtacaaagagggtgggggttaa

SEQ ID NO: 320324 - DNA, 60 bp, Artificial
  Synthetic oligonucleotide
agagtcaggaatcattacacaactgaatgacgtttatcacgcttttcaaagcgtgcacgt

SEQ ID NO: 320325 - DNA, 51 bp, Artificial
  Synthetic oligonucleotide
agagtcatgggcagagtattaccctattatttaccagattcgaaagatccg

SEQ ID NO: 320326 - DNA, 60 bp, Artificial
  Synthetic oligonucleotide
agagtcattacagaataggatacagatagacccagtgaaattgagcagtggatacaaaga

SEQ ID NO: 320327 - DNA, 51 bp, Artificial
  Synthetic oligonucleotide
agagtcattgaagctagtagtgtgaatgatacaatagcttttagggtagtg

SEQ ID NO: 320328 - DNA, 60 bp, Artificial
  Synthetic oligonucleotide
agagtcattgatatcacactacgttcgaccaattcgttcgtcgatgcaatattaaatgta

SEQ ID NO: 320329 - DNA, 58 bp, Artificial
  Synthetic oligonucleotide
agagtcattggtctaagcaatgggttttaatcgatcccataatcgatagtcgtgattt

SEQ ID NO: 320330 - DNA, 60 bp, Artificial
  Synthetic oligonucleotide
agagtccaccatagagaacttcctgtgtagatctgcctgtgtgtactacaccacgtacaa

SEQ ID NO: 320331 - DNA, 60 bp, Artificial
  Synthetic oligonucleotide
agagtccacggttcttgttagcacatgcatatcatacactgcgtgatattagatatcaag

SEQ ID NO: 320332 - DNA, 55 bp, Artificial
  Synthetic oligonucleotide
agagtccatagctggcagcaggagctactccgctcacccctgagttggaacgctt

SEQ ID NO: 320333 - DNA, 57 bp, Artificial
  Synthetic oligonucleotide
agagtcccacctaccgttgttcctccaccacagaacgcgcaagtcactccaatccaa

SEQ ID NO: 320334 - DNA, 59 bp, Artificial
  Synthetic oligonucleotide
agagtccgactcagaaggcaacccaacatgcgactttgtggcccaggtctctccaggta

SEQ ID NO: 320335 - DNA, 55 bp, Artificial
  Synthetic oligonucleotide
agagtccgcgacagagaccatgcgcttgctgttcagtgggtatgcaagcattcca

SEQ ID NO: 320336 - DNA, 59 bp, Artificial
  Synthetic oligonucleotide
agagtcgaagcgcccgtcaatctgcaattggcaatcactaacctccaagcccagtaccc

SEQ ID NO: 320337 - DNA, 58 bp, Artificial
  Synthetic oligonucleotide
agagtcgaaggagcagaactcctccttcaacaactggctgggcgaatgatcccaaaag

SEQ ID NO: 320338 - DNA, 59 bp, Artificial
  Synthetic oligonucleotide
agagtcgatcagaaatggaacttatgaccatgatgtatacagagacgaagcattaaaca

SEQ ID NO: 320339 - DNA, 59 bp, Artificial
  Synthetic oligonucleotide
agagtcggagtgcgcctataaagttaacattctctctcctcttttgatctccaatacaa

SEQ ID NO: 320340 - DNA, 55 bp, Artificial
  Synthetic oligonucleotide
agagtcggagtgtgtatgccataagggaatttgtccagtagtcatgacagatggc

SEQ ID NO: 320341 - DNA, 60 bp, Artificial
  Synthetic oligonucleotide
agagtcggtggtcgaaatgacaatgggcgaggacgcatcgatgctgactcgtcaactggg

SEQ ID NO: 320342 - DNA, 53 bp, Artificial
  Synthetic oligonucleotide
agagtcgttgcctactgtcaagaccagggatggatcttaccgcctgacctcac

SEQ ID NO: 320343 - DNA, 60 bp, Artificial
  Synthetic oligonucleotide
agagtctaatcatcgctgcgaggaacattgtcaggagggcaacagtgtcagcagatccat

SEQ ID NO: 320344 - DNA, 59 bp, Artificial
  Synthetic oligonucleotide
agagtctattgagctaactagtagtcctccggcccctgaatgcggataatcttaactgc

SEQ ID NO: 320345 - DNA, 58 bp, Artificial
  Synthetic oligonucleotide
agagtctcaagccttgtgtaaagttgacccctttatgtgtaaccttgcagtgcagtaa

SEQ ID NO: 320346 - DNA, 55 bp, Artificial
  Synthetic oligonucleotide
agagtctcagttgagattctggtcccaaccaagtacgcgaaactgtttaccctta

SEQ ID NO: 320347 - DNA, 55 bp, Artificial
  Synthetic oligonucleotide
agagtctcatttcaacacctcatggatgtcatgggatggatgtgacctagactac

SEQ ID NO: 320348 - DNA, 60 bp, Artificial
  Synthetic oligonucleotide
agagtctccatttgctgcagagcggtggaacctgcaggatactagccgtgagacatggac

SEQ ID NO: 320349 - DNA, 57 bp, Artificial
  Synthetic oligonucleotide
agagtctcccacgactcgacgtcgccacctgcaggggtatctccaattgaagggtaa

SEQ ID NO: 320350 - DNA, 60 bp, Artificial
  Synthetic oligonucleotide
agagtctctcagatctggttatatctgacaacactggcagtctgagactgaagggtgtca

SEQ ID NO: 320351 - DNA, 55 bp, Artificial
  Synthetic oligonucleotide
agagtctgattatgaagcatttgatgcatctcaagacagccaaatattagcattt

SEQ ID NO: 320352 - DNA, 60 bp, Artificial
  Synthetic oligonucleotide
agagtctgtaaacaacgctgtggtgatgccagctcatggtccagccaagagcatggaata

SEQ ID NO: 320353 - DNA, 60 bp, Artificial
  Synthetic oligonucleotide
agagtcttacggtgaatcggtcaaacaggcagtactgttgaatgtactaggagcaggaga

SEQ ID NO: 320354 - DNA, 55 bp, Artificial
  Synthetic oligonucleotide
agagtcttcgctaatgtcacttgccgaaagctcggtcggggcttctactaccccg

SEQ ID NO: 320355 - DNA, 60 bp, Artificial
  Synthetic oligonucleotide
agagtcttgtagggtatgagcatgttgaggagtttcgtatatctctcctcgacgttgctc

SEQ ID NO: 320356 - DNA, 60 bp, Artificial
  Synthetic oligonucleotide
agagtctttggtacatgctttgtctataattctagattgaagattcatctccttacctgt

SEQ ID NO: 320357 - DNA, 60 bp, Artificial
  Synthetic oligonucleotide
agagtcttttgcagcaaatcacctgtactgcatcaggagaggaaatatgatgacgccaga

SEQ ID NO: 320358 - DNA, 57 bp, Artificial
  Synthetic oligonucleotide
agagtgaacggctcataactgttggtcatccattttacccagtttacaatgaggaaa

SEQ ID NO: 320359 - DNA, 55 bp, Artificial
  Synthetic oligonucleotide
agagtgagcgagacagatatattagattagataagataggagagatggcgagtac

SEQ ID NO: 320360 - DNA, 60 bp, Artificial
  Synthetic oligonucleotide
agagtgatcacctcatctcagagatgttgagtaaggagtatgctgagaggcaaggcaaaa

SEQ ID NO: 320361 - DNA, 50 bp, Artificial
  Synthetic oligonucleotide
agagtgatcataccaatctgggagtaaagctgatagaagtgtacgaagtt

SEQ ID NO: 320362 - DNA, 54 bp, Artificial
  Synthetic oligonucleotide
agagtgatcgcttttaaaccagttaagaatccagaacccaagggttatgtctta

SEQ ID NO: 320363 - DNA, 56 bp, Artificial
  Synthetic oligonucleotide
agagtgcaagacccaacttttctgtcaaggccaaggtctttggtgacgttccagaa

SEQ ID NO: 320364 - DNA, 60 bp, Artificial
  Synthetic oligonucleotide
agagtgcatatatgtagcccttgtacttatggcatagtcctaagagttgttagtgaatgg

SEQ ID NO: 320365 - DNA, 60 bp, Artificial
  Synthetic oligonucleotide
agagtgccaggagtgaagacagtttggaagagacgctagacaacagcgcctccctgactc

SEQ ID NO: 320366 - DNA, 60 bp, Artificial
  Synthetic oligonucleotide
agagtgcgctatcatggaggagtgcgggatgccgcagtggctcatccgcctgtaccacct

SEQ ID NO: 320367 - DNA, 50 bp, Artificial
  Synthetic oligonucleotide
agagtgcgctgtcgagggagtggataagttaaacaagagtgcttctcgtg

SEQ ID NO: 320368 - DNA, 60 bp, Artificial
  Synthetic oligonucleotide
agagtgcggggttcctctagtggcatatcctacaatatcgcagatgcaaccgatagctgg

SEQ ID NO: 320369 - DNA, 59 bp, Artificial
  Synthetic oligonucleotide
agagtgcgtaactcagtcagctgtcggtcgattcccagtgtcgctctggttgatttgga

SEQ ID NO: 320370 - DNA, 51 bp, Artificial
  Synthetic oligonucleotide
agagtgcgttccgattcggcacccggtggagcgtcgtatgtgatctcgaga

SEQ ID NO: 320371 - DNA, 55 bp, Artificial
  Synthetic oligonucleotide
agagtgctcttcttcactatgcaaggaagaaccgcatcactagactggggataac

SEQ ID NO: 320372 - DNA, 56 bp, Artificial
  Synthetic oligonucleotide
agagtgcttggtgaactacaagctgcttgtgttaatctgagcgagagtgaacagag

SEQ ID NO: 320373 - DNA, 59 bp, Artificial
  Synthetic oligonucleotide
agagtggacggttcctgtcctcatctatacggagggagtcatgatttggccggcgcagg

SEQ ID NO: 320374 - DNA, 60 bp, Artificial
  Synthetic oligonucleotide
agagtggagcaaatcaccttaggaaactctacaataacaactcaagaggcagcaaattca

SEQ ID NO: 320375 - DNA, 55 bp, Artificial
  Synthetic oligonucleotide
agagtggagtgaggatggccaaatgcaacacaaagtgccaaacgtcagtaggtgg

SEQ ID NO: 320376 - DNA, 57 bp, Artificial
  Synthetic oligonucleotide
agagtggatcctccacgttgtatatcttgaaatagaggggatttggaacttcccaga

SEQ ID NO: 320377 - DNA, 60 bp, Artificial
  Synthetic oligonucleotide
agagtggatgcgatgcttggtacacatgttgtgtgggatgtaggcttacaatctagctgc

SEQ ID NO: 320378 - DNA, 58 bp, Artificial
  Synthetic oligonucleotide
agagtggcccgttgagggagacgaagatcgcattctttacagcccagtttcgaagtgc

SEQ ID NO: 320379 - DNA, 55 bp, Artificial
  Synthetic oligonucleotide
agagtggctataagaaaatggcctgggacgcagttgcttggtttgtgctagctat

SEQ ID NO: 320380 - DNA, 60 bp, Artificial
  Synthetic oligonucleotide
agagtgggagagatgatggctttttgggatgagaggatgtcaaggcagcagacttacttg

SEQ ID NO: 320381 - DNA, 60 bp, Artificial
  Synthetic oligonucleotide
agagtgggcatgtcgatgaacgaggatgggcccttcatcttcgcgaggcacgctattttc

SEQ ID NO: 320382 - DNA, 60 bp, Artificial
  Synthetic oligonucleotide
agagtggtcatatttgattgaggacccttctgctcctcatggattgtgctacccaggaga

SEQ ID NO: 320383 - DNA, 60 bp, Artificial
  Synthetic oligonucleotide
agagtggtctgcgtaccaactccactatagtctgtctgaggtgcgatgctgtgtcacgca

SEQ ID NO: 320384 - DNA, 55 bp, Artificial
  Synthetic oligonucleotide
agagtggtgaaaaagatttctgctaaacttaagagtaagaatgctaacataataa

SEQ ID NO: 320385 - DNA, 57 bp, Artificial
  Synthetic oligonucleotide
agagtggtggtgagcattgaccgctttctcagggttcgggatcaacgaggaaacgta

SEQ ID NO: 320386 - DNA, 55 bp, Artificial
  Synthetic oligonucleotide
agagtggttcttgaacctatggctaggaagttctactctcgagacaaaaacgttc

SEQ ID NO: 320387 - DNA, 51 bp, Artificial
  Synthetic oligonucleotide
agagtgtactcacagcgtttactttgtgaagtactgtccacacaacctgca

SEQ ID NO: 320388 - DNA, 57 bp, Artificial
  Synthetic oligonucleotide
agagtgtatacgtatgaaggaacaactccgaatgccaggactggattttacacgact

SEQ ID NO: 320389 - DNA, 52 bp, Artificial
  Synthetic oligonucleotide
agagtgtatggactacttctgcaggaacgagactatacctgcatcgtacggg

SEQ ID NO: 320390 - DNA, 60 bp, Artificial
  Synthetic oligonucleotide
agagtgtcaagcaggcggtgatattgaatgttttaggaggaggcgacacgatagctgacc

SEQ ID NO: 320391 - DNA, 55 bp, Artificial
  Synthetic oligonucleotide
agagtgtcaagtttcatccggggaacaagggtgctaccaaggggacaattgtcga

SEQ ID NO: 320392 - DNA, 58 bp, Artificial
  Synthetic oligonucleotide
agagtgtcagcgtcccaatgtcgtactagcaggtatatggaaagggtccccgcgcgaa

SEQ ID NO: 320393 - DNA, 57 bp, Artificial
  Synthetic oligonucleotide
agagtgtccccgtccttgtcgatgtaggatttgacgtcggagctggatttagctccc

SEQ ID NO: 320394 - DNA, 59 bp, Artificial
  Synthetic oligonucleotide
agagtgtcccgagctctcccaatagtttggagagtgatccgtgtttcgaacgcgatgaa

SEQ ID NO: 320395 - DNA, 50 bp, Artificial
  Synthetic oligonucleotide
agagtgtctttacgttggataccaagaccataacgacgacgagcaacgaa

SEQ ID NO: 320396 - DNA, 60 bp, Artificial
  Synthetic oligonucleotide
agagtgtgacaaaagtctattagctcataaacgcttcgagatgatgatagctgctcaacg

SEQ ID NO: 320397 - DNA, 58 bp, Artificial
  Synthetic oligonucleotide
agagtgtgcagctggctgatatcgttaaaacggtcgatgtccgtattcctcgggaagt

SEQ ID NO: 320398 - DNA, 60 bp, Artificial
  Synthetic oligonucleotide
agagtgtgcgggggcgccgaggggctatgcgagatatgaccctacagcagtgagcggaga

SEQ ID NO: 320399 - DNA, 55 bp, Artificial
  Synthetic oligonucleotide
agagtgtggtgtccacgacctcctagggctgtgagctacagaggacccggtgtgg

SEQ ID NO: 320400 - DNA, 60 bp, Artificial
  Synthetic oligonucleotide
agagtgtgtgctctgagatgcttgccagaatgctttcttatactttggttggtaaatcct

SEQ ID NO: 320401 - DNA, 56 bp, Artificial
  Synthetic oligonucleotide
agagtgtgtgttgtttacccaacacactgtccctatggggggccaacataggtcca

SEQ ID NO: 320402 - DNA, 57 bp, Artificial
  Synthetic oligonucleotide
agagtgttaaaggtcaagcacttctgtttccccggtcaaagttgatatgctccaaca

SEQ ID NO: 320403 - DNA, 56 bp, Artificial
  Synthetic oligonucleotide
agagtgttaaataaagcacctctggatctaaagggttgcaccattgaagggtggat

SEQ ID NO: 320404 - DNA, 53 bp, Artificial
  Synthetic oligonucleotide
agagtgttaagtaaagcccctttagatctaaagggttgcactattgaaggttg

SEQ ID NO: 320405 - DNA, 51 bp, Artificial
  Synthetic oligonucleotide
agagtgtttacaactactcgggcggtctagctattagtgtgtggggaattg

SEQ ID NO: 320406 - DNA, 52 bp, Artificial
  Synthetic oligonucleotide
agagttaaacaaggtaacccaagactttacagaagtccagctgggtattccc

SEQ ID NO: 320407 - DNA, 57 bp, Artificial
  Synthetic oligonucleotide
agagttaagacgaggcatattgaattggggacactcaaaactctgaggaatggggga

SEQ ID NO: 320408 - DNA, 57 bp, Artificial
  Synthetic oligonucleotide
agagttaagagcaaatttgattacataatggatgattcaggtgttaaaaacaacctg

SEQ ID NO: 320409 - DNA, 55 bp, Artificial
  Synthetic oligonucleotide
agagttaagtcctgctactctaggcatattccaaccggtcctagtcgtgaccgag

SEQ ID NO: 320410 - DNA, 59 bp, Artificial
  Synthetic oligonucleotide
agagttaataatcatgtagtttataatcatcaagaggcgggaaagtatgagaaccatac

SEQ ID NO: 320411 - DNA, 54 bp, Artificial
  Synthetic oligonucleotide
agagttaatacaggttttacgtatacggaaacatgccaaagcggaattacgata

SEQ ID NO: 320412 - DNA, 60 bp, Artificial
  Synthetic oligonucleotide
agagttaatgaattggatcagcatattgaagcagcatccgtgagatatgtcttaaattac

SEQ ID NO: 320413 - DNA, 57 bp, Artificial
  Synthetic oligonucleotide
agagttaatgcgtagctcaaatgcaaacgctcgagtaaaaacggattttaatgagga

SEQ ID NO: 320414 - DNA, 59 bp, Artificial
  Synthetic oligonucleotide
agagttacacctcccagctgtttgtgcgtcagattacctccggtggttagagattctgc

SEQ ID NO: 320415 - DNA, 54 bp, Artificial
  Synthetic oligonucleotide
agagttacggttggaacctggtctcgctaaagagtggggtggacgtgttctaca

SEQ ID NO: 320416 - DNA, 55 bp, Artificial
  Synthetic oligonucleotide
agagttactgcaatggttcaaggagataatcaagccatagctgttactacaagag

SEQ ID NO: 320417 - DNA, 57 bp, Artificial
  Synthetic oligonucleotide
agagttagaactagaagagaatagggagattctaaaagagccagtacatggggtata

SEQ ID NO: 320418 - DNA, 56 bp, Artificial
  Synthetic oligonucleotide
agagttagacgccaactacgagagaatgccgaggacaaaggaaacggatgttttga

SEQ ID NO: 320419 - DNA, 58 bp, Artificial
  Synthetic oligonucleotide
agagttagcgcagtgaggactgtatattggttcatacccgatatatttagactagtcc

SEQ ID NO: 320420 - DNA, 58 bp, Artificial
  Synthetic oligonucleotide
agagttataaagataattggaagaaaaactttatagctccatgcgcattatggcgaac

SEQ ID NO: 320421 - DNA, 60 bp, Artificial
  Synthetic oligonucleotide
agagttatcttcacaaaggacagaacataccctgttcatattgcgaagctaacaagagca

SEQ ID NO: 320422 - DNA, 60 bp, Artificial
  Synthetic oligonucleotide
agagttcaatcttctcggtatacacgacaactgtgctgtcctgccaacccatgctgactg

SEQ ID NO: 320423 - DNA, 55 bp, Artificial
  Synthetic oligonucleotide
agagttcaggaaatacactgcattcactatacctagtatcaacaatgagacaccg

SEQ ID NO: 320424 - DNA, 56 bp, Artificial
  Synthetic oligonucleotide
agagttccaaggaagcaggcttcccggtcattaacacacctagcaaaacaaagctc

SEQ ID NO: 320425 - DNA, 60 bp, Artificial
  Synthetic oligonucleotide
agagttccctatgcacagtatgatgctcaggagatgggagaggaatgggagatcacaaac

SEQ ID NO: 320426 - DNA, 55 bp, Artificial
  Synthetic oligonucleotide
agagttccctggggccgaacgcatgacacctgttgccctccagaggtctcggtct

SEQ ID NO: 320427 - DNA, 57 bp, Artificial
  Synthetic oligonucleotide
agagttcgaagttcttacacttacggacaccttgcgattcaatagcactaataagag

SEQ ID NO: 320428 - DNA, 56 bp, Artificial
  Synthetic oligonucleotide
agagttcggggtacgcatgttcacgtagcaagtccgcttgcgacgttccgccgagt

SEQ ID NO: 320429 - DNA, 54 bp, Artificial
  Synthetic oligonucleotide
agagttcgtagatttaccatataagtcagaagtaaaaagaccacatttaactgg

SEQ ID NO: 320430 - DNA, 60 bp, Artificial
  Synthetic oligonucleotide
agagttcgtgacatacgactctagcattcattcgtactttatcactgacgagaacagtgg

SEQ ID NO: 320431 - DNA, 60 bp, Artificial
  Synthetic oligonucleotide
agagttctagctcgtcggacttccaatgctgtcaaaaacatcacgtacaatgtttgtgct

SEQ ID NO: 320432 - DNA, 56 bp, Artificial
  Synthetic oligonucleotide
agagttctctcgctttgttgaccggttactgcatacttgggggcctagcggccctc

SEQ ID NO: 320433 - DNA, 55 bp, Artificial
  Synthetic oligonucleotide
agagttctgtgacatgttgaggctttttgactataacaagaatgcaataaagacc

SEQ ID NO: 320434 - DNA, 56 bp, Artificial
  Synthetic oligonucleotide
agagttcttatatgtctaccgatattcccgatcttggacgatttatcgaagaaccg

SEQ ID NO: 320435 - DNA, 60 bp, Artificial
  Synthetic oligonucleotide
agagttcttgagatcactgacattcaagatattcaatatgaaagttcacccagaaatgtc

SEQ ID NO: 320436 - DNA, 56 bp, Artificial
  Synthetic oligonucleotide
agagttctttgaaaacaagtcagaaacatggccaattggagaatcgcccaagggag

SEQ ID NO: 320437 - DNA, 58 bp, Artificial
  Synthetic oligonucleotide
agagttgagaggagcttcaatccttcggtcacaatggaggaaaaattgacctgtgaga

SEQ ID NO: 320438 - DNA, 51 bp, Artificial
  Synthetic oligonucleotide
agagttgcaactgctcaatttatcccggccatgtatcaggacatcgcatgg

SEQ ID NO: 320439 - DNA, 55 bp, Artificial
  Synthetic oligonucleotide
agagttgcaagcactcctaccgaaagcacagtcggtcggcaacagccgtgtgagg

SEQ ID NO: 320440 - DNA, 58 bp, Artificial
  Synthetic oligonucleotide
agagttgcacacacggtgtgccaggtgatctacaggtctaccacatcggaaatttatt

SEQ ID NO: 320441 - DNA, 53 bp, Artificial
  Synthetic oligonucleotide
agagttgcatgtatacgggtcaatggttcctcaaggttctaaaaaaactttgg

SEQ ID NO: 320442 - DNA, 60 bp, Artificial
  Synthetic oligonucleotide
agagttgccagaagttcgcgcactggatgagtacgaccaactgggcgagattaagcggaa

SEQ ID NO: 320443 - DNA, 52 bp, Artificial
  Synthetic oligonucleotide
agagttgcccttaggcggataaccattacacaccaaatggcaaacctagtag

SEQ ID NO: 320444 - DNA, 55 bp, Artificial
  Synthetic oligonucleotide
agagttggagggcaactcaagggcgtcagaaccatgccagagctcaagcaagcac

SEQ ID NO: 320445 - DNA, 53 bp, Artificial
  Synthetic oligonucleotide
agagttggcggcccggctttggcaggcccggtgggaccgctggaagccgtacc

SEQ ID NO: 320446 - DNA, 60 bp, Artificial
  Synthetic oligonucleotide
agagttgggtcaatcttacccattgcctctctcacaactgactcttgcaactcagtcaag

SEQ ID NO: 320447 - DNA, 60 bp, Artificial
  Synthetic oligonucleotide
agagttggttcaacaaagcattcacatcttcagggtcgtccagtgcgccaattgccttca

SEQ ID NO: 320448 - DNA, 60 bp, Artificial
  Synthetic oligonucleotide
agagttgtatgatgctggatatgttgagataaccattgatcagatggttgattactcttc

SEQ ID NO: 320449 - DNA, 55 bp, Artificial
  Synthetic oligonucleotide
agagttgtgacaaaaggggggcgtcgctgcgtagcacgacggaaagcgggaaggc

SEQ ID NO: 320450 - DNA, 57 bp, Artificial
  Synthetic oligonucleotide
agagttgttgggtttggtgtgtttgttaggaagtctgacaatgcaaatgttatgtag

SEQ ID NO: 320451 - DNA, 56 bp, Artificial
  Synthetic oligonucleotide
agagttgtttgtcttaacgttagatgagaagactaaagcgttaaagcagttagcaa

SEQ ID NO: 320452 - DNA, 55 bp, Artificial
  Synthetic oligonucleotide
agagtttaacgccgaatggatcggtgagtccattgctgactttaacgtcgctccg

SEQ ID NO: 320453 - DNA, 58 bp, Artificial
  Synthetic oligonucleotide
agagtttaaggaagatatgagagagcaggcaggttttggtcgttggaagcgagtcaaa

SEQ ID NO: 320454 - DNA, 57 bp, Artificial
  Synthetic oligonucleotide
agagtttacatgaaacccaaacatgtgagagtttggtgccctaggccaccgagagtg

SEQ ID NO: 320455 - DNA, 59 bp, Artificial
  Synthetic oligonucleotide
agagtttaggcgtgaagaagtagcctgcacaggatccatcatttgtaaaacaataggga

SEQ ID NO: 320456 - DNA, 55 bp, Artificial
  Synthetic oligonucleotide
agagtttcgcatggaacatcataaggttaaagggaagattgatgtacaaacgacc

SEQ ID NO: 320457 - DNA, 60 bp, Artificial
  Synthetic oligonucleotide
agagtttgaatgcggtacatatgaagttcgtcatcagagcagctcaagatcagacacatt

SEQ ID NO: 320458 - DNA, 53 bp, Artificial
  Synthetic oligonucleotide
agagtttgacaaaaaatgtgccacatggctatgcagagcttataatgaaggaa

SEQ ID NO: 320459 - DNA, 55 bp, Artificial
  Synthetic oligonucleotide
agagtttgcgtccattgaagcgggctttataaatgactcaccgaatgacatagcg

SEQ ID NO: 320460 - DNA, 55 bp, Artificial
  Synthetic oligonucleotide
agagtttgtgggtagacgactttgccgaggctaattggaacacaggtaacttatc

SEQ ID NO: 320461 - DNA, 56 bp, Artificial
  Synthetic oligonucleotide
agagtttgttggtattaaccaatggttgtatactctatggtcagttattagcgaag

SEQ ID NO: 320462 - DNA, 55 bp, Artificial
  Synthetic oligonucleotide
agagttttgcacaaatgccgtaaagccataagcgcgaccattgtaatagtttacg

SEQ ID NO: 320463 - DNA, 52 bp, Artificial
  Synthetic oligonucleotide
agagtttttcgactctttggccgctttcttccttccccctcacgaccctcaa

SEQ ID NO: 320464 - DNA, 52 bp, Artificial
  Synthetic oligonucleotide
agagttttttaacaaagaactctcactaacaaaactaggcaactttataatc

SEQ ID NO: 320465 - DNA, 60 bp, Artificial
  Synthetic oligonucleotide
agataaaaacggaattctctgcctgagccgcagtgatgctctccccggtgcgtgaatcca

SEQ ID NO: 320466 - DNA, 55 bp, Artificial
  Synthetic oligonucleotide
agataaaaaggatcaagataaattttataactcaattgtttacggaattgcgcca

SEQ ID NO: 320467 - DNA, 56 bp, Artificial
  Synthetic oligonucleotide
agataaaatcgtcaagagaatacgtacagtaaacaatgataaacgatatttgtttg

SEQ ID NO: 320468 - DNA, 55 bp, Artificial
  Synthetic oligonucleotide
agataaacgatcacgactctttggaaaatgtgttggaggactattttgcgtggag

SEQ ID NO: 320469 - DNA, 54 bp, Artificial
  Synthetic oligonucleotide
agataaactgggccagtcaaactatcccagacttaagtataaaagaactaacta

SEQ ID NO: 320470 - DNA, 55 bp, Artificial
  Synthetic oligonucleotide
agataaagacagctctagacaattctatagggtctttcggttacgaaaacactcc

SEQ ID NO: 320471 - DNA, 50 bp, Artificial
  Synthetic oligonucleotide
agataaataggcctctatttaaaattagcttgacataactaaatagttgt

SEQ ID NO: 320472 - DNA, 55 bp, Artificial
  Synthetic oligonucleotide
agataaatgctctacctttcagagcttacaatcttatctataacgactggttccg

SEQ ID NO: 320473 - DNA, 55 bp, Artificial
  Synthetic oligonucleotide
agataaattatcatggtcttactgcgataggtaaattacctcagctgcgaacacc

SEQ ID NO: 320474 - DNA, 51 bp, Artificial
  Synthetic oligonucleotide
agataacaagtaacgtactttctaacgcagttgtatttaatggcgcggtaa

SEQ ID NO: 320475 - DNA, 53 bp, Artificial
  Synthetic oligonucleotide
agataacagagaatgcgtgtcaatggactacaagcaaacacagctgtgcatgc

SEQ ID NO: 320476 - DNA, 60 bp, Artificial
  Synthetic oligonucleotide
agataacagagctgcgtgaatcagctgagaattatgagaagcagattgcagagctagtga

SEQ ID NO: 320477 - DNA, 60 bp, Artificial
  Synthetic oligonucleotide
agataactggaaggagtggagcgtggctgacagcacggctgtggttgggcagaagaagac

SEQ ID NO: 320478 - DNA, 60 bp, Artificial
  Synthetic oligonucleotide
agataactggatttactgcgacgcagatggatcacaatttgatagttcactgtcaccgta

SEQ ID NO: 320479 - DNA, 59 bp, Artificial
  Synthetic oligonucleotide
agataacttctgacggaacaggattagatatatggaacgcaggacataaatgggaggag

SEQ ID NO: 320480 - DNA, 59 bp, Artificial
  Synthetic oligonucleotide
agataagaaaagtgttcaggcagtctcttccctatctataagagcaacagtcaggttgt

SEQ ID NO: 320481 - DNA, 57 bp, Artificial
  Synthetic oligonucleotide
agataagaatgatactaaatttaggttaatacattgtaacacctcaaccattacaca

SEQ ID NO: 320482 - DNA, 60 bp, Artificial
  Synthetic oligonucleotide
agataagctccaggatcttccagatgatagactgaacaaattcttgacatgtatcatcac

SEQ ID NO: 320483 - DNA, 54 bp, Artificial
  Synthetic oligonucleotide
agataagtatggtgttgatttacctatggttacctttctcaaagatgagcttag

SEQ ID NO: 320484 - DNA, 57 bp, Artificial
  Synthetic oligonucleotide
agataagtgatcccacaagcgatcttggcaattatagcaataggtcttcacgaaccg

SEQ ID NO: 320485 - DNA, 60 bp, Artificial
  Synthetic oligonucleotide
agataagtggaccacacgccgtcagcattataaccaagccgcaacacaggcgctacatcg

SEQ ID NO: 320486 - DNA, 57 bp, Artificial
  Synthetic oligonucleotide
agataagttttcgaaatatcacattccttgtgaaaatcgggctgtggggagcagagt

SEQ ID NO: 320487 - DNA, 57 bp, Artificial
  Synthetic oligonucleotide
agataataaaattatgatattcagttattctatgagtcactagaaacctttcaaggt

SEQ ID NO: 320488 - DNA, 60 bp, Artificial
  Synthetic oligonucleotide
agataataagtggtcacggactacgcagtggttgaataatctgccagtaccaggcaacga

SEQ ID NO: 320489 - DNA, 60 bp, Artificial
  Synthetic oligonucleotide
agataatcaatcaggtccagttgcgcaccaggtgatagtaaacaatcaaaactggtcagg

SEQ ID NO: 320490 - DNA, 60 bp, Artificial
  Synthetic oligonucleotide
agataatccggcgaatcccaacacttctgaggtagcttccgctactcagcgtgtcgacga

SEQ ID NO: 320491 - DNA, 59 bp, Artificial
  Synthetic oligonucleotide
agataatcgatccaaagaaaggctacactcaatatgagacgagaatagtgccgaacggg

SEQ ID NO: 320492 - DNA, 60 bp, Artificial
  Synthetic oligonucleotide
agataatcgcatctctcgtaccagttccagcgcccgtgtttgccattccacctaagccag

SEQ ID NO: 320493 - DNA, 60 bp, Artificial
  Synthetic oligonucleotide
agataatctaatcagtttaatgtcaggtgaatgtgctatgtcagctcctcataatcaggg

SEQ ID NO: 320494 - DNA, 51 bp, Artificial
  Synthetic oligonucleotide
agataatggtgctaactttgcctcgcaagaagtaaagatggttgcatggtg

SEQ ID NO: 320495 - DNA, 55 bp, Artificial
  Synthetic oligonucleotide
agataattaacgagtgcccttcccgaaattggaaatatctgactccagccaagtt

SEQ ID NO: 320496 - DNA, 55 bp, Artificial
  Synthetic oligonucleotide
agataattacgccatagaatgttcatatgcctataagttaggtgaccggcttgtg

SEQ ID NO: 320497 - DNA, 58 bp, Artificial
  Synthetic oligonucleotide
agataattatgtgggcctaaagcacgagcccacattgtcttgcccgttcgtgaatccc

SEQ ID NO: 320498 - DNA, 55 bp, Artificial
  Synthetic oligonucleotide
agataattgtgacaacttagtgagcaagttgtaggaggaccctatccgtctggga

SEQ ID NO: 320499 - DNA, 56 bp, Artificial
  Synthetic oligonucleotide
agataattgtgagggcctaaactcctggcccataatgttttacctgttctggatgg

SEQ ID NO: 320500 - DNA, 60 bp, Artificial
  Synthetic oligonucleotide
agataattgtgcggccctaatgcacgagcccatgtcgtcttaccagtacgactatctcct

SEQ ID NO: 320501 - DNA, 50 bp, Artificial
  Synthetic oligonucleotide
agataattgtgtggacccagtgacctggcccacattgtcttccccgtacg

SEQ ID NO: 320502 - DNA, 55 bp, Artificial
  Synthetic oligonucleotide
agataattgttcatttgtctttatatacttggtccccaagttttatttcctgcaa

SEQ ID NO: 320503 - DNA, 50 bp, Artificial
  Synthetic oligonucleotide
agataatttgcttgtataccttgtaagaaagttgaatgatcctagcatca

SEQ ID NO: 320504 - DNA, 50 bp, Artificial
  Synthetic oligonucleotide
agatacaaagcaggtcttactggtaaaggtacgaatgtagcagatcctga

SEQ ID NO: 320505 - DNA, 58 bp, Artificial
  Synthetic oligonucleotide
agatacaaggattttaagggttatgctcccagaccgctcattcggacaccacacatta

SEQ ID NO: 320506 - DNA, 58 bp, Artificial
  Synthetic oligonucleotide
agatacaattataggtttgatctattgaggtggataaacttacatgccaaggacgaag

SEQ ID NO: 320507 - DNA, 56 bp, Artificial
  Synthetic oligonucleotide
agatacacccgaagggctctctttttgtggactgacaatagtaaaatcaagtactg

SEQ ID NO: 320508 - DNA, 60 bp, Artificial
  Synthetic oligonucleotide
agatacagacgctaatgccagagcttttttacagcacaatagtcaagccagattcgttag

SEQ ID NO: 320509 - DNA, 58 bp, Artificial
  Synthetic oligonucleotide
agatacagagcatgtttgggagatacaactcaaacaagaaaccttttgaactcaagcc

SEQ ID NO: 320510 - DNA, 60 bp, Artificial
  Synthetic oligonucleotide
agatacagctgcctgaggttgttgacttgtataacgtcgtcacacgctatgcttatgaga

SEQ ID NO: 320511 - DNA, 51 bp, Artificial
  Synthetic oligonucleotide
agatacaggctatggtgccatggactttcgtacattgcaggaaaccaaaag

SEQ ID NO: 320512 - DNA, 50 bp, Artificial
  Synthetic oligonucleotide
agatacaggggcctcgtctggtttcgagggggcgcgggcagtgccagctg

SEQ ID NO: 320513 - DNA, 51 bp, Artificial
  Synthetic oligonucleotide
agatacatatcagacactaaaaagctactatggtgagctaccggctgtgtc

SEQ ID NO: 320514 - DNA, 53 bp, Artificial
  Synthetic oligonucleotide
agatacatcccacaacctaacaaccccacctgcaacccccctttgttgttgga

SEQ ID NO: 320515 - DNA, 52 bp, Artificial
  Synthetic oligonucleotide
agatacatctaccagaccttagccaacttagcttggctgatttgggaccttg

SEQ ID NO: 320516 - DNA, 60 bp, Artificial
  Synthetic oligonucleotide
agatacatggcttatttaatgcgtggggaccaataaatagacttgctcaccaagcttgga

SEQ ID NO: 320517 - DNA, 57 bp, Artificial
  Synthetic oligonucleotide
agataccactaccgtactggccactttagcactcttgggttgtgatgtatccccgtg

SEQ ID NO: 320518 - DNA, 59 bp, Artificial
  Synthetic oligonucleotide
agataccagctgatatttccaccactattgagttggaaatggccaaatgcttaagcccc

SEQ ID NO: 320519 - DNA, 55 bp, Artificial
  Synthetic oligonucleotide
agataccatcaatgacgaggctgcagaatgggatagattacatccagtacatgcg

SEQ ID NO: 320520 - DNA, 60 bp, Artificial
  Synthetic oligonucleotide
agatacccaattacagcagacaagagaataatggacatgattccggagaggaatgaacaa

SEQ ID NO: 320521 - DNA, 59 bp, Artificial
  Synthetic oligonucleotide
agatacccagtacaccaacatggatacaacggggtagtagatctaagaatgtcaatctg

SEQ ID NO: 320522 - DNA, 55 bp, Artificial
  Synthetic oligonucleotide
agatacccagttatcagtaagacctacaacaacacaacgggaagagatgtcctag

SEQ ID NO: 320523 - DNA, 56 bp, Artificial
  Synthetic oligonucleotide
agatacccctctaatggagtcaggttggtcagatacagcacatggtgtaggtatag

SEQ ID NO: 320524 - DNA, 60 bp, Artificial
  Synthetic oligonucleotide
agataccgcctcagctctatatcgggaagccttagagtctcctgagcatgtttcagctca

SEQ ID NO: 320525 - DNA, 58 bp, Artificial
  Synthetic oligonucleotide
agataccggagcactcacggtcattggacgcgatacagtcatcgggcggctaatggtc

SEQ ID NO: 320526 - DNA, 55 bp, Artificial
  Synthetic oligonucleotide
agatacctatagaaatctgcgggcataaagctgtaggtacagtgttagtagggcc

SEQ ID NO: 320527 - DNA, 55 bp, Artificial
  Synthetic oligonucleotide
agatacctgtatttctgctacttttagaaggggagcttgccatgccaagaaaccc

SEQ ID NO: 320528 - DNA, 53 bp, Artificial
  Synthetic oligonucleotide
agataccttacgtgtctgtattggtacatttgcgacttgtcgggtacgacggt

SEQ ID NO: 320529 - DNA, 55 bp, Artificial
  Synthetic oligonucleotide
agataccttatcacaactgttcttaacaaaaggatggccaacaggatcagtgtac

SEQ ID NO: 320530 - DNA, 56 bp, Artificial
  Synthetic oligonucleotide
agataccttatcccactttacaccgtaaggttttataagtctatctctctctgcaa

SEQ ID NO: 320531 - DNA, 54 bp, Artificial
  Synthetic oligonucleotide
agatacgagaaacgattctggtagcaccctgaccagcgttgagcatacgcttta

SEQ ID NO: 320532 - DNA, 53 bp, Artificial
  Synthetic oligonucleotide
agatacgaggaagattctgtgtaccgtatccttttgcactgttaaaatgcaca

SEQ ID NO: 320533 - DNA, 55 bp, Artificial
  Synthetic oligonucleotide
agatacgaggagtctttacatacaccctatccggataacagttggctgcgaactg

SEQ ID NO: 320534 - DNA, 58 bp, Artificial
  Synthetic oligonucleotide
agatacgctccagttaattggggacatggggagattaatgattcaactacagtggaac

SEQ ID NO: 320535 - DNA, 59 bp, Artificial
  Synthetic oligonucleotide
agatacggagctctcctttacaattactggagacaacaccaaatggaatgagaatcaaa

SEQ ID NO: 320536 - DNA, 59 bp, Artificial
  Synthetic oligonucleotide
agatacggccttcttattggtcctcaaaacatattcacagctctgtacgaagaatcatt

SEQ ID NO: 320537 - DNA, 60 bp, Artificial
  Synthetic oligonucleotide
agatacgtattatcaacatgcgaacgatcaactcagacgtttatacagacgcatgtataa

SEQ ID NO: 320538 - DNA, 53 bp, Artificial
  Synthetic oligonucleotide
agatacgtcgacttaagattccccgccaagaaaaggttgctcctacacgttta

SEQ ID NO: 320539 - DNA, 59 bp, Artificial
  Synthetic oligonucleotide
agatactaataaaaaccactgtggaccatatggccataatcaagaaatatacgtcagga

SEQ ID NO: 320540 - DNA, 57 bp, Artificial
  Synthetic oligonucleotide
agatactagtgtttataacttaggacaagggcagtgtctcgacttggatcgcttccc

SEQ ID NO: 320541 - DNA, 53 bp, Artificial
  Synthetic oligonucleotide
agatactatagacctgatgtattacatgggtggtgttgcctggtattgctgtc

SEQ ID NO: 320542 - DNA, 51 bp, Artificial
  Synthetic oligonucleotide
agatactccgcagagattccgcgtggtgtacatgagtatcacgcgtctatc

SEQ ID NO: 320543 - DNA, 59 bp, Artificial
  Synthetic oligonucleotide
agatactcgttgggataataagttgatagatatcttgactgctacaagtaataaaggta

SEQ ID NO: 320544 - DNA, 60 bp, Artificial
  Synthetic oligonucleotide
agatactgcggtgcgacgtcatcaatgacgttatacaacacttcgttcgagtagactcgt

SEQ ID NO: 320545 - DNA, 60 bp, Artificial
  Synthetic oligonucleotide
agatactggacaagccgggagatgagtaatgctggggggcttgcatggattccatggatt

SEQ ID NO: 320546 - DNA, 60 bp, Artificial
  Synthetic oligonucleotide
agatactggagtccatcttcgcgaacatagcgatccagggaacgtcagagcagacggagt

SEQ ID NO: 320547 - DNA, 54 bp, Artificial
  Synthetic oligonucleotide
agatactggtggacgttttggccgggtacggcgcaggcatttcaggggccctcg

SEQ ID NO: 320548 - DNA, 60 bp, Artificial
  Synthetic oligonucleotide
agatacttaagaaccctcaagaagcctgatttacaatctgccatggccaaactgagccag

SEQ ID NO: 320549 - DNA, 56 bp, Artificial
  Synthetic oligonucleotide
agatacttctcctcactctacgactgggaggtaccaacctccccatgtgaggtccc

SEQ ID NO: 320550 - DNA, 55 bp, Artificial
  Synthetic oligonucleotide
agatacttgttgaaggtcagatctctcactttcctgctgcggagccaaacgtaga

SEQ ID NO: 320551 - DNA, 60 bp, Artificial
  Synthetic oligonucleotide
agatagaacaacaaatcgggaatgtcattaactggacacgagactcaatgactgaggtat

SEQ ID NO: 320552 - DNA, 55 bp, Artificial
  Synthetic oligonucleotide
agatagaacaacacacgggtaccacgcgggtgttagaactactgaaatgtaagga

SEQ ID NO: 320553 - DNA, 55 bp, Artificial
  Synthetic oligonucleotide
agatagaacacgctataaaagtctcacatggaatgccgtatgctgaatggatatt

SEQ ID NO: 320554 - DNA, 59 bp, Artificial
  Synthetic oligonucleotide
agatagaaggccgtatgggactcctatggattttgggcaggtgttcaacatgttcgaca

SEQ ID NO: 320555 - DNA, 60 bp, Artificial
  Synthetic oligonucleotide
agatagagagtgagtacttcccacacataccggagcgctcagcttacggtgagctcgcct

SEQ ID NO: 320556 - DNA, 57 bp, Artificial
  Synthetic oligonucleotide
agatagagggggctgtcttgaagccaaccctatctctccattggggaccaagagtac

SEQ ID NO: 320557 - DNA, 60 bp, Artificial
  Synthetic oligonucleotide
agatagatacttcccagtcacagtgactgctcatgattggtatgagatacaagaatcaca

SEQ ID NO: 320558 - DNA, 60 bp, Artificial
  Synthetic oligonucleotide
agatagattctataggacttgcaagttagtcgggatcaatatgagcaaaaagaagtccta

SEQ ID NO: 320559 - DNA, 51 bp, Artificial
  Synthetic oligonucleotide
agatagcaccaattatgttcattggggagcgctttcaatttcaatagacgc

SEQ ID NO: 320560 - DNA, 59 bp, Artificial
  Synthetic oligonucleotide
agatagcaccactagcactcgcaacaatagctcctcaggccagcacatgcgcacgtggt

SEQ ID NO: 320561 - DNA, 56 bp, Artificial
  Synthetic oligonucleotide
agatagcaccgtcgctgcatctcgctctattgtgtgaccgcgagctccatgcggcg

SEQ ID NO: 320562 - DNA, 56 bp, Artificial
  Synthetic oligonucleotide
agatagcccaagattcctattagctcatgcatttcacacaataagagatattaggt

SEQ ID NO: 320563 - DNA, 57 bp, Artificial
  Synthetic oligonucleotide
agatagcccgaaggctatccatcgtgatctgcgtctgtcataatagcgacattcgca

SEQ ID NO: 320564 - DNA, 58 bp, Artificial
  Synthetic oligonucleotide
agatagccttatatcagaggctgagactcgaggtattacaggatataaccccttggcc

SEQ ID NO: 320565 - DNA, 53 bp, Artificial
  Synthetic oligonucleotide
agatagcgttcagcgttagctggtctcgacgatacaggcttgaacacgtaaaa

SEQ ID NO: 320566 - DNA, 54 bp, Artificial
  Synthetic oligonucleotide
agataggaaatataacagatgaggtaagaaactgttcttttaatatggccacag

SEQ ID NO: 320567 - DNA, 60 bp, Artificial
  Synthetic oligonucleotide
agataggacttgacatctgagcttgatttgccaccttgaatgttgggatgaaaagtggtg

SEQ ID NO: 320568 - DNA, 58 bp, Artificial
  Synthetic oligonucleotide
agataggcgcacactccagaagacgaacggtcgttgatacagaagtagcatccacacc

SEQ ID NO: 320569 - DNA, 52 bp, Artificial
  Synthetic oligonucleotide
agataggcgccgcactctcggtcctccttgctcattctcagaaacacctcgg

SEQ ID NO: 320570 - DNA, 57 bp, Artificial
  Synthetic oligonucleotide
agataggcgtccctttggtactccgatggattttggtcaagtgtttaatatgtatga

SEQ ID NO: 320571 - DNA, 58 bp, Artificial
  Synthetic oligonucleotide
agataggctgaagtttctagaacgcatgtcacaattcaccatagatcaactgacgttg

SEQ ID NO: 320572 - DNA, 50 bp, Artificial
  Synthetic oligonucleotide
agataggtggcccggtgaatcggcagcaaaacgggtagatggggtggcac

SEQ ID NO: 320573 - DNA, 58 bp, Artificial
  Synthetic oligonucleotide
agatagtagtgggggcaccacttacgtcccaataactgtgacagtggcaccaatgtgc

SEQ ID NO: 320574 - DNA, 57 bp, Artificial
  Synthetic oligonucleotide
agatagtcccaggtttttgttagcccatgcttttcatactataagagatattaggta

SEQ ID NO: 320575 - DNA, 56 bp, Artificial
  Synthetic oligonucleotide
agatagtcctgcgggaaattggatactctgaggaagcagtgtctctcatagaaggg

SEQ ID NO: 320576 - DNA, 53 bp, Artificial
  Synthetic oligonucleotide
agatagtcgatctcatgtgccacgccactttcaccatgcgtctcctatctcca

SEQ ID NO: 320577 - DNA, 59 bp, Artificial
  Synthetic oligonucleotide
agatagtgccaaaaccttggtgagcgactgctttctcgagttttacagtgagtttatga

SEQ ID NO: 320578 - DNA, 60 bp, Artificial
  Synthetic oligonucleotide
agatagtgctactgtgtattatcgagagataggcttgtctgcagtaaataagaattgagt

SEQ ID NO: 320579 - DNA, 53 bp, Artificial
  Synthetic oligonucleotide
agatagtggatgattggcataaagtgggaaggaagatttatatgcctcctgtg

SEQ ID NO: 320580 - DNA, 60 bp, Artificial
  Synthetic oligonucleotide
agatagttgaccttatgtgtcacgccactttcaccatgcgtctcctctcccctgtgagag

SEQ ID NO: 320581 - DNA, 53 bp, Artificial
  Synthetic oligonucleotide
agatataacggaactagttttctaccttccgatttcacaaacctgactgcggc

SEQ ID NO: 320582 - DNA, 58 bp, Artificial
  Synthetic oligonucleotide
agatataatcagtttatgggatcagagcttaaagccctgtgtaaagttaactccactc

SEQ ID NO: 320583 - DNA, 60 bp, Artificial
  Synthetic oligonucleotide
agatatacaggtctataagagatgtccatgatcggtacacactatgctcagtataagatg

SEQ ID NO: 320584 - DNA, 52 bp, Artificial
  Synthetic oligonucleotide
agatatactaggcatcaggtactcggaccatgacaacgagcagtgggccgtt

SEQ ID NO: 320585 - DNA, 59 bp, Artificial
  Synthetic oligonucleotide
agatatagaagggtcacagcgactaacggtcgacgctttattttacgtgacgcatgcag

SEQ ID NO: 320586 - DNA, 56 bp, Artificial
  Synthetic oligonucleotide
agatatagggattttcactcccgtctccaaggtacggcgccgtctgaacttcgaca

SEQ ID NO: 320587 - DNA, 60 bp, Artificial
  Synthetic oligonucleotide
agatataggtgcctcatattcataccatgatcaacagtggtatgatctacgttcctattt

SEQ ID NO: 320588 - DNA, 56 bp, Artificial
  Synthetic oligonucleotide
agatatagtcatttccactcccgcctccaaggtacgtcggaggttgaacttcgaca

SEQ ID NO: 320589 - DNA, 60 bp, Artificial
  Synthetic oligonucleotide
agatatcaaaccaagaaccactaaagatctagtctgactactttaatcaatatgaactga

SEQ ID NO: 320590 - DNA, 60 bp, Artificial
  Synthetic oligonucleotide
agatatcaattgggtactggtgtcacacttgcagtccaaggtatggttacattgggttgc

SEQ ID NO: 320591 - DNA, 55 bp, Artificial
  Synthetic oligonucleotide
agatatcaccaaatggggagaaaagaatgaacgctcaggattgggcactagtcac

SEQ ID NO: 320592 - DNA, 60 bp, Artificial
  Synthetic oligonucleotide
agatatcagcagcgttcggcataaagcctacagttggacaggatgtggaagaactcctga

SEQ ID NO: 320593 - DNA, 57 bp, Artificial
  Synthetic oligonucleotide
agatatcagcctattcccgatcagtctcgactgccgtgtacgagaaatgctcgttga

SEQ ID NO: 320594 - DNA, 60 bp, Artificial
  Synthetic oligonucleotide
agatatcatatagagcacaacgttatcagtttacagaaagtatacccaatcacactttac

SEQ ID NO: 320595 - DNA, 56 bp, Artificial
  Synthetic oligonucleotide
agatatcattcaacagacaaatgaattgattagaaccttaaatggcaatacatttc

SEQ ID NO: 320596 - DNA, 55 bp, Artificial
  Synthetic oligonucleotide
agatatctcggcgttggaattcggtgatatgaaggttgatccggttgaactactg

SEQ ID NO: 320597 - DNA, 55 bp, Artificial
  Synthetic oligonucleotide
agatatcttcgcacgcaggctatctcgaaaggtatgaagaggctggagctcgagc

SEQ ID NO: 320598 - DNA, 57 bp, Artificial
  Synthetic oligonucleotide
agatatgagatcccccacgactactgacttgctcagtctagtcatctgcaccttctg

SEQ ID NO: 320599 - DNA, 50 bp, Artificial
  Synthetic oligonucleotide
agatatgagtggcttaacaacatgaaactcattactcaccattgcaagag

SEQ ID NO: 320600 - DNA, 60 bp, Artificial
  Synthetic oligonucleotide
agatatgatgagatgggttatgttaccttcgttacaaccgtcactgaaattggcattgga

SEQ ID NO: 320601 - DNA, 60 bp, Artificial
  Synthetic oligonucleotide
agatatggaaatgtccttgatgtgaatgctattgacattgaagaaccaagtggccagaca

SEQ ID NO: 320602 - DNA, 57 bp, Artificial
  Synthetic oligonucleotide
agatatggcgtgaagttaagattaacctatcgttctgagagtgaacgtagtttacta

SEQ ID NO: 320603 - DNA, 60 bp, Artificial
  Synthetic oligonucleotide
agatatggcttgcttgcagatccgcttataggaacatcgtcaacagtccaagaagagtgc

SEQ ID NO: 320604 - DNA, 59 bp, Artificial
  Synthetic oligonucleotide
agatatgggaatgtcctggatgttaactcaatcgatttggaagaaccgagtggacagac

SEQ ID NO: 320605 - DNA, 60 bp, Artificial
  Synthetic oligonucleotide
agatatggggaatcattagtggaaaatggctacatgatgtgggagcttcgtgaaaatgct

SEQ ID NO: 320606 - DNA, 52 bp, Artificial
  Synthetic oligonucleotide
agatatgggggctccccactcccgagtcacatcctctgcccaagtacttcga

SEQ ID NO: 320607 - DNA, 60 bp, Artificial
  Synthetic oligonucleotide
agatatggtcaaggcttgatggaggaggatgttctgaatgtgcaaacgaacacttttgct

SEQ ID NO: 320608 - DNA, 60 bp, Artificial
  Synthetic oligonucleotide
agatatgtgtacgtcactgaagatggtgtaaatgtagcgcagttcagtgaaaggccaaaa

SEQ ID NO: 320609 - DNA, 55 bp, Artificial
  Synthetic oligonucleotide
agatatgttgtcatggagggatttgtgtcccaacctgagctacctagaccacaga

SEQ ID NO: 320610 - DNA, 57 bp, Artificial
  Synthetic oligonucleotide
agatattacaccgaaatattatcattatttggacccagcctcagagacccgatttcg

SEQ ID NO: 320611 - DNA, 54 bp, Artificial
  Synthetic oligonucleotide
agatattaccttaggtaataatttctgtcgtttatatgaacctttcgttcagta

SEQ ID NO: 320612 - DNA, 56 bp, Artificial
  Synthetic oligonucleotide
agatattatccccaagggaccgtttggagggggacacagcaccatgagattctccc

SEQ ID NO: 320613 - DNA, 58 bp, Artificial
  Synthetic oligonucleotide
agatattatcggttataccctctcctgatgtcccacgtggttgtgaaggaccattgta

SEQ ID NO: 320614 - DNA, 60 bp, Artificial
  Synthetic oligonucleotide
agatattatgatgaagacacaagtatcgtgaagtatcgcttcctcaacgatggatcttta

SEQ ID NO: 320615 - DNA, 60 bp, Artificial
  Synthetic oligonucleotide
agatattcatataccttagttcactcaagaaacctgatgagcagtcggcagtggctaaac

SEQ ID NO: 320616 - DNA, 55 bp, Artificial
  Synthetic oligonucleotide
agatattccgacagaatccgcatgtagcaccttcattaattgcaaaacaccaagc

SEQ ID NO: 320617 - DNA, 51 bp, Artificial
  Synthetic oligonucleotide
agatattccgttcgactacttcgaagaggcgacgtggaacgaagaccggac

SEQ ID NO: 320618 - DNA, 60 bp, Artificial
  Synthetic oligonucleotide
agatattccttatagctgctgtttggacctttattgcacaggaagatagtgggaattcca

SEQ ID NO: 320619 - DNA, 60 bp, Artificial
  Synthetic oligonucleotide
agatattctaagaacccaggaatcatcatgcacttgcattcaaggtgaatgttattgggt

SEQ ID NO: 320620 - DNA, 60 bp, Artificial
  Synthetic oligonucleotide
agatattctccatatgaagaagtaggtcctggattgcagaggaagatagtgggaattcca

SEQ ID NO: 320621 - DNA, 55 bp, Artificial
  Synthetic oligonucleotide
agatattctctaaaagagggcaacccttccagggatgatctgacactatctaggg

SEQ ID NO: 320622 - DNA, 59 bp, Artificial
  Synthetic oligonucleotide
agatattctgttaacgacaaacagtacagtgctccgcatatgtctaccctacttatccc

SEQ ID NO: 320623 - DNA, 58 bp, Artificial
  Synthetic oligonucleotide
agatattgcggtgcgacgtcatcgatgacgttatactccacttcgttagaataaaccc

SEQ ID NO: 320624 - DNA, 60 bp, Artificial
  Synthetic oligonucleotide
agatattgctgactcaccccttttataaaacttcatggtgaatctgatagatagtcccaa

SEQ ID NO: 320625 - DNA, 56 bp, Artificial
  Synthetic oligonucleotide
agatatttgtgacaacttccgcgcgaagttgtctggtgtcggttataaattaaaga

SEQ ID NO: 320626 - DNA, 54 bp, Artificial
  Synthetic oligonucleotide
agatatttgtgttaatagattgatgccagttataagattaattagatacaacgt

SEQ ID NO: 320627 - DNA, 54 bp, Artificial
  Synthetic oligonucleotide
agatattttggttgtttattatacaatagccactcaatttaggaagtttcttcc

SEQ ID NO: 320628 - DNA, 57 bp, Artificial
  Synthetic oligonucleotide
agatcaaaaacgtggcattactaggtaacctccagatagaagtaatcgatcgtacaa

SEQ ID NO: 320629 - DNA, 59 bp, Artificial
  Synthetic oligonucleotide
agatcaaaaatgaacgagaatctgcgccacggcttcaagttcaaagcgtggcgccaagg

SEQ ID NO: 320630 - DNA, 55 bp, Artificial
  Synthetic oligonucleotide
agatcaaaagtgctctactatccacaaacaaggccgtagtcagcttatcaaatgg

SEQ ID NO: 320631 - DNA, 60 bp, Artificial
  Synthetic oligonucleotide
agatcaaaatgaacgcgatggcattggttagcaacgaagatttacagatgcatgtactgc

SEQ ID NO: 320632 - DNA, 57 bp, Artificial
  Synthetic oligonucleotide
agatcaaataaccgggaagttgaacagactgatagagaagacgaacacggagttcga

SEQ ID NO: 320633 - DNA, 59 bp, Artificial
  Synthetic oligonucleotide
agatcaaatgtcatgacgtatgtaacgaaggtaagtagaggattttcagaggaactggc

SEQ ID NO: 320634 - DNA, 57 bp, Artificial
  Synthetic oligonucleotide
agatcaacttttcggcgaaaccagaccctgctcctagagttatccagcctagggatc

SEQ ID NO: 320635 - DNA, 58 bp, Artificial
  Synthetic oligonucleotide
agatcaagattatataagcgcaaacccaacaatgagcgctatggagataataggtagc

SEQ ID NO: 320636 - DNA, 55 bp, Artificial
  Synthetic oligonucleotide
agatcaagcccgttaagccaaaaaccacaccgggcaaattagatctattagaagc

SEQ ID NO: 320637 - DNA, 55 bp, Artificial
  Synthetic oligonucleotide
agatcaatagagataataaccatcggatcaatctgtatggtaactggaatggcct

SEQ ID NO: 320638 - DNA, 51 bp, Artificial
  Synthetic oligonucleotide
agatcaatcttctgccagtggtcattcctaaatggccgcactttctctgcg

SEQ ID NO: 320639 - DNA, 60 bp, Artificial
  Synthetic oligonucleotide
agatcaatgatctgagttcgaagctctctgggcagcaggtcacgttgttcaacaacttcc

SEQ ID NO: 320640 - DNA, 57 bp, Artificial
  Synthetic oligonucleotide
agatcaattctaggatcaaagctctagtcatctttacgaagggtcataccgttttta

SEQ ID NO: 320641 - DNA, 55 bp, Artificial
  Synthetic oligonucleotide
agatcacaacaacctcaagcggcactacagaggcctacgagagtaagcttgcggg

SEQ ID NO: 320642 - DNA, 60 bp, Artificial
  Synthetic oligonucleotide
agatcacatgttcttaataaggtagtaaatgttattgattatctgtacagtccacagatt

SEQ ID NO: 320643 - DNA, 51 bp, Artificial
  Synthetic oligonucleotide
agatcacgcccacgacacgccctagcgctcttatcacacggtctctgctgc

SEQ ID NO: 320644 - DNA, 54 bp, Artificial
  Synthetic oligonucleotide
agatcacgtgtaaccacaccccctcgggtgagttcctccgccagttctacggta

SEQ ID NO: 320645 - DNA, 60 bp, Artificial
  Synthetic oligonucleotide
agatcacttaattcgtcagcgttctattacagagtttaggtgcatgttagattaggatta

SEQ ID NO: 320646 - DNA, 57 bp, Artificial
  Synthetic oligonucleotide
agatcagaaagatttgggtatttcactgtataaagaaggcctaaagaggtcaatgct

SEQ ID NO: 320647 - DNA, 56 bp, Artificial
  Synthetic oligonucleotide
agatcagacggtgcgagcgagcgtggttaattaacctaactaattaactagacaac

SEQ ID NO: 320648 - DNA, 60 bp, Artificial
  Synthetic oligonucleotide
agatcagccggagggatcaccatggggcgatatgatggtatacgggatgaagggggcttc

SEQ ID NO: 320649 - DNA, 60 bp, Artificial
  Synthetic oligonucleotide
agatcagcggaactgtcattgacagcataatcacggttcagggcaaatcagcagagaccc

SEQ ID NO: 320650 - DNA, 55 bp, Artificial
  Synthetic oligonucleotide
agatcaggaatcgacagaagaagagactaagttagtaagtatgcgaatgttaatg

SEQ ID NO: 320651 - DNA, 58 bp, Artificial
  Synthetic oligonucleotide
agatcaggataatcaaaggtactgttctaaatctggtgaggtttggtcacacggagaa

SEQ ID NO: 320652 - DNA, 60 bp, Artificial
  Synthetic oligonucleotide
agatcagggcatctgttggaagaatgattagtggcatcgggaggttctacatacagatgt

SEQ ID NO: 320653 - DNA, 50 bp, Artificial
  Synthetic oligonucleotide
agatcaggggaggccaacaggctttccctggttcgtgctagagccacacc

SEQ ID NO: 320654 - DNA, 55 bp, Artificial
  Synthetic oligonucleotide
agatcaggtatactcgactaccagggtaccagtacaggggcaggagaacaacccc

SEQ ID NO: 320655 - DNA, 59 bp, Artificial
  Synthetic oligonucleotide
agatcagtacagatatctgaattccctagcgacacggtgccccgatcaggaacccccta

SEQ ID NO: 320656 - DNA, 51 bp, Artificial
  Synthetic oligonucleotide
agatcagtcacaaggcgtgggcgggcgcagataacccgctcggcatcaata

SEQ ID NO: 320657 - DNA, 60 bp, Artificial
  Synthetic oligonucleotide
agatcagtgaatagatctggaatggaagtagatctgacctttataaaggtgactaaagga

SEQ ID NO: 320658 - DNA, 55 bp, Artificial
  Synthetic oligonucleotide
agatcagtggttcttttcccttttgagcaaattttggggatgtttgtccgctcca

SEQ ID NO: 320659 - DNA, 53 bp, Artificial
  Synthetic oligonucleotide
agatcagtttccgttgggccgtaaatttttgttacaagcaggactaaaggcca

SEQ ID NO: 320660 - DNA, 55 bp, Artificial
  Synthetic oligonucleotide
agatcagttttgaggccccggtttccatctggtcccgtgttgtacagttcggcac

SEQ ID NO: 320661 - DNA, 55 bp, Artificial
  Synthetic oligonucleotide
agatcataccagagaaagaggggtttggttgtcttgtttactagccaccggatag

SEQ ID NO: 320662 - DNA, 60 bp, Artificial
  Synthetic oligonucleotide
agatcatcaacataagatagagagagcaattgaggaggctgataatttttgtgttcttca

SEQ ID NO: 320663 - DNA, 60 bp, Artificial
  Synthetic oligonucleotide
agatcatcagaatgttgactgccctagagtttgatctatctgatgactgttgtcagtcac

SEQ ID NO: 320664 - DNA, 60 bp, Artificial
  Synthetic oligonucleotide
agatcatccggagtcgtcctattctaggaacgaggagatagagtctttagagcagtttca

SEQ ID NO: 320665 - DNA, 60 bp, Artificial
  Synthetic oligonucleotide
agatcatcgaggtggaacgcagtcttcagaaggagctggggatcacgcgtgaaggagtgg

SEQ ID NO: 320666 - DNA, 60 bp, Artificial
  Synthetic oligonucleotide
agatcatgagacaattgatattcatctctgtgcgactctatataattgaacgcattcggt

SEQ ID NO: 320667 - DNA, 57 bp, Artificial
  Synthetic oligonucleotide
agatcatggcaactgaatcccttgtattctcataacgccgctacccccggtagaacc

SEQ ID NO: 320668 - DNA, 58 bp, Artificial
  Synthetic oligonucleotide
agatcatgtacccccacaattctactatgaccaaatcataacttgggaaggaatagta

SEQ ID NO: 320669 - DNA, 55 bp, Artificial
  Synthetic oligonucleotide
agatcatgtattagtgacctctggttctggaggtcaaatcataggaggatcatcc

SEQ ID NO: 320670 - DNA, 60 bp, Artificial
  Synthetic oligonucleotide
agatcattagcaagctggatccagagcgaattcaacaaagcatgcgaattgacagattcg

SEQ ID NO: 320671 - DNA, 60 bp, Artificial
  Synthetic oligonucleotide
agatcattagcagctaatctgaactcagtgaaatgtacgggtggaagttacgatttcagt

SEQ ID NO: 320672 - DNA, 60 bp, Artificial
  Synthetic oligonucleotide
agatccaaactctatgtgaccagggatctcatagatcacctagatataggtggcttgctt

SEQ ID NO: 320673 - DNA, 56 bp, Artificial
  Synthetic oligonucleotide
agatccaaataacatggacaaagcagttaaactgtataggaaacttaagagggaga

SEQ ID NO: 320674 - DNA, 55 bp, Artificial
  Synthetic oligonucleotide
agatccaaataacttcgcggattaaagcgttagtgattttcacaaaaggccacga

SEQ ID NO: 320675 - DNA, 58 bp, Artificial
  Synthetic oligonucleotide
agatccaaatgcccacataggtaattatgtgggcctaaagacctagcccacattgtct

SEQ ID NO: 320676 - DNA, 58 bp, Artificial
  Synthetic oligonucleotide
agatccaccatgccagggtgtagcgggtaccccaacatgaatttggattgcttactcc

SEQ ID NO: 320677 - DNA, 60 bp, Artificial
  Synthetic oligonucleotide
agatccactggcatcactattggagatgtgtcacggcacacaaatcggtgggataagaat

SEQ ID NO: 320678 - DNA, 55 bp, Artificial
  Synthetic oligonucleotide
agatccagaacggccctccgctcgcgatccttggtgcgttcgctcgcgactacca

SEQ ID NO: 320679 - DNA, 58 bp, Artificial
  Synthetic oligonucleotide
agatccagatggccgcacaagtaattgtgcggtcccaaagaacgcgcccacgcagttt

SEQ ID NO: 320680 - DNA, 60 bp, Artificial
  Synthetic oligonucleotide
agatccagccccctatgtgcatgcacaacgctacatacgttattgtggcattgattcacg

SEQ ID NO: 320681 - DNA, 60 bp, Artificial
  Synthetic oligonucleotide
agatccagtgaagactcttggattcaataaaatgatcgcggcaataagtctcgaaaagaa

SEQ ID NO: 320682 - DNA, 57 bp, Artificial
  Synthetic oligonucleotide
agatccagttttggcaaagaaagtgcctgaaacttttccagaattgaagcctggaga

SEQ ID NO: 320683 - DNA, 60 bp, Artificial
  Synthetic oligonucleotide
agatccatggaggcattctcagggatttttaggtcaccacatggagaggaccatgatcta

SEQ ID NO: 320684 - DNA, 60 bp, Artificial
  Synthetic oligonucleotide
agatcccacaatgatgacgcacactagtcaatacatatgcagtcctgtcctcacagacaa

SEQ ID NO: 320685 - DNA, 55 bp, Artificial
  Synthetic oligonucleotide
agatcccagaaacactcaggatcacgtacgctcactgtgcctattggcctggcac

SEQ ID NO: 320686 - DNA, 50 bp, Artificial
  Synthetic oligonucleotide
agatccccatggggcaaatccgggtttcacccttgtgttgcctggttcgg

SEQ ID NO: 320687 - DNA, 59 bp, Artificial
  Synthetic oligonucleotide
agatcccctcacacacgctggttggagcactacttcgttctgcgacgtactacttctca

SEQ ID NO: 320688 - DNA, 57 bp, Artificial
  Synthetic oligonucleotide
agatcccgaaatcttgggcgtggatgttaaaagcatattaccggtgctaacggctga

SEQ ID NO: 320689 - DNA, 58 bp, Artificial
  Synthetic oligonucleotide
agatcccgacgaaagtacggtccagcaagtctgttgatgcccaactatgttgtacacc

SEQ ID NO: 320690 - DNA, 52 bp, Artificial
  Synthetic oligonucleotide
agatcccgaggtcgcaacaaccacagattcatgtttatacggcaccgtggga

SEQ ID NO: 320691 - DNA, 59 bp, Artificial
  Synthetic oligonucleotide
agatccgacatttttgaagatgcctcagtcgaagagatcgcctcagacgaagtcccggg

SEQ ID NO: 320692 - DNA, 59 bp, Artificial
  Synthetic oligonucleotide
agatccgataaacaaccgtccacacctgagcatgcgactctgcatgacggcccgccaac

SEQ ID NO: 320693 - DNA, 60 bp, Artificial
  Synthetic oligonucleotide
agatccgctacttgctgtcccccgcctaatcgaggagattctatccgagcaagactacat

SEQ ID NO: 320694 - DNA, 55 bp, Artificial
  Synthetic oligonucleotide
agatccgctctcgatggccccaactccggctaaaaggaaagaacaccccgctgtg

SEQ ID NO: 320695 - DNA, 60 bp, Artificial
  Synthetic oligonucleotide
agatccggaccgtgggtcagacttgttgccagcgggcacatccctggccgaatatcatac

SEQ ID NO: 320696 - DNA, 57 bp, Artificial
  Synthetic oligonucleotide
agatccgttggcagacgagtcactaaaatatttacgtagcagaataacagtgtttaa

SEQ ID NO: 320697 - DNA, 55 bp, Artificial
  Synthetic oligonucleotide
agatcctaaccgatacaagtcgtcccaatgatcccactaatggaaactgtgacgc

SEQ ID NO: 320698 - DNA, 56 bp, Artificial
  Synthetic oligonucleotide
agatcctaacctagagccctggaatcatccggggagtcaacctactactccttgta

SEQ ID NO: 320699 - DNA, 55 bp, Artificial
  Synthetic oligonucleotide
agatcctagaaacacgcaggatcacgtgcgctctttgtgcttattggcttggcac

SEQ ID NO: 320700 - DNA, 58 bp, Artificial
  Synthetic oligonucleotide
agatcctataccaaagcagtaagtataggtaatgatagatttactagcaagggtagat

SEQ ID NO: 320701 - DNA, 60 bp, Artificial
  Synthetic oligonucleotide
agatcctcccttaacttgtccatcaatgatgtggatgaaaagtcggagacaatggccatc

SEQ ID NO: 320702 - DNA, 60 bp, Artificial
  Synthetic oligonucleotide
agatcctgaataagcttaagagtgtttttggcactatggctgaggaagttcgcatgcaga

SEQ ID NO: 320703 - DNA, 52 bp, Artificial
  Synthetic oligonucleotide
agatcctgacctagcagaccacctgattcatctgcactattttgactgtttt

SEQ ID NO: 320704 - DNA, 55 bp, Artificial
  Synthetic oligonucleotide
agatcctgctttcttgtctcgtcccacctcattggttacttttgacaatcctgca

SEQ ID NO: 320705 - DNA, 56 bp, Artificial
  Synthetic oligonucleotide
agatccttgaaaacgatccatacacgctagtgctcggattagtctccccgacagtt

SEQ ID NO: 320706 - DNA, 56 bp, Artificial
  Synthetic oligonucleotide
agatccttgtggatactaaggtattgacgaaggttttagaagcaagcttccgacaa

SEQ ID NO: 320707 - DNA, 60 bp, Artificial
  Synthetic oligonucleotide
agatcctttccgtctgctgcaaaacagtcaggtcctcagtctaattagatcaaatgagaa

SEQ ID NO: 320708 - DNA, 60 bp, Artificial
  Synthetic oligonucleotide
agatcgaaagtcaagggattggtgctgatgtccatcatcttgggcattggtatgacgcac

SEQ ID NO: 320709 - DNA, 56 bp, Artificial
  Synthetic oligonucleotide
agatcgaaatctaggaaattgcctaagtggtccccgcatataaaaagctgctgttt

SEQ ID NO: 320710 - DNA, 60 bp, Artificial
  Synthetic oligonucleotide
agatcgaataaagctagttgcttgctgaacacgctatgacaaacgcacgctatgacaaaa

SEQ ID NO: 320711 - DNA, 60 bp, Artificial
  Synthetic oligonucleotide
agatcgaatgatgattatatcttctgaacgacgcaaagacattgaagatgtgcaagggta

SEQ ID NO: 320712 - DNA, 54 bp, Artificial
  Synthetic oligonucleotide
agatcgacccagagtcactcgcccgattcccaccccgtgtcttcttgccagatg

SEQ ID NO: 320713 - DNA, 60 bp, Artificial
  Synthetic oligonucleotide
agatcgagaggtctcgagaagcatgccaatccgtgctcggtttgttacacgtcatccttc

SEQ ID NO: 320714 - DNA, 52 bp, Artificial
  Synthetic oligonucleotide
agatcgaggttggtgacccggatgcccctggggccggtgccaagactcgact

SEQ ID NO: 320715 - DNA, 52 bp, Artificial
  Synthetic oligonucleotide
agatcgagtactacgggtagacacatactatgaagagatgtcacaggtaggc

SEQ ID NO: 320716 - DNA, 60 bp, Artificial
  Synthetic oligonucleotide
agatcgcagcctcaacatgacaatttaatgggtacaatgtggttaaatgcaggttcggag

SEQ ID NO: 320717 - DNA, 50 bp, Artificial
  Synthetic oligonucleotide
agatcgcatgcaccaatacattttcgcgacgccacagtcggtcgcacggc

SEQ ID NO: 320718 - DNA, 56 bp, Artificial
  Synthetic oligonucleotide
agatcgcccaagagtgagagataacgcgtcacttaatggagactaacctatcacct

SEQ ID NO: 320719 - DNA, 60 bp, Artificial
  Synthetic oligonucleotide
agatcgcccactgaagcatgtgacacctcagatggaagaaagctttcgcaagcatgtgga

SEQ ID NO: 320720 - DNA, 60 bp, Artificial
  Synthetic oligonucleotide
agatcgccgagcggtcatgagcgatcattcgggactacgacgtgagcatcagtggacgct

SEQ ID NO: 320721 - DNA, 55 bp, Artificial
  Synthetic oligonucleotide
agatcgcgatcgcccacgaaggaaccgcactccggaagaagagaggcggggatac

SEQ ID NO: 320722 - DNA, 58 bp, Artificial
  Synthetic oligonucleotide
agatcgctgtcagccaacttgaatgatgtggtctgcagtggtggtgattacagtttcg

SEQ ID NO: 320723 - DNA, 55 bp, Artificial
  Synthetic oligonucleotide
agatcggaaacctcacttgggtcctagtggttgtctgcatacattcgacgagctg

SEQ ID NO: 320724 - DNA, 54 bp, Artificial
  Synthetic oligonucleotide
agatcggaacacttccttcaaccatttcggtgtttggcaggtactttgacaaaa

SEQ ID NO: 320725 - DNA, 55 bp, Artificial
  Synthetic oligonucleotide
agatcggagtattcgaattcgccaagagactaatggatctagaaggaccttgtca

SEQ ID NO: 320726 - DNA, 60 bp, Artificial
  Synthetic oligonucleotide
agatcggcaatgtaatcaactggacaagagactcactcacagaggtatggtcttacaatg

SEQ ID NO: 320727 - DNA, 60 bp, Artificial
  Synthetic oligonucleotide
agatcggcagacgcaggatccgtatgcgcaagggatttggtgatgcattgagaaattacg

SEQ ID NO: 320728 - DNA, 60 bp, Artificial
  Synthetic oligonucleotide
agatcggccagctctatcgttacgtcgatgtagttgacggattcgataggaaggacgtga

SEQ ID NO: 320729 - DNA, 52 bp, Artificial
  Synthetic oligonucleotide
agatcgggcgagttgattcatcgcagcaattcaggccctcacaaggaacctc

SEQ ID NO: 320730 - DNA, 53 bp, Artificial
  Synthetic oligonucleotide
agatcggtagctagccagatctttggataccaatgcgtaggtgttaagtctct

SEQ ID NO: 320731 - DNA, 58 bp, Artificial
  Synthetic oligonucleotide
agatcggtcctagcatgcgagttactgcgggttgcagaggttgggcctcccgtcgagg

SEQ ID NO: 320732 - DNA, 51 bp, Artificial
  Synthetic oligonucleotide
agatcgtaagactaccaacaatacaaagaggtttggatggctgttcatgtg

SEQ ID NO: 320733 - DNA, 59 bp, Artificial
  Synthetic oligonucleotide
agatcgtacatagtaacatgggaccaagacataccatgtaaaccgctaccatatactaa

SEQ ID NO: 320734 - DNA, 60 bp, Artificial
  Synthetic oligonucleotide
agatcgtgtacaccacgacagacagggtaattggggctagaatcttgctatatgctccta

SEQ ID NO: 320735 - DNA, 57 bp, Artificial
  Synthetic oligonucleotide
agatcgttatccgcaagatgcctacgcaacgcctagtaacactttgaagtgtttttg

SEQ ID NO: 320736 - DNA, 50 bp, Artificial
  Synthetic oligonucleotide
agatcgttgggaggggccgaccgcagttggaatttggtccatctcaccgc

SEQ ID NO: 320737 - DNA, 60 bp, Artificial
  Synthetic oligonucleotide
agatcgttgggatcttaatgccagcaaggaagatgatgtttctgggcactttgttctcta

SEQ ID NO: 320738 - DNA, 55 bp, Artificial
  Synthetic oligonucleotide
agatcgtttctgataggaccactctgaggagtattattgatgaccatctgcgggg

SEQ ID NO: 320739 - DNA, 53 bp, Artificial
  Synthetic oligonucleotide
agatctacaatgaggagtgccccactatcaccgacgcgtcaattcctttggac

SEQ ID NO: 320740 - DNA, 60 bp, Artificial
  Synthetic oligonucleotide
agatctacttgcccacgattcgttcggaccaatcgcaagatgtgggacgcgtaatgatct

SEQ ID NO: 320741 - DNA, 60 bp, Artificial
  Synthetic oligonucleotide
agatctagacagtcatgtcccaatggacgtacttgagttggatgtttcgaagtatgataa

SEQ ID NO: 320742 - DNA, 50 bp, Artificial
  Synthetic oligonucleotide
agatctagaccaccgaatagagcctctaataggtctaataacccgcctag

SEQ ID NO: 320743 - DNA, 55 bp, Artificial
  Synthetic oligonucleotide
agatctagatgaccacacaaataattatgttggcctaacgatctggcccacatcg

SEQ ID NO: 320744 - DNA, 60 bp, Artificial
  Synthetic oligonucleotide
agatctagcaagagaagcgacaaaacgcgcgaacataagagcatatgtgtataaacctgg

SEQ ID NO: 320745 - DNA, 55 bp, Artificial
  Synthetic oligonucleotide
agatctagcaatagtaattgcaggaatcctaacaatgagagagggaatccaggag

SEQ ID NO: 320746 - DNA, 60 bp, Artificial
  Synthetic oligonucleotide
agatctagtctcagttatcagggcgcgtaattatgtcgaagcgaccaggagatatcatca

SEQ ID NO: 320747 - DNA, 55 bp, Artificial
  Synthetic oligonucleotide
agatctatacagtcacatggagctaaaaggtttgatctaagttgcatcatacccc

SEQ ID NO: 320748 - DNA, 60 bp, Artificial
  Synthetic oligonucleotide
agatctatgaagccgtagatgttaagacccctagtgttatcactgagattgtcgataatc

SEQ ID NO: 320749 - DNA, 60 bp, Artificial
  Synthetic oligonucleotide
agatctatgttgcatctgatcggaaatgtccataacgcctgtaacgactcgttgtccgtc

SEQ ID NO: 320750 - DNA, 53 bp, Artificial
  Synthetic oligonucleotide
agatctattaatgataaccccaatgttttgcaccggtgttttcttagaccggt

SEQ ID NO: 320751 - DNA, 60 bp, Artificial
  Synthetic oligonucleotide
agatctcagtttaatctggtaaggagatgccatcgatacttgactaattttacagtcacc

SEQ ID NO: 320752 - DNA, 60 bp, Artificial
  Synthetic oligonucleotide
agatctcatatttctggcacggtctgcactcatcctgagaggatcagtagcccacaagtc

SEQ ID NO: 320753 - DNA, 60 bp, Artificial
  Synthetic oligonucleotide
agatctcatctttcttgcacgatctgctctcattttgagaggatcagtggctcataagtc

SEQ ID NO: 320754 - DNA, 50 bp, Artificial
  Synthetic oligonucleotide
agatctcattgttcaaaccagtcccaatgactttactacctcacggtctg

SEQ ID NO: 320755 - DNA, 51 bp, Artificial
  Synthetic oligonucleotide
agatctccatccaacctgtagacaaagcactgcgttccatcttcatcggcc

SEQ ID NO: 320756 - DNA, 55 bp, Artificial
  Synthetic oligonucleotide
agatctcccacgtggagtagtacactattattacggtaatcttgtacgccagttt

SEQ ID NO: 320757 - DNA, 52 bp, Artificial
  Synthetic oligonucleotide
agatctccgagttgcagcgccttaaccgagaattgtctttgaagttagcgga

SEQ ID NO: 320758 - DNA, 60 bp, Artificial
  Synthetic oligonucleotide
agatctcctagatacctccgcagctctatatcgggaagcccttgagtctcctgagcattg

SEQ ID NO: 320759 - DNA, 55 bp, Artificial
  Synthetic oligonucleotide
agatctcgctgccggggcttaggatcccagttaaggcttcttcacaaccgggaaa

SEQ ID NO: 320760 - DNA, 53 bp, Artificial
  Synthetic oligonucleotide
agatctctctcattaatgaaagcaaggagaatcataagctgcgagcccaagag

SEQ ID NO: 320761 - DNA, 60 bp, Artificial
  Synthetic oligonucleotide
agatctctgcaaaagcttatgtcaacatgcaattaatgtgtgataaccaacttgacacta

SEQ ID NO: 320762 - DNA, 54 bp, Artificial
  Synthetic oligonucleotide
agatctgaacctttctaagggaaacaccgaaatcatcgcccgaaatttaccagc

SEQ ID NO: 320763 - DNA, 57 bp, Artificial
  Synthetic oligonucleotide
agatctgacaagggttgggtttatcagagacctgacaaggtttatatagagaaccag

SEQ ID NO: 320764 - DNA, 60 bp, Artificial
  Synthetic oligonucleotide
agatctgacaatttcacagacaatggtaaagccataatagtacagctgaaagaacctgtg

SEQ ID NO: 320765 - DNA, 60 bp, Artificial
  Synthetic oligonucleotide
agatctgacgaacatggaagtagacactgctacgtttgttcggcttcatcatgagctcct

SEQ ID NO: 320766 - DNA, 56 bp, Artificial
  Synthetic oligonucleotide
agatctgcgttgcttccgccccctcactttagctcatagcctccgctatgatgccc

SEQ ID NO: 320767 - DNA, 60 bp, Artificial
  Synthetic oligonucleotide
agatctggactacaggcagtacgagcaacatctacaaggttggtcgcgtagttattacac

SEQ ID NO: 320768 - DNA, 60 bp, Artificial
  Synthetic oligonucleotide
agatctggatggatgacaacattaagacgaggaaccatacgaatacagttatgttcttct

SEQ ID NO: 320769 - DNA, 60 bp, Artificial
  Synthetic oligonucleotide
agatctggcagaggcatgcgcttgctactgcgcaattgttacaacgcgaaccgtcgtgta

SEQ ID NO: 320770 - DNA, 60 bp, Artificial
  Synthetic oligonucleotide
agatctggtggcagctcaaaaattggctacaaaaccagttgatccaacagggcttgagcc

SEQ ID NO: 320771 - DNA, 60 bp, Artificial
  Synthetic oligonucleotide
agatctgtgtcggatattgtcacgcataggcagaattatgttggaccaagaagcggaacc

SEQ ID NO: 320772 - DNA, 54 bp, Artificial
  Synthetic oligonucleotide
agatctgtttaatgagtcaaatagtacggagttaaacgacactataactctcca

SEQ ID NO: 320773 - DNA, 55 bp, Artificial
  Synthetic oligonucleotide
agatcttaaagccaaacccatgttttacttcccagttcccgctggtagctggtca

SEQ ID NO: 320774 - DNA, 54 bp, Artificial
  Synthetic oligonucleotide
agatcttaagggcggaacaatcgtattacccaactcgattcggtaggaggatgg

SEQ ID NO: 320775 - DNA, 57 bp, Artificial
  Synthetic oligonucleotide
agatcttaattgagaatgcggctggtcaccgcgtctgtatttcaacttatactacta

SEQ ID NO: 320776 - DNA, 54 bp, Artificial
  Synthetic oligonucleotide
agatcttacacaggttgagacaaattcgcagagcagacagaaagatggaattca

SEQ ID NO: 320777 - DNA, 60 bp, Artificial
  Synthetic oligonucleotide
agatcttatacaaaagctgtctttgctgagcgtttgcagttagcagtgaatttcgttcca

SEQ ID NO: 320778 - DNA, 60 bp, Artificial
  Synthetic oligonucleotide
agatcttatcttacttgtgaaggctcagcgcggtcgctctacggaggagctgatctttgg

SEQ ID NO: 320779 - DNA, 60 bp, Artificial
  Synthetic oligonucleotide
agatcttatcttcattgttaaggctcggcgaggtagatctacggaggagctgcaattcgg

SEQ ID NO: 320780 - DNA, 60 bp, Artificial
  Synthetic oligonucleotide
agatcttccatcctcccagatgagtccagcacctctgatactactttccgaagtcctcag

SEQ ID NO: 320781 - DNA, 60 bp, Artificial
  Synthetic oligonucleotide
agatcttcgagagaaccttcctagtgtcgatcgtagatatcttcggaccatcgactccta

SEQ ID NO: 320782 - DNA, 60 bp, Artificial
  Synthetic oligonucleotide
agatcttgacaacgagaaaatgctgggcaccagagagcgcaagcttacgtatggctgctt

SEQ ID NO: 320783 - DNA, 54 bp, Artificial
  Synthetic oligonucleotide
agatcttgcgaacatgcttggtgtctacagtgagagaacgggagtcaccgaaat

SEQ ID NO: 320784 - DNA, 54 bp, Artificial
  Synthetic oligonucleotide
agatcttgtatcagcaatacgacgagatggaggagtgctctcagcacataccct

SEQ ID NO: 320785 - DNA, 55 bp, Artificial
  Synthetic oligonucleotide
agatcttgtcgaactgatctgcatatggactgatatcctttgttgttgcatgagc

SEQ ID NO: 320786 - DNA, 54 bp, Artificial
  Synthetic oligonucleotide
agatctttggattttcagctttatatttagtacagtttaaaagtgcgaaaagta

SEQ ID NO: 320787 - DNA, 55 bp, Artificial
  Synthetic oligonucleotide
agatctttgggtcttagcgggaagtctccatactcctccaatgcagtgggtcatg

SEQ ID NO: 320788 - DNA, 52 bp, Artificial
  Synthetic oligonucleotide
agatgaaaattaaagttagccaactcggcaatcgtgtacacgaagttaaaac

SEQ ID NO: 320789 - DNA, 53 bp, Artificial
  Synthetic oligonucleotide
agatgaacaaaatcgctggccaaacgcccgagaagcagtggaggaccccgagt

SEQ ID NO: 320790 - DNA, 60 bp, Artificial
  Synthetic oligonucleotide
agatgaacaatatccattcctcatccacccaaccatgccaatgaaggagatacacgaatc

SEQ ID NO: 320791 - DNA, 57 bp, Artificial
  Synthetic oligonucleotide
agatgaaccctccacagcgacatttcggacctacaccaacacagttcctaaactcag

SEQ ID NO: 320792 - DNA, 55 bp, Artificial
  Synthetic oligonucleotide
agatgaacttggcataccagtcggctctgatgctgctaacacgcacgagagaagc

SEQ ID NO: 320793 - DNA, 55 bp, Artificial
  Synthetic oligonucleotide
agatgaagagactgaaggtgcagtgagaaggttcatagccgagatgaggcaacga

SEQ ID NO: 320794 - DNA, 60 bp, Artificial
  Synthetic oligonucleotide
agatgaagcagcggatgttttgttgtttggacagatctcgccagagtggacatgctctca

SEQ ID NO: 320795 - DNA, 59 bp, Artificial
  Synthetic oligonucleotide
agatgaagtctagtagtctcccaatatttccgtgaaaagaatgagggacgagatagctc

SEQ ID NO: 320796 - DNA, 60 bp, Artificial
  Synthetic oligonucleotide
agatgaatctgcttatactggagatctgttaattcagactgaggaaacagaagtaagaaa

SEQ ID NO: 320797 - DNA, 55 bp, Artificial
  Synthetic oligonucleotide
agatgaattaacagcctgtcagcaagacatgattaagtctggcttcataggaaag

SEQ ID NO: 320798 - DNA, 60 bp, Artificial
  Synthetic oligonucleotide
agatgacaagtactaatgcgagacttggcatgataaatgatgggcaacaatcagatgctg

SEQ ID NO: 320799 - DNA, 55 bp, Artificial
  Synthetic oligonucleotide
agatgacaagtcacactccttcaccagaacgaggctagcgtcctggttgtcagag

SEQ ID NO: 320800 - DNA, 60 bp, Artificial
  Synthetic oligonucleotide
agatgacatagaactgatactagtcagtggtgatgactcgttgatcttctcgaaacacga

SEQ ID NO: 320801 - DNA, 59 bp, Artificial
  Synthetic oligonucleotide
agatgacatctttaattttccttgcatcctgcagaagtgaactccatttaccacgttag

SEQ ID NO: 320802 - DNA, 60 bp, Artificial
  Synthetic oligonucleotide
agatgacgctcagtatgactgatggtcactcgactgcatacctgaagcccatgcaggatg

SEQ ID NO: 320803 - DNA, 60 bp, Artificial
  Synthetic oligonucleotide
agatgacgtcagtcgcaattactggatcattaagactatttccttctgaacgcgtattaa

SEQ ID NO: 320804 - DNA, 60 bp, Artificial
  Synthetic oligonucleotide
agatgacgttaacaagaatacactgcaagcaaggcaacagacagtgtcagcactggagga

SEQ ID NO: 320805 - DNA, 59 bp, Artificial
  Synthetic oligonucleotide
agatgacttcctcgcaagggtctgggagataggccataagcgtacctccattagcgact

SEQ ID NO: 320806 - DNA, 57 bp, Artificial
  Synthetic oligonucleotide
agatgacttgttcgttgatcgggcgaacaagattttctctaggggtggacagacggc

SEQ ID NO: 320807 - DNA, 50 bp, Artificial
  Synthetic oligonucleotide
agatgagacaaccttaccagaagcgtccatactacaacttctacgacctt

SEQ ID NO: 320808 - DNA, 60 bp, Artificial
  Synthetic oligonucleotide
agatgagacatgggacctttttgtggagcgaagcaatgctttcagcaattgttaccctta

SEQ ID NO: 320809 - DNA, 58 bp, Artificial
  Synthetic oligonucleotide
agatgagagcgcgcttgaaccaaagggtggcgttaagagagctccaaccaaagctgag

SEQ ID NO: 320810 - DNA, 60 bp, Artificial
  Synthetic oligonucleotide
agatgagattccatatgcgttactaagcagataccctctggcgatacagacaaatgttaa

SEQ ID NO: 320811 - DNA, 51 bp, Artificial
  Synthetic oligonucleotide
agatgagcggctatcgatgttagcgagcatgatgcctcagcaatcaggaga

SEQ ID NO: 320812 - DNA, 60 bp, Artificial
  Synthetic oligonucleotide
agatgagcgttgaattcctactcgctatgtacaacgagttcaaggagtgcacgaaagact

SEQ ID NO: 320813 - DNA, 55 bp, Artificial
  Synthetic oligonucleotide
agatgaggaaatgcgctgcccatgttaatccaagattaatgagtatgttccctga

SEQ ID NO: 320814 - DNA, 55 bp, Artificial
  Synthetic oligonucleotide
agatgaggaagccaatcttgaagttcaacattgcaattatagggctctgatacaa

SEQ ID NO: 320815 - DNA, 55 bp, Artificial
  Synthetic oligonucleotide
agatgaggccaccctccccgcctggagccaaggcgtcgctaacttgaccggtaat

SEQ ID NO: 320816 - DNA, 58 bp, Artificial
  Synthetic oligonucleotide
agatgagggaaccaaggggaagtgacatagcaggaaccactagtaaccttcaggagca

SEQ ID NO: 320817 - DNA, 56 bp, Artificial
  Synthetic oligonucleotide
agatgagtaggtaaatcgctgtgatgctcatgtctctattatgcgctcatcgtggc

SEQ ID NO: 320818 - DNA, 60 bp, Artificial
  Synthetic oligonucleotide
agatgagtattcagtattgaatgaattggttgcatcactgagcactaacaaaccaaaaat

SEQ ID NO: 320819 - DNA, 55 bp, Artificial
  Synthetic oligonucleotide
agatgagtgcttcatgtacctgtttcttctaggagtgattgaggataacgacccc

SEQ ID NO: 320820 - DNA, 56 bp, Artificial
  Synthetic oligonucleotide
agatgagttcatagggttccttaaacctctttgcgtagatctcaagcttaaaagta

SEQ ID NO: 320821 - DNA, 56 bp, Artificial
  Synthetic oligonucleotide
agatgatactgactatgggccccgaatacctcccgggggcctagagcctcccagtg

SEQ ID NO: 320822 - DNA, 60 bp, Artificial
  Synthetic oligonucleotide
agatgatagtgttttacaggtatacttgaattcagtgctgcgccaggaaaaattgaatcc

SEQ ID NO: 320823 - DNA, 60 bp, Artificial
  Synthetic oligonucleotide
agatgatagttcctatgaggatgtgaatggcatcaggcgcccaaagcatctctacgtgtc

SEQ ID NO: 320824 - DNA, 60 bp, Artificial
  Synthetic oligonucleotide
agatgatatatgcaactatagatggttgaatctaagagctcatggggatcttagactcgt

SEQ ID NO: 320825 - DNA, 60 bp, Artificial
  Synthetic oligonucleotide
agatgattgaatctattggtgctaaccacctcttcatgatcacccgtggcattaaaataa

SEQ ID NO: 320826 - DNA, 54 bp, Artificial
  Synthetic oligonucleotide
agatgattttgaatcactgatcagaaatattatactcgactatgacagaatatt

SEQ ID NO: 320827 - DNA, 57 bp, Artificial
  Synthetic oligonucleotide
agatgcaaaagtgctttttcagaattggggaattgaacacatcgacagtgtgatggg

SEQ ID NO: 320828 - DNA, 60 bp, Artificial
  Synthetic oligonucleotide
agatgcaactttccgcctgaaatatggtgatttgcagtttgacagtcgcgatattgttac

SEQ ID NO: 320829 - DNA, 51 bp, Artificial
  Synthetic oligonucleotide
agatgcaagaacatgttctgtcactgtgtcatttaatgtggcacaatggca

SEQ ID NO: 320830 - DNA, 55 bp, Artificial
  Synthetic oligonucleotide
agatgcaatgacaatgtgcaggctatatagacgtgcagaacaggccagaatgagc

SEQ ID NO: 320831 - DNA, 60 bp, Artificial
  Synthetic oligonucleotide
agatgcaatgctctcctcaggttgtggttgaaccgtatctgcacgtggtatactctggtc

SEQ ID NO: 320832 - DNA, 50 bp, Artificial
  Synthetic oligonucleotide
agatgcaattactatcaattccttgtatatcggatgatcaacttccgcga

SEQ ID NO: 320833 - DNA, 60 bp, Artificial
  Synthetic oligonucleotide
agatgcacaaattgacacatgcatttctgagtgcatcactcctaatggaagcatcccaaa

SEQ ID NO: 320834 - DNA, 55 bp, Artificial
  Synthetic oligonucleotide
agatgcacctaagggtaatagtgggggtagttacgtttttgttgctgacacgatg

SEQ ID NO: 320835 - DNA, 60 bp, Artificial
  Synthetic oligonucleotide
agatgcacctattgacacctgcaattctgaatgcattactccaaacggaagcatacccaa

SEQ ID NO: 320836 - DNA, 60 bp, Artificial
  Synthetic oligonucleotide
agatgcacctttgctctgtatcgccctgtgtagaatagactcatgctttcctaagaccgg

SEQ ID NO: 320837 - DNA, 55 bp, Artificial
  Synthetic oligonucleotide
agatgcactaccaaataacaactactccggttcttttatcgagggttgttattca

SEQ ID NO: 320838 - DNA, 54 bp, Artificial
  Synthetic oligonucleotide
agatgcagcaaggaatctcgttagtgaggaaaatcaattattcctgtggttgag

SEQ ID NO: 320839 - DNA, 60 bp, Artificial
  Synthetic oligonucleotide
agatgcagcatggtcccatgcgtgcgaacaagcacgcaaagtaggtgataatcatgacct

SEQ ID NO: 320840 - DNA, 55 bp, Artificial
  Synthetic oligonucleotide
agatgcagcttctggggaacagcttaaaggagagcccatggtgcaatgagccatg

SEQ ID NO: 320841 - DNA, 51 bp, Artificial
  Synthetic oligonucleotide
agatgcaggaaattcatatgaagcaggcataggagtagctgtttcatatat

SEQ ID NO: 320842 - DNA, 60 bp, Artificial
  Synthetic oligonucleotide
agatgcataagtggcttgatggtagaaaaattgtgaactatgatgctatgcaacggaagc

SEQ ID NO: 320843 - DNA, 52 bp, Artificial
  Synthetic oligonucleotide
agatgcatcgagattcgatcagcattgtagcgtggatgccctcaaattcgag

SEQ ID NO: 320844 - DNA, 60 bp, Artificial
  Synthetic oligonucleotide
agatgcattatttagggctatgacgtacctgtgcaactcaaaactggagcccatgttttc

SEQ ID NO: 320845 - DNA, 56 bp, Artificial
  Synthetic oligonucleotide
agatgcatttcctagtcctgctggacctaagcaagtattttatgatgcagccacca

SEQ ID NO: 320846 - DNA, 60 bp, Artificial
  Synthetic oligonucleotide
agatgccaatggcgtgtgggtgatgatggatggagaggaacagattgaatatccgctgaa

SEQ ID NO: 320847 - DNA, 60 bp, Artificial
  Synthetic oligonucleotide
agatgccaggcggcagcagccaggtacccattagaatgagagcaaagtggtaccctaccc

SEQ ID NO: 320848 - DNA, 58 bp, Artificial
  Synthetic oligonucleotide
agatgcccctacaccgaacccatgctaatagaccactcagaccccaacagaggctttg

SEQ ID NO: 320849 - DNA, 60 bp, Artificial
  Synthetic oligonucleotide
agatgcccgtattggcatgtggtatcgtgctttaactagtgttggaccaagatcagatat

SEQ ID NO: 320850 - DNA, 60 bp, Artificial
  Synthetic oligonucleotide
agatgccctcgacgtctattaccgttccatacaaccgatcagtcggatacagccagagga

SEQ ID NO: 320851 - DNA, 54 bp, Artificial
  Synthetic oligonucleotide
agatgcccttgcattgcaagaactagcagacacttgtccagtcacccttaattg

SEQ ID NO: 320852 - DNA, 59 bp, Artificial
  Synthetic oligonucleotide
agatgccgaacgaacaatggaagtggaccccgatgatgttaacaaaagcacattacaga

SEQ ID NO: 320853 - DNA, 60 bp, Artificial
  Synthetic oligonucleotide
agatgccgccataggccttatcaaagttctaatgctgttgctatggagcaactatggaga

SEQ ID NO: 320854 - DNA, 60 bp, Artificial
  Synthetic oligonucleotide
agatgccgccctagatcaattgaaaactgagtatacagaagatgtagatgacgaaatgta

SEQ ID NO: 320855 - DNA, 55 bp, Artificial
  Synthetic oligonucleotide
agatgccgttgaacgtgtcactgagctgaatttggacgcagctacttgacctttg

SEQ ID NO: 320856 - DNA, 55 bp, Artificial
  Synthetic oligonucleotide
agatgcctaaggacttcccagtcttccctcaaaagttgcacttccgcggacctag

SEQ ID NO: 320857 - DNA, 54 bp, Artificial
  Synthetic oligonucleotide
agatgcctaattctctctctcagggagagagattagatgcctccaaggagatgc

SEQ ID NO: 320858 - DNA, 50 bp, Artificial
  Synthetic oligonucleotide
agatgcctatgacctaaatgataagactgacacctcattagaactgacca

SEQ ID NO: 320859 - DNA, 60 bp, Artificial
  Synthetic oligonucleotide
agatgcgcgcatgttcagagaaggacgtgacatcagagaattcgtcgcgtacgcttcggg

SEQ ID NO: 320860 - DNA, 60 bp, Artificial
  Synthetic oligonucleotide
agatgcggaaagaggtaaattgaagaggcgagcaattgcaacacccggaatgcaaatcag

SEQ ID NO: 320861 - DNA, 60 bp, Artificial
  Synthetic oligonucleotide
agatgcggaaatgataaacctacaaagaggagcagaaacatcatgggaccaggcaacaga

SEQ ID NO: 320862 - DNA, 55 bp, Artificial
  Synthetic oligonucleotide
agatgcggcttgaccactgggagaaaatgatggccccgcctgacgctggtcgcag

SEQ ID NO: 320863 - DNA, 60 bp, Artificial
  Synthetic oligonucleotide
agatgcgtacagaccctgttcccactctctcgcacatcctgaatgtggaaaaccctcctg

SEQ ID NO: 320864 - DNA, 60 bp, Artificial
  Synthetic oligonucleotide
agatgcgtgagccgatgttgtttaagcgtgatgagatcgagttacatggtgacttgctag

SEQ ID NO: 320865 - DNA, 59 bp, Artificial
  Synthetic oligonucleotide
agatgcgtgtgcactggagttctaacagataccagtagacctggggacaaacctaatgg

SEQ ID NO: 320866 - DNA, 58 bp, Artificial
  Synthetic oligonucleotide
agatgcgttgtacacggagcttcggtggaatggacaagatgggccgctgaaaatccgt

SEQ ID NO: 320867 - DNA, 58 bp, Artificial
  Synthetic oligonucleotide
agatgctaaagtatatgatacagagacacataatgtttgggccacccacgcctgtgta

SEQ ID NO: 320868 - DNA, 55 bp, Artificial
  Synthetic oligonucleotide
agatgctacgcatgctggttgccgcaggtaaagattcggaggcagcgtatttccg

SEQ ID NO: 320869 - DNA, 53 bp, Artificial
  Synthetic oligonucleotide
agatgctcactttctatcacagactaagcaacagggactcaatttcccgtacc

SEQ ID NO: 320870 - DNA, 50 bp, Artificial
  Synthetic oligonucleotide
agatgctcagggtcgagattatatgtcttacctgtcctatttgtaccgat

SEQ ID NO: 320871 - DNA, 60 bp, Artificial
  Synthetic oligonucleotide
agatgctcgactccaagggtaatactcatgaagttgttgttgaatactactgcggccgta

SEQ ID NO: 320872 - DNA, 60 bp, Artificial
  Synthetic oligonucleotide
agatgctcgcggtaagcgttttatcaaagaatagagccatcgaagagaaccataaagaga

SEQ ID NO: 320873 - DNA, 55 bp, Artificial
  Synthetic oligonucleotide
agatgctgaaatggacccaagtgatatcatgggagaaacaagcgatatgagaggt

SEQ ID NO: 320874 - DNA, 60 bp, Artificial
  Synthetic oligonucleotide
agatgctgccgacggaaatgtggatgacagtgacagtgaaacaagtgccaagaacgagta

SEQ ID NO: 320875 - DNA, 54 bp, Artificial
  Synthetic oligonucleotide
agatgctgctttacaacagggttatggcaagtcatgagtaacctttatgtatcg

SEQ ID NO: 320876 - DNA, 55 bp, Artificial
  Synthetic oligonucleotide
agatgctggaaccgacgttcggggagatcactccggaagagactgccgcgtggct

SEQ ID NO: 320877 - DNA, 50 bp, Artificial
  Synthetic oligonucleotide
agatgctggtaaaccattggagtcgcataccttgaaaccaacaaagaatc

SEQ ID NO: 320878 - DNA, 60 bp, Artificial
  Synthetic oligonucleotide
agatgctggttgtaacatcattgatcacatcgactcaccatcatcaatttgggtttttgc

SEQ ID NO: 320879 - DNA, 55 bp, Artificial
  Synthetic oligonucleotide
agatgcttagaatcattctgcacgtaccgcgtgcattgtaaacgcgatatcgcac

SEQ ID NO: 320880 - DNA, 59 bp, Artificial
  Synthetic oligonucleotide
agatgcttagcaaaacgcaaattgctaggcaaaagagcgtgtcgtttcgaattggtgta

SEQ ID NO: 320881 - DNA, 60 bp, Artificial
  Synthetic oligonucleotide
agatgctttctcgcataccgtagtgacaaccgtgagcatacatgctatacagggctagat

SEQ ID NO: 320882 - DNA, 55 bp, Artificial
  Synthetic oligonucleotide
agatgcttttgtcatggacaaccgttggtccaaggataacctgcctaatggaacc

SEQ ID NO: 320883 - DNA, 60 bp, Artificial
  Synthetic oligonucleotide
agatggaaaccctatgtcattagatactaagcatagagcgctaatgcaaattacatgccc

SEQ ID NO: 320884 - DNA, 60 bp, Artificial
  Synthetic oligonucleotide
agatggaaagattgtcgtcgattccacaatcgttccagaactcctgccacggcttggaca

SEQ ID NO: 320885 - DNA, 55 bp, Artificial
  Synthetic oligonucleotide
agatggaaaggccaccggaggatgaaggaccgccaagggaaccctatgatgagtg

SEQ ID NO: 320886 - DNA, 55 bp, Artificial
  Synthetic oligonucleotide
agatggaacggagttggaacgccatgacatttgtcctgggttggctatatctgga

SEQ ID NO: 320887 - DNA, 60 bp, Artificial
  Synthetic oligonucleotide
agatggaatgctgaaacctgagaggtctattcgactcctcaaaacaggcgaatgtaagat

SEQ ID NO: 320888 - DNA, 54 bp, Artificial
  Synthetic oligonucleotide
agatggagaagctaatgacagcaagctcaccctaatacttgttaagacaggcgg

SEQ ID NO: 320889 - DNA, 54 bp, Artificial
  Synthetic oligonucleotide
agatggagacaaactcgaattaataggctatccattcgatcataaagttaacca

SEQ ID NO: 320890 - DNA, 53 bp, Artificial
  Synthetic oligonucleotide
agatggagctcccttcgatttgactggctgggtagctacttttgaaggagtaa

SEQ ID NO: 320891 - DNA, 59 bp, Artificial
  Synthetic oligonucleotide
agatggagggccaaacctatataacattcgaaacctccacattccagaggtctgcttga

SEQ ID NO: 320892 - DNA, 59 bp, Artificial
  Synthetic oligonucleotide
agatggagggccaaacttatacaatatccgaaatctccacattccggaagtctgcctga

SEQ ID NO: 320893 - DNA, 55 bp, Artificial
  Synthetic oligonucleotide
agatggaggggtttgtctagccccggtgaagtcaaagcgtgcggtacggcgtgaa

SEQ ID NO: 320894 - DNA, 60 bp, Artificial
  Synthetic oligonucleotide
agatggagtaatgcaaggaacaattcagagcataatacagggtgaaaacctgggagctca

SEQ ID NO: 320895 - DNA, 60 bp, Artificial
  Synthetic oligonucleotide
agatggagtcaccaataaggtcaactcgatcattgacaaaatgaacactcagtttgaggc

SEQ ID NO: 320896 - DNA, 60 bp, Artificial
  Synthetic oligonucleotide
agatggatgagattctcagatctgagcacgtgggagggcgatcgcaatctggctcccagt

SEQ ID NO: 320897 - DNA, 55 bp, Artificial
  Synthetic oligonucleotide
agatggatgccgttccttaacagagagaccagcacactactgtactacacacaag

SEQ ID NO: 320898 - DNA, 60 bp, Artificial
  Synthetic oligonucleotide
agatggattaacagcggccacgatcgaagagagataaaagctctggaactttgtaagatc

SEQ ID NO: 320899 - DNA, 60 bp, Artificial
  Synthetic oligonucleotide
agatggattagttcagggcagcgtacattccatcataactggcgagtcttatggggaatc

SEQ ID NO: 320900 - DNA, 52 bp, Artificial
  Synthetic oligonucleotide
agatggcaatccttcccgcacctataggtggtcttaattacctcaatatgag

SEQ ID NO: 320901 - DNA, 60 bp, Artificial
  Synthetic oligonucleotide
agatggcacaaaccttgaactgacgctgttgaaacttaatcggaatgagaagttcagaga

SEQ ID NO: 320902 - DNA, 59 bp, Artificial
  Synthetic oligonucleotide
agatggcacacggtgagccatattatagttctaagcctgacaaagattttaattttgga

SEQ ID NO: 320903 - DNA, 55 bp, Artificial
  Synthetic oligonucleotide
agatggcaccagtgatcccagtgctgccctccccttaccaggcagagaggctccc

SEQ ID NO: 320904 - DNA, 55 bp, Artificial
  Synthetic oligonucleotide
agatggcaggacgatagtcgtcccctgccgacaccaagatgagctagtgggaaga

SEQ ID NO: 320905 - DNA, 60 bp, Artificial
  Synthetic oligonucleotide
agatggcccgagatttgaacgaaggcatagatgtgagccagatacatagctcttcagcta

SEQ ID NO: 320906 - DNA, 60 bp, Artificial
  Synthetic oligonucleotide
agatggccgtctcaatcattaactcttcttttgaagctgcagttgtagctgcaacctcag

SEQ ID NO: 320907 - DNA, 57 bp, Artificial
  Synthetic oligonucleotide
agatggcctatacgatggtgtgccgtaaatagttcaacaccttgaccatatggccac

SEQ ID NO: 320908 - DNA, 54 bp, Artificial
  Synthetic oligonucleotide
agatggcgaaaaagagcgattacggctacaaaaggtgggtgttcacgattaata

SEQ ID NO: 320909 - DNA, 56 bp, Artificial
  Synthetic oligonucleotide
agatggcgaaccccttatgatagtggcaagacacgaaagggggagacctctcttgt

SEQ ID NO: 320910 - DNA, 56 bp, Artificial
  Synthetic oligonucleotide
agatggcgggttttgccttggacgatatccttccataccaagatggttattactac

SEQ ID NO: 320911 - DNA, 55 bp, Artificial
  Synthetic oligonucleotide
agatggcgtaggaggtgtaagtttggcaccgacgccgctgttcggccctggagat

SEQ ID NO: 320912 - DNA, 55 bp, Artificial
  Synthetic oligonucleotide
agatggcgttatctactagatttcagttcaagttagacgagaaattcattaggac

SEQ ID NO: 320913 - DNA, 60 bp, Artificial
  Synthetic oligonucleotide
agatggcgtttttctgtgcccagtcattgagtgatttgttcttctcttcgctgagatact

SEQ ID NO: 320914 - DNA, 55 bp, Artificial
  Synthetic oligonucleotide
agatggctatcaagtgttgggttgccttggatgggtctatggtggctagggttgc

SEQ ID NO: 320915 - DNA, 59 bp, Artificial
  Synthetic oligonucleotide
agatggctatcgaatttcacgggtctgaggcggagacgttaaacgatgcaaatcctcga

SEQ ID NO: 320916 - DNA, 60 bp, Artificial
  Synthetic oligonucleotide
agatggctcaggaggacttccttttaatgtatgagatgcacagggaatcattgttaaaat

SEQ ID NO: 320917 - DNA, 51 bp, Artificial
  Synthetic oligonucleotide
agatggctctcctattcactcccgtgactcacgcggcccctactgaccgca

SEQ ID NO: 320918 - DNA, 55 bp, Artificial
  Synthetic oligonucleotide
agatggctggatgtgccacgctgctaaatgggtgactacttgtgacttcagatgg

SEQ ID NO: 320919 - DNA, 54 bp, Artificial
  Synthetic oligonucleotide
agatgggaaaccactggcgcacaccccctgtggacctggtggcctgacttaacc

SEQ ID NO: 320920 - DNA, 59 bp, Artificial
  Synthetic oligonucleotide
agatgggaaggaagtgacttcaacttttgcctcttcatattgtggtcttagtcagtata

SEQ ID NO: 320921 - DNA, 51 bp, Artificial
  Synthetic oligonucleotide
agatgggaatctcgggacagttgacctggaccagacttccacaaggcttca

SEQ ID NO: 320922 - DNA, 52 bp, Artificial
  Synthetic oligonucleotide
agatgggacccgagcttcccccggatcctctcttggggatcgagggggaaaa

SEQ ID NO: 320923 - DNA, 55 bp, Artificial
  Synthetic oligonucleotide
agatgggaggaagatagtggtgccttgcagagaccaagatgaactgatagggaga

SEQ ID NO: 320924 - DNA, 60 bp, Artificial
  Synthetic oligonucleotide
agatgggcatcaataacaagaaattatatctcaagtttcaacttcaatgatggaggagac

SEQ ID NO: 320925 - DNA, 52 bp, Artificial
  Synthetic oligonucleotide
agatgggccccataatagtccgcgcccgtaaaagaaagtggtccccgcgcac

SEQ ID NO: 320926 - DNA, 54 bp, Artificial
  Synthetic oligonucleotide
agatgggcctaactagccctgtggagaggctaccccttgaataagggtagtggt

SEQ ID NO: 320927 - DNA, 58 bp, Artificial
  Synthetic oligonucleotide
agatgggcctatcgttgtacagtacttctctgttaaggagagttggatccgccactta

SEQ ID NO: 320928 - DNA, 51 bp, Artificial
  Synthetic oligonucleotide
agatggggatcttactccaaaaatggaacagtatcttgcaaggagggcatg

SEQ ID NO: 320929 - DNA, 56 bp, Artificial
  Synthetic oligonucleotide
agatggggggccacttgtcggaggtactactactctcagtggtagtgctttccgat

SEQ ID NO: 320930 - DNA, 60 bp, Artificial
  Synthetic oligonucleotide
agatgggtatgggcgtgacatacttggcattactagctgctttcagagtcagacctacct

SEQ ID NO: 320931 - DNA, 60 bp, Artificial
  Synthetic oligonucleotide
agatgggtctcagttcgatagctctttgacaccatacttgcttaatgctgtattgtcaat

SEQ ID NO: 320932 - DNA, 58 bp, Artificial
  Synthetic oligonucleotide
agatgggtgcgagagcgtcaatattaagcgggggagaattagatagatgggaaaagat

SEQ ID NO: 320933 - DNA, 57 bp, Artificial
  Synthetic oligonucleotide
agatgggtggcaaatggtcaaaacgtgtgactggatggcctactgtaagggaaagaa

SEQ ID NO: 320934 - DNA, 56 bp, Artificial
  Synthetic oligonucleotide
agatgggtggcaagtggtcaaaaagtagtattggatggcctgaaataagggaaaga

SEQ ID NO: 320935 - DNA, 57 bp, Artificial
  Synthetic oligonucleotide
agatgggtggcaagtggtcaaaaagtgctagggataggtggcctgctgtaagggaaa

SEQ ID NO: 320936 - DNA, 59 bp, Artificial
  Synthetic oligonucleotide
agatgggtggcaagtggtcaaaatggagtggatggtctaccataagggaaagaatgaga

SEQ ID NO: 320937 - DNA, 57 bp, Artificial
  Synthetic oligonucleotide
agatgggtggcaagtggtcaaaatgtagtatgaagggatggcctactataagggaaa

SEQ ID NO: 320938 - DNA, 55 bp, Artificial
  Synthetic oligonucleotide
agatggtaattatgtgtatccttgctgttgcacaacacttgatgatggctcggcc

SEQ ID NO: 320939 - DNA, 58 bp, Artificial
  Synthetic oligonucleotide
agatggtactggaagctaaagaaagatactctaccagatggagattatgacgttaggg

SEQ ID NO: 320940 - DNA, 55 bp, Artificial
  Synthetic oligonucleotide
agatggtagcgatgtggaaatagtttggaaagagttgattaagtacgctagacca

SEQ ID NO: 320941 - DNA, 57 bp, Artificial
  Synthetic oligonucleotide
agatggtcatatacaagttgacaaaggcctcatcaaacaattggggtcggcccctgt

SEQ ID NO: 320942 - DNA, 60 bp, Artificial
  Synthetic oligonucleotide
agatggtcatgaattcgggcacttttctcgtctcgacttttgctttgatgttgttatgac

SEQ ID NO: 320943 - DNA, 55 bp, Artificial
  Synthetic oligonucleotide
agatggtcatggcaaacgtgaagcctgttgagcttattctcgacgggaagacagt

SEQ ID NO: 320944 - DNA, 60 bp, Artificial
  Synthetic oligonucleotide
agatggtcctgcagctaacagtgcagaccaccgaatttactggatacgagaagggaagat

SEQ ID NO: 320945 - DNA, 57 bp, Artificial
  Synthetic oligonucleotide
agatggtgaccgcacttttggacttgtcgttaaagatgtccagctgactttgtttcg

SEQ ID NO: 320946 - DNA, 55 bp, Artificial
  Synthetic oligonucleotide
agatggtggggaaaataagtggcagtcaaacagaacgagaattgtggacagagtg

SEQ ID NO: 320947 - DNA, 52 bp, Artificial
  Synthetic oligonucleotide
agatggttggttttcaattttcaaactaaatgctctaacctacccagcaaat

SEQ ID NO: 320948 - DNA, 60 bp, Artificial
  Synthetic oligonucleotide
agatggtttcaagataactgtctggggaagagtgaatgtctatcgcaatactatcaattg

SEQ ID NO: 320949 - DNA, 57 bp, Artificial
  Synthetic oligonucleotide
agatgtaaaagacaccaaggaagctttagacaagatagaggaagagcagaacaaaag

SEQ ID NO: 320950 - DNA, 59 bp, Artificial
  Synthetic oligonucleotide
agatgtaacactatcgtcagctgcgaaggttacgttgtcaagaagattacgcttagtcc

SEQ ID NO: 320951 - DNA, 55 bp, Artificial
  Synthetic oligonucleotide
agatgtaacatataatccactaactgacagaggtataggtaacagaatctggtac

SEQ ID NO: 320952 - DNA, 52 bp, Artificial
  Synthetic oligonucleotide
agatgtacaatttcggtctaaatgtgtacctgttaagggaggctactgccaa

SEQ ID NO: 320953 - DNA, 60 bp, Artificial
  Synthetic oligonucleotide
agatgtaccagaagtgctgcaatctattcgagaaattcttccccagtagctcatacagga

SEQ ID NO: 320954 - DNA, 57 bp, Artificial
  Synthetic oligonucleotide
agatgtacccatacaggcagcaatttcaacaacattcccatacaccggtgttccccc

SEQ ID NO: 320955 - DNA, 60 bp, Artificial
  Synthetic oligonucleotide
agatgtaggtccaataaccatggcaggtcttattaatctcagtagcacaccaacaaatcg

SEQ ID NO: 320956 - DNA, 57 bp, Artificial
  Synthetic oligonucleotide
agatgtagtaccacttgtgcgtctgatggctacgaaggctctaccgaaaggaacccg

SEQ ID NO: 320957 - DNA, 57 bp, Artificial
  Synthetic oligonucleotide
agatgtataccaatgtggaccaagacctcgtaggctggcctgctccccacggtgccc

SEQ ID NO: 320958 - DNA, 50 bp, Artificial
  Synthetic oligonucleotide
agatgtattattgacctcgaatgattataatagactacttaatgtaataa

SEQ ID NO: 320959 - DNA, 55 bp, Artificial
  Synthetic oligonucleotide
agatgtatttggattacctatagcgatagcggattctcaacgagctttaggtaga

SEQ ID NO: 320960 - DNA, 60 bp, Artificial
  Synthetic oligonucleotide
agatgtcaaaacatttatgagtgccaccgctcaatgcgggatgatcttgaatagtggagt

SEQ ID NO: 320961 - DNA, 60 bp, Artificial
  Synthetic oligonucleotide
agatgtcaacaacgcacgtgacgtgaaaagagtaatggagatgtttgcagcaaaacatca

SEQ ID NO: 320962 - DNA, 55 bp, Artificial
  Synthetic oligonucleotide
agatgtcacaacaactgtagatatttcagctactagtgtagctagaggagatcac

SEQ ID NO: 320963 - DNA, 60 bp, Artificial
  Synthetic oligonucleotide
agatgtcactcgtggtggtgggctgacccaccgaacaggcaagaggttctgcgtgaagtc

SEQ ID NO: 320964 - DNA, 56 bp, Artificial
  Synthetic oligonucleotide
agatgtcactgtaggacaaggaataaggcctaggcccttaactcctccttctgacc

SEQ ID NO: 320965 - DNA, 59 bp, Artificial
  Synthetic oligonucleotide
agatgtcgtacaccattgcttgaggataatcccgccttgttctaatggaccaaggaaca

SEQ ID NO: 320966 - DNA, 60 bp, Artificial
  Synthetic oligonucleotide
agatgtctacaaggaatttgagcggagaattcgtagtgtaagcgctggtcgtgcactata

SEQ ID NO: 320967 - DNA, 52 bp, Artificial
  Synthetic oligonucleotide
agatgtgaatgattgtcttgtcacaccatctgtaaaggtttgtttgatcggt

SEQ ID NO: 320968 - DNA, 60 bp, Artificial
  Synthetic oligonucleotide
agatgtgaatgggataaggagacctaaacacctctatgtctctatgcccacagcccagtc

SEQ ID NO: 320969 - DNA, 55 bp, Artificial
  Synthetic oligonucleotide
agatgtgagcaaaattactggttaacatatgaagaccttgtaaatgggtgcgccg

SEQ ID NO: 320970 - DNA, 60 bp, Artificial
  Synthetic oligonucleotide
agatgtgatctgtcaaaaagattctatggagtattcagggcctaagatcacagttaaagg

SEQ ID NO: 320971 - DNA, 60 bp, Artificial
  Synthetic oligonucleotide
agatgtgcaacagatattccagggtcgtaacgatcccatgatgatatatctagtatggag

SEQ ID NO: 320972 - DNA, 57 bp, Artificial
  Synthetic oligonucleotide
agatgtgcaatacccgaccggtgcaaacattttcacgggtagctctccaaattttgc

SEQ ID NO: 320973 - DNA, 60 bp, Artificial
  Synthetic oligonucleotide
agatgtgcactgaactccaactcagcgactatgaagggagactgatccaaaacagcataa

SEQ ID NO: 320974 - DNA, 60 bp, Artificial
  Synthetic oligonucleotide
agatgtgccatagcacacaaatcggtggcataaggatggtagacatccttaggcaaaacc

SEQ ID NO: 320975 - DNA, 50 bp, Artificial
  Synthetic oligonucleotide
agatgtgctgaacctgtatgcagacttcattgcaagcatgcctatagact

SEQ ID NO: 320976 - DNA, 59 bp, Artificial
  Synthetic oligonucleotide
agatgtggaggttggcactgtagtaccatatggagaggtcaaccttagtggtaatccaa

SEQ ID NO: 320977 - DNA, 60 bp, Artificial
  Synthetic oligonucleotide
agatgtggcgcagttgaagcaacaaggattgtcaacagcgatgatgtacaaggatttggc

SEQ ID NO: 320978 - DNA, 54 bp, Artificial
  Synthetic oligonucleotide
agatgtgggagatgcctacttcagtatcccactagatccaaacttcagacagta

SEQ ID NO: 320979 - DNA, 60 bp, Artificial
  Synthetic oligonucleotide
agatgtggtaccacgatacgcgtttgtgaatggtggattaattgcaaactgcataacaac

SEQ ID NO: 320980 - DNA, 55 bp, Artificial
  Synthetic oligonucleotide
agatgtggttcctggagaaaggaataccgagccggagataaaattgagaccccgc

SEQ ID NO: 320981 - DNA, 60 bp, Artificial
  Synthetic oligonucleotide
agatgtgtcgctgacgtgtaaagtggcaagtgggattgatgtcgcccaaactgtggtgat

SEQ ID NO: 320982 - DNA, 60 bp, Artificial
  Synthetic oligonucleotide
agatgtgtgtattgtccgaggagggatgacaactgatcggcttcagaggtggttgtatgc

SEQ ID NO: 320983 - DNA, 56 bp, Artificial
  Synthetic oligonucleotide
agatgtgttgcaccgtacaggtgttttttctccaaaccaccacttttccgcagtca

SEQ ID NO: 320984 - DNA, 56 bp, Artificial
  Synthetic oligonucleotide
agatgttaaaactcgcctctttaccattctcccgatggagtataattacttggtgc

SEQ ID NO: 320985 - DNA, 58 bp, Artificial
  Synthetic oligonucleotide
agatgttaatgattgtttggtcaccccgtctgttaaagtttgcatgataggtaccatc

SEQ ID NO: 320986 - DNA, 52 bp, Artificial
  Synthetic oligonucleotide
agatgttacatttgcatcgaaaattaatgatgtccaatcttggcacgaacaa

SEQ ID NO: 320987 - DNA, 60 bp, Artificial
  Synthetic oligonucleotide
agatgttagattttcatctgtatttggcgtttattctgactcttatgaccacttatctcc

SEQ ID NO: 320988 - DNA, 60 bp, Artificial
  Synthetic oligonucleotide
agatgttaggctggagccaatcattgattgactcattacaaagtaaatcaggtgaggatt

SEQ ID NO: 320989 - DNA, 60 bp, Artificial
  Synthetic oligonucleotide
agatgttatacatcgccaagcagggttattgttatattaacgtgtttcttgcaatgctga

SEQ ID NO: 320990 - DNA, 55 bp, Artificial
  Synthetic oligonucleotide
agatgttatcgtaaggaagtgtttcaatgacaactatcagtcgtgcactaggcta

SEQ ID NO: 320991 - DNA, 57 bp, Artificial
  Synthetic oligonucleotide
agatgtttagggagtacaaccataggcacagcgtcggggcaaccctcgaggcgctat

SEQ ID NO: 320992 - DNA, 57 bp, Artificial
  Synthetic oligonucleotide
agatgtttctgtcaatcggttttacaccatgtcgacgcaaatgtggcaggaatcatc

SEQ ID NO: 320993 - DNA, 60 bp, Artificial
  Synthetic oligonucleotide
agatgttttagtcacaagagaaccctatgtttcatgcgacccagatgaatgcaggttcta

SEQ ID NO: 320994 - DNA, 58 bp, Artificial
  Synthetic oligonucleotide
agattaaaacatggcatagtttagtaaagtaccatatgtatatttcaaggagagctag

SEQ ID NO: 320995 - DNA, 58 bp, Artificial
  Synthetic oligonucleotide
agattaaacaggcagacaatagaatcagtgaaactagaaaaccttggtgtgtatcaaa

SEQ ID NO: 320996 - DNA, 57 bp, Artificial
  Synthetic oligonucleotide
agattaacatacgagcaattcctcggattttattctggtcgcaaattagagaggtac

SEQ ID NO: 320997 - DNA, 57 bp, Artificial
  Synthetic oligonucleotide
agattaactgatgttacgaaagacggcactattgttaaatatagaccgttagcagac

SEQ ID NO: 320998 - DNA, 56 bp, Artificial
  Synthetic oligonucleotide
agattaagccagccatgcttcgttccacagagtcgttctccagggagtttccagac

SEQ ID NO: 320999 - DNA, 60 bp, Artificial
  Synthetic oligonucleotide
agattaagcgctcagttgacggggagggctataacgtagctcagtgcaacatgacaaagg

SEQ ID NO: 321000 - DNA, 60 bp, Artificial
  Synthetic oligonucleotide
agattaagcttcgagcgtccacggtacaagcgaagctcctatccatagaggaagcctgcg

SEQ ID NO: 321001 - DNA, 53 bp, Artificial
  Synthetic oligonucleotide
agattaagtctgttcgtccgacccccgttttagagcttcaagaccccgtctca

SEQ ID NO: 321002 - DNA, 55 bp, Artificial
  Synthetic oligonucleotide
agattaatgagggataagattgaacgtggtgaagtcgaagtggatgattcgtttg

SEQ ID NO: 321003 - DNA, 52 bp, Artificial
  Synthetic oligonucleotide
agattaatgcggtaagcatacaggcttccgctcatcaatcggaaattcagac

SEQ ID NO: 321004 - DNA, 59 bp, Artificial
  Synthetic oligonucleotide
agattacaacagacctgtagtattgctttgtcacacagaggaatttgcttacgaggtag

SEQ ID NO: 321005 - DNA, 54 bp, Artificial
  Synthetic oligonucleotide
agattacaagaagggcacttttaatcctgataatcgtaaactagttcttctggt

SEQ ID NO: 321006 - DNA, 56 bp, Artificial
  Synthetic oligonucleotide
agattacaagagcacccagtcggcaattgatcaaataacaggaaaattaaaccggc

SEQ ID NO: 321007 - DNA, 60 bp, Artificial
  Synthetic oligonucleotide
agattacacattttcgacgtggctagagttccagatgatcaaatgtataggctaagggac

SEQ ID NO: 321008 - DNA, 55 bp, Artificial
  Synthetic oligonucleotide
agattacaggccattgggagtttgctaattatgctgcatcaccagcattggcaac

SEQ ID NO: 321009 - DNA, 60 bp, Artificial
  Synthetic oligonucleotide
agattacatattttcgatgtggctagagttccagatgatcaaatgtatagattgagggat

SEQ ID NO: 321010 - DNA, 58 bp, Artificial
  Synthetic oligonucleotide
agattacatccagtacaggcagggcctattgcaccaggccaaataagagaaccaaggg

SEQ ID NO: 321011 - DNA, 57 bp, Artificial
  Synthetic oligonucleotide
agattacatccggcacatgcggggccaattcaaccaggccaaataagagacccaagg

SEQ ID NO: 321012 - DNA, 55 bp, Artificial
  Synthetic oligonucleotide
agattaccacaacgggcacagaaggaaaaccacacttcatagttgcaacaaacat

SEQ ID NO: 321013 - DNA, 55 bp, Artificial
  Synthetic oligonucleotide
agattaccagttggtgcatggccagtgatgactggtggcgctgtgtcattacgac

SEQ ID NO: 321014 - DNA, 60 bp, Artificial
  Synthetic oligonucleotide
agattaccatacactaacagccacaaatgtacgtggccacctctatatgcaaggtgttaa

SEQ ID NO: 321015 - DNA, 60 bp, Artificial
  Synthetic oligonucleotide
agattacctactcaggccgagagagtggcaaatgccactagtaaggaaatacagatgtac

SEQ ID NO: 321016 - DNA, 55 bp, Artificial
  Synthetic oligonucleotide
agattacgaccaactcgcacgccgcagctacgatcggctggagtgagtactactg

SEQ ID NO: 321017 - DNA, 60 bp, Artificial
  Synthetic oligonucleotide
agattacgatgcttgggcacaagcatggtgggcaacacgtaaggacggggagatatttgc

SEQ ID NO: 321018 - DNA, 50 bp, Artificial
  Synthetic oligonucleotide
agattacggaccaaagcgcactttaacgtgtgctaggcgagtgcttttag

SEQ ID NO: 321019 - DNA, 58 bp, Artificial
  Synthetic oligonucleotide
agattacgtatgcgtttcactggtaaccccctcgtccgagtgcgccttgcattagcgc

SEQ ID NO: 321020 - DNA, 56 bp, Artificial
  Synthetic oligonucleotide
agattacgttactagttctaaacctcatcttaattctggtcgtccatatagtctta

SEQ ID NO: 321021 - DNA, 54 bp, Artificial
  Synthetic oligonucleotide
agattactcccgttgggactcaacacaacaaagagcagtgctggctgcagccct

SEQ ID NO: 321022 - DNA, 58 bp, Artificial
  Synthetic oligonucleotide
agattagccttcacattgtgatagttgacgaggaaagtcttggggtctccggccctga

SEQ ID NO: 321023 - DNA, 60 bp, Artificial
  Synthetic oligonucleotide
agattaggagtaggagcactaataatagcagtaatcttagcaataattgtgtggattata

SEQ ID NO: 321024 - DNA, 59 bp, Artificial
  Synthetic oligonucleotide
agattaggcttttgcgctgtttcgcgatgtacgggtcaggagtgagtagtataactgag

SEQ ID NO: 321025 - DNA, 53 bp, Artificial
  Synthetic oligonucleotide
agattataccaccacaccaacccccgcccgcatcttaactagttttggaggaa

SEQ ID NO: 321026 - DNA, 55 bp, Artificial
  Synthetic oligonucleotide
agattatacccaacatatggctacaattggtgtactagcgacgccagagataccc

SEQ ID NO: 321027 - DNA, 59 bp, Artificial
  Synthetic oligonucleotide
agattatagtggacatgtttggatttaagaacccgatattgtctgctattagtgctacc

SEQ ID NO: 321028 - DNA, 60 bp, Artificial
  Synthetic oligonucleotide
agattatcacgttccttgtagtcttatacaccatgccaaacgtgaggttcatacttggca

SEQ ID NO: 321029 - DNA, 56 bp, Artificial
  Synthetic oligonucleotide
agattatcgaagtggaacgcagtctccagaaagagttgggaatttcccgtgaggga

SEQ ID NO: 321030 - DNA, 60 bp, Artificial
  Synthetic oligonucleotide
agattatctgtcagaactgataatgccgttccatatgatccatactctttttgaccacgt

SEQ ID NO: 321031 - DNA, 55 bp, Artificial
  Synthetic oligonucleotide
agattatgatccttttaaggcaggaattctcaaataccaggatcccatgggagag

SEQ ID NO: 321032 - DNA, 59 bp, Artificial
  Synthetic oligonucleotide
agattattaaatgtagcgcaaggtgaaagtatcgagcatagttctggggcaatgtcagt

SEQ ID NO: 321033 - DNA, 60 bp, Artificial
  Synthetic oligonucleotide
agattattaactgtcgaatctgaaacgtatgtgggcgatgacatgttgatgtatacaaac

SEQ ID NO: 321034 - DNA, 55 bp, Artificial
  Synthetic oligonucleotide
agattattacagagagctgtagaacaaggaattagacaattcgttattactccgc

SEQ ID NO: 321035 - DNA, 55 bp, Artificial
  Synthetic oligonucleotide
agattattactgtatgtgttaatgggtgtttgctcagcgaactgttagatcctag

SEQ ID NO: 321036 - DNA, 60 bp, Artificial
  Synthetic oligonucleotide
agattattccattacgtattggatcaacttcaatgattattgacacaccacgtgtggtgt

SEQ ID NO: 321037 - DNA, 60 bp, Artificial
  Synthetic oligonucleotide
agattattgcagacgaaggggctggatagttccagacactcctactgagatcacggtttc

SEQ ID NO: 321038 - DNA, 51 bp, Artificial
  Synthetic oligonucleotide
agattatttgtgaaacacccaggatattccctcgcataatcttcagcattc

SEQ ID NO: 321039 - DNA, 52 bp, Artificial
  Synthetic oligonucleotide
agattcaaaagttgtgtctgggaatggtgtgtacgaggatctgtcaaccgct

SEQ ID NO: 321040 - DNA, 54 bp, Artificial
  Synthetic oligonucleotide
agattcaaggggagacctttgaggaaacggcggttgtacgtgcgacaccgactc

SEQ ID NO: 321041 - DNA, 59 bp, Artificial
  Synthetic oligonucleotide
agattcaattcttacttgtttagacctcaaatggatgctgtcaatttgaaagcgatggt

SEQ ID NO: 321042 - DNA, 60 bp, Artificial
  Synthetic oligonucleotide
agattcacgagtctattcgttggactaaagacgcacgaagtacacaagatcatgtgcgct

SEQ ID NO: 321043 - DNA, 60 bp, Artificial
  Synthetic oligonucleotide
agattcactgacatatcggttgggggtgctatccttgctggctactaatggatatcaatt

SEQ ID NO: 321044 - DNA, 60 bp, Artificial
  Synthetic oligonucleotide
agattcagcctgaagggcagccagttgacctgctttgtgaagaggagttaccagctgagc

SEQ ID NO: 321045 - DNA, 55 bp, Artificial
  Synthetic oligonucleotide
agattcagggcaccaggttaatgtagtaactgattcccagtatgtcctaggaatc

SEQ ID NO: 321046 - DNA, 55 bp, Artificial
  Synthetic oligonucleotide
agattcagttttccgagagtgatcaattcagctgacggtactaccacatggtact

SEQ ID NO: 321047 - DNA, 51 bp, Artificial
  Synthetic oligonucleotide
agattccagataatgcattagcggtcagcattttatcgaaaaatcgagcta

SEQ ID NO: 321048 - DNA, 54 bp, Artificial
  Synthetic oligonucleotide
agattccagatacaaggggttaaattgacccaaggatacaaggatattatcctc

SEQ ID NO: 321049 - DNA, 59 bp, Artificial
  Synthetic oligonucleotide
agattccatttgtctcgcgtatcccaactttctcgttgaagcatccgtccatccgagga

SEQ ID NO: 321050 - DNA, 55 bp, Artificial
  Synthetic oligonucleotide
agattcccagagagaatctggaggtgactgggcactccctttgccatccgagtgg

SEQ ID NO: 321051 - DNA, 58 bp, Artificial
  Synthetic oligonucleotide
agattcccgaggcatggctctccaaggtaccagtaggactttaactcaacagtcctca

SEQ ID NO: 321052 - DNA, 60 bp, Artificial
  Synthetic oligonucleotide
agattccgcatctgactggttgatccctatagcacttctgacggcccatgactcaccggg

SEQ ID NO: 321053 - DNA, 55 bp, Artificial
  Synthetic oligonucleotide
agattccgtcattagtcgaaatcatatctcaaaggcattagtttgtatggtaggt

SEQ ID NO: 321054 - DNA, 57 bp, Artificial
  Synthetic oligonucleotide
agattccgtgttccttggatttcagatactccttatagagttaatagatataccaag

SEQ ID NO: 321055 - DNA, 58 bp, Artificial
  Synthetic oligonucleotide
agattcctcaatcaccacaagatcacgccttctagatcgtctcgtcaaaatggtgggg

SEQ ID NO: 321056 - DNA, 60 bp, Artificial
  Synthetic oligonucleotide
agattcctcccagtggctggtggaacaagcagtgtgtatattgaggtcttgcacttgacc

SEQ ID NO: 321057 - DNA, 54 bp, Artificial
  Synthetic oligonucleotide
agattcgagtacatcagttacatagcatttgtctgttgcataacgaacagctct

SEQ ID NO: 321058 - DNA, 50 bp, Artificial
  Synthetic oligonucleotide
agattcgatacgttgcgtcagaactggaagatacgcttggtggcgtctat

SEQ ID NO: 321059 - DNA, 52 bp, Artificial
  Synthetic oligonucleotide
agattcgatccatgctcctctactaccatggtccagccgactgagacaaggg

SEQ ID NO: 321060 - DNA, 51 bp, Artificial
  Synthetic oligonucleotide
agattcgctttagggagccaagagtggatgacaaaattgttttggtcagca

SEQ ID NO: 321061 - DNA, 52 bp, Artificial
  Synthetic oligonucleotide
agattcggaaagaaagtggggaacgttctgacgtcaaatacggcgaaaaaga

SEQ ID NO: 321062 - DNA, 55 bp, Artificial
  Synthetic oligonucleotide
agattcggaaggttagaaaacacttgtgtattcccagagctttccgtaggctgta

SEQ ID NO: 321063 - DNA, 60 bp, Artificial
  Synthetic oligonucleotide
agattcggagatgttatacatcgccaagcaaggctattgctatatcaacgtgtttcttgc

SEQ ID NO: 321064 - DNA, 55 bp, Artificial
  Synthetic oligonucleotide
agattcggcagctaattattcagagatactcgaacagtttgggatagaatatcat

SEQ ID NO: 321065 - DNA, 56 bp, Artificial
  Synthetic oligonucleotide
agattcggtagactagaaaacatttgtgtatccccaacactttcctcaggttgtga

SEQ ID NO: 321066 - DNA, 55 bp, Artificial
  Synthetic oligonucleotide
agattcggtgtggacagactcgtacctagtgataccagtggatcgtgagtggcgg

SEQ ID NO: 321067 - DNA, 55 bp, Artificial
  Synthetic oligonucleotide
agattcgtaggggcttattgggctatcattacttctacattgggacagtccaaat

SEQ ID NO: 321068 - DNA, 55 bp, Artificial
  Synthetic oligonucleotide
agattcgtcgagatattaaacttcaaataggcggctatcattcatggttgtggtg

SEQ ID NO: 321069 - DNA, 55 bp, Artificial
  Synthetic oligonucleotide
agattctaactgacacaagtcggcctaatgaccccgggagcggaaactgtgatgc

SEQ ID NO: 321070 - DNA, 60 bp, Artificial
  Synthetic oligonucleotide
agattctagatgacattaaagcgttagccgcagagcaggtgtataaaatcgtcaaagttc

SEQ ID NO: 321071 - DNA, 60 bp, Artificial
  Synthetic oligonucleotide
agattctataggacctgcaagctggtcggaatcaacatgagcaagaagaagtcctacata

SEQ ID NO: 321072 - DNA, 60 bp, Artificial
  Synthetic oligonucleotide
agattctatcatcgaagtatggtcatataatgcagaattcctcgtggcagtggagaatca

SEQ ID NO: 321073 - DNA, 60 bp, Artificial
  Synthetic oligonucleotide
agattctatgctaaggtcacgggtggacaatatgccagcaacgagcaagccttggttagg

SEQ ID NO: 321074 - DNA, 55 bp, Artificial
  Synthetic oligonucleotide
agattctctgcaacagccaattccgattgccggggctctgacttgcgattgtggc

SEQ ID NO: 321075 - DNA, 50 bp, Artificial
  Synthetic oligonucleotide
agattctgagcaaattgctttcgggtcgagagacgcttctttcgatatgc

SEQ ID NO: 321076 - DNA, 60 bp, Artificial
  Synthetic oligonucleotide
agattctgagctctgtgtttatcatagttcgtgcctagaggacatctctcatagctgctg

SEQ ID NO: 321077 - DNA, 55 bp, Artificial
  Synthetic oligonucleotide
agattctgcggaagtaccggagattcaccccggccctgcccatttgggcacggcc

SEQ ID NO: 321078 - DNA, 60 bp, Artificial
  Synthetic oligonucleotide
agattctgctgcgttttattacagagtatagatatatcttagattagaattgtatgatgt

SEQ ID NO: 321079 - DNA, 52 bp, Artificial
  Synthetic oligonucleotide
agattcttatgctattcctgcgatacaatctggtgccactagcaggcgcgtt

SEQ ID NO: 321080 - DNA, 55 bp, Artificial
  Synthetic oligonucleotide
agattctttcggatctttgacggttgggtatcatgtcttgaaagctggtacagta

SEQ ID NO: 321081 - DNA, 60 bp, Artificial
  Synthetic oligonucleotide
agattgaacgtgtgcatgcggatgtgaacatggacggcgtatgttcaaaaattgaaggtg

SEQ ID NO: 321082 - DNA, 57 bp, Artificial
  Synthetic oligonucleotide
agattgaaggcttgggttcacgagagtgttttgcgcgttgactatgttcgtagtaac

SEQ ID NO: 321083 - DNA, 51 bp, Artificial
  Synthetic oligonucleotide
agattgaatgctgtcctgcttccgaacatccacacactgtttgacatgtcg

SEQ ID NO: 321084 - DNA, 53 bp, Artificial
  Synthetic oligonucleotide
agattgaattggttgcataatttggattacaaatatccagcgctgaacgtaac

SEQ ID NO: 321085 - DNA, 55 bp, Artificial
  Synthetic oligonucleotide
agattgacatctccagatttggagtccttcattttgaccattgctaattgcacgg

SEQ ID NO: 321086 - DNA, 57 bp, Artificial
  Synthetic oligonucleotide
agattgacctgtcctggtacctggtagacctggcctgtgagcgtgggtgttcctact

SEQ ID NO: 321087 - DNA, 57 bp, Artificial
  Synthetic oligonucleotide
agattgacgttttcagtccgagagatttgaacctttgcttcaacattccggttcaca

SEQ ID NO: 321088 - DNA, 58 bp, Artificial
  Synthetic oligonucleotide
agattgagcggcccgtttcttataccgatgctcttaattctcgccttggtaagtgcaa

SEQ ID NO: 321089 - DNA, 55 bp, Artificial
  Synthetic oligonucleotide
agattgaggagctatggccagtactcgatggctagacgtgtggtttgtccacgtc

SEQ ID NO: 321090 - DNA, 60 bp, Artificial
  Synthetic oligonucleotide
agattgaggcgtgtattctcctcaaccctgtccttgttaaggatgctactgggagcactc

SEQ ID NO: 321091 - DNA, 60 bp, Artificial
  Synthetic oligonucleotide
agattgataccgatgcatcttgtacatccagaagtggttcctaaccttgattcagtttgt

SEQ ID NO: 321092 - DNA, 60 bp, Artificial
  Synthetic oligonucleotide
agattgatcccggtgagaggatggatccggcagtaaggatggtcgctggtgttgtgggtc

SEQ ID NO: 321093 - DNA, 60 bp, Artificial
  Synthetic oligonucleotide
agattgatctgagagtggctcagacgctgctgcctacgaacgttccgattggggaggtct

SEQ ID NO: 321094 - DNA, 60 bp, Artificial
  Synthetic oligonucleotide
agattgattcagctgatagtaagtgggagagacgaacagtcaatcgctgaagcgatcatt

SEQ ID NO: 321095 - DNA, 60 bp, Artificial
  Synthetic oligonucleotide
agattgcaattcgcatccgttatcggacatctcgttcaattgtgatccagaacccatcat

SEQ ID NO: 321096 - DNA, 58 bp, Artificial
  Synthetic oligonucleotide
agattgcacacgtcgtgatcaatcgtgcactgaccgacgcagtcgcgtgggatgccgt

SEQ ID NO: 321097 - DNA, 57 bp, Artificial
  Synthetic oligonucleotide
agattgcacaggattatggatttagtgctgtgaaattaaatcgaattttaaacgagt

SEQ ID NO: 321098 - DNA, 58 bp, Artificial
  Synthetic oligonucleotide
agattgcccccttgatggttgcatacatgctagaaagagagttggtccgtaaaacgag

SEQ ID NO: 321099 - DNA, 60 bp, Artificial
  Synthetic oligonucleotide
agattgccgactggtcgtggcacgatggagctattcttccttttgacatcgacaagatgt

SEQ ID NO: 321100 - DNA, 55 bp, Artificial
  Synthetic oligonucleotide
agattgcctcttactctattgttggacctgccaatgcaaaagtgcctcacagtgc

SEQ ID NO: 321101 - DNA, 55 bp, Artificial
  Synthetic oligonucleotide
agattgcctgttggtgaatggcctattatgaatggtggtgctgtatcattacatt

SEQ ID NO: 321102 - DNA, 60 bp, Artificial
  Synthetic oligonucleotide
agattgcgcagctttcggtctacgtgcagtctgaatagtgctagagacattaacgtagtg

SEQ ID NO: 321103 - DNA, 60 bp, Artificial
  Synthetic oligonucleotide
agattgcgcggcgatttattcaacacaagcatttatcagtacttagtttacatcaatcgc

SEQ ID NO: 321104 - DNA, 58 bp, Artificial
  Synthetic oligonucleotide
agattgcgtttcgtctacttatcctaagagtattgtgctgtgtttactctttgtgtag

SEQ ID NO: 321105 - DNA, 58 bp, Artificial
  Synthetic oligonucleotide
agattgctatgtccgccaaatctatcgctggagttccagcttcagcccctaaaccccg

SEQ ID NO: 321106 - DNA, 50 bp, Artificial
  Synthetic oligonucleotide
agattgctgcgaagtgggttctgtgcctccacaccccgcccccgtacatc

SEQ ID NO: 321107 - DNA, 55 bp, Artificial
  Synthetic oligonucleotide
agattgctggtgtgataatcaagccatgtacgtgagttatggtagatgcacgaga

SEQ ID NO: 321108 - DNA, 60 bp, Artificial
  Synthetic oligonucleotide
agattgcttcatactctattgttggacctgctaatgcaaaagtaccccatagtgctagct

SEQ ID NO: 321109 - DNA, 55 bp, Artificial
  Synthetic oligonucleotide
agattgcttgtaatatggaaactaaatctagacgcaagcgtgctgcaccagatca

SEQ ID NO: 321110 - DNA, 59 bp, Artificial
  Synthetic oligonucleotide
agattggaaagaacgtcatacatggggatttacattaggtgagcatttactgcgtttca

SEQ ID NO: 321111 - DNA, 55 bp, Artificial
  Synthetic oligonucleotide
agattggaaatttgtcacgcgttttcccaagctttcttgggcaagccattgtgtg

SEQ ID NO: 321112 - DNA, 59 bp, Artificial
  Synthetic oligonucleotide
agattggactacttttacatgctcagaaggattatatacttggaacgtctgtccatttg

SEQ ID NO: 321113 - DNA, 55 bp, Artificial
  Synthetic oligonucleotide
agattggatcagctaagtcacaggatgttactataaatcctggtccattcgcacg

SEQ ID NO: 321114 - DNA, 60 bp, Artificial
  Synthetic oligonucleotide
agattggccaagcagagtatatacctctgtagtgcgatcgggctgaccactctgagattg

SEQ ID NO: 321115 - DNA, 60 bp, Artificial
  Synthetic oligonucleotide
agattggctacggtgctatggatcacaggggtctctctcagaataagtccgatgcacctc

SEQ ID NO: 321116 - DNA, 55 bp, Artificial
  Synthetic oligonucleotide
agattgggaagattttaaatataagccagagccaacagaatcaacacctcaagct

SEQ ID NO: 321117 - DNA, 57 bp, Artificial
  Synthetic oligonucleotide
agattgggcagtgaactggggtgttacactatcaatagagtaaagtcatttaagctt

SEQ ID NO: 321118 - DNA, 55 bp, Artificial
  Synthetic oligonucleotide
agattgggctacaaggctacacatttgtcccccaggtggtcctagaccttacgga

SEQ ID NO: 321119 - DNA, 51 bp, Artificial
  Synthetic oligonucleotide
agattgggctcctgccacccggttatatagatctggtgatcgctgctcacc

SEQ ID NO: 321120 - DNA, 57 bp, Artificial
  Synthetic oligonucleotide
agattggggtacttaactgtgtataggagacccaaagatgtcagcccttgaacgaca

SEQ ID NO: 321121 - DNA, 55 bp, Artificial
  Synthetic oligonucleotide
agattggttctaacctaaactcaatccttgagtctactcctgacactaaactgtt

SEQ ID NO: 321122 - DNA, 60 bp, Artificial
  Synthetic oligonucleotide
agattgtacacacttagaaggaaaagttatcctggtagcagttcatgtagccagtggata

SEQ ID NO: 321123 - DNA, 54 bp, Artificial
  Synthetic oligonucleotide
agattgtatgcctaagattggttccgaagatgccgcaggtatggatttgcgagc

SEQ ID NO: 321124 - DNA, 60 bp, Artificial
  Synthetic oligonucleotide
agattgtcagatctacggggcctgttactccattgaaccgcttgacctacctctgatcat

SEQ ID NO: 321125 - DNA, 59 bp, Artificial
  Synthetic oligonucleotide
agattgtcagatctatggggctacttactccattgaaccacttgacctacctcaaatca

SEQ ID NO: 321126 - DNA, 60 bp, Artificial
  Synthetic oligonucleotide
agattgtccagcgtgcccccaggacaaggtaaggactctcccgctatcactcgtgcagaa

SEQ ID NO: 321127 - DNA, 50 bp, Artificial
  Synthetic oligonucleotide
agattgtcgcgacgctatcacgcgcaaaagcgagcttgcttatccgctac

SEQ ID NO: 321128 - DNA, 53 bp, Artificial
  Synthetic oligonucleotide
agattgtcggtattccgcctttaatttgaactggcttaccgtattttgtgttg

SEQ ID NO: 321129 - DNA, 60 bp, Artificial
  Synthetic oligonucleotide
agattgtgagactttcgtatggagacaatcttgcgaggataagtctgtctgtggaaagag

SEQ ID NO: 321130 - DNA, 60 bp, Artificial
  Synthetic oligonucleotide
agattgtgataacttcaaaataatctcagaacttggtattgatgtgggtgatggatactc

SEQ ID NO: 321131 - DNA, 60 bp, Artificial
  Synthetic oligonucleotide
agattgtgatgtccgtcaaagagatgctgtctgacatgattaggagaaggaaccaaattc

SEQ ID NO: 321132 - DNA, 60 bp, Artificial
  Synthetic oligonucleotide
agattgtgatgtctgggaatgcagcagtcaaaaggagtgattgggcctcattggtacaag

SEQ ID NO: 321133 - DNA, 54 bp, Artificial
  Synthetic oligonucleotide
agattgtgattgggcttcaatccggatgggcaccctagttgcaagacacaaaga

SEQ ID NO: 321134 - DNA, 60 bp, Artificial
  Synthetic oligonucleotide
agattgtgcaggcaccacttaatggcttgtgtacacgcattctcaaaattgcgcgcaata

SEQ ID NO: 321135 - DNA, 60 bp, Artificial
  Synthetic oligonucleotide
agattgtgccagcgttcacacttgaacagatcaagatcacgaacgacgttctttcatctg

SEQ ID NO: 321136 - DNA, 55 bp, Artificial
  Synthetic oligonucleotide
agattgtgctcagatggtctaatcaaagagccgtgtttgatatatgaaaggctgc

SEQ ID NO: 321137 - DNA, 57 bp, Artificial
  Synthetic oligonucleotide
agattgtgggccggaatgggatccatacgaaatatattgcgacttaaacaagaaagc

SEQ ID NO: 321138 - DNA, 55 bp, Artificial
  Synthetic oligonucleotide
agattgtggttaaatcctgtctgctagacagcagcatcagattttcacagtcggc

SEQ ID NO: 321139 - DNA, 60 bp, Artificial
  Synthetic oligonucleotide
agattgtgtcaactgcaacccagactttcctggcatcttgcatcaacggggtgtgttgga

SEQ ID NO: 321140 - DNA, 59 bp, Artificial
  Synthetic oligonucleotide
agattgtgtgttcaactgtgacgaggtttatctcttatatagactatttttggacgcta

SEQ ID NO: 321141 - DNA, 60 bp, Artificial
  Synthetic oligonucleotide
agattgttagagatgacatgctgccacagcctgagcagagtgactatgccatggtgacac

SEQ ID NO: 321142 - DNA, 55 bp, Artificial
  Synthetic oligonucleotide
agattgttatcatatagctattggattggccatccggtgactaacagagatatca

SEQ ID NO: 321143 - DNA, 54 bp, Artificial
  Synthetic oligonucleotide
agattgttattattgactagcgttggggtgtcgtccacgtgaaacgtaatgtac

SEQ ID NO: 321144 - DNA, 60 bp, Artificial
  Synthetic oligonucleotide
agattgttctgtgctcaaggcccattatattgttgtctggatatcgcattgacgtgctgc

SEQ ID NO: 321145 - DNA, 55 bp, Artificial
  Synthetic oligonucleotide
agattgttgtggaagaggacttccctttcatagagtcagaaacgcctggaaggga

SEQ ID NO: 321146 - DNA, 56 bp, Artificial
  Synthetic oligonucleotide
agattgttttagcagttaggtctgctttaaaacggagtggggcagtaacagataca

SEQ ID NO: 321147 - DNA, 60 bp, Artificial
  Synthetic oligonucleotide
agatttaaatacatcacatagcttatttgaggctgagttctacaagctgagcgagatagc

SEQ ID NO: 321148 - DNA, 60 bp, Artificial
  Synthetic oligonucleotide
agatttacaacttaatagcgcagtgaaattagcggttaatcatgaagctaatgacgctga

SEQ ID NO: 321149 - DNA, 52 bp, Artificial
  Synthetic oligonucleotide
agatttacaatactcaaggatgtaactctcaattgttcgctgacaggggaga

SEQ ID NO: 321150 - DNA, 57 bp, Artificial
  Synthetic oligonucleotide
agatttacacttataatggagagacaccgaacgcaaacactggttactactctacaa

SEQ ID NO: 321151 - DNA, 59 bp, Artificial
  Synthetic oligonucleotide
agatttacgtcttttaggaccgatgagacatgttagattaacacatctctacaaacata

SEQ ID NO: 321152 - DNA, 55 bp, Artificial
  Synthetic oligonucleotide
agatttactcagggatcaaagtgaagcagttatgtaaactccttaggggaaccaa

SEQ ID NO: 321153 - DNA, 55 bp, Artificial
  Synthetic oligonucleotide
agatttagatgcttcagttgggaaagaaccttggagacccctgcgtaatcagcgg

SEQ ID NO: 321154 - DNA, 56 bp, Artificial
  Synthetic oligonucleotide
agatttaggtccgtacattgttcctgtcctgtctagtggtaggtgataccgatacc

SEQ ID NO: 321155 - DNA, 60 bp, Artificial
  Synthetic oligonucleotide
agatttattcacaagataaatatagaatacttgagtcatatgtatataacctgttatcta

SEQ ID NO: 321156 - DNA, 56 bp, Artificial
  Synthetic oligonucleotide
agatttatttgtgcaaggccttcccttatggcaactactactaggattccctgact

SEQ ID NO: 321157 - DNA, 55 bp, Artificial
  Synthetic oligonucleotide
agatttcaggctatctgtggtcatcttgctggttattctggcgacttgattatag

SEQ ID NO: 321158 - DNA, 55 bp, Artificial
  Synthetic oligonucleotide
agatttccacctggcccctgaagtggaccgcggatgcgtcggacatctggacgtc

SEQ ID NO: 321159 - DNA, 59 bp, Artificial
  Synthetic oligonucleotide
agatttcctgcacgtgtgtgcgggcactttagtcagtatccgcggcgttctgttgaacg

SEQ ID NO: 321160 - DNA, 55 bp, Artificial
  Synthetic oligonucleotide
agatttcgtgtcccctggatttctgatactccctatcgggtaaacaggtacacaa

SEQ ID NO: 321161 - DNA, 56 bp, Artificial
  Synthetic oligonucleotide
agatttcgtgttccttggatttctgatacaccctatcgagtaaataggtacacgaa

SEQ ID NO: 321162 - DNA, 53 bp, Artificial
  Synthetic oligonucleotide
agatttctcgatagtgaatacctcggcgcatgtcaggtttgcaggtccgtacc

SEQ ID NO: 321163 - DNA, 53 bp, Artificial
  Synthetic oligonucleotide
agatttctgttgacctttttatgttcaatgagcttttggcccttataaacccg

SEQ ID NO: 321164 - DNA, 59 bp, Artificial
  Synthetic oligonucleotide
agatttcttcggaagggcttcgtgagaagctcgtgcacggtaatacactgatattacca

SEQ ID NO: 321165 - DNA, 58 bp, Artificial
  Synthetic oligonucleotide
agatttgaagtgcaacagtataggtacaagaacgtgcctcttactagaaggtcatggg

SEQ ID NO: 321166 - DNA, 60 bp, Artificial
  Synthetic oligonucleotide
agatttgaatcggttgcatggtcagcaagcgcatgccatgatggtgtgagctggttaaca

SEQ ID NO: 321167 - DNA, 60 bp, Artificial
  Synthetic oligonucleotide
agatttgagtctgttgcttggtcggcaagtgcttgtcatgatggcatcagttggttgaca

SEQ ID NO: 321168 - DNA, 60 bp, Artificial
  Synthetic oligonucleotide
agatttgcaacgtgcagagtgggcccggctacagcgataagattaggatcgctttggcct

SEQ ID NO: 321169 - DNA, 56 bp, Artificial
  Synthetic oligonucleotide
agatttgcggaagctataaatttacttggcgactggcttaatttgactcccgtcga

SEQ ID NO: 321170 - DNA, 60 bp, Artificial
  Synthetic oligonucleotide
agatttggtagactttatagatgacacatgtggaagtgtgcagacaggggacgaggcacc

SEQ ID NO: 321171 - DNA, 58 bp, Artificial
  Synthetic oligonucleotide
agatttgtaatgtcaacctgagagcacactagggagctccccactcccgttttgtgac

SEQ ID NO: 321172 - DNA, 55 bp, Artificial
  Synthetic oligonucleotide
agatttgtaccatcctgcagtacaagtgccggaacggcgagatgtacgcctgccg

SEQ ID NO: 321173 - DNA, 51 bp, Artificial
  Synthetic oligonucleotide
agatttgtcgaccctcctaaattgtctgggaattgccccggagctcacacc

SEQ ID NO: 321174 - DNA, 59 bp, Artificial
  Synthetic oligonucleotide
agatttgttcggaccagcacattataaagaactgtcagacctaaacaccataagtcatc

SEQ ID NO: 321175 - DNA, 58 bp, Artificial
  Synthetic oligonucleotide
agatttgttttgcgtactaagcggcttttctacatcattcatgaataccatatgagcc

SEQ ID NO: 321176 - DNA, 58 bp, Artificial
  Synthetic oligonucleotide
agattttacacacttgagagtaaactatggcatgaaacatcaaaaggttggtggtgga

SEQ ID NO: 321177 - DNA, 60 bp, Artificial
  Synthetic oligonucleotide
agattttatgctctgattgcaatcgcagcgacggatacacaaaagggtagagtgtggaga

SEQ ID NO: 321178 - DNA, 60 bp, Artificial
  Synthetic oligonucleotide
agattttccaggaaatgacaaaaacacagcaacgctgtgcctgggacatcatgcggtgcc

SEQ ID NO: 321179 - DNA, 57 bp, Artificial
  Synthetic oligonucleotide
agattttccgagactcgacctagctatcttcaagagttacgagcttaatttggaatc

SEQ ID NO: 321180 - DNA, 60 bp, Artificial
  Synthetic oligonucleotide
agattttgatgaaggttacacgctggccaatatctcagctcgcactctttacgttcgcgc

SEQ ID NO: 321181 - DNA, 60 bp, Artificial
  Synthetic oligonucleotide
agattttgcgcgacattactggcatcaccgctttgtgtggctacctctatctcaaacttg

SEQ ID NO: 321182 - DNA, 53 bp, Artificial
  Synthetic oligonucleotide
agattttgctgtgacattcacatcaagtcttgaaactactttgtcaccctcca

SEQ ID NO: 321183 - DNA, 55 bp, Artificial
  Synthetic oligonucleotide
agattttggacgacactcttaagtgtcgacttggacaatggcttgcaggacgacc

SEQ ID NO: 321184 - DNA, 55 bp, Artificial
  Synthetic oligonucleotide
agattttggattgactgggatggacaattacgccccagatagttcactagcttca

SEQ ID NO: 321185 - DNA, 54 bp, Artificial
  Synthetic oligonucleotide
agattttggccgagacgcacgggaccagaccagaccccacggaccagcctctcc

SEQ ID NO: 321186 - DNA, 57 bp, Artificial
  Synthetic oligonucleotide
agattttggcgatctattcaactgccgccagttctttggtactgttggtctccctgg

SEQ ID NO: 321187 - DNA, 56 bp, Artificial
  Synthetic oligonucleotide
agattttggtcaggtttttaacatgtatgataacgagcctagtaccgctactgtta

SEQ ID NO: 321188 - DNA, 58 bp, Artificial
  Synthetic oligonucleotide
agatttttcagaattcactaaactgatgaagaaggaaggtgggaggagcaatatagag

SEQ ID NO: 321189 - DNA, 53 bp, Artificial
  Synthetic oligonucleotide
agatttttcctgggtagcctccctccatgttagtattgaggtccacgagggtt

SEQ ID NO: 321190 - DNA, 57 bp, Artificial
  Synthetic oligonucleotide
agcaaaaacaagcagttgacagtcatgaatctcttctctcccagaacagggctgagc

SEQ ID NO: 321191 - DNA, 53 bp, Artificial
  Synthetic oligonucleotide
agcaaaaataggaaggacttaacaaactccttacaagcaatcttccagggacc

SEQ ID NO: 321192 - DNA, 60 bp, Artificial
  Synthetic oligonucleotide
agcaaaacatcatggttaaatcagcctggcacttataagatattggcgggagaggtacac

SEQ ID NO: 321193 - DNA, 52 bp, Artificial
  Synthetic oligonucleotide
agcaaaaccactcttacctgtttgggggatttcaaacaactccacccagtgg

SEQ ID NO: 321194 - DNA, 59 bp, Artificial
  Synthetic oligonucleotide
agcaaaacgaatgtagcatccccgcgaacaaccaagtagtgccatgtgaaccaaccata

SEQ ID NO: 321195 - DNA, 60 bp, Artificial
  Synthetic oligonucleotide
agcaaaacgacacttgcacagctaaagcaagctgctggctagagtcagtcaaaagttttt

SEQ ID NO: 321196 - DNA, 56 bp, Artificial
  Synthetic oligonucleotide
agcaaaactgtcgtcaaaaaagtggaggtcctcaacaataagaattggtcaggata

SEQ ID NO: 321197 - DNA, 60 bp, Artificial
  Synthetic oligonucleotide
agcaaaactgtttgtactattctgcacattcactgtactgaaagctgacactatctgtgt

SEQ ID NO: 321198 - DNA, 53 bp, Artificial
  Synthetic oligonucleotide
agcaaaacttaaggaatacgggttgaaaccgactcgccctgacaagactgagg

SEQ ID NO: 321199 - DNA, 56 bp, Artificial
  Synthetic oligonucleotide
agcaaaagcaggagtttaaaatgaatccaaatcagaaaataataaccataggatcc

SEQ ID NO: 321200 - DNA, 56 bp, Artificial
  Synthetic oligonucleotide
agcaaaagcaggagtttaaaatgaatccaaatcagaagataataacaattggttcg

SEQ ID NO: 321201 - DNA, 55 bp, Artificial
  Synthetic oligonucleotide
agcaaaagcaggggaaaacttcaacaaaccgacacaagagaaatggacatcccag

SEQ ID NO: 321202 - DNA, 58 bp, Artificial
  Synthetic oligonucleotide
agcaaaagcaggggaagttcacaaccactcaagatggaagtagtatcactaataacta

SEQ ID NO: 321203 - DNA, 58 bp, Artificial
  Synthetic oligonucleotide
agcaaaagcaggggaatttcacaaacaaccagaatggaaacaatagcactaatagcta

SEQ ID NO: 321204 - DNA, 60 bp, Artificial
  Synthetic oligonucleotide
agcaaaagcaggggacacgaaatgaacactcaaatcctggtattcgctctggtggcgatc

SEQ ID NO: 321205 - DNA, 60 bp, Artificial
  Synthetic oligonucleotide
agcaaaagcaggggataattcattaaccatgaagaccatcattattctgagctacatttt

SEQ ID NO: 321206 - DNA, 59 bp, Artificial
  Synthetic oligonucleotide
agcaaaagcaggggataattcattaatcatgaagaccgttattgctttaagctgcattt

SEQ ID NO: 321207 - DNA, 60 bp, Artificial
  Synthetic oligonucleotide
agcaaaagcaggggataattctattaaccatgaagactatcattgctttgagctacattc

SEQ ID NO: 321208 - DNA, 59 bp, Artificial
  Synthetic oligonucleotide
agcaaaagcaggggataattctattaatcatgaagaccatcattgtcctaagctacttt

SEQ ID NO: 321209 - DNA, 59 bp, Artificial
  Synthetic oligonucleotide
agcaaaagcagggggaaatgattgcaatcattataatagcggtactggcaacggccgga

SEQ ID NO: 321210 - DNA, 60 bp, Artificial
  Synthetic oligonucleotide
agcaaaagcaggggtcacaatggagaagttcatcataatgacaatgctcttggtgagcac

SEQ ID NO: 321211 - DNA, 59 bp, Artificial
  Synthetic oligonucleotide
agcaaaagcaggggtcacaatggagaagttcattgtactgagcattgttttaacgactg

SEQ ID NO: 321212 - DNA, 59 bp, Artificial
  Synthetic oligonucleotide
agcaaaagcaggggtcacaatgtacaaaatagtgctagtactcgcgctccttggagcgg

SEQ ID NO: 321213 - DNA, 58 bp, Artificial
  Synthetic oligonucleotide
agcaaaagcaggggtctaatctattaaaatggagagaatagtgctttttcttgcaata

SEQ ID NO: 321214 - DNA, 52 bp, Artificial
  Synthetic oligonucleotide
agcaaaagcaggggttataccatagacaatcaaaagcaagacaatggccatc

SEQ ID NO: 321215 - DNA, 56 bp, Artificial
  Synthetic oligonucleotide
agcaaaagcaggggttataccatggacaaccgaacaaagacaatgaccatcacctt

SEQ ID NO: 321216 - DNA, 60 bp, Artificial
  Synthetic oligonucleotide
agcaaaagcagggtagataatcactcacagagtgacatcgaaatcatggcgaccaaaggc

SEQ ID NO: 321217 - DNA, 60 bp, Artificial
  Synthetic oligonucleotide
agcaaaagcagggtagataatcactcaccgagtgacatcaatatcatggcgtctcaaggc

SEQ ID NO: 321218 - DNA, 59 bp, Artificial
  Synthetic oligonucleotide
agcaaaagcagggtgaaaatgaatccaaatcagaagataataacaattggtgtagtgaa

SEQ ID NO: 321219 - DNA, 60 bp, Artificial
  Synthetic oligonucleotide
agcaaaagcagggtgaaaatgaatccaaatcagaagataatatgcatttcagcaacagga

SEQ ID NO: 321220 - DNA, 60 bp, Artificial
  Synthetic oligonucleotide
agcaaaagcaggtactgatctgaaatggaagattttgtgcgacaatgcttcaatccgatg

SEQ ID NO: 321221 - DNA, 60 bp, Artificial
  Synthetic oligonucleotide
agcaaaagccggggaaaatgattgcaatcattgtaatagcgatattggcagcagccggaa

SEQ ID NO: 321222 - DNA, 60 bp, Artificial
  Synthetic oligonucleotide
agcaaaagccggttgtgaactgggcttatgaagcatggacaacaaatgaggatattgggc

SEQ ID NO: 321223 - DNA, 55 bp, Artificial
  Synthetic oligonucleotide
agcaaaagtgtctgtgttagatggatgctggggccagatacatgcgcttaactgg

SEQ ID NO: 321224 - DNA, 60 bp, Artificial
  Synthetic oligonucleotide
agcaaaatcattcagtagagcatagttaaattgcctgtctgaacaactgtcagcactcag

SEQ ID NO: 321225 - DNA, 58 bp, Artificial
  Synthetic oligonucleotide
agcaaaatgaatgcagcatcccctcgaataatcaagtaatgccgtgtgacccaatcat

SEQ ID NO: 321226 - DNA, 55 bp, Artificial
  Synthetic oligonucleotide
agcaaaattactacgttccttagatttcgagatcgcaaactttactggtagcaac

SEQ ID NO: 321227 - DNA, 56 bp, Artificial
  Synthetic oligonucleotide
agcaaacacagacaaatatgggaaaacttagtccagtttgtttgtatctacttctc

SEQ ID NO: 321228 - DNA, 60 bp, Artificial
  Synthetic oligonucleotide
agcaaacagcttatctgtgctcatgaaatcattgtgtagatctacagtcatgtctaactg

SEQ ID NO: 321229 - DNA, 55 bp, Artificial
  Synthetic oligonucleotide
agcaaacatcaccacagatgacaagactcttgatgaggcggaaaagaaccctctg

SEQ ID NO: 321230 - DNA, 53 bp, Artificial
  Synthetic oligonucleotide
agcaaacatgcgacaccttacagagaccgccccttggtgcgagggctctctgc

SEQ ID NO: 321231 - DNA, 60 bp, Artificial
  Synthetic oligonucleotide
agcaaacatgtgataattgactccctcaataggaatgccagcgccattttcctggtttcg

SEQ ID NO: 321232 - DNA, 56 bp, Artificial
  Synthetic oligonucleotide
agcaaaccaaactctatggaagtggaaacaagttgataacagtaggaagctcgaaa

SEQ ID NO: 321233 - DNA, 60 bp, Artificial
  Synthetic oligonucleotide
agcaaaccaatctgtatgttcaagcatcagggagagtcacagtctctaccaagagaggcc

SEQ ID NO: 321234 - DNA, 55 bp, Artificial
  Synthetic oligonucleotide
agcaaaccttgcctatcaacccaccaaagaatgaggacccagacctccgctgggc

SEQ ID NO: 321235 - DNA, 55 bp, Artificial
  Synthetic oligonucleotide
agcaaacgctcaataatgatatctggtataagactgatacaggtggttgggttga

SEQ ID NO: 321236 - DNA, 58 bp, Artificial
  Synthetic oligonucleotide
agcaaagaacctggttacagaatacggccgatttgacccaggagccatgaactacaca

SEQ ID NO: 321237 - DNA, 60 bp, Artificial
  Synthetic oligonucleotide
agcaaagaagagtggcatatgcccatgcggtatgcacttcaagccctccaggtatatggg

SEQ ID NO: 321238 - DNA, 60 bp, Artificial
  Synthetic oligonucleotide
agcaaagaatccagattatagttgtgtcacagttatggcttatgtgaatgaggatcttgt

SEQ ID NO: 321239 - DNA, 59 bp, Artificial
  Synthetic oligonucleotide
agcaaagagaaataggcctccattacccagtgttcagaagttaacagaagatagataga

SEQ ID NO: 321240 - DNA, 60 bp, Artificial
  Synthetic oligonucleotide
agcaaagaggattatcatagagagaaagcaatcgttaagatgtctgagtttgctgcctct

SEQ ID NO: 321241 - DNA, 60 bp, Artificial
  Synthetic oligonucleotide
agcaaagatgtcataacttgttatggtggttccagttctgactgcctgatgagcggtgtt

SEQ ID NO: 321242 - DNA, 59 bp, Artificial
  Synthetic oligonucleotide
agcaaagattcaagatcagggtatgaggtgctaaaggttccgaatgcggaaacagacaa

SEQ ID NO: 321243 - DNA, 60 bp, Artificial
  Synthetic oligonucleotide
agcaaagcaacttggaaagcaacctcagcaaggctcatcaacaacagccttacctgacga

SEQ ID NO: 321244 - DNA, 55 bp, Artificial
  Synthetic oligonucleotide
agcaaagcgtcgtctttacgatacagcggttgacgagttcaacgctcgtgatcgc

SEQ ID NO: 321245 - DNA, 56 bp, Artificial
  Synthetic oligonucleotide
agcaaaggaggtttgatagccaactggttagtgaaagagaaggcggcgggacgtgc

SEQ ID NO: 321246 - DNA, 55 bp, Artificial
  Synthetic oligonucleotide
agcaaaggcacctcgggaagtcctatcattaacgcccagggagaggtggtgggtc

SEQ ID NO: 321247 - DNA, 60 bp, Artificial
  Synthetic oligonucleotide
agcaaaggcgaatgtggcaagaagttcgcggacttacacctgctttgcgaactgctatgc

SEQ ID NO: 321248 - DNA, 55 bp, Artificial
  Synthetic oligonucleotide
agcaaaggcgcagttctcatgctcgaaccaacaagaccattggcagagaatgtct

SEQ ID NO: 321249 - DNA, 60 bp, Artificial
  Synthetic oligonucleotide
agcaaaggttaacacaatatgccactcggagaattaatgtgcgtcagacgcacgtaactc

SEQ ID NO: 321250 - DNA, 60 bp, Artificial
  Synthetic oligonucleotide
agcaaagtgggcgttaatgtgtctgctcgacctgtcagattggttgacaaagggaatcta

SEQ ID NO: 321251 - DNA, 55 bp, Artificial
  Synthetic oligonucleotide
agcaaagttgaaaggctatatggcacagttcctggaatggtaaataatcctactg

SEQ ID NO: 321252 - DNA, 54 bp, Artificial
  Synthetic oligonucleotide
agcaaatagcaactttaacgtctgcaaaagactaacgggaaggagtactgggga

SEQ ID NO: 321253 - DNA, 60 bp, Artificial
  Synthetic oligonucleotide
agcaaatagcgcaagccggaggactagactaatcagaagccacggtcacacctatactta

SEQ ID NO: 321254 - DNA, 57 bp, Artificial
  Synthetic oligonucleotide
agcaaatagctgctaccactaaaggttgcttagatttaaatcaaaaggtaatatgga

SEQ ID NO: 321255 - DNA, 55 bp, Artificial
  Synthetic oligonucleotide
agcaaatcgcacgacagcgcgtcatggcctttcgcaataaacgcatcgcgcacac

SEQ ID NO: 321256 - DNA, 60 bp, Artificial
  Synthetic oligonucleotide
agcaaatcgggggccgccagctcacaaatgcagctgagcgcttcgagactatatacccta

SEQ ID NO: 321257 - DNA, 55 bp, Artificial
  Synthetic oligonucleotide
agcaaatcttacgctcagatgtggttgctaatgtacttccacaggcgggacctcc

SEQ ID NO: 321258 - DNA, 51 bp, Artificial
  Synthetic oligonucleotide
agcaaatgattgaggacagaggtattgattctaatcgtatgctacttgttc

SEQ ID NO: 321259 - DNA, 55 bp, Artificial
  Synthetic oligonucleotide
agcaaatggaaaagctccgtacatatcagaagcggcattaagaaggctatataca

SEQ ID NO: 321260 - DNA, 57 bp, Artificial
  Synthetic oligonucleotide
agcaaatgttgttagacccactgttattgtggatgcattaggtcctactggggttcc

SEQ ID NO: 321261 - DNA, 51 bp, Artificial
  Synthetic oligonucleotide
agcaaattccaatccggaatcgaaatgatgaaacaattcatgccagcaatc

SEQ ID NO: 321262 - DNA, 52 bp, Artificial
  Synthetic oligonucleotide
agcaaattgtccacatagacgtgaaggttgggatgaatatcaacgttatgac

SEQ ID NO: 321263 - DNA, 55 bp, Artificial
  Synthetic oligonucleotide
agcaacaaactttgtaaggagggggacttcttgtgaccaaatgaagaatctcgat

SEQ ID NO: 321264 - DNA, 57 bp, Artificial
  Synthetic oligonucleotide
agcaacaaccaatcttcccaaatttcgacctgtcactgtggcgcactacccagccgt

SEQ ID NO: 321265 - DNA, 60 bp, Artificial
  Synthetic oligonucleotide
agcaacaaccacagacaaacagacaagacagccatcgtttgacagttggctcaattgtaa

SEQ ID NO: 321266 - DNA, 59 bp, Artificial
  Synthetic oligonucleotide
agcaacaacgacaccgtaaaatcttcaagtgacggagtactctctagtatggctgtcac

SEQ ID NO: 321267 - DNA, 60 bp, Artificial
  Synthetic oligonucleotide
agcaacaacgccacagacacagtagacacactgacagagaacggagttccagtgaccagc

SEQ ID NO: 321268 - DNA, 60 bp, Artificial
  Synthetic oligonucleotide
agcaacaatcactgatgtaggtaacagtgcgaataacgctagacagccagcgtcagaagc

SEQ ID NO: 321269 - DNA, 54 bp, Artificial
  Synthetic oligonucleotide
agcaacaatcggaaaaattggaccaaatgtaaattcagggcctgaattacaaat

SEQ ID NO: 321270 - DNA, 60 bp, Artificial
  Synthetic oligonucleotide
agcaacaattgtggttaacaacaatctcctgccagaatatacatgcaaccgcttgtggta

SEQ ID NO: 321271 - DNA, 51 bp, Artificial
  Synthetic oligonucleotide
agcaacacaaactatgggatctctctgaccaacgacatgggaaccctgtgt

SEQ ID NO: 321272 - DNA, 50 bp, Artificial
  Synthetic oligonucleotide
agcaacacacgctccccaagctcactacacttgtagagtgatctttgtca

SEQ ID NO: 321273 - DNA, 55 bp, Artificial
  Synthetic oligonucleotide
agcaacaccccgggggagtaccccagcaaacacgtcacgcgcccctcagtggcat

SEQ ID NO: 321274 - DNA, 57 bp, Artificial
  Synthetic oligonucleotide
agcaacactgccgatagactatttagtaccaattctcctgcgttccctaacggggca

SEQ ID NO: 321275 - DNA, 55 bp, Artificial
  Synthetic oligonucleotide
agcaacagagatctgtgcacttgaccactgtagagcacctccaatctgctcggca

SEQ ID NO: 321276 - DNA, 50 bp, Artificial
  Synthetic oligonucleotide
agcaacagatccggcagattagtgactgggttcttaccactcatctggga

SEQ ID NO: 321277 - DNA, 58 bp, Artificial
  Synthetic oligonucleotide
agcaacagcaacccttgggacggtcgggtcaaacaccagtggcaccactgagattgag

SEQ ID NO: 321278 - DNA, 55 bp, Artificial
  Synthetic oligonucleotide
agcaacagcggggtggacagacagggttatagaagtagtacaaagagcttcgaga

SEQ ID NO: 321279 - DNA, 58 bp, Artificial
  Synthetic oligonucleotide
agcaacagcttgatcaattatcgtgtcaatagtttctgctaactgatgcggctcttta

SEQ ID NO: 321280 - DNA, 57 bp, Artificial
  Synthetic oligonucleotide
agcaacaggaatgacactatccgtagtaagtctgctaatagggttggccaacttggg

SEQ ID NO: 321281 - DNA, 60 bp, Artificial
  Synthetic oligonucleotide
agcaacagtatcagcggacccattagcatccttgctggaaatgtgccacagcacacagat

SEQ ID NO: 321282 - DNA, 60 bp, Artificial
  Synthetic oligonucleotide
agcaacagtatcggcagacccattagcatctctattagagatgtgccatagcacacagat

SEQ ID NO: 321283 - DNA, 60 bp, Artificial
  Synthetic oligonucleotide
agcaacagtcactataatagatgcaaaacctatattggagcttgcccctgtggatcaaac

SEQ ID NO: 321284 - DNA, 60 bp, Artificial
  Synthetic oligonucleotide
agcaacagtcggttcgaatctgtggcttggtctgccactgcatgcagcgatggacccggt

SEQ ID NO: 321285 - DNA, 57 bp, Artificial
  Synthetic oligonucleotide
agcaacatgacaatggaagaaagtgtgtttggaactgatggtttggaagcattagac

SEQ ID NO: 321286 - DNA, 55 bp, Artificial
  Synthetic oligonucleotide
agcaacatgttccagttataaccaagtctcgaatgactcagttcatgacatccgc

SEQ ID NO: 321287 - DNA, 55 bp, Artificial
  Synthetic oligonucleotide
agcaaccaaatatccactactgaaactgctgacatacagacagacaacgataacc

SEQ ID NO: 321288 - DNA, 59 bp, Artificial
  Synthetic oligonucleotide
agcaaccaaggtaccagcagatcaaatgtataatttacgagatagattaagacgtctac

SEQ ID NO: 321289 - DNA, 60 bp, Artificial
  Synthetic oligonucleotide
agcaaccactggcactacggccttagtggtgactcagaacctgagagggattatgctcca

SEQ ID NO: 321290 - DNA, 51 bp, Artificial
  Synthetic oligonucleotide
agcaaccagaaggatgatccaactgatagtcagcgggagggacgagcaatc

SEQ ID NO: 321291 - DNA, 59 bp, Artificial
  Synthetic oligonucleotide
agcaaccagctactaaaccagatgtaagtggaaaggtttgtgcgtgtgtagccaccata

SEQ ID NO: 321292 - DNA, 60 bp, Artificial
  Synthetic oligonucleotide
agcaaccatggtggcacatcgtgcaaggcgtcgcaagcgtgcatccgccacacagcttta

SEQ ID NO: 321293 - DNA, 52 bp, Artificial
  Synthetic oligonucleotide
agcaacccttgccccaccaagcaataaacgaacccgaaacccatccccagaa

SEQ ID NO: 321294 - DNA, 54 bp, Artificial
  Synthetic oligonucleotide
agcaaccgatttcgattttggctgtcagcctttgtaccgccttcggtaaaagta

SEQ ID NO: 321295 - DNA, 60 bp, Artificial
  Synthetic oligonucleotide
agcaaccgtgctaaacttagaacacttgcttgagtatgctccacaacagattgatatttc

SEQ ID NO: 321296 - DNA, 57 bp, Artificial
  Synthetic oligonucleotide
agcaaccgttgctcgccacttaggggaatttcaaccctccgtgctaacacatgaggc

SEQ ID NO: 321297 - DNA, 55 bp, Artificial
  Synthetic oligonucleotide
agcaacgagctttcgactcaacgcggactcattgatggcgtcactgcgcgtgtcg

SEQ ID NO: 321298 - DNA, 55 bp, Artificial
  Synthetic oligonucleotide
agcaacgatatcgagtgactgacgctcaaggacacgtttatagcgtatccatgcc

SEQ ID NO: 321299 - DNA, 58 bp, Artificial
  Synthetic oligonucleotide
agcaacgctagcggtggctttagcggtggctatcctaaaataaccggcatctataaca

SEQ ID NO: 321300 - DNA, 60 bp, Artificial
  Synthetic oligonucleotide
agcaacgctggacgcgtcaggttatgtctatgaatgtcagccgacagattcaggcgtgcc

SEQ ID NO: 321301 - DNA, 58 bp, Artificial
  Synthetic oligonucleotide
agcaacggcgggacctgctattgatttaacggcaggcccatctaatctagcaacggcg

SEQ ID NO: 321302 - DNA, 60 bp, Artificial
  Synthetic oligonucleotide
agcaacggtatcggcagacccattagcatccctgttggaaatgtgccacagcacacagat

SEQ ID NO: 321303 - DNA, 55 bp, Artificial
  Synthetic oligonucleotide
agcaacggttgttacaagatggaaagttgacatagcgttcatattacggaagggc

SEQ ID NO: 321304 - DNA, 60 bp, Artificial
  Synthetic oligonucleotide
agcaacgtcggcttggacagaggtggcatcagtggcgtccgatataaatgaaatgacaaa

SEQ ID NO: 321305 - DNA, 60 bp, Artificial
  Synthetic oligonucleotide
agcaacgttcagggctgcgcaaattaatggggtagagtggcatgatacaaccgaagatca

SEQ ID NO: 321306 - DNA, 55 bp, Artificial
  Synthetic oligonucleotide
agcaacgttgggtgcgagcaagtggatttctccttaactaaaggtattaatgtta

SEQ ID NO: 321307 - DNA, 58 bp, Artificial
  Synthetic oligonucleotide
agcaactaaaggccgcgagttgtgctccacacgtccctgacgttaacgagcatgaaac

SEQ ID NO: 321308 - DNA, 53 bp, Artificial
  Synthetic oligonucleotide
agcaactacaccagccacctggaggacaaaatagttaaaggaccctacggagg

SEQ ID NO: 321309 - DNA, 55 bp, Artificial
  Synthetic oligonucleotide
agcaactagcggtaagtgtactgaataaaaagacagccgtagccgataactgtaa

SEQ ID NO: 321310 - DNA, 60 bp, Artificial
  Synthetic oligonucleotide
agcaactcgtcgatgcttctcgttgattgtgctaccaacactttgaccacaccctcttac

SEQ ID NO: 321311 - DNA, 55 bp, Artificial
  Synthetic oligonucleotide
agcaactgataaggatgtgaacgctggaactatcggaacccacactatccctcgg

SEQ ID NO: 321312 - DNA, 55 bp, Artificial
  Synthetic oligonucleotide
agcaactgatgctaccctaacacatggcgcaatatcccatatcaccggcgggagc

SEQ ID NO: 321313 - DNA, 50 bp, Artificial
  Synthetic oligonucleotide
agcaactggagagccatggctgatgaattccaactcccaccggtagtagc

SEQ ID NO: 321314 - DNA, 50 bp, Artificial
  Synthetic oligonucleotide
agcaactggcaacacttctcatcttgagacttacatcaaaatgttagatc

SEQ ID NO: 321315 - DNA, 51 bp, Artificial
  Synthetic oligonucleotide
agcaactggctgacgcagagctggcaaaaattgtgagcgaggcaaacatgt

SEQ ID NO: 321316 - DNA, 60 bp, Artificial
  Synthetic oligonucleotide
agcaactggttgctgccagacaaaaactcaaggatgcagagagggcagtggaaatggacc

SEQ ID NO: 321317 - DNA, 55 bp, Artificial
  Synthetic oligonucleotide
agcaactgtccgaactacaattggaccgattaccctccaacaccaggaaggtgcc

SEQ ID NO: 321318 - DNA, 58 bp, Artificial
  Synthetic oligonucleotide
agcaacttgcgattacaagcgtgagtatgtattctaaccttcgtaacaagcacaaacg

SEQ ID NO: 321319 - DNA, 55 bp, Artificial
  Synthetic oligonucleotide
agcaagaacaaggtccgcagtcaacaagttagtgacgctaacccatagggtaggc

SEQ ID NO: 321320 - DNA, 57 bp, Artificial
  Synthetic oligonucleotide
agcaagaatatcagtaccctacgtgggaattgctaacgcgtattcccacttttatga

SEQ ID NO: 321321 - DNA, 53 bp, Artificial
  Synthetic oligonucleotide
agcaagactaccctcacctgtctgggagacttcaaacaactccacccagtggg

SEQ ID NO: 321322 - DNA, 55 bp, Artificial
  Synthetic oligonucleotide
agcaagagaagagtcctataaaacagatgtctgtgaagcagccatgatacccctc

SEQ ID NO: 321323 - DNA, 59 bp, Artificial
  Synthetic oligonucleotide
agcaagagtacactgtgaagtggctcccacttgtggaataggattggccgccacttacg

SEQ ID NO: 321324 - DNA, 60 bp, Artificial
  Synthetic oligonucleotide
agcaagagtccattcagatcaggttgtagaggagcgtgtacaacgtccactagttcgatt

SEQ ID NO: 321325 - DNA, 58 bp, Artificial
  Synthetic oligonucleotide
agcaagataacgctcgaggtcttgtgcttcctgggtacaagtatcttggtcctgggaa

SEQ ID NO: 321326 - DNA, 55 bp, Artificial
  Synthetic oligonucleotide
agcaagatgatagctattccagtaaaattactggtcaaataaaccccgctaagtc

SEQ ID NO: 321327 - DNA, 60 bp, Artificial
  Synthetic oligonucleotide
agcaagcaataactgccaacgcgactcgttgaagtattcgacacattctgctggggaaat

SEQ ID NO: 321328 - DNA, 60 bp, Artificial
  Synthetic oligonucleotide
agcaagcaatgccgcatctaagcaagactattcccaggatccctctaaattcaccgaacc

SEQ ID NO: 321329 - DNA, 60 bp, Artificial
  Synthetic oligonucleotide
agcaagcagcagaagccatggaggttgctagtcaggctaggcagatggtgcaggcaatga

SEQ ID NO: 321330 - DNA, 60 bp, Artificial
  Synthetic oligonucleotide
agcaagcagtagagatgtcttcaattgctcccactgatagtgtttcgtcctctggaaaga

SEQ ID NO: 321331 - DNA, 60 bp, Artificial
  Synthetic oligonucleotide
agcaagccaaggtctgtgagcgcttgtacaacgtcattgagcggagtctgtgactgtttg

SEQ ID NO: 321332 - DNA, 60 bp, Artificial
  Synthetic oligonucleotide
agcaagcgaaacccgattcagatgtgttgttagcagccaatcgtgagactgcaaaggatg

SEQ ID NO: 321333 - DNA, 55 bp, Artificial
  Synthetic oligonucleotide
agcaagcgagtcggtaccaattggtttagccttcgaaattactctgggcaggaag

SEQ ID NO: 321334 - DNA, 55 bp, Artificial
  Synthetic oligonucleotide
agcaagcgcagtaggtagcagcattttctcgccgtactatcaacaacagggcgcg

SEQ ID NO: 321335 - DNA, 55 bp, Artificial
  Synthetic oligonucleotide
agcaagctaacctgtatggacttggtacccgttatgttaggatggggactgaaag

SEQ ID NO: 321336 - DNA, 59 bp, Artificial
  Synthetic oligonucleotide
agcaaggaggaaggctcgcttacgttacttgccgctcatagatccgagatccttggaag

SEQ ID NO: 321337 - DNA, 53 bp, Artificial
  Synthetic oligonucleotide
agcaaggagtgaaggactacgtggagcaattgggaaatgcatttggttcgggc

SEQ ID NO: 321338 - DNA, 60 bp, Artificial
  Synthetic oligonucleotide
agcaagggagccgtaagaggaagacgatggaatcatttcaggaagacccagaagagatgc

SEQ ID NO: 321339 - DNA, 55 bp, Artificial
  Synthetic oligonucleotide
agcaaggggagcgtgtggcttattctttcgaagtcaattttggcaaaccacaaac

SEQ ID NO: 321340 - DNA, 58 bp, Artificial
  Synthetic oligonucleotide
agcaaggtggatgatggcggggactggaagccaatagtacagttcctaaggtatcaag

SEQ ID NO: 321341 - DNA, 55 bp, Artificial
  Synthetic oligonucleotide
agcaagtaagccatcatacatagccacctttcgggggtacctagctggccatacg

SEQ ID NO: 321342 - DNA, 56 bp, Artificial
  Synthetic oligonucleotide
agcaagtacctcgcgcaactaacacccgacccagtagtcgcggtgaggcgtcgtca

SEQ ID NO: 321343 - DNA, 53 bp, Artificial
  Synthetic oligonucleotide
agcaagtatttaattgttacgacaacgaacccagtactgccactgtaaaaaac

SEQ ID NO: 321344 - DNA, 58 bp, Artificial
  Synthetic oligonucleotide
agcaagtcacctgctctcatcaggcaggagatcccaaatgtaaattgggacggctccc

SEQ ID NO: 321345 - DNA, 55 bp, Artificial
  Synthetic oligonucleotide
agcaagtccagtacgtcaccacggcatagcttacagagtgggagcggttgaatcc

SEQ ID NO: 321346 - DNA, 57 bp, Artificial
  Synthetic oligonucleotide
agcaagtcgtgtcggttggaatttagtagaactggattctatgggatcagacgaaaa

SEQ ID NO: 321347 - DNA, 57 bp, Artificial
  Synthetic oligonucleotide
agcaagtgcgggtgtccaatcaggaacagttcctgtctgcccctaggcgggcggtaa

SEQ ID NO: 321348 - DNA, 54 bp, Artificial
  Synthetic oligonucleotide
agcaagtggaatttccgcttaaacccattgtggaaaacgcaaaacccacactca

SEQ ID NO: 321349 - DNA, 58 bp, Artificial
  Synthetic oligonucleotide
agcaagtggacacactgaacccactaacaatgtgggatccattgttgaacgactttcc

SEQ ID NO: 321350 - DNA, 60 bp, Artificial
  Synthetic oligonucleotide
agcaagtggattgatgttatatctccactgacgtaagggatgacgcacaatcccactatc

SEQ ID NO: 321351 - DNA, 60 bp, Artificial
  Synthetic oligonucleotide
agcaagtgtatgcacttttttatagatctgatatagtaccatttaatgagggtaatagga

SEQ ID NO: 321352 - DNA, 53 bp, Artificial
  Synthetic oligonucleotide
agcaagttaatgtgcgggatcctttgtttatccaatctccctctaaactagta

SEQ ID NO: 321353 - DNA, 55 bp, Artificial
  Synthetic oligonucleotide
agcaagttcttgacagtcctagagcacttgactgaaccagttgatctaaatctag

SEQ ID NO: 321354 - DNA, 60 bp, Artificial
  Synthetic oligonucleotide
agcaagttgagtaccctaaaaggcctacaagcatatctaggattactcaattatgctaga

SEQ ID NO: 321355 - DNA, 55 bp, Artificial
  Synthetic oligonucleotide
agcaagtttatgtgcgacacgtatggtctagaggcgggacagataaggaagcccc

SEQ ID NO: 321356 - DNA, 58 bp, Artificial
  Synthetic oligonucleotide
agcaagtttggatctagcaacattgctgttatgacaagtggttttgcctttcactatt

SEQ ID NO: 321357 - DNA, 60 bp, Artificial
  Synthetic oligonucleotide
agcaataaccgtgatcacacatgttattcagggctagatgtcactgagtgtggcgaagtc

SEQ ID NO: 321358 - DNA, 60 bp, Artificial
  Synthetic oligonucleotide
agcaatacgtgatacttatggcattagtgatgatatcatatacaaattagtggcatctga

SEQ ID NO: 321359 - DNA, 56 bp, Artificial
  Synthetic oligonucleotide
agcaatagacggggaatacagactgcggggtgaagcaaggaaaacgttcgtggagc

SEQ ID NO: 321360 - DNA, 59 bp, Artificial
  Synthetic oligonucleotide
agcaatagggaaatgtccgaggtatgttaagcaagaaagtctgctactggcaactggga

SEQ ID NO: 321361 - DNA, 55 bp, Artificial
  Synthetic oligonucleotide
agcaatagggagagtcacagtctctaccaaaagtagccaacaaactgtaatcccg

SEQ ID NO: 321362 - DNA, 56 bp, Artificial
  Synthetic oligonucleotide
agcaatagtatagttactttctgtgggttagacaatgaacctggatcgggaaattg

SEQ ID NO: 321363 - DNA, 60 bp, Artificial
  Synthetic oligonucleotide
agcaatagtcaggaaattcatgaaggtgaacaaccatgtgacttataatcatcaagaggc

SEQ ID NO: 321364 - DNA, 60 bp, Artificial
  Synthetic oligonucleotide
agcaatagtgacttcctttgcgtgggatggtccagcactagttgccatgacggcatcgga

SEQ ID NO: 321365 - DNA, 56 bp, Artificial
  Synthetic oligonucleotide
agcaatattctaacttaaagtttgagacgtgggacccattggacacaccatattct

SEQ ID NO: 321366 - DNA, 52 bp, Artificial
  Synthetic oligonucleotide
agcaatcaccagcagtaatacagcatttacaaatgctgactgtgcctggctg

SEQ ID NO: 321367 - DNA, 55 bp, Artificial
  Synthetic oligonucleotide
agcaatcaggtgtatcttccacctacatcagtatccaaagttctcagcacggacg

SEQ ID NO: 321368 - DNA, 55 bp, Artificial
  Synthetic oligonucleotide
agcaatcgatcaactgttgacgcattcgtgaggcaagtatgtgaagatctgggtc

SEQ ID NO: 321369 - DNA, 57 bp, Artificial
  Synthetic oligonucleotide
agcaatcgttcaccccaagtccgggagcacggccacaggtaaatggacagtcaggga

SEQ ID NO: 321370 - DNA, 56 bp, Artificial
  Synthetic oligonucleotide
agcaatctaccaatgttgtgacctagacccccaagcccgcgtggccattaagtccc

SEQ ID NO: 321371 - DNA, 60 bp, Artificial
  Synthetic oligonucleotide
agcaatctagaagtaaacatattatagacgcaggtggaaatatatctgctagtgtaaaag

SEQ ID NO: 321372 - DNA, 57 bp, Artificial
  Synthetic oligonucleotide
agcaatctttcaatacaccatgaggaaggtactagaccccttcagaaaggccaacaa

SEQ ID NO: 321373 - DNA, 60 bp, Artificial
  Synthetic oligonucleotide
agcaatgcacactgcgttgactggggcgacagaaatccagatgtcaggaacgacgacaat

SEQ ID NO: 321374 - DNA, 60 bp, Artificial
  Synthetic oligonucleotide
agcaatgcatggtcaggtcgactgcagtccagaagtatggcaaatagattgcacacattt

SEQ ID NO: 321375 - DNA, 55 bp, Artificial
  Synthetic oligonucleotide
agcaatgccaacggcgtcgctgagtggctttctaataactcacgcagtcaagctt

SEQ ID NO: 321376 - DNA, 58 bp, Artificial
  Synthetic oligonucleotide
agcaatggaggccctctgcgaacttagaggacgactgttgtttcgggctctctaaaga

SEQ ID NO: 321377 - DNA, 57 bp, Artificial
  Synthetic oligonucleotide
agcaatggagtagtggccccatgtgggcctcatttccattttagctaacttaatccg

SEQ ID NO: 321378 - DNA, 57 bp, Artificial
  Synthetic oligonucleotide
agcaatggctttccttgaagagtcccaccccggaatctttgaaaactcatgtcttga

SEQ ID NO: 321379 - DNA, 60 bp, Artificial
  Synthetic oligonucleotide
agcaatggtgcacaacatcatgtacttttggggatcctggtgatatcatgtctactacat

SEQ ID NO: 321380 - DNA, 60 bp, Artificial
  Synthetic oligonucleotide
agcaatgtctcaactaatcgatctagcattacttccattagacatgttctcgatgttctc

SEQ ID NO: 321381 - DNA, 52 bp, Artificial
  Synthetic oligonucleotide
agcaattacacaagagaaatatacaccttaattgaacaatcgcagaaccagc

SEQ ID NO: 321382 - DNA, 56 bp, Artificial
  Synthetic oligonucleotide
agcaattaccccgtggtgggcacagaacttttgccactggtgccgcgtagctttta

SEQ ID NO: 321383 - DNA, 57 bp, Artificial
  Synthetic oligonucleotide
agcaattcaaccaaactcagcaacaaatcacccttcgaccaaacgaactctgaccat

SEQ ID NO: 321384 - DNA, 52 bp, Artificial
  Synthetic oligonucleotide
agcaattcctacaaaaaaggtcttagagacactcttacaaaaacctgccaca

SEQ ID NO: 321385 - DNA, 60 bp, Artificial
  Synthetic oligonucleotide
agcaattgaggagtgcctgattaatgatccctgggttttgcttaatgcttcttggttcaa

SEQ ID NO: 321386 - DNA, 55 bp, Artificial
  Synthetic oligonucleotide
agcaatttcaacgtgtgtaaaaggctcacagggaggtcgacaggcgagagactac

SEQ ID NO: 321387 - DNA, 55 bp, Artificial
  Synthetic oligonucleotide
agcaattttcggggcctgattttgaccgagtgtggagtagcagtcacaacggcgc

SEQ ID NO: 321388 - DNA, 55 bp, Artificial
  Synthetic oligonucleotide
agcacaaagaatcggtagagctatcctcaacatacctacaaggataagacagggc

SEQ ID NO: 321389 - DNA, 60 bp, Artificial
  Synthetic oligonucleotide
agcacaaagtacaaacctaatgatgatgatgcagagaggcaattttaagggccagaaaaa

SEQ ID NO: 321390 - DNA, 56 bp, Artificial
  Synthetic oligonucleotide
agcacaaatcaccggacatgtcaaaaacggttccatgaggattgttgggcccaaaa

SEQ ID NO: 321391 - DNA, 53 bp, Artificial
  Synthetic oligonucleotide
agcacaacaaatattggccgagcctccaaaaactaggagcactgctgcagcgc

SEQ ID NO: 321392 - DNA, 55 bp, Artificial
  Synthetic oligonucleotide
agcacaacgcaggagacgaaacccaagcaccttcagtaataacgtaaccattacc

SEQ ID NO: 321393 - DNA, 56 bp, Artificial
  Synthetic oligonucleotide
agcacaactaccctgatgagcttaatcccttttctgagagtggattttggagtcgt

SEQ ID NO: 321394 - DNA, 59 bp, Artificial
  Synthetic oligonucleotide
agcacaagaagcttgagattccctagcaagttgtttccaacataccagagtttggatcg

SEQ ID NO: 321395 - DNA, 54 bp, Artificial
  Synthetic oligonucleotide
agcacaagaggacgaggaggtaggctttccagttaggccgcaggtgcctttgag

SEQ ID NO: 321396 - DNA, 59 bp, Artificial
  Synthetic oligonucleotide
agcacaaggatataacgtcctcgtgttgaatccatcggtagcggccacgctaggcttcg

SEQ ID NO: 321397 - DNA, 60 bp, Artificial
  Synthetic oligonucleotide
agcacaaggggaagtggaaagcagccagcatgttttgcgagccagagctgttttggcttg

SEQ ID NO: 321398 - DNA, 60 bp, Artificial
  Synthetic oligonucleotide
agcacaagtaatctatccgactcagcaatcaactatacaatacggaatcggcaaacaaca

SEQ ID NO: 321399 - DNA, 60 bp, Artificial
  Synthetic oligonucleotide
agcacaagtatgctataaaggtgatctgcaatgaaaagccaggtcctacattgccgttca

SEQ ID NO: 321400 - DNA, 59 bp, Artificial
  Synthetic oligonucleotide
agcacaatcactgccatgtataatcacgggtatacgggtggttttcatatggggaacaa

SEQ ID NO: 321401 - DNA, 60 bp, Artificial
  Synthetic oligonucleotide
agcacaatggaatgttatgtgcaacaaacctggggcatcctcttatcctagacacctgca

SEQ ID NO: 321402 - DNA, 60 bp, Artificial
  Synthetic oligonucleotide
agcacaattggtaaagcggctgagagattcgcagaaagtgaaatcggttcagcggcgatc

SEQ ID NO: 321403 - DNA, 60 bp, Artificial
  Synthetic oligonucleotide
agcacacaactaggcccaaacgtggaccacgagactcaaggcctggtgtgcataatatgc

SEQ ID NO: 321404 - DNA, 50 bp, Artificial
  Synthetic oligonucleotide
agcacacaagcaggtatgtatgcactggagtcttaacagataccagcaga

SEQ ID NO: 321405 - DNA, 60 bp, Artificial
  Synthetic oligonucleotide
agcacacacccggctctcatgctactacaaaaacatagaatagttgtacccagcttcaga

SEQ ID NO: 321406 - DNA, 60 bp, Artificial
  Synthetic oligonucleotide
agcacacacttatgacaccagtaatgaccgtgtcaactttttgtcatcaaacggtgtgat

SEQ ID NO: 321407 - DNA, 55 bp, Artificial
  Synthetic oligonucleotide
agcacaccacctcttattagactcgggtacaacctagttaaggatcccataccag

SEQ ID NO: 321408 - DNA, 53 bp, Artificial
  Synthetic oligonucleotide
agcacaccactgcagaaggtttgcgccactttatgcagccgaggccagaaggg

SEQ ID NO: 321409 - DNA, 51 bp, Artificial
  Synthetic oligonucleotide
agcacaccagtacaaagagcagtacaatcactctctagtttaagacgggca

SEQ ID NO: 321410 - DNA, 58 bp, Artificial
  Synthetic oligonucleotide
agcacaccagtccaatatactaatgcagagaggcaattttaggggccaaaaaacaata

SEQ ID NO: 321411 - DNA, 55 bp, Artificial
  Synthetic oligonucleotide
agcacaccatgtatacggtcaataggcggctcagtacaccaactgggccacgacc

SEQ ID NO: 321412 - DNA, 52 bp, Artificial
  Synthetic oligonucleotide
agcacacctccccaaggtaggaacccctccttccctagagaagttggccttc

SEQ ID NO: 321413 - DNA, 54 bp, Artificial
  Synthetic oligonucleotide
agcacacggcaattattccgaaccaagtgggattcccgtataaggctcatgttg

SEQ ID NO: 321414 - DNA, 60 bp, Artificial
  Synthetic oligonucleotide
agcacacggctctgataggatttcactacttggctttgcaacaatcttgctagtaatttc

SEQ ID NO: 321415 - DNA, 53 bp, Artificial
  Synthetic oligonucleotide
agcacacgggtgcgacactattgccagatgtcaatgcaacgctggggtgtact

SEQ ID NO: 321416 - DNA, 60 bp, Artificial
  Synthetic oligonucleotide
agcacactctattgctgttgaactatgtgtgcctgggttccatggttgggctacagctgc

SEQ ID NO: 321417 - DNA, 51 bp, Artificial
  Synthetic oligonucleotide
agcacacttagcggtagtcaaaaattaacggcgtcgttacaacattctctc

SEQ ID NO: 321418 - DNA, 56 bp, Artificial
  Synthetic oligonucleotide
agcacagacccaacagcaataccccgaacgctcgtcattttagatcatttactcag

SEQ ID NO: 321419 - DNA, 51 bp, Artificial
  Synthetic oligonucleotide
agcacagaccgtatctgatagttagcggcagaaatgacgctaagcggttgc

SEQ ID NO: 321420 - DNA, 60 bp, Artificial
  Synthetic oligonucleotide
agcacagagcgctcttctagccactggtgaaaactttcggacacgcatggcaaccacact

SEQ ID NO: 321421 - DNA, 55 bp, Artificial
  Synthetic oligonucleotide
agcacagcactccttgcaccgagcctagtacggataaaacccccgtacgggtgac

SEQ ID NO: 321422 - DNA, 60 bp, Artificial
  Synthetic oligonucleotide
agcacagccaagggaatgaaaagcctgttgaactccacgagcttagaaactagtctgtca

SEQ ID NO: 321423 - DNA, 59 bp, Artificial
  Synthetic oligonucleotide
agcacagcgattagccgcgctaggagacacagcttgggacttcggttcaattggtgggg

SEQ ID NO: 321424 - DNA, 58 bp, Artificial
  Synthetic oligonucleotide
agcacagcgtactcctgacgacttcctcgacataacaccttacgaagacacaaagaaa

SEQ ID NO: 321425 - DNA, 60 bp, Artificial
  Synthetic oligonucleotide
agcacagctagggggagcaagagatctattggtgcaagaaaccggcactaaagtcatgca

SEQ ID NO: 321426 - DNA, 58 bp, Artificial
  Synthetic oligonucleotide
agcacaggcagctgtaatgatgcagaactcggggggaccgccgcggggtcccccgaga

SEQ ID NO: 321427 - DNA, 57 bp, Artificial
  Synthetic oligonucleotide
agcacaggcggcctagtattacccgcctgtgctccccatcctttgctccctataaaa

SEQ ID NO: 321428 - DNA, 55 bp, Artificial
  Synthetic oligonucleotide
agcacaggggtccagttcagtccgtgggattaccccggatctcccgttctccaca

SEQ ID NO: 321429 - DNA, 58 bp, Artificial
  Synthetic oligonucleotide
agcacaggtcctaagttggttttttagaggtgtgcatcatgatttccatttagaccca

SEQ ID NO: 321430 - DNA, 55 bp, Artificial
  Synthetic oligonucleotide
agcacaggtggggctattaggatctacgatagaatcagcaatagcaagtataaga

SEQ ID NO: 321431 - DNA, 60 bp, Artificial
  Synthetic oligonucleotide
agcacaggtttcagtaccattcatgtcacctgcgagtgcttatcaatggttttatgacgg

SEQ ID NO: 321432 - DNA, 57 bp, Artificial
  Synthetic oligonucleotide
agcacagtgatgagaaaaccgggaaaagtttttacgattttgtgtgcttcagacgca

SEQ ID NO: 321433 - DNA, 60 bp, Artificial
  Synthetic oligonucleotide
agcacataaagtatcaattgcgaaaactttggagttccaactagatctgatgcaacgaca

SEQ ID NO: 321434 - DNA, 60 bp, Artificial
  Synthetic oligonucleotide
agcacataataatgaggtattggggtggcttacgcattccgtgcgtgaggtgaactcata

SEQ ID NO: 321435 - DNA, 59 bp, Artificial
  Synthetic oligonucleotide
agcacatagaacacccaatctataaagccatagacagaatatggggggggaagacaata

SEQ ID NO: 321436 - DNA, 60 bp, Artificial
  Synthetic oligonucleotide
agcacatagtatgggcaagcagggagctggacagatttgcactcaaccctgacctcttag

SEQ ID NO: 321437 - DNA, 53 bp, Artificial
  Synthetic oligonucleotide
agcacatcaccgagctttcgcatcaatccgccggtggcctgtgggctggggct

SEQ ID NO: 321438 - DNA, 55 bp, Artificial
  Synthetic oligonucleotide
agcacatcaggtggcattgcattacctgaccgaatcttagtgatcgcatcattgt

SEQ ID NO: 321439 - DNA, 60 bp, Artificial
  Synthetic oligonucleotide
agcacatgaatcaaacaaagcaggtatgttcaatccatatgctgccactaaaggtaattc

SEQ ID NO: 321440 - DNA, 60 bp, Artificial
  Synthetic oligonucleotide
agcacatgcgtacaggctgatagaatctgtgtgggatacttaagcaccaactcatcagaa

SEQ ID NO: 321441 - DNA, 60 bp, Artificial
  Synthetic oligonucleotide
agcacatgggttctggcagggggggtgctagccgccgtggcagcttactgcctggcgacc

SEQ ID NO: 321442 - DNA, 60 bp, Artificial
  Synthetic oligonucleotide
agcacattaaggtctggtgtccaaggccacccagagctgttgagtatacacatactcacg

SEQ ID NO: 321443 - DNA, 60 bp, Artificial
  Synthetic oligonucleotide
agcacattacaaattggtcaaggtggagccaattggctttgctccaactgatgtacatag

SEQ ID NO: 321444 - DNA, 60 bp, Artificial
  Synthetic oligonucleotide
agcaccaaaatgtccacactgtcaggggacaggtataatccctaggagtgagcctatgca

SEQ ID NO: 321445 - DNA, 60 bp, Artificial
  Synthetic oligonucleotide
agcaccaaactaagaatggcaacaggattgagaaatgtcccatccattcaatccagaggg

SEQ ID NO: 321446 - DNA, 60 bp, Artificial
  Synthetic oligonucleotide
agcaccaaagatgcatgaattcagtagatctttcttaaagaagtgtacggatcacgggaa

SEQ ID NO: 321447 - DNA, 60 bp, Artificial
  Synthetic oligonucleotide
agcaccaaagcgtcacgatacctaatgaaggctgagtcatggatcttgagaaaccctgga

SEQ ID NO: 321448 - DNA, 57 bp, Artificial
  Synthetic oligonucleotide
agcaccaccaactgagccttttaagtcttactatgctaagggattcatcacaatgga

SEQ ID NO: 321449 - DNA, 53 bp, Artificial
  Synthetic oligonucleotide
agcaccaccggagctgcctccgaaaaaaagggactatcgccgtcggagtgggg

SEQ ID NO: 321450 - DNA, 59 bp, Artificial
  Synthetic oligonucleotide
agcaccacgtatcccgctggtgggcagtttgcgcacctttgggcatataaatacgatgg

SEQ ID NO: 321451 - DNA, 60 bp, Artificial
  Synthetic oligonucleotide
agcaccagccatttttggctgcagccgttgctggattgcagggtggccatgttagatgat

SEQ ID NO: 321452 - DNA, 52 bp, Artificial
  Synthetic oligonucleotide
agcaccagtccaccaagggacggagactattttctgagcagtgactctggct

SEQ ID NO: 321453 - DNA, 56 bp, Artificial
  Synthetic oligonucleotide
agcaccagtgagattttgtcaactgttcgcgaacggctttttgctttttggactac

SEQ ID NO: 321454 - DNA, 54 bp, Artificial
  Synthetic oligonucleotide
agcaccatacatatcagaagtagctctgagacgactatacacaaacattgaagc

SEQ ID NO: 321455 - DNA, 60 bp, Artificial
  Synthetic oligonucleotide
agcaccatcaagcagctatctaagggagctgttcagttgaggttatgctcgtatgaacaa

SEQ ID NO: 321456 - DNA, 60 bp, Artificial
  Synthetic oligonucleotide
agcaccatggtatgctttcgcactgaataaggggtctgactctggaattataacatcaga

SEQ ID NO: 321457 - DNA, 51 bp, Artificial
  Synthetic oligonucleotide
agcacccaagatggatctgtctccgggaacgcctcccaccggcgaggagct

SEQ ID NO: 321458 - DNA, 57 bp, Artificial
  Synthetic oligonucleotide
agcacccagaacaattttatagtccactcagaggacataactccaagaggagccccc

SEQ ID NO: 321459 - DNA, 58 bp, Artificial
  Synthetic oligonucleotide
agcaccccaactgacctgttcggtgatcctatctccagacaatatacgcgtaaggaaa

SEQ ID NO: 321460 - DNA, 50 bp, Artificial
  Synthetic oligonucleotide
agcaccccagttttatgaagttccaaacgtccatcttgtacggaccgacg

SEQ ID NO: 321461 - DNA, 59 bp, Artificial
  Synthetic oligonucleotide
agcacccgcactctaagtccaccctcttacgcctcactactttctgcttcgcgatacga

SEQ ID NO: 321462 - DNA, 60 bp, Artificial
  Synthetic oligonucleotide
agcaccctatccgggctcactgatgtatcaagagtccatgcttcacagtgccactgtccc

SEQ ID NO: 321463 - DNA, 60 bp, Artificial
  Synthetic oligonucleotide
agcacccttcagaacacatagactcgctatgtactctgaagggtgcccttagggagagaa

SEQ ID NO: 321464 - DNA, 55 bp, Artificial
  Synthetic oligonucleotide
agcaccctttatggtggtgcattttatttcgacttcacgtgcagagctcgtgtgg

SEQ ID NO: 321465 - DNA, 55 bp, Artificial
  Synthetic oligonucleotide
agcaccctttggagtgtactctccggtcatctctgtagcgacatccatcagacgg

SEQ ID NO: 321466 - DNA, 54 bp, Artificial
  Synthetic oligonucleotide
agcaccgactttacctcccgattgttccgttgggagatggattcccttctggga

SEQ ID NO: 321467 - DNA, 58 bp, Artificial
  Synthetic oligonucleotide
agcaccgagtcgagttagcaaactagttggaagaggtttgggaattcaatcagaagca

SEQ ID NO: 321468 - DNA, 54 bp, Artificial
  Synthetic oligonucleotide
agcaccgattcttgtgaaccagacggggtacccggcgattgttatcgagacggg

SEQ ID NO: 321469 - DNA, 50 bp, Artificial
  Synthetic oligonucleotide
agcaccgcaaatgtgggccccacaaaagtggacccgtcttggttgggcta

SEQ ID NO: 321470 - DNA, 58 bp, Artificial
  Synthetic oligonucleotide
agcaccgcggtcaataaactggtgcgacaaaccatcccatctattaggagttccaaca

SEQ ID NO: 321471 - DNA, 56 bp, Artificial
  Synthetic oligonucleotide
agcaccggatggcccgagtaatgagtgttccgtgttgctaccggattgcgttttac

SEQ ID NO: 321472 - DNA, 55 bp, Artificial
  Synthetic oligonucleotide
agcaccgttcaagtcccagacaatggctgttacgaccgcctaactggaaagctgc

SEQ ID NO: 321473 - DNA, 53 bp, Artificial
  Synthetic oligonucleotide
agcacctaactttgtgcacagtcaagacgggagccaccttcgcaagaccgtag

SEQ ID NO: 321474 - DNA, 56 bp, Artificial
  Synthetic oligonucleotide
agcacctacgtataaggttactccaagcaacggtgacataactagtccgaagacca

SEQ ID NO: 321475 - DNA, 60 bp, Artificial
  Synthetic oligonucleotide
agcacctatacatcaccgatgcatgcgagacgtatgattagatctaaaactgtccaccct

SEQ ID NO: 321476 - DNA, 55 bp, Artificial
  Synthetic oligonucleotide
agcacctcatagctggctgtgtagaattaagagatgcactaaacagctcagggat

SEQ ID NO: 321477 - DNA, 57 bp, Artificial
  Synthetic oligonucleotide
agcacctcgccacgcatttccccttaaaccactacagtgtgctcaagcccgcggagg

SEQ ID NO: 321478 - DNA, 55 bp, Artificial
  Synthetic oligonucleotide
agcacctctggatctaaagggttgcaccattgaagggtggattcttggaaacccc

SEQ ID NO: 321479 - DNA, 60 bp, Artificial
  Synthetic oligonucleotide
agcacctgaatggatagttaggcaaacaatgtttcaacatagcctggaggatagtatatt

SEQ ID NO: 321480 - DNA, 55 bp, Artificial
  Synthetic oligonucleotide
agcacctggggttgtgaagaatggggttgtttagcaataggcacgggatgcgtgt

SEQ ID NO: 321481 - DNA, 60 bp, Artificial
  Synthetic oligonucleotide
agcacctgttccatggagttatcacgatccagcagactgtcacggttgtgctcagtcatg

SEQ ID NO: 321482 - DNA, 55 bp, Artificial
  Synthetic oligonucleotide
agcaccttttcaaatcaaatgcccaccacttttggtgaccacaaacgtgaacgta

SEQ ID NO: 321483 - DNA, 55 bp, Artificial
  Synthetic oligonucleotide
agcacgaactatggcgcaatgtgtggtcgagatcgaatgacggaatggacctagc

SEQ ID NO: 321484 - DNA, 60 bp, Artificial
  Synthetic oligonucleotide
agcacgacacttagtggctggcgtagactgctggtatgtgaactcatagagttcacatag

SEQ ID NO: 321485 - DNA, 57 bp, Artificial
  Synthetic oligonucleotide
agcacgagaacaacctgtaatcgtggactgtaactttgtgattacaacggatcgtta

SEQ ID NO: 321486 - DNA, 60 bp, Artificial
  Synthetic oligonucleotide
agcacgatgatgcatataagagagagatgaaaattagataagggattcatgtaaaacaaa

SEQ ID NO: 321487 - DNA, 60 bp, Artificial
  Synthetic oligonucleotide
agcacgcaagatagccggaggccattacgtgcagatggccatcattaaggtgggggcgct

SEQ ID NO: 321488 - DNA, 50 bp, Artificial
  Synthetic oligonucleotide
agcacgcccgccgtagatgcgagaacgcacagccattcgtacgtggcccc

SEQ ID NO: 321489 - DNA, 59 bp, Artificial
  Synthetic oligonucleotide
agcacgcggctaggcagcaagtacggcgccaacggagcgagctttatcgaattttcttc

SEQ ID NO: 321490 - DNA, 55 bp, Artificial
  Synthetic oligonucleotide
agcacgcgttgtttacgtctcttgaatcgccggtcacgttgtattgcacgtgatc

SEQ ID NO: 321491 - DNA, 54 bp, Artificial
  Synthetic oligonucleotide
agcacggagccttggacactgggagataccagtctggaacggtggcacgcagaa

SEQ ID NO: 321492 - DNA, 60 bp, Artificial
  Synthetic oligonucleotide
agcacggagtctagcaactatgctcaataccgtgtacagggcctaactgtccgctggcgc

SEQ ID NO: 321493 - DNA, 56 bp, Artificial
  Synthetic oligonucleotide
agcacggagtgctcctagaaaggcgcgggccgaggtaccaaagcggcgtgtggacg

SEQ ID NO: 321494 - DNA, 58 bp, Artificial
  Synthetic oligonucleotide
agcacggatgaatacgttactcggacaaacgtcttttattatgcatccagtgaccggc

SEQ ID NO: 321495 - DNA, 51 bp, Artificial
  Synthetic oligonucleotide
agcacggctgtgaggatgccgcactaagagacctctccaagtatgacttgt

SEQ ID NO: 321496 - DNA, 59 bp, Artificial
  Synthetic oligonucleotide
agcacgggcagtcgactagtcgatcggtcgattactcgactagtagaagatagggccga

SEQ ID NO: 321497 - DNA, 55 bp, Artificial
  Synthetic oligonucleotide
agcacgggggactattattaccccccgtgctcgggacgggacatgacgtcagcaa

SEQ ID NO: 321498 - DNA, 51 bp, Artificial
  Synthetic oligonucleotide
agcacgggggactattattaccccccgtgctcgggacgggacatgggcttt

SEQ ID NO: 321499 - DNA, 54 bp, Artificial
  Synthetic oligonucleotide
agcacgggttggcagtcgcgggtgccggacttacagtcgtgaaccgaatccaac

SEQ ID NO: 321500 - DNA, 55 bp, Artificial
  Synthetic oligonucleotide
agcacgtaggtaaagtcatttgtgtgtcggatgttactcgtggtaacgggttgac

SEQ ID NO: 321501 - DNA, 59 bp, Artificial
  Synthetic oligonucleotide
agcacgtagtcaatgggaagtgcgtcttgtttgaaacgtatttgcaaacacatccagag

SEQ ID NO: 321502 - DNA, 60 bp, Artificial
  Synthetic oligonucleotide
agcacgtatagtagcgcgatacatgcgagacgcatgatcaggtcacgagcagtacatccg

SEQ ID NO: 321503 - DNA, 55 bp, Artificial
  Synthetic oligonucleotide
agcacgtcaaaccaacgtttgacgaagccttcactccggtgttttagcctgccta

SEQ ID NO: 321504 - DNA, 60 bp, Artificial
  Synthetic oligonucleotide
agcacgtcaatgaagaacgccaaacagatgaatctgaccaacacactcatgcacggtgac

SEQ ID NO: 321505 - DNA, 60 bp, Artificial
  Synthetic oligonucleotide
agcacgtctgacttcacaggaattgtgaaactgctcaattctcgtcttaaagactgagtc

SEQ ID NO: 321506 - DNA, 55 bp, Artificial
  Synthetic oligonucleotide
agcacgtgaagagcaataccaacctcatttcgatatgccgtatgtcccaataaac

SEQ ID NO: 321507 - DNA, 52 bp, Artificial
  Synthetic oligonucleotide
agcacgtgctagtcgcgtgctagtatttgggtgttgtacgttgtgcattgag

SEQ ID NO: 321508 - DNA, 55 bp, Artificial
  Synthetic oligonucleotide
agcacgtggaattgtccttgtcagggtcacatcgcaccacttttcgtgtggacca

SEQ ID NO: 321509 - DNA, 55 bp, Artificial
  Synthetic oligonucleotide
agcacgttcaatacaacaagcctgtttaacagcacggggaggaacgggacaaatg

SEQ ID NO: 321510 - DNA, 55 bp, Artificial
  Synthetic oligonucleotide
agcacgttcctaggggttacagacgcctcaagagatatgcgcacgtgacaccctc

SEQ ID NO: 321511 - DNA, 50 bp, Artificial
  Synthetic oligonucleotide
agcacgttgccttcgggacatagagctactacgtttatcaactcagtcct

SEQ ID NO: 321512 - DNA, 56 bp, Artificial
  Synthetic oligonucleotide
agcactaatcctagcaataattgtgtggaccatagtttatctagaatataggaaat

SEQ ID NO: 321513 - DNA, 58 bp, Artificial
  Synthetic oligonucleotide
agcactacaccgcccaccgacccttgtggagaggctgaattatatcctcaccggatac

SEQ ID NO: 321514 - DNA, 60 bp, Artificial
  Synthetic oligonucleotide
agcactacaggactcaggaccacaggtcaatatcatagtagattcacaatatgtcatggg

SEQ ID NO: 321515 - DNA, 60 bp, Artificial
  Synthetic oligonucleotide
agcactactccaacgttgcctcggtagtctctatctatgactccagcggctatatcaaga

SEQ ID NO: 321516 - DNA, 54 bp, Artificial
  Synthetic oligonucleotide
agcactagaccttaataccagtgcaggatttccctatgtttccatgggcattag

SEQ ID NO: 321517 - DNA, 50 bp, Artificial
  Synthetic oligonucleotide
agcactagactctgtttactcatggtgatgtaataggtaaacagcgagta

SEQ ID NO: 321518 - DNA, 55 bp, Artificial
  Synthetic oligonucleotide
agcactagagtcttatttggtaagacatccagagatacttgactgtggttctaag

SEQ ID NO: 321519 - DNA, 60 bp, Artificial
  Synthetic oligonucleotide
agcactagagtggtagtggatatgatgcaggggtccgatgatagcgccatgttgtgtagt

SEQ ID NO: 321520 - DNA, 52 bp, Artificial
  Synthetic oligonucleotide
agcactagattattcggaatatgatacccatatgacttggcataactttagg

SEQ ID NO: 321521 - DNA, 58 bp, Artificial
  Synthetic oligonucleotide
agcactagcgacaggggtttgcttgtaccttattgagctatatgtcgagttacctccg

SEQ ID NO: 321522 - DNA, 60 bp, Artificial
  Synthetic oligonucleotide
agcactaggaggatttgccagttgagaattcatttgaaatatctaggccgcgcagcggca

SEQ ID NO: 321523 - DNA, 60 bp, Artificial
  Synthetic oligonucleotide
agcactaggatgccgcattagaatgccgcactaggaatgccgcacacgcacaagaatgtc

SEQ ID NO: 321524 - DNA, 57 bp, Artificial
  Synthetic oligonucleotide
agcactaggcgactccctctatggtgtagcatctttaaacgatttcggtattttggc

SEQ ID NO: 321525 - DNA, 60 bp, Artificial
  Synthetic oligonucleotide
agcactcaagaacatcgcaatcaagagttgccagatagtgtatggtggctgcacctatag

SEQ ID NO: 321526 - DNA, 60 bp, Artificial
  Synthetic oligonucleotide
agcactcaggtggtcaactcatggaacactaccgatgcgacgcagctaatcgttacggct

SEQ ID NO: 321527 - DNA, 57 bp, Artificial
  Synthetic oligonucleotide
agcactcataccaaaggaatggggaagaaaacccgcaacttcacacacatttatgga

SEQ ID NO: 321528 - DNA, 55 bp, Artificial
  Synthetic oligonucleotide
agcactcattgcaatgtacaaacccgtagtaattgtctggctgattaacagtcag

SEQ ID NO: 321529 - DNA, 56 bp, Artificial
  Synthetic oligonucleotide
agcactccaactaaattgtgcacactatccggaagtgcatgctaaagtggatgtgt

SEQ ID NO: 321530 - DNA, 60 bp, Artificial
  Synthetic oligonucleotide
agcactccagacgagcccaaacagtgtgtaactgtagtcgcatctattcggttacccaga

SEQ ID NO: 321531 - DNA, 54 bp, Artificial
  Synthetic oligonucleotide
agcactcccgttgttaacgacaccggctcacagccgtctcaggacaacgtgcgt

SEQ ID NO: 321532 - DNA, 57 bp, Artificial
  Synthetic oligonucleotide
agcactccgagcgacagcgaggagtgcgaccctccccccggtagcaacttcttcgga

SEQ ID NO: 321533 - DNA, 58 bp, Artificial
  Synthetic oligonucleotide
agcactcctgaggaatcggagaacgctcatttaactgacacctacgttccggcgcgct

SEQ ID NO: 321534 - DNA, 55 bp, Artificial
  Synthetic oligonucleotide
agcactcgcaaggctcagatccagaagtaagatatatgtggactaactgtagagg

SEQ ID NO: 321535 - DNA, 55 bp, Artificial
  Synthetic oligonucleotide
agcactgacacctatgttaggcgcaccaatgtttactgtcatgctaactctgacc

SEQ ID NO: 321536 - DNA, 55 bp, Artificial
  Synthetic oligonucleotide
agcactgagtacctgaagatgtcaaccatccagctattcaagactatcacctttg

SEQ ID NO: 321537 - DNA, 50 bp, Artificial
  Synthetic oligonucleotide
agcactgatagggtgcttaatgacctgcgtagtaataataagcggctgtc

SEQ ID NO: 321538 - DNA, 51 bp, Artificial
  Synthetic oligonucleotide
agcactgatggaactcttcgctgtaagactgacttaggtttaatcttagga

SEQ ID NO: 321539 - DNA, 58 bp, Artificial
  Synthetic oligonucleotide
agcactgatggaagggttcgcatacggtgccgttcagctgcttgagccgtcgggtacg

SEQ ID NO: 321540 - DNA, 50 bp, Artificial
  Synthetic oligonucleotide
agcactgcgaaggcgtttcgcactgcacggataaagtatacgctgtcgct

SEQ ID NO: 321541 - DNA, 55 bp, Artificial
  Synthetic oligonucleotide
agcactgcttgacatgaaagcgacgcttctataaattgggcctatcgaaaagaca

SEQ ID NO: 321542 - DNA, 60 bp, Artificial
  Synthetic oligonucleotide
agcactggtaatctagttgcaccagagtatggattcaaaatatcgaaaagaggtagttca

SEQ ID NO: 321543 - DNA, 53 bp, Artificial
  Synthetic oligonucleotide
agcactgttaggaggaagatatgtcctgtggctgatagtgacctacatagttc

SEQ ID NO: 321544 - DNA, 55 bp, Artificial
  Synthetic oligonucleotide
agcactgttgatcctcagaaagatgggtgtccccacttgtatgcactcttgcacg

SEQ ID NO: 321545 - DNA, 54 bp, Artificial
  Synthetic oligonucleotide
agcacttaaacttaaatagaatagcggatttcgtaccgttgcatgtaaacgccc

SEQ ID NO: 321546 - DNA, 56 bp, Artificial
  Synthetic oligonucleotide
agcacttacgcacaagttgcaacggcgaacggaatcagagggctccagtacgccta

SEQ ID NO: 321547 - DNA, 60 bp, Artificial
  Synthetic oligonucleotide
agcacttagccttgtcactgcatttaaggcggggactgcagaagagtgcagacactctaa

SEQ ID NO: 321548 - DNA, 55 bp, Artificial
  Synthetic oligonucleotide
agcacttaggcaagctatactgtgctggggtgagttaatgactctggcctcctgg

SEQ ID NO: 321549 - DNA, 50 bp, Artificial
  Synthetic oligonucleotide
agcacttccccaaaaccgcctctccagcttacacggcatccaacctgcta

SEQ ID NO: 321550 - DNA, 54 bp, Artificial
  Synthetic oligonucleotide
agcacttcctacaggacaacttggtcgacttaggatgcccaaacgttcccctac

SEQ ID NO: 321551 - DNA, 59 bp, Artificial
  Synthetic oligonucleotide
agcacttcgcaagttatacactgacaagggagcggaaacaagtgaattagcacgctacc

SEQ ID NO: 321552 - DNA, 52 bp, Artificial
  Synthetic oligonucleotide
agcacttcgttgtgcgtcctaccgtcggtattcctaccgctccccgttgaag

SEQ ID NO: 321553 - DNA, 58 bp, Artificial
  Synthetic oligonucleotide
agcacttctgtttccccggatctagtatcaatagactgttagcacggttgaaggagaa

SEQ ID NO: 321554 - DNA, 53 bp, Artificial
  Synthetic oligonucleotide
agcacttctgtttccccggtatccttgtatacgcttcacccgaggcgaaaacc

SEQ ID NO: 321555 - DNA, 60 bp, Artificial
  Synthetic oligonucleotide
agcacttgctgcaccagtctcttgttggcaagcaatctccattccagaacgcctacaatg

SEQ ID NO: 321556 - DNA, 55 bp, Artificial
  Synthetic oligonucleotide
agcacttggaggaatgttcctgttatgtggacactgatgtgtactgcatatgtag

SEQ ID NO: 321557 - DNA, 60 bp, Artificial
  Synthetic oligonucleotide
agcacttgtggagatggggcatcttgctccttgggatattaatgattagtagtgctgcag

SEQ ID NO: 321558 - DNA, 54 bp, Artificial
  Synthetic oligonucleotide
agcactttaaagggctcgtcgggagggccgatcctgtgcccttcggggcatgca

SEQ ID NO: 321559 - DNA, 57 bp, Artificial
  Synthetic oligonucleotide
agcactttactaattaaatcacttcataccgattatgcctggacttttgttcctgcg

SEQ ID NO: 321560 - DNA, 55 bp, Artificial
  Synthetic oligonucleotide
agcactttagctggagggaaaatcctgacgtccatagtaggactaaggtaatttc

SEQ ID NO: 321561 - DNA, 50 bp, Artificial
  Synthetic oligonucleotide
agcagaaaagcatttcaagcccccactaccgctgtgtcctttcagaggtt

SEQ ID NO: 321562 - DNA, 53 bp, Artificial
  Synthetic oligonucleotide
agcagaaacaccgcaggcagccacacaaccggtacatacgcgaccggtggctc

SEQ ID NO: 321563 - DNA, 55 bp, Artificial
  Synthetic oligonucleotide
agcagaaactatgccacacactcagacgataccaactacccaggaccctttgggg

SEQ ID NO: 321564 - DNA, 60 bp, Artificial
  Synthetic oligonucleotide
agcagaaagcgagcgagttactgacatcccacggtatcagcgagttatcacaatatgagc

SEQ ID NO: 321565 - DNA, 57 bp, Artificial
  Synthetic oligonucleotide
agcagaaattcacaactttggcatagtgtgtgttcagtgtccctacaccttcccccc

SEQ ID NO: 321566 - DNA, 60 bp, Artificial
  Synthetic oligonucleotide
agcagaaccgtttgattagaaaccaagcaatacgtgaaggctatctcgcagaacgagata

SEQ ID NO: 321567 - DNA, 60 bp, Artificial
  Synthetic oligonucleotide
agcagaactacacaccagggccaggggtcagatatccactgacctttggatggtgctaca

SEQ ID NO: 321568 - DNA, 57 bp, Artificial
  Synthetic oligonucleotide
agcagaactacctgtgggttggcgataacgttgtgcacatcggggctaaacacgttc

SEQ ID NO: 321569 - DNA, 60 bp, Artificial
  Synthetic oligonucleotide
agcagaagaagtgatagcattggtgagtgatcctggaggatttcagagggtgcaacacgt

SEQ ID NO: 321570 - DNA, 59 bp, Artificial
  Synthetic oligonucleotide
agcagaagacagtatgccacagccacgcgttcgtgtggggcggctacgtgcagacacca

SEQ ID NO: 321571 - DNA, 60 bp, Artificial
  Synthetic oligonucleotide
agcagaagacagtggcaatgagagtgatggggatacagaggaattatccttgcttgtgga

SEQ ID NO: 321572 - DNA, 56 bp, Artificial
  Synthetic oligonucleotide
agcagaagcagggggttaataatgtttttctcattactcttggtgttgggcctcac

SEQ ID NO: 321573 - DNA, 58 bp, Artificial
  Synthetic oligonucleotide
agcagaagcgatacgtttgatttgccataatggatacttttattacaagaaacttcca

SEQ ID NO: 321574 - DNA, 60 bp, Artificial
  Synthetic oligonucleotide
agcagaaggctttcatacattattaaaaggacaggcattatacttacatacacagtggac

SEQ ID NO: 321575 - DNA, 60 bp, Artificial
  Synthetic oligonucleotide
agcagaatagagaatcctgcaggaaagaaggcaacttactgatggagtgtggagctccta

SEQ ID NO: 321576 - DNA, 60 bp, Artificial
  Synthetic oligonucleotide
agcagaatagtataaggcagtacatgggtggtgatatagcgcttgcgagtcgggctgtaa

SEQ ID NO: 321577 - DNA, 58 bp, Artificial
  Synthetic oligonucleotide
agcagaatgcatagacagcatagatactgtggatgagttattcgacgaaagtactgac

SEQ ID NO: 321578 - DNA, 58 bp, Artificial
  Synthetic oligonucleotide
agcagacacccaaaagtaagttcagaagtacatatcccattaggggatgctagattag

SEQ ID NO: 321579 - DNA, 55 bp, Artificial
  Synthetic oligonucleotide
agcagacatgactatctatgatcctgataaatacaggttggtgtgggcctgcgca

SEQ ID NO: 321580 - DNA, 60 bp, Artificial
  Synthetic oligonucleotide
agcagacccggccacacgccagatggcaatcaccctggcacaaaagactgtctctaacct

SEQ ID NO: 321581 - DNA, 60 bp, Artificial
  Synthetic oligonucleotide
agcagaccttaaaagcactcaggcagccatcgatcagatcaatgggaaattgaacagagt

SEQ ID NO: 321582 - DNA, 56 bp, Artificial
  Synthetic oligonucleotide
agcagacgaatgataatgataactcggttaaggaatcagctcccaaacctactgta

SEQ ID NO: 321583 - DNA, 55 bp, Artificial
  Synthetic oligonucleotide
agcagacggtaccaacgaaaagaatctagccctacatccaccgccacccggcaac

SEQ ID NO: 321584 - DNA, 60 bp, Artificial
  Synthetic oligonucleotide
agcagactacactcttgatgaagagagtagagcaaggatcaaaaccagactattcaccat

SEQ ID NO: 321585 - DNA, 58 bp, Artificial
  Synthetic oligonucleotide
agcagactatccggttgtcgtccaatccatttcgactgatggcaacgaaaaccctagc

SEQ ID NO: 321586 - DNA, 52 bp, Artificial
  Synthetic oligonucleotide
agcagactcattgtcatcacaaccaactggcagagacttgtccccccagagt

SEQ ID NO: 321587 - DNA, 60 bp, Artificial
  Synthetic oligonucleotide
agcagactgcactgaattcactagggctgtaaatttgatcactgacctttgtaacacctg

SEQ ID NO: 321588 - DNA, 58 bp, Artificial
  Synthetic oligonucleotide
agcagactgccagttggaggtcgggcagtcttaggcccaggtagaaccgtgcctgtac

SEQ ID NO: 321589 - DNA, 60 bp, Artificial
  Synthetic oligonucleotide
agcagactgctgacctcctctagcagatctgccgtcgatctggaattcaccccatatgag

SEQ ID NO: 321590 - DNA, 60 bp, Artificial
  Synthetic oligonucleotide
agcagactgctgtcctcctctagcagatctgccgtctatttggaattctccccattctac

SEQ ID NO: 321591 - DNA, 60 bp, Artificial
  Synthetic oligonucleotide
agcagactggttgagtattgttgtctatcttacatcatttgttgtcccgatacttctaaa

SEQ ID NO: 321592 - DNA, 55 bp, Artificial
  Synthetic oligonucleotide
agcagacttgcgctgttgtggtgcaagttggtccactagagttggtttatccagc

SEQ ID NO: 321593 - DNA, 60 bp, Artificial
  Synthetic oligonucleotide
agcagactttagatgggccatatgcgccagatagctcgaacttgccgtctaactattggt

SEQ ID NO: 321594 - DNA, 60 bp, Artificial
  Synthetic oligonucleotide
agcagactttgcctcacccgagtggattgcagagaacaactaccgcggtccagctccagg

SEQ ID NO: 321595 - DNA, 57 bp, Artificial
  Synthetic oligonucleotide
agcagactttttcttttcatgaggtcactggtgaaagaataagtcaagccttcaaaa

SEQ ID NO: 321596 - DNA, 54 bp, Artificial
  Synthetic oligonucleotide
agcagagaaattacgtcctgtaagtcctttacgaggagatggatgtgcctctcg

SEQ ID NO: 321597 - DNA, 60 bp, Artificial
  Synthetic oligonucleotide
agcagagacaaaagcgaactcattgagagactacgcattagcactcaagagtaagtaccc

SEQ ID NO: 321598 - DNA, 60 bp, Artificial
  Synthetic oligonucleotide
agcagagactgcgggggcgagactggttgtgctcgccactgctactcctccgggctccgt

SEQ ID NO: 321599 - DNA, 52 bp, Artificial
  Synthetic oligonucleotide
agcagagcccgggagccccttctaaagtgaccggggggggtagcttggaaca

SEQ ID NO: 321600 - DNA, 55 bp, Artificial
  Synthetic oligonucleotide
agcagagcggcaagatcctcagtgccgggagtgaggagagaaatgcagatggttt

SEQ ID NO: 321601 - DNA, 52 bp, Artificial
  Synthetic oligonucleotide
agcagagcgtctagtgcgtgcttgctgaaccaaacaaccggatccgcatgtt

SEQ ID NO: 321602 - DNA, 60 bp, Artificial
  Synthetic oligonucleotide
agcagagctgtctgcctcagtgaaacaacacgtgggtcctggtcaatttgtcattaagag

SEQ ID NO: 321603 - DNA, 57 bp, Artificial
  Synthetic oligonucleotide
agcagaggcagcctgctgtcgccccggcccatttcctacttgaaaggctcctcgggg

SEQ ID NO: 321604 - DNA, 60 bp, Artificial
  Synthetic oligonucleotide
agcagaggcgatagactgtgcactcccccaggagtttgtctcctggttcgcgtctaacgc

SEQ ID NO: 321605 - DNA, 57 bp, Artificial
  Synthetic oligonucleotide
agcagaggcgggttgcctaagtcagatgggatgtaaggttagcgctggccaagcatt

SEQ ID NO: 321606 - DNA, 60 bp, Artificial
  Synthetic oligonucleotide
agcagaggtgtctcattgcagagccacagaatacataatgaagggagtgtacatcaatac

SEQ ID NO: 321607 - DNA, 56 bp, Artificial
  Synthetic oligonucleotide
agcagagtgcagccctagtgtaattacatggatgtagtttatggaccacgtttact

SEQ ID NO: 321608 - DNA, 60 bp, Artificial
  Synthetic oligonucleotide
agcagatacagttcgccgcgtcggatggcgctgccgtatttgtggtgatgtcttgggacc

SEQ ID NO: 321609 - DNA, 52 bp, Artificial
  Synthetic oligonucleotide
agcagatacctgggtctgagcgggccaacgggaagggagaacagccacgaag

SEQ ID NO: 321610 - DNA, 60 bp, Artificial
  Synthetic oligonucleotide
agcagatactgggcaataaggaccaagagcggaggaaacaccaaccaacagagagcatct

SEQ ID NO: 321611 - DNA, 59 bp, Artificial
  Synthetic oligonucleotide
agcagatactgggccataaggaccaggagtggaggaaataccaatcaacagaaggcttc

SEQ ID NO: 321612 - DNA, 50 bp, Artificial
  Synthetic oligonucleotide
agcagatatacaagtgaatttgcacgctcgagacggtatgccccacaccg

SEQ ID NO: 321613 - DNA, 55 bp, Artificial
  Synthetic oligonucleotide
agcagatatgcctatctggactggtgttcaagacgggactacgattgaattcttt

SEQ ID NO: 321614 - DNA, 60 bp, Artificial
  Synthetic oligonucleotide
agcagatcaacgggatggaatggcatgatgcaaccgaagaccagttcaagatcctctata

SEQ ID NO: 321615 - DNA, 51 bp, Artificial
  Synthetic oligonucleotide
agcagatcaggtgtgttcaagacaagagttctctgaagtgcagtgtgactg

SEQ ID NO: 321616 - DNA, 50 bp, Artificial
  Synthetic oligonucleotide
agcagatcctcacttacttagttcattctaccaaagtggactaattagct

SEQ ID NO: 321617 - DNA, 60 bp, Artificial
  Synthetic oligonucleotide
agcagatctgccgtcgacctggaattctccccattccaatgtgtctccatccttatcgac

SEQ ID NO: 321618 - DNA, 60 bp, Artificial
  Synthetic oligonucleotide
agcagatctgccgtcgatctggaattcaccccagtcgaggtagtctccgtccttctcgat

SEQ ID NO: 321619 - DNA, 60 bp, Artificial
  Synthetic oligonucleotide
agcagatctgccgtcgatctggaattcaccccatgtgagtgtatccccgtccttatcgac

SEQ ID NO: 321620 - DNA, 60 bp, Artificial
  Synthetic oligonucleotide
agcagatctttcaaggtcgcaatgatcctatgatgatttacttagtttggagacggatcg

SEQ ID NO: 321621 - DNA, 60 bp, Artificial
  Synthetic oligonucleotide
agcagatgctctacagaagattagttgcacggtggatttggcccagattttgcgtgagta

SEQ ID NO: 321622 - DNA, 56 bp, Artificial
  Synthetic oligonucleotide
agcagatggtaaagtcctccacactgtgccaacacatccgaattggactgccaagg

SEQ ID NO: 321623 - DNA, 60 bp, Artificial
  Synthetic oligonucleotide
agcagattacattaactaccacatgaacctgtcaaccacgtctggtagcgcagtaattga

SEQ ID NO: 321624 - DNA, 60 bp, Artificial
  Synthetic oligonucleotide
agcagattagtgaccctaaaggctatctgacttatagtgtgaagtatgaggaccagtttg

SEQ ID NO: 321625 - DNA, 60 bp, Artificial
  Synthetic oligonucleotide
agcagattgctgactcgcagcatcggtctcacagacaaatggcgactaccaccaacccac

SEQ ID NO: 321626 - DNA, 60 bp, Artificial
  Synthetic oligonucleotide
agcagatttgatcaacatgtgggggtagaagcactccaatgggagcactcaatttacaac

SEQ ID NO: 321627 - DNA, 55 bp, Artificial
  Synthetic oligonucleotide
agcagattttcagagaaagatggataatgcatttaggggaacagatgcatttatc

SEQ ID NO: 321628 - DNA, 55 bp, Artificial
  Synthetic oligonucleotide
agcagcaaaattacaacacagctgcgacacctagtggcagacatggtaattaccc

SEQ ID NO: 321629 - DNA, 60 bp, Artificial
  Synthetic oligonucleotide
agcagcaaacccgattggcctaatcgtaacggcagtcgcagcattgactgcaggtcttgt

SEQ ID NO: 321630 - DNA, 55 bp, Artificial
  Synthetic oligonucleotide
agcagcaaatggttccgtgttttacctggagttgactgatttaaggggcgacgta

SEQ ID NO: 321631 - DNA, 60 bp, Artificial
  Synthetic oligonucleotide
agcagcaactccaatcctacttgatggagctatgcctccatggaaaagacacttatcttc

SEQ ID NO: 321632 - DNA, 52 bp, Artificial
  Synthetic oligonucleotide
agcagcacgatttgaaatgcagttatcatacatggtatggatggtgaaccgt

SEQ ID NO: 321633 - DNA, 59 bp, Artificial
  Synthetic oligonucleotide
agcagcactgcgtggcgcaaataataatttgttcggattggatggtaacgttggtacaa

SEQ ID NO: 321634 - DNA, 60 bp, Artificial
  Synthetic oligonucleotide
agcagcagaagccatggaggtcgcaaatcaggctaggaaaatggtgcaggctatgaggac

SEQ ID NO: 321635 - DNA, 57 bp, Artificial
  Synthetic oligonucleotide
agcagcagactccttagagaagaaacctgtgcaatggagagactccaaggtacaagc

SEQ ID NO: 321636 - DNA, 50 bp, Artificial
  Synthetic oligonucleotide
agcagcagtcaacgtgggcaccgctgaccggtaaacatggagcgaacgtt

SEQ ID NO: 321637 - DNA, 60 bp, Artificial
  Synthetic oligonucleotide
agcagcagtgaaaggagttggaacaatggtgatggaactaattcggatgatcaagcgtgg

SEQ ID NO: 321638 - DNA, 55 bp, Artificial
  Synthetic oligonucleotide
agcagcagttacctggtggaatacatatggaccaataggagatactgaaggtttc

SEQ ID NO: 321639 - DNA, 60 bp, Artificial
  Synthetic oligonucleotide
agcagcatctttagtacttgctcgcaaacacactaactgttgtacttggtctgagcgcat

SEQ ID NO: 321640 - DNA, 55 bp, Artificial
  Synthetic oligonucleotide
agcagcattctgatatatcaactgtcggtgacagaggctagtacacgactgaatt

SEQ ID NO: 321641 - DNA, 55 bp, Artificial
  Synthetic oligonucleotide
agcagcattgagaaatgttcagaatcgtttatttggcttggatggaaacgtcgga

SEQ ID NO: 321642 - DNA, 55 bp, Artificial
  Synthetic oligonucleotide
agcagccactcctctcgtctcgggccctaccactgcttgaagtagggaaccgggt

SEQ ID NO: 321643 - DNA, 59 bp, Artificial
  Synthetic oligonucleotide
agcagccagacagacatgttttgcgagcctaggaatcttggccttgtccccagttaaac

SEQ ID NO: 321644 - DNA, 60 bp, Artificial
  Synthetic oligonucleotide
agcagccaggtcagccaaaattaccctatagtgcagaacatccaggggcaaatggtacat

SEQ ID NO: 321645 - DNA, 56 bp, Artificial
  Synthetic oligonucleotide
agcagcccactctgacgtccgtgagtccttagggaggtttatccctaccatcgggc

SEQ ID NO: 321646 - DNA, 55 bp, Artificial
  Synthetic oligonucleotide
agcagccgcagtttaggtcaatgcgtcttcggcgaattaccttccgtttggctgc

SEQ ID NO: 321647 - DNA, 55 bp, Artificial
  Synthetic oligonucleotide
agcagccgcattcgaggtctaccctcctacgtctgagggccctagtcttcgcggt

SEQ ID NO: 321648 - DNA, 57 bp, Artificial
  Synthetic oligonucleotide
agcagccgcgttaggcaacgacccgaatttcgcagcgacggtggccgatcaaatcgg

SEQ ID NO: 321649 - DNA, 58 bp, Artificial
  Synthetic oligonucleotide
agcagccggaggccagaaacttggcgcagccgtgaaagcacgcagtcgttatattagc

SEQ ID NO: 321650 - DNA, 60 bp, Artificial
  Synthetic oligonucleotide
agcagcctagcacgccgtcacatggcccgagagatacatccggagtactacaaagactgc

SEQ ID NO: 321651 - DNA, 60 bp, Artificial
  Synthetic oligonucleotide
agcagcctctaggcaatcaaaagtggactccagaccctgactcctggcttttagatgacc

SEQ ID NO: 321652 - DNA, 60 bp, Artificial
  Synthetic oligonucleotide
agcagcgaattcaatagcgaatttagcgctgatcaaaacagtcttatcacgtatttctaa

SEQ ID NO: 321653 - DNA, 55 bp, Artificial
  Synthetic oligonucleotide
agcagcgaccaaacaacccaggcagcagacccaagctcccaaccacaccatacac

SEQ ID NO: 321654 - DNA, 59 bp, Artificial
  Synthetic oligonucleotide
agcagcgcccttatcaacaagggcagcaatcggacaagtgtgccaatccgttgcagact

SEQ ID NO: 321655 - DNA, 55 bp, Artificial
  Synthetic oligonucleotide
agcagcgcgttcactccacgttgcagcagctaattatataaggatatttgaccgc

SEQ ID NO: 321656 - DNA, 60 bp, Artificial
  Synthetic oligonucleotide
agcagcggctacaggcgtagatcatcaagcaaccgcaggacctatagacgatcgagcggc

SEQ ID NO: 321657 - DNA, 58 bp, Artificial
  Synthetic oligonucleotide
agcagcgtgtttagcgtagtgcggtcgcaggcgattccgcgaagaaagccatccttgc

SEQ ID NO: 321658 - DNA, 60 bp, Artificial
  Synthetic oligonucleotide
agcagctaacgattgctttaaaaccataattgcatcaatgttgagtcaacgaactatgtc

SEQ ID NO: 321659 - DNA, 60 bp, Artificial
  Synthetic oligonucleotide
agcagctaatgactgctttaaaacactgattgcagctatgctgagtcagcggactatgtc

SEQ ID NO: 321660 - DNA, 58 bp, Artificial
  Synthetic oligonucleotide
agcagctacaaatgatgactgtgcctggctggaagcacaaacagaggaggaggttgga

SEQ ID NO: 321661 - DNA, 60 bp, Artificial
  Synthetic oligonucleotide
agcagctagaatggggacccatgcaaccatgaaaattcaagggcgcactgttggaggtca

SEQ ID NO: 321662 - DNA, 60 bp, Artificial
  Synthetic oligonucleotide
agcagctatcaactacattaagcatagatacgggactgatgatgcggcgtttaatcgggt

SEQ ID NO: 321663 - DNA, 60 bp, Artificial
  Synthetic oligonucleotide
agcagctatgaacctagatcacttgttggtctacaacccagagcaagttgacttggctaa

SEQ ID NO: 321664 - DNA, 55 bp, Artificial
  Synthetic oligonucleotide
agcagctcccgccacacgcaaagaggcaatgcttgggacacatgtggtgtgggat

SEQ ID NO: 321665 - DNA, 55 bp, Artificial
  Synthetic oligonucleotide
agcagctctgttatcacatctctaggagctattgtgtcatgctatggcaaaacca

SEQ ID NO: 321666 - DNA, 60 bp, Artificial
  Synthetic oligonucleotide
agcagctgaacaaaggttgctcctatataaccaaccaagatgcagacacagtgacaatag

SEQ ID NO: 321667 - DNA, 59 bp, Artificial
  Synthetic oligonucleotide
agcagctgatcggagggcctatgccggaacactgggaggaggcctggttagggagctac

SEQ ID NO: 321668 - DNA, 55 bp, Artificial
  Synthetic oligonucleotide
agcagctgtaagggtgagtaacaccggaagccttgggagggctcctgcaccgctg

SEQ ID NO: 321669 - DNA, 58 bp, Artificial
  Synthetic oligonucleotide
agcagcttagtgattttctcaggtaggccttaggtctgaaatctatttgccttacaaa

SEQ ID NO: 321670 - DNA, 59 bp, Artificial
  Synthetic oligonucleotide
agcagctttactgcgaaaaccactttaaggtgacattgatactggtactcacgcactgg

SEQ ID NO: 321671 - DNA, 58 bp, Artificial
  Synthetic oligonucleotide
agcagctttgatataaaatggggggcaagtggtcaaaaagcagcaaaactgaatggcc

SEQ ID NO: 321672 - DNA, 58 bp, Artificial
  Synthetic oligonucleotide
agcaggaaagtccgcgaaatgtgccatgcacgtgacgaacttatctgtcttcgaatgc

SEQ ID NO: 321673 - DNA, 54 bp, Artificial
  Synthetic oligonucleotide
agcaggacataataataaggtaggatctctacaatacttagcactgacagcact

SEQ ID NO: 321674 - DNA, 55 bp, Artificial
  Synthetic oligonucleotide
agcaggacctatactcgcccgtctccctacggtgcagaccagtgccaaggggttt

SEQ ID NO: 321675 - DNA, 58 bp, Artificial
  Synthetic oligonucleotide
agcaggagacctggcagtcgaagtctctccaggttgctggataatcgacaataacatt

SEQ ID NO: 321676 - DNA, 60 bp, Artificial
  Synthetic oligonucleotide
agcaggagcagaatcattcaacacttctagggaggcagcaaatgacttaagaagacatgg

SEQ ID NO: 321677 - DNA, 55 bp, Artificial
  Synthetic oligonucleotide
agcaggagctactagtaccctgcaggaacagataagatggatgaccagcaaccca

SEQ ID NO: 321678 - DNA, 55 bp, Artificial
  Synthetic oligonucleotide
agcaggagtggataggttctataggacctgcaaactggttggggtcaatatgagc

SEQ ID NO: 321679 - DNA, 60 bp, Artificial
  Synthetic oligonucleotide
agcaggatatcctgagagggagaatgagcttagacaaaccggattaccacaagaaattga

SEQ ID NO: 321680 - DNA, 55 bp, Artificial
  Synthetic oligonucleotide
agcaggatctgagagatcgcttgcaggttttacacaagttcactggtacggttac

SEQ ID NO: 321681 - DNA, 60 bp, Artificial
  Synthetic oligonucleotide
agcaggatgctatggcaggtgtggttgctcaagctgtaagagatttgccagtagcacatg

SEQ ID NO: 321682 - DNA, 59 bp, Artificial
  Synthetic oligonucleotide
agcaggatggtggaagaatagtacagaatggcaaattatggaaatagaaggatctaatc

SEQ ID NO: 321683 - DNA, 58 bp, Artificial
  Synthetic oligonucleotide
agcaggcacggactcaaaccgctctgccccaaagcaaccattggcctccaatttcctg

SEQ ID NO: 321684 - DNA, 60 bp, Artificial
  Synthetic oligonucleotide
agcaggcacttcagaggatgtttgtcatactgctacaaggacaggaagtctgccaaatcc

SEQ ID NO: 321685 - DNA, 60 bp, Artificial
  Synthetic oligonucleotide
agcaggccgtggagtcgttagcaatccgcccaataggggtacaggatgcttggcttagca

SEQ ID NO: 321686 - DNA, 60 bp, Artificial
  Synthetic oligonucleotide
agcaggcgctcggtgagtcatctcccgtctgactgcagtgacgaggtacagctatggagt

SEQ ID NO: 321687 - DNA, 59 bp, Artificial
  Synthetic oligonucleotide
agcaggcgcttaagtgggaacacgggatatacaatggaatcttcggtgacagcgagttg

SEQ ID NO: 321688 - DNA, 60 bp, Artificial
  Synthetic oligonucleotide
agcaggcgcttaagtgggaacacgggatatacaatggcatatttggcgacactgaattgg

SEQ ID NO: 321689 - DNA, 50 bp, Artificial
  Synthetic oligonucleotide
agcaggcgttaagttggcggaacttcgattaaacgaccgtaactttaaag

SEQ ID NO: 321690 - DNA, 55 bp, Artificial
  Synthetic oligonucleotide
agcaggctattatagagttcgatgaatggtatagactgcatgtactatgcaggaa

SEQ ID NO: 321691 - DNA, 51 bp, Artificial
  Synthetic oligonucleotide
agcaggctctagttaggaagtttatgaagattaacaaccatgtaacttaca

SEQ ID NO: 321692 - DNA, 60 bp, Artificial
  Synthetic oligonucleotide
agcaggcttgtagaacttctcgcctgctgtcataatgtatatgaccgcgtttgcctcgaa

SEQ ID NO: 321693 - DNA, 59 bp, Artificial
  Synthetic oligonucleotide
agcagggaccattagcggagttggtgagtgcaatcaaagacgaggagctaagtcgggga

SEQ ID NO: 321694 - DNA, 58 bp, Artificial
  Synthetic oligonucleotide
agcagggacggtaggagtagtccaaacgtccaagatgtcattgtcaatgggaccaaca

SEQ ID NO: 321695 - DNA, 56 bp, Artificial
  Synthetic oligonucleotide
agcagggagactagtcaatccggaggggattaaacaacagattttgcgagtcggta

SEQ ID NO: 321696 - DNA, 56 bp, Artificial
  Synthetic oligonucleotide
agcagggcctctgcttgggttaacaggcccatgtataggaagccgcgtatttaccg

SEQ ID NO: 321697 - DNA, 59 bp, Artificial
  Synthetic oligonucleotide
agcaggggagaatggattattattgggctgtcctaaagccagggcaaacagtgaagata

SEQ ID NO: 321698 - DNA, 54 bp, Artificial
  Synthetic oligonucleotide
agcaggggggcttattattaccccccctgctcggggcgggacattctgtgatgg

SEQ ID NO: 321699 - DNA, 53 bp, Artificial
  Synthetic oligonucleotide
agcaggggggcttattattaccccccctgctgggacgggacatccgaatagta

SEQ ID NO: 321700 - DNA, 54 bp, Artificial
  Synthetic oligonucleotide
agcagggtataactccaaattacgtgggtgatttaaacctagatgatcagttca

SEQ ID NO: 321701 - DNA, 60 bp, Artificial
  Synthetic oligonucleotide
agcaggtaagacgcataagaaagcgcctagcgtactatctaaggagctacatgagtttgt

SEQ ID NO: 321702 - DNA, 60 bp, Artificial
  Synthetic oligonucleotide
agcaggtacagtgtatctgttatctttcattagtgcatgcccagattttaaactcagatt

SEQ ID NO: 321703 - DNA, 57 bp, Artificial
  Synthetic oligonucleotide
agcaggtacattcacttggaccttgtcagactcttcaggagtggaaaaccctggtgg

SEQ ID NO: 321704 - DNA, 60 bp, Artificial
  Synthetic oligonucleotide
agcaggtaggagtaagcagcatgtaggcttctggactaacctgatagatgttggggttga

SEQ ID NO: 321705 - DNA, 59 bp, Artificial
  Synthetic oligonucleotide
agcaggtatgaactggaccgagttgcttaataattattcagtatctagagaagataact

SEQ ID NO: 321706 - DNA, 59 bp, Artificial
  Synthetic oligonucleotide
agcaggtcctacatcaagttgagacgactgcgtttcaaaggaactgtgaagattgaacg

SEQ ID NO: 321707 - DNA, 57 bp, Artificial
  Synthetic oligonucleotide
agcaggtgagaattacccctacctggtcgcttaccaagccacggtctgcgccagagc

SEQ ID NO: 321708 - DNA, 51 bp, Artificial
  Synthetic oligonucleotide
agcaggtgccagttacatcacaacagtttttgaagcagccaagcagtttag

SEQ ID NO: 321709 - DNA, 53 bp, Artificial
  Synthetic oligonucleotide
agcaggttaaccatggtcgggtcgtcctttcgaggtgaggggtaggccagccc

SEQ ID NO: 321710 - DNA, 60 bp, Artificial
  Synthetic oligonucleotide
agcagtaataggtcttcagctgaagatcttagtatcaagataccaggtactagaatagtc

SEQ ID NO: 321711 - DNA, 52 bp, Artificial
  Synthetic oligonucleotide
agcagtaccgcctatccatcaccaaccaggtcacgggggtcacgacttccgt

SEQ ID NO: 321712 - DNA, 60 bp, Artificial
  Synthetic oligonucleotide
agcagtagcgtagcgtcgcagcaacatctgtcggggcatcttagtgacgaaagtgcgtca

SEQ ID NO: 321713 - DNA, 53 bp, Artificial
  Synthetic oligonucleotide
agcagtatatggaaggtgctcgtgaaacggcaagtggagttagtagcagctct

SEQ ID NO: 321714 - DNA, 52 bp, Artificial
  Synthetic oligonucleotide
agcagtatgaccctgagaataacctcattcttcctatacaagagatcaacac

SEQ ID NO: 321715 - DNA, 58 bp, Artificial
  Synthetic oligonucleotide
agcagtcaacgcgtaccgaaacagttgtacaaagattatccagtaattatagatgtcg

SEQ ID NO: 321716 - DNA, 60 bp, Artificial
  Synthetic oligonucleotide
agcagtcaattgctgaagcaataattgtggccatggtattttcacaagaggattgcatga

SEQ ID NO: 321717 - DNA, 55 bp, Artificial
  Synthetic oligonucleotide
agcagtcacccacggtgccagtgcccaggcgtcgttctccgaacccgcaatagaa

SEQ ID NO: 321718 - DNA, 55 bp, Artificial
  Synthetic oligonucleotide
agcagtcccccttgtgcctactggcggtggaatcaggacttaccaaattgggact

SEQ ID NO: 321719 - DNA, 51 bp, Artificial
  Synthetic oligonucleotide
agcagtcggatctatttctgacattcgtattgttaacagaggtggtttcta

SEQ ID NO: 321720 - DNA, 58 bp, Artificial
  Synthetic oligonucleotide
agcagtcgtctcatcggaaaacttcccaagttcattctgaagaactcgcgggaagctg

SEQ ID NO: 321721 - DNA, 59 bp, Artificial
  Synthetic oligonucleotide
agcagtctagttttggtagggctgatcttggcaatgggtgtttggatgtgttcaaatgg

SEQ ID NO: 321722 - DNA, 60 bp, Artificial
  Synthetic oligonucleotide
agcagtctcaagcacttgtggatattctagtcggcgtgattgtcttttgccagattagct

SEQ ID NO: 321723 - DNA, 60 bp, Artificial
  Synthetic oligonucleotide
agcagtctcactgtgacccagctcctgaggcgactacaccagtggataagctcggagtgc

SEQ ID NO: 321724 - DNA, 60 bp, Artificial
  Synthetic oligonucleotide
agcagtctccgttccaaaatgcctacaatgtcaagggcaacgctacaagtgccaacatca

SEQ ID NO: 321725 - DNA, 60 bp, Artificial
  Synthetic oligonucleotide
agcagtctctcgagacctaggaaagcatggagcaatcacaagtagcaacacagcagctaa

SEQ ID NO: 321726 - DNA, 55 bp, Artificial
  Synthetic oligonucleotide
agcagtctgcgggcctcctctcgctgatctgccgtcgatctggaattctccccat

SEQ ID NO: 321727 - DNA, 60 bp, Artificial
  Synthetic oligonucleotide
agcagtgaagatcatcaaaatcctatatcaaagcagtaagtagtaataaacagtatatgt

SEQ ID NO: 321728 - DNA, 60 bp, Artificial
  Synthetic oligonucleotide
agcagtgatgctctcccctgtgcgtgaatccatagttgcgacagttgacgtggaagtagt

SEQ ID NO: 321729 - DNA, 60 bp, Artificial
  Synthetic oligonucleotide
agcagtgatgggttcccctgtgcgtgaatccatggtttctgcagttgatgtgtacgtaaa

SEQ ID NO: 321730 - DNA, 56 bp, Artificial
  Synthetic oligonucleotide
agcagtgcagtgtactagacatatgcctgccacaatctctagccattttggcttca

SEQ ID NO: 321731 - DNA, 60 bp, Artificial
  Synthetic oligonucleotide
agcagtggagagctgatacttacgcaagaacagtcattaactcgacttcttggcgtgtct

SEQ ID NO: 321732 - DNA, 60 bp, Artificial
  Synthetic oligonucleotide
agcagtggagttgtaggaggatgaggattggtgtactcctccacggtatcagggaatagc

SEQ ID NO: 321733 - DNA, 60 bp, Artificial
  Synthetic oligonucleotide
agcagtgtatacattgaggtgttgcatctgactcagggaacgtgctgggaacaaatgtac

SEQ ID NO: 321734 - DNA, 60 bp, Artificial
  Synthetic oligonucleotide
agcagtgtctcactccttacaagattatagtggcctgcaattgtggtacacggcttcgtc

SEQ ID NO: 321735 - DNA, 57 bp, Artificial
  Synthetic oligonucleotide
agcagtgtgtcgtaacgggcaactctgcagcggaaccgactactttgggtgtccgtg

SEQ ID NO: 321736 - DNA, 57 bp, Artificial
  Synthetic oligonucleotide
agcagttacgcaaaatgagggttgacttagagtccccacaagccctctcggtcatgg

SEQ ID NO: 321737 - DNA, 57 bp, Artificial
  Synthetic oligonucleotide
agcagttactcctgtaattagtggtcctgatatggttcaagtttctatgaacgcggg

SEQ ID NO: 321738 - DNA, 55 bp, Artificial
  Synthetic oligonucleotide
agcagttataagagtcggtaatcttgtcggtggactataccagtcctcgcacggc

SEQ ID NO: 321739 - DNA, 55 bp, Artificial
  Synthetic oligonucleotide
agcagttatacaagttggcggctcagaagtgctagatattacagcggatccaacc

SEQ ID NO: 321740 - DNA, 60 bp, Artificial
  Synthetic oligonucleotide
agcagttatcgaatgatgacctgattcggcaattaataactgagcttgcagacacgaaca

SEQ ID NO: 321741 - DNA, 52 bp, Artificial
  Synthetic oligonucleotide
agcagttcaaagacttggtatactggaaagtgttacaagcaattagtgggac

SEQ ID NO: 321742 - DNA, 55 bp, Artificial
  Synthetic oligonucleotide
agcagttcgaggtgatctgaacttcgtaaatagagcgaatcaacgactaaatccc

SEQ ID NO: 321743 - DNA, 57 bp, Artificial
  Synthetic oligonucleotide
agcagttctattggaaggatgcttgttccgcacggccggaagagcttggttgggagg

SEQ ID NO: 321744 - DNA, 55 bp, Artificial
  Synthetic oligonucleotide
agcagttcttggactagctttagtacctgcaagaaaacagctgtagcgaccacac

SEQ ID NO: 321745 - DNA, 56 bp, Artificial
  Synthetic oligonucleotide
agcagttggggaatgcggactcagccttacaggaggcctccccgtaaagcaggaat

SEQ ID NO: 321746 - DNA, 55 bp, Artificial
  Synthetic oligonucleotide
agcagttggtcaggagataaaactagatatcgctactcaacatcagctaaataga

SEQ ID NO: 321747 - DNA, 55 bp, Artificial
  Synthetic oligonucleotide
agcagtttcttctgactcatatgggttgttctgaagccacatgggagaatgttcg

SEQ ID NO: 321748 - DNA, 51 bp, Artificial
  Synthetic oligonucleotide
agcagttttggttacaccccctctaggtatgtctctggaggcatgctatgt

SEQ ID NO: 321749 - DNA, 55 bp, Artificial
  Synthetic oligonucleotide
agcataaaaaacagaccaggcagaaaacactatgtaaagattaaagtgggagccc

SEQ ID NO: 321750 - DNA, 55 bp, Artificial
  Synthetic oligonucleotide
agcataaacacccacatgcatgaagtgcatagcactctcttatggattgcctact

SEQ ID NO: 321751 - DNA, 55 bp, Artificial
  Synthetic oligonucleotide
agcataaatggcaagatggagtcgaagtagataacagggaatggaaaagagtcaa

SEQ ID NO: 321752 - DNA, 52 bp, Artificial
  Synthetic oligonucleotide
agcataacctcatgaggtagctctaattttgtactctcctgtgagtctgcag

SEQ ID NO: 321753 - DNA, 60 bp, Artificial
  Synthetic oligonucleotide
agcataacggtagatctgggtaacgcgaaatcatcataatcatataaaggcgcacggccc

SEQ ID NO: 321754 - DNA, 55 bp, Artificial
  Synthetic oligonucleotide
agcataagaccacctaggtcaaattcggtaaggaatccaagggaggtccaaatca

SEQ ID NO: 321755 - DNA, 55 bp, Artificial
  Synthetic oligonucleotide
agcataagtcagcaaatagggtccatggtcaacacgagcgtcaaaattccaggcg

SEQ ID NO: 321756 - DNA, 55 bp, Artificial
  Synthetic oligonucleotide
agcataatcacggcccagggcaaatcaacagagaacttcggaaggagcgcaatac

SEQ ID NO: 321757 - DNA, 60 bp, Artificial
  Synthetic oligonucleotide
agcatacaagacgatgcttgtgcatttcttgtggtggaatcagtatttcatagcacggag

SEQ ID NO: 321758 - DNA, 60 bp, Artificial
  Synthetic oligonucleotide
agcatacattgagatgagaaattccgagaggccgtatatgcctaggtacggactacttcg

SEQ ID NO: 321759 - DNA, 51 bp, Artificial
  Synthetic oligonucleotide
agcatacctggtaggattgaggatatgagtgcgctggcagggagttatgac

SEQ ID NO: 321760 - DNA, 53 bp, Artificial
  Synthetic oligonucleotide
agcatacgtctcacagacagatggtgactaccaccaaccccttaatcaggcat

SEQ ID NO: 321761 - DNA, 60 bp, Artificial
  Synthetic oligonucleotide
agcatacgtgtcatcaactttagcgcaagtatcgatgaacgcgggtgcacgcggagacat

SEQ ID NO: 321762 - DNA, 60 bp, Artificial
  Synthetic oligonucleotide
agcatagagcgatgatacagcatgttctagatggcgctataatagagaacggtaatatag

SEQ ID NO: 321763 - DNA, 55 bp, Artificial
  Synthetic oligonucleotide
agcatagatacgggactgatgatgcggcgtttaatcgggttgcggcgtacggata

SEQ ID NO: 321764 - DNA, 56 bp, Artificial
  Synthetic oligonucleotide
agcatagcactccttgcatcgagcctaggtaggataaaaccccctaccgggtcact

SEQ ID NO: 321765 - DNA, 60 bp, Artificial
  Synthetic oligonucleotide
agcatagccaacagcccctactactgcgactactccagcaagtggtaaaagaacactaga

SEQ ID NO: 321766 - DNA, 60 bp, Artificial
  Synthetic oligonucleotide
agcataggctcgaggccgcatgcaactggactcgaggagagcgttgtgacttggaggaca

SEQ ID NO: 321767 - DNA, 57 bp, Artificial
  Synthetic oligonucleotide
agcatataatggccccctccctcaaccaaggggctactgcaagataggacttaagaa

SEQ ID NO: 321768 - DNA, 55 bp, Artificial
  Synthetic oligonucleotide
agcatatacagcttgcatgatgatctgaattgttggtccgcaggtaccataaacc

SEQ ID NO: 321769 - DNA, 54 bp, Artificial
  Synthetic oligonucleotide
agcatataccacttcactgtcatgaagtccgaatgaacgagctaaagatagcat

SEQ ID NO: 321770 - DNA, 53 bp, Artificial
  Synthetic oligonucleotide
agcatatcaatactctcaaccatgtcttcacgccggaactctctcacggttga

SEQ ID NO: 321771 - DNA, 60 bp, Artificial
  Synthetic oligonucleotide
agcatatctgagaaggtgttccgctgtggctgccagcctggtaacaggtgccccagtgtg

SEQ ID NO: 321772 - DNA, 55 bp, Artificial
  Synthetic oligonucleotide
agcatatgatgaagaggcccataatgtttgggccccacatgcctgtgtacccaca

SEQ ID NO: 321773 - DNA, 60 bp, Artificial
  Synthetic oligonucleotide
agcatatggcgacgattggagtgctagcgacgccagagattcctttcacaacggaggctg

SEQ ID NO: 321774 - DNA, 59 bp, Artificial
  Synthetic oligonucleotide
agcatatgtcaagtcctttgagaagttcacttacgcgaaaccgcgagactcgattaagc

SEQ ID NO: 321775 - DNA, 60 bp, Artificial
  Synthetic oligonucleotide
agcatatgtgccaccgttatgatcagaagctagcagcatttcagaatggttctctctctg

SEQ ID NO: 321776 - DNA, 52 bp, Artificial
  Synthetic oligonucleotide
agcatatgttaaagaccaaaaatatgccgccgtaaccccggttcaacagatg

SEQ ID NO: 321777 - DNA, 60 bp, Artificial
  Synthetic oligonucleotide
agcatatgttgcaactcacggtctggggcattaagcagctccagacaagagtcctggcta

SEQ ID NO: 321778 - DNA, 50 bp, Artificial
  Synthetic oligonucleotide
agcatattccagagcctctgatgtatctacagtattaatatgatctggcc

SEQ ID NO: 321779 - DNA, 57 bp, Artificial
  Synthetic oligonucleotide
agcatattcgcgttcacaatgtatttacaggggaagacaacacgtattgacccggct

SEQ ID NO: 321780 - DNA, 52 bp, Artificial
  Synthetic oligonucleotide
agcatcaacgtaattagcgtgaatgtacgtcgagtcattggcagcggtggaa

SEQ ID NO: 321781 - DNA, 60 bp, Artificial
  Synthetic oligonucleotide
agcatcaatgaactgagtaaccttgcaaaaggagaaaaggctaatgtgctaattgggcaa

SEQ ID NO: 321782 - DNA, 60 bp, Artificial
  Synthetic oligonucleotide
agcatcaattaaacagactggggtcggcaatgtacaaggcggatcatgagcgtgagaccg

SEQ ID NO: 321783 - DNA, 51 bp, Artificial
  Synthetic oligonucleotide
agcatcacgcgagggcaattgatcgtgccttcatttcgctctttcggccct

SEQ ID NO: 321784 - DNA, 57 bp, Artificial
  Synthetic oligonucleotide
agcatcacttaaaacaaccagtgccctagtgcaccaagtgatggaaaaaactaggga

SEQ ID NO: 321785 - DNA, 53 bp, Artificial
  Synthetic oligonucleotide
agcatcacttggggaagttgtcaggtttatatcaaatgaagggttgtaccttt

SEQ ID NO: 321786 - DNA, 60 bp, Artificial
  Synthetic oligonucleotide
agcatcatctagccgtttcacaaactggggttcagttagcctctcactggacgcagaggg

SEQ ID NO: 321787 - DNA, 60 bp, Artificial
  Synthetic oligonucleotide
agcatccagagaccaagtagtcaattatgttaacactaacatgggactaaagattagaca

SEQ ID NO: 321788 - DNA, 57 bp, Artificial
  Synthetic oligonucleotide
agcatccagagacctggtagttaattatgttaacactaacatggggctgaagatcag

SEQ ID NO: 321789 - DNA, 60 bp, Artificial
  Synthetic oligonucleotide
agcatccccgcgaacaaccaagtagtgccatgtgaaccaatcataatagagaggaacata

SEQ ID NO: 321790 - DNA, 60 bp, Artificial
  Synthetic oligonucleotide
agcatccccgcgaagaaccaagtggtgccatgtgagccaaccacagcagagaggcccaaa

SEQ ID NO: 321791 - DNA, 57 bp, Artificial
  Synthetic oligonucleotide
agcatccctgagcaactcctggcggactggataacgacccgcaaggcaaagcgtgcc

SEQ ID NO: 321792 - DNA, 55 bp, Artificial
  Synthetic oligonucleotide
agcatccctttgtacatctcgtgacccggcagaggttcctccacgtacccgaggc

SEQ ID NO: 321793 - DNA, 55 bp, Artificial
  Synthetic oligonucleotide
agcatccgcaggttgatctgaacatcaaaggttgggacgggctgacggcttacga

SEQ ID NO: 321794 - DNA, 60 bp, Artificial
  Synthetic oligonucleotide
agcatccggagatagactcatcgtctccaattccactgaccagcccataggtcttttcgg

SEQ ID NO: 321795 - DNA, 58 bp, Artificial
  Synthetic oligonucleotide
agcatcgagtgcggttaaagccctgtcaactgtgttaagaaatttcaagtaagtgtca

SEQ ID NO: 321796 - DNA, 60 bp, Artificial
  Synthetic oligonucleotide
agcatcgatctcacagacaaatggctactaccaccaacccactaatcaggcatgaaaaca

SEQ ID NO: 321797 - DNA, 60 bp, Artificial
  Synthetic oligonucleotide
agcatcgcacagctgcttgacatcaccctaccagttggcccacctggtgaggatgacaag

SEQ ID NO: 321798 - DNA, 60 bp, Artificial
  Synthetic oligonucleotide
agcatcgcacccataatgttctcaaacaaaatggcgagactagggaaaggatacatgttc

SEQ ID NO: 321799 - DNA, 51 bp, Artificial
  Synthetic oligonucleotide
agcatcgcatacgacgaataaattatacccgttgtcgttgaagcaccgata

SEQ ID NO: 321800 - DNA, 60 bp, Artificial
  Synthetic oligonucleotide
agcatcggtctcacagacagatggtgaccactaccaacccactaatcaggcatgaaaaca

SEQ ID NO: 321801 - DNA, 60 bp, Artificial
  Synthetic oligonucleotide
agcatcgtcaatatctagaggatcaactattaggtcaattggctcttcagcatctgcatg

SEQ ID NO: 321802 - DNA, 53 bp, Artificial
  Synthetic oligonucleotide
agcatcgtgggattaggtgtgagaagtgtgaaacgaagacgctgtttttaagt

SEQ ID NO: 321803 - DNA, 57 bp, Artificial
  Synthetic oligonucleotide
agcatcgtggttgttggtcctccttggtgatgtactcccaagctcgcttgggggcgt

SEQ ID NO: 321804 - DNA, 59 bp, Artificial
  Synthetic oligonucleotide
agcatcgttcactcttaatagatctcaaccacaacatgataatctaatgggcactatgt

SEQ ID NO: 321805 - DNA, 60 bp, Artificial
  Synthetic oligonucleotide
agcatctaaattgatctggttctcttcaaaacttgctggctgggacgtgtgtcttgcgac

SEQ ID NO: 321806 - DNA, 56 bp, Artificial
  Synthetic oligonucleotide
agcatctagggaactagtagtcaattatgttaataacaacacgggtctaaaaatca

SEQ ID NO: 321807 - DNA, 60 bp, Artificial
  Synthetic oligonucleotide
agcatctagggacctagtagtcagttatgtcaacactaatatgggcctaaagttcagaca

SEQ ID NO: 321808 - DNA, 60 bp, Artificial
  Synthetic oligonucleotide
agcatctcaagagcaactggatgggacaggaactcgtgtagcaatatgacgtcaagtgac

SEQ ID NO: 321809 - DNA, 58 bp, Artificial
  Synthetic oligonucleotide
agcatcttaacaattttactactgtcgacgctcgcggatgtttattcggtgttgagac

SEQ ID NO: 321810 - DNA, 55 bp, Artificial
  Synthetic oligonucleotide
agcatcttgccgagggcgataagcccgcccatgataagcagcgcccagaagccct

SEQ ID NO: 321811 - DNA, 57 bp, Artificial
  Synthetic oligonucleotide
agcatctttcgtagtaggattaagcggaagtttgtcaatagcgtcacttgcaaactg

SEQ ID NO: 321812 - DNA, 60 bp, Artificial
  Synthetic oligonucleotide
agcatgaagatgggacgaatcaacaactagaactgagagcaatagaagaggcatgcaaga

SEQ ID NO: 321813 - DNA, 55 bp, Artificial
  Synthetic oligonucleotide
agcatgaccaggtgctatccccgtgggagcaacgcctagccgccaagcaagcgtt

SEQ ID NO: 321814 - DNA, 60 bp, Artificial
  Synthetic oligonucleotide
agcatgaccccacgcttctgcccgcgtccatagccaagagactgcggttccgacacaatg

SEQ ID NO: 321815 - DNA, 51 bp, Artificial
  Synthetic oligonucleotide
agcatgacgcgaagtgcggtcgtaggtgaactaggcaaccaatgcgagatg

SEQ ID NO: 321816 - DNA, 60 bp, Artificial
  Synthetic oligonucleotide
agcatgagcctagcattcccggactcttacgagtcgacgatcacgactgaaccgtaccgc

SEQ ID NO: 321817 - DNA, 60 bp, Artificial
  Synthetic oligonucleotide
agcatgagcttagccccaatgggatttccagaagaagagggtagatggaggcagacagga

SEQ ID NO: 321818 - DNA, 60 bp, Artificial
  Synthetic oligonucleotide
agcatgagtaaggatctggtgcatcccagcttggtgcgtgcagggtatgtggagttggag

SEQ ID NO: 321819 - DNA, 60 bp, Artificial
  Synthetic oligonucleotide
agcatgatagcaacagaggctgcgttagcttgtttcgcatacaacttaccagtaatggct

SEQ ID NO: 321820 - DNA, 55 bp, Artificial
  Synthetic oligonucleotide
agcatgatgtcatagcctaagccggcacatcgaccctagccgacgcgtaacgcgt

SEQ ID NO: 321821 - DNA, 55 bp, Artificial
  Synthetic oligonucleotide
agcatgcaagctcctgccttcacagctgcacccaagctaaagttataacctgaga

SEQ ID NO: 321822 - DNA, 60 bp, Artificial
  Synthetic oligonucleotide
agcatgcacctcatcaaccggtaaaagactatcggactcttctatcattataactcgaga

SEQ ID NO: 321823 - DNA, 57 bp, Artificial
  Synthetic oligonucleotide
agcatgccccaaatatatcaaacaaaacaccctaaagttggcaacagggatgaggaa

SEQ ID NO: 321824 - DNA, 59 bp, Artificial
  Synthetic oligonucleotide
agcatgccccaagtatgttaagcaaaacaccctgaagttggcaacaggaatgcggaatg

SEQ ID NO: 321825 - DNA, 55 bp, Artificial
  Synthetic oligonucleotide
agcatgcccctagacattgacactgcatcagagtcaggccaagatccgcaggaca

SEQ ID NO: 321826 - DNA, 55 bp, Artificial
  Synthetic oligonucleotide
agcatgcctagcgttcgagcctcagatccaaaacaacaactctacccaatcgccg

SEQ ID NO: 321827 - DNA, 52 bp, Artificial
  Synthetic oligonucleotide
agcatgcgaaaacaggtgagactagtgtcccgaagtgctggcttataactaa

SEQ ID NO: 321828 - DNA, 55 bp, Artificial
  Synthetic oligonucleotide
agcatgcgggccttagaaaagtatgccggctatatgcgccaatcgtctggaacag

SEQ ID NO: 321829 - DNA, 60 bp, Artificial
  Synthetic oligonucleotide
agcatgcgtacgcgcagtggcaaaaatatcggggcccgggtgcattactaccatgacctc

SEQ ID NO: 321830 - DNA, 57 bp, Artificial
  Synthetic oligonucleotide
agcatgctccggtctacgacaggcgagatgggatcgcgggattaaaataccgcctcg

SEQ ID NO: 321831 - DNA, 55 bp, Artificial
  Synthetic oligonucleotide
agcatgctcttgcgaaaggtactcaaaggggaaacttacagaagatcggaggttg

SEQ ID NO: 321832 - DNA, 60 bp, Artificial
  Synthetic oligonucleotide
agcatgctctttgccccggaattggctaactccacatttgtcgtagatggacctgagaca

SEQ ID NO: 321833 - DNA, 60 bp, Artificial
  Synthetic oligonucleotide
agcatgctgggaccaccatgataacggtcccatccggaggagtatgtgacctcatcaaca

SEQ ID NO: 321834 - DNA, 59 bp, Artificial
  Synthetic oligonucleotide
agcatgcttgttaaatgaggaccgagctaattacttggtatccaactttgacaagtatg

SEQ ID NO: 321835 - DNA, 60 bp, Artificial
  Synthetic oligonucleotide
agcatgcttgttaagtgaggaccaagctagcaccttggtatccaatcttatcacgcatgt

SEQ ID NO: 321836 - DNA, 53 bp, Artificial
  Synthetic oligonucleotide
agcatggaacctttggtcccgtccattttcgaaatcaagttaaaatacgccga

SEQ ID NO: 321837 - DNA, 55 bp, Artificial
  Synthetic oligonucleotide
agcatggactgcggtgcatgtgacttcggtcaccacgggcatagcattgctcacc

SEQ ID NO: 321838 - DNA, 55 bp, Artificial
  Synthetic oligonucleotide
agcatggagttttctctcaccgatccaagacttgagccacacaattgggagaagt

SEQ ID NO: 321839 - DNA, 60 bp, Artificial
  Synthetic oligonucleotide
agcatggatgcggcagatagagggggctgttttaaagcctaccctatctctccattggag

SEQ ID NO: 321840 - DNA, 60 bp, Artificial
  Synthetic oligonucleotide
agcatggcaacgctgtgcctgggacaccatgcagtaccaaacggaacgttagtgaaaaca

SEQ ID NO: 321841 - DNA, 57 bp, Artificial
  Synthetic oligonucleotide
agcatggccactattgaacggacggcccgtcacaacctttcccttatgcacccgcta

SEQ ID NO: 321842 - DNA, 60 bp, Artificial
  Synthetic oligonucleotide
agcatgggaaaagttcctagctgcggaggctgagtgtgctaagacgaatctgagactcta

SEQ ID NO: 321843 - DNA, 59 bp, Artificial
  Synthetic oligonucleotide
agcatgggctcgttagcatttgaggaattgggtccttggtccaacaatctgcgttctaa

SEQ ID NO: 321844 - DNA, 58 bp, Artificial
  Synthetic oligonucleotide
agcatgggtaatgaccaatgtacccctggactccagtatataaggagccctagagtat

SEQ ID NO: 321845 - DNA, 55 bp, Artificial
  Synthetic oligonucleotide
agcatggtattatggttgggataaatccgcattcaagggaatggtctgacttagc

SEQ ID NO: 321846 - DNA, 60 bp, Artificial
  Synthetic oligonucleotide
agcatggtccagacacttataacagcaatctagcagcatttgaactgtggtatggaaaat

SEQ ID NO: 321847 - DNA, 58 bp, Artificial
  Synthetic oligonucleotide
agcatggttcttgttgaccggcttatgtggttggataagcactttaaccagtacacta

SEQ ID NO: 321848 - DNA, 60 bp, Artificial
  Synthetic oligonucleotide
agcatgtacagctacgcaacgccaaagaggcgagaagaattatatatttgatacaaaaca

SEQ ID NO: 321849 - DNA, 59 bp, Artificial
  Synthetic oligonucleotide
agcatgtacgtatctcatgcacgctgtataaaaatagctttggttttacatattttccc

SEQ ID NO: 321850 - DNA, 60 bp, Artificial
  Synthetic oligonucleotide
agcatgtctagaaggagaaagcgacatacacgagtccctcgtgactcggccactcacata

SEQ ID NO: 321851 - DNA, 53 bp, Artificial
  Synthetic oligonucleotide
agcatgtctcttggggccgtgagctggcagggggaaaattccaagttgtgttt

SEQ ID NO: 321852 - DNA, 60 bp, Artificial
  Synthetic oligonucleotide
agcatgtggcctatcagttatatatgattgatcctgcgggtgtctgtcttggtgcaggtc

SEQ ID NO: 321853 - DNA, 57 bp, Artificial
  Synthetic oligonucleotide
agcatgtgggaaatgattcggttttcaagacgaaattggttcgcgatgaacaaattg

SEQ ID NO: 321854 - DNA, 60 bp, Artificial
  Synthetic oligonucleotide
agcatgtgggcgattcactgcagctaccatggggcattcgatgggcctcatacaagtatg

SEQ ID NO: 321855 - DNA, 56 bp, Artificial
  Synthetic oligonucleotide
agcatgttattggcggagccctgtgcttcggccgttcctcggagagcgagaaagta

SEQ ID NO: 321856 - DNA, 60 bp, Artificial
  Synthetic oligonucleotide
agcatgttcgctcattcacaggatttagacaggctaatgaatcctctcctagatcagtac

SEQ ID NO: 321857 - DNA, 60 bp, Artificial
  Synthetic oligonucleotide
agcattaacagacataataccactgacaaaagaggcagaattggaattggcagaaaacag

SEQ ID NO: 321858 - DNA, 54 bp, Artificial
  Synthetic oligonucleotide
agcattaatcagattaaaaccagatcaaaacggtgtttcattaggcgataaaat

SEQ ID NO: 321859 - DNA, 55 bp, Artificial
  Synthetic oligonucleotide
agcattaatccaagaataagctcagaagtacacatcccactaggggatgctagat

SEQ ID NO: 321860 - DNA, 60 bp, Artificial
  Synthetic oligonucleotide
agcattagtaatactgtatatagactctttcaagagttagctcgtataccatctagaatt

SEQ ID NO: 321861 - DNA, 60 bp, Artificial
  Synthetic oligonucleotide
agcattatcaccacagtggacgtgttcgcatttgcggcgcaattgcctatttgatggagt

SEQ ID NO: 321862 - DNA, 55 bp, Artificial
  Synthetic oligonucleotide
agcattattagtgctggagatgtgcggagtataacatgtatgcaagagttctggc

SEQ ID NO: 321863 - DNA, 58 bp, Artificial
  Synthetic oligonucleotide
agcattatttgccttaacaagagctcagaattatgggattaacttaccgataacagga

SEQ ID NO: 321864 - DNA, 55 bp, Artificial
  Synthetic oligonucleotide
agcattcaagttactactaacatgttacaactcttttaacgcctgtggtcgttcc

SEQ ID NO: 321865 - DNA, 59 bp, Artificial
  Synthetic oligonucleotide
agcattccaagttctaaatcattgatcccccaaaccgcattcacccctgatgaattgag

SEQ ID NO: 321866 - DNA, 57 bp, Artificial
  Synthetic oligonucleotide
agcattcccaatgacaaaccttttcaaaacgtaaacaagattacatatggggcatgc

SEQ ID NO: 321867 - DNA, 60 bp, Artificial
  Synthetic oligonucleotide
agcattcgataatattcgcattatgaacgagttgtaaacgccaaccccactgtggagata

SEQ ID NO: 321868 - DNA, 60 bp, Artificial
  Synthetic oligonucleotide
agcattcgatgtggcatcctacatagcacatttcgttgcctctgatcgaaaagtatttat

SEQ ID NO: 321869 - DNA, 59 bp, Artificial
  Synthetic oligonucleotide
agcattctgaggctgtccaagatttcctcgatttttttaagggtggagtgtctgctaca

SEQ ID NO: 321870 - DNA, 55 bp, Artificial
  Synthetic oligonucleotide
agcattcttccaggatttcaaaagttatgtctgcggtacagtgaccctttgctcg

SEQ ID NO: 321871 - DNA, 58 bp, Artificial
  Synthetic oligonucleotide
agcattgaaatcagcccaacctcgacttttcgggttggacggtggcatcagtacacaa

SEQ ID NO: 321872 - DNA, 60 bp, Artificial
  Synthetic oligonucleotide
agcattgaattcaattaaagtcacgcagtctgatgttgcaagtgtactttcaagagtagt

SEQ ID NO: 321873 - DNA, 57 bp, Artificial
  Synthetic oligonucleotide
agcattgagccaacagacactcctgtgttcctcaagcgcaccttttcccaaacccct

SEQ ID NO: 321874 - DNA, 52 bp, Artificial
  Synthetic oligonucleotide
agcattgagtaaagacttagtggcgcgtcatgcgctaatgactgcacgtatg

SEQ ID NO: 321875 - DNA, 60 bp, Artificial
  Synthetic oligonucleotide
agcattgatcgtttcctgagagttcgagatcaacgagggaatgtgctcttatcccctgag

SEQ ID NO: 321876 - DNA, 57 bp, Artificial
  Synthetic oligonucleotide
agcattgatgacacgtttatagccacacggtttcttacgatttcggtgacccttata

SEQ ID NO: 321877 - DNA, 60 bp, Artificial
  Synthetic oligonucleotide
agcattgcgaacacaaacgattgatagactatcatccaactcttacacatacgattacga

SEQ ID NO: 321878 - DNA, 59 bp, Artificial
  Synthetic oligonucleotide
agcattgcgtggaccagtgtcctctatagaaggggtaaccggacaatcattcagccgac

SEQ ID NO: 321879 - DNA, 58 bp, Artificial
  Synthetic oligonucleotide
agcattggacaaatgggcaaatctatggaattggtttagtataacaaattggctgtgg

SEQ ID NO: 321880 - DNA, 54 bp, Artificial
  Synthetic oligonucleotide
agcattggcaatcgcgaacttctcatcgcgaaacaagtaaggcggaagaatctc

SEQ ID NO: 321881 - DNA, 57 bp, Artificial
  Synthetic oligonucleotide
agcattgtcaaaatctggctattccccaagttggctggggggcacacgtacaaagtg

SEQ ID NO: 321882 - DNA, 60 bp, Artificial
  Synthetic oligonucleotide
agcattgtccgaggatggggagaatgtgttattgaccagttcgaaagtctcgatagagag

SEQ ID NO: 321883 - DNA, 60 bp, Artificial
  Synthetic oligonucleotide
agcattgtgacgagtcggtatcttctgagatctggaacggggaaggtgtgaatgagatgc

SEQ ID NO: 321884 - DNA, 60 bp, Artificial
  Synthetic oligonucleotide
agcatttaccaatctaccacatgtattgatgaatttggctgagaccacgcaagctgattt

SEQ ID NO: 321885 - DNA, 60 bp, Artificial
  Synthetic oligonucleotide
agcatttactttccatcgccttagcatagtttagatcaacatcattcatttctccatcct

SEQ ID NO: 321886 - DNA, 55 bp, Artificial
  Synthetic oligonucleotide
agcatttaggttgtggtactgcagtacatagtcctttggagctaattccttgagg

SEQ ID NO: 321887 - DNA, 60 bp, Artificial
  Synthetic oligonucleotide
agcatttcaagcccactataaagtatgccaggttactcacaggttcagggatgatcttaa

SEQ ID NO: 321888 - DNA, 56 bp, Artificial
  Synthetic oligonucleotide
agcatttcacagtctctgttaccatatgccatagtgtagtgggaatttcccactcg

SEQ ID NO: 321889 - DNA, 58 bp, Artificial
  Synthetic oligonucleotide
agcatttgcattgcaatcctggatggattatatagaacaagcagaaatcgagcatgac

SEQ ID NO: 321890 - DNA, 57 bp, Artificial
  Synthetic oligonucleotide
agcatttgccattcaataatcggaaggaaataccagttgagttaaatgggtacttga

SEQ ID NO: 321891 - DNA, 56 bp, Artificial
  Synthetic oligonucleotide
agcatttgcgaattaccccggacgaattattcatcattaccctcctgataaattat

SEQ ID NO: 321892 - DNA, 60 bp, Artificial
  Synthetic oligonucleotide
agcatttgcgactggtcatcttatatcgctggccgatgaatggagctctgttaatgccag

SEQ ID NO: 321893 - DNA, 59 bp, Artificial
  Synthetic oligonucleotide
agcatttgctggtgtgcctttctatacttctacaggtgtcttaactgccaaagaggacc

SEQ ID NO: 321894 - DNA, 55 bp, Artificial
  Synthetic oligonucleotide
agcattttattacagagtgtaggtataacttaggttagaattgtatgatgtgacc

SEQ ID NO: 321895 - DNA, 60 bp, Artificial
  Synthetic oligonucleotide
agccaaaaaaagtctacaaagctcatgacaaagaagaaacatggtgcattaatgatcagc

SEQ ID NO: 321896 - DNA, 59 bp, Artificial
  Synthetic oligonucleotide
agccaaaattgggccgctacttgctgaaccaaattttgaagagtacaagctgtctgata

SEQ ID NO: 321897 - DNA, 50 bp, Artificial
  Synthetic oligonucleotide
agccaaacaaacacgcgggtgtatcggataggcgtcgtttaatgcaccgg

SEQ ID NO: 321898 - DNA, 55 bp, Artificial
  Synthetic oligonucleotide
agccaaacagtatggcgaacctatttacgatcacatgattttggtgcatgtgttg

SEQ ID NO: 321899 - DNA, 60 bp, Artificial
  Synthetic oligonucleotide
agccaaagcctatctcatcatatcttgagagtgatgaaagtcaagaagacgctagtgagc

SEQ ID NO: 321900 - DNA, 60 bp, Artificial
  Synthetic oligonucleotide
agccaaagtcatgctaaggcttggtgaggctcccgagtctctcctgtccatggctttcca

SEQ ID NO: 321901 - DNA, 55 bp, Artificial
  Synthetic oligonucleotide
agccaaataagtgacctgctaaaggctaagcttatccggccttcaaagagtaagc

SEQ ID NO: 321902 - DNA, 57 bp, Artificial
  Synthetic oligonucleotide
agccaaatgagaccagttaagcttgatcaaggaggattcaagaaacttgttagggag

SEQ ID NO: 321903 - DNA, 60 bp, Artificial
  Synthetic oligonucleotide
agccaacagctcgaggtagatatattgattgggacgatcttggaacgttcatgaaaaatg

SEQ ID NO: 321904 - DNA, 60 bp, Artificial
  Synthetic oligonucleotide
agccaacaggtcagactgcagattggctgagcattgttgtctatcttacatcctttgtgg

SEQ ID NO: 321905 - DNA, 60 bp, Artificial
  Synthetic oligonucleotide
agccaacagttcacttgattgccccaattcaaacctgcacaaccatgaggagctgcatgg

SEQ ID NO: 321906 - DNA, 56 bp, Artificial
  Synthetic oligonucleotide
agccaaccacgatcttacccacgtaatagtttgataagacggcaatcacttttcaa

SEQ ID NO: 321907 - DNA, 60 bp, Artificial
  Synthetic oligonucleotide
agccaaccagccacggtaatagcagctatggaagtagatctgagtaaaggagctcagatg

SEQ ID NO: 321908 - DNA, 50 bp, Artificial
  Synthetic oligonucleotide
agccaacctttacactcagcttaagactggtaaagatgcccgatacagtg

SEQ ID NO: 321909 - DNA, 55 bp, Artificial
  Synthetic oligonucleotide
agccaacgcatgctcttcggtgagctttgtgaccgtgcgaacgcccccggatggt

SEQ ID NO: 321910 - DNA, 60 bp, Artificial
  Synthetic oligonucleotide
agccaactgaaatgggcacttggtgagaacatggcaccagagaaagtagacttcgaggat

SEQ ID NO: 321911 - DNA, 56 bp, Artificial
  Synthetic oligonucleotide
agccaactttgcacggacccacccccctcctatatcggctaggggcagtgcagaac

SEQ ID NO: 321912 - DNA, 60 bp, Artificial
  Synthetic oligonucleotide
agccaagagaaaccgtagatggagaactgaggactcatgaagatgaatgtgagctgtctg

SEQ ID NO: 321913 - DNA, 55 bp, Artificial
  Synthetic oligonucleotide
agccaagaggagttggatgctataaaaaagtccaggtgttgggaagttgattacc

SEQ ID NO: 321914 - DNA, 57 bp, Artificial
  Synthetic oligonucleotide
agccaagaggtaggtggcttggacgggtctgggaagggtggcagacttcctcagatc

SEQ ID NO: 321915 - DNA, 60 bp, Artificial
  Synthetic oligonucleotide
agccaagcacgcgtgttttgcacaccgatgagtatgtgacaaggacacgtatcttttacc

SEQ ID NO: 321916 - DNA, 50 bp, Artificial
  Synthetic oligonucleotide
agccaagcgccggtccagcgaataccccgtgctcgtcagacgccatttca

SEQ ID NO: 321917 - DNA, 51 bp, Artificial
  Synthetic oligonucleotide
agccaagtcccgtggccacactcttcccgctgatccaaacggctccagttg

SEQ ID NO: 321918 - DNA, 60 bp, Artificial
  Synthetic oligonucleotide
agccaataaggagaacatcccctatcttggggattgtatgtattatgatgcgcctggcat

SEQ ID NO: 321919 - DNA, 55 bp, Artificial
  Synthetic oligonucleotide
agccaatagagatactgtttgccaatcgacttaaggagatactacaaatcatcgc

SEQ ID NO: 321920 - DNA, 50 bp, Artificial
  Synthetic oligonucleotide
agccaatgacgctatcgctgaatcgaagcaaggagttatgggtgctagca

SEQ ID NO: 321921 - DNA, 53 bp, Artificial
  Synthetic oligonucleotide
agccaattagggagcaattagctcccgaggaagtcccggactctttccgggtg

SEQ ID NO: 321922 - DNA, 60 bp, Artificial
  Synthetic oligonucleotide
agccaattgccgaacgaggatggcgcgagaggaaggatcagaggacgagaggggatgaga

SEQ ID NO: 321923 - DNA, 60 bp, Artificial
  Synthetic oligonucleotide
agccaattgtcccaactttgcaagtgttgttctcggcaatgcctcaggcttaggcataat

SEQ ID NO: 321924 - DNA, 55 bp, Artificial
  Synthetic oligonucleotide
agccaattgtgtctctttgcatgaaggttgctccctccactaagttttcctctca

SEQ ID NO: 321925 - DNA, 57 bp, Artificial
  Synthetic oligonucleotide
agccaatttacaaatatataactattgaaggaactgaaaccgctgaaggtatagaga

SEQ ID NO: 321926 - DNA, 60 bp, Artificial
  Synthetic oligonucleotide
agccaattttagcatggaactgcccagctttggagtgtctgggatcaatgaatcagctga

SEQ ID NO: 321927 - DNA, 57 bp, Artificial
  Synthetic oligonucleotide
agccacaaacccgttagttccatcggacacggtacagaccagacacgtcatacaaca

SEQ ID NO: 321928 - DNA, 60 bp, Artificial
  Synthetic oligonucleotide
agccacaccacctgtggaatgcatggaaaggatcccacataagttacgtccacggctcgc

SEQ ID NO: 321929 - DNA, 55 bp, Artificial
  Synthetic oligonucleotide
agccacacgaattaataatgtatacgtctaagtataaacgtggttcgtctaacta

SEQ ID NO: 321930 - DNA, 60 bp, Artificial
  Synthetic oligonucleotide
agccacactgctgttttgcatattggtattacaaacatataaactgttaccatacgtata

SEQ ID NO: 321931 - DNA, 60 bp, Artificial
  Synthetic oligonucleotide
agccacaggaatgacactatcggtagtaagcctgctgataggagttgccaatttaggcct

SEQ ID NO: 321932 - DNA, 60 bp, Artificial
  Synthetic oligonucleotide
agccacagtatctgagtcatcactcattgtgcctgagggagtcggatccttttggattca

SEQ ID NO: 321933 - DNA, 60 bp, Artificial
  Synthetic oligonucleotide
agccacagtctgttggtgggctcaaatagagcacactacaggaattccctacaatcctca

SEQ ID NO: 321934 - DNA, 51 bp, Artificial
  Synthetic oligonucleotide
agccacatactctcgatgcggctccggtccctggctcacacccaggtgcct

SEQ ID NO: 321935 - DNA, 60 bp, Artificial
  Synthetic oligonucleotide
agccacatgagaagggcataaaccccaattacctcctggcctggaagcaagtgctagcag

SEQ ID NO: 321936 - DNA, 59 bp, Artificial
  Synthetic oligonucleotide
agccacatggagatttggcatgtgagtgacgcttggctacgcaggacgcgtgactttgg

SEQ ID NO: 321937 - DNA, 55 bp, Artificial
  Synthetic oligonucleotide
agccaccaaatttcaattggggaaacacttgatgagtctgttgatgctatacccc

SEQ ID NO: 321938 - DNA, 58 bp, Artificial
  Synthetic oligonucleotide
agccaccaagctgtatcgcagcctatgcaaagggagtactggtgtgcttttcaatgtt

SEQ ID NO: 321939 - DNA, 56 bp, Artificial
  Synthetic oligonucleotide
agccaccaaggtaggagtgggagcattcgggccagggttcacccctccacatggcg

SEQ ID NO: 321940 - DNA, 60 bp, Artificial
  Synthetic oligonucleotide
agccaccaccttctgagccaaagccgagtcagatcagtaccccagagatgattatccaga

SEQ ID NO: 321941 - DNA, 51 bp, Artificial
  Synthetic oligonucleotide
agccaccaggggtgatgtcatcgagtggaggctagggtgactagcccccgg

SEQ ID NO: 321942 - DNA, 57 bp, Artificial
  Synthetic oligonucleotide
agccaccatcacatttcatcgaaaacagttgacctcccagttctccccactatttac

SEQ ID NO: 321943 - DNA, 51 bp, Artificial
  Synthetic oligonucleotide
agccacccgttggaatcgttgggcgacatgaccctaaacgccttggctaga

SEQ ID NO: 321944 - DNA, 57 bp, Artificial
  Synthetic oligonucleotide
agccacctactcccggtgtggctccggtccctggatcacgcccaggtgtctagtcca

SEQ ID NO: 321945 - DNA, 55 bp, Artificial
  Synthetic oligonucleotide
agccacctgatagacagtttctagatgtagttcgtttgggtagacctacatattc

SEQ ID NO: 321946 - DNA, 50 bp, Artificial
  Synthetic oligonucleotide
agccacctgatcgggttgtgtgcgcggtttgccgacaccgaggacatgga

SEQ ID NO: 321947 - DNA, 55 bp, Artificial
  Synthetic oligonucleotide
agccacctgggtgggtactaatttggaagatccggcatccagggatctagtagtc

SEQ ID NO: 321948 - DNA, 60 bp, Artificial
  Synthetic oligonucleotide
agccacgatcatcatctctcctggagacggtacagagcacgtcattgatacgctccggta

SEQ ID NO: 321949 - DNA, 60 bp, Artificial
  Synthetic oligonucleotide
agccacgcgagaaactatcacgccgttgcctggaggatgtccacagtgggccgtcttatg

SEQ ID NO: 321950 - DNA, 51 bp, Artificial
  Synthetic oligonucleotide
agccacggacgtactgcgacgttgagagggtgatcgtctagccacggacat

SEQ ID NO: 321951 - DNA, 55 bp, Artificial
  Synthetic oligonucleotide
agccacggagaccatgcgcttgttatttagtgggtacgcaagcattcctttgaac

SEQ ID NO: 321952 - DNA, 55 bp, Artificial
  Synthetic oligonucleotide
agccacggccctgtgtggcgagcggtcctgctctgccaggctgccggtgcgattt

SEQ ID NO: 321953 - DNA, 54 bp, Artificial
  Synthetic oligonucleotide
agccacgtactctcggtgcggctccggtccttggattacgcccaggtgcctggt

SEQ ID NO: 321954 - DNA, 57 bp, Artificial
  Synthetic oligonucleotide
agccactaactggaacaatcctggaaatgtgggacggagagatctaccattacggtc

SEQ ID NO: 321955 - DNA, 51 bp, Artificial
  Synthetic oligonucleotide
agccactaccctgctagactcattctctggagaatctgagaatccttggct

SEQ ID NO: 321956 - DNA, 56 bp, Artificial
  Synthetic oligonucleotide
agccactagtatcattgctcgagcaatcgctgataagtaccactccagcgtgtact

SEQ ID NO: 321957 - DNA, 60 bp, Artificial
  Synthetic oligonucleotide
agccactcccgaagactataggcactgtgtaaagagcatgtgggagagagatcttatggt

SEQ ID NO: 321958 - DNA, 50 bp, Artificial
  Synthetic oligonucleotide
agccactcctctgaagctgtgtctccgtttaagataatttcacaatggac

SEQ ID NO: 321959 - DNA, 56 bp, Artificial
  Synthetic oligonucleotide
agccactctaccctacccagactcccggggactacgctgagttctgcggttggtca

SEQ ID NO: 321960 - DNA, 60 bp, Artificial
  Synthetic oligonucleotide
agccactgcggtggaccaaccgacacaacctgatgtcgcaacatgtcgtttctacactct

SEQ ID NO: 321961 - DNA, 58 bp, Artificial
  Synthetic oligonucleotide
agccacttacacccggtgtggctctggtccttggctcacgcccaggtgcctggtccac

SEQ ID NO: 321962 - DNA, 52 bp, Artificial
  Synthetic oligonucleotide
agccactttccgtacgacggtgaccacacggaccccgaccgtcacacgacgt

SEQ ID NO: 321963 - DNA, 60 bp, Artificial
  Synthetic oligonucleotide
agccacttttgtcatcgacagagacacacccgcctgctcagacaatgtgctctacacagc

SEQ ID NO: 321964 - DNA, 60 bp, Artificial
  Synthetic oligonucleotide
agccagaactatgcactaactccacttgcatcggatctcgaggacctggctttagagcct

SEQ ID NO: 321965 - DNA, 55 bp, Artificial
  Synthetic oligonucleotide
agccagacacactacaggctcgtgcaacaagatgagtatactagcgcagggttca

SEQ ID NO: 321966 - DNA, 55 bp, Artificial
  Synthetic oligonucleotide
agccagattctgaactacgcagcaacgctcatgctcagtcttgttatcatgagct

SEQ ID NO: 321967 - DNA, 60 bp, Artificial
  Synthetic oligonucleotide
agccagcacagggaccgaacaacacaacaggatcaaacagaccagccctcgagccacgga

SEQ ID NO: 321968 - DNA, 60 bp, Artificial
  Synthetic oligonucleotide
agccagcaccccccagcaacaaagtgggcctcagcaaggcctcctctgaggagatgcgcg

SEQ ID NO: 321969 - DNA, 55 bp, Artificial
  Synthetic oligonucleotide
agccagccatagcctggtttgaggccaaccgacctacccttcctgcccttactat

SEQ ID NO: 321970 - DNA, 53 bp, Artificial
  Synthetic oligonucleotide
agccagcgggagtaagttctagtttgttcacctgggggagacagagaaggtgc

SEQ ID NO: 321971 - DNA, 50 bp, Artificial
  Synthetic oligonucleotide
agccagctactggcacaggttgcttaaggtgtgtggaggagttaccactc

SEQ ID NO: 321972 - DNA, 51 bp, Artificial
  Synthetic oligonucleotide
agccagctatctttagaagggaaggcaccatacattactgagcttgcactt

SEQ ID NO: 321973 - DNA, 55 bp, Artificial
  Synthetic oligonucleotide
agccaggaaccgtcacccaccgtccacctgtaccgcctagattatatgtgccccc

SEQ ID NO: 321974 - DNA, 58 bp, Artificial
  Synthetic oligonucleotide
agccaggaacttcgacacaatacgcttatcattccagctaatgagacctccaaatatg

SEQ ID NO: 321975 - DNA, 57 bp, Artificial
  Synthetic oligonucleotide
agccaggcactagtcctgcataggtgcatatgcagtgctcagagcatgtgtggatat

SEQ ID NO: 321976 - DNA, 57 bp, Artificial
  Synthetic oligonucleotide
agccaggcgaactttggtcacagccgttcgtgagaacaaggctgttgccgggttcaa

SEQ ID NO: 321977 - DNA, 58 bp, Artificial
  Synthetic oligonucleotide
agccagggctatgggcgttagaaacgactcttctttcaaatgtctgccagtggtggga

SEQ ID NO: 321978 - DNA, 58 bp, Artificial
  Synthetic oligonucleotide
agccaggggccgatggttctagctaaacacatggcgaaaccatcgaatggtggtagcg

SEQ ID NO: 321979 - DNA, 60 bp, Artificial
  Synthetic oligonucleotide
agccagggtgcgctgattaaggccgtgggcagtgctcacgccagagcgatgggttgggta

SEQ ID NO: 321980 - DNA, 60 bp, Artificial
  Synthetic oligonucleotide
agccaggtctttagtctcattagaccaaatgagaatccagcacatcagagtcaattggtg

SEQ ID NO: 321981 - DNA, 55 bp, Artificial
  Synthetic oligonucleotide
agccaggtgatgaagttggcttacttagacaggggcttttataaacactacggta

SEQ ID NO: 321982 - DNA, 57 bp, Artificial
  Synthetic oligonucleotide
agccaggttggatccagcttaaatctaatatgactcagtgggggaatagtaacgaaa

SEQ ID NO: 321983 - DNA, 59 bp, Artificial
  Synthetic oligonucleotide
agccaggtttgtcggcgacaatcacacaagtgacccgaagctgatcaacttcgggaagc

SEQ ID NO: 321984 - DNA, 55 bp, Artificial
  Synthetic oligonucleotide
agccagtacaaatatgtctgtcctcacaccacctactgtctcatcacctgaagcc

SEQ ID NO: 321985 - DNA, 57 bp, Artificial
  Synthetic oligonucleotide
agccagtacaagcgattgaaaggcgaaatttgcaggagaaaagacagcgtggttcgg

SEQ ID NO: 321986 - DNA, 54 bp, Artificial
  Synthetic oligonucleotide
agccagtagacacccgcgcaatgctttactatacgacataggtggtaatatcaa

SEQ ID NO: 321987 - DNA, 54 bp, Artificial
  Synthetic oligonucleotide
agccagtatcggacgctgagtcaatccctgatccaccccctagatcctgggcct

SEQ ID NO: 321988 - DNA, 54 bp, Artificial
  Synthetic oligonucleotide
agccagtatttaatgggctccgtcacacagtggtaaatccacaaagccccttcc

SEQ ID NO: 321989 - DNA, 60 bp, Artificial
  Synthetic oligonucleotide
agccagtcacaccatcgacaatgctgaggtcgtggattcggagcttttccttccagctag

SEQ ID NO: 321990 - DNA, 57 bp, Artificial
  Synthetic oligonucleotide
agccagtccaatttccgatctatttgcccacgattcgttcggaccgattgcaaaatg

SEQ ID NO: 321991 - DNA, 59 bp, Artificial
  Synthetic oligonucleotide
agccagtccgcgatctcttaaatgctgggaagttgacggactttgttcttgataggaca

SEQ ID NO: 321992 - DNA, 56 bp, Artificial
  Synthetic oligonucleotide
agccagtcgtggggggcaatcagaatatactagtggaaccactggttaatggttta

SEQ ID NO: 321993 - DNA, 54 bp, Artificial
  Synthetic oligonucleotide
agccagtgccccccaaacccccgaatgtcaacagaccagtcaacaccggtggtc

SEQ ID NO: 321994 - DNA, 60 bp, Artificial
  Synthetic oligonucleotide
agccagtgtagtccttggtccattctggatctcagcatcttgctcaaagatctctccaag

SEQ ID NO: 321995 - DNA, 55 bp, Artificial
  Synthetic oligonucleotide
agccataaatcatcagctagttaaggtacatctagtttacaaatgtaccccccac

SEQ ID NO: 321996 - DNA, 56 bp, Artificial
  Synthetic oligonucleotide
agccataatgaagaaaaacaccgtcgttgccaggactgaaaagggtgagttcacca

SEQ ID NO: 321997 - DNA, 59 bp, Artificial
  Synthetic oligonucleotide
agccatactcgctaacctcagccgaggtacttgaaagctcaattggttgcaggatttcc

SEQ ID NO: 321998 - DNA, 55 bp, Artificial
  Synthetic oligonucleotide
agccataggtaagcaacggtatcaaagagcaagaaaagagttagaaacagcaggg

SEQ ID NO: 321999 - DNA, 60 bp, Artificial
  Synthetic oligonucleotide
agccatatgaaatcatataggtactcacacatcttgattctaactttagtagcaatgtct

SEQ ID NO: 322000 - DNA, 53 bp, Artificial
  Synthetic oligonucleotide
agccatatggtcgggtagtagatactccaattggcggttcgcatctgccaaat

SEQ ID NO: 322001 - DNA, 56 bp, Artificial
  Synthetic oligonucleotide
agccatattggatgcgccgggggggaatgtaacggacttgatgctgacgcgggggt

SEQ ID NO: 322002 - DNA, 55 bp, Artificial
  Synthetic oligonucleotide
agccatcaaataacaatcacgggcaaggactgggcatactatggtggtcttagag

SEQ ID NO: 322003 - DNA, 60 bp, Artificial
  Synthetic oligonucleotide
agccatcacaagtagaaatacagcaggcaccaatcctgattgtgcctggctggaagcaca

SEQ ID NO: 322004 - DNA, 51 bp, Artificial
  Synthetic oligonucleotide
agccatcacgataagccttaaggtcacgtacaaagacgtaaccattggcct

SEQ ID NO: 322005 - DNA, 54 bp, Artificial
  Synthetic oligonucleotide
agccatcagagaatccactatacgagccatcagagaatctacacacatagtatc

SEQ ID NO: 322006 - DNA, 60 bp, Artificial
  Synthetic oligonucleotide
agccatcaggggagaaaagatattgtcctactgcaactacccatcagcccatagaggaca

SEQ ID NO: 322007 - DNA, 60 bp, Artificial
  Synthetic oligonucleotide
agccatccttaccggagattctaagcagagctttcatcatgaatccaatgaggatgccta

SEQ ID NO: 322008 - DNA, 56 bp, Artificial
  Synthetic oligonucleotide
agccatcttaagtcacttcaaaccagaccttaaacatctactgacctatgtgaaga

SEQ ID NO: 322009 - DNA, 59 bp, Artificial
  Synthetic oligonucleotide
agccatgaactacacaaaattgatactgagtgagagggaccgtcttggcaccaagaccg

SEQ ID NO: 322010 - DNA, 55 bp, Artificial
  Synthetic oligonucleotide
agccatgatcattaattgctagcacaagtcttatactgatgcactaataaaattc

SEQ ID NO: 322011 - DNA, 60 bp, Artificial
  Synthetic oligonucleotide
agccatgcatggacaagtagactgtagcccaggaatatggcaactagattgtacacattt

SEQ ID NO: 322012 - DNA, 60 bp, Artificial
  Synthetic oligonucleotide
agccatgcgtacagttgaccccactctgtgtcactttaaattgtagtgatgttatcaaga

SEQ ID NO: 322013 - DNA, 60 bp, Artificial
  Synthetic oligonucleotide
agccatgctgccattggggcttggagcaaggacatacctgagtggggaagtgctgttgag

SEQ ID NO: 322014 - DNA, 59 bp, Artificial
  Synthetic oligonucleotide
agccatgcttggactttaggtaaatacatgtggcgtacttatcacgcacagtttttata

SEQ ID NO: 322015 - DNA, 58 bp, Artificial
  Synthetic oligonucleotide
agccatggtaacttggccataacctcatctttgaaggatcgtttttacatacgtcatg

SEQ ID NO: 322016 - DNA, 57 bp, Artificial
  Synthetic oligonucleotide
agccatggtcatagaccagagatattcagaacttctaagccgggtcagatacttgtg

SEQ ID NO: 322017 - DNA, 59 bp, Artificial
  Synthetic oligonucleotide
agccatgtgccattggcctagatgcgtcgaggtttgatcaacactgttccgtggaagcc

SEQ ID NO: 322018 - DNA, 53 bp, Artificial
  Synthetic oligonucleotide
agccattaaagctgtaagagccataattataagagccattatgctatgagagc

SEQ ID NO: 322019 - DNA, 54 bp, Artificial
  Synthetic oligonucleotide
agccattaacaaaatcctgaaaagggaaaattttctgcgcgtgagggaacgtgc

SEQ ID NO: 322020 - DNA, 55 bp, Artificial
  Synthetic oligonucleotide
agccattagtgtaggtactttacgccagcacattggttcgcttcacaatagaacg

SEQ ID NO: 322021 - DNA, 55 bp, Artificial
  Synthetic oligonucleotide
agccattctgattctagtaaactcccatagcagtgcaggtcttctagatgaccca

SEQ ID NO: 322022 - DNA, 60 bp, Artificial
  Synthetic oligonucleotide
agccattgacatcttagccgactgttgtgagcaaacggaactcactaaaagtgtcgtgct

SEQ ID NO: 322023 - DNA, 59 bp, Artificial
  Synthetic oligonucleotide
agccattgcacacacaaggactttcagttgctaaacattaatcaacaggactgtctttt

SEQ ID NO: 322024 - DNA, 60 bp, Artificial
  Synthetic oligonucleotide
agccattgggggagagaggctgtgaatcactttcatcttggagatgatatggatcctgaa

SEQ ID NO: 322025 - DNA, 60 bp, Artificial
  Synthetic oligonucleotide
agccatttcagtctctggtccctaaggcagccagaggtcaatacagtggattcgtgagaa

SEQ ID NO: 322026 - DNA, 55 bp, Artificial
  Synthetic oligonucleotide
agccatttctgaggacgacaccacgccctctcagattgccggatgggcctccctg

SEQ ID NO: 322027 - DNA, 60 bp, Artificial
  Synthetic oligonucleotide
agccatttgaacatcatgctactgtaggactaacattacgaattgaatctgcaatttgtg

SEQ ID NO: 322028 - DNA, 55 bp, Artificial
  Synthetic oligonucleotide
agcccaaagacacagggaacagagcagacatcattccagatgcaacaggcatggg

SEQ ID NO: 322029 - DNA, 60 bp, Artificial
  Synthetic oligonucleotide
agcccaacaactataagttgcatggtcccgctacaattatggtaatgccatttgacagac

SEQ ID NO: 322030 - DNA, 60 bp, Artificial
  Synthetic oligonucleotide
agcccaacattgtcaaaccacatgagaagggcataaatcccaactatctcctggcttgga

SEQ ID NO: 322031 - DNA, 57 bp, Artificial
  Synthetic oligonucleotide
agcccaacgcatacatgaaaaccagtatgggccggaatttgtgatggcccataatac

SEQ ID NO: 322032 - DNA, 51 bp, Artificial
  Synthetic oligonucleotide
agcccaacggttcttaaatgttaaggacccattcactttattctaccaaca

SEQ ID NO: 322033 - DNA, 55 bp, Artificial
  Synthetic oligonucleotide
agcccaacgttccggtgtggttttgtactcagtacctccaacactcgatgcccaa

SEQ ID NO: 322034 - DNA, 60 bp, Artificial
  Synthetic oligonucleotide
agcccaaggaatgattgcacccgcaacattatctatcagcggattaactgtaacgctaaa

SEQ ID NO: 322035 - DNA, 53 bp, Artificial
  Synthetic oligonucleotide
agcccaatttggttccgggatttttgtagtatagcaccggtcttgttctccaa

SEQ ID NO: 322036 - DNA, 58 bp, Artificial
  Synthetic oligonucleotide
agcccacaccttgtaaaggcgctcgtttctggggctatgagggcaatccacaaagcaa

SEQ ID NO: 322037 - DNA, 57 bp, Artificial
  Synthetic oligonucleotide
agcccacatggtcttacccgttctactatcaccttctatcactatacttatgggtct

SEQ ID NO: 322038 - DNA, 60 bp, Artificial
  Synthetic oligonucleotide
agcccacatgtgagaaatccacatccttgcttgagaattgtttggaaaggatcttcactg

SEQ ID NO: 322039 - DNA, 55 bp, Artificial
  Synthetic oligonucleotide
agcccacggactcttgccggttctttaatcaccctaaacaaatgaccctgcaaga

SEQ ID NO: 322040 - DNA, 56 bp, Artificial
  Synthetic oligonucleotide
agcccacggatgtgacaccatagccaggtgccaatgtaccgcaggagtgtactttt

SEQ ID NO: 322041 - DNA, 60 bp, Artificial
  Synthetic oligonucleotide
agcccactatcgtgcagatatgttagtcttatatacagctgtagggaaagccatccctgg

SEQ ID NO: 322042 - DNA, 60 bp, Artificial
  Synthetic oligonucleotide
agcccactcactaatgcgtatgacgaacgcagtgacgaccacaaaagaattccctctata

SEQ ID NO: 322043 - DNA, 56 bp, Artificial
  Synthetic oligonucleotide
agcccactcccctgtcaccttgggtgatcggggagcagggccagaattcaacctta

SEQ ID NO: 322044 - DNA, 50 bp, Artificial
  Synthetic oligonucleotide
agcccactcgacctaccccgggacccgcattctttccccaacccttcaag

SEQ ID NO: 322045 - DNA, 55 bp, Artificial
  Synthetic oligonucleotide
agcccactttcgtggtaccttcattgaaatacgtggcactttgtatgatgaccct

SEQ ID NO: 322046 - DNA, 60 bp, Artificial
  Synthetic oligonucleotide
agcccactttgctatttctatacacggaggatatgatatgggctttagaggtttatgtga

SEQ ID NO: 322047 - DNA, 60 bp, Artificial
  Synthetic oligonucleotide
agcccagaagtacagatttctataccctaccgttgcatgagcgcagcttggcgttgtttg

SEQ ID NO: 322048 - DNA, 60 bp, Artificial
  Synthetic oligonucleotide
agcccagaatatacagaatgtatcgaagtcctgatgttccccgtggatgtgaaggcccat

SEQ ID NO: 322049 - DNA, 59 bp, Artificial
  Synthetic oligonucleotide
agcccagaatgtacagaatgtatcggagcccagatgtcccaaaggggtgtgaaggtcca

SEQ ID NO: 322050 - DNA, 56 bp, Artificial
  Synthetic oligonucleotide
agcccagaccagacagcgatgagttcaaatcgattgaggacaagctaggtatcaac

SEQ ID NO: 322051 - DNA, 60 bp, Artificial
  Synthetic oligonucleotide
agcccagagatgatatgtaaatcccgatatgtcgtacatatgctcagagcatttatgttc

SEQ ID NO: 322052 - DNA, 58 bp, Artificial
  Synthetic oligonucleotide
agcccagcgattttggggggagcaatcctcatgcaagaaaccacttgtacgatggaag

SEQ ID NO: 322053 - DNA, 55 bp, Artificial
  Synthetic oligonucleotide
agcccaggagcaacttgaaaaaaccctagattgtcagatctacggggccacttac

SEQ ID NO: 322054 - DNA, 57 bp, Artificial
  Synthetic oligonucleotide
agcccaggcacattgggccgttgccatcgctattctaggccttcccgcccaaattaa

SEQ ID NO: 322055 - DNA, 52 bp, Artificial
  Synthetic oligonucleotide
agcccagggtttgcgggacttggcagtcgccgtggagcccgtggtgttcagc

SEQ ID NO: 322056 - DNA, 58 bp, Artificial
  Synthetic oligonucleotide
agcccagtcggagggcgtaagcccgtccagatctggaacattagaacacatttgtgaa

SEQ ID NO: 322057 - DNA, 55 bp, Artificial
  Synthetic oligonucleotide
agcccagtgcgagttcgccgcgcgattcttcgatcgattcgtcgcacgcacccgt

SEQ ID NO: 322058 - DNA, 60 bp, Artificial
  Synthetic oligonucleotide
agcccataatgggagcagaaaccttctatgtagatggggcatctaatagagagaccaaac

SEQ ID NO: 322059 - DNA, 52 bp, Artificial
  Synthetic oligonucleotide
agcccatacaaaagtaatgtatttccacaaggggttagtagttaaagaagag

SEQ ID NO: 322060 - DNA, 60 bp, Artificial
  Synthetic oligonucleotide
agcccatagagtttgctaaagctcgacaggctgctttagcaaaatttgcaccacaaccat

SEQ ID NO: 322061 - DNA, 56 bp, Artificial
  Synthetic oligonucleotide
agcccatatgtaagtcctatacaatactcagaaccgtctatagacggggacctaag

SEQ ID NO: 322062 - DNA, 52 bp, Artificial
  Synthetic oligonucleotide
agcccatgactctccgggtttaatttctattgggccgtttagtccaaacctg

SEQ ID NO: 322063 - DNA, 58 bp, Artificial
  Synthetic oligonucleotide
agcccatgactgtaactcctccggcacgttgttaaatgaggagagtgaaaatggagga

SEQ ID NO: 322064 - DNA, 55 bp, Artificial
  Synthetic oligonucleotide
agcccatggaattgctgtttcctactgtgactaagtgtacttttaagaaatacgg

SEQ ID NO: 322065 - DNA, 52 bp, Artificial
  Synthetic oligonucleotide
agcccatggtcggtgcggggtatgtagttgggccgtctacctttttaggtac

SEQ ID NO: 322066 - DNA, 51 bp, Artificial
  Synthetic oligonucleotide
agcccattaaccaccagtcaaaccctcctcttcaacatattgggagggtgg

SEQ ID NO: 322067 - DNA, 60 bp, Artificial
  Synthetic oligonucleotide
agcccattatcaggaagtgctcagcatatagaggaatgttcttgttatccccgacatcca

SEQ ID NO: 322068 - DNA, 60 bp, Artificial
  Synthetic oligonucleotide
agcccatttagaactctcatgagtgtcgaagtgggccaatcacccaatgtataccaagcc

SEQ ID NO: 322069 - DNA, 56 bp, Artificial
  Synthetic oligonucleotide
agcccatttagggcattaataagttgggaaatggggcaagcaccgagtccatacaa

SEQ ID NO: 322070 - DNA, 54 bp, Artificial
  Synthetic oligonucleotide
agccccaactggttgtcattcgcctttccactatggcaaccttcgctactgtca

SEQ ID NO: 322071 - DNA, 55 bp, Artificial
  Synthetic oligonucleotide
agccccaagtcttggaggtaaatatcctgaactctgctttgacttcaattctggc

SEQ ID NO: 322072 - DNA, 60 bp, Artificial
  Synthetic oligonucleotide
agccccaatgaggtcatatcagtgcagtgtcaaaacgggaggtgcacgttggatggggag

SEQ ID NO: 322073 - DNA, 60 bp, Artificial
  Synthetic oligonucleotide
agccccaccgactgacttgcaaaagatggtcatgggcaacacgaagcctgttgagcttat

SEQ ID NO: 322074 - DNA, 55 bp, Artificial
  Synthetic oligonucleotide
agccccacgaattaatgtaaatcgagttagcctcaagcgttgcacgaacatccgc

SEQ ID NO: 322075 - DNA, 55 bp, Artificial
  Synthetic oligonucleotide
agccccagatagtttggtggataggttccactttgatctggaaactttgcctaaa

SEQ ID NO: 322076 - DNA, 55 bp, Artificial
  Synthetic oligonucleotide
agccccatgggaaaccagaggtacggagttaagggatttggattcagacagggca

SEQ ID NO: 322077 - DNA, 60 bp, Artificial
  Synthetic oligonucleotide
agccccatgggaggcaacatatacacagcacccatgatgcatccgggagccctaatgctc

SEQ ID NO: 322078 - DNA, 56 bp, Artificial
  Synthetic oligonucleotide
agccccatgtgggcctcatctccattttagctaacttaatacggtagtcttcaaaa

SEQ ID NO: 322079 - DNA, 55 bp, Artificial
  Synthetic oligonucleotide
agccccatgtttgctgaattttctggtgcacgtgcgaagagtcagggattacccg

SEQ ID NO: 322080 - DNA, 55 bp, Artificial
  Synthetic oligonucleotide
agccccattacaactagggaaatgcaacgtggcggggtggctccttggcaaccta

SEQ ID NO: 322081 - DNA, 56 bp, Artificial
  Synthetic oligonucleotide
agcccccatccctgccgtgcctggcctcacgtcaccgaaatacgttttcgagacca

SEQ ID NO: 322082 - DNA, 59 bp, Artificial
  Synthetic oligonucleotide
agccccccgaatgttcacagataagtggtacccccagacagacctctgtgacatgacac

SEQ ID NO: 322083 - DNA, 54 bp, Artificial
  Synthetic oligonucleotide
agcccccgctcgggttctcctgaaacccagtgcataaggagaggaggtaaatgg

SEQ ID NO: 322084 - DNA, 56 bp, Artificial
  Synthetic oligonucleotide
agcccccgtcttcctctaccgaagaggcctcgtcatctcagtttaccgatgaggaa

SEQ ID NO: 322085 - DNA, 60 bp, Artificial
  Synthetic oligonucleotide
agccccctatggaggcaacctcacacacataacatggtgcctagaggccatctaccaaga

SEQ ID NO: 322086 - DNA, 56 bp, Artificial
  Synthetic oligonucleotide
agccccctctatacatctacaggggtattgacagctaaggataacccggtatatat

SEQ ID NO: 322087 - DNA, 51 bp, Artificial
  Synthetic oligonucleotide
agccccctctccgtccttatccttctttccgagagttcctttgacgtttcc

SEQ ID NO: 322088 - DNA, 55 bp, Artificial
  Synthetic oligonucleotide
agccccgatgtgactcctcctgagttgatacaactaggtctttgcgacccagtgc

SEQ ID NO: 322089 - DNA, 52 bp, Artificial
  Synthetic oligonucleotide
agccccggtgccatagcgtgcttgcagagttacgtcggtctttcgatgcccc

SEQ ID NO: 322090 - DNA, 53 bp, Artificial
  Synthetic oligonucleotide
agccccgtggtcgtgggaaccactgaccgcaagggtgttccaacttacacttg

SEQ ID NO: 322091 - DNA, 50 bp, Artificial
  Synthetic oligonucleotide
agcccctaccaggcccccccggtcgtcgactggaggcggggccttattgg

SEQ ID NO: 322092 - DNA, 50 bp, Artificial
  Synthetic oligonucleotide
agcccctagtcccttttcctagccaccctctaaggccctttccaaagccc

SEQ ID NO: 322093 - DNA, 53 bp, Artificial
  Synthetic oligonucleotide
agcccctgccaacatccataagagtcccgctagaggcaagtgctccggatctg

SEQ ID NO: 322094 - DNA, 56 bp, Artificial
  Synthetic oligonucleotide
agccccttactgtagtgggggttatgttggccatggccagtggactactacgacat

SEQ ID NO: 322095 - DNA, 55 bp, Artificial
  Synthetic oligonucleotide
agccccttgtgaattgggatttgaggaacctgacttcttccccacaacaaggtca

SEQ ID NO: 322096 - DNA, 59 bp, Artificial
  Synthetic oligonucleotide
agcccgaacacaagacttcattaggcgcgccgcacatcatggcgttttcgtatgtaaag

SEQ ID NO: 322097 - DNA, 55 bp, Artificial
  Synthetic oligonucleotide
agcccgaactgccacggccccgactgggcctccccggtttgtcagcgccactctc

SEQ ID NO: 322098 - DNA, 56 bp, Artificial
  Synthetic oligonucleotide
agcccgaatcaaaaaacgccgtagattcgtatgcgtacaattcgagagtattagtg

SEQ ID NO: 322099 - DNA, 59 bp, Artificial
  Synthetic oligonucleotide
agcccgcaactgggtgtctcgcgaattgggcctgggcctgcccaactgtccagaaatca

SEQ ID NO: 322100 - DNA, 53 bp, Artificial
  Synthetic oligonucleotide
agcccgcaataaagggttctgtggcgacgccggttgcgttggccggagggaac

SEQ ID NO: 322101 - DNA, 50 bp, Artificial
  Synthetic oligonucleotide
agcccgcggggcatcgtccgtccaatacagtgggcgccggcaaggaatgt

SEQ ID NO: 322102 - DNA, 56 bp, Artificial
  Synthetic oligonucleotide
agcccgctacccagaggaaacggttgtggaacaccttgagtccactccctgcacta

SEQ ID NO: 322103 - DNA, 60 bp, Artificial
  Synthetic oligonucleotide
agcccgctgagtaactctctcatacgccaccacaatctggtgtatgccactacctcacgt

SEQ ID NO: 322104 - DNA, 60 bp, Artificial
  Synthetic oligonucleotide
agcccgctttgcaggcgcaagcagatcgagtgtatgattgcgacgattacccattcttag

SEQ ID NO: 322105 - DNA, 51 bp, Artificial
  Synthetic oligonucleotide
agcccgggagatactataggagccaagaaacccctgtcggctctaaggact

SEQ ID NO: 322106 - DNA, 53 bp, Artificial
  Synthetic oligonucleotide
agcccgggtacccctggcccctctatggcaatgagggttgcgggtgggcggga

SEQ ID NO: 322107 - DNA, 56 bp, Artificial
  Synthetic oligonucleotide
agcccgtatagccatcaagtccctcactgagaggctttacgttgggggccctctta

SEQ ID NO: 322108 - DNA, 55 bp, Artificial
  Synthetic oligonucleotide
agcccgtgccagtacaggcgtaggcgtatggccagtcgccgtactcgcgaccgta

SEQ ID NO: 322109 - DNA, 55 bp, Artificial
  Synthetic oligonucleotide
agcccgtggtgggatccatccttgagcaagacgaccataagttttaccactactc

SEQ ID NO: 322110 - DNA, 53 bp, Artificial
  Synthetic oligonucleotide
agcccgttgtgtgtgtccttcggggcgcatcagggcaaggcaaatcttatttg

SEQ ID NO: 322111 - DNA, 57 bp, Artificial
  Synthetic oligonucleotide
agcccgtttctcctggctcagtttactagtgcaatttgttcagtggtgcgtcgggct

SEQ ID NO: 322112 - DNA, 56 bp, Artificial
  Synthetic oligonucleotide
agccctaacatctaacgactttcagagaactaacatacccatctccaagccccttg

SEQ ID NO: 322113 - DNA, 60 bp, Artificial
  Synthetic oligonucleotide
agccctacaagataaccctcaatgtggttgcagtccgtacagatggctccaatatttcaa

SEQ ID NO: 322114 - DNA, 59 bp, Artificial
  Synthetic oligonucleotide
agccctagaagactggtctgctatcatggcgaaacccgagctggtgttcacttacgcga

SEQ ID NO: 322115 - DNA, 55 bp, Artificial
  Synthetic oligonucleotide
agccctaggtgcaactatcaagcaggacgtaacaaggtaggatcgctacaatact

SEQ ID NO: 322116 - DNA, 57 bp, Artificial
  Synthetic oligonucleotide
agccctcatagattcggagaaaccagaggaaactcagctcccttgacaataagggaa

SEQ ID NO: 322117 - DNA, 53 bp, Artificial
  Synthetic oligonucleotide
agccctccatcgggatttagcaccctttcgcgctcaaaacccccagcttaccc

SEQ ID NO: 322118 - DNA, 55 bp, Artificial
  Synthetic oligonucleotide
agccctgactcgtcacacggagaagtgcgtggtggttgatgcaccggggcttctc

SEQ ID NO: 322119 - DNA, 55 bp, Artificial
  Synthetic oligonucleotide
agccctgagaggttctctccagcactagccggtagagcccgggtgttccctgcta

SEQ ID NO: 322120 - DNA, 56 bp, Artificial
  Synthetic oligonucleotide
agccctgagtacggtgtccaatcgggcgttcgcgaccgatctaagcgcaaacggcc

SEQ ID NO: 322121 - DNA, 55 bp, Artificial
  Synthetic oligonucleotide
agccctgcatggcacgcagagcaagtaggaaattcgccaaaacttctacttaaat

SEQ ID NO: 322122 - DNA, 60 bp, Artificial
  Synthetic oligonucleotide
agccctgccgagtccacgtgcgtttgattcgtagattcgctctctgttcaacgctgtcga

SEQ ID NO: 322123 - DNA, 50 bp, Artificial
  Synthetic oligonucleotide
agccctgcgttcattggtgagaaacgggctctgcattcccgctgctacgt

SEQ ID NO: 322124 - DNA, 56 bp, Artificial
  Synthetic oligonucleotide
agccctggggcgtctgagccgggtccgaagaaacggcgtgctggatcgtgacggcg

SEQ ID NO: 322125 - DNA, 55 bp, Artificial
  Synthetic oligonucleotide
agccctgggtcgtcgggaggtagatgtcctggcagttcttggaaagccggcacac

SEQ ID NO: 322126 - DNA, 59 bp, Artificial
  Synthetic oligonucleotide
agccctgtaaacatgtgacccccatgcgaggcttgcactgtgccttgttgccgtttaca

SEQ ID NO: 322127 - DNA, 60 bp, Artificial
  Synthetic oligonucleotide
agccctgtacatagtattagccccggctaatgggcttgtattcacagctagaggtgtcat

SEQ ID NO: 322128 - DNA, 53 bp, Artificial
  Synthetic oligonucleotide
agccctgttcttacagataatccccgaccgaacgacccaactgtaggtaagtg

SEQ ID NO: 322129 - DNA, 56 bp, Artificial
  Synthetic oligonucleotide
agcccttatctgatcgtcttggagtgagggggtccccccacacccctcacgactga

SEQ ID NO: 322130 - DNA, 60 bp, Artificial
  Synthetic oligonucleotide
agcccttcatcccttccaaacttaggatggtctctgatggcatcctagtggctcttgcaa

SEQ ID NO: 322131 - DNA, 58 bp, Artificial
  Synthetic oligonucleotide
agcccttctaatagtatacacacaggcagtgcggtcccttgaccaactgtgaccttac

SEQ ID NO: 322132 - DNA, 56 bp, Artificial
  Synthetic oligonucleotide
agcccttctggacaagtgctgaagagctttttccggatgacaccagacaactataa

SEQ ID NO: 322133 - DNA, 55 bp, Artificial
  Synthetic oligonucleotide
agcccttgtacggaaaagctgtgaacgtctctatgaagggcggatgggagtctgg

SEQ ID NO: 322134 - DNA, 53 bp, Artificial
  Synthetic oligonucleotide
agccctttagtctacgtcgaagactaagtggagggaaatatcctatttggtcg

SEQ ID NO: 322135 - DNA, 51 bp, Artificial
  Synthetic oligonucleotide
agccgaaaacgcacaggatgtgaagagtccagcctccttagccgttactga

SEQ ID NO: 322136 - DNA, 58 bp, Artificial
  Synthetic oligonucleotide
agccgaaaggccgcaattgtcacaggtgcgactggtcaagatggttcgtacctctgtg

SEQ ID NO: 322137 - DNA, 51 bp, Artificial
  Synthetic oligonucleotide
agccgaaaggttaaaacatggaacttttggccctgtccatttcggaaacca

SEQ ID NO: 322138 - DNA, 60 bp, Artificial
  Synthetic oligonucleotide
agccgaaagtacaaatagtgctggaccacaacacccaagtgtgcagcgcgaatgtgatgt

SEQ ID NO: 322139 - DNA, 55 bp, Artificial
  Synthetic oligonucleotide
agccgaaagtcagtccaagccccaatacacagacacccgacaacctcctacgagg

SEQ ID NO: 322140 - DNA, 53 bp, Artificial
  Synthetic oligonucleotide
agccgaaccaaaggctccagtccctgtggcaacgtcttgggcacttcgaggta

SEQ ID NO: 322141 - DNA, 60 bp, Artificial
  Synthetic oligonucleotide
agccgaactggcaataattcacgggctcttatcatgggcccgagtactagcagggcctca

SEQ ID NO: 322142 - DNA, 55 bp, Artificial
  Synthetic oligonucleotide
agccgaagagcggaatgtcgcgagacataaacaccaaatcaagtcggtggtcctc

SEQ ID NO: 322143 - DNA, 52 bp, Artificial
  Synthetic oligonucleotide
agccgaagtttcttactgagaggcaacaggggttaaaccctctgtcagtccc

SEQ ID NO: 322144 - DNA, 58 bp, Artificial
  Synthetic oligonucleotide
agccgaatggctggaaactgccgctctcgcccttggtaacgccctgatcgcccaacac

SEQ ID NO: 322145 - DNA, 52 bp, Artificial
  Synthetic oligonucleotide
agccgaatttacttacaatagacttcgaaaaagacgcttatttaggaccgga

SEQ ID NO: 322146 - DNA, 54 bp, Artificial
  Synthetic oligonucleotide
agccgacatgtctacaaactcaacggctcttagtaaacgatacgtaagaaaggg

SEQ ID NO: 322147 - DNA, 54 bp, Artificial
  Synthetic oligonucleotide
agccgacccataccgggtcaccaacagttgaacccttcaaatcttacttcgcta

SEQ ID NO: 322148 - DNA, 54 bp, Artificial
  Synthetic oligonucleotide
agccgactccagaccagggaaacgagccaagtggcgccgaccacttaaaaacac

SEQ ID NO: 322149 - DNA, 59 bp, Artificial
  Synthetic oligonucleotide
agccgactccatacgagcagtcttccgttcgctacacttgatctcgatactacctttag

SEQ ID NO: 322150 - DNA, 55 bp, Artificial
  Synthetic oligonucleotide
agccgagaaagtcggcatatcccagccgacactgcaccggatacagaagggcatc

SEQ ID NO: 322151 - DNA, 53 bp, Artificial
  Synthetic oligonucleotide
agccgagaagcctaaatttctcccggatttgtacgactacaaggagaaccgat

SEQ ID NO: 322152 - DNA, 58 bp, Artificial
  Synthetic oligonucleotide
agccgagagactaaggttgtagccagatatgttgatctgtgattcttcttgggtgatg

SEQ ID NO: 322153 - DNA, 60 bp, Artificial
  Synthetic oligonucleotide
agccgagagtgagatcggatcggcgacaatagacggattattacagggtagcgtacactc

SEQ ID NO: 322154 - DNA, 55 bp, Artificial
  Synthetic oligonucleotide
agccgagctggatcaatttcttgctgggttggatcgcatcagggcggcagacctg

SEQ ID NO: 322155 - DNA, 60 bp, Artificial
  Synthetic oligonucleotide
agccgaggaacgatggcatatgacatcagcacagggagatcagccgacccagtgtatggg

SEQ ID NO: 322156 - DNA, 57 bp, Artificial
  Synthetic oligonucleotide
agccgaggctcgtagcgttggtggagttgcttgcttctccggaatagagtttcgagg

SEQ ID NO: 322157 - DNA, 55 bp, Artificial
  Synthetic oligonucleotide
agccgaggtctaccagcaacaatcccacctacacatattgactctgtaagcaccc

SEQ ID NO: 322158 - DNA, 57 bp, Artificial
  Synthetic oligonucleotide
agccgagttctagaacaacggttgagggactccaaatgcgcagctttcataggggac

SEQ ID NO: 322159 - DNA, 58 bp, Artificial
  Synthetic oligonucleotide
agccgatagttatgagtggagaaaggatggaactcttgtagcaaacgttcaagaaata

SEQ ID NO: 322160 - DNA, 60 bp, Artificial
  Synthetic oligonucleotide
agccgatgtctgtgagttaattcgtggtgcgtacccaaagatccagactgtgagccgcgt

SEQ ID NO: 322161 - DNA, 58 bp, Artificial
  Synthetic oligonucleotide
agccgattctgtcgatgtcgaacgtttatctgaatctgttgctaagaagtttttatct

SEQ ID NO: 322162 - DNA, 55 bp, Artificial
  Synthetic oligonucleotide
agccgcaacccttccacactatcctcgtccttgtttcaggaactttcctcttggc

SEQ ID NO: 322163 - DNA, 56 bp, Artificial
  Synthetic oligonucleotide
agccgcaagtggtctttgactttgcaaaaggtctgcccttaagctccttaactcga

SEQ ID NO: 322164 - DNA, 60 bp, Artificial
  Synthetic oligonucleotide
agccgcaatgtactacatcctcaccagagggtggtcagacaacggcgacccaatgttcaa

SEQ ID NO: 322165 - DNA, 60 bp, Artificial
  Synthetic oligonucleotide
agccgcaccgtccatatagaacgcgacgtctatcccttcaatctctcctaagcctcgagc

SEQ ID NO: 322166 - DNA, 56 bp, Artificial
  Synthetic oligonucleotide
agccgcacttcaatacttcctggatgtcctgggatggctgtgacctagactactac

SEQ ID NO: 322167 - DNA, 57 bp, Artificial
  Synthetic oligonucleotide
agccgcagcatccacactccaggatgttaccgataatgggaacacgacaacgggtga

SEQ ID NO: 322168 - DNA, 60 bp, Artificial
  Synthetic oligonucleotide
agccgcagctattagaactgagggatctagacagaatagagctgttgtcactaagtctat

SEQ ID NO: 322169 - DNA, 52 bp, Artificial
  Synthetic oligonucleotide
agccgcatatccggagccacaggattagcggcgtctatggttgacattgtgg

SEQ ID NO: 322170 - DNA, 60 bp, Artificial
  Synthetic oligonucleotide
agccgcatgcttaacgcacggctcaagcggtctcatcttcaaaccgaaattcgctgacag

SEQ ID NO: 322171 - DNA, 60 bp, Artificial
  Synthetic oligonucleotide
agccgcattcgacagcagtactgatctaattgtaacagccaatagaaaatcggctgagga

SEQ ID NO: 322172 - DNA, 60 bp, Artificial
  Synthetic oligonucleotide
agccgccaaatggagatgttcgtcccagtcctcgagaacgaacgactaattgcatcagcc

SEQ ID NO: 322173 - DNA, 60 bp, Artificial
  Synthetic oligonucleotide
agccgccaagacgcggattgtagatgttcccccatttgaacattgcattctgggtagaca

SEQ ID NO: 322174 - DNA, 55 bp, Artificial
  Synthetic oligonucleotide
agccgcccctctaaccggtcaaaataatgtgatagacccctggattagaatgaac

SEQ ID NO: 322175 - DNA, 52 bp, Artificial
  Synthetic oligonucleotide
agccgcccgctaaagcggctcccaagtggagttaagtctcccgctaaagaga

SEQ ID NO: 322176 - DNA, 57 bp, Artificial
  Synthetic oligonucleotide
agccgcctgaacgtttggatggtaatgtgctgacctggtttgggataccaggtcgaa

SEQ ID NO: 322177 - DNA, 60 bp, Artificial
  Synthetic oligonucleotide
agccgcctggcatttgagcacaaggcccgagagctgcatccggagtactacaaagactgc

SEQ ID NO: 322178 - DNA, 52 bp, Artificial
  Synthetic oligonucleotide
agccgcgaccgatcggaacccggtacctcacccacaacctgtaaataaatcc

SEQ ID NO: 322179 - DNA, 59 bp, Artificial
  Synthetic oligonucleotide
agccgcgcgttactgcaattagcggtggctcccgacactctggccaattggtgctaatg

SEQ ID NO: 322180 - DNA, 58 bp, Artificial
  Synthetic oligonucleotide
agccgcggagcaagtgtacaaaatcgtcaaagttccgagtatttcgttcagacacatc

SEQ ID NO: 322181 - DNA, 59 bp, Artificial
  Synthetic oligonucleotide
agccgcggcgggtacacgagtatcacggacatacaatcccgtcaccatggccgcggcac

SEQ ID NO: 322182 - DNA, 60 bp, Artificial
  Synthetic oligonucleotide
agccgcgtgggaaacagcaagacacactccagtcaattcctggctaggcaacataatcat

SEQ ID NO: 322183 - DNA, 55 bp, Artificial
  Synthetic oligonucleotide
agccgcgtgtccaaccatgggtgaagctcacaacgagaaaagagctgaccccgcc

SEQ ID NO: 322184 - DNA, 58 bp, Artificial
  Synthetic oligonucleotide
agccgctaacagccatgatgggaaccactcaagaagaggacactaatcccagaccccg

SEQ ID NO: 322185 - DNA, 50 bp, Artificial
  Synthetic oligonucleotide
agccgctacacgcccaccgcccaccgtcaacggccaatccagatcgacgg

SEQ ID NO: 322186 - DNA, 58 bp, Artificial
  Synthetic oligonucleotide
agccgctcatctaattattcgcctcgtggaggcgtttccgactcaggttcttatcttc

SEQ ID NO: 322187 - DNA, 50 bp, Artificial
  Synthetic oligonucleotide
agccgctcctattgatacactgctgggagggaagtgctgtgtggatgatt

SEQ ID NO: 322188 - DNA, 55 bp, Artificial
  Synthetic oligonucleotide
agccgctggcttgactccttctccggggaagaatttcgtcacgagccggtacgcc

SEQ ID NO: 322189 - DNA, 57 bp, Artificial
  Synthetic oligonucleotide
agccgcttaagatatcgattgacgaggaacatagccgggttgtacactccctattta

SEQ ID NO: 322190 - DNA, 50 bp, Artificial
  Synthetic oligonucleotide
agccgcttcatagaccaaccccacccgtcggaccggactacagcaaggtc

SEQ ID NO: 322191 - DNA, 60 bp, Artificial
  Synthetic oligonucleotide
agccgcttgacctacctcagatcattcaacgactccatggtcttagcgcattttcactcc

SEQ ID NO: 322192 - DNA, 54 bp, Artificial
  Synthetic oligonucleotide
agccgcttgttcggccagtctggaggggagctgtatgccactaccgcaagtggc

SEQ ID NO: 322193 - DNA, 55 bp, Artificial
  Synthetic oligonucleotide
agccggaacccaggaaacgccgaaattgaagatctcattttcctggcacggtcag

SEQ ID NO: 322194 - DNA, 59 bp, Artificial
  Synthetic oligonucleotide
agccggaagaaaagacgatatggacctcaagtagctccgttgtgatgtgtggagtagac

SEQ ID NO: 322195 - DNA, 60 bp, Artificial
  Synthetic oligonucleotide
agccggaatcctggaaatgctgaaatcgaagatctcatctttcttgcacggtctgctctc

SEQ ID NO: 322196 - DNA, 55 bp, Artificial
  Synthetic oligonucleotide
agccggacggtcgcgagccgatcggcctgactggcgaggttcgcccgccggagga

SEQ ID NO: 322197 - DNA, 58 bp, Artificial
  Synthetic oligonucleotide
agccggaggcgtgaccgctacaccggttggcggttctatcagattgatgggcctatcc

SEQ ID NO: 322198 - DNA, 55 bp, Artificial
  Synthetic oligonucleotide
agccggatgctctccagggtcgtgtttattgtccgcggaccacaattatttcccc

SEQ ID NO: 322199 - DNA, 50 bp, Artificial
  Synthetic oligonucleotide
agccggcacagagatagaatccgtcatcaaacgctttcttagaggtttta

SEQ ID NO: 322200 - DNA, 57 bp, Artificial
  Synthetic oligonucleotide
agccggcctttacttagtctacctcaaaatctcagcccacgtgcgaagcattgttaa

SEQ ID NO: 322201 - DNA, 53 bp, Artificial
  Synthetic oligonucleotide
agccggcgaaggtcgtatgcgcgacacacgtcgttaatgcaggtgtacacggg

SEQ ID NO: 322202 - DNA, 55 bp, Artificial
  Synthetic oligonucleotide
agccggcgatgactgtttgatcatatgcgaacggccagtgtgcgacccttgtgac

SEQ ID NO: 322203 - DNA, 55 bp, Artificial
  Synthetic oligonucleotide
agccggcgcgggtaacggaacatcgaagtcgatcgctgtcaccgtgtcgggtatc

SEQ ID NO: 322204 - DNA, 58 bp, Artificial
  Synthetic oligonucleotide
agccggcggctgatttcaactttgtgtacctgaccccacccattgagagaaccatcta

SEQ ID NO: 322205 - DNA, 54 bp, Artificial
  Synthetic oligonucleotide
agccggctgggagtttttgtcacgagcaactcctactttagcgccatctcgccc

SEQ ID NO: 322206 - DNA, 55 bp, Artificial
  Synthetic oligonucleotide
agccggcttgtgagatggcaaatggctttaagagaatattcttttgatatagaac

SEQ ID NO: 322207 - DNA, 55 bp, Artificial
  Synthetic oligonucleotide
agccggggagagatcgcccctcgtccccggcccgcgctgttcatccaacctaaca

SEQ ID NO: 322208 - DNA, 60 bp, Artificial
  Synthetic oligonucleotide
agccggtcatcgtgttgccatatctacttataccactagtctcagtgccggccctgtgtc

SEQ ID NO: 322209 - DNA, 57 bp, Artificial
  Synthetic oligonucleotide
agccggtctggagcaaaacttatcggcaccgacaactctgttgtcctctctcggaag

SEQ ID NO: 322210 - DNA, 59 bp, Artificial
  Synthetic oligonucleotide
agccggtgcgttcaatgccgccacctctgaagttgggagtctcgttggttccagctcca

SEQ ID NO: 322211 - DNA, 53 bp, Artificial
  Synthetic oligonucleotide
agccggttgaccttgtatgtcacgagcaattaggagattcagacgatgaaata

SEQ ID NO: 322212 - DNA, 58 bp, Artificial
  Synthetic oligonucleotide
agccgtaactatacgttcgtgagcgctgcgttggacatgccgatcggcggtgaccccg

SEQ ID NO: 322213 - DNA, 55 bp, Artificial
  Synthetic oligonucleotide
agccgtaactcccacgcacacccactaggatttaagccatgtcggaaacgttcga

SEQ ID NO: 322214 - DNA, 55 bp, Artificial
  Synthetic oligonucleotide
agccgtagaacacgttatactcggttaacaacggtgcaggtgtgtccacatccac

SEQ ID NO: 322215 - DNA, 60 bp, Artificial
  Synthetic oligonucleotide
agccgtaggcaacctctcgtacttcaatgataaggctaagggcccactggctcatctcta

SEQ ID NO: 322216 - DNA, 50 bp, Artificial
  Synthetic oligonucleotide
agccgtcatcgaagcggggtccagccgagtcagaaacacgaaacacctcc

SEQ ID NO: 322217 - DNA, 55 bp, Artificial
  Synthetic oligonucleotide
agccgtccaagcagctttatatagtctgcaatgtaatctaatcgaaccttggcgc

SEQ ID NO: 322218 - DNA, 55 bp, Artificial
  Synthetic oligonucleotide
agccgtcctctgaaaagtcatccaagcgggcctcacagtccaaggtcacagtctg

SEQ ID NO: 322219 - DNA, 57 bp, Artificial
  Synthetic oligonucleotide
agccgtcgttctctgcccaaacagagaacttcgttttggaatcaccacctcctcaca

SEQ ID NO: 322220 - DNA, 60 bp, Artificial
  Synthetic oligonucleotide
agccgtctctgcagtcgccctggcatatagtatggaggctagcacacctggcgaccttgt

SEQ ID NO: 322221 - DNA, 60 bp, Artificial
  Synthetic oligonucleotide
agccgtctgcgcaaaggtttatatctagcacggtgcgaagttgatgtcgaagcaccaaac

SEQ ID NO: 322222 - DNA, 57 bp, Artificial
  Synthetic oligonucleotide
agccgtctgtgatacgtccctccccacccacgtgtgttacgatgacacgtaccacca

SEQ ID NO: 322223 - DNA, 60 bp, Artificial
  Synthetic oligonucleotide
agccgtctttggcgtgtctgaagaggctgccgaatgaccgcggctgttgagcactatgag

SEQ ID NO: 322224 - DNA, 60 bp, Artificial
  Synthetic oligonucleotide
agccgtgaacatgtggagtggtgcagggaatttgtcaaaggcaagtacatcatggccttc

SEQ ID NO: 322225 - DNA, 60 bp, Artificial
  Synthetic oligonucleotide
agccgtgaatcgggatcccggatgattgagctaccactgccacgtcttgggtcaattgac

SEQ ID NO: 322226 - DNA, 60 bp, Artificial
  Synthetic oligonucleotide
agccgtgagtatcctggcgaagaataacgcgatcgtagcgaatacaagagaggttcaaca

SEQ ID NO: 322227 - DNA, 60 bp, Artificial
  Synthetic oligonucleotide
agccgtgagtccggcatgtgactcatcatgtgcagttaacatgtgtactgtgaataatgt

SEQ ID NO: 322228 - DNA, 60 bp, Artificial
  Synthetic oligonucleotide
agccgtgatacccagacctgtgttcacgcagatgcaggtcagtgatcacccagcactcca

SEQ ID NO: 322229 - DNA, 55 bp, Artificial
  Synthetic oligonucleotide
agccgtgctgctgtccccactgtccgcgtcacaaaagggcaggtatggaagaacc

SEQ ID NO: 322230 - DNA, 57 bp, Artificial
  Synthetic oligonucleotide
agccgtggatatatgcaaagcggcaatgggtttaagaatcagttcctcctttagctt

SEQ ID NO: 322231 - DNA, 60 bp, Artificial
  Synthetic oligonucleotide
agccgtggcagggtagaggagatacgatgttctttacattgtataggatgactaatgttc

SEQ ID NO: 322232 - DNA, 55 bp, Artificial
  Synthetic oligonucleotide
agccgtggtgagacgtcgcatggcgaccaagtgtttgtcaccagcggcattgggg

SEQ ID NO: 322233 - DNA, 60 bp, Artificial
  Synthetic oligonucleotide
agccgtgtttagagtttatggtgttgatctccatagtgttcgtgttatcactggattgtc

SEQ ID NO: 322234 - DNA, 50 bp, Artificial
  Synthetic oligonucleotide
agccgttacgtcactactactttacgtaatcggttcaacaatgctctaca

SEQ ID NO: 322235 - DNA, 52 bp, Artificial
  Synthetic oligonucleotide
agccgttactagatttattcgctgacgtatttacgaagtaaccccgttgtcg

SEQ ID NO: 322236 - DNA, 60 bp, Artificial
  Synthetic oligonucleotide
agccgttccctctggtgacggtccatgatgagttcaagtgccacgccaatcactgtaacg

SEQ ID NO: 322237 - DNA, 55 bp, Artificial
  Synthetic oligonucleotide
agccgttgcccataatccaatgggtttgcggtcgtaatgcgcaagtgcgggacgg

SEQ ID NO: 322238 - DNA, 60 bp, Artificial
  Synthetic oligonucleotide
agccgttgtgggacccacatatgaatgaagttcatgggtgatttcaagtatatggaggaa

SEQ ID NO: 322239 - DNA, 58 bp, Artificial
  Synthetic oligonucleotide
agccgtttcacaaactggggttcagttagcctctcactggacgcagagggcatttcag

SEQ ID NO: 322240 - DNA, 57 bp, Artificial
  Synthetic oligonucleotide
agccgtttcgacgagctgtttcttgcgttacaacaagtggtgtttgctcggaatcga

SEQ ID NO: 322241 - DNA, 53 bp, Artificial
  Synthetic oligonucleotide
agccgtttcgacgagttgtttcttaaggtacaacaggtggtgtatactaggta

SEQ ID NO: 322242 - DNA, 57 bp, Artificial
  Synthetic oligonucleotide
agccgtttcttgccatacttcggatttactgtaatgtccttctggcttccgacaagc

SEQ ID NO: 322243 - DNA, 57 bp, Artificial
  Synthetic oligonucleotide
agccgtttgcagcacggggcgatctaagctttgggttcaattcccttacgcagtgac

SEQ ID NO: 322244 - DNA, 50 bp, Artificial
  Synthetic oligonucleotide
agccgtttgccagggtttcaatacctattgaacaattatgctctatcagt

SEQ ID NO: 322245 - DNA, 60 bp, Artificial
  Synthetic oligonucleotide
agccgttttcaagtcaaatttaccaatcgagaactgtgatgcctcatgccagaccattgc

SEQ ID NO: 322246 - DNA, 60 bp, Artificial
  Synthetic oligonucleotide
agcctaaacatctttatgtgtcgatgcccactgcacagtcaacaatgaaggctgatgaaa

SEQ ID NO: 322247 - DNA, 53 bp, Artificial
  Synthetic oligonucleotide
agcctaaatatcggtcgggttacaacgaaaactatttactcatcgatagcgtg

SEQ ID NO: 322248 - DNA, 58 bp, Artificial
  Synthetic oligonucleotide
agcctaacatcaaccagtttaagatctcttctcccatggaggtcaaacaacttcctga

SEQ ID NO: 322249 - DNA, 56 bp, Artificial
  Synthetic oligonucleotide
agcctaacctacaacagcttgatgtccctaacaacaaacccacaggacaaggtcaa

SEQ ID NO: 322250 - DNA, 51 bp, Artificial
  Synthetic oligonucleotide
agcctaagagcactctggtgaggtcttggtagaccctcgcctggcgactgg

SEQ ID NO: 322251 - DNA, 55 bp, Artificial
  Synthetic oligonucleotide
agcctaaggtcccggatcatttcgagatcccaactcctttcgctttcgctatctc

SEQ ID NO: 322252 - DNA, 60 bp, Artificial
  Synthetic oligonucleotide
agcctaagtggagcatgccatgctacaaagtcgtattgctaccttcaaattgtcgcttat

SEQ ID NO: 322253 - DNA, 58 bp, Artificial
  Synthetic oligonucleotide
agcctaatggggagagctattgctgaaaaggagaacacatccacgtactcattacccc

SEQ ID NO: 322254 - DNA, 54 bp, Artificial
  Synthetic oligonucleotide
agcctacacacctcataccgcagcccgtgttactcgtggccgtagagttgttat

SEQ ID NO: 322255 - DNA, 55 bp, Artificial
  Synthetic oligonucleotide
agcctaccaagcacgggtttcccacacttgtatattttacacctacacaatggga

SEQ ID NO: 322256 - DNA, 55 bp, Artificial
  Synthetic oligonucleotide
agcctaccaccccttggccactaattcttggctctctgtttgggtgcccaccata

SEQ ID NO: 322257 - DNA, 58 bp, Artificial
  Synthetic oligonucleotide
agcctaccactgtacccactacacatccaaccacaactcacactacacagttagacac

SEQ ID NO: 322258 - DNA, 60 bp, Artificial
  Synthetic oligonucleotide
agcctacgcccaaatgtggagtctcatgtattttcacagaagagatctcagattagcatc

SEQ ID NO: 322259 - DNA, 59 bp, Artificial
  Synthetic oligonucleotide
agcctacggagtatcctggcaaacaatgggaaatttgagttcattgctgaggaattcca

SEQ ID NO: 322260 - DNA, 55 bp, Artificial
  Synthetic oligonucleotide
agcctacgggccttcacggaggctatgactagatactctgccccccctggggacc

SEQ ID NO: 322261 - DNA, 55 bp, Artificial
  Synthetic oligonucleotide
agcctactaatttatactttcacgcgtatacagaacgcctgttgactgtagggca

SEQ ID NO: 322262 - DNA, 58 bp, Artificial
  Synthetic oligonucleotide
agcctactgagctagttggtattcctccggcccctgaatgcggctaatcctaactgcg

SEQ ID NO: 322263 - DNA, 51 bp, Artificial
  Synthetic oligonucleotide
agcctactttgctatatctcctagcactcaagaagagcgactcgaattcag

SEQ ID NO: 322264 - DNA, 56 bp, Artificial
  Synthetic oligonucleotide
agcctagatacatactaaccgattctacctttgtttgccacaaacgttatcagacg

SEQ ID NO: 322265 - DNA, 53 bp, Artificial
  Synthetic oligonucleotide
agcctagatgttgatattgagatggataatcttcttgaaatataatattgttt

SEQ ID NO: 322266 - DNA, 60 bp, Artificial
  Synthetic oligonucleotide
agcctagcataatcaaaccacatgagagaggcataaaccccaattacctcctggcttgga

SEQ ID NO: 322267 - DNA, 57 bp, Artificial
  Synthetic oligonucleotide
agcctagcgtcctggatagggacagtatgtccgaaccccttccatatagttacactc

SEQ ID NO: 322268 - DNA, 54 bp, Artificial
  Synthetic oligonucleotide
agcctaggcaccaccggcattgaaccccttaagccaaccattttggacggcgaa

SEQ ID NO: 322269 - DNA, 58 bp, Artificial
  Synthetic oligonucleotide
agcctaggtttgttcgatccgaaggatctgtgaagatagttcatagggagtttattgc

SEQ ID NO: 322270 - DNA, 56 bp, Artificial
  Synthetic oligonucleotide
agcctagtagtttcggagagccattgcaagtcagcaattgcctgttctcggcttaa

SEQ ID NO: 322271 - DNA, 56 bp, Artificial
  Synthetic oligonucleotide
agcctatagaccaccaaatgcccctatcttatcaacacctccggaaactactgtta

SEQ ID NO: 322272 - DNA, 60 bp, Artificial
  Synthetic oligonucleotide
agcctatgccatccaatattttagggagagcctgcttgcctatccgagatatagtaactt

SEQ ID NO: 322273 - DNA, 58 bp, Artificial
  Synthetic oligonucleotide
agcctattgagctacctgagagtcctccggcccctgaatgcggctaatcccaaccacg

SEQ ID NO: 322274 - DNA, 60 bp, Artificial
  Synthetic oligonucleotide
agcctcaactcccaactggcattctcgcaaagtgatccatgtgttcagcaacatgtcacc

SEQ ID NO: 322275 - DNA, 60 bp, Artificial
  Synthetic oligonucleotide
agcctcacaagggttcaagttgcgggatgcagcgccgtttaagaagatcgctgggcaagc

SEQ ID NO: 322276 - DNA, 50 bp, Artificial
  Synthetic oligonucleotide
agcctcacagctgaatgctgtggtagatttgcaggaccgcaacacagaac

SEQ ID NO: 322277 - DNA, 60 bp, Artificial
  Synthetic oligonucleotide
agcctcagctgtgccttatcttgtagtgccaaactcaagtcatctatagaacattcactt

SEQ ID NO: 322278 - DNA, 60 bp, Artificial
  Synthetic oligonucleotide
agcctcaggctgtaatggtgtgctactcgccaaatcagggctggacattatccaaggatg

SEQ ID NO: 322279 - DNA, 55 bp, Artificial
  Synthetic oligonucleotide
agcctcaggggagtacaacaaataggtactctcctacaccaactgagagggaccc

SEQ ID NO: 322280 - DNA, 60 bp, Artificial
  Synthetic oligonucleotide
agcctcattagatcaaatgagaatccagtacataagagtcagctgatatggatggcatgt

SEQ ID NO: 322281 - DNA, 57 bp, Artificial
  Synthetic oligonucleotide
agcctcccaccggaatccaagatccctgcacttctaacccgacctatcctgtcagaa

SEQ ID NO: 322282 - DNA, 58 bp, Artificial
  Synthetic oligonucleotide
agcctcccggcagtccacacatcatgcctcaagtaccactgcaaaacctattggggat

SEQ ID NO: 322283 - DNA, 55 bp, Artificial
  Synthetic oligonucleotide
agcctccctgcggaatccaggatccaggaacttctaacccgacctatcctgtccg

SEQ ID NO: 322284 - DNA, 55 bp, Artificial
  Synthetic oligonucleotide
agcctccgaactcgtcataccaagtgagcgtctccactatcgtaatcagggttgg

SEQ ID NO: 322285 - DNA, 52 bp, Artificial
  Synthetic oligonucleotide
agcctccgactgggacgttcgggttcttccctggagtgcccccgctaaacaa

SEQ ID NO: 322286 - DNA, 54 bp, Artificial
  Synthetic oligonucleotide
agcctcctaagatctgggcccctcctactagggaggagttagaagagcttttaa

SEQ ID NO: 322287 - DNA, 57 bp, Artificial
  Synthetic oligonucleotide
agcctcctagcacggcgtcacatggcccgagagctacatccggaatacttcaagaac

SEQ ID NO: 322288 - DNA, 55 bp, Artificial
  Synthetic oligonucleotide
agcctcgcaggacacagaagaatacggggacggtacggtagaaatgattgattac

SEQ ID NO: 322289 - DNA, 60 bp, Artificial
  Synthetic oligonucleotide
agcctcggatcgagaaccacttcgtgctgacgtacccactgatagccaactgcgaggatt

SEQ ID NO: 322290 - DNA, 54 bp, Artificial
  Synthetic oligonucleotide
agcctcgggggcttatgatctgggtagcatacgggtgtttgtgacgcacccctt

SEQ ID NO: 322291 - DNA, 50 bp, Artificial
  Synthetic oligonucleotide
agcctcggtaagaccgagcctaaccgaaccaggtcatacatcaagctaaa

SEQ ID NO: 322292 - DNA, 60 bp, Artificial
  Synthetic oligonucleotide
agcctctcactggacgcagagggcatttcaggctcaaatagcttctctttcattgagagc

SEQ ID NO: 322293 - DNA, 60 bp, Artificial
  Synthetic oligonucleotide
agcctctggagatccaactgcaccagattctatagagtcaccatatgctccatgggtgtt

SEQ ID NO: 322294 - DNA, 55 bp, Artificial
  Synthetic oligonucleotide
agcctctggggaacaccaggggcaaaagcggccatccgcaataatattaccggat

SEQ ID NO: 322295 - DNA, 55 bp, Artificial
  Synthetic oligonucleotide
agcctctgtgcagattacgatttaatcggctggtaatttgagatgaagaagtgga

SEQ ID NO: 322296 - DNA, 55 bp, Artificial
  Synthetic oligonucleotide
agcctcttaagatgggggtttgtggtgaacacgtacccattcaatatgggtctgg

SEQ ID NO: 322297 - DNA, 58 bp, Artificial
  Synthetic oligonucleotide
agcctcttggagcgctgaaaagattaatgggaaggagtggcactcctcttcggagaac

SEQ ID NO: 322298 - DNA, 60 bp, Artificial
  Synthetic oligonucleotide
agcctcttgtcacatggtacagtaccatgttcgtagaaagatccagcttctttctgtatg

SEQ ID NO: 322299 - DNA, 58 bp, Artificial
  Synthetic oligonucleotide
agcctgaaacatgcaaccaaagcgtcatcacttacgaaaacaacacttgggtaaatca

SEQ ID NO: 322300 - DNA, 53 bp, Artificial
  Synthetic oligonucleotide
agcctgaacatgctctattggccacgtcaatttttaaactgacctaccaaaat

SEQ ID NO: 322301 - DNA, 55 bp, Artificial
  Synthetic oligonucleotide
agcctgaacatgtcattgtcactccgattatggcaggattgccagttttggatcg

SEQ ID NO: 322302 - DNA, 59 bp, Artificial
  Synthetic oligonucleotide
agcctgaaccggacgtggccgtgttaacgtccatgctcactgatccctcccatataaca

SEQ ID NO: 322303 - DNA, 59 bp, Artificial
  Synthetic oligonucleotide
agcctgaatcagactctcaaacagatccatcgtctgcccaccccctttcttcctgaccc

SEQ ID NO: 322304 - DNA, 57 bp, Artificial
  Synthetic oligonucleotide
agcctgacaaggctgacaactactgttaatacattcttggaccgttgtcctaactaa

SEQ ID NO: 322305 - DNA, 60 bp, Artificial
  Synthetic oligonucleotide
agcctgacttgcacaggttgttatgcttgtagttcaggcatctcctgcaaagttaggatt

SEQ ID NO: 322306 - DNA, 58 bp, Artificial
  Synthetic oligonucleotide
agcctgataaattattgggaaccctagtgtacccgcctgaactgctatgcggctcaac

SEQ ID NO: 322307 - DNA, 55 bp, Artificial
  Synthetic oligonucleotide
agcctgatggggcaacatcccgcaaaatcaatggacactcgaagaatcgagggag

SEQ ID NO: 322308 - DNA, 60 bp, Artificial
  Synthetic oligonucleotide
agcctgcaagtactcgagtattggcactggcgtggtgtggttggtgtatgatgcacagcc

SEQ ID NO: 322309 - DNA, 55 bp, Artificial
  Synthetic oligonucleotide
agcctgcacctgagcattagaggaaataccatctacaaagctgtgtcctgtgact

SEQ ID NO: 322310 - DNA, 55 bp, Artificial
  Synthetic oligonucleotide
agcctgcccttgctggccactccccagactccgacgccgagtcctattcttccat

SEQ ID NO: 322311 - DNA, 58 bp, Artificial
  Synthetic oligonucleotide
agcctgcctcaatgctggctagtttccaacgggagttaccttaatgaatcccacttca

SEQ ID NO: 322312 - DNA, 52 bp, Artificial
  Synthetic oligonucleotide
agcctgcgaacctcagtacaagggggccgagtggcttatttcgaagcctgtc

SEQ ID NO: 322313 - DNA, 51 bp, Artificial
  Synthetic oligonucleotide
agcctgcgagaaattgtgaggtggcatctcaaaagaacagagtcaataaaa

SEQ ID NO: 322314 - DNA, 60 bp, Artificial
  Synthetic oligonucleotide
agcctgctcgaatgagctagggaattggagatggattggtgcagcatcgtttgttaatac

SEQ ID NO: 322315 - DNA, 55 bp, Artificial
  Synthetic oligonucleotide
agcctgctggagagcccagcggcggtcaaacaccgattggcggatgggataatcc

SEQ ID NO: 322316 - DNA, 60 bp, Artificial
  Synthetic oligonucleotide
agcctgctgtgataaatgtcagctaaaaggagaagccatgcatggacaagtagactgtag

SEQ ID NO: 322317 - DNA, 57 bp, Artificial
  Synthetic oligonucleotide
agcctggagacacaataacattcgaagcaactggaaatctagtggtaccaagatatg

SEQ ID NO: 322318 - DNA, 60 bp, Artificial
  Synthetic oligonucleotide
agcctggagagtccagacatacatcagatcatatgtctatttataaattcatgggaaggt

SEQ ID NO: 322319 - DNA, 60 bp, Artificial
  Synthetic oligonucleotide
agcctggagcatgattctcggaatcatactaaggttgaaaaattgattaagtatatgaag

SEQ ID NO: 322320 - DNA, 60 bp, Artificial
  Synthetic oligonucleotide
agcctggatgacaacagaggacatgctggacgtctggaacagggtgtggatcctggacaa

SEQ ID NO: 322321 - DNA, 55 bp, Artificial
  Synthetic oligonucleotide
agcctggcatactcttcaggttcaagcaggggctgaagaagaggtttgcacagct

SEQ ID NO: 322322 - DNA, 60 bp, Artificial
  Synthetic oligonucleotide
agcctggctctccagtgcgacgtggatccacgagactcactgcaagtgcggtaactggag

SEQ ID NO: 322323 - DNA, 60 bp, Artificial
  Synthetic oligonucleotide
agcctggcttctgccgctaccagagagagctgccgaactccagaatcctggccaactctc

SEQ ID NO: 322324 - DNA, 60 bp, Artificial
  Synthetic oligonucleotide
agcctgggctcaagccttaacagcatcaggctacaaaccatatgacaatataccaagcga

SEQ ID NO: 322325 - DNA, 56 bp, Artificial
  Synthetic oligonucleotide
agcctgggtgctggtcccacgtcaatttctgcggtcggtgtgttagccccacactc

SEQ ID NO: 322326 - DNA, 52 bp, Artificial
  Synthetic oligonucleotide
agcctggtgggtaggaatagaacagacctttggagtaccctataacccacaa

SEQ ID NO: 322327 - DNA, 59 bp, Artificial
  Synthetic oligonucleotide
agcctggtttcgtcaatgcgcggaacactaggcaaattgaagttgattaaatcgatgac

SEQ ID NO: 322328 - DNA, 57 bp, Artificial
  Synthetic oligonucleotide
agcctgtaactcacataaatctctattaagctcatattgactttgtgagtgatcctt

SEQ ID NO: 322329 - DNA, 60 bp, Artificial
  Synthetic oligonucleotide
agcctgtagaggagggaaattccctggcattattcaacactcaaagcgcagaggaatgtg

SEQ ID NO: 322330 - DNA, 58 bp, Artificial
  Synthetic oligonucleotide
agcctgtagcgactttctaacgagttatagtcagcagaatgttcgttttaacattaga

SEQ ID NO: 322331 - DNA, 60 bp, Artificial
  Synthetic oligonucleotide
agcctgtcaaagatgttcgaacagatggtcaatgcaagactgccaaaagatgagaaaatc

SEQ ID NO: 322332 - DNA, 58 bp, Artificial
  Synthetic oligonucleotide
agcctgtccaaaagtctcgtttgacccaattcctatacattattgtgctccagctggt

SEQ ID NO: 322333 - DNA, 60 bp, Artificial
  Synthetic oligonucleotide
agcctgtcgtccactctgcttggcccaaacttgaacagttctggcagaagcatttgtgga

SEQ ID NO: 322334 - DNA, 55 bp, Artificial
  Synthetic oligonucleotide
agcctgtgattaagtgaaacgacataggcgaggacaggtggaccaatcacgttaa

SEQ ID NO: 322335 - DNA, 55 bp, Artificial
  Synthetic oligonucleotide
agcctgtggcgctcctccatgtcaggttaccactaacaacacttggagttgcccc

SEQ ID NO: 322336 - DNA, 56 bp, Artificial
  Synthetic oligonucleotide
agcctgtggtgtcaactcaactactgttaaatggtagcctagtaaaaggggagata

SEQ ID NO: 322337 - DNA, 60 bp, Artificial
  Synthetic oligonucleotide
agcctgttcctcttcagctaccaccacagagacttactcttgattgcagcgaggattgtg

SEQ ID NO: 322338 - DNA, 60 bp, Artificial
  Synthetic oligonucleotide
agcctgttcctttgtaaatgagtattccttgtcttcgatcatatccgcaatgttataata

SEQ ID NO: 322339 - DNA, 51 bp, Artificial
  Synthetic oligonucleotide
agcctgttgacctgcaagaagtcgactgggtggtcctgacgcccgacacgg

SEQ ID NO: 322340 - DNA, 58 bp, Artificial
  Synthetic oligonucleotide
agccttacacaattgttggtttgacaaggcataccagaagtcttgtctactattctgt

SEQ ID NO: 322341 - DNA, 55 bp, Artificial
  Synthetic oligonucleotide
agccttatacggaggtatcctaaggaggcgctgttagctttggctaaaaggaatg

SEQ ID NO: 322342 - DNA, 58 bp, Artificial
  Synthetic oligonucleotide
agccttatgcatcctatatgatggcggttaaaaccttagagaggatgaaagttcgaac

SEQ ID NO: 322343 - DNA, 55 bp, Artificial
  Synthetic oligonucleotide
agccttcaacaataggagcggtgtcacagaggaacgagctcagcgtttcgctatg

SEQ ID NO: 322344 - DNA, 54 bp, Artificial
  Synthetic oligonucleotide
agccttccgtaccgtagtgggccagatggtaaccgacgctgggtctgagtggtc

SEQ ID NO: 322345 - DNA, 59 bp, Artificial
  Synthetic oligonucleotide
agccttcctatatggcgctacatcggggcctagtcgtgcgcgtaacgtcacaactgccg

SEQ ID NO: 322346 - DNA, 59 bp, Artificial
  Synthetic oligonucleotide
agccttcggctcgcaagggagttgtgactcttgttgagaccgagaaggatttcgcacta

SEQ ID NO: 322347 - DNA, 55 bp, Artificial
  Synthetic oligonucleotide
agccttcgggcgagtccgcccttggacggcttattcaactcggagaataccactg

SEQ ID NO: 322348 - DNA, 58 bp, Artificial
  Synthetic oligonucleotide
agccttctcaaacttgctcattcaattggagtattagagtaacttatatataagaacc

SEQ ID NO: 322349 - DNA, 56 bp, Artificial
  Synthetic oligonucleotide
agccttctctcgagatcctccgcatcttttcttgcttggacccacttctcgagggt

SEQ ID NO: 322350 - DNA, 57 bp, Artificial
  Synthetic oligonucleotide
agccttctgcggagatgacagtttgttgtactttcctaagggttgtgagtatcccga

SEQ ID NO: 322351 - DNA, 51 bp, Artificial
  Synthetic oligonucleotide
agccttgaggacccacctcagcgtctgtcgcagggacttacgtacgctcga

SEQ ID NO: 322352 - DNA, 59 bp, Artificial
  Synthetic oligonucleotide
agccttgatcctgttacactagcctcacaagaattcctgcgcaaggaagtaaattctgt

SEQ ID NO: 322353 - DNA, 59 bp, Artificial
  Synthetic oligonucleotide
agccttgatgcacggacttttgatatcctgaataccacttttaggttactccagatgtc

SEQ ID NO: 322354 - DNA, 60 bp, Artificial
  Synthetic oligonucleotide
agccttgccgtgaactgggctgcagttgaagggaattgaagtagtatctcagtaagatca

SEQ ID NO: 322355 - DNA, 60 bp, Artificial
  Synthetic oligonucleotide
agccttgctgtaaattgcgctgcagttgaagggaattgcagtactatttcagtaagatca

SEQ ID NO: 322356 - DNA, 52 bp, Artificial
  Synthetic oligonucleotide
agccttggacacttgtacaaactagtcttgagactgtccgcagcccccctgc

SEQ ID NO: 322357 - DNA, 55 bp, Artificial
  Synthetic oligonucleotide
agccttggactaccattttgtgctgtcctcggctgcctgtaagtatgccagtcgc

SEQ ID NO: 322358 - DNA, 57 bp, Artificial
  Synthetic oligonucleotide
agcctttactggctaagtcaatagtggtatattttaacgcatatcggtaacgctaca

SEQ ID NO: 322359 - DNA, 50 bp, Artificial
  Synthetic oligonucleotide
agcctttagtcaccaataagcctgacttctgcgggtggagactcacgaaa

SEQ ID NO: 322360 - DNA, 56 bp, Artificial
  Synthetic oligonucleotide
agcctttcctagaacagtgtcttaacgaagaacgtggaacagttgttgagtatcta

SEQ ID NO: 322361 - DNA, 60 bp, Artificial
  Synthetic oligonucleotide
agcctttgggagtacagcctgatagggtgttgcagagacctgctacaccactagtataaa

SEQ ID NO: 322362 - DNA, 60 bp, Artificial
  Synthetic oligonucleotide
agccttttcaacatcatgcaacagttggacttacattacgcattgaatctgcagtttgtg

SEQ ID NO: 322363 - DNA, 53 bp, Artificial
  Synthetic oligonucleotide
agccttttcactgaagcctatagtggggaaccccgatctatttacttccctct

SEQ ID NO: 322364 - DNA, 55 bp, Artificial
  Synthetic oligonucleotide
agccttttgactgaccaatcacgttgtatctacaaagcttagttagtgcgtcccg

SEQ ID NO: 322365 - DNA, 57 bp, Artificial
  Synthetic oligonucleotide
agccttttgctgctcccgtctaatgacctaccttcgcggcattagttacaaggtcac

SEQ ID NO: 322366 - DNA, 60 bp, Artificial
  Synthetic oligonucleotide
agcgaaaaaacggggtgtgcactcggactctactctctaccctgcgtgtgagtgtgcaga

SEQ ID NO: 322367 - DNA, 58 bp, Artificial
  Synthetic oligonucleotide
agcgaaaaaacggggtgtgctcacaaactctactctctaccctgcgtgggagtgtgca

SEQ ID NO: 322368 - DNA, 60 bp, Artificial
  Synthetic oligonucleotide
agcgaaaagcaatttatctcaattaagaccatatcaagtgagctcacatgccgagaggga

SEQ ID NO: 322369 - DNA, 60 bp, Artificial
  Synthetic oligonucleotide
agcgaaagcaggcaaccatttgaatggatgtcaatccgactctacttttcttgaaagtgc

SEQ ID NO: 322370 - DNA, 59 bp, Artificial
  Synthetic oligonucleotide
agcgaaagcaggggtccaatccgtcatgatggagataatagtgcttcttcttgcaatag

SEQ ID NO: 322371 - DNA, 60 bp, Artificial
  Synthetic oligonucleotide
agcgaaagcagggtagataatcactcactgagtgacactcacgccatggcgcttcaaggc

SEQ ID NO: 322372 - DNA, 60 bp, Artificial
  Synthetic oligonucleotide
agcgaaagcaggtactgatccaaaatggaggactttgtgcgacgatgcttcaatccaatg

SEQ ID NO: 322373 - DNA, 60 bp, Artificial
  Synthetic oligonucleotide
agcgaaagtaagaccagaggagatctctcgacgcaggactcggcttgctgaagtgcactc

SEQ ID NO: 322374 - DNA, 60 bp, Artificial
  Synthetic oligonucleotide
agcgaaagttccagagaagttctctcgacgcaggactcggcttgctgaggtgcacacagc

SEQ ID NO: 322375 - DNA, 60 bp, Artificial
  Synthetic oligonucleotide
agcgaaatgaagcaatacctgatgtgggagctcatcagtttgcttgtgtaccaccttcaa

SEQ ID NO: 322376 - DNA, 58 bp, Artificial
  Synthetic oligonucleotide
agcgaaatgggccacaaggtttccacttatgcgggctgtcagggtctcacagccccac

SEQ ID NO: 322377 - DNA, 55 bp, Artificial
  Synthetic oligonucleotide
agcgaaatttcctgttacttccgtgacttagactactttgcaatgttgtttgttc

SEQ ID NO: 322378 - DNA, 54 bp, Artificial
  Synthetic oligonucleotide
agcgaacaacgacggaaattgggtttggacaaacccctggtagaagcagcgatc

SEQ ID NO: 322379 - DNA, 60 bp, Artificial
  Synthetic oligonucleotide
agcgaacaatggagaagacgcaactgctggtctaacccacctgatgatatggcattccaa

SEQ ID NO: 322380 - DNA, 54 bp, Artificial
  Synthetic oligonucleotide
agcgaaccgaaaacttacacgtggctgcggtattgggccgggctccgtcgctaa

SEQ ID NO: 322381 - DNA, 59 bp, Artificial
  Synthetic oligonucleotide
agcgaacgcagcacatgtagcgaatgagatagcccacggcccacacaaggacttgttga

SEQ ID NO: 322382 - DNA, 60 bp, Artificial
  Synthetic oligonucleotide
agcgaacgctatatcagacttaacgaatagcatgtcggacgcagcttcttcaattagtag

SEQ ID NO: 322383 - DNA, 51 bp, Artificial
  Synthetic oligonucleotide
agcgaagacagcctctattcttggtattcccatagtgcaaaaacagagcgc

SEQ ID NO: 322384 - DNA, 57 bp, Artificial
  Synthetic oligonucleotide
agcgaagacccttgttccaactccgttcgccaccttcgctcttgccaggatcgcgtc

SEQ ID NO: 322385 - DNA, 60 bp, Artificial
  Synthetic oligonucleotide
agcgaagaccgcgacgaagcgctcctcagaacagtacggatcatcaaactcttatatcaa

SEQ ID NO: 322386 - DNA, 58 bp, Artificial
  Synthetic oligonucleotide
agcgaagcgcgcgggtaagtgggtgtcgagctacgcggacaagttcgcggagaatcac

SEQ ID NO: 322387 - DNA, 53 bp, Artificial
  Synthetic oligonucleotide
agcgaagcggtaagagctaccttattaagcattactttattccagtccttaag

SEQ ID NO: 322388 - DNA, 60 bp, Artificial
  Synthetic oligonucleotide
agcgaagctcatacattacatagtcagcagatatgctgacagaaaacacacacatagtgc

SEQ ID NO: 322389 - DNA, 56 bp, Artificial
  Synthetic oligonucleotide
agcgaaggcccccttaggccgattggtcccaatgtgggacaattgtgccaccgcta

SEQ ID NO: 322390 - DNA, 57 bp, Artificial
  Synthetic oligonucleotide
agcgaaggtcatcgatgaaggacatttaaaacctgtgttaaacacaggtagtggaca

SEQ ID NO: 322391 - DNA, 55 bp, Artificial
  Synthetic oligonucleotide
agcgaagttgaattcgtatgcaccaatatcacttgaaaagagacgtgcacagata

SEQ ID NO: 322392 - DNA, 60 bp, Artificial
  Synthetic oligonucleotide
agcgaataccggtaaacgacgacgtgtacacatcaatcagctatttcaatgtacgcagcc

SEQ ID NO: 322393 - DNA, 55 bp, Artificial
  Synthetic oligonucleotide
agcgaatatggtggcaggccagcaagaaagagttgacccggtgatattggacata

SEQ ID NO: 322394 - DNA, 57 bp, Artificial
  Synthetic oligonucleotide
agcgaatcaaataaatggatctcaatgggaacggattgcacggtaaaagtttgtcca

SEQ ID NO: 322395 - DNA, 51 bp, Artificial
  Synthetic oligonucleotide
agcgaatcgagtggattaccagacgagccagacttcaccgcaagcgcaaat

SEQ ID NO: 322396 - DNA, 58 bp, Artificial
  Synthetic oligonucleotide
agcgaatcgctacaaagggctgtttcggtcatctttttatagtgagtcgaggcgaatg

SEQ ID NO: 322397 - DNA, 60 bp, Artificial
  Synthetic oligonucleotide
agcgaattcgcagtgttagtgctggtcgcgcactgtatattcctccttatgacttgctct

SEQ ID NO: 322398 - DNA, 55 bp, Artificial
  Synthetic oligonucleotide
agcgacaaaatagacactatggctgtgattgtttcagtacgtttgggacgtgggt

SEQ ID NO: 322399 - DNA, 56 bp, Artificial
  Synthetic oligonucleotide
agcgacaacaggcatacacccagttcagtgtttacagctacgatgctgctaggaag

SEQ ID NO: 322400 - DNA, 57 bp, Artificial
  Synthetic oligonucleotide
agcgacacaaaccgccacaattagtaaacgattaagattgaaagaaatagcgacaca

SEQ ID NO: 322401 - DNA, 60 bp, Artificial
  Synthetic oligonucleotide
agcgacacactgctctgtgacattggagagtcatcgtcaagtgccgaggtagaagaacac

SEQ ID NO: 322402 - DNA, 59 bp, Artificial
  Synthetic oligonucleotide
agcgacacagaactcctcagagcaatcagacacatcaagatcttgtatcaaagcagtaa

SEQ ID NO: 322403 - DNA, 55 bp, Artificial
  Synthetic oligonucleotide
agcgacactgaattatacaaagatgtcatgcgatgcaatattatggggtgctagg

SEQ ID NO: 322404 - DNA, 57 bp, Artificial
  Synthetic oligonucleotide
agcgacagacgataggcgtttttcctggcgtttgtgcaaaatatttgacaccaccaa

SEQ ID NO: 322405 - DNA, 58 bp, Artificial
  Synthetic oligonucleotide
agcgacatatgccaagtgtggagccgggccctggttgacacctaagtgtttaatcgac

SEQ ID NO: 322406 - DNA, 60 bp, Artificial
  Synthetic oligonucleotide
agcgacatgatcatcccaaagagtctggcaggtcctatttcgcaacacaactacaggccc

SEQ ID NO: 322407 - DNA, 60 bp, Artificial
  Synthetic oligonucleotide
agcgaccaatgcaagctgcaatcagcagtacatttttaacttctgccaatagaagagcaa

SEQ ID NO: 322408 - DNA, 55 bp, Artificial
  Synthetic oligonucleotide
agcgaccacacccccgataagaccgtcatggagagtacaacgctctcaaaaccct

SEQ ID NO: 322409 - DNA, 54 bp, Artificial
  Synthetic oligonucleotide
agcgacccagcgctaatagaatttagttggaaccttgttgcgtatcgaaaaggt

SEQ ID NO: 322410 - DNA, 52 bp, Artificial
  Synthetic oligonucleotide
agcgacccgccgattccctatccctgaacggggtagccgaccatctgagata

SEQ ID NO: 322411 - DNA, 58 bp, Artificial
  Synthetic oligonucleotide
agcgaccctcgaggcactgtttcaaggtccgccagtgtatagggagatcaaaattagc

SEQ ID NO: 322412 - DNA, 53 bp, Artificial
  Synthetic oligonucleotide
agcgaccctgacaatcactatcaggaccgcacgacagcggtgatgttcccgga

SEQ ID NO: 322413 - DNA, 60 bp, Artificial
  Synthetic oligonucleotide
agcgaccgcttcgcggtcgcggcccgagtgagcgagcgagcctgtcttggaaactggcca

SEQ ID NO: 322414 - DNA, 60 bp, Artificial
  Synthetic oligonucleotide
agcgacctgacaccccgaataacagtctttatgcgaccctgactgcaactaagcatggcg

SEQ ID NO: 322415 - DNA, 60 bp, Artificial
  Synthetic oligonucleotide
agcgaccttctcacatctactaccatgcagggaacactcctcatgaccttaggcgctggt

SEQ ID NO: 322416 - DNA, 57 bp, Artificial
  Synthetic oligonucleotide
agcgacgagagtgggtgactcatttgtcagtgacgtcctttcgacaccttccgacgt

SEQ ID NO: 322417 - DNA, 60 bp, Artificial
  Synthetic oligonucleotide
agcgacgatgatcttcccgacgccgacgctgacctctcagcagatcgtgcgaggcacgct

SEQ ID NO: 322418 - DNA, 60 bp, Artificial
  Synthetic oligonucleotide
agcgacgcagagctcctcctgacagtcagagccatcaagcatctctatcaaagcagtaag

SEQ ID NO: 322419 - DNA, 60 bp, Artificial
  Synthetic oligonucleotide
agcgacgcatgaatcaccgctgcctgtctcactcactcagtgacgttatcagtcatttag

SEQ ID NO: 322420 - DNA, 56 bp, Artificial
  Synthetic oligonucleotide
agcgacggcggacagcccaactcaacggtgtatgcggaacgagtactttacccagc

SEQ ID NO: 322421 - DNA, 60 bp, Artificial
  Synthetic oligonucleotide
agcgacgggtcatggtctacggtcagcagtggggccgacgcggaggatgtcgtgtgctgc

SEQ ID NO: 322422 - DNA, 52 bp, Artificial
  Synthetic oligonucleotide
agcgacgggtcgttgcatgtgggctatgtgatagagggcgaacacgagccgt

SEQ ID NO: 322423 - DNA, 60 bp, Artificial
  Synthetic oligonucleotide
agcgacgggtgatgacggcaatcaactcaagagttgaggagtatctcaacgtgctgactc

SEQ ID NO: 322424 - DNA, 55 bp, Artificial
  Synthetic oligonucleotide
agcgacggttatagatattttaacaggctaggcggagatgaggaggactgcgcag

SEQ ID NO: 322425 - DNA, 55 bp, Artificial
  Synthetic oligonucleotide
agcgacgtatattgactaatatactacagtcggacatttgtgccgatctatacac

SEQ ID NO: 322426 - DNA, 57 bp, Artificial
  Synthetic oligonucleotide
agcgacgtcgttttttaactgactgcatccttgtaaatttaagcaatggcatatttg

SEQ ID NO: 322427 - DNA, 55 bp, Artificial
  Synthetic oligonucleotide
agcgacgttatgtattgacgaaccattctgtaggaaggctaggtaactcggttgg

SEQ ID NO: 322428 - DNA, 55 bp, Artificial
  Synthetic oligonucleotide
agcgactatgtggatactgcagacatatttctcggtaaaagatcccctggagatt

SEQ ID NO: 322429 - DNA, 60 bp, Artificial
  Synthetic oligonucleotide
agcgactcatattagtcaagtgttttgtcttctgatggggatatgctatggtggcttaga

SEQ ID NO: 322430 - DNA, 55 bp, Artificial
  Synthetic oligonucleotide
agcgacttaattgcgtcagggtgagactccagtgcacaaagctatattggccgcg

SEQ ID NO: 322431 - DNA, 51 bp, Artificial
  Synthetic oligonucleotide
agcgacttttcgacatttgttagtaaacttaaaggtcggaccgtactagtg

SEQ ID NO: 322432 - DNA, 55 bp, Artificial
  Synthetic oligonucleotide
agcgagaaagagcatctcgatcaagggaggtaaagtgattcaaaccccattcgag

SEQ ID NO: 322433 - DNA, 58 bp, Artificial
  Synthetic oligonucleotide
agcgagaagaaagacgctgagaaataatgtaagtctatgttacatctaagagggaaag

SEQ ID NO: 322434 - DNA, 58 bp, Artificial
  Synthetic oligonucleotide
agcgagaatacaaagagaatactaccaaaaaccgcaatgcgctttaaagtgccattga

SEQ ID NO: 322435 - DNA, 59 bp, Artificial
  Synthetic oligonucleotide
agcgagacccaggtcatcggtaccttcgagctgcaaggtccgcaggagtccaccgctcc

SEQ ID NO: 322436 - DNA, 55 bp, Artificial
  Synthetic oligonucleotide
agcgagactcgaacgtgaaatagctaggcaacgacgtaaagaggcagaactaaga

SEQ ID NO: 322437 - DNA, 60 bp, Artificial
  Synthetic oligonucleotide
agcgagagatttatttcaatatgactcaaaagatgattatgagataatttttccagatgc

SEQ ID NO: 322438 - DNA, 60 bp, Artificial
  Synthetic oligonucleotide
agcgagagcagtgcaacttctgggacgcagcagtctcacgggactacagaagtggtggga

SEQ ID NO: 322439 - DNA, 60 bp, Artificial
  Synthetic oligonucleotide
agcgagataaccgatattggcggacgattattatacacagtatattacacaacacttgac

SEQ ID NO: 322440 - DNA, 51 bp, Artificial
  Synthetic oligonucleotide
agcgagatgaatagagtgagacagtcgctttcgatcgcgcagtcgcaaata

SEQ ID NO: 322441 - DNA, 60 bp, Artificial
  Synthetic oligonucleotide
agcgagatgacgttaagcatactggcagtgttcgttgtgttagtgatgtcacgcgtggtt

SEQ ID NO: 322442 - DNA, 51 bp, Artificial
  Synthetic oligonucleotide
agcgagccaatctttttgccctcgaggagcctgctgccacatttgcagctg

SEQ ID NO: 322443 - DNA, 60 bp, Artificial
  Synthetic oligonucleotide
agcgagcgacttagcatgctcatggtctaataatgtagggatgccaaacacgtttgaagg

SEQ ID NO: 322444 - DNA, 60 bp, Artificial
  Synthetic oligonucleotide
agcgagcgatcccagactatccttcacaatgttaggggagattctaaattactatacaca

SEQ ID NO: 322445 - DNA, 60 bp, Artificial
  Synthetic oligonucleotide
agcgagcgatgcaaccagctgtcagtaaaccggctttacttgagaccgtattcacactcg

SEQ ID NO: 322446 - DNA, 60 bp, Artificial
  Synthetic oligonucleotide
agcgagctcttacgtgcgagtcgtactccagtgacaacgggcattaagtgtgtcgtgaac

SEQ ID NO: 322447 - DNA, 59 bp, Artificial
  Synthetic oligonucleotide
agcgagctgagagagaagcttggggtggagttactagcggcaacctacaaattcttcaa

SEQ ID NO: 322448 - DNA, 60 bp, Artificial
  Synthetic oligonucleotide
agcgagctgtatgtcatatgtgatggtgtcaagacacgtattagggttaaatcaatcgtg

SEQ ID NO: 322449 - DNA, 55 bp, Artificial
  Synthetic oligonucleotide
agcgaggaggaaagcaaagaaagcaacggggctagccggtgaatgttccgcccaa

SEQ ID NO: 322450 - DNA, 57 bp, Artificial
  Synthetic oligonucleotide
agcgaggcatgacacatcactacccgacggaatccccgaaagatttccccgtaggca

SEQ ID NO: 322451 - DNA, 58 bp, Artificial
  Synthetic oligonucleotide
agcgaggctagatgctctgattagcgctggacaagcgtccttaacgagtctatcatca

SEQ ID NO: 322452 - DNA, 55 bp, Artificial
  Synthetic oligonucleotide
agcgagggcactgggcaagcgggtaagagccggcttgcccgtagacatccagcct

SEQ ID NO: 322453 - DNA, 60 bp, Artificial
  Synthetic oligonucleotide
agcgagggcatgcagagtgattctatcatgtgtcatgagatagctacggcaatgcttgtt

SEQ ID NO: 322454 - DNA, 57 bp, Artificial
  Synthetic oligonucleotide
agcgagggtcaattggaaaactgatctagtattgactcccgggagggaggcggctgc

SEQ ID NO: 322455 - DNA, 55 bp, Artificial
  Synthetic oligonucleotide
agcgagggttccattaactggaaccaaaatcgcgaagtcttcgattcaacggcag

SEQ ID NO: 322456 - DNA, 52 bp, Artificial
  Synthetic oligonucleotide
agcgaggtcaaagtagttaagcccgttgtaaaacgtaagcctagacgtggtc

SEQ ID NO: 322457 - DNA, 60 bp, Artificial
  Synthetic oligonucleotide
agcgaggtgatctggcaacgaagcacgggcaagagccttcaatcgacacggcttcctacg

SEQ ID NO: 322458 - DNA, 59 bp, Artificial
  Synthetic oligonucleotide
agcgagtatagtgacccgatggcttcggccatcggttacatcctcctttatccttggca

SEQ ID NO: 322459 - DNA, 58 bp, Artificial
  Synthetic oligonucleotide
agcgagtcttctggactccattggtcgattcgctaaggctggtgccgatatgtatatc

SEQ ID NO: 322460 - DNA, 50 bp, Artificial
  Synthetic oligonucleotide
agcgagtgcaggacctacatctgctcgggatggtataagagatgccatgg

SEQ ID NO: 322461 - DNA, 60 bp, Artificial
  Synthetic oligonucleotide
agcgagtgggcggcgttgaagactacggagaaaaacatcttgtcaggcatgtcatgcccg

SEQ ID NO: 322462 - DNA, 51 bp, Artificial
  Synthetic oligonucleotide
agcgagtttgatacgcatttaacaccttataatttcaggaacgggatgcta

SEQ ID NO: 322463 - DNA, 58 bp, Artificial
  Synthetic oligonucleotide
agcgataaacgtagacggggccatcgggaatggcaatctgactaagggtgagctcttc

SEQ ID NO: 322464 - DNA, 55 bp, Artificial
  Synthetic oligonucleotide
agcgataacagctaaagcgcctagaatccatagattgcccgttactactagacct

SEQ ID NO: 322465 - DNA, 60 bp, Artificial
  Synthetic oligonucleotide
agcgataacttattcacaaaacttgggcatgcatcattatggcttgcctgtttttgaatc

SEQ ID NO: 322466 - DNA, 53 bp, Artificial
  Synthetic oligonucleotide
agcgataccgtctgtcgcgctgcatcgtaaacaacagacttgcgagcgtcttc

SEQ ID NO: 322467 - DNA, 56 bp, Artificial
  Synthetic oligonucleotide
agcgataccgtctgtcgcgttgcatcgtagaccaggaaccgacgcacctcctcgta

SEQ ID NO: 322468 - DNA, 60 bp, Artificial
  Synthetic oligonucleotide
agcgatagcatctcaaccattgaatcaagactgggtgagatggataatcgacttgtgggt

SEQ ID NO: 322469 - DNA, 57 bp, Artificial
  Synthetic oligonucleotide
agcgataggaggggatgctaggagtaggggcgaccgaagcgaggaggaaagcaaaga

SEQ ID NO: 322470 - DNA, 59 bp, Artificial
  Synthetic oligonucleotide
agcgatataatttcaaaatcgtttcgcggcgcctgagcagcctttccaatggtaggagc

SEQ ID NO: 322471 - DNA, 56 bp, Artificial
  Synthetic oligonucleotide
agcgatccgaaaggctatctaacgtatagtgttaagtatgaggatcagtttacgaa

SEQ ID NO: 322472 - DNA, 56 bp, Artificial
  Synthetic oligonucleotide
agcgatcgaattcttcgaggggatggtccacgactccattaaggaggaactccgac

SEQ ID NO: 322473 - DNA, 55 bp, Artificial
  Synthetic oligonucleotide
agcgatcgctcggagtgtgtgcgagttactggatcttgaccaatcaactgtcagc

SEQ ID NO: 322474 - DNA, 60 bp, Artificial
  Synthetic oligonucleotide
agcgatctatacagagtctacgttagcggatatcaaacgtctgtacaatatgggcgttag

SEQ ID NO: 322475 - DNA, 60 bp, Artificial
  Synthetic oligonucleotide
agcgatgacatgatggtagaaagtatagtgagagatgcagcaagtttcacagtagtttct

SEQ ID NO: 322476 - DNA, 60 bp, Artificial
  Synthetic oligonucleotide
agcgatgaccagctggtgtttgtaggagatgccgccgaatgggtttttgcgtctgaagat

SEQ ID NO: 322477 - DNA, 54 bp, Artificial
  Synthetic oligonucleotide
agcgatgatcggactgagcaagctacagaatctgacaatatcaagactgaacaa

SEQ ID NO: 322478 - DNA, 50 bp, Artificial
  Synthetic oligonucleotide
agcgatgcatggtgaactttggcgtccccacgttcctcctggcgagcggg

SEQ ID NO: 322479 - DNA, 56 bp, Artificial
  Synthetic oligonucleotide
agcgatgcctacaatgcacactggtcggtgtccatttatataagtcacgtcccagt

SEQ ID NO: 322480 - DNA, 60 bp, Artificial
  Synthetic oligonucleotide
agcgatgcctacacatctcacaagaagtgccacactccgggatactgacgtgtcggggcc

SEQ ID NO: 322481 - DNA, 60 bp, Artificial
  Synthetic oligonucleotide
agcgatggacgtgggattcatgtgtgatgacactattgcatacgagtgtcctgcactcat

SEQ ID NO: 322482 - DNA, 59 bp, Artificial
  Synthetic oligonucleotide
agcgatggagtatccatcggtcaaattttgccgtgacaacgtgtacaatacaattagaa

SEQ ID NO: 322483 - DNA, 60 bp, Artificial
  Synthetic oligonucleotide
agcgatggatatatttacattcaacaggtaaagctagcattgaaggtggtaaatattatg

SEQ ID NO: 322484 - DNA, 55 bp, Artificial
  Synthetic oligonucleotide
agcgatgtccaagagatctagatcactaaattcgtcagcattttattacagagtg

SEQ ID NO: 322485 - DNA, 60 bp, Artificial
  Synthetic oligonucleotide
agcgatgttgctctagacatcggcacaccagatctgtaaactgtttcagtggttacgttt

SEQ ID NO: 322486 - DNA, 54 bp, Artificial
  Synthetic oligonucleotide
agcgatgttttactacaccaatgctgacaagatgctcagcttgacttttgggct

SEQ ID NO: 322487 - DNA, 60 bp, Artificial
  Synthetic oligonucleotide
agcgattattatacgactttggtatatgatcgaagcatgctcgaagtatctaaatcgcta

SEQ ID NO: 322488 - DNA, 58 bp, Artificial
  Synthetic oligonucleotide
agcgattcaaggcccgtgtccttattaggacgcttgcggaacagtacagcggcagttc

SEQ ID NO: 322489 - DNA, 52 bp, Artificial
  Synthetic oligonucleotide
agcgattgaaagttagtaaagcttttcgaaaaaaggtgaaacaatcccttga

SEQ ID NO: 322490 - DNA, 59 bp, Artificial
  Synthetic oligonucleotide
agcgattgaaggcgcatataagcttaagaaagttataaacgcgttgagcggaattgatc

SEQ ID NO: 322491 - DNA, 52 bp, Artificial
  Synthetic oligonucleotide
agcgattggactgatgccatggcgaaagctacaggtgctaaggtgattggcg

SEQ ID NO: 322492 - DNA, 57 bp, Artificial
  Synthetic oligonucleotide
agcgatttaaggtcctggggaccattaagaaatattgttcatgtacttctggagcaa

SEQ ID NO: 322493 - DNA, 60 bp, Artificial
  Synthetic oligonucleotide
agcgcaaaatgctataagcacaacattcccttacactggagatcctccttacagccatgg

SEQ ID NO: 322494 - DNA, 59 bp, Artificial
  Synthetic oligonucleotide
agcgcaaagatcttcggcgttctgatgccggttctgccgttcgggccaaactgcataag

SEQ ID NO: 322495 - DNA, 55 bp, Artificial
  Synthetic oligonucleotide
agcgcaagcgagctaagaccagacgccaacgtgagcgtcgttacgactgcgcatt

SEQ ID NO: 322496 - DNA, 60 bp, Artificial
  Synthetic oligonucleotide
agcgcacccaaatctataattgaacacgacaacgccatcgctctggattcagaagttaag

SEQ ID NO: 322497 - DNA, 52 bp, Artificial
  Synthetic oligonucleotide
agcgcacctgcaaactgctttaaaaaaggtccacaaaatattgaggtcatgt

SEQ ID NO: 322498 - DNA, 60 bp, Artificial
  Synthetic oligonucleotide
agcgcactcaaatgggtcgcttcagttggggagtgtggattatcactttgtgggggcata

SEQ ID NO: 322499 - DNA, 59 bp, Artificial
  Synthetic oligonucleotide
agcgcactgacgtagaagggaactgggctttgacaggaggcatggaactgacaagggac

SEQ ID NO: 322500 - DNA, 55 bp, Artificial
  Synthetic oligonucleotide
agcgcagaagattctcaccggcggcaaatcgccgggctgggtgaaccaaacgcag

SEQ ID NO: 322501 - DNA, 60 bp, Artificial
  Synthetic oligonucleotide
agcgcagatgacgtcagtgagttcttctcggacttaccacatgtttcacagactgacgtc

SEQ ID NO: 322502 - DNA, 60 bp, Artificial
  Synthetic oligonucleotide
agcgcaggactcatggttggtccccatttagagtgatcaagagaacatgataggtcacca

SEQ ID NO: 322503 - DNA, 56 bp, Artificial
  Synthetic oligonucleotide
agcgcaggttccttaaaccctaagcgattaatcttcttgtgatcatacctcccaac

SEQ ID NO: 322504 - DNA, 60 bp, Artificial
  Synthetic oligonucleotide
agcgcataaaagtcaactagtatggatggcatgccactctgccgcatttgaagatctgag

SEQ ID NO: 322505 - DNA, 59 bp, Artificial
  Synthetic oligonucleotide
agcgcatagatcccaggtaccgtcacttcaatttctggccttagtggtagtgcaacaaa

SEQ ID NO: 322506 - DNA, 55 bp, Artificial
  Synthetic oligonucleotide
agcgcatcactccacaaactcacagggctccaagacctactgccaactatgcacc

SEQ ID NO: 322507 - DNA, 55 bp, Artificial
  Synthetic oligonucleotide
agcgcatgtttgtggccacacctgctggaagagttttagtccaattcgaagagca

SEQ ID NO: 322508 - DNA, 60 bp, Artificial
  Synthetic oligonucleotide
agcgccaactggttgggtgagtacacgcgctcaaaggcaggcattacctctgtactcaac

SEQ ID NO: 322509 - DNA, 60 bp, Artificial
  Synthetic oligonucleotide
agcgccaatagcgagattcaccaaacacataatattcgtttcttatacacgccacacatt

SEQ ID NO: 322510 - DNA, 57 bp, Artificial
  Synthetic oligonucleotide
agcgccacatgatgaccatgaccggaggagtcagggttccagtggaccagtccaatt

SEQ ID NO: 322511 - DNA, 57 bp, Artificial
  Synthetic oligonucleotide
agcgccactccaaggtgaggcgtcccgtgttccacgacgactggtgtagtcagccgg

SEQ ID NO: 322512 - DNA, 56 bp, Artificial
  Synthetic oligonucleotide
agcgccagatacaaaccaccgttcagattaaagacggtcagaccctgcttttaggc

SEQ ID NO: 322513 - DNA, 59 bp, Artificial
  Synthetic oligonucleotide
agcgccataccagatggagtgttattgaatcacgaagggatggtggtacgtaaaggagc

SEQ ID NO: 322514 - DNA, 52 bp, Artificial
  Synthetic oligonucleotide
agcgccatggaatcctgctacggaccctagggacggacgtattgcgggcagc

SEQ ID NO: 322515 - DNA, 51 bp, Artificial
  Synthetic oligonucleotide
agcgccattcgaagctatccaagtttttctcagtgttttacgcgaaatcat

SEQ ID NO: 322516 - DNA, 59 bp, Artificial
  Synthetic oligonucleotide
agcgcccaacatgagtgttcgagcccaaaacgtcactgtttccaacagcagacgtaggc

SEQ ID NO: 322517 - DNA, 59 bp, Artificial
  Synthetic oligonucleotide
agcgcccagcaattttatgaaccacaggatagcgcctgtggaaaatttgtgaatctagg

SEQ ID NO: 322518 - DNA, 60 bp, Artificial
  Synthetic oligonucleotide
agcgcccaggacgggacatcacgtgcatctaacaaatgcacgtgagaaggcagtagcttg

SEQ ID NO: 322519 - DNA, 60 bp, Artificial
  Synthetic oligonucleotide
agcgcccatcacggcctatgcccaacagacgcggggcctaattggctgcatcatcactag

SEQ ID NO: 322520 - DNA, 55 bp, Artificial
  Synthetic oligonucleotide
agcgccccactgaaggtgcacccaaattagtgtttgagatggagggcaatggctc

SEQ ID NO: 322521 - DNA, 58 bp, Artificial
  Synthetic oligonucleotide
agcgcccgaaccactcccgggcgcgataatagagatgtgggatggcgagatttaccac

SEQ ID NO: 322522 - DNA, 60 bp, Artificial
  Synthetic oligonucleotide
agcgcccgagaccgccccactcacaaatgacaacctgggaaacgatgcagaacacacgca

SEQ ID NO: 322523 - DNA, 59 bp, Artificial
  Synthetic oligonucleotide
agcgccgaatgaggttgctgactccacgagaaaattcatcacgtggcatccgggaaaag

SEQ ID NO: 322524 - DNA, 51 bp, Artificial
  Synthetic oligonucleotide
agcgccgatccagaatcgtgcttggcctactacgattgttacacgggccga

SEQ ID NO: 322525 - DNA, 57 bp, Artificial
  Synthetic oligonucleotide
agcgccgcgcaaaggagaggacgtatcgggagaaacccttcacaggtgggagatgag

SEQ ID NO: 322526 - DNA, 55 bp, Artificial
  Synthetic oligonucleotide
agcgccggcgctgctactattaaatttgcctttcggtccgctgtcgtcgccaggg

SEQ ID NO: 322527 - DNA, 60 bp, Artificial
  Synthetic oligonucleotide
agcgccggcgtacaggaggatgtcgtagcactgagagcgtttacagacgctatgatcaga

SEQ ID NO: 322528 - DNA, 55 bp, Artificial
  Synthetic oligonucleotide
agcgcctatcatgtcatacgttaatgggatgtctcgtgtcattgatgagtgctgg

SEQ ID NO: 322529 - DNA, 55 bp, Artificial
  Synthetic oligonucleotide
agcgcctcattaagctccctttgttttgcactttcaaagttacaaccataaaaca

SEQ ID NO: 322530 - DNA, 55 bp, Artificial
  Synthetic oligonucleotide
agcgcgaaaggggttgaatttacaacagatgctaagtggatgaaatgggcaatcg

SEQ ID NO: 322531 - DNA, 52 bp, Artificial
  Synthetic oligonucleotide
agcgcgacacagcagacgtccgtccagtaacgtggcagggcgcagaatgaca

SEQ ID NO: 322532 - DNA, 57 bp, Artificial
  Synthetic oligonucleotide
agcgcgacctggagccctcgataccatcggagtatttgctccctaagaacaagttcc

SEQ ID NO: 322533 - DNA, 58 bp, Artificial
  Synthetic oligonucleotide
agcgcgacgctccatggcgttcaatggcgggaacctcaaaggttagccgcaacgctaa

SEQ ID NO: 322534 - DNA, 56 bp, Artificial
  Synthetic oligonucleotide
agcgcgacgtgaatgtttaacaccgtatgccctagccccgaatgccgttgttccga

SEQ ID NO: 322535 - DNA, 53 bp, Artificial
  Synthetic oligonucleotide
agcgcgatggctccgtattaacccaaactgctttaccgtttctcgagtttggt

SEQ ID NO: 322536 - DNA, 58 bp, Artificial
  Synthetic oligonucleotide
agcgcgcaaacgccaccgacaaaacaggaaggctcgtggacacaagagcccaagcgag

SEQ ID NO: 322537 - DNA, 60 bp, Artificial
  Synthetic oligonucleotide
agcgcgcatgagattcaaatttcgaatttgaaatcctggcagacccgcctaaagacgctc

SEQ ID NO: 322538 - DNA, 60 bp, Artificial
  Synthetic oligonucleotide
agcgcgccaaccacaccacagggcacacatcacactgcaaggggtctactgtcagtcacc

SEQ ID NO: 322539 - DNA, 57 bp, Artificial
  Synthetic oligonucleotide
agcgcgcttagcggcaatcgaaccctccgataaggaggtttagcaaatccgcggctc

SEQ ID NO: 322540 - DNA, 55 bp, Artificial
  Synthetic oligonucleotide
agcgcggcatttcccaattcgcgtagccgagataatcccagtgcacgagaaccgc

SEQ ID NO: 322541 - DNA, 54 bp, Artificial
  Synthetic oligonucleotide
agcgcggcggcctcagcactatccctaatagcgtatcaattagtgatgccgcta

SEQ ID NO: 322542 - DNA, 55 bp, Artificial
  Synthetic oligonucleotide
agcgcggcggggaacgcacaagagacaccacaaggagtaacattaaatgtgggag

SEQ ID NO: 322543 - DNA, 55 bp, Artificial
  Synthetic oligonucleotide
agcgcggctgcctttgtgcgcactaccggtgcgtgtcgtcccacggtatttgttc

SEQ ID NO: 322544 - DNA, 55 bp, Artificial
  Synthetic oligonucleotide
agcgcgggcaacaaccgcgtcttccaggcgggcaactggagcggcctcaacgggg

SEQ ID NO: 322545 - DNA, 55 bp, Artificial
  Synthetic oligonucleotide
agcgcggggggaggatcagcaaccgagagggagtaaatggcaaagaggcggggaa

SEQ ID NO: 322546 - DNA, 57 bp, Artificial
  Synthetic oligonucleotide
agcgcgtaactgagaagtgctgaaccgtgatcccaataatttatccgtaaggaggta

SEQ ID NO: 322547 - DNA, 50 bp, Artificial
  Synthetic oligonucleotide
agcgcgtgacgagctgagtaaaccagggcagggaccgaaactcgctcgca

SEQ ID NO: 322548 - DNA, 60 bp, Artificial
  Synthetic oligonucleotide
agcgcgttaataccacgtgatgatggtgaactcatggaaatggatccttctcaacgtaag

SEQ ID NO: 322549 - DNA, 60 bp, Artificial
  Synthetic oligonucleotide
agcgcgttacagtgaatccaggaccatttgcgcagacagtatatgcgccagtgaactggg

SEQ ID NO: 322550 - DNA, 60 bp, Artificial
  Synthetic oligonucleotide
agcgcgttttcactccacagttactctccaggtgagatcaatagggtggccgcatgcctc

SEQ ID NO: 322551 - DNA, 55 bp, Artificial
  Synthetic oligonucleotide
agcgctaacctaaataaaatcgtcaattggcacaatgctaatcccgcagacgttc

SEQ ID NO: 322552 - DNA, 55 bp, Artificial
  Synthetic oligonucleotide
agcgctaatgcgcacccactgccgctacttaccgaagcactttaaatgcgtcgag

SEQ ID NO: 322553 - DNA, 60 bp, Artificial
  Synthetic oligonucleotide
agcgctacatacgttattgtggtatcgattcgcgcgagttgattaatccgacaacatatg

SEQ ID NO: 322554 - DNA, 60 bp, Artificial
  Synthetic oligonucleotide
agcgctagagaagctgtcgaggactccacgttttgggagatggttgatgaagaacgcgaa

SEQ ID NO: 322555 - DNA, 60 bp, Artificial
  Synthetic oligonucleotide
agcgctaggaagccactagcgtaatcatatggttgatccccaatatttggcgagtatatc

SEQ ID NO: 322556 - DNA, 59 bp, Artificial
  Synthetic oligonucleotide
agcgctaggacgttattatccagtggttacgagctagaatatcagaaggctttgaatag

SEQ ID NO: 322557 - DNA, 60 bp, Artificial
  Synthetic oligonucleotide
agcgctaggcactgaccttgggagacttcttggtatacagcatgttaagtggaatccagc

SEQ ID NO: 322558 - DNA, 60 bp, Artificial
  Synthetic oligonucleotide
agcgctagtgggccaactaggagctctctatagccctttggctgtcggtagctacgctgc

SEQ ID NO: 322559 - DNA, 51 bp, Artificial
  Synthetic oligonucleotide
agcgctatgcagaatgggtcattaacacaagacaggtggcacagcttgcga

SEQ ID NO: 322560 - DNA, 60 bp, Artificial
  Synthetic oligonucleotide
agcgctcatctttacaattggatatatcaatcctcagacatgagcttgagcgtgcaagac

SEQ ID NO: 322561 - DNA, 59 bp, Artificial
  Synthetic oligonucleotide
agcgctgaataagcgctgaatgcaggggcgtgattcgcggaggggggagattaggatac

SEQ ID NO: 322562 - DNA, 58 bp, Artificial
  Synthetic oligonucleotide
agcgctgactaagttcctctgctacatcaacgcggatgtttgtaaagaattaaggtac

SEQ ID NO: 322563 - DNA, 55 bp, Artificial
  Synthetic oligonucleotide
agcgctgcgctgccgattctttgagcgtagccggctggctggacaccatttggga

SEQ ID NO: 322564 - DNA, 60 bp, Artificial
  Synthetic oligonucleotide
agcgctgggagttgcagtagccaatgtcaacgtcaggtccagatacagacgtgctataag

SEQ ID NO: 322565 - DNA, 58 bp, Artificial
  Synthetic oligonucleotide
agcgctggggcttattattacccccagcgctcaggacgggacatcacgtgcaacttaa

SEQ ID NO: 322566 - DNA, 55 bp, Artificial
  Synthetic oligonucleotide
agcgctggggcttattattacccccagcgctcaggacgggacatgggctttttaa

SEQ ID NO: 322567 - DNA, 55 bp, Artificial
  Synthetic oligonucleotide
agcgctggggcttattattacccccagcgctcgggacggggacgggacatttgca

SEQ ID NO: 322568 - DNA, 50 bp, Artificial
  Synthetic oligonucleotide
agcgctgggtgatttatgggcttgcaccgtgagaatgcgtagcagccgtg

SEQ ID NO: 322569 - DNA, 55 bp, Artificial
  Synthetic oligonucleotide
agcgctggtcgtcgcaccaaacgcaggacagctgcaaccggtgcctcttgtgaac

SEQ ID NO: 322570 - DNA, 60 bp, Artificial
  Synthetic oligonucleotide
agcgctggtcgtgcactgtacatccctccatatgatttgcttttgcatgagtggtatgaa

SEQ ID NO: 322571 - DNA, 60 bp, Artificial
  Synthetic oligonucleotide
agcgcttagcggtttgttggagatcgggaaagatcaatcagaacgcattacaaagctata

SEQ ID NO: 322572 - DNA, 51 bp, Artificial
  Synthetic oligonucleotide
agcgcttatgcgtgccagaaatcccgcccctctcgcattgctacttggtga

SEQ ID NO: 322573 - DNA, 54 bp, Artificial
  Synthetic oligonucleotide
agcgcttccgtgtgggcgcccgaggacggtaaagcgttctactacaactgggac

SEQ ID NO: 322574 - DNA, 60 bp, Artificial
  Synthetic oligonucleotide
agcgcttctttgagagtccacattcctatcacctccgatgctcatcctagcaaaggtgtg

SEQ ID NO: 322575 - DNA, 60 bp, Artificial
  Synthetic oligonucleotide
agcgcttgtataccgagtggctagttggcagacgcgaaggcgagactctccatggtctcg

SEQ ID NO: 322576 - DNA, 56 bp, Artificial
  Synthetic oligonucleotide
agcggaaaagggctcaatggaggatattaggacgctatggaaagtaacatttgacc

SEQ ID NO: 322577 - DNA, 55 bp, Artificial
  Synthetic oligonucleotide
agcggaaacaggacaagaaacagcctactatatactaaaattagcaggaagatgg

SEQ ID NO: 322578 - DNA, 55 bp, Artificial
  Synthetic oligonucleotide
agcggaaaggctttttaagcctccactgccgctgtgccccttccgaggattcttc

SEQ ID NO: 322579 - DNA, 60 bp, Artificial
  Synthetic oligonucleotide
agcggaaattgtcagcgaggcaaacatgttcaatgagatggctgctagtcagagagatat

SEQ ID NO: 322580 - DNA, 53 bp, Artificial
  Synthetic oligonucleotide
agcggaaccagtacaggatgctaaagccccgggcaatacccgaaaacacaccc

SEQ ID NO: 322581 - DNA, 56 bp, Artificial
  Synthetic oligonucleotide
agcggaacctctcccaaaataatcgtccgcccactcttgcatctcgtccggcacgt

SEQ ID NO: 322582 - DNA, 58 bp, Artificial
  Synthetic oligonucleotide
agcggaagccattgactgcgccctcccacaagagtttatctcgtggtttgcgagtaac

SEQ ID NO: 322583 - DNA, 55 bp, Artificial
  Synthetic oligonucleotide
agcggaagcgaagcggaggggattctaaggcgaagagtaggggctccagttccta

SEQ ID NO: 322584 - DNA, 59 bp, Artificial
  Synthetic oligonucleotide
agcggaagtgtcccattgtagggccactgagtacataatgaagggagtgtacataaaca

SEQ ID NO: 322585 - DNA, 60 bp, Artificial
  Synthetic oligonucleotide
agcggacaaccatcaacagtcgtggacaacacgctcatggtcatattagcagtcaactac

SEQ ID NO: 322586 - DNA, 51 bp, Artificial
  Synthetic oligonucleotide
agcggacaactcgtactcgtttgcggccgacgattgtgtggagcattggcg

SEQ ID NO: 322587 - DNA, 58 bp, Artificial
  Synthetic oligonucleotide
agcggacaattggcttacccctacagattggaatacacttgttagggcagtcctctca

SEQ ID NO: 322588 - DNA, 60 bp, Artificial
  Synthetic oligonucleotide
agcggacatgatcgatatttacgcacacgttggattagagttagccggtacagacgcaga

SEQ ID NO: 322589 - DNA, 60 bp, Artificial
  Synthetic oligonucleotide
agcggaccgcatatcctggccgggcattagacagatagcggctactgactccacaagata

SEQ ID NO: 322590 - DNA, 60 bp, Artificial
  Synthetic oligonucleotide
agcggacgcatagacctctgaaagcggattgcatcgagttaatgcgttatcatatgtctc

SEQ ID NO: 322591 - DNA, 60 bp, Artificial
  Synthetic oligonucleotide
agcggacgcatcaacgcaagtatctagcgttagcaggagtttgcggttacgtgaattcac

SEQ ID NO: 322592 - DNA, 55 bp, Artificial
  Synthetic oligonucleotide
agcggacggtggtcctcactgaatcactcatacctactgccttggccgagcttgc

SEQ ID NO: 322593 - DNA, 59 bp, Artificial
  Synthetic oligonucleotide
agcggacttcgatagacgaggagagtggtgcaagtctcggaaggggcgtcctccatcca

SEQ ID NO: 322594 - DNA, 50 bp, Artificial
  Synthetic oligonucleotide
agcggactttgttaaagacggtaattcctatgaagcaggaataggaatag

SEQ ID NO: 322595 - DNA, 58 bp, Artificial
  Synthetic oligonucleotide
agcggagaacccacctccagaggaccccttcagcgaacagagaggctcctcctctgcg

SEQ ID NO: 322596 - DNA, 54 bp, Artificial
  Synthetic oligonucleotide
agcggagaacccacctccagaggaccccttctgcgaacagaaaagctcttcccc

SEQ ID NO: 322597 - DNA, 60 bp, Artificial
  Synthetic oligonucleotide
agcggagacagcgacgaagcactcctccaaacagtgaggatcatcagaatcctatatcaa

SEQ ID NO: 322598 - DNA, 60 bp, Artificial
  Synthetic oligonucleotide
agcggagacgacgccggcttgctacgtaggtacgatgcatcatgcatcgcctagtagtag

SEQ ID NO: 322599 - DNA, 59 bp, Artificial
  Synthetic oligonucleotide
agcggaggaaacactaaccagcagagggcgtccgcagggcaaatcagtgtacagcccac

SEQ ID NO: 322600 - DNA, 55 bp, Artificial
  Synthetic oligonucleotide
agcggaggcagccttggagaacctcgtattacttaatgcagcgtctctggccggg

SEQ ID NO: 322601 - DNA, 55 bp, Artificial
  Synthetic oligonucleotide
agcggaggcgtgactctgggaaacgtgcccacgccggggccacgcgaagtggaga

SEQ ID NO: 322602 - DNA, 59 bp, Artificial
  Synthetic oligonucleotide
agcggaggggcaggataggaagaaacccagatcgcaacacggactcttacatgtatgaa

SEQ ID NO: 322603 - DNA, 59 bp, Artificial
  Synthetic oligonucleotide
agcggagtaatcagcttagagggacttttcaatgaaaacagactgtggagaaacatatg

SEQ ID NO: 322604 - DNA, 54 bp, Artificial
  Synthetic oligonucleotide
agcggagtgagactcacagtcctcgcaaccgctaccccccccggttcggtcacg

SEQ ID NO: 322605 - DNA, 59 bp, Artificial
  Synthetic oligonucleotide
agcggatacgcccaaacagattgtgtattagaagcaatggctttccttgaagagtccca

SEQ ID NO: 322606 - DNA, 60 bp, Artificial
  Synthetic oligonucleotide
agcggatcagaggacgtcgtgtgttgctcaatgtcatattcatggaccggggcacttata

SEQ ID NO: 322607 - DNA, 60 bp, Artificial
  Synthetic oligonucleotide
agcggatcccagcagctgcaaatcccagcccaaccagcctcaagtttgggagctgataca

SEQ ID NO: 322608 - DNA, 60 bp, Artificial
  Synthetic oligonucleotide
agcggatcggaggacgtcgtgtgttgctcgatgtcatactcatggactggggcgcttgtg

SEQ ID NO: 322609 - DNA, 60 bp, Artificial
  Synthetic oligonucleotide
agcggatcggccttttatgtgtcgactctatgtgcacccatggcaccagagacagtagaa

SEQ ID NO: 322610 - DNA, 60 bp, Artificial
  Synthetic oligonucleotide
agcggatggacacaaggacttggactcacggcaagtgcacatggtatgattttggataca

SEQ ID NO: 322611 - DNA, 52 bp, Artificial
  Synthetic oligonucleotide
agcggattaacgttgtgaaagtacgaaaaccctcggacttaactcgagagat

SEQ ID NO: 322612 - DNA, 50 bp, Artificial
  Synthetic oligonucleotide
agcggattattggaccccgcgatagggtctgttagggtcgggggttcggc

SEQ ID NO: 322613 - DNA, 54 bp, Artificial
  Synthetic oligonucleotide
agcggattcgtgaggacactgttccagcaaatgcgggatgtgattggaacattt

SEQ ID NO: 322614 - DNA, 54 bp, Artificial
  Synthetic oligonucleotide
agcggattcgtgaggacgctgtttcaacaaatgagggatgtgcttggaacgttt

SEQ ID NO: 322615 - DNA, 51 bp, Artificial
  Synthetic oligonucleotide
agcggattgggatagctttgggcacaagattgggattcagggggataagat

SEQ ID NO: 322616 - DNA, 60 bp, Artificial
  Synthetic oligonucleotide
agcggcaagcaaggtggttcaattaatccattgtcacaacacacaattattccaacttca

SEQ ID NO: 322617 - DNA, 55 bp, Artificial
  Synthetic oligonucleotide
agcggcaccaagactgaaattgtagccagaaatgttgatgctggactgttgttca

SEQ ID NO: 322618 - DNA, 60 bp, Artificial
  Synthetic oligonucleotide
agcggcactgccacacaaatgggacaccagcaagttagtcgcggagctttatgtccaaac

SEQ ID NO: 322619 - DNA, 60 bp, Artificial
  Synthetic oligonucleotide
agcggcagtggagttaccacagacgcatgtcgtgctcaggcgatgcaattcacatttggc

SEQ ID NO: 322620 - DNA, 60 bp, Artificial
  Synthetic oligonucleotide
agcggcatcatctgtaagattgacgtcagtgagatcggtgggcactattacattgccaag

SEQ ID NO: 322621 - DNA, 55 bp, Artificial
  Synthetic oligonucleotide
agcggccatccgtataatattaccggatggccgcgcccccctctttatggtggtc

SEQ ID NO: 322622 - DNA, 56 bp, Artificial
  Synthetic oligonucleotide
agcggcccccccacggcagccaaggcagacccagacagcgatatcgttgaaagtta

SEQ ID NO: 322623 - DNA, 54 bp, Artificial
  Synthetic oligonucleotide
agcggccccggggcctaattcgagcctcgcccatctgcctaacctaaaatggcg

SEQ ID NO: 322624 - DNA, 52 bp, Artificial
  Synthetic oligonucleotide
agcggcccgagaggcagccataaggacatctccagaaacttccaccctcctc

SEQ ID NO: 322625 - DNA, 54 bp, Artificial
  Synthetic oligonucleotide
agcggccgaggagggttgtagacaaacgaacgaacgactgtcgctagttaagta

SEQ ID NO: 322626 - DNA, 52 bp, Artificial
  Synthetic oligonucleotide
agcggcctgctcctggaggctgcccacctatagagctgaagaacaagcctat

SEQ ID NO: 322627 - DNA, 51 bp, Artificial
  Synthetic oligonucleotide
agcggcgacagccctgacggtccagtctcagcagttactcgctgggatact

SEQ ID NO: 322628 - DNA, 54 bp, Artificial
  Synthetic oligonucleotide
agcggcgacgagaaagataaaggcgaacaaagttttaaagtctggcgatgtccg

SEQ ID NO: 322629 - DNA, 55 bp, Artificial
  Synthetic oligonucleotide
agcggcgaggaacgctgaattgtctatttaaccctagtattacgtcaaatatacc

SEQ ID NO: 322630 - DNA, 60 bp, Artificial
  Synthetic oligonucleotide
agcggcgatcgatggattagtacagggcagcgtgcactcaatattgacaggtgaatctta

SEQ ID NO: 322631 - DNA, 55 bp, Artificial
  Synthetic oligonucleotide
agcggcgctcttagcgtacagtcacaagccccactgaccgtgcaagactccaaac

SEQ ID NO: 322632 - DNA, 50 bp, Artificial
  Synthetic oligonucleotide
agcggcgttaagtgaggcgaaggcggaactcattgagtggaaggatgaaa

SEQ ID NO: 322633 - DNA, 60 bp, Artificial
  Synthetic oligonucleotide
agcggcgttagctccgacatgtcgttgcaccggtaatagcgaatgatcttgtgcacgtag

SEQ ID NO: 322634 - DNA, 60 bp, Artificial
  Synthetic oligonucleotide
agcggctactcaggcaacaagaaggccataaatccaggaatggtatgtgccggttggagc

SEQ ID NO: 322635 - DNA, 60 bp, Artificial
  Synthetic oligonucleotide
agcggctataaccttgcactgcctactaagagagtcacctgggtagcgccactaggtgtc

SEQ ID NO: 322636 - DNA, 58 bp, Artificial
  Synthetic oligonucleotide
agcggctccacgcttgcttgcttacaacgacctcttaataaagctgccaaattagaag

SEQ ID NO: 322637 - DNA, 60 bp, Artificial
  Synthetic oligonucleotide
agcggctgaaatactgattcctgcggaccagacttcttatggcgccaatgagactcgcgc

SEQ ID NO: 322638 - DNA, 56 bp, Artificial
  Synthetic oligonucleotide
agcggctgtacggaacccttgtcctaccagtagaagctctacataaacttcctagc

SEQ ID NO: 322639 - DNA, 59 bp, Artificial
  Synthetic oligonucleotide
agcggctgttttgaagactaagatagataaatcgactcaaatatcaccaaacacaatac

SEQ ID NO: 322640 - DNA, 51 bp, Artificial
  Synthetic oligonucleotide
agcggcttccttacctccgcgtccctgacaacctcgcgggtttttacactg

SEQ ID NO: 322641 - DNA, 60 bp, Artificial
  Synthetic oligonucleotide
agcgggaacaatgaaggacgcacatcagacatgcgaacggaagttataaggatgatggaa

SEQ ID NO: 322642 - DNA, 54 bp, Artificial
  Synthetic oligonucleotide
agcgggaacgggaaacggttcttagtaggctagctgttaatataatgtctcgcc

SEQ ID NO: 322643 - DNA, 54 bp, Artificial
  Synthetic oligonucleotide
agcgggaccgggtatgatagaaatagaggtaatttactacttgagtttagataa

SEQ ID NO: 322644 - DNA, 54 bp, Artificial
  Synthetic oligonucleotide
agcgggactcgtactggtctacctcccctggtggtagcactacaaaattggtgt

SEQ ID NO: 322645 - DNA, 55 bp, Artificial
  Synthetic oligonucleotide
agcgggagcaaatgtctcgagacccggacatacaccccaccctcgccgctcatct

SEQ ID NO: 322646 - DNA, 52 bp, Artificial
  Synthetic oligonucleotide
agcgggagtcgtaaaacggattgctgctcacagtccaattgggggaacgggc

SEQ ID NO: 322647 - DNA, 56 bp, Artificial
  Synthetic oligonucleotide
agcgggagtgctaggaccctgattgtaactggctttaccgcacttgggctcgacct

SEQ ID NO: 322648 - DNA, 58 bp, Artificial
  Synthetic oligonucleotide
agcgggatccctcatggcgccagatggcgggaacctcaaaggtaagccgcactaccaa

SEQ ID NO: 322649 - DNA, 56 bp, Artificial
  Synthetic oligonucleotide
agcgggatcctattagacttgggccttggaccagtttcctctgctgggcttttgga

SEQ ID NO: 322650 - DNA, 60 bp, Artificial
  Synthetic oligonucleotide
agcgggatggcaagatagcgaagcaatactatcgccaggcgactatactagtgaacgctt

SEQ ID NO: 322651 - DNA, 54 bp, Artificial
  Synthetic oligonucleotide
agcgggattgaagagggctcacaggaaagcgtgcaggggtccggtaacgcgggg

SEQ ID NO: 322652 - DNA, 60 bp, Artificial
  Synthetic oligonucleotide
agcgggcaaccatcaacagttgttgataacacacttatggttatcatcacaatgcactat

SEQ ID NO: 322653 - DNA, 53 bp, Artificial
  Synthetic oligonucleotide
agcgggcaacgtattgatgaagccagcgcggtatatatgaagctttgactttt

SEQ ID NO: 322654 - DNA, 60 bp, Artificial
  Synthetic oligonucleotide
agcgggcacccaacgcgctgtcgcagtgactgctgaccatgaggttacttctactaagat

SEQ ID NO: 322655 - DNA, 59 bp, Artificial
  Synthetic oligonucleotide
agcgggccagatggactgttgtagaagggccaggagaggcttatagaggcttaatagag

SEQ ID NO: 322656 - DNA, 55 bp, Artificial
  Synthetic oligonucleotide
agcgggctcatggtaacataaaggcagttgctcaagctccaagtgccttggtcac

SEQ ID NO: 322657 - DNA, 54 bp, Artificial
  Synthetic oligonucleotide
agcgggcttcggggtaattggacgatatgtacgcggcaactgacggttacgggc

SEQ ID NO: 322658 - DNA, 60 bp, Artificial
  Synthetic oligonucleotide
agcggggacatgaacaccgctctgggaaactgcttgttagcttgcattatcaccaaagag

SEQ ID NO: 322659 - DNA, 55 bp, Artificial
  Synthetic oligonucleotide
agcggggtgatccatgtttgatgcagttattaatgcgttgtcggcgctggctcag

SEQ ID NO: 322660 - DNA, 53 bp, Artificial
  Synthetic oligonucleotide
agcggggtgcgtctgtgagaagcacctcagaaagcggcaagatcatcccagaa

SEQ ID NO: 322661 - DNA, 53 bp, Artificial
  Synthetic oligonucleotide
agcggggtttttggagacaacccgcgccccaatgacggaacaggcagttgtgg

SEQ ID NO: 322662 - DNA, 53 bp, Artificial
  Synthetic oligonucleotide
agcgggtaagttggataaggtaatatccgcaaggtcgaatagggtttgtatta

SEQ ID NO: 322663 - DNA, 57 bp, Artificial
  Synthetic oligonucleotide
agcgggtagaatttctgggttgtaagaaacgcctctcatgatttgctctccacaaag

SEQ ID NO: 322664 - DNA, 56 bp, Artificial
  Synthetic oligonucleotide
agcgggtccccgtccactcggcatcacacggaatctgcaccgagtccccccccgca

SEQ ID NO: 322665 - DNA, 55 bp, Artificial
  Synthetic oligonucleotide
agcgggtccgtgctagcaggcgagtctcatatgccgtgagggttgcccatgtagc

SEQ ID NO: 322666 - DNA, 55 bp, Artificial
  Synthetic oligonucleotide
agcgggtgggtgctaagttggtagttacattactctaaactacctgaagtcacta

SEQ ID NO: 322667 - DNA, 55 bp, Artificial
  Synthetic oligonucleotide
agcggtaaattgaccgagctcgttacggataacggtacagtcttgcttgcgacac

SEQ ID NO: 322668 - DNA, 55 bp, Artificial
  Synthetic oligonucleotide
agcggtaatcttaaatgtggcgggaactttagaatccgcgccagatcctttgagt

SEQ ID NO: 322669 - DNA, 53 bp, Artificial
  Synthetic oligonucleotide
agcggtagatgggttcttaataatgagcattacagagctttaccaggagtttt

SEQ ID NO: 322670 - DNA, 52 bp, Artificial
  Synthetic oligonucleotide
agcggtatagaggtcgataaaaggtatccgggtaatctcctacgatatcgtc

SEQ ID NO: 322671 - DNA, 57 bp, Artificial
  Synthetic oligonucleotide
agcggtcaagaatcccgctgtaaaaggtgctattatgactggtacatcgttggttgc

SEQ ID NO: 322672 - DNA, 54 bp, Artificial
  Synthetic oligonucleotide
agcggtcatgacacagtggttatggaggtgagctattccggggccaccaaaccc

SEQ ID NO: 322673 - DNA, 60 bp, Artificial
  Synthetic oligonucleotide
agcggtccgcacactccggacttcagacccagcggcattcgtaaggatgcattcttccaa

SEQ ID NO: 322674 - DNA, 60 bp, Artificial
  Synthetic oligonucleotide
agcggtgagtggcatctatatcaaaccaggaccgatctactaccaggactatgtggggcc

SEQ ID NO: 322675 - DNA, 60 bp, Artificial
  Synthetic oligonucleotide
agcggtgatatggataccgccctgggcaattgtgttctcatggtcctaatgacacgaaat

SEQ ID NO: 322676 - DNA, 60 bp, Artificial
  Synthetic oligonucleotide
agcggtgcaccgtattgtggtagtgagtccaggatccgcttgagcaggcgagatcgctaa

SEQ ID NO: 322677 - DNA, 55 bp, Artificial
  Synthetic oligonucleotide
agcggtggctcttattgtttggtacagcctgaccggtccttcccacttcaaccat

SEQ ID NO: 322678 - DNA, 52 bp, Artificial
  Synthetic oligonucleotide
agcggttagtagtgacgaagggaccttggttgaatccggtgacagcgcgcgg

SEQ ID NO: 322679 - DNA, 60 bp, Artificial
  Synthetic oligonucleotide
agcggttccatcaagtaatgtacgtatgcacttggtagactattgcgcactattgagtgt

SEQ ID NO: 322680 - DNA, 60 bp, Artificial
  Synthetic oligonucleotide
agcggttccggtgtatgagagagagggttgctttaggtgagacggcttagcattgcctca

SEQ ID NO: 322681 - DNA, 55 bp, Artificial
  Synthetic oligonucleotide
agcggttcgctgaagcgcgctggcaatatcgtctgggatgccggcaacttcgatc

SEQ ID NO: 322682 - DNA, 58 bp, Artificial
  Synthetic oligonucleotide
agcggttgctcataggccccgctcactgacgagactacctaaattcgccactctttcg

SEQ ID NO: 322683 - DNA, 55 bp, Artificial
  Synthetic oligonucleotide
agcggttgttgatgcttacgaggcgctcgcccacttctgcacccaaacttttggc

SEQ ID NO: 322684 - DNA, 58 bp, Artificial
  Synthetic oligonucleotide
agcggtttaaactacataatatcctcacggagccgaatctattgacaatcgattttga

SEQ ID NO: 322685 - DNA, 55 bp, Artificial
  Synthetic oligonucleotide
agcggtttctgcgcatgatagtaactcacacaacgctctctccagagtggaagct

SEQ ID NO: 322686 - DNA, 60 bp, Artificial
  Synthetic oligonucleotide
agcgtaaatcataaattagatgtcacatctacaacatgtacaatacggaattgtaataaa

SEQ ID NO: 322687 - DNA, 51 bp, Artificial
  Synthetic oligonucleotide
agcgtaagaaaaatttgaatagtaagattgctaatcatagagttcggacgc

SEQ ID NO: 322688 - DNA, 58 bp, Artificial
  Synthetic oligonucleotide
agcgtaagtgttgtttgtacgaggacatatacaagaagtatggcggttcagagtcaaa

SEQ ID NO: 322689 - DNA, 50 bp, Artificial
  Synthetic oligonucleotide
agcgtaatggggatttccagttttaaggatgggactcaatataccattgt

SEQ ID NO: 322690 - DNA, 55 bp, Artificial
  Synthetic oligonucleotide
agcgtacacccacggagtccctgaccccccaaatcttgaaggccgattcattcag

SEQ ID NO: 322691 - DNA, 53 bp, Artificial
  Synthetic oligonucleotide
agcgtacacgtagcggggaaactgttgcggaacgggcacaaacgacggttgag

SEQ ID NO: 322692 - DNA, 57 bp, Artificial
  Synthetic oligonucleotide
agcgtacactccatattaaccggcgaatcgtacggtcaatccgtcaagcaggcagtt

SEQ ID NO: 322693 - DNA, 59 bp, Artificial
  Synthetic oligonucleotide
agcgtaccattggcttatgatcctaataacgagcttggtgacttgaaggatgtgtttcc

SEQ ID NO: 322694 - DNA, 55 bp, Artificial
  Synthetic oligonucleotide
agcgtacgataacgtattgctgattaccggcattcagaacgacccgaaagtaatc

SEQ ID NO: 322695 - DNA, 55 bp, Artificial
  Synthetic oligonucleotide
agcgtacgatcaacttccggccataaggaaagaagtacctgataatgcgcccttc

SEQ ID NO: 322696 - DNA, 60 bp, Artificial
  Synthetic oligonucleotide
agcgtacgtgagggatataagcctcgagatttagatcgccagtatgagaaatacatcgtg

SEQ ID NO: 322697 - DNA, 60 bp, Artificial
  Synthetic oligonucleotide
agcgtactcaatccaatgcccatatgagcagccaatccatattgcgtcataggtcgagca

SEQ ID NO: 322698 - DNA, 55 bp, Artificial
  Synthetic oligonucleotide
agcgtactctttccactagttcctacagggtcagagaatcttcttgcgctgtaca

SEQ ID NO: 322699 - DNA, 56 bp, Artificial
  Synthetic oligonucleotide
agcgtagacccatgttttcagtgttatcctgaacaggggtaagcgtgatccaaaaa

SEQ ID NO: 322700 - DNA, 60 bp, Artificial
  Synthetic oligonucleotide
agcgtagcttcaagtaggagacacaagagatttgcgggagtagtcctggcaggtgcggcc

SEQ ID NO: 322701 - DNA, 56 bp, Artificial
  Synthetic oligonucleotide
agcgtaggtctgcacaccgctggtctacgtttccggttagagcgtttccgactgcg

SEQ ID NO: 322702 - DNA, 55 bp, Artificial
  Synthetic oligonucleotide
agcgtatactctagtataggaggtagattacgtagtggtgtgtcctggactagta

SEQ ID NO: 322703 - DNA, 52 bp, Artificial
  Synthetic oligonucleotide
agcgtatcgacggtgaacccgcggagacgaaggttatgggtcgcgtgttacc

SEQ ID NO: 322704 - DNA, 60 bp, Artificial
  Synthetic oligonucleotide
agcgtatctgacttgacagagccgaccagctactcaatatgcggctccgggtcgttaccc

SEQ ID NO: 322705 - DNA, 60 bp, Artificial
  Synthetic oligonucleotide
agcgtatgacgccctcagattccaagtggactccacagtcaatgcatgctatgccggaga

SEQ ID NO: 322706 - DNA, 55 bp, Artificial
  Synthetic oligonucleotide
agcgtatgatgcagaagctcaagttccgggatgcttttgatagaaaggttggccg

SEQ ID NO: 322707 - DNA, 60 bp, Artificial
  Synthetic oligonucleotide
agcgtatgccgtggacagtccctggtaaccctggtgcgattcagagcagccaatacggta

SEQ ID NO: 322708 - DNA, 55 bp, Artificial
  Synthetic oligonucleotide
agcgtatgctgttgcccaattcttgagtgctccttgctctggtttgtccaaccag

SEQ ID NO: 322709 - DNA, 60 bp, Artificial
  Synthetic oligonucleotide
agcgtatgtctagcggcgcttgcacggggcgcactggccatacctgagtgtcggttgtgg

SEQ ID NO: 322710 - DNA, 59 bp, Artificial
  Synthetic oligonucleotide
agcgtattcttggtagggcagctgtttactttcaggcctaagcaccatcaggtcaccca

SEQ ID NO: 322711 - DNA, 55 bp, Artificial
  Synthetic oligonucleotide
agcgtcaaaaacactactgatggacttagtacgagtgttacccagttgggtgaac

SEQ ID NO: 322712 - DNA, 60 bp, Artificial
  Synthetic oligonucleotide
agcgtcaaactatggagcattgagagcgtcgcagctatacggaagcctagagcattatag

SEQ ID NO: 322713 - DNA, 60 bp, Artificial
  Synthetic oligonucleotide
agcgtcaataacgctgacggtacaagcccggacattattatctgggatagtgcaacagca

SEQ ID NO: 322714 - DNA, 56 bp, Artificial
  Synthetic oligonucleotide
agcgtcaattatgcgggagcaaattagatgggcatcaagtgcacataattggctta

SEQ ID NO: 322715 - DNA, 50 bp, Artificial
  Synthetic oligonucleotide
agcgtcacaccccggctacccgtttggtagacttccgggacggttcggta

SEQ ID NO: 322716 - DNA, 60 bp, Artificial
  Synthetic oligonucleotide
agcgtcaccacatgttttagtggctctgactagacacacaacgcgttgtcggtactatac

SEQ ID NO: 322717 - DNA, 55 bp, Artificial
  Synthetic oligonucleotide
agcgtcactggacaatcggatgaagacgatacgtcctttggcgtattcggacacc

SEQ ID NO: 322718 - DNA, 55 bp, Artificial
  Synthetic oligonucleotide
agcgtcatgatattgctcatactggcaaggtgatatgtgtctcggatgtcacacg

SEQ ID NO: 322719 - DNA, 55 bp, Artificial
  Synthetic oligonucleotide
agcgtcatggcctccctgtcgtacgtggggtagcggcgctggtacttgaggacca

SEQ ID NO: 322720 - DNA, 60 bp, Artificial
  Synthetic oligonucleotide
agcgtccagggatctagtagtcaattatgttaacactaacatgggcctaaagatcagaca

SEQ ID NO: 322721 - DNA, 60 bp, Artificial
  Synthetic oligonucleotide
agcgtcctgcaagtaaacagagtgactcatggttgcgcaaattcacagagtgttgcaatg

SEQ ID NO: 322722 - DNA, 57 bp, Artificial
  Synthetic oligonucleotide
agcgtcgacacttgcagggttatttgcaatgtaagggtcagagaaccctttcacaaa

SEQ ID NO: 322723 - DNA, 60 bp, Artificial
  Synthetic oligonucleotide
agcgtcgatcccccgtatggagcggagaatataaggctcagctaggatgacacgcctgta

SEQ ID NO: 322724 - DNA, 51 bp, Artificial
  Synthetic oligonucleotide
agcgtcgctcaagctacttcaaatctatgtcgctacacggcatcccagcat

SEQ ID NO: 322725 - DNA, 60 bp, Artificial
  Synthetic oligonucleotide
agcgtcgttagcattctggcagcctcccctagcacttcttccgtcgatctggaaatctcc

SEQ ID NO: 322726 - DNA, 60 bp, Artificial
  Synthetic oligonucleotide
agcgtcgtttacactgaaccggtcacaaccagctcatgataacttgatgggtacaatgtg

SEQ ID NO: 322727 - DNA, 59 bp, Artificial
  Synthetic oligonucleotide
agcgtctaccatgaaactgctgaggacgcctccatcaggcatttgggaccagcgacaga

SEQ ID NO: 322728 - DNA, 55 bp, Artificial
  Synthetic oligonucleotide
agcgtctatagagaggttagaggctgctggacacaacgcgttgaagactcatgct

SEQ ID NO: 322729 - DNA, 60 bp, Artificial
  Synthetic oligonucleotide
agcgtctcaggactactctgcgcaacgggctgcctgacttcatgaaccagagcatgatta

SEQ ID NO: 322730 - DNA, 53 bp, Artificial
  Synthetic oligonucleotide
agcgtctggttcatacaaagtaaacggtgggtacggtggagaaggaacaccga

SEQ ID NO: 322731 - DNA, 55 bp, Artificial
  Synthetic oligonucleotide
agcgtcttagattgaggaatgcaaactccaggaatctaaactttgaacagtacaa

SEQ ID NO: 322732 - DNA, 57 bp, Artificial
  Synthetic oligonucleotide
agcgtgacccttatgtggtaaccgggatagctgggccccacaatgacatggagattc

SEQ ID NO: 322733 - DNA, 56 bp, Artificial
  Synthetic oligonucleotide
agcgtgacggttgctgatattactttgtctggtaatttaccccgattacaacatgg

SEQ ID NO: 322734 - DNA, 58 bp, Artificial
  Synthetic oligonucleotide
agcgtgagctcggagcaccctaaaaagtgctctgttttgtaacagccaacgattgtta

SEQ ID NO: 322735 - DNA, 58 bp, Artificial
  Synthetic oligonucleotide
agcgtgatgcaaagtaaatcatcctctccgccaaataacgggcgtctacctctactag

SEQ ID NO: 322736 - DNA, 60 bp, Artificial
  Synthetic oligonucleotide
agcgtgatggaatgcaggaagaggctatacaagagatcgctggaatgacagcagacgtgc

SEQ ID NO: 322737 - DNA, 59 bp, Artificial
  Synthetic oligonucleotide
agcgtgcaagggagaggcgtagagcgcagcaaccaatcatgctaaagtgggagcccaaa

SEQ ID NO: 322738 - DNA, 55 bp, Artificial
  Synthetic oligonucleotide
agcgtgcatctgccacgcagctgtatcaaacctgcaaggcggcaggcacatgccc

SEQ ID NO: 322739 - DNA, 57 bp, Artificial
  Synthetic oligonucleotide
agcgtgcccatccccgcgcctaactacaagtttgcgctgtggagggtatccgcggag

SEQ ID NO: 322740 - DNA, 54 bp, Artificial
  Synthetic oligonucleotide
agcgtgcccatttctattccttcgcgaaattgggctgcttttcgggggtggagt

SEQ ID NO: 322741 - DNA, 59 bp, Artificial
  Synthetic oligonucleotide
agcgtgccctcccacgtctcaggtgggactgtccggggagtcatcgcagcgccttgact

SEQ ID NO: 322742 - DNA, 55 bp, Artificial
  Synthetic oligonucleotide
agcgtgcctacgcatggacgggcgaggatagtgcgactcttggagctgggatcct

SEQ ID NO: 322743 - DNA, 54 bp, Artificial
  Synthetic oligonucleotide
agcgtgcgcaaggagaattcaaggtgccgaaaggggtattaccagtgtcaacca

SEQ ID NO: 322744 - DNA, 50 bp, Artificial
  Synthetic oligonucleotide
agcgtgcgcccgtgaagtatctcgttgtgttctcctagctgcccgtgcac

SEQ ID NO: 322745 - DNA, 56 bp, Artificial
  Synthetic oligonucleotide
agcgtgctcaagcccgcggaggtcaggcccccgcgaggcatgtgcgggagcgacat

SEQ ID NO: 322746 - DNA, 60 bp, Artificial
  Synthetic oligonucleotide
agcgtggagtatacatggacctgcttgtttcgggggcaagcccaaacagtgcatggtctc

SEQ ID NO: 322747 - DNA, 59 bp, Artificial
  Synthetic oligonucleotide
agcgtggatcccaacgtcgtaaacaccatactaccagctaggctagctgtgcggtcgtc

SEQ ID NO: 322748 - DNA, 60 bp, Artificial
  Synthetic oligonucleotide
agcgtggattactatctgagtccgatgctgttcaaccactaataggtaataaatcatgag

SEQ ID NO: 322749 - DNA, 55 bp, Artificial
  Synthetic oligonucleotide
agcgtggctgctatgaagccacgtttatcatgtactatttggatgacagctgtca

SEQ ID NO: 322750 - DNA, 60 bp, Artificial
  Synthetic oligonucleotide
agcgtgggatggacaggccgcgttgcatgtacataacccaacacaacagaacgcgatggt

SEQ ID NO: 322751 - DNA, 52 bp, Artificial
  Synthetic oligonucleotide
agcgtggtcacaagaatccttggagattgcgctctcagtgatagtcctaacg

SEQ ID NO: 322752 - DNA, 51 bp, Artificial
  Synthetic oligonucleotide
agcgtggttgtaccatgagtgctgtccgaggtgcgggtatgaatattctct

SEQ ID NO: 322753 - DNA, 55 bp, Artificial
  Synthetic oligonucleotide
agcgtgtacattacgttccacaggtccaccgctatcggggtgaagcagcccgcgg

SEQ ID NO: 322754 - DNA, 55 bp, Artificial
  Synthetic oligonucleotide
agcgtgtcacatggtgtgcttgacatgggtctagtcgaaacaggagttaatgcag

SEQ ID NO: 322755 - DNA, 54 bp, Artificial
  Synthetic oligonucleotide
agcgtgtgcttctgtagcacgagctcttatagcggctccattgttacatcatat

SEQ ID NO: 322756 - DNA, 60 bp, Artificial
  Synthetic oligonucleotide
agcgtgttatcgctcgacgtgtcattcactcgcctcgtcggcctgtggttaggtggtgcc

SEQ ID NO: 322757 - DNA, 59 bp, Artificial
  Synthetic oligonucleotide
agcgtgttcatggaaaacctggcgttcccatcatgtttgaacgtgaatgaatgtgttaa

SEQ ID NO: 322758 - DNA, 57 bp, Artificial
  Synthetic oligonucleotide
agcgttaaacgaggacgacgtaagacgacgtttcagacgtattcagagctcgatcca

SEQ ID NO: 322759 - DNA, 60 bp, Artificial
  Synthetic oligonucleotide
agcgttaaatcaagagctagctaaggcgcgtattgagcaacaagacatgatgactcagtc

SEQ ID NO: 322760 - DNA, 58 bp, Artificial
  Synthetic oligonucleotide
agcgttacgttcgatattgtggtattgactcacgtgaattgattaatccaacaacgta

SEQ ID NO: 322761 - DNA, 55 bp, Artificial
  Synthetic oligonucleotide
agcgttagaatgtactgggaatctgctgtagttgtagaacccggtgaaccaagtc

SEQ ID NO: 322762 - DNA, 55 bp, Artificial
  Synthetic oligonucleotide
agcgttcagtttctagacggtccttcaaccaccacaaggcgagaggagccgggga

SEQ ID NO: 322763 - DNA, 60 bp, Artificial
  Synthetic oligonucleotide
agcgttcatcgattattgggctgatagagaatgcttcaacccttgcttttatgtggaatt

SEQ ID NO: 322764 - DNA, 55 bp, Artificial
  Synthetic oligonucleotide
agcgttctattacagagtataggtgcatgttagattagagttgtatgatgtgacc

SEQ ID NO: 322765 - DNA, 57 bp, Artificial
  Synthetic oligonucleotide
agcgttctgatgaggtcacgctcccgcatacgacccacatctggggtgtgtttacca

SEQ ID NO: 322766 - DNA, 54 bp, Artificial
  Synthetic oligonucleotide
agcgttcttatgttgctaaacgaagtgaagtaaaacgacgacccagttatccaa

SEQ ID NO: 322767 - DNA, 59 bp, Artificial
  Synthetic oligonucleotide
agcgttgaactgaatcatcgaatcgtttcattgactcggaacaaatcatttttccataa

SEQ ID NO: 322768 - DNA, 55 bp, Artificial
  Synthetic oligonucleotide
agcgttgaagagttcacagacagaggcgcctcaaagtttcctgttatggagagcg

SEQ ID NO: 322769 - DNA, 53 bp, Artificial
  Synthetic oligonucleotide
agcgttgacgcgacgggtctacccggtcccgaacttgacgtgtgcagtagaat

SEQ ID NO: 322770 - DNA, 60 bp, Artificial
  Synthetic oligonucleotide
agcgttgattcaggctacagccctagaagactggtctgctatcatggcgaaacccgagct

SEQ ID NO: 322771 - DNA, 57 bp, Artificial
  Synthetic oligonucleotide
agcgttgcacctataatgttctcgaacaagatggcaaggctaggaaagggatacatg

SEQ ID NO: 322772 - DNA, 55 bp, Artificial
  Synthetic oligonucleotide
agcgttgcactggtttaagcccatccactaattgaggaatcccgcgttcctcagc

SEQ ID NO: 322773 - DNA, 59 bp, Artificial
  Synthetic oligonucleotide
agcgttgcccgaggcaccattcagtcatatcaaggaaattaataatgtcttactgaaat

SEQ ID NO: 322774 - DNA, 55 bp, Artificial
  Synthetic oligonucleotide
agcgttgcctcggacttcgagccggcagagcacgcatcctcgatcgcggaagact

SEQ ID NO: 322775 - DNA, 60 bp, Artificial
  Synthetic oligonucleotide
agcgttggctcgtgacacatatatttctcctctcgcgtgacgtcagagctagcagttaga

SEQ ID NO: 322776 - DNA, 52 bp, Artificial
  Synthetic oligonucleotide
agcgttggtaagattcaggataaaattgtagctgggtgcaaaatagcaacta

SEQ ID NO: 322777 - DNA, 59 bp, Artificial
  Synthetic oligonucleotide
agcgttgtttgagcgaccggaatagagtggttcttcgagttggatgaagactgcattct

SEQ ID NO: 322778 - DNA, 50 bp, Artificial
  Synthetic oligonucleotide
agcgtttaaaggggatgattcagtggttctttgtagtgactaccgtcaga

SEQ ID NO: 322779 - DNA, 56 bp, Artificial
  Synthetic oligonucleotide
agcgtttcatcacaaacttctactataagtagaaggctaagactaaaagaaatagc

SEQ ID NO: 322780 - DNA, 55 bp, Artificial
  Synthetic oligonucleotide
agcgtttcccaatcgggtgtggtgatccgcgcgacctcgaatagctccccgttgc

SEQ ID NO: 322781 - DNA, 59 bp, Artificial
  Synthetic oligonucleotide
agcgtttctgctacgtgtctaacgcttggagctattcaagcaagtccggcaaccattac

SEQ ID NO: 322782 - DNA, 55 bp, Artificial
  Synthetic oligonucleotide
agcgtttgactacggagtctgaatgtcattgagattagagttgtatggcgtgacc

SEQ ID NO: 322783 - DNA, 60 bp, Artificial
  Synthetic oligonucleotide
agcgtttggtacggcgcagagggctgccatttgctaactggtggctcagcacgaaatgcc

SEQ ID NO: 322784 - DNA, 60 bp, Artificial
  Synthetic oligonucleotide
agcgtttggtagtggatgtggcggaacaagtgaatcacttagcttcatactgccagtcac

SEQ ID NO: 322785 - DNA, 60 bp, Artificial
  Synthetic oligonucleotide
agcgttttgctgaaagcgagatcggtgcggcgacaatagatgggttggtgcagggtagcg

SEQ ID NO: 322786 - DNA, 57 bp, Artificial
  Synthetic oligonucleotide
agctaaaactgaatcagaaccttttacttgataatgggcattggaatcacttgtccc

SEQ ID NO: 322787 - DNA, 54 bp, Artificial
  Synthetic oligonucleotide
agctaaaatcttcggtaacggtgatgaatatgacatgtctacctcgggtgttca

SEQ ID NO: 322788 - DNA, 60 bp, Artificial
  Synthetic oligonucleotide
agctaaaatgtcagcatcactagccaacctaggattaaacatggataatgctatccgtga

SEQ ID NO: 322789 - DNA, 56 bp, Artificial
  Synthetic oligonucleotide
agctaaaattgatgttcccaaagtgtctggaaatcaatacagggcatttagggtta

SEQ ID NO: 322790 - DNA, 57 bp, Artificial
  Synthetic oligonucleotide
agctaaacaattttagcgaattgttgacaactgggtttgatatcttagcgaacgaca

SEQ ID NO: 322791 - DNA, 60 bp, Artificial
  Synthetic oligonucleotide
agctaaagcgcaaatgtcaccaggtattgcaccaatggtggcgacagggtacagaagagc

SEQ ID NO: 322792 - DNA, 53 bp, Artificial
  Synthetic oligonucleotide
agctaaagggaaaataatcggtgccagtccccttatactagataaaagaggta

SEQ ID NO: 322793 - DNA, 59 bp, Artificial
  Synthetic oligonucleotide
agctaaagggacatctaatacaaactctaactcaatgagtgaaaatgtggaacaacaca

SEQ ID NO: 322794 - DNA, 55 bp, Artificial
  Synthetic oligonucleotide
agctaaaggtcgacgtcccgaaaatagagcagcttaccggttaccaacaagctgc

SEQ ID NO: 322795 - DNA, 59 bp, Artificial
  Synthetic oligonucleotide
agctaaagtggtgtgtgcccatccattcggtaactctggtacctagagatccctcagat

SEQ ID NO: 322796 - DNA, 60 bp, Artificial
  Synthetic oligonucleotide
agctaaatattggaactggtacctccgcctatacatcactgaatgtgctggctagattta

SEQ ID NO: 322797 - DNA, 60 bp, Artificial
  Synthetic oligonucleotide
agctaaatccgatcgatctcactgatcttagtcttgccacgactgcagatctcactctag

SEQ ID NO: 322798 - DNA, 57 bp, Artificial
  Synthetic oligonucleotide
agctaaattgttagcagattgccttcacgatggttccactggcgtgatgtgctctga

SEQ ID NO: 322799 - DNA, 55 bp, Artificial
  Synthetic oligonucleotide
agctaacaacttctatctatgtgaggcggtgaagcgcggtcatgtcttggatgca

SEQ ID NO: 322800 - DNA, 50 bp, Artificial
  Synthetic oligonucleotide
agctaacaatgatgacatctaatctgtttagtttgatctactcaaagttt

SEQ ID NO: 322801 - DNA, 58 bp, Artificial
  Synthetic oligonucleotide
agctaacacctaccgagtgtgagcgactacaaaccgttccagacaactacacggcaca

SEQ ID NO: 322802 - DNA, 57 bp, Artificial
  Synthetic oligonucleotide
agctaacgccagcagagaccaccaccagactgagggcctactttaacaccccaggcc

SEQ ID NO: 322803 - DNA, 51 bp, Artificial
  Synthetic oligonucleotide
agctaactcgttggttccctgctcgtgtcaggctgagtcctgttgggtcat

SEQ ID NO: 322804 - DNA, 59 bp, Artificial
  Synthetic oligonucleotide
agctaactctttccgtgtcccaagacttatctacgttgctatctcttacatctctcacg

SEQ ID NO: 322805 - DNA, 51 bp, Artificial
  Synthetic oligonucleotide
agctaagattctccttctacaatggatttcaccaaagtgtatggtgtgctg

SEQ ID NO: 322806 - DNA, 58 bp, Artificial
  Synthetic oligonucleotide
agctaaggaactctcgtgcataggaactcttggacatcacttagaataccccaaacta

SEQ ID NO: 322807 - DNA, 55 bp, Artificial
  Synthetic oligonucleotide
agctaaggcttaacgattcataccccttgtgttctctttgtttaatagcgtctct

SEQ ID NO: 322808 - DNA, 50 bp, Artificial
  Synthetic oligonucleotide
agctaagggacttttatggctttgctatgatccctgtgagactctagcta

SEQ ID NO: 322809 - DNA, 53 bp, Artificial
  Synthetic oligonucleotide
agctaataaccttggacagtgttaacactctaacaaaagaagggtggcgaagg

SEQ ID NO: 322810 - DNA, 60 bp, Artificial
  Synthetic oligonucleotide
agctaataatggagaagacgcaactgctggtctcactcatttgatgatctggcattccaa

SEQ ID NO: 322811 - DNA, 54 bp, Artificial
  Synthetic oligonucleotide
agctaataattgcacgaacaggggggtctgtattaatggaatacggggctttta

SEQ ID NO: 322812 - DNA, 54 bp, Artificial
  Synthetic oligonucleotide
agctaatacccgaatcattagagcatccaagcctaaatttacacgaagcaaggg

SEQ ID NO: 322813 - DNA, 59 bp, Artificial
  Synthetic oligonucleotide
agctaatagagacaccctagacacagcagtagtacggacgtatagaaggtccagaccat

SEQ ID NO: 322814 - DNA, 56 bp, Artificial
  Synthetic oligonucleotide
agctaatagggataccctagacacagcagtagtacggacgtacaggaggtccgtac

SEQ ID NO: 322815 - DNA, 58 bp, Artificial
  Synthetic oligonucleotide
agctaatattgttcatacttcggtttcgtctgttgcgatgttcaataggtcgtataaa

SEQ ID NO: 322816 - DNA, 57 bp, Artificial
  Synthetic oligonucleotide
agctaatatttgaagatggtgattcccaggaaaattctgaaatttcactgaggaacc

SEQ ID NO: 322817 - DNA, 55 bp, Artificial
  Synthetic oligonucleotide
agctaatcaagacagtaaccgataattacgagacgactttgtctggtgccgttcc

SEQ ID NO: 322818 - DNA, 60 bp, Artificial
  Synthetic oligonucleotide
agctaatgcaagctacagtctttgtttctgatcttggccttccccactacatccgcggca

SEQ ID NO: 322819 - DNA, 59 bp, Artificial
  Synthetic oligonucleotide
agctaatggatgaggactatcagggaaggctttgtaatcccctgaacccatttgtcagc

SEQ ID NO: 322820 - DNA, 60 bp, Artificial
  Synthetic oligonucleotide
agctaatgtagttagtggttgattcgtcagcaatgacgtaaaacatttgtatcgatcctc

SEQ ID NO: 322821 - DNA, 57 bp, Artificial
  Synthetic oligonucleotide
agctaattccaaatcccaggtaaatagacaagtcatagttgacaataataactggtc

SEQ ID NO: 322822 - DNA, 55 bp, Artificial
  Synthetic oligonucleotide
agctaattccacctactatcctacagtaagtgggtcattagtaacttcagatgct

SEQ ID NO: 322823 - DNA, 53 bp, Artificial
  Synthetic oligonucleotide
agctaattctgggcgttacgttagaagcgactcgtcctagccccgcaagggtt

SEQ ID NO: 322824 - DNA, 53 bp, Artificial
  Synthetic oligonucleotide
agctaattctgggcgtttccttggaaacgactcgtcctagtcccgcacgggta

SEQ ID NO: 322825 - DNA, 60 bp, Artificial
  Synthetic oligonucleotide
agctaattgatttatatgattatcacaattgaatgtaatcataagcacaatcactgccat

SEQ ID NO: 322826 - DNA, 57 bp, Artificial
  Synthetic oligonucleotide
agctacaaagatgactctgtaatgactggcataaccgcaggctacaagtttaaattc

SEQ ID NO: 322827 - DNA, 59 bp, Artificial
  Synthetic oligonucleotide
agctacaactattgaccaggcattaaatgggaagtttggctcagttatgagaaatagaa

SEQ ID NO: 322828 - DNA, 55 bp, Artificial
  Synthetic oligonucleotide
agctacacacccgtttcaatactccaatcctgcgtcacgttaaaatgggtagact

SEQ ID NO: 322829 - DNA, 60 bp, Artificial
  Synthetic oligonucleotide
agctacacgagacgtcgacgtattcataggtgcttgttctgaaccgatctatcgcatata

SEQ ID NO: 322830 - DNA, 56 bp, Artificial
  Synthetic oligonucleotide
agctacagcatgggaggttggtcctcaaaacctcggaaaggcatggggacgaatct

SEQ ID NO: 322831 - DNA, 58 bp, Artificial
  Synthetic oligonucleotide
agctacaggcatgacactatcggtagtaagtctcctagtaggaattgccaatttaggt

SEQ ID NO: 322832 - DNA, 57 bp, Artificial
  Synthetic oligonucleotide
agctacaggttgataagttgtaacacctcaagtgttacacaagcctgtccaaaggta

SEQ ID NO: 322833 - DNA, 58 bp, Artificial
  Synthetic oligonucleotide
agctacatccggagtactacaaagactgctgacacagcggggactttccgcctgggac

SEQ ID NO: 322834 - DNA, 60 bp, Artificial
  Synthetic oligonucleotide
agctacatcctctgtctagctttcggccaagacctctcaggaaacgataacagcacagca

SEQ ID NO: 322835 - DNA, 50 bp, Artificial
  Synthetic oligonucleotide
agctacattcctaatctaggaaaaatacttgggccattatactcgaagac

SEQ ID NO: 322836 - DNA, 57 bp, Artificial
  Synthetic oligonucleotide
agctacattctctgtctggttttcgcccaaaaccttcccggaaatgacaacagcaca

SEQ ID NO: 322837 - DNA, 60 bp, Artificial
  Synthetic oligonucleotide
agctaccagaaaagatgcaatgctgggaacacatgttgtgtgggatgtcggtttgcaatc

SEQ ID NO: 322838 - DNA, 54 bp, Artificial
  Synthetic oligonucleotide
agctaccagatgcccaggtaaaaatgatgcccctaaagatactgaggacccgta

SEQ ID NO: 322839 - DNA, 60 bp, Artificial
  Synthetic oligonucleotide
agctaccagcctcctggggtcccgcatgcacaattagctctgtcagacctatggtttatc

SEQ ID NO: 322840 - DNA, 55 bp, Artificial
  Synthetic oligonucleotide
agctaccgctgacacaactactatcgatgcaacgttcactggaataatggttaca

SEQ ID NO: 322841 - DNA, 55 bp, Artificial
  Synthetic oligonucleotide
agctaccggctcacgcggcccggagggtccgcagggaccgaccggagagcgcggc

SEQ ID NO: 322842 - DNA, 52 bp, Artificial
  Synthetic oligonucleotide
agctaccgggagtccctttcctatcatgtcagcgtgggtataagggagtctg

SEQ ID NO: 322843 - DNA, 51 bp, Artificial
  Synthetic oligonucleotide
agctacctcaatcagaaggacaactaatctaatcaagtcaattcaacgggc

SEQ ID NO: 322844 - DNA, 60 bp, Artificial
  Synthetic oligonucleotide
agctacgacgagaagcaattggatttgttgagagtgcgttccatctgttccaggctctag

SEQ ID NO: 322845 - DNA, 55 bp, Artificial
  Synthetic oligonucleotide
agctacgcgtggcccatgattcaccaggccttaattctattgccgagtgcaggcc

SEQ ID NO: 322846 - DNA, 60 bp, Artificial
  Synthetic oligonucleotide
agctacgctcctagaaggcgatgttttagtgaattcaatggttcactcagatgataacca

SEQ ID NO: 322847 - DNA, 60 bp, Artificial
  Synthetic oligonucleotide
agctacggctgatgccaggggtcttatccagtcatcccgagctcatgctatagttgcact

SEQ ID NO: 322848 - DNA, 55 bp, Artificial
  Synthetic oligonucleotide
agctacgggaatacactggacctgaatagtcttgacattgatgaacctacaggac

SEQ ID NO: 322849 - DNA, 60 bp, Artificial
  Synthetic oligonucleotide
agctacgtgatttccacgccgaacggacttcttgagttccgcactggagcagccgagata

SEQ ID NO: 322850 - DNA, 58 bp, Artificial
  Synthetic oligonucleotide
agctacgtgccaagatgtcgtggttcacctacatgaggtttgacgttgaatttactat

SEQ ID NO: 322851 - DNA, 55 bp, Artificial
  Synthetic oligonucleotide
agctactaaacctttggagagcccatagtgttcaaaggttaagccgactgctgag

SEQ ID NO: 322852 - DNA, 53 bp, Artificial
  Synthetic oligonucleotide
agctactaccatgaacattgctaagcttcagattatttcagctagtccagaac

SEQ ID NO: 322853 - DNA, 60 bp, Artificial
  Synthetic oligonucleotide
agctactactgtgcaaccctgaagcatgttcaagaagtgaaaggattcacgaagggtgga

SEQ ID NO: 322854 - DNA, 60 bp, Artificial
  Synthetic oligonucleotide
agctactattactctacttcctgatgcagagagatttagttttccaagagttgtcaattc

SEQ ID NO: 322855 - DNA, 57 bp, Artificial
  Synthetic oligonucleotide
agctactcaatacggctacgttaggagaaatcaattacggttgggcatgagggtgtc

SEQ ID NO: 322856 - DNA, 60 bp, Artificial
  Synthetic oligonucleotide
agctactcagtgttgaggaagcgtgcgacctcacacctgcccactctgcccgttccaagt

SEQ ID NO: 322857 - DNA, 56 bp, Artificial
  Synthetic oligonucleotide
agctactgctctgttaagtaaagcccgcgctttttacaacagacgtttcactcaaa

SEQ ID NO: 322858 - DNA, 60 bp, Artificial
  Synthetic oligonucleotide
agctactgcttgggtgggccgtgcgcctttatatgattatgatgatttcgcgttacccag

SEQ ID NO: 322859 - DNA, 58 bp, Artificial
  Synthetic oligonucleotide
agctactgtctccctttgctttgttaacaatgctacttgtcacggtgaatttatttca

SEQ ID NO: 322860 - DNA, 53 bp, Artificial
  Synthetic oligonucleotide
agctacttaccagcaaaaaatctaacggaggtgattgtaaatccgagagtttt

SEQ ID NO: 322861 - DNA, 55 bp, Artificial
  Synthetic oligonucleotide
agctacttccacgcgatgttcgcctacgtcaagcccatgagccacggccccgaca

SEQ ID NO: 322862 - DNA, 58 bp, Artificial
  Synthetic oligonucleotide
agctacttttagctccctgaatgttcggatggaaatatgttgacctggtttcggcatg

SEQ ID NO: 322863 - DNA, 59 bp, Artificial
  Synthetic oligonucleotide
agctagaagcatttgcgagaagcttgaacagtctggacttccggttgggggtaatgaga

SEQ ID NO: 322864 - DNA, 60 bp, Artificial
  Synthetic oligonucleotide
agctagaataaagaccaggctattcaccataagacaagagatggctagcagaggtctttg

SEQ ID NO: 322865 - DNA, 60 bp, Artificial
  Synthetic oligonucleotide
agctagagaatttgccatattgcaggacgacttaacagtgttgagatacgctaatgaaat

SEQ ID NO: 322866 - DNA, 58 bp, Artificial
  Synthetic oligonucleotide
agctagagatgtggtaacgcggagaacaagtattaacgaagacatagttatatctaaa

SEQ ID NO: 322867 - DNA, 60 bp, Artificial
  Synthetic oligonucleotide
agctagagccattgctgacaaataccactccagcgtctactcgcttcccccagacccaga

SEQ ID NO: 322868 - DNA, 54 bp, Artificial
  Synthetic oligonucleotide
agctagagcttaaatcaggcacacagtttaataattggggtcgtagtaaatgtc

SEQ ID NO: 322869 - DNA, 60 bp, Artificial
  Synthetic oligonucleotide
agctagaggcatttcttcacaactacacttatatcctacagaagggaatcagtgttcaag

SEQ ID NO: 322870 - DNA, 60 bp, Artificial
  Synthetic oligonucleotide
agctagagggagtaggagcactatagctctgaaacgtaaggctaggataacatctgagaa

SEQ ID NO: 322871 - DNA, 58 bp, Artificial
  Synthetic oligonucleotide
agctagataatactgtgggagccttcgaattacttagacctgttatgtcgataccgac

SEQ ID NO: 322872 - DNA, 60 bp, Artificial
  Synthetic oligonucleotide
agctagatatataagacctaatttactacaagacagactgaatttgcacgataattttga

SEQ ID NO: 322873 - DNA, 56 bp, Artificial
  Synthetic oligonucleotide
agctagatcatactgtatgaaggcggatacaagaatcgaaggacccttcgagtacg

SEQ ID NO: 322874 - DNA, 50 bp, Artificial
  Synthetic oligonucleotide
agctagatgcgccttgagcctcgttgggattggcagcatcactcttgata

SEQ ID NO: 322875 - DNA, 60 bp, Artificial
  Synthetic oligonucleotide
agctagcaagatcgccaatatggaactctctaacctggtctcctacttgggcatgctgca

SEQ ID NO: 322876 - DNA, 59 bp, Artificial
  Synthetic oligonucleotide
agctagccccctctcctggattgcacagcacgattgagggtattcctcctttagtttga

SEQ ID NO: 322877 - DNA, 57 bp, Artificial
  Synthetic oligonucleotide
agctagccgtgcgttgcaaatgtttttgggtaatcccaagagtatattgagtgtaac

SEQ ID NO: 322878 - DNA, 55 bp, Artificial
  Synthetic oligonucleotide
agctagcctaaccatgatggaacagagtaagaagatattgtccaaaagcaatggg

SEQ ID NO: 322879 - DNA, 60 bp, Artificial
  Synthetic oligonucleotide
agctagcgagtatgcacgccttggtgcaaatgtggaggataggcgcgatgtgaggattcc

SEQ ID NO: 322880 - DNA, 51 bp, Artificial
  Synthetic oligonucleotide
agctagcgcaccacttttcactaggtgtcaccggggctacttgcaccgcgg

SEQ ID NO: 322881 - DNA, 60 bp, Artificial
  Synthetic oligonucleotide
agctagcgcactcaacaccatgctaggacaagccaatgaccaaatagcgcacttacaggc

SEQ ID NO: 322882 - DNA, 54 bp, Artificial
  Synthetic oligonucleotide
agctagcgtcgggtggtggggatttgcaatgtgtgcgaacggcccagactatct

SEQ ID NO: 322883 - DNA, 55 bp, Artificial
  Synthetic oligonucleotide
agctagctatgttctcaggggacgattccctcgtaatttgtggttctaagcctga

SEQ ID NO: 322884 - DNA, 60 bp, Artificial
  Synthetic oligonucleotide
agctagctgctccgaccgtgtagatatctgctactaatatttgcaataagcaatagcact

SEQ ID NO: 322885 - DNA, 59 bp, Artificial
  Synthetic oligonucleotide
agctaggagcgcggggggacccagtggagccatgggatgctgctcccgattccgcccaa

SEQ ID NO: 322886 - DNA, 59 bp, Artificial
  Synthetic oligonucleotide
agctaggaggggttgagatcataacaaaaggaagctcaatcaagaaacacttcatcgtg

SEQ ID NO: 322887 - DNA, 57 bp, Artificial
  Synthetic oligonucleotide
agctaggataatgtcaccaagaaaagcccggtttgttctgggtgccatagcattagg

SEQ ID NO: 322888 - DNA, 56 bp, Artificial
  Synthetic oligonucleotide
agctaggcccctttcaagaccacgaaacagtaggcctagtaatagtacagtgtcca

SEQ ID NO: 322889 - DNA, 51 bp, Artificial
  Synthetic oligonucleotide
agctaggggtatttttggtatttcactttataagggcaaaatggtaaataa

SEQ ID NO: 322890 - DNA, 60 bp, Artificial
  Synthetic oligonucleotide
agctaggggtggactgcctcttgtgaaggacacccattctagcccagctcacgctgtccg

SEQ ID NO: 322891 - DNA, 60 bp, Artificial
  Synthetic oligonucleotide
agctagtaccagtggatccaaaagaggtagaagagggcactgcaggagagaacagctgct

SEQ ID NO: 322892 - DNA, 57 bp, Artificial
  Synthetic oligonucleotide
agctagtagatcctaacttagatccctggaaccatccaggaagccaacctacaactc

SEQ ID NO: 322893 - DNA, 50 bp, Artificial
  Synthetic oligonucleotide
agctagtatagcatctactggaagtgcaggcgtagcaaacgctagtgcag

SEQ ID NO: 322894 - DNA, 57 bp, Artificial
  Synthetic oligonucleotide
agctagtcccccaattactgcagtacatgtatgtcccaccgggagctccgaaaccca

SEQ ID NO: 322895 - DNA, 60 bp, Artificial
  Synthetic oligonucleotide
agctagtcctactgatttagtcaatcaggagtatgttgcatcccacatgtacccgacgtt

SEQ ID NO: 322896 - DNA, 53 bp, Artificial
  Synthetic oligonucleotide
agctagtctgcaaggatcatcttgcatctactgaccagctgaaatcagttggt

SEQ ID NO: 322897 - DNA, 59 bp, Artificial
  Synthetic oligonucleotide
agctagtgccggaggttaatacagctgaccaaatttcaatggatcctgttgcgggtgct

SEQ ID NO: 322898 - DNA, 60 bp, Artificial
  Synthetic oligonucleotide
agctagtgcggaaactccactgctggaatcaggatggtcagatacagcccatggtgttgg

SEQ ID NO: 322899 - DNA, 58 bp, Artificial
  Synthetic oligonucleotide
agctagttgggatcaatatgagcaaaaagaagtcctacataaataggacaggaacatt

SEQ ID NO: 322900 - DNA, 57 bp, Artificial
  Synthetic oligonucleotide
agctataaaggtgttgtaatgcatatcagtgaaaaaggtctggtgcttataaaacgt

SEQ ID NO: 322901 - DNA, 50 bp, Artificial
  Synthetic oligonucleotide
agctataattgtagcagccttagttttgagcatcctgtcgattatcattt

SEQ ID NO: 322902 - DNA, 57 bp, Artificial
  Synthetic oligonucleotide
agctatacacaatttgcttaaatcatacaaactgagggattcaaatttggtattaaa

SEQ ID NO: 322903 - DNA, 58 bp, Artificial
  Synthetic oligonucleotide
agctatacgcccttgcctccgaccatccagagtgggtgcgagccctggggaaatacta

SEQ ID NO: 322904 - DNA, 60 bp, Artificial
  Synthetic oligonucleotide
agctatagacctccacactagtgctgggtacccatacagcgccctaggcatcaagaagag

SEQ ID NO: 322905 - DNA, 60 bp, Artificial
  Synthetic oligonucleotide
agctatagcaatatttaatcacttcgcaggcactagtgtatctgctataggtgtagttgc

SEQ ID NO: 322906 - DNA, 60 bp, Artificial
  Synthetic oligonucleotide
agctataggttgatacattgtaattcctcagtcattacacagacctgtccaaaggtatcc

SEQ ID NO: 322907 - DNA, 55 bp, Artificial
  Synthetic oligonucleotide
agctatagtctcctccccctgtcataactccctcatcctgccccccttttccttg

SEQ ID NO: 322908 - DNA, 60 bp, Artificial
  Synthetic oligonucleotide
agctatagtgaacacaatagtgtacccagcgtttggaatgcaacgaatgcactatagaaa

SEQ ID NO: 322909 - DNA, 55 bp, Artificial
  Synthetic oligonucleotide
agctatagttcagggcgttcgcctttatggctgtgttaatcatttaaacaagggg

SEQ ID NO: 322910 - DNA, 57 bp, Artificial
  Synthetic oligonucleotide
agctatagtttcgcattacctatgggaaattttccagttatgtcaggaggcgccgta

SEQ ID NO: 322911 - DNA, 51 bp, Artificial
  Synthetic oligonucleotide
agctatataccgcgtgaaagggagcgggaaacggagaagtatatatttagt

SEQ ID NO: 322912 - DNA, 60 bp, Artificial
  Synthetic oligonucleotide
agctatatctcatggcaaacggcattggaggcttgttcttcattctcagttgatgtctca

SEQ ID NO: 322913 - DNA, 60 bp, Artificial
  Synthetic oligonucleotide
agctatatctctaacacggggcaaggtcgtatcaagcattcactagccgttactggaaca

SEQ ID NO: 322914 - DNA, 60 bp, Artificial
  Synthetic oligonucleotide
agctatatggatgatgtggtattgggggccaagtctgtacagcatcgtgagtccctttat

SEQ ID NO: 322915 - DNA, 58 bp, Artificial
  Synthetic oligonucleotide
agctatcaaacgaggctgtaagccgcaggctggctgaatgtgcggttgcgctgaatag

SEQ ID NO: 322916 - DNA, 50 bp, Artificial
  Synthetic oligonucleotide
agctatcactgctcgccgtcacactatctgaatctaccatgcctcctaga

SEQ ID NO: 322917 - DNA, 55 bp, Artificial
  Synthetic oligonucleotide
agctatcatcaagtcctccttagctgttgcaagcaacattcctggccctatcggt

SEQ ID NO: 322918 - DNA, 51 bp, Artificial
  Synthetic oligonucleotide
agctatcccacatatagtcaagtcccccggcgtcgttctgggaaatgtcat

SEQ ID NO: 322919 - DNA, 56 bp, Artificial
  Synthetic oligonucleotide
agctatcccgataatgtttggactttagagcgtcggggtggctactgtggttacac

SEQ ID NO: 322920 - DNA, 55 bp, Artificial
  Synthetic oligonucleotide
agctatcgcgggaagcaatagccctacggcggcagctgccgggttagccctgcaa

SEQ ID NO: 322921 - DNA, 60 bp, Artificial
  Synthetic oligonucleotide
agctatctcgctggctgggtaccaactccccgcgagacttggaagagaggcgcaagctca

SEQ ID NO: 322922 - DNA, 59 bp, Artificial
  Synthetic oligonucleotide
agctatctctgtacaggtagggtggtacatctgggcctgctacaggagtaaagtttcca

SEQ ID NO: 322923 - DNA, 55 bp, Artificial
  Synthetic oligonucleotide
agctatgaggaaatacctatgcaaacatttgctatacacggtactggcaacgaac

SEQ ID NO: 322924 - DNA, 60 bp, Artificial
  Synthetic oligonucleotide
agctatgcaagctatacattgataagttgtaacacctcaatcattacccaagcctgtcca

SEQ ID NO: 322925 - DNA, 60 bp, Artificial
  Synthetic oligonucleotide
agctatgccagcattgatggctgcttaatgcgttgcatggcgtcatctatatgggttccc

SEQ ID NO: 322926 - DNA, 58 bp, Artificial
  Synthetic oligonucleotide
agctatgcgagttcgatcggggtgagtttaccaggtgggaagtacatgccagggtatc

SEQ ID NO: 322927 - DNA, 60 bp, Artificial
  Synthetic oligonucleotide
agctatgtatatatttactagtcgtattatcgtgttgtgtgttacggtaatgctggcgtg

SEQ ID NO: 322928 - DNA, 60 bp, Artificial
  Synthetic oligonucleotide
agctatgtcccctgcgcatgttagcaataaagctcagtcccctgcgcacgataacctgtg

SEQ ID NO: 322929 - DNA, 60 bp, Artificial
  Synthetic oligonucleotide
agctattcaaggtatcccttgtctaggcgttcgtatagtgtgaatagaatcaatggcaaa

SEQ ID NO: 322930 - DNA, 54 bp, Artificial
  Synthetic oligonucleotide
agctattcggattgttcaagcactttgcttacccccgggtttactcaagggata

SEQ ID NO: 322931 - DNA, 55 bp, Artificial
  Synthetic oligonucleotide
agctattcttccttttgacatcgataagatgtgatttacgaaaaaaactccttgt

SEQ ID NO: 322932 - DNA, 55 bp, Artificial
  Synthetic oligonucleotide
agctattgagtgtgctcacacaagctcttcgtcatatcagaacccttccggtgtg

SEQ ID NO: 322933 - DNA, 55 bp, Artificial
  Synthetic oligonucleotide
agctattgccggaatcctaacaatgagaaagggagtcatggagtgaaaggctggg

SEQ ID NO: 322934 - DNA, 60 bp, Artificial
  Synthetic oligonucleotide
agctattggcctttgtcacatcatgcgaggaggatggctctcgtgtctctccattacgtg

SEQ ID NO: 322935 - DNA, 60 bp, Artificial
  Synthetic oligonucleotide
agctattggctcagcttcaggcttagagttttcccaagcactaggtgtattgtatatagc

SEQ ID NO: 322936 - DNA, 56 bp, Artificial
  Synthetic oligonucleotide
agctattgtacagacccattacaaatcccactgatcaattatacatttggacctaa

SEQ ID NO: 322937 - DNA, 50 bp, Artificial
  Synthetic oligonucleotide
agctatttatggccctagtagcgttcctccgtttcctaaccatcccacca

SEQ ID NO: 322938 - DNA, 59 bp, Artificial
  Synthetic oligonucleotide
agctatttcagtggctacgctcaaatggatacctaattagcagacgtggtgactcatgg

SEQ ID NO: 322939 - DNA, 60 bp, Artificial
  Synthetic oligonucleotide
agctatttcccttgactgtggatcaggtgttacagatgtgtgtgctgtttgtttgccccc

SEQ ID NO: 322940 - DNA, 55 bp, Artificial
  Synthetic oligonucleotide
agctatttgctacaccacagtgccttggaacaaaacctggttcggaaactactcc

SEQ ID NO: 322941 - DNA, 53 bp, Artificial
  Synthetic oligonucleotide
agctattttcaaatcagaccttccaattgagaattgtgatgctgtctgtcaaa

SEQ ID NO: 322942 - DNA, 60 bp, Artificial
  Synthetic oligonucleotide
agctcaaaaaggccttagatggcagcatacaaaagagtgatgagagaagtagatatcatc

SEQ ID NO: 322943 - DNA, 53 bp, Artificial
  Synthetic oligonucleotide
agctcaaaacgatcggggaggtaggcttacgtccacgcgaccacgttgacgtt

SEQ ID NO: 322944 - DNA, 60 bp, Artificial
  Synthetic oligonucleotide
agctcaaaagggatctcacgaacaagcgatcgaatactgcaagaaagaaggagattttca

SEQ ID NO: 322945 - DNA, 51 bp, Artificial
  Synthetic oligonucleotide
agctcaaacacgtcctcgcggatggtaccacgcagaccatcacttgccaga

SEQ ID NO: 322946 - DNA, 58 bp, Artificial
  Synthetic oligonucleotide
agctcaaacctggtaccaatcagtttcttactaccgatgatggtgtctccgcaccaat

SEQ ID NO: 322947 - DNA, 58 bp, Artificial
  Synthetic oligonucleotide
agctcaaagtaacttcttgaacgttgtaggtaattttcatgcttatatgcagaagtgg

SEQ ID NO: 322948 - DNA, 59 bp, Artificial
  Synthetic oligonucleotide
agctcaaatactgcaaatttaaacgatatatcgattataatacattcagaattttatat

SEQ ID NO: 322949 - DNA, 55 bp, Artificial
  Synthetic oligonucleotide
agctcaaattgatgatgggtagctccatgggatcactagctgtgatgagattctc

SEQ ID NO: 322950 - DNA, 51 bp, Artificial
  Synthetic oligonucleotide
agctcaacttacctgccaacctcatgccaatcgacctaattagtacagcct

SEQ ID NO: 322951 - DNA, 55 bp, Artificial
  Synthetic oligonucleotide
agctcaagtcaagacgtgatagataggatatataagcaggtggctctcgaatctc

SEQ ID NO: 322952 - DNA, 60 bp, Artificial
  Synthetic oligonucleotide
agctcaagtctcatggcaaggaagcttgagttcggaacagacagtacatttaaagctttc

SEQ ID NO: 322953 - DNA, 56 bp, Artificial
  Synthetic oligonucleotide
agctcaataaaagaactcaggacttttgggaagtccagttaggaataccgcatcca

SEQ ID NO: 322954 - DNA, 60 bp, Artificial
  Synthetic oligonucleotide
agctcaatctgaacaataattgaattgccttccttgagctttacatcgatggtaaactcc

SEQ ID NO: 322955 - DNA, 55 bp, Artificial
  Synthetic oligonucleotide
agctcacaagagggtgagtaaatttgctggcggtggccagacctaggggaagggc

SEQ ID NO: 322956 - DNA, 57 bp, Artificial
  Synthetic oligonucleotide
agctcacaaggacactacggacggtatgactaccaagaacgatggtctacagagtat

SEQ ID NO: 322957 - DNA, 60 bp, Artificial
  Synthetic oligonucleotide
agctcacagagatcacgacggacacagcatatattagtgacactctgcacttcctggatc

SEQ ID NO: 322958 - DNA, 60 bp, Artificial
  Synthetic oligonucleotide
agctcacagtgtccgatagtgtcctggtttttgagctcacggacatagtccattgccgaa

SEQ ID NO: 322959 - DNA, 50 bp, Artificial
  Synthetic oligonucleotide
agctcaccggccaaccgtgcccgcattgctacgctgaccaaagagttctc

SEQ ID NO: 322960 - DNA, 60 bp, Artificial
  Synthetic oligonucleotide
agctcacgacatcggttatgagtcagaaccaaggcccaccgcttcatcgataaagcgcgg

SEQ ID NO: 322961 - DNA, 58 bp, Artificial
  Synthetic oligonucleotide
agctcacgaggaggtgacccctgagacctcagcttatgaccacgttcctttaaactgc

SEQ ID NO: 322962 - DNA, 60 bp, Artificial
  Synthetic oligonucleotide
agctcacggaaaatacgtccaagctctcttgctacgactcggagcgctgactggcactta

SEQ ID NO: 322963 - DNA, 60 bp, Artificial
  Synthetic oligonucleotide
agctcactctgggcgttatatgcgccctcctgcttgctggcctacttgcttgctgtgcca

SEQ ID NO: 322964 - DNA, 53 bp, Artificial
  Synthetic oligonucleotide
agctcagaagtacacatcccactaggggatgataatgctagattggtagtaat

SEQ ID NO: 322965 - DNA, 55 bp, Artificial
  Synthetic oligonucleotide
agctcagaccaatgcaatgggaccgggatagaagccctccagaataaaggagggg

SEQ ID NO: 322966 - DNA, 58 bp, Artificial
  Synthetic oligonucleotide
agctcagacccttctgtacataatatttggactgtggtggtaatggttctctcacctt

SEQ ID NO: 322967 - DNA, 60 bp, Artificial
  Synthetic oligonucleotide
agctcagactggagagctcaataatctaaacccagactgtgacagagcaaaacccggagg

SEQ ID NO: 322968 - DNA, 50 bp, Artificial
  Synthetic oligonucleotide
agctcagagaatctgtgatcatgttacgacctaatgcaattcctcacacg

SEQ ID NO: 322969 - DNA, 51 bp, Artificial
  Synthetic oligonucleotide
agctcagaggtgggtaggtttccattgttactacggggtttttaggaccgc

SEQ ID NO: 322970 - DNA, 60 bp, Artificial
  Synthetic oligonucleotide
agctcagagtgagcaccctgagagaacaggcccaggcactcaaaccagccgcaacaacat

SEQ ID NO: 322971 - DNA, 60 bp, Artificial
  Synthetic oligonucleotide
agctcaggcgcagattaggcacgttgtttcagggcagggcgtatggtgggagcatatggt

SEQ ID NO: 322972 - DNA, 60 bp, Artificial
  Synthetic oligonucleotide
agctcaggtgtatatattccagtaggtacagctaatatagtggtgactacatattgggga

SEQ ID NO: 322973 - DNA, 60 bp, Artificial
  Synthetic oligonucleotide
agctcagtacaatgcgcacatggaattaggccggtggcatcaacccaactgctgttgaat

SEQ ID NO: 322974 - DNA, 60 bp, Artificial
  Synthetic oligonucleotide
agctcagtatcatcattcgagagattcgaaatattccccaaggaaagatcatggcccaaa

SEQ ID NO: 322975 - DNA, 52 bp, Artificial
  Synthetic oligonucleotide
agctcagtcaaagacttgtggtacgtggttctaactttatttccttgcatcc

SEQ ID NO: 322976 - DNA, 60 bp, Artificial
  Synthetic oligonucleotide
agctcagtccaatgcacacatggaattaagccagtggtatcaactcaattgctgttaaat

SEQ ID NO: 322977 - DNA, 59 bp, Artificial
  Synthetic oligonucleotide
agctcatacgcggggcttatcctaaaattcagaccacgagtcgtgtgctacggtctctg

SEQ ID NO: 322978 - DNA, 55 bp, Artificial
  Synthetic oligonucleotide
agctcatagagttgtcaatccccatgtgacacaatttaagaatttcttcatggtg

SEQ ID NO: 322979 - DNA, 55 bp, Artificial
  Synthetic oligonucleotide
agctcataggggagtcatagctacagggaaggctatatgggctgttcctgtgacg

SEQ ID NO: 322980 - DNA, 56 bp, Artificial
  Synthetic oligonucleotide
agctcatctggctccgttctgttaattgaaccaacaaggcccttagctgaaaacgt

SEQ ID NO: 322981 - DNA, 55 bp, Artificial
  Synthetic oligonucleotide
agctcatgcaaagcttagtgcaagtggagcaaaacaatggctaaactgtccaccg

SEQ ID NO: 322982 - DNA, 55 bp, Artificial
  Synthetic oligonucleotide
agctcatgtcaagggtgccataaatagtgtacggcgtttcgttacgaatcagtac

SEQ ID NO: 322983 - DNA, 54 bp, Artificial
  Synthetic oligonucleotide
agctcatgtgttgcttagggccagacatttttcttggtacatgttatagatgtc

SEQ ID NO: 322984 - DNA, 60 bp, Artificial
  Synthetic oligonucleotide
agctcatgttatttgcataaagtctccagcactatattgttatccagaaatagggtcctg

SEQ ID NO: 322985 - DNA, 55 bp, Artificial
  Synthetic oligonucleotide
agctcattggaatcccaacccatcgacacctaattggcgaaggatgcccgaagcc

SEQ ID NO: 322986 - DNA, 58 bp, Artificial
  Synthetic oligonucleotide
agctcattggtacacctgaattttcagactttgtacttgcttacaaaggccctctgta

SEQ ID NO: 322987 - DNA, 60 bp, Artificial
  Synthetic oligonucleotide
agctcattgtaatgttagtagaacagattggaataatatgttaaagaatgtgactacaaa

SEQ ID NO: 322988 - DNA, 60 bp, Artificial
  Synthetic oligonucleotide
agctccaaccattcacaaacaactgggagagaatgtttatgccgagaatgagatgattgc

SEQ ID NO: 322989 - DNA, 60 bp, Artificial
  Synthetic oligonucleotide
agctccacatatgaccgggtggcactcatgctcatcggagtagagccttccgaaccatgg

SEQ ID NO: 322990 - DNA, 55 bp, Artificial
  Synthetic oligonucleotide
agctccaccacaagttttggctcagcccgctttgcaagcacaggcagatcgagtg

SEQ ID NO: 322991 - DNA, 58 bp, Artificial
  Synthetic oligonucleotide
agctccagtgggtctccaaggggactcctgtcctccgagaacaccttcactgtctcta

SEQ ID NO: 322992 - DNA, 57 bp, Artificial
  Synthetic oligonucleotide
agctccatccgctccaagaaatgggcggaggcacacggttatccgaccccattctcc

SEQ ID NO: 322993 - DNA, 60 bp, Artificial
  Synthetic oligonucleotide
agctccatcggatatgtatgaagtccgcaacgtcatgagattacggggatatagtcatgt

SEQ ID NO: 322994 - DNA, 59 bp, Artificial
  Synthetic oligonucleotide
agctccatgactcgtagctcttccctgcgaattccgaccctcaaggtgcaaagtaggcg

SEQ ID NO: 322995 - DNA, 58 bp, Artificial
  Synthetic oligonucleotide
agctcccaagaccaatctacatccctgagtcaggacacgccagtgttgacccaccaga

SEQ ID NO: 322996 - DNA, 51 bp, Artificial
  Synthetic oligonucleotide
agctcccaagaggagacggaagcgcaagggtcggtacaagaacaactacta

SEQ ID NO: 322997 - DNA, 56 bp, Artificial
  Synthetic oligonucleotide
agctcccaccgctggtatatgtcgatggctccccgctaaccgtagagcggtccagc

SEQ ID NO: 322998 - DNA, 55 bp, Artificial
  Synthetic oligonucleotide
agctcccagataaagacggaattctgcgcttgatgcgcagtgatgagttcccctg

SEQ ID NO: 322999 - DNA, 55 bp, Artificial
  Synthetic oligonucleotide
agctcccatgcgagccggaaccggatgtagcggtgctcacttccatgctcaccga

SEQ ID NO: 323000 - DNA, 57 bp, Artificial
  Synthetic oligonucleotide
agctccccctggccgtgatgggaagctcctacggatttcagtactcaccagggcaac

SEQ ID NO: 323001 - DNA, 55 bp, Artificial
  Synthetic oligonucleotide
agctccccgaccgaccgctgactaaaagcgctaagcgcgatccgcccacgcgcta

SEQ ID NO: 323002 - DNA, 57 bp, Artificial
  Synthetic oligonucleotide
agctccccttacaaaagactccatccaggcaactttacattaccaaattgcatggcg

SEQ ID NO: 323003 - DNA, 56 bp, Artificial
  Synthetic oligonucleotide
agctccccttatttgatctacaacgatttggagcaattaagtttcctgccttttga

SEQ ID NO: 323004 - DNA, 60 bp, Artificial
  Synthetic oligonucleotide
agctcccgcactaaattccccaaacattgaggcgtgtgggtacagtgaccgagtgatgca

SEQ ID NO: 323005 - DNA, 53 bp, Artificial
  Synthetic oligonucleotide
agctcccggaggtggtactgatacaacgctcaccggtttgggtaacgtaaaca

SEQ ID NO: 323006 - DNA, 55 bp, Artificial
  Synthetic oligonucleotide
agctccctgaatgttcggatggaaatgtgctgacctgcttggggtttgtaggtcg

SEQ ID NO: 323007 - DNA, 58 bp, Artificial
  Synthetic oligonucleotide
agctccctgctcgggcccagggttttaagagaagccctgactcaagtcatgctaccca

SEQ ID NO: 323008 - DNA, 59 bp, Artificial
  Synthetic oligonucleotide
agctccctggatgttggggtgaaaatgagatgacctggatggggataccaggtcgaaga

SEQ ID NO: 323009 - DNA, 59 bp, Artificial
  Synthetic oligonucleotide
agctccgatttagcctcgccgtgaactgtgacgccgtcgaaggaaactgcaggattatc

SEQ ID NO: 323010 - DNA, 56 bp, Artificial
  Synthetic oligonucleotide
agctccgcgccgcacggtaggctaaacaaaagtagtgaccctgagagtgccaccaa

SEQ ID NO: 323011 - DNA, 53 bp, Artificial
  Synthetic oligonucleotide
agctcctacaaatgctgagctagaagtactgggagcactacctggcatggtct

SEQ ID NO: 323012 - DNA, 60 bp, Artificial
  Synthetic oligonucleotide
agctcctacggtgtttggctccgcgcctcactttgatgacatcaacgatgtgattgaaga

SEQ ID NO: 323013 - DNA, 60 bp, Artificial
  Synthetic oligonucleotide
agctcctactctgtcacgcttaattatgaagatggatagcatctttgtacgtgacttagc

SEQ ID NO: 323014 - DNA, 56 bp, Artificial
  Synthetic oligonucleotide
agctcctagggatgtggggctgctctgggaaaatcatctgcaccactacagtgcct

SEQ ID NO: 323015 - DNA, 55 bp, Artificial
  Synthetic oligonucleotide
agctcctctaccttaggctgttgaactcaaaatgttgactcttttcggtaacaaa

SEQ ID NO: 323016 - DNA, 52 bp, Artificial
  Synthetic oligonucleotide
agctcctctcaaacttgctgattgtattggtgtattggggtaacttatatac

SEQ ID NO: 323017 - DNA, 58 bp, Artificial
  Synthetic oligonucleotide
agctcctctgccgtaggctgttgaaaccaacatgttgacacttttcggcagcaaaaaa

SEQ ID NO: 323018 - DNA, 60 bp, Artificial
  Synthetic oligonucleotide
agctcctgaatatgcatacaagatagttaagaaaggagactcagcaatcatgagaagcga

SEQ ID NO: 323019 - DNA, 60 bp, Artificial
  Synthetic oligonucleotide
agctcctgcagaaggggatcagccgatagtttctttagccgactgaattggctgacaaaa

SEQ ID NO: 323020 - DNA, 55 bp, Artificial
  Synthetic oligonucleotide
agctcctgtagctaggacccgacaagtgagggcccggccacctaaggtcgaggcg

SEQ ID NO: 323021 - DNA, 54 bp, Artificial
  Synthetic oligonucleotide
agctccttgttcccaaagaatcgaaccagctcgaaatagttccatacgagttcg

SEQ ID NO: 323022 - DNA, 59 bp, Artificial
  Synthetic oligonucleotide
agctcctttggtactgggagcagtgaccctatactggtcgctcgcagaaacggaggcgc

SEQ ID NO: 323023 - DNA, 59 bp, Artificial
  Synthetic oligonucleotide
agctcgaaagtaaatccacatataagggcttgcgggattacagtagtgtctcgacacta

SEQ ID NO: 323024 - DNA, 57 bp, Artificial
  Synthetic oligonucleotide
agctcgaacagggcctcctctatctgccccaggagctcaccacctgtgatagtgttg

SEQ ID NO: 323025 - DNA, 60 bp, Artificial
  Synthetic oligonucleotide
agctcgacgacagaatccttttatgcgaaggattcactgaggaaagcataggggaagata

SEQ ID NO: 323026 - DNA, 55 bp, Artificial
  Synthetic oligonucleotide
agctcgacgtcactttaccatttgcttggcgacatttttacttttgtcggagaaa

SEQ ID NO: 323027 - DNA, 56 bp, Artificial
  Synthetic oligonucleotide
agctcgaggagcaattacaacatctacgtcggggccgtaaggtctacattcggaac

SEQ ID NO: 323028 - DNA, 58 bp, Artificial
  Synthetic oligonucleotide
agctcgatcttgctggaagaactcttaattacaatgaaagtccttctggaaagaagta

SEQ ID NO: 323029 - DNA, 60 bp, Artificial
  Synthetic oligonucleotide
agctcgatgagataggggaagatattgccccgattgaacacattgcaagcatgaggagga

SEQ ID NO: 323030 - DNA, 60 bp, Artificial
  Synthetic oligonucleotide
agctcgattctgtgtttccgcaagtctcaccatcacccggtgacgaactttctcagatca

SEQ ID NO: 323031 - DNA, 58 bp, Artificial
  Synthetic oligonucleotide
agctcgatttagctccctgaatattcggatggaaatgtgctgaccgggttggggagac

SEQ ID NO: 323032 - DNA, 58 bp, Artificial
  Synthetic oligonucleotide
agctcgcatggcaactaaagcctttcctaggggcacgcacgccaagtatgctagatgg

SEQ ID NO: 323033 - DNA, 55 bp, Artificial
  Synthetic oligonucleotide
agctcgctgtaatccaaacgaatcctaactggaaggtcaactactgttcgactcc

SEQ ID NO: 323034 - DNA, 60 bp, Artificial
  Synthetic oligonucleotide
agctcggagggcctattcatagtgcgtgggtcgcacgaaggaaaaatctatgatgcacgt

SEQ ID NO: 323035 - DNA, 53 bp, Artificial
  Synthetic oligonucleotide
agctcgggtttccggggtcggcttcaatcaaatgcttgactttgacgtaaagg

SEQ ID NO: 323036 - DNA, 60 bp, Artificial
  Synthetic oligonucleotide
agctcgtcaacagcgctgttgcaaccggagcccaggccatgcgagacctcggaggagggt

SEQ ID NO: 323037 - DNA, 60 bp, Artificial
  Synthetic oligonucleotide
agctcgtgaattgcttcgccgaggtgagactaacatggggttggcagtatcgcgaggctg

SEQ ID NO: 323038 - DNA, 52 bp, Artificial
  Synthetic oligonucleotide
agctcgtgcatgctttcgtggccgacattctcgcgcaaagcgggcactacaa

SEQ ID NO: 323039 - DNA, 55 bp, Artificial
  Synthetic oligonucleotide
agctcgtgccacaactccccgggattcccttcgtgtcctgccaacgcgggtacaa

SEQ ID NO: 323040 - DNA, 60 bp, Artificial
  Synthetic oligonucleotide
agctcgtgggctcataacatcctccgaacccaggaatcagagtgtgtttgtatcaatggt

SEQ ID NO: 323041 - DNA, 55 bp, Artificial
  Synthetic oligonucleotide
agctcgttcaactggcccattgacattgtgatgttggactccgctctctgggttc

SEQ ID NO: 323042 - DNA, 58 bp, Artificial
  Synthetic oligonucleotide
agctcgttggattcgtcttaaagagacaaacccaacgagccctatgccgagaatgcaa

SEQ ID NO: 323043 - DNA, 58 bp, Artificial
  Synthetic oligonucleotide
agctctaaatacacttaccgaagaaggctcacaaacccacttgaagagacacaatcag

SEQ ID NO: 323044 - DNA, 60 bp, Artificial
  Synthetic oligonucleotide
agctctaatagtttggggagttcatcactctgtatcggtcagcgagcaaaccaaactcta

SEQ ID NO: 323045 - DNA, 60 bp, Artificial
  Synthetic oligonucleotide
agctctacggcattcagcgttccccctcttagtcagagggagaacagagatgcaaaggaa

SEQ ID NO: 323046 - DNA, 60 bp, Artificial
  Synthetic oligonucleotide
agctctacgttaccaaagatctgcttgaccatctagatgtcggtggtctattaagagcaa

SEQ ID NO: 323047 - DNA, 58 bp, Artificial
  Synthetic oligonucleotide
agctctactttccctacagtcacaccagtcgagacccctgcccgcgttgcaaccacaa

SEQ ID NO: 323048 - DNA, 55 bp, Artificial
  Synthetic oligonucleotide
agctctagacttcaagcccggcacatctggatctcctatcgtgaacagagaggga

SEQ ID NO: 323049 - DNA, 55 bp, Artificial
  Synthetic oligonucleotide
agctctagatcgttgcacgccatgacttcactatccgcaccacacgggacagctc

SEQ ID NO: 323050 - DNA, 55 bp, Artificial
  Synthetic oligonucleotide
agctctagcaacagcaattgcaaggaccctaataatgagagaggaaacccaggag

SEQ ID NO: 323051 - DNA, 60 bp, Artificial
  Synthetic oligonucleotide
agctctagcacctttcactcgcactttcaggttcacaaccacttactgataagatattta

SEQ ID NO: 323052 - DNA, 55 bp, Artificial
  Synthetic oligonucleotide
agctctcaagtttaatacactatgggtgcacaagtatcaactcagaagtcaggct

SEQ ID NO: 323053 - DNA, 55 bp, Artificial
  Synthetic oligonucleotide
agctctcacccaagctttaccagcacccacaggccaaaacacgcaagtaagcagc

SEQ ID NO: 323054 - DNA, 53 bp, Artificial
  Synthetic oligonucleotide
agctctcgtaccaagcacacgaccgccccaaaagggctgccccgcagacgagt

SEQ ID NO: 323055 - DNA, 60 bp, Artificial
  Synthetic oligonucleotide
agctctcgtccttagttacgatctgcaagcattcgtgctctagagttagcttgtcaaggt

SEQ ID NO: 323056 - DNA, 60 bp, Artificial
  Synthetic oligonucleotide
agctctctcacgatgccgtcaccaactcaattcatttttctacctatcgatattcatctc

SEQ ID NO: 323057 - DNA, 60 bp, Artificial
  Synthetic oligonucleotide
agctctctcagagctaggggcaatgcgactcgagctcaatttgcaaagatagataactgg

SEQ ID NO: 323058 - DNA, 54 bp, Artificial
  Synthetic oligonucleotide
agctctctgccgacgggtctcggtgtgttcaaggagagttgagcgaattggtcc

SEQ ID NO: 323059 - DNA, 60 bp, Artificial
  Synthetic oligonucleotide
agctctcttgacgcaggactcggcttgctgaagtgcacacagcaagaggcgaggcggcgg

SEQ ID NO: 323060 - DNA, 60 bp, Artificial
  Synthetic oligonucleotide
agctctgaagttccggttgccaacatatggagcccagtgagcatgtcgtggggatacagc

SEQ ID NO: 323061 - DNA, 60 bp, Artificial
  Synthetic oligonucleotide
agctctgacgtgcccaggggctgtgaaggcccatgtaaggtgcaatcgtttgagtccagg

SEQ ID NO: 323062 - DNA, 59 bp, Artificial
  Synthetic oligonucleotide
agctctgagtgaaagcgccaccattgtgtacaacgaacgagagttcgtgaacaggtacc

SEQ ID NO: 323063 - DNA, 60 bp, Artificial
  Synthetic oligonucleotide
agctctgattatatgagttaccgcagaacttcccaattaacagtttcagctcatgaaaat

SEQ ID NO: 323064 - DNA, 57 bp, Artificial
  Synthetic oligonucleotide
agctctgctgtgggatttgtcccaactgatgatctgccgtctcggagtgtgcttcgc

SEQ ID NO: 323065 - DNA, 60 bp, Artificial
  Synthetic oligonucleotide
agctctggagctagaagtcacaattgagaattttgtaagaaaggacctcctctgtgcatt

SEQ ID NO: 323066 - DNA, 58 bp, Artificial
  Synthetic oligonucleotide
agctctggatcttctggggaccttctggaaccgggaagtccaagcgagccaatgagac

SEQ ID NO: 323067 - DNA, 51 bp, Artificial
  Synthetic oligonucleotide
agctctggggcgagtcggattcgttcgcaccgagccagatcccgaaatacg

SEQ ID NO: 323068 - DNA, 60 bp, Artificial
  Synthetic oligonucleotide
agctctggtaatttggggagtacatcactctgaatcggttagcgagcagaccaaactcta

SEQ ID NO: 323069 - DNA, 60 bp, Artificial
  Synthetic oligonucleotide
agctctggtatctcctgtaaggtcaggatccatgtagatgaaccagatgagcttacagta

SEQ ID NO: 323070 - DNA, 56 bp, Artificial
  Synthetic oligonucleotide
agctctgtacggcgaggtgacaataaaagaactcgaggaaacaaacctcggagtca

SEQ ID NO: 323071 - DNA, 59 bp, Artificial
  Synthetic oligonucleotide
agctctgttgaccttactgcccgagaaaggtggcttagaaaaacactgcatcctactca

SEQ ID NO: 323072 - DNA, 54 bp, Artificial
  Synthetic oligonucleotide
agctcttaacttgcgcagatggaaactgtcacaccttgcgcaccgtgcacatag

SEQ ID NO: 323073 - DNA, 60 bp, Artificial
  Synthetic oligonucleotide
agctcttatcaatactatcatttattctaaacatctgctgtacaactgttgttatcatgt

SEQ ID NO: 323074 - DNA, 55 bp, Artificial
  Synthetic oligonucleotide
agctcttcactactcgctgcgtcgagagtgtacgagactctccaggtttggtaag

SEQ ID NO: 323075 - DNA, 55 bp, Artificial
  Synthetic oligonucleotide
agctcttccccaagtaactgacactgcgggactttccagactgctgacactgcgg

SEQ ID NO: 323076 - DNA, 55 bp, Artificial
  Synthetic oligonucleotide
agctcttcgagctgctggcatgcgcatcaacccgtactcgaacggtcgccaaatt

SEQ ID NO: 323077 - DNA, 59 bp, Artificial
  Synthetic oligonucleotide
agctcttcgctgggctataccctatgttggcgcgctttccaggtgcccgatacgtgact

SEQ ID NO: 323078 - DNA, 59 bp, Artificial
  Synthetic oligonucleotide
agctcttgacccggttaatgaacagatggtcaatgcactcttagtgaaaatttcgacca

SEQ ID NO: 323079 - DNA, 60 bp, Artificial
  Synthetic oligonucleotide
agctcttgatgcgtatagccgttggctggcgataaagctagacaaagctcggagtatgaa

SEQ ID NO: 323080 - DNA, 51 bp, Artificial
  Synthetic oligonucleotide
agctcttgtaactttgatttgcatgtaccgtcaacaacaattcagaagtac

SEQ ID NO: 323081 - DNA, 56 bp, Artificial
  Synthetic oligonucleotide
agctcttgtggaggagaactgtaccttgaccattacaaacttcggtccctgcaaac

SEQ ID NO: 323082 - DNA, 58 bp, Artificial
  Synthetic oligonucleotide
agctcttttataacatggggggcaagtggtcaaaatgttccatagtaggatggtctga

SEQ ID NO: 323083 - DNA, 50 bp, Artificial
  Synthetic oligonucleotide
agctgaaaacgaaagaagtgcgctgtaagtattaccagtgcacttcggga

SEQ ID NO: 323084 - DNA, 60 bp, Artificial
  Synthetic oligonucleotide
agctgaacacgatggaagcactttcagaccgtttaagtgcgttgcaggacagaatattag

SEQ ID NO: 323085 - DNA, 53 bp, Artificial
  Synthetic oligonucleotide
agctgaacaggctcctagcaatgaagggcgtcgccactggcaggaatccaaac

SEQ ID NO: 323086 - DNA, 60 bp, Artificial
  Synthetic oligonucleotide
agctgaaccgacttgagcaagtgctgacgacgtatgcagaagttttgcgcaggcgagtat

SEQ ID NO: 323087 - DNA, 60 bp, Artificial
  Synthetic oligonucleotide
agctgaactcagacattgaccactgggattcctacacaaatcaaccagtggtgtgctggg

SEQ ID NO: 323088 - DNA, 55 bp, Artificial
  Synthetic oligonucleotide
agctgaagaattcgagctgttgaagggttacttcggtttgccttatcttggtaac

SEQ ID NO: 323089 - DNA, 53 bp, Artificial
  Synthetic oligonucleotide
agctgaagcgcacttgcaagtgtgggtcccccctcttaacgttcggggggggc

SEQ ID NO: 323090 - DNA, 53 bp, Artificial
  Synthetic oligonucleotide
agctgaagctcacatcgaaaccgatgtttcctaaacaagtcaaaggggattac

SEQ ID NO: 323091 - DNA, 53 bp, Artificial
  Synthetic oligonucleotide
agctgaaggaccctatgctggcccccttgaacgacaacagccgctgaaactta

SEQ ID NO: 323092 - DNA, 55 bp, Artificial
  Synthetic oligonucleotide
agctgaaggccaccctgaattggttccgcagtatgtaccgcagcctctcagtgcc

SEQ ID NO: 323093 - DNA, 60 bp, Artificial
  Synthetic oligonucleotide
agctgaagtaaatgattaatactcaccttacgaatcttgtggccagtacacacttaatca

SEQ ID NO: 323094 - DNA, 54 bp, Artificial
  Synthetic oligonucleotide
agctgaatattccgaagtgaatcctaacaaacttaatcggaaggaaaccgacga

SEQ ID NO: 323095 - DNA, 51 bp, Artificial
  Synthetic oligonucleotide
agctgaattgaatgcggcacgagttgctgtcgaattagctattactacggg

SEQ ID NO: 323096 - DNA, 50 bp, Artificial
  Synthetic oligonucleotide
agctgaatttgcgggaatgtcgtacaaagttccactgacccagatggatg

SEQ ID NO: 323097 - DNA, 56 bp, Artificial
  Synthetic oligonucleotide
agctgacacaaatattttgtaggtcgtagtgaaatacaacaattgaaacccgtatc

SEQ ID NO: 323098 - DNA, 59 bp, Artificial
  Synthetic oligonucleotide
agctgacactagggaactccactattactacacaagaggctgccaattcggtggttgcc

SEQ ID NO: 323099 - DNA, 60 bp, Artificial
  Synthetic oligonucleotide
agctgaccaggcgcagtcaagccagaattcatttgaaacagtagcctctgaggtggactt

SEQ ID NO: 323100 - DNA, 60 bp, Artificial
  Synthetic oligonucleotide
agctgaccccctctccaggattgcagagcacgattgatgggaccccaccttcaatcagcc

SEQ ID NO: 323101 - DNA, 51 bp, Artificial
  Synthetic oligonucleotide
agctgacctgagtgttaacgggtgtcaagtcgtcagtcagcaaacttcagc

SEQ ID NO: 323102 - DNA, 60 bp, Artificial
  Synthetic oligonucleotide
agctgacgtcctttccatggctgctcgcctgtgttgccacctggattctgcgcgggacgt

SEQ ID NO: 323103 - DNA, 57 bp, Artificial
  Synthetic oligonucleotide
agctgacgttcccccatgctgaggatctcgaaactgtccgcttcaaggcccgtaagt

SEQ ID NO: 323104 - DNA, 60 bp, Artificial
  Synthetic oligonucleotide
agctgacttgtctgcattttatcagaggaccctacctatagagtccatcttgaaccacac

SEQ ID NO: 323105 - DNA, 55 bp, Artificial
  Synthetic oligonucleotide
agctgactttgtacccgaggacgatggtcctctgattactacggtcagggacgta

SEQ ID NO: 323106 - DNA, 57 bp, Artificial
  Synthetic oligonucleotide
agctgagaacgataggagacgtcggtccacgacctcgcgaccacgtagacgtattag

SEQ ID NO: 323107 - DNA, 60 bp, Artificial
  Synthetic oligonucleotide
agctgagagaaaaatgagaagatgtgtgagctttcatgaagcatttgaaatagcagaagg

SEQ ID NO: 323108 - DNA, 60 bp, Artificial
  Synthetic oligonucleotide
agctgagagagcttccgctatgttggagtatgttgcttacgagcagcaactacatcagaa

SEQ ID NO: 323109 - DNA, 52 bp, Artificial
  Synthetic oligonucleotide
agctgagagatgtaacaattgagctaagaggtgcattcctaaattattgctt

SEQ ID NO: 323110 - DNA, 57 bp, Artificial
  Synthetic oligonucleotide
agctgagaggccggcgcgctaccttctactccaggaatgcggcgatcaagacttaca

SEQ ID NO: 323111 - DNA, 60 bp, Artificial
  Synthetic oligonucleotide
agctgagcaaacgaaaccgtcagccgtcgctcgcctgttgaagtcgcaattgagtaacat

SEQ ID NO: 323112 - DNA, 60 bp, Artificial
  Synthetic oligonucleotide
agctgagcagcagatcagctttgtctgccaaagggttgatatggatattatagtgtactg

SEQ ID NO: 323113 - DNA, 53 bp, Artificial
  Synthetic oligonucleotide
agctgagcatacgggaacgaaccactgtgtctaccataaggagcccagaaaag

SEQ ID NO: 323114 - DNA, 59 bp, Artificial
  Synthetic oligonucleotide
agctgagcattcgaaaccgtcagccgtcgctcgcctgttgaagtcgcagttaaacaacg

SEQ ID NO: 323115 - DNA, 60 bp, Artificial
  Synthetic oligonucleotide
agctgagctatgcaataatggagatgattgtgtcatcataactgatagagcgaatgaaga

SEQ ID NO: 323116 - DNA, 60 bp, Artificial
  Synthetic oligonucleotide
agctgaggatgtcagcgaggtgtactctgatgcgtttttgttagatgacactcctgagga

SEQ ID NO: 323117 - DNA, 52 bp, Artificial
  Synthetic oligonucleotide
agctgaggcatctgatttcagtcaaattaggcaaaatcccaactgtagaaaa

SEQ ID NO: 323118 - DNA, 60 bp, Artificial
  Synthetic oligonucleotide
agctgagggtgcgcacaacattgagaagggcttcttgttcaagtgtcaggatcggctttc

SEQ ID NO: 323119 - DNA, 52 bp, Artificial
  Synthetic oligonucleotide
agctgaggtgtgtgtgcccacatctcccttggtgttttctcgctttgcagac

SEQ ID NO: 323120 - DNA, 55 bp, Artificial
  Synthetic oligonucleotide
agctgaggttggttatagtgcaccatattattcttttgaggcgtctacacaaggg

SEQ ID NO: 323121 - DNA, 53 bp, Artificial
  Synthetic oligonucleotide
agctgagtaaaccagggcagggaccgaaactcgctcgcacgcaaccctcccgt

SEQ ID NO: 323122 - DNA, 52 bp, Artificial
  Synthetic oligonucleotide
agctgagtaccacatgtccaatggcagttttccaactcgcctccgaggtcat

SEQ ID NO: 323123 - DNA, 56 bp, Artificial
  Synthetic oligonucleotide
agctgagtctaacggaatcagatgggacaatggggcagaaatatacctggcattct

SEQ ID NO: 323124 - DNA, 59 bp, Artificial
  Synthetic oligonucleotide
agctgagtgcatgaagaggtacattggcacaccttatgaaggaattatcgacaccttag

SEQ ID NO: 323125 - DNA, 56 bp, Artificial
  Synthetic oligonucleotide
agctgagttggcagtattgctacaaactgtctgaagtcgctaaacgttttaaacgg

SEQ ID NO: 323126 - DNA, 60 bp, Artificial
  Synthetic oligonucleotide
agctgataaaatttgcgttgctatgttctcagttcaattgacatgatgtcgacaatccca

SEQ ID NO: 323127 - DNA, 59 bp, Artificial
  Synthetic oligonucleotide
agctgataatttgctcgacactttggctttagtgcatccacttgcgataccttttcttg

SEQ ID NO: 323128 - DNA, 55 bp, Artificial
  Synthetic oligonucleotide
agctgatatccgtcaccacatcatctaggttgtcaaagctgcgttttcggcgaga

SEQ ID NO: 323129 - DNA, 60 bp, Artificial
  Synthetic oligonucleotide
agctgatcaatgcccattaccaggttaccatgctggattaacctataatagacagtctat

SEQ ID NO: 323130 - DNA, 60 bp, Artificial
  Synthetic oligonucleotide
agctgatcgggataatcactccccactctcgtaacgtattggataggctggcgtacatac

SEQ ID NO: 323131 - DNA, 50 bp, Artificial
  Synthetic oligonucleotide
agctgatgaactaatctcgtgacagagattacctggaacgatacacttac

SEQ ID NO: 323132 - DNA, 60 bp, Artificial
  Synthetic oligonucleotide
agctgatgcacttgcccatggagtattggattcgtccgggactcgttggattcgtctcgg

SEQ ID NO: 323133 - DNA, 55 bp, Artificial
  Synthetic oligonucleotide
agctgatggtactaccacatggtacttcaatccagttgttctgagaccaagtaat

SEQ ID NO: 323134 - DNA, 59 bp, Artificial
  Synthetic oligonucleotide
agctgattgacattccttactgcaattacactaagttttggtatgttaatcatacaaaa

SEQ ID NO: 323135 - DNA, 60 bp, Artificial
  Synthetic oligonucleotide
agctgattgcgacggcggagagaggagacgtacgacagagatatgacgcagcaggggtaa

SEQ ID NO: 323136 - DNA, 58 bp, Artificial
  Synthetic oligonucleotide
agctgattgtggttaggccgattactggaaactagacaacctgattcattagtggtta

SEQ ID NO: 323137 - DNA, 60 bp, Artificial
  Synthetic oligonucleotide
agctgcaaagaaggctaggcggcttctaggtatgtggcagccccccacgcacaatgtccc

SEQ ID NO: 323138 - DNA, 55 bp, Artificial
  Synthetic oligonucleotide
agctgcaagagctctgctgcggagagccaaacgcgtggggcgaagagccatgctt

SEQ ID NO: 323139 - DNA, 60 bp, Artificial
  Synthetic oligonucleotide
agctgcactcgcactatttgacgtactacattcacatcgatctgtaccaattcctgagca

SEQ ID NO: 323140 - DNA, 50 bp, Artificial
  Synthetic oligonucleotide
agctgcagagcaagtgtacaaaattgttaaagttcctagtatttcgttta

SEQ ID NO: 323141 - DNA, 57 bp, Artificial
  Synthetic oligonucleotide
agctgcaggttaggcaagaagtagcttcctttatgaaccagtctaaggtgaggcgtt

SEQ ID NO: 323142 - DNA, 60 bp, Artificial
  Synthetic oligonucleotide
agctgcagtgagtagctccccggtgcgtgaatccattatcgtgacagcctagagcgatga

SEQ ID NO: 323143 - DNA, 60 bp, Artificial
  Synthetic oligonucleotide
agctgcagtgagtagttcccctgtgcgtgaatccattatcgtgacaacctatggcgagaa

SEQ ID NO: 323144 - DNA, 60 bp, Artificial
  Synthetic oligonucleotide
agctgcagtgatgagttcccctgtgcgtgaatccatcgttggcacagtgtattcctatgt

SEQ ID NO: 323145 - DNA, 60 bp, Artificial
  Synthetic oligonucleotide
agctgcagtgatgagttcccctgtgcgtgaatccatgatcgtgacaggctagtgctatga

SEQ ID NO: 323146 - DNA, 60 bp, Artificial
  Synthetic oligonucleotide
agctgcagtgatgggttcccctgtgcgtgaatccatggttgtggcaggctatggatatga

SEQ ID NO: 323147 - DNA, 55 bp, Artificial
  Synthetic oligonucleotide
agctgcatagattgggtggtggcggctgcaggggtgcatcatagcgtggcggaga

SEQ ID NO: 323148 - DNA, 60 bp, Artificial
  Synthetic oligonucleotide
agctgcatggtaggcttgggcttacaaagagttcaaatcacatatgaaaagacatactgt

SEQ ID NO: 323149 - DNA, 58 bp, Artificial
  Synthetic oligonucleotide
agctgcatgttctggttggtcagggaccgtagaccctatggaacgccaatggattttg

SEQ ID NO: 323150 - DNA, 60 bp, Artificial
  Synthetic oligonucleotide
agctgcattcgtacctggaaggtacccgctttcatcagactgcggtggatatggctgaga

SEQ ID NO: 323151 - DNA, 57 bp, Artificial
  Synthetic oligonucleotide
agctgcattgacggcgttgtggtagacgtcgtctttgtttgattttgtacccccaga

SEQ ID NO: 323152 - DNA, 57 bp, Artificial
  Synthetic oligonucleotide
agctgccaacctagttagggacactctcgttctccaccagtggtataaagtccgcag

SEQ ID NO: 323153 - DNA, 60 bp, Artificial
  Synthetic oligonucleotide
agctgccaatatagcacttagctggagttcagttgaacacagaggcaacaaaatcctagt

SEQ ID NO: 323154 - DNA, 55 bp, Artificial
  Synthetic oligonucleotide
agctgccagtcactagggaaacttgggaaacatggtgggcggactattggcaggc

SEQ ID NO: 323155 - DNA, 60 bp, Artificial
  Synthetic oligonucleotide
agctgcccccacatcaatggtgcacggaaggctagggtttgacggtcaataccatgagaa

SEQ ID NO: 323156 - DNA, 50 bp, Artificial
  Synthetic oligonucleotide
agctgcccggttgcaattgtgacatccgcacaaactttggcgccacaaag

SEQ ID NO: 323157 - DNA, 57 bp, Artificial
  Synthetic oligonucleotide
agctgccgacctcttaccaagtttgcccagggctggggccctatcagttatgtcaac

SEQ ID NO: 323158 - DNA, 57 bp, Artificial
  Synthetic oligonucleotide
agctgccgccccattgacgagttcgctcaggggtggggtcccatcacttacgctagt

SEQ ID NO: 323159 - DNA, 59 bp, Artificial
  Synthetic oligonucleotide
agctgccgcccttgaagagtcgctgggaggaagagcctggctctctcgtgcccggggat

SEQ ID NO: 323160 - DNA, 55 bp, Artificial
  Synthetic oligonucleotide
agctgcctcataatttgcattatagttctgcactaggccttgcaaatctaatggt

SEQ ID NO: 323161 - DNA, 55 bp, Artificial
  Synthetic oligonucleotide
agctgcctgcacccgaagatatcctcatagacgcattcttgatgatcttggggag

SEQ ID NO: 323162 - DNA, 60 bp, Artificial
  Synthetic oligonucleotide
agctgcgaagagaggcgagtatgatggaaagataatacttggacatcattccgataattt

SEQ ID NO: 323163 - DNA, 60 bp, Artificial
  Synthetic oligonucleotide
agctgcgaagtatgacaatcacacagagaatgctcttttgttgtatatggcatgtactca

SEQ ID NO: 323164 - DNA, 51 bp, Artificial
  Synthetic oligonucleotide
agctgcgagtcccctgatgagttcgtcagcccaatagtgcttctagaagcc

SEQ ID NO: 323165 - DNA, 60 bp, Artificial
  Synthetic oligonucleotide
agctgcggcaataccctcacatgttacttgaaggcttctgcagcctgtcgagctgcgaag

SEQ ID NO: 323166 - DNA, 60 bp, Artificial
  Synthetic oligonucleotide
agctgcggtaataccctcacatgttatctgaaagcctctgcggcctgtcgagctgcaaag

SEQ ID NO: 323167 - DNA, 60 bp, Artificial
  Synthetic oligonucleotide
agctgcgtacgataggcgcacccgatcagaagtcgcacgcgctgacctgcttgctgtgct

SEQ ID NO: 323168 - DNA, 60 bp, Artificial
  Synthetic oligonucleotide
agctgctatagcagctcactcttcatgtctgagagcccccaatttgattaagtataagcc

SEQ ID NO: 323169 - DNA, 60 bp, Artificial
  Synthetic oligonucleotide
agctgctatcggtgaaccagcagtcctacagcttgacgaggggaacgctgacgtatcgaa

SEQ ID NO: 323170 - DNA, 60 bp, Artificial
  Synthetic oligonucleotide
agctgctatgagtgtcgagcgttttagtgtcttggactacccggagtactgcatgatcga

SEQ ID NO: 323171 - DNA, 60 bp, Artificial
  Synthetic oligonucleotide
agctgctattggccaagatcacacaccctctggagcaatggagtcctagagagtgaaatg

SEQ ID NO: 323172 - DNA, 60 bp, Artificial
  Synthetic oligonucleotide
agctgctcctagtcgctcgacaacactggcagtcgatcctactaaaggtatcccctgcgt

SEQ ID NO: 323173 - DNA, 51 bp, Artificial
  Synthetic oligonucleotide
agctgctcgttttaattcactcaaagaagatccatcaggtggtaaccgttt

SEQ ID NO: 323174 - DNA, 60 bp, Artificial
  Synthetic oligonucleotide
agctgctgagattcaactgtgaagttcctaattctggttcggcttttattcgctcagtgt

SEQ ID NO: 323175 - DNA, 60 bp, Artificial
  Synthetic oligonucleotide
agctgctgaggaagtgtctaggatggatatagaccatgataaggatggctacacaaaggt

SEQ ID NO: 323176 - DNA, 60 bp, Artificial
  Synthetic oligonucleotide
agctgctgagtatgatcagaccacttatggttcttctactaatcctatgtatgtctctga

SEQ ID NO: 323177 - DNA, 58 bp, Artificial
  Synthetic oligonucleotide
agctgctgagtcgaagtagtacgcactatggatgtagcgccccaatggtggggtggtt

SEQ ID NO: 323178 - DNA, 60 bp, Artificial
  Synthetic oligonucleotide
agctgctttcagctgtgctggacctattgctcttcactggcatgcaaacgatgctatctc

SEQ ID NO: 323179 - DNA, 59 bp, Artificial
  Synthetic oligonucleotide
agctgcttttcgcctgtactgggtctctctaggtagaccagatcagagcccgggaactc

SEQ ID NO: 323180 - DNA, 55 bp, Artificial
  Synthetic oligonucleotide
agctggaaagatctttgaaggtaactggaatgtctgatatctgttccaatccaga

SEQ ID NO: 323181 - DNA, 57 bp, Artificial
  Synthetic oligonucleotide
agctggacaaaagtagtgacccgacaacgtgccaccaacatgacccctgaaaacatc

SEQ ID NO: 323182 - DNA, 59 bp, Artificial
  Synthetic oligonucleotide
agctggacactctgagccgaaagcaggttacaaaaaaggagggtgtggtgcattatgtg

SEQ ID NO: 323183 - DNA, 60 bp, Artificial
  Synthetic oligonucleotide
agctggacagatttgcatgtaatcctgagctactagaaactgcagaaggtaatgagcaac

SEQ ID NO: 323184 - DNA, 60 bp, Artificial
  Synthetic oligonucleotide
agctggacaggcgcggtcatcactccgtgtgcaccagaggaggaaaaattgccaattagc

SEQ ID NO: 323185 - DNA, 60 bp, Artificial
  Synthetic oligonucleotide
agctggacatcagaaccgtctggaggactgaggaatacaaagaaaggacaagagcattca

SEQ ID NO: 323186 - DNA, 50 bp, Artificial
  Synthetic oligonucleotide
agctggactactatctatgtcatcagcatctaatggtgaatcgagacaac

SEQ ID NO: 323187 - DNA, 55 bp, Artificial
  Synthetic oligonucleotide
agctggactcacggcaccgcgtggccattttagctggactgtgcggacgaacacc

SEQ ID NO: 323188 - DNA, 60 bp, Artificial
  Synthetic oligonucleotide
agctggactcatatgcaagctccgcgccgtaaggcaagctgaaccaaagtagtgacccga

SEQ ID NO: 323189 - DNA, 60 bp, Artificial
  Synthetic oligonucleotide
agctggactgtcaatgacatacagaagttagtgggaaaattgaattgggcaagtcagatt

SEQ ID NO: 323190 - DNA, 55 bp, Artificial
  Synthetic oligonucleotide
agctggagacactcaggtacctgctgggtactttgactggggactgtgggatgac

SEQ ID NO: 323191 - DNA, 60 bp, Artificial
  Synthetic oligonucleotide
agctggagccctcaccaggattgcatagcacgattgatggtatacctcctttaatttgaa

SEQ ID NO: 323192 - DNA, 60 bp, Artificial
  Synthetic oligonucleotide
agctggaggagcaattacaacatcaacgtagaggccataaggtctacattcgtaatgtac

SEQ ID NO: 323193 - DNA, 55 bp, Artificial
  Synthetic oligonucleotide
agctggagggcttctcactgtgtgttacgtgctcactggaagatcggctgatttg

SEQ ID NO: 323194 - DNA, 60 bp, Artificial
  Synthetic oligonucleotide
agctggatacaaagtgaattcaacaaggcatgtgaattgaccgattcaagctggatagaa

SEQ ID NO: 323195 - DNA, 56 bp, Artificial
  Synthetic oligonucleotide
agctggatgagatctatcaatttatgactagcgcgatcagaaatgatggagaagcg

SEQ ID NO: 323196 - DNA, 60 bp, Artificial
  Synthetic oligonucleotide
agctggcaaatacgagaatcatactgagaacgccctgttattgtatatggcatgtactca

SEQ ID NO: 323197 - DNA, 59 bp, Artificial
  Synthetic oligonucleotide
agctggcaagtgaatgtcacagacagtttcggagggctagcggttttcaaccaaggcgc

SEQ ID NO: 323198 - DNA, 60 bp, Artificial
  Synthetic oligonucleotide
agctggcagcaatggattatgtggctgtcttagatagagagctgcggtcaaataacattt

SEQ ID NO: 323199 - DNA, 55 bp, Artificial
  Synthetic oligonucleotide
agctggcatcgagtgtggctggggcggtcactgacttcctcggtatccactcgcc

SEQ ID NO: 323200 - DNA, 58 bp, Artificial
  Synthetic oligonucleotide
agctggcatgttgcgggctctgtttccttcggggtgcagttgctttccaaggcatggc

SEQ ID NO: 323201 - DNA, 54 bp, Artificial
  Synthetic oligonucleotide
agctggccacagcttacagttgtggaccgttttcggtatttggcgcccttttta

SEQ ID NO: 323202 - DNA, 59 bp, Artificial
  Synthetic oligonucleotide
agctggccccctctccaggattgcagagcacgattgatgggataccccctttaatttga

SEQ ID NO: 323203 - DNA, 50 bp, Artificial
  Synthetic oligonucleotide
agctggcggccccatggaaaggatccgacaatcccctttgtgcgaccgta

SEQ ID NO: 323204 - DNA, 60 bp, Artificial
  Synthetic oligonucleotide
agctggcgttcacatcttttgtgatggagagcatgcttacccaaatgcatctcatccatg

SEQ ID NO: 323205 - DNA, 60 bp, Artificial
  Synthetic oligonucleotide
agctgggacacccacgtcatgctcgataatgtgtttcgtttcggcatgcaacgacttttc

SEQ ID NO: 323206 - DNA, 59 bp, Artificial
  Synthetic oligonucleotide
agctggggacgaattatcagaaatctacagctcacgttttcacggaatgacacttagaa

SEQ ID NO: 323207 - DNA, 55 bp, Artificial
  Synthetic oligonucleotide
agctggggctctatatgataagaggcacaaaacactcaagaattccttcaaagga

SEQ ID NO: 323208 - DNA, 59 bp, Artificial
  Synthetic oligonucleotide
agctggggttgtaacccatcagattgcccaggggtgggtacaggatgtacagcatgtgg

SEQ ID NO: 323209 - DNA, 55 bp, Artificial
  Synthetic oligonucleotide
agctgggtgctggagtacgccgcgggcaacggtgcggctctgttacagaaagggg

SEQ ID NO: 323210 - DNA, 55 bp, Artificial
  Synthetic oligonucleotide
agctgggttaccgcactaactccctgccaagtgaaactcggggacgagtgagtac

SEQ ID NO: 323211 - DNA, 60 bp, Artificial
  Synthetic oligonucleotide
agctgggtttgattactcgtgcgcttttaatgcaccagcgaatattcagcagtttgaaca

SEQ ID NO: 323212 - DNA, 52 bp, Artificial
  Synthetic oligonucleotide
agctggtacacgaatggtattcgaagtttcaggaacgtcgaccgttagcatt

SEQ ID NO: 323213 - DNA, 55 bp, Artificial
  Synthetic oligonucleotide
agctggtacccaaactccttgcactcaaagcgggggtccgtgagggagacaaagc

SEQ ID NO: 323214 - DNA, 57 bp, Artificial
  Synthetic oligonucleotide
agctggtcacctacttttaggctctcaaaagcagtctgtaggacgaatacgttagaa

SEQ ID NO: 323215 - DNA, 53 bp, Artificial
  Synthetic oligonucleotide
agctggtccaacgacatacgttgcctcggggaacggtctggttcttagaaagt

SEQ ID NO: 323216 - DNA, 55 bp, Artificial
  Synthetic oligonucleotide
agctggtcgtcctactattaaccacccaacctttgtgggtagtgagcgttgtaga

SEQ ID NO: 323217 - DNA, 55 bp, Artificial
  Synthetic oligonucleotide
agctggtgcacattctgatgggccgctgggttgatgcggtcgctctggcgaagga

SEQ ID NO: 323218 - DNA, 60 bp, Artificial
  Synthetic oligonucleotide
agctggtggcccccctgtgttccttgatggaacaatgagcttgggtgctgagattttgcc

SEQ ID NO: 323219 - DNA, 55 bp, Artificial
  Synthetic oligonucleotide
agctggtgtacactctcgaaggaaatgctaccggcaactacactcaacctctccg

SEQ ID NO: 323220 - DNA, 52 bp, Artificial
  Synthetic oligonucleotide
agctggtgtgaaagctgctcttggagatcccggagcacattgcgaactacgc

SEQ ID NO: 323221 - DNA, 57 bp, Artificial
  Synthetic oligonucleotide
agctggttccatgatgaaccataaagatgagaacaagttaggaataaggggggcttc

SEQ ID NO: 323222 - DNA, 51 bp, Artificial
  Synthetic oligonucleotide
agctggttggcagggcaagggtgtccccggggtgcggatggagtgtgcgag

SEQ ID NO: 323223 - DNA, 58 bp, Artificial
  Synthetic oligonucleotide
agctggttggtataccaactcatagacatttgattggagaaggctgccctaaacctca

SEQ ID NO: 323224 - DNA, 60 bp, Artificial
  Synthetic oligonucleotide
agctggttttgcgatcctaaaatgtacagataaagagttcaatggagcagggccatgcaa

SEQ ID NO: 323225 - DNA, 55 bp, Artificial
  Synthetic oligonucleotide
agctggttttgcgatcctaaagtgtaatgatgaacagttcaatggaacaggggaa

SEQ ID NO: 323226 - DNA, 60 bp, Artificial
  Synthetic oligonucleotide
agctggttttgcgattctagagtgtaaggataaagatttcaatggaacagggctatgcaa

SEQ ID NO: 323227 - DNA, 53 bp, Artificial
  Synthetic oligonucleotide
agctgtaacaattcctcccagcacgctaacgtgggacgctgtctggtgcgacc

SEQ ID NO: 323228 - DNA, 51 bp, Artificial
  Synthetic oligonucleotide
agctgtaagcgatggacttgagtaagctctataccaagagacagttggaag

SEQ ID NO: 323229 - DNA, 59 bp, Artificial
  Synthetic oligonucleotide
agctgtacgttgtggccccgtaataccatccgtcaagcatcacttcaatatgaattacg

SEQ ID NO: 323230 - DNA, 54 bp, Artificial
  Synthetic oligonucleotide
agctgtactccctagacactcccaaccgggaaaaaccatttgggttgagcacaa

SEQ ID NO: 323231 - DNA, 59 bp, Artificial
  Synthetic oligonucleotide
agctgtactgaatgttgttcctagaaacggacaagtggaatgtagttcttcaaagatga

SEQ ID NO: 323232 - DNA, 58 bp, Artificial
  Synthetic oligonucleotide
agctgtatatagaaagaccacggaagaattgactactgttgaattgtgtctaacattt

SEQ ID NO: 323233 - DNA, 55 bp, Artificial
  Synthetic oligonucleotide
agctgtatgcagtccacaaccaggcagaagtagaagtctggaagaagcacatagg

SEQ ID NO: 323234 - DNA, 55 bp, Artificial
  Synthetic oligonucleotide
agctgtcaatagagagagcggagcaggagtacgtggagaggcaagcctctcttcg

SEQ ID NO: 323235 - DNA, 59 bp, Artificial
  Synthetic oligonucleotide
agctgtcacacaggttaaagtaacagatcctgctttcttgtctcgtcccacctcattgg

SEQ ID NO: 323236 - DNA, 55 bp, Artificial
  Synthetic oligonucleotide
agctgtcattctgaagcacaagtctggttcaagccataagaggtctttgcccagg

SEQ ID NO: 323237 - DNA, 56 bp, Artificial
  Synthetic oligonucleotide
agctgtccaacaagccatcaggggagaaaagtatctttggtgtaaacaccaggtgg

SEQ ID NO: 323238 - DNA, 50 bp, Artificial
  Synthetic oligonucleotide
agctgtccacaatgtgtcgtcaacaggcagctaacgaagcttatgcttcg

SEQ ID NO: 323239 - DNA, 55 bp, Artificial
  Synthetic oligonucleotide
agctgtcccacatacccggctcgccgttgtggacggctccctgagccagcgtgta

SEQ ID NO: 323240 - DNA, 55 bp, Artificial
  Synthetic oligonucleotide
agctgtccttttgagaggaccaacgtgtgcgacgtacaaacgccccttagcgcag

SEQ ID NO: 323241 - DNA, 53 bp, Artificial
  Synthetic oligonucleotide
agctgtcgaccccttaccgactttgcccagggctggggccctatcgggtacgc

SEQ ID NO: 323242 - DNA, 60 bp, Artificial
  Synthetic oligonucleotide
agctgtcgcaaaatgcaatgtcaatcatgacgaagagttctgtgatatgctccgactgat

SEQ ID NO: 323243 - DNA, 58 bp, Artificial
  Synthetic oligonucleotide
agctgtcgtcagttattacgtatccgtcaatttgagagacctgtcccggttcattaga

SEQ ID NO: 323244 - DNA, 58 bp, Artificial
  Synthetic oligonucleotide
agctgtcgtggctggtgttttggccgttcaaactgccaaaggccgaatcactcgtcaa

SEQ ID NO: 323245 - DNA, 59 bp, Artificial
  Synthetic oligonucleotide
agctgtctggcaaccgcctctagcacttctgccgtcgatttggaattccccccattcga

SEQ ID NO: 323246 - DNA, 60 bp, Artificial
  Synthetic oligonucleotide
agctgtcttgggctatgacatcaaccaatgttatgtcgttagttatggggatgactgtgt

SEQ ID NO: 323247 - DNA, 59 bp, Artificial
  Synthetic oligonucleotide
agctgtgagataatgattcctaagggcacaggtgacatcttagtagactgctcaggagg

SEQ ID NO: 323248 - DNA, 60 bp, Artificial
  Synthetic oligonucleotide
agctgtgagcgccagtcggatacggttccctttcgacagctgcgccacataccgctgttc

SEQ ID NO: 323249 - DNA, 55 bp, Artificial
  Synthetic oligonucleotide
agctgtgatggaggaaacggtgtcctccgctctcgggttcacaataggtggggcg

SEQ ID NO: 323250 - DNA, 60 bp, Artificial
  Synthetic oligonucleotide
agctgtgcacgcatgttgagaagaaattgctaggatcatcgcggtctaataatgtcccac

SEQ ID NO: 323251 - DNA, 60 bp, Artificial
  Synthetic oligonucleotide
agctgtgcagccgaatgcgcataattgatactttcagtggaccgctgacgagcggtaaga

SEQ ID NO: 323252 - DNA, 57 bp, Artificial
  Synthetic oligonucleotide
agctgtgcagcctgtgagccccgtccaaggacgttaaaagaagaagtcaggcccaaa

SEQ ID NO: 323253 - DNA, 57 bp, Artificial
  Synthetic oligonucleotide
agctgtgccccactttcagaaacttcctgatatccgcctaaagcccggtgactttga

SEQ ID NO: 323254 - DNA, 59 bp, Artificial
  Synthetic oligonucleotide
agctgtgggtcatccatactatcctgtaaaaaagtctaatggaaaaatagcagtgccca

SEQ ID NO: 323255 - DNA, 55 bp, Artificial
  Synthetic oligonucleotide
agctgtgtacggtaccgaagggttggaggccctcgatctgacgactagcgcaggg

SEQ ID NO: 323256 - DNA, 55 bp, Artificial
  Synthetic oligonucleotide
agctgtgtcagctgtacatagcaggagatcaagtgttgtccatgtgcggaaactc

SEQ ID NO: 323257 - DNA, 60 bp, Artificial
  Synthetic oligonucleotide
agctgtgtccagtcgtacaagaaacagcggagacgcgtgatacagctatgtctcttcagg

SEQ ID NO: 323258 - DNA, 54 bp, Artificial
  Synthetic oligonucleotide
agctgtgtcgttgtcaagttgccggcatagacacctggctgtccattcccttca

SEQ ID NO: 323259 - DNA, 60 bp, Artificial
  Synthetic oligonucleotide
agctgttagacactttcctagaccctggctccatagtctaggacagtatatctattacac

SEQ ID NO: 323260 - DNA, 60 bp, Artificial
  Synthetic oligonucleotide
agctgttagcgagccatctttttcaatctctcgaactaggctaagtggtatatatggatt

SEQ ID NO: 323261 - DNA, 58 bp, Artificial
  Synthetic oligonucleotide
agctgttcaagttgatctagtagaaaaggacctgttacctgcaagcctaacaatatgg

SEQ ID NO: 323262 - DNA, 60 bp, Artificial
  Synthetic oligonucleotide
agctgttcatcaaggattacagatatacatatcggtgccacagaggggacacacaaatcc

SEQ ID NO: 323263 - DNA, 55 bp, Artificial
  Synthetic oligonucleotide
agctgttccaaaccgcccaactccgcagctgggaccagcccgagccccaaccaca

SEQ ID NO: 323264 - DNA, 60 bp, Artificial
  Synthetic oligonucleotide
agctgttccgcacaatatatatactgactacgtgggtaattctcgaccaagtttcattga

SEQ ID NO: 323265 - DNA, 50 bp, Artificial
  Synthetic oligonucleotide
agctgttgacgatgcaggtaaacctaggcaacgtgctgatgccaaatcca

SEQ ID NO: 323266 - DNA, 51 bp, Artificial
  Synthetic oligonucleotide
agctgttggcctctgctcttgctgcgccatttacgcggccactagatctac

SEQ ID NO: 323267 - DNA, 60 bp, Artificial
  Synthetic oligonucleotide
agctgttgtatccgtgaggcaccagtggccgtcccatttgagctaacaggtgtagcacca

SEQ ID NO: 323268 - DNA, 56 bp, Artificial
  Synthetic oligonucleotide
agcttaaaatggaatgtccacatactgttagattagggcagggtcttgttgtgggt

SEQ ID NO: 323269 - DNA, 56 bp, Artificial
  Synthetic oligonucleotide
agcttaaagaaacaggacaacttacaagcggcactataagttggaatagcgtacaa

SEQ ID NO: 323270 - DNA, 60 bp, Artificial
  Synthetic oligonucleotide
agcttaaagcaattgacagcagaatatgatcggacaaatccccctgatggtcctagacca

SEQ ID NO: 323271 - DNA, 56 bp, Artificial
  Synthetic oligonucleotide
agcttaaccccgtatgaggagaggcacgttcagtgactcgacgattcccgggcaaa

SEQ ID NO: 323272 - DNA, 55 bp, Artificial
  Synthetic oligonucleotide
agcttaacgtcacccacgtgtcatgctataagtaccactgtaaaacatactgggg

SEQ ID NO: 323273 - DNA, 60 bp, Artificial
  Synthetic oligonucleotide
agcttaagaccatcccttgtggaagagcacctattacagaagatgtcagcccaggttgtg

SEQ ID NO: 323274 - DNA, 59 bp, Artificial
  Synthetic oligonucleotide
agcttaaggtgttttggcgacccccttcagatgagatactactcagcagaggacacaaa

SEQ ID NO: 323275 - DNA, 60 bp, Artificial
  Synthetic oligonucleotide
agcttaagtcatattgcatcccaaagtatctaagcagattctctgaagccaacagggttc

SEQ ID NO: 323276 - DNA, 53 bp, Artificial
  Synthetic oligonucleotide
agcttaatatcagaagtaacaacttgtttctttctgtttgaaaagggtttaca

SEQ ID NO: 323277 - DNA, 55 bp, Artificial
  Synthetic oligonucleotide
agcttaatcatattgccggtcggcgtttaggcgcttgtgatcgcgtggttagggg

SEQ ID NO: 323278 - DNA, 58 bp, Artificial
  Synthetic oligonucleotide
agcttaatcttcatcttgcgtgaagatacttattccggttttattaagcacggaatca

SEQ ID NO: 323279 - DNA, 60 bp, Artificial
  Synthetic oligonucleotide
agcttaatggcgtcagttcgacaaggggcacagtagttatgagtcatgcttattggagtg

SEQ ID NO: 323280 - DNA, 52 bp, Artificial
  Synthetic oligonucleotide
agcttaattattatgtggtcctgtatataacttcgaccccaaggagtcattt

SEQ ID NO: 323281 - DNA, 60 bp, Artificial
  Synthetic oligonucleotide
agcttaattattgctgccaggaacatagtgagaagagcgacggtatcagcagatccacta

SEQ ID NO: 323282 - DNA, 53 bp, Artificial
  Synthetic oligonucleotide
agcttaattgtgtcctggtcccctctataaacttggtccccaagttcccacat

SEQ ID NO: 323283 - DNA, 56 bp, Artificial
  Synthetic oligonucleotide
agcttacacacccccaggtgcacagggaccaacaaaacgcaaagacgcaatgttag

SEQ ID NO: 323284 - DNA, 60 bp, Artificial
  Synthetic oligonucleotide
agcttacattcatatgtcgactgatatgtcgaaaacacacgctatcaatacagggagggg

SEQ ID NO: 323285 - DNA, 58 bp, Artificial
  Synthetic oligonucleotide
agcttaccaaggcgcttcactcgaaggcagctggagtacatttggaggggcggaccaa

SEQ ID NO: 323286 - DNA, 57 bp, Artificial
  Synthetic oligonucleotide
agcttacgacttgatgaggttttacataaggtaactcaacgaatgtgtcgactaaca

SEQ ID NO: 323287 - DNA, 57 bp, Artificial
  Synthetic oligonucleotide
agcttacgcgaaagatcttctcaagtacgcaacaccaatcgaggcagggaacattga

SEQ ID NO: 323288 - DNA, 54 bp, Artificial
  Synthetic oligonucleotide
agcttacggacttatattcaccaaacaagaatcgctcatgcgcttcatttgaac

SEQ ID NO: 323289 - DNA, 60 bp, Artificial
  Synthetic oligonucleotide
agcttacggctaaaatggtcagtcgtgtctttcacacgccgatgtcttacaatatgtcga

SEQ ID NO: 323290 - DNA, 54 bp, Artificial
  Synthetic oligonucleotide
agcttacggtgatgatgtcattgcgtcatacccactacctattgacgcctcact

SEQ ID NO: 323291 - DNA, 59 bp, Artificial
  Synthetic oligonucleotide
agcttactcagctcgttttgatgtttatcacatcgctatactttcgtacctcaaccgcc

SEQ ID NO: 323292 - DNA, 60 bp, Artificial
  Synthetic oligonucleotide
agcttactgaatggaccagcttttcagatggtatgcccacaggggtggactggtagaata

SEQ ID NO: 323293 - DNA, 60 bp, Artificial
  Synthetic oligonucleotide
agcttacttgctatctgatttgattggtagacctttgagtgaaatcgcaattcgctgtga

SEQ ID NO: 323294 - DNA, 60 bp, Artificial
  Synthetic oligonucleotide
agcttagaatagcagcatacccggactggttatcgctgattactgatccaacctcattga

SEQ ID NO: 323295 - DNA, 60 bp, Artificial
  Synthetic oligonucleotide
agcttagacaacgacaagtctacgccatgcgtcgctttgagttcgcactcgcgcgcatgt

SEQ ID NO: 323296 - DNA, 56 bp, Artificial
  Synthetic oligonucleotide
agcttagaccgccttattccggcgttaatggaatgtaaccacaagatggaccttca

SEQ ID NO: 323297 - DNA, 60 bp, Artificial
  Synthetic oligonucleotide
agcttagagcaaaggtgctcgccgatagtttgaatgcaggcagtactgggggcctctgcg

SEQ ID NO: 323298 - DNA, 59 bp, Artificial
  Synthetic oligonucleotide
agcttagcaacgactgccaagcttgcgtgtaccttcttacaaatgtcacgacacaccgg

SEQ ID NO: 323299 - DNA, 56 bp, Artificial
  Synthetic oligonucleotide
agcttaggaaatggctgataggtgaaggtaggaaagagcggaccgaacagctaaac

SEQ ID NO: 323300 - DNA, 60 bp, Artificial
  Synthetic oligonucleotide
agcttaggacaatatatctatgaaacttatggggatacctgggcaggagttgaagctata

SEQ ID NO: 323301 - DNA, 50 bp, Artificial
  Synthetic oligonucleotide
agcttaggcacgtccacgtaacgagtatcaatgttcttgcacagactatt

SEQ ID NO: 323302 - DNA, 60 bp, Artificial
  Synthetic oligonucleotide
agcttaggcctcccatgctacgctcgtcgatggacgtgaccatcttgtctcactgtgagc

SEQ ID NO: 323303 - DNA, 53 bp, Artificial
  Synthetic oligonucleotide
agcttagggataatgcaaaggagctgggtaatggttgtttcgaattctatcac

SEQ ID NO: 323304 - DNA, 55 bp, Artificial
  Synthetic oligonucleotide
agcttagtcccgcctaggtcagtgtctatgctcttgtcgttgggcctcaggtcag

SEQ ID NO: 323305 - DNA, 60 bp, Artificial
  Synthetic oligonucleotide
agcttagttctgatctcaagaggcagaatataactttagtacctgttattgatggtagat

SEQ ID NO: 323306 - DNA, 59 bp, Artificial
  Synthetic oligonucleotide
agcttataatcgtcctagagcaagttggtccacattaagaaatcaagctacacaaagtg

SEQ ID NO: 323307 - DNA, 59 bp, Artificial
  Synthetic oligonucleotide
agcttataatggatcctccagcaataatacattctcaaaactgttgttgcccggattgt

SEQ ID NO: 323308 - DNA, 55 bp, Artificial
  Synthetic oligonucleotide
agcttataattatgccagcatagcggatgaggacagcaatgctgctgcatggcta

SEQ ID NO: 323309 - DNA, 50 bp, Artificial
  Synthetic oligonucleotide
agcttatagcgtctgagtcaactaatttcaactaatctaggaggggcatc

SEQ ID NO: 323310 - DNA, 60 bp, Artificial
  Synthetic oligonucleotide
agcttatccgagtactctgtgtctgacctgtagagagaccaccaatgcacaccagaaatg

SEQ ID NO: 323311 - DNA, 60 bp, Artificial
  Synthetic oligonucleotide
agcttatgacatcatcatttgtgacgaatgccactccactgattccacgacgatcctcgg

SEQ ID NO: 323312 - DNA, 60 bp, Artificial
  Synthetic oligonucleotide
agcttatggaagctgacgagtacgtagctgacctggaggagaaacttaatggcgcttctc

SEQ ID NO: 323313 - DNA, 58 bp, Artificial
  Synthetic oligonucleotide
agcttatggcagaccgacccaccgaggatgggttgaggataagcaactcctaccgata

SEQ ID NO: 323314 - DNA, 60 bp, Artificial
  Synthetic oligonucleotide
agcttatggccgccttctgaggactgatttgttctccactggatggtggggtagcaggga

SEQ ID NO: 323315 - DNA, 58 bp, Artificial
  Synthetic oligonucleotide
agcttattgtctacagctcaaattttcaagcctccatcacgttctggtcatgtctgac

SEQ ID NO: 323316 - DNA, 57 bp, Artificial
  Synthetic oligonucleotide
agcttcaaagggaataataggaatgttcgtggcttcttatacgtatcaatccgagac

SEQ ID NO: 323317 - DNA, 55 bp, Artificial
  Synthetic oligonucleotide
agcttcaagatccggatacgagattctaaaggtgccaaatgcattgaccgacgaa

SEQ ID NO: 323318 - DNA, 57 bp, Artificial
  Synthetic oligonucleotide
agcttcacacgtgcggggtgtggggtaggatcgaacaatatctacgtgggatagggc

SEQ ID NO: 323319 - DNA, 55 bp, Artificial
  Synthetic oligonucleotide
agcttcacatctactagcttcaagtccttccgcccatgaatgtctaaaagcttcc

SEQ ID NO: 323320 - DNA, 54 bp, Artificial
  Synthetic oligonucleotide
agcttcagagaacgtgtttccactttttactgacggtaaatcagccgttcttac

SEQ ID NO: 323321 - DNA, 55 bp, Artificial
  Synthetic oligonucleotide
agcttcagataaaattgctcaaggagtaataattgcttatagagatatgcaacta

SEQ ID NO: 323322 - DNA, 60 bp, Artificial
  Synthetic oligonucleotide
agcttcagccaatagaccttgggagtatgatggtacgtatgcgaggatgactcagattat

SEQ ID NO: 323323 - DNA, 60 bp, Artificial
  Synthetic oligonucleotide
agcttcattcacgttgaacagatcacaaccggctcatgataacttgatgggtacgatgtg

SEQ ID NO: 323324 - DNA, 57 bp, Artificial
  Synthetic oligonucleotide
agcttccaaacggcgctggcacgatagaaaagtcgcttgcgtttgtctacacgcagc

SEQ ID NO: 323325 - DNA, 58 bp, Artificial
  Synthetic oligonucleotide
agcttccaattatgcccagtaccgggttgctcgtgctacaattcgctaccgcccgctg

SEQ ID NO: 323326 - DNA, 60 bp, Artificial
  Synthetic oligonucleotide
agcttccactcggagagttttcacctggacgtatttcgagaaccatgatgcatagtgctc

SEQ ID NO: 323327 - DNA, 60 bp, Artificial
  Synthetic oligonucleotide
agcttcccagagagaagcgagagaaaagtggctctcccttagccatccgagtggacgtgc

SEQ ID NO: 323328 - DNA, 58 bp, Artificial
  Synthetic oligonucleotide
agcttccccgataagtggagtgctggtacccttgcttacatgaccctgcgtgcggagt

SEQ ID NO: 323329 - DNA, 55 bp, Artificial
  Synthetic oligonucleotide
agcttcctgcggccttgtgttttttaacaacacacctggtgaacttctactgtcc

SEQ ID NO: 323330 - DNA, 60 bp, Artificial
  Synthetic oligonucleotide
agcttcgaaccaaagtgagacacaacaagtgtgttgtaagtcatgcctggggtccaggca

SEQ ID NO: 323331 - DNA, 51 bp, Artificial
  Synthetic oligonucleotide
agcttcgacatgttaagttggacgatcagggtcgattcttggaagacatca

SEQ ID NO: 323332 - DNA, 56 bp, Artificial
  Synthetic oligonucleotide
agcttcgacccaagtcagtatcccgacgaccaatcagtcccgacgccaataaattc

SEQ ID NO: 323333 - DNA, 57 bp, Artificial
  Synthetic oligonucleotide
agcttcggaccctaggttgtctcatactatgcttggagaggtcctaaattactacac

SEQ ID NO: 323334 - DNA, 53 bp, Artificial
  Synthetic oligonucleotide
agcttcggttttggggaagaggcaaccccctctcaaaagcaggagccgaggga

SEQ ID NO: 323335 - DNA, 52 bp, Artificial
  Synthetic oligonucleotide
agcttcgtgccaagcagtggccaagcctcacagactaggccgaccttgtacg

SEQ ID NO: 323336 - DNA, 60 bp, Artificial
  Synthetic oligonucleotide
agcttctcaaatggtgcactatcctactgttttgctcagcctagtatactgtaacatata

SEQ ID NO: 323337 - DNA, 60 bp, Artificial
  Synthetic oligonucleotide
agcttctccgtgaacactaggatcgcttacatctccgattctctacatttcatggaacca

SEQ ID NO: 323338 - DNA, 60 bp, Artificial
  Synthetic oligonucleotide
agcttctctatcaaagcagtaagtagtatatgtaatgcactctttacaaatattaggaat

SEQ ID NO: 323339 - DNA, 55 bp, Artificial
  Synthetic oligonucleotide
agcttctggagttttaggatatcttggcgcacagaaacaaaatgcgactgcgaag

SEQ ID NO: 323340 - DNA, 60 bp, Artificial
  Synthetic oligonucleotide
agcttctgtgcacctcttgtgaacttactgcaaagcttgttttggagtgtcttgattagt

SEQ ID NO: 323341 - DNA, 59 bp, Artificial
  Synthetic oligonucleotide
agcttctgtgcggagcaccacggagagtgggaaagtcattccggaatggtgttgtagaa

SEQ ID NO: 323342 - DNA, 57 bp, Artificial
  Synthetic oligonucleotide
agcttcttgtatctctgtcaagttagccaatctcaaattctgaccgttcttttccgg

SEQ ID NO: 323343 - DNA, 60 bp, Artificial
  Synthetic oligonucleotide
agcttgaacaggcccttgattgcgaaatctacggagcctgctactccatagaaccattgg

SEQ ID NO: 323344 - DNA, 55 bp, Artificial
  Synthetic oligonucleotide
agcttgaatttaggaacctgacacccgggaacactaatactcgtgtatcccgata

SEQ ID NO: 323345 - DNA, 58 bp, Artificial
  Synthetic oligonucleotide
agcttgaggacacgaccagctgctccctaccaagtaccgaccataggggtgtatggcg

SEQ ID NO: 323346 - DNA, 60 bp, Artificial
  Synthetic oligonucleotide
agcttgagtcgagctcgaaccgccttgcagggacgctctgtcagacgagagcccttaaca

SEQ ID NO: 323347 - DNA, 53 bp, Artificial
  Synthetic oligonucleotide
agcttgagttcaggaacctgacacccgggaatactaatacccgtgtatcccgg

SEQ ID NO: 323348 - DNA, 57 bp, Artificial
  Synthetic oligonucleotide
agcttgatagctagtttaattggatatatcgtttgtagatgtatcaaaaacgtaaaa

SEQ ID NO: 323349 - DNA, 60 bp, Artificial
  Synthetic oligonucleotide
agcttgatcatgctcccagtgcgtctactcacgtcccgataactgtgacagttgccccca

SEQ ID NO: 323350 - DNA, 60 bp, Artificial
  Synthetic oligonucleotide
agcttgatcggattgctggcaattgcaggcattagacttcatcgggcagccatctacacc

SEQ ID NO: 323351 - DNA, 54 bp, Artificial
  Synthetic oligonucleotide
agcttgcacaagcacttattgatcaaaaggttaaggagatttcaaatcaagagc

SEQ ID NO: 323352 - DNA, 58 bp, Artificial
  Synthetic oligonucleotide
agcttgccatcgcccaactcacggcacccggcccacttcgtttatcactcgcagggct

SEQ ID NO: 323353 - DNA, 60 bp, Artificial
  Synthetic oligonucleotide
agcttgcccagtaggatgctattcataaatgccttgcactgtggaaagcttttctaaacg

SEQ ID NO: 323354 - DNA, 53 bp, Artificial
  Synthetic oligonucleotide
agcttgctcctatggtggtacagctgttggactatatcctgttactatgcgct

SEQ ID NO: 323355 - DNA, 60 bp, Artificial
  Synthetic oligonucleotide
agcttggaagcaagtgctagcagaactccaggacattgaaaacgaggagaagatcccaaa

SEQ ID NO: 323356 - DNA, 60 bp, Artificial
  Synthetic oligonucleotide
agcttggacatcactgcaagccaaattatatctcgtcaaatcattggcagccagcgtcaa

SEQ ID NO: 323357 - DNA, 59 bp, Artificial
  Synthetic oligonucleotide
agcttggagagcttttctccacatacctaggagaatcagacagggcttcgaaagagctt

SEQ ID NO: 323358 - DNA, 55 bp, Artificial
  Synthetic oligonucleotide
agcttggagctggaattacccaaactcagcatttatatgttgtattatacacgag

SEQ ID NO: 323359 - DNA, 57 bp, Artificial
  Synthetic oligonucleotide
agcttggagttaaggctgcgagtctacaaccgttgaacaaacttagcgtagtcactg

SEQ ID NO: 323360 - DNA, 58 bp, Artificial
  Synthetic oligonucleotide
agcttggatacagacaccttcagtattactgggtgttccagactagttcctgaggtac

SEQ ID NO: 323361 - DNA, 60 bp, Artificial
  Synthetic oligonucleotide
agcttggattactgcgcctcgtgtggtcatgtcttctccttcggtagatgtcaagctgtc

SEQ ID NO: 323362 - DNA, 58 bp, Artificial
  Synthetic oligonucleotide
agcttggcatcgcgtggaattcaaattactttgccaggttagaggcgcaacttttgac

SEQ ID NO: 323363 - DNA, 60 bp, Artificial
  Synthetic oligonucleotide
agcttggcccacattttaatagatttcaggctatctgtggtcatcttgctggttattctg

SEQ ID NO: 323364 - DNA, 54 bp, Artificial
  Synthetic oligonucleotide
agcttggccggtgccataggtgttacagggtctacccacctttatttcccgaga

SEQ ID NO: 323365 - DNA, 51 bp, Artificial
  Synthetic oligonucleotide
agcttggccgtagccaccggcatgcgtggcgccgccttcgatacagttaac

SEQ ID NO: 323366 - DNA, 59 bp, Artificial
  Synthetic oligonucleotide
agcttgggtgccggccctacctcgatctctgcggtcggtgtactagctccacattcggc

SEQ ID NO: 323367 - DNA, 54 bp, Artificial
  Synthetic oligonucleotide
agcttgggtggttgcagatgtggtaagtaccccaatctaaagaaaccaacagtt

SEQ ID NO: 323368 - DNA, 58 bp, Artificial
  Synthetic oligonucleotide
agcttggtccgcggggtagcttgtggtaagtactgccagatggccctactcaagatgg

SEQ ID NO: 323369 - DNA, 60 bp, Artificial
  Synthetic oligonucleotide
agcttggtgccatgaagtacagagtaagtacctcagtaagtcaaagtgcaacttgatcaa

SEQ ID NO: 323370 - DNA, 55 bp, Artificial
  Synthetic oligonucleotide
agcttgtagagctattcttcacatacccacacgaataagacaggggttggaaggg

SEQ ID NO: 323371 - DNA, 55 bp, Artificial
  Synthetic oligonucleotide
agcttgtagagctgttctccacatacctagaagaataagacagggcgccgaaagg

SEQ ID NO: 323372 - DNA, 59 bp, Artificial
  Synthetic oligonucleotide
agcttgtattcaagcacgagtgcaaatggtacctcttccaggaggaagtaggtgagaag

SEQ ID NO: 323373 - DNA, 50 bp, Artificial
  Synthetic oligonucleotide
agcttgtcagctgccatattgctttttccgcaatacatctgcggattata

SEQ ID NO: 323374 - DNA, 50 bp, Artificial
  Synthetic oligonucleotide
agcttgtctaaatccaggatagtttcgataaatcaagtatctatggagaa

SEQ ID NO: 323375 - DNA, 60 bp, Artificial
  Synthetic oligonucleotide
agcttgtctgccattgataagatgacgttggccctcgcacaccaactgtgctacctatat

SEQ ID NO: 323376 - DNA, 60 bp, Artificial
  Synthetic oligonucleotide
agcttgtgacgatgcgttatataaagttcattcaacactgatgagttatatagaaacggg

SEQ ID NO: 323377 - DNA, 60 bp, Artificial
  Synthetic oligonucleotide
agcttgtgaggatgatcaatgatcaaggcttgagcaatcagttggcttcaattacagata

SEQ ID NO: 323378 - DNA, 50 bp, Artificial
  Synthetic oligonucleotide
agcttgtgctgtttctttgcttgatgctacagcaataacagtagcggggt

SEQ ID NO: 323379 - DNA, 55 bp, Artificial
  Synthetic oligonucleotide
agcttgtgcttgagaggttgtgcatagcgaaagagaccaataaccttgcttgctg

SEQ ID NO: 323380 - DNA, 54 bp, Artificial
  Synthetic oligonucleotide
agcttgtggcgggttattatggtgtggaagttggtatggttgaggtggtttggg

SEQ ID NO: 323381 - DNA, 60 bp, Artificial
  Synthetic oligonucleotide
agcttgtggctgtggcaattttattatgcacattaatcttctggctgggcgttatgtttt

SEQ ID NO: 323382 - DNA, 60 bp, Artificial
  Synthetic oligonucleotide
agcttgtttggaacttcgagttttacaaagtcatgactatagccagcaatgctactgctg

SEQ ID NO: 323383 - DNA, 60 bp, Artificial
  Synthetic oligonucleotide
agctttacaagcatctggcgtcgcttattcggatgatattaacagattagtagatgctgg

SEQ ID NO: 323384 - DNA, 60 bp, Artificial
  Synthetic oligonucleotide
agctttacataggcctgcactaacatctaggaaaggcactattagatatagtagagtagg

SEQ ID NO: 323385 - DNA, 58 bp, Artificial
  Synthetic oligonucleotide
agctttacgtccctcttcacattaggggcgtctcagagagtccaactcataaacacta

SEQ ID NO: 323386 - DNA, 59 bp, Artificial
  Synthetic oligonucleotide
agctttactcaacgcttcttgtgcagcaatggatgattttcagttaatcccaatgataa

SEQ ID NO: 323387 - DNA, 58 bp, Artificial
  Synthetic oligonucleotide
agctttagcagatgcctttagcgtattggcgccagactttaacttatttggtgtagta

SEQ ID NO: 323388 - DNA, 52 bp, Artificial
  Synthetic oligonucleotide
agctttagtagtcaattgctcagctgttcgacgatatagtaaaccgagttta

SEQ ID NO: 323389 - DNA, 55 bp, Artificial
  Synthetic oligonucleotide
agctttatcaccccagtggacttgctcacatttgagacggaattgcttatttgat

SEQ ID NO: 323390 - DNA, 60 bp, Artificial
  Synthetic oligonucleotide
agctttatgtcccttctattctgtgaatctaggagctttctgatgtcatcagagccttga

SEQ ID NO: 323391 - DNA, 60 bp, Artificial
  Synthetic oligonucleotide
agctttattaaacagactccgagttgccattggacactggagctgtgaatcagtaacgaa

SEQ ID NO: 323392 - DNA, 55 bp, Artificial
  Synthetic oligonucleotide
agctttcaacgtcgtacgggtgatgcctttacttattttgggaacacactagtca

SEQ ID NO: 323393 - DNA, 60 bp, Artificial
  Synthetic oligonucleotide
agctttcacagatctaagaccctattcatgtttagacactcaccaaggtcctattcagga

SEQ ID NO: 323394 - DNA, 58 bp, Artificial
  Synthetic oligonucleotide
agctttcccttgaatttcgcgaagtgggtcctctgatggacgttagtgtcgcacactc

SEQ ID NO: 323395 - DNA, 56 bp, Artificial
  Synthetic oligonucleotide
agctttccgtagatgcgaaaggcttagttaggtgctctggtgttattcctggggtg

SEQ ID NO: 323396 - DNA, 58 bp, Artificial
  Synthetic oligonucleotide
agctttcgaagaagatgggggatttgcgcaaggtagtagaatccggtcacagcttggc

SEQ ID NO: 323397 - DNA, 60 bp, Artificial
  Synthetic oligonucleotide
agctttcgtagatagacatctctagactcactgagagccaacgcagcgccactagtgcat

SEQ ID NO: 323398 - DNA, 55 bp, Artificial
  Synthetic oligonucleotide
agctttctctcctgagggaatcaacgtaggccacatcggcgcatggaaccgcaac

SEQ ID NO: 323399 - DNA, 59 bp, Artificial
  Synthetic oligonucleotide
agctttctgaaaagctcaaacgccatgttaaacctacagcatatgcttaccacgttgtg

SEQ ID NO: 323400 - DNA, 59 bp, Artificial
  Synthetic oligonucleotide
agctttctttccagaaacgagtagtgctgagcttccaagaatactagttgaccacacaa

SEQ ID NO: 323401 - DNA, 57 bp, Artificial
  Synthetic oligonucleotide
agctttgagtctttcaccatgaccattgggggtgttttccatgagttacccgctctg

SEQ ID NO: 323402 - DNA, 55 bp, Artificial
  Synthetic oligonucleotide
agctttgataatctggggaattcatcattctggatcaaccacagaacagaccaaa

SEQ ID NO: 323403 - DNA, 53 bp, Artificial
  Synthetic oligonucleotide
agctttgatggctggcccatcccccgcctaaggttgagaaaactaatctaggt

SEQ ID NO: 323404 - DNA, 60 bp, Artificial
  Synthetic oligonucleotide
agctttgctacttgaagcactcaaagcaaatcccaacctgtggcgtgattgatgtacgtg

SEQ ID NO: 323405 - DNA, 57 bp, Artificial
  Synthetic oligonucleotide
agctttgctataaaatgggtggcaagtggtcaaaaagtagaaagattggatggccta

SEQ ID NO: 323406 - DNA, 56 bp, Artificial
  Synthetic oligonucleotide
agctttgctggtacctcatacccgattgttggtattgttcgttttgagtctgcttt

SEQ ID NO: 323407 - DNA, 55 bp, Artificial
  Synthetic oligonucleotide
agctttggggagtcggaagctgaagttgtctccggcggaacgtatggtgttcggc

SEQ ID NO: 323408 - DNA, 58 bp, Artificial
  Synthetic oligonucleotide
agctttgtccggtaacggcttggtgacggacaacaacacttccatgcttcatgacaaa

SEQ ID NO: 323409 - DNA, 59 bp, Artificial
  Synthetic oligonucleotide
agctttgttagttagatcgcatggtcccgttggagcctggcattgtaccactttagatg

SEQ ID NO: 323410 - DNA, 51 bp, Artificial
  Synthetic oligonucleotide
agctttgttttcatcgacacaaccttatccagctcctcctgtgtatgggaa

SEQ ID NO: 323411 - DNA, 60 bp, Artificial
  Synthetic oligonucleotide
agcttttagctccctgaatgttcggatggaaatgtgctgacctatgtggggatatgagat

SEQ ID NO: 323412 - DNA, 60 bp, Artificial
  Synthetic oligonucleotide
agcttttatagatcttagacatttccattgtgctgaagaacaaggtgtcacagactacat

SEQ ID NO: 323413 - DNA, 50 bp, Artificial
  Synthetic oligonucleotide
agcttttggtaatcttagtgatgcctttggtttttatgagagttttcctc

SEQ ID NO: 323414 - DNA, 51 bp, Artificial
  Synthetic oligonucleotide
agctttttggcgtgtaatacaaaacattcctaggctcacctcacaggagct

SEQ ID NO: 323415 - DNA, 52 bp, Artificial
  Synthetic oligonucleotide
aggaaaaaccctagtttattacgcatttccgtggtagcttatgctttccacg

SEQ ID NO: 323416 - DNA, 52 bp, Artificial
  Synthetic oligonucleotide
aggaaaaatagtgacattaaacgacttttaactaaactgctaattgggagac

SEQ ID NO: 323417 - DNA, 55 bp, Artificial
  Synthetic oligonucleotide
aggaaaacccatggatggaagacaaaactcatgtgcccagttgggaggatgttcc

SEQ ID NO: 323418 - DNA, 51 bp, Artificial
  Synthetic oligonucleotide
aggaaaacgtatggttaaaagagggacatacagaatcaaggaaggagaact

SEQ ID NO: 323419 - DNA, 53 bp, Artificial
  Synthetic oligonucleotide
aggaaaacgtccgtcaccgttatcgagttattgggacgtcgaaattatatata

SEQ ID NO: 323420 - DNA, 59 bp, Artificial
  Synthetic oligonucleotide
aggaaaagactatggactaaccatgacacctgctgacaaatcagccacttttgaaacag

SEQ ID NO: 323421 - DNA, 56 bp, Artificial
  Synthetic oligonucleotide
aggaaaagctgacactagaatactatttattagagaggggaaaatcgtacacatta

SEQ ID NO: 323422 - DNA, 52 bp, Artificial
  Synthetic oligonucleotide
aggaaaataatcacttagtttttacctgactacaagtgggaataataattac

SEQ ID NO: 323423 - DNA, 57 bp, Artificial
  Synthetic oligonucleotide
aggaaacactcgtcatgttggcgagttcgtagttagtgaaggagctaaaattctaca

SEQ ID NO: 323424 - DNA, 60 bp, Artificial
  Synthetic oligonucleotide
aggaaacataggaagtatggtggacagagtattggcaagccacctagattcctgagtgag

SEQ ID NO: 323425 - DNA, 56 bp, Artificial
  Synthetic oligonucleotide
aggaaacatccgaaggtttcacgactgttagtacaatttctagcacccagtggtca

SEQ ID NO: 323426 - DNA, 60 bp, Artificial
  Synthetic oligonucleotide
aggaaacatgccatagatgctggttgcaacctcattgaccatatagactcaccatcatca

SEQ ID NO: 323427 - DNA, 58 bp, Artificial
  Synthetic oligonucleotide
aggaaacattctgtttaagagttgacgaaatctcaatgaacaatggacaagcaacaat

SEQ ID NO: 323428 - DNA, 60 bp, Artificial
  Synthetic oligonucleotide
aggaaaccctgtgatatgcatgggacatcatgctgtggccaatgggactatggtaaagac

SEQ ID NO: 323429 - DNA, 55 bp, Artificial
  Synthetic oligonucleotide
aggaaaccgcaggtgggaggatcagccaccggcgagggacgcgatggtaagagtg

SEQ ID NO: 323430 - DNA, 56 bp, Artificial
  Synthetic oligonucleotide
aggaaacgcttttatttcggaaggacgataccattatgcacttgacactactgaaa

SEQ ID NO: 323431 - DNA, 49 bp, Artificial
  Synthetic oligonucleotide
aggaaactagggtttccggtcccttcgaatttggggattattgccccag

SEQ ID NO: 323432 - DNA, 50 bp, Artificial
  Synthetic oligonucleotide
aggaaactgcacgcgcatttagaggtgacggggctcctcaacgcctacga

SEQ ID NO: 323433 - DNA, 56 bp, Artificial
  Synthetic oligonucleotide
aggaaacttgtacaaattacattaaccatggacttccaccgatacagaacaccaga

SEQ ID NO: 323434 - DNA, 60 bp, Artificial
  Synthetic oligonucleotide
aggaaactttgctgtgtaaagtagcccacagatctgttaggccttgcaacaacatcattc

SEQ ID NO: 323435 - DNA, 60 bp, Artificial
  Synthetic oligonucleotide
aggaaagactcttggtctgtcattctggcgaccctcctgtgagtttggcctgtgcatggt

SEQ ID NO: 323436 - DNA, 55 bp, Artificial
  Synthetic oligonucleotide
aggaaagactgtgggtgatacctgctgaggtcgtcggagacaagacgacaatcag

SEQ ID NO: 323437 - DNA, 59 bp, Artificial
  Synthetic oligonucleotide
aggaaagagatgggtcacgctttactccaaaagacctgagatcaagagttatagctatg

SEQ ID NO: 323438 - DNA, 59 bp, Artificial
  Synthetic oligonucleotide
aggaaagaggatattggtcagcagaaggatttgtcagcactaaagttatgtattgaagt

SEQ ID NO: 323439 - DNA, 58 bp, Artificial
  Synthetic oligonucleotide
aggaaagcaaaacctagtagtattaccaatggacatgtcgagaaagagcaacgtgtca

SEQ ID NO: 323440 - DNA, 52 bp, Artificial
  Synthetic oligonucleotide
aggaaagcatgcaaaaatgaggactgccagcatagcagaataggaatcttgc

SEQ ID NO: 323441 - DNA, 51 bp, Artificial
  Synthetic oligonucleotide
aggaaaggaggacacggacgacaaaccgtaagttctactgccctttattgt

SEQ ID NO: 323442 - DNA, 54 bp, Artificial
  Synthetic oligonucleotide
aggaaaggattaaaagttttcatctgcggaggtacaacaggttatgtaaccaga

SEQ ID NO: 323443 - DNA, 59 bp, Artificial
  Synthetic oligonucleotide
aggaaaggcctataaagtaatctcactaagatatactcgtaaagtgtgcatacagctgg

SEQ ID NO: 323444 - DNA, 51 bp, Artificial
  Synthetic oligonucleotide
aggaaaggtcatcttagtggcggtccacgtagcaagtgggtatgtctgggc

SEQ ID NO: 323445 - DNA, 51 bp, Artificial
  Synthetic oligonucleotide
aggaaaggttcttgggatacatgtaggggggaacggccatcaagggttttc

SEQ ID NO: 323446 - DNA, 55 bp, Artificial
  Synthetic oligonucleotide
aggaaagtcatacgcccaaatgtggagtttgatgtacttccatcgacgtgatctc

SEQ ID NO: 323447 - DNA, 56 bp, Artificial
  Synthetic oligonucleotide
aggaaagttaaagacaggtcctattacaaagatctctcagtcttatcgttcgcttc

SEQ ID NO: 323448 - DNA, 52 bp, Artificial
  Synthetic oligonucleotide
aggaaataacagtggtcagccttctactgttgtggacaactctcttatggtc

SEQ ID NO: 323449 - DNA, 56 bp, Artificial
  Synthetic oligonucleotide
aggaaatacatctgtcaacatattcgcaacaataatatgaggttgatagacggctc

SEQ ID NO: 323450 - DNA, 58 bp, Artificial
  Synthetic oligonucleotide
aggaaatagacggagtcaaattagaatcaatgggggcttatcagatactttcaatcta

SEQ ID NO: 323451 - DNA, 53 bp, Artificial
  Synthetic oligonucleotide
aggaaatctcattgagtttattgaggtgactgtgacagctgatgtggcaagag

SEQ ID NO: 323452 - DNA, 60 bp, Artificial
  Synthetic oligonucleotide
aggaaatctgtgaaacacaggagggttcggagtatctgctgcacaacaatcgttacatga

SEQ ID NO: 323453 - DNA, 60 bp, Artificial
  Synthetic oligonucleotide
aggaaatgacatccttggagacatctgtgtggtccaagcagcacgggtgacaagactggt

SEQ ID NO: 323454 - DNA, 57 bp, Artificial
  Synthetic oligonucleotide
aggaaatgcccggtcctgaatctggaacgctcgtagtcaggtggacggtttatatga

SEQ ID NO: 323455 - DNA, 58 bp, Artificial
  Synthetic oligonucleotide
aggaaatgcttttggctcaggattcaccaaccaaatctgcgaacaggttaatctatta

SEQ ID NO: 323456 - DNA, 60 bp, Artificial
  Synthetic oligonucleotide
aggaaatggatagtgccgtgtggcgccaatgggtgaaggatggctgtatgaaaccacgca

SEQ ID NO: 323457 - DNA, 55 bp, Artificial
  Synthetic oligonucleotide
aggaaatggatgttttgaactcctccacaaatgtaatgactcttgcatggagaca

SEQ ID NO: 323458 - DNA, 55 bp, Artificial
  Synthetic oligonucleotide
aggaaatgtaatgtggatgcccacattttggtcatgctataagggctcggttcgc

SEQ ID NO: 323459 - DNA, 60 bp, Artificial
  Synthetic oligonucleotide
aggaaatgtcattaattggacacgagacgcaatgactgagatatggtcgtataatgctga

SEQ ID NO: 323460 - DNA, 55 bp, Artificial
  Synthetic oligonucleotide
aggaaattactcttagaagatttgcccacttctacatctcgtgagatagatagag

SEQ ID NO: 323461 - DNA, 57 bp, Artificial
  Synthetic oligonucleotide
aggaaattcaaaccagacactaaataccccttcctcattcatccaatctattcaatg

SEQ ID NO: 323462 - DNA, 56 bp, Artificial
  Synthetic oligonucleotide
aggaaattcattggcaactggaactggagtaaaagtatgtaataatttaccattca

SEQ ID NO: 323463 - DNA, 55 bp, Artificial
  Synthetic oligonucleotide
aggaaattcccttttcagtcattagtcgtctaaccagtatgtatccgagtaaata

SEQ ID NO: 323464 - DNA, 58 bp, Artificial
  Synthetic oligonucleotide
aggaaattggatcaacgaaaacgcagaatgtcaccattaatccagggccgtttgcaca

SEQ ID NO: 323465 - DNA, 60 bp, Artificial
  Synthetic oligonucleotide
aggaaattggatcggcaaaatctcagaacgtcacaatcaatccaggaccatttgcacaaa

SEQ ID NO: 323466 - DNA, 58 bp, Artificial
  Synthetic oligonucleotide
aggaaattggtggctttagctacgttaggagtgccagaaaacactggatgtgctctaa

SEQ ID NO: 323467 - DNA, 59 bp, Artificial
  Synthetic oligonucleotide
aggaacaaacactcaaatggaaccatacatgacagaacgactttccgtggtctcatatc

SEQ ID NO: 323468 - DNA, 60 bp, Artificial
  Synthetic oligonucleotide
aggaacaaatactgaatctatatgagcaagattcaaaggacattcaggcccaaatacaat

SEQ ID NO: 323469 - DNA, 60 bp, Artificial
  Synthetic oligonucleotide
aggaacaacaagctatgggtcttcacccattacagtgatgacaagtgggtatgcgttgca

SEQ ID NO: 323470 - DNA, 60 bp, Artificial
  Synthetic oligonucleotide
aggaacaacacttatgaccatacccaatacagagcagagtcattacaaaataggatacag

SEQ ID NO: 323471 - DNA, 55 bp, Artificial
  Synthetic oligonucleotide
aggaacaactcaaggaatggttctcagtccagatctacctcaagaaacaggtctc

SEQ ID NO: 323472 - DNA, 58 bp, Artificial
  Synthetic oligonucleotide
aggaacaacttgcaagttcaacacctggggagactcaaatagatctgggaagttcaca

SEQ ID NO: 323473 - DNA, 55 bp, Artificial
  Synthetic oligonucleotide
aggaacaagaagattaaaatcagaaattgggaaggtcagggtccatgctttggag

SEQ ID NO: 323474 - DNA, 60 bp, Artificial
  Synthetic oligonucleotide
aggaacacaattatggcttctaagactgtgggcactgctgatgagaagctgcgaaagaaa

SEQ ID NO: 323475 - DNA, 58 bp, Artificial
  Synthetic oligonucleotide
aggaacacattttgaatggtctagggtgcccagctccgataactaagtggtggtgtga

SEQ ID NO: 323476 - DNA, 57 bp, Artificial
  Synthetic oligonucleotide
aggaacacccaatcctcaggctcgatagttgtgaatcccagggaagtgccgtggaat

SEQ ID NO: 323477 - DNA, 52 bp, Artificial
  Synthetic oligonucleotide
aggaacacctccccaccgggagggaatttcgcgacactgcggtcacggttgt

SEQ ID NO: 323478 - DNA, 59 bp, Artificial
  Synthetic oligonucleotide
aggaacagatgattcgttctcacggaaaaagaatcgtggatgctgggagtatgtcccaa

SEQ ID NO: 323479 - DNA, 55 bp, Artificial
  Synthetic oligonucleotide
aggaacagggagttttaaatcgcgtggtggttatgcgctgtattgtgaagattac

SEQ ID NO: 323480 - DNA, 59 bp, Artificial
  Synthetic oligonucleotide
aggaacataacagagatagtgtatttgaataatactaccatagagaaagagatttgtcc

SEQ ID NO: 323481 - DNA, 58 bp, Artificial
  Synthetic oligonucleotide
aggaacatataacaacgttgcttttacaggcggtagtcctactatagttgcaactgca

SEQ ID NO: 323482 - DNA, 58 bp, Artificial
  Synthetic oligonucleotide
aggaaccacagtggtagtgactgaagactgcggaaatagaggaccctctctaagaaca

SEQ ID NO: 323483 - DNA, 52 bp, Artificial
  Synthetic oligonucleotide
aggaaccaccagattgaaccgcgacagtttgtccgtcatcggtcggataccc

SEQ ID NO: 323484 - DNA, 51 bp, Artificial
  Synthetic oligonucleotide
aggaaccagacccttaaggtcagcttctcgaaacatgatcaatcgaattcc

SEQ ID NO: 323485 - DNA, 60 bp, Artificial
  Synthetic oligonucleotide
aggaacccatcccgggagaggatgtctactatgtagatggagcctgtaatagacagtcga

SEQ ID NO: 323486 - DNA, 53 bp, Artificial
  Synthetic oligonucleotide
aggaacccatcttgttgggctccagttgactgggttggatgtctcgaacctcc

SEQ ID NO: 323487 - DNA, 58 bp, Artificial
  Synthetic oligonucleotide
aggaacccgactggcttcagacacttctgcaatggcggaaagatacggtgaggacgtg

SEQ ID NO: 323488 - DNA, 56 bp, Artificial
  Synthetic oligonucleotide
aggaacccgagctccctaagacgctagtcaactgtgtaaggaggatcaaggaggcc

SEQ ID NO: 323489 - DNA, 55 bp, Artificial
  Synthetic oligonucleotide
aggaacccgatgatcgaagcatcatctgggtctatggtccttatggtaatgaggg

SEQ ID NO: 323490 - DNA, 59 bp, Artificial
  Synthetic oligonucleotide
aggaaccgacctggatttatactgtacaagagtcgtgacattccctatgtctcctggca

SEQ ID NO: 323491 - DNA, 56 bp, Artificial
  Synthetic oligonucleotide
aggaaccggactcaacacgtctgcgcactccagtattttggggacctccccattga

SEQ ID NO: 323492 - DNA, 56 bp, Artificial
  Synthetic oligonucleotide
aggaaccggatcttataatcggagctctttcgagagctcttctggtttggtttgga

SEQ ID NO: 323493 - DNA, 55 bp, Artificial
  Synthetic oligonucleotide
aggaaccggtaatgaagagcgacgcatgggcggtggtacgcgtccagtcggtctg

SEQ ID NO: 323494 - DNA, 58 bp, Artificial
  Synthetic oligonucleotide
aggaaccgttcaaggtccatacttgccctcaactatagcatccgaccagtacgataca

SEQ ID NO: 323495 - DNA, 58 bp, Artificial
  Synthetic oligonucleotide
aggaacctcgaagtccaagtacccattggtgatcaggatttacatgaggatgaaacac

SEQ ID NO: 323496 - DNA, 58 bp, Artificial
  Synthetic oligonucleotide
aggaacctgaaacacctcattgttcaaagctatctctttgatcttacgaaatgtaaga

SEQ ID NO: 323497 - DNA, 51 bp, Artificial
  Synthetic oligonucleotide
aggaacctgggaacgagaagaagagctcacaaacttctgtcatcaagagtg

SEQ ID NO: 323498 - DNA, 52 bp, Artificial
  Synthetic oligonucleotide
aggaaccttaaccgatgcctaccctaccctacatgttgacctatgtgaccta

SEQ ID NO: 323499 - DNA, 55 bp, Artificial
  Synthetic oligonucleotide
aggaaccttggttggactcaggtgattgctagtcaatatgtgaccaaccccaggt

SEQ ID NO: 323500 - DNA, 57 bp, Artificial
  Synthetic oligonucleotide
aggaacgaccgaagagctgttgcgaatctgttcaacgcaaccctaggagaaggcacc

SEQ ID NO: 323501 - DNA, 60 bp, Artificial
  Synthetic oligonucleotide
aggaacgatcaagcctcagatatgggaatgtccttgatgtaaatgccattgatatagagg

SEQ ID NO: 323502 - DNA, 60 bp, Artificial
  Synthetic oligonucleotide
aggaacgatggcatatgacattagtacagggagatcagctgacccagtgtatgggaccca

SEQ ID NO: 323503 - DNA, 56 bp, Artificial
  Synthetic oligonucleotide
aggaacgattcgaagcttcctcagaaaggttaaccaacagtgagcaagtcggtcaa

SEQ ID NO: 323504 - DNA, 58 bp, Artificial
  Synthetic oligonucleotide
aggaacggttctacatacgtcatgtgctgaagcgtgtggtatcagttgagaaggacac

SEQ ID NO: 323505 - DNA, 57 bp, Artificial
  Synthetic oligonucleotide
aggaacgtctagtgtgggcctgcaggggtatagaaattggcagagggcagcccctag

SEQ ID NO: 323506 - DNA, 57 bp, Artificial
  Synthetic oligonucleotide
aggaacgttagtatgtacactgtacagctaactagtcaagtgaatttggcccaagaa

SEQ ID NO: 323507 - DNA, 56 bp, Artificial
  Synthetic oligonucleotide
aggaacgttgttaaacgaggataatggataaggaggagtccatggcataggaggag

SEQ ID NO: 323508 - DNA, 52 bp, Artificial
  Synthetic oligonucleotide
aggaactacgcaatcgttacatagataaaatgagcgagcccttcgatgtcgg

SEQ ID NO: 323509 - DNA, 54 bp, Artificial
  Synthetic oligonucleotide
aggaactactagtacccttcaggaacaaatagcctggatgacaagtaacccacc

SEQ ID NO: 323510 - DNA, 55 bp, Artificial
  Synthetic oligonucleotide
aggaactagtggaagctgcagaacagaacatggactgtttagtgccgcaaggtgc

SEQ ID NO: 323511 - DNA, 60 bp, Artificial
  Synthetic oligonucleotide
aggaactatgaagacaccaccacagtcttagcaacactagctcttcttggttgtgattgc

SEQ ID NO: 323512 - DNA, 59 bp, Artificial
  Synthetic oligonucleotide
aggaactccaggactgtaagattgctcctttaatggtggcatacatgttggaaagagaa

SEQ ID NO: 323513 - DNA, 59 bp, Artificial
  Synthetic oligonucleotide
aggaactcgaggcaccattcgcactcgttctggtgcacaaataggttctcaggtacact

SEQ ID NO: 323514 - DNA, 53 bp, Artificial
  Synthetic oligonucleotide
aggaactgctcttacaatatgaccacagagctaagggataagaaacggaaggt

SEQ ID NO: 323515 - DNA, 55 bp, Artificial
  Synthetic oligonucleotide
aggaacttatgcaccgcactgaggcaatttgtgcagctatgatagaagcatgggg

SEQ ID NO: 323516 - DNA, 55 bp, Artificial
  Synthetic oligonucleotide
aggaacttctgaggggtttccttatcgcctagatcgtggtcctggtgagaaagga

SEQ ID NO: 323517 - DNA, 56 bp, Artificial
  Synthetic oligonucleotide
aggaacttggttcctatactccagtattacgtgatctattcttagacaacgacctc

SEQ ID NO: 323518 - DNA, 57 bp, Artificial
  Synthetic oligonucleotide
aggaagaaacacgtcaacaggcctttaaggatgccagagatcgtgctctgatgacga

SEQ ID NO: 323519 - DNA, 55 bp, Artificial
  Synthetic oligonucleotide
aggaagaactaaaagtactagctcaaggagtgggtttgagatgatctgggaccct

SEQ ID NO: 323520 - DNA, 60 bp, Artificial
  Synthetic oligonucleotide
aggaagaatatatgtacttatgtctttaggccattaggtgagctatttgggctgcctctc

SEQ ID NO: 323521 - DNA, 55 bp, Artificial
  Synthetic oligonucleotide
aggaagaatcgctataaatatcggttcagaacagtaacctgttagttgaccttag

SEQ ID NO: 323522 - DNA, 56 bp, Artificial
  Synthetic oligonucleotide
aggaagaatctattccaaaaattccagatggtcttctgatccccaccagtggaacc

SEQ ID NO: 323523 - DNA, 60 bp, Artificial
  Synthetic oligonucleotide
aggaagaattatcagcacttgtggagatggggcacgatgctccttgggatattaatgatc

SEQ ID NO: 323524 - DNA, 53 bp, Artificial
  Synthetic oligonucleotide
aggaagacaaaaagttgtttccctaactgagacaacaaatcaaaagactgaat

SEQ ID NO: 323525 - DNA, 52 bp, Artificial
  Synthetic oligonucleotide
aggaagacaccagggttggagatcaatttgaattcggaaccttaccctttaa

SEQ ID NO: 323526 - DNA, 58 bp, Artificial
  Synthetic oligonucleotide
aggaagacctttgattctgagtatgtcaagactagaaccaatgattgggacttcgtgg

SEQ ID NO: 323527 - DNA, 55 bp, Artificial
  Synthetic oligonucleotide
aggaagactgctgacgctacgggactttccagcaaagactgctgacactgcgggg

SEQ ID NO: 323528 - DNA, 57 bp, Artificial
  Synthetic oligonucleotide
aggaagaggatactccgactaacatcctggtagaccaaccagataacctgaatagat

SEQ ID NO: 323529 - DNA, 55 bp, Artificial
  Synthetic oligonucleotide
aggaagagggtaggcaacaggccgccaaccctagttacatcgcagatgtgctagg

SEQ ID NO: 323530 - DNA, 57 bp, Artificial
  Synthetic oligonucleotide
aggaagaggtcgaatggaggcgattggtctaagcgctccgctaagaagaagccggcg

SEQ ID NO: 323531 - DNA, 60 bp, Artificial
  Synthetic oligonucleotide
aggaagagtcacagtctccaccaggagaagccaacagactataattccgaacattggatc

SEQ ID NO: 323532 - DNA, 56 bp, Artificial
  Synthetic oligonucleotide
aggaagagttcagaggacaagggggatgagatggtaaagaggcgagaaacgccgag

SEQ ID NO: 323533 - DNA, 59 bp, Artificial
  Synthetic oligonucleotide
aggaagatcaggcgtgtgtggtcatgaacaaataattaactctagaacctgtgaaagag

SEQ ID NO: 323534 - DNA, 55 bp, Artificial
  Synthetic oligonucleotide
aggaagcacgacctgagtgccgaggaggtcgagtggtacatgcgtagggctttgg

SEQ ID NO: 323535 - DNA, 58 bp, Artificial
  Synthetic oligonucleotide
aggaagcacgtactctgggaggaagcatctactacaaaccacgaggtctctggtggga

SEQ ID NO: 323536 - DNA, 55 bp, Artificial
  Synthetic oligonucleotide
aggaagcattacctgtaattcaaatattacaggtatacttttaacaagagatggg

SEQ ID NO: 323537 - DNA, 55 bp, Artificial
  Synthetic oligonucleotide
aggaagccttttacacgccacttgcagatcagtttcgtgaactgttagtaggggt

SEQ ID NO: 323538 - DNA, 53 bp, Artificial
  Synthetic oligonucleotide
aggaagcggaaccctgtgacgttgttctctgtgacataggtgaatgtagtagt

SEQ ID NO: 323539 - DNA, 53 bp, Artificial
  Synthetic oligonucleotide
aggaaggacgttccattactggtagattgttttccgtggttaaccttcgcaca

SEQ ID NO: 323540 - DNA, 60 bp, Artificial
  Synthetic oligonucleotide
aggaaggataggaactacgtatcatggtgcattaccacatgatgtgatggctcctcagtt

SEQ ID NO: 323541 - DNA, 58 bp, Artificial
  Synthetic oligonucleotide
aggaaggatggcgatctcaagacctttattaaggcagagaaattcaacgtaaatctga

SEQ ID NO: 323542 - DNA, 55 bp, Artificial
  Synthetic oligonucleotide
aggaaggcctcttttccttttcagcaacgtccgtgcctgaattaggtgaagtaga

SEQ ID NO: 323543 - DNA, 54 bp, Artificial
  Synthetic oligonucleotide
aggaaggctagtctatgccttgggttaatggtcttcgttgtgaaacggattacc

SEQ ID NO: 323544 - DNA, 57 bp, Artificial
  Synthetic oligonucleotide
aggaagggcacagcacgtcgggacattaccaagatcctgcactatgcactgctgctg

SEQ ID NO: 323545 - DNA, 59 bp, Artificial
  Synthetic oligonucleotide
aggaagggctgacactagaatactattcatcagagaggggaaaattgtccatattagcc

SEQ ID NO: 323546 - DNA, 58 bp, Artificial
  Synthetic oligonucleotide
aggaagggctgatactagaatattattcgttgaagaggggaaaattgtacatatcagc

SEQ ID NO: 323547 - DNA, 53 bp, Artificial
  Synthetic oligonucleotide
aggaagggtgaggtttgcgccagcgactttggttggtcgcgtcccgactcgga

SEQ ID NO: 323548 - DNA, 60 bp, Artificial
  Synthetic oligonucleotide
aggaaggtaatcttatcagagatatctttccatctagtagaggactttgatccatcctgt

SEQ ID NO: 323549 - DNA, 58 bp, Artificial
  Synthetic oligonucleotide
aggaagtaaacttgacgtcgacttcgacaatatcagattgaggcagagtgaagtgttt

SEQ ID NO: 323550 - DNA, 54 bp, Artificial
  Synthetic oligonucleotide
aggaagtactcgtcgggtcgtccgtcgtccgtgacgtttgtcagcgcgcgatta

SEQ ID NO: 323551 - DNA, 55 bp, Artificial
  Synthetic oligonucleotide
aggaagtagaccacctagtaagtcaaggaatcagacaggtcttgttcctagaaaa

SEQ ID NO: 323552 - DNA, 54 bp, Artificial
  Synthetic oligonucleotide
aggaagtatgtttcgtacgcttaaggaagtgtcaaatgtcgaaactcttgttgg

SEQ ID NO: 323553 - DNA, 55 bp, Artificial
  Synthetic oligonucleotide
aggaagtattgtcgcctgctcaaaattcacatgcaatcatgacatgcacctcatg

SEQ ID NO: 323554 - DNA, 59 bp, Artificial
  Synthetic oligonucleotide
aggaagtcgtaggagatgtaattgaacctgttgagtggtttaagtgccatgtgcctgtg

SEQ ID NO: 323555 - DNA, 55 bp, Artificial
  Synthetic oligonucleotide
aggaagtgctcagcatatagaggaatgttcctgttatcctcgatatcctgacgtc

SEQ ID NO: 323556 - DNA, 58 bp, Artificial
  Synthetic oligonucleotide
aggaagtgtgaacaactccaaaatgtccgacaatatcccatcgttccgctgggtgcaa

SEQ ID NO: 323557 - DNA, 59 bp, Artificial
  Synthetic oligonucleotide
aggaagtgtgttggcatgactgtcccttacgtggcaaccactgtcaactgctaccaggt

SEQ ID NO: 323558 - DNA, 51 bp, Artificial
  Synthetic oligonucleotide
aggaagtgtttgctaggtcaaggttcgatacgcaccatggggtggtagagc

SEQ ID NO: 323559 - DNA, 56 bp, Artificial
  Synthetic oligonucleotide
aggaagttcgccaatttgatctgtgaacgcgtggtttacgataatcgcgtgggtta

SEQ ID NO: 323560 - DNA, 58 bp, Artificial
  Synthetic oligonucleotide
aggaataaccagtactttaaagcgcagacgaattacatctactgctacaactacgtca

SEQ ID NO: 323561 - DNA, 55 bp, Artificial
  Synthetic oligonucleotide
aggaataagcgctcatcaaaagccctcatcaacccaagcctgttgtgcgacaatc

SEQ ID NO: 323562 - DNA, 56 bp, Artificial
  Synthetic oligonucleotide
aggaatacaacgttattcgatcgcgtttcctgacgcacgaggtttttgatctgacg

SEQ ID NO: 323563 - DNA, 57 bp, Artificial
  Synthetic oligonucleotide
aggaatacgaaaaacatgataacaaataccatgtgaatataccaagtgcgttgaaaa

SEQ ID NO: 323564 - DNA, 53 bp, Artificial
  Synthetic oligonucleotide
aggaatactctgacaacgtctgttccacactgtccgttagtcgcgaggtaacg

SEQ ID NO: 323565 - DNA, 54 bp, Artificial
  Synthetic oligonucleotide
aggaatagaggattgtctgtgtcagaagttgctagtacttttgacaggccaatg

SEQ ID NO: 323566 - DNA, 60 bp, Artificial
  Synthetic oligonucleotide
aggaataggcacgctgttgaagttgattctgaagggaggacaagcgtcactctcagagtg

SEQ ID NO: 323567 - DNA, 52 bp, Artificial
  Synthetic oligonucleotide
aggaatatggcaactagattgtacacatggtagcagttcatgtagccagtgg

SEQ ID NO: 323568 - DNA, 57 bp, Artificial
  Synthetic oligonucleotide
aggaatattgcgaacacatctaatccgattaaacgtaaccaagatgacaattggtta

SEQ ID NO: 323569 - DNA, 55 bp, Artificial
  Synthetic oligonucleotide
aggaatcaacgcgacttatatgcctgcctacgttggcgctaacactgccaagctg

SEQ ID NO: 323570 - DNA, 57 bp, Artificial
  Synthetic oligonucleotide
aggaatcacacaacgtgctgcggcagttagcgtcgagtgtgttgatatgagggccag

SEQ ID NO: 323571 - DNA, 55 bp, Artificial
  Synthetic oligonucleotide
aggaatcattcaggcacaaccagacaggagtgaatcagggctagtcaatcagata

SEQ ID NO: 323572 - DNA, 54 bp, Artificial
  Synthetic oligonucleotide
aggaatcccatcccggtatttttgaaaactcatgtattgaaacgatggaggttg

SEQ ID NO: 323573 - DNA, 50 bp, Artificial
  Synthetic oligonucleotide
aggaatccggaatacgattctttccacagagtacgcacattcccacaccc

SEQ ID NO: 323574 - DNA, 60 bp, Artificial
  Synthetic oligonucleotide
aggaatcgagcaggtgtgcagtcacggctagtgcagtacgggtagaattcttggtttaga

SEQ ID NO: 323575 - DNA, 57 bp, Artificial
  Synthetic oligonucleotide
aggaatcgtactcctctctcagagtaccataccagagagcatacttgaactgactga

SEQ ID NO: 323576 - DNA, 55 bp, Artificial
  Synthetic oligonucleotide
aggaatcgtccaaaggacgaggatcaagcacacccgatgctagacatactgccac

SEQ ID NO: 323577 - DNA, 54 bp, Artificial
  Synthetic oligonucleotide
aggaatctccgacgaccaaacgccgtcacctccaagggtacctgcaattgaagg

SEQ ID NO: 323578 - DNA, 60 bp, Artificial
  Synthetic oligonucleotide
aggaatctcgccggtgtgttgcacgcgtgtgatctgcacagtggcacagaagactaccca

SEQ ID NO: 323579 - DNA, 55 bp, Artificial
  Synthetic oligonucleotide
aggaatctgcgccgatgattcggaggcgtgctaacgccaagttcagaggttgcgt

SEQ ID NO: 323580 - DNA, 60 bp, Artificial
  Synthetic oligonucleotide
aggaatgaactcattagacgagcttcatgctacacatgaggaatgctgtcagtgcggtga

SEQ ID NO: 323581 - DNA, 60 bp, Artificial
  Synthetic oligonucleotide
aggaatgacgttaactatatacttaatatggacagaaatctgccatcaacagctagatat

SEQ ID NO: 323582 - DNA, 60 bp, Artificial
  Synthetic oligonucleotide
aggaatgcgatatgtatcacgagaaatctggtttgacacactggggcgactttactaata

SEQ ID NO: 323583 - DNA, 51 bp, Artificial
  Synthetic oligonucleotide
aggaatgctggtgtcagtgctccattcgggtggacgggttacggcggcacg

SEQ ID NO: 323584 - DNA, 60 bp, Artificial
  Synthetic oligonucleotide
aggaatggcagagtatatgtgaactcgccaaacccgccacagctgtcactcatacacttg

SEQ ID NO: 323585 - DNA, 57 bp, Artificial
  Synthetic oligonucleotide
aggaatggcctgttgtggtgttctgttatcttgaaatagaggggattttgaatctcc

SEQ ID NO: 323586 - DNA, 55 bp, Artificial
  Synthetic oligonucleotide
aggaatggtagacggttggtatgggtaccaccatagcaacgaacaggggagtgga

SEQ ID NO: 323587 - DNA, 60 bp, Artificial
  Synthetic oligonucleotide
aggaatggtgactttacaaacaagtgtagacaatgcacttgtgggcagtatgaagatgca

SEQ ID NO: 323588 - DNA, 60 bp, Artificial
  Synthetic oligonucleotide
aggaatggttgtgttatcgagagatcgggtgtcacctgtcgactatatcgaagtttatga

SEQ ID NO: 323589 - DNA, 60 bp, Artificial
  Synthetic oligonucleotide
aggaatgttcctgttacccagacactggcacagtgatgtgtgtatgcagagacaactggc

SEQ ID NO: 323590 - DNA, 54 bp, Artificial
  Synthetic oligonucleotide
aggaatgttcctgttacccccggtatccagaagtaaggtgtgtttgtagagaca

SEQ ID NO: 323591 - DNA, 55 bp, Artificial
  Synthetic oligonucleotide
aggaattaaaccgtattatccaagacaggtagttaatcattacttccagaccaga

SEQ ID NO: 323592 - DNA, 57 bp, Artificial
  Synthetic oligonucleotide
aggaattaaagcagcattgttaatcttaaaagctgagaatgttatttttggctcgaa

SEQ ID NO: 323593 - DNA, 54 bp, Artificial
  Synthetic oligonucleotide
aggaattaagccagcacgaacgttatgtggaacaattaaaacaggctttaaaga

SEQ ID NO: 323594 - DNA, 60 bp, Artificial
  Synthetic oligonucleotide
aggaattatttcacagcggaagtatcccactgcagggctactgaatacataatgaaggga

SEQ ID NO: 323595 - DNA, 54 bp, Artificial
  Synthetic oligonucleotide
aggaattccccgattctagacttgggaggaaattatgtatcgcactttaaacga

SEQ ID NO: 323596 - DNA, 56 bp, Artificial
  Synthetic oligonucleotide
aggaattcggccacaaacacacaatctactgttggtcggctctgtggttacggaaa

SEQ ID NO: 323597 - DNA, 60 bp, Artificial
  Synthetic oligonucleotide
aggaattcgtttgctcaatttgggagttgcgatattccaaagcatgtagccgagtccatc

SEQ ID NO: 323598 - DNA, 59 bp, Artificial
  Synthetic oligonucleotide
aggaattctccacaagcctatgattggatcgtaagaggtctgatctttcccactactgg

SEQ ID NO: 323599 - DNA, 51 bp, Artificial
  Synthetic oligonucleotide
aggaattctttgaaaacaagtcggaaacgtggccaattggggaatccccca

SEQ ID NO: 323600 - DNA, 59 bp, Artificial
  Synthetic oligonucleotide
aggaattgggagactgtgaaaattcagtggtcacaggatcccacgatgttatataataa

SEQ ID NO: 323601 - DNA, 60 bp, Artificial
  Synthetic oligonucleotide
aggaattggggatcgtgaatcttatagtatgttttgttatatgatccatggatacgcaag

SEQ ID NO: 323602 - DNA, 57 bp, Artificial
  Synthetic oligonucleotide
aggaattgtgatagcctaatgatcgataggagacatgaactttcacatgttgaacta

SEQ ID NO: 323603 - DNA, 55 bp, Artificial
  Synthetic oligonucleotide
aggaatttcaaatgtcgggttgaatgtatctctacacctgaaagaaactgggacc

SEQ ID NO: 323604 - DNA, 60 bp, Artificial
  Synthetic oligonucleotide
aggaatttcaagccctcaggcaacatgcaaaggatgctgggtgtacactggttgagcata

SEQ ID NO: 323605 - DNA, 60 bp, Artificial
  Synthetic oligonucleotide
aggacaaatcagcgtacagcccacattctctgtacagagaaatcttccattcgagagagc

SEQ ID NO: 323606 - DNA, 57 bp, Artificial
  Synthetic oligonucleotide
aggacaacaccacgtcctctcagattgccggatggacctccctgttcccaaaggtca

SEQ ID NO: 323607 - DNA, 56 bp, Artificial
  Synthetic oligonucleotide
aggacaacactcattaccaaggtgctggttaataaagaacaacagttacttgaaca

SEQ ID NO: 323608 - DNA, 55 bp, Artificial
  Synthetic oligonucleotide
aggacaactcaggaccgataccacaaaatcaaagaccatcatccccggatgctcc

SEQ ID NO: 323609 - DNA, 51 bp, Artificial
  Synthetic oligonucleotide
aggacaagcaatgtatgctcctcccatcgatgaagcaattaattgtgtatc

SEQ ID NO: 323610 - DNA, 59 bp, Artificial
  Synthetic oligonucleotide
aggacaagcagcagacctcaaaagcactcaggcagcaattaaccaaatcaacgggaaac

SEQ ID NO: 323611 - DNA, 60 bp, Artificial
  Synthetic oligonucleotide
aggacaagcagcagaccttaaaagcactcaggcagccattgaccaaatcaataggaaatt

SEQ ID NO: 323612 - DNA, 58 bp, Artificial
  Synthetic oligonucleotide
aggacaagcatttggacctctagtagctccacagtattttgtggtgtttcaagtgagg

SEQ ID NO: 323613 - DNA, 52 bp, Artificial
  Synthetic oligonucleotide
aggacaaggtcaacaaccaactagtgaccaaaggaataaccgtcctgaacct

SEQ ID NO: 323614 - DNA, 55 bp, Artificial
  Synthetic oligonucleotide
aggacaataagcggtgggaaacagatgaatcctggtcctctcagtggagtaagag

SEQ ID NO: 323615 - DNA, 60 bp, Artificial
  Synthetic oligonucleotide
aggacaatacttgaaagggatatcatctacgatgttgtagattgcgtcttcgttgtatga

SEQ ID NO: 323616 - DNA, 57 bp, Artificial
  Synthetic oligonucleotide
aggacaatccatacaaaacatgggcctatcatggatcatatgaggttaagccatcag

SEQ ID NO: 323617 - DNA, 58 bp, Artificial
  Synthetic oligonucleotide
aggacaattcaatcagactttctgctggtggggacatttgggtaacgagagagcctta

SEQ ID NO: 323618 - DNA, 56 bp, Artificial
  Synthetic oligonucleotide
aggacaattcaattcggctttctgctggtgggggcatttgggtgacgagagaacct

SEQ ID NO: 323619 - DNA, 60 bp, Artificial
  Synthetic oligonucleotide
aggacacaatcaatgggaatccagctggaccaacgcattattgtgctttttatggtggac

SEQ ID NO: 323620 - DNA, 50 bp, Artificial
  Synthetic oligonucleotide
aggacacacagcgagagacgagagcggcgactggtgagtacgccataaat

SEQ ID NO: 323621 - DNA, 55 bp, Artificial
  Synthetic oligonucleotide
aggacacagacagtgaatatccttggtggagtggcgaaagagttaaattcacccc

SEQ ID NO: 323622 - DNA, 60 bp, Artificial
  Synthetic oligonucleotide
aggacacagtcaaagctcaacaatttgctagttctagtgaagttgtgcttgcaacaccgc

SEQ ID NO: 323623 - DNA, 59 bp, Artificial
  Synthetic oligonucleotide
aggacacatagttagccctaggtgaagaccaagggccacagagggagccacacaatgaa

SEQ ID NO: 323624 - DNA, 60 bp, Artificial
  Synthetic oligonucleotide
aggacacatccagtgcatgcagggcctattgcaccaggccaaatgagagaaccaagggga

SEQ ID NO: 323625 - DNA, 52 bp, Artificial
  Synthetic oligonucleotide
aggacaccagggggagtcctctcaaaaacctatttttcgtggtgtcctggtg

SEQ ID NO: 323626 - DNA, 58 bp, Artificial
  Synthetic oligonucleotide
aggacacccgcgtgcgcgggccgtgggagttcggcgagtgcaggaccgcaggcaggaa

SEQ ID NO: 323627 - DNA, 55 bp, Artificial
  Synthetic oligonucleotide
aggacaccttgcgagggttccagtccacgatccgatccctcgaaaagcgcgggct

SEQ ID NO: 323628 - DNA, 52 bp, Artificial
  Synthetic oligonucleotide
aggacacgatggacgtaattgacgcagcgcacaagacagtacataaccctaa

SEQ ID NO: 323629 - DNA, 53 bp, Artificial
  Synthetic oligonucleotide
aggacactaccaatggttagttatgcccttcggccttaaacaagccccggcaa

SEQ ID NO: 323630 - DNA, 55 bp, Artificial
  Synthetic oligonucleotide
aggacactaccacggttctggcgacattggctctcctcggctgtgactgctcccc

SEQ ID NO: 323631 - DNA, 60 bp, Artificial
  Synthetic oligonucleotide
aggacactgaacgtcacacggttgacgatgtcaagcatggtactcattcattctacggag

SEQ ID NO: 323632 - DNA, 60 bp, Artificial
  Synthetic oligonucleotide
aggacactgctcgctgataaatgtagaggatctagtgttatctgctctagagttgcatga

SEQ ID NO: 323633 - DNA, 60 bp, Artificial
  Synthetic oligonucleotide
aggacagaatttaaacgggatatcatctacgatgttgtagattgcgtcctcgttatatga

SEQ ID NO: 323634 - DNA, 59 bp, Artificial
  Synthetic oligonucleotide
aggacagagactgcagagatccacggcgacaactatggtggcccgggtgacaaaataac

SEQ ID NO: 323635 - DNA, 59 bp, Artificial
  Synthetic oligonucleotide
aggacagattagagaccaagcagagcagctaaagacagctgtccaaatggcagtcttca

SEQ ID NO: 323636 - DNA, 58 bp, Artificial
  Synthetic oligonucleotide
aggacagcaatagtgtgcgagtgagatagcactatagcaactgttagagcgagatagc

SEQ ID NO: 323637 - DNA, 55 bp, Artificial
  Synthetic oligonucleotide
aggacagcttttgtcactccaccatctagtacagcctctagttcaggcacggtct

SEQ ID NO: 323638 - DNA, 58 bp, Artificial
  Synthetic oligonucleotide
aggacaggaacatttgaattcacgagctttttctatcgctatggattcgtagccaact

SEQ ID NO: 323639 - DNA, 59 bp, Artificial
  Synthetic oligonucleotide
aggacagggacagatcagagcttagtccgctgctactgtctacaacagagtggcaggta

SEQ ID NO: 323640 - DNA, 55 bp, Artificial
  Synthetic oligonucleotide
aggacagggaggcaatccaccaggagatttcggacaactcacctccagaggaccc

SEQ ID NO: 323641 - DNA, 56 bp, Artificial
  Synthetic oligonucleotide
aggacagggcctatgcatgggagcagtacctaaaactcaccaggccttatgtaaca

SEQ ID NO: 323642 - DNA, 54 bp, Artificial
  Synthetic oligonucleotide
aggacaggtaagagatcaggctgaacatcttaggacagcagtacaaatggcagt

SEQ ID NO: 323643 - DNA, 49 bp, Artificial
  Synthetic oligonucleotide
aggacaggtttgggggtaaagtaccgggagtggtatgagaagggttggg

SEQ ID NO: 323644 - DNA, 58 bp, Artificial
  Synthetic oligonucleotide
aggacagtctatgcgacgccgtctagtcgccctatgacgctttgcgtccctatgttga

SEQ ID NO: 323645 - DNA, 50 bp, Artificial
  Synthetic oligonucleotide
aggacagtctgatggtagacgtggaaggatcaactgccctgtctaatagg

SEQ ID NO: 323646 - DNA, 59 bp, Artificial
  Synthetic oligonucleotide
aggacagtctgccaacactaacgtttccaatgctgtagaatttatgcctagctctaaaa

SEQ ID NO: 323647 - DNA, 60 bp, Artificial
  Synthetic oligonucleotide
aggacagttcgcctgatcaagtttctctatcaaagcagtaagtagtacatgtgatgcaac

SEQ ID NO: 323648 - DNA, 60 bp, Artificial
  Synthetic oligonucleotide
aggacataactagattaaaggatgattcaatattgtatattgatatcaggactgatcgtg

SEQ ID NO: 323649 - DNA, 60 bp, Artificial
  Synthetic oligonucleotide
aggacataaggcttaagtccatatccgtacgcgtcttgactagtgacagtgcacacgtag

SEQ ID NO: 323650 - DNA, 57 bp, Artificial
  Synthetic oligonucleotide
aggacatatagttacccctaggtgtaattaccaagcaggacataacaatgtaggatc

SEQ ID NO: 323651 - DNA, 55 bp, Artificial
  Synthetic oligonucleotide
aggacatatatatcaaccttctttaactctcactcagtccttcccctccaccgtc

SEQ ID NO: 323652 - DNA, 57 bp, Artificial
  Synthetic oligonucleotide
aggacatatattcgtaattgagattactgatagtaatccgggtctaggtcgtaaata

SEQ ID NO: 323653 - DNA, 59 bp, Artificial
  Synthetic oligonucleotide
aggacatcaagatcaggatttgaaatactgaaagtcaggaatggttggacacaaaatag

SEQ ID NO: 323654 - DNA, 60 bp, Artificial
  Synthetic oligonucleotide
aggacatccagatcttgagatcaattcctgtcattttagagacgggcaactgttagaacg

SEQ ID NO: 323655 - DNA, 55 bp, Artificial
  Synthetic oligonucleotide
aggacatcccttattccgcttacctcttaagtatccatcgaaaacgataccaaca

SEQ ID NO: 323656 - DNA, 60 bp, Artificial
  Synthetic oligonucleotide
aggacatgcgtgaaaccgcagtatctgcggtgtccgcaatcacgctcctttttgagtcat

SEQ ID NO: 323657 - DNA, 57 bp, Artificial
  Synthetic oligonucleotide
aggacattacattagccctaggtgtaactaccaagcaggacataataaggtaggatc

SEQ ID NO: 323658 - DNA, 53 bp, Artificial
  Synthetic oligonucleotide
aggacattgcaaacgctgtagttggatatggagtttggcctacttatttagat

SEQ ID NO: 323659 - DNA, 60 bp, Artificial
  Synthetic oligonucleotide
aggacattgcagttcaattgaacgtgcttatccattggtaaaagatgtattgtggcattc

SEQ ID NO: 323660 - DNA, 60 bp, Artificial
  Synthetic oligonucleotide
aggacatttcaccatgcttggtgtcagagacagacttgcagtgcttccaaggcatgcaaa

SEQ ID NO: 323661 - DNA, 60 bp, Artificial
  Synthetic oligonucleotide
aggacatttgtctattgagggcatcaaagaggcagatataaccccagcacatggtccagt

SEQ ID NO: 323662 - DNA, 52 bp, Artificial
  Synthetic oligonucleotide
aggaccaaaggaaccctttagagactatgtggaccggttctataaaactcta

SEQ ID NO: 323663 - DNA, 60 bp, Artificial
  Synthetic oligonucleotide
aggaccaacgtagatggctgagcatcgtctacggaggcaaggctccaagaggatggggtg

SEQ ID NO: 323664 - DNA, 56 bp, Artificial
  Synthetic oligonucleotide
aggaccaagagaaaatgtagcggttatacaggtaggtggtgcaaacattttagaca

SEQ ID NO: 323665 - DNA, 59 bp, Artificial
  Synthetic oligonucleotide
aggaccaatgtaactgcctatctggtcagatttaaaggaacacccatccatcttcagcc

SEQ ID NO: 323666 - DNA, 52 bp, Artificial
  Synthetic oligonucleotide
aggaccaccggctttttcaggccctaccaagagtggaacaggaagccccttc

SEQ ID NO: 323667 - DNA, 60 bp, Artificial
  Synthetic oligonucleotide
aggaccacctcaatgtgatcaattcctcgagttcacagccgatttgataatcgagaggcg

SEQ ID NO: 323668 - DNA, 53 bp, Artificial
  Synthetic oligonucleotide
aggaccagaggaagaatttggacgctccctgattaaacacaatacatgtgtgg

SEQ ID NO: 323669 - DNA, 59 bp, Artificial
  Synthetic oligonucleotide
aggaccagcattgtccagtgcaaaactcttactcgcatacactcccccaggtgccccag

SEQ ID NO: 323670 - DNA, 60 bp, Artificial
  Synthetic oligonucleotide
aggaccagccgctgacctgaattggggtgatacccaagatggtatagtgtgggttgctgc

SEQ ID NO: 323671 - DNA, 60 bp, Artificial
  Synthetic oligonucleotide
aggaccaggaactagatacccactgacatttggatggccattcaggctagtaccagtgtc

SEQ ID NO: 323672 - DNA, 60 bp, Artificial
  Synthetic oligonucleotide
aggaccagggatcagatatcactgacctttgaatggtgctacaagctagtaccagttgag

SEQ ID NO: 323673 - DNA, 54 bp, Artificial
  Synthetic oligonucleotide
aggaccaggggccacaaacttctctctcttgaagcaagcaggagatgttgagga

SEQ ID NO: 323674 - DNA, 57 bp, Artificial
  Synthetic oligonucleotide
aggaccatagcgtcacccaagggtcctgttatccagatgtataccaacgtagaccaa

SEQ ID NO: 323675 - DNA, 58 bp, Artificial
  Synthetic oligonucleotide
aggaccatcaaactcttatatcaaagcagtgagtatatgtaatgttaagtttactaaa

SEQ ID NO: 323676 - DNA, 60 bp, Artificial
  Synthetic oligonucleotide
aggaccatgcaataatgtcagcactgtacaatgcacacatggaattaagccagtggtgtc

SEQ ID NO: 323677 - DNA, 60 bp, Artificial
  Synthetic oligonucleotide
aggacccaacccgtatgcactggcaggcgcatgagcaagtagagaaccttcacggtatcg

SEQ ID NO: 323678 - DNA, 51 bp, Artificial
  Synthetic oligonucleotide
aggacccaccctcctttgtctggcgggtgctgagttggcagtgttgttaca

SEQ ID NO: 323679 - DNA, 54 bp, Artificial
  Synthetic oligonucleotide
aggacccacggggccaaaagccacgtcctaccggacccatcatgtgtgcaaacc

SEQ ID NO: 323680 - DNA, 55 bp, Artificial
  Synthetic oligonucleotide
aggacccagcaccatgccaaccgacgtccgcgtgttcgaatccgcctcggaggat

SEQ ID NO: 323681 - DNA, 60 bp, Artificial
  Synthetic oligonucleotide
aggacccaggaatcagagtgcgtttgtatcaatggtacttgcacagtagtaatgactgat

SEQ ID NO: 323682 - DNA, 51 bp, Artificial
  Synthetic oligonucleotide
aggaccccactgtgggcatgagtgccacaaactggctattgtacaccccgg

SEQ ID NO: 323683 - DNA, 57 bp, Artificial
  Synthetic oligonucleotide
aggacccctcatcgaactctattaatgaatgagctgggtgtcccgtttcatttggga

SEQ ID NO: 323684 - DNA, 58 bp, Artificial
  Synthetic oligonucleotide
aggacccctcttcccacagtgctcgaggatcttatggacacctcgtccttgaccttca

SEQ ID NO: 323685 - DNA, 54 bp, Artificial
  Synthetic oligonucleotide
aggaccccttatcgaaccctattgatgaatgagttgggggtcccatttcatttg

SEQ ID NO: 323686 - DNA, 59 bp, Artificial
  Synthetic oligonucleotide
aggaccccttcagcgaacagaagagtctactcggatcaggagtaagaccatagcgatag

SEQ ID NO: 323687 - DNA, 57 bp, Artificial
  Synthetic oligonucleotide
aggaccccttgtgggggaagctcttggtgacaaaggactttgtctatgcacacaata

SEQ ID NO: 323688 - DNA, 57 bp, Artificial
  Synthetic oligonucleotide
aggacccggccataaggcaagagttttggctgaagcaatgagccaagtaacaaatcc

SEQ ID NO: 323689 - DNA, 60 bp, Artificial
  Synthetic oligonucleotide
aggacccggtcacagcagcttacctcaatcatccacacttaattgggagaatctgtgcaa

SEQ ID NO: 323690 - DNA, 50 bp, Artificial
  Synthetic oligonucleotide
aggaccctaataatgagagaggaaacccaggagtgaaaggatgggccttt

SEQ ID NO: 323691 - DNA, 53 bp, Artificial
  Synthetic oligonucleotide
aggaccctactgttactaatgctcaccaaccctacaaaaaggaatcaaaagca

SEQ ID NO: 323692 - DNA, 55 bp, Artificial
  Synthetic oligonucleotide
aggaccctgcaaggttcagtcctacgagcagcgtcacgacatctcacatgtcggg

SEQ ID NO: 323693 - DNA, 56 bp, Artificial
  Synthetic oligonucleotide
aggaccctgcaccgaacatggagaacatagcgtcaggattcctaggacccctgctc

SEQ ID NO: 323694 - DNA, 55 bp, Artificial
  Synthetic oligonucleotide
aggacccttatgcaaagtacacattttgggatgtggaccttacagaacgattttc

SEQ ID NO: 323695 - DNA, 57 bp, Artificial
  Synthetic oligonucleotide
aggaccgagagaaaatgtggccataatacaggttggtggttctaatatattagatat

SEQ ID NO: 323696 - DNA, 55 bp, Artificial
  Synthetic oligonucleotide
aggaccgctatactaaacagaacaacgcttccaaatatgttacctccaatcttcc

SEQ ID NO: 323697 - DNA, 52 bp, Artificial
  Synthetic oligonucleotide
aggaccggtaggggtagaaggggcatatacaggtttgtgactccaggggaac

SEQ ID NO: 323698 - DNA, 53 bp, Artificial
  Synthetic oligonucleotide
aggaccggttagagtagcgccatacacaaaaaaaaatcgttgatgtgtgaggt

SEQ ID NO: 323699 - DNA, 52 bp, Artificial
  Synthetic oligonucleotide
aggaccgtaacccggcccttacacacctcgagtccgtgaccaccggattata

SEQ ID NO: 323700 - DNA, 53 bp, Artificial
  Synthetic oligonucleotide
aggaccgtaccacgccccaggatagtgttggttcaaggccgtctgtggttaac

SEQ ID NO: 323701 - DNA, 57 bp, Artificial
  Synthetic oligonucleotide
aggaccgtgggtaggatggtctgcaagggtacagactggagatccttggatgggtgg

SEQ ID NO: 323702 - DNA, 54 bp, Artificial
  Synthetic oligonucleotide
aggacctgataggtaaatgaggacccgatacatcggggactcaattggggacta

SEQ ID NO: 323703 - DNA, 52 bp, Artificial
  Synthetic oligonucleotide
aggacctgggttttaaagactctcaagaaaatcccaatcggagggcgtaagc

SEQ ID NO: 323704 - DNA, 51 bp, Artificial
  Synthetic oligonucleotide
aggaccttacgagggaccggtgaaaaagcctgtcgctttgaaagttaaagc

SEQ ID NO: 323705 - DNA, 60 bp, Artificial
  Synthetic oligonucleotide
aggaccttgatgtggatagttgcactgggagctattctaatttagccaagaatgccctgt

SEQ ID NO: 323706 - DNA, 57 bp, Artificial
  Synthetic oligonucleotide
aggaccttgatgttgagtcacgtaagggtgtttatgacaacataagcaagaacgccc

SEQ ID NO: 323707 - DNA, 56 bp, Artificial
  Synthetic oligonucleotide
aggacctttagagggagagtcctagatatgttcagaactgcttttggaggaaaata

SEQ ID NO: 323708 - DNA, 53 bp, Artificial
  Synthetic oligonucleotide
aggacctttgaagtatggtcgtttatgaccaggaatttaaaggtcttatggag

SEQ ID NO: 323709 - DNA, 59 bp, Artificial
  Synthetic oligonucleotide
aggaccttttgcttccctcacatcgagtcagttaaatgtcctcccactctcagtgacca

SEQ ID NO: 323710 - DNA, 60 bp, Artificial
  Synthetic oligonucleotide
aggacgaagtctctaggtcaggggagatgggtgcgagagcgtcagtgttgcggggagaga

SEQ ID NO: 323711 - DNA, 60 bp, Artificial
  Synthetic oligonucleotide
aggacgaatggactgtaactgcaaattatcaaccattgaacatctctggcacgctaattg

SEQ ID NO: 323712 - DNA, 57 bp, Artificial
  Synthetic oligonucleotide
aggacgaattttccaaagtcgcattcgagctggtaaatgcaatactaagtgtcaaac

SEQ ID NO: 323713 - DNA, 57 bp, Artificial
  Synthetic oligonucleotide
aggacgacgaaagacaaatctgtatgggttcatcataaaggggagatcccacttgag

SEQ ID NO: 323714 - DNA, 59 bp, Artificial
  Synthetic oligonucleotide
aggacgacgttatcattgattcaagacgtccgggcccgctgaatgctccagaggtcgac

SEQ ID NO: 323715 - DNA, 55 bp, Artificial
  Synthetic oligonucleotide
aggacgagaacacgctgtctttgcgtgtgtcacctccaacgggtggtacgcgatt

SEQ ID NO: 323716 - DNA, 54 bp, Artificial
  Synthetic oligonucleotide
aggacgagcgcaagaaaatacgggagcttccaatctccctttttgattatttta

SEQ ID NO: 323717 - DNA, 55 bp, Artificial
  Synthetic oligonucleotide
aggacgaggtaggtcctggattgcagaggaagatagtgggaattccacctttaat

SEQ ID NO: 323718 - DNA, 56 bp, Artificial
  Synthetic oligonucleotide
aggacgatcacttagtacgatacctgttcagaggaatagggaccgcgtcctcctct

SEQ ID NO: 323719 - DNA, 57 bp, Artificial
  Synthetic oligonucleotide
aggacgatgtggtctattttgcagcagtgacccttgaggagcgatattttgttatcc

SEQ ID NO: 323720 - DNA, 60 bp, Artificial
  Synthetic oligonucleotide
aggacgcacttgcacttatacgcgtgtcactccaagcgctctcaaacagagggggcgcgc

SEQ ID NO: 323721 - DNA, 60 bp, Artificial
  Synthetic oligonucleotide
aggacgcatctacttctcctttttaaacccattcaaacagatcatgcacaccaatcagac

SEQ ID NO: 323722 - DNA, 51 bp, Artificial
  Synthetic oligonucleotide
aggacgcgagcagctctgtatatctagatccaaggggctcttttgagtggc

SEQ ID NO: 323723 - DNA, 55 bp, Artificial
  Synthetic oligonucleotide
aggacgcggcagccctacgagtcttcacggaggctatgactaggtattccgcccc

SEQ ID NO: 323724 - DNA, 55 bp, Artificial
  Synthetic oligonucleotide
aggacgcgggtgtgccaacacggaaacggcatagacagtgtgacccagacgaggg

SEQ ID NO: 323725 - DNA, 55 bp, Artificial
  Synthetic oligonucleotide
aggacggaaggttgagatctactccctcccatactccgcgatcaacatgtggtcg

SEQ ID NO: 323726 - DNA, 60 bp, Artificial
  Synthetic oligonucleotide
aggacggactgtcgcatcataagagatgctgctcgaaccctgtcgtgcggccagtgtgtc

SEQ ID NO: 323727 - DNA, 55 bp, Artificial
  Synthetic oligonucleotide
aggacggcacgcccaaatatgtaatcatagccagtgcatcactcccagagacaac

SEQ ID NO: 323728 - DNA, 56 bp, Artificial
  Synthetic oligonucleotide
aggacgggactagatgtagtgaactgctcgttagtagctggagtaccggttactaa

SEQ ID NO: 323729 - DNA, 54 bp, Artificial
  Synthetic oligonucleotide
aggacgggggccggctgacacaacaaattgggataggagcccttgctatgtcac

SEQ ID NO: 323730 - DNA, 56 bp, Artificial
  Synthetic oligonucleotide
aggacgggggcgtatgcaagtcctgttcgtggattagcaacgttcgtggctggaaa

SEQ ID NO: 323731 - DNA, 55 bp, Artificial
  Synthetic oligonucleotide
aggacggtagcgcaatgtcagtcatacctgataacagcaatccccggcttctcaa

SEQ ID NO: 323732 - DNA, 55 bp, Artificial
  Synthetic oligonucleotide
aggacggtatctagttccgatgtatacgccaacacaaaccttgtgctgcagagac

SEQ ID NO: 323733 - DNA, 52 bp, Artificial
  Synthetic oligonucleotide
aggacggtcagcaaccttaccccgctggcaagtaccgtttacatcctgcatc

SEQ ID NO: 323734 - DNA, 60 bp, Artificial
  Synthetic oligonucleotide
aggacggtcgtgagatcattgctccgtgtcgtgaccaacacgagatcattggtcgagcac

SEQ ID NO: 323735 - DNA, 50 bp, Artificial
  Synthetic oligonucleotide
aggacggtgaaccagaagttccacagtttaggccacaggtttaccctaga

SEQ ID NO: 323736 - DNA, 56 bp, Artificial
  Synthetic oligonucleotide
aggacggtgcggacaagtttcgagattcaacgtttgtggatcctgtatatgggaaa

SEQ ID NO: 323737 - DNA, 51 bp, Artificial
  Synthetic oligonucleotide
aggacggttctcctgacatttacgaaaggggagacgaagtctcggttactt

SEQ ID NO: 323738 - DNA, 56 bp, Artificial
  Synthetic oligonucleotide
aggacgtatcattcttcgtgtcggaaagatttcatcccttgagatggggggattcg

SEQ ID NO: 323739 - DNA, 55 bp, Artificial
  Synthetic oligonucleotide
aggacgtatcgttcatttcttcgctatttcgttcgactttggcgcacgctgagtg

SEQ ID NO: 323740 - DNA, 55 bp, Artificial
  Synthetic oligonucleotide
aggacgtcctcgaggggtacttccgcgagttcacgacgacgtacgagcgccacat

SEQ ID NO: 323741 - DNA, 55 bp, Artificial
  Synthetic oligonucleotide
aggacgtcgcgcgagagttccctgatatctacgtcagacatgggcggggcttgca

SEQ ID NO: 323742 - DNA, 51 bp, Artificial
  Synthetic oligonucleotide
aggacgtctcctcggtgctcgcagtatcaccgcctaagtctgacggccaac

SEQ ID NO: 323743 - DNA, 60 bp, Artificial
  Synthetic oligonucleotide
aggacgtgcgaagatctagatagtgcacacttgagagtgagaatttatgccaaacccaaa

SEQ ID NO: 323744 - DNA, 57 bp, Artificial
  Synthetic oligonucleotide
aggacgtgcgatacttctcacggcctttacgcgtggttctgccgagaaccaacgcaa

SEQ ID NO: 323745 - DNA, 60 bp, Artificial
  Synthetic oligonucleotide
aggacgtggagaacatgctccgttcgctgacatgtgccgatgttgaagccattgggccgc

SEQ ID NO: 323746 - DNA, 54 bp, Artificial
  Synthetic oligonucleotide
aggacgtgggctcgttagggtctggggagccggtgttcggtgcgtcgtacacca

SEQ ID NO: 323747 - DNA, 60 bp, Artificial
  Synthetic oligonucleotide
aggacgtgtacgtgcagacgtatcaagccgatgcattcggtagatacctagccgatgtgt

SEQ ID NO: 323748 - DNA, 52 bp, Artificial
  Synthetic oligonucleotide
aggacgttaaaagaagtcaggccactacaagtgccataacttgagcaaacta

SEQ ID NO: 323749 - DNA, 60 bp, Artificial
  Synthetic oligonucleotide
aggacgttagcgatctaaaacagtatgatagtgatgagccagaacctagatcgctagcaa

SEQ ID NO: 323750 - DNA, 51 bp, Artificial
  Synthetic oligonucleotide
aggacgtttcttctcccttatgtcatggaaattacgagagtatttcgtcat

SEQ ID NO: 323751 - DNA, 54 bp, Artificial
  Synthetic oligonucleotide
aggactaatacaatacctccgcatagtacaataacaaaccaaggcatggggttg

SEQ ID NO: 323752 - DNA, 55 bp, Artificial
  Synthetic oligonucleotide
aggactacacgattacccggtagggtcgcagttgccttgcgagcctgaaccggac

SEQ ID NO: 323753 - DNA, 60 bp, Artificial
  Synthetic oligonucleotide
aggactacctccattgcaggacacgtcatgaagacaacatgttcaagaggaaggacgtgg

SEQ ID NO: 323754 - DNA, 54 bp, Artificial
  Synthetic oligonucleotide
aggactacgtcggtttgaagattccgacatccgccgacttagttgattggaaaa

SEQ ID NO: 323755 - DNA, 55 bp, Artificial
  Synthetic oligonucleotide
aggactactattaacaagagatggtggggataatgatactactagggcaaatgag

SEQ ID NO: 323756 - DNA, 53 bp, Artificial
  Synthetic oligonucleotide
aggactactattaacaagagatggtgggggtaatggtacaaatgaaaccttta

SEQ ID NO: 323757 - DNA, 58 bp, Artificial
  Synthetic oligonucleotide
aggactactgttcagcagcagttcagtgatttgtttaaaactgtcccaacacggacta

SEQ ID NO: 323758 - DNA, 60 bp, Artificial
  Synthetic oligonucleotide
aggactagcaaattcagtctctactctaactgactccctgtcagatgcagcgtcatcagt

SEQ ID NO: 323759 - DNA, 53 bp, Artificial
  Synthetic oligonucleotide
aggactagcggtagttactaaccagctaactaggtcaacgcttccccacgttg

SEQ ID NO: 323760 - DNA, 52 bp, Artificial
  Synthetic oligonucleotide
aggactaggctcccgagggggctgaagtggattgttttgcttggttcctgat

SEQ ID NO: 323761 - DNA, 60 bp, Artificial
  Synthetic oligonucleotide
aggactatgctacgccatgtggatcaacatggcttagagacatctgggactgggtgtgta

SEQ ID NO: 323762 - DNA, 55 bp, Artificial
  Synthetic oligonucleotide
aggactcaccactgataacttgaaagtcccctgccaactaccctctcccgagttc

SEQ ID NO: 323763 - DNA, 58 bp, Artificial
  Synthetic oligonucleotide
aggactcatgagaccttccgagatagcctgatatacctctgttcgggggaaggagtac

SEQ ID NO: 323764 - DNA, 55 bp, Artificial
  Synthetic oligonucleotide
aggactcatttgtgtaattgcttccagcggcatgttatggatggctgatgtccca

SEQ ID NO: 323765 - DNA, 55 bp, Artificial
  Synthetic oligonucleotide
aggactccacgagtacccggtgggatcgcaattaccttgcgagcccgaaccagac

SEQ ID NO: 323766 - DNA, 56 bp, Artificial
  Synthetic oligonucleotide
aggactccacgagtacctggtggggtcgcaattaccttgtgaacccgagccagatg

SEQ ID NO: 323767 - DNA, 55 bp, Artificial
  Synthetic oligonucleotide
aggactccacgttttgggagatggttgatgaagaacgcgaagctcacctgcgtgg

SEQ ID NO: 323768 - DNA, 59 bp, Artificial
  Synthetic oligonucleotide
aggactccagcggagtccctcaactcctgtcatatattgtggagtcctggagtccctta

SEQ ID NO: 323769 - DNA, 59 bp, Artificial
  Synthetic oligonucleotide
aggactcctgatgttccaagaggctgtgaagggccctgtaaggtccagtcctacgagca

SEQ ID NO: 323770 - DNA, 52 bp, Artificial
  Synthetic oligonucleotide
aggactcgaagtatcatttgaggactctcgtgttagatgcagggcatcaatt

SEQ ID NO: 323771 - DNA, 53 bp, Artificial
  Synthetic oligonucleotide
aggactcgagatggatcaactatcaatacgtggggcgcgtgactttgagttcc

SEQ ID NO: 323772 - DNA, 55 bp, Artificial
  Synthetic oligonucleotide
aggactcgcccatgttcgagggcgggtacttcatcgtcgggatcaacctccccac

SEQ ID NO: 323773 - DNA, 56 bp, Artificial
  Synthetic oligonucleotide
aggactcgtactcccaaccactaaacctgttcctgcaaggtgggaagatgcttcat

SEQ ID NO: 323774 - DNA, 54 bp, Artificial
  Synthetic oligonucleotide
aggactcgtgcgtcggtagaactgtccgcggcttcccggagggctcgcgtcttt

SEQ ID NO: 323775 - DNA, 60 bp, Artificial
  Synthetic oligonucleotide
aggactgaaggggatattttacaacaaacgtaggcatgcaatcttgaatctgtatgccca

SEQ ID NO: 323776 - DNA, 56 bp, Artificial
  Synthetic oligonucleotide
aggactgatcggggtagcgttgattggaaagaatggaggaaaatagtcgaattaca

SEQ ID NO: 323777 - DNA, 58 bp, Artificial
  Synthetic oligonucleotide
aggactgcgataggccaagtgtcgaggcccatgttcctatacgtaagaaccaatggaa

SEQ ID NO: 323778 - DNA, 60 bp, Artificial
  Synthetic oligonucleotide
aggactgctggtgtcagatggaggaccaaacttatacaatatccggaatctacacatccc

SEQ ID NO: 323779 - DNA, 55 bp, Artificial
  Synthetic oligonucleotide
aggactgctttccgttattatcagagcagtccctcgaagttcctgtacacctcgt

SEQ ID NO: 323780 - DNA, 57 bp, Artificial
  Synthetic oligonucleotide
aggactggaattttggattgcagccccctccgtctgggagtttgcaggatacgtata

SEQ ID NO: 323781 - DNA, 60 bp, Artificial
  Synthetic oligonucleotide
aggactggagatatatcgccacaaccagggccaagcaagcgccgagctttatcacctttg

SEQ ID NO: 323782 - DNA, 60 bp, Artificial
  Synthetic oligonucleotide
aggactggtatacatgaacatgcccaatgctttgtgctctttgtggagatatatgcgtgg

SEQ ID NO: 323783 - DNA, 58 bp, Artificial
  Synthetic oligonucleotide
aggactggtcagtcctggatgatggaaatttcctggcttccctctgggaaccagaaga

SEQ ID NO: 323784 - DNA, 60 bp, Artificial
  Synthetic oligonucleotide
aggactgtaaaattgcccccttgatgttagcatacatgctggaaagagagttggtccgca

SEQ ID NO: 323785 - DNA, 60 bp, Artificial
  Synthetic oligonucleotide
aggactgtaagattgctcctttgatggtggcatacatgctggagagggaactggttcgca

SEQ ID NO: 323786 - DNA, 59 bp, Artificial
  Synthetic oligonucleotide
aggactgtcatcctatgaaaatggttggaggaactattaatataatagaagtaacagca

SEQ ID NO: 323787 - DNA, 57 bp, Artificial
  Synthetic oligonucleotide
aggactgtgacccgaagccactgttccggagattcacccgtgtatggtggtgggaca

SEQ ID NO: 323788 - DNA, 54 bp, Artificial
  Synthetic oligonucleotide
aggactgtgcaacatgcttcaactgtgcaagagttggacctccaagtcccagat

SEQ ID NO: 323789 - DNA, 55 bp, Artificial
  Synthetic oligonucleotide
aggactgtgggaagtaagaattaataaggacactgtatttacccctgtcactagc

SEQ ID NO: 323790 - DNA, 59 bp, Artificial
  Synthetic oligonucleotide
aggactgtgtgtatccacgaaatgtggtagatgactactggagtgggtacaaaagacaa

SEQ ID NO: 323791 - DNA, 52 bp, Artificial
  Synthetic oligonucleotide
aggacttcaacctgtagtaggcccaagttcctcctcgaagaagagagaagcc

SEQ ID NO: 323792 - DNA, 60 bp, Artificial
  Synthetic oligonucleotide
aggacttcattagagggactagctccactttgattgtcactgacattttctgaagaatac

SEQ ID NO: 323793 - DNA, 60 bp, Artificial
  Synthetic oligonucleotide
aggacttcttgaaggtacgttgcaggctggcacttctgccgtttctgataagttgcttga

SEQ ID NO: 323794 - DNA, 60 bp, Artificial
  Synthetic oligonucleotide
aggacttgacgtcggagctggatttagctccctgtatgttcggatggaaatgtgctgacc

SEQ ID NO: 323795 - DNA, 56 bp, Artificial
  Synthetic oligonucleotide
aggacttggtctgcctgtgactcggcctggagactttcttccggtgcaccgtaggg

SEQ ID NO: 323796 - DNA, 54 bp, Artificial
  Synthetic oligonucleotide
aggactttagaccctttacagccttctctgtagtccctgtaaatcgagaaggac

SEQ ID NO: 323797 - DNA, 57 bp, Artificial
  Synthetic oligonucleotide
aggactttattatagaatatgggacaactgacgacgaagtatacatacaaagagcgt

SEQ ID NO: 323798 - DNA, 60 bp, Artificial
  Synthetic oligonucleotide
aggactttattgtggcagttcgagagagctttaaacatctagcaggaggcgatgttggca

SEQ ID NO: 323799 - DNA, 57 bp, Artificial
  Synthetic oligonucleotide
aggactttgagtctgttccccaggcaaaaaaaccaagcaacagctctgttgcacttg

SEQ ID NO: 323800 - DNA, 50 bp, Artificial
  Synthetic oligonucleotide
aggagaaaacagttgggaaagttaaagcggccgaagcttttgcgggtaat

SEQ ID NO: 323801 - DNA, 59 bp, Artificial
  Synthetic oligonucleotide
aggagaaaactgccatatcatttggtggcaatttctaggcatactgataaaatcgttta

SEQ ID NO: 323802 - DNA, 55 bp, Artificial
  Synthetic oligonucleotide
aggagaaaaggctaatgtactaattgggcaaggagacgtagtgttggtaatgaaa

SEQ ID NO: 323803 - DNA, 53 bp, Artificial
  Synthetic oligonucleotide
aggagaaattgctagttactacacacactggaccggtagtcttcggtttagtt

SEQ ID NO: 323804 - DNA, 60 bp, Artificial
  Synthetic oligonucleotide
aggagaacaaagcattgtagatgcaatgatagagagcagtttcgtagatccctttgaaac

SEQ ID NO: 323805 - DNA, 60 bp, Artificial
  Synthetic oligonucleotide
aggagaacctcttgagataagaactattatcagatcctatcggatggatgacccctcact

SEQ ID NO: 323806 - DNA, 57 bp, Artificial
  Synthetic oligonucleotide
aggagaacgaaggaggtcccaactcgactgcgaccagtgtacctactgcgaagaaca

SEQ ID NO: 323807 - DNA, 53 bp, Artificial
  Synthetic oligonucleotide
aggagaagaatttctaacaactctaacaaattcgttttatactatatttgttg

SEQ ID NO: 323808 - DNA, 53 bp, Artificial
  Synthetic oligonucleotide
aggagaagaccaaattactgtttgggggttccactctgatgacgaaaccctaa

SEQ ID NO: 323809 - DNA, 51 bp, Artificial
  Synthetic oligonucleotide
aggagaagagcaagttaatgaacttgtttacagattcagattagcagtgag

SEQ ID NO: 323810 - DNA, 54 bp, Artificial
  Synthetic oligonucleotide
aggagaagggtagtactagcttttgtgactacccgttaactccgtcagtcatac

SEQ ID NO: 323811 - DNA, 60 bp, Artificial
  Synthetic oligonucleotide
aggagaaggtctcaatgacaggcatgacaacacagttctttagctggggttccatgactc

SEQ ID NO: 323812 - DNA, 52 bp, Artificial
  Synthetic oligonucleotide
aggagaaggtgacaccagctgagttggaaagatacaacatcgcactaattga

SEQ ID NO: 323813 - DNA, 60 bp, Artificial
  Synthetic oligonucleotide
aggagaataatggcagctctagtgagaataatgtcgactctagtgaggagtatagattaa

SEQ ID NO: 323814 - DNA, 60 bp, Artificial
  Synthetic oligonucleotide
aggagaatatctagagagatgtctaaaggacaatgtcgcgatcaggatagagcaccttgc

SEQ ID NO: 323815 - DNA, 59 bp, Artificial
  Synthetic oligonucleotide
aggagaatcgagagattagtgcagtttacacagtttcttaaaacggaagatatccatga

SEQ ID NO: 323816 - DNA, 60 bp, Artificial
  Synthetic oligonucleotide
aggagaatgtgcgcatggttaaaggttacagtactgactatgttatcatgtgcgtgatag

SEQ ID NO: 323817 - DNA, 59 bp, Artificial
  Synthetic oligonucleotide
aggagaatgtgtgcagagacctctaagacacaacataacggtaggaaatggaaccataa

SEQ ID NO: 323818 - DNA, 60 bp, Artificial
  Synthetic oligonucleotide
aggagaattcttatgtctatgttgattattgggatgactcacaagcattcaggaatatgg

SEQ ID NO: 323819 - DNA, 57 bp, Artificial
  Synthetic oligonucleotide
aggagaatttaagaaagtcattaacggtatatgagcctatgcaagggtgctaccgga

SEQ ID NO: 323820 - DNA, 55 bp, Artificial
  Synthetic oligonucleotide
aggagacataaggcaagcacattgtaacattagtgaaggtgattggaataaaacc

SEQ ID NO: 323821 - DNA, 57 bp, Artificial
  Synthetic oligonucleotide
aggagacatgggatattgcgtttggggtaccaaccagtacccactctggcaacttca

SEQ ID NO: 323822 - DNA, 52 bp, Artificial
  Synthetic oligonucleotide
aggagacccaaaccctcaaagcggagaggttggagaaaacggtagggctctc

SEQ ID NO: 323823 - DNA, 60 bp, Artificial
  Synthetic oligonucleotide
aggagacgaaactatctaaaagtgcggccacaattggagcacactctcagaggtcagact

SEQ ID NO: 323824 - DNA, 59 bp, Artificial
  Synthetic oligonucleotide
aggagacgacattgtcatatacaactctgaagttgcaaaagcctattcaaccctaatgg

SEQ ID NO: 323825 - DNA, 50 bp, Artificial
  Synthetic oligonucleotide
aggagactcgtacctgggaggtcgagatattgataatgctatccagaagt

SEQ ID NO: 323826 - DNA, 55 bp, Artificial
  Synthetic oligonucleotide
aggagactgcgtccgattctggcgctgaggttgtgtggcgggataccgaggctcg

SEQ ID NO: 323827 - DNA, 58 bp, Artificial
  Synthetic oligonucleotide
aggagagaacaactgtttgttacaccctgttagccaacatggaatggaggacgcagaa

SEQ ID NO: 323828 - DNA, 60 bp, Artificial
  Synthetic oligonucleotide
aggagagaacacaagtctgctacaccctatgagccagcatggaatggatgatccagagaa

SEQ ID NO: 323829 - DNA, 60 bp, Artificial
  Synthetic oligonucleotide
aggagagaccaacaacttgctaagccctatgagcctgcatgggatggaggacccggagaa

SEQ ID NO: 323830 - DNA, 58 bp, Artificial
  Synthetic oligonucleotide
aggagagcaattgcaacgcccgggatgcaaatcaggggatttgtatactttgttgaaa

SEQ ID NO: 323831 - DNA, 58 bp, Artificial
  Synthetic oligonucleotide
aggagagccctgcgcgtaacaaggtggccacctgtgggcgacgcttcggcaaatcgga

SEQ ID NO: 323832 - DNA, 58 bp, Artificial
  Synthetic oligonucleotide
aggagagccgtggacagtgtaccggacagcgggtatggctatactgaagtggaaactc

SEQ ID NO: 323833 - DNA, 60 bp, Artificial
  Synthetic oligonucleotide
aggagagcgctgcgacttggaggacagggatagatcagagcttagcccgctgttactgtc

SEQ ID NO: 323834 - DNA, 55 bp, Artificial
  Synthetic oligonucleotide
aggagagcgggtccgatgctggtctggtccgaccgtgtgttcgcacttgtctgcg

SEQ ID NO: 323835 - DNA, 55 bp, Artificial
  Synthetic oligonucleotide
aggagagcttaacgtactagtgcccggcgaagtgatatcaattgagtactcggag

SEQ ID NO: 323836 - DNA, 60 bp, Artificial
  Synthetic oligonucleotide
aggagaggacaactgcttgctacaccccttgaaccagcatggagtggatgacccggagag

SEQ ID NO: 323837 - DNA, 60 bp, Artificial
  Synthetic oligonucleotide
aggagaggacggacgcccaactcagctgcccaatgagattaatgatgcttttcccttgga

SEQ ID NO: 323838 - DNA, 60 bp, Artificial
  Synthetic oligonucleotide
aggagagggaactgcagctgattacaaaagcactcaatcggcaattgatcaaataaccgg

SEQ ID NO: 323839 - DNA, 60 bp, Artificial
  Synthetic oligonucleotide
aggagagggaactgctgcagattacaagagcacccagtcggcaattaatcaaataacagg

SEQ ID NO: 323840 - DNA, 55 bp, Artificial
  Synthetic oligonucleotide
aggagagggaagccaccaggagccggagacaagacacctccagaggaccccttca

SEQ ID NO: 323841 - DNA, 52 bp, Artificial
  Synthetic oligonucleotide
aggagagggatgggaagacatccatgtaaaattcttcaccaaggacatatta

SEQ ID NO: 323842 - DNA, 58 bp, Artificial
  Synthetic oligonucleotide
aggagaggtggagatatggctccacgacagcatcctcccccacctcgggagcgtcgga

SEQ ID NO: 323843 - DNA, 54 bp, Artificial
  Synthetic oligonucleotide
aggagagtagagcggagagaggaagtaagaagacgcctccgggtaagggacgcc

SEQ ID NO: 323844 - DNA, 55 bp, Artificial
  Synthetic oligonucleotide
aggagagtctgaaatgttgtatgttgctcgcgaaggctattgttacatcaacgtt

SEQ ID NO: 323845 - DNA, 60 bp, Artificial
  Synthetic oligonucleotide
aggagagtgatcgcacttggaataggtcaggaatgtgttagcattcctgtgcctgaatga

SEQ ID NO: 323846 - DNA, 55 bp, Artificial
  Synthetic oligonucleotide
aggagataacctcccctcccaagcaggagcagaaaggcgagggactgtaccctcc

SEQ ID NO: 323847 - DNA, 60 bp, Artificial
  Synthetic oligonucleotide
aggagatacgactggccgaccctaagctgtatcgtcgctgcttggcgactaagattaata

SEQ ID NO: 323848 - DNA, 60 bp, Artificial
  Synthetic oligonucleotide
aggagatagaatccgtgaacaatgcaatggtgatgccagctcatggcccagctaagagca

SEQ ID NO: 323849 - DNA, 60 bp, Artificial
  Synthetic oligonucleotide
aggagatatgactaattattgcctagtttgtgtctgctcaaaggataaaggtctaacata

SEQ ID NO: 323850 - DNA, 60 bp, Artificial
  Synthetic oligonucleotide
aggagatatgcgggatagaagataaaaccatacatccgaaggttatgatgagattcaaga

SEQ ID NO: 323851 - DNA, 60 bp, Artificial
  Synthetic oligonucleotide
aggagatatgtgttgcttggtcaagtagcagctgcttcgatggaaaggaatggatgcatg

SEQ ID NO: 323852 - DNA, 60 bp, Artificial
  Synthetic oligonucleotide
aggagatattctaaggactcaggaatcatcatgcacttgcattcaaggtgagtgttattg

SEQ ID NO: 323853 - DNA, 59 bp, Artificial
  Synthetic oligonucleotide
aggagatcctcagtcgtcgactcttaaccctatgagccaagttccgactcactcctctg

SEQ ID NO: 323854 - DNA, 57 bp, Artificial
  Synthetic oligonucleotide
aggagatctttacccttcagcatatacttagtattcgcaacgggaaacttgtagcaa

SEQ ID NO: 323855 - DNA, 55 bp, Artificial
  Synthetic oligonucleotide
aggagatcttttgagcttaagaaactatgggatcagacccgttcaaaggcagggt

SEQ ID NO: 323856 - DNA, 60 bp, Artificial
  Synthetic oligonucleotide
aggagatgatgacgcagtcgctgcagtacctcaccgagcgtgacgaattggctcaagagt

SEQ ID NO: 323857 - DNA, 58 bp, Artificial
  Synthetic oligonucleotide
aggagatgatgaggtaaaactattgacacttattgccgtaaagtcggcgttctatgag

SEQ ID NO: 323858 - DNA, 58 bp, Artificial
  Synthetic oligonucleotide
aggagatggcgccataggtgcagccactgttttgtcaagacaacacttgcttaatctc

SEQ ID NO: 323859 - DNA, 52 bp, Artificial
  Synthetic oligonucleotide
aggagatgggtggaaacatcacaagggtggagtcagaaaacaaagttgtggt

SEQ ID NO: 323860 - DNA, 58 bp, Artificial
  Synthetic oligonucleotide
aggagatgtcacccacattgcgggttcccgcaattacacaatgaatttggcctctcta

SEQ ID NO: 323861 - DNA, 60 bp, Artificial
  Synthetic oligonucleotide
aggagatgttggacctaagcgcagaggtcattgagacagcagcggaggaggtgccaattt

SEQ ID NO: 323862 - DNA, 58 bp, Artificial
  Synthetic oligonucleotide
aggagattcagaccccctacgcgcgcgccaatctccacgacgctgactaacgcccctg

SEQ ID NO: 323863 - DNA, 58 bp, Artificial
  Synthetic oligonucleotide
aggagattctgggttgatcaagagattattcggggagataactttcgaattgctttca

SEQ ID NO: 323864 - DNA, 53 bp, Artificial
  Synthetic oligonucleotide
aggagattctttctaaggtcaacttcgatgaggatttgatactcgtcccaggt

SEQ ID NO: 323865 - DNA, 60 bp, Artificial
  Synthetic oligonucleotide
aggagattgagtccgtaaacaatgctgtagtaatgccggcccacggtccagccaagagca

SEQ ID NO: 323866 - DNA, 60 bp, Artificial
  Synthetic oligonucleotide
aggagattggtaggatcatatgcacggcgagtcgtattttattcttttgccgtgcatgcc

SEQ ID NO: 323867 - DNA, 51 bp, Artificial
  Synthetic oligonucleotide
aggagatttgaaagtcatattgagagcagaaaaccatacaaagaattaaga

SEQ ID NO: 323868 - DNA, 57 bp, Artificial
  Synthetic oligonucleotide
aggagatttgcagagaccaaagtcaagagttccgtgaaatgggaaagggagccctga

SEQ ID NO: 323869 - DNA, 57 bp, Artificial
  Synthetic oligonucleotide
aggagcaaagcatatcaacctggagagtacatcattccggatttgttgggtaaaggg

SEQ ID NO: 323870 - DNA, 58 bp, Artificial
  Synthetic oligonucleotide
aggagcaaagtataacgctccgcacccccagcatggcagaaatttacgacttcgacaa

SEQ ID NO: 323871 - DNA, 59 bp, Artificial
  Synthetic oligonucleotide
aggagcaatctagaagtaaacatgtttttgacgcaggtggaaatatatctgctagtgta

SEQ ID NO: 323872 - DNA, 59 bp, Artificial
  Synthetic oligonucleotide
aggagcacaacgggaaactctgcagtctcaaaggagtgaggcccctcattctgaaggat

SEQ ID NO: 323873 - DNA, 55 bp, Artificial
  Synthetic oligonucleotide
aggagcacgtgctgcggagacttcgccaggacagacacgggaatttggagaccgc

SEQ ID NO: 323874 - DNA, 54 bp, Artificial
  Synthetic oligonucleotide
aggagcacttgcagaacgagcaggacctaaataccctaaaacgaaagtacttaa

SEQ ID NO: 323875 - DNA, 60 bp, Artificial
  Synthetic oligonucleotide
aggagcagatactgggctataagaacaagaagtggagggaacactaaccaacagagagca

SEQ ID NO: 323876 - DNA, 60 bp, Artificial
  Synthetic oligonucleotide
aggagcagatattgggctataaggaccagaagcggagggaatactaatcagcagagagca

SEQ ID NO: 323877 - DNA, 60 bp, Artificial
  Synthetic oligonucleotide
aggagcagtattcaagtcagatttgccaatagagagctgtgatgccacatgccaaactgt

SEQ ID NO: 323878 - DNA, 55 bp, Artificial
  Synthetic oligonucleotide
aggagcagtcagcctggactatcctgaagggacctcaggctccccaatactggac

SEQ ID NO: 323879 - DNA, 60 bp, Artificial
  Synthetic oligonucleotide
aggagcagtccaagaaggcacctctatcaacacactgcagaggtacgggcgagcactcaa

SEQ ID NO: 323880 - DNA, 56 bp, Artificial
  Synthetic oligonucleotide
aggagcagtcgtgaaccacgtgagtatggcttccttcgaaacgccagataaaaaac

SEQ ID NO: 323881 - DNA, 60 bp, Artificial
  Synthetic oligonucleotide
aggagcagtgatgagttcccctgtgcgtaaatccatgattggagcagttgatatggaggt

SEQ ID NO: 323882 - DNA, 55 bp, Artificial
  Synthetic oligonucleotide
aggagcagttacacaccccaaatacgccggtcaaggaggtggctacacgacccaa

SEQ ID NO: 323883 - DNA, 60 bp, Artificial
  Synthetic oligonucleotide
aggagcatacagacgggctatggagaatgctttgttacacagagttctagtgaccgatga

SEQ ID NO: 323884 - DNA, 55 bp, Artificial
  Synthetic oligonucleotide
aggagcatacctagagatccaggggtattggaatctgaccccggaaaggggactc

SEQ ID NO: 323885 - DNA, 60 bp, Artificial
  Synthetic oligonucleotide
aggagcatgaggagcaagaggagttgtacctaaagtccttgccaatattggattcggaca

SEQ ID NO: 323886 - DNA, 55 bp, Artificial
  Synthetic oligonucleotide
aggagcatgtatgctttaggactgacctggtatatgtttggctcaagccagtcct

SEQ ID NO: 323887 - DNA, 60 bp, Artificial
  Synthetic oligonucleotide
aggagcattaagaacaaaaatgggcacatcattggcccccacttactatgatccatactg

SEQ ID NO: 323888 - DNA, 60 bp, Artificial
  Synthetic oligonucleotide
aggagcattcttctctatcttacaggatatgaggaataccatcatggcatccaagactgt

SEQ ID NO: 323889 - DNA, 60 bp, Artificial
  Synthetic oligonucleotide
aggagccaccccacaagatctaaacaccatgctaaacacagtggggggacatcaagcagc

SEQ ID NO: 323890 - DNA, 60 bp, Artificial
  Synthetic oligonucleotide
aggagccatattgtcaactagcaccgattgaccactccagatacttctccctagtgaatt

SEQ ID NO: 323891 - DNA, 55 bp, Artificial
  Synthetic oligonucleotide
aggagcccgcccggggatacgcgctatgggatggggagtccccggccagcgacta

SEQ ID NO: 323892 - DNA, 55 bp, Artificial
  Synthetic oligonucleotide
aggagccctagggaatgtgcaaagtaccccactagcaggccctatggcggcgtgt

SEQ ID NO: 323893 - DNA, 59 bp, Artificial
  Synthetic oligonucleotide
aggagccgaagctcctatccgcataatacgccatacagaggctcattagagcttctaaa

SEQ ID NO: 323894 - DNA, 57 bp, Artificial
  Synthetic oligonucleotide
aggagcctcccacgcgataggagtaagcccataacgatagggggagatgctaggagt

SEQ ID NO: 323895 - DNA, 57 bp, Artificial
  Synthetic oligonucleotide
aggagcctgtgtcgtgaggaaatctactccgagaaactgaaagggcgcgaggtggcg

SEQ ID NO: 323896 - DNA, 60 bp, Artificial
  Synthetic oligonucleotide
aggagccttgatctatctgtcgggctcagtgatgtgctcggaccttccgtgctggtaaat

SEQ ID NO: 323897 - DNA, 56 bp, Artificial
  Synthetic oligonucleotide
aggagcgataaaattcttagccctggtcaggtgaacaaatttgaccaagccttcaa

SEQ ID NO: 323898 - DNA, 50 bp, Artificial
  Synthetic oligonucleotide
aggagcgcaatgcaggctgtggcggctgtttcccagcggacaagccacgt

SEQ ID NO: 323899 - DNA, 60 bp, Artificial
  Synthetic oligonucleotide
aggagcgcctggtgcagtatgcaatagctttgcaaaagcaggcatcgtggcgcggaacac

SEQ ID NO: 323900 - DNA, 54 bp, Artificial
  Synthetic oligonucleotide
aggagcgccttaaagaagatacgtcttttgggggcaacctcggacgagcagtct

SEQ ID NO: 323901 - DNA, 55 bp, Artificial
  Synthetic oligonucleotide
aggagcgctattactggtgcggacctgcgacgatgcaagtgttgctgtcgattcg

SEQ ID NO: 323902 - DNA, 53 bp, Artificial
  Synthetic oligonucleotide
aggagcgggagcattcgggccagggttcaccccaccacacggcggtcttttgg

SEQ ID NO: 323903 - DNA, 54 bp, Artificial
  Synthetic oligonucleotide
aggagcgtacacaggaatgcctaaccagaaacctaaggtacccactctcagaca

SEQ ID NO: 323904 - DNA, 57 bp, Artificial
  Synthetic oligonucleotide
aggagcgtgagggcagaagctgtccgggtcttttcttgtgtagactggattcataga

SEQ ID NO: 323905 - DNA, 57 bp, Artificial
  Synthetic oligonucleotide
aggagcgtgatggatatgtcgaaacccttaagcgcatgtgccgacttcccggggtac

SEQ ID NO: 323906 - DNA, 50 bp, Artificial
  Synthetic oligonucleotide
aggagcgtgctaacgcggaacgaagacccgttcctcttttgacccgcccg

SEQ ID NO: 323907 - DNA, 51 bp, Artificial
  Synthetic oligonucleotide
aggagctaacggcttacgtgaggaagtacgtgggaagcccagggacccttt

SEQ ID NO: 323908 - DNA, 57 bp, Artificial
  Synthetic oligonucleotide
aggagctaccagaaaggaccgcgtacaaagttgttacaccttgcggctgctgcaagg

SEQ ID NO: 323909 - DNA, 57 bp, Artificial
  Synthetic oligonucleotide
aggagctactttgccagcgagcaaggagagattcagtgggtcaaacctaataaagag

SEQ ID NO: 323910 - DNA, 55 bp, Artificial
  Synthetic oligonucleotide
aggagctatccgtaagacaagccctagagtcccacctaccgttgttcctccacca

SEQ ID NO: 323911 - DNA, 60 bp, Artificial
  Synthetic oligonucleotide
aggagctattgacatctcccatatacttagatggctcgatcggtaccctactcttgtgga

SEQ ID NO: 323912 - DNA, 55 bp, Artificial
  Synthetic oligonucleotide
aggagctccggcagaggagaggggcacaggtctcagaccaagacctggctctcat

SEQ ID NO: 323913 - DNA, 51 bp, Artificial
  Synthetic oligonucleotide
aggagctctcgttgtcggcgtggtgtgcgcagcaatactacgccggcacgt

SEQ ID NO: 323914 - DNA, 60 bp, Artificial
  Synthetic oligonucleotide
aggagctgtattcattgggttcttaggagcagcaggaagcactatgggcgcggcgtcaat

SEQ ID NO: 323915 - DNA, 60 bp, Artificial
  Synthetic oligonucleotide
aggagctgttggatgagtctacagacatcacagggttagacacggttcagaaattgatta

SEQ ID NO: 323916 - DNA, 50 bp, Artificial
  Synthetic oligonucleotide
aggagcttcggtctcatcatgacacccccagacaagagtgctgaatttgt

SEQ ID NO: 323917 - DNA, 53 bp, Artificial
  Synthetic oligonucleotide
aggagcttttattaggtgaagtacagttggtgtgtcctaactgcagagagaag

SEQ ID NO: 323918 - DNA, 50 bp, Artificial
  Synthetic oligonucleotide
aggaggaaactcgtcaaaggctgcgtagagcctttgatactctagcatga

SEQ ID NO: 323919 - DNA, 59 bp, Artificial
  Synthetic oligonucleotide
aggaggaaattaccagcagggggtgatccacccggagatgagcggacaagccacatcca

SEQ ID NO: 323920 - DNA, 56 bp, Artificial
  Synthetic oligonucleotide
aggaggaacaaatacctagaagagcatcccagcgctgggaaggaccctaagaagac

SEQ ID NO: 323921 - DNA, 60 bp, Artificial
  Synthetic oligonucleotide
aggaggaacatcaggcaggtccaaaccgatcagggccacttcacaatgctaggagtgcga

SEQ ID NO: 323922 - DNA, 57 bp, Artificial
  Synthetic oligonucleotide
aggaggaatctccgacgacgaaacgtcgtcatctccaggggtatctgcaattgaagg

SEQ ID NO: 323923 - DNA, 57 bp, Artificial
  Synthetic oligonucleotide
aggaggacattcaacaacaccaaagggagagatgtattaatggtatggggagtccac

SEQ ID NO: 323924 - DNA, 60 bp, Artificial
  Synthetic oligonucleotide
aggaggaccctctgcaagcgaacttgaagcagaggaagctcgtacaaagtggccactaca

SEQ ID NO: 323925 - DNA, 53 bp, Artificial
  Synthetic oligonucleotide
aggaggacgaaaacgtcgttgaagttagtttcaatgacctcgcagcccaaaag

SEQ ID NO: 323926 - DNA, 56 bp, Artificial
  Synthetic oligonucleotide
aggaggacgctacaaggatgtaatggactcctgggccagcggcggacccgacggga

SEQ ID NO: 323927 - DNA, 57 bp, Artificial
  Synthetic oligonucleotide
aggaggactgtgacccgaagccactgttccggagattcactcgtgtttggtggtaca

SEQ ID NO: 323928 - DNA, 60 bp, Artificial
  Synthetic oligonucleotide
aggaggagaagtgagaaatgatgatgttgaccaaagtttgattatcgctgctaggaacat

SEQ ID NO: 323929 - DNA, 56 bp, Artificial
  Synthetic oligonucleotide
aggaggagacttttacactatataactaagtgtactgacgaatggctgagtttacc

SEQ ID NO: 323930 - DNA, 57 bp, Artificial
  Synthetic oligonucleotide
aggaggaggaaccttaggaggagtaagcaacacaaattgcacattacctcacaaaga

SEQ ID NO: 323931 - DNA, 59 bp, Artificial
  Synthetic oligonucleotide
aggaggagttgccctcaatgttaattgtcctgcagataagctcaactttgaacttggtg

SEQ ID NO: 323932 - DNA, 56 bp, Artificial
  Synthetic oligonucleotide
aggaggagtttcgcttcctatataactaacagcacttccgaatggctgagtttttc

SEQ ID NO: 323933 - DNA, 56 bp, Artificial
  Synthetic oligonucleotide
aggaggataatggagatgattcctgaaagaaacgaacaaggacaaatactttggag

SEQ ID NO: 323934 - DNA, 59 bp, Artificial
  Synthetic oligonucleotide
aggaggatactcacctggacagatggtactcagagtggacccacccagtacggaattga

SEQ ID NO: 323935 - DNA, 54 bp, Artificial
  Synthetic oligonucleotide
aggaggatctaaatttgaagttaacccgaacccaaattctagcactggactgcg

SEQ ID NO: 323936 - DNA, 55 bp, Artificial
  Synthetic oligonucleotide
aggaggatgagagaattgtcaattagcttgtagccatctggaatgatcaatggca

SEQ ID NO: 323937 - DNA, 53 bp, Artificial
  Synthetic oligonucleotide
aggaggattattacagtcaaattgatgcgctgcagtctgactgggtgactggc

SEQ ID NO: 323938 - DNA, 56 bp, Artificial
  Synthetic oligonucleotide
aggaggcacaagcatttttgcggggcacttaaagtgtagacttaagatggacaaat

SEQ ID NO: 323939 - DNA, 55 bp, Artificial
  Synthetic oligonucleotide
aggaggcacataatgcatggcagtagccatgtctatggatgcaaactgcccaaaa

SEQ ID NO: 323940 - DNA, 55 bp, Artificial
  Synthetic oligonucleotide
aggaggcacccctaccattgttcgccctggggtcacacctgaacttattggtcca

SEQ ID NO: 323941 - DNA, 55 bp, Artificial
  Synthetic oligonucleotide
aggaggcactggcagaggtcccctacaaggccgacaagttcgccgggttggtgta

SEQ ID NO: 323942 - DNA, 53 bp, Artificial
  Synthetic oligonucleotide
aggaggcagcgcgtcatggtgctctcactatgaccctaaagctcagcatcggg

SEQ ID NO: 323943 - DNA, 55 bp, Artificial
  Synthetic oligonucleotide
aggaggcattggaggagcacctgtcccacctgcctggcgtccctttgaaatgcgg

SEQ ID NO: 323944 - DNA, 55 bp, Artificial
  Synthetic oligonucleotide
aggaggccaggattctccacgtccgtttcgcgtggggaacatcctgatctggtgg

SEQ ID NO: 323945 - DNA, 55 bp, Artificial
  Synthetic oligonucleotide
aggaggccagtgaggacgtcgtctgttgctcaatgtcctacacatggacaggcgc

SEQ ID NO: 323946 - DNA, 59 bp, Artificial
  Synthetic oligonucleotide
aggaggctcaaaagaaggacttattggagttgcagaacttaagtaagattgtgcgcagc

SEQ ID NO: 323947 - DNA, 60 bp, Artificial
  Synthetic oligonucleotide
aggaggctggtccgcgatgaacgggagcaagtggtatcgagctgagatcatcagcatcgg

SEQ ID NO: 323948 - DNA, 56 bp, Artificial
  Synthetic oligonucleotide
aggaggcttaataggcttaagaataattttaggtgtgctctctatagtgaaaagag

SEQ ID NO: 323949 - DNA, 55 bp, Artificial
  Synthetic oligonucleotide
aggaggctttcacctacctctgtactgcaccggggtgcgccactcaggcacctgt

SEQ ID NO: 323950 - DNA, 50 bp, Artificial
  Synthetic oligonucleotide
aggagggaagctgtggcgtggtcccccagaacagacttgagatggccatg

SEQ ID NO: 323951 - DNA, 60 bp, Artificial
  Synthetic oligonucleotide
aggagggaatctatctgttagcgagggtgctactacgctgggagctatcaatgcaagcac

SEQ ID NO: 323952 - DNA, 57 bp, Artificial
  Synthetic oligonucleotide
aggagggcagcaacactttttacaggacaatctaattgacttgggatgcccaaatat

SEQ ID NO: 323953 - DNA, 60 bp, Artificial
  Synthetic oligonucleotide
aggagggcgttgttgcctcggttcttgtcaagagggcctctggcgagatgcttgctctgg

SEQ ID NO: 323954 - DNA, 56 bp, Artificial
  Synthetic oligonucleotide
aggagggctggaaccactggtcggccagcaaccagatgcttcccctggttcggtac

SEQ ID NO: 323955 - DNA, 53 bp, Artificial
  Synthetic oligonucleotide
aggaggggactgcgggtccgtcgttccatccttttcttaccttgtggccggca

SEQ ID NO: 323956 - DNA, 60 bp, Artificial
  Synthetic oligonucleotide
aggaggggtgcaggttactgacagcactacagggcgtctatgcatgttagtagaccatga

SEQ ID NO: 323957 - DNA, 59 bp, Artificial
  Synthetic oligonucleotide
aggagggtatcttcatgctcggacgcgtactactgagatgggaactaacgaaggcacaa

SEQ ID NO: 323958 - DNA, 55 bp, Artificial
  Synthetic oligonucleotide
aggagggtccgttcaactgattagcaagaaaagtacccatgttcactataaagaa

SEQ ID NO: 323959 - DNA, 55 bp, Artificial
  Synthetic oligonucleotide
aggagggtgtgtgtatgggtgttgtcaaagttgtgtgagacgttgcagctttgtg

SEQ ID NO: 323960 - DNA, 56 bp, Artificial
  Synthetic oligonucleotide
aggaggtagaaaagagcccagggggatgtatgcagggataccccattcctgtagga

SEQ ID NO: 323961 - DNA, 55 bp, Artificial
  Synthetic oligonucleotide
aggaggtatcattccgagtgggactccacgagtacccggtgggatcgcaattacc

SEQ ID NO: 323962 - DNA, 54 bp, Artificial
  Synthetic oligonucleotide
aggaggtatcatttagggtaggactccacagctacccggtggggtcgcaattac

SEQ ID NO: 323963 - DNA, 57 bp, Artificial
  Synthetic oligonucleotide
aggaggtcacattccaggtcgggctccaccaatacttggttgggtcacagctcccat

SEQ ID NO: 323964 - DNA, 52 bp, Artificial
  Synthetic oligonucleotide
aggaggtcctttaggaattggaacaacaggtcaccccttgctaaataagtta

SEQ ID NO: 323965 - DNA, 56 bp, Artificial
  Synthetic oligonucleotide
aggaggtcgattaggtatgataccgaaacacttcctttacgtgatggaacattatg

SEQ ID NO: 323966 - DNA, 60 bp, Artificial
  Synthetic oligonucleotide
aggaggtgtagagcaatatagtgaagaggatctaaggaaactgttggcagacaatttaga

SEQ ID NO: 323967 - DNA, 53 bp, Artificial
  Synthetic oligonucleotide
aggaggtgtaggtacgtttatcctaccaaggtttgccgacacctgttgttgga

SEQ ID NO: 323968 - DNA, 54 bp, Artificial
  Synthetic oligonucleotide
aggaggttaaaaattgggacaccaatggtaaatgagaccccgatacatcggtgc

SEQ ID NO: 323969 - DNA, 53 bp, Artificial
  Synthetic oligonucleotide
aggaggttgtatgggctctcgtggtcccgtgccgaagcgttcagaggaacgca

SEQ ID NO: 323970 - DNA, 55 bp, Artificial
  Synthetic oligonucleotide
aggaggtttgataggcttaagaatagtttttgctgtgttttctatagtaagtaga

SEQ ID NO: 323971 - DNA, 55 bp, Artificial
  Synthetic oligonucleotide
aggagtaaaattgagcaacatgggggtttaccaaatccttgctatttacgctaca

SEQ ID NO: 323972 - DNA, 59 bp, Artificial
  Synthetic oligonucleotide
aggagtaaagctggattccagtggcaacgtttacaaaatactgtcgatttacagctgca

SEQ ID NO: 323973 - DNA, 57 bp, Artificial
  Synthetic oligonucleotide
aggagtaagagttagtaaaatgggggtggatgaatattccagcactgagagagtggt

SEQ ID NO: 323974 - DNA, 57 bp, Artificial
  Synthetic oligonucleotide
aggagtacctggttgcggtaagagtagttgtatccgtaaattgatcaatcttgattc

SEQ ID NO: 323975 - DNA, 55 bp, Artificial
  Synthetic oligonucleotide
aggagtacgtggagataaggcgggtgggagacttccactacataacgggtatgac

SEQ ID NO: 323976 - DNA, 55 bp, Artificial
  Synthetic oligonucleotide
aggagtaggcatctttttactccccgctcggtagagcggcaaaccctagctacac

SEQ ID NO: 323977 - DNA, 60 bp, Artificial
  Synthetic oligonucleotide
aggagtatggaggaccaagcttatgatcaatacctgcacagaatccaagcagctagaaca

SEQ ID NO: 323978 - DNA, 60 bp, Artificial
  Synthetic oligonucleotide
aggagtattattgatgaccatctgcggggaatgtttcacaatggaacttgtgaactgcct

SEQ ID NO: 323979 - DNA, 53 bp, Artificial
  Synthetic oligonucleotide
aggagtcaaggtactatcaaaggatcgtttattgctggtacctgtggatcagt

SEQ ID NO: 323980 - DNA, 60 bp, Artificial
  Synthetic oligonucleotide
aggagtcaatgcgcctggtgaatgacgttggtgtggatattatgagttcacgagccccca

SEQ ID NO: 323981 - DNA, 59 bp, Artificial
  Synthetic oligonucleotide
aggagtcacaggcacgcgttgagtctatcctcgccaacactgacctcacgactaaacag

SEQ ID NO: 323982 - DNA, 59 bp, Artificial
  Synthetic oligonucleotide
aggagtcatggtacaggacttctatggtgttcttcattgatgtttccagtccgttgaag

SEQ ID NO: 323983 - DNA, 55 bp, Artificial
  Synthetic oligonucleotide
aggagtccacacggagttgggcagagaaatcacctccggaggaccccttcaacga

SEQ ID NO: 323984 - DNA, 54 bp, Artificial
  Synthetic oligonucleotide
aggagtcgtttaaaattccgcaaatttggtcgcggtctagcaggttgacatgcc

SEQ ID NO: 323985 - DNA, 55 bp, Artificial
  Synthetic oligonucleotide
aggagtctaaccgtacggtcaagcacactccctggtggcgtttatgcactaaacg

SEQ ID NO: 323986 - DNA, 60 bp, Artificial
  Synthetic oligonucleotide
aggagtctagattaatgatctttgtactgggaggctgtaggcataaattggtctgcgcac

SEQ ID NO: 323987 - DNA, 54 bp, Artificial
  Synthetic oligonucleotide
aggagtctgaatgtgcctgcattaacggttcctgcttcaccataatgactgatg

SEQ ID NO: 323988 - DNA, 57 bp, Artificial
  Synthetic oligonucleotide
aggagtctgcgggtggctgtcaagttgcgatcacttaaaaacggggcaactgtagga

SEQ ID NO: 323989 - DNA, 56 bp, Artificial
  Synthetic oligonucleotide
aggagtgaaagggtgggcttttgacagtggggatgatgtttggatgggaagaacaa

SEQ ID NO: 323990 - DNA, 59 bp, Artificial
  Synthetic oligonucleotide
aggagtgagagtacgaggacatcggccaggcacccattgggagatcgattttacagaag

SEQ ID NO: 323991 - DNA, 60 bp, Artificial
  Synthetic oligonucleotide
aggagtgagagtcagcaaaatgggagtggatgaatactccagcactgagagagtggtcgt

SEQ ID NO: 323992 - DNA, 58 bp, Artificial
  Synthetic oligonucleotide
aggagtgattcctgacccgagcccaggaccgagtacatgggctacagattgcccgaag

SEQ ID NO: 323993 - DNA, 60 bp, Artificial
  Synthetic oligonucleotide
aggagtgcaattcaactcacaatcaggcactctttggcagttcgcattttcttagttagc

SEQ ID NO: 323994 - DNA, 57 bp, Artificial
  Synthetic oligonucleotide
aggagtggaagtttgagggcgttagcgtgacgccactggctactcgggtacaacata

SEQ ID NO: 323995 - DNA, 58 bp, Artificial
  Synthetic oligonucleotide
aggagtgggacctcttctccccacacatagaatctagatttaaattctgcagcaaacc

SEQ ID NO: 323996 - DNA, 53 bp, Artificial
  Synthetic oligonucleotide
aggagtgggagctttcgggccaggattcaccccaccacacggaggtattttgg

SEQ ID NO: 323997 - DNA, 51 bp, Artificial
  Synthetic oligonucleotide
aggagtgggtagaatcacgattcctgtttcagtgcaaagtgatgtggacac

SEQ ID NO: 323998 - DNA, 55 bp, Artificial
  Synthetic oligonucleotide
aggagtggtattatagaggtggatagatctgaagccaaggaggggttgagaagag

SEQ ID NO: 323999 - DNA, 53 bp, Artificial
  Synthetic oligonucleotide
aggagtggttcgtttgaactaattttcaagtttatgactcaacgtttcctatg

SEQ ID NO: 324000 - DNA, 59 bp, Artificial
  Synthetic oligonucleotide
aggagtgtgccaatcggaagagcgttattgctccctgagtactctacattgtaccgccg

SEQ ID NO: 324001 - DNA, 56 bp, Artificial
  Synthetic oligonucleotide
aggagtgtggaagtatgaataaaaagacactatttcaagaggttgaaggtagatta

SEQ ID NO: 324002 - DNA, 60 bp, Artificial
  Synthetic oligonucleotide
aggagtgttagcgctggacgcgcactctatataccaccatatgaactcttgtgccacgag

SEQ ID NO: 324003 - DNA, 55 bp, Artificial
  Synthetic oligonucleotide
aggagtgttcaaagaggccccgttgtttatgccgacgggagccggtaagagcaca

SEQ ID NO: 324004 - DNA, 52 bp, Artificial
  Synthetic oligonucleotide
aggagtgtttgtattaggttaaatattaggagaggtcttgtttgtattaggt

SEQ ID NO: 324005 - DNA, 56 bp, Artificial
  Synthetic oligonucleotide
aggagttactctatccactcaatttactgacttcgtatcacttaattcgttaagat

SEQ ID NO: 324006 - DNA, 55 bp, Artificial
  Synthetic oligonucleotide
aggagttactgcatgagcacagcctttggacaaattagggagaagcagattgtgg

SEQ ID NO: 324007 - DNA, 60 bp, Artificial
  Synthetic oligonucleotide
aggagttagtgcggatagtgcgctgtagggaccatgcgaaagcggagctacgatacggca

SEQ ID NO: 324008 - DNA, 55 bp, Artificial
  Synthetic oligonucleotide
aggagttatcagtcatgtggcttagcgtgtgtccatgtaccgtcatgtggcgctc

SEQ ID NO: 324009 - DNA, 56 bp, Artificial
  Synthetic oligonucleotide
aggagttcacaatggttggacggggggcaacagccatcctgaggaaagcaactaaa

SEQ ID NO: 324010 - DNA, 60 bp, Artificial
  Synthetic oligonucleotide
aggagttcagattgcttcaaatgagaatgtggaggctatggactctagtaccctggaact

SEQ ID NO: 324011 - DNA, 58 bp, Artificial
  Synthetic oligonucleotide
aggagttcatacgtaaaatcagaagcgtgcctgttggacgctgtctgacccttcccgc

SEQ ID NO: 324012 - DNA, 60 bp, Artificial
  Synthetic oligonucleotide
aggagttgacaggtcacttgctggacacatatagtgtcatgcttgctagtgataacgccg

SEQ ID NO: 324013 - DNA, 54 bp, Artificial
  Synthetic oligonucleotide
aggagttggaactagctttagtaagcttgataaagaaactctaaaggacataat

SEQ ID NO: 324014 - DNA, 60 bp, Artificial
  Synthetic oligonucleotide
aggagttggaatggccgcagacagggagtcaactcaaaaagcagtcgataagataacatc

SEQ ID NO: 324015 - DNA, 60 bp, Artificial
  Synthetic oligonucleotide
aggagtttcctgatgtcatcagaaccctgacaacttaagaccattccctgtggaagagca

SEQ ID NO: 324016 - DNA, 60 bp, Artificial
  Synthetic oligonucleotide
aggataaacccatgcctaatgaagtggctgatctgcttagggccttacgtggtgatgaaa

SEQ ID NO: 324017 - DNA, 55 bp, Artificial
  Synthetic oligonucleotide
aggataaagaatggttggacacagacaagtaaagagcaggttagaaagcaggtag

SEQ ID NO: 324018 - DNA, 58 bp, Artificial
  Synthetic oligonucleotide
aggataacgctaacctgcgagctttcacggaagctatgaccaggtattctgcgacccc

SEQ ID NO: 324019 - DNA, 55 bp, Artificial
  Synthetic oligonucleotide
aggataagcgagccctcggagccttcacggaggctatgacgaggtactcggctcc

SEQ ID NO: 324020 - DNA, 51 bp, Artificial
  Synthetic oligonucleotide
aggataagggacaaaacttccctcagaccacaaacacttatagaaacacgg

SEQ ID NO: 324021 - DNA, 57 bp, Artificial
  Synthetic oligonucleotide
aggataattctaatcgttactttgtaccaatttatcagtctgcgggaacttacagca

SEQ ID NO: 324022 - DNA, 60 bp, Artificial
  Synthetic oligonucleotide
aggatacagcggagctttcaccatcccaatcacaatgactagtaaacaatgcttagttcc

SEQ ID NO: 324023 - DNA, 60 bp, Artificial
  Synthetic oligonucleotide
aggatacagcgggagttttgttcagcatccagaactaaccggactggattgtatgagatc

SEQ ID NO: 324024 - DNA, 56 bp, Artificial
  Synthetic oligonucleotide
aggatacagtggctccttcacactaccggtgaagttaacaaaaagagattgtctgg

SEQ ID NO: 324025 - DNA, 53 bp, Artificial
  Synthetic oligonucleotide
aggatacagtggttccttcacactacctgtagaattgaccaaaagaaattgtc

SEQ ID NO: 324026 - DNA, 56 bp, Artificial
  Synthetic oligonucleotide
aggatacagtggttctttcacactgccggtggaattaacaaaaagagattgtctag

SEQ ID NO: 324027 - DNA, 59 bp, Artificial
  Synthetic oligonucleotide
aggatacataaagaatctgagtaaaccagccaaagctgcgataagaatagcaatgatat

SEQ ID NO: 324028 - DNA, 60 bp, Artificial
  Synthetic oligonucleotide
aggatacattgtaggttgtacgtgctcaaccgatgacgtcacacactgggcacgaggtcc

SEQ ID NO: 324029 - DNA, 54 bp, Artificial
  Synthetic oligonucleotide
aggatacccttacttactggcattctttacgacttttgtaaggagtacagtgtc

SEQ ID NO: 324030 - DNA, 50 bp, Artificial
  Synthetic oligonucleotide
aggatacgaaagattatcttgcttctgcgttccccgaactcaacccgtgg

SEQ ID NO: 324031 - DNA, 60 bp, Artificial
  Synthetic oligonucleotide
aggatacgattagaacatcgtcagtgttagatacaaaattcagtgactggtgggatcgtc

SEQ ID NO: 324032 - DNA, 55 bp, Artificial
  Synthetic oligonucleotide
aggatacgttagaatgtataagcgggtatatggaagagtttgggttcgcgccaag

SEQ ID NO: 324033 - DNA, 55 bp, Artificial
  Synthetic oligonucleotide
aggatactatgaccccagtaaggagttatatgctaaattaagtttggtgggacca

SEQ ID NO: 324034 - DNA, 57 bp, Artificial
  Synthetic oligonucleotide
aggatactcgagttgctccacccgtcgaattcggtcagttcacagaacttgggtcga

SEQ ID NO: 324035 - DNA, 59 bp, Artificial
  Synthetic oligonucleotide
aggatactcttcagcaatcaactcgaaaataggtccaagatctcttctgccttcaggtt

SEQ ID NO: 324036 - DNA, 54 bp, Artificial
  Synthetic oligonucleotide
aggatactgactccacggaagtgtgtcaatgccgatgtccagatgaggggggca

SEQ ID NO: 324037 - DNA, 53 bp, Artificial
  Synthetic oligonucleotide
aggatacttccccgattggcaaaactacacaccaggaccggggaccagatttc

SEQ ID NO: 324038 - DNA, 57 bp, Artificial
  Synthetic oligonucleotide
aggatagcacctgccgccacgaatgctggcgcgaacgtagtcatatagctcatgtga

SEQ ID NO: 324039 - DNA, 59 bp, Artificial
  Synthetic oligonucleotide
aggatagcgaggctacagcagaggaccaaccgacccaaccagacgttgccacatgtagg

SEQ ID NO: 324040 - DNA, 60 bp, Artificial
  Synthetic oligonucleotide
aggataggagaagatgcccacatccttgtcacaagagaaccatacctctcatgtggacca

SEQ ID NO: 324041 - DNA, 57 bp, Artificial
  Synthetic oligonucleotide
aggatagtgtctttggtatagagggcttagaagcccttgaccttaataccagtgcag

SEQ ID NO: 324042 - DNA, 60 bp, Artificial
  Synthetic oligonucleotide
aggatataacagatggataaccctcaatgatgtgaaatctaggtcgtctcttctggatta

SEQ ID NO: 324043 - DNA, 60 bp, Artificial
  Synthetic oligonucleotide
aggatataaggggtcatgcaacctgcgggggctgcacagattgcttcaacgacgttgcat

SEQ ID NO: 324044 - DNA, 60 bp, Artificial
  Synthetic oligonucleotide
aggatataatggatgggccacaatagatgttgaatatagagacccggccccttacgcaca

SEQ ID NO: 324045 - DNA, 60 bp, Artificial
  Synthetic oligonucleotide
aggatatataatccctgctttagattgtacgggagctcaccactgctcgctgcgtcgaga

SEQ ID NO: 324046 - DNA, 58 bp, Artificial
  Synthetic oligonucleotide
aggatatcgcacgcaatgaaatgtacaaggacgcgatcgaaaggtacgtaactaagaa

SEQ ID NO: 324047 - DNA, 59 bp, Artificial
  Synthetic oligonucleotide
aggatatctagaggagtggcctgaagcagactgctggacaacagaatttcttccgttac

SEQ ID NO: 324048 - DNA, 52 bp, Artificial
  Synthetic oligonucleotide
aggatatgcagcgtacaaaggcgcagcagaaaccaacacacttaatgaggcc

SEQ ID NO: 324049 - DNA, 55 bp, Artificial
  Synthetic oligonucleotide
aggatattcactggtcgggatagaccccttcaaactacttcaaaacagtcaagtg

SEQ ID NO: 324050 - DNA, 60 bp, Artificial
  Synthetic oligonucleotide
aggatattggtttccgtgtcaatgctaatacggcagccttgagcaacaaagtccttgcag

SEQ ID NO: 324051 - DNA, 58 bp, Artificial
  Synthetic oligonucleotide
aggatcaaacgcgaatgacggttgcgaacttgaattccaagcgatactgaaactggtg

SEQ ID NO: 324052 - DNA, 60 bp, Artificial
  Synthetic oligonucleotide
aggatcaaagttccagtagtcaagagctacgaggaagaagttgcagacatgcgcctgagc

SEQ ID NO: 324053 - DNA, 53 bp, Artificial
  Synthetic oligonucleotide
aggatcaactgcctctcgtgtgactattgcggaccctactaatgcaggtgccg

SEQ ID NO: 324054 - DNA, 60 bp, Artificial
  Synthetic oligonucleotide
aggatcaggggcatttggcacctcgacactggtcccggctgggagcactgagtacatccc

SEQ ID NO: 324055 - DNA, 59 bp, Artificial
  Synthetic oligonucleotide
aggatcatcaaaatcctatatcaaagcagtaagtattaatgtaatgcaatccttgacca

SEQ ID NO: 324056 - DNA, 58 bp, Artificial
  Synthetic oligonucleotide
aggatcatcaaaatcttatatcaaagcagtaagtatatctatgtaatgttaagtttaa

SEQ ID NO: 324057 - DNA, 60 bp, Artificial
  Synthetic oligonucleotide
aggatcatcccggtctagcaatgtcctacgatcagaggagttcagcagcatccgtacaga

SEQ ID NO: 324058 - DNA, 60 bp, Artificial
  Synthetic oligonucleotide
aggatccaacgccaaaagcatggatctaggcaccacaccaggtgactgcggctgccccta

SEQ ID NO: 324059 - DNA, 55 bp, Artificial
  Synthetic oligonucleotide
aggatccaccgaccttagttaaatcccctggcatggagccctgaaggaaaactga

SEQ ID NO: 324060 - DNA, 57 bp, Artificial
  Synthetic oligonucleotide
aggatccacgatatctatacccaacatgtaataacaaatacaaccgggacacacttc

SEQ ID NO: 324061 - DNA, 60 bp, Artificial
  Synthetic oligonucleotide
aggatcccacaccgatgattactatgatttcagtgcttgctggagtggtgtcagctgccg

SEQ ID NO: 324062 - DNA, 55 bp, Artificial
  Synthetic oligonucleotide
aggatccccgatccggagtcaaggggcctatcgggcaggagcagctgagcggagg

SEQ ID NO: 324063 - DNA, 55 bp, Artificial
  Synthetic oligonucleotide
aggatccctatggtgctatctcccttgcattcatgcgattattgtcgatgtttca

SEQ ID NO: 324064 - DNA, 52 bp, Artificial
  Synthetic oligonucleotide
aggatccggttccaatactcgaagccgctgaatacgcttcgagtctaacacg

SEQ ID NO: 324065 - DNA, 55 bp, Artificial
  Synthetic oligonucleotide
aggatcctagaaacacacaggatcatgttcgttcattgtgcctattggcctggca

SEQ ID NO: 324066 - DNA, 58 bp, Artificial
  Synthetic oligonucleotide
aggatccttaggtggggatttgacaagtactctaaatggtatattgactcacgattgc

SEQ ID NO: 324067 - DNA, 53 bp, Artificial
  Synthetic oligonucleotide
aggatcgaccaggagaagggcttgtcacataggtgggagtacaggtttaaagg

SEQ ID NO: 324068 - DNA, 60 bp, Artificial
  Synthetic oligonucleotide
aggatcgactatcagatctgttggctcatcagtttctgcatggacggaagtgtcaagttc

SEQ ID NO: 324069 - DNA, 50 bp, Artificial
  Synthetic oligonucleotide
aggatcgactggaaagagtatatcctatggaaatccctggtttcccctca

SEQ ID NO: 324070 - DNA, 58 bp, Artificial
  Synthetic oligonucleotide
aggatcgactttcattggatgctattggacccaggggatacagtcacttttaccttca

SEQ ID NO: 324071 - DNA, 60 bp, Artificial
  Synthetic oligonucleotide
aggatcgagagtgcgagaaaagtttgtctcggatatccacatcgacgacagctcactttg

SEQ ID NO: 324072 - DNA, 55 bp, Artificial
  Synthetic oligonucleotide
aggatcgattctggggttatgagggagtaccacagaacaaaatatcagctgcacg

SEQ ID NO: 324073 - DNA, 55 bp, Artificial
  Synthetic oligonucleotide
aggatcgcttacatctccgattctctacacttcatggaaccagctgatgtgaccc

SEQ ID NO: 324074 - DNA, 60 bp, Artificial
  Synthetic oligonucleotide
aggatcgcttctacattcgacatgtattcaagcgtgtgatatcagtcgagaaggatagtc

SEQ ID NO: 324075 - DNA, 59 bp, Artificial
  Synthetic oligonucleotide
aggatcggatgggaacagtatatcctatgggaatccctgcgtccctctcgtgtccagcc

SEQ ID NO: 324076 - DNA, 58 bp, Artificial
  Synthetic oligonucleotide
aggatcggctggaaagagtatatcctatgggaatccccggtctcctctcaggtccagc

SEQ ID NO: 324077 - DNA, 60 bp, Artificial
  Synthetic oligonucleotide
aggatcggtactacatccgccatgtattcaagcgcgtaatatctgtcgagaaagacacaa

SEQ ID NO: 324078 - DNA, 58 bp, Artificial
  Synthetic oligonucleotide
aggatcgtgttaaatcattggagtctaccgcgagtcatggtctatctttttcgcctcc

SEQ ID NO: 324079 - DNA, 50 bp, Artificial
  Synthetic oligonucleotide
aggatctatacaagaaggacagctcctatgtagcagtgggttcagaaacc

SEQ ID NO: 324080 - DNA, 57 bp, Artificial
  Synthetic oligonucleotide
aggatctcttccctggaaattaccatcattccaatggttctttcccaactaggcagc

SEQ ID NO: 324081 - DNA, 60 bp, Artificial
  Synthetic oligonucleotide
aggatctgcgtgtgctgcaggtcactttgctgagcctcagcctggtgtgcaccacctgtg

SEQ ID NO: 324082 - DNA, 60 bp, Artificial
  Synthetic oligonucleotide
aggatctgcttatttagctaaaccatcgatgagagacatccctggcgccatatcaacttg

SEQ ID NO: 324083 - DNA, 54 bp, Artificial
  Synthetic oligonucleotide
aggatctggcaacatgacccggagctcgtcacagagggagttacagtgctgatg

SEQ ID NO: 324084 - DNA, 60 bp, Artificial
  Synthetic oligonucleotide
aggatctgttgtcatgcatggtaataatcaattcggatttgtcaaaccgttggacgcatc

SEQ ID NO: 324085 - DNA, 60 bp, Artificial
  Synthetic oligonucleotide
aggatcttcgttttacgcagagatgaaatggcttttgtcaaatacagacaatgctgcttt

SEQ ID NO: 324086 - DNA, 60 bp, Artificial
  Synthetic oligonucleotide
aggatcttgtggtttcaaccgcagcagctatggtacatggtaacactctttcatatgcag

SEQ ID NO: 324087 - DNA, 52 bp, Artificial
  Synthetic oligonucleotide
aggatgaacgaaggcttgcactactacgtgagagagccgctgcctgggatca

SEQ ID NO: 324088 - DNA, 60 bp, Artificial
  Synthetic oligonucleotide
aggatgaactccaggactgtaaaattgcccccttgatggtagcatacatgctagaaagag

SEQ ID NO: 324089 - DNA, 53 bp, Artificial
  Synthetic oligonucleotide
aggatgaagataagaatggagaggtaaagactggttgcggagtcatgaagatc

SEQ ID NO: 324090 - DNA, 55 bp, Artificial
  Synthetic oligonucleotide
aggatgacccatacgcaatgcaagccttgaagttcaataccgggcgtaacgctgc

SEQ ID NO: 324091 - DNA, 60 bp, Artificial
  Synthetic oligonucleotide
aggatgactcagattgtgttatccttgttctggctatcgtatgtcggtgtaatccatcag

SEQ ID NO: 324092 - DNA, 55 bp, Artificial
  Synthetic oligonucleotide
aggatgagaatacacagagaatccggattatgtcaaggttataagagtctacgtg

SEQ ID NO: 324093 - DNA, 55 bp, Artificial
  Synthetic oligonucleotide
aggatgaggccctcctgtatcgtcaaggtgtggctctacagcagatggctttcgc

SEQ ID NO: 324094 - DNA, 55 bp, Artificial
  Synthetic oligonucleotide
aggatgaggtattgcttgttcgtcacaaactaaccgtttgccaaaacatcgatca

SEQ ID NO: 324095 - DNA, 56 bp, Artificial
  Synthetic oligonucleotide
aggatgagtttggaagacgtacttcaacaagcgaggcgccaccgggtaggagtata

SEQ ID NO: 324096 - DNA, 55 bp, Artificial
  Synthetic oligonucleotide
aggatgataaagagaggagtcaatgaccgcaatttctggagaggtgaaaacggac

SEQ ID NO: 324097 - DNA, 55 bp, Artificial
  Synthetic oligonucleotide
aggatgcagaaagaggcaaattgaaaaggagggcaattgcaacacccggaatgca

SEQ ID NO: 324098 - DNA, 57 bp, Artificial
  Synthetic oligonucleotide
aggatgcctacactgccaccctagaacctagcattatcacctaccaacccttctgcc

SEQ ID NO: 324099 - DNA, 60 bp, Artificial
  Synthetic oligonucleotide
aggatgcgggtgcagcacttttaacaacaaatgaatcagcttgcttaagagcgcaggaag

SEQ ID NO: 324100 - DNA, 57 bp, Artificial
  Synthetic oligonucleotide
aggatgctatgcctaaagcaatccaatacaacgaagttaggattaagaggaagaagg

SEQ ID NO: 324101 - DNA, 60 bp, Artificial
  Synthetic oligonucleotide
aggatgctgcatctagtggtgcctcacgactggatttttctcaggaccctagtaagttta

SEQ ID NO: 324102 - DNA, 55 bp, Artificial
  Synthetic oligonucleotide
aggatgctgttttgtctatccggatggagtggaggagtcggcggcactatggggt

SEQ ID NO: 324103 - DNA, 52 bp, Artificial
  Synthetic oligonucleotide
aggatgctttaagcctatgtcagcctctgaaaagcagttccagatagaggat

SEQ ID NO: 324104 - DNA, 56 bp, Artificial
  Synthetic oligonucleotide
aggatggaacatcagtaaacctacgggaaacagagctatggaactcccaagtactg

SEQ ID NO: 324105 - DNA, 60 bp, Artificial
  Synthetic oligonucleotide
aggatggacagcgtgtgcaacctcacatccgttcacaccattagagagactggaccccga

SEQ ID NO: 324106 - DNA, 60 bp, Artificial
  Synthetic oligonucleotide
aggatggacaggcatgatagatgggtggtatgggtaccaccaccagaatgagcaaggatc

SEQ ID NO: 324107 - DNA, 57 bp, Artificial
  Synthetic oligonucleotide
aggatggaccccgagcacgtacgcacaagtagcgactgccaacggaatccgagggct

SEQ ID NO: 324108 - DNA, 59 bp, Artificial
  Synthetic oligonucleotide
aggatggatagttagacctaggtgtgagtatcaagcaggacacaacaaggtagggtctc

SEQ ID NO: 324109 - DNA, 60 bp, Artificial
  Synthetic oligonucleotide
aggatggcaccaacactcacattatggctactgaggcatctaattacgcccagtatcggg

SEQ ID NO: 324110 - DNA, 60 bp, Artificial
  Synthetic oligonucleotide
aggatggccaacaggatcagtgtactttaaagaatatgctgatatagcggccttttcagt

SEQ ID NO: 324111 - DNA, 56 bp, Artificial
  Synthetic oligonucleotide
aggatggccgacaacacaggtacagacaacaagggtacggggtgctcaggatggtt

SEQ ID NO: 324112 - DNA, 56 bp, Artificial
  Synthetic oligonucleotide
aggatgggaactgaaagcatgaattttgccaagggtccggaaatttcagcaagacc

SEQ ID NO: 324113 - DNA, 55 bp, Artificial
  Synthetic oligonucleotide
aggatgggataggcttctcacatctctacctgagggatgggtttattgtgacgct

SEQ ID NO: 324114 - DNA, 60 bp, Artificial
  Synthetic oligonucleotide
aggatgggggctgtgaccaccgaatcagcatttggcctgatatgtgcaacctgtgaacag

SEQ ID NO: 324115 - DNA, 53 bp, Artificial
  Synthetic oligonucleotide
aggatggggtcaaatgtccaagattaagtaaacaattagaagggaacacctgg

SEQ ID NO: 324116 - DNA, 55 bp, Artificial
  Synthetic oligonucleotide
aggatgggtttactgcgatgctgatggatcacaattcgacagctcgttgtcaccc

SEQ ID NO: 324117 - DNA, 54 bp, Artificial
  Synthetic oligonucleotide
aggatggtactgtacactgttgggcagaatctgggaagaactcattctagttgg

SEQ ID NO: 324118 - DNA, 59 bp, Artificial
  Synthetic oligonucleotide
aggatggtcactctatgcaggttactgtagttggtaagtcccgccgcgctattcgtgac

SEQ ID NO: 324119 - DNA, 60 bp, Artificial
  Synthetic oligonucleotide
aggatggtccgacaacggtgaccccatgttcaatcagacatgggccacctttgcgatgaa

SEQ ID NO: 324120 - DNA, 57 bp, Artificial
  Synthetic oligonucleotide
aggatggtcgtgcaatctatggtaacgtttgtagaaaggatcttaccgagtatacta

SEQ ID NO: 324121 - DNA, 55 bp, Artificial
  Synthetic oligonucleotide
aggatggtgaacccggtgagacagagccccgccacgctttgtcacccgtggacat

SEQ ID NO: 324122 - DNA, 60 bp, Artificial
  Synthetic oligonucleotide
aggatggtggccaatactacagtgtcttaaagggcaggaatcactgagatataggccgct

SEQ ID NO: 324123 - DNA, 58 bp, Artificial
  Synthetic oligonucleotide
aggatgtacaatccctccgaactcctgacggagctccctccgaagaggtgtcagtcga

SEQ ID NO: 324124 - DNA, 52 bp, Artificial
  Synthetic oligonucleotide
aggatgtacttaccaccatatatagcagcgcgtgacatgcaagcgccaggaa

SEQ ID NO: 324125 - DNA, 59 bp, Artificial
  Synthetic oligonucleotide
aggatgtagctaggcagcggaccgttgggtataaataggcttgttgttgtcgagagcgc

SEQ ID NO: 324126 - DNA, 60 bp, Artificial
  Synthetic oligonucleotide
aggatgtagtgtgctgctcaatgtcctactcatggacgggggctcttgttaccccttgcg

SEQ ID NO: 324127 - DNA, 51 bp, Artificial
  Synthetic oligonucleotide
aggatgtattaacgtgtaactatacggggttacctggaaccattccgaatt

SEQ ID NO: 324128 - DNA, 60 bp, Artificial
  Synthetic oligonucleotide
aggatgtcacgtgggaagatgtacaacagtccgaggtgaacctgatgaaagagttgcgac

SEQ ID NO: 324129 - DNA, 60 bp, Artificial
  Synthetic oligonucleotide
aggatgtccaaactgacattccaagtgaaccatggacttcaggccatgagtggatcctag

SEQ ID NO: 324130 - DNA, 55 bp, Artificial
  Synthetic oligonucleotide
aggatgtcgatcaacccactggactttatggcgttgtgtcgattgttattgtccg

SEQ ID NO: 324131 - DNA, 60 bp, Artificial
  Synthetic oligonucleotide
aggatgtcgcctgcttatcaccaaggtcaggtgctatatatgcttcaataattgcgtgtg

SEQ ID NO: 324132 - DNA, 56 bp, Artificial
  Synthetic oligonucleotide
aggatgtcttaccacagacactacaacttttgaagaagttgcaacggctgaaaaat

SEQ ID NO: 324133 - DNA, 55 bp, Artificial
  Synthetic oligonucleotide
aggatgtgccgcaccatcaggtaggtggtggcggcctggcgtccacgcttcggat

SEQ ID NO: 324134 - DNA, 53 bp, Artificial
  Synthetic oligonucleotide
aggatgtgcttaaagtagcagaggatgaggtagagtaccttacaggagttata

SEQ ID NO: 324135 - DNA, 59 bp, Artificial
  Synthetic oligonucleotide
aggatgtggttaaagcgcgccagtttgctagcgaggcacaagttgttttcgctacgcca

SEQ ID NO: 324136 - DNA, 55 bp, Artificial
  Synthetic oligonucleotide
aggatgttatcgaaactctctcgtccaccatccacagagacacaatcgcagcacc

SEQ ID NO: 324137 - DNA, 57 bp, Artificial
  Synthetic oligonucleotide
aggatgttcccggcccactccttccaattctgagtccgtatgtaatggcttgggaca

SEQ ID NO: 324138 - DNA, 56 bp, Artificial
  Synthetic oligonucleotide
aggatgttcctggcaatgataacctacataacaagaaatcaacccgaatggtttag

SEQ ID NO: 324139 - DNA, 53 bp, Artificial
  Synthetic oligonucleotide
aggatgttgtgaacggcttttaggtcaggaagtcttgccttagaagcactctc

SEQ ID NO: 324140 - DNA, 55 bp, Artificial
  Synthetic oligonucleotide
aggatgttgttaatcaacagggtagtgctcttaaccatctcacttcacaattgag

SEQ ID NO: 324141 - DNA, 60 bp, Artificial
  Synthetic oligonucleotide
aggatgtttcgagttatatcataaatgtgatgatcagtgcatggagacaattcgaaacgg

SEQ ID NO: 324142 - DNA, 59 bp, Artificial
  Synthetic oligonucleotide
aggatgtttctggcgatgataacgtatatcacaaaaaatcagcctgaatggtttagaaa

SEQ ID NO: 324143 - DNA, 60 bp, Artificial
  Synthetic oligonucleotide
aggatgtttgggccaatgcttaccgccagactgacacagcgagcaagtcaatcattcagg

SEQ ID NO: 324144 - DNA, 55 bp, Artificial
  Synthetic oligonucleotide
aggattaacgtattctatagaggattgtctagctctgctagatagagacacacaa

SEQ ID NO: 324145 - DNA, 59 bp, Artificial
  Synthetic oligonucleotide
aggattaagaccagactgttcactataagacaggaaatggccagcaggggtctgtggga

SEQ ID NO: 324146 - DNA, 55 bp, Artificial
  Synthetic oligonucleotide
aggattaattgttccagacctggcaataatactagacagagtgtacgaataggac

SEQ ID NO: 324147 - DNA, 59 bp, Artificial
  Synthetic oligonucleotide
aggattacaacagagacctacttgtgagtactaccacggcacaagggtgtgacattatc

SEQ ID NO: 324148 - DNA, 55 bp, Artificial
  Synthetic oligonucleotide
aggattacaagaatctttgtgggaactggcttcagaaataacaaacagagctgga

SEQ ID NO: 324149 - DNA, 55 bp, Artificial
  Synthetic oligonucleotide
aggattacgtcgatgtacagttcgcagatcgtgttactgctcactggaagcgggg

SEQ ID NO: 324150 - DNA, 54 bp, Artificial
  Synthetic oligonucleotide
aggattagctcatctttcagcttcggtgggttcacctttaaaagaacaagtggg

SEQ ID NO: 324151 - DNA, 52 bp, Artificial
  Synthetic oligonucleotide
aggattatctcagtcagatcatgcgaaagctgatactcgtctcgctgtgatt

SEQ ID NO: 324152 - DNA, 60 bp, Artificial
  Synthetic oligonucleotide
aggattatgaagtggcaccatgccaggtgatttacaatggagccacctataatgtcagct

SEQ ID NO: 324153 - DNA, 50 bp, Artificial
  Synthetic oligonucleotide
aggattcaagcaagggcaacattcgtctgcccaaagcgggagaattaaga

SEQ ID NO: 324154 - DNA, 60 bp, Artificial
  Synthetic oligonucleotide
aggattcattgtccgtcatcctcttgtcgtgaatctccacgatgacggaacctgcggcgt

SEQ ID NO: 324155 - DNA, 55 bp, Artificial
  Synthetic oligonucleotide
aggattccgaagtcatccggaatcggtatggagggaggtacaacctccatcttac

SEQ ID NO: 324156 - DNA, 57 bp, Artificial
  Synthetic oligonucleotide
aggattcggaaggatctgtagttcgagtgcgtgcaaaattgcgtatacgttacagac

SEQ ID NO: 324157 - DNA, 54 bp, Artificial
  Synthetic oligonucleotide
aggattcggacgcaaacctgtgagtggaagttcgctctttattggggggtacac

SEQ ID NO: 324158 - DNA, 50 bp, Artificial
  Synthetic oligonucleotide
aggattctaaaagacacaacacccatgttcccttgttacggttcctacgc

SEQ ID NO: 324159 - DNA, 60 bp, Artificial
  Synthetic oligonucleotide
aggattctccacactcttgaactctgccaacccttcatcagtcagaatgactcttttgtc

SEQ ID NO: 324160 - DNA, 59 bp, Artificial
  Synthetic oligonucleotide
aggattcttatggtatatgttataggattcttgtcgtagtcgtttggatatgattattg

SEQ ID NO: 324161 - DNA, 58 bp, Artificial
  Synthetic oligonucleotide
aggattgaacaattgatactgcaatgtagattgtaagtagctgctagaggttgtgacc

SEQ ID NO: 324162 - DNA, 60 bp, Artificial
  Synthetic oligonucleotide
aggattgagcaagtttggctcaagcaacatagttgtcatgacaagtgggtttgcgtttca

SEQ ID NO: 324163 - DNA, 60 bp, Artificial
  Synthetic oligonucleotide
aggattgcagtgtagctggatggcttcttggaaacccaatgtgtgatgaattcctgaatg

SEQ ID NO: 324164 - DNA, 54 bp, Artificial
  Synthetic oligonucleotide
aggattgccacattcgaccgtacatgtctgcaagtcagggacacttgacttgcg

SEQ ID NO: 324165 - DNA, 51 bp, Artificial
  Synthetic oligonucleotide
aggattgcgagggtcactctgagctggtcccttgcgaattctgcgacacag

SEQ ID NO: 324166 - DNA, 60 bp, Artificial
  Synthetic oligonucleotide
aggattgcgccactatgtgtaggcactacaaaagggccgaaaagcaggcaatgacaatgt

SEQ ID NO: 324167 - DNA, 55 bp, Artificial
  Synthetic oligonucleotide
aggattgctgtggcccgtattctccttaggtgcaccatgtggcaccgcatcccct

SEQ ID NO: 324168 - DNA, 54 bp, Artificial
  Synthetic oligonucleotide
aggattggacaatcagggggaggaaatcctctctcaactataccgcccccttaa

SEQ ID NO: 324169 - DNA, 56 bp, Artificial
  Synthetic oligonucleotide
aggattggcgtctgacgcagcgtacggaataaagatcgcgatggcaagcatactga

SEQ ID NO: 324170 - DNA, 60 bp, Artificial
  Synthetic oligonucleotide
aggattgggagaccccactctcttgcgaccataagatgcttgatttcgtagtggtgcgtg

SEQ ID NO: 324171 - DNA, 59 bp, Artificial
  Synthetic oligonucleotide
aggattggtagtcctcaatattctcctacatatagttagcattacaataacagtgttgg

SEQ ID NO: 324172 - DNA, 52 bp, Artificial
  Synthetic oligonucleotide
aggattgtgccactatgtgtaggcactacaaaagagccgagaggcaacaaat

SEQ ID NO: 324173 - DNA, 50 bp, Artificial
  Synthetic oligonucleotide
aggattgtgctgcctttgatctaaaacaatttagacttttgtggaaaaat

SEQ ID NO: 324174 - DNA, 55 bp, Artificial
  Synthetic oligonucleotide
aggatttacaacgaattctttttgacagccaaccaactgtttccagcaaggacaa

SEQ ID NO: 324175 - DNA, 58 bp, Artificial
  Synthetic oligonucleotide
aggatttacatagcagtttaaaatcagctctagaagttgatttggacacagaaggtgg

SEQ ID NO: 324176 - DNA, 58 bp, Artificial
  Synthetic oligonucleotide
aggatttacgggctgaggctatggatggtgtgtggtattgtcaaaacaagttcgaaga

SEQ ID NO: 324177 - DNA, 54 bp, Artificial
  Synthetic oligonucleotide
aggatttagacttcatagacaatagggttcccggagatgggcaggaaattccct

SEQ ID NO: 324178 - DNA, 55 bp, Artificial
  Synthetic oligonucleotide
aggatttcacaaagatggcacgcgagatagcagtgaaacagctcggagagtggcc

SEQ ID NO: 324179 - DNA, 56 bp, Artificial
  Synthetic oligonucleotide
aggatttcatcgattacgctgactcaaagaattacgacaacggggccgttcgctat

SEQ ID NO: 324180 - DNA, 55 bp, Artificial
  Synthetic oligonucleotide
aggatttctggcaaaccacacagggtatgagccaaattgcagatgcactgagagc

SEQ ID NO: 324181 - DNA, 59 bp, Artificial
  Synthetic oligonucleotide
aggatttgaaataaagctcagtagaagagttagacactttgcctaggatccactgtgcg

SEQ ID NO: 324182 - DNA, 57 bp, Artificial
  Synthetic oligonucleotide
aggatttgataaatcttatcacatagtgcgtggaatcgtttttaaactagatattat

SEQ ID NO: 324183 - DNA, 50 bp, Artificial
  Synthetic oligonucleotide
aggatttgcgcttagagtgggacacacggagaaaggaattgaggaagttc

SEQ ID NO: 324184 - DNA, 58 bp, Artificial
  Synthetic oligonucleotide
aggatttgctattgtttctaaggacaatgggatcagagtaggttcaagaggtcacgta

SEQ ID NO: 324185 - DNA, 58 bp, Artificial
  Synthetic oligonucleotide
aggatttggctaaggcctttccaactttgaattcgttagctgtgctgtatgcaaagaa

SEQ ID NO: 324186 - DNA, 58 bp, Artificial
  Synthetic oligonucleotide
aggatttgggaccgtccagataaagacgccattgttgaaacgagctgcagtgatgggt

SEQ ID NO: 324187 - DNA, 55 bp, Artificial
  Synthetic oligonucleotide
aggatttgtacgtggactgcctgtattcgcaacgtcaatgtgtaattttgccgca

SEQ ID NO: 324188 - DNA, 51 bp, Artificial
  Synthetic oligonucleotide
aggattttcctcgggtactgaccacaccccgaccccagtccaataggtcat

SEQ ID NO: 324189 - DNA, 54 bp, Artificial
  Synthetic oligonucleotide
aggatttttaacaatccttttcctgagggtcacattgaaatatctgggaagccc

SEQ ID NO: 324190 - DNA, 58 bp, Artificial
  Synthetic oligonucleotide
aggcaaaaattgacgaattgaagagacaattggcagataggattgcaactggaaaaaa

SEQ ID NO: 324191 - DNA, 54 bp, Artificial
  Synthetic oligonucleotide
aggcaaagagaattagtatccagaatcgctaggaagtattgggggtatattata

SEQ ID NO: 324192 - DNA, 55 bp, Artificial
  Synthetic oligonucleotide
aggcaaagagctcttgtagctatcaccagggcaagacatgctatcttcgtgtatg

SEQ ID NO: 324193 - DNA, 55 bp, Artificial
  Synthetic oligonucleotide
aggcaaagctttgggctaacaagaagagtaatatagtggtgttcaattacgcgcg

SEQ ID NO: 324194 - DNA, 58 bp, Artificial
  Synthetic oligonucleotide
aggcaaaggtcctggctgtggaaagatacctaaaggatcaacagctcctagagattta

SEQ ID NO: 324195 - DNA, 51 bp, Artificial
  Synthetic oligonucleotide
aggcaaagtagtgtcttacatgaatagtcacagtcatttttggattcaacc

SEQ ID NO: 324196 - DNA, 59 bp, Artificial
  Synthetic oligonucleotide
aggcaaagtattggtgtcccgactcaatggaatacaactgtcccaatctcagccccaga

SEQ ID NO: 324197 - DNA, 55 bp, Artificial
  Synthetic oligonucleotide
aggcaaatcggttgactggttgtcagaccggcccgaggctaccttcagagctcgc

SEQ ID NO: 324198 - DNA, 53 bp, Artificial
  Synthetic oligonucleotide
aggcaaatgatgatatttgatcatgagacctccgctattgaagtgggagcatc

SEQ ID NO: 324199 - DNA, 60 bp, Artificial
  Synthetic oligonucleotide
aggcaaattgaatcgtctaattggcaaaacaaatcagcagtttgagttgatagacaatga

SEQ ID NO: 324200 - DNA, 55 bp, Artificial
  Synthetic oligonucleotide
aggcaacaaaagaactgtgagtatagacaacttgaaattaacccctcaccagaaa

SEQ ID NO: 324201 - DNA, 50 bp, Artificial
  Synthetic oligonucleotide
aggcaaccctgacaaaggccccccaggaaagacccccgtggggcatgggg

SEQ ID NO: 324202 - DNA, 55 bp, Artificial
  Synthetic oligonucleotide
aggcaaccgaatggctgaccaagcggcccgagaaatagcctctaaagaaacccca

SEQ ID NO: 324203 - DNA, 59 bp, Artificial
  Synthetic oligonucleotide
aggcaaccttcagacactgaaaataagagtacatgaggggtatgaggaattcacaatgg

SEQ ID NO: 324204 - DNA, 60 bp, Artificial
  Synthetic oligonucleotide
aggcaactgctatttaccaagaagcactatcctccacctcagcaggctgggaagactcgg

SEQ ID NO: 324205 - DNA, 55 bp, Artificial
  Synthetic oligonucleotide
aggcaactgtgtaaactcctcaggggaactaaagcactaacagaaatagtaccac

SEQ ID NO: 324206 - DNA, 59 bp, Artificial
  Synthetic oligonucleotide
aggcaagaaatagttgacaacaacaattggtcaggatactcagggagtttcattgacta

SEQ ID NO: 324207 - DNA, 60 bp, Artificial
  Synthetic oligonucleotide
aggcaagacccgctgcattgaagcctgctcaattgactatgtgattgcctatagagttgt

SEQ ID NO: 324208 - DNA, 60 bp, Artificial
  Synthetic oligonucleotide
aggcaagactactgatcctgttgtgtgcacttgcagctacagatgcagacacaatatgta

SEQ ID NO: 324209 - DNA, 55 bp, Artificial
  Synthetic oligonucleotide
aggcaagactgcctgttattcgttgtttagttcgttttctaagcataatgtacga

SEQ ID NO: 324210 - DNA, 60 bp, Artificial
  Synthetic oligonucleotide
aggcaagagattctgtgtcaagtccgtttatgttttgggcaagatttggatggatgagaa

SEQ ID NO: 324211 - DNA, 58 bp, Artificial
  Synthetic oligonucleotide
aggcaagagtcctagctgtggaaagatacctaaaggatcaacagctcctggggatttg

SEQ ID NO: 324212 - DNA, 55 bp, Artificial
  Synthetic oligonucleotide
aggcaagagtgttggctgaggcaatgagccaaacacaaagcaccatactggtgca

SEQ ID NO: 324213 - DNA, 56 bp, Artificial
  Synthetic oligonucleotide
aggcaagctattgtgtgttggggtgagttaatgaatttagccacctgggtgggaag

SEQ ID NO: 324214 - DNA, 58 bp, Artificial
  Synthetic oligonucleotide
aggcaagtacatcatggctttcaacccaccttggggcgatatcaacaagtcaggtcgg

SEQ ID NO: 324215 - DNA, 60 bp, Artificial
  Synthetic oligonucleotide
aggcaagtagtggtatagtaccacttgcgactgtgccaatagtctgtagtaataagctta

SEQ ID NO: 324216 - DNA, 56 bp, Artificial
  Synthetic oligonucleotide
aggcaagtggtaggtatggaaatatagccaaaaatgccctggttctgtactatgtt

SEQ ID NO: 324217 - DNA, 60 bp, Artificial
  Synthetic oligonucleotide
aggcaataatcgtagccatggtgttttctcaagaagattgcatgatcaaagcagttcgag

SEQ ID NO: 324218 - DNA, 51 bp, Artificial
  Synthetic oligonucleotide
aggcaataccatcgtcgcgcttgcatgccgcattgcggggatttagatcgg

SEQ ID NO: 324219 - DNA, 60 bp, Artificial
  Synthetic oligonucleotide
aggcaatctgccaggtggttatagaataaagtttgatgtagtggcagtgaggactgatgg

SEQ ID NO: 324220 - DNA, 60 bp, Artificial
  Synthetic oligonucleotide
aggcaatgacaacctcagaccaggctttaaggctgacttgcattggtcaaaatgacagct

SEQ ID NO: 324221 - DNA, 55 bp, Artificial
  Synthetic oligonucleotide
aggcaatgcatggtcacatgcgtgcgaagaggcacgcatcatgggcatcaatcaa

SEQ ID NO: 324222 - DNA, 50 bp, Artificial
  Synthetic oligonucleotide
aggcaatggagacaatccaaattgaccccaccgaatgggaagaccgacgg

SEQ ID NO: 324223 - DNA, 54 bp, Artificial
  Synthetic oligonucleotide
aggcaatggcattacccatcgggttggtaaacgtttctgcgttaagtccgtgta

SEQ ID NO: 324224 - DNA, 57 bp, Artificial
  Synthetic oligonucleotide
aggcaatgtcgcagtagtaccaatttcaaattcagggcgccaatcggtacgtatagt

SEQ ID NO: 324225 - DNA, 58 bp, Artificial
  Synthetic oligonucleotide
aggcaattcagactagggcggtgatcaaccaacacggcaccagtgaaaccttagtgga

SEQ ID NO: 324226 - DNA, 60 bp, Artificial
  Synthetic oligonucleotide
aggcaattgacgaggaacccgatgatcgaagcatcatctgggtctatggtccttatggta

SEQ ID NO: 324227 - DNA, 55 bp, Artificial
  Synthetic oligonucleotide
aggcacaatgggcgcagcggcgacagccctgacggtacagtctcggtcattactg

SEQ ID NO: 324228 - DNA, 58 bp, Artificial
  Synthetic oligonucleotide
aggcacaattgctgtgttaataggaatagcaaacctaggtttgaacataggactacac

SEQ ID NO: 324229 - DNA, 58 bp, Artificial
  Synthetic oligonucleotide
aggcacacctgcagaggtctcgctgacatcttgccctgcggggataaaatacacacta

SEQ ID NO: 324230 - DNA, 60 bp, Artificial
  Synthetic oligonucleotide
aggcacacgtggcaccattcgcacacgttctggtgcacaaattgggtcgcaggtacattt

SEQ ID NO: 324231 - DNA, 60 bp, Artificial
  Synthetic oligonucleotide
aggcacacgttgggactactctgctaccaacaactgcactcactttgtttccaacatcac

SEQ ID NO: 324232 - DNA, 59 bp, Artificial
  Synthetic oligonucleotide
aggcacaggatttggcgctatggactttaaggtgttgcaggaatctaaggctgaggtac

SEQ ID NO: 324233 - DNA, 60 bp, Artificial
  Synthetic oligonucleotide
aggcacagtatagaatatacaaggcaaatcaaggcagaataattggtcagacggatgtaa

SEQ ID NO: 324234 - DNA, 57 bp, Artificial
  Synthetic oligonucleotide
aggcacatatagttccctggactctctcgcagcggaaactcaaggagccttttccac

SEQ ID NO: 324235 - DNA, 55 bp, Artificial
  Synthetic oligonucleotide
aggcacatggaatcgatcctaacatcaggaccggggtgaggacgattactactgg

SEQ ID NO: 324236 - DNA, 60 bp, Artificial
  Synthetic oligonucleotide
aggcaccatacatctcagaaacagcattgaggtgtctctacatgagtgcgcatggagaga

SEQ ID NO: 324237 - DNA, 55 bp, Artificial
  Synthetic oligonucleotide
aggcacccggcaccatgcaatggcacatagcgccactctccagcccctctccgga

SEQ ID NO: 324238 - DNA, 54 bp, Artificial
  Synthetic oligonucleotide
aggcacccttttaggcgtttactcgcaatcagggaaaaccattggctacagaac

SEQ ID NO: 324239 - DNA, 57 bp, Artificial
  Synthetic oligonucleotide
aggcacctacacaaataatacagaagcagtatgtgacgtcaagggctttgcaccttt

SEQ ID NO: 324240 - DNA, 51 bp, Artificial
  Synthetic oligonucleotide
aggcacctatgtctgctcgggctgggtgatgacagtggctcatgctttttc

SEQ ID NO: 324241 - DNA, 55 bp, Artificial
  Synthetic oligonucleotide
aggcacctggtgccactacgctacgcagcagccttagctacgccggagcttagct

SEQ ID NO: 324242 - DNA, 60 bp, Artificial
  Synthetic oligonucleotide
aggcacctgttgcctatattctatgacgcaatggtcgattttcatacaactaccactgag

SEQ ID NO: 324243 - DNA, 55 bp, Artificial
  Synthetic oligonucleotide
aggcacgaacgacggcaaaatgagcgggtttctctgtgacaatgcaaatctcgcg

SEQ ID NO: 324244 - DNA, 56 bp, Artificial
  Synthetic oligonucleotide
aggcacgattgcagtactaataggaatagcgaacttaggattgaatataggactac

SEQ ID NO: 324245 - DNA, 57 bp, Artificial
  Synthetic oligonucleotide
aggcacggaatcgggattggagaggctttacagctaggcgtcagaaaaagtttgtgc

SEQ ID NO: 324246 - DNA, 60 bp, Artificial
  Synthetic oligonucleotide
aggcacggcagatttgggagctcttcaacaaactctagacaggtgcgcccttatgaatcc

SEQ ID NO: 324247 - DNA, 56 bp, Artificial
  Synthetic oligonucleotide
aggcacgggagacgccgagctaaaatctatactgccagtcctgggatcccccctct

SEQ ID NO: 324248 - DNA, 59 bp, Artificial
  Synthetic oligonucleotide
aggcacgggtcgctatgcagacctacgctatggttctaagaacccagatatcatatggg

SEQ ID NO: 324249 - DNA, 54 bp, Artificial
  Synthetic oligonucleotide
aggcacgttagtatgcgttcgggggatagacggatgcgggcccatacagaccta

SEQ ID NO: 324250 - DNA, 60 bp, Artificial
  Synthetic oligonucleotide
aggcacgttcagtgactcgacgattcaggagcaataaatgtctcgccgctatacatataa

SEQ ID NO: 324251 - DNA, 60 bp, Artificial
  Synthetic oligonucleotide
aggcacgttccctctatagcatcctttactatgacggctgataagtcgtgcgtggagcac

SEQ ID NO: 324252 - DNA, 57 bp, Artificial
  Synthetic oligonucleotide
aggcactaaaaagagttggacttgacccttcattaatcagtacctttgcaggaagca

SEQ ID NO: 324253 - DNA, 59 bp, Artificial
  Synthetic oligonucleotide
aggcactacaactaacacagttactatgtattcctctaatgactcctggtacagaggaa

SEQ ID NO: 324254 - DNA, 52 bp, Artificial
  Synthetic oligonucleotide
aggcactcccgtgggctcagggactggatacacaccgtgggcaacaagggtc

SEQ ID NO: 324255 - DNA, 60 bp, Artificial
  Synthetic oligonucleotide
aggcactcgacatcgtcacgcggtctcctacctttagtgacaatagcactccaccggctg

SEQ ID NO: 324256 - DNA, 52 bp, Artificial
  Synthetic oligonucleotide
aggcactctaattgtggcaatgatcccagaacatcagttagctagtgcaaga

SEQ ID NO: 324257 - DNA, 59 bp, Artificial
  Synthetic oligonucleotide
aggcactgcttacagtgcgaaggctgccttgggtaggaataaaaggctgagaggcaaaa

SEQ ID NO: 324258 - DNA, 60 bp, Artificial
  Synthetic oligonucleotide
aggcacttgaggaccaagcaggcacaaacttggaaatcaccatagtcactctcaaaagaa

SEQ ID NO: 324259 - DNA, 51 bp, Artificial
  Synthetic oligonucleotide
aggcacttttggtcgggtcggtctgctggtatggccagtcggattttcact

SEQ ID NO: 324260 - DNA, 55 bp, Artificial
  Synthetic oligonucleotide
aggcagaagaactcacaccaggtagatttcgtacaatagtatgtggtctatttcc

SEQ ID NO: 324261 - DNA, 60 bp, Artificial
  Synthetic oligonucleotide
aggcagaatccaacagaggaacaagctgtggatatatgcaaggcagcaatggggttgaga

SEQ ID NO: 324262 - DNA, 60 bp, Artificial
  Synthetic oligonucleotide
aggcagaatgtgttgccgtcatgcgctcccagtgccccacacacaattgtaacataaaag

SEQ ID NO: 324263 - DNA, 51 bp, Artificial
  Synthetic oligonucleotide
aggcagacatcttaatggcggcagtaagtaaacctcagaccattacagagc

SEQ ID NO: 324264 - DNA, 58 bp, Artificial
  Synthetic oligonucleotide
aggcagacatgattccagacgacgccaccgtccttgtgccttcaagagtagagcaggc

SEQ ID NO: 324265 - DNA, 60 bp, Artificial
  Synthetic oligonucleotide
aggcagaccacatatgtggtcgatgccatggaggcccaccagtttatcaaggctcctggc

SEQ ID NO: 324266 - DNA, 60 bp, Artificial
  Synthetic oligonucleotide
aggcagactattgcgaatgccgcttcgaggagtgcccgagacgggccgactatgtgatgg

SEQ ID NO: 324267 - DNA, 60 bp, Artificial
  Synthetic oligonucleotide
aggcagatattgagcagcaaattaactcaattgatgcgattaatccattgcacgcttttg

SEQ ID NO: 324268 - DNA, 57 bp, Artificial
  Synthetic oligonucleotide
aggcagatgggctatgtaaacgttttcgctattccgtttacgatacatagtctactc

SEQ ID NO: 324269 - DNA, 60 bp, Artificial
  Synthetic oligonucleotide
aggcagatggtgcaggcaatgaggaccattgggactcatcctagctccagcgccggtcta

SEQ ID NO: 324270 - DNA, 60 bp, Artificial
  Synthetic oligonucleotide
aggcagattcgttccaccaagactctacgaacacaacctgcagcttcgaacgtagagcta

SEQ ID NO: 324271 - DNA, 60 bp, Artificial
  Synthetic oligonucleotide
aggcagcattagatgatgagacaacaatgttcgctctattcggacccttagtagaaaagg

SEQ ID NO: 324272 - DNA, 54 bp, Artificial
  Synthetic oligonucleotide
aggcagccaccgggagaaaacggagaaaccacctccagaggaccccttcagcga

SEQ ID NO: 324273 - DNA, 51 bp, Artificial
  Synthetic oligonucleotide
aggcagccacgctgatttctattctcgtatactacagacctgaactttcac

SEQ ID NO: 324274 - DNA, 52 bp, Artificial
  Synthetic oligonucleotide
aggcagccccctgccgttgtcgtaatttccttcggaaagccgcccacaagtt

SEQ ID NO: 324275 - DNA, 54 bp, Artificial
  Synthetic oligonucleotide
aggcagccctagggttggctgaggacactgtgtacagcaggaacccggcagaaa

SEQ ID NO: 324276 - DNA, 55 bp, Artificial
  Synthetic oligonucleotide
aggcagccttggagaaccttgtggtgctcaatgcggcgtctctggccggaacgca

SEQ ID NO: 324277 - DNA, 59 bp, Artificial
  Synthetic oligonucleotide
aggcagcgtatcgagaaacctgctctcgccgtggtactgccgcctacccacttcttggc

SEQ ID NO: 324278 - DNA, 58 bp, Artificial
  Synthetic oligonucleotide
aggcagctactttactgactcatatgtcataacaaaaaacaccagacaatttctggtt

SEQ ID NO: 324279 - DNA, 60 bp, Artificial
  Synthetic oligonucleotide
aggcagctcgccttatcgtgttcccagatctgggggtgcgcgtgtgcgagaaaatggccc

SEQ ID NO: 324280 - DNA, 60 bp, Artificial
  Synthetic oligonucleotide
aggcagctcggtatgaaaaccatacggagaacgccttaatgttgtatatggcatgtactc

SEQ ID NO: 324281 - DNA, 55 bp, Artificial
  Synthetic oligonucleotide
aggcagctctggagaacctcgtgttactcaatgcggcgtctctggccgggacgca

SEQ ID NO: 324282 - DNA, 60 bp, Artificial
  Synthetic oligonucleotide
aggcagctggcagatcttgttgcggctcaaagactggcttcgaaaccagttgatccaaca

SEQ ID NO: 324283 - DNA, 54 bp, Artificial
  Synthetic oligonucleotide
aggcagcttaacacaggagttagaatacagaggagaaagcttattatgcagttt

SEQ ID NO: 324284 - DNA, 60 bp, Artificial
  Synthetic oligonucleotide
aggcaggaaggccgctaaggggaaaatgtcacattgctgaggatatcatgctgtgtgttt

SEQ ID NO: 324285 - DNA, 58 bp, Artificial
  Synthetic oligonucleotide
aggcaggaggaaccttgggccacaggtgtcgcgctctcataaaaggctttaagcctga

SEQ ID NO: 324286 - DNA, 60 bp, Artificial
  Synthetic oligonucleotide
aggcaggctagagatagcaaactatctgacagcaagcatgtggcactccataacttaatc

SEQ ID NO: 324287 - DNA, 60 bp, Artificial
  Synthetic oligonucleotide
aggcaggctgtgcaatcctctgaatccgtttgtcagtcataaagagattgagtcggtaaa

SEQ ID NO: 324288 - DNA, 52 bp, Artificial
  Synthetic oligonucleotide
aggcaggggtactcacctttatcgtttcagaccctcctcccagccccgaggg

SEQ ID NO: 324289 - DNA, 55 bp, Artificial
  Synthetic oligonucleotide
aggcaggttcgacagcatgacggatggtagtggaaacaaatggaccgtcttcaga

SEQ ID NO: 324290 - DNA, 54 bp, Artificial
  Synthetic oligonucleotide
aggcaggttcggagagtaacctggaactggagggttaggagtcgtgtgaaattc

SEQ ID NO: 324291 - DNA, 51 bp, Artificial
  Synthetic oligonucleotide
aggcagtaagttaaaggggtctgaagtttacttagtccttacaataggtcc

SEQ ID NO: 324292 - DNA, 55 bp, Artificial
  Synthetic oligonucleotide
aggcagtaatttccacttctttgctgttggtggagaccccttggaaatgcaggga

SEQ ID NO: 324293 - DNA, 59 bp, Artificial
  Synthetic oligonucleotide
aggcagtactgttgaatgtactaggagcaggggatgagattccagacccgttgagtccg

SEQ ID NO: 324294 - DNA, 53 bp, Artificial
  Synthetic oligonucleotide
aggcagtagactggttatctgaaacaccggatgctacattcagggcgcgccta

SEQ ID NO: 324295 - DNA, 60 bp, Artificial
  Synthetic oligonucleotide
aggcagtagcagtagtccattatgggggagtgcctactgacgtcattaattcctgggcag

SEQ ID NO: 324296 - DNA, 60 bp, Artificial
  Synthetic oligonucleotide
aggcagtagtgtcagtgacattggcgggcaattcctctctctgccctattagtgggtggg

SEQ ID NO: 324297 - DNA, 56 bp, Artificial
  Synthetic oligonucleotide
aggcagtcctgtcgacccttgttggtaggtacggccgccgtacgaagctgtatgag

SEQ ID NO: 324298 - DNA, 60 bp, Artificial
  Synthetic oligonucleotide
aggcagtctggattctgccctgggtacaaaagcctaagagcagccaggtctatgtgtaaa

SEQ ID NO: 324299 - DNA, 57 bp, Artificial
  Synthetic oligonucleotide
aggcagtggtaagagcaccaaggtcccggctgcgtatgcagctcagggctacaaggt

SEQ ID NO: 324300 - DNA, 53 bp, Artificial
  Synthetic oligonucleotide
aggcagtggtggaagtactggttataccccattaggtcgtacacctggggtgg

SEQ ID NO: 324301 - DNA, 60 bp, Artificial
  Synthetic oligonucleotide
aggcagttaagcatgatgaccatttactacaagattcggagctagcgggcctactatcca

SEQ ID NO: 324302 - DNA, 60 bp, Artificial
  Synthetic oligonucleotide
aggcagttaagcatgatgatcatctccttcaagattctgaattagcaggactgctctcaa

SEQ ID NO: 324303 - DNA, 60 bp, Artificial
  Synthetic oligonucleotide
aggcagttactgtcaaactcatacgtaacaaacatctctgatgaagttagtgagattgga

SEQ ID NO: 324304 - DNA, 60 bp, Artificial
  Synthetic oligonucleotide
aggcagttattgtctggtatagtgcaacagcaaaacaatttgctgagggctatagaggcg

SEQ ID NO: 324305 - DNA, 59 bp, Artificial
  Synthetic oligonucleotide
aggcagttgcagaagttccattaatcttaaagattcttctcttgttaaagtgtgatcca

SEQ ID NO: 324306 - DNA, 55 bp, Artificial
  Synthetic oligonucleotide
aggcagttggtaccgacggatcagtactccgatgtatccccgtcggcgacttgca

SEQ ID NO: 324307 - DNA, 56 bp, Artificial
  Synthetic oligonucleotide
aggcataagtgcgtaagagcgttgttagggttaaaaagtaatgacgcgccctcatg

SEQ ID NO: 324308 - DNA, 55 bp, Artificial
  Synthetic oligonucleotide
aggcatacgaccgaggacgttaatcggaacatgcataacttactgggcgttaagg

SEQ ID NO: 324309 - DNA, 60 bp, Artificial
  Synthetic oligonucleotide
aggcatagacggagtattagattctccgtctaatgctatgtccgctcttactggaagcgt

SEQ ID NO: 324310 - DNA, 50 bp, Artificial
  Synthetic oligonucleotide
aggcatatagagtccccgtgaagtcaatgagcggaagtgctacacaagtc

SEQ ID NO: 324311 - DNA, 60 bp, Artificial
  Synthetic oligonucleotide
aggcatatatttgtagcgcagattgtgttataagcattgacaaagagacagcacagatca

SEQ ID NO: 324312 - DNA, 54 bp, Artificial
  Synthetic oligonucleotide
aggcatatcatagtacctagggcagctcatgaaatcctggatcacagtgtcaca

SEQ ID NO: 324313 - DNA, 58 bp, Artificial
  Synthetic oligonucleotide
aggcatattttcacctccctggctaacaccaggcaggatatctcctgaaaccccagga

SEQ ID NO: 324314 - DNA, 53 bp, Artificial
  Synthetic oligonucleotide
aggcatcaccacttacatagagtcgcttggggccgcatttggaagtggattta

SEQ ID NO: 324315 - DNA, 54 bp, Artificial
  Synthetic oligonucleotide
aggcatcagttccgagttgctttattgaaggtgaaaggatatgtatttggtaac

SEQ ID NO: 324316 - DNA, 55 bp, Artificial
  Synthetic oligonucleotide
aggcatccaattatgcccagtatcgggttgttcgagctacaatccgttatcgccc

SEQ ID NO: 324317 - DNA, 51 bp, Artificial
  Synthetic oligonucleotide
aggcatcccgcgtaatgccttgggagggccctgttatctaggacaattgac

SEQ ID NO: 324318 - DNA, 50 bp, Artificial
  Synthetic oligonucleotide
aggcatcctcgaatgcccccggggggccccaatggggccccccgcgggga

SEQ ID NO: 324319 - DNA, 55 bp, Artificial
  Synthetic oligonucleotide
aggcatcgaaattggtttaagggctcaacaacgaagcttgatgtggttcgagaga

SEQ ID NO: 324320 - DNA, 60 bp, Artificial
  Synthetic oligonucleotide
aggcatcgaccaaggcgctctctgacggttacgctagagtctactcacattaccgacgaa

SEQ ID NO: 324321 - DNA, 58 bp, Artificial
  Synthetic oligonucleotide
aggcatcgactatgggacaggctgtaggacaatgagctattacagaaacctcgttaag

SEQ ID NO: 324322 - DNA, 60 bp, Artificial
  Synthetic oligonucleotide
aggcatgaaaacagaatggtgctggccagcactacggctaaggctatggagcaaatggct

SEQ ID NO: 324323 - DNA, 55 bp, Artificial
  Synthetic oligonucleotide
aggcatgaaagagattcggtgcaaatgaggtcagtaaacaaatctgggatggaag

SEQ ID NO: 324324 - DNA, 55 bp, Artificial
  Synthetic oligonucleotide
aggcatgacataaatatagaagcgcctcaagaagagcagtatagcagtagagagc

SEQ ID NO: 324325 - DNA, 55 bp, Artificial
  Synthetic oligonucleotide
aggcatgatattgcccacacaggcaaagtgatttgcatatcggacgtgactcgag

SEQ ID NO: 324326 - DNA, 58 bp, Artificial
  Synthetic oligonucleotide
aggcatgatgttagtcatgtgggtaaggtctgttgtataactgacgtcactaggggtt

SEQ ID NO: 324327 - DNA, 58 bp, Artificial
  Synthetic oligonucleotide
aggcatgcttgcttccgtacagggacaccaattggggactcgtcatttattccttgta

SEQ ID NO: 324328 - DNA, 60 bp, Artificial
  Synthetic oligonucleotide
aggcatgcttgtgaattaggatgtatattattagttatgaccttatctaagcatagagta

SEQ ID NO: 324329 - DNA, 55 bp, Artificial
  Synthetic oligonucleotide
aggcatggagtatgacactgagggagccatgatgacaaaactaggctctggacta

SEQ ID NO: 324330 - DNA, 55 bp, Artificial
  Synthetic oligonucleotide
aggcatggcaaatacgttgtagatatcatgtgtcacacgaccagtccttcttggc

SEQ ID NO: 324331 - DNA, 60 bp, Artificial
  Synthetic oligonucleotide
aggcatggtcactcactacatctggtccactgagtacaatgacgggtcactcttcgccac

SEQ ID NO: 324332 - DNA, 60 bp, Artificial
  Synthetic oligonucleotide
aggcatggttccaaaccggggagatcctgctacagcaaggatatgtcgcacctgactttc

SEQ ID NO: 324333 - DNA, 54 bp, Artificial
  Synthetic oligonucleotide
aggcatggttttaaaccggggaaatcttgttacaacaaggacatgtcgcaccta

SEQ ID NO: 324334 - DNA, 55 bp, Artificial
  Synthetic oligonucleotide
aggcatgtgagctgaccgattcaagttggatagaacttgatgaaataggggaaga

SEQ ID NO: 324335 - DNA, 55 bp, Artificial
  Synthetic oligonucleotide
aggcatgtgagttgacggattccagctggatagagcttgacgaaataggagagga

SEQ ID NO: 324336 - DNA, 55 bp, Artificial
  Synthetic oligonucleotide
aggcatgtgatgccgcaatgtgttatggatctactacagctaatttagttagggg

SEQ ID NO: 324337 - DNA, 55 bp, Artificial
  Synthetic oligonucleotide
aggcatgtgcaaaattccccttgtttcctgaacagtcggaaagaatccggaacac

SEQ ID NO: 324338 - DNA, 51 bp, Artificial
  Synthetic oligonucleotide
aggcatgttgttgtgactccgaggggttgcctcaaactctatcttataacc

SEQ ID NO: 324339 - DNA, 55 bp, Artificial
  Synthetic oligonucleotide
aggcattcaactacgggagactgatctcacggaaatacgacatccagagctcgac

SEQ ID NO: 324340 - DNA, 52 bp, Artificial
  Synthetic oligonucleotide
aggcattggatgacgcataaaagcaggaccctttggaggtgcccaggaataa

SEQ ID NO: 324341 - DNA, 60 bp, Artificial
  Synthetic oligonucleotide
aggcatttactatggcaggaagaagcggagacagcagcgacgaagcgctcctccaagcaa

SEQ ID NO: 324342 - DNA, 59 bp, Artificial
  Synthetic oligonucleotide
aggcatttcgtcatagaagtactcaaacgctacatgcttttcatacgacttagtctcaa

SEQ ID NO: 324343 - DNA, 55 bp, Artificial
  Synthetic oligonucleotide
aggccaacacgaagcagcaattgaattctttgaggggatggtccacgactccgtc

SEQ ID NO: 324344 - DNA, 55 bp, Artificial
  Synthetic oligonucleotide
aggccaagtattaagacctatgtttctgtatgtgagaaccaatggaacttccaag

SEQ ID NO: 324345 - DNA, 58 bp, Artificial
  Synthetic oligonucleotide
aggccaattgagagaacccaggggaagtgacatagcaggatctactagtacccttcag

SEQ ID NO: 324346 - DNA, 55 bp, Artificial
  Synthetic oligonucleotide
aggccaattggtccaggagagggtggctaggcctgcatccttgcgaccacgttgg

SEQ ID NO: 324347 - DNA, 56 bp, Artificial
  Synthetic oligonucleotide
aggccacaacggtccggttggtctccaagatgtgtgcgaggggagcctatttgttc

SEQ ID NO: 324348 - DNA, 53 bp, Artificial
  Synthetic oligonucleotide
aggccacactaactgcgtccaaaccgacgaccccaccacccaactcttctcac

SEQ ID NO: 324349 - DNA, 55 bp, Artificial
  Synthetic oligonucleotide
aggccacccggagacaggtcaggtcgcagggaatccttcttcagaaaggggagtc

SEQ ID NO: 324350 - DNA, 55 bp, Artificial
  Synthetic oligonucleotide
aggccacctccacaccggaggagcgcaccactttccagtacactcccaaccccca

SEQ ID NO: 324351 - DNA, 54 bp, Artificial
  Synthetic oligonucleotide
aggccacgcaaacgtggacggttgatgcttgcgcgtgcattgtgcagtgaccgg

SEQ ID NO: 324352 - DNA, 55 bp, Artificial
  Synthetic oligonucleotide
aggccactagatcaggtgtgccccttgacattgttaatcaaacagtcaaataccc

SEQ ID NO: 324353 - DNA, 55 bp, Artificial
  Synthetic oligonucleotide
aggccactagggcatcgtgtctgacctctgatgcgataactcgaccctacagagc

SEQ ID NO: 324354 - DNA, 59 bp, Artificial
  Synthetic oligonucleotide
aggccagactataggtagtgacataacagatgtcatagaactgcaagaatttcctagta

SEQ ID NO: 324355 - DNA, 55 bp, Artificial
  Synthetic oligonucleotide
aggccagatgcccgatagtagcgatcctgaggggccagccgctgggaccaggagt

SEQ ID NO: 324356 - DNA, 56 bp, Artificial
  Synthetic oligonucleotide
aggccagcagagttaacagggggtcaggtcaccgtaaaggcgatccgacagaacaa

SEQ ID NO: 324357 - DNA, 56 bp, Artificial
  Synthetic oligonucleotide
aggccagggggaaagaaaacctatatgttaaagcatctaatatgggcaagcaggga

SEQ ID NO: 324358 - DNA, 60 bp, Artificial
  Synthetic oligonucleotide
aggccagtaattcagatagatccagtggcgatgacacacactagtcagtatatatgtagc

SEQ ID NO: 324359 - DNA, 57 bp, Artificial
  Synthetic oligonucleotide
aggccagtactgtgataatcaatggtatgtcctaccaggtgggtgaaaaattggacc

SEQ ID NO: 324360 - DNA, 55 bp, Artificial
  Synthetic oligonucleotide
aggccagtgctttagcggggatttccggagccacaccggtgcaaacctcggcaag

SEQ ID NO: 324361 - DNA, 60 bp, Artificial
  Synthetic oligonucleotide
aggccagtggccagtactcgtctcagccttatcctgtctcgcctcgggtaccctctgcag

SEQ ID NO: 324362 - DNA, 54 bp, Artificial
  Synthetic oligonucleotide
aggccatactggatatacatggctcaaggcatgaataatggaatagcctggaac

SEQ ID NO: 324363 - DNA, 58 bp, Artificial
  Synthetic oligonucleotide
aggccatagtctgttaagctatgctactgagacccaggaaaaccacgatcgttctacc

SEQ ID NO: 324364 - DNA, 53 bp, Artificial
  Synthetic oligonucleotide
aggccatatcgaaccctacaccgggccagggaataacccagtattcccagtta

SEQ ID NO: 324365 - DNA, 57 bp, Artificial
  Synthetic oligonucleotide
aggccatatgaacccataactcctgaagaatttgggtttgattactatagctgggaa

SEQ ID NO: 324366 - DNA, 60 bp, Artificial
  Synthetic oligonucleotide
aggccatcagtcaagaggagctggatgcagtaaagaaatccaaatgttgggaaattgaat

SEQ ID NO: 324367 - DNA, 51 bp, Artificial
  Synthetic oligonucleotide
aggccatccaattaatggacagatacaccagacagaggtttagtgttgatg

SEQ ID NO: 324368 - DNA, 60 bp, Artificial
  Synthetic oligonucleotide
aggccatctcacttctggaaggcagttctaaatgatagtccagaggcggtgaaagcagtt

SEQ ID NO: 324369 - DNA, 53 bp, Artificial
  Synthetic oligonucleotide
aggccatgcactactgctagcatctcatcgaagatgcttggagcgtcccgagc

SEQ ID NO: 324370 - DNA, 59 bp, Artificial
  Synthetic oligonucleotide
aggccatggcggtaatctcgtcgggagtcaaaaggcaagacatccctctcacgctcgcc

SEQ ID NO: 324371 - DNA, 60 bp, Artificial
  Synthetic oligonucleotide
aggccatggtgtctagggcccgaattgatgcacggattgacttcgagtctggaaggatta

SEQ ID NO: 324372 - DNA, 59 bp, Artificial
  Synthetic oligonucleotide
aggccatgtttgaagtatccccttagcctacttcagcgcacttttgctgaatcttaaga

SEQ ID NO: 324373 - DNA, 60 bp, Artificial
  Synthetic oligonucleotide
aggccattaagtgcaggtgtctatatgggcaacctaagctcacagcaacttgaccaaaga

SEQ ID NO: 324374 - DNA, 55 bp, Artificial
  Synthetic oligonucleotide
aggccattcaaaactttataaactcaccaaatgctctcccttggagacaacatgc

SEQ ID NO: 324375 - DNA, 53 bp, Artificial
  Synthetic oligonucleotide
aggcccaactggccctcagggaattccgggtattccaggattaactggcccaa

SEQ ID NO: 324376 - DNA, 60 bp, Artificial
  Synthetic oligonucleotide
aggcccaataaggatccgctgaactttggccaagtcttcactatgtatgacaatgagccc

SEQ ID NO: 324377 - DNA, 55 bp, Artificial
  Synthetic oligonucleotide
aggcccacccggtgaggatgacaaaccctgggtaccactcacaagggtgccgtca

SEQ ID NO: 324378 - DNA, 54 bp, Artificial
  Synthetic oligonucleotide
aggcccacgggatcgaacctaatatcaggaccggggtgagaacaattaccactg

SEQ ID NO: 324379 - DNA, 60 bp, Artificial
  Synthetic oligonucleotide
aggcccacgggattgatcccaacatcaggactggggtgaggacaatcactactggcagct

SEQ ID NO: 324380 - DNA, 60 bp, Artificial
  Synthetic oligonucleotide
aggcccactcaaaggtgagatcgcgcagagactggaaagtgtctttgcaggaaagcacac

SEQ ID NO: 324381 - DNA, 51 bp, Artificial
  Synthetic oligonucleotide
aggcccactctgatgtgtacagatggaaaggctgtgtgttattcgtggatc

SEQ ID NO: 324382 - DNA, 58 bp, Artificial
  Synthetic oligonucleotide
aggcccagaaactagcccttcagtcacagctaagatcggtttgtacccgcagaagcac

SEQ ID NO: 324383 - DNA, 55 bp, Artificial
  Synthetic oligonucleotide
aggcccagggtgctacattcaccgagactacaattattgccacggcagacgcccg

SEQ ID NO: 324384 - DNA, 59 bp, Artificial
  Synthetic oligonucleotide
aggcccaggttccggacaaggcgtggagcactgggtatgagtggatcaccaacttcaca

SEQ ID NO: 324385 - DNA, 55 bp, Artificial
  Synthetic oligonucleotide
aggcccagtatacgtccattgagtgccgtttacgttaacggctagattagttcca

SEQ ID NO: 324386 - DNA, 56 bp, Artificial
  Synthetic oligonucleotide
aggcccataatatttgggcctcacaagcctgtgttcctacagaccctaacccacaa

SEQ ID NO: 324387 - DNA, 54 bp, Artificial
  Synthetic oligonucleotide
aggcccatatttgactttaatttggctaattgggttaaccctgtcacgtatctg

SEQ ID NO: 324388 - DNA, 55 bp, Artificial
  Synthetic oligonucleotide
aggcccatggaattgaccctaacatcagaaccggggtgagaacaattaccactgg

SEQ ID NO: 324389 - DNA, 60 bp, Artificial
  Synthetic oligonucleotide
aggcccatgtaaagtccagtcatatgagcaacgggatgatattaagcatactggtattgt

SEQ ID NO: 324390 - DNA, 60 bp, Artificial
  Synthetic oligonucleotide
aggcccatgtaaggtccaatcattcgagcagaggcatgacatagcccacactgggaaggt

SEQ ID NO: 324391 - DNA, 59 bp, Artificial
  Synthetic oligonucleotide
aggcccatgtaaggtccagtcatttgaagcccgtcatgacatagcccatactggtaagg

SEQ ID NO: 324392 - DNA, 55 bp, Artificial
  Synthetic oligonucleotide
aggcccatgtacaggaagcccagaatttacaggacgttaagggggcctgatattc

SEQ ID NO: 324393 - DNA, 60 bp, Artificial
  Synthetic oligonucleotide
aggcccatgtacccatacctttaggaggtgatggctcaatgtctattatggagcttgcca

SEQ ID NO: 324394 - DNA, 59 bp, Artificial
  Synthetic oligonucleotide
aggcccatgtatcgaaagcccaaaatttacagaatgacaagaagccctgatgtgcctag

SEQ ID NO: 324395 - DNA, 54 bp, Artificial
  Synthetic oligonucleotide
aggcccattacagagtatgtcaagtaacccacaggtttagggatgacctaaaaa

SEQ ID NO: 324396 - DNA, 59 bp, Artificial
  Synthetic oligonucleotide
aggcccatttaaaggtttcaatgaagtatcaactgcatttagacatatagattggtgga

SEQ ID NO: 324397 - DNA, 60 bp, Artificial
  Synthetic oligonucleotide
aggccccaagatgaacgatagatttaagcttgtgtgcacaacctcaaatagtgacattag

SEQ ID NO: 324398 - DNA, 55 bp, Artificial
  Synthetic oligonucleotide
aggccccaccacctgaggtggaatttatacatgctgccttaagtataaaaagggc

SEQ ID NO: 324399 - DNA, 60 bp, Artificial
  Synthetic oligonucleotide
aggccccccaaagcaatgccaatttgcagacatctggtgaaggacagtctgtcctcccta

SEQ ID NO: 324400 - DNA, 55 bp, Artificial
  Synthetic oligonucleotide
aggcccctctcgacctaaggggatgcaccatagagggttggatcctggggaatcc

SEQ ID NO: 324401 - DNA, 56 bp, Artificial
  Synthetic oligonucleotide
aggccccttgtcaatggtctgcagggaagaattgattattattggtcggtactaaa

SEQ ID NO: 324402 - DNA, 51 bp, Artificial
  Synthetic oligonucleotide
aggcccgaagtagacccattaaccatagatgcaccacatattaccccagac

SEQ ID NO: 324403 - DNA, 50 bp, Artificial
  Synthetic oligonucleotide
aggcccgaatcggaccgaactaaggcgacggtagcgggttgggacgaaaa

SEQ ID NO: 324404 - DNA, 53 bp, Artificial
  Synthetic oligonucleotide
aggcccgagtgggatcctgtgggtttcgttggaaaattacgtgtgcgaaatgg

SEQ ID NO: 324405 - DNA, 50 bp, Artificial
  Synthetic oligonucleotide
aggcccgccccccacagggatgtggggtttcccttataaccccaatattg

SEQ ID NO: 324406 - DNA, 55 bp, Artificial
  Synthetic oligonucleotide
aggcccgccgtatatgacgtataaccagccgcaagccggtagcgttaccctgccg

SEQ ID NO: 324407 - DNA, 60 bp, Artificial
  Synthetic oligonucleotide
aggcccgcctgtccaccacagcgactggcagtcagcaaccattctccatatgctgaccaa

SEQ ID NO: 324408 - DNA, 51 bp, Artificial
  Synthetic oligonucleotide
aggcccgcggatccacataacacacccgtttccgcagaggacaatcaccgc

SEQ ID NO: 324409 - DNA, 57 bp, Artificial
  Synthetic oligonucleotide
aggcccgctcacagtaaatgagaaaagaaggttgaaattgattatgcctgctaggtt

SEQ ID NO: 324410 - DNA, 59 bp, Artificial
  Synthetic oligonucleotide
aggcccgggttgctccgtcggtacagcttgcgaagctcagccggcgagtacgacgctgc

SEQ ID NO: 324411 - DNA, 54 bp, Artificial
  Synthetic oligonucleotide
aggcccggttcagaaccgctggcggaacgaacgtatactgctcgacccagggga

SEQ ID NO: 324412 - DNA, 55 bp, Artificial
  Synthetic oligonucleotide
aggcccgtgtagagccggatgctgcggagcacctctccgagaccgtccgtgtaga

SEQ ID NO: 324413 - DNA, 54 bp, Artificial
  Synthetic oligonucleotide
aggcccgttgggtccaaggggtcacgactggtccaaccttcgcgccatgacgaa

SEQ ID NO: 324414 - DNA, 57 bp, Artificial
  Synthetic oligonucleotide
aggccctattgttggcactacgcgcctcaaccgtgtggtatcgtacccgcgtcacag

SEQ ID NO: 324415 - DNA, 60 bp, Artificial
  Synthetic oligonucleotide
aggccctcgcctcacacgatcgtgcccagctcaaacctcggtttgatgcacgtgagtggt

SEQ ID NO: 324416 - DNA, 53 bp, Artificial
  Synthetic oligonucleotide
aggccctctaaagggatacttgggttcgtctacctctatgtcaacccagctgt

SEQ ID NO: 324417 - DNA, 52 bp, Artificial
  Synthetic oligonucleotide
aggccctctatggtaaggcaggttgcccaaagggagggaacctatatttcct

SEQ ID NO: 324418 - DNA, 55 bp, Artificial
  Synthetic oligonucleotide
aggcccttagtgtaggtgtttacaaatctattgagctgggacgggtgcatccggg

SEQ ID NO: 324419 - DNA, 60 bp, Artificial
  Synthetic oligonucleotide
aggcccttgattgcgagatctacggagcctgctactccatagaaccactggatctacctc

SEQ ID NO: 324420 - DNA, 56 bp, Artificial
  Synthetic oligonucleotide
aggcccttgccccctatgccaggatcccgcccactggaagcgggactgcccacagt

SEQ ID NO: 324421 - DNA, 56 bp, Artificial
  Synthetic oligonucleotide
aggcccttggcctcctacagaccgcatcccgtcaggcagaggttatcgcccctgct

SEQ ID NO: 324422 - DNA, 58 bp, Artificial
  Synthetic oligonucleotide
aggccctttcaattctacactgacctgttcacagacaccgatcttccgaccgatcgta

SEQ ID NO: 324423 - DNA, 53 bp, Artificial
  Synthetic oligonucleotide
aggccctttttcacaacacaattaccgccaggggtatgccacgcaaaccgcgg

SEQ ID NO: 324424 - DNA, 53 bp, Artificial
  Synthetic oligonucleotide
aggccgacaagttcgccgggttggtgtatgcagagatgggccttaagacccgg

SEQ ID NO: 324425 - DNA, 60 bp, Artificial
  Synthetic oligonucleotide
aggccgattatgatctgctgtctcaacagatcatcgaagcggacacggtgaaaaacctac

SEQ ID NO: 324426 - DNA, 57 bp, Artificial
  Synthetic oligonucleotide
aggccgatttgtgatttggtagcccatgtttcgccaggtagaatggttatgggcctg

SEQ ID NO: 324427 - DNA, 51 bp, Artificial
  Synthetic oligonucleotide
aggccgctctgtcgggacgtgtgggttgtcgtgtcaatcggcttcccaaaa

SEQ ID NO: 324428 - DNA, 57 bp, Artificial
  Synthetic oligonucleotide
aggccgctgcttgggttaacaggcccatgtacaggaagcccaggatatatcggacgt

SEQ ID NO: 324429 - DNA, 55 bp, Artificial
  Synthetic oligonucleotide
aggccgctggggttggggtccacgcgcgggttgtacgtgagcagcaggtccttga

SEQ ID NO: 324430 - DNA, 52 bp, Artificial
  Synthetic oligonucleotide
aggccgcttcctgagtcagattcgggaaaagcttggtccagaccatctaccc

SEQ ID NO: 324431 - DNA, 60 bp, Artificial
  Synthetic oligonucleotide
aggccggaagtatgttacaagccagatcacccaattcacgagttacatcaagcgcgctac

SEQ ID NO: 324432 - DNA, 52 bp, Artificial
  Synthetic oligonucleotide
aggccggggtttatcccccggccgatacagcatggtcattttgggtaggaac

SEQ ID NO: 324433 - DNA, 59 bp, Artificial
  Synthetic oligonucleotide
aggccggtattgcccccgaaggtgatagctctggagcattagcatggaacgcagatgta

SEQ ID NO: 324434 - DNA, 52 bp, Artificial
  Synthetic oligonucleotide
aggccggttcaccatccctacaggtgcgggcaaaccaggggacagcggtaga

SEQ ID NO: 324435 - DNA, 55 bp, Artificial
  Synthetic oligonucleotide
aggccgtggcttctgcaagactcacaattggaattgtctcatttgtgacacattt

SEQ ID NO: 324436 - DNA, 55 bp, Artificial
  Synthetic oligonucleotide
aggccgtggtggctgatgctgtttgtatcagccgcccaaaaggtacgggagaagc

SEQ ID NO: 324437 - DNA, 57 bp, Artificial
  Synthetic oligonucleotide
aggccgttgagtccacttacgagcccaatacattgggccacgatttaattcgagatc

SEQ ID NO: 324438 - DNA, 60 bp, Artificial
  Synthetic oligonucleotide
aggcctaacgctaagaattgaatctgcagtatgtgaatctgtacttgctgatgcgagtga

SEQ ID NO: 324439 - DNA, 55 bp, Artificial
  Synthetic oligonucleotide
aggcctaaggcgcgatggcttcttcgtcaccagtggggccattggtacgcgcatg

SEQ ID NO: 324440 - DNA, 56 bp, Artificial
  Synthetic oligonucleotide
aggcctaagtgtgaatatccaacaggacatagcaaggtagggtctctacaatactt

SEQ ID NO: 324441 - DNA, 55 bp, Artificial
  Synthetic oligonucleotide
aggcctaccgttactgcctccattgagaaatgcttatgcacctcgtggtctgtgg

SEQ ID NO: 324442 - DNA, 55 bp, Artificial
  Synthetic oligonucleotide
aggcctacgaccaacagcttaaagcgggagacaacccttatataaaattcaatca

SEQ ID NO: 324443 - DNA, 55 bp, Artificial
  Synthetic oligonucleotide
aggcctacgaggggtctgaggtggatcccgctgagcctgtccccgttgatgtttc

SEQ ID NO: 324444 - DNA, 59 bp, Artificial
  Synthetic oligonucleotide
aggcctagagcttagaaatccatggctcagatcaggcacaaacagccctgttataggct

SEQ ID NO: 324445 - DNA, 59 bp, Artificial
  Synthetic oligonucleotide
aggcctagcgttcagacctatatgcgcgctggcagtgtacgctaccctacctagggaaa

SEQ ID NO: 324446 - DNA, 57 bp, Artificial
  Synthetic oligonucleotide
aggcctaggagccttagaggccttaactttgactggactgtcagcagaagaattttc

SEQ ID NO: 324447 - DNA, 55 bp, Artificial
  Synthetic oligonucleotide
aggcctagggccggatcaaggggcttatcgggccgtgcgacctgtacagcaagat

SEQ ID NO: 324448 - DNA, 55 bp, Artificial
  Synthetic oligonucleotide
aggcctagtaagtcaaaacacaggactacagccttcattgtggaatcaggcactg

SEQ ID NO: 324449 - DNA, 51 bp, Artificial
  Synthetic oligonucleotide
aggcctatagacaccccaaagttgactacatactagcatacacaagaacac

SEQ ID NO: 324450 - DNA, 53 bp, Artificial
  Synthetic oligonucleotide
aggcctataggtcgacagccttgccggcccccatgtgggcccataattttgac

SEQ ID NO: 324451 - DNA, 60 bp, Artificial
  Synthetic oligonucleotide
aggcctatcagaaacgaatgggagtgcaaatgcagcgattcaagtgatcctctcgttatt

SEQ ID NO: 324452 - DNA, 60 bp, Artificial
  Synthetic oligonucleotide
aggcctatctaaatcccagaatgggaaccggtaatggagcatattcagcagcattaacag

SEQ ID NO: 324453 - DNA, 55 bp, Artificial
  Synthetic oligonucleotide
aggcctatgggcagatgtggctgctgagttacttccaccggcgtgacctgcgaac

SEQ ID NO: 324454 - DNA, 53 bp, Artificial
  Synthetic oligonucleotide
aggcctatttaaatacagacacctcaaggacgacgaagaaaccggttacagga

SEQ ID NO: 324455 - DNA, 50 bp, Artificial
  Synthetic oligonucleotide
aggcctcaggtacctttaaggccaatgacttacaagggagctttagatct

SEQ ID NO: 324456 - DNA, 59 bp, Artificial
  Synthetic oligonucleotide
aggcctcatccttcgagccacaagatattaaggtctttcacgtcaaaaggagcaccaga

SEQ ID NO: 324457 - DNA, 56 bp, Artificial
  Synthetic oligonucleotide
aggcctcggtctcaatgctgtagcgtattaccggggcctagacgtgtccgttatac

SEQ ID NO: 324458 - DNA, 60 bp, Artificial
  Synthetic oligonucleotide
aggcctctaaacagctacttgcaatgacacaatggtggaagaatcacatggctttaactg

SEQ ID NO: 324459 - DNA, 51 bp, Artificial
  Synthetic oligonucleotide
aggcctctacacggaggttccctggccatccttctactgcgacaccccagg

SEQ ID NO: 324460 - DNA, 56 bp, Artificial
  Synthetic oligonucleotide
aggcctctcgtctatatgcaggggcgtggagtttcccctacgccgatacatggttg

SEQ ID NO: 324461 - DNA, 56 bp, Artificial
  Synthetic oligonucleotide
aggcctctgggacatgcccacccgatgtaattcctaagattgaaggtcgcacgtgg

SEQ ID NO: 324462 - DNA, 55 bp, Artificial
  Synthetic oligonucleotide
aggcctcttaagtgggttaggtccaactaactctgtgacttgtggtcaccttcac

SEQ ID NO: 324463 - DNA, 56 bp, Artificial
  Synthetic oligonucleotide
aggcctgataagggctccaactgacgctgaacgtatcgctttcgcaacacacaaga

SEQ ID NO: 324464 - DNA, 56 bp, Artificial
  Synthetic oligonucleotide
aggcctgtatgggaaaccttcaggctacgcatccaccatgcaccgcgagggtttct

SEQ ID NO: 324465 - DNA, 58 bp, Artificial
  Synthetic oligonucleotide
aggcctgtgcagtgtatggcggtccctcgttcttcaggaatatggtttggcttacaaa

SEQ ID NO: 324466 - DNA, 53 bp, Artificial
  Synthetic oligonucleotide
aggccttaacgtgacatggcctttatgggggtgccttaatgtgaagtcccctt

SEQ ID NO: 324467 - DNA, 59 bp, Artificial
  Synthetic oligonucleotide
aggccttatactgggcgctaccatctaccttataggcttcgatgggactgcggtaatca

SEQ ID NO: 324468 - DNA, 57 bp, Artificial
  Synthetic oligonucleotide
aggccttccctccagatacagactctactccactcgggggacaccatgataaccgta

SEQ ID NO: 324469 - DNA, 55 bp, Artificial
  Synthetic oligonucleotide
aggccttccggactacaaaaatggcggattttgtgacgtcacggctgccatttta

SEQ ID NO: 324470 - DNA, 60 bp, Artificial
  Synthetic oligonucleotide
aggccttcctgcaggaagcccaagtgatgaagaagctccagcatgagaagctggttcaac

SEQ ID NO: 324471 - DNA, 58 bp, Artificial
  Synthetic oligonucleotide
aggccttgagagtttagaatctttgaccgatttgcgagacgtctgcttggtatcctcc

SEQ ID NO: 324472 - DNA, 59 bp, Artificial
  Synthetic oligonucleotide
aggccttgcgtaactaccaacttgctcttaattctgcacgcatggcccaatctggtccc

SEQ ID NO: 324473 - DNA, 60 bp, Artificial
  Synthetic oligonucleotide
aggccttggatgaggatcaacaatgagactatactagaaacagggtatgtgtgtagtaaa

SEQ ID NO: 324474 - DNA, 55 bp, Artificial
  Synthetic oligonucleotide
aggcctttcaccgaacaagccttcgatacaatttcaatgttgtttacacccgaga

SEQ ID NO: 324475 - DNA, 55 bp, Artificial
  Synthetic oligonucleotide
aggccttttgctgctcgaggcttatgacgtaccttcgcggtattagttataaggt

SEQ ID NO: 324476 - DNA, 53 bp, Artificial
  Synthetic oligonucleotide
aggcgaaaaccttggtgattcaattaagcaggcggttattttaaatgttgcgg

SEQ ID NO: 324477 - DNA, 59 bp, Artificial
  Synthetic oligonucleotide
aggcgaaacacgctctgtagtcccctagatgtgcactgggagacaggcaaatctcccta

SEQ ID NO: 324478 - DNA, 53 bp, Artificial
  Synthetic oligonucleotide
aggcgaaatcctggatatccgggtccaatacattctgcgttcaacgctacact

SEQ ID NO: 324479 - DNA, 56 bp, Artificial
  Synthetic oligonucleotide
aggcgaaccggtagaaccatacccagtaacagttgagtgtgtgagcaagttacagg

SEQ ID NO: 324480 - DNA, 60 bp, Artificial
  Synthetic oligonucleotide
aggcgaactcactgatgagagggtccggctcgccctcgatacaggccatcgcattcttct

SEQ ID NO: 324481 - DNA, 58 bp, Artificial
  Synthetic oligonucleotide
aggcgaacttaatagagtggcatcttgtctcaggaagcttggggcaccacccctaaga

SEQ ID NO: 324482 - DNA, 60 bp, Artificial
  Synthetic oligonucleotide
aggcgaagattgtcatatgagccagtagagagaccgttggtccataatgtgttgtgtgag

SEQ ID NO: 324483 - DNA, 52 bp, Artificial
  Synthetic oligonucleotide
aggcgaatggtagtacatctgataccgccgggcaattcatcattacaatacg

SEQ ID NO: 324484 - DNA, 60 bp, Artificial
  Synthetic oligonucleotide
aggcgaattcttttctagaagcgcagtcgatgaatgctagggtggacatgctcactggtg

SEQ ID NO: 324485 - DNA, 60 bp, Artificial
  Synthetic oligonucleotide
aggcgaattgagagacgaatttaataatttgtcgcaacaaatagcaatgtcacaattgat

SEQ ID NO: 324486 - DNA, 60 bp, Artificial
  Synthetic oligonucleotide
aggcgacacagtgttcgatattactgagtgagctaaaaacttaacacactggtcacatcg

SEQ ID NO: 324487 - DNA, 56 bp, Artificial
  Synthetic oligonucleotide
aggcgacaggtagaacgtttcgagaagcttaccgtgaatttttctcattggctcta

SEQ ID NO: 324488 - DNA, 59 bp, Artificial
  Synthetic oligonucleotide
aggcgacctaatatatcaacaagcatcagtgcaagagagagacataaggggccatgcaa

SEQ ID NO: 324489 - DNA, 52 bp, Artificial
  Synthetic oligonucleotide
aggcgactccgatcatcggcacttgggccagacgtgtgatagaactgacggg

SEQ ID NO: 324490 - DNA, 57 bp, Artificial
  Synthetic oligonucleotide
aggcgactgttacgggtggtcaatatgcaagtaaggagcaggcgatagttaggaaat

SEQ ID NO: 324491 - DNA, 59 bp, Artificial
  Synthetic oligonucleotide
aggcgagaagtggcgatctagagagagcgcgcgcgctttataaatgcgcgccatatgcg

SEQ ID NO: 324492 - DNA, 60 bp, Artificial
  Synthetic oligonucleotide
aggcgagaattctactctcgtcgcaaactctctacataacatggccattggccgcgttat

SEQ ID NO: 324493 - DNA, 59 bp, Artificial
  Synthetic oligonucleotide
aggcgagacgtacagaatgactacgttttaggcatgacttacaaagaaatgtcagccaa

SEQ ID NO: 324494 - DNA, 58 bp, Artificial
  Synthetic oligonucleotide
aggcgagatgggctgtcaatataaggatcaccggtgtaacaacccttgtggagaccgc

SEQ ID NO: 324495 - DNA, 55 bp, Artificial
  Synthetic oligonucleotide
aggcgagctctctcactcaaactgctcatctagccccacataatcatgcgcccct

SEQ ID NO: 324496 - DNA, 58 bp, Artificial
  Synthetic oligonucleotide
aggcgaggacgtaccgacattgaccgtgtcaggacatgtgtggtccgagtatgggaaa

SEQ ID NO: 324497 - DNA, 60 bp, Artificial
  Synthetic oligonucleotide
aggcgaggatgacgctgcgacgagtgctatagtgggcaggttggcaatagaagctacaat

SEQ ID NO: 324498 - DNA, 60 bp, Artificial
  Synthetic oligonucleotide
aggcgaggctcaagtgcttccggagacaatcttcagcaccggccgaattgaggtagattg

SEQ ID NO: 324499 - DNA, 54 bp, Artificial
  Synthetic oligonucleotide
aggcgaggggcggcgactggtgagtacgccaaaaataaaatttggactagcgga

SEQ ID NO: 324500 - DNA, 51 bp, Artificial
  Synthetic oligonucleotide
aggcgagttaaccctaaaccgcaccgactggccagaagaagcaaccgtatt

SEQ ID NO: 324501 - DNA, 57 bp, Artificial
  Synthetic oligonucleotide
aggcgataagaaagtgctcaaagttaagaggaagcacaggggtaagtttgcgctcca

SEQ ID NO: 324502 - DNA, 60 bp, Artificial
  Synthetic oligonucleotide
aggcgatctgaactttgtgaacagagcaaatcagaggttgaaccccatgcatcaacttct

SEQ ID NO: 324503 - DNA, 54 bp, Artificial
  Synthetic oligonucleotide
aggcgatgaggacaattgggactcaacccagctccagtgcaggtctgagagaca

SEQ ID NO: 324504 - DNA, 60 bp, Artificial
  Synthetic oligonucleotide
aggcgatgtggtatctgcaatgcaagatcgtttctgataggaccactctgaggagtatta

SEQ ID NO: 324505 - DNA, 60 bp, Artificial
  Synthetic oligonucleotide
aggcgattagctaatgcactgcagaaggaaattggcgagaggacgcatgcggagacagtt

SEQ ID NO: 324506 - DNA, 57 bp, Artificial
  Synthetic oligonucleotide
aggcgcaaagatagggatgtggtaccccatgtggactgaaaaggtgtcgaataaaca

SEQ ID NO: 324507 - DNA, 56 bp, Artificial
  Synthetic oligonucleotide
aggcgcaacaatccctcacccactggagatgtgcggagacttgcacgtgcgatcgg

SEQ ID NO: 324508 - DNA, 53 bp, Artificial
  Synthetic oligonucleotide
aggcgcaagcggtccgcacgctgcaggagcgtcgagaggtgtcgttctcgctg

SEQ ID NO: 324509 - DNA, 55 bp, Artificial
  Synthetic oligonucleotide
aggcgcacatgacacacggacggacttaatggcatgacgggcatactcattcatc

SEQ ID NO: 324510 - DNA, 56 bp, Artificial
  Synthetic oligonucleotide
aggcgcacgagtactgccgagggggcaactgtcaaccaggggagttcaaattgcat

SEQ ID NO: 324511 - DNA, 50 bp, Artificial
  Synthetic oligonucleotide
aggcgcagagctagcgtgacgggctcccgttgagacgtcttacgttccat

SEQ ID NO: 324512 - DNA, 55 bp, Artificial
  Synthetic oligonucleotide
aggcgcagcagtgggttagtggttggcgattaaatgctgactcagtattgtgggg

SEQ ID NO: 324513 - DNA, 58 bp, Artificial
  Synthetic oligonucleotide
aggcgccaaggggatggactaccaaaaagagtctgttctggcgctcaatattctacgc

SEQ ID NO: 324514 - DNA, 55 bp, Artificial
  Synthetic oligonucleotide
aggcgccgccagcggtggcaaagtgtactacaagccaagaggggagtggtgggat

SEQ ID NO: 324515 - DNA, 54 bp, Artificial
  Synthetic oligonucleotide
aggcgcctaatgttggtccggttaagaagcctatacgtatgaagtttcgtaata

SEQ ID NO: 324516 - DNA, 54 bp, Artificial
  Synthetic oligonucleotide
aggcgcctactatcaaatattcccttctgaggaaaattactcttatacccctgt

SEQ ID NO: 324517 - DNA, 53 bp, Artificial
  Synthetic oligonucleotide
aggcgcctggaacagtgaaaccccgcgctctagtacgcccgtccccgggacca

SEQ ID NO: 324518 - DNA, 52 bp, Artificial
  Synthetic oligonucleotide
aggcgcgaacatactagatataacggctgatccaactacagcgccacaaaca

SEQ ID NO: 324519 - DNA, 60 bp, Artificial
  Synthetic oligonucleotide
aggcgcgagcccgttcagtctgcacataatgtgggagccgaaggtagagtgcgtagcaca

SEQ ID NO: 324520 - DNA, 57 bp, Artificial
  Synthetic oligonucleotide
aggcgcggttttcataggtctggcactcttgaccttgtcaccacactataaagtgtt

SEQ ID NO: 324521 - DNA, 53 bp, Artificial
  Synthetic oligonucleotide
aggcgcgtgagaggctggcgcgtgcgtcgtgcaacgggacgccgtgcgactac

SEQ ID NO: 324522 - DNA, 60 bp, Artificial
  Synthetic oligonucleotide
aggcgctagccgcaggcgaagatattgttaagcccgaagacatgtatacctcgatgttaa

SEQ ID NO: 324523 - DNA, 60 bp, Artificial
  Synthetic oligonucleotide
aggcgctatggaccaatcatgttgcgcctgacgagtctagatatttgtgacaacttccgc

SEQ ID NO: 324524 - DNA, 50 bp, Artificial
  Synthetic oligonucleotide
aggcgctgacggagcacacctgcgtttgcaaagcactggccgagtacgtg

SEQ ID NO: 324525 - DNA, 57 bp, Artificial
  Synthetic oligonucleotide
aggcggaagtagtagacgcggttggacgacctatggccacgtctgcggaggcgtgtc

SEQ ID NO: 324526 - DNA, 60 bp, Artificial
  Synthetic oligonucleotide
aggcggaatctgagtcagcaactttattcacagaaattgcaagccctcattcagtatggg

SEQ ID NO: 324527 - DNA, 59 bp, Artificial
  Synthetic oligonucleotide
aggcggacccacttcatcaaggggctagagaagttgcccatgcttatggagacctttga

SEQ ID NO: 324528 - DNA, 60 bp, Artificial
  Synthetic oligonucleotide
aggcggacgatggactctatcataaaccattgtgaaggtggtagagtcatttcaccagcg

SEQ ID NO: 324529 - DNA, 60 bp, Artificial
  Synthetic oligonucleotide
aggcggacgtcagctgacattcacggaatagttcgatatcataattcctcgttctttgct

SEQ ID NO: 324530 - DNA, 60 bp, Artificial
  Synthetic oligonucleotide
aggcggagaagtgagaaatgatgatgtcgaccagagtttgatcattgctgccagaaatat

SEQ ID NO: 324531 - DNA, 55 bp, Artificial
  Synthetic oligonucleotide
aggcggatccgcagtctttggaaggataggacgacaggggacacctcctattact

SEQ ID NO: 324532 - DNA, 57 bp, Artificial
  Synthetic oligonucleotide
aggcggcaatagctcttcacggggccggcgattcagagggggaaacagcgctggact

SEQ ID NO: 324533 - DNA, 59 bp, Artificial
  Synthetic oligonucleotide
aggcggcagatacagcgagtcagtcacgtcctcctacgaatggggtaaacaacgcgtga

SEQ ID NO: 324534 - DNA, 59 bp, Artificial
  Synthetic oligonucleotide
aggcggccatcaagcggcgcgtcccctcgaaactggaatcggacttgatcaaggcgcaa

SEQ ID NO: 324535 - DNA, 50 bp, Artificial
  Synthetic oligonucleotide
aggcggcccgatgacccccgatagtcccgtactcgtttccgtaaactccc

SEQ ID NO: 324536 - DNA, 58 bp, Artificial
  Synthetic oligonucleotide
aggcggctggtcaataaaagcctcacacgtaactaacatctaagacaatcttatacaa

SEQ ID NO: 324537 - DNA, 52 bp, Artificial
  Synthetic oligonucleotide
aggcgggaaaaaatcgcgggacagttcataagttaattacctcaatgttaaa

SEQ ID NO: 324538 - DNA, 56 bp, Artificial
  Synthetic oligonucleotide
aggcgggagctgagttggcggtattgctacaaaccgtctgaagtcactaaacgtat

SEQ ID NO: 324539 - DNA, 54 bp, Artificial
  Synthetic oligonucleotide
aggcgggatggcaaccagggacaacgcccaggaagaggcctctcttcggggtcg

SEQ ID NO: 324540 - DNA, 60 bp, Artificial
  Synthetic oligonucleotide
aggcgggcaaaaatcgcaagactgtgcataaattgatgacatgcatgctaaatgtgcaag

SEQ ID NO: 324541 - DNA, 60 bp, Artificial
  Synthetic oligonucleotide
aggcgggcatcttatataagagagaaactacacgcagcgcctcattttgtgggtcaccat

SEQ ID NO: 324542 - DNA, 53 bp, Artificial
  Synthetic oligonucleotide
aggcggggttgcggctatggcgtgtcccgctttcttcggggggctagttgacc

SEQ ID NO: 324543 - DNA, 55 bp, Artificial
  Synthetic oligonucleotide
aggcgggtcaggaagagtggttatgtcacctatagtgtggttgaatagtccgatg

SEQ ID NO: 324544 - DNA, 50 bp, Artificial
  Synthetic oligonucleotide
aggcggtatgcagagcgtaacctagtcacgcttaacggcacaataagcgt

SEQ ID NO: 324545 - DNA, 57 bp, Artificial
  Synthetic oligonucleotide
aggcggtcgggacgagatgctttgtgcaagggcctatcgcagaaagtggtgggcctt

SEQ ID NO: 324546 - DNA, 60 bp, Artificial
  Synthetic oligonucleotide
aggcggtctccatgactctatgtctacgctgctcaataggctctacgtcggtaaggctgg

SEQ ID NO: 324547 - DNA, 56 bp, Artificial
  Synthetic oligonucleotide
aggcggtgaaagggcaaggccagactgtatttggggcacatagtaagagggcaccg

SEQ ID NO: 324548 - DNA, 50 bp, Artificial
  Synthetic oligonucleotide
aggcggttctacagccgtctgccggactgagccccggtgccatagcgtgc

SEQ ID NO: 324549 - DNA, 52 bp, Artificial
  Synthetic oligonucleotide
aggcggttttctaccccctagctttttttcgcagctcaagtgggtcgcgggc

SEQ ID NO: 324550 - DNA, 57 bp, Artificial
  Synthetic oligonucleotide
aggcgtaaacagcagggtcataaccgtagggttgccctggcaaacgaggctcacata

SEQ ID NO: 324551 - DNA, 59 bp, Artificial
  Synthetic oligonucleotide
aggcgtaaagctcgattacgatatttgccactcatagacccgcggtccttagaggtgca

SEQ ID NO: 324552 - DNA, 59 bp, Artificial
  Synthetic oligonucleotide
aggcgtaactgttactttatgtctggcgaacatgagaggtgctgtaatgtcatttttcg

SEQ ID NO: 324553 - DNA, 50 bp, Artificial
  Synthetic oligonucleotide
aggcgtacacgaccgtgtctaacacgacccgttgggccgacagatgcccg

SEQ ID NO: 324554 - DNA, 56 bp, Artificial
  Synthetic oligonucleotide
aggcgtaccgcccattcgaaagggaaactctttcgaaccatgctcagatattcgtc

SEQ ID NO: 324555 - DNA, 56 bp, Artificial
  Synthetic oligonucleotide
aggcgtatagggtggtaactttgtgtacaaagtgtagtacaacactgcgactggtg

SEQ ID NO: 324556 - DNA, 60 bp, Artificial
  Synthetic oligonucleotide
aggcgtcatgtctctcaaccagtcctcatcctcattggctagcactatagtggggatgga

SEQ ID NO: 324557 - DNA, 53 bp, Artificial
  Synthetic oligonucleotide
aggcgtccgtgtgtgtgacccgggggtagggaggtttgtagtgccgttcgcca

SEQ ID NO: 324558 - DNA, 56 bp, Artificial
  Synthetic oligonucleotide
aggcgtcgctaacttgaccggtaatggccaaggtgtggtaccctgcctcgattaca

SEQ ID NO: 324559 - DNA, 55 bp, Artificial
  Synthetic oligonucleotide
aggcgtcgctggaacccttacatacttacgcggacgctggttcatgtaactaaac

SEQ ID NO: 324560 - DNA, 55 bp, Artificial
  Synthetic oligonucleotide
aggcgtctggacgatacctgagaattgcgctggcggagctaccgtggcgctagtc

SEQ ID NO: 324561 - DNA, 57 bp, Artificial
  Synthetic oligonucleotide
aggcgtgacatgggcgggacctgggcgggaccggggagtggcgagccctcagattgc

SEQ ID NO: 324562 - DNA, 55 bp, Artificial
  Synthetic oligonucleotide
aggcgtgctatagcggctagggttgcgtttggcgagtctgctgcgtgtgatccta

SEQ ID NO: 324563 - DNA, 60 bp, Artificial
  Synthetic oligonucleotide
aggcgtggagagacagctatgggcttggctgtttcacgtgggacagcgaaattggcatgg

SEQ ID NO: 324564 - DNA, 57 bp, Artificial
  Synthetic oligonucleotide
aggcgtgggcggtggctaacgatttcgaagaattgatgttaacggatcaggtgtaca

SEQ ID NO: 324565 - DNA, 49 bp, Artificial
  Synthetic oligonucleotide
aggcgtgggggttacgataaaccctagagtttttccctcctcttaaatc

SEQ ID NO: 324566 - DNA, 52 bp, Artificial
  Synthetic oligonucleotide
aggcgtggtagacaggttacgccagccaccgtctgcactgtcctggatcggt

SEQ ID NO: 324567 - DNA, 54 bp, Artificial
  Synthetic oligonucleotide
aggcgtggtcgctgcgttaagcgatagagtttttccctcctctttaatcgaagg

SEQ ID NO: 324568 - DNA, 55 bp, Artificial
  Synthetic oligonucleotide
aggcgtgtagtggtaactacttctcttagtgtgtctcaacgcgcgactgaattct

SEQ ID NO: 324569 - DNA, 50 bp, Artificial
  Synthetic oligonucleotide
aggcgtgtccatatgaacctaggcacccgcgcacaactaagcgcccctac

SEQ ID NO: 324570 - DNA, 60 bp, Artificial
  Synthetic oligonucleotide
aggcgtgtgattctgctatgtgttatggggccacagttacaaatctactcagagggtcta

SEQ ID NO: 324571 - DNA, 54 bp, Artificial
  Synthetic oligonucleotide
aggcgttacaagagctgacaaggacaacgtgaggacggtagattccttcttgat

SEQ ID NO: 324572 - DNA, 59 bp, Artificial
  Synthetic oligonucleotide
aggcgttcgatgttggcctttatgttatggtagttgacgatgaatgtctttggatctcc

SEQ ID NO: 324573 - DNA, 55 bp, Artificial
  Synthetic oligonucleotide
aggcgttcgtaggaccccggcccgagggatatgagatccggcacctgaacggtga

SEQ ID NO: 324574 - DNA, 52 bp, Artificial
  Synthetic oligonucleotide
aggcgttgccacagctgctcagataacagccggcattgcacttcaccagtcc

SEQ ID NO: 324575 - DNA, 59 bp, Artificial
  Synthetic oligonucleotide
aggcgttggcattcagaaagctgacggttttggcggtacgactcaggatgttgagcagg

SEQ ID NO: 324576 - DNA, 52 bp, Artificial
  Synthetic oligonucleotide
aggcgtttaataagtaccccttagttgtgtcgcctttaatctccgcaggtat

SEQ ID NO: 324577 - DNA, 50 bp, Artificial
  Synthetic oligonucleotide
aggcgtttagggtatgttgaacgtgaaaaacgatgtttaactgaaacggc

SEQ ID NO: 324578 - DNA, 54 bp, Artificial
  Synthetic oligonucleotide
aggcgtttatccccgaacttgctcgtgccgctcaggtaactgcccaactcggtg

SEQ ID NO: 324579 - DNA, 55 bp, Artificial
  Synthetic oligonucleotide
aggcgtttcattcgtaataacttctaataggcgtcagaagttatcttcccactac

SEQ ID NO: 324580 - DNA, 58 bp, Artificial
  Synthetic oligonucleotide
aggcgtttgtaacgcaaggagctgcgaaagtgtttcttctttggatagaggacagcga

SEQ ID NO: 324581 - DNA, 55 bp, Artificial
  Synthetic oligonucleotide
aggcgtttttcgcagcctacccccattccgtcgacggtagatggcacaagttctc

SEQ ID NO: 324582 - DNA, 60 bp, Artificial
  Synthetic oligonucleotide
aggctaaagagatgattccgggaaccagcagattggagaggctgcgtgaaacgagaagca

SEQ ID NO: 324583 - DNA, 54 bp, Artificial
  Synthetic oligonucleotide
aggctaaagcatggaacctttggccctgtccattttagaaaccaagtcaaaata

SEQ ID NO: 324584 - DNA, 57 bp, Artificial
  Synthetic oligonucleotide
aggctaaatacaatctgaagtgggaaggtagtgcctgacggggcggcgtctcggaga

SEQ ID NO: 324585 - DNA, 55 bp, Artificial
  Synthetic oligonucleotide
aggctaagcggttggtccctggaaccgctacaatcactaagatgcgggtggaaac

SEQ ID NO: 324586 - DNA, 60 bp, Artificial
  Synthetic oligonucleotide
aggctaatctgatatttcagacacgagcggtcaaacctaatgcaagaagtcatcataaac

SEQ ID NO: 324587 - DNA, 60 bp, Artificial
  Synthetic oligonucleotide
aggctacaaagattggatactgtggatttcattcgccatatcatgcttcttaatttgcgt

SEQ ID NO: 324588 - DNA, 60 bp, Artificial
  Synthetic oligonucleotide
aggctacacaccaactatgagctggacaacatgtggcacaagttatgtccctgcagtttg

SEQ ID NO: 324589 - DNA, 57 bp, Artificial
  Synthetic oligonucleotide
aggctacaccagctcatgaaccggtgaacacaacagatgattccacaagctactaca

SEQ ID NO: 324590 - DNA, 58 bp, Artificial
  Synthetic oligonucleotide
aggctacacgcgacgagtcttaatgacagttacgaaaacgatgcgtaatgggacgata

SEQ ID NO: 324591 - DNA, 60 bp, Artificial
  Synthetic oligonucleotide
aggctacccaccatctgtgaaatcaaaaaacacacagattggatttgttatggtgatgac

SEQ ID NO: 324592 - DNA, 53 bp, Artificial
  Synthetic oligonucleotide
aggctacggtccctcttgcgcatatggaggaaaagcgcacggtccacaggtgt

SEQ ID NO: 324593 - DNA, 60 bp, Artificial
  Synthetic oligonucleotide
aggctacggtttcaggtgacatgtacaattcatatgctgtatttaacagtgttccaattg

SEQ ID NO: 324594 - DNA, 57 bp, Artificial
  Synthetic oligonucleotide
aggctacgtattctccggatacggtgggttacgatctgatacgtgatcttataggtg

SEQ ID NO: 324595 - DNA, 53 bp, Artificial
  Synthetic oligonucleotide
aggctacgtattgcctccccgtttaaatcgtcaagctataaatcgtgggggcc

SEQ ID NO: 324596 - DNA, 57 bp, Artificial
  Synthetic oligonucleotide
aggctacgtcgatatgattcctgcattactacttttacaaccccgaatggcatttcc

SEQ ID NO: 324597 - DNA, 56 bp, Artificial
  Synthetic oligonucleotide
aggctactgagggagagaccaacagcttgttacaccctatatgccaacatggaata

SEQ ID NO: 324598 - DNA, 50 bp, Artificial
  Synthetic oligonucleotide
aggctagaagctctcgatttgacaacgagtgcgggatatccgtatgttgc

SEQ ID NO: 324599 - DNA, 52 bp, Artificial
  Synthetic oligonucleotide
aggctagacacatcgcctccgtagcagggtccagggaatacaggaagccccc

SEQ ID NO: 324600 - DNA, 59 bp, Artificial
  Synthetic oligonucleotide
aggctagagatcatttcggttatgactttgtcaccagggcctgaggtattcactagaac

SEQ ID NO: 324601 - DNA, 60 bp, Artificial
  Synthetic oligonucleotide
aggctagcatagttcgagtgccgtacttcgtgcgcgctcaagggctcattcgtgcatgca

SEQ ID NO: 324602 - DNA, 55 bp, Artificial
  Synthetic oligonucleotide
aggctaggcaaaaaggctaccatgcaaacacgtaggggtacgcaaataggtgctc

SEQ ID NO: 324603 - DNA, 58 bp, Artificial
  Synthetic oligonucleotide
aggctaggcaaatggtacaggcaatgagaacaattgggacccaccctagttccagcac

SEQ ID NO: 324604 - DNA, 54 bp, Artificial
  Synthetic oligonucleotide
aggctagggttcgctagaactagttcttttacactaagagccaacctcgctaac

SEQ ID NO: 324605 - DNA, 56 bp, Artificial
  Synthetic oligonucleotide
aggctagtaagacgtaagaatctaagacatcactagaactgggtagaagtttggaa

SEQ ID NO: 324606 - DNA, 57 bp, Artificial
  Synthetic oligonucleotide
aggctagtactgatggtaaatatttcgcttacaaagttgaaacattcgaagagattc

SEQ ID NO: 324607 - DNA, 60 bp, Artificial
  Synthetic oligonucleotide
aggctagtatcgaaggtggcagatattatgaacacgctccaatagagttgatttatgcat

SEQ ID NO: 324608 - DNA, 56 bp, Artificial
  Synthetic oligonucleotide
aggctagtgagcaggagtctaaccgtacggtcaagcacactccctggtggcgttta

SEQ ID NO: 324609 - DNA, 59 bp, Artificial
  Synthetic oligonucleotide
aggctagtgatcaagctccgtgacagtacgagtctacgttcgaataataatcgtaagta

SEQ ID NO: 324610 - DNA, 55 bp, Artificial
  Synthetic oligonucleotide
aggctatacgagctactagataaagaagttttaactgacaagcctgtcatagagc

SEQ ID NO: 324611 - DNA, 55 bp, Artificial
  Synthetic oligonucleotide
aggctatataactgacagaggaagacaaaaggttgtccccctaacggatacaaca

SEQ ID NO: 324612 - DNA, 60 bp, Artificial
  Synthetic oligonucleotide
aggctatatgaagtctaggatagaattgactagacacgctcgccacaaccagcactccag

SEQ ID NO: 324613 - DNA, 55 bp, Artificial
  Synthetic oligonucleotide
aggctatattggatgcgccaggagggaatgtaacggatttgatgctaacgcgggg

SEQ ID NO: 324614 - DNA, 60 bp, Artificial
  Synthetic oligonucleotide
aggctatatttggggatttgaagcctcatcttgagaaacagcgagctcgtaagacagacg

SEQ ID NO: 324615 - DNA, 51 bp, Artificial
  Synthetic oligonucleotide
aggctatccccctagaggtgatcaagggggggaggcatctcgtcttctgcc

SEQ ID NO: 324616 - DNA, 60 bp, Artificial
  Synthetic oligonucleotide
aggctatcctctcctttgcacgccgtgggaccatacaggagaagttgatctccgtggcag

SEQ ID NO: 324617 - DNA, 60 bp, Artificial
  Synthetic oligonucleotide
aggctatggagcaaatggctggatcaagtgagcaggcagcggaggccatggagattgcta

SEQ ID NO: 324618 - DNA, 55 bp, Artificial
  Synthetic oligonucleotide
aggctatgtccgtgtcagtagacttggtagaagagccactataaggaccagaagc

SEQ ID NO: 324619 - DNA, 55 bp, Artificial
  Synthetic oligonucleotide
aggctcaatgcaacattcaccgtttgtgtggggcctgaggcatcaccttcagtgg

SEQ ID NO: 324620 - DNA, 59 bp, Artificial
  Synthetic oligonucleotide
aggctcacatggtgcgagtaacatccgtacactgtgggtaggcacacttctccacgggt

SEQ ID NO: 324621 - DNA, 59 bp, Artificial
  Synthetic oligonucleotide
aggctcaccggcgagggccccaccttcgacgccaacacagaatgcaacatcgcctacac

SEQ ID NO: 324622 - DNA, 55 bp, Artificial
  Synthetic oligonucleotide
aggctcacgtacatctactggcgacagggaacccctctatggcaggcgtttaagg

SEQ ID NO: 324623 - DNA, 60 bp, Artificial
  Synthetic oligonucleotide
aggctcagatccgatcactctgcaacgattgtgtctcggaaactactacgatgtacgacc

SEQ ID NO: 324624 - DNA, 60 bp, Artificial
  Synthetic oligonucleotide
aggctcaggtaactattctagcactgatgcacaaatgcaatatgatccgggattgtttgc

SEQ ID NO: 324625 - DNA, 60 bp, Artificial
  Synthetic oligonucleotide
aggctcatatggtggttgcaatatcttatcaccagagccgaggcgcacttgcaagtgtgg

SEQ ID NO: 324626 - DNA, 60 bp, Artificial
  Synthetic oligonucleotide
aggctcatcaggcggacgggtagtaggtggctctgctgtaagaccacctatccctacaga

SEQ ID NO: 324627 - DNA, 60 bp, Artificial
  Synthetic oligonucleotide
aggctcatgctaatgtcatggaagagttgcaaaacgagaagatgaacgtgagtgcgtatg

SEQ ID NO: 324628 - DNA, 55 bp, Artificial
  Synthetic oligonucleotide
aggctcattgatcgtaccactcaacttggatagggcacgtactgcactccttgga

SEQ ID NO: 324629 - DNA, 60 bp, Artificial
  Synthetic oligonucleotide
aggctccagagccaggtgatgcacaaacacagtcggcggaagttatggggatgcctacga

SEQ ID NO: 324630 - DNA, 54 bp, Artificial
  Synthetic oligonucleotide
aggctccataagtggatcaacgaggattgttccactccctgtgattcatcatgg

SEQ ID NO: 324631 - DNA, 53 bp, Artificial
  Synthetic oligonucleotide
aggctccattgtcttcttttaccagagcaaatggacctggggcggggacttcc

SEQ ID NO: 324632 - DNA, 56 bp, Artificial
  Synthetic oligonucleotide
aggctccccattttcgtgtaactctctacatacacgaatatatttcttgttcgtcg

SEQ ID NO: 324633 - DNA, 54 bp, Artificial
  Synthetic oligonucleotide
aggctccctacagcgcaccatcatccccggggagttccgtgggccccgattccc

SEQ ID NO: 324634 - DNA, 55 bp, Artificial
  Synthetic oligonucleotide
aggctccgcttcggccgagcttagtatcccctaaggtagtgccatcgtcacgggg

SEQ ID NO: 324635 - DNA, 55 bp, Artificial
  Synthetic oligonucleotide
aggctcctggcgtcactactgctatcgagcaggcagctctagcagcggccaactc

SEQ ID NO: 324636 - DNA, 60 bp, Artificial
  Synthetic oligonucleotide
aggctccttctcttgcgactaatgacatagctgcctcaacgatgggagctcttgcgaaca

SEQ ID NO: 324637 - DNA, 60 bp, Artificial
  Synthetic oligonucleotide
aggctcgaaagcagaaagagttagtttgctcttccaggcaggcagattccgccccacaga

SEQ ID NO: 324638 - DNA, 55 bp, Artificial
  Synthetic oligonucleotide
aggctcgagcgtattgtactaaagagcactatttcgagtacggggaaatgtctac

SEQ ID NO: 324639 - DNA, 55 bp, Artificial
  Synthetic oligonucleotide
aggctcgggacaatttctaactactgatgatcatagctctgcaccagttctcccg

SEQ ID NO: 324640 - DNA, 57 bp, Artificial
  Synthetic oligonucleotide
aggctcgggatatgcagcagacagagaaagtactcaaaaggctatagacgggattac

SEQ ID NO: 324641 - DNA, 55 bp, Artificial
  Synthetic oligonucleotide
aggctcgtatggacctgcgcactggtatcgacatggtatgtttattgtacgcggt

SEQ ID NO: 324642 - DNA, 55 bp, Artificial
  Synthetic oligonucleotide
aggctcgtgcgtggattacgtacacgcgcgcgcttaagagcgtcgacctgaccca

SEQ ID NO: 324643 - DNA, 60 bp, Artificial
  Synthetic oligonucleotide
aggctctaatagacggaaactatcggagatggtttctagatctccagaacgcatgagaat

SEQ ID NO: 324644 - DNA, 59 bp, Artificial
  Synthetic oligonucleotide
aggctctacgtacacttcctggggtgtgtcttcgaagagtatataagcagaggcggtga

SEQ ID NO: 324645 - DNA, 60 bp, Artificial
  Synthetic oligonucleotide
aggctctatagcgaatttgggctctctcgtgatctccgttgcgaacgtattgtgcgccga

SEQ ID NO: 324646 - DNA, 55 bp, Artificial
  Synthetic oligonucleotide
aggctctccacgaccccggactcagtaaagaggtcagagtaactattatatgccc

SEQ ID NO: 324647 - DNA, 52 bp, Artificial
  Synthetic oligonucleotide
aggctctccggaacataggagggggaacattagggggagtacaaaacacaaa

SEQ ID NO: 324648 - DNA, 52 bp, Artificial
  Synthetic oligonucleotide
aggctctctcccggccaatacgcaggcccaactcttgcggaaggtggggact

SEQ ID NO: 324649 - DNA, 56 bp, Artificial
  Synthetic oligonucleotide
aggctctgcttctggacacggaccgagtccagttcggaccaatagtgaccctaaac

SEQ ID NO: 324650 - DNA, 50 bp, Artificial
  Synthetic oligonucleotide
aggctctgtaccaacatccttcttgagacaagtgttgcgtatgccctgga

SEQ ID NO: 324651 - DNA, 60 bp, Artificial
  Synthetic oligonucleotide
aggctcttaatgttgcactggtggcagtcagcataatcgcaattctgaaagggattgtga

SEQ ID NO: 324652 - DNA, 55 bp, Artificial
  Synthetic oligonucleotide
aggctcttctcagctctacccctagacagctgcgaaataatccgcccaccgcccg

SEQ ID NO: 324653 - DNA, 60 bp, Artificial
  Synthetic oligonucleotide
aggctgaacataactcagtgccatttcggctacttcgatgctcgttcacctgattggaat

SEQ ID NO: 324654 - DNA, 60 bp, Artificial
  Synthetic oligonucleotide
aggctgacatagccagcgaatctatacctactccacttcatacaccgactctaccaccca

SEQ ID NO: 324655 - DNA, 58 bp, Artificial
  Synthetic oligonucleotide
aggctgacggtcatcgtggttagaggaaactcgcagcccagactagactcctacgaag

SEQ ID NO: 324656 - DNA, 55 bp, Artificial
  Synthetic oligonucleotide
aggctgagcgtgatttagcgcgtgtcgaatatcgcccaatgacaaacgccattaa

SEQ ID NO: 324657 - DNA, 60 bp, Artificial
  Synthetic oligonucleotide
aggctgagctggtaggcatgtcgtcttcccttggcaagaggaagaggtccgatgagggcg

SEQ ID NO: 324658 - DNA, 60 bp, Artificial
  Synthetic oligonucleotide
aggctgatccaaaacagcataacaatagagagaatggtcctctctgcatttgacgagagg

SEQ ID NO: 324659 - DNA, 60 bp, Artificial
  Synthetic oligonucleotide
aggctgatggtgagttcgtcgtcaaacatattggcggcgagttagacggcagttggcttg

SEQ ID NO: 324660 - DNA, 58 bp, Artificial
  Synthetic oligonucleotide
aggctgattaggagcagcaaatacgagcccatagattttaactgcgctgataaggtgc

SEQ ID NO: 324661 - DNA, 50 bp, Artificial
  Synthetic oligonucleotide
aggctgattttaaaaggcttgttattattgagcctgacaaacgaatgagt

SEQ ID NO: 324662 - DNA, 57 bp, Artificial
  Synthetic oligonucleotide
aggctgcaagttaatggtctccgagcagtaactgacctaaacggacctatcgtcgta

SEQ ID NO: 324663 - DNA, 51 bp, Artificial
  Synthetic oligonucleotide
aggctgccgtttaacatgtacgctaaggtatggaacgactggtttcgagac

SEQ ID NO: 324664 - DNA, 55 bp, Artificial
  Synthetic oligonucleotide
aggctgcgtcgtccgcgcctgcgcagggcatatcgctaccgtctacgccggaata

SEQ ID NO: 324665 - DNA, 60 bp, Artificial
  Synthetic oligonucleotide
aggctgctcaggctcaccatggagatttattaaggaaaagatttgcaactggttacagct

SEQ ID NO: 324666 - DNA, 56 bp, Artificial
  Synthetic oligonucleotide
aggctgctctaaagtggagaaaggacataggtttccgtgttaatgcaaatacggcg

SEQ ID NO: 324667 - DNA, 57 bp, Artificial
  Synthetic oligonucleotide
aggctggaagactcggtagttacgcatggatgagtaagtggtccctacgcactaagt

SEQ ID NO: 324668 - DNA, 52 bp, Artificial
  Synthetic oligonucleotide
aggctggacaggtagccagctggacgcaaggccggaaagtgctaacgcactt

SEQ ID NO: 324669 - DNA, 50 bp, Artificial
  Synthetic oligonucleotide
aggctggaggccgaataacagggttgtcccaatacctaggtacaccggat

SEQ ID NO: 324670 - DNA, 53 bp, Artificial
  Synthetic oligonucleotide
aggctggcagaccaaccaaattacacataccaagtacaccttgagaatttgga

SEQ ID NO: 324671 - DNA, 55 bp, Artificial
  Synthetic oligonucleotide
aggctggccagctgccgaccccttacctatttcaaccagggctggggccctatca

SEQ ID NO: 324672 - DNA, 60 bp, Artificial
  Synthetic oligonucleotide
aggctggccgtatcatctcgtcgttcgctgacatgcggttcctactgcggttttccagct

SEQ ID NO: 324673 - DNA, 53 bp, Artificial
  Synthetic oligonucleotide
aggctggcggacgattaaactctcacttgttaccgcaagatgcaatcaagacc

SEQ ID NO: 324674 - DNA, 57 bp, Artificial
  Synthetic oligonucleotide
aggctgggctaagacgcaggcgtatctagtgactgattgcaagacaccgtttattgg

SEQ ID NO: 324675 - DNA, 60 bp, Artificial
  Synthetic oligonucleotide
aggctggggcccactcggggtcgctaacatcagcggctcgtctgatgacaggccttattg

SEQ ID NO: 324676 - DNA, 60 bp, Artificial
  Synthetic oligonucleotide
aggctggtcagcaacatacagcaaagatcttgggatctatgtgcctgtacttgacaagga

SEQ ID NO: 324677 - DNA, 55 bp, Artificial
  Synthetic oligonucleotide
aggctgtaacactgaatgaggtttgctatgaagcattcgaagcagccttcaatgg

SEQ ID NO: 324678 - DNA, 55 bp, Artificial
  Synthetic oligonucleotide
aggctgtacaatagaaaactagtccagcaggtaaaaatcacagacagaacttttt

SEQ ID NO: 324679 - DNA, 56 bp, Artificial
  Synthetic oligonucleotide
aggctgtacaggtcctaaaacgaaagtatgctagtagtccacttagcagcgtgagc

SEQ ID NO: 324680 - DNA, 52 bp, Artificial
  Synthetic oligonucleotide
aggctgtacccactgccgaaagcctttaaccgttatccgccaaccaactacg

SEQ ID NO: 324681 - DNA, 58 bp, Artificial
  Synthetic oligonucleotide
aggctgtaggataataaatggacgccagctagtccccaaccgtgacaggattctcgcg

SEQ ID NO: 324682 - DNA, 59 bp, Artificial
  Synthetic oligonucleotide
aggctgtatcgattataccgctctcctgatgtcccacgtggttgtgagggaccgtgtaa

SEQ ID NO: 324683 - DNA, 52 bp, Artificial
  Synthetic oligonucleotide
aggctgtcaacaaatcatgaatcagctacaaccagctcttaagacaggaaca

SEQ ID NO: 324684 - DNA, 60 bp, Artificial
  Synthetic oligonucleotide
aggctgtgaccttaaaaactgaggttataggcgtgacaagtttgatgaatgtgcactcta

SEQ ID NO: 324685 - DNA, 60 bp, Artificial
  Synthetic oligonucleotide
aggctgtgctagctattaataccagcaagttccccaacatgtacatcccagtaggacagg

SEQ ID NO: 324686 - DNA, 60 bp, Artificial
  Synthetic oligonucleotide
aggctgtgcttggtatgagctcacacccgccgagactacagttaggctacgagcgtacat

SEQ ID NO: 324687 - DNA, 55 bp, Artificial
  Synthetic oligonucleotide
aggctgtggcggctgtttcccagcggacaagccacgtgtgcctgcggatgtaaag

SEQ ID NO: 324688 - DNA, 55 bp, Artificial
  Synthetic oligonucleotide
aggctgtggtgattggtatattgtgcatgaagcggagtgcgaggaggaattgact

SEQ ID NO: 324689 - DNA, 56 bp, Artificial
  Synthetic oligonucleotide
aggctgtgtacaccgattggagctctctcaaacttactcattcaatcggtgtattg

SEQ ID NO: 324690 - DNA, 55 bp, Artificial
  Synthetic oligonucleotide
aggctgttactccatctatgaccgccgcccctcttgtcactacacctctcggcgt

SEQ ID NO: 324691 - DNA, 58 bp, Artificial
  Synthetic oligonucleotide
aggctgttcgtgacgaggcgcaacttattctcgaagggggcggcacgtcagagatcgt

SEQ ID NO: 324692 - DNA, 58 bp, Artificial
  Synthetic oligonucleotide
aggcttaacatcaatgggccaacccgcactaagctcgaacctagtgtgttctatgacg

SEQ ID NO: 324693 - DNA, 57 bp, Artificial
  Synthetic oligonucleotide
aggcttaccatgcaaaagtcgtgaaggtggctcggccctcacccgagggtggctgcg

SEQ ID NO: 324694 - DNA, 58 bp, Artificial
  Synthetic oligonucleotide
aggcttacgcattcaatggggtttcgaaatccgagcacgcgcgcatgggttacttggc

SEQ ID NO: 324695 - DNA, 60 bp, Artificial
  Synthetic oligonucleotide
aggcttactgtgctcgccactgcgactcctcctgggtcgattactgtcccacatcccaac

SEQ ID NO: 324696 - DNA, 60 bp, Artificial
  Synthetic oligonucleotide
aggcttagcgttgttggaactactgtgccaccaactgcagacgcgagcactagtaattcc

SEQ ID NO: 324697 - DNA, 55 bp, Artificial
  Synthetic oligonucleotide
aggcttagctcaattgttagacatacctttagtagattgtttgctaccttgcaac

SEQ ID NO: 324698 - DNA, 60 bp, Artificial
  Synthetic oligonucleotide
aggcttatagattattaatgagggacctgtctagcctagaactaaccaatgatgacatcc

SEQ ID NO: 324699 - DNA, 59 bp, Artificial
  Synthetic oligonucleotide
aggcttatcaatatcgtgtgttcatattcccggtatttctgtgtcttgagcttacccaa

SEQ ID NO: 324700 - DNA, 55 bp, Artificial
  Synthetic oligonucleotide
aggcttatcccggggaactcggctaatcgtcttcacatagcagctccaggacccc

SEQ ID NO: 324701 - DNA, 55 bp, Artificial
  Synthetic oligonucleotide
aggcttatgacgtacctccgtggtattagttataaggttacagtcggtgctctcg

SEQ ID NO: 324702 - DNA, 60 bp, Artificial
  Synthetic oligonucleotide
aggcttatggccaaaatgagctagatcttgcgcaactttctttggatgatactagttccc

SEQ ID NO: 324703 - DNA, 55 bp, Artificial
  Synthetic oligonucleotide
aggcttatgggtgcttcctgtttcctcccgccgtattgataggccagaaggaagg

SEQ ID NO: 324704 - DNA, 51 bp, Artificial
  Synthetic oligonucleotide
aggcttccaactttcatgactcagaaggcaagagacgcactggataaccta

SEQ ID NO: 324705 - DNA, 56 bp, Artificial
  Synthetic oligonucleotide
aggcttccacggttcaataaccgtgtggtggtccagaagattgtcacaactctcgg

SEQ ID NO: 324706 - DNA, 55 bp, Artificial
  Synthetic oligonucleotide
aggcttccgtggactggtctaagcgccttggccttaattggggtggtgcgttatc

SEQ ID NO: 324707 - DNA, 57 bp, Artificial
  Synthetic oligonucleotide
aggcttcgacagctgtcccgcggacagcgtctgaggtttctattcccttaggggata

SEQ ID NO: 324708 - DNA, 50 bp, Artificial
  Synthetic oligonucleotide
aggcttcgcgcccctctgccctagcgtctcgtacctatgcgcggtcgtac

SEQ ID NO: 324709 - DNA, 56 bp, Artificial
  Synthetic oligonucleotide
aggcttctcgagtgccgggaaaaagctcgagcctagttagaggactaggagaggcc

SEQ ID NO: 324710 - DNA, 55 bp, Artificial
  Synthetic oligonucleotide
aggcttgaaacagtggtctaggtgccctatttagggtgaggagcctagctggcag

SEQ ID NO: 324711 - DNA, 52 bp, Artificial
  Synthetic oligonucleotide
aggcttgaggtacagctcttgtcggtagaccatataaatgaaaatttggtac

SEQ ID NO: 324712 - DNA, 58 bp, Artificial
  Synthetic oligonucleotide
aggcttgcgggtatagtgatagagtactgcaattaacactgggaaactccactataac

SEQ ID NO: 324713 - DNA, 55 bp, Artificial
  Synthetic oligonucleotide
aggcttgctaaagccatttggtatattagccgatgatgtccacttatgcgagcca

SEQ ID NO: 324714 - DNA, 59 bp, Artificial
  Synthetic oligonucleotide
aggcttggcatttacgatttgcgctacacctactcggagtatgccgagtgtcgggttga

SEQ ID NO: 324715 - DNA, 51 bp, Artificial
  Synthetic oligonucleotide
aggcttgggacaccgtctattcaaggaaattggtcctttagtaggcgaggg

SEQ ID NO: 324716 - DNA, 58 bp, Artificial
  Synthetic oligonucleotide
aggcttgtatggggcctacgaggtgttgagatatcccgtggtcagcccttaggcatag

SEQ ID NO: 324717 - DNA, 52 bp, Artificial
  Synthetic oligonucleotide
aggctttaaaggctggccgtgttgttgtaaccaacattgaaggtatggagcc

SEQ ID NO: 324718 - DNA, 53 bp, Artificial
  Synthetic oligonucleotide
aggctttctcatagtagtaatcaagcattatcagttgagtatgtggatgttag

SEQ ID NO: 324719 - DNA, 58 bp, Artificial
  Synthetic oligonucleotide
aggctttgaatggtaagtttagttcatctattagaaatagaaattggatgactgattc

SEQ ID NO: 324720 - DNA, 54 bp, Artificial
  Synthetic oligonucleotide
aggctttgagctcttcttcgagtgctcaccataatcatccacagacaaattagc

SEQ ID NO: 324721 - DNA, 57 bp, Artificial
  Synthetic oligonucleotide
aggctttgcacctaactgctctaaagtagtagctgctacatgcaccagaatgatgga

SEQ ID NO: 324722 - DNA, 52 bp, Artificial
  Synthetic oligonucleotide
aggctttgcacctactgctgtcagacgctacgagggaccagagtctgtgaga

SEQ ID NO: 324723 - DNA, 60 bp, Artificial
  Synthetic oligonucleotide
aggctttggcattatccttgcactgtcaactacaccatattcaaggtcagaatgtacgtg

SEQ ID NO: 324724 - DNA, 53 bp, Artificial
  Synthetic oligonucleotide
aggctttgtggagatccaacgctttcctgaggttgtggttggcgcgaatttgt

SEQ ID NO: 324725 - DNA, 60 bp, Artificial
  Synthetic oligonucleotide
agggaaaacatccatcggcctgctctgtgtgacggcctcaagcgcactgctgtggatggc

SEQ ID NO: 324726 - DNA, 59 bp, Artificial
  Synthetic oligonucleotide
agggaaaatgtatgatatgtggaacgcttcgagtatttcgaagtggttcgcagcgttga

SEQ ID NO: 324727 - DNA, 51 bp, Artificial
  Synthetic oligonucleotide
agggaaacgagccaagtggcgccgaccacttaaaaacaccggaatccaccc

SEQ ID NO: 324728 - DNA, 54 bp, Artificial
  Synthetic oligonucleotide
agggaaagcagggtatgttactgatagaggaaggcaaaaaattgtttccttcac

SEQ ID NO: 324729 - DNA, 53 bp, Artificial
  Synthetic oligonucleotide
agggaaagctaagatatgttgcgttaaaatgaccgccatggatttagaattac

SEQ ID NO: 324730 - DNA, 59 bp, Artificial
  Synthetic oligonucleotide
agggaaagtggacaacgaacacagagactggagcaccccaactcaatccgattgatgga

SEQ ID NO: 324731 - DNA, 50 bp, Artificial
  Synthetic oligonucleotide
agggaaagtttcatgtgtaccttgaggccgatggagaattcgtcgtaaaa

SEQ ID NO: 324732 - DNA, 59 bp, Artificial
  Synthetic oligonucleotide
agggaaatgcaacgtggcggggtggctccttggcaacctagaatgtgacctgttgctca

SEQ ID NO: 324733 - DNA, 53 bp, Artificial
  Synthetic oligonucleotide
agggaaatgtaagagttagcaggttgggtactaaaggcactataagattacgt

SEQ ID NO: 324734 - DNA, 57 bp, Artificial
  Synthetic oligonucleotide
agggaaattcccgcgaattgttatgccagcaacaaagtgaggaaagcgagcaacaaa

SEQ ID NO: 324735 - DNA, 58 bp, Artificial
  Synthetic oligonucleotide
agggaacaacaggagtggaatctgcagtattgaggggatttctaatcctaggcaaaga

SEQ ID NO: 324736 - DNA, 58 bp, Artificial
  Synthetic oligonucleotide
agggaacaaccggcagcgactacacgactgcttgcacggacttgaagcagtgtcgagc

SEQ ID NO: 324737 - DNA, 60 bp, Artificial
  Synthetic oligonucleotide
agggaacagataggattatagagatcatacaaagaatttgtagagctatcttacatatac

SEQ ID NO: 324738 - DNA, 55 bp, Artificial
  Synthetic oligonucleotide
agggaacagattgaggcaggcaaaagactcatatttatgggtccggcaccttatg

SEQ ID NO: 324739 - DNA, 56 bp, Artificial
  Synthetic oligonucleotide
agggaacagcaaagaatcgggggttgattgtgctatcctaacgattaagggccgca

SEQ ID NO: 324740 - DNA, 55 bp, Artificial
  Synthetic oligonucleotide
agggaacagccggagtagaatctgcggtactgaggggattcctaattttaggcaa

SEQ ID NO: 324741 - DNA, 54 bp, Artificial
  Synthetic oligonucleotide
agggaaccaagaaaatgatccaagtgtcctagaggttgcaacaaagggtttgac

SEQ ID NO: 324742 - DNA, 55 bp, Artificial
  Synthetic oligonucleotide
agggaaccaagaggcagtgacatagcaggcactactagctccctagaggagcaag

SEQ ID NO: 324743 - DNA, 54 bp, Artificial
  Synthetic oligonucleotide
agggaaccaaggggaagtgacatagcaggaactactagtaaccttcaggaacaa

SEQ ID NO: 324744 - DNA, 55 bp, Artificial
  Synthetic oligonucleotide
agggaaccaggccccatggcccttctggaccgcgcctttctgaactagcaaagaa

SEQ ID NO: 324745 - DNA, 56 bp, Artificial
  Synthetic oligonucleotide
agggaaccgcttggtggagttacaaaatccacaacgaccacggtacatcagatctc

SEQ ID NO: 324746 - DNA, 53 bp, Artificial
  Synthetic oligonucleotide
agggaacgagaatacaagtgaggaatggttgactgctcgacaacgcttaaagg

SEQ ID NO: 324747 - DNA, 56 bp, Artificial
  Synthetic oligonucleotide
agggaacgcatatagtaacttctatgatggatggtcacacttttcacaaaacgggg

SEQ ID NO: 324748 - DNA, 55 bp, Artificial
  Synthetic oligonucleotide
agggaacggaaactacaatgcagcggatgcccttagctataggaggtggtgcggg

SEQ ID NO: 324749 - DNA, 60 bp, Artificial
  Synthetic oligonucleotide
agggaactgctgcagattacaagagcacccaatcggcaattgatcaaataacagggaaat

SEQ ID NO: 324750 - DNA, 51 bp, Artificial
  Synthetic oligonucleotide
agggaacttggtggtcacagtatattatagggtacctgtatcgagaaaagc

SEQ ID NO: 324751 - DNA, 60 bp, Artificial
  Synthetic oligonucleotide
agggaactttcattggcatgctgttaatcaggaaatgtggaaaagcatgtttaatctcca

SEQ ID NO: 324752 - DNA, 59 bp, Artificial
  Synthetic oligonucleotide
agggaagaactatggtttatgtcgcaccgtgggatcatgacggatggcttgtacatacc

SEQ ID NO: 324753 - DNA, 59 bp, Artificial
  Synthetic oligonucleotide
agggaagaatcgttgcgttcgcagattcgcggtctgaatgaggccattaagacctcaac

SEQ ID NO: 324754 - DNA, 58 bp, Artificial
  Synthetic oligonucleotide
agggaagaccacctgggctaagtcgaagatacaggctggctggttctactccagagga

SEQ ID NO: 324755 - DNA, 55 bp, Artificial
  Synthetic oligonucleotide
agggaagactacctgggcgaagtctaagatacaatccggatggttctactccagg

SEQ ID NO: 324756 - DNA, 55 bp, Artificial
  Synthetic oligonucleotide
agggaagagatggtgaggcgggtcgcagacgaggctcccttgtatgcgttttgtg

SEQ ID NO: 324757 - DNA, 55 bp, Artificial
  Synthetic oligonucleotide
agggaagataggagaagcccctccacattggacatggaatactcccatattctgt

SEQ ID NO: 324758 - DNA, 60 bp, Artificial
  Synthetic oligonucleotide
agggaagatcatccatattagtccattgttgggaagtgctcagcatgtggaagagtgttc

SEQ ID NO: 324759 - DNA, 60 bp, Artificial
  Synthetic oligonucleotide
agggaagatgataatattttcgtcaactgaatatatgacaagaaaattgtctgttgatcc

SEQ ID NO: 324760 - DNA, 60 bp, Artificial
  Synthetic oligonucleotide
agggaagatgcgtatcatggatattacgcaagcacttaaggtgggcaccaagctagctgc

SEQ ID NO: 324761 - DNA, 52 bp, Artificial
  Synthetic oligonucleotide
agggaagcctttgcagggtccctaccaaagggaaagaacgagtcctcaagaa

SEQ ID NO: 324762 - DNA, 57 bp, Artificial
  Synthetic oligonucleotide
agggaagcggatgtcaagaaggatatgggtccatcggtctctatgacggtggtgggg

SEQ ID NO: 324763 - DNA, 60 bp, Artificial
  Synthetic oligonucleotide
agggaagctctggcgaccacagatggggcggatgattatcatttactgtatgtggtaccc

SEQ ID NO: 324764 - DNA, 58 bp, Artificial
  Synthetic oligonucleotide
agggaagcttgggcggttgctaatgactttgaagttttgatgttagtggatcacgtga

SEQ ID NO: 324765 - DNA, 59 bp, Artificial
  Synthetic oligonucleotide
agggaagctttggcttcatctccccaacaggagaaaagttcagaaggcatgaagatgga

SEQ ID NO: 324766 - DNA, 60 bp, Artificial
  Synthetic oligonucleotide
agggaaggacaattgacctgcaactcaacagtgaccagcttgattgctaacattgacgta

SEQ ID NO: 324767 - DNA, 55 bp, Artificial
  Synthetic oligonucleotide
agggaagggaattaaattaagtgatgttccagaatgggcagagctttcagaagag

SEQ ID NO: 324768 - DNA, 54 bp, Artificial
  Synthetic oligonucleotide
agggaagggtactctctggtcgggatagacccttttcgactgctccaaaacagc

SEQ ID NO: 324769 - DNA, 60 bp, Artificial
  Synthetic oligonucleotide
agggaaggtcatgtgtattagtgatgtcactcgcggtactgggctgacccatagagttgg

SEQ ID NO: 324770 - DNA, 56 bp, Artificial
  Synthetic oligonucleotide
agggaaggtgacacttcggtaaatgacaagtcggactactgataaatggggcagga

SEQ ID NO: 324771 - DNA, 55 bp, Artificial
  Synthetic oligonucleotide
agggaaggttacacgattgatgctatacgtgttggtgatgtgcaggtagaacaac

SEQ ID NO: 324772 - DNA, 54 bp, Artificial
  Synthetic oligonucleotide
agggaaggtttttaagattgtgtcccttaaatacacaagaaaagtatgcatcca

SEQ ID NO: 324773 - DNA, 54 bp, Artificial
  Synthetic oligonucleotide
agggaagtgaaaactgtccttgatggacctgaaccctccttgattaaagggtca

SEQ ID NO: 324774 - DNA, 53 bp, Artificial
  Synthetic oligonucleotide
agggaagtggatactgaacagctccgttttagatgcgccaggagcaacgttga

SEQ ID NO: 324775 - DNA, 57 bp, Artificial
  Synthetic oligonucleotide
agggaagtgggcttactcatcgtactggaaagcgtttcacaatcaaatccatttata

SEQ ID NO: 324776 - DNA, 54 bp, Artificial
  Synthetic oligonucleotide
agggaagtgttataactgtggaaggcccggacacagagcaaaagaatgcagaca

SEQ ID NO: 324777 - DNA, 58 bp, Artificial
  Synthetic oligonucleotide
agggaagttccaaacagcagcacaaagagcaatggtggaccaggtacgagaaagcagg

SEQ ID NO: 324778 - DNA, 60 bp, Artificial
  Synthetic oligonucleotide
agggaataatatatcatagtagtcagctggtctcctgggaataagtgccatgtttctatt

SEQ ID NO: 324779 - DNA, 55 bp, Artificial
  Synthetic oligonucleotide
agggaatactaagggcgcactagttaatgagcacagtgaggctaaagacgaagcg

SEQ ID NO: 324780 - DNA, 59 bp, Artificial
  Synthetic oligonucleotide
agggaatatgctgaattttactcgcagtctaatcagcttctttcgtatggggacgtgac

SEQ ID NO: 324781 - DNA, 56 bp, Artificial
  Synthetic oligonucleotide
agggaatcaatccgaactatctcttggcatggaaacaagtactagcagaactacaa

SEQ ID NO: 324782 - DNA, 50 bp, Artificial
  Synthetic oligonucleotide
agggaatcaggtccctggcggtcgaaaccctgggtcccccccctggagcg

SEQ ID NO: 324783 - DNA, 60 bp, Artificial
  Synthetic oligonucleotide
agggaatgtcaacacacacgtggatgagtacatgatggaggcagtggatcattatgcagg

SEQ ID NO: 324784 - DNA, 60 bp, Artificial
  Synthetic oligonucleotide
agggaattattgaaattccaagcatgatcgctactgaggcggctcttgcatgctttgcat

SEQ ID NO: 324785 - DNA, 60 bp, Artificial
  Synthetic oligonucleotide
agggaattgaatccgtaaacagtgccgtagtaatgcaatctcatggtccagccaagagca

SEQ ID NO: 324786 - DNA, 57 bp, Artificial
  Synthetic oligonucleotide
agggacaaactagttggcgaacttggcaaatggcccactctgttagatgtggcaacc

SEQ ID NO: 324787 - DNA, 56 bp, Artificial
  Synthetic oligonucleotide
agggacaacctcgaacctgggacctttgatctcggggggctatatgaagcaattga

SEQ ID NO: 324788 - DNA, 58 bp, Artificial
  Synthetic oligonucleotide
agggacaatcgacgtatgcggtacccacgtatcaatctggtgccactagcaagagggt

SEQ ID NO: 324789 - DNA, 56 bp, Artificial
  Synthetic oligonucleotide
agggacaatgtgactaagaaaatggtgacacaaagaacaataggtaaaaagaagca

SEQ ID NO: 324790 - DNA, 56 bp, Artificial
  Synthetic oligonucleotide
agggacacattactgggtaggaggctagcggggtaccgaacatagggtcaggcatg

SEQ ID NO: 324791 - DNA, 53 bp, Artificial
  Synthetic oligonucleotide
agggacaggtagtgccagttataaggtgatgacccaatcgagtcaccagtcac

SEQ ID NO: 324792 - DNA, 52 bp, Artificial
  Synthetic oligonucleotide
agggacatacctagccttaaatgccaccgaccccaacaaaactaaagactgt

SEQ ID NO: 324793 - DNA, 60 bp, Artificial
  Synthetic oligonucleotide
agggacatttgctaataacatagctatgagaaaatggttggtcgcagattggcatgactg

SEQ ID NO: 324794 - DNA, 56 bp, Artificial
  Synthetic oligonucleotide
agggaccactggggtgctttgttcggaactattcaatgaacagggagtccttatgc

SEQ ID NO: 324795 - DNA, 55 bp, Artificial
  Synthetic oligonucleotide
agggacccaaagaatactgaagaccatgtgcgctcactgtgtcaactggcttggc

SEQ ID NO: 324796 - DNA, 54 bp, Artificial
  Synthetic oligonucleotide
agggacccaagtagccatgaggctattcctactaggtttgcgcccggtacggta

SEQ ID NO: 324797 - DNA, 56 bp, Artificial
  Synthetic oligonucleotide
agggacccacggttctggagccttcatgaatatgcgttccaaatttgcccttagat

SEQ ID NO: 324798 - DNA, 55 bp, Artificial
  Synthetic oligonucleotide
agggaccgcagtctgacagcaatttcacgacgaacctaagacttacccctgggct

SEQ ID NO: 324799 - DNA, 55 bp, Artificial
  Synthetic oligonucleotide
agggaccgttatcgttcctttccaacttggcagaggaacagagaacatgactacc

SEQ ID NO: 324800 - DNA, 57 bp, Artificial
  Synthetic oligonucleotide
agggacctagtagtcagttatgtcaatactaatgtgggccttaagttcaggcaacta

SEQ ID NO: 324801 - DNA, 51 bp, Artificial
  Synthetic oligonucleotide
agggacgaagtaccgtgacggacgggtgtaccggtcaacggatgaatggtt

SEQ ID NO: 324802 - DNA, 60 bp, Artificial
  Synthetic oligonucleotide
agggacgcacatcagacatgcgtacggaagttataaggatgatggaaagcgcaaagccag

SEQ ID NO: 324803 - DNA, 60 bp, Artificial
  Synthetic oligonucleotide
agggacgcgattacgttcactgctgtatgccgaatttggatgttcgcgatatagctcgtc

SEQ ID NO: 324804 - DNA, 56 bp, Artificial
  Synthetic oligonucleotide
agggacgtcgtcattgtattgataacttaataccacgatttgcaggagaacccgta

SEQ ID NO: 324805 - DNA, 55 bp, Artificial
  Synthetic oligonucleotide
agggacgtggggaccagatcgccaaccgttcggttatttcctaacagcagctgaa

SEQ ID NO: 324806 - DNA, 54 bp, Artificial
  Synthetic oligonucleotide
agggactaagactgttgtgggaaaaaatccgcttgtgctggggagtgctgcaat

SEQ ID NO: 324807 - DNA, 52 bp, Artificial
  Synthetic oligonucleotide
agggactacgtctctctaagtgctaacccggaaaaagggcgtgtgattaaaa

SEQ ID NO: 324808 - DNA, 54 bp, Artificial
  Synthetic oligonucleotide
agggactcccagtctaaatataatgtccgaaacctcggtgtgaggtacggtgta

SEQ ID NO: 324809 - DNA, 56 bp, Artificial
  Synthetic oligonucleotide
agggactcgaaaacgaaagttccagagaagttctctcgacgcaggactcggcttgc

SEQ ID NO: 324810 - DNA, 56 bp, Artificial
  Synthetic oligonucleotide
agggacttactgctgacacagaaaggactttccgcctgagactttccactggggcg

SEQ ID NO: 324811 - DNA, 60 bp, Artificial
  Synthetic oligonucleotide
agggacttatcattccaagacttaagtgagaatccatgtcaaatagatcttagcacatct

SEQ ID NO: 324812 - DNA, 60 bp, Artificial
  Synthetic oligonucleotide
agggacttggtgatatcagacagctccggcagcctgaggctcaaaggcatcacctgtaaa

SEQ ID NO: 324813 - DNA, 48 bp, Artificial
  Synthetic oligonucleotide
agggactttccacggggactttccggggaggtgtggtttgggcggagt

SEQ ID NO: 324814 - DNA, 55 bp, Artificial
  Synthetic oligonucleotide
agggactttccagactgctgacacaactgggactttccactggggcgttccaggg

SEQ ID NO: 324815 - DNA, 52 bp, Artificial
  Synthetic oligonucleotide
agggactttccgctgggacttttcactggggccgttccggaggtgtggtctg

SEQ ID NO: 324816 - DNA, 53 bp, Artificial
  Synthetic oligonucleotide
agggactttccgctggggactttccagggaggcgtgacatgggcggaattggg

SEQ ID NO: 324817 - DNA, 52 bp, Artificial
  Synthetic oligonucleotide
agggactttccgctggggactttccaggggaggcgtggactgggcgggactg

SEQ ID NO: 324818 - DNA, 51 bp, Artificial
  Synthetic oligonucleotide
agggactttccgctggggactttccggggaggcgtggactgggcgggactg

SEQ ID NO: 324819 - DNA, 52 bp, Artificial
  Synthetic oligonucleotide
agggactttccgtggggactttccactgggcgttctaggaggtgtggtctgg

SEQ ID NO: 324820 - DNA, 53 bp, Artificial
  Synthetic oligonucleotide
agggactttcctctgggactttccacctggggcgttccaggaggagtggtctg

SEQ ID NO: 324821 - DNA, 56 bp, Artificial
  Synthetic oligonucleotide
agggacttttcagactgctgacacagaagggactttccactggggcgttccaggag

SEQ ID NO: 324822 - DNA, 59 bp, Artificial
  Synthetic oligonucleotide
agggagaagtgttagagtggagatttgacagccgcctagcacttcgtcacctggcccga

SEQ ID NO: 324823 - DNA, 55 bp, Artificial
  Synthetic oligonucleotide
agggagaatgacctcaggcaaacagggatggctaaagaaatcccaattagcaaag

SEQ ID NO: 324824 - DNA, 60 bp, Artificial
  Synthetic oligonucleotide
agggagagtcaaatccatagcatgattttggacacgccatgcaatttggtaatgtaaagt

SEQ ID NO: 324825 - DNA, 55 bp, Artificial
  Synthetic oligonucleotide
agggagatcctgtcagcctgcagatcggatgcttcccgtggggccgcaagctatg

SEQ ID NO: 324826 - DNA, 55 bp, Artificial
  Synthetic oligonucleotide
agggagatgacgactatgccgaccacagagcatggatcagacgtccagcacttga

SEQ ID NO: 324827 - DNA, 51 bp, Artificial
  Synthetic oligonucleotide
agggagattctattgttagtcacaagtagtagcaatggtacatcaaaggaa

SEQ ID NO: 324828 - DNA, 55 bp, Artificial
  Synthetic oligonucleotide
agggagccggacaatccagtccggcgaccgggtcacagaaccaatcaggcaacac

SEQ ID NO: 324829 - DNA, 53 bp, Artificial
  Synthetic oligonucleotide
agggagcctaaggtggacgaggttcaggtggggtacgtctgggacctgtggga

SEQ ID NO: 324830 - DNA, 58 bp, Artificial
  Synthetic oligonucleotide
agggagcctttcgtctcttgttcgcccatagagtgcagaaccttcttcctcactcagg

SEQ ID NO: 324831 - DNA, 56 bp, Artificial
  Synthetic oligonucleotide
agggagcgcccacctgtacccgctggtgacagtaatcgttctgtccctgttccgtc

SEQ ID NO: 324832 - DNA, 56 bp, Artificial
  Synthetic oligonucleotide
agggagcggctgtcggttgagatgcagctgtgtcgccctggcaaccacccggcggt

SEQ ID NO: 324833 - DNA, 55 bp, Artificial
  Synthetic oligonucleotide
agggagctgcgtctttaagccctggaatgatgatgggtatgtttaatatgttaag

SEQ ID NO: 324834 - DNA, 55 bp, Artificial
  Synthetic oligonucleotide
agggagcttgggctagagacaggtaaccttctttctttatgtaattcatgtcatc

SEQ ID NO: 324835 - DNA, 58 bp, Artificial
  Synthetic oligonucleotide
agggaggaagccacacggagttgacagagaaatcacctccagaggaccccttcagcga

SEQ ID NO: 324836 - DNA, 57 bp, Artificial
  Synthetic oligonucleotide
agggaggacaaaaagcttggaatccagaagcggttttgagatggtctgggatgctaa

SEQ ID NO: 324837 - DNA, 54 bp, Artificial
  Synthetic oligonucleotide
agggaggatgctctacacaccaccatattccttgctgtaccgacagtggataga

SEQ ID NO: 324838 - DNA, 55 bp, Artificial
  Synthetic oligonucleotide
agggaggcacaacagtgactgttacatatgatgaatcaggatacaattgcatgga

SEQ ID NO: 324839 - DNA, 58 bp, Artificial
  Synthetic oligonucleotide
agggaggcctagtacgtctacctggggttgtaacacagatcaatcgagatatcccatc

SEQ ID NO: 324840 - DNA, 56 bp, Artificial
  Synthetic oligonucleotide
agggaggtacaacctccatcttacccagcaggagtttgctccccacggcctagctg

SEQ ID NO: 324841 - DNA, 58 bp, Artificial
  Synthetic oligonucleotide
agggaggtgatcccgtatctccctgtgatcctacggatccagcggtaacaatgaagcc

SEQ ID NO: 324842 - DNA, 53 bp, Artificial
  Synthetic oligonucleotide
agggaggttgggcatatataggtatgtctcttccggtgagagggcgtcgggga

SEQ ID NO: 324843 - DNA, 57 bp, Artificial
  Synthetic oligonucleotide
agggaggttgtcaaacattctagttaggtttagttcgacgtgtgagagctcatgtct

SEQ ID NO: 324844 - DNA, 52 bp, Artificial
  Synthetic oligonucleotide
agggagtatgaagactatgcactccaggagtgcatccaatcagcaaggcaac

SEQ ID NO: 324845 - DNA, 60 bp, Artificial
  Synthetic oligonucleotide
agggagtatgtacagtaaatgaagatagatggaacgtaataaaatgtgatagtgggctga

SEQ ID NO: 324846 - DNA, 59 bp, Artificial
  Synthetic oligonucleotide
agggagtgacaccatctgcacccccgatgaacccagcagagggcatgacacctcggggg

SEQ ID NO: 324847 - DNA, 55 bp, Artificial
  Synthetic oligonucleotide
agggagtgagttataccagtgatcgaaggctccattatggaaatgaaggaactct

SEQ ID NO: 324848 - DNA, 55 bp, Artificial
  Synthetic oligonucleotide
agggagtgattagttataaggaattcgcgtggcattatggccatacgtatgataa

SEQ ID NO: 324849 - DNA, 52 bp, Artificial
  Synthetic oligonucleotide
agggagtgctcaacatatagaggaatgttcctgttatcccaaatactcaaac

SEQ ID NO: 324850 - DNA, 57 bp, Artificial
  Synthetic oligonucleotide
agggagtggaagaaggatccatcgggaaagtgtgcagaaccctactggcaaaatctg

SEQ ID NO: 324851 - DNA, 56 bp, Artificial
  Synthetic oligonucleotide
agggagtgggacgaataactatggagtgaaaggatttggcttcagacaaggtaata

SEQ ID NO: 324852 - DNA, 51 bp, Artificial
  Synthetic oligonucleotide
agggagtgtctggatttctgactgatctacacaaccatcatttggacttgg

SEQ ID NO: 324853 - DNA, 53 bp, Artificial
  Synthetic oligonucleotide
agggagtgtggagtgcaggtaataggcgacgaaccccacgcgcttttaccaga

SEQ ID NO: 324854 - DNA, 55 bp, Artificial
  Synthetic oligonucleotide
agggagttggcttagcatcatgaacttgctcaaatttcatgggattgaacctatt

SEQ ID NO: 324855 - DNA, 55 bp, Artificial
  Synthetic oligonucleotide
agggagtttcacccttgataccaacgccactaaccctgcacggaacttctgccca

SEQ ID NO: 324856 - DNA, 57 bp, Artificial
  Synthetic oligonucleotide
agggataaggtgatgatggaaacgtattacacgtgttgttatgttggcttgaaatct

SEQ ID NO: 324857 - DNA, 55 bp, Artificial
  Synthetic oligonucleotide
agggataccaacaggactatgagcccgttgaagatatgtacgaaggtacattaca

SEQ ID NO: 324858 - DNA, 60 bp, Artificial
  Synthetic oligonucleotide
agggatactatgaggaatgtctagaggcttctactgacattttccttgatgaacttgcta

SEQ ID NO: 324859 - DNA, 57 bp, Artificial
  Synthetic oligonucleotide
agggatactgcacagtaccttggcatttcgagggtgggtatcatctttaaggctacc

SEQ ID NO: 324860 - DNA, 60 bp, Artificial
  Synthetic oligonucleotide
agggatagattcgagcgatgggattgatagttcttatatagaggttgatataacagcaag

SEQ ID NO: 324861 - DNA, 57 bp, Artificial
  Synthetic oligonucleotide
agggatatattatacacaaggggcatataagcagtattacgtggactttaaacaaga

SEQ ID NO: 324862 - DNA, 57 bp, Artificial
  Synthetic oligonucleotide
agggatatcctccacatacctaggagaatcagacagggcttagaaagggttttgcta

SEQ ID NO: 324863 - DNA, 55 bp, Artificial
  Synthetic oligonucleotide
agggatcaggagctcaggttgtgggaccgatgggacagcccctgcaagtgctgac

SEQ ID NO: 324864 - DNA, 60 bp, Artificial
  Synthetic oligonucleotide
agggatcaggatatgcagccgaccgaaagagcacacagaatgccattgacggggtcacta

SEQ ID NO: 324865 - DNA, 60 bp, Artificial
  Synthetic oligonucleotide
agggatcaggatatgctgctgatcagaaaagcacacagaatgcgatcgacgggatcacaa

SEQ ID NO: 324866 - DNA, 58 bp, Artificial
  Synthetic oligonucleotide
agggatcagtcgacgtttgtggtcgtttcgagtgacgggctggaggtgcagcaggacc

SEQ ID NO: 324867 - DNA, 60 bp, Artificial
  Synthetic oligonucleotide
agggatccattattgcacgaatttccagaaagcgttcatggtctaaggtgcatgctagct

SEQ ID NO: 324868 - DNA, 55 bp, Artificial
  Synthetic oligonucleotide
agggatcccagcctgcttctaagcaggacgtgaaacaagttgtcaagtccatcct

SEQ ID NO: 324869 - DNA, 60 bp, Artificial
  Synthetic oligonucleotide
agggatcgccctccatttgtggggagcatttttcctgtatgatcgcattgcctccacaac

SEQ ID NO: 324870 - DNA, 55 bp, Artificial
  Synthetic oligonucleotide
agggatctacacagttagaaaagcaagtcgtaacattcaattggaacgttggtgg

SEQ ID NO: 324871 - DNA, 50 bp, Artificial
  Synthetic oligonucleotide
agggatctcaggagaaggttagagccacgccctccataccaaagacagat

SEQ ID NO: 324872 - DNA, 55 bp, Artificial
  Synthetic oligonucleotide
agggatctcccttgccctactcgtctacaccgccaccaggtcgacactcccacac

SEQ ID NO: 324873 - DNA, 57 bp, Artificial
  Synthetic oligonucleotide
agggatctgcggcgtaaagagaaaggtgaaccacggactaaggcagtgatgaaagga

SEQ ID NO: 324874 - DNA, 60 bp, Artificial
  Synthetic oligonucleotide
agggatctggacataccaagtccattctcaaccttcggacaagcacagagaccaacaatc

SEQ ID NO: 324875 - DNA, 55 bp, Artificial
  Synthetic oligonucleotide
agggatgaagacacgttcgaccgccttatggatgactacgcgataattaccggag

SEQ ID NO: 324876 - DNA, 55 bp, Artificial
  Synthetic oligonucleotide
agggatgaatacaaatacatggtatatcaagtagagcgaggagaaagcggtactc

SEQ ID NO: 324877 - DNA, 59 bp, Artificial
  Synthetic oligonucleotide
agggatgaatggaatgactatagaaaaccccacgtttatgacaattgtgccgatgcaaa

SEQ ID NO: 324878 - DNA, 60 bp, Artificial
  Synthetic oligonucleotide
agggatgatatctatatcgtttggggcggtcgtaactcaactgactatactagatatgtg

SEQ ID NO: 324879 - DNA, 60 bp, Artificial
  Synthetic oligonucleotide
agggatgatctgacactatctagggtgactgctgctcttgctggctacacttgccaggcc

SEQ ID NO: 324880 - DNA, 55 bp, Artificial
  Synthetic oligonucleotide
agggatgatgggacccttttcaaggttgaggaaagtgtactcactgtcaatttgc

SEQ ID NO: 324881 - DNA, 60 bp, Artificial
  Synthetic oligonucleotide
agggatgcaacaaggctatacacccagagccataggaggcaccttgtggaatttgtcaca

SEQ ID NO: 324882 - DNA, 55 bp, Artificial
  Synthetic oligonucleotide
agggatgccccatggcgactatcggcggggacctataaggtttcccgctcttcta

SEQ ID NO: 324883 - DNA, 60 bp, Artificial
  Synthetic oligonucleotide
agggatggatcaactcacccagtcaagccaaatcgctcacacagacactagtgtcaaaca

SEQ ID NO: 324884 - DNA, 59 bp, Artificial
  Synthetic oligonucleotide
agggatggatttataaacatcactatgaaagcactaatccaagagtaagttcagaagta

SEQ ID NO: 324885 - DNA, 55 bp, Artificial
  Synthetic oligonucleotide
agggatggccatcaggaatcgaccgtccccacatgccggctcaagaaccgtgtcc

SEQ ID NO: 324886 - DNA, 55 bp, Artificial
  Synthetic oligonucleotide
agggatggcctaggcgaggggttgacagggtaggagtgtgtctgtagagtgcgcc

SEQ ID NO: 324887 - DNA, 60 bp, Artificial
  Synthetic oligonucleotide
agggatgggacaaaacaatctcagcacagccagatatgatggtatgtggtggtgccgtcg

SEQ ID NO: 324888 - DNA, 60 bp, Artificial
  Synthetic oligonucleotide
agggatgggttgatgatgcccctaggaaatattcagcgctaggccatctctgtaaagagt

SEQ ID NO: 324889 - DNA, 55 bp, Artificial
  Synthetic oligonucleotide
agggatgtgtgttcgcttcggagctcgctttctacaccagtggtcgttgcaatcg

SEQ ID NO: 324890 - DNA, 52 bp, Artificial
  Synthetic oligonucleotide
agggattaaagtaaggcaactttgtaaactccttaggggagccaaagcacta

SEQ ID NO: 324891 - DNA, 60 bp, Artificial
  Synthetic oligonucleotide
agggattagcatgcatggatatctcatacggatgtgaggtggacgctagcaaccgatcag

SEQ ID NO: 324892 - DNA, 56 bp, Artificial
  Synthetic oligonucleotide
agggattatcccttcgtggccataagggatgatgaacttgttcttgacaagaaccg

SEQ ID NO: 324893 - DNA, 55 bp, Artificial
  Synthetic oligonucleotide
agggattccagtcaggcaaataccaggtagtagccaatttctgacagtacagaga

SEQ ID NO: 324894 - DNA, 50 bp, Artificial
  Synthetic oligonucleotide
agggattccccaagaacagcaggctatggctcattttgaacctgccagaa

SEQ ID NO: 324895 - DNA, 55 bp, Artificial
  Synthetic oligonucleotide
agggattcgcaatggcgaacacaaacgcgacgagaagaagactgcagcgacctgg

SEQ ID NO: 324896 - DNA, 59 bp, Artificial
  Synthetic oligonucleotide
agggattctccgccaacactgttccagtctccaaggctaaacgtgatatttcatctctc

SEQ ID NO: 324897 - DNA, 60 bp, Artificial
  Synthetic oligonucleotide
agggattctccgccaacactgttccagtttctaaggccaagcgtgacatatcatctcttg

SEQ ID NO: 324898 - DNA, 51 bp, Artificial
  Synthetic oligonucleotide
agggattgacatatgtccgcgcagggccataggctgaccgctccggtcaat

SEQ ID NO: 324899 - DNA, 60 bp, Artificial
  Synthetic oligonucleotide
agggattgccatcccacatgatattgatctcggtgagtcccgagttgttatccaggacta

SEQ ID NO: 324900 - DNA, 60 bp, Artificial
  Synthetic oligonucleotide
agggattgtgaaccaatggtgtgatgttgctgaattagatcacttgccgttatgcactga

SEQ ID NO: 324901 - DNA, 59 bp, Artificial
  Synthetic oligonucleotide
agggcaaaaaactatgtccaagcgtccagcagatatgatcatttccggtcccgtctcga

SEQ ID NO: 324902 - DNA, 57 bp, Artificial
  Synthetic oligonucleotide
agggcaaaaacagtagagatcgttatccgcaaggtgcctacacaaagcttagtaaca

SEQ ID NO: 324903 - DNA, 60 bp, Artificial
  Synthetic oligonucleotide
agggcaacacgcaagtgcataagcatgaggaggcactgcgtaaatttcaagaagcattcg

SEQ ID NO: 324904 - DNA, 59 bp, Artificial
  Synthetic oligonucleotide
agggcaacagaatatatagtgaagggagtatacataaacacagctttactcaacgcttc

SEQ ID NO: 324905 - DNA, 60 bp, Artificial
  Synthetic oligonucleotide
agggcaacagcacagcaacgctgtgcctgggacatcatgcggtgccaaacggaacgctag

SEQ ID NO: 324906 - DNA, 60 bp, Artificial
  Synthetic oligonucleotide
agggcaacagctatcctcagaaaggcaacaagaaggctgatccagctgatagtaagtggg

SEQ ID NO: 324907 - DNA, 53 bp, Artificial
  Synthetic oligonucleotide
agggcaactaacctttgctggcctaataaacctcagtagcgttccaacaaacc

SEQ ID NO: 324908 - DNA, 59 bp, Artificial
  Synthetic oligonucleotide
agggcaagagaactggagagtcaccacgttggagacattccttgcaagagtggagttcc

SEQ ID NO: 324909 - DNA, 55 bp, Artificial
  Synthetic oligonucleotide
agggcaaggcctttgactctaggtttgtgctatgcagcacaaatcactcactttt

SEQ ID NO: 324910 - DNA, 60 bp, Artificial
  Synthetic oligonucleotide
agggcaagtgcttacagctctgatatcaagaacaataggactggcaaattgctttgctcc

SEQ ID NO: 324911 - DNA, 56 bp, Artificial
  Synthetic oligonucleotide
agggcaatacccccaaccagtcgggctctcacggcctactcaagtatctcggcttg

SEQ ID NO: 324912 - DNA, 60 bp, Artificial
  Synthetic oligonucleotide
agggcaatgatgcatcctagctttgctggactcattgatccaaaacttcccccagatgtg

SEQ ID NO: 324913 - DNA, 57 bp, Artificial
  Synthetic oligonucleotide
agggcaatgttgtcgagaagaagccggtagtggtgccgaaatgggatgaaatggcct

SEQ ID NO: 324914 - DNA, 57 bp, Artificial
  Synthetic oligonucleotide
agggcaattcgcgcacgattatgcgtaatcaagcccacagatcgcaccttcaaccga

SEQ ID NO: 324915 - DNA, 58 bp, Artificial
  Synthetic oligonucleotide
agggcacaatcctgggtccctaaatatacttattgatgcgtctcctcactttagagac

SEQ ID NO: 324916 - DNA, 60 bp, Artificial
  Synthetic oligonucleotide
agggcacaccagctgtgaggagagtgaccacgatgagttgttaatgactatcccgtccgg

SEQ ID NO: 324917 - DNA, 53 bp, Artificial
  Synthetic oligonucleotide
agggcaccgtaaaggaaggggttgtcatacaaagccctcacataaagagtcgg

SEQ ID NO: 324918 - DNA, 58 bp, Artificial
  Synthetic oligonucleotide
agggcacgaagaacccatccctatgtcaacatatggatggaatctagtgcgtcttcaa

SEQ ID NO: 324919 - DNA, 50 bp, Artificial
  Synthetic oligonucleotide
agggcacggctggagtagagtccgctgtattgagagggtttctaattctg

SEQ ID NO: 324920 - DNA, 52 bp, Artificial
  Synthetic oligonucleotide
agggcacgtggagaccacaccgattctgacctggacactgcacaacgagatc

SEQ ID NO: 324921 - DNA, 60 bp, Artificial
  Synthetic oligonucleotide
agggcactattgccactacagatgtagtgaacgctcaatttgctcgtgctccttctgacg

SEQ ID NO: 324922 - DNA, 58 bp, Artificial
  Synthetic oligonucleotide
agggcactggtttgatggccgtttaaatctcaagacatcctttcactgttacggagca

SEQ ID NO: 324923 - DNA, 59 bp, Artificial
  Synthetic oligonucleotide
agggcacttataggtatgtttccactggtgaacgagcctcaggaatgtttgacagtgta

SEQ ID NO: 324924 - DNA, 58 bp, Artificial
  Synthetic oligonucleotide
agggcagagagtactgaccaagtgtgaataccctgaaggacatagtaaggtagggaca

SEQ ID NO: 324925 - DNA, 57 bp, Artificial
  Synthetic oligonucleotide
agggcagggagtgtggcgtcaatttccagctgtacgtgaggatcgtgagcggagatt

SEQ ID NO: 324926 - DNA, 59 bp, Artificial
  Synthetic oligonucleotide
agggcagttaatctatacaagaagctgagaagagaaataacattccatggggctaagga

SEQ ID NO: 324927 - DNA, 57 bp, Artificial
  Synthetic oligonucleotide
agggcatacgacattttcggtgttgacgagttcaatcaatcgtatgctcgaacggtt

SEQ ID NO: 324928 - DNA, 52 bp, Artificial
  Synthetic oligonucleotide
agggcataggccaagctgctgactacaagagtactcaaacagctattgacca

SEQ ID NO: 324929 - DNA, 59 bp, Artificial
  Synthetic oligonucleotide
agggcatcatccgtgctaatctgggcttatggggacaacgaagtaaactggactgccgc

SEQ ID NO: 324930 - DNA, 52 bp, Artificial
  Synthetic oligonucleotide
agggcatcgcacaaccttcgccatgactgtggcgaacggggcgtatgtcaag

SEQ ID NO: 324931 - DNA, 60 bp, Artificial
  Synthetic oligonucleotide
agggcatctgcaggacagataagcatccagcccactttctcggtacagagaaaccttccc

SEQ ID NO: 324932 - DNA, 60 bp, Artificial
  Synthetic oligonucleotide
agggcatctgttggaaggatggttagtggcattgggaggttctacatacagatgtgcaca

SEQ ID NO: 324933 - DNA, 58 bp, Artificial
  Synthetic oligonucleotide
agggcatgcccgtgaggcccaacgccaggtccaaaagggcagacttcaaatcatccca

SEQ ID NO: 324934 - DNA, 56 bp, Artificial
  Synthetic oligonucleotide
agggcatggaaagagtagttagactccatcagactacctcagtagtagaaattaga

SEQ ID NO: 324935 - DNA, 59 bp, Artificial
  Synthetic oligonucleotide
agggcatgggcggtgttcgatgacagaccagacactctgtacctctacaacctaactcc

SEQ ID NO: 324936 - DNA, 58 bp, Artificial
  Synthetic oligonucleotide
agggcattacaatcacaatttgcatcttggtatgaaggtgtcaagaatgactatgatg

SEQ ID NO: 324937 - DNA, 59 bp, Artificial
  Synthetic oligonucleotide
agggcattactaactacatagtagactattaacatataggtgtatagaatatattcagg

SEQ ID NO: 324938 - DNA, 57 bp, Artificial
  Synthetic oligonucleotide
agggcattatattatcagggttatgggcactaattagggattattgcactagggtgg

SEQ ID NO: 324939 - DNA, 55 bp, Artificial
  Synthetic oligonucleotide
agggccaacaattcacgcagcaaagaccccattttcagcttccaggtagaccctg

SEQ ID NO: 324940 - DNA, 50 bp, Artificial
  Synthetic oligonucleotide
agggccaacgatccggtggggactctgcgtaagaacacgaacggtcagta

SEQ ID NO: 324941 - DNA, 58 bp, Artificial
  Synthetic oligonucleotide
agggccaatgggagttgtgctgcatggccaatttaaatgtgtacgttttgggaccaca

SEQ ID NO: 324942 - DNA, 55 bp, Artificial
  Synthetic oligonucleotide
agggccaccaagttagaatatcgtaatccagtttgctagaactataaactagtag

SEQ ID NO: 324943 - DNA, 53 bp, Artificial
  Synthetic oligonucleotide
agggccagataccaaggcagtggcagtagttcattatgggggagtgcctactg

SEQ ID NO: 324944 - DNA, 50 bp, Artificial
  Synthetic oligonucleotide
agggccagctagaggaggcacctccaactaatccttataatacccccaca

SEQ ID NO: 324945 - DNA, 60 bp, Artificial
  Synthetic oligonucleotide
agggccaggagctacactagaagaaatgatgacagcatgtcagggagtgggagggcccgg

SEQ ID NO: 324946 - DNA, 60 bp, Artificial
  Synthetic oligonucleotide
agggccaggatataaaagcaagataatggcacaagccttacaggaggctttgagctctca

SEQ ID NO: 324947 - DNA, 55 bp, Artificial
  Synthetic oligonucleotide
agggccagggacaagacttccactgacctttggttggtgcttcaagttagtacca

SEQ ID NO: 324948 - DNA, 55 bp, Artificial
  Synthetic oligonucleotide
agggccagggacaagattcccactgacctttgggtggtgcttcaaactagaacca

SEQ ID NO: 324949 - DNA, 58 bp, Artificial
  Synthetic oligonucleotide
agggccagggataagatatccactgacctttggatggtgcttcaaactagtaccagta

SEQ ID NO: 324950 - DNA, 59 bp, Artificial
  Synthetic oligonucleotide
agggccagggatcagatatccactgacctttgggtggtgcttcaagctagtaccagttc

SEQ ID NO: 324951 - DNA, 56 bp, Artificial
  Synthetic oligonucleotide
agggccagggatcagattccccctgacctttggatggtgctggaagttagtaccag

SEQ ID NO: 324952 - DNA, 57 bp, Artificial
  Synthetic oligonucleotide
agggccagggcctagatggccactgacctttgggtggtgcttcaagctagtaccagt

SEQ ID NO: 324953 - DNA, 50 bp, Artificial
  Synthetic oligonucleotide
agggccatactcgcgtgggccgaagagaatatgcacgccccaaagatggg

SEQ ID NO: 324954 - DNA, 60 bp, Artificial
  Synthetic oligonucleotide
agggccatcacgcggagcacgcagacggacctagaccaccaggattagagaatgccttta

SEQ ID NO: 324955 - DNA, 52 bp, Artificial
  Synthetic oligonucleotide
agggccatccgttataatattaccggatggcccgaaaaaaatgggcacccaa

SEQ ID NO: 324956 - DNA, 60 bp, Artificial
  Synthetic oligonucleotide
agggccatgctgaatccaccaacactctctattctctgcctgcaccccctactgaataac

SEQ ID NO: 324957 - DNA, 50 bp, Artificial
  Synthetic oligonucleotide
agggcccaagatgcccgggcctcggcaaccggcccccaaaaggcctcccc

SEQ ID NO: 324958 - DNA, 53 bp, Artificial
  Synthetic oligonucleotide
agggcccacccaccaacatggctgaccacatcatacacacaggggtcttccca

SEQ ID NO: 324959 - DNA, 59 bp, Artificial
  Synthetic oligonucleotide
agggcccactgacgcgaaagcgcgttacatgattgcatacgccccaccgggcatggaac

SEQ ID NO: 324960 - DNA, 57 bp, Artificial
  Synthetic oligonucleotide
agggcccactgggcgctagtgcactggtatgctagtaccttggtattacggtaccat

SEQ ID NO: 324961 - DNA, 56 bp, Artificial
  Synthetic oligonucleotide
agggcccatgctcaacgggtcccgagcggctttggctttcacatgggcttgtcccc

SEQ ID NO: 324962 - DNA, 56 bp, Artificial
  Synthetic oligonucleotide
agggcccattgggcgctagcactctggtattacggtacccttgtgcgcctgtttta

SEQ ID NO: 324963 - DNA, 56 bp, Artificial
  Synthetic oligonucleotide
agggccccttcaaaggttttaatgaggtttcaacagcattcagacacatcgactgg

SEQ ID NO: 324964 - DNA, 57 bp, Artificial
  Synthetic oligonucleotide
agggcccgtgttacctatcagttgtatatgatactgtgggattaataacttagtgaa

SEQ ID NO: 324965 - DNA, 59 bp, Artificial
  Synthetic oligonucleotide
agggccgaagcatttccagaggcgcgcaattatgggagctatcaaggtaggtgtaagct

SEQ ID NO: 324966 - DNA, 57 bp, Artificial
  Synthetic oligonucleotide
agggccgaagctttggaccctgaattgattgcctcggcatatgcgtcgttaaaagac

SEQ ID NO: 324967 - DNA, 57 bp, Artificial
  Synthetic oligonucleotide
agggccgaatcggatggtccagggagctccgagattgtgaccgaggagcaaggaacc

SEQ ID NO: 324968 - DNA, 57 bp, Artificial
  Synthetic oligonucleotide
agggccgcaggcccgtcaagatgaatgaacggtccagattaattccttagcgacgaa

SEQ ID NO: 324969 - DNA, 53 bp, Artificial
  Synthetic oligonucleotide
agggccgcgcattccggggtaagtaatcacgcggcaccaagctttcccgaccc

SEQ ID NO: 324970 - DNA, 51 bp, Artificial
  Synthetic oligonucleotide
agggccggcactgggctcagcctggttatccctggcccctttatggtaacg

SEQ ID NO: 324971 - DNA, 58 bp, Artificial
  Synthetic oligonucleotide
agggccgggatatccgacccaaagctggagagactctagacgagccagtgaaattaga

SEQ ID NO: 324972 - DNA, 52 bp, Artificial
  Synthetic oligonucleotide
agggccggtttgtacaccggctagtctgtgatgggaaaaaccactttggtgg

SEQ ID NO: 324973 - DNA, 57 bp, Artificial
  Synthetic oligonucleotide
agggcctagtcacaaagcaagagtgttggctgaggcaatgagccaaacaaacaagac

SEQ ID NO: 324974 - DNA, 60 bp, Artificial
  Synthetic oligonucleotide
agggcctcaagctacctacctgaagccatcaccacgtgcgtgcagacaccaggaatgtat

SEQ ID NO: 324975 - DNA, 60 bp, Artificial
  Synthetic oligonucleotide
agggcctcaggaggaatttggacgtagtctacttaaacataatgcatgcattgtcacaac

SEQ ID NO: 324976 - DNA, 52 bp, Artificial
  Synthetic oligonucleotide
agggcctcccgaaggattccaattacacgacaggggaaagttgcccaggtcc

SEQ ID NO: 324977 - DNA, 60 bp, Artificial
  Synthetic oligonucleotide
agggcctctgcacattcgtcgttagctgtctgctggcctcctctagcagatctagcgtca

SEQ ID NO: 324978 - DNA, 53 bp, Artificial
  Synthetic oligonucleotide
agggcctgaaagtgggcaccacagtcatcactgcgactaccgaagacggtggt

SEQ ID NO: 324979 - DNA, 56 bp, Artificial
  Synthetic oligonucleotide
agggccttccggtcatcaatttgcgacacgcgcggcagtgtgtacccctgggaggg

SEQ ID NO: 324980 - DNA, 54 bp, Artificial
  Synthetic oligonucleotide
agggcgaagaaccgccgcgaggtacccggcatgattctttctggccgtaagttc

SEQ ID NO: 324981 - DNA, 60 bp, Artificial
  Synthetic oligonucleotide
agggcgaattttccaaagccgcattcgcattgctaaatgcaatactaagtgccagacgtc

SEQ ID NO: 324982 - DNA, 53 bp, Artificial
  Synthetic oligonucleotide
agggcgacttaccccgacgaggcaaattgctctggagccttggccttccgggt

SEQ ID NO: 324983 - DNA, 60 bp, Artificial
  Synthetic oligonucleotide
agggcgacttttcaggtagcatggatccactcgctctgtgtgccgactatagcacatttc

SEQ ID NO: 324984 - DNA, 58 bp, Artificial
  Synthetic oligonucleotide
agggcgagccaggaggagtggtctgggcgggactagggagtggctaaccctcagatgc

SEQ ID NO: 324985 - DNA, 51 bp, Artificial
  Synthetic oligonucleotide
agggcgagcgaagctgtcgttccgagcagacgatcaaggaccagtacgctc

SEQ ID NO: 324986 - DNA, 60 bp, Artificial
  Synthetic oligonucleotide
agggcgatcatggtgtgcatactcgtgagggcgatacgcgtactgtgttcggcacctccg

SEQ ID NO: 324987 - DNA, 60 bp, Artificial
  Synthetic oligonucleotide
agggcgatcgcaatcttgctcccgagagtgtgaatgaagatggcgtcgaatgacgctgct

SEQ ID NO: 324988 - DNA, 56 bp, Artificial
  Synthetic oligonucleotide
agggcgccggaacttgtaccctgtcagattcagggaggataagttacactgtggag

SEQ ID NO: 324989 - DNA, 56 bp, Artificial
  Synthetic oligonucleotide
agggcggaagtttgcagccctggattacttactagggtgtggagtcctagcaggta

SEQ ID NO: 324990 - DNA, 51 bp, Artificial
  Synthetic oligonucleotide
agggcggacgcgatgtgactgcgtctcaaggaggggacgtcaggctaaatg

SEQ ID NO: 324991 - DNA, 50 bp, Artificial
  Synthetic oligonucleotide
agggcggcacagcgggtcatatagttgtcaccactgctggccggagtgaa

SEQ ID NO: 324992 - DNA, 51 bp, Artificial
  Synthetic oligonucleotide
agggcgggaggaagtactttacctgaaactcagcgtatgggtgggaagatt

SEQ ID NO: 324993 - DNA, 50 bp, Artificial
  Synthetic oligonucleotide
agggcggtcccacgttagcggttttagctggtgtaccgtagaccgtggta

SEQ ID NO: 324994 - DNA, 53 bp, Artificial
  Synthetic oligonucleotide
agggcggttctaggaagtcgtcgcctaaccctcagaagcgacaaagccccgga

SEQ ID NO: 324995 - DNA, 60 bp, Artificial
  Synthetic oligonucleotide
agggcgtctgcagggcagatcagtgtccagcccactttctcggtacagagaaatcttccc

SEQ ID NO: 324996 - DNA, 52 bp, Artificial
  Synthetic oligonucleotide
agggcgtctgctgtgtgccgcagtattcgagacgggtctgttccagtggaag

SEQ ID NO: 324997 - DNA, 59 bp, Artificial
  Synthetic oligonucleotide
agggcgtgcaaagtcacctgactcgaaggccctagtgatatcggtcaactccattggcg

SEQ ID NO: 324998 - DNA, 60 bp, Artificial
  Synthetic oligonucleotide
agggctaataataaaggaagaaccactcaggggatcagccaggcatattgaggaatgctc

SEQ ID NO: 324999 - DNA, 58 bp, Artificial
  Synthetic oligonucleotide
agggctacactcagtacgagacacgaatagtgccaaatggttccagaaaacttgctat

SEQ ID NO: 325000 - DNA, 55 bp, Artificial
  Synthetic oligonucleotide
agggctaccctctggcattccgatgaccagcatactcaactgtgtggcacactgg

SEQ ID NO: 325001 - DNA, 60 bp, Artificial
  Synthetic oligonucleotide
agggctagggaagcgcacatacaaatgaaggccgcagcattgaaatcagcccaatctcga

SEQ ID NO: 325002 - DNA, 55 bp, Artificial
  Synthetic oligonucleotide
agggctagtgtactcaaccaactattagggcttaccgatgtcgttggacgtattg

SEQ ID NO: 325003 - DNA, 56 bp, Artificial
  Synthetic oligonucleotide
agggctatagggacagtattagtaggacccacacctatcaacataatcgggagaaa

SEQ ID NO: 325004 - DNA, 60 bp, Artificial
  Synthetic oligonucleotide
agggctatatgaagcaatcgaggagtgcctgattaacgatccctgggttttgcttaatgc

SEQ ID NO: 325005 - DNA, 60 bp, Artificial
  Synthetic oligonucleotide
agggctatcctctggatgtcaatgtcaccctgaaaaacgccgatcgtcgcgcattcttcg

SEQ ID NO: 325006 - DNA, 54 bp, Artificial
  Synthetic oligonucleotide
agggctcaacaatgggcgcaccctccctaagccctgagccgcgttttacataaa

SEQ ID NO: 325007 - DNA, 60 bp, Artificial
  Synthetic oligonucleotide
agggctcattcgtgcatgcatgttggtgcggaaagtcgctgggggtcattatgtccaaat

SEQ ID NO: 325008 - DNA, 58 bp, Artificial
  Synthetic oligonucleotide
agggctccaaacaagagaccaattaatgtcttatatcctcagaatgggagattcacat

SEQ ID NO: 325009 - DNA, 57 bp, Artificial
  Synthetic oligonucleotide
agggctccacgagtttgccggggaattgtccactattgagtccttgatgaccttgta

SEQ ID NO: 325010 - DNA, 56 bp, Artificial
  Synthetic oligonucleotide
agggctcctattgaaagcgtaattagtattgtgacaggtatgaagtaattaacgcc

SEQ ID NO: 325011 - DNA, 54 bp, Artificial
  Synthetic oligonucleotide
agggctcgctcggcttagtggtaattagcgggaagatgttagttaataaaagta

SEQ ID NO: 325012 - DNA, 60 bp, Artificial
  Synthetic oligonucleotide
agggctctgtactataaattcatggcacatatatgggaaagacaatgcagtaagaattgg

SEQ ID NO: 325013 - DNA, 59 bp, Artificial
  Synthetic oligonucleotide
agggctctgtactttcctgctggtggctccagttcaggaacagtgaaccctgttcagaa

SEQ ID NO: 325014 - DNA, 57 bp, Artificial
  Synthetic oligonucleotide
agggctgatattaacaagagatggtggtttgaatagtacaaacgagactttcagacc

SEQ ID NO: 325015 - DNA, 60 bp, Artificial
  Synthetic oligonucleotide
agggctgatgaaacagccacaaaagtccaaactagagcaaatgtcacaacagtaggtcca

SEQ ID NO: 325016 - DNA, 58 bp, Artificial
  Synthetic oligonucleotide
agggctgcgcttagtggtacacaagtagaacgcctaggaagcgctagggcacgcctta

SEQ ID NO: 325017 - DNA, 59 bp, Artificial
  Synthetic oligonucleotide
agggctggcctagcaacgtcaccacctcgaggcgtcgtgtcgatacgccgcgtgatttg

SEQ ID NO: 325018 - DNA, 55 bp, Artificial
  Synthetic oligonucleotide
agggctggtgacaggttccgacattcggaagagaaaaccaatcgactggacccca

SEQ ID NO: 325019 - DNA, 55 bp, Artificial
  Synthetic oligonucleotide
agggctgttctaggaagccgaccaataacgatcagaagcgacaaagccccggact

SEQ ID NO: 325020 - DNA, 56 bp, Artificial
  Synthetic oligonucleotide
agggcttaagagattacaatgggattgcgagcctggtttgccaactaacaaacact

SEQ ID NO: 325021 - DNA, 60 bp, Artificial
  Synthetic oligonucleotide
agggcttaccgcattcttcctgacactcaagtatgggatcaatactaagacatcagccct

SEQ ID NO: 325022 - DNA, 55 bp, Artificial
  Synthetic oligonucleotide
agggcttaggcatcttctatggcaggaggaagcgaagaccgcgacgaagcgctcc

SEQ ID NO: 325023 - DNA, 60 bp, Artificial
  Synthetic oligonucleotide
agggcttcgtgagaagctcgtgcacggtgatacactgatatcaccaagagtgcgggtatc

SEQ ID NO: 325024 - DNA, 51 bp, Artificial
  Synthetic oligonucleotide
agggcttctcttgcaacaggaagagctcaaggtgggcgctcccatatggac

SEQ ID NO: 325025 - DNA, 60 bp, Artificial
  Synthetic oligonucleotide
agggcttgaagaagtttgcccagctgcggacgtccatgccgcctcttgtgcgcgtgaacc

SEQ ID NO: 325026 - DNA, 60 bp, Artificial
  Synthetic oligonucleotide
agggcttgacaggtccacccagcaaatgctgcagcaatcctagatagtgtcaggtcatct

SEQ ID NO: 325027 - DNA, 54 bp, Artificial
  Synthetic oligonucleotide
agggctttactataaaatgggtcgcaagtggtcaaaacttagtagagagggatg

SEQ ID NO: 325028 - DNA, 55 bp, Artificial
  Synthetic oligonucleotide
agggctttgatataaaatgggtggcaagtggtcaaaactgagtggatggcgtaga

SEQ ID NO: 325029 - DNA, 60 bp, Artificial
  Synthetic oligonucleotide
agggcttttgtggctttgttatgatccttgcgagactcttgctaaatatcctagcaggga

SEQ ID NO: 325030 - DNA, 52 bp, Artificial
  Synthetic oligonucleotide
aggggaaaaagccgtggacggtgcatacgttgagatgtatatgaacattgca

SEQ ID NO: 325031 - DNA, 54 bp, Artificial
  Synthetic oligonucleotide
aggggaaaataaaagcaaccgaaatgacggcaatactattagtcttgctatgta

SEQ ID NO: 325032 - DNA, 53 bp, Artificial
  Synthetic oligonucleotide
aggggaaatggacaacaaacacagaaaccaaagcaccccaactcaacccgatc

SEQ ID NO: 325033 - DNA, 55 bp, Artificial
  Synthetic oligonucleotide
aggggaaatggacaacaaacacagaaactggagcaccacaacttaacccaattga

SEQ ID NO: 325034 - DNA, 52 bp, Artificial
  Synthetic oligonucleotide
aggggaaatgtaaccacccgcagtggggttcagttaggttcgcaggcccact

SEQ ID NO: 325035 - DNA, 52 bp, Artificial
  Synthetic oligonucleotide
aggggaacaatggcacgaggtttctgggtattcattcccaaattcgtggggt

SEQ ID NO: 325036 - DNA, 60 bp, Artificial
  Synthetic oligonucleotide
aggggaacatgttttgcgagccagagctgttttggcttgtcaccagctggccatggttct

SEQ ID NO: 325037 - DNA, 60 bp, Artificial
  Synthetic oligonucleotide
aggggaacctatggtgcatttagatacgatgatcctacatttatgatcggatatcaaatt

SEQ ID NO: 325038 - DNA, 55 bp, Artificial
  Synthetic oligonucleotide
aggggaacgagagtggtcccaagagggcaactgtccacaagaggagttcagattg

SEQ ID NO: 325039 - DNA, 57 bp, Artificial
  Synthetic oligonucleotide
aggggaacggatgcttcaccttttaccataagtgtgacaataaatgcattgaacgag

SEQ ID NO: 325040 - DNA, 59 bp, Artificial
  Synthetic oligonucleotide
aggggaagccatacacggacaagtagactgtagtccaggaatatggcagttagattgta

SEQ ID NO: 325041 - DNA, 52 bp, Artificial
  Synthetic oligonucleotide
aggggaagtttactatctccccggccaatttcatatctaaagggatcctcgg

SEQ ID NO: 325042 - DNA, 56 bp, Artificial
  Synthetic oligonucleotide
aggggaatcatcaccaaatcccacggtagaagcgggacgaacactcagagtcctta

SEQ ID NO: 325043 - DNA, 58 bp, Artificial
  Synthetic oligonucleotide
aggggaatgagttactcatgccctctgggtaccaaaagaaattcagacatgctgttaa

SEQ ID NO: 325044 - DNA, 55 bp, Artificial
  Synthetic oligonucleotide
aggggaattctctaacagtgtatgaggctcaaaaccgtgccgatgacgaacgggc

SEQ ID NO: 325045 - DNA, 53 bp, Artificial
  Synthetic oligonucleotide
aggggaattcttctactgtaatacaacaaagctgtttaatagtacttgggtaa

SEQ ID NO: 325046 - DNA, 54 bp, Artificial
  Synthetic oligonucleotide
aggggaatttttctactgtaatacaacacaattgtttaatagtacgtggcctgc

SEQ ID NO: 325047 - DNA, 54 bp, Artificial
  Synthetic oligonucleotide
aggggacaccggggtcaccaagccgatccaccctaccgtgctctgtactgggga

SEQ ID NO: 325048 - DNA, 58 bp, Artificial
  Synthetic oligonucleotide
aggggacaggccaagccgccgattacaagagtactcaggcagctatcgaccaaatcac

SEQ ID NO: 325049 - DNA, 60 bp, Artificial
  Synthetic oligonucleotide
aggggacatgctcctaagaactgctataggccaagtctcaaggcccatgttcctgtatgt

SEQ ID NO: 325050 - DNA, 57 bp, Artificial
  Synthetic oligonucleotide
aggggaccctatatgcctctacggctgacctgaatggactgcaacatagttcagtcc

SEQ ID NO: 325051 - DNA, 54 bp, Artificial
  Synthetic oligonucleotide
aggggacgagtgaggcttttcccggggggagctccctatcgtccccacatagca

SEQ ID NO: 325052 - DNA, 57 bp, Artificial
  Synthetic oligonucleotide
aggggacggggataactgactctgattcccgtatcaacttgattgacggtgaatcat

SEQ ID NO: 325053 - DNA, 55 bp, Artificial
  Synthetic oligonucleotide
aggggacggggtgctcaggatggttcttagtagaggctatagtggagaaaacaac

SEQ ID NO: 325054 - DNA, 54 bp, Artificial
  Synthetic oligonucleotide
aggggacgtggcaaggcattacaaagacggactaataagcctcctagaagtagg

SEQ ID NO: 325055 - DNA, 59 bp, Artificial
  Synthetic oligonucleotide
aggggacttcggtggattctgtcgtgccgtctgatctagttggcgcttacactcctgag

SEQ ID NO: 325056 - DNA, 48 bp, Artificial
  Synthetic oligonucleotide
aggggactttccgcctgggactttccggggaggcgtaacctgggaggg

SEQ ID NO: 325057 - DNA, 60 bp, Artificial
  Synthetic oligonucleotide
aggggagagggtgtcaactgctgagactgggacattttgcctggcggccataccaattgc

SEQ ID NO: 325058 - DNA, 55 bp, Artificial
  Synthetic oligonucleotide
aggggagatcccacttgaggaatgatactgatgtggtgaattttgtgagcatgga

SEQ ID NO: 325059 - DNA, 60 bp, Artificial
  Synthetic oligonucleotide
aggggaggatgttgctccaattgagcacattgcaagtatgagaaggaactacttcacagc

SEQ ID NO: 325060 - DNA, 54 bp, Artificial
  Synthetic oligonucleotide
aggggaggccagggaatttccttcagaacagaccggagccaacagccccaccac

SEQ ID NO: 325061 - DNA, 54 bp, Artificial
  Synthetic oligonucleotide
aggggaggcgccgaagatataagggtctacgacgttaaggacgtcgcatacgac

SEQ ID NO: 325062 - DNA, 56 bp, Artificial
  Synthetic oligonucleotide
aggggaggtctatgatgaccctattgatccaatcgagtcagaggctgaacccagag

SEQ ID NO: 325063 - DNA, 53 bp, Artificial
  Synthetic oligonucleotide
aggggagttctctttcttgggtaaagtccaatggaaagtattcataccaaaga

SEQ ID NO: 325064 - DNA, 55 bp, Artificial
  Synthetic oligonucleotide
aggggagtttttctactgtaatacaacacaactgtctaatagtacttggcagagg

SEQ ID NO: 325065 - DNA, 55 bp, Artificial
  Synthetic oligonucleotide
aggggatcagtggctcataagtcttgtctgcctgcttgtgtgtatgggcttgctg

SEQ ID NO: 325066 - DNA, 57 bp, Artificial
  Synthetic oligonucleotide
aggggatggatagaatatgcctttcatgccggaacaacgggataagatttaaagcaa

SEQ ID NO: 325067 - DNA, 54 bp, Artificial
  Synthetic oligonucleotide
aggggatggtcgtcaagcttgtgactcgtagtggtcgcaaccttaccgttaccc

SEQ ID NO: 325068 - DNA, 54 bp, Artificial
  Synthetic oligonucleotide
aggggattgatagtcacggtgacggtaaatacaataagggagggtattgtagac

SEQ ID NO: 325069 - DNA, 53 bp, Artificial
  Synthetic oligonucleotide
aggggatttggaacccttactgctgaagcctccaacatgattacaaaagtgcg

SEQ ID NO: 325070 - DNA, 59 bp, Artificial
  Synthetic oligonucleotide
aggggatttggaatctcccagataaaggcgccactcctccattgaagagcaccaatgtc

SEQ ID NO: 325071 - DNA, 55 bp, Artificial
  Synthetic oligonucleotide
aggggcaagggtggcgacttctcgcgcctatcacggcctattcccaacagactcg

SEQ ID NO: 325072 - DNA, 54 bp, Artificial
  Synthetic oligonucleotide
aggggcaccacgtaaacttatctggccttccttcaccctacttcgtggtctcag

SEQ ID NO: 325073 - DNA, 56 bp, Artificial
  Synthetic oligonucleotide
aggggcaccatcccgactgcccgaaccctgagacggaggactaatgcgcatcaggt

SEQ ID NO: 325074 - DNA, 60 bp, Artificial
  Synthetic oligonucleotide
aggggcactgtgcgcttcagtagagtaggtcaaaagtttagcatgcgtactcgcagcggc

SEQ ID NO: 325075 - DNA, 51 bp, Artificial
  Synthetic oligonucleotide
aggggcagcttagggaaccatcaggagcagacatagcaggaacaaacagca

SEQ ID NO: 325076 - DNA, 54 bp, Artificial
  Synthetic oligonucleotide
aggggcagggtaggcagaaaccctaaccaagttggagatgaataccactatggg

SEQ ID NO: 325077 - DNA, 60 bp, Artificial
  Synthetic oligonucleotide
aggggcatagtgcccatggtaatatgcggacacaccagagcaggtagaaactatgccctt

SEQ ID NO: 325078 - DNA, 55 bp, Artificial
  Synthetic oligonucleotide
aggggccagaataagatgattaagtgcttcaactgtggcaaagaaggacacctag

SEQ ID NO: 325079 - DNA, 55 bp, Artificial
  Synthetic oligonucleotide
aggggccatagatattgattatctgtcattgctgcgtagtagcaatattaaagcc

SEQ ID NO: 325080 - DNA, 54 bp, Artificial
  Synthetic oligonucleotide
aggggccccacgttgggtgtgcgcgcgactaggaagacttccgaacggtcgcaa

SEQ ID NO: 325081 - DNA, 55 bp, Artificial
  Synthetic oligonucleotide
aggggccccgtcatagatctcccagacggtggcgtatatgagctcgagaggacgg

SEQ ID NO: 325082 - DNA, 56 bp, Artificial
  Synthetic oligonucleotide
aggggccgagcttggacttcgccctatctctacttaggagaaacattaggcagggc

SEQ ID NO: 325083 - DNA, 54 bp, Artificial
  Synthetic oligonucleotide
aggggccgaggcaaggccgatctttacgacttgatgcgcgttcgtgcccgtgtt

SEQ ID NO: 325084 - DNA, 59 bp, Artificial
  Synthetic oligonucleotide
aggggcctatcgggcaggagcagctgagcggagggcctatgccggaacactgggaggag

SEQ ID NO: 325085 - DNA, 50 bp, Artificial
  Synthetic oligonucleotide
aggggcctattactgagacatgcccgtggtgttctgatggacagcgggga

SEQ ID NO: 325086 - DNA, 55 bp, Artificial
  Synthetic oligonucleotide
aggggcctatttgggctaaaattccaaatacagatggacattttcatccttctcc

SEQ ID NO: 325087 - DNA, 54 bp, Artificial
  Synthetic oligonucleotide
aggggcctcctagggtgcataatcaccagcctaactggtcgggacaaaaaccaa

SEQ ID NO: 325088 - DNA, 55 bp, Artificial
  Synthetic oligonucleotide
aggggcctcctagggtgcatagtcaccagtctgaccggccgggacaagaaccaag

SEQ ID NO: 325089 - DNA, 56 bp, Artificial
  Synthetic oligonucleotide
aggggcctcctagggtgtatagtcaccagcctaactggccgagacaaaaatcaagc

SEQ ID NO: 325090 - DNA, 54 bp, Artificial
  Synthetic oligonucleotide
aggggcctcttcctaccactccgacccctgcgggtccaatcacccacaatgtac

SEQ ID NO: 325091 - DNA, 57 bp, Artificial
  Synthetic oligonucleotide
aggggcctggccaaaatttggtgaggttttgcgagccctagatcggatggccacata

SEQ ID NO: 325092 - DNA, 57 bp, Artificial
  Synthetic oligonucleotide
aggggcctttgtggagttcacgtcgcgcgtgataatagtgaccagcaacagtccccc

SEQ ID NO: 325093 - DNA, 55 bp, Artificial
  Synthetic oligonucleotide
aggggcgaagccaaaggtgcaggccatcctagaggcgcctaaaccggccctagag

SEQ ID NO: 325094 - DNA, 55 bp, Artificial
  Synthetic oligonucleotide
aggggcgcacagacgtcgtgaaagaattgatactcaatcgtcagtacaagcggga

SEQ ID NO: 325095 - DNA, 55 bp, Artificial
  Synthetic oligonucleotide
aggggcgcctgatagtcacatacgagggggatacatcggccggctatagccatga

SEQ ID NO: 325096 - DNA, 60 bp, Artificial
  Synthetic oligonucleotide
aggggcgctgcggtgtcttctgcttgtctcagtgacatgcccatcccgtagaatactacg

SEQ ID NO: 325097 - DNA, 52 bp, Artificial
  Synthetic oligonucleotide
aggggcgcttactggcacctacatatacaaccacctcactcctcttaaggac

SEQ ID NO: 325098 - DNA, 53 bp, Artificial
  Synthetic oligonucleotide
aggggcggtgtttacgcaccgctctcttgtgagcccaccaagcaggaactaga

SEQ ID NO: 325099 - DNA, 53 bp, Artificial
  Synthetic oligonucleotide
aggggcgtacactggacttcccaacaagaaacctaatgttcccaccattagaa

SEQ ID NO: 325100 - DNA, 50 bp, Artificial
  Synthetic oligonucleotide
aggggcgttaactcttctgttggtagagcacttgtgcgactcacacagag

SEQ ID NO: 325101 - DNA, 52 bp, Artificial
  Synthetic oligonucleotide
aggggcgttctacgaaagggggtctaccaatgagtacaaaggcaacgtccag

SEQ ID NO: 325102 - DNA, 56 bp, Artificial
  Synthetic oligonucleotide
aggggctcctagtcacgtgatcttttatcctacacatcgagtaccagttttagatg

SEQ ID NO: 325103 - DNA, 60 bp, Artificial
  Synthetic oligonucleotide
aggggctcggtcccaaactagatagtgagctgtacattgtgaatggagattgtgtcattt

SEQ ID NO: 325104 - DNA, 51 bp, Artificial
  Synthetic oligonucleotide
aggggctgcagaaaaacgggaacaccctgaatgtcattgtgggtaatggaa

SEQ ID NO: 325105 - DNA, 55 bp, Artificial
  Synthetic oligonucleotide
aggggctggtacgcgatgagaaagccgcccgcggccaggtagtactgcacctggc

SEQ ID NO: 325106 - DNA, 55 bp, Artificial
  Synthetic oligonucleotide
aggggctggtgtataggcacagatcacagtgcatgcattggtctttatatggatg

SEQ ID NO: 325107 - DNA, 56 bp, Artificial
  Synthetic oligonucleotide
aggggctgtgtaagcatgtaaaggatatgcctgatcgggaaggccccccagacggg

SEQ ID NO: 325108 - DNA, 50 bp, Artificial
  Synthetic oligonucleotide
agggggaacccttcaggtcaggtgtcaacaactatggacaataacttgtg

SEQ ID NO: 325109 - DNA, 55 bp, Artificial
  Synthetic oligonucleotide
agggggaagcctggggtgtatagatatgtctcacaaggagaacggccgtcgggaa

SEQ ID NO: 325110 - DNA, 56 bp, Artificial
  Synthetic oligonucleotide
agggggaaggatataaggataagatacctgtaggtaggcagccggagattttagca

SEQ ID NO: 325111 - DNA, 55 bp, Artificial
  Synthetic oligonucleotide
agggggaatttttgcaggcggatcctacctcatttacacatggttcacagaaact

SEQ ID NO: 325112 - DNA, 54 bp, Artificial
  Synthetic oligonucleotide
agggggacacgttagccgtgaagttggtgacaagggggtgggcctctctgagta

SEQ ID NO: 325113 - DNA, 58 bp, Artificial
  Synthetic oligonucleotide
agggggaggttcaagtggtctccactgcgacacaatccttcctggcgacctgtgtcaa

SEQ ID NO: 325114 - DNA, 60 bp, Artificial
  Synthetic oligonucleotide
agggggatggactggaatgatagatggatggtatggttaccatcagcagaatggacaagg

SEQ ID NO: 325115 - DNA, 52 bp, Artificial
  Synthetic oligonucleotide
agggggattaagcgggagaggcatgaggagactagccacagaaccgaactga

SEQ ID NO: 325116 - DNA, 51 bp, Artificial
  Synthetic oligonucleotide
agggggccatggaccgtaggaatcacgaagttttacgctgggtggaacgaa

SEQ ID NO: 325117 - DNA, 57 bp, Artificial
  Synthetic oligonucleotide
agggggcccccatggttgagaaagtcagggagcctgatctgcccaaaacactggtca

SEQ ID NO: 325118 - DNA, 60 bp, Artificial
  Synthetic oligonucleotide
agggggcctcgtcctgctctccaaattgcgcagtacatagctgcgggcacctctatggtc

SEQ ID NO: 325119 - DNA, 60 bp, Artificial
  Synthetic oligonucleotide
agggggcgaccgtgctaaacttggaacacttgctcgagtatgctccacagcaaattgata

SEQ ID NO: 325120 - DNA, 50 bp, Artificial
  Synthetic oligonucleotide
agggggcgctccttaccactgggcccctggaacccaccgcctggggttac

SEQ ID NO: 325121 - DNA, 55 bp, Artificial
  Synthetic oligonucleotide
agggggcttaccttcaggcatgccattcacatcagttgtcaactcactcaaccat

SEQ ID NO: 325122 - DNA, 55 bp, Artificial
  Synthetic oligonucleotide
aggggggaaaggttctggtgtgggtatatccacaggtggctgggtaggaggcagc

SEQ ID NO: 325123 - DNA, 52 bp, Artificial
  Synthetic oligonucleotide
aggggggactctcacccgagtgtgggttgggagcgccgggcctatgtacgaa

SEQ ID NO: 325124 - DNA, 56 bp, Artificial
  Synthetic oligonucleotide
aggggggaggtacgttctgtggctaatagtgacctatatagttctaacagagcaac

SEQ ID NO: 325125 - DNA, 56 bp, Artificial
  Synthetic oligonucleotide
aggggggatatggagtgttacctgatattcgttatgggctgcttaggcgggcccac

SEQ ID NO: 325126 - DNA, 53 bp, Artificial
  Synthetic oligonucleotide
aggggggcccccaggccccaggggccctggtttatggctcatagggaggtgca

SEQ ID NO: 325127 - DNA, 52 bp, Artificial
  Synthetic oligonucleotide
agggggggacaaccatgggacttactgtggtgcaccaatacttggaccaggg

SEQ ID NO: 325128 - DNA, 53 bp, Artificial
  Synthetic oligonucleotide
agggggggcaagtaaaactatgcaggtggtgcggttttgacttcaaggagccc

SEQ ID NO: 325129 - DNA, 58 bp, Artificial
  Synthetic oligonucleotide
aggggggtcacgggatgatagacaaaacacatcatttgatccaaaacaagtacagatg

SEQ ID NO: 325130 - DNA, 51 bp, Artificial
  Synthetic oligonucleotide
aggggggtcatgcgtatagggggtgtccccaggaagggggtacccccatgc

SEQ ID NO: 325131 - DNA, 52 bp, Artificial
  Synthetic oligonucleotide
agggggtatagtgtttcgtattgagggtaaaagtgtgttgttgcttacccag

SEQ ID NO: 325132 - DNA, 52 bp, Artificial
  Synthetic oligonucleotide
agggggtatcaactcgatacgctcccccgcgttcttcacggagggtacgtgc

SEQ ID NO: 325133 - DNA, 53 bp, Artificial
  Synthetic oligonucleotide
agggggtccacaaaaacccattgttagagtaggccccgagcagtggctgtttc

SEQ ID NO: 325134 - DNA, 60 bp, Artificial
  Synthetic oligonucleotide
agggggtgatatggatcctgagttgcgaacactggcacagagtttgattgatgttaaagt

SEQ ID NO: 325135 - DNA, 53 bp, Artificial
  Synthetic oligonucleotide
agggggtgggaagcccttaaatatctgggaagccttgggcagtattggggtca

SEQ ID NO: 325136 - DNA, 57 bp, Artificial
  Synthetic oligonucleotide
agggggttgaacgcacttatcagcgggcattgggcaatctactcgacaattacggaa

SEQ ID NO: 325137 - DNA, 55 bp, Artificial
  Synthetic oligonucleotide
agggggttgcgctgccgggcgggtgtgtggtagactgggtgtactccggcagacg

SEQ ID NO: 325138 - DNA, 57 bp, Artificial
  Synthetic oligonucleotide
aggggtaactgcgactgttgtacgtcgttagccagggagattctatatgccgggcta

SEQ ID NO: 325139 - DNA, 60 bp, Artificial
  Synthetic oligonucleotide
aggggtaatcacgtatcgcccacacattacgtgcctgagactgacacatctcgccagatc

SEQ ID NO: 325140 - DNA, 56 bp, Artificial
  Synthetic oligonucleotide
aggggtacaacccccccgcctatggcgaggaggctttcgcctacctctgcactgca

SEQ ID NO: 325141 - DNA, 55 bp, Artificial
  Synthetic oligonucleotide
aggggtacaacgattggctagaggagtacactagttgcaagttccgggacagacc

SEQ ID NO: 325142 - DNA, 53 bp, Artificial
  Synthetic oligonucleotide
aggggtactctctagtcggaatagaccctttcagactgcttcaaaacagccaa

SEQ ID NO: 325143 - DNA, 58 bp, Artificial
  Synthetic oligonucleotide
aggggtaggcatcttcctgctgcctgctcgataggcagcttaacactccgaccttagg

SEQ ID NO: 325144 - DNA, 52 bp, Artificial
  Synthetic oligonucleotide
aggggtataccccccccgcctacggagaggaggccttcacctacctctgcac

SEQ ID NO: 325145 - DNA, 55 bp, Artificial
  Synthetic oligonucleotide
aggggtatgagtgttttcggttctagcaacatcacagtaatgacaagtggcttcg

SEQ ID NO: 325146 - DNA, 53 bp, Artificial
  Synthetic oligonucleotide
aggggtcaaatggcactggatcaaattacacacagatccagtgcaaaataaag

SEQ ID NO: 325147 - DNA, 56 bp, Artificial
  Synthetic oligonucleotide
aggggtcaatcctacctgaaattatgattgagtcaatctgtacaaatgcagagctg

SEQ ID NO: 325148 - DNA, 57 bp, Artificial
  Synthetic oligonucleotide
aggggtcacaaattgaagatcgcagaaggggatattccaattgctggggtgaaaagc

SEQ ID NO: 325149 - DNA, 57 bp, Artificial
  Synthetic oligonucleotide
aggggtcacatctgttcttatctgttcaaatttgagtccgattgttgttactttgga

SEQ ID NO: 325150 - DNA, 57 bp, Artificial
  Synthetic oligonucleotide
aggggtcactgcttaatgacaaacactcaaatggaacagtgaaagatagaagccctt

SEQ ID NO: 325151 - DNA, 53 bp, Artificial
  Synthetic oligonucleotide
aggggtcaggcctctcaaagtcctttctaccgcaccactaatagcagactcaa

SEQ ID NO: 325152 - DNA, 59 bp, Artificial
  Synthetic oligonucleotide
aggggtccagccaacatcagcttaagtttatacacagttagtcatgataagataggtag

SEQ ID NO: 325153 - DNA, 51 bp, Artificial
  Synthetic oligonucleotide
aggggtcccgggccgcgaatagcccccggaccacccagtagacgtgcgtcc

SEQ ID NO: 325154 - DNA, 55 bp, Artificial
  Synthetic oligonucleotide
aggggtccgcaagcgggaggatcagccaccggtgagggacgcgatggcaagagtg

SEQ ID NO: 325155 - DNA, 54 bp, Artificial
  Synthetic oligonucleotide
aggggtcgcggtcgggttcgggattgcaaacgcaaacttaacgcatctactcag

SEQ ID NO: 325156 - DNA, 54 bp, Artificial
  Synthetic oligonucleotide
aggggtctcaaacatggcctacaatctgtctctattcatagggatggtgtttcc

SEQ ID NO: 325157 - DNA, 55 bp, Artificial
  Synthetic oligonucleotide
aggggtctccacatagaccccctccttacatagcccctccacctatagtggagga

SEQ ID NO: 325158 - DNA, 54 bp, Artificial
  Synthetic oligonucleotide
aggggtctcgtttaatttcagctagttgcaataggcgctttacggtgtttactg

SEQ ID NO: 325159 - DNA, 57 bp, Artificial
  Synthetic oligonucleotide
aggggtctttgctcaatgacaaacactcgaatgggacagtaaaggatagaagcccat

SEQ ID NO: 325160 - DNA, 60 bp, Artificial
  Synthetic oligonucleotide
aggggtgacaaagacaagatatctgaagatctcaagattagtttacagagccatagggag

SEQ ID NO: 325161 - DNA, 60 bp, Artificial
  Synthetic oligonucleotide
aggggtgacatggtcccaacgatcgcaatagccagcactttgatacaagctggcgctgac

SEQ ID NO: 325162 - DNA, 55 bp, Artificial
  Synthetic oligonucleotide
aggggtgcaaagagtaaccataacagacgccagaagaagagtgtgcccttacgtg

SEQ ID NO: 325163 - DNA, 58 bp, Artificial
  Synthetic oligonucleotide
aggggtgcctactgatgtcgttaattcctgggcaggggatatattgaggacacaagaa

SEQ ID NO: 325164 - DNA, 53 bp, Artificial
  Synthetic oligonucleotide
aggggtgccttgaaaggaggccaggattctccacgtccgtttcgcgtggggaa

SEQ ID NO: 325165 - DNA, 55 bp, Artificial
  Synthetic oligonucleotide
aggggtgcgaactctgccggcacacgcgcgtcaccaatgaccgcgcctacgtcaa

SEQ ID NO: 325166 - DNA, 58 bp, Artificial
  Synthetic oligonucleotide
aggggtgcgagcagtgtgcctccgaagcagcacaagagacctcggcatgagtagaagt

SEQ ID NO: 325167 - DNA, 59 bp, Artificial
  Synthetic oligonucleotide
aggggtgctacggtgtaagagttatggcgaagcgaccaggagatataataatctcaaca

SEQ ID NO: 325168 - DNA, 49 bp, Artificial
  Synthetic oligonucleotide
aggggtgggaaacccttaagtatttgggaagtcttgtacagtattgggg

SEQ ID NO: 325169 - DNA, 55 bp, Artificial
  Synthetic oligonucleotide
aggggtggtatgccctcagggtgttctggtaccagtatctttaactcaatgatca

SEQ ID NO: 325170 - DNA, 54 bp, Artificial
  Synthetic oligonucleotide
aggggtgtctttctggtttgtttcgaaatctgggttttgttcatcatccgacac

SEQ ID NO: 325171 - DNA, 57 bp, Artificial
  Synthetic oligonucleotide
aggggtgtggttggggtgtggctttaccctcagagctgcatataagcagctgctctc

SEQ ID NO: 325172 - DNA, 54 bp, Artificial
  Synthetic oligonucleotide
aggggttaacgcgcaggtcaagcctactttagtccacgtagcgcgttacgccac

SEQ ID NO: 325173 - DNA, 50 bp, Artificial
  Synthetic oligonucleotide
aggggttacccctttccgttaattgcttcagagctcatagtcaccctata

SEQ ID NO: 325174 - DNA, 57 bp, Artificial
  Synthetic oligonucleotide
aggggttacgttgtcaacgcaattcactgattatgtgtcacttaattcactaagatt

SEQ ID NO: 325175 - DNA, 52 bp, Artificial
  Synthetic oligonucleotide
aggggttaggagtgatagtagtttaggtgtgactgatatgagtcaggacggt

SEQ ID NO: 325176 - DNA, 55 bp, Artificial
  Synthetic oligonucleotide
aggggttccacctattgacccagaaattcagtgtgcagcactgatgattgctgac

SEQ ID NO: 325177 - DNA, 60 bp, Artificial
  Synthetic oligonucleotide
aggggttcccgcccagctgcacaaatctgctctggcaaagcacgtgtatggcgcgcacga

SEQ ID NO: 325178 - DNA, 58 bp, Artificial
  Synthetic oligonucleotide
aggggttctatcacaccatgtatacgacgcctaggcgtgggtataaatcatcgtatag

SEQ ID NO: 325179 - DNA, 60 bp, Artificial
  Synthetic oligonucleotide
aggggttctggatctggtattatcatttcagatgcaccagtgcatgattgtaacacgaag

SEQ ID NO: 325180 - DNA, 60 bp, Artificial
  Synthetic oligonucleotide
aggggttgaattagctgagctggaacactatttcgcattgttcggaatagctgcattggt

SEQ ID NO: 325181 - DNA, 55 bp, Artificial
  Synthetic oligonucleotide
aggggttgaattggtacaggatggggatggacctttctcatgaggttaatgttac

SEQ ID NO: 325182 - DNA, 59 bp, Artificial
  Synthetic oligonucleotide
aggggttgtgaaggtccgtgtaaggttcaatcctttgaacagagacatgatatagctca

SEQ ID NO: 325183 - DNA, 58 bp, Artificial
  Synthetic oligonucleotide
aggggtttagctacatcggctctcgttccgacggctgggtcaagatactatcaaatga

SEQ ID NO: 325184 - DNA, 55 bp, Artificial
  Synthetic oligonucleotide
agggtaaaacctatgagctacagtccacaggacagggaaggatttgccaaacaaa

SEQ ID NO: 325185 - DNA, 56 bp, Artificial
  Synthetic oligonucleotide
agggtaaaagtaatcactcagggagtcatcaaagaaagataagctttgagcaactc

SEQ ID NO: 325186 - DNA, 53 bp, Artificial
  Synthetic oligonucleotide
agggtaaacagtttatctagctgatactcatcgttcgcgtagtccaataactc

SEQ ID NO: 325187 - DNA, 59 bp, Artificial
  Synthetic oligonucleotide
agggtaaataatatcggtgcttcaattatagatctaagccagagatattttactcataa

SEQ ID NO: 325188 - DNA, 60 bp, Artificial
  Synthetic oligonucleotide
agggtaaatgccctccattagaattaatcaattcagttatacaagatggtgatatgattg

SEQ ID NO: 325189 - DNA, 51 bp, Artificial
  Synthetic oligonucleotide
agggtaacaagttacccgggtgaggaaaagatcgggtcgtatgctatactt

SEQ ID NO: 325190 - DNA, 55 bp, Artificial
  Synthetic oligonucleotide
agggtaacacctcgaaatgttgggtggcggtggcccctacagtcgccaccagaga

SEQ ID NO: 325191 - DNA, 58 bp, Artificial
  Synthetic oligonucleotide
agggtaaccacgatatgctgatttcttgcgagtcgtaccacgccgagtgttgcgaggg

SEQ ID NO: 325192 - DNA, 54 bp, Artificial
  Synthetic oligonucleotide
agggtaaccccaagaaaatggctctgcaagtatggacacccaacatagattatc

SEQ ID NO: 325193 - DNA, 51 bp, Artificial
  Synthetic oligonucleotide
agggtaacgataccctgtctaagcgtttcgtctattacttcgctatcggat

SEQ ID NO: 325194 - DNA, 52 bp, Artificial
  Synthetic oligonucleotide
agggtaacgcctcgaaatgttgggtgccggtggcccccacagtcgccacccg

SEQ ID NO: 325195 - DNA, 52 bp, Artificial
  Synthetic oligonucleotide
agggtaacgtctcgcggtgttgggtggcggtgacccccacggtggccactag

SEQ ID NO: 325196 - DNA, 54 bp, Artificial
  Synthetic oligonucleotide
agggtaagtagatttcacttttccagacttggtatatccaggttcagtaaaatg

SEQ ID NO: 325197 - DNA, 57 bp, Artificial
  Synthetic oligonucleotide
agggtaagtggaatagcagtagtgcgagtgacctgtggttagagttccgttatgggc

SEQ ID NO: 325198 - DNA, 58 bp, Artificial
  Synthetic oligonucleotide
agggtaataaattctatgttgagcttgactggacacgatttgatggtacgataccacc

SEQ ID NO: 325199 - DNA, 55 bp, Artificial
  Synthetic oligonucleotide
agggtaataacatttggccaatctactggcctaacttttgactatgtggcggtgg

SEQ ID NO: 325200 - DNA, 57 bp, Artificial
  Synthetic oligonucleotide
agggtaatgagctggagagctaaaacctcaacgattggtcatcgttattgactggtt

SEQ ID NO: 325201 - DNA, 55 bp, Artificial
  Synthetic oligonucleotide
agggtaatgcatacccaaccataaagaggagttacaacaacaccaaccaggaaga

SEQ ID NO: 325202 - DNA, 56 bp, Artificial
  Synthetic oligonucleotide
agggtacacaaaaggaggaccaggacacgaagaacctatgatgacgcaaagttatg

SEQ ID NO: 325203 - DNA, 60 bp, Artificial
  Synthetic oligonucleotide
agggtacacacctacctgtagtgctggagccctttctatgctgggtgtctgcatggacct

SEQ ID NO: 325204 - DNA, 55 bp, Artificial
  Synthetic oligonucleotide
agggtacagcgccactctgtccgtcaggcaattgattaaggcttacatagagacc

SEQ ID NO: 325205 - DNA, 59 bp, Artificial
  Synthetic oligonucleotide
agggtacatgcacaacagctggggtacaccccgacgcagagttgattgaggctaaccta

SEQ ID NO: 325206 - DNA, 51 bp, Artificial
  Synthetic oligonucleotide
agggtaccgaatcaaatattacagatgtggctagctatgcttaaaaatggt

SEQ ID NO: 325207 - DNA, 58 bp, Artificial
  Synthetic oligonucleotide
agggtacgacgtcggctcaacttcgacagccctatggctcgccgtgctactgccccca

SEQ ID NO: 325208 - DNA, 52 bp, Artificial
  Synthetic oligonucleotide
agggtacggtgatttgggtctcgtaggggtttccgcttggatcaagtacttg

SEQ ID NO: 325209 - DNA, 55 bp, Artificial
  Synthetic oligonucleotide
agggtactcttatcgggtacccgaccaaggagaccaacagcggattatcagatgg

SEQ ID NO: 325210 - DNA, 56 bp, Artificial
  Synthetic oligonucleotide
agggtacttcctaagtgagatggtggcgagttgccggttacacttcaacggcattc

SEQ ID NO: 325211 - DNA, 60 bp, Artificial
  Synthetic oligonucleotide
agggtagagaggacagcctgtttatcaggtgtgtatatcgtggagatgactttgtctatg

SEQ ID NO: 325212 - DNA, 51 bp, Artificial
  Synthetic oligonucleotide
agggtagcgactatttgtagtcacctacagtacaggcttaaaagattcacg

SEQ ID NO: 325213 - DNA, 53 bp, Artificial
  Synthetic oligonucleotide
agggtagcgcgaaaaccagcacggacatggtgttgctaccgctccgaaggcgt

SEQ ID NO: 325214 - DNA, 60 bp, Artificial
  Synthetic oligonucleotide
agggtagctggctgcagtgaccctgttgtcttttgctttcaaagatttcagtcgcatgga

SEQ ID NO: 325215 - DNA, 59 bp, Artificial
  Synthetic oligonucleotide
agggtaggaacatctgcaatcgaacacttctcatactgttccgggcaaacgcacaaaca

SEQ ID NO: 325216 - DNA, 60 bp, Artificial
  Synthetic oligonucleotide
agggtaggattgtagttggtagcattattagtgctggagatgtgcggagtataacatgta

SEQ ID NO: 325217 - DNA, 51 bp, Artificial
  Synthetic oligonucleotide
agggtaggtttacatttatgggtgggaattattatttagagggtgggtcag

SEQ ID NO: 325218 - DNA, 57 bp, Artificial
  Synthetic oligonucleotide
agggtagtagattccacggactgcaacagaggcggcgttgttattagcactgaaggg

SEQ ID NO: 325219 - DNA, 60 bp, Artificial
  Synthetic oligonucleotide
agggtagtgacattccccatgtctcctggtatttattcctgtctgagcggcaatacgtca

SEQ ID NO: 325220 - DNA, 49 bp, Artificial
  Synthetic oligonucleotide
agggtagtggactattataaggagggggggccacccctaaacctacctc

SEQ ID NO: 325221 - DNA, 55 bp, Artificial
  Synthetic oligonucleotide
agggtataaagctgaagtcagaagacaacgtttacaaagcattgtcgatatacag

SEQ ID NO: 325222 - DNA, 54 bp, Artificial
  Synthetic oligonucleotide
agggtataatttgggaaagtgcttcttctgtagtgagagagcagtgtggatatg

SEQ ID NO: 325223 - DNA, 55 bp, Artificial
  Synthetic oligonucleotide
agggtatacaggtaaggaaacgaactacatagattacctctgtaattctcaccac

SEQ ID NO: 325224 - DNA, 52 bp, Artificial
  Synthetic oligonucleotide
agggtatagtgcactgattagaaaccactgacagactggtccgactcctaac

SEQ ID NO: 325225 - DNA, 59 bp, Artificial
  Synthetic oligonucleotide
agggtatatttggtataccggcaccacagcatgcgtgtgtggtaatgggcaagcacggt

SEQ ID NO: 325226 - DNA, 59 bp, Artificial
  Synthetic oligonucleotide
agggtatgactctataatatggggagctgaaggcacacaatttcaatgttctacacatg

SEQ ID NO: 325227 - DNA, 56 bp, Artificial
  Synthetic oligonucleotide
agggtatggctttgggaaggcatacacctgtggaagacccagaaagccctcgtcaa

SEQ ID NO: 325228 - DNA, 57 bp, Artificial
  Synthetic oligonucleotide
agggtatgtggagttacctcctataccattagctgacacaacacaaatggtaccgga

SEQ ID NO: 325229 - DNA, 58 bp, Artificial
  Synthetic oligonucleotide
agggtcaatcagcacgattgcgggagtggaatagatattaccggctacttgtccggcg

SEQ ID NO: 325230 - DNA, 59 bp, Artificial
  Synthetic oligonucleotide
agggtcaatcatagtcaagttactcccaaatatgcccaaggacaaagaggcgtgtgcaa

SEQ ID NO: 325231 - DNA, 51 bp, Artificial
  Synthetic oligonucleotide
agggtcaatgaaaagttggacgttttagccactgctgaacgattatgtcaa

SEQ ID NO: 325232 - DNA, 56 bp, Artificial
  Synthetic oligonucleotide
agggtcagaggaccctggtcaggtgaaggctatctttggggatttgaagccccatc

SEQ ID NO: 325233 - DNA, 60 bp, Artificial
  Synthetic oligonucleotide
agggtcagatcattcaggatgggtggaatcatcgagattttaagatgcataaaatcttgc

SEQ ID NO: 325234 - DNA, 56 bp, Artificial
  Synthetic oligonucleotide
agggtcagtgtggactagggacaacgaggtcgtcgtactaacagcgtcacacgtgg

SEQ ID NO: 325235 - DNA, 60 bp, Artificial
  Synthetic oligonucleotide
agggtcagttcatttcaaaggatatgcagacattgcatcgttttccatagaaccacagtt

SEQ ID NO: 325236 - DNA, 57 bp, Artificial
  Synthetic oligonucleotide
agggtcataatgtttttggtacaaccgatttagctttatgctctgaggctttattgc

SEQ ID NO: 325237 - DNA, 58 bp, Artificial
  Synthetic oligonucleotide
agggtcattaatggttggaccacggctaattccaaatcacagataaatagacaagtca

SEQ ID NO: 325238 - DNA, 56 bp, Artificial
  Synthetic oligonucleotide
agggtccaccagccgaaggtatgttggccaaattgtggtatgggcttgggcaggac

SEQ ID NO: 325239 - DNA, 52 bp, Artificial
  Synthetic oligonucleotide
agggtccagggaatacaggaagcccccacgtttcttgatgtcggtcggcgat

SEQ ID NO: 325240 - DNA, 53 bp, Artificial
  Synthetic oligonucleotide
agggtccatccaggatgtttccgtgcctgaggttaagaaggttacaaaagtcc

SEQ ID NO: 325241 - DNA, 51 bp, Artificial
  Synthetic oligonucleotide
agggtccccagcgcattatccacgttaccattagggggcgctccgcggaac

SEQ ID NO: 325242 - DNA, 58 bp, Artificial
  Synthetic oligonucleotide
agggtccccctcgttccgcaaatggctcacattgcaaccctcactgctgcgctattcg

SEQ ID NO: 325243 - DNA, 57 bp, Artificial
  Synthetic oligonucleotide
agggtccctgtaaggtacagtcgtttgaatctcgacacgatgtcgttcatattggta

SEQ ID NO: 325244 - DNA, 54 bp, Artificial
  Synthetic oligonucleotide
agggtccggcgtggcccgcccattgaaggtcaccggcccagggtggattagtgc

SEQ ID NO: 325245 - DNA, 51 bp, Artificial
  Synthetic oligonucleotide
agggtcctcagtacggatatgccttattactggcacgcacggctcacgctg

SEQ ID NO: 325246 - DNA, 55 bp, Artificial
  Synthetic oligonucleotide
agggtcgaaaagagcgcaggcttaatagagcagcacgctggtaggagtgaccccg

SEQ ID NO: 325247 - DNA, 60 bp, Artificial
  Synthetic oligonucleotide
agggtcgaatgcatagggtggtcaagcacgtcatgccacgacggcatatcaagaatgtca

SEQ ID NO: 325248 - DNA, 55 bp, Artificial
  Synthetic oligonucleotide
agggtcgtcgggactttactgcacgtcctcggacgatcacgattatgcggtaaga

SEQ ID NO: 325249 - DNA, 52 bp, Artificial
  Synthetic oligonucleotide
agggtctacctcggtggtcagtagggatggggcgcctatcgagcggttttcc

SEQ ID NO: 325250 - DNA, 60 bp, Artificial
  Synthetic oligonucleotide
agggtctactgtcatcaatctagaacagactggtagtatgatgtttgaggtgaatgtatc

SEQ ID NO: 325251 - DNA, 54 bp, Artificial
  Synthetic oligonucleotide
agggtctattaccttactcgtgaccctacaacccccctcgcaagagctgcgtgg

SEQ ID NO: 325252 - DNA, 55 bp, Artificial
  Synthetic oligonucleotide
agggtctcaaaagctaactagtggtaactgtaattgggcgctgaatttggtggac

SEQ ID NO: 325253 - DNA, 57 bp, Artificial
  Synthetic oligonucleotide
agggtctcacccctagcacgccaacgacagtccctgcgttgcactccacacttacgt

SEQ ID NO: 325254 - DNA, 58 bp, Artificial
  Synthetic oligonucleotide
agggtctcagaaactgtcgattcacccctattttgatagttaccgtactcagctgatc

SEQ ID NO: 325255 - DNA, 60 bp, Artificial
  Synthetic oligonucleotide
agggtctcagtccatcatgacatggagattcctgttggcacttaccggcaggtaatggac

SEQ ID NO: 325256 - DNA, 54 bp, Artificial
  Synthetic oligonucleotide
agggtctcgattatcataataaatggaagacccaccgggatttacagggagtta

SEQ ID NO: 325257 - DNA, 53 bp, Artificial
  Synthetic oligonucleotide
agggtgagaaccagttaacacggcaatggaccaccctgtacacacacggcgga

SEQ ID NO: 325258 - DNA, 53 bp, Artificial
  Synthetic oligonucleotide
agggtgaggcaatcaaattgcaagcaaatattctgaccgctgacagattgcag

SEQ ID NO: 325259 - DNA, 60 bp, Artificial
  Synthetic oligonucleotide
agggtgaggtgcaggtcctatccacggcaacacaaacattccttggtacttgcatcaatg

SEQ ID NO: 325260 - DNA, 52 bp, Artificial
  Synthetic oligonucleotide
agggtgatagaatttactccactgaagggcaattctgttggaatggacaact

SEQ ID NO: 325261 - DNA, 60 bp, Artificial
  Synthetic oligonucleotide
agggtgcaacgcagcgctttgctcaggctattttgtttcgtgtgttatggacatgcgcca

SEQ ID NO: 325262 - DNA, 58 bp, Artificial
  Synthetic oligonucleotide
agggtgcaacgtcgattgcgaaagacattttcggcgttatcaattctacgcttgacgc

SEQ ID NO: 325263 - DNA, 54 bp, Artificial
  Synthetic oligonucleotide
agggtgcaactaccccactttaagctcgttcggagtcacggacaagtacgacgc

SEQ ID NO: 325264 - DNA, 60 bp, Artificial
  Synthetic oligonucleotide
agggtgcacagattgacactgctttcagctcatattactggctctacaaggcaggtgtga

SEQ ID NO: 325265 - DNA, 55 bp, Artificial
  Synthetic oligonucleotide
agggtgcacgaggcgccagaagatcgatctggagtggggttaacgccatctgcaa

SEQ ID NO: 325266 - DNA, 60 bp, Artificial
  Synthetic oligonucleotide
agggtgcaggatgtttgctctaagtcaaggcacaacactcagggggcgacatgcaaatgg

SEQ ID NO: 325267 - DNA, 60 bp, Artificial
  Synthetic oligonucleotide
agggtgcagggtccaatcacaaagtggcaatgaagagcgatgttacgagcagcgtcctaa

SEQ ID NO: 325268 - DNA, 59 bp, Artificial
  Synthetic oligonucleotide
agggtgcattcccctgtagatttctcgatatgggtcaaacgctacccagaatggcgaca

SEQ ID NO: 325269 - DNA, 53 bp, Artificial
  Synthetic oligonucleotide
agggtgccccggaagcctaggcttttgaccgcaagctagtttcagaacctacc

SEQ ID NO: 325270 - DNA, 55 bp, Artificial
  Synthetic oligonucleotide
agggtgcgaacatacgggagttggagattatcagttatcggaagtatatacagtg

SEQ ID NO: 325271 - DNA, 55 bp, Artificial
  Synthetic oligonucleotide
agggtgcggttcgctaaatccatctttattaatggtaacgttgtgacattacatt

SEQ ID NO: 325272 - DNA, 60 bp, Artificial
  Synthetic oligonucleotide
agggtgctgctctgcaacggtcaccagactcccgctctccaacaaggtactcacagcagt

SEQ ID NO: 325273 - DNA, 53 bp, Artificial
  Synthetic oligonucleotide
agggtggaaaggatcaccgtcaatattccagtgtagcatgacaaaaatcttgg

SEQ ID NO: 325274 - DNA, 57 bp, Artificial
  Synthetic oligonucleotide
agggtggaaggggagcccttgtatatttcagggaacagtagcaggacttctctcaga

SEQ ID NO: 325275 - DNA, 53 bp, Artificial
  Synthetic oligonucleotide
agggtggacgcccttagcctagagctcctaacggtgcaggacattgaaggcgc

SEQ ID NO: 325276 - DNA, 50 bp, Artificial
  Synthetic oligonucleotide
agggtggagacacttctactgcttccatgggctgcttttactcagttcaa

SEQ ID NO: 325277 - DNA, 52 bp, Artificial
  Synthetic oligonucleotide
agggtggagagtgggactttgtggtcaccactgacatatctgaaatgggagc

SEQ ID NO: 325278 - DNA, 58 bp, Artificial
  Synthetic oligonucleotide
agggtggagcagggtcccttgctaaggcaacacgccagcagcctaacgttgaaacaga

SEQ ID NO: 325279 - DNA, 58 bp, Artificial
  Synthetic oligonucleotide
agggtggcagcgtcggagtacgttgaggttacgcagcatggctctttctcgtacgtaa

SEQ ID NO: 325280 - DNA, 57 bp, Artificial
  Synthetic oligonucleotide
agggtggccgcatgcctcagaaaacttggggtcccacccttgcgagcttggagacac

SEQ ID NO: 325281 - DNA, 55 bp, Artificial
  Synthetic oligonucleotide
agggtggctgtcggcttctctatggcacacgaactgaccggcagaggggtcaaag

SEQ ID NO: 325282 - DNA, 51 bp, Artificial
  Synthetic oligonucleotide
agggtgggcttcccgttgcggtaccggacgtagtcagccggggataggacc

SEQ ID NO: 325283 - DNA, 51 bp, Artificial
  Synthetic oligonucleotide
agggtggtagttgggtttacactaattacgggtttactgtcctttgcacta

SEQ ID NO: 325284 - DNA, 58 bp, Artificial
  Synthetic oligonucleotide
agggtggtctgcggttggaatgtcgtggatgaatggcggagcggctaaagtagcctct

SEQ ID NO: 325285 - DNA, 57 bp, Artificial
  Synthetic oligonucleotide
agggtggtgaaccggcatctggcaacccataccgactggcaaaactgtgtatgggag

SEQ ID NO: 325286 - DNA, 55 bp, Artificial
  Synthetic oligonucleotide
agggtgtaaacaaatattggaacagctacaaccaacccttaagacaggatcagaa

SEQ ID NO: 325287 - DNA, 59 bp, Artificial
  Synthetic oligonucleotide
agggtgtaaccgaaaacggttgcaaccgatatcggtgcatatataagtgctgcagtaca

SEQ ID NO: 325288 - DNA, 54 bp, Artificial
  Synthetic oligonucleotide
agggtgtccggtatcccttacgacaggaaagcggtatgttcgtgccctgggtgc

SEQ ID NO: 325289 - DNA, 57 bp, Artificial
  Synthetic oligonucleotide
agggtgtctggtccaataaacatgtgcttctaaaccccgattacatgaacccgatca

SEQ ID NO: 325290 - DNA, 52 bp, Artificial
  Synthetic oligonucleotide
agggtgtgattgttccgtatgggaacttgaccataagttgctcgttaaccct

SEQ ID NO: 325291 - DNA, 55 bp, Artificial
  Synthetic oligonucleotide
agggtgtggctgatatccactaaaatagtaggcccccaggaaaaggattattgga

SEQ ID NO: 325292 - DNA, 58 bp, Artificial
  Synthetic oligonucleotide
agggtgtgtatagaccaactgatgtggccttatctttagcttacccaatcggtgacac

SEQ ID NO: 325293 - DNA, 55 bp, Artificial
  Synthetic oligonucleotide
agggttaaccttatgtgcttctcagccaaagttaagacacccaaggtggacacag

SEQ ID NO: 325294 - DNA, 50 bp, Artificial
  Synthetic oligonucleotide
agggttaaggggtagtattaagtttctatctcttcgcacacgtgttcttt

SEQ ID NO: 325295 - DNA, 51 bp, Artificial
  Synthetic oligonucleotide
agggttaataatcatgtggtgtataatcatcaagaggctgcgaagtatgag

SEQ ID NO: 325296 - DNA, 58 bp, Artificial
  Synthetic oligonucleotide
agggttaataattatgttgtgtttaaccagcaggaagctggtaaatatgagaatcata

SEQ ID NO: 325297 - DNA, 51 bp, Artificial
  Synthetic oligonucleotide
agggttacgcaaggtcaacgtctctgtaccggcgcttgcggtgttacgctg

SEQ ID NO: 325298 - DNA, 52 bp, Artificial
  Synthetic oligonucleotide
agggttacttagtagagtatcccgattctaaacctaaccatgaacaattccg

SEQ ID NO: 325299 - DNA, 50 bp, Artificial
  Synthetic oligonucleotide
agggttagaaacgcaccgtgaccgtaaccgcatatctgcggagtgaacga

SEQ ID NO: 325300 - DNA, 56 bp, Artificial
  Synthetic oligonucleotide
agggttagctttcttcatgcgtattcgcggagtcggactacggtcagaggcagggg

SEQ ID NO: 325301 - DNA, 55 bp, Artificial
  Synthetic oligonucleotide
agggttagttcgtttagacatgcgtcttggcgttctagtgttggacgatccaggg

SEQ ID NO: 325302 - DNA, 55 bp, Artificial
  Synthetic oligonucleotide
agggttatgcaggcagagcggttcttcaaaacccacttgttcgactgggtcacca

SEQ ID NO: 325303 - DNA, 60 bp, Artificial
  Synthetic oligonucleotide
agggttcacatagtgcaggccacggtagtcagtctaacatgaacttaactgcactagctg

SEQ ID NO: 325304 - DNA, 56 bp, Artificial
  Synthetic oligonucleotide
agggttcaccaaccagatatgtgaacaggtcaacctccttaaggagtcactagtag

SEQ ID NO: 325305 - DNA, 52 bp, Artificial
  Synthetic oligonucleotide
agggttcatggttccgcctggcctctccaacgaaggccacttgaccagtgtt

SEQ ID NO: 325306 - DNA, 54 bp, Artificial
  Synthetic oligonucleotide
agggttccttaaacctctttgcgtagatctcaagcttaaaagtatgagtagaag

SEQ ID NO: 325307 - DNA, 54 bp, Artificial
  Synthetic oligonucleotide
agggttcgacaaaccatacgtccgcctagaggacgagacaccacagggtcccca

SEQ ID NO: 325308 - DNA, 55 bp, Artificial
  Synthetic oligonucleotide
agggttcgtgaccttgtgggttcaaaacttggagagtggccaacgatgctagatg

SEQ ID NO: 325309 - DNA, 54 bp, Artificial
  Synthetic oligonucleotide
agggttcgtgagcattggagacgtaagtcaagacgccgtgccgtagctgtacaa

SEQ ID NO: 325310 - DNA, 55 bp, Artificial
  Synthetic oligonucleotide
agggttctgtattcacgtgcagtgcaatgctagtaaattccaccaaggagcactc

SEQ ID NO: 325311 - DNA, 60 bp, Artificial
  Synthetic oligonucleotide
agggttgaacataggactacatctaaaaccgagctgcaactgctcacactcacaacctga

SEQ ID NO: 325312 - DNA, 50 bp, Artificial
  Synthetic oligonucleotide
agggttgagagtgggtgcggaagagaagaatcccatagcgggtctgttca

SEQ ID NO: 325313 - DNA, 59 bp, Artificial
  Synthetic oligonucleotide
agggttgagttggcaaactacagcgtactagcagagacagccccctgggctgaacgtgc

SEQ ID NO: 325314 - DNA, 56 bp, Artificial
  Synthetic oligonucleotide
agggttgatatcaactcccttagggagcccccctatagtcagcaatagtgactttc

SEQ ID NO: 325315 - DNA, 56 bp, Artificial
  Synthetic oligonucleotide
agggttgatctctttggatgacactctggagcagtacgttccgggaattccgaacg

SEQ ID NO: 325316 - DNA, 59 bp, Artificial
  Synthetic oligonucleotide
agggttgccaacagagctcaaaccagggacgaatcaattcttgacgacagatgatggag

SEQ ID NO: 325317 - DNA, 55 bp, Artificial
  Synthetic oligonucleotide
agggttgcccaacttacagtaggtaactcgactattaccactcaggaagctgcta

SEQ ID NO: 325318 - DNA, 59 bp, Artificial
  Synthetic oligonucleotide
agggttggatgctacccgttgaggtcagacacattgaaataaagagggaatgctcagaa

SEQ ID NO: 325319 - DNA, 55 bp, Artificial
  Synthetic oligonucleotide
agggttggcattctatatcgcccccgtgggtattgtctttcgcggcgagccccta

SEQ ID NO: 325320 - DNA, 52 bp, Artificial
  Synthetic oligonucleotide
agggttggctgaattttgccagagtgaggattgcagctgatcttgctgtgag

SEQ ID NO: 325321 - DNA, 51 bp, Artificial
  Synthetic oligonucleotide
agggttgtagcccaaggaccggaagaagaatttggtaggtcacttattaaa

SEQ ID NO: 325322 - DNA, 54 bp, Artificial
  Synthetic oligonucleotide
agggttgtcgaggtacccttgaaatcatctcctagatttcttcggaagggcttc

SEQ ID NO: 325323 - DNA, 56 bp, Artificial
  Synthetic oligonucleotide
agggttgtcgaggtacccttgtgcacggtaatacactgatattaccaagagtgcgg

SEQ ID NO: 325324 - DNA, 60 bp, Artificial
  Synthetic oligonucleotide
agggttgtgtatgtctatacagcccagatggatcgtgaacaatgcctattttagacaaca

SEQ ID NO: 325325 - DNA, 50 bp, Artificial
  Synthetic oligonucleotide
agggtttacctgcgaggccgggggatttggcacgggggttagagagaaca

SEQ ID NO: 325326 - DNA, 50 bp, Artificial
  Synthetic oligonucleotide
agggtttcaatgaagtgtcaacagcattcaggcacatcgattggtggata

SEQ ID NO: 325327 - DNA, 53 bp, Artificial
  Synthetic oligonucleotide
agggtttcaccagacagcaattacgggacatggctgaagtgcttagagaggcg

SEQ ID NO: 325328 - DNA, 58 bp, Artificial
  Synthetic oligonucleotide
agggtttgatcactgacatagcttccaccgtttcggcggtggcaggtgcggtcagtgg

SEQ ID NO: 325329 - DNA, 53 bp, Artificial
  Synthetic oligonucleotide
agggtttgggaccgagggaatgtcacacttttgtgtgattgccccaacggtcc

SEQ ID NO: 325330 - DNA, 55 bp, Artificial
  Synthetic oligonucleotide
agggtttgggacctgctttgcaggagcggtatagaacaactgaagatcctacgcc

SEQ ID NO: 325331 - DNA, 52 bp, Artificial
  Synthetic oligonucleotide
agggtttgggacgtaaaaaatgcagaattactcaataaccaatttggaacca

SEQ ID NO: 325332 - DNA, 52 bp, Artificial
  Synthetic oligonucleotide
agggtttgtagttgggaaagggcttcagttaatgaaagagaacactggggat

SEQ ID NO: 325333 - DNA, 53 bp, Artificial
  Synthetic oligonucleotide
agggtttgtttccgtacacgaccaatgctaatttaggcttcgccgagcctagg

SEQ ID NO: 325334 - DNA, 54 bp, Artificial
  Synthetic oligonucleotide
agggtttttgactatcctgagctacgggttcttgtgacacctgaatattcggtc

SEQ ID NO: 325335 - DNA, 56 bp, Artificial
  Synthetic oligonucleotide
aggtaaaaattctcgatggagttgccggatgtggtaaatcgtaccagatagctaac

SEQ ID NO: 325336 - DNA, 57 bp, Artificial
  Synthetic oligonucleotide
aggtaaaacaactgtgtaaactcctcagaggagccaaagcactaacagatatagtaa

SEQ ID NO: 325337 - DNA, 53 bp, Artificial
  Synthetic oligonucleotide
aggtaaaacctccgactccagaaaatatcagtagactcaccgataaaatcgtt

SEQ ID NO: 325338 - DNA, 54 bp, Artificial
  Synthetic oligonucleotide
aggtaaaactattgacacttattgccgtaaagtcggcgttctatgagggccttc

SEQ ID NO: 325339 - DNA, 54 bp, Artificial
  Synthetic oligonucleotide
aggtaaaagactatgggtacatcccgtactcctacaaattcggagcgggtcaga

SEQ ID NO: 325340 - DNA, 60 bp, Artificial
  Synthetic oligonucleotide
aggtaaaagcatagcaagggaaccaatcacaatggcgtgcatttccagacaggatggtaa

SEQ ID NO: 325341 - DNA, 55 bp, Artificial
  Synthetic oligonucleotide
aggtaaaccatgtatcaaagttgccactgtacagtccaaaatgtccgacgtaaag

SEQ ID NO: 325342 - DNA, 55 bp, Artificial
  Synthetic oligonucleotide
aggtaaacgcggttagctctgtgccgacgtggccggtagaggcgtgtccttcgtc

SEQ ID NO: 325343 - DNA, 55 bp, Artificial
  Synthetic oligonucleotide
aggtaaataggcaagtcatagttgacaataacaactggtctggttattcgggtgt

SEQ ID NO: 325344 - DNA, 55 bp, Artificial
  Synthetic oligonucleotide
aggtaaatgagacgatgatgcatatgggagccctacaacctgggttgcccactcc

SEQ ID NO: 325345 - DNA, 55 bp, Artificial
  Synthetic oligonucleotide
aggtaaatgagtccccaattgaggcaccgttatatcggtgcctcggaaagagaaa

SEQ ID NO: 325346 - DNA, 54 bp, Artificial
  Synthetic oligonucleotide
aggtaaatgggacaccgatacactggttcccctattaggtcctcaatatccaat

SEQ ID NO: 325347 - DNA, 51 bp, Artificial
  Synthetic oligonucleotide
aggtaaatttgtccccgatatatcggtgacaaatgggggcattggagtctc

SEQ ID NO: 325348 - DNA, 54 bp, Artificial
  Synthetic oligonucleotide
aggtaaattttagcttctcttctgcttataggactttgttatataaattaacca

SEQ ID NO: 325349 - DNA, 53 bp, Artificial
  Synthetic oligonucleotide
aggtaacattgtcaaggtgctctttaacgggaggcccgaagtcacgtgggtag

SEQ ID NO: 325350 - DNA, 50 bp, Artificial
  Synthetic oligonucleotide
aggtaacccttttatagcattaggtacgtgaggttgatacccttccggag

SEQ ID NO: 325351 - DNA, 55 bp, Artificial
  Synthetic oligonucleotide
aggtaacctccactccaacacatggggtactctcatcctctatgttgatctcccc

SEQ ID NO: 325352 - DNA, 59 bp, Artificial
  Synthetic oligonucleotide
aggtaacgcacccttctatagacgaaatatgatagccttattgcgttcgatgataatta

SEQ ID NO: 325353 - DNA, 59 bp, Artificial
  Synthetic oligonucleotide
aggtaacgtggtgcataatgccacgtgccgctagacaccaaaactcgatgtacttccga

SEQ ID NO: 325354 - DNA, 59 bp, Artificial
  Synthetic oligonucleotide
aggtaactatgggaccaggacgagtattctatagaacaggagagataatgggagatata

SEQ ID NO: 325355 - DNA, 58 bp, Artificial
  Synthetic oligonucleotide
aggtaactggttcggctgtacatggatgaatagtactgggttcaccaagacctgcgga

SEQ ID NO: 325356 - DNA, 50 bp, Artificial
  Synthetic oligonucleotide
aggtaagactgaattcacccgccacgctcgccactactatcattcggaca

SEQ ID NO: 325357 - DNA, 56 bp, Artificial
  Synthetic oligonucleotide
aggtaagcgcgctcaaagcggaccatgcactcgaagcgaaacggctttccgacgca

SEQ ID NO: 325358 - DNA, 56 bp, Artificial
  Synthetic oligonucleotide
aggtaagctacgaccgtgcccgtgcaaagatctttagagatttcgtaatccacgtc

SEQ ID NO: 325359 - DNA, 55 bp, Artificial
  Synthetic oligonucleotide
aggtaaggaggctagtgcacctaattattattacgggagtgaggcaaattttaca

SEQ ID NO: 325360 - DNA, 60 bp, Artificial
  Synthetic oligonucleotide
aggtaaggcaaggattatcatggagacaaagatcaagatggataaccgaacaatatcaca

SEQ ID NO: 325361 - DNA, 56 bp, Artificial
  Synthetic oligonucleotide
aggtaaggtcataaagccgattgccccaatgcggggacgtccattgtatgaagcgg

SEQ ID NO: 325362 - DNA, 55 bp, Artificial
  Synthetic oligonucleotide
aggtaataaacaaactttacgcactcgtagtggtgctactattggtgcaagggtg

SEQ ID NO: 325363 - DNA, 53 bp, Artificial
  Synthetic oligonucleotide
aggtaataaaccgtatagatctcgtaggttaaaggctagtgattaccagatct

SEQ ID NO: 325364 - DNA, 55 bp, Artificial
  Synthetic oligonucleotide
aggtaataaatcgggacaccaatggtaattgggacaccgatacatcagtgccccc

SEQ ID NO: 325365 - DNA, 56 bp, Artificial
  Synthetic oligonucleotide
aggtaataggggacccaaagcaagcacattgtaatgtcagcagagcagcatggaat

SEQ ID NO: 325366 - DNA, 56 bp, Artificial
  Synthetic oligonucleotide
aggtaatatctcgaaaagagtaccgactttccgcgaagcgtctctcgctattaaga

SEQ ID NO: 325367 - DNA, 54 bp, Artificial
  Synthetic oligonucleotide
aggtaatcaggtaatttatcctgggcccacagaaaggccaactataatatttcc

SEQ ID NO: 325368 - DNA, 55 bp, Artificial
  Synthetic oligonucleotide
aggtaatgacacctctgcaaattagtgcaatagtaggattgatagtagtgctaat

SEQ ID NO: 325369 - DNA, 58 bp, Artificial
  Synthetic oligonucleotide
aggtaatgaccatgttccgggggagtgcatctataacagcactggtcaagcccggttg

SEQ ID NO: 325370 - DNA, 60 bp, Artificial
  Synthetic oligonucleotide
aggtaatggcaggcagggtttttgtgcaggactcaagagaagctactttgctagtgaaca

SEQ ID NO: 325371 - DNA, 52 bp, Artificial
  Synthetic oligonucleotide
aggtaatgggggtaggtctgttgatcacataaaattattaaacttgagggtt

SEQ ID NO: 325372 - DNA, 56 bp, Artificial
  Synthetic oligonucleotide
aggtaattcctgtgtacgatgtgggtttacaccaccacgtattgtagatcaatacg

SEQ ID NO: 325373 - DNA, 56 bp, Artificial
  Synthetic oligonucleotide
aggtaattgagaccccaatacactggtgtctcaattggtacccatatttgcgtttc

SEQ ID NO: 325374 - DNA, 57 bp, Artificial
  Synthetic oligonucleotide
aggtacaaaattctcaagtatgacaaaggaacatatgttgtgcaaaacgagttcacc

SEQ ID NO: 325375 - DNA, 55 bp, Artificial
  Synthetic oligonucleotide
aggtacaacaggtggtgtatactaggtatccatcaagagatagagcctctgaccc

SEQ ID NO: 325376 - DNA, 56 bp, Artificial
  Synthetic oligonucleotide
aggtacaacatcaagacagactaccggaacggacgtctaatcaggtggcaactacg

SEQ ID NO: 325377 - DNA, 59 bp, Artificial
  Synthetic oligonucleotide
aggtacaagggtcaagccacacttggctagatctttggacaattgcatcagtttttcaa

SEQ ID NO: 325378 - DNA, 58 bp, Artificial
  Synthetic oligonucleotide
aggtacaccaaaacaacatactggtgggacgggctccaatcctctgatgactttgctc

SEQ ID NO: 325379 - DNA, 56 bp, Artificial
  Synthetic oligonucleotide
aggtacacggtagaggggtgtcgtatgtctggagatattaacacatcttccggaaa

SEQ ID NO: 325380 - DNA, 50 bp, Artificial
  Synthetic oligonucleotide
aggtacacgtcctgggcaccataggcgacgagctgtgaaagtcctccggc

SEQ ID NO: 325381 - DNA, 60 bp, Artificial
  Synthetic oligonucleotide
aggtacatgaattagaagatctagagcaatataggaaagctattacgcaaaaactgcaaa

SEQ ID NO: 325382 - DNA, 58 bp, Artificial
  Synthetic oligonucleotide
aggtaccgataagcggatgcccaatcgttgcaagctccgctgattcggacttggactt

SEQ ID NO: 325383 - DNA, 50 bp, Artificial
  Synthetic oligonucleotide
aggtaccgttttgaacccgaccctttgaagttgataacaaagctgggtaa

SEQ ID NO: 325384 - DNA, 55 bp, Artificial
  Synthetic oligonucleotide
aggtacctcgaggtaacacgcgacactcgagatctgagaaggtgactggggcttc

SEQ ID NO: 325385 - DNA, 55 bp, Artificial
  Synthetic oligonucleotide
aggtacctctcaaaacactagaatatccttacgcccggggccagtgtctcagccg

SEQ ID NO: 325386 - DNA, 60 bp, Artificial
  Synthetic oligonucleotide
aggtaccttagcaaagcattatacccaatggagtgggtcagtggagatcacctgcatgtt

SEQ ID NO: 325387 - DNA, 60 bp, Artificial
  Synthetic oligonucleotide
aggtacgaagcaatcaggatggtgggcggctggaacaatccactgctggaaaccgcagca

SEQ ID NO: 325388 - DNA, 60 bp, Artificial
  Synthetic oligonucleotide
aggtacgacaaaagcacatgctgcaccaagacccgtaacaaatggtcagctcaatcgtca

SEQ ID NO: 325389 - DNA, 57 bp, Artificial
  Synthetic oligonucleotide
aggtacgacgcatttacactgagtaaggtttgcttcgagcatacattaccgaaccca

SEQ ID NO: 325390 - DNA, 55 bp, Artificial
  Synthetic oligonucleotide
aggtacgagtcaccaaacccatccactatcacactgccctagctattaagctagg

SEQ ID NO: 325391 - DNA, 55 bp, Artificial
  Synthetic oligonucleotide
aggtacgatgttgacccagtaggataggatgacttggagcgaaaatccacttcca

SEQ ID NO: 325392 - DNA, 51 bp, Artificial
  Synthetic oligonucleotide
aggtacgctgatctcgggctcacggtgcggcttcgcatttctttcacccac

SEQ ID NO: 325393 - DNA, 55 bp, Artificial
  Synthetic oligonucleotide
aggtacgtaaagctcaaatccttagagcctggtactaagaacagaagatatacct

SEQ ID NO: 325394 - DNA, 53 bp, Artificial
  Synthetic oligonucleotide
aggtacgtacgtttatgaccaccttactccactgcgggactgggcccactcgg

SEQ ID NO: 325395 - DNA, 58 bp, Artificial
  Synthetic oligonucleotide
aggtacgtcgccgtctgaacttcgacagcccgtatgtcagccgtgcgaatgcccccac

SEQ ID NO: 325396 - DNA, 57 bp, Artificial
  Synthetic oligonucleotide
aggtactatcatacaattttcaggtaatggaattccgatgaaatataaatctagtac

SEQ ID NO: 325397 - DNA, 54 bp, Artificial
  Synthetic oligonucleotide
aggtactcgaccgtccccggtccctggaagtcccacttgctggacagagccgag

SEQ ID NO: 325398 - DNA, 52 bp, Artificial
  Synthetic oligonucleotide
aggtactcgtcttgaacccgtctgtcgccgccaccctagggtttggggcgta

SEQ ID NO: 325399 - DNA, 59 bp, Artificial
  Synthetic oligonucleotide
aggtactgacactattgccaggtgttcatgcaaagcaggagtctattactgtgagtcca

SEQ ID NO: 325400 - DNA, 60 bp, Artificial
  Synthetic oligonucleotide
aggtactggcacctgtactggagaggggctgcacgttgccatgctcggtgtggacgcgag

SEQ ID NO: 325401 - DNA, 59 bp, Artificial
  Synthetic oligonucleotide
aggtactgggccataaggaccagaagtggaggaaacaccaatcaacagagggcatctgc

SEQ ID NO: 325402 - DNA, 60 bp, Artificial
  Synthetic oligonucleotide
aggtacttcagggcagatgagcagtacccattcctagtgcatcctgtgatgcccatgaaa

SEQ ID NO: 325403 - DNA, 52 bp, Artificial
  Synthetic oligonucleotide
aggtacttgtcctgaacccgtccgttgctgccaccttaggttttggggcgta

SEQ ID NO: 325404 - DNA, 54 bp, Artificial
  Synthetic oligonucleotide
aggtactttgcattcaaatcacaaccatctttttccgagtatttaaagccgaaa

SEQ ID NO: 325405 - DNA, 55 bp, Artificial
  Synthetic oligonucleotide
aggtagaagttgatgttgatgcgtagaatctccaaagcctaggatccactgtgcg

SEQ ID NO: 325406 - DNA, 59 bp, Artificial
  Synthetic oligonucleotide
aggtagacgatgaggagatcatggagcagtttctgagtggtcttattgacactgaagcg

SEQ ID NO: 325407 - DNA, 58 bp, Artificial
  Synthetic oligonucleotide
aggtagacgtaccttcaaggagacacctatcacaagcgacaatcgaatgtcgtactgg

SEQ ID NO: 325408 - DNA, 55 bp, Artificial
  Synthetic oligonucleotide
aggtagactaagaggggcatcgaatagctttcatcgaatgtctttcccttccttg

SEQ ID NO: 325409 - DNA, 54 bp, Artificial
  Synthetic oligonucleotide
aggtagacttgcaaggacgttatgggtgtcttgccacttttcgtctgacgcgag

SEQ ID NO: 325410 - DNA, 52 bp, Artificial
  Synthetic oligonucleotide
aggtagagaaggccaatgagggagagaataactgcttgctacaccccataag

SEQ ID NO: 325411 - DNA, 57 bp, Artificial
  Synthetic oligonucleotide
aggtagagactttacaagctgcagtcgctctagcaacctttgccttgaataaaaaac

SEQ ID NO: 325412 - DNA, 53 bp, Artificial
  Synthetic oligonucleotide
aggtagaggacccggtttacgagctcgaacgtattgacttttgtcaaacgaga

SEQ ID NO: 325413 - DNA, 54 bp, Artificial
  Synthetic oligonucleotide
aggtagataaattagtcagtgctggaatcaggagagtactatttctagatggaa

SEQ ID NO: 325414 - DNA, 59 bp, Artificial
  Synthetic oligonucleotide
aggtagatctgactggttcacctccttatttaacatggaagctaagaatatggatcctc

SEQ ID NO: 325415 - DNA, 60 bp, Artificial
  Synthetic oligonucleotide
aggtagcaaacaatgtagccaagcaacccctgccatatattgttctagtacagcatttcc

SEQ ID NO: 325416 - DNA, 51 bp, Artificial
  Synthetic oligonucleotide
aggtagcacccagcatagccaagatggcatggtctaacggatgccgaatcc

SEQ ID NO: 325417 - DNA, 52 bp, Artificial
  Synthetic oligonucleotide
aggtagccctttgtgttagggatttgctaccgcaggtagttaagaaggttaa

SEQ ID NO: 325418 - DNA, 55 bp, Artificial
  Synthetic oligonucleotide
aggtagctacgactcaaacattaaaatagcaggagacagcaactacaactggtac

SEQ ID NO: 325419 - DNA, 56 bp, Artificial
  Synthetic oligonucleotide
aggtagcttccggtcgtctgatgacttccaagaagccgctagggaagctgaaaacc

SEQ ID NO: 325420 - DNA, 56 bp, Artificial
  Synthetic oligonucleotide
aggtaggacctgggattgcagaggaagattgttggaatgccacctttaatttgaat

SEQ ID NO: 325421 - DNA, 54 bp, Artificial
  Synthetic oligonucleotide
aggtaggagccggagcattcgggctgggattcaccccacctcacggaggccttt

SEQ ID NO: 325422 - DNA, 58 bp, Artificial
  Synthetic oligonucleotide
aggtaggagctgatacatgtgcattggttcatgtggatttggagggtgtacccggttc

SEQ ID NO: 325423 - DNA, 60 bp, Artificial
  Synthetic oligonucleotide
aggtaggcagagtcagacaggaactgtacagacattggttgaactacggatttgaagtca

SEQ ID NO: 325424 - DNA, 55 bp, Artificial
  Synthetic oligonucleotide
aggtagggccgctaagctttgcacggagaacaacactgccaattttaagagatgc

SEQ ID NO: 325425 - DNA, 54 bp, Artificial
  Synthetic oligonucleotide
aggtaggtaatgagttttgacattggtgggttgacctggactcctgagaccgca

SEQ ID NO: 325426 - DNA, 53 bp, Artificial
  Synthetic oligonucleotide
aggtaggttcttgctgcgcttagacgacttgattgaattacaggctccacacg

SEQ ID NO: 325427 - DNA, 55 bp, Artificial
  Synthetic oligonucleotide
aggtaggtttcggacaattgtgtgtggtcttttcccaactcagattcaggtgcgc

SEQ ID NO: 325428 - DNA, 55 bp, Artificial
  Synthetic oligonucleotide
aggtagtaccaaggaggatagcagaaatcattaaggactatggaacacagctggc

SEQ ID NO: 325429 - DNA, 53 bp, Artificial
  Synthetic oligonucleotide
aggtagtacccgtatctttaaagccagggatggatggacctaaagttaagcaa

SEQ ID NO: 325430 - DNA, 57 bp, Artificial
  Synthetic oligonucleotide
aggtagtacgtcgggatacggcctttgagcgctagagcgagcgtgaacgccgactta

SEQ ID NO: 325431 - DNA, 57 bp, Artificial
  Synthetic oligonucleotide
aggtagtagaaaaatatcctcaagttgactcgttggtcgcaaagatattgtatcgtg

SEQ ID NO: 325432 - DNA, 58 bp, Artificial
  Synthetic oligonucleotide
aggtagtattagcatgacattcaacaaaagcaacgatggtggagatccagagacaacc

SEQ ID NO: 325433 - DNA, 55 bp, Artificial
  Synthetic oligonucleotide
aggtagtccaaatcttgaagtaatcacctctaacaaaggtaggacggctaagtgc

SEQ ID NO: 325434 - DNA, 55 bp, Artificial
  Synthetic oligonucleotide
aggtagtgcccctgctcggagagcccctgactgggttaaagtcacaggccccttg

SEQ ID NO: 325435 - DNA, 60 bp, Artificial
  Synthetic oligonucleotide
aggtagtggaagatcttgacacaaagttggaccagtgctggacggcctcaattcttatga

SEQ ID NO: 325436 - DNA, 60 bp, Artificial
  Synthetic oligonucleotide
aggtagtggggatcgacgtcatcaatgacgttgtaccatgcagcattattgaagaccttt

SEQ ID NO: 325437 - DNA, 57 bp, Artificial
  Synthetic oligonucleotide
aggtagtgggggtctacgtcatcaatgacgttgtaccacgaatcattactatagacc

SEQ ID NO: 325438 - DNA, 60 bp, Artificial
  Synthetic oligonucleotide
aggtagttaaaattgtatcagctctagttatcatttgtagaaaccatgatgatttagtca

SEQ ID NO: 325439 - DNA, 57 bp, Artificial
  Synthetic oligonucleotide
aggtagtttagaccacttgactttatgtgctgcggtcgattcggacatcactttcgt

SEQ ID NO: 325440 - DNA, 54 bp, Artificial
  Synthetic oligonucleotide
aggtataaactaccgactgagttatgttcgtgactcacttctggacaaagaccc

SEQ ID NO: 325441 - DNA, 59 bp, Artificial
  Synthetic oligonucleotide
aggtataacagagtaatgagaagatatccaaccataaggcctttgagaggcacacaacc

SEQ ID NO: 325442 - DNA, 60 bp, Artificial
  Synthetic oligonucleotide
aggtataatcccatcatgcttgtatggaagcatgaatttcttcttcacaagaactggaga

SEQ ID NO: 325443 - DNA, 53 bp, Artificial
  Synthetic oligonucleotide
aggtataattacagctggtggtgagggtcatgttgcatttatagatttgagac

SEQ ID NO: 325444 - DNA, 56 bp, Artificial
  Synthetic oligonucleotide
aggtatagccaataaaaggtatatgactatggcgtataaattaagctaaggcggga

SEQ ID NO: 325445 - DNA, 60 bp, Artificial
  Synthetic oligonucleotide
aggtatagctaggcccccaaattctgtggaatacatagctgctcaaacaagcaagaggat

SEQ ID NO: 325446 - DNA, 54 bp, Artificial
  Synthetic oligonucleotide
aggtatagggaacagtcatctcagctcattaataggtagtggcttgatcacagg

SEQ ID NO: 325447 - DNA, 55 bp, Artificial
  Synthetic oligonucleotide
aggtatatatgcagctggtaaggatcgcttggaagtttcgctcaattgcctgacc

SEQ ID NO: 325448 - DNA, 50 bp, Artificial
  Synthetic oligonucleotide
aggtatcacagactatatacacatgcttggggaagcctttggtagtgggt

SEQ ID NO: 325449 - DNA, 53 bp, Artificial
  Synthetic oligonucleotide
aggtatcatagcgggtgacattctcttggaactcaccttacttgaacctagct

SEQ ID NO: 325450 - DNA, 60 bp, Artificial
  Synthetic oligonucleotide
aggtatcatgggctatcattttggactatagatgtctctaaatctctcacccgagatttg

SEQ ID NO: 325451 - DNA, 60 bp, Artificial
  Synthetic oligonucleotide
aggtatccaatcaggatcattagtggataatgactgtgaatcaaaatgcttttggaaagg

SEQ ID NO: 325452 - DNA, 52 bp, Artificial
  Synthetic oligonucleotide
aggtatccaccatgcgtaacaaacacctctaccgtaacgtgaacctccgtca

SEQ ID NO: 325453 - DNA, 54 bp, Artificial
  Synthetic oligonucleotide
aggtatccccacttacacctggggagaaaatgtgtccgacgtgttcctactaca

SEQ ID NO: 325454 - DNA, 54 bp, Artificial
  Synthetic oligonucleotide
aggtatccgaagaaggcgctaaagaagaggaaggcggtacgccgtaagtatgga

SEQ ID NO: 325455 - DNA, 55 bp, Artificial
  Synthetic oligonucleotide
aggtatccgagctagtcttgagtctgatgatttatcacgttgaccatgattggga

SEQ ID NO: 325456 - DNA, 60 bp, Artificial
  Synthetic oligonucleotide
aggtatcgacgaatcagctccagaggttgcgaacagtctcgattatatccgtgaacaagt

SEQ ID NO: 325457 - DNA, 56 bp, Artificial
  Synthetic oligonucleotide
aggtatcttccgggctgctgtgtgcacccggggggtcgcgaaggcagtggactttg

SEQ ID NO: 325458 - DNA, 56 bp, Artificial
  Synthetic oligonucleotide
aggtatgaactggactgatttaatcaccaattattcaccgtctagggaggacaatt

SEQ ID NO: 325459 - DNA, 60 bp, Artificial
  Synthetic oligonucleotide
aggtatgacacattcagcatgaacttaaactttgcactcaatagcactttctctccagta

SEQ ID NO: 325460 - DNA, 59 bp, Artificial
  Synthetic oligonucleotide
aggtatgcgtgcccgtcctaggttacaggcctctaaacggtctgcaccttcatcatcta

SEQ ID NO: 325461 - DNA, 55 bp, Artificial
  Synthetic oligonucleotide
aggtatgtcaggatgcggatcaagagggtgggaacacctgtttggtctgggcagc

SEQ ID NO: 325462 - DNA, 60 bp, Artificial
  Synthetic oligonucleotide
aggtatgtctaaatctcattctgacgttgtgggcactgtgtctggtcttaattatagact

SEQ ID NO: 325463 - DNA, 60 bp, Artificial
  Synthetic oligonucleotide
aggtattccatcttattcttctaccagtatcttagcagcatcagaggatggtaggtttgt

SEQ ID NO: 325464 - DNA, 58 bp, Artificial
  Synthetic oligonucleotide
aggtattccgatagaaatagtcatcatccgtatagaccctgtgagcaaagatttacat

SEQ ID NO: 325465 - DNA, 53 bp, Artificial
  Synthetic oligonucleotide
aggtattctgatgaacatgtattgtccctggttcatgcgttcataggatattg

SEQ ID NO: 325466 - DNA, 50 bp, Artificial
  Synthetic oligonucleotide
aggtattgactctggagaacgtcactgagaataccgatttgacatgcaaa

SEQ ID NO: 325467 - DNA, 60 bp, Artificial
  Synthetic oligonucleotide
aggtattgctgctacctattgaccatcagccagccaatgtaaccacaccgactctggatt

SEQ ID NO: 325468 - DNA, 55 bp, Artificial
  Synthetic oligonucleotide
aggtatttgcagtcccgtgctattacctgccaaaagggggtttctgctcctgacc

SEQ ID NO: 325469 - DNA, 52 bp, Artificial
  Synthetic oligonucleotide
aggtatttgcctccaatgttagtactggtgaacaacctattagcagtacacc

SEQ ID NO: 325470 - DNA, 55 bp, Artificial
  Synthetic oligonucleotide
aggtcaaaagtcctcgagtactagagtcctcgagttttctagtcctcggagtgtc

SEQ ID NO: 325471 - DNA, 51 bp, Artificial
  Synthetic oligonucleotide
aggtcaaagttctgcgtgcacgtggtggtgatgatcgtaattcaaaagatg

SEQ ID NO: 325472 - DNA, 53 bp, Artificial
  Synthetic oligonucleotide
aggtcaacagccttgttcgggtctacatggtaagccagaccaacgttcacagt

SEQ ID NO: 325473 - DNA, 55 bp, Artificial
  Synthetic oligonucleotide
aggtcaaccctcttacgccggaaggctctacgcttggctagcctgtgttggacct

SEQ ID NO: 325474 - DNA, 55 bp, Artificial
  Synthetic oligonucleotide
aggtcaacgtctcgagatgttgggtaccggtggcccccacagtcgccactaagga

SEQ ID NO: 325475 - DNA, 56 bp, Artificial
  Synthetic oligonucleotide
aggtcaagctcactcggccctgatgatctggtaaacgcgcccacgcgtaatgccgg

SEQ ID NO: 325476 - DNA, 54 bp, Artificial
  Synthetic oligonucleotide
aggtcaagggggtcgaacgctctttgcgaaaagcatcttaggactaggcctcgg

SEQ ID NO: 325477 - DNA, 60 bp, Artificial
  Synthetic oligonucleotide
aggtcaatggaacatggatgatgcacacacttgagacccttgactataaagagtgtgaat

SEQ ID NO: 325478 - DNA, 58 bp, Artificial
  Synthetic oligonucleotide
aggtcaattcttaacaactgatgactttcagtccccctgcatgctaccaaaattccaa

SEQ ID NO: 325479 - DNA, 60 bp, Artificial
  Synthetic oligonucleotide
aggtcaattggtgcttatatcctcggatttgcactaccaatcatcttgaaagccctctac

SEQ ID NO: 325480 - DNA, 51 bp, Artificial
  Synthetic oligonucleotide
aggtcacacaaatatttgaaagagatgttgctgaagtggaggaacctccag

SEQ ID NO: 325481 - DNA, 60 bp, Artificial
  Synthetic oligonucleotide
aggtcacataatgcatgggggagcggtgtcgatcgagggacgaggatttagacaagctta

SEQ ID NO: 325482 - DNA, 54 bp, Artificial
  Synthetic oligonucleotide
aggtcaccacccaaattggggcgacatcaatgatagcccccgttatggatcaac

SEQ ID NO: 325483 - DNA, 53 bp, Artificial
  Synthetic oligonucleotide
aggtcacccggccgggtaagatgtacccagaccgttacggctttcttgatgga

SEQ ID NO: 325484 - DNA, 59 bp, Artificial
  Synthetic oligonucleotide
aggtcacctcaagggctggccttctgcagccacatatgtcccttcaacgtgtggcgtgt

SEQ ID NO: 325485 - DNA, 60 bp, Artificial
  Synthetic oligonucleotide
aggtcacgatgcaattgagatgcagatggccttagaaggtttgagcaagtcgaactttag

SEQ ID NO: 325486 - DNA, 59 bp, Artificial
  Synthetic oligonucleotide
aggtcacgtagagtgatttttcttatggaacaatggaaaatgaggaatccgacagcagc

SEQ ID NO: 325487 - DNA, 58 bp, Artificial
  Synthetic oligonucleotide
aggtcactagagagttccattagttcatcttttgacaacgatccaactttcaggaaca

SEQ ID NO: 325488 - DNA, 58 bp, Artificial
  Synthetic oligonucleotide
aggtcactttttagctctgctagttcctaccaaagaatccagatctttccagacacaa

SEQ ID NO: 325489 - DNA, 56 bp, Artificial
  Synthetic oligonucleotide
aggtcagaacgctcaattacatgagacaattgaacaaaccctctgtctggcgttac

SEQ ID NO: 325490 - DNA, 54 bp, Artificial
  Synthetic oligonucleotide
aggtcagaccttataattcaggaagtggaccccaggttggacctaatcatttag

SEQ ID NO: 325491 - DNA, 60 bp, Artificial
  Synthetic oligonucleotide
aggtcagcttgctatctcgcaactcgaaactggatatggcgtgcgaatattcaaccctaa

SEQ ID NO: 325492 - DNA, 58 bp, Artificial
  Synthetic oligonucleotide
aggtcaggactacgccctcaacatgcagttttggttggggagctcaagggacaacatg

SEQ ID NO: 325493 - DNA, 57 bp, Artificial
  Synthetic oligonucleotide
aggtcagtgtggcggtgtcctcatgtccactggtaaggtgttggggatacacgttgg

SEQ ID NO: 325494 - DNA, 60 bp, Artificial
  Synthetic oligonucleotide
aggtcagttcatgacaactgatgacatgcagtccccttgtgcattaccctggtatcaccc

SEQ ID NO: 325495 - DNA, 57 bp, Artificial
  Synthetic oligonucleotide
aggtcagttggttgatttaacgagattactatcttacaactatgaaactctaatggc

SEQ ID NO: 325496 - DNA, 58 bp, Artificial
  Synthetic oligonucleotide
aggtcagtttcctatcaagcttgatttggttctcgatactgaccctaacaacatccaa

SEQ ID NO: 325497 - DNA, 53 bp, Artificial
  Synthetic oligonucleotide
aggtcataaagtcgtacgttataaaagcgagggataatccttcacctcgtttc

SEQ ID NO: 325498 - DNA, 57 bp, Artificial
  Synthetic oligonucleotide
aggtcataaggtcgctcacagagcggctttatgtcgggggccccctgactaattcaa

SEQ ID NO: 325499 - DNA, 55 bp, Artificial
  Synthetic oligonucleotide
aggtcatactttgggagtacgaattaatttcgccgaagtactcagtgagtaacca

SEQ ID NO: 325500 - DNA, 57 bp, Artificial
  Synthetic oligonucleotide
aggtcatagcgcataccacgtgttcagttaacggagtgaataatttcaattacaacg

SEQ ID NO: 325501 - DNA, 55 bp, Artificial
  Synthetic oligonucleotide
aggtcatcaagtataaagacaacgtaaatgaagtttattcgctcacaggagccca

SEQ ID NO: 325502 - DNA, 54 bp, Artificial
  Synthetic oligonucleotide
aggtcatccaaccgactcttccaataattcgggtccttactactagatcctagg

SEQ ID NO: 325503 - DNA, 56 bp, Artificial
  Synthetic oligonucleotide
aggtcatcctcaccataactggcacaaaatggccgccaacttcttccgggtcaaag

SEQ ID NO: 325504 - DNA, 53 bp, Artificial
  Synthetic oligonucleotide
aggtcatccttatttctcgcccctctcgtatatcggctactgtatgcatctct

SEQ ID NO: 325505 - DNA, 55 bp, Artificial
  Synthetic oligonucleotide
aggtcatcttaaagaccgtccgtgtgggcagctcatcgctaacccattcgagacg

SEQ ID NO: 325506 - DNA, 58 bp, Artificial
  Synthetic oligonucleotide
aggtcatgagaaagttgatattcgtcccgatgggactctatgtagttaaatgcgttgg

SEQ ID NO: 325507 - DNA, 60 bp, Artificial
  Synthetic oligonucleotide
aggtcatgggttcattttcataagtacacacaagagtatacagctggcggatatcatcaa

SEQ ID NO: 325508 - DNA, 60 bp, Artificial
  Synthetic oligonucleotide
aggtcatggtaaacgaacccaatctgtgggccattgctcgtggggacatcattcttgctc

SEQ ID NO: 325509 - DNA, 60 bp, Artificial
  Synthetic oligonucleotide
aggtcatgtgtattagtgatgtcactcgtggaactgggctgacccatcgagtgggtaaaa

SEQ ID NO: 325510 - DNA, 55 bp, Artificial
  Synthetic oligonucleotide
aggtcatgttggcgtcaatcgttctcaccgattgcaagacaatttcgtaccgacg

SEQ ID NO: 325511 - DNA, 56 bp, Artificial
  Synthetic oligonucleotide
aggtcattggcgaatctaagcatgcgaacgcagcatacacccattgtactaaaccg

SEQ ID NO: 325512 - DNA, 60 bp, Artificial
  Synthetic oligonucleotide
aggtccaatcacttccaaccatgcgccccaataaatggttgcatgattacggccattgct

SEQ ID NO: 325513 - DNA, 59 bp, Artificial
  Synthetic oligonucleotide
aggtccaatctacagaaggagagacgggaaatgggtaagagagctaatcctgtatgaca

SEQ ID NO: 325514 - DNA, 60 bp, Artificial
  Synthetic oligonucleotide
aggtccaatctacagaaggagggacggaaaatggatgagagaactgattctgtatgacaa

SEQ ID NO: 325515 - DNA, 56 bp, Artificial
  Synthetic oligonucleotide
aggtccacactaaaagctccagtccaactccccttaatcataccggatgtgtcaag

SEQ ID NO: 325516 - DNA, 58 bp, Artificial
  Synthetic oligonucleotide
aggtccaccgacgccaacggtactatctcgtcgttgagaatgtagcgcttgacaatat

SEQ ID NO: 325517 - DNA, 59 bp, Artificial
  Synthetic oligonucleotide
aggtccacctctgggaagatttgttctgctgtcgcacggtcagtgccatgcttctccat

SEQ ID NO: 325518 - DNA, 55 bp, Artificial
  Synthetic oligonucleotide
aggtccactggttgggccaaacactgagagtcccaacacagggaccccatgaccg

SEQ ID NO: 325519 - DNA, 55 bp, Artificial
  Synthetic oligonucleotide
aggtccagactggcagacccttgataatgcacagggttcttggtggagaccaggg

SEQ ID NO: 325520 - DNA, 60 bp, Artificial
  Synthetic oligonucleotide
aggtccagagtcataattaacggtgttactgccagatctgaatgggacacggataaggca

SEQ ID NO: 325521 - DNA, 60 bp, Artificial
  Synthetic oligonucleotide
aggtccagctcacagttctcttactctcttcattcgtggacccgtacgtacggctgcaga

SEQ ID NO: 325522 - DNA, 50 bp, Artificial
  Synthetic oligonucleotide
aggtccagcttctgcacatattatagaccccatgtcaacatttgacctgt

SEQ ID NO: 325523 - DNA, 51 bp, Artificial
  Synthetic oligonucleotide
aggtccatcacccttggaaactccacgataaccacgcaggagtgtgctaac

SEQ ID NO: 325524 - DNA, 52 bp, Artificial
  Synthetic oligonucleotide
aggtccatcagaagttatcccagtagatgctatagaccctttagggccagct

SEQ ID NO: 325525 - DNA, 58 bp, Artificial
  Synthetic oligonucleotide
aggtcccgacgtagagaaactgcactgtgacgtgtaaaaacgccatgagaggacacaa

SEQ ID NO: 325526 - DNA, 57 bp, Artificial
  Synthetic oligonucleotide
aggtcccgatcatccgcgttgaacctcccacgtcgctgtacgcctccatagacccgc

SEQ ID NO: 325527 - DNA, 54 bp, Artificial
  Synthetic oligonucleotide
aggtcccggcacgacgccggggcctcttacgtcgtaggacgcgactatcaacaa

SEQ ID NO: 325528 - DNA, 60 bp, Artificial
  Synthetic oligonucleotide
aggtcccggctgcatacgcagctcagggctacaaggtgttggtgctcaacccttctgttg

SEQ ID NO: 325529 - DNA, 55 bp, Artificial
  Synthetic oligonucleotide
aggtcccggctgcatacgcagctcagggttacaaagtgctagtactcaatccctc

SEQ ID NO: 325530 - DNA, 55 bp, Artificial
  Synthetic oligonucleotide
aggtccctcaggacgatggagagaatatctaagaatccttttcgactacaaaaaa

SEQ ID NO: 325531 - DNA, 59 bp, Artificial
  Synthetic oligonucleotide
aggtccctgccgcatataccagtcaggggtataaagtgctcgtgctaaatccctctgtc

SEQ ID NO: 325532 - DNA, 51 bp, Artificial
  Synthetic oligonucleotide
aggtccgaaagggagagggggaccaagaagaactcccccaggacaaatcag

SEQ ID NO: 325533 - DNA, 60 bp, Artificial
  Synthetic oligonucleotide
aggtccgcaaatgtagagggatctatggcgtcctggtgattcctagtatagtcatccatc

SEQ ID NO: 325534 - DNA, 56 bp, Artificial
  Synthetic oligonucleotide
aggtccgccaggaataagagcgggggacgctactgtacagaacaagcggagacctc

SEQ ID NO: 325535 - DNA, 57 bp, Artificial
  Synthetic oligonucleotide
aggtccgtctgcctatcgaggaacttattcacgtaaacatggtgtaagacgttcata

SEQ ID NO: 325536 - DNA, 53 bp, Artificial
  Synthetic oligonucleotide
aggtccgttgactggtctgggacgcggtactataccgccgaacagccggttac

SEQ ID NO: 325537 - DNA, 59 bp, Artificial
  Synthetic oligonucleotide
aggtcctaactgacacaagtcgccccaatgaccccactaatgggaactgtgatgcgcca

SEQ ID NO: 325538 - DNA, 60 bp, Artificial
  Synthetic oligonucleotide
aggtcctcaacaataagaattggtcaggatacagtggagcattcaccataccgatcacaa

SEQ ID NO: 325539 - DNA, 60 bp, Artificial
  Synthetic oligonucleotide
aggtcctcagaattgctaggcttgataaaaattgactccagcatattgcctccgtccaac

SEQ ID NO: 325540 - DNA, 52 bp, Artificial
  Synthetic oligonucleotide
aggtcctgatgaacctttccaaatcatcactgtcaagcccgtgacattaaac

SEQ ID NO: 325541 - DNA, 59 bp, Artificial
  Synthetic oligonucleotide
aggtcctgatgttccgagaggctgtgagggtccatgtaaggtccagtcctttgagtcaa

SEQ ID NO: 325542 - DNA, 58 bp, Artificial
  Synthetic oligonucleotide
aggtcctggcattccaccgcggcaagtggacacacgtccgctggtcaaccaaccacaa

SEQ ID NO: 325543 - DNA, 57 bp, Artificial
  Synthetic oligonucleotide
aggtccttacagcaattaagaaacgtaatgctgacgttccagagctaggtgattccg

SEQ ID NO: 325544 - DNA, 54 bp, Artificial
  Synthetic oligonucleotide
aggtccttagtgttaaggaattgctcgaggaacaacgcgctcttgttgccttaa

SEQ ID NO: 325545 - DNA, 52 bp, Artificial
  Synthetic oligonucleotide
aggtcctttagtttcactagctaaacataatggtaatgtagaagtctcaaaa

SEQ ID NO: 325546 - DNA, 55 bp, Artificial
  Synthetic oligonucleotide
aggtcctttcgctcaaactaattacgcaccagtggattgggggcacggagaaata

SEQ ID NO: 325547 - DNA, 60 bp, Artificial
  Synthetic oligonucleotide
aggtcgaaagcgtacctcatcatgttagacattttgtatttagcaaaccagcagatctca

SEQ ID NO: 325548 - DNA, 58 bp, Artificial
  Synthetic oligonucleotide
aggtcgacgctagtctcctagcccaatcaggaaaagactacggactgaccatgactcc

SEQ ID NO: 325549 - DNA, 52 bp, Artificial
  Synthetic oligonucleotide
aggtcgacggacgaactatgaagcatggtagcctcgagattacaaccagcgg

SEQ ID NO: 325550 - DNA, 54 bp, Artificial
  Synthetic oligonucleotide
aggtcgacggtatccgcatcgtcagagcgagattccgtgagggtcaacgattcg

SEQ ID NO: 325551 - DNA, 60 bp, Artificial
  Synthetic oligonucleotide
aggtcgagcatgaggcactttctcatagctaatcgacccttgaaaagacgcagtaatcgt

SEQ ID NO: 325552 - DNA, 59 bp, Artificial
  Synthetic oligonucleotide
aggtcgatcttgttggggcggatactgattggtcatcccgacagcctacttgccgatgg

SEQ ID NO: 325553 - DNA, 55 bp, Artificial
  Synthetic oligonucleotide
aggtcgcacaggaatgcaacgggagtgttcatatctgagttgatagtgaccgacc

SEQ ID NO: 325554 - DNA, 60 bp, Artificial
  Synthetic oligonucleotide
aggtcgcactcagttactcaactggtgcacttgccagttgcatgggtctcatatacaacc

SEQ ID NO: 325555 - DNA, 54 bp, Artificial
  Synthetic oligonucleotide
aggtcgccactgggagaaatccaaacaaggatcctcttaagcttgggtacactt

SEQ ID NO: 325556 - DNA, 60 bp, Artificial
  Synthetic oligonucleotide
aggtcgccatgatctacatgtcttgccttctggcaagagagcttgggttcccgtgagggc

SEQ ID NO: 325557 - DNA, 50 bp, Artificial
  Synthetic oligonucleotide
aggtcgcgcactgtacatcccgccttatgagctgttactgcatgagtggt

SEQ ID NO: 325558 - DNA, 60 bp, Artificial
  Synthetic oligonucleotide
aggtcgcgcgtattgatgactctctaaccaggtatgttaacaatattgatgagtcagcta

SEQ ID NO: 325559 - DNA, 56 bp, Artificial
  Synthetic oligonucleotide
aggtcgctcacagagcggctttatgtcgggggtcccctgaccaattccaaagggca

SEQ ID NO: 325560 - DNA, 60 bp, Artificial
  Synthetic oligonucleotide
aggtcgctgatgtccctatctacgctgcggacagctccactcctaacaggaagattattg

SEQ ID NO: 325561 - DNA, 51 bp, Artificial
  Synthetic oligonucleotide
aggtcgctgtctcgggatgtactgactcctttcaatagcactcctgctcag

SEQ ID NO: 325562 - DNA, 60 bp, Artificial
  Synthetic oligonucleotide
aggtcgcttgcaagttggattcaaagtgagttcaacaaagcatgtgaactgactgattca

SEQ ID NO: 325563 - DNA, 60 bp, Artificial
  Synthetic oligonucleotide
aggtcggacaccaatactgtgtgaaattttctgagaatgatgatcacatggagttgaccc

SEQ ID NO: 325564 - DNA, 53 bp, Artificial
  Synthetic oligonucleotide
aggtcggactggccttccggtccaaataggggtgccttgaaaggaggccagga

SEQ ID NO: 325565 - DNA, 57 bp, Artificial
  Synthetic oligonucleotide
aggtcggagcccatccgagatctattaatgataaccccaacgtcttgcaccggtgct

SEQ ID NO: 325566 - DNA, 58 bp, Artificial
  Synthetic oligonucleotide
aggtcggctggtggaaggaacttcactggacctgttcccgccgcaattgagcagtgag

SEQ ID NO: 325567 - DNA, 50 bp, Artificial
  Synthetic oligonucleotide
aggtcgggtaataggaaggggcccctgagtgggatctacctgaaacccgg

SEQ ID NO: 325568 - DNA, 57 bp, Artificial
  Synthetic oligonucleotide
aggtcggttatcatctaacaagtgatgttaagttgattcatccacgtgtttctttaa

SEQ ID NO: 325569 - DNA, 55 bp, Artificial
  Synthetic oligonucleotide
aggtcgtccaaacccggaaggtcagaaaacacttgtgcactcccagagctctccg

SEQ ID NO: 325570 - DNA, 58 bp, Artificial
  Synthetic oligonucleotide
aggtcgtccagatctcgaagttgagaaaacatttgtgaatccccagcgccttcctcag

SEQ ID NO: 325571 - DNA, 54 bp, Artificial
  Synthetic oligonucleotide
aggtcgtcgctcgtggggatgcccctactggctgccggctccggggttacgtac

SEQ ID NO: 325572 - DNA, 55 bp, Artificial
  Synthetic oligonucleotide
aggtcgtctattgttatttgtggtttcggtctgaggaggcgtttgaatcccctgc

SEQ ID NO: 325573 - DNA, 60 bp, Artificial
  Synthetic oligonucleotide
aggtcgtgagacagttgaaattcatcccgatgagattctatataattaaatgcgcttgga

SEQ ID NO: 325574 - DNA, 49 bp, Artificial
  Synthetic oligonucleotide
aggtcgttaggtcgcccagccctgttaagccccccccccccgtgcgtaa

SEQ ID NO: 325575 - DNA, 55 bp, Artificial
  Synthetic oligonucleotide
aggtcgtttcaatcacctctactgctctaaagtgggtggtcaaacacggcgtgtc

SEQ ID NO: 325576 - DNA, 52 bp, Artificial
  Synthetic oligonucleotide
aggtctaaatcgacttctcacagcaacaggcggagcctcaactccctcaggc

SEQ ID NO: 325577 - DNA, 55 bp, Artificial
  Synthetic oligonucleotide
aggtctaaccacctcacgcacgtaggggataacacacatcatctaccacacggtg

SEQ ID NO: 325578 - DNA, 50 bp, Artificial
  Synthetic oligonucleotide
aggtctaataagtactaacatgtagatttattattcagggattgccttag

SEQ ID NO: 325579 - DNA, 60 bp, Artificial
  Synthetic oligonucleotide
aggtctactattgacaagagatggtggtcagaataatcagacggaggagaccttcagacc

SEQ ID NO: 325580 - DNA, 60 bp, Artificial
  Synthetic oligonucleotide
aggtctagatgaccacacaaataattatgtggtcccagtgatctggcccacattgttttc

SEQ ID NO: 325581 - DNA, 60 bp, Artificial
  Synthetic oligonucleotide
aggtctagatgcccacacaagtaattatgtggacctaatgacctggcccacatcgtcttc

SEQ ID NO: 325582 - DNA, 55 bp, Artificial
  Synthetic oligonucleotide
aggtctaggtgccttccgcactgaaagcattctcgcaaaccgagttatcgctccg

SEQ ID NO: 325583 - DNA, 60 bp, Artificial
  Synthetic oligonucleotide
aggtctatgaacactgttggccctcgcggtgcgaagcctatgacatctgtacattgtgtt

SEQ ID NO: 325584 - DNA, 53 bp, Artificial
  Synthetic oligonucleotide
aggtctatgcgcttacgtctgactgctctcgttttcgctatgcggtgttggac

SEQ ID NO: 325585 - DNA, 60 bp, Artificial
  Synthetic oligonucleotide
aggtctattacagagacagcagagaccctatttggaaaggaccagcaaagctcctgtgga

SEQ ID NO: 325586 - DNA, 57 bp, Artificial
  Synthetic oligonucleotide
aggtctattggtcgcttcccgatatgatgcaagatccggtgacttttcgctcctcgc

SEQ ID NO: 325587 - DNA, 60 bp, Artificial
  Synthetic oligonucleotide
aggtctcaatggccgcgcagcggaactcctcccaaaataatcatccgcccactcttgcat

SEQ ID NO: 325588 - DNA, 52 bp, Artificial
  Synthetic oligonucleotide
aggtctcacgctgacagctgatggaggctctacaccactaacaatggtgagt

SEQ ID NO: 325589 - DNA, 60 bp, Artificial
  Synthetic oligonucleotide
aggtctcacgtggatggacttactacgagccattatcatgctaggggacaccatgcttag

SEQ ID NO: 325590 - DNA, 55 bp, Artificial
  Synthetic oligonucleotide
aggtctcatactcgcatttataatgtgggcatgcagcagtggcaattgccggttc

SEQ ID NO: 325591 - DNA, 52 bp, Artificial
  Synthetic oligonucleotide
aggtctctccggcaagagggattttaacccatcacaagaaatggtggacagt

SEQ ID NO: 325592 - DNA, 59 bp, Artificial
  Synthetic oligonucleotide
aggtctctctcgagttcctctaacttctttcttccgctcacccactgctcgaggatgtc

SEQ ID NO: 325593 - DNA, 60 bp, Artificial
  Synthetic oligonucleotide
aggtctgaagatgcctcgctaaacctattcttcgaagtggcagaaggcacaagtgagtat

SEQ ID NO: 325594 - DNA, 56 bp, Artificial
  Synthetic oligonucleotide
aggtctgaggaggcgtttgaaccccctgctaagataccattttctggcaccgtcga

SEQ ID NO: 325595 - DNA, 60 bp, Artificial
  Synthetic oligonucleotide
aggtctgatccgtactcattgatcaaggggacttacaccaatacaggctctcagtcaatc

SEQ ID NO: 325596 - DNA, 51 bp, Artificial
  Synthetic oligonucleotide
aggtctgcctgcccatcacgggagcgcagcctggcttgtggttgcaatcgc

SEQ ID NO: 325597 - DNA, 57 bp, Artificial
  Synthetic oligonucleotide
aggtctgcgtgagaaaacgttggagggcattcatggcgcgtccatcaacggttaaag

SEQ ID NO: 325598 - DNA, 56 bp, Artificial
  Synthetic oligonucleotide
aggtctggagccgcaggtgctgcagtaaagggagttggaacaatagtgatggagtt

SEQ ID NO: 325599 - DNA, 54 bp, Artificial
  Synthetic oligonucleotide
aggtctgtttaatatcactgacagaacggggcctgatggcgatattgctctccc

SEQ ID NO: 325600 - DNA, 57 bp, Artificial
  Synthetic oligonucleotide
aggtcttaactattattgtaccgtacacaaaccacaattatcattcccgctctgtgc

SEQ ID NO: 325601 - DNA, 60 bp, Artificial
  Synthetic oligonucleotide
aggtcttcaaagcctgaacagtccatggcacgaaagcagcggaaactctagacaaggtga

SEQ ID NO: 325602 - DNA, 60 bp, Artificial
  Synthetic oligonucleotide
aggtcttcagatcgaacggtctgactgccaacgaatcaggaaggctaattgatttcctca

SEQ ID NO: 325603 - DNA, 60 bp, Artificial
  Synthetic oligonucleotide
aggtcttcagtctcattagaccaaatgagaatccagcacataaaagtcaattggtgtgga

SEQ ID NO: 325604 - DNA, 55 bp, Artificial
  Synthetic oligonucleotide
aggtcttggtgtagtagccgctgttggtgcagcactagcagctggagcttaccta

SEQ ID NO: 325605 - DNA, 60 bp, Artificial
  Synthetic oligonucleotide
aggtcttgtctaccatgcatgtcaaacagtttcctgatgtcatctgacccttgtgctgtg

SEQ ID NO: 325606 - DNA, 55 bp, Artificial
  Synthetic oligonucleotide
aggtcttgtggaaccacccaattcagcgtgtgatccacaacgagcacgaacagta

SEQ ID NO: 325607 - DNA, 55 bp, Artificial
  Synthetic oligonucleotide
aggtctttacaccgccgcgttctatacgggcagatcaataccaggccccttacga

SEQ ID NO: 325608 - DNA, 57 bp, Artificial
  Synthetic oligonucleotide
aggtctttagctgatcctataagggatcttgttgtggctccttttatcaaattgagg

SEQ ID NO: 325609 - DNA, 57 bp, Artificial
  Synthetic oligonucleotide
aggtctttatgagggatttgtacgtgataacgagtgagttaccacctgtgcgaatac

SEQ ID NO: 325610 - DNA, 56 bp, Artificial
  Synthetic oligonucleotide
aggtgaaacaaacggttgacaacatgaagtaaacacggtacgatgtaccacatgaa

SEQ ID NO: 325611 - DNA, 55 bp, Artificial
  Synthetic oligonucleotide
aggtgaaacaggaataccagaaaacaatgggttctatggtttgtgaagtttgtca

SEQ ID NO: 325612 - DNA, 51 bp, Artificial
  Synthetic oligonucleotide
aggtgaaagccaaagaagtagtgtctgtttccgtcaaacttcccgaccact

SEQ ID NO: 325613 - DNA, 60 bp, Artificial
  Synthetic oligonucleotide
aggtgaacactggggcgttggcactgtatgtaaaaatgcacagtctcaggtacagcgtgg

SEQ ID NO: 325614 - DNA, 57 bp, Artificial
  Synthetic oligonucleotide
aggtgaacatcgtccctcccaaagcagagacgtttccaatcagaggtatcgccccgc

SEQ ID NO: 325615 - DNA, 56 bp, Artificial
  Synthetic oligonucleotide
aggtgaacgaagtttcttctctaggactaaacgctttggagcgcatacttcagacg

SEQ ID NO: 325616 - DNA, 55 bp, Artificial
  Synthetic oligonucleotide
aggtgaacgatgagcggagtaccgacacctgcgccggacaccccccagggggaca

SEQ ID NO: 325617 - DNA, 59 bp, Artificial
  Synthetic oligonucleotide
aggtgaagaagtggctattgcggatgaattcaacacctgtggtgacggggagagctggg

SEQ ID NO: 325618 - DNA, 60 bp, Artificial
  Synthetic oligonucleotide
aggtgaatggcctacagtgcaagatttggccacatccatgtacatcctcacagtgttcca

SEQ ID NO: 325619 - DNA, 60 bp, Artificial
  Synthetic oligonucleotide
aggtgaattatctctcagacagatcccatatgaggtgctcactggttacaacatatctaa

SEQ ID NO: 325620 - DNA, 60 bp, Artificial
  Synthetic oligonucleotide
aggtgacacagtgtttgatatggctgagtgagctaaaaacttaacacactggtcacgatg

SEQ ID NO: 325621 - DNA, 55 bp, Artificial
  Synthetic oligonucleotide
aggtgacccatggcttaagacgatgataaatctgtaccaaggagcggagatgcag

SEQ ID NO: 325622 - DNA, 60 bp, Artificial
  Synthetic oligonucleotide
aggtgacgaacttcattataaagttggccaacctatgggagcatatagttcttgagctgc

SEQ ID NO: 325623 - DNA, 60 bp, Artificial
  Synthetic oligonucleotide
aggtgacgaggggtggaaagaggttgctaaagcagcaactcagcgtcctaacatcatggc

SEQ ID NO: 325624 - DNA, 55 bp, Artificial
  Synthetic oligonucleotide
aggtgacgctggtgttgatatcgcatgttcgcgtgcgcctattagtgcgtcagta

SEQ ID NO: 325625 - DNA, 60 bp, Artificial
  Synthetic oligonucleotide
aggtgactcaaaacatcgttctgacgttgttgcatatctgctggcgcttggttatgactc

SEQ ID NO: 325626 - DNA, 55 bp, Artificial
  Synthetic oligonucleotide
aggtgactcagcagccaattacgttaaaatcgttagtcagattagccgtctaacc

SEQ ID NO: 325627 - DNA, 55 bp, Artificial
  Synthetic oligonucleotide
aggtgagccggacccgaggcactgcatcagtgctcgtcctcgaacttcatgcagc

SEQ ID NO: 325628 - DNA, 55 bp, Artificial
  Synthetic oligonucleotide
aggtgagcgcccgtcgaaaccgctgagccgcaaccaacttctactgcggcaacag

SEQ ID NO: 325629 - DNA, 51 bp, Artificial
  Synthetic oligonucleotide
aggtgagcgcgttgatatcaatgattacccttacatagggttcgctataat

SEQ ID NO: 325630 - DNA, 60 bp, Artificial
  Synthetic oligonucleotide
aggtgagcgtgagaaatctcgacgcgctgctagtgatctcaaagttcgtggtcacgcttt

SEQ ID NO: 325631 - DNA, 60 bp, Artificial
  Synthetic oligonucleotide
aggtgaggaatgatggctatagccctggataatattgggtcaatcaacttcatccaacca

SEQ ID NO: 325632 - DNA, 56 bp, Artificial
  Synthetic oligonucleotide
aggtgaggagccgagctgatagtcctaaggtaactactttgtgtaagtcaaagtcg

SEQ ID NO: 325633 - DNA, 57 bp, Artificial
  Synthetic oligonucleotide
aggtgagtgaaaccaccgaagtctaggggcaattcgggctagatcagtctggcggac

SEQ ID NO: 325634 - DNA, 60 bp, Artificial
  Synthetic oligonucleotide
aggtgagtgaggacgaggagttagtgtcagagggaatgtacgctgtgccattagatttgg

SEQ ID NO: 325635 - DNA, 59 bp, Artificial
  Synthetic oligonucleotide
aggtgagtgtgtgttttgaggacccgataggatgagacccaatatattgggtctcatat

SEQ ID NO: 325636 - DNA, 57 bp, Artificial
  Synthetic oligonucleotide
aggtgagtgtgtgtttttggacaccaattggtttgggcaccgatatactggtgccta

SEQ ID NO: 325637 - DNA, 52 bp, Artificial
  Synthetic oligonucleotide
aggtgagtttacacaccgaggttaagggccaattcgggcttgggactggccg

SEQ ID NO: 325638 - DNA, 55 bp, Artificial
  Synthetic oligonucleotide
aggtgatactgacgagttgtggagtttcaaagacacattcgttgtgtttgagaac

SEQ ID NO: 325639 - DNA, 55 bp, Artificial
  Synthetic oligonucleotide
aggtgatcagggtcgaggatcgtgcgcgtaacctgctgggcctgtccaggagcga

SEQ ID NO: 325640 - DNA, 51 bp, Artificial
  Synthetic oligonucleotide
aggtgatccatcgtcgaagcttagcccatctgaagagaccggctaatgcag

SEQ ID NO: 325641 - DNA, 60 bp, Artificial
  Synthetic oligonucleotide
aggtgatccgtggggcaattcccatgcaccatactgttaacatcatagcacgtcctaata

SEQ ID NO: 325642 - DNA, 52 bp, Artificial
  Synthetic oligonucleotide
aggtgatctgaattttgtgaacagagcaaaccaacgattaaaccccatgcat

SEQ ID NO: 325643 - DNA, 60 bp, Artificial
  Synthetic oligonucleotide
aggtgatgaagttaactcatacatgctgtgtacatttgttagcgatcagggacgagtagg

SEQ ID NO: 325644 - DNA, 60 bp, Artificial
  Synthetic oligonucleotide
aggtgatgatgtaatccctaattgtaattgtactgactgtacatattactgttatcataa

SEQ ID NO: 325645 - DNA, 55 bp, Artificial
  Synthetic oligonucleotide
aggtgatggaaatcattttgcaccctcggctgagactgcttcttcagctgtaccc

SEQ ID NO: 325646 - DNA, 54 bp, Artificial
  Synthetic oligonucleotide
aggtgatggcaatcactttgcaccttcagccgaaaccacgtcatcagctgtacc

SEQ ID NO: 325647 - DNA, 50 bp, Artificial
  Synthetic oligonucleotide
aggtgatgggcagactatgaaaaaaactaacagggttcaaacactcttga

SEQ ID NO: 325648 - DNA, 52 bp, Artificial
  Synthetic oligonucleotide
aggtgatggggtcgttaacgggtctctcccctgctctcgcgatacaggcgga

SEQ ID NO: 325649 - DNA, 60 bp, Artificial
  Synthetic oligonucleotide
aggtgattactctacagctgccttctggaacggtatccggtgcgacagtgcgacggccat

SEQ ID NO: 325650 - DNA, 60 bp, Artificial
  Synthetic oligonucleotide
aggtgattcagatatgtcagcatgcaatgatagattggaaacaattttgcatgatattgt

SEQ ID NO: 325651 - DNA, 59 bp, Artificial
  Synthetic oligonucleotide
aggtgattcagcgagccactgatgggttactgttaacctacaatgatttggtggtacat

SEQ ID NO: 325652 - DNA, 60 bp, Artificial
  Synthetic oligonucleotide
aggtgattgctattgggtgatgactgacggtcccgccaataggcaggcacagtatagaat

SEQ ID NO: 325653 - DNA, 59 bp, Artificial
  Synthetic oligonucleotide
aggtgatttaagggaggaattcaattctctatcacaagaaatagcgataacgcaattga

SEQ ID NO: 325654 - DNA, 59 bp, Artificial
  Synthetic oligonucleotide
aggtgatttgaatttcgtgaacagagcgaaccaacggctgaatcccatgcaccaacttc

SEQ ID NO: 325655 - DNA, 52 bp, Artificial
  Synthetic oligonucleotide
aggtgcaacaatctggcagatattatgtaccgcaaggtcgaacacgtggtgg

SEQ ID NO: 325656 - DNA, 60 bp, Artificial
  Synthetic oligonucleotide
aggtgcacataaacttcacaagcgtgtagttattatgtgtgctggtaacttatcatcaga

SEQ ID NO: 325657 - DNA, 57 bp, Artificial
  Synthetic oligonucleotide
aggtgcacccctgcggaatgctacaccgtacactctgatccaaatctaccgccgcgt

SEQ ID NO: 325658 - DNA, 58 bp, Artificial
  Synthetic oligonucleotide
aggtgcacttgaagcaatgttcaacttaaaatttcatgttacaggccctaaagtgaga

SEQ ID NO: 325659 - DNA, 60 bp, Artificial
  Synthetic oligonucleotide
aggtgcagtaagaagattcatagctgagatgagacaacgagttcaagctgatcgaaatgt

SEQ ID NO: 325660 - DNA, 50 bp, Artificial
  Synthetic oligonucleotide
aggtgcagtgatgaattccccggtgcgtgaatccatgcccggtgcagttg

SEQ ID NO: 325661 - DNA, 58 bp, Artificial
  Synthetic oligonucleotide
aggtgccaagcacggtgatatatcgctaaaagacttagttgagtattgtgaaagttta

SEQ ID NO: 325662 - DNA, 55 bp, Artificial
  Synthetic oligonucleotide
aggtgccacatggaagccctcttctggtccaccgtgttggagaacatgccttctg

SEQ ID NO: 325663 - DNA, 55 bp, Artificial
  Synthetic oligonucleotide
aggtgccagagtggtcttacatagtagaaaaggacaatccagtcaatggcctctg

SEQ ID NO: 325664 - DNA, 53 bp, Artificial
  Synthetic oligonucleotide
aggtgccatggttgttatctacaacgatcgtactggttataacttgcaccggt

SEQ ID NO: 325665 - DNA, 56 bp, Artificial
  Synthetic oligonucleotide
aggtgcccaaggattgggccagtgtgatagggtcgtgttcgccaccactgggaccg

SEQ ID NO: 325666 - DNA, 57 bp, Artificial
  Synthetic oligonucleotide
aggtgccccaccattccttattgggatgtgttctttgggtgtcacactatcaaactc

SEQ ID NO: 325667 - DNA, 60 bp, Artificial
  Synthetic oligonucleotide
aggtgccttggcaggatgtgctttgaggctaagggaacaggctcacagatccgcaaaact

SEQ ID NO: 325668 - DNA, 52 bp, Artificial
  Synthetic oligonucleotide
aggtgcctttagacactagcggtatttggaaaaccgctattgtctttagggg

SEQ ID NO: 325669 - DNA, 55 bp, Artificial
  Synthetic oligonucleotide
aggtgcgaaaaaggctccgcttcggccgagcttagtatcccctaaggtagtgcca

SEQ ID NO: 325670 - DNA, 60 bp, Artificial
  Synthetic oligonucleotide
aggtgcgaagagccacgtgtgctcatcctgagtcctccggcccctgaatgcggctaacct

SEQ ID NO: 325671 - DNA, 52 bp, Artificial
  Synthetic oligonucleotide
aggtgcgaatgtagtagtgcctaatggatttgtccctcccacgttcccctta

SEQ ID NO: 325672 - DNA, 60 bp, Artificial
  Synthetic oligonucleotide
aggtgcgactctctagagatattgatgcaagaggacgcttatcccttttcatcctctcac

SEQ ID NO: 325673 - DNA, 60 bp, Artificial
  Synthetic oligonucleotide
aggtgcgcatccaaattatgcaccgaacatatgatggtacaatggcattagtggtcttcc

SEQ ID NO: 325674 - DNA, 53 bp, Artificial
  Synthetic oligonucleotide
aggtgcgcgtgaaattggacaccgtcagagaagtcgaggagatttgtttcaga

SEQ ID NO: 325675 - DNA, 60 bp, Artificial
  Synthetic oligonucleotide
aggtgcggattcgatgacttgtctagtcaacagaaatcgtctatgcgacgtgccatcgca

SEQ ID NO: 325676 - DNA, 54 bp, Artificial
  Synthetic oligonucleotide
aggtgcggggatggcgacagccgtagccacgggtagggctatcgaaggagccta

SEQ ID NO: 325677 - DNA, 49 bp, Artificial
  Synthetic oligonucleotide
aggtgcgggtttactttaaacccaaacacgtacgcggatgggtcccacg

SEQ ID NO: 325678 - DNA, 59 bp, Artificial
  Synthetic oligonucleotide
aggtgcgtatccaacattggccgcaatatataaaacaatgctattcgctattaggcttt

SEQ ID NO: 325679 - DNA, 54 bp, Artificial
  Synthetic oligonucleotide
aggtgcgtgtaacaggttattacaccttcaagttgcaaacaagcgagcttctag

SEQ ID NO: 325680 - DNA, 60 bp, Artificial
  Synthetic oligonucleotide
aggtgcgtgtgagcgtgttgcttttgtctctaaggacatgagcttgatcatattgccggt

SEQ ID NO: 325681 - DNA, 60 bp, Artificial
  Synthetic oligonucleotide
aggtgctactttcaatcatgtagccccttccattgtgcacattgacagattcaaccgttc

SEQ ID NO: 325682 - DNA, 56 bp, Artificial
  Synthetic oligonucleotide
aggtgctcaatacctcacttttactcaaagtgagaaggaagacatggtccgttacc

SEQ ID NO: 325683 - DNA, 55 bp, Artificial
  Synthetic oligonucleotide
aggtgctcaatagtgagttagataaagttgccaagcacggtgacaaaagcagctc

SEQ ID NO: 325684 - DNA, 60 bp, Artificial
  Synthetic oligonucleotide
aggtgctcagtacggatgtctatgtcacgcggacgaatgtttattatcatggtgggagct

SEQ ID NO: 325685 - DNA, 60 bp, Artificial
  Synthetic oligonucleotide
aggtgctcgagatgcatcgggtgagagtgactaggaccgagacggctctgagttatgtca

SEQ ID NO: 325686 - DNA, 56 bp, Artificial
  Synthetic oligonucleotide
aggtgctcggaccctgggaacgtgacgttcgtgagttactcactattctgcccact

SEQ ID NO: 325687 - DNA, 56 bp, Artificial
  Synthetic oligonucleotide
aggtgctcgtcttgaacccgtctgtcgctgccaccttaggttttggggcgtacatg

SEQ ID NO: 325688 - DNA, 55 bp, Artificial
  Synthetic oligonucleotide
aggtgctgcctgtggcgacatattcttcggcctatgtgacttgcaatccccgttc

SEQ ID NO: 325689 - DNA, 55 bp, Artificial
  Synthetic oligonucleotide
aggtgctggatttcaatcatgttgatgaatgctgtgaatcagtgtccttacaatc

SEQ ID NO: 325690 - DNA, 55 bp, Artificial
  Synthetic oligonucleotide
aggtgctgttggtggtagagggaaattgaggaggaatcctaagggtgagagctcc

SEQ ID NO: 325691 - DNA, 59 bp, Artificial
  Synthetic oligonucleotide
aggtggaactatgttattggataacgcgtatattggtgatgccgtcacttgcgttaagc

SEQ ID NO: 325692 - DNA, 60 bp, Artificial
  Synthetic oligonucleotide
aggtggaactttagtggctgaagccattcgatttataggaagagcaatggcagacagagg

SEQ ID NO: 325693 - DNA, 52 bp, Artificial
  Synthetic oligonucleotide
aggtggaagagctcactgaaggagagaacaactgcttgttacaccctgtgtg

SEQ ID NO: 325694 - DNA, 60 bp, Artificial
  Synthetic oligonucleotide
aggtggaagtttgacagccacctagcacacaaacatgtggcccgcgagatacatccggag

SEQ ID NO: 325695 - DNA, 58 bp, Artificial
  Synthetic oligonucleotide
aggtggacatccaagtattgagaaatttttggatcatgtcaagggagttagacctgac

SEQ ID NO: 325696 - DNA, 54 bp, Artificial
  Synthetic oligonucleotide
aggtggacgaatcgtccgatgtggaggaagccacgtttttaccgattgtatcgg

SEQ ID NO: 325697 - DNA, 56 bp, Artificial
  Synthetic oligonucleotide
aggtggacgatatgttaccgctgtttcatggacttgtccctccggacgtgggtgaa

SEQ ID NO: 325698 - DNA, 57 bp, Artificial
  Synthetic oligonucleotide
aggtggacgcttttcaaaataagatcggaagtaggacgagccaggattgacgcaata

SEQ ID NO: 325699 - DNA, 59 bp, Artificial
  Synthetic oligonucleotide
aggtggactcggtcgttcccgtcaataacacctctacgcacatggaggggactgatgca

SEQ ID NO: 325700 - DNA, 53 bp, Artificial
  Synthetic oligonucleotide
aggtggactttaaaggaacttgtgtgttaaaacacaaaatggtggaagactca

SEQ ID NO: 325701 - DNA, 60 bp, Artificial
  Synthetic oligonucleotide
aggtggagaagtgaggaatgatgatgttgatcaaagtctaattattgcagccaggaacat

SEQ ID NO: 325702 - DNA, 60 bp, Artificial
  Synthetic oligonucleotide
aggtggagcaaacgaccgtacatggaacgcatcagatgagcgcagacccagaacagactc

SEQ ID NO: 325703 - DNA, 55 bp, Artificial
  Synthetic oligonucleotide
aggtggaggaaagcaagttgttgcagtaccgaacccagctaagttgttaatcaaa

SEQ ID NO: 325704 - DNA, 52 bp, Artificial
  Synthetic oligonucleotide
aggtggaggtgtaacatgtaagcagtgcgggcggaggggtcatacagcacca

SEQ ID NO: 325705 - DNA, 55 bp, Artificial
  Synthetic oligonucleotide
aggtggagttaccaaacctatataagtaactacactgacgaatggctgagtttac

SEQ ID NO: 325706 - DNA, 60 bp, Artificial
  Synthetic oligonucleotide
aggtggatcagccgctacacaagtaatctatccgaatcagcaatttgctatataatacgg

SEQ ID NO: 325707 - DNA, 60 bp, Artificial
  Synthetic oligonucleotide
aggtggatgaagctgctgttagggccaccgctagcgatatttgcggtgagttcaaaatca

SEQ ID NO: 325708 - DNA, 53 bp, Artificial
  Synthetic oligonucleotide
aggtggattagggatgacttatacgggcatatcgttgaatgaggtcctgttta

SEQ ID NO: 325709 - DNA, 55 bp, Artificial
  Synthetic oligonucleotide
aggtggattttctcaagagacgattcaccactttacaaggacatattgttgctcc

SEQ ID NO: 325710 - DNA, 60 bp, Artificial
  Synthetic oligonucleotide
aggtggcaagctgccactagatgagctaatgcaaagaatgaatagagcaattcctgttgg

SEQ ID NO: 325711 - DNA, 52 bp, Artificial
  Synthetic oligonucleotide
aggtggcaccggcccacaactacctcaagaagatcgtctgccaggagagtaa

SEQ ID NO: 325712 - DNA, 50 bp, Artificial
  Synthetic oligonucleotide
aggtggcatcacagttgattacggcaaagacccatcaccgccgggcatgt

SEQ ID NO: 325713 - DNA, 59 bp, Artificial
  Synthetic oligonucleotide
aggtggcgctaatgaagccactggtgcgacaagtactcttgttgccgtattgaatacgg

SEQ ID NO: 325714 - DNA, 60 bp, Artificial
  Synthetic oligonucleotide
aggtggcgtggacatgagagcgggacgtataatcgcatgggatgggcaggcggtgctaca

SEQ ID NO: 325715 - DNA, 55 bp, Artificial
  Synthetic oligonucleotide
aggtggctattttaatttgcgaggcgttgaattcaatcaaggttactcaatctga

SEQ ID NO: 325716 - DNA, 55 bp, Artificial
  Synthetic oligonucleotide
aggtggctccaacgcgcggagtcggccactatccctggcgcagaagcaagaaagc

SEQ ID NO: 325717 - DNA, 59 bp, Artificial
  Synthetic oligonucleotide
aggtggctcctacgtgtggtatagggttggcagttagctacgttgagggcaatgagagc

SEQ ID NO: 325718 - DNA, 50 bp, Artificial
  Synthetic oligonucleotide
aggtgggaccgaaaacggtccgaccgaaagcggtacatatataaaccacc

SEQ ID NO: 325719 - DNA, 51 bp, Artificial
  Synthetic oligonucleotide
aggtgggacggccaaatagtgggactgcaaccagtacctggggggttttcc

SEQ ID NO: 325720 - DNA, 59 bp, Artificial
  Synthetic oligonucleotide
aggtgggatgttacagattacggtaagtggtgagataccgaatgacatacgcgttgaga

SEQ ID NO: 325721 - DNA, 53 bp, Artificial
  Synthetic oligonucleotide
aggtgggattgatatttatggtatggcaagtgttctttggaaagcggtacagg

SEQ ID NO: 325722 - DNA, 53 bp, Artificial
  Synthetic oligonucleotide
aggtgggatttaaagatatttacgattggacttttttgccaactgatttcgaa

SEQ ID NO: 325723 - DNA, 57 bp, Artificial
  Synthetic oligonucleotide
aggtgggcacacactcgggccgtcccctattcgttgctctgcgttcgtctcagggcc

SEQ ID NO: 325724 - DNA, 55 bp, Artificial
  Synthetic oligonucleotide
aggtgggcagcaacattttttgaaggacaacttaattgatctaggatgtcccagt

SEQ ID NO: 325725 - DNA, 60 bp, Artificial
  Synthetic oligonucleotide
aggtgggcattcaggtcttcattcaaggtgctgtcatgatacagactgttcatctgaggg

SEQ ID NO: 325726 - DNA, 59 bp, Artificial
  Synthetic oligonucleotide
aggtgggccatctctgcaacaagttatgcgagaccaactgaagccattcaccgaacccc

SEQ ID NO: 325727 - DNA, 60 bp, Artificial
  Synthetic oligonucleotide
aggtgggctgtcttaccacgccacgctaaacctgggccaaccattctcatgaatgatcaa

SEQ ID NO: 325728 - DNA, 60 bp, Artificial
  Synthetic oligonucleotide
aggtggggaagtgaagaatgatgatgttgaccagagtttgatcattgctgccaggaacat

SEQ ID NO: 325729 - DNA, 54 bp, Artificial
  Synthetic oligonucleotide
aggtggggacgtgtggttgtcgccgtgtattcccctcttaatcaagtttctcaa

SEQ ID NO: 325730 - DNA, 57 bp, Artificial
  Synthetic oligonucleotide
aggtgggggtgtgccagagataggtactagttcaatacttgatgggcgatccccaag

SEQ ID NO: 325731 - DNA, 57 bp, Artificial
  Synthetic oligonucleotide
aggtgggtcacagtcaatggctataaagtgttatacaggtccctctcctttcgtgaa

SEQ ID NO: 325732 - DNA, 53 bp, Artificial
  Synthetic oligonucleotide
aggtgggtttacctaagggccatgatagagctgtttttaaattgggttcagcc

SEQ ID NO: 325733 - DNA, 54 bp, Artificial
  Synthetic oligonucleotide
aggtgggtttgcggtctatctagagttgtggtccgtattggtttctgtaaagga

SEQ ID NO: 325734 - DNA, 56 bp, Artificial
  Synthetic oligonucleotide
aggtggtacagtgcctgacccagtgggtcacactgaagggacccacaaaatagtgt

SEQ ID NO: 325735 - DNA, 55 bp, Artificial
  Synthetic oligonucleotide
aggtggtactgattaccctatggctccgggttaattgagccaactaaagctgtgc

SEQ ID NO: 325736 - DNA, 60 bp, Artificial
  Synthetic oligonucleotide
aggtggtaggaacatcgagtcggtctgacgcgatgacgatagagatagcgtcggacactc

SEQ ID NO: 325737 - DNA, 55 bp, Artificial
  Synthetic oligonucleotide
aggtggtagggatgttgatgctagcaaaaccccatatgttcttgcgagggcaagt

SEQ ID NO: 325738 - DNA, 54 bp, Artificial
  Synthetic oligonucleotide
aggtggtatggacagcatggtcgcgagatccgtagtcagaatggtcatcgcagg

SEQ ID NO: 325739 - DNA, 60 bp, Artificial
  Synthetic oligonucleotide
aggtggtcaatgcgaaccagcctatgatcaggccaagtgggccgaaacgtgcctcaatgt

SEQ ID NO: 325740 - DNA, 56 bp, Artificial
  Synthetic oligonucleotide
aggtggtccctcctctaagctccccactaagcgcaaacgcaggaaggtgacacgta

SEQ ID NO: 325741 - DNA, 51 bp, Artificial
  Synthetic oligonucleotide
aggtggtcctgtgaatcggaaaaccaagcagcttttgtaacattgtggttc

SEQ ID NO: 325742 - DNA, 55 bp, Artificial
  Synthetic oligonucleotide
aggtggtcctttgggcattggaactacaggtcaccctttactggatcgtttgcaa

SEQ ID NO: 325743 - DNA, 60 bp, Artificial
  Synthetic oligonucleotide
aggtggtgccatgtgggataagcagttctgtgagttcatggactattatcaaacaagcta

SEQ ID NO: 325744 - DNA, 53 bp, Artificial
  Synthetic oligonucleotide
aggtggtggaagttgagcgtggtctttaccgggacatttttcaggacaacgaa

SEQ ID NO: 325745 - DNA, 55 bp, Artificial
  Synthetic oligonucleotide
aggtggtggtcttttgtctggtttagggcaaggactcggcgcgtatgctcagggt

SEQ ID NO: 325746 - DNA, 53 bp, Artificial
  Synthetic oligonucleotide
aggtggttagcgacaatattaatagaaccgaacgtacagtcggtcgaaagaac

SEQ ID NO: 325747 - DNA, 52 bp, Artificial
  Synthetic oligonucleotide
aggtggttgtttccggcaccagaggcatacaaactcaaagattgtactggaa

SEQ ID NO: 325748 - DNA, 53 bp, Artificial
  Synthetic oligonucleotide
aggtgtaacgactactctctttcctgactgatcccctggccaaaaccccggcc

SEQ ID NO: 325749 - DNA, 60 bp, Artificial
  Synthetic oligonucleotide
aggtgtaactatcaagcaggacataataaggtaggatctctacaatatttggcactaaca

SEQ ID NO: 325750 - DNA, 58 bp, Artificial
  Synthetic oligonucleotide
aggtgtacaccgatggctatgatggccactcgatgcgtacctttgcgttctggccgga

SEQ ID NO: 325751 - DNA, 55 bp, Artificial
  Synthetic oligonucleotide
aggtgtactggtcccttcccgacatgatgcaagatccagtaacgtttcgaccgtc

SEQ ID NO: 325752 - DNA, 60 bp, Artificial
  Synthetic oligonucleotide
aggtgtagatacatgtccatagcggctacgaagtctgtgtgatttgccaagtagtagtgg

SEQ ID NO: 325753 - DNA, 59 bp, Artificial
  Synthetic oligonucleotide
aggtgtagtattcaacattggagatacgggtctccagtttaccgatatcacgcatcgtg

SEQ ID NO: 325754 - DNA, 56 bp, Artificial
  Synthetic oligonucleotide
aggtgtatgctagcagttaaatacctgcggttagtagaaaatacgtattccccaga

SEQ ID NO: 325755 - DNA, 50 bp, Artificial
  Synthetic oligonucleotide
aggtgtatggccgcgtgtcaaagcagatacaatatatgggaaggtcattg

SEQ ID NO: 325756 - DNA, 57 bp, Artificial
  Synthetic oligonucleotide
aggtgtattcaaccctcaatgtggttcagtccagtcatttgatggtaaactctatgg

SEQ ID NO: 325757 - DNA, 60 bp, Artificial
  Synthetic oligonucleotide
aggtgtcaacatggcgtcatcggaatcgtgacagctggtggagagggattagtcgcattc

SEQ ID NO: 325758 - DNA, 52 bp, Artificial
  Synthetic oligonucleotide
aggtgtcacgggggcagcctctgggaatcggggtgacaggcagcacagtgtt

SEQ ID NO: 325759 - DNA, 59 bp, Artificial
  Synthetic oligonucleotide
aggtgtcacttacagaatgcctgacatttctcacttctatagaggcttgtgatatggcg

SEQ ID NO: 325760 - DNA, 53 bp, Artificial
  Synthetic oligonucleotide
aggtgtccaacgaccgtgtaggaaaagaagagttcgttcgcgactgggctttg

SEQ ID NO: 325761 - DNA, 59 bp, Artificial
  Synthetic oligonucleotide
aggtgtcctcaaggaaggagtgttccataccatgtggcacgtcactagaggaagtgctc

SEQ ID NO: 325762 - DNA, 60 bp, Artificial
  Synthetic oligonucleotide
aggtgtctgcgaaattgttggtctcttgcactcgacgtgcggtctcaggcttatatgcag

SEQ ID NO: 325763 - DNA, 57 bp, Artificial
  Synthetic oligonucleotide
aggtgtctggaaatccccaaccgacatgcaatcctgggtccccctatcaacggatga

SEQ ID NO: 325764 - DNA, 58 bp, Artificial
  Synthetic oligonucleotide
aggtgtcttaaaaacaacactactaggtgaaatagcacagtattacactcattgggca

SEQ ID NO: 325765 - DNA, 54 bp, Artificial
  Synthetic oligonucleotide
aggtgtgaacaatttgtgggacccctcacagtaaatgagaaacggagactaaat

SEQ ID NO: 325766 - DNA, 56 bp, Artificial
  Synthetic oligonucleotide
aggtgtgaacgtcaaccgcaaatctaaactcggtcgctctcctgcctttggtgcct

SEQ ID NO: 325767 - DNA, 53 bp, Artificial
  Synthetic oligonucleotide
aggtgtgacatacgcgaggaatgagccaacgccctgcttcttgactccggcac

SEQ ID NO: 325768 - DNA, 60 bp, Artificial
  Synthetic oligonucleotide
aggtgtgactatccagcaggacataatcaggtaggatctttacaatacttggcactgaca

SEQ ID NO: 325769 - DNA, 55 bp, Artificial
  Synthetic oligonucleotide
aggtgtgataaaactgccataccattaacctggacaggaatgattgatctaccgg

SEQ ID NO: 325770 - DNA, 60 bp, Artificial
  Synthetic oligonucleotide
aggtgtgattcgtgccaagaattatgtcgaagcgtccagcagatatagggattttcactc

SEQ ID NO: 325771 - DNA, 55 bp, Artificial
  Synthetic oligonucleotide
aggtgtgcgtgcggttcaggaggttcgcgctacccgcgctgatactccttctcct

SEQ ID NO: 325772 - DNA, 60 bp, Artificial
  Synthetic oligonucleotide
aggtgtgctgagtgtcaacaatattgttgcagcgtgtgattttatcatgcgcacttcaga

SEQ ID NO: 325773 - DNA, 59 bp, Artificial
  Synthetic oligonucleotide
aggtgtggaaagagttgctgactaattgcttccataaggatgcctgggagtatatttgg

SEQ ID NO: 325774 - DNA, 58 bp, Artificial
  Synthetic oligonucleotide
aggtgtggagctaaagtctgggtacaaagattggatcttatggatttcctttgccata

SEQ ID NO: 325775 - DNA, 60 bp, Artificial
  Synthetic oligonucleotide
aggtgtggtctaggcaggacaaaggagtggtcaaccctcagatgctgcatataagcagct

SEQ ID NO: 325776 - DNA, 58 bp, Artificial
  Synthetic oligonucleotide
aggtgtggtgttcttaacccatgataactgtggtctgataggagtcaacgggatagaa

SEQ ID NO: 325777 - DNA, 51 bp, Artificial
  Synthetic oligonucleotide
aggtgtggttgcgtttgtcgtccgtgtagaccttgtcttcgcagacggcga

SEQ ID NO: 325778 - DNA, 54 bp, Artificial
  Synthetic oligonucleotide
aggtgtgtacctgctaatttcccattattaggtcatttaccaatcaatagaccc

SEQ ID NO: 325779 - DNA, 55 bp, Artificial
  Synthetic oligonucleotide
aggtgtgtacgtcggcagcacaaaggtgtgggcaccggcggcgtacgacaactgt

SEQ ID NO: 325780 - DNA, 55 bp, Artificial
  Synthetic oligonucleotide
aggtgtgtcgaaccctcggcagtgcctaataacaattgatggcgcgggggccata

SEQ ID NO: 325781 - DNA, 60 bp, Artificial
  Synthetic oligonucleotide
aggtgtgtggccgcgtgtcaaagtagatacaatatacgggaatatcattgggcagctaca

SEQ ID NO: 325782 - DNA, 60 bp, Artificial
  Synthetic oligonucleotide
aggtgttaattaatgagcctgataactattctaagcttgacatgtcatataaaacggcag

SEQ ID NO: 325783 - DNA, 53 bp, Artificial
  Synthetic oligonucleotide
aggtgttacgtaaattctatgcgactattgttggtggaccctccgggaataag

SEQ ID NO: 325784 - DNA, 57 bp, Artificial
  Synthetic oligonucleotide
aggtgttacgtactgaacccagaggctgttaacatatctggtactaaaggagctatg

SEQ ID NO: 325785 - DNA, 60 bp, Artificial
  Synthetic oligonucleotide
aggtgttacgtgctgaatccagaggcacagaacatagccgggaccagaggggcaatggta

SEQ ID NO: 325786 - DNA, 57 bp, Artificial
  Synthetic oligonucleotide
aggtgttatcgagatttttccctgcgtttagtgatggattacgcattcgtgaattta

SEQ ID NO: 325787 - DNA, 55 bp, Artificial
  Synthetic oligonucleotide
aggtgttatgcttaatggcgtgagtaaattaggtgaacgaagtttcttctctagg

SEQ ID NO: 325788 - DNA, 60 bp, Artificial
  Synthetic oligonucleotide
aggtgttcagcaactttatcctgattcaatccaagctgatcaatcctttgcttcgctatg

SEQ ID NO: 325789 - DNA, 52 bp, Artificial
  Synthetic oligonucleotide
aggtgttctacccctggacacccgacccagagaacgtacttgcgtacgtccc

SEQ ID NO: 325790 - DNA, 60 bp, Artificial
  Synthetic oligonucleotide
aggtgttgagttgaaatcaggctacaaagattggatactgtggatttcattcgccatatc

SEQ ID NO: 325791 - DNA, 54 bp, Artificial
  Synthetic oligonucleotide
aggtgttgcagccctttctaacaggcgttttaattgttgggctagtttcaagga

SEQ ID NO: 325792 - DNA, 55 bp, Artificial
  Synthetic oligonucleotide
aggtgttggcttacaaagaatggtagttacttgaatgtgtctgatttcaggaatg

SEQ ID NO: 325793 - DNA, 50 bp, Artificial
  Synthetic oligonucleotide
aggtgtttacggtgtcaaaaacctttatgtccggcagaaaaactaaaaca

SEQ ID NO: 325794 - DNA, 55 bp, Artificial
  Synthetic oligonucleotide
aggttaaaacagctgagtcaattccggatgataaggagttaaggaaagttgtgaa

SEQ ID NO: 325795 - DNA, 60 bp, Artificial
  Synthetic oligonucleotide
aggttaaaatcatatgtagcactgccatgcacttcattacttgtcttgtaatagtcagtg

SEQ ID NO: 325796 - DNA, 55 bp, Artificial
  Synthetic oligonucleotide
aggttaaagctgatgatcccgatgaatacgaaatgaccagtttgtccactttgcg

SEQ ID NO: 325797 - DNA, 54 bp, Artificial
  Synthetic oligonucleotide
aggttaaagggtctggctaccagttggtcgaagttcaagtggcaggctattaaa

SEQ ID NO: 325798 - DNA, 55 bp, Artificial
  Synthetic oligonucleotide
aggttaacgaatgttgcgcaggtctgtgtagatgttgtgtctcgagtctacggag

SEQ ID NO: 325799 - DNA, 58 bp, Artificial
  Synthetic oligonucleotide
aggttaacgctgctttcgggccctatatacgttatctggcctgtaagttgcgcgagca

SEQ ID NO: 325800 - DNA, 50 bp, Artificial
  Synthetic oligonucleotide
aggttaagtaattgtagttaaatagttgtgttaagttagtatgttaaggt

SEQ ID NO: 325801 - DNA, 59 bp, Artificial
  Synthetic oligonucleotide
aggttaatagttagcaacaagtacgaacctcttatggctcccatgatcaactgtattca

SEQ ID NO: 325802 - DNA, 53 bp, Artificial
  Synthetic oligonucleotide
aggttaattgttagtaacaagtatgagccccttatggccccacttgttaattg

SEQ ID NO: 325803 - DNA, 60 bp, Artificial
  Synthetic oligonucleotide
aggttacaaggttagatggtctaatcaatagtggccagaattcgattggtgagctatcca

SEQ ID NO: 325804 - DNA, 52 bp, Artificial
  Synthetic oligonucleotide
aggttacaccaaatgaccatgctaacgccagagcattctcgcatctggctac

SEQ ID NO: 325805 - DNA, 50 bp, Artificial
  Synthetic oligonucleotide
aggttacacccagtacgaaactagaatagtaccaaacggttctagaaaac

SEQ ID NO: 325806 - DNA, 57 bp, Artificial
  Synthetic oligonucleotide
aggttacaggctgctcttgaaaggcagtcctgtgctagggcttttgccctagaaacc

SEQ ID NO: 325807 - DNA, 60 bp, Artificial
  Synthetic oligonucleotide
aggttacagttacaatccacacacttgtctaaaatacactgagcgctgtggcgctccgag

SEQ ID NO: 325808 - DNA, 56 bp, Artificial
  Synthetic oligonucleotide
aggttacatccagtacaggcagggcctttaccaccagggcaactgagagaaccaag

SEQ ID NO: 325809 - DNA, 60 bp, Artificial
  Synthetic oligonucleotide
aggttacctgacagagttcgtgcaaaggctgatcagataatggtcgcagccatcgaattg

SEQ ID NO: 325810 - DNA, 51 bp, Artificial
  Synthetic oligonucleotide
aggttacgctcaagtagcttttgaatataataagagggccattgggagctt

SEQ ID NO: 325811 - DNA, 57 bp, Artificial
  Synthetic oligonucleotide
aggttacgtgccattgggtgagggtccagccatccgcgttggcggcacacccactgt

SEQ ID NO: 325812 - DNA, 53 bp, Artificial
  Synthetic oligonucleotide
aggttactactgatggtgcctctggatttgtcggcactgagaggaaagagttt

SEQ ID NO: 325813 - DNA, 60 bp, Artificial
  Synthetic oligonucleotide
aggttactcacatgttgatcgtcacatgcatcctgatgcggcggtgatgaaagttgtgtc

SEQ ID NO: 325814 - DNA, 55 bp, Artificial
  Synthetic oligonucleotide
aggttagattaacacgaacgtgttagagttcattagattcctcccatcgagacga

SEQ ID NO: 325815 - DNA, 56 bp, Artificial
  Synthetic oligonucleotide
aggttagccgcggtgtcagttcgtccccacgtggaggcatggcttttactagccca

SEQ ID NO: 325816 - DNA, 55 bp, Artificial
  Synthetic oligonucleotide
aggttagcctcctccagttctctggggcatgaaaacctaaccacttttcatggaa

SEQ ID NO: 325817 - DNA, 58 bp, Artificial
  Synthetic oligonucleotide
aggttaggtcaaaaggccaccatgcgcactcgtagtggcaaacaaattggtgctcgtg

SEQ ID NO: 325818 - DNA, 57 bp, Artificial
  Synthetic oligonucleotide
aggttagtccaattcatcaataatagagtaagtgcagttaaaattctggtccttaga

SEQ ID NO: 325819 - DNA, 60 bp, Artificial
  Synthetic oligonucleotide
aggttagtgctcgggtgtacgccagcccgttggtatctgacgaaaatatgatgcctatga

SEQ ID NO: 325820 - DNA, 57 bp, Artificial
  Synthetic oligonucleotide
aggttatcaaccagtaatgttatcaatacagagacggcaccaggaggaccctacaag

SEQ ID NO: 325821 - DNA, 53 bp, Artificial
  Synthetic oligonucleotide
aggttatccgaatggtttagatgtttgggatcttaagtttaagaaatgggtga

SEQ ID NO: 325822 - DNA, 53 bp, Artificial
  Synthetic oligonucleotide
aggttatcggaccgacgcaacagtctcggggttatctaactctgggaggggtg

SEQ ID NO: 325823 - DNA, 55 bp, Artificial
  Synthetic oligonucleotide
aggttatcttgtccttgcgacgtaggcggaagtagtaaatgcggccactggaacg

SEQ ID NO: 325824 - DNA, 60 bp, Artificial
  Synthetic oligonucleotide
aggttatgactgaaatgcgacatgaatatacggacgaagctaaaactggtgatattgtta

SEQ ID NO: 325825 - DNA, 50 bp, Artificial
  Synthetic oligonucleotide
aggttatgagggaagtaaagatagtagcacatcaacttctgaatcatcaa

SEQ ID NO: 325826 - DNA, 60 bp, Artificial
  Synthetic oligonucleotide
aggttatgtgctgagcgtatctggtcctggggcttatagaattttggatgggcaagatgt

SEQ ID NO: 325827 - DNA, 58 bp, Artificial
  Synthetic oligonucleotide
aggttatgttctgagaacaacactgcaaactttaaacggtgcagtccattagtctgcg

SEQ ID NO: 325828 - DNA, 57 bp, Artificial
  Synthetic oligonucleotide
aggttattcagtctgcttcggctccgggacgcgagtttgctgctgagtggggttggt

SEQ ID NO: 325829 - DNA, 54 bp, Artificial
  Synthetic oligonucleotide
aggttatttaaaccggatggtcttgttatttccgaaatcactcatcggaggaga

SEQ ID NO: 325830 - DNA, 50 bp, Artificial
  Synthetic oligonucleotide
aggttcaccctcacaacccgcgaccttgtggggccaaaaggggggtggta

SEQ ID NO: 325831 - DNA, 58 bp, Artificial
  Synthetic oligonucleotide
aggttcacgttgtatgacgtgcctcgtaaacatcaacggattgacactgtaaccaatg

SEQ ID NO: 325832 - DNA, 56 bp, Artificial
  Synthetic oligonucleotide
aggttcactattagtgacaaccaagtggactatagggtagatggtggtggtaggtg

SEQ ID NO: 325833 - DNA, 60 bp, Artificial
  Synthetic oligonucleotide
aggttcactttgctggattcactgcgccggtctgcgagagtggagaagttatcaacctcg

SEQ ID NO: 325834 - DNA, 55 bp, Artificial
  Synthetic oligonucleotide
aggttcagagaattgggtgccaaaacctatggagaatcacaagggctgacaatgg

SEQ ID NO: 325835 - DNA, 59 bp, Artificial
  Synthetic oligonucleotide
aggttcagcgatactgttaaaggtctttcttctggtggtgacgtgccagaacagtatga

SEQ ID NO: 325836 - DNA, 57 bp, Artificial
  Synthetic oligonucleotide
aggttcagcgccctattgcttgcgcacacacaagcataagggaacgttttgttgggg

SEQ ID NO: 325837 - DNA, 60 bp, Artificial
  Synthetic oligonucleotide
aggttcagctggtatggcatgcatgcatcgactgcttgggggtgtccccaacccccttaa

SEQ ID NO: 325838 - DNA, 51 bp, Artificial
  Synthetic oligonucleotide
aggttcagggttcttaaatctgtttctctataagcaacactgaattttcac

SEQ ID NO: 325839 - DNA, 60 bp, Artificial
  Synthetic oligonucleotide
aggttcatttctccaaggcagtgtctacggaacagacactgattgcaacaaacgcatatc

SEQ ID NO: 325840 - DNA, 56 bp, Artificial
  Synthetic oligonucleotide
aggttccaacgtttatcatgcagtagcgtaacttaagtactaggcacccgcggtca

SEQ ID NO: 325841 - DNA, 54 bp, Artificial
  Synthetic oligonucleotide
aggttccagacgcgaaatcctcacgtacggagcccgagaccctattccaacgta

SEQ ID NO: 325842 - DNA, 56 bp, Artificial
  Synthetic oligonucleotide
aggttccatagaccttttaaatgaagcccaagtagttgaatggatgaagagacaag

SEQ ID NO: 325843 - DNA, 60 bp, Artificial
  Synthetic oligonucleotide
aggttccatagtcaatggatccagactactgaactttgcgtatactgtatcgcgtgtagt

SEQ ID NO: 325844 - DNA, 55 bp, Artificial
  Synthetic oligonucleotide
aggttcccatcttggcacaccgcgccaatcccaccagaggggctcaggtctaccc

SEQ ID NO: 325845 - DNA, 54 bp, Artificial
  Synthetic oligonucleotide
aggttcccccgtcaagagcacgacgggcatgaaaacggtggctttcgacctatc

SEQ ID NO: 325846 - DNA, 54 bp, Artificial
  Synthetic oligonucleotide
aggttcccctgtgcgacaactacggtgatgtggccactccgcgcggactgatcg

SEQ ID NO: 325847 - DNA, 60 bp, Artificial
  Synthetic oligonucleotide
aggttccgctgacccaaaatcagtatgatgcaatatgttcgctggtgttcaatataggca

SEQ ID NO: 325848 - DNA, 55 bp, Artificial
  Synthetic oligonucleotide
aggttccggccgcttatgtagcacagggatatgacgtcctcgtgttaaatccatc

SEQ ID NO: 325849 - DNA, 58 bp, Artificial
  Synthetic oligonucleotide
aggttccgtagtccatggatccaaactagcaaacttcgcgtatacagtatcgcgatta

SEQ ID NO: 325850 - DNA, 59 bp, Artificial
  Synthetic oligonucleotide
aggttccgttgcagttactcatgcttattggcaagctaatttcaaagcgaagcccaaca

SEQ ID NO: 325851 - DNA, 60 bp, Artificial
  Synthetic oligonucleotide
aggttcctactaatgattgagaagctattgatacgcttcttagcattatggagacttctc

SEQ ID NO: 325852 - DNA, 55 bp, Artificial
  Synthetic oligonucleotide
aggttcctccgccctctatggccgacaatgccacccaagtcgggcctgttcctcc

SEQ ID NO: 325853 - DNA, 52 bp, Artificial
  Synthetic oligonucleotide
aggttcctcgtatttgcccggtctcaagaacgttattgaagcaataccgttc

SEQ ID NO: 325854 - DNA, 55 bp, Artificial
  Synthetic oligonucleotide
aggttcctgggagtctcccgacaccacccgcgcaggtgtggacaccaattcggac

SEQ ID NO: 325855 - DNA, 57 bp, Artificial
  Synthetic oligonucleotide
aggttcgaatacttggattgggaattctttggtcactctaggcattctctcgttata

SEQ ID NO: 325856 - DNA, 60 bp, Artificial
  Synthetic oligonucleotide
aggttcgaatcagttgcttggtcagcaagtgcatgccatgatggaatgggatggctaaca

SEQ ID NO: 325857 - DNA, 59 bp, Artificial
  Synthetic oligonucleotide
aggttcgaattggactgaaattgaccatgagattagaaatcgtagattagccagcttaa

SEQ ID NO: 325858 - DNA, 60 bp, Artificial
  Synthetic oligonucleotide
aggttcgcagaagataggctgggtgaagaaatagcgtatgatatgggcggagctttctct

SEQ ID NO: 325859 - DNA, 52 bp, Artificial
  Synthetic oligonucleotide
aggttcgcgccccgcagagacaccaggtacggtcgtatagagggttgtaagt

SEQ ID NO: 325860 - DNA, 58 bp, Artificial
  Synthetic oligonucleotide
aggttcggaggtgttactcctggcgtcatggaacaacttcgtgacgcagagtctgagt

SEQ ID NO: 325861 - DNA, 55 bp, Artificial
  Synthetic oligonucleotide
aggttcggggcagaaatagtacccatgttccaagccctctcagaagggtgcttaa

SEQ ID NO: 325862 - DNA, 53 bp, Artificial
  Synthetic oligonucleotide
aggttcgtaccagtttttaactacctctgatgactgttctgaaggtttgttac

SEQ ID NO: 325863 - DNA, 59 bp, Artificial
  Synthetic oligonucleotide
aggttcgtagatccactcacaggggcgacactagatgaaaacccgctcacggacatcac

SEQ ID NO: 325864 - DNA, 52 bp, Artificial
  Synthetic oligonucleotide
aggttcgtgacggacttctggagctgctctgatgccctaccgaggatggttc

SEQ ID NO: 325865 - DNA, 57 bp, Artificial
  Synthetic oligonucleotide
aggttcgtggcagacgggggcagcgacccgaagctagtcgatttcggcaagcttctg

SEQ ID NO: 325866 - DNA, 60 bp, Artificial
  Synthetic oligonucleotide
aggttctatgcaaaggtcactggtggtcaatatgcgagcaacgagcaagccttagttcgg

SEQ ID NO: 325867 - DNA, 60 bp, Artificial
  Synthetic oligonucleotide
aggttctgaacggtacacaggtaagagacaattggagatagtcagtgcaatttgtgctga

SEQ ID NO: 325868 - DNA, 60 bp, Artificial
  Synthetic oligonucleotide
aggttctgatgttctcgatataacagctgatccaactacagcaccacaaactgaacgaat

SEQ ID NO: 325869 - DNA, 51 bp, Artificial
  Synthetic oligonucleotide
aggttctgtgccgtgccatacgcggcccgatacatcgtctgtgacggtctg

SEQ ID NO: 325870 - DNA, 57 bp, Artificial
  Synthetic oligonucleotide
aggttcttacggctatcaagaagcgtaatgccgacgttccagagctgggtcattccg

SEQ ID NO: 325871 - DNA, 60 bp, Artificial
  Synthetic oligonucleotide
aggttcttcagtggataaactacactccaaatgtcaagagaatgttcatcagtcctagaa

SEQ ID NO: 325872 - DNA, 60 bp, Artificial
  Synthetic oligonucleotide
aggttcttgatcccttcctctattgcgttgaagtcgaatggagcgatgattccctggtgc

SEQ ID NO: 325873 - DNA, 58 bp, Artificial
  Synthetic oligonucleotide
aggttcttgcatgcgttattgaaacacaaaggggtagtctctactttaatgacatcat

SEQ ID NO: 325874 - DNA, 60 bp, Artificial
  Synthetic oligonucleotide
aggttcttgccagtggcaggagcaacatcagctgagttcatagaaatgctacactgctta

SEQ ID NO: 325875 - DNA, 51 bp, Artificial
  Synthetic oligonucleotide
aggttctttaaaaccctaagagctgaacaagcttcacaagaagtaaagggt

SEQ ID NO: 325876 - DNA, 55 bp, Artificial
  Synthetic oligonucleotide
aggttctttaaaactcttagagctgagcaagctacacacgatgtaaagaactgga

SEQ ID NO: 325877 - DNA, 60 bp, Artificial
  Synthetic oligonucleotide
aggttctttgacttgcatgtgatgtccaggagaccagttgtgtacttcatcatgtctatg

SEQ ID NO: 325878 - DNA, 54 bp, Artificial
  Synthetic oligonucleotide
aggttgaaacacaacgtacctgacaccgtccgctagaaatacccgacaccgtca

SEQ ID NO: 325879 - DNA, 57 bp, Artificial
  Synthetic oligonucleotide
aggttgaattcacgactcaatttcctgtcaaattaattgttgaggagtcgctgtctt

SEQ ID NO: 325880 - DNA, 55 bp, Artificial
  Synthetic oligonucleotide
aggttgacaagagaatcatctatttgggccccatcaccacttctcatgatcaatg

SEQ ID NO: 325881 - DNA, 54 bp, Artificial
  Synthetic oligonucleotide
aggttgacagattaaaacatggaacctttggtcctgtccactttcggaatcaag

SEQ ID NO: 325882 - DNA, 58 bp, Artificial
  Synthetic oligonucleotide
aggttgacgtcatttacgggccaccggggtgtggcaagagtagatgggccaatgagca

SEQ ID NO: 325883 - DNA, 51 bp, Artificial
  Synthetic oligonucleotide
aggttgactggagaaccctccgggaaaacttactcatcatttcaacgctta

SEQ ID NO: 325884 - DNA, 59 bp, Artificial
  Synthetic oligonucleotide
aggttgacttcactgtgccggatgtacaaaagattctagatgacattaaagcgttagcc

SEQ ID NO: 325885 - DNA, 51 bp, Artificial
  Synthetic oligonucleotide
aggttgagattgtttactaatgaggactgcatgcagttaatgtccaggtac

SEQ ID NO: 325886 - DNA, 60 bp, Artificial
  Synthetic oligonucleotide
aggttgagcaagtgcacctctgagcaccggatctccatcacaggactccggtcaagtcca

SEQ ID NO: 325887 - DNA, 60 bp, Artificial
  Synthetic oligonucleotide
aggttgagcgatatgctggggagacttatgatagtttgatcattagtccagcagagcgac

SEQ ID NO: 325888 - DNA, 54 bp, Artificial
  Synthetic oligonucleotide
aggttgaggccagggggaaagaaacggtatatgataaaacacttagtatgggca

SEQ ID NO: 325889 - DNA, 60 bp, Artificial
  Synthetic oligonucleotide
aggttgagtcatgcaaaggtgttactacatcatcagcctctaagtgctctggggatgaat

SEQ ID NO: 325890 - DNA, 56 bp, Artificial
  Synthetic oligonucleotide
aggttgagttactgggagtccagcggggttgacccacagacacaggtccttgttga

SEQ ID NO: 325891 - DNA, 54 bp, Artificial
  Synthetic oligonucleotide
aggttgataaacgtcccctctttccctaagcgccaaccacgcgtgttgccgtca

SEQ ID NO: 325892 - DNA, 59 bp, Artificial
  Synthetic oligonucleotide
aggttgatatgtatttttacattgccggatgatattatagctttcctacgtacagatgg

SEQ ID NO: 325893 - DNA, 53 bp, Artificial
  Synthetic oligonucleotide
aggttgatcatatacagaacgtgattgttccgaaacttaaaaaagcagtagag

SEQ ID NO: 325894 - DNA, 55 bp, Artificial
  Synthetic oligonucleotide
aggttgatcttggacaatttaagtgccctagatctaggaccagttaactgttctt

SEQ ID NO: 325895 - DNA, 56 bp, Artificial
  Synthetic oligonucleotide
aggttgatggagtaaaaggctatgagtgggagtttacagaccataggctggggctc

SEQ ID NO: 325896 - DNA, 50 bp, Artificial
  Synthetic oligonucleotide
aggttgattctgtagtgccgatcaacaacctgcaagctaatctgaagaca

SEQ ID NO: 325897 - DNA, 58 bp, Artificial
  Synthetic oligonucleotide
aggttgcaacgtgaagataaacgtagggagcatcttgcctttctacgtcatttgaagc

SEQ ID NO: 325898 - DNA, 58 bp, Artificial
  Synthetic oligonucleotide
aggttgcacatttcctgttgtgactctccgtctgcccacgcctcagtcactgacgcga

SEQ ID NO: 325899 - DNA, 60 bp, Artificial
  Synthetic oligonucleotide
aggttgcagcgacacctcgcaggctgcggggctgcattatcgagcacggcgatacaagtt

SEQ ID NO: 325900 - DNA, 58 bp, Artificial
  Synthetic oligonucleotide
aggttgcaggtacatgcccccctgatatagtccctaaaattgaaggtgacacatgggc

SEQ ID NO: 325901 - DNA, 55 bp, Artificial
  Synthetic oligonucleotide
aggttgccccgagagaatggctagctgtcgaccccttaccgactttgcccagggc

SEQ ID NO: 325902 - DNA, 50 bp, Artificial
  Synthetic oligonucleotide
aggttgcctaccaacactgttcctttgtcttttagtgatagtacctctaa

SEQ ID NO: 325903 - DNA, 57 bp, Artificial
  Synthetic oligonucleotide
aggttgcgaaagatcccttcgctgaattggaggtaaccttgcaaccatactttgata

SEQ ID NO: 325904 - DNA, 60 bp, Artificial
  Synthetic oligonucleotide
aggttgctggattcgattattcatgtgctattaacgcaccagctaatacacaacaatttg

SEQ ID NO: 325905 - DNA, 54 bp, Artificial
  Synthetic oligonucleotide
aggttggaattcaatggcggttctgtaaaaatcacctcgggttatattgcaatt

SEQ ID NO: 325906 - DNA, 58 bp, Artificial
  Synthetic oligonucleotide
aggttggacaatctatttaaagacctatatgacgtaagtatctcagcttcgcttgaac

SEQ ID NO: 325907 - DNA, 52 bp, Artificial
  Synthetic oligonucleotide
aggttggagaagcagtgttccaagcagtgcaggctgccatgcaaggacccgg

SEQ ID NO: 325908 - DNA, 60 bp, Artificial
  Synthetic oligonucleotide
aggttggaggcaaatttggcaagggttatcaatctgacttgtgctgctgcaatatgagtt

SEQ ID NO: 325909 - DNA, 56 bp, Artificial
  Synthetic oligonucleotide
aggttggattgccgctgcgctacaaacagcatgtgattaatttcagaaagcgtgaa

SEQ ID NO: 325910 - DNA, 60 bp, Artificial
  Synthetic oligonucleotide
aggttgggcaaaagtagattgatagaagcatctagtttgaatgattcagtcaatatgaga

SEQ ID NO: 325911 - DNA, 59 bp, Artificial
  Synthetic oligonucleotide
aggttgggcaaatggtgtaagttatttgatgggtcagcccttgtttcagattgcatatg

SEQ ID NO: 325912 - DNA, 59 bp, Artificial
  Synthetic oligonucleotide
aggttggtccacacctaactccaaattgcagataaataggcaagtcatagttgatagcg

SEQ ID NO: 325913 - DNA, 58 bp, Artificial
  Synthetic oligonucleotide
aggttggtggatagaataatggagcccattgttaattccgttcatcagttgggctcca

SEQ ID NO: 325914 - DNA, 55 bp, Artificial
  Synthetic oligonucleotide
aggttggttggagaccaaccttgacccatgtggtgagtataagtcgaccctagac

SEQ ID NO: 325915 - DNA, 54 bp, Artificial
  Synthetic oligonucleotide
aggttggttgggttttgacgttgaaggagcacatgttgttggctctaacgtcgg

SEQ ID NO: 325916 - DNA, 57 bp, Artificial
  Synthetic oligonucleotide
aggttgtaagctcgtccagactcgataggttagaaaacatttgtgtatccccaatgc

SEQ ID NO: 325917 - DNA, 50 bp, Artificial
  Synthetic oligonucleotide
aggttgtacctacagagttaaattgagcaaggaatttatgtttaaattcc

SEQ ID NO: 325918 - DNA, 52 bp, Artificial
  Synthetic oligonucleotide
aggttgtaggtaactgaaggctagcccatagtggttaaccttctggggaaac

SEQ ID NO: 325919 - DNA, 54 bp, Artificial
  Synthetic oligonucleotide
aggttgtagttgaaccggatttggacatctattatgtgaaacggccggttgaac

SEQ ID NO: 325920 - DNA, 55 bp, Artificial
  Synthetic oligonucleotide
aggttgtatgaggagtccaaacatgaggtttgtaaggagactgcactggtggtga

SEQ ID NO: 325921 - DNA, 60 bp, Artificial
  Synthetic oligonucleotide
aggttgtcagcactgatgagtatgtcacccgtaccagtattttctaccacgcaggcagtt

SEQ ID NO: 325922 - DNA, 55 bp, Artificial
  Synthetic oligonucleotide
aggttgtcccccagcatccgtagatgtatacccctataattagagtttgtcaggg

SEQ ID NO: 325923 - DNA, 60 bp, Artificial
  Synthetic oligonucleotide
aggttgtcgcggtcagtctcttgaactgtggcttaggccacatatagcacttagtcttaa

SEQ ID NO: 325924 - DNA, 56 bp, Artificial
  Synthetic oligonucleotide
aggttgtcttgccagtattgacagggcctgtaaaaagccagtatcttttcttagga

SEQ ID NO: 325925 - DNA, 60 bp, Artificial
  Synthetic oligonucleotide
aggttgtggttgaatcgtatctggatgtggtacactctggtcctggtgaacagcagttcc

SEQ ID NO: 325926 - DNA, 54 bp, Artificial
  Synthetic oligonucleotide
aggttgttatatggggcagatacgatctctaaatgcaactgtgattcagacatg

SEQ ID NO: 325927 - DNA, 58 bp, Artificial
  Synthetic oligonucleotide
aggttgttcgccccgctcacttcgtgtgctctgtaagtcgcaggtttgggactgctac

SEQ ID NO: 325928 - DNA, 55 bp, Artificial
  Synthetic oligonucleotide
aggttgttctgcaaccaggtgtttatcgttgttgtgtcaaggaggtttggagtgg

SEQ ID NO: 325929 - DNA, 60 bp, Artificial
  Synthetic oligonucleotide
aggttgtttcggatatgttgcactggcacgaagattacctgcggagcacgttgcgccttg

SEQ ID NO: 325930 - DNA, 57 bp, Artificial
  Synthetic oligonucleotide
aggttgtttgctacagtcttgaaacccctggtatcaacttcaatacatctagatacg

SEQ ID NO: 325931 - DNA, 50 bp, Artificial
  Synthetic oligonucleotide
aggtttaactgttcatttagcccctcttagagactgtattgctagagttc

SEQ ID NO: 325932 - DNA, 54 bp, Artificial
  Synthetic oligonucleotide
aggtttaaggagcaatcaggggaaaaccagaacctatggatgcaagtccctagg

SEQ ID NO: 325933 - DNA, 59 bp, Artificial
  Synthetic oligonucleotide
aggtttacaaccacatgcttgaggaagataagagacgacgccaagtggtggacgtcatg

SEQ ID NO: 325934 - DNA, 55 bp, Artificial
  Synthetic oligonucleotide
aggtttaccaatcgaagaggttagaaatggttcaataactcatgcgaaaatagcc

SEQ ID NO: 325935 - DNA, 52 bp, Artificial
  Synthetic oligonucleotide
aggtttaccttaacactaccatctaggtaatctcttaaattgtcaaggttat

SEQ ID NO: 325936 - DNA, 56 bp, Artificial
  Synthetic oligonucleotide
aggtttacgccgagtgtctcgacactaacgaacagacgcgcctgtcggtggtgagc

SEQ ID NO: 325937 - DNA, 53 bp, Artificial
  Synthetic oligonucleotide
aggtttagaatccacattcttgcgagacgcttccgtggttttttctgaaaacg

SEQ ID NO: 325938 - DNA, 54 bp, Artificial
  Synthetic oligonucleotide
aggtttagacgccattttcgcagaagaacttaccgaagacgctgggtaagcaac

SEQ ID NO: 325939 - DNA, 57 bp, Artificial
  Synthetic oligonucleotide
aggtttagattgacggtcgaggagccctctttcacgataactaggacacgcgtgtca

SEQ ID NO: 325940 - DNA, 58 bp, Artificial
  Synthetic oligonucleotide
aggtttagcattaaaaaatgtctttgacatgaagatacagtgccctcattcagtaaac

SEQ ID NO: 325941 - DNA, 58 bp, Artificial
  Synthetic oligonucleotide
aggtttaggcaaaattgacaagtctagaccattaagtctagcagtcttataagcctca

SEQ ID NO: 325942 - DNA, 52 bp, Artificial
  Synthetic oligonucleotide
aggtttagtcagtgttttgagtattcttcttaaaccgctgacgttggtttta

SEQ ID NO: 325943 - DNA, 60 bp, Artificial
  Synthetic oligonucleotide
aggtttatgtatgagcttgtagcatatggcaagaaccacttcgggcgggcgccgagatgt

SEQ ID NO: 325944 - DNA, 55 bp, Artificial
  Synthetic oligonucleotide
aggtttatttttgtattcgtataatttctcattcgcttcgcttccagtctccagg

SEQ ID NO: 325945 - DNA, 50 bp, Artificial
  Synthetic oligonucleotide
aggtttcaaaggagcaattttaggttgataaacatatgtcaagatgggtt

SEQ ID NO: 325946 - DNA, 51 bp, Artificial
  Synthetic oligonucleotide
aggtttcatggcttggatcgtagatcgataggaggaccacggactcgttgg

SEQ ID NO: 325947 - DNA, 60 bp, Artificial
  Synthetic oligonucleotide
aggtttcattgaacgcaggagcaagaggtgatgtacagcagatctttcaaggtcgaaacg

SEQ ID NO: 325948 - DNA, 51 bp, Artificial
  Synthetic oligonucleotide
aggtttcgggtttcgacaagggaatgacgtgtgggccggaaggacaattag

SEQ ID NO: 325949 - DNA, 57 bp, Artificial
  Synthetic oligonucleotide
aggtttcttcggaaggacttcggtccgtgtacttctagcacaagatgctagtgtaga

SEQ ID NO: 325950 - DNA, 57 bp, Artificial
  Synthetic oligonucleotide
aggtttcttctcggagactaaggttggctgtcacccaatctggaaatgcaactcgac

SEQ ID NO: 325951 - DNA, 60 bp, Artificial
  Synthetic oligonucleotide
aggtttgaaactcgactgcgacatgaggctagtgctgagtgggaacctcgtgtggaagcg

SEQ ID NO: 325952 - DNA, 58 bp, Artificial
  Synthetic oligonucleotide
aggtttgacagccgcctggcattaacacacagagcccgagaggtgcatccggagtact

SEQ ID NO: 325953 - DNA, 52 bp, Artificial
  Synthetic oligonucleotide
aggtttgagtagtgggcgtggctaatgtgagtataaaggcgggtgtcttacg

SEQ ID NO: 325954 - DNA, 60 bp, Artificial
  Synthetic oligonucleotide
aggtttgagtctaaatatgtcgaggcgtccattttgtcatcaagcttctcaaacatacca

SEQ ID NO: 325955 - DNA, 60 bp, Artificial
  Synthetic oligonucleotide
aggtttgatccgctctcagcgtgttctacctctgttatgcaattatcgcataagtaccta

SEQ ID NO: 325956 - DNA, 55 bp, Artificial
  Synthetic oligonucleotide
aggtttgattctgagtacaccatactagccactgcgtcacaaccgaacgcatctg

SEQ ID NO: 325957 - DNA, 59 bp, Artificial
  Synthetic oligonucleotide
aggtttggacgacctcctaagaggaagtaacatgcccagcatccgtgcttcagctgtcg

SEQ ID NO: 325958 - DNA, 56 bp, Artificial
  Synthetic oligonucleotide
aggtttggataggatgtggtcacgaagaacacgttgggacttttattggcctgctc

SEQ ID NO: 325959 - DNA, 55 bp, Artificial
  Synthetic oligonucleotide
aggtttgggctgtggcctttggtacaaagttatcggctagaataacaacagtgga

SEQ ID NO: 325960 - DNA, 53 bp, Artificial
  Synthetic oligonucleotide
aggtttggggactttacgttacttggagtgtcgagtcagaactacccattcta

SEQ ID NO: 325961 - DNA, 55 bp, Artificial
  Synthetic oligonucleotide
aggtttgggtcctgcgtatgtcttgcattggcttagccgccctcacgccctgggc

SEQ ID NO: 325962 - DNA, 59 bp, Artificial
  Synthetic oligonucleotide
aggtttgtcaatatgagtgtgaaactgcaaaggaactagagtcacacaggaaaagttgc

SEQ ID NO: 325963 - DNA, 48 bp, Artificial
  Synthetic oligonucleotide
aggttttaactgttttacggccgagtaaaactgtaattccgttctacc

SEQ ID NO: 325964 - DNA, 53 bp, Artificial
  Synthetic oligonucleotide
aggttttacgacaccccctgtcaaggacagtcaaccttgcgaagtcgggagaa

SEQ ID NO: 325965 - DNA, 53 bp, Artificial
  Synthetic oligonucleotide
aggttttcatacacgctccagctgctcaaccctcagccacattcaactatggt

SEQ ID NO: 325966 - DNA, 50 bp, Artificial
  Synthetic oligonucleotide
aggttttcctgtcatgcttacacctgggtctggtcagttcttaacaactg

SEQ ID NO: 325967 - DNA, 60 bp, Artificial
  Synthetic oligonucleotide
aggttttgcagcttattgcaggtagtaattatcaggtgagcatcaggacagctttgcacg

SEQ ID NO: 325968 - DNA, 55 bp, Artificial
  Synthetic oligonucleotide
aggttttgccactggggcaccaagcaacctccagcccaccaccaacacttcaggt

SEQ ID NO: 325969 - DNA, 50 bp, Artificial
  Synthetic oligonucleotide
aggttttgggggagtctttgtagggtcctttaagataattaactatcact

SEQ ID NO: 325970 - DNA, 55 bp, Artificial
  Synthetic oligonucleotide
aggttttggggttatgaaggtgtgccacagaataagatagtcacagcgcagaacg

SEQ ID NO: 325971 - DNA, 55 bp, Artificial
  Synthetic oligonucleotide
aggttttgtgtctgagccctctatacctagtagggccgccacgcctactttggcg

SEQ ID NO: 325972 - DNA, 59 bp, Artificial
  Synthetic oligonucleotide
aggttttgtgttaagtccgtctatgtactgggcaagatttggatggatgagaacatcaa

SEQ ID NO: 325973 - DNA, 58 bp, Artificial
  Synthetic oligonucleotide
aggtttttatactatggtggctttgtaccttgccactttgggggatgccatcactgca

SEQ ID NO: 325974 - DNA, 56 bp, Artificial
  Synthetic oligonucleotide
aggttttttagggttaacactcacgtcgtctacaatcatcaggaagcagcgaaata

SEQ ID NO: 325975 - DNA, 48 bp, Artificial
  Synthetic oligonucleotide
agtaaaaaactaccttgtttctactggagtaaaaaactaccttgtttc

SEQ ID NO: 325976 - DNA, 57 bp, Artificial
  Synthetic oligonucleotide
agtaaaaatgatgaaagtactcctatttatggatccatctgctggaattgaagggtt

SEQ ID NO: 325977 - DNA, 52 bp, Artificial
  Synthetic oligonucleotide
agtaaaaatgattcaaacacaaccatcagtacaaacgcaaccatcacactcc

SEQ ID NO: 325978 - DNA, 52 bp, Artificial
  Synthetic oligonucleotide
agtaaaaattctatcgaaatacgtcacttatcgagctcacatatgaacgtcg

SEQ ID NO: 325979 - DNA, 54 bp, Artificial
  Synthetic oligonucleotide
agtaaaacaactctcacttgcctaggagacttcaaacaactccaccctgtgggt

SEQ ID NO: 325980 - DNA, 55 bp, Artificial
  Synthetic oligonucleotide
agtaaaacaattccgtggaagacacgtgtatatcaaacaagttagcagaaaggcg

SEQ ID NO: 325981 - DNA, 55 bp, Artificial
  Synthetic oligonucleotide
agtaaaagtgctaacgaagttgctaaaggtatggaagaattggcagctttaggct

SEQ ID NO: 325982 - DNA, 55 bp, Artificial
  Synthetic oligonucleotide
agtaaaataggacatagcagagaaccgaaagtacacaggatgtatagttccgggg

SEQ ID NO: 325983 - DNA, 53 bp, Artificial
  Synthetic oligonucleotide
agtaaaatggtctcatttgaaggacccccaattaagacagggctcctcgacct

SEQ ID NO: 325984 - DNA, 59 bp, Artificial
  Synthetic oligonucleotide
agtaaacaaccaaaactggtcagggtactcaggagcattcatcgattattgggctgata

SEQ ID NO: 325985 - DNA, 59 bp, Artificial
  Synthetic oligonucleotide
agtaaacagtggatggagaactcaaaaggttggtggtggaaattgccagatgctctcaa

SEQ ID NO: 325986 - DNA, 60 bp, Artificial
  Synthetic oligonucleotide
agtaaaccactttcaccttggtgatgacatggatcctgagctaaggcagttagcacagtc

SEQ ID NO: 325987 - DNA, 54 bp, Artificial
  Synthetic oligonucleotide
agtaaaccagctttactggaaaccgtattcacactcgatatatggtacagaagg

SEQ ID NO: 325988 - DNA, 54 bp, Artificial
  Synthetic oligonucleotide
agtaaaccatgtaaactaaccttaagctatcaaagtacacgttgcttggggcta

SEQ ID NO: 325989 - DNA, 60 bp, Artificial
  Synthetic oligonucleotide
agtaaaccgtcgttctcacaatctaggagtggaaaagcagacctcagtctcgcactgaga

SEQ ID NO: 325990 - DNA, 59 bp, Artificial
  Synthetic oligonucleotide
agtaaacctgtcatttatcactactgtataatcattagacatggtaagttttatgtgta

SEQ ID NO: 325991 - DNA, 60 bp, Artificial
  Synthetic oligonucleotide
agtaaacgactttgtgatcatatagactattggaaacatattcgacttgaatgtgtatta

SEQ ID NO: 325992 - DNA, 52 bp, Artificial
  Synthetic oligonucleotide
agtaaacggcgtccagaacgccgcagacttgttctgaggtgccaattgaact

SEQ ID NO: 325993 - DNA, 50 bp, Artificial
  Synthetic oligonucleotide
agtaaactttaaccttaattttaaattctaggccaacaatgtacacttag

SEQ ID NO: 325994 - DNA, 55 bp, Artificial
  Synthetic oligonucleotide
agtaaagactatgagactatggtatacagtataaatataagctgtggtagtatag

SEQ ID NO: 325995 - DNA, 55 bp, Artificial
  Synthetic oligonucleotide
agtaaagagcacaggcatacagtcagcctggacagacatgagagtggccatcaga

SEQ ID NO: 325996 - DNA, 58 bp, Artificial
  Synthetic oligonucleotide
agtaaagcttttaggcttgacagtagatcaatcaactgttggtgctagtggaatttac

SEQ ID NO: 325997 - DNA, 55 bp, Artificial
  Synthetic oligonucleotide
agtaaaggaggcgttatggaaccactggtagtagtgtttggaatattcggctggc

SEQ ID NO: 325998 - DNA, 55 bp, Artificial
  Synthetic oligonucleotide
agtaaaggagtggggcaacccctctacagttagcatctcgcgtcgttcatagttt

SEQ ID NO: 325999 - DNA, 53 bp, Artificial
  Synthetic oligonucleotide
agtaaaggtaaggatgagggaccctattcaagggcctcaggtaaaacagtggc

SEQ ID NO: 326000 - DNA, 56 bp, Artificial
  Synthetic oligonucleotide
agtaaaggttggcgtaaagtatatagctatcctgacaatactaaacctttctatga

SEQ ID NO: 326001 - DNA, 53 bp, Artificial
  Synthetic oligonucleotide
agtaaagtccagtactagttaaagacacttgaccaggatgactaccaaacttt

SEQ ID NO: 326002 - DNA, 60 bp, Artificial
  Synthetic oligonucleotide
agtaaagtggatcgtacgcataataagtgcgcttaccattgtgatccgcaacagttctga

SEQ ID NO: 326003 - DNA, 59 bp, Artificial
  Synthetic oligonucleotide
agtaaagttatggtaccagttagagacagagcctatagaaggagcagaaacatactatg

SEQ ID NO: 326004 - DNA, 53 bp, Artificial
  Synthetic oligonucleotide
agtaaatacgcatttgggaactgccccaaatacgttggagtaaagagtcttaa

SEQ ID NO: 326005 - DNA, 55 bp, Artificial
  Synthetic oligonucleotide
agtaaatatagtgacagattcacagtatgctatgggtatcctatcggcagcaccc

SEQ ID NO: 326006 - DNA, 60 bp, Artificial
  Synthetic oligonucleotide
agtaaatatgcctgccctcaaagctcaatggtggtgtttcacggtcttcttcttatctgc

SEQ ID NO: 326007 - DNA, 58 bp, Artificial
  Synthetic oligonucleotide
agtaaatccacgctaatagcaaagatgttacaacaacctacaggaggatataccacgc

SEQ ID NO: 326008 - DNA, 59 bp, Artificial
  Synthetic oligonucleotide
agtaaatccagcctgtaaactgagatacactatattagcaactcaaagacatcgtaaat

SEQ ID NO: 326009 - DNA, 56 bp, Artificial
  Synthetic oligonucleotide
agtaaatccaggtataggtaaaataactcaatattcaggatgactactaaactcta

SEQ ID NO: 326010 - DNA, 57 bp, Artificial
  Synthetic oligonucleotide
agtaaatcccaggcgtaaaccgaatatcgctacattcgcaactcgaaatcaccagga

SEQ ID NO: 326011 - DNA, 55 bp, Artificial
  Synthetic oligonucleotide
agtaaatcctgtgtgctaattgaggtgcattggtctgcaaatcgagttgctaggc

SEQ ID NO: 326012 - DNA, 59 bp, Artificial
  Synthetic oligonucleotide
agtaaatctacagagacgcttaagagcggatgagctaaaattgaggaagtggtttatca

SEQ ID NO: 326013 - DNA, 54 bp, Artificial
  Synthetic oligonucleotide
agtaaatggcgccgttatacgggcgccgttaatctccgggggatcacactcgcc

SEQ ID NO: 326014 - DNA, 54 bp, Artificial
  Synthetic oligonucleotide
agtaaatggcggcgttatacgccgccgtaatctccggaggatcacacccgcccg

SEQ ID NO: 326015 - DNA, 53 bp, Artificial
  Synthetic oligonucleotide
agtaaattaaatgtttcaaggaaactaggatacgaccgtattgatcgtgaatt

SEQ ID NO: 326016 - DNA, 51 bp, Artificial
  Synthetic oligonucleotide
agtaaatttgacaactacgacatgtactattcgaaattgtaagaagttagg

SEQ ID NO: 326017 - DNA, 50 bp, Artificial
  Synthetic oligonucleotide
agtaaattttgcgtgctagtcgcttggcgttagtccgtgaagtgagtttt

SEQ ID NO: 326018 - DNA, 58 bp, Artificial
  Synthetic oligonucleotide
agtaacaacgaagaagatcacctacttcacgtagcaatgatcttacaaaagtgcaatc

SEQ ID NO: 326019 - DNA, 54 bp, Artificial
  Synthetic oligonucleotide
agtaacacaattccaaaatgtgtcatgggtaaactcggcttgcactacaattta

SEQ ID NO: 326020 - DNA, 55 bp, Artificial
  Synthetic oligonucleotide
agtaacaccagctaccgccgcactgtcaaggacgactttactgaagggggttaca

SEQ ID NO: 326021 - DNA, 52 bp, Artificial
  Synthetic oligonucleotide
agtaacaccccacacgtaacccctgagtgccttacacgggcgctcaggggtt

SEQ ID NO: 326022 - DNA, 58 bp, Artificial
  Synthetic oligonucleotide
agtaacacggaagtcagcacatgcaacaagtctctgtgggacccccaaggactaagcc

SEQ ID NO: 326023 - DNA, 60 bp, Artificial
  Synthetic oligonucleotide
agtaacactatacctaggagtcatggttcaggcggattcaggatgtgtgattaattggaa

SEQ ID NO: 326024 - DNA, 56 bp, Artificial
  Synthetic oligonucleotide
agtaacactggagggactataccaggaacacttactatggagaaactcctggtcaa

SEQ ID NO: 326025 - DNA, 55 bp, Artificial
  Synthetic oligonucleotide
agtaacactttggaagatttatggctggtcgttccactataccccatagtagacc

SEQ ID NO: 326026 - DNA, 60 bp, Artificial
  Synthetic oligonucleotide
agtaacagattcacaatatgcattgggcatcatctcctcccaacctacacagagtgattc

SEQ ID NO: 326027 - DNA, 50 bp, Artificial
  Synthetic oligonucleotide
agtaacaggaggaaacagggatgacccagatcaagattttcggtcgtgaa

SEQ ID NO: 326028 - DNA, 53 bp, Artificial
  Synthetic oligonucleotide
agtaacagtgaaccaacagaagtctttcaaaacgtcttcggagaaagacaaac

SEQ ID NO: 326029 - DNA, 55 bp, Artificial
  Synthetic oligonucleotide
agtaaccgccgggcagactatgaccctgaccgtagccgttactggtggtctggcc

SEQ ID NO: 326030 - DNA, 53 bp, Artificial
  Synthetic oligonucleotide
agtaaccgctccgaccctcaacgaaagggacggccaaggctactacatctact

SEQ ID NO: 326031 - DNA, 55 bp, Artificial
  Synthetic oligonucleotide
agtaacctagaggaatccctaacctccttatctgaagtagtcctacagaatagaa

SEQ ID NO: 326032 - DNA, 53 bp, Artificial
  Synthetic oligonucleotide
agtaaccttagaagcaactcaacaagttcaatagagggggtacaaaccagtac

SEQ ID NO: 326033 - DNA, 55 bp, Artificial
  Synthetic oligonucleotide
agtaacgaagtatccactactgaaactgctgtccacctatgcaccgaaacctcca

SEQ ID NO: 326034 - DNA, 55 bp, Artificial
  Synthetic oligonucleotide
agtaacgacagactccactcgcgggtagaggccacaggtcccgtgggtgtgtatt

SEQ ID NO: 326035 - DNA, 55 bp, Artificial
  Synthetic oligonucleotide
agtaacgaccactcgctcgagccatcgcggttctgccacccgaacggcaagaacc

SEQ ID NO: 326036 - DNA, 55 bp, Artificial
  Synthetic oligonucleotide
agtaacgacgattagacttgtcgagtggagggataaggttgccgcgtatatgggg

SEQ ID NO: 326037 - DNA, 60 bp, Artificial
  Synthetic oligonucleotide
agtaacgggccatgtggaccatgcaggactatattatgtgcacgaagggacacgtgtaac

SEQ ID NO: 326038 - DNA, 51 bp, Artificial
  Synthetic oligonucleotide
agtaactaagcactccgagcgaagcgaggagtgcgacccttgggggctcaa

SEQ ID NO: 326039 - DNA, 60 bp, Artificial
  Synthetic oligonucleotide
agtaactaaggatgaaatgcatgtctaagacagcatcttcgcataactctcttagcgcac

SEQ ID NO: 326040 - DNA, 55 bp, Artificial
  Synthetic oligonucleotide
agtaactaccgggctgtgtgaggctgacgcgcgaggggggtatgtcggtaccctc

SEQ ID NO: 326041 - DNA, 58 bp, Artificial
  Synthetic oligonucleotide
agtaactccaacctcgcctcaacatccacccagttcacccgcggccagctctccaaca

SEQ ID NO: 326042 - DNA, 53 bp, Artificial
  Synthetic oligonucleotide
agtaactgacataactttgcgtgttccgcggtcctgtgacatgtcataatcgc

SEQ ID NO: 326043 - DNA, 55 bp, Artificial
  Synthetic oligonucleotide
agtaactggagagcaatggttagtgatttcaatctaccacctgtagtagcaaaag

SEQ ID NO: 326044 - DNA, 59 bp, Artificial
  Synthetic oligonucleotide
agtaactgtaacaaccagtgcatcatcgggttcattaccacttactactatcccagctg

SEQ ID NO: 326045 - DNA, 56 bp, Artificial
  Synthetic oligonucleotide
agtaagaacacccgcacggcaagtcaattctcttcctccggatggacctcttcttc

SEQ ID NO: 326046 - DNA, 54 bp, Artificial
  Synthetic oligonucleotide
agtaagaatgcctgccctcaaagcacagtggtggtgtttcaccatcttcttcgt

SEQ ID NO: 326047 - DNA, 59 bp, Artificial
  Synthetic oligonucleotide
agtaagaatggcaacaatgctgttctgtacagtggtcatagtgggggtgcttcaccaga

SEQ ID NO: 326048 - DNA, 56 bp, Artificial
  Synthetic oligonucleotide
agtaagacaactgtgtaaactccttaggggagccaaagcactaacagacatagtac

SEQ ID NO: 326049 - DNA, 60 bp, Artificial
  Synthetic oligonucleotide
agtaagaccagaggagatctctcgacgcaggactcggcttgctgaaagtgcactcggcaa

SEQ ID NO: 326050 - DNA, 60 bp, Artificial
  Synthetic oligonucleotide
agtaagactgaaccgaatcgcagcagatcatatattaaactgaaacgactgcgtttcaag

SEQ ID NO: 326051 - DNA, 55 bp, Artificial
  Synthetic oligonucleotide
agtaagagcttacacatatggtgttgtagaaatgccacaatcgtatatggaggag

SEQ ID NO: 326052 - DNA, 55 bp, Artificial
  Synthetic oligonucleotide
agtaagagtaaaattgaaagaaggatgtgcagggccacgcatcccgcaatggccc

SEQ ID NO: 326053 - DNA, 59 bp, Artificial
  Synthetic oligonucleotide
agtaagagttgatctagatgacaagcgattaatgaaaattaagattcagccgtatttgg

SEQ ID NO: 326054 - DNA, 60 bp, Artificial
  Synthetic oligonucleotide
agtaagatcatgcgacagctgatattcgtctctatgagactctatgtaattaaacgcatt

SEQ ID NO: 326055 - DNA, 60 bp, Artificial
  Synthetic oligonucleotide
agtaagcacagcaagcatatgcagttagtagacattttctttgcacactcaggccattgt

SEQ ID NO: 326056 - DNA, 57 bp, Artificial
  Synthetic oligonucleotide
agtaagcactatattgggaaatgccccaaatacataccatcagggagtctaaaactg

SEQ ID NO: 326057 - DNA, 60 bp, Artificial
  Synthetic oligonucleotide
agtaagcaggttggggactcgagccactattcgcactcgctctggtgcacagatagggtc

SEQ ID NO: 326058 - DNA, 58 bp, Artificial
  Synthetic oligonucleotide
agtaagccgtaattctggattaactaacaggcgaatagaaacattatcctcctgatga

SEQ ID NO: 326059 - DNA, 55 bp, Artificial
  Synthetic oligonucleotide
agtaagcctaagtttactggcaggacgtctggctctgtcacagttacccaccgtg

SEQ ID NO: 326060 - DNA, 55 bp, Artificial
  Synthetic oligonucleotide
agtaagcttcatagacttaacagaaccatggctagaaggctggggaaatgcattc

SEQ ID NO: 326061 - DNA, 55 bp, Artificial
  Synthetic oligonucleotide
agtaaggaaggtaatgttattgtggaatttaacagaccaagtacagttgacagag

SEQ ID NO: 326062 - DNA, 58 bp, Artificial
  Synthetic oligonucleotide
agtaaggagggccgtatggctggagtcaaatttaaggagcgcttgagtaccaagatga

SEQ ID NO: 326063 - DNA, 56 bp, Artificial
  Synthetic oligonucleotide
agtaaggatgtatagtcctattagcatcctggacataagacaagggccaaaggaac

SEQ ID NO: 326064 - DNA, 51 bp, Artificial
  Synthetic oligonucleotide
agtaaggcagctaaattgaggcgtctgtgtgtactatgtagagatatctga

SEQ ID NO: 326065 - DNA, 55 bp, Artificial
  Synthetic oligonucleotide
agtaaggcatttacgtaccgagggagcctttatcttgcataacatacccacaaaa

SEQ ID NO: 326066 - DNA, 53 bp, Artificial
  Synthetic oligonucleotide
agtaaggccgacgcaaagtgaaagtaagggcttcctccgaagggagaagcagg

SEQ ID NO: 326067 - DNA, 54 bp, Artificial
  Synthetic oligonucleotide
agtaaggcttagcagattaggaactagagggacaatacgaacccgttcaggtac

SEQ ID NO: 326068 - DNA, 55 bp, Artificial
  Synthetic oligonucleotide
agtaaggggtaactcagccgtacgggtgaagattgtacggagcctcatgaatctg

SEQ ID NO: 326069 - DNA, 54 bp, Artificial
  Synthetic oligonucleotide
agtaagggtagtttgggaaatgtccactcacccgtcagtctataaatacttagc

SEQ ID NO: 326070 - DNA, 54 bp, Artificial
  Synthetic oligonucleotide
agtaagggttgtttgagactctgtccctcaacggtctacattcgaaactactta

SEQ ID NO: 326071 - DNA, 56 bp, Artificial
  Synthetic oligonucleotide
agtaaggtatcggtcgagaactcattgaaacctgagaagtttgtcaaaatctcttg

SEQ ID NO: 326072 - DNA, 55 bp, Artificial
  Synthetic oligonucleotide
agtaaggtcctggggatacatcgatgattgtagtcccgtcggctagatacaaccg

SEQ ID NO: 326073 - DNA, 56 bp, Artificial
  Synthetic oligonucleotide
agtaaggtctttaccatggtgcaggtttatgacattccccttttagatctctgtac

SEQ ID NO: 326074 - DNA, 56 bp, Artificial
  Synthetic oligonucleotide
agtaaggttaggcttgtatacataagtaatagagtgagcgcgactaccgactttcg

SEQ ID NO: 326075 - DNA, 58 bp, Artificial
  Synthetic oligonucleotide
agtaagtatcgagaatgtcaagtgtgagacgtccaggcaacaagtaagtctacggaac

SEQ ID NO: 326076 - DNA, 60 bp, Artificial
  Synthetic oligonucleotide
agtaagtatgcagacagaggacaagtatcatggaagcagtcagtaagaaaggagttcgcc

SEQ ID NO: 326077 - DNA, 60 bp, Artificial
  Synthetic oligonucleotide
agtaagtatgcatttgggaactgcccaaagtatgttggagtaaagagtctcagactggca

SEQ ID NO: 326078 - DNA, 56 bp, Artificial
  Synthetic oligonucleotide
agtaagtcacaaaacccctcgaaccccaacatgtctatacaatccagctgctgccg

SEQ ID NO: 326079 - DNA, 57 bp, Artificial
  Synthetic oligonucleotide
agtaagtgcaaaacataatgatgggaacttggaagacaggagtgatgacgaccaaag

SEQ ID NO: 326080 - DNA, 55 bp, Artificial
  Synthetic oligonucleotide
agtaagtggttatacaatgcagcgcacacaaacatacaggtagtagcgcagttgg

SEQ ID NO: 326081 - DNA, 56 bp, Artificial
  Synthetic oligonucleotide
agtaagtgtactctggtagcaatgggtggggtcgatttcctacgtctagctttggc

SEQ ID NO: 326082 - DNA, 55 bp, Artificial
  Synthetic oligonucleotide
agtaagttaggggatgttcccagcttatgtgggcttataaaaggggctgcagagg

SEQ ID NO: 326083 - DNA, 50 bp, Artificial
  Synthetic oligonucleotide
agtaagttaggtgaaagaaactttttctcaagacagaaaaggtttggaac

SEQ ID NO: 326084 - DNA, 56 bp, Artificial
  Synthetic oligonucleotide
agtaagttatgtcgaaggcaatgaaagtgcaaacttgggatctagcctggggcgtt

SEQ ID NO: 326085 - DNA, 57 bp, Artificial
  Synthetic oligonucleotide
agtaagttgcatctctgagactgcgagccacccacttttccgaatcatcacgacact

SEQ ID NO: 326086 - DNA, 50 bp, Artificial
  Synthetic oligonucleotide
agtaagtttctgtaaaagcgtttcttgttttaatttggtctaacacgtaa

SEQ ID NO: 326087 - DNA, 57 bp, Artificial
  Synthetic oligonucleotide
agtaagtttgcaagatgtctggtgacgtgtgggaacttattggaaacaacattttgc

SEQ ID NO: 326088 - DNA, 58 bp, Artificial
  Synthetic oligonucleotide
agtaataaggagttgagatggcgacacctctcgcattcattaagaacgccagggttct

SEQ ID NO: 326089 - DNA, 54 bp, Artificial
  Synthetic oligonucleotide
agtaatacacatgtgtttcaccagtctaaaaatgaagctgtggataccggtctg

SEQ ID NO: 326090 - DNA, 51 bp, Artificial
  Synthetic oligonucleotide
agtaataccaaggttgttggatataacactgcacgcgtatgataagagacg

SEQ ID NO: 326091 - DNA, 58 bp, Artificial
  Synthetic oligonucleotide
agtaatattcgtgccagtggaagctatatctccggtaccaatggtatatcaaacggta

SEQ ID NO: 326092 - DNA, 60 bp, Artificial
  Synthetic oligonucleotide
agtaatcatcgttccacacttgatctttttatagtatcgcgtcaagcaaactactggctc

SEQ ID NO: 326093 - DNA, 55 bp, Artificial
  Synthetic oligonucleotide
agtaatcccatccatgacgcccttaggttacaagaactcgctgacacttgccccc

SEQ ID NO: 326094 - DNA, 60 bp, Artificial
  Synthetic oligonucleotide
agtaatcctgcatccagcactcctgttcctacaactgttgcacgtccacgacttggcctt

SEQ ID NO: 326095 - DNA, 60 bp, Artificial
  Synthetic oligonucleotide
agtaatcgcatcgttcacttctgaggaacagtccagaatctcagcccaagctgtgttaac

SEQ ID NO: 326096 - DNA, 55 bp, Artificial
  Synthetic oligonucleotide
agtaatcttaagattcagaacgttactgttcctagtgcaaccgccacggaggccg

SEQ ID NO: 326097 - DNA, 53 bp, Artificial
  Synthetic oligonucleotide
agtaatcttagataaagggttactctttgtacatctttgacactaacacacta

SEQ ID NO: 326098 - DNA, 60 bp, Artificial
  Synthetic oligonucleotide
agtaatgacaccttggtatatagtagatagcaacgcttggggtgtatggatgagtcctaa

SEQ ID NO: 326099 - DNA, 58 bp, Artificial
  Synthetic oligonucleotide
agtaatgaggacttgtcattagaggcggagctggaggaccaaacctcaccttacagcg

SEQ ID NO: 326100 - DNA, 53 bp, Artificial
  Synthetic oligonucleotide
agtaatgcgcatccccgtgttaaatctccgttattagtcatcacctcccatag

SEQ ID NO: 326101 - DNA, 55 bp, Artificial
  Synthetic oligonucleotide
agtaatgctcatgcaataactgttgcacgcccaagatcgcaacgcaagattttgc

SEQ ID NO: 326102 - DNA, 58 bp, Artificial
  Synthetic oligonucleotide
agtaatgctcggtcattctcaatgctactcaatacgggtgcgaccccagagggtactt

SEQ ID NO: 326103 - DNA, 59 bp, Artificial
  Synthetic oligonucleotide
agtaatggctagtaatgtcacgacaagtataatcgcaaactgcacggttcggcgagtta

SEQ ID NO: 326104 - DNA, 55 bp, Artificial
  Synthetic oligonucleotide
agtaatggtttctccgccgcgtagcactgttgttaatattccggtcactaccgca

SEQ ID NO: 326105 - DNA, 55 bp, Artificial
  Synthetic oligonucleotide
agtaatgtaaccgttactatgttgcatagaaatatttactcggtatttctctacg

SEQ ID NO: 326106 - DNA, 55 bp, Artificial
  Synthetic oligonucleotide
agtaatgtaccagttgatgcacgcacactacagtcagccacggctgccttggccg

SEQ ID NO: 326107 - DNA, 58 bp, Artificial
  Synthetic oligonucleotide
agtaatgtcacggttactagctcggttgaactggttgaaaatgagcacactggatctt

SEQ ID NO: 326108 - DNA, 60 bp, Artificial
  Synthetic oligonucleotide
agtaatgtcaggcaaaatgttgaagtgaagttgacagatgtgtcccgacaagttggtgct

SEQ ID NO: 326109 - DNA, 57 bp, Artificial
  Synthetic oligonucleotide
agtaatgtggaagttgaatttttgttgaacggacaaataattaacacatatcaagca

SEQ ID NO: 326110 - DNA, 55 bp, Artificial
  Synthetic oligonucleotide
agtaattatgtggccctaatgaccgagcccaaatagttttgccggtacgactatc

SEQ ID NO: 326111 - DNA, 57 bp, Artificial
  Synthetic oligonucleotide
agtaattggaaagcactagctagtgaatttggactaccaccagtggtggccaaggaa

SEQ ID NO: 326112 - DNA, 55 bp, Artificial
  Synthetic oligonucleotide
agtaattggagagcaatggctagcgactttaacctaccacctgtagttgcaaagg

SEQ ID NO: 326113 - DNA, 60 bp, Artificial
  Synthetic oligonucleotide
agtaattggagagcaatggctggtgattttaacctgccacctatagtagcaaaagagata

SEQ ID NO: 326114 - DNA, 59 bp, Artificial
  Synthetic oligonucleotide
agtaattggtggtaacagcaaagatgttacaacaaccagcaggaggatataccacacta

SEQ ID NO: 326115 - DNA, 57 bp, Artificial
  Synthetic oligonucleotide
agtaattgtgtgggccgatggacctagcccacattgttttgcccgtacgactatcac

SEQ ID NO: 326116 - DNA, 58 bp, Artificial
  Synthetic oligonucleotide
agtaatttagaagcaagcacaaaccagttcagtagtaagcagtacaatccagtactgt

SEQ ID NO: 326117 - DNA, 57 bp, Artificial
  Synthetic oligonucleotide
agtaatttccccgtcacttaaaggttctacgatacaggcacatagcatctttgacga

SEQ ID NO: 326118 - DNA, 56 bp, Artificial
  Synthetic oligonucleotide
agtaatttggacgatcccgcatccagggaattagtagtcggctatgtcaacgttaa

SEQ ID NO: 326119 - DNA, 59 bp, Artificial
  Synthetic oligonucleotide
agtacaaaaccgtcatcccgtctccgtacgtgaaatgctgcggtacagcagagtgcaag

SEQ ID NO: 326120 - DNA, 57 bp, Artificial
  Synthetic oligonucleotide
agtacaaacatactgatgcagagaggcaattttagaggccctaaaagaagtgttaag

SEQ ID NO: 326121 - DNA, 57 bp, Artificial
  Synthetic oligonucleotide
agtacaacattactaaatgtctaaagcgacttaaatagctcgtcccagaagctcgaa

SEQ ID NO: 326122 - DNA, 57 bp, Artificial
  Synthetic oligonucleotide
agtacaacggaatctcccttttgagagagcaaccgttatggcagctttcagtgggaa

SEQ ID NO: 326123 - DNA, 52 bp, Artificial
  Synthetic oligonucleotide
agtacaactcaccctgatggtacgcaaaacaaccctgcatctagtcaagctt

SEQ ID NO: 326124 - DNA, 56 bp, Artificial
  Synthetic oligonucleotide
agtacaagataggagttaagaaggtggatttcttgggaagcacaattggtgacaac

SEQ ID NO: 326125 - DNA, 60 bp, Artificial
  Synthetic oligonucleotide
agtacaaggttgggttggtgtgtatcagatcactgacacacacgagacggacgcggcagt

SEQ ID NO: 326126 - DNA, 54 bp, Artificial
  Synthetic oligonucleotide
agtacaatttgttttgatacattcctggaccgcagtccgaactaactcgtttaa

SEQ ID NO: 326127 - DNA, 58 bp, Artificial
  Synthetic oligonucleotide
agtacacatacgagatcgcacgacttcaggcaaatatggggcagtttcgtgcggcgtt

SEQ ID NO: 326128 - DNA, 59 bp, Artificial
  Synthetic oligonucleotide
agtacacccctgaatatgtgtctaataccgacccacacctcgcctacactatgcggcaa

SEQ ID NO: 326129 - DNA, 60 bp, Artificial
  Synthetic oligonucleotide
agtacacgcagggcctattgcaccaggccagatgagagaacctaggggaagtgacatagc

SEQ ID NO: 326130 - DNA, 56 bp, Artificial
  Synthetic oligonucleotide
agtacactacccacgataacttataactatagcttaaccccgtatgaggagaggca

SEQ ID NO: 326131 - DNA, 59 bp, Artificial
  Synthetic oligonucleotide
agtacactcttggattgaagtccagatgtccactaaggtaattgtgtgggcctaaggca

SEQ ID NO: 326132 - DNA, 59 bp, Artificial
  Synthetic oligonucleotide
agtacagaaacgtgtgggacgtggactattcggcctttgatgctaaccactgcagtgac

SEQ ID NO: 326133 - DNA, 59 bp, Artificial
  Synthetic oligonucleotide
agtacagccactattaaacaggagttgagagatcgtttgcaggtgttacatcggttcag

SEQ ID NO: 326134 - DNA, 60 bp, Artificial
  Synthetic oligonucleotide
agtacagcttcaagatcgggatacgagatgctaaaggtgccaaatgcattaacagacgat

SEQ ID NO: 326135 - DNA, 60 bp, Artificial
  Synthetic oligonucleotide
agtacagcttggtctggttcccatatgtactgatcgtgttgacagacataccagccagtg

SEQ ID NO: 326136 - DNA, 50 bp, Artificial
  Synthetic oligonucleotide
agtacaggcctgactttcgactatggcacaatactcataactagtgtggc

SEQ ID NO: 326137 - DNA, 58 bp, Artificial
  Synthetic oligonucleotide
agtacagtcctaggagtctcaatcctgaatcttggacagaaaaggtacatcaaaacca

SEQ ID NO: 326138 - DNA, 60 bp, Artificial
  Synthetic oligonucleotide
agtacagtgtacgtcaactgcccctacagcggagttgagtcctgctacttcagtatgtct

SEQ ID NO: 326139 - DNA, 59 bp, Artificial
  Synthetic oligonucleotide
agtacataaattgctcgataaatgttgtcgtgaagttcctgctcaaatgggaatattaa

SEQ ID NO: 326140 - DNA, 60 bp, Artificial
  Synthetic oligonucleotide
agtacataactgcatggagattcctgtcaaaaactttggagtctctctgctgcataagga

SEQ ID NO: 326141 - DNA, 60 bp, Artificial
  Synthetic oligonucleotide
agtacatacagacaatggcagcaatttcaccagtactgcggttaaggccgcctgttggtg

SEQ ID NO: 326142 - DNA, 50 bp, Artificial
  Synthetic oligonucleotide
agtacatagtagcctttgagctagagttgatgaagtacttgggcctgcca

SEQ ID NO: 326143 - DNA, 56 bp, Artificial
  Synthetic oligonucleotide
agtacatagttatgtaatcaatactaactataggttaagaaatactaatcattagt

SEQ ID NO: 326144 - DNA, 60 bp, Artificial
  Synthetic oligonucleotide
agtacatatctaagcatatgtacatccacttggacagaacactccagatcaggaaggaat

SEQ ID NO: 326145 - DNA, 60 bp, Artificial
  Synthetic oligonucleotide
agtacatatgacgcatctgaacacttcacggtcaaccgcaatttactacgatcccgacaa

SEQ ID NO: 326146 - DNA, 54 bp, Artificial
  Synthetic oligonucleotide
agtacatcatacaatacatgatcaactgctctgattacattattaattgaaatt

SEQ ID NO: 326147 - DNA, 56 bp, Artificial
  Synthetic oligonucleotide
agtacatcccacgatactaccccacacacaagcccgagcacaacaaaccaacaccc

SEQ ID NO: 326148 - DNA, 55 bp, Artificial
  Synthetic oligonucleotide
agtacatcgatctgaaacctttaagcatctggggcacctatgcaaccttggtgac

SEQ ID NO: 326149 - DNA, 60 bp, Artificial
  Synthetic oligonucleotide
agtacatggaggctaatgactattacccagcacgataccagacacacatgttactcggac

SEQ ID NO: 326150 - DNA, 56 bp, Artificial
  Synthetic oligonucleotide
agtacatggttctcccctctcgacccaggacttctttttgaatatccacggctcga

SEQ ID NO: 326151 - DNA, 59 bp, Artificial
  Synthetic oligonucleotide
agtacattaatgtaccctatgaagaagtccatgcgcttgtgactaaccgactcgacctc

SEQ ID NO: 326152 - DNA, 56 bp, Artificial
  Synthetic oligonucleotide
agtacattaatttgtacgaagattcacagttaccgcattttcggcaggcggctttg

SEQ ID NO: 326153 - DNA, 60 bp, Artificial
  Synthetic oligonucleotide
agtacattcgcaagttggaatgtgaagtaggcacagccgaacttgaagtcacctgccgta

SEQ ID NO: 326154 - DNA, 53 bp, Artificial
  Synthetic oligonucleotide
agtacattcttgtcgactgtgaactggacagctctagctgcgccctttgtgcg

SEQ ID NO: 326155 - DNA, 58 bp, Artificial
  Synthetic oligonucleotide
agtaccaaccaatgacgattatcagacaccaatagctaattcagtaacggtacggcaa

SEQ ID NO: 326156 - DNA, 60 bp, Artificial
  Synthetic oligonucleotide
agtaccaactaatgacgattatcagacaccaatagctaattccgtgacagtgagacagga

SEQ ID NO: 326157 - DNA, 60 bp, Artificial
  Synthetic oligonucleotide
agtaccaatactcatgatgtgggccacagcctgtgaacccagaaacccatggctcggaga

SEQ ID NO: 326158 - DNA, 60 bp, Artificial
  Synthetic oligonucleotide
agtaccaccatgaaagttgcgcagcgtttcgttccgcacagccccagtgtagatcaggcc

SEQ ID NO: 326159 - DNA, 53 bp, Artificial
  Synthetic oligonucleotide
agtaccacctctctccggcgaccaattagaaccacagttcggaggaatttatt

SEQ ID NO: 326160 - DNA, 54 bp, Artificial
  Synthetic oligonucleotide
agtaccaccttcgattctatttggttggtcgttcagctacaaaacccagtagta

SEQ ID NO: 326161 - DNA, 55 bp, Artificial
  Synthetic oligonucleotide
agtaccactaccttgggagagccgggtacacgatacacgtgcagtgcaacgcgtc

SEQ ID NO: 326162 - DNA, 50 bp, Artificial
  Synthetic oligonucleotide
agtaccagctcaaacgacacatggccaaaggggtcaaatataactctcca

SEQ ID NO: 326163 - DNA, 58 bp, Artificial
  Synthetic oligonucleotide
agtaccaggagcaggatcaatcctatttgaagaaccaatgatcacaccagtaaacgtc

SEQ ID NO: 326164 - DNA, 56 bp, Artificial
  Synthetic oligonucleotide
agtaccagttgacccagaccaggtagagaaggacaatgaaggagagaccaacaact

SEQ ID NO: 326165 - DNA, 54 bp, Artificial
  Synthetic oligonucleotide
agtaccccaacaggaagtccaagtggactacatccccccgcaggatacaatccc

SEQ ID NO: 326166 - DNA, 50 bp, Artificial
  Synthetic oligonucleotide
agtacccccgaccgatggaatttcggccggaaaaatcttctcccctcgcc

SEQ ID NO: 326167 - DNA, 55 bp, Artificial
  Synthetic oligonucleotide
agtacccgcgcgtttacgttgtgatagattgaagttgcgttttcccttaagtgca

SEQ ID NO: 326168 - DNA, 56 bp, Artificial
  Synthetic oligonucleotide
agtacccgttgcaattgttaatttcaaggcgttaactcaaatcattccatatcgtg

SEQ ID NO: 326169 - DNA, 51 bp, Artificial
  Synthetic oligonucleotide
agtaccctgtattgctggtagaggagatgacattggtcatgttgtaatgca

SEQ ID NO: 326170 - DNA, 59 bp, Artificial
  Synthetic oligonucleotide
agtaccctgtgcccgatactgtctcacaagcaatacaaattagcaacccgctcaaacaa

SEQ ID NO: 326171 - DNA, 50 bp, Artificial
  Synthetic oligonucleotide
agtaccgattccggaaaaccggaaacacccgaagtgaccatgaccggtaa

SEQ ID NO: 326172 - DNA, 55 bp, Artificial
  Synthetic oligonucleotide
agtaccgccctacctgtgagggtaagacagtatcctattaccttggaggcaagac

SEQ ID NO: 326173 - DNA, 59 bp, Artificial
  Synthetic oligonucleotide
agtaccgtctgtgcactctggaggggtcccacgttctcctgctgctggttgagccgtac

SEQ ID NO: 326174 - DNA, 58 bp, Artificial
  Synthetic oligonucleotide
agtaccgttgtacgccatagtaggtggtggtcagatcacttcgcatgactttgttaac

SEQ ID NO: 326175 - DNA, 55 bp, Artificial
  Synthetic oligonucleotide
agtaccgttgtgtacgctactcttcattctttgcaggtttgcgcagtgtgatccg

SEQ ID NO: 326176 - DNA, 55 bp, Artificial
  Synthetic oligonucleotide
agtacctaatatcaaagaaagccatccaagcacatctaattctgccccaatcctg

SEQ ID NO: 326177 - DNA, 55 bp, Artificial
  Synthetic oligonucleotide
agtacctagctaatgattggcatgatggagctgtctccgttttgagaaatcgtaa

SEQ ID NO: 326178 - DNA, 55 bp, Artificial
  Synthetic oligonucleotide
agtacctatagccagttctggcttaaggccctgtacctccgtttggtatgaccca

SEQ ID NO: 326179 - DNA, 55 bp, Artificial
  Synthetic oligonucleotide
agtacctcaaaaggttacaactactaacagcgtgaaacgctccttgtacgctaga

SEQ ID NO: 326180 - DNA, 58 bp, Artificial
  Synthetic oligonucleotide
agtacctcaagaaacacggaacaagtcccagcgctcactgctgtggaaacgggacaca

SEQ ID NO: 326181 - DNA, 55 bp, Artificial
  Synthetic oligonucleotide
agtacctcacttcagtgagagtgacatgggtcagagacattcctctggctccggc

SEQ ID NO: 326182 - DNA, 56 bp, Artificial
  Synthetic oligonucleotide
agtacctccgggtcaaaatgcacataggctcccacctatgtgacggttagcgggac

SEQ ID NO: 326183 - DNA, 58 bp, Artificial
  Synthetic oligonucleotide
agtacctcctttggcatctgatagttaaccacctctcggtaccaaatacatctctgat

SEQ ID NO: 326184 - DNA, 55 bp, Artificial
  Synthetic oligonucleotide
agtacctcgtcattcgaacctctcccttccgtctagtgagtggtgcgtgatcacc

SEQ ID NO: 326185 - DNA, 53 bp, Artificial
  Synthetic oligonucleotide
agtacctgagcttgtaactgtaacacaaggtgtaacagcagctgtacaagggg

SEQ ID NO: 326186 - DNA, 53 bp, Artificial
  Synthetic oligonucleotide
agtacctgcgggttgactccaaggatggtgctttccgtcaggcaatagggact

SEQ ID NO: 326187 - DNA, 50 bp, Artificial
  Synthetic oligonucleotide
agtacctggctcacatcatattggactctctgaagcaagcacaggcggat

SEQ ID NO: 326188 - DNA, 55 bp, Artificial
  Synthetic oligonucleotide
agtacctgggttctggtgggtggggtcctcgcggcattagcagcctactgcctgt

SEQ ID NO: 326189 - DNA, 57 bp, Artificial
  Synthetic oligonucleotide
agtacctgtacgccaaactgagagcacaacaaaagatatcaaatcgaagtccaaaac

SEQ ID NO: 326190 - DNA, 51 bp, Artificial
  Synthetic oligonucleotide
agtacctgtgtggaaagacgcaagtactcctctattctgtgcatcagaagc

SEQ ID NO: 326191 - DNA, 54 bp, Artificial
  Synthetic oligonucleotide
agtaccttcaccgcgcgagtgagggggggaggtgcgtggcctgtagccgccata

SEQ ID NO: 326192 - DNA, 59 bp, Artificial
  Synthetic oligonucleotide
agtaccttcgactattgtcacccttgcctacagctgggaatctccaacatagattggac

SEQ ID NO: 326193 - DNA, 55 bp, Artificial
  Synthetic oligonucleotide
agtaccttctgtgcactcgtgcggggtcccatgttctcctgctgctcgtagagcc

SEQ ID NO: 326194 - DNA, 60 bp, Artificial
  Synthetic oligonucleotide
agtaccttgaaggcgagtgtaaagatgcagcgttcagacgctccctgaagaacttatcat

SEQ ID NO: 326195 - DNA, 60 bp, Artificial
  Synthetic oligonucleotide
agtacgaccacggcgcacgggtgtgacaccatagccagatgtcagtgtaatacaggggtg

SEQ ID NO: 326196 - DNA, 60 bp, Artificial
  Synthetic oligonucleotide
agtacgagaatcacacggagaacgcattgctactttatatggcatgtacccatgcctcta

SEQ ID NO: 326197 - DNA, 53 bp, Artificial
  Synthetic oligonucleotide
agtacgatatggagctttaacccagaaacgaagtagaagcccgtcggaggctt

SEQ ID NO: 326198 - DNA, 55 bp, Artificial
  Synthetic oligonucleotide
agtacgatgtgaatgaatacgaaagtgaggttgatagtcatgacagcgaaactca

SEQ ID NO: 326199 - DNA, 56 bp, Artificial
  Synthetic oligonucleotide
agtacgattgttaactaacatgttaagtgtacataaagagcaaatacttactgaac

SEQ ID NO: 326200 - DNA, 59 bp, Artificial
  Synthetic oligonucleotide
agtacgcaactcctcgggcctctaccatgtcaccaatgattgccctaactcgagtattg

SEQ ID NO: 326201 - DNA, 55 bp, Artificial
  Synthetic oligonucleotide
agtacgcggtcgagaggcgcacttttaatcttacaaactgctgtcgccaatgctg

SEQ ID NO: 326202 - DNA, 54 bp, Artificial
  Synthetic oligonucleotide
agtacgcgtactacgtggtaccgttatgttcgacggtgctatgttgtttgaccg

SEQ ID NO: 326203 - DNA, 51 bp, Artificial
  Synthetic oligonucleotide
agtacgcgttacaattaaacgggtccgcgttgaggccaaagtagccgcggg

SEQ ID NO: 326204 - DNA, 57 bp, Artificial
  Synthetic oligonucleotide
agtacgctacattcaattgtcaagagccagtatgctttttttatttctcatacaccg

SEQ ID NO: 326205 - DNA, 60 bp, Artificial
  Synthetic oligonucleotide
agtacgcttccgcatctatgcaaagattaagcacactagctgttggatcccccgggcacc

SEQ ID NO: 326206 - DNA, 55 bp, Artificial
  Synthetic oligonucleotide
agtacggccgctggccggacaacctctggatgggcgtctcgataggcacgaacgg

SEQ ID NO: 326207 - DNA, 55 bp, Artificial
  Synthetic oligonucleotide
agtacggcgttgcctgcttcgaatattacatgaacacgaagatatcgcagggtgg

SEQ ID NO: 326208 - DNA, 56 bp, Artificial
  Synthetic oligonucleotide
agtacggctgttcgacgtcatgtagaggacttaaagaaggcaggtttgaatccgct

SEQ ID NO: 326209 - DNA, 54 bp, Artificial
  Synthetic oligonucleotide
agtacgggtaggctggcgtgtagactggcccctagcccgcgtacctgagaggcc

SEQ ID NO: 326210 - DNA, 59 bp, Artificial
  Synthetic oligonucleotide
agtacggtggagtcctagatgttgttcgtgtttcaacaagtgggcaattaactgcatca

SEQ ID NO: 326211 - DNA, 55 bp, Artificial
  Synthetic oligonucleotide
agtacggtgttgaatacgtacttgatgtggaggagtagggactcttccatcaccc

SEQ ID NO: 326212 - DNA, 54 bp, Artificial
  Synthetic oligonucleotide
agtacgtaaggaaacgagtcgaggggttttcacattgcgctgacccgtatcctc

SEQ ID NO: 326213 - DNA, 53 bp, Artificial
  Synthetic oligonucleotide
agtacgtaccgggaaacgatcgcgtccctgtagtgctcccccaggttctccaa

SEQ ID NO: 326214 - DNA, 58 bp, Artificial
  Synthetic oligonucleotide
agtacgtactataatgcatgcccgttgcaaatctacgaagctggcgccggaattgggt

SEQ ID NO: 326215 - DNA, 53 bp, Artificial
  Synthetic oligonucleotide
agtacgtcaattttgtcatgttcactggcgatactttcagagcggtgtgcatt

SEQ ID NO: 326216 - DNA, 60 bp, Artificial
  Synthetic oligonucleotide
agtacgtctcaaagcatgctgcgcggggtgtgaatcactaccagcgttcgccggaaaaca

SEQ ID NO: 326217 - DNA, 51 bp, Artificial
  Synthetic oligonucleotide
agtacgtgaaaacggtgctcgcgaagatctgacattacctgaaatatggtt

SEQ ID NO: 326218 - DNA, 60 bp, Artificial
  Synthetic oligonucleotide
agtacgtggatgagtagtagtgcagattgcagttgcatttaatcggaattgtgaattctg

SEQ ID NO: 326219 - DNA, 51 bp, Artificial
  Synthetic oligonucleotide
agtacgtgtcgttgtgtaaaaagggggtgatggtgcgcgaaaacgaacgca

SEQ ID NO: 326220 - DNA, 57 bp, Artificial
  Synthetic oligonucleotide
agtacgtgtgttgttccgcttttcgtcgttgatgcaccgtaccgcaattagtgcaaa

SEQ ID NO: 326221 - DNA, 60 bp, Artificial
  Synthetic oligonucleotide
agtacgttatatgccagatatgcaagtcagaaacacgttccatcaagtaccacaggtgtg

SEQ ID NO: 326222 - DNA, 52 bp, Artificial
  Synthetic oligonucleotide
agtactaaggtcctcatatcgtccgttattggactgtttgaagactacgtgt

SEQ ID NO: 326223 - DNA, 56 bp, Artificial
  Synthetic oligonucleotide
agtactaagtctaggcgtcgttcagtatccaagaaagatagagtctttcctggtgg

SEQ ID NO: 326224 - DNA, 60 bp, Artificial
  Synthetic oligonucleotide
agtactagatataggagatgcctattatagtataccattggatccagaattcaggcccta

SEQ ID NO: 326225 - DNA, 54 bp, Artificial
  Synthetic oligonucleotide
agtactagccgcaaggcttaagaaactaggtgtagctgagtcctttcccttaaa

SEQ ID NO: 326226 - DNA, 60 bp, Artificial
  Synthetic oligonucleotide
agtactagctttaagacacagtgtggctcaggtatatgcagacactcaagtctacacaca

SEQ ID NO: 326227 - DNA, 54 bp, Artificial
  Synthetic oligonucleotide
agtactaggttgtggctatcgaaaacggatatgagtgcgttcgaaatgttgctt

SEQ ID NO: 326228 - DNA, 60 bp, Artificial
  Synthetic oligonucleotide
agtactagttgccatgatggcagagccaggatgtcaatatgtatatcaggcccgaacaac

SEQ ID NO: 326229 - DNA, 60 bp, Artificial
  Synthetic oligonucleotide
agtactatcactaactttacttccagctccaggtgtgattcaattatcgctaggaaatca

SEQ ID NO: 326230 - DNA, 55 bp, Artificial
  Synthetic oligonucleotide
agtactatcgaggaacacggactacccattgttgagactgctgacgccagacccc

SEQ ID NO: 326231 - DNA, 53 bp, Artificial
  Synthetic oligonucleotide
agtactattaaaagattcgtaccaaaaggcgtgttttatgctttcataaacaa

SEQ ID NO: 326232 - DNA, 56 bp, Artificial
  Synthetic oligonucleotide
agtactcacagaccaaccctggaaagaatggtggcacgttcaatcacccttattta

SEQ ID NO: 326233 - DNA, 55 bp, Artificial
  Synthetic oligonucleotide
agtactcaggaggccggttcaccatccctacaggtgcgggcaaaccaggggacag

SEQ ID NO: 326234 - DNA, 51 bp, Artificial
  Synthetic oligonucleotide
agtactcatggaaaacatggggaaaggcgaaaatgttctccacagagtctc

SEQ ID NO: 326235 - DNA, 55 bp, Artificial
  Synthetic oligonucleotide
agtactccacattgtaccgccgttggctcgactcattttagtaaccctacctcag

SEQ ID NO: 326236 - DNA, 60 bp, Artificial
  Synthetic oligonucleotide
agtactcctgactgggcaatgggactgcgttgcatatccctaggcacctattgagatttc

SEQ ID NO: 326237 - DNA, 54 bp, Artificial
  Synthetic oligonucleotide
agtactcgcacgacttgtttcaggtccgtagaattcaaacgaaacaagccctcg

SEQ ID NO: 326238 - DNA, 55 bp, Artificial
  Synthetic oligonucleotide
agtactctaaaacacaattatgggaggtacatgtgggtagtcgggtaattgtatg

SEQ ID NO: 326239 - DNA, 57 bp, Artificial
  Synthetic oligonucleotide
agtactcttaccactctccgccaacttggtcgttagcgctgccttgggcactcctgt

SEQ ID NO: 326240 - DNA, 60 bp, Artificial
  Synthetic oligonucleotide
agtactgaagtggaagtttgacagccacctggcactgagacacctagccagagagaaaca

SEQ ID NO: 326241 - DNA, 60 bp, Artificial
  Synthetic oligonucleotide
agtactgacaacagctaccattactctgctccctgactcagaaagattcggctttccaag

SEQ ID NO: 326242 - DNA, 58 bp, Artificial
  Synthetic oligonucleotide
agtactgaccaagtgtgactaccctgaaggacatagtaaggtagggacactgcaacta

SEQ ID NO: 326243 - DNA, 55 bp, Artificial
  Synthetic oligonucleotide
agtactgagagaacaatagccaggatcaatgaagaaattgggtggagaccagagg

SEQ ID NO: 326244 - DNA, 59 bp, Artificial
  Synthetic oligonucleotide
agtactgccactgtgaagaacgatcttagagatcgttatcaagtgatccgtcgttttac

SEQ ID NO: 326245 - DNA, 51 bp, Artificial
  Synthetic oligonucleotide
agtactgggttcactaagacgtgcggaggccccccgtgtaacatcgggggg

SEQ ID NO: 326246 - DNA, 54 bp, Artificial
  Synthetic oligonucleotide
agtactggtttaatctaggttcgattcctggaacttgctccctttaataatatg

SEQ ID NO: 326247 - DNA, 55 bp, Artificial
  Synthetic oligonucleotide
agtactgtagtatacatacttctaataggaaggtcctcgcctatgagtcgaccac

SEQ ID NO: 326248 - DNA, 55 bp, Artificial
  Synthetic oligonucleotide
agtactgtattaagccaatactgctgctaggcctgtaaatccgcaaccattctgc

SEQ ID NO: 326249 - DNA, 55 bp, Artificial
  Synthetic oligonucleotide
agtactgtcaatcctcagaaggatgggtgtccccacttgtacgcacttttgcatg

SEQ ID NO: 326250 - DNA, 56 bp, Artificial
  Synthetic oligonucleotide
agtactgtggtgtgttaggtggggacctaatcgctgcttgtattccgttagtctga

SEQ ID NO: 326251 - DNA, 60 bp, Artificial
  Synthetic oligonucleotide
agtactgtgttctcgaaataggagatatgctcttgaggactgcgataggccaagtgtcac

SEQ ID NO: 326252 - DNA, 53 bp, Artificial
  Synthetic oligonucleotide
agtacttaaaatggtggatgacccttacttctccagtttctaagtgagttacc

SEQ ID NO: 326253 - DNA, 55 bp, Artificial
  Synthetic oligonucleotide
agtacttacccactgaagctagctgatattccgttggtatcttgttcacgttccg

SEQ ID NO: 326254 - DNA, 54 bp, Artificial
  Synthetic oligonucleotide
agtacttcaggccagccggtgtacaatcacggtaggtatctcctcctaccactc

SEQ ID NO: 326255 - DNA, 59 bp, Artificial
  Synthetic oligonucleotide
agtacttcctgaccagagcagaagcgctattgcacatatgggttccccccctcaacgtc

SEQ ID NO: 326256 - DNA, 60 bp, Artificial
  Synthetic oligonucleotide
agtacttcgggaagcctagtatcatcttggaatcttcgatgcgttgcgttcagcactcaa

SEQ ID NO: 326257 - DNA, 55 bp, Artificial
  Synthetic oligonucleotide
agtacttctctgttaaggagagctggatccgccacgtgaaactggcggaagagtc

SEQ ID NO: 326258 - DNA, 55 bp, Artificial
  Synthetic oligonucleotide
agtacttctctgttaaggagagttggatccgccacttaaggctgacggaagaacc

SEQ ID NO: 326259 - DNA, 54 bp, Artificial
  Synthetic oligonucleotide
agtacttggttctttccccgcagaccgtactacgtagccaaaagcttagtctga

SEQ ID NO: 326260 - DNA, 58 bp, Artificial
  Synthetic oligonucleotide
agtactttctgaccagagcagaagcgcaactgcatatatgggtccctcccctcaacgt

SEQ ID NO: 326261 - DNA, 57 bp, Artificial
  Synthetic oligonucleotide
agtactttctgactagagtagaagcgcatctgcacgtgtgggtcccccccctcaacg

SEQ ID NO: 326262 - DNA, 55 bp, Artificial
  Synthetic oligonucleotide
agtacttttgagtctcaggttggtagattgccagttctactgggtcgttaggtgg

SEQ ID NO: 326263 - DNA, 53 bp, Artificial
  Synthetic oligonucleotide
agtagaaaaaccattcgtattcccaccccaccaattcaacgtcaataagattc

SEQ ID NO: 326264 - DNA, 60 bp, Artificial
  Synthetic oligonucleotide
agtagaaagacctattgctctaagcaagcaagctgtaagaaggatgctgtcaatgaatat

SEQ ID NO: 326265 - DNA, 59 bp, Artificial
  Synthetic oligonucleotide
agtagaaagatacgcaacaaagaactggcgtccagaaagaagacatactgcactcggga

SEQ ID NO: 326266 - DNA, 58 bp, Artificial
  Synthetic oligonucleotide
agtagaaatgttcgagtgagagtccatcgggaccttaatttcaagccgaattcaatga

SEQ ID NO: 326267 - DNA, 52 bp, Artificial
  Synthetic oligonucleotide
agtagaaccagccttaccatacctcccctatgctaccaatacactgaaactt

SEQ ID NO: 326268 - DNA, 57 bp, Artificial
  Synthetic oligonucleotide
agtagaaccagccttggcatacctcccctacgctaccagtgcactaaaaatgttcac

SEQ ID NO: 326269 - DNA, 60 bp, Artificial
  Synthetic oligonucleotide
agtagaagcatatagcttgcctagaattattgcagtacggaatcatgaaatcatggtagg

SEQ ID NO: 326270 - DNA, 60 bp, Artificial
  Synthetic oligonucleotide
agtagaagtaggttggtctgatacagctcatggcgtgggggatatccctatgaagactga

SEQ ID NO: 326271 - DNA, 57 bp, Artificial
  Synthetic oligonucleotide
agtagaagttgtcactgcccaggaattagtggaatcgcaacacctaccggaattgtg

SEQ ID NO: 326272 - DNA, 53 bp, Artificial
  Synthetic oligonucleotide
agtagaatgtacttatccaacacaacctttatcctcctccctgacggagtttt

SEQ ID NO: 326273 - DNA, 59 bp, Artificial
  Synthetic oligonucleotide
agtagaatgtcctactgggaatcattcggagttgaccctaagatacagcaaatcgtcga

SEQ ID NO: 326274 - DNA, 55 bp, Artificial
  Synthetic oligonucleotide
agtagacacctaatgaaccacaaagcatttatagtaccaaaactaggaagaggac

SEQ ID NO: 326275 - DNA, 51 bp, Artificial
  Synthetic oligonucleotide
agtagaccagactgggacctttttaggttgctaaaggtcctacggggctta

SEQ ID NO: 326276 - DNA, 60 bp, Artificial
  Synthetic oligonucleotide
agtagacctggcagatgaggctagaaaccccccactggcgacagtgttctagcctgcgtg

SEQ ID NO: 326277 - DNA, 55 bp, Artificial
  Synthetic oligonucleotide
agtagacctggcagatgaggctggataaaccccactggcgacagtgatccagcct

SEQ ID NO: 326278 - DNA, 55 bp, Artificial
  Synthetic oligonucleotide
agtagacctttgggttgaagtccagatgtccactaaggtaattatgtgggcctaa

SEQ ID NO: 326279 - DNA, 55 bp, Artificial
  Synthetic oligonucleotide
agtagacgatacacagatgacagtaatcatgagtggactaatggtatggtgcata

SEQ ID NO: 326280 - DNA, 55 bp, Artificial
  Synthetic oligonucleotide
agtagacggacctactagtctttatcatcaagccaataagggtgtaagggtcgcc

SEQ ID NO: 326281 - DNA, 55 bp, Artificial
  Synthetic oligonucleotide
agtagacggctacgactaaaagaaatggctacgcaaacagaagggatgaatttcg

SEQ ID NO: 326282 - DNA, 58 bp, Artificial
  Synthetic oligonucleotide
agtagacgggcagctgtgtctgcattggagaccaaactcggagaacttaaacggcaat

SEQ ID NO: 326283 - DNA, 60 bp, Artificial
  Synthetic oligonucleotide
agtagacgtaagataagaatcaaatctgagaatataatcggtgacgataagaatattgta

SEQ ID NO: 326284 - DNA, 60 bp, Artificial
  Synthetic oligonucleotide
agtagactcaaagtcacttggcgcgaaggcagtagtgctaccagaagcagacaacatcaa

SEQ ID NO: 326285 - DNA, 55 bp, Artificial
  Synthetic oligonucleotide
agtagactctttcgaatgggttgttcgtatccaaagtacagttaatactcaatta

SEQ ID NO: 326286 - DNA, 56 bp, Artificial
  Synthetic oligonucleotide
agtagactgtagtccaggtttatggcaactagattgtacacatttagaaggaaaag

SEQ ID NO: 326287 - DNA, 60 bp, Artificial
  Synthetic oligonucleotide
agtagacttattgaagcctcaagcttgaatgattcagtcaacatgagaatgaaattggga

SEQ ID NO: 326288 - DNA, 60 bp, Artificial
  Synthetic oligonucleotide
agtagagaagcgcattcgcttctgcgtgtacagcgacacaacgggttgctccactgctgt

SEQ ID NO: 326289 - DNA, 60 bp, Artificial
  Synthetic oligonucleotide
agtagagagaattcagattgaccgacgacagcgcgctatctcaggtctatctaacgagcg

SEQ ID NO: 326290 - DNA, 60 bp, Artificial
  Synthetic oligonucleotide
agtagagataataatactgccactctgttagatgcttatcaaagagaagtaacaaacata

SEQ ID NO: 326291 - DNA, 54 bp, Artificial
  Synthetic oligonucleotide
agtagagatagtgttcggagaaaagggattgtacgtcagacccaccgggtccaa

SEQ ID NO: 326292 - DNA, 60 bp, Artificial
  Synthetic oligonucleotide
agtagagctagaataaagaccaggctattcaccataagacaagagatggctagcagaggc

SEQ ID NO: 326293 - DNA, 56 bp, Artificial
  Synthetic oligonucleotide
agtagagggaacgaataatacagatcgttggttagctacgatattaatagaaccga

SEQ ID NO: 326294 - DNA, 54 bp, Artificial
  Synthetic oligonucleotide
agtagagggacctattgtcgactcgttaaatgggacagaccctagaactaacgc

SEQ ID NO: 326295 - DNA, 52 bp, Artificial
  Synthetic oligonucleotide
agtagagtaaacgtaatcgaaccctcacacggaccccgccctacaaggtaca

SEQ ID NO: 326296 - DNA, 54 bp, Artificial
  Synthetic oligonucleotide
agtagagtgcggggcggtaaattgtgttggtaagtcgtttaagagcgtgcgtac

SEQ ID NO: 326297 - DNA, 57 bp, Artificial
  Synthetic oligonucleotide
agtagagtggcttgtgaacaagatcccgggttaccacgtgctgttggttagtgagta

SEQ ID NO: 326298 - DNA, 59 bp, Artificial
  Synthetic oligonucleotide
agtagagtgtataatggcatcgttggcgcgaggaaaggtccagagggcggtggttcgca

SEQ ID NO: 326299 - DNA, 56 bp, Artificial
  Synthetic oligonucleotide
agtagagttgtgtggcttccccaccggtgagcggcttccactcgtcttgggtgaac

SEQ ID NO: 326300 - DNA, 57 bp, Artificial
  Synthetic oligonucleotide
agtagagttttcggaaattggtgtagttgtgccaggtgctggcagaactaaggctta

SEQ ID NO: 326301 - DNA, 60 bp, Artificial
  Synthetic oligonucleotide
agtagatatgaagacagccatcctagggacatcccatgttaactctatggacttaagtac

SEQ ID NO: 326302 - DNA, 54 bp, Artificial
  Synthetic oligonucleotide
agtagatccagctgacacgtattgtaaatatgtggctgcaggtaatcaaccttt

SEQ ID NO: 326303 - DNA, 60 bp, Artificial
  Synthetic oligonucleotide
agtagatcctgaggtagctttacagttatctatgcaggaacgtgcaaggctagtaccagc

SEQ ID NO: 326304 - DNA, 60 bp, Artificial
  Synthetic oligonucleotide
agtagatctactggcaagttcgatatacagtatatcgcgtgcagtagccgtgttctggca

SEQ ID NO: 326305 - DNA, 58 bp, Artificial
  Synthetic oligonucleotide
agtagatgaacaagggattaacctagagctcacactggtaacgcttgacaccaacgaa

SEQ ID NO: 326306 - DNA, 59 bp, Artificial
  Synthetic oligonucleotide
agtagatgaatattccagcacggagagagtggtggtgagtattgaccgtttcttgaggg

SEQ ID NO: 326307 - DNA, 58 bp, Artificial
  Synthetic oligonucleotide
agtagatgactgtggtccccacaggaaacttgctcagcaagtttcgaataatgtcggt

SEQ ID NO: 326308 - DNA, 54 bp, Artificial
  Synthetic oligonucleotide
agtagatgctatgtaggccttgtgtggggttgccttttaaccattgagttagtg

SEQ ID NO: 326309 - DNA, 60 bp, Artificial
  Synthetic oligonucleotide
agtagatggatccttcatctgatcagaatatctcagggtagggaaaggttggaagtgatt

SEQ ID NO: 326310 - DNA, 58 bp, Artificial
  Synthetic oligonucleotide
agtagatgtattgaatttcattccaaatgcttggagaattcaaaaaacggactatcac

SEQ ID NO: 326311 - DNA, 55 bp, Artificial
  Synthetic oligonucleotide
agtagattacgtaaaccaaattgtacaaacaatgtccaaaaggtccagatcacta

SEQ ID NO: 326312 - DNA, 53 bp, Artificial
  Synthetic oligonucleotide
agtagattgggtcaaagggcaaccatgtttacacgtagtggtaaacaaatagg

SEQ ID NO: 326313 - DNA, 58 bp, Artificial
  Synthetic oligonucleotide
agtagcaacaaacggacaacttgctccaggtgtccatatcgtaacgttctccgctgac

SEQ ID NO: 326314 - DNA, 55 bp, Artificial
  Synthetic oligonucleotide
agtagcagctgtttcgacgggaaggagtggatgcatgtctgcatgacagggaacg

SEQ ID NO: 326315 - DNA, 60 bp, Artificial
  Synthetic oligonucleotide
agtagcaggaaaattctcaaggagcagatgcccctatgccattatagaaattctatccca

SEQ ID NO: 326316 - DNA, 60 bp, Artificial
  Synthetic oligonucleotide
agtagcagtctgtctagtagagggcaacaagagagtggttaaatgggccacaatccacaa

SEQ ID NO: 326317 - DNA, 57 bp, Artificial
  Synthetic oligonucleotide
agtagcagttaatacagaatcaggatacatttgggctagaataatactacaagagac

SEQ ID NO: 326318 - DNA, 55 bp, Artificial
  Synthetic oligonucleotide
agtagccatagtagcattagtagtagcaataatactagccatagttgtgtggacc

SEQ ID NO: 326319 - DNA, 60 bp, Artificial
  Synthetic oligonucleotide
agtagccccatgattggaggaactttctcaattgcatatgttgctggagcctacattgaa

SEQ ID NO: 326320 - DNA, 55 bp, Artificial
  Synthetic oligonucleotide
agtagccctgaaccagcaaatggtcctgagggtgatgattccagcacagcgagtt

SEQ ID NO: 326321 - DNA, 55 bp, Artificial
  Synthetic oligonucleotide
agtagccctttgcggatccagggagcgattgggatcatggtcctggcatgatggt

SEQ ID NO: 326322 - DNA, 60 bp, Artificial
  Synthetic oligonucleotide
agtagccggatttgattactcatgtgcacttaatgcaccagcaaatattcagcagtttga

SEQ ID NO: 326323 - DNA, 53 bp, Artificial
  Synthetic oligonucleotide
agtagccggtgcgaaaggtaatgaatcgttagtacggttagaaaaactgatgc

SEQ ID NO: 326324 - DNA, 60 bp, Artificial
  Synthetic oligonucleotide
agtagcctcccaccagatatcgataagtgcgtgtctgatgccttggttacttttatgcgg

SEQ ID NO: 326325 - DNA, 58 bp, Artificial
  Synthetic oligonucleotide
agtagcctccctttccagaatgtacatcctattactatcggagaatgtcccaaatatg

SEQ ID NO: 326326 - DNA, 60 bp, Artificial
  Synthetic oligonucleotide
agtagcctggcacgtagacatgttgcatatgagctgcatccggagttttacaagaactga

SEQ ID NO: 326327 - DNA, 60 bp, Artificial
  Synthetic oligonucleotide
agtagcgaaagcaggagttcaaaatgaatccaaatcagaagataataatcattagctcga

SEQ ID NO: 326328 - DNA, 60 bp, Artificial
  Synthetic oligonucleotide
agtagcgcaatacatgcgaggcgtatgataagatcacgcgctgtacaccctatcttttta

SEQ ID NO: 326329 - DNA, 55 bp, Artificial
  Synthetic oligonucleotide
agtagcgccgagaagaacgctcgttctttgatagtataattcgaacgagatcatc

SEQ ID NO: 326330 - DNA, 54 bp, Artificial
  Synthetic oligonucleotide
agtagcggttacgaagtacgagcgggacaataacgtcaacgtgtacgacatcac

SEQ ID NO: 326331 - DNA, 60 bp, Artificial
  Synthetic oligonucleotide
agtagcgtaccacacgacttactcagcgattacgattttatgattgatctgagtgataaa

SEQ ID NO: 326332 - DNA, 51 bp, Artificial
  Synthetic oligonucleotide
agtagcgtaggtcaaaggtttggaaatctgtctgatgcgtctatgaagtca

SEQ ID NO: 326333 - DNA, 55 bp, Artificial
  Synthetic oligonucleotide
agtagcgttattgacccgcgaactatgcgacctcgatttgtctgcgcgagcaacg

SEQ ID NO: 326334 - DNA, 50 bp, Artificial
  Synthetic oligonucleotide
agtagctaacttgcgcattgcacacggtgataacaaattaagtcaagtgt

SEQ ID NO: 326335 - DNA, 51 bp, Artificial
  Synthetic oligonucleotide
agtagctacgctccaggagaatacggctgccatagtgcgcgggcctacacc

SEQ ID NO: 326336 - DNA, 55 bp, Artificial
  Synthetic oligonucleotide
agtagctgagggaacagataggattatagaattcctacagagaattggtagaggc

SEQ ID NO: 326337 - DNA, 60 bp, Artificial
  Synthetic oligonucleotide
agtagctgaggggactgataggattatagaagtattacaaagagcttatagagctgttat

SEQ ID NO: 326338 - DNA, 60 bp, Artificial
  Synthetic oligonucleotide
agtagctgcactatttccaaatgcacaaccatttgaacatcatgctacggtaggcctaac

SEQ ID NO: 326339 - DNA, 60 bp, Artificial
  Synthetic oligonucleotide
agtagctgcccaagatcctccccctgccgccccgtatcagccagcctctgctcagtggtc

SEQ ID NO: 326340 - DNA, 55 bp, Artificial
  Synthetic oligonucleotide
agtagctggaccaatgggagcaacttacacagcttttaatccaagaacagtagct

SEQ ID NO: 326341 - DNA, 55 bp, Artificial
  Synthetic oligonucleotide
agtagctggcgggacaagcagcgtgtatatcgaagtgttgcacttgactcaaggg

SEQ ID NO: 326342 - DNA, 53 bp, Artificial
  Synthetic oligonucleotide
agtagctggtcctcgaagattttggggtacaatctcctcacagattgaatcac

SEQ ID NO: 326343 - DNA, 59 bp, Artificial
  Synthetic oligonucleotide
agtagctgtggtcgaggattcacttaagcaatatggtccagcaactgggggtgtagtgg

SEQ ID NO: 326344 - DNA, 55 bp, Artificial
  Synthetic oligonucleotide
agtagcttcggcacctgcttgtaactgaataccagcgcggttggtgccacccaat

SEQ ID NO: 326345 - DNA, 59 bp, Artificial
  Synthetic oligonucleotide
agtaggaaaagcaatgtatgcccctcccatccaaggacaaatcagaatcttagcgtata

SEQ ID NO: 326346 - DNA, 57 bp, Artificial
  Synthetic oligonucleotide
agtaggacagtgatagtttgtaaatggaatttaacatgtaaatgctgaaccccacaa

SEQ ID NO: 326347 - DNA, 60 bp, Artificial
  Synthetic oligonucleotide
agtaggacatgcaatgggagaagcccaatttagtttatcaatgcttgtgcagtgggcata

SEQ ID NO: 326348 - DNA, 55 bp, Artificial
  Synthetic oligonucleotide
agtaggagaaggcatattgttaacacccggaatgtttgaggagtatttcacaggt

SEQ ID NO: 326349 - DNA, 50 bp, Artificial
  Synthetic oligonucleotide
agtaggagacattagacaagcacactgtaatgtctctaacgaatggagat

SEQ ID NO: 326350 - DNA, 57 bp, Artificial
  Synthetic oligonucleotide
agtaggagacttaatatacttggggaacacaatgacatatcaacaaggccaaagccc

SEQ ID NO: 326351 - DNA, 59 bp, Artificial
  Synthetic oligonucleotide
agtaggagctcaaggagacaacatctctagattggtacatctggttacaggacagtggg

SEQ ID NO: 326352 - DNA, 52 bp, Artificial
  Synthetic oligonucleotide
agtaggaggcttgataggtttaagaatagtttttactgtgttctctttagtg

SEQ ID NO: 326353 - DNA, 59 bp, Artificial
  Synthetic oligonucleotide
agtaggaggttgagacttaaggaaatagcaacacaaactgacggcatgaactttgatga

SEQ ID NO: 326354 - DNA, 50 bp, Artificial
  Synthetic oligonucleotide
agtaggatgggcatcctctaacttcacaacaccaggcagtgcacaaaatt

SEQ ID NO: 326355 - DNA, 60 bp, Artificial
  Synthetic oligonucleotide
agtaggatgggcatcttcaaactacacaacaacaggcagtgatcaaaacagtggtggaac

SEQ ID NO: 326356 - DNA, 51 bp, Artificial
  Synthetic oligonucleotide
agtaggcatcaacccgtatagtcgcgagtggactgatctgtaccatcgtct

SEQ ID NO: 326357 - DNA, 55 bp, Artificial
  Synthetic oligonucleotide
agtaggcattggtacccttttccaagctatttcaggtgcaagtggacttgtagct

SEQ ID NO: 326358 - DNA, 54 bp, Artificial
  Synthetic oligonucleotide
agtaggccccttgcctcggtgcgctgcgcctttggtccccgttccttgccgcct

SEQ ID NO: 326359 - DNA, 53 bp, Artificial
  Synthetic oligonucleotide
agtaggcgagtcacaagggttgagcgcgaatagagtgaacatcctcttggata

SEQ ID NO: 326360 - DNA, 52 bp, Artificial
  Synthetic oligonucleotide
agtaggctaggacaacgggcaaccatgtttacccgtagtggtaaacaaattg

SEQ ID NO: 326361 - DNA, 54 bp, Artificial
  Synthetic oligonucleotide
agtaggcttcttaattttactaacggtgcttaataagcttgtacatcttagttg

SEQ ID NO: 326362 - DNA, 52 bp, Artificial
  Synthetic oligonucleotide
agtagggaggaaccgatatcggtttaaccgaaaacggtgcatatataaacca

SEQ ID NO: 326363 - DNA, 55 bp, Artificial
  Synthetic oligonucleotide
agtagggcgactgcaaatcaacagataagttagtcgcccacgatgcgttagcttg

SEQ ID NO: 326364 - DNA, 54 bp, Artificial
  Synthetic oligonucleotide
agtaggggtacctggtattgggccaacgatgaccaagacgagagccttccaggg

SEQ ID NO: 326365 - DNA, 55 bp, Artificial
  Synthetic oligonucleotide
agtagggtcagatttaaggaaagatcaacacctaaagaaggtagcacaattaaga

SEQ ID NO: 326366 - DNA, 60 bp, Artificial
  Synthetic oligonucleotide
agtagggtgcacagcaaagtgcgcgggcctgagcgcatatacaaaatcgtctctcaagag

SEQ ID NO: 326367 - DNA, 60 bp, Artificial
  Synthetic oligonucleotide
agtaggtatactctgtttgtttggagctatatacctaacatcagcagatatgttggggat

SEQ ID NO: 326368 - DNA, 55 bp, Artificial
  Synthetic oligonucleotide
agtaggtcaaactagattctcaggacttcttattgtgaaaacagttctcgagttc

SEQ ID NO: 326369 - DNA, 55 bp, Artificial
  Synthetic oligonucleotide
agtaggtctggcactgtaggtgaaagtgtgcctgatgacatgctgttcaaagccg

SEQ ID NO: 326370 - DNA, 53 bp, Artificial
  Synthetic oligonucleotide
agtaggtcttccatcaactgacgtactgtgtacttctgtgtcaggtcttcccg

SEQ ID NO: 326371 - DNA, 54 bp, Artificial
  Synthetic oligonucleotide
agtaggtgagtattggacagaggcacggccttgtgtcacagacagaccagaaga

SEQ ID NO: 326372 - DNA, 52 bp, Artificial
  Synthetic oligonucleotide
agtaggtgccatctgggtcgttgtttatgtcattaattctgcggaaccaaaa

SEQ ID NO: 326373 - DNA, 58 bp, Artificial
  Synthetic oligonucleotide
agtaggtgtatgcaatgactgtgcactttggtgttatcagatcaaagcacctacatgc

SEQ ID NO: 326374 - DNA, 60 bp, Artificial
  Synthetic oligonucleotide
agtaggtgtgacacaccagtcacatctcgatcaagcacttctgtttccccggactgagta

SEQ ID NO: 326375 - DNA, 58 bp, Artificial
  Synthetic oligonucleotide
agtaggtgtgagaattatcatgatagtacttaacctagtgaaaaacattaggcaggga

SEQ ID NO: 326376 - DNA, 56 bp, Artificial
  Synthetic oligonucleotide
agtaggttaatgatgattcaaattcggtaaaaatccgacattttgattgcggttca

SEQ ID NO: 326377 - DNA, 60 bp, Artificial
  Synthetic oligonucleotide
agtaggttacactcagccaattcatgcatatgacattgtgacattgcctgtaacttgctt

SEQ ID NO: 326378 - DNA, 60 bp, Artificial
  Synthetic oligonucleotide
agtaggttctctatgagacaagatgttgtggcaataactaatcggtcagggtacagcgga

SEQ ID NO: 326379 - DNA, 53 bp, Artificial
  Synthetic oligonucleotide
agtagtaaatacgcccgttagtaatttgcgccaattaggtaggagagaagtta

SEQ ID NO: 326380 - DNA, 51 bp, Artificial
  Synthetic oligonucleotide
agtagtaacaaccagtcaagttgatgccgaagagggcttattaaccactct

SEQ ID NO: 326381 - DNA, 59 bp, Artificial
  Synthetic oligonucleotide
agtagtaacaagcgtgggaggcgatgaatatgagataacccattttgagcgctggttac

SEQ ID NO: 326382 - DNA, 60 bp, Artificial
  Synthetic oligonucleotide
agtagtaagtggcctgctaatgatagttggagtagtactttgaacgatactggagagtca

SEQ ID NO: 326383 - DNA, 56 bp, Artificial
  Synthetic oligonucleotide
agtagtaatggattcagagagaggagacaatggttatgggtcaacaggagtattct

SEQ ID NO: 326384 - DNA, 55 bp, Artificial
  Synthetic oligonucleotide
agtagtacgtaatattaaggattccctagtaaggtgcgagtgactagcaagattt

SEQ ID NO: 326385 - DNA, 55 bp, Artificial
  Synthetic oligonucleotide
agtagtagggttcacgcggacccagcacacatcaatgccagaatatcgttgaaga

SEQ ID NO: 326386 - DNA, 55 bp, Artificial
  Synthetic oligonucleotide
agtagtatcacaactactgctagccctgcgtataccctttcggtccctcattggc

SEQ ID NO: 326387 - DNA, 57 bp, Artificial
  Synthetic oligonucleotide
agtagtatgtcacatgtttccggtgtcatgtggtagtaatatttgagtttgtaaccc

SEQ ID NO: 326388 - DNA, 58 bp, Artificial
  Synthetic oligonucleotide
agtagtatttcaactcagactgctactattagtagaaggcttaggctaaaagaaatga

SEQ ID NO: 326389 - DNA, 51 bp, Artificial
  Synthetic oligonucleotide
agtagtcaaagcgccagatttacctgatcctgctaaaaatattacgcaggt

SEQ ID NO: 326390 - DNA, 53 bp, Artificial
  Synthetic oligonucleotide
agtagtcacggcgggcggatggttgcgcggaggcgacggttgctagtcgtcgt

SEQ ID NO: 326391 - DNA, 60 bp, Artificial
  Synthetic oligonucleotide
agtagtcagatgcccatacactgaacccatgctaatagaccactcagacccaaacagggg

SEQ ID NO: 326392 - DNA, 53 bp, Artificial
  Synthetic oligonucleotide
agtagtcggtccgtttagttcggattacgacatagtattttatactaactcta

SEQ ID NO: 326393 - DNA, 55 bp, Artificial
  Synthetic oligonucleotide
agtagtcttcatacctttcaacacctctattaacaaccacctcaacctttctgtg

SEQ ID NO: 326394 - DNA, 51 bp, Artificial
  Synthetic oligonucleotide
agtagtgaaaattatatgtccgtggaaaaaattaactcggaacagatatta

SEQ ID NO: 326395 - DNA, 58 bp, Artificial
  Synthetic oligonucleotide
agtagtgaaaggggaccaaatatgcatcggataccatgccaacaattccacagaaaaa

SEQ ID NO: 326396 - DNA, 60 bp, Artificial
  Synthetic oligonucleotide
agtagtgaacaagatgtgaagagcccactgagctacctgagaatcctccggcccctgaat

SEQ ID NO: 326397 - DNA, 55 bp, Artificial
  Synthetic oligonucleotide
agtagtgaactccctagacttacatcttgctaaacactcgaactttcaacaaaaa

SEQ ID NO: 326398 - DNA, 57 bp, Artificial
  Synthetic oligonucleotide
agtagtgacccgacaaagtgccaccaacatgaccccagacaacatccggttccgcca

SEQ ID NO: 326399 - DNA, 60 bp, Artificial
  Synthetic oligonucleotide
agtagtgaggccggcacagaagatgtcgtgtgctgctcaatgtcttattcctggacaggc

SEQ ID NO: 326400 - DNA, 55 bp, Artificial
  Synthetic oligonucleotide
agtagtgcaaggagttggtagggctattctcaacgtacctgtaagaataagacaa

SEQ ID NO: 326401 - DNA, 60 bp, Artificial
  Synthetic oligonucleotide
agtagtgcagtgtgaatacagatccatcaatttgatgttgagcctcgcagatcgatccca

SEQ ID NO: 326402 - DNA, 59 bp, Artificial
  Synthetic oligonucleotide
agtagtgccaaactgaacgagcctgcaccggaacttactgtcatatgtatcaagcccgg

SEQ ID NO: 326403 - DNA, 60 bp, Artificial
  Synthetic oligonucleotide
agtagtgccatgtgaaccaatcataatagagaggaacgtaacagagatagtgtatttgaa

SEQ ID NO: 326404 - DNA, 58 bp, Artificial
  Synthetic oligonucleotide
agtagtgcctcctatactagctcttttaatcaagggtggtttaatacagatcgaatgc

SEQ ID NO: 326405 - DNA, 58 bp, Artificial
  Synthetic oligonucleotide
agtagtggagatatttggtactgatgttgacgttgatattatttggtttcgtgagaag

SEQ ID NO: 326406 - DNA, 57 bp, Artificial
  Synthetic oligonucleotide
agtagtgggagcaagaccacaagtaaatggtcaaagtggacggattgatttccattg

SEQ ID NO: 326407 - DNA, 55 bp, Artificial
  Synthetic oligonucleotide
agtagtgtactaccaagtataaataacgttcaaagagtaaagtgaataaacatca

SEQ ID NO: 326408 - DNA, 55 bp, Artificial
  Synthetic oligonucleotide
agtagtgtactaccaagtatagataacgtctggaaaacaaagtcattagaaagtg

SEQ ID NO: 326409 - DNA, 58 bp, Artificial
  Synthetic oligonucleotide
agtagtgtactaccaagtatagataacgttcttgaatagaatcgagagacaaaatgag

SEQ ID NO: 326410 - DNA, 54 bp, Artificial
  Synthetic oligonucleotide
agtagtgtactaccaagtatagataacgtttaaaagttgaagtcagttcacaag

SEQ ID NO: 326411 - DNA, 60 bp, Artificial
  Synthetic oligonucleotide
agtagtgtactaccgatacaatccacatctagataaaggttcttcaagatgctattcctg

SEQ ID NO: 326412 - DNA, 56 bp, Artificial
  Synthetic oligonucleotide
agtagtgtactccacttaagtactaaagctattaattgaggacatcgactaataaa

SEQ ID NO: 326413 - DNA, 58 bp, Artificial
  Synthetic oligonucleotide
agtagtgtataattatttgagttccagagctccaaactttctaaggttggatgatcaa

SEQ ID NO: 326414 - DNA, 60 bp, Artificial
  Synthetic oligonucleotide
agtagtgtctcagaacctaagagggattatgctccaacaaacagaaatagatgagcaaac

SEQ ID NO: 326415 - DNA, 58 bp, Artificial
  Synthetic oligonucleotide
agtagtgtctttggcatagaaggtttagaagcacttgatcttaatactagtgcagggt

SEQ ID NO: 326416 - DNA, 60 bp, Artificial
  Synthetic oligonucleotide
agtagtgtgcggtccggatatgatccaggtgtcactaaatgctggagcgagaggggatgt

SEQ ID NO: 326417 - DNA, 55 bp, Artificial
  Synthetic oligonucleotide
agtagtgtgtgcccttctgttgtgtgcctttggtaactaaggatccctcagcccc

SEQ ID NO: 326418 - DNA, 55 bp, Artificial
  Synthetic oligonucleotide
agtagttaccctaggtcacagtactgtagtatacatacttctaataggaaggtcc

SEQ ID NO: 326419 - DNA, 57 bp, Artificial
  Synthetic oligonucleotide
agtagttacgattgagcgaatagaggtggaaagtaggtcgtatgcagtacacctacc

SEQ ID NO: 326420 - DNA, 60 bp, Artificial
  Synthetic oligonucleotide
agtagttatgaacatcccttggacgtctggtgtccaatttagatacacagatcctgatac

SEQ ID NO: 326421 - DNA, 60 bp, Artificial
  Synthetic oligonucleotide
agtagttcatacagaaggccggttggaatctctagcatggtggaggccatggtgtctagg

SEQ ID NO: 326422 - DNA, 58 bp, Artificial
  Synthetic oligonucleotide
agtagttcatataggagaccggttggaatttccagtatggtggaggccatggtatcta

SEQ ID NO: 326423 - DNA, 58 bp, Artificial
  Synthetic oligonucleotide
agtagttcgcctgtgtgagctgacaaacttagtagtgtttgtgaggattaacaacgat

SEQ ID NO: 326424 - DNA, 51 bp, Artificial
  Synthetic oligonucleotide
agtagttgccgtgccaaccaaacatttgcgggtgtgtcccgacccttgcgg

SEQ ID NO: 326425 - DNA, 52 bp, Artificial
  Synthetic oligonucleotide
agtagttgtaaatatatttactagtcgtattatcgtgttgtgtgttgcgata

SEQ ID NO: 326426 - DNA, 53 bp, Artificial
  Synthetic oligonucleotide
agtagttttgttttggcttccactaactctcagacattaaaccctccaacagt

SEQ ID NO: 326427 - DNA, 60 bp, Artificial
  Synthetic oligonucleotide
agtataaagaacactagccaagcacacacgagttgcaagcattggaagtctgagtctcgt

SEQ ID NO: 326428 - DNA, 60 bp, Artificial
  Synthetic oligonucleotide
agtataaatcagacattcctagagtaagtgttacttcgcagtatccagtttatgacttga

SEQ ID NO: 326429 - DNA, 57 bp, Artificial
  Synthetic oligonucleotide
agtataaccacagacatagcgtgggcgccacccttgaagcattattccaaggacccc

SEQ ID NO: 326430 - DNA, 60 bp, Artificial
  Synthetic oligonucleotide
agtataagccaatgacagacctagtggaatgcacagcatctctcattgacccgttcgcag

SEQ ID NO: 326431 - DNA, 58 bp, Artificial
  Synthetic oligonucleotide
agtataatccactgcctggggcatcaaaaaggagatagtgccgaggctaggggcaacc

SEQ ID NO: 326432 - DNA, 53 bp, Artificial
  Synthetic oligonucleotide
agtataatcttgcaccttccgggatgcgtcccgtgcgtgcgatcaaagaacgt

SEQ ID NO: 326433 - DNA, 60 bp, Artificial
  Synthetic oligonucleotide
agtataatttctgattacatgcgaagtgatgttgaggatcttagtccacaattacctgta

SEQ ID NO: 326434 - DNA, 55 bp, Artificial
  Synthetic oligonucleotide
agtatacacactcctactaaaacgaaactgcaaccgagtgttttccatgacactt

SEQ ID NO: 326435 - DNA, 55 bp, Artificial
  Synthetic oligonucleotide
agtatacacttcatatggggagcccataacccggggaacagtaataatgcgactt

SEQ ID NO: 326436 - DNA, 60 bp, Artificial
  Synthetic oligonucleotide
agtatactaatatgttagacgcagctaacaaaacctgacgctatcctttcacaaggcaca

SEQ ID NO: 326437 - DNA, 55 bp, Artificial
  Synthetic oligonucleotide
agtatactcccagctaacgcatcacaatatgtcaaaagatcagacacagccgaac

SEQ ID NO: 326438 - DNA, 58 bp, Artificial
  Synthetic oligonucleotide
agtatagaatatacaaagcgaatcaaggtaagatagttggccaaacggatgtcagctt

SEQ ID NO: 326439 - DNA, 50 bp, Artificial
  Synthetic oligonucleotide
agtatagagtcagcagtcggttaaacatcttaccgtcaacgccaagttca

SEQ ID NO: 326440 - DNA, 57 bp, Artificial
  Synthetic oligonucleotide
agtatagattggtaaattgtaatacctcagtcataacacaagcctgtccaaaggtaa

SEQ ID NO: 326441 - DNA, 60 bp, Artificial
  Synthetic oligonucleotide
agtatagcattgattccagttatgtatgctcaggacttgttggtgacacaccaaggaacg

SEQ ID NO: 326442 - DNA, 60 bp, Artificial
  Synthetic oligonucleotide
agtatagcgatgttatagagaatgctacgctgttgtcaatactatcatattcttacgata

SEQ ID NO: 326443 - DNA, 53 bp, Artificial
  Synthetic oligonucleotide
agtatagcttactacaaaaactatatgccctagaagggaaaactttacagaac

SEQ ID NO: 326444 - DNA, 59 bp, Artificial
  Synthetic oligonucleotide
agtataggaccagggagagcatggtatacaacaaaacaaatagtaggagatataagaca

SEQ ID NO: 326445 - DNA, 54 bp, Artificial
  Synthetic oligonucleotide
agtatagtcaaactaaatccagtcctgaagtcagttggttttctcacaactgtt

SEQ ID NO: 326446 - DNA, 57 bp, Artificial
  Synthetic oligonucleotide
agtatagtgtattttggaggtttggggataggcacaggtaaaggatctggtggcagc

SEQ ID NO: 326447 - DNA, 60 bp, Artificial
  Synthetic oligonucleotide
agtatataaacaagttccacagcaatttgatttcaggaattcgatgcatatgttaacatc

SEQ ID NO: 326448 - DNA, 60 bp, Artificial
  Synthetic oligonucleotide
agtatataacagcagggtggaatgcattggatggtcaagtactagttgccatgatggtag

SEQ ID NO: 326449 - DNA, 60 bp, Artificial
  Synthetic oligonucleotide
agtatataagtaagtgcgcagacgaatggctgagtttatgccgctggtggtagacacgaa

SEQ ID NO: 326450 - DNA, 50 bp, Artificial
  Synthetic oligonucleotide
agtatatacaatactgcttggttgattcaacatggatgtgctttagcaga

SEQ ID NO: 326451 - DNA, 60 bp, Artificial
  Synthetic oligonucleotide
agtatatacccgttagttactcaatggaatccatcattcagcacgagtccactgttcttc

SEQ ID NO: 326452 - DNA, 58 bp, Artificial
  Synthetic oligonucleotide
agtatatatagggtaccgattgactagtcaattgggtctcataccccaattgagcacc

SEQ ID NO: 326453 - DNA, 59 bp, Artificial
  Synthetic oligonucleotide
agtatatccatatagcttacgctgacacgatttctggtagcggttttagtcaaactgat

SEQ ID NO: 326454 - DNA, 56 bp, Artificial
  Synthetic oligonucleotide
agtatatcttcctctttaacataatctctaaagcacaaactggcagaggataatgc

SEQ ID NO: 326455 - DNA, 60 bp, Artificial
  Synthetic oligonucleotide
agtatattctgcgtgctaatcgttcgacgttagtccgtggagtgagcttctattagagtc

SEQ ID NO: 326456 - DNA, 60 bp, Artificial
  Synthetic oligonucleotide
agtatattgagggcctcagctttggaccctgaattgattgcctcggcatatgcgtcgttg

SEQ ID NO: 326457 - DNA, 57 bp, Artificial
  Synthetic oligonucleotide
agtatattgcttgctccaatggaggtgttaagttataccagcgaccaaataaacctc

SEQ ID NO: 326458 - DNA, 60 bp, Artificial
  Synthetic oligonucleotide
agtatatttgatttgtcccaaatggtgcagtgggcatatgaccacgacctagaggacgat

SEQ ID NO: 326459 - DNA, 55 bp, Artificial
  Synthetic oligonucleotide
agtatcaacagtactgacgatccagtctcagcatttgcttgctgggatagtgcag

SEQ ID NO: 326460 - DNA, 60 bp, Artificial
  Synthetic oligonucleotide
agtatcaacgcatttccctgcgcccaaacctgattgtccgactagcggagacagtggtga

SEQ ID NO: 326461 - DNA, 58 bp, Artificial
  Synthetic oligonucleotide
agtatcaagattgagcccgaactttgactctacatccgaatctgaaccgggatcgtac

SEQ ID NO: 326462 - DNA, 50 bp, Artificial
  Synthetic oligonucleotide
agtatcaattaaggatattttgcgtagaccagtgttgttgtttaatcatg

SEQ ID NO: 326463 - DNA, 55 bp, Artificial
  Synthetic oligonucleotide
agtatcacaggattactactgacacgtgatggaggcacgaatggaggcacgaatg

SEQ ID NO: 326464 - DNA, 56 bp, Artificial
  Synthetic oligonucleotide
agtatcaccaatacgctggccgtcacatctctaacgctgctaccttccttgatttc

SEQ ID NO: 326465 - DNA, 57 bp, Artificial
  Synthetic oligonucleotide
agtatcaccaggaaccggactcaacacgtctgcgcactccaatattttggggacctc

SEQ ID NO: 326466 - DNA, 55 bp, Artificial
  Synthetic oligonucleotide
agtatcagcagccaccgggagtcgccagagcaatctcggaagcggagctagacga

SEQ ID NO: 326467 - DNA, 55 bp, Artificial
  Synthetic oligonucleotide
agtatcaggattacaatacagggtatttagaatacatttacctgaccccaataag

SEQ ID NO: 326468 - DNA, 54 bp, Artificial
  Synthetic oligonucleotide
agtatcagtaaatgctttaccccagaattctgtaggatctaaactagctgcatc

SEQ ID NO: 326469 - DNA, 50 bp, Artificial
  Synthetic oligonucleotide
agtatcatcataagcttagtttcagcaccccagtgggacattcatacacc

SEQ ID NO: 326470 - DNA, 55 bp, Artificial
  Synthetic oligonucleotide
agtatccactaccgagtgtattgtgcccatggctgatttgcctgataaaggaatg

SEQ ID NO: 326471 - DNA, 60 bp, Artificial
  Synthetic oligonucleotide
agtatccagagttgattaagaaagatttatcgtatgatccagcgtgggctatgaactttg

SEQ ID NO: 326472 - DNA, 53 bp, Artificial
  Synthetic oligonucleotide
agtatccattttgctacctccatatgatctgtgatgaattaacttaggttgat

SEQ ID NO: 326473 - DNA, 55 bp, Artificial
  Synthetic oligonucleotide
agtatcccgagcatattcgctgttgacagagatatgagcactcccaagccaccaa

SEQ ID NO: 326474 - DNA, 54 bp, Artificial
  Synthetic oligonucleotide
agtatccgacgttgcacgacatacttaacaaagaacctactggaaggttagtcg

SEQ ID NO: 326475 - DNA, 60 bp, Artificial
  Synthetic oligonucleotide
agtatccggaatggaacttatgatcataatgtttatagagatgaagcaatcagtaaccga

SEQ ID NO: 326476 - DNA, 58 bp, Artificial
  Synthetic oligonucleotide
agtatcctcaacctactaataggaatatccaatgtgggactgaacgtctcattacacc

SEQ ID NO: 326477 - DNA, 60 bp, Artificial
  Synthetic oligonucleotide
agtatcgaccggcacggacatgctaatttatgttgaagcgctagagatctggggacctaa

SEQ ID NO: 326478 - DNA, 60 bp, Artificial
  Synthetic oligonucleotide
agtatcgcagtacactgtgacttctacataatttcacgtgcacaagaagcggaatgcacg

SEQ ID NO: 326479 - DNA, 55 bp, Artificial
  Synthetic oligonucleotide
agtatcgccattcaaagacgcaatcattattgaaagcaaacggcagtgccggatt

SEQ ID NO: 326480 - DNA, 54 bp, Artificial
  Synthetic oligonucleotide
agtatcggaaaagattgctcatccgttattagttgggaccaattggaggggtgg

SEQ ID NO: 326481 - DNA, 50 bp, Artificial
  Synthetic oligonucleotide
agtatcgtcagaaaaggggcttagagtgattgcggttgacgtttttaatt

SEQ ID NO: 326482 - DNA, 51 bp, Artificial
  Synthetic oligonucleotide
agtatcgtttagagtgggactccacgggtacccggtaggatcgcaattacc

SEQ ID NO: 326483 - DNA, 60 bp, Artificial
  Synthetic oligonucleotide
agtatctagagacctggtagtcagttatgtcaacactaatgtgggcctgaaattcaggca

SEQ ID NO: 326484 - DNA, 57 bp, Artificial
  Synthetic oligonucleotide
agtatctagtgaaggtcaattatttaatcgaccttattggattcagcgagctcaagg

SEQ ID NO: 326485 - DNA, 52 bp, Artificial
  Synthetic oligonucleotide
agtatctatttagtattattgaaagttaattctgtgtgacttagtatcatta

SEQ ID NO: 326486 - DNA, 60 bp, Artificial
  Synthetic oligonucleotide
agtatctcgaataaggctttcatgccatactttgatgctcctactctcttgagtctaagc

SEQ ID NO: 326487 - DNA, 59 bp, Artificial
  Synthetic oligonucleotide
agtatctctcgatcatcaagacacgatgattctgtggggtgcaaatccccccctttact

SEQ ID NO: 326488 - DNA, 60 bp, Artificial
  Synthetic oligonucleotide
agtatctgcgagtacgattgtgcgttactactttccccacacgccatcactccactgtcc

SEQ ID NO: 326489 - DNA, 55 bp, Artificial
  Synthetic oligonucleotide
agtatcttaagcatactggagggtcttgcaaattgcagcttaaggctccgagcga

SEQ ID NO: 326490 - DNA, 55 bp, Artificial
  Synthetic oligonucleotide
agtatcttatggcaatggtgggtggctatatggaacaatcgcagtagttggaacg

SEQ ID NO: 326491 - DNA, 58 bp, Artificial
  Synthetic oligonucleotide
agtatcttgggaacctactccagtgaattagatacaggtgagtcagatgtaggagaca

SEQ ID NO: 326492 - DNA, 54 bp, Artificial
  Synthetic oligonucleotide
agtatgaacaacgccgttttctgtctggacggataacgcatcctcgacaggttg

SEQ ID NO: 326493 - DNA, 60 bp, Artificial
  Synthetic oligonucleotide
agtatgaagtctcacctggtggccataccgtcgatgaacagtttgcaagtcatcgacatt

SEQ ID NO: 326494 - DNA, 55 bp, Artificial
  Synthetic oligonucleotide
agtatgaatacccctggcatacagcgaaatgtcactttgaaagagacttcgagta

SEQ ID NO: 326495 - DNA, 55 bp, Artificial
  Synthetic oligonucleotide
agtatgacgttaaaacaccccaccttacatttggtgtgttgaatatttcagattc

SEQ ID NO: 326496 - DNA, 60 bp, Artificial
  Synthetic oligonucleotide
agtatgactcccatcgatgtttcaggactactcgcaatcacgaatcctccgttaggatat

SEQ ID NO: 326497 - DNA, 59 bp, Artificial
  Synthetic oligonucleotide
agtatgacttcacacaaaggcaccgaagtaaacaggatttgtggtttatgtcgcatcga

SEQ ID NO: 326498 - DNA, 60 bp, Artificial
  Synthetic oligonucleotide
agtatgagaaggaactacttcacagcagaagtgtctcattgcagggccacggagtacata

SEQ ID NO: 326499 - DNA, 60 bp, Artificial
  Synthetic oligonucleotide
agtatgagaaggaattatttcacagcggaagtgtcccattgcagggctactgagtacata

SEQ ID NO: 326500 - DNA, 58 bp, Artificial
  Synthetic oligonucleotide
agtatgagattgtgtataccacgagtataaatgttttgggtgcaaaaattaagatgta

SEQ ID NO: 326501 - DNA, 60 bp, Artificial
  Synthetic oligonucleotide
agtatgagcataagctaaggcgggatagaaataacacgccacacctgccacaaatgccac

SEQ ID NO: 326502 - DNA, 58 bp, Artificial
  Synthetic oligonucleotide
agtatgaggagtcattacatgtcctaaataagattaagaatgacgtttcaaagattaa

SEQ ID NO: 326503 - DNA, 55 bp, Artificial
  Synthetic oligonucleotide
agtatgaggggcggacagcgtggttcgtcccttcagtatcaaaaggtggggtcat

SEQ ID NO: 326504 - DNA, 60 bp, Artificial
  Synthetic oligonucleotide
agtatgatagattgagtgccaaagctatggtgttgtttttcactccaagggcagtggaat

SEQ ID NO: 326505 - DNA, 57 bp, Artificial
  Synthetic oligonucleotide
agtatgatgaattgttgagactttgtgaccgctatccacaccgggttcctgttaaag

SEQ ID NO: 326506 - DNA, 59 bp, Artificial
  Synthetic oligonucleotide
agtatgatgaggaggcgagccgtgctaggtggagcggtggtgtatccggagggtcctcc

SEQ ID NO: 326507 - DNA, 60 bp, Artificial
  Synthetic oligonucleotide
agtatgattggtggtgttgagaggaaggcggcaccgataggagcgcgagagagtgccgtt

SEQ ID NO: 326508 - DNA, 60 bp, Artificial
  Synthetic oligonucleotide
agtatgcaaaaaggagggctgcccacactaatgatgtaaggcaattaacagaagtgatac

SEQ ID NO: 326509 - DNA, 58 bp, Artificial
  Synthetic oligonucleotide
agtatgcccaagaatttaagaaatgtgtcacccctgatccttacatgccaagaaactc

SEQ ID NO: 326510 - DNA, 60 bp, Artificial
  Synthetic oligonucleotide
agtatgcccttatcaacccagagaccatgctataatagacccgctagcttctgcagcaaa

SEQ ID NO: 326511 - DNA, 55 bp, Artificial
  Synthetic oligonucleotide
agtatgcctattggaccaggacaagtattctatagaacaggagacataatagggg

SEQ ID NO: 326512 - DNA, 51 bp, Artificial
  Synthetic oligonucleotide
agtatgctcaaagtccgcagggatcatctgtggctgagcttagcccgagac

SEQ ID NO: 326513 - DNA, 58 bp, Artificial
  Synthetic oligonucleotide
agtatgctttccgtcaaagtttgcgaccttgtacacgtctatatagctctttctggaa

SEQ ID NO: 326514 - DNA, 53 bp, Artificial
  Synthetic oligonucleotide
agtatggaaggttagagggttagaagtcattagaggagggcctttaggtatag

SEQ ID NO: 326515 - DNA, 60 bp, Artificial
  Synthetic oligonucleotide
agtatggaatatgatgctgttgcgactacacactcatggatccctaagaggaaccgttcc

SEQ ID NO: 326516 - DNA, 56 bp, Artificial
  Synthetic oligonucleotide
agtatggaattttctctcaccgacccgagactggaaccacacaagtgggagaagta

SEQ ID NO: 326517 - DNA, 53 bp, Artificial
  Synthetic oligonucleotide
agtatggatgtggtcctagtggagtagtaaagactgaggattttacacactac

SEQ ID NO: 326518 - DNA, 60 bp, Artificial
  Synthetic oligonucleotide
agtatggattcttcgcgctgcatcaatgaattgtattgcgaggaaatagcagaagccatc

SEQ ID NO: 326519 - DNA, 60 bp, Artificial
  Synthetic oligonucleotide
agtatggcaactgtgataccaaatgtcagaccccagtgggtgctataaattccagtatgc

SEQ ID NO: 326520 - DNA, 55 bp, Artificial
  Synthetic oligonucleotide
agtatggcctgttttgacactgagaaatgtctatgacatgaaaattgagtgcccc

SEQ ID NO: 326521 - DNA, 60 bp, Artificial
  Synthetic oligonucleotide
agtatggcgagtgtaaactccacatctgtcggcttgaccgagtgtatgggaccttcgaca

SEQ ID NO: 326522 - DNA, 55 bp, Artificial
  Synthetic oligonucleotide
agtatggcggtgggcaaaagttaatgagcaaagtcctgaaggttggttgagggct

SEQ ID NO: 326523 - DNA, 60 bp, Artificial
  Synthetic oligonucleotide
agtatggcgttccaagacatgatcaaaagtatagatacacgtatgatgtaatgaaggata

SEQ ID NO: 326524 - DNA, 53 bp, Artificial
  Synthetic oligonucleotide
agtatggggacctttaatctcaaagaagcggtctggaacggtttttgcggtgc

SEQ ID NO: 326525 - DNA, 59 bp, Artificial
  Synthetic oligonucleotide
agtatggtagtgctgctgtcttttttggtgggctgggtattagcactggtcgtggtaca

SEQ ID NO: 326526 - DNA, 60 bp, Artificial
  Synthetic oligonucleotide
agtatggtcttacaatcactccagctgacaaatcaagtgaattcaagaaattggactata

SEQ ID NO: 326527 - DNA, 60 bp, Artificial
  Synthetic oligonucleotide
agtatggtgaatttaccatgctgggcatctatgataggtgggccgtcttaccacgccacg

SEQ ID NO: 326528 - DNA, 52 bp, Artificial
  Synthetic oligonucleotide
agtatggttgggaaacatcgccccatggggggggcgatgttaaattggttag

SEQ ID NO: 326529 - DNA, 60 bp, Artificial
  Synthetic oligonucleotide
agtatgtacatgcgcgaataatcttaagagtgttggagaatggtcacgtaagtgtctacg

SEQ ID NO: 326530 - DNA, 58 bp, Artificial
  Synthetic oligonucleotide
agtatgtccagtagtgttcactgacggttctgctactggcccagcagaaactaggata

SEQ ID NO: 326531 - DNA, 55 bp, Artificial
  Synthetic oligonucleotide
agtatgtccgttaaacacacagacgcttggaatcgggtgctcaacaactaccccg

SEQ ID NO: 326532 - DNA, 59 bp, Artificial
  Synthetic oligonucleotide
agtatgtctcaaccaaacgtcaggtatttacaccacacatggaaggaagctacatcaag

SEQ ID NO: 326533 - DNA, 53 bp, Artificial
  Synthetic oligonucleotide
agtatgtgtcatctaaattacaccaatacccgcccgcccacgcgctatcgttt

SEQ ID NO: 326534 - DNA, 60 bp, Artificial
  Synthetic oligonucleotide
agtatgtttgtaattatgatagacaagaacatcaggtctcttcttatgaacaaatcgcta

SEQ ID NO: 326535 - DNA, 55 bp, Artificial
  Synthetic oligonucleotide
agtatgtttttttttgctcggaaagaacaagtttatgttcgccacatctggtcgc

SEQ ID NO: 326536 - DNA, 59 bp, Artificial
  Synthetic oligonucleotide
agtattaaacaaagtgacaagatgaccactgggagtacatccttagtgcgactagttca

SEQ ID NO: 326537 - DNA, 60 bp, Artificial
  Synthetic oligonucleotide
agtattaatgtggaagtttgacagctgcctggcattaaagcacagagcccaagagctgca

SEQ ID NO: 326538 - DNA, 60 bp, Artificial
  Synthetic oligonucleotide
agtattaccaaggacgtgagttcacggatggcttttcgctgcttgagcaatggatgtcta

SEQ ID NO: 326539 - DNA, 55 bp, Artificial
  Synthetic oligonucleotide
agtattacccacctcggaacactacctctgaacgcctggagatgtccagtccctc

SEQ ID NO: 326540 - DNA, 56 bp, Artificial
  Synthetic oligonucleotide
agtattacgtgaatttattaatcaggataatccaataatacgaaacagaatagaaa

SEQ ID NO: 326541 - DNA, 52 bp, Artificial
  Synthetic oligonucleotide
agtattagaaggcggtgaagttgcgaactgctatttttacgaccttaaaaga

SEQ ID NO: 326542 - DNA, 60 bp, Artificial
  Synthetic oligonucleotide
agtattagagtcgcccagcaacaacagtccatcactagcatcactgcacagctgggaacc

SEQ ID NO: 326543 - DNA, 52 bp, Artificial
  Synthetic oligonucleotide
agtattagcagaactacaagaccttgagaacgaagaaaaaatccctaagacc

SEQ ID NO: 326544 - DNA, 60 bp, Artificial
  Synthetic oligonucleotide
agtattagctttaagacatagtgtggctcaggtgtacgcggacactcaaatatatactca

SEQ ID NO: 326545 - DNA, 58 bp, Artificial
  Synthetic oligonucleotide
agtattagtaatacagtctatagactattccaagagttagccagaataccttctagaa

SEQ ID NO: 326546 - DNA, 60 bp, Artificial
  Synthetic oligonucleotide
agtattataaattggatcaatttgctaatcacaccagtatatcgagaagatcacaccaaa

SEQ ID NO: 326547 - DNA, 59 bp, Artificial
  Synthetic oligonucleotide
agtattatacaattgggagctagagtgtggggccgaaacatcattaagttgactgatta

SEQ ID NO: 326548 - DNA, 55 bp, Artificial
  Synthetic oligonucleotide
agtattatctactattcctgaattatcccagaccttgtttggagtccaaacctta

SEQ ID NO: 326549 - DNA, 51 bp, Artificial
  Synthetic oligonucleotide
agtattcaaagggtacagtgatgtggtttgacccccctcccgggggaacaa

SEQ ID NO: 326550 - DNA, 55 bp, Artificial
  Synthetic oligonucleotide
agtattcagaatcataggcaacataccccggcgcataagacaaggcctagagaga

SEQ ID NO: 326551 - DNA, 57 bp, Artificial
  Synthetic oligonucleotide
agtattcagatcggttgggaatttcatttaccatgggacgcgattggaaagtatgga

SEQ ID NO: 326552 - DNA, 58 bp, Artificial
  Synthetic oligonucleotide
agtattcataccaagaataccggataggtgcgaagccttactcagccaaagagtctaa

SEQ ID NO: 326553 - DNA, 54 bp, Artificial
  Synthetic oligonucleotide
agtattcccttgttcgattcgttgacccactcactggtttgacttatgacaggc

SEQ ID NO: 326554 - DNA, 55 bp, Artificial
  Synthetic oligonucleotide
agtattcgccaaagtcaggaattgacttagtaccaaagcggaagcggtagttgtc

SEQ ID NO: 326555 - DNA, 55 bp, Artificial
  Synthetic oligonucleotide
agtattcgcgacagtgtcgatactggacgaggaaatgtccaagttcacgaaagag

SEQ ID NO: 326556 - DNA, 60 bp, Artificial
  Synthetic oligonucleotide
agtattctatacaaatgacataataggagacataaggcaagcacattgtaaccttagtgg

SEQ ID NO: 326557 - DNA, 54 bp, Artificial
  Synthetic oligonucleotide
agtattctcacgagctatacgcaaccgcaccctttcagctttaactgcattacg

SEQ ID NO: 326558 - DNA, 51 bp, Artificial
  Synthetic oligonucleotide
agtattctctaccatttgttctatgttatgccccatatgttgacctacatc

SEQ ID NO: 326559 - DNA, 60 bp, Artificial
  Synthetic oligonucleotide
agtattgaatggatcaacttttactactggtggattggctactatgccacttagagaatg

SEQ ID NO: 326560 - DNA, 60 bp, Artificial
  Synthetic oligonucleotide
agtattgagggggggaggtattatgaacacgctccgatagagttgatttacgcatgcaga

SEQ ID NO: 326561 - DNA, 58 bp, Artificial
  Synthetic oligonucleotide
agtattgatagtcgttctatattatctaagcgtgcggaccctgttgtagaattaatgt

SEQ ID NO: 326562 - DNA, 60 bp, Artificial
  Synthetic oligonucleotide
agtattgcaattggcagccaactcgccacactgtgatttcccaatgtctcacaatcaatc

SEQ ID NO: 326563 - DNA, 57 bp, Artificial
  Synthetic oligonucleotide
agtattggagcgaatgttaatagcataacggctaacactttaaagcagttaagagta

SEQ ID NO: 326564 - DNA, 55 bp, Artificial
  Synthetic oligonucleotide
agtattggcaaactgcaagaatgctatgcagaactacttgctaaattcggtcgtc

SEQ ID NO: 326565 - DNA, 59 bp, Artificial
  Synthetic oligonucleotide
agtattggtaaagtgccacaaatattaactttagagaatgttattataatcatgcaatc

SEQ ID NO: 326566 - DNA, 58 bp, Artificial
  Synthetic oligonucleotide
agtattgtatttctaggtgcaaagaatgaacccgtagcagatatgatttacaggttaa

SEQ ID NO: 326567 - DNA, 59 bp, Artificial
  Synthetic oligonucleotide
agtatttactaagagacagttagatctggatacagttccaaattgtggatatttcgctc

SEQ ID NO: 326568 - DNA, 52 bp, Artificial
  Synthetic oligonucleotide
agtatttatctaggtggcgtagcagcggcgggtctagctggtgacgcaggca

SEQ ID NO: 326569 - DNA, 58 bp, Artificial
  Synthetic oligonucleotide
agtatttcaatcttgggggatttaaatgttatctccgaggactgttttgcagatgaca

SEQ ID NO: 326570 - DNA, 57 bp, Artificial
  Synthetic oligonucleotide
agtatttcactgcggttcccacatccccccattggtaagtgcagatcccacaccctc

SEQ ID NO: 326571 - DNA, 55 bp, Artificial
  Synthetic oligonucleotide
agtatttcctgaccagagtagaagcgcaactacacgtgtgggttccccccctcaa

SEQ ID NO: 326572 - DNA, 55 bp, Artificial
  Synthetic oligonucleotide
agtatttctaagaaatacgagccaggaaccctagggttcgagctgtgctccgaaa

SEQ ID NO: 326573 - DNA, 52 bp, Artificial
  Synthetic oligonucleotide
agtatttgaggttgtcaatatcttgaaactttctttagtcatgtacctgtca

SEQ ID NO: 326574 - DNA, 58 bp, Artificial
  Synthetic oligonucleotide
agtatttgatggcacccaatggagaatggttaggcaaattcctagtatcgctaaagac

SEQ ID NO: 326575 - DNA, 59 bp, Artificial
  Synthetic oligonucleotide
agtatttggttcccaggcatgtgctgcgttcgatttggtaaatgactcaggcactgcga

SEQ ID NO: 326576 - DNA, 58 bp, Artificial
  Synthetic oligonucleotide
agtattttagccctgacaccatctaagtgcatttggtcgtacatacctgagtagttag

SEQ ID NO: 326577 - DNA, 56 bp, Artificial
  Synthetic oligonucleotide
agtcaaaagtaaattcgattatgtaatggatgactctggtgtcaaaaataatcttt

SEQ ID NO: 326578 - DNA, 54 bp, Artificial
  Synthetic oligonucleotide
agtcaaaattaccccatagtgcagaatcttcagggacaaatggtacatcaggct

SEQ ID NO: 326579 - DNA, 54 bp, Artificial
  Synthetic oligonucleotide
agtcaaagaaatattacaagaaccatttggtgcaggtgttgatttagcattaat

SEQ ID NO: 326580 - DNA, 59 bp, Artificial
  Synthetic oligonucleotide
agtcaaagccccaagccacccgcgagcacaaccccatcacacgcaccggaatcatccac

SEQ ID NO: 326581 - DNA, 59 bp, Artificial
  Synthetic oligonucleotide
agtcaaagccctaagccacccgtgagcaccactctaccacacacaccagaagcctccac

SEQ ID NO: 326582 - DNA, 51 bp, Artificial
  Synthetic oligonucleotide
agtcaaaggaggggttctaagaatttcaggaggagggccttcaggttttcc

SEQ ID NO: 326583 - DNA, 60 bp, Artificial
  Synthetic oligonucleotide
agtcaaagttaatgtggtaggatgtactcagagtttaactgcgcgttatgtgccacagcc

SEQ ID NO: 326584 - DNA, 60 bp, Artificial
  Synthetic oligonucleotide
agtcaaatcagttgagttgaatgcccctaattatcactacgaggaatgctcctgttatct

SEQ ID NO: 326585 - DNA, 57 bp, Artificial
  Synthetic oligonucleotide
agtcaacaaactccacggaaaccgtggatacgctaatggagaacaatgttcctgtga

SEQ ID NO: 326586 - DNA, 54 bp, Artificial
  Synthetic oligonucleotide
agtcaacaaactccacggaaactgttgatacactaatagaaaacaatgttccgg

SEQ ID NO: 326587 - DNA, 57 bp, Artificial
  Synthetic oligonucleotide
agtcaacaaactccacggaaactgttgatacgctaacagaaaccagtgttcctgtga

SEQ ID NO: 326588 - DNA, 58 bp, Artificial
  Synthetic oligonucleotide
agtcaacaatttcagttataacggtggatcattaccaacagatttcgtaatatcacga

SEQ ID NO: 326589 - DNA, 60 bp, Artificial
  Synthetic oligonucleotide
agtcaacagctctaccatacgagctaataaggtacggagcagtcctcgtgtgtgtgccta

SEQ ID NO: 326590 - DNA, 53 bp, Artificial
  Synthetic oligonucleotide
agtcaacataaaacgcgggggtccgaaaaggaactcagacccacaacaataca

SEQ ID NO: 326591 - DNA, 58 bp, Artificial
  Synthetic oligonucleotide
agtcaaccagattctgtaccctgaggtacacctcgatagcccaatagtgactaacaag

SEQ ID NO: 326592 - DNA, 53 bp, Artificial
  Synthetic oligonucleotide
agtcaacccaatcggagcaggtcatatattaagttaaaacgtctacgttttaa

SEQ ID NO: 326593 - DNA, 57 bp, Artificial
  Synthetic oligonucleotide
agtcaacgaatttgttgttataaaaccaggtgcattatgtgttatagacacccctga

SEQ ID NO: 326594 - DNA, 56 bp, Artificial
  Synthetic oligonucleotide
agtcaacgacgcattcaagacggcttttgacctcgacggcgctcttctggacgggt

SEQ ID NO: 326595 - DNA, 54 bp, Artificial
  Synthetic oligonucleotide
agtcaacgcaggatttgtctgcaatatccacggatcaagggaaattgcgtggag

SEQ ID NO: 326596 - DNA, 56 bp, Artificial
  Synthetic oligonucleotide
agtcaacgcctgtttcatgccctgagtcttctaggttgtcattccccgcctgtttt

SEQ ID NO: 326597 - DNA, 56 bp, Artificial
  Synthetic oligonucleotide
agtcaacggaacagtttgtggacgaatcttggctttatccacacttaacagcgttc

SEQ ID NO: 326598 - DNA, 60 bp, Artificial
  Synthetic oligonucleotide
agtcaacgtacaatgtcattagattttgtaactacgaattatatgtcacttatatctggc

SEQ ID NO: 326599 - DNA, 56 bp, Artificial
  Synthetic oligonucleotide
agtcaacgtcgtggccgtacgggccgaggtagactcggcacgtaccgatatgtcac

SEQ ID NO: 326600 - DNA, 55 bp, Artificial
  Synthetic oligonucleotide
agtcaactaggggtgcctagaggaactcgctgggttctgtacttcggtacggaga

SEQ ID NO: 326601 - DNA, 53 bp, Artificial
  Synthetic oligonucleotide
agtcaactatcctaaaggtagggttgaaggaaggagaatacccagggccagga

SEQ ID NO: 326602 - DNA, 55 bp, Artificial
  Synthetic oligonucleotide
agtcaactatgaaggctgaagaattaacccctggccggtttagaacaatagtatg

SEQ ID NO: 326603 - DNA, 60 bp, Artificial
  Synthetic oligonucleotide
agtcaactatgatcaaatttctcactggattggagatttgcggcacgcgagtgatgtact

SEQ ID NO: 326604 - DNA, 57 bp, Artificial
  Synthetic oligonucleotide
agtcaactcatcccgggaaggattcccctcctttagcttatacttgttgatgagagc

SEQ ID NO: 326605 - DNA, 57 bp, Artificial
  Synthetic oligonucleotide
agtcaactgggtccccactggacgcactacatggtcaattcatgggaagggtgagtg

SEQ ID NO: 326606 - DNA, 51 bp, Artificial
  Synthetic oligonucleotide
agtcaagagatagatttctccgggtggacacttattatgaaaggatgtctg

SEQ ID NO: 326607 - DNA, 60 bp, Artificial
  Synthetic oligonucleotide
agtcaagatcctccgttgcgtctctgcccgagtgacatcagttcgcgctggccccgcaac

SEQ ID NO: 326608 - DNA, 60 bp, Artificial
  Synthetic oligonucleotide
agtcaagatggccacatagatagttatgacgtggatgtaatgacctggcccacatagttt

SEQ ID NO: 326609 - DNA, 58 bp, Artificial
  Synthetic oligonucleotide
agtcaagcctactacacattgaattcgataactcagaccccgacgtcaattgacgatt

SEQ ID NO: 326610 - DNA, 60 bp, Artificial
  Synthetic oligonucleotide
agtcaagcgaagctacgccatagactacctgttcgcgtatcgacttggagaccagcttta

SEQ ID NO: 326611 - DNA, 60 bp, Artificial
  Synthetic oligonucleotide
agtcaagcgcttctggaaggtcaacaatcatgtggtctacaatcatcaagaggctggcaa

SEQ ID NO: 326612 - DNA, 54 bp, Artificial
  Synthetic oligonucleotide
agtcaaggggcaattcgggcaagggcggtctcggggaccgggcaaggctctgaa

SEQ ID NO: 326613 - DNA, 57 bp, Artificial
  Synthetic oligonucleotide
agtcaaggtatcaggaaaaggtggccatagtggttcaacatttaagtgttgccatgg

SEQ ID NO: 326614 - DNA, 57 bp, Artificial
  Synthetic oligonucleotide
agtcaaggtgttaaggattttgaccactgtgtcaaaatgatgggccaacgaatacat

SEQ ID NO: 326615 - DNA, 55 bp, Artificial
  Synthetic oligonucleotide
agtcaagtcactgaattcgcagtaagtctgaataggtgtacactgttcaggtgtt

SEQ ID NO: 326616 - DNA, 60 bp, Artificial
  Synthetic oligonucleotide
agtcaagtccgtccaccagagactttgcatcacgcaagacatctcctttggtttgagtgg

SEQ ID NO: 326617 - DNA, 52 bp, Artificial
  Synthetic oligonucleotide
agtcaagtctaaacaacccagggaccgccgtctattgtcaagcgacggtccc

SEQ ID NO: 326618 - DNA, 59 bp, Artificial
  Synthetic oligonucleotide
agtcaagttggaaagttgcctggcgagtcaaatgaagcatacgaagccagacttaaggc

SEQ ID NO: 326619 - DNA, 55 bp, Artificial
  Synthetic oligonucleotide
agtcaataatgaatgacagtgggagtagtggcacactggtagttgacgcgaggtc

SEQ ID NO: 326620 - DNA, 59 bp, Artificial
  Synthetic oligonucleotide
agtcaataccagacagaaagcagatcttacgtatttaacaatggaacatctcgaaacaa

SEQ ID NO: 326621 - DNA, 57 bp, Artificial
  Synthetic oligonucleotide
agtcaatacctccaagactggtatcaatgaaaactatgccaagaagtttaagactgg

SEQ ID NO: 326622 - DNA, 56 bp, Artificial
  Synthetic oligonucleotide
agtcaatacgacgggaaagtaatgtgtactagttcaattcttaggtctgtagaatg

SEQ ID NO: 326623 - DNA, 60 bp, Artificial
  Synthetic oligonucleotide
agtcaatagagtctgaattcagtgagattgaacaccaaattggtaacgtcatcaattgga

SEQ ID NO: 326624 - DNA, 60 bp, Artificial
  Synthetic oligonucleotide
agtcaatatctgtcgccattgagcgatcgttgaattcagttgaggggcgagagtcctgtc

SEQ ID NO: 326625 - DNA, 59 bp, Artificial
  Synthetic oligonucleotide
agtcaatcagactctacaagaaagggtatgacttcatactcgctacgtagagtaactgt

SEQ ID NO: 326626 - DNA, 58 bp, Artificial
  Synthetic oligonucleotide
agtcaatcgaggcatttggagagagctacatttccgagaagaccaaaggggagatttc

SEQ ID NO: 326627 - DNA, 57 bp, Artificial
  Synthetic oligonucleotide
agtcaatcgcttagcgaatatagcttcctctagtgcgccatcccttcaacatccgac

SEQ ID NO: 326628 - DNA, 60 bp, Artificial
  Synthetic oligonucleotide
agtcaatctgaacaattacaatttacctggacctagcaacgtgcagcaaacagaggcaat

SEQ ID NO: 326629 - DNA, 51 bp, Artificial
  Synthetic oligonucleotide
agtcaatgcaaattgccccaaatacgttaccagatattgttacagaggcat

SEQ ID NO: 326630 - DNA, 54 bp, Artificial
  Synthetic oligonucleotide
agtcaatgcgtcgtcgacgaatggctttatgtttggcaatcctgtgctgtgctt

SEQ ID NO: 326631 - DNA, 55 bp, Artificial
  Synthetic oligonucleotide
agtcaatgctaccatgatattaatgggagctttacagcccggattaccctctccg

SEQ ID NO: 326632 - DNA, 55 bp, Artificial
  Synthetic oligonucleotide
agtcaatggagtaaatgattttagttataatggcgggactttacctactgatttc

SEQ ID NO: 326633 - DNA, 60 bp, Artificial
  Synthetic oligonucleotide
agtcaatgtcctgtgtgagccagtgatcgtcaaatctatccagcacttgtgaagattcaa

SEQ ID NO: 326634 - DNA, 59 bp, Artificial
  Synthetic oligonucleotide
agtcaattaacgtatggttagaggatcaagttacagtagcaatgcgtgaggagccggga

SEQ ID NO: 326635 - DNA, 60 bp, Artificial
  Synthetic oligonucleotide
agtcaattgctgaggcaataatcgttgctatggtcttttcacaggaggattgtatgataa

SEQ ID NO: 326636 - DNA, 60 bp, Artificial
  Synthetic oligonucleotide
agtcaatttcattgtcacctcagcagaagtctaagcgaaggctctttgcagagcaggaca

SEQ ID NO: 326637 - DNA, 60 bp, Artificial
  Synthetic oligonucleotide
agtcaatttgggatgcaaaaacacatgctgattacgtttcagctagaagatttgtacctg

SEQ ID NO: 326638 - DNA, 55 bp, Artificial
  Synthetic oligonucleotide
agtcacaaaacgagtttcactgcgctgtggagtataagatctgggaaaagcttgg

SEQ ID NO: 326639 - DNA, 54 bp, Artificial
  Synthetic oligonucleotide
agtcacaaaatggcgggcgcggctgggacacaaaatggcggcgtagtggggggg

SEQ ID NO: 326640 - DNA, 54 bp, Artificial
  Synthetic oligonucleotide
agtcacaacgggcgtgcctggcattgcttggctgtcgcgtgaccctacgctaga

SEQ ID NO: 326641 - DNA, 58 bp, Artificial
  Synthetic oligonucleotide
agtcacaagttaatgctcacgttacatccttcggatcccgtttatttaatcagatgtc

SEQ ID NO: 326642 - DNA, 60 bp, Artificial
  Synthetic oligonucleotide
agtcacaatcacttcaattgttgttagtgcacagaattatggcattaatttaccaataac

SEQ ID NO: 326643 - DNA, 55 bp, Artificial
  Synthetic oligonucleotide
agtcacagctacactagcattacttggttgtgacggatctccatggaggtacctc

SEQ ID NO: 326644 - DNA, 60 bp, Artificial
  Synthetic oligonucleotide
agtcacagctgtacgggatgcaggtgtatgccgacactccagcaaaggagtcggtcacct

SEQ ID NO: 326645 - DNA, 54 bp, Artificial
  Synthetic oligonucleotide
agtcacaggggcccccgttaagaaaagatctggcatgagtaaactagcactcgt

SEQ ID NO: 326646 - DNA, 59 bp, Artificial
  Synthetic oligonucleotide
agtcacaggttttgtacgacatagctccgatgtatgaacaagctcatccatctatgcgt

SEQ ID NO: 326647 - DNA, 59 bp, Artificial
  Synthetic oligonucleotide
agtcacatatcgtacgacctcaagacgtcagacgggacggttttgcactataagctcga

SEQ ID NO: 326648 - DNA, 60 bp, Artificial
  Synthetic oligonucleotide
agtcacatctgacctgaaatgttttggcaacactgctcttgcaaagtgtaacttaaatca

SEQ ID NO: 326649 - DNA, 57 bp, Artificial
  Synthetic oligonucleotide
agtcacattggagtgcgcgcacaaccgcgagcactggaaacatctgctgttcggggc

SEQ ID NO: 326650 - DNA, 55 bp, Artificial
  Synthetic oligonucleotide
agtcacatttagtatagggagggatgagtatcgtgtattcagagcaatcaaaccg

SEQ ID NO: 326651 - DNA, 57 bp, Artificial
  Synthetic oligonucleotide
agtcaccaacgccatcgcattcaccggggtatccgcagtgggaacagtaaccaccgc

SEQ ID NO: 326652 - DNA, 60 bp, Artificial
  Synthetic oligonucleotide
agtcaccaatgatcctgaggtcttgaagcagaagtccaacatccccacgcacctggacgt

SEQ ID NO: 326653 - DNA, 55 bp, Artificial
  Synthetic oligonucleotide
agtcaccatcctcaatatgggtgtttgctggagcaccagatcgctgtccaccaac

SEQ ID NO: 326654 - DNA, 56 bp, Artificial
  Synthetic oligonucleotide
agtcacccccggtattgtgcagtatcagtttaccgcaggtgtgcccgggtctggaa

SEQ ID NO: 326655 - DNA, 60 bp, Artificial
  Synthetic oligonucleotide
agtcacccgacatgcagatgtcatacctgtgcgcaggagaggcgacactcggggggccct

SEQ ID NO: 326656 - DNA, 59 bp, Artificial
  Synthetic oligonucleotide
agtcaccgtgccacatcccaacatcgaggaggtggctctgtccaacaccggagaggtcc

SEQ ID NO: 326657 - DNA, 60 bp, Artificial
  Synthetic oligonucleotide
agtcacctattctatcactccgctggatttaccagccataattcaaagactccatggctt

SEQ ID NO: 326658 - DNA, 56 bp, Artificial
  Synthetic oligonucleotide
agtcacctcggcgaatcataggtgaaccgtgccacgggcctgcctaccgaaaggaa

SEQ ID NO: 326659 - DNA, 60 bp, Artificial
  Synthetic oligonucleotide
agtcacgacgaagaatcagccatttgtcgagggtgtgatcaatgagtcgggaaaagagtc

SEQ ID NO: 326660 - DNA, 60 bp, Artificial
  Synthetic oligonucleotide
agtcacgagagagccttacgttagttgcgacaatgataattgctggtcctttgctctcgc

SEQ ID NO: 326661 - DNA, 60 bp, Artificial
  Synthetic oligonucleotide
agtcacggtaatttagccattactgccacattgaaagagcgattctatatacgtcatgtt

SEQ ID NO: 326662 - DNA, 60 bp, Artificial
  Synthetic oligonucleotide
agtcacgtgcacgtactgttgcaggtgtgtcaattcttagctcgatgacaaaccgccaat

SEQ ID NO: 326663 - DNA, 54 bp, Artificial
  Synthetic oligonucleotide
agtcacgttgactggtataaggacccggacaaattcttcgaacctgttctgaat

SEQ ID NO: 326664 - DNA, 55 bp, Artificial
  Synthetic oligonucleotide
agtcactcgatcccgagccacagccacgggaccaacgtcctgacctccaccacgg

SEQ ID NO: 326665 - DNA, 55 bp, Artificial
  Synthetic oligonucleotide
agtcactgccactttggcactacttgggtgtgacggatcaccctggagattcctc

SEQ ID NO: 326666 - DNA, 59 bp, Artificial
  Synthetic oligonucleotide
agtcactgggcaaggacccaccaaagttacaccagagatatgaaaaagcatttgagcgc

SEQ ID NO: 326667 - DNA, 55 bp, Artificial
  Synthetic oligonucleotide
agtcactgttaggcaagatcttgagagacaacttggagatttaagggaagaattc

SEQ ID NO: 326668 - DNA, 60 bp, Artificial
  Synthetic oligonucleotide
agtcactgttatgacgaaatcacaacaccacccaagcagatagatccagacatagtcact

SEQ ID NO: 326669 - DNA, 50 bp, Artificial
  Synthetic oligonucleotide
agtcacttctataagccttagttcactcctctcggttggagttaaggccc

SEQ ID NO: 326670 - DNA, 51 bp, Artificial
  Synthetic oligonucleotide
agtcagaattccaaattacttggccaggactggtggtttgcttcagaattg

SEQ ID NO: 326671 - DNA, 60 bp, Artificial
  Synthetic oligonucleotide
agtcagacaagatctgcattgggtatcatgccaacaattcaacaacacaggtagatacga

SEQ ID NO: 326672 - DNA, 52 bp, Artificial
  Synthetic oligonucleotide
agtcagacctccagaactccaacttttcatttatggcgacattcattttcac

SEQ ID NO: 326673 - DNA, 55 bp, Artificial
  Synthetic oligonucleotide
agtcagagacgagcattggccgccccaaccagaccggggcaacatactagtgggc

SEQ ID NO: 326674 - DNA, 56 bp, Artificial
  Synthetic oligonucleotide
agtcagagatcgtagaccgtatagttctcctatggactttggtcaagtttttaata

SEQ ID NO: 326675 - DNA, 60 bp, Artificial
  Synthetic oligonucleotide
agtcagagcatgtatcgagggtcagccagtagaagtattactagacacaggagctgacga

SEQ ID NO: 326676 - DNA, 60 bp, Artificial
  Synthetic oligonucleotide
agtcagaggcattgtgtaggattccctgtcccatgtcaataagactggatatatgagatg

SEQ ID NO: 326677 - DNA, 60 bp, Artificial
  Synthetic oligonucleotide
agtcagatgcaaagttggatgataggattgtacaaggtaagggatcacgttatatgtctg

SEQ ID NO: 326678 - DNA, 55 bp, Artificial
  Synthetic oligonucleotide
agtcagattgaaagttggcaggctacgagggcgagtgtacttacgcacttaggtg

SEQ ID NO: 326679 - DNA, 53 bp, Artificial
  Synthetic oligonucleotide
agtcagattgggttggagttcaccaagattgggctcagctccgaccagttgac

SEQ ID NO: 326680 - DNA, 59 bp, Artificial
  Synthetic oligonucleotide
agtcagatttaccaatagagaactgtgatgccacatgtcagactattgcaggggtctta

SEQ ID NO: 326681 - DNA, 57 bp, Artificial
  Synthetic oligonucleotide
agtcagcatcgttaaaggggacgtgttgcactcctgtacggtcgaaaagagggtgca

SEQ ID NO: 326682 - DNA, 57 bp, Artificial
  Synthetic oligonucleotide
agtcagcccagacaagcgcagtactttagaagagagaagttccccgatagcgaccga

SEQ ID NO: 326683 - DNA, 52 bp, Artificial
  Synthetic oligonucleotide
agtcagcgtaaagctgtcctgtccaccctagtcggtaggtacggccgccgta

SEQ ID NO: 326684 - DNA, 55 bp, Artificial
  Synthetic oligonucleotide
agtcagctggtctcctgggaataagtgccatgtttctattcacaatcggtacttc

SEQ ID NO: 326685 - DNA, 60 bp, Artificial
  Synthetic oligonucleotide
agtcagctggtctgctgtatttattcgggagcagctatcgatctgcactcttcgtctgga

SEQ ID NO: 326686 - DNA, 56 bp, Artificial
  Synthetic oligonucleotide
agtcaggaactcacctgagcataacttggctaagcaaaagagtttgtaagttttta

SEQ ID NO: 326687 - DNA, 53 bp, Artificial
  Synthetic oligonucleotide
agtcaggaaggatagatttccattggctactacttgatccgaacgacacagtg

SEQ ID NO: 326688 - DNA, 60 bp, Artificial
  Synthetic oligonucleotide
agtcaggaaggcagcctaccccaatgactccacctttgagaaacactcatcctcaggcca

SEQ ID NO: 326689 - DNA, 60 bp, Artificial
  Synthetic oligonucleotide
agtcaggaattatcacacaattaaacgatgtgtatcatgctttccaaagtgtacacgttg

SEQ ID NO: 326690 - DNA, 55 bp, Artificial
  Synthetic oligonucleotide
agtcaggacaccgagagggatcaataccaagagcgggggatcgtcggaggaaagt

SEQ ID NO: 326691 - DNA, 60 bp, Artificial
  Synthetic oligonucleotide
agtcaggagtgttgcagcagccctattctggtacagaagtgggatgtcatccgctgtcca

SEQ ID NO: 326692 - DNA, 55 bp, Artificial
  Synthetic oligonucleotide
agtcaggagttccaattgacatagtggacactgtctgtaaatggccggacttctt

SEQ ID NO: 326693 - DNA, 60 bp, Artificial
  Synthetic oligonucleotide
agtcaggatgcaggagttgatgacatacatgttcttttaaggccgcctgagtcgggacta

SEQ ID NO: 326694 - DNA, 54 bp, Artificial
  Synthetic oligonucleotide
agtcaggcccatagtctttggatagtatttttatagtgggctgtttaaatttaa

SEQ ID NO: 326695 - DNA, 58 bp, Artificial
  Synthetic oligonucleotide
agtcagggaggcccagagggtcttagagtgttactacatttggacctctgaagatcag

SEQ ID NO: 326696 - DNA, 55 bp, Artificial
  Synthetic oligonucleotide
agtcagggagtccaggaggacgcggcgagcctgagagccttcacagaggctatga

SEQ ID NO: 326697 - DNA, 50 bp, Artificial
  Synthetic oligonucleotide
agtcaggggaatcccggaccatttgttcctgggacgggataagcaatcag

SEQ ID NO: 326698 - DNA, 57 bp, Artificial
  Synthetic oligonucleotide
agtcaggtgaatggatttcagggattttcaatggtaattggatagtacttattgtct

SEQ ID NO: 326699 - DNA, 60 bp, Artificial
  Synthetic oligonucleotide
agtcagtaagatgggagtagatgaatactccagcacagagagggtggtagtgagcattga

SEQ ID NO: 326700 - DNA, 51 bp, Artificial
  Synthetic oligonucleotide
agtcagtacacaggcttgtccaaagatatcctttgaccctattgctatacc

SEQ ID NO: 326701 - DNA, 60 bp, Artificial
  Synthetic oligonucleotide
agtcagtagtggaatcagaaaagtactgtttttagatggcatagataaagctcaagaaga

SEQ ID NO: 326702 - DNA, 54 bp, Artificial
  Synthetic oligonucleotide
agtcagtccacccgtgagggtcgagtatgtcgtcccaacttgtctcgagtgacc

SEQ ID NO: 326703 - DNA, 60 bp, Artificial
  Synthetic oligonucleotide
agtcagtcttgagaatgttagccacgagtcgatcagagaaagatgccgggtggatctcaa

SEQ ID NO: 326704 - DNA, 60 bp, Artificial
  Synthetic oligonucleotide
agtcagtgttggtcaatacttatcagtggatcatcagaaattgggaaactgtgaaaattc

SEQ ID NO: 326705 - DNA, 50 bp, Artificial
  Synthetic oligonucleotide
agtcagttcaccaagggtagcaatagtaccaccgatgttagactgcatgg

SEQ ID NO: 326706 - DNA, 57 bp, Artificial
  Synthetic oligonucleotide
agtcagtttctgtttcgtagtgaggtcatgcctctttttgaacgaaagatgtctggt

SEQ ID NO: 326707 - DNA, 60 bp, Artificial
  Synthetic oligonucleotide
agtcatagattataatgacgctggaataccaacttctgtgaatgaacttcgtgaatattc

SEQ ID NO: 326708 - DNA, 60 bp, Artificial
  Synthetic oligonucleotide
agtcatagcatcttcctttctagaattggctccttcaactgcactaaatcctgtactagg

SEQ ID NO: 326709 - DNA, 60 bp, Artificial
  Synthetic oligonucleotide
agtcatataccgaacaaacacaataggtgatgactatataccaacatgcgattgcactga

SEQ ID NO: 326710 - DNA, 60 bp, Artificial
  Synthetic oligonucleotide
agtcatatatgcactgatcataaatgtagtgagttactaacatgcagacaacattatata

SEQ ID NO: 326711 - DNA, 54 bp, Artificial
  Synthetic oligonucleotide
agtcatatttcctaacaaaagtaccggccacacgtttatcttatctctagggcc

SEQ ID NO: 326712 - DNA, 60 bp, Artificial
  Synthetic oligonucleotide
agtcatcaagtgggctgccatatgtaggtcgcacaaagggggaaacgattggagagatga

SEQ ID NO: 326713 - DNA, 50 bp, Artificial
  Synthetic oligonucleotide
agtcatcacgaagttgggtgagagaaagatcctaagacccaggtgggcgg

SEQ ID NO: 326714 - DNA, 60 bp, Artificial
  Synthetic oligonucleotide
agtcatcaggcagcagcagatgctatgcaatttgacctttctgaaatgatacaatgggcc

SEQ ID NO: 326715 - DNA, 60 bp, Artificial
  Synthetic oligonucleotide
agtcatcaggccttcgaagagtcctcacaggaccaatgcattcattgtggaatcgggtac

SEQ ID NO: 326716 - DNA, 60 bp, Artificial
  Synthetic oligonucleotide
agtcatccaagatagcatatccttgactaagagtatgctagcgatgagtcaactgtcttt

SEQ ID NO: 326717 - DNA, 60 bp, Artificial
  Synthetic oligonucleotide
agtcatcccacactgttgactacgcgtaagctaggaccgcgagctgaacccacgtctgaa

SEQ ID NO: 326718 - DNA, 60 bp, Artificial
  Synthetic oligonucleotide
agtcatcctcaggccatgcagtggaattccactgccttccaccaaactctgcaggatccc

SEQ ID NO: 326719 - DNA, 60 bp, Artificial
  Synthetic oligonucleotide
agtcatcctcaggccatgcctgctggtggctccagttcaggaacagtaaaccctgctccg

SEQ ID NO: 326720 - DNA, 58 bp, Artificial
  Synthetic oligonucleotide
agtcatcctcagggccctctaggcaaccagaagtggatacctgatcctgattcttggt

SEQ ID NO: 326721 - DNA, 55 bp, Artificial
  Synthetic oligonucleotide
agtcatcctgggtttgtgcaaagcgtatccggatatgcctaggatccacggtgcg

SEQ ID NO: 326722 - DNA, 55 bp, Artificial
  Synthetic oligonucleotide
agtcatcgatggcaaggcgcgagtcatgctgtctgacaagtgctacgctgcccca

SEQ ID NO: 326723 - DNA, 60 bp, Artificial
  Synthetic oligonucleotide
agtcatctcactcggtatgccattgctcggagcgatcgtggtaaccatcggtactattat

SEQ ID NO: 326724 - DNA, 60 bp, Artificial
  Synthetic oligonucleotide
agtcatctctttcttttgtagaatgatgccaaatgctctggctaggctttcatcaaattt

SEQ ID NO: 326725 - DNA, 55 bp, Artificial
  Synthetic oligonucleotide
agtcatctgacccaagtgctgatttgtatcaccgggtagcgcccgagggcaatag

SEQ ID NO: 326726 - DNA, 60 bp, Artificial
  Synthetic oligonucleotide
agtcatgaggataggccagggacttggcttagatgattccttgcgcaatttgtataaatt

SEQ ID NO: 326727 - DNA, 60 bp, Artificial
  Synthetic oligonucleotide
agtcatgagggagaggggataccgctatacgatgcaatcaactgcatgaagacatttttc

SEQ ID NO: 326728 - DNA, 60 bp, Artificial
  Synthetic oligonucleotide
agtcatgagggcgaggggatacctctgtatgatgcaatcaaatgtatgaagacctttttc

SEQ ID NO: 326729 - DNA, 60 bp, Artificial
  Synthetic oligonucleotide
agtcatgcagcccttggctcaatgttcgaagagcagcaactatggagcagtgcaaaggaa

SEQ ID NO: 326730 - DNA, 55 bp, Artificial
  Synthetic oligonucleotide
agtcatggatggaaagcaagttcagatagagttagacaatgcagtaggcagcccc

SEQ ID NO: 326731 - DNA, 52 bp, Artificial
  Synthetic oligonucleotide
agtcatgggtgaatatgccgaccacattgctttaatcgtggcagcatttact

SEQ ID NO: 326732 - DNA, 58 bp, Artificial
  Synthetic oligonucleotide
agtcatggtaacctggcaatagtatcctctctgaaagagcgtttttacatacgtcacg

SEQ ID NO: 326733 - DNA, 55 bp, Artificial
  Synthetic oligonucleotide
agtcatgtcaacggaagtggccccgaccaacggccttactgctggcactacgccc

SEQ ID NO: 326734 - DNA, 54 bp, Artificial
  Synthetic oligonucleotide
agtcatgtgtgttagtgatgtaacgcgaggaaccggactcacacatcgtgtagg

SEQ ID NO: 326735 - DNA, 60 bp, Artificial
  Synthetic oligonucleotide
agtcattaagagacgtagccctggacatcgggactccagatctgtatactgtctctgtta

SEQ ID NO: 326736 - DNA, 60 bp, Artificial
  Synthetic oligonucleotide
agtcattacatcagactccacaatgaaccagatttcccgttggttatggcattatactct

SEQ ID NO: 326737 - DNA, 53 bp, Artificial
  Synthetic oligonucleotide
agtcattagagtacaatatgagggagacggctctccatgcaagatcccctttg

SEQ ID NO: 326738 - DNA, 60 bp, Artificial
  Synthetic oligonucleotide
agtcattagcagggatggctaggttcagctgcgcatgcacaaaccacaacaataaactaa

SEQ ID NO: 326739 - DNA, 60 bp, Artificial
  Synthetic oligonucleotide
agtcattagttgcatgtcaactagccatagtaaatacgatagtgtatccagcgtttggaa

SEQ ID NO: 326740 - DNA, 57 bp, Artificial
  Synthetic oligonucleotide
agtcattattcaagcgtaatgttagcaaacgacgaccatttcaaaccgtgaagatgg

SEQ ID NO: 326741 - DNA, 60 bp, Artificial
  Synthetic oligonucleotide
agtcattccaaacggatctaaatgtgatcgatacataccgggcttttagcactgcattga

SEQ ID NO: 326742 - DNA, 57 bp, Artificial
  Synthetic oligonucleotide
agtcattctcggggaccgcctcgttgtagctagaaacaaacatcgtcatcgcagaag

SEQ ID NO: 326743 - DNA, 51 bp, Artificial
  Synthetic oligonucleotide
agtcattgatgttatgacagcaatattccaagggccaattagtctagaggg

SEQ ID NO: 326744 - DNA, 60 bp, Artificial
  Synthetic oligonucleotide
agtcattgtgcacaactgtgcactgcccaaaacagagcataagcaccaatatagtgcgtc

SEQ ID NO: 326745 - DNA, 55 bp, Artificial
  Synthetic oligonucleotide
agtcattgttggtaagtagatacgtttacctccgataacgaaccattgctcagtg

SEQ ID NO: 326746 - DNA, 58 bp, Artificial
  Synthetic oligonucleotide
agtcatttatctttacaaaacacgtctgcacactccactttgcataaagcgtacccaa

SEQ ID NO: 326747 - DNA, 57 bp, Artificial
  Synthetic oligonucleotide
agtcatttccacacccgcctccaaggtgcgtcgccgtctgaacttcgacagccctta

SEQ ID NO: 326748 - DNA, 55 bp, Artificial
  Synthetic oligonucleotide
agtcatttgatagcaatatcgtgcttgtgactatgcctaatcgtattcctgagtg

SEQ ID NO: 326749 - DNA, 50 bp, Artificial
  Synthetic oligonucleotide
agtcatttgatcatcccacacacactagcaggaccacgctcttggcacaa

SEQ ID NO: 326750 - DNA, 60 bp, Artificial
  Synthetic oligonucleotide
agtcatttggcagcaatagatcgtcaaatcatacaggatactctcaatgggatgatcatt

SEQ ID NO: 326751 - DNA, 59 bp, Artificial
  Synthetic oligonucleotide
agtcatttttcagctccgctcgctcctacaaaagactcctgctctttccagacagaact

SEQ ID NO: 326752 - DNA, 57 bp, Artificial
  Synthetic oligonucleotide
agtccaaagcgctaaagacactacgctgtcaagccgtaattgggttatgaaagatcc

SEQ ID NO: 326753 - DNA, 59 bp, Artificial
  Synthetic oligonucleotide
agtccaaattactttgtgatgtgcctttggactactacggcttcagacttgctcaccaa

SEQ ID NO: 326754 - DNA, 55 bp, Artificial
  Synthetic oligonucleotide
agtccaacaccatgggaccccaattttaaagttgctcagggtcaatctgatttcc

SEQ ID NO: 326755 - DNA, 60 bp, Artificial
  Synthetic oligonucleotide
agtccaagagcatacaacgacaaagatctcctcagctaagtgaacactcctcacgcctca

SEQ ID NO: 326756 - DNA, 60 bp, Artificial
  Synthetic oligonucleotide
agtccaagcatatatcgagggtcagccagtagaagtactactagacacaggggctgacga

SEQ ID NO: 326757 - DNA, 50 bp, Artificial
  Synthetic oligonucleotide
agtccaagtgactgctactggttcatacagcatgaacatggtcaagatac

SEQ ID NO: 326758 - DNA, 54 bp, Artificial
  Synthetic oligonucleotide
agtccaatctaaagaaaccggtcccgggcactataaattgtctaacaagtgcga

SEQ ID NO: 326759 - DNA, 58 bp, Artificial
  Synthetic oligonucleotide
agtccacacgagagggctgaccggtatagaggtaacatgtaatccagtctgagtagag

SEQ ID NO: 326760 - DNA, 57 bp, Artificial
  Synthetic oligonucleotide
agtccacaggcgcgaagcacgatctcagcagcgttcggcataaagcctactgctgga

SEQ ID NO: 326761 - DNA, 59 bp, Artificial
  Synthetic oligonucleotide
agtccacatgtgtaaaatccacatctttatgcgagaattgtttggatagtattttgacc

SEQ ID NO: 326762 - DNA, 59 bp, Artificial
  Synthetic oligonucleotide
agtccacatgttgaaaagtcccacatctttgtccgtgaactgtttggataggatcttca

SEQ ID NO: 326763 - DNA, 55 bp, Artificial
  Synthetic oligonucleotide
agtccacatttcgaaagcgagcgacccaaagattgacgggtgtgtggagtaccag

SEQ ID NO: 326764 - DNA, 59 bp, Artificial
  Synthetic oligonucleotide
agtccaccaagcctcagaagagtgagccccaaccatactcacaaacctatggtaaggca

SEQ ID NO: 326765 - DNA, 54 bp, Artificial
  Synthetic oligonucleotide
agtccaccaccctgcaactctaaaggaacaccaagacttgtacaaaaaggacag

SEQ ID NO: 326766 - DNA, 60 bp, Artificial
  Synthetic oligonucleotide
agtccacgattcagaagcatatgaacggcgaagacatgcggtgattagagtctctctaaa

SEQ ID NO: 326767 - DNA, 60 bp, Artificial
  Synthetic oligonucleotide
agtccacgtgcgagaagtccacatccttctcggtgaattgcttggataagatcttgaccg

SEQ ID NO: 326768 - DNA, 57 bp, Artificial
  Synthetic oligonucleotide
agtccactacattaatgataaggggaaaatagtcttgtccaaatgtagtgagcaaaa

SEQ ID NO: 326769 - DNA, 51 bp, Artificial
  Synthetic oligonucleotide
agtccactgccgtatggccgcccccagtcaacgtaaggcggtcctttctac

SEQ ID NO: 326770 - DNA, 60 bp, Artificial
  Synthetic oligonucleotide
agtccagagttcttcaacagggaagatatgcaacaatccacatagaatccttgatggaag

SEQ ID NO: 326771 - DNA, 56 bp, Artificial
  Synthetic oligonucleotide
agtccagatctggaagattagaaaacactggtgtattcccaacgctttcctcaggt

SEQ ID NO: 326772 - DNA, 56 bp, Artificial
  Synthetic oligonucleotide
agtccagattgaatacaattacgatcccacacgggcacgaaaagaccgtatcctta

SEQ ID NO: 326773 - DNA, 53 bp, Artificial
  Synthetic oligonucleotide
agtccagcccttttcgaacgagcactacaggaaccccttcgccaagtttccgc

SEQ ID NO: 326774 - DNA, 55 bp, Artificial
  Synthetic oligonucleotide
agtccagcgaagcgaagacgagcagaagcccctgactccaccggatctgctgtcc

SEQ ID NO: 326775 - DNA, 60 bp, Artificial
  Synthetic oligonucleotide
agtccaggaatatggcagctagattgtacacatttagaaggaaaagttatcctggtagca

SEQ ID NO: 326776 - DNA, 60 bp, Artificial
  Synthetic oligonucleotide
agtccaggaatatggcagttagactgcacacatttagaaggaaaaattatcctagtggca

SEQ ID NO: 326777 - DNA, 60 bp, Artificial
  Synthetic oligonucleotide
agtccaggaattctttcggtcattcagattcttcctgctcgtatctccctcggcagttgc

SEQ ID NO: 326778 - DNA, 59 bp, Artificial
  Synthetic oligonucleotide
agtccaggacccattgctaggccttgtaacaccttggaaacaggatgtgtatgactcaa

SEQ ID NO: 326779 - DNA, 57 bp, Artificial
  Synthetic oligonucleotide
agtccaggggtgtggcaattagattgcacacatttagaagggaaagttatcctggta

SEQ ID NO: 326780 - DNA, 55 bp, Artificial
  Synthetic oligonucleotide
agtccaggtaattcaagcagcggagccattggcgaccgcttacctgtgcggcatc

SEQ ID NO: 326781 - DNA, 60 bp, Artificial
  Synthetic oligonucleotide
agtccagtttctcagagatgcattttcctgcttgtctaggaaatctttatagctggctcc

SEQ ID NO: 326782 - DNA, 60 bp, Artificial
  Synthetic oligonucleotide
agtccataacacgagtgtatggtctagagtggacatagcttggatacagacaccttcagt

SEQ ID NO: 326783 - DNA, 59 bp, Artificial
  Synthetic oligonucleotide
agtccataattttaccgtcagcgttacatagaactcgccacttgctagccgattcttga

SEQ ID NO: 326784 - DNA, 60 bp, Artificial
  Synthetic oligonucleotide
agtccatacgagcttgtggcccgcaatataagacgccatgataattcgaatttgcaagcc

SEQ ID NO: 326785 - DNA, 55 bp, Artificial
  Synthetic oligonucleotide
agtccatccaatccgatagggattttagtacttcagtgaactccttttcgtagga

SEQ ID NO: 326786 - DNA, 59 bp, Artificial
  Synthetic oligonucleotide
agtccatcttaatatgcgatagagaggtaagggtacctgatgtaggaacacctgcaatt

SEQ ID NO: 326787 - DNA, 54 bp, Artificial
  Synthetic oligonucleotide
agtccatgcatccgcgtaagcggtgcacgtgagcaaggtacaacccgccgtacc

SEQ ID NO: 326788 - DNA, 55 bp, Artificial
  Synthetic oligonucleotide
agtccattctcaagcagactacgcccgtattacgcgatcctgaagtttggacggg

SEQ ID NO: 326789 - DNA, 54 bp, Artificial
  Synthetic oligonucleotide
agtcccaagaggacaactatccaccagaggagttcaaattgcttcgaacgagaa

SEQ ID NO: 326790 - DNA, 60 bp, Artificial
  Synthetic oligonucleotide
agtcccaagaggacaattgtccaccagaggagttcagattgcctcaaatgagaacatgga

SEQ ID NO: 326791 - DNA, 55 bp, Artificial
  Synthetic oligonucleotide
agtcccaagcctgattaaatcagtgcagtccaaactttcaaagaactttgttcgg

SEQ ID NO: 326792 - DNA, 56 bp, Artificial
  Synthetic oligonucleotide
agtcccaaggcgcacaagcatgggggggttaccataacgatctaggagacagttta

SEQ ID NO: 326793 - DNA, 60 bp, Artificial
  Synthetic oligonucleotide
agtcccagatgcttggtacttctattacactggaacaggaccagccgctgacctgaattg

SEQ ID NO: 326794 - DNA, 60 bp, Artificial
  Synthetic oligonucleotide
agtcccagcactccaagctgctgaaattggagcatcatcaaatgctagtgacgagagtat

SEQ ID NO: 326795 - DNA, 56 bp, Artificial
  Synthetic oligonucleotide
agtcccaggtgcattagagatggatcgtactgaagcgtttgttcttccgtttaccg

SEQ ID NO: 326796 - DNA, 60 bp, Artificial
  Synthetic oligonucleotide
agtcccagtacagggggcgtcaatactgttcgaagtcatgcaaggctgaccataagcttc

SEQ ID NO: 326797 - DNA, 55 bp, Artificial
  Synthetic oligonucleotide
agtcccagttgagatagttggaagaaagcggaaagtggtctcacgaattcaaccc

SEQ ID NO: 326798 - DNA, 59 bp, Artificial
  Synthetic oligonucleotide
agtcccatcacaattaggcgggttcaattacatgagtctctctaggttgttcgtgcgta

SEQ ID NO: 326799 - DNA, 55 bp, Artificial
  Synthetic oligonucleotide
agtcccctgcgcacgataacctgtgtcccctatataaggaattacactgaggccg

SEQ ID NO: 326800 - DNA, 53 bp, Artificial
  Synthetic oligonucleotide
agtccccttcttctcatgccaacgtgggtacaagggagtttggcggggagacg

SEQ ID NO: 326801 - DNA, 56 bp, Artificial
  Synthetic oligonucleotide
agtcccctttttctcgtgtcagcgcggatacaggggagtctggcggggagacggca

SEQ ID NO: 326802 - DNA, 55 bp, Artificial
  Synthetic oligonucleotide
agtcccgacgtgtgtatatcccgcacaccgacagttggttaggaccacctaatgt

SEQ ID NO: 326803 - DNA, 60 bp, Artificial
  Synthetic oligonucleotide
agtcccggcaaggagtttatggaccagatcaaattagtagcaggatttgcacagatgact

SEQ ID NO: 326804 - DNA, 56 bp, Artificial
  Synthetic oligonucleotide
agtcccgtcagcgcgaattcagagaagttcttttgatagatcttgtggtttaaaaa

SEQ ID NO: 326805 - DNA, 60 bp, Artificial
  Synthetic oligonucleotide
agtcccgtgcgaaaatccgtgatgacattcattatgaattgtgaagtgacacttacaggg

SEQ ID NO: 326806 - DNA, 51 bp, Artificial
  Synthetic oligonucleotide
agtccctcaggctgttaaggattatctatcagtgcgatataacttttcgta

SEQ ID NO: 326807 - DNA, 60 bp, Artificial
  Synthetic oligonucleotide
agtccctgcactcacagcaaatgaaactggagctacactaccaacaacaccctcagacaa

SEQ ID NO: 326808 - DNA, 59 bp, Artificial
  Synthetic oligonucleotide
agtccctgccctttgccgttcctctctccttgaccaactgaacaatgcgctttggatca

SEQ ID NO: 326809 - DNA, 53 bp, Artificial
  Synthetic oligonucleotide
agtccctgtcgcgtatgccgctcaggggtacaaagtgctagtgcttaatccct

SEQ ID NO: 326810 - DNA, 56 bp, Artificial
  Synthetic oligonucleotide
agtcccttatatacataaagcctctaggactctaaaggacaggtgccctaatcgcg

SEQ ID NO: 326811 - DNA, 52 bp, Artificial
  Synthetic oligonucleotide
agtccctttcctctcgtgtcaacgtgggtacaagggggtctggcggggagac

SEQ ID NO: 326812 - DNA, 55 bp, Artificial
  Synthetic oligonucleotide
agtccctttgggcccccatgaattccttgaagtgcttgagatagtgggggtcgac

SEQ ID NO: 326813 - DNA, 60 bp, Artificial
  Synthetic oligonucleotide
agtccgagagcacgaatgtcatacgtcgatagaattgactcaatactacgtggcgatgtc

SEQ ID NO: 326814 - DNA, 60 bp, Artificial
  Synthetic oligonucleotide
agtccgagatcttctagataccgcctcagcgctatatcgggatgctttagagtctcctga

SEQ ID NO: 326815 - DNA, 60 bp, Artificial
  Synthetic oligonucleotide
agtccgatagtcaccaataagatagtagccatcctggagtatgctcgaatccctcacgct

SEQ ID NO: 326816 - DNA, 50 bp, Artificial
  Synthetic oligonucleotide
agtccgatcaggctccggatcctcacgatttcattcgtcctcagaatcag

SEQ ID NO: 326817 - DNA, 51 bp, Artificial
  Synthetic oligonucleotide
agtccgcaatccactctcaaggaattctacgcatgagatgtattgggtgtc

SEQ ID NO: 326818 - DNA, 60 bp, Artificial
  Synthetic oligonucleotide
agtccgcatcacgattctctgcaagctctcacttcagacctgactcctacgtttcatcat

SEQ ID NO: 326819 - DNA, 60 bp, Artificial
  Synthetic oligonucleotide
agtccgcatctgaatggccgcctcctattgtacttctagaagcccatgactctccaggcc

SEQ ID NO: 326820 - DNA, 52 bp, Artificial
  Synthetic oligonucleotide
agtccgcatctgtgaactgtctgggtatcacctcgtccctacaagggtatcg

SEQ ID NO: 326821 - DNA, 54 bp, Artificial
  Synthetic oligonucleotide
agtccgcatcttcgttaacgggccctatggtactcctggtcgcccacgactccc

SEQ ID NO: 326822 - DNA, 55 bp, Artificial
  Synthetic oligonucleotide
agtccgcattatggatccaggtgtccccagtaacatgactgcgcagattgctcgc

SEQ ID NO: 326823 - DNA, 53 bp, Artificial
  Synthetic oligonucleotide
agtccgcgaaatgggttaaccgcattttttgacgtccgcatacgattggtccc

SEQ ID NO: 326824 - DNA, 59 bp, Artificial
  Synthetic oligonucleotide
agtccgcggctttgccgcggactggggaggcactgcttatagtgcaaaggctgccttgg

SEQ ID NO: 326825 - DNA, 57 bp, Artificial
  Synthetic oligonucleotide
agtccgcttatgcggatccgagcgatgatcgtttacctcataacactgatcttaaca

SEQ ID NO: 326826 - DNA, 59 bp, Artificial
  Synthetic oligonucleotide
agtccggacctctcatgcgaaggttaccgagcttgaagcatctttgaactgcgaaaggc

SEQ ID NO: 326827 - DNA, 55 bp, Artificial
  Synthetic oligonucleotide
agtccggagtggttgcacgtacctattgtgttttcgagtgactcgagttacaggt

SEQ ID NO: 326828 - DNA, 54 bp, Artificial
  Synthetic oligonucleotide
agtccgggacacacgagacaggaaatatagcgaccgaagggtccactattaact

SEQ ID NO: 326829 - DNA, 52 bp, Artificial
  Synthetic oligonucleotide
agtccgggagctcctggagtcaaaggattcggtttcctagatagtagcaata

SEQ ID NO: 326830 - DNA, 60 bp, Artificial
  Synthetic oligonucleotide
agtccggtaatccatccatactccacataaatgcttatctctacgctgcattaaagggag

SEQ ID NO: 326831 - DNA, 58 bp, Artificial
  Synthetic oligonucleotide
agtccggtcttgcacccggatgagattaaatccatatggttcgactctctcagaggtt

SEQ ID NO: 326832 - DNA, 56 bp, Artificial
  Synthetic oligonucleotide
agtccggtgagaatggccgaagagaacccatctcttttccgacgagtgaaggcaaa

SEQ ID NO: 326833 - DNA, 58 bp, Artificial
  Synthetic oligonucleotide
agtccggtgctcgtcaggctgggatcgacactcagaacgcgggtcatgtggcgacaat

SEQ ID NO: 326834 - DNA, 52 bp, Artificial
  Synthetic oligonucleotide
agtccggttgcaaacggctccggtaaagactcaacaaatccgttgaaccctg

SEQ ID NO: 326835 - DNA, 60 bp, Artificial
  Synthetic oligonucleotide
agtccgtaacaccacttgtgccatggaaattctcagatgagcaagttgacctgtgcggat

SEQ ID NO: 326836 - DNA, 55 bp, Artificial
  Synthetic oligonucleotide
agtccgtatatgcctagatatggactactaaggaatctgagagatagagaactgg

SEQ ID NO: 326837 - DNA, 60 bp, Artificial
  Synthetic oligonucleotide
agtccgtatcttcctagttagtgagctcaagaggggccgcaatacagcaggtgggagctc

SEQ ID NO: 326838 - DNA, 54 bp, Artificial
  Synthetic oligonucleotide
agtccgtcccgccggaggttatcgacgacattctgggcctgcctccgggcaccc

SEQ ID NO: 326839 - DNA, 50 bp, Artificial
  Synthetic oligonucleotide
agtccgtctatattttgggcaagatatggatggacgagaatatcaagctc

SEQ ID NO: 326840 - DNA, 56 bp, Artificial
  Synthetic oligonucleotide
agtccgttagtcagatccctcactgaatctgccaatggatactacgctaatctctt

SEQ ID NO: 326841 - DNA, 59 bp, Artificial
  Synthetic oligonucleotide
agtcctaatgtgggcttagtcgttgcatcgggagatgacagtttgatcggtacgattaa

SEQ ID NO: 326842 - DNA, 60 bp, Artificial
  Synthetic oligonucleotide
agtcctacacaagaggaactgcaacaactctccaagatgaccctccaagcgctagtcacc

SEQ ID NO: 326843 - DNA, 57 bp, Artificial
  Synthetic oligonucleotide
agtcctaccacaggggtggaaggggtcaccagcaatttttcaatacacaatgaggca

SEQ ID NO: 326844 - DNA, 60 bp, Artificial
  Synthetic oligonucleotide
agtcctagagtccagcgaagtctatgaagacgctgttgacgccccctcagagtccgtcag

SEQ ID NO: 326845 - DNA, 53 bp, Artificial
  Synthetic oligonucleotide
agtcctagctctcgcttctgatctcagagcgtctggtggctagtactcgacgg

SEQ ID NO: 326846 - DNA, 54 bp, Artificial
  Synthetic oligonucleotide
agtcctagtactgttagtaggagtgttacgcgtcgtgttttgcttccttgatga

SEQ ID NO: 326847 - DNA, 60 bp, Artificial
  Synthetic oligonucleotide
agtcctatgagcagcgtgatgacgtcaagcataccggtgttgtgcgttgtgttagtgatg

SEQ ID NO: 326848 - DNA, 59 bp, Artificial
  Synthetic oligonucleotide
agtcctcaagcgtccattaagatgcccaacgggtctgccgagaaggtgcccgctggtga

SEQ ID NO: 326849 - DNA, 60 bp, Artificial
  Synthetic oligonucleotide
agtcctcaggaagtggagtgccacagtcactggtggtcagtatgcgagcaaggaacaggc

SEQ ID NO: 326850 - DNA, 58 bp, Artificial
  Synthetic oligonucleotide
agtcctccaatacatgtatgttcccccgggtgcacctcttccagataaaaggatgcac

SEQ ID NO: 326851 - DNA, 57 bp, Artificial
  Synthetic oligonucleotide
agtcctccagtcagcgggtggacagaagacagggagttcgcagttacgtcaagtacg

SEQ ID NO: 326852 - DNA, 55 bp, Artificial
  Synthetic oligonucleotide
agtcctccctcccttgccgctcgatcacacccagaactaataattcggcccctcg

SEQ ID NO: 326853 - DNA, 54 bp, Artificial
  Synthetic oligonucleotide
agtcctccgcgacccacaaaagaggtggagactcttaaactatataaccaagtg

SEQ ID NO: 326854 - DNA, 59 bp, Artificial
  Synthetic oligonucleotide
agtcctccggcccctgaatgtggctaaccttaaacctgcagccagtgcacacaatccag

SEQ ID NO: 326855 - DNA, 51 bp, Artificial
  Synthetic oligonucleotide
agtcctcgaatggcagttttagctgccccccgtccctcttgaggacgtcct

SEQ ID NO: 326856 - DNA, 56 bp, Artificial
  Synthetic oligonucleotide
agtcctcgagtgtgttgtccatcggttcttgggtcactatgaatttccgggcttgt

SEQ ID NO: 326857 - DNA, 58 bp, Artificial
  Synthetic oligonucleotide
agtcctcgggaaggacgcaggtgcactaacagaagacccagatgagggaacagcggga

SEQ ID NO: 326858 - DNA, 57 bp, Artificial
  Synthetic oligonucleotide
agtcctctcctagacttcttcggaaggtgacggtcccagaccgtcccgtgcatgcta

SEQ ID NO: 326859 - DNA, 60 bp, Artificial
  Synthetic oligonucleotide
agtcctctgtgatgataagcttacacatcagaccactgtggttcatactcccaagaaggt

SEQ ID NO: 326860 - DNA, 54 bp, Artificial
  Synthetic oligonucleotide
agtcctctgttattgattgtgtggttttctttctcagccccaattgggctttaa

SEQ ID NO: 326861 - DNA, 51 bp, Artificial
  Synthetic oligonucleotide
agtcctgataccactaagagctgcagcggagtcagtgtaccaatacatgag

SEQ ID NO: 326862 - DNA, 55 bp, Artificial
  Synthetic oligonucleotide
agtcctgattcctgctctcctcttcccttagtttatttgttcttgtcccacttag

SEQ ID NO: 326863 - DNA, 51 bp, Artificial
  Synthetic oligonucleotide
agtcctggctcccggaaagggacagtgggagcacgaaggtgtcctctaccg

SEQ ID NO: 326864 - DNA, 51 bp, Artificial
  Synthetic oligonucleotide
agtcctggtagtgtcggttgaccgtgtcagagtcactccggccgttccgta

SEQ ID NO: 326865 - DNA, 60 bp, Artificial
  Synthetic oligonucleotide
agtcctgtcatgagtgtgatcggattcctggctttggcaaaagattggagtgaccgcatt

SEQ ID NO: 326866 - DNA, 58 bp, Artificial
  Synthetic oligonucleotide
agtcctgtcatgggagtcatcggatttagcttctttgtaaaggactggatggaaagga

SEQ ID NO: 326867 - DNA, 60 bp, Artificial
  Synthetic oligonucleotide
agtcctgtctgcctgcttgtgtgtatggacttgccgtagccagtggatacgactttgaaa

SEQ ID NO: 326868 - DNA, 55 bp, Artificial
  Synthetic oligonucleotide
agtccttatcggacgcggcatcgtcaatatctagaggatcaactattaggtcaat

SEQ ID NO: 326869 - DNA, 53 bp, Artificial
  Synthetic oligonucleotide
agtccttcggacctgcgcaactctaccgatccgctggggtgtctcttgtccca

SEQ ID NO: 326870 - DNA, 56 bp, Artificial
  Synthetic oligonucleotide
agtccttggagccccactccggctcgccgcccccacgtcctactactctggatatc

SEQ ID NO: 326871 - DNA, 55 bp, Artificial
  Synthetic oligonucleotide
agtccttgggcccagaggagttctcggaagcgatacactccggcaaagggtcgag

SEQ ID NO: 326872 - DNA, 60 bp, Artificial
  Synthetic oligonucleotide
agtcctttgaatctaggcacgatgtctctcatattggcaaagtcatgtgtgttagtgatg

SEQ ID NO: 326873 - DNA, 58 bp, Artificial
  Synthetic oligonucleotide
agtccttttgaatacgttagaatgtactaccctatatgcgctttatggcacgaagatg

SEQ ID NO: 326874 - DNA, 55 bp, Artificial
  Synthetic oligonucleotide
agtcgaaactgaatcatcgacacgtgacttgctactaatggcaggaccaccaaac

SEQ ID NO: 326875 - DNA, 52 bp, Artificial
  Synthetic oligonucleotide
agtcgaaaggttaaaacatggtacctttggtcccgtccacttcagaaatcaa

SEQ ID NO: 326876 - DNA, 57 bp, Artificial
  Synthetic oligonucleotide
agtcgaaagtggaggaccaatccacttgcacaagtccacattaaccgtggtccgcaa

SEQ ID NO: 326877 - DNA, 57 bp, Artificial
  Synthetic oligonucleotide
agtcgaacagtgaatgctcttacagttcgacatcccgggctcgccttggaacccttg

SEQ ID NO: 326878 - DNA, 56 bp, Artificial
  Synthetic oligonucleotide
agtcgaacgggaattgtgtggtcaggccattgcagggatacggccccgcgacccga

SEQ ID NO: 326879 - DNA, 58 bp, Artificial
  Synthetic oligonucleotide
agtcgaagaatctgttattcgtgcagacgtattttccctcgaactggataagcacgtg

SEQ ID NO: 326880 - DNA, 56 bp, Artificial
  Synthetic oligonucleotide
agtcgaagatggttactatttacgatcctggtaacttcgactatgcatttacgaaa

SEQ ID NO: 326881 - DNA, 60 bp, Artificial
  Synthetic oligonucleotide
agtcgaagggttctacgcccctttgatgtatcatgactatatgaatgatccaaagtcacc

SEQ ID NO: 326882 - DNA, 55 bp, Artificial
  Synthetic oligonucleotide
agtcgaatacgtataaattagagtacaagcatggaatgttctatcgcccttaacc

SEQ ID NO: 326883 - DNA, 55 bp, Artificial
  Synthetic oligonucleotide
agtcgaatctcctaggaaggaggtcttcctaggtatgaacgtacctctctcccag

SEQ ID NO: 326884 - DNA, 52 bp, Artificial
  Synthetic oligonucleotide
agtcgaattgcgagtaaataggtcgaaactgccggaaccgaaagcgctctcg

SEQ ID NO: 326885 - DNA, 54 bp, Artificial
  Synthetic oligonucleotide
agtcgaccgaatacggtagcgattaatcaccccttatttgcgcttaggtactag

SEQ ID NO: 326886 - DNA, 55 bp, Artificial
  Synthetic oligonucleotide
agtcgacgatttagtccccgacgtgggttccacgtttctgtgtatgcttcagtcg

SEQ ID NO: 326887 - DNA, 51 bp, Artificial
  Synthetic oligonucleotide
agtcgacggtgtgaatcataaactagatgtaactactacgacttgtactat

SEQ ID NO: 326888 - DNA, 59 bp, Artificial
  Synthetic oligonucleotide
agtcgagagctatttttgtgcccggtggggttgcgagacaacaggcgatgcctactgga

SEQ ID NO: 326889 - DNA, 58 bp, Artificial
  Synthetic oligonucleotide
agtcgagatgcgtgatggtgtgccgtgggtaatcgagggattccatcgctacacgtcg

SEQ ID NO: 326890 - DNA, 58 bp, Artificial
  Synthetic oligonucleotide
agtcgagcacctcggatactactttccgcagtcctcaagatgttgtccctttagtcac

SEQ ID NO: 326891 - DNA, 51 bp, Artificial
  Synthetic oligonucleotide
agtcgagccttgtggtaaggtccctggggattaaacgtttgatcgtttaac

SEQ ID NO: 326892 - DNA, 60 bp, Artificial
  Synthetic oligonucleotide
agtcgaggatcaaaacagacggatcgagacgatctgtcatgccagcccacgactaaaaga

SEQ ID NO: 326893 - DNA, 58 bp, Artificial
  Synthetic oligonucleotide
agtcgaggcattggcagatcaaactcaacggttcaagcgggataaacttgaaacatgg

SEQ ID NO: 326894 - DNA, 51 bp, Artificial
  Synthetic oligonucleotide
agtcgaggtagtctccgtccttctcgatgtatgacttgacatccgaggagg

SEQ ID NO: 326895 - DNA, 55 bp, Artificial
  Synthetic oligonucleotide
agtcgagttccttcacgaataatgctggagtaggtagagaatgattaccagcgcg

SEQ ID NO: 326896 - DNA, 55 bp, Artificial
  Synthetic oligonucleotide
agtcgataatgtagagcgtaggtatgttacccataggtgtcctagagagctcact

SEQ ID NO: 326897 - DNA, 60 bp, Artificial
  Synthetic oligonucleotide
agtcgatacgcactgccaatagaacgattagaagcatgatagtgaagccgattgtatctg

SEQ ID NO: 326898 - DNA, 55 bp, Artificial
  Synthetic oligonucleotide
agtcgatcaaaacgcaaccaaccccggtgacggagtctcagccggcgcaaacgcg

SEQ ID NO: 326899 - DNA, 55 bp, Artificial
  Synthetic oligonucleotide
agtcgatggatggcaattaaattggaccaagcaaagagtattaaagtactccgtg

SEQ ID NO: 326900 - DNA, 58 bp, Artificial
  Synthetic oligonucleotide
agtcgatgtaatcaccgtccttctcgatgtattgtttaacatcggaagtgaccttagc

SEQ ID NO: 326901 - DNA, 56 bp, Artificial
  Synthetic oligonucleotide
agtcgatgtaatctccgtccttctcgatataggacttgacgtcggagcttgattta

SEQ ID NO: 326902 - DNA, 60 bp, Artificial
  Synthetic oligonucleotide
agtcgatgtggagataatatgagcagccgcagtctaggtcaacccgtttacgccgtatgg

SEQ ID NO: 326903 - DNA, 57 bp, Artificial
  Synthetic oligonucleotide
agtcgcaaagggatgggaccctaatctacctctatttcgactggaggctgatgacgg

SEQ ID NO: 326904 - DNA, 59 bp, Artificial
  Synthetic oligonucleotide
agtcgcaaatggaacttcatcaattgatccaagataaggttttcttgcgattgggtgcg

SEQ ID NO: 326905 - DNA, 59 bp, Artificial
  Synthetic oligonucleotide
agtcgcaacatgcacacccttcttggggtgcaacagcaccactgacgtgacggaaaccc

SEQ ID NO: 326906 - DNA, 60 bp, Artificial
  Synthetic oligonucleotide
agtcgcaacgcggcagccttgatcgcaggctgcgggctcaaattgaaggttgattaccgc

SEQ ID NO: 326907 - DNA, 55 bp, Artificial
  Synthetic oligonucleotide
agtcgcaaggtaggctgagcacggtttcttccggcgggtcatgttggttggaggg

SEQ ID NO: 326908 - DNA, 50 bp, Artificial
  Synthetic oligonucleotide
agtcgcacggcgaacggccatgtgtaccgagtcgcgatacgccatttctg

SEQ ID NO: 326909 - DNA, 60 bp, Artificial
  Synthetic oligonucleotide
agtcgcactggaaaaccaacacactatagatgtaactgactcagagatgaacaaactctt

SEQ ID NO: 326910 - DNA, 55 bp, Artificial
  Synthetic oligonucleotide
agtcgcagtatgcgtatacagagttttgtttcctttcggggtagcaacattcccg

SEQ ID NO: 326911 - DNA, 55 bp, Artificial
  Synthetic oligonucleotide
agtcgcatcacaccacccacagtcgcacacagtgacgcactagctaggcgcttcg

SEQ ID NO: 326912 - DNA, 59 bp, Artificial
  Synthetic oligonucleotide
agtcgcattccgaacaaagtagtattcgcgacagtgtcgatactggacgaggaaatgtc

SEQ ID NO: 326913 - DNA, 55 bp, Artificial
  Synthetic oligonucleotide
agtcgcattcgcattgctaaatgcaatactaagtgtcagacatctgttggtggga

SEQ ID NO: 326914 - DNA, 60 bp, Artificial
  Synthetic oligonucleotide
agtcgcattgttgattctaaccagcacgtgcatacaagctgacagaatctgtgttgggta

SEQ ID NO: 326915 - DNA, 59 bp, Artificial
  Synthetic oligonucleotide
agtcgccaaggagcggagttcttttctcgtagactcgctctgtatactggtgacgcctc

SEQ ID NO: 326916 - DNA, 56 bp, Artificial
  Synthetic oligonucleotide
agtcgcccctcgcacgtgtcgcgcactggctcaggactcacacgtgggccctctgg

SEQ ID NO: 326917 - DNA, 51 bp, Artificial
  Synthetic oligonucleotide
agtcgcctgcagacaccccggctgcgaccccacaaccggagtcgctcgtcg

SEQ ID NO: 326918 - DNA, 60 bp, Artificial
  Synthetic oligonucleotide
agtcgcgactaacaataacaatagagcgtcgactcatttcgtgacttgcacgcttctgtc

SEQ ID NO: 326919 - DNA, 57 bp, Artificial
  Synthetic oligonucleotide
agtcgcgaggtctacgtcatcaaagataacggtcgttgttacggattcactggtgag

SEQ ID NO: 326920 - DNA, 53 bp, Artificial
  Synthetic oligonucleotide
agtcgcgagtttgtccgagaattagcgagactaaacggttgcgttaccgtagg

SEQ ID NO: 326921 - DNA, 55 bp, Artificial
  Synthetic oligonucleotide
agtcgcgctgttggcgtggtctggttggtctatgatgcgcagccgaccggcaatg

SEQ ID NO: 326922 - DNA, 51 bp, Artificial
  Synthetic oligonucleotide
agtcgcggaaactttattaaacacactccgaggggggcgcaccgccccaag

SEQ ID NO: 326923 - DNA, 53 bp, Artificial
  Synthetic oligonucleotide
agtcgcgggtaatactataccgcgactatccttgttacgccctcaaaaaaata

SEQ ID NO: 326924 - DNA, 59 bp, Artificial
  Synthetic oligonucleotide
agtcgcgtagtaaaacttcgacaactgtttacctgcgagcgatgggtgcatttgaatca

SEQ ID NO: 326925 - DNA, 55 bp, Artificial
  Synthetic oligonucleotide
agtcgctactgtggagttcttattaggtgcggacgggaatgcaggcccattgaga

SEQ ID NO: 326926 - DNA, 51 bp, Artificial
  Synthetic oligonucleotide
agtcgctatggccaagaggaatattgtcactgccactaccagcaaaggaga

SEQ ID NO: 326927 - DNA, 57 bp, Artificial
  Synthetic oligonucleotide
agtcgctccagtgcgcggtactatgaagttcgaaaaggcgttatcgaaggctcgaag

SEQ ID NO: 326928 - DNA, 60 bp, Artificial
  Synthetic oligonucleotide
agtcgctctgtagactatggtaagtaccacactatgttagtagacgagatcactcgcgtt

SEQ ID NO: 326929 - DNA, 51 bp, Artificial
  Synthetic oligonucleotide
agtcgctgattggtgtcatccgtgtcacgcaggacatgccgctgggcctca

SEQ ID NO: 326930 - DNA, 51 bp, Artificial
  Synthetic oligonucleotide
agtcgctgcccaacttcctgcctcttttaactttggtgcagtccaggccac

SEQ ID NO: 326931 - DNA, 54 bp, Artificial
  Synthetic oligonucleotide
agtcgctgctaaataccacgtcggacgaacccaagcgtttaatgctacggttaa

SEQ ID NO: 326932 - DNA, 56 bp, Artificial
  Synthetic oligonucleotide
agtcgctggttggtcgttagatgggatcgtcagcagtttaaggcgaaggtatatgg

SEQ ID NO: 326933 - DNA, 60 bp, Artificial
  Synthetic oligonucleotide
agtcgctgtcctaccagagtatgtcattgggacagtagcaggcggtacagggacggagga

SEQ ID NO: 326934 - DNA, 55 bp, Artificial
  Synthetic oligonucleotide
agtcgcttctgtggagttgttattaggtgcggatttgaatgcaggtccattgaga

SEQ ID NO: 326935 - DNA, 56 bp, Artificial
  Synthetic oligonucleotide
agtcgctttgcgtggggccgcaagtccagaccaatgtttcctatcacaccctaagt

SEQ ID NO: 326936 - DNA, 56 bp, Artificial
  Synthetic oligonucleotide
agtcggaaaaagtgtcttattacacactccgtcttatgactgagagtaaatcgaat

SEQ ID NO: 326937 - DNA, 57 bp, Artificial
  Synthetic oligonucleotide
agtcggaacaacggattcacaagatgctgcatacaaaacattgaagagcctagtctg

SEQ ID NO: 326938 - DNA, 59 bp, Artificial
  Synthetic oligonucleotide
agtcggaattatacttgagaagtgtaatgaaatcagagttatgacggttaacatcatag

SEQ ID NO: 326939 - DNA, 60 bp, Artificial
  Synthetic oligonucleotide
agtcggacctgccaatgcaaaagttcctcatagtgctagctcagatacattgagattgat

SEQ ID NO: 326940 - DNA, 57 bp, Artificial
  Synthetic oligonucleotide
agtcggagacatggcccattggagaatcacccaaaggagtggaagaaggttccattg

SEQ ID NO: 326941 - DNA, 59 bp, Artificial
  Synthetic oligonucleotide
agtcggagacctggaacattatcttgtctgggttctctgcaacgccgcggcacagaacc

SEQ ID NO: 326942 - DNA, 50 bp, Artificial
  Synthetic oligonucleotide
agtcggagcttgatgaattgaagcttcaagagtgggacttcgaagtgtgg

SEQ ID NO: 326943 - DNA, 55 bp, Artificial
  Synthetic oligonucleotide
agtcggagtgaattttcagcagaactatagcacatgtatcgtatcggagagtagc

SEQ ID NO: 326944 - DNA, 55 bp, Artificial
  Synthetic oligonucleotide
agtcggatcagccgccacacaggcaccgacgtatacctgtacacctcgacatggc

SEQ ID NO: 326945 - DNA, 57 bp, Artificial
  Synthetic oligonucleotide
agtcggatccatttcatcccccatatgacagatcgtacgaccggagaggggttcagg

SEQ ID NO: 326946 - DNA, 60 bp, Artificial
  Synthetic oligonucleotide
agtcggattgatgtttgccatcgtaggtggtttggccgagttggatattgaatccatgtc

SEQ ID NO: 326947 - DNA, 55 bp, Artificial
  Synthetic oligonucleotide
agtcggcaaaaactacgatttaaggaggctcgtgataacaaatacgcatacgacg

SEQ ID NO: 326948 - DNA, 60 bp, Artificial
  Synthetic oligonucleotide
agtcggcagacatgaaggacgaacagatgaatacatatactctggacagtgtgatgatga

SEQ ID NO: 326949 - DNA, 56 bp, Artificial
  Synthetic oligonucleotide
agtcggccccgatattaaagggccgcgtatgaatcgcactataagtagagccctag

SEQ ID NO: 326950 - DNA, 55 bp, Artificial
  Synthetic oligonucleotide
agtcggcctaatgaccccggaagcgggaactgtgatgcaccaataaccggaggga

SEQ ID NO: 326951 - DNA, 53 bp, Artificial
  Synthetic oligonucleotide
agtcgggcaggatcgattgttacgcccgcgtgattccggtcacgtacgcagtc

SEQ ID NO: 326952 - DNA, 54 bp, Artificial
  Synthetic oligonucleotide
agtcgggccttcatctgtttgcaagcactaactactttcgtctcagtggctgga

SEQ ID NO: 326953 - DNA, 55 bp, Artificial
  Synthetic oligonucleotide
agtcggtaatcggaccaaggttctcatcgcaattctccgcgtttagtaccaaata

SEQ ID NO: 326954 - DNA, 53 bp, Artificial
  Synthetic oligonucleotide
agtcggtaccgtgtcaagaggggtacgaaccgctctcggtggaggtctctagt

SEQ ID NO: 326955 - DNA, 55 bp, Artificial
  Synthetic oligonucleotide
agtcggtcatgccgcctgtcacccacttcccggtcgaagagtgcaccacggcgct

SEQ ID NO: 326956 - DNA, 55 bp, Artificial
  Synthetic oligonucleotide
agtcggtcgttagtagggtagttattaacggtacgtccgtgcgtgcagaatggca

SEQ ID NO: 326957 - DNA, 56 bp, Artificial
  Synthetic oligonucleotide
agtcggtgatgctacggtaggtacactagctactggtctaggctggggcgctcgta

SEQ ID NO: 326958 - DNA, 54 bp, Artificial
  Synthetic oligonucleotide
agtcggtggatcctcgttacaactacgtagcggggaagaatattgttgacgcct

SEQ ID NO: 326959 - DNA, 58 bp, Artificial
  Synthetic oligonucleotide
agtcgtaaaattaacgacgcaggccggtgttgcacccgaaggcgatagctctggagca

SEQ ID NO: 326960 - DNA, 57 bp, Artificial
  Synthetic oligonucleotide
agtcgtaaggagattagaggtgtgaccgaagcgaggtggatcagatccgtttcggga

SEQ ID NO: 326961 - DNA, 55 bp, Artificial
  Synthetic oligonucleotide
agtcgtaatgagcaactacgggatgggaccaactactttgggtgtccgtgtttca

SEQ ID NO: 326962 - DNA, 50 bp, Artificial
  Synthetic oligonucleotide
agtcgtacatacgactacatcaaggtgctgtccataagtgcctctggctc

SEQ ID NO: 326963 - DNA, 58 bp, Artificial
  Synthetic oligonucleotide
agtcgtagcatctccagtagttccaccctgctgatttctttcgagcgcaatgaccgaa

SEQ ID NO: 326964 - DNA, 60 bp, Artificial
  Synthetic oligonucleotide
agtcgtagctggagaattgatacccagttgcgaaactgtcaatgagaatgtttgtgtgga

SEQ ID NO: 326965 - DNA, 60 bp, Artificial
  Synthetic oligonucleotide
agtcgtagtcatgacacatggctaccaagattgggtggacggagagtcaaatctcctaat

SEQ ID NO: 326966 - DNA, 53 bp, Artificial
  Synthetic oligonucleotide
agtcgtagttgaactaacgtagtaggggagcggcgtttgaggatgttcacggg

SEQ ID NO: 326967 - DNA, 54 bp, Artificial
  Synthetic oligonucleotide
agtcgtatagttcttagaaatctcactgagtttacttgggattcccaaattagt

SEQ ID NO: 326968 - DNA, 60 bp, Artificial
  Synthetic oligonucleotide
agtcgtattgtggttagccatacatctggcgtcggttctattggtgtcattctggaacat

SEQ ID NO: 326969 - DNA, 51 bp, Artificial
  Synthetic oligonucleotide
agtcgtcaacttatctctcgtcggatctgtctcccgctacctcaatgttgg

SEQ ID NO: 326970 - DNA, 60 bp, Artificial
  Synthetic oligonucleotide
agtcgtcaatggttcgacactccatcagtcgaggagtctcgagatgccatgtggacgagg

SEQ ID NO: 326971 - DNA, 60 bp, Artificial
  Synthetic oligonucleotide
agtcgtcaattgtttgtacacatgttatctgtaatgctaaaacataggggaatcattgtc

SEQ ID NO: 326972 - DNA, 59 bp, Artificial
  Synthetic oligonucleotide
agtcgtccacgcggttgcttcgaccaatgcaaactctgctgtcggtgttctatacccca

SEQ ID NO: 326973 - DNA, 55 bp, Artificial
  Synthetic oligonucleotide
agtcgtcgatttaagtaattaagcccttgattcgcctgcaatgtcagtagttatg

SEQ ID NO: 326974 - DNA, 59 bp, Artificial
  Synthetic oligonucleotide
agtcgtctagctactattgctataggtataaaaggagacactaatgttgagtatagtta

SEQ ID NO: 326975 - DNA, 55 bp, Artificial
  Synthetic oligonucleotide
agtcgtgattcagattttgacgagggttacacattggccaatatctcagcgcgca

SEQ ID NO: 326976 - DNA, 59 bp, Artificial
  Synthetic oligonucleotide
agtcgtggcgaccaccctgacatgcaaatcacgcctaggaacggatgccacaaggtaag

SEQ ID NO: 326977 - DNA, 55 bp, Artificial
  Synthetic oligonucleotide
agtcgtggtccattagcatattgtgccaacgatattgatcgcactaaacctgacg

SEQ ID NO: 326978 - DNA, 58 bp, Artificial
  Synthetic oligonucleotide
agtcgtgttggacaaagtctcacggtctatgagtttgacaaagaccattggtatacga

SEQ ID NO: 326979 - DNA, 59 bp, Artificial
  Synthetic oligonucleotide
agtcgttagcactctggcagcctcctctagcacttcgaccgtcgacctggaattctccc

SEQ ID NO: 326980 - DNA, 55 bp, Artificial
  Synthetic oligonucleotide
agtcgttatagtgcctacaattatagtccccatctgggcaaaacctatgtatacg

SEQ ID NO: 326981 - DNA, 52 bp, Artificial
  Synthetic oligonucleotide
agtcgttatccagaaataggacgcttaccccttcggagaaaagcttaaatac

SEQ ID NO: 326982 - DNA, 60 bp, Artificial
  Synthetic oligonucleotide
agtcgttatctgtgaaagtcagggagtccaggaggacgcggcgagcctgagagccttcac

SEQ ID NO: 326983 - DNA, 59 bp, Artificial
  Synthetic oligonucleotide
agtcgttcagcaaacaagagtggacaaactgacccagggtcgccagacttatgattgga

SEQ ID NO: 326984 - DNA, 56 bp, Artificial
  Synthetic oligonucleotide
agtcgttcaggtgggttcttgataactagttgaaatgtaaggtcatacgtccgtgc

SEQ ID NO: 326985 - DNA, 53 bp, Artificial
  Synthetic oligonucleotide
agtcgttcgacgtgagcgtccacccgttcacggtgtacaaccgagtcacggat

SEQ ID NO: 326986 - DNA, 59 bp, Artificial
  Synthetic oligonucleotide
agtcgttgatctcaggttgcaatgtcggcattccctcattcccaccgaaagaccattcc

SEQ ID NO: 326987 - DNA, 55 bp, Artificial
  Synthetic oligonucleotide
agtcgttggtgtgccctactgactgcttccgaaaacatccggaagccacttacgc

SEQ ID NO: 326988 - DNA, 52 bp, Artificial
  Synthetic oligonucleotide
agtcgtttaggcaagtggtggactcgtatttgcacggacacagtttagcttg

SEQ ID NO: 326989 - DNA, 53 bp, Artificial
  Synthetic oligonucleotide
agtcgttttgaatcggggggcactcaaagtctatggcaattgggggaactggg

SEQ ID NO: 326990 - DNA, 57 bp, Artificial
  Synthetic oligonucleotide
agtctaaactgggcgttgaggtcccctctggtagggaccatcacactgcgttcgtga

SEQ ID NO: 326991 - DNA, 54 bp, Artificial
  Synthetic oligonucleotide
agtctaacacgcactgctggtgtccacctaaacctacaattgttcccaccattg

SEQ ID NO: 326992 - DNA, 55 bp, Artificial
  Synthetic oligonucleotide
agtctaactggtcgggacaaaaaccaagtggagggtgaggtccagattgtgtcaa

SEQ ID NO: 326993 - DNA, 53 bp, Artificial
  Synthetic oligonucleotide
agtctaagtcttatttatttacgccgtctaaacctacaggtaagagtccacaa

SEQ ID NO: 326994 - DNA, 55 bp, Artificial
  Synthetic oligonucleotide
agtctaatccgacccaatgagaatccagcacataagagtcagttggtgtggatgg

SEQ ID NO: 326995 - DNA, 60 bp, Artificial
  Synthetic oligonucleotide
agtctaatcctggacctgctacctggtcatcgctttcagtagaggcaatcacactgtgcc

SEQ ID NO: 326996 - DNA, 55 bp, Artificial
  Synthetic oligonucleotide
agtctaatgtaaaaattaagcctcgtagagtgaaaaaatcccactcggatgccag

SEQ ID NO: 326997 - DNA, 60 bp, Artificial
  Synthetic oligonucleotide
agtctaatgtccagcttgcgccatcgctatgctggtacaattgatctcgatcccgacgct

SEQ ID NO: 326998 - DNA, 60 bp, Artificial
  Synthetic oligonucleotide
agtctaattcaactgtctcacaacagtagtttagctttgtctgtcgaatatgtggatttg

SEQ ID NO: 326999 - DNA, 51 bp, Artificial
  Synthetic oligonucleotide
agtctacagacatcactggagattgtacgtttaacgcaaaactataagagt

SEQ ID NO: 327000 - DNA, 58 bp, Artificial
  Synthetic oligonucleotide
agtctacagggtagaggagtcacttcaagcgatgccaaaagagatttgacccaccgaa

SEQ ID NO: 327001 - DNA, 60 bp, Artificial
  Synthetic oligonucleotide
agtctaccaactcaagtcagtggaatttgacatgtcacatctgaacttgacaatgcccaa

SEQ ID NO: 327002 - DNA, 60 bp, Artificial
  Synthetic oligonucleotide
agtctacgcgcacgatgcacagaacagaggagcttatgtcgagatgcacctcccgggctc

SEQ ID NO: 327003 - DNA, 54 bp, Artificial
  Synthetic oligonucleotide
agtctacgtcgaagactaggtggagggaaatatcctatttggtcgtctttcaag

SEQ ID NO: 327004 - DNA, 58 bp, Artificial
  Synthetic oligonucleotide
agtctacgtctaagtacgactgacacaatcttacataactactcggctagagtaggag

SEQ ID NO: 327005 - DNA, 55 bp, Artificial
  Synthetic oligonucleotide
agtctactcgttacaactgcctagggctgaccccctgccgtgatcggaagccccc

SEQ ID NO: 327006 - DNA, 60 bp, Artificial
  Synthetic oligonucleotide
agtctactggagagtattccggctgggcttcgtgagctggctaggcaacacctacctgat

SEQ ID NO: 327007 - DNA, 59 bp, Artificial
  Synthetic oligonucleotide
agtctacttgcccaccttagagcagtacttctcggcacacttaactatggctggtgtta

SEQ ID NO: 327008 - DNA, 58 bp, Artificial
  Synthetic oligonucleotide
agtctagaagatcagcccagcattagtgaggacatgctaggatagaatacctgagaca

SEQ ID NO: 327009 - DNA, 60 bp, Artificial
  Synthetic oligonucleotide
agtctagagcgtgcgagatcagctctacaaggcaagagtgttgaagccataccattgaca

SEQ ID NO: 327010 - DNA, 60 bp, Artificial
  Synthetic oligonucleotide
agtctagagtgcacatcgaaacagctgtagcgacctcacagtagcagcggactcccctct

SEQ ID NO: 327011 - DNA, 54 bp, Artificial
  Synthetic oligonucleotide
agtctagcacgcaaacacctggcccgtgagaaacatccggagttttacaagaac

SEQ ID NO: 327012 - DNA, 53 bp, Artificial
  Synthetic oligonucleotide
agtctagcagcggatccgcgaattcgggggatgccagggcacagcgcgtactt

SEQ ID NO: 327013 - DNA, 60 bp, Artificial
  Synthetic oligonucleotide
agtctagccttgtctctgacaaggtgggttacacaggcagccgcttggctgacaaaaaca

SEQ ID NO: 327014 - DNA, 60 bp, Artificial
  Synthetic oligonucleotide
agtctaggccaggacgaagacaggtggaagctcgtcatccagaccagtcatatgctcttc

SEQ ID NO: 327015 - DNA, 56 bp, Artificial
  Synthetic oligonucleotide
agtctagtcacccaattgtttttagattcctgtcagcatccttttctccgctttaa

SEQ ID NO: 327016 - DNA, 59 bp, Artificial
  Synthetic oligonucleotide
agtctagttttggtgggactgatcgttgccatgggtctttggatgtgctcgaatggctc

SEQ ID NO: 327017 - DNA, 55 bp, Artificial
  Synthetic oligonucleotide
agtctatagttgatcaagtaacacaaatgattaggcagtgtaacgcagtgtgtaa

SEQ ID NO: 327018 - DNA, 52 bp, Artificial
  Synthetic oligonucleotide
agtctatataacccgtcaacaaatcgcaaaacccctcaaaccccagtaagtc

SEQ ID NO: 327019 - DNA, 60 bp, Artificial
  Synthetic oligonucleotide
agtctatcaagcgctatgcctcaagcgagcggtggatttgatcgtatgattgttacgaaa

SEQ ID NO: 327020 - DNA, 55 bp, Artificial
  Synthetic oligonucleotide
agtctatcacacagttcttgactgctatgacaggctctacctcaattcctacccc

SEQ ID NO: 327021 - DNA, 59 bp, Artificial
  Synthetic oligonucleotide
agtctatgaccagtaaagtttgtgctttgaagagaacgtgtggtgctttgtacaatatg

SEQ ID NO: 327022 - DNA, 55 bp, Artificial
  Synthetic oligonucleotide
agtctatgtatcatttaaggacacggaggattctgaacctacaggcctctatggc

SEQ ID NO: 327023 - DNA, 59 bp, Artificial
  Synthetic oligonucleotide
agtctatgtgataggctttacactccctattatcttaaaggcactttacatgttgtcaa

SEQ ID NO: 327024 - DNA, 55 bp, Artificial
  Synthetic oligonucleotide
agtctattaatatggctgtctctgccgaataaatcagagcgtatgcaaagcagaa

SEQ ID NO: 327025 - DNA, 54 bp, Artificial
  Synthetic oligonucleotide
agtctattgtttcaccccaagccccgttgtggtggggacgaccgatcatcttgg

SEQ ID NO: 327026 - DNA, 55 bp, Artificial
  Synthetic oligonucleotide
agtctatttaaatgccacactattgcttactggttattaccctgtagatgggtcc

SEQ ID NO: 327027 - DNA, 57 bp, Artificial
  Synthetic oligonucleotide
agtctatttccaccctctcatcgtgagacttcaacagtttctcacacgaaagacctt

SEQ ID NO: 327028 - DNA, 54 bp, Artificial
  Synthetic oligonucleotide
agtctcaaggagacaatattattgcaagcatgattggaagttcgaagagagcca

SEQ ID NO: 327029 - DNA, 55 bp, Artificial
  Synthetic oligonucleotide
agtctcaatcagtggacgtgtatagccgaggatccgcgttactacgcgggaactg

SEQ ID NO: 327030 - DNA, 55 bp, Artificial
  Synthetic oligonucleotide
agtctcactgcgcaacaatcagttgcgggcagtggtgtagggacgcccttcactc

SEQ ID NO: 327031 - DNA, 60 bp, Artificial
  Synthetic oligonucleotide
agtctcagactcaatcacgacgtctaaatcatacacatcgctgttctactcaatactacg

SEQ ID NO: 327032 - DNA, 60 bp, Artificial
  Synthetic oligonucleotide
agtctcagcacacaagtcttgcaagtgggcccccaacctgatcaagtatagaccggtcac

SEQ ID NO: 327033 - DNA, 57 bp, Artificial
  Synthetic oligonucleotide
agtctcaggtggaggaggtcagggtgtttgatggcacagaaaagcttccaggggacc

SEQ ID NO: 327034 - DNA, 56 bp, Artificial
  Synthetic oligonucleotide
agtctcataagggataattggtttgtgcataccttcaaataggctgtccttaaatt

SEQ ID NO: 327035 - DNA, 60 bp, Artificial
  Synthetic oligonucleotide
agtctcatgcgacgaccacaccgatgaattggcctctgcttccagtgtcccttccgaatg

SEQ ID NO: 327036 - DNA, 59 bp, Artificial
  Synthetic oligonucleotide
agtctcattagaccaaatgagaatccagcacacaagagccaactgatatggatggcatg

SEQ ID NO: 327037 - DNA, 59 bp, Artificial
  Synthetic oligonucleotide
agtctccaagggaaacaattgtctatgtgcaagatattgaaggcaatcacgtagtgtat

SEQ ID NO: 327038 - DNA, 55 bp, Artificial
  Synthetic oligonucleotide
agtctccaatcttttgtttagaatgattagctacagagtccaacgcttggctgac

SEQ ID NO: 327039 - DNA, 60 bp, Artificial
  Synthetic oligonucleotide
agtctccagatgtcactcaccttgcacctgctgtgttcccccaggctttgggaggtgatt

SEQ ID NO: 327040 - DNA, 60 bp, Artificial
  Synthetic oligonucleotide
agtctccagcaacttgtgcgctcttgagtattactgcggcgacatgcgaacaagcatata

SEQ ID NO: 327041 - DNA, 51 bp, Artificial
  Synthetic oligonucleotide
agtctccccttagtctgcccagcaaccagggccttcattggccatggagta

SEQ ID NO: 327042 - DNA, 58 bp, Artificial
  Synthetic oligonucleotide
agtctccgatattcagccataacgtgccctcgtccgataggaccctgaagacctccga

SEQ ID NO: 327043 - DNA, 50 bp, Artificial
  Synthetic oligonucleotide
agtctccgttaggcgtggcatcagaggaaacgaagtcgacctaccagacg

SEQ ID NO: 327044 - DNA, 60 bp, Artificial
  Synthetic oligonucleotide
agtctcctgagcattgttcacctcaccatactgcactcaggcaagcaatactttgctggg

SEQ ID NO: 327045 - DNA, 50 bp, Artificial
  Synthetic oligonucleotide
agtctcgaaaaagacgagtgcaacatcgatgaagttgtacaactcatgag

SEQ ID NO: 327046 - DNA, 56 bp, Artificial
  Synthetic oligonucleotide
agtctcgaaagcgatagaaatactaggagtgccagagaggaatgatatagtggcca

SEQ ID NO: 327047 - DNA, 59 bp, Artificial
  Synthetic oligonucleotide
agtctcgaggccgttgaagtcgaaaggtgcaatgatcccatcgtgaccatacggaatgt

SEQ ID NO: 327048 - DNA, 50 bp, Artificial
  Synthetic oligonucleotide
agtctcgcataagctggtggtgtacgtcgctatcgtatgtataaccagtt

SEQ ID NO: 327049 - DNA, 52 bp, Artificial
  Synthetic oligonucleotide
agtctcgcataatgaaagaccacacatgcgagaacatatcaatactcgaggg

SEQ ID NO: 327050 - DNA, 59 bp, Artificial
  Synthetic oligonucleotide
agtctcgcgaagaaagcagttctcggtctagctttagtgcccacaagaaaacagctgta

SEQ ID NO: 327051 - DNA, 60 bp, Artificial
  Synthetic oligonucleotide
agtctctatcattgacaaacgtcggactgatctaaggagggcaaccctagcttgcaggaa

SEQ ID NO: 327052 - DNA, 60 bp, Artificial
  Synthetic oligonucleotide
agtctctcagcgggagtgaagactgcagtgagtaagctgagctcttctgaatctattcag

SEQ ID NO: 327053 - DNA, 50 bp, Artificial
  Synthetic oligonucleotide
agtctctcgggtccaccacggagcgatgaatctgggcgcagggtgtcccc

SEQ ID NO: 327054 - DNA, 54 bp, Artificial
  Synthetic oligonucleotide
agtctctgaggtgcctttgaaaccatctcctaggtttcttcggaaggacttcgg

SEQ ID NO: 327055 - DNA, 58 bp, Artificial
  Synthetic oligonucleotide
agtctcttgaaaccaccatgaggtctcccgtatacactgacaattccacccctccagc

SEQ ID NO: 327056 - DNA, 55 bp, Artificial
  Synthetic oligonucleotide
agtctctttctttggcggtcgatctaaatcgaaagtagcacttctgctgcctgca

SEQ ID NO: 327057 - DNA, 60 bp, Artificial
  Synthetic oligonucleotide
agtctgaacatgtcctcggaagacatctcacaactcttgatagaaatcaaaaggctatat

SEQ ID NO: 327058 - DNA, 55 bp, Artificial
  Synthetic oligonucleotide
agtctgaacctcggtttctcgctaccgttaacgtgcttaactgacattatatggg

SEQ ID NO: 327059 - DNA, 60 bp, Artificial
  Synthetic oligonucleotide
agtctgactgcctattcaggtataccatcttattcctcacttagtatccttgcaggttca

SEQ ID NO: 327060 - DNA, 60 bp, Artificial
  Synthetic oligonucleotide
agtctgaggatgatgaggattgacacgctgccgaatccccctgatcttaatcccccctcc

SEQ ID NO: 327061 - DNA, 60 bp, Artificial
  Synthetic oligonucleotide
agtctgataaatgattatggtttgtattcaaagtcgttttaactaagatgcgcatatcat

SEQ ID NO: 327062 - DNA, 55 bp, Artificial
  Synthetic oligonucleotide
agtctgatctactagcaatagaagaacgattaactgagagcgctgagcttctgct

SEQ ID NO: 327063 - DNA, 50 bp, Artificial
  Synthetic oligonucleotide
agtctgatgcagctgataatgtaaccatcgactttgtcggtgtgattttc

SEQ ID NO: 327064 - DNA, 60 bp, Artificial
  Synthetic oligonucleotide
agtctgatgctgcgctcatcacttcctagcatgatggggagaaacaactggattccagtt

SEQ ID NO: 327065 - DNA, 59 bp, Artificial
  Synthetic oligonucleotide
agtctgatgggagcaaaaaatgcaaattgacctggccaagacccggcgcgaagccctgc

SEQ ID NO: 327066 - DNA, 60 bp, Artificial
  Synthetic oligonucleotide
agtctgattacgaacgcgtcgtcagattaccaggcgtgagcctgaagcgatggtgggagg

SEQ ID NO: 327067 - DNA, 60 bp, Artificial
  Synthetic oligonucleotide
agtctgcaactcttttcacagacattgcaacgccccattcggtctgggtcttcgcatgtg

SEQ ID NO: 327068 - DNA, 55 bp, Artificial
  Synthetic oligonucleotide
agtctgcgactgacccgaagggcgtcaagcccaccagcaaggtgacgtgggccaa

SEQ ID NO: 327069 - DNA, 50 bp, Artificial
  Synthetic oligonucleotide
agtctgctaaccccttttgcggtgaggggactttgtatacccgaacctgg

SEQ ID NO: 327070 - DNA, 60 bp, Artificial
  Synthetic oligonucleotide
agtctgctgacctcctctagcagatctgccgtcgatctgggattcaccccagtcgaggta

SEQ ID NO: 327071 - DNA, 51 bp, Artificial
  Synthetic oligonucleotide
agtctgctgatgactaagtggatgtcacgagccgatgacaacactgacggc

SEQ ID NO: 327072 - DNA, 60 bp, Artificial
  Synthetic oligonucleotide
agtctgctgctctatgtcgtactcttggaccggcgctttgataacaccatgtagcgccga

SEQ ID NO: 327073 - DNA, 60 bp, Artificial
  Synthetic oligonucleotide
agtctgcttgataccatagcaatagcagtagctgaaggaacagatagaattatagaattc

SEQ ID NO: 327074 - DNA, 60 bp, Artificial
  Synthetic oligonucleotide
agtctggatacaaagattggattctatggatttcctttgccatatcatgctttttgctgt

SEQ ID NO: 327075 - DNA, 55 bp, Artificial
  Synthetic oligonucleotide
agtctggccctcctacctaagtgacaaggatgctaaccctgttgatcaacccacc

SEQ ID NO: 327076 - DNA, 60 bp, Artificial
  Synthetic oligonucleotide
agtctggctcgtgtctgccctagctatggggacaggcatagctgggggtatcacaggatc

SEQ ID NO: 327077 - DNA, 59 bp, Artificial
  Synthetic oligonucleotide
agtctggggccttattgggctacaggtctctcgtgggcagccattaggaggggctatca

SEQ ID NO: 327078 - DNA, 55 bp, Artificial
  Synthetic oligonucleotide
agtctggtcgatgaggctgagaattccccacgggcgaccgtgtctcagcctgcgt

SEQ ID NO: 327079 - DNA, 60 bp, Artificial
  Synthetic oligonucleotide
agtctgtatgcatctccacaattagaaggattttcagctgagtcaagaaagttgctcctc

SEQ ID NO: 327080 - DNA, 56 bp, Artificial
  Synthetic oligonucleotide
agtctgtattgttaggagggaaaagtttgaaagacttgctaccttatggagtgata

SEQ ID NO: 327081 - DNA, 60 bp, Artificial
  Synthetic oligonucleotide
agtctgtctagacgtattgattatgctaacggcgcatgtcgttcaattgcctaagatcga

SEQ ID NO: 327082 - DNA, 50 bp, Artificial
  Synthetic oligonucleotide
agtctgtgaaacgagatgctatcatagttgatgactcaaaattcgttagc

SEQ ID NO: 327083 - DNA, 60 bp, Artificial
  Synthetic oligonucleotide
agtctgtggcaacttcaataattggccgtgcaatagccgagagtatttcagggtcagtat

SEQ ID NO: 327084 - DNA, 60 bp, Artificial
  Synthetic oligonucleotide
agtctgtgtagccctgcatatggcgtgtcgtcggactcatatgaggtccccgtgaaactg

SEQ ID NO: 327085 - DNA, 58 bp, Artificial
  Synthetic oligonucleotide
agtctgttacttctcggcaaaatactaaggactctgtgtatgctcaaaacgaaatgct

SEQ ID NO: 327086 - DNA, 57 bp, Artificial
  Synthetic oligonucleotide
agtcttaagtgaatacacaggttctaatactgttcttctgtccaacggtataattca

SEQ ID NO: 327087 - DNA, 51 bp, Artificial
  Synthetic oligonucleotide
agtcttacacattcgctcatacatgtatggccgttaactacagagtctaca

SEQ ID NO: 327088 - DNA, 54 bp, Artificial
  Synthetic oligonucleotide
agtcttagaggtcttgtatatttatacttaccacacaagatggaccggagcagc

SEQ ID NO: 327089 - DNA, 53 bp, Artificial
  Synthetic oligonucleotide
agtcttagtgcccacacaacaatccacgcttatctggtgaatagtggcacgaa

SEQ ID NO: 327090 - DNA, 59 bp, Artificial
  Synthetic oligonucleotide
agtcttatttacgccgaactcaatcgatgggaattcagcttgaccaaaggatcattctc

SEQ ID NO: 327091 - DNA, 56 bp, Artificial
  Synthetic oligonucleotide
agtcttcaaagaacacagagaagttgagatcaatgtgcttcttcctcagattgcag

SEQ ID NO: 327092 - DNA, 60 bp, Artificial
  Synthetic oligonucleotide
agtcttcatcatgagaagattgcgcaaccctttagctggttacgtttacacaggattcat

SEQ ID NO: 327093 - DNA, 60 bp, Artificial
  Synthetic oligonucleotide
agtcttcatcctcgttcacgaggattatgcatggaatgccatttgacagcagccgtttct

SEQ ID NO: 327094 - DNA, 55 bp, Artificial
  Synthetic oligonucleotide
agtcttccccgtcctactgtcaccctcaattactatacttatgggtctcagaggc

SEQ ID NO: 327095 - DNA, 56 bp, Artificial
  Synthetic oligonucleotide
agtcttctacaaaaacaaaatagtgagttgagggctaggatagccaccaataaaga

SEQ ID NO: 327096 - DNA, 60 bp, Artificial
  Synthetic oligonucleotide
agtcttctcatcacgctctgtctagttggtccatcactcggtggtcttcctacacctgcg

SEQ ID NO: 327097 - DNA, 60 bp, Artificial
  Synthetic oligonucleotide
agtcttctggactctgactttgcagatgagccatggtcactcatggacacgagtagagag

SEQ ID NO: 327098 - DNA, 60 bp, Artificial
  Synthetic oligonucleotide
agtcttcttcggcgctcgcgagacccacaagagtctgtcccggagctagtcatggcctac

SEQ ID NO: 327099 - DNA, 60 bp, Artificial
  Synthetic oligonucleotide
agtcttgaatgggatcattctgttcttgctcgagcaggtgattcggaccacaccaggcca

SEQ ID NO: 327100 - DNA, 58 bp, Artificial
  Synthetic oligonucleotide
agtcttgcgaaagtttaatgccactgttactggtggccaatatgcttgtaaggaacaa

SEQ ID NO: 327101 - DNA, 59 bp, Artificial
  Synthetic oligonucleotide
agtcttgcgacttcacttttgaagtccacctcctccgacagtgctacctcagggtagca

SEQ ID NO: 327102 - DNA, 59 bp, Artificial
  Synthetic oligonucleotide
agtcttgctgctcacacgaaattatttgcgttttgtaaatgcctaatgcttagtttctg

SEQ ID NO: 327103 - DNA, 55 bp, Artificial
  Synthetic oligonucleotide
agtcttggagtatttcctcttatagagacgtttactcaaggctatgtgtcgttcg

SEQ ID NO: 327104 - DNA, 55 bp, Artificial
  Synthetic oligonucleotide
agtcttgggctgatagagaggtctcaaaggagtttaaaggagttagtgacaatgg

SEQ ID NO: 327105 - DNA, 54 bp, Artificial
  Synthetic oligonucleotide
agtcttggtaggactgatcatagcaatgggtctttggatgtgttcaaatggctc

SEQ ID NO: 327106 - DNA, 51 bp, Artificial
  Synthetic oligonucleotide
agtcttgtgtattctctgggttctcaccatttgttccacatttaccccacg

SEQ ID NO: 327107 - DNA, 55 bp, Artificial
  Synthetic oligonucleotide
agtcttgtttgtgtacctctacactacttccacactaaaagatgcaagcctttaa

SEQ ID NO: 327108 - DNA, 50 bp, Artificial
  Synthetic oligonucleotide
agtctttactgtaggtttaataggtgtaacatgaggtgttacagtagtcc

SEQ ID NO: 327109 - DNA, 60 bp, Artificial
  Synthetic oligonucleotide
agtctttatagctctgtccctctcctggattgcagagcacgatagagggtatgccacctt

SEQ ID NO: 327110 - DNA, 55 bp, Artificial
  Synthetic oligonucleotide
agtctttattaggtgctgggattgttcggggaaaactggcggaattgaacataga

SEQ ID NO: 327111 - DNA, 56 bp, Artificial
  Synthetic oligonucleotide
agtctttcaaggtcattgaggtttgggtatttaactgtgtagagcaggccaaggtc

SEQ ID NO: 327112 - DNA, 55 bp, Artificial
  Synthetic oligonucleotide
agtctttggcgtgctttcccgtaaggaaaatagtagtctctatgctctcctgggt

SEQ ID NO: 327113 - DNA, 54 bp, Artificial
  Synthetic oligonucleotide
agtctttgtcctacgtagagtgtctgcgtttgttaaccgatttgaagagtttag

SEQ ID NO: 327114 - DNA, 60 bp, Artificial
  Synthetic oligonucleotide
agtctttgtcgcaatttcactgtgcttctgttgattcgctgattaaaaagcaaatggcat

SEQ ID NO: 327115 - DNA, 59 bp, Artificial
  Synthetic oligonucleotide
agtctttgtgaacgaggcaaagcaaacaatgaactatctggtgtccgtcgaatggcgcg

SEQ ID NO: 327116 - DNA, 55 bp, Artificial
  Synthetic oligonucleotide
agtcttttggcctccattgagtgtctcgctcctccttcgtatggtctccctcgta

SEQ ID NO: 327117 - DNA, 60 bp, Artificial
  Synthetic oligonucleotide
agtgaaaacaatcacggatgaccaaattgaagtgactaatgctactgagctggttcagag

SEQ ID NO: 327118 - DNA, 56 bp, Artificial
  Synthetic oligonucleotide
agtgaaaacaggcctaacgagaccttcagacctggaggaggagatatgagggacaa

SEQ ID NO: 327119 - DNA, 52 bp, Artificial
  Synthetic oligonucleotide
agtgaaaacggttatgaattccaacgcatgtcggagttctggaaggttgctt

SEQ ID NO: 327120 - DNA, 57 bp, Artificial
  Synthetic oligonucleotide
agtgaaaatgaatccaaatcagaagataataacaattggttccgtctctctaaccat

SEQ ID NO: 327121 - DNA, 54 bp, Artificial
  Synthetic oligonucleotide
agtgaaaccaccgaggtctaggggcaattcgggctgggcagtctagcggaacgg

SEQ ID NO: 327122 - DNA, 60 bp, Artificial
  Synthetic oligonucleotide
agtgaaaccagtgtctgaatcctccgacgcacgggctcggctcagcggagtgcacctgct

SEQ ID NO: 327123 - DNA, 55 bp, Artificial
  Synthetic oligonucleotide
agtgaaagccgcggggttattgtaccacggaatgccagtaatggggggccatcaa

SEQ ID NO: 327124 - DNA, 59 bp, Artificial
  Synthetic oligonucleotide
agtgaaagggtgggcttttgattatggaagtgatgtttggatgggaagaacaatcagca

SEQ ID NO: 327125 - DNA, 60 bp, Artificial
  Synthetic oligonucleotide
agtgaaagtaaaaccggaggctgaatctctcgacgcacggactcggcttgctgagtgcac

SEQ ID NO: 327126 - DNA, 58 bp, Artificial
  Synthetic oligonucleotide
agtgaaagtttgagacttgcaactggactaaggaatgttccacagattgaaactagag

SEQ ID NO: 327127 - DNA, 60 bp, Artificial
  Synthetic oligonucleotide
agtgaaatgcctgatctaccaggtgtgatgagatcaaactacgatgttcgcgagctacgg

SEQ ID NO: 327128 - DNA, 55 bp, Artificial
  Synthetic oligonucleotide
agtgaacaaatttcaagtcaacaatgaactatggcaaggagttaaggcctgtgtc

SEQ ID NO: 327129 - DNA, 60 bp, Artificial
  Synthetic oligonucleotide
agtgaacaatgtagcatggtggcaacttcatctagaaaacgtgagtgggcatttggagga

SEQ ID NO: 327130 - DNA, 51 bp, Artificial
  Synthetic oligonucleotide
agtgaacaattagtagatattgcgcatactaaacaattaagacgtgataga

SEQ ID NO: 327131 - DNA, 59 bp, Artificial
  Synthetic oligonucleotide
agtgaacataaattacatccctggttacaatttcctacacagctcatgtagctttttga

SEQ ID NO: 327132 - DNA, 56 bp, Artificial
  Synthetic oligonucleotide
agtgaactccgtcaatgtacagtcgaggaaacttttggctcggtttggagaccaga

SEQ ID NO: 327133 - DNA, 50 bp, Artificial
  Synthetic oligonucleotide
agtgaagaaatcaacgaaagaagaatctaagcagttacttgaagtgctga

SEQ ID NO: 327134 - DNA, 60 bp, Artificial
  Synthetic oligonucleotide
agtgaagcaaaatccatcaaaggaagcagtgacggaagtgtgcctcaaagatgacgtaag

SEQ ID NO: 327135 - DNA, 52 bp, Artificial
  Synthetic oligonucleotide
agtgaagcctacattagcaattgcaacaatattcttcgggagttatggcttg

SEQ ID NO: 327136 - DNA, 54 bp, Artificial
  Synthetic oligonucleotide
agtgaaggggcacgtcatcacaatggggataagttccctagttggggcaactcc

SEQ ID NO: 327137 - DNA, 60 bp, Artificial
  Synthetic oligonucleotide
agtgaagggtttgctaatatcattaggagtgtctgatctgagaaataatacaggaggatc

SEQ ID NO: 327138 - DNA, 55 bp, Artificial
  Synthetic oligonucleotide
agtgaagtggaagaagccaaccagggagaaaacaactgtttgctacaccctataa

SEQ ID NO: 327139 - DNA, 55 bp, Artificial
  Synthetic oligonucleotide
agtgaagtgtatggagacactccggattggatagtaagacaaacaattgtgggac

SEQ ID NO: 327140 - DNA, 60 bp, Artificial
  Synthetic oligonucleotide
agtgaagtttgtaacaggccaccttgttgttgacactcgcagtgagtcagtggtgtttga

SEQ ID NO: 327141 - DNA, 60 bp, Artificial
  Synthetic oligonucleotide
agtgaataccagaatttagatgagcaggacagagtaccaacggaagattcacctttcaga

SEQ ID NO: 327142 - DNA, 56 bp, Artificial
  Synthetic oligonucleotide
agtgaatacgacacgcatttaactcgctataattttcggaagggcatgttagaagg

SEQ ID NO: 327143 - DNA, 60 bp, Artificial
  Synthetic oligonucleotide
agtgaatacgaggactgtgcactccaagagtgcattcaatcagcaagacaactggtggcc

SEQ ID NO: 327144 - DNA, 59 bp, Artificial
  Synthetic oligonucleotide
agtgaatcagagttagtcagtcaaataatagagcagctaataaacaaagaaagggtcta

SEQ ID NO: 327145 - DNA, 56 bp, Artificial
  Synthetic oligonucleotide
agtgaatgaggagagttgaaacggaggaacccacggtgacggagcctttgcgaata

SEQ ID NO: 327146 - DNA, 60 bp, Artificial
  Synthetic oligonucleotide
agtgaatgcaccgaatcatgagggaatacaagcaggggtagatagattttatagaacatg

SEQ ID NO: 327147 - DNA, 60 bp, Artificial
  Synthetic oligonucleotide
agtgaatgcaccgaatcatgagggaatacaagcgggagtggatagattctataggacctg

SEQ ID NO: 327148 - DNA, 60 bp, Artificial
  Synthetic oligonucleotide
agtgaatggagatatggtgtcatcagatgcgtgtttgcttcgagtgccatcggggcccaa

SEQ ID NO: 327149 - DNA, 55 bp, Artificial
  Synthetic oligonucleotide
agtgaatggggaatggtaatgctgctactgctacggtttaagtgtaacaaaagca

SEQ ID NO: 327150 - DNA, 60 bp, Artificial
  Synthetic oligonucleotide
agtgaatggtcctgagcaatgtgtcctatcgttcgatgcctcccgacagtctatgggggc

SEQ ID NO: 327151 - DNA, 60 bp, Artificial
  Synthetic oligonucleotide
agtgaattcacgcgcgaaacgtgcgctgagatcgcgaacaaaattgcgcactcagcccaa

SEQ ID NO: 327152 - DNA, 55 bp, Artificial
  Synthetic oligonucleotide
agtgaatttattgatactacaactagagataacgcaggatggagtacctcaagac

SEQ ID NO: 327153 - DNA, 58 bp, Artificial
  Synthetic oligonucleotide
agtgaattttcactgttggtgcccggaagggtatatccactgaatgtttagctgttga

SEQ ID NO: 327154 - DNA, 55 bp, Artificial
  Synthetic oligonucleotide
agtgacaaacgaatactacgagcctcttgacctaactacgtcgtctgggtaccca

SEQ ID NO: 327155 - DNA, 53 bp, Artificial
  Synthetic oligonucleotide
agtgacaaccgaaggattatcttaagtgtgtaggccactgtgcctttgtgacc

SEQ ID NO: 327156 - DNA, 60 bp, Artificial
  Synthetic oligonucleotide
agtgacaagacaacatgtggggactgggtaattgcagcctttggggtgcaccatagtgtg

SEQ ID NO: 327157 - DNA, 60 bp, Artificial
  Synthetic oligonucleotide
agtgacaagggagccgtatgtgtcatgtgacccattagggtgtaggatgtacgcattgca

SEQ ID NO: 327158 - DNA, 50 bp, Artificial
  Synthetic oligonucleotide
agtgacaatatatcacgatctaggcgcgagtcatctaaacgggcgccagt

SEQ ID NO: 327159 - DNA, 58 bp, Artificial
  Synthetic oligonucleotide
agtgacacaacagggcggctcaggttgttgtactatgtgcgtagaaataggtgggact

SEQ ID NO: 327160 - DNA, 55 bp, Artificial
  Synthetic oligonucleotide
agtgacaccttaccaagttgacagttggtgtcctaattgtaacaaaggtgtaaga

SEQ ID NO: 327161 - DNA, 60 bp, Artificial
  Synthetic oligonucleotide
agtgacagcgttatgttcgattgcgtcctttgcattcctactattgatgccgactctccc

SEQ ID NO: 327162 - DNA, 54 bp, Artificial
  Synthetic oligonucleotide
agtgacagtaaagggtacttccgttgattctattacgccagtcgatttagtggg

SEQ ID NO: 327163 - DNA, 60 bp, Artificial
  Synthetic oligonucleotide
agtgacagtgaagaaacagaagaagtcttcgagaacatctctggagagaaacaaacacaa

SEQ ID NO: 327164 - DNA, 59 bp, Artificial
  Synthetic oligonucleotide
agtgacatagcaggaacaactagtacccttcaagaacaaataggatggatgacaaacaa

SEQ ID NO: 327165 - DNA, 58 bp, Artificial
  Synthetic oligonucleotide
agtgacatcccagggttcaggaagtgcggcaaactcccagcgctataccatcccccaa

SEQ ID NO: 327166 - DNA, 55 bp, Artificial
  Synthetic oligonucleotide
agtgacatcccgccctgtggacacatcccctctaccgatctcgggtggacgcttg

SEQ ID NO: 327167 - DNA, 60 bp, Artificial
  Synthetic oligonucleotide
agtgacatctgcactggccatctgtgacacattcctaagagaggtctcggagtgtgtcaa

SEQ ID NO: 327168 - DNA, 58 bp, Artificial
  Synthetic oligonucleotide
agtgacattcgatctaattatactgagtgaaaataggttatctgctaaaaataaccca

SEQ ID NO: 327169 - DNA, 60 bp, Artificial
  Synthetic oligonucleotide
agtgaccagctcagttgatctcgttgaaacaaaccacacaggaacatactgctcactgaa

SEQ ID NO: 327170 - DNA, 60 bp, Artificial
  Synthetic oligonucleotide
agtgaccctaaattcttctgtaagtatgacctgtgagagaccatacaatctatcagtaca

SEQ ID NO: 327171 - DNA, 58 bp, Artificial
  Synthetic oligonucleotide
agtgaccgaaggaatcacagtcctgaatctaccaactgggtttgacaagccatacgtc

SEQ ID NO: 327172 - DNA, 58 bp, Artificial
  Synthetic oligonucleotide
agtgaccgagatgtttagggagtacaaccatagacacagtgttggggccactcttgag

SEQ ID NO: 327173 - DNA, 51 bp, Artificial
  Synthetic oligonucleotide
agtgaccgctaacaaaaattcgcaagcggagatttctcaacgaatctccaa

SEQ ID NO: 327174 - DNA, 60 bp, Artificial
  Synthetic oligonucleotide
agtgaccgctactcagggcactcagaccgacgattcttcgagtgagtacatcgactggag

SEQ ID NO: 327175 - DNA, 51 bp, Artificial
  Synthetic oligonucleotide
agtgaccgtcctgaataccatcccacttaaagggttggttcgggcttcggt

SEQ ID NO: 327176 - DNA, 60 bp, Artificial
  Synthetic oligonucleotide
agtgacctctctactgctgtgagtaccttgttggagagcgggagtctggtgaccgttgca

SEQ ID NO: 327177 - DNA, 55 bp, Artificial
  Synthetic oligonucleotide
agtgacctggaatgacaatatccaggtggctgttgaccactattcagcccagcta

SEQ ID NO: 327178 - DNA, 57 bp, Artificial
  Synthetic oligonucleotide
agtgacctggcccacattgtcttccccgtcctactatcaccctcaatcactacactt

SEQ ID NO: 327179 - DNA, 60 bp, Artificial
  Synthetic oligonucleotide
agtgaccttctggcaagtgtggatagtgaagaggtcaggcaatattgtagggatcagggt

SEQ ID NO: 327180 - DNA, 60 bp, Artificial
  Synthetic oligonucleotide
agtgacgaaccggagctgagatcgcttgcaagctggattcaaagtgagttcaataaggcg

SEQ ID NO: 327181 - DNA, 52 bp, Artificial
  Synthetic oligonucleotide
agtgacgcaaggaaaatgccagttatccactctgtttctcataccaacctag

SEQ ID NO: 327182 - DNA, 60 bp, Artificial
  Synthetic oligonucleotide
agtgacgcagagatggagattttactcagcggattgatggtttggtgtcttgagaacgga

SEQ ID NO: 327183 - DNA, 60 bp, Artificial
  Synthetic oligonucleotide
agtgacgcgcttcggcgtgctcctttggtgattcggcgactggttacaggagagtaggca

SEQ ID NO: 327184 - DNA, 59 bp, Artificial
  Synthetic oligonucleotide
agtgacgctaacccatagggtaggccaagtctttgttactcctgagcttgtcattgtga

SEQ ID NO: 327185 - DNA, 60 bp, Artificial
  Synthetic oligonucleotide
agtgacgctggaatctttggagtataaagtaggatcctacgtcacacatggtcgtcttga

SEQ ID NO: 327186 - DNA, 57 bp, Artificial
  Synthetic oligonucleotide
agtgacggagcaaggtctttcaatccctttgattaatgactggacaaaagtgccaat

SEQ ID NO: 327187 - DNA, 60 bp, Artificial
  Synthetic oligonucleotide
agtgacggcgtgtgtggtttcattcacaccaatgactcttaaacgagagcgtctctctct

SEQ ID NO: 327188 - DNA, 59 bp, Artificial
  Synthetic oligonucleotide
agtgacgggatcctcaaagacgaggcttatgaacgaattactagagataatccatgccc

SEQ ID NO: 327189 - DNA, 60 bp, Artificial
  Synthetic oligonucleotide
agtgacgggtcatggtcgacagttagtagtggggctgacacggaggatgtcgtgtgctgc

SEQ ID NO: 327190 - DNA, 60 bp, Artificial
  Synthetic oligonucleotide
agtgacgtcacacacttgcgtaagtctacagtgcgctcttggctggttcttacggcgccg

SEQ ID NO: 327191 - DNA, 51 bp, Artificial
  Synthetic oligonucleotide
agtgacgtcatgttcagtcgaccgaattggaaaccctaacgcatctttgat

SEQ ID NO: 327192 - DNA, 59 bp, Artificial
  Synthetic oligonucleotide
agtgacgttaactcataagataggccaagtctttgttactcctgagcttgtcgtcgtga

SEQ ID NO: 327193 - DNA, 58 bp, Artificial
  Synthetic oligonucleotide
agtgacgttcacaagaaacgtttacagcgctcccgcatgtcccatcctatttatctag

SEQ ID NO: 327194 - DNA, 58 bp, Artificial
  Synthetic oligonucleotide
agtgactattgtgctgctagtgctccttgtactatggtgccttgcactcacaatcagc

SEQ ID NO: 327195 - DNA, 59 bp, Artificial
  Synthetic oligonucleotide
agtgactccacgcttgcttgcttaaagccctcttcaataaagctgccattttagaagta

SEQ ID NO: 327196 - DNA, 60 bp, Artificial
  Synthetic oligonucleotide
agtgactgttgatggagcagacggagtaaaggggttttcatacagatatggcaatggtgt

SEQ ID NO: 327197 - DNA, 60 bp, Artificial
  Synthetic oligonucleotide
agtgacttctatataatttctagatcacaggagtcagcgtgtactgagtatataaataac

SEQ ID NO: 327198 - DNA, 57 bp, Artificial
  Synthetic oligonucleotide
agtgacttgcaattagattttatctgcttgctgtttattagtggggttagtcttggg

SEQ ID NO: 327199 - DNA, 58 bp, Artificial
  Synthetic oligonucleotide
agtgacttgttatctaattcgaccgtttcgttgagctttctcttgcgtgagcgaatta

SEQ ID NO: 327200 - DNA, 55 bp, Artificial
  Synthetic oligonucleotide
agtgactttcctcccgcgctcagttgtttcttcttgttctcgagggccttccttc

SEQ ID NO: 327201 - DNA, 55 bp, Artificial
  Synthetic oligonucleotide
agtgagaaatagtcccaaaggagtggccttgaatacggcgccacctgtcttaaac

SEQ ID NO: 327202 - DNA, 60 bp, Artificial
  Synthetic oligonucleotide
agtgagaagatatatcaatcgacttgcttttccagtcactgggaaaaatgtcacatcctc

SEQ ID NO: 327203 - DNA, 60 bp, Artificial
  Synthetic oligonucleotide
agtgagaagatttattgcagagatgagacagcgcgtacaagctgacagaaatgttgttaa

SEQ ID NO: 327204 - DNA, 60 bp, Artificial
  Synthetic oligonucleotide
agtgagaaggacacatggctgtatgacaccctcagcacttcattcgctgaacttggtctc

SEQ ID NO: 327205 - DNA, 51 bp, Artificial
  Synthetic oligonucleotide
agtgagaaggatccggcccttacccccaaggttgcccagtcggcccccact

SEQ ID NO: 327206 - DNA, 58 bp, Artificial
  Synthetic oligonucleotide
agtgagacccacatcccaacaacattcaattacgggataatttacacagaggcagaag

SEQ ID NO: 327207 - DNA, 56 bp, Artificial
  Synthetic oligonucleotide
agtgagataaacttacgtggtttatgcttggttcctcctttggtgattgaaactgc

SEQ ID NO: 327208 - DNA, 53 bp, Artificial
  Synthetic oligonucleotide
agtgagatacacggctaaacaactcacggaggatagcacgggtaggacatggc

SEQ ID NO: 327209 - DNA, 60 bp, Artificial
  Synthetic oligonucleotide
agtgagatcctgtgaagctacattcgtgaacataacaggatgttattcatgtaactatgg

SEQ ID NO: 327210 - DNA, 60 bp, Artificial
  Synthetic oligonucleotide
agtgagatggggtgttacactatcaatagagtgaagtcattcaagctgtgcgaaaacagt

SEQ ID NO: 327211 - DNA, 55 bp, Artificial
  Synthetic oligonucleotide
agtgagcacgaggaaggtttaaattgcaatagaaagctacctttggaggaggtaa

SEQ ID NO: 327212 - DNA, 60 bp, Artificial
  Synthetic oligonucleotide
agtgagcacgcagggtctccattttgaagcgggaggtttgaacgcgcagccgccatgccg

SEQ ID NO: 327213 - DNA, 60 bp, Artificial
  Synthetic oligonucleotide
agtgagcatctaatattgcccttagatagtcttctggtagagaagggtccaccatgccag

SEQ ID NO: 327214 - DNA, 55 bp, Artificial
  Synthetic oligonucleotide
agtgagcatgtagctatatcaagtcattcagactctacaagtaaggacatgactc

SEQ ID NO: 327215 - DNA, 60 bp, Artificial
  Synthetic oligonucleotide
agtgagccgggagctgtgtcatcgcttcgtggtgaaacggcgatggttgttcaacatgga

SEQ ID NO: 327216 - DNA, 55 bp, Artificial
  Synthetic oligonucleotide
agtgagcctcactgtgctctgctagattgcatcatgtatcagtcggtaatggacg

SEQ ID NO: 327217 - DNA, 56 bp, Artificial
  Synthetic oligonucleotide
agtgagcgagaatacctcgaggaaaatggctggggtccctatatcaaggaatttaa

SEQ ID NO: 327218 - DNA, 56 bp, Artificial
  Synthetic oligonucleotide
agtgagcgataggaaagtgctaccaccggggaaactagtggcagaagaaacgatta

SEQ ID NO: 327219 - DNA, 59 bp, Artificial
  Synthetic oligonucleotide
agtgagcgcgtgaaccagaagacgaagcctctacgttcaacaagtccgtaagagagatc

SEQ ID NO: 327220 - DNA, 55 bp, Artificial
  Synthetic oligonucleotide
agtgagctttgcgtgtatgaagatagtgcgctacaggacatagcacacacgtgct

SEQ ID NO: 327221 - DNA, 59 bp, Artificial
  Synthetic oligonucleotide
agtgaggaaagacaaattcctgatggggagtggcgtgacgggtttgactggatcactga

SEQ ID NO: 327222 - DNA, 58 bp, Artificial
  Synthetic oligonucleotide
agtgaggaaatagtttttggcttgtattctaaaacgctttggaggtgccatgtcagca

SEQ ID NO: 327223 - DNA, 60 bp, Artificial
  Synthetic oligonucleotide
agtgaggacgcagtggaagaacgtcacagacggtggagttggtgcgatacagagaggggc

SEQ ID NO: 327224 - DNA, 55 bp, Artificial
  Synthetic oligonucleotide
agtgaggagaggtgctcactagacaaatagtttgttgtgaactcttcatggagtt

SEQ ID NO: 327225 - DNA, 60 bp, Artificial
  Synthetic oligonucleotide
agtgaggcacgaagtaatgcactgcgcacaggagagtgcctatgtcctgaaaccaactat

SEQ ID NO: 327226 - DNA, 60 bp, Artificial
  Synthetic oligonucleotide
agtgaggcagcaataccgcatggagttcaatctatttggatgtctgctagggagtatgaa

SEQ ID NO: 327227 - DNA, 54 bp, Artificial
  Synthetic oligonucleotide
agtgaggcttatcccggggaactcggaccagtcccggactgccggctccaggaa

SEQ ID NO: 327228 - DNA, 55 bp, Artificial
  Synthetic oligonucleotide
agtgaggcttatcccggggaactcggcgtatcgtccccacatagcagctcccgag

SEQ ID NO: 327229 - DNA, 56 bp, Artificial
  Synthetic oligonucleotide
agtgagggaggttgatccttcggtcgacattagcgctagcggtgggcaatctcagg

SEQ ID NO: 327230 - DNA, 59 bp, Artificial
  Synthetic oligonucleotide
agtgagggctacagacgtcatattgttcgtgaaaatcctagaggtattcgcaaattggc

SEQ ID NO: 327231 - DNA, 60 bp, Artificial
  Synthetic oligonucleotide
agtgagggtagattgctgacattcgctcatgccgacagtgagctgctgaacgcgaactat

SEQ ID NO: 327232 - DNA, 59 bp, Artificial
  Synthetic oligonucleotide
agtgagtactggaggaggcgggttgaacaagggcagattatacaggatcgtatagataa

SEQ ID NO: 327233 - DNA, 57 bp, Artificial
  Synthetic oligonucleotide
agtgagtatactagtgttattgtgtattaaatcagttattgttgggtgggcacacgg

SEQ ID NO: 327234 - DNA, 56 bp, Artificial
  Synthetic oligonucleotide
agtgagtccaagcgtttccgaaatccgatgtttcttggacgtctcccatgcacttt

SEQ ID NO: 327235 - DNA, 60 bp, Artificial
  Synthetic oligonucleotide
agtgagtctttatctactgtcacgcgctcgcttcaagctccgaccggaaccattagtcaa

SEQ ID NO: 327236 - DNA, 59 bp, Artificial
  Synthetic oligonucleotide
agtgagtgaccctcaaattctttggttgagaacataacagtgtaaactgtgtgtgagtg

SEQ ID NO: 327237 - DNA, 60 bp, Artificial
  Synthetic oligonucleotide
agtgagtgcatatgcattaatgattacgctcaactctcctccaagactcaagccaccatc

SEQ ID NO: 327238 - DNA, 60 bp, Artificial
  Synthetic oligonucleotide
agtgagtgcttggagtggatgcgggaggaggttgatagactgagcgctcacgacatcaac

SEQ ID NO: 327239 - DNA, 60 bp, Artificial
  Synthetic oligonucleotide
agtgagtgggagagatgaacaatctattgctgaggccatcattgtagcgatggtgttctc

SEQ ID NO: 327240 - DNA, 56 bp, Artificial
  Synthetic oligonucleotide
agtgagtggtatctacattaaaccaggaccgatctactaccaggactatacggggc

SEQ ID NO: 327241 - DNA, 59 bp, Artificial
  Synthetic oligonucleotide
agtgagttggagacctttgcgaagagatactcaaacggatctgtttgtgttgaatcgga

SEQ ID NO: 327242 - DNA, 54 bp, Artificial
  Synthetic oligonucleotide
agtgagtttgcaggtcgtaatggatttggcagatcctacggggttataaatccg

SEQ ID NO: 327243 - DNA, 55 bp, Artificial
  Synthetic oligonucleotide
agtgataaaacaagctgtacagattggtgtataacaggatatggaattagtccat

SEQ ID NO: 327244 - DNA, 60 bp, Artificial
  Synthetic oligonucleotide
agtgataagatcaagggagtccatttatttgtggaggctgcgggccctattgatgttgat

SEQ ID NO: 327245 - DNA, 58 bp, Artificial
  Synthetic oligonucleotide
agtgataataatattgatagagcaattttacaacttaatttgccaataggtgaggtta

SEQ ID NO: 327246 - DNA, 55 bp, Artificial
  Synthetic oligonucleotide
agtgatacacacagataatggtagcaatttcaccagtactgcagttaaagcagcc

SEQ ID NO: 327247 - DNA, 55 bp, Artificial
  Synthetic oligonucleotide
agtgatacaccaatcccgttaggaggtaatggggctatgtcaataatggaactgg

SEQ ID NO: 327248 - DNA, 60 bp, Artificial
  Synthetic oligonucleotide
agtgatactgcaaactggtcttggccagacggtgctgagttgccattcaccattgacaag

SEQ ID NO: 327249 - DNA, 60 bp, Artificial
  Synthetic oligonucleotide
agtgatagcgggatgtaaggctaaacatctcacggaggatagcaacgggtaggacatggc

SEQ ID NO: 327250 - DNA, 54 bp, Artificial
  Synthetic oligonucleotide
agtgatagcgtcgttcctggtagcgtgcgcttcagtttccgtgggcggacatac

SEQ ID NO: 327251 - DNA, 60 bp, Artificial
  Synthetic oligonucleotide
agtgatattatctctcccgatgcccccggcattcctcttggggatccctcatatgcaaca

SEQ ID NO: 327252 - DNA, 60 bp, Artificial
  Synthetic oligonucleotide
agtgatcaaagattgcagtacacattgcttggggaagtgttgaactactacacgcactgg

SEQ ID NO: 327253 - DNA, 60 bp, Artificial
  Synthetic oligonucleotide
agtgatcaacacagaacatatgccgtcaatgtttgtccctgtgggggacgtcgtgcagta

SEQ ID NO: 327254 - DNA, 60 bp, Artificial
  Synthetic oligonucleotide
agtgatcacgaagccactgcggtggaccaaccgacacaacctgatgtcgcaacatgtcgt

SEQ ID NO: 327255 - DNA, 52 bp, Artificial
  Synthetic oligonucleotide
agtgatccatactaacaacaaaaccggactgccttataatggccttcatgtc

SEQ ID NO: 327256 - DNA, 60 bp, Artificial
  Synthetic oligonucleotide
agtgatcctgctacgcaggagtggctctctcgcatgtgggatagggttgacatgctgact

SEQ ID NO: 327257 - DNA, 60 bp, Artificial
  Synthetic oligonucleotide
agtgatcgacagccgcaaaagtgtgaaacctaccatcattgaggagggtgatggaagagt

SEQ ID NO: 327258 - DNA, 55 bp, Artificial
  Synthetic oligonucleotide
agtgatcgagggttcccaattacccttctgtctaccagtgggggattatccacta

SEQ ID NO: 327259 - DNA, 60 bp, Artificial
  Synthetic oligonucleotide
agtgatcgatatgtttcctgagttgtgtttgaatttcaccgacacatcttactcctctca

SEQ ID NO: 327260 - DNA, 52 bp, Artificial
  Synthetic oligonucleotide
agtgatcgtggtaaggaaccacgacgacttgatcacagtgactgctacacta

SEQ ID NO: 327261 - DNA, 59 bp, Artificial
  Synthetic oligonucleotide
agtgatgaagcatggggggaaaatctatacgtataatggagagacaccaaacgctaata

SEQ ID NO: 327262 - DNA, 55 bp, Artificial
  Synthetic oligonucleotide
agtgatgaatggccgggctgccccggtgtcaccagtatggcataccatccgccac

SEQ ID NO: 327263 - DNA, 60 bp, Artificial
  Synthetic oligonucleotide
agtgatgaattcccctgtgcgtgaatccatgtcccgtacagcctatgtggaagtagatgg

SEQ ID NO: 327264 - DNA, 53 bp, Artificial
  Synthetic oligonucleotide
agtgatgacgcctagcgaagggtatacccaacatgtcgacgcggagagtatta

SEQ ID NO: 327265 - DNA, 60 bp, Artificial
  Synthetic oligonucleotide
agtgatgactggtggtgccgtaatattacatccagcaggtgttactctgtccacacaatt

SEQ ID NO: 327266 - DNA, 59 bp, Artificial
  Synthetic oligonucleotide
agtgatgatatatgcagacaacatctacatcctgcaagacaacacgtggtactcgatag

SEQ ID NO: 327267 - DNA, 60 bp, Artificial
  Synthetic oligonucleotide
agtgatgatccaaacacaactctagagctttcaatggtgagccgagattcagattttgat

SEQ ID NO: 327268 - DNA, 60 bp, Artificial
  Synthetic oligonucleotide
agtgatgcaacgtcgtcggatagaccgcgcaaagtgaacctctatcactatacccagtgg

SEQ ID NO: 327269 - DNA, 57 bp, Artificial
  Synthetic oligonucleotide
agtgatgcagggaccgaatgaacccccctctgttttccttgagtggctcttggaagc

SEQ ID NO: 327270 - DNA, 51 bp, Artificial
  Synthetic oligonucleotide
agtgatgcatggccccgtactcggtctcgaaccactccccgctcacagtcc

SEQ ID NO: 327271 - DNA, 55 bp, Artificial
  Synthetic oligonucleotide
agtgatgccgtggatagactactgtgttaagcacaggatgtgggctggtacacct

SEQ ID NO: 327272 - DNA, 58 bp, Artificial
  Synthetic oligonucleotide
agtgatgcctattctactttggtaccatattaccagatgattggtaggcaaaagatta

SEQ ID NO: 327273 - DNA, 58 bp, Artificial
  Synthetic oligonucleotide
agtgatgcgaacttaccaaggcgcttcactcggagacaattggagtacatttggaggg

SEQ ID NO: 327274 - DNA, 60 bp, Artificial
  Synthetic oligonucleotide
agtgatgcgcaagttttacgccaaggtcacaggtggacagtatgctagcaacgagcaggc

SEQ ID NO: 327275 - DNA, 59 bp, Artificial
  Synthetic oligonucleotide
agtgatggaagtttacaaacagaccacaatgacacccagtttggaggcaatccatataa

SEQ ID NO: 327276 - DNA, 57 bp, Artificial
  Synthetic oligonucleotide
agtgatggagacgttagggattgcaattaataggtacaatggtttaacgaatcattc

SEQ ID NO: 327277 - DNA, 60 bp, Artificial
  Synthetic oligonucleotide
agtgatggccagtttagtatggcctgttttgacactgagaaatgtctatgacatgaaaat

SEQ ID NO: 327278 - DNA, 55 bp, Artificial
  Synthetic oligonucleotide
agtgatggcggtacggaggacgtcgtgtgctgctcgatgtcctactcgtggacgg

SEQ ID NO: 327279 - DNA, 55 bp, Artificial
  Synthetic oligonucleotide
agtgatgggcgcgtattcatcaatgtatggtgatttaacggctatctggatggtc

SEQ ID NO: 327280 - DNA, 60 bp, Artificial
  Synthetic oligonucleotide
agtgatggtatcacctctggctgtaacatggtggaataggaatggaccaatgacaagtac

SEQ ID NO: 327281 - DNA, 60 bp, Artificial
  Synthetic oligonucleotide
agtgatgttacacgaggaactgaactcacacatcgcgtaggaaggcgattctgtgtgaaa

SEQ ID NO: 327282 - DNA, 53 bp, Artificial
  Synthetic oligonucleotide
agtgatgttacacgtggaactgggcttacccatcgagttggtaaaaggttttg

SEQ ID NO: 327283 - DNA, 55 bp, Artificial
  Synthetic oligonucleotide
agtgatgttactcgtgggattgggctaactcatagggttggtaagcgtttctgtg

SEQ ID NO: 327284 - DNA, 59 bp, Artificial
  Synthetic oligonucleotide
agtgatgttactcgtggtactgggctgacccatagagttggtaagagattttgtgtcaa

SEQ ID NO: 327285 - DNA, 55 bp, Artificial
  Synthetic oligonucleotide
agtgatgttggctcgtacgcaggcttgctagtcgcctgtggtcttggggtcaccc

SEQ ID NO: 327286 - DNA, 56 bp, Artificial
  Synthetic oligonucleotide
agtgattacaggagagagttttccgcgatccagtaactgtagttggtaccaaatac

SEQ ID NO: 327287 - DNA, 51 bp, Artificial
  Synthetic oligonucleotide
agtgattatgcttgtttggatcatttggtggcatttgaaccagcactaatc

SEQ ID NO: 327288 - DNA, 59 bp, Artificial
  Synthetic oligonucleotide
agtgattcttaccggtttctctgtttggattaatgcatgtaaatgcaaatctccatctt

SEQ ID NO: 327289 - DNA, 52 bp, Artificial
  Synthetic oligonucleotide
agtgattgtagaaacgtggatagtaacaagtctaaggtttgcactggtgatc

SEQ ID NO: 327290 - DNA, 55 bp, Artificial
  Synthetic oligonucleotide
agtgatttatagtcgtcaatctgacaacgaccatgaaggacaattaaggctagta

SEQ ID NO: 327291 - DNA, 60 bp, Artificial
  Synthetic oligonucleotide
agtgatttatcatacaagcatgctatattaaaagagtctcagtacacaataaaaagggat

SEQ ID NO: 327292 - DNA, 60 bp, Artificial
  Synthetic oligonucleotide
agtgatttatcccttaatatgtgattgtggatcaatactttaaagatacgatggagatgt

SEQ ID NO: 327293 - DNA, 55 bp, Artificial
  Synthetic oligonucleotide
agtgatttcaagcggcactgtgttcaacgctggaaactaagttatccgccggatc

SEQ ID NO: 327294 - DNA, 54 bp, Artificial
  Synthetic oligonucleotide
agtgcaaaaagtggctacagaaagcatagtaatatggggaaagacccctaagtt

SEQ ID NO: 327295 - DNA, 60 bp, Artificial
  Synthetic oligonucleotide
agtgcaaatgcctccacgtctgcaacgaccatagaccagttgtgcaagacgtttaatcta

SEQ ID NO: 327296 - DNA, 50 bp, Artificial
  Synthetic oligonucleotide
agtgcaacgatttaatttctgtccgctatcacttcgcgaacttgctatcc

SEQ ID NO: 327297 - DNA, 55 bp, Artificial
  Synthetic oligonucleotide
agtgcaacgcttcaaaatttcaccaaggggcgttaggagttttcctgataccaga

SEQ ID NO: 327298 - DNA, 60 bp, Artificial
  Synthetic oligonucleotide
agtgcaactatgtcacgtatggatctgatatactgagtgcacttaacatgaaggcagcta

SEQ ID NO: 327299 - DNA, 60 bp, Artificial
  Synthetic oligonucleotide
agtgcaagtggttgctgttaccatccgagaagaaacacgcctgggctgtagtcctagcga

SEQ ID NO: 327300 - DNA, 60 bp, Artificial
  Synthetic oligonucleotide
agtgcaatagcaggactgataatagcgctaatcttagcaatagtagtgtggactatagta

SEQ ID NO: 327301 - DNA, 60 bp, Artificial
  Synthetic oligonucleotide
agtgcaatccagttcaagacatcctcggaacttttatggtgttcgatgtgaatcatgagg

SEQ ID NO: 327302 - DNA, 59 bp, Artificial
  Synthetic oligonucleotide
agtgcaatcgaacgcaacggcttatcgcaagccgttgcgttacgtatgcactacttacc

SEQ ID NO: 327303 - DNA, 60 bp, Artificial
  Synthetic oligonucleotide
agtgcacacaggagaccaacaccaggtgggaaatgaaacgcagggagtcacggctgagat

SEQ ID NO: 327304 - DNA, 55 bp, Artificial
  Synthetic oligonucleotide
agtgcacacagtggagagtgcacctggtgaggcctttgggtcccttctggtaatc

SEQ ID NO: 327305 - DNA, 60 bp, Artificial
  Synthetic oligonucleotide
agtgcacatgcgggttcgccagcaataaaaccatagaatgtgcctgtagagacaacagtt

SEQ ID NO: 327306 - DNA, 56 bp, Artificial
  Synthetic oligonucleotide
agtgcaccaggcgaggcattcgggtccctggcaatcataattccaggggagtaccc

SEQ ID NO: 327307 - DNA, 60 bp, Artificial
  Synthetic oligonucleotide
agtgcaccatttagtcaacatcgaaatgcttcattgctctcaggaggttgcttatacgct

SEQ ID NO: 327308 - DNA, 50 bp, Artificial
  Synthetic oligonucleotide
agtgcaccgttccaattcctatctgactataaaccgatacctgcgcctag

SEQ ID NO: 327309 - DNA, 55 bp, Artificial
  Synthetic oligonucleotide
agtgcacgagccgcgtgtggtcacgcatgccgcggaacgcgtctctgaagagtat

SEQ ID NO: 327310 - DNA, 51 bp, Artificial
  Synthetic oligonucleotide
agtgcacgcactattttggtggctgggactattgcgacccaaaattcagtt

SEQ ID NO: 327311 - DNA, 52 bp, Artificial
  Synthetic oligonucleotide
agtgcacgttggtcgaaccgtgtggaactaaccgcccgaccccgcttcgagg

SEQ ID NO: 327312 - DNA, 60 bp, Artificial
  Synthetic oligonucleotide
agtgcactactgatgaggttccgaagatacccgcatacattgctaatgctgagggtagta

SEQ ID NO: 327313 - DNA, 52 bp, Artificial
  Synthetic oligonucleotide
agtgcactagatatagccgatatgttagagtatactagtttactggattgca

SEQ ID NO: 327314 - DNA, 57 bp, Artificial
  Synthetic oligonucleotide
agtgcactcatccctccggatgctcacgattcttttttaactaaggtccaagaactc

SEQ ID NO: 327315 - DNA, 53 bp, Artificial
  Synthetic oligonucleotide
agtgcactggttctggcattcaagaaaggtccgacaatcacaactgccgacct

SEQ ID NO: 327316 - DNA, 60 bp, Artificial
  Synthetic oligonucleotide
agtgcagaaacgtgtcaaatttgatctgtttttgctaagtatcgtactattagatagcat

SEQ ID NO: 327317 - DNA, 55 bp, Artificial
  Synthetic oligonucleotide
agtgcagaacgtttttccttactcagggttccctactcaatgacaaacattctaa

SEQ ID NO: 327318 - DNA, 51 bp, Artificial
  Synthetic oligonucleotide
agtgcagatcacagggtttactggatacgagagggaaggataatgaagtat

SEQ ID NO: 327319 - DNA, 58 bp, Artificial
  Synthetic oligonucleotide
agtgcagatcatagggtttattggatacgggaggggagaatagtgaagtatgaaaatg

SEQ ID NO: 327320 - DNA, 59 bp, Artificial
  Synthetic oligonucleotide
agtgcagatctatgttgcaccttatgggaaaggtgtacgacgcctgtaaggactcgtta

SEQ ID NO: 327321 - DNA, 50 bp, Artificial
  Synthetic oligonucleotide
agtgcagatgaaggtccttctcctaagagtaactattgtgatagcacaga

SEQ ID NO: 327322 - DNA, 55 bp, Artificial
  Synthetic oligonucleotide
agtgcagattaacggtgcactcaggtctgcgaggaggtcacagacgagtgggacg

SEQ ID NO: 327323 - DNA, 58 bp, Artificial
  Synthetic oligonucleotide
agtgcagcattttcctctttgtcgaggaaatctttatagctgcccccctctcctggat

SEQ ID NO: 327324 - DNA, 55 bp, Artificial
  Synthetic oligonucleotide
agtgcagcccaaaattttggaatggaagtgacctcatcagataaatctggtcccc

SEQ ID NO: 327325 - DNA, 60 bp, Artificial
  Synthetic oligonucleotide
agtgcagcggcatggcacacttctgtctaaatcagacgaaattacattgactaggttatt

SEQ ID NO: 327326 - DNA, 55 bp, Artificial
  Synthetic oligonucleotide
agtgcagctttggggtcctacagcaagaatctttgcatctatcttagccccgggg

SEQ ID NO: 327327 - DNA, 55 bp, Artificial
  Synthetic oligonucleotide
agtgcaggaggaacgtactctcgggaccagtaggtattcaaatgtaacggctaac

SEQ ID NO: 327328 - DNA, 60 bp, Artificial
  Synthetic oligonucleotide
agtgcaggtcctaaagctacaggtggacatacaatcattccagccggttatcctgctaat

SEQ ID NO: 327329 - DNA, 59 bp, Artificial
  Synthetic oligonucleotide
agtgcaggttgcaattgcatttgatcggaatcgtgaattccgcttgttttgtgtccccc

SEQ ID NO: 327330 - DNA, 60 bp, Artificial
  Synthetic oligonucleotide
agtgcagtgacgaatggctgagtttatcccgctagacggtgcaggaaccggatcgagcgc

SEQ ID NO: 327331 - DNA, 52 bp, Artificial
  Synthetic oligonucleotide
agtgcagtgtcagactgagaaaggtggcttaaacacgactttgccgttccac

SEQ ID NO: 327332 - DNA, 59 bp, Artificial
  Synthetic oligonucleotide
agtgcagtgttgcaggtgttcaagtttgctacagttggcagtggaaagcagtggagaca

SEQ ID NO: 327333 - DNA, 55 bp, Artificial
  Synthetic oligonucleotide
agtgcagttagcagaggttattttagtgctttaagaacaggttggtataccagtg

SEQ ID NO: 327334 - DNA, 58 bp, Artificial
  Synthetic oligonucleotide
agtgcataacgtcactatcaaatgttccccatttatcactataaatacgttagtccaa

SEQ ID NO: 327335 - DNA, 52 bp, Artificial
  Synthetic oligonucleotide
agtgcataagcaagcgccatgaacggaacatatacccgtgctgctgtgtcac

SEQ ID NO: 327336 - DNA, 52 bp, Artificial
  Synthetic oligonucleotide
agtgcatctggtcttaaaaccatgcacactctgatgagagccacggttggtg

SEQ ID NO: 327337 - DNA, 58 bp, Artificial
  Synthetic oligonucleotide
agtgcatcttatgcgcacacttcctttgggttctctggaccctaacttcggtaagctg

SEQ ID NO: 327338 - DNA, 60 bp, Artificial
  Synthetic oligonucleotide
agtgcatggaactatgcgactcactcactctatacatccgtgagaattacctcatgctac

SEQ ID NO: 327339 - DNA, 60 bp, Artificial
  Synthetic oligonucleotide
agtgcatggtaatgctcatgtagctagttgtgatgctatcatgactagatgtctcgcagt

SEQ ID NO: 327340 - DNA, 60 bp, Artificial
  Synthetic oligonucleotide
agtgcatgtgcagtgtaatgcaagtaagttccaccaaggtgcattattagtatttctagc

SEQ ID NO: 327341 - DNA, 55 bp, Artificial
  Synthetic oligonucleotide
agtgcattaatggtgacggtcccagttcatttcgtttgcactcatatgagtaatc

SEQ ID NO: 327342 - DNA, 51 bp, Artificial
  Synthetic oligonucleotide
agtgcattctactgcttagagtacttccctagtcagatgctgagaacaggt

SEQ ID NO: 327343 - DNA, 52 bp, Artificial
  Synthetic oligonucleotide
agtgcattgggttgtcaacaactttgtgtagatcatttatgtcaccagcgtt

SEQ ID NO: 327344 - DNA, 55 bp, Artificial
  Synthetic oligonucleotide
agtgcattgttgctgtcccaccgttgacataagggactcggccaggaagactgtg

SEQ ID NO: 327345 - DNA, 56 bp, Artificial
  Synthetic oligonucleotide
agtgccaaagatagtcactcacttaaataaccctaatcacttctggccaataaaac

SEQ ID NO: 327346 - DNA, 55 bp, Artificial
  Synthetic oligonucleotide
agtgccaaattaatgacagtcagaaaactagatccagaaacgggggatatcgtaa

SEQ ID NO: 327347 - DNA, 52 bp, Artificial
  Synthetic oligonucleotide
agtgccaacccacgtctttcccgctcctaacccgactcccacctcgggtcca

SEQ ID NO: 327348 - DNA, 59 bp, Artificial
  Synthetic oligonucleotide
agtgccaagagctaataacggactcgtcccagtggaccacgagagtaactccatgttca

SEQ ID NO: 327349 - DNA, 55 bp, Artificial
  Synthetic oligonucleotide
agtgccaaggtcgcaacgaccgagttcgttcaacgcgcgttggggaattttcaga

SEQ ID NO: 327350 - DNA, 60 bp, Artificial
  Synthetic oligonucleotide
agtgccacctaatgacgattatcagacgccgatagctaattctgtgacagtaagacagga

SEQ ID NO: 327351 - DNA, 51 bp, Artificial
  Synthetic oligonucleotide
agtgccacggatgaatctgtcaattgggcgacaaagcttatggaagttcga

SEQ ID NO: 327352 - DNA, 53 bp, Artificial
  Synthetic oligonucleotide
agtgccaggcagacagatgagagcttcctcaagcaccctttgtctctcagatt

SEQ ID NO: 327353 - DNA, 60 bp, Artificial
  Synthetic oligonucleotide
agtgccataccgctcacatggactgggatgattgatttacctggatactatgaggccata

SEQ ID NO: 327354 - DNA, 54 bp, Artificial
  Synthetic oligonucleotide
agtgccatcgtatgctccaggaggttgtgagtatgttcctggagattgttcggg

SEQ ID NO: 327355 - DNA, 58 bp, Artificial
  Synthetic oligonucleotide
agtgccatttgttcagtggttcgccgggctttccctcactgtctggctttcagttata

SEQ ID NO: 327356 - DNA, 60 bp, Artificial
  Synthetic oligonucleotide
agtgccctgtaaacgctgaacataagaggactatcaattgtggggctgctgcctctcgga

SEQ ID NO: 327357 - DNA, 56 bp, Artificial
  Synthetic oligonucleotide
agtgcccttacctgggatgccagtcgtggacgtgtccctacacgggcccagtgtcc

SEQ ID NO: 327358 - DNA, 59 bp, Artificial
  Synthetic oligonucleotide
agtgccgaactcttgaaagcgcaggtcacatccgaggtgctacgcgtgcgtaatttaat

SEQ ID NO: 327359 - DNA, 60 bp, Artificial
  Synthetic oligonucleotide
agtgccgctagcttgaggaccgccgccacaagatatgcccagaatgtcgcgcaatattgc

SEQ ID NO: 327360 - DNA, 51 bp, Artificial
  Synthetic oligonucleotide
agtgccgctcctcgcagtgggccctgggaccgtagaagagtgcccataacc

SEQ ID NO: 327361 - DNA, 56 bp, Artificial
  Synthetic oligonucleotide
agtgccgctgtacccggtaagtatccggatgtcattgaaaaatttgtggccaacag

SEQ ID NO: 327362 - DNA, 58 bp, Artificial
  Synthetic oligonucleotide
agtgccggtctgaaagatgatcttcttgaaaatttacaggcctaccagaagcggatgg

SEQ ID NO: 327363 - DNA, 60 bp, Artificial
  Synthetic oligonucleotide
agtgccgtactttgtgcgcgctcacgggctcattcgtgcatgcatgctggtgcggaaagc

SEQ ID NO: 327364 - DNA, 57 bp, Artificial
  Synthetic oligonucleotide
agtgcctaactgtcactggatgctagaaaaccttcccctctggtcactcctacacgg

SEQ ID NO: 327365 - DNA, 60 bp, Artificial
  Synthetic oligonucleotide
agtgcctattcgagcagctagtcagaacgcagcagggagtccacgtagacccctgccttg

SEQ ID NO: 327366 - DNA, 57 bp, Artificial
  Synthetic oligonucleotide
agtgcctcacgatctcactcccctgagatgtccaacagccacagctagacgatacag

SEQ ID NO: 327367 - DNA, 60 bp, Artificial
  Synthetic oligonucleotide
agtgcctctcacatacctcatggtgatgcacatagtcatatccttggccaatgtgtcacc

SEQ ID NO: 327368 - DNA, 60 bp, Artificial
  Synthetic oligonucleotide
agtgcctgatggcacccccatatgttttgctggtgatgacatgtgcgctctgaggaacct

SEQ ID NO: 327369 - DNA, 50 bp, Artificial
  Synthetic oligonucleotide
agtgccttaattatggtgtcaccaaaaatctccacctttaagtaagacaa

SEQ ID NO: 327370 - DNA, 54 bp, Artificial
  Synthetic oligonucleotide
agtgccttccactatgtgtttgagggagtgaaagaaccagcagtgctcaccaag

SEQ ID NO: 327371 - DNA, 54 bp, Artificial
  Synthetic oligonucleotide
agtgcgaaactcgagattttgacgttgcaattcctggcatcaaatgcgcaactt

SEQ ID NO: 327372 - DNA, 55 bp, Artificial
  Synthetic oligonucleotide
agtgcgaacgggtctccttacgttggcactgttcaggcatatgaactaggcttca

SEQ ID NO: 327373 - DNA, 59 bp, Artificial
  Synthetic oligonucleotide
agtgcgaagctagacaacgctgccgcacaactaagaagcctcgacaggaggatatcgga

SEQ ID NO: 327374 - DNA, 58 bp, Artificial
  Synthetic oligonucleotide
agtgcgaatacttttggatccctcgctataggatggtctccagaccccgccaacaata

SEQ ID NO: 327375 - DNA, 60 bp, Artificial
  Synthetic oligonucleotide
agtgcgacagatcctattgagaaggccaaagactcagtagacaactatgcactgccttca

SEQ ID NO: 327376 - DNA, 54 bp, Artificial
  Synthetic oligonucleotide
agtgcgacccttctctctgtacaccccccctgcccggtagcaacgccctcggag

SEQ ID NO: 327377 - DNA, 57 bp, Artificial
  Synthetic oligonucleotide
agtgcgacctcgaagtgacccttagtcctcacacctcgggcaaccatgggctgttgg

SEQ ID NO: 327378 - DNA, 56 bp, Artificial
  Synthetic oligonucleotide
agtgcgactatctatgtccaattgggttcgactgggttaactaattttcggctcag

SEQ ID NO: 327379 - DNA, 60 bp, Artificial
  Synthetic oligonucleotide
agtgcgactattgtcatgccgtacatcaactctgtccctatggacaatatgtttaggcat

SEQ ID NO: 327380 - DNA, 55 bp, Artificial
  Synthetic oligonucleotide
agtgcgagtgacctgtggttagagttccgttatgggcttatgccgttgttctacg

SEQ ID NO: 327381 - DNA, 55 bp, Artificial
  Synthetic oligonucleotide
agtgcgatgagacggtgccggatggagcgttcgtcactgcagggtttgacgggtc

SEQ ID NO: 327382 - DNA, 59 bp, Artificial
  Synthetic oligonucleotide
agtgcgatgggagactggttcatgcagggcagccccccggacttcgcggtccaggagga

SEQ ID NO: 327383 - DNA, 53 bp, Artificial
  Synthetic oligonucleotide
agtgcgcagcctaaatggtttggatcattgttgcgattgctcatatgtccctg

SEQ ID NO: 327384 - DNA, 60 bp, Artificial
  Synthetic oligonucleotide
agtgcgccgaggcttttggaccacgtctttatgtcatcacatcaattattggtggtgagt

SEQ ID NO: 327385 - DNA, 58 bp, Artificial
  Synthetic oligonucleotide
agtgcgccgaggcttttggaccacgtctttatgttatcactccaataattagaggtga

SEQ ID NO: 327386 - DNA, 56 bp, Artificial
  Synthetic oligonucleotide
agtgcgccgaggcttttggaccacgtcttttggacatcactttaataattgtggga

SEQ ID NO: 327387 - DNA, 56 bp, Artificial
  Synthetic oligonucleotide
agtgcgcgccaagcttatcgcccagggagggaaggccaaaatatgtggtctttacc

SEQ ID NO: 327388 - DNA, 56 bp, Artificial
  Synthetic oligonucleotide
agtgcgctgataaagtgaaccttctctctccgttttgggactctaatacaatttcc

SEQ ID NO: 327389 - DNA, 51 bp, Artificial
  Synthetic oligonucleotide
agtgcggaggggctcctagatgcctttgcatccaaacccccagtggacatt

SEQ ID NO: 327390 - DNA, 60 bp, Artificial
  Synthetic oligonucleotide
agtgcggatcaacgtcatcaattacgttataccaggcatcattactgtacacctttggac

SEQ ID NO: 327391 - DNA, 50 bp, Artificial
  Synthetic oligonucleotide
agtgcggatcaacgtcatcgattacgttgtaccatgcgtcgtttgaatac

SEQ ID NO: 327392 - DNA, 60 bp, Artificial
  Synthetic oligonucleotide
agtgcggatgggaatgcgagaacgtgagaatcgagtacaataacaagactcggaacaata

SEQ ID NO: 327393 - DNA, 60 bp, Artificial
  Synthetic oligonucleotide
agtgcgtaaactagtggatgcggtaaaccatgcatggggcgtcgaaaagatcaggtatgc

SEQ ID NO: 327394 - DNA, 55 bp, Artificial
  Synthetic oligonucleotide
agtgcgtaccgcactataaaacttgggggccacgaaataatggcaaacatgtggg

SEQ ID NO: 327395 - DNA, 55 bp, Artificial
  Synthetic oligonucleotide
agtgcgtaggtgagcgcccgtcgaaaccgctgagccgcaaccaacttctactgcg

SEQ ID NO: 327396 - DNA, 60 bp, Artificial
  Synthetic oligonucleotide
agtgcgtatgtggagttactacaatcatgccagatggggatttatgacattgaaggcgac

SEQ ID NO: 327397 - DNA, 52 bp, Artificial
  Synthetic oligonucleotide
agtgcgtcaacaacaaagtgagtgctcatctgttcggggtcattctgggagc

SEQ ID NO: 327398 - DNA, 56 bp, Artificial
  Synthetic oligonucleotide
agtgcgtgataggaggccatatgggtctccccaggattttggtcaggtttttaaca

SEQ ID NO: 327399 - DNA, 50 bp, Artificial
  Synthetic oligonucleotide
agtgcgtggatcgaagctcaggggataccacaagacccccggaccgtggg

SEQ ID NO: 327400 - DNA, 55 bp, Artificial
  Synthetic oligonucleotide
agtgctaaaacgaaagtatgttagtcctagcccgaagcagcgggtaatagattta

SEQ ID NO: 327401 - DNA, 52 bp, Artificial
  Synthetic oligonucleotide
agtgctaaaccggaaaaggacaaggtattgtcatacgacgtggttaaagtac

SEQ ID NO: 327402 - DNA, 51 bp, Artificial
  Synthetic oligonucleotide
agtgctaaccttaaggggggacttgctgtcactcgaaacacatcgaagtgt

SEQ ID NO: 327403 - DNA, 55 bp, Artificial
  Synthetic oligonucleotide
agtgctaacttttgaagacaaccaggcttccttgcgggaacaacaacctttgcaa

SEQ ID NO: 327404 - DNA, 55 bp, Artificial
  Synthetic oligonucleotide
agtgctaagtacttgtccagcgcgattaatcatgtatctactatatccgggaata

SEQ ID NO: 327405 - DNA, 60 bp, Artificial
  Synthetic oligonucleotide
agtgctagctcagatacactaagcctaactgcttactcaggtataccatcttattcctca

SEQ ID NO: 327406 - DNA, 54 bp, Artificial
  Synthetic oligonucleotide
agtgctaggtgagtagaatcgcgcgtccgtcgcggtgagggtatagaggtatcc

SEQ ID NO: 327407 - DNA, 54 bp, Artificial
  Synthetic oligonucleotide
agtgctagtcactttaggtacacctctagtgacgaacattcagcagctggatac

SEQ ID NO: 327408 - DNA, 59 bp, Artificial
  Synthetic oligonucleotide
agtgctatgaaatatgaacatccacaagggaggtcaacacgtcgacgcctgttcccctc

SEQ ID NO: 327409 - DNA, 51 bp, Artificial
  Synthetic oligonucleotide
agtgctattagtttgcttgataccatagcaatagcagtagctggctggacc

SEQ ID NO: 327410 - DNA, 55 bp, Artificial
  Synthetic oligonucleotide
agtgctattctcggtcggctcaacactctaccctgaaagtcgtaaacttctacaa

SEQ ID NO: 327411 - DNA, 54 bp, Artificial
  Synthetic oligonucleotide
agtgctcacttgtgtttgtgttcgctccagaaaataactggtgttacgatagat

SEQ ID NO: 327412 - DNA, 60 bp, Artificial
  Synthetic oligonucleotide
agtgctcagcatatagaagagtgttcttgttatccccgatatccagatgtcaggtgtgtc

SEQ ID NO: 327413 - DNA, 60 bp, Artificial
  Synthetic oligonucleotide
agtgctcagcatatagaggaatgttcctgttaccctcgatatccagatgttagatgtgtt

SEQ ID NO: 327414 - DNA, 60 bp, Artificial
  Synthetic oligonucleotide
agtgctcagcatatagaggagtgttcctgttaccctcgatatcctgacgtaagatgtatc

SEQ ID NO: 327415 - DNA, 60 bp, Artificial
  Synthetic oligonucleotide
agtgctcagcatgtagaggagtgttcctgttatcctcgatatcctggtgtcagatgtgtc

SEQ ID NO: 327416 - DNA, 59 bp, Artificial
  Synthetic oligonucleotide
agtgctcagcatgtggaggaatgctcctgttacccccggtatccagaagttaggtgtgt

SEQ ID NO: 327417 - DNA, 56 bp, Artificial
  Synthetic oligonucleotide
agtgctcccagtctgattccgtgttcccagaaccctccctccaaatttctgtggcg

SEQ ID NO: 327418 - DNA, 58 bp, Artificial
  Synthetic oligonucleotide
agtgctcctgccagcgtgagaagacgtcggtggaccaaccgtcccatgtggaggaaac

SEQ ID NO: 327419 - DNA, 53 bp, Artificial
  Synthetic oligonucleotide
agtgctcgggtagaaagtacgcgtctgcttaaacttcgaaccgttataatacg

SEQ ID NO: 327420 - DNA, 57 bp, Artificial
  Synthetic oligonucleotide
agtgctcgtttgcttgtcaccattacaaagaacgttattgaaaaatgctcttgttac

SEQ ID NO: 327421 - DNA, 58 bp, Artificial
  Synthetic oligonucleotide
agtgctgcaatctatttgagaaattcttccctagtagttcatacaggagaccggttgg

SEQ ID NO: 327422 - DNA, 60 bp, Artificial
  Synthetic oligonucleotide
agtgctgcagtggaagtttgacagtcaactagcactcagacacagggcccgcgagctaca

SEQ ID NO: 327423 - DNA, 59 bp, Artificial
  Synthetic oligonucleotide
agtgctgctgtcttttttggtgggctgggtattagcactggtcgtggtacaggcggtgc

SEQ ID NO: 327424 - DNA, 58 bp, Artificial
  Synthetic oligonucleotide
agtgctggaaaagaccccaagaagacaggaggcccgatctacagacggagagatggga

SEQ ID NO: 327425 - DNA, 55 bp, Artificial
  Synthetic oligonucleotide
agtgctggacgcagcagggcacgcgcctggagaccacgccgcagatctgtgacca

SEQ ID NO: 327426 - DNA, 58 bp, Artificial
  Synthetic oligonucleotide
agtgctgggaaggaccccaagaagactggaggtccaatctacaggaggagagatggta

SEQ ID NO: 327427 - DNA, 55 bp, Artificial
  Synthetic oligonucleotide
agtgctgggccaggggtctcgaatcaaatctctttcgtggtgccgtacaattctc

SEQ ID NO: 327428 - DNA, 53 bp, Artificial
  Synthetic oligonucleotide
agtgctggtacaacataaacgatgaactcagtaacgggtcactacatactgac

SEQ ID NO: 327429 - DNA, 55 bp, Artificial
  Synthetic oligonucleotide
agtgctggtgtgttttttggaggcctgggcattagtacgggccgaggaactggtg

SEQ ID NO: 327430 - DNA, 55 bp, Artificial
  Synthetic oligonucleotide
agtgctgtgttatcagcctcgtccaagtaatctttataagaggactttggtccag

SEQ ID NO: 327431 - DNA, 58 bp, Artificial
  Synthetic oligonucleotide
agtgcttagggatgttcacggtgttgaccctgaatctcaagagaagtcgggtgtgtgg

SEQ ID NO: 327432 - DNA, 54 bp, Artificial
  Synthetic oligonucleotide
agtgcttcattcagggggtagggtcacggcggcacgattcactcggccgtggac

SEQ ID NO: 327433 - DNA, 57 bp, Artificial
  Synthetic oligonucleotide
agtgcttccccctgttggtgatccgagtaaattcacaactcttttcaacatggaagc

SEQ ID NO: 327434 - DNA, 57 bp, Artificial
  Synthetic oligonucleotide
agtgcttgaatccaaggttaagtacgttttgcataatccacaggttaaattgctgtg

SEQ ID NO: 327435 - DNA, 52 bp, Artificial
  Synthetic oligonucleotide
agtgctttacgggatgtagtttcgtatggcggtccatggcaactcgagaccc

SEQ ID NO: 327436 - DNA, 60 bp, Artificial
  Synthetic oligonucleotide
agtgctttatttgcattagacctctgtgtaattagacatttgctaatggtggactctatg

SEQ ID NO: 327437 - DNA, 60 bp, Artificial
  Synthetic oligonucleotide
agtgctttgtgaagcgcgtggattggtctgtagaataccctattataggtgacgagctga

SEQ ID NO: 327438 - DNA, 55 bp, Artificial
  Synthetic oligonucleotide
agtggaaacacaagagcgtgtttatataaatccaaaaccaatctctgcacgaaag

SEQ ID NO: 327439 - DNA, 51 bp, Artificial
  Synthetic oligonucleotide
agtggaaacagcgaccaagcaacgataatctggacgagttatgcgatctgc

SEQ ID NO: 327440 - DNA, 58 bp, Artificial
  Synthetic oligonucleotide
agtggaaacctagccatagcttacatggatgtgtttcgacccaaagtccctatccatg

SEQ ID NO: 327441 - DNA, 50 bp, Artificial
  Synthetic oligonucleotide
agtggaaagcgccgtatctagggtggcagatacaattatgagtggcccgt

SEQ ID NO: 327442 - DNA, 59 bp, Artificial
  Synthetic oligonucleotide
agtggaaatgacatatgagaagcacaatgggaagtttcaaacaacaactgtcctgtttg

SEQ ID NO: 327443 - DNA, 57 bp, Artificial
  Synthetic oligonucleotide
agtggaacacaatggaataacactctaaacaatgtagaggcaaagttaaagtctcat

SEQ ID NO: 327444 - DNA, 60 bp, Artificial
  Synthetic oligonucleotide
agtggaacagttcctgatgcttgggagagcatcaaacccgtccttggtaacaatggcaca

SEQ ID NO: 327445 - DNA, 54 bp, Artificial
  Synthetic oligonucleotide
agtggaaccagttttagatggtccttatcaacccactacattcaaaccacccaa

SEQ ID NO: 327446 - DNA, 56 bp, Artificial
  Synthetic oligonucleotide
agtggaacccccagactgtacgaaaatgcctcatccggggcatgtttcccatcctg

SEQ ID NO: 327447 - DNA, 50 bp, Artificial
  Synthetic oligonucleotide
agtggaacgaggatcacacagccatcaacaaattcattcggctcgagtat

SEQ ID NO: 327448 - DNA, 55 bp, Artificial
  Synthetic oligonucleotide
agtggaacttctgggacgcagcagtctcaggggactgcagaaagggtgggacacc

SEQ ID NO: 327449 - DNA, 56 bp, Artificial
  Synthetic oligonucleotide
agtggaagaatctcacagacggtggtgtgggagcgattaagaagggtgcgttgtac

SEQ ID NO: 327450 - DNA, 60 bp, Artificial
  Synthetic oligonucleotide
agtggaagatatgtattccatagtgctgcacatccaacttgagcacaaaaggcattcaac

SEQ ID NO: 327451 - DNA, 55 bp, Artificial
  Synthetic oligonucleotide
agtggaatagtacacatccgcgaagaagcaaatgggacccgaagggtcgcggagt

SEQ ID NO: 327452 - DNA, 60 bp, Artificial
  Synthetic oligonucleotide
agtggaatctgctgttctaagaggatttctcattttgggcaaggaagacaagagatatgg

SEQ ID NO: 327453 - DNA, 56 bp, Artificial
  Synthetic oligonucleotide
agtggaatctgctgttctaaggggattcctcattctaggcaaagaggataggagat

SEQ ID NO: 327454 - DNA, 56 bp, Artificial
  Synthetic oligonucleotide
agtggaatcttggcccaaggaaagaaatcgattaggccacaacccatggaacataa

SEQ ID NO: 327455 - DNA, 51 bp, Artificial
  Synthetic oligonucleotide
agtggaattacctataaccacgacgtttatgacatgggaaacggagtaacc

SEQ ID NO: 327456 - DNA, 51 bp, Artificial
  Synthetic oligonucleotide
agtggaattcgttctttaaggatggtaagtccaacggtatttcccttaata

SEQ ID NO: 327457 - DNA, 59 bp, Artificial
  Synthetic oligonucleotide
agtggacagatagagttatagaattaggacaaagattttatagagctctccttaatata

SEQ ID NO: 327458 - DNA, 55 bp, Artificial
  Synthetic oligonucleotide
agtggaccaactgtcaaagttattggttgataagaagttcaaagtgacaaaggtc

SEQ ID NO: 327459 - DNA, 56 bp, Artificial
  Synthetic oligonucleotide
agtggaccccgttgatgacgttggtgtctacgaccctgtacataactctccatggg

SEQ ID NO: 327460 - DNA, 55 bp, Artificial
  Synthetic oligonucleotide
agtggacggttgcttgtgtggacgtggctccggaccgggcttgggggtctattgc

SEQ ID NO: 327461 - DNA, 60 bp, Artificial
  Synthetic oligonucleotide
agtggactatgcaatcgatgtgcgcctgacgctttacaaggacgcagatacgaatacgac

SEQ ID NO: 327462 - DNA, 60 bp, Artificial
  Synthetic oligonucleotide
agtggactgtatggactgcctgcagctaatccaaataacgggagagaatattatgagata

SEQ ID NO: 327463 - DNA, 60 bp, Artificial
  Synthetic oligonucleotide
agtggagagcagaagacctcatgctatcactcacaggaatttgacctatagtgatctttt

SEQ ID NO: 327464 - DNA, 54 bp, Artificial
  Synthetic oligonucleotide
agtggagagtgccaaaaaaactagtagaggggcctgtgacaacaaaggccccta

SEQ ID NO: 327465 - DNA, 59 bp, Artificial
  Synthetic oligonucleotide
agtggagatctatgttgcatcttaagggaaatgtccaagacgcttgtaaggattcgtcg

SEQ ID NO: 327466 - DNA, 58 bp, Artificial
  Synthetic oligonucleotide
agtggagatgacatgaccctattttgtcagatggtgtctagtgtcacttttataccac

SEQ ID NO: 327467 - DNA, 60 bp, Artificial
  Synthetic oligonucleotide
agtggagcaaacagtgtacatgcttggctttgttagtgcatgcccagattttaagttaag

SEQ ID NO: 327468 - DNA, 55 bp, Artificial
  Synthetic oligonucleotide
agtggagcatctaagcttgaattttcccaagacccgagtaaatttactgaccctg

SEQ ID NO: 327469 - DNA, 51 bp, Artificial
  Synthetic oligonucleotide
agtggaggccacgtactcctcagacaagtgcgacagcatccccctgcatct

SEQ ID NO: 327470 - DNA, 55 bp, Artificial
  Synthetic oligonucleotide
agtggagggctcttagcaccaagatatggctacataattgagaagtacggaacag

SEQ ID NO: 327471 - DNA, 54 bp, Artificial
  Synthetic oligonucleotide
agtggaggttgtttactacgttggagttgttgggaagcgtcctgtgttagcgag

SEQ ID NO: 327472 - DNA, 50 bp, Artificial
  Synthetic oligonucleotide
agtggagtcacaagcagaacacactttaataaccccacctttgaagcccc

SEQ ID NO: 327473 - DNA, 57 bp, Artificial
  Synthetic oligonucleotide
agtggataaccccttcaaccaccataacgtaaatcatatgctggttaggtatgtgct

SEQ ID NO: 327474 - DNA, 58 bp, Artificial
  Synthetic oligonucleotide
agtggatacacttaatgagattccattcgatataaataaattcgctgaacttgtaacg

SEQ ID NO: 327475 - DNA, 60 bp, Artificial
  Synthetic oligonucleotide
agtggatacctagccaggggcaatgggactgctttgcatatccctaatgaagcatcgaga

SEQ ID NO: 327476 - DNA, 54 bp, Artificial
  Synthetic oligonucleotide
agtggatacgctacttgagaagaatgtaaccgtcacacactcagttgaattgct

SEQ ID NO: 327477 - DNA, 51 bp, Artificial
  Synthetic oligonucleotide
agtggatactgttttaattgggtccccgtttgaattgaatgttgagggggt

SEQ ID NO: 327478 - DNA, 60 bp, Artificial
  Synthetic oligonucleotide
agtggatatgcacaaacagactgtgtccttgaagcaatggctttccttgaagaatcccac

SEQ ID NO: 327479 - DNA, 60 bp, Artificial
  Synthetic oligonucleotide
agtggatatgcacaaacggattgcgtgttggaagcaatggctttccttgaagaatcccac

SEQ ID NO: 327480 - DNA, 60 bp, Artificial
  Synthetic oligonucleotide
agtggatattggctccggaagaacccaaggctcttgtatatgcggacaacatatacattg

SEQ ID NO: 327481 - DNA, 60 bp, Artificial
  Synthetic oligonucleotide
agtggatcagttgacctcgtcctcaagtgatgaactgcaagactatgaagatcttgcatt

SEQ ID NO: 327482 - DNA, 52 bp, Artificial
  Synthetic oligonucleotide
agtggatccatgaagactatgcctcaccttgctcaacgtcttggttgaggga

SEQ ID NO: 327483 - DNA, 60 bp, Artificial
  Synthetic oligonucleotide
agtggatcccactacaggatgttcaatagcgacgctaagtcaaccaatgctaatgttggc

SEQ ID NO: 327484 - DNA, 60 bp, Artificial
  Synthetic oligonucleotide
agtggatgggctatatacagcaaggacaatggtgtaaggatcggttccaagggagatgta

SEQ ID NO: 327485 - DNA, 55 bp, Artificial
  Synthetic oligonucleotide
agtggatgtcgaattaatgaaccctcccactcaaagccattgcgtaagagagtgc

SEQ ID NO: 327486 - DNA, 59 bp, Artificial
  Synthetic oligonucleotide
agtggatgtcgttgatggggtcaatcataaattgaatgtgacgacaaacacttgtacaa

SEQ ID NO: 327487 - DNA, 60 bp, Artificial
  Synthetic oligonucleotide
agtggattggaggagagtatatttagtgtaatgaggaaatcatcgattgccacggcgtgg

SEQ ID NO: 327488 - DNA, 59 bp, Artificial
  Synthetic oligonucleotide
agtggatttccagacgagccagacttcaccgcaagcgcaaaacttctcctgaaagtgga

SEQ ID NO: 327489 - DNA, 60 bp, Artificial
  Synthetic oligonucleotide
agtggattttacgaccaccgcaagctgacatcacaccgatgcaaccaagatcggtagaaa

SEQ ID NO: 327490 - DNA, 55 bp, Artificial
  Synthetic oligonucleotide
agtggcaacggaacttctaacccctcgggtgtgactaccgtgccttgtggcagac

SEQ ID NO: 327491 - DNA, 58 bp, Artificial
  Synthetic oligonucleotide
agtggcaactgcgtagtacaatgccaaactgagaaaggtggtttgaacacgaccttgc

SEQ ID NO: 327492 - DNA, 60 bp, Artificial
  Synthetic oligonucleotide
agtggcaagcccttgagaccttctgggcaaaacacatgtggaatttcatcagcgggatac

SEQ ID NO: 327493 - DNA, 57 bp, Artificial
  Synthetic oligonucleotide
agtggcaatcactggacaaacaattttagtgacctacaaaatccaaaatattgggca

SEQ ID NO: 327494 - DNA, 60 bp, Artificial
  Synthetic oligonucleotide
agtggcaatgactgattggtcagggtacagcggaagtttcgttcagcatcctgagctaac

SEQ ID NO: 327495 - DNA, 55 bp, Artificial
  Synthetic oligonucleotide
agtggcacaacgttgattacaaattgccctgccaggtgagaggagcaacttacga

SEQ ID NO: 327496 - DNA, 60 bp, Artificial
  Synthetic oligonucleotide
agtggcagaaggcacaagtgagtattgtcagacaattcacttccagaaaccccttgtgga

SEQ ID NO: 327497 - DNA, 55 bp, Artificial
  Synthetic oligonucleotide
agtggcagcctgcctcaggaagcttggggcaccaccgttgagagcctggagacat

SEQ ID NO: 327498 - DNA, 55 bp, Artificial
  Synthetic oligonucleotide
agtggcagtcatactatcaaagttgtaagcatggtccttgttgaccggcttatgt

SEQ ID NO: 327499 - DNA, 60 bp, Artificial
  Synthetic oligonucleotide
agtggcatacaaattgcgcaccgatgaacattctctccagaagacaattgggatactcaa

SEQ ID NO: 327500 - DNA, 52 bp, Artificial
  Synthetic oligonucleotide
agtggccaagggcaaccggatggcagactcagtagcaaaacaggttgctcag

SEQ ID NO: 327501 - DNA, 60 bp, Artificial
  Synthetic oligonucleotide
agtggccagacagctgattggcttaagattggcagctacatcataggatttgcactacct

SEQ ID NO: 327502 - DNA, 55 bp, Artificial
  Synthetic oligonucleotide
agtggccatgtgtccaaaatgtcagataaagggagaaccagtgcatggacaagtg

SEQ ID NO: 327503 - DNA, 60 bp, Artificial
  Synthetic oligonucleotide
agtggcccataagtcctgcttgcctgcttgtgtatatggacttgccgtggccagtgggta

SEQ ID NO: 327504 - DNA, 60 bp, Artificial
  Synthetic oligonucleotide
agtggccccagagagccacgccggcgcgtagtggtcaaagcattactcatcctaacagca

SEQ ID NO: 327505 - DNA, 60 bp, Artificial
  Synthetic oligonucleotide
agtggccctgttatgagtcagagcttaagtgacagggttgaccgaatgtaccatgaactg

SEQ ID NO: 327506 - DNA, 56 bp, Artificial
  Synthetic oligonucleotide
agtggccgtatggctcgtttcagccctagcggccgggactggtattgcagggggaa

SEQ ID NO: 327507 - DNA, 60 bp, Artificial
  Synthetic oligonucleotide
agtggcctcaaacatgaggcagtccaaaagagcgcaatgtggagttatctcctccttccc

SEQ ID NO: 327508 - DNA, 59 bp, Artificial
  Synthetic oligonucleotide
agtggcctgaatattgcccagacacggatgcaacggcagtcgacaagcccacacgacct

SEQ ID NO: 327509 - DNA, 59 bp, Artificial
  Synthetic oligonucleotide
agtggcgaagagcgtaagcaatgacgaaagacaggtgaagaacgtcagggaagacgtca

SEQ ID NO: 327510 - DNA, 52 bp, Artificial
  Synthetic oligonucleotide
agtggcgacagtgtgttgtttgtcctttggaaccacttgccttgttggacgc

SEQ ID NO: 327511 - DNA, 58 bp, Artificial
  Synthetic oligonucleotide
agtggcgatgtggcgagtgtggcgggcttttcctatccaccttaccttatattcatag

SEQ ID NO: 327512 - DNA, 53 bp, Artificial
  Synthetic oligonucleotide
agtggcgcaagcattacaacttccttgaggatacccgggtgatgcatataaca

SEQ ID NO: 327513 - DNA, 58 bp, Artificial
  Synthetic oligonucleotide
agtggcgccaaacgtagaagcctctcccgattcatcgaggaactccctgacgtgcttg

SEQ ID NO: 327514 - DNA, 56 bp, Artificial
  Synthetic oligonucleotide
agtggcgcccgaaaggggactcgaaagcgaaagtaagaccagaggagatctctcga

SEQ ID NO: 327515 - DNA, 57 bp, Artificial
  Synthetic oligonucleotide
agtggcggactgcctacacccttttcggcactgtctcctggaacgctaatgccggcc

SEQ ID NO: 327516 - DNA, 58 bp, Artificial
  Synthetic oligonucleotide
agtggcggcagttataatttcgcattaccattgggtaacttcccagtcatgtctggag

SEQ ID NO: 327517 - DNA, 58 bp, Artificial
  Synthetic oligonucleotide
agtggcggtaaccctcgggcctcatctcgttgctatagcgagtagttcagcgatgacg

SEQ ID NO: 327518 - DNA, 54 bp, Artificial
  Synthetic oligonucleotide
agtggcgtctacaccaccagcttcggaaacacactaacgtgctatctcaaagct

SEQ ID NO: 327519 - DNA, 59 bp, Artificial
  Synthetic oligonucleotide
agtggcgtgcagtcacgaccagagcattcagagtgcataatgccaagtggctatcgcta

SEQ ID NO: 327520 - DNA, 60 bp, Artificial
  Synthetic oligonucleotide
agtggcgttgataggcacctgttgcctatattctatgacgcaatggtcgattttcataca

SEQ ID NO: 327521 - DNA, 58 bp, Artificial
  Synthetic oligonucleotide
agtggcgttgatggtttcagagtgcaaaactctaccctagaccttccgatgactgtac

SEQ ID NO: 327522 - DNA, 54 bp, Artificial
  Synthetic oligonucleotide
agtggctaatctagataatctcagggactacctggatgggagtgtaaaggtcaa

SEQ ID NO: 327523 - DNA, 60 bp, Artificial
  Synthetic oligonucleotide
agtggctacaagtgagaaattggcaataactgatgtcgttgatggtgtgaactataaact

SEQ ID NO: 327524 - DNA, 53 bp, Artificial
  Synthetic oligonucleotide
agtggctacagctgagaaattggtaataactgatgttgtcgacggagtcaatc

SEQ ID NO: 327525 - DNA, 51 bp, Artificial
  Synthetic oligonucleotide
agtggctcgcgttagggctcgtgatgctgcggcccgagcattctttaccga

SEQ ID NO: 327526 - DNA, 60 bp, Artificial
  Synthetic oligonucleotide
agtggctctatgacaaactcgggtcatctttcgcagagctggggttaaattatgacttca

SEQ ID NO: 327527 - DNA, 60 bp, Artificial
  Synthetic oligonucleotide
agtggctgatttgtgcgcctacagacaaactcgacggtcatcgatgtatttgctcagcgc

SEQ ID NO: 327528 - DNA, 60 bp, Artificial
  Synthetic oligonucleotide
agtggctggcaaaaggtaacaagcctctgccgccaaatgatatggggatgtatcctgctg

SEQ ID NO: 327529 - DNA, 56 bp, Artificial
  Synthetic oligonucleotide
agtggctggttcctggcgccgccacaaaataaatacggaggggcatcccgagccac

SEQ ID NO: 327530 - DNA, 60 bp, Artificial
  Synthetic oligonucleotide
agtggctttgtaatccaatggacatagcattgtactactatcaacagacggatgaggcaa

SEQ ID NO: 327531 - DNA, 59 bp, Artificial
  Synthetic oligonucleotide
agtgggaaaagtactgcgttcttgaaataggagacatgctcctacggactgcaataggc

SEQ ID NO: 327532 - DNA, 52 bp, Artificial
  Synthetic oligonucleotide
agtgggaaacacagtttaacacttggaaaaactctcataccttcgaaaacgc

SEQ ID NO: 327533 - DNA, 54 bp, Artificial
  Synthetic oligonucleotide
agtgggaacaatgagggacgaacatcagatatgcgaaccggagttataaggatg

SEQ ID NO: 327534 - DNA, 59 bp, Artificial
  Synthetic oligonucleotide
agtgggaatcaaactgcaagaatgctcaaatacaattacccaactaaatcaggatattg

SEQ ID NO: 327535 - DNA, 57 bp, Artificial
  Synthetic oligonucleotide
agtgggaattccacctttaatcatgactggctttccgtatttcgtgttgctttgcca

SEQ ID NO: 327536 - DNA, 56 bp, Artificial
  Synthetic oligonucleotide
agtgggaccagctttttaaaacaatgattagatttggagatgttggtctagatttg

SEQ ID NO: 327537 - DNA, 59 bp, Artificial
  Synthetic oligonucleotide
agtgggacctacatggggcaagcgaccagacttgttgccatgaaagaggttgccactgg

SEQ ID NO: 327538 - DNA, 55 bp, Artificial
  Synthetic oligonucleotide
agtgggacgcggcagccgagaggtacgccaatcccgtgacaccagaggttgattc

SEQ ID NO: 327539 - DNA, 57 bp, Artificial
  Synthetic oligonucleotide
agtgggagaccgtgggaacgtgttctgggctgtgatggaaaccaatgatgtggaatt

SEQ ID NO: 327540 - DNA, 58 bp, Artificial
  Synthetic oligonucleotide
agtgggagacgtgatatctgagggtgaacctgagactttctatacaacgataattaaa

SEQ ID NO: 327541 - DNA, 60 bp, Artificial
  Synthetic oligonucleotide
agtgggagcctgaggcttgcaactggactaagaaatgttccacagattgaaactagagga

SEQ ID NO: 327542 - DNA, 56 bp, Artificial
  Synthetic oligonucleotide
agtgggagctaatggacgaagactatcaggggaggctttgcaaccctctgaacccg

SEQ ID NO: 327543 - DNA, 60 bp, Artificial
  Synthetic oligonucleotide
agtgggaggacgatcttcaacgcctaagagacaagcttcgtctagacttgctcagcttat

SEQ ID NO: 327544 - DNA, 59 bp, Artificial
  Synthetic oligonucleotide
agtgggaggagactccacactatataataaactacacttccgaatggctgagtttatgc

SEQ ID NO: 327545 - DNA, 54 bp, Artificial
  Synthetic oligonucleotide
agtgggatccttcgggccagggttcactcctccacacggcaatcttttggggtg

SEQ ID NO: 327546 - DNA, 56 bp, Artificial
  Synthetic oligonucleotide
agtgggattcaacccaatccccccgcgttagtgccgcttcaattgacatactgcgg

SEQ ID NO: 327547 - DNA, 60 bp, Artificial
  Synthetic oligonucleotide
agtgggcagccaagcactgttgtggacaatacactcgcactcatgaccgcttttctctac

SEQ ID NO: 327548 - DNA, 55 bp, Artificial
  Synthetic oligonucleotide
agtgggcagggtagtcctttccaacaaacccgcggtcatacctgacagagaagtc

SEQ ID NO: 327549 - DNA, 56 bp, Artificial
  Synthetic oligonucleotide
agtgggccaattggaggtattaaatccatgggaattactactttagttcaatatgc

SEQ ID NO: 327550 - DNA, 54 bp, Artificial
  Synthetic oligonucleotide
agtgggccacaccacttctggcttcgtcggtcttttcacccccggtgcccgtca

SEQ ID NO: 327551 - DNA, 55 bp, Artificial
  Synthetic oligonucleotide
agtgggccccaccgatgacgtcactgaaattgactggtcaattgggcctgaatag

SEQ ID NO: 327552 - DNA, 56 bp, Artificial
  Synthetic oligonucleotide
agtgggccccgccactaacaaatgtccgccactaagaacgctccctcagagtctat

SEQ ID NO: 327553 - DNA, 60 bp, Artificial
  Synthetic oligonucleotide
agtgggccgtcttatgcactgatgaatcagtgcgacgtgacatcgtatgtgacgtatcct

SEQ ID NO: 327554 - DNA, 55 bp, Artificial
  Synthetic oligonucleotide
agtgggccttcgatggtgacgaagattgcattctttagagcccaatttttaagtg

SEQ ID NO: 327555 - DNA, 55 bp, Artificial
  Synthetic oligonucleotide
agtgggctccaaatcttataaagtatagaccagtgacagattttgtggagtgttc

SEQ ID NO: 327556 - DNA, 60 bp, Artificial
  Synthetic oligonucleotide
agtgggctgatatattacactgaccagagagatgggcaggatacaggcaatgatttcgga

SEQ ID NO: 327557 - DNA, 51 bp, Artificial
  Synthetic oligonucleotide
agtgggcttatgataacaacatcacagaggagagtgaaattgcttaccagt

SEQ ID NO: 327558 - DNA, 52 bp, Artificial
  Synthetic oligonucleotide
agtgggcttgttaggtactccctagactttgtcttaaagggaaccgtgtgac

SEQ ID NO: 327559 - DNA, 57 bp, Artificial
  Synthetic oligonucleotide
agtggggaaccagttcaacggaggctgtttgctggtagcgatggtaccggagctctg

SEQ ID NO: 327560 - DNA, 58 bp, Artificial
  Synthetic oligonucleotide
agtggggatataaacacctcgttggggaattacctattgatgtgtgcaatggtacatg

SEQ ID NO: 327561 - DNA, 60 bp, Artificial
  Synthetic oligonucleotide
agtggggatgcgccatttggactacccgctgtggatatgtactgacgtttagtactcaca

SEQ ID NO: 327562 - DNA, 56 bp, Artificial
  Synthetic oligonucleotide
agtggggattactctgcggcacccaccccgcaatacaaatcgtgggccctaccatc

SEQ ID NO: 327563 - DNA, 60 bp, Artificial
  Synthetic oligonucleotide
agtggggcgcgaaaggttatcaagaatggccatcagtggagatgattgtgttgtgaaacc

SEQ ID NO: 327564 - DNA, 60 bp, Artificial
  Synthetic oligonucleotide
agtggggtaaacaacgcgcaaagcaggtatactccagaacatgcactaggatgcgcaata

SEQ ID NO: 327565 - DNA, 53 bp, Artificial
  Synthetic oligonucleotide
agtggggtaacaaaagcttgtccttacaatagtggttcgtccttctacagaaa

SEQ ID NO: 327566 - DNA, 55 bp, Artificial
  Synthetic oligonucleotide
agtgggtaaattagacgtgacaccgataggtaaaagagacaccgatgagtcggta

SEQ ID NO: 327567 - DNA, 56 bp, Artificial
  Synthetic oligonucleotide
agtgggtcacagtcttctatggggtaccggtatggaaagatgcaaccccaccactc

SEQ ID NO: 327568 - DNA, 55 bp, Artificial
  Synthetic oligonucleotide
agtgggtcataccaggattgccagtacacaacagagattggcgctttgtcgtcgc

SEQ ID NO: 327569 - DNA, 59 bp, Artificial
  Synthetic oligonucleotide
agtgggtccctgctcactggaagttgacagaccaacgtcaggccacaaatttgtgccac

SEQ ID NO: 327570 - DNA, 55 bp, Artificial
  Synthetic oligonucleotide
agtgggtccctttggaaatgacgtcagttattgggcttgttttgtcattgagcct

SEQ ID NO: 327571 - DNA, 60 bp, Artificial
  Synthetic oligonucleotide
agtgggtcctggttctatacacgtggaggatctgcagataatgtagcttaccagtacata

SEQ ID NO: 327572 - DNA, 55 bp, Artificial
  Synthetic oligonucleotide
agtgggtctccaaaggaactcctaccttacgccagccccttcacagtctctactg

SEQ ID NO: 327573 - DNA, 60 bp, Artificial
  Synthetic oligonucleotide
agtgggtgaggcgagagaccagctgtctgaacttctcgctgcagcagaacagttagtttt

SEQ ID NO: 327574 - DNA, 55 bp, Artificial
  Synthetic oligonucleotide
agtgggtgctcatgagaacaccaacattgctactggcgggtcaactgtcaattac

SEQ ID NO: 327575 - DNA, 58 bp, Artificial
  Synthetic oligonucleotide
agtgggtggcaaaccatttgctcaaatgggctttggtgatggcgcctttattggaaga

SEQ ID NO: 327576 - DNA, 60 bp, Artificial
  Synthetic oligonucleotide
agtgggtgggtgtattgtgacgctgatggttcgcaattcgacagttccttgactccattc

SEQ ID NO: 327577 - DNA, 60 bp, Artificial
  Synthetic oligonucleotide
agtgggtgtgccgacctatgcgcatggaaacggcactgcacatacgcagtcggtaaccgt

SEQ ID NO: 327578 - DNA, 58 bp, Artificial
  Synthetic oligonucleotide
agtgggttacgtggcgcggtctacctttgatgcagcttatgttccttgcactgtcttt

SEQ ID NO: 327579 - DNA, 59 bp, Artificial
  Synthetic oligonucleotide
agtgggttgaaacccacgacatcgatctggaagttaccaattgtgatctcgatatgtcc

SEQ ID NO: 327580 - DNA, 58 bp, Artificial
  Synthetic oligonucleotide
agtgggttggtcttggccagacggtgctgagttgccatttaccattgacaagtaattc

SEQ ID NO: 327581 - DNA, 53 bp, Artificial
  Synthetic oligonucleotide
agtgggttgtatatccccacgactagtccggttgcaaacggctccggtaaaga

SEQ ID NO: 327582 - DNA, 55 bp, Artificial
  Synthetic oligonucleotide
agtgggtttatggccgtgcacggtttgttgtgttttcaacctccgctatctcgcc

SEQ ID NO: 327583 - DNA, 55 bp, Artificial
  Synthetic oligonucleotide
agtggtaaccagactgctagaatgcttaaatatcattacccaactaaatctgggt

SEQ ID NO: 327584 - DNA, 53 bp, Artificial
  Synthetic oligonucleotide
agtggtaactcagaacttgagggggattatgctccaacaaacagaaataaatg

SEQ ID NO: 327585 - DNA, 54 bp, Artificial
  Synthetic oligonucleotide
agtggtaaggcaacgtgttgttatgcctactcttataatggcccaagggcatgt

SEQ ID NO: 327586 - DNA, 56 bp, Artificial
  Synthetic oligonucleotide
agtggtacccgtccatgtggaaccaagaaccagtactaaatgacttagcaaagagc

SEQ ID NO: 327587 - DNA, 56 bp, Artificial
  Synthetic oligonucleotide
agtggtaccctccagattccatttcgccctaatcatcgatggggagatgttaggtt

SEQ ID NO: 327588 - DNA, 55 bp, Artificial
  Synthetic oligonucleotide
agtggtactgtctcttacggctttcgttgtaaccgttagtacactcgcgacagta

SEQ ID NO: 327589 - DNA, 53 bp, Artificial
  Synthetic oligonucleotide
agtggtagggatagtttccacaggaggggatggtttagtgggctttgcggact

SEQ ID NO: 327590 - DNA, 60 bp, Artificial
  Synthetic oligonucleotide
agtggtaggtatgttacatgcgtcttcgtactcctgctctgccctggacttgaagtgcgg

SEQ ID NO: 327591 - DNA, 53 bp, Artificial
  Synthetic oligonucleotide
agtggtagtacaaggtccttctactgaatttggcctaagtttaataaaacata

SEQ ID NO: 327592 - DNA, 60 bp, Artificial
  Synthetic oligonucleotide
agtggtagttcggagttgagcccgtcatgtagctgttcgtgtctccgaacatcgcccatc

SEQ ID NO: 327593 - DNA, 55 bp, Artificial
  Synthetic oligonucleotide
agtggtagttgatacacttaacgaagagaccaagtggtattgtgagatcatcggg

SEQ ID NO: 327594 - DNA, 56 bp, Artificial
  Synthetic oligonucleotide
agtggtatcctacagtgccaaagagggggtctccggcctacctgagctatccaccg

SEQ ID NO: 327595 - DNA, 55 bp, Artificial
  Synthetic oligonucleotide
agtggtatcgcagatactccggatcccacaagctgtcgtggacatgattgcgggg

SEQ ID NO: 327596 - DNA, 55 bp, Artificial
  Synthetic oligonucleotide
agtggtatcggatttggatccggtgtggaatcgtcacccggtgatgtgatataca

SEQ ID NO: 327597 - DNA, 54 bp, Artificial
  Synthetic oligonucleotide
agtggtatcgtctatcttttgtggggaggtcacgctagaaagttccgcgatgtt

SEQ ID NO: 327598 - DNA, 54 bp, Artificial
  Synthetic oligonucleotide
agtggtattgtgtttctcggtcctgttttaacaacaggatcgatgacgtggaat

SEQ ID NO: 327599 - DNA, 60 bp, Artificial
  Synthetic oligonucleotide
agtggtcaaaaactagtatagttggatggcctaagataagagatagaatgagacgagctg

SEQ ID NO: 327600 - DNA, 56 bp, Artificial
  Synthetic oligonucleotide
agtggtcaaaaagtagtgtagttggatggcctactgtaagggaaagaatgagacga

SEQ ID NO: 327601 - DNA, 60 bp, Artificial
  Synthetic oligonucleotide
agtggtcaacatgctcggacacagatgaagagttatgactagacagagcagggggttaca

SEQ ID NO: 327602 - DNA, 58 bp, Artificial
  Synthetic oligonucleotide
agtggtccaggctctggttttgactcaacaatatcaccagctaaaacctatagagtac

SEQ ID NO: 327603 - DNA, 53 bp, Artificial
  Synthetic oligonucleotide
agtggtccccaccactaacaaatgttccccacttagaacgctccctcaaagtc

SEQ ID NO: 327604 - DNA, 57 bp, Artificial
  Synthetic oligonucleotide
agtggtcccccctgacaaagacatgtccaccaatctaaagcgtcgctcaaagcttaa

SEQ ID NO: 327605 - DNA, 53 bp, Artificial
  Synthetic oligonucleotide
agtggtccccgtccactaataaatgtcagccaatcagaatgaagcctgaaagc

SEQ ID NO: 327606 - DNA, 51 bp, Artificial
  Synthetic oligonucleotide
agtggtccgcatgccagagacgccacacgtcacgcctatcactttctccgg

SEQ ID NO: 327607 - DNA, 54 bp, Artificial
  Synthetic oligonucleotide
agtggtcgtatctaatagaagatcctaatgcccctaacaaactttgcttcccgg

SEQ ID NO: 327608 - DNA, 55 bp, Artificial
  Synthetic oligonucleotide
agtggtgacgataatccccttcttggttggtgtactccactaacaccggatagaa

SEQ ID NO: 327609 - DNA, 55 bp, Artificial
  Synthetic oligonucleotide
agtggtgagaaaccaccaggatttgattaccgtgggagcaaccctcgcccttcta

SEQ ID NO: 327610 - DNA, 55 bp, Artificial
  Synthetic oligonucleotide
agtggtgagaatgccaattttatctcgcgcttgacttgtgcatccggtagatccg

SEQ ID NO: 327611 - DNA, 55 bp, Artificial
  Synthetic oligonucleotide
agtggtgcaatcccttggctatccagtttacaaacgccgggaaacaggtcacctc

SEQ ID NO: 327612 - DNA, 56 bp, Artificial
  Synthetic oligonucleotide
agtggtgcaatctttccccgaactgttattcgggaagtgtgtcgtgattacaactc

SEQ ID NO: 327613 - DNA, 60 bp, Artificial
  Synthetic oligonucleotide
agtggtgccatggaacgaatcgacccactcctccaaagcgtgcagttgtgcgtgctcaat

SEQ ID NO: 327614 - DNA, 53 bp, Artificial
  Synthetic oligonucleotide
agtggtggagtcagcggctgttcccaagctggcagttggacaggctcaagggt

SEQ ID NO: 327615 - DNA, 60 bp, Artificial
  Synthetic oligonucleotide
agtggtgggacggctacgaccaccaggagatagtcatcatagatgacttctacggctggc

SEQ ID NO: 327616 - DNA, 57 bp, Artificial
  Synthetic oligonucleotide
agtggtgggctggccaagcgaagaacctcatccaggtatagttctacatgggaaatt

SEQ ID NO: 327617 - DNA, 55 bp, Artificial
  Synthetic oligonucleotide
agtggtgtcgcagttactccggatcccacaagctgccgtggatatggtggcgggg

SEQ ID NO: 327618 - DNA, 52 bp, Artificial
  Synthetic oligonucleotide
agtggtgttttacaggttatgctgccaacccaaacctcgttaatttggttaa

SEQ ID NO: 327619 - DNA, 53 bp, Artificial
  Synthetic oligonucleotide
agtggttaacgtcccaacgacgggccctagtacgagcagtttccatccaacgc

SEQ ID NO: 327620 - DNA, 60 bp, Artificial
  Synthetic oligonucleotide
agtggttaactccgtcaacatgactgcaacggtcaatgatctcacccgacgcaccatgac

SEQ ID NO: 327621 - DNA, 55 bp, Artificial
  Synthetic oligonucleotide
agtggttactgaagtggtacggtgtgtcccacctgagggtttgcgagatccaagg

SEQ ID NO: 327622 - DNA, 55 bp, Artificial
  Synthetic oligonucleotide
agtggttatcgcaagtcttcggattcacatatgggagcggtgactaacccgccgt

SEQ ID NO: 327623 - DNA, 55 bp, Artificial
  Synthetic oligonucleotide
agtggttcacaattggtatttggaaatcctagacgcagcacaacttcagtgactg

SEQ ID NO: 327624 - DNA, 58 bp, Artificial
  Synthetic oligonucleotide
agtggttcgaaaaaaatgcaggaaccatcaagtcttgggatgagagctatactgaact

SEQ ID NO: 327625 - DNA, 55 bp, Artificial
  Synthetic oligonucleotide
agtggttgcaattagctcctctatctaatagcagtctaactatgtcaggcttttc

SEQ ID NO: 327626 - DNA, 55 bp, Artificial
  Synthetic oligonucleotide
agtggttgcgcaagtattcctctgaacgttatacctgggacgaagcttacagtgg

SEQ ID NO: 327627 - DNA, 60 bp, Artificial
  Synthetic oligonucleotide
agtggttgctgttaccatccgagaagaaacacgcctgggctgtagtcctagcgagtgatg

SEQ ID NO: 327628 - DNA, 55 bp, Artificial
  Synthetic oligonucleotide
agtggttggccgccgtgatacaacgccccgtcaggggcttcgtcgccttcgatac

SEQ ID NO: 327629 - DNA, 55 bp, Artificial
  Synthetic oligonucleotide
agtggttgtttattcggaggacgggagtgggaaatgggcagagtgggcgctacgc

SEQ ID NO: 327630 - DNA, 59 bp, Artificial
  Synthetic oligonucleotide
agtggtttccactgcgacacaatctttcctggcgacctgcgtcaacggcgtgtgttgga

SEQ ID NO: 327631 - DNA, 60 bp, Artificial
  Synthetic oligonucleotide
agtggtttgccctcctagagacagttgtgcagctcataattgcttgctatgctatcatgg

SEQ ID NO: 327632 - DNA, 60 bp, Artificial
  Synthetic oligonucleotide
agtggtttgctcatccctgtacattggggatctgtgcggctctctcttcttggcgggaca

SEQ ID NO: 327633 - DNA, 55 bp, Artificial
  Synthetic oligonucleotide
agtgtaaaaatgtggatccatcacaaaacaagatctgctctggtgataacacttt

SEQ ID NO: 327634 - DNA, 53 bp, Artificial
  Synthetic oligonucleotide
agtgtaaataagtgggttcttaggtcctttcattgcaatttctagggtcccta

SEQ ID NO: 327635 - DNA, 57 bp, Artificial
  Synthetic oligonucleotide
agtgtaaattaggtgacgtttattataaattgcggtcatggtatgaatggagcgtac

SEQ ID NO: 327636 - DNA, 54 bp, Artificial
  Synthetic oligonucleotide
agtgtaacacaaaaatctaacattcctaccttaggtttttgtttaatgcaatca

SEQ ID NO: 327637 - DNA, 56 bp, Artificial
  Synthetic oligonucleotide
agtgtaacactctcacgaggacaaaatactgtcaaaattactgggaaaggtggcca

SEQ ID NO: 327638 - DNA, 55 bp, Artificial
  Synthetic oligonucleotide
agtgtaaggacccggaattcaatggaacagggccatgcaagaatgttagctcagt

SEQ ID NO: 327639 - DNA, 51 bp, Artificial
  Synthetic oligonucleotide
agtgtaagggcaaaaggagttttaatcaggttaaattattatttggtgacc

SEQ ID NO: 327640 - DNA, 55 bp, Artificial
  Synthetic oligonucleotide
agtgtaatgatgtgacattcaatgggacaggaccatgccataatgtccgcacagt

SEQ ID NO: 327641 - DNA, 60 bp, Artificial
  Synthetic oligonucleotide
agtgtaatgccacaaaatttcatcaaggtgctctattagtggtagcaattccagaacatc

SEQ ID NO: 327642 - DNA, 55 bp, Artificial
  Synthetic oligonucleotide
agtgtaattttgccacaacccctgtttgtgaatatgatgggaatatggtttcagg

SEQ ID NO: 327643 - DNA, 58 bp, Artificial
  Synthetic oligonucleotide
agtgtacaggccggactcagaaataatggacatgttaggattcccacgattaccgtca

SEQ ID NO: 327644 - DNA, 53 bp, Artificial
  Synthetic oligonucleotide
agtgtacagggagatcaaaatcagtgttgcacccgagattccaccaccccctg

SEQ ID NO: 327645 - DNA, 60 bp, Artificial
  Synthetic oligonucleotide
agtgtaccacaagagtatctcccgcaggtgcaccaagacagtcacagctatcgtctctac

SEQ ID NO: 327646 - DNA, 54 bp, Artificial
  Synthetic oligonucleotide
agtgtaccccgtccacgacattcgtgtcgtctaccctgtacataaccttccaag

SEQ ID NO: 327647 - DNA, 53 bp, Artificial
  Synthetic oligonucleotide
agtgtacccgggttcgataatgtccttcattttatgttataccggactcaaag

SEQ ID NO: 327648 - DNA, 52 bp, Artificial
  Synthetic oligonucleotide
agtgtacctcttaccatctggcgtccgaaagtaggacttaccaaggttgaga

SEQ ID NO: 327649 - DNA, 50 bp, Artificial
  Synthetic oligonucleotide
agtgtacgaagcggttttacgacacgcatttgatgcacccacgttgtacg

SEQ ID NO: 327650 - DNA, 60 bp, Artificial
  Synthetic oligonucleotide
agtgtacgcaactgttgtatgcccacccgaattgcttattggtgctaagcagagttataa

SEQ ID NO: 327651 - DNA, 51 bp, Artificial
  Synthetic oligonucleotide
agtgtacgtagcacaagccgttccaggcaaattcctcctttatatggcagc

SEQ ID NO: 327652 - DNA, 60 bp, Artificial
  Synthetic oligonucleotide
agtgtactactgctggatgtcggatgtcatgtccaaagcatccacatttgtaacatatga

SEQ ID NO: 327653 - DNA, 53 bp, Artificial
  Synthetic oligonucleotide
agtgtactatacaaccttcccaacgaacagtaacttaaaacatcattaacaag

SEQ ID NO: 327654 - DNA, 58 bp, Artificial
  Synthetic oligonucleotide
agtgtactattattacaacttgtatcagaagaaacctactatatacatggttggttca

SEQ ID NO: 327655 - DNA, 58 bp, Artificial
  Synthetic oligonucleotide
agtgtactgaacttgttgataggaatttcaaatgtcgggttgaatgtatctctacacc

SEQ ID NO: 327656 - DNA, 54 bp, Artificial
  Synthetic oligonucleotide
agtgtagaactataccaaactaagggttcaagagacgtaccgattaaggctaca

SEQ ID NO: 327657 - DNA, 60 bp, Artificial
  Synthetic oligonucleotide
agtgtagagcaaagagcaaagttcttagctacggtgactctgcctaaggacattgtggct

SEQ ID NO: 327658 - DNA, 53 bp, Artificial
  Synthetic oligonucleotide
agtgtagataagtaaaggtatgtaaagtctacaaccggttttgaacttcgtca

SEQ ID NO: 327659 - DNA, 52 bp, Artificial
  Synthetic oligonucleotide
agtgtagctattggtttttggagggatagcgtagaggtgtttcctaatggtc

SEQ ID NO: 327660 - DNA, 55 bp, Artificial
  Synthetic oligonucleotide
agtgtagcttaggctgatgagtctggacataccccaccggcgacggtggtccagg

SEQ ID NO: 327661 - DNA, 55 bp, Artificial
  Synthetic oligonucleotide
agtgtaggaaccgacggactgtcgctcacccacctacagctgaacccacaacacc

SEQ ID NO: 327662 - DNA, 57 bp, Artificial
  Synthetic oligonucleotide
agtgtaggtactttacgccagcacattggttcgcttcacaatagaacggtggcgagt

SEQ ID NO: 327663 - DNA, 60 bp, Artificial
  Synthetic oligonucleotide
agtgtagtatgtttatcgcctagatctggagtgtcgtatgattcaatattagcatgtggc

SEQ ID NO: 327664 - DNA, 60 bp, Artificial
  Synthetic oligonucleotide
agtgtagttcaccactgcgactggtggtagagtgcagccacgcagatataagggcactgg

SEQ ID NO: 327665 - DNA, 60 bp, Artificial
  Synthetic oligonucleotide
agtgtagttcttcttgtgctgtctacgaactattggaattcgacatacatggaaacagct

SEQ ID NO: 327666 - DNA, 55 bp, Artificial
  Synthetic oligonucleotide
agtgtagtttctactatcttagagtatcgcactagagctattcctgatagcgcgt

SEQ ID NO: 327667 - DNA, 56 bp, Artificial
  Synthetic oligonucleotide
agtgtataaaacctcgtggctcccattttctagattaagccaattggcttgtgtgt

SEQ ID NO: 327668 - DNA, 59 bp, Artificial
  Synthetic oligonucleotide
agtgtatatggtgcatatacatccgtaggcacgtaataaagcgagggattcgaattccc

SEQ ID NO: 327669 - DNA, 60 bp, Artificial
  Synthetic oligonucleotide
agtgtatcagcaattgagtgccgtgactctgctcaacttgacgggatttggcccgatttc

SEQ ID NO: 327670 - DNA, 56 bp, Artificial
  Synthetic oligonucleotide
agtgtatcatgttgttttgaactatccaacttagtaccgaatggggaaagtgattg

SEQ ID NO: 327671 - DNA, 60 bp, Artificial
  Synthetic oligonucleotide
agtgtatgactggttaatattaagtttctccagattctcaacgggcgccatcctcgcatc

SEQ ID NO: 327672 - DNA, 60 bp, Artificial
  Synthetic oligonucleotide
agtgtatgctcaagaatctctacacgcagattatccacacttgcattctcattggcgatg

SEQ ID NO: 327673 - DNA, 60 bp, Artificial
  Synthetic oligonucleotide
agtgtatgtatcctctcatgaatagcactggtcggaccgccagtctcaactggtcggacc

SEQ ID NO: 327674 - DNA, 60 bp, Artificial
  Synthetic oligonucleotide
agtgtatgtgagtacactatgccaggttactgtgtgtcactggactctaaatgggtcttg

SEQ ID NO: 327675 - DNA, 60 bp, Artificial
  Synthetic oligonucleotide
agtgtatgttgattggcaatcagacattttggtgaccacagtggctgcccatggaaagca

SEQ ID NO: 327676 - DNA, 57 bp, Artificial
  Synthetic oligonucleotide
agtgtattatggcttttgattatacaaattatgatggtagtatacaccctatttggt

SEQ ID NO: 327677 - DNA, 53 bp, Artificial
  Synthetic oligonucleotide
agtgtattttagacccgtaccgggtcaaaaccacctgtcactattgtgacaag

SEQ ID NO: 327678 - DNA, 55 bp, Artificial
  Synthetic oligonucleotide
agtgtcaaattcaatcgatgatgtggcacatgcgactgcgtacttcaccgcacca

SEQ ID NO: 327679 - DNA, 60 bp, Artificial
  Synthetic oligonucleotide
agtgtcaacagtacttggcagtggacatagcactcaattagcttgatgtctgatgtctga

SEQ ID NO: 327680 - DNA, 60 bp, Artificial
  Synthetic oligonucleotide
agtgtcaacgcactttccggtgccaaagcctgactgtccgactagtggagatagtggtga

SEQ ID NO: 327681 - DNA, 60 bp, Artificial
  Synthetic oligonucleotide
agtgtcaagcttcatcagaggaacaagaatagtcccaagaggacaactgtccaccagagg

SEQ ID NO: 327682 - DNA, 57 bp, Artificial
  Synthetic oligonucleotide
agtgtcaagtccgtgtctctggcgaaccggagtccgtgaactccgttgtggcgaaca

SEQ ID NO: 327683 - DNA, 50 bp, Artificial
  Synthetic oligonucleotide
agtgtcaatgatacagtgtactttagaacaacttttggcaatctatacag

SEQ ID NO: 327684 - DNA, 60 bp, Artificial
  Synthetic oligonucleotide
agtgtcaatgttattactgcgagatcgagctatgccagctgaacttttactatacgagac

SEQ ID NO: 327685 - DNA, 57 bp, Artificial
  Synthetic oligonucleotide
agtgtcaattgttggctacaatccaccttatgtttggacgtgtctacgtcacggaat

SEQ ID NO: 327686 - DNA, 60 bp, Artificial
  Synthetic oligonucleotide
agtgtcacactttgcgacatcacctattgacccgatcagacactttctctattacgggac

SEQ ID NO: 327687 - DNA, 60 bp, Artificial
  Synthetic oligonucleotide
agtgtcacagaggacgcgcattccctccgaactcctgatggagctcccgctgaagcggtg

SEQ ID NO: 327688 - DNA, 55 bp, Artificial
  Synthetic oligonucleotide
agtgtcaccaaaatattcggatctcttgacctatgttgactgctacgtcggcgtg

SEQ ID NO: 327689 - DNA, 60 bp, Artificial
  Synthetic oligonucleotide
agtgtcacccaggtattgtgtgctgttactcgaacagtttccactgatgccgaaggatct

SEQ ID NO: 327690 - DNA, 55 bp, Artificial
  Synthetic oligonucleotide
agtgtcatgctatggaaaaactaaatgcactgcatccaataaaaatcgtgggatt

SEQ ID NO: 327691 - DNA, 60 bp, Artificial
  Synthetic oligonucleotide
agtgtcattggaaaattaagtatgatacccatcgtcactattcactccattcctgaatat

SEQ ID NO: 327692 - DNA, 59 bp, Artificial
  Synthetic oligonucleotide
agtgtcattgtgtgcaaaagctcaaaactatgggattaatttaccgataacaggatcaa

SEQ ID NO: 327693 - DNA, 59 bp, Artificial
  Synthetic oligonucleotide
agtgtccaatgtggaattaagcaatctagtttcttacatgggcattttgcatgagaacc

SEQ ID NO: 327694 - DNA, 50 bp, Artificial
  Synthetic oligonucleotide
agtgtccagaggctccgcaaagctgagatggatggtagaacgccaatttg

SEQ ID NO: 327695 - DNA, 58 bp, Artificial
  Synthetic oligonucleotide
agtgtccccactcagtcaacttcggggaaacaagtgtgtcaggctatacagaactgcc

SEQ ID NO: 327696 - DNA, 51 bp, Artificial
  Synthetic oligonucleotide
agtgtccctacgtcaggttttaggaggcgtcaagctcaaagctcttttgga

SEQ ID NO: 327697 - DNA, 60 bp, Artificial
  Synthetic oligonucleotide
agtgtccttagttctgcaactgtgtatagtggacctaacaccagaggctttagctcacat

SEQ ID NO: 327698 - DNA, 52 bp, Artificial
  Synthetic oligonucleotide
agtgtcgaatcatctcaacaagttggccaatgtcgtaggagacgcgattccc

SEQ ID NO: 327699 - DNA, 60 bp, Artificial
  Synthetic oligonucleotide
agtgtcgagcagatgcaagcgcccacggctcagtgctccttaactgtgctgttgatccga

SEQ ID NO: 327700 - DNA, 51 bp, Artificial
  Synthetic oligonucleotide
agtgtcgcctccaatagtgtcgacccctgtgcccgcaccacgacgtggact

SEQ ID NO: 327701 - DNA, 52 bp, Artificial
  Synthetic oligonucleotide
agtgtcgggggggggctggaacgcagggcccggcgttccatggaattcggcc

SEQ ID NO: 327702 - DNA, 59 bp, Artificial
  Synthetic oligonucleotide
agtgtcgtactcagtaggactcaattcgttcgtagtgggatcacaactcccatgcgaac

SEQ ID NO: 327703 - DNA, 56 bp, Artificial
  Synthetic oligonucleotide
agtgtcgtctccgatagcgtgccaggacgagcccctcgatttgtctgcatcctcgc

SEQ ID NO: 327704 - DNA, 60 bp, Artificial
  Synthetic oligonucleotide
agtgtctaaagttgtaagcacggatgaatatgtaacacgaaccaacatatattatcacgc

SEQ ID NO: 327705 - DNA, 55 bp, Artificial
  Synthetic oligonucleotide
agtgtctaaccgcctgggcgggtgccggagctcctgagggcggagtcaaggggcc

SEQ ID NO: 327706 - DNA, 59 bp, Artificial
  Synthetic oligonucleotide
agtgtctcaaaggagataaaatcctttctgtggacacagtctctgaggagggagttgtc

SEQ ID NO: 327707 - DNA, 54 bp, Artificial
  Synthetic oligonucleotide
agtgtctcaagtctgggttcgctccaaatttcctaccctactcctacctccaac

SEQ ID NO: 327708 - DNA, 60 bp, Artificial
  Synthetic oligonucleotide
agtgtctccaattgagccccctcaaacttacgctatgcaattggagactggagtacaata

SEQ ID NO: 327709 - DNA, 53 bp, Artificial
  Synthetic oligonucleotide
agtgtctccttaactatgccgttgatgcatggtcatcatgcaacgttgtaact

SEQ ID NO: 327710 - DNA, 57 bp, Artificial
  Synthetic oligonucleotide
agtgtctcgaggtcctttctggataccgagtcggatggggtctgtgataccgagtcc

SEQ ID NO: 327711 - DNA, 60 bp, Artificial
  Synthetic oligonucleotide
agtgtctgccagtcggactcaacaacgattcagtttgcggaattgttatcgtcttagagc

SEQ ID NO: 327712 - DNA, 53 bp, Artificial
  Synthetic oligonucleotide
agtgtcttataaagggtctaatagaggaacaaagcgcaaacgtaaaaattgag

SEQ ID NO: 327713 - DNA, 54 bp, Artificial
  Synthetic oligonucleotide
agtgtcttctaatggggcatatggagtaaagggattttcatttaaatacggtaa

SEQ ID NO: 327714 - DNA, 58 bp, Artificial
  Synthetic oligonucleotide
agtgtcttgttagtgccacactgggtcacagtgttcctaatagttgcttttagaattg

SEQ ID NO: 327715 - DNA, 60 bp, Artificial
  Synthetic oligonucleotide
agtgtgaaatcagtaggtatcactggtcagttaactggtagccgtgctgacattatcatt

SEQ ID NO: 327716 - DNA, 60 bp, Artificial
  Synthetic oligonucleotide
agtgtgacctaggccggcatcattggatgcgtgctgataatgctatttcagtccggcccc

SEQ ID NO: 327717 - DNA, 60 bp, Artificial
  Synthetic oligonucleotide
agtgtgacgccaatggctactagggtacaacataatggtgtgatggttgatgccgagatt

SEQ ID NO: 327718 - DNA, 59 bp, Artificial
  Synthetic oligonucleotide
agtgtgacggtcgtgaagacgcaccttgctctttctgctcccgagttttcgcttgtggc

SEQ ID NO: 327719 - DNA, 60 bp, Artificial
  Synthetic oligonucleotide
agtgtgactacaaccactagtgagcaaaacagggaaggacctctatacgaggatcagatc

SEQ ID NO: 327720 - DNA, 54 bp, Artificial
  Synthetic oligonucleotide
agtgtgactacttaactcctattggtttcgattggtcggaaaatgggatccctg

SEQ ID NO: 327721 - DNA, 60 bp, Artificial
  Synthetic oligonucleotide
agtgtgataggataagagcatgggagtgggtagtttatagacattaggataaggctaagc

SEQ ID NO: 327722 - DNA, 58 bp, Artificial
  Synthetic oligonucleotide
agtgtgcagcctacattctcagtacaacggaatctcccttttgaaagatcaaccgtta

SEQ ID NO: 327723 - DNA, 60 bp, Artificial
  Synthetic oligonucleotide
agtgtgcctgcagctctatactggtataagagcagcatgtatagtgggacattcacacac

SEQ ID NO: 327724 - DNA, 50 bp, Artificial
  Synthetic oligonucleotide
agtgtgctgagacgctcagagcagcggctatatactctacctgtgacgtc

SEQ ID NO: 327725 - DNA, 60 bp, Artificial
  Synthetic oligonucleotide
agtgtggaagtttgacagccacctagcatttcgccacgtagcccgagctgctgacattga

SEQ ID NO: 327726 - DNA, 58 bp, Artificial
  Synthetic oligonucleotide
agtgtggacggatgtttccgaacagatagcgggttcgtcagattctgtcaggaatatt

SEQ ID NO: 327727 - DNA, 59 bp, Artificial
  Synthetic oligonucleotide
agtgtggattcgcactcccccctcatatagaccaccaaatgcccctatcttatcaacac

SEQ ID NO: 327728 - DNA, 60 bp, Artificial
  Synthetic oligonucleotide
agtgtggcaatatgctgagagcacgtgtgattattggatcgatgtactgaatccattgtc

SEQ ID NO: 327729 - DNA, 55 bp, Artificial
  Synthetic oligonucleotide
agtgtggccacattatctgaattcacgagatgctgtggctatagacaagccaacc

SEQ ID NO: 327730 - DNA, 50 bp, Artificial
  Synthetic oligonucleotide
agtgtggctgtcatttaaggcagctagttctggggttcagtaccatgaca

SEQ ID NO: 327731 - DNA, 50 bp, Artificial
  Synthetic oligonucleotide
agtgtgggaattccggatacgatgtcatcaaaatcttagaaccctacgtt

SEQ ID NO: 327732 - DNA, 60 bp, Artificial
  Synthetic oligonucleotide
agtgtgggacgtcaggtgtcgatgggaatcgataaagctcattaattgtcaaatagaatc

SEQ ID NO: 327733 - DNA, 55 bp, Artificial
  Synthetic oligonucleotide
agtgtgggggcgacacttgaggcactcttccaaggtccaccagtgtatagggaga

SEQ ID NO: 327734 - DNA, 53 bp, Artificial
  Synthetic oligonucleotide
agtgtgggggtcacctacgggtactccactgcggaggaccacgttgccgggcc

SEQ ID NO: 327735 - DNA, 60 bp, Artificial
  Synthetic oligonucleotide
agtgtggttatggcaattgtgtacgatgcacaggacactgtacccaccactcggacccag

SEQ ID NO: 327736 - DNA, 50 bp, Artificial
  Synthetic oligonucleotide
agtgtggtttcaccacggaaaccggtcaaagtgttgtacgttttgttagg

SEQ ID NO: 327737 - DNA, 55 bp, Artificial
  Synthetic oligonucleotide
agtgtgtaggtttagtaattgggaaagtgcctcttctttagtaagagagcatttg

SEQ ID NO: 327738 - DNA, 60 bp, Artificial
  Synthetic oligonucleotide
agtgtgtatggatgcaggtgctgcgggacaggtcaatgcgctgctagccccaaggagggg

SEQ ID NO: 327739 - DNA, 58 bp, Artificial
  Synthetic oligonucleotide
agtgtgtattcacttacctcagacccagaccactttgacggataccaacaacagatcg

SEQ ID NO: 327740 - DNA, 55 bp, Artificial
  Synthetic oligonucleotide
agtgtgtcgtaaggctttcaggtctagcagtgagcatggatcattccaagtgggg

SEQ ID NO: 327741 - DNA, 59 bp, Artificial
  Synthetic oligonucleotide
agtgtgtcgtggtatggaatggttgatgcgaaataaggcgaatgcgttacagtatgaaa

SEQ ID NO: 327742 - DNA, 57 bp, Artificial
  Synthetic oligonucleotide
agtgtgtggtcccaataatggtttcgaaatgtggagttctgagtgggctaatcaaac

SEQ ID NO: 327743 - DNA, 55 bp, Artificial
  Synthetic oligonucleotide
agtgtgttacagttgatgttttaaaagatatgcctgttcttaaaactattaatgg

SEQ ID NO: 327744 - DNA, 60 bp, Artificial
  Synthetic oligonucleotide
agtgtgttattatggaggagtgtggcatgccgcagtggcttgtccggctatatcacctag

SEQ ID NO: 327745 - DNA, 52 bp, Artificial
  Synthetic oligonucleotide
agtgtgttcattgagtttgactggacacgctacgatgggaccatcccacgtg

SEQ ID NO: 327746 - DNA, 60 bp, Artificial
  Synthetic oligonucleotide
agtgtgttgcctatagatatttgcgtgtgtatagctttgagggccctcaagaccgagcct

SEQ ID NO: 327747 - DNA, 59 bp, Artificial
  Synthetic oligonucleotide
agtgtgtttagcgctaaccaggtttgcaatgcagtcaacctagtcccacttgatactcc

SEQ ID NO: 327748 - DNA, 58 bp, Artificial
  Synthetic oligonucleotide
agtgtgtttattgatgcacaagattctacacctttaacttatacagaagaccaactgt

SEQ ID NO: 327749 - DNA, 59 bp, Artificial
  Synthetic oligonucleotide
agtgtgtttgcagagacaattggaagggctccaataggcccgtcctacatataaatatg

SEQ ID NO: 327750 - DNA, 55 bp, Artificial
  Synthetic oligonucleotide
agtgttaaagtggagatttaacagccacctggcatttgagcacaaggcccgagtg

SEQ ID NO: 327751 - DNA, 58 bp, Artificial
  Synthetic oligonucleotide
agtgttaagaaattagcagaggatagatagaacaatccccagaggaccaaagaccgca

SEQ ID NO: 327752 - DNA, 60 bp, Artificial
  Synthetic oligonucleotide
agtgttaatgttgaaggttgtcacaacatgtttataacacgtgatgaggcaattcgcaat

SEQ ID NO: 327753 - DNA, 55 bp, Artificial
  Synthetic oligonucleotide
agtgttaccaagcgtgctactccggttaaacctgtagctcgtcagaaagagggct

SEQ ID NO: 327754 - DNA, 55 bp, Artificial
  Synthetic oligonucleotide
agtgttacgcggagcgtggtgtgccgtaccaaggcaatgttttcgccaacgaacg

SEQ ID NO: 327755 - DNA, 60 bp, Artificial
  Synthetic oligonucleotide
agtgttacgctcgtgagtatgctcctggaccgttgactcaaactgctgtatttccaagtg

SEQ ID NO: 327756 - DNA, 57 bp, Artificial
  Synthetic oligonucleotide
agtgttactaacaactcctacggcagtgaaagttgacgggattgcctcctggatcca

SEQ ID NO: 327757 - DNA, 52 bp, Artificial
  Synthetic oligonucleotide
agtgttactccgtcgacttctgtggttttggacccaaacaaccctatggtcg

SEQ ID NO: 327758 - DNA, 58 bp, Artificial
  Synthetic oligonucleotide
agtgttactgaaggctctcgctggggttcctgtggcacacattgagggaaccaagtac

SEQ ID NO: 327759 - DNA, 60 bp, Artificial
  Synthetic oligonucleotide
agtgttagaatgacatattcacccagaatgaaagagcgtgaggatgacaagtacatatat

SEQ ID NO: 327760 - DNA, 50 bp, Artificial
  Synthetic oligonucleotide
agtgttagatcctttagtacagataattagtgatttgtcttctttaagct

SEQ ID NO: 327761 - DNA, 53 bp, Artificial
  Synthetic oligonucleotide
agtgttagatgtccaaaccacattcaacttggagtatgatcattctcaaattg

SEQ ID NO: 327762 - DNA, 57 bp, Artificial
  Synthetic oligonucleotide
agtgttagccgctttccataagatacttgtcgcgcaaggcttgctcccccccaaaga

SEQ ID NO: 327763 - DNA, 60 bp, Artificial
  Synthetic oligonucleotide
agtgttagtgtggaagtttgacagccacctagcatttcgccatgtagcccgagagctgca

SEQ ID NO: 327764 - DNA, 59 bp, Artificial
  Synthetic oligonucleotide
agtgttatcacgggtggagagttgttcttctcatcccgagcacagttcaacggtcatgt

SEQ ID NO: 327765 - DNA, 60 bp, Artificial
  Synthetic oligonucleotide
agtgttatcctctcagttgctcagaatgtttgaagagcaaatagcagtgcctgaaattac

SEQ ID NO: 327766 - DNA, 60 bp, Artificial
  Synthetic oligonucleotide
agtgttattttaggaatcaccaccagtcagctatcattgtcaactgtgtttcctgagatc

SEQ ID NO: 327767 - DNA, 55 bp, Artificial
  Synthetic oligonucleotide
agtgttcaatagttgcttaagtttcgtgctggagctacccggctgtaaaacccga

SEQ ID NO: 327768 - DNA, 57 bp, Artificial
  Synthetic oligonucleotide
agtgttcaccggttccgtcactgcaccagttccagccaaaaccagcgatagccaagt

SEQ ID NO: 327769 - DNA, 60 bp, Artificial
  Synthetic oligonucleotide
agtgttcatccctcttccacttaacgacatgggaaatgagagatagagactctgagttga

SEQ ID NO: 327770 - DNA, 60 bp, Artificial
  Synthetic oligonucleotide
agtgttccagctgcattgcacggcactgttcgggtaccgcttaactgcagactcagaagc

SEQ ID NO: 327771 - DNA, 59 bp, Artificial
  Synthetic oligonucleotide
agtgttccagttgcgatattgcccgtccaaaggtcctccgatgcacagtccgaaatagc

SEQ ID NO: 327772 - DNA, 60 bp, Artificial
  Synthetic oligonucleotide
agtgttcccagttgtatgtgtatggttaacctctatgggtatctgtacaatggcattcaa

SEQ ID NO: 327773 - DNA, 58 bp, Artificial
  Synthetic oligonucleotide
agtgttccgaaagtgagcttttacagttcgtacatacaaacgctgactgtggcccaga

SEQ ID NO: 327774 - DNA, 60 bp, Artificial
  Synthetic oligonucleotide
agtgttcgaagctggaacagatggaagatttttcgcatatcgagttgaaacattcgagga

SEQ ID NO: 327775 - DNA, 55 bp, Artificial
  Synthetic oligonucleotide
agtgttcgtatggtgtgcacgcctcttgcgcctgtggacagaagagttcagagga

SEQ ID NO: 327776 - DNA, 60 bp, Artificial
  Synthetic oligonucleotide
agtgttctatggacgaattgagccagatttcagaggacttgcacaacctcatgctgtccg

SEQ ID NO: 327777 - DNA, 57 bp, Artificial
  Synthetic oligonucleotide
agtgttcttgctaccctaacgatgggaaagtggaatgtgtatgtagggacaattgga

SEQ ID NO: 327778 - DNA, 60 bp, Artificial
  Synthetic oligonucleotide
agtgttctttctcgttcgagtcagctcacgaggaggtgaccccagagacctcagcttatg

SEQ ID NO: 327779 - DNA, 54 bp, Artificial
  Synthetic oligonucleotide
agtgttgaagagatgggcttcttctattcatgatggcataagtggtcttttagt

SEQ ID NO: 327780 - DNA, 60 bp, Artificial
  Synthetic oligonucleotide
agtgttgaagcatgtggttattcagataggatcatgcaaataacacgagggaattcaaca

SEQ ID NO: 327781 - DNA, 55 bp, Artificial
  Synthetic oligonucleotide
agtgttgaagtacaatctaatggaccctgaatacagagggcgattacttcaccct

SEQ ID NO: 327782 - DNA, 59 bp, Artificial
  Synthetic oligonucleotide
agtgttgacggtagcagcacgtaacccgatcacgacgaggatcaaatgtataccagaag

SEQ ID NO: 327783 - DNA, 58 bp, Artificial
  Synthetic oligonucleotide
agtgttggaaaccatgcgaggccaacaatgtaccttaaaggacattgtcctgcagcta

SEQ ID NO: 327784 - DNA, 53 bp, Artificial
  Synthetic oligonucleotide
agtgttggcatgtcacgtagacaaaacgcgccccggtccccctcccggtcgtc

SEQ ID NO: 327785 - DNA, 60 bp, Artificial
  Synthetic oligonucleotide
agtgttgggaatctgctgttgcctcctcatcactggcaaacatatcttcatggcagaata

SEQ ID NO: 327786 - DNA, 59 bp, Artificial
  Synthetic oligonucleotide
agtgttggtaatgaaacggaaacgggactctagcatacttactgacagccagacagcga

SEQ ID NO: 327787 - DNA, 58 bp, Artificial
  Synthetic oligonucleotide
agtgttggtgtggagatttgacagcaccctggcatttcatcacagagcccgagagcta

SEQ ID NO: 327788 - DNA, 59 bp, Artificial
  Synthetic oligonucleotide
agtgttgtgacctggagcctgaagcccgcaaggcaattaccgccctcacagaaagactc

SEQ ID NO: 327789 - DNA, 53 bp, Artificial
  Synthetic oligonucleotide
agtgttgtgggataccctagagtacacgtaaaacacccaccggtttggcagga

SEQ ID NO: 327790 - DNA, 60 bp, Artificial
  Synthetic oligonucleotide
agtgtttaacatgtttgataacgagccaagtactgccactgtgaagaacgatctccgtga

SEQ ID NO: 327791 - DNA, 50 bp, Artificial
  Synthetic oligonucleotide
agtgtttaatttaagttcaagtttagtagtatgagtctgtttgtgtcgat

SEQ ID NO: 327792 - DNA, 55 bp, Artificial
  Synthetic oligonucleotide
agtgtttatgcctacctttacagtgaacccagagatgcactacaggcgcgtggct

SEQ ID NO: 327793 - DNA, 58 bp, Artificial
  Synthetic oligonucleotide
agtgtttcaattgtggcaaagaaggacacatagccaaaaattgcagagcccctaggaa

SEQ ID NO: 327794 - DNA, 56 bp, Artificial
  Synthetic oligonucleotide
agtgtttcaccactgtcacacactctagaatggcccaaaacggtacgggaggagga

SEQ ID NO: 327795 - DNA, 60 bp, Artificial
  Synthetic oligonucleotide
agtgtttccaccaggcatgaactggactgaattgatcactaattactctccatcacgtga

SEQ ID NO: 327796 - DNA, 57 bp, Artificial
  Synthetic oligonucleotide
agtgtttgaggctcttaaacctcagcaagttcagtactcagaaccgaatcccagacc

SEQ ID NO: 327797 - DNA, 60 bp, Artificial
  Synthetic oligonucleotide
agtgtttgcactatctcaggactggtcaatgtaaaggcaggtcctattggctctgagact

SEQ ID NO: 327798 - DNA, 59 bp, Artificial
  Synthetic oligonucleotide
agtgttttcacttgtcgtggtggtcgaccgcagaccacatataagccctactggatgct

SEQ ID NO: 327799 - DNA, 55 bp, Artificial
  Synthetic oligonucleotide
agtgttttccgtgctccgaggcaagcgaagcctctcgactacaggacccttctga

SEQ ID NO: 327800 - DNA, 58 bp, Artificial
  Synthetic oligonucleotide
agtgttttgtgtcccaggagagggcacaagaaaactgtctaagcattgacctcaactc

SEQ ID NO: 327801 - DNA, 52 bp, Artificial
  Synthetic oligonucleotide
agttaaaacccaaaagcgtgtattgtataccatagcaaagaactaagaaatt

SEQ ID NO: 327802 - DNA, 53 bp, Artificial
  Synthetic oligonucleotide
agttaaaacgacttcgtttcaagggtattgtgaaagtggaacgggttcatgca

SEQ ID NO: 327803 - DNA, 55 bp, Artificial
  Synthetic oligonucleotide
agttaaaagcagtgagggccatttgttttggtgattccgaacaaatagcgttctg

SEQ ID NO: 327804 - DNA, 54 bp, Artificial
  Synthetic oligonucleotide
agttaaaagctaacactgtcaaaaacctaaatggctataggggcgttatgtgac

SEQ ID NO: 327805 - DNA, 54 bp, Artificial
  Synthetic oligonucleotide
agttaaacgaataagaggtgtaacacgtgtgcttgaacctgttaagcttattaa

SEQ ID NO: 327806 - DNA, 54 bp, Artificial
  Synthetic oligonucleotide
agttaaagagtttgaacttatccgggacatttgccgttcgaaagtcggatgtga

SEQ ID NO: 327807 - DNA, 55 bp, Artificial
  Synthetic oligonucleotide
agttaaagattgggtaaaacaacacatgattagatggggcaactttgtgatgagg

SEQ ID NO: 327808 - DNA, 60 bp, Artificial
  Synthetic oligonucleotide
agttaaaggggtattctcctggcacactgactgcagtagagtgtatagattattttgata

SEQ ID NO: 327809 - DNA, 60 bp, Artificial
  Synthetic oligonucleotide
agttaaagtattgctgaattgcagcattgttggagtttgtgacccagtttgcagggatcc

SEQ ID NO: 327810 - DNA, 59 bp, Artificial
  Synthetic oligonucleotide
agttaaatagcttgcaaaatacgtggccttatggttacagtatgcccatcgcagttcgc

SEQ ID NO: 327811 - DNA, 57 bp, Artificial
  Synthetic oligonucleotide
agttaaatctatcaaatgaggaaatagtttatggagccactctaggtgttgaaggga

SEQ ID NO: 327812 - DNA, 60 bp, Artificial
  Synthetic oligonucleotide
agttaaattccatgatggcaaatactctgactatcgactccctcacacccacattagaaa

SEQ ID NO: 327813 - DNA, 54 bp, Artificial
  Synthetic oligonucleotide
agttaacaaacgtttagtcgcgtacaaaggtaagatgcgcttaatggatgtaac

SEQ ID NO: 327814 - DNA, 60 bp, Artificial
  Synthetic oligonucleotide
agttaacaacaacttgactctcaagacaactatctttgatccaatcaactccagaatcag

SEQ ID NO: 327815 - DNA, 54 bp, Artificial
  Synthetic oligonucleotide
agttaaccaaatgcacagaagtgaaattgagttaacaactttatcaagaggatt

SEQ ID NO: 327816 - DNA, 53 bp, Artificial
  Synthetic oligonucleotide
agttaaccacaaactagatgtgacaaccgctacgtgtacaataagaaactgta

SEQ ID NO: 327817 - DNA, 51 bp, Artificial
  Synthetic oligonucleotide
agttaaccgaaagaggcttctatcataacgaaagtgattggtctgtagaga

SEQ ID NO: 327818 - DNA, 57 bp, Artificial
  Synthetic oligonucleotide
agttaacggagtgaacgacttcagctacaacggtggtacattgccaacagatttcgc

SEQ ID NO: 327819 - DNA, 56 bp, Artificial
  Synthetic oligonucleotide
agttaacggatctttattatgtgattatgataaccattttagcggtgaaaatatgg

SEQ ID NO: 327820 - DNA, 59 bp, Artificial
  Synthetic oligonucleotide
agttaacggtccatacagacatagagcatgagcgaatcccttccgcttccaagctcccg

SEQ ID NO: 327821 - DNA, 56 bp, Artificial
  Synthetic oligonucleotide
agttaactaatagctcacatcgtcgtaggcgttctattggccaaaatgtaacaagt

SEQ ID NO: 327822 - DNA, 54 bp, Artificial
  Synthetic oligonucleotide
agttaactcctctctgtgttactttaaactgtacccaggctaattggaaatcta

SEQ ID NO: 327823 - DNA, 57 bp, Artificial
  Synthetic oligonucleotide
agttaacttcagtcacgtcgttgtgtatgcttattggaaatgcaaccgttataccca

SEQ ID NO: 327824 - DNA, 56 bp, Artificial
  Synthetic oligonucleotide
agttaagaaagcagggagatcaaggatgattccagtgcatctgcttaaaccaacct

SEQ ID NO: 327825 - DNA, 51 bp, Artificial
  Synthetic oligonucleotide
agttaagaagttaagaaattcttatacaaacttaattatgttagataaatt

SEQ ID NO: 327826 - DNA, 54 bp, Artificial
  Synthetic oligonucleotide
agttaagaatccagagcccaagggctatgtcttaaacgttccgggaccaggcgc

SEQ ID NO: 327827 - DNA, 52 bp, Artificial
  Synthetic oligonucleotide
agttaagactcacctttggactaccgcttcttcaacccggactttacaacac

SEQ ID NO: 327828 - DNA, 55 bp, Artificial
  Synthetic oligonucleotide
agttaagactctcctacggactaccaattcttcaactcggactttataacaatca

SEQ ID NO: 327829 - DNA, 49 bp, Artificial
  Synthetic oligonucleotide
agttaagaggaattttaataccccggatttagccgggagtttagatatt

SEQ ID NO: 327830 - DNA, 55 bp, Artificial
  Synthetic oligonucleotide
agttaagcaagcaaggagtgcactgaattttgaactgaccccactcttcactacg

SEQ ID NO: 327831 - DNA, 54 bp, Artificial
  Synthetic oligonucleotide
agttaagccagtattcaacgggctccgacacacagtggttaacccgcaaagtcc

SEQ ID NO: 327832 - DNA, 56 bp, Artificial
  Synthetic oligonucleotide
agttaaggacggtgacaccgtgactgttccaaaggtcagccctcatcagtacaggg

SEQ ID NO: 327833 - DNA, 57 bp, Artificial
  Synthetic oligonucleotide
agttaatactcgcgattacaaaggtgcaggtggtctgactgaacgtgtatctagcga

SEQ ID NO: 327834 - DNA, 57 bp, Artificial
  Synthetic oligonucleotide
agttaatcagaatgatcaaacgtgggatcaatgaccgaaacttctggaggggtccaa

SEQ ID NO: 327835 - DNA, 59 bp, Artificial
  Synthetic oligonucleotide
agttaatcatcagggccgacgcggaaattcgtcaagcgttcctgacaggtgatattgac

SEQ ID NO: 327836 - DNA, 53 bp, Artificial
  Synthetic oligonucleotide
agttaatcctttgccgaaatttgattctaccgtgtgggtgacagtccgtaaag

SEQ ID NO: 327837 - DNA, 53 bp, Artificial
  Synthetic oligonucleotide
agttaatcggttgagaggcttttatacggacagagattttattttaaccaaga

SEQ ID NO: 327838 - DNA, 57 bp, Artificial
  Synthetic oligonucleotide
agttaatgatacatggagaccgtcacctccaactaagtataaaggatggtgtttgga

SEQ ID NO: 327839 - DNA, 52 bp, Artificial
  Synthetic oligonucleotide
agttaatttacaattacccttttaattgtaagcaagaaatcaatctattacc

SEQ ID NO: 327840 - DNA, 54 bp, Artificial
  Synthetic oligonucleotide
agttaatttgcgagcctaggaatcttggccttgtccccagttaaactggacaaa

SEQ ID NO: 327841 - DNA, 58 bp, Artificial
  Synthetic oligonucleotide
agttaatttggacaattatgttatgccaggccctgataatgtgactaagcaagaaggg

SEQ ID NO: 327842 - DNA, 60 bp, Artificial
  Synthetic oligonucleotide
agttacaagggtagccaaagagttcgctataaacaggcagttgacagcctaggcatgcga

SEQ ID NO: 327843 - DNA, 55 bp, Artificial
  Synthetic oligonucleotide
agttacaatgaggtggaccagttgtcaaagctcttaacaaacagaggcttcatgg

SEQ ID NO: 327844 - DNA, 60 bp, Artificial
  Synthetic oligonucleotide
agttacaatggagcaaatgcagcctgctactatccctccaactgttgagggaggccttgg

SEQ ID NO: 327845 - DNA, 54 bp, Artificial
  Synthetic oligonucleotide
agttacacccacacactccttaagctcaagggtgttttccccgccctctccatc

SEQ ID NO: 327846 - DNA, 56 bp, Artificial
  Synthetic oligonucleotide
agttacacgtcatttgtgacgtatccctccaggggaccatcgggtgatgggcgtag

SEQ ID NO: 327847 - DNA, 55 bp, Artificial
  Synthetic oligonucleotide
agttacactcttagcactgatccaacggcagtccctcgaacacttgcaatattgg

SEQ ID NO: 327848 - DNA, 60 bp, Artificial
  Synthetic oligonucleotide
agttacagagcgtctgagtagactgcttaagagttatggattagtgactcaagctgattc

SEQ ID NO: 327849 - DNA, 60 bp, Artificial
  Synthetic oligonucleotide
agttacagctatgacaatgcagtcaccacttcaattaagatttagaatgcaggcaaaaca

SEQ ID NO: 327850 - DNA, 54 bp, Artificial
  Synthetic oligonucleotide
agttacagttacattctcaattacttgtgaaggtaggtaaggggctcagaaacc

SEQ ID NO: 327851 - DNA, 60 bp, Artificial
  Synthetic oligonucleotide
agttaccactgtgtcgaccaccagctgcgagatatgagagcataatagacctgatggaca

SEQ ID NO: 327852 - DNA, 55 bp, Artificial
  Synthetic oligonucleotide
agttaccacttggtatttgggaaagtactgtagggcggatgctagatcgaccggc

SEQ ID NO: 327853 - DNA, 55 bp, Artificial
  Synthetic oligonucleotide
agttacccggccccgttgttgcttcagaaccgacaaatggtcttggtcagcagtc

SEQ ID NO: 327854 - DNA, 52 bp, Artificial
  Synthetic oligonucleotide
agttaccgaaagaggccgttgagcctactatcagtaccgggatggaagcatt

SEQ ID NO: 327855 - DNA, 54 bp, Artificial
  Synthetic oligonucleotide
agttaccgggagtccctttcttctcatgccaacgcgggtataagggagtctggc

SEQ ID NO: 327856 - DNA, 57 bp, Artificial
  Synthetic oligonucleotide
agttacctgggagtcctattatgcagaaggcgattggtagtgagcacgaggaaggtt

SEQ ID NO: 327857 - DNA, 59 bp, Artificial
  Synthetic oligonucleotide
agttacgaccacgtacgacagcatgaaaagaatccagttcagcataaaacgatgaacaa

SEQ ID NO: 327858 - DNA, 49 bp, Artificial
  Synthetic oligonucleotide
agttacgagacaacttaccgggagtaagcctaagtttaccggtaagacg

SEQ ID NO: 327859 - DNA, 55 bp, Artificial
  Synthetic oligonucleotide
agttacgatacacgtagagctaagctcgtcctctactatcctttcatagagggaa

SEQ ID NO: 327860 - DNA, 59 bp, Artificial
  Synthetic oligonucleotide
agttacgccgacgcaaatttcgcaatctgcgtcttcttctgcagcgactccagtcggtt

SEQ ID NO: 327861 - DNA, 54 bp, Artificial
  Synthetic oligonucleotide
agttacggcttaccaaaggcgtgttttccaaatcccacaggcgaatggtcatgg

SEQ ID NO: 327862 - DNA, 55 bp, Artificial
  Synthetic oligonucleotide
agttacgggcggcgatcacgtggcttgaaagactggggagacgtaaacgtatgac

SEQ ID NO: 327863 - DNA, 53 bp, Artificial
  Synthetic oligonucleotide
agttacggttgcgcctccctacccaagccagtgtcttatagcactaggtggta

SEQ ID NO: 327864 - DNA, 53 bp, Artificial
  Synthetic oligonucleotide
agttacggtttcattgttgagaagacagacccagtattccaagtccctaaagg

SEQ ID NO: 327865 - DNA, 57 bp, Artificial
  Synthetic oligonucleotide
agttacgttgatgactcgaccattcaggccaaaaccgcattgacagttgaagctatc

SEQ ID NO: 327866 - DNA, 52 bp, Artificial
  Synthetic oligonucleotide
agttactctacccttattgtcaaattgttaaagcggtcatccgtctaatatt

SEQ ID NO: 327867 - DNA, 58 bp, Artificial
  Synthetic oligonucleotide
agttactcttcattaagtgtctatattggaagtcaggatgggcctgtcgtttatagcc

SEQ ID NO: 327868 - DNA, 60 bp, Artificial
  Synthetic oligonucleotide
agttactgacactttcgctactagagtggctgacaacatgtttgactacataaacatcgg

SEQ ID NO: 327869 - DNA, 55 bp, Artificial
  Synthetic oligonucleotide
agttactgtcacactaaacagacgtatgtcagcttctggaatggcctatgctatg

SEQ ID NO: 327870 - DNA, 59 bp, Artificial
  Synthetic oligonucleotide
agttacttctcaagcgactcgctgacagacccgtggacaacaagcgacgacgattttca

SEQ ID NO: 327871 - DNA, 59 bp, Artificial
  Synthetic oligonucleotide
agttacttgatggcactcacatacaggagtccgatcgaggaagtgttaacctaccttga

SEQ ID NO: 327872 - DNA, 58 bp, Artificial
  Synthetic oligonucleotide
agttacttggtagtcaacacatgcctgccgccgccagtcggtttcaggaagtgtagat

SEQ ID NO: 327873 - DNA, 60 bp, Artificial
  Synthetic oligonucleotide
agttacttgtacttgttcagactagaactgacattttgcataggcagaacgcaattatgc

SEQ ID NO: 327874 - DNA, 54 bp, Artificial
  Synthetic oligonucleotide
agttacttgtctgaatttaggttggtaattcaaggcacgtacagcaaattctct

SEQ ID NO: 327875 - DNA, 55 bp, Artificial
  Synthetic oligonucleotide
agttactttacagtcctcaggcgagaagcgcggacgaaacagacattgctagcat

SEQ ID NO: 327876 - DNA, 55 bp, Artificial
  Synthetic oligonucleotide
agttagaaaaggaacccatagcaggagcagaaacttactatgtagatggagctgc

SEQ ID NO: 327877 - DNA, 58 bp, Artificial
  Synthetic oligonucleotide
agttagaagcacctaattatcactacgaggaatgctcctgttaccctgattcagggaa

SEQ ID NO: 327878 - DNA, 58 bp, Artificial
  Synthetic oligonucleotide
agttagaccgagtgaaggtaagtggaatagcagtagtgcgagtgacctgtggttagag

SEQ ID NO: 327879 - DNA, 53 bp, Artificial
  Synthetic oligonucleotide
agttagagaagccttaaaaaggaggctgcgaaccttgattctggctcccacga

SEQ ID NO: 327880 - DNA, 55 bp, Artificial
  Synthetic oligonucleotide
agttagagcaactcaacgtcgatttacctcgatattcctacaggtttcgttacag

SEQ ID NO: 327881 - DNA, 55 bp, Artificial
  Synthetic oligonucleotide
agttagagtctccagtaacgactatagttggatatcatccggcagctagagaccg

SEQ ID NO: 327882 - DNA, 57 bp, Artificial
  Synthetic oligonucleotide
agttagatctagaaatttctcggacaatgctaaaaacataatagtgcaactaaaaga

SEQ ID NO: 327883 - DNA, 55 bp, Artificial
  Synthetic oligonucleotide
agttagatgaggcggtgcgggaagttcatagaactgcccctccgggtgcgtttgt

SEQ ID NO: 327884 - DNA, 50 bp, Artificial
  Synthetic oligonucleotide
agttagattttcatgagactttcaacacatggagaaaagaggcactgctg

SEQ ID NO: 327885 - DNA, 56 bp, Artificial
  Synthetic oligonucleotide
agttagcctccttggtggtcctgcaacaaacagggactacttacggcagcggcaag

SEQ ID NO: 327886 - DNA, 53 bp, Artificial
  Synthetic oligonucleotide
agttagcctcgacgttcacatagggacctgccatagcagcggtcgccataagg

SEQ ID NO: 327887 - DNA, 57 bp, Artificial
  Synthetic oligonucleotide
agttagcggctcctgattgtactattactgtgaatgttttggcatggttgtatgcag

SEQ ID NO: 327888 - DNA, 55 bp, Artificial
  Synthetic oligonucleotide
agttagctacgtcgaaggcaatgaaagcgtgaacttgggatctagcctggggcgc

SEQ ID NO: 327889 - DNA, 55 bp, Artificial
  Synthetic oligonucleotide
agttaggaaaaatgtatggagtataatatatgggcgtgctgttcataattttaga

SEQ ID NO: 327890 - DNA, 55 bp, Artificial
  Synthetic oligonucleotide
agttaggacgaaacctacggatgattcaattgccagaggtagggaatacctaatc

SEQ ID NO: 327891 - DNA, 60 bp, Artificial
  Synthetic oligonucleotide
agttaggagacgtatattatactctgcgtcacgtgtatcgatggagcctgcgacctgaat

SEQ ID NO: 327892 - DNA, 54 bp, Artificial
  Synthetic oligonucleotide
agttaggcaggggtactcaccattatcgttgcagacccacctcccaaccccgcg

SEQ ID NO: 327893 - DNA, 52 bp, Artificial
  Synthetic oligonucleotide
agttaggccctgagttgaacccctaccttgctcaccttgcacgcatgtataa

SEQ ID NO: 327894 - DNA, 60 bp, Artificial
  Synthetic oligonucleotide
agttaggccgtctacggttgttgaggcgatgctcaccgtcgagcgtactctgactcacga

SEQ ID NO: 327895 - DNA, 50 bp, Artificial
  Synthetic oligonucleotide
agttaggcgcgcttaggatctcggcatacgtggacgctgcgctatggtgc

SEQ ID NO: 327896 - DNA, 54 bp, Artificial
  Synthetic oligonucleotide
agttagggataggaggccttatggcactccgcaagactttggtcaggtttttaa

SEQ ID NO: 327897 - DNA, 60 bp, Artificial
  Synthetic oligonucleotide
agttaggggtgctagaaaatcagatcaacaccatccaccaatcgtgtccgagccaagagc

SEQ ID NO: 327898 - DNA, 56 bp, Artificial
  Synthetic oligonucleotide
agttagggtaatgggttagtattcttaaagttgcttacaatttatgcactacatga

SEQ ID NO: 327899 - DNA, 56 bp, Artificial
  Synthetic oligonucleotide
agttaggtgtcacttgtggagacagagttagacacggttgatctcacccttcgggg

SEQ ID NO: 327900 - DNA, 55 bp, Artificial
  Synthetic oligonucleotide
agttaggtgttccatttcatctggggaccaagcaagtgtgcatagcatggtccag

SEQ ID NO: 327901 - DNA, 55 bp, Artificial
  Synthetic oligonucleotide
agttagtaatgaagtgccttctcattcacattaaacgtgagacgcatcgcttgcg

SEQ ID NO: 327902 - DNA, 53 bp, Artificial
  Synthetic oligonucleotide
agttagtaccggtgggtgggaagggggaacactgttcggagataatagagtca

SEQ ID NO: 327903 - DNA, 53 bp, Artificial
  Synthetic oligonucleotide
agttagtagattaggaaggcgaggcactataagaacacgtagtggcttacaaa

SEQ ID NO: 327904 - DNA, 54 bp, Artificial
  Synthetic oligonucleotide
agttagtatggaaaaagctaacttatataatatccctaaattaataagagagtg

SEQ ID NO: 327905 - DNA, 60 bp, Artificial
  Synthetic oligonucleotide
agttagtctgctggatcagcacactcagggagtcgacttcactgtgaatgaaatcgatgc

SEQ ID NO: 327906 - DNA, 59 bp, Artificial
  Synthetic oligonucleotide
agttagtgcttgtcctgaccttttacttatgcttgaaggtcagccaggtggtgcacgcc

SEQ ID NO: 327907 - DNA, 53 bp, Artificial
  Synthetic oligonucleotide
agttagtgggaaaattgaattgggcaagtcagatttacccagggattaaagta

SEQ ID NO: 327908 - DNA, 57 bp, Artificial
  Synthetic oligonucleotide
agttagtgtgtttagtgttggcgatcgctattcgtactactaccaggcaaacagtac

SEQ ID NO: 327909 - DNA, 56 bp, Artificial
  Synthetic oligonucleotide
agttagttaggttgaagcacgggaaagagatcacgaagaagtttggcgaggagcta

SEQ ID NO: 327910 - DNA, 60 bp, Artificial
  Synthetic oligonucleotide
agttataaagccatgctgcatgacggctcatagctatcatttgaggcctaaaagacagtg

SEQ ID NO: 327911 - DNA, 54 bp, Artificial
  Synthetic oligonucleotide
agttatacagcacacgaagaacgagacctcacccctactgaacgattgaaggct

SEQ ID NO: 327912 - DNA, 53 bp, Artificial
  Synthetic oligonucleotide
agttatagaaaatatcgcgcaacatattactagtatgcataacaccactcgcg

SEQ ID NO: 327913 - DNA, 50 bp, Artificial
  Synthetic oligonucleotide
agttatagcgcaatcaagtctccaacaaggtacaacggcctgtacaattt

SEQ ID NO: 327914 - DNA, 56 bp, Artificial
  Synthetic oligonucleotide
agttatataatggaagagggttaccatatacaagatgtcttaaataatcaggtagt

SEQ ID NO: 327915 - DNA, 52 bp, Artificial
  Synthetic oligonucleotide
agttatatcactcattgcaaagttggatgccacagtttttgctcagatagtt

SEQ ID NO: 327916 - DNA, 60 bp, Artificial
  Synthetic oligonucleotide
agttatatgaggcagcacattcagatgtccgtgagtccctagccaggttcatccccacta

SEQ ID NO: 327917 - DNA, 55 bp, Artificial
  Synthetic oligonucleotide
agttatattgcaatctatacctacagcacactgcgaacaacctgaacagatcatt

SEQ ID NO: 327918 - DNA, 54 bp, Artificial
  Synthetic oligonucleotide
agttatattggtatagttggcaaaattccaggtttagaagttcataaattgtta

SEQ ID NO: 327919 - DNA, 59 bp, Artificial
  Synthetic oligonucleotide
agttatcaggccagaggtagtgtatgctaccctagtgtacccacctgaaatactatcag

SEQ ID NO: 327920 - DNA, 54 bp, Artificial
  Synthetic oligonucleotide
agttatcccgttttacaaccacactcagagcccacgtaatgcgtaccagtcaaa

SEQ ID NO: 327921 - DNA, 59 bp, Artificial
  Synthetic oligonucleotide
agttatccgtgctagagattatgtcgaagcgtcccgccgatatagtcatttccacaccc

SEQ ID NO: 327922 - DNA, 57 bp, Artificial
  Synthetic oligonucleotide
agttatccgtgtcctgaggaggggtggttctccaaagatcagaaacgatggctagag

SEQ ID NO: 327923 - DNA, 58 bp, Artificial
  Synthetic oligonucleotide
agttatcctgtctgactttgcccccgagacagctagcacgctatacctaattttacac

SEQ ID NO: 327924 - DNA, 56 bp, Artificial
  Synthetic oligonucleotide
agttatcgtcttgcgatagggtttaaatagccgtactatttgtcgttgctagatgt

SEQ ID NO: 327925 - DNA, 55 bp, Artificial
  Synthetic oligonucleotide
agttatcgtgttacttaactgggatgaaggaaaacctgtctgtgatcagacgtgg

SEQ ID NO: 327926 - DNA, 50 bp, Artificial
  Synthetic oligonucleotide
agttatctagctggtcgaaacgtcatctatgctaacaaggtggttagata

SEQ ID NO: 327927 - DNA, 56 bp, Artificial
  Synthetic oligonucleotide
agttatctgtataatcgaaagtcgcaccaatcatagcaagaatagtacaagggtaa

SEQ ID NO: 327928 - DNA, 56 bp, Artificial
  Synthetic oligonucleotide
agttatctgtgtaacggatgttacccgtggtaatggaattactcatcgtgttggta

SEQ ID NO: 327929 - DNA, 60 bp, Artificial
  Synthetic oligonucleotide
agttatcttagcaccatccttcaggcacttggcacgcccttacaacgactgcgcatgcac

SEQ ID NO: 327930 - DNA, 60 bp, Artificial
  Synthetic oligonucleotide
agttatgacgtatggttctgcgctccagtgtcacgctatggaccctagcttcatatcaac

SEQ ID NO: 327931 - DNA, 59 bp, Artificial
  Synthetic oligonucleotide
agttatgagatctgattcaaatccgatttcctctctataaaaagcccgagagcttaata

SEQ ID NO: 327932 - DNA, 60 bp, Artificial
  Synthetic oligonucleotide
agttatgagtatggttcagggtgacaaccaagcaattgcaatcaccactagagtagtacg

SEQ ID NO: 327933 - DNA, 52 bp, Artificial
  Synthetic oligonucleotide
agttatgagtattgctaatacaattactcagacattaactagagatttactc

SEQ ID NO: 327934 - DNA, 55 bp, Artificial
  Synthetic oligonucleotide
agttatgctacatggtgatgcattaggaaaaccatttgcatatccgataccaaca

SEQ ID NO: 327935 - DNA, 56 bp, Artificial
  Synthetic oligonucleotide
agttatggagaacgaattcagcggcttggaagggtaggtcgcatacagaagggtac

SEQ ID NO: 327936 - DNA, 58 bp, Artificial
  Synthetic oligonucleotide
agttatgtacaaacgaacagttattatctctgctttcacttacagttgagcccattat

SEQ ID NO: 327937 - DNA, 57 bp, Artificial
  Synthetic oligonucleotide
agttatgtcgtgacagacgaccttttggtacacccatggattttggacaggtgttca

SEQ ID NO: 327938 - DNA, 59 bp, Artificial
  Synthetic oligonucleotide
agttatgtcttcgaggactttataggatccgagatgggtccgtatgtccagaccagatg

SEQ ID NO: 327939 - DNA, 60 bp, Artificial
  Synthetic oligonucleotide
agttatgtgtgggtatcgctatgtcggaccacgtgtgatgtgtattcgcagtttgtactg

SEQ ID NO: 327940 - DNA, 60 bp, Artificial
  Synthetic oligonucleotide
agttatgttagatggtgaatgtataatggcttttgattacactaattatgatggtagcat

SEQ ID NO: 327941 - DNA, 54 bp, Artificial
  Synthetic oligonucleotide
agttatgttcttcttggtccgtgataggaggccctatgggactcctaaggattt

SEQ ID NO: 327942 - DNA, 56 bp, Artificial
  Synthetic oligonucleotide
agttatgttgatggcactaagaaaatcaattactgcggtccaaaggagagtttccc

SEQ ID NO: 327943 - DNA, 57 bp, Artificial
  Synthetic oligonucleotide
agttattaaccctgtgtttagtgaaagccataacttcgaacatgatgactagtagaa

SEQ ID NO: 327944 - DNA, 53 bp, Artificial
  Synthetic oligonucleotide
agttattactgcatggatctagtacatgatggatgttaggaataaacgacgcg

SEQ ID NO: 327945 - DNA, 60 bp, Artificial
  Synthetic oligonucleotide
agttattataatatgatgatccgaaacacccagtccattaacagctctagcatacttcgt

SEQ ID NO: 327946 - DNA, 57 bp, Artificial
  Synthetic oligonucleotide
agttattccctgagtcagttatgctaactccctactacgatatctcaaacatttcgt

SEQ ID NO: 327947 - DNA, 58 bp, Artificial
  Synthetic oligonucleotide
agttattgcgtccgttgtgcaccactatgacttctctatacaagtttattaccctgag

SEQ ID NO: 327948 - DNA, 60 bp, Artificial
  Synthetic oligonucleotide
agttattgctagcctaccattgttcacaggccatgagagctttgacctagctggcttgtt

SEQ ID NO: 327949 - DNA, 60 bp, Artificial
  Synthetic oligonucleotide
agttattgctatctggctaccgtcagcgatctctccaccaaagctgcgtgcccgactatg

SEQ ID NO: 327950 - DNA, 57 bp, Artificial
  Synthetic oligonucleotide
agttattgtgcctaagaatggatttaacacgagcacagtttaatgagagggtgaaaa

SEQ ID NO: 327951 - DNA, 52 bp, Artificial
  Synthetic oligonucleotide
agttattgtggtgagaaaccatgatgacctcattaccgtgacagccactctt

SEQ ID NO: 327952 - DNA, 53 bp, Artificial
  Synthetic oligonucleotide
agttatttcgcttgcagagtcgcataattgttgtactgccgacacacgtagac

SEQ ID NO: 327953 - DNA, 54 bp, Artificial
  Synthetic oligonucleotide
agttcaaaacatagaggacgacttgggagattattggaagaagctctcgacccc

SEQ ID NO: 327954 - DNA, 53 bp, Artificial
  Synthetic oligonucleotide
agttcaaaagggtgcttagaggcttacagagcgtatgacatacataatttggt

SEQ ID NO: 327955 - DNA, 60 bp, Artificial
  Synthetic oligonucleotide
agttcaaattgcttcgaatgagaacatggaaacgatggattccagcactcttgaactgag

SEQ ID NO: 327956 - DNA, 55 bp, Artificial
  Synthetic oligonucleotide
agttcaacgagtcttgggatagcggacgcactgcggctgtcgcttcgccagcgca

SEQ ID NO: 327957 - DNA, 60 bp, Artificial
  Synthetic oligonucleotide
agttcaactcctccaggcgctaccgcaccagcgccacaaatcgagagccccactcgcgat

SEQ ID NO: 327958 - DNA, 54 bp, Artificial
  Synthetic oligonucleotide
agttcaagaccaaatcccgcattgaacctgtatgtttgttgatccatggagctc

SEQ ID NO: 327959 - DNA, 55 bp, Artificial
  Synthetic oligonucleotide
agttcaagcacgaactgaactacagcagagtcactagtgagaaactactcttagg

SEQ ID NO: 327960 - DNA, 60 bp, Artificial
  Synthetic oligonucleotide
agttcaataaaatagagctctcaattatgactttcacattaagtatacccatcaattgtc

SEQ ID NO: 327961 - DNA, 56 bp, Artificial
  Synthetic oligonucleotide
agttcaatagcaggggtacaagccagtacctctacgaacaagcacttctgtttccc

SEQ ID NO: 327962 - DNA, 51 bp, Artificial
  Synthetic oligonucleotide
agttcaatcactccacttctgatgaatgcaattcttaacatacggcaatac

SEQ ID NO: 327963 - DNA, 60 bp, Artificial
  Synthetic oligonucleotide
agttcaatctagggagagggtttatctcaaacacattagctctcctgtccaccatctaca

SEQ ID NO: 327964 - DNA, 60 bp, Artificial
  Synthetic oligonucleotide
agttcacaacacaacagacacttcagtcaaaggcaacatggcaaaagatgatgctcatga

SEQ ID NO: 327965 - DNA, 51 bp, Artificial
  Synthetic oligonucleotide
agttcacaacggggagctccgcactgtgtgcaagcgagcgtttagcatcga

SEQ ID NO: 327966 - DNA, 59 bp, Artificial
  Synthetic oligonucleotide
agttcacaattcatagcacagtggaaaccagttgtcaaattgaaagcgactgtacaagt

SEQ ID NO: 327967 - DNA, 60 bp, Artificial
  Synthetic oligonucleotide
agttcacagatccagctcttagagcacatgctctcgccatagcaactggatctaacatag

SEQ ID NO: 327968 - DNA, 54 bp, Artificial
  Synthetic oligonucleotide
agttcacaggttcatgtactagccccatgggaaaccagaggtacggagttaagg

SEQ ID NO: 327969 - DNA, 60 bp, Artificial
  Synthetic oligonucleotide
agttcaccatgctaggcatctacgacagatgggccgttttaccacgtcacgccaagccag

SEQ ID NO: 327970 - DNA, 56 bp, Artificial
  Synthetic oligonucleotide
agttcacccgtggccagctctctaacacctcccccacagtccagttcctcccaagc

SEQ ID NO: 327971 - DNA, 60 bp, Artificial
  Synthetic oligonucleotide
agttcaccctcagctggaatttgaggatggttctcccctgtgtgctctcgtggacataca

SEQ ID NO: 327972 - DNA, 55 bp, Artificial
  Synthetic oligonucleotide
agttcaccgactctcggcgtcaacacacgttacacgcgccacaatcgaccttgat

SEQ ID NO: 327973 - DNA, 51 bp, Artificial
  Synthetic oligonucleotide
agttcacctttattactgcggaaaggaacggtaacaccagtccgatacccg

SEQ ID NO: 327974 - DNA, 60 bp, Artificial
  Synthetic oligonucleotide
agttcacgtctcgcgtgatcatagtgaccagcaacagtccccccgatgcctggtacagcg

SEQ ID NO: 327975 - DNA, 59 bp, Artificial
  Synthetic oligonucleotide
agttcacgtttctcgaccactcgcttatgagtggccttcccacgcagtaggattgtgtg

SEQ ID NO: 327976 - DNA, 60 bp, Artificial
  Synthetic oligonucleotide
agttcacttgtgtcttcagttgaatggtacatgaaatcgatggaattgcctgacgaaatt

SEQ ID NO: 327977 - DNA, 59 bp, Artificial
  Synthetic oligonucleotide
agttcagaagtacatgtcccactagaggaggctgaaatcgtaatcacaacatactgggg

SEQ ID NO: 327978 - DNA, 60 bp, Artificial
  Synthetic oligonucleotide
agttcagagtgctagcgactatgggacaaggggctttctcaccagttgcaagcctacttg

SEQ ID NO: 327979 - DNA, 56 bp, Artificial
  Synthetic oligonucleotide
agttcagataataaaacttctcccctttgctgctgccccaccggagcaaagtagga

SEQ ID NO: 327980 - DNA, 55 bp, Artificial
  Synthetic oligonucleotide
agttcagcctatatcggataacttaggatacttacaggataagcttgttacaggc

SEQ ID NO: 327981 - DNA, 51 bp, Artificial
  Synthetic oligonucleotide
agttcagcggcggtagcgtcccggtcaccccgcacgtccccaatctgccta

SEQ ID NO: 327982 - DNA, 55 bp, Artificial
  Synthetic oligonucleotide
agttcagcgtgtacagcgggacccagcgggtgaaggtgggagagttcgtggtccc

SEQ ID NO: 327983 - DNA, 54 bp, Artificial
  Synthetic oligonucleotide
agttcaggaagctgtcctcagtcaatccgaacttcacagagctgatcaactatc

SEQ ID NO: 327984 - DNA, 58 bp, Artificial
  Synthetic oligonucleotide
agttcaggagagacgtatccactaaggcctagtacaagaggaaggagccaatctggag

SEQ ID NO: 327985 - DNA, 54 bp, Artificial
  Synthetic oligonucleotide
agttcaggcaactattgtggtttcacgtttcttgtctaacttttggaagagaaa

SEQ ID NO: 327986 - DNA, 59 bp, Artificial
  Synthetic oligonucleotide
agttcagggacattagagcaatggttccggaccaaattacagattacaatgaggcagtg

SEQ ID NO: 327987 - DNA, 55 bp, Artificial
  Synthetic oligonucleotide
agttcaggggagcgtacattcgttgatgacgggagagtcttacggcgagtcggta

SEQ ID NO: 327988 - DNA, 50 bp, Artificial
  Synthetic oligonucleotide
agttcaggtttaaaccccgaccttcctgttaattccaagcccgcggttga

SEQ ID NO: 327989 - DNA, 60 bp, Artificial
  Synthetic oligonucleotide
agttcagtccgacgagcgaatttttcagattaatcgattttatgagcagatatcggcgat

SEQ ID NO: 327990 - DNA, 54 bp, Artificial
  Synthetic oligonucleotide
agttcagtgagtacctttaccttttttgataattggtacgcacaaccacaggac

SEQ ID NO: 327991 - DNA, 60 bp, Artificial
  Synthetic oligonucleotide
agttcagtgcagaggtagtacccatgtttagcgccctagcagaaggagctatcccttatg

SEQ ID NO: 327992 - DNA, 60 bp, Artificial
  Synthetic oligonucleotide
agttcatatgcccacctttgcttgtctccgggtggatgcctcatggtgctatgaatgcct

SEQ ID NO: 327993 - DNA, 51 bp, Artificial
  Synthetic oligonucleotide
agttcatcaagcttcggcacaacaacacttttattgcttgacaagtctaga

SEQ ID NO: 327994 - DNA, 55 bp, Artificial
  Synthetic oligonucleotide
agttcatcaagggtctccgtgtatccacggaatggatgaacacgggtgatggcaa

SEQ ID NO: 327995 - DNA, 52 bp, Artificial
  Synthetic oligonucleotide
agttcatcacttgtgtcctaaagaccctcaagaaatgccatgtctgaggatg

SEQ ID NO: 327996 - DNA, 55 bp, Artificial
  Synthetic oligonucleotide
agttcatccatcacaaccagcccgagaaaggacagcgacggcgcggccttcaggg

SEQ ID NO: 327997 - DNA, 52 bp, Artificial
  Synthetic oligonucleotide
agttcatccgtaaaattagaagcgtcccagtcggacgttgtttgaccctccc

SEQ ID NO: 327998 - DNA, 60 bp, Artificial
  Synthetic oligonucleotide
agttcatcgaaacgtgcaagatgattcgggagttcttctacgggattgcatctttcgaca

SEQ ID NO: 327999 - DNA, 54 bp, Artificial
  Synthetic oligonucleotide
agttcatcggtttagatagtacctgtaatgcttttacccgtagggtgaggcgta

SEQ ID NO: 328000 - DNA, 52 bp, Artificial
  Synthetic oligonucleotide
agttcatctgtacaataatgatagaccccgatatgttggttaaggatcgggg

SEQ ID NO: 328001 - DNA, 57 bp, Artificial
  Synthetic oligonucleotide
agttcatgaagtacgggaagtgccggcggcctaattgccagaactccactaggtcaa

SEQ ID NO: 328002 - DNA, 60 bp, Artificial
  Synthetic oligonucleotide
agttcatgaagtagcgggatatgaagtcactgcattctacaatgtatttgacggtaaata

SEQ ID NO: 328003 - DNA, 51 bp, Artificial
  Synthetic oligonucleotide
agttcatgcgtttgaggagaagaagttgtccaagagtatggctacaattga

SEQ ID NO: 328004 - DNA, 54 bp, Artificial
  Synthetic oligonucleotide
agttcatgctgacatgggctattggatagagagcagactgaatgacacatggaa

SEQ ID NO: 328005 - DNA, 60 bp, Artificial
  Synthetic oligonucleotide
agttcatgggtgatttcaagtatatggaggaaattgtggatgacaaaaatgaatcatgtt

SEQ ID NO: 328006 - DNA, 55 bp, Artificial
  Synthetic oligonucleotide
agttcattagcgcgcacccatgttgctttaataactcacccagagctcttcaaca

SEQ ID NO: 328007 - DNA, 55 bp, Artificial
  Synthetic oligonucleotide
agttcattgcatatcatgcagtctcacctaagagtgcttgcaatctagaagtgga

SEQ ID NO: 328008 - DNA, 58 bp, Artificial
  Synthetic oligonucleotide
agttccaaagccacgcaggactaagtaccaacaaccaccaggagtcgctagagcgatc

SEQ ID NO: 328009 - DNA, 59 bp, Artificial
  Synthetic oligonucleotide
agttccaactctaattggaatagagtgccccaaagatgagaaactgccacatcggaaga

SEQ ID NO: 328010 - DNA, 57 bp, Artificial
  Synthetic oligonucleotide
agttccaagagtaacataccgcgtgcgagttccagtgcgtactcgcgttctacgact

SEQ ID NO: 328011 - DNA, 60 bp, Artificial
  Synthetic oligonucleotide
agttccaatagttgatggtcgttgtaattatgataacagcttcatgccagagtgggtgaa

SEQ ID NO: 328012 - DNA, 55 bp, Artificial
  Synthetic oligonucleotide
agttccacaccctattgaaatgcataagatcggttatgttgtgaatggagaatgc

SEQ ID NO: 328013 - DNA, 53 bp, Artificial
  Synthetic oligonucleotide
agttccacagttgatcagaaacttatagatttgggacagcttggtatcgctac

SEQ ID NO: 328014 - DNA, 59 bp, Artificial
  Synthetic oligonucleotide
agttccaccggtctatactcaaacacgcttcggaatgctattcttatatattatgtgtg

SEQ ID NO: 328015 - DNA, 58 bp, Artificial
  Synthetic oligonucleotide
agttccagtctgtgcgaatgacgcactgggatgcgctttcacgttgcgaggtaacacc

SEQ ID NO: 328016 - DNA, 58 bp, Artificial
  Synthetic oligonucleotide
agttccagtgccggtttgaaagatgacctccttgaaaatttgcaggcataccagaagc

SEQ ID NO: 328017 - DNA, 55 bp, Artificial
  Synthetic oligonucleotide
agttccatttatgccatacaaagttaatgccatcatccctttgataacctgcgtc

SEQ ID NO: 328018 - DNA, 60 bp, Artificial
  Synthetic oligonucleotide
agttccccactggcgacagtgttctagcctgcgtggctgcctgcacacccttctggggtg

SEQ ID NO: 328019 - DNA, 59 bp, Artificial
  Synthetic oligonucleotide
agttccccggtgcgtgaatccattattgtgacagcctattgcgacgaagtacgaacatc

SEQ ID NO: 328020 - DNA, 55 bp, Artificial
  Synthetic oligonucleotide
agttcccctgagtgcggggtggtcgtctctgctcgtctagcgagcccctgcctta

SEQ ID NO: 328021 - DNA, 60 bp, Artificial
  Synthetic oligonucleotide
agttccctagcaagaagacacatagcccgagagctgcatccggagtggtataaggactga

SEQ ID NO: 328022 - DNA, 60 bp, Artificial
  Synthetic oligonucleotide
agttccctccgctggaattgaatcacttccaaacatccgttatcataatcattcaaatga

SEQ ID NO: 328023 - DNA, 54 bp, Artificial
  Synthetic oligonucleotide
agttccctggatcaaacaccgtcttaatagaacgagaaattcctcgctggaact

SEQ ID NO: 328024 - DNA, 54 bp, Artificial
  Synthetic oligonucleotide
agttccctggcacgagaacacgtagcccgaaagctgtacccggagttcttcaaa

SEQ ID NO: 328025 - DNA, 58 bp, Artificial
  Synthetic oligonucleotide
agttccgaacgaggattccgcgagtggaaggatcagcgcccgagagggagtgacggca

SEQ ID NO: 328026 - DNA, 55 bp, Artificial
  Synthetic oligonucleotide
agttccgatgaaatactttggagacaattcgttagggagtgtttattagacatgg

SEQ ID NO: 328027 - DNA, 60 bp, Artificial
  Synthetic oligonucleotide
agttccgccagttgatgcaggcacgtacgtcgggtcaagaatatattcgcaagacaagta

SEQ ID NO: 328028 - DNA, 55 bp, Artificial
  Synthetic oligonucleotide
agttccgcgcagggcttcccgtcaccggcatagctgactatgcgacgcaggttcg

SEQ ID NO: 328029 - DNA, 51 bp, Artificial
  Synthetic oligonucleotide
agttccggaatttgactccggggaacactaacacccgagtctcccggtata

SEQ ID NO: 328030 - DNA, 52 bp, Artificial
  Synthetic oligonucleotide
agttccgggacagacccccgagaatgctacacacagacttacccttttaccc

SEQ ID NO: 328031 - DNA, 57 bp, Artificial
  Synthetic oligonucleotide
agttccggtgacagtgactatacgcctatagtgcacctaaaaggtgaatctaactgt

SEQ ID NO: 328032 - DNA, 60 bp, Artificial
  Synthetic oligonucleotide
agttcctacaagaagagctcaatacattagacagcacggaagcacagcatcaagcaacac

SEQ ID NO: 328033 - DNA, 60 bp, Artificial
  Synthetic oligonucleotide
agttcctatgaaaactgatttggagctagattttgcattggcatcatcctcctcatacag

SEQ ID NO: 328034 - DNA, 50 bp, Artificial
  Synthetic oligonucleotide
agttcctattcttggggccgctgacaccgcttctctaagtggatcattac

SEQ ID NO: 328035 - DNA, 58 bp, Artificial
  Synthetic oligonucleotide
agttcctcactagaagacttgcaggtacattcacttggactctgtcagactcttcagg

SEQ ID NO: 328036 - DNA, 54 bp, Artificial
  Synthetic oligonucleotide
agttcctctcctcttcgccgctctgtgtcgtggtttgatagaggggggagtcga

SEQ ID NO: 328037 - DNA, 55 bp, Artificial
  Synthetic oligonucleotide
agttcctgcagatacaccagccacagccaacttactatgttttgtgtccgcttgc

SEQ ID NO: 328038 - DNA, 60 bp, Artificial
  Synthetic oligonucleotide
agttcctgctagcgtcaatgaacctgacatacgtgagcaaaatcggaggccccatcgccg

SEQ ID NO: 328039 - DNA, 60 bp, Artificial
  Synthetic oligonucleotide
agttccttattactacttacctgagcaagggcattatggcgatgaatagttacaatcaca

SEQ ID NO: 328040 - DNA, 60 bp, Artificial
  Synthetic oligonucleotide
agttcgaaccggggacgttgtggacacaatgctagtcaattgagtcagccaggcatatgg

SEQ ID NO: 328041 - DNA, 52 bp, Artificial
  Synthetic oligonucleotide
agttcgacggtacgtccgatctgatggacgtcgtggtttccccgaacgtagt

SEQ ID NO: 328042 - DNA, 58 bp, Artificial
  Synthetic oligonucleotide
agttcgagaccgtagaccatatggtactcctatggatttcggccaggtgttcaatatg

SEQ ID NO: 328043 - DNA, 54 bp, Artificial
  Synthetic oligonucleotide
agttcgagcatattgtgccactccgaagagtgttgactacagctacgataactc

SEQ ID NO: 328044 - DNA, 60 bp, Artificial
  Synthetic oligonucleotide
agttcgagcgtcgttagagaggatccgggacccatcagtgcaaactgctatctcagaagc

SEQ ID NO: 328045 - DNA, 56 bp, Artificial
  Synthetic oligonucleotide
agttcgatagttcactatcgccatacttgattaacgcagtgcttaacatccgcttg

SEQ ID NO: 328046 - DNA, 57 bp, Artificial
  Synthetic oligonucleotide
agttcgcaagttacgttaggttccgcgctatatcgtttgttacaacaatatgcagga

SEQ ID NO: 328047 - DNA, 60 bp, Artificial
  Synthetic oligonucleotide
agttcgcacgcttgcgatccgtcaatccaaatttctccgagctagtcaactatcggctta

SEQ ID NO: 328048 - DNA, 56 bp, Artificial
  Synthetic oligonucleotide
agttcgcctaggaaggcctacttattctgaaacaccacaaggttatgtgcgtgtaa

SEQ ID NO: 328049 - DNA, 58 bp, Artificial
  Synthetic oligonucleotide
agttcgctacaatatctcattgcctgtgaacctggagtccgtataaggtgttcgtaaa

SEQ ID NO: 328050 - DNA, 55 bp, Artificial
  Synthetic oligonucleotide
agttcgctgttatgcacgtttttcatactttcaacgtatcacatattcacgtatt

SEQ ID NO: 328051 - DNA, 55 bp, Artificial
  Synthetic oligonucleotide
agttcgcttatcatcgagctttctgatcgctatggaatgtacgacatgaacaccg

SEQ ID NO: 328052 - DNA, 58 bp, Artificial
  Synthetic oligonucleotide
agttcggcgaatgaattaattgggcattgaacaaggagtcattgtgcattttaacgat

SEQ ID NO: 328053 - DNA, 59 bp, Artificial
  Synthetic oligonucleotide
agttcggcgtgttggaatggaggatgtgcaagaactagagaaggtactcgatgaattaa

SEQ ID NO: 328054 - DNA, 53 bp, Artificial
  Synthetic oligonucleotide
agttcgggccgggttctcgggtcctcgcgtgtgacctcattggggccatcatg

SEQ ID NO: 328055 - DNA, 52 bp, Artificial
  Synthetic oligonucleotide
agttcggtgtggggtattcgttatgagtttattgtgttactttccgtactaa

SEQ ID NO: 328056 - DNA, 55 bp, Artificial
  Synthetic oligonucleotide
agttcggttggggcgttgctcgttcggcgtacggtgaccacgtgattctgtcgaa

SEQ ID NO: 328057 - DNA, 59 bp, Artificial
  Synthetic oligonucleotide
agttcgtagcccctggtggaaccatcatcctggaatcctgctacggcgcacgtatgtgg

SEQ ID NO: 328058 - DNA, 51 bp, Artificial
  Synthetic oligonucleotide
agttcgtcaaataggtgcgtttggtacaggttcggttactcggggattaat

SEQ ID NO: 328059 - DNA, 54 bp, Artificial
  Synthetic oligonucleotide
agttcgtcattttacattcgaaaatgggctaacttccttcaggaagtttcggca

SEQ ID NO: 328060 - DNA, 54 bp, Artificial
  Synthetic oligonucleotide
agttcgtgaaccaaggattaaatgtcgctcgaaacgaaagttaattatctctta

SEQ ID NO: 328061 - DNA, 60 bp, Artificial
  Synthetic oligonucleotide
agttcgtgagatctaacgaacgtggagaatctgagccacattttactgatgtggaagcga

SEQ ID NO: 328062 - DNA, 56 bp, Artificial
  Synthetic oligonucleotide
agttcgtgataggagaccttttggcactccacaggattttggtcaggtgtttaaca

SEQ ID NO: 328063 - DNA, 60 bp, Artificial
  Synthetic oligonucleotide
agttcgtgatgattagagccccctccagcaaggctgttgactcaatttcacccgcaggcc

SEQ ID NO: 328064 - DNA, 57 bp, Artificial
  Synthetic oligonucleotide
agttcgtggatccaagaaacatcagtccacgaagcgacgagtttctagtagtggtgg

SEQ ID NO: 328065 - DNA, 58 bp, Artificial
  Synthetic oligonucleotide
agttcgtggtctcaaaacatactccggactcaggaatcggagtgtgtttgtatcaatg

SEQ ID NO: 328066 - DNA, 51 bp, Artificial
  Synthetic oligonucleotide
agttcgttggaggcattagaatagctggatatcagtagatgcacaatctga

SEQ ID NO: 328067 - DNA, 55 bp, Artificial
  Synthetic oligonucleotide
agttcgtttaattgtcccagagacatcgtaatgttggactgggctctctgggccc

SEQ ID NO: 328068 - DNA, 56 bp, Artificial
  Synthetic oligonucleotide
agttctaaaagagtccgacaaattcgatgttgatgttttttcccagatgtgccaaa

SEQ ID NO: 328069 - DNA, 60 bp, Artificial
  Synthetic oligonucleotide
agttctaacttagttcggactatttgcctgctagtgggcatatctcacaatttgtgagat

SEQ ID NO: 328070 - DNA, 60 bp, Artificial
  Synthetic oligonucleotide
agttctacgagcattctagctctgataaagccttccaacctcctgaatgtccaatcgtct

SEQ ID NO: 328071 - DNA, 51 bp, Artificial
  Synthetic oligonucleotide
agttctatcacgcctaaccctctaactgaatcttcttcggaaacttcaccc

SEQ ID NO: 328072 - DNA, 60 bp, Artificial
  Synthetic oligonucleotide
agttctattctgtcatctaccattctgtcgtgctttttgtgcatgacgatgtacgtgatc

SEQ ID NO: 328073 - DNA, 54 bp, Artificial
  Synthetic oligonucleotide
agttctcgcgggcgtatggatgtccgcgcgcgcgataataacccgcgcgcgata

SEQ ID NO: 328074 - DNA, 55 bp, Artificial
  Synthetic oligonucleotide
agttctctatttcccccaacttgttctttgtaggacagcgcgaatttcagccttc

SEQ ID NO: 328075 - DNA, 58 bp, Artificial
  Synthetic oligonucleotide
agttctctcattccctagagataacttcatcaggaacgtacaggttagcccagaattc

SEQ ID NO: 328076 - DNA, 60 bp, Artificial
  Synthetic oligonucleotide
agttctctgtatggatgcatttcgtccgaatccgcattcgagtgggccgggcctatagta

SEQ ID NO: 328077 - DNA, 60 bp, Artificial
  Synthetic oligonucleotide
agttctcttagagatcatattaatgtgattgtcagccgtgatctttccttccaggatttg

SEQ ID NO: 328078 - DNA, 52 bp, Artificial
  Synthetic oligonucleotide
agttctctttctaaccggcccaccgccagaggagacaccggggccgaaacca

SEQ ID NO: 328079 - DNA, 60 bp, Artificial
  Synthetic oligonucleotide
agttctgaatccgagtgtattccatgacgtcagattccatctatcgtatccgcttattac

SEQ ID NO: 328080 - DNA, 55 bp, Artificial
  Synthetic oligonucleotide
agttctgacctggtgcgcctatgccggctgtgtacggccgtcgcattgaagtggg

SEQ ID NO: 328081 - DNA, 50 bp, Artificial
  Synthetic oligonucleotide
agttctgacgacgagccccgaaagaactgtgctcgcggcgtcccaaagag

SEQ ID NO: 328082 - DNA, 50 bp, Artificial
  Synthetic oligonucleotide
agttctgactttgtatatcgtcctagtttgtatcgcaagaaacgaaaacg

SEQ ID NO: 328083 - DNA, 52 bp, Artificial
  Synthetic oligonucleotide
agttctgggaggggttaacgagggctcccggacagctttatctgtagttact

SEQ ID NO: 328084 - DNA, 55 bp, Artificial
  Synthetic oligonucleotide
agttctgtagttgtaaatccggcttcccaagggtggagtctatcaaattggttca

SEQ ID NO: 328085 - DNA, 55 bp, Artificial
  Synthetic oligonucleotide
agttctgtcccagtgagtgttccagcgattagtgagccagtgatttctcaggtgc

SEQ ID NO: 328086 - DNA, 55 bp, Artificial
  Synthetic oligonucleotide
agttctgtcgactttagtcggtaggtatggccgccgtacgaagttgtacgaagca

SEQ ID NO: 328087 - DNA, 60 bp, Artificial
  Synthetic oligonucleotide
agttcttatcctcgtccaagaactctctatagctggcgttggggcctggattgcacagga

SEQ ID NO: 328088 - DNA, 55 bp, Artificial
  Synthetic oligonucleotide
agttcttcactgaagtgaagccacgacctccatctacaaattgctggacatgcag

SEQ ID NO: 328089 - DNA, 60 bp, Artificial
  Synthetic oligonucleotide
agttcttccaacccctcatgggtgcatatggaaagagtcgactgaatcgtatcgcatacg

SEQ ID NO: 328090 - DNA, 51 bp, Artificial
  Synthetic oligonucleotide
agttcttccagaaccaagtaagcagcttgatcaaggctcagctcataaggc

SEQ ID NO: 328091 - DNA, 58 bp, Artificial
  Synthetic oligonucleotide
agttcttcctcatagtactgctaatccctgaaccagagaagcaaagaacaccccagga

SEQ ID NO: 328092 - DNA, 56 bp, Artificial
  Synthetic oligonucleotide
agttcttcctgatgagtcccaaaaggaccctcctctcctagacgctttgtcctcgc

SEQ ID NO: 328093 - DNA, 52 bp, Artificial
  Synthetic oligonucleotide
agttcttcttaagaggaaatcagaacaggcctgaacaatggcaggatgcatt

SEQ ID NO: 328094 - DNA, 60 bp, Artificial
  Synthetic oligonucleotide
agttcttgaggtgttgaacactgcgaatttcatgtcgcagtataacccaatcacgttgca

SEQ ID NO: 328095 - DNA, 57 bp, Artificial
  Synthetic oligonucleotide
agttcttggcaaaccataagaaattttgtatgtcaaggttaggttcatggtgtcaga

SEQ ID NO: 328096 - DNA, 55 bp, Artificial
  Synthetic oligonucleotide
agttcttgtgtcctgacagaatagcattgtgggagatttgcaaggtaacctaggc

SEQ ID NO: 328097 - DNA, 53 bp, Artificial
  Synthetic oligonucleotide
agttctttccttggtaccagaatttctggtttatcgcaattttgggagcgtta

SEQ ID NO: 328098 - DNA, 57 bp, Artificial
  Synthetic oligonucleotide
agttcttttcctcgtccaagaattctttatagcttgcgtggggccctggattgcaga

SEQ ID NO: 328099 - DNA, 60 bp, Artificial
  Synthetic oligonucleotide
agttctttttgcaatccggtccccccatcatgatctgagaggagcgtcctatgacgcagc

SEQ ID NO: 328100 - DNA, 53 bp, Artificial
  Synthetic oligonucleotide
agttgaaacggctgcgtttcaaaggaactgttaagattgaacgtgtgcaagct

SEQ ID NO: 328101 - DNA, 57 bp, Artificial
  Synthetic oligonucleotide
agttgaaacttctgctggcaaccctggttctccccgtggaagccctgcatcggcacc

SEQ ID NO: 328102 - DNA, 58 bp, Artificial
  Synthetic oligonucleotide
agttgaaaggcatgtcccagcggccacaagatttacatatgattacctggaagaaatt

SEQ ID NO: 328103 - DNA, 57 bp, Artificial
  Synthetic oligonucleotide
agttgaaatgcaggtagtaagaacacccgcacgtcaagtcaattctcttcctccgga

SEQ ID NO: 328104 - DNA, 55 bp, Artificial
  Synthetic oligonucleotide
agttgaactggacctggattgttattacgtcgtggtccctcaggaatggcctctc

SEQ ID NO: 328105 - DNA, 60 bp, Artificial
  Synthetic oligonucleotide
agttgaagatccaagacttaagaatgagttcagatcaaagggtttgattatggtgcatga

SEQ ID NO: 328106 - DNA, 60 bp, Artificial
  Synthetic oligonucleotide
agttgaaggaagcgttgacgtgccctgaagcgatgaagtaccgcattaggacagtcgaca

SEQ ID NO: 328107 - DNA, 60 bp, Artificial
  Synthetic oligonucleotide
agttgaagtgtatgacacagtaggcattacacgagaatatccgcatgttcagatatcata

SEQ ID NO: 328108 - DNA, 60 bp, Artificial
  Synthetic oligonucleotide
agttgaatggaaaactgttcgcctaccactctccactctccgtgatactgaggagatagc

SEQ ID NO: 328109 - DNA, 55 bp, Artificial
  Synthetic oligonucleotide
agttgacaatgctcagtagaggttatcaggatgtgaatacagtacatgagattca

SEQ ID NO: 328110 - DNA, 60 bp, Artificial
  Synthetic oligonucleotide
agttgacagattcgagttggatagaacttgatgaaataggagaagatgttgccccaattg

SEQ ID NO: 328111 - DNA, 60 bp, Artificial
  Synthetic oligonucleotide
agttgacatcaagtatgctgagggcagagtcaaaggctatgctagatctcctcaataatc

SEQ ID NO: 328112 - DNA, 59 bp, Artificial
  Synthetic oligonucleotide
agttgacccacagcaagtagaagaggccactcaaggagagaccaactgcttgtacaccc

SEQ ID NO: 328113 - DNA, 60 bp, Artificial
  Synthetic oligonucleotide
agttgacccatgaaatacgcaagttttatgcatggatgatcgaacaggctccatatagct

SEQ ID NO: 328114 - DNA, 58 bp, Artificial
  Synthetic oligonucleotide
agttgacccgaaatacgtctcactccaactcgtgtggcactcgtgggacttcagaaga

SEQ ID NO: 328115 - DNA, 56 bp, Artificial
  Synthetic oligonucleotide
agttgaccctaagatacaacaaattgtcgagcggtactacgacaatcttacggtga

SEQ ID NO: 328116 - DNA, 60 bp, Artificial
  Synthetic oligonucleotide
agttgaccctcaattggaatttgaggatggttctcccctgtgcactctcgtgtacataca

SEQ ID NO: 328117 - DNA, 60 bp, Artificial
  Synthetic oligonucleotide
agttgacgctcgcacgcaaaccacctccacaggtgagtccgctgaccccgtgactgccac

SEQ ID NO: 328118 - DNA, 60 bp, Artificial
  Synthetic oligonucleotide
agttgacggccagacctgtgatatcatcaatggagcattggggagcccagggtgtgacca

SEQ ID NO: 328119 - DNA, 52 bp, Artificial
  Synthetic oligonucleotide
agttgactacccaattcaagagtttgaactgacgaccgatagcggtaaatct

SEQ ID NO: 328120 - DNA, 57 bp, Artificial
  Synthetic oligonucleotide
agttgactacttgtgtattggaaacctcactgcccaacgcctccgtatcgcgattgc

SEQ ID NO: 328121 - DNA, 59 bp, Artificial
  Synthetic oligonucleotide
agttgactgtgcggacgttgtcacgacggagacttccaatcaggcagggagtcgtcaac

SEQ ID NO: 328122 - DNA, 53 bp, Artificial
  Synthetic oligonucleotide
agttgagaaaacatttgtgaatccccagttccttccggaggttgtggttgaac

SEQ ID NO: 328123 - DNA, 60 bp, Artificial
  Synthetic oligonucleotide
agttgagaaagcttgacaagatcgcttcagggaaaactaggtgcatagaagcctgtgaag

SEQ ID NO: 328124 - DNA, 51 bp, Artificial
  Synthetic oligonucleotide
agttgagaacggtttcatgaaacagggccatcgtggatggctcgtcgacct

SEQ ID NO: 328125 - DNA, 59 bp, Artificial
  Synthetic oligonucleotide
agttgagcaagtataattaactgaccatatgattgtatcctcatttaatgggcccttaa

SEQ ID NO: 328126 - DNA, 57 bp, Artificial
  Synthetic oligonucleotide
agttgagcgcacgccgaatgttgctgtcgttaaattgggcgacggttacgagcaacg

SEQ ID NO: 328127 - DNA, 60 bp, Artificial
  Synthetic oligonucleotide
agttgaggcgggacaggattaacccgccatacccgccacatcgccattcaggcacatcac

SEQ ID NO: 328128 - DNA, 53 bp, Artificial
  Synthetic oligonucleotide
agttgaggtggttatatcagatttgcggagttatggttttgaaacgtgcaact

SEQ ID NO: 328129 - DNA, 60 bp, Artificial
  Synthetic oligonucleotide
agttgagtccgcagttctgagaggattcctcattctgggcaaagaagacaggagatatgg

SEQ ID NO: 328130 - DNA, 53 bp, Artificial
  Synthetic oligonucleotide
agttgagtgccatactccaggcatctacaaacacgggtctaacggccacaata

SEQ ID NO: 328131 - DNA, 60 bp, Artificial
  Synthetic oligonucleotide
agttgagttgaatgcccctaattaccactatgaggagtgttcctgttatcctgatgctag

SEQ ID NO: 328132 - DNA, 56 bp, Artificial
  Synthetic oligonucleotide
agttgataagccccaattaggtggtttacacactgttataggtatgtacagactct

SEQ ID NO: 328133 - DNA, 57 bp, Artificial
  Synthetic oligonucleotide
agttgataccgcgcacacgagaacgcgagtgagccacgcgttatttaactgtacggt

SEQ ID NO: 328134 - DNA, 55 bp, Artificial
  Synthetic oligonucleotide
agttgatactgatatcaaaaccatacccgatcccagcgttgcggaggccttcgtg

SEQ ID NO: 328135 - DNA, 53 bp, Artificial
  Synthetic oligonucleotide
agttgatcatgaataatgctgacataattgagaagttgttatcaggtaaactt

SEQ ID NO: 328136 - DNA, 55 bp, Artificial
  Synthetic oligonucleotide
agttgatccacgtgaagttacgccctccgaggaagaatgttgagtacttcgaacc

SEQ ID NO: 328137 - DNA, 50 bp, Artificial
  Synthetic oligonucleotide
agttgatcccaacctaatcgggacggcagagtgtgttttatttcaatttc

SEQ ID NO: 328138 - DNA, 57 bp, Artificial
  Synthetic oligonucleotide
agttgatcccgctgctattgttgtggctatgctctgtggacagacggagacgaacct

SEQ ID NO: 328139 - DNA, 57 bp, Artificial
  Synthetic oligonucleotide
agttgatcctgccagcggtgggtcgctactgtttcgcgaaccagtcgttttgacagt

SEQ ID NO: 328140 - DNA, 58 bp, Artificial
  Synthetic oligonucleotide
agttgatgcatttgccttaccatgttaaacgaggagcgtctcacgtcgacgtttacaa

SEQ ID NO: 328141 - DNA, 59 bp, Artificial
  Synthetic oligonucleotide
agttgatgctgttgcaccagaggcaccttctgtggtacctttggaagaagtaaccatta

SEQ ID NO: 328142 - DNA, 60 bp, Artificial
  Synthetic oligonucleotide
agttgatggagctggctctaatcattaaggaacaaggttttgcgatgaatccagggcaag

SEQ ID NO: 328143 - DNA, 55 bp, Artificial
  Synthetic oligonucleotide
agttgatggatatataatacgaacacccacacggcagatcaactctcttcccgcg

SEQ ID NO: 328144 - DNA, 56 bp, Artificial
  Synthetic oligonucleotide
agttgatggtgggaactacaggggagggtatgccccaagctattacccaagtgtga

SEQ ID NO: 328145 - DNA, 60 bp, Artificial
  Synthetic oligonucleotide
agttgattctatcatgggagccaggtaagaccaggcctccattgaatagaaattatgtct

SEQ ID NO: 328146 - DNA, 55 bp, Artificial
  Synthetic oligonucleotide
agttgatttgtataacagcttgatggccagtgccctttacagtaccaagtgcatg

SEQ ID NO: 328147 - DNA, 51 bp, Artificial
  Synthetic oligonucleotide
agttgcaacacagttggacgccctcaacgcgaatatggccgcgtactacgc

SEQ ID NO: 328148 - DNA, 60 bp, Artificial
  Synthetic oligonucleotide
agttgcaactaatatcattgaaaatggagtcacaattgatatcgatgctgttgtggattt

SEQ ID NO: 328149 - DNA, 60 bp, Artificial
  Synthetic oligonucleotide
agttgcaatgaaacagtcatcagggaatataatgagacagtaaggattgagaagataata

SEQ ID NO: 328150 - DNA, 60 bp, Artificial
  Synthetic oligonucleotide
agttgcaatgtatagcgggaccaagccctgtaaacatgtgacccccatgcgaggcttgca

SEQ ID NO: 328151 - DNA, 58 bp, Artificial
  Synthetic oligonucleotide
agttgcacccgctgatccagcgcctgcctatggggtcgctgaagctggaccactatgc

SEQ ID NO: 328152 - DNA, 59 bp, Artificial
  Synthetic oligonucleotide
agttgcagaaccgttcttttcaatttcaagaacacgtgtaagcagattgtatggattgc

SEQ ID NO: 328153 - DNA, 55 bp, Artificial
  Synthetic oligonucleotide
agttgcagatgatgcatctaatgtgcttggaccaaattgttatgctacaacggct

SEQ ID NO: 328154 - DNA, 60 bp, Artificial
  Synthetic oligonucleotide
agttgcagccgcctcgatcgtgtcccaggagatgattcgagcggtggtgaatgctttcga

SEQ ID NO: 328155 - DNA, 60 bp, Artificial
  Synthetic oligonucleotide
agttgcagctgcaccacatctagatcgtgttacaggctataatcaagcagatagtgataa

SEQ ID NO: 328156 - DNA, 59 bp, Artificial
  Synthetic oligonucleotide
agttgcagggaccagacttgtagagagaagcgggagtttctctctctagaatggaatcg

SEQ ID NO: 328157 - DNA, 58 bp, Artificial
  Synthetic oligonucleotide
agttgcaggggattagcggcctactggcggtcgatgtttcacctatcggcgaaatgtc

SEQ ID NO: 328158 - DNA, 55 bp, Artificial
  Synthetic oligonucleotide
agttgcagtagtgcagtagtgtggggcatcgtgagcgattgtattctgtggcccg

SEQ ID NO: 328159 - DNA, 55 bp, Artificial
  Synthetic oligonucleotide
agttgcagtgtgtaggtgcgtgcgagcgtgttgcttttgtctctaaggacatgag

SEQ ID NO: 328160 - DNA, 54 bp, Artificial
  Synthetic oligonucleotide
agttgcatacaagaaagttaacaaaattcgaatggaccctaataggaggtgccc

SEQ ID NO: 328161 - DNA, 59 bp, Artificial
  Synthetic oligonucleotide
agttgcatattgtgaattacgctattaaaactggtaaatggatcacgttattctgcgat

SEQ ID NO: 328162 - DNA, 60 bp, Artificial
  Synthetic oligonucleotide
agttgcatgaacatgtcttctatcattagctgtgactgtattccccaaagactacctaac

SEQ ID NO: 328163 - DNA, 59 bp, Artificial
  Synthetic oligonucleotide
agttgcatgggtctcatatacaacaggatggggacggtgaccacagaggcggcttttgg

SEQ ID NO: 328164 - DNA, 55 bp, Artificial
  Synthetic oligonucleotide
agttgcatggtcccgctacaattatggtgatgccatttgacagactgagacgtct

SEQ ID NO: 328165 - DNA, 57 bp, Artificial
  Synthetic oligonucleotide
agttgccaaatacgtttgatcaataatccctctccgtggtgtgtttgtgagttctta

SEQ ID NO: 328166 - DNA, 60 bp, Artificial
  Synthetic oligonucleotide
agttgccatttgacactggagatgtgaatcagtaacgaaagtgagtggggccagacttcg

SEQ ID NO: 328167 - DNA, 57 bp, Artificial
  Synthetic oligonucleotide
agttgcccccgcaggaactacgtgggcgtgtaacaccggactcactccatgcttatc

SEQ ID NO: 328168 - DNA, 56 bp, Artificial
  Synthetic oligonucleotide
agttgccctccttagtaatcagcgccgtagagcgagccccacgaacgctttccaac

SEQ ID NO: 328169 - DNA, 57 bp, Artificial
  Synthetic oligonucleotide
agttgcgaaaccaaccacaagaactatggcaatgttggggacccatcttgtctggga

SEQ ID NO: 328170 - DNA, 50 bp, Artificial
  Synthetic oligonucleotide
agttgcggtggcaatacaataaatttgctgtaattacacatggtaaaggt

SEQ ID NO: 328171 - DNA, 56 bp, Artificial
  Synthetic oligonucleotide
agttgcgttaaaggggacctggttgcggtattcaattataatgtggtcgatcttca

SEQ ID NO: 328172 - DNA, 55 bp, Artificial
  Synthetic oligonucleotide
agttgcgttggtgttttccggtgcttccaagtcctatctggagtctatcggcgtc

SEQ ID NO: 328173 - DNA, 59 bp, Artificial
  Synthetic oligonucleotide
agttgctcaaacctatacaactgtactttgtcccgagcaaatataatcctgctgacggc

SEQ ID NO: 328174 - DNA, 60 bp, Artificial
  Synthetic oligonucleotide
agttgctccattgatcgagtctgtttacgcgtcggagttatcagtaatgaaagtagatat

SEQ ID NO: 328175 - DNA, 56 bp, Artificial
  Synthetic oligonucleotide
agttgctctatttaaaggacgttgttgtcattttggagtagtatccgatatcttaa

SEQ ID NO: 328176 - DNA, 60 bp, Artificial
  Synthetic oligonucleotide
agttgctgcaatttgatggcaatgagatagctctgtacatgacaagcactttgcccaaga

SEQ ID NO: 328177 - DNA, 59 bp, Artificial
  Synthetic oligonucleotide
agttgctggttctttggaaaagcaaccagaacgtgagctcagattgaattactgttcca

SEQ ID NO: 328178 - DNA, 54 bp, Artificial
  Synthetic oligonucleotide
agttgcttaagtacaataaaattttgaccagacttggcccttattcagttcaag

SEQ ID NO: 328179 - DNA, 58 bp, Artificial
  Synthetic oligonucleotide
agttgcttaagttagatagtagatttgagtgcattacccgcggtcggccagacatccc

SEQ ID NO: 328180 - DNA, 60 bp, Artificial
  Synthetic oligonucleotide
agttgcttcctcccagaaccgtaatggcacacagaagatggattatgtcaactccattga

SEQ ID NO: 328181 - DNA, 60 bp, Artificial
  Synthetic oligonucleotide
agttgcttgtgcttgcaacgcacgattcgtgcaaggggtggtactgagcaaccaggcagg

SEQ ID NO: 328182 - DNA, 55 bp, Artificial
  Synthetic oligonucleotide
agttggaaacgccacactgttctgtgcacaagactctagcaccgtgaatgtcgac

SEQ ID NO: 328183 - DNA, 60 bp, Artificial
  Synthetic oligonucleotide
agttggaacaatagcaatggagctaatcagaatgatcaaacgtgggatcaatgatcgaaa

SEQ ID NO: 328184 - DNA, 60 bp, Artificial
  Synthetic oligonucleotide
agttggaagagctggagcagtttcatttccagtgattgcaagacacacccttcttgcacg

SEQ ID NO: 328185 - DNA, 60 bp, Artificial
  Synthetic oligonucleotide
agttggaatgtactgcatggtggaggccatggtgtctagggcccgaattgacgcacgaat

SEQ ID NO: 328186 - DNA, 60 bp, Artificial
  Synthetic oligonucleotide
agttggaattctgtcctgtcagacgtggcatatgccagcgcacttgaattatcagccatg

SEQ ID NO: 328187 - DNA, 59 bp, Artificial
  Synthetic oligonucleotide
agttggaatttctagcatggtggaggccatggtgtctagggcccgaatcgacgcacgga

SEQ ID NO: 328188 - DNA, 60 bp, Artificial
  Synthetic oligonucleotide
agttggacatgccttaaatattgatcactttgcagctagtgtgttaaacattaacctgcg

SEQ ID NO: 328189 - DNA, 50 bp, Artificial
  Synthetic oligonucleotide
agttggacgctatggccaggaattgtcccgcccataataccgtgaacact

SEQ ID NO: 328190 - DNA, 60 bp, Artificial
  Synthetic oligonucleotide
agttggacgtagcaactcagcaccaattgaacaggctaggatcagctatgtataaagcag

SEQ ID NO: 328191 - DNA, 59 bp, Artificial
  Synthetic oligonucleotide
agttggaggcaatgaaaagaaggccaaactggcaaatgttgtgagaaaaatgatgacta

SEQ ID NO: 328192 - DNA, 50 bp, Artificial
  Synthetic oligonucleotide
agttggagtttttacggtttgtaattgggaaaggtgcctctctttggaaa

SEQ ID NO: 328193 - DNA, 58 bp, Artificial
  Synthetic oligonucleotide
agttggataagttggttgccagggaagaatcgttgcgttcgcagattcgcggtctgaa

SEQ ID NO: 328194 - DNA, 60 bp, Artificial
  Synthetic oligonucleotide
agttggatccagaatgagttcaacaaggcatgcgagctgaccgattcaatctggatagag

SEQ ID NO: 328195 - DNA, 60 bp, Artificial
  Synthetic oligonucleotide
agttggcaagcagtctgagcttcggggagaccaagttaagctgggtcaggctattatcgc

SEQ ID NO: 328196 - DNA, 60 bp, Artificial
  Synthetic oligonucleotide
agttggcaattgggtcactcattgtgccgttgaatttcgagcgtgctcgaatggcattac

SEQ ID NO: 328197 - DNA, 55 bp, Artificial
  Synthetic oligonucleotide
agttggcatacattggaggtgataacacccgggttaaatacaagcatacacatcc

SEQ ID NO: 328198 - DNA, 52 bp, Artificial
  Synthetic oligonucleotide
agttggcccagtagcttcgtaactgggccttatatgggtttcaattaaacgt

SEQ ID NO: 328199 - DNA, 58 bp, Artificial
  Synthetic oligonucleotide
agttggccgaccgaccacgaggcacaaattcgatgggaagccatcgttggcatcgccc

SEQ ID NO: 328200 - DNA, 56 bp, Artificial
  Synthetic oligonucleotide
agttggccggcaagctaacggtgactgaaaattggacgcggaactacacgcttggc

SEQ ID NO: 328201 - DNA, 55 bp, Artificial
  Synthetic oligonucleotide
agttggcctctatcatcaccacccacagtgtacaacaccaaaatagaatgcatcg

SEQ ID NO: 328202 - DNA, 53 bp, Artificial
  Synthetic oligonucleotide
agttggcggaccgggggccgtatccttggagcggttatctgaacgacgagatt

SEQ ID NO: 328203 - DNA, 60 bp, Artificial
  Synthetic oligonucleotide
agttggcggaggcaactggagattcagagctcggcagaggtagtgtggatgacagacggg

SEQ ID NO: 328204 - DNA, 57 bp, Artificial
  Synthetic oligonucleotide
agttggcggagggacaacagatgtggaatgtcttctacggaagaccacattacttcg

SEQ ID NO: 328205 - DNA, 60 bp, Artificial
  Synthetic oligonucleotide
agttggcggctcagaagtactagatattacagcggatccaactactgcaccacagactga

SEQ ID NO: 328206 - DNA, 60 bp, Artificial
  Synthetic oligonucleotide
agttggcgtcagaacatcacatgtctagaccgcaattgacttcacgccgagtgcctggaa

SEQ ID NO: 328207 - DNA, 51 bp, Artificial
  Synthetic oligonucleotide
agttggctcgggtggtgatggatgacctcctggctccctcattgctggacg

SEQ ID NO: 328208 - DNA, 57 bp, Artificial
  Synthetic oligonucleotide
agttgggaccacacccacagtggtgggaaactattatgcaaacactcaaaagatcaa

SEQ ID NO: 328209 - DNA, 57 bp, Artificial
  Synthetic oligonucleotide
agttgggatggtgataattggaatggtactaactgggctaacaatactgatggggaa

SEQ ID NO: 328210 - DNA, 55 bp, Artificial
  Synthetic oligonucleotide
agttgggatgtatcgcctgttgtggccggctcgtggcgccaaggttggagtaggt

SEQ ID NO: 328211 - DNA, 60 bp, Artificial
  Synthetic oligonucleotide
agttgggcaatgcggcgggtgctgtagttgacctacgaggagagctgaactcattaactg

SEQ ID NO: 328212 - DNA, 55 bp, Artificial
  Synthetic oligonucleotide
agttgggccggtacttaaagaagtatgaacaccatgcttacaaagccttagacaa

SEQ ID NO: 328213 - DNA, 60 bp, Artificial
  Synthetic oligonucleotide
agttgggctaacgctacgaattgaatcagcagtttgtgaatctgtgcttgcggacgcttc

SEQ ID NO: 328214 - DNA, 60 bp, Artificial
  Synthetic oligonucleotide
agttgggcttacaatgcgtattgaatctgcagtttgtgaatctgtgcttgcggacgcttc

SEQ ID NO: 328215 - DNA, 60 bp, Artificial
  Synthetic oligonucleotide
agttggggaatgtatgtcaatagggtaaatgcctcagggtcacatgtagccatggtcacc

SEQ ID NO: 328216 - DNA, 59 bp, Artificial
  Synthetic oligonucleotide
agttgggtaagagaccatgtccgctcaattgtcgagggtgcgtgggaagtgcgcgatgt

SEQ ID NO: 328217 - DNA, 59 bp, Artificial
  Synthetic oligonucleotide
agttgggtatttgtgtgcaggtattcccagtgacactccaagaggagaagataatcagt

SEQ ID NO: 328218 - DNA, 55 bp, Artificial
  Synthetic oligonucleotide
agttgggtcctagtgctctcaaacatcctgtgcgcggaagacaagtctctcgttc

SEQ ID NO: 328219 - DNA, 57 bp, Artificial
  Synthetic oligonucleotide
agttgggtgagctttcttccgtcgataacaccgaatgcggtgctgttttggatggga

SEQ ID NO: 328220 - DNA, 57 bp, Artificial
  Synthetic oligonucleotide
agttggtagaatctacgtattcacctgatacactcgggtacgatcttatccgagatt

SEQ ID NO: 328221 - DNA, 57 bp, Artificial
  Synthetic oligonucleotide
agttggtcactttctgacccaaagggtaatgatatgccaggtggttactgtcttgaa

SEQ ID NO: 328222 - DNA, 58 bp, Artificial
  Synthetic oligonucleotide
agttggtccgcaaaacaagattcctcccagtggctggtgggacaagcagtgtgtacat

SEQ ID NO: 328223 - DNA, 54 bp, Artificial
  Synthetic oligonucleotide
agttggtccgcagatgtagagggagttccttcggtgttggagttgttcgggttc

SEQ ID NO: 328224 - DNA, 52 bp, Artificial
  Synthetic oligonucleotide
agttggtctataaaaacagaggcttttataaacattatggggttagatttgg

SEQ ID NO: 328225 - DNA, 55 bp, Artificial
  Synthetic oligonucleotide
agttggtgaaccaggcggtaagggtcgatcctcccagctcgccgatgcgacatcc

SEQ ID NO: 328226 - DNA, 55 bp, Artificial
  Synthetic oligonucleotide
agttggtgggagctaaagtacaagtagtgtttgctagtgggttgttttgagcaca

SEQ ID NO: 328227 - DNA, 55 bp, Artificial
  Synthetic oligonucleotide
agttggtgtggatggcatgccattccgctgcatttgaggatttgagagtgtcaag

SEQ ID NO: 328228 - DNA, 60 bp, Artificial
  Synthetic oligonucleotide
agttggttatcgtgtttacagcggatactctcagattgaagggtgtgcatgcgacactag

SEQ ID NO: 328229 - DNA, 52 bp, Artificial
  Synthetic oligonucleotide
agttggttcgaccatgcgataaagtgtttgtaacattgtggtcatatcacct

SEQ ID NO: 328230 - DNA, 55 bp, Artificial
  Synthetic oligonucleotide
agttggttctgggatggcgacggctatagcaacaggcagagcaatagagggggcg

SEQ ID NO: 328231 - DNA, 54 bp, Artificial
  Synthetic oligonucleotide
agttggttgacgatagtgtctcataaccacagctacatgaataaaggattccgc

SEQ ID NO: 328232 - DNA, 59 bp, Artificial
  Synthetic oligonucleotide
agttggttgactattggaacttctggcccagacaatggggctgtggctgtattgaaata

SEQ ID NO: 328233 - DNA, 60 bp, Artificial
  Synthetic oligonucleotide
agttggttgagactgactacagcaaattcgatggcacattcttgcgctttatgcgtgagt

SEQ ID NO: 328234 - DNA, 53 bp, Artificial
  Synthetic oligonucleotide
agttgtaaagtaaaggccgatattgcagtgtaccaggatgtgtacgcagtcga

SEQ ID NO: 328235 - DNA, 56 bp, Artificial
  Synthetic oligonucleotide
agttgtaacaaacctgttgaggactcagtccaacttccttatctacgtaatcagac

SEQ ID NO: 328236 - DNA, 56 bp, Artificial
  Synthetic oligonucleotide
agttgtaatttctcatagaaattcaaaattcaagttgaaatccaaaagcggccatc

SEQ ID NO: 328237 - DNA, 59 bp, Artificial
  Synthetic oligonucleotide
agttgtacaaaaagtgctccgcgatgatagacgcttagattatgtactcttttgttcta

SEQ ID NO: 328238 - DNA, 57 bp, Artificial
  Synthetic oligonucleotide
agttgtacagaggattgccgatgctcatgttaaatgcgttcgcacaatcatgcgaac

SEQ ID NO: 328239 - DNA, 60 bp, Artificial
  Synthetic oligonucleotide
agttgtacttattatttgcagagcgtttgcctgtctctgatgccgcattccgtccgtcgg

SEQ ID NO: 328240 - DNA, 57 bp, Artificial
  Synthetic oligonucleotide
agttgtacttcagcgttatttagatgaaggaaatacgatcgaatccgctaacatact

SEQ ID NO: 328241 - DNA, 54 bp, Artificial
  Synthetic oligonucleotide
agttgtagctgcaacctcagctcttgagaatatgggaatagaatatgattatca

SEQ ID NO: 328242 - DNA, 60 bp, Artificial
  Synthetic oligonucleotide
agttgtagggtttttccttctcaacgggatgcttgagcaggctgcagacttgcaactatg

SEQ ID NO: 328243 - DNA, 60 bp, Artificial
  Synthetic oligonucleotide
agttgtagttgatgtggactatgatgccttccactggagtatagatgtaaattctgaatt

SEQ ID NO: 328244 - DNA, 50 bp, Artificial
  Synthetic oligonucleotide
agttgtatgcgcgcgatggggagcaacgctaccgagctagaagccctaga

SEQ ID NO: 328245 - DNA, 60 bp, Artificial
  Synthetic oligonucleotide
agttgtatgggcctcatttacaacagaatggggactgtcaccactgaggtggcatttggc

SEQ ID NO: 328246 - DNA, 59 bp, Artificial
  Synthetic oligonucleotide
agttgtatggtatgataaacgttgatttcctcagatatgcctcctttgttgccgtcacc

SEQ ID NO: 328247 - DNA, 57 bp, Artificial
  Synthetic oligonucleotide
agttgtatggttgttctgtattttcctctgatttcgaatcgaaactgagggatatac

SEQ ID NO: 328248 - DNA, 59 bp, Artificial
  Synthetic oligonucleotide
agttgtatttaagagatatctcagatacgacgggacggaaacttcattgcacagaactc

SEQ ID NO: 328249 - DNA, 50 bp, Artificial
  Synthetic oligonucleotide
agttgtcaaccaagcagatatggttggccgcgaatttagtaactggctgc

SEQ ID NO: 328250 - DNA, 60 bp, Artificial
  Synthetic oligonucleotide
agttgtcaatcgaattcctcaaatgagtaagaccttcggattcataacgcattcttgtga

SEQ ID NO: 328251 - DNA, 52 bp, Artificial
  Synthetic oligonucleotide
agttgtcactgcttatgaagactgttcagggctggtatcgtttactgggttt

SEQ ID NO: 328252 - DNA, 55 bp, Artificial
  Synthetic oligonucleotide
agttgtcatcatgggcgcacaagtatctagacaaaatgttggtacacactcaact

SEQ ID NO: 328253 - DNA, 60 bp, Artificial
  Synthetic oligonucleotide
agttgtcatgatgggaaagcatggttgcatgtctgtgtcactggggatgatagaaatgcg

SEQ ID NO: 328254 - DNA, 54 bp, Artificial
  Synthetic oligonucleotide
agttgtccaacaacttgtccctcaaagggaaaatcacagtgttcccattagacc

SEQ ID NO: 328255 - DNA, 58 bp, Artificial
  Synthetic oligonucleotide
agttgtcctcttggcgattctgtgtcgaaccttgataggaacctgagtagagtggggc

SEQ ID NO: 328256 - DNA, 60 bp, Artificial
  Synthetic oligonucleotide
agttgtcgacgtgagacacgatacgaaatatggctatggcagggctttatacggctatct

SEQ ID NO: 328257 - DNA, 55 bp, Artificial
  Synthetic oligonucleotide
agttgtcgaggccacgcttagctcacttaggcaaatcttagctggcaacacgcag

SEQ ID NO: 328258 - DNA, 56 bp, Artificial
  Synthetic oligonucleotide
agttgtcgattaactactacgaaacacccgagcccacctgcatcgataattgggaa

SEQ ID NO: 328259 - DNA, 52 bp, Artificial
  Synthetic oligonucleotide
agttgtcgggcatattcaatgtacaggtggtagtcacttgtaccactgcagg

SEQ ID NO: 328260 - DNA, 55 bp, Artificial
  Synthetic oligonucleotide
agttgtcggtaaaggtgggcattctgggtccttgttcaagtgctgccatgatact

SEQ ID NO: 328261 - DNA, 58 bp, Artificial
  Synthetic oligonucleotide
agttgtctaaccagggtgctcaaacgtcgtatgtgaactttccatcgctcggagttga

SEQ ID NO: 328262 - DNA, 58 bp, Artificial
  Synthetic oligonucleotide
agttgtctcaggtggttaatggagtgttcgtgtttagcgtaatcatggacacaaagcc

SEQ ID NO: 328263 - DNA, 55 bp, Artificial
  Synthetic oligonucleotide
agttgtctcgagctgccaggaacaggttctcgtgcttcatgaactcagtcttcca

SEQ ID NO: 328264 - DNA, 55 bp, Artificial
  Synthetic oligonucleotide
agttgtctgagtcttacgaaacagttgacactcttcgtggacttcgtagtgcgga

SEQ ID NO: 328265 - DNA, 59 bp, Artificial
  Synthetic oligonucleotide
agttgtgaacgcctctttcttgggaggatgggagtctggaatggctcactaaaggcaga

SEQ ID NO: 328266 - DNA, 58 bp, Artificial
  Synthetic oligonucleotide
agttgtgaagggctgcatacaacgtgtgcgttcagtccgggtaccccctctctatgag

SEQ ID NO: 328267 - DNA, 58 bp, Artificial
  Synthetic oligonucleotide
agttgtgacacagggtcctgaggaagagtttggtcgctccctgatcaaacataacact

SEQ ID NO: 328268 - DNA, 59 bp, Artificial
  Synthetic oligonucleotide
agttgtgatagcacactacggctatgcattaatagcactgcgacggaccttcgtactct

SEQ ID NO: 328269 - DNA, 50 bp, Artificial
  Synthetic oligonucleotide
agttgtgcaggacttaatcatagcgggtgccgttgctattggtggaatag

SEQ ID NO: 328270 - DNA, 53 bp, Artificial
  Synthetic oligonucleotide
agttgtgcattcgctgttgtaagtgccacaagccattgtcgcctatagaaaag

SEQ ID NO: 328271 - DNA, 55 bp, Artificial
  Synthetic oligonucleotide
agttgtgcattgttcctttgaccccggaggttctttcccacctacacactgtcaa

SEQ ID NO: 328272 - DNA, 57 bp, Artificial
  Synthetic oligonucleotide
agttgtgcccgaaaatggtgtgggtgtaccttatagtcttgaagagacgcgcgaaca

SEQ ID NO: 328273 - DNA, 54 bp, Artificial
  Synthetic oligonucleotide
agttgtgcgaagagggttctcatcggctgtggccgtcactagggcgaccgtggc

SEQ ID NO: 328274 - DNA, 55 bp, Artificial
  Synthetic oligonucleotide
agttgtggaaacctcagatgcgcaaagttaagatccgattgcactgccataccac

SEQ ID NO: 328275 - DNA, 54 bp, Artificial
  Synthetic oligonucleotide
agttgtggaagactctacaaggaattgatgacgttcgatgatgttgctatacgg

SEQ ID NO: 328276 - DNA, 57 bp, Artificial
  Synthetic oligonucleotide
agttgtggaggggattgctttcacagtaggggtacgatagtcagttccctgccattc

SEQ ID NO: 328277 - DNA, 57 bp, Artificial
  Synthetic oligonucleotide
agttgtggatctaccgtctagccggcgcgggtaacggaacatcgaagtcgatcgctg

SEQ ID NO: 328278 - DNA, 60 bp, Artificial
  Synthetic oligonucleotide
agttgtgggcaaaggtgggcattcaggctcattattcaagtgctgccatgatactgactg

SEQ ID NO: 328279 - DNA, 57 bp, Artificial
  Synthetic oligonucleotide
agttgtgggcctatataacgttatgagatttcattttatgctttaattcgaaatgcc

SEQ ID NO: 328280 - DNA, 60 bp, Artificial
  Synthetic oligonucleotide
agttgtggttaaatatccgatcagtttcattggatctctcacgcctatacattcacttgc

SEQ ID NO: 328281 - DNA, 53 bp, Artificial
  Synthetic oligonucleotide
agttgtggttgaatcggatctggacgtggtatatacgcgtcctggtgtatagc

SEQ ID NO: 328282 - DNA, 60 bp, Artificial
  Synthetic oligonucleotide
agttgtgtggttatacctctgaacagagctattagagctagatctcaagcattcattgag

SEQ ID NO: 328283 - DNA, 55 bp, Artificial
  Synthetic oligonucleotide
agttgtgtttatatggttattgtttatttacgtggttcattcgtgttcatatgtt

SEQ ID NO: 328284 - DNA, 55 bp, Artificial
  Synthetic oligonucleotide
agttgttaaggttactaacaaatcatactactcaaacagatgtaaatttcgttca

SEQ ID NO: 328285 - DNA, 53 bp, Artificial
  Synthetic oligonucleotide
agttgttagagagttcgcagggacttgtcttgcaagcatcaatggtgctgttg

SEQ ID NO: 328286 - DNA, 55 bp, Artificial
  Synthetic oligonucleotide
agttgttagtctacgtggaccgacaggaacagtttcgaatcggaagcttgcttaa

SEQ ID NO: 328287 - DNA, 56 bp, Artificial
  Synthetic oligonucleotide
agttgttagtctgtgtggaccgacaaggacagttctaaatcggaagcttgcttaac

SEQ ID NO: 328288 - DNA, 50 bp, Artificial
  Synthetic oligonucleotide
agttgttctcggcagagtagcggcggttacacagctcagaacccatcaaa

SEQ ID NO: 328289 - DNA, 53 bp, Artificial
  Synthetic oligonucleotide
agttgttctggtcacgatcggagcattcctactaggtattacgatctcatggt

SEQ ID NO: 328290 - DNA, 56 bp, Artificial
  Synthetic oligonucleotide
agttgttgagataccagctacaaaatctaaaaggggatggaattatactgctaaaa

SEQ ID NO: 328291 - DNA, 55 bp, Artificial
  Synthetic oligonucleotide
agttgttggacacactggttccgggaagtccacacgactaccaactgcatacgcc

SEQ ID NO: 328292 - DNA, 60 bp, Artificial
  Synthetic oligonucleotide
agttgttggatacggggtgtggcctcattacttgactccacaagatgctacagcaattga

SEQ ID NO: 328293 - DNA, 51 bp, Artificial
  Synthetic oligonucleotide
agttgttgttcctgaacaccagctagcatcacacacagaagggaatgtgtc

SEQ ID NO: 328294 - DNA, 55 bp, Artificial
  Synthetic oligonucleotide
agttgtttctagaaggaatggagaacaagttgacagttgatgagtccagaaccag

SEQ ID NO: 328295 - DNA, 52 bp, Artificial
  Synthetic oligonucleotide
agtttaaaaacccagaagatttgctcgaatttggtggactagttacggtcat

SEQ ID NO: 328296 - DNA, 50 bp, Artificial
  Synthetic oligonucleotide
agtttaaaacgcacgagacacaatggacgattactacaccaacagatcaa

SEQ ID NO: 328297 - DNA, 50 bp, Artificial
  Synthetic oligonucleotide
agtttaaaccccttaggattgacgtgagcgaggagacccccgcacccccc

SEQ ID NO: 328298 - DNA, 59 bp, Artificial
  Synthetic oligonucleotide
agtttaaataaggcgttagatcgccttgatatttgcactacagcgtatgcctccataaa

SEQ ID NO: 328299 - DNA, 56 bp, Artificial
  Synthetic oligonucleotide
agtttaacctctgagcttacttctgctttgttaactttaaatggcttatcctcatc

SEQ ID NO: 328300 - DNA, 59 bp, Artificial
  Synthetic oligonucleotide
agtttaagtgtctgtgtttacaataaatgcaccatgccaccattaaagcgtgtgaagcg

SEQ ID NO: 328301 - DNA, 53 bp, Artificial
  Synthetic oligonucleotide
agtttaatgccaccgaatctggtggccaatatgcttgtaaggaacaagccatg

SEQ ID NO: 328302 - DNA, 58 bp, Artificial
  Synthetic oligonucleotide
agtttaattccagtgcatttatcttacgtcaaaatggctcttttcaattctcgtgaga

SEQ ID NO: 328303 - DNA, 56 bp, Artificial
  Synthetic oligonucleotide
agtttaattgggctcaagtagcaattataatgaagcccacgaaattggtggaccat

SEQ ID NO: 328304 - DNA, 60 bp, Artificial
  Synthetic oligonucleotide
agtttacactagacatatgcttgtcaaaggtggtgtagacggagacagcttaccccatga

SEQ ID NO: 328305 - DNA, 57 bp, Artificial
  Synthetic oligonucleotide
agtttacagacgccgggagacaggtcacctcatggataactggacactattggggtc

SEQ ID NO: 328306 - DNA, 60 bp, Artificial
  Synthetic oligonucleotide
agtttaccaacggtgcatgacagagacatctcaggaactttaggagagattacaggatca

SEQ ID NO: 328307 - DNA, 56 bp, Artificial
  Synthetic oligonucleotide
agtttacccagacttgggcgtgcgggtctgcgagaaaatggccttatacgacgtga

SEQ ID NO: 328308 - DNA, 52 bp, Artificial
  Synthetic oligonucleotide
agtttacccccatcaaaagcactattgatgcggaggtacaggctgtaattaa

SEQ ID NO: 328309 - DNA, 54 bp, Artificial
  Synthetic oligonucleotide
agtttacctggagtatgggcggtgtggaaaacaagaaggatcaagaacaaggcg

SEQ ID NO: 328310 - DNA, 60 bp, Artificial
  Synthetic oligonucleotide
agtttacctttgccacgtgtagcaactgatgctaccctaacacatggcgcaatatcccat

SEQ ID NO: 328311 - DNA, 55 bp, Artificial
  Synthetic oligonucleotide
agtttactacccagtcttagaccctattagtcttaaggcaatatggatagaaggc

SEQ ID NO: 328312 - DNA, 54 bp, Artificial
  Synthetic oligonucleotide
agtttactagagtcgatacttttactcttttccgtggtgtgtacaagacaagtg

SEQ ID NO: 328313 - DNA, 55 bp, Artificial
  Synthetic oligonucleotide
agtttacttccaggtccatgtagaatcattatagttcctttgtaggtactggcag

SEQ ID NO: 328314 - DNA, 60 bp, Artificial
  Synthetic oligonucleotide
agtttagaactaaaatccatgatagcactctgaactgcttgaagactaagattgctagcg

SEQ ID NO: 328315 - DNA, 58 bp, Artificial
  Synthetic oligonucleotide
agtttagaatcctcagaggtcagttaattcaaagtcagggaatgaaacccatatcagc

SEQ ID NO: 328316 - DNA, 60 bp, Artificial
  Synthetic oligonucleotide
agtttagacaagaccatgactcagtatccgtcattacaagcacatatattcaatgtctac

SEQ ID NO: 328317 - DNA, 53 bp, Artificial
  Synthetic oligonucleotide
agtttagaggcaacattaaactttctcctaaccaaccgtcgtcaacaagtgcc

SEQ ID NO: 328318 - DNA, 50 bp, Artificial
  Synthetic oligonucleotide
agtttagatgatacctataggtacttgcagtctcgcgccattacttgcca

SEQ ID NO: 328319 - DNA, 56 bp, Artificial
  Synthetic oligonucleotide
agtttagctttcaatcacccaatgtgtacaaccctgaaaatcaaagacttgtgtgg

SEQ ID NO: 328320 - DNA, 56 bp, Artificial
  Synthetic oligonucleotide
agtttaggggcaataatagtggacaaccgtccactgtggtcgacaacactcttatg

SEQ ID NO: 328321 - DNA, 53 bp, Artificial
  Synthetic oligonucleotide
agtttaggtagttacacctgcaatacttggtataatggcgtctctggtccagt

SEQ ID NO: 328322 - DNA, 54 bp, Artificial
  Synthetic oligonucleotide
agtttagtctgcgcctagcgtttcgtttggaactacttttgtcggcgccatagt

SEQ ID NO: 328323 - DNA, 56 bp, Artificial
  Synthetic oligonucleotide
agtttagtgaaactatgattcactcgttcaaggcagtttctactttaaggatgact

SEQ ID NO: 328324 - DNA, 55 bp, Artificial
  Synthetic oligonucleotide
agtttagtggcccaatcataagggaatgatttgcggaccattgagaggtactccc

SEQ ID NO: 328325 - DNA, 59 bp, Artificial
  Synthetic oligonucleotide
agtttagtgtaaataggatttattgagaatggaagtcaggccagattaatgctgccacc

SEQ ID NO: 328326 - DNA, 54 bp, Artificial
  Synthetic oligonucleotide
agtttatactaagaccgcatatgggaggttgctcgcggacgcccgtacctcggg

SEQ ID NO: 328327 - DNA, 55 bp, Artificial
  Synthetic oligonucleotide
agtttatagtataattgctctccataaaaacgagattgatgtctttaacccaggg

SEQ ID NO: 328328 - DNA, 53 bp, Artificial
  Synthetic oligonucleotide
agtttatatactggggtttgtagggtataatttgggaaagtgcttcttctgta

SEQ ID NO: 328329 - DNA, 60 bp, Artificial
  Synthetic oligonucleotide
agtttatcatccttgtgcgattacagttgagagagagatatctactactggcgatcaact

SEQ ID NO: 328330 - DNA, 57 bp, Artificial
  Synthetic oligonucleotide
agtttatcggattacgttactgtccactcattgaagattagataacgcgtcggtgta

SEQ ID NO: 328331 - DNA, 59 bp, Artificial
  Synthetic oligonucleotide
agtttatgcgtagcagggagaaccattacaatgccggagttatttgtagtgtgattcca

SEQ ID NO: 328332 - DNA, 60 bp, Artificial
  Synthetic oligonucleotide
agtttatgcgtcttcctagtgtggcatatgttctgctcaacacatttctcaagctggcaa

SEQ ID NO: 328333 - DNA, 57 bp, Artificial
  Synthetic oligonucleotide
agtttatgtaccttatcctgctagaatgtctctgttttgtgacgaacgttcggatac

SEQ ID NO: 328334 - DNA, 60 bp, Artificial
  Synthetic oligonucleotide
agtttattgcataccacatttttcctacccacgagtgcttgcattctagaagtggagcca

SEQ ID NO: 328335 - DNA, 47 bp, Artificial
  Synthetic oligonucleotide
agtttcaagttccccaaaagaccgggaaaaaccccaagccttattta

SEQ ID NO: 328336 - DNA, 60 bp, Artificial
  Synthetic oligonucleotide
agtttcaccttctatcttgattcacatgtatcgtatgaagcattttgagaaaggggtgga

SEQ ID NO: 328337 - DNA, 60 bp, Artificial
  Synthetic oligonucleotide
agtttcaggccatagagtattcacagctcaacgccacgtcgcacctcgcgcaactaacgc

SEQ ID NO: 328338 - DNA, 56 bp, Artificial
  Synthetic oligonucleotide
agtttcatccgaggcgcacgagtactgccgagggggcaactgtcaaccaggggagt

SEQ ID NO: 328339 - DNA, 56 bp, Artificial
  Synthetic oligonucleotide
agtttcatgaatgtaccgcgggaaactcagccattcgacaaaagactttgggccca

SEQ ID NO: 328340 - DNA, 55 bp, Artificial
  Synthetic oligonucleotide
agtttcatgctaaaacgggattggtaccgacgattagtaggcagtctactggacg

SEQ ID NO: 328341 - DNA, 52 bp, Artificial
  Synthetic oligonucleotide
agtttcatgctaaatgtgttgacagttccaaaaaaggtctgtcattaaaacc

SEQ ID NO: 328342 - DNA, 60 bp, Artificial
  Synthetic oligonucleotide
agtttcatgtaagactaattaaaggagaactctcacaccacatgattgaagactttgatc

SEQ ID NO: 328343 - DNA, 56 bp, Artificial
  Synthetic oligonucleotide
agtttcattaaggtatgacccgtttgaaacaagccaacatctaggcaatgaagtct

SEQ ID NO: 328344 - DNA, 60 bp, Artificial
  Synthetic oligonucleotide
agtttcattcctacagacaacgctaagtatcctattgatgttgatcactattggatcaag

SEQ ID NO: 328345 - DNA, 57 bp, Artificial
  Synthetic oligonucleotide
agtttcattgcttatccttgactcatgtggtcaatcgtttcctttaccacacctgtt

SEQ ID NO: 328346 - DNA, 54 bp, Artificial
  Synthetic oligonucleotide
agtttccaacatagccttccagatctgtgaccctgccaccaatgaatgcgcatc

SEQ ID NO: 328347 - DNA, 55 bp, Artificial
  Synthetic oligonucleotide
agtttccaacctgactatcctattacagcaagaattcatgcacacctaaaagctt

SEQ ID NO: 328348 - DNA, 57 bp, Artificial
  Synthetic oligonucleotide
agtttccagacaaaaagcagtgaggtaaatttaagaggattatgcctgataccaaca

SEQ ID NO: 328349 - DNA, 56 bp, Artificial
  Synthetic oligonucleotide
agtttcccctaggacgtaggtttcttgcacagcgcggtttagggtgcagaagcaga

SEQ ID NO: 328350 - DNA, 55 bp, Artificial
  Synthetic oligonucleotide
agtttcccgcgctgcaaattctacacgaacactttctcgtctgccttccacatcc

SEQ ID NO: 328351 - DNA, 58 bp, Artificial
  Synthetic oligonucleotide
agtttccctgataagagtacttacaacgatgaatcgcaggtggttgtcgctcttacta

SEQ ID NO: 328352 - DNA, 52 bp, Artificial
  Synthetic oligonucleotide
agtttcctaatgtctgggtaggggctgaaccccaaaatgcgagttccgagat

SEQ ID NO: 328353 - DNA, 60 bp, Artificial
  Synthetic oligonucleotide
agtttcctactagcagcactcctctgcagtctgttaccaggggcgccactgctctgaaca

SEQ ID NO: 328354 - DNA, 60 bp, Artificial
  Synthetic oligonucleotide
agtttcctgctctcacggctcttgcatctcaactcatcaatccccttcaactatgatcga

SEQ ID NO: 328355 - DNA, 54 bp, Artificial
  Synthetic oligonucleotide
agtttccttggtatcagaaaggttatataccaaaagatccaacacgcacgtccc

SEQ ID NO: 328356 - DNA, 55 bp, Artificial
  Synthetic oligonucleotide
agtttcgaactgagccgaatcgatacaaagccctatttcgatcgtcgttttataa

SEQ ID NO: 328357 - DNA, 55 bp, Artificial
  Synthetic oligonucleotide
agtttcgaatctgttagacgattccgaaagtataattcaggggaattctgaggaa

SEQ ID NO: 328358 - DNA, 50 bp, Artificial
  Synthetic oligonucleotide
agtttcgacgttcaaaaacgttttacctcccgacacttgaactctaatcg

SEQ ID NO: 328359 - DNA, 54 bp, Artificial
  Synthetic oligonucleotide
agtttcgactcgccggttgctgtttgtttagacgcatcccggtttgacctccac

SEQ ID NO: 328360 - DNA, 58 bp, Artificial
  Synthetic oligonucleotide
agtttcgatttaatactgatcagttccagatagttaataataacttgactctcaagac

SEQ ID NO: 328361 - DNA, 55 bp, Artificial
  Synthetic oligonucleotide
agtttcgcaaacttgcgagactcaatccgagcttcgtagagctcatcaattttcg

SEQ ID NO: 328362 - DNA, 54 bp, Artificial
  Synthetic oligonucleotide
agtttcggagccccgatcctgttggctgggttggtcaaagtcgcctcgagtttc

SEQ ID NO: 328363 - DNA, 51 bp, Artificial
  Synthetic oligonucleotide
agtttcggagctccggttctgttagccgggttggttaaagtcgcctcgagt

SEQ ID NO: 328364 - DNA, 56 bp, Artificial
  Synthetic oligonucleotide
agtttcggcgttgattggcttccaacagaaactgttcgtaagactaccattaatga

SEQ ID NO: 328365 - DNA, 53 bp, Artificial
  Synthetic oligonucleotide
agtttcgtagacttatcattgaatatcgtgatatgatgctgagccagtacgag

SEQ ID NO: 328366 - DNA, 60 bp, Artificial
  Synthetic oligonucleotide
agtttcgtctccaaatgctttatcaggcctagctagagtatatgttgatcactcttcctc

SEQ ID NO: 328367 - DNA, 54 bp, Artificial
  Synthetic oligonucleotide
agtttcgtttactttacgataaactacatattagcgatatcttacaaattttgc

SEQ ID NO: 328368 - DNA, 55 bp, Artificial
  Synthetic oligonucleotide
agtttctaccaagagaagtcaacaaaccataatcccaaatatcggatctagaccc

SEQ ID NO: 328369 - DNA, 54 bp, Artificial
  Synthetic oligonucleotide
agtttctaccattatatacgtcctcctgggacgccattacataattttaagtta

SEQ ID NO: 328370 - DNA, 54 bp, Artificial
  Synthetic oligonucleotide
agtttctaggatgccccaccgttgtttcaagggttcccagatgaccggagttca

SEQ ID NO: 328371 - DNA, 55 bp, Artificial
  Synthetic oligonucleotide
agtttctcctgccatacgtggggactgtgaagatccacgggaccaacgggagcat

SEQ ID NO: 328372 - DNA, 58 bp, Artificial
  Synthetic oligonucleotide
agtttctctcaagttccagtacttgggaagttttatagtgcgctcagttccacatcaa

SEQ ID NO: 328373 - DNA, 55 bp, Artificial
  Synthetic oligonucleotide
agtttctctctcctaaaactcctccgaccgccgattcaggcacttccggtcacca

SEQ ID NO: 328374 - DNA, 59 bp, Artificial
  Synthetic oligonucleotide
agtttctgcttgcctatggatgatgtttatggtatcccaggttgaggcggctctgtgca

SEQ ID NO: 328375 - DNA, 55 bp, Artificial
  Synthetic oligonucleotide
agtttcttacacctctctctatacccagtcacaaagttctcttcaccttctactg

SEQ ID NO: 328376 - DNA, 60 bp, Artificial
  Synthetic oligonucleotide
agtttcttatacaggttgacaagagaatcatctatttgggccccatcaccacttctcatg

SEQ ID NO: 328377 - DNA, 50 bp, Artificial
  Synthetic oligonucleotide
agtttcttgttactattgatcaacagctacatcctacaacaacagcaaac

SEQ ID NO: 328378 - DNA, 58 bp, Artificial
  Synthetic oligonucleotide
agtttctttaccaagatggcaagacccgctgttcaaagtgtgctgaatagcgacgaac

SEQ ID NO: 328379 - DNA, 57 bp, Artificial
  Synthetic oligonucleotide
agtttctttactatcaactgtgtagcgtgatttgtgaaagggcccagattttgagtg

SEQ ID NO: 328380 - DNA, 55 bp, Artificial
  Synthetic oligonucleotide
agtttctttctcggggagctcggctcttaagacgcgagtctgctgacgctcccgg

SEQ ID NO: 328381 - DNA, 60 bp, Artificial
  Synthetic oligonucleotide
agtttgaacaaaggatacgcagtgtcagcgctggacgtgcactgtatatccctccctacg

SEQ ID NO: 328382 - DNA, 50 bp, Artificial
  Synthetic oligonucleotide
agtttgaattctccatcgttccttactcgaaggagtgggccacaaacccc

SEQ ID NO: 328383 - DNA, 57 bp, Artificial
  Synthetic oligonucleotide
agtttgacagaaccattgttgggaagagataatatgacaaggtttggagcaaaatta

SEQ ID NO: 328384 - DNA, 57 bp, Artificial
  Synthetic oligonucleotide
agtttgacagcaccctggcactgagacaccgagccaaagagctacatccggagtttt

SEQ ID NO: 328385 - DNA, 57 bp, Artificial
  Synthetic oligonucleotide
agtttgacagcaccctggcacttagacacctagccagagagaaacatccggagtact

SEQ ID NO: 328386 - DNA, 60 bp, Artificial
  Synthetic oligonucleotide
agtttgacagccacctagcatttcgtcacatggcccgagacctgcatccggagtactata

SEQ ID NO: 328387 - DNA, 60 bp, Artificial
  Synthetic oligonucleotide
agtttgacagctccctagcacggagacacatggcccgagagctacatccggagttttaca

SEQ ID NO: 328388 - DNA, 60 bp, Artificial
  Synthetic oligonucleotide
agtttgacatgaaccagaccctcgctactcgggacgtcgagctcgagattagcgctgctc

SEQ ID NO: 328389 - DNA, 53 bp, Artificial
  Synthetic oligonucleotide
agtttgaccgggagcgaccttcgagggacattcttttcgtaatcaaggttata

SEQ ID NO: 328390 - DNA, 56 bp, Artificial
  Synthetic oligonucleotide
agtttgactcgtcttgacggcgtatgctaggctggacaggtagccagctggacgca

SEQ ID NO: 328391 - DNA, 54 bp, Artificial
  Synthetic oligonucleotide
agtttgagcgctgtctaaacgattccgtgtgggaaagcgtaacctgtccggttc

SEQ ID NO: 328392 - DNA, 59 bp, Artificial
  Synthetic oligonucleotide
agtttgagtatctctgcactcgcggatacgaatactttaaaagattcgctcaaactctg

SEQ ID NO: 328393 - DNA, 53 bp, Artificial
  Synthetic oligonucleotide
agtttgatccaccaaagagcacaatcgatgcagaacttttcgcggtaatgaat

SEQ ID NO: 328394 - DNA, 60 bp, Artificial
  Synthetic oligonucleotide
agtttgatgacgtagcgtatggacaaatggtgaatgatttgataaatggcggctgggacc

SEQ ID NO: 328395 - DNA, 56 bp, Artificial
  Synthetic oligonucleotide
agtttgatgtagattataggaaaccgggtaattactagaggctaggttctcagtga

SEQ ID NO: 328396 - DNA, 55 bp, Artificial
  Synthetic oligonucleotide
agtttgcccccctgaaacaatcagacactgcgtgtggtttccgtccttgaaagat

SEQ ID NO: 328397 - DNA, 56 bp, Artificial
  Synthetic oligonucleotide
agtttgcccgagttcaggtggcgcatttacttggtaaacgagcacaacgtgacctg

SEQ ID NO: 328398 - DNA, 54 bp, Artificial
  Synthetic oligonucleotide
agtttgccgcattagatgacccagcagagattcgacaaaagctgttcgctgagt

SEQ ID NO: 328399 - DNA, 53 bp, Artificial
  Synthetic oligonucleotide
agtttgcctttgaatttggcaaaatgcgtcctttgatgcacatttgtatctga

SEQ ID NO: 328400 - DNA, 58 bp, Artificial
  Synthetic oligonucleotide
agtttgcgcaaatattgattcagctttaattcctagaaacttgacattcaagacccaa

SEQ ID NO: 328401 - DNA, 59 bp, Artificial
  Synthetic oligonucleotide
agtttgcggaattgtcatcgttttagagctgcttctcattgcaggtgtcccaagtaagt

SEQ ID NO: 328402 - DNA, 55 bp, Artificial
  Synthetic oligonucleotide
agtttgcgtgcccactcgcggacgttcggatcacatttgatggtcgccatcagtt

SEQ ID NO: 328403 - DNA, 53 bp, Artificial
  Synthetic oligonucleotide
agtttgctcaccattcagatgatgccttgtttatttatggttatttagaacct

SEQ ID NO: 328404 - DNA, 58 bp, Artificial
  Synthetic oligonucleotide
agtttggaacatggctgtgattgcgcattgttatgagttccgcagcctaaggttggcg

SEQ ID NO: 328405 - DNA, 53 bp, Artificial
  Synthetic oligonucleotide
agtttggattggatctcagctccatcggatggctccgcacttgatgtatggtc

SEQ ID NO: 328406 - DNA, 55 bp, Artificial
  Synthetic oligonucleotide
agtttggcatcactgcggaatcgaacaaggaggacgaagtcttctttgggtgggc

SEQ ID NO: 328407 - DNA, 60 bp, Artificial
  Synthetic oligonucleotide
agtttggccccgtgcaggcgttaggtgcacagtattccatgtggaagctgaagtacctga

SEQ ID NO: 328408 - DNA, 54 bp, Artificial
  Synthetic oligonucleotide
agtttggctgtaaggttttaggagatcgtctggacgtaccactcttcttacgaa

SEQ ID NO: 328409 - DNA, 58 bp, Artificial
  Synthetic oligonucleotide
agtttgggctcgatgatttgacccgagtgctaggtggtatggtgggcaggtacattag

SEQ ID NO: 328410 - DNA, 57 bp, Artificial
  Synthetic oligonucleotide
agtttggggaattcaccattctggatcgactaccgaacagaccagactctatggaag

SEQ ID NO: 328411 - DNA, 51 bp, Artificial
  Synthetic oligonucleotide
agtttggggagataaccccatacgagttccagtgcgtaacatttgatgcta

SEQ ID NO: 328412 - DNA, 58 bp, Artificial
  Synthetic oligonucleotide
agtttgggtgcaagatacttggagatcgattggacgtgcccctcttcttacgaaatgc

SEQ ID NO: 328413 - DNA, 57 bp, Artificial
  Synthetic oligonucleotide
agtttgggttatgatggatggagatgaacaagtcgaatacccactgaaaccaatcgt

SEQ ID NO: 328414 - DNA, 60 bp, Artificial
  Synthetic oligonucleotide
agtttgggttctactcaatgtcctccactgtgtttctcctagctagaggtctgcacataa

SEQ ID NO: 328415 - DNA, 56 bp, Artificial
  Synthetic oligonucleotide
agtttggtcgatgaggctaggaactccccacgggtgaccgtgtcctagcctgcgtg

SEQ ID NO: 328416 - DNA, 57 bp, Artificial
  Synthetic oligonucleotide
agtttggttgggcatgagagtaagtcactattcagaggcttaagggattataaccca

SEQ ID NO: 328417 - DNA, 51 bp, Artificial
  Synthetic oligonucleotide
agtttgtaacgttcgctaaggctaagtgttacgatgggtttgtttggttcc

SEQ ID NO: 328418 - DNA, 53 bp, Artificial
  Synthetic oligonucleotide
agtttgtcatttgcgttttggggaccgtcgcgagcagaactccgtcgttttcg

SEQ ID NO: 328419 - DNA, 55 bp, Artificial
  Synthetic oligonucleotide
agtttgtccacctcttgatttagatcccttagtttgtctagatcagcatcgctcc

SEQ ID NO: 328420 - DNA, 55 bp, Artificial
  Synthetic oligonucleotide
agtttgtctcggatatccacatcgacgacagctcactttgaacccgggcctcgag

SEQ ID NO: 328421 - DNA, 60 bp, Artificial
  Synthetic oligonucleotide
agtttgtgacagagcactaccagcaaccgatttggaagcagcactatatcttccgtcttt

SEQ ID NO: 328422 - DNA, 50 bp, Artificial
  Synthetic oligonucleotide
agtttgtggaatcgtcatcgttttagagctgcttcggattgcaggtgttc

SEQ ID NO: 328423 - DNA, 55 bp, Artificial
  Synthetic oligonucleotide
agtttgtgtcttgtttataacgtcactttcaactactgcttcagcagttaactcg

SEQ ID NO: 328424 - DNA, 60 bp, Artificial
  Synthetic oligonucleotide
agtttgttagatcgctctctcaagataaacggagatgagcattcaaacgaatcggccatt

SEQ ID NO: 328425 - DNA, 57 bp, Artificial
  Synthetic oligonucleotide
agtttgttaggaattctccacaagcctatgattggatcgtaagaggtctaatcttcc

SEQ ID NO: 328426 - DNA, 56 bp, Artificial
  Synthetic oligonucleotide
agtttgttagggttgataattatgttgtgtataaccagcaagaagctggcaagtat

SEQ ID NO: 328427 - DNA, 56 bp, Artificial
  Synthetic oligonucleotide
agttttaatcctacccgaaaatggcgagctatacaaactacatgatcactttctta

SEQ ID NO: 328428 - DNA, 52 bp, Artificial
  Synthetic oligonucleotide
agttttaatgcgatacaattcaagcttggaactagacatgtcagagttagcg

SEQ ID NO: 328429 - DNA, 53 bp, Artificial
  Synthetic oligonucleotide
agttttaattgtggaggagaatttttttattgcaatacaacagagttgtttaa

SEQ ID NO: 328430 - DNA, 54 bp, Artificial
  Synthetic oligonucleotide
agttttacgattcgaacttgatcgtgcggcacccatatgagttctctatttacg

SEQ ID NO: 328431 - DNA, 60 bp, Artificial
  Synthetic oligonucleotide
agttttatagtctttcagatccatgatagttcacaacgtaaaggtggtgtctgcacattg

SEQ ID NO: 328432 - DNA, 51 bp, Artificial
  Synthetic oligonucleotide
agttttatctccccttaccccaatgtaacttagaagtttgtacataccgac

SEQ ID NO: 328433 - DNA, 60 bp, Artificial
  Synthetic oligonucleotide
agttttatgatgatggtgctgagaatggtttgattagacatgtgttattgatggatgtgt

SEQ ID NO: 328434 - DNA, 53 bp, Artificial
  Synthetic oligonucleotide
agttttattatagcagcgtgtgtggcttctattttacccttaggtcagtgtgt

SEQ ID NO: 328435 - DNA, 59 bp, Artificial
  Synthetic oligonucleotide
agttttcaaaccatgtcactaaccttgccgctcttcgtcaatatcatgagacttacaac

SEQ ID NO: 328436 - DNA, 59 bp, Artificial
  Synthetic oligonucleotide
agttttcagaacgtggtatggatttgtctcatgtcctccctccagatgcttcttcctac

SEQ ID NO: 328437 - DNA, 60 bp, Artificial
  Synthetic oligonucleotide
agttttcagctttgtcgaggaaatctttataactagatccctcgcctggattgcagagca

SEQ ID NO: 328438 - DNA, 54 bp, Artificial
  Synthetic oligonucleotide
agttttccaacggaggaacttatagagacgggtctaagtgcataacgtataata

SEQ ID NO: 328439 - DNA, 56 bp, Artificial
  Synthetic oligonucleotide
agttttcctctggcgcttcttggccgccgcgtgtattggttcctgagcgggacact

SEQ ID NO: 328440 - DNA, 52 bp, Artificial
  Synthetic oligonucleotide
agttttccttacctggagggacgaaggacttcttccttggtatgtatgtacc

SEQ ID NO: 328441 - DNA, 60 bp, Artificial
  Synthetic oligonucleotide
agttttcgagattcaaacaatggagagaatcggaattcttgatagatgctcttaagatga

SEQ ID NO: 328442 - DNA, 56 bp, Artificial
  Synthetic oligonucleotide
agttttcggtcacagatattcgacctcccaagttgggtgtagcagcagccttcgac

SEQ ID NO: 328443 - DNA, 55 bp, Artificial
  Synthetic oligonucleotide
agttttcgtaattatatctgcaatttcgtccctcgtaatacttcctgtttgtgag

SEQ ID NO: 328444 - DNA, 53 bp, Artificial
  Synthetic oligonucleotide
agttttctaggaaggtcaggctgcattgccattattgagacagaattgaatca

SEQ ID NO: 328445 - DNA, 56 bp, Artificial
  Synthetic oligonucleotide
agttttctcaaggtgatacactattgttctttggaccacttgagggtggtggtcta

SEQ ID NO: 328446 - DNA, 60 bp, Artificial
  Synthetic oligonucleotide
agttttctgcggaagtctagagtgcgcatcgaaacagctgtagcgacctcacagtagcag

SEQ ID NO: 328447 - DNA, 55 bp, Artificial
  Synthetic oligonucleotide
agttttcttgtaagaactttattgacgctggaggtgacgtagtacgctacctgaa

SEQ ID NO: 328448 - DNA, 59 bp, Artificial
  Synthetic oligonucleotide
agttttgactggtggcaaaaaactttagaagaaactgactactgcttactgcatctgca

SEQ ID NO: 328449 - DNA, 60 bp, Artificial
  Synthetic oligonucleotide
agttttgagatcgggttcatcagacattgggcgttatcagtcgtgggaaacatgatggag

SEQ ID NO: 328450 - DNA, 59 bp, Artificial
  Synthetic oligonucleotide
agttttgatcgtgaacactagtaagtaccccaacatgtatgtcccagtcggtgctgtga

SEQ ID NO: 328451 - DNA, 55 bp, Artificial
  Synthetic oligonucleotide
agttttgatctccaagcaagatatcacgccgcattttcgacttatagcatgtata

SEQ ID NO: 328452 - DNA, 56 bp, Artificial
  Synthetic oligonucleotide
agttttgatctcctactcatcagatttagtcatataccgaacaaacaccaaaggtg

SEQ ID NO: 328453 - DNA, 50 bp, Artificial
  Synthetic oligonucleotide
agttttggggtcgctccgccactttgttttaaatgcctttagttaggtgt

SEQ ID NO: 328454 - DNA, 57 bp, Artificial
  Synthetic oligonucleotide
agttttgtccgtaccggatagactccaagtgtcacaattgtggctgtcgcataaggg

SEQ ID NO: 328455 - DNA, 56 bp, Artificial
  Synthetic oligonucleotide
agttttgtcgtccgcctgaagttcttacccaggatgactcattataccgtgaccca

SEQ ID NO: 328456 - DNA, 58 bp, Artificial
  Synthetic oligonucleotide
agttttgtctcgagaatggcagaagtcaatttaaggggactctgcataatccctccat

SEQ ID NO: 328457 - DNA, 60 bp, Artificial
  Synthetic oligonucleotide
agttttgtgaatgtgcgagatatcgtaaggtggagtcaacagagggacattcaggagtcg

SEQ ID NO: 328458 - DNA, 51 bp, Artificial
  Synthetic oligonucleotide
agtttttaacacttcggcgttcgtaacgtcagcgatcttatccacgtccgg

SEQ ID NO: 328459 - DNA, 56 bp, Artificial
  Synthetic oligonucleotide
agtttttcaaggcagagctacttgttgttatgcgtattcctataacggaccacgta

SEQ ID NO: 328460 - DNA, 56 bp, Artificial
  Synthetic oligonucleotide
agtttttgtcagaacatcagaacggttaaatctatccagcttagtaccgaatgggc

SEQ ID NO: 328461 - DNA, 54 bp, Artificial
  Synthetic oligonucleotide
ataaaaacaaccatcttggcacgatgggcaacacaccccccaaccttagccgta

SEQ ID NO: 328462 - DNA, 52 bp, Artificial
  Synthetic oligonucleotide
ataaaaacactagagtgtatgtatgaggattgtagggaggaaccttggaccc

SEQ ID NO: 328463 - DNA, 56 bp, Artificial
  Synthetic oligonucleotide
ataaaaactgcttttcactgttatggggagtgtaaaaaatatgcctatccttggca

SEQ ID NO: 328464 - DNA, 60 bp, Artificial
  Synthetic oligonucleotide
ataaaaagacggctgtggctgataattgcaacgagattgctcatattaaacaagagatac

SEQ ID NO: 328465 - DNA, 56 bp, Artificial
  Synthetic oligonucleotide
ataaaaaggaaattgcaggtggagtgatgcttatgtatcagtgtttgagatgtggg

SEQ ID NO: 328466 - DNA, 52 bp, Artificial
  Synthetic oligonucleotide
ataaaacaatgacccagtatccctcactacaggcacagatttttaacgtcta

SEQ ID NO: 328467 - DNA, 60 bp, Artificial
  Synthetic oligonucleotide
ataaaacatgagaagcttggagggacctccttgctgatcacggtggtgttggatggatga

SEQ ID NO: 328468 - DNA, 58 bp, Artificial
  Synthetic oligonucleotide
ataaaacattatagagttggtggtgttcctaatgcatgccctgaacttgggtccacta

SEQ ID NO: 328469 - DNA, 56 bp, Artificial
  Synthetic oligonucleotide
ataaaacattgcacctatggtgttgccccggccggggtgtgtctttgaacgcagta

SEQ ID NO: 328470 - DNA, 58 bp, Artificial
  Synthetic oligonucleotide
ataaaacattgcacctttggtcgtgccctggctggggtatgtctttgaacgcagtaga

SEQ ID NO: 328471 - DNA, 60 bp, Artificial
  Synthetic oligonucleotide
ataaaacattgcacctttggtgatgccctgattggggtgcgtcagtgaactcagtagaat

SEQ ID NO: 328472 - DNA, 54 bp, Artificial
  Synthetic oligonucleotide
ataaaacgagaacttttacagcagctccactagaaacactacttggaggaaaag

SEQ ID NO: 328473 - DNA, 59 bp, Artificial
  Synthetic oligonucleotide
ataaaacgtacattgagctatttcggtctgagaacacacgactatgatataaaaggatc

SEQ ID NO: 328474 - DNA, 60 bp, Artificial
  Synthetic oligonucleotide
ataaaactattgtcataagtgcagcgaccatccactatgggcacaagtgttatacctgaa

SEQ ID NO: 328475 - DNA, 60 bp, Artificial
  Synthetic oligonucleotide
ataaaactctaagagctgagcaggctacacaggagttaaagaattggatgacagacacct

SEQ ID NO: 328476 - DNA, 60 bp, Artificial
  Synthetic oligonucleotide
ataaaagaactaagagatttgatgtcacagtctcgcactcgcgagatactgacaaaaacc

SEQ ID NO: 328477 - DNA, 59 bp, Artificial
  Synthetic oligonucleotide
ataaaagagagtccacacatagcgcctcattttgcgggtcaccatattcttgggaacaa

SEQ ID NO: 328478 - DNA, 59 bp, Artificial
  Synthetic oligonucleotide
ataaaaggaagatcccatttgagaaatgacaccgatgtggtaaactttgtgagcatgga

SEQ ID NO: 328479 - DNA, 57 bp, Artificial
  Synthetic oligonucleotide
ataaaagggattgtaaatcagtggtgcaacgtgaacgacttagatactttgcctcta

SEQ ID NO: 328480 - DNA, 55 bp, Artificial
  Synthetic oligonucleotide
ataaaagggcattaagcgatcgggaaagtgttgcacagtcaatccaagggaaaat

SEQ ID NO: 328481 - DNA, 53 bp, Artificial
  Synthetic oligonucleotide
ataaaaggtaactggctgcaaggtaatttaaacaagtgttcttcattattcgg

SEQ ID NO: 328482 - DNA, 58 bp, Artificial
  Synthetic oligonucleotide
ataaaagtcaaatcactcgggatatcataatagctttgtctgtgttagtcggtggagg

SEQ ID NO: 328483 - DNA, 60 bp, Artificial
  Synthetic oligonucleotide
ataaaagtgaatgtactgcccgttggatggctgatatatggccacttcaacagggtcctc

SEQ ID NO: 328484 - DNA, 60 bp, Artificial
  Synthetic oligonucleotide
ataaaagtttgtactcagttctctctaaggaggctgtgattgccgtagctcagattcaat

SEQ ID NO: 328485 - DNA, 51 bp, Artificial
  Synthetic oligonucleotide
ataaaatcccaaagaaaccctacaaatgggtgagactgggtaaataagccc

SEQ ID NO: 328486 - DNA, 52 bp, Artificial
  Synthetic oligonucleotide
ataaaatcgaacctgtcatcgaacaaacgtctaacgacaaacccgagccccc

SEQ ID NO: 328487 - DNA, 54 bp, Artificial
  Synthetic oligonucleotide
ataaaatcttcaccgtcggagcccggaagggtatatccacggagtgtttagctg

SEQ ID NO: 328488 - DNA, 51 bp, Artificial
  Synthetic oligonucleotide
ataaaatgatcctgacagctctagctggactgccagccattacccctgctc

SEQ ID NO: 328489 - DNA, 53 bp, Artificial
  Synthetic oligonucleotide
ataaaatggtctacacgtacgattctgtcttaatgactgctataggagccaat

SEQ ID NO: 328490 - DNA, 55 bp, Artificial
  Synthetic oligonucleotide
ataaaatgtcccgaaatgtcgcatacgcagccattacatgaacaagtacgtccag

SEQ ID NO: 328491 - DNA, 60 bp, Artificial
  Synthetic oligonucleotide
ataaaatttgtgaagcttggggggacccccttgctgaactacatgatgtgtgatagatga

SEQ ID NO: 328492 - DNA, 58 bp, Artificial
  Synthetic oligonucleotide
ataaacaaacacagattaatttgatggattcatacgttcaaataccagatggtaatgt

SEQ ID NO: 328493 - DNA, 60 bp, Artificial
  Synthetic oligonucleotide
ataaacaagcagtgagtcgtcctctctcaaggagagaaccactgcaggtgcaagatttta

SEQ ID NO: 328494 - DNA, 58 bp, Artificial
  Synthetic oligonucleotide
ataaacaagcgtcgttcatggacgtacaggcccatgtaccgaaagcccagaatataca

SEQ ID NO: 328495 - DNA, 54 bp, Artificial
  Synthetic oligonucleotide
ataaacaagttcactagaaggtaggtgctggtttttcaaccggtcagactacca

SEQ ID NO: 328496 - DNA, 60 bp, Artificial
  Synthetic oligonucleotide
ataaacactagcctcccatttcagaatgtacatccagccacaattggagaatgtccaaag

SEQ ID NO: 328497 - DNA, 50 bp, Artificial
  Synthetic oligonucleotide
ataaacagttcataggccgcgggtaccaccccggcaaccaactcgggggt

SEQ ID NO: 328498 - DNA, 53 bp, Artificial
  Synthetic oligonucleotide
ataaacagttctgtcacttctccccaaagcctggttcaggcttgtcatgtttc

SEQ ID NO: 328499 - DNA, 56 bp, Artificial
  Synthetic oligonucleotide
ataaacatgatgtaaacaccttacgggacatggaagatactgtgaaaacgaaacga

SEQ ID NO: 328500 - DNA, 53 bp, Artificial
  Synthetic oligonucleotide
ataaacatggagcacttacaagcagcaacacagtccacaataatgctgcctgt

SEQ ID NO: 328501 - DNA, 60 bp, Artificial
  Synthetic oligonucleotide
ataaacatggggcgcttaccagcagcaatacagcccacaataatgctgattgtgcctggg

SEQ ID NO: 328502 - DNA, 60 bp, Artificial
  Synthetic oligonucleotide
ataaaccaaacatattcccatattcagcatcctttacactgaatagatcgcagccagccc

SEQ ID NO: 328503 - DNA, 57 bp, Artificial
  Synthetic oligonucleotide
ataaacccactctatgtccggtcatttgggcacgcccccgcaagactgctagccgag

SEQ ID NO: 328504 - DNA, 60 bp, Artificial
  Synthetic oligonucleotide
ataaaccctgggcacgcagatcttagtgccaaagaggcacaggatgtaatcatggaagtc

SEQ ID NO: 328505 - DNA, 60 bp, Artificial
  Synthetic oligonucleotide
ataaaccgtatgcattatgcagccataagcagttagtgacgctactgtgtagatggcgct

SEQ ID NO: 328506 - DNA, 59 bp, Artificial
  Synthetic oligonucleotide
ataaacctgaacgcaataggcgatgttttgaagtcgactggcggaatgacatctaacgc

SEQ ID NO: 328507 - DNA, 57 bp, Artificial
  Synthetic oligonucleotide
ataaacctgctaccacattgtcagatcaaattgatagtagaagggcctgttcataca

SEQ ID NO: 328508 - DNA, 53 bp, Artificial
  Synthetic oligonucleotide
ataaacctggagtaagtgatgctcacgtacgaggaaatgcaacaccacccgac

SEQ ID NO: 328509 - DNA, 53 bp, Artificial
  Synthetic oligonucleotide
ataaacgatgagacaccaggaatcagatatcagtacaatgtgttgccacaggg

SEQ ID NO: 328510 - DNA, 51 bp, Artificial
  Synthetic oligonucleotide
ataaacgatgctttagtcctttgggaacaacagttcatggtaaactcagaa

SEQ ID NO: 328511 - DNA, 57 bp, Artificial
  Synthetic oligonucleotide
ataaacgattctagtagattatatggtgcaagttattatgtaatgaactctgagttc

SEQ ID NO: 328512 - DNA, 55 bp, Artificial
  Synthetic oligonucleotide
ataaacgcactatcctgcgccacgccacacctagtctctccgggaattctccgga

SEQ ID NO: 328513 - DNA, 55 bp, Artificial
  Synthetic oligonucleotide
ataaacgccttgagtggaatcgatctgtcacatctgcgaacgccgaagatcgaac

SEQ ID NO: 328514 - DNA, 56 bp, Artificial
  Synthetic oligonucleotide
ataaacggagaactggtttcagactaccagcctaagacatatcgttatggtaagga

SEQ ID NO: 328515 - DNA, 57 bp, Artificial
  Synthetic oligonucleotide
ataaacggagaggaatatgtactattggactatgaagtgaactgggaagtgagggga

SEQ ID NO: 328516 - DNA, 53 bp, Artificial
  Synthetic oligonucleotide
ataaacgtaattagcctgccgaggtgtccgacttctctgtcatttacacttaa

SEQ ID NO: 328517 - DNA, 53 bp, Artificial
  Synthetic oligonucleotide
ataaacgtggcgcacgctcacataatctcccggtgtggtgtccgttcgtttgt

SEQ ID NO: 328518 - DNA, 55 bp, Artificial
  Synthetic oligonucleotide
ataaacgtggttcgtctaagtatcaacgtcgaggatattcacgtactcaaggttg

SEQ ID NO: 328519 - DNA, 60 bp, Artificial
  Synthetic oligonucleotide
ataaacgttttaggatcgccagcttttataatgtcgagagcctctcccgcacttgctgca

SEQ ID NO: 328520 - DNA, 51 bp, Artificial
  Synthetic oligonucleotide
ataaactaagggattcaaatgtggtgctgaataagatggcgatacctcatg

SEQ ID NO: 328521 - DNA, 56 bp, Artificial
  Synthetic oligonucleotide
ataaactaggtatatgtaagtgtggggcgatatgcgttaagcatgaacccggttgt

SEQ ID NO: 328522 - DNA, 52 bp, Artificial
  Synthetic oligonucleotide
ataaactattataaggatgcagctagctcatcatccgctggacaatccttat

SEQ ID NO: 328523 - DNA, 57 bp, Artificial
  Synthetic oligonucleotide
ataaactcaagaaagttataaacgcattaagcggaatagatctctcgcatttacgaa

SEQ ID NO: 328524 - DNA, 53 bp, Artificial
  Synthetic oligonucleotide
ataaactcaagcctgtgcatgtgagtcgcgtaacgacttgcgttcgtaaggtc

SEQ ID NO: 328525 - DNA, 52 bp, Artificial
  Synthetic oligonucleotide
ataaactggctaatgtatagggacttcatatctacattgccacctacatatg

SEQ ID NO: 328526 - DNA, 60 bp, Artificial
  Synthetic oligonucleotide
ataaactggtcggtgcactgagatgttatgcttactgcttgattctcgctttgtatgact

SEQ ID NO: 328527 - DNA, 55 bp, Artificial
  Synthetic oligonucleotide
ataaacttacgtactaacaattcggccaccatagttttgccgtacataaactgca

SEQ ID NO: 328528 - DNA, 58 bp, Artificial
  Synthetic oligonucleotide
ataaacttagtccccaagtttgctgtcttgcaatatgtgggatccacttcttaatgaa

SEQ ID NO: 328529 - DNA, 57 bp, Artificial
  Synthetic oligonucleotide
ataaacttatcaattcccaccgaattcggtctgttactgcgtgttcttcgactgcac

SEQ ID NO: 328530 - DNA, 51 bp, Artificial
  Synthetic oligonucleotide
ataaacttcctacgctccctctacacggggaacgaagactttagaaggaaa

SEQ ID NO: 328531 - DNA, 60 bp, Artificial
  Synthetic oligonucleotide
ataaagaaatagacccagagaaactgcagagtatcatggcagattcatttggcgccgaag

SEQ ID NO: 328532 - DNA, 55 bp, Artificial
  Synthetic oligonucleotide
ataaagaacgttgtatgtctctcacctagatccggtgcttcctacgaaggcattg

SEQ ID NO: 328533 - DNA, 54 bp, Artificial
  Synthetic oligonucleotide
ataaagaagagaaccggcaagtctaccgtggtgataaaagcagattccgttaag

SEQ ID NO: 328534 - DNA, 54 bp, Artificial
  Synthetic oligonucleotide
ataaagaccccgcgcgggccggtttattggttgctccggcacaccgagtgtgac

SEQ ID NO: 328535 - DNA, 58 bp, Artificial
  Synthetic oligonucleotide
ataaagactcattttccgacattcctccatcgtcatggtgtctttcatctccaaaaaa

SEQ ID NO: 328536 - DNA, 53 bp, Artificial
  Synthetic oligonucleotide
ataaagagcactatcaggatctacttcaaacccaagcacgttaaggcgtggat

SEQ ID NO: 328537 - DNA, 60 bp, Artificial
  Synthetic oligonucleotide
ataaagcagcgaattatcagtatagttattcacgtgatggtgaacaagttactgcacata

SEQ ID NO: 328538 - DNA, 55 bp, Artificial
  Synthetic oligonucleotide
ataaagccacgttctctgtgtggttcccttcagcggcgaaatctgtggtaatccc

SEQ ID NO: 328539 - DNA, 52 bp, Artificial
  Synthetic oligonucleotide
ataaagccagcctggattaagcaggaaacccgtggtcgagtgcttaaattct

SEQ ID NO: 328540 - DNA, 54 bp, Artificial
  Synthetic oligonucleotide
ataaagccagttgaagacggggactctggggcgggcgcgagacccagacccgga

SEQ ID NO: 328541 - DNA, 54 bp, Artificial
  Synthetic oligonucleotide
ataaagccccccaaacttatgctaaacaagtggtactttaccaaagacatatgc

SEQ ID NO: 328542 - DNA, 58 bp, Artificial
  Synthetic oligonucleotide
ataaagcctctaggactctaaaggacaggtgtacacatcgcggccatcctataatatt

SEQ ID NO: 328543 - DNA, 51 bp, Artificial
  Synthetic oligonucleotide
ataaagctgccaaaagatcatcctccatttagccagaaggcaaattttcga

SEQ ID NO: 328544 - DNA, 59 bp, Artificial
  Synthetic oligonucleotide
ataaaggaattaaccctcactatccagagcatgtagttgaacattacttccagacgaca

SEQ ID NO: 328545 - DNA, 55 bp, Artificial
  Synthetic oligonucleotide
ataaaggacatggttatgagtgtattcaaacccagtatggagagcaaagctattc

SEQ ID NO: 328546 - DNA, 50 bp, Artificial
  Synthetic oligonucleotide
ataaaggagttaaagagcaaacggttattggaaaccgaaaccaggttaga

SEQ ID NO: 328547 - DNA, 57 bp, Artificial
  Synthetic oligonucleotide
ataaaggcaaccacacggtatatcacgtagtaaagcagcaaaaatacttggacttca

SEQ ID NO: 328548 - DNA, 57 bp, Artificial
  Synthetic oligonucleotide
ataaagggaagatcccacttgaggaatgataccgatgtggtaaattatgtaagtatg

SEQ ID NO: 328549 - DNA, 54 bp, Artificial
  Synthetic oligonucleotide
ataaaggggaaatgctttatcctcgtccaatgttgttaccagcttttaagagag

SEQ ID NO: 328550 - DNA, 56 bp, Artificial
  Synthetic oligonucleotide
ataaaggttcccgagctatactgtacctttgccgacagattggtactacagtacaa

SEQ ID NO: 328551 - DNA, 57 bp, Artificial
  Synthetic oligonucleotide
ataaaggtttgttccgagatagctctaaatattcacaacctaacctgcactttatga

SEQ ID NO: 328552 - DNA, 53 bp, Artificial
  Synthetic oligonucleotide
ataaagtatcagctagatacatcgaccatctatcaatatcttcgtgagtaccg

SEQ ID NO: 328553 - DNA, 55 bp, Artificial
  Synthetic oligonucleotide
ataaagtcaccacaagcaccatgggtgtttgcttgtcgaccagacaggtgccctc

SEQ ID NO: 328554 - DNA, 55 bp, Artificial
  Synthetic oligonucleotide
ataaagtgacctgatcatcacttgatgtgtaagcttctggtctctcaccaaagat

SEQ ID NO: 328555 - DNA, 57 bp, Artificial
  Synthetic oligonucleotide
ataaagttcagcgaacaaaccaccatcttgaagtaaactcagccgataagaacaaca

SEQ ID NO: 328556 - DNA, 55 bp, Artificial
  Synthetic oligonucleotide
ataaagttcattcaacactgatgagttatatagaaacgggacagacagcagcgtt

SEQ ID NO: 328557 - DNA, 56 bp, Artificial
  Synthetic oligonucleotide
ataaagttgaattcattggaccagatctcaaggagatgcgaaataactatgggtgg

SEQ ID NO: 328558 - DNA, 60 bp, Artificial
  Synthetic oligonucleotide
ataaataacctgaatagatacatcctttactcttgatccaattggcatcagattaaactc

SEQ ID NO: 328559 - DNA, 54 bp, Artificial
  Synthetic oligonucleotide
ataaataattatgtgggcctaatgacctagcccacattgttttccccgtccgac

SEQ ID NO: 328560 - DNA, 60 bp, Artificial
  Synthetic oligonucleotide
ataaatacagctttgctaaacgcatcttgtgctgccatggatgacttccaacttattcca

SEQ ID NO: 328561 - DNA, 59 bp, Artificial
  Synthetic oligonucleotide
ataaataccgggactggactaatcgatggccagtcttcgtacatatctacgaagtgaga

SEQ ID NO: 328562 - DNA, 51 bp, Artificial
  Synthetic oligonucleotide
ataaatactgtcgttgaacggcaacatggttcacatatgacccttggaagt

SEQ ID NO: 328563 - DNA, 56 bp, Artificial
  Synthetic oligonucleotide
ataaatagagccacggcgttacctaagcgtaatccatcgccaattgtggatagggt

SEQ ID NO: 328564 - DNA, 53 bp, Artificial
  Synthetic oligonucleotide
ataaatatcttgggcctgggaacagtcttgaccaaggagaaccaactaaccct

SEQ ID NO: 328565 - DNA, 60 bp, Artificial
  Synthetic oligonucleotide
ataaatatggcagattataatactgagtccagttatgtgtgctcaggacttgttggtgac

SEQ ID NO: 328566 - DNA, 60 bp, Artificial
  Synthetic oligonucleotide
ataaatatgtcttgctaggagatactatagaaagtgccctggatgctataacaagccaaa

SEQ ID NO: 328567 - DNA, 56 bp, Artificial
  Synthetic oligonucleotide
ataaatcaaggttcactcaccgtcaagtgcgctgtaccagatgaacgcatcatacc

SEQ ID NO: 328568 - DNA, 59 bp, Artificial
  Synthetic oligonucleotide
ataaatcagttacttgagagtgttcaaggtggttatgaggagtttatgatgctacggcg

SEQ ID NO: 328569 - DNA, 55 bp, Artificial
  Synthetic oligonucleotide
ataaatccacagggtttgctagtacctaaaacgtatgcttgccgtgctatgtgtg

SEQ ID NO: 328570 - DNA, 60 bp, Artificial
  Synthetic oligonucleotide
ataaatcccacaacgatgacgcacaccagtcaatacatatgcagccctgtcctcacagac

SEQ ID NO: 328571 - DNA, 60 bp, Artificial
  Synthetic oligonucleotide
ataaatcctttagaaatctgggcaatagtagcactgatagtggcgctaatcttagcaata

SEQ ID NO: 328572 - DNA, 60 bp, Artificial
  Synthetic oligonucleotide
ataaatgacaacccgcgacgtgaaatgctatccgctgctatgttgtgtctgggcagtgtt

SEQ ID NO: 328573 - DNA, 60 bp, Artificial
  Synthetic oligonucleotide
ataaatgatgaccaaggaccactcaaagttccgtagaccgcagtgcccagcaatgcccga

SEQ ID NO: 328574 - DNA, 55 bp, Artificial
  Synthetic oligonucleotide
ataaatgattccgattacaggttgcagttggtagtttagggaacggcaactgccg

SEQ ID NO: 328575 - DNA, 59 bp, Artificial
  Synthetic oligonucleotide
ataaatgattttgggactatggcaatcaggatagttaatgaatacgacccagtcacaat

SEQ ID NO: 328576 - DNA, 60 bp, Artificial
  Synthetic oligonucleotide
ataaatgcggtcgcattcgataacatgcgcatcatgaacgaactgtaaacgccaacccca

SEQ ID NO: 328577 - DNA, 60 bp, Artificial
  Synthetic oligonucleotide
ataaatggactaagtgtataagtggtcgatgttgacagatctgtaattgagcagtacatg

SEQ ID NO: 328578 - DNA, 57 bp, Artificial
  Synthetic oligonucleotide
ataaatggggactgtgatgctccaataactggcggaagtccagatccgggggtcaag

SEQ ID NO: 328579 - DNA, 60 bp, Artificial
  Synthetic oligonucleotide
ataaatgtctcgatattcaataaaaagttgagccagacagaatgacattgttcaactttc

SEQ ID NO: 328580 - DNA, 60 bp, Artificial
  Synthetic oligonucleotide
ataaatgtgatagtcgtgaaggcggtgagcaactttaatacggcatgcacgacagaattt

SEQ ID NO: 328581 - DNA, 55 bp, Artificial
  Synthetic oligonucleotide
ataaattagacaaaaggagttacctaattagagcattaaccctgaacacaatgac

SEQ ID NO: 328582 - DNA, 53 bp, Artificial
  Synthetic oligonucleotide
ataaattagtccccaaatattggtctttatccacaatgtgggaccctttagta

SEQ ID NO: 328583 - DNA, 60 bp, Artificial
  Synthetic oligonucleotide
ataaattcaattctcgctgagatgaacattcagcaagtcacatcagctgtttttacggcc

SEQ ID NO: 328584 - DNA, 59 bp, Artificial
  Synthetic oligonucleotide
ataaattcacaacaggcgagacaatagcgcacggtaaagttgggcaggggatatctgcg

SEQ ID NO: 328585 - DNA, 59 bp, Artificial
  Synthetic oligonucleotide
ataaattcatggcatatatttgggaaggacaacgctataagaataggggagaactctga

SEQ ID NO: 328586 - DNA, 55 bp, Artificial
  Synthetic oligonucleotide
ataaattcctcgaggtaagattatgatcagtagataccatcggcgcctggagcaa

SEQ ID NO: 328587 - DNA, 57 bp, Artificial
  Synthetic oligonucleotide
ataaattccttaaagtgctttagataatgcgggtctacgtcatcaatgacgttgtac

SEQ ID NO: 328588 - DNA, 58 bp, Artificial
  Synthetic oligonucleotide
ataaattgggatgttatcaatgtattggttcagagcattggtaaagtaccacaaatat

SEQ ID NO: 328589 - DNA, 60 bp, Artificial
  Synthetic oligonucleotide
ataaattgtgatagccataataagtaaattacactacataatgagatatagatgtaggtt

SEQ ID NO: 328590 - DNA, 57 bp, Artificial
  Synthetic oligonucleotide
ataaattgtgttaactgtcccagagggtgttcacaatcatttggcaataactcaact

SEQ ID NO: 328591 - DNA, 57 bp, Artificial
  Synthetic oligonucleotide
ataaattgttcatttcttgaactttcttcacataccagttcggtctcttctaatcaa

SEQ ID NO: 328592 - DNA, 59 bp, Artificial
  Synthetic oligonucleotide
ataaatttggtcaatgtgacagaacagtttaacatgtggaaaaacaagatggtagagca

SEQ ID NO: 328593 - DNA, 53 bp, Artificial
  Synthetic oligonucleotide
ataacaaaaacggaggtctattagagtttaatttgcttgaccaaaggataata

SEQ ID NO: 328594 - DNA, 58 bp, Artificial
  Synthetic oligonucleotide
ataacaaaatccttacggaagaagatctacagatgcgccggctagctacggcgttaca

SEQ ID NO: 328595 - DNA, 60 bp, Artificial
  Synthetic oligonucleotide
ataacaacaattacccagtagacaatgcattgaatccgtacatatgctacattggggact

SEQ ID NO: 328596 - DNA, 55 bp, Artificial
  Synthetic oligonucleotide
ataacaactactccggttcttttatcgagggttgttattcacaatcggtgtgcaa

SEQ ID NO: 328597 - DNA, 50 bp, Artificial
  Synthetic oligonucleotide
ataacaagatcgattatctctaccatgtcttcttgcttgaattccctcac

SEQ ID NO: 328598 - DNA, 57 bp, Artificial
  Synthetic oligonucleotide
ataacaagctcgcacgtactatgcgtgccgaagcttgcccttcctgttctagttacg

SEQ ID NO: 328599 - DNA, 54 bp, Artificial
  Synthetic oligonucleotide
ataacaaggtataccgcacgtcctcgcggactgcttcccagcgggccaaaaagg

SEQ ID NO: 328600 - DNA, 59 bp, Artificial
  Synthetic oligonucleotide
ataacaagtttgctgtaatcacacatggtaagggtcattatagaattgtaaagtattca

SEQ ID NO: 328601 - DNA, 55 bp, Artificial
  Synthetic oligonucleotide
ataacaatacacctcttccacggtacccagataaggctgacaaggagctcattcg

SEQ ID NO: 328602 - DNA, 58 bp, Artificial
  Synthetic oligonucleotide
ataacaatcatggcctccgtgttttcccctgccacacctacaccgctgaagggatgtc

SEQ ID NO: 328603 - DNA, 55 bp, Artificial
  Synthetic oligonucleotide
ataacaattgggaactcagtggacccaaaaatagtagatttgccaagtactgacc

SEQ ID NO: 328604 - DNA, 58 bp, Artificial
  Synthetic oligonucleotide
ataacacacattcagcaaccaacaatacacaaccattgtcaggccatcattgacagtg

SEQ ID NO: 328605 - DNA, 55 bp, Artificial
  Synthetic oligonucleotide
ataacacagttacacacagacaatgggcctaactttacctcccaagaagtggcag

SEQ ID NO: 328606 - DNA, 54 bp, Artificial
  Synthetic oligonucleotide
ataacacataattgcgtgttattgccgataacaaataattcgacatgctttaat

SEQ ID NO: 328607 - DNA, 60 bp, Artificial
  Synthetic oligonucleotide
ataacacatatggggatacttgggcaggagttgaagctctactgagaatattgcaacaac

SEQ ID NO: 328608 - DNA, 60 bp, Artificial
  Synthetic oligonucleotide
ataacacatggtaaaggtcactacagagttgtaaaatattcatcagttgctaatcacgca

SEQ ID NO: 328609 - DNA, 60 bp, Artificial
  Synthetic oligonucleotide
ataacacatgtacttactgctgcactcaaagtacgttattacgatcgatcaaatcttcgc

SEQ ID NO: 328610 - DNA, 58 bp, Artificial
  Synthetic oligonucleotide
ataacaccaaaacatgcctaagagaggacgagttggactcgctgaatcttttcaagga

SEQ ID NO: 328611 - DNA, 60 bp, Artificial
  Synthetic oligonucleotide
ataacaccaaatggaatgaaaatcagaatcctcgaatgtttttagctatgattacataca

SEQ ID NO: 328612 - DNA, 52 bp, Artificial
  Synthetic oligonucleotide
ataacacctcatctcaacatactatgcttggatctctcgtattattatcact

SEQ ID NO: 328613 - DNA, 55 bp, Artificial
  Synthetic oligonucleotide
ataacacggagatattggataagttcggaagggatctcgatgaggtttataagtt

SEQ ID NO: 328614 - DNA, 50 bp, Artificial
  Synthetic oligonucleotide
ataacacggcgctgcgggtaggccgggcgagcacaacacagtcacacgcg

SEQ ID NO: 328615 - DNA, 50 bp, Artificial
  Synthetic oligonucleotide
ataacactctaacaagtgccggatttgctaacttgcaatttagccagcgc

SEQ ID NO: 328616 - DNA, 56 bp, Artificial
  Synthetic oligonucleotide
ataacagaagattcaccccagaaatagcaaaacgacccaaagtaagagatcaagaa

SEQ ID NO: 328617 - DNA, 55 bp, Artificial
  Synthetic oligonucleotide
ataacagacactatcaagagttggagaaccattatattgagaacgcaagactccg

SEQ ID NO: 328618 - DNA, 59 bp, Artificial
  Synthetic oligonucleotide
ataacagcgccagatgcaaaatcgattgcgtacaagtcatcaacgtttcaggtctggtg

SEQ ID NO: 328619 - DNA, 60 bp, Artificial
  Synthetic oligonucleotide
ataacagctaatatgtacttgtatgtcaaatctgatgccgaccattttgattgatctgct

SEQ ID NO: 328620 - DNA, 59 bp, Artificial
  Synthetic oligonucleotide
ataacagctttggagttggcagcgttgtccaaaccagattttaatatctacgctccagc

SEQ ID NO: 328621 - DNA, 60 bp, Artificial
  Synthetic oligonucleotide
ataacaggcatctcatccacaattagtcaccctcgtatactcagaagatgcatcaatttg

SEQ ID NO: 328622 - DNA, 52 bp, Artificial
  Synthetic oligonucleotide
ataacaggccagccagctggcatataatcaatcgctgatagcgccgtagggg

SEQ ID NO: 328623 - DNA, 60 bp, Artificial
  Synthetic oligonucleotide
ataacaggtaggttgaagaagcatgtatgcttcgggactgacctgatagatgttaggctg

SEQ ID NO: 328624 - DNA, 56 bp, Artificial
  Synthetic oligonucleotide
ataacagtaggaagctcgaaataccagcaatcgttcaccccaagtccgggagcacg

SEQ ID NO: 328625 - DNA, 60 bp, Artificial
  Synthetic oligonucleotide
ataacagtgcactcaccaacgccactacttgtgctagtatcaccgaccataaccatatca

SEQ ID NO: 328626 - DNA, 60 bp, Artificial
  Synthetic oligonucleotide
ataacagtgtaggaacataatgtgccattcgtagtctgagacgccgctagcctggtttaa

SEQ ID NO: 328627 - DNA, 57 bp, Artificial
  Synthetic oligonucleotide
ataacagttttttcagtagactgaactggttgtacaaattaggcaacacatatccga

SEQ ID NO: 328628 - DNA, 60 bp, Artificial
  Synthetic oligonucleotide
ataacatacctagctatacttctccaaattccatcataatgacattagattctttaatga

SEQ ID NO: 328629 - DNA, 55 bp, Artificial
  Synthetic oligonucleotide
ataacatagcacctaacagtcagctttatgacttctcagcgtatcagccgtgggc

SEQ ID NO: 328630 - DNA, 60 bp, Artificial
  Synthetic oligonucleotide
ataacatagctatgtgaagagatatgggccgttggatgcctccatcggacgatggaggtt

SEQ ID NO: 328631 - DNA, 56 bp, Artificial
  Synthetic oligonucleotide
ataacatatgtcaaacgtaccagaatttgcgtacgaactattaatcacgtaaccca

SEQ ID NO: 328632 - DNA, 58 bp, Artificial
  Synthetic oligonucleotide
ataacatccatcatcccatggttaggagaaacacctgaagaaacattaagcttgtccc

SEQ ID NO: 328633 - DNA, 55 bp, Artificial
  Synthetic oligonucleotide
ataacatcccctatgtgcttagtgtcaaaacagaaccgattccggctaacagagc

SEQ ID NO: 328634 - DNA, 55 bp, Artificial
  Synthetic oligonucleotide
ataacatcctaattgactatcttgcagactgccaaagtgtgaagatcccgaaacc

SEQ ID NO: 328635 - DNA, 60 bp, Artificial
  Synthetic oligonucleotide
ataacatctacccacaattacacagcggctccagagcctctgaacagcttgaattcgcat

SEQ ID NO: 328636 - DNA, 60 bp, Artificial
  Synthetic oligonucleotide
ataacatgcacaagtatcaccacctgttgacaagtcaaaattcacctatcgattggaatt

SEQ ID NO: 328637 - DNA, 55 bp, Artificial
  Synthetic oligonucleotide
ataacatgggaggcaaatggtcaaaaagtaggcatagctgtgtatggccgcaggt

SEQ ID NO: 328638 - DNA, 58 bp, Artificial
  Synthetic oligonucleotide
ataacatgggatagtggattggcaacttcatttaaattggttccaattgtcaacgctc

SEQ ID NO: 328639 - DNA, 60 bp, Artificial
  Synthetic oligonucleotide
ataacatgtaactcaagcatcacaggactactattgacacgtgatggaggagcaaacaac

SEQ ID NO: 328640 - DNA, 59 bp, Artificial
  Synthetic oligonucleotide
ataacatgtacgtcaaatatcacaggactactattggtacgtgatggaggccgtacaag

SEQ ID NO: 328641 - DNA, 56 bp, Artificial
  Synthetic oligonucleotide
ataacatgtatgcaagagttctggcaactagataattgttatcctcagttatacag

SEQ ID NO: 328642 - DNA, 56 bp, Artificial
  Synthetic oligonucleotide
ataacatgtgcatcaaatatcacaggactactattgacacgtgatggaggagtatc

SEQ ID NO: 328643 - DNA, 60 bp, Artificial
  Synthetic oligonucleotide
ataacattacctattgaacagtcacaagactcatatccattggatggcattccaaactta

SEQ ID NO: 328644 - DNA, 59 bp, Artificial
  Synthetic oligonucleotide
ataacattcagaaggaaagaccggcatcaatttgtatatcaaatacattcccacgagtc

SEQ ID NO: 328645 - DNA, 55 bp, Artificial
  Synthetic oligonucleotide
ataacattcttggagatatgcaaaccaaatgtcatgcttggcactctagtttacc

SEQ ID NO: 328646 - DNA, 60 bp, Artificial
  Synthetic oligonucleotide
ataacattggaggatccataagccagtcatgtcctaaggcaattgagaaccagtggatgg

SEQ ID NO: 328647 - DNA, 55 bp, Artificial
  Synthetic oligonucleotide
ataacatttgacaaaccatatgcagcactgtacccatcagtaggaccggggattt

SEQ ID NO: 328648 - DNA, 51 bp, Artificial
  Synthetic oligonucleotide
ataacattttcagcgtcaaacttctatttggcgttactacctttagcgttt

SEQ ID NO: 328649 - DNA, 60 bp, Artificial
  Synthetic oligonucleotide
ataaccaaggtgccgatggagtgggcaatgcctcgggagattggcattgcgattccacgt

SEQ ID NO: 328650 - DNA, 58 bp, Artificial
  Synthetic oligonucleotide
ataaccaagtggctcttggcggtgcttgggtctagttatctcctaagagacgctctaa

SEQ ID NO: 328651 - DNA, 55 bp, Artificial
  Synthetic oligonucleotide
ataaccaattcgcatcaaaacccattcctagacctgctaaacaggtcttgaaggg

SEQ ID NO: 328652 - DNA, 55 bp, Artificial
  Synthetic oligonucleotide
ataaccaggcagtgatctacgatcggatccaactcctttcgaggtatacggtccg

SEQ ID NO: 328653 - DNA, 60 bp, Artificial
  Synthetic oligonucleotide
ataaccatccatggcagtcaatacctagtccgtcattatttgcatcttccagtgacagtg

SEQ ID NO: 328654 - DNA, 59 bp, Artificial
  Synthetic oligonucleotide
ataaccatccatggcagtcaataccttcgcaggaaaccgttacaacctatgacgtcata

SEQ ID NO: 328655 - DNA, 60 bp, Artificial
  Synthetic oligonucleotide
ataacccagatgacatttacccctgcatctctctacagagtgtcaccctacgttcacata

SEQ ID NO: 328656 - DNA, 59 bp, Artificial
  Synthetic oligonucleotide
ataacccatttgtgaatatcgagatcgcgaaagattttgaaccaacggattagctctgc

SEQ ID NO: 328657 - DNA, 52 bp, Artificial
  Synthetic oligonucleotide
ataaccccatacttcgtgtccgtttgcgataagacggcgggacattccttcg

SEQ ID NO: 328658 - DNA, 55 bp, Artificial
  Synthetic oligonucleotide
ataaccccggaggctgtaagtatgtcagcatgccccatctgagggatatacctca

SEQ ID NO: 328659 - DNA, 51 bp, Artificial
  Synthetic oligonucleotide
ataacccgagtaggagtaggaacccgaatagggtttcgagcggtgtaggac

SEQ ID NO: 328660 - DNA, 55 bp, Artificial
  Synthetic oligonucleotide
ataacccgtcaggatttaagctctataccggatataatggttggcaatggacatc

SEQ ID NO: 328661 - DNA, 55 bp, Artificial
  Synthetic oligonucleotide
ataaccctagctgaacccctgacaaaccaaaccctgatagacatcaacacacccc

SEQ ID NO: 328662 - DNA, 55 bp, Artificial
  Synthetic oligonucleotide
ataaccctcttgcagtaggcaaggcaatagcttttctgtcggcggtagcgtcccg

SEQ ID NO: 328663 - DNA, 55 bp, Artificial
  Synthetic oligonucleotide
ataacccttgaccagacatgtgagcatctaaaagtctcttgtgggcctaagtcga

SEQ ID NO: 328664 - DNA, 59 bp, Artificial
  Synthetic oligonucleotide
ataaccgacccagtggcgttaattggtacttgctgtctatattcgatgacgcaatggtc

SEQ ID NO: 328665 - DNA, 54 bp, Artificial
  Synthetic oligonucleotide
ataaccgacccagttgcgttaaatggaacctggttgcggtattcaattataatg

SEQ ID NO: 328666 - DNA, 56 bp, Artificial
  Synthetic oligonucleotide
ataaccgctaaaacattatgcggggctatcgcgaagttgagttcgcagccgtattg

SEQ ID NO: 328667 - DNA, 58 bp, Artificial
  Synthetic oligonucleotide
ataaccggcacgcctgtagccaggtaaatactggccccagtggcgaagccttcacaca

SEQ ID NO: 328668 - DNA, 59 bp, Artificial
  Synthetic oligonucleotide
ataaccgtaagcgctgcatcttctgtaggtctgggtaattatccggcctcaaagtgtga

SEQ ID NO: 328669 - DNA, 53 bp, Artificial
  Synthetic oligonucleotide
ataaccgtcaaacggtacaatggcaaggatttcctacactgcaagacaagaca

SEQ ID NO: 328670 - DNA, 55 bp, Artificial
  Synthetic oligonucleotide
ataaccgttactaagcatttgaagtttgatatggcccttatgggcagttctgcgt

SEQ ID NO: 328671 - DNA, 60 bp, Artificial
  Synthetic oligonucleotide
ataacctacttgtagcataaacacccacatgcatgaagtgcatagcactctcttatggat

SEQ ID NO: 328672 - DNA, 57 bp, Artificial
  Synthetic oligonucleotide
ataacctatagtgaatcttattcagtcactaatcgaatcataaagcagagtaggtac

SEQ ID NO: 328673 - DNA, 60 bp, Artificial
  Synthetic oligonucleotide
ataacctcaagtgcttactggagcagttcagaacctttcacttcagcaggcataatgcgc

SEQ ID NO: 328674 - DNA, 60 bp, Artificial
  Synthetic oligonucleotide
ataacctcagggtgttggaagacatctaggccagagcagagccatcgcaagggaggattt

SEQ ID NO: 328675 - DNA, 55 bp, Artificial
  Synthetic oligonucleotide
ataacctctatgtacattcgtcgtgtggcgggggacattggttgtggaatcgaca

SEQ ID NO: 328676 - DNA, 60 bp, Artificial
  Synthetic oligonucleotide
ataacctggtatcatgcatttctataatgacatgcccagtggcattaacaggaacctggt

SEQ ID NO: 328677 - DNA, 51 bp, Artificial
  Synthetic oligonucleotide
ataacctgtgtcccctatataaggaattacactgaggccggtatcagtatt

SEQ ID NO: 328678 - DNA, 58 bp, Artificial
  Synthetic oligonucleotide
ataaccttaatcaaatgatgatcatataaagattcccacaaacccttagtagataaca

SEQ ID NO: 328679 - DNA, 54 bp, Artificial
  Synthetic oligonucleotide
ataaccttctaattgtgaatcacctaacctattttgtaattcacgagttaaagc

SEQ ID NO: 328680 - DNA, 52 bp, Artificial
  Synthetic oligonucleotide
ataacctttcgttgcaacaccaattaaacactcaagttattgaaagtcgcgt

SEQ ID NO: 328681 - DNA, 55 bp, Artificial
  Synthetic oligonucleotide
ataacgaacttggtgacttgaaggatgtttttccttctgcggttgacgaaatggc

SEQ ID NO: 328682 - DNA, 57 bp, Artificial
  Synthetic oligonucleotide
ataacgaagcactggcagtctccccgttgacaggaaagaatctcagcccacgccggt

SEQ ID NO: 328683 - DNA, 58 bp, Artificial
  Synthetic oligonucleotide
ataacgaattaagcccacgtttggatgcaatatgtttacagcaaaggcacgacaaggc

SEQ ID NO: 328684 - DNA, 60 bp, Artificial
  Synthetic oligonucleotide
ataacgacactgactgggggtactgatcgacaacacccagcccgctctcacagggccatc

SEQ ID NO: 328685 - DNA, 60 bp, Artificial
  Synthetic oligonucleotide
ataacgacccctgcagtaccaaactgcagtgacactataataacatacaataacactgtg

SEQ ID NO: 328686 - DNA, 60 bp, Artificial
  Synthetic oligonucleotide
ataacgagagtgccgtacttcgtgcgcgctcaagggctcattcgtgcatgcatgttagtg

SEQ ID NO: 328687 - DNA, 54 bp, Artificial
  Synthetic oligonucleotide
ataacgaggctcaaggatagttacaatccgttcttccttagaaccttggtgtcg

SEQ ID NO: 328688 - DNA, 56 bp, Artificial
  Synthetic oligonucleotide
ataacgatactatgacaatcgaaagaaatgacatagaaaaaggttattatccggaa

SEQ ID NO: 328689 - DNA, 57 bp, Artificial
  Synthetic oligonucleotide
ataacgatagtatccctaactagcgtgacggatgagaatgggaccaccactttagtg

SEQ ID NO: 328690 - DNA, 60 bp, Artificial
  Synthetic oligonucleotide
ataacgcaaaactttataagcatgcctacgcacctcactagaagtgccacgttgcaagat

SEQ ID NO: 328691 - DNA, 58 bp, Artificial
  Synthetic oligonucleotide
ataacgccagagccgctgccaagattggagcggaaatgttcgcccccgttgacgtaca

SEQ ID NO: 328692 - DNA, 51 bp, Artificial
  Synthetic oligonucleotide
ataacgcctgagagagcatctaagcggagactgtttaatgatagtggagtt

SEQ ID NO: 328693 - DNA, 57 bp, Artificial
  Synthetic oligonucleotide
ataacgcggattgggttgtggacccgtcgcattctcgcagcggggatggtactggcg

SEQ ID NO: 328694 - DNA, 59 bp, Artificial
  Synthetic oligonucleotide
ataacggaaactgtaatgccaaactatccagacgtaataaacgcatgcataatctggta

SEQ ID NO: 328695 - DNA, 55 bp, Artificial
  Synthetic oligonucleotide
ataacggaatagtattgtcgctggtagacaaatttctagtagacagtacgttccc

SEQ ID NO: 328696 - DNA, 60 bp, Artificial
  Synthetic oligonucleotide
ataacggcagatccaactaccgcaccacaaactgaaagaatgatgcgcataaattggaaa

SEQ ID NO: 328697 - DNA, 54 bp, Artificial
  Synthetic oligonucleotide
ataacggccgagcgggtttcgtagcacgtgcgcctcgcccgtagctaaccgccg

SEQ ID NO: 328698 - DNA, 60 bp, Artificial
  Synthetic oligonucleotide
ataacgggtcaccgcatggcatgggatatgatgatgaactggtcccctacaacggcgctg

SEQ ID NO: 328699 - DNA, 57 bp, Artificial
  Synthetic oligonucleotide
ataacggtaacagtggcccccatgaatgcagagtacaacggcctcaggctgggggta

SEQ ID NO: 328700 - DNA, 55 bp, Artificial
  Synthetic oligonucleotide
ataacggtcgccaactccgttgccaactttcaggtatgtactttgcaagtttcaa

SEQ ID NO: 328701 - DNA, 54 bp, Artificial
  Synthetic oligonucleotide
ataacggtgacgacgagatcgtttggttcaaatcggaacgcgattaccgtctgt

SEQ ID NO: 328702 - DNA, 60 bp, Artificial
  Synthetic oligonucleotide
ataacgtatgtatggatgagatggttagagaatcacaaagaaacggaattgcaccgcagt

SEQ ID NO: 328703 - DNA, 54 bp, Artificial
  Synthetic oligonucleotide
ataacgtctatgaacccgatgctgaactcaagtcccgtatgcacatgaagttta

SEQ ID NO: 328704 - DNA, 60 bp, Artificial
  Synthetic oligonucleotide
ataacgtgctcaacattcgacgattctacatgagcgcaatggccaatcgacaaatgtatc

SEQ ID NO: 328705 - DNA, 55 bp, Artificial
  Synthetic oligonucleotide
ataacgtgttactcatactgcacctaaaaagttaaacctatttggatcacacaaa

SEQ ID NO: 328706 - DNA, 55 bp, Artificial
  Synthetic oligonucleotide
ataacgttcagtaacgttcggttctcatcaatcccgttcgaagcgacacacgaga

SEQ ID NO: 328707 - DNA, 58 bp, Artificial
  Synthetic oligonucleotide
ataacgttgaattctcgaatacacctgattctctggtgttgattaacccaacatatac

SEQ ID NO: 328708 - DNA, 55 bp, Artificial
  Synthetic oligonucleotide
ataacgttgatctagaccctgcgtattctcgtgtaattattgcttcacagagttt

SEQ ID NO: 328709 - DNA, 56 bp, Artificial
  Synthetic oligonucleotide
ataacgttttatagaacgcataaaaaacattatggatttataacactaacacatca

SEQ ID NO: 328710 - DNA, 60 bp, Artificial
  Synthetic oligonucleotide
ataactaaaatgccatactttgtgcgtgcccaggggctcattcgtgcgtgcatgttggtg

SEQ ID NO: 328711 - DNA, 59 bp, Artificial
  Synthetic oligonucleotide
ataactaacaatgaacgtcttcggatctccagcctttataattgcgagagcctcttcca

SEQ ID NO: 328712 - DNA, 53 bp, Artificial
  Synthetic oligonucleotide
ataactagcgccacttcttggtctaaatatcatccagagtcgtactaacccct

SEQ ID NO: 328713 - DNA, 60 bp, Artificial
  Synthetic oligonucleotide
ataactatcccaaataccaggctgaaagcagattaaacaggcagacaatagaatcggtga

SEQ ID NO: 328714 - DNA, 60 bp, Artificial
  Synthetic oligonucleotide
ataactatggtatgcccgttcgttcattatcaaaactgattggtcaactagcatatccag

SEQ ID NO: 328715 - DNA, 53 bp, Artificial
  Synthetic oligonucleotide
ataactattctatatacgggccaacattagaacgtagaactaaaaaacaacta

SEQ ID NO: 328716 - DNA, 58 bp, Artificial
  Synthetic oligonucleotide
ataactcaagaggcatgaactatgagacacctatgtttaataaggtggctattttaat

SEQ ID NO: 328717 - DNA, 60 bp, Artificial
  Synthetic oligonucleotide
ataactcacccagagctcttcaacaaggactaaaactgctgacatgaagattgctgacac

SEQ ID NO: 328718 - DNA, 59 bp, Artificial
  Synthetic oligonucleotide
ataactcatggaatggccccgacccagtgttaatatggggcagaggttcagtctgtgta

SEQ ID NO: 328719 - DNA, 52 bp, Artificial
  Synthetic oligonucleotide
ataactccgctgaccattggtttgggcattggactggtcattcacttcttga

SEQ ID NO: 328720 - DNA, 56 bp, Artificial
  Synthetic oligonucleotide
ataactctaccgagacggtcgacacaattctagagcggaatgtcactgtgacccat

SEQ ID NO: 328721 - DNA, 59 bp, Artificial
  Synthetic oligonucleotide
ataactctagatcagacctgtgaacacctcaaagtttcctgcggcccaaaatcagtaca

SEQ ID NO: 328722 - DNA, 60 bp, Artificial
  Synthetic oligonucleotide
ataactgaggatacggctcgtacggccagcctggcattagagatcgacgccgctacagag

SEQ ID NO: 328723 - DNA, 59 bp, Artificial
  Synthetic oligonucleotide
ataactgaggcgtcggagaagttcataccaaaccgtgcgtatagattaatagatggaga

SEQ ID NO: 328724 - DNA, 60 bp, Artificial
  Synthetic oligonucleotide
ataactgatccaaagacatgcaacgcaagcaagatacccttagtgctcaaagctgctgag

SEQ ID NO: 328725 - DNA, 59 bp, Artificial
  Synthetic oligonucleotide
ataactgcatggagattcctgttaagaattttggagtctccctactgcacaaggaatct

SEQ ID NO: 328726 - DNA, 53 bp, Artificial
  Synthetic oligonucleotide
ataactggaagtcctggcgctccgggagtgaagggattcgggtttctaaatgg

SEQ ID NO: 328727 - DNA, 57 bp, Artificial
  Synthetic oligonucleotide
ataactggacccctctccaggattgcacaccacgattgatgggattccacctttaat

SEQ ID NO: 328728 - DNA, 55 bp, Artificial
  Synthetic oligonucleotide
ataactggagtctcccagtagccaacgctgcaacaggatccatgctggtcctatc

SEQ ID NO: 328729 - DNA, 60 bp, Artificial
  Synthetic oligonucleotide
ataactgtcgtcacaccaacaagactgtgttatacaaattcatgtctaagaacacagtgt

SEQ ID NO: 328730 - DNA, 60 bp, Artificial
  Synthetic oligonucleotide
ataacttactcgtcatcaatgatgtgggaaattaatggtcctgagtcagtgttggtcaat

SEQ ID NO: 328731 - DNA, 60 bp, Artificial
  Synthetic oligonucleotide
ataacttcatcatacccagtgtacgatttattcgttatatcagcaatcaaatctcgcaac

SEQ ID NO: 328732 - DNA, 60 bp, Artificial
  Synthetic oligonucleotide
ataacttcggttgatggatggttgacagtttggcagctcacccctctgacttatcctgct

SEQ ID NO: 328733 - DNA, 54 bp, Artificial
  Synthetic oligonucleotide
ataacttgaccgctgggcgagtgtaccggcgagtagtcgggcgaacgtggagtt

SEQ ID NO: 328734 - DNA, 57 bp, Artificial
  Synthetic oligonucleotide
ataacttgcattgggccctggattgcagaggaagattgttggtattccgcctttaat

SEQ ID NO: 328735 - DNA, 55 bp, Artificial
  Synthetic oligonucleotide
ataacttgcgccgaggtttaattgagcgtgtctactatgtcgaatccaatggtgt

SEQ ID NO: 328736 - DNA, 55 bp, Artificial
  Synthetic oligonucleotide
ataacttgggtcttaaataccctcaagaaacgaccagtcggaggctgtgaggtca

SEQ ID NO: 328737 - DNA, 52 bp, Artificial
  Synthetic oligonucleotide
ataactttcatcggtgcagccatggacctctccgcgtcgccttttgtggcct

SEQ ID NO: 328738 - DNA, 60 bp, Artificial
  Synthetic oligonucleotide
ataacttttgcgacaatgataacaccaggggagattctggatggtagatcgcatttttca

SEQ ID NO: 328739 - DNA, 60 bp, Artificial
  Synthetic oligonucleotide
ataagaaagagctcataatcagaactgacagtcaagcaatagtgagcttttacaagaaaa

SEQ ID NO: 328740 - DNA, 60 bp, Artificial
  Synthetic oligonucleotide
ataagaaagcatagtttgagtgccaggcaacaattgcacgtcacaattgcgtctatgtgc

SEQ ID NO: 328741 - DNA, 60 bp, Artificial
  Synthetic oligonucleotide
ataagaacaaagtgcatacttctgctgaggctcaagggatgacggaaaggaatgtggctt

SEQ ID NO: 328742 - DNA, 60 bp, Artificial
  Synthetic oligonucleotide
ataagaacatttccaaaaatgctattgtactgagctatgcatttatatcaatgcatagcc

SEQ ID NO: 328743 - DNA, 54 bp, Artificial
  Synthetic oligonucleotide
ataagaacggactaacgtaagtttgtggcggagcctggaagattcgatccgcgt

SEQ ID NO: 328744 - DNA, 60 bp, Artificial
  Synthetic oligonucleotide
ataagaagctcacaattgattttgatctagacacaagtaaggaaccaacagcaatgcatt

SEQ ID NO: 328745 - DNA, 54 bp, Artificial
  Synthetic oligonucleotide
ataagaatctgctggtccgacatctatctcttgggtatccttattgactacggg

SEQ ID NO: 328746 - DNA, 58 bp, Artificial
  Synthetic oligonucleotide
ataagaatgatggaaagcgccagaccagaagatgtgtctttccaggggcggggagtct

SEQ ID NO: 328747 - DNA, 57 bp, Artificial
  Synthetic oligonucleotide
ataagacaagcatattgtagcattagtaaagagaaatggaacaaaaccctagaacag

SEQ ID NO: 328748 - DNA, 55 bp, Artificial
  Synthetic oligonucleotide
ataagacagtcttaccagtcaccattatgtcagggttggtcttccattcgcaacc

SEQ ID NO: 328749 - DNA, 60 bp, Artificial
  Synthetic oligonucleotide
ataagacattcagtggaaagggaccatgcaataatgtcagcacagtacaatgtactcatg

SEQ ID NO: 328750 - DNA, 55 bp, Artificial
  Synthetic oligonucleotide
ataagacatttgcagataatgtagatataactgctgaggggtcatgcactggatg

SEQ ID NO: 328751 - DNA, 57 bp, Artificial
  Synthetic oligonucleotide
ataagaccaatggtgatataaagaccacacctaatctccactttcggtgtgtgaccc

SEQ ID NO: 328752 - DNA, 57 bp, Artificial
  Synthetic oligonucleotide
ataagaccatcgagacccacctccttctcgatgtctggcccaactacgctcggggtc

SEQ ID NO: 328753 - DNA, 58 bp, Artificial
  Synthetic oligonucleotide
ataagacccgactttaactccagtgcagacctactgtgccccactgattgtttcagga

SEQ ID NO: 328754 - DNA, 60 bp, Artificial
  Synthetic oligonucleotide
ataagaccgtgactgcagcatacatattgcactacctgatacctaaaaaacaacctgagc

SEQ ID NO: 328755 - DNA, 59 bp, Artificial
  Synthetic oligonucleotide
ataagacgccgtataggagtccgtatggcgctcgtggaacaccatatgtgaatcgtaaa

SEQ ID NO: 328756 - DNA, 55 bp, Artificial
  Synthetic oligonucleotide
ataagacgggggcgacgcaaaaagaaactcatactgactcagtggaacccggcaa

SEQ ID NO: 328757 - DNA, 56 bp, Artificial
  Synthetic oligonucleotide
ataagactctaaatcaataccccgctttgaccgctgaaatcttcaacgtttatagc

SEQ ID NO: 328758 - DNA, 59 bp, Artificial
  Synthetic oligonucleotide
ataagactgcggtgcgacatgcagcactgtaccagagatccttctttcactggagtttc

SEQ ID NO: 328759 - DNA, 57 bp, Artificial
  Synthetic oligonucleotide
ataagagaacctagaggaagtgacatagcaggaactactagtacccttcaggaacaa

SEQ ID NO: 328760 - DNA, 51 bp, Artificial
  Synthetic oligonucleotide
ataagagacagctcccaagatcttggggaaaaccctttctccaagttaagg

SEQ ID NO: 328761 - DNA, 60 bp, Artificial
  Synthetic oligonucleotide
ataagagagggaaagattgtacacattagcccattgtcaggaagtgctcagcatgtggag

SEQ ID NO: 328762 - DNA, 60 bp, Artificial
  Synthetic oligonucleotide
ataagagataaggtgcggaaagaatatgcacttttttatagacttgatgtggcaccaatg

SEQ ID NO: 328763 - DNA, 55 bp, Artificial
  Synthetic oligonucleotide
ataagaggaagaccgcaggaggctagggtatggtggacctcaaatagtattgtcg

SEQ ID NO: 328764 - DNA, 56 bp, Artificial
  Synthetic oligonucleotide
ataagaggaaggccagaagaagccaaatacgtttggtggacgagcaacagcttagt

SEQ ID NO: 328765 - DNA, 51 bp, Artificial
  Synthetic oligonucleotide
ataagaggtaagctacctcccagcattatggcaagcctcacagactttgca

SEQ ID NO: 328766 - DNA, 58 bp, Artificial
  Synthetic oligonucleotide
ataagaggtcaattcagcgtggaatattgttgttatcaaatagacttggtcaactagt

SEQ ID NO: 328767 - DNA, 56 bp, Artificial
  Synthetic oligonucleotide
ataagaggtgattacgaaagttcgtctgagttgaaatcccttcgagatttgaatcc

SEQ ID NO: 328768 - DNA, 53 bp, Artificial
  Synthetic oligonucleotide
ataagagttgtaacccctaaaggggtaagaattcgagcgacgcacgatgaaaa

SEQ ID NO: 328769 - DNA, 53 bp, Artificial
  Synthetic oligonucleotide
ataagatagtgaccacgacagatgcaccaaaggtccctcaccagataaattta

SEQ ID NO: 328770 - DNA, 59 bp, Artificial
  Synthetic oligonucleotide
ataagatcatgactaggcccagtcaccagtatttggtcataaaactaatgcctaatgtt

SEQ ID NO: 328771 - DNA, 52 bp, Artificial
  Synthetic oligonucleotide
ataagatcgaaattcaagatatagtttctaatattccggatcttggtattca

SEQ ID NO: 328772 - DNA, 53 bp, Artificial
  Synthetic oligonucleotide
ataagatctaccttcgcccggaagtaaaacggtaaatacacatagatttgccc

SEQ ID NO: 328773 - DNA, 58 bp, Artificial
  Synthetic oligonucleotide
ataagatcttctctattcgaacagatgttgcttcccaacctttagctactactttgat

SEQ ID NO: 328774 - DNA, 52 bp, Artificial
  Synthetic oligonucleotide
ataagatgactcagtaagctttggtgaagtacggattaagcaaggttcaagc

SEQ ID NO: 328775 - DNA, 60 bp, Artificial
  Synthetic oligonucleotide
ataagatgatcgagcatacactacgttctagctcagcggtcagagagttttttttgtgcc

SEQ ID NO: 328776 - DNA, 55 bp, Artificial
  Synthetic oligonucleotide
ataagatggaaaattataagagaatcgcctaaatgcgctccgtatcaggggcgta

SEQ ID NO: 328777 - DNA, 58 bp, Artificial
  Synthetic oligonucleotide
ataagatggagtttgaaccgttccaatccttggtgcctaaagctgccagaggtcaaga

SEQ ID NO: 328778 - DNA, 58 bp, Artificial
  Synthetic oligonucleotide
ataagatgggtggcaagtggtcaaaaagtagtagaaatggatggtctgctgtaaggga

SEQ ID NO: 328779 - DNA, 55 bp, Artificial
  Synthetic oligonucleotide
ataagatgtgtgggcaaacgcttaatttttctgggccgggcttctgcaaaccaac

SEQ ID NO: 328780 - DNA, 60 bp, Artificial
  Synthetic oligonucleotide
ataagattgtagcggtagtgtgttatcgagtgtttagcgaaaagatatggttgagcgctg

SEQ ID NO: 328781 - DNA, 55 bp, Artificial
  Synthetic oligonucleotide
ataagcaaatgtagaaccaaagagggaagacgaaagaccaatttgtacggattca

SEQ ID NO: 328782 - DNA, 60 bp, Artificial
  Synthetic oligonucleotide
ataagcaaattctgtgcatcacacaacatacggacgacctcgtacgcccacctaatctct

SEQ ID NO: 328783 - DNA, 55 bp, Artificial
  Synthetic oligonucleotide
ataagcaacccgaaagagtagtttgagcgggttcttgtattccgtgtgataactg

SEQ ID NO: 328784 - DNA, 60 bp, Artificial
  Synthetic oligonucleotide
ataagcactacttggagctgggttgacacaacgagcacatgcaggctaggtagcgggcgc

SEQ ID NO: 328785 - DNA, 60 bp, Artificial
  Synthetic oligonucleotide
ataagcactatgtcagctggtgcttgtggtggctccagtacctcctgaccagagtagaag

SEQ ID NO: 328786 - DNA, 58 bp, Artificial
  Synthetic oligonucleotide
ataagcatctattggacaatagtaaaaccgggagacatactgttgattaatagcaccg

SEQ ID NO: 328787 - DNA, 60 bp, Artificial
  Synthetic oligonucleotide
ataagccagaacaggtcgatctctcaaacaccagagccacgagggagcagtttgacaatt

SEQ ID NO: 328788 - DNA, 60 bp, Artificial
  Synthetic oligonucleotide
ataagccagtgtactgatcactttccgtggcagacgaaccaccaacacatattacacaat

SEQ ID NO: 328789 - DNA, 53 bp, Artificial
  Synthetic oligonucleotide
ataagcccatatcgagacatacaaggctattagtggccacgtgtatttgttcg

SEQ ID NO: 328790 - DNA, 50 bp, Artificial
  Synthetic oligonucleotide
ataagccgccgagctctcgcttgtgagatagcgctgggcacccaaccgct

SEQ ID NO: 328791 - DNA, 60 bp, Artificial
  Synthetic oligonucleotide
ataagccgcttgctagctggggaaaagcagagtgctttggagagctcgaaggaaagagtc

SEQ ID NO: 328792 - DNA, 56 bp, Artificial
  Synthetic oligonucleotide
ataagcctcgcgatgcgtcatacatctttactaatgacaacgtggttaacggtgaa

SEQ ID NO: 328793 - DNA, 55 bp, Artificial
  Synthetic oligonucleotide
ataagcctctataggcttaatagacacgtgtaggccatccgtataatattaccgg

SEQ ID NO: 328794 - DNA, 60 bp, Artificial
  Synthetic oligonucleotide
ataagcgagtgcgcgccctgttcgattacgtagagcgtgatcgcgctgccatctgcgaag

SEQ ID NO: 328795 - DNA, 60 bp, Artificial
  Synthetic oligonucleotide
ataagcgattttctatccacttgtgtcacagtcgatagcatttcattaatggaccccctg

SEQ ID NO: 328796 - DNA, 58 bp, Artificial
  Synthetic oligonucleotide
ataagcgcttcgtcggttgagattttagaacctgtggatggtacgcaagaggctacta

SEQ ID NO: 328797 - DNA, 59 bp, Artificial
  Synthetic oligonucleotide
ataagcggcgtaaacaggcgtataaggtagtacctgtgaagcctccagctctctgcgta

SEQ ID NO: 328798 - DNA, 51 bp, Artificial
  Synthetic oligonucleotide
ataagctaggtaaggggacagaacactgcagaagctttaatttggccgcca

SEQ ID NO: 328799 - DNA, 51 bp, Artificial
  Synthetic oligonucleotide
ataagctcatggggggttcgacaatagacttccagcatattccaaccggaa

SEQ ID NO: 328800 - DNA, 59 bp, Artificial
  Synthetic oligonucleotide
ataagctctctttgtgtctccggtgatgccttccaataggtgagtaataaagcgaggta

SEQ ID NO: 328801 - DNA, 56 bp, Artificial
  Synthetic oligonucleotide
ataagctgctcacgcagtcttcattagttggacgagctttagtcggtgtgcgtagc

SEQ ID NO: 328802 - DNA, 52 bp, Artificial
  Synthetic oligonucleotide
ataagcttctccaaattcatgtctctttgcaaggatacaatcaacctggaac

SEQ ID NO: 328803 - DNA, 60 bp, Artificial
  Synthetic oligonucleotide
ataaggaaatgagatccctattgagaagtcgtgcctcaatagatgtagctgcaaaaacac

SEQ ID NO: 328804 - DNA, 57 bp, Artificial
  Synthetic oligonucleotide
ataaggaacctcttcagtaatccttgagcacagacctcctaaaataccagaaataca

SEQ ID NO: 328805 - DNA, 57 bp, Artificial
  Synthetic oligonucleotide
ataaggaccaatcaggtttccgtgcttgggcgccaagaatggagcatttgtgggacc

SEQ ID NO: 328806 - DNA, 51 bp, Artificial
  Synthetic oligonucleotide
ataaggaccaatcaggtttccgtgcttgggcgggaacgtttgtctgtgtct

SEQ ID NO: 328807 - DNA, 56 bp, Artificial
  Synthetic oligonucleotide
ataaggaggccatgtattcaggttgcaagcatgcaccacaacgcaagcttactcct

SEQ ID NO: 328808 - DNA, 60 bp, Artificial
  Synthetic oligonucleotide
ataaggagttccgccggatatgcaaatgagcaatcgcgcaaagcattttgggtagtcacc

SEQ ID NO: 328809 - DNA, 59 bp, Artificial
  Synthetic oligonucleotide
ataaggatgtatgtggggggggttgagcacaggctcacggccgcgtgcaatttctctcg

SEQ ID NO: 328810 - DNA, 57 bp, Artificial
  Synthetic oligonucleotide
ataaggcagcgtgcccgctgtgccgcttacggggcttgggataagctcccccgtctg

SEQ ID NO: 328811 - DNA, 55 bp, Artificial
  Synthetic oligonucleotide
ataaggcatggctaaaacggaaaataggactcgtccttcatgtgagagcgcctac

SEQ ID NO: 328812 - DNA, 53 bp, Artificial
  Synthetic oligonucleotide
ataaggcccaattggctaggcccaatttggaaagcggccatccgtataatatt

SEQ ID NO: 328813 - DNA, 53 bp, Artificial
  Synthetic oligonucleotide
ataaggccttattggatgactggaattttggtgtggtgcctcctccttctacc

SEQ ID NO: 328814 - DNA, 54 bp, Artificial
  Synthetic oligonucleotide
ataaggccttgtttttgggtagagttaataagaggacaacccaaggagagcaca

SEQ ID NO: 328815 - DNA, 60 bp, Artificial
  Synthetic oligonucleotide
ataaggcgataacatgtgaagccaacatgccaacactcgtcgaccaaggcttttggatcg

SEQ ID NO: 328816 - DNA, 57 bp, Artificial
  Synthetic oligonucleotide
ataaggcgccctttggagcttcattaaatcagtggtcccactatgttggttataaca

SEQ ID NO: 328817 - DNA, 60 bp, Artificial
  Synthetic oligonucleotide
ataaggcttgatatggttgacaaggagttacttgacaaacagcacttatacctcaagaga

SEQ ID NO: 328818 - DNA, 55 bp, Artificial
  Synthetic oligonucleotide
ataagggaaccttttattgcttgtggaccaaaggagtgcaaacactttgctctaa

SEQ ID NO: 328819 - DNA, 56 bp, Artificial
  Synthetic oligonucleotide
ataagggagtcagccaagtagataagttggtgagaacgtacgacagtttgctaatg

SEQ ID NO: 328820 - DNA, 56 bp, Artificial
  Synthetic oligonucleotide
ataaggggacaaaactctcttgtcaatgatctagccaagcgtaaactttacgacac

SEQ ID NO: 328821 - DNA, 60 bp, Artificial
  Synthetic oligonucleotide
ataaggggacaagaatccggttcaaggatgacagctcatatgaagagatcaatggcatta

SEQ ID NO: 328822 - DNA, 53 bp, Artificial
  Synthetic oligonucleotide
ataagggggctacctgtttcggctaggttgggcaatgagatcttgctcgggcc

SEQ ID NO: 328823 - DNA, 55 bp, Artificial
  Synthetic oligonucleotide
ataaggggtcttctaagtctgccagaaaggatgaagggcctttagtttcacttgc

SEQ ID NO: 328824 - DNA, 59 bp, Artificial
  Synthetic oligonucleotide
ataagggtaattcacaggcaatggtgcacgtaggtggtatgggcggggctatgatggcc

SEQ ID NO: 328825 - DNA, 54 bp, Artificial
  Synthetic oligonucleotide
ataagggtctcattatatatgttaaaggcgcgcgtgccattatgcttctcaccg

SEQ ID NO: 328826 - DNA, 56 bp, Artificial
  Synthetic oligonucleotide
ataagggtgggttcacgtggtgccggtcggcagcggtgtcgtatctgaatgttggt

SEQ ID NO: 328827 - DNA, 55 bp, Artificial
  Synthetic oligonucleotide
ataagggtgtttaggtaattgtgtacacccttgaatgattaaagcggcactcgta

SEQ ID NO: 328828 - DNA, 60 bp, Artificial
  Synthetic oligonucleotide
ataaggtaagagcagtatctcgagacttggagagacatagagcaatcacaagtagcaata

SEQ ID NO: 328829 - DNA, 55 bp, Artificial
  Synthetic oligonucleotide
ataaggtcgagatgtgctacaatcaagctttgggcaaagtgaatgtactatcccc

SEQ ID NO: 328830 - DNA, 52 bp, Artificial
  Synthetic oligonucleotide
ataaggtcggctatacgacgtttgtagggggtagtgcctaacaacccctgag

SEQ ID NO: 328831 - DNA, 55 bp, Artificial
  Synthetic oligonucleotide
ataaggtctctcacagagaggctttacatcgggggcccacttaccaattctaagg

SEQ ID NO: 328832 - DNA, 60 bp, Artificial
  Synthetic oligonucleotide
ataaggtcttctggatcatctactttgtatctatcttgaatccttcttaactggtcatta

SEQ ID NO: 328833 - DNA, 60 bp, Artificial
  Synthetic oligonucleotide
ataaggtgaatgcaattgaatttgtatgtcttggttggtcatggccaattgaacataatt

SEQ ID NO: 328834 - DNA, 51 bp, Artificial
  Synthetic oligonucleotide
ataaggtgacacaaagagatatctttgcgaaagtaaggcaacttatatcta

SEQ ID NO: 328835 - DNA, 53 bp, Artificial
  Synthetic oligonucleotide
ataaggtgcctgttgggttgagctttgacgcctgggaacgtaaccaccggccc

SEQ ID NO: 328836 - DNA, 60 bp, Artificial
  Synthetic oligonucleotide
ataaggtgtatcgttatctccgcacactgaaaaaaccagacgcacaatcagccatggcta

SEQ ID NO: 328837 - DNA, 54 bp, Artificial
  Synthetic oligonucleotide
ataaggtttgaattggcaggaagagttgttggaaacgccaacaaacttggaaca

SEQ ID NO: 328838 - DNA, 60 bp, Artificial
  Synthetic oligonucleotide
ataagtacagaaatgttcccattactaagcgtgcttgggcacagggagacatgcctatca

SEQ ID NO: 328839 - DNA, 55 bp, Artificial
  Synthetic oligonucleotide
ataagtacctcaaatcaggaggtgtcagacagcggaacactgaagtgctcttcag

SEQ ID NO: 328840 - DNA, 54 bp, Artificial
  Synthetic oligonucleotide
ataagtacgaaccagttggggtttattgaccctacttgtaatgtacatgttgta

SEQ ID NO: 328841 - DNA, 55 bp, Artificial
  Synthetic oligonucleotide
ataagtagtctacatctcagtgttagaggccatactgagtatagagctgtgtcat

SEQ ID NO: 328842 - DNA, 55 bp, Artificial
  Synthetic oligonucleotide
ataagtataatgtcacgtgccgaattaaaaggttgcttcgccacgaagaaaccta

SEQ ID NO: 328843 - DNA, 58 bp, Artificial
  Synthetic oligonucleotide
ataagtatatgactaatatgtactttcgtgagcgtgacgaaaccaataggggtataga

SEQ ID NO: 328844 - DNA, 60 bp, Artificial
  Synthetic oligonucleotide
ataagtccattaatatgcaggtacaagcaacatttgtcacccctgaagctgcgggtactg

SEQ ID NO: 328845 - DNA, 56 bp, Artificial
  Synthetic oligonucleotide
ataagtcctctagaggcttgcgattgtggctgcccaaccccccagtattcccccca

SEQ ID NO: 328846 - DNA, 59 bp, Artificial
  Synthetic oligonucleotide
ataagtcgacccagaagctgtgatcgatgtcgtccagacttggaagttcaggtaggctt

SEQ ID NO: 328847 - DNA, 53 bp, Artificial
  Synthetic oligonucleotide
ataagtcgggtttatttgtaaattatccctagggacctccgagcatagcggga

SEQ ID NO: 328848 - DNA, 57 bp, Artificial
  Synthetic oligonucleotide
ataagtcgtttagagcaggaatggcgcgcactaagcttgtgggaaaaatcctcttta

SEQ ID NO: 328849 - DNA, 58 bp, Artificial
  Synthetic oligonucleotide
ataagtctagctagacttcacttaacttaataaaagactcaacttaatctagatcaca

SEQ ID NO: 328850 - DNA, 53 bp, Artificial
  Synthetic oligonucleotide
ataagtcttcgaacatactgccgcctggcgtatactcaggcccatacaacgtg

SEQ ID NO: 328851 - DNA, 58 bp, Artificial
  Synthetic oligonucleotide
ataagtcttctccaaaccatgcacagtagcatttgtaacaaaagcattctccccaaac

SEQ ID NO: 328852 - DNA, 51 bp, Artificial
  Synthetic oligonucleotide
ataagtgctactgtggcctactgtgctgtccttactgtagggcttgctcaa

SEQ ID NO: 328853 - DNA, 51 bp, Artificial
  Synthetic oligonucleotide
ataagtggagattatgtccaggggttcatgagttatgcagtgccctattac

SEQ ID NO: 328854 - DNA, 55 bp, Artificial
  Synthetic oligonucleotide
ataagtggagctgcagagttggacagaacagaagagtatgccctcggtgtagttg

SEQ ID NO: 328855 - DNA, 60 bp, Artificial
  Synthetic oligonucleotide
ataagtgtacagactattcccacctcgaatgcaactgctgggcagacaaattcagaatgc

SEQ ID NO: 328856 - DNA, 60 bp, Artificial
  Synthetic oligonucleotide
ataagtgtccatttgctcgttcacgttgtctcgtattcttcgcagcatcagcaagcttcc

SEQ ID NO: 328857 - DNA, 56 bp, Artificial
  Synthetic oligonucleotide
ataagttaaatcagattagaaatgaaatggttccgggagattcaattggcaggatt

SEQ ID NO: 328858 - DNA, 52 bp, Artificial
  Synthetic oligonucleotide
ataagttcagaagtgcacatcccactaggggatactggtgctaaattggtaa

SEQ ID NO: 328859 - DNA, 59 bp, Artificial
  Synthetic oligonucleotide
ataagttgcaaatggcttgtgagttggaccgcgattatctggacgctagaggtgtttct

SEQ ID NO: 328860 - DNA, 57 bp, Artificial
  Synthetic oligonucleotide
ataagttgcaggccatagccgacacagccccactcaccttgaattgtgatcggattg

SEQ ID NO: 328861 - DNA, 60 bp, Artificial
  Synthetic oligonucleotide
ataagttgcgtgattcatccatgcaattgtgcaaggaagcgataccaaatagtggagtga

SEQ ID NO: 328862 - DNA, 54 bp, Artificial
  Synthetic oligonucleotide
ataagttgggaaatggggcaagcaccaagtccatataacgtcagagtagagtgc

SEQ ID NO: 328863 - DNA, 58 bp, Artificial
  Synthetic oligonucleotide
ataagttgggaaatggggcaagcaccgagcccatacaatatcagggtagaatgtgtgg

SEQ ID NO: 328864 - DNA, 50 bp, Artificial
  Synthetic oligonucleotide
ataagttgtttgccggtttccagggagcatattctggtgcccccaagcaa

SEQ ID NO: 328865 - DNA, 60 bp, Artificial
  Synthetic oligonucleotide
ataagtttacttgatacaacagcaatagcagtagctaattggacagatagagttatagaa

SEQ ID NO: 328866 - DNA, 55 bp, Artificial
  Synthetic oligonucleotide
ataagtttccacgtcgaagccccagatgatgggcgtttctttctgataggacccg

SEQ ID NO: 328867 - DNA, 60 bp, Artificial
  Synthetic oligonucleotide
ataagtttgttgttgcactgtattcattgtcgaatgagaataatgatagggataaagtaa

SEQ ID NO: 328868 - DNA, 51 bp, Artificial
  Synthetic oligonucleotide
ataagttttcgtctgacttggatcagttccccctcgggcgaaagtttattt

SEQ ID NO: 328869 - DNA, 58 bp, Artificial
  Synthetic oligonucleotide
ataataaacgacgaccatttcaaactgcgaaaacagttgatgagtctatggtcaaggc

SEQ ID NO: 328870 - DNA, 55 bp, Artificial
  Synthetic oligonucleotide
ataataaagtaggtgacgattcggttgaagttttgagagtggtggacggctcacc

SEQ ID NO: 328871 - DNA, 60 bp, Artificial
  Synthetic oligonucleotide
ataataaatcggtatgctcaaatggcagttcagcaatacctgcgagttgggtacgtcgaa

SEQ ID NO: 328872 - DNA, 54 bp, Artificial
  Synthetic oligonucleotide
ataataaccagactaggacaatcaacggcgcacaaaactatacgtgttgaggat

SEQ ID NO: 328873 - DNA, 58 bp, Artificial
  Synthetic oligonucleotide
ataataaccattgggacaatctgtctaatagttggaataattagtttattattgcaga

SEQ ID NO: 328874 - DNA, 56 bp, Artificial
  Synthetic oligonucleotide
ataataacgttaccgccacgcaatctgtgcaaacgtggaagcagggatttctgacg

SEQ ID NO: 328875 - DNA, 59 bp, Artificial
  Synthetic oligonucleotide
ataataagaatgagagtaacagtgaatatagattaataaattgtaatacctcaaccata

SEQ ID NO: 328876 - DNA, 51 bp, Artificial
  Synthetic oligonucleotide
ataataagggtaggcgagctacccgaaatttcgcattatagataggttagt

SEQ ID NO: 328877 - DNA, 60 bp, Artificial
  Synthetic oligonucleotide
ataataatatagccgcgttttcagttgatcctcagctttattgtgactataacatcgtaa

SEQ ID NO: 328878 - DNA, 56 bp, Artificial
  Synthetic oligonucleotide
ataataatgaagaagagggctgttttcatggtgaaaatacggtggtatataaccat

SEQ ID NO: 328879 - DNA, 60 bp, Artificial
  Synthetic oligonucleotide
ataataatgacacccaacccaccatgcgcctcctttgcatgttgtacactcctctccgca

SEQ ID NO: 328880 - DNA, 56 bp, Artificial
  Synthetic oligonucleotide
ataatacagtggcagttctctactttgtacatcaaagagtagatgtaaaggatacc

SEQ ID NO: 328881 - DNA, 60 bp, Artificial
  Synthetic oligonucleotide
ataatacattctcaaaactgttgttgcccggattgttcttggcagccatcatgtacgcat

SEQ ID NO: 328882 - DNA, 50 bp, Artificial
  Synthetic oligonucleotide
ataataccaccttcagacagatggctgtccctggtgtctacagcccatgt

SEQ ID NO: 328883 - DNA, 60 bp, Artificial
  Synthetic oligonucleotide
ataatacccacagtaataatgctacccacaataatgctacccacaataatgctacccaca

SEQ ID NO: 328884 - DNA, 55 bp, Artificial
  Synthetic oligonucleotide
ataataccctttgctagaacactaaatcgaatgtacggatatcctcatctcttcg

SEQ ID NO: 328885 - DNA, 55 bp, Artificial
  Synthetic oligonucleotide
ataatacctgggtcaataagacgtatttgaacatcagcgtcacgaatttggctgt

SEQ ID NO: 328886 - DNA, 55 bp, Artificial
  Synthetic oligonucleotide
ataatactaccatagagaaagaactttgtcctaaactggtagaatacaggagttg

SEQ ID NO: 328887 - DNA, 55 bp, Artificial
  Synthetic oligonucleotide
ataatactaccgccagtgaccagattttaattgagaatgcagctggtcaccgtgt

SEQ ID NO: 328888 - DNA, 54 bp, Artificial
  Synthetic oligonucleotide
ataatactagtaaaataatctttagtagctcctcaggaggggacccagaaattg

SEQ ID NO: 328889 - DNA, 60 bp, Artificial
  Synthetic oligonucleotide
ataatactgaattgagccagaataggagactaacaatcctggcaacacaagaactattaa

SEQ ID NO: 328890 - DNA, 52 bp, Artificial
  Synthetic oligonucleotide
ataatactgtcaatcgtaccgtcgtttaaccaacctctaaataagtctttcg

SEQ ID NO: 328891 - DNA, 60 bp, Artificial
  Synthetic oligonucleotide
ataatagcacagatggagggttattagtaattatatgccgacagaatagtacaataacag

SEQ ID NO: 328892 - DNA, 55 bp, Artificial
  Synthetic oligonucleotide
ataatagcagcgttagtggaactagtaaccttggctacaaaatgctcttccagaa

SEQ ID NO: 328893 - DNA, 51 bp, Artificial
  Synthetic oligonucleotide
ataatagccacactgaccttacttggttgttctggttcaccatggaggttc

SEQ ID NO: 328894 - DNA, 55 bp, Artificial
  Synthetic oligonucleotide
ataatagcgctctttctgggtttcaccctcacgggggtcccaatcgtgggcagtc

SEQ ID NO: 328895 - DNA, 60 bp, Artificial
  Synthetic oligonucleotide
ataatagcgtgggatggtcaggctgcgttacaaattcataacccgacacagcagaatgct

SEQ ID NO: 328896 - DNA, 55 bp, Artificial
  Synthetic oligonucleotide
ataatagggactggagttgactttgaaattagcgcagtcagccggctgcgcgccc

SEQ ID NO: 328897 - DNA, 60 bp, Artificial
  Synthetic oligonucleotide
ataatagtacagcttagtaagcctgtaaacattacttgtatcagacctggcaacaataca

SEQ ID NO: 328898 - DNA, 58 bp, Artificial
  Synthetic oligonucleotide
ataatagtaccaatagactacgactttattgacggtcaatcaccatacacagaagaac

SEQ ID NO: 328899 - DNA, 56 bp, Artificial
  Synthetic oligonucleotide
ataatagtaccagtccctcaaggcgagtggactgtggaaatttcgatggaggggta

SEQ ID NO: 328900 - DNA, 60 bp, Artificial
  Synthetic oligonucleotide
ataatagtcaagcacgatttgttagagagtgtgcagcaatggtaagatattataaaagag

SEQ ID NO: 328901 - DNA, 60 bp, Artificial
  Synthetic oligonucleotide
ataatagtgaccagcaatagtccccccgatgcctggtacagcgaggagaagtgctgtgtc

SEQ ID NO: 328902 - DNA, 53 bp, Artificial
  Synthetic oligonucleotide
ataatagtggcattcggggtaaagcagttgttgacgcttacacagcttcagct

SEQ ID NO: 328903 - DNA, 55 bp, Artificial
  Synthetic oligonucleotide
ataatataatatcctcttctgtaaatgctacttctggagcacctaacggagtacc

SEQ ID NO: 328904 - DNA, 53 bp, Artificial
  Synthetic oligonucleotide
ataatatcagctctagtaatagtggtgaggaaccatgatgacctgattacggt

SEQ ID NO: 328905 - DNA, 59 bp, Artificial
  Synthetic oligonucleotide
ataatatgatagttagtctcgaacgcagggtttttcgtgtgaagaactctgcaggagag

SEQ ID NO: 328906 - DNA, 58 bp, Artificial
  Synthetic oligonucleotide
ataatatgatagttagtctcgaacgtagggtcttccgagtgaagaacgctgcgggaga

SEQ ID NO: 328907 - DNA, 60 bp, Artificial
  Synthetic oligonucleotide
ataatatggcagaactggtatgcgtttacatcttcaatgaaacaaggtaacactcttgaa

SEQ ID NO: 328908 - DNA, 60 bp, Artificial
  Synthetic oligonucleotide
ataatatgggacataggactacaatcctcagctactatggttgtgccctggattagcaat

SEQ ID NO: 328909 - DNA, 54 bp, Artificial
  Synthetic oligonucleotide
ataatatgggtgtgagctatatgcgacacccactgtataagccccatcagcgaa

SEQ ID NO: 328910 - DNA, 50 bp, Artificial
  Synthetic oligonucleotide
ataatattaccggttggccccgccccctttaatgtggtccccgcgcacta

SEQ ID NO: 328911 - DNA, 58 bp, Artificial
  Synthetic oligonucleotide
ataatcaaccagaaccatgttatcaaaccgattcaccctttccatatttatatcacac

SEQ ID NO: 328912 - DNA, 60 bp, Artificial
  Synthetic oligonucleotide
ataatcaatacatgagagtattcttaccaattgaacaatatatgttatacgataccacat

SEQ ID NO: 328913 - DNA, 60 bp, Artificial
  Synthetic oligonucleotide
ataatcacactatactgctctactactcaactgctgcttctagcttggctgtaacattga

SEQ ID NO: 328914 - DNA, 60 bp, Artificial
  Synthetic oligonucleotide
ataatcacactgagaatgctttgttgttgtatatggcatgtactcatgcctctaatccag

SEQ ID NO: 328915 - DNA, 59 bp, Artificial
  Synthetic oligonucleotide
ataatcacgaacacgatttatcgttcgttgaacttcactttgtggtggatatgcagtta

SEQ ID NO: 328916 - DNA, 60 bp, Artificial
  Synthetic oligonucleotide
ataatcacgaatgacatctcgcattaacatctgcgcactaccacctagctgatttgagtt

SEQ ID NO: 328917 - DNA, 52 bp, Artificial
  Synthetic oligonucleotide
ataatcacgggtatacgggtggttttcatatggggaacaaggtgggcttaag

SEQ ID NO: 328918 - DNA, 59 bp, Artificial
  Synthetic oligonucleotide
ataatcaggctcatcccaactccacaatgttccgtacgaaaccatttacgaatgcgcaa

SEQ ID NO: 328919 - DNA, 51 bp, Artificial
  Synthetic oligonucleotide
ataatcagggttcatctaatgctaagaaactagaaattatcgttcgtaatg

SEQ ID NO: 328920 - DNA, 60 bp, Artificial
  Synthetic oligonucleotide
ataatcagtctgatgctacaaattggaaatataatctcaatatgggttagccattcaatc

SEQ ID NO: 328921 - DNA, 60 bp, Artificial
  Synthetic oligonucleotide
ataatcagttcacagggtcatgcatcagtcctatgggaaatcagggatatggagttaagg

SEQ ID NO: 328922 - DNA, 54 bp, Artificial
  Synthetic oligonucleotide
ataatcagtttatgggaccaaagcctaaagccatgtgtcaaattgaccccacta

SEQ ID NO: 328923 - DNA, 58 bp, Artificial
  Synthetic oligonucleotide
ataatcatgatagcagtccatgtagccagtggttatatagaagcagaagttatcccag

SEQ ID NO: 328924 - DNA, 58 bp, Artificial
  Synthetic oligonucleotide
ataatcatggattacattacacggatgtttttgtcttaatcctatgtggttctataat

SEQ ID NO: 328925 - DNA, 55 bp, Artificial
  Synthetic oligonucleotide
ataatcatggtagaaccaagaggagtattcgttgggaaatacaaccccgaatgtg

SEQ ID NO: 328926 - DNA, 60 bp, Artificial
  Synthetic oligonucleotide
ataatcattgacccagtcttgcatctcgacaggaacgttagtgaacgatgagaggggaaa

SEQ ID NO: 328927 - DNA, 55 bp, Artificial
  Synthetic oligonucleotide
ataatccaatgggtttacggtcgcaacgcgcaagtgcgggatgggaccaactact

SEQ ID NO: 328928 - DNA, 58 bp, Artificial
  Synthetic oligonucleotide
ataatccacctcgttcgagaacactcttggattgaagtccagatgtccacttaggtaa

SEQ ID NO: 328929 - DNA, 55 bp, Artificial
  Synthetic oligonucleotide
ataatccacttattgtagatatacaacagtggggttatacaggttctttaactag

SEQ ID NO: 328930 - DNA, 53 bp, Artificial
  Synthetic oligonucleotide
ataatcccaaacattggatccaggccttgggtcagaggccaatcagggaggat

SEQ ID NO: 328931 - DNA, 55 bp, Artificial
  Synthetic oligonucleotide
ataatcccaatcaaatgacggtaacgcctgtttataacggttgtgattccggcga

SEQ ID NO: 328932 - DNA, 56 bp, Artificial
  Synthetic oligonucleotide
ataatccgggccataaggaggatagctgtaccggtggtctctacattgttcccacc

SEQ ID NO: 328933 - DNA, 58 bp, Artificial
  Synthetic oligonucleotide
ataatcctctagccgttggtcacgccctgtgctgtgtcctgaacaaacaattcgggaa

SEQ ID NO: 328934 - DNA, 53 bp, Artificial
  Synthetic oligonucleotide
ataatccttaggggctaattccctaaggacgttaagagcctctgacttacttc

SEQ ID NO: 328935 - DNA, 55 bp, Artificial
  Synthetic oligonucleotide
ataatcgagaattgtcgtataccataccctcttatccggatcccacttccacccg

SEQ ID NO: 328936 - DNA, 59 bp, Artificial
  Synthetic oligonucleotide
ataatcgccgcttgtctggcttcgatgttacccatggagaaggtgatcaaaggtgcgtt

SEQ ID NO: 328937 - DNA, 60 bp, Artificial
  Synthetic oligonucleotide
ataatcgctccgatgttcaacgctaagctgcgtataaaacatgaagagattgcgcagcgt

SEQ ID NO: 328938 - DNA, 59 bp, Artificial
  Synthetic oligonucleotide
ataatcgtaggagatgataagctagaaccgcatgtgcggtcggaacaggtcgttagtaa

SEQ ID NO: 328939 - DNA, 52 bp, Artificial
  Synthetic oligonucleotide
ataatcgtatgcaaaaacttcaaactataataatgtacgatggactctgacg

SEQ ID NO: 328940 - DNA, 60 bp, Artificial
  Synthetic oligonucleotide
ataatctcacgaccacaatcaaagatcacacactgatagcatttgactttgttgacgagt

SEQ ID NO: 328941 - DNA, 57 bp, Artificial
  Synthetic oligonucleotide
ataatctcctcaatgtaggttattgctcctttgggtaactcatctttttcaaggcaa

SEQ ID NO: 328942 - DNA, 52 bp, Artificial
  Synthetic oligonucleotide
ataatctcttgcttcgagccaaggaatgggcgggagagacgcttattagagg

SEQ ID NO: 328943 - DNA, 60 bp, Artificial
  Synthetic oligonucleotide
ataatctgtgtgagtgctcataataggagctgttgtgtacttttcagaaacttcataatg

SEQ ID NO: 328944 - DNA, 57 bp, Artificial
  Synthetic oligonucleotide
ataatcttagcgttgaacgccggatcaaactcggagtaactgcggtgataccgagtc

SEQ ID NO: 328945 - DNA, 57 bp, Artificial
  Synthetic oligonucleotide
ataatgaaatagtgggccgcttgacaaaatgacatatgtttgacctgctcgagagga

SEQ ID NO: 328946 - DNA, 50 bp, Artificial
  Synthetic oligonucleotide
ataatgaaccgagcactgcgactgttaagaatgatatgagggatcgattc

SEQ ID NO: 328947 - DNA, 60 bp, Artificial
  Synthetic oligonucleotide
ataatgaccttggaccagcaacggctcaaatggctcttcagctattcataaaggattaca

SEQ ID NO: 328948 - DNA, 55 bp, Artificial
  Synthetic oligonucleotide
ataatgactccactccaactatgagattgatttgtatgttgtatacccctctccg

SEQ ID NO: 328949 - DNA, 60 bp, Artificial
  Synthetic oligonucleotide
ataatgagatgctacgcatgttagttgctgcaggcaaagattcggaagcagcgtatttcc

SEQ ID NO: 328950 - DNA, 60 bp, Artificial
  Synthetic oligonucleotide
ataatgagcacattcgcttaaaccgcataggccaaagggcatctctgcagctgcgcagtg

SEQ ID NO: 328951 - DNA, 60 bp, Artificial
  Synthetic oligonucleotide
ataatgagccatctactgcgactattaagaatgaccttcgagacagattacaagttttgc

SEQ ID NO: 328952 - DNA, 60 bp, Artificial
  Synthetic oligonucleotide
ataatgaggcatttgaggggtcggacgtcgaccctgctgaagaggccactgtgagtatct

SEQ ID NO: 328953 - DNA, 60 bp, Artificial
  Synthetic oligonucleotide
ataatgagggttgaaaggccagaagaagcaccgatcatgtcatatgtcaatgggatgtcc

SEQ ID NO: 328954 - DNA, 60 bp, Artificial
  Synthetic oligonucleotide
ataatgaggtcagatgcacccatagacacttgtgtgtccgagtgtattacaccaaatgga

SEQ ID NO: 328955 - DNA, 57 bp, Artificial
  Synthetic oligonucleotide
ataatgagtgtaaacgagttactggaaatgactgcttaagcacaaatggagttaaag

SEQ ID NO: 328956 - DNA, 60 bp, Artificial
  Synthetic oligonucleotide
ataatgatgacgatcaaggacttctatcgtcatatacagatctctatcaagaccaaggga

SEQ ID NO: 328957 - DNA, 58 bp, Artificial
  Synthetic oligonucleotide
ataatgatggatcccatgatgctcatcgccactacgggttttatccctcgacttaacg

SEQ ID NO: 328958 - DNA, 60 bp, Artificial
  Synthetic oligonucleotide
ataatgcaatgcggtattacctccgttgtccgtgccattgatatctgctcctaggcctac

SEQ ID NO: 328959 - DNA, 55 bp, Artificial
  Synthetic oligonucleotide
ataatgcagagcttctggtggccttggaaaaccagcatacaattgatctgactga

SEQ ID NO: 328960 - DNA, 60 bp, Artificial
  Synthetic oligonucleotide
ataatgcatctgctaatgtacgtagagatgtggtgtctggaaataaagctgaatcatccg

SEQ ID NO: 328961 - DNA, 59 bp, Artificial
  Synthetic oligonucleotide
ataatgccaccggtgtagagcccgcacccatacactaatcccatcgtagttcgatgtac

SEQ ID NO: 328962 - DNA, 58 bp, Artificial
  Synthetic oligonucleotide
ataatgcctaagcgtgatgccccatggcgcttaatggcgggtacccctaaggtgagtc

SEQ ID NO: 328963 - DNA, 59 bp, Artificial
  Synthetic oligonucleotide
ataatgcctgggtacaccagcctttgtctccgcgcacgttaaatgcgtgggtcaaatgc

SEQ ID NO: 328964 - DNA, 55 bp, Artificial
  Synthetic oligonucleotide
ataatgcctggtccacaatcaggttatttccctatgaatcaaccttatgtagcgc

SEQ ID NO: 328965 - DNA, 60 bp, Artificial
  Synthetic oligonucleotide
ataatgctcatctgaaatagttatgcatccaattatttcgaatcttctttctatcgtctc

SEQ ID NO: 328966 - DNA, 60 bp, Artificial
  Synthetic oligonucleotide
ataatgctgacacaataatagtacagctgaaggactctgtagaaattaattgtataagac

SEQ ID NO: 328967 - DNA, 59 bp, Artificial
  Synthetic oligonucleotide
ataatggaaaagaacgttactgttacacatgctcaagacatattggaaaagacacacaa

SEQ ID NO: 328968 - DNA, 55 bp, Artificial
  Synthetic oligonucleotide
ataatggcaaggttattgattgttatgactctatgtgcagtaccagtgacgagca

SEQ ID NO: 328969 - DNA, 60 bp, Artificial
  Synthetic oligonucleotide
ataatggcattcgattacacaaattatgatggtagtatacaccctatatggttccaggct

SEQ ID NO: 328970 - DNA, 55 bp, Artificial
  Synthetic oligonucleotide
ataatggcgctaacttcacctcgcaggaggtaaagatggtagcctggtgggcggg

SEQ ID NO: 328971 - DNA, 55 bp, Artificial
  Synthetic oligonucleotide
ataatgggagcacaagtatcatctcagaaggtgggcgctcatgagaacaccaatg

SEQ ID NO: 328972 - DNA, 59 bp, Artificial
  Synthetic oligonucleotide
ataatgggccaaactttactagtgcagcagtaaaagcagcctgttggtgggcacaaatc

SEQ ID NO: 328973 - DNA, 50 bp, Artificial
  Synthetic oligonucleotide
ataatgggtacatttatcccatcaaaggcgcctaggcattatcgtcctat

SEQ ID NO: 328974 - DNA, 50 bp, Artificial
  Synthetic oligonucleotide
ataatggtaaaaaggggtgaagtgaccgttcgtgttgtgactctcaccga

SEQ ID NO: 328975 - DNA, 53 bp, Artificial
  Synthetic oligonucleotide
ataatggttgggacaaattaagtgggcaagtggactattggggcctattttat

SEQ ID NO: 328976 - DNA, 60 bp, Artificial
  Synthetic oligonucleotide
ataatggttgggcgacgatcgatgttgagtatagagaacccgcaccctacgtacatgctc

SEQ ID NO: 328977 - DNA, 55 bp, Artificial
  Synthetic oligonucleotide
ataatgtaatcgctgataccttctgaaccaccattagcaacacggaattgcttcc

SEQ ID NO: 328978 - DNA, 60 bp, Artificial
  Synthetic oligonucleotide
ataatgtcgagagcctctccagcactagctgcattgacggcgttgtggtagacgtcgtct

SEQ ID NO: 328979 - DNA, 60 bp, Artificial
  Synthetic oligonucleotide
ataatgtgacgctaaacagattgaaaacatgtgtttgacctgcgtcacaggtgacatgcc

SEQ ID NO: 328980 - DNA, 53 bp, Artificial
  Synthetic oligonucleotide
ataatgtgctgtagcgctaataacgtgcaccgggcttacactactgacaccgt

SEQ ID NO: 328981 - DNA, 53 bp, Artificial
  Synthetic oligonucleotide
ataatgtgggatccattgcttaacgaatttcctgaaaccgtacacggttttag

SEQ ID NO: 328982 - DNA, 57 bp, Artificial
  Synthetic oligonucleotide
ataatgtgtgagtagttcccagataagggaattagggatcttatagggtttcgctca

SEQ ID NO: 328983 - DNA, 57 bp, Artificial
  Synthetic oligonucleotide
ataatgttgatctatcaactaaccacaaagttgatatacacacacttgagataatgg

SEQ ID NO: 328984 - DNA, 60 bp, Artificial
  Synthetic oligonucleotide
ataatgttgcagactagctatcgggctaatgattctacacctcagtctaaggtggagtgc

SEQ ID NO: 328985 - DNA, 52 bp, Artificial
  Synthetic oligonucleotide
ataatgttgtgttgttttccgcaaggagtgtagggttaggctatggccgatc

SEQ ID NO: 328986 - DNA, 56 bp, Artificial
  Synthetic oligonucleotide
ataattacggagagacccaagttactaaatatgagtatgctcccaacggtgtagta

SEQ ID NO: 328987 - DNA, 53 bp, Artificial
  Synthetic oligonucleotide
ataattacttaacctttcataacttttatatgatgttcgtaaaaattgccatt

SEQ ID NO: 328988 - DNA, 51 bp, Artificial
  Synthetic oligonucleotide
ataattacttccatttggttcactacatcactcaccaaatgacatgggctg

SEQ ID NO: 328989 - DNA, 55 bp, Artificial
  Synthetic oligonucleotide
ataattagcttctacggcctcactaacgcaatctccaattaatctaacaactgcg

SEQ ID NO: 328990 - DNA, 58 bp, Artificial
  Synthetic oligonucleotide
ataattagtctatgggatcaaagcctaaagccatgtgtaaagttgaccccactctgtg

SEQ ID NO: 328991 - DNA, 51 bp, Artificial
  Synthetic oligonucleotide
ataattatcgttatccatggcgagtgggcgttggtataaataggaccgtaa

SEQ ID NO: 328992 - DNA, 58 bp, Artificial
  Synthetic oligonucleotide
ataattatgtagtctacaaccatcaagaagcagggaagtacgagaatcatactgagaa

SEQ ID NO: 328993 - DNA, 58 bp, Artificial
  Synthetic oligonucleotide
ataattatgtgggcctagtgcacgagcccacatcgtctttcccgtcctggaatcaccc

SEQ ID NO: 328994 - DNA, 56 bp, Artificial
  Synthetic oligonucleotide
ataattatgtggtcctaatgacctggcccacattgttttccccgtccgactatcgc

SEQ ID NO: 328995 - DNA, 52 bp, Artificial
  Synthetic oligonucleotide
ataattcaaccccaccggccgtaccgcagacctaccaagtagggtacctcca

SEQ ID NO: 328996 - DNA, 51 bp, Artificial
  Synthetic oligonucleotide
ataattcacaatccgcagttcaaattccaatttactattcttccaatagtg

SEQ ID NO: 328997 - DNA, 58 bp, Artificial
  Synthetic oligonucleotide
ataattcaccgtctggagggtgtctcctacaatatagggtcgcaagagtggtacacca

SEQ ID NO: 328998 - DNA, 60 bp, Artificial
  Synthetic oligonucleotide
ataattccacagagaaggttgacacaattctagagcaaaatgtcactgtgactcatgcca

SEQ ID NO: 328999 - DNA, 60 bp, Artificial
  Synthetic oligonucleotide
ataattcggagatatggaggtgatgagatcaaaacactaactaccagtatgagcccagac

SEQ ID NO: 329000 - DNA, 58 bp, Artificial
  Synthetic oligonucleotide
ataattctaacggttctacctgtaacacgtgtctatatggcaggcttcattcatttaa

SEQ ID NO: 329001 - DNA, 60 bp, Artificial
  Synthetic oligonucleotide
ataattctattaatcatgaagaccataattgctttgagctacattttctgtctggttttc

SEQ ID NO: 329002 - DNA, 60 bp, Artificial
  Synthetic oligonucleotide
ataattctattaatcatgaggaccatcatcattctaagctactttttctgtctggctttc

SEQ ID NO: 329003 - DNA, 51 bp, Artificial
  Synthetic oligonucleotide
ataattctcaggcgtatgcccgcggcgctacaaatccgagctcccgcgata

SEQ ID NO: 329004 - DNA, 60 bp, Artificial
  Synthetic oligonucleotide
ataattgaaggaagagatcgcacaatggcctggacagtggtgaacagcatctgcaatacc

SEQ ID NO: 329005 - DNA, 51 bp, Artificial
  Synthetic oligonucleotide
ataattgaagtagccacaaatcagatgcatgcatatttggcagataaggac

SEQ ID NO: 329006 - DNA, 55 bp, Artificial
  Synthetic oligonucleotide
ataattgagccagtcatttccgtagggaagagagttattcgctcctctcgagatt

SEQ ID NO: 329007 - DNA, 60 bp, Artificial
  Synthetic oligonucleotide
ataattgatatgattaatgctcttgatagtagagttacgatttgtgctaagttgcgaccc

SEQ ID NO: 329008 - DNA, 59 bp, Artificial
  Synthetic oligonucleotide
ataattgatccatccatgtaaggtcagagatagcctcttcgagggtgtaacaggttggt

SEQ ID NO: 329009 - DNA, 60 bp, Artificial
  Synthetic oligonucleotide
ataattgatgctttaagatatggagttatgattgatcggaatgataatcaagtaagagtt

SEQ ID NO: 329010 - DNA, 53 bp, Artificial
  Synthetic oligonucleotide
ataattgcaagattttccctcataagaacgttaaagtctggcaagagaaacga

SEQ ID NO: 329011 - DNA, 55 bp, Artificial
  Synthetic oligonucleotide
ataattgcacgcacgatctcattgaacgtggctttggagctctgctgaagggagc

SEQ ID NO: 329012 - DNA, 60 bp, Artificial
  Synthetic oligonucleotide
ataattgctatgggcgcggttctgacatttgtgcttatcataatttgtttagctccttgc

SEQ ID NO: 329013 - DNA, 60 bp, Artificial
  Synthetic oligonucleotide
ataattggagtggtgatcatatacatggtgttcacactctgcttgaaagttaaaaaatcg

SEQ ID NO: 329014 - DNA, 59 bp, Artificial
  Synthetic oligonucleotide
ataattggattgcactggcacaaggagttaaaactagtctgcgtactaaaagtctctca

SEQ ID NO: 329015 - DNA, 59 bp, Artificial
  Synthetic oligonucleotide
ataattggcaattccatctcaacagtccagaaccttcaggcaaataaacaattggctgc

SEQ ID NO: 329016 - DNA, 60 bp, Artificial
  Synthetic oligonucleotide
ataattgggcagattgatgtaagctttaatggggggcacattgaagagtgttcttgctac

SEQ ID NO: 329017 - DNA, 60 bp, Artificial
  Synthetic oligonucleotide
ataattgggctcgaaagagcacgacgtatgcaaagttcttcgagctatcgtcgtcactgt

SEQ ID NO: 329018 - DNA, 57 bp, Artificial
  Synthetic oligonucleotide
ataattggtaatacgctgcagggcgcggaatcactaaagttttaagaggcgatgtta

SEQ ID NO: 329019 - DNA, 60 bp, Artificial
  Synthetic oligonucleotide
ataattgtcacagccaacaagaaatctgctcaagatgtgcgttatgcgctgtttaaatct

SEQ ID NO: 329020 - DNA, 57 bp, Artificial
  Synthetic oligonucleotide
ataattgtgaggcccaagacttctggcccatactgtcttccctgttctgctttcccc

SEQ ID NO: 329021 - DNA, 55 bp, Artificial
  Synthetic oligonucleotide
ataattgtgtggacctaacgacctagcccacatggtcttgccggtacgactatcg

SEQ ID NO: 329022 - DNA, 58 bp, Artificial
  Synthetic oligonucleotide
ataattgttggtctacatttaaggaccttgatccttcgtcatgtaacggcgtctatga

SEQ ID NO: 329023 - DNA, 56 bp, Artificial
  Synthetic oligonucleotide
ataattgttgtggccgtagtcaccttgaaaagtgtcgtaaacgtgttgaagcaaga

SEQ ID NO: 329024 - DNA, 55 bp, Artificial
  Synthetic oligonucleotide
ataattgtttattggtccatataaacttagcccccaagtttgttgtcttgcaata

SEQ ID NO: 329025 - DNA, 60 bp, Artificial
  Synthetic oligonucleotide
ataatttagtcgatggtgttcctgcgcatatgaaggcgacagatgtttggagcgtgttca

SEQ ID NO: 329026 - DNA, 60 bp, Artificial
  Synthetic oligonucleotide
ataatttatttgcacgactattcatattacacaaacaatgaaatacgaactgatcagcat

SEQ ID NO: 329027 - DNA, 60 bp, Artificial
  Synthetic oligonucleotide
ataatttccaactaccagttggacaatggcctgtgatgagtggtggctcagtatcattgc

SEQ ID NO: 329028 - DNA, 57 bp, Artificial
  Synthetic oligonucleotide
ataatttctatatggattagccactcaattcaaactggagaccaaaaacgcccagaa

SEQ ID NO: 329029 - DNA, 50 bp, Artificial
  Synthetic oligonucleotide
ataatttcttaaacacgaaaaacgacttaggaggtgtgctctcaaactct

SEQ ID NO: 329030 - DNA, 60 bp, Artificial
  Synthetic oligonucleotide
ataatttcttatctgctgagtgtccatttttgcagaagccaaaggttccatctgaggcat

SEQ ID NO: 329031 - DNA, 55 bp, Artificial
  Synthetic oligonucleotide
ataatttggaaaggaagatgagggcattgctcaaccccttactcttaaaatccca

SEQ ID NO: 329032 - DNA, 58 bp, Artificial
  Synthetic oligonucleotide
atacaaaacccattatatattgaaccacctgtagatattcctcagtctggagaggctt

SEQ ID NO: 329033 - DNA, 53 bp, Artificial
  Synthetic oligonucleotide
atacaaaactttcaggtagcaaattggctacatttcgttaacaacaaccagtt

SEQ ID NO: 329034 - DNA, 60 bp, Artificial
  Synthetic oligonucleotide
atacaaaattcaacgtgacagggtttactacatgcttggtgatgcacatcatgcaaactt

SEQ ID NO: 329035 - DNA, 60 bp, Artificial
  Synthetic oligonucleotide
atacaaacatgttgatcgagttcagagtagaagaggtgttgcggggcatgcaagcatata

SEQ ID NO: 329036 - DNA, 55 bp, Artificial
  Synthetic oligonucleotide
atacaaactaaccaacccatacgcccactccgagtccaccgctgacttattagag

SEQ ID NO: 329037 - DNA, 57 bp, Artificial
  Synthetic oligonucleotide
atacaaagaacctcagtcctcttggtactttctcgcctgagtctacaaagcgagaaa

SEQ ID NO: 329038 - DNA, 59 bp, Artificial
  Synthetic oligonucleotide
atacaaagaatggtagacacactcttccacaatgttggttggtatcagatggttcgtac

SEQ ID NO: 329039 - DNA, 55 bp, Artificial
  Synthetic oligonucleotide
atacaaagagacaaaagcttcaacccttccatcaagagcattctaggctctgtct

SEQ ID NO: 329040 - DNA, 55 bp, Artificial
  Synthetic oligonucleotide
atacaaaggagtagaccttgactctcttcgcatgattgcatacggagatgatgtc

SEQ ID NO: 329041 - DNA, 60 bp, Artificial
  Synthetic oligonucleotide
atacaaatgaagctacagaatctagaggagaatcgtaatgaggtcctacacatacaggaa

SEQ ID NO: 329042 - DNA, 60 bp, Artificial
  Synthetic oligonucleotide
atacaaatgtagcaacaatcagtagacttgatttagagttagcagaattaaaattgatgc

SEQ ID NO: 329043 - DNA, 52 bp, Artificial
  Synthetic oligonucleotide
atacaaatttggaagggagacgttacctgattcaatgaggagtagagtgggg

SEQ ID NO: 329044 - DNA, 60 bp, Artificial
  Synthetic oligonucleotide
atacaacaaagactataatagccctggcattggacacacagaatctgagtcacactaagc

SEQ ID NO: 329045 - DNA, 56 bp, Artificial
  Synthetic oligonucleotide
atacaacaagtgtcttattgtcgtgaggctgatataggaccaaagaagttaggtga

SEQ ID NO: 329046 - DNA, 55 bp, Artificial
  Synthetic oligonucleotide
atacaacacaattgtttagtagtaagtggcctgctaatggtactaggaacgatac

SEQ ID NO: 329047 - DNA, 50 bp, Artificial
  Synthetic oligonucleotide
atacaacacactcataaccaaaacatcgaaaaacgaaatacaaggagctg

SEQ ID NO: 329048 - DNA, 60 bp, Artificial
  Synthetic oligonucleotide
atacaacacaggtgatggagtggaagctcgtgtttataagtctgtcaaaattactgaatg

SEQ ID NO: 329049 - DNA, 56 bp, Artificial
  Synthetic oligonucleotide
atacaacacctttcaaaccatagcccggcttaaagagacaggacaaactgcaaaca

SEQ ID NO: 329050 - DNA, 57 bp, Artificial
  Synthetic oligonucleotide
atacaacacgctatgaaataaaagacgctatgacaaaagtacgggtatctgattagg

SEQ ID NO: 329051 - DNA, 58 bp, Artificial
  Synthetic oligonucleotide
atacaacactacctttccacaatgtccacccactgacaataggcgaatgccccaaata

SEQ ID NO: 329052 - DNA, 60 bp, Artificial
  Synthetic oligonucleotide
atacaacagaatgggaacagtgaccacagaagctgcttttggcctagtgtgtgctacttg

SEQ ID NO: 329053 - DNA, 60 bp, Artificial
  Synthetic oligonucleotide
atacaacagaatgggaactgtgaccaccgaagtagcatttggcctagtgtgcgccacatg

SEQ ID NO: 329054 - DNA, 60 bp, Artificial
  Synthetic oligonucleotide
atacaacagaatggggactgtcaccactgaggtggcatttggtctagtatgcgcaacctg

SEQ ID NO: 329055 - DNA, 60 bp, Artificial
  Synthetic oligonucleotide
atacaacagaatgggggctgtaaccactgaagtggcctttggcctggtatgtgcaacatg

SEQ ID NO: 329056 - DNA, 54 bp, Artificial
  Synthetic oligonucleotide
atacaacagacgcttgtcgaatcctctcagtgggtagctggtgagcagcaagtc

SEQ ID NO: 329057 - DNA, 57 bp, Artificial
  Synthetic oligonucleotide
atacaacaggtctatacctttttatttaggacatatcagggcccattcaggattgcc

SEQ ID NO: 329058 - DNA, 55 bp, Artificial
  Synthetic oligonucleotide
atacaacattaccctttcacaatatccacccactgaccattggtgagtgccccaa

SEQ ID NO: 329059 - DNA, 60 bp, Artificial
  Synthetic oligonucleotide
atacaacattgccttttcacaacatccacccattgacaataggtgaatgtcccaaatatg

SEQ ID NO: 329060 - DNA, 58 bp, Artificial
  Synthetic oligonucleotide
atacaaccacagacacagtgttggagcaaccctcgaggcgctattccaaggcccgcca

SEQ ID NO: 329061 - DNA, 57 bp, Artificial
  Synthetic oligonucleotide
atacaaccgaatgggaacggtaaccacagaagtggctcttggcctagtatgtgccac

SEQ ID NO: 329062 - DNA, 58 bp, Artificial
  Synthetic oligonucleotide
atacaaccggaaagtgctgaacagctaaacaggagtggtatgccctttatccatatgg

SEQ ID NO: 329063 - DNA, 56 bp, Artificial
  Synthetic oligonucleotide
atacaacctaagctaatgagaagcttaaaattgttctgaattccagagtttgttcc

SEQ ID NO: 329064 - DNA, 60 bp, Artificial
  Synthetic oligonucleotide
atacaacggaagcgatacgaggggacattacaacttttcattcaaatgccagaatgcagc

SEQ ID NO: 329065 - DNA, 56 bp, Artificial
  Synthetic oligonucleotide
atacaacggctgcgtctctacttacttgtctgaagactcttaccctaagaacggtg

SEQ ID NO: 329066 - DNA, 60 bp, Artificial
  Synthetic oligonucleotide
atacaacgtgtaatgtgcttatctccaagatccaaagctacagttgaggacattattgca

SEQ ID NO: 329067 - DNA, 58 bp, Artificial
  Synthetic oligonucleotide
atacaactaacattaacctattatataggttactttgctttgatatactgatgtagga

SEQ ID NO: 329068 - DNA, 60 bp, Artificial
  Synthetic oligonucleotide
atacaactaagtaagactcagaatgatgttgctaattactacgccgcctgtagagcaatg

SEQ ID NO: 329069 - DNA, 52 bp, Artificial
  Synthetic oligonucleotide
atacaactcccagacaaggagagctggactgtcaatgatatacagaaattgg

SEQ ID NO: 329070 - DNA, 51 bp, Artificial
  Synthetic oligonucleotide
atacaactgcccggggtcctacgggtagtacggtaggtggcttaacgcctg

SEQ ID NO: 329071 - DNA, 59 bp, Artificial
  Synthetic oligonucleotide
atacaacttgctcatctcaccaaacaaaagatggatggtgctgttcgtgtgacaaaagg

SEQ ID NO: 329072 - DNA, 55 bp, Artificial
  Synthetic oligonucleotide
atacaagaagctcaaaagggaaataacattccatggggccaaagaggtgtcacta

SEQ ID NO: 329073 - DNA, 57 bp, Artificial
  Synthetic oligonucleotide
atacaagaatacaagttcagtatggaccaactggagagcccttagactttagaatcg

SEQ ID NO: 329074 - DNA, 55 bp, Artificial
  Synthetic oligonucleotide
atacaagacatgcccttatgggcctctgtatacggattctccgagtactgcagta

SEQ ID NO: 329075 - DNA, 56 bp, Artificial
  Synthetic oligonucleotide
atacaagagttgggcctagatgagagctatgaccactgtctcattcaacggtactc

SEQ ID NO: 329076 - DNA, 60 bp, Artificial
  Synthetic oligonucleotide
atacaagatagttaaaaaaggagattcagcaatcatgaaaagtgaactggagtatggcaa

SEQ ID NO: 329077 - DNA, 56 bp, Artificial
  Synthetic oligonucleotide
atacaagcaaacctttccagaacactagtaagcactatattgggaaatgccccaaa

SEQ ID NO: 329078 - DNA, 57 bp, Artificial
  Synthetic oligonucleotide
atacaagcatcaatttattttgcgtattcttatacgaagcccaattgtataaaattg

SEQ ID NO: 329079 - DNA, 60 bp, Artificial
  Synthetic oligonucleotide
atacaagcctagtggcagtagtcactatgatccctatgatagggtactacaacatggtag

SEQ ID NO: 329080 - DNA, 55 bp, Artificial
  Synthetic oligonucleotide
atacaagctatacgttgataaattgtaaatcctcaaccattacacaggcctgtcc

SEQ ID NO: 329081 - DNA, 55 bp, Artificial
  Synthetic oligonucleotide
atacaagctatatactgataaattgtaacacctcagtcatcacacaagcctgtcc

SEQ ID NO: 329082 - DNA, 54 bp, Artificial
  Synthetic oligonucleotide
atacaagctcaagataaaacatctagtgttgtaaatagaattagcaacaactta

SEQ ID NO: 329083 - DNA, 56 bp, Artificial
  Synthetic oligonucleotide
atacaaggaaaggtatacgtataggaccaggaagagtgatttatgcaacaagtgcc

SEQ ID NO: 329084 - DNA, 58 bp, Artificial
  Synthetic oligonucleotide
atacaaggcactatttgaatacactctgctgttaaaatctaagtggccggataaataa

SEQ ID NO: 329085 - DNA, 60 bp, Artificial
  Synthetic oligonucleotide
atacaagtcagtatctgtgcacaggggtcctcacagacacgagcaggccatcagacaaat

SEQ ID NO: 329086 - DNA, 60 bp, Artificial
  Synthetic oligonucleotide
atacaagtgagagacctgcgagggctatgtctaagagtgtgctccgcgcaagaaacatac

SEQ ID NO: 329087 - DNA, 54 bp, Artificial
  Synthetic oligonucleotide
atacaagttattatcaacatttactaattggtcaagaagttcaatctttcaaat

SEQ ID NO: 329088 - DNA, 56 bp, Artificial
  Synthetic oligonucleotide
atacaagtttagcattcgcggtttcgaccctgttacagacaacatcgaccctacca

SEQ ID NO: 329089 - DNA, 57 bp, Artificial
  Synthetic oligonucleotide
atacaataagatggaattcgaaccattccagtctcttgtccctaaggcggccaggag

SEQ ID NO: 329090 - DNA, 55 bp, Artificial
  Synthetic oligonucleotide
atacaataagatggaatttgagccattccagtccctggtccctagggccgccaga

SEQ ID NO: 329091 - DNA, 54 bp, Artificial
  Synthetic oligonucleotide
atacaatagtccagaagagatattcagacctggaggaggagatatgagggacaa

SEQ ID NO: 329092 - DNA, 55 bp, Artificial
  Synthetic oligonucleotide
atacaatccacaaagaagaatggtctaaccttgcgtcgcttaactttagagcagg

SEQ ID NO: 329093 - DNA, 60 bp, Artificial
  Synthetic oligonucleotide
atacaatcccacagtgttatatgcatgtcagtgattattataatccaccacataacctca

SEQ ID NO: 329094 - DNA, 60 bp, Artificial
  Synthetic oligonucleotide
atacaatcgatgtcatgcctgacatatatgacttcgttaaacccattggcgctgtgctgc

SEQ ID NO: 329095 - DNA, 60 bp, Artificial
  Synthetic oligonucleotide
atacaatctggaccagtggaagcagcatttccttttgtggagtaaatagcgacactgtgg

SEQ ID NO: 329096 - DNA, 53 bp, Artificial
  Synthetic oligonucleotide
atacaatgaattagcacgaggtgggaaggcaccatacatagctgaaaccgcac

SEQ ID NO: 329097 - DNA, 55 bp, Artificial
  Synthetic oligonucleotide
atacaatgattggttatttgagccgaataatttcgatggatgctgtgacgtcgat

SEQ ID NO: 329098 - DNA, 50 bp, Artificial
  Synthetic oligonucleotide
atacaatgcaagcatcgtttctgagacaagcaaaacattcccacgagttg

SEQ ID NO: 329099 - DNA, 57 bp, Artificial
  Synthetic oligonucleotide
atacaatgggggtcttaacacgtatcgtaaactgcgtgttgctcgcaagttatccta

SEQ ID NO: 329100 - DNA, 50 bp, Artificial
  Synthetic oligonucleotide
atacaatgtcccagaaaagaaaggtgaatcctcaaagtgcgtggccgaag

SEQ ID NO: 329101 - DNA, 55 bp, Artificial
  Synthetic oligonucleotide
atacaattattcatagctgattatagatacacctacaaatgccacaggggagatt

SEQ ID NO: 329102 - DNA, 60 bp, Artificial
  Synthetic oligonucleotide
atacaattcgagattatccatacactgcgatggttaactatcagtcatcaaacgatgtgg

SEQ ID NO: 329103 - DNA, 56 bp, Artificial
  Synthetic oligonucleotide
atacaattggagtgtatgtaatagggtttacactacctattatattgaaggcccta

SEQ ID NO: 329104 - DNA, 60 bp, Artificial
  Synthetic oligonucleotide
atacaattggtgtgtatgtcattgggtttacactgccaattgtcctgaaagcattgtata

SEQ ID NO: 329105 - DNA, 60 bp, Artificial
  Synthetic oligonucleotide
atacaatttattgtctattaattatggatgttatcagctattcgactttaattcaccaga

SEQ ID NO: 329106 - DNA, 55 bp, Artificial
  Synthetic oligonucleotide
atacaatttcccggtgatcggagtcgagttttccgacacgcgcggcggtgtgtac

SEQ ID NO: 329107 - DNA, 56 bp, Artificial
  Synthetic oligonucleotide
atacaatttttggggtacaagaacaaattacagtagagaatacttcacagacgcaa

SEQ ID NO: 329108 - DNA, 54 bp, Artificial
  Synthetic oligonucleotide
atacacaaaccgtgaatacagcggtacttgaaaacacgtagagtcatggtaaaa

SEQ ID NO: 329109 - DNA, 59 bp, Artificial
  Synthetic oligonucleotide
atacacaaacgcttgggattgggtgcttgacaactgatacgagttcatttgaaactgtc

SEQ ID NO: 329110 - DNA, 54 bp, Artificial
  Synthetic oligonucleotide
atacacaaagattcatttatcatggaagattgaagagaccaatctctaatgtac

SEQ ID NO: 329111 - DNA, 54 bp, Artificial
  Synthetic oligonucleotide
atacacaagcaccaccaagtcaggggaatcccgggccgtttgttccaggcacgg

SEQ ID NO: 329112 - DNA, 60 bp, Artificial
  Synthetic oligonucleotide
atacacacaaagagtttggatcgatcagctttaattattacgcaagtactaagattgcgc

SEQ ID NO: 329113 - DNA, 60 bp, Artificial
  Synthetic oligonucleotide
atacacacaactcatgatatgtcggacatctttaactcaccacagaacaaggcttctatc

SEQ ID NO: 329114 - DNA, 52 bp, Artificial
  Synthetic oligonucleotide
atacacacagacaatggcagcaatttcaccagtgctgcagtaagggcagcat

SEQ ID NO: 329115 - DNA, 60 bp, Artificial
  Synthetic oligonucleotide
atacacacagatagtgtatacgccaattttaacaattgacggatacattactaagaagca

SEQ ID NO: 329116 - DNA, 59 bp, Artificial
  Synthetic oligonucleotide
atacacacatacgagcgcgtaccatcgttagataatcaagttggttcatcaaacgcgga

SEQ ID NO: 329117 - DNA, 60 bp, Artificial
  Synthetic oligonucleotide
atacacacatgcgaagctgttggctttgataatgctgaggtcgatgatccaatcgtgatt

SEQ ID NO: 329118 - DNA, 54 bp, Artificial
  Synthetic oligonucleotide
atacacaccaccgggtggtgcgagacccaccagtagggaagaggccatgctagg

SEQ ID NO: 329119 - DNA, 50 bp, Artificial
  Synthetic oligonucleotide
atacacaggcatcatctacaagttttcaaacaaagagcagtgaaataaac

SEQ ID NO: 329120 - DNA, 57 bp, Artificial
  Synthetic oligonucleotide
atacacatacaaatgtcaccaattataaaccatccaaaggagaatacacaccacccg

SEQ ID NO: 329121 - DNA, 57 bp, Artificial
  Synthetic oligonucleotide
atacacatgagcctgtggagacccccggtatacaatgtcccgggacaagaaaggcag

SEQ ID NO: 329122 - DNA, 56 bp, Artificial
  Synthetic oligonucleotide
atacaccaaccgtgttgctgcccccattgtccgcgtcacaaaacaacaggcatgga

SEQ ID NO: 329123 - DNA, 60 bp, Artificial
  Synthetic oligonucleotide
atacaccacgatccggtaaacgtttctgctgtccatacttgacccgatgcatgtcgtctg

SEQ ID NO: 329124 - DNA, 57 bp, Artificial
  Synthetic oligonucleotide
atacaccagtccacgattgtaatacgacttgtcaaacacccaaaggtgctataaaca

SEQ ID NO: 329125 - DNA, 58 bp, Artificial
  Synthetic oligonucleotide
atacaccataaattggttgtttatcaccgactttctcatacacataaacagaagtcaa

SEQ ID NO: 329126 - DNA, 60 bp, Artificial
  Synthetic oligonucleotide
atacaccatcggagcgatgcctcgttggagtcgtcgcatccgggatgtctatcctggttc

SEQ ID NO: 329127 - DNA, 60 bp, Artificial
  Synthetic oligonucleotide
atacacccaagggttatgatgaggttcaaagtgccacgatcgcagcaacctcagatccat

SEQ ID NO: 329128 - DNA, 59 bp, Artificial
  Synthetic oligonucleotide
atacacccagataagttggagaggtaaggctgaacaggcacaagccagccaaaattcat

SEQ ID NO: 329129 - DNA, 55 bp, Artificial
  Synthetic oligonucleotide
atacaccccgtcattctgtttaatcttcagcaccgcattcacagtcctgtccgcg

SEQ ID NO: 329130 - DNA, 60 bp, Artificial
  Synthetic oligonucleotide
atacaccgaatgcagcgccacaggaatatggatatgagacaagtgattacagtacaatag

SEQ ID NO: 329131 - DNA, 55 bp, Artificial
  Synthetic oligonucleotide
atacaccggaacgcttgtcttcggcgtacaacgaacactttcgttgctccatcga

SEQ ID NO: 329132 - DNA, 53 bp, Artificial
  Synthetic oligonucleotide
atacaccggccagattaaatggtgaccaacaaggactcccgaggtaagggtaa

SEQ ID NO: 329133 - DNA, 57 bp, Artificial
  Synthetic oligonucleotide
atacacctcagggcgtgactctgaacgtggggggcgtaaacatgagggcgggtgtga

SEQ ID NO: 329134 - DNA, 55 bp, Artificial
  Synthetic oligonucleotide
atacacctctatgctgagattggctcgaaatacgagttcaggattcgctgcggag

SEQ ID NO: 329135 - DNA, 60 bp, Artificial
  Synthetic oligonucleotide
atacacctgaaggcatcatccccagcatgtttgaaccagaacgtgagaaagtagacgcca

SEQ ID NO: 329136 - DNA, 54 bp, Artificial
  Synthetic oligonucleotide
atacacctggaaggtgggaagggaagtgtgtcaccgcttcgtggtgaaacgccg

SEQ ID NO: 329137 - DNA, 59 bp, Artificial
  Synthetic oligonucleotide
atacacgaaccgtgtggctgcccccactgtccgcgtcaccagaagcaaaatatgggcca

SEQ ID NO: 329138 - DNA, 54 bp, Artificial
  Synthetic oligonucleotide
atacacggcgagagggggtacgctgagacaccagggtcttacaggcgtctgcac

SEQ ID NO: 329139 - DNA, 53 bp, Artificial
  Synthetic oligonucleotide
atacacggggttcaataattatcatatgaatatcagtagccatacatagggtc

SEQ ID NO: 329140 - DNA, 58 bp, Artificial
  Synthetic oligonucleotide
atacactagatggcgctatacgttaactgaaaaagctatgcaatgagcagccactagg

SEQ ID NO: 329141 - DNA, 55 bp, Artificial
  Synthetic oligonucleotide
atacactagccatacaactcctaatggacatacaagttaggataggagcaatcag

SEQ ID NO: 329142 - DNA, 60 bp, Artificial
  Synthetic oligonucleotide
atacactcagtttagtgtttatagttacgatgctgccaggaaggtccttgcagatcgtaa

SEQ ID NO: 329143 - DNA, 51 bp, Artificial
  Synthetic oligonucleotide
atacactcttaagcgcgatgacttcggtaagcgagataaattcgaacatag

SEQ ID NO: 329144 - DNA, 55 bp, Artificial
  Synthetic oligonucleotide
atacactcttggacagttgtcctaaccaaatcatttaattgggccatagacatcg

SEQ ID NO: 329145 - DNA, 56 bp, Artificial
  Synthetic oligonucleotide
atacactgaattgctgcaagagatccgcaaattttatttgtggctcctaaacaagg

SEQ ID NO: 329146 - DNA, 55 bp, Artificial
  Synthetic oligonucleotide
atacactgatatttaaatactcttaagaaacgccaagtctgaggatgtaaatgag

SEQ ID NO: 329147 - DNA, 55 bp, Artificial
  Synthetic oligonucleotide
atacactgatgacatgcggccagaaacggttgaaaccacaataaccactgcgcag

SEQ ID NO: 329148 - DNA, 60 bp, Artificial
  Synthetic oligonucleotide
atacactgtccaggagattggtaaaatcattgagagcaagtggaatgagtaccggaggcc

SEQ ID NO: 329149 - DNA, 60 bp, Artificial
  Synthetic oligonucleotide
atacacttgagcacaatacagatattagttaaatctacctatgcctcaatagatacaccc

SEQ ID NO: 329150 - DNA, 60 bp, Artificial
  Synthetic oligonucleotide
atacacttgggcacttgtcgagtataagtgaagtattgtgacggacgctaccgtagcata

SEQ ID NO: 329151 - DNA, 60 bp, Artificial
  Synthetic oligonucleotide
atacacttgggcagctggttatggtgaacactcgaaagggatatacacttgggcagctgg

SEQ ID NO: 329152 - DNA, 58 bp, Artificial
  Synthetic oligonucleotide
atacactttcattccaatcttttgttgatgcgcaaggctcaaaaaccaatgccgacgt

SEQ ID NO: 329153 - DNA, 60 bp, Artificial
  Synthetic oligonucleotide
atacagaacagcaatttgtggactctatcctgcacagattaaagccagacaaatgattag

SEQ ID NO: 329154 - DNA, 59 bp, Artificial
  Synthetic oligonucleotide
atacagaacctctctgcaatgtgtccgggtttgcaatagtttccaaggacaatggaata

SEQ ID NO: 329155 - DNA, 60 bp, Artificial
  Synthetic oligonucleotide
atacagaagagtgatgagaggagtaggtatcatcgtataaaactaaatctgtctaatgag

SEQ ID NO: 329156 - DNA, 59 bp, Artificial
  Synthetic oligonucleotide
atacagacacgagtctgtagactacatagtcacctacaacagaacaggcccctttgaaa

SEQ ID NO: 329157 - DNA, 55 bp, Artificial
  Synthetic oligonucleotide
atacagaccaagcacttaagtttgactttgggactatggttcagtgggcctatga

SEQ ID NO: 329158 - DNA, 50 bp, Artificial
  Synthetic oligonucleotide
atacagacgtaaaccgcgatgttgttggaaactatacgcgacgcgttgac

SEQ ID NO: 329159 - DNA, 60 bp, Artificial
  Synthetic oligonucleotide
atacagactgggcgctgttcagaatgagatcaccctgacgcacccagtcaccaaatacat

SEQ ID NO: 329160 - DNA, 54 bp, Artificial
  Synthetic oligonucleotide
atacagagacattacaacagacttatgcgtggactgcagggacaaatataccta

SEQ ID NO: 329161 - DNA, 55 bp, Artificial
  Synthetic oligonucleotide
atacagagagaagcgaaaatccggaataccgcagttaaagtgctagcacaaggcg

SEQ ID NO: 329162 - DNA, 54 bp, Artificial
  Synthetic oligonucleotide
atacagaggaactatccacccttatggaattgggggactttgatccttgggttg

SEQ ID NO: 329163 - DNA, 60 bp, Artificial
  Synthetic oligonucleotide
atacagaggaactggccacaatggtggatgtgggccagcttaggcttttggatgctaatg

SEQ ID NO: 329164 - DNA, 58 bp, Artificial
  Synthetic oligonucleotide
atacagaggaattatcaacacttatggaaatggggaatcttgattttggggatgctaa

SEQ ID NO: 329165 - DNA, 60 bp, Artificial
  Synthetic oligonucleotide
atacagaggaggctctgaaggtggacctgacaccacaccgacccacactcttgtgccaaa

SEQ ID NO: 329166 - DNA, 57 bp, Artificial
  Synthetic oligonucleotide
atacagagggcgattacttcaccctcaaaatccctttgtaggacatttgtccattga

SEQ ID NO: 329167 - DNA, 50 bp, Artificial
  Synthetic oligonucleotide
atacagagtatttagaattaaattgccggaccctaataaatttggttttc

SEQ ID NO: 329168 - DNA, 60 bp, Artificial
  Synthetic oligonucleotide
atacagatacattaatggatccatcaattaatacatcattacggtcgaacttgaatgcag

SEQ ID NO: 329169 - DNA, 57 bp, Artificial
  Synthetic oligonucleotide
atacagatagtcttttaaccccagcaagcactattgtacctgctattaattggttcc

SEQ ID NO: 329170 - DNA, 59 bp, Artificial
  Synthetic oligonucleotide
atacagatgatgatacccttcagtgaacgtgtttttaggatggcctcgtcctttgcgac

SEQ ID NO: 329171 - DNA, 57 bp, Artificial
  Synthetic oligonucleotide
atacagatgtaccgcatccgttccatggaaggtacccaagctgtaaatttcggcgaa

SEQ ID NO: 329172 - DNA, 58 bp, Artificial
  Synthetic oligonucleotide
atacagattggggaaattcctgtcccacttgtcgtcatcaaggaaacgccagttatca

SEQ ID NO: 329173 - DNA, 58 bp, Artificial
  Synthetic oligonucleotide
atacagcacacgggttactgtatgcataccaacaacgcacacgggataggagcccaca

SEQ ID NO: 329174 - DNA, 60 bp, Artificial
  Synthetic oligonucleotide
atacagcatcaagaatctcttcagctacttcgttcacttcagacacaacaatggcctcca

SEQ ID NO: 329175 - DNA, 55 bp, Artificial
  Synthetic oligonucleotide
atacagccaatctcatggactctcaacgagctgtagaacaaactaatcctcgggg

SEQ ID NO: 329176 - DNA, 60 bp, Artificial
  Synthetic oligonucleotide
atacagccgttgcaagatgctaaactaggactgttggatgatgccacagatgcatgctgg

SEQ ID NO: 329177 - DNA, 60 bp, Artificial
  Synthetic oligonucleotide
atacagcctggggggctactacacatccgtcagcagcctaatcactactaccgctagtga

SEQ ID NO: 329178 - DNA, 60 bp, Artificial
  Synthetic oligonucleotide
atacagcctgtgtgcctatatgcccatatacaaagccaaacctgttcgtggggtatggta

SEQ ID NO: 329179 - DNA, 57 bp, Artificial
  Synthetic oligonucleotide
atacagcgggtttgtgagaacactattccaacaaatgcgtgacgtactggggacatt

SEQ ID NO: 329180 - DNA, 55 bp, Artificial
  Synthetic oligonucleotide
atacagctgaccccttacccatggaacccgtggccgggccaacaacagccgtagc

SEQ ID NO: 329181 - DNA, 55 bp, Artificial
  Synthetic oligonucleotide
atacagctgcattgcaagcagtgttgtgttagtaggactcatactctctttcatc

SEQ ID NO: 329182 - DNA, 55 bp, Artificial
  Synthetic oligonucleotide
atacagcttgataacccgcgacctgtccctgtatgtgtggtgttctccggacccc

SEQ ID NO: 329183 - DNA, 55 bp, Artificial
  Synthetic oligonucleotide
atacaggaaacgaatacaaaggtgtgttccaagtggctggaacaagggtatgtta

SEQ ID NO: 329184 - DNA, 55 bp, Artificial
  Synthetic oligonucleotide
atacaggacatggacattgtggcctctgagcacttgctgcaccaatccattgttg

SEQ ID NO: 329185 - DNA, 53 bp, Artificial
  Synthetic oligonucleotide
atacaggactcccaaacaaaaggcccaacgtccctactataaggactgctaaa

SEQ ID NO: 329186 - DNA, 60 bp, Artificial
  Synthetic oligonucleotide
atacaggataggtgaagtcagggcgattagaagatcagttcgattggcaaaagatgttgt

SEQ ID NO: 329187 - DNA, 60 bp, Artificial
  Synthetic oligonucleotide
atacaggatatgcgtgaaacgcacaaaaggcctctggagtatttatatgattgtcctaac

SEQ ID NO: 329188 - DNA, 60 bp, Artificial
  Synthetic oligonucleotide
atacaggatatgcgtgaagctcataaacggcctctggaatatttatatgattgtccgaat

SEQ ID NO: 329189 - DNA, 55 bp, Artificial
  Synthetic oligonucleotide
atacaggatggagacatggtagatgcaggctatgggtgtctggactttcaggccc

SEQ ID NO: 329190 - DNA, 57 bp, Artificial
  Synthetic oligonucleotide
atacaggcggggtttttcttgttgacaagaatcctcacaataccgcagagtctagac

SEQ ID NO: 329191 - DNA, 59 bp, Artificial
  Synthetic oligonucleotide
atacaggctctctacttagtccagcacgaagtctggagacctctggcggcagcctacca

SEQ ID NO: 329192 - DNA, 59 bp, Artificial
  Synthetic oligonucleotide
atacaggtaattcgagatgtctaagtgatgtcacaagaggtaatggtcttactcatcgt

SEQ ID NO: 329193 - DNA, 60 bp, Artificial
  Synthetic oligonucleotide
atacaggtataatgatgggtcctatacaacgaccgattgttaatcgcgatggtgattctg

SEQ ID NO: 329194 - DNA, 60 bp, Artificial
  Synthetic oligonucleotide
atacaggtcgaccaaaacgcattaccagacgtcatcacagaagcgtcagagaaattcata

SEQ ID NO: 329195 - DNA, 60 bp, Artificial
  Synthetic oligonucleotide
atacaggtgagggtgcaggcgttgcatcgagcacaccaagggactatggtactagtcctt

SEQ ID NO: 329196 - DNA, 60 bp, Artificial
  Synthetic oligonucleotide
atacaggttcacttcatcagtagaggacgcactaaaggtctgcaatgatgatcacggaag

SEQ ID NO: 329197 - DNA, 60 bp, Artificial
  Synthetic oligonucleotide
atacagtataactttgatactagagacaaacatgctccattcgctcctctccgtaataat

SEQ ID NO: 329198 - DNA, 54 bp, Artificial
  Synthetic oligonucleotide
atacagtctactactactccaccttggaacttctttttggaacccgaagctcaa

SEQ ID NO: 329199 - DNA, 60 bp, Artificial
  Synthetic oligonucleotide
atacagtctactggtagcactcggctactgcgtctcatgtacgaggctgtggacttcgtg

SEQ ID NO: 329200 - DNA, 50 bp, Artificial
  Synthetic oligonucleotide
atacagtgatagggtggaacaaattactataggcaattcaaccattacca

SEQ ID NO: 329201 - DNA, 58 bp, Artificial
  Synthetic oligonucleotide
atacagtgtcgtcgttgccaatgtctataacacgccggagactaaactacgcgagtca

SEQ ID NO: 329202 - DNA, 60 bp, Artificial
  Synthetic oligonucleotide
atacagtgttagcatgttaccatctatgcataaccctctatgagcacaatagttaaaagc

SEQ ID NO: 329203 - DNA, 60 bp, Artificial
  Synthetic oligonucleotide
atacagttaaacatgggctcacaagtgtccacacaacgctccggctcgcatgaaaactct

SEQ ID NO: 329204 - DNA, 57 bp, Artificial
  Synthetic oligonucleotide
atacagttcaagagcaaacaccgtattgaaccagtatgtgtcttgatacatggcagt

SEQ ID NO: 329205 - DNA, 59 bp, Artificial
  Synthetic oligonucleotide
atacagttcaagtccaaatgccgtattgaacctgtctgcctattgctccacggaagccc

SEQ ID NO: 329206 - DNA, 53 bp, Artificial
  Synthetic oligonucleotide
atacagttgacagtgcacgtcttgggaggggtagaatgcttgttatgttcaca

SEQ ID NO: 329207 - DNA, 60 bp, Artificial
  Synthetic oligonucleotide
atacagttgtactttgttccgagtaaatacaatcctgctgatggcccatccaggcacaga

SEQ ID NO: 329208 - DNA, 59 bp, Artificial
  Synthetic oligonucleotide
atacataagacaaaacggacaaacaactgccagcactagtcgaatagaaccatactcaa

SEQ ID NO: 329209 - DNA, 57 bp, Artificial
  Synthetic oligonucleotide
atacataagcgttcacactatgtgacgaatgttccaatgcgtatactcagaggagtg

SEQ ID NO: 329210 - DNA, 55 bp, Artificial
  Synthetic oligonucleotide
atacatagaaacttccccgggtttgatttcctatctcaatgccttacaagcggaa

SEQ ID NO: 329211 - DNA, 50 bp, Artificial
  Synthetic oligonucleotide
atacataggttggcgctttgtgcgctaggtatactgttatcccgtaatta

SEQ ID NO: 329212 - DNA, 60 bp, Artificial
  Synthetic oligonucleotide
atacatatccacaggcgaagtgctttgccgcgcctggttcagggccagtgttagttaaca

SEQ ID NO: 329213 - DNA, 55 bp, Artificial
  Synthetic oligonucleotide
atacatatcttccgtagctaagccgaaaacatggcatgcagtcgaaagaagttga

SEQ ID NO: 329214 - DNA, 55 bp, Artificial
  Synthetic oligonucleotide
atacatatggagatacctgggagggagtagaggccatcattaggacactacaaca

SEQ ID NO: 329215 - DNA, 59 bp, Artificial
  Synthetic oligonucleotide
atacatcaaagacagttcttcttgactgctcttagcttttggccctgcactcaccagac

SEQ ID NO: 329216 - DNA, 50 bp, Artificial
  Synthetic oligonucleotide
atacatcaaggtagactacgtgggctacaatctgggcgctcttatcccac

SEQ ID NO: 329217 - DNA, 55 bp, Artificial
  Synthetic oligonucleotide
atacatcaggactgtttaatgacacaatatccagtagcactaatggcactatcac

SEQ ID NO: 329218 - DNA, 60 bp, Artificial
  Synthetic oligonucleotide
atacatcaggactgtttaatggtagtagaaggacagcgacaaatgatacaatcacactcc

SEQ ID NO: 329219 - DNA, 52 bp, Artificial
  Synthetic oligonucleotide
atacatcctgacatcaggatttgtgtcggacctatacgctcatggattcata

SEQ ID NO: 329220 - DNA, 60 bp, Artificial
  Synthetic oligonucleotide
atacatccttatatattcatagcactgagtacctgaagatgtcaaccatccagctattca

SEQ ID NO: 329221 - DNA, 59 bp, Artificial
  Synthetic oligonucleotide
atacatcgcggaaaaatatcgaggatgttggaaaacaatcaagcccatcgacgagtaca

SEQ ID NO: 329222 - DNA, 55 bp, Artificial
  Synthetic oligonucleotide
atacatcgtgggacgtgtgaacctatttgatttggaagcggaacctggaacaaaa

SEQ ID NO: 329223 - DNA, 55 bp, Artificial
  Synthetic oligonucleotide
atacatgaggcttgtacaagctgaaattagttatgttcgagagcacttgatacgg

SEQ ID NO: 329224 - DNA, 53 bp, Artificial
  Synthetic oligonucleotide
atacatgagtataacgtggaagatcttattataaaagccgattacttatctat

SEQ ID NO: 329225 - DNA, 60 bp, Artificial
  Synthetic oligonucleotide
atacatgagtccattaggtggaccaaggacccacgttgcactcaagagcatgtaaggtcc

SEQ ID NO: 329226 - DNA, 60 bp, Artificial
  Synthetic oligonucleotide
atacatgattcatacccagttgatcttctaattgacgaacaattctaggcttaacagccc

SEQ ID NO: 329227 - DNA, 60 bp, Artificial
  Synthetic oligonucleotide
atacatgccctgctctgaatccgacagcaaagtgtttcatggctcctgggtctggaccaa

SEQ ID NO: 329228 - DNA, 60 bp, Artificial
  Synthetic oligonucleotide
atacatggcgaaattcctaagcttcccagactacaaggcgttcatcagatcactttggcc

SEQ ID NO: 329229 - DNA, 59 bp, Artificial
  Synthetic oligonucleotide
atacatggctgctaacagggcgctggcacaagttttcgcagaaccttcttccaacgaaa

SEQ ID NO: 329230 - DNA, 55 bp, Artificial
  Synthetic oligonucleotide
atacatggtgaccgaggaccctttccgcggaccaggaaagaatgttcgcatcacg

SEQ ID NO: 329231 - DNA, 60 bp, Artificial
  Synthetic oligonucleotide
atacatgtatagctggtttaccagtcgaggattgtggtaggattgccgcattgatgacac

SEQ ID NO: 329232 - DNA, 59 bp, Artificial
  Synthetic oligonucleotide
atacatgtatagggtgagtgttcaatgttttttgactggctgactattgaacaggattt

SEQ ID NO: 329233 - DNA, 60 bp, Artificial
  Synthetic oligonucleotide
atacatgtcaaaagtgtcttatgagtgcagagtggtcagtggtaaactggtgatgggttt

SEQ ID NO: 329234 - DNA, 60 bp, Artificial
  Synthetic oligonucleotide
atacatgtcagctgtgctacttgaaacactcaaagcagatcccgacctgtggtgtgattg

SEQ ID NO: 329235 - DNA, 55 bp, Artificial
  Synthetic oligonucleotide
atacatgtgcagtgcaatgctagcaagtttcaccagggtactctattagtgtttt

SEQ ID NO: 329236 - DNA, 59 bp, Artificial
  Synthetic oligonucleotide
atacattaataatggattgcctccaattcaaaatactaggaatgtagtaccagtatcat

SEQ ID NO: 329237 - DNA, 60 bp, Artificial
  Synthetic oligonucleotide
atacattatcaacaaacatttaacagctatggaccactaagtgcttttccacatcctgcg

SEQ ID NO: 329238 - DNA, 50 bp, Artificial
  Synthetic oligonucleotide
atacattccggccgctccatccaatacgcagggaactgtagcaatgggat

SEQ ID NO: 329239 - DNA, 54 bp, Artificial
  Synthetic oligonucleotide
atacattcttggaccgtagtccttactagttcgtttaattgggccaccgacatc

SEQ ID NO: 329240 - DNA, 59 bp, Artificial
  Synthetic oligonucleotide
atacattgaactatggggaagggtgccaccacagggtgacacagaactgccaaaacaga

SEQ ID NO: 329241 - DNA, 60 bp, Artificial
  Synthetic oligonucleotide
atacattgcgtggtttgagcgcaagaatccataacatcgcgaatgcaacatcgatcttcg

SEQ ID NO: 329242 - DNA, 57 bp, Artificial
  Synthetic oligonucleotide
atacattggtatctaccagttcatggagtagaaaatacaacttagaaattggaatcc

SEQ ID NO: 329243 - DNA, 60 bp, Artificial
  Synthetic oligonucleotide
atacatttgacgcattgtcgaattaactgtgagaagtatctaatgcaaacattatacgta

SEQ ID NO: 329244 - DNA, 55 bp, Artificial
  Synthetic oligonucleotide
atacatttgtggatgaaaagatggaagtggacactattgactggaaatcgcgcta

SEQ ID NO: 329245 - DNA, 58 bp, Artificial
  Synthetic oligonucleotide
ataccaaaaatagacgctgatacgtatgtaggatcaaagatctattctcaagacaagt

SEQ ID NO: 329246 - DNA, 60 bp, Artificial
  Synthetic oligonucleotide
ataccaaaccataacagtgttgagacagctttgaacattactgttatttgcaagcatcag

SEQ ID NO: 329247 - DNA, 55 bp, Artificial
  Synthetic oligonucleotide
ataccaaccaacagttgctttagacaacgttgggcctgtatacccatggggacag

SEQ ID NO: 329248 - DNA, 55 bp, Artificial
  Synthetic oligonucleotide
ataccaacccaagttggaaactccaccttcgtcagattaccaagggatattatca

SEQ ID NO: 329249 - DNA, 60 bp, Artificial
  Synthetic oligonucleotide
ataccaacgactggcaacagatcttcatgaggatgtcaccaatcaaaggaccaaatggag

SEQ ID NO: 329250 - DNA, 56 bp, Artificial
  Synthetic oligonucleotide
ataccaacgttgggtactctgttcgccattggcggaccggaaatgcttgttggcgc

SEQ ID NO: 329251 - DNA, 55 bp, Artificial
  Synthetic oligonucleotide
ataccaactctgacagcaaaactttgacaggagcgaaaatgatgtaaggtgggtg

SEQ ID NO: 329252 - DNA, 60 bp, Artificial
  Synthetic oligonucleotide
ataccaagataaggcaatagattgtgatagtgaacctaccccatataatatctgtaacaa

SEQ ID NO: 329253 - DNA, 55 bp, Artificial
  Synthetic oligonucleotide
ataccaagcactgttactgtatacttttgggctcaggtccaaatgcccacacagg

SEQ ID NO: 329254 - DNA, 55 bp, Artificial
  Synthetic oligonucleotide
ataccaagcactgttgctatacacctttggactcaggtccaaatgcccacacaga

SEQ ID NO: 329255 - DNA, 57 bp, Artificial
  Synthetic oligonucleotide
ataccaaggtgaaagcagattaaacaggcagacaatagaatcggtgaaactggaaaa

SEQ ID NO: 329256 - DNA, 50 bp, Artificial
  Synthetic oligonucleotide
ataccaatattgagttgaccgaatctattgatcaccaaactaaggatgtc

SEQ ID NO: 329257 - DNA, 59 bp, Artificial
  Synthetic oligonucleotide
ataccaatgatgcaaagggcccaaaaactgacccaatatacaacatggatggtacatta

SEQ ID NO: 329258 - DNA, 54 bp, Artificial
  Synthetic oligonucleotide
ataccaattcaagggtattatggtaatgacaagccaaagtatacccccagaaaa

SEQ ID NO: 329259 - DNA, 58 bp, Artificial
  Synthetic oligonucleotide
ataccacaactggtgtctaccggattatggcaagaggaattcttggcacttaccaagc

SEQ ID NO: 329260 - DNA, 57 bp, Artificial
  Synthetic oligonucleotide
ataccacaaggcaccacttacccggcttgcactgccctacacggcaccacaccgtgt

SEQ ID NO: 329261 - DNA, 60 bp, Artificial
  Synthetic oligonucleotide
ataccacaattctaatcttcttgatatcgattacattgttaaattacatactgaaatcag

SEQ ID NO: 329262 - DNA, 60 bp, Artificial
  Synthetic oligonucleotide
ataccacacgcgtgcgcaattcgggatgtcaacggcagcaggcaacaacataacgcttgt

SEQ ID NO: 329263 - DNA, 56 bp, Artificial
  Synthetic oligonucleotide
ataccacaggactggtcagtatctggtatcaaacaaactacgtagttccaattggg

SEQ ID NO: 329264 - DNA, 57 bp, Artificial
  Synthetic oligonucleotide
ataccacagtagttgaaccctcagcccccaatgtggttcactattctagtggaagaa

SEQ ID NO: 329265 - DNA, 58 bp, Artificial
  Synthetic oligonucleotide
ataccacagttctattttatttgatatcgttcgttcttgtgagttatattctgaagac

SEQ ID NO: 329266 - DNA, 53 bp, Artificial
  Synthetic oligonucleotide
ataccacagttttgacctttttgatatcagttatattgttgaactacgtactt

SEQ ID NO: 329267 - DNA, 53 bp, Artificial
  Synthetic oligonucleotide
ataccacattggtgccttactatcaaatgatcggtaagcaaaaatttacaact

SEQ ID NO: 329268 - DNA, 55 bp, Artificial
  Synthetic oligonucleotide
ataccacctactcttttgatgcatatcaaaaaattacggttctcgcttatgggtg

SEQ ID NO: 329269 - DNA, 55 bp, Artificial
  Synthetic oligonucleotide
ataccaccttatattacgtgcacgtgaaatctgatcttaagcagaagttctacag

SEQ ID NO: 329270 - DNA, 59 bp, Artificial
  Synthetic oligonucleotide
ataccacgaaaccatgcgtgaagcgagttcagacccagattttacttgaggcttaatgc

SEQ ID NO: 329271 - DNA, 54 bp, Artificial
  Synthetic oligonucleotide
ataccactaaagaaatcttaatagttaatgactcgactgtggggaagtttagga

SEQ ID NO: 329272 - DNA, 60 bp, Artificial
  Synthetic oligonucleotide
ataccactcaaatcagatttagagcttgatttttcgttgccatcatctgcaacatacata

SEQ ID NO: 329273 - DNA, 60 bp, Artificial
  Synthetic oligonucleotide
ataccactgtatatcgacttacttgctcccacaaccgggagcggatacggatatgtatga

SEQ ID NO: 329274 - DNA, 59 bp, Artificial
  Synthetic oligonucleotide
ataccactgtgccactaagtacaggttttgacattcccatattttctgggcctgatgta

SEQ ID NO: 329275 - DNA, 53 bp, Artificial
  Synthetic oligonucleotide
ataccacttctcgaaccgcgacggttcgccatccgtcaaccggttctcttcgg

SEQ ID NO: 329276 - DNA, 53 bp, Artificial
  Synthetic oligonucleotide
ataccagaagtagcactaataataccaggaatccgggatttacttaaaactaa

SEQ ID NO: 329277 - DNA, 59 bp, Artificial
  Synthetic oligonucleotide
ataccaggacatatggccaattagtactgcacataacttgagccaggtcgtttgggtag

SEQ ID NO: 329278 - DNA, 55 bp, Artificial
  Synthetic oligonucleotide
ataccaggcttcctatggtgtctgagagaagtggccatgacggagggctctgagg

SEQ ID NO: 329279 - DNA, 58 bp, Artificial
  Synthetic oligonucleotide
ataccaggggctcgcgcggaccaaccctacttggacatcattgcctacttgtggacca

SEQ ID NO: 329280 - DNA, 60 bp, Artificial
  Synthetic oligonucleotide
ataccagtagtcgagttgtacatgagtttgccagcgatgaggacgtggtgattaatcttg

SEQ ID NO: 329281 - DNA, 60 bp, Artificial
  Synthetic oligonucleotide
ataccagttggaccagtctttccaccaggtatgaactggactgatctgatcactaattat

SEQ ID NO: 329282 - DNA, 56 bp, Artificial
  Synthetic oligonucleotide
ataccatatgttttcctacccatgtatcgttacctacttcatattatgaccggaag

SEQ ID NO: 329283 - DNA, 60 bp, Artificial
  Synthetic oligonucleotide
ataccatcattaacacatcaagttcgacataatcgtgaatttaagcatggacgatcgcag

SEQ ID NO: 329284 - DNA, 58 bp, Artificial
  Synthetic oligonucleotide
ataccatccttaacgagatctgataaataacctttgacttttactctccctgatgcac

SEQ ID NO: 329285 - DNA, 60 bp, Artificial
  Synthetic oligonucleotide
ataccatgagcgactggattcctcctacacagaatgtaccctctagagaggaagactggt

SEQ ID NO: 329286 - DNA, 54 bp, Artificial
  Synthetic oligonucleotide
ataccatggaagttcttctcatgtatgggcatagctcatctaccgacagaatgc

SEQ ID NO: 329287 - DNA, 60 bp, Artificial
  Synthetic oligonucleotide
ataccatggattagccagacacactacaggctcgtgcaacaagatgagtatactagcgca

SEQ ID NO: 329288 - DNA, 51 bp, Artificial
  Synthetic oligonucleotide
ataccatgtatgaggaaatgagaaattgctctttcaatataaccacagaag

SEQ ID NO: 329289 - DNA, 60 bp, Artificial
  Synthetic oligonucleotide
ataccatgtcgcagtgggtggagtactcccggtgaacgcagtgcacaagcgccaatgctc

SEQ ID NO: 329290 - DNA, 55 bp, Artificial
  Synthetic oligonucleotide
ataccattaatgactggactatcgcagggtttcacattgcaagatcacaaaggta

SEQ ID NO: 329291 - DNA, 55 bp, Artificial
  Synthetic oligonucleotide
ataccatttatggtattcaagtcaaagttagcagacatgggagaaggattagtat

SEQ ID NO: 329292 - DNA, 58 bp, Artificial
  Synthetic oligonucleotide
atacccaaaagctgtcttagtccacatcatagacttaccagatttcgctcgccctagt

SEQ ID NO: 329293 - DNA, 59 bp, Artificial
  Synthetic oligonucleotide
atacccaacatatggctacaattggtgtgctagcgacgccagagataccctttacaacg

SEQ ID NO: 329294 - DNA, 57 bp, Artificial
  Synthetic oligonucleotide
atacccaacatcagtcgacacccgccagtcggtaaggaatatgcgtctcccgagacc

SEQ ID NO: 329295 - DNA, 58 bp, Artificial
  Synthetic oligonucleotide
atacccaattaaacccttattggaacatgccaaaccaacattcaggcaaatcatggca

SEQ ID NO: 329296 - DNA, 53 bp, Artificial
  Synthetic oligonucleotide
atacccacgtccaaccctcaagtatgtaccacttcaactatatccggccattg

SEQ ID NO: 329297 - DNA, 60 bp, Artificial
  Synthetic oligonucleotide
atacccagaacttttgaagtacattcgtgagttttatctatggatgatgcatcatgaatg

SEQ ID NO: 329298 - DNA, 55 bp, Artificial
  Synthetic oligonucleotide
atacccaggtctcaagaatcgacatgtactaactacataaacaatgggttaccgc

SEQ ID NO: 329299 - DNA, 57 bp, Artificial
  Synthetic oligonucleotide
atacccatcccggcgccaaactacaagaaagcgctgtggagggtaagtgctactgac

SEQ ID NO: 329300 - DNA, 58 bp, Artificial
  Synthetic oligonucleotide
ataccccaaatgaatgaaccctacttcattgacgttgttcagtcttgctcacttggcg

SEQ ID NO: 329301 - DNA, 54 bp, Artificial
  Synthetic oligonucleotide
ataccccaagaggggaagatgcccaatttacgggttcttgcactagtccaatag

SEQ ID NO: 329302 - DNA, 59 bp, Artificial
  Synthetic oligonucleotide
ataccccagaggtcacgtggcactcgtgggacattagacgaggactctttggcaaagca

SEQ ID NO: 329303 - DNA, 57 bp, Artificial
  Synthetic oligonucleotide
ataccccaggcctagagctgttcgccgggttccctaaatgccacaaagatatatgac

SEQ ID NO: 329304 - DNA, 52 bp, Artificial
  Synthetic oligonucleotide
ataccccatgaactaacacaacggtgtacggattatacggccagtattttga

SEQ ID NO: 329305 - DNA, 53 bp, Artificial
  Synthetic oligonucleotide
atacccccaacccagggggcagtgtgtcgtaacgggtaactctgcagcggaac

SEQ ID NO: 329306 - DNA, 53 bp, Artificial
  Synthetic oligonucleotide
atacccccgggtgcgtgccctgcgttcgggagaataacacctcccgttgctgg

SEQ ID NO: 329307 - DNA, 60 bp, Artificial
  Synthetic oligonucleotide
ataccccctccagatttctctagggctccagtgattgtgactgggatgacgagtgccaaa

SEQ ID NO: 329308 - DNA, 53 bp, Artificial
  Synthetic oligonucleotide
atacccccttaattggtggcctctttcgctccacgtcaaccaagaatgtacaa

SEQ ID NO: 329309 - DNA, 56 bp, Artificial
  Synthetic oligonucleotide
ataccccgaagttcacctagatagcccgatagttaccaataagatagtagctatcc

SEQ ID NO: 329310 - DNA, 60 bp, Artificial
  Synthetic oligonucleotide
ataccccgtacagataatctgagatatgacgctactcttgacagagttataaatggggct

SEQ ID NO: 329311 - DNA, 54 bp, Artificial
  Synthetic oligonucleotide
atacccctaagaaaagaccaatctgagggtgtaaggtcgtccagattcggtatg

SEQ ID NO: 329312 - DNA, 56 bp, Artificial
  Synthetic oligonucleotide
atacccctatttctgtgtctggaaggcgcgtggaagtgcgcctataaagttaacat

SEQ ID NO: 329313 - DNA, 60 bp, Artificial
  Synthetic oligonucleotide
atacccgccacttcgttgcacgatggcaaaccgtacagtgcgccgattctgcttcacgtg

SEQ ID NO: 329314 - DNA, 57 bp, Artificial
  Synthetic oligonucleotide
atacccgcgtcgcaggtgtgtggtccggtgtattgcttcaccccgagccctgttgtg

SEQ ID NO: 329315 - DNA, 51 bp, Artificial
  Synthetic oligonucleotide
atacccggtgggaactcagctgagcgtttctatccctaaacgtgctgatga

SEQ ID NO: 329316 - DNA, 57 bp, Artificial
  Synthetic oligonucleotide
ataccctagaactttcagcagttagtagggactctgatttcgatgagaacttcactt

SEQ ID NO: 329317 - DNA, 59 bp, Artificial
  Synthetic oligonucleotide
ataccctagggtagatataccaaagattgctagatctttttatgaactatttgagcaga

SEQ ID NO: 329318 - DNA, 53 bp, Artificial
  Synthetic oligonucleotide
ataccctcgtttctgtgtcttagaggcgcgtcggagtgcgccgaaaaagtgaa

SEQ ID NO: 329319 - DNA, 52 bp, Artificial
  Synthetic oligonucleotide
ataccctgccccttcgaacccggggaccgcttccacagcgggatacaagacc

SEQ ID NO: 329320 - DNA, 59 bp, Artificial
  Synthetic oligonucleotide
ataccctggtgtcagatgtatttgcagagacaactggaaaggctctaataggcccgtcg

SEQ ID NO: 329321 - DNA, 57 bp, Artificial
  Synthetic oligonucleotide
ataccctgttgggtcacagctcccatgtgagcccgagccggacgtagcagtgctaac

SEQ ID NO: 329322 - DNA, 57 bp, Artificial
  Synthetic oligonucleotide
atacccttaattatgtgtctggaaggcgcgtggtaatgcgctgataaaggtgacctt

SEQ ID NO: 329323 - DNA, 50 bp, Artificial
  Synthetic oligonucleotide
ataccgatcccattcacccgtacatagacatcttacccgcagtcgaatca

SEQ ID NO: 329324 - DNA, 60 bp, Artificial
  Synthetic oligonucleotide
ataccgatttatgtggatgaggtcctgccaggcgatacgtttcagatgaacgcaaccgga

SEQ ID NO: 329325 - DNA, 60 bp, Artificial
  Synthetic oligonucleotide
ataccgcacaaacacaaaaggtgatgactatatacccacttgtgactgtactcaagctac

SEQ ID NO: 329326 - DNA, 60 bp, Artificial
  Synthetic oligonucleotide
ataccgcacggagtgcaatctatttggatgtctgctagggagtatgaagcggttggtggt

SEQ ID NO: 329327 - DNA, 51 bp, Artificial
  Synthetic oligonucleotide
ataccgcactaatgtgtctcatgattcacgaagattggttgaagtatttat

SEQ ID NO: 329328 - DNA, 60 bp, Artificial
  Synthetic oligonucleotide
ataccgccacttcgtgttatataaagccatgcgttacaagctaagcttcagacaatggct

SEQ ID NO: 329329 - DNA, 55 bp, Artificial
  Synthetic oligonucleotide
ataccgcccgtttatggtctcacaagccccagctacgaatttgagaccacggccc

SEQ ID NO: 329330 - DNA, 51 bp, Artificial
  Synthetic oligonucleotide
ataccgcgcggcaatccagaccagaacatagacaccctacgggcgtttcct

SEQ ID NO: 329331 - DNA, 57 bp, Artificial
  Synthetic oligonucleotide
ataccgcgtgccgacgtggaccactgggatgtctacaagggtgccagggtggtcctc

SEQ ID NO: 329332 - DNA, 60 bp, Artificial
  Synthetic oligonucleotide
ataccgctatatgatgcgatcaaatgcatgaaaacattcttcggatggaaagagcccaac

SEQ ID NO: 329333 - DNA, 50 bp, Artificial
  Synthetic oligonucleotide
ataccgctccttacgttggtttaggccgggttattaccaagatggttaac

SEQ ID NO: 329334 - DNA, 55 bp, Artificial
  Synthetic oligonucleotide
ataccgctcgtcgtcagaaatgtccccacaagagctctctagattccaggaccgt

SEQ ID NO: 329335 - DNA, 60 bp, Artificial
  Synthetic oligonucleotide
ataccgctgtatgatgcgatcaaatgcatgaagacctttttcggctggaaagagcctaac

SEQ ID NO: 329336 - DNA, 56 bp, Artificial
  Synthetic oligonucleotide
ataccggaacgcttatcaacagtggtcttaagagactcacagagtctgaagtattc

SEQ ID NO: 329337 - DNA, 59 bp, Artificial
  Synthetic oligonucleotide
ataccgggcgagaagtggtgggacggctacaccaatcaagacactgtcatcctagacga

SEQ ID NO: 329338 - DNA, 60 bp, Artificial
  Synthetic oligonucleotide
ataccggtatgtcaccccaggggagagaccatcgggcatattcgacacctcagtgatctg

SEQ ID NO: 329339 - DNA, 60 bp, Artificial
  Synthetic oligonucleotide
ataccgtataggactccaggagagtccctcaacttctgtcatatattgtggagtcctgga

SEQ ID NO: 329340 - DNA, 58 bp, Artificial
  Synthetic oligonucleotide
ataccgtccacttcgttgcgccttgttgctgggcgctcccacttatatactctactcg

SEQ ID NO: 329341 - DNA, 52 bp, Artificial
  Synthetic oligonucleotide
ataccgtttatgaacgagtatatgcgaattgctgcaaagactggacgtctgt

SEQ ID NO: 329342 - DNA, 57 bp, Artificial
  Synthetic oligonucleotide
ataccgtttgacttcacggaatttgataagactaaatgtccgattcaagccgtgata

SEQ ID NO: 329343 - DNA, 55 bp, Artificial
  Synthetic oligonucleotide
atacctaaaaggtgtgacatcctcggaagaaggaatcaagcccaacaaggtcaac

SEQ ID NO: 329344 - DNA, 51 bp, Artificial
  Synthetic oligonucleotide
atacctaataataaccagttggtattcaataatgagcgataatgaatttag

SEQ ID NO: 329345 - DNA, 58 bp, Artificial
  Synthetic oligonucleotide
atacctaccatagaagcagtgcataccacccacctgttaaaacagtggttcacattgg

SEQ ID NO: 329346 - DNA, 55 bp, Artificial
  Synthetic oligonucleotide
atacctacggaacagctccagcccgaatctcggtaccgtatgttggtatttcgaa

SEQ ID NO: 329347 - DNA, 60 bp, Artificial
  Synthetic oligonucleotide
atacctactaatagtaggcgttgtcctatagttgttggcacatctgatgaggttcgatac

SEQ ID NO: 329348 - DNA, 59 bp, Artificial
  Synthetic oligonucleotide
atacctagttttataatatatgcctgaccgaattaggtctgagttcgctacacgcatag

SEQ ID NO: 329349 - DNA, 54 bp, Artificial
  Synthetic oligonucleotide
atacctataacagtgaccattgcacccatgaacacagaattctcaggcattaga

SEQ ID NO: 329350 - DNA, 50 bp, Artificial
  Synthetic oligonucleotide
atacctatcccacaagccgaaatggaacgacgcacacttcaagtttctac

SEQ ID NO: 329351 - DNA, 59 bp, Artificial
  Synthetic oligonucleotide
atacctatggctgagcgtcaaaacaacgggtggcttaagaagttcactgagatgacaaa

SEQ ID NO: 329352 - DNA, 56 bp, Artificial
  Synthetic oligonucleotide
atacctcaagacacataaagcctctaggggacaccaaggggcaaaatcggccatcc

SEQ ID NO: 329353 - DNA, 54 bp, Artificial
  Synthetic oligonucleotide
atacctcaggcgcatttgggaccaaacctcgaacccaaccagttgtgatttggt

SEQ ID NO: 329354 - DNA, 60 bp, Artificial
  Synthetic oligonucleotide
atacctccaaatgctgccccagtagctgatatgatatgttttgtatcaggatgtaaagat

SEQ ID NO: 329355 - DNA, 55 bp, Artificial
  Synthetic oligonucleotide
atacctctatggggtctccacggctatcgtgtcgtgggcactcaaatgggagtac

SEQ ID NO: 329356 - DNA, 60 bp, Artificial
  Synthetic oligonucleotide
atacctctcagtgggtgtgatattacttgtgattttagagattctcagcaactctacata

SEQ ID NO: 329357 - DNA, 55 bp, Artificial
  Synthetic oligonucleotide
atacctgaggagcacctctagtgtccacctatatgtgaccctgtagtcaagggcc

SEQ ID NO: 329358 - DNA, 53 bp, Artificial
  Synthetic oligonucleotide
atacctggagatatcttagcgacgtgtttttcccaagaggagagtcaaatgct

SEQ ID NO: 329359 - DNA, 51 bp, Artificial
  Synthetic oligonucleotide
atacctggagcgcaatctcctcatccatgtgagatggacacgggaactcta

SEQ ID NO: 329360 - DNA, 57 bp, Artificial
  Synthetic oligonucleotide
atacctggtgacacgtgaagctgatgtcataccggcacgccgtagaggggactctac

SEQ ID NO: 329361 - DNA, 57 bp, Artificial
  Synthetic oligonucleotide
atacctggttggatcacagctcccatgtgagcccgagccagacgtatcagtgctcac

SEQ ID NO: 329362 - DNA, 56 bp, Artificial
  Synthetic oligonucleotide
atacctgtacggggtggggtcaagcattgtatcctgggccatcaagtgggagtacg

SEQ ID NO: 329363 - DNA, 56 bp, Artificial
  Synthetic oligonucleotide
atacctgtacggtatagggtcggcggttgtctccgttgcaatcaagtgggagtaca

SEQ ID NO: 329364 - DNA, 55 bp, Artificial
  Synthetic oligonucleotide
atacctgtacggtgtggggtcagcggttgtctccgttgtaatcaggtgggagtac

SEQ ID NO: 329365 - DNA, 57 bp, Artificial
  Synthetic oligonucleotide
ataccttacacgatctttgctcagacctagatgctaatccggggagggaaccgtgga

SEQ ID NO: 329366 - DNA, 59 bp, Artificial
  Synthetic oligonucleotide
ataccttatctcctcattcctgtggagaaaggaaaatactccgtgttcatacaatgtga

SEQ ID NO: 329367 - DNA, 55 bp, Artificial
  Synthetic oligonucleotide
ataccttatgaagagttgatctggtgatccattactggattgtaaggccttcggg

SEQ ID NO: 329368 - DNA, 53 bp, Artificial
  Synthetic oligonucleotide
ataccttattggaacagaacaaatgaaacagattctgattctccgttgggggg

SEQ ID NO: 329369 - DNA, 58 bp, Artificial
  Synthetic oligonucleotide
ataccttccctgaccagttcattcccaactatgacatcgtcactaactccgttgatgg

SEQ ID NO: 329370 - DNA, 58 bp, Artificial
  Synthetic oligonucleotide
ataccttggaagaacacaatcaatgggaatacaactggaccagagaattattgttctc

SEQ ID NO: 329371 - DNA, 53 bp, Artificial
  Synthetic oligonucleotide
atacctttaaatacaggatttgatactcctgttatgtctggccctgatatacc

SEQ ID NO: 329372 - DNA, 56 bp, Artificial
  Synthetic oligonucleotide
atacctttcatgagcattgcctcagcatactatatgttttatgatggatatgagga

SEQ ID NO: 329373 - DNA, 57 bp, Artificial
  Synthetic oligonucleotide
atacctttgggctcagatctaaatgaccgcacaaataattatgtgggcctaaagaac

SEQ ID NO: 329374 - DNA, 55 bp, Artificial
  Synthetic oligonucleotide
atacgaaatccctgttcccgtatgtttagtgggtgatgactggatattacggtgt

SEQ ID NO: 329375 - DNA, 55 bp, Artificial
  Synthetic oligonucleotide
atacgaacacgcgcgtctcccgttattcgagtagcgcacgtcacaagttgcgccg

SEQ ID NO: 329376 - DNA, 59 bp, Artificial
  Synthetic oligonucleotide
atacgaacgcgaatataatcgaattcattccgcccttcacgacaaagctcgccaagatg

SEQ ID NO: 329377 - DNA, 60 bp, Artificial
  Synthetic oligonucleotide
atacgaactgacaccaggagctaccgtccctttcctgcttagcctaacatgctgcatcag

SEQ ID NO: 329378 - DNA, 55 bp, Artificial
  Synthetic oligonucleotide
atacgaactttccagtttgtccactctacgtactaattatgatggtacttccact

SEQ ID NO: 329379 - DNA, 55 bp, Artificial
  Synthetic oligonucleotide
atacgaaggtaggtaacgagcttacaaacttgtcagactaccataggaaacgata

SEQ ID NO: 329380 - DNA, 60 bp, Artificial
  Synthetic oligonucleotide
atacgaagtgctcaagtactgggttggttgcagctgcaccacacttggatcgtgtgacag

SEQ ID NO: 329381 - DNA, 60 bp, Artificial
  Synthetic oligonucleotide
atacgaatacaaattggtcttgatggatggacgtcatggtcaaagtagccaatccataag

SEQ ID NO: 329382 - DNA, 50 bp, Artificial
  Synthetic oligonucleotide
atacgaatacacggactgtgcaccgcgtctctgccacaacccggcctgaa

SEQ ID NO: 329383 - DNA, 60 bp, Artificial
  Synthetic oligonucleotide
atacgaatgggggtcgatgcttttatggtggtgatatgtttcgccagatcaattcaacat

SEQ ID NO: 329384 - DNA, 53 bp, Artificial
  Synthetic oligonucleotide
atacgaatttaggaaacatccaacaacgaacaagacaacggttagtttcagta

SEQ ID NO: 329385 - DNA, 55 bp, Artificial
  Synthetic oligonucleotide
atacgacaaaggctctattgatttagttgagagagtcagctctagagaggctacc

SEQ ID NO: 329386 - DNA, 58 bp, Artificial
  Synthetic oligonucleotide
atacgacaactacgaggtcatgggttcattttcgtaagtacacacaagaatatacagc

SEQ ID NO: 329387 - DNA, 50 bp, Artificial
  Synthetic oligonucleotide
atacgacaagcattagaatccgaaatgattacatcaatgggtgccttagc

SEQ ID NO: 329388 - DNA, 57 bp, Artificial
  Synthetic oligonucleotide
atacgaccaagcttccgttcgctacactcgatctcgatactacctttagttcgtata

SEQ ID NO: 329389 - DNA, 55 bp, Artificial
  Synthetic oligonucleotide
atacgaccagcaaacaagacacttgtgcctaaggtttcgggatttcaatataggg

SEQ ID NO: 329390 - DNA, 60 bp, Artificial
  Synthetic oligonucleotide
atacgacccggctgatgctacacctaccagcttccaacaagtgcaacagatgtataacag

SEQ ID NO: 329391 - DNA, 56 bp, Artificial
  Synthetic oligonucleotide
atacgacctatctactcaaggatttgtcctgcccggggtcttacgccttgtacgca

SEQ ID NO: 329392 - DNA, 56 bp, Artificial
  Synthetic oligonucleotide
atacgacctgtccactcagggattcgtcctgcctggggtcttacgcctagtacgta

SEQ ID NO: 329393 - DNA, 50 bp, Artificial
  Synthetic oligonucleotide
atacgaccttccttggtacatgggaaaatttcggaaattaagacaaaacc

SEQ ID NO: 329394 - DNA, 55 bp, Artificial
  Synthetic oligonucleotide
atacgacgataggaattggctgatacctgccaatagatgtacatcgacggaattg

SEQ ID NO: 329395 - DNA, 58 bp, Artificial
  Synthetic oligonucleotide
atacgacggagagacgcgaaatcttcatcgtagaaacgggcctctgttcattggccga

SEQ ID NO: 329396 - DNA, 60 bp, Artificial
  Synthetic oligonucleotide
atacgagagcagatatcattaactgaaaacatgactcaagtggtaagtattggcggccgt

SEQ ID NO: 329397 - DNA, 60 bp, Artificial
  Synthetic oligonucleotide
atacgagatgctaaaggtgccaaatgcattgaccgacgataggtcaaagcccactcaagg

SEQ ID NO: 329398 - DNA, 60 bp, Artificial
  Synthetic oligonucleotide
atacgagatgggcatctaatgttgactttgaccgagactcgtctgtcatcatggcgccac

SEQ ID NO: 329399 - DNA, 60 bp, Artificial
  Synthetic oligonucleotide
atacgagcaaagagtggctctaaacctcgatcacctaatcctatacacgccggagcagac

SEQ ID NO: 329400 - DNA, 57 bp, Artificial
  Synthetic oligonucleotide
atacgagcagtttctcggattttattctggtcgcaaattagaaaggtaccagcaggc

SEQ ID NO: 329401 - DNA, 55 bp, Artificial
  Synthetic oligonucleotide
atacgagcgattcgtataccaatacattcggcaagagtttgctgaagaggttgac

SEQ ID NO: 329402 - DNA, 56 bp, Artificial
  Synthetic oligonucleotide
atacgaggaattgggacctggattgcagaggaagattgttgggatgccccctttaa

SEQ ID NO: 329403 - DNA, 55 bp, Artificial
  Synthetic oligonucleotide
atacgaggacaagcgtatcaccatagatggtggtttaccttcaggttgtagtgcc

SEQ ID NO: 329404 - DNA, 60 bp, Artificial
  Synthetic oligonucleotide
atacgaggagataccgatatacctagaactcctgccagagaatcccaatcaacatttggc

SEQ ID NO: 329405 - DNA, 54 bp, Artificial
  Synthetic oligonucleotide
atacgaggagtttattcgaaagattagaagcgtcccagttggacgttgtttgac

SEQ ID NO: 329406 - DNA, 60 bp, Artificial
  Synthetic oligonucleotide
atacgaggcgagatacattatatctaggataaggtcgtctaccggtgcggcgcgtatgag

SEQ ID NO: 329407 - DNA, 60 bp, Artificial
  Synthetic oligonucleotide
atacgaggtttataattcagaatcaatctaatcagctcttaagtcaatatctgtttgaaa

SEQ ID NO: 329408 - DNA, 60 bp, Artificial
  Synthetic oligonucleotide
atacgagtgctacggcgccccaatcaccaacgaccgctggagacctgatgcactacaagc

SEQ ID NO: 329409 - DNA, 53 bp, Artificial
  Synthetic oligonucleotide
atacgataaccttgtactgaaaggtgtcatgttaatgtcattttactgtttac

SEQ ID NO: 329410 - DNA, 54 bp, Artificial
  Synthetic oligonucleotide
atacgatacggaattgactctgccggtattgaagcagaagcgcgtcggtggata

SEQ ID NO: 329411 - DNA, 58 bp, Artificial
  Synthetic oligonucleotide
atacgatcagcctacaactacgtcacttggaatttaaaataggttatgtcagctgacc

SEQ ID NO: 329412 - DNA, 60 bp, Artificial
  Synthetic oligonucleotide
atacgatgagtgtcgcgctatggtggaagagctgcatcgatcgcgtaggggcgccaatct

SEQ ID NO: 329413 - DNA, 60 bp, Artificial
  Synthetic oligonucleotide
atacgatgcttaatgttagcggccgctaattatccaagacttgaggggatcatagtccag

SEQ ID NO: 329414 - DNA, 54 bp, Artificial
  Synthetic oligonucleotide
atacgatgggggattcggtgaaggtcctgcgaaatatcaggtactggttaaaaa

SEQ ID NO: 329415 - DNA, 60 bp, Artificial
  Synthetic oligonucleotide
atacgattgggtgagaacaaggatgtcatagtcacaagggaaccctacattagctgcgat

SEQ ID NO: 329416 - DNA, 54 bp, Artificial
  Synthetic oligonucleotide
atacgattttggaggtgggactttcgacgtgtctattatttcctaccgcaacaa

SEQ ID NO: 329417 - DNA, 60 bp, Artificial
  Synthetic oligonucleotide
atacgcaactaaaagtctattaatatggctgtctctgccgaataaatcagagcgtatgca

SEQ ID NO: 329418 - DNA, 56 bp, Artificial
  Synthetic oligonucleotide
atacgcaagtgcgtcggtttccgggacttgttacagtctcgaagggtgtggccata

SEQ ID NO: 329419 - DNA, 59 bp, Artificial
  Synthetic oligonucleotide
atacgcagactttaggaataggctgtacaactacaaatacagcaacatttgaggaagtg

SEQ ID NO: 329420 - DNA, 60 bp, Artificial
  Synthetic oligonucleotide
atacgccaatgcttattgttcacatgctaatgggtcaggaattgtacagatacaagtatc

SEQ ID NO: 329421 - DNA, 60 bp, Artificial
  Synthetic oligonucleotide
atacgccatagcagggagaccaggtggcggtaaaacctatgaggctgtcgcctatcacat

SEQ ID NO: 329422 - DNA, 60 bp, Artificial
  Synthetic oligonucleotide
atacgccattctgtgcttgaattgcagtgatgttctcccctgtgcgtaaatccatggtta

SEQ ID NO: 329423 - DNA, 55 bp, Artificial
  Synthetic oligonucleotide
atacgccgccgtaatctccggaggatcacacccgcccgggaaccatgccgtccaa

SEQ ID NO: 329424 - DNA, 55 bp, Artificial
  Synthetic oligonucleotide
atacgccggcagtggatttgtggtggaagccgccgacgccatcgacaccttgctc

SEQ ID NO: 329425 - DNA, 55 bp, Artificial
  Synthetic oligonucleotide
atacgcctccctttccggacaacgcctattgttttaacatcttgcctagttgata

SEQ ID NO: 329426 - DNA, 57 bp, Artificial
  Synthetic oligonucleotide
atacgcctgcctatttccattatactgaaacagatctaaaaaaactcagagaccttg

SEQ ID NO: 329427 - DNA, 59 bp, Artificial
  Synthetic oligonucleotide
atacgcgaggcgagggctgaattgaaatggcgttacgatgatgaaccaaaggttcttga

SEQ ID NO: 329428 - DNA, 58 bp, Artificial
  Synthetic oligonucleotide
atacgcgatatacgtcgagtacggaacgggaatctacgcagttgatggaaacggcaga

SEQ ID NO: 329429 - DNA, 59 bp, Artificial
  Synthetic oligonucleotide
atacgcgatttatacgtcttggccaagccggcctatatcaacaccatagtggacaaata

SEQ ID NO: 329430 - DNA, 59 bp, Artificial
  Synthetic oligonucleotide
atacgcgcaacagtctcagaatcttccatcgttctacctgaagggaagggatctttctg

SEQ ID NO: 329431 - DNA, 50 bp, Artificial
  Synthetic oligonucleotide
atacgcgcaatgcatcccgtccaaaaccgcgtccacagccgtgtcttcgc

SEQ ID NO: 329432 - DNA, 60 bp, Artificial
  Synthetic oligonucleotide
atacgcgcgggggcgcggccttgatcatccggccaccattggcgcgcttgaggaaattca

SEQ ID NO: 329433 - DNA, 53 bp, Artificial
  Synthetic oligonucleotide
atacgcgcgtcccctcccggcttccgtactacgtcaggcggggcgtggccgta

SEQ ID NO: 329434 - DNA, 55 bp, Artificial
  Synthetic oligonucleotide
atacgcggggcttaccctaaaatccagaccacgagtcgtgtgctacggtctctgt

SEQ ID NO: 329435 - DNA, 59 bp, Artificial
  Synthetic oligonucleotide
atacgcggtaaaatgcgtgttgtaggtatgcttgttgctggaaaggataagaccagctg

SEQ ID NO: 329436 - DNA, 56 bp, Artificial
  Synthetic oligonucleotide
atacgcggttgacggaccgacaagtctctatcaccaagccaataagggagttagag

SEQ ID NO: 329437 - DNA, 57 bp, Artificial
  Synthetic oligonucleotide
atacgcgttactcggtggctgtcaagttcgactactggaaaacggggcagctatagc

SEQ ID NO: 329438 - DNA, 58 bp, Artificial
  Synthetic oligonucleotide
atacgctcgcgtgtttacgcgccaccgtatttcaagtctattagcgctcagctctgat

SEQ ID NO: 329439 - DNA, 60 bp, Artificial
  Synthetic oligonucleotide
atacgctctaacatcaattcacaaaggcagtcctatgaagtgcaaattcagtctatacgc

SEQ ID NO: 329440 - DNA, 58 bp, Artificial
  Synthetic oligonucleotide
atacggaaattctatgcgtggcttctcgaaatgcaaccatttgcaaatctagcgaaag

SEQ ID NO: 329441 - DNA, 53 bp, Artificial
  Synthetic oligonucleotide
atacggaatgttgaatttcctcttgatgagtgccggcgctcttgtggaggaga

SEQ ID NO: 329442 - DNA, 60 bp, Artificial
  Synthetic oligonucleotide
atacggagaacgcactattactgtatatggcatgtacccatgcctctaaccccgtgtatg

SEQ ID NO: 329443 - DNA, 50 bp, Artificial
  Synthetic oligonucleotide
atacggagcctatgaaactagaggatgcagtgtatggtacagaggggttg

SEQ ID NO: 329444 - DNA, 60 bp, Artificial
  Synthetic oligonucleotide
atacggatgtaactcgttctgtatctctgagtcgtcctctgattgacccattcctattgt

SEQ ID NO: 329445 - DNA, 53 bp, Artificial
  Synthetic oligonucleotide
atacggccccgcgacccgatctgtgctttggacggacatggtaaaaacccctg

SEQ ID NO: 329446 - DNA, 50 bp, Artificial
  Synthetic oligonucleotide
atacggcgtgggaggggtctgatctgtgggtgggggtccgatgtgaaagg

SEQ ID NO: 329447 - DNA, 58 bp, Artificial
  Synthetic oligonucleotide
atacggctacgaaaaacgcctctctttgagtgattgtactagagaacaagcgagtcaa

SEQ ID NO: 329448 - DNA, 60 bp, Artificial
  Synthetic oligonucleotide
atacggctataatatggcatgttaccacccgctcctcgcctataaatgcgatggcaaagt

SEQ ID NO: 329449 - DNA, 58 bp, Artificial
  Synthetic oligonucleotide
atacgggagctgatgtcactatcatcaagctagaggactggcctcctaattggcctat

SEQ ID NO: 329450 - DNA, 55 bp, Artificial
  Synthetic oligonucleotide
atacggggattcccttcgttttcacaagtgtccatcgttattcatgtgaaaggcc

SEQ ID NO: 329451 - DNA, 53 bp, Artificial
  Synthetic oligonucleotide
atacggggcgccaacctacacctggggggagaatgaaacggatgtgttcttac

SEQ ID NO: 329452 - DNA, 56 bp, Artificial
  Synthetic oligonucleotide
atacgggtagaacaggcttccaccccgtatttcttcggctgtgatcctgtacctga

SEQ ID NO: 329453 - DNA, 57 bp, Artificial
  Synthetic oligonucleotide
atacgggtagaacagttggaggggtcgtctccactcaggaagtgtgacctcaatcta

SEQ ID NO: 329454 - DNA, 56 bp, Artificial
  Synthetic oligonucleotide
atacgggtccggaaccagtcaggggcaactagccaggctagtcgccatgaaggaag

SEQ ID NO: 329455 - DNA, 58 bp, Artificial
  Synthetic oligonucleotide
atacgggttccacaatggtcgttaaatcaatcacagtttcgacatacgccaatgaata

SEQ ID NO: 329456 - DNA, 54 bp, Artificial
  Synthetic oligonucleotide
atacggtaataagctgctccagtaggaatgtcagcgattgatagatatcctccg

SEQ ID NO: 329457 - DNA, 59 bp, Artificial
  Synthetic oligonucleotide
atacggtagtttcagaacttattagggaatacagcaatagatccgccattggcaataca

SEQ ID NO: 329458 - DNA, 58 bp, Artificial
  Synthetic oligonucleotide
atacggtcacgcaaatcgggggctattggcacgcgctcaagtgcccctgcgttgagtt

SEQ ID NO: 329459 - DNA, 55 bp, Artificial
  Synthetic oligonucleotide
atacggtccaaccagttggagttgtataccggcgtgttgctaacctcccagcttg

SEQ ID NO: 329460 - DNA, 55 bp, Artificial
  Synthetic oligonucleotide
atacggtgatctgaaccttcgaaatagatgttcaactagggtggcggttcactgt

SEQ ID NO: 329461 - DNA, 55 bp, Artificial
  Synthetic oligonucleotide
atacggtgctgctttactgcgcaagtactttgcagtagcccagggtgaaataacg

SEQ ID NO: 329462 - DNA, 60 bp, Artificial
  Synthetic oligonucleotide
atacggtgggatacgatctcatacgtgatttgatacttgtcatacgtgcacgtaattatg

SEQ ID NO: 329463 - DNA, 52 bp, Artificial
  Synthetic oligonucleotide
atacggttcacgaagttcaaggggagacatataagagggttcgtttagtacg

SEQ ID NO: 329464 - DNA, 54 bp, Artificial
  Synthetic oligonucleotide
atacggtttgttcaaggtcgtcgcacactatggtcaaggtttaaggaccctgaa

SEQ ID NO: 329465 - DNA, 58 bp, Artificial
  Synthetic oligonucleotide
atacgtaagaatggactgttttatgagagcgatgagcctcgagcggatttattttact

SEQ ID NO: 329466 - DNA, 54 bp, Artificial
  Synthetic oligonucleotide
atacgtaagactctcacctactcgggtgccacctacgccgttcaactcggcccc

SEQ ID NO: 329467 - DNA, 59 bp, Artificial
  Synthetic oligonucleotide
atacgtacagtttacctttgacacaagcaggatggagaacaatcctcaattgtgtacca

SEQ ID NO: 329468 - DNA, 55 bp, Artificial
  Synthetic oligonucleotide
atacgtacggttcgattacatccattcccaatatctctgggttttcaagtacaag

SEQ ID NO: 329469 - DNA, 57 bp, Artificial
  Synthetic oligonucleotide
atacgtatacacgagatggagaggatgttacagctcacacgacgtgctcagtaaacg

SEQ ID NO: 329470 - DNA, 55 bp, Artificial
  Synthetic oligonucleotide
atacgtcacggttcctgacatcttcctccccgagaagtacaactgcagaaccccg

SEQ ID NO: 329471 - DNA, 57 bp, Artificial
  Synthetic oligonucleotide
atacgtcagggtctgtacagtctccagtatgggagactatgctgcctgtggcgggtg

SEQ ID NO: 329472 - DNA, 56 bp, Artificial
  Synthetic oligonucleotide
atacgtgaccaaaacttactagcactcaggctctgcgaagtacctcgaagtcagcc

SEQ ID NO: 329473 - DNA, 59 bp, Artificial
  Synthetic oligonucleotide
atacgtgcgccgacgcagtttaccaagacggagcttgatgccgtaaatttatatgttgc

SEQ ID NO: 329474 - DNA, 55 bp, Artificial
  Synthetic oligonucleotide
atacgtggcttcccgtatttgaggtttgtctgccactccttttgcgcaccaatta

SEQ ID NO: 329475 - DNA, 50 bp, Artificial
  Synthetic oligonucleotide
atacgtgggaggccctatgtacaattcacagggtcaatcctgcggctacc

SEQ ID NO: 329476 - DNA, 55 bp, Artificial
  Synthetic oligonucleotide
atacgtgtgtaaccgcggaggctgggtcaaccagataggggtagccgtggaggaa

SEQ ID NO: 329477 - DNA, 60 bp, Artificial
  Synthetic oligonucleotide
atacgttcaatctgagttcagagaggagcaccctgcagttaaggaccgctccttgtgcgc

SEQ ID NO: 329478 - DNA, 60 bp, Artificial
  Synthetic oligonucleotide
atacgttctaaacacattcttgtgtctgagcggtatgcggaaccattgcccaccatagtc

SEQ ID NO: 329479 - DNA, 60 bp, Artificial
  Synthetic oligonucleotide
atacgttctccctatcatcgaactccactgcgtttgagagatgcacaagtggcgagctct

SEQ ID NO: 329480 - DNA, 59 bp, Artificial
  Synthetic oligonucleotide
atacgttgcgaagaattaccctaactacaagggttctgagatcaagtgcgcatcatcta

SEQ ID NO: 329481 - DNA, 50 bp, Artificial
  Synthetic oligonucleotide
atacgttgtaatgctaaattcagatgcagaagataatcctggagacttag

SEQ ID NO: 329482 - DNA, 57 bp, Artificial
  Synthetic oligonucleotide
atacgtttctatggtcccactcaacggcttatattactacaacggtgcaacctcata

SEQ ID NO: 329483 - DNA, 59 bp, Artificial
  Synthetic oligonucleotide
atacgttttgatgtattggtcgtcaaatatttctgcatatccagtcgatattttgtaat

SEQ ID NO: 329484 - DNA, 60 bp, Artificial
  Synthetic oligonucleotide
atactaacaagggatggaggaaatacctctaatgatgctgaaatcttcagacctggagga

SEQ ID NO: 329485 - DNA, 54 bp, Artificial
  Synthetic oligonucleotide
atactaacacggttatgttctggttagttagggatcgtcgcccagttacaacgc

SEQ ID NO: 329486 - DNA, 50 bp, Artificial
  Synthetic oligonucleotide
atactaagaaagatccgagacaaacgcggtacatgtgctaatgaaacccc

SEQ ID NO: 329487 - DNA, 50 bp, Artificial
  Synthetic oligonucleotide
atactaagcatgatgaaaagtgcacaggaccctgcccagctataatagat

SEQ ID NO: 329488 - DNA, 56 bp, Artificial
  Synthetic oligonucleotide
atactaagcttccggagcccacgttgattacgcctcccgaactcacacgcccaaca

SEQ ID NO: 329489 - DNA, 55 bp, Artificial
  Synthetic oligonucleotide
atactaaggccaaacgatacaattagctttgaaagtactgggaactttatagctc

SEQ ID NO: 329490 - DNA, 51 bp, Artificial
  Synthetic oligonucleotide
atactaaggccgaatgatgcgatcagttttgaaagtaacgggaacttcata

SEQ ID NO: 329491 - DNA, 57 bp, Artificial
  Synthetic oligonucleotide
atactaattgagcacaaaggaacgataattggaaagcagaatgatacttgcacagcc

SEQ ID NO: 329492 - DNA, 55 bp, Artificial
  Synthetic oligonucleotide
atactacaaggctctagaaggctccttaggacaccaggggtaaattcggccatcc

SEQ ID NO: 329493 - DNA, 60 bp, Artificial
  Synthetic oligonucleotide
atactacacaggcgatgagagacagacaacggagtggtgtagtacaattgttcttaagag

SEQ ID NO: 329494 - DNA, 59 bp, Artificial
  Synthetic oligonucleotide
atactacagatcatttggaggtgaaggaaccgagaaacaggtaaaggcatcattgaata

SEQ ID NO: 329495 - DNA, 59 bp, Artificial
  Synthetic oligonucleotide
atactacaggcttggttagtatatggtatcagacgaattatgtagttccaattggggca

SEQ ID NO: 329496 - DNA, 56 bp, Artificial
  Synthetic oligonucleotide
atactacatcgcgaggatgaactttaacttttacaactcggctggttgaactacca

SEQ ID NO: 329497 - DNA, 54 bp, Artificial
  Synthetic oligonucleotide
atactaccgaattgtatcagactaagggttcaagggacgttccaattaaagcaa

SEQ ID NO: 329498 - DNA, 60 bp, Artificial
  Synthetic oligonucleotide
atactaccggtcaggttcatttattatccttcatcagtgcatgcccagatttcaagttaa

SEQ ID NO: 329499 - DNA, 55 bp, Artificial
  Synthetic oligonucleotide
atactacggggaccactgcacttccaaagacgcgcaatcctgggggcactaaagt

SEQ ID NO: 329500 - DNA, 56 bp, Artificial
  Synthetic oligonucleotide
atactacgtattgttagtagtttggtgttagcccgtaaacatgattcgtgctgttc

SEQ ID NO: 329501 - DNA, 55 bp, Artificial
  Synthetic oligonucleotide
atactacgtcaaaaactggtttgaatgtaacccagttcaagactacatggggaca

SEQ ID NO: 329502 - DNA, 55 bp, Artificial
  Synthetic oligonucleotide
atactactagcaatttcctcagacctccagatagatagcgcagatgaacctggtc

SEQ ID NO: 329503 - DNA, 60 bp, Artificial
  Synthetic oligonucleotide
atactactcagcctcctactctgatccttgctccctacaatgtccctacctaggaagtca

SEQ ID NO: 329504 - DNA, 57 bp, Artificial
  Synthetic oligonucleotide
atactactctgactgtatcaaagaaggatccaaagtagcttgctataaagttaaaag

SEQ ID NO: 329505 - DNA, 58 bp, Artificial
  Synthetic oligonucleotide
atactactgacccattgggtctacagtcaaaacccaaccagtggcaataacacagcca

SEQ ID NO: 329506 - DNA, 53 bp, Artificial
  Synthetic oligonucleotide
atactactgtccctctttcattacctggtgacatgtttgtacagcctggtcct

SEQ ID NO: 329507 - DNA, 58 bp, Artificial
  Synthetic oligonucleotide
atactagaaaaagagcacaacgggaaactctgcagtctcaaaggagtgaggcccctca

SEQ ID NO: 329508 - DNA, 59 bp, Artificial
  Synthetic oligonucleotide
atactagaaacagggtatgtatgtagcaaattccattcagatacccccaggccagccga

SEQ ID NO: 329509 - DNA, 57 bp, Artificial
  Synthetic oligonucleotide
atactagaacttctatgttagctgataggggggggtatgtacctgtgtacaagcaag

SEQ ID NO: 329510 - DNA, 59 bp, Artificial
  Synthetic oligonucleotide
atactagagataagctactagtaagaatgtcccaatttgcatcagaagggaaaacatta

SEQ ID NO: 329511 - DNA, 59 bp, Artificial
  Synthetic oligonucleotide
atactagatctggtgccgcaacccgaaattgacctacactgctacgaacaattggacta

SEQ ID NO: 329512 - DNA, 50 bp, Artificial
  Synthetic oligonucleotide
atactagcatagtccctttactggaagctacccctgatgtgcccattgat

SEQ ID NO: 329513 - DNA, 55 bp, Artificial
  Synthetic oligonucleotide
atactagcgcaggctagcatagctccgcacatctgggggtctgcggcggtcgcac

SEQ ID NO: 329514 - DNA, 58 bp, Artificial
  Synthetic oligonucleotide
atactaggcgcgctaaagtttgggtgcaagatacttggagatcgattggacgtgcccc

SEQ ID NO: 329515 - DNA, 59 bp, Artificial
  Synthetic oligonucleotide
atactagggttgtatcactaagaacactagcagtcaatagggatggtggactttacaga

SEQ ID NO: 329516 - DNA, 56 bp, Artificial
  Synthetic oligonucleotide
atactagtcagtatatatgtagccctgttcttacggataatccccgaccgaacgac

SEQ ID NO: 329517 - DNA, 59 bp, Artificial
  Synthetic oligonucleotide
atactatagaggtcttcagatcgaacggtctgactgccaacgaatcaggaaggctaatt

SEQ ID NO: 329518 - DNA, 60 bp, Artificial
  Synthetic oligonucleotide
atactataggagtgtatgtgatagggtttacacttcctatcatcctaaaggcattatata

SEQ ID NO: 329519 - DNA, 55 bp, Artificial
  Synthetic oligonucleotide
atactatgaagctatacatccttgcacagttttctgtgtcttgtcaggtcccggg

SEQ ID NO: 329520 - DNA, 60 bp, Artificial
  Synthetic oligonucleotide
atactatgacatgtatcatgagaagccaataatttacatgataggatcagcaccttcata

SEQ ID NO: 329521 - DNA, 55 bp, Artificial
  Synthetic oligonucleotide
atactatgagcctaccatcatgctgcccaagcaagtagcaaccttggagcatgcc

SEQ ID NO: 329522 - DNA, 60 bp, Artificial
  Synthetic oligonucleotide
atactattcattgaggaggggaaaatcgttcatactagcacattgtcaggaagtgctcag

SEQ ID NO: 329523 - DNA, 60 bp, Artificial
  Synthetic oligonucleotide
atactattctgctagtgacgaatctgacttggacgagtcgttgcttagtgacacgcccgg

SEQ ID NO: 329524 - DNA, 60 bp, Artificial
  Synthetic oligonucleotide
atactattgtcacgatggctgagtttgcttggtgttatgacactgatcaatttgaccgat

SEQ ID NO: 329525 - DNA, 58 bp, Artificial
  Synthetic oligonucleotide
atactcaaaaagaacgttcgtatgtcagggagagagtatatacctactcattagactc

SEQ ID NO: 329526 - DNA, 51 bp, Artificial
  Synthetic oligonucleotide
atactcaaactacattgttaacaaattgcgaggatttgagactgatagaga

SEQ ID NO: 329527 - DNA, 54 bp, Artificial
  Synthetic oligonucleotide
atactcaaagaagtatacttagaagactggccgtggaatacctaccactggccg

SEQ ID NO: 329528 - DNA, 59 bp, Artificial
  Synthetic oligonucleotide
atactcaacagaacaacattaccaaataatatcccaccgatatatccacctaatgatcg

SEQ ID NO: 329529 - DNA, 60 bp, Artificial
  Synthetic oligonucleotide
atactcaaggcatggtcctgcattgagtatcgaccaaatccaaacgccatgttataccaa

SEQ ID NO: 329530 - DNA, 55 bp, Artificial
  Synthetic oligonucleotide
atactcacaggggaccctaggcaatccgaacacttcgaatcggttgaagggaaca

SEQ ID NO: 329531 - DNA, 55 bp, Artificial
  Synthetic oligonucleotide
atactcacaggtctctctggccgcgcagcatccgttccaaaataaccgtctgccc

SEQ ID NO: 329532 - DNA, 60 bp, Artificial
  Synthetic oligonucleotide
atactcagcatcattcactttgaatagatcacaaccggcgcatgacaacttaatgggaac

SEQ ID NO: 329533 - DNA, 54 bp, Artificial
  Synthetic oligonucleotide
atactcagtttccctcggatactcagtctacggtctggtggtttccaggtgacg

SEQ ID NO: 329534 - DNA, 52 bp, Artificial
  Synthetic oligonucleotide
atactcattgaacattctaatccccaaccgcgcccggttgcacccagtgagt

SEQ ID NO: 329535 - DNA, 60 bp, Artificial
  Synthetic oligonucleotide
atactccaagaggagaagataatcagttcacagggtcatgcaccagtcccatggggaatc

SEQ ID NO: 329536 - DNA, 60 bp, Artificial
  Synthetic oligonucleotide
atactccagagtcactaaatgcctcacttccgaatgacgctgctagatgtatgatcgata

SEQ ID NO: 329537 - DNA, 58 bp, Artificial
  Synthetic oligonucleotide
atactccagcacagagagggtagtagtgagcattgaccgatttttaagagttcgggac

SEQ ID NO: 329538 - DNA, 55 bp, Artificial
  Synthetic oligonucleotide
atactccccgcgttataccacgttccattaatgcaatactgaattggccttgcct

SEQ ID NO: 329539 - DNA, 60 bp, Artificial
  Synthetic oligonucleotide
atactcccttatatgcgtttcgacttctacaaggccatacctctcagtcagatgtcacag

SEQ ID NO: 329540 - DNA, 54 bp, Artificial
  Synthetic oligonucleotide
atactcgcgttatatgattatttcggggaggatatcgaagggtttaagaaagga

SEQ ID NO: 329541 - DNA, 55 bp, Artificial
  Synthetic oligonucleotide
atactcggagcgtagcgttgcattccgatctcttacttacgcgcatgctgactct

SEQ ID NO: 329542 - DNA, 55 bp, Artificial
  Synthetic oligonucleotide
atactcgtgactctcagggttatattgattgtcaattggataaggcagcacaaca

SEQ ID NO: 329543 - DNA, 60 bp, Artificial
  Synthetic oligonucleotide
atactctacacaccgcgctttcgaatggaacatctctcgctgtgccactcttagcgacga

SEQ ID NO: 329544 - DNA, 58 bp, Artificial
  Synthetic oligonucleotide
atactctagaacgtgaagtgaatcatgtgcagctgttggaacgtcaatcagaaaaggt

SEQ ID NO: 329545 - DNA, 56 bp, Artificial
  Synthetic oligonucleotide
atactctagattcgttggccaggaccccttaactggactccgatacaccataacca

SEQ ID NO: 329546 - DNA, 60 bp, Artificial
  Synthetic oligonucleotide
atactctatgctgatgatacagcaggttgggatactagaatcacaatggctgatctagaa

SEQ ID NO: 329547 - DNA, 60 bp, Artificial
  Synthetic oligonucleotide
atactctccctcgcatgggctgaacgttgacgtggcaacgttgcgccgcccaatgcgaga

SEQ ID NO: 329548 - DNA, 59 bp, Artificial
  Synthetic oligonucleotide
atactctcctatggaggtatgaacacacctgaggcagaagtgggttactacccctatgc

SEQ ID NO: 329549 - DNA, 53 bp, Artificial
  Synthetic oligonucleotide
atactctcttactacttccgttaggaaattgtttgaagcgtacatggtgacga

SEQ ID NO: 329550 - DNA, 57 bp, Artificial
  Synthetic oligonucleotide
atactctgataaacaatttatcagaaggacaggtaatgtttttaagtagttcgagca

SEQ ID NO: 329551 - DNA, 60 bp, Artificial
  Synthetic oligonucleotide
atactctgataaataatttgtcagatggacatgaaatgtttcgaaggagttcgagcatat

SEQ ID NO: 329552 - DNA, 51 bp, Artificial
  Synthetic oligonucleotide
atactctggaacgtgggctagtcttatagacggatttgtgtcggacaggga

SEQ ID NO: 329553 - DNA, 60 bp, Artificial
  Synthetic oligonucleotide
atactctgtatggctctggtgatcgatacgttagaatgggaactgaaagcatgaattttg

SEQ ID NO: 329554 - DNA, 57 bp, Artificial
  Synthetic oligonucleotide
atactcttaagaaacgaccagtctgaggctgtaatgtcgtccaaattcggaagttga

SEQ ID NO: 329555 - DNA, 51 bp, Artificial
  Synthetic oligonucleotide
atactcttggaggaggtacacctattggaatcatatctgcacaagtactat

SEQ ID NO: 329556 - DNA, 60 bp, Artificial
  Synthetic oligonucleotide
atactgaaaagcagtggagagtgagaaatgatttcgaggaccagtatggatatctagtac

SEQ ID NO: 329557 - DNA, 56 bp, Artificial
  Synthetic oligonucleotide
atactgaaagtaccaccaagttcagccaacaaatctggagacccaacactttccgc

SEQ ID NO: 329558 - DNA, 50 bp, Artificial
  Synthetic oligonucleotide
atactgaaagtggtgatcatgtgtgcaagcgtgagtagctctgtttatct

SEQ ID NO: 329559 - DNA, 60 bp, Artificial
  Synthetic oligonucleotide
atactgaacgtcgtcggtgcgttaatgaagatcaagtagcaagactctttagtatgcacg

SEQ ID NO: 329560 - DNA, 53 bp, Artificial
  Synthetic oligonucleotide
atactgaagacgttgatgacgaaatgtatagagagtatactatgttgattaga

SEQ ID NO: 329561 - DNA, 52 bp, Artificial
  Synthetic oligonucleotide
atactgaagggaaaatctttgcatataaagtcgatacacttaatgaagtgcc

SEQ ID NO: 329562 - DNA, 50 bp, Artificial
  Synthetic oligonucleotide
atactgaagggtcaaataacactgaaggaaatactatcacactcccatgc

SEQ ID NO: 329563 - DNA, 60 bp, Artificial
  Synthetic oligonucleotide
atactgacgatctggttgccttctccggcgttgcacgagtacgattctctgacaagtagt

SEQ ID NO: 329564 - DNA, 54 bp, Artificial
  Synthetic oligonucleotide
atactgacgtggtaaattttgtaagtatggagttttctcttactgacccgaggc

SEQ ID NO: 329565 - DNA, 60 bp, Artificial
  Synthetic oligonucleotide
atactgagaatgcattgctactgtatatggcatgtactcatgcctctaaccctgtatatg

SEQ ID NO: 329566 - DNA, 58 bp, Artificial
  Synthetic oligonucleotide
atactgagaccagctttaggttgatacattgtaacacctcaaccattacacaagcttg

SEQ ID NO: 329567 - DNA, 50 bp, Artificial
  Synthetic oligonucleotide
atactgagcttttacaagaaattcgcaaattttatttgtggcttctaagc

SEQ ID NO: 329568 - DNA, 60 bp, Artificial
  Synthetic oligonucleotide
atactgaggatagcagtggccaatgcggctggaccccattctttggaggattcgagagga

SEQ ID NO: 329569 - DNA, 55 bp, Artificial
  Synthetic oligonucleotide
atactgagtctaacctcgtctttgagtctcagtgtctcatcggtgaaacctagtc

SEQ ID NO: 329570 - DNA, 60 bp, Artificial
  Synthetic oligonucleotide
atactgagtgcaacatcgcctttacacacaccaagtttgacatacccgcaggtacagctc

SEQ ID NO: 329571 - DNA, 60 bp, Artificial
  Synthetic oligonucleotide
atactgagttcatgaatgcagcgtgggggatgccaacaaccccagagctccataaacgta

SEQ ID NO: 329572 - DNA, 52 bp, Artificial
  Synthetic oligonucleotide
atactgatgatgaaatacgaaatgctattgaggctgcttacgtatactattt

SEQ ID NO: 329573 - DNA, 60 bp, Artificial
  Synthetic oligonucleotide
atactgattggatgaacttacacctatgtaagagccaaaatgagaatgaatttgtatcgg

SEQ ID NO: 329574 - DNA, 60 bp, Artificial
  Synthetic oligonucleotide
atactgcaaaccttcatgaggatggcttggggtgggagttacattgcacttgactcaggt

SEQ ID NO: 329575 - DNA, 60 bp, Artificial
  Synthetic oligonucleotide
atactgcaattattcaaaattctggtatctagaacatgcgaagactggtgagactagcgt

SEQ ID NO: 329576 - DNA, 58 bp, Artificial
  Synthetic oligonucleotide
atactgccaacgtcgactacggcgggtaagatctcttgcgacatgaaatctgtagtga

SEQ ID NO: 329577 - DNA, 55 bp, Artificial
  Synthetic oligonucleotide
atactgcccactacaagcggactttaatccactggttaaaaccagacgctacttc

SEQ ID NO: 329578 - DNA, 57 bp, Artificial
  Synthetic oligonucleotide
atactgcggtgttcaaaagggtggcctgtaactctagcctgagtctatcatctcact

SEQ ID NO: 329579 - DNA, 60 bp, Artificial
  Synthetic oligonucleotide
atactgcgtcagtatcaaatgatatactgcgttatatgatggcttacgcaacaggtaacg

SEQ ID NO: 329580 - DNA, 59 bp, Artificial
  Synthetic oligonucleotide
atactgctaatgtaacttgtataagactgcgaatcaaaaatcttcgtggtatcgtatgg

SEQ ID NO: 329581 - DNA, 55 bp, Artificial
  Synthetic oligonucleotide
atactgctaccttggtgatgccatatataaattcagtacccatggattccatgac

SEQ ID NO: 329582 - DNA, 50 bp, Artificial
  Synthetic oligonucleotide
atactgctttcaccttaccatcagtaaacaatgcagaaccaggaaaaaga

SEQ ID NO: 329583 - DNA, 60 bp, Artificial
  Synthetic oligonucleotide
atactggacccagatctgtgctaccagaccaacctattggaccatcatcatatccaatga

SEQ ID NO: 329584 - DNA, 55 bp, Artificial
  Synthetic oligonucleotide
atactggagacctcgcgagagattcacgctagacaaaacgaatgcaattacacaa

SEQ ID NO: 329585 - DNA, 55 bp, Artificial
  Synthetic oligonucleotide
atactggaggggtccaaacccttttttcgcaggctgtaccgagtgaatgcaagat

SEQ ID NO: 329586 - DNA, 59 bp, Artificial
  Synthetic oligonucleotide
atactggctgtcctagtgatcaaaagggcttttgggtgtgcaaagaacatcccttcagc

SEQ ID NO: 329587 - DNA, 53 bp, Artificial
  Synthetic oligonucleotide
atactgggatcgagcctctcgataaagcaaaaaatagccgtatttaacaggta

SEQ ID NO: 329588 - DNA, 55 bp, Artificial
  Synthetic oligonucleotide
atactgggcaataaagacccgaagcggaggaaatgccagccagcaaagagcatcc

SEQ ID NO: 329589 - DNA, 60 bp, Artificial
  Synthetic oligonucleotide
atactgggctataagaacaaggagcggaggaaacaccaaccagcagagagcatctgcagg

SEQ ID NO: 329590 - DNA, 56 bp, Artificial
  Synthetic oligonucleotide
atactgggtaccagacccttctgaaacaggccctcagtaattacacccaagcacaa

SEQ ID NO: 329591 - DNA, 55 bp, Artificial
  Synthetic oligonucleotide
atactgggtatgatgctagtctttctcccgcttggtttagggctttagaaattgt

SEQ ID NO: 329592 - DNA, 60 bp, Artificial
  Synthetic oligonucleotide
atactgggtcaggatcaataaaagaagagcgcaactgcgcatgtgttgggcccgtggcgt

SEQ ID NO: 329593 - DNA, 51 bp, Artificial
  Synthetic oligonucleotide
atactggtgtgccgcgttcggatatgctctgatccgacgcgagcaagtggt

SEQ ID NO: 329594 - DNA, 38 bp, Artificial
  Synthetic oligonucleotide
atactggttggtcctacctgtgtggctatacctggtgg

SEQ ID NO: 329595 - DNA, 60 bp, Artificial
  Synthetic oligonucleotide
atactgtacacaccccaatgcaacactcatacagtacgtttgcaacaacacgtaccagca

SEQ ID NO: 329596 - DNA, 58 bp, Artificial
  Synthetic oligonucleotide
atactgtactgcgaccggagttcgatatacatggtgtaaatccaatacagggcccgct

SEQ ID NO: 329597 - DNA, 55 bp, Artificial
  Synthetic oligonucleotide
atactgtattggaaacgccaagttggattcatcgttgtgatgatccgatagaagc

SEQ ID NO: 329598 - DNA, 60 bp, Artificial
  Synthetic oligonucleotide
atactgtgaaggcaacaagtggataatacctgctgaatgtaaggtggaaagagatcttaa

SEQ ID NO: 329599 - DNA, 60 bp, Artificial
  Synthetic oligonucleotide
atactgtgaccctgcgatcagtgaatagatctggaatggaagtagatctgacctttataa

SEQ ID NO: 329600 - DNA, 55 bp, Artificial
  Synthetic oligonucleotide
atactgtgactacaacgtagtgttaatgaaatatgacgcagcgttacagttagac

SEQ ID NO: 329601 - DNA, 55 bp, Artificial
  Synthetic oligonucleotide
atactgtgtagagacagtggaatatcatttgacgaccttcgcctgcactgcatat

SEQ ID NO: 329602 - DNA, 55 bp, Artificial
  Synthetic oligonucleotide
atactgttactgctcaaacttctggagcgtacggttatgttcgtagttacagtgg

SEQ ID NO: 329603 - DNA, 60 bp, Artificial
  Synthetic oligonucleotide
atactgttgttgatgtgtctcctgcaaggccacctgttgtaattgaatctgtggggcctt

SEQ ID NO: 329604 - DNA, 56 bp, Artificial
  Synthetic oligonucleotide
atacttaacagaacaacactaccgaataatattccaccaatatacccacctaatga

SEQ ID NO: 329605 - DNA, 60 bp, Artificial
  Synthetic oligonucleotide
atacttacctgtgcagtactccaactacttatccaccaagagtgataggcgacagcaaat

SEQ ID NO: 329606 - DNA, 58 bp, Artificial
  Synthetic oligonucleotide
atacttagacagatgtattggaccaggggccccaaccatgaggatcccgctgaaacaa

SEQ ID NO: 329607 - DNA, 55 bp, Artificial
  Synthetic oligonucleotide
atacttagatacgtctttgagttcttggattaggtacggctgtcggataaacgac

SEQ ID NO: 329608 - DNA, 60 bp, Artificial
  Synthetic oligonucleotide
atacttagcatcccggcatgcagaaacttcatacaggtccttcatagaagaatttcagtg

SEQ ID NO: 329609 - DNA, 55 bp, Artificial
  Synthetic oligonucleotide
atacttatcagatagagcatccatagctctaccggttacaggcagataatcctgg

SEQ ID NO: 329610 - DNA, 59 bp, Artificial
  Synthetic oligonucleotide
atacttatcctgatggctcgaaggtgtatgctggctccctttttgagtccgactgtact

SEQ ID NO: 329611 - DNA, 60 bp, Artificial
  Synthetic oligonucleotide
atacttatctgatttatacgcatttaatctattacaagagatattggacgtattgtatat

SEQ ID NO: 329612 - DNA, 55 bp, Artificial
  Synthetic oligonucleotide
atacttatttctctggccttaagaccatcaatattgcgcattacaactgttgacg

SEQ ID NO: 329613 - DNA, 59 bp, Artificial
  Synthetic oligonucleotide
atacttcaacgaatcaacgagaaagaagatcgagaatataaggcctctcctaatagatg

SEQ ID NO: 329614 - DNA, 60 bp, Artificial
  Synthetic oligonucleotide
atacttcatccgagtatgttggtatgaaccaatattggtcagcatttatgcgtagattag

SEQ ID NO: 329615 - DNA, 52 bp, Artificial
  Synthetic oligonucleotide
atacttccgatggagtacaatcttttggtacgacgccgtttcctaaagtttg

SEQ ID NO: 329616 - DNA, 58 bp, Artificial
  Synthetic oligonucleotide
atacttccgtacaaacggaataccctgctttgcagacgattgtctatcatcccaagtc

SEQ ID NO: 329617 - DNA, 52 bp, Artificial
  Synthetic oligonucleotide
atacttcctacccctcgagcacccacaggggttctttatcaagataaacctt

SEQ ID NO: 329618 - DNA, 60 bp, Artificial
  Synthetic oligonucleotide
atacttcgtacgcgcacaagggctcatacgtgcatgcatgttggtgcggaaagtcgctgg

SEQ ID NO: 329619 - DNA, 60 bp, Artificial
  Synthetic oligonucleotide
atacttctgattctgctagtgtacacatggtagtggtttgccctcccagagatagttgtg

SEQ ID NO: 329620 - DNA, 54 bp, Artificial
  Synthetic oligonucleotide
atacttcttccctcggtgtcgggagggaaaagagagttgtatcagttcctgaac

SEQ ID NO: 329621 - DNA, 53 bp, Artificial
  Synthetic oligonucleotide
atacttgaacgatcctcgaatcttgttaaagacatgctattgtatgctgaact

SEQ ID NO: 329622 - DNA, 60 bp, Artificial
  Synthetic oligonucleotide
atacttgacataacagctgatccaacgacagcgccacaaacagaaagaatgatgcgagtg

SEQ ID NO: 329623 - DNA, 60 bp, Artificial
  Synthetic oligonucleotide
atacttgacggtggcaacatgctggaaacaatcagggtcactcctgataatttctctagt

SEQ ID NO: 329624 - DNA, 55 bp, Artificial
  Synthetic oligonucleotide
atacttgactatacaaagtctggaactgagaagtacaccatatatcccacagggg

SEQ ID NO: 329625 - DNA, 60 bp, Artificial
  Synthetic oligonucleotide
atacttgactcgatcaacagcagcctcgatgaactacctgaggaattacaagtacacctc

SEQ ID NO: 329626 - DNA, 57 bp, Artificial
  Synthetic oligonucleotide
atacttgatcgtaattacgggattgctattccgactccaccaaatatagatttaatc

SEQ ID NO: 329627 - DNA, 60 bp, Artificial
  Synthetic oligonucleotide
atacttgatgatcgctggtgtcctggtggatactagtttcatgtgaatgaatagcctcat

SEQ ID NO: 329628 - DNA, 57 bp, Artificial
  Synthetic oligonucleotide
atacttgccggttataaatcttcagttttgccatttctctaccagtttgagatccat

SEQ ID NO: 329629 - DNA, 60 bp, Artificial
  Synthetic oligonucleotide
atacttgctgtaattacagtatggaattcccatgatgtcccgtagatggttcttcattat

SEQ ID NO: 329630 - DNA, 55 bp, Artificial
  Synthetic oligonucleotide
atacttggtggctaagttacaatgattaaaatgtgggatccactgttaaacgagt

SEQ ID NO: 329631 - DNA, 55 bp, Artificial
  Synthetic oligonucleotide
atacttgtaaggggcaattctccaatattcaactacaacaagaccactaaaagac

SEQ ID NO: 329632 - DNA, 55 bp, Artificial
  Synthetic oligonucleotide
atacttgtcacaaacctctcctgggtgacaagttacattttgacaaccaccctta

SEQ ID NO: 329633 - DNA, 55 bp, Artificial
  Synthetic oligonucleotide
atacttgtgagaggtaactcccctgcgtttaactacaacaagacaactaagaggc

SEQ ID NO: 329634 - DNA, 55 bp, Artificial
  Synthetic oligonucleotide
atacttgtgtgcatggttattatttccgttgtcccaggggtggggggaattcatc

SEQ ID NO: 329635 - DNA, 53 bp, Artificial
  Synthetic oligonucleotide
atacttgttatctagttaaattcaaacaatttaactcaactatggaaaaccaa

SEQ ID NO: 329636 - DNA, 56 bp, Artificial
  Synthetic oligonucleotide
atacttgttgtagtcgtagtcgctttggaaaatgtcgtaaacgcgttgaagcaaga

SEQ ID NO: 329637 - DNA, 60 bp, Artificial
  Synthetic oligonucleotide
atacttgttgtgcaccacaaactcatctatggtgttgaacgcaacccacccacgtgcaac

SEQ ID NO: 329638 - DNA, 60 bp, Artificial
  Synthetic oligonucleotide
atactttaatgagcgactcaacctcaattttcagagcagtagacatctcatgtgtgctag

SEQ ID NO: 329639 - DNA, 58 bp, Artificial
  Synthetic oligonucleotide
atactttacaacaccagctcttaaaagaatgtcagacaacctctcaattgatacaact

SEQ ID NO: 329640 - DNA, 57 bp, Artificial
  Synthetic oligonucleotide
atactttaccaaccttcattataggtggaaatgtatatcgaggttttgatgagaaca

SEQ ID NO: 329641 - DNA, 55 bp, Artificial
  Synthetic oligonucleotide
atactttatgtatggttagaaaccctttaacattatatgtcccagtagattggaa

SEQ ID NO: 329642 - DNA, 60 bp, Artificial
  Synthetic oligonucleotide
atactttcaccgggcgtgataggtgcaattaacgtggtaggcataatctatgaggcatct

SEQ ID NO: 329643 - DNA, 50 bp, Artificial
  Synthetic oligonucleotide
atactttccaaacgtgtaggcactctcaagaatgttacacgggaagagtg

SEQ ID NO: 329644 - DNA, 51 bp, Artificial
  Synthetic oligonucleotide
atactttgctgtaactcttaaagtagagtttaagactggtaaactacttgt

SEQ ID NO: 329645 - DNA, 60 bp, Artificial
  Synthetic oligonucleotide
atactttgtacatcacagatcctcttgatgcggaccacatgggccttgtgtgaatccatt

SEQ ID NO: 329646 - DNA, 50 bp, Artificial
  Synthetic oligonucleotide
atacttttactacagccctccggtctggttactccaccacgaacctcgtc

SEQ ID NO: 329647 - DNA, 57 bp, Artificial
  Synthetic oligonucleotide
atactttttgactgaggtcaagatgtccgcacaaataattatgtgggcctagggaac

SEQ ID NO: 329648 - DNA, 54 bp, Artificial
  Synthetic oligonucleotide
atagaaaaggtgactgaagccttaaagataaacaacttaagattagttacatta

SEQ ID NO: 329649 - DNA, 53 bp, Artificial
  Synthetic oligonucleotide
atagaaaagtcgttgggtccactcattggggagctgacctcgcagtcacccct

SEQ ID NO: 329650 - DNA, 57 bp, Artificial
  Synthetic oligonucleotide
atagaaacacgaccattacagatgcttggtccgaaagttggtacagttggggcacta

SEQ ID NO: 329651 - DNA, 56 bp, Artificial
  Synthetic oligonucleotide
atagaaactgatctaccttcgaacgtggattatgtaacgggaatattaactgacga

SEQ ID NO: 329652 - DNA, 57 bp, Artificial
  Synthetic oligonucleotide
atagaaacttaatacctattcctttaggtggtgatggttctatgtcaatcatggagt

SEQ ID NO: 329653 - DNA, 58 bp, Artificial
  Synthetic oligonucleotide
atagaaacttgtccccaataatagcactcaagctagcacccgccggtgtggcagtaaa

SEQ ID NO: 329654 - DNA, 60 bp, Artificial
  Synthetic oligonucleotide
atagaaagaccagagagtgatcatttcatgaacaatacagaaccattgtgtgatgctaag

SEQ ID NO: 329655 - DNA, 59 bp, Artificial
  Synthetic oligonucleotide
atagaaagagatgctaggagtagggagcgaccgaagcgaggaggaaagcaaagaaagca

SEQ ID NO: 329656 - DNA, 60 bp, Artificial
  Synthetic oligonucleotide
atagaaagtcagccagtagaagtactattagacacaggggctgatgactctatagtagca

SEQ ID NO: 329657 - DNA, 57 bp, Artificial
  Synthetic oligonucleotide
atagaaagtcggttaagaacgcacgcggcgtggattttatgacggatgctaagtgga

SEQ ID NO: 329658 - DNA, 51 bp, Artificial
  Synthetic oligonucleotide
atagaaatctgggatgtaatccgcaacgggacttaagaggataatagtccg

SEQ ID NO: 329659 - DNA, 55 bp, Artificial
  Synthetic oligonucleotide
atagaaatgcgactgctagtttcatttatggcggaatactcgttgacagtatcgg

SEQ ID NO: 329660 - DNA, 55 bp, Artificial
  Synthetic oligonucleotide
atagaaattacggtacacatctgcggagtgtgcttgaggtagactgttgcgacgg

SEQ ID NO: 329661 - DNA, 50 bp, Artificial
  Synthetic oligonucleotide
atagaaattcaccctttttcgttgtcatatatgaaggaaggagtttcaac

SEQ ID NO: 329662 - DNA, 60 bp, Artificial
  Synthetic oligonucleotide
atagaaattggatggttgatactagaactacagctagactagatgaagatgtgaataaac

SEQ ID NO: 329663 - DNA, 55 bp, Artificial
  Synthetic oligonucleotide
atagaacagctaatatcgcagtgtagattgtgagagccttctagaggttgtgacc

SEQ ID NO: 329664 - DNA, 58 bp, Artificial
  Synthetic oligonucleotide
atagaacccactcgaccattagctgaaaacgtttgcaggcaattgcaaggacctccat

SEQ ID NO: 329665 - DNA, 53 bp, Artificial
  Synthetic oligonucleotide
atagaacccttttaatgaatgagttgggtgttccgtttcatttggcaaccaaa

SEQ ID NO: 329666 - DNA, 58 bp, Artificial
  Synthetic oligonucleotide
atagaacgtgatttcaactatgcccaatactgtataaactgtgtaggtagtattgtcc

SEQ ID NO: 329667 - DNA, 60 bp, Artificial
  Synthetic oligonucleotide
atagaactactctgccaaatatgttaccgcctatactccctccaaacgatcgagatagca

SEQ ID NO: 329668 - DNA, 54 bp, Artificial
  Synthetic oligonucleotide
atagaactccttatcgaaccctattaatgaacgagttgggtgttccatttcatt

SEQ ID NO: 329669 - DNA, 60 bp, Artificial
  Synthetic oligonucleotide
atagaactcgatgaaataggggaggatgttgccccaatcgaacacattgcaagcatgagg

SEQ ID NO: 329670 - DNA, 60 bp, Artificial
  Synthetic oligonucleotide
atagaagaatgttcttgttatccccgatatccagacgtcagatgtgtttgcagagacaac

SEQ ID NO: 329671 - DNA, 58 bp, Artificial
  Synthetic oligonucleotide
atagaagacaacgatggcctcggacccccgattggaagaacatttggatcgctgcctc

SEQ ID NO: 329672 - DNA, 58 bp, Artificial
  Synthetic oligonucleotide
atagaagacatcgagagggaaattccagaaaggtcatggaatacagggttcgactgga

SEQ ID NO: 329673 - DNA, 60 bp, Artificial
  Synthetic oligonucleotide
atagaagagagggagacctttcatgtccaattaactgcagaatatgctatgttgactagg

SEQ ID NO: 329674 - DNA, 60 bp, Artificial
  Synthetic oligonucleotide
atagaagcctcggatcatctgcgcgaactagcgcgatatcagaagaatcgcacagagaac

SEQ ID NO: 329675 - DNA, 60 bp, Artificial
  Synthetic oligonucleotide
atagaagcttccacagtgtccatagaaacacaataggagactgccccaagtatgtgaatg

SEQ ID NO: 329676 - DNA, 60 bp, Artificial
  Synthetic oligonucleotide
atagaaggaggatggacaggtatggtagacggatggtacggatatcatcatgagaattca

SEQ ID NO: 329677 - DNA, 60 bp, Artificial
  Synthetic oligonucleotide
atagaaggcctatcagaagctgaggccctcacagcactgggcctaacggctgaaacagct

SEQ ID NO: 329678 - DNA, 60 bp, Artificial
  Synthetic oligonucleotide
atagaaggcggatggcaagggatggttgatggctggtatgggtaccatcacagcaatgat

SEQ ID NO: 329679 - DNA, 53 bp, Artificial
  Synthetic oligonucleotide
atagaagtagttgcgctgaaaaccgcggtacatcccgcagtcgtgattccgta

SEQ ID NO: 329680 - DNA, 51 bp, Artificial
  Synthetic oligonucleotide
atagaagtcatggtgtgttcttagagttcacacgagcaaccgccgaaagcg

SEQ ID NO: 329681 - DNA, 58 bp, Artificial
  Synthetic oligonucleotide
atagaagtcccgacgtgccaaggggctgtgaaggcccctgcaaagtgcagtcttttga

SEQ ID NO: 329682 - DNA, 56 bp, Artificial
  Synthetic oligonucleotide
atagaataccggaacgattactgggttgcgtaggggcctcagagtgtgccaatgcg

SEQ ID NO: 329683 - DNA, 55 bp, Artificial
  Synthetic oligonucleotide
atagaatcatgaatcaaatacgttcacacaaccctagtgtgtttgatttgcatca

SEQ ID NO: 329684 - DNA, 55 bp, Artificial
  Synthetic oligonucleotide
atagaatcatggtccccaccgatgttatcgaagaccacttcacattagctagcag

SEQ ID NO: 329685 - DNA, 53 bp, Artificial
  Synthetic oligonucleotide
atagaatccacaaggcgttagacaatgtccaggtactgtaggcgctgctccca

SEQ ID NO: 329686 - DNA, 56 bp, Artificial
  Synthetic oligonucleotide
atagaatccctcatcggaccctcttgatgaacgaattgggtgtcccgttccattta

SEQ ID NO: 329687 - DNA, 60 bp, Artificial
  Synthetic oligonucleotide
atagaattacgatagattttgctatttcggctaacgatttgagtgcgaatctgatatgtt

SEQ ID NO: 329688 - DNA, 60 bp, Artificial
  Synthetic oligonucleotide
atagaattagagagcagctgtaggttctgaacacgatatgacgggagactaggagaatgg

SEQ ID NO: 329689 - DNA, 60 bp, Artificial
  Synthetic oligonucleotide
atagaattgggaagaagtgtgagagaattctccatgcttaccaggccactgggaattgcg

SEQ ID NO: 329690 - DNA, 55 bp, Artificial
  Synthetic oligonucleotide
atagaatttaatggtttagacgacacagaccctggctatcacatagtagactgcg

SEQ ID NO: 329691 - DNA, 50 bp, Artificial
  Synthetic oligonucleotide
atagacaaagcgcccacctattatacagatggagcagcaaatagacagac

SEQ ID NO: 329692 - DNA, 54 bp, Artificial
  Synthetic oligonucleotide
atagacaaagtatacaatcccattgggataatcctaatggcaagatacatgtca

SEQ ID NO: 329693 - DNA, 55 bp, Artificial
  Synthetic oligonucleotide
atagacaaccagattatccgagagctcagtgggttgactctagaaagactagcca

SEQ ID NO: 329694 - DNA, 50 bp, Artificial
  Synthetic oligonucleotide
atagacacttacagggacgagaaaacagaagtctacaattcccagcccgc

SEQ ID NO: 329695 - DNA, 59 bp, Artificial
  Synthetic oligonucleotide
atagacagcttgaattcgtttttactaaaaagagcattaggttatgaatatgatgagat

SEQ ID NO: 329696 - DNA, 56 bp, Artificial
  Synthetic oligonucleotide
atagacagggttaaacgtgaagttaatagcgtagagtatgcagtaattcgtattgg

SEQ ID NO: 329697 - DNA, 60 bp, Artificial
  Synthetic oligonucleotide
atagacagtgcttgctaacgctaaagcgggcctcgtgccccgtagcgtctctcgtgtctg

SEQ ID NO: 329698 - DNA, 52 bp, Artificial
  Synthetic oligonucleotide
atagacatcaatccatatagcctaatgacaaggaaagcgtggatgtacaata

SEQ ID NO: 329699 - DNA, 58 bp, Artificial
  Synthetic oligonucleotide
atagacatcattggtggggctcattggggcgtcatgttcggcttagcctacttctcta

SEQ ID NO: 329700 - DNA, 58 bp, Artificial
  Synthetic oligonucleotide
atagacatgaatgattgctttgtctccaggcatgttaaagtctgtataattggcacag

SEQ ID NO: 329701 - DNA, 60 bp, Artificial
  Synthetic oligonucleotide
atagacatggagcacttacaagtagcaacacaccacaaaataatgctacttgtgcctggc

SEQ ID NO: 329702 - DNA, 53 bp, Artificial
  Synthetic oligonucleotide
atagacatggagcacttacaatcagcaactcaggccccgctaatgctacttgt

SEQ ID NO: 329703 - DNA, 56 bp, Artificial
  Synthetic oligonucleotide
atagacatggggcgctgacaagcagcaacacccccgcaaataatcctgattgtgcc

SEQ ID NO: 329704 - DNA, 60 bp, Artificial
  Synthetic oligonucleotide
atagacattatcagactttattatgccgacagagtaagcactgtcagcggaataggagca

SEQ ID NO: 329705 - DNA, 60 bp, Artificial
  Synthetic oligonucleotide
atagaccaaattagtgatatcatataaggaatctgctggtgcgcatacgtgtgtaaccgc

SEQ ID NO: 329706 - DNA, 59 bp, Artificial
  Synthetic oligonucleotide
atagaccaccaaatgcccctatcttatcaacacttccagagaccactgttgttagacga

SEQ ID NO: 329707 - DNA, 55 bp, Artificial
  Synthetic oligonucleotide
atagaccactcaaatgagaatggaactccaataagacgaggacttcttctggatc

SEQ ID NO: 329708 - DNA, 58 bp, Artificial
  Synthetic oligonucleotide
atagaccagggggaggaaccagttgacgtggattgcttttgcagaaatgtcgatggag

SEQ ID NO: 329709 - DNA, 58 bp, Artificial
  Synthetic oligonucleotide
atagaccccttcgctgcctttgtcaagggttcattaccacaagtcaggaatggaatga

SEQ ID NO: 329710 - DNA, 60 bp, Artificial
  Synthetic oligonucleotide
atagacccttcgctgatagctgcttacaccactggttgtcagatatatgaggagctctgc

SEQ ID NO: 329711 - DNA, 59 bp, Artificial
  Synthetic oligonucleotide
atagaccgagaaggaacgatggtgtggtcgtgccgagattgttagatataacgctacgc

SEQ ID NO: 329712 - DNA, 58 bp, Artificial
  Synthetic oligonucleotide
atagaccgattaattaacatgttagacaaccgagcaatcatcaagtccaagcacaccc

SEQ ID NO: 329713 - DNA, 51 bp, Artificial
  Synthetic oligonucleotide
atagacctctagcaatcccttaggcctggagattgtgggattgactaccgc

SEQ ID NO: 329714 - DNA, 56 bp, Artificial
  Synthetic oligonucleotide
atagacgaaacaaacaacttagcaatcagtcctaccattcgatatttacctaattg

SEQ ID NO: 329715 - DNA, 53 bp, Artificial
  Synthetic oligonucleotide
atagacgacgagggatttcctctagtatattacatctctaaactacgcggtac

SEQ ID NO: 329716 - DNA, 56 bp, Artificial
  Synthetic oligonucleotide
atagacgacgtctttggagagaagacagttctgtcgggtttggataacagggccca

SEQ ID NO: 329717 - DNA, 60 bp, Artificial
  Synthetic oligonucleotide
atagacgagatcttaacaaataagcaacaacaagttctgaattcatatttacatgatgat

SEQ ID NO: 329718 - DNA, 53 bp, Artificial
  Synthetic oligonucleotide
atagacgataaaaagatacatccgagagtgatgatgagatttaaggtgcctag

SEQ ID NO: 329719 - DNA, 58 bp, Artificial
  Synthetic oligonucleotide
atagacgatgtcttcaaagagaagaccgtcttgtcaggtttggataacagggctcaag

SEQ ID NO: 329720 - DNA, 59 bp, Artificial
  Synthetic oligonucleotide
atagacgcaggaatccgcgccggagggtgagttggagacggctctatagaacttataga

SEQ ID NO: 329721 - DNA, 60 bp, Artificial
  Synthetic oligonucleotide
atagacgccattcccggcttgaactgcagtgatggattcccctgtgcgtaaatccatggt

SEQ ID NO: 329722 - DNA, 50 bp, Artificial
  Synthetic oligonucleotide
atagacgcgatagagcgagattacccatatatcgtttggggagttatgcc

SEQ ID NO: 329723 - DNA, 60 bp, Artificial
  Synthetic oligonucleotide
atagacgcgtacatactgcagtgggatctggatcaggcgcaaaaggacctggagaacgcg

SEQ ID NO: 329724 - DNA, 59 bp, Artificial
  Synthetic oligonucleotide
atagacgtacgattaagacgcgaggatgacgtaatatcacaaaagcgtacgtgtcaatg

SEQ ID NO: 329725 - DNA, 60 bp, Artificial
  Synthetic oligonucleotide
atagacgtggtcgatcgcaaactcagcgaggtactcatgtacgccgtacaggtgtcaagc

SEQ ID NO: 329726 - DNA, 57 bp, Artificial
  Synthetic oligonucleotide
atagactacataactttacgttagacttcagtgataagtccgatagactagtcataa

SEQ ID NO: 329727 - DNA, 60 bp, Artificial
  Synthetic oligonucleotide
atagactgcaattattatgactgctgtctattccaagtgtacaacgaaaatggaaggatt

SEQ ID NO: 329728 - DNA, 56 bp, Artificial
  Synthetic oligonucleotide
atagactgttcccacggttgaaagtgtccgatccgttatccgctcatgtacttcga

SEQ ID NO: 329729 - DNA, 52 bp, Artificial
  Synthetic oligonucleotide
atagacttatagcgcagctagaagtatacactgtacagatattgtattctgt

SEQ ID NO: 329730 - DNA, 60 bp, Artificial
  Synthetic oligonucleotide
atagacttattcggaccagcacattataaagaattgtcagacctgaacaccataagtcat

SEQ ID NO: 329731 - DNA, 60 bp, Artificial
  Synthetic oligonucleotide
atagacttctcgcgatcgctgctcacagacgtattttcccctgacacggtttacattcag

SEQ ID NO: 329732 - DNA, 60 bp, Artificial
  Synthetic oligonucleotide
atagacttggcactactaccattagacatgttctcgatgttctcaggaatcaaaggtaca

SEQ ID NO: 329733 - DNA, 60 bp, Artificial
  Synthetic oligonucleotide
atagacttgtggaaaggcactgacgaacccgttgagtctgagactacatcgcaactgttg

SEQ ID NO: 329734 - DNA, 60 bp, Artificial
  Synthetic oligonucleotide
atagactttctcatcatgaaagatatggtatgaaagttaggttgacctaccgatctgaaa

SEQ ID NO: 329735 - DNA, 60 bp, Artificial
  Synthetic oligonucleotide
atagacttttcagagtctgtcaggataatggaatgtgactagtcgggcccttgcctgcaa

SEQ ID NO: 329736 - DNA, 55 bp, Artificial
  Synthetic oligonucleotide
atagagaaaggttcatcgttgcgtaagaccgaaattgaagacaaaaatacatccg

SEQ ID NO: 329737 - DNA, 51 bp, Artificial
  Synthetic oligonucleotide
atagagacaaataaattcgctgcaatatgcacacacctggaagtgtgtttc

SEQ ID NO: 329738 - DNA, 55 bp, Artificial
  Synthetic oligonucleotide
atagagacctatagccctgttaagggaactgttccagacccaaatcaggcaaacg

SEQ ID NO: 329739 - DNA, 55 bp, Artificial
  Synthetic oligonucleotide
atagagagaatgcatgatgacccagttttggagcttgaatatgcaatgtcagggt

SEQ ID NO: 329740 - DNA, 60 bp, Artificial
  Synthetic oligonucleotide
atagagagagcatctctcattgaagtaaaaacatgtctgtggcccaagacccatacactg

SEQ ID NO: 329741 - DNA, 60 bp, Artificial
  Synthetic oligonucleotide
atagagagcaagtgacaataatggatatatcagatgcttatttcactatcccattagata

SEQ ID NO: 329742 - DNA, 54 bp, Artificial
  Synthetic oligonucleotide
atagagagcgcctgtaattttaacgtttccgtggaggacattttatacggagac

SEQ ID NO: 329743 - DNA, 54 bp, Artificial
  Synthetic oligonucleotide
atagagagctaacaagtatatggttccccggtagcgtaacactaaaggagtatt

SEQ ID NO: 329744 - DNA, 60 bp, Artificial
  Synthetic oligonucleotide
atagagaggaattgtcaaaacttgtggaaatggggcatcatgctccttgggatattgatg

SEQ ID NO: 329745 - DNA, 57 bp, Artificial
  Synthetic oligonucleotide
atagagaggagtttattttgtgattggatcatataattgatactcaagacatatctc

SEQ ID NO: 329746 - DNA, 53 bp, Artificial
  Synthetic oligonucleotide
atagagaggctcagagcatggtggttaataaggggatatgtcctgaggatgtt

SEQ ID NO: 329747 - DNA, 60 bp, Artificial
  Synthetic oligonucleotide
atagagagtttcttaggtaggtctagttgcattgcaataatccatactgatgttgtgcat

SEQ ID NO: 329748 - DNA, 55 bp, Artificial
  Synthetic oligonucleotide
atagagatgctgatggagccaataacaatcctcttggagtatttacttcagcagc

SEQ ID NO: 329749 - DNA, 58 bp, Artificial
  Synthetic oligonucleotide
atagagatgtaccgtcacgagagcgtggcgggattgtccgagtctgaggccccttgtt

SEQ ID NO: 329750 - DNA, 55 bp, Artificial
  Synthetic oligonucleotide
atagagcaactcacatggccacaggattatcattttacacaacctttgtagaaag

SEQ ID NO: 329751 - DNA, 56 bp, Artificial
  Synthetic oligonucleotide
atagagcaatttgccggccaaaatcccagtgggatgttatattccgtaagtcttta

SEQ ID NO: 329752 - DNA, 60 bp, Artificial
  Synthetic oligonucleotide
atagagcacgaaccattcgtgttagtgttagccatgcagtcaccagctgttttattagcc

SEQ ID NO: 329753 - DNA, 55 bp, Artificial
  Synthetic oligonucleotide
atagagcagttaattctgcaatgtagattgtaagtagtgtctagaggttgtgacc

SEQ ID NO: 329754 - DNA, 52 bp, Artificial
  Synthetic oligonucleotide
atagagcctgacttagaaccatggaaccatccagggagcaaacctagaacag

SEQ ID NO: 329755 - DNA, 51 bp, Artificial
  Synthetic oligonucleotide
atagagcggatcgtgatgcgtggggtcacaaaggatagagcgtactttttc

SEQ ID NO: 329756 - DNA, 60 bp, Artificial
  Synthetic oligonucleotide
atagagcggtgctagtcatgcaatccatcgccactgtggtggcagttgtctcactggtgt

SEQ ID NO: 329757 - DNA, 60 bp, Artificial
  Synthetic oligonucleotide
atagagcttggatacttgggattggaacacttggcaccattgtgtccctcataacaatgt

SEQ ID NO: 329758 - DNA, 55 bp, Artificial
  Synthetic oligonucleotide
atagaggaaacatggagagattgccaggaggagtttgaaacgttcgaggaagtga

SEQ ID NO: 329759 - DNA, 60 bp, Artificial
  Synthetic oligonucleotide
atagaggaaatgtagattggaaaacatggagaaggattgtagaagagcagaccgttagca

SEQ ID NO: 329760 - DNA, 60 bp, Artificial
  Synthetic oligonucleotide
atagaggaagcttgcgacctcacaccatcgcactcagcccggtccaaatatggatacggt

SEQ ID NO: 329761 - DNA, 59 bp, Artificial
  Synthetic oligonucleotide
atagaggacccggagaaggaagtgttagagtggaggtttgacagcaagctagcatttca

SEQ ID NO: 329762 - DNA, 54 bp, Artificial
  Synthetic oligonucleotide
atagaggacccttcaaagcttatgctggattggctaataacaggaaacaagccc

SEQ ID NO: 329763 - DNA, 57 bp, Artificial
  Synthetic oligonucleotide
atagaggacctcgcagcgtacaagcggttgacccgaaatacaataccccagaggtca

SEQ ID NO: 329764 - DNA, 57 bp, Artificial
  Synthetic oligonucleotide
atagaggattaccttcagtctagagggaatgaatgtagggataaacttgatagtaaa

SEQ ID NO: 329765 - DNA, 55 bp, Artificial
  Synthetic oligonucleotide
atagaggccataaggtacctttcatcctcacaaaacaatcccagtgtgctacaac

SEQ ID NO: 329766 - DNA, 53 bp, Artificial
  Synthetic oligonucleotide
atagaggcctacgagattacagtggcatttcaactctcatttgtcaattgacg

SEQ ID NO: 329767 - DNA, 60 bp, Artificial
  Synthetic oligonucleotide
atagaggcgtacgtgcaaaattctccaatgctagacctgctgatactcacaggggaccct

SEQ ID NO: 329768 - DNA, 55 bp, Artificial
  Synthetic oligonucleotide
atagaggggataaaccgggtagtgcctggagagatttgtgttgtggacggcaggg

SEQ ID NO: 329769 - DNA, 60 bp, Artificial
  Synthetic oligonucleotide
atagaggtcggcaagtcaaggctggttaaaggggcggctaaacatatcattcatgcagta

SEQ ID NO: 329770 - DNA, 55 bp, Artificial
  Synthetic oligonucleotide
atagagtaaacgattccttctctccaggtaacgatttcacccacatgactaccac

SEQ ID NO: 329771 - DNA, 60 bp, Artificial
  Synthetic oligonucleotide
atagagtacattggagtaaactcaatgcgcacagcaggtagaaccgccactatcacttat

SEQ ID NO: 329772 - DNA, 60 bp, Artificial
  Synthetic oligonucleotide
atagagtaccggggccactacactgcctaacacgattgtaggtgcaccgtgacatgctat

SEQ ID NO: 329773 - DNA, 58 bp, Artificial
  Synthetic oligonucleotide
atagagttaggaagggatactcacctgtgtctttccagaccccttcccatcatcagag

SEQ ID NO: 329774 - DNA, 59 bp, Artificial
  Synthetic oligonucleotide
atagagttatagaagtaggacgagggattggtagagctcttcttcacatacctagaaga

SEQ ID NO: 329775 - DNA, 58 bp, Artificial
  Synthetic oligonucleotide
atagagttggtgctttccatgtttggcaagtgatccctggatgtttcattggtgcacc

SEQ ID NO: 329776 - DNA, 55 bp, Artificial
  Synthetic oligonucleotide
atagagttggtggcattccgaatgcatgccctgaacttggatccacaatatcacc

SEQ ID NO: 329777 - DNA, 52 bp, Artificial
  Synthetic oligonucleotide
atagagttggtggcgattgtaattttggcagccgagtccgaatcgatacaaa

SEQ ID NO: 329778 - DNA, 60 bp, Artificial
  Synthetic oligonucleotide
atagagtttctacttgtgttattttgggattagctttacaggcatatgaccagatgcgta

SEQ ID NO: 329779 - DNA, 59 bp, Artificial
  Synthetic oligonucleotide
atagataacatcagagaacaaattcaggtaattaaccccatcaacaagatcacaggaaa

SEQ ID NO: 329780 - DNA, 54 bp, Artificial
  Synthetic oligonucleotide
atagataacgaaataccgctaacgtccgccaacagtgtaccggcgtgcgtacga

SEQ ID NO: 329781 - DNA, 60 bp, Artificial
  Synthetic oligonucleotide
atagataatacaccgttgctatccacagtagttggagtaggcttatgccatggtgccacg

SEQ ID NO: 329782 - DNA, 55 bp, Artificial
  Synthetic oligonucleotide
atagataattatgcgcgtactgtcattaagaccacggctataagaagctatcgag

SEQ ID NO: 329783 - DNA, 58 bp, Artificial
  Synthetic oligonucleotide
atagatacattaaacgaagggaggtacaactcgaacttgcagaacatatctttcgaga

SEQ ID NO: 329784 - DNA, 51 bp, Artificial
  Synthetic oligonucleotide
atagataccgcgaacatgttcacgtcattgaatcccatgaatcgaaatgac

SEQ ID NO: 329785 - DNA, 60 bp, Artificial
  Synthetic oligonucleotide
atagatactgaacctttaaaatcatgtctggcagccatagacggaggtgatgtagcctgt

SEQ ID NO: 329786 - DNA, 60 bp, Artificial
  Synthetic oligonucleotide
atagatactggagatgggtgttttgaaatactacacaaatgtgatgatggatgcatggat

SEQ ID NO: 329787 - DNA, 58 bp, Artificial
  Synthetic oligonucleotide
atagatagcaccccagttaagtgcagacaaggtttttgcttgaaaatcactcaagaag

SEQ ID NO: 329788 - DNA, 57 bp, Artificial
  Synthetic oligonucleotide
atagataggatatacaagcaggtggctcttgaatccccactggcgctactaaacact

SEQ ID NO: 329789 - DNA, 60 bp, Artificial
  Synthetic oligonucleotide
atagatagtgagaatgcattcataagtgatctttgtttgtggctgtgggaagctgaatgc

SEQ ID NO: 329790 - DNA, 60 bp, Artificial
  Synthetic oligonucleotide
atagatattcctacataaaggataagagagctggtgtaagcatgcccataagctttcaac

SEQ ID NO: 329791 - DNA, 60 bp, Artificial
  Synthetic oligonucleotide
atagatcaattaactctatcttatcaaatggttattgaccgcgtttgaaatgactcatac

SEQ ID NO: 329792 - DNA, 58 bp, Artificial
  Synthetic oligonucleotide
atagatcaggggttaaactagttaagataaggcactgtgacattaacctatcagtcaa

SEQ ID NO: 329793 - DNA, 60 bp, Artificial
  Synthetic oligonucleotide
atagatcatcatgcaaagaggaccactcttagattctttgtatatcacaaagttatcagg

SEQ ID NO: 329794 - DNA, 57 bp, Artificial
  Synthetic oligonucleotide
atagatcatcgcgttccgagacggtgaaaaccggaaacttgcatcgtattaccagcc

SEQ ID NO: 329795 - DNA, 60 bp, Artificial
  Synthetic oligonucleotide
atagatccagtggcaatgacacacactagtcagtatatatgcagtcctgttctcacagac

SEQ ID NO: 329796 - DNA, 53 bp, Artificial
  Synthetic oligonucleotide
atagatctacgtcctgcatcagcatggacgttgtatgccgtggctacgacatt

SEQ ID NO: 329797 - DNA, 55 bp, Artificial
  Synthetic oligonucleotide
atagatcttccggctgttgaccaatacaggcatatgattaaggctcagcctaagc

SEQ ID NO: 329798 - DNA, 55 bp, Artificial
  Synthetic oligonucleotide
atagatgaagtatcacttctgggctaaatttgttgtggggatgtattagcaggaa

SEQ ID NO: 329799 - DNA, 59 bp, Artificial
  Synthetic oligonucleotide
atagatgacgaaacaatgtgccaagaagtgcctaaaatccctaacaagtgtagaatggc

SEQ ID NO: 329800 - DNA, 59 bp, Artificial
  Synthetic oligonucleotide
atagatgctctattgggagaccctcattgtgatggcttccaaaataagaaatgggacct

SEQ ID NO: 329801 - DNA, 60 bp, Artificial
  Synthetic oligonucleotide
atagatggaattgttcagggaagcgttcactcgatcatgacgggcgagtcctatggtgaa

SEQ ID NO: 329802 - DNA, 55 bp, Artificial
  Synthetic oligonucleotide
atagatggaggttccatctggacttcgttcatcttgagtgtacgcagtgccactg

SEQ ID NO: 329803 - DNA, 58 bp, Artificial
  Synthetic oligonucleotide
atagatggcagcctatgaccccgtcaagaggacgtttacgtcttaataagcctagtgc

SEQ ID NO: 329804 - DNA, 56 bp, Artificial
  Synthetic oligonucleotide
atagatgggtggtatgggtaccatcaccagaatgagcaagggtctggttatgcagc

SEQ ID NO: 329805 - DNA, 60 bp, Artificial
  Synthetic oligonucleotide
atagatgtaatcaacagattcgccagcaagactatgttgacgtgcagtttgcagaccgtg

SEQ ID NO: 329806 - DNA, 55 bp, Artificial
  Synthetic oligonucleotide
atagatgtcaactagataagcaagctaacaccactcaaggaacttcataccgtgc

SEQ ID NO: 329807 - DNA, 57 bp, Artificial
  Synthetic oligonucleotide
atagatgttgtggttgacttcgggcttaaagtgtcaccgttcctagacgtggattca

SEQ ID NO: 329808 - DNA, 53 bp, Artificial
  Synthetic oligonucleotide
atagattaatagttagtaataagtacgagcctcttatggcccctttggttaat

SEQ ID NO: 329809 - DNA, 60 bp, Artificial
  Synthetic oligonucleotide
atagattagggcaactagttgatttgactaggctgttggcatataattacgagactttga

SEQ ID NO: 329810 - DNA, 50 bp, Artificial
  Synthetic oligonucleotide
atagattatcttgatagactttacgccgtgagacatgacattgtagacca

SEQ ID NO: 329811 - DNA, 53 bp, Artificial
  Synthetic oligonucleotide
atagattctgcagagtcttgaataaagcgccactggatctaatggactgcacc

SEQ ID NO: 329812 - DNA, 51 bp, Artificial
  Synthetic oligonucleotide
atagattgtttctctgctgagtgtcttgacattctgcggagcatactacta

SEQ ID NO: 329813 - DNA, 60 bp, Artificial
  Synthetic oligonucleotide
atagcaaaggcgatagtgaatgaccttaaggcccacaggatctcgtatcggactgcaatg

SEQ ID NO: 329814 - DNA, 55 bp, Artificial
  Synthetic oligonucleotide
atagcaaatgcccaacctgcggcttgtgtcttctgcggggaagatgccccgtcag

SEQ ID NO: 329815 - DNA, 60 bp, Artificial
  Synthetic oligonucleotide
atagcaacaaattgttatcactatgtacgtgacgaacaataatcagttcggtttgcgctg

SEQ ID NO: 329816 - DNA, 57 bp, Artificial
  Synthetic oligonucleotide
atagcaacaatgattggacccggtcctacccttcaggacatagtcctagaattggaa

SEQ ID NO: 329817 - DNA, 60 bp, Artificial
  Synthetic oligonucleotide
atagcaacattagcagtagcagaatcagaaatgatactgatatgaaaaactgctctttcc

SEQ ID NO: 329818 - DNA, 54 bp, Artificial
  Synthetic oligonucleotide
atagcaacgggaacctaattgctcctcggggttacttcaaaatacgcactggga

SEQ ID NO: 329819 - DNA, 53 bp, Artificial
  Synthetic oligonucleotide
atagcaactcaatcgacttttggaaggctagcagtacatatactatgggacaa

SEQ ID NO: 329820 - DNA, 50 bp, Artificial
  Synthetic oligonucleotide
atagcaaggatccacgccttgaagtggactttgagcaggctctattctcc

SEQ ID NO: 329821 - DNA, 60 bp, Artificial
  Synthetic oligonucleotide
atagcaataacgcctcgatccaagagtcgtacactgtggatgactttgtatcctattgga

SEQ ID NO: 329822 - DNA, 60 bp, Artificial
  Synthetic oligonucleotide
atagcaatgtatcacattggatcggcaacgcggtttgcagagtgttcggttgtatatgtt

SEQ ID NO: 329823 - DNA, 60 bp, Artificial
  Synthetic oligonucleotide
atagcaatgttattagagtctatggatcgagaattccatatgttcacattacccgaagcc

SEQ ID NO: 329824 - DNA, 60 bp, Artificial
  Synthetic oligonucleotide
atagcacaaatagcagatcgttcttggactcggctcgcgatagcgcccacgttatcaggg

SEQ ID NO: 329825 - DNA, 60 bp, Artificial
  Synthetic oligonucleotide
atagcacaattgggaaagcggctgaacgatttgcagagagcgaaattggctcagcggcta

SEQ ID NO: 329826 - DNA, 60 bp, Artificial
  Synthetic oligonucleotide
atagcaccaatgaacagaaccaaaatgatggaaaaatgctgcgaacatttcgtagcggta

SEQ ID NO: 329827 - DNA, 55 bp, Artificial
  Synthetic oligonucleotide
atagcaccaattgaccccgaagcaccatcaatagtctcattaacagacagtggcg

SEQ ID NO: 329828 - DNA, 60 bp, Artificial
  Synthetic oligonucleotide
atagcaccatggtatgcctttgcattaaataaggggtcagactcagggattataacatca

SEQ ID NO: 329829 - DNA, 51 bp, Artificial
  Synthetic oligonucleotide
atagcaccctctctgaaagaccgtttctacatacgacacgtgttcaaacgt

SEQ ID NO: 329830 - DNA, 53 bp, Artificial
  Synthetic oligonucleotide
atagcaccggtcttgttctccaacaagatagccagattgggaaaagggtttat

SEQ ID NO: 329831 - DNA, 58 bp, Artificial
  Synthetic oligonucleotide
atagcacgaaagggatgttgacgcgggaagcgcaatgagttaccagagttccgcccgc

SEQ ID NO: 329832 - DNA, 59 bp, Artificial
  Synthetic oligonucleotide
atagcacggatgaggtggttgatgctacactaccttatctattgctagtagctacagat

SEQ ID NO: 329833 - DNA, 50 bp, Artificial
  Synthetic oligonucleotide
atagcactaatcttagcaataattgtgtggaccatagcatatctagaata

SEQ ID NO: 329834 - DNA, 52 bp, Artificial
  Synthetic oligonucleotide
atagcactaccacatgagtacacaattgggctaaaggacgagttaaggcccg

SEQ ID NO: 329835 - DNA, 60 bp, Artificial
  Synthetic oligonucleotide
atagcactgagcattataatcgatatttcacagatgatgatatagccagtgttaaaacaa

SEQ ID NO: 329836 - DNA, 60 bp, Artificial
  Synthetic oligonucleotide
atagcactgggttcacaaaagcctgtggcgctcctccatgtcaggttaccactaacaaca

SEQ ID NO: 329837 - DNA, 59 bp, Artificial
  Synthetic oligonucleotide
atagcacttccgaagaactctgtagttgagattcttggtgacaaatttgctgtcggtga

SEQ ID NO: 329838 - DNA, 55 bp, Artificial
  Synthetic oligonucleotide
atagcacttggaatgatcaaactgacgagaggtcaaatgacactataactctcca

SEQ ID NO: 329839 - DNA, 58 bp, Artificial
  Synthetic oligonucleotide
atagcagaagttgactcagtggtgccactcaacaacgttcagggtaaccttaggaaga

SEQ ID NO: 329840 - DNA, 60 bp, Artificial
  Synthetic oligonucleotide
atagcagaataggaatcttgcgacagagaagagcaaatggagccagtagatcctaaccta

SEQ ID NO: 329841 - DNA, 60 bp, Artificial
  Synthetic oligonucleotide
atagcagaataggcattttgccccgaagaagagcaagaaatggatccagtagatcctaaa

SEQ ID NO: 329842 - DNA, 60 bp, Artificial
  Synthetic oligonucleotide
atagcagaatatagaaattggtcaaagccgcagtgtcaaatcacaggatttgcacctttc

SEQ ID NO: 329843 - DNA, 58 bp, Artificial
  Synthetic oligonucleotide
atagcagatgagacgcaccacaccaataggaagaggcacggacttctcagattcctaa

SEQ ID NO: 329844 - DNA, 58 bp, Artificial
  Synthetic oligonucleotide
atagcagcagataggtctgaaattacaggggaccacgtggagagtagtgacgatttca

SEQ ID NO: 329845 - DNA, 51 bp, Artificial
  Synthetic oligonucleotide
atagcagcctctttgggaatggaatgcacgaaggctaaaggtggtttagat

SEQ ID NO: 329846 - DNA, 60 bp, Artificial
  Synthetic oligonucleotide
atagcagctatgttaagtcaacgtacaatgtcattagattttgtaactacgaattatatg

SEQ ID NO: 329847 - DNA, 60 bp, Artificial
  Synthetic oligonucleotide
atagcagctcggggccacctgtactcacttgctaaggaaaacaagtgcgcgctcgtcctc

SEQ ID NO: 329848 - DNA, 54 bp, Artificial
  Synthetic oligonucleotide
atagcaggattcatagaaggagggtggcaaggaatggttgacgggtggtacgga

SEQ ID NO: 329849 - DNA, 55 bp, Artificial
  Synthetic oligonucleotide
atagcaggcttcccagagtatgagggtacacttcggcaaacaggagcagctctac

SEQ ID NO: 329850 - DNA, 55 bp, Artificial
  Synthetic oligonucleotide
atagcagggggagcttactctcccccaggccggtctcctacttgaagggctcttc

SEQ ID NO: 329851 - DNA, 58 bp, Artificial
  Synthetic oligonucleotide
atagcagtaacagagaaagcgaaattgaactcgtatgcacccgtatatttagagaaac

SEQ ID NO: 329852 - DNA, 53 bp, Artificial
  Synthetic oligonucleotide
atagcagtactacaaagaatttgtagagctatctacaacacacctagaagaat

SEQ ID NO: 329853 - DNA, 56 bp, Artificial
  Synthetic oligonucleotide
atagcagttcacacccgtggtgtgtggaccaacttagacattggcgaggaggactg

SEQ ID NO: 329854 - DNA, 60 bp, Artificial
  Synthetic oligonucleotide
atagcagtttggcactctcagttgagtacggcgacactggcacagttatgtgtgaacatg

SEQ ID NO: 329855 - DNA, 60 bp, Artificial
  Synthetic oligonucleotide
atagcatactgaattattgtgtgttaagagcaactcaacgttgagcaacgcttagccacg

SEQ ID NO: 329856 - DNA, 60 bp, Artificial
  Synthetic oligonucleotide
atagcataggcaaagacagcacaacactactgagcatgctcaaccaatccgacgtcaaaa

SEQ ID NO: 329857 - DNA, 60 bp, Artificial
  Synthetic oligonucleotide
atagcatatcagtgtcgaagcttgggggtcagtcaatgcagtacatagagaacgagaagt

SEQ ID NO: 329858 - DNA, 60 bp, Artificial
  Synthetic oligonucleotide
atagcatattgactcttttgttgttgtcaacgttagctgatgtatatactgtactgcgac

SEQ ID NO: 329859 - DNA, 52 bp, Artificial
  Synthetic oligonucleotide
atagcatgaaacagagagctgatataatgcagtataccttgcataaatcctg

SEQ ID NO: 329860 - DNA, 55 bp, Artificial
  Synthetic oligonucleotide
atagcatgaagcatctagtatgggcaagcagggaactagaacgatttgcacttaa

SEQ ID NO: 329861 - DNA, 60 bp, Artificial
  Synthetic oligonucleotide
atagcatgcggtagccgtgatacgtgtcccaggtctgggacacctgtcaagtagctatat

SEQ ID NO: 329862 - DNA, 55 bp, Artificial
  Synthetic oligonucleotide
atagcatgctgggccccaagaagctggcaactctccaagggaataaaagtcagcc

SEQ ID NO: 329863 - DNA, 60 bp, Artificial
  Synthetic oligonucleotide
atagcatggatgatcgttcgagcgatcacatttcccacaacttctaccgttgccatgcca

SEQ ID NO: 329864 - DNA, 58 bp, Artificial
  Synthetic oligonucleotide
atagcatgtcaaaaggatgctcctacacctgaaaaaaaggatccctatgacgatttaa

SEQ ID NO: 329865 - DNA, 60 bp, Artificial
  Synthetic oligonucleotide
atagcattctcctgtttcagctgttcttagtttatatttagattggttgctcatcatgtt

SEQ ID NO: 329866 - DNA, 55 bp, Artificial
  Synthetic oligonucleotide
atagcattgtagctctatgtggatccaaagagcgattgggatcatggtcctggca

SEQ ID NO: 329867 - DNA, 60 bp, Artificial
  Synthetic oligonucleotide
atagccaaactacatggaggacatatttgcgatctcatgattttgaggtatgtattgcct

SEQ ID NO: 329868 - DNA, 55 bp, Artificial
  Synthetic oligonucleotide
atagccaagatattcctaatcccctcttccaaattattgaagtcgaaaggaggta

SEQ ID NO: 329869 - DNA, 60 bp, Artificial
  Synthetic oligonucleotide
atagccaatcgcaggttgtgttcccatcatactataataagtggacacatgccccgatgt

SEQ ID NO: 329870 - DNA, 60 bp, Artificial
  Synthetic oligonucleotide
atagccacatacaatggcttacaaatgcatggggaatggtcctactggcattagtaaggt

SEQ ID NO: 329871 - DNA, 56 bp, Artificial
  Synthetic oligonucleotide
atagccacgaccaacctgtactcgggattcaccccaagaaccatggtgtgccccga

SEQ ID NO: 329872 - DNA, 55 bp, Artificial
  Synthetic oligonucleotide
atagccactgaaagtatagtaatctggggaaaaacaccaaaattcagattacctg

SEQ ID NO: 329873 - DNA, 60 bp, Artificial
  Synthetic oligonucleotide
atagccagagtccaccaaaagctcaagaatcttggatctataaatcaggccatggtgaca

SEQ ID NO: 329874 - DNA, 59 bp, Artificial
  Synthetic oligonucleotide
atagccaggggactgagaccattcatccccttatttctgaggcgcgaatgttgaccgga

SEQ ID NO: 329875 - DNA, 60 bp, Artificial
  Synthetic oligonucleotide
atagccatgtcttagccgaattggtatgcgttggtgtcacatgtacagggctgaagcccg

SEQ ID NO: 329876 - DNA, 53 bp, Artificial
  Synthetic oligonucleotide
atagccatgtgggatcctcttttaaacgaatttccggattctgttcacggttt

SEQ ID NO: 329877 - DNA, 55 bp, Artificial
  Synthetic oligonucleotide
atagcccaagaatgtatagtgatatggggaaaacctcctaaatttagactaccca

SEQ ID NO: 329878 - DNA, 56 bp, Artificial
  Synthetic oligonucleotide
atagccccattcgcgagactaagaagggcgtggttataaaccgcgtatcatttgga

SEQ ID NO: 329879 - DNA, 55 bp, Artificial
  Synthetic oligonucleotide
atagcccggaggaatcaacacccgcacgcggaggtacagcaaaacggtccccata

SEQ ID NO: 329880 - DNA, 58 bp, Artificial
  Synthetic oligonucleotide
atagccctacgctgtgccaaaaatttgttgctacagcaatagctccggttcgtcaacg

SEQ ID NO: 329881 - DNA, 60 bp, Artificial
  Synthetic oligonucleotide
atagccctcaacattaacatcctggtgcgatgggcacaacaacgcattctaatttcgctt

SEQ ID NO: 329882 - DNA, 58 bp, Artificial
  Synthetic oligonucleotide
atagcccttaatgtaattcgcatgtatgtagtgggaatcaatggaagcgccgggttcg

SEQ ID NO: 329883 - DNA, 51 bp, Artificial
  Synthetic oligonucleotide
atagccgggatagtttgtatgtttgaccgttcggtgtccttctctgaagtc

SEQ ID NO: 329884 - DNA, 55 bp, Artificial
  Synthetic oligonucleotide
atagccgtcaaagacggtgttaaaacagagctgcagggtgacgtgtatacaacac

SEQ ID NO: 329885 - DNA, 53 bp, Artificial
  Synthetic oligonucleotide
atagccgttaggtacgtccacgcgtgcgggctgtctaagtcgtcgctagggaa

SEQ ID NO: 329886 - DNA, 58 bp, Artificial
  Synthetic oligonucleotide
atagccgtttcttgagctatctccttcgtcttaaacgcaacgattcaggtctcctcca

SEQ ID NO: 329887 - DNA, 58 bp, Artificial
  Synthetic oligonucleotide
atagcctaccactatgcattgctagccgacgaggacacaaatgcagcggcatggctag

SEQ ID NO: 329888 - DNA, 58 bp, Artificial
  Synthetic oligonucleotide
atagcctatgcctcgatgaaaactgaactcgggaagattaaaaccctacatgaaatca

SEQ ID NO: 329889 - DNA, 59 bp, Artificial
  Synthetic oligonucleotide
atagcctatggggagtggcctgaatattgcccagacacggatgcaacggcagtcgacaa

SEQ ID NO: 329890 - DNA, 60 bp, Artificial
  Synthetic oligonucleotide
atagcctcatgccttgcatgatgcgtacgtcgactgtgaaccggactccttgagtgttga

SEQ ID NO: 329891 - DNA, 60 bp, Artificial
  Synthetic oligonucleotide
atagcctccttgaactgcaagttcagctccactgggaatagatccaacgtgcctagagat

SEQ ID NO: 329892 - DNA, 55 bp, Artificial
  Synthetic oligonucleotide
atagcctcgagcaaacgcaggacgccgggcttccgaaccgcagaagccttgacga

SEQ ID NO: 329893 - DNA, 51 bp, Artificial
  Synthetic oligonucleotide
atagcctgatggtcgacatagaaggaaccgccaccctgtcgaacaggcgtt

SEQ ID NO: 329894 - DNA, 60 bp, Artificial
  Synthetic oligonucleotide
atagcctgttatagcagtgataatgtcactgataaccaacccgtagataacactctctct

SEQ ID NO: 329895 - DNA, 50 bp, Artificial
  Synthetic oligonucleotide
atagcctttataagattactactaatgacagttatgaatgtattattgca

SEQ ID NO: 329896 - DNA, 55 bp, Artificial
  Synthetic oligonucleotide
atagcgaaaatctctgatgtagccgagtttgaatgtgattctgttccaatccggc

SEQ ID NO: 329897 - DNA, 60 bp, Artificial
  Synthetic oligonucleotide
atagcgatgtatcatatcggatcagcgacgaggtttgctgagtgttcggttgtatatgtt

SEQ ID NO: 329898 - DNA, 60 bp, Artificial
  Synthetic oligonucleotide
atagcgccactgcctctgtagttagtaggttagcgattgccgaaacttcggctctgaggc

SEQ ID NO: 329899 - DNA, 55 bp, Artificial
  Synthetic oligonucleotide
atagcgcctttgaatccatttacttcgtgtacgcaatggatagccgcagccgtgt

SEQ ID NO: 329900 - DNA, 55 bp, Artificial
  Synthetic oligonucleotide
atagcgcggatggaagctgcgctacaagtatgggtcccgagcctctccgtacggg

SEQ ID NO: 329901 - DNA, 54 bp, Artificial
  Synthetic oligonucleotide
atagcgcgggcaattggaaggtttttcgactcagacaccctatgtaatccatcc

SEQ ID NO: 329902 - DNA, 60 bp, Artificial
  Synthetic oligonucleotide
atagcgggaatgactgcagatgtacttgaagctgcatcagaggaggtaccgttggtaggc

SEQ ID NO: 329903 - DNA, 52 bp, Artificial
  Synthetic oligonucleotide
atagcggtagacgcagacgccaagaggagcgaaattttagcgcagcagaccg

SEQ ID NO: 329904 - DNA, 50 bp, Artificial
  Synthetic oligonucleotide
atagcgtcgcgtcgccgttaatgcgaggggctatgcctttacggaccctc

SEQ ID NO: 329905 - DNA, 59 bp, Artificial
  Synthetic oligonucleotide
atagcgtgtttgatgggactaagccgtatgcatcctacatgatggcggttaaaacctta

SEQ ID NO: 329906 - DNA, 60 bp, Artificial
  Synthetic oligonucleotide
atagcgttagactgggtctgagatattgaatctccaggatccaatgatgcctcttgcaat

SEQ ID NO: 329907 - DNA, 59 bp, Artificial
  Synthetic oligonucleotide
atagcgttgaaggttataaggacggcagactctgctttaatgcatggtttaccgcaatg

SEQ ID NO: 329908 - DNA, 58 bp, Artificial
  Synthetic oligonucleotide
atagctaaattagatgcaaccgtctttgcacagattgttaaacttaggaaggtcgaca

SEQ ID NO: 329909 - DNA, 60 bp, Artificial
  Synthetic oligonucleotide
atagctagagcaggtgaggagtacaggagagctatgggtatccccagagatgactgggta

SEQ ID NO: 329910 - DNA, 52 bp, Artificial
  Synthetic oligonucleotide
atagctaggagatgttctaaggcgtcttctttggttactgaacatctagggt

SEQ ID NO: 329911 - DNA, 55 bp, Artificial
  Synthetic oligonucleotide
atagctcacttagtgaacatcaaggtgttacagattacatcacccagctaggtag

SEQ ID NO: 329912 - DNA, 60 bp, Artificial
  Synthetic oligonucleotide
atagctcctcaggacaactcagaatatcaagccgtttggcgcgtaatcttaactcaggcg

SEQ ID NO: 329913 - DNA, 60 bp, Artificial
  Synthetic oligonucleotide
atagctcctcatttgtgaggggtgacgtgccttatgtaccagaagatgggatcaagacaa

SEQ ID NO: 329914 - DNA, 53 bp, Artificial
  Synthetic oligonucleotide
atagctcgagccgcaacctccctttctttttattccaccctcgcaaggccccg

SEQ ID NO: 329915 - DNA, 59 bp, Artificial
  Synthetic oligonucleotide
atagctcgtcacgaagggcacaaggaggcgatcttcagttacatttcccgcctagatag

SEQ ID NO: 329916 - DNA, 58 bp, Artificial
  Synthetic oligonucleotide
atagctgagccaccaaagttaagaagtgtattggcagcactattttggtataaaggaa

SEQ ID NO: 329917 - DNA, 60 bp, Artificial
  Synthetic oligonucleotide
atagctgagcgcctgtccagttgagcagttgtgagattcccttggtaaacaccaggggtg

SEQ ID NO: 329918 - DNA, 55 bp, Artificial
  Synthetic oligonucleotide
atagctgaggacctagtggtaactgctaacaagaagtccgctgaagacgtcaggg

SEQ ID NO: 329919 - DNA, 60 bp, Artificial
  Synthetic oligonucleotide
atagctgataaagctgttgcgacatcttatcacatgataatgactcagatccttggggtt

SEQ ID NO: 329920 - DNA, 60 bp, Artificial
  Synthetic oligonucleotide
atagctgatactgaatggaaagataccttatcacaactgttcttaacaaaaggatggcca

SEQ ID NO: 329921 - DNA, 60 bp, Artificial
  Synthetic oligonucleotide
atagctgcatcaggtcattttattacattgcgaattattcgtcatgcttggtcgaaagtg

SEQ ID NO: 329922 - DNA, 54 bp, Artificial
  Synthetic oligonucleotide
atagctgcatcatcaacgtttaagaattatgtgtctagattatctgggcagctg

SEQ ID NO: 329923 - DNA, 60 bp, Artificial
  Synthetic oligonucleotide
atagctgcttggcacatcaagggtcgggcggtccccttggctgcctattccctcactggc

SEQ ID NO: 329924 - DNA, 60 bp, Artificial
  Synthetic oligonucleotide
atagctggaatgacggcagacgtattggaggcagcctcggaggaggtgccactaataggt

SEQ ID NO: 329925 - DNA, 58 bp, Artificial
  Synthetic oligonucleotide
atagctggcactgacgtagacattacagttaacccttattaccgcttgatggcctttg

SEQ ID NO: 329926 - DNA, 57 bp, Artificial
  Synthetic oligonucleotide
atagctggccccctcaccaggattgcagagcacgattgacggtattccccctttaat

SEQ ID NO: 329927 - DNA, 60 bp, Artificial
  Synthetic oligonucleotide
atagctggccccctcgccaggattgcaaagcacgatgcatgggatgccccctttaatttg

SEQ ID NO: 329928 - DNA, 56 bp, Artificial
  Synthetic oligonucleotide
atagctggtactgacgttgacatcacggttaacccttactatcgcttaatggcctt

SEQ ID NO: 329929 - DNA, 60 bp, Artificial
  Synthetic oligonucleotide
atagctggtctattcttttggatgtgctctaatggatcattgcagtgcagaatttgcatc

SEQ ID NO: 329930 - DNA, 55 bp, Artificial
  Synthetic oligonucleotide
atagctgtagaaagtatagtgatatggggaaagacccctaaatttagactaccca

SEQ ID NO: 329931 - DNA, 57 bp, Artificial
  Synthetic oligonucleotide
atagcttacaatggacaaacactcaagtaggtgaatggtcactacccttaccaggag

SEQ ID NO: 329932 - DNA, 59 bp, Artificial
  Synthetic oligonucleotide
atagcttcaggagacgatagtcttataggttcaattaaacctctggaccgatctgaaga

SEQ ID NO: 329933 - DNA, 50 bp, Artificial
  Synthetic oligonucleotide
atagcttgaagctcattggccacagctgctgcgaaaggtctcatgtaagt

SEQ ID NO: 329934 - DNA, 51 bp, Artificial
  Synthetic oligonucleotide
atagcttgcccaaccaaatcttctacgggcgtaaggagtggatacaatatg

SEQ ID NO: 329935 - DNA, 60 bp, Artificial
  Synthetic oligonucleotide
atagcttggtcaagtagcagctgtttcgacgggaaggagtggatgcatgtctgcatgaca

SEQ ID NO: 329936 - DNA, 57 bp, Artificial
  Synthetic oligonucleotide
atagctttcacggacagatgcccattcgttcgtctcaaacaattagtcttcttcgtg

SEQ ID NO: 329937 - DNA, 60 bp, Artificial
  Synthetic oligonucleotide
atagctttgcattaccggttggtcaatggccagtaatgactggcggagcagtgtcattgc

SEQ ID NO: 329938 - DNA, 60 bp, Artificial
  Synthetic oligonucleotide
atagctttggacaatctatgcgagtgttgcaggttggtgacggcattaccaaactttgct

SEQ ID NO: 329939 - DNA, 55 bp, Artificial
  Synthetic oligonucleotide
ataggaaacataagacaagcacactgtaacatcagtaggaaaagctggactgaca

SEQ ID NO: 329940 - DNA, 54 bp, Artificial
  Synthetic oligonucleotide
ataggaaagtgctaccaccggggaaactagtggcagaagaaacgattaggaatc

SEQ ID NO: 329941 - DNA, 60 bp, Artificial
  Synthetic oligonucleotide
ataggaacaaaaggccaaatgtgctcaatagcagcagttacttggtggaatacatatgga

SEQ ID NO: 329942 - DNA, 56 bp, Artificial
  Synthetic oligonucleotide
ataggaacataactttgaccaccacgtacgtgacaaacaatcagtaaggtttgcgc

SEQ ID NO: 329943 - DNA, 60 bp, Artificial
  Synthetic oligonucleotide
ataggaacataagcaagaatgctattcttgtcagttatgcttttgtatcagagcattcaa

SEQ ID NO: 329944 - DNA, 57 bp, Artificial
  Synthetic oligonucleotide
ataggaaccttgcttggtgctttgaagaggcttaatagtctaacttgatttaatctc

SEQ ID NO: 329945 - DNA, 55 bp, Artificial
  Synthetic oligonucleotide
ataggaagaagaactcgggtgtgtggccacgtgtcaaaatggatacgatatacgg

SEQ ID NO: 329946 - DNA, 60 bp, Artificial
  Synthetic oligonucleotide
ataggaagaggggtgtgagcattgttggcccttgatcgggctctatcagcagaaccccat

SEQ ID NO: 329947 - DNA, 59 bp, Artificial
  Synthetic oligonucleotide
ataggaagcgtcgacgttagcttcatgctcgattctggcgctgtctggaccattgccag

SEQ ID NO: 329948 - DNA, 58 bp, Artificial
  Synthetic oligonucleotide
ataggaaggacgtgaagctcaagtccgtgtccgtacgcgttatagcgccgtctgcgga

SEQ ID NO: 329949 - DNA, 55 bp, Artificial
  Synthetic oligonucleotide
ataggaatacccgtactgcaaataatgtcaggcttcagcgcatcggtctttgaca

SEQ ID NO: 329950 - DNA, 57 bp, Artificial
  Synthetic oligonucleotide
ataggaataggtttgtgttaatccagcagaagaagtgcgttgtaaataccgctttgc

SEQ ID NO: 329951 - DNA, 60 bp, Artificial
  Synthetic oligonucleotide
ataggaatatccaatgtggggctgaatgtctcattacacctaaagggcagcaatgaccaa

SEQ ID NO: 329952 - DNA, 59 bp, Artificial
  Synthetic oligonucleotide
ataggaatcccctcaggacaattctgcttggaatatgatggcaccttccctgttttgcc

SEQ ID NO: 329953 - DNA, 60 bp, Artificial
  Synthetic oligonucleotide
ataggaatgtgtgcgggagaagggaagaatagagctggagtcaccaaggctctgtatgct

SEQ ID NO: 329954 - DNA, 54 bp, Artificial
  Synthetic oligonucleotide
ataggaattacacgaactcgttgtttgataaatttgcagtattcaaaattcggg

SEQ ID NO: 329955 - DNA, 57 bp, Artificial
  Synthetic oligonucleotide
ataggacaaaggtgcctatgttttgtggatggagattgtgttgtggcggtctcatta

SEQ ID NO: 329956 - DNA, 55 bp, Artificial
  Synthetic oligonucleotide
ataggacaaggagacgtggtattggtaatgaaacggaaacgggactctagcatac

SEQ ID NO: 329957 - DNA, 58 bp, Artificial
  Synthetic oligonucleotide
ataggacagtgtatagttataagtacgagcctgttgggttcattgatcctacttgtaa

SEQ ID NO: 329958 - DNA, 54 bp, Artificial
  Synthetic oligonucleotide
ataggacccaccagaagcaacaaactatttgcaaccgcctaccaggacgttact

SEQ ID NO: 329959 - DNA, 56 bp, Artificial
  Synthetic oligonucleotide
ataggaccgtatatagttataagtatgaaccagttggatttatagatccaacatgt

SEQ ID NO: 329960 - DNA, 55 bp, Artificial
  Synthetic oligonucleotide
ataggacgtcaattgacgttcgtttaatttctatgaagtggaataggagtaaaga

SEQ ID NO: 329961 - DNA, 57 bp, Artificial
  Synthetic oligonucleotide
ataggactagggcaggtactccatacaacaagggtaaaaggagatataagacaagca

SEQ ID NO: 329962 - DNA, 57 bp, Artificial
  Synthetic oligonucleotide
ataggactagtatcagggttaaaagcgtgtgatgatacataactgatcttagcagtc

SEQ ID NO: 329963 - DNA, 55 bp, Artificial
  Synthetic oligonucleotide
ataggactccaatatctaggctatgtaatcaaggacctatccaccaaagaagggg

SEQ ID NO: 329964 - DNA, 60 bp, Artificial
  Synthetic oligonucleotide
ataggagaagctgacccggcatctacgtcggctgaaattggatggcatatccctcgtgaa

SEQ ID NO: 329965 - DNA, 60 bp, Artificial
  Synthetic oligonucleotide
ataggagacatgcttctaagaactgccataggtcaagtgtcaaggcctatgttcctatat

SEQ ID NO: 329966 - DNA, 56 bp, Artificial
  Synthetic oligonucleotide
ataggagacgcatacaatcttcccaataaagacgagttactgacacttattcgagg

SEQ ID NO: 329967 - DNA, 60 bp, Artificial
  Synthetic oligonucleotide
ataggagaggacatacccttcgagggagacaacatgtgctacactgcactcccactcaag

SEQ ID NO: 329968 - DNA, 58 bp, Artificial
  Synthetic oligonucleotide
ataggagataaattaagtgcatcctttcagaatacacagactaatcaacttccgaccc

SEQ ID NO: 329969 - DNA, 55 bp, Artificial
  Synthetic oligonucleotide
ataggagatatgctcttgaggactgcgataggccaagtgtcacggcccatgttcc

SEQ ID NO: 329970 - DNA, 55 bp, Artificial
  Synthetic oligonucleotide
ataggagattgtatcacctgttagacaatccggtttagagaggaacttctcagcg

SEQ ID NO: 329971 - DNA, 52 bp, Artificial
  Synthetic oligonucleotide
ataggagcaattgataaagaattcatcctggcagctatctctccgtctgacc

SEQ ID NO: 329972 - DNA, 54 bp, Artificial
  Synthetic oligonucleotide
ataggagcggtccctaaaacccatcaagtcttgtgtaataccacccaaaagaca

SEQ ID NO: 329973 - DNA, 59 bp, Artificial
  Synthetic oligonucleotide
ataggaggagtaagaatggttgacatactcaggcagaacccaacggaggagcaggctgt

SEQ ID NO: 329974 - DNA, 59 bp, Artificial
  Synthetic oligonucleotide
ataggaggcaacggactggctatttgttgcataagccaaatattcttccatataacaat

SEQ ID NO: 329975 - DNA, 56 bp, Artificial
  Synthetic oligonucleotide
ataggaggcaacggtaggcaaggtttctgtgcgggacttaagaggagctactttgc

SEQ ID NO: 329976 - DNA, 52 bp, Artificial
  Synthetic oligonucleotide
ataggaggcccaataaggatccattgacgttttcacaggcgtttacaatgta

SEQ ID NO: 329977 - DNA, 58 bp, Artificial
  Synthetic oligonucleotide
ataggagtaagaccatagcgatagggggagatgctgggagtgcggggagaccagagcg

SEQ ID NO: 329978 - DNA, 58 bp, Artificial
  Synthetic oligonucleotide
ataggagtaagcccatacgcgatggggggagatgctaggagaacgggctagccgtcag

SEQ ID NO: 329979 - DNA, 51 bp, Artificial
  Synthetic oligonucleotide
ataggagtagagccgggacaattgaaactcaattggttcaagaagggaagt

SEQ ID NO: 329980 - DNA, 53 bp, Artificial
  Synthetic oligonucleotide
ataggagtgggtataactagaatttacgatagcgccgtacgtgatatgcaatt

SEQ ID NO: 329981 - DNA, 55 bp, Artificial
  Synthetic oligonucleotide
ataggagttgccccttctcctagtaacagccgctttgaatctgtggcatggtctg

SEQ ID NO: 329982 - DNA, 60 bp, Artificial
  Synthetic oligonucleotide
ataggatacatctgcagcggagtgtttggtgataatcctcgtcctaatgatggaacaggg

SEQ ID NO: 329983 - DNA, 50 bp, Artificial
  Synthetic oligonucleotide
ataggatacttgctaggatgcacggtattcttagattaaagaacgatcgc

SEQ ID NO: 329984 - DNA, 55 bp, Artificial
  Synthetic oligonucleotide
ataggatctccgtcgctatacccatccttatgatttcttgcgaatgaaggcgcgt

SEQ ID NO: 329985 - DNA, 54 bp, Artificial
  Synthetic oligonucleotide
ataggatctgttaaaagcccaaccttcaccgagcttgacccagaacctaattct

SEQ ID NO: 329986 - DNA, 59 bp, Artificial
  Synthetic oligonucleotide
ataggatgggcgagcagtaattttacaacagcaggtagcgtacaaaatcaaacacttca

SEQ ID NO: 329987 - DNA, 56 bp, Artificial
  Synthetic oligonucleotide
ataggatgtacagaagtccggatgttccaaagggttgtgaaggcccatgtaaggta

SEQ ID NO: 329988 - DNA, 56 bp, Artificial
  Synthetic oligonucleotide
ataggatgtcagactacaaacaccggaacgttcgaggaagtagcaacggctgaaaa

SEQ ID NO: 329989 - DNA, 56 bp, Artificial
  Synthetic oligonucleotide
ataggattagggatagggaaacaatacataacagtgtactatggggtacctcaatg

SEQ ID NO: 329990 - DNA, 60 bp, Artificial
  Synthetic oligonucleotide
ataggattatagaacttatactaagaatttgcagagctatccgcaacatacctacaagaa

SEQ ID NO: 329991 - DNA, 60 bp, Artificial
  Synthetic oligonucleotide
ataggattcgatctgagtatcgacttagttcactatgaggatttaacggctcattggcat

SEQ ID NO: 329992 - DNA, 60 bp, Artificial
  Synthetic oligonucleotide
ataggatttgacgtcggagcttgatttagctccttgaatgtttggatggaaatgtgctga

SEQ ID NO: 329993 - DNA, 60 bp, Artificial
  Synthetic oligonucleotide
ataggatttgcgcgtgtccaagtgatagtcacagtattgacgactgtccattgggtggat

SEQ ID NO: 329994 - DNA, 58 bp, Artificial
  Synthetic oligonucleotide
ataggcaagtgcatcctagcaaatgagacgggttacagggtagtggattccacagact

SEQ ID NO: 329995 - DNA, 54 bp, Artificial
  Synthetic oligonucleotide
ataggcacaggtaagggtactggtggggcctctggctatgttcccattgggtcg

SEQ ID NO: 329996 - DNA, 55 bp, Artificial
  Synthetic oligonucleotide
ataggcactgggcgttggacttggtctgcatccgcgcgctttcaaagggcggctg

SEQ ID NO: 329997 - DNA, 60 bp, Artificial
  Synthetic oligonucleotide
ataggcacttgctgcctatattctatgacacaatggtctatcttcatgcagctacgactg

SEQ ID NO: 329998 - DNA, 52 bp, Artificial
  Synthetic oligonucleotide
ataggcagcaacacaaattgcgtttaggtggggtgcatgtggactcgatacc

SEQ ID NO: 329999 - DNA, 55 bp, Artificial
  Synthetic oligonucleotide
ataggcatagttcttctctcacatagcgatggagtggttcacccttggcaatacc

SEQ ID NO: 330000 - DNA, 55 bp, Artificial
  Synthetic oligonucleotide
ataggcatataatcgtaacatgatcacgagtttcgtgtgttttgaacccttggcg

SEQ ID NO: 330001 - DNA, 56 bp, Artificial
  Synthetic oligonucleotide
ataggcccaaagttcaacaaggcctctgaatgggttaacaggcccatgtatagaaa

SEQ ID NO: 330002 - DNA, 60 bp, Artificial
  Synthetic oligonucleotide
ataggcccaacagcttcggtgagcttagggatggggcagccgctccatccgacggatcag

SEQ ID NO: 330003 - DNA, 54 bp, Artificial
  Synthetic oligonucleotide
ataggcctcccgttaccgcccgagttaaggagtgcagtcttgactaatcttaat

SEQ ID NO: 330004 - DNA, 60 bp, Artificial
  Synthetic oligonucleotide
ataggcctcgccgtcatccgagcctacaccatacttacaaccccatctggcgctacagtg

SEQ ID NO: 330005 - DNA, 59 bp, Artificial
  Synthetic oligonucleotide
ataggcgacgcggtttccttccattgtggtgacgacgtgttactatgtggtgagtatga

SEQ ID NO: 330006 - DNA, 52 bp, Artificial
  Synthetic oligonucleotide
ataggcgcaccaagggaatccgttttaacggcccacttggaataggtggtct

SEQ ID NO: 330007 - DNA, 50 bp, Artificial
  Synthetic oligonucleotide
ataggcgcgccggtagggtcggtaggaatagtgagcatacgcccgtctgc

SEQ ID NO: 330008 - DNA, 51 bp, Artificial
  Synthetic oligonucleotide
ataggcggattcttgtattccgtgtgatagctggttggattgttaaccgat

SEQ ID NO: 330009 - DNA, 58 bp, Artificial
  Synthetic oligonucleotide
ataggcggcctctgttacgtcaaagagaggtcggctgtgaggctttgtcgcgttcgtc

SEQ ID NO: 330010 - DNA, 60 bp, Artificial
  Synthetic oligonucleotide
ataggcgggcctgatataggagtagagaaggacactgtccgtgcactgatcatgtcacgc

SEQ ID NO: 330011 - DNA, 55 bp, Artificial
  Synthetic oligonucleotide
ataggcggggagtttgtaccgtctaatacatcgaaaacagaaatggcagtaacta

SEQ ID NO: 330012 - DNA, 55 bp, Artificial
  Synthetic oligonucleotide
ataggcggggtgtagcgctgcactttgtgcatccaccgatcgtgtccgtcagcgc

SEQ ID NO: 330013 - DNA, 57 bp, Artificial
  Synthetic oligonucleotide
ataggcgtcttgaaagagcggtattgtatgttagtgacccccattgtcctcctgatt

SEQ ID NO: 330014 - DNA, 56 bp, Artificial
  Synthetic oligonucleotide
ataggcgtgcttagtaacggagagtttaggtatgttggtgccgtgtcgcgcggaag

SEQ ID NO: 330015 - DNA, 55 bp, Artificial
  Synthetic oligonucleotide
ataggcgtttagtacaacaagtagctgtagatgatcccatattcttaactcagcc

SEQ ID NO: 330016 - DNA, 54 bp, Artificial
  Synthetic oligonucleotide
ataggctcatgtgtcagcaaatgtcacacagacaaaggttctctctctacaact

SEQ ID NO: 330017 - DNA, 59 bp, Artificial
  Synthetic oligonucleotide
ataggctcgcgtctcgaaaacatagtcgttgcaaacgcgcaccacgtattggtagccga

SEQ ID NO: 330018 - DNA, 56 bp, Artificial
  Synthetic oligonucleotide
ataggctcgttgaaatcgtctcgactgggcagaaccaaggaaaactgtatcaaggg

SEQ ID NO: 330019 - DNA, 60 bp, Artificial
  Synthetic oligonucleotide
ataggctgatggatgggataagcgtaacgaagttcactcccgcatccctagcaagagtgt

SEQ ID NO: 330020 - DNA, 55 bp, Artificial
  Synthetic oligonucleotide
ataggcttaggtacgaagtatcttctgtgtactctcgaggggtcccatgtccttc

SEQ ID NO: 330021 - DNA, 60 bp, Artificial
  Synthetic oligonucleotide
ataggcttgacagaactaaaatagcatgctgggccccaagaagctggcaactctccaagg

SEQ ID NO: 330022 - DNA, 53 bp, Artificial
  Synthetic oligonucleotide
ataggctttgatgggactacggtaatcaccagggctgtggccgcagacaatgg

SEQ ID NO: 330023 - DNA, 51 bp, Artificial
  Synthetic oligonucleotide
ataggctttggcctccgttttaggccttccggactaccaaaatggccgatt

SEQ ID NO: 330024 - DNA, 54 bp, Artificial
  Synthetic oligonucleotide
atagggaacttcttcttaaatcacttgagggattgggtgggtggctagatttct

SEQ ID NO: 330025 - DNA, 53 bp, Artificial
  Synthetic oligonucleotide
atagggaattggcttcagtgtatagagaagtggcgaaagaagtgtctaggcta

SEQ ID NO: 330026 - DNA, 57 bp, Artificial
  Synthetic oligonucleotide
atagggaccgtcttggaccaagcggagacggctggagtcagactcaccgtgcttgca

SEQ ID NO: 330027 - DNA, 59 bp, Artificial
  Synthetic oligonucleotide
atagggagcacgaatgtatgagcagacgatgaataagtcccaaatattagaaaaaacga

SEQ ID NO: 330028 - DNA, 60 bp, Artificial
  Synthetic oligonucleotide
atagggaggcacagctgttggtgcagaataagggtatttgtccagaggatgtaatacctg

SEQ ID NO: 330029 - DNA, 60 bp, Artificial
  Synthetic oligonucleotide
atagggaggcctattggtcacaagcggattcactacacctacatggcgtggtgatccgag

SEQ ID NO: 330030 - DNA, 54 bp, Artificial
  Synthetic oligonucleotide
atagggaggtggtctcgttgtcttggtcaaccagtgaccggtcaacccgcctac

SEQ ID NO: 330031 - DNA, 53 bp, Artificial
  Synthetic oligonucleotide
atagggagtattcagaaagcgtccgagatttctatctggaaaaacttcccccc

SEQ ID NO: 330032 - DNA, 60 bp, Artificial
  Synthetic oligonucleotide
atagggagtgaagagcagacgcgaattttgcccgtaactgcgatgcgatttaagattcca

SEQ ID NO: 330033 - DNA, 58 bp, Artificial
  Synthetic oligonucleotide
atagggataatgtactctaaagcttttcaaggcttgctaagatttgctaatgctttac

SEQ ID NO: 330034 - DNA, 58 bp, Artificial
  Synthetic oligonucleotide
atagggatgcctcatggacacttgtggtgtggacacgaaagtgtaccgcggggaacac

SEQ ID NO: 330035 - DNA, 60 bp, Artificial
  Synthetic oligonucleotide
atagggatggtgacggcaggtggagagaaccatgttgcattcatagatctgagaaactac

SEQ ID NO: 330036 - DNA, 60 bp, Artificial
  Synthetic oligonucleotide
atagggattgagatgccccgtcccgagcgcatgtgctacgaacagtggcgcgatctcgtt

SEQ ID NO: 330037 - DNA, 56 bp, Artificial
  Synthetic oligonucleotide
atagggcaaggggacgtagtgctgataatgaaacggaaacgggactctagcatact

SEQ ID NO: 330038 - DNA, 60 bp, Artificial
  Synthetic oligonucleotide
atagggcaatgtggtggagtggttgctactactggcaaggtccttggcatacatgtgggg

SEQ ID NO: 330039 - DNA, 60 bp, Artificial
  Synthetic oligonucleotide
atagggcagagttcgaggctttattgccatggactactgcgcctgctacttaggcgtagt

SEQ ID NO: 330040 - DNA, 55 bp, Artificial
  Synthetic oligonucleotide
atagggcatttgagtcaaataaaaagaggtgtggacctgaaaatacgaataagaa

SEQ ID NO: 330041 - DNA, 56 bp, Artificial
  Synthetic oligonucleotide
atagggccaaggccccttgtcaacggccagcagggaagaatcgattactattggtc

SEQ ID NO: 330042 - DNA, 58 bp, Artificial
  Synthetic oligonucleotide
atagggctctgcccacatccgtgacattcgagctgctatttgatgggacccgtccatt

SEQ ID NO: 330043 - DNA, 60 bp, Artificial
  Synthetic oligonucleotide
atagggctctgtatattgttggtgatacgtgtgttaaatatgcattgctggtttgtgttt

SEQ ID NO: 330044 - DNA, 60 bp, Artificial
  Synthetic oligonucleotide
atagggcttgaatcaagggtctcggcgctcgagaagacgtctcaaatacactctgatact

SEQ ID NO: 330045 - DNA, 58 bp, Artificial
  Synthetic oligonucleotide
ataggggacagtgtgagtagagccctcacccgagctctaccggcacctacaggccaaa

SEQ ID NO: 330046 - DNA, 57 bp, Artificial
  Synthetic oligonucleotide
ataggggacatgaaagagggggacatggcaacggggataacctatgcatcatacggg

SEQ ID NO: 330047 - DNA, 55 bp, Artificial
  Synthetic oligonucleotide
ataggggtcttaacacgtatcgtaaattacgtgttgctcgcaagttatcctacga

SEQ ID NO: 330048 - DNA, 57 bp, Artificial
  Synthetic oligonucleotide
ataggggtgcctagagaggaggccagggttctccacgtccgtttcgcgtggagagca

SEQ ID NO: 330049 - DNA, 60 bp, Artificial
  Synthetic oligonucleotide
ataggggtgtcttgaagagtggcttggggtgcagtctcggcgcacacgtgcgcggcaccc

SEQ ID NO: 330050 - DNA, 60 bp, Artificial
  Synthetic oligonucleotide
atagggtcaaacgacctatgagcttcctgcttaacagcacggagagcggcattcgccatc

SEQ ID NO: 330051 - DNA, 60 bp, Artificial
  Synthetic oligonucleotide
atagggtgaatggattagttgctcatcttttgtatcagcagaaatcgggtaattgtgaca

SEQ ID NO: 330052 - DNA, 58 bp, Artificial
  Synthetic oligonucleotide
atagggtggtcaatgaagtacttcaaagggtatgtggatggatacaagtctggtgtac

SEQ ID NO: 330053 - DNA, 60 bp, Artificial
  Synthetic oligonucleotide
atagggttggtagcatcaaggctagtgctccactactctactcctgactctaaagtccag

SEQ ID NO: 330054 - DNA, 57 bp, Artificial
  Synthetic oligonucleotide
atagggttggtggcgatagggggaagattaaacggatctggccaatcaaatgctata

SEQ ID NO: 330055 - DNA, 55 bp, Artificial
  Synthetic oligonucleotide
atagggtttacactacctattatattgaaggccctatacatgctttctacacgtg

SEQ ID NO: 330056 - DNA, 55 bp, Artificial
  Synthetic oligonucleotide
atagggtttacacttcctatcatcctaaaggcattatatatgttgtcgacacgtg

SEQ ID NO: 330057 - DNA, 55 bp, Artificial
  Synthetic oligonucleotide
atagggtttgtcactagcacatcaatgtttgaagcaggccacattgcatcaaatg

SEQ ID NO: 330058 - DNA, 56 bp, Artificial
  Synthetic oligonucleotide
ataggtaaataattgggacaccaaaggtaaatgagacaccgatacatcggtgcctc

SEQ ID NO: 330059 - DNA, 57 bp, Artificial
  Synthetic oligonucleotide
ataggtaacaaggcatccgaatgggttaataggcccatgtacaggaagcccaagatc

SEQ ID NO: 330060 - DNA, 60 bp, Artificial
  Synthetic oligonucleotide
ataggtaacagtgctatcagcatgaggtaaaccgcagcgattatgtcattgacgcacagg

SEQ ID NO: 330061 - DNA, 60 bp, Artificial
  Synthetic oligonucleotide
ataggtaaggtcatgtgtattagtgatgttactcatggtactgggttgactcatagagtt

SEQ ID NO: 330062 - DNA, 58 bp, Artificial
  Synthetic oligonucleotide
ataggtaatggcgaacatgtgggatcctctagttcaccccttccctgaaagcttgcac

SEQ ID NO: 330063 - DNA, 55 bp, Artificial
  Synthetic oligonucleotide
ataggtactgtttcaaagttctcacaaggtgacaccctggtgtttcttggtccca

SEQ ID NO: 330064 - DNA, 58 bp, Artificial
  Synthetic oligonucleotide
ataggtacttttggacctagcagtacattagacagacaacccagtgatgaaaattggc

SEQ ID NO: 330065 - DNA, 55 bp, Artificial
  Synthetic oligonucleotide
ataggtagcggtacttagctttaactaagcattcgaagacaggcagacccgaaat

SEQ ID NO: 330066 - DNA, 60 bp, Artificial
  Synthetic oligonucleotide
ataggtagtgtcattatgtgatcaattcttagatgtctagttgaaattatatatgttaag

SEQ ID NO: 330067 - DNA, 52 bp, Artificial
  Synthetic oligonucleotide
ataggtataaaacgttacgaaccatgtttacgtatatctttagctttccgaa

SEQ ID NO: 330068 - DNA, 56 bp, Artificial
  Synthetic oligonucleotide
ataggtatgtcactactcctacttacaataaggatattgaactgccccttccttta

SEQ ID NO: 330069 - DNA, 60 bp, Artificial
  Synthetic oligonucleotide
ataggtcatcagaggttttctttagccattggtcatatgaatatagaaagactaatctgt

SEQ ID NO: 330070 - DNA, 55 bp, Artificial
  Synthetic oligonucleotide
ataggtccgacctcgaattactaacgaacggttctgcgcaagtctaatccgctcc

SEQ ID NO: 330071 - DNA, 55 bp, Artificial
  Synthetic oligonucleotide
ataggtcctgcagatgtaggccctgtactagaatctgtccctgctgtgattgatg

SEQ ID NO: 330072 - DNA, 60 bp, Artificial
  Synthetic oligonucleotide
ataggtcgatgccactgcgagcaatgcagttctacgattgacgacgtgttcataggatgc

SEQ ID NO: 330073 - DNA, 56 bp, Artificial
  Synthetic oligonucleotide
ataggtcgtacatttattgttcaaacccagacagccctgagtacagggttgtgttg

SEQ ID NO: 330074 - DNA, 56 bp, Artificial
  Synthetic oligonucleotide
ataggtctcccaatttattggtacgggagtcagcagcgacatagaccctaaacttc

SEQ ID NO: 330075 - DNA, 60 bp, Artificial
  Synthetic oligonucleotide
ataggtgaagctccgtctccctacaattcaaggtttgaatcagttgcttggtcagcaagc

SEQ ID NO: 330076 - DNA, 56 bp, Artificial
  Synthetic oligonucleotide
ataggtgcatgggggcgttacaaacataatatcactaagtttcgaaacaggggcta

SEQ ID NO: 330077 - DNA, 60 bp, Artificial
  Synthetic oligonucleotide
ataggtgctagtgcggaaggctctataactctatatcatgtagattcaaatatgttaaag

SEQ ID NO: 330078 - DNA, 58 bp, Artificial
  Synthetic oligonucleotide
ataggtggagctcgctatcttggagggatgtttggcgatcttgggaaccagacggcgc

SEQ ID NO: 330079 - DNA, 57 bp, Artificial
  Synthetic oligonucleotide
ataggtggcatttatccagaatgtcaaaggtcaagcaccttctgtttccccggtcaa

SEQ ID NO: 330080 - DNA, 50 bp, Artificial
  Synthetic oligonucleotide
ataggtgggggtgccggaggaacaggactggtatacatgaatatgcccaa

SEQ ID NO: 330081 - DNA, 59 bp, Artificial
  Synthetic oligonucleotide
ataggtgtcgggatttctaccgcaggacgtggaatatggtcactagagactagcaatag

SEQ ID NO: 330082 - DNA, 60 bp, Artificial
  Synthetic oligonucleotide
ataggtgtgtttgctggcagaatacctgtggcgaccgtcagtgaatctcaaggaatgacc

SEQ ID NO: 330083 - DNA, 58 bp, Artificial
  Synthetic oligonucleotide
ataggttaaacacaatggtgttcttttatcatgaatatatagaagacctaggtggtga

SEQ ID NO: 330084 - DNA, 60 bp, Artificial
  Synthetic oligonucleotide
ataggttaagacgtgatggtgttatgactcaagcccagcagaatcaagtcgaggcactgg

SEQ ID NO: 330085 - DNA, 60 bp, Artificial
  Synthetic oligonucleotide
ataggttccattggggcagaaatataacctacatcgctcagttgccaaatggcgacggca

SEQ ID NO: 330086 - DNA, 55 bp, Artificial
  Synthetic oligonucleotide
ataggttgccttaccccactgatgaagagaaactctatgctggacttgtaacacc

SEQ ID NO: 330087 - DNA, 56 bp, Artificial
  Synthetic oligonucleotide
ataggttggcctgacacttttggcattaagttgctgtagttagagtattactaaat

SEQ ID NO: 330088 - DNA, 53 bp, Artificial
  Synthetic oligonucleotide
ataggttgtcaaacaacaaatgtagactcgtttgaaatggtcgctgagaatga

SEQ ID NO: 330089 - DNA, 57 bp, Artificial
  Synthetic oligonucleotide
ataggtttatagaaatcatacaaagattttgtagagctatccttaacatacctagaa

SEQ ID NO: 330090 - DNA, 59 bp, Artificial
  Synthetic oligonucleotide
ataggttttcaatacctatcagtgaatgtcgtaaagaactcacgccaatgacgaccaga

SEQ ID NO: 330091 - DNA, 50 bp, Artificial
  Synthetic oligonucleotide
ataggttttgtagcttcaactagttcttttgctacacgacgtcgttctgc

SEQ ID NO: 330092 - DNA, 55 bp, Artificial
  Synthetic oligonucleotide
atagtaacagatcaactgttgacaggttcgtcaaccaggtttgcaatgatttggg

SEQ ID NO: 330093 - DNA, 52 bp, Artificial
  Synthetic oligonucleotide
atagtaaggctaatcaacaggttcgtgtgtctacttcacagtttttaacaca

SEQ ID NO: 330094 - DNA, 60 bp, Artificial
  Synthetic oligonucleotide
atagtacaacaaggtgtacctacttcggcagcacaagaaggagtagcgtcaagcataaca

SEQ ID NO: 330095 - DNA, 55 bp, Artificial
  Synthetic oligonucleotide
atagtacaacttaacgagactgtaaaaattacttgtatcagacctaacaacaata

SEQ ID NO: 330096 - DNA, 60 bp, Artificial
  Synthetic oligonucleotide
atagtacaacttattgagcctgtgacaattaattgtaccagacttgccaataatacaaga

SEQ ID NO: 330097 - DNA, 60 bp, Artificial
  Synthetic oligonucleotide
atagtacaagtaatgtccaaaagatcaagatcgttagattcgtcatctttctattataga

SEQ ID NO: 330098 - DNA, 50 bp, Artificial
  Synthetic oligonucleotide
atagtacacaaattggcgggataaggatggtggacattctcagacaaaac

SEQ ID NO: 330099 - DNA, 60 bp, Artificial
  Synthetic oligonucleotide
atagtacattctgtaagcctaccctttatctaattgtgcctgtgcatgcctgtaacatga

SEQ ID NO: 330100 - DNA, 52 bp, Artificial
  Synthetic oligonucleotide
atagtaccttaaaggggcgagttaaagcggggtattataaatgtcaggatta

SEQ ID NO: 330101 - DNA, 55 bp, Artificial
  Synthetic oligonucleotide
atagtacggcttaatgaaaccataaggattaagtgcataagacccggcaataaca

SEQ ID NO: 330102 - DNA, 53 bp, Artificial
  Synthetic oligonucleotide
atagtactagaggcactaactttagtatatcagtacacactactgacccagag

SEQ ID NO: 330103 - DNA, 50 bp, Artificial
  Synthetic oligonucleotide
atagtactaggaataatactagcgagtcagataagatcacactcccatgc

SEQ ID NO: 330104 - DNA, 60 bp, Artificial
  Synthetic oligonucleotide
atagtactggcagtggaatatacaggctaatacattgtaatacctcaaccattacacagg

SEQ ID NO: 330105 - DNA, 60 bp, Artificial
  Synthetic oligonucleotide
atagtacttggaatagtactgaagggtcaaatagcactgagagagataatgcaacactca

SEQ ID NO: 330106 - DNA, 60 bp, Artificial
  Synthetic oligonucleotide
atagtagcagttatgagcaacgagagtggtcttactctcacgtttgaacagcccaccgaa

SEQ ID NO: 330107 - DNA, 60 bp, Artificial
  Synthetic oligonucleotide
atagtaggaatagtagtcagtatagattaataaattgtaatacctcagccatcacacaag

SEQ ID NO: 330108 - DNA, 60 bp, Artificial
  Synthetic oligonucleotide
atagtaggagcacgtgggcagaagcgcttcgtcaaaatcccactgaagcacacactaggt

SEQ ID NO: 330109 - DNA, 55 bp, Artificial
  Synthetic oligonucleotide
atagtagggagactggaagtcaagcagtcggtaatccgtgcggggcagtcgattg

SEQ ID NO: 330110 - DNA, 52 bp, Artificial
  Synthetic oligonucleotide
atagtagtagaacgattagggcaatggccctcactgctcgatgtggcaacag

SEQ ID NO: 330111 - DNA, 54 bp, Artificial
  Synthetic oligonucleotide
atagtagtatcgtcaaacgataatgtattagtaaccgtttataaaagcgaacta

SEQ ID NO: 330112 - DNA, 55 bp, Artificial
  Synthetic oligonucleotide
atagtagtcctctcttgtagtgaaagcctttcgccacttgtagcactccctaacc

SEQ ID NO: 330113 - DNA, 50 bp, Artificial
  Synthetic oligonucleotide
atagtagtcttgatgattacatgattcgagacgtcgtgaatctccttcga

SEQ ID NO: 330114 - DNA, 54 bp, Artificial
  Synthetic oligonucleotide
atagtagtgggttagaagggataacgggagaactaagaaactgctctttcaatg

SEQ ID NO: 330115 - DNA, 53 bp, Artificial
  Synthetic oligonucleotide
atagtagtttagaatactacaacgtttaaacagataacttgaaagtcgccggc

SEQ ID NO: 330116 - DNA, 55 bp, Artificial
  Synthetic oligonucleotide
atagtataaacatagtcgaaggcatacttttccctacgtggtaggcgcccattgg

SEQ ID NO: 330117 - DNA, 55 bp, Artificial
  Synthetic oligonucleotide
atagtatattctcataagggtttctctcacctggagtgtctgacacaaacatccc

SEQ ID NO: 330118 - DNA, 50 bp, Artificial
  Synthetic oligonucleotide
atagtatcggacacgtatagcgcagcgctgttatccatgcgataaactag

SEQ ID NO: 330119 - DNA, 55 bp, Artificial
  Synthetic oligonucleotide
atagtatgaagtccgctggcgtgcgtgtaatacgcacttcggagtggctgacgcc

SEQ ID NO: 330120 - DNA, 60 bp, Artificial
  Synthetic oligonucleotide
atagtatgggatgttggattgcaatcgactgtatccttggttgtcccatgggttagtgct

SEQ ID NO: 330121 - DNA, 59 bp, Artificial
  Synthetic oligonucleotide
atagtatgggcagtgaacgaattggacagatatggattagcagagagcctgttggagtc

SEQ ID NO: 330122 - DNA, 51 bp, Artificial
  Synthetic oligonucleotide
atagtatgtggtctatttccaactcagattcaagtccgtaacatcatgagt

SEQ ID NO: 330123 - DNA, 55 bp, Artificial
  Synthetic oligonucleotide
atagtattagtgcatttgcggagaaagcgggaaacggtaccctttcttgctggta

SEQ ID NO: 330124 - DNA, 58 bp, Artificial
  Synthetic oligonucleotide
atagtattatcccatactagactggacgaagccgcttggaataagtctagtcttatct

SEQ ID NO: 330125 - DNA, 55 bp, Artificial
  Synthetic oligonucleotide
atagtattgtaaaactgggaggactaggttataaatggtccgaaatatcatataa

SEQ ID NO: 330126 - DNA, 55 bp, Artificial
  Synthetic oligonucleotide
atagtcaacaggtttattaaaagtacccagtggactcaaatgaatggagacatcc

SEQ ID NO: 330127 - DNA, 55 bp, Artificial
  Synthetic oligonucleotide
atagtcaagaatttctcgagactatacccggtattagttgaagtccagaaggacg

SEQ ID NO: 330128 - DNA, 55 bp, Artificial
  Synthetic oligonucleotide
atagtcaccatgcctaacggcgctcgagagcggttgggcacctcggtggctctct

SEQ ID NO: 330129 - DNA, 57 bp, Artificial
  Synthetic oligonucleotide
atagtcaccatgtgctcttaaattcaaccatctgaagtctaagattctttctatctg

SEQ ID NO: 330130 - DNA, 60 bp, Artificial
  Synthetic oligonucleotide
atagtcacttcaaagtccactagtgaatgtggtttgcctagtatccatacaccaagcaag

SEQ ID NO: 330131 - DNA, 55 bp, Artificial
  Synthetic oligonucleotide
atagtcagggtttcgtgccacctcaggattgggacgttcttaccgacactattag

SEQ ID NO: 330132 - DNA, 59 bp, Artificial
  Synthetic oligonucleotide
atagtcagtgtccttactatgctctaatctgaatgtgccactatacttattacacttga

SEQ ID NO: 330133 - DNA, 60 bp, Artificial
  Synthetic oligonucleotide
atagtcataatggcggcgagagacttagtgtagaggcggcgtgcaaagaaatatttctta

SEQ ID NO: 330134 - DNA, 56 bp, Artificial
  Synthetic oligonucleotide
atagtcatggtaatcttagcataaccccgtctctgaaagatcggttctatattcga

SEQ ID NO: 330135 - DNA, 60 bp, Artificial
  Synthetic oligonucleotide
atagtcattatcgtgctcattatcatcacgagcatcaaagctgtgtacaatttcgccact

SEQ ID NO: 330136 - DNA, 60 bp, Artificial
  Synthetic oligonucleotide
atagtcattgttgcatgctcttctaactatgtcctgtgatatcttaaatagttgagatat

SEQ ID NO: 330137 - DNA, 58 bp, Artificial
  Synthetic oligonucleotide
atagtccatcactgaaacatactccacatcaacttttatttggtatagactccaatac

SEQ ID NO: 330138 - DNA, 54 bp, Artificial
  Synthetic oligonucleotide
atagtccattagtaagtaagcagacagaccagctagatctcgtattatgggcta

SEQ ID NO: 330139 - DNA, 52 bp, Artificial
  Synthetic oligonucleotide
atagtcccaacgaacttcgaagttttgagggaacagatgaaaggcgaaccgg

SEQ ID NO: 330140 - DNA, 52 bp, Artificial
  Synthetic oligonucleotide
atagtcctatcaaggacaggtttcggggtaaagtaccgggagtggtaggaga

SEQ ID NO: 330141 - DNA, 50 bp, Artificial
  Synthetic oligonucleotide
atagtcgaaaagcgaaccacggggcccggaacacatagcgccgccagaga

SEQ ID NO: 330142 - DNA, 59 bp, Artificial
  Synthetic oligonucleotide
atagtcgccgtgcctttaagcgtgctatggctctagtcgcacgcgagaggtggatcacg

SEQ ID NO: 330143 - DNA, 59 bp, Artificial
  Synthetic oligonucleotide
atagtcgtaagtgagcttgacgctgaagtaatcgaatacacaattgatacaagtaatag

SEQ ID NO: 330144 - DNA, 59 bp, Artificial
  Synthetic oligonucleotide
atagtcgtctatctctacgatctttagtctgtattttcgtccttgtgctagtacttcta

SEQ ID NO: 330145 - DNA, 55 bp, Artificial
  Synthetic oligonucleotide
atagtctagtctatttgccgaagggatgtgagttaccagatatccagagctgtgc

SEQ ID NO: 330146 - DNA, 55 bp, Artificial
  Synthetic oligonucleotide
atagtctatccctgatttcaatactaggttaagtatgttcgctaacggaccgtac

SEQ ID NO: 330147 - DNA, 57 bp, Artificial
  Synthetic oligonucleotide
atagtctccacaggaggaaacggcctggtggggtttgccgatgtgagggatcttcta

SEQ ID NO: 330148 - DNA, 59 bp, Artificial
  Synthetic oligonucleotide
atagtctccaccgcgacgcagtctttcttggcgacctgtgtcaacggcgtgtgttggac

SEQ ID NO: 330149 - DNA, 60 bp, Artificial
  Synthetic oligonucleotide
atagtctctcaatgctagctctatttccacctcactcctttgcttcggcttgatcctcaa

SEQ ID NO: 330150 - DNA, 56 bp, Artificial
  Synthetic oligonucleotide
atagtctggccgcgttcccgtacacttggaaggtcggaagggaggtgtgtcatcgc

SEQ ID NO: 330151 - DNA, 60 bp, Artificial
  Synthetic oligonucleotide
atagtgaacagccgcaacgcagatcaaccctccgtctgcgaggtttcctcttggctagcc

SEQ ID NO: 330152 - DNA, 58 bp, Artificial
  Synthetic oligonucleotide
atagtgaagaggccattctgtggtttacagcattttccacagacttaacacctacaga

SEQ ID NO: 330153 - DNA, 52 bp, Artificial
  Synthetic oligonucleotide
atagtgaagtttttaaggcatcagggggtagagttcgtgtcattccttgccg

SEQ ID NO: 330154 - DNA, 56 bp, Artificial
  Synthetic oligonucleotide
atagtgaatccaaaatcgagaagtgagtggcatccgggtttcgttcccataactaa

SEQ ID NO: 330155 - DNA, 55 bp, Artificial
  Synthetic oligonucleotide
atagtgacaacactgaatacttggatgccccagactttgctgaccagctcagaga

SEQ ID NO: 330156 - DNA, 60 bp, Artificial
  Synthetic oligonucleotide
atagtgacagactcacagtatgccttgggaatcattcaagcacagccagataagagtgaa

SEQ ID NO: 330157 - DNA, 50 bp, Artificial
  Synthetic oligonucleotide
atagtgatagagtccagcagattaccctaggtaattcaaccataacaacc

SEQ ID NO: 330158 - DNA, 52 bp, Artificial
  Synthetic oligonucleotide
atagtgatattgcgagtggttccagaaactctaataggtatgtctatagcaa

SEQ ID NO: 330159 - DNA, 60 bp, Artificial
  Synthetic oligonucleotide
atagtgatgccatacattaatgctgtgccttatgacagtgctttaaaccactgcaatttt

SEQ ID NO: 330160 - DNA, 58 bp, Artificial
  Synthetic oligonucleotide
atagtgcaccttaataggtctgtagaaattgtgtgtacaagaccccacaataatacaa

SEQ ID NO: 330161 - DNA, 60 bp, Artificial
  Synthetic oligonucleotide
atagtgcaggtgctatcccatgatagtcctttaactcaagggttgagttcggtttgcatc

SEQ ID NO: 330162 - DNA, 60 bp, Artificial
  Synthetic oligonucleotide
atagtgccgtgagtgctggttttgactcagtttccgcgcgtcaattggctgggtcacgtg

SEQ ID NO: 330163 - DNA, 60 bp, Artificial
  Synthetic oligonucleotide
atagtgcgtgtcgacgtcatgtcactccggacggaatctctagtttcacaatcgaatgct

SEQ ID NO: 330164 - DNA, 59 bp, Artificial
  Synthetic oligonucleotide
atagtggaggtcgatgttacaccggatcgggaatgtccatgacgcctgtaaggattcat

SEQ ID NO: 330165 - DNA, 60 bp, Artificial
  Synthetic oligonucleotide
atagtggatgcttgttggttgtggttatacctgagcatcaacttgcttccattaaaggag

SEQ ID NO: 330166 - DNA, 58 bp, Artificial
  Synthetic oligonucleotide
atagtggcaagtatcctaaaacaggtgaaggggacaataggcagaatgtgtcctttga

SEQ ID NO: 330167 - DNA, 60 bp, Artificial
  Synthetic oligonucleotide
atagtggccaaacgccaaacgcaaccactggctattactcagctactaattatgactcag

SEQ ID NO: 330168 - DNA, 56 bp, Artificial
  Synthetic oligonucleotide
atagtggccaaagaactagtagcccgttgtgataaatgccaactaaaaggagaggc

SEQ ID NO: 330169 - DNA, 60 bp, Artificial
  Synthetic oligonucleotide
atagtggcggtgttgtgacgatgaacgcgaatgctcacgctcatggatgccgtacggatg

SEQ ID NO: 330170 - DNA, 51 bp, Artificial
  Synthetic oligonucleotide
atagtggctaaatttaagccacaaactatgtgctcctcaaggcacaattat

SEQ ID NO: 330171 - DNA, 53 bp, Artificial
  Synthetic oligonucleotide
atagtgggaatacctcctttaatttgaactggcttaccgtacttggtgtttga

SEQ ID NO: 330172 - DNA, 49 bp, Artificial
  Synthetic oligonucleotide
atagtgggaattccccctttaatttgaatgggtttcccgtattttgtgt

SEQ ID NO: 330173 - DNA, 51 bp, Artificial
  Synthetic oligonucleotide
atagtggtaacgtggctagagcctttgggtcccaaaaccccggtacatttg

SEQ ID NO: 330174 - DNA, 56 bp, Artificial
  Synthetic oligonucleotide
atagtggtattttattcttgtggtctagaatagttcacttagcaagagtttcagtt

SEQ ID NO: 330175 - DNA, 56 bp, Artificial
  Synthetic oligonucleotide
atagtggtcccgcccgaaaccccatctgactgtgtggtattatgtttcgtgtccgc

SEQ ID NO: 330176 - DNA, 58 bp, Artificial
  Synthetic oligonucleotide
atagtggtccttcgagggagatgaaggtcgcatttttcagagcccaggcttttaatgc

SEQ ID NO: 330177 - DNA, 60 bp, Artificial
  Synthetic oligonucleotide
atagtgtagatcgacgttacacccaattgggaaagtgaaagctgcttgtgcagcttgttc

SEQ ID NO: 330178 - DNA, 53 bp, Artificial
  Synthetic oligonucleotide
atagtgtctactagagtctttcctgccgcctcgttaattgcctttagcccttt

SEQ ID NO: 330179 - DNA, 58 bp, Artificial
  Synthetic oligonucleotide
atagtgtgaagctggtcacaaatagaggggtgcaccgtacggattccgtcggattaca

SEQ ID NO: 330180 - DNA, 54 bp, Artificial
  Synthetic oligonucleotide
atagtgtgacccctgagtcaagggcaagcttttggcaagcctttggtctgacgg

SEQ ID NO: 330181 - DNA, 57 bp, Artificial
  Synthetic oligonucleotide
atagtgtgggcaagcagggagctggagagatttgcacttaaccccggccttttagaa

SEQ ID NO: 330182 - DNA, 54 bp, Artificial
  Synthetic oligonucleotide
atagtgtggttatgggttagatttaagggtggtgggtgtcttacgtgcgtgtcc

SEQ ID NO: 330183 - DNA, 58 bp, Artificial
  Synthetic oligonucleotide
atagtgtgtagctatgtacagttatctgtttacgtgtaactatatattcctttcggtc

SEQ ID NO: 330184 - DNA, 58 bp, Artificial
  Synthetic oligonucleotide
atagtgttacctgtagatcgtagtatatggctgcactaacatgccacccattttcacg

SEQ ID NO: 330185 - DNA, 54 bp, Artificial
  Synthetic oligonucleotide
atagtgttagtagagttaagttgaggaatgctagtatgatgaagtctaagaggc

SEQ ID NO: 330186 - DNA, 52 bp, Artificial
  Synthetic oligonucleotide
atagtgtttctaccagatgtagaatattcacacaatataaactcaaaatggc

SEQ ID NO: 330187 - DNA, 51 bp, Artificial
  Synthetic oligonucleotide
atagttaaagggggagtggaggtgttggatattagaactggacctgatagt

SEQ ID NO: 330188 - DNA, 57 bp, Artificial
  Synthetic oligonucleotide
atagttactttctgtggactagacaatgaacctggatcgggaaattggcctgatggt

SEQ ID NO: 330189 - DNA, 55 bp, Artificial
  Synthetic oligonucleotide
atagttagagaggccataaaaagaggcttgagaacactaatcctagcccccacta

SEQ ID NO: 330190 - DNA, 52 bp, Artificial
  Synthetic oligonucleotide
atagttagtgttaggttacccacgttcgccgttagaagttcgggtggcgata

SEQ ID NO: 330191 - DNA, 59 bp, Artificial
  Synthetic oligonucleotide
atagttatgggaaatgtaacagaaaattttgacatgtggaaaaatgacatggtggatca

SEQ ID NO: 330192 - DNA, 60 bp, Artificial
  Synthetic oligonucleotide
atagttcataagaagagtgatttggttgatgagtattgtctaagcccaaattgcgattta

SEQ ID NO: 330193 - DNA, 60 bp, Artificial
  Synthetic oligonucleotide
atagttcctgttgatgcagtagatcctgcaggctcctccattgtcccgctcactgatgtg

SEQ ID NO: 330194 - DNA, 58 bp, Artificial
  Synthetic oligonucleotide
atagttctaacaagctagtttcttttatggacggtataatcagcgcgatgtctacaaa

SEQ ID NO: 330195 - DNA, 60 bp, Artificial
  Synthetic oligonucleotide
atagttgacgatatcgcgcggctaaatgtgatcaggacggagtggatcaacgcgcaattt

SEQ ID NO: 330196 - DNA, 60 bp, Artificial
  Synthetic oligonucleotide
atagttggattgcgcaagtttctatgcgtttgggagaggagtcaggggtgatatcgacat

SEQ ID NO: 330197 - DNA, 60 bp, Artificial
  Synthetic oligonucleotide
atagttggcaacaatcacctctgcagaaaatatataaccggcagtggtactgcagattat

SEQ ID NO: 330198 - DNA, 60 bp, Artificial
  Synthetic oligonucleotide
atagttggccaaacggatgtcagctttaatggaggacatattgaagagtgttcttgctat

SEQ ID NO: 330199 - DNA, 60 bp, Artificial
  Synthetic oligonucleotide
atagttgtaaattggctgtgcagacacattttgctgatggagaccccaacaggatcttta

SEQ ID NO: 330200 - DNA, 52 bp, Artificial
  Synthetic oligonucleotide
atagttgtagagaggccagtttagtgtagcgggagatcttggactcaaatct

SEQ ID NO: 330201 - DNA, 60 bp, Artificial
  Synthetic oligonucleotide
atagttgtgaagagctgcatacaacgtatgcgttcagctcgagtaccccctctatgaggg

SEQ ID NO: 330202 - DNA, 58 bp, Artificial
  Synthetic oligonucleotide
atagttgtgtggactatagtagctctagaatataggaaagtgctaaagcaaaggaaaa

SEQ ID NO: 330203 - DNA, 60 bp, Artificial
  Synthetic oligonucleotide
atagtttaggtccgaagcacgcagatgaaacgtacattgttgataaaacatgtgcatgct

SEQ ID NO: 330204 - DNA, 55 bp, Artificial
  Synthetic oligonucleotide
atagtttaggtttcatgccgctgaattcttttgttcatcgatatttaggcggatc

SEQ ID NO: 330205 - DNA, 60 bp, Artificial
  Synthetic oligonucleotide
atagtttatgatgatgagttgcagatgcacgtgctgcgtgggccgatacattttcagcgc

SEQ ID NO: 330206 - DNA, 58 bp, Artificial
  Synthetic oligonucleotide
atagtttccaaggacaatggaatcagaattgggtcaaggggacatgtgtttgtcataa

SEQ ID NO: 330207 - DNA, 54 bp, Artificial
  Synthetic oligonucleotide
atagtttcgaacgtgtaacttatgttacgaaaccgataatgtgaacaatttatg

SEQ ID NO: 330208 - DNA, 56 bp, Artificial
  Synthetic oligonucleotide
atagtttcgcgctaccggttggaaactatccggtcatgaccggtggtgctgtttca

SEQ ID NO: 330209 - DNA, 60 bp, Artificial
  Synthetic oligonucleotide
atagtttggccattcataaagcacatctccttgcgcaaagtattattcgtgatcttggct

SEQ ID NO: 330210 - DNA, 59 bp, Artificial
  Synthetic oligonucleotide
atagtttggcgccggattgagattttttcgaacgcacaagggaactcaatgcagacgca

SEQ ID NO: 330211 - DNA, 57 bp, Artificial
  Synthetic oligonucleotide
atagtttggtgtttagctgtataaggacatggagatgcgggtccccgtccttatgga

SEQ ID NO: 330212 - DNA, 60 bp, Artificial
  Synthetic oligonucleotide
atagtttgttattacgatcgttgcactcatcttcacactctatccgcgtgctgttgtaat

SEQ ID NO: 330213 - DNA, 60 bp, Artificial
  Synthetic oligonucleotide
atataaaaaatgctagagttattgctaagtatgcagaggagtataagactgggccaactg

SEQ ID NO: 330214 - DNA, 58 bp, Artificial
  Synthetic oligonucleotide
atataaaagagagacaacacgtagcgcctcattttgtgggtcaccatattcttgggaa

SEQ ID NO: 330215 - DNA, 50 bp, Artificial
  Synthetic oligonucleotide
atataaaagcgttaacaataagacatatcggtgcaaaacgttttcgttag

SEQ ID NO: 330216 - DNA, 60 bp, Artificial
  Synthetic oligonucleotide
atataaaatgaatccaagcaagactgaatattgttcccaagtaagatctctattccttca

SEQ ID NO: 330217 - DNA, 58 bp, Artificial
  Synthetic oligonucleotide
atataaaatgcacctggtgcgattttatcaccgcttttgtggaagcacccgaggcgcc

SEQ ID NO: 330218 - DNA, 58 bp, Artificial
  Synthetic oligonucleotide
atataaaccacacaaagtctggtgagcactcgttgcctcggtgttggctggttaataa

SEQ ID NO: 330219 - DNA, 57 bp, Artificial
  Synthetic oligonucleotide
atataaaccacccaaagtagtggtcccagttaaggcagaatgtcaggtacatctgcc

SEQ ID NO: 330220 - DNA, 54 bp, Artificial
  Synthetic oligonucleotide
atataaacgtggattttcgtatagagtaaacgattccttctctccaggtaacga

SEQ ID NO: 330221 - DNA, 56 bp, Artificial
  Synthetic oligonucleotide
atataaacttgggccccaagtagtgcactcataccaatgtgggatccgttagtaaa

SEQ ID NO: 330222 - DNA, 59 bp, Artificial
  Synthetic oligonucleotide
atataaagacatgtgatttcaatttatgctttacttcgaaatgcctaagcgggatgccc

SEQ ID NO: 330223 - DNA, 51 bp, Artificial
  Synthetic oligonucleotide
atataaataatgggctgcctccaattcaaaacaccaggaatgtagtgccag

SEQ ID NO: 330224 - DNA, 60 bp, Artificial
  Synthetic oligonucleotide
atataaatcttgctaactcctggcggttgaatttctcgcgagactcgcaaaagcgataca

SEQ ID NO: 330225 - DNA, 60 bp, Artificial
  Synthetic oligonucleotide
atataaatggtctgaagtgtcatttaaaccagcgaactatcaatacacttatacaagaga

SEQ ID NO: 330226 - DNA, 55 bp, Artificial
  Synthetic oligonucleotide
atataacacagggacgtcagcatcttttgacgatgtcatgaaagggaaaactggg

SEQ ID NO: 330227 - DNA, 53 bp, Artificial
  Synthetic oligonucleotide
atataacagacgggtctcaccgggattggatagaccacttagttccgcatagt

SEQ ID NO: 330228 - DNA, 57 bp, Artificial
  Synthetic oligonucleotide
atataaccagcctaagggaggttgtaaatgctggatttgtttaggatattcatattg

SEQ ID NO: 330229 - DNA, 54 bp, Artificial
  Synthetic oligonucleotide
atataaccccatctgggttaaaacgcctcgagtagataggcacaccatgacgga

SEQ ID NO: 330230 - DNA, 54 bp, Artificial
  Synthetic oligonucleotide
atataacctctggaactggggtagaagtctggaactgggaagcatcccaagggg

SEQ ID NO: 330231 - DNA, 56 bp, Artificial
  Synthetic oligonucleotide
atataagaaaagcacattgtaacattagtagagcaaaatggaataacgctttagaa

SEQ ID NO: 330232 - DNA, 59 bp, Artificial
  Synthetic oligonucleotide
atataagaatttacgttatgaaggatatacattggagcagataatagagtttgggtatg

SEQ ID NO: 330233 - DNA, 55 bp, Artificial
  Synthetic oligonucleotide
atataagctcacctacttgcctgataaaccgtgttcaaagattccgtggtgctga

SEQ ID NO: 330234 - DNA, 50 bp, Artificial
  Synthetic oligonucleotide
atataataaattcatgtggtgtgaatcatcaagcataaactcgccaccag

SEQ ID NO: 330235 - DNA, 60 bp, Artificial
  Synthetic oligonucleotide
atataatactagggttgagtgcatagggtggtcaagcacgtcatgccatgacggcatatc

SEQ ID NO: 330236 - DNA, 57 bp, Artificial
  Synthetic oligonucleotide
atataatagctacacccacacttcaggtcaattcgagatcgtcgaattgctctcttc

SEQ ID NO: 330237 - DNA, 58 bp, Artificial
  Synthetic oligonucleotide
atataatatccggaatctccacattccggaggtctgtttgaaatgggagcttatggat

SEQ ID NO: 330238 - DNA, 57 bp, Artificial
  Synthetic oligonucleotide
atataatcatccccgaagaccccctgcggagaaggttcatcgtgacagaagtggagt

SEQ ID NO: 330239 - DNA, 54 bp, Artificial
  Synthetic oligonucleotide
atataatgtaatggatatgtgtgtcatgtagaacatacgcagcgtctaaacacg

SEQ ID NO: 330240 - DNA, 55 bp, Artificial
  Synthetic oligonucleotide
atataatgtgcttccacaaggatggaaggggtcaccagcaatattccagtgcagc

SEQ ID NO: 330241 - DNA, 56 bp, Artificial
  Synthetic oligonucleotide
atataattctgatacgtggttaatttgattatttggtagaatggcagttttgttta

SEQ ID NO: 330242 - DNA, 54 bp, Artificial
  Synthetic oligonucleotide
atatacaacaatgcagtatggaggaggtgataaagtttgatctacagaaggtta

SEQ ID NO: 330243 - DNA, 60 bp, Artificial
  Synthetic oligonucleotide
atatacagatctgtcacgcgtgacgtcacagatcagtcatctcattggtcgttgtcacac

SEQ ID NO: 330244 - DNA, 52 bp, Artificial
  Synthetic oligonucleotide
atatacagcttcagaatataaacaatacatgcgacatgtagaggaatttgat

SEQ ID NO: 330245 - DNA, 59 bp, Artificial
  Synthetic oligonucleotide
atatacaggaagatatgacttaaattttgataggtgggtcacagtcaatggctataaag

SEQ ID NO: 330246 - DNA, 57 bp, Artificial
  Synthetic oligonucleotide
atatacagtaaagacaacagtgtaagaatcggttccaagggggatgtgtttgtcata

SEQ ID NO: 330247 - DNA, 60 bp, Artificial
  Synthetic oligonucleotide
atatacatgggttcgatggattatacaattagttttgatcaacttagcaccaacgcacta

SEQ ID NO: 330248 - DNA, 60 bp, Artificial
  Synthetic oligonucleotide
atatacatgttcctctacaataatctcagtgcaatgatttgggttgagaaggggtacagt

SEQ ID NO: 330249 - DNA, 59 bp, Artificial
  Synthetic oligonucleotide
atatacattgtccactcaaacacgtggtactcaattgacctagagaagggtgaggcaaa

SEQ ID NO: 330250 - DNA, 55 bp, Artificial
  Synthetic oligonucleotide
atatacccattcaccacaggtggcgttctaactattctgagagatcatatgcact

SEQ ID NO: 330251 - DNA, 59 bp, Artificial
  Synthetic oligonucleotide
atatacccggggattgaagtccagatgtccactgagataattatgtgggcctaacgcac

SEQ ID NO: 330252 - DNA, 59 bp, Artificial
  Synthetic oligonucleotide
atataccgccccgataacgacgtgactcatagcaaaagacaggcggtattcgctatcaa

SEQ ID NO: 330253 - DNA, 55 bp, Artificial
  Synthetic oligonucleotide
atataccgtccatgtccagtgcaacgcctccaagtttcaccaaggaaccttgggg

SEQ ID NO: 330254 - DNA, 51 bp, Artificial
  Synthetic oligonucleotide
atataccgtggaggaagtgggacaacatattcggggcgcttggtgccagta

SEQ ID NO: 330255 - DNA, 50 bp, Artificial
  Synthetic oligonucleotide
atatacctcatgggacggtgtagagactcacaggacgcctgaagagctta

SEQ ID NO: 330256 - DNA, 60 bp, Artificial
  Synthetic oligonucleotide
atatacctgcagacgcgaataagaaagctttaatgtttcgtcgtgcttatgcatatgtac

SEQ ID NO: 330257 - DNA, 58 bp, Artificial
  Synthetic oligonucleotide
atatacgatgtaaaacaatactctaatttgaaatttgagacatgggacccattggata

SEQ ID NO: 330258 - DNA, 59 bp, Artificial
  Synthetic oligonucleotide
atatacgcaatggacgagtattacggtgtgcagataagtaaccgtgaatttgctaattg

SEQ ID NO: 330259 - DNA, 57 bp, Artificial
  Synthetic oligonucleotide
atatacgctcttatcaggactagagttagtgcggttatctttacaacgcctagcccg

SEQ ID NO: 330260 - DNA, 55 bp, Artificial
  Synthetic oligonucleotide
atatacggaaagaacataaagacacttcatatcctcgtatagtatactccgtgat

SEQ ID NO: 330261 - DNA, 60 bp, Artificial
  Synthetic oligonucleotide
atatacggaggggcgatagcggagtcatcttgaacacgtggcgcctcagaggccactttg

SEQ ID NO: 330262 - DNA, 60 bp, Artificial
  Synthetic oligonucleotide
atatacgggcctatgcgtatggcgaacatgataagtcgcctggcgaggcgctccttacgc

SEQ ID NO: 330263 - DNA, 55 bp, Artificial
  Synthetic oligonucleotide
atatacggggtggccggtgtggctaagcagccggcagttcggtaacagggaccag

SEQ ID NO: 330264 - DNA, 55 bp, Artificial
  Synthetic oligonucleotide
atatacgtacaatggtcaaacaccgaatgcagttactggttattacaccacaact

SEQ ID NO: 330265 - DNA, 56 bp, Artificial
  Synthetic oligonucleotide
atatacgtatgaagcttatttgttgttatcgcatggttctacgttaactacaaaag

SEQ ID NO: 330266 - DNA, 53 bp, Artificial
  Synthetic oligonucleotide
atatacgtttggactaccggttagcgggtggtacgattagggacgcctgataa

SEQ ID NO: 330267 - DNA, 60 bp, Artificial
  Synthetic oligonucleotide
atatactaggtaagatatggatggacgagaatatcaagttgaagaaccacacgaacagtg

SEQ ID NO: 330268 - DNA, 60 bp, Artificial
  Synthetic oligonucleotide
atatactcaagggtttgatagtaagtggttatacaatgcagcgcacacaaacatacaggt

SEQ ID NO: 330269 - DNA, 60 bp, Artificial
  Synthetic oligonucleotide
atatactgaacattatagcgtatcacagagatgcaagctttataccaagagtaagctcga

SEQ ID NO: 330270 - DNA, 60 bp, Artificial
  Synthetic oligonucleotide
atatactgaactacgtagagagcatatgggccaattctcatgtgctactcaatccagacg

SEQ ID NO: 330271 - DNA, 52 bp, Artificial
  Synthetic oligonucleotide
atatacttccacaagtttgtcaccggactaggggtaaaaacggagtggaaga

SEQ ID NO: 330272 - DNA, 60 bp, Artificial
  Synthetic oligonucleotide
atatacttccacggcagtagtgatcgccttctaacagttggacatccatattttccaata

SEQ ID NO: 330273 - DNA, 54 bp, Artificial
  Synthetic oligonucleotide
atatagaaacatttggttcaaaggccccattaatagtgggaagacaagtttcgc

SEQ ID NO: 330274 - DNA, 55 bp, Artificial
  Synthetic oligonucleotide
atatagacaaggccgatgatttagagcctgagttgattgcctcggcataagcgtc

SEQ ID NO: 330275 - DNA, 56 bp, Artificial
  Synthetic oligonucleotide
atatagacgaagaattgagtagaagtagtatggtattccttcaacaacaatgtgtg

SEQ ID NO: 330276 - DNA, 60 bp, Artificial
  Synthetic oligonucleotide
atatagacgccactcctgagttgagctgcagtgatgtactcccctgtgcgaaaagccata

SEQ ID NO: 330277 - DNA, 56 bp, Artificial
  Synthetic oligonucleotide
atatagacgtccaaaagtacgtgtagatgagccggccgcgagtttaactaagacta

SEQ ID NO: 330278 - DNA, 53 bp, Artificial
  Synthetic oligonucleotide
atatagagaagcattaatttatgctccacatgcaagatatagtgaaccagaaa

SEQ ID NO: 330279 - DNA, 59 bp, Artificial
  Synthetic oligonucleotide
atatagagttccctatttcctcccacttgctccttgtatgacaatgcaaacttcagcct

SEQ ID NO: 330280 - DNA, 58 bp, Artificial
  Synthetic oligonucleotide
atatagagtttgattagtagttatgagtttacagagaactgacaattaggctataaat

SEQ ID NO: 330281 - DNA, 60 bp, Artificial
  Synthetic oligonucleotide
atatagatatcatatgggtggtattgaaggatggtgtcaaaaactctggacaatggaagc

SEQ ID NO: 330282 - DNA, 57 bp, Artificial
  Synthetic oligonucleotide
atatagatcgggcgcggagtgggggaccaatcagcgtgcgttacggagtgttacgaa

SEQ ID NO: 330283 - DNA, 56 bp, Artificial
  Synthetic oligonucleotide
atatagatggatgacccatcgtttctcgcgggtaggtccacgtttgctaaacgtag

SEQ ID NO: 330284 - DNA, 54 bp, Artificial
  Synthetic oligonucleotide
atatagcaaacggaatacattttaattaacgaattgctcttggggtcaattaac

SEQ ID NO: 330285 - DNA, 54 bp, Artificial
  Synthetic oligonucleotide
atatagcacaattcgcaacggttgacggccgatataaaataaacctctcacggg

SEQ ID NO: 330286 - DNA, 54 bp, Artificial
  Synthetic oligonucleotide
atatagcagaatccgtgacccacgcaatcgcaaccgtattctctggcttagaac

SEQ ID NO: 330287 - DNA, 60 bp, Artificial
  Synthetic oligonucleotide
atatagcgacgtgcttaccgacaggagatatgtttcgccccaatcctcgcatagcttcaa

SEQ ID NO: 330288 - DNA, 60 bp, Artificial
  Synthetic oligonucleotide
atatagcgtagacactgtggtatcagaattggtcagggagtataacaacaggtccgctat

SEQ ID NO: 330289 - DNA, 60 bp, Artificial
  Synthetic oligonucleotide
atatagctggcctgacagaggttcaaaagcagagcgtggctctctcctctatcaagcggg

SEQ ID NO: 330290 - DNA, 60 bp, Artificial
  Synthetic oligonucleotide
atatagctgggctgtagttagcaatatctcggctcgtgaatacaagaatattggttctaa

SEQ ID NO: 330291 - DNA, 60 bp, Artificial
  Synthetic oligonucleotide
atataggaccagggagagcattttatacagatagagtaggagacataaggcaagcatatt

SEQ ID NO: 330292 - DNA, 56 bp, Artificial
  Synthetic oligonucleotide
atataggactggacgtcggaactcgatttagccccctgaatgtttggatggaaatg

SEQ ID NO: 330293 - DNA, 58 bp, Artificial
  Synthetic oligonucleotide
atataggagcccgagcactatcccgtacctgttgtatccccctcacggcggccagaga

SEQ ID NO: 330294 - DNA, 56 bp, Artificial
  Synthetic oligonucleotide
atataggagtttaaaggatgaccttgatcaccattacccattagaatatcaaaggg

SEQ ID NO: 330295 - DNA, 58 bp, Artificial
  Synthetic oligonucleotide
atataggatatggcaatctaaatttcaaagccttacaacaaaataggtctgatgttag

SEQ ID NO: 330296 - DNA, 59 bp, Artificial
  Synthetic oligonucleotide
atataggccaaatagtactaatgagaccttcagacctacaggaggagaaatgagggaca

SEQ ID NO: 330297 - DNA, 57 bp, Artificial
  Synthetic oligonucleotide
atataggctgcgacatttcatcaccattccaagtagtttttttcaaacgtacattac

SEQ ID NO: 330298 - DNA, 60 bp, Artificial
  Synthetic oligonucleotide
atatagggggtatgtctccctatgaattacatatatggcaggagaatacattaatacaac

SEQ ID NO: 330299 - DNA, 55 bp, Artificial
  Synthetic oligonucleotide
atataggttaagatgtaaggattaaggtaagaggtgtgtggctcatcgcatagag

SEQ ID NO: 330300 - DNA, 52 bp, Artificial
  Synthetic oligonucleotide
atataggttgccgaaatttccatggtgtcatatttgctagacgtgagcggtt

SEQ ID NO: 330301 - DNA, 59 bp, Artificial
  Synthetic oligonucleotide
atatagtacagattaatgagggcaactctagtgagtatagattaataaattgtaatacc

SEQ ID NO: 330302 - DNA, 55 bp, Artificial
  Synthetic oligonucleotide
atatagtatatgcaccatcaaccaggaatttgtcgatacaagaccatatactccg

SEQ ID NO: 330303 - DNA, 60 bp, Artificial
  Synthetic oligonucleotide
atatagtatccttctcagttgatccacaattatactgtgactacaacgtagtgttaatga

SEQ ID NO: 330304 - DNA, 56 bp, Artificial
  Synthetic oligonucleotide
atatagtcgcgtggcgggcgtgggttttactgatcggctgataacctgctcgacct

SEQ ID NO: 330305 - DNA, 54 bp, Artificial
  Synthetic oligonucleotide
atatagtgtaccttagtagacccacttttgaggaaagagagggctatttacgtg

SEQ ID NO: 330306 - DNA, 53 bp, Artificial
  Synthetic oligonucleotide
atatagttatataacccaacctaagccggaggttaaaaaggtagtctctcaga

SEQ ID NO: 330307 - DNA, 56 bp, Artificial
  Synthetic oligonucleotide
atatagttcactgccgtatggccgccccaagtcagcggaaggccgttctctctacg

SEQ ID NO: 330308 - DNA, 55 bp, Artificial
  Synthetic oligonucleotide
atatagttctacatgccgaacacaatgaacattggtattaccccgggcggaaccc

SEQ ID NO: 330309 - DNA, 60 bp, Artificial
  Synthetic oligonucleotide
atatataaagccgcaggtcgggggctggtgcatgaggcattagcttcatccactatgtct

SEQ ID NO: 330310 - DNA, 60 bp, Artificial
  Synthetic oligonucleotide
atatataagcctctgataacgtgcttctctgtaaatagacatcacgatccaacctatcta

SEQ ID NO: 330311 - DNA, 56 bp, Artificial
  Synthetic oligonucleotide
atatataaggtccctgttgggttgagctttgatgcctgggagcgtaaccaccgacc

SEQ ID NO: 330312 - DNA, 60 bp, Artificial
  Synthetic oligonucleotide
atatatacgccattctctccttgagctgcagtgatgggttcccctgtgcgtgaatccatg

SEQ ID NO: 330313 - DNA, 59 bp, Artificial
  Synthetic oligonucleotide
atatatactagaaccctcaatagaactttggatctcgttcacacacgtggcggccatcc

SEQ ID NO: 330314 - DNA, 60 bp, Artificial
  Synthetic oligonucleotide
atatatactagaaccctcaatctcttgaattatcacatccatacacgtggcggccatccg

SEQ ID NO: 330315 - DNA, 60 bp, Artificial
  Synthetic oligonucleotide
atatatagccgagtgaacctgttcgatttgcaacgcttagacctggcgataagattaata

SEQ ID NO: 330316 - DNA, 60 bp, Artificial
  Synthetic oligonucleotide
atatatagtaggctacggagccatagtgacattggtttcaagaaagcgactgttggcgat

SEQ ID NO: 330317 - DNA, 55 bp, Artificial
  Synthetic oligonucleotide
atatatcacaactgacctgcagaagtactgtctcaattggaggtatcagaccatc

SEQ ID NO: 330318 - DNA, 60 bp, Artificial
  Synthetic oligonucleotide
atatatcactgtgccggttcatcggactgcgagtcgaatcctccttaatgagaatacaga

SEQ ID NO: 330319 - DNA, 60 bp, Artificial
  Synthetic oligonucleotide
atatatcagaggaggagtcaagtttgagataatcaagctaagctctccctatgtaaaggc

SEQ ID NO: 330320 - DNA, 59 bp, Artificial
  Synthetic oligonucleotide
atatatcagttacgcatcaaatatcaagtttagtgcagaaaagtcgcagtcaagtcagc

SEQ ID NO: 330321 - DNA, 60 bp, Artificial
  Synthetic oligonucleotide
atatatccaccaatgccatgttacgttccactagacaaatactttacacacaatgatggc

SEQ ID NO: 330322 - DNA, 60 bp, Artificial
  Synthetic oligonucleotide
atatatcccgagatatgcaattcatgagcaaaacaatccagcacaatggagtgtactatc

SEQ ID NO: 330323 - DNA, 55 bp, Artificial
  Synthetic oligonucleotide
atatatccgaccgttctcggtagtgtccagcaagggtacgtgggaggaatcgacg

SEQ ID NO: 330324 - DNA, 58 bp, Artificial
  Synthetic oligonucleotide
atatatcgggcttggagaacgcccgatgttccaagaggctgtgaaggcccatgtaagg

SEQ ID NO: 330325 - DNA, 55 bp, Artificial
  Synthetic oligonucleotide
atatatctaagcagtgtacctatggagactggtccctacttctatcaggatctaa

SEQ ID NO: 330326 - DNA, 60 bp, Artificial
  Synthetic oligonucleotide
atatatctaccattttacttcaatgcaaaggggttacatgaaaaacatcatgttatgata

SEQ ID NO: 330327 - DNA, 60 bp, Artificial
  Synthetic oligonucleotide
atatatgaatggtttgatatcagatatatgagaaacacgccaatgactacatttacagtc

SEQ ID NO: 330328 - DNA, 60 bp, Artificial
  Synthetic oligonucleotide
atatatggacacaaatcaattacgtggtcttgtctagaacacttgagttgtgtggagaat

SEQ ID NO: 330329 - DNA, 56 bp, Artificial
  Synthetic oligonucleotide
atatatgggaagtcctatatagattgcagaatttctataataagacgctaacgcgc

SEQ ID NO: 330330 - DNA, 60 bp, Artificial
  Synthetic oligonucleotide
atatatgttgtctcctgggctgtcgagagaagggcttctttatgaactggagagcatatc

SEQ ID NO: 330331 - DNA, 58 bp, Artificial
  Synthetic oligonucleotide
atatattatgcaggcttagaaccacatagaaacataaggaaaggcttatgcaagttta

SEQ ID NO: 330332 - DNA, 60 bp, Artificial
  Synthetic oligonucleotide
atatattcagtgttccagctgcattgcacggcactgttcgggtaccgcttaactgcagac

SEQ ID NO: 330333 - DNA, 57 bp, Artificial
  Synthetic oligonucleotide
atatattccacataggctatgtggaacttaagaattacacccctctccttcggagct

SEQ ID NO: 330334 - DNA, 55 bp, Artificial
  Synthetic oligonucleotide
atatattctacctcgcggatcgctagtaggcttaaaactccacggtcgttccaca

SEQ ID NO: 330335 - DNA, 56 bp, Artificial
  Synthetic oligonucleotide
atatattggaggaggaggcggtcccgaagtgcgccggggatgacaatctaacggtc

SEQ ID NO: 330336 - DNA, 54 bp, Artificial
  Synthetic oligonucleotide
atatcaaagaatcttcgacaacgctgatcggccatctcatatctactcacactg

SEQ ID NO: 330337 - DNA, 57 bp, Artificial
  Synthetic oligonucleotide
atatcaaagctgtgattacctaatctttcggttctcttaattttctcgtcgacaaca

SEQ ID NO: 330338 - DNA, 60 bp, Artificial
  Synthetic oligonucleotide
atatcaaaggaatacacctgactggatgctgcctctaattttaggcctgtatggtgatat

SEQ ID NO: 330339 - DNA, 60 bp, Artificial
  Synthetic oligonucleotide
atatcaaatttggaggtcgcgaggtgatatgattgaacactttttcaaggcgattgatgc

SEQ ID NO: 330340 - DNA, 58 bp, Artificial
  Synthetic oligonucleotide
atatcaacagaagaagttcccgaaactggattccaaattgatccccgcatcgtccgca

SEQ ID NO: 330341 - DNA, 60 bp, Artificial
  Synthetic oligonucleotide
atatcaaggcagacatcaattacacatcaaatagctgatgatgagcctttcaatttaagt

SEQ ID NO: 330342 - DNA, 60 bp, Artificial
  Synthetic oligonucleotide
atatcaagtcatgcagactctacaagtaaggacatggctccatgttcgctacgtagagta

SEQ ID NO: 330343 - DNA, 60 bp, Artificial
  Synthetic oligonucleotide
atatcaagtctcatcgtacttgtttataccaccatatatctataatgtggtttatatcaa

SEQ ID NO: 330344 - DNA, 55 bp, Artificial
  Synthetic oligonucleotide
atatcaatggtacgtttattacgaatgaagaattggaacttgagttttcggataa

SEQ ID NO: 330345 - DNA, 58 bp, Artificial
  Synthetic oligonucleotide
atatcaatggtgacccattgcctgaaggcgaaactaatgatgccaccgggatgaaacg

SEQ ID NO: 330346 - DNA, 60 bp, Artificial
  Synthetic oligonucleotide
atatcaatgttatcgaagtaggagatgatctatcactgcatacagaatcgtacatttgta

SEQ ID NO: 330347 - DNA, 59 bp, Artificial
  Synthetic oligonucleotide
atatcacactcagggattcttccctgattggcagtgttacacaccgggaccaggaccta

SEQ ID NO: 330348 - DNA, 60 bp, Artificial
  Synthetic oligonucleotide
atatcacagcctgtctcgtgcccgaccccgctggttcatgtgatgcctactcctactctc

SEQ ID NO: 330349 - DNA, 60 bp, Artificial
  Synthetic oligonucleotide
atatcacgtacagccacaaataaaactcattgcgagcgtctacactcaccgttttgttga

SEQ ID NO: 330350 - DNA, 56 bp, Artificial
  Synthetic oligonucleotide
atatcactacgttgccaaacctgccctacaggaactacgattactaaaaggcgagc

SEQ ID NO: 330351 - DNA, 60 bp, Artificial
  Synthetic oligonucleotide
atatcactctgatagtatcaaaaaatgagccaaagtaacttgcaatgaaattgaatgggc

SEQ ID NO: 330352 - DNA, 60 bp, Artificial
  Synthetic oligonucleotide
atatcacttgagaagaggcgtgcgcaaatatcagctttattgacaatgttacaaaaacca

SEQ ID NO: 330353 - DNA, 60 bp, Artificial
  Synthetic oligonucleotide
atatcactttctttctcgtagattgagtcgagtcatggacaaatctgaatcacccagtgc

SEQ ID NO: 330354 - DNA, 60 bp, Artificial
  Synthetic oligonucleotide
atatcagaaggctttgaacagttggattgcacaagtttcgatgcgtttgggagaggaatc

SEQ ID NO: 330355 - DNA, 55 bp, Artificial
  Synthetic oligonucleotide
atatcagacgaatttgctaaggctcgaaaaccgattttggtcccgactcaaatat

SEQ ID NO: 330356 - DNA, 58 bp, Artificial
  Synthetic oligonucleotide
atatcagctgcagaattaaatagccttgagaaacaagtaaacgaacgcttaatagacc

SEQ ID NO: 330357 - DNA, 55 bp, Artificial
  Synthetic oligonucleotide
atatcaggatgacccttacgcgatggaagccctcaagactaagactggtcgtaac

SEQ ID NO: 330358 - DNA, 59 bp, Artificial
  Synthetic oligonucleotide
atatcaggcctgaccccgaggagggaagcaacacaacactgcggtgtcctaccgactgc

SEQ ID NO: 330359 - DNA, 60 bp, Artificial
  Synthetic oligonucleotide
atatcagtcccaagtccgtcagtgctaggacagcatcatttaggtcaacttgaccctgtt

SEQ ID NO: 330360 - DNA, 58 bp, Artificial
  Synthetic oligonucleotide
atatcataactgtaagtataccagtctgaagtagtagcaggaaggtcaggggaattaa

SEQ ID NO: 330361 - DNA, 59 bp, Artificial
  Synthetic oligonucleotide
atatcatactacaacgaattggaggttgtagcgacgcgcaatttaagaggtgtgggaga

SEQ ID NO: 330362 - DNA, 60 bp, Artificial
  Synthetic oligonucleotide
atatcatatgaagtccatacatcaatcgttcgctctattacattatctaatacatgataa

SEQ ID NO: 330363 - DNA, 60 bp, Artificial
  Synthetic oligonucleotide
atatcatatgaagtctgtacatcaatcgtctgttccaatacattatccaatacatgatac

SEQ ID NO: 330364 - DNA, 55 bp, Artificial
  Synthetic oligonucleotide
atatcatccatatcagtgtggacagatgtttccgaacaaatagcgggttcgtcag

SEQ ID NO: 330365 - DNA, 58 bp, Artificial
  Synthetic oligonucleotide
atatcatccttggttccatacgtgtggaaaaatcatctttgcggttatggctttctta

SEQ ID NO: 330366 - DNA, 52 bp, Artificial
  Synthetic oligonucleotide
atatcatcgtagcattaagtacaaggaattactaatgacaattatgaatgta

SEQ ID NO: 330367 - DNA, 53 bp, Artificial
  Synthetic oligonucleotide
atatcatctacgatgttgtagattgcgtcttcgttgtatgaagaccaatcaac

SEQ ID NO: 330368 - DNA, 60 bp, Artificial
  Synthetic oligonucleotide
atatcatctgagcttggatccggctcaaaagatgtatgcaaatttaggtcaagcactagt

SEQ ID NO: 330369 - DNA, 55 bp, Artificial
  Synthetic oligonucleotide
atatcatgaattacaccggcaaccaacagtcccggtggggcctcgggagcccgaa

SEQ ID NO: 330370 - DNA, 59 bp, Artificial
  Synthetic oligonucleotide
atatcatgctttttgctcgttgcactacttttagccttcattttgtgggcctgtcaaaa

SEQ ID NO: 330371 - DNA, 54 bp, Artificial
  Synthetic oligonucleotide
atatcatggagtcgcagcactttgcttcaagccccaggattgaagcttattttg

SEQ ID NO: 330372 - DNA, 60 bp, Artificial
  Synthetic oligonucleotide
atatcatgtaatgcatcgaatgcaccattactcaacctcatcaactttttgggatggact

SEQ ID NO: 330373 - DNA, 53 bp, Artificial
  Synthetic oligonucleotide
atatccaaattgtaattaatgatttactaaaacaaggggtactaattcagaaa

SEQ ID NO: 330374 - DNA, 49 bp, Artificial
  Synthetic oligonucleotide
atatccaacgtcaggtctccctttttgtcggggggcccctccccaaacg

SEQ ID NO: 330375 - DNA, 54 bp, Artificial
  Synthetic oligonucleotide
atatccacccgaactgctgattgggtctgatcgctcactcaacccatggtgtta

SEQ ID NO: 330376 - DNA, 55 bp, Artificial
  Synthetic oligonucleotide
atatccactaatccaagtcctctcgctatatcctcctcacacgtttctgccatag

SEQ ID NO: 330377 - DNA, 60 bp, Artificial
  Synthetic oligonucleotide
atatccagacgctcccacacgagaccttcgatgagtatgactccacctcaagcccatttg

SEQ ID NO: 330378 - DNA, 51 bp, Artificial
  Synthetic oligonucleotide
atatccagaggcaaaagatgaaaagtcacaggtgtaatgcttgaggctttt

SEQ ID NO: 330379 - DNA, 60 bp, Artificial
  Synthetic oligonucleotide
atatccagcgttcgggatgcaacgaatgcattatagaaatggagatccacagacaccatt

SEQ ID NO: 330380 - DNA, 58 bp, Artificial
  Synthetic oligonucleotide
atatccagtaatgagcgagtggttcaattcattaaatacggagtaaccgaggtgatac

SEQ ID NO: 330381 - DNA, 57 bp, Artificial
  Synthetic oligonucleotide
atatccatctccttttggcctcagacgacaactaccccgacctccgtcgacatgaat

SEQ ID NO: 330382 - DNA, 60 bp, Artificial
  Synthetic oligonucleotide
atatccatgacagttaatactgaggtaatatgagcagccgcagtctaagtcaattcgtct

SEQ ID NO: 330383 - DNA, 57 bp, Artificial
  Synthetic oligonucleotide
atatcccaagcggaggcagccttggaaaaccttgtgctactcaatgcggcgtctttg

SEQ ID NO: 330384 - DNA, 55 bp, Artificial
  Synthetic oligonucleotide
atatcccacaccgggaaggtgctatgcatatcggacgttacccgaggtaacggta

SEQ ID NO: 330385 - DNA, 60 bp, Artificial
  Synthetic oligonucleotide
atatcccagcattgattgaagagtatgataccgaagggcttgagatcgttgagctacacc

SEQ ID NO: 330386 - DNA, 60 bp, Artificial
  Synthetic oligonucleotide
atatcccagtcctctgggggggacataggggttcacatggcacacgatgatcagtcagtt

SEQ ID NO: 330387 - DNA, 60 bp, Artificial
  Synthetic oligonucleotide
atatcccatgtgaaaatcgtgccattgattgtgtggtcagtctttttgtcatagcagttc

SEQ ID NO: 330388 - DNA, 56 bp, Artificial
  Synthetic oligonucleotide
atatcccctaacatatgggcggtgctttaagttagtccctctcacagaagaggaag

SEQ ID NO: 330389 - DNA, 60 bp, Artificial
  Synthetic oligonucleotide
atatcccctccggtgctgtctctcagccagaaatcgctccacacaatcaagctgccccca

SEQ ID NO: 330390 - DNA, 58 bp, Artificial
  Synthetic oligonucleotide
atatcccgaccggcactgtgtggcctgccttggataacccattcggctggattaggtg

SEQ ID NO: 330391 - DNA, 52 bp, Artificial
  Synthetic oligonucleotide
atatcccgggtggagccttcgcatgtcgcggtgaggtaggttaggaacagtg

SEQ ID NO: 330392 - DNA, 55 bp, Artificial
  Synthetic oligonucleotide
atatcccgttgtgtacacgatagtacatagtgtttatccctccacttaaatcgaa

SEQ ID NO: 330393 - DNA, 55 bp, Artificial
  Synthetic oligonucleotide
atatccctccccctcgagctcaggaagttccacatgaaacaggtcccgttcggga

SEQ ID NO: 330394 - DNA, 58 bp, Artificial
  Synthetic oligonucleotide
atatccctggtaccaacgaatgatgattatcaaacaccaatagctaattctgtaacgg

SEQ ID NO: 330395 - DNA, 60 bp, Artificial
  Synthetic oligonucleotide
atatccgagcaaagatccctctcatgctgacgtacagctgctatacgagagcatagttcg

SEQ ID NO: 330396 - DNA, 55 bp, Artificial
  Synthetic oligonucleotide
atatccgatcagtttcattggatctctcacgcctatacattcacttgctgatcat

SEQ ID NO: 330397 - DNA, 59 bp, Artificial
  Synthetic oligonucleotide
atatccgatgtgacacgtggtaatggtatcacccaccgtgttggtaagcgattctgtgt

SEQ ID NO: 330398 - DNA, 55 bp, Artificial
  Synthetic oligonucleotide
atatccgcaatctcatctctcgtaatactccctgcttgtgatgccgatggccctg

SEQ ID NO: 330399 - DNA, 55 bp, Artificial
  Synthetic oligonucleotide
atatccggcagggcacaatcaggtaggcactttgcaacatctagcactcacagcc

SEQ ID NO: 330400 - DNA, 51 bp, Artificial
  Synthetic oligonucleotide
atatccggcgcggtagtggtatcaacccggttcaacaggacacgatatttt

SEQ ID NO: 330401 - DNA, 57 bp, Artificial
  Synthetic oligonucleotide
atatccgtggtcacaacgaagatggacacgttaaaggtacacttagcgtcgctgtgt

SEQ ID NO: 330402 - DNA, 53 bp, Artificial
  Synthetic oligonucleotide
atatcctaccatgcagctaatggtgcccaagcgccagaggctagaagacgtac

SEQ ID NO: 330403 - DNA, 54 bp, Artificial
  Synthetic oligonucleotide
atatcctacgagatcaccgctactgaccatcgcctttcttacgaacttggcccc

SEQ ID NO: 330404 - DNA, 52 bp, Artificial
  Synthetic oligonucleotide
atatcctacgggaatcctccggttcccgtcacgtctagcccctccccgcgtc

SEQ ID NO: 330405 - DNA, 60 bp, Artificial
  Synthetic oligonucleotide
atatcctcaaaggattgttcatgctctgcttgaaactcacacatcttttgcgcaagttct

SEQ ID NO: 330406 - DNA, 60 bp, Artificial
  Synthetic oligonucleotide
atatcctcaggtatttacttaagcccttacagtttcagacctcactcacatccagtctgc

SEQ ID NO: 330407 - DNA, 55 bp, Artificial
  Synthetic oligonucleotide
atatcctcgtgtatgttgcaagctacaacgaagtagatacactttcaagactcct

SEQ ID NO: 330408 - DNA, 60 bp, Artificial
  Synthetic oligonucleotide
atatcctgcatttgttgcaggtcatcggctgcttgggaaattgatgtgccaggatgtatt

SEQ ID NO: 330409 - DNA, 54 bp, Artificial
  Synthetic oligonucleotide
atatcctggaggttcgcaagggacgcaataagttcgcttgcaaactggctgccc

SEQ ID NO: 330410 - DNA, 60 bp, Artificial
  Synthetic oligonucleotide
atatcctgtaactcaaatattacaggtctactattgacaagagatggtggtaagactgat

SEQ ID NO: 330411 - DNA, 60 bp, Artificial
  Synthetic oligonucleotide
atatcctgtgatcagagggacctacaacaacactactggaagagatgttttggttatatg

SEQ ID NO: 330412 - DNA, 59 bp, Artificial
  Synthetic oligonucleotide
atatccttcacgcggcgctacttgctattccaccatggggtgaactttccgcgcaatgt

SEQ ID NO: 330413 - DNA, 55 bp, Artificial
  Synthetic oligonucleotide
atatcctttaaatcctctgatttagccttttcgggtagtgatttctcgcaagggc

SEQ ID NO: 330414 - DNA, 60 bp, Artificial
  Synthetic oligonucleotide
atatcctttcctcgagactgttgaaatcaaatggacctgtgaacccatgatggccgtatg

SEQ ID NO: 330415 - DNA, 60 bp, Artificial
  Synthetic oligonucleotide
atatcctttctgaaggatagatgcaatccaaaatttgagcatttaccattattatggcag

SEQ ID NO: 330416 - DNA, 55 bp, Artificial
  Synthetic oligonucleotide
atatcgaaccacccgtacgggaatttgcatacgtacatgagtttcaacgcttggt

SEQ ID NO: 330417 - DNA, 55 bp, Artificial
  Synthetic oligonucleotide
atatcgaattcccacgcagggagatcaccgatttaacattgatgagaatgcatcc

SEQ ID NO: 330418 - DNA, 57 bp, Artificial
  Synthetic oligonucleotide
atatcgaatttgaattcgcgtttgagtctaatagtgtaaagtctattggttgtgaaa

SEQ ID NO: 330419 - DNA, 52 bp, Artificial
  Synthetic oligonucleotide
atatcgactacggtcgatatcccaggttatttgttggatgatggccgaagcc

SEQ ID NO: 330420 - DNA, 50 bp, Artificial
  Synthetic oligonucleotide
atatcgaggcctttcggataggatggggcaccttgcaatacgaggagaat

SEQ ID NO: 330421 - DNA, 55 bp, Artificial
  Synthetic oligonucleotide
atatcgagtcaaccaatttcactttaagtttggaacctgtacctgtggactactc

SEQ ID NO: 330422 - DNA, 60 bp, Artificial
  Synthetic oligonucleotide
atatcgagtgcgtcacctcatgttttggtggcgctgacaagacacacaacgtgttgtaaa

SEQ ID NO: 330423 - DNA, 55 bp, Artificial
  Synthetic oligonucleotide
atatcgcagcaagctggtagactgcatgagattatttgtgactgccccaagaata

SEQ ID NO: 330424 - DNA, 60 bp, Artificial
  Synthetic oligonucleotide
atatcgccaggggacttaaccatggttatcgcccaggattgtgattcatgtcactctcca

SEQ ID NO: 330425 - DNA, 54 bp, Artificial
  Synthetic oligonucleotide
atatcgcgcggcacgcgttaaatcgctcttcaatgtcgaagacggctcacgatt

SEQ ID NO: 330426 - DNA, 60 bp, Artificial
  Synthetic oligonucleotide
atatcgctaatacaagtaatgcgcaactgcatcagtacacacatgaatgatagtgaatgg

SEQ ID NO: 330427 - DNA, 60 bp, Artificial
  Synthetic oligonucleotide
atatcgcttcattctcaattgacccacaactctattgtgattataatgttgtgctaatga

SEQ ID NO: 330428 - DNA, 59 bp, Artificial
  Synthetic oligonucleotide
atatcggctgtggtctccaagacagaaggtaaggttatgtctctactcggttcaagtca

SEQ ID NO: 330429 - DNA, 51 bp, Artificial
  Synthetic oligonucleotide
atatcgggcaattgacgctatgtggggtgggcccactgtgctgaaaggata

SEQ ID NO: 330430 - DNA, 60 bp, Artificial
  Synthetic oligonucleotide
atatcggggatgtgtgcgaatgttggcaatgcacgtaagtctatagctatctatgaatcc

SEQ ID NO: 330431 - DNA, 57 bp, Artificial
  Synthetic oligonucleotide
atatcggtcactaatactggacgtacgccgcttataagctggggatttgatccccca

SEQ ID NO: 330432 - DNA, 55 bp, Artificial
  Synthetic oligonucleotide
atatcggtgttggcttcaaccccttgctttccagatacgtatacgttaacgtctc

SEQ ID NO: 330433 - DNA, 51 bp, Artificial
  Synthetic oligonucleotide
atatcgtacccgtcccgaacgtattcttagtttgaaggacatagtaccccg

SEQ ID NO: 330434 - DNA, 60 bp, Artificial
  Synthetic oligonucleotide
atatcgtcaccttttttttagtgcgcgataggcgcccatctgacaagccatattcatttg

SEQ ID NO: 330435 - DNA, 55 bp, Artificial
  Synthetic oligonucleotide
atatcgtccgcgagattcgtagaacgcctcactgtgctacagtacctatagccag

SEQ ID NO: 330436 - DNA, 54 bp, Artificial
  Synthetic oligonucleotide
atatcgtctacgatattatacatagcctcttcgtcataagaggtccagtctacg

SEQ ID NO: 330437 - DNA, 55 bp, Artificial
  Synthetic oligonucleotide
atatcgtgggcgtgtggacggtgtgctacgggcacactggagcagacgtggtcca

SEQ ID NO: 330438 - DNA, 60 bp, Artificial
  Synthetic oligonucleotide
atatcgtgtcaactactcacgtaccagctctggtatagcagctgccgaacggtagcgagt

SEQ ID NO: 330439 - DNA, 60 bp, Artificial
  Synthetic oligonucleotide
atatcgttaccttttgttgtcagtgtgagtctacacttcgtttgtgtgtacagagcacac

SEQ ID NO: 330440 - DNA, 60 bp, Artificial
  Synthetic oligonucleotide
atatcgttctacatgccgagcataatcaacattggtattatcctggaaggaacccaactg

SEQ ID NO: 330441 - DNA, 52 bp, Artificial
  Synthetic oligonucleotide
atatcgttgagttaaagattgatcaccgagctctacggattgggaaggttac

SEQ ID NO: 330442 - DNA, 60 bp, Artificial
  Synthetic oligonucleotide
atatctacccatgttgaaattttctcagaactgctaacatacgttgactatgaatggcag

SEQ ID NO: 330443 - DNA, 52 bp, Artificial
  Synthetic oligonucleotide
atatctacgtagaactttccatgcgctattacgcagactgtcttttgggcac

SEQ ID NO: 330444 - DNA, 57 bp, Artificial
  Synthetic oligonucleotide
atatctactgagtgttttgctgtggatagttttaacttgcccttgaatttggcgaaa

SEQ ID NO: 330445 - DNA, 50 bp, Artificial
  Synthetic oligonucleotide
atatctagcaaacacgtttttactaatctgtacaagatgttagcaaatga

SEQ ID NO: 330446 - DNA, 60 bp, Artificial
  Synthetic oligonucleotide
atatctagtaccggtgcttcctgcatcatgaggatgtcaattgcctcgatcatgtcttcg

SEQ ID NO: 330447 - DNA, 57 bp, Artificial
  Synthetic oligonucleotide
atatctatacggtatagggtcagtggtcgtctcctttgcaatcaagtgggagtatat

SEQ ID NO: 330448 - DNA, 60 bp, Artificial
  Synthetic oligonucleotide
atatctatccgaggtttccattggccacaatctcggcgaccaaatcattcaacacctgcc

SEQ ID NO: 330449 - DNA, 51 bp, Artificial
  Synthetic oligonucleotide
atatctatggaaacgttagaccactaaactgggcagctgatgatgaaaggt

SEQ ID NO: 330450 - DNA, 60 bp, Artificial
  Synthetic oligonucleotide
atatctatggagaaggactctaccattttgaacttgactgggtccatgagtttatcttca

SEQ ID NO: 330451 - DNA, 60 bp, Artificial
  Synthetic oligonucleotide
atatctattcatggaggttatgatatgggcttcagaggattatgtgaagcaatgcatgct

SEQ ID NO: 330452 - DNA, 59 bp, Artificial
  Synthetic oligonucleotide
atatctatttacaataacgcccatattatccccgactagcacatctgctagttcaaagg

SEQ ID NO: 330453 - DNA, 60 bp, Artificial
  Synthetic oligonucleotide
atatctcacttattgatacatgtgggacaaatccaaatgtcacaggagccaacccggtag

SEQ ID NO: 330454 - DNA, 55 bp, Artificial
  Synthetic oligonucleotide
atatctcaggggaccacatcggtgtctgttattaaccacaccccaccgggcagtt

SEQ ID NO: 330455 - DNA, 60 bp, Artificial
  Synthetic oligonucleotide
atatctcatatggatgtgaggtagatgctaacaaccgatcagctggtgatcagagcatgg

SEQ ID NO: 330456 - DNA, 52 bp, Artificial
  Synthetic oligonucleotide
atatctccccctgaatctagatactctgatgacttggttggaaacttgtgtc

SEQ ID NO: 330457 - DNA, 54 bp, Artificial
  Synthetic oligonucleotide
atatctccgtgggtatcggaaaggtgaaacggattcagttcgaaagcgtaccgc

SEQ ID NO: 330458 - DNA, 60 bp, Artificial
  Synthetic oligonucleotide
atatctcctaatccatgatggggaccgtgcagtgattacatatgagggggattccagtgc

SEQ ID NO: 330459 - DNA, 60 bp, Artificial
  Synthetic oligonucleotide
atatctcggagctgccgagatgattgatcaaggcttgccgttgttgccccctttgcgtaa

SEQ ID NO: 330460 - DNA, 55 bp, Artificial
  Synthetic oligonucleotide
atatctcgtatattctcacctctattacgaactcggtatttataacctcgtaaaa

SEQ ID NO: 330461 - DNA, 58 bp, Artificial
  Synthetic oligonucleotide
atatctgaaataaaggggatttggtaccgtccaaatatacgcgccattctctgcttga

SEQ ID NO: 330462 - DNA, 60 bp, Artificial
  Synthetic oligonucleotide
atatctgaaggtggagggtcctttggcctaactgcaatgatacagcagtctcagtgcact

SEQ ID NO: 330463 - DNA, 53 bp, Artificial
  Synthetic oligonucleotide
atatctgacgtgacccgtggtaacggtattactcatcgcgtggggaaacgttt

SEQ ID NO: 330464 - DNA, 60 bp, Artificial
  Synthetic oligonucleotide
atatctgagtctatcagaggcggagcgcgcgcaaggagaattcaaagtcccgaaaggagt

SEQ ID NO: 330465 - DNA, 59 bp, Artificial
  Synthetic oligonucleotide
atatctgatacggtatcaacacaaacatctacgataagtagacggttaagattgaaaga

SEQ ID NO: 330466 - DNA, 58 bp, Artificial
  Synthetic oligonucleotide
atatctgatatcacccgaggtaacggtattactcaccgtgtgggtaagcgcttctgtg

SEQ ID NO: 330467 - DNA, 58 bp, Artificial
  Synthetic oligonucleotide
atatctgatgttacacgtggtaacggtattactcatcgcgttggcaaacgtttctgtg

SEQ ID NO: 330468 - DNA, 60 bp, Artificial
  Synthetic oligonucleotide
atatctgcaatagttgattttgctactataaaagcaatacgtgacacttatggcattagt

SEQ ID NO: 330469 - DNA, 60 bp, Artificial
  Synthetic oligonucleotide
atatctgcagctcaagccgataagtggatggaagaacgagcagggggatattcgagcacg

SEQ ID NO: 330470 - DNA, 60 bp, Artificial
  Synthetic oligonucleotide
atatctgctccatatttgttcggagctccaatcaacgccatggctccagacacgagactg

SEQ ID NO: 330471 - DNA, 56 bp, Artificial
  Synthetic oligonucleotide
atatctgtacggtatagggtcggcggttgtctcccttacaatcaaatgggagtatg

SEQ ID NO: 330472 - DNA, 59 bp, Artificial
  Synthetic oligonucleotide
atatctgtggagtcttctatcatactggggtcaggaactaaagagtagtgctattaatt

SEQ ID NO: 330473 - DNA, 60 bp, Artificial
  Synthetic oligonucleotide
atatctgtgtctacaatgcatatgtgttccccttatatattgtcgtacaccttgaaatgc

SEQ ID NO: 330474 - DNA, 55 bp, Artificial
  Synthetic oligonucleotide
atatcttacgcgaaccgcgaaggatatgctgttttcgacaacggttcccttcggc

SEQ ID NO: 330475 - DNA, 55 bp, Artificial
  Synthetic oligonucleotide
atatcttcaaacacaactagtgtgaacatgtactctctcgtgttgacgaaggaga

SEQ ID NO: 330476 - DNA, 60 bp, Artificial
  Synthetic oligonucleotide
atatcttcaactggtgcctcttccatcatgagaatgtctacgacttgtaccatgtcttct

SEQ ID NO: 330477 - DNA, 60 bp, Artificial
  Synthetic oligonucleotide
atatcttcatgggagtcatataaaagtgggggtgagaccagactgtgagggccgatcatc

SEQ ID NO: 330478 - DNA, 60 bp, Artificial
  Synthetic oligonucleotide
atatcttgacatcaattaagaacttccactatgagaacactgaaatcccagcagcttctg

SEQ ID NO: 330479 - DNA, 60 bp, Artificial
  Synthetic oligonucleotide
atatcttgtgactctcgttcaagcaacgattgttacagggtattctctggtaatggcaaa

SEQ ID NO: 330480 - DNA, 55 bp, Artificial
  Synthetic oligonucleotide
atatcttgtttacgataatgccggggagagatttgtgaatctccgtgaatcggct

SEQ ID NO: 330481 - DNA, 53 bp, Artificial
  Synthetic oligonucleotide
atatctttaccgtcggtgcccggaacggtatatcaacggaatgtttcgccgtc

SEQ ID NO: 330482 - DNA, 55 bp, Artificial
  Synthetic oligonucleotide
atatgaaaaggtcaaatcacaactacgagacaatgctaacgatctgggaaatgga

SEQ ID NO: 330483 - DNA, 50 bp, Artificial
  Synthetic oligonucleotide
atatgaaaggttaaccggtaaccgtggcgaactacgggcttcgaggcggg

SEQ ID NO: 330484 - DNA, 51 bp, Artificial
  Synthetic oligonucleotide
atatgaacagctggtctttgggtttgggtcctcaacagcgtagcagtgaca

SEQ ID NO: 330485 - DNA, 55 bp, Artificial
  Synthetic oligonucleotide
atatgaagacggtgacagcactatatggtctgaaaatgaatcaccctgggtcgta

SEQ ID NO: 330486 - DNA, 60 bp, Artificial
  Synthetic oligonucleotide
atatgaaggaaatgactacttcttggattgacgccctctctgatgccctggctcttctag

SEQ ID NO: 330487 - DNA, 60 bp, Artificial
  Synthetic oligonucleotide
atatgaaggttgtgttccacatgtgctaccatacaaagctgtgacagcccatggctattg

SEQ ID NO: 330488 - DNA, 51 bp, Artificial
  Synthetic oligonucleotide
atatgaataacgggtactttggtttaagtagggataaaaagcaggttgtgt

SEQ ID NO: 330489 - DNA, 57 bp, Artificial
  Synthetic oligonucleotide
atatgaatacacccccagaactcgatactgttttacaagctccatatgcttataatt

SEQ ID NO: 330490 - DNA, 59 bp, Artificial
  Synthetic oligonucleotide
atatgaatcgcgctttttggttcatttgggcgatctacaatcgtatgcccgaagacttc

SEQ ID NO: 330491 - DNA, 60 bp, Artificial
  Synthetic oligonucleotide
atatgaatttgaagggttgggcacaaaattcacaccaatgcatgattacaattcacacat

SEQ ID NO: 330492 - DNA, 59 bp, Artificial
  Synthetic oligonucleotide
atatgacccaacacgcattgtacttgatgataatttttcggcttttccatatttataca

SEQ ID NO: 330493 - DNA, 55 bp, Artificial
  Synthetic oligonucleotide
atatgaccccacaaaaataagtgaggataggattgtaattatcaattgttgaatt

SEQ ID NO: 330494 - DNA, 60 bp, Artificial
  Synthetic oligonucleotide
atatgaccgcataagtaattatgtggacctaatgatctagcccacatggttttcccagtc

SEQ ID NO: 330495 - DNA, 55 bp, Artificial
  Synthetic oligonucleotide
atatgaccttagttatgtgagactcggtgaccccatccccgcagcaggactcgac

SEQ ID NO: 330496 - DNA, 60 bp, Artificial
  Synthetic oligonucleotide
atatgacgcgggggaatctcagattgaccctcgcgatctgctcaatcctattctctttca

SEQ ID NO: 330497 - DNA, 60 bp, Artificial
  Synthetic oligonucleotide
atatgacgtgacgaaaggtatagtgtgtgacttgaattatcctatctcaactggcacgta

SEQ ID NO: 330498 - DNA, 57 bp, Artificial
  Synthetic oligonucleotide
atatgactaaaaaaaaagtacctgccacaaattcttgagacactttagtctgcataa

SEQ ID NO: 330499 - DNA, 54 bp, Artificial
  Synthetic oligonucleotide
atatgactatagaatccgttaaacaaattctatcgagattaaacttcaatggag

SEQ ID NO: 330500 - DNA, 60 bp, Artificial
  Synthetic oligonucleotide
atatgactcaaaagatgattatgagataatttttccagatgcgttatcaataggcatacg

SEQ ID NO: 330501 - DNA, 60 bp, Artificial
  Synthetic oligonucleotide
atatgactgcaatgttttcagggcagattttgcgacaggaacaggatataatggatgggc

SEQ ID NO: 330502 - DNA, 57 bp, Artificial
  Synthetic oligonucleotide
atatgagaaacggttgggatgttgaagtcactgcagtgggaaaccagtttaatggag

SEQ ID NO: 330503 - DNA, 60 bp, Artificial
  Synthetic oligonucleotide
atatgagaaagtacgccgtgctcgtgtattcaaaagacgatgcgcttgagacggacgaac

SEQ ID NO: 330504 - DNA, 55 bp, Artificial
  Synthetic oligonucleotide
atatgagaaggctccagataagtgaacatgcaccttgtcacccgtcagagggtgc

SEQ ID NO: 330505 - DNA, 55 bp, Artificial
  Synthetic oligonucleotide
atatgagaagtgctgtgtcgtacggttgttctctgtcgcattcgttggaagacag

SEQ ID NO: 330506 - DNA, 60 bp, Artificial
  Synthetic oligonucleotide
atatgagacagcaagttcaggctgatagaaatattgtcaattatccatcgattttacatc

SEQ ID NO: 330507 - DNA, 57 bp, Artificial
  Synthetic oligonucleotide
atatgagcagagacgtggcaacatccggttttaatttaccctttcatcatggcgggt

SEQ ID NO: 330508 - DNA, 60 bp, Artificial
  Synthetic oligonucleotide
atatgaggactgagatcatacggatgatggaaagtgcaagatcagaagatgtgtctttcc

SEQ ID NO: 330509 - DNA, 60 bp, Artificial
  Synthetic oligonucleotide
atatgatacacacctcactcgatataattttcggactggtatgttgcaagggatcagaga

SEQ ID NO: 330510 - DNA, 59 bp, Artificial
  Synthetic oligonucleotide
atatgatagcggctgttgctatgaaggttccggatgttttgcctggattcggccgtttg

SEQ ID NO: 330511 - DNA, 53 bp, Artificial
  Synthetic oligonucleotide
atatgatatatcagatcccagacgtatgaagcaaaacgcagtggtcaggtcga

SEQ ID NO: 330512 - DNA, 55 bp, Artificial
  Synthetic oligonucleotide
atatgatattctgctaatccatctgaagacgctcctcccgaagcttgttccttgc

SEQ ID NO: 330513 - DNA, 54 bp, Artificial
  Synthetic oligonucleotide
atatgatcacagtatcagatcgtagtctggagcttgcaaccattgaaaagttta

SEQ ID NO: 330514 - DNA, 55 bp, Artificial
  Synthetic oligonucleotide
atatgatcagaccagcagctatgacacagtatgtacaaagactgtttccacaagg

SEQ ID NO: 330515 - DNA, 60 bp, Artificial
  Synthetic oligonucleotide
atatgatcagtttagggtgatgccatatgttacgcgtagcgaagatggacatgcatcaaa

SEQ ID NO: 330516 - DNA, 57 bp, Artificial
  Synthetic oligonucleotide
atatgatctcaggacgattagctgattggttcatgtcccgatatggcaacaatttca

SEQ ID NO: 330517 - DNA, 52 bp, Artificial
  Synthetic oligonucleotide
atatgatctgccagatgatttcttcccaaaaattgatgaccttgtaagggat

SEQ ID NO: 330518 - DNA, 58 bp, Artificial
  Synthetic oligonucleotide
atatgatgaaaagttgtttaattgcattaggaccccacagggtccaagtggtctatga

SEQ ID NO: 330519 - DNA, 60 bp, Artificial
  Synthetic oligonucleotide
atatgatgactcaatccctacaatacttgaacgagcgtgatgaattactccacgaagtag

SEQ ID NO: 330520 - DNA, 60 bp, Artificial
  Synthetic oligonucleotide
atatgatgcaatcaaatgcatgaagacatttttcggctggaaagagcccaaaataatcaa

SEQ ID NO: 330521 - DNA, 60 bp, Artificial
  Synthetic oligonucleotide
atatgatggaattctacgctcctacgacaggacaactgtacgacatacgtagtgataacc

SEQ ID NO: 330522 - DNA, 55 bp, Artificial
  Synthetic oligonucleotide
atatgatggcaaatctagagaaccgctttaagatgctgtttggcacaccgtcaac

SEQ ID NO: 330523 - DNA, 54 bp, Artificial
  Synthetic oligonucleotide
atatgatgggtttgcgacggagagtggacttccgatgtgatatgtggacagttg

SEQ ID NO: 330524 - DNA, 50 bp, Artificial
  Synthetic oligonucleotide
atatgattcgatggatagtgaaatgcgcgattatatagtcgggggcggaa

SEQ ID NO: 330525 - DNA, 58 bp, Artificial
  Synthetic oligonucleotide
atatgcaactcatcaaccccacttctgacatttatattaaagactatggaaacttttc

SEQ ID NO: 330526 - DNA, 60 bp, Artificial
  Synthetic oligonucleotide
atatgcaagcgctattatagtactaggttgtggctatcgaaaacggatatgagtgcgttc

SEQ ID NO: 330527 - DNA, 60 bp, Artificial
  Synthetic oligonucleotide
atatgcacgtaatggatgatatggctaatggaaaatatacgccgggagttattccaccag

SEQ ID NO: 330528 - DNA, 60 bp, Artificial
  Synthetic oligonucleotide
atatgcactgcaagagacgttaggaaagcgataggacaaaacctgccacttgttgcacgc

SEQ ID NO: 330529 - DNA, 60 bp, Artificial
  Synthetic oligonucleotide
atatgcagatgagccatggacattagttgagactagcttggagacaattagaagtccacc

SEQ ID NO: 330530 - DNA, 52 bp, Artificial
  Synthetic oligonucleotide
atatgcagttggaaagagatgagatgtacggatatgtaaatatagctagaaa

SEQ ID NO: 330531 - DNA, 60 bp, Artificial
  Synthetic oligonucleotide
atatgcattcccttctcggaatgcaaggaatgtgatgtctcggtatagcgaaactactat

SEQ ID NO: 330532 - DNA, 59 bp, Artificial
  Synthetic oligonucleotide
atatgccaactcacgaattcctcagatggtcacaaggaaacaatgtttggagttgggta

SEQ ID NO: 330533 - DNA, 60 bp, Artificial
  Synthetic oligonucleotide
atatgccaactttgtcatgtgcaaatggttattatccagcactgaccaatgtcaatcctt

SEQ ID NO: 330534 - DNA, 60 bp, Artificial
  Synthetic oligonucleotide
atatgccaccacagtgtttattttagccctgctcttgcctctatgtctagggtgctctga

SEQ ID NO: 330535 - DNA, 58 bp, Artificial
  Synthetic oligonucleotide
atatgccagacatttgtttacccatgcaggaccaattggggaacctatacctaatgtc

SEQ ID NO: 330536 - DNA, 60 bp, Artificial
  Synthetic oligonucleotide
atatgccagatcccgtgattgctcggctctttcatgtgtacaagtagagtgattcgggaa

SEQ ID NO: 330537 - DNA, 60 bp, Artificial
  Synthetic oligonucleotide
atatgccatctgcccatcacttcatggagaggaagaagaatcacattgaggtgatcctcg

SEQ ID NO: 330538 - DNA, 55 bp, Artificial
  Synthetic oligonucleotide
atatgcctaccactcgtgatggcatcatgacgtcataaaacaaaacgttgaacgg

SEQ ID NO: 330539 - DNA, 55 bp, Artificial
  Synthetic oligonucleotide
atatgcctccttagaggctgagatgcccggttgagcgggaccagccacggtaggt

SEQ ID NO: 330540 - DNA, 60 bp, Artificial
  Synthetic oligonucleotide
atatgcctggagagttcgttgagctgatctgcgtatggaccgatattctttgctgttgca

SEQ ID NO: 330541 - DNA, 60 bp, Artificial
  Synthetic oligonucleotide
atatgcgaacggcctatgtgcgaccctagcgaggccttgggcagagccctagcttcgtac

SEQ ID NO: 330542 - DNA, 60 bp, Artificial
  Synthetic oligonucleotide
atatgcgaatatgcacctcttggattctcagaagccacgcttcaaagtcctggggacaat

SEQ ID NO: 330543 - DNA, 60 bp, Artificial
  Synthetic oligonucleotide
atatgcgaggatgactcagatcgtgctgtctttgttttggctgtcgtatgttggagtgat

SEQ ID NO: 330544 - DNA, 53 bp, Artificial
  Synthetic oligonucleotide
atatgcgatcagtgacaggtatcgtaccgataagagtttgatgtacgaattcg

SEQ ID NO: 330545 - DNA, 60 bp, Artificial
  Synthetic oligonucleotide
atatgcgcatctcgcgtcacctgctcaacaagaatcacaccgagatgcccggaacggaac

SEQ ID NO: 330546 - DNA, 50 bp, Artificial
  Synthetic oligonucleotide
atatgcgcccagatcctacgaatccgtacaacaggccgtccatagaagct

SEQ ID NO: 330547 - DNA, 58 bp, Artificial
  Synthetic oligonucleotide
atatgcgctgccatattacgtcggcacgtaggacctggggagggggcggtacagtgga

SEQ ID NO: 330548 - DNA, 60 bp, Artificial
  Synthetic oligonucleotide
atatgcggaagagaattgtcagacgagtccgcgctccagatgtactatcacaggttaaca

SEQ ID NO: 330549 - DNA, 60 bp, Artificial
  Synthetic oligonucleotide
atatgcggacaaatagcagcgagacaatcattgccatattgtcaaatcaaaatagggagg

SEQ ID NO: 330550 - DNA, 59 bp, Artificial
  Synthetic oligonucleotide
atatgcggagttgtagctgtaagtgtgggtcaagagggccagttacaggtgtattccac

SEQ ID NO: 330551 - DNA, 56 bp, Artificial
  Synthetic oligonucleotide
atatgcgggaatgtaaagaactagttttcccccaatctgccttagacaaagactca

SEQ ID NO: 330552 - DNA, 55 bp, Artificial
  Synthetic oligonucleotide
atatgcggtgaaggcaccactgtaagaaactacaacgtacatagccaggactatg

SEQ ID NO: 330553 - DNA, 53 bp, Artificial
  Synthetic oligonucleotide
atatgcgtcaactggacgctatggaggttgcttaccttgcccatgtgggtgat

SEQ ID NO: 330554 - DNA, 55 bp, Artificial
  Synthetic oligonucleotide
atatgcgtgctttcaataaacgggttggcaatggcacatcttcgtatgctagacg

SEQ ID NO: 330555 - DNA, 60 bp, Artificial
  Synthetic oligonucleotide
atatgcgttaaagaacttgtagctgaattgaggtggcagtataatagattcgctgtgata

SEQ ID NO: 330556 - DNA, 57 bp, Artificial
  Synthetic oligonucleotide
atatgctaagtacggttttgggagtctcaatcctaaatctaggacagaagaggtaca

SEQ ID NO: 330557 - DNA, 60 bp, Artificial
  Synthetic oligonucleotide
atatgctacgcaaagctaggatagcatatgctacccagatctattaggatagtatatgct

SEQ ID NO: 330558 - DNA, 57 bp, Artificial
  Synthetic oligonucleotide
atatgctagacgcacttatggccgccgaagggtgagttggagacgcctggttcgcag

SEQ ID NO: 330559 - DNA, 60 bp, Artificial
  Synthetic oligonucleotide
atatgctccggcatatagcgggacaaagggagtctgggcaacccagcttccgcttatgtc

SEQ ID NO: 330560 - DNA, 60 bp, Artificial
  Synthetic oligonucleotide
atatgctgagtacagtcttaggagtctcaatcctgaatcttgggcaaaagaggtatacta

SEQ ID NO: 330561 - DNA, 60 bp, Artificial
  Synthetic oligonucleotide
atatgctgatagagacgatatggctagcgatgtcgaaacgtcgattagtcagtgcgtcga

SEQ ID NO: 330562 - DNA, 60 bp, Artificial
  Synthetic oligonucleotide
atatgctgtcttctggcctcaataacgaaggactcaggtatgagctagaaaacatctcta

SEQ ID NO: 330563 - DNA, 55 bp, Artificial
  Synthetic oligonucleotide
atatgcttacatcatgtaaagatttttatacacaggcctctaagagtaaacaccc

SEQ ID NO: 330564 - DNA, 59 bp, Artificial
  Synthetic oligonucleotide
atatgcttatgcgttgtgccgtccacttgggccctaggcgaggcgtgtttgtgccttac

SEQ ID NO: 330565 - DNA, 56 bp, Artificial
  Synthetic oligonucleotide
atatgcttggtagaagagcgcaacgtgacctgttagctggagcggaggagaatcac

SEQ ID NO: 330566 - DNA, 58 bp, Artificial
  Synthetic oligonucleotide
atatgctttcgccacggcccatatccatggagagatctataagaggcgagggttgcta

SEQ ID NO: 330567 - DNA, 50 bp, Artificial
  Synthetic oligonucleotide
atatggaaattaaggttatggacccaagtttgccatacgtctgtagtaag

SEQ ID NO: 330568 - DNA, 55 bp, Artificial
  Synthetic oligonucleotide
atatggaacagccgcagttcaagtcaatccgtcgtcgacgtatagctctcctctt

SEQ ID NO: 330569 - DNA, 60 bp, Artificial
  Synthetic oligonucleotide
atatggaacagccgcagttcaagtcaatgcgtcgtcgacgaatggctctacgtttggcaa

SEQ ID NO: 330570 - DNA, 50 bp, Artificial
  Synthetic oligonucleotide
atatggacagctagtaatgtgggcatggaattcgctagattcttaagagg

SEQ ID NO: 330571 - DNA, 54 bp, Artificial
  Synthetic oligonucleotide
atatggacccactggtggggaaggaaaatcgcaatttgcgcgctatctgggttt

SEQ ID NO: 330572 - DNA, 56 bp, Artificial
  Synthetic oligonucleotide
atatggactccgccagcataagttgagtccacttggtcaaaaacgacaatctggcg

SEQ ID NO: 330573 - DNA, 51 bp, Artificial
  Synthetic oligonucleotide
atatggactcgccgtataaaattcaagttacgatggatcgacaggaatatc

SEQ ID NO: 330574 - DNA, 60 bp, Artificial
  Synthetic oligonucleotide
atatggacttatatcaaagttctatatggatcactggaggtggaaaataagagagaaaca

SEQ ID NO: 330575 - DNA, 54 bp, Artificial
  Synthetic oligonucleotide
atatggagaatggtatgacaggactttaccttctcagacattgcaagaactagc

SEQ ID NO: 330576 - DNA, 60 bp, Artificial
  Synthetic oligonucleotide
atatggagagtgacgagaccggtgagcatatgatcaatttaaaaggttgtgggtacattg

SEQ ID NO: 330577 - DNA, 60 bp, Artificial
  Synthetic oligonucleotide
atatggagataatatgaacagccacagacaagatccactctcctacgccggatggctcgc

SEQ ID NO: 330578 - DNA, 56 bp, Artificial
  Synthetic oligonucleotide
atatggagatacttggacaggagtcgaggctctaataagaacattgcaacaactac

SEQ ID NO: 330579 - DNA, 59 bp, Artificial
  Synthetic oligonucleotide
atatggagcaaccgcattccaggtcaattcgtctccgacgaattactttcttcgagtgc

SEQ ID NO: 330580 - DNA, 56 bp, Artificial
  Synthetic oligonucleotide
atatggaggcaaagaacatggacccccccactccttacatatgttcaaagtttcta

SEQ ID NO: 330581 - DNA, 57 bp, Artificial
  Synthetic oligonucleotide
atatggagtaatgaaatatggtggattggtgtgtacgtataaaggcgaaacgccgaa

SEQ ID NO: 330582 - DNA, 52 bp, Artificial
  Synthetic oligonucleotide
atatggatcacttattaactaggttaggtatagggaacaatcaactcagctc

SEQ ID NO: 330583 - DNA, 57 bp, Artificial
  Synthetic oligonucleotide
atatggatgatgtggtattgggggccaaatctgtaccgcaccttgagtcccttttta

SEQ ID NO: 330584 - DNA, 60 bp, Artificial
  Synthetic oligonucleotide
atatggatgatgtggtattgggggccaagtctgtacagcatcttgaggccctttataccg

SEQ ID NO: 330585 - DNA, 60 bp, Artificial
  Synthetic oligonucleotide
atatggatgcattgcgttttccacctctgagtcggcatcggagttgctgagcccaattgt

SEQ ID NO: 330586 - DNA, 60 bp, Artificial
  Synthetic oligonucleotide
atatggattgcaggtaaggctgttgggatgcaatttagtgttattgaatccattgtatca

SEQ ID NO: 330587 - DNA, 55 bp, Artificial
  Synthetic oligonucleotide
atatggcaactttacgcagtttcgtactcgtcgataatggcggtacggggaatgt

SEQ ID NO: 330588 - DNA, 55 bp, Artificial
  Synthetic oligonucleotide
atatggcaataataacggggccttagttgaatacaaggtcggaacctcgatgact

SEQ ID NO: 330589 - DNA, 60 bp, Artificial
  Synthetic oligonucleotide
atatggcataaatgtgctaaatcacatgggtagtattgcctttagggtagtaaatgacca

SEQ ID NO: 330590 - DNA, 60 bp, Artificial
  Synthetic oligonucleotide
atatggcatgtactcatgcctctaatcctgtgtatgctactttgaaagtcaggagttatt

SEQ ID NO: 330591 - DNA, 60 bp, Artificial
  Synthetic oligonucleotide
atatggcatgtagtcatgcttctaacccagtgtatgctactattaaggctcgtgtgtatt

SEQ ID NO: 330592 - DNA, 52 bp, Artificial
  Synthetic oligonucleotide
atatggccacctttacagacgcggagattgacgatctatttgaaaccagtgg

SEQ ID NO: 330593 - DNA, 60 bp, Artificial
  Synthetic oligonucleotide
atatggccagggcactagtgtcacataaagctaagaggtacgatttctctatgatcatac

SEQ ID NO: 330594 - DNA, 60 bp, Artificial
  Synthetic oligonucleotide
atatggccgccgctcataggttgttggagactcatgatttgttgtccaacttccctgcgg

SEQ ID NO: 330595 - DNA, 55 bp, Artificial
  Synthetic oligonucleotide
atatggcctggacgaccggccatgatacatacccgcctacgagaattcgagctac

SEQ ID NO: 330596 - DNA, 55 bp, Artificial
  Synthetic oligonucleotide
atatggcggtgagagtttagttattgcatacgataacacacaggctagacacgtg

SEQ ID NO: 330597 - DNA, 60 bp, Artificial
  Synthetic oligonucleotide
atatggcgtgtactcacgcctctaacccagtgtatgctaccttgaagatacggatctact

SEQ ID NO: 330598 - DNA, 55 bp, Artificial
  Synthetic oligonucleotide
atatggctcttcgtgtgcctttatctcgtatcccagacgaacagactcaatcaat

SEQ ID NO: 330599 - DNA, 60 bp, Artificial
  Synthetic oligonucleotide
atatggctggagattttgttgaactgatctgcatacggaccgatatcctttgatgctgca

SEQ ID NO: 330600 - DNA, 55 bp, Artificial
  Synthetic oligonucleotide
atatggctgttgctaacggcgtcagttcaattggttctctcttcagctttggcgc

SEQ ID NO: 330601 - DNA, 56 bp, Artificial
  Synthetic oligonucleotide
atatggcttaagtaccacatacttcgaaaaattgtccaatttcggtgggcatattc

SEQ ID NO: 330602 - DNA, 52 bp, Artificial
  Synthetic oligonucleotide
atatgggaagggttaaccaccggggcaggggcgtcaggccgaacaggacaac

SEQ ID NO: 330603 - DNA, 60 bp, Artificial
  Synthetic oligonucleotide
atatgggagaatgtcccaattatgtaaagaaggcaagcttgcgacttgcagtggggctta

SEQ ID NO: 330604 - DNA, 50 bp, Artificial
  Synthetic oligonucleotide
atatgggcatgccccatctgtgacgtcttcagtatatccgaccactcagt

SEQ ID NO: 330605 - DNA, 60 bp, Artificial
  Synthetic oligonucleotide
atatgggccaggcctgactacaatccacctcttatacaagcatggcaaatgcccgggtac

SEQ ID NO: 330606 - DNA, 58 bp, Artificial
  Synthetic oligonucleotide
atatgggccccacgcactaatatgtgtcgaccaatcatatcgcagcctgaaaggctag

SEQ ID NO: 330607 - DNA, 60 bp, Artificial
  Synthetic oligonucleotide
atatgggccgcctactcagcccattgtatgccaaagtcagcccaactggtgaacgaagag

SEQ ID NO: 330608 - DNA, 58 bp, Artificial
  Synthetic oligonucleotide
atatgggcgtatgtgtatggtatgtcgcatttgaaaccagttaagaccggttgatttg

SEQ ID NO: 330609 - DNA, 59 bp, Artificial
  Synthetic oligonucleotide
atatggggtagagcctaacatcagaactggtgtcaggactataacaacaggaggtccta

SEQ ID NO: 330610 - DNA, 59 bp, Artificial
  Synthetic oligonucleotide
atatggggtggtaataggccggtgtcgcagtcagatcctaatggcgctaccgttgctcg

SEQ ID NO: 330611 - DNA, 59 bp, Artificial
  Synthetic oligonucleotide
atatgggtacctgtgaatctacacgggttaggagatttgcacgcctctccataaatatg

SEQ ID NO: 330612 - DNA, 60 bp, Artificial
  Synthetic oligonucleotide
atatgggtggcaagtggtcaaagagtagcatagttggatggtctgctataagggagagaa

SEQ ID NO: 330613 - DNA, 56 bp, Artificial
  Synthetic oligonucleotide
atatgggtgttcccccgatagcgctctcgctcaaaactcctatgaattgggggaac

SEQ ID NO: 330614 - DNA, 59 bp, Artificial
  Synthetic oligonucleotide
atatgggttccttggtcgatatcatcgtgacttgtacgttcagtcttggacaaagacga

SEQ ID NO: 330615 - DNA, 58 bp, Artificial
  Synthetic oligonucleotide
atatggtacacgtaacgatcttgaactatgtcccattaaccgtgaaccatccacaaga

SEQ ID NO: 330616 - DNA, 54 bp, Artificial
  Synthetic oligonucleotide
atatggtaccgttggtcattgggtcgattgggttgttgatttgattatgttggc

SEQ ID NO: 330617 - DNA, 52 bp, Artificial
  Synthetic oligonucleotide
atatggtactcattcatggttactattccaggagggaaaatttgtgttctct

SEQ ID NO: 330618 - DNA, 60 bp, Artificial
  Synthetic oligonucleotide
atatggtagagacagatagggtaaaccaggagattgatgaggccatagagcgggccatgg

SEQ ID NO: 330619 - DNA, 60 bp, Artificial
  Synthetic oligonucleotide
atatggtgcccttgcccgccagaaaatatccactggcaactacatcaccacccttggtga

SEQ ID NO: 330620 - DNA, 52 bp, Artificial
  Synthetic oligonucleotide
atatggtggctacgccacctatcgtgctgtccggaacacggatccatggatc

SEQ ID NO: 330621 - DNA, 57 bp, Artificial
  Synthetic oligonucleotide
atatggtgggtttcaatgaaaaggggctcggtcctaaactagatagtgagctgtaca

SEQ ID NO: 330622 - DNA, 57 bp, Artificial
  Synthetic oligonucleotide
atatggtggttcgggcacaaaccctgttggggatgtgttcatatcttacagtgttac

SEQ ID NO: 330623 - DNA, 53 bp, Artificial
  Synthetic oligonucleotide
atatggtgtgaagggtttcgggtttcgacaagggaatgacgtgtgggttggaa

SEQ ID NO: 330624 - DNA, 60 bp, Artificial
  Synthetic oligonucleotide
atatggttaaatctgatgtcaaaccgtcgtcgtccgacactctcaatgttgacaggcctg

SEQ ID NO: 330625 - DNA, 60 bp, Artificial
  Synthetic oligonucleotide
atatggttatgagtggggtgcgacgaatcataggctcgggttgtgtgagatagagaatac

SEQ ID NO: 330626 - DNA, 56 bp, Artificial
  Synthetic oligonucleotide
atatggttcgaaatatgggaatagttactgtaagaacttttgattcttacagaata

SEQ ID NO: 330627 - DNA, 60 bp, Artificial
  Synthetic oligonucleotide
atatgtagcgggatatttggggacaatcccaggtctgtggatggcacgggctcatgtaac

SEQ ID NO: 330628 - DNA, 59 bp, Artificial
  Synthetic oligonucleotide
atatgtaggtcgcacaaagggggaaacgattggagagatgatagccatctcaaaccagt

SEQ ID NO: 330629 - DNA, 60 bp, Artificial
  Synthetic oligonucleotide
atatgtatctcggaagatgcgtctattgcggaaccggacgctgaattggtcagggtacat

SEQ ID NO: 330630 - DNA, 57 bp, Artificial
  Synthetic oligonucleotide
atatgtatgctgttaacggtacattgatttccgtttttgacgctaatacgcgtaagc

SEQ ID NO: 330631 - DNA, 56 bp, Artificial
  Synthetic oligonucleotide
atatgtcaaccgctctcgtaagacggtggttggcggataactgtcccctcgacctg

SEQ ID NO: 330632 - DNA, 55 bp, Artificial
  Synthetic oligonucleotide
atatgtcagtaggtttacgcttagggccgcaacggaccacagtattaggtagtgg

SEQ ID NO: 330633 - DNA, 51 bp, Artificial
  Synthetic oligonucleotide
atatgtccactgcagtgtgccattttcgctcactctctaagtcctgttcta

SEQ ID NO: 330634 - DNA, 60 bp, Artificial
  Synthetic oligonucleotide
atatgtccttactgtgcatccaggttgacatcagatggtcttgccagacatgtaatgcag

SEQ ID NO: 330635 - DNA, 60 bp, Artificial
  Synthetic oligonucleotide
atatgtcgaagacaccaaaatagatctatggtcttacaatgcggaacttcttgtggcact

SEQ ID NO: 330636 - DNA, 60 bp, Artificial
  Synthetic oligonucleotide
atatgtcgccacatgtaaaggctgccctaagggcatcatccgtgttgatctgggcttatg

SEQ ID NO: 330637 - DNA, 57 bp, Artificial
  Synthetic oligonucleotide
atatgtcgtaaacataaagaggttcgcggagcaccccaatgtaagtgggatagcaac

SEQ ID NO: 330638 - DNA, 54 bp, Artificial
  Synthetic oligonucleotide
atatgtctactcaaattggaaagaatactttacccgacatagtcacagaggcat

SEQ ID NO: 330639 - DNA, 56 bp, Artificial
  Synthetic oligonucleotide
atatgtctagatataaggaatctcgtaaaccgcgtaattttttgctgatacaaggt

SEQ ID NO: 330640 - DNA, 52 bp, Artificial
  Synthetic oligonucleotide
atatgtctagggctgctaaagctgccgccaaggctcgtactgggcgtgagcc

SEQ ID NO: 330641 - DNA, 60 bp, Artificial
  Synthetic oligonucleotide
atatgtctcataaggtccgtaaattttagctagttcgcaactagattctagtgcggcata

SEQ ID NO: 330642 - DNA, 60 bp, Artificial
  Synthetic oligonucleotide
atatgtctcgtggcagacggtacagtgttctggtcgatatccgatgattgtgctatcgca

SEQ ID NO: 330643 - DNA, 60 bp, Artificial
  Synthetic oligonucleotide
atatgtcttacagtatcactactccatctcagttcgtgttcttgtcatcagcgtgggccg

SEQ ID NO: 330644 - DNA, 57 bp, Artificial
  Synthetic oligonucleotide
atatgtcttatagctgcgtactgctgaacgtcattccaactgtaccgcgaggttatt

SEQ ID NO: 330645 - DNA, 54 bp, Artificial
  Synthetic oligonucleotide
atatgtgaccctgtagtcaagggcctgaggtgtaccctttaggtgacccaaagg

SEQ ID NO: 330646 - DNA, 60 bp, Artificial
  Synthetic oligonucleotide
atatgtgagaagtgatggtagggacattcatatattgtcttattcagctacagattcaga

SEQ ID NO: 330647 - DNA, 60 bp, Artificial
  Synthetic oligonucleotide
atatgtgatagtatattaatgcgtgcaatttataatgaaagttctgataatatatcaata

SEQ ID NO: 330648 - DNA, 60 bp, Artificial
  Synthetic oligonucleotide
atatgtgatgctatttttcaagatgaagagactgaaggtgcagtgagaaggttcatagcc

SEQ ID NO: 330649 - DNA, 55 bp, Artificial
  Synthetic oligonucleotide
atatgtgccggttggagcggagttgtgttacgacacggagctttaacccagaaac

SEQ ID NO: 330650 - DNA, 58 bp, Artificial
  Synthetic oligonucleotide
atatgtgcggttgtggtcccccgcactatatatagtctttagcatagttcttaccgcg

SEQ ID NO: 330651 - DNA, 60 bp, Artificial
  Synthetic oligonucleotide
atatgtggagtactctatgtgctgacccttacgcattaaatatcccctacactcagctac

SEQ ID NO: 330652 - DNA, 60 bp, Artificial
  Synthetic oligonucleotide
atatgtggcagggatgccagagctaggcgcattctttggaatccttcaggatatgagaaa

SEQ ID NO: 330653 - DNA, 52 bp, Artificial
  Synthetic oligonucleotide
atatgtgggctctttgccttcgaggcttgggactcacctgaactccgggcgc

SEQ ID NO: 330654 - DNA, 55 bp, Artificial
  Synthetic oligonucleotide
atatgtggtcccaacatgccttttcgtacatcgcttgtgtgcttttgtggtcccc

SEQ ID NO: 330655 - DNA, 58 bp, Artificial
  Synthetic oligonucleotide
atatgtggtggcttttcagaagcgatcctgtggtatttaccaattacccatccttcta

SEQ ID NO: 330656 - DNA, 57 bp, Artificial
  Synthetic oligonucleotide
atatgtgtaggataactgttatgagagtgtggttatgggttagatttaagggtggtg

SEQ ID NO: 330657 - DNA, 52 bp, Artificial
  Synthetic oligonucleotide
atatgtgttataccaatgttaaagacagactcactccttctagagctccagc

SEQ ID NO: 330658 - DNA, 56 bp, Artificial
  Synthetic oligonucleotide
atatgttcaaagtttctattgacggatgagttgggtaacacattctccgtccccga

SEQ ID NO: 330659 - DNA, 51 bp, Artificial
  Synthetic oligonucleotide
atatgttcaacccgcctacgccggaaacaaactatattcgatcgaatgtcg

SEQ ID NO: 330660 - DNA, 58 bp, Artificial
  Synthetic oligonucleotide
atatgttcaggcgtcagggagagttacagtttccactaaagaaagccagcaaactata

SEQ ID NO: 330661 - DNA, 59 bp, Artificial
  Synthetic oligonucleotide
atatgttcctgtacagactgccccacgccctgccataccctttgggcctactgcacgtc

SEQ ID NO: 330662 - DNA, 55 bp, Artificial
  Synthetic oligonucleotide
atatgttctagttggtacggagtcgcaggagcgtgtccctttaccaattttggtc

SEQ ID NO: 330663 - DNA, 54 bp, Artificial
  Synthetic oligonucleotide
atatgttgacgacacgggggcgacaaactaccaaagataataagggaaccagaa

SEQ ID NO: 330664 - DNA, 60 bp, Artificial
  Synthetic oligonucleotide
atatgttgcacctctgtgatcaatcatgttgaccagctggacgtgctgtacaccggtcac

SEQ ID NO: 330665 - DNA, 55 bp, Artificial
  Synthetic oligonucleotide
atatgttggatacatatgcagctatagattttgttcagtatgaagtagatagacg

SEQ ID NO: 330666 - DNA, 60 bp, Artificial
  Synthetic oligonucleotide
atatgttggtttgacgactgaccatggcagttcttgaagcaagcgaagagcttcatcctt

SEQ ID NO: 330667 - DNA, 60 bp, Artificial
  Synthetic oligonucleotide
atatgttgtgttaaaatgactgccatggatttagaattgccagtatcagcaaaattatta

SEQ ID NO: 330668 - DNA, 60 bp, Artificial
  Synthetic oligonucleotide
atatgttttatcactatcttgggagggctggctacacagtgcacgtgcagtgcaacgctt

SEQ ID NO: 330669 - DNA, 58 bp, Artificial
  Synthetic oligonucleotide
atatgtttttccagttaggcgtcggtgcagtgctacgcgataggttgcgtttatggaa

SEQ ID NO: 330670 - DNA, 54 bp, Artificial
  Synthetic oligonucleotide
atattaaaagaacccgtacatggagtgtattaccagcctgaaaaggaattaata

SEQ ID NO: 330671 - DNA, 60 bp, Artificial
  Synthetic oligonucleotide
atattaagatacttagtattagatgctgaaatggacccaagtgatatcatgggagaaaca

SEQ ID NO: 330672 - DNA, 60 bp, Artificial
  Synthetic oligonucleotide
atattaaggaggttgtgaagtatctcgtagaatacatgaccagacgacgtgtatggatgc

SEQ ID NO: 330673 - DNA, 54 bp, Artificial
  Synthetic oligonucleotide
atattaaggcatgtaagggagctaatctaaggtgccggaatgagacagtaaatc

SEQ ID NO: 330674 - DNA, 59 bp, Artificial
  Synthetic oligonucleotide
atattaaggcctgcaacactagcgcaatgagatgccacgatacgaaagtgaatccaggg

SEQ ID NO: 330675 - DNA, 57 bp, Artificial
  Synthetic oligonucleotide
atattaagttgcggcgtctacgctttaagggcactctgaaggtcgagcgtgtacacg

SEQ ID NO: 330676 - DNA, 55 bp, Artificial
  Synthetic oligonucleotide
atattacaacggatttcttgccatagaccttatcgaagttctagtatcgctgggt

SEQ ID NO: 330677 - DNA, 58 bp, Artificial
  Synthetic oligonucleotide
atattacaccaaactcagctgggataggtaatctacgatttgatgtggacgtcggtgg

SEQ ID NO: 330678 - DNA, 57 bp, Artificial
  Synthetic oligonucleotide
atattacagggttgctattaacaagagatggaggtaaccataatgagtctgagtcta

SEQ ID NO: 330679 - DNA, 55 bp, Artificial
  Synthetic oligonucleotide
atattaccaccttaaacagcactgggaatgccaccttaaacagcactaggaacgc

SEQ ID NO: 330680 - DNA, 57 bp, Artificial
  Synthetic oligonucleotide
atattacccgacatgaccccaagcactgaaatatcactgaggggaataagagtcagc

SEQ ID NO: 330681 - DNA, 49 bp, Artificial
  Synthetic oligonucleotide
atattaccggttggccccgcccccctttaaacgtggtccccgcgcacta

SEQ ID NO: 330682 - DNA, 59 bp, Artificial
  Synthetic oligonucleotide
atattacctgtaagtcctgtttgagacccatagaagagatcaccctggactcaaatatg

SEQ ID NO: 330683 - DNA, 60 bp, Artificial
  Synthetic oligonucleotide
atattacgaacacgctccaatagaattgatttatgcatgtagatcagcgaaagaatttgc

SEQ ID NO: 330684 - DNA, 50 bp, Artificial
  Synthetic oligonucleotide
atattacgggttagtgtgcaattacaaactagatgctcaaggtgatgatg

SEQ ID NO: 330685 - DNA, 55 bp, Artificial
  Synthetic oligonucleotide
atattacgtttggacaatcacgaatgtttattcctcacattacacttagttttag

SEQ ID NO: 330686 - DNA, 60 bp, Artificial
  Synthetic oligonucleotide
atattactgaaccagaggaatattctgatctagagctattacatgttgaggagctgcctt

SEQ ID NO: 330687 - DNA, 50 bp, Artificial
  Synthetic oligonucleotide
atattacttatgaaacgttaaagacgaacgccacagaggctcgatatgat

SEQ ID NO: 330688 - DNA, 60 bp, Artificial
  Synthetic oligonucleotide
atattagacaacacgtgtattatttacacgtatatacgttgtacagtatctctatcatcg

SEQ ID NO: 330689 - DNA, 57 bp, Artificial
  Synthetic oligonucleotide
atattaggtatcaggcagttgatgctgtaagtaatgtatggtttatacataaagggg

SEQ ID NO: 330690 - DNA, 50 bp, Artificial
  Synthetic oligonucleotide
atattagtagacaaaactggaagtatatgataaacaatgtaactgctaga

SEQ ID NO: 330691 - DNA, 53 bp, Artificial
  Synthetic oligonucleotide
atattagtgaaggaagttggatgaagaccttacacaaagtagccacacaatta

SEQ ID NO: 330692 - DNA, 60 bp, Artificial
  Synthetic oligonucleotide
atattatactagcagttcaaaaagaggatgtgtggttatataacacactcagcaactcct

SEQ ID NO: 330693 - DNA, 60 bp, Artificial
  Synthetic oligonucleotide
atattatatttagtgtacacagcactgcaagtacttttgtttcttgcagcttacgtgttg

SEQ ID NO: 330694 - DNA, 58 bp, Artificial
  Synthetic oligonucleotide
atattatccaataaaagtcactagtcatgattggtacgaaattcaggaaagtgaatac

SEQ ID NO: 330695 - DNA, 60 bp, Artificial
  Synthetic oligonucleotide
atattatccattggttcgaattttagatgtggaatatattgatagaaacatcatttcgaa

SEQ ID NO: 330696 - DNA, 60 bp, Artificial
  Synthetic oligonucleotide
atattatctacattgaacagggctctatacttgcctcaaacataacaactttagcgctaa

SEQ ID NO: 330697 - DNA, 59 bp, Artificial
  Synthetic oligonucleotide
atattatgtacaggatacacaaggttattatgtggcttacccagagtctagaaatgagg

SEQ ID NO: 330698 - DNA, 58 bp, Artificial
  Synthetic oligonucleotide
atattattactggggaccacctggcagtggaaaaagcagacgagcactagaagaagca

SEQ ID NO: 330699 - DNA, 56 bp, Artificial
  Synthetic oligonucleotide
atattattcggcccaaagaccctgataggagagagtacgagttgttccaaaccatg

SEQ ID NO: 330700 - DNA, 59 bp, Artificial
  Synthetic oligonucleotide
atattattgtcaggttatgtaggaaccatcttggtgtctcgaatccatcggaatccgat

SEQ ID NO: 330701 - DNA, 60 bp, Artificial
  Synthetic oligonucleotide
atattatttgtggcatatgcaaggtcaaggtatgccatcaatgcacagaatactgctatg

SEQ ID NO: 330702 - DNA, 56 bp, Artificial
  Synthetic oligonucleotide
atattcaacaaataataacggcggactccgttgactttgccgtgatcggcaacgaa

SEQ ID NO: 330703 - DNA, 60 bp, Artificial
  Synthetic oligonucleotide
atattcaatgacgcagtggtcgatcttcatgcagctacggctgagcctagctgtcaactg

SEQ ID NO: 330704 - DNA, 55 bp, Artificial
  Synthetic oligonucleotide
atattcacatgtaacgtgtgcttttattcgtggtattcccgaagatttagaccag

SEQ ID NO: 330705 - DNA, 50 bp, Artificial
  Synthetic oligonucleotide
atattcacgtaagattaatcgtgatgctttaactccacgagttatacaat

SEQ ID NO: 330706 - DNA, 56 bp, Artificial
  Synthetic oligonucleotide
atattcacgtaatgatagttacacttgcccaatgttaaacgtatttaactatacag

SEQ ID NO: 330707 - DNA, 54 bp, Artificial
  Synthetic oligonucleotide
atattcacttgtcggtgtccatttattaaagtttcaacttaaataaacatccac

SEQ ID NO: 330708 - DNA, 57 bp, Artificial
  Synthetic oligonucleotide
atattcagaagagtccaaattgaatcgagaggaaatagacggagtgaaactagagtc

SEQ ID NO: 330709 - DNA, 58 bp, Artificial
  Synthetic oligonucleotide
atattcagaagcttacgttaatatgcgactattgtctagtcgccaagatcgtttccgt

SEQ ID NO: 330710 - DNA, 59 bp, Artificial
  Synthetic oligonucleotide
atattcagcatcattcaccctaaatcgatcacagccagctcacgataacttgatgggga

SEQ ID NO: 330711 - DNA, 53 bp, Artificial
  Synthetic oligonucleotide
atattcagcggccaactcgaaggcactgttctcccgcttaccccactctgcaa

SEQ ID NO: 330712 - DNA, 55 bp, Artificial
  Synthetic oligonucleotide
atattcaggggtactgtactcttaagaaacctcaacgtctctctttcctcaagac

SEQ ID NO: 330713 - DNA, 60 bp, Artificial
  Synthetic oligonucleotide
atattcaggtcagttgctatcactagatatctcaacagatgagttgtcacttaaagaagc

SEQ ID NO: 330714 - DNA, 50 bp, Artificial
  Synthetic oligonucleotide
atattcaggtctcggtcaagtaccggggtcgcaacggtaacgctgttcgt

SEQ ID NO: 330715 - DNA, 50 bp, Artificial
  Synthetic oligonucleotide
atattcatccaaccaatcccttcgcatccgacattccaaccgcaaccggg

SEQ ID NO: 330716 - DNA, 57 bp, Artificial
  Synthetic oligonucleotide
atattcattaaatttctactgaaagcacttaattgggaagactggtcacatacaatt

SEQ ID NO: 330717 - DNA, 59 bp, Artificial
  Synthetic oligonucleotide
atattccaacgctattaagaaattctgcattcgtaactgcatcccaagaacttacacaa

SEQ ID NO: 330718 - DNA, 60 bp, Artificial
  Synthetic oligonucleotide
atattccccaaggaaagatcatggcccaaccacacaaccagaggagtgacggcagcatgc

SEQ ID NO: 330719 - DNA, 60 bp, Artificial
  Synthetic oligonucleotide
atattcccctgcattgcatacgaatatgggctaagaatgcggttgagggcgaatctgtgt

SEQ ID NO: 330720 - DNA, 53 bp, Artificial
  Synthetic oligonucleotide
atattccctaccccttttgtaacttagaagttaagcacacagaccaataggcg

SEQ ID NO: 330721 - DNA, 59 bp, Artificial
  Synthetic oligonucleotide
atattccctcaatttcatgggatatgtgattggtagttgggggacattgccacaagagc

SEQ ID NO: 330722 - DNA, 59 bp, Artificial
  Synthetic oligonucleotide
atattccgacccgagatcatcgcggtatggaagttgcggagccagaagtgttgggagtc

SEQ ID NO: 330723 - DNA, 54 bp, Artificial
  Synthetic oligonucleotide
atattccgatttgaaatttgaaacgtgggacccattggatacgccttattccga

SEQ ID NO: 330724 - DNA, 57 bp, Artificial
  Synthetic oligonucleotide
atattccggccaggaacctccattcgatcgcgggtgcgttgtacggatttgcgagaa

SEQ ID NO: 330725 - DNA, 60 bp, Artificial
  Synthetic oligonucleotide
atattcctaagtcctcaaaggtccctagaattcccagcagcataccaagatgtcacatac

SEQ ID NO: 330726 - DNA, 60 bp, Artificial
  Synthetic oligonucleotide
atattcctagcagcaggcaggagctactttgagaccccgggggcctacacagacgtcata

SEQ ID NO: 330727 - DNA, 59 bp, Artificial
  Synthetic oligonucleotide
atattcctgtgtgcaaactcttcacaagatctatctctcacaagggagtagaggtctag

SEQ ID NO: 330728 - DNA, 60 bp, Artificial
  Synthetic oligonucleotide
atattcgaaacatgggatccacttgatactccatattcatccgtacatcataaagaatta

SEQ ID NO: 330729 - DNA, 55 bp, Artificial
  Synthetic oligonucleotide
atattcgatgggccattagaatggctaatgtaactacaggacgagaccctggtga

SEQ ID NO: 330730 - DNA, 60 bp, Artificial
  Synthetic oligonucleotide
atattcgcgagtgcagcggctgttcactcaatcaaccgtcagaactactcgcgacaccgc

SEQ ID NO: 330731 - DNA, 60 bp, Artificial
  Synthetic oligonucleotide
atattctacaagaatgcaatgaaactgggctatgtaattggtgatatagatgtgttcaac

SEQ ID NO: 330732 - DNA, 57 bp, Artificial
  Synthetic oligonucleotide
atattctagatctaatgtagctagtgatgatattgtagttgataaagcattattgag

SEQ ID NO: 330733 - DNA, 58 bp, Artificial
  Synthetic oligonucleotide
atattctatataggatgccgttggtcctggattgcagaggaagattgttgggattcca

SEQ ID NO: 330734 - DNA, 55 bp, Artificial
  Synthetic oligonucleotide
atattctcgtgcttgcactgggtaactccccacccacagaagatgccgaaagggg

SEQ ID NO: 330735 - DNA, 55 bp, Artificial
  Synthetic oligonucleotide
atattctctccttgctgatactcgatgtggcaatccagcgcgttctttgtcgtat

SEQ ID NO: 330736 - DNA, 55 bp, Artificial
  Synthetic oligonucleotide
atattctctctccaaaactccccggagacgatgaaactcggtcttcccggcctca

SEQ ID NO: 330737 - DNA, 50 bp, Artificial
  Synthetic oligonucleotide
atattctcttcatgtggggcatacaccacccacctaccgatacagagcaa

SEQ ID NO: 330738 - DNA, 60 bp, Artificial
  Synthetic oligonucleotide
atattctgcctctgacgtactggcattatccgtgaggcccaatctctctgtggacgtgta

SEQ ID NO: 330739 - DNA, 56 bp, Artificial
  Synthetic oligonucleotide
atattcttagatcttttgcaaacgggtaatgagtttgttcgacatctagctggttt

SEQ ID NO: 330740 - DNA, 55 bp, Artificial
  Synthetic oligonucleotide
atattcttccccaagtatattttgcggtaacgttagaagaagcaaagttagtgca

SEQ ID NO: 330741 - DNA, 58 bp, Artificial
  Synthetic oligonucleotide
atattctttgagcgggattcgggtgcgacgttcacccttcatgagaacaagaacacga

SEQ ID NO: 330742 - DNA, 59 bp, Artificial
  Synthetic oligonucleotide
atattgaaatggccaaattgagggaggctgaactctttggggagagcatgctcaaactt

SEQ ID NO: 330743 - DNA, 60 bp, Artificial
  Synthetic oligonucleotide
atattgaccatctatggatcttttaggcattggggtcatccattcatatcttactttgag

SEQ ID NO: 330744 - DNA, 60 bp, Artificial
  Synthetic oligonucleotide
atattgaggtgcaggaaccatgaccaagcggagtttcgatacagcattctcttcgccgat

SEQ ID NO: 330745 - DNA, 54 bp, Artificial
  Synthetic oligonucleotide
atattgatactgtaacaaccaaataccacaaggaccagtggatggtttgtagga

SEQ ID NO: 330746 - DNA, 52 bp, Artificial
  Synthetic oligonucleotide
atattgatagaagtatacctgtcactcctgatgtacctgtagggcctttaga

SEQ ID NO: 330747 - DNA, 54 bp, Artificial
  Synthetic oligonucleotide
atattgatgcgggtatgtgagcctttagttacggccaggaacacgcgagagccc

SEQ ID NO: 330748 - DNA, 60 bp, Artificial
  Synthetic oligonucleotide
atattgattctttgtgctattctaagcaccactgggatgatgagacttaccgccttgatg

SEQ ID NO: 330749 - DNA, 60 bp, Artificial
  Synthetic oligonucleotide
atattgcaacaccgaattcagtttgggtttttgcatgtgctcctgatcgttgtccgccca

SEQ ID NO: 330750 - DNA, 57 bp, Artificial
  Synthetic oligonucleotide
atattgcatataaatacctatcaacaggaaaagcaaaggtgtgttgtgttaaattaa

SEQ ID NO: 330751 - DNA, 60 bp, Artificial
  Synthetic oligonucleotide
atattgccacccaacatcctgaaacgtacatcagatactttcgcggcattcgagaactac

SEQ ID NO: 330752 - DNA, 57 bp, Artificial
  Synthetic oligonucleotide
atattgccatacaaagttttcacatcaatagaattctgcggggcactgacaggtaac

SEQ ID NO: 330753 - DNA, 50 bp, Artificial
  Synthetic oligonucleotide
atattgccgggtgtcctaccctctaggaagtctactacttcggaagatac

SEQ ID NO: 330754 - DNA, 52 bp, Artificial
  Synthetic oligonucleotide
atattgcggatatggaaccatcgttaacagcgttgcctgatcctcaatagga

SEQ ID NO: 330755 - DNA, 55 bp, Artificial
  Synthetic oligonucleotide
atattgcgttcttaacagcccagttcttaagcgcctcttgttctggcttgtccag

SEQ ID NO: 330756 - DNA, 52 bp, Artificial
  Synthetic oligonucleotide
atattgctacccctcattctgtttgggtctttgcatgtgctcctgatcgttg

SEQ ID NO: 330757 - DNA, 55 bp, Artificial
  Synthetic oligonucleotide
atattgctcagtgtcgtgccttcccggtcaatcagtatgggctaacccataagga

SEQ ID NO: 330758 - DNA, 55 bp, Artificial
  Synthetic oligonucleotide
atattgcttcactcccagccccgtagtggtgggaacgaccgacagggcgggcgta

SEQ ID NO: 330759 - DNA, 59 bp, Artificial
  Synthetic oligonucleotide
atattggaagcggccttggtgtaccgaggctatcgaggagtcaatttcttggcacgcta

SEQ ID NO: 330760 - DNA, 55 bp, Artificial
  Synthetic oligonucleotide
atattggacataacggaactaccgcgagcgtgtgtagtaactggcaaccgaagtt

SEQ ID NO: 330761 - DNA, 58 bp, Artificial
  Synthetic oligonucleotide
atattggacctttacctgggagagtctgtcaacaggtgtggtacagacttcacaccca

SEQ ID NO: 330762 - DNA, 59 bp, Artificial
  Synthetic oligonucleotide
atattggatacatgacgttaaacagtactctgacctaaaatttgagacatgggatccgc

SEQ ID NO: 330763 - DNA, 59 bp, Artificial
  Synthetic oligonucleotide
atattggattctgctctctgggcccctacaaccgaagcagactctcctgggtctagaac

SEQ ID NO: 330764 - DNA, 57 bp, Artificial
  Synthetic oligonucleotide
atattggcaagttactccagaaggtctaccaactaagccaagtaagattccacataa

SEQ ID NO: 330765 - DNA, 59 bp, Artificial
  Synthetic oligonucleotide
atattgggccgtgatggtttaccatctgctcaatttgacgcttacggagccatgttacc

SEQ ID NO: 330766 - DNA, 54 bp, Artificial
  Synthetic oligonucleotide
atattgggcttcatttcaaggtaggaaacacaccggaaacaggaacccctagca

SEQ ID NO: 330767 - DNA, 52 bp, Artificial
  Synthetic oligonucleotide
atattgggggctcggaaagagaaataaatcccgcgttccaaaaatgccccta

SEQ ID NO: 330768 - DNA, 58 bp, Artificial
  Synthetic oligonucleotide
atattggtgttaatatcaatattccagggacttatctcgtcacgattgtacttaacgc

SEQ ID NO: 330769 - DNA, 56 bp, Artificial
  Synthetic oligonucleotide
atattggttaacaactactaatattgaagaatacattttgcctggttggaaattga

SEQ ID NO: 330770 - DNA, 60 bp, Artificial
  Synthetic oligonucleotide
atattggttctcgttcgcagagtttgactcgtggtcgtagtgcatcacaacctttgtcat

SEQ ID NO: 330771 - DNA, 57 bp, Artificial
  Synthetic oligonucleotide
atattgtaaaccatctaaacatctatctaatattacgttatccatccaaccaacaat

SEQ ID NO: 330772 - DNA, 53 bp, Artificial
  Synthetic oligonucleotide
atattgtactcatacaaccatatgggcaacatcattattacgatggaccggct

SEQ ID NO: 330773 - DNA, 58 bp, Artificial
  Synthetic oligonucleotide
atattgtagtcactgacaactttgacgtaataaggatgactcaaccaatggaacaggt

SEQ ID NO: 330774 - DNA, 60 bp, Artificial
  Synthetic oligonucleotide
atattgtatgccccgtacaaacttatcatgttgtctacaatgtcaatacgcgtcgcatta

SEQ ID NO: 330775 - DNA, 50 bp, Artificial
  Synthetic oligonucleotide
atattgtattacagtatggttgcgaactgggctaaagtcctcgctgtctt

SEQ ID NO: 330776 - DNA, 55 bp, Artificial
  Synthetic oligonucleotide
atattgtcagccatcgactaccgtttactcgctgtatgcaataaagtccctcgtt

SEQ ID NO: 330777 - DNA, 60 bp, Artificial
  Synthetic oligonucleotide
atattgtcatcattgtgctcattataatcacaagcatcaaagctgtgtataactttgcca

SEQ ID NO: 330778 - DNA, 60 bp, Artificial
  Synthetic oligonucleotide
atattgtcgaggttgtaccatgtatcatgtttgtcaatggtgtagtcaatatggtagatg

SEQ ID NO: 330779 - DNA, 51 bp, Artificial
  Synthetic oligonucleotide
atattgtctccagactatggctgtcttcttaactaacaccacatatgacat

SEQ ID NO: 330780 - DNA, 55 bp, Artificial
  Synthetic oligonucleotide
atattgtgtacacgcaaatatagatgtaagagacaccaaggaagccttagacaag

SEQ ID NO: 330781 - DNA, 60 bp, Artificial
  Synthetic oligonucleotide
atattgttaagctaagcagaccagtattcacaacaaaagaaggcttagtcagggtgagca

SEQ ID NO: 330782 - DNA, 60 bp, Artificial
  Synthetic oligonucleotide
atattgttcgtagcgattctccgatatacgaagatatggataccgactcggaggtgcaat

SEQ ID NO: 330783 - DNA, 56 bp, Artificial
  Synthetic oligonucleotide
atattgttggaattcacactaattattcagaatcccaaaactggagaggcctacct

SEQ ID NO: 330784 - DNA, 59 bp, Artificial
  Synthetic oligonucleotide
atatttaatatgcaagtgtataaatacccgttgtagatctgtttgtaacctgaatatgc

SEQ ID NO: 330785 - DNA, 57 bp, Artificial
  Synthetic oligonucleotide
atatttacaactacttaacgcccaagctgcataacggctataaattaaacgtgcata

SEQ ID NO: 330786 - DNA, 60 bp, Artificial
  Synthetic oligonucleotide
atatttaccacagtaattgttcgtgataagagaccatgtcagttctctgctgtggatcct

SEQ ID NO: 330787 - DNA, 60 bp, Artificial
  Synthetic oligonucleotide
atatttaggcgcttgttcagagtccgtatatcgcatatacaatcggcttcagggatatat

SEQ ID NO: 330788 - DNA, 55 bp, Artificial
  Synthetic oligonucleotide
atatttagttccaacagactcaggattaggatccttcttaacattaccaacaaaa

SEQ ID NO: 330789 - DNA, 57 bp, Artificial
  Synthetic oligonucleotide
atatttcaactagggtatatcacaaagctaaacacgtcaaagcttggtgcccacgac

SEQ ID NO: 330790 - DNA, 59 bp, Artificial
  Synthetic oligonucleotide
atatttcaccagcttctcttagacgggcttggcattttgtgtgctgtctgctacaggac

SEQ ID NO: 330791 - DNA, 50 bp, Artificial
  Synthetic oligonucleotide
atatttcattgcgggggcgtagaccgcatgccgggattgttcgaaccccc

SEQ ID NO: 330792 - DNA, 57 bp, Artificial
  Synthetic oligonucleotide
atatttcgaaaccaacatattgagcccaaagacttattgcgttacgatgacgagtct

SEQ ID NO: 330793 - DNA, 59 bp, Artificial
  Synthetic oligonucleotide
atatttcgcacgcgctgtagttcggcgaattgcctacgttgtagtcgcggcgtgcttcg

SEQ ID NO: 330794 - DNA, 55 bp, Artificial
  Synthetic oligonucleotide
atatttcggatactcattttgatttacaagtagtaaatgagtgcccttcccgaaa

SEQ ID NO: 330795 - DNA, 60 bp, Artificial
  Synthetic oligonucleotide
atatttctatcagctggcaggagctactttgaaaccactggggcctactctgacattata

SEQ ID NO: 330796 - DNA, 52 bp, Artificial
  Synthetic oligonucleotide
atatttcttagtagtaataagaaagctaagttactttcaaaatttgaagact

SEQ ID NO: 330797 - DNA, 50 bp, Artificial
  Synthetic oligonucleotide
atatttgaccgattctttatgcagcgagctcttacgtgcgagtcgttctc

SEQ ID NO: 330798 - DNA, 60 bp, Artificial
  Synthetic oligonucleotide
atatttgacttatgtaggtgagagtagtttctctcggtcatcatcacacgatgatcctgt

SEQ ID NO: 330799 - DNA, 59 bp, Artificial
  Synthetic oligonucleotide
atatttgaggtaggccatgtagaacctccatgaatcatttggtcgctctttccttctaa

SEQ ID NO: 330800 - DNA, 54 bp, Artificial
  Synthetic oligonucleotide
atatttgccaccctctcagcctgtggctaaaatactgcctacagatgattacgt

SEQ ID NO: 330801 - DNA, 59 bp, Artificial
  Synthetic oligonucleotide
atatttggaaaccctgagatagccaagtttcgaataactcacatagacaagctagtaga

SEQ ID NO: 330802 - DNA, 55 bp, Artificial
  Synthetic oligonucleotide
atatttggagcaagctcggtcggatttaagggcgttaatgtgtctactttgcccc

SEQ ID NO: 330803 - DNA, 57 bp, Artificial
  Synthetic oligonucleotide
atatttggatgacgggctctactcagggtcctcagggtcctccgacttcggcctctc

SEQ ID NO: 330804 - DNA, 54 bp, Artificial
  Synthetic oligonucleotide
atatttgggcttatagaatataaggtccaaaactattaacttatgcggaaggac

SEQ ID NO: 330805 - DNA, 59 bp, Artificial
  Synthetic oligonucleotide
atatttggggatctcaaaccccatcttgagaaacagcgagctcgtaaaacagacgatgc

SEQ ID NO: 330806 - DNA, 55 bp, Artificial
  Synthetic oligonucleotide
atatttggtgcagattcggtcggatttaaaggtgtaaatgtatcaacattgcccc

SEQ ID NO: 330807 - DNA, 56 bp, Artificial
  Synthetic oligonucleotide
atatttgtacggggtagggtcgagcatcgtgtcctgggccatcaagtgggagtacg

SEQ ID NO: 330808 - DNA, 60 bp, Artificial
  Synthetic oligonucleotide
atatttgtcttgtaggaagtagctcagagccattatatgttccgacattagacgattatc

SEQ ID NO: 330809 - DNA, 55 bp, Artificial
  Synthetic oligonucleotide
atatttgtgtcatggtatattttgacgcagactctaacggtagcacgccaatata

SEQ ID NO: 330810 - DNA, 59 bp, Artificial
  Synthetic oligonucleotide
atatttgttaacgaatgcgaagactaatcaaaatgcgcgcagtgagtccgaggatttaa

SEQ ID NO: 330811 - DNA, 60 bp, Artificial
  Synthetic oligonucleotide
atattttaatcaacagttcgacgcgtggattaagacaggagagttgcgaatccgcattga

SEQ ID NO: 330812 - DNA, 58 bp, Artificial
  Synthetic oligonucleotide
atattttcactgtcggtgcccggagggggatatccactgagtgtttcgctgtgtacaa

SEQ ID NO: 330813 - DNA, 54 bp, Artificial
  Synthetic oligonucleotide
atattttccctcaccctgatactttgacagcgttcccgtacacctggaaggttg

SEQ ID NO: 330814 - DNA, 58 bp, Artificial
  Synthetic oligonucleotide
atattttgtaaatatgcctcaggacaccaggaggagctctctcaaaagtcctatattt

SEQ ID NO: 330815 - DNA, 60 bp, Artificial
  Synthetic oligonucleotide
atattttgtcttcaaacctctcagctgtaacgttctcagctcacgttgccatctctgttt

SEQ ID NO: 330816 - DNA, 57 bp, Artificial
  Synthetic oligonucleotide
atcaaaaagccataaattttcatttcatgagggaaaggtccctgctgtgtttgactg

SEQ ID NO: 330817 - DNA, 57 bp, Artificial
  Synthetic oligonucleotide
atcaaaacgtgtctaatccagaaccatttcttacatcaacactatgtttgtattacc

SEQ ID NO: 330818 - DNA, 60 bp, Artificial
  Synthetic oligonucleotide
atcaaaaggctgaattacaagcaattcagatagccttacaggactcaggatcagaagtga

SEQ ID NO: 330819 - DNA, 57 bp, Artificial
  Synthetic oligonucleotide
atcaaaagttcctaggactttggggctgctctggaaaaaccatctgcaccactactg

SEQ ID NO: 330820 - DNA, 60 bp, Artificial
  Synthetic oligonucleotide
atcaaaataaacacttgcacccccgtcaagcaggatttcatccaaatcagcctcatcagc

SEQ ID NO: 330821 - DNA, 59 bp, Artificial
  Synthetic oligonucleotide
atcaaaatatgaattgcaccttcatctcaccgtccgcttagtttacatattcgtagttg

SEQ ID NO: 330822 - DNA, 58 bp, Artificial
  Synthetic oligonucleotide
atcaaaatcctctatcaaagcagtaagtacacatagtagatgtaatggtaagtttaag

SEQ ID NO: 330823 - DNA, 56 bp, Artificial
  Synthetic oligonucleotide
atcaaaatggtacgcaaaggtgataagaaattggctaaacaggcgaccaccaaggc

SEQ ID NO: 330824 - DNA, 52 bp, Artificial
  Synthetic oligonucleotide
atcaaaatgtcgtaaactacatcaagcacggagtaactgaggtgataccgcg

SEQ ID NO: 330825 - DNA, 51 bp, Artificial
  Synthetic oligonucleotide
atcaaacaactaggccagtaaaaataactgggtcttttaccttccctggcg

SEQ ID NO: 330826 - DNA, 57 bp, Artificial
  Synthetic oligonucleotide
atcaaacacctttgggacgcaagttcttgtatactatgggtatgctaaatggtagga

SEQ ID NO: 330827 - DNA, 55 bp, Artificial
  Synthetic oligonucleotide
atcaaacacgtctcctgctgttccgatggatttagtaatacaggttaaaagagcg

SEQ ID NO: 330828 - DNA, 60 bp, Artificial
  Synthetic oligonucleotide
atcaaacatgtgagcatcttaaagtatcatgcggaccaaaatcgatacagtttcatgctt

SEQ ID NO: 330829 - DNA, 53 bp, Artificial
  Synthetic oligonucleotide
atcaaacattacagggctaataataacaagagacggtgggactaacagtacta

SEQ ID NO: 330830 - DNA, 55 bp, Artificial
  Synthetic oligonucleotide
atcaaaccaccacatgaaagacgttggtattaccctacaacagattatacaccct

SEQ ID NO: 330831 - DNA, 60 bp, Artificial
  Synthetic oligonucleotide
atcaaaccacccaggattgtaactgctctatctacactggtcacattacaggacacagga

SEQ ID NO: 330832 - DNA, 54 bp, Artificial
  Synthetic oligonucleotide
atcaaacctagagttaaacttcatgaaattaagccaagagcacaataagtgttc

SEQ ID NO: 330833 - DNA, 55 bp, Artificial
  Synthetic oligonucleotide
atcaaacgacgtgagcacgaatggcgaattatgcgcttagaagaaaacactaagg

SEQ ID NO: 330834 - DNA, 55 bp, Artificial
  Synthetic oligonucleotide
atcaaactacactacgttcaagaaatggactacatcaaggaaggaaaagaatcct

SEQ ID NO: 330835 - DNA, 55 bp, Artificial
  Synthetic oligonucleotide
atcaaactcgaactacccgctaccgaacagattcatatggtatgggtgcgagccg

SEQ ID NO: 330836 - DNA, 59 bp, Artificial
  Synthetic oligonucleotide
atcaaacttgtaaatatatcatttacaggtacagtgtgtattaaaaacagtcagatgga

SEQ ID NO: 330837 - DNA, 55 bp, Artificial
  Synthetic oligonucleotide
atcaaagaataacaactataggccagccgccgccggtaagactctagttctacct

SEQ ID NO: 330838 - DNA, 58 bp, Artificial
  Synthetic oligonucleotide
atcaaagactaggcagtgaactggggtgttatactatcaatagggtgaagtcatttaa

SEQ ID NO: 330839 - DNA, 58 bp, Artificial
  Synthetic oligonucleotide
atcaaagagtgctctcccatatcagtttcgaataggttcgccccattggaatccctta

SEQ ID NO: 330840 - DNA, 58 bp, Artificial
  Synthetic oligonucleotide
atcaaagcagtaccgatgttctactttcccatccctgaagggcaatggtcagtagaaa

SEQ ID NO: 330841 - DNA, 56 bp, Artificial
  Synthetic oligonucleotide
atcaaaggactcctaatatcgatgagtctagactacggaaggaacaaaactggagg

SEQ ID NO: 330842 - DNA, 57 bp, Artificial
  Synthetic oligonucleotide
atcaaaggaggtggaactttagtggctgaagccattcggtttataggaagagcaatg

SEQ ID NO: 330843 - DNA, 51 bp, Artificial
  Synthetic oligonucleotide
atcaaaggataaggctccaaaaaactacaaagggccccagaagaccaaggg

SEQ ID NO: 330844 - DNA, 59 bp, Artificial
  Synthetic oligonucleotide
atcaaaggtgctggcaacttcagaaacactcaatccacgattccttgggttgatagtcc

SEQ ID NO: 330845 - DNA, 60 bp, Artificial
  Synthetic oligonucleotide
atcaaagtatggttcgtttcatcaacatctgctcgcatgattgggtgtatggggccagtg

SEQ ID NO: 330846 - DNA, 60 bp, Artificial
  Synthetic oligonucleotide
atcaaagtctctgatatccgatatatcggggacaatatataggtctcccaatatttgtac

SEQ ID NO: 330847 - DNA, 54 bp, Artificial
  Synthetic oligonucleotide
atcaaagtgttctcgacaataacgcgagacctacattgtgcaaaggcttcttac

SEQ ID NO: 330848 - DNA, 52 bp, Artificial
  Synthetic oligonucleotide
atcaaagttaccccacatgattggtatgaaattcaagagtcagagtattacc

SEQ ID NO: 330849 - DNA, 55 bp, Artificial
  Synthetic oligonucleotide
atcaaataacttacgccacggatttgttgacaatcaacaagacgcatacacgcgc

SEQ ID NO: 330850 - DNA, 59 bp, Artificial
  Synthetic oligonucleotide
atcaaataatagaacagctaatacaaaaggaaagagtctacctgacatgggtaccagca

SEQ ID NO: 330851 - DNA, 55 bp, Artificial
  Synthetic oligonucleotide
atcaaatagagacttcgtagaaggggtttcaggaggaagttgggttgacatagtc

SEQ ID NO: 330852 - DNA, 59 bp, Artificial
  Synthetic oligonucleotide
atcaaatcttctacgtcgagtctgtctcttcgcgtaacgatgacgaggtttgattgacg

SEQ ID NO: 330853 - DNA, 57 bp, Artificial
  Synthetic oligonucleotide
atcaaatgaacttgaactttcgtgcgctgtttattaaatacacatgggtagggcatt

SEQ ID NO: 330854 - DNA, 55 bp, Artificial
  Synthetic oligonucleotide
atcaaatggtcaagctatgccttctactttccgcattaggagagatagtaatgag

SEQ ID NO: 330855 - DNA, 60 bp, Artificial
  Synthetic oligonucleotide
atcaaattgaggtggacaagtcagcgatttattgctgttacattcaagccgagaaggcag

SEQ ID NO: 330856 - DNA, 57 bp, Artificial
  Synthetic oligonucleotide
atcaacaaaagagtggagcagacggtacgaattagaaattggaaccaggataggaga

SEQ ID NO: 330857 - DNA, 58 bp, Artificial
  Synthetic oligonucleotide
atcaacaagacaagagcgcaagttttatttggggtcaacgtgaatatcacgcgaagag

SEQ ID NO: 330858 - DNA, 51 bp, Artificial
  Synthetic oligonucleotide
atcaacaaggtatacacagggcctctaggcgaggaactagtccaaaccctc

SEQ ID NO: 330859 - DNA, 60 bp, Artificial
  Synthetic oligonucleotide
atcaacaatagcccttcttattggagtgggaaacttgattttcaacactgtcatacatga

SEQ ID NO: 330860 - DNA, 59 bp, Artificial
  Synthetic oligonucleotide
atcaacacaatacgtgtattcatctatagggtctataggaattcctactagattctctt

SEQ ID NO: 330861 - DNA, 55 bp, Artificial
  Synthetic oligonucleotide
atcaacacaatgggagcccaagttagtagacagacgtctggtgcacatgagactc

SEQ ID NO: 330862 - DNA, 54 bp, Artificial
  Synthetic oligonucleotide
atcaacacccgtctcttgcattcggtgcgtaccacccaccaataccgggggaac

SEQ ID NO: 330863 - DNA, 57 bp, Artificial
  Synthetic oligonucleotide
atcaacactggaatcagcgaaaatcgattcagttttacctccattaaccgtacgcga

SEQ ID NO: 330864 - DNA, 56 bp, Artificial
  Synthetic oligonucleotide
atcaacacttccggagacttgtgttgttagacgaagaggcaggtcccctagaagaa

SEQ ID NO: 330865 - DNA, 56 bp, Artificial
  Synthetic oligonucleotide
atcaacagccacgatgcgctccgaccacgtatgctggagtgtttatcacttggtgg

SEQ ID NO: 330866 - DNA, 51 bp, Artificial
  Synthetic oligonucleotide
atcaacagctccggtcaccaatattgacgacgaggctacccaacaacttgc

SEQ ID NO: 330867 - DNA, 51 bp, Artificial
  Synthetic oligonucleotide
atcaacaggacggccctgaactgcaatgatagccttaacaccggctggata

SEQ ID NO: 330868 - DNA, 60 bp, Artificial
  Synthetic oligonucleotide
atcaacaggctagtcggctctgccgacacaggggtcatcactggatacccacaacatctc

SEQ ID NO: 330869 - DNA, 59 bp, Artificial
  Synthetic oligonucleotide
atcaacaggtataatggattgactttgcgtggagttacgatgagacccacctctctagc

SEQ ID NO: 330870 - DNA, 55 bp, Artificial
  Synthetic oligonucleotide
atcaacaggttaacatagtgactgactcacaatatgtgttagggattattcagtc

SEQ ID NO: 330871 - DNA, 60 bp, Artificial
  Synthetic oligonucleotide
atcaacatagaagcagaacctccttttggtgacagctatattgtcataggagtggagcca

SEQ ID NO: 330872 - DNA, 55 bp, Artificial
  Synthetic oligonucleotide
atcaacatgaactccagagcttgccaactgtgggcagacatggccctcaagaccc

SEQ ID NO: 330873 - DNA, 52 bp, Artificial
  Synthetic oligonucleotide
atcaacattagtgggccagatatgcagatattacacccaatggtcaggttcc

SEQ ID NO: 330874 - DNA, 58 bp, Artificial
  Synthetic oligonucleotide
atcaacattcactctactaactatgtgttcggtaagtactcagttttcgctcgtgtcc

SEQ ID NO: 330875 - DNA, 51 bp, Artificial
  Synthetic oligonucleotide
atcaaccaacccagcccgacgttgccacgtgtagattttacacactggact

SEQ ID NO: 330876 - DNA, 58 bp, Artificial
  Synthetic oligonucleotide
atcaaccaactacattcaaaccacccaatgattattggctgcttattagttcaaatac

SEQ ID NO: 330877 - DNA, 60 bp, Artificial
  Synthetic oligonucleotide
atcaacccaagccatcctcatgaaggtctgcaaaacaccatttgccactgtaccacaatg

SEQ ID NO: 330878 - DNA, 59 bp, Artificial
  Synthetic oligonucleotide
atcaaccccaaccgcacagcaacttaatgatgttaggaagatctatttagcgctaatgt

SEQ ID NO: 330879 - DNA, 57 bp, Artificial
  Synthetic oligonucleotide
atcaacccccggacgaacatgacagcccacatcaaggtgccctttgttggcgtcaac

SEQ ID NO: 330880 - DNA, 58 bp, Artificial
  Synthetic oligonucleotide
atcaacccttggctgggtcggcccgacggctgcactcgcacctcataaggaacctgaa

SEQ ID NO: 330881 - DNA, 58 bp, Artificial
  Synthetic oligonucleotide
atcaaccgcatggaggccaactcgaccatctactctgtccccggcgatactcgcgaac

SEQ ID NO: 330882 - DNA, 60 bp, Artificial
  Synthetic oligonucleotide
atcaaccgctgctgggacaggctgcaagaacacatcgccattctgctaggcaaggtgcgc

SEQ ID NO: 330883 - DNA, 57 bp, Artificial
  Synthetic oligonucleotide
atcaacctctatgctacttttttccccatggctcacaacaccgcttccacccttgaa

SEQ ID NO: 330884 - DNA, 52 bp, Artificial
  Synthetic oligonucleotide
atcaacctttgctcgagacctggtaaagaaagggggacctggttctaaacac

SEQ ID NO: 330885 - DNA, 59 bp, Artificial
  Synthetic oligonucleotide
atcaacgatcgaaatttctggagaggtgagaatgggcggaaaacaaggagtgcttatga

SEQ ID NO: 330886 - DNA, 55 bp, Artificial
  Synthetic oligonucleotide
atcaacgctattttggggtgaatcctccgccactaggtttcaagtggattcgacc

SEQ ID NO: 330887 - DNA, 54 bp, Artificial
  Synthetic oligonucleotide
atcaacggaatgtttagccgtcgataatttcagtttacctttgaattttgcgaa

SEQ ID NO: 330888 - DNA, 55 bp, Artificial
  Synthetic oligonucleotide
atcaacggcacctatccggccaagagcctcgatctggtgacgcgcaagcatggcg

SEQ ID NO: 330889 - DNA, 57 bp, Artificial
  Synthetic oligonucleotide
atcaacggccgattgctctatatgtcaaatacggtggcggaaggaaacaaggttcga

SEQ ID NO: 330890 - DNA, 59 bp, Artificial
  Synthetic oligonucleotide
atcaacggtctatcgatctgcgcagtagaacgatttcacgttactgatttgacccccca

SEQ ID NO: 330891 - DNA, 60 bp, Artificial
  Synthetic oligonucleotide
atcaacgtaaagcccacagagcagggaaggcctcgcacataactcacgttgtgcatggtc

SEQ ID NO: 330892 - DNA, 60 bp, Artificial
  Synthetic oligonucleotide
atcaacgtatgattatttatatttgccatctgaagtgtcacgtgaaggaactatagtcac

SEQ ID NO: 330893 - DNA, 54 bp, Artificial
  Synthetic oligonucleotide
atcaacgttagtgggacagtactgcaagtactacacacaatggtcgggctcgct

SEQ ID NO: 330894 - DNA, 51 bp, Artificial
  Synthetic oligonucleotide
atcaactaaaatcgcggctgaaagtgttgcaacagaaagcccgaatatttc

SEQ ID NO: 330895 - DNA, 60 bp, Artificial
  Synthetic oligonucleotide
atcaactacattaagcatagatacgggactgatgatgcggcgtttaatcgggttgcggcg

SEQ ID NO: 330896 - DNA, 60 bp, Artificial
  Synthetic oligonucleotide
atcaactaccagcacgggaccatgcaagacctgcacgaatcctgccaacggaacctctat

SEQ ID NO: 330897 - DNA, 60 bp, Artificial
  Synthetic oligonucleotide
atcaactaccagcacgggaccatgcaagacctgcacgagtcctgctcaaggaaactctac

SEQ ID NO: 330898 - DNA, 60 bp, Artificial
  Synthetic oligonucleotide
atcaactgcatctggtaaagctgttgtagattcctactggattcatgaacttggcactgg

SEQ ID NO: 330899 - DNA, 60 bp, Artificial
  Synthetic oligonucleotide
atcaactgcttatcgcgtcatatcgcaactgctcactatccccctcgcatacgctaatca

SEQ ID NO: 330900 - DNA, 57 bp, Artificial
  Synthetic oligonucleotide
atcaactggaccctgcattcggagccaattcaaacaatcccgattgggacttcaacc

SEQ ID NO: 330901 - DNA, 58 bp, Artificial
  Synthetic oligonucleotide
atcaactggttaacactcatagccgcttggttagagtgtagggtattttgatctagac

SEQ ID NO: 330902 - DNA, 50 bp, Artificial
  Synthetic oligonucleotide
atcaactttgactagatcctgcttctgcatactctttgaataaattgtac

SEQ ID NO: 330903 - DNA, 59 bp, Artificial
  Synthetic oligonucleotide
atcaagaaaggtgtgcaacactaatgaaggataatggcgaacgcagcagcatcggagcg

SEQ ID NO: 330904 - DNA, 58 bp, Artificial
  Synthetic oligonucleotide
atcaagacacgtctgtttgcacaagctaaacctagtacagcagacaacattgatggtt

SEQ ID NO: 330905 - DNA, 60 bp, Artificial
  Synthetic oligonucleotide
atcaagacactgaggagactacgagacaacccgacaggattgtgactaccttggacggca

SEQ ID NO: 330906 - DNA, 60 bp, Artificial
  Synthetic oligonucleotide
atcaagaccagactattcaccatcaggcaggaattggccattagaggcctatgggactcc

SEQ ID NO: 330907 - DNA, 58 bp, Artificial
  Synthetic oligonucleotide
atcaagaccaggaatcacacgaacagtgtcctgttctttcttgttcgtgaccgtcgcc

SEQ ID NO: 330908 - DNA, 57 bp, Artificial
  Synthetic oligonucleotide
atcaagacgacaacccctccgacatctccgacaagactttcgcgactgaacacaact

SEQ ID NO: 330909 - DNA, 60 bp, Artificial
  Synthetic oligonucleotide
atcaagagcgtcacctcatgttttggtggcgttgacaaggcacactactcgatgtaaata

SEQ ID NO: 330910 - DNA, 57 bp, Artificial
  Synthetic oligonucleotide
atcaagaggattgtttggagcaatagccggatttatagaaggtgggtggccagggct

SEQ ID NO: 330911 - DNA, 60 bp, Artificial
  Synthetic oligonucleotide
atcaagaggctgcgaagtatgacaaccacacagagaatgctttgttattgtatatggcat

SEQ ID NO: 330912 - DNA, 55 bp, Artificial
  Synthetic oligonucleotide
atcaagagttgtcagatagtgtatggtggctgcacttataggcttgagtctgacg

SEQ ID NO: 330913 - DNA, 60 bp, Artificial
  Synthetic oligonucleotide
atcaagataaacctttgcgatggatatatctgtctgctactccaactaaacatctgctcc

SEQ ID NO: 330914 - DNA, 60 bp, Artificial
  Synthetic oligonucleotide
atcaagatgctcctcaccgcaggaaggaacatctcgacgatgtgaggaaaccaggcagaa

SEQ ID NO: 330915 - DNA, 60 bp, Artificial
  Synthetic oligonucleotide
atcaagattataaccatcctaagcaagtacatgcccgtaggtcacagcctcaacctgacc

SEQ ID NO: 330916 - DNA, 55 bp, Artificial
  Synthetic oligonucleotide
atcaagcagaagacgtgaagccttacgcaaaagtaacgagccacgagttaggact

SEQ ID NO: 330917 - DNA, 60 bp, Artificial
  Synthetic oligonucleotide
atcaagcaggtgtgtttgctgtgcagttagctaataagttaggcattgacaaaccttttg

SEQ ID NO: 330918 - DNA, 60 bp, Artificial
  Synthetic oligonucleotide
atcaagcatcacttcacacacacatgtatggaatacaatcagacataaagccacgtcgat

SEQ ID NO: 330919 - DNA, 60 bp, Artificial
  Synthetic oligonucleotide
atcaagcatctccaaccaatgtatggcactgattatgaaatctgtgctgtcagcagacca

SEQ ID NO: 330920 - DNA, 58 bp, Artificial
  Synthetic oligonucleotide
atcaagcgcagttcatcgagaagtgtcaacagggcgatccaactacagccatcacggg

SEQ ID NO: 330921 - DNA, 55 bp, Artificial
  Synthetic oligonucleotide
atcaagcgggtcgagggtacgacgtcggctcaacttcgacagccctatggctcgc

SEQ ID NO: 330922 - DNA, 58 bp, Artificial
  Synthetic oligonucleotide
atcaagcgtgggatcaatgaccgaaacttctggagaggtgaaaatggaccaaggacaa

SEQ ID NO: 330923 - DNA, 55 bp, Artificial
  Synthetic oligonucleotide
atcaagctacgtctagtggcctcagcccctgccaaagtattacgcgccgcgggtt

SEQ ID NO: 330924 - DNA, 59 bp, Artificial
  Synthetic oligonucleotide
atcaagctcaagaaccacacgaacagtgtaatgttctggttggtcagggatcgtcgacc

SEQ ID NO: 330925 - DNA, 60 bp, Artificial
  Synthetic oligonucleotide
atcaagctcacatgtcttaccatgtccggaacgttcggcattcgatgttctgatttgatg

SEQ ID NO: 330926 - DNA, 58 bp, Artificial
  Synthetic oligonucleotide
atcaagctgaagaaccacacgaatagtgttatgttctggttggtcagggaccgtagac

SEQ ID NO: 330927 - DNA, 50 bp, Artificial
  Synthetic oligonucleotide
atcaagctgcgataccatggtgtcggatttggacgtgacattggaatgcc

SEQ ID NO: 330928 - DNA, 60 bp, Artificial
  Synthetic oligonucleotide
atcaagctggagagcatagacgcgataagagatcggtggcgctagctccccatgtcggca

SEQ ID NO: 330929 - DNA, 60 bp, Artificial
  Synthetic oligonucleotide
atcaagcttaagagtctgaacatatctgggacatttgctgtccgtaaatctgacttgatg

SEQ ID NO: 330930 - DNA, 55 bp, Artificial
  Synthetic oligonucleotide
atcaagcttcatcagagggacgagagtggtcccaagaggacaactgtccactagg

SEQ ID NO: 330931 - DNA, 51 bp, Artificial
  Synthetic oligonucleotide
atcaagcttggtcacctcgaagacatggacatggagagtaaggagatgatg

SEQ ID NO: 330932 - DNA, 60 bp, Artificial
  Synthetic oligonucleotide
atcaagctttggatgatggactcaatcttaacggtaacgttgaggagtgttcatttgaca

SEQ ID NO: 330933 - DNA, 52 bp, Artificial
  Synthetic oligonucleotide
atcaaggaaggaccagcgaggttcaggccaagtcgtgacttatgcactaaac

SEQ ID NO: 330934 - DNA, 58 bp, Artificial
  Synthetic oligonucleotide
atcaaggaattcatttgaattgggattctaagtctagtcaacagagtattcacggtta

SEQ ID NO: 330935 - DNA, 60 bp, Artificial
  Synthetic oligonucleotide
atcaaggacagctggctccaattccagaaaccagtagctattggcttcgacatgagtcga

SEQ ID NO: 330936 - DNA, 58 bp, Artificial
  Synthetic oligonucleotide
atcaaggacggttgattagatggcaacttgaattatcacaattcaattatcgaacttt

SEQ ID NO: 330937 - DNA, 60 bp, Artificial
  Synthetic oligonucleotide
atcaaggaggaatgtaacatcttaggtaagtcgaacttcaatgccatggatgtggataat

SEQ ID NO: 330938 - DNA, 60 bp, Artificial
  Synthetic oligonucleotide
atcaaggcgattcgaacgagcccatactcgattcgaaattcgcacgtcaagtgctcgtgt

SEQ ID NO: 330939 - DNA, 52 bp, Artificial
  Synthetic oligonucleotide
atcaagggcaagctacacggtcagaccacggtctgaccgcccttgacagcct

SEQ ID NO: 330940 - DNA, 53 bp, Artificial
  Synthetic oligonucleotide
atcaagggctccaacgctctcgctactgtcatgactatgggtcttgacgaaaa

SEQ ID NO: 330941 - DNA, 59 bp, Artificial
  Synthetic oligonucleotide
atcaaggggaaagtgattaacgatcaggtgaacttgactgaactacccgccaatcagca

SEQ ID NO: 330942 - DNA, 60 bp, Artificial
  Synthetic oligonucleotide
atcaaggtgaccgctcaaataattatgtgggcctaatgcacgtgcccacattgtcttgcc

SEQ ID NO: 330943 - DNA, 55 bp, Artificial
  Synthetic oligonucleotide
atcaaggttaccaagcagccagcagtcttgaaggatggagatcccagatgcacag

SEQ ID NO: 330944 - DNA, 57 bp, Artificial
  Synthetic oligonucleotide
atcaagtaaacaggtgttagtatcgaacgtatctgatacgaaatggaagtttgttga

SEQ ID NO: 330945 - DNA, 59 bp, Artificial
  Synthetic oligonucleotide
atcaagtataatcaaggagttagctttcgggatttcagggagcctgctagtaatcacaa

SEQ ID NO: 330946 - DNA, 60 bp, Artificial
  Synthetic oligonucleotide
atcaagtatgtgttggggaggcagatttggtagaggctatggttggttcacatgttatta

SEQ ID NO: 330947 - DNA, 60 bp, Artificial
  Synthetic oligonucleotide
atcaagtctaaaatgtgcccatcagaagtcaacgacattacaagattaaactctggcggc

SEQ ID NO: 330948 - DNA, 54 bp, Artificial
  Synthetic oligonucleotide
atcaagtgaaggtaaacgtattccgggcctactgaagcgacgcgctgaggcata

SEQ ID NO: 330949 - DNA, 58 bp, Artificial
  Synthetic oligonucleotide
atcaagtgatagtaaacaaccaaaactggtcagggtactcaggagcgttcatcgatta

SEQ ID NO: 330950 - DNA, 60 bp, Artificial
  Synthetic oligonucleotide
atcaagtggactaccatatgtaggtcgcaccaaaggagagacaattggcgagatgatagc

SEQ ID NO: 330951 - DNA, 59 bp, Artificial
  Synthetic oligonucleotide
atcaagtggatggtccggaactgacagggtcgtgccgccatgtgaacgaggcggagtta

SEQ ID NO: 330952 - DNA, 58 bp, Artificial
  Synthetic oligonucleotide
atcaagttatatggcgctgacgaagacggcctttacgagtctattggccctctgaagg

SEQ ID NO: 330953 - DNA, 54 bp, Artificial
  Synthetic oligonucleotide
atcaagttatcgttggtgacgggtactcttatagagtggaacgaactaacgact

SEQ ID NO: 330954 - DNA, 51 bp, Artificial
  Synthetic oligonucleotide
atcaagttgtacagactggatattatcgcgtagttgcaaccgctggtgatg

SEQ ID NO: 330955 - DNA, 54 bp, Artificial
  Synthetic oligonucleotide
atcaagttttacaaggcaatttgcccaaaggataccctaaacactttgtgtaca

SEQ ID NO: 330956 - DNA, 60 bp, Artificial
  Synthetic oligonucleotide
atcaataataccagattatataatgttgaggaatatggctgtggataatactagatcgag

SEQ ID NO: 330957 - DNA, 57 bp, Artificial
  Synthetic oligonucleotide
atcaataattgtagaattgagcgatccaaatgcgttattgaaacaccgatttgaaat

SEQ ID NO: 330958 - DNA, 60 bp, Artificial
  Synthetic oligonucleotide
atcaatacaattgctgaacaattagcaatcggtgcctgcttagccacacatatgaagctt

SEQ ID NO: 330959 - DNA, 53 bp, Artificial
  Synthetic oligonucleotide
atcaataccaggtttggagatctatcttacaaaacccctcaagacaccaagtc

SEQ ID NO: 330960 - DNA, 55 bp, Artificial
  Synthetic oligonucleotide
atcaataccatattgataacctaacatatcagcaccacgggtcataccacataca

SEQ ID NO: 330961 - DNA, 55 bp, Artificial
  Synthetic oligonucleotide
atcaataccccgcgttggcagcagaaatttacaacgtgtatagcttcagagaccc

SEQ ID NO: 330962 - DNA, 60 bp, Artificial
  Synthetic oligonucleotide
atcaatactatgacatgtatcatgagaaaccgataatctacatggtaggatcagcgccct

SEQ ID NO: 330963 - DNA, 60 bp, Artificial
  Synthetic oligonucleotide
atcaatactttcagtctagtacagataatagacaaaatgtatcttcagaccctaagcaaa

SEQ ID NO: 330964 - DNA, 60 bp, Artificial
  Synthetic oligonucleotide
atcaataggggacaatcatccagattgtcaaagatcaagcacttctgtttccccggtcaa

SEQ ID NO: 330965 - DNA, 55 bp, Artificial
  Synthetic oligonucleotide
atcaatattggccagaattcgattggtgagctatccacaagaatatccactgtgg

SEQ ID NO: 330966 - DNA, 54 bp, Artificial
  Synthetic oligonucleotide
atcaatcaaacattgattattaacggttttagaatcaaactgttgaatatgttc

SEQ ID NO: 330967 - DNA, 55 bp, Artificial
  Synthetic oligonucleotide
atcaatcaccacaccacattctaacatcgaggaggttgctttacccacaacgggg

SEQ ID NO: 330968 - DNA, 60 bp, Artificial
  Synthetic oligonucleotide
atcaatcagaagggccggttagagaggagtacgcagggtatctgcaatatagagccagag

SEQ ID NO: 330969 - DNA, 60 bp, Artificial
  Synthetic oligonucleotide
atcaatcatacttgaggcgtactcagtcaatggggatacaactggatcagaggattattc

SEQ ID NO: 330970 - DNA, 60 bp, Artificial
  Synthetic oligonucleotide
atcaatcatatttaggatggggtgactttgagtcagcctatccaggtctgaagtattggg

SEQ ID NO: 330971 - DNA, 55 bp, Artificial
  Synthetic oligonucleotide
atcaatcatggcgggtttctagaatgtattggcattaagcctacaaaacacactc

SEQ ID NO: 330972 - DNA, 50 bp, Artificial
  Synthetic oligonucleotide
atcaatcattctactcaactatatgttaaaatcagtgacccgaatgatgg

SEQ ID NO: 330973 - DNA, 60 bp, Artificial
  Synthetic oligonucleotide
atcaatccatcaaacgtggtggcgtttccttcattactcaatgagagtgcccgctgggaa

SEQ ID NO: 330974 - DNA, 55 bp, Artificial
  Synthetic oligonucleotide
atcaatccctgcagcacactgagaacacccagagcatatcattttagcctccgag

SEQ ID NO: 330975 - DNA, 58 bp, Artificial
  Synthetic oligonucleotide
atcaatccgtaggaggggatctagaaataacaacacatagctttaattgtggaggaga

SEQ ID NO: 330976 - DNA, 60 bp, Artificial
  Synthetic oligonucleotide
atcaatcgacgttgtaaatcaatcgacgttgtagatcaatcgacgttgtaaatcaatgaa

SEQ ID NO: 330977 - DNA, 58 bp, Artificial
  Synthetic oligonucleotide
atcaatcgccaggagattgagggggtgaaattagactccagtgggaatgtgtataaaa

SEQ ID NO: 330978 - DNA, 55 bp, Artificial
  Synthetic oligonucleotide
atcaatcgcgttgctgaattactcatacgattggccatgaaagaatgaggactgt

SEQ ID NO: 330979 - DNA, 58 bp, Artificial
  Synthetic oligonucleotide
atcaatcggggactgtcccaaatatgtcaaacagggatctttgaaactagctacagga

SEQ ID NO: 330980 - DNA, 60 bp, Artificial
  Synthetic oligonucleotide
atcaatcgtgtgcaaaatttcccatttcctcagcatttcagtaagctgattgtagatgag

SEQ ID NO: 330981 - DNA, 55 bp, Artificial
  Synthetic oligonucleotide
atcaatcgtgttcatctcacttcatgtccttatcatcaattatggcatcactcag

SEQ ID NO: 330982 - DNA, 57 bp, Artificial
  Synthetic oligonucleotide
atcaatctgggtttttgctggggcacctgataggtgtccccctacctgcctgttcat

SEQ ID NO: 330983 - DNA, 58 bp, Artificial
  Synthetic oligonucleotide
atcaatcttacttgcgacggacacaatcaatgggaatccaacttgaccaaaggattat

SEQ ID NO: 330984 - DNA, 59 bp, Artificial
  Synthetic oligonucleotide
atcaatgacgttataccatgcgtcgttactgtacacctttgggctaagatctaaatgcc

SEQ ID NO: 330985 - DNA, 60 bp, Artificial
  Synthetic oligonucleotide
atcaatgacgttgtaccacgcatcattgctgtacacttttggactcaggtcgagatgacc

SEQ ID NO: 330986 - DNA, 60 bp, Artificial
  Synthetic oligonucleotide
atcaatgactgtgttgtcccaggatctgccttttatgctggttctggaagagatgtatgg

SEQ ID NO: 330987 - DNA, 60 bp, Artificial
  Synthetic oligonucleotide
atcaatgcagacaagagtttgaagagaccaaattgtcaaaaagtgctgcaaccattggag

SEQ ID NO: 330988 - DNA, 58 bp, Artificial
  Synthetic oligonucleotide
atcaatgcaggacaacgtatagctcaactccttttagtcccattagttatacaaggaa

SEQ ID NO: 330989 - DNA, 60 bp, Artificial
  Synthetic oligonucleotide
atcaatgcatgcccctggatttcttccgatatgttcggttcggcgctgagtttatggatg

SEQ ID NO: 330990 - DNA, 53 bp, Artificial
  Synthetic oligonucleotide
atcaatgcccacgagggtcagctggtgatagcacggcagaaggtgagagatgc

SEQ ID NO: 330991 - DNA, 60 bp, Artificial
  Synthetic oligonucleotide
atcaatgcgcaggggctgaaggcttacagggggtatggattcactatgaatgactgggct

SEQ ID NO: 330992 - DNA, 60 bp, Artificial
  Synthetic oligonucleotide
atcaatggaacctgtacggtagtaatgacggatggcagtgcatcaggaagggctgacact

SEQ ID NO: 330993 - DNA, 60 bp, Artificial
  Synthetic oligonucleotide
atcaatggaacttgtacagtagtaatgactgatggaagtgcatcaggaaaggctgatact

SEQ ID NO: 330994 - DNA, 60 bp, Artificial
  Synthetic oligonucleotide
atcaatggactcagcacacgacgactggtggttctcgggcctgtgcagtgtctggcaatc

SEQ ID NO: 330995 - DNA, 60 bp, Artificial
  Synthetic oligonucleotide
atcaatggagacttagacaaaatatatggaccaagccaaacacatacaaagacctttgca

SEQ ID NO: 330996 - DNA, 50 bp, Artificial
  Synthetic oligonucleotide
atcaatgggaagacagtgacttacgtgtgcaagaacgctgatgctctgac

SEQ ID NO: 330997 - DNA, 59 bp, Artificial
  Synthetic oligonucleotide
atcaatgggaatacaactggaccaaagaatcatagtgctctttatggttgcctggggta

SEQ ID NO: 330998 - DNA, 58 bp, Artificial
  Synthetic oligonucleotide
atcaatgttcgggacaatgaaggcagttgtgccgccagtggaagggtcctatccggat

SEQ ID NO: 330999 - DNA, 58 bp, Artificial
  Synthetic oligonucleotide
atcaattatctcctcaacccacgtatacatttcggcaccattatacgacagtctaacg

SEQ ID NO: 331000 - DNA, 60 bp, Artificial
  Synthetic oligonucleotide
atcaattcaagtcagtagagtttgacatgtcccacttgaacctgactatgcccaatgcat

SEQ ID NO: 331001 - DNA, 60 bp, Artificial
  Synthetic oligonucleotide
atcaattcaatctgaacaacgattgaattgtcctccttcaactctacatcaactatgaac

SEQ ID NO: 331002 - DNA, 60 bp, Artificial
  Synthetic oligonucleotide
atcaattcgacatgacagcctccgaaattgaacaagtcgggtatgattatttggctgaag

SEQ ID NO: 331003 - DNA, 57 bp, Artificial
  Synthetic oligonucleotide
atcaattcgatcggatgttgttttcgggagacgactctttagccttttctctgaatc

SEQ ID NO: 331004 - DNA, 50 bp, Artificial
  Synthetic oligonucleotide
atcaattgcctccactatttcttcgtgcttcatttccctgtaatttagct

SEQ ID NO: 331005 - DNA, 60 bp, Artificial
  Synthetic oligonucleotide
atcaattggaccaaggattcaataaccgacatctggacttatcaagcagagctattggta

SEQ ID NO: 331006 - DNA, 57 bp, Artificial
  Synthetic oligonucleotide
atcaattgtactaatattagcaataataacaatggcactcaggcaataccttgcaag

SEQ ID NO: 331007 - DNA, 53 bp, Artificial
  Synthetic oligonucleotide
atcaattgtgaaggggaatgctaccacagtggaggtacaataacaagcaactt

SEQ ID NO: 331008 - DNA, 58 bp, Artificial
  Synthetic oligonucleotide
atcaatttgtgtattcgtacttttgtgcttaaacttccaatcctgtatgccaagcgta

SEQ ID NO: 331009 - DNA, 56 bp, Artificial
  Synthetic oligonucleotide
atcaattttcaagtatgtaagaacaaaaaacctcccacatatcaaacccgcatata

SEQ ID NO: 331010 - DNA, 57 bp, Artificial
  Synthetic oligonucleotide
atcacaaaagtgcttttggccctcttagggccgctgtacctctttcaggccagccta

SEQ ID NO: 331011 - DNA, 56 bp, Artificial
  Synthetic oligonucleotide
atcacaaacctgtgtaacttataacactgaagattaccgtgttggaaacataattg

SEQ ID NO: 331012 - DNA, 58 bp, Artificial
  Synthetic oligonucleotide
atcacaaactagatgttactactgcgacctgtactatcagaaattgtaagaaattggg

SEQ ID NO: 331013 - DNA, 55 bp, Artificial
  Synthetic oligonucleotide
atcacaaagcgcattagacaaatagcttgacacaatgcctaggatcctcggtcgc

SEQ ID NO: 331014 - DNA, 56 bp, Artificial
  Synthetic oligonucleotide
atcacaaagctcaaggcgttaggattcccaactgtgaactacatcactgacccaga

SEQ ID NO: 331015 - DNA, 57 bp, Artificial
  Synthetic oligonucleotide
atcacaaataaataccgtgacgttaccgttgatggtacttatatccaaccagtgcta

SEQ ID NO: 331016 - DNA, 53 bp, Artificial
  Synthetic oligonucleotide
atcacaacacacaaacttgtcacgttgttgattcattcgggtctataacgact

SEQ ID NO: 331017 - DNA, 51 bp, Artificial
  Synthetic oligonucleotide
atcacaacatctatcggagttgtgccctagccctttaaaattagttgatgg

SEQ ID NO: 331018 - DNA, 60 bp, Artificial
  Synthetic oligonucleotide
atcacaactcatgctagggttgacgccatcatggcacatcctcatgatctcatcattatg

SEQ ID NO: 331019 - DNA, 57 bp, Artificial
  Synthetic oligonucleotide
atcacaactctattttaacgatttggggtgtgtaggaatacaatttgtgttgataca

SEQ ID NO: 331020 - DNA, 60 bp, Artificial
  Synthetic oligonucleotide
atcacaagagagatttcctcacttaccattgaaagactagcaactttgaaagcaactagc

SEQ ID NO: 331021 - DNA, 60 bp, Artificial
  Synthetic oligonucleotide
atcacaagcctcagcattgggggagagctcgtgttccatacaagagtccaaggccttgca

SEQ ID NO: 331022 - DNA, 55 bp, Artificial
  Synthetic oligonucleotide
atcacaagcgccaaagcttaattctaagcaactaatcgatgatttgaaagctggc

SEQ ID NO: 331023 - DNA, 60 bp, Artificial
  Synthetic oligonucleotide
atcacaagctggacagacgttccgtacgtgggaaagcgtgaggacatctggtgtggcagc

SEQ ID NO: 331024 - DNA, 55 bp, Artificial
  Synthetic oligonucleotide
atcacaatctgccacacggaggttggtacagggacgggaccaaatcagtgtttta

SEQ ID NO: 331025 - DNA, 55 bp, Artificial
  Synthetic oligonucleotide
atcacaattggcagcttgaagtgctgtctgcgatcggagagccagcggacgatcg

SEQ ID NO: 331026 - DNA, 60 bp, Artificial
  Synthetic oligonucleotide
atcacaccattatgagcataataagtagtctacatctcagtgttagaggccatactgagt

SEQ ID NO: 331027 - DNA, 60 bp, Artificial
  Synthetic oligonucleotide
atcacaccgatgagttggcctctgcttccagtgtcccttccgaatggaagccctctaaga

SEQ ID NO: 331028 - DNA, 60 bp, Artificial
  Synthetic oligonucleotide
atcacaccgatgtgctaaagcagagattcggagtcttatcatgcggatagcacgcactgg

SEQ ID NO: 331029 - DNA, 51 bp, Artificial
  Synthetic oligonucleotide
atcacaccgtttagtccgaagacgttaaactacgttcgaaccgtgttcgaa

SEQ ID NO: 331030 - DNA, 60 bp, Artificial
  Synthetic oligonucleotide
atcacacggagaatgcgttgatgctttatatggcttgtacccatgctagcaacccagttt

SEQ ID NO: 331031 - DNA, 55 bp, Artificial
  Synthetic oligonucleotide
atcacactaataccgtcatgttcttcttagtccgggatagaagaccgtttggtac

SEQ ID NO: 331032 - DNA, 56 bp, Artificial
  Synthetic oligonucleotide
atcacactacaaagtatgtagtcaagcctcaaatctggtatccaatcacacctcta

SEQ ID NO: 331033 - DNA, 55 bp, Artificial
  Synthetic oligonucleotide
atcacagacacacgagagctccccagagccatcatgcccgcacactgggacagcc

SEQ ID NO: 331034 - DNA, 55 bp, Artificial
  Synthetic oligonucleotide
atcacagatcagacccgtgatgaaatgagtatagagagtttcttaggtaggtcta

SEQ ID NO: 331035 - DNA, 60 bp, Artificial
  Synthetic oligonucleotide
atcacagatgtaaagatcagggtagacgcaatcccacctcagctgaaccaaactatgggt

SEQ ID NO: 331036 - DNA, 59 bp, Artificial
  Synthetic oligonucleotide
atcacagcaagaatcggggtcaggaattaacaaatgctgccgaaaggtatgaagctatt

SEQ ID NO: 331037 - DNA, 55 bp, Artificial
  Synthetic oligonucleotide
atcacagcaagaatcgtggtcaagagttaaccaatgccgctgagaggtatgaggc

SEQ ID NO: 331038 - DNA, 60 bp, Artificial
  Synthetic oligonucleotide
atcacagcaagagacatttttaacttcaacgttgtgcttatattatcctattgaagcatc

SEQ ID NO: 331039 - DNA, 55 bp, Artificial
  Synthetic oligonucleotide
atcacagcagcaatgatagagtcatggggatatgaggagttaacgcaccagatcc

SEQ ID NO: 331040 - DNA, 60 bp, Artificial
  Synthetic oligonucleotide
atcacagctgatccaacaactacaccacagacagagagaatgatgcgaataaattggaaa

SEQ ID NO: 331041 - DNA, 60 bp, Artificial
  Synthetic oligonucleotide
atcacaggaaccatgcgcaggcttgcagaccaaagtctcccgccgaacttctccagcctt

SEQ ID NO: 331042 - DNA, 58 bp, Artificial
  Synthetic oligonucleotide
atcacaggactactattgacacgtgatggaggagttaacaatactaatgagacattca

SEQ ID NO: 331043 - DNA, 60 bp, Artificial
  Synthetic oligonucleotide
atcacaggactactattgacacgtgatgggggaacaaacaacacagagatattcagacct

SEQ ID NO: 331044 - DNA, 55 bp, Artificial
  Synthetic oligonucleotide
atcacagggcaaagcacgttgaagcatggattccaagagcacccagagcactacc

SEQ ID NO: 331045 - DNA, 55 bp, Artificial
  Synthetic oligonucleotide
atcacagtaaacccaacattcacgatgacgaagattcatatgcggaagaagattg

SEQ ID NO: 331046 - DNA, 55 bp, Artificial
  Synthetic oligonucleotide
atcacagttggggccggcattctggacacgggagttgcgatacactgggttgcaa

SEQ ID NO: 331047 - DNA, 55 bp, Artificial
  Synthetic oligonucleotide
atcacatagcgaacctagacgctagttctagggccactaaatgcacgctagtggt

SEQ ID NO: 331048 - DNA, 60 bp, Artificial
  Synthetic oligonucleotide
atcacatcaatatattagtaacaagggacattgactttgacaacctggctgagaatccat

SEQ ID NO: 331049 - DNA, 55 bp, Artificial
  Synthetic oligonucleotide
atcacatcaggcaacaatagcgacattctaactcgcaatgattacgagaatgctg

SEQ ID NO: 331050 - DNA, 60 bp, Artificial
  Synthetic oligonucleotide
atcacatcgctccatgtttgcttggatgagatttcatgatttgtctttgtgggaaggtag

SEQ ID NO: 331051 - DNA, 59 bp, Artificial
  Synthetic oligonucleotide
atcacatcggaatatttacgtcatcaaattttacctatgattggcaacataaaatagta

SEQ ID NO: 331052 - DNA, 60 bp, Artificial
  Synthetic oligonucleotide
atcacatggtttgtgaacgtgatgtcctgtccgttggacccgtggactgtcgaatgtgct

SEQ ID NO: 331053 - DNA, 60 bp, Artificial
  Synthetic oligonucleotide
atcacatgtaattgtttactgaggcgaagccgaggtcaacaaacatgtggtctgaggctt

SEQ ID NO: 331054 - DNA, 60 bp, Artificial
  Synthetic oligonucleotide
atcacattgccaaccaacgaggacctttttctgagcgcacctgacatgcgagagtgggca

SEQ ID NO: 331055 - DNA, 60 bp, Artificial
  Synthetic oligonucleotide
atcacattgctgcgagatggaggagtataggctttggtcaaagaatccggattacttctt

SEQ ID NO: 331056 - DNA, 60 bp, Artificial
  Synthetic oligonucleotide
atcaccaaaatgagcagggatcagggtatgcagcagaccgaaagagcacacagaatgcca

SEQ ID NO: 331057 - DNA, 57 bp, Artificial
  Synthetic oligonucleotide
atcaccaaagttgatgcagattacgggcacaacggtatggtttacccccacaattca

SEQ ID NO: 331058 - DNA, 55 bp, Artificial
  Synthetic oligonucleotide
atcaccaacattgtaggagacgcgaatccgaatcaatcaaggatcttcgatcagg

SEQ ID NO: 331059 - DNA, 55 bp, Artificial
  Synthetic oligonucleotide
atcaccaattggtctagtgatcaccaatatatcggtgatcaatttggtgcccact

SEQ ID NO: 331060 - DNA, 55 bp, Artificial
  Synthetic oligonucleotide
atcaccaattgtgtcataaagggaagagaagtccgaaaagggcagtcggctttga

SEQ ID NO: 331061 - DNA, 60 bp, Artificial
  Synthetic oligonucleotide
atcaccacacgacatagacttcggacaccacagtagatttggaccattctgtgtgaaaaa

SEQ ID NO: 331062 - DNA, 59 bp, Artificial
  Synthetic oligonucleotide
atcaccaccacgggatggccattgtagagtggaggccttatgttgactatttgttccca

SEQ ID NO: 331063 - DNA, 60 bp, Artificial
  Synthetic oligonucleotide
atcaccacgttcttcagcgcaatcctgtcagaaggtgaaatgagcatctggcaaaacggg

SEQ ID NO: 331064 - DNA, 60 bp, Artificial
  Synthetic oligonucleotide
atcaccactaacctggccaatccagcaccactggactatgtcaactttgaagcatgctcg

SEQ ID NO: 331065 - DNA, 54 bp, Artificial
  Synthetic oligonucleotide
atcaccagagccgaggcgcacttgcaagtgtgggtcccccctctcaacgttcgg

SEQ ID NO: 331066 - DNA, 53 bp, Artificial
  Synthetic oligonucleotide
atcaccagagccgaggcgcagttacaagtgtggattccccctcttaacattcg

SEQ ID NO: 331067 - DNA, 60 bp, Artificial
  Synthetic oligonucleotide
atcaccagcatacaaaatgcaattattagcggaggctctcacaaaggttcaaacagttca

SEQ ID NO: 331068 - DNA, 60 bp, Artificial
  Synthetic oligonucleotide
atcaccaggctctgaagtggttcaaggacttcgcggcagggaagagatcagctgtcagct

SEQ ID NO: 331069 - DNA, 55 bp, Artificial
  Synthetic oligonucleotide
atcaccagtagtaacacaacagatactaatggtgcttgtgcctggctggaagcac

SEQ ID NO: 331070 - DNA, 60 bp, Artificial
  Synthetic oligonucleotide
atcaccatagttgactcgaaacctatagttgagttagcaccagtggatcagactgcatat

SEQ ID NO: 331071 - DNA, 58 bp, Artificial
  Synthetic oligonucleotide
atcacccagaacataatcgctgggaagcgttttaacctggatgtctggaaccctgaga

SEQ ID NO: 331072 - DNA, 55 bp, Artificial
  Synthetic oligonucleotide
atcacccatcgtgtgggtaagcgtttctgtgttaagtctgtgtatatcttaggga

SEQ ID NO: 331073 - DNA, 60 bp, Artificial
  Synthetic oligonucleotide
atcacccatgggctttttgagccttttgtcacagagaactaggagctcttacatctcaag

SEQ ID NO: 331074 - DNA, 54 bp, Artificial
  Synthetic oligonucleotide
atcacccccaggggagcctcctacgggggcaacttcacaaacatgactttctcc

SEQ ID NO: 331075 - DNA, 55 bp, Artificial
  Synthetic oligonucleotide
atcaccccctgtcccgatcgttcccaattgttcccaatcccgtgccttacacgca

SEQ ID NO: 331076 - DNA, 57 bp, Artificial
  Synthetic oligonucleotide
atcacccggccaagtataattttcttggtcccagttagcaatactatgagagtattc

SEQ ID NO: 331077 - DNA, 59 bp, Artificial
  Synthetic oligonucleotide
atcacccttgcaatctgagaggggctgaatttgaccacgtaacgtttattacagctcac

SEQ ID NO: 331078 - DNA, 58 bp, Artificial
  Synthetic oligonucleotide
atcaccgccttattccagactcgaagaccatggtgtacgttggggcttcaggtacgca

SEQ ID NO: 331079 - DNA, 60 bp, Artificial
  Synthetic oligonucleotide
atcaccggagatgtgctgaatgggcaactcaaagatccagtttactcaaccaagctgtgc

SEQ ID NO: 331080 - DNA, 60 bp, Artificial
  Synthetic oligonucleotide
atcaccggcagagcgtgcgcatacatggtcagacacaaactgacagacggtgtgttcagc

SEQ ID NO: 331081 - DNA, 55 bp, Artificial
  Synthetic oligonucleotide
atcaccggttttatcttcgaatcactgagatccattggatggatacaaatagtcg

SEQ ID NO: 331082 - DNA, 57 bp, Artificial
  Synthetic oligonucleotide
atcaccgtgaaatttcaatccatggattatcccgagaaaaaatgcgaagtattaatc

SEQ ID NO: 331083 - DNA, 56 bp, Artificial
  Synthetic oligonucleotide
atcacctctaaagcaggtaaatgatgtcttttctctggccaaaaacctggactggg

SEQ ID NO: 331084 - DNA, 57 bp, Artificial
  Synthetic oligonucleotide
atcacctgcaaaaccagtacgtcatgccgggagggtaagtggctaagaagcattacc

SEQ ID NO: 331085 - DNA, 53 bp, Artificial
  Synthetic oligonucleotide
atcacctgcccgcgagccattcacacggtacttatgagagcgacaggcagccc

SEQ ID NO: 331086 - DNA, 60 bp, Artificial
  Synthetic oligonucleotide
atcaccttacatcgtgattgtcaccactgtaatcagcgcaagggtgtttactgtaaagca

SEQ ID NO: 331087 - DNA, 50 bp, Artificial
  Synthetic oligonucleotide
atcaccttcctggaagtggttaggcccaatatgcttcttgcaacagctgt

SEQ ID NO: 331088 - DNA, 60 bp, Artificial
  Synthetic oligonucleotide
atcacgaacaccagtgagggccagagaagcgcaaatacagatgaaggccgcagaattaaa

SEQ ID NO: 331089 - DNA, 55 bp, Artificial
  Synthetic oligonucleotide
atcacgaacgcgagattttggatctcatgcgacacagccccgacgtgcctcggga

SEQ ID NO: 331090 - DNA, 60 bp, Artificial
  Synthetic oligonucleotide
atcacgaactatatggatccgccggccctacctgcaggtttggcattcacttcaccatgg

SEQ ID NO: 331091 - DNA, 60 bp, Artificial
  Synthetic oligonucleotide
atcacgattaatggaaggataccatcaccttttgtgagtgctttaaagctggtaggcatg

SEQ ID NO: 331092 - DNA, 59 bp, Artificial
  Synthetic oligonucleotide
atcacgcaacaggaactattctaactcaacaaacatctacagttggagttagaaatcca

SEQ ID NO: 331093 - DNA, 56 bp, Artificial
  Synthetic oligonucleotide
atcacgcccgtagtggcctgattcttacttgacaatagtcacccctggggcgtggt

SEQ ID NO: 331094 - DNA, 60 bp, Artificial
  Synthetic oligonucleotide
atcacgcggggctgtgtgcgataaagctagtgaaggtactacttgaattgggagctgatc

SEQ ID NO: 331095 - DNA, 59 bp, Artificial
  Synthetic oligonucleotide
atcacgctgagattctatataattaaatgcactgggcggattaactaactgagactcca

SEQ ID NO: 331096 - DNA, 51 bp, Artificial
  Synthetic oligonucleotide
atcacggaaccaaacagcccaagccctgcttggagtgccgttagggttaag

SEQ ID NO: 331097 - DNA, 57 bp, Artificial
  Synthetic oligonucleotide
atcacggccctgtctaagccacctgtcaatccccgagagtttttgaaatctatagac

SEQ ID NO: 331098 - DNA, 55 bp, Artificial
  Synthetic oligonucleotide
atcacgggcgacaatacgacaacgtcctctgagcccgctccttctggctgctccc

SEQ ID NO: 331099 - DNA, 60 bp, Artificial
  Synthetic oligonucleotide
atcacgggtaagatcacgaagatagacaaatgggcttcgtgtcacaagaacattgaaatg

SEQ ID NO: 331100 - DNA, 60 bp, Artificial
  Synthetic oligonucleotide
atcacgtacatgaagaagttcacttgccccacctccgagctgtgcggtccacggagtgct

SEQ ID NO: 331101 - DNA, 60 bp, Artificial
  Synthetic oligonucleotide
atcacgtatgccaacatcagtggtcccgctatggacaagccctactgctggcattactcg

SEQ ID NO: 331102 - DNA, 52 bp, Artificial
  Synthetic oligonucleotide
atcacgtatggggatcgttgtttcgaaagttttacggggaagcgatttggaa

SEQ ID NO: 331103 - DNA, 56 bp, Artificial
  Synthetic oligonucleotide
atcacgtccgaagactttcaccctcagggatggtgttttgaagaatgcaaaaagaa

SEQ ID NO: 331104 - DNA, 60 bp, Artificial
  Synthetic oligonucleotide
atcacgtctacaaaatgcgtatgtagcacattcgccaatgaatttgcaggcgccacagaa

SEQ ID NO: 331105 - DNA, 50 bp, Artificial
  Synthetic oligonucleotide
atcacgtctacggacgtgaaatcggaaggttcgaggctgaacactcttcc

SEQ ID NO: 331106 - DNA, 55 bp, Artificial
  Synthetic oligonucleotide
atcacgtctcgcacatccgtccgagcaagagaagctcacatccagatgaaagcag

SEQ ID NO: 331107 - DNA, 55 bp, Artificial
  Synthetic oligonucleotide
atcacgtggttagcctcgccggttgcgtaatcgtccctagcgactgccagggcac

SEQ ID NO: 331108 - DNA, 55 bp, Artificial
  Synthetic oligonucleotide
atcactaaaggtaacgccggttgttatgggaaatggtcagttagttctcaccatc

SEQ ID NO: 331109 - DNA, 52 bp, Artificial
  Synthetic oligonucleotide
atcactaacctccaagcccagtacccgaggtcccgaccccgctcctgtttcc

SEQ ID NO: 331110 - DNA, 56 bp, Artificial
  Synthetic oligonucleotide
atcactaacgtagccaccaagtcgacccacttcctgattccggacagcaggtccca

SEQ ID NO: 331111 - DNA, 56 bp, Artificial
  Synthetic oligonucleotide
atcactaacttcgatttttcgctcttagactctccagaaacaccaaacgctaccac

SEQ ID NO: 331112 - DNA, 51 bp, Artificial
  Synthetic oligonucleotide
atcactaaggtgatcgtcgctgatgaatctaacatcatggttcaattgcat

SEQ ID NO: 331113 - DNA, 58 bp, Artificial
  Synthetic oligonucleotide
atcactaatagcaaaacttgacgctacagtgttcgctcaaatagtcaaattacgaaaa

SEQ ID NO: 331114 - DNA, 60 bp, Artificial
  Synthetic oligonucleotide
atcactaattattcaccattcagagaggacaatttgcaacgtgtgtttacagtggcttcc

SEQ ID NO: 331115 - DNA, 55 bp, Artificial
  Synthetic oligonucleotide
atcactacgtcataagtcacgtggggacggctgtacttaaacacggaagtaggcc

SEQ ID NO: 331116 - DNA, 55 bp, Artificial
  Synthetic oligonucleotide
atcactagagcgatcgcacgcgctgcgtatgtctagccgcgtttgcacgggacgc

SEQ ID NO: 331117 - DNA, 54 bp, Artificial
  Synthetic oligonucleotide
atcactagctacacgttgataagttgtaacacctcagtccttacacaggcctgt

SEQ ID NO: 331118 - DNA, 60 bp, Artificial
  Synthetic oligonucleotide
atcactatcctcacggcacttactcagttttgcctccttggtacattcacggccgctata

SEQ ID NO: 331119 - DNA, 60 bp, Artificial
  Synthetic oligonucleotide
atcactatgaaagcagtaatccaagagtaaattcagaggtacacatcccgctaggggatg

SEQ ID NO: 331120 - DNA, 55 bp, Artificial
  Synthetic oligonucleotide
atcactattgcggggcaagagccgataaaggtattaatcccctcttctcatttcg

SEQ ID NO: 331121 - DNA, 52 bp, Artificial
  Synthetic oligonucleotide
atcactcaattcattacgattcaggtttagtttagaggtgttggatccgcct

SEQ ID NO: 331122 - DNA, 54 bp, Artificial
  Synthetic oligonucleotide
atcactcacgtgggtggtcccgctcatcgtggcgcaacgaggagtctcgttggg

SEQ ID NO: 331123 - DNA, 55 bp, Artificial
  Synthetic oligonucleotide
atcactcatagaaccaatggatgtttcctcttacttgactggaatcccttccggt

SEQ ID NO: 331124 - DNA, 59 bp, Artificial
  Synthetic oligonucleotide
atcactcattggagccacggacaaaatcagtggcccctctcgtgcccccagttcgtcta

SEQ ID NO: 331125 - DNA, 60 bp, Artificial
  Synthetic oligonucleotide
atcactcattggagccacggacaacatcagtggcccctgtcatgcccccagtatgtctac

SEQ ID NO: 331126 - DNA, 56 bp, Artificial
  Synthetic oligonucleotide
atcactccaaaacgatgcatcggaaggatagacccgtagacccaagggccagggaa

SEQ ID NO: 331127 - DNA, 60 bp, Artificial
  Synthetic oligonucleotide
atcactccaaagatgcacaaagtggctagggatttcgtgcgccatttggtgcccacggcc

SEQ ID NO: 331128 - DNA, 55 bp, Artificial
  Synthetic oligonucleotide
atcactccacacatcccagctcctccaacgcccgcctttctcccgagcaccggta

SEQ ID NO: 331129 - DNA, 59 bp, Artificial
  Synthetic oligonucleotide
atcactcgatcaccgttagcgcgcgcaaagacccaggggcattccgggctggtctcgga

SEQ ID NO: 331130 - DNA, 57 bp, Artificial
  Synthetic oligonucleotide
atcactcggtgatccttcgcgcggtattgaggtacgtctccctcctccaacggacaa

SEQ ID NO: 331131 - DNA, 59 bp, Artificial
  Synthetic oligonucleotide
atcactctgggatactataactacatctaattatattttagcaaggtctgtagtgccag

SEQ ID NO: 331132 - DNA, 60 bp, Artificial
  Synthetic oligonucleotide
atcactctgtaggacctatagccatctgcactctggaaatggaagatgccagggcctacg

SEQ ID NO: 331133 - DNA, 55 bp, Artificial
  Synthetic oligonucleotide
atcactctttggaatcgtgtcagtactctattgtatccacgcagaggtgagcgtg

SEQ ID NO: 331134 - DNA, 51 bp, Artificial
  Synthetic oligonucleotide
atcactgcaacacaaagcttttttaatctcggagaaaaattcagggatccc

SEQ ID NO: 331135 - DNA, 60 bp, Artificial
  Synthetic oligonucleotide
atcactgcaatcaatcgctttcgcacaacatcgttggtgttgttttgcgcgtttcctaga

SEQ ID NO: 331136 - DNA, 60 bp, Artificial
  Synthetic oligonucleotide
atcactgcgccagatcccgagtgaagtgttttctggttataatatatctaaggagatagc

SEQ ID NO: 331137 - DNA, 51 bp, Artificial
  Synthetic oligonucleotide
atcactgctcgatgcagttattcctcgtaaagattggggtgacgttcgtta

SEQ ID NO: 331138 - DNA, 55 bp, Artificial
  Synthetic oligonucleotide
atcactgctgcctcttccagaaccctcagtgcagatacacccaccgaagcagcgc

SEQ ID NO: 331139 - DNA, 60 bp, Artificial
  Synthetic oligonucleotide
atcactggtactgaagaatcatctgcgataacacaagagcagttaactcgtgtattaaag

SEQ ID NO: 331140 - DNA, 60 bp, Artificial
  Synthetic oligonucleotide
atcactgtgccatctgggggtgtctgtgacctcatcaatacctatgcccgaggatccgat

SEQ ID NO: 331141 - DNA, 55 bp, Artificial
  Synthetic oligonucleotide
atcacttaccatcatatcagccaccgttactgcctagtggaaactcatcgcataa

SEQ ID NO: 331142 - DNA, 52 bp, Artificial
  Synthetic oligonucleotide
atcacttacgcaaggttaccgtttaagcatacacaacgacaagtgtaagcca

SEQ ID NO: 331143 - DNA, 50 bp, Artificial
  Synthetic oligonucleotide
atcacttagatgctgaggacaaatggcacaggggcacaagtgaggtagat

SEQ ID NO: 331144 - DNA, 57 bp, Artificial
  Synthetic oligonucleotide
atcacttcccattagttccgtcagccccttgccaaagagggttatttgatcatcact

SEQ ID NO: 331145 - DNA, 56 bp, Artificial
  Synthetic oligonucleotide
atcacttctcgaacttaagtgtgggtcgtcgaatttcgtcgttgactatatacggc

SEQ ID NO: 331146 - DNA, 60 bp, Artificial
  Synthetic oligonucleotide
atcacttctctccttcagctgaaaccgcatcatctgcagtcccatcactatcgctaaatc

SEQ ID NO: 331147 - DNA, 60 bp, Artificial
  Synthetic oligonucleotide
atcacttgcgatcactcacgttccgctatgacagacggtatgtacgatgaggagtttgat

SEQ ID NO: 331148 - DNA, 60 bp, Artificial
  Synthetic oligonucleotide
atcacttggccttaaatgggattctgtgagaggggatccctccattgacagctggactgt

SEQ ID NO: 331149 - DNA, 53 bp, Artificial
  Synthetic oligonucleotide
atcacttgtcctaatggggacagtactggggacaacgctacgtgtgcagaagc

SEQ ID NO: 331150 - DNA, 51 bp, Artificial
  Synthetic oligonucleotide
atcactttattaacctccttattgaagagggttacgtccggacgaacgaaa

SEQ ID NO: 331151 - DNA, 56 bp, Artificial
  Synthetic oligonucleotide
atcactttgaacattataggtctgtacttgtgtcatgtgttttccgaatccggccg

SEQ ID NO: 331152 - DNA, 57 bp, Artificial
  Synthetic oligonucleotide
atcagaaaaaacgcagagaactacagtaaatccaggtccatttgcacaaactggtta

SEQ ID NO: 331153 - DNA, 58 bp, Artificial
  Synthetic oligonucleotide
atcagaaacacaataatcaaagcttagactagtggattccccccatatcgagtgtgtt

SEQ ID NO: 331154 - DNA, 56 bp, Artificial
  Synthetic oligonucleotide
atcagaaacatggcccattggagagtcccctaaaggagtggaagaaggttccattg

SEQ ID NO: 331155 - DNA, 60 bp, Artificial
  Synthetic oligonucleotide
atcagaaagccgagttacaggcaattcagttagctttacaggattcaggatcaaaagtga

SEQ ID NO: 331156 - DNA, 60 bp, Artificial
  Synthetic oligonucleotide
atcagaaagccgctgttggatcaacctttcagctgcaatcccggaagcccacagagccac

SEQ ID NO: 331157 - DNA, 60 bp, Artificial
  Synthetic oligonucleotide
atcagaacagtggtgttacaatagaaatcgatgaagagtctttatccagaacagctgatc

SEQ ID NO: 331158 - DNA, 60 bp, Artificial
  Synthetic oligonucleotide
atcagaacgcatgagtactcaaacaaggggaaacagtacatttctgatgttacaggatgc

SEQ ID NO: 331159 - DNA, 55 bp, Artificial
  Synthetic oligonucleotide
atcagaacgttatgtgtagaggacaaggacagtagtagtggtaatcttaccacaa

SEQ ID NO: 331160 - DNA, 55 bp, Artificial
  Synthetic oligonucleotide
atcagaagactgaattacaagccatccatttagctttgcaggattcggggttaga

SEQ ID NO: 331161 - DNA, 60 bp, Artificial
  Synthetic oligonucleotide
atcagaagccaagaacctaagtgatgatctctctggctctgccactctcaccaaagtcat

SEQ ID NO: 331162 - DNA, 60 bp, Artificial
  Synthetic oligonucleotide
atcagaagcgagcgacacattgctctgtgacattggagagtcatcgtcaagcgccgaggt

SEQ ID NO: 331163 - DNA, 59 bp, Artificial
  Synthetic oligonucleotide
atcagaaggactaagatctttatttaacaccctagcagtcctctggtgcgtacatcaaa

SEQ ID NO: 331164 - DNA, 60 bp, Artificial
  Synthetic oligonucleotide
atcagaaggctgagttacaagcaattcagttagcgttgcaggattcaggatcagcagtga

SEQ ID NO: 331165 - DNA, 56 bp, Artificial
  Synthetic oligonucleotide
atcagaatcgacaccaacaatccaggacaagctaacctcaatctgagtatgtcata

SEQ ID NO: 331166 - DNA, 60 bp, Artificial
  Synthetic oligonucleotide
atcagaatgcccgaatcccaagaagctgatgcacagagttcagatcctacaatcacttga

SEQ ID NO: 331167 - DNA, 53 bp, Artificial
  Synthetic oligonucleotide
atcagaatggctttgaaaccgcatgttgtgtacaattcgagaatgaatgctga

SEQ ID NO: 331168 - DNA, 59 bp, Artificial
  Synthetic oligonucleotide
atcagaatggtcaaacgagggatcaacgatcgaaatttctggagaggtgagaatgggcg

SEQ ID NO: 331169 - DNA, 58 bp, Artificial
  Synthetic oligonucleotide
atcagacaaatcaggtcaatattccgccatctagtgaaaactagttagttgaccgccc

SEQ ID NO: 331170 - DNA, 57 bp, Artificial
  Synthetic oligonucleotide
atcagacaaatcatcacgacgagaattggtgctcttatattaacggaatattaacga

SEQ ID NO: 331171 - DNA, 55 bp, Artificial
  Synthetic oligonucleotide
atcagacaccaatagctaattccgtgacagtacgacaagatttggaacggcaact

SEQ ID NO: 331172 - DNA, 60 bp, Artificial
  Synthetic oligonucleotide
atcagacactcgcgggcacaaatgaatgaagatatagtggtatcaaaaacgtcattatgg

SEQ ID NO: 331173 - DNA, 60 bp, Artificial
  Synthetic oligonucleotide
atcagacatgagaaccgaaatcataaggataatggaaagtgcaagaccagaagatgtgtc

SEQ ID NO: 331174 - DNA, 60 bp, Artificial
  Synthetic oligonucleotide
atcagacatgatgaaggtagaagttgatgttgatgcgtagaatctccaaagcctaggatc

SEQ ID NO: 331175 - DNA, 60 bp, Artificial
  Synthetic oligonucleotide
atcagaccaaatgaaaacccagcacataaaagtcaactggtatggatggcgtgtcactct

SEQ ID NO: 331176 - DNA, 58 bp, Artificial
  Synthetic oligonucleotide
atcagacctcccaattgagaattgtaatgctgtctgtcagaccatagatggagcaata

SEQ ID NO: 331177 - DNA, 52 bp, Artificial
  Synthetic oligonucleotide
atcagacgagtgggcgaagaaaagcgctacttatgcgctgttctttgagttg

SEQ ID NO: 331178 - DNA, 55 bp, Artificial
  Synthetic oligonucleotide
atcagacgctattcctgggaggagacacactactataaaactaagtacactgacg

SEQ ID NO: 331179 - DNA, 54 bp, Artificial
  Synthetic oligonucleotide
atcagacgtgaccacctcgttagagcttgaaatcgcaaggagcttgtgtccaca

SEQ ID NO: 331180 - DNA, 60 bp, Artificial
  Synthetic oligonucleotide
atcagactacttatggctcctctaccaaccctatgtatgtttctgatactgtgacgtttg

SEQ ID NO: 331181 - DNA, 59 bp, Artificial
  Synthetic oligonucleotide
atcagacttctgagatctcacggttgttcatttcgacggccacaagaagtgagggggga

SEQ ID NO: 331182 - DNA, 60 bp, Artificial
  Synthetic oligonucleotide
atcagagacccacaagtacaatctagcatttgtgaagctgcttaccaacatgttagacct

SEQ ID NO: 331183 - DNA, 55 bp, Artificial
  Synthetic oligonucleotide
atcagagaccgaaagtggttctgttagatacagtagacttggtcaaagggcatct

SEQ ID NO: 331184 - DNA, 60 bp, Artificial
  Synthetic oligonucleotide
atcagagagctatgaatcatcaaactttgatgaagcgactatggcttgggtttttggtga

SEQ ID NO: 331185 - DNA, 60 bp, Artificial
  Synthetic oligonucleotide
atcagagcaatccgcaggcggaaggtatttacgaaatcaacgacagatcgacagcaggag

SEQ ID NO: 331186 - DNA, 56 bp, Artificial
  Synthetic oligonucleotide
atcagagcgttgaaggaacagtacggtgaaacttggcacgggaacggagagcaccc

SEQ ID NO: 331187 - DNA, 55 bp, Artificial
  Synthetic oligonucleotide
atcagaggcatgttgaggaattcgagatcacccttattgtgcagctatgtgttgt

SEQ ID NO: 331188 - DNA, 60 bp, Artificial
  Synthetic oligonucleotide
atcagaggccttattgctggcactacgcgcctcggccgtgtggtattgtacccgcgtcgc

SEQ ID NO: 331189 - DNA, 60 bp, Artificial
  Synthetic oligonucleotide
atcagagggttcgtgtacttcgtcgaaacgctggcgagaagcatctgtgagaaacttgaa

SEQ ID NO: 331190 - DNA, 59 bp, Artificial
  Synthetic oligonucleotide
atcagaggtatttctaaccagtctgtggatcatgggtatcttctcggaagaccgttaca

SEQ ID NO: 331191 - DNA, 60 bp, Artificial
  Synthetic oligonucleotide
atcagaggttatattggagctagaatgcgagggattgaagctagggctgggcgaattagg

SEQ ID NO: 331192 - DNA, 60 bp, Artificial
  Synthetic oligonucleotide
atcagagtcattttcttctgagaggcccatttgaagccaagtgggcaatccagctagaaa

SEQ ID NO: 331193 - DNA, 60 bp, Artificial
  Synthetic oligonucleotide
atcagataaaagcacaataattgatccttttgatggatcaatcgcaatggatcatcctcc

SEQ ID NO: 331194 - DNA, 60 bp, Artificial
  Synthetic oligonucleotide
atcagatagaacgtgcatcggataaaattgctcagggtgtcattattgcataccgtgaca

SEQ ID NO: 331195 - DNA, 60 bp, Artificial
  Synthetic oligonucleotide
atcagataggatacatatgcagcggggttttgggagacaatccacgccccaatgacggaa

SEQ ID NO: 331196 - DNA, 59 bp, Artificial
  Synthetic oligonucleotide
atcagatagtgccagcgaaacgttgactgtaaaacttgatgaagattccgtgactaaat

SEQ ID NO: 331197 - DNA, 60 bp, Artificial
  Synthetic oligonucleotide
atcagatcaccacttacaagcaaaacatggagttctgtcacagtactggaacattccagc

SEQ ID NO: 331198 - DNA, 60 bp, Artificial
  Synthetic oligonucleotide
atcagatcacgaacttagagcagtccgctgcctcacaagaggaccttgaagctatgtttg

SEQ ID NO: 331199 - DNA, 59 bp, Artificial
  Synthetic oligonucleotide
atcagatcacgtctgatctcactgagtacctcttttacgactccgcccttaaagctcgg

SEQ ID NO: 331200 - DNA, 60 bp, Artificial
  Synthetic oligonucleotide
atcagatcagtatacatagtgccaattcgagggggtatgtttatgcgagctctatgtttt

SEQ ID NO: 331201 - DNA, 60 bp, Artificial
  Synthetic oligonucleotide
atcagatgattgttaaagagttattgggtgttcatactcaatttgctatcaatttatcct

SEQ ID NO: 331202 - DNA, 55 bp, Artificial
  Synthetic oligonucleotide
atcagatgccaaagcacatgagacagaagcgcacaacatttgggccacacatggc

SEQ ID NO: 331203 - DNA, 55 bp, Artificial
  Synthetic oligonucleotide
atcagatgccaacacggtgtcatgggccttgtcactgccggtggtgatggagtgg

SEQ ID NO: 331204 - DNA, 60 bp, Artificial
  Synthetic oligonucleotide
atcagatgtactgatcacttttgaatcaatcatagtcgtgaattttctattatgactatt

SEQ ID NO: 331205 - DNA, 53 bp, Artificial
  Synthetic oligonucleotide
atcagatgtcgacttggggctacccgattggagcctttatgcgttgatagggg

SEQ ID NO: 331206 - DNA, 55 bp, Artificial
  Synthetic oligonucleotide
atcagattgtgttcctacgtaccgacccgcgatcacagacgacgttggtgcagga

SEQ ID NO: 331207 - DNA, 53 bp, Artificial
  Synthetic oligonucleotide
atcagcaaaatctacgatcatgaagatttctcctcataaaatgatgaacccga

SEQ ID NO: 331208 - DNA, 60 bp, Artificial
  Synthetic oligonucleotide
atcagcaaccgagattgatgggccagaaagtgatactgaatctgactcatattcagcatc

SEQ ID NO: 331209 - DNA, 55 bp, Artificial
  Synthetic oligonucleotide
atcagcaagggcttcggagagaatatcaaaacctgtggttatcggccttttccgc

SEQ ID NO: 331210 - DNA, 58 bp, Artificial
  Synthetic oligonucleotide
atcagcaaggtttggataggatgtggtcacgaagaacgcgctgggacttttactggcc

SEQ ID NO: 331211 - DNA, 55 bp, Artificial
  Synthetic oligonucleotide
atcagcacaaacctctgagctactccaggttccaaaatcaggctgatgagctacc

SEQ ID NO: 331212 - DNA, 60 bp, Artificial
  Synthetic oligonucleotide
atcagcacttatggaaatggggcacaatgctccttgggttgttaatgatctatagtgctg

SEQ ID NO: 331213 - DNA, 55 bp, Artificial
  Synthetic oligonucleotide
atcagcagatatggttagtgaggagtttctttctagtaaatacactgggcagatg

SEQ ID NO: 331214 - DNA, 60 bp, Artificial
  Synthetic oligonucleotide
atcagcagcccctaggactttggggctgctctggaagactcatctgcaccactaatgtgc

SEQ ID NO: 331215 - DNA, 51 bp, Artificial
  Synthetic oligonucleotide
atcagcatgtcgtgactggcgggataaggcaagacttcatggcttcagtag

SEQ ID NO: 331216 - DNA, 55 bp, Artificial
  Synthetic oligonucleotide
atcagccaaacatattgaagaatgctcctgttacggacacaatcagagggtaacc

SEQ ID NO: 331217 - DNA, 53 bp, Artificial
  Synthetic oligonucleotide
atcagccaacacaaccagatgtagcaacatgcaggttctacacattagactct

SEQ ID NO: 331218 - DNA, 57 bp, Artificial
  Synthetic oligonucleotide
atcagccacacctactcaaaatggagggcaatttcttccgggtcaaaggtcacagtc

SEQ ID NO: 331219 - DNA, 60 bp, Artificial
  Synthetic oligonucleotide
atcagccactcccgacattgagaggatgataaaactagggcgagcagtacaccaggtcct

SEQ ID NO: 331220 - DNA, 60 bp, Artificial
  Synthetic oligonucleotide
atcagccactgatagattcccagtaaaactgcaatctagactgcttacagagatgtattc

SEQ ID NO: 331221 - DNA, 60 bp, Artificial
  Synthetic oligonucleotide
atcagccagatgcagcggacgattgggttgctccagacatatacccaatgcgaagaccta

SEQ ID NO: 331222 - DNA, 54 bp, Artificial
  Synthetic oligonucleotide
atcagccatagagatggcaatagatgaagagccagaacaattcgaacatagagc

SEQ ID NO: 331223 - DNA, 60 bp, Artificial
  Synthetic oligonucleotide
atcagccatgttgtgattgatgcattgcttgttggattgggcctgcatttataatgggct

SEQ ID NO: 331224 - DNA, 58 bp, Artificial
  Synthetic oligonucleotide
atcagccccattctattctcacaaaccattgaggacggttagggacacccacagctta

SEQ ID NO: 331225 - DNA, 60 bp, Artificial
  Synthetic oligonucleotide
atcagccctaaatctgtcaaagcttgaacggcatcattcaggtccacttgcccctgtttg

SEQ ID NO: 331226 - DNA, 53 bp, Artificial
  Synthetic oligonucleotide
atcagccctcgactaccctgccggaaccgacgacggacccgtaaccatgacgg

SEQ ID NO: 331227 - DNA, 50 bp, Artificial
  Synthetic oligonucleotide
atcagccgttcctcttatgctaatcaactattagcttcgttggacttaag

SEQ ID NO: 331228 - DNA, 60 bp, Artificial
  Synthetic oligonucleotide
atcagcctggtcgttggtttatgcgagctgcgcaggccgtaactgctgtggtgtgtggcc

SEQ ID NO: 331229 - DNA, 52 bp, Artificial
  Synthetic oligonucleotide
atcagcgagtaagagatcggcacaaggcgttggacggccaaaccgttccggt

SEQ ID NO: 331230 - DNA, 50 bp, Artificial
  Synthetic oligonucleotide
atcagcgctccatgtctcgccccacgacaaacccagaggtgggtccgcga

SEQ ID NO: 331231 - DNA, 53 bp, Artificial
  Synthetic oligonucleotide
atcagcggacagaggcacgcacgctacctcgtatcgtacacgcacaatggcga

SEQ ID NO: 331232 - DNA, 59 bp, Artificial
  Synthetic oligonucleotide
atcagcggagtataatcgatcatctaccaacacggatgagtgtcagtctcactcaactt

SEQ ID NO: 331233 - DNA, 53 bp, Artificial
  Synthetic oligonucleotide
atcagcggattcctctaagttgcagagctaaccgccccttggcagacaagaat

SEQ ID NO: 331234 - DNA, 60 bp, Artificial
  Synthetic oligonucleotide
atcagcggcaatcgacggattagttcagggtagcgtacactcgatcatgacgggagaatc

SEQ ID NO: 331235 - DNA, 60 bp, Artificial
  Synthetic oligonucleotide
atcagcgggagtgaagactgcagtgagtaagctaagctcatctgagtctatccagaattg

SEQ ID NO: 331236 - DNA, 55 bp, Artificial
  Synthetic oligonucleotide
atcagcgtttgctttggagccttggaccttagtggacactagtacagagactttt

SEQ ID NO: 331237 - DNA, 60 bp, Artificial
  Synthetic oligonucleotide
atcagctattcccaggaatgtgtgattccaggaatgtgttcgacacagttgctaatgtaa

SEQ ID NO: 331238 - DNA, 60 bp, Artificial
  Synthetic oligonucleotide
atcagctcagactgctcaaactgatccccccggaaggagggccgcacttgaccgattgcg

SEQ ID NO: 331239 - DNA, 60 bp, Artificial
  Synthetic oligonucleotide
atcagctcgtaaaccatgatatccacccacaattagctattcgtgtactagcatcatcgg

SEQ ID NO: 331240 - DNA, 55 bp, Artificial
  Synthetic oligonucleotide
atcagctgatacagtagaacctataaacgcggttgcatttgataacatgcgcatc

SEQ ID NO: 331241 - DNA, 60 bp, Artificial
  Synthetic oligonucleotide
atcagctgatccactagcatcattgctcgagatgtgtcacagcacacaaattggcggagt

SEQ ID NO: 331242 - DNA, 60 bp, Artificial
  Synthetic oligonucleotide
atcagctgcgacaatgaagcctgttggtcttttgcactagctcaaggcgcactcctggga

SEQ ID NO: 331243 - DNA, 60 bp, Artificial
  Synthetic oligonucleotide
atcagctggtgactggcagaacaagcagtccatggttgaatttgcggagccgcatgccac

SEQ ID NO: 331244 - DNA, 60 bp, Artificial
  Synthetic oligonucleotide
atcaggaacaattcatcagcgacggcattgaactctttccgcttatctcgatttttggca

SEQ ID NO: 331245 - DNA, 60 bp, Artificial
  Synthetic oligonucleotide
atcaggaatgtactagatccggttaatcacgccacaagacacgtgattgcaagtgatgta

SEQ ID NO: 331246 - DNA, 52 bp, Artificial
  Synthetic oligonucleotide
atcaggaattggacagccacagccaccaatagtagatgctagtgtggaatct

SEQ ID NO: 331247 - DNA, 60 bp, Artificial
  Synthetic oligonucleotide
atcaggacaatatggagggtaccatggtgatatggagatgcgactaaccttcgccgtgtc

SEQ ID NO: 331248 - DNA, 55 bp, Artificial
  Synthetic oligonucleotide
atcaggacgggacaaagaggattagctactgtggaccaaaagagtcatttccaag

SEQ ID NO: 331249 - DNA, 60 bp, Artificial
  Synthetic oligonucleotide
atcaggagaatttggcgtcaagcgaacaatggagaagacgcaactgctggcctcacccat

SEQ ID NO: 331250 - DNA, 60 bp, Artificial
  Synthetic oligonucleotide
atcaggagcaagcatgccgttatctagcagcaagcctaatcagtcgtgaggatgatcgtg

SEQ ID NO: 331251 - DNA, 60 bp, Artificial
  Synthetic oligonucleotide
atcaggaggaattatcagcaattgcggggatggagcagcatgctcttttggattttgctg

SEQ ID NO: 331252 - DNA, 60 bp, Artificial
  Synthetic oligonucleotide
atcaggaggaattatcaggactcatggagatggggcatcatgctccttgggatattgatg

SEQ ID NO: 331253 - DNA, 58 bp, Artificial
  Synthetic oligonucleotide
atcaggaggtgacttttggaagtacatcgatctgaaacctttaagcatctggggcacc

SEQ ID NO: 331254 - DNA, 53 bp, Artificial
  Synthetic oligonucleotide
atcaggagtacgggttataaacccggtgcactgccatagtgctacaggactat

SEQ ID NO: 331255 - DNA, 60 bp, Artificial
  Synthetic oligonucleotide
atcaggatgtatgtgggaggggtcgagcacagactggaagccgcctgcaactggacgcgg

SEQ ID NO: 331256 - DNA, 60 bp, Artificial
  Synthetic oligonucleotide
atcaggattgccagttggcggtaatgagaagaaggccaaattggccaatgtcgtcagaaa

SEQ ID NO: 331257 - DNA, 55 bp, Artificial
  Synthetic oligonucleotide
atcaggcaacggctctctaaatagagccctcaaccggagtttgaagcatggcttc

SEQ ID NO: 331258 - DNA, 60 bp, Artificial
  Synthetic oligonucleotide
atcaggcagatctgaccgatcacaccacagtaaacacggcccagaacgtggagcgcatgc

SEQ ID NO: 331259 - DNA, 60 bp, Artificial
  Synthetic oligonucleotide
atcaggcagggcactgactgtaggctgaaatggtataaaatgatattactttactattca

SEQ ID NO: 331260 - DNA, 55 bp, Artificial
  Synthetic oligonucleotide
atcaggcagttgccgtcccagtccctgtcgtaggcgacgtagatgcggtcatccg

SEQ ID NO: 331261 - DNA, 60 bp, Artificial
  Synthetic oligonucleotide
atcaggcatacgcttgagatcagcaatcttacccagcacaatcttccgaaggttgggatc

SEQ ID NO: 331262 - DNA, 60 bp, Artificial
  Synthetic oligonucleotide
atcaggccaaacgaaaatccagcacataagagtcaactggtatggatggcttgtcattct

SEQ ID NO: 331263 - DNA, 50 bp, Artificial
  Synthetic oligonucleotide
atcaggcgcagtctgttcctaaaggggattcctgatgtttataccgcaat

SEQ ID NO: 331264 - DNA, 55 bp, Artificial
  Synthetic oligonucleotide
atcaggcgctcccgctgagtgctgaatcgaaataccacgcgcataggcgcaccgc

SEQ ID NO: 331265 - DNA, 55 bp, Artificial
  Synthetic oligonucleotide
atcagggagaatcctcatgttgaagacaagacagaagtggcagattggaaggacg

SEQ ID NO: 331266 - DNA, 52 bp, Artificial
  Synthetic oligonucleotide
atcagggagagccaccctataagtggatggggtacatattacacccagacag

SEQ ID NO: 331267 - DNA, 60 bp, Artificial
  Synthetic oligonucleotide
atcagggcacttgtgaaatcgaatggaaatgttggacattgttcatcccaggaatcagtg

SEQ ID NO: 331268 - DNA, 59 bp, Artificial
  Synthetic oligonucleotide
atcagggcaggctttgcaaccccctgaatccatttgtcagccataaagaaattgagtcc

SEQ ID NO: 331269 - DNA, 59 bp, Artificial
  Synthetic oligonucleotide
atcagggcagggtcagttggggcagaggcttgtctgatgttgaagggggtcaaggacga

SEQ ID NO: 331270 - DNA, 60 bp, Artificial
  Synthetic oligonucleotide
atcagggccctgcacgtcacgtcccgagatgtcgactgcaccatgtagttcagcgctgag

SEQ ID NO: 331271 - DNA, 60 bp, Artificial
  Synthetic oligonucleotide
atcaggggaaactccaactacaaagcagtgtcttgtgatttcaacaatggcatcacaatc

SEQ ID NO: 331272 - DNA, 57 bp, Artificial
  Synthetic oligonucleotide
atcaggggtgctcccagtttgaactcgtgtttcccagaatcctcccttcgattgtga

SEQ ID NO: 331273 - DNA, 55 bp, Artificial
  Synthetic oligonucleotide
atcagggtagttggtacctactcacaagcaccgtactgcatactggaccacctgt

SEQ ID NO: 331274 - DNA, 55 bp, Artificial
  Synthetic oligonucleotide
atcagggtatcctacctgatgggcgtgccgttacctacgagaaaatatcctccat

SEQ ID NO: 331275 - DNA, 55 bp, Artificial
  Synthetic oligonucleotide
atcagggtctggcatgtatgcaggcaaattgctgtgcgcactcataccgcctggg

SEQ ID NO: 331276 - DNA, 57 bp, Artificial
  Synthetic oligonucleotide
atcagggtttggaagcgcgtaatattgcaattgttcgtctgaacacccttaatgcgt

SEQ ID NO: 331277 - DNA, 55 bp, Artificial
  Synthetic oligonucleotide
atcaggtacaattgtacctgcggccgtgacaacgtaggcactaccagtactgaca

SEQ ID NO: 331278 - DNA, 55 bp, Artificial
  Synthetic oligonucleotide
atcaggtacggcggtccacaccgctcacacgtcccagaactacccgccaagtcct

SEQ ID NO: 331279 - DNA, 60 bp, Artificial
  Synthetic oligonucleotide
atcaggtatgcaccttgatggagatcttaaaatgtgtgctatggttagacagggttcttc

SEQ ID NO: 331280 - DNA, 58 bp, Artificial
  Synthetic oligonucleotide
atcaggtccagaactggattgcgttgttactggaggtcaaactagaggaaatcttctc

SEQ ID NO: 331281 - DNA, 58 bp, Artificial
  Synthetic oligonucleotide
atcaggttaagatcataacacactccggaagatcaggaaggtacgcggtcgaaccata

SEQ ID NO: 331282 - DNA, 57 bp, Artificial
  Synthetic oligonucleotide
atcaggttgcactcggataccctcattcgacataagtgctacccactactgttacac

SEQ ID NO: 331283 - DNA, 55 bp, Artificial
  Synthetic oligonucleotide
atcaggtttccacccttggcgcccaagtatggctgaattgtgggaccctctgcag

SEQ ID NO: 331284 - DNA, 60 bp, Artificial
  Synthetic oligonucleotide
atcagtaaattgttgtacagattcagttcctctcgaatacatcgtacaatacatgatcaa

SEQ ID NO: 331285 - DNA, 60 bp, Artificial
  Synthetic oligonucleotide
atcagtaaattgttgtacatactctgttccatctaatacatcgtacaatacgtgatcaac

SEQ ID NO: 331286 - DNA, 58 bp, Artificial
  Synthetic oligonucleotide
atcagtaacgaaagtgagtggggccagacttcgccataaggcctttatcttctcgcca

SEQ ID NO: 331287 - DNA, 52 bp, Artificial
  Synthetic oligonucleotide
atcagtaagcgccgatggcgttgtcactggttacggcactaaatggaaagac

SEQ ID NO: 331288 - DNA, 56 bp, Artificial
  Synthetic oligonucleotide
atcagtaattttgaagggactgatagatataatttgggcccaatagtcaacgtagt

SEQ ID NO: 331289 - DNA, 55 bp, Artificial
  Synthetic oligonucleotide
atcagtaccgagagtggttaacatgagacgaatagaccagacgttattatgtttt

SEQ ID NO: 331290 - DNA, 55 bp, Artificial
  Synthetic oligonucleotide
atcagtagcaagctggtctacgagcagcgcagtgagcgcgtgagcaccccgtgct

SEQ ID NO: 331291 - DNA, 54 bp, Artificial
  Synthetic oligonucleotide
atcagtaggggtagggatctttttgctccctgctcggtaggcagggggcctaaa

SEQ ID NO: 331292 - DNA, 54 bp, Artificial
  Synthetic oligonucleotide
atcagtagtgaagctgtcgaagatactattgatggtgtcgttgaagacactatt

SEQ ID NO: 331293 - DNA, 55 bp, Artificial
  Synthetic oligonucleotide
atcagtatatggatgacttgtttgtggggagtgatctaagtgcctctgaacacag

SEQ ID NO: 331294 - DNA, 55 bp, Artificial
  Synthetic oligonucleotide
atcagtatgcgtgcgccaagactggttatagaggaattgatggagaagaactggg

SEQ ID NO: 331295 - DNA, 60 bp, Artificial
  Synthetic oligonucleotide
atcagtatgggtgcacaggtctcatctcagaaagttggagctcacgaaaactcgaacaga

SEQ ID NO: 331296 - DNA, 60 bp, Artificial
  Synthetic oligonucleotide
atcagtattacatcctactataatagataacggggctatataccccacagacataagcag

SEQ ID NO: 331297 - DNA, 56 bp, Artificial
  Synthetic oligonucleotide
atcagtcataccaacggaagcggccccgaccaacgcccctactgctggcactaccc

SEQ ID NO: 331298 - DNA, 59 bp, Artificial
  Synthetic oligonucleotide
atcagtccataccgtacagggcctcgagtacttggttgtctgcgggcgaatacgagcga

SEQ ID NO: 331299 - DNA, 55 bp, Artificial
  Synthetic oligonucleotide
atcagtccattgtcgggaagtgctcagcatgtggaggagtgttcttgttatcctc

SEQ ID NO: 331300 - DNA, 59 bp, Artificial
  Synthetic oligonucleotide
atcagtcccagatctaggagtgggttcgagatgctgaaaatacccaatgcagaaaccga

SEQ ID NO: 331301 - DNA, 60 bp, Artificial
  Synthetic oligonucleotide
atcagtcccgagccagcagcgtccctgcccatctcagccgaaccggagtctgttttcgag

SEQ ID NO: 331302 - DNA, 55 bp, Artificial
  Synthetic oligonucleotide
atcagtcggtcaggacgcttatcacatgcgcccacaccaaagtcctccgagtggc

SEQ ID NO: 331303 - DNA, 53 bp, Artificial
  Synthetic oligonucleotide
atcagtctcatcttatagaggcttggagataccttgtcataacctgaggcaat

SEQ ID NO: 331304 - DNA, 60 bp, Artificial
  Synthetic oligonucleotide
atcagtgatgtcctgggaatgtcacgccacgccctgcagcgagtgcgcctaggcaagacg

SEQ ID NO: 331305 - DNA, 60 bp, Artificial
  Synthetic oligonucleotide
atcagtgcagatatcatctagcacctgcagcaaccgccaaaactttgccaggacttggca

SEQ ID NO: 331306 - DNA, 53 bp, Artificial
  Synthetic oligonucleotide
atcagtgcagctccaccaaatacctacacgcagtcggcgttcctcaaagcccc

SEQ ID NO: 331307 - DNA, 55 bp, Artificial
  Synthetic oligonucleotide
atcagtgctgggtgtgtccaagtcagaaggagcaacaggaccaaggctggtctct

SEQ ID NO: 331308 - DNA, 60 bp, Artificial
  Synthetic oligonucleotide
atcagtggacgtgcatagccgaggacccgcgttactatgcgggcacagataacatgacac

SEQ ID NO: 331309 - DNA, 51 bp, Artificial
  Synthetic oligonucleotide
atcagtggatcaacttgcgcactaacaactgtgctaccatagttatgccct

SEQ ID NO: 331310 - DNA, 60 bp, Artificial
  Synthetic oligonucleotide
atcagtggatgacaacagaagacatgttgtcagtgtggaatagggtttggatagaggaaa

SEQ ID NO: 331311 - DNA, 58 bp, Artificial
  Synthetic oligonucleotide
atcagtggcactatccgtccccttactctaggggagcgcttagtgtcacttcggtcga

SEQ ID NO: 331312 - DNA, 59 bp, Artificial
  Synthetic oligonucleotide
atcagtggcctactgtaacgttgtacctagcctgcaaaatttctgagattcctgaagaa

SEQ ID NO: 331313 - DNA, 60 bp, Artificial
  Synthetic oligonucleotide
atcagtgtaaggctgctcactgacattggttcgatagttgcaagtcgaacagagtgttgg

SEQ ID NO: 331314 - DNA, 60 bp, Artificial
  Synthetic oligonucleotide
atcagtgtatcgcatatacaatcgattacaaggatatatcgaggccgttcaattggaaga

SEQ ID NO: 331315 - DNA, 60 bp, Artificial
  Synthetic oligonucleotide
atcagtgtcacgatctggcacactaagatccgtcagttctacagcttctgcatggacgga

SEQ ID NO: 331316 - DNA, 60 bp, Artificial
  Synthetic oligonucleotide
atcagtgtcatgaagatcatatcggctccatgcaactcattctacaaaatgcccataatc

SEQ ID NO: 331317 - DNA, 60 bp, Artificial
  Synthetic oligonucleotide
atcagtgtgcagtacaatctaagccattcttatgctatagatgcagctaatcattgcggc

SEQ ID NO: 331318 - DNA, 59 bp, Artificial
  Synthetic oligonucleotide
atcagtgttattttggttgtgcgtgaaatctattgtaactgagaactccaatactctct

SEQ ID NO: 331319 - DNA, 54 bp, Artificial
  Synthetic oligonucleotide
atcagttaggacctgttaatgtaacgggttatttatggcttaaatcatctaacg

SEQ ID NO: 331320 - DNA, 60 bp, Artificial
  Synthetic oligonucleotide
atcagttccaataaagaggttgctcaaacaaatagtttctgcgatcataatgcttgtgta

SEQ ID NO: 331321 - DNA, 60 bp, Artificial
  Synthetic oligonucleotide
atcagttcggcttatactctaatcatgaaatcagtaagttcatacaatgatgtcatcagt

SEQ ID NO: 331322 - DNA, 60 bp, Artificial
  Synthetic oligonucleotide
atcagttcgggctagatctcgacgatgtacgcacagacagtggtgatacatcccttactt

SEQ ID NO: 331323 - DNA, 58 bp, Artificial
  Synthetic oligonucleotide
atcagttgagtcatggggtcgtcatttatggtctccacccgtccactcgaccttataa

SEQ ID NO: 331324 - DNA, 60 bp, Artificial
  Synthetic oligonucleotide
atcagttgctacagctgtatttcgagcgatatcaagcctttaaagtgcttgaaggacaat

SEQ ID NO: 331325 - DNA, 58 bp, Artificial
  Synthetic oligonucleotide
atcagttgtagcaccagatgaactaggattttgaggatcggtactttgtgaattaacg

SEQ ID NO: 331326 - DNA, 57 bp, Artificial
  Synthetic oligonucleotide
atcataaacggtgtgacagcgaggtctgaatgggatgtggacaaatctttgttacaa

SEQ ID NO: 331327 - DNA, 55 bp, Artificial
  Synthetic oligonucleotide
atcataaacgtgttacatagtctcgttaactcaaccgaatttgtggactggttat

SEQ ID NO: 331328 - DNA, 51 bp, Artificial
  Synthetic oligonucleotide
atcataacacatggtgcgtttatatgtgctatggagctaggagggaccact

SEQ ID NO: 331329 - DNA, 60 bp, Artificial
  Synthetic oligonucleotide
atcataagacacagcacatcacaatcggcaccgaaagtcagactcgacaaattcccaatg

SEQ ID NO: 331330 - DNA, 58 bp, Artificial
  Synthetic oligonucleotide
atcataagatagactatactgtaactacttgtaacgttaagaattgtatgcgattaaa

SEQ ID NO: 331331 - DNA, 59 bp, Artificial
  Synthetic oligonucleotide
atcataataagtgatattccctagaatggtgactatggcgttttcgaacatgggccgag

SEQ ID NO: 331332 - DNA, 60 bp, Artificial
  Synthetic oligonucleotide
atcatacaagttggtggctctaatatattagacataacagcggatccaacgactaatcca

SEQ ID NO: 331333 - DNA, 60 bp, Artificial
  Synthetic oligonucleotide
atcatacagcgggtagaatgaataacatgtttgttgcatcgcccatgggatcaccatgcg

SEQ ID NO: 331334 - DNA, 59 bp, Artificial
  Synthetic oligonucleotide
atcataccaatcctgaaaatgcagttcgtagtatttttgttgcgcctttcagaggcgga

SEQ ID NO: 331335 - DNA, 60 bp, Artificial
  Synthetic oligonucleotide
atcatacccagcagcgaattatcaatatagctattcacgtgatggtgaacaagttactgc

SEQ ID NO: 331336 - DNA, 58 bp, Artificial
  Synthetic oligonucleotide
atcatacgaaccatgttatgttcttcctcgttcgagatagaaggccttatggtccgag

SEQ ID NO: 331337 - DNA, 58 bp, Artificial
  Synthetic oligonucleotide
atcatactaacacttgtatgttctggcttgttcgggatcgtcgtccagttactactcc

SEQ ID NO: 331338 - DNA, 55 bp, Artificial
  Synthetic oligonucleotide
atcatactaattggcaatttataagagatgcattcggtataccagcactggtagc

SEQ ID NO: 331339 - DNA, 55 bp, Artificial
  Synthetic oligonucleotide
atcatactctagatgctgaggctctaacttatttatcaaacgtgacttttgggtc

SEQ ID NO: 331340 - DNA, 51 bp, Artificial
  Synthetic oligonucleotide
atcatactctcccttgaaaataggtttacaaccaccaagacaaagcgaaac

SEQ ID NO: 331341 - DNA, 60 bp, Artificial
  Synthetic oligonucleotide
atcatactgagaatgcgatgttattgtatatggcgtgtacacacgcatcgaatcctgtgt

SEQ ID NO: 331342 - DNA, 60 bp, Artificial
  Synthetic oligonucleotide
atcatacttctgctgaatggtttatacccactacaccttgtgtttatcagaagaccagtg

SEQ ID NO: 331343 - DNA, 60 bp, Artificial
  Synthetic oligonucleotide
atcatacttggcatggactaaggaccgctatattaaatagaactactctgccaaatatgt

SEQ ID NO: 331344 - DNA, 55 bp, Artificial
  Synthetic oligonucleotide
atcatagaaacgaagccggcattattatagggtcgctgtacgggtatctatatga

SEQ ID NO: 331345 - DNA, 59 bp, Artificial
  Synthetic oligonucleotide
atcatagatggtttaaccgtaagttctctaaggaattgcagaaatacacatcaatgttg

SEQ ID NO: 331346 - DNA, 60 bp, Artificial
  Synthetic oligonucleotide
atcatagcttcacaacatgctcagatagtgctagtgccaggcagaaggtttattggttac

SEQ ID NO: 331347 - DNA, 60 bp, Artificial
  Synthetic oligonucleotide
atcatagggagatcttaatgtggaagtttgacagatcactgggagaaagacatgttgcct

SEQ ID NO: 331348 - DNA, 56 bp, Artificial
  Synthetic oligonucleotide
atcatagtaacagtattggtcctggggaaaggtggaaacaatggggtctgcaacga

SEQ ID NO: 331349 - DNA, 58 bp, Artificial
  Synthetic oligonucleotide
atcatagtactccaatagtcagagactttctgatcagaaagctaatgtccattagttg

SEQ ID NO: 331350 - DNA, 54 bp, Artificial
  Synthetic oligonucleotide
atcatatattcaacgtgactgttatgaatataatgcaccgactcgtactgggga

SEQ ID NO: 331351 - DNA, 50 bp, Artificial
  Synthetic oligonucleotide
atcatatcagcagtcacaataatcattagaaacagtgcagacccacacac

SEQ ID NO: 331352 - DNA, 59 bp, Artificial
  Synthetic oligonucleotide
atcatatccaccagttcgactaactcctccgtcttgatcatctggtgagtggtgtcctt

SEQ ID NO: 331353 - DNA, 55 bp, Artificial
  Synthetic oligonucleotide
atcatatctcaaaggcattagtttgtatggtgggtggaacatcaatgctggatgg

SEQ ID NO: 331354 - DNA, 60 bp, Artificial
  Synthetic oligonucleotide
atcatatgaagtccatacatcaattgttctctccaatacattatctaatacatgatacac

SEQ ID NO: 331355 - DNA, 60 bp, Artificial
  Synthetic oligonucleotide
atcatatgaccaaagaagatcatccaggacactactgtccaatattgtccattcattcag

SEQ ID NO: 331356 - DNA, 56 bp, Artificial
  Synthetic oligonucleotide
atcatatgacgcgctcaaagcctaattattttgtggtcccctatttaaacttcgtc

SEQ ID NO: 331357 - DNA, 60 bp, Artificial
  Synthetic oligonucleotide
atcatatgcaaagcatactagagagtacgcagaattctattcacaatcaaatcaattatt

SEQ ID NO: 331358 - DNA, 60 bp, Artificial
  Synthetic oligonucleotide
atcatatggcatgtgtgcacgcttgtttagttatacgcacttaagcttctaattcaacaa

SEQ ID NO: 331359 - DNA, 60 bp, Artificial
  Synthetic oligonucleotide
atcatatgtgttacatgctttttcaagcttaaaaagccgatcaatggcagaattgtatac

SEQ ID NO: 331360 - DNA, 51 bp, Artificial
  Synthetic oligonucleotide
atcatatgttgaatggttcgaagaattacatctgactgaataccaagtaag

SEQ ID NO: 331361 - DNA, 55 bp, Artificial
  Synthetic oligonucleotide
atcatatttaaagagcgtattaatcgtcgtactcacgatggacgtactatttcgg

SEQ ID NO: 331362 - DNA, 50 bp, Artificial
  Synthetic oligonucleotide
atcatattttagctacgatcggtgtattctatacaatatttcgtataaca

SEQ ID NO: 331363 - DNA, 60 bp, Artificial
  Synthetic oligonucleotide
atcatcaaaaacttatccgctgcatgaataaagctctatattgttgtttacactccttcg

SEQ ID NO: 331364 - DNA, 60 bp, Artificial
  Synthetic oligonucleotide
atcatcaaaatctcaagatgttacagttaatccaggaccatttgctcagactggatatgc

SEQ ID NO: 331365 - DNA, 58 bp, Artificial
  Synthetic oligonucleotide
atcatcaaacgtgggatcaatgatcgaaacttctggaggggtgagaatggacgaaaaa

SEQ ID NO: 331366 - DNA, 60 bp, Artificial
  Synthetic oligonucleotide
atcatcaaatgctagtgatgagagcatgattgagacacgctgtgttcttaactcgcacag

SEQ ID NO: 331367 - DNA, 60 bp, Artificial
  Synthetic oligonucleotide
atcatcaactggtgagtccgtaaagcaacaatcagaaccacaccgtgtgcttgaagataa

SEQ ID NO: 331368 - DNA, 60 bp, Artificial
  Synthetic oligonucleotide
atcatcaagccgtcatcagattgcagatggaaaaacaatgtcaagctataccacaaacga

SEQ ID NO: 331369 - DNA, 50 bp, Artificial
  Synthetic oligonucleotide
atcatcaatttcggaaactattgttgttggacgaacaggcaggtcctcta

SEQ ID NO: 331370 - DNA, 60 bp, Artificial
  Synthetic oligonucleotide
atcatcaccgctactacagcgcaaggcacgcaagtccgctgcatgaatagcacgcaagct

SEQ ID NO: 331371 - DNA, 60 bp, Artificial
  Synthetic oligonucleotide
atcatcacgccttgcgactcaactgcaagcgatagtgatgtgacgtgctatgcagcggcg

SEQ ID NO: 331372 - DNA, 60 bp, Artificial
  Synthetic oligonucleotide
atcatcactgaccacctatgaattgttcaaaaatggattagctgacactatctatttttc

SEQ ID NO: 331373 - DNA, 57 bp, Artificial
  Synthetic oligonucleotide
atcatcactgagatcaagagttggcaccatattttcacctatacccatgctgtctga

SEQ ID NO: 331374 - DNA, 60 bp, Artificial
  Synthetic oligonucleotide
atcatcaggaagttcccaaatggaactcgcaaattggcgattggcaatctcatccttttc

SEQ ID NO: 331375 - DNA, 58 bp, Artificial
  Synthetic oligonucleotide
atcatcatctcaacccggcggtaatcaagtggcgaacgcaggcgtggcagtaccttcc

SEQ ID NO: 331376 - DNA, 57 bp, Artificial
  Synthetic oligonucleotide
atcatcatggactttcgcaaaatacctatggtagtgggccaccgtccgtttctctag

SEQ ID NO: 331377 - DNA, 52 bp, Artificial
  Synthetic oligonucleotide
atcatccaacaactgaaatccgatcagaattctatctactcttagacatttg

SEQ ID NO: 331378 - DNA, 51 bp, Artificial
  Synthetic oligonucleotide
atcatcccagtcgagagtaacttcaccaacgttagttgggaaaagaccgac

SEQ ID NO: 331379 - DNA, 60 bp, Artificial
  Synthetic oligonucleotide
atcatcccctttgcgcgtacattgaactcaatgtatggtataccccatctgttcgaatgg

SEQ ID NO: 331380 - DNA, 60 bp, Artificial
  Synthetic oligonucleotide
atcatccctcctgtccactatagaagtcccagacaagtctttaccgaatcttgtgcatga

SEQ ID NO: 331381 - DNA, 51 bp, Artificial
  Synthetic oligonucleotide
atcatccgagtccgagaaacgcagggagtctgcgtcggagtgttcatcatc

SEQ ID NO: 331382 - DNA, 60 bp, Artificial
  Synthetic oligonucleotide
atcatccgccggtccgtgtgcacttcgcttcacctctccacgtcgcatggagaccacagt

SEQ ID NO: 331383 - DNA, 60 bp, Artificial
  Synthetic oligonucleotide
atcatccgtatgcaggcatggcactcccacaccgcgaacctcaacgtgttggggaacgcg

SEQ ID NO: 331384 - DNA, 57 bp, Artificial
  Synthetic oligonucleotide
atcatccgttgaccatgactctgagtgggtttcctataagtacaccggtaccacatg

SEQ ID NO: 331385 - DNA, 59 bp, Artificial
  Synthetic oligonucleotide
atcatcctaaaggctttgtacatgctgtcaacccgtggaaggcagacggtcaaggacaa

SEQ ID NO: 331386 - DNA, 59 bp, Artificial
  Synthetic oligonucleotide
atcatcctatattcaaagaattctatgactccctgccaaatgagtcaaaaattaccttc

SEQ ID NO: 331387 - DNA, 55 bp, Artificial
  Synthetic oligonucleotide
atcatcctgatactccacatcgatcagctcgttgacggcatccatcaccacagcg

SEQ ID NO: 331388 - DNA, 60 bp, Artificial
  Synthetic oligonucleotide
atcatcctgcacttgcatccaaggtaattgctattgggtgatgactgacggtcccgctaa

SEQ ID NO: 331389 - DNA, 57 bp, Artificial
  Synthetic oligonucleotide
atcatcctgggctttcgcaaaatacctatgggagtgggcctcagtccgtttctcctg

SEQ ID NO: 331390 - DNA, 60 bp, Artificial
  Synthetic oligonucleotide
atcatcgaagtctcatacggcaaatggaatatctattagatttcctagattcagtaggat

SEQ ID NO: 331391 - DNA, 60 bp, Artificial
  Synthetic oligonucleotide
atcatcgaccccgggttctggctcagctgtggcgagctcttggaagagccgcaagatggc

SEQ ID NO: 331392 - DNA, 60 bp, Artificial
  Synthetic oligonucleotide
atcatcgatacaaggatatgacatgaccaaagcttgtttcaagggagacagagtaaatag

SEQ ID NO: 331393 - DNA, 55 bp, Artificial
  Synthetic oligonucleotide
atcatcggggtcgactgacaggactgtggaagtcccgcctcaatgaactcacccc

SEQ ID NO: 331394 - DNA, 55 bp, Artificial
  Synthetic oligonucleotide
atcatcgtctcaaatgcatcgatggatgagtgtgacgcgaagtgtcaaacacccc

SEQ ID NO: 331395 - DNA, 55 bp, Artificial
  Synthetic oligonucleotide
atcatctaaaaccaaagtgtgacagagcaaaacctggagggctcgtgaaacattg

SEQ ID NO: 331396 - DNA, 52 bp, Artificial
  Synthetic oligonucleotide
atcatctacgttggggtgctcaatatgttggcgaggactcgttgacgtaccg

SEQ ID NO: 331397 - DNA, 60 bp, Artificial
  Synthetic oligonucleotide
atcatctactcctggtgattgtgaagagccgtgtacaatgtacacatccggctcgggtac

SEQ ID NO: 331398 - DNA, 60 bp, Artificial
  Synthetic oligonucleotide
atcatctatgataacttctcccattattggttctgaccgcatcttcacatcgtctgaatt

SEQ ID NO: 331399 - DNA, 55 bp, Artificial
  Synthetic oligonucleotide
atcatctcacccagaaggagcctgaaggagcagttcattggtatgctagaccttg

SEQ ID NO: 331400 - DNA, 60 bp, Artificial
  Synthetic oligonucleotide
atcatctcacttctgtgcattgtcaaggggtttgtgaacctatggaaatgtggcattatt

SEQ ID NO: 331401 - DNA, 57 bp, Artificial
  Synthetic oligonucleotide
atcatctcccagacttgactgaatcatatttttcgaaagaggaatcagcactaagag

SEQ ID NO: 331402 - DNA, 55 bp, Artificial
  Synthetic oligonucleotide
atcatctccctcccccccgagtgtcgcccaggaatggcgggaccccactcaactg

SEQ ID NO: 331403 - DNA, 57 bp, Artificial
  Synthetic oligonucleotide
atcatctgataatgtacccgtctaggaataaacgtggatcctactttaatcaacgtc

SEQ ID NO: 331404 - DNA, 60 bp, Artificial
  Synthetic oligonucleotide
atcatctgcttgggccaacaggcccatgtacagaaagcccaggatatatcggaccgtaag

SEQ ID NO: 331405 - DNA, 60 bp, Artificial
  Synthetic oligonucleotide
atcatctgtcccctgacttcattctaaaaacagctgctggatctcatcatgttgttgaat

SEQ ID NO: 331406 - DNA, 60 bp, Artificial
  Synthetic oligonucleotide
atcatcttcgtcggcagaaatggcgcgatatgtggtatgctggatgttcaccatcaacaa

SEQ ID NO: 331407 - DNA, 55 bp, Artificial
  Synthetic oligonucleotide
atcatgaaaagggcctgctcgctcgttgtaacgtatctggtgattcaatctcctc

SEQ ID NO: 331408 - DNA, 60 bp, Artificial
  Synthetic oligonucleotide
atcatgaaaattcacaaggatctggttatgccgcagataaagaaagcactcagaaagcaa

SEQ ID NO: 331409 - DNA, 60 bp, Artificial
  Synthetic oligonucleotide
atcatgaagctagaggaaaggacaggaatcagctgggatctaggagtagaagatgcctct

SEQ ID NO: 331410 - DNA, 55 bp, Artificial
  Synthetic oligonucleotide
atcatgacaagtctatcactgattatctgactcacaaccctggtgtcgggtgtgt

SEQ ID NO: 331411 - DNA, 60 bp, Artificial
  Synthetic oligonucleotide
atcatgacatggaacatgaggtctgttgatcccgtggctgtcagaatattccccgcaaag

SEQ ID NO: 331412 - DNA, 59 bp, Artificial
  Synthetic oligonucleotide
atcatgacatttacacggtggtgggtgggaacacagtgactaccgttcatgagaagccg

SEQ ID NO: 331413 - DNA, 55 bp, Artificial
  Synthetic oligonucleotide
atcatgacgactggttttgcatttcactactatgcaaacaatcctgagcagttac

SEQ ID NO: 331414 - DNA, 59 bp, Artificial
  Synthetic oligonucleotide
atcatgagaaggagagacatgttaccgtgtcaagttggtataaacccatacgggatgga

SEQ ID NO: 331415 - DNA, 60 bp, Artificial
  Synthetic oligonucleotide
atcatgaggagttggttgcagctcaagccaacaaaggtgttattttacacagagcggagg

SEQ ID NO: 331416 - DNA, 59 bp, Artificial
  Synthetic oligonucleotide
atcatgaggcacatcttggagagaccggaccctaccgacgtcttccagaataaggcaaa

SEQ ID NO: 331417 - DNA, 60 bp, Artificial
  Synthetic oligonucleotide
atcatgaggttgatttacgattcgccgagaaggttagcgctcaatcagctgagatgagga

SEQ ID NO: 331418 - DNA, 55 bp, Artificial
  Synthetic oligonucleotide
atcatgagtccaacaatgaagcttacattgcctctcttgatgaagctgttgccta

SEQ ID NO: 331419 - DNA, 51 bp, Artificial
  Synthetic oligonucleotide
atcatgagtggatttgggctcccacattctattaccaagaaggtgaggcgt

SEQ ID NO: 331420 - DNA, 50 bp, Artificial
  Synthetic oligonucleotide
atcatgatgcctcatcaggggtaagctcagcatgtccataccttgggagg

SEQ ID NO: 331421 - DNA, 60 bp, Artificial
  Synthetic oligonucleotide
atcatgcaaatagcgatcgcctccttactgtaggccacccatattttgatgttagagaca

SEQ ID NO: 331422 - DNA, 58 bp, Artificial
  Synthetic oligonucleotide
atcatgcaaggctaaggcggttaagaagttgtggtctgattcttataaagccgcttta

SEQ ID NO: 331423 - DNA, 60 bp, Artificial
  Synthetic oligonucleotide
atcatgcaccatttctcagatgcagctgaagcatacattgagatgagaaattccgagaga

SEQ ID NO: 331424 - DNA, 60 bp, Artificial
  Synthetic oligonucleotide
atcatgcagaagttccaattggttctaggtttgtgtggaaggtcccaccaagaatgctca

SEQ ID NO: 331425 - DNA, 58 bp, Artificial
  Synthetic oligonucleotide
atcatgccttattaggaaggcaacagacgggtcttacatggattggacgaactcctta

SEQ ID NO: 331426 - DNA, 60 bp, Artificial
  Synthetic oligonucleotide
atcatgcgatgcagagttttatttattaccaagatcgcaaactgatttatgcgaccagta

SEQ ID NO: 331427 - DNA, 50 bp, Artificial
  Synthetic oligonucleotide
atcatgcgtcgtgtacgtcacaaattgccatgcgaccaaatatcgtagag

SEQ ID NO: 331428 - DNA, 60 bp, Artificial
  Synthetic oligonucleotide
atcatgcttcttgctcgttgcactacttttagcctttattttgtgggcttgtcagaatgg

SEQ ID NO: 331429 - DNA, 56 bp, Artificial
  Synthetic oligonucleotide
atcatggacagatttgtgaaggttagcgccttgagtccaatacacgtgattgacct

SEQ ID NO: 331430 - DNA, 60 bp, Artificial
  Synthetic oligonucleotide
atcatggacttcggcaaagctctgtgtaccaaagcccaataccaaaggctgatatagatg

SEQ ID NO: 331431 - DNA, 56 bp, Artificial
  Synthetic oligonucleotide
atcatggagatggtcaacgacttacataatgaccaagaacagttcggagcacaggt

SEQ ID NO: 331432 - DNA, 60 bp, Artificial
  Synthetic oligonucleotide
atcatggaggtcgttttcccaaatgaagtgggagccaggatactaacatcagaatcacaa

SEQ ID NO: 331433 - DNA, 55 bp, Artificial
  Synthetic oligonucleotide
atcatggattacgccgcgctttccccgcacgtcggtagttgggctctgcgagacg

SEQ ID NO: 331434 - DNA, 60 bp, Artificial
  Synthetic oligonucleotide
atcatggatttagcgcattcacatagctttatcaatatccgagatatgatgaggtggata

SEQ ID NO: 331435 - DNA, 60 bp, Artificial
  Synthetic oligonucleotide
atcatggcccaggctagctggaagaaatccatgagtaatgagagtgccgaagaaatatct

SEQ ID NO: 331436 - DNA, 50 bp, Artificial
  Synthetic oligonucleotide
atcatggctaatgcaaacctgtgttacctatcaagatgtagaattccgag

SEQ ID NO: 331437 - DNA, 51 bp, Artificial
  Synthetic oligonucleotide
atcatgggcttgtgctgaattatatattgcattactccgtaattatgatgc

SEQ ID NO: 331438 - DNA, 50 bp, Artificial
  Synthetic oligonucleotide
atcatgggtgcgcaagtgtcaacacagaagagtggctcacatgaaaacca

SEQ ID NO: 331439 - DNA, 55 bp, Artificial
  Synthetic oligonucleotide
atcatggtcctacatagtggagaaaccaaaccccaccaatgggatatgttacccg

SEQ ID NO: 331440 - DNA, 60 bp, Artificial
  Synthetic oligonucleotide
atcatggtctcaatctaatgagaaagaagctctggcaaaaaatatggatgtatctaaagg

SEQ ID NO: 331441 - DNA, 60 bp, Artificial
  Synthetic oligonucleotide
atcatggtgcgcctctcccctgagccagacttggctcgagtagtgatggatgacctccta

SEQ ID NO: 331442 - DNA, 60 bp, Artificial
  Synthetic oligonucleotide
atcatggttagactctggttagctctggattgtgtcgtgggacatagctgggttagtgct

SEQ ID NO: 331443 - DNA, 59 bp, Artificial
  Synthetic oligonucleotide
atcatggttttgctctcccgtatttcggtgcaacagccagcacctttctccaggcgagg

SEQ ID NO: 331444 - DNA, 55 bp, Artificial
  Synthetic oligonucleotide
atcatgtagaataaggcaaattgtaaactcctggatgagagtggggaaaggaatc

SEQ ID NO: 331445 - DNA, 55 bp, Artificial
  Synthetic oligonucleotide
atcatgtgcaagactggaagacgcggtagttacgtattgatgagtaagtggtccc

SEQ ID NO: 331446 - DNA, 58 bp, Artificial
  Synthetic oligonucleotide
atcatgtggcacgctaagaacgtgaccgccgataaggctcgctttcttaacggagccg

SEQ ID NO: 331447 - DNA, 60 bp, Artificial
  Synthetic oligonucleotide
atcatgtggtctacaatcatcaagaggctggcaagtacgagaatcacacggagaacgctc

SEQ ID NO: 331448 - DNA, 56 bp, Artificial
  Synthetic oligonucleotide
atcatgttcatgcgactgactttactcgtaaccgcgttacgtgtcaagggtcaatt

SEQ ID NO: 331449 - DNA, 60 bp, Artificial
  Synthetic oligonucleotide
atcatgttcatgcgactgactttactcgtaaccggattacgagtcaagcccgagttctgc

SEQ ID NO: 331450 - DNA, 60 bp, Artificial
  Synthetic oligonucleotide
atcatgttccttctgctggtatgatggcaacagatccttctgttgctccagattctggca

SEQ ID NO: 331451 - DNA, 60 bp, Artificial
  Synthetic oligonucleotide
atcatgttgtagcctgccagaagtggagacgctagttgcaaggcaggaggaggcctccaa

SEQ ID NO: 331452 - DNA, 56 bp, Artificial
  Synthetic oligonucleotide
atcatgtttgaggaggtgtttcgcacggaatttggtttccacccaaacgctgagtg

SEQ ID NO: 331453 - DNA, 52 bp, Artificial
  Synthetic oligonucleotide
atcatgtttggagatttcactgtgcagctgaagcacagcacagtaacggaaa

SEQ ID NO: 331454 - DNA, 60 bp, Artificial
  Synthetic oligonucleotide
atcattaaatctgccttcgatgtcaatccatgtaggggcattggggtcaatccctcccat

SEQ ID NO: 331455 - DNA, 54 bp, Artificial
  Synthetic oligonucleotide
atcattaagactctttccttctgaacgcgtgttaaccacgaactctacgtttaa

SEQ ID NO: 331456 - DNA, 57 bp, Artificial
  Synthetic oligonucleotide
atcattaaggccgcaggtagcactatagagttcagaccagattattctagggcaaag

SEQ ID NO: 331457 - DNA, 55 bp, Artificial
  Synthetic oligonucleotide
atcattacagcgagccagcaggcccattctgggaaggatttcgaaagggcttcac

SEQ ID NO: 331458 - DNA, 58 bp, Artificial
  Synthetic oligonucleotide
atcattacttccagacgcgacattatttacacactctttggaaggcggggatcttata

SEQ ID NO: 331459 - DNA, 57 bp, Artificial
  Synthetic oligonucleotide
atcattagcaaatcgtgctattacgcgaaggtgatacccttcattactgcaaacgtt

SEQ ID NO: 331460 - DNA, 56 bp, Artificial
  Synthetic oligonucleotide
atcattaggaggatagagctcttttccatcgtcaaagacgacgatggaggaaacta

SEQ ID NO: 331461 - DNA, 55 bp, Artificial
  Synthetic oligonucleotide
atcattaggtaagcctaataatcagctggtgaccgtgctagagctaaatcgtatt

SEQ ID NO: 331462 - DNA, 54 bp, Artificial
  Synthetic oligonucleotide
atcattagtaggtcgagcgtaggctgcggtaacccccttggtagttcagggtta

SEQ ID NO: 331463 - DNA, 60 bp, Artificial
  Synthetic oligonucleotide
atcattagtcatacctgctgatagttatacttggatacataaccttgcccaagatatgtt

SEQ ID NO: 331464 - DNA, 56 bp, Artificial
  Synthetic oligonucleotide
atcattattacgagcaataaggcccccgagacctggtacaaggaggactgtgaccc

SEQ ID NO: 331465 - DNA, 59 bp, Artificial
  Synthetic oligonucleotide
atcattattatacacttttggacttaaatctaaatggccacacagataattatgtggtc

SEQ ID NO: 331466 - DNA, 53 bp, Artificial
  Synthetic oligonucleotide
atcattcagacatatcgttatgcaatcgcatgatagggtgttacgagtaagta

SEQ ID NO: 331467 - DNA, 60 bp, Artificial
  Synthetic oligonucleotide
atcattcaggtagactattgttttgctttgttcctgggaatgagttaatagatgtcactg

SEQ ID NO: 331468 - DNA, 60 bp, Artificial
  Synthetic oligonucleotide
atcattccaaagtacgatgtctctcacataccgtagcccgattgaagaagcactcacgtc

SEQ ID NO: 331469 - DNA, 60 bp, Artificial
  Synthetic oligonucleotide
atcattcgaaagattcgagatatttcccaagacaagctcgtggcccaatcatgaaacaac

SEQ ID NO: 331470 - DNA, 56 bp, Artificial
  Synthetic oligonucleotide
atcattcgagaggtttgaaatattccctaaggaaaactcatggcccaaacacagcg

SEQ ID NO: 331471 - DNA, 55 bp, Artificial
  Synthetic oligonucleotide
atcattcgctcctatcgttagtggctttgacccaaatcttcatggatgcccgacc

SEQ ID NO: 331472 - DNA, 60 bp, Artificial
  Synthetic oligonucleotide
atcattctcgaggaaggttctgggagaagatgggctcaagctgatgggatatgtctacca

SEQ ID NO: 331473 - DNA, 60 bp, Artificial
  Synthetic oligonucleotide
atcattgaaagactccatggtttggctgcgttctcgctccatagttactctcctactgag

SEQ ID NO: 331474 - DNA, 55 bp, Artificial
  Synthetic oligonucleotide
atcattgaacgcgtacgtaacgatgagattgagagctatagacccgaatcttcgt

SEQ ID NO: 331475 - DNA, 51 bp, Artificial
  Synthetic oligonucleotide
atcattgatagccgctgaagctcagctcggagatgtttataatacaatgag

SEQ ID NO: 331476 - DNA, 55 bp, Artificial
  Synthetic oligonucleotide
atcattgatatagattgttgtggtcgcgcattcggcaaagctcctttagatcagg

SEQ ID NO: 331477 - DNA, 56 bp, Artificial
  Synthetic oligonucleotide
atcattgcacgcccttatctgcacgattttgaacacgtgtattccactaacagact

SEQ ID NO: 331478 - DNA, 60 bp, Artificial
  Synthetic oligonucleotide
atcattgcacgccgttatccacccgatttgcaacacgtgcctcgcactaacagactttat

SEQ ID NO: 331479 - DNA, 57 bp, Artificial
  Synthetic oligonucleotide
atcattgccacaagaacacattgtacaacgaatcaaacaatgtttccgaaaactccc

SEQ ID NO: 331480 - DNA, 52 bp, Artificial
  Synthetic oligonucleotide
atcattgccggaagacattgatgaagttgtgtgtgaagggttccactcatac

SEQ ID NO: 331481 - DNA, 60 bp, Artificial
  Synthetic oligonucleotide
atcattggaagggaaggtgcaggcactgtaaagcaatagaatgattgggaaacaagctac

SEQ ID NO: 331482 - DNA, 59 bp, Artificial
  Synthetic oligonucleotide
atcattggctcagatggagtcgagagacatttggaagtcaacctgagcgagaacaactt

SEQ ID NO: 331483 - DNA, 52 bp, Artificial
  Synthetic oligonucleotide
atcattgggtcacggtgcctctgctgctaagaagacatgcgccgctaactat

SEQ ID NO: 331484 - DNA, 51 bp, Artificial
  Synthetic oligonucleotide
atcattggtttactcttcatacggtccccacaccttggcggatacatggac

SEQ ID NO: 331485 - DNA, 58 bp, Artificial
  Synthetic oligonucleotide
atcattgttcctccatctggttggaatacccacccatcgacacctcaaaggcgaagcc

SEQ ID NO: 331486 - DNA, 60 bp, Artificial
  Synthetic oligonucleotide
atcatttaagcccatgaactatcagtatacgtatacgcgtgacggagaggaaataactgc

SEQ ID NO: 331487 - DNA, 55 bp, Artificial
  Synthetic oligonucleotide
atcatttagaataacagcagtggagcccactcccctgtcaccttgggtgatgggg

SEQ ID NO: 331488 - DNA, 60 bp, Artificial
  Synthetic oligonucleotide
atcatttagtgatcgcgcaattagagtcttatgcgacgatcacaccgatgagttggcctc

SEQ ID NO: 331489 - DNA, 51 bp, Artificial
  Synthetic oligonucleotide
atcatttcagacccgcctcccagtcaggagggaacccgacaggcccggaga

SEQ ID NO: 331490 - DNA, 60 bp, Artificial
  Synthetic oligonucleotide
atcatttcctaggcagagctggatatacagtgcatgtgcaatgcaacgcaagcaaatttc

SEQ ID NO: 331491 - DNA, 60 bp, Artificial
  Synthetic oligonucleotide
atcatttcctattgacattttggccgcgcagcggaacacacactgaaacacagaaggagg

SEQ ID NO: 331492 - DNA, 60 bp, Artificial
  Synthetic oligonucleotide
atcatttcctgggtagaagtggatatacagttcatgtgcagtgtaatgctagtaaattcc

SEQ ID NO: 331493 - DNA, 60 bp, Artificial
  Synthetic oligonucleotide
atcatttgaaaggtttgagatattccccaagacaagttcatggcccaatcatgactcgaa

SEQ ID NO: 331494 - DNA, 55 bp, Artificial
  Synthetic oligonucleotide
atcatttgatagaatacaaacctaaccagacagatttgttcaatacgagagcaac

SEQ ID NO: 331495 - DNA, 55 bp, Artificial
  Synthetic oligonucleotide
atcattttgaggaggccgacattgcttatggatatgcaaaactagccccagaaga

SEQ ID NO: 331496 - DNA, 60 bp, Artificial
  Synthetic oligonucleotide
atccaaaaatcgaaacaaataagtttgctgcgatatgcacgcatttggaagtgtgtttca

SEQ ID NO: 331497 - DNA, 57 bp, Artificial
  Synthetic oligonucleotide
atccaaaatggaagattttgtgcgacaatgcttcaatccaatgattgtcgagcttgc

SEQ ID NO: 331498 - DNA, 50 bp, Artificial
  Synthetic oligonucleotide
atccaaactcagttacgactgaaataactgatcccgattggacaaataca

SEQ ID NO: 331499 - DNA, 53 bp, Artificial
  Synthetic oligonucleotide
atccaaactggttgatcatgagtgatgaatccttcacatcccacacctttacg

SEQ ID NO: 331500 - DNA, 55 bp, Artificial
  Synthetic oligonucleotide
atccaaagggtcaccaggttctcaccatcaaccactcaggggaatgcctcaccca

SEQ ID NO: 331501 - DNA, 55 bp, Artificial
  Synthetic oligonucleotide
atccaaagtttgagaagcagttgggacaagtaatgctcctagtcctctgcgtgac

SEQ ID NO: 331502 - DNA, 60 bp, Artificial
  Synthetic oligonucleotide
atccaaatcagaagataataacaatcggctccgtctctctaaccattgcaacagtatgtt

SEQ ID NO: 331503 - DNA, 58 bp, Artificial
  Synthetic oligonucleotide
atccaaatgtacaccaatgtagacaaagacctcgtgggctggcccgctcctcagggta

SEQ ID NO: 331504 - DNA, 51 bp, Artificial
  Synthetic oligonucleotide
atccaaattttcgaacattgtcaagaatgaaggacaaggtgactcggacat

SEQ ID NO: 331505 - DNA, 60 bp, Artificial
  Synthetic oligonucleotide
atccaacagaggaacaagctgtggatatatgcaaggcagcaatgggcttgagaattagct

SEQ ID NO: 331506 - DNA, 57 bp, Artificial
  Synthetic oligonucleotide
atccaacaggcccgagaccttctgggtcatcgggaatagatcccactccgcccatcc

SEQ ID NO: 331507 - DNA, 60 bp, Artificial
  Synthetic oligonucleotide
atccaacatcaccagataacattgagtccccgaatgcaccctgggtatttgcctgtgcac

SEQ ID NO: 331508 - DNA, 51 bp, Artificial
  Synthetic oligonucleotide
atccaacattgccagactcacttgaaaatccacatgcagcttgggtctttg

SEQ ID NO: 331509 - DNA, 57 bp, Artificial
  Synthetic oligonucleotide
atccaaccacactcgctctatacggagggcggcataattaggaaaatgatctttacc

SEQ ID NO: 331510 - DNA, 60 bp, Artificial
  Synthetic oligonucleotide
atccaaccactagttgcttgcatcagttaatacgcgtcatttacaagcctcatgaacttc

SEQ ID NO: 331511 - DNA, 53 bp, Artificial
  Synthetic oligonucleotide
atccaaccgcatccaggtgcaaccccaccctacttaagcatatcctggacatt

SEQ ID NO: 331512 - DNA, 56 bp, Artificial
  Synthetic oligonucleotide
atccaacctaaaacgttagaggctatattggatgcgccaggagggaatgtaacgga

SEQ ID NO: 331513 - DNA, 55 bp, Artificial
  Synthetic oligonucleotide
atccaacctcttctacacaaaacataggcgattgatatcacattttccaccaacg

SEQ ID NO: 331514 - DNA, 54 bp, Artificial
  Synthetic oligonucleotide
atccaacctttgtttctagcaggaagtgtattaaagggtacacatacacttcgt

SEQ ID NO: 331515 - DNA, 55 bp, Artificial
  Synthetic oligonucleotide
atccaacggcgtaccacaaggcaccgctcactcggtttgcactgccttacacggc

SEQ ID NO: 331516 - DNA, 52 bp, Artificial
  Synthetic oligonucleotide
atccaacgttaatactacgttaagtattggtgcttccagggctaaaccgtgg

SEQ ID NO: 331517 - DNA, 59 bp, Artificial
  Synthetic oligonucleotide
atccaactcaaccgcaagtcctatgacacagaatacccaaaatgtaagaatggagactg

SEQ ID NO: 331518 - DNA, 57 bp, Artificial
  Synthetic oligonucleotide
atccaagaataagttcagaggtacacattccactaggggaagctagactggaaatag

SEQ ID NO: 331519 - DNA, 60 bp, Artificial
  Synthetic oligonucleotide
atccaagaatggttaatcgattgctcattagagaaattcacgctgatgtcaaaaatttac

SEQ ID NO: 331520 - DNA, 55 bp, Artificial
  Synthetic oligonucleotide
atccaagaattggattgctggcactatcatcaatactgtgtaacctctacaagag

SEQ ID NO: 331521 - DNA, 59 bp, Artificial
  Synthetic oligonucleotide
atccaagacaagcttcgggatcttggctttggtgtcctaacaccagcccgaggcagcaa

SEQ ID NO: 331522 - DNA, 60 bp, Artificial
  Synthetic oligonucleotide
atccaagcagacgaaatctgcattggatacctgagcaacaactcaacagagaaagtggac

SEQ ID NO: 331523 - DNA, 60 bp, Artificial
  Synthetic oligonucleotide
atccaagcatctactgtggccatgatacaactgcattcactaggatcacagattcccctt

SEQ ID NO: 331524 - DNA, 60 bp, Artificial
  Synthetic oligonucleotide
atccaagggtacatctcgcgatcttgtcggtgctaatttcgtcacagttgctgataaagt

SEQ ID NO: 331525 - DNA, 60 bp, Artificial
  Synthetic oligonucleotide
atccaagtccactgacaatggctatgattgttatgcccagaatgcacgccagagggaaaa

SEQ ID NO: 331526 - DNA, 60 bp, Artificial
  Synthetic oligonucleotide
atccaataataagaaacaggatagagcagttaattctgcaatgtagattgtaagtagtgt

SEQ ID NO: 331527 - DNA, 60 bp, Artificial
  Synthetic oligonucleotide
atccaatacaacttgacattctcagatgcacaaagtgctcagagccagtgtagaaccttc

SEQ ID NO: 331528 - DNA, 59 bp, Artificial
  Synthetic oligonucleotide
atccaatagtggcctggataccccgttcgttactctgcctggttgagcgcgtcattcgc

SEQ ID NO: 331529 - DNA, 60 bp, Artificial
  Synthetic oligonucleotide
atccaatcatttgatcaacgtgactcagtaacccatacaggtaattcgagatgtctaagt

SEQ ID NO: 331530 - DNA, 60 bp, Artificial
  Synthetic oligonucleotide
atccaatctgagactgcactaaggacttgcatgaaagcagcctcatatagttcaaccaat

SEQ ID NO: 331531 - DNA, 57 bp, Artificial
  Synthetic oligonucleotide
atccaatgagcgtgcgtctgggaagcttagttaacagttccagacgtggggaccaag

SEQ ID NO: 331532 - DNA, 51 bp, Artificial
  Synthetic oligonucleotide
atccaatgcaagatgcaaagctacggtatttgcacagtagaatacatgtgt

SEQ ID NO: 331533 - DNA, 60 bp, Artificial
  Synthetic oligonucleotide
atccaatggggcaggctctttggtcctgcccgtcagacattacacgatggggcgacagtc

SEQ ID NO: 331534 - DNA, 53 bp, Artificial
  Synthetic oligonucleotide
atccaatgggtttgcggtcgtaacgcgcaagtgcgggacgggaccaactactt

SEQ ID NO: 331535 - DNA, 59 bp, Artificial
  Synthetic oligonucleotide
atccaatgttggcagtgtgtgggcgttgggtggtcttcaacgtgcgttactcggaatgc

SEQ ID NO: 331536 - DNA, 53 bp, Artificial
  Synthetic oligonucleotide
atccaattacgcccagtatcgggttgtccgagccacaatccgttaccgacctt

SEQ ID NO: 331537 - DNA, 56 bp, Artificial
  Synthetic oligonucleotide
atccaattgtcagggatcccgggacatttcacacataacggatggaagggaatggt

SEQ ID NO: 331538 - DNA, 58 bp, Artificial
  Synthetic oligonucleotide
atccaatttgactggtgtcgtcttcaattacaacaatagcctgtcagccctggcgaac

SEQ ID NO: 331539 - DNA, 55 bp, Artificial
  Synthetic oligonucleotide
atccacaagtcgccttgtttgtggtttggaacctacggaccagaaatcaatatcg

SEQ ID NO: 331540 - DNA, 51 bp, Artificial
  Synthetic oligonucleotide
atccacaattgctaataccattgaccctattatgatctcaacgattgtgtg

SEQ ID NO: 331541 - DNA, 60 bp, Artificial
  Synthetic oligonucleotide
atccacacaaatgctcttctgacaccttatgtgtgattgtgagctctcatcctgctttac

SEQ ID NO: 331542 - DNA, 58 bp, Artificial
  Synthetic oligonucleotide
atccacacttgtgggaatggggaactttgatccttgggttggtgataatctgtagtgc

SEQ ID NO: 331543 - DNA, 57 bp, Artificial
  Synthetic oligonucleotide
atccacagactgtgttcttagttggagtacactgttcctttacgactttgcggccac

SEQ ID NO: 331544 - DNA, 55 bp, Artificial
  Synthetic oligonucleotide
atccacagctgttggcaacatcatggtatcagtatgacaaatgtcacacttaagc

SEQ ID NO: 331545 - DNA, 60 bp, Artificial
  Synthetic oligonucleotide
atccacatttgctgcctctctgctggcaataaagcctcggatcgagaaccacttcgtgct

SEQ ID NO: 331546 - DNA, 50 bp, Artificial
  Synthetic oligonucleotide
atccaccaccctttggaggttaatgtaataataaacaggcactgaaagtg

SEQ ID NO: 331547 - DNA, 60 bp, Artificial
  Synthetic oligonucleotide
atccaccaggataatgcggatagactggcaaaggcctggactcgtccagagaaccgccaa

SEQ ID NO: 331548 - DNA, 60 bp, Artificial
  Synthetic oligonucleotide
atccaccatgagagagctgatttgcagttacttcaaggtcgatcatgcggatgggttgaa

SEQ ID NO: 331549 - DNA, 53 bp, Artificial
  Synthetic oligonucleotide
atccacccaaacccgaccctgtgtctattcgaagtgtcccgacgtcccgtgct

SEQ ID NO: 331550 - DNA, 55 bp, Artificial
  Synthetic oligonucleotide
atccacccacaattagctattcgtgtactagcatcatcggatacgcctatcctgc

SEQ ID NO: 331551 - DNA, 54 bp, Artificial
  Synthetic oligonucleotide
atccaccgtgtgttggtggcgtggctgtcccctttggggaaggtttctactcgc

SEQ ID NO: 331552 - DNA, 59 bp, Artificial
  Synthetic oligonucleotide
atccacctagttgtgatcttcagagtgctcatgggaatccttgcatgaaagagaaactc

SEQ ID NO: 331553 - DNA, 57 bp, Artificial
  Synthetic oligonucleotide
atccacctccatcggaacaccgtggacgtgcaatacctgtacggtatagggtcagcg

SEQ ID NO: 331554 - DNA, 53 bp, Artificial
  Synthetic oligonucleotide
atccacgcaaaaagcgtacgacaggaaggataagtccccttctaaaggcaaaa

SEQ ID NO: 331555 - DNA, 55 bp, Artificial
  Synthetic oligonucleotide
atccacgcccacaccaccagtgacccctggcacccaccgggccccttggggctga

SEQ ID NO: 331556 - DNA, 56 bp, Artificial
  Synthetic oligonucleotide
atccacgccgtaccctccgacctacttacagtgctagacatcaccgttggaaagga

SEQ ID NO: 331557 - DNA, 55 bp, Artificial
  Synthetic oligonucleotide
atccacgcgtgggatttcagacgtggcttctttggcccaaaagctattaaaagaa

SEQ ID NO: 331558 - DNA, 55 bp, Artificial
  Synthetic oligonucleotide
atccacggaggagctgatatttggtcctggtgagaggccagccgtcgcttgtgcc

SEQ ID NO: 331559 - DNA, 54 bp, Artificial
  Synthetic oligonucleotide
atccacgtaatcaagtatttaaacgatcatcggcggttaaacgtaacgatggta

SEQ ID NO: 331560 - DNA, 57 bp, Artificial
  Synthetic oligonucleotide
atccacgtcacttgcgtgttaagacgggaggtaagatggctaatgcactaactaacg

SEQ ID NO: 331561 - DNA, 54 bp, Artificial
  Synthetic oligonucleotide
atccacgttgggactcgccagtttgttcaatcctggctccaagcaggatgtcca

SEQ ID NO: 331562 - DNA, 60 bp, Artificial
  Synthetic oligonucleotide
atccactacttggagttatcacttcttggaaacaggatgaatatgatagtaccacatgga

SEQ ID NO: 331563 - DNA, 60 bp, Artificial
  Synthetic oligonucleotide
atccactagcgatacttttaacggaaggacgatagagctgagccgtggtcatcgcgtaca

SEQ ID NO: 331564 - DNA, 58 bp, Artificial
  Synthetic oligonucleotide
atccactatatgacacgtggaacgtaggtggccgaggggatgatgctaaaagaggtaa

SEQ ID NO: 331565 - DNA, 55 bp, Artificial
  Synthetic oligonucleotide
atccactattttggagtatcgtacgaaggagattccagataatgcattagcggtt

SEQ ID NO: 331566 - DNA, 60 bp, Artificial
  Synthetic oligonucleotide
atccactcactggtgctactttggacgaaggcacaagggtggatataagactcgtgcagg

SEQ ID NO: 331567 - DNA, 58 bp, Artificial
  Synthetic oligonucleotide
atccactccttggctcaggtatataccaggtccccgttggtctcagttttgatgcctg

SEQ ID NO: 331568 - DNA, 55 bp, Artificial
  Synthetic oligonucleotide
atccactgaatgtttcgccgtcgacaatttcagtttccctttgaatttcgcgaag

SEQ ID NO: 331569 - DNA, 59 bp, Artificial
  Synthetic oligonucleotide
atccactggcgagtgttagtaacaccactgctgcttcgtaacggagcatgacggccgtg

SEQ ID NO: 331570 - DNA, 60 bp, Artificial
  Synthetic oligonucleotide
atccactggtggaccaaattccgcggctagcatctctatcggaacgctgactggcttgtc

SEQ ID NO: 331571 - DNA, 55 bp, Artificial
  Synthetic oligonucleotide
atccacttaaatagaatcggggacaacttccggggtctgctgtgcagacggaaac

SEQ ID NO: 331572 - DNA, 60 bp, Artificial
  Synthetic oligonucleotide
atccagaagatagtgactcagtatctgttctacccaataataatccagtacttaccgatg

SEQ ID NO: 331573 - DNA, 59 bp, Artificial
  Synthetic oligonucleotide
atccagaataacagcagtggagcctactcccctatcaccctgggtgattggggagcaag

SEQ ID NO: 331574 - DNA, 55 bp, Artificial
  Synthetic oligonucleotide
atccagaatccagcgaccaacgaggtgatgatgtcgcacgagattcaggacgtgc

SEQ ID NO: 331575 - DNA, 59 bp, Artificial
  Synthetic oligonucleotide
atccagacacgtttgaaacagttgcgacaacggagaagttggtgattacagatgttgta

SEQ ID NO: 331576 - DNA, 55 bp, Artificial
  Synthetic oligonucleotide
atccagacactgagcgcctggtatgggcctgtaggggccttgaggtaggacgtgg

SEQ ID NO: 331577 - DNA, 55 bp, Artificial
  Synthetic oligonucleotide
atccagactgaagaggttcgttacggtcgtgatgaaaagggtagtctggtagagc

SEQ ID NO: 331578 - DNA, 60 bp, Artificial
  Synthetic oligonucleotide
atccagagaaagaagtgctaatgtggaagtttgacagcagcctagcacgcagacacattg

SEQ ID NO: 331579 - DNA, 60 bp, Artificial
  Synthetic oligonucleotide
atccagagacgcgcaatgcagagttgccaagaattttggtcgaccacactactaagacca

SEQ ID NO: 331580 - DNA, 57 bp, Artificial
  Synthetic oligonucleotide
atccagagtcaggagttcatgattctgaggcctatgagaggagaaggcatgtggtcg

SEQ ID NO: 331581 - DNA, 60 bp, Artificial
  Synthetic oligonucleotide
atccagagtgaattcaataaggcatgtgaattgaccgattcgagctggatagaactggat

SEQ ID NO: 331582 - DNA, 52 bp, Artificial
  Synthetic oligonucleotide
atccagatgggcaggatattagcatgttttgccagatggtctcttcagtcga

SEQ ID NO: 331583 - DNA, 55 bp, Artificial
  Synthetic oligonucleotide
atccagatgtacaccaatgtggatcaggaccttgtgggctggcctgcccctcagg

SEQ ID NO: 331584 - DNA, 60 bp, Artificial
  Synthetic oligonucleotide
atccagatttccttgacattgtggcattgcacaggcccgccttgacgtcacgtaagggca

SEQ ID NO: 331585 - DNA, 60 bp, Artificial
  Synthetic oligonucleotide
atccagcacagagtcgagtgaacctagccacaaagttcgtgccgtacgagatgagtcgtc

SEQ ID NO: 331586 - DNA, 52 bp, Artificial
  Synthetic oligonucleotide
atccagcagctagtctagagtggcggaatacgtccggtctctacgtccttac

SEQ ID NO: 331587 - DNA, 60 bp, Artificial
  Synthetic oligonucleotide
atccagccaatgcctttacaggcattacgtgggttatgagctttgatgcctataatcgaa

SEQ ID NO: 331588 - DNA, 59 bp, Artificial
  Synthetic oligonucleotide
atccagcctgggagtaatgaacccacgctggggactcagttatatctcttcgggagtga

SEQ ID NO: 331589 - DNA, 52 bp, Artificial
  Synthetic oligonucleotide
atccagcgtatacgcttaatcaatctgagttgggtacgctgttgaaaactct

SEQ ID NO: 331590 - DNA, 55 bp, Artificial
  Synthetic oligonucleotide
atccaggaatttaggaactcaccttataagacctttgcagatcgaaatagagctg

SEQ ID NO: 331591 - DNA, 60 bp, Artificial
  Synthetic oligonucleotide
atccaggaccatttgctcaaactggatatgctccagtggactgggggccaggtgaaacga

SEQ ID NO: 331592 - DNA, 55 bp, Artificial
  Synthetic oligonucleotide
atccaggagccacatacgccaagtgcggatccggtccgtggcttacgcctaggtg

SEQ ID NO: 331593 - DNA, 50 bp, Artificial
  Synthetic oligonucleotide
atccaggagttgtgcgtcttgggtccggcgtcaactacacaggcggcgca

SEQ ID NO: 331594 - DNA, 57 bp, Artificial
  Synthetic oligonucleotide
atccagggaaacgcttcaggcttccattgccattatgccccttcaaaggattctttc

SEQ ID NO: 331595 - DNA, 57 bp, Artificial
  Synthetic oligonucleotide
atccagggaattagtagtcggctatgtcaacgttaatatgggcctaaaattcagaca

SEQ ID NO: 331596 - DNA, 53 bp, Artificial
  Synthetic oligonucleotide
atccaggggcactcaatacaaataccgctaggacattcttcctcaatgccgca

SEQ ID NO: 331597 - DNA, 59 bp, Artificial
  Synthetic oligonucleotide
atccaggtcaaacaaggcttagtccaagatacgacgcaatcaatcattagcttttcgag

SEQ ID NO: 331598 - DNA, 55 bp, Artificial
  Synthetic oligonucleotide
atccaggtgaaatttttgcctccgaggaagaaggtagagtgcttcgtaccttcac

SEQ ID NO: 331599 - DNA, 50 bp, Artificial
  Synthetic oligonucleotide
atccagtcgagatagctctgtatcaaccaaactcaggctgttacatacac

SEQ ID NO: 331600 - DNA, 56 bp, Artificial
  Synthetic oligonucleotide
atccagtctttggatgttggttttcaggatgttgttttgatgaaggttcctacaat

SEQ ID NO: 331601 - DNA, 57 bp, Artificial
  Synthetic oligonucleotide
atccagtgattaaacaagtctcgaactatttcacatgcgttaaagttggaacgtctg

SEQ ID NO: 331602 - DNA, 53 bp, Artificial
  Synthetic oligonucleotide
atccagtgggtacgacttcgaaaaagagggatattccttagtgggaatagacc

SEQ ID NO: 331603 - DNA, 57 bp, Artificial
  Synthetic oligonucleotide
atccagtggtggtgccataccgtttgacttcactaagtttgataagactaaatgtcc

SEQ ID NO: 331604 - DNA, 53 bp, Artificial
  Synthetic oligonucleotide
atccagtggttgtaaggtcgtaatgagcaactccgggacgggaccgactactt

SEQ ID NO: 331605 - DNA, 54 bp, Artificial
  Synthetic oligonucleotide
atccagttgtggtggttgaaactgttccttcgattcctcctaagggagtcacac

SEQ ID NO: 331606 - DNA, 55 bp, Artificial
  Synthetic oligonucleotide
atccataaaaagggtatgtgctgccccttccttctttggagaattcacacggcgg

SEQ ID NO: 331607 - DNA, 60 bp, Artificial
  Synthetic oligonucleotide
atccatacccatgtctgcgtggagcactgatagcatccgaatgtgagttaggagacgtat

SEQ ID NO: 331608 - DNA, 55 bp, Artificial
  Synthetic oligonucleotide
atccatacctgttatcagcgacgtttcgcaattaggatttatcaagcccttgatc

SEQ ID NO: 331609 - DNA, 60 bp, Artificial
  Synthetic oligonucleotide
atccatacggcggaactcctagccgcttgctttgctcgcagcaggtctggagccacaatt

SEQ ID NO: 331610 - DNA, 52 bp, Artificial
  Synthetic oligonucleotide
atccatactgtagttcaagaacccctctcgcacattgatggtcattgataag

SEQ ID NO: 331611 - DNA, 60 bp, Artificial
  Synthetic oligonucleotide
atccatagaggaagcttgtagcctgacgcccccacactcagccaaatctaagttcggcta

SEQ ID NO: 331612 - DNA, 50 bp, Artificial
  Synthetic oligonucleotide
atccatagcccgaaacggtgagccacgacgactccttcctccgccatggt

SEQ ID NO: 331613 - DNA, 60 bp, Artificial
  Synthetic oligonucleotide
atccataggccctaactctacgggatagcggccacattccgtgcgcttaccgatggtgca

SEQ ID NO: 331614 - DNA, 58 bp, Artificial
  Synthetic oligonucleotide
atccatatacctggtgaagttagaaatttgctagagttatgccaggtggagactattt

SEQ ID NO: 331615 - DNA, 59 bp, Artificial
  Synthetic oligonucleotide
atccatattgacgggatggtaccaagtgggtcactctggactggatggttggacacggc

SEQ ID NO: 331616 - DNA, 60 bp, Artificial
  Synthetic oligonucleotide
atccatcaaaattacactgaatcagctaaaagtttagaggtaatactacaggagatgagc

SEQ ID NO: 331617 - DNA, 52 bp, Artificial
  Synthetic oligonucleotide
atccatcacctcggtaaaaaccgagtccccatatataaacagggaaacctgt

SEQ ID NO: 331618 - DNA, 60 bp, Artificial
  Synthetic oligonucleotide
atccatcattccggatcaaatgcagagcagaccaagttatatgggagtggagacaaacta

SEQ ID NO: 331619 - DNA, 60 bp, Artificial
  Synthetic oligonucleotide
atccatccacatcactaacccaaagtttaaggtttcatcaggctatggcacttctggata

SEQ ID NO: 331620 - DNA, 60 bp, Artificial
  Synthetic oligonucleotide
atccatccctacaggcacaaattttcaatgtatattcatataagaaccccctgtggcatg

SEQ ID NO: 331621 - DNA, 60 bp, Artificial
  Synthetic oligonucleotide
atccatccgcatgtgattggccaagcgataagtaaaaatgacgttgatgataagacactt

SEQ ID NO: 331622 - DNA, 58 bp, Artificial
  Synthetic oligonucleotide
atccatcgtcgtagccatgttatgcggccagaccccgaccaacctgataccgtcccac

SEQ ID NO: 331623 - DNA, 60 bp, Artificial
  Synthetic oligonucleotide
atccatctaatacgtagtagctattctgatcctcacagtcatgaggtttatcttgtatgt

SEQ ID NO: 331624 - DNA, 59 bp, Artificial
  Synthetic oligonucleotide
atccatctggaaaagaaaaggccgcgcagcggctgtgcaatttaattatgaactgggga

SEQ ID NO: 331625 - DNA, 60 bp, Artificial
  Synthetic oligonucleotide
atccatgaccgtagcaatttatgtgtacgtaaattgtgcagccgcactctaaatcaacgc

SEQ ID NO: 331626 - DNA, 50 bp, Artificial
  Synthetic oligonucleotide
atccatgacgtctttagttcacggggaccattgcctgcttatctagggtc

SEQ ID NO: 331627 - DNA, 60 bp, Artificial
  Synthetic oligonucleotide
atccatgagattgtttataaatgatgtgctcgatagaatgggagagcctaaactcaaccg

SEQ ID NO: 331628 - DNA, 55 bp, Artificial
  Synthetic oligonucleotide
atccatgatactttgtggagggctcccgaaactgaaccaaccgtgatatcacccg

SEQ ID NO: 331629 - DNA, 58 bp, Artificial
  Synthetic oligonucleotide
atccatgcaattgggccttaatttgaatgggcttggaccagtagattcgggactgggc

SEQ ID NO: 331630 - DNA, 59 bp, Artificial
  Synthetic oligonucleotide
atccatgctgtggcccctgactatagggttgagcagaaccccaagaggctagaggcggc

SEQ ID NO: 331631 - DNA, 60 bp, Artificial
  Synthetic oligonucleotide
atccatgggcatgtcacaatggttacaacataggtgttcaaaaatagaagatggaggaac

SEQ ID NO: 331632 - DNA, 53 bp, Artificial
  Synthetic oligonucleotide
atccatgtgccgtatcccatctggtcagtctcctcttttgggcattcgccgcg

SEQ ID NO: 331633 - DNA, 55 bp, Artificial
  Synthetic oligonucleotide
atccatgttcaagaaacaagcatacggggagttgggacacaaggtttcaacctac

SEQ ID NO: 331634 - DNA, 57 bp, Artificial
  Synthetic oligonucleotide
atccattacacacaagccagtgtgtttatggtcgtaatgggtaactacgggatggaa

SEQ ID NO: 331635 - DNA, 56 bp, Artificial
  Synthetic oligonucleotide
atccattacgagtaagaagtgtaatccttttcttgtagccgtagctactagagaac

SEQ ID NO: 331636 - DNA, 58 bp, Artificial
  Synthetic oligonucleotide
atccattactttaatgaagtagaagtggctaatacgagaaatcttcgcagtctgggaa

SEQ ID NO: 331637 - DNA, 60 bp, Artificial
  Synthetic oligonucleotide
atccattaggatgtaagatgtacgcactacatcaagggacgaccattagaaacaagcact

SEQ ID NO: 331638 - DNA, 60 bp, Artificial
  Synthetic oligonucleotide
atccattatatgtgattgtggattaaagagttaagatatgatggagatgtattacttgtg

SEQ ID NO: 331639 - DNA, 55 bp, Artificial
  Synthetic oligonucleotide
atccattatttacaactctccccacagaggaccgggacagtcaggcgccctgcca

SEQ ID NO: 331640 - DNA, 55 bp, Artificial
  Synthetic oligonucleotide
atccattcaaggaattcacgacaaacaacaagtgcgcagagaccatgtacgaggc

SEQ ID NO: 331641 - DNA, 60 bp, Artificial
  Synthetic oligonucleotide
atccattcatcatgtgaagttcagtcctataccagtgtccgatccaccgtttccgtccat

SEQ ID NO: 331642 - DNA, 60 bp, Artificial
  Synthetic oligonucleotide
atccattgcgacgatgatttcctcttcttcgaaccattgtatcattaatggcgttaccat

SEQ ID NO: 331643 - DNA, 59 bp, Artificial
  Synthetic oligonucleotide
atccattggtcagcgtctctgatggctacatagtgggactacacagtctgtcgccctcg

SEQ ID NO: 331644 - DNA, 55 bp, Artificial
  Synthetic oligonucleotide
atccatttcgatacaacggaactatgtttgccagggcgacgatggtctaatggtg

SEQ ID NO: 331645 - DNA, 55 bp, Artificial
  Synthetic oligonucleotide
atccattttgaaatccactgatcgcatcttcgttgtacccacggcgcgtgtgtac

SEQ ID NO: 331646 - DNA, 60 bp, Artificial
  Synthetic oligonucleotide
atcccaaaatttcacagataatgctaaaaccataatagtacagctgaacgaatctgtaga

SEQ ID NO: 331647 - DNA, 51 bp, Artificial
  Synthetic oligonucleotide
atcccaaacgaaaagattgtagattactcaaagcgaagtcgtaaccgaaca

SEQ ID NO: 331648 - DNA, 55 bp, Artificial
  Synthetic oligonucleotide
atcccaacaaagttggttttacgaagagtgcgcttttccataagcagcccctggc

SEQ ID NO: 331649 - DNA, 56 bp, Artificial
  Synthetic oligonucleotide
atcccaacatcgacaacatgagcggaatgaaagcaccggtttcctttctggagaag

SEQ ID NO: 331650 - DNA, 60 bp, Artificial
  Synthetic oligonucleotide
atcccaaccaacacaggcagaagatagggaactggctgatggttccgtgtctatgcgatt

SEQ ID NO: 331651 - DNA, 58 bp, Artificial
  Synthetic oligonucleotide
atcccaaccccgagacaggtcaagagcaacgcatactctttcaaggggcagataaggc

SEQ ID NO: 331652 - DNA, 59 bp, Artificial
  Synthetic oligonucleotide
atcccaactcaaaccggttgaagataacagtctgatgtttgagagacctttggcagcta

SEQ ID NO: 331653 - DNA, 52 bp, Artificial
  Synthetic oligonucleotide
atcccaactttacaatctcctacagtagaagcatgtggttactcagacagaa

SEQ ID NO: 331654 - DNA, 59 bp, Artificial
  Synthetic oligonucleotide
atcccaagcggaggcagccctggagaaccttgtattactcaatgcggcgtctctggccg

SEQ ID NO: 331655 - DNA, 54 bp, Artificial
  Synthetic oligonucleotide
atcccaagtaggggtaggagttttccaagaaaacgtgttccacacaatgtggca

SEQ ID NO: 331656 - DNA, 57 bp, Artificial
  Synthetic oligonucleotide
atcccaagtgggtgcattaggtggggcagttgtagcccctgtggcggttaccagaca

SEQ ID NO: 331657 - DNA, 55 bp, Artificial
  Synthetic oligonucleotide
atcccaatgatactgttactttcagttttaatggggcctttatagcacctgaccg

SEQ ID NO: 331658 - DNA, 57 bp, Artificial
  Synthetic oligonucleotide
atcccacccagggatctttgagaactcgtgtcttgaaacaatggaagttgtccaaca

SEQ ID NO: 331659 - DNA, 59 bp, Artificial
  Synthetic oligonucleotide
atcccaccgaggatactatcccataccttgacaccaaggttgaagcctcagtgcttcca

SEQ ID NO: 331660 - DNA, 55 bp, Artificial
  Synthetic oligonucleotide
atcccacctggcaggtgacaagatatttagacatggtagagcacatgacagggga

SEQ ID NO: 331661 - DNA, 60 bp, Artificial
  Synthetic oligonucleotide
atcccacgcactagaaacgctgatctcagagtcggtacttctgccaacgaacacttctca

SEQ ID NO: 331662 - DNA, 55 bp, Artificial
  Synthetic oligonucleotide
atcccagaactcaaaacgaattcctttctgggaatgatacaacttgattccaaag

SEQ ID NO: 331663 - DNA, 55 bp, Artificial
  Synthetic oligonucleotide
atcccagagaaatggctttgcttatccctatcccacacctcgccgttccggtaac

SEQ ID NO: 331664 - DNA, 60 bp, Artificial
  Synthetic oligonucleotide
atcccagaggtaataagcggagctagtgatgcaaccttagtgatcaatactgagcacatg

SEQ ID NO: 331665 - DNA, 57 bp, Artificial
  Synthetic oligonucleotide
atcccagagtcagggccctgtactttcctgctggtggctccagttccggaacagtaa

SEQ ID NO: 331666 - DNA, 60 bp, Artificial
  Synthetic oligonucleotide
atcccagcactcacagcagttgagacaggtcacacgtcacaagtcgagcccagcgataca

SEQ ID NO: 331667 - DNA, 53 bp, Artificial
  Synthetic oligonucleotide
atcccagctcaagacgggattcaaccagctgagagattccatccaggaattac

SEQ ID NO: 331668 - DNA, 58 bp, Artificial
  Synthetic oligonucleotide
atcccaggatcacacggtggtggggcatatttccacaaatatgaaaccctagaatggc

SEQ ID NO: 331669 - DNA, 58 bp, Artificial
  Synthetic oligonucleotide
atcccaggtcaggttagaaacttgatagagatgtgcgaggttgataccctaataccta

SEQ ID NO: 331670 - DNA, 52 bp, Artificial
  Synthetic oligonucleotide
atcccagtcctattcagcttgcacaggcatggcatgcaaatatttggcacag

SEQ ID NO: 331671 - DNA, 58 bp, Artificial
  Synthetic oligonucleotide
atcccagtcggcgggcgtaagcccgtccagatctggaaagttatcgcacatttgtgaa

SEQ ID NO: 331672 - DNA, 58 bp, Artificial
  Synthetic oligonucleotide
atcccagtgcagggaaggaccctaagaagacaggaggtccaatctacagaaggagaga

SEQ ID NO: 331673 - DNA, 55 bp, Artificial
  Synthetic oligonucleotide
atcccagtggtagctccgagtgatggggctcgcgaatcccccgtggtaacacgga

SEQ ID NO: 331674 - DNA, 53 bp, Artificial
  Synthetic oligonucleotide
atcccatacgactgggcaagggtggaatgtcccacctgcggatctgccccgga

SEQ ID NO: 331675 - DNA, 55 bp, Artificial
  Synthetic oligonucleotide
atcccatagctttgaaaacgtaggtttgagatggcaaaatctggcgccgaatacg

SEQ ID NO: 331676 - DNA, 50 bp, Artificial
  Synthetic oligonucleotide
atcccatgtggtcttcgttcaaggatctggaatcgagtagtacggggggt

SEQ ID NO: 331677 - DNA, 60 bp, Artificial
  Synthetic oligonucleotide
atccccaacattccaccaagctctgctagatcctcctgctggtggctccagttccggaac

SEQ ID NO: 331678 - DNA, 55 bp, Artificial
  Synthetic oligonucleotide
atccccaaggcgcgtcgacccgagggaaggtcctgggcacaaccaggatatccat

SEQ ID NO: 331679 - DNA, 50 bp, Artificial
  Synthetic oligonucleotide
atccccaataggaatttccacgcagattgcagggtaatcggtcaatgtct

SEQ ID NO: 331680 - DNA, 56 bp, Artificial
  Synthetic oligonucleotide
atccccaattgagaagctcctgaactataccttggaaaatagaggacttcagaccc

SEQ ID NO: 331681 - DNA, 55 bp, Artificial
  Synthetic oligonucleotide
atccccaatttctcttcaccaattacagacggtcttgggagacctccaatgggtc

SEQ ID NO: 331682 - DNA, 55 bp, Artificial
  Synthetic oligonucleotide
atccccaggatacgaacacacgaggaaccttctacacaacctcgaagtagcatag

SEQ ID NO: 331683 - DNA, 55 bp, Artificial
  Synthetic oligonucleotide
atccccaggccagttcaagtactacatgataacgggcagagtcccaaaccccgga

SEQ ID NO: 331684 - DNA, 58 bp, Artificial
  Synthetic oligonucleotide
atccccatagcatatatatacggtataatttacaataagtcgtgcaaaaaatgcaaat

SEQ ID NO: 331685 - DNA, 60 bp, Artificial
  Synthetic oligonucleotide
atccccattgcgcattgttggactgtataatgtttgatgccactgtcacaggctatcttc

SEQ ID NO: 331686 - DNA, 55 bp, Artificial
  Synthetic oligonucleotide
atcccccaaggccttgcggcattgtgcgcgcgaaggaagtgtgtggcccggtata

SEQ ID NO: 331687 - DNA, 53 bp, Artificial
  Synthetic oligonucleotide
atcccccgaggattagatatcgtgaaattcactctgatgcagggtttacacgt

SEQ ID NO: 331688 - DNA, 54 bp, Artificial
  Synthetic oligonucleotide
atccccgaggaagcatttacggcgttcacgggtctggcacagcggcagacgatt

SEQ ID NO: 331689 - DNA, 53 bp, Artificial
  Synthetic oligonucleotide
atccccgagtgtggcagatttggacccatatgacaaatcccttcactcgagag

SEQ ID NO: 331690 - DNA, 60 bp, Artificial
  Synthetic oligonucleotide
atccccgatacccaattgtcagatgtgtatgcagagacaactggaaaggctctaataggc

SEQ ID NO: 331691 - DNA, 57 bp, Artificial
  Synthetic oligonucleotide
atccccgccgccagtatggtcttcccgaacgccagcagcctgccctacctatccctg

SEQ ID NO: 331692 - DNA, 59 bp, Artificial
  Synthetic oligonucleotide
atccccgctgtttctggaggagggtgcaccaaatgtgcatgttgaaaagagactattta

SEQ ID NO: 331693 - DNA, 55 bp, Artificial
  Synthetic oligonucleotide
atccccggatgaaggctacgtagtgtacaacacgtactttggcatgggaaagtgg

SEQ ID NO: 331694 - DNA, 52 bp, Artificial
  Synthetic oligonucleotide
atccccgggatcccctcacgtccagcccctccccagttctggtgaaccggga

SEQ ID NO: 331695 - DNA, 52 bp, Artificial
  Synthetic oligonucleotide
atccccggtatttccgatagtctggtttccgagactactactaaagtttctg

SEQ ID NO: 331696 - DNA, 56 bp, Artificial
  Synthetic oligonucleotide
atccccgtaagttgaaggcttaccctgatctcgttgcatcagtttataataaatcc

SEQ ID NO: 331697 - DNA, 54 bp, Artificial
  Synthetic oligonucleotide
atccccgtcagcgaatttcaggcactcagtgagagtgctactatggtctacaac

SEQ ID NO: 331698 - DNA, 56 bp, Artificial
  Synthetic oligonucleotide
atccccgtctttgtcgacgtaggacttgacgtcggagctcgatttagctccctgaa

SEQ ID NO: 331699 - DNA, 57 bp, Artificial
  Synthetic oligonucleotide
atcccctatgtttctgacacaaactatgttaagactgattcgtcagacctagggcgt

SEQ ID NO: 331700 - DNA, 55 bp, Artificial
  Synthetic oligonucleotide
atcccctcattgggatccaggatagggtccatccttgtgcggggtataggggaag

SEQ ID NO: 331701 - DNA, 55 bp, Artificial
  Synthetic oligonucleotide
atcccctccatatattgggtgcgtttattttaacaattgacgatttgaagcttaa

SEQ ID NO: 331702 - DNA, 60 bp, Artificial
  Synthetic oligonucleotide
atcccctgtgcgtaaatccatcgtctcggcagtggatgctcacatatatggagcaaccgc

SEQ ID NO: 331703 - DNA, 60 bp, Artificial
  Synthetic oligonucleotide
atcccctgtgggggaatccatgtccagcgcagtctatgtggaagtaaatggagcaaccgc

SEQ ID NO: 331704 - DNA, 51 bp, Artificial
  Synthetic oligonucleotide
atcccgaaccagtattagtttgtatactgggaaggacccgttaatgggccc

SEQ ID NO: 331705 - DNA, 50 bp, Artificial
  Synthetic oligonucleotide
atcccgaatttaacgggactttgccctataatcaacccaaaggtaaattc

SEQ ID NO: 331706 - DNA, 56 bp, Artificial
  Synthetic oligonucleotide
atcccgactgcccgaaccctgagacggaggactaatgcgcatcaggtcaaccaaac

SEQ ID NO: 331707 - DNA, 59 bp, Artificial
  Synthetic oligonucleotide
atcccgagtgagcgccttcattatcgcaatcagggctggcgctctgttgagacatcggg

SEQ ID NO: 331708 - DNA, 60 bp, Artificial
  Synthetic oligonucleotide
atcccgatggtggttttgcagacgaacttcagtgcattgactcctgctatgatggggttc

SEQ ID NO: 331709 - DNA, 54 bp, Artificial
  Synthetic oligonucleotide
atcccgcctttaatttgaactggcttcccgtacttagtgttgctttgccagtcc

SEQ ID NO: 331710 - DNA, 55 bp, Artificial
  Synthetic oligonucleotide
atcccgctcaaccacgacataatgcaggccttcacgcttcatacgtgggtcatag

SEQ ID NO: 331711 - DNA, 51 bp, Artificial
  Synthetic oligonucleotide
atcccgctggccattgggtatgctattccattgaatatcttctagtcaata

SEQ ID NO: 331712 - DNA, 52 bp, Artificial
  Synthetic oligonucleotide
atcccgcttcgctaccagtgatgcgggatgagttcaaatacatggtatatca

SEQ ID NO: 331713 - DNA, 56 bp, Artificial
  Synthetic oligonucleotide
atcccggaacaactactactgtgacaaacaacatcacccttgacgttggacaccta

SEQ ID NO: 331714 - DNA, 49 bp, Artificial
  Synthetic oligonucleotide
atcccggattggttttctataactaaaaccaaacggggagggcaaaata

SEQ ID NO: 331715 - DNA, 54 bp, Artificial
  Synthetic oligonucleotide
atcccggcccaggcccaaacgcatttagttttatccgggaccacacacatcaac

SEQ ID NO: 331716 - DNA, 60 bp, Artificial
  Synthetic oligonucleotide
atcccggctgtgtcatggagaagtgtatattggttaattatcttgaagtgtgcggattcc

SEQ ID NO: 331717 - DNA, 55 bp, Artificial
  Synthetic oligonucleotide
atcccgggagaggtgcgcaacctcatggaaattgctgaagtggattccgtggtgc

SEQ ID NO: 331718 - DNA, 54 bp, Artificial
  Synthetic oligonucleotide
atcccgggccgggcactcagagctacccggaaagcgagaacctgtgggcgaccc

SEQ ID NO: 331719 - DNA, 55 bp, Artificial
  Synthetic oligonucleotide
atcccggggaactcggcaatcgtccccgcatggcagagaccgagtcccccttcaa

SEQ ID NO: 331720 - DNA, 60 bp, Artificial
  Synthetic oligonucleotide
atcccggtctaacaatgtcccacgatcagaggaattcagcagcatccgtacagatccggc

SEQ ID NO: 331721 - DNA, 51 bp, Artificial
  Synthetic oligonucleotide
atcccggttgtgttcgggaccgttaccgtgaagagcccgaacgtggtatgg

SEQ ID NO: 331722 - DNA, 54 bp, Artificial
  Synthetic oligonucleotide
atcccgtaagacgcaaattcgccggattgtgtggacttccccggcacacaatcc

SEQ ID NO: 331723 - DNA, 57 bp, Artificial
  Synthetic oligonucleotide
atcccgtacacttaaattcatttccggatgaagtaagagccaattgattaattcaca

SEQ ID NO: 331724 - DNA, 60 bp, Artificial
  Synthetic oligonucleotide
atcccgtaccatcaggcgggtacaacctgacaatgctgatgtgaccagtctgaattttgt

SEQ ID NO: 331725 - DNA, 56 bp, Artificial
  Synthetic oligonucleotide
atcccgtccaatcagaattcagcctgaaagcttaaataaaattggcgcccgcttta

SEQ ID NO: 331726 - DNA, 59 bp, Artificial
  Synthetic oligonucleotide
atcccgtcttactcttcattcagtgtccttacagggtctacagatgcccgatatgtatt

SEQ ID NO: 331727 - DNA, 55 bp, Artificial
  Synthetic oligonucleotide
atcccgttctgcgacagcacgtcctgaacgcaaaacgacatccgactacttacga

SEQ ID NO: 331728 - DNA, 58 bp, Artificial
  Synthetic oligonucleotide
atccctaaaggcatggagtctgatttctatcagttggcttcagccctttcagaaaacc

SEQ ID NO: 331729 - DNA, 60 bp, Artificial
  Synthetic oligonucleotide
atccctaaatggacatatctggtgcctccagcgtttcggtgtctgagcgcatgtttctag

SEQ ID NO: 331730 - DNA, 57 bp, Artificial
  Synthetic oligonucleotide
atccctaagggatgtgttggtccctgtaagatccaggactatgagctcaaaatggac

SEQ ID NO: 331731 - DNA, 56 bp, Artificial
  Synthetic oligonucleotide
atccctaattctaagtttgtcagatactcttttagagggtcacgtgaaaatcgtga

SEQ ID NO: 331732 - DNA, 51 bp, Artificial
  Synthetic oligonucleotide
atccctacatggcaggagcaacgtgctcgtctagcagagtacatgttccaa

SEQ ID NO: 331733 - DNA, 60 bp, Artificial
  Synthetic oligonucleotide
atccctaccctgagtgaacgacagaaatatgatacacgagtactctcattagagagaacc

SEQ ID NO: 331734 - DNA, 55 bp, Artificial
  Synthetic oligonucleotide
atccctacctctagtgtggggtttatccattccgatatagagaccttacctaaca

SEQ ID NO: 331735 - DNA, 51 bp, Artificial
  Synthetic oligonucleotide
atccctacgttttgttgttaaaaggtcctgctaataccttaaaatgttaca

SEQ ID NO: 331736 - DNA, 55 bp, Artificial
  Synthetic oligonucleotide
atccctactataaaagggaatctaatcaacggtacagcttgtcgtggtattgaaa

SEQ ID NO: 331737 - DNA, 58 bp, Artificial
  Synthetic oligonucleotide
atccctagccggattaagctgcccgccaaaatattgcgcgcgtgcgcctcctggggcg

SEQ ID NO: 331738 - DNA, 55 bp, Artificial
  Synthetic oligonucleotide
atccctaggcacctattgagatttctctggggcccaccagcatggagttcctgta

SEQ ID NO: 331739 - DNA, 55 bp, Artificial
  Synthetic oligonucleotide
atccctatacaatatggcacttcagatgctggatctgcaatactgccaccctttg

SEQ ID NO: 331740 - DNA, 53 bp, Artificial
  Synthetic oligonucleotide
atccctatataccctatccttacctatccggtaattctatcctaaaagcttgt

SEQ ID NO: 331741 - DNA, 60 bp, Artificial
  Synthetic oligonucleotide
atccctattgtcaccatcatatgctatcacccaccctagcttgttgaacccatacccaca

SEQ ID NO: 331742 - DNA, 55 bp, Artificial
  Synthetic oligonucleotide
atccctcaaatcttccagatggtgatggaaatggtggaggtgtttatgagtttgg

SEQ ID NO: 331743 - DNA, 59 bp, Artificial
  Synthetic oligonucleotide
atccctcaacaatatcatgtgactccccaagcaacgtcaatggaggacccggagtgaag

SEQ ID NO: 331744 - DNA, 57 bp, Artificial
  Synthetic oligonucleotide
atccctcaactgttctatactgggctgaaaattgtaatcttcaaattttgtgtagta

SEQ ID NO: 331745 - DNA, 53 bp, Artificial
  Synthetic oligonucleotide
atccctcatttgctcactccgggccgctgtgtgtagcagcagtgccggagtac

SEQ ID NO: 331746 - DNA, 55 bp, Artificial
  Synthetic oligonucleotide
atccctcccacataacagcagaggcggccaggagaaggttggcgaggggatctcc

SEQ ID NO: 331747 - DNA, 54 bp, Artificial
  Synthetic oligonucleotide
atccctcccgaggttatgtggtcgatgtttcttacaacggtcacgtgattccgg

SEQ ID NO: 331748 - DNA, 56 bp, Artificial
  Synthetic oligonucleotide
atccctccgcgataccggacaacgttgaccgtcggcttcgtaagcgactaatgcta

SEQ ID NO: 331749 - DNA, 52 bp, Artificial
  Synthetic oligonucleotide
atccctcctaatagattagatacggtgttggtagacttagttaaaacgaggt

SEQ ID NO: 331750 - DNA, 60 bp, Artificial
  Synthetic oligonucleotide
atccctcctgagtaatggagctgaagccatatgtgggcctcatttccattttagctaact

SEQ ID NO: 331751 - DNA, 55 bp, Artificial
  Synthetic oligonucleotide
atccctcgcgatgaagaaccgtcatccgacaagggcgactccgacctgtaccccc

SEQ ID NO: 331752 - DNA, 55 bp, Artificial
  Synthetic oligonucleotide
atccctctggatttacttagagccagggactacgggagtgacgtcaaaaacaaga

SEQ ID NO: 331753 - DNA, 53 bp, Artificial
  Synthetic oligonucleotide
atccctgacctcgttatccgaggtagtcctgcaaaaccgaagagggttagact

SEQ ID NO: 331754 - DNA, 55 bp, Artificial
  Synthetic oligonucleotide
atccctggcccctttatggaaacgagggctgtgggtgggcaggttggctcctgtc

SEQ ID NO: 331755 - DNA, 54 bp, Artificial
  Synthetic oligonucleotide
atccctggccggaagcattcgccatgtggctgtaccgcacagagacgtacagct

SEQ ID NO: 331756 - DNA, 55 bp, Artificial
  Synthetic oligonucleotide
atccctgggacgcggtagtacctcgtcattcgaacctctcccttccgtctagcga

SEQ ID NO: 331757 - DNA, 50 bp, Artificial
  Synthetic oligonucleotide
atccctgggttttgcttaatgcatcctggttcaactccttcctcacacat

SEQ ID NO: 331758 - DNA, 54 bp, Artificial
  Synthetic oligonucleotide
atccctgtccccggatttttagtgggtgatgtctggatattacggtgttactgt

SEQ ID NO: 331759 - DNA, 60 bp, Artificial
  Synthetic oligonucleotide
atccctgtggggcaagctcgtgtcgctgaaaattatgtgctaccacagtgaccctgaagc

SEQ ID NO: 331760 - DNA, 55 bp, Artificial
  Synthetic oligonucleotide
atcccttcagtagtcggtggctgtcaagtcagcggatacggacgtacccgttgcc

SEQ ID NO: 331761 - DNA, 55 bp, Artificial
  Synthetic oligonucleotide
atcccttctaccgagtgagcgagggacttcagccaccccacgtttctcctagaag

SEQ ID NO: 331762 - DNA, 60 bp, Artificial
  Synthetic oligonucleotide
atcccttctgctcttaagatacattcagaacacacaccgaaggttcatatatatacgaca

SEQ ID NO: 331763 - DNA, 56 bp, Artificial
  Synthetic oligonucleotide
atcccttcttctaagctgttgaagtcgattggtgggatgatcccctggtgtctgta

SEQ ID NO: 331764 - DNA, 59 bp, Artificial
  Synthetic oligonucleotide
atcccttgaatgttggctaatcagaggaaagtcagcattttccggcccaggctaagaga

SEQ ID NO: 331765 - DNA, 58 bp, Artificial
  Synthetic oligonucleotide
atcccttgatcaacggcgggagcgccaagaagaacaggcgcagtccggccttgacaag

SEQ ID NO: 331766 - DNA, 56 bp, Artificial
  Synthetic oligonucleotide
atcccttgcgtaaggtatttctctctccttgttaatatggagggtttgaaggctga

SEQ ID NO: 331767 - DNA, 52 bp, Artificial
  Synthetic oligonucleotide
atcccttggctagctttgctaccggcaaacgtgctatacggctcactgtcag

SEQ ID NO: 331768 - DNA, 54 bp, Artificial
  Synthetic oligonucleotide
atccctttaacaagatgggtatgggtctcaacaaaagagagtttgtggaaacca

SEQ ID NO: 331769 - DNA, 52 bp, Artificial
  Synthetic oligonucleotide
atccctttaactgttgtttcactgatgtctatgcctcaataggaactgagta

SEQ ID NO: 331770 - DNA, 54 bp, Artificial
  Synthetic oligonucleotide
atccctttctcgtctcgctgactctgccacccaccggactcatcttaaacgcaa

SEQ ID NO: 331771 - DNA, 56 bp, Artificial
  Synthetic oligonucleotide
atccgaaagagggaacagccggagtagaatctgcagtactgaggggattcctaatt

SEQ ID NO: 331772 - DNA, 54 bp, Artificial
  Synthetic oligonucleotide
atccgaaatgtacaccacagggctgtctaaggctaagacaaccatcaccgacgc

SEQ ID NO: 331773 - DNA, 57 bp, Artificial
  Synthetic oligonucleotide
atccgaaattaacacaattgggtcgtgaatactataattgcataacaactattgtta

SEQ ID NO: 331774 - DNA, 56 bp, Artificial
  Synthetic oligonucleotide
atccgaacaacgttcctggtagcgagctttgctctaaatgtggtaaacgtgagtgg

SEQ ID NO: 331775 - DNA, 55 bp, Artificial
  Synthetic oligonucleotide
atccgaaggtatgtggacgtctaggggcaattcgggcaggagcacccggcgcaac

SEQ ID NO: 331776 - DNA, 60 bp, Artificial
  Synthetic oligonucleotide
atccgaatcaccatttatgtagatgtgtaaagtatggggacaaatgcaatagtgccaagt

SEQ ID NO: 331777 - DNA, 59 bp, Artificial
  Synthetic oligonucleotide
atccgaatcactacacagtgggcggcattgagacttatgactttattgcggcaaagttg

SEQ ID NO: 331778 - DNA, 60 bp, Artificial
  Synthetic oligonucleotide
atccgacacagttcaaacgcgccacgtagtccaacgacgcagcaggtcagagtccacaat

SEQ ID NO: 331779 - DNA, 55 bp, Artificial
  Synthetic oligonucleotide
atccgacgatatcaaaactgagggcaagaaagggaggaacaagactggccgcggc

SEQ ID NO: 331780 - DNA, 59 bp, Artificial
  Synthetic oligonucleotide
atccgacgcagtggggagacaagctcggggtcataccgtcaggaacaccagatcaacca

SEQ ID NO: 331781 - DNA, 58 bp, Artificial
  Synthetic oligonucleotide
atccgacgtatctacaaccaaacttacaacggtgagcgccaacaagatagcatacacg

SEQ ID NO: 331782 - DNA, 60 bp, Artificial
  Synthetic oligonucleotide
atccgactgggattgagcctgatgaccatctcaaggaacgatcaagcctcagatatggga

SEQ ID NO: 331783 - DNA, 56 bp, Artificial
  Synthetic oligonucleotide
atccgagaacatcggtgagagcggatacccgacactggtacgatgggaggacccaa

SEQ ID NO: 331784 - DNA, 60 bp, Artificial
  Synthetic oligonucleotide
atccgagactttatggtaggaaaacatagatgggatttatgtaaatcatgcatacaggga

SEQ ID NO: 331785 - DNA, 54 bp, Artificial
  Synthetic oligonucleotide
atccgagaggccgtcgtggacaacccctttataagcacgtgtacccgaacatcg

SEQ ID NO: 331786 - DNA, 60 bp, Artificial
  Synthetic oligonucleotide
atccgagcacgaactctagtatcggacaatacacgcgcgagagcttggttgcagcacgta

SEQ ID NO: 331787 - DNA, 58 bp, Artificial
  Synthetic oligonucleotide
atccgagcatttatgcccaatggtgaggaaaacgagtacatacgaaaaatattgtggc

SEQ ID NO: 331788 - DNA, 59 bp, Artificial
  Synthetic oligonucleotide
atccgagcgtatagagagctagttatcagaccccagatggtttggtctattattttcca

SEQ ID NO: 331789 - DNA, 55 bp, Artificial
  Synthetic oligonucleotide
atccgaggaaagttgaagcccaaaaccataacttaccgatgtccacgggatgcca

SEQ ID NO: 331790 - DNA, 60 bp, Artificial
  Synthetic oligonucleotide
atccgaggctggagccacacaaatgggagaagtattgtgttcttgagataggagacatgc

SEQ ID NO: 331791 - DNA, 59 bp, Artificial
  Synthetic oligonucleotide
atccgagtgggagttatctgacggtacattactgaatggattagacctacataatgttg

SEQ ID NO: 331792 - DNA, 59 bp, Artificial
  Synthetic oligonucleotide
atccgataaaaccattaatagatcacgccaaacccacatttcgacagataatggctcat

SEQ ID NO: 331793 - DNA, 60 bp, Artificial
  Synthetic oligonucleotide
atccgatattatcacagattttgatgcaagtgaagcgaaagtgataatggatcgatgggg

SEQ ID NO: 331794 - DNA, 55 bp, Artificial
  Synthetic oligonucleotide
atccgatccagcgagtcatacataatgagctcgagcagtattgccgtgctcgagc

SEQ ID NO: 331795 - DNA, 60 bp, Artificial
  Synthetic oligonucleotide
atccgatcctctaatcaagctacgtctagtggcctcagcccctgccaaagtattacgcgc

SEQ ID NO: 331796 - DNA, 55 bp, Artificial
  Synthetic oligonucleotide
atccgatcgcaagttcgatatgccagttgaacaattcgtccggcactcgtcagag

SEQ ID NO: 331797 - DNA, 55 bp, Artificial
  Synthetic oligonucleotide
atccgatggtgggatgggaccccagggagaaccctccaagagcaacagcaggctg

SEQ ID NO: 331798 - DNA, 57 bp, Artificial
  Synthetic oligonucleotide
atccgatgttgtcatgtccgaagacgttaaactacgcttgaaccgtgttcgagtgtc

SEQ ID NO: 331799 - DNA, 60 bp, Artificial
  Synthetic oligonucleotide
atccgattctcgaatccacagtagattcgattcgctcctcgatacagacctacccatggt

SEQ ID NO: 331800 - DNA, 58 bp, Artificial
  Synthetic oligonucleotide
atccgcaagatgcctacacaaagcttagtacctcctttgacggtatttgtctggtcgc

SEQ ID NO: 331801 - DNA, 52 bp, Artificial
  Synthetic oligonucleotide
atccgcagctcctctctctacttcaatcttggggcctatgccacgctcccga

SEQ ID NO: 331802 - DNA, 55 bp, Artificial
  Synthetic oligonucleotide
atccgcagtacgcggcctccgtcttcctgggctgggcgcaaaagaagttcgggaa

SEQ ID NO: 331803 - DNA, 60 bp, Artificial
  Synthetic oligonucleotide
atccgcattttgcgggttcgtcactatgacagggcgaatgcgcgttacgcggagatttca

SEQ ID NO: 331804 - DNA, 55 bp, Artificial
  Synthetic oligonucleotide
atccgccaatcctttttgtggggagagcaccctctacacccggacctggtcagtg

SEQ ID NO: 331805 - DNA, 56 bp, Artificial
  Synthetic oligonucleotide
atccgccacaaggtgggtgacgtctctgctactgtttcggacctcggcgaggcgct

SEQ ID NO: 331806 - DNA, 55 bp, Artificial
  Synthetic oligonucleotide
atccgcccaacactgattacaattcccgtcacatacatgcatgagttcaaggccc

SEQ ID NO: 331807 - DNA, 55 bp, Artificial
  Synthetic oligonucleotide
atccgcccactcctgcatgttttcggggacggcagtgaaagatgataggggaaac

SEQ ID NO: 331808 - DNA, 55 bp, Artificial
  Synthetic oligonucleotide
atccgcctcaagcctaccctgcatggccccacacctctcctctacagactggggt

SEQ ID NO: 331809 - DNA, 60 bp, Artificial
  Synthetic oligonucleotide
atccgcgaaacgatctcattgtcacggctaataggaaatcggctcaagatgttaggatgg

SEQ ID NO: 331810 - DNA, 55 bp, Artificial
  Synthetic oligonucleotide
atccgcgaatggggcgacgcctggcatgttcgttctgacgacggcacgacgacaa

SEQ ID NO: 331811 - DNA, 60 bp, Artificial
  Synthetic oligonucleotide
atccgcgacaaaatgcgccacgcggaacgtttaatgaacatgcgcaagatcatcttgaac

SEQ ID NO: 331812 - DNA, 55 bp, Artificial
  Synthetic oligonucleotide
atccgcgccagtacctacgaaggttacagatgtccctgacgtctgattgacacgt

SEQ ID NO: 331813 - DNA, 60 bp, Artificial
  Synthetic oligonucleotide
atccgctagcgacagcgtacttgtgcggaatccaccgggagctggttaggagattgaatg

SEQ ID NO: 331814 - DNA, 60 bp, Artificial
  Synthetic oligonucleotide
atccgctagcgcatccatagtgacgtcctcaaataatggagtgggcgaggtgcgaaatat

SEQ ID NO: 331815 - DNA, 54 bp, Artificial
  Synthetic oligonucleotide
atccgctcctcaaagcttaattatttaatggtccactataaaacttagccccca

SEQ ID NO: 331816 - DNA, 54 bp, Artificial
  Synthetic oligonucleotide
atccgctctcccggtctagagttcaggtaccagtccgaagactttaaactactc

SEQ ID NO: 331817 - DNA, 55 bp, Artificial
  Synthetic oligonucleotide
atccgctgaagccttaccagtaggcgcagaaatgttaacgttcatggaacaggta

SEQ ID NO: 331818 - DNA, 60 bp, Artificial
  Synthetic oligonucleotide
atccgctgacgctctgactattcaccagacaactcactcgatcggtactaatgctgcttt

SEQ ID NO: 331819 - DNA, 55 bp, Artificial
  Synthetic oligonucleotide
atccgctgctgtacgtcttcgtgggcaccaagtttcggcaagaactgcactgtct

SEQ ID NO: 331820 - DNA, 60 bp, Artificial
  Synthetic oligonucleotide
atccgcttcagcgagatagacgttccaggggatggttcatgcgggatacacgctatggtg

SEQ ID NO: 331821 - DNA, 55 bp, Artificial
  Synthetic oligonucleotide
atccgcttgagagtgaggcgactaagtgtaatcatgcgaacatagagctaatgcg

SEQ ID NO: 331822 - DNA, 57 bp, Artificial
  Synthetic oligonucleotide
atccgcttttgaatccgtttcccaagacagtgcacggctttcgttgcatgcttgctg

SEQ ID NO: 331823 - DNA, 58 bp, Artificial
  Synthetic oligonucleotide
atccggaacatccgtgacccctatgagcacgggtttgtcaagcgagatggtaagcttc

SEQ ID NO: 331824 - DNA, 50 bp, Artificial
  Synthetic oligonucleotide
atccggaagtccataatgtttgggctacacatgcctgtgtacctacagac

SEQ ID NO: 331825 - DNA, 60 bp, Artificial
  Synthetic oligonucleotide
atccggacattgtggatcactattaaccaacacatggtggccaaggatctcaccagtata

SEQ ID NO: 331826 - DNA, 59 bp, Artificial
  Synthetic oligonucleotide
atccggagatacttttggttcaacgggcattagagacagtagagtcaatactgtggaca

SEQ ID NO: 331827 - DNA, 60 bp, Artificial
  Synthetic oligonucleotide
atccggagtactacaaggactgctgacatcgagctaaggactgctgacatcgaactttct

SEQ ID NO: 331828 - DNA, 55 bp, Artificial
  Synthetic oligonucleotide
atccggagtggccacgggtccatacgtaggaggccagtcgagcgacatcacgaca

SEQ ID NO: 331829 - DNA, 58 bp, Artificial
  Synthetic oligonucleotide
atccggagttctacaaagactgctgacatcgagatttctacaagggactttccgctgg

SEQ ID NO: 331830 - DNA, 55 bp, Artificial
  Synthetic oligonucleotide
atccggccctcgggcccacgtgccccattggcgatttatcgatcgctttccgaag

SEQ ID NO: 331831 - DNA, 51 bp, Artificial
  Synthetic oligonucleotide
atccggcggggttcactgatgacgacaactgagctggcccgcgtctacatc

SEQ ID NO: 331832 - DNA, 52 bp, Artificial
  Synthetic oligonucleotide
atccggctaaccacttcgagaaacccagtaacaccatgaaagttgcagggtg

SEQ ID NO: 331833 - DNA, 51 bp, Artificial
  Synthetic oligonucleotide
atccgggaacgaatccccaaaacgccggtaaagctcttggaatgaggaaaa

SEQ ID NO: 331834 - DNA, 55 bp, Artificial
  Synthetic oligonucleotide
atccgggaccacacacagcaacaaaagctgaccaatcagaatgcgcgtgacgtgt

SEQ ID NO: 331835 - DNA, 60 bp, Artificial
  Synthetic oligonucleotide
atccgggacccatcagtgcaaactgctatctcagaagcagcttacgctcatgtacgcccc

SEQ ID NO: 331836 - DNA, 57 bp, Artificial
  Synthetic oligonucleotide
atccgggacgtttcgtgaatctattggaagtagccatgattggaacattcgcggacg

SEQ ID NO: 331837 - DNA, 53 bp, Artificial
  Synthetic oligonucleotide
atccgggagtggggcagatggagatcgaagtggtttcagagaacgcaagggct

SEQ ID NO: 331838 - DNA, 57 bp, Artificial
  Synthetic oligonucleotide
atccgggcggatagattccattggactgtgtatgcctaaagggtctttcaagtcaac

SEQ ID NO: 331839 - DNA, 58 bp, Artificial
  Synthetic oligonucleotide
atccggggtggccaccgcgacctctcgtcccggcaccttgtgtgcctctgcgaagcgc

SEQ ID NO: 331840 - DNA, 58 bp, Artificial
  Synthetic oligonucleotide
atccgggtagtgttatcagggccatagaagaattgaccccaggtaacaccagcataga

SEQ ID NO: 331841 - DNA, 60 bp, Artificial
  Synthetic oligonucleotide
atccgggtgccactgtgaatgaagaagcattaaggcagaaaattatggagagtggaggga

SEQ ID NO: 331842 - DNA, 57 bp, Artificial
  Synthetic oligonucleotide
atccgggtttgcaatagtttccaaggacaatggaatcagaattggatcaaggggaca

SEQ ID NO: 331843 - DNA, 55 bp, Artificial
  Synthetic oligonucleotide
atccggtaattttagaggtgagttgggcttcgatctggttcgccttcgtgagacg

SEQ ID NO: 331844 - DNA, 51 bp, Artificial
  Synthetic oligonucleotide
atccggtaccggtactgaatccagtggaaacaaccttgatcaatcaaccaa

SEQ ID NO: 331845 - DNA, 55 bp, Artificial
  Synthetic oligonucleotide
atccggtacgctggggacatgacagccgcgcctacttggtccatcctcgtcccga

SEQ ID NO: 331846 - DNA, 53 bp, Artificial
  Synthetic oligonucleotide
atccggtagaccgtctggggtgagtgaggtcgaaaaacctaacatccttgata

SEQ ID NO: 331847 - DNA, 59 bp, Artificial
  Synthetic oligonucleotide
atccggtatcacttaggcgctctgggtgtgtatacgcaacgtgtaggctggttgtggcg

SEQ ID NO: 331848 - DNA, 58 bp, Artificial
  Synthetic oligonucleotide
atccggtcaaattggatacgctgtatacgagacagatttttaggtgcacgtgtccgtc

SEQ ID NO: 331849 - DNA, 59 bp, Artificial
  Synthetic oligonucleotide
atccggtcgaagcatcgaacgaaatagctgacactgaatggaaaaacaccttatcacaa

SEQ ID NO: 331850 - DNA, 57 bp, Artificial
  Synthetic oligonucleotide
atccggtctcggaacaaccgctcttgctaggactaatcctagcaggccggcgttcaa

SEQ ID NO: 331851 - DNA, 57 bp, Artificial
  Synthetic oligonucleotide
atccggtgtatcctgagactgaagtctgggaatccattagatggacaaagaaccccc

SEQ ID NO: 331852 - DNA, 55 bp, Artificial
  Synthetic oligonucleotide
atccgtacccgtcaggccgtcgtgtggggctgtctgatcatcgaatacacgaagc

SEQ ID NO: 331853 - DNA, 60 bp, Artificial
  Synthetic oligonucleotide
atccgtagctattcagaattacaatcagcacaacagaatgtcttaccattcaacgcaatc

SEQ ID NO: 331854 - DNA, 58 bp, Artificial
  Synthetic oligonucleotide
atccgtagtaagtctgctaataggattggccaacctgggtctgaacattggacttcat

SEQ ID NO: 331855 - DNA, 57 bp, Artificial
  Synthetic oligonucleotide
atccgtagtatttgatactatttcactaaaatctggtggattttaatagtagaatca

SEQ ID NO: 331856 - DNA, 55 bp, Artificial
  Synthetic oligonucleotide
atccgtccaggtcagaggccctctcaaagtctccgaaccggtagtgcgtggaccg

SEQ ID NO: 331857 - DNA, 55 bp, Artificial
  Synthetic oligonucleotide
atccgtccctgtaggtcgaaccttgtacttaccaccatatgagtacttagaaaga

SEQ ID NO: 331858 - DNA, 60 bp, Artificial
  Synthetic oligonucleotide
atccgtcccttcagacaggatcagaagaactaagatcattatataatgcagtagcaaccc

SEQ ID NO: 331859 - DNA, 55 bp, Artificial
  Synthetic oligonucleotide
atccgtcgaaaggtggacgcaagccagcacgcctgatagtttacccagacttggg

SEQ ID NO: 331860 - DNA, 51 bp, Artificial
  Synthetic oligonucleotide
atccgtcgagttgaccttctcgcacccgtagttcagtgcgacctcgttgta

SEQ ID NO: 331861 - DNA, 53 bp, Artificial
  Synthetic oligonucleotide
atccgtcggaatccgaccctcacgacatgcccaaccgaagaacgacacgcacg

SEQ ID NO: 331862 - DNA, 50 bp, Artificial
  Synthetic oligonucleotide
atccgtctcaggaaggatgcgagccacggtatgcggcatgggccgactgt

SEQ ID NO: 331863 - DNA, 58 bp, Artificial
  Synthetic oligonucleotide
atccgtctgaactaattctgtagtggccccatgtgggcctcatttccattttagctaa

SEQ ID NO: 331864 - DNA, 56 bp, Artificial
  Synthetic oligonucleotide
atccgtgaacttggttaaaattgatgggataccattcgtaccgattagcattgttg

SEQ ID NO: 331865 - DNA, 60 bp, Artificial
  Synthetic oligonucleotide
atccgtgactacgggctgctcgcagagccctccccggatggggcacagtgcactgtgatc

SEQ ID NO: 331866 - DNA, 55 bp, Artificial
  Synthetic oligonucleotide
atccgtgagaaatgacacaggaacctacatagtggaacttctggtcactgacctg

SEQ ID NO: 331867 - DNA, 53 bp, Artificial
  Synthetic oligonucleotide
atccgtgaggaggacggcttgggaggttagaggcccgaatgtggaaccgaagg

SEQ ID NO: 331868 - DNA, 55 bp, Artificial
  Synthetic oligonucleotide
atccgtgataaacaggctagttgaagcctatagttgcgcgcgcactaacgcacca

SEQ ID NO: 331869 - DNA, 60 bp, Artificial
  Synthetic oligonucleotide
atccgtgattgggagatgagacctctcatgtgctattgctaaatctgaagacagaaccac

SEQ ID NO: 331870 - DNA, 60 bp, Artificial
  Synthetic oligonucleotide
atccgtgcatctggagcatgacgaagtttccttcgtcggccctgacgctgttgctctccc

SEQ ID NO: 331871 - DNA, 52 bp, Artificial
  Synthetic oligonucleotide
atccgtgtgcttaatagggctgtacacggtagcaacccccagggggggttaa

SEQ ID NO: 331872 - DNA, 59 bp, Artificial
  Synthetic oligonucleotide
atccgttcggctcaccacaaactgacaacgtatgtgtcaacttccagatattggggcaa

SEQ ID NO: 331873 - DNA, 53 bp, Artificial
  Synthetic oligonucleotide
atccgtttatgttttaggtaaggtctggatggacgagaatattaagaccaaaa

SEQ ID NO: 331874 - DNA, 55 bp, Artificial
  Synthetic oligonucleotide
atccgtttgattgtacggtgtaatgtccccctgtgggcctcatttccattttagc

SEQ ID NO: 331875 - DNA, 55 bp, Artificial
  Synthetic oligonucleotide
atccgtttggttgaagggtatgcgagatgagttgaagaaggttctcacttatgag

SEQ ID NO: 331876 - DNA, 51 bp, Artificial
  Synthetic oligonucleotide
atcctaaagaaaagaccacccaggacgcagctatttctggaattcaacaag

SEQ ID NO: 331877 - DNA, 55 bp, Artificial
  Synthetic oligonucleotide
atcctaaagatttgcccactatggctgctatcaaggagttctataacatgcagcg

SEQ ID NO: 331878 - DNA, 59 bp, Artificial
  Synthetic oligonucleotide
atcctaaagtagtgaggaactgtaaaataacaggatggtggccagtcattcagtgtatg

SEQ ID NO: 331879 - DNA, 58 bp, Artificial
  Synthetic oligonucleotide
atcctaaataaccattgtgcagaaaatcaggaagaactaattttagcatggattaatc

SEQ ID NO: 331880 - DNA, 56 bp, Artificial
  Synthetic oligonucleotide
atcctaaatcgcccttactggatgcacagggctcaggggttaaataatggtatttg

SEQ ID NO: 331881 - DNA, 58 bp, Artificial
  Synthetic oligonucleotide
atcctaacaatgagagagggactcaaggagtgaaaggctgggcctttgacaatggaaa

SEQ ID NO: 331882 - DNA, 57 bp, Artificial
  Synthetic oligonucleotide
atcctaacatcgaggaggtagctctgtccaccaccggagagattcccttttacggca

SEQ ID NO: 331883 - DNA, 60 bp, Artificial
  Synthetic oligonucleotide
atcctaacatgaatctggattgcctactcccccaagaatgggtgcagcacttctaccaag

SEQ ID NO: 331884 - DNA, 50 bp, Artificial
  Synthetic oligonucleotide
atcctaactatcttctggcttggaagcaagtgctagcagaactccaggac

SEQ ID NO: 331885 - DNA, 55 bp, Artificial
  Synthetic oligonucleotide
atcctaactgccaccaccatgaaaggggagttcaccatgctaggggtgcacgaca

SEQ ID NO: 331886 - DNA, 57 bp, Artificial
  Synthetic oligonucleotide
atcctaactgtttcaatgatctctctgaactaaaactaactttccatgacttggtcc

SEQ ID NO: 331887 - DNA, 56 bp, Artificial
  Synthetic oligonucleotide
atcctaagaaaactggaggacctatatataggagagtagacggaaagtggatgagg

SEQ ID NO: 331888 - DNA, 55 bp, Artificial
  Synthetic oligonucleotide
atcctaagagtattgtgctgtgtttactctttgtgtagtagatttgagtcgagtc

SEQ ID NO: 331889 - DNA, 60 bp, Artificial
  Synthetic oligonucleotide
atcctaagggcgctcccacctataactggggcgagaatgagacagacgtgttcctgctga

SEQ ID NO: 331890 - DNA, 55 bp, Artificial
  Synthetic oligonucleotide
atcctaagtctataactgtagaagatagtgtctttggtatagagggtctagaagc

SEQ ID NO: 331891 - DNA, 56 bp, Artificial
  Synthetic oligonucleotide
atcctaatgacgcagcggaacaaacaaagctctatcaaaatccgaccacttacgtt

SEQ ID NO: 331892 - DNA, 60 bp, Artificial
  Synthetic oligonucleotide
atcctacaaggtctctacgcgaggcctctcatggaaatctgtgcgtgatgcacagaaggc

SEQ ID NO: 331893 - DNA, 60 bp, Artificial
  Synthetic oligonucleotide
atcctacagctactcatctttttgatgttggctgggagatcctgttcaatcaccattggt

SEQ ID NO: 331894 - DNA, 57 bp, Artificial
  Synthetic oligonucleotide
atcctaccggtaagctatggcgacccgtcggtacctctgttgctaccatcgactcac

SEQ ID NO: 331895 - DNA, 56 bp, Artificial
  Synthetic oligonucleotide
atcctacctttagacaggtagaagattgtgggagatgggcgcgagaaactccgtct

SEQ ID NO: 331896 - DNA, 60 bp, Artificial
  Synthetic oligonucleotide
atcctacgagcagcgtcatgacatctcacacgtgggtaaggtcatgtgcatatctgatgt

SEQ ID NO: 331897 - DNA, 55 bp, Artificial
  Synthetic oligonucleotide
atcctactctaatatcatacggattccatggatcagacgagaaagacccacacag

SEQ ID NO: 331898 - DNA, 58 bp, Artificial
  Synthetic oligonucleotide
atcctacttgcgcctggctggaggcacaagaagagagtgaggaagtaggcttcccagt

SEQ ID NO: 331899 - DNA, 60 bp, Artificial
  Synthetic oligonucleotide
atcctactttccttgacgctcaggatcagcgatactcacttgaacttcatcccatcgagc

SEQ ID NO: 331900 - DNA, 60 bp, Artificial
  Synthetic oligonucleotide
atcctagcccagctcacatacgcatacggcggtgagacggcatgaatcctggacaattcc

SEQ ID NO: 331901 - DNA, 55 bp, Artificial
  Synthetic oligonucleotide
atcctaggcaacggttcgactctgaaggatccacgacacaattaaatcccggagg

SEQ ID NO: 331902 - DNA, 55 bp, Artificial
  Synthetic oligonucleotide
atcctagtgcaaaaacctatccgtatgttataattgatggggaaccagttggagg

SEQ ID NO: 331903 - DNA, 55 bp, Artificial
  Synthetic oligonucleotide
atcctataaaaaccgaacaagaattgcgaaattcacagttgtattccagcagctc

SEQ ID NO: 331904 - DNA, 60 bp, Artificial
  Synthetic oligonucleotide
atcctataagtgtagatagaaagcataggcacctagtacaaattaaatgtccaccaatgc

SEQ ID NO: 331905 - DNA, 59 bp, Artificial
  Synthetic oligonucleotide
atcctatagtgcagaatctacaagggcaaatggtacatcagaacatatcacctagaacc

SEQ ID NO: 331906 - DNA, 59 bp, Artificial
  Synthetic oligonucleotide
atcctatagtgcagaatgtccaagggcaaatggtacaccaacccatatcacctaggact

SEQ ID NO: 331907 - DNA, 57 bp, Artificial
  Synthetic oligonucleotide
atcctatatgtggggaaactacgcttagagactactttgtctttcaaatatgactac

SEQ ID NO: 331908 - DNA, 60 bp, Artificial
  Synthetic oligonucleotide
atcctatcactgtaaatgctcaccgtctttagatggtggtcgagattctatcatcccaca

SEQ ID NO: 331909 - DNA, 53 bp, Artificial
  Synthetic oligonucleotide
atcctatggaaattcccgggatcccctcacgtccagcccctccccagttctgg

SEQ ID NO: 331910 - DNA, 55 bp, Artificial
  Synthetic oligonucleotide
atcctatgggaatccctgcgtccctctcgtgtccagcccctccccgtgtctatgg

SEQ ID NO: 331911 - DNA, 53 bp, Artificial
  Synthetic oligonucleotide
atcctattaggatgtggtttgacctcactgcttgaacgttgtataggcggaca

SEQ ID NO: 331912 - DNA, 55 bp, Artificial
  Synthetic oligonucleotide
atcctattcagggctacataaaatcaggagagcagggtatgacacttacgtattc

SEQ ID NO: 331913 - DNA, 60 bp, Artificial
  Synthetic oligonucleotide
atcctattccattcaatcttgtgtttccgaccaacgagataactcagccaattacatcca

SEQ ID NO: 331914 - DNA, 58 bp, Artificial
  Synthetic oligonucleotide
atcctattcgtctcactcatttgggggtgcacaccgcgtttgtgagacagattatttt

SEQ ID NO: 331915 - DNA, 55 bp, Artificial
  Synthetic oligonucleotide
atcctcaacacgacatcccgaaaaaaacgtaatggaatgcttacgttctccaaca

SEQ ID NO: 331916 - DNA, 57 bp, Artificial
  Synthetic oligonucleotide
atcctcaaccaaccaactcaataatacctacgagaacagtgaatcgggagagataaa

SEQ ID NO: 331917 - DNA, 60 bp, Artificial
  Synthetic oligonucleotide
atcctcaacgcactgcttggagctcacgtcgccccttactcagccggagctattaaccag

SEQ ID NO: 331918 - DNA, 60 bp, Artificial
  Synthetic oligonucleotide
atcctcaactcctttagaaccttgatgttgtgctatagctgaactactcttgtaagacgc

SEQ ID NO: 331919 - DNA, 55 bp, Artificial
  Synthetic oligonucleotide
atcctcacggagccaaatctgctgacaatcgattttgagaaagacgcgtacctaa

SEQ ID NO: 331920 - DNA, 55 bp, Artificial
  Synthetic oligonucleotide
atcctcagatgaatataacgcagaatggggctgatgttcggaagctcagcagcca

SEQ ID NO: 331921 - DNA, 58 bp, Artificial
  Synthetic oligonucleotide
atcctcagggaatcaggagggatcaacaaggaaacaacgggattcacatacagtggga

SEQ ID NO: 331922 - DNA, 59 bp, Artificial
  Synthetic oligonucleotide
atcctcataagatccttgatggaagagactgcacactgatagatgctctcttgggggac

SEQ ID NO: 331923 - DNA, 55 bp, Artificial
  Synthetic oligonucleotide
atcctcataggagtcattattacatggataggaatgaattcacgtagcacctcac

SEQ ID NO: 331924 - DNA, 55 bp, Artificial
  Synthetic oligonucleotide
atcctcatatgcatccgagctatattggtggcatggacattcttagtgttttgag

SEQ ID NO: 331925 - DNA, 51 bp, Artificial
  Synthetic oligonucleotide
atcctcatggtctgttgaattgtaatatcaacaatgtagttagaataaagg

SEQ ID NO: 331926 - DNA, 60 bp, Artificial
  Synthetic oligonucleotide
atcctcattaacgcctgtgacatactgaaagatacgtgaaggttcattacgcatctgtaa

SEQ ID NO: 331927 - DNA, 60 bp, Artificial
  Synthetic oligonucleotide
atcctcattgggtgacagaatcaatgctgtcgaaccacgagttgacagtctggatacagt

SEQ ID NO: 331928 - DNA, 58 bp, Artificial
  Synthetic oligonucleotide
atcctccaagcggcagccttgctcctacggacctagaatacaaacttcaatggtacca

SEQ ID NO: 331929 - DNA, 59 bp, Artificial
  Synthetic oligonucleotide
atcctccactttgtacatcttgaaatagaggggattttctatctcccagatatacacgc

SEQ ID NO: 331930 - DNA, 55 bp, Artificial
  Synthetic oligonucleotide
atcctcccaagctatgccagtgattcgtcgctatgatgggacacctcatggtacg

SEQ ID NO: 331931 - DNA, 60 bp, Artificial
  Synthetic oligonucleotide
atcctcccagctcgccgatgcgacatccgctgtgctcgctggtctcccgctgactgacgt

SEQ ID NO: 331932 - DNA, 51 bp, Artificial
  Synthetic oligonucleotide
atcctccccaacataaatctggaccaggatactaccagcaagccccgaccg

SEQ ID NO: 331933 - DNA, 55 bp, Artificial
  Synthetic oligonucleotide
atcctccgcttgttcccgaataaggtctgggtataatactgttagcgcctctaaa

SEQ ID NO: 331934 - DNA, 53 bp, Artificial
  Synthetic oligonucleotide
atcctccggggggacagaggcgattttcttctcgccaaagagtattccccttc

SEQ ID NO: 331935 - DNA, 52 bp, Artificial
  Synthetic oligonucleotide
atcctcgaccaggagacggatgccattctccaaggacgggtggtccaacacc

SEQ ID NO: 331936 - DNA, 54 bp, Artificial
  Synthetic oligonucleotide
atcctcgacgacaagcttaaggatctcctcgctcccccagctgacgtccaggta

SEQ ID NO: 331937 - DNA, 57 bp, Artificial
  Synthetic oligonucleotide
atcctcgagttaacactcacgaaaagaggctcattggtattgtcttgcccagatcat

SEQ ID NO: 331938 - DNA, 55 bp, Artificial
  Synthetic oligonucleotide
atcctcgccggacatcgtcggcactatcaacgccatactggctagaatagctgcc

SEQ ID NO: 331939 - DNA, 57 bp, Artificial
  Synthetic oligonucleotide
atcctcggaatacgcaggaccatgtacgctccttgtgtctattggcttggcacaaca

SEQ ID NO: 331940 - DNA, 53 bp, Artificial
  Synthetic oligonucleotide
atcctcggtttagcaaacctggtgttgtacttccgatggatgggccctcaacg

SEQ ID NO: 331941 - DNA, 54 bp, Artificial
  Synthetic oligonucleotide
atcctcgtggttggccgccgttgttggtaaggcccctatggtgaggtaactggc

SEQ ID NO: 331942 - DNA, 57 bp, Artificial
  Synthetic oligonucleotide
atcctctagccaaggcacagtctcaaccgtgcccaaagaagttttggactcctggac

SEQ ID NO: 331943 - DNA, 56 bp, Artificial
  Synthetic oligonucleotide
atcctctagtaagtttgtgagacgtctggtgacgtgtgggaacttattggaaacaa

SEQ ID NO: 331944 - DNA, 55 bp, Artificial
  Synthetic oligonucleotide
atcctctcactggataaggctgatatacaagatagttaaaaccactcgcctgaac

SEQ ID NO: 331945 - DNA, 50 bp, Artificial
  Synthetic oligonucleotide
atcctctcgttgcagagcggctcaaccgtattatccaccaagtctattga

SEQ ID NO: 331946 - DNA, 60 bp, Artificial
  Synthetic oligonucleotide
atcctctgatgattttgctctcatagtgaacgcaccgaatcatgagggaatacaagcagg

SEQ ID NO: 331947 - DNA, 60 bp, Artificial
  Synthetic oligonucleotide
atcctctgggattctttcccgaccaccagttggatccagccttcagagcaaacacagcaa

SEQ ID NO: 331948 - DNA, 55 bp, Artificial
  Synthetic oligonucleotide
atcctcttattgatcagtatctgtactacctgaacagaacgcaaggaacaacctc

SEQ ID NO: 331949 - DNA, 60 bp, Artificial
  Synthetic oligonucleotide
atcctcttcatcacttgctcaagtcggtcggtacatcaagcacaagttggtacaagtatg

SEQ ID NO: 331950 - DNA, 59 bp, Artificial
  Synthetic oligonucleotide
atcctgaacataccgttaccacattcaaggataatgtaaatctgatgacttacggcgac

SEQ ID NO: 331951 - DNA, 53 bp, Artificial
  Synthetic oligonucleotide
atcctgaatttcgcggactcaaccttgacgcattctattctactaaggacatg

SEQ ID NO: 331952 - DNA, 58 bp, Artificial
  Synthetic oligonucleotide
atcctgacactactaatcctggtgagggaacttctcagagctttggcggggggaatca

SEQ ID NO: 331953 - DNA, 50 bp, Artificial
  Synthetic oligonucleotide
atcctgacctgggagtgcgtatctgcgagaagcgcgctctatatgatgtg

SEQ ID NO: 331954 - DNA, 60 bp, Artificial
  Synthetic oligonucleotide
atcctgagatcaggaaacctctgagatacatgcttggacaagcccatgcaacgcccaaag

SEQ ID NO: 331955 - DNA, 53 bp, Artificial
  Synthetic oligonucleotide
atcctgagcaaggttatgataagtatgtcatccggaaaaacccaaatggagaa

SEQ ID NO: 331956 - DNA, 60 bp, Artificial
  Synthetic oligonucleotide
atcctgagctaacagggctggactgtatgaggccttgcttctgggttgaattaatcaggg

SEQ ID NO: 331957 - DNA, 55 bp, Artificial
  Synthetic oligonucleotide
atcctgagggacttatcggcctctttgccccgttctcgcccgggcatgtctggga

SEQ ID NO: 331958 - DNA, 55 bp, Artificial
  Synthetic oligonucleotide
atcctgagggcctagtgggtctgtttccaccattctctccgggccatagctggga

SEQ ID NO: 331959 - DNA, 60 bp, Artificial
  Synthetic oligonucleotide
atcctgagtggattatgacacagactatgatacatcaccaaactgctgacagtgtacaat

SEQ ID NO: 331960 - DNA, 57 bp, Artificial
  Synthetic oligonucleotide
atcctgatctgtctacttcagttccagctttcgtcctcatccagacctcagtaccaa

SEQ ID NO: 331961 - DNA, 57 bp, Artificial
  Synthetic oligonucleotide
atcctgcaagaaagaggggtgttgttgtggtaacaaacacaactaccctgatgagct

SEQ ID NO: 331962 - DNA, 55 bp, Artificial
  Synthetic oligonucleotide
atcctgcacgacctggcgtgtctgcatcatgctcggagtttggtcagctccgttg

SEQ ID NO: 331963 - DNA, 60 bp, Artificial
  Synthetic oligonucleotide
atcctgcactattgttacactaaatattcacttgaatacatccgtttccatcaagaaaca

SEQ ID NO: 331964 - DNA, 50 bp, Artificial
  Synthetic oligonucleotide
atcctgcccgaaataatcctgaacctcaaggaggtgacactagctcaact

SEQ ID NO: 331965 - DNA, 60 bp, Artificial
  Synthetic oligonucleotide
atcctgcctttggattgcagaagatgcattatattaatggcgatcagcgcactccattta

SEQ ID NO: 331966 - DNA, 54 bp, Artificial
  Synthetic oligonucleotide
atcctgcgacagaggagaacaagaaatggagccagtagatcataatctagaccc

SEQ ID NO: 331967 - DNA, 60 bp, Artificial
  Synthetic oligonucleotide
atcctgcgcagatgtcacgtagagactaaccatggtacccaatttcactgatactcgatc

SEQ ID NO: 331968 - DNA, 55 bp, Artificial
  Synthetic oligonucleotide
atcctgcggattctcaagggcgagagtgtgagcccgccggattgggcggtaacca

SEQ ID NO: 331969 - DNA, 60 bp, Artificial
  Synthetic oligonucleotide
atcctgcggtactcatcgagagcgtctgaggtctctttgacctgcgctctaagttcgagg

SEQ ID NO: 331970 - DNA, 60 bp, Artificial
  Synthetic oligonucleotide
atcctgctcaagtggcctatgaggatgacgcctggaaagagaccctggtgtggaagtttg

SEQ ID NO: 331971 - DNA, 60 bp, Artificial
  Synthetic oligonucleotide
atcctgctgctatgcctcatcttcttattggtgcttctggattaccaaggtatgttgccc

SEQ ID NO: 331972 - DNA, 51 bp, Artificial
  Synthetic oligonucleotide
atcctggaaaatttgtcaacgaagaagctctgagacaaatcctcagggaat

SEQ ID NO: 331973 - DNA, 59 bp, Artificial
  Synthetic oligonucleotide
atcctggaggaaataaagcaagaagccttaaagcattttgatcctcgcttgctaactgc

SEQ ID NO: 331974 - DNA, 59 bp, Artificial
  Synthetic oligonucleotide
atcctggagtcaaaggatttgcattcttagatggggaaaattcatggcttggaaggaca

SEQ ID NO: 331975 - DNA, 60 bp, Artificial
  Synthetic oligonucleotide
atcctggatcccaaggctcgagccgaggtgacactgatctcctgggaggacaagtgacac

SEQ ID NO: 331976 - DNA, 51 bp, Artificial
  Synthetic oligonucleotide
atcctgggctactagaaactgcagagggtaatgagaagctgctacagcagt

SEQ ID NO: 331977 - DNA, 59 bp, Artificial
  Synthetic oligonucleotide
atcctggtcatagccctatgtaaggttgacaccgctctactgaaatttgtcgattacaa

SEQ ID NO: 331978 - DNA, 52 bp, Artificial
  Synthetic oligonucleotide
atcctggtgagagaggcggtgagtttacgaacacctacaatccgtcaaatac

SEQ ID NO: 331979 - DNA, 58 bp, Artificial
  Synthetic oligonucleotide
atcctggttagatcggccatccactcaaggtcagattgtgcttgatcgtaggagacag

SEQ ID NO: 331980 - DNA, 57 bp, Artificial
  Synthetic oligonucleotide
atcctggttcgctcgaacatcgtactgcttctcagcggtacggtgaaccggttactg

SEQ ID NO: 331981 - DNA, 55 bp, Artificial
  Synthetic oligonucleotide
atcctggttgggatcaaagcaatgttgccaaactttagaggcatggaagggagag

SEQ ID NO: 331982 - DNA, 55 bp, Artificial
  Synthetic oligonucleotide
atcctgtaaattaaatggtgtgtacaccaacccaacagctagtgagtttatggat

SEQ ID NO: 331983 - DNA, 53 bp, Artificial
  Synthetic oligonucleotide
atcctgtaattaaggggacctacaacaacactggaaaccagccaatcctttat

SEQ ID NO: 331984 - DNA, 50 bp, Artificial
  Synthetic oligonucleotide
atcctgtactgaatgcaggatatagagtattagaagcatcgtctcatgag

SEQ ID NO: 331985 - DNA, 59 bp, Artificial
  Synthetic oligonucleotide
atcctgtaggattgaacctctacagttattacatagctcgtaattaagacagtgactac

SEQ ID NO: 331986 - DNA, 50 bp, Artificial
  Synthetic oligonucleotide
atcctgtatttgagggactcgtcatcccaggttgcctttaggtcgatgat

SEQ ID NO: 331987 - DNA, 54 bp, Artificial
  Synthetic oligonucleotide
atcctgtcccacagggaggagctagacattagaactgtctggaggaccgaggag

SEQ ID NO: 331988 - DNA, 56 bp, Artificial
  Synthetic oligonucleotide
atcctgtgacgtactttctacaggtccagaacattcctgcaaaacttgtacgaaat

SEQ ID NO: 331989 - DNA, 59 bp, Artificial
  Synthetic oligonucleotide
atcctgttccagtctcggtcgccaagtatggctgaattgtgggacccacactatcctcg

SEQ ID NO: 331990 - DNA, 54 bp, Artificial
  Synthetic oligonucleotide
atccttaaataaactagtttcctataatgactttagatcttctttagacgacca

SEQ ID NO: 331991 - DNA, 53 bp, Artificial
  Synthetic oligonucleotide
atccttaaccctgaaagaaagcgtaggtttagacggtgtttacaatatatcag

SEQ ID NO: 331992 - DNA, 52 bp, Artificial
  Synthetic oligonucleotide
atccttacaagctttcatctaccctgaccaacatctatacaggttccagact

SEQ ID NO: 331993 - DNA, 60 bp, Artificial
  Synthetic oligonucleotide
atccttaccagctgacaaaaaccgaggtcgacgccgtttcactatattgcactcagatga

SEQ ID NO: 331994 - DNA, 55 bp, Artificial
  Synthetic oligonucleotide
atccttacgatcatatcttggttagacttggcagagcgcatcttgggactcgtgt

SEQ ID NO: 331995 - DNA, 50 bp, Artificial
  Synthetic oligonucleotide
atccttagagaggctctcaacgctgacacaggaaattccgagtgggatcc

SEQ ID NO: 331996 - DNA, 50 bp, Artificial
  Synthetic oligonucleotide
atccttagtgactgcacgcatctctattgatacatccataggggagagcg

SEQ ID NO: 331997 - DNA, 55 bp, Artificial
  Synthetic oligonucleotide
atccttatgtggatcgtgtgatccgagctattgacgcagcaacggatgacaattc

SEQ ID NO: 331998 - DNA, 54 bp, Artificial
  Synthetic oligonucleotide
atccttcaatttctgatcagttgccggtgccgtccccctgggttaaatacctaa

SEQ ID NO: 331999 - DNA, 60 bp, Artificial
  Synthetic oligonucleotide
atccttcactaagaatgagatgggcaatgagcagcaaattcccaataatagctaacaaga

SEQ ID NO: 332000 - DNA, 60 bp, Artificial
  Synthetic oligonucleotide
atccttcagtagcaatggagtagtggccccatgtgggcttcatctccattttagctaact

SEQ ID NO: 332001 - DNA, 60 bp, Artificial
  Synthetic oligonucleotide
atccttccagacccgatctcctgacactaggttagctgagagggcagcagccatgttaga

SEQ ID NO: 332002 - DNA, 50 bp, Artificial
  Synthetic oligonucleotide
atccttcgggggaaacctcggaaaggcagtctttcaggccaagaaaaggg

SEQ ID NO: 332003 - DNA, 55 bp, Artificial
  Synthetic oligonucleotide
atccttcgtatacgtgtacgtttcgattatatacgattcgatcgtgtcaactccg

SEQ ID NO: 332004 - DNA, 55 bp, Artificial
  Synthetic oligonucleotide
atccttctcaatatgaaggagtgttttatactgatggctcggccatcaaaagtcc

SEQ ID NO: 332005 - DNA, 60 bp, Artificial
  Synthetic oligonucleotide
atccttgaagatgaacagatgtatcaaaagtgctgcaatctattcgagaaattcttccct

SEQ ID NO: 332006 - DNA, 60 bp, Artificial
  Synthetic oligonucleotide
atccttgaattcagaagccatacactcgatctcaggtgataaagggccttcagatctcat

SEQ ID NO: 332007 - DNA, 57 bp, Artificial
  Synthetic oligonucleotide
atccttgactcggaatatgagttacatagggacgttgttctagatagaaagtgtaag

SEQ ID NO: 332008 - DNA, 60 bp, Artificial
  Synthetic oligonucleotide
atccttgatgacttggatctttatgttggagcagtaccctgagagttctctcctcaggct

SEQ ID NO: 332009 - DNA, 53 bp, Artificial
  Synthetic oligonucleotide
atccttgcccccactagagtcgtggcagctgagatggaggaagcccttagagg

SEQ ID NO: 332010 - DNA, 60 bp, Artificial
  Synthetic oligonucleotide
atccttgggatacacacaagtggcaatggcactatgggagcagccaatagggtctttcca

SEQ ID NO: 332011 - DNA, 56 bp, Artificial
  Synthetic oligonucleotide
atccttggtacctaaagccgccagaggtcaatacagtgggtttgtgagaacactat

SEQ ID NO: 332012 - DNA, 54 bp, Artificial
  Synthetic oligonucleotide
atccttggtcccactaccaacgtggaccaagcgccctaccagggcagggtgtac

SEQ ID NO: 332013 - DNA, 57 bp, Artificial
  Synthetic oligonucleotide
atccttgtaaggttgatttgcatacacaagctattgaaggggcttggggttctggtg

SEQ ID NO: 332014 - DNA, 57 bp, Artificial
  Synthetic oligonucleotide
atccttgtaagtactgtaaagaatagcatctaagattttggtccctgaagaaagcaa

SEQ ID NO: 332015 - DNA, 55 bp, Artificial
  Synthetic oligonucleotide
atccttgtccccagatctggatcagttccctctgggcaggcgattcttgacccag

SEQ ID NO: 332016 - DNA, 56 bp, Artificial
  Synthetic oligonucleotide
atccttgtgggatacgataacaacctcaaactatattttggcaagatcggtagtac

SEQ ID NO: 332017 - DNA, 59 bp, Artificial
  Synthetic oligonucleotide
atccttgtgtgcgtgtagagtggatcctccacgttgtacatcttgaaatagaggggatt

SEQ ID NO: 332018 - DNA, 60 bp, Artificial
  Synthetic oligonucleotide
atcctttctaggttgacagttgctcttcaatccgctagaggtgaaggtgctcagacgaga

SEQ ID NO: 332019 - DNA, 55 bp, Artificial
  Synthetic oligonucleotide
atcctttctgtggacacagtctctgaggagggagttgtcgggttactgctctaac

SEQ ID NO: 332020 - DNA, 60 bp, Artificial
  Synthetic oligonucleotide
atcctttgtgagcgagtgcttcacaacagcgaagtcatacctcagaagcagaaaggatat

SEQ ID NO: 332021 - DNA, 60 bp, Artificial
  Synthetic oligonucleotide
atcctttgttacatcaagaaacaggcctgtatcaagcgctgcctaatgcagttacggatc

SEQ ID NO: 332022 - DNA, 56 bp, Artificial
  Synthetic oligonucleotide
atccttttaaactgagcatacacctacatatttttcttatcgaaagctgcggtgtt

SEQ ID NO: 332023 - DNA, 54 bp, Artificial
  Synthetic oligonucleotide
atccttttagattgtacgggagcttcctactcacacatctagctgcgcctagag

SEQ ID NO: 332024 - DNA, 55 bp, Artificial
  Synthetic oligonucleotide
atcgaaaaagagttctcagaagttgaagggaggatccaagatcttgagaaatacg

SEQ ID NO: 332025 - DNA, 55 bp, Artificial
  Synthetic oligonucleotide
atcgaaaacaacatcgctgcaatcatcgtggggtgttcatcagtcttcgcatctt

SEQ ID NO: 332026 - DNA, 57 bp, Artificial
  Synthetic oligonucleotide
atcgaaaaggcttggggtgttttccctagggacctctgattctcctgtgacgcatgc

SEQ ID NO: 332027 - DNA, 59 bp, Artificial
  Synthetic oligonucleotide
atcgaaaattcgaacaatggatcaaacagcctatgcatcctggtgtgctaatcacgcat

SEQ ID NO: 332028 - DNA, 50 bp, Artificial
  Synthetic oligonucleotide
atcgaaagaacaccagggttttacccgaacttatcgaaatggtggggcgg

SEQ ID NO: 332029 - DNA, 60 bp, Artificial
  Synthetic oligonucleotide
atcgaaaggtcagtggagttcgacaacttttcaaaggaagcagctgcgaacatcgagatg

SEQ ID NO: 332030 - DNA, 60 bp, Artificial
  Synthetic oligonucleotide
atcgaaattgactgagcaagcgatggatcttgtaactgcagctgaacctgagataatcgc

SEQ ID NO: 332031 - DNA, 52 bp, Artificial
  Synthetic oligonucleotide
atcgaaatttagtgagtccctaacagataacaatctaattagaatgaagggt

SEQ ID NO: 332032 - DNA, 59 bp, Artificial
  Synthetic oligonucleotide
atcgaacatacgcgcttgcgtgtccgttgtcaaatgctcggcttgcgtgtcccgtgcga

SEQ ID NO: 332033 - DNA, 60 bp, Artificial
  Synthetic oligonucleotide
atcgaacatgcaagcaggctggaacgtgcccccctgatatcatacctagggtggaacagg

SEQ ID NO: 332034 - DNA, 59 bp, Artificial
  Synthetic oligonucleotide
atcgaaccagctatcccgtctgcactcggtcatcccaattctgaaggttatactgatat

SEQ ID NO: 332035 - DNA, 55 bp, Artificial
  Synthetic oligonucleotide
atcgaaccagttataaatgaggttatcgaaccagttataaatgaggttatcgaac

SEQ ID NO: 332036 - DNA, 58 bp, Artificial
  Synthetic oligonucleotide
atcgaaccctaatgagctgtcctattggtgaagttccctctccatacaactcaagatt

SEQ ID NO: 332037 - DNA, 55 bp, Artificial
  Synthetic oligonucleotide
atcgaacctctgagagtcagtatctggtacctggttatgacgggtggtgggcatg

SEQ ID NO: 332038 - DNA, 59 bp, Artificial
  Synthetic oligonucleotide
atcgaacggtctgactgccaatgaatcagggaggctaattgatttcctcaaagatgtga

SEQ ID NO: 332039 - DNA, 52 bp, Artificial
  Synthetic oligonucleotide
atcgaacgtaaatcgatagtttggcgcttaagtcaagttctaacggtttctt

SEQ ID NO: 332040 - DNA, 57 bp, Artificial
  Synthetic oligonucleotide
atcgaactgacttcataccattgctttttagaaccggcgatttaagacaagcagact

SEQ ID NO: 332041 - DNA, 60 bp, Artificial
  Synthetic oligonucleotide
atcgaagaatctgttattcgtgcattgatatttaccttcgaactggacaagcacgtggag

SEQ ID NO: 332042 - DNA, 58 bp, Artificial
  Synthetic oligonucleotide
atcgaagatcggaagaggtgactcgagcgctgaacggggattacaggcccagaaggcg

SEQ ID NO: 332043 - DNA, 60 bp, Artificial
  Synthetic oligonucleotide
atcgaagatctcatctttctggcacggtctgcactcatattacgaggatcagttgcacac

SEQ ID NO: 332044 - DNA, 55 bp, Artificial
  Synthetic oligonucleotide
atcgaagcaactttggatttgacacatacaggcgttattcacgagggtaaatcca

SEQ ID NO: 332045 - DNA, 51 bp, Artificial
  Synthetic oligonucleotide
atcgaagcagactctcccgggtctaacacgctggtccccagccgacttagg

SEQ ID NO: 332046 - DNA, 60 bp, Artificial
  Synthetic oligonucleotide
atcgaagcagactctcctggatctaacacgttggtcctaagcctgcttaggtgcctgtac

SEQ ID NO: 332047 - DNA, 55 bp, Artificial
  Synthetic oligonucleotide
atcgaagccactattggcatcgtgaattgtgccccttaccccttgaactgtgatc

SEQ ID NO: 332048 - DNA, 56 bp, Artificial
  Synthetic oligonucleotide
atcgaaggacgtgggtttagacaagcttatagcgaattcatgggggtcgcgtggtc

SEQ ID NO: 332049 - DNA, 60 bp, Artificial
  Synthetic oligonucleotide
atcgaagtcctctactagatggaaagatatctctgacaaaatgaccttcctcaagtaagc

SEQ ID NO: 332050 - DNA, 51 bp, Artificial
  Synthetic oligonucleotide
atcgaataaccaatgaagtatccataggaactaatgtttattcccaagatt

SEQ ID NO: 332051 - DNA, 55 bp, Artificial
  Synthetic oligonucleotide
atcgaatatgctaagacgcttgaggtagccaaacattggtagccttaggtttcaa

SEQ ID NO: 332052 - DNA, 56 bp, Artificial
  Synthetic oligonucleotide
atcgaatccttgatggagtagactgcacactgatagatgctctactgggggaccct

SEQ ID NO: 332053 - DNA, 56 bp, Artificial
  Synthetic oligonucleotide
atcgaatcgctataggagtctatttcgttcatctttttataacgagtctaaacgga

SEQ ID NO: 332054 - DNA, 59 bp, Artificial
  Synthetic oligonucleotide
atcgaatgcaaggtctgtgggtcggagaagcgcgtccaggacagtaatgtggggaagta

SEQ ID NO: 332055 - DNA, 58 bp, Artificial
  Synthetic oligonucleotide
atcgaatggggttatgggagtgaaacgacttactgaagcacggaggaagcagtctgga

SEQ ID NO: 332056 - DNA, 53 bp, Artificial
  Synthetic oligonucleotide
atcgaatgtgttagttacggtagatacaaacgatacacggcaggtcttcaaca

SEQ ID NO: 332057 - DNA, 56 bp, Artificial
  Synthetic oligonucleotide
atcgaattctgtggcaagacgcaaattccatccctagtctctggggtaccggtggg

SEQ ID NO: 332058 - DNA, 53 bp, Artificial
  Synthetic oligonucleotide
atcgacaattcgtgtatccgggatgggcttcagcttgttgtgcgccatgcggg

SEQ ID NO: 332059 - DNA, 55 bp, Artificial
  Synthetic oligonucleotide
atcgacagactcagagaacttcgtagaaacctcaatctcgatcgattcaagacgg

SEQ ID NO: 332060 - DNA, 55 bp, Artificial
  Synthetic oligonucleotide
atcgacatgatggcggcgtctaaggtgtatagagtttgcgagcagactctgctag

SEQ ID NO: 332061 - DNA, 51 bp, Artificial
  Synthetic oligonucleotide
atcgacatttgtatcgtttgacctcgattatatcgggtgattaatgaaaag

SEQ ID NO: 332062 - DNA, 55 bp, Artificial
  Synthetic oligonucleotide
atcgaccagagcggcaccatccggtgcgccgttactggccgcaccctattcatcg

SEQ ID NO: 332063 - DNA, 55 bp, Artificial
  Synthetic oligonucleotide
atcgaccaggaccatttaaggagtataatcatgaggctttagttaagtttgcggc

SEQ ID NO: 332064 - DNA, 55 bp, Artificial
  Synthetic oligonucleotide
atcgaccggggcgttgccaaggcagaggcagtcggagcgcgtcaggatttgcggt

SEQ ID NO: 332065 - DNA, 60 bp, Artificial
  Synthetic oligonucleotide
atcgacctgaatgatcagacgattaaccaggtgcgcgcatattcaggcagctgtagcaat

SEQ ID NO: 332066 - DNA, 60 bp, Artificial
  Synthetic oligonucleotide
atcgacctttactgttccctgagacgctactatctggagacacctcctatcactgctact

SEQ ID NO: 332067 - DNA, 55 bp, Artificial
  Synthetic oligonucleotide
atcgacgaagatagcaagtacagcgacgtggttaagcaaactgtagacgcaattg

SEQ ID NO: 332068 - DNA, 60 bp, Artificial
  Synthetic oligonucleotide
atcgacgctcaaaagcacacagtgaccgacgggccatcattctacaacgttgccgtgggc

SEQ ID NO: 332069 - DNA, 55 bp, Artificial
  Synthetic oligonucleotide
atcgacgctcgtagcgtaatttggccatgatcctttatcggagctacttccgccg

SEQ ID NO: 332070 - DNA, 60 bp, Artificial
  Synthetic oligonucleotide
atcgacggcacgtatttcatgtacaacagcagtggccaaatcacattaaaagacaacata

SEQ ID NO: 332071 - DNA, 59 bp, Artificial
  Synthetic oligonucleotide
atcgacggcgagcgagtcactattcgtaacaaggatgaggcgacggtcgttaggaatca

SEQ ID NO: 332072 - DNA, 60 bp, Artificial
  Synthetic oligonucleotide
atcgacgtgacgcatccgggtgtcaagctttacgatcgtgaagcgtggctcaaactcatg

SEQ ID NO: 332073 - DNA, 55 bp, Artificial
  Synthetic oligonucleotide
atcgacgttagcaaagtcagtatctacaattacggaagaattatcagacgcagct

SEQ ID NO: 332074 - DNA, 60 bp, Artificial
  Synthetic oligonucleotide
atcgactcctaatttgtcactcacacttgctttgataaattccaactgatgattaatgat

SEQ ID NO: 332075 - DNA, 57 bp, Artificial
  Synthetic oligonucleotide
atcgactgcctggtccccttttgaccgtaagattgtgcaatacgcaggcgaggttta

SEQ ID NO: 332076 - DNA, 53 bp, Artificial
  Synthetic oligonucleotide
atcgactttaaccttagagttggtaggaacggagaacagagcacgatctattg

SEQ ID NO: 332077 - DNA, 55 bp, Artificial
  Synthetic oligonucleotide
atcgagaaaatatgcactcaagggaaaaggccaacagacctgggacaatgtggac

SEQ ID NO: 332078 - DNA, 55 bp, Artificial
  Synthetic oligonucleotide
atcgagacatgggtgtacaatcggccttgttctaatcccgtcatttacgggtgca

SEQ ID NO: 332079 - DNA, 55 bp, Artificial
  Synthetic oligonucleotide
atcgagacgctgacgatcgagatggtgcagcaaaccattgggactaacagtccca

SEQ ID NO: 332080 - DNA, 55 bp, Artificial
  Synthetic oligonucleotide
atcgagagataggcttgtctgcagtaaataagaattgagtgtcagtgacttgaga

SEQ ID NO: 332081 - DNA, 55 bp, Artificial
  Synthetic oligonucleotide
atcgagcaaatcccgattaacggcgttgttaccatgactgaggatgcacctccaa

SEQ ID NO: 332082 - DNA, 51 bp, Artificial
  Synthetic oligonucleotide
atcgagcactcgtctacacgacaccgctgtataccgtttggcggttcaagt

SEQ ID NO: 332083 - DNA, 60 bp, Artificial
  Synthetic oligonucleotide
atcgagcacttgtcatagtcctgggacaaataaatgctcgttgtatttgtctcgaggaga

SEQ ID NO: 332084 - DNA, 55 bp, Artificial
  Synthetic oligonucleotide
atcgagcagcgtcgccgagtctatatacatgaagacaccccgctgtttgatcccc

SEQ ID NO: 332085 - DNA, 55 bp, Artificial
  Synthetic oligonucleotide
atcgagcatatcgacaatttgactcaggacggttcggacattgcgatctacccca

SEQ ID NO: 332086 - DNA, 51 bp, Artificial
  Synthetic oligonucleotide
atcgagcatttcctacaggatgaatcagcatatactggagatctcttaatt

SEQ ID NO: 332087 - DNA, 60 bp, Artificial
  Synthetic oligonucleotide
atcgagccaaaagcccaacgagtttaaatggagatggcgctttcttgcttatcaatcaga

SEQ ID NO: 332088 - DNA, 57 bp, Artificial
  Synthetic oligonucleotide
atcgagcgattcgacccggcacaaggcatcactttcctcgcccgtgtttatcccgac

SEQ ID NO: 332089 - DNA, 60 bp, Artificial
  Synthetic oligonucleotide
atcgagcgctatcgtgcactcgttgatccaggcgccctccctgctactaaccaactgccg

SEQ ID NO: 332090 - DNA, 58 bp, Artificial
  Synthetic oligonucleotide
atcgaggaacgtcggtatgtgactcagttgtttggagattgtccagcgggagagttcc

SEQ ID NO: 332091 - DNA, 54 bp, Artificial
  Synthetic oligonucleotide
atcgaggatgcggtgttggacctcgaggcaattgaaaacaaccacatgactgcc

SEQ ID NO: 332092 - DNA, 60 bp, Artificial
  Synthetic oligonucleotide
atcgagggcgcatgcaaccttgtgcgcctcggtgactagggttgatagctggtttcggat

SEQ ID NO: 332093 - DNA, 60 bp, Artificial
  Synthetic oligonucleotide
atcgagggcgttgccgcagtgctggtcgggcacacaccacacaacaggctcaccagactg

SEQ ID NO: 332094 - DNA, 54 bp, Artificial
  Synthetic oligonucleotide
atcgagggttgccataggcttcgacctccattttaggccttccggactacaaaa

SEQ ID NO: 332095 - DNA, 60 bp, Artificial
  Synthetic oligonucleotide
atcgagtatatagggagaccttcaaatgaatattacatgaacaacaccgagtcactgtgt

SEQ ID NO: 332096 - DNA, 57 bp, Artificial
  Synthetic oligonucleotide
atcgagtggtgggtgggactattaagactccagttgagtcgttaggatacacgctgg

SEQ ID NO: 332097 - DNA, 53 bp, Artificial
  Synthetic oligonucleotide
atcgataaaagaagactgaagactaaaggaggaaccactttaaattattgtac

SEQ ID NO: 332098 - DNA, 60 bp, Artificial
  Synthetic oligonucleotide
atcgataagaatgctctaggtgactgtcccaaatatataaagtctggccaactcaagcta

SEQ ID NO: 332099 - DNA, 57 bp, Artificial
  Synthetic oligonucleotide
atcgatactttacgtggtgggtgcttctacaaccaatgccgcaaacctcgtgccgtc

SEQ ID NO: 332100 - DNA, 50 bp, Artificial
  Synthetic oligonucleotide
atcgatagatgggtgtgcaatgcaattctggttttctatgcaatcattag

SEQ ID NO: 332101 - DNA, 55 bp, Artificial
  Synthetic oligonucleotide
atcgatagattacgcagtagagcaggtctactcggagttccttggaaactaggtc

SEQ ID NO: 332102 - DNA, 60 bp, Artificial
  Synthetic oligonucleotide
atcgatagcagaagattgcggaggcatcagcgatctactaaatcgagtagcagcaagatt

SEQ ID NO: 332103 - DNA, 60 bp, Artificial
  Synthetic oligonucleotide
atcgatatgaccacataggtaattgtgaggacccagacttcgggcccatattgtcttgcc

SEQ ID NO: 332104 - DNA, 60 bp, Artificial
  Synthetic oligonucleotide
atcgatattacattcgccacgtttgcaaacgtgtgctatctgtggagaaggatacgctga

SEQ ID NO: 332105 - DNA, 51 bp, Artificial
  Synthetic oligonucleotide
atcgatcgaccgggcaccttcctcgttcacaggcgtcacttatggcggtgt

SEQ ID NO: 332106 - DNA, 55 bp, Artificial
  Synthetic oligonucleotide
atcgatcgactaccagcagcatactatttggagtggttgtggtcagtgagacaac

SEQ ID NO: 332107 - DNA, 55 bp, Artificial
  Synthetic oligonucleotide
atcgatcgactgaacccagcgtattgaacattgctcattgccggtggtggctcag

SEQ ID NO: 332108 - DNA, 60 bp, Artificial
  Synthetic oligonucleotide
atcgatcgcagatggatgatgatgaatgggaatcgaccagattcgcagaggacaggttag

SEQ ID NO: 332109 - DNA, 56 bp, Artificial
  Synthetic oligonucleotide
atcgatcgtgcgttacacgtagaattctactcgtaaagcgagtttaattagagccg

SEQ ID NO: 332110 - DNA, 55 bp, Artificial
  Synthetic oligonucleotide
atcgatcgttacgtgcatgcgagggtgatccttagaatacaaaaggatggcagcg

SEQ ID NO: 332111 - DNA, 59 bp, Artificial
  Synthetic oligonucleotide
atcgatctactcaacacaagaaggatgggacaagacaatctcagcacaactttatatga

SEQ ID NO: 332112 - DNA, 50 bp, Artificial
  Synthetic oligonucleotide
atcgatctcatagacaaatggagacaacaaccaatccactaattaggcat

SEQ ID NO: 332113 - DNA, 56 bp, Artificial
  Synthetic oligonucleotide
atcgatctgaaattccccccactcgagaatgtccccgtccttggcgatataggact

SEQ ID NO: 332114 - DNA, 52 bp, Artificial
  Synthetic oligonucleotide
atcgatgacacggcaggcccaacacaattcgcttggcctagtgacaggtcta

SEQ ID NO: 332115 - DNA, 60 bp, Artificial
  Synthetic oligonucleotide
atcgatgataagaagatacatccgagagtaatgatgagattcaaggttccacgatcgcag

SEQ ID NO: 332116 - DNA, 56 bp, Artificial
  Synthetic oligonucleotide
atcgatgccccgcgtagttttcagttgctgattacgggtgcggtgtttgtttcgac

SEQ ID NO: 332117 - DNA, 50 bp, Artificial
  Synthetic oligonucleotide
atcgatggaagcaatcgccaagatgagaatgcttactaagatgctcagtc

SEQ ID NO: 332118 - DNA, 60 bp, Artificial
  Synthetic oligonucleotide
atcgatggagttaaagagctggcctcagagacgatctataaaattgtacagaaacccatc

SEQ ID NO: 332119 - DNA, 60 bp, Artificial
  Synthetic oligonucleotide
atcgatggattacgctataagctacgaacagctggtttctaacgcgatgagattagttta

SEQ ID NO: 332120 - DNA, 60 bp, Artificial
  Synthetic oligonucleotide
atcgatgggccattgcctgataacaatgaaccgagcgggtacgcacaaacggactgcgtg

SEQ ID NO: 332121 - DNA, 60 bp, Artificial
  Synthetic oligonucleotide
atcgatgtactcttgccccatcattatatcttgggacgagggccgttgtatcggagatac

SEQ ID NO: 332122 - DNA, 55 bp, Artificial
  Synthetic oligonucleotide
atcgatgtaggtcgtatatcaagttgaaacgcttgcgtttcaaagggacggttaa

SEQ ID NO: 332123 - DNA, 60 bp, Artificial
  Synthetic oligonucleotide
atcgatgtcgtccagacttggaagttcaggtacgctttgtggagatccaacgctctcctg

SEQ ID NO: 332124 - DNA, 57 bp, Artificial
  Synthetic oligonucleotide
atcgatgtctctctctaataagcgttttaattgttgggctacgtttaaggatcttga

SEQ ID NO: 332125 - DNA, 57 bp, Artificial
  Synthetic oligonucleotide
atcgatgtgcgtgcatcggaattggttgggtgttcaccctttagaacggttaagatc

SEQ ID NO: 332126 - DNA, 57 bp, Artificial
  Synthetic oligonucleotide
atcgattaagggagtgttgaagcctaaacttgttacataccgatgtcctagggatgc

SEQ ID NO: 332127 - DNA, 58 bp, Artificial
  Synthetic oligonucleotide
atcgattataccgctctcctgatgtcccacgtggttgtgaaggaccgtgtaaggtcca

SEQ ID NO: 332128 - DNA, 60 bp, Artificial
  Synthetic oligonucleotide
atcgattcctggcagttaacagtttctcaacctcctgcaaatgctatagaggacaagtat

SEQ ID NO: 332129 - DNA, 60 bp, Artificial
  Synthetic oligonucleotide
atcgattggaattgggggattataaattggtagagatcactccaattggcatggctccca

SEQ ID NO: 332130 - DNA, 55 bp, Artificial
  Synthetic oligonucleotide
atcgattgggaacagctagaatcttggtggcacgcgataggaaactgcggccaga

SEQ ID NO: 332131 - DNA, 60 bp, Artificial
  Synthetic oligonucleotide
atcgatttacagctgcattgcaagcagtattgtattggtaggactcatacttacattcat

SEQ ID NO: 332132 - DNA, 55 bp, Artificial
  Synthetic oligonucleotide
atcgatttcgatgctgccattcaaggtcgctcgagcgtagaggaggtcgtgaggg

SEQ ID NO: 332133 - DNA, 60 bp, Artificial
  Synthetic oligonucleotide
atcgatttgccaagttgcggctttcatatgtacacgacacaaacgccaccgtgagcggtc

SEQ ID NO: 332134 - DNA, 50 bp, Artificial
  Synthetic oligonucleotide
atcgatttgtcacatattcgatcgttgcgttgcaatcttttcacgtaagg

SEQ ID NO: 332135 - DNA, 59 bp, Artificial
  Synthetic oligonucleotide
atcgcaaaagatcaggtctgggatggcgagggctataccaagtacacgttcgacgacaa

SEQ ID NO: 332136 - DNA, 56 bp, Artificial
  Synthetic oligonucleotide
atcgcaaactattcgttcgggcactggccggattttctcgggcgaacctgctccgc

SEQ ID NO: 332137 - DNA, 60 bp, Artificial
  Synthetic oligonucleotide
atcgcaaatgtgcgtcgtcagcacgactgacagtgttactgttgtcaagacccatcttgc

SEQ ID NO: 332138 - DNA, 57 bp, Artificial
  Synthetic oligonucleotide
atcgcaacatctaccggaattatgtcctagccctttaagattaatagatggacaaac

SEQ ID NO: 332139 - DNA, 60 bp, Artificial
  Synthetic oligonucleotide
atcgcaaccaattttgtgcttgtcactatccccagcatttgatccgcgcttatcacacac

SEQ ID NO: 332140 - DNA, 60 bp, Artificial
  Synthetic oligonucleotide
atcgcaaccgagttccctacacaattcatcagataccatcgtggcatacgagaattactg

SEQ ID NO: 332141 - DNA, 60 bp, Artificial
  Synthetic oligonucleotide
atcgcaagagacagtccgcatgttctggtctcgttgtcaagacacacaaaatccctaaag

SEQ ID NO: 332142 - DNA, 59 bp, Artificial
  Synthetic oligonucleotide
atcgcacaagcaacggtcagcgttgacacagcgtactatggggcattgtggtaaacccg

SEQ ID NO: 332143 - DNA, 60 bp, Artificial
  Synthetic oligonucleotide
atcgcacaagtagctgaagtcactgtgcacgctgccggcagttcgactcccaatcaaaag

SEQ ID NO: 332144 - DNA, 51 bp, Artificial
  Synthetic oligonucleotide
atcgcacagtcttctctgcgacgggcgatgccccctatagttacacggccg

SEQ ID NO: 332145 - DNA, 60 bp, Artificial
  Synthetic oligonucleotide
atcgcacgcgtatggataccgagagcatcactcggctctacatactcgattacccgagga

SEQ ID NO: 332146 - DNA, 50 bp, Artificial
  Synthetic oligonucleotide
atcgcacgtttcagccaattcggttgcgtgacaggccagtataaaacagg

SEQ ID NO: 332147 - DNA, 60 bp, Artificial
  Synthetic oligonucleotide
atcgcactactcatgtcgtctcacgttctccgacagaactgtttggagatccaatctcca

SEQ ID NO: 332148 - DNA, 55 bp, Artificial
  Synthetic oligonucleotide
atcgcacttgttccacaacatggtcctgggttggtgatgaaagtcctgaacccaa

SEQ ID NO: 332149 - DNA, 60 bp, Artificial
  Synthetic oligonucleotide
atcgcagaaccagcaggaaataaatgaacaagacttattggcattggacaagtgggcaga

SEQ ID NO: 332150 - DNA, 56 bp, Artificial
  Synthetic oligonucleotide
atcgcagaggaagagagccggaattccgcgtctaatttgaaccggcttcccgtatg

SEQ ID NO: 332151 - DNA, 60 bp, Artificial
  Synthetic oligonucleotide
atcgcagatggacgatgatgagtgggagtcgaccagattcgcagaagataggttgggtga

SEQ ID NO: 332152 - DNA, 55 bp, Artificial
  Synthetic oligonucleotide
atcgcagggctcatgttcgcggcttttgtcatctcgggaaagtccacagatatgt

SEQ ID NO: 332153 - DNA, 58 bp, Artificial
  Synthetic oligonucleotide
atcgcaggggggattctcgctgcattggcggcctactgcctcacggtgggtagcgtcg

SEQ ID NO: 332154 - DNA, 55 bp, Artificial
  Synthetic oligonucleotide
atcgcagtcaaatatgggcacataattaaagtccagttctgccaggttagtacgt

SEQ ID NO: 332155 - DNA, 51 bp, Artificial
  Synthetic oligonucleotide
atcgcagttgtcctttccgttcacatcacgtgccggggttgatagagattt

SEQ ID NO: 332156 - DNA, 54 bp, Artificial
  Synthetic oligonucleotide
atcgcatcccgcctcggtctccatgggctcggtgtctgtgtcgtcctcctcaac

SEQ ID NO: 332157 - DNA, 55 bp, Artificial
  Synthetic oligonucleotide
atcgccaaatcgcatactatttctataatccggatgcggctgatgattggatcga

SEQ ID NO: 332158 - DNA, 56 bp, Artificial
  Synthetic oligonucleotide
atcgccacaaagtaggaaatggttgccatctagttcttcaggtttgaagtttattg

SEQ ID NO: 332159 - DNA, 55 bp, Artificial
  Synthetic oligonucleotide
atcgccaccaagagcttgtacgccataagattgtgttggcgttccttggttgtcg

SEQ ID NO: 332160 - DNA, 60 bp, Artificial
  Synthetic oligonucleotide
atcgccactgtcgcagctggatattacacagccttagctgcgcgtctcgaactaacgaaa

SEQ ID NO: 332161 - DNA, 60 bp, Artificial
  Synthetic oligonucleotide
atcgccagaatgcaactgagattaggtcatccgtcgggaagatgattgatggaattgggc

SEQ ID NO: 332162 - DNA, 60 bp, Artificial
  Synthetic oligonucleotide
atcgccagcgccatttccctcgccgacgctcagatagttcaactcgctcgcacggttaac

SEQ ID NO: 332163 - DNA, 60 bp, Artificial
  Synthetic oligonucleotide
atcgccagggcaagagccagcgcccccgctacactgctgcactgaaggacgagttggtgg

SEQ ID NO: 332164 - DNA, 60 bp, Artificial
  Synthetic oligonucleotide
atcgccatcttgcttttaagtgtctatgggatctattgtactctatatgtcacagtcttt

SEQ ID NO: 332165 - DNA, 60 bp, Artificial
  Synthetic oligonucleotide
atcgccatcttgtttctaagtgcctatgggatctattgcattcaatatgtcacagtcttt

SEQ ID NO: 332166 - DNA, 58 bp, Artificial
  Synthetic oligonucleotide
atcgccatgtttgacgtggatgcggagacagccgcgcaggagattgtggccacggcgg

SEQ ID NO: 332167 - DNA, 50 bp, Artificial
  Synthetic oligonucleotide
atcgccatttaactctgccgtcgcctcctacttgcagatatggccctcac

SEQ ID NO: 332168 - DNA, 60 bp, Artificial
  Synthetic oligonucleotide
atcgcccatctcatgtttaagccgcatatattgttgccacgggccggtgggtctgtgtat

SEQ ID NO: 332169 - DNA, 60 bp, Artificial
  Synthetic oligonucleotide
atcgcccccctgaacggtcatgcaggctattgtcagtgcaggaactgagccgaactggtt

SEQ ID NO: 332170 - DNA, 59 bp, Artificial
  Synthetic oligonucleotide
atcgccccttggtatgcatacaaatttgtcagcacaactaataaaggagccgtcttcaa

SEQ ID NO: 332171 - DNA, 58 bp, Artificial
  Synthetic oligonucleotide
atcgccgattaggcatgtatagccaagcttatccagggttggaatgatgacatcctta

SEQ ID NO: 332172 - DNA, 55 bp, Artificial
  Synthetic oligonucleotide
atcgccgccagttccttacaaaaccgctatacgcgcggcaatctgtcttatgacc

SEQ ID NO: 332173 - DNA, 60 bp, Artificial
  Synthetic oligonucleotide
atcgccgcgtcgcagaagatctcaatctcgggaatctcaatttggaccctgcgttcggag

SEQ ID NO: 332174 - DNA, 53 bp, Artificial
  Synthetic oligonucleotide
atcgccgtagctggaggaatcccagtacacaactcgttcttgcgctacctcat

SEQ ID NO: 332175 - DNA, 58 bp, Artificial
  Synthetic oligonucleotide
atcgccgttttcacccataactacactcgcttggcattaactgctaggcgtgaaacaa

SEQ ID NO: 332176 - DNA, 60 bp, Artificial
  Synthetic oligonucleotide
atcgcctactgtgggaggaacgtggtatagtgcactgtctcgccctcgggctgagggtgc

SEQ ID NO: 332177 - DNA, 52 bp, Artificial
  Synthetic oligonucleotide
atcgcctccgtagcagggtccagggaatacaggaagcccccacgtttcttga

SEQ ID NO: 332178 - DNA, 56 bp, Artificial
  Synthetic oligonucleotide
atcgcgaatactgggataaccaattcgcatcaaaacccattcctagacctgtaaaa

SEQ ID NO: 332179 - DNA, 56 bp, Artificial
  Synthetic oligonucleotide
atcgcgaggacgcagatgggccgctttaccaggcggttctaaagcgttctaaagga

SEQ ID NO: 332180 - DNA, 56 bp, Artificial
  Synthetic oligonucleotide
atcgcgagtcattaatggttgcggaacgttcattcgaaagagtgccgcaagaggct

SEQ ID NO: 332181 - DNA, 51 bp, Artificial
  Synthetic oligonucleotide
atcgcgatgtgactctctcagttgatctagcccatagttcacttactactg

SEQ ID NO: 332182 - DNA, 59 bp, Artificial
  Synthetic oligonucleotide
atcgcgcagttgtttgcactgcccatatgagaggtttacgaaagagagtggactttcgg

SEQ ID NO: 332183 - DNA, 53 bp, Artificial
  Synthetic oligonucleotide
atcgcgcgactacgtgtactgcgcgagacatctactcaacactctacgattcg

SEQ ID NO: 332184 - DNA, 57 bp, Artificial
  Synthetic oligonucleotide
atcgcgcgccacgcggctctccagtgacatttctgtctcgagtatacctcgatcctt

SEQ ID NO: 332185 - DNA, 60 bp, Artificial
  Synthetic oligonucleotide
atcgcgcggtaaattgtagtctggcagccgcgcgttactgcaattagcggtggctcccga

SEQ ID NO: 332186 - DNA, 59 bp, Artificial
  Synthetic oligonucleotide
atcgcggcctaaaggctgccgctagaaaacacatcggtctgatggtcccaattgaggga

SEQ ID NO: 332187 - DNA, 52 bp, Artificial
  Synthetic oligonucleotide
atcgcgggactttgttgctaaagcaatcaacattggaattcctttggaatgg

SEQ ID NO: 332188 - DNA, 56 bp, Artificial
  Synthetic oligonucleotide
atcgcgggtttaccaaagtcgctatacggcggagagtatcagttgataactcgtcg

SEQ ID NO: 332189 - DNA, 54 bp, Artificial
  Synthetic oligonucleotide
atcgcgggtttgtccgagaattagcgagaccaaacggttacgctatcgtcggtg

SEQ ID NO: 332190 - DNA, 50 bp, Artificial
  Synthetic oligonucleotide
atcgcggtcacgcggatcctagggattggcacgctgttgctaggcttgag

SEQ ID NO: 332191 - DNA, 53 bp, Artificial
  Synthetic oligonucleotide
atcgcggtcactggttgagattattgcaaagggaggtgaacaaatttattcgc

SEQ ID NO: 332192 - DNA, 60 bp, Artificial
  Synthetic oligonucleotide
atcgcgtaaattcatagcggcttgtggtaggcattttgagcgaattttcggatatgctgt

SEQ ID NO: 332193 - DNA, 58 bp, Artificial
  Synthetic oligonucleotide
atcgcgtacaactggccggaccccgagggtgggccgcgactgggtgcatacctgcata

SEQ ID NO: 332194 - DNA, 52 bp, Artificial
  Synthetic oligonucleotide
atcgcgtaccgtgagacgttgttgcgcataggcgtacaggaagccgcgaaac

SEQ ID NO: 332195 - DNA, 56 bp, Artificial
  Synthetic oligonucleotide
atcgcgtgcagtagccgtgttctggcaccctacggggtcttccagggcacgaaggt

SEQ ID NO: 332196 - DNA, 50 bp, Artificial
  Synthetic oligonucleotide
atcgcgtggatgaaggctgaatcggctatcgctcaatcctactcggaagg

SEQ ID NO: 332197 - DNA, 60 bp, Artificial
  Synthetic oligonucleotide
atcgcgtggttcagtatacgtacgagatagcgcggttgcaagcgaatatgggacaatttc

SEQ ID NO: 332198 - DNA, 60 bp, Artificial
  Synthetic oligonucleotide
atcgcgtgtatctcgaaagttggtgtatgaatcgcccaaaggtctatatacgcgacgctc

SEQ ID NO: 332199 - DNA, 55 bp, Artificial
  Synthetic oligonucleotide
atcgcgttcaaccaacatgcgttcgatttgagaccatcgtttcgtaggatcgttt

SEQ ID NO: 332200 - DNA, 56 bp, Artificial
  Synthetic oligonucleotide
atcgctaatccggttcccaatagggactgctccagtactgggtaattacaaggaga

SEQ ID NO: 332201 - DNA, 55 bp, Artificial
  Synthetic oligonucleotide
atcgctagatcgacacaaaatctactttacatcgctagatcgacacacggtctac

SEQ ID NO: 332202 - DNA, 52 bp, Artificial
  Synthetic oligonucleotide
atcgctagatcgacacacggtctactttacgttctttttggataaccttaag

SEQ ID NO: 332203 - DNA, 55 bp, Artificial
  Synthetic oligonucleotide
atcgctaggtggcaaagccattttcattgtgacgacgacaacaccgccggagcgg

SEQ ID NO: 332204 - DNA, 60 bp, Artificial
  Synthetic oligonucleotide
atcgctattggagatgtgtcatagcacacaaattggtgggataagaatggtagacatcct

SEQ ID NO: 332205 - DNA, 59 bp, Artificial
  Synthetic oligonucleotide
atcgctcccactactgggcagaaacatctccaaggatatgtttcgatgaagaaattaat

SEQ ID NO: 332206 - DNA, 58 bp, Artificial
  Synthetic oligonucleotide
atcgctcctgagcatttcttccgggtctagagaaaactcataacagagcgcgtaagac

SEQ ID NO: 332207 - DNA, 58 bp, Artificial
  Synthetic oligonucleotide
atcgctcgcgtgcgctccctaagacgcttaacgagatccctgacccccgattgcagca

SEQ ID NO: 332208 - DNA, 60 bp, Artificial
  Synthetic oligonucleotide
atcgctcgtccgaatgacggacgtccgccagtctatcttgatgacgctgttaccgcgttc

SEQ ID NO: 332209 - DNA, 58 bp, Artificial
  Synthetic oligonucleotide
atcgctcttgcgtatgcgtcgttagctgtctgttgacctccacgagcagatcgtccat

SEQ ID NO: 332210 - DNA, 60 bp, Artificial
  Synthetic oligonucleotide
atcgctgagaggaaacaagttctccgtgatgcggccatgatccggactcagatccagcgg

SEQ ID NO: 332211 - DNA, 55 bp, Artificial
  Synthetic oligonucleotide
atcgctgagatcgcaaagaacacgccaagcgccagaaacgtcgttgcctatgcaa

SEQ ID NO: 332212 - DNA, 50 bp, Artificial
  Synthetic oligonucleotide
atcgctgatacggaatggaaaaacaccttgtcccaactatttttaacaaa

SEQ ID NO: 332213 - DNA, 60 bp, Artificial
  Synthetic oligonucleotide
atcgctggtgatgagttcactatgtcattgaacgttgctacccaggattttattgatact

SEQ ID NO: 332214 - DNA, 55 bp, Artificial
  Synthetic oligonucleotide
atcgctggtggcatggtggtcagcacggactacagcctgatctgccgcgctgatc

SEQ ID NO: 332215 - DNA, 54 bp, Artificial
  Synthetic oligonucleotide
atcgctgtgcaagattggctagtaagagtagggcgtgaaaggctgtcaagaatg

SEQ ID NO: 332216 - DNA, 55 bp, Artificial
  Synthetic oligonucleotide
atcgcttaaatggtgttagacaattccaattttatggcggctgctctgtctccgt

SEQ ID NO: 332217 - DNA, 60 bp, Artificial
  Synthetic oligonucleotide
atcgcttcattctcaattgacccacaactttattgtgattacaatgttgtattgatgaag

SEQ ID NO: 332218 - DNA, 57 bp, Artificial
  Synthetic oligonucleotide
atcgcttccttaacgatggatctttagattggaggacttggacaattcctttacatc

SEQ ID NO: 332219 - DNA, 60 bp, Artificial
  Synthetic oligonucleotide
atcgcttccttgaattgcaagttcagctctactggaaacagatccaaggtgcttagagat

SEQ ID NO: 332220 - DNA, 51 bp, Artificial
  Synthetic oligonucleotide
atcgcttgaggaggacttgtacaaacacgatctatgcaggtttccccaact

SEQ ID NO: 332221 - DNA, 59 bp, Artificial
  Synthetic oligonucleotide
atcgcttgcaccaacagtaggtgtaggtattccaggacacgtaatcgttgaattaatca

SEQ ID NO: 332222 - DNA, 59 bp, Artificial
  Synthetic oligonucleotide
atcgctttgggggacccgctccagggcgtctaccattcaactcattctgactcatccaa

SEQ ID NO: 332223 - DNA, 52 bp, Artificial
  Synthetic oligonucleotide
atcggaaaaggaaatagtaattccgtaaaagaaggttatggaccaaatatga

SEQ ID NO: 332224 - DNA, 57 bp, Artificial
  Synthetic oligonucleotide
atcggaaacattagtgttaggtgcaatggagtcttccacaactaacaggccctcctc

SEQ ID NO: 332225 - DNA, 60 bp, Artificial
  Synthetic oligonucleotide
atcggaagcccaggatgtacagaatgtatcgaagccctgatgtgcccaaggggtgtgaag

SEQ ID NO: 332226 - DNA, 55 bp, Artificial
  Synthetic oligonucleotide
atcggaataggatattgcactgccgtgaacctgagatagcaaaggatatatggcg

SEQ ID NO: 332227 - DNA, 60 bp, Artificial
  Synthetic oligonucleotide
atcggaatattgcccgatatgaccccaagtactgagatgtcgctgagggggataagagtc

SEQ ID NO: 332228 - DNA, 56 bp, Artificial
  Synthetic oligonucleotide
atcggaatttcaggtccagataatggagcagtggctgtattaaaatacaacggcat

SEQ ID NO: 332229 - DNA, 59 bp, Artificial
  Synthetic oligonucleotide
atcggaatttctggagaggtgaaaacggacgaagaacaaggattgcatatgagagaatg

SEQ ID NO: 332230 - DNA, 52 bp, Artificial
  Synthetic oligonucleotide
atcggacgagacaggtgagggggtatcaactcgatacgctcccccgcgttct

SEQ ID NO: 332231 - DNA, 56 bp, Artificial
  Synthetic oligonucleotide
atcggacgttgaggacgcctgatgttccaagaggttgtgaagggccttgtaaggtc

SEQ ID NO: 332232 - DNA, 60 bp, Artificial
  Synthetic oligonucleotide
atcggactccattataaggtgggtgatacaccagatgcaaacattccaagcatgaacgag

SEQ ID NO: 332233 - DNA, 56 bp, Artificial
  Synthetic oligonucleotide
atcggactcttaggacaactgacgtcgccaggggctgtgaaggcccatgtaaggtc

SEQ ID NO: 332234 - DNA, 55 bp, Artificial
  Synthetic oligonucleotide
atcggactgggtgtttcaaggatttaacacccactccacaatcccgctactcatt

SEQ ID NO: 332235 - DNA, 54 bp, Artificial
  Synthetic oligonucleotide
atcggagaaccctcccctgagaggcctcttcctaggtccggagtctacctccat

SEQ ID NO: 332236 - DNA, 55 bp, Artificial
  Synthetic oligonucleotide
atcggagaattaatcagtatctgatattaaccccagacggatatgcgcccgcccc

SEQ ID NO: 332237 - DNA, 55 bp, Artificial
  Synthetic oligonucleotide
atcggagacgttccggaacatagtccagacgatcggatccgttgcggggtccgtg

SEQ ID NO: 332238 - DNA, 58 bp, Artificial
  Synthetic oligonucleotide
atcggagaggccttcgcttggctagacaggacggtagaagccataaacagagaggcgg

SEQ ID NO: 332239 - DNA, 58 bp, Artificial
  Synthetic oligonucleotide
atcggagtgagcagaaatgtctcccctgagcgcaaattgaaacgtagacaccgatcaa

SEQ ID NO: 332240 - DNA, 60 bp, Artificial
  Synthetic oligonucleotide
atcggagtgttgttcccgagcgactcggatgtacgtgggcttgacgacagaccatggcaa

SEQ ID NO: 332241 - DNA, 60 bp, Artificial
  Synthetic oligonucleotide
atcggagtttgtgctcccaagttatttcgatcaatggatctactcgccgatgtttaatgc

SEQ ID NO: 332242 - DNA, 60 bp, Artificial
  Synthetic oligonucleotide
atcggatacatatccaattaatcgttcttgatgcttgtcggagaattgtggagaagttcc

SEQ ID NO: 332243 - DNA, 60 bp, Artificial
  Synthetic oligonucleotide
atcggatctaattaattacgcgcatcatgtaaattcatcctctctcaccacttctcaggg

SEQ ID NO: 332244 - DNA, 60 bp, Artificial
  Synthetic oligonucleotide
atcggatctcgcttcctcggccacaattaaagcgtcgccgcacgcatacgcactttaatc

SEQ ID NO: 332245 - DNA, 55 bp, Artificial
  Synthetic oligonucleotide
atcggatgcaactgttgatgtctgacttcgcattgtccatagatggcccgctcta

SEQ ID NO: 332246 - DNA, 56 bp, Artificial
  Synthetic oligonucleotide
atcggatgtataggacccccgatgttccaagaggctgtgaaggcccatgtaaggtg

SEQ ID NO: 332247 - DNA, 60 bp, Artificial
  Synthetic oligonucleotide
atcggatgtcattctagattttactcttatgagtagccccatgataggtggaactttctc

SEQ ID NO: 332248 - DNA, 55 bp, Artificial
  Synthetic oligonucleotide
atcggatgtgactcgtggtaacggaattacacatcgtgttggcaagaggttctgc

SEQ ID NO: 332249 - DNA, 60 bp, Artificial
  Synthetic oligonucleotide
atcggcacttgttgcctgtactctatgacgcagtgatcgatcttcatgcagctacgactg

SEQ ID NO: 332250 - DNA, 57 bp, Artificial
  Synthetic oligonucleotide
atcggcaggtaggaaggccgcctactcccctgtctccacctctaagggacactcatc

SEQ ID NO: 332251 - DNA, 58 bp, Artificial
  Synthetic oligonucleotide
atcggcaggtggggaggcggcctacgcccatttctccacctctaagagacactcatcc

SEQ ID NO: 332252 - DNA, 60 bp, Artificial
  Synthetic oligonucleotide
atcggcagtcaggaaggcagcctactcccctgactccgcctctaagagacactcatcctc

SEQ ID NO: 332253 - DNA, 60 bp, Artificial
  Synthetic oligonucleotide
atcggcagtcaggaaggcagcctactcccttatctccacctctaagggacacacatcctc

SEQ ID NO: 332254 - DNA, 52 bp, Artificial
  Synthetic oligonucleotide
atcggcagtgtcggactggggaaagttcttgtggacattcttgcagggtatg

SEQ ID NO: 332255 - DNA, 55 bp, Artificial
  Synthetic oligonucleotide
atcggccagaactttcgaaactgggaggtgctgacgcttacatccactaggacga

SEQ ID NO: 332256 - DNA, 58 bp, Artificial
  Synthetic oligonucleotide
atcggccctcggattgaattctgtagcgtattaccggggccttgatgtgtccgtcata

SEQ ID NO: 332257 - DNA, 50 bp, Artificial
  Synthetic oligonucleotide
atcggccgagcaacctcggcaggtaactccttagtttcggcgcggcacca

SEQ ID NO: 332258 - DNA, 52 bp, Artificial
  Synthetic oligonucleotide
atcggccggtaagaccggaactggttggaaacagctgggggctgttcggatt

SEQ ID NO: 332259 - DNA, 56 bp, Artificial
  Synthetic oligonucleotide
atcggccgtacacataactatcgttcccaatttgaccaaccctcgtaccttcatgc

SEQ ID NO: 332260 - DNA, 57 bp, Artificial
  Synthetic oligonucleotide
atcggcgaagacgacgcgcgtcgcaaagtgaaagtaaggtaaggagccgatcggtca

SEQ ID NO: 332261 - DNA, 60 bp, Artificial
  Synthetic oligonucleotide
atcggcgaagtgcctgacacagttctatcaagcatagctagtcatctcaggtttgccagc

SEQ ID NO: 332262 - DNA, 56 bp, Artificial
  Synthetic oligonucleotide
atcggcggagtagtttcgttggctatgccgttacttggtgctatagtcgtaaccat

SEQ ID NO: 332263 - DNA, 60 bp, Artificial
  Synthetic oligonucleotide
atcggctaaatcgacaccacgctttgcgatcaatccgagagctgttgcaatgttgccata

SEQ ID NO: 332264 - DNA, 55 bp, Artificial
  Synthetic oligonucleotide
atcggctcagcacctacttaccaaccttgctgagagagtagtttatgatcaggct

SEQ ID NO: 332265 - DNA, 58 bp, Artificial
  Synthetic oligonucleotide
atcggctgacatgctaagtaccaaatttgcgtcacgtgtccactgtgaactgttcaga

SEQ ID NO: 332266 - DNA, 60 bp, Artificial
  Synthetic oligonucleotide
atcggctgatatgagcattggagtgacagtgataaggaacaacatgataaacaatgatct

SEQ ID NO: 332267 - DNA, 55 bp, Artificial
  Synthetic oligonucleotide
atcggctgttaatggattgtgttaccccgggaatgtagagaacctagaagaacta

SEQ ID NO: 332268 - DNA, 60 bp, Artificial
  Synthetic oligonucleotide
atcggcttagaggtgcatttggcgatctaaatcaacatgtgtttgcgaggacggattcac

SEQ ID NO: 332269 - DNA, 55 bp, Artificial
  Synthetic oligonucleotide
atcgggaactgcagttttaccagggcgggccttcaactatggccgaacaagccaa

SEQ ID NO: 332270 - DNA, 55 bp, Artificial
  Synthetic oligonucleotide
atcgggaagctcgtttcccctagcttggccacaatccggacctctgttccgtgag

SEQ ID NO: 332271 - DNA, 50 bp, Artificial
  Synthetic oligonucleotide
atcgggagacataaatcatttcgtttacgaacgtctttcggcttagtcga

SEQ ID NO: 332272 - DNA, 54 bp, Artificial
  Synthetic oligonucleotide
atcgggagacatgttctcgccgggggacgactgcttaccccttactcggtgccg

SEQ ID NO: 332273 - DNA, 53 bp, Artificial
  Synthetic oligonucleotide
atcgggagacgttaccgtagtacgttcacgctaactacgcctattctacggga

SEQ ID NO: 332274 - DNA, 60 bp, Artificial
  Synthetic oligonucleotide
atcgggagattctacatccaaatgtgcactgaactcaagctcagtgactatgaggggcga

SEQ ID NO: 332275 - DNA, 55 bp, Artificial
  Synthetic oligonucleotide
atcgggagcgatatccctcggtcgacggattcttggccgccctgcaagcggtcta

SEQ ID NO: 332276 - DNA, 60 bp, Artificial
  Synthetic oligonucleotide
atcgggatgccttagagtctcctgagcattgctcacctcatcatacagcactcaggcaag

SEQ ID NO: 332277 - DNA, 60 bp, Artificial
  Synthetic oligonucleotide
atcgggatggcaccattccagaacacgagtcccgtcgcatcttggccttaagtcgagaca

SEQ ID NO: 332278 - DNA, 60 bp, Artificial
  Synthetic oligonucleotide
atcgggcacagatctggaattgttcttatctgattggtatgatgtcgctttattctatat

SEQ ID NO: 332279 - DNA, 52 bp, Artificial
  Synthetic oligonucleotide
atcgggcacgggctaagtgtcgaccagaccagcctatctcgagaccgggcac

SEQ ID NO: 332280 - DNA, 55 bp, Artificial
  Synthetic oligonucleotide
atcgggcagggcgtcagaagggcggcatgaggcgacagcaaagaagcatcaccga

SEQ ID NO: 332281 - DNA, 52 bp, Artificial
  Synthetic oligonucleotide
atcgggcagtttggtgaattcgctgttccgtctaccggaaccaggtacatgc

SEQ ID NO: 332282 - DNA, 59 bp, Artificial
  Synthetic oligonucleotide
atcgggcccagaaatccacaaactagacgcatgggagtccctgcgcctaccaccgcgca

SEQ ID NO: 332283 - DNA, 58 bp, Artificial
  Synthetic oligonucleotide
atcgggcccatatcgttttccctgttctgctatcaccttctatgacaatactattggg

SEQ ID NO: 332284 - DNA, 51 bp, Artificial
  Synthetic oligonucleotide
atcgggcgtttgaagtggtcagtgctacggtcgcggttccacgactgcatg

SEQ ID NO: 332285 - DNA, 58 bp, Artificial
  Synthetic oligonucleotide
atcgggctacacagtactactattactaagattcatagcccataaaaatagagatacc

SEQ ID NO: 332286 - DNA, 59 bp, Artificial
  Synthetic oligonucleotide
atcggggacaatatataggtctcccaatttattggtacgggagtcagcagcgacataga

SEQ ID NO: 332287 - DNA, 54 bp, Artificial
  Synthetic oligonucleotide
atcggggaccattgccgttcgaaattcggatgtcatgacggaagctccgcaaac

SEQ ID NO: 332288 - DNA, 58 bp, Artificial
  Synthetic oligonucleotide
atcggggtaccatcaatgataatcctatcaaagtggtactatatgtcactcgttcggg

SEQ ID NO: 332289 - DNA, 56 bp, Artificial
  Synthetic oligonucleotide
atcggggtacctgaatcctggggatgtctacgccacttcgcccacaggcctagagg

SEQ ID NO: 332290 - DNA, 50 bp, Artificial
  Synthetic oligonucleotide
atcggggttttactggtcgctttccccctcgaccttcggtgaaccgtcac

SEQ ID NO: 332291 - DNA, 52 bp, Artificial
  Synthetic oligonucleotide
atcgggtaccaatttttatgggacctttcagagtggatcaatttcccggaaa

SEQ ID NO: 332292 - DNA, 60 bp, Artificial
  Synthetic oligonucleotide
atcgggtgcatctacagctgggtatgtaacatgctggtatcaaaccagattagtaattcc

SEQ ID NO: 332293 - DNA, 55 bp, Artificial
  Synthetic oligonucleotide
atcgggttccaatggaaagagtaaaggagggcgcggagtgacaagtgaaatgcaa

SEQ ID NO: 332294 - DNA, 54 bp, Artificial
  Synthetic oligonucleotide
atcggtaacgctcaaataaaagtagcgtgttgcttgtaacgcaattacctaaac

SEQ ID NO: 332295 - DNA, 54 bp, Artificial
  Synthetic oligonucleotide
atcggtaatgtatgcacacatagcacgagtgcgttgtttagatcctttctcgtc

SEQ ID NO: 332296 - DNA, 52 bp, Artificial
  Synthetic oligonucleotide
atcggtactagagtaatcaactatgaagtacacgcttacaggagaatagggt

SEQ ID NO: 332297 - DNA, 52 bp, Artificial
  Synthetic oligonucleotide
atcggtactcaataacggattggtactcaataacggaacggggtaaagacaa

SEQ ID NO: 332298 - DNA, 60 bp, Artificial
  Synthetic oligonucleotide
atcggtagtcaggaagacagcctacgcccatctctccacctctaagagacagtcatcctc

SEQ ID NO: 332299 - DNA, 55 bp, Artificial
  Synthetic oligonucleotide
atcggtatacgaggcgagatacattatatctaggataaggtcgtctaccggtgcg

SEQ ID NO: 332300 - DNA, 50 bp, Artificial
  Synthetic oligonucleotide
atcggtcatgggaagaccatagaaacgtatcaaactagagaagggtacac

SEQ ID NO: 332301 - DNA, 53 bp, Artificial
  Synthetic oligonucleotide
atcggtccacccgtagtagggcatggccagtagcgacgagacgagggccaatt

SEQ ID NO: 332302 - DNA, 60 bp, Artificial
  Synthetic oligonucleotide
atcggtcccacaggcagatggtgaccacaaccaatccattaatcagacacgaaaatagaa

SEQ ID NO: 332303 - DNA, 60 bp, Artificial
  Synthetic oligonucleotide
atcggtctatcattttcagcactgttataatctactggataaactcgcacttcattatga

SEQ ID NO: 332304 - DNA, 60 bp, Artificial
  Synthetic oligonucleotide
atcggtctcacagacaaatggtgactaccaccaacccactaatcaggcatgaaaacagaa

SEQ ID NO: 332305 - DNA, 60 bp, Artificial
  Synthetic oligonucleotide
atcggtctcacagacagatggtgacaacaaccaacccactgataagacatgagaacagga

SEQ ID NO: 332306 - DNA, 60 bp, Artificial
  Synthetic oligonucleotide
atcggtctcacaggcaaatggtgacaataacagacccactgatcagacatgagaacagaa

SEQ ID NO: 332307 - DNA, 55 bp, Artificial
  Synthetic oligonucleotide
atcggtctctctggccgcgcagcggaacctctcccaaaatagtcgtccgcccact

SEQ ID NO: 332308 - DNA, 60 bp, Artificial
  Synthetic oligonucleotide
atcggtcttcaacagtctgtacgcatctccacaactcgaggggttctcagctgaatcaag

SEQ ID NO: 332309 - DNA, 54 bp, Artificial
  Synthetic oligonucleotide
atcggtgaccaccctgggggagttatcgatcgggtcgtgacgttccccattgcc

SEQ ID NO: 332310 - DNA, 58 bp, Artificial
  Synthetic oligonucleotide
atcggtgaccgcccagttgtaggaggatcgaatgcttctatttggacctgcgtgttta

SEQ ID NO: 332311 - DNA, 57 bp, Artificial
  Synthetic oligonucleotide
atcggtgtacaccgattacttctctatccccctatcggtgtatcggtgtcttatata

SEQ ID NO: 332312 - DNA, 56 bp, Artificial
  Synthetic oligonucleotide
atcggtgtacctgggatgtgtccacccgaactcattcgacattgtatttggttccc

SEQ ID NO: 332313 - DNA, 58 bp, Artificial
  Synthetic oligonucleotide
atcggtgtataagggtcttatatatactataagcctctataggcttaatagacacgtg

SEQ ID NO: 332314 - DNA, 59 bp, Artificial
  Synthetic oligonucleotide
atcggtgtatagccatttagctctatgtatcggtgtatcggtgtcttatttataggtac

SEQ ID NO: 332315 - DNA, 58 bp, Artificial
  Synthetic oligonucleotide
atcggtgtattggtgtactatatatagtaaagttactaggggctctcagatataatat

SEQ ID NO: 332316 - DNA, 59 bp, Artificial
  Synthetic oligonucleotide
atcggtgtctctccatttaactctatgtatcggtgtatcggtgtcttatttatatgtag

SEQ ID NO: 332317 - DNA, 58 bp, Artificial
  Synthetic oligonucleotide
atcggtgttagatctgtttgactggtctcgattccgcgcgactataaacgtagacacg

SEQ ID NO: 332318 - DNA, 60 bp, Artificial
  Synthetic oligonucleotide
atcggttcagttgttgacttcagacatgcctattgatgtccagtggggctttgtatactc

SEQ ID NO: 332319 - DNA, 54 bp, Artificial
  Synthetic oligonucleotide
atcgtaaattactaacctagaacactatggaagcctatatccgcgaaaaccgta

SEQ ID NO: 332320 - DNA, 54 bp, Artificial
  Synthetic oligonucleotide
atcgtaacgacggtttctcactttttggtgaatgtctcgataaaatgcgtcttc

SEQ ID NO: 332321 - DNA, 57 bp, Artificial
  Synthetic oligonucleotide
atcgtaagaactacaaagttcaggtaaagatccagaacccaacctcttgcactgcaa

SEQ ID NO: 332322 - DNA, 51 bp, Artificial
  Synthetic oligonucleotide
atcgtaaggggtctaatctttcccaccactggaaaaacttatttccaacga

SEQ ID NO: 332323 - DNA, 60 bp, Artificial
  Synthetic oligonucleotide
atcgtaatggtgaaaacatcgcggaagcgttgtgtgcagattttgctttagccttgatta

SEQ ID NO: 332324 - DNA, 59 bp, Artificial
  Synthetic oligonucleotide
atcgtacatctgtatattcgatgaaagggcaaccaccagtcacattttctgctagtgac

SEQ ID NO: 332325 - DNA, 54 bp, Artificial
  Synthetic oligonucleotide
atcgtaccagatacttaatgcatctttagtcttccagatcagccatgacacagg

SEQ ID NO: 332326 - DNA, 60 bp, Artificial
  Synthetic oligonucleotide
atcgtaccctatatggatagagtaagttctgaagtactgcagaagtgcacaatcacttgt

SEQ ID NO: 332327 - DNA, 57 bp, Artificial
  Synthetic oligonucleotide
atcgtacggcgcgaagtatcgctcgcttcaacgagctccacggcgctatcgggttca

SEQ ID NO: 332328 - DNA, 53 bp, Artificial
  Synthetic oligonucleotide
atcgtagaccgccgtaggcacgtattcgccggtagcggacatgtaacccttaa

SEQ ID NO: 332329 - DNA, 59 bp, Artificial
  Synthetic oligonucleotide
atcgtagacgcaatacgtaactcgtcagctagttctgacgggattacgcttagttcaga

SEQ ID NO: 332330 - DNA, 58 bp, Artificial
  Synthetic oligonucleotide
atcgtaggacaatacctgaaagggcttctcaacatggagtgggcgtctggcgttatgg

SEQ ID NO: 332331 - DNA, 60 bp, Artificial
  Synthetic oligonucleotide
atcgtagtggcgcctatttccactatggcccatgttgaatagccatgcaattatctgaca

SEQ ID NO: 332332 - DNA, 52 bp, Artificial
  Synthetic oligonucleotide
atcgtatctgtttgaacgagagacagtgaccacgtcaaataccgaaatcaac

SEQ ID NO: 332333 - DNA, 51 bp, Artificial
  Synthetic oligonucleotide
atcgtatcttaaagtgattagagtctggctcacataacctcgaaggttaga

SEQ ID NO: 332334 - DNA, 57 bp, Artificial
  Synthetic oligonucleotide
atcgtatggaggaccttggaagatgggcacgaaatggaacggggttgatgaggtaca

SEQ ID NO: 332335 - DNA, 54 bp, Artificial
  Synthetic oligonucleotide
atcgtatgtacagaacgccggatgttccgaaaggttgtgaaggtccctgtaagg

SEQ ID NO: 332336 - DNA, 56 bp, Artificial
  Synthetic oligonucleotide
atcgtattaatatacggtgtgagaacttcccagtcaacttggattaactaccctga

SEQ ID NO: 332337 - DNA, 55 bp, Artificial
  Synthetic oligonucleotide
atcgtattgatagtcctgtgcctatcaaggagccttccatcatctccgcagagga

SEQ ID NO: 332338 - DNA, 56 bp, Artificial
  Synthetic oligonucleotide
atcgtcaacatgaatcctggagcgagcttttacgagagtccacttgacgttggaaa

SEQ ID NO: 332339 - DNA, 51 bp, Artificial
  Synthetic oligonucleotide
atcgtcacaataaaagtagggggacagataaaggaggctctcttagacaca

SEQ ID NO: 332340 - DNA, 55 bp, Artificial
  Synthetic oligonucleotide
atcgtcacgcggtctcctacctttagtgacaatagcactccaccggctgtgcccc

SEQ ID NO: 332341 - DNA, 59 bp, Artificial
  Synthetic oligonucleotide
atcgtcagatggtgttgttagcaccagttagggcctttagtggcctagctgctatttta

SEQ ID NO: 332342 - DNA, 60 bp, Artificial
  Synthetic oligonucleotide
atcgtcatataacatggccaagaagaatctcaaaattgaatatgatatgaatcaacagcg

SEQ ID NO: 332343 - DNA, 55 bp, Artificial
  Synthetic oligonucleotide
atcgtcatctattgtcaaatgcacgaaattgatgcgcgataaattggaacgtggt

SEQ ID NO: 332344 - DNA, 58 bp, Artificial
  Synthetic oligonucleotide
atcgtcatgatgattttactgcgcggtaataaaaaaactactttcatctcagaggtaa

SEQ ID NO: 332345 - DNA, 60 bp, Artificial
  Synthetic oligonucleotide
atcgtcattgagattaagacgatggacccctccctctcatggcttgattacgctgtccaa

SEQ ID NO: 332346 - DNA, 60 bp, Artificial
  Synthetic oligonucleotide
atcgtcattgatgtaccccattaatttgggatgccaaagtcatttgatgctgacctccac

SEQ ID NO: 332347 - DNA, 50 bp, Artificial
  Synthetic oligonucleotide
atcgtcattgcgcagtaatcggacgagtttagataaacccgcaacgatgg

SEQ ID NO: 332348 - DNA, 60 bp, Artificial
  Synthetic oligonucleotide
atcgtcattgtttctgtgttgttggtcgttgtgtgatggtatgcatttatagaggatgtc

SEQ ID NO: 332349 - DNA, 60 bp, Artificial
  Synthetic oligonucleotide
atcgtccctaagattgagagatgtgtatagatttaagcatgatagacctgtgatagaagt

SEQ ID NO: 332350 - DNA, 54 bp, Artificial
  Synthetic oligonucleotide
atcgtccctcatagcttaattattgcatggtcccccctataaacttgggttcca

SEQ ID NO: 332351 - DNA, 52 bp, Artificial
  Synthetic oligonucleotide
atcgtccctcatagcttaattatttcatggtccccctttaaaggaggttggg

SEQ ID NO: 332352 - DNA, 57 bp, Artificial
  Synthetic oligonucleotide
atcgtccgatgtggaggaaaccacgtttttatcgattgtatcggacacctgatgttc

SEQ ID NO: 332353 - DNA, 59 bp, Artificial
  Synthetic oligonucleotide
atcgtccgtcgatctggaattctccccattcgagagtgtctccgtccttgtcgatatag

SEQ ID NO: 332354 - DNA, 55 bp, Artificial
  Synthetic oligonucleotide
atcgtcgaacgcagatttcaaatgttcggaatttcatacctagatacactagcag

SEQ ID NO: 332355 - DNA, 57 bp, Artificial
  Synthetic oligonucleotide
atcgtcgacccacttcatcattatttccggtacattaatgaacgtggacatttgaaa

SEQ ID NO: 332356 - DNA, 51 bp, Artificial
  Synthetic oligonucleotide
atcgtcgagaggtactacgacggtcttacggtaagtgcccaactccagagt

SEQ ID NO: 332357 - DNA, 60 bp, Artificial
  Synthetic oligonucleotide
atcgtcgccaatgcttcccggtctgacccagattggagacatactgccgtcaagatattc

SEQ ID NO: 332358 - DNA, 53 bp, Artificial
  Synthetic oligonucleotide
atcgtcgccgctaagaataacacgccggaaactgaacttcgggagtccctccc

SEQ ID NO: 332359 - DNA, 52 bp, Artificial
  Synthetic oligonucleotide
atcgtcgctttaaatacgttttggaaagagggccttctacggaaggagtgcc

SEQ ID NO: 332360 - DNA, 52 bp, Artificial
  Synthetic oligonucleotide
atcgtcggagaactcttttggtgcgtggttgcttgagccggtaactattttc

SEQ ID NO: 332361 - DNA, 57 bp, Artificial
  Synthetic oligonucleotide
atcgtcggagccttgaacataatgtccgttgaatgtcgtgcagaactcagtcgcaac

SEQ ID NO: 332362 - DNA, 54 bp, Artificial
  Synthetic oligonucleotide
atcgtcggtcccaggacctgcaggaacacgtggaatgggaccttccccattaac

SEQ ID NO: 332363 - DNA, 54 bp, Artificial
  Synthetic oligonucleotide
atcgtcgtgggagaaccctcccgactctgatcagcccacccttcccccgtaggc

SEQ ID NO: 332364 - DNA, 59 bp, Artificial
  Synthetic oligonucleotide
atcgtcgttcatggcgagaacgagatccctcgatccttgacacgctcggcggacgaaaa

SEQ ID NO: 332365 - DNA, 55 bp, Artificial
  Synthetic oligonucleotide
atcgtctaaaataaagtctcctcgacgtggtgactgttgcggacgcggttgtgtt

SEQ ID NO: 332366 - DNA, 60 bp, Artificial
  Synthetic oligonucleotide
atcgtctctattgatgaaggagatccagacagtgatgctatcttcagcatctcagaggga

SEQ ID NO: 332367 - DNA, 60 bp, Artificial
  Synthetic oligonucleotide
atcgtctgagcgccaacaggccgcgatcatggatcgcaacgcgcagctcgcgaacaatca

SEQ ID NO: 332368 - DNA, 60 bp, Artificial
  Synthetic oligonucleotide
atcgtctgtcagtctggagtatttagtgacgattgggcgacatgtagaatgctttgggca

SEQ ID NO: 332369 - DNA, 60 bp, Artificial
  Synthetic oligonucleotide
atcgtcttccagatctgctactgaactgtttggagagcccatctccaaacaatatacgcg

SEQ ID NO: 332370 - DNA, 58 bp, Artificial
  Synthetic oligonucleotide
atcgtcttcccagttctactgtcaccctcaatcactatacttatgggccttataggcc

SEQ ID NO: 332371 - DNA, 55 bp, Artificial
  Synthetic oligonucleotide
atcgtctttcctgtacgactatcaccctcaattataatactaataggtctctccg

SEQ ID NO: 332372 - DNA, 55 bp, Artificial
  Synthetic oligonucleotide
atcgtcttttcacactactaaaaaatcaggaacagcatcaacccaattaggattt

SEQ ID NO: 332373 - DNA, 59 bp, Artificial
  Synthetic oligonucleotide
atcgtgaacactagtaagtaccccaacatgtatattcctgtcggtgctgtaactgaaca

SEQ ID NO: 332374 - DNA, 56 bp, Artificial
  Synthetic oligonucleotide
atcgtgaactgtgttatggggattggttcgtattacgattggttggaataactgta

SEQ ID NO: 332375 - DNA, 53 bp, Artificial
  Synthetic oligonucleotide
atcgtgaagccatgcctgtctgggtcaagtacaattaccctggggccccttca

SEQ ID NO: 332376 - DNA, 55 bp, Artificial
  Synthetic oligonucleotide
atcgtgaatcaacaaaccgaaacgaacatcaattacctacagggacaagttccga

SEQ ID NO: 332377 - DNA, 60 bp, Artificial
  Synthetic oligonucleotide
atcgtgacagaaagtttgattcaaacgatgaggatgggtttacactgatacagattcgaa

SEQ ID NO: 332378 - DNA, 59 bp, Artificial
  Synthetic oligonucleotide
atcgtgagtcatgcaagggtgtttatgataacattagcaagaacgccctgttagtttat

SEQ ID NO: 332379 - DNA, 52 bp, Artificial
  Synthetic oligonucleotide
atcgtgagtgccatcgctgggttgggtgtgcccactgagcaagtctctgcag

SEQ ID NO: 332380 - DNA, 57 bp, Artificial
  Synthetic oligonucleotide
atcgtgcacgcctatgaaagagcgcgacacatgtaagcctaacgaagcggccagcta

SEQ ID NO: 332381 - DNA, 55 bp, Artificial
  Synthetic oligonucleotide
atcgtgcatcgacgcacgctcgtggcgttcctggtaatcggaccatacgccacgg

SEQ ID NO: 332382 - DNA, 55 bp, Artificial
  Synthetic oligonucleotide
atcgtgctgccgaacggtgcgacgctgtacttcctcggcaccaacgcgcgcactg

SEQ ID NO: 332383 - DNA, 54 bp, Artificial
  Synthetic oligonucleotide
atcgtggcgtgggccgcgatcctcgaggcacggtccccgatcgatccggacggt

SEQ ID NO: 332384 - DNA, 60 bp, Artificial
  Synthetic oligonucleotide
atcgtgtatcttgaccttattcgtccgatgtgtagccttcgtcgtctgtatcgtcgtctc

SEQ ID NO: 332385 - DNA, 58 bp, Artificial
  Synthetic oligonucleotide
atcgtgtgaaaatcgagttgaagagcgtcttaccaatactcggtggggtgatgccacc

SEQ ID NO: 332386 - DNA, 51 bp, Artificial
  Synthetic oligonucleotide
atcgtgtgggcccaacccttcggggccggttcgatgtgtatccgcccctta

SEQ ID NO: 332387 - DNA, 55 bp, Artificial
  Synthetic oligonucleotide
atcgtgtggggaaacgtttttgcgtcaaatctgtgtacatattagggaagatttg

SEQ ID NO: 332388 - DNA, 55 bp, Artificial
  Synthetic oligonucleotide
atcgttaacaaggtttaattgctgtactggatgcattgtcttagctcgccagtcc

SEQ ID NO: 332389 - DNA, 55 bp, Artificial
  Synthetic oligonucleotide
atcgttaagctgggaggtacgactggtagaaccgttcagggcctgaaagtgggca

SEQ ID NO: 332390 - DNA, 56 bp, Artificial
  Synthetic oligonucleotide
atcgttaatagcaaagcttgatgccacagttttcgcccaaatagttaaattacgaa

SEQ ID NO: 332391 - DNA, 51 bp, Artificial
  Synthetic oligonucleotide
atcgttaattccggtaagaactccggttatggtacgatggaatacctgaag

SEQ ID NO: 332392 - DNA, 51 bp, Artificial
  Synthetic oligonucleotide
atcgttacagtaagaatagagggacagctaaaagaagctctgttagacaca

SEQ ID NO: 332393 - DNA, 60 bp, Artificial
  Synthetic oligonucleotide
atcgttacatcagccgcctcacttgacccgactcaattgagtcgcctactatgacaacgc

SEQ ID NO: 332394 - DNA, 58 bp, Artificial
  Synthetic oligonucleotide
atcgttacatctactgcgtcgctttaagaactgtatcgaatgttcttaggcgtttgtg

SEQ ID NO: 332395 - DNA, 57 bp, Artificial
  Synthetic oligonucleotide
atcgttacgcattattttacgatccgtttccggcacgacatcacggcagatcacgaa

SEQ ID NO: 332396 - DNA, 60 bp, Artificial
  Synthetic oligonucleotide
atcgttagacgttctcacgaacagttctgttctcgatggagcttctatgtttgagtccga

SEQ ID NO: 332397 - DNA, 55 bp, Artificial
  Synthetic oligonucleotide
atcgttagcacaaatggctagtaagtttcgtgcttggtctgagcaagtcgctcag

SEQ ID NO: 332398 - DNA, 55 bp, Artificial
  Synthetic oligonucleotide
atcgttagcttcaatcagttcacaagcgggttcgctgtttgtcttgccgcgaggc

SEQ ID NO: 332399 - DNA, 60 bp, Artificial
  Synthetic oligonucleotide
atcgttccattcgcaacttgccgttcaaacctcctgaaaatcagtgagtatggtgcagag

SEQ ID NO: 332400 - DNA, 55 bp, Artificial
  Synthetic oligonucleotide
atcgttcgaactcgtctccccaaacatcgtctaatccaggacattcgtccggaca

SEQ ID NO: 332401 - DNA, 56 bp, Artificial
  Synthetic oligonucleotide
atcgttcgtttaagcgtggtgcgaagagtgttcgtaatacggctgattcgattagg

SEQ ID NO: 332402 - DNA, 50 bp, Artificial
  Synthetic oligonucleotide
atcgttctggggtcaacgcgaaggaacgcagagcatgcatgttcgctggc

SEQ ID NO: 332403 - DNA, 60 bp, Artificial
  Synthetic oligonucleotide
atcgttctttgtggcagctcgagatataggagttcctcctctgtagacagtttcagttat

SEQ ID NO: 332404 - DNA, 55 bp, Artificial
  Synthetic oligonucleotide
atcgttgaaaaacgatctaaagaactacttgaactaagacaagctcttagtgaaa

SEQ ID NO: 332405 - DNA, 55 bp, Artificial
  Synthetic oligonucleotide
atcgttgagcgcgtacgggttggacagattctggctgtattgaacagaagatttg

SEQ ID NO: 332406 - DNA, 60 bp, Artificial
  Synthetic oligonucleotide
atcgttgagtctgctcggtgtgcaacggttcaaactggaaaccgtgtgaatattgtggca

SEQ ID NO: 332407 - DNA, 56 bp, Artificial
  Synthetic oligonucleotide
atcgttgatagcgaagcttgacgctacagtttttgcccaaatagttaaattacgga

SEQ ID NO: 332408 - DNA, 52 bp, Artificial
  Synthetic oligonucleotide
atcgttgatttggttgagttgtggatatttgcgactgtctacagcactttgg

SEQ ID NO: 332409 - DNA, 54 bp, Artificial
  Synthetic oligonucleotide
atcgttgcactcgtcattaaaccccggaacgaggtcccagccggctttatctcc

SEQ ID NO: 332410 - DNA, 54 bp, Artificial
  Synthetic oligonucleotide
atcgttgcattgagtgcgtgatcgcaaatggagcaagatgcaccgaatgtgccg

SEQ ID NO: 332411 - DNA, 55 bp, Artificial
  Synthetic oligonucleotide
atcgttgctatggtcttttcacaggaggattgtatgataaaggcagttaggggtg

SEQ ID NO: 332412 - DNA, 60 bp, Artificial
  Synthetic oligonucleotide
atcgttggctatatctaatgctttgggcgaactgatgacttatgttagttcgaaagaata

SEQ ID NO: 332413 - DNA, 60 bp, Artificial
  Synthetic oligonucleotide
atcgttgtacctagattacttgatataacattacgcgcttatgatgatagaaaatcgacg

SEQ ID NO: 332414 - DNA, 55 bp, Artificial
  Synthetic oligonucleotide
atcgttgtctgaatgcacaaatgtcgtctcggtacgaactataattatcgacgtc

SEQ ID NO: 332415 - DNA, 55 bp, Artificial
  Synthetic oligonucleotide
atcgtttatctactaccggtgataggcctctgtcttgccctgggtttgacgacgt

SEQ ID NO: 332416 - DNA, 60 bp, Artificial
  Synthetic oligonucleotide
atcgtttcgccatcaaagtatggttcgtttcatcaacatctgctcgcacgattgggtgta

SEQ ID NO: 332417 - DNA, 57 bp, Artificial
  Synthetic oligonucleotide
atcgtttcttaagatccgtgacaatttctcttccttgagtctagttactctgattgt

SEQ ID NO: 332418 - DNA, 52 bp, Artificial
  Synthetic oligonucleotide
atcgtttgaagggtgactctgggtttttaccattttactgcgcggtaaaatg

SEQ ID NO: 332419 - DNA, 60 bp, Artificial
  Synthetic oligonucleotide
atcgtttgaatctaggcacgatgtctctcatattggaaaggtgatgtgtatcagcgatgt

SEQ ID NO: 332420 - DNA, 50 bp, Artificial
  Synthetic oligonucleotide
atcgtttggccagaactcaaaatgtgcaacatagagccactgttttaaca

SEQ ID NO: 332421 - DNA, 59 bp, Artificial
  Synthetic oligonucleotide
atcgtttgtttccagcacgaggtattatgccgctttgcaccctatatacgttacattga

SEQ ID NO: 332422 - DNA, 57 bp, Artificial
  Synthetic oligonucleotide
atcgttttaactccattaattgtaacaatacgatattgaggtgctgggtatccacca

SEQ ID NO: 332423 - DNA, 55 bp, Artificial
  Synthetic oligonucleotide
atcgttttgcccgtacgactatctccctctaagactaaactcaaaggtctcagag

SEQ ID NO: 332424 - DNA, 59 bp, Artificial
  Synthetic oligonucleotide
atctaaacacaaatcatagcctttcggaggagatttcctcttcctggtctgatcagttc

SEQ ID NO: 332425 - DNA, 60 bp, Artificial
  Synthetic oligonucleotide
atctaaactcaggatggacagatactgcacatggttcaggtattattcccatgagaactg

SEQ ID NO: 332426 - DNA, 59 bp, Artificial
  Synthetic oligonucleotide
atctaaactctatatgggatgctctgagagacggaaccatatcgtcgtccaagttttat

SEQ ID NO: 332427 - DNA, 58 bp, Artificial
  Synthetic oligonucleotide
atctaaagaatccggtcccgggcactataaattgtctaacaagtgcgattcattcatg

SEQ ID NO: 332428 - DNA, 60 bp, Artificial
  Synthetic oligonucleotide
atctaaagaggtctgcagcggaagtaattgaatggaaggagcagatggccgaacgtccat

SEQ ID NO: 332429 - DNA, 54 bp, Artificial
  Synthetic oligonucleotide
atctaaagcagcccattctaaagaaaccggtcccgggcactataaattgcttaa

SEQ ID NO: 332430 - DNA, 53 bp, Artificial
  Synthetic oligonucleotide
atctaaagcctaaggcacgcataatatcttgctctgagcaacttgaataacgc

SEQ ID NO: 332431 - DNA, 60 bp, Artificial
  Synthetic oligonucleotide
atctaaatacggtacgaaggttgatgtttacagggatgagacgtcagcgcagataattga

SEQ ID NO: 332432 - DNA, 56 bp, Artificial
  Synthetic oligonucleotide
atctaaatacttcatgacttgggtcttaaataccctcaagaaacgccaagtcgctg

SEQ ID NO: 332433 - DNA, 54 bp, Artificial
  Synthetic oligonucleotide
atctaaatcaatggagaatctaactaaacttgttaacgtagattcgctaaccgg

SEQ ID NO: 332434 - DNA, 58 bp, Artificial
  Synthetic oligonucleotide
atctaaatcgtcccatgcatataattttgtaccatctggtaaaatcttcctaggttca

SEQ ID NO: 332435 - DNA, 55 bp, Artificial
  Synthetic oligonucleotide
atctaaatgtgggacccattagtcaatgactttcctgacacactgcatggattgc

SEQ ID NO: 332436 - DNA, 60 bp, Artificial
  Synthetic oligonucleotide
atctaagcagtctatacaccatcttttcagcatgcgtgattaaatcctccctcagcttgt

SEQ ID NO: 332437 - DNA, 60 bp, Artificial
  Synthetic oligonucleotide
atctaagccctgcggagcttgtgcaggcgggtctctgtgacccgatacgtgtgtttgtta

SEQ ID NO: 332438 - DNA, 60 bp, Artificial
  Synthetic oligonucleotide
atctaagcgaacacttcccagcattgttctcagatgtaccgttagccggcgcgaacacta

SEQ ID NO: 332439 - DNA, 59 bp, Artificial
  Synthetic oligonucleotide
atctaaggacaaacactgagtccaacaatccgtgtgccaggaccattgtcaagcttttc

SEQ ID NO: 332440 - DNA, 54 bp, Artificial
  Synthetic oligonucleotide
atctaagtattctaatgtgggaggctcacagtcagccacaactatcatagcttt

SEQ ID NO: 332441 - DNA, 54 bp, Artificial
  Synthetic oligonucleotide
atctaagtggtactttagtaccataatttaaacgcaaattgaaaagattcgagc

SEQ ID NO: 332442 - DNA, 60 bp, Artificial
  Synthetic oligonucleotide
atctaagttcacagcaacttgatcaaagaagggctcttctaaacatgattggcatgactg

SEQ ID NO: 332443 - DNA, 60 bp, Artificial
  Synthetic oligonucleotide
atctaatacgtgatttgatacttgtcatacgtgcacgtaattatgtcgaagcgtcccgcc

SEQ ID NO: 332444 - DNA, 60 bp, Artificial
  Synthetic oligonucleotide
atctaatagacccgttctatatataaatatggcagattatagtattgattccagttatgt

SEQ ID NO: 332445 - DNA, 60 bp, Artificial
  Synthetic oligonucleotide
atctaatcgccccttggtatgcatacagatttgtcagcacaaataataaaggagccgtct

SEQ ID NO: 332446 - DNA, 59 bp, Artificial
  Synthetic oligonucleotide
atctaatctagggcgtgaaggaaataacaaccgtgtgccttcgcaggctgattaccagc

SEQ ID NO: 332447 - DNA, 51 bp, Artificial
  Synthetic oligonucleotide
atctaatgggcctaacgcaacgcgaggaaacaagctctcctgggacaactt

SEQ ID NO: 332448 - DNA, 59 bp, Artificial
  Synthetic oligonucleotide
atctaattccaggtacaccatatacacatgctgtgggtttcatgcctaacaaaaaagcc

SEQ ID NO: 332449 - DNA, 58 bp, Artificial
  Synthetic oligonucleotide
atctaattgaagccgacactccgctccccgtgagcgtatttactccatctctcgcccc

SEQ ID NO: 332450 - DNA, 60 bp, Artificial
  Synthetic oligonucleotide
atctaattgcagcgctgagggaatataaacggaaaatggggatgagagagggagcctcga

SEQ ID NO: 332451 - DNA, 59 bp, Artificial
  Synthetic oligonucleotide
atctacaaagctgtgtcctgtgacttcaacaatgggattacaatccagtacaacctaac

SEQ ID NO: 332452 - DNA, 60 bp, Artificial
  Synthetic oligonucleotide
atctacaacagctttaccagatgcagttgatccccagactgaagctcttgtctgaatgat

SEQ ID NO: 332453 - DNA, 51 bp, Artificial
  Synthetic oligonucleotide
atctacaacctatcctcagtaccttacacagtaagatgcaagagattcggt

SEQ ID NO: 332454 - DNA, 59 bp, Artificial
  Synthetic oligonucleotide
atctacaagctcccaaggggttacctagatctggctctccttgcagatccctccacttc

SEQ ID NO: 332455 - DNA, 60 bp, Artificial
  Synthetic oligonucleotide
atctacaataggatgggaaccgtgactacagaggtagcatttggtctagtatgcgccacc

SEQ ID NO: 332456 - DNA, 51 bp, Artificial
  Synthetic oligonucleotide
atctacaatcgagggagagtagatagattagttttaatttcgagcggcgtt

SEQ ID NO: 332457 - DNA, 60 bp, Artificial
  Synthetic oligonucleotide
atctacaatgcttgtagagatgccggtaataccgacgatagtattctagcgaggagctat

SEQ ID NO: 332458 - DNA, 60 bp, Artificial
  Synthetic oligonucleotide
atctacacagcaaagtatcccaacacttcagacttagacaggctgactcaaagtcatccc

SEQ ID NO: 332459 - DNA, 55 bp, Artificial
  Synthetic oligonucleotide
atctacagatggccagctattcaatcggccatattggatactgagagctcaggga

SEQ ID NO: 332460 - DNA, 60 bp, Artificial
  Synthetic oligonucleotide
atctacagctgtgaagaggtacactatgtggggagcggcgacggacgcaccgtgatgtgc

SEQ ID NO: 332461 - DNA, 60 bp, Artificial
  Synthetic oligonucleotide
atctacagtacgatcgggaaagcagctgagaggttcgcagagagtgagatcggttcagcc

SEQ ID NO: 332462 - DNA, 60 bp, Artificial
  Synthetic oligonucleotide
atctacatcaatgttaacctcgctttgtggtaatgacacataagcatttctgttcgctgt

SEQ ID NO: 332463 - DNA, 60 bp, Artificial
  Synthetic oligonucleotide
atctacatgaatttgcatttgggtgattgcgcgcgctccattggctatgttcctgggatt

SEQ ID NO: 332464 - DNA, 59 bp, Artificial
  Synthetic oligonucleotide
atctaccaagcaattcaacaatgacttaactgcgtcgttacaggttgctttagatacta

SEQ ID NO: 332465 - DNA, 55 bp, Artificial
  Synthetic oligonucleotide
atctaccacggggccggaacgcggactctcgcatcacccaagggtcctgttatcc

SEQ ID NO: 332466 - DNA, 58 bp, Artificial
  Synthetic oligonucleotide
atctaccagatcacccacgggaaggctgaacatgacactctggtcgtgtcggtcagtg

SEQ ID NO: 332467 - DNA, 55 bp, Artificial
  Synthetic oligonucleotide
atctaccagttcatggagtaggaaatacaacttagagactggaacccggcctgga

SEQ ID NO: 332468 - DNA, 60 bp, Artificial
  Synthetic oligonucleotide
atctaccatagcactgctgattgggataggcaacttggctttcaatgcagttattcatgg

SEQ ID NO: 332469 - DNA, 51 bp, Artificial
  Synthetic oligonucleotide
atctacccacatctaaaatccttttatctcagtagaagtctctagattcac

SEQ ID NO: 332470 - DNA, 60 bp, Artificial
  Synthetic oligonucleotide
atctacgattcagaacccagacaggctatcccgaacataacagatgtgttctccatgcct

SEQ ID NO: 332471 - DNA, 60 bp, Artificial
  Synthetic oligonucleotide
atctacgcaattcacagatttcgtatcattgaattcactacgatttagatttagtttgac

SEQ ID NO: 332472 - DNA, 60 bp, Artificial
  Synthetic oligonucleotide
atctacgcgatcgttaccaggtcatgcacaagttctatggcaaggtgaccggtggacagt

SEQ ID NO: 332473 - DNA, 60 bp, Artificial
  Synthetic oligonucleotide
atctacggagcctgctactccatagaaccactggatctacctccaatcattcaaagactc

SEQ ID NO: 332474 - DNA, 58 bp, Artificial
  Synthetic oligonucleotide
atctacggggcctgttactccattgaaccacttgacctacctcagatcattgaacgac

SEQ ID NO: 332475 - DNA, 55 bp, Artificial
  Synthetic oligonucleotide
atctacgtccaataaagtgacccgatggtttaaatctggctatgaccccggagat

SEQ ID NO: 332476 - DNA, 59 bp, Artificial
  Synthetic oligonucleotide
atctacgtcctgcactttgcgtgcctcgtgtatctcgcggcccatttttgcaccagggg

SEQ ID NO: 332477 - DNA, 60 bp, Artificial
  Synthetic oligonucleotide
atctactactgggaagaatggtttgcgttgtggtgacgatataccagggtgtgcttatga

SEQ ID NO: 332478 - DNA, 59 bp, Artificial
  Synthetic oligonucleotide
atctactagacgtaagcaatgacgaccaatggggaagatcgtaagcaatgacgtcttac

SEQ ID NO: 332479 - DNA, 52 bp, Artificial
  Synthetic oligonucleotide
atctactcacggaggaccctccgccttaccgggacccagggccaccctctcc

SEQ ID NO: 332480 - DNA, 50 bp, Artificial
  Synthetic oligonucleotide
atctactcctcattcaaatgccaaaagatttccccgtgtttccacagaaa

SEQ ID NO: 332481 - DNA, 59 bp, Artificial
  Synthetic oligonucleotide
atctactcggtagtcgttcaacttaactccgtgaatagcatggaaagccataatgagcc

SEQ ID NO: 332482 - DNA, 60 bp, Artificial
  Synthetic oligonucleotide
atctactgatagtacacttaaaagttgctctgttacgtatgtcaatgacccttcatctaa

SEQ ID NO: 332483 - DNA, 51 bp, Artificial
  Synthetic oligonucleotide
atctactgggacggcaatgcgcccggactctccgatggccggttgagtctg

SEQ ID NO: 332484 - DNA, 57 bp, Artificial
  Synthetic oligonucleotide
atctacttcctcagcagtaccagttcaaaccgcgcctttttccgagccatcattttc

SEQ ID NO: 332485 - DNA, 57 bp, Artificial
  Synthetic oligonucleotide
atctagaagcatatcctcacaagttggttcagttttcggaaatacaagagagggtaa

SEQ ID NO: 332486 - DNA, 51 bp, Artificial
  Synthetic oligonucleotide
atctagagaaccatacatagaagacgtaaccaaaatgtcatcgcatgcact

SEQ ID NO: 332487 - DNA, 52 bp, Artificial
  Synthetic oligonucleotide
atctagagtaatagactttgactcgatatgggaaaagccgtctgacttgagg

SEQ ID NO: 332488 - DNA, 56 bp, Artificial
  Synthetic oligonucleotide
atctagatatcagcggaatgattcggacgtaactcaaacactaacgtcaaaaaaat

SEQ ID NO: 332489 - DNA, 57 bp, Artificial
  Synthetic oligonucleotide
atctagatcaatcaagaaagttgacgacccttgcccggtttattatactgcatcttt

SEQ ID NO: 332490 - DNA, 59 bp, Artificial
  Synthetic oligonucleotide
atctagatcaattgtaccacaggggttgccgactacaactctgccaggttcaggtcaat

SEQ ID NO: 332491 - DNA, 60 bp, Artificial
  Synthetic oligonucleotide
atctagatgagagagatgaaggggatagagatgaacggggggatgaggagcaagtgaaga

SEQ ID NO: 332492 - DNA, 60 bp, Artificial
  Synthetic oligonucleotide
atctagcaggcagcgacttcgatgcctacctagcatcatacaacaagtataagtactttt

SEQ ID NO: 332493 - DNA, 60 bp, Artificial
  Synthetic oligonucleotide
atctagcatcttgagggtacctgagatctgtgcgagtgtgatattcggtggccactgggg

SEQ ID NO: 332494 - DNA, 60 bp, Artificial
  Synthetic oligonucleotide
atctagccgttaatgtcattgtcgccgctaatttgagggcctgttttgcggtcacagatc

SEQ ID NO: 332495 - DNA, 52 bp, Artificial
  Synthetic oligonucleotide
atctagcgggaccccggacccccttcgaaagtgaccggaggggatgctggga

SEQ ID NO: 332496 - DNA, 52 bp, Artificial
  Synthetic oligonucleotide
atctagcgttgagatattttatctttaggcggtaatcagcgatgcgatgcat

SEQ ID NO: 332497 - DNA, 60 bp, Artificial
  Synthetic oligonucleotide
atctaggacactgtcacctgcagagttagctcctgtagttgaaccaactgtgcagatgaa

SEQ ID NO: 332498 - DNA, 58 bp, Artificial
  Synthetic oligonucleotide
atctaggaccccaactgacctgtttgatgatcctatttccagacaatacacgcgtaag

SEQ ID NO: 332499 - DNA, 59 bp, Artificial
  Synthetic oligonucleotide
atctaggagaagatagagagtatgaactgtggaagattggagacggacggtggggaatg

SEQ ID NO: 332500 - DNA, 55 bp, Artificial
  Synthetic oligonucleotide
atctaggagtggaaaagcagacctcagtctcgcactgagatggcgcttagtacgc

SEQ ID NO: 332501 - DNA, 55 bp, Artificial
  Synthetic oligonucleotide
atctaggatatccacattagagcgcacggcggtcactagcgcgggagctcccctc

SEQ ID NO: 332502 - DNA, 51 bp, Artificial
  Synthetic oligonucleotide
atctaggtattgcaatgatcaacacgtgtcctctatgtcatcctttactaa

SEQ ID NO: 332503 - DNA, 60 bp, Artificial
  Synthetic oligonucleotide
atctagtaataggaaatagtggcgatgacaagagcatcgaactacctgcacgtgaagatg

SEQ ID NO: 332504 - DNA, 55 bp, Artificial
  Synthetic oligonucleotide
atctagtagggtcatttggtaagaatgtcaggggtagcataaatctggtgacggc

SEQ ID NO: 332505 - DNA, 55 bp, Artificial
  Synthetic oligonucleotide
atctagtggcagctctgggagggagcggactaatcgttctctttccaaactcacc

SEQ ID NO: 332506 - DNA, 60 bp, Artificial
  Synthetic oligonucleotide
atctagttcactatgaggacctgaccgcgcattggcacgctttaggggcagctcaaacag

SEQ ID NO: 332507 - DNA, 60 bp, Artificial
  Synthetic oligonucleotide
atctagttccaatatatccagaatttatgccgactttaccagcaaacgtgcaatatgtct

SEQ ID NO: 332508 - DNA, 50 bp, Artificial
  Synthetic oligonucleotide
atctagttgcccctacaggtaccatgtgggcttgtagtaccgggcttact

SEQ ID NO: 332509 - DNA, 60 bp, Artificial
  Synthetic oligonucleotide
atctagttggcgcttacactcctgaggctttatctgccgcgcttcctaatgacgctgggc

SEQ ID NO: 332510 - DNA, 60 bp, Artificial
  Synthetic oligonucleotide
atctagttttgtgagtcaggtcatgtcggacggtgtgaatgagacaccattatggcctca

SEQ ID NO: 332511 - DNA, 58 bp, Artificial
  Synthetic oligonucleotide
atctataaaagcatagagacattcagccatagcttagcccgcttaccagtagacaaag

SEQ ID NO: 332512 - DNA, 52 bp, Artificial
  Synthetic oligonucleotide
atctataactagagggtttggtcataaggatttccctgggaagaaccttata

SEQ ID NO: 332513 - DNA, 56 bp, Artificial
  Synthetic oligonucleotide
atctataagctcccccgtggttacctcgacctctgcattttggcagacccctgtct

SEQ ID NO: 332514 - DNA, 60 bp, Artificial
  Synthetic oligonucleotide
atctatacaacaagaaacagcattgacagaggggctaggtgaagatttaatggaagtcat

SEQ ID NO: 332515 - DNA, 54 bp, Artificial
  Synthetic oligonucleotide
atctatacaggacaagctaccggaaaagaagggtaaacttttggtgcataaaga

SEQ ID NO: 332516 - DNA, 60 bp, Artificial
  Synthetic oligonucleotide
atctatacgcagctttccacaagaaccccggtgttgtgacaggatcagctgtcgggtgtg

SEQ ID NO: 332517 - DNA, 60 bp, Artificial
  Synthetic oligonucleotide
atctatagacaacattatgggaatgattgggatactccctgacttaactccaagcaccga

SEQ ID NO: 332518 - DNA, 54 bp, Artificial
  Synthetic oligonucleotide
atctatagaccttggaggactaccggatgaggatttaataatcggtcttaaacc

SEQ ID NO: 332519 - DNA, 60 bp, Artificial
  Synthetic oligonucleotide
atctatagactccttgattgctttcgctacctgtatgaaatgtccactatggcctatccg

SEQ ID NO: 332520 - DNA, 60 bp, Artificial
  Synthetic oligonucleotide
atctataggatacatggccggcgcgtgccgatagtcacgctgtagctggccctaagcttc

SEQ ID NO: 332521 - DNA, 52 bp, Artificial
  Synthetic oligonucleotide
atctataggtaggttcttcccttccgacactctgtgtaatcccaataataag

SEQ ID NO: 332522 - DNA, 60 bp, Artificial
  Synthetic oligonucleotide
atctatagtgtaacatatatacatcccacaagccaatatgtgctgctaactgtatataca

SEQ ID NO: 332523 - DNA, 59 bp, Artificial
  Synthetic oligonucleotide
atctatagtttccaggatgtgattcccgagtataatgatggtcttcttgttccccttgc

SEQ ID NO: 332524 - DNA, 60 bp, Artificial
  Synthetic oligonucleotide
atctatataaaatgtatgccactagtgcgcagcctaaatggtttggatcattgttgcgat

SEQ ID NO: 332525 - DNA, 51 bp, Artificial
  Synthetic oligonucleotide
atctatatcccgcaagatcgaatgatgatggtctcctctgaacgtgttaag

SEQ ID NO: 332526 - DNA, 59 bp, Artificial
  Synthetic oligonucleotide
atctatatcttcaactggtgcctcttccatcattagtgtgtctataacctgtaccatat

SEQ ID NO: 332527 - DNA, 60 bp, Artificial
  Synthetic oligonucleotide
atctatatgactacaaggagaacaggttcattgagattggagtgacaaggagagaagtcc

SEQ ID NO: 332528 - DNA, 60 bp, Artificial
  Synthetic oligonucleotide
atctatatgtatccatgcctactgcccagtccaccatgaaagctgaagaacttacacccg

SEQ ID NO: 332529 - DNA, 60 bp, Artificial
  Synthetic oligonucleotide
atctatcaccccatgagataatgacaggccgagtgatgcctgggccgccaagagagggag

SEQ ID NO: 332530 - DNA, 58 bp, Artificial
  Synthetic oligonucleotide
atctatcacgatcctttatagggaactcgcacggttcaaggataaccaccaatcttca

SEQ ID NO: 332531 - DNA, 59 bp, Artificial
  Synthetic oligonucleotide
atctatcagggggtagagccactgcctggtgatccaacactaactaggactgttgaccg

SEQ ID NO: 332532 - DNA, 56 bp, Artificial
  Synthetic oligonucleotide
atctatcatcatgtgacgtacaatcatcaagaacaagcaaagtatgagaatcatac

SEQ ID NO: 332533 - DNA, 54 bp, Artificial
  Synthetic oligonucleotide
atctatcattacggtctgtatgtggaacgaggccttgtacttggtgtgcacaaa

SEQ ID NO: 332534 - DNA, 60 bp, Artificial
  Synthetic oligonucleotide
atctatccattgaaaaagttagagagatgtcgcacattctctctctagactgaattggag

SEQ ID NO: 332535 - DNA, 55 bp, Artificial
  Synthetic oligonucleotide
atctatccggttaatgattgggggccgcccccctgacacgtcctattatccatat

SEQ ID NO: 332536 - DNA, 55 bp, Artificial
  Synthetic oligonucleotide
atctatctcccacgtattcagagcgtggtcgctccgatcctccggggagatcccc

SEQ ID NO: 332537 - DNA, 60 bp, Artificial
  Synthetic oligonucleotide
atctatcttggatctttctcaactggacactattatccacttgattcaagaggtatactt

SEQ ID NO: 332538 - DNA, 54 bp, Artificial
  Synthetic oligonucleotide
atctatgaaacttatggggatacttggaggggagttgaagctatgataagaact

SEQ ID NO: 332539 - DNA, 52 bp, Artificial
  Synthetic oligonucleotide
atctatgatggcaaccggaaaattactggttgcttacgccccaccaggcgcc

SEQ ID NO: 332540 - DNA, 53 bp, Artificial
  Synthetic oligonucleotide
atctatgatgttgtagactgcttcctcatcataggaagaccagtccacattat

SEQ ID NO: 332541 - DNA, 56 bp, Artificial
  Synthetic oligonucleotide
atctatgcggttctctttgtctgcgtggcgtggcatattaaaggaaggttgccagc

SEQ ID NO: 332542 - DNA, 55 bp, Artificial
  Synthetic oligonucleotide
atctatgctaactctttatgtacagtgttaccggccgttaggctactaagtaaca

SEQ ID NO: 332543 - DNA, 56 bp, Artificial
  Synthetic oligonucleotide
atctatggataaaactttaaaccagtaccccgctttgactgctgagattttcaatg

SEQ ID NO: 332544 - DNA, 59 bp, Artificial
  Synthetic oligonucleotide
atctatggcaacccttcctgtgatctactgttgggaggaagagaatggtcctacatcgt

SEQ ID NO: 332545 - DNA, 60 bp, Artificial
  Synthetic oligonucleotide
atctatggcgctgatcaggtaatctgtgtagaccttgcttgggacatgttcatcacagat

SEQ ID NO: 332546 - DNA, 55 bp, Artificial
  Synthetic oligonucleotide
atctatggctaggcgctatccacgtggtgcttgacaagctatctcccgggcggtt

SEQ ID NO: 332547 - DNA, 59 bp, Artificial
  Synthetic oligonucleotide
atctatggtagttctcaactttttattcgcacagtttcctgatgagtataatcgattta

SEQ ID NO: 332548 - DNA, 57 bp, Artificial
  Synthetic oligonucleotide
atctatgtactactacctatatgctttaagttaagggatacccttagaaagcatgaa

SEQ ID NO: 332549 - DNA, 60 bp, Artificial
  Synthetic oligonucleotide
atctatgtagaggctagcgagtattacccagccaggtaccaatcacatctcatgctcgca

SEQ ID NO: 332550 - DNA, 55 bp, Artificial
  Synthetic oligonucleotide
atctatgtcagagccgttcggaccctccgtgtcactgaccccgctgggtttgtcc

SEQ ID NO: 332551 - DNA, 60 bp, Artificial
  Synthetic oligonucleotide
atctatgtgtggctcatctatatactcatcagctgtcaatgcataccgtggatttggcga

SEQ ID NO: 332552 - DNA, 60 bp, Artificial
  Synthetic oligonucleotide
atctatgttacatctgatcggaaacgtccacgaggcttgcaaggactcgttgtccgtcat

SEQ ID NO: 332553 - DNA, 55 bp, Artificial
  Synthetic oligonucleotide
atctattatgagcagattcttgagaaattcccaaacagtctttggattgccgggt

SEQ ID NO: 332554 - DNA, 56 bp, Artificial
  Synthetic oligonucleotide
atctattccaggtgccccagaatcccgtagtcgacgggattcttgcttcacctggg

SEQ ID NO: 332555 - DNA, 55 bp, Artificial
  Synthetic oligonucleotide
atctattgagaatgagaactttcaagaatgaagtgacgaaaaatgatctaatgaa

SEQ ID NO: 332556 - DNA, 60 bp, Artificial
  Synthetic oligonucleotide
atctattgataaagtgaagctcgaagtgtctcgtaaatctatccgtgatttgcgctcttc

SEQ ID NO: 332557 - DNA, 51 bp, Artificial
  Synthetic oligonucleotide
atctattgcatttaagtggctccacgggtccatgacggagcttaaagcccc

SEQ ID NO: 332558 - DNA, 59 bp, Artificial
  Synthetic oligonucleotide
atctattgtaaaactggccgcgcagcggaatggcgttaattcaagataaatcagaagat

SEQ ID NO: 332559 - DNA, 58 bp, Artificial
  Synthetic oligonucleotide
atctattgtgaaggaatggtcgattgaggatcgtaaacatgacaatccaaccgaaagt

SEQ ID NO: 332560 - DNA, 59 bp, Artificial
  Synthetic oligonucleotide
atctattgttccggcactggtacttgccctcgaactggatgagaacatgcagatgagga

SEQ ID NO: 332561 - DNA, 58 bp, Artificial
  Synthetic oligonucleotide
atctatttgaatgttttaaatacacattgatcagtgcagggtttgaccagaaactggg

SEQ ID NO: 332562 - DNA, 59 bp, Artificial
  Synthetic oligonucleotide
atctatttttgacctgtcaacaggggttctcaattccagcatttgtaataatgctagga

SEQ ID NO: 332563 - DNA, 52 bp, Artificial
  Synthetic oligonucleotide
atctcaaaacatcctttcattgttacggtgcatgtacaaagtatgaataccc

SEQ ID NO: 332564 - DNA, 57 bp, Artificial
  Synthetic oligonucleotide
atctcaaatcgacccaggcagctattgatcaaattaatgggaaattgaatcgtctca

SEQ ID NO: 332565 - DNA, 60 bp, Artificial
  Synthetic oligonucleotide
atctcaacaaccatctataccgccaattcaatacatatactgcaaatctcaaaatgggaa

SEQ ID NO: 332566 - DNA, 52 bp, Artificial
  Synthetic oligonucleotide
atctcaacaattgctgcgtaggtacgccgccgagggacctgagggagtccat

SEQ ID NO: 332567 - DNA, 59 bp, Artificial
  Synthetic oligonucleotide
atctcaacacccgtatccaaggtgcggaggaggctgaacttcgacagcccatacacgaa

SEQ ID NO: 332568 - DNA, 55 bp, Artificial
  Synthetic oligonucleotide
atctcaacatagccgcttcagtagaaacaccttcatttctggatcaagaattcgc

SEQ ID NO: 332569 - DNA, 59 bp, Artificial
  Synthetic oligonucleotide
atctcaaccttcattagctatcctaatcttggtaagacagaacccagtcgaagcaggtc

SEQ ID NO: 332570 - DNA, 55 bp, Artificial
  Synthetic oligonucleotide
atctcaactcgatgcttcgataggttggcgtgtgaaacccagtgtgcccggactc

SEQ ID NO: 332571 - DNA, 56 bp, Artificial
  Synthetic oligonucleotide
atctcaagatctagataaacatggagcagtaacaagtagtaatatgaacaatgagg

SEQ ID NO: 332572 - DNA, 59 bp, Artificial
  Synthetic oligonucleotide
atctcaagtattagtttcttctcttattacccgagtgatcaccagtgtcgcgtgcttac

SEQ ID NO: 332573 - DNA, 60 bp, Artificial
  Synthetic oligonucleotide
atctcaagtcgactcaggcagccattgaccaaatcaatggaaagctaaatcgtcttattg

SEQ ID NO: 332574 - DNA, 55 bp, Artificial
  Synthetic oligonucleotide
atctcaagttagggtaaatggtttcatcagaatcctccaaaaatcccagttaatc

SEQ ID NO: 332575 - DNA, 55 bp, Artificial
  Synthetic oligonucleotide
atctcaataccgcatttcgtttcatggcatccaagaggagggtgcttttgcaagg

SEQ ID NO: 332576 - DNA, 60 bp, Artificial
  Synthetic oligonucleotide
atctcaattgggcctctaagcccaagtctggacatggacgcgcatctaatgggcttcctc

SEQ ID NO: 332577 - DNA, 55 bp, Artificial
  Synthetic oligonucleotide
atctcacaaaagttcgtgagtacctcaagtcctattctcgtctagatcaggcagt

SEQ ID NO: 332578 - DNA, 55 bp, Artificial
  Synthetic oligonucleotide
atctcacacatctggtcacaaatcaaaggtgcaactgtcgtcttgacagcattga

SEQ ID NO: 332579 - DNA, 55 bp, Artificial
  Synthetic oligonucleotide
atctcaccggattccagcgggacatcatgttctgcctacgccggatcgagcgcgg

SEQ ID NO: 332580 - DNA, 56 bp, Artificial
  Synthetic oligonucleotide
atctcaccggctgagtgccggaaggaaaccgcgcgcaggtttcaccctataactgg

SEQ ID NO: 332581 - DNA, 60 bp, Artificial
  Synthetic oligonucleotide
atctcacctcataagatgatgaatccgagtggtggcgcactcgcagttctctcaaagttc

SEQ ID NO: 332582 - DNA, 51 bp, Artificial
  Synthetic oligonucleotide
atctcacgaggcggaggtcgcgacgactgctctgacgaggaggtatcttcg

SEQ ID NO: 332583 - DNA, 55 bp, Artificial
  Synthetic oligonucleotide
atctcacgccgacaaaagcattatcgattagcgaatatgtatcaaatccacaaca

SEQ ID NO: 332584 - DNA, 54 bp, Artificial
  Synthetic oligonucleotide
atctcacgcggccaatgaacatataggtactaatctgccattgatggtaggatt

SEQ ID NO: 332585 - DNA, 57 bp, Artificial
  Synthetic oligonucleotide
atctcacgtgtctaataccgcgttcgactcgtttccgaagaaacattatgcaacgcc

SEQ ID NO: 332586 - DNA, 60 bp, Artificial
  Synthetic oligonucleotide
atctcacgtttggtccatctacacaccggacagtggtccacacagcatggtgtcactaca

SEQ ID NO: 332587 - DNA, 60 bp, Artificial
  Synthetic oligonucleotide
atctcactagcagaacatcaactttggaagcaacgagttcatcattaacaactgatctgg

SEQ ID NO: 332588 - DNA, 51 bp, Artificial
  Synthetic oligonucleotide
atctcacttgtgaacagttcttgcagtacattcatgaaaaccatccaaggt

SEQ ID NO: 332589 - DNA, 53 bp, Artificial
  Synthetic oligonucleotide
atctcagagcactgcagcattgactaggttgatggcaactacagacactatga

SEQ ID NO: 332590 - DNA, 60 bp, Artificial
  Synthetic oligonucleotide
atctcagatgcataaatggatgggaagttggataatgtctgataatcatgatgccagtca

SEQ ID NO: 332591 - DNA, 50 bp, Artificial
  Synthetic oligonucleotide
atctcagcacacacgagtgagcaacgatggatcacggcgcttagtcgttt

SEQ ID NO: 332592 - DNA, 56 bp, Artificial
  Synthetic oligonucleotide
atctcagcaccactctagcgctcacgatcactatagcgttccatcaattatacact

SEQ ID NO: 332593 - DNA, 55 bp, Artificial
  Synthetic oligonucleotide
atctcagcactagtgattgtggttagaaaccatgatgacttaataacggtaactg

SEQ ID NO: 332594 - DNA, 60 bp, Artificial
  Synthetic oligonucleotide
atctcagcagagatacacaactttggcatagtatgtgtccagtgcccctacacgtttccc

SEQ ID NO: 332595 - DNA, 57 bp, Artificial
  Synthetic oligonucleotide
atctcagcatggagaagcagtcgtctttgagtgcctcaaaatgaaccgtctctccat

SEQ ID NO: 332596 - DNA, 51 bp, Artificial
  Synthetic oligonucleotide
atctcagccaagttatcaatcgggacctcgtatccgccttttccctaccgg

SEQ ID NO: 332597 - DNA, 59 bp, Artificial
  Synthetic oligonucleotide
atctcagcccttctaggaaaatcctatccgttgaatcataacacgcgttacatatccaa

SEQ ID NO: 332598 - DNA, 59 bp, Artificial
  Synthetic oligonucleotide
atctcagcgacgggtcctggtctaccgtgagcgaggaggctagtgaggacgtcgtctgt

SEQ ID NO: 332599 - DNA, 60 bp, Artificial
  Synthetic oligonucleotide
atctcagcgtatatctagtgaattgatgagtaggaagcgagctgctaagtacgttactgg

SEQ ID NO: 332600 - DNA, 60 bp, Artificial
  Synthetic oligonucleotide
atctcagctctatcttgagtccttttggggttcatctaatgtagcaagacgtgataataa

SEQ ID NO: 332601 - DNA, 55 bp, Artificial
  Synthetic oligonucleotide
atctcaggacggctagccgactggttcatgtcccaatatggcaacaatttcgttg

SEQ ID NO: 332602 - DNA, 58 bp, Artificial
  Synthetic oligonucleotide
atctcaggactctctaatgtgattaatacgggttgatcatgagggtggtaagtgggtt

SEQ ID NO: 332603 - DNA, 54 bp, Artificial
  Synthetic oligonucleotide
atctcaggcctacccgtctctgcccgaagagggggggagatacttctgggaccg

SEQ ID NO: 332604 - DNA, 59 bp, Artificial
  Synthetic oligonucleotide
atctcaggctcttccattcttcagaaattacgtcaatgtacaatcgaagggttctctcc

SEQ ID NO: 332605 - DNA, 58 bp, Artificial
  Synthetic oligonucleotide
atctcagtagtaaaaccaagtcaagtcatctttctcggtgatccactccagttaggtc

SEQ ID NO: 332606 - DNA, 55 bp, Artificial
  Synthetic oligonucleotide
atctcagtgaaacaccttgtcaggtggatttaatgacttcaactatagatggggc

SEQ ID NO: 332607 - DNA, 60 bp, Artificial
  Synthetic oligonucleotide
atctcagtgaacctgaaagagttcctcctagcgtcaatgaacctgacatacgtgagcaaa

SEQ ID NO: 332608 - DNA, 58 bp, Artificial
  Synthetic oligonucleotide
atctcagtttaatgacataccctctacttcgaggggtttgactcgtgacactcgtgaa

SEQ ID NO: 332609 - DNA, 60 bp, Artificial
  Synthetic oligonucleotide
atctcatacggatgtgaggtggacgctagcaaccgatcagctggtgatcagagcatggat

SEQ ID NO: 332610 - DNA, 58 bp, Artificial
  Synthetic oligonucleotide
atctcatactcatctagaacaagtctcacactggcatgaatctcccctgtggttagag

SEQ ID NO: 332611 - DNA, 55 bp, Artificial
  Synthetic oligonucleotide
atctcatatcttcttacttagaagaggagtctcctggacgctcccgcccactcgg

SEQ ID NO: 332612 - DNA, 60 bp, Artificial
  Synthetic oligonucleotide
atctcatatgcgtcgtatgtatacgatcatatttgattatttacaaaggatcccttccaa

SEQ ID NO: 332613 - DNA, 60 bp, Artificial
  Synthetic oligonucleotide
atctcatcaggggacaggattccaccgcctctttactcaatgtgagaatgtcatcatcgt

SEQ ID NO: 332614 - DNA, 55 bp, Artificial
  Synthetic oligonucleotide
atctcatccgtgatcttatcagtgtaattcgtgcgaagaattatgtcgaagcgtc

SEQ ID NO: 332615 - DNA, 50 bp, Artificial
  Synthetic oligonucleotide
atctcatcttcgaactctaccatgcaccgtgtgctcttcatgtcgtaagg

SEQ ID NO: 332616 - DNA, 55 bp, Artificial
  Synthetic oligonucleotide
atctcatctttgggtcgaagagatgatattgttaaccaagacattttggaggcgg

SEQ ID NO: 332617 - DNA, 60 bp, Artificial
  Synthetic oligonucleotide
atctcatgagttcccacgttaccaactcgtcaagtatatcacttgcaggcctagttaaca

SEQ ID NO: 332618 - DNA, 60 bp, Artificial
  Synthetic oligonucleotide
atctcattccgcatgatgacaggcttggtcaactatttcaagcgtttctgcctctcgcaa

SEQ ID NO: 332619 - DNA, 59 bp, Artificial
  Synthetic oligonucleotide
atctcattttcctggcacggtcagcacttattccaagggggtcagtggcacataaatct

SEQ ID NO: 332620 - DNA, 60 bp, Artificial
  Synthetic oligonucleotide
atctcattttcctggcacggtcagcacttattttaagaggatcagttgcacacaagtctt

SEQ ID NO: 332621 - DNA, 60 bp, Artificial
  Synthetic oligonucleotide
atctcattttcttggcacggtcagcactcattctgagagggtcagtagcccacaaatcgt

SEQ ID NO: 332622 - DNA, 55 bp, Artificial
  Synthetic oligonucleotide
atctccaagatccaaagctacagttgaggacattattgcatgcggtgaacatgag

SEQ ID NO: 332623 - DNA, 55 bp, Artificial
  Synthetic oligonucleotide
atctccaagtccaacaataagtacattctggatggaggacacttgagttgcagga

SEQ ID NO: 332624 - DNA, 59 bp, Artificial
  Synthetic oligonucleotide
atctccactattacagtcccagaagcgtttatggggacctgttgcctgtactctatgac

SEQ ID NO: 332625 - DNA, 57 bp, Artificial
  Synthetic oligonucleotide
atctccactattactgaacccgtcgcgtttataggaacttgttgtctgtattctata

SEQ ID NO: 332626 - DNA, 54 bp, Artificial
  Synthetic oligonucleotide
atctccacttccagatacttataaagctacagattttaaccagtatttgcgtca

SEQ ID NO: 332627 - DNA, 60 bp, Artificial
  Synthetic oligonucleotide
atctccatctctatgtgcctctcgggcacatatgatatacttcggggtccaacgaccaac

SEQ ID NO: 332628 - DNA, 60 bp, Artificial
  Synthetic oligonucleotide
atctcccagatgattgcgaaatcgtctccattgatgaaggagatccagacagcgatgcta

SEQ ID NO: 332629 - DNA, 51 bp, Artificial
  Synthetic oligonucleotide
atctccccgtgagcgtggacggaaagatatcggggacgctaaagcaatcgc

SEQ ID NO: 332630 - DNA, 52 bp, Artificial
  Synthetic oligonucleotide
atctcccgggtctaatacgggagtccctagcctatttaactcccgatatggg

SEQ ID NO: 332631 - DNA, 52 bp, Artificial
  Synthetic oligonucleotide
atctccgaaccaatgtgcaccatgaatgggtcaagtcctgggtctacaatcc

SEQ ID NO: 332632 - DNA, 53 bp, Artificial
  Synthetic oligonucleotide
atctccgaagtcgagtcttttgaagtggactctgtcccaacatcacgacttag

SEQ ID NO: 332633 - DNA, 55 bp, Artificial
  Synthetic oligonucleotide
atctccgaatgtgaagttagccgtatacaacaagtagatatcacacatgtcaccg

SEQ ID NO: 332634 - DNA, 55 bp, Artificial
  Synthetic oligonucleotide
atctccgagcgttgcagatttggacccgtacgataaatcccttcactcgagagtt

SEQ ID NO: 332635 - DNA, 54 bp, Artificial
  Synthetic oligonucleotide
atctccgatttatgctcctccaccccccccgtctctaaccccgacttctgccga

SEQ ID NO: 332636 - DNA, 55 bp, Artificial
  Synthetic oligonucleotide
atctccgcgatcgcttccaagtgatgcacaagttttacgctaaggtcactggtgg

SEQ ID NO: 332637 - DNA, 52 bp, Artificial
  Synthetic oligonucleotide
atctccggtaaggcacacttaaatccgagtcttatgtgtgacaatcaacttg

SEQ ID NO: 332638 - DNA, 56 bp, Artificial
  Synthetic oligonucleotide
atctccgtgatcgtttccaggttatgcacaagttttatgctaaggttaccggtgga

SEQ ID NO: 332639 - DNA, 58 bp, Artificial
  Synthetic oligonucleotide
atctcctaagagaaagaaaacccgtggggagtatcaggtacgctgtgctatgcacagt

SEQ ID NO: 332640 - DNA, 55 bp, Artificial
  Synthetic oligonucleotide
atctcctaatgcaccatgggtctttgcttgtgctcctgatcgttgtccaccaaca

SEQ ID NO: 332641 - DNA, 59 bp, Artificial
  Synthetic oligonucleotide
atctcctagtagatactctaggaattcaagtaaggcctcacatagagcctctaaaagac

SEQ ID NO: 332642 - DNA, 59 bp, Artificial
  Synthetic oligonucleotide
atctcctatctacttttcataacttaaccgacttaacatatgttggatgccattgatac

SEQ ID NO: 332643 - DNA, 55 bp, Artificial
  Synthetic oligonucleotide
atctcctctgaggcccagcttttcaataagccatattggctgcggcgtgctcagg

SEQ ID NO: 332644 - DNA, 60 bp, Artificial
  Synthetic oligonucleotide
atctcctcttgatgccgtgctaaaacaaatcctgtacaaacctcctcgtacagtcatcat

SEQ ID NO: 332645 - DNA, 51 bp, Artificial
  Synthetic oligonucleotide
atctcctgaaaaggacgattcgagaggtctcgtgttcccgggttacaagta

SEQ ID NO: 332646 - DNA, 57 bp, Artificial
  Synthetic oligonucleotide
atctcctggaagagttggggtcagtcaatgatctggagtgtcccggaggccccccga

SEQ ID NO: 332647 - DNA, 52 bp, Artificial
  Synthetic oligonucleotide
atctcgaaagagttcttcctacagtcatcaaccaggtaactgacatgactca

SEQ ID NO: 332648 - DNA, 53 bp, Artificial
  Synthetic oligonucleotide
atctcgaaccacgggcggaggtccggacttggtcttcggatggcggaggtccg

SEQ ID NO: 332649 - DNA, 60 bp, Artificial
  Synthetic oligonucleotide
atctcgaatagccacattagagcgtacagcggtcactagcgcagcggcacctctctcgat

SEQ ID NO: 332650 - DNA, 55 bp, Artificial
  Synthetic oligonucleotide
atctcgacacgatatcgttcatattggtaaggtaatgtgtatttcggatgttacg

SEQ ID NO: 332651 - DNA, 59 bp, Artificial
  Synthetic oligonucleotide
atctcgacgttcatcagttacccagacttgggcaagattgaaccgggtcgaagcagatc

SEQ ID NO: 332652 - DNA, 60 bp, Artificial
  Synthetic oligonucleotide
atctcgagacgtcttgcagagcaatttattgaggtgcaaatcgctgtagctgaatcgaac

SEQ ID NO: 332653 - DNA, 55 bp, Artificial
  Synthetic oligonucleotide
atctcgatacaaatactactggtatggtcagcttgaaaattcccgcacgcatggc

SEQ ID NO: 332654 - DNA, 53 bp, Artificial
  Synthetic oligonucleotide
atctcgcaacgttgaatcatccggtccaattaggtatatatctactccaacgg

SEQ ID NO: 332655 - DNA, 60 bp, Artificial
  Synthetic oligonucleotide
atctcgccggatctctcttacagagttgggtacttatgtgcagggctgcccagtgatact

SEQ ID NO: 332656 - DNA, 54 bp, Artificial
  Synthetic oligonucleotide
atctcgcgagaacgtaaacaaatataagacggcgccacacggcgctgcgtcata

SEQ ID NO: 332657 - DNA, 59 bp, Artificial
  Synthetic oligonucleotide
atctcgctagagttccatgtcttccttgaggtccgatacattgaatggaattgatgtag

SEQ ID NO: 332658 - DNA, 55 bp, Artificial
  Synthetic oligonucleotide
atctcggaccccccctcgacccgaatcgctcgcgcgattcggacctgcggcctcg

SEQ ID NO: 332659 - DNA, 55 bp, Artificial
  Synthetic oligonucleotide
atctcggacccggcaagactcggaccggagacgctcttccactcatgggacatca

SEQ ID NO: 332660 - DNA, 55 bp, Artificial
  Synthetic oligonucleotide
atctcggaggatttggcctgcacaatccaccaccacaggtcttcatcaagaatac

SEQ ID NO: 332661 - DNA, 50 bp, Artificial
  Synthetic oligonucleotide
atctcggcgctggagtttggtgatatgaaggttgatccggttggactatt

SEQ ID NO: 332662 - DNA, 60 bp, Artificial
  Synthetic oligonucleotide
atctcgggacctagaaagacatggggcaatcacaagtagcaatacagcacaggctaatcc

SEQ ID NO: 332663 - DNA, 50 bp, Artificial
  Synthetic oligonucleotide
atctcgggcagaagaagtacaccaaaaatacatattggtgggacggactc

SEQ ID NO: 332664 - DNA, 56 bp, Artificial
  Synthetic oligonucleotide
atctcgggtggacgcttgccctcccttcgtggaggttcctggtctccgcgcgatta

SEQ ID NO: 332665 - DNA, 50 bp, Artificial
  Synthetic oligonucleotide
atctcggttccttcccaaaagtccgtattgtactttctcattgagaaggg

SEQ ID NO: 332666 - DNA, 60 bp, Artificial
  Synthetic oligonucleotide
atctcgtcagactctcgccatactgaacgagccaatctgatcaaacacatgactttcgga

SEQ ID NO: 332667 - DNA, 55 bp, Artificial
  Synthetic oligonucleotide
atctcgtgcactgacgctccagactccttcggcctcaactttgcggcagactctc

SEQ ID NO: 332668 - DNA, 58 bp, Artificial
  Synthetic oligonucleotide
atctcgtgtttgtgctttgcaaaacatgagttgcgaaactgaactgtacgttgggaat

SEQ ID NO: 332669 - DNA, 58 bp, Artificial
  Synthetic oligonucleotide
atctctaatcaggaacccctaaaactctaagaaggcagtaggatcaatgattgtggta

SEQ ID NO: 332670 - DNA, 58 bp, Artificial
  Synthetic oligonucleotide
atctctacaactaaaccctttcagaacatctcgagaatatcgatcggggactgtccca

SEQ ID NO: 332671 - DNA, 58 bp, Artificial
  Synthetic oligonucleotide
atctctacgtgccgaataataggcggtatgctagacgtatctatagttttgttatccg

SEQ ID NO: 332672 - DNA, 55 bp, Artificial
  Synthetic oligonucleotide
atctctagcttcaatcaactcacaggccggctcactctttgttctaccaagaggc

SEQ ID NO: 332673 - DNA, 58 bp, Artificial
  Synthetic oligonucleotide
atctctattctgggtgctcggaattcgacgtcagtcgaatgttttgccgaggatagtt

SEQ ID NO: 332674 - DNA, 50 bp, Artificial
  Synthetic oligonucleotide
atctctattgaagggaggtatgactgcgggcttagcaagaggccaatggt

SEQ ID NO: 332675 - DNA, 60 bp, Artificial
  Synthetic oligonucleotide
atctctattgaggagagattgttctatgtcagaggcgggcaggatgagattgctgccctc

SEQ ID NO: 332676 - DNA, 60 bp, Artificial
  Synthetic oligonucleotide
atctctcaccctttgcttatgtcaatcattctcaccctggttgcaaaactctggagaacc

SEQ ID NO: 332677 - DNA, 60 bp, Artificial
  Synthetic oligonucleotide
atctctcccgggaccagatgctgagggacatcagggctctgatcaccctccatctgacca

SEQ ID NO: 332678 - DNA, 51 bp, Artificial
  Synthetic oligonucleotide
atctctccggtgcgtcggtcgacagactccgcacggatcaagccgctggcg

SEQ ID NO: 332679 - DNA, 57 bp, Artificial
  Synthetic oligonucleotide
atctctcgcgagttttaaattagctatagcgcccttggagataggaggggtgttcga

SEQ ID NO: 332680 - DNA, 58 bp, Artificial
  Synthetic oligonucleotide
atctctcgcgcgcataaccacctgggcgaggttaagctctacgtggcgggtgaagacc

SEQ ID NO: 332681 - DNA, 60 bp, Artificial
  Synthetic oligonucleotide
atctctcgggcagaaagagcgtgctattacaactactctgttgatagttctaaacaacaa

SEQ ID NO: 332682 - DNA, 59 bp, Artificial
  Synthetic oligonucleotide
atctctcggtctgtgcgagagaagcccaaaaatatcggggagcctcggctcagtgaggg

SEQ ID NO: 332683 - DNA, 60 bp, Artificial
  Synthetic oligonucleotide
atctctcttcatcagagaagaggatcgtgcggcactatccgatccggagttaagaagcgt

SEQ ID NO: 332684 - DNA, 60 bp, Artificial
  Synthetic oligonucleotide
atctctggaccctattgggctgacgtcagggaagacgttgtgtgctatggtggagcatgg

SEQ ID NO: 332685 - DNA, 59 bp, Artificial
  Synthetic oligonucleotide
atctctggagacaagagttgtacaagtacaaagtagttagcatagaacccataggagta

SEQ ID NO: 332686 - DNA, 60 bp, Artificial
  Synthetic oligonucleotide
atctctggcactcacaggtcagacagcggcaaacgatggcaaccagtatcgtgttaaggt

SEQ ID NO: 332687 - DNA, 58 bp, Artificial
  Synthetic oligonucleotide
atctctggcttaagagtggtccaatgggcaacaggcgcccattacaagcttaaaccta

SEQ ID NO: 332688 - DNA, 58 bp, Artificial
  Synthetic oligonucleotide
atctctggttgcgacttcacgcctgccaaactaccattctgaccctaaggtccaatac

SEQ ID NO: 332689 - DNA, 57 bp, Artificial
  Synthetic oligonucleotide
atctctgtcaagttagccaatctcaaattctgaccgtttttttccggctgtctagga

SEQ ID NO: 332690 - DNA, 60 bp, Artificial
  Synthetic oligonucleotide
atctctgtggaacactttggtagtgttgtggtgtgtccaccggagaattgatgtatcaga

SEQ ID NO: 332691 - DNA, 53 bp, Artificial
  Synthetic oligonucleotide
atctcttagattgtttccatcggaaagggttctaacaactaattctacgttta

SEQ ID NO: 332692 - DNA, 55 bp, Artificial
  Synthetic oligonucleotide
atctcttccacactgagaagtctgcaagactttcacatgagtctagaggtttgct

SEQ ID NO: 332693 - DNA, 57 bp, Artificial
  Synthetic oligonucleotide
atctcttccactttgttggaacaccagggtgtttgtacagtccacaggaacatactc

SEQ ID NO: 332694 - DNA, 55 bp, Artificial
  Synthetic oligonucleotide
atctcttgactacattgaaggcacttgccgtccatctcactatacaaccaatgtc

SEQ ID NO: 332695 - DNA, 53 bp, Artificial
  Synthetic oligonucleotide
atctcttgctgtgatgttgtccaggtggacactggtgagaagctccctactaa

SEQ ID NO: 332696 - DNA, 60 bp, Artificial
  Synthetic oligonucleotide
atctcttggtgccgtttgcggcccatatgaatggattggcgacatcgtcgctgcattccc

SEQ ID NO: 332697 - DNA, 60 bp, Artificial
  Synthetic oligonucleotide
atctcttgtgctcacaaccaattcatcggtaaggcttgaatcagaacgttgatgtgagtt

SEQ ID NO: 332698 - DNA, 53 bp, Artificial
  Synthetic oligonucleotide
atctctttgtcgtggggaaacaagcaagaaactccatgttgagaggcaaccta

SEQ ID NO: 332699 - DNA, 57 bp, Artificial
  Synthetic oligonucleotide
atctgaaactctccccactcgagagtgtccccgtccttgtcgatgtaggatttgacg

SEQ ID NO: 332700 - DNA, 55 bp, Artificial
  Synthetic oligonucleotide
atctgaaactgcttatcaaagcttctggattgtacttttctagtgttgaggacca

SEQ ID NO: 332701 - DNA, 60 bp, Artificial
  Synthetic oligonucleotide
atctgaaagagccttacaacactgtgcatgatccttcataccctcaaaggattgttcatg

SEQ ID NO: 332702 - DNA, 54 bp, Artificial
  Synthetic oligonucleotide
atctgaacatacgaatgttcctgccttagtcctgtcaccatcaccatctgcaat

SEQ ID NO: 332703 - DNA, 55 bp, Artificial
  Synthetic oligonucleotide
atctgaacattgatcctagctaccccgaacttgtgaggaatttcggagcattgga

SEQ ID NO: 332704 - DNA, 60 bp, Artificial
  Synthetic oligonucleotide
atctgaactgaagttcaactgactaaactctggcctctcaacaatagttgaggggtcaga

SEQ ID NO: 332705 - DNA, 55 bp, Artificial
  Synthetic oligonucleotide
atctgaagaatctacaacttactgagggagagcaacttgcgattacaagcgtgag

SEQ ID NO: 332706 - DNA, 56 bp, Artificial
  Synthetic oligonucleotide
atctgaagagtttaaatttgtcacgttgttcaattttgaagcgaaatttccacata

SEQ ID NO: 332707 - DNA, 55 bp, Artificial
  Synthetic oligonucleotide
atctgaagcgggctcacgaacgactggacatcatctcggaggaacttcaggctct

SEQ ID NO: 332708 - DNA, 53 bp, Artificial
  Synthetic oligonucleotide
atctgaaggaccggttgtggtaccaagctaccagcataacggggaaaagtggg

SEQ ID NO: 332709 - DNA, 51 bp, Artificial
  Synthetic oligonucleotide
atctgaaggactccatcttattattggattaaatttcatacatgctatgga

SEQ ID NO: 332710 - DNA, 60 bp, Artificial
  Synthetic oligonucleotide
atctgaaggagagatcaatgcttagctatggaaatgtactggatttgaaccatctggata

SEQ ID NO: 332711 - DNA, 55 bp, Artificial
  Synthetic oligonucleotide
atctgaagggtaagtgggtgcccggagcggtctacgccctctacgggatgtggcc

SEQ ID NO: 332712 - DNA, 59 bp, Artificial
  Synthetic oligonucleotide
atctgaatctatagaccctgttggttctgtggcccctcctgttggcagggatccttctc

SEQ ID NO: 332713 - DNA, 60 bp, Artificial
  Synthetic oligonucleotide
atctgaatgatgccacttaccagagaacaagggctcttgtgcgtactgggatggatccca

SEQ ID NO: 332714 - DNA, 51 bp, Artificial
  Synthetic oligonucleotide
atctgaatgcttcccgatctaagccgcacgcctttcggtaacgtatgtctg

SEQ ID NO: 332715 - DNA, 60 bp, Artificial
  Synthetic oligonucleotide
atctgaatgtgcctgcataaatggctcttgctttactataatgaccgatggaccaagtaa

SEQ ID NO: 332716 - DNA, 59 bp, Artificial
  Synthetic oligonucleotide
atctgacaaacgatatcaaaacaataatagtacaccttaatgaatctatagaaattgtg

SEQ ID NO: 332717 - DNA, 60 bp, Artificial
  Synthetic oligonucleotide
atctgacaaatttcacctacgattgcgtagacgaattcaagagtctgatcgaaggacggc

SEQ ID NO: 332718 - DNA, 60 bp, Artificial
  Synthetic oligonucleotide
atctgacatagcagggacaacaagcacagtagaggaacagatcgaatggatgtataggca

SEQ ID NO: 332719 - DNA, 60 bp, Artificial
  Synthetic oligonucleotide
atctgaccaagctcctgtgctccattatgttgggggtttatggagaagatacagagacta

SEQ ID NO: 332720 - DNA, 59 bp, Artificial
  Synthetic oligonucleotide
atctgacgcacgcggcaggacacagttacgtgtagcggcagttccagtaattaaagtaa

SEQ ID NO: 332721 - DNA, 60 bp, Artificial
  Synthetic oligonucleotide
atctgacgcgcatttggaacgctgccacgactactgcattcctagtatgccttgttaaga

SEQ ID NO: 332722 - DNA, 55 bp, Artificial
  Synthetic oligonucleotide
atctgacggggcgtctcccctcctgggcgggagtgcgtcaaaatgtgatgggatc

SEQ ID NO: 332723 - DNA, 60 bp, Artificial
  Synthetic oligonucleotide
atctgagagtatcaagcttcatcagagggacaaaagtggtcccaagaggacaactgtcca

SEQ ID NO: 332724 - DNA, 60 bp, Artificial
  Synthetic oligonucleotide
atctgagagtgtcaagtttcattagagggacaagagtagttccaaggggacagctgtcca

SEQ ID NO: 332725 - DNA, 60 bp, Artificial
  Synthetic oligonucleotide
atctgagagtgtcgagcttcattagagggacaagagtattcccaagaggacaactgtcca

SEQ ID NO: 332726 - DNA, 53 bp, Artificial
  Synthetic oligonucleotide
atctgagcgatggatggatcaccggggtacgtggggatatagttacatgtata

SEQ ID NO: 332727 - DNA, 60 bp, Artificial
  Synthetic oligonucleotide
atctgagcggttaaagaatgccggagtagagttgcctgatagcgtgttgtatagtcgcca

SEQ ID NO: 332728 - DNA, 52 bp, Artificial
  Synthetic oligonucleotide
atctgaggggactagggtgtgtttaggcgaaaagcggggcttcggttgtacg

SEQ ID NO: 332729 - DNA, 60 bp, Artificial
  Synthetic oligonucleotide
atctgaggggttacagcctccacgcatacgtgacataagcactggtcatgatcattataa

SEQ ID NO: 332730 - DNA, 59 bp, Artificial
  Synthetic oligonucleotide
atctgaggggttcacataagacttatctattatgcggagggtagtaattccactggctc

SEQ ID NO: 332731 - DNA, 60 bp, Artificial
  Synthetic oligonucleotide
atctgagggtctcaagcttcatcagaggaacaagagtggccccaaggggacaactatcta

SEQ ID NO: 332732 - DNA, 55 bp, Artificial
  Synthetic oligonucleotide
atctgagggtgaagtttcgtatttccaggactatatagttgggaagaatcccgac

SEQ ID NO: 332733 - DNA, 55 bp, Artificial
  Synthetic oligonucleotide
atctgagtccaggaaagtctttgccttagacctgagtattctatctagagcaagc

SEQ ID NO: 332734 - DNA, 60 bp, Artificial
  Synthetic oligonucleotide
atctgataatgaagttgtcatcataaccaatataccttatggtagattaaagactctaag

SEQ ID NO: 332735 - DNA, 55 bp, Artificial
  Synthetic oligonucleotide
atctgatacagctaacacagtgaatgaagtccaaggagggacctttaagacagtg

SEQ ID NO: 332736 - DNA, 57 bp, Artificial
  Synthetic oligonucleotide
atctgataccttttatgtacaagatttggaaggttatgctgtgtcatatcctgaacg

SEQ ID NO: 332737 - DNA, 60 bp, Artificial
  Synthetic oligonucleotide
atctgatgcttactgatcaagtttacatgcatcgagatatgttgccagagccgcggttgg

SEQ ID NO: 332738 - DNA, 56 bp, Artificial
  Synthetic oligonucleotide
atctgattacaccaaattggacctgtcagacggagggccccccgctctcgttcttc

SEQ ID NO: 332739 - DNA, 51 bp, Artificial
  Synthetic oligonucleotide
atctgattggtatgatgtcgctttattctatattgatgaagccaactctcg

SEQ ID NO: 332740 - DNA, 60 bp, Artificial
  Synthetic oligonucleotide
atctgcaacactactggagctgagaaaccgaagtttctgccagatttgtatgattacaag

SEQ ID NO: 332741 - DNA, 60 bp, Artificial
  Synthetic oligonucleotide
atctgcaactgaaggcccgtcaattgagcttgcagaggcccatgtttctcctgggccgat

SEQ ID NO: 332742 - DNA, 60 bp, Artificial
  Synthetic oligonucleotide
atctgcaagaggaggaaagtgggtagcaatgttatgctggctgtctgtaagcgtatgtgc

SEQ ID NO: 332743 - DNA, 60 bp, Artificial
  Synthetic oligonucleotide
atctgcaatagatcagatcacaggcaaattgaatcgtctaattgacaaaacaaatcagca

SEQ ID NO: 332744 - DNA, 60 bp, Artificial
  Synthetic oligonucleotide
atctgcacgccgtacgagcatgatgaccgaccgacgttaatttatggtttgacatacctg

SEQ ID NO: 332745 - DNA, 60 bp, Artificial
  Synthetic oligonucleotide
atctgcaggaggtgactgccgctcctaatccagattttcaagacatccaaactttaagta

SEQ ID NO: 332746 - DNA, 55 bp, Artificial
  Synthetic oligonucleotide
atctgcaggtacatatcaaaacaggggttcagactgattccaaagggatagttca

SEQ ID NO: 332747 - DNA, 60 bp, Artificial
  Synthetic oligonucleotide
atctgcagtattcgacagcatatcccgcagtcgcataacccgggtgagttcaagcagcac

SEQ ID NO: 332748 - DNA, 60 bp, Artificial
  Synthetic oligonucleotide
atctgcagtctgattggcacgtatgcccggggttctgatgaaggtaaccgccacaccaac

SEQ ID NO: 332749 - DNA, 60 bp, Artificial
  Synthetic oligonucleotide
atctgcataagctgatgctatcagcagagatgcgaaacttacccacgaaaggatgtcacg

SEQ ID NO: 332750 - DNA, 55 bp, Artificial
  Synthetic oligonucleotide
atctgcatcagcgttagcacgctgtgtggaagccacctgattacccacctcggcg

SEQ ID NO: 332751 - DNA, 60 bp, Artificial
  Synthetic oligonucleotide
atctgcattgctgagatgaatttagctgtgggccaagctgagaatctaagggggaggagt

SEQ ID NO: 332752 - DNA, 60 bp, Artificial
  Synthetic oligonucleotide
atctgccatcagcgctacctccgtacccaggcgatatccaagggcatgcgccggttggag

SEQ ID NO: 332753 - DNA, 57 bp, Artificial
  Synthetic oligonucleotide
atctgccattgtgggagctttctgtgtttccataaaaactggtaagttcgtcacgaa

SEQ ID NO: 332754 - DNA, 60 bp, Artificial
  Synthetic oligonucleotide
atctgccccttggaagaaactgggagcgaggcgctcaaatcactctttggaatcgtgtca

SEQ ID NO: 332755 - DNA, 58 bp, Artificial
  Synthetic oligonucleotide
atctgccctcagtcgggaacttaaataatatgcgtgccacctatttggagaccttatc

SEQ ID NO: 332756 - DNA, 58 bp, Artificial
  Synthetic oligonucleotide
atctgcgacggatggaagtgacttggcgttaatcgatactcacttatcgggcgaaaat

SEQ ID NO: 332757 - DNA, 58 bp, Artificial
  Synthetic oligonucleotide
atctgcgacgtaaagagaaaggtgaaccacgaactaaggcagtgatgaaaggagatcg

SEQ ID NO: 332758 - DNA, 55 bp, Artificial
  Synthetic oligonucleotide
atctgcgatcggttagaagacagtttcaggcgtctctgcagggaactacctgcag

SEQ ID NO: 332759 - DNA, 60 bp, Artificial
  Synthetic oligonucleotide
atctgcgattgaatatttcaggcattttgcgggaccctgtgatacgccagtccttgcatg

SEQ ID NO: 332760 - DNA, 58 bp, Artificial
  Synthetic oligonucleotide
atctgcgggggtcaatagagcgtgtaacgtagctatggccttcagggttgtgcggaaa

SEQ ID NO: 332761 - DNA, 59 bp, Artificial
  Synthetic oligonucleotide
atctgcgtactacctttgagcgtgaaacgatagctggaaagccgtatatttatggcttc

SEQ ID NO: 332762 - DNA, 60 bp, Artificial
  Synthetic oligonucleotide
atctgcgtgatcgttaccaagttatgcacaggttctcagctaaggtcacaggtggacagt

SEQ ID NO: 332763 - DNA, 55 bp, Artificial
  Synthetic oligonucleotide
atctgctaaagtggacgctcacgctagagagctccgcgccctgactgctcaggtg

SEQ ID NO: 332764 - DNA, 60 bp, Artificial
  Synthetic oligonucleotide
atctgctagcacaacacttaaactcttattagcatacacaccaccaggaatagcaaagcc

SEQ ID NO: 332765 - DNA, 60 bp, Artificial
  Synthetic oligonucleotide
atctgctagcatcatcataaatctagtctcggcaccccagtgggacattcatacaccagc

SEQ ID NO: 332766 - DNA, 56 bp, Artificial
  Synthetic oligonucleotide
atctgctatccatgactatgcatgggattctctcaccgtcccgtgtattcaaagtc

SEQ ID NO: 332767 - DNA, 59 bp, Artificial
  Synthetic oligonucleotide
atctgctattcctgaggtgtctcctacacctgctgatcagggcaatgcttgtggactag

SEQ ID NO: 332768 - DNA, 55 bp, Artificial
  Synthetic oligonucleotide
atctgctcgaagttcttgctcacagatgacttaggtcacaccttctccgtccctg

SEQ ID NO: 332769 - DNA, 50 bp, Artificial
  Synthetic oligonucleotide
atctgctcttacgtttacccttaactctacaggtgtgcccaacagtagta

SEQ ID NO: 332770 - DNA, 59 bp, Artificial
  Synthetic oligonucleotide
atctggaaacccctcaaaaccacacttcattgtagccacaaacatcattgagaatggag

SEQ ID NO: 332771 - DNA, 60 bp, Artificial
  Synthetic oligonucleotide
atctggactactcagatgatagcaaatagcaactttaacgtctgcaaaagactaacggga

SEQ ID NO: 332772 - DNA, 60 bp, Artificial
  Synthetic oligonucleotide
atctggactagcgggagcagcatatccttttgtggtgtaaacagtgacactgtgggttgg

SEQ ID NO: 332773 - DNA, 56 bp, Artificial
  Synthetic oligonucleotide
atctggactccccgttggagggaacgagaagaaggctaaattggcaaatgtcgtga

SEQ ID NO: 332774 - DNA, 54 bp, Artificial
  Synthetic oligonucleotide
atctggactggctaacagttcggtaggggtaaattgaccacatccagagtggtc

SEQ ID NO: 332775 - DNA, 59 bp, Artificial
  Synthetic oligonucleotide
atctggactgtcctcggggtggcagacgggagagacacaaccttcgtcaacaacagatc

SEQ ID NO: 332776 - DNA, 60 bp, Artificial
  Synthetic oligonucleotide
atctggactttgactgtcttagtgtgcaagactacaatggtatgatagaaaatatgtcca

SEQ ID NO: 332777 - DNA, 60 bp, Artificial
  Synthetic oligonucleotide
atctggagatactgtacacagtcatatcaagggcaatcccaggactggtcggtaatttac

SEQ ID NO: 332778 - DNA, 58 bp, Artificial
  Synthetic oligonucleotide
atctggagcctccctcaactcatgagccatctcaggataacgacaccgactgggggta

SEQ ID NO: 332779 - DNA, 55 bp, Artificial
  Synthetic oligonucleotide
atctggagtgtgtgagtagttacctgttagatatgtacaaagttgatgtgtcgac

SEQ ID NO: 332780 - DNA, 60 bp, Artificial
  Synthetic oligonucleotide
atctggatacgagatgctaaaggtgccaaatgcattgaccgacgataggtcaaaacccac

SEQ ID NO: 332781 - DNA, 55 bp, Artificial
  Synthetic oligonucleotide
atctggatcttacaacacgagttcatccaattccagggttcgagtgatggccgct

SEQ ID NO: 332782 - DNA, 60 bp, Artificial
  Synthetic oligonucleotide
atctggatgagatgtgtacttaggagacgccctcaagacgtgactttagcgtcaagtctt

SEQ ID NO: 332783 - DNA, 60 bp, Artificial
  Synthetic oligonucleotide
atctggattggatgaagacaccacaagaagtgatacacggtgcagaagaatgtggtggaa

SEQ ID NO: 332784 - DNA, 55 bp, Artificial
  Synthetic oligonucleotide
atctggcacacaaagttacgcatcactggtgcaggattatcgggcggctctgttg

SEQ ID NO: 332785 - DNA, 50 bp, Artificial
  Synthetic oligonucleotide
atctggcatagctgcagtagagatacaaagaatggatgaattgttcacgt

SEQ ID NO: 332786 - DNA, 60 bp, Artificial
  Synthetic oligonucleotide
atctggcattccaatcttaatgatgccacataccagaggacaagggctcttgtgcgtact

SEQ ID NO: 332787 - DNA, 60 bp, Artificial
  Synthetic oligonucleotide
atctggcattctaatctgaatgatgccacatatcaaagaacaagggcacttgtgcgtact

SEQ ID NO: 332788 - DNA, 60 bp, Artificial
  Synthetic oligonucleotide
atctggccactgacacggaactgacagagatacgtgggatgatggacgccagtgagagga

SEQ ID NO: 332789 - DNA, 60 bp, Artificial
  Synthetic oligonucleotide
atctggcctgacgttgaaatccgttatggattttcatgtactatgtatcatagaaatgga

SEQ ID NO: 332790 - DNA, 55 bp, Artificial
  Synthetic oligonucleotide
atctggcgtcaagcaaacaatggggaggacgcaactgctggtctcactcacctga

SEQ ID NO: 332791 - DNA, 60 bp, Artificial
  Synthetic oligonucleotide
atctggcgtggcgagagatgcttggtactctgaaaacattgattcacgatgaagcgcgtc

SEQ ID NO: 332792 - DNA, 51 bp, Artificial
  Synthetic oligonucleotide
atctggctatgaccccggagatttaccgtctcagggatatatgagcgtccc

SEQ ID NO: 332793 - DNA, 60 bp, Artificial
  Synthetic oligonucleotide
atctggctgtcccttgctgcgcaattctaatggtgcaataaaagaatcaggttctgtgct

SEQ ID NO: 332794 - DNA, 54 bp, Artificial
  Synthetic oligonucleotide
atctggcttcctgggtgggaaataatttggaagatcccgcctctagggaactag

SEQ ID NO: 332795 - DNA, 55 bp, Artificial
  Synthetic oligonucleotide
atctgggataaggagaggtccaacgaatatttcttagaatctaggtgtgagtcag

SEQ ID NO: 332796 - DNA, 60 bp, Artificial
  Synthetic oligonucleotide
atctgggatgtgagtgcagatgggctgaaggggacaattgagtgggagaagcagaggttt

SEQ ID NO: 332797 - DNA, 55 bp, Artificial
  Synthetic oligonucleotide
atctgggcagtttaaggcccatgacgcctttgtcaacatgtgcttcgggcacatg

SEQ ID NO: 332798 - DNA, 58 bp, Artificial
  Synthetic oligonucleotide
atctgggccacccaagcttgtgtacctactgatcccactcctcaagaggtactcttac

SEQ ID NO: 332799 - DNA, 60 bp, Artificial
  Synthetic oligonucleotide
atctgggctgcaagtgcagaagtgatgaacttggagccagaatggaatgataatgtccac

SEQ ID NO: 332800 - DNA, 59 bp, Artificial
  Synthetic oligonucleotide
atctggggaatctcctacagtattggattcaggaactaaggaatagtgctattagcttg

SEQ ID NO: 332801 - DNA, 53 bp, Artificial
  Synthetic oligonucleotide
atctggggacgtcaactgttgggacgttttgcgtctagatttcaaacaaaccc

SEQ ID NO: 332802 - DNA, 57 bp, Artificial
  Synthetic oligonucleotide
atctggggtttgcaatccctttaactgaagaagatctgagtagatcaattagtttaa

SEQ ID NO: 332803 - DNA, 60 bp, Artificial
  Synthetic oligonucleotide
atctgggtaaagccaacggtgatcaatattcgcattattcacagatgtcaaagccaagtg

SEQ ID NO: 332804 - DNA, 55 bp, Artificial
  Synthetic oligonucleotide
atctgggtcgtggtcttttaccattgagtccggataccagttacgttatttgcaa

SEQ ID NO: 332805 - DNA, 54 bp, Artificial
  Synthetic oligonucleotide
atctgggtctttgcaggtgcacctgatcgttgtccacctacatgcctcttcgtc

SEQ ID NO: 332806 - DNA, 60 bp, Artificial
  Synthetic oligonucleotide
atctgggtgttacagacaccatgagtgagtaccgaattccactcactgcaggtagagtga

SEQ ID NO: 332807 - DNA, 54 bp, Artificial
  Synthetic oligonucleotide
atctggtaacagatgcctctggggccaaaagccacggtttaatagaccctttgg

SEQ ID NO: 332808 - DNA, 55 bp, Artificial
  Synthetic oligonucleotide
atctggtactttagatgacacatataggtacataaactctcttgctactaagtgc

SEQ ID NO: 332809 - DNA, 55 bp, Artificial
  Synthetic oligonucleotide
atctggtatttggcttcgctgggaactttggacgaagacattgcacgcacgaacg

SEQ ID NO: 332810 - DNA, 55 bp, Artificial
  Synthetic oligonucleotide
atctggtgatagatgaggaggccccgtgtgttttccccctggcctatcccaaatt

SEQ ID NO: 332811 - DNA, 55 bp, Artificial
  Synthetic oligonucleotide
atctggtggcgtgagcatgaccgggtggctgccggatattccgaacctgcaccgt

SEQ ID NO: 332812 - DNA, 60 bp, Artificial
  Synthetic oligonucleotide
atctggtgggtcatagcacctgttctcatgatatataggaccgtcatatgcattcacaga

SEQ ID NO: 332813 - DNA, 60 bp, Artificial
  Synthetic oligonucleotide
atctggtggtgtgcgcgacagacgcgctatccaccggatatactgggaacttcgattccg

SEQ ID NO: 332814 - DNA, 57 bp, Artificial
  Synthetic oligonucleotide
atctggttccaagcattaaagcaagtcctgactaatttatcttttgaagccagttta

SEQ ID NO: 332815 - DNA, 52 bp, Artificial
  Synthetic oligonucleotide
atctggttcccagcagtggagaggcctgtccagatattttaaggttcagcta

SEQ ID NO: 332816 - DNA, 60 bp, Artificial
  Synthetic oligonucleotide
atctggttgcaacatcagtgttgcattggatagttgcattgactaggagcagacagggtt

SEQ ID NO: 332817 - DNA, 53 bp, Artificial
  Synthetic oligonucleotide
atctggttggttgctcagccgttaaacccaaacggtaaacctggcagatgagg

SEQ ID NO: 332818 - DNA, 58 bp, Artificial
  Synthetic oligonucleotide
atctggtttgtactgttagtttaacagaatgttctgcatttctgacatcaatcaaggc

SEQ ID NO: 332819 - DNA, 56 bp, Artificial
  Synthetic oligonucleotide
atctgtaccaattaattgtacaagacccaacatcaatacaagaaaaggtatccgta

SEQ ID NO: 332820 - DNA, 52 bp, Artificial
  Synthetic oligonucleotide
atctgtacggtatagggtcagtggttgtctccctcgtgatcaaatgggagta

SEQ ID NO: 332821 - DNA, 60 bp, Artificial
  Synthetic oligonucleotide
atctgtaggaagaatgattggtggaattggacgattctacatccaaatgtgcaccgaact

SEQ ID NO: 332822 - DNA, 54 bp, Artificial
  Synthetic oligonucleotide
atctgtagggataattggaccggaaccaacaggcctgttttagtgatttcccca

SEQ ID NO: 332823 - DNA, 56 bp, Artificial
  Synthetic oligonucleotide
atctgtagggcactattcgaagtcgaaatctgagtattttgcgttgaacacccccc

SEQ ID NO: 332824 - DNA, 60 bp, Artificial
  Synthetic oligonucleotide
atctgtagtgctgcaggacaattgtaggtcacagtctattatagagtacctgtgtagaaa

SEQ ID NO: 332825 - DNA, 56 bp, Artificial
  Synthetic oligonucleotide
atctgtataagtttatggggcgtgcccattacttgtggggacataaattcaccaaa

SEQ ID NO: 332826 - DNA, 60 bp, Artificial
  Synthetic oligonucleotide
atctgtatccatagagggatcaccatgttgggcgcgtgataataagatccgtaatgtctg

SEQ ID NO: 332827 - DNA, 60 bp, Artificial
  Synthetic oligonucleotide
atctgtatggcaatcggaacaatcagtctaatactgcaaatagggaatattatctcaata

SEQ ID NO: 332828 - DNA, 57 bp, Artificial
  Synthetic oligonucleotide
atctgtattttccgtcaacttcagtcgaaaacactaaagattgcctaggcatgaggt

SEQ ID NO: 332829 - DNA, 56 bp, Artificial
  Synthetic oligonucleotide
atctgtcaggtctaccgctataacgcccatgtttataacgccatgactctcgccgt

SEQ ID NO: 332830 - DNA, 60 bp, Artificial
  Synthetic oligonucleotide
atctgtccagtagtcatgacagatggcccagcaaataatagggcagcaaccaagataatc

SEQ ID NO: 332831 - DNA, 59 bp, Artificial
  Synthetic oligonucleotide
atctgtccgcatgggctttcgtacagttgatttacgcaatgcaatgatcggtgaaacgc

SEQ ID NO: 332832 - DNA, 60 bp, Artificial
  Synthetic oligonucleotide
atctgtcgactccggaataggcccgtgcacaatatcgcgcaccatggactttggacctag

SEQ ID NO: 332833 - DNA, 60 bp, Artificial
  Synthetic oligonucleotide
atctgtcgatcatgccgtcggttggatgcctcagtttgatcccgctacatcgtacaatcc

SEQ ID NO: 332834 - DNA, 59 bp, Artificial
  Synthetic oligonucleotide
atctgtcgggctcagtgatgtgctcggaccttccgtgctggtaaatgcaagaggtgcac

SEQ ID NO: 332835 - DNA, 59 bp, Artificial
  Synthetic oligonucleotide
atctgtcttaactgtctaaatgaatgtaaagtttgtccatgcgattattgtggaatacg

SEQ ID NO: 332836 - DNA, 60 bp, Artificial
  Synthetic oligonucleotide
atctgtcttattgggagtagctcagagccattgtatgttcccacgctggatgattatcgg

SEQ ID NO: 332837 - DNA, 60 bp, Artificial
  Synthetic oligonucleotide
atctgtgagagcgcgggaacacaagaggatgcggcatgcctacgagttttcacggaagct

SEQ ID NO: 332838 - DNA, 60 bp, Artificial
  Synthetic oligonucleotide
atctgtgaggcatacggattcacatcacgactacagctttcgaattacttaggcatgtca

SEQ ID NO: 332839 - DNA, 59 bp, Artificial
  Synthetic oligonucleotide
atctgtgatagcaatgtgagagctgtgttgttaactagggctagaaaaggcggtttact

SEQ ID NO: 332840 - DNA, 58 bp, Artificial
  Synthetic oligonucleotide
atctgtgcgggtaccggcggtgtcgcgctagcggcgtgtacaccacaagcttcgggaa

SEQ ID NO: 332841 - DNA, 60 bp, Artificial
  Synthetic oligonucleotide
atctgtggaacgccatgttccaatgggctctcgcccatctttcgcgacagggttctgacg

SEQ ID NO: 332842 - DNA, 60 bp, Artificial
  Synthetic oligonucleotide
atctgtgggagagacattgatttacagttaacaattaagccatacaatcagaagatagac

SEQ ID NO: 332843 - DNA, 55 bp, Artificial
  Synthetic oligonucleotide
atctgtggtaaggaacgagcctcaggagacaaactggagatgtggccgtctacca

SEQ ID NO: 332844 - DNA, 55 bp, Artificial
  Synthetic oligonucleotide
atctgtggtcataaagctataggtacagtattggtaggacctacacccgtcaaca

SEQ ID NO: 332845 - DNA, 55 bp, Artificial
  Synthetic oligonucleotide
atctgtggtcgcaatgaagaccaatccgctacccgcaaccccttccgtgtggggc

SEQ ID NO: 332846 - DNA, 51 bp, Artificial
  Synthetic oligonucleotide
atctgtgtaccgtgatgacagatcagggggacgtgtaccgtatatgagggg

SEQ ID NO: 332847 - DNA, 55 bp, Artificial
  Synthetic oligonucleotide
atctgtgtcaagtgcgagcagcaaacagttaaccttatggaccaagagttgcatg

SEQ ID NO: 332848 - DNA, 60 bp, Artificial
  Synthetic oligonucleotide
atctgttaatcagcgcctcgcacgcgatgcatcgcagttggaccatttggccactgtcga

SEQ ID NO: 332849 - DNA, 55 bp, Artificial
  Synthetic oligonucleotide
atctgttataccttgaataacgccttcaacggatacggggtgtgtaggatcgtac

SEQ ID NO: 332850 - DNA, 60 bp, Artificial
  Synthetic oligonucleotide
atctgttatggtgcagagagtgtgacacttacaagaggtcaaaatacagtgaaagtgtca

SEQ ID NO: 332851 - DNA, 57 bp, Artificial
  Synthetic oligonucleotide
atctgttcacccgaatcgtacttttagcgttacgacctgtgggattgtgaggcataa

SEQ ID NO: 332852 - DNA, 59 bp, Artificial
  Synthetic oligonucleotide
atctgttgcttgttggatctatggtcctctatttatgccccttatatagtggtggtttg

SEQ ID NO: 332853 - DNA, 58 bp, Artificial
  Synthetic oligonucleotide
atctgttgtatatgtttggctaagcatacccaacctccccaggaattagttgtagcac

SEQ ID NO: 332854 - DNA, 52 bp, Artificial
  Synthetic oligonucleotide
atctgttgtgtgactttggtgaatagagatcctcagaccgcggccgcgacct

SEQ ID NO: 332855 - DNA, 50 bp, Artificial
  Synthetic oligonucleotide
atctgttgtttgactccggttactagagatccctcagaccattttagtcc

SEQ ID NO: 332856 - DNA, 60 bp, Artificial
  Synthetic oligonucleotide
atctgtttataagcgtcctgcacctaaaccggaaggttgtgcagatgcctgtgtcattat

SEQ ID NO: 332857 - DNA, 54 bp, Artificial
  Synthetic oligonucleotide
atctgtttccagaactttcttaccatcctctagccttacccaaggctcgtggta

SEQ ID NO: 332858 - DNA, 60 bp, Artificial
  Synthetic oligonucleotide
atctgtttgtccattggatactacaatgaacggaattggatgttcgccagcaagtacgga

SEQ ID NO: 332859 - DNA, 60 bp, Artificial
  Synthetic oligonucleotide
atcttaacggatctggacgtctacatacatttgatgaactatttggcgcaaggattcaca

SEQ ID NO: 332860 - DNA, 53 bp, Artificial
  Synthetic oligonucleotide
atcttaacggtggggctgctaaggtgggatcgtctaggccaaaagggggcgct

SEQ ID NO: 332861 - DNA, 52 bp, Artificial
  Synthetic oligonucleotide
atcttaagacgtacgacggttgtcgtactcttgatcgataggtaaggaccca

SEQ ID NO: 332862 - DNA, 58 bp, Artificial
  Synthetic oligonucleotide
atcttaatggtgggcctcgctatcgcgggggggatgatctacgcctcatacactgggt

SEQ ID NO: 332863 - DNA, 60 bp, Artificial
  Synthetic oligonucleotide
atcttaattgcaacgaggattgtggagcttctgggacgcagagggtgggaagcaatcaaa

SEQ ID NO: 332864 - DNA, 54 bp, Artificial
  Synthetic oligonucleotide
atcttacaagtcagtgacccggcaaggctcggaccgaaaacaatttttcaccag

SEQ ID NO: 332865 - DNA, 60 bp, Artificial
  Synthetic oligonucleotide
atcttacacaccagcaaactcgctcctgccgattgtagcctaccatcatattgtggccag

SEQ ID NO: 332866 - DNA, 55 bp, Artificial
  Synthetic oligonucleotide
atcttacaggatatgaggaataccatcatggcatccaagactgtgggaacatctg

SEQ ID NO: 332867 - DNA, 60 bp, Artificial
  Synthetic oligonucleotide
atcttacatcacaggcaacacgatgccctgacaaacaacctgctccagaaaggaaagatc

SEQ ID NO: 332868 - DNA, 60 bp, Artificial
  Synthetic oligonucleotide
atcttacatgcgatgcatctcccctcattggcagcatcagatcgtagaagtggccggcgc

SEQ ID NO: 332869 - DNA, 51 bp, Artificial
  Synthetic oligonucleotide
atcttacattagcacctattagggtagcatggtctcataatgatattaccg

SEQ ID NO: 332870 - DNA, 55 bp, Artificial
  Synthetic oligonucleotide
atcttacccattgcctctctcacaactgactcttgcaactcagtcaagtgggaga

SEQ ID NO: 332871 - DNA, 58 bp, Artificial
  Synthetic oligonucleotide
atcttaccgacgtacacagctgcgatacacattcacggtgccccgtggggctttgacc

SEQ ID NO: 332872 - DNA, 56 bp, Artificial
  Synthetic oligonucleotide
atcttactatctgccatcagagatatcttcgcacgcaggctatctcgaaaggtatg

SEQ ID NO: 332873 - DNA, 60 bp, Artificial
  Synthetic oligonucleotide
atcttactgacagccgtcgctccttcaatgacaatgcgttgcataggaatatcaaataga

SEQ ID NO: 332874 - DNA, 59 bp, Artificial
  Synthetic oligonucleotide
atcttactgtcgtagcgacgtacgggcatgagcgaaatgtggaacgcgcttttataggc

SEQ ID NO: 332875 - DNA, 54 bp, Artificial
  Synthetic oligonucleotide
atcttagagtgttaagtttcattagaggaactaaagtagtcccaagagggcaac

SEQ ID NO: 332876 - DNA, 54 bp, Artificial
  Synthetic oligonucleotide
atcttagatgttaagcacggttacccttacaaatggaacgtcaacgcagaaccc

SEQ ID NO: 332877 - DNA, 51 bp, Artificial
  Synthetic oligonucleotide
atcttagcgtcaggaaagtttgtattgaacttcgtaactggtttgtctcca

SEQ ID NO: 332878 - DNA, 56 bp, Artificial
  Synthetic oligonucleotide
atcttagctgtcttgggctatgacatcaaccaatgttatgttgtcagttatggaga

SEQ ID NO: 332879 - DNA, 60 bp, Artificial
  Synthetic oligonucleotide
atcttaggaaacccagaatgcgaatcactgttttctaaggaatcatggtcctacattgca

SEQ ID NO: 332880 - DNA, 50 bp, Artificial
  Synthetic oligonucleotide
atcttaggactaacaattgcgccactctcatagtgccttacattaacaca

SEQ ID NO: 332881 - DNA, 56 bp, Artificial
  Synthetic oligonucleotide
atcttaggagcccaagaagactttctcaatgagttgtcgtccagaaacggaaggag

SEQ ID NO: 332882 - DNA, 58 bp, Artificial
  Synthetic oligonucleotide
atcttaggtgaacaagctgtttgtaaagtcaacggagtgcctggctactcttgtggta

SEQ ID NO: 332883 - DNA, 60 bp, Artificial
  Synthetic oligonucleotide
atcttataagcgtgttccgattatgcacttagctgcggacttggactgtatgacgctggc

SEQ ID NO: 332884 - DNA, 60 bp, Artificial
  Synthetic oligonucleotide
atcttatacgcgatcttatacttgtgattcgtgcgaagaattatgtcgaagcgtccagca

SEQ ID NO: 332885 - DNA, 55 bp, Artificial
  Synthetic oligonucleotide
atcttatagaactaacggcgccaagtgtgaggacgcttggatggcatatgttgcg

SEQ ID NO: 332886 - DNA, 59 bp, Artificial
  Synthetic oligonucleotide
atcttatagatcttcgtgtatttgtaatgttaatatagcagctttaactgatcttaaac

SEQ ID NO: 332887 - DNA, 59 bp, Artificial
  Synthetic oligonucleotide
atcttatataaaagagagtccacacgtagcgcctcattttgcgggtcaccatattcttg

SEQ ID NO: 332888 - DNA, 49 bp, Artificial
  Synthetic oligonucleotide
atcttatatcgttacttctaaactttttagtcgggtaaggttctcccgt

SEQ ID NO: 332889 - DNA, 59 bp, Artificial
  Synthetic oligonucleotide
atcttatccgagatttaatttcagtaattcgtgctcgcaattatgtcgaagcgtcccgc

SEQ ID NO: 332890 - DNA, 60 bp, Artificial
  Synthetic oligonucleotide
atcttatcgaactatgagaagcttacgccggacttacatgaagggctggaacatcagact

SEQ ID NO: 332891 - DNA, 55 bp, Artificial
  Synthetic oligonucleotide
atcttatcggcaaagtgtatacaaacttcagttatatatattctacgttttttaa

SEQ ID NO: 332892 - DNA, 56 bp, Artificial
  Synthetic oligonucleotide
atcttatctaaattactgcttaagttatgatattgaaaaatgaattcttttgggag

SEQ ID NO: 332893 - DNA, 55 bp, Artificial
  Synthetic oligonucleotide
atcttattaagttgtcagacagttgtcttaaatatctaatttcagcgactgtcaa

SEQ ID NO: 332894 - DNA, 60 bp, Artificial
  Synthetic oligonucleotide
atcttatttaagcgagcactttccatcgctgttctccgatgtgccattagctggcgcgaa

SEQ ID NO: 332895 - DNA, 58 bp, Artificial
  Synthetic oligonucleotide
atcttcaagtgacggtgtgctatctaacatggctgtcacttttaaacgagccctcggg

SEQ ID NO: 332896 - DNA, 60 bp, Artificial
  Synthetic oligonucleotide
atcttcacgatggctggcgtgaggaaggtccaatgtttcacagctctctttagatctaga

SEQ ID NO: 332897 - DNA, 60 bp, Artificial
  Synthetic oligonucleotide
atcttcacgtcgatggtaaatagcatacccttcgcgttagtatacttgatcgtcatttgc

SEQ ID NO: 332898 - DNA, 60 bp, Artificial
  Synthetic oligonucleotide
atcttcactgttggtgctctgaatgggatatctacagagtgttttgccgtagacaatttc

SEQ ID NO: 332899 - DNA, 57 bp, Artificial
  Synthetic oligonucleotide
atcttcaggaggggatatagagattacatcacatacttttaattgtggaggagaatt

SEQ ID NO: 332900 - DNA, 58 bp, Artificial
  Synthetic oligonucleotide
atcttcagtggaaattggattgtgctcattgttctttgtgtattcttattgttttcac

SEQ ID NO: 332901 - DNA, 54 bp, Artificial
  Synthetic oligonucleotide
atcttcatctatgctgggcgcactcctcaggaaatgtccgagtggtgccaaaag

SEQ ID NO: 332902 - DNA, 60 bp, Artificial
  Synthetic oligonucleotide
atcttcatggttcactgtggtgaatggttcgcttgtttaaacctgattaaatgtcagtca

SEQ ID NO: 332903 - DNA, 51 bp, Artificial
  Synthetic oligonucleotide
atcttccaagtctgtggaatgggtaatgggaccactttcggagttcacaac

SEQ ID NO: 332904 - DNA, 52 bp, Artificial
  Synthetic oligonucleotide
atcttccagtacatgatttacatacgctctgtctgttgcgaaacgaacagct

SEQ ID NO: 332905 - DNA, 54 bp, Artificial
  Synthetic oligonucleotide
atcttccatcgacttggaaaactccaaaatcaatgaagtctccgtttttttcca

SEQ ID NO: 332906 - DNA, 60 bp, Artificial
  Synthetic oligonucleotide
atcttccatcgcatatgttatcatagcttcctaacttcggacgagggctcaggtttgctc

SEQ ID NO: 332907 - DNA, 58 bp, Artificial
  Synthetic oligonucleotide
atcttccccatataaagccggtgtacaaatatatcacagtgcaaggggtagagaattc

SEQ ID NO: 332908 - DNA, 58 bp, Artificial
  Synthetic oligonucleotide
atcttccccgttttctaatgggagcgtctactgagcgtttctggtctcgtagcatcaa

SEQ ID NO: 332909 - DNA, 60 bp, Artificial
  Synthetic oligonucleotide
atcttccgacccccatgttgtgtcctcagtcaacgcactcctcggaaggattgccatggc

SEQ ID NO: 332910 - DNA, 56 bp, Artificial
  Synthetic oligonucleotide
atcttccgatatatacactttcccaagtgtcggttgccgttgggatcgattggtta

SEQ ID NO: 332911 - DNA, 57 bp, Artificial
  Synthetic oligonucleotide
atcttccgcatggacgccgcagggtccggcgtggcccgcccattgaaggtcaccggc

SEQ ID NO: 332912 - DNA, 60 bp, Artificial
  Synthetic oligonucleotide
atcttccgggtccaaagaggggtcaataaggccagcaaagctaggatgcatcatctgtct

SEQ ID NO: 332913 - DNA, 51 bp, Artificial
  Synthetic oligonucleotide
atcttcctgaagtggaaactctggttgctaggcaggaagaggcatcaaatc

SEQ ID NO: 332914 - DNA, 60 bp, Artificial
  Synthetic oligonucleotide
atcttcctgctggtggctccagttcaggaacacacaaccctgttccaaatattgcctctc

SEQ ID NO: 332915 - DNA, 55 bp, Artificial
  Synthetic oligonucleotide
atcttcgaatgggttccgaacaaacgggctagacctacttcgattgtgaatgtgt

SEQ ID NO: 332916 - DNA, 57 bp, Artificial
  Synthetic oligonucleotide
atcttcgacgagaggcggggcgtcccgagaactcttatcttcctgcttagaagagga

SEQ ID NO: 332917 - DNA, 61 bp, Artificial
  Synthetic oligonucleotide
atcttcgatgcgttgcgctcagcactcgaccccggagtgtagcttaggctgatgagtctgg

SEQ ID NO: 332918 - DNA, 53 bp, Artificial
  Synthetic oligonucleotide
atcttcgtcctgaaatgtaccacccaacaggcaatcctggacttgtcccaacg

SEQ ID NO: 332919 - DNA, 60 bp, Artificial
  Synthetic oligonucleotide
atcttctagataccgcctcagctctatatcgggaagccttagagtctcctgagcattgtt

SEQ ID NO: 332920 - DNA, 60 bp, Artificial
  Synthetic oligonucleotide
atcttctcattcactggagaagaaatggccaccaaagctgattacacccttgatgaagag

SEQ ID NO: 332921 - DNA, 58 bp, Artificial
  Synthetic oligonucleotide
atcttctccgctcttcagtcaagtttcagctttagtttctacagttttggcattggga

SEQ ID NO: 332922 - DNA, 60 bp, Artificial
  Synthetic oligonucleotide
atcttctcctagaagactcacacgcgaatctcgatgaaatcaacgcgtgtttctcaaggg

SEQ ID NO: 332923 - DNA, 60 bp, Artificial
  Synthetic oligonucleotide
atcttctcgaggactgggggccctgccccgaacatggagagcacaacatcaggattccta

SEQ ID NO: 332924 - DNA, 60 bp, Artificial
  Synthetic oligonucleotide
atcttctgacgttatagatgaacctggtgcataggtagcccttggtgtaggagcacccat

SEQ ID NO: 332925 - DNA, 50 bp, Artificial
  Synthetic oligonucleotide
atcttctggacaaaacacatgagctcgacattttgactaagacaatcaag

SEQ ID NO: 332926 - DNA, 60 bp, Artificial
  Synthetic oligonucleotide
atcttctgtcttcctgatctaagaagcaccctgtaccaccttatgtctgacactgacact

SEQ ID NO: 332927 - DNA, 60 bp, Artificial
  Synthetic oligonucleotide
atcttctgtggagtacttactactatggtgtcagcactcccgaaagcagtctatgagctt

SEQ ID NO: 332928 - DNA, 60 bp, Artificial
  Synthetic oligonucleotide
atcttcttcgaagagtaacaccctacatcaacgactcccatcaatatttgctgagagctg

SEQ ID NO: 332929 - DNA, 55 bp, Artificial
  Synthetic oligonucleotide
atcttcttgcacttctcccacagccttacggtgctagtatccgtgagatgagggc

SEQ ID NO: 332930 - DNA, 60 bp, Artificial
  Synthetic oligonucleotide
atcttgaaataaaggggattttgaatctcccagatatacacgccattctctgcttgagct

SEQ ID NO: 332931 - DNA, 60 bp, Artificial
  Synthetic oligonucleotide
atcttgaaatagaggggatttctgatcgtccaggtatacacgccactctcgcattgagtt

SEQ ID NO: 332932 - DNA, 55 bp, Artificial
  Synthetic oligonucleotide
atcttgaacaggagacgcagaactgcaggtataattattatgatgatcccaacag

SEQ ID NO: 332933 - DNA, 55 bp, Artificial
  Synthetic oligonucleotide
atcttgaacaggaggcgcagaactgcaggcatgatcattatgctgattccaacag

SEQ ID NO: 332934 - DNA, 60 bp, Artificial
  Synthetic oligonucleotide
atcttgaagaggacacagttgaatgcagggaacacggcaagtgtgaaggaaagaatcatc

SEQ ID NO: 332935 - DNA, 54 bp, Artificial
  Synthetic oligonucleotide
atcttgaccgtccccaaactctcacgtgagaacatcgacaaccacgtaaagttg

SEQ ID NO: 332936 - DNA, 55 bp, Artificial
  Synthetic oligonucleotide
atcttgactatcaaattggttatgtatgtagtggagtgtttggagacaatcccag

SEQ ID NO: 332937 - DNA, 60 bp, Artificial
  Synthetic oligonucleotide
atcttgagatgtctaactctctaactccttttacaggatcctcaaggactctggccaatg

SEQ ID NO: 332938 - DNA, 58 bp, Artificial
  Synthetic oligonucleotide
atcttgagcgaatggaaggatttactcaagaaccgacaaacactaccgtcttagctga

SEQ ID NO: 332939 - DNA, 55 bp, Artificial
  Synthetic oligonucleotide
atcttgatcatctaattctttacaccccagaacagacagacttgtccaacacacg

SEQ ID NO: 332940 - DNA, 55 bp, Artificial
  Synthetic oligonucleotide
atcttgattcgtatgccgaaggattttcctccgtttgcaaagcgtaacttcttta

SEQ ID NO: 332941 - DNA, 60 bp, Artificial
  Synthetic oligonucleotide
atcttgcacagttggcgacccaggaatggcacgctctgaggcttgtggttacactcgcag

SEQ ID NO: 332942 - DNA, 60 bp, Artificial
  Synthetic oligonucleotide
atcttgcagcaggtacaatcatacaagaggaattggctttgaaagccccgagattattaa

SEQ ID NO: 332943 - DNA, 52 bp, Artificial
  Synthetic oligonucleotide
atcttgcagttattcagacattgcgtgaactcctccttaatagagggttgaa

SEQ ID NO: 332944 - DNA, 52 bp, Artificial
  Synthetic oligonucleotide
atcttgccccactgtcagactgggctgctgacggcctcaaggacctagcggt

SEQ ID NO: 332945 - DNA, 60 bp, Artificial
  Synthetic oligonucleotide
atcttgcgttgtcagattttgttacttatctgcaataccagactacaggagtcttagcag

SEQ ID NO: 332946 - DNA, 55 bp, Artificial
  Synthetic oligonucleotide
atcttgctgcgacaagcacaagcctatcgtatgcaacacacaatacgtcgctgcg

SEQ ID NO: 332947 - DNA, 57 bp, Artificial
  Synthetic oligonucleotide
atcttggaagttgacctttatctatgaagcttcttaagcgaaaggaagtcttatctg

SEQ ID NO: 332948 - DNA, 55 bp, Artificial
  Synthetic oligonucleotide
atcttggacagaagaagtacaccaaaaccacatattggtgggatgggctccaatc

SEQ ID NO: 332949 - DNA, 60 bp, Artificial
  Synthetic oligonucleotide
atcttggcaaggtgatgtgtatttccgatgtgacacgtggtaatggtattacacaccgtg

SEQ ID NO: 332950 - DNA, 57 bp, Artificial
  Synthetic oligonucleotide
atcttggccaccataataaatgcgcaaaactatggagtaaatttgccaattacaggt

SEQ ID NO: 332951 - DNA, 60 bp, Artificial
  Synthetic oligonucleotide
atcttggcttttagtttttctaaatcagccgcaagagacatcagctcgtcagcactcaac

SEQ ID NO: 332952 - DNA, 55 bp, Artificial
  Synthetic oligonucleotide
atcttgggagggaggaaaactgaagatgttgaccgtcgagctcacatcacccgtt

SEQ ID NO: 332953 - DNA, 55 bp, Artificial
  Synthetic oligonucleotide
atcttgggcccatgggtctttataacaatcttgttcttctcacattcccagaggc

SEQ ID NO: 332954 - DNA, 55 bp, Artificial
  Synthetic oligonucleotide
atcttggtctacagggctgtgcttttcaatctactatcgctgagcttcagcgcct

SEQ ID NO: 332955 - DNA, 55 bp, Artificial
  Synthetic oligonucleotide
atcttgtaaatcgggttgtcgagcgttcgattcgttcctggggctcgtaatcttc

SEQ ID NO: 332956 - DNA, 53 bp, Artificial
  Synthetic oligonucleotide
atcttgtacactgtaaagactttccttacttttgaagaaggatacgtccctac

SEQ ID NO: 332957 - DNA, 60 bp, Artificial
  Synthetic oligonucleotide
atcttgtatgacaaggaggagatcagaagaatttggcgtcaagcgaacaatggagaagac

SEQ ID NO: 332958 - DNA, 60 bp, Artificial
  Synthetic oligonucleotide
atcttgtatggaccatgctctttaattcaaaatgcctaagcgtgatgctcaatggcgcca

SEQ ID NO: 332959 - DNA, 50 bp, Artificial
  Synthetic oligonucleotide
atcttgtcaatctcgtaaatgtgttacgagaattgtatttgcacagtcca

SEQ ID NO: 332960 - DNA, 59 bp, Artificial
  Synthetic oligonucleotide
atcttgttaacaggtggagcaatgctcttcttgatatcaggtaaagggattggaaagac

SEQ ID NO: 332961 - DNA, 55 bp, Artificial
  Synthetic oligonucleotide
atcttgtttctgctcgtagcagagagctcttctcaaaactacacgggaaaccctg

SEQ ID NO: 332962 - DNA, 59 bp, Artificial
  Synthetic oligonucleotide
atctttaactgtcgataaatgggtttatacgggtacagatttatatgctgcttatgaca

SEQ ID NO: 332963 - DNA, 55 bp, Artificial
  Synthetic oligonucleotide
atctttaattacgggtgggttagagtagatgaatgtataatcctttaatgtgacg

SEQ ID NO: 332964 - DNA, 60 bp, Artificial
  Synthetic oligonucleotide
atctttacattaaggggggcaatgcttcatttcagatcagctttgatgatattgcagtat

SEQ ID NO: 332965 - DNA, 55 bp, Artificial
  Synthetic oligonucleotide
atctttacttatcagcaggggttttctggttaatgtcaccacggatgacgtcagc

SEQ ID NO: 332966 - DNA, 57 bp, Artificial
  Synthetic oligonucleotide
atctttagaagtgacaccctacagcgacgccgcgactctcctaaaatattgcggaat

SEQ ID NO: 332967 - DNA, 52 bp, Artificial
  Synthetic oligonucleotide
atctttatacccgggaaggtgaacaaccttctagagatcgcccaagttgagt

SEQ ID NO: 332968 - DNA, 59 bp, Artificial
  Synthetic oligonucleotide
atctttatagctggaaccctcacctggattgcaaagcacgattgctgggatcccacctt

SEQ ID NO: 332969 - DNA, 57 bp, Artificial
  Synthetic oligonucleotide
atctttatatttcgtatttagaacgttgaagattcagattcttccataagtagcgat

SEQ ID NO: 332970 - DNA, 57 bp, Artificial
  Synthetic oligonucleotide
atctttatgacagccacccccccaggatcggtggaggcctttccacagagcaatgca

SEQ ID NO: 332971 - DNA, 58 bp, Artificial
  Synthetic oligonucleotide
atctttcaaaccaaaatcaatcatcactagggttaatgtgctagtaaggacattggta

SEQ ID NO: 332972 - DNA, 60 bp, Artificial
  Synthetic oligonucleotide
atctttcaattatccccatgatatcctgcgtgtgatattactgagccctttatagaccat

SEQ ID NO: 332973 - DNA, 52 bp, Artificial
  Synthetic oligonucleotide
atctttcaccctgccagttgaattgactgggaaagactgcctagttccctgt

SEQ ID NO: 332974 - DNA, 52 bp, Artificial
  Synthetic oligonucleotide
atctttcccagtttccccttggtaggaaatttttgatgcaggtaggtgtggg

SEQ ID NO: 332975 - DNA, 55 bp, Artificial
  Synthetic oligonucleotide
atctttccggagtagacgggtgcagttggcaccgcggagggtacagcgggcagag

SEQ ID NO: 332976 - DNA, 55 bp, Artificial
  Synthetic oligonucleotide
atctttcctcccaacaaaagaggaatttctcacccacgtaataactcaagctcgc

SEQ ID NO: 332977 - DNA, 60 bp, Artificial
  Synthetic oligonucleotide
atctttcgcgagatcagtgcgattcagagaatattggatgcagttctagcgcctgttctc

SEQ ID NO: 332978 - DNA, 60 bp, Artificial
  Synthetic oligonucleotide
atctttcggcgatgcgcgctgatataggtgacatgagaaagtacgccgtcctcgtgtatt

SEQ ID NO: 332979 - DNA, 55 bp, Artificial
  Synthetic oligonucleotide
atctttcggctgcagagtttcctaccgatggttgtatgaccaaacccaatcgagg

SEQ ID NO: 332980 - DNA, 52 bp, Artificial
  Synthetic oligonucleotide
atctttctaatggcatattaacatttaatgactttcccccacagagatcaag

SEQ ID NO: 332981 - DNA, 56 bp, Artificial
  Synthetic oligonucleotide
atctttctgtccccaatcccctgggattcttccccgatcatcagttggaccctgca

SEQ ID NO: 332982 - DNA, 59 bp, Artificial
  Synthetic oligonucleotide
atctttgaataagcaacacgatgttgaaaaaagaatgattactgaattcacttataata

SEQ ID NO: 332983 - DNA, 51 bp, Artificial
  Synthetic oligonucleotide
atctttgagtatttcactagatcggggtcgatgggtggcagctgacgctaa

SEQ ID NO: 332984 - DNA, 55 bp, Artificial
  Synthetic oligonucleotide
atctttgcctcccaggaacaaagaacgcacggtgtgtcgtttaatattatagttc

SEQ ID NO: 332985 - DNA, 56 bp, Artificial
  Synthetic oligonucleotide
atctttggatacctccttattctcttcggatctcccactccgatgtccgtagctgg

SEQ ID NO: 332986 - DNA, 55 bp, Artificial
  Synthetic oligonucleotide
atctttggcgagccaaaggtccaccacagtcttggggcgtttcctgagaggtacc

SEQ ID NO: 332987 - DNA, 56 bp, Artificial
  Synthetic oligonucleotide
atctttgggagtctgcaaatcccttttgcggtgagagtacgctttatactcggact

SEQ ID NO: 332988 - DNA, 51 bp, Artificial
  Synthetic oligonucleotide
atctttgggatgagggaagagatagtctcccctccgaagcaggagcagaac

SEQ ID NO: 332989 - DNA, 60 bp, Artificial
  Synthetic oligonucleotide
atctttgggttcttaggagcagcaggaagcactatgggcgcggcgtccataacgctgacg

SEQ ID NO: 332990 - DNA, 55 bp, Artificial
  Synthetic oligonucleotide
atctttggtctagttgctgtgttgttaagttccccatatatacccctgaagcctg

SEQ ID NO: 332991 - DNA, 57 bp, Artificial
  Synthetic oligonucleotide
atctttggtgcaagctttgtctattactctcgaagatatgttaacttcatttcccgg

SEQ ID NO: 332992 - DNA, 60 bp, Artificial
  Synthetic oligonucleotide
atctttgtatgggtcctacttaataacacggatcgatgacgtgtcagtcatgtgtgtttg

SEQ ID NO: 332993 - DNA, 55 bp, Artificial
  Synthetic oligonucleotide
atctttgtcagggtcgcaaaggtgcccattccgggggagtcagactcttacctaa

SEQ ID NO: 332994 - DNA, 53 bp, Artificial
  Synthetic oligonucleotide
atctttgtcagtgacttacgcagaacaaacaggaaacattgttgacacaatgg

SEQ ID NO: 332995 - DNA, 53 bp, Artificial
  Synthetic oligonucleotide
atctttgttccaagcccattgctgatcccctcgctagcgtctccaccccacct

SEQ ID NO: 332996 - DNA, 58 bp, Artificial
  Synthetic oligonucleotide
atcttttaagactttcatggagtccataccagaacgcttatcaatggtggtcttaaga

SEQ ID NO: 332997 - DNA, 56 bp, Artificial
  Synthetic oligonucleotide
atcttttctatggcttcccctgcccccgcattctcactagccaatcttttgaacgg

SEQ ID NO: 332998 - DNA, 60 bp, Artificial
  Synthetic oligonucleotide
atcttttgatgtcctcttggatcaagtgtataacagcttgtaaggattttgcaagcatca

SEQ ID NO: 332999 - DNA, 60 bp, Artificial
  Synthetic oligonucleotide
atcttttgggtaaagctataactattgatcaggcattaaatggaaagttcagctcagcta

SEQ ID NO: 333000 - DNA, 59 bp, Artificial
  Synthetic oligonucleotide
atctttttgtggtgtaaatagtgacactgtgggttggtcttggccagacggtgctgagc

SEQ ID NO: 333001 - DNA, 60 bp, Artificial
  Synthetic oligonucleotide
atgaaaaacctctatggagactcaaatcctcaaaagttcacctcatctgctaatggagta

SEQ ID NO: 333002 - DNA, 55 bp, Artificial
  Synthetic oligonucleotide
atgaaaacagaaggaacacttgaaaactgcgagaccaagtgccaaactcccttgg

SEQ ID NO: 333003 - DNA, 50 bp, Artificial
  Synthetic oligonucleotide
atgaaaactctaactcggctactgagggttccaccataaactacactacc

SEQ ID NO: 333004 - DNA, 60 bp, Artificial
  Synthetic oligonucleotide
atgaaaagaaggctaaattggcaaatgttgtgagaaaaatgatgactaattcacaagaca

SEQ ID NO: 333005 - DNA, 55 bp, Artificial
  Synthetic oligonucleotide
atgaaaaggatctaatagtgctatcaggtctgggaacaaagtttctcccttgggg

SEQ ID NO: 333006 - DNA, 57 bp, Artificial
  Synthetic oligonucleotide
atgaaaaggcgagacgtgctaccggctcaagttgggattaatccctactcgagagaa

SEQ ID NO: 333007 - DNA, 54 bp, Artificial
  Synthetic oligonucleotide
atgaaaagggacgctcgcgaggcctacgtgcccaagcagaacctgttcagagac

SEQ ID NO: 333008 - DNA, 60 bp, Artificial
  Synthetic oligonucleotide
atgaaaatcacactgagaatgctttgttgttgtatatggcatgtactcatgcttctaacc

SEQ ID NO: 333009 - DNA, 60 bp, Artificial
  Synthetic oligonucleotide
atgaaaatcccaacacacagacatattaagggtggctcatgtccaaagccacaccgctta

SEQ ID NO: 333010 - DNA, 60 bp, Artificial
  Synthetic oligonucleotide
atgaaaatcccgtgtgtccattagcaggaattatatctacaagacaatggttaactcata

SEQ ID NO: 333011 - DNA, 54 bp, Artificial
  Synthetic oligonucleotide
atgaaaatgcatttctcatttctaatctaactacacataatatattatacctga

SEQ ID NO: 333012 - DNA, 54 bp, Artificial
  Synthetic oligonucleotide
atgaaaattaaaccggaaatacgtcatcaaaggaagtgcgtcaccggaagtcac

SEQ ID NO: 333013 - DNA, 54 bp, Artificial
  Synthetic oligonucleotide
atgaaaatttttgtggagttttcatataaacgcaatccacaaccctttcaacca

SEQ ID NO: 333014 - DNA, 54 bp, Artificial
  Synthetic oligonucleotide
atgaaaatttttgtggggttttcatataaacgcaactcacaattctttttgcca

SEQ ID NO: 333015 - DNA, 54 bp, Artificial
  Synthetic oligonucleotide
atgaaacaagtattgagagtttcttgggtaggtcaggatgtatagctatgatag

SEQ ID NO: 333016 - DNA, 59 bp, Artificial
  Synthetic oligonucleotide
atgaaacagtatattgcttgttccaatggaggtgtcaagttatatcaacgacctaacaa

SEQ ID NO: 333017 - DNA, 60 bp, Artificial
  Synthetic oligonucleotide
atgaaaccagatgagatgcaactttgaaaggctgacttattgattgcctctgacaatagc

SEQ ID NO: 333018 - DNA, 58 bp, Artificial
  Synthetic oligonucleotide
atgaaacctacgtcagcagcattgctcagggtgaagcggaaaagagtcgacccaacct

SEQ ID NO: 333019 - DNA, 57 bp, Artificial
  Synthetic oligonucleotide
atgaaacgagaaagtaatccatttaaggggctgtcaactgatagaaaaatggatgaa

SEQ ID NO: 333020 - DNA, 58 bp, Artificial
  Synthetic oligonucleotide
atgaaactactggaaacttttccaacatcagaagccttgcatatggtaacattagtaa

SEQ ID NO: 333021 - DNA, 57 bp, Artificial
  Synthetic oligonucleotide
atgaaactcggttcaagacacaaccaacacagcttcgcacagatcccaagcgttcac

SEQ ID NO: 333022 - DNA, 55 bp, Artificial
  Synthetic oligonucleotide
atgaaactgccataggacttttgactaaaggtttgacgacaaacacataccctgt

SEQ ID NO: 333023 - DNA, 56 bp, Artificial
  Synthetic oligonucleotide
atgaaactttccacgcaaaccctgggactgtgactggctctgccgtggggtgtaac

SEQ ID NO: 333024 - DNA, 58 bp, Artificial
  Synthetic oligonucleotide
atgaaagacgatgtggatttcaagtcgttggcgcatactgcgtttttgaaggtattcg

SEQ ID NO: 333025 - DNA, 60 bp, Artificial
  Synthetic oligonucleotide
atgaaagagatttacgaatctatcaggtggaccagagatgcacgcaacacacaagatcat

SEQ ID NO: 333026 - DNA, 52 bp, Artificial
  Synthetic oligonucleotide
atgaaagaggcagtgataccttagaagaacagataaagcattggactctttt

SEQ ID NO: 333027 - DNA, 55 bp, Artificial
  Synthetic oligonucleotide
atgaaagatatggtatgaaagttaggttgacctaccgatctgaaagcgagcgaac

SEQ ID NO: 333028 - DNA, 54 bp, Artificial
  Synthetic oligonucleotide
atgaaagccaatatccgttttaggattatgcaacaggcgccgattggtcccgcc

SEQ ID NO: 333029 - DNA, 53 bp, Artificial
  Synthetic oligonucleotide
atgaaagcgaaagttaatagggactcgaaaacgaaagttccagagaagttctc

SEQ ID NO: 333030 - DNA, 56 bp, Artificial
  Synthetic oligonucleotide
atgaaagcggacacgatcagggattttgtgacgacgagcgttcgtttaaacgagct

SEQ ID NO: 333031 - DNA, 60 bp, Artificial
  Synthetic oligonucleotide
atgaaaggaccgccatcaatccggctcatcttcaccaaggtgattactggaacatgaccc

SEQ ID NO: 333032 - DNA, 55 bp, Artificial
  Synthetic oligonucleotide
atgaaaggagaaaatagatggtaaaatcaaaatacgaaacccatgtagtaccata

SEQ ID NO: 333033 - DNA, 55 bp, Artificial
  Synthetic oligonucleotide
atgaaaggcaagtttcttatcgcttacacaccacctggagcgggcaaaccgacaa

SEQ ID NO: 333034 - DNA, 60 bp, Artificial
  Synthetic oligonucleotide
atgaaagtaaaactactgatcctgttatgtacatttacagctacatatgcagacacaata

SEQ ID NO: 333035 - DNA, 60 bp, Artificial
  Synthetic oligonucleotide
atgaaagtactagctttaagacacagtgtggctcaggtatacgcggacactcaagtctat

SEQ ID NO: 333036 - DNA, 51 bp, Artificial
  Synthetic oligonucleotide
atgaaagtagacaatcacacagggctcatatcacagttgttacaagaagca

SEQ ID NO: 333037 - DNA, 60 bp, Artificial
  Synthetic oligonucleotide
atgaaagtattagctttaagacatagtgtggctcaggtatatgcagacactcaggtttac

SEQ ID NO: 333038 - DNA, 60 bp, Artificial
  Synthetic oligonucleotide
atgaaagttgcggagagcttcgttcagcacttccccagtgtagatcaggtcgatgagtca

SEQ ID NO: 333039 - DNA, 59 bp, Artificial
  Synthetic oligonucleotide
atgaaagttgtttcgcgtgacgtgcgcaaaatggttgaattgtatcacggtcgcgatcg

SEQ ID NO: 333040 - DNA, 60 bp, Artificial
  Synthetic oligonucleotide
atgaaataggggaagacgttgctccaattgagcacattgcaagtatgagaaggaactatt

SEQ ID NO: 333041 - DNA, 60 bp, Artificial
  Synthetic oligonucleotide
atgaaatatcctgtggatgacacgtataatgcacagttcatcacgcctaccaactcggcg

SEQ ID NO: 333042 - DNA, 60 bp, Artificial
  Synthetic oligonucleotide
atgaaatcaactactgtaaggcctctacaattatgatgaagtatgtgcttttccacactt

SEQ ID NO: 333043 - DNA, 55 bp, Artificial
  Synthetic oligonucleotide
atgaaatcaccttagaacactgttccgggctttgatcacttgttgtaacagatcg

SEQ ID NO: 333044 - DNA, 55 bp, Artificial
  Synthetic oligonucleotide
atgaaatggtgggacatggtggtagaactcgacgtgatgtgtagaatgtgccgcg

SEQ ID NO: 333045 - DNA, 56 bp, Artificial
  Synthetic oligonucleotide
atgaaatgtacaaggatgcgatcgaaaggtacgtcactaagaagagggacggtcca

SEQ ID NO: 333046 - DNA, 60 bp, Artificial
  Synthetic oligonucleotide
atgaacaacagcgcagcgttataatagacgacttctatggatggataaagtacgacgaaa

SEQ ID NO: 333047 - DNA, 60 bp, Artificial
  Synthetic oligonucleotide
atgaacaaggacagacactttggagtaagacaaatgatgctggatcagatagggtgatgg

SEQ ID NO: 333048 - DNA, 58 bp, Artificial
  Synthetic oligonucleotide
atgaacaaggcccctctcgatctaagggattgcaccatagagggttggatcttgggga

SEQ ID NO: 333049 - DNA, 56 bp, Artificial
  Synthetic oligonucleotide
atgaacacacccgattcccagattatggaagaaccgtaccaccgtgtggatttatc

SEQ ID NO: 333050 - DNA, 59 bp, Artificial
  Synthetic oligonucleotide
atgaacacataatgcatgttgaaaagattggtaccggtccgcaaagcataaaggtggac

SEQ ID NO: 333051 - DNA, 60 bp, Artificial
  Synthetic oligonucleotide
atgaacacccaaatcctgatactcgctcttgtggcgatcatcccgacaaatgcagacaaa

SEQ ID NO: 333052 - DNA, 59 bp, Artificial
  Synthetic oligonucleotide
atgaacactcaaattctggcattcattgcttgtgtgctgattggagctaaaggagacaa

SEQ ID NO: 333053 - DNA, 60 bp, Artificial
  Synthetic oligonucleotide
atgaacactctaatcctggtattcgctctggtggcgatcattccgataaatgcagacaag

SEQ ID NO: 333054 - DNA, 56 bp, Artificial
  Synthetic oligonucleotide
atgaacactttactccttatttgccacccaactgtgcgtacataaaagggcagtta

SEQ ID NO: 333055 - DNA, 60 bp, Artificial
  Synthetic oligonucleotide
atgaacagatctgatattacagaccgattccagctccaagaagaagacataattcccaat

SEQ ID NO: 333056 - DNA, 55 bp, Artificial
  Synthetic oligonucleotide
atgaacagccacgccgcctaccgaagaagggtagcccttgcagatgcctccagag

SEQ ID NO: 333057 - DNA, 55 bp, Artificial
  Synthetic oligonucleotide
atgaacagcttggtctatccttcgactccagagctgcataagagaagattgcaac

SEQ ID NO: 333058 - DNA, 60 bp, Artificial
  Synthetic oligonucleotide
atgaacaggctcatagcgttcgcctctaggggcaaccacgtgtcacccacgcactatgtg

SEQ ID NO: 333059 - DNA, 60 bp, Artificial
  Synthetic oligonucleotide
atgaacagggtgtggggcctctgtgtaaagctgatagcctgtatgtttcagctgctgata

SEQ ID NO: 333060 - DNA, 59 bp, Artificial
  Synthetic oligonucleotide
atgaacatacaagacctctggtccaagccacaagtggaaggcacaggggaggttatcaa

SEQ ID NO: 333061 - DNA, 60 bp, Artificial
  Synthetic oligonucleotide
atgaacattcgtatcgcagactctgtagtatagtttccatggaattgggtccttcaacga

SEQ ID NO: 333062 - DNA, 50 bp, Artificial
  Synthetic oligonucleotide
atgaaccaaagaagtgataatttaggtatatggtctaaagcagaaaagaa

SEQ ID NO: 333063 - DNA, 56 bp, Artificial
  Synthetic oligonucleotide
atgaaccaatcaagaagtggatattgttactcttccacgccttgactaacaacccc

SEQ ID NO: 333064 - DNA, 58 bp, Artificial
  Synthetic oligonucleotide
atgaaccagaccctcgctacccgggacgtcgagctcgagattagcgccgctctcttgg

SEQ ID NO: 333065 - DNA, 58 bp, Artificial
  Synthetic oligonucleotide
atgaacccaaaccagaagataataacaattggctccgtctctctaaccattgcaacag

SEQ ID NO: 333066 - DNA, 60 bp, Artificial
  Synthetic oligonucleotide
atgaacccagtactgccacagttaagaacgatttgcgtgaccgttatcaagttatgcaca

SEQ ID NO: 333067 - DNA, 57 bp, Artificial
  Synthetic oligonucleotide
atgaaccgactactgcaaccgtgaagaatgatcttagggaccggtatcaggtgttac

SEQ ID NO: 333068 - DNA, 56 bp, Artificial
  Synthetic oligonucleotide
atgaaccgggacaccagggggagctctctctaaaacctattattgctggtgtcctg

SEQ ID NO: 333069 - DNA, 55 bp, Artificial
  Synthetic oligonucleotide
atgaaccgtaagcttaacgttgccggtgaccgtacattcgacgattggaccgtga

SEQ ID NO: 333070 - DNA, 60 bp, Artificial
  Synthetic oligonucleotide
atgaaccgtctaatcgcattcgcatcgcgaggcaatcacgtgtcccccacgcattatgtc

SEQ ID NO: 333071 - DNA, 54 bp, Artificial
  Synthetic oligonucleotide
atgaacctagtagtgccattgagagagcaattgtgcgcgtagcagatactatgg

SEQ ID NO: 333072 - DNA, 56 bp, Artificial
  Synthetic oligonucleotide
atgaacctcattacagccctttaattctagcccttaagacattggaaagtactgaa

SEQ ID NO: 333073 - DNA, 54 bp, Artificial
  Synthetic oligonucleotide
atgaacctctttgatcttccacaaggggtaggctacgggtgaaacctcttaggc

SEQ ID NO: 333074 - DNA, 55 bp, Artificial
  Synthetic oligonucleotide
atgaacctgagcaattgaataagactgaccctgagatgaactattaccttttagc

SEQ ID NO: 333075 - DNA, 58 bp, Artificial
  Synthetic oligonucleotide
atgaacctgtcatctcacagcttgaccttccaccaatttcgtccggagtgtctggggt

SEQ ID NO: 333076 - DNA, 60 bp, Artificial
  Synthetic oligonucleotide
atgaaccttccattgtgttgcccaaacagatagcaactttggagcatgccccagcgttta

SEQ ID NO: 333077 - DNA, 55 bp, Artificial
  Synthetic oligonucleotide
atgaaccttgctgtttcctacgcattcaaaatgactccattatccgcctcggtga

SEQ ID NO: 333078 - DNA, 60 bp, Artificial
  Synthetic oligonucleotide
atgaaccttgtcgcgcagtctcttatctccaatatgtcttctcacacggctacgacgtgt

SEQ ID NO: 333079 - DNA, 59 bp, Artificial
  Synthetic oligonucleotide
atgaacgaatgctcagcagaatctttgtgagccatgtaaagaatagagtcaagaacctt

SEQ ID NO: 333080 - DNA, 54 bp, Artificial
  Synthetic oligonucleotide
atgaacgactcagccgtgcgcttaattgagacgccgtggaagggaactgcagga

SEQ ID NO: 333081 - DNA, 60 bp, Artificial
  Synthetic oligonucleotide
atgaacgcgaataagccgctatctaagcgtagagcaatgcagctgtggctctatgccaaa

SEQ ID NO: 333082 - DNA, 60 bp, Artificial
  Synthetic oligonucleotide
atgaacgctcaaagagacattatctaagtctaaagggcttatggcgatacattcctctca

SEQ ID NO: 333083 - DNA, 60 bp, Artificial
  Synthetic oligonucleotide
atgaacgggaatttgtcaatcggtatttacaccatattgccatcaatggaggtgcgataa

SEQ ID NO: 333084 - DNA, 53 bp, Artificial
  Synthetic oligonucleotide
atgaacggtgaggacgtcgactacgtccaccctgacatcgagaaccacgtgga

SEQ ID NO: 333085 - DNA, 57 bp, Artificial
  Synthetic oligonucleotide
atgaacgtaggtacgttcaagagcttgagttgaagaatgataagggtaaactgcttc

SEQ ID NO: 333086 - DNA, 59 bp, Artificial
  Synthetic oligonucleotide
atgaactaaatgacggaacgtggtgatgagagacgcgagtattcccctccgatagctac

SEQ ID NO: 333087 - DNA, 56 bp, Artificial
  Synthetic oligonucleotide
atgaactaacaccatcggagaccacagtcagactacgcgcatacctgaacactcct

SEQ ID NO: 333088 - DNA, 60 bp, Artificial
  Synthetic oligonucleotide
atgaactagcatttgtagatagagtgaaggtatatagatggaaacaagctccattcctag

SEQ ID NO: 333089 - DNA, 57 bp, Artificial
  Synthetic oligonucleotide
atgaactcaactggattcaccaaagtgtgcggagcgcccccctgtgtcatcggtggg

SEQ ID NO: 333090 - DNA, 55 bp, Artificial
  Synthetic oligonucleotide
atgaactccataggtatgtgagagctgtcgtcattcaaaaggaaaacagaacctg

SEQ ID NO: 333091 - DNA, 55 bp, Artificial
  Synthetic oligonucleotide
atgaactcgaataccgcctcattgtcgcttatattgatgacatgacatcgaattc

SEQ ID NO: 333092 - DNA, 58 bp, Artificial
  Synthetic oligonucleotide
atgaactcttctatcttagaagattggaatttagcttttgtacctcaaccagctataa

SEQ ID NO: 333093 - DNA, 56 bp, Artificial
  Synthetic oligonucleotide
atgaactctttaaaaaagtccccacagatagctccagaattgtaaagtctttcaca

SEQ ID NO: 333094 - DNA, 60 bp, Artificial
  Synthetic oligonucleotide
atgaactgctgagcttcgctcaggagcattatccatccgcttacggtctcgtgagcggca

SEQ ID NO: 333095 - DNA, 60 bp, Artificial
  Synthetic oligonucleotide
atgaactggttgcaaggcaatttaaattatctgtcttctgtttatcactcttgtgcaatg

SEQ ID NO: 333096 - DNA, 51 bp, Artificial
  Synthetic oligonucleotide
atgaactgtgtcgtgcatatcagtggctacaagccatccgtcctttggacc

SEQ ID NO: 333097 - DNA, 60 bp, Artificial
  Synthetic oligonucleotide
atgaacttcctaaagcgtgtcgaaagactccttatatgggatgtatcgtcagatcgatcg

SEQ ID NO: 333098 - DNA, 60 bp, Artificial
  Synthetic oligonucleotide
atgaactttgcggtttcaatgagggagccgattccagatccgccggtgccagacatctcg

SEQ ID NO: 333099 - DNA, 57 bp, Artificial
  Synthetic oligonucleotide
atgaagaaaagggacaagcttagttgtcaagtcggaatcaacccatactccatggaa

SEQ ID NO: 333100 - DNA, 54 bp, Artificial
  Synthetic oligonucleotide
atgaagaacgaagagcgagacggcgcaggaataagcgacgactcagaatatttc

SEQ ID NO: 333101 - DNA, 53 bp, Artificial
  Synthetic oligonucleotide
atgaagaacgttaatgtagaccgcatagtgttaatgtctacctacctaacacc

SEQ ID NO: 333102 - DNA, 55 bp, Artificial
  Synthetic oligonucleotide
atgaagacaccaccacagtgcttgccaccctcgctctccttggatgcgacatctc

SEQ ID NO: 333103 - DNA, 54 bp, Artificial
  Synthetic oligonucleotide
atgaagacagagggataattaactctcttacgttgcggaatcgaacttttaact

SEQ ID NO: 333104 - DNA, 54 bp, Artificial
  Synthetic oligonucleotide
atgaagacattgctaataggtgtcagcaatttgtaggccctcttactgtaaatg

SEQ ID NO: 333105 - DNA, 54 bp, Artificial
  Synthetic oligonucleotide
atgaagacatttttcggctggaaggaacccaacgtaatcaaaccacatgaaaag

SEQ ID NO: 333106 - DNA, 56 bp, Artificial
  Synthetic oligonucleotide
atgaagaccattatcgctttaagctacgttttctgtctggccttcggtcaggacct

SEQ ID NO: 333107 - DNA, 57 bp, Artificial
  Synthetic oligonucleotide
atgaagacgtaaataaacttagaatgatattatcttctaaaggaatcgaccagaaga

SEQ ID NO: 333108 - DNA, 60 bp, Artificial
  Synthetic oligonucleotide
atgaagactatcattgctctgagctacattttatgtctggtcttcgctcaaaaacttccc

SEQ ID NO: 333109 - DNA, 60 bp, Artificial
  Synthetic oligonucleotide
atgaagacttggctaatgatatagaccgtactctgatcatggcccgttccataatgaggg

SEQ ID NO: 333110 - DNA, 56 bp, Artificial
  Synthetic oligonucleotide
atgaagagaccaacactctcgggctttcaactgaacacctcactgcgttggcccac

SEQ ID NO: 333111 - DNA, 57 bp, Artificial
  Synthetic oligonucleotide
atgaagagattcaaaaggtcaaatttggctacatcaatttcagatttaaccgattcg

SEQ ID NO: 333112 - DNA, 57 bp, Artificial
  Synthetic oligonucleotide
atgaagagcaaatcggtgaatcaccattcggaaagtggttcaacactctgcccaaca

SEQ ID NO: 333113 - DNA, 60 bp, Artificial
  Synthetic oligonucleotide
atgaagaggtaaatggaatcaggaaaccaaaacatctctatgtgtcactgcctacagcac

SEQ ID NO: 333114 - DNA, 60 bp, Artificial
  Synthetic oligonucleotide
atgaagagtcagctagtgacaaagcacgtggtcaaaggggagtgtcggcacttcaaagag

SEQ ID NO: 333115 - DNA, 60 bp, Artificial
  Synthetic oligonucleotide
atgaagatcgcattcttgatagtccagtttcttagtcctgcattttcctctttgtccagg

SEQ ID NO: 333116 - DNA, 57 bp, Artificial
  Synthetic oligonucleotide
atgaagatctaattctagttcctgggaagcaagccgcggaaatgatcagaagacgtg

SEQ ID NO: 333117 - DNA, 51 bp, Artificial
  Synthetic oligonucleotide
atgaagcaaaacacatgattggggcaaatgacaatgacacgaccaccagct

SEQ ID NO: 333118 - DNA, 51 bp, Artificial
  Synthetic oligonucleotide
atgaagcattgtggcaaactgttcataagtatagacatgatgcaggctttg

SEQ ID NO: 333119 - DNA, 55 bp, Artificial
  Synthetic oligonucleotide
atgaagcccaagtagttgaatggatgaagagacaaggcttggttgtcaaagaggg

SEQ ID NO: 333120 - DNA, 60 bp, Artificial
  Synthetic oligonucleotide
atgaagcccagatgcacgatcacaattgcttcataactttaactataaacccagagactc

SEQ ID NO: 333121 - DNA, 60 bp, Artificial
  Synthetic oligonucleotide
atgaagctgttagacatttccctaggccatggctttatagcttagggcaatatatctatg

SEQ ID NO: 333122 - DNA, 60 bp, Artificial
  Synthetic oligonucleotide
atgaaggaaactgcgaaggctatagcaaagcgctttcgtagcacattccttaatgttgac

SEQ ID NO: 333123 - DNA, 57 bp, Artificial
  Synthetic oligonucleotide
atgaaggaattcaagcaggagtggataggttctataggacctgcaaactggttgggg

SEQ ID NO: 333124 - DNA, 56 bp, Artificial
  Synthetic oligonucleotide
atgaaggacattcagttcttaaaacgccgctttcgaaagattgccggcatttgggc

SEQ ID NO: 333125 - DNA, 51 bp, Artificial
  Synthetic oligonucleotide
atgaaggagactgtggatcccttttcaacttgccattcacatccagttctc

SEQ ID NO: 333126 - DNA, 52 bp, Artificial
  Synthetic oligonucleotide
atgaaggagcgccagataactccggatgtatataaggtcactccagtgatga

SEQ ID NO: 333127 - DNA, 55 bp, Artificial
  Synthetic oligonucleotide
atgaaggatatgacccctttaggggaggtgttactaaatattcgcagccgatggg

SEQ ID NO: 333128 - DNA, 60 bp, Artificial
  Synthetic oligonucleotide
atgaaggatcatcagcatgcatagatttaccatatagacttgtaaattgcattgacttat

SEQ ID NO: 333129 - DNA, 60 bp, Artificial
  Synthetic oligonucleotide
atgaaggcaagactactggtcctgttatgtacacttgcagctacagatgcagacacaata

SEQ ID NO: 333130 - DNA, 55 bp, Artificial
  Synthetic oligonucleotide
atgaaggcacttctggtgggccagctgtctcccggtttgttaccttaaaagccaa

SEQ ID NO: 333131 - DNA, 55 bp, Artificial
  Synthetic oligonucleotide
atgaagggaagaccacctgggccaagtctaagattcaagctgggtggttctattc

SEQ ID NO: 333132 - DNA, 56 bp, Artificial
  Synthetic oligonucleotide
atgaagggagataagtgcgttcgcgttggttatcacccacgaagtgacattatttt

SEQ ID NO: 333133 - DNA, 56 bp, Artificial
  Synthetic oligonucleotide
atgaagggcgttaaggtcgtaccgctctcgcaatgcgggctgtttacctctaaagc

SEQ ID NO: 333134 - DNA, 58 bp, Artificial
  Synthetic oligonucleotide
atgaaggggctattttcacaagctaagatttctcttttttacactgaggagcatgaaa

SEQ ID NO: 333135 - DNA, 58 bp, Artificial
  Synthetic oligonucleotide
atgaagggggtatacattaatactgctttgcttaatgcatcctgtgcagctatggatg

SEQ ID NO: 333136 - DNA, 56 bp, Artificial
  Synthetic oligonucleotide
atgaagggtacgaggaattcacaatggttgggcggagggccaccgccatcttaaga

SEQ ID NO: 333137 - DNA, 60 bp, Artificial
  Synthetic oligonucleotide
atgaagggtatgaagaattcacaatggtcgggagacgagcgacagctattctcaggaagg

SEQ ID NO: 333138 - DNA, 59 bp, Artificial
  Synthetic oligonucleotide
atgaagggtttgtgtacgatgcacgctccaaagttactcagagtgttctaaactcaatg

SEQ ID NO: 333139 - DNA, 55 bp, Artificial
  Synthetic oligonucleotide
atgaaggtacatgaagtgctacctagccagtattacattcactcaggtaaagggc

SEQ ID NO: 333140 - DNA, 56 bp, Artificial
  Synthetic oligonucleotide
atgaaggtcaaaacgctagacttgaagagaggagatagtggggtcattcttaaccc

SEQ ID NO: 333141 - DNA, 50 bp, Artificial
  Synthetic oligonucleotide
atgaaggtgtcagctaccaacttggtacacgaagaattcaactccgcagc

SEQ ID NO: 333142 - DNA, 51 bp, Artificial
  Synthetic oligonucleotide
atgaaggtgtggcagttctattggagccatttaagaacttgtttggttcat

SEQ ID NO: 333143 - DNA, 55 bp, Artificial
  Synthetic oligonucleotide
atgaagtacaatttggaacagctacgtcatgcagtcgggcaaacttctacgacaa

SEQ ID NO: 333144 - DNA, 60 bp, Artificial
  Synthetic oligonucleotide
atgaagtagaatatgtgctgtttgatcatgagattaattgggaagttagaggcttaattt

SEQ ID NO: 333145 - DNA, 55 bp, Artificial
  Synthetic oligonucleotide
atgaagtagccattttcgtccacggaccgacaactgttgaatcccatggtaacta

SEQ ID NO: 333146 - DNA, 60 bp, Artificial
  Synthetic oligonucleotide
atgaagtcacctgtctatgaggactcaccctatgagcccgctgtcctttccatcaatgac

SEQ ID NO: 333147 - DNA, 54 bp, Artificial
  Synthetic oligonucleotide
atgaagtctgacaatgcaaaggttacaaagtcggagctaaaaattaggttgcca

SEQ ID NO: 333148 - DNA, 50 bp, Artificial
  Synthetic oligonucleotide
atgaagtctggctcttactgcacatcctcgactaattcgcgcatacgttg

SEQ ID NO: 333149 - DNA, 53 bp, Artificial
  Synthetic oligonucleotide
atgaagttcacccacccttcggtgtggtgatactggaccatcataccatgctc

SEQ ID NO: 333150 - DNA, 57 bp, Artificial
  Synthetic oligonucleotide
atgaagttgaaggtggggtgccctcaggttgttcaggaactagcatatttaatacta

SEQ ID NO: 333151 - DNA, 51 bp, Artificial
  Synthetic oligonucleotide
atgaagttggagtcggacaagacatttccgatcatgctgaacggccaagtg

SEQ ID NO: 333152 - DNA, 58 bp, Artificial
  Synthetic oligonucleotide
atgaagtttagtggtagattatatacgtacaatggtcaaacaccgaatgcagttactg

SEQ ID NO: 333153 - DNA, 55 bp, Artificial
  Synthetic oligonucleotide
atgaagtttattcgctcacaggagcccatttcagcgacgaaaagaaaatcatggc

SEQ ID NO: 333154 - DNA, 53 bp, Artificial
  Synthetic oligonucleotide
atgaagtttgtaatatgaaacgctgatataaaagtcgttttatacgggagtgg

SEQ ID NO: 333155 - DNA, 58 bp, Artificial
  Synthetic oligonucleotide
atgaatacaaatcaaagaataataaccattgggacaatctgtctaatagttggaatag

SEQ ID NO: 333156 - DNA, 59 bp, Artificial
  Synthetic oligonucleotide
atgaatacaaatcaaagaataataaccattgggatagtctgtatgatagttggagtaat

SEQ ID NO: 333157 - DNA, 60 bp, Artificial
  Synthetic oligonucleotide
atgaataccttgaagaactaggtggtgattactcagtatatcaagatctctattgtgatg

SEQ ID NO: 333158 - DNA, 50 bp, Artificial
  Synthetic oligonucleotide
atgaatacgctggattaactaaagagctacatcaaaggttaactctagag

SEQ ID NO: 333159 - DNA, 55 bp, Artificial
  Synthetic oligonucleotide
atgaatacttcgcgcgcgcgggcggaccaacacacccttcggttgcgtcaatcgg

SEQ ID NO: 333160 - DNA, 55 bp, Artificial
  Synthetic oligonucleotide
atgaatatgcaaaacgtgcagactttaactacagaggaattacagctgacttcag

SEQ ID NO: 333161 - DNA, 60 bp, Artificial
  Synthetic oligonucleotide
atgaatatggatcaaatagaacgtgcttcagataaaattgcgcagggtgttatcatcgca

SEQ ID NO: 333162 - DNA, 60 bp, Artificial
  Synthetic oligonucleotide
atgaatatgtgagcatggttgtctatggcgatgacaatttgctgtcggtgagtgaggtta

SEQ ID NO: 333163 - DNA, 56 bp, Artificial
  Synthetic oligonucleotide
atgaatcactttattaaccttctcgtagctgagggatttgtcaggactaacgaacc

SEQ ID NO: 333164 - DNA, 60 bp, Artificial
  Synthetic oligonucleotide
atgaatcagattctatcacagaatcagagggttatgatctttctgcaagaatgatagtag

SEQ ID NO: 333165 - DNA, 60 bp, Artificial
  Synthetic oligonucleotide
atgaatcagtgcgacgtgacttcgtatgtgacgtatcctattcttggtctagagggcaac

SEQ ID NO: 333166 - DNA, 60 bp, Artificial
  Synthetic oligonucleotide
atgaatccaaatcaaaagataatagcacttggctctgtttctctaactattgcgacaatg

SEQ ID NO: 333167 - DNA, 60 bp, Artificial
  Synthetic oligonucleotide
atgaatccaaatcagaaaataataacaattggctctatctctctaaccatcgcaacagta

SEQ ID NO: 333168 - DNA, 60 bp, Artificial
  Synthetic oligonucleotide
atgaatccaaatcagaaaataataaccattggatacgtttgcatgacgcttggggcaatc

SEQ ID NO: 333169 - DNA, 60 bp, Artificial
  Synthetic oligonucleotide
atgaatccaaatcagaagataataacacttggtgtagtgaatacaaccctatcaacaata

SEQ ID NO: 333170 - DNA, 60 bp, Artificial
  Synthetic oligonucleotide
atgaatccaaatcagaagataataaccatcggatcaatctgtatggtaattggaatagtc

SEQ ID NO: 333171 - DNA, 60 bp, Artificial
  Synthetic oligonucleotide
atgaatccaaatcagaggataatagcgattggatctgtgaatacagtgttatctaccata

SEQ ID NO: 333172 - DNA, 57 bp, Artificial
  Synthetic oligonucleotide
atgaatccaaattcgaagataataacaatcggggtagtgaacaccattttgtcaaca

SEQ ID NO: 333173 - DNA, 51 bp, Artificial
  Synthetic oligonucleotide
atgaatcccctcatcgaccagtacttgtactacctggccagaacacagagt

SEQ ID NO: 333174 - DNA, 60 bp, Artificial
  Synthetic oligonucleotide
atgaatccggtgcaagtgaatgagcaacttgtaattaacttctattggcaaatagatatc

SEQ ID NO: 333175 - DNA, 60 bp, Artificial
  Synthetic oligonucleotide
atgaatcctggagccagcttttatgagagtcctttggatgttggaaattcatcaattcaa

SEQ ID NO: 333176 - DNA, 60 bp, Artificial
  Synthetic oligonucleotide
atgaatcgaatctagacccgatatatccagagttcatgccaactctaccacacaatgttc

SEQ ID NO: 333177 - DNA, 60 bp, Artificial
  Synthetic oligonucleotide
atgaatcgtgatactacagacggtatgctggcgcgggtagtatgcgacaaggcagccggg

SEQ ID NO: 333178 - DNA, 60 bp, Artificial
  Synthetic oligonucleotide
atgaatcgttaacagtctgcttgcctcctctagcagatctgccgtcgatctggaattcgc

SEQ ID NO: 333179 - DNA, 55 bp, Artificial
  Synthetic oligonucleotide
atgaatctagccacctgggtgggtagtaatttggaaccaacagccagggacctag

SEQ ID NO: 333180 - DNA, 60 bp, Artificial
  Synthetic oligonucleotide
atgaatctagctacctgggtgggagtgaacttggaagatccagcatctagggacctagta

SEQ ID NO: 333181 - DNA, 55 bp, Artificial
  Synthetic oligonucleotide
atgaatctatttgcattcattctaaacgtggtggtagctaatgctgcctacacaa

SEQ ID NO: 333182 - DNA, 58 bp, Artificial
  Synthetic oligonucleotide
atgaatctcaaggcatctcagaggatcatgtaactctagttagattgaaaagtactaa

SEQ ID NO: 333183 - DNA, 55 bp, Artificial
  Synthetic oligonucleotide
atgaatctcatgaaggagtcacattgtgtgaattgcaaacaaccaacagcgaggc

SEQ ID NO: 333184 - DNA, 60 bp, Artificial
  Synthetic oligonucleotide
atgaatcttccaatggttgaagggaagatcattctcagtttggaccacttgcttgagtat

SEQ ID NO: 333185 - DNA, 60 bp, Artificial
  Synthetic oligonucleotide
atgaatcttttatggacgagctcacagaagaacagcagttgatgttgagtgagattgagg

SEQ ID NO: 333186 - DNA, 51 bp, Artificial
  Synthetic oligonucleotide
atgaatgacacgtgttgcgtcgacaaagcaccgttctacgtggttagtaga

SEQ ID NO: 333187 - DNA, 58 bp, Artificial
  Synthetic oligonucleotide
atgaatgacgagccaacaaaagatgagttaactcataggttgacgaacataaggaatt

SEQ ID NO: 333188 - DNA, 59 bp, Artificial
  Synthetic oligonucleotide
atgaatgatccaaagtcaccaatgttgaacgggaagagtgcgcaacggttgtacaccga

SEQ ID NO: 333189 - DNA, 54 bp, Artificial
  Synthetic oligonucleotide
atgaatgattggtcgggatacttagaagtggctgtctgggaacgtggtatgttg

SEQ ID NO: 333190 - DNA, 57 bp, Artificial
  Synthetic oligonucleotide
atgaatgcaaccggattcaccaaagtgtgcggagcgcccccctgtaacatcggaggg

SEQ ID NO: 333191 - DNA, 60 bp, Artificial
  Synthetic oligonucleotide
atgaatgcatggagtctgtcaaaaatggtacttatgattatcccaaataccaggatgaaa

SEQ ID NO: 333192 - DNA, 55 bp, Artificial
  Synthetic oligonucleotide
atgaatgcccactccgtagccatggagttgcgggcgaggtatggggttcagccct

SEQ ID NO: 333193 - DNA, 52 bp, Artificial
  Synthetic oligonucleotide
atgaatgcctatggttcagggcaagtaatgctaagatggggagttttagcca

SEQ ID NO: 333194 - DNA, 55 bp, Artificial
  Synthetic oligonucleotide
atgaatgctcaccgagagatgattcctaacgacccaatctcccaacagatgctca

SEQ ID NO: 333195 - DNA, 60 bp, Artificial
  Synthetic oligonucleotide
atgaatgcttgcaaaagcacaaggatggcagtgcactatcagtcataccggacggtggca

SEQ ID NO: 333196 - DNA, 54 bp, Artificial
  Synthetic oligonucleotide
atgaatggaaatgactttcaaactggaggaattggtaatttacctgttagaaac

SEQ ID NO: 333197 - DNA, 60 bp, Artificial
  Synthetic oligonucleotide
atgaatggaacattcaccattgaattttataataacggtcagctagttgacatggtcagg

SEQ ID NO: 333198 - DNA, 60 bp, Artificial
  Synthetic oligonucleotide
atgaatggagggacgcccgttcacgagctcaacttactgactaccgcgcaggaatgcatt

SEQ ID NO: 333199 - DNA, 60 bp, Artificial
  Synthetic oligonucleotide
atgaatggcaggaaggtgtttatctattggccagagtgttgctgcgatgggagttgtcat

SEQ ID NO: 333200 - DNA, 60 bp, Artificial
  Synthetic oligonucleotide
atgaatggtatgttgacaacctccttaatcgccatgtacttctaccatctggtgaagtca

SEQ ID NO: 333201 - DNA, 54 bp, Artificial
  Synthetic oligonucleotide
atgaatggtggttcaggaaagatcccaacttggtgttgcagtctacactaggga

SEQ ID NO: 333202 - DNA, 59 bp, Artificial
  Synthetic oligonucleotide
atgaatgtaccgcgggaaactcagccattcgacaaaagactttgggcccactgcaggca

SEQ ID NO: 333203 - DNA, 50 bp, Artificial
  Synthetic oligonucleotide
atgaatgtataacagcgtgaataaactcatcccctcacaacggtgttttg

SEQ ID NO: 333204 - DNA, 50 bp, Artificial
  Synthetic oligonucleotide
atgaatgtatcaggcgtctttgacaaggccgtgcctgaatgtacgccggt

SEQ ID NO: 333205 - DNA, 58 bp, Artificial
  Synthetic oligonucleotide
atgaatgtccttcaataagccagttgtatatcctggttgttcgaccatatttccctta

SEQ ID NO: 333206 - DNA, 56 bp, Artificial
  Synthetic oligonucleotide
atgaatgttaatgttcgcaatcttaacttgaggaccatttggaaagataccggtgg

SEQ ID NO: 333207 - DNA, 54 bp, Artificial
  Synthetic oligonucleotide
atgaattacgccaaactgatgtgcttgcccccagagccagttcccttcgaagag

SEQ ID NO: 333208 - DNA, 60 bp, Artificial
  Synthetic oligonucleotide
atgaattatgagactgcaatgtttaacaaggtggcggtgctaatttgtgaagcattgaat

SEQ ID NO: 333209 - DNA, 57 bp, Artificial
  Synthetic oligonucleotide
atgaattccaaactggcggaattggtaatttgccagtcagaacatggaattttgatt

SEQ ID NO: 333210 - DNA, 60 bp, Artificial
  Synthetic oligonucleotide
atgaattgataggcctctacgaggctagccaggctcagctagtgagcttgagttacacaa

SEQ ID NO: 333211 - DNA, 60 bp, Artificial
  Synthetic oligonucleotide
atgaattggactgagctaattactaactattcaccatcgagagaagataacctgcaacgt

SEQ ID NO: 333212 - DNA, 59 bp, Artificial
  Synthetic oligonucleotide
atgaattggactgatttgattactaactactcaccatctagagaggataatttacaacg

SEQ ID NO: 333213 - DNA, 57 bp, Artificial
  Synthetic oligonucleotide
atgaattggagtaaggagtacaatatatagtaataggagttcctaaggccatccgta

SEQ ID NO: 333214 - DNA, 58 bp, Artificial
  Synthetic oligonucleotide
atgaattggtgacattggtgtacaatatatactagaagttcttaagggtcctatagcg

SEQ ID NO: 333215 - DNA, 58 bp, Artificial
  Synthetic oligonucleotide
atgaatttactcaaggattacgaggtggccccatgccaagtgatctacaacggggcca

SEQ ID NO: 333216 - DNA, 60 bp, Artificial
  Synthetic oligonucleotide
atgaatttgaagtatgctatatctggaaaggctagagctcgtactgtgggaggagtgtca

SEQ ID NO: 333217 - DNA, 53 bp, Artificial
  Synthetic oligonucleotide
atgaatttgcatttgatcatggaaccaattgtgaccgaatagtaagttgttgt

SEQ ID NO: 333218 - DNA, 51 bp, Artificial
  Synthetic oligonucleotide
atgaatttgctgtttgggcattatgaaccgcagagaaatagagagcaaatg

SEQ ID NO: 333219 - DNA, 53 bp, Artificial
  Synthetic oligonucleotide
atgacaaaagaaagtggctattttttaagtagtgattctggttggaaatttaa

SEQ ID NO: 333220 - DNA, 54 bp, Artificial
  Synthetic oligonucleotide
atgacaaacattccaatggaaccgttaaagacagaagcccctatagaaccttaa

SEQ ID NO: 333221 - DNA, 55 bp, Artificial
  Synthetic oligonucleotide
atgacaacataaacaagaacgccctgttagtttattattcatgggtctctgacac

SEQ ID NO: 333222 - DNA, 53 bp, Artificial
  Synthetic oligonucleotide
atgacaaccacccgtacagaacctggaactaccacgggagctacgaggtaaaa

SEQ ID NO: 333223 - DNA, 56 bp, Artificial
  Synthetic oligonucleotide
atgacaaccttccaagtgatgacaattggcttaactttgatggtactttattaggc

SEQ ID NO: 333224 - DNA, 57 bp, Artificial
  Synthetic oligonucleotide
atgacaagctcactcaccagaccactgttgtccataccccaaagaaggtttatgacc

SEQ ID NO: 333225 - DNA, 55 bp, Artificial
  Synthetic oligonucleotide
atgacaaggtcagaatgcagttgagagacaatgccaaggaaataggaaacgggtg

SEQ ID NO: 333226 - DNA, 55 bp, Artificial
  Synthetic oligonucleotide
atgacaaggtgctgcaatctaaggccgatgcagcaaaaagaaggggtttactctt

SEQ ID NO: 333227 - DNA, 60 bp, Artificial
  Synthetic oligonucleotide
atgacaagtattccgcctaccgtggcttgggttatggcagcggtcggtgtgcctcaatgc

SEQ ID NO: 333228 - DNA, 60 bp, Artificial
  Synthetic oligonucleotide
atgacaatcacacagagaatgctcttttgttgtatatggcatgtactcatgctagtaatc

SEQ ID NO: 333229 - DNA, 60 bp, Artificial
  Synthetic oligonucleotide
atgacaatgaaccaagtaccgcaacagtcaagaacgatcttcgtgatcgttatcaggtca

SEQ ID NO: 333230 - DNA, 60 bp, Artificial
  Synthetic oligonucleotide
atgacaatgcaaaacttagtaacatcgatcgaaaccagagtgatggccccgacgcctgca

SEQ ID NO: 333231 - DNA, 56 bp, Artificial
  Synthetic oligonucleotide
atgacaatggagacctgtaagggtctggtattccttgcacacacttctcaattaac

SEQ ID NO: 333232 - DNA, 60 bp, Artificial
  Synthetic oligonucleotide
atgacaatgtcacagtggataagggctagatgtgacaaaacagacgatgggggagactgg

SEQ ID NO: 333233 - DNA, 60 bp, Artificial
  Synthetic oligonucleotide
atgacacagcctctagatcccggttctcttcctatcgcgccgtcaaagacagatctttgc

SEQ ID NO: 333234 - DNA, 60 bp, Artificial
  Synthetic oligonucleotide
atgacacatatggagacacatgggaaggagtagaggcaattatcaggatgctacaacaat

SEQ ID NO: 333235 - DNA, 56 bp, Artificial
  Synthetic oligonucleotide
atgacaccactgcgttcactaggattactgactcccccttaacgtattccacctac

SEQ ID NO: 333236 - DNA, 60 bp, Artificial
  Synthetic oligonucleotide
atgacacctggaataaagttgagggccgtgttgactatcatggtgcatattatatggaag

SEQ ID NO: 333237 - DNA, 55 bp, Artificial
  Synthetic oligonucleotide
atgacacgctcaaagccttacgcattacaaaaaacctaaattgataactcgttta

SEQ ID NO: 333238 - DNA, 60 bp, Artificial
  Synthetic oligonucleotide
atgacacgtaccaccaagtcttcgtggagaactcagacttcaccactgatatcgatcact

SEQ ID NO: 333239 - DNA, 60 bp, Artificial
  Synthetic oligonucleotide
atgacacgtgcaagaaattggtgcggaacactaaatgcaattccagatggatttgacgga

SEQ ID NO: 333240 - DNA, 54 bp, Artificial
  Synthetic oligonucleotide
atgacactggatgtgcgtggtacgagctaaccccttccgaaacaactgtcaggt

SEQ ID NO: 333241 - DNA, 60 bp, Artificial
  Synthetic oligonucleotide
atgacactttgttacctggaaacagcactattttaaacgagtatgatgcagtgactatga

SEQ ID NO: 333242 - DNA, 59 bp, Artificial
  Synthetic oligonucleotide
atgacagatggaccgagtaatgaacaggcctcatacaagattttcaagatagaaaaggg

SEQ ID NO: 333243 - DNA, 55 bp, Artificial
  Synthetic oligonucleotide
atgacagcaatcatccaagaataagctcagaggtacacatcccactaagagaagc

SEQ ID NO: 333244 - DNA, 60 bp, Artificial
  Synthetic oligonucleotide
atgacagcatgtcagggagtgggaggacctagccacaaagcaagagtgttagctgaggca

SEQ ID NO: 333245 - DNA, 53 bp, Artificial
  Synthetic oligonucleotide
atgacagcggtgggttgtcttatgcaacgataaagtatgcgaatgagaccaca

SEQ ID NO: 333246 - DNA, 60 bp, Artificial
  Synthetic oligonucleotide
atgacagtcgcaccgcaatgcatggcgacaccagttgtagaatgtaatgcaacaattaag

SEQ ID NO: 333247 - DNA, 55 bp, Artificial
  Synthetic oligonucleotide
atgacagtggcataggaggcccatactgcacatacgcagatacatggtacaaagg

SEQ ID NO: 333248 - DNA, 55 bp, Artificial
  Synthetic oligonucleotide
atgacagttgtcttcctgtgacgccatttcccaacgaacagtaataccgtccgac

SEQ ID NO: 333249 - DNA, 60 bp, Artificial
  Synthetic oligonucleotide
atgacataactgtgtgtccattaccgcgtgatgtgcagccatttcgggcgaagatcgtgt

SEQ ID NO: 333250 - DNA, 60 bp, Artificial
  Synthetic oligonucleotide
atgacatcgatcgtactcttattatggcacggtccataatgagggtcgaacgtccagaag

SEQ ID NO: 333251 - DNA, 60 bp, Artificial
  Synthetic oligonucleotide
atgacatcgctcctatgttcaggaatgctcctgacaactgtctcttcgatgagtattgga

SEQ ID NO: 333252 - DNA, 57 bp, Artificial
  Synthetic oligonucleotide
atgacatctacggaatccccaagcaggatgacgttctctacctgctaatccattcgg

SEQ ID NO: 333253 - DNA, 57 bp, Artificial
  Synthetic oligonucleotide
atgacatgccctttcaaggggttcgtgtagcgaccatttccgtatgccgattcccta

SEQ ID NO: 333254 - DNA, 50 bp, Artificial
  Synthetic oligonucleotide
atgacatgtatcgtaaaaagccaataatttatatgatagggtcggcacct

SEQ ID NO: 333255 - DNA, 59 bp, Artificial
  Synthetic oligonucleotide
atgacatgtttagctaggataatgattaaacctagatgtatactctccgattctacctt

SEQ ID NO: 333256 - DNA, 55 bp, Artificial
  Synthetic oligonucleotide
atgacattaagagcctctgacttactgcctgcgttaagcgccttggcgtaagcgt

SEQ ID NO: 333257 - DNA, 53 bp, Artificial
  Synthetic oligonucleotide
atgacattctactggaccatagtgaaaccgggagaagcaataacatttgagtc

SEQ ID NO: 333258 - DNA, 60 bp, Artificial
  Synthetic oligonucleotide
atgacattgagctgttcaatcatgcacgtgatgacatgaggcagcttcgagctctgctga

SEQ ID NO: 333259 - DNA, 55 bp, Artificial
  Synthetic oligonucleotide
atgaccaaagacgctgaaagggggaaactaaaacgcagagcaattgcaaccccag

SEQ ID NO: 333260 - DNA, 55 bp, Artificial
  Synthetic oligonucleotide
atgaccaacaaagtgtgtcgctacatattgagatcgaaagtcaagggattggtgc

SEQ ID NO: 333261 - DNA, 60 bp, Artificial
  Synthetic oligonucleotide
atgaccaacagagtgtctcattgcacatagaaattgaaagtcaaggcattggtgctgatg

SEQ ID NO: 333262 - DNA, 55 bp, Artificial
  Synthetic oligonucleotide
atgaccaaccagtgggagcccactactctcaatgcctggggtcgcgaggaggcgt

SEQ ID NO: 333263 - DNA, 54 bp, Artificial
  Synthetic oligonucleotide
atgaccaacctactagagaaccccggacacaaaccccccctgcaagcacaggtg

SEQ ID NO: 333264 - DNA, 51 bp, Artificial
  Synthetic oligonucleotide
atgaccaactcattatgaagaatcacttaagggacctaatgggtatccctt

SEQ ID NO: 333265 - DNA, 58 bp, Artificial
  Synthetic oligonucleotide
atgaccaatttcgtaaaaatattgctgcgcctaacgcggttaggtgcaataatacata

SEQ ID NO: 333266 - DNA, 57 bp, Artificial
  Synthetic oligonucleotide
atgaccacacagtggcagtttcaaaaagacttggctgactatccgttgtttaactgg

SEQ ID NO: 333267 - DNA, 60 bp, Artificial
  Synthetic oligonucleotide
atgaccacagaactaagagatagacagcagagggtctatgcacttttttataagcttgat

SEQ ID NO: 333268 - DNA, 55 bp, Artificial
  Synthetic oligonucleotide
atgaccacagaattgagagataagaagcacaaggtctatgcacttttttatagtc

SEQ ID NO: 333269 - DNA, 56 bp, Artificial
  Synthetic oligonucleotide
atgaccacataagtaattatgtggccctaatgacctagcccaaatagttttgccgg

SEQ ID NO: 333270 - DNA, 54 bp, Artificial
  Synthetic oligonucleotide
atgaccaccactatgtttaacctaaaagttccgtacgaacagtttcaactgcac

SEQ ID NO: 333271 - DNA, 60 bp, Artificial
  Synthetic oligonucleotide
atgaccacgatacggacgagaagtagccaaatcagtatgtagcaaggcttgtaccgtgta

SEQ ID NO: 333272 - DNA, 55 bp, Artificial
  Synthetic oligonucleotide
atgaccagaatggagggcttgttgctaaacttgttgctactgatgatcggacagt

SEQ ID NO: 333273 - DNA, 53 bp, Artificial
  Synthetic oligonucleotide
atgaccataatgaatacagagacgaagcactaaacaaccgatttcagatcaaa

SEQ ID NO: 333274 - DNA, 54 bp, Artificial
  Synthetic oligonucleotide
atgaccatcgatttttgtttaacggtaagcaggtggacgtgtccaacggacaac

SEQ ID NO: 333275 - DNA, 60 bp, Artificial
  Synthetic oligonucleotide
atgaccatctgaaagaaaagtcctcacttaggtatggcaatgtgcttgacgtcaattcaa

SEQ ID NO: 333276 - DNA, 60 bp, Artificial
  Synthetic oligonucleotide
atgaccatgatatttacagagacgaagcaatcaacaatagattccagatacaaggggtta

SEQ ID NO: 333277 - DNA, 60 bp, Artificial
  Synthetic oligonucleotide
atgacccaaagtcaactgtgcaaatcccagcatgggtgaccatgcaaggacctgaaggta

SEQ ID NO: 333278 - DNA, 60 bp, Artificial
  Synthetic oligonucleotide
atgacccaggacgggggagaggacacacggatctgcacgctagacgacgcagcagaccac

SEQ ID NO: 333279 - DNA, 57 bp, Artificial
  Synthetic oligonucleotide
atgacccataaagggaggatcggacgatacaaggtagaaccatatcatggacgggtc

SEQ ID NO: 333280 - DNA, 55 bp, Artificial
  Synthetic oligonucleotide
atgacccattagttttgaaccgtctactagtctccggctttgtgctttcgatccc

SEQ ID NO: 333281 - DNA, 52 bp, Artificial
  Synthetic oligonucleotide
atgacccccccaccgtgtcggggtgtgcattgcccccaaaggggttgccacc

SEQ ID NO: 333282 - DNA, 60 bp, Artificial
  Synthetic oligonucleotide
atgaccccgagacatcgggcaatttatccggaaggttggatgctgagatatgcgtaaaca

SEQ ID NO: 333283 - DNA, 55 bp, Artificial
  Synthetic oligonucleotide
atgacccgacttattgtatgtctgcagtgactcgattcagtgagcatcttgtacg

SEQ ID NO: 333284 - DNA, 55 bp, Artificial
  Synthetic oligonucleotide
atgaccctactacgcaacgcctggtatgggcctgcattgggttggaagtgggtag

SEQ ID NO: 333285 - DNA, 51 bp, Artificial
  Synthetic oligonucleotide
atgaccctagagaactgcagcaggtatagagcatgggcatcaacaacaacc

SEQ ID NO: 333286 - DNA, 59 bp, Artificial
  Synthetic oligonucleotide
atgaccctgaccatcaagtcctaacggttaactattcagggagtgccaccttctgcata

SEQ ID NO: 333287 - DNA, 59 bp, Artificial
  Synthetic oligonucleotide
atgaccgaacctgttgcgttaatcggaacttgttgcctatattctatgacgcaatggtc

SEQ ID NO: 333288 - DNA, 55 bp, Artificial
  Synthetic oligonucleotide
atgaccgaacgaaagctccaagagatcgtattgcacttaggatgcccggcttgga

SEQ ID NO: 333289 - DNA, 58 bp, Artificial
  Synthetic oligonucleotide
atgaccgaagctgggcaaacgaatgggttatatggagtaatgtcagtagttgtagtcc

SEQ ID NO: 333290 - DNA, 59 bp, Artificial
  Synthetic oligonucleotide
atgaccgacccagttgcgtttatcggaacctgctgtctgtactcgataacgcaatggtc

SEQ ID NO: 333291 - DNA, 60 bp, Artificial
  Synthetic oligonucleotide
atgaccgaccctgtcgcgttaatcggcacttgttgcctgtactctatgacgcagtggtcg

SEQ ID NO: 333292 - DNA, 55 bp, Artificial
  Synthetic oligonucleotide
atgaccgagccgacaccgacggaaccggaacccttgctgaccgcagaggatttgg

SEQ ID NO: 333293 - DNA, 54 bp, Artificial
  Synthetic oligonucleotide
atgaccgatgaggtcagtccaggttgtgcattgaagagatcagtaaggtccatg

SEQ ID NO: 333294 - DNA, 59 bp, Artificial
  Synthetic oligonucleotide
atgaccgcagaaataagagataagcagcggaaggtctattcacttttttataggctcga

SEQ ID NO: 333295 - DNA, 55 bp, Artificial
  Synthetic oligonucleotide
atgaccgccccgtcgccctaataatgtcccgcctctctcgcgaccctagagactg

SEQ ID NO: 333296 - DNA, 55 bp, Artificial
  Synthetic oligonucleotide
atgaccgcttttgatgaggcaaatcttttgttagtggccgttacagagggtgtcc

SEQ ID NO: 333297 - DNA, 55 bp, Artificial
  Synthetic oligonucleotide
atgaccgggttgaagtgaccaatgctacagagttagttcaaagctcctcaacggg

SEQ ID NO: 333298 - DNA, 60 bp, Artificial
  Synthetic oligonucleotide
atgaccgtatgatcggacagtatatcgttgtctcgccaaactctgtgctgaagaatgcca

SEQ ID NO: 333299 - DNA, 55 bp, Artificial
  Synthetic oligonucleotide
atgaccgtggtggcctctgtctccgccccaggggaattctcgggtcctctgatca

SEQ ID NO: 333300 - DNA, 55 bp, Artificial
  Synthetic oligonucleotide
atgaccgtttacccaatgtaagcggtcgccaagtaaggcgtacaccacatcgcgt

SEQ ID NO: 333301 - DNA, 59 bp, Artificial
  Synthetic oligonucleotide
atgacctacaagataataggtgttcctggcgtgtgcccgcccgaaatcattcgacactg

SEQ ID NO: 333302 - DNA, 53 bp, Artificial
  Synthetic oligonucleotide
atgacctacctttgttgtgtaccttaaacaagagccatctttacattaagggg

SEQ ID NO: 333303 - DNA, 51 bp, Artificial
  Synthetic oligonucleotide
atgacctgcatatactgaatgcgcccaattttaagctgcgcctggctcatt

SEQ ID NO: 333304 - DNA, 60 bp, Artificial
  Synthetic oligonucleotide
atgacctggctccatggattaggacagtacatctataacacttatggggatactagggaa

SEQ ID NO: 333305 - DNA, 60 bp, Artificial
  Synthetic oligonucleotide
atgaccttggaccagcaacagcccagatggctcttcagctatttatcaaggattatcgat

SEQ ID NO: 333306 - DNA, 60 bp, Artificial
  Synthetic oligonucleotide
atgaccttggaccagcaacggctcaaatggctcttcagctgtttatcaaggattacagat

SEQ ID NO: 333307 - DNA, 60 bp, Artificial
  Synthetic oligonucleotide
atgaccttgttcaatgcatatcatggagaggtggaggtgccatggcttgagaagggaagg

SEQ ID NO: 333308 - DNA, 58 bp, Artificial
  Synthetic oligonucleotide
atgacgaacgtccagtcccgtccatgactaagattgcttccggtcaacagacgttatc

SEQ ID NO: 333309 - DNA, 60 bp, Artificial
  Synthetic oligonucleotide
atgacgacatggaagcgaaatatcgaactgatatgacgagtagtaatgttgaatttctac

SEQ ID NO: 333310 - DNA, 60 bp, Artificial
  Synthetic oligonucleotide
atgacgacctcgattattaaagcgacaaaatagacactatggctgtgattgtttcagtac

SEQ ID NO: 333311 - DNA, 52 bp, Artificial
  Synthetic oligonucleotide
atgacgacttacctttatttcgtcaagttgaaggtttagcttttggttatta

SEQ ID NO: 333312 - DNA, 56 bp, Artificial
  Synthetic oligonucleotide
atgacgagggaggttcaggggatgtagatatacattatacatcattgttgcgttct

SEQ ID NO: 333313 - DNA, 60 bp, Artificial
  Synthetic oligonucleotide
atgacgatgaactgcagatgcacatactccgtgggccgatacattttcagagacgggcaa

SEQ ID NO: 333314 - DNA, 53 bp, Artificial
  Synthetic oligonucleotide
atgacgcaattcaatttttggtctggaactcagaattaaccgctaccgacagg

SEQ ID NO: 333315 - DNA, 57 bp, Artificial
  Synthetic oligonucleotide
atgacgcagtccgttcctggtgccgcagacaccagaatcccaaaacctaggcgtagg

SEQ ID NO: 333316 - DNA, 60 bp, Artificial
  Synthetic oligonucleotide
atgacgcagtggtctatcttcatacagctacggctgagtctggcgcttatatgagccgct

SEQ ID NO: 333317 - DNA, 55 bp, Artificial
  Synthetic oligonucleotide
atgacgcatgggaatacaagaagactttagctatgttaaatgccgagaggactat

SEQ ID NO: 333318 - DNA, 52 bp, Artificial
  Synthetic oligonucleotide
atgacgcatttttttggaatactccagtcccaagaaacactccacaaagcac

SEQ ID NO: 333319 - DNA, 60 bp, Artificial
  Synthetic oligonucleotide
atgacgccataatagtgtatgacaacacccggaattggatcagcgaagctcagaattcag

SEQ ID NO: 333320 - DNA, 55 bp, Artificial
  Synthetic oligonucleotide
atgacgccctcaggtttcaacttgactcgacagtgaacgcttcgtacgctgggga

SEQ ID NO: 333321 - DNA, 51 bp, Artificial
  Synthetic oligonucleotide
atgacgccctctagcggcttccttacctccgcgtccctgacaacctcgcgg

SEQ ID NO: 333322 - DNA, 60 bp, Artificial
  Synthetic oligonucleotide
atgacgccgctgctacagtagctgtgaatactctcaaagagatgtccaatctaattgaga

SEQ ID NO: 333323 - DNA, 52 bp, Artificial
  Synthetic oligonucleotide
atgacgccgtgagtgatcgcaaagggctactagaccagcaaaacgctcacat

SEQ ID NO: 333324 - DNA, 60 bp, Artificial
  Synthetic oligonucleotide
atgacgccgttgaactatcacaaagcaagattcgctatcgtacctcaacaaatggcaacg

SEQ ID NO: 333325 - DNA, 60 bp, Artificial
  Synthetic oligonucleotide
atgacgcgcctagtgcagtgcgatgagacggtgccggatggagcgttcgtcactgcaggg

SEQ ID NO: 333326 - DNA, 55 bp, Artificial
  Synthetic oligonucleotide
atgacgcgctgggaggacatgggtcagtacgggaacattctgcgtggcgagtcgc

SEQ ID NO: 333327 - DNA, 60 bp, Artificial
  Synthetic oligonucleotide
atgacgctgccaatatttggctgccatactttaatcgtgtcatgtactctgcgcttccga

SEQ ID NO: 333328 - DNA, 60 bp, Artificial
  Synthetic oligonucleotide
atgacggacgaatgtccgatctccgatctgcttgcccatgattcgttcggacctattgcc

SEQ ID NO: 333329 - DNA, 55 bp, Artificial
  Synthetic oligonucleotide
atgacggagtagcggtgctattgaaccgttatactgattggaaatgcaggtccgg

SEQ ID NO: 333330 - DNA, 58 bp, Artificial
  Synthetic oligonucleotide
atgacggggaagatatcgtcattgtggacgacttttatgggtggctaccttattgcga

SEQ ID NO: 333331 - DNA, 53 bp, Artificial
  Synthetic oligonucleotide
atgacggggaagcagtgtgggacccgaccgacgttgcggaaaacccagtcgcc

SEQ ID NO: 333332 - DNA, 58 bp, Artificial
  Synthetic oligonucleotide
atgacggggtatctgccaggcggtctgttacatgatactcttggcgggattgtcatct

SEQ ID NO: 333333 - DNA, 53 bp, Artificial
  Synthetic oligonucleotide
atgacgggtgaaatgcgccgttacttcgatgcgaacgatgaagcttatgagtc

SEQ ID NO: 333334 - DNA, 59 bp, Artificial
  Synthetic oligonucleotide
atgacggtatcggaacagtatgggattatttcggactgcctctaatcaaagagactaca

SEQ ID NO: 333335 - DNA, 60 bp, Artificial
  Synthetic oligonucleotide
atgacggtcaattagagcacataatatctcagatggcatatataactggctctaccacag

SEQ ID NO: 333336 - DNA, 52 bp, Artificial
  Synthetic oligonucleotide
atgacggtcgttcccaaccttttcggccttatcctgttcggggtgtccttca

SEQ ID NO: 333337 - DNA, 60 bp, Artificial
  Synthetic oligonucleotide
atgacgtaaagcgaattttgaatgctccaggagtgtctaatgcggagaagagagttttga

SEQ ID NO: 333338 - DNA, 60 bp, Artificial
  Synthetic oligonucleotide
atgacgtaagcatgataaaaactgaggccagatataccaagaatagtactggagtgttct

SEQ ID NO: 333339 - DNA, 60 bp, Artificial
  Synthetic oligonucleotide
atgacgtataggtgttggctctatgccacgacatttgtattgtcaggagctgtgaccatt

SEQ ID NO: 333340 - DNA, 56 bp, Artificial
  Synthetic oligonucleotide
atgacgtatcccactacagaactatctacgcgattacaatgttacatcatgctcgc

SEQ ID NO: 333341 - DNA, 57 bp, Artificial
  Synthetic oligonucleotide
atgacgtatctgactctaacttaaataagttggttcacgtagcaccgagtaatagta

SEQ ID NO: 333342 - DNA, 56 bp, Artificial
  Synthetic oligonucleotide
atgacgtcaatgtctctgggacattattgaatgattcagaactgaacggcgattca

SEQ ID NO: 333343 - DNA, 53 bp, Artificial
  Synthetic oligonucleotide
atgacgtcctagtcaacggtgcttcaagccccccccatccgacccaaacaacg

SEQ ID NO: 333344 - DNA, 60 bp, Artificial
  Synthetic oligonucleotide
atgacgtgacagatccttgctgggtgtatatggacacatatttaagaaatggattagatg

SEQ ID NO: 333345 - DNA, 58 bp, Artificial
  Synthetic oligonucleotide
atgacgtgtccgggaagcagccttgtccccgattccttaatcctgccagtatgcgaac

SEQ ID NO: 333346 - DNA, 59 bp, Artificial
  Synthetic oligonucleotide
atgacgttataccaggcctcattgctgtacactcttgggcttaggtcaagttgaccaca

SEQ ID NO: 333347 - DNA, 52 bp, Artificial
  Synthetic oligonucleotide
atgacgttcacacgcactaggattcagaatgacagcgagattgttcagagtc

SEQ ID NO: 333348 - DNA, 51 bp, Artificial
  Synthetic oligonucleotide
atgacgttgatcagagtttaatcattgccgccagaaatatagttaggagag

SEQ ID NO: 333349 - DNA, 56 bp, Artificial
  Synthetic oligonucleotide
atgactaacccacccttagacttagattgcacagggataccaggaacaccatttaa

SEQ ID NO: 333350 - DNA, 59 bp, Artificial
  Synthetic oligonucleotide
atgactaactcacaagacacagagctctcctttacaattactggggacaacaccaaatg

SEQ ID NO: 333351 - DNA, 56 bp, Artificial
  Synthetic oligonucleotide
atgactaattcgggcgcgcaattagcgggcggatcccggtttcggtacagagttca

SEQ ID NO: 333352 - DNA, 55 bp, Artificial
  Synthetic oligonucleotide
atgactaccttagcgctgccaacatgctttacccaattccagccaatgctaccaa

SEQ ID NO: 333353 - DNA, 60 bp, Artificial
  Synthetic oligonucleotide
atgactacgaatcaagtcattgtgaataatgcctactcgtttcgagtagaaaggactgcg

SEQ ID NO: 333354 - DNA, 55 bp, Artificial
  Synthetic oligonucleotide
atgactacgaggcagcttggaagattcttgcagatcggaaaagagtcgtctcggt

SEQ ID NO: 333355 - DNA, 55 bp, Artificial
  Synthetic oligonucleotide
atgactactgatggtgtaacgagattgaaggaagacatacttgtagttactgaca

SEQ ID NO: 333356 - DNA, 60 bp, Artificial
  Synthetic oligonucleotide
atgactagccaatcattgcatgaaaatcagtttgcccctgattttgttatgactcacaac

SEQ ID NO: 333357 - DNA, 52 bp, Artificial
  Synthetic oligonucleotide
atgactaggtactccgcccctcctggggacccgcccaaaccagagtacgact

SEQ ID NO: 333358 - DNA, 60 bp, Artificial
  Synthetic oligonucleotide
atgactatacctggcaaacatcctgcaacccatcagtgttttacacatatggcgacgctc

SEQ ID NO: 333359 - DNA, 56 bp, Artificial
  Synthetic oligonucleotide
atgactatatcataccaagaggtagagataaccttttagtgtacctggtaagaaaa

SEQ ID NO: 333360 - DNA, 55 bp, Artificial
  Synthetic oligonucleotide
atgactatcaacaagcaataactgacgtgtgtcagttctctgagtacactcccag

SEQ ID NO: 333361 - DNA, 55 bp, Artificial
  Synthetic oligonucleotide
atgactatccacaatactcagaagaatcaaggttgaacagggaggaaatagacgg

SEQ ID NO: 333362 - DNA, 60 bp, Artificial
  Synthetic oligonucleotide
atgactatcccaaatattcagaagagtccagcttgaacagagaggaaatagacggtgtga

SEQ ID NO: 333363 - DNA, 59 bp, Artificial
  Synthetic oligonucleotide
atgactcaaaaaatgcggagctaagacaatcggaagtctctaaaattccagagctagaa

SEQ ID NO: 333364 - DNA, 56 bp, Artificial
  Synthetic oligonucleotide
atgactcaccgcctccccctggtgactccccgtcgcaccctcctggacgcagccca

SEQ ID NO: 333365 - DNA, 55 bp, Artificial
  Synthetic oligonucleotide
atgactcagtaatagaaatcaacaaggtatgtgaaaaccttaatatgtatattgc

SEQ ID NO: 333366 - DNA, 50 bp, Artificial
  Synthetic oligonucleotide
atgactcagtggtttaggaaccacatgcacctgactggtgaagaagcgtt

SEQ ID NO: 333367 - DNA, 59 bp, Artificial
  Synthetic oligonucleotide
atgactcagttcgtggctaagaccttgatcataacaagtaaccgcgaacctcgtgattg

SEQ ID NO: 333368 - DNA, 58 bp, Artificial
  Synthetic oligonucleotide
atgactcatgtaacttgtgcaaatgtctaagtggatagtccgcatctgatgttgttgg

SEQ ID NO: 333369 - DNA, 60 bp, Artificial
  Synthetic oligonucleotide
atgactccagctgacaagtcagccacatttgaagcagtcacatgggagaatgtaacattc

SEQ ID NO: 333370 - DNA, 59 bp, Artificial
  Synthetic oligonucleotide
atgactcggtggtcctctgtagtgattaccgacagagtcgtaatgcggcggccttaatc

SEQ ID NO: 333371 - DNA, 59 bp, Artificial
  Synthetic oligonucleotide
atgactctaactcaacctgcacatacttatgacactgttacccttcctgtattatgttt

SEQ ID NO: 333372 - DNA, 50 bp, Artificial
  Synthetic oligonucleotide
atgactctcaatttgtgtcgaccttgtatttgtggccagtgttaattgtg

SEQ ID NO: 333373 - DNA, 57 bp, Artificial
  Synthetic oligonucleotide
atgactctggtgttaaaaacaatcttttgggtaaagctgtgactattgaccaggcac

SEQ ID NO: 333374 - DNA, 60 bp, Artificial
  Synthetic oligonucleotide
atgactgacaccagaaccacagctagattggatgaagatgtgaataagcttagaatgatg

SEQ ID NO: 333375 - DNA, 60 bp, Artificial
  Synthetic oligonucleotide
atgactgattggtcagggtatagcggaagtttcgttcaacatcctgagctaacaggattg

SEQ ID NO: 333376 - DNA, 60 bp, Artificial
  Synthetic oligonucleotide
atgactgctctctggagggtttgattctaggtaatcccaaatgcgatctttatctgaatg

SEQ ID NO: 333377 - DNA, 55 bp, Artificial
  Synthetic oligonucleotide
atgactggactaagggatctgatactcgattgatgccgacactgtcagtgggtgg

SEQ ID NO: 333378 - DNA, 51 bp, Artificial
  Synthetic oligonucleotide
atgactggcagcaggtcccattctgttcaaaccattttacggaactgatta

SEQ ID NO: 333379 - DNA, 60 bp, Artificial
  Synthetic oligonucleotide
atgactgtcatgcaatttgtgtgtttaaatttgagaatgcttggtggtgctttgatgatg

SEQ ID NO: 333380 - DNA, 56 bp, Artificial
  Synthetic oligonucleotide
atgactgtcccaacgctagcattgtgtacgaggcggatactatgatcttacacctt

SEQ ID NO: 333381 - DNA, 55 bp, Artificial
  Synthetic oligonucleotide
atgactgtctcgggagtgatacatgcgaaggctaattccaatgatgatcctatgg

SEQ ID NO: 333382 - DNA, 60 bp, Artificial
  Synthetic oligonucleotide
atgactgtgagaaggacaatgcaatggtgtacacgttgtggacagacatatatgtcatgg

SEQ ID NO: 333383 - DNA, 59 bp, Artificial
  Synthetic oligonucleotide
atgactgtgagtactattcatagttgtgagcgctgtttagagggtcgtactagtttaag

SEQ ID NO: 333384 - DNA, 60 bp, Artificial
  Synthetic oligonucleotide
atgactgtgatatatctgtctgtccattagatactacaagtaatggaatcggatgttcac

SEQ ID NO: 333385 - DNA, 53 bp, Artificial
  Synthetic oligonucleotide
atgactgtggacctctgctcggtgacatccagcgggtcctaagtttcttatct

SEQ ID NO: 333386 - DNA, 50 bp, Artificial
  Synthetic oligonucleotide
atgactgtgtcctgtcagtgccagaggtgcgcgatatttcaaaactatcg

SEQ ID NO: 333387 - DNA, 60 bp, Artificial
  Synthetic oligonucleotide
atgactgtttacatcgtttccgccatgactcaatccgtgtcttacaatgcgtatgacacc

SEQ ID NO: 333388 - DNA, 59 bp, Artificial
  Synthetic oligonucleotide
atgacttacttattagaaagtctaaccataatttccttgtgcaggctagtaatgtgcaa

SEQ ID NO: 333389 - DNA, 56 bp, Artificial
  Synthetic oligonucleotide
atgacttatatgtaggatcagatttaccactggcagaacataggaaaagggttgaa

SEQ ID NO: 333390 - DNA, 60 bp, Artificial
  Synthetic oligonucleotide
atgacttcaacaatcagttctatgaccacaacctgagagctccgtggagcgtaggtatga

SEQ ID NO: 333391 - DNA, 59 bp, Artificial
  Synthetic oligonucleotide
atgacttcgagagagaagggtactctctagtaggaatagatcctttccgtctgctgcaa

SEQ ID NO: 333392 - DNA, 58 bp, Artificial
  Synthetic oligonucleotide
atgacttcgatatacatgaaacaagctggttaaccgacgtttatcacagaacaccaac

SEQ ID NO: 333393 - DNA, 55 bp, Artificial
  Synthetic oligonucleotide
atgacttctccgctagactgctcaaggacaccccatttgtgagacaggatgccta

SEQ ID NO: 333394 - DNA, 55 bp, Artificial
  Synthetic oligonucleotide
atgacttgaaccagtagaactgacttgcataccaacaccggctgctaaagtctca

SEQ ID NO: 333395 - DNA, 53 bp, Artificial
  Synthetic oligonucleotide
atgacttggcaagagtgggaaggaaaggttgacttcctagaggcaaatataac

SEQ ID NO: 333396 - DNA, 60 bp, Artificial
  Synthetic oligonucleotide
atgacttggccgagatcattgttttccgatgctgttgcaacgcatcgaggattgtacctt

SEQ ID NO: 333397 - DNA, 60 bp, Artificial
  Synthetic oligonucleotide
atgacttggcctcgctctctatttgctgaagcagttcatgcccacagaggattgtacctg

SEQ ID NO: 333398 - DNA, 55 bp, Artificial
  Synthetic oligonucleotide
atgacttgggtcttaaataccctcaagaaacgccaagtcgctggttgtaagcgag

SEQ ID NO: 333399 - DNA, 55 bp, Artificial
  Synthetic oligonucleotide
atgacttgttaaccaagtggctataaaggaaggcgagttgtcatgtcatgtcagc

SEQ ID NO: 333400 - DNA, 56 bp, Artificial
  Synthetic oligonucleotide
atgactttaatgtagaggatgcttgtgaggaggtctatcttaacccgaagggtaag

SEQ ID NO: 333401 - DNA, 57 bp, Artificial
  Synthetic oligonucleotide
atgactttactctcagaatgccggtgactcctagtaagtacacgccccatggagtag

SEQ ID NO: 333402 - DNA, 60 bp, Artificial
  Synthetic oligonucleotide
atgactttgctatgcgtggtatgtccggctttaccgatgacgcatttaatgctgtaggtc

SEQ ID NO: 333403 - DNA, 59 bp, Artificial
  Synthetic oligonucleotide
atgactttgtactcactggcccctttagctacaaagatgacctagcaaacactacacta

SEQ ID NO: 333404 - DNA, 56 bp, Artificial
  Synthetic oligonucleotide
atgacttttagaaatcgtggctggtgttttacgataaacaatcctacggaagatga

SEQ ID NO: 333405 - DNA, 54 bp, Artificial
  Synthetic oligonucleotide
atgacttttggtgaaagtccgagaaatgtcgagcgtatatatctgagatctaga

SEQ ID NO: 333406 - DNA, 57 bp, Artificial
  Synthetic oligonucleotide
atgagaaaacacccgaggagccaacgagtgtgggaattactatagaaggggtcatga

SEQ ID NO: 333407 - DNA, 55 bp, Artificial
  Synthetic oligonucleotide
atgagaaaccatcaagagtggttggaaatctcggtggagtccgagtcttgttgac

SEQ ID NO: 333408 - DNA, 55 bp, Artificial
  Synthetic oligonucleotide
atgagaaacgagagttgctgagaagctggcacttaccttcagtgttccacctacg

SEQ ID NO: 333409 - DNA, 55 bp, Artificial
  Synthetic oligonucleotide
atgagaaagactggaatcaaggtaattcaattaaagaagggcctcagcacatgac

SEQ ID NO: 333410 - DNA, 60 bp, Artificial
  Synthetic oligonucleotide
atgagaacaattgggactcatcctagctccagcgctggtctaaaagatgatcttcttgaa

SEQ ID NO: 333411 - DNA, 55 bp, Artificial
  Synthetic oligonucleotide
atgagaacatcaagatgaccgagtacttctgtcgcgctaaaagtaggtctggtgt

SEQ ID NO: 333412 - DNA, 54 bp, Artificial
  Synthetic oligonucleotide
atgagaacgtatccatagatatttgtggacacaaggctataggtacagtgttga

SEQ ID NO: 333413 - DNA, 60 bp, Artificial
  Synthetic oligonucleotide
atgagaactgacttggaattggatttctcactaccatcatctgcaagttacacatacaga

SEQ ID NO: 333414 - DNA, 55 bp, Artificial
  Synthetic oligonucleotide
atgagaacttggaaagctgcaatctgctgtgacggtaggtgttatccatctcgtt

SEQ ID NO: 333415 - DNA, 60 bp, Artificial
  Synthetic oligonucleotide
atgagaagaaactatttcacagcggaagtatcccactgcagggctactgaatacataatg

SEQ ID NO: 333416 - DNA, 55 bp, Artificial
  Synthetic oligonucleotide
atgagaagatgtgtgacgacctcaagttgtttccagaggcaccagagcccccacc

SEQ ID NO: 333417 - DNA, 57 bp, Artificial
  Synthetic oligonucleotide
atgagaagccgcaaagtaagtggtgggatggatacgagggagagaaagtagttgtta

SEQ ID NO: 333418 - DNA, 57 bp, Artificial
  Synthetic oligonucleotide
atgagaagtattgcagtaaagagggggacgttatacttaccctgggcattgtggcga

SEQ ID NO: 333419 - DNA, 59 bp, Artificial
  Synthetic oligonucleotide
atgagaataatgacaactctagttatagattaataaattgtaacacctcaaccataaca

SEQ ID NO: 333420 - DNA, 60 bp, Artificial
  Synthetic oligonucleotide
atgagaatagggactctagtgagtatagattaagacattgtaacacctcaaccataacac

SEQ ID NO: 333421 - DNA, 55 bp, Artificial
  Synthetic oligonucleotide
atgagaatcaatacggcccagatttctcaatagcccataacacagccgtctctac

SEQ ID NO: 333422 - DNA, 60 bp, Artificial
  Synthetic oligonucleotide
atgagaatcagagtcctcggatgtttctggcaatgataacatacattacaaggaaccaac

SEQ ID NO: 333423 - DNA, 60 bp, Artificial
  Synthetic oligonucleotide
atgagaatcatacagagaacgctctgttattgtatatggcatgtacacatgcctctaatc

SEQ ID NO: 333424 - DNA, 55 bp, Artificial
  Synthetic oligonucleotide
atgagaatgtggaggctatggactctagtaccctggaactaaggagcaggtactg

SEQ ID NO: 333425 - DNA, 60 bp, Artificial
  Synthetic oligonucleotide
atgagaattggcatacatcaccaaagatattggcaagaaattataagataccattgactg

SEQ ID NO: 333426 - DNA, 60 bp, Artificial
  Synthetic oligonucleotide
atgagacaacgtgtacaggctgatagaaatgttgttaattatccatcaatattgcatcca

SEQ ID NO: 333427 - DNA, 55 bp, Artificial
  Synthetic oligonucleotide
atgagacaatatatacaagtgggaaaaggagcaataccacgggaaaactaatttg

SEQ ID NO: 333428 - DNA, 60 bp, Artificial
  Synthetic oligonucleotide
atgagacaatgtgcaatggtttggaactacgggtccccttcactgactctgttgatgtta

SEQ ID NO: 333429 - DNA, 50 bp, Artificial
  Synthetic oligonucleotide
atgagacacaggttgaacatgatggaaacttcgtactcggcggagaccac

SEQ ID NO: 333430 - DNA, 57 bp, Artificial
  Synthetic oligonucleotide
atgagacagaattggtccatctgtcaggatgtgtggggccgaggcccccccgaaaat

SEQ ID NO: 333431 - DNA, 54 bp, Artificial
  Synthetic oligonucleotide
atgagacagtgtaagtggggggaaccgtctgaatgctcctctcttgcgactctg

SEQ ID NO: 333432 - DNA, 54 bp, Artificial
  Synthetic oligonucleotide
atgagacatggttcagggtggcggtgtcaagcgattccttgatatattcggata

SEQ ID NO: 333433 - DNA, 52 bp, Artificial
  Synthetic oligonucleotide
atgagacctaacagaaatcatatcaactgcaataaactgttaggagcaagaa

SEQ ID NO: 333434 - DNA, 60 bp, Artificial
  Synthetic oligonucleotide
atgagaccttgcttctgggttgaactgatcagaggaaggcccaaggagaatacgatctgg

SEQ ID NO: 333435 - DNA, 60 bp, Artificial
  Synthetic oligonucleotide
atgagacgatagtgagggaatataatgagacagtcagaattgagaaggtgattcaatggc

SEQ ID NO: 333436 - DNA, 59 bp, Artificial
  Synthetic oligonucleotide
atgagacgggtcgccgtaagagatcttctggggtgaagcaggggcgtacatctgccgcc

SEQ ID NO: 333437 - DNA, 60 bp, Artificial
  Synthetic oligonucleotide
atgagacgtcagacgacgcctccattaggcacttgggtccagccactgaggtatttgcga

SEQ ID NO: 333438 - DNA, 60 bp, Artificial
  Synthetic oligonucleotide
atgagactaaattcagaactcagtggctgtcagagagcaatgcactctatacagaaatgc

SEQ ID NO: 333439 - DNA, 58 bp, Artificial
  Synthetic oligonucleotide
atgagactcacagtcatcctgtaagtaaaaccattgagtcccatttaattaatgttaa

SEQ ID NO: 333440 - DNA, 50 bp, Artificial
  Synthetic oligonucleotide
atgagactgactgctgacgggttgattacctgtgatctataaatttttgt

SEQ ID NO: 333441 - DNA, 60 bp, Artificial
  Synthetic oligonucleotide
atgagactttcagggtcattggtggttgggccactgctaattccaagtcacagaccaata

SEQ ID NO: 333442 - DNA, 57 bp, Artificial
  Synthetic oligonucleotide
atgagagaaccaaggggaagtgacatagcaggaaccactagtacccttcaagaacaa

SEQ ID NO: 333443 - DNA, 60 bp, Artificial
  Synthetic oligonucleotide
atgagagaactcatcctccatgataaagaagaaatcatgaggatctggcgtcaggccaac

SEQ ID NO: 333444 - DNA, 59 bp, Artificial
  Synthetic oligonucleotide
atgagagaatagagtggaaagacccagatggaatgttaagggaccatataaacattctg

SEQ ID NO: 333445 - DNA, 60 bp, Artificial
  Synthetic oligonucleotide
atgagagaatcgacagtttcgagaggagagtatgaatttgtcaatcacatgggtcgaata

SEQ ID NO: 333446 - DNA, 60 bp, Artificial
  Synthetic oligonucleotide
atgagagactacatggaatctgtcatcttcagatacaattctaaaaggtttaaagagagc

SEQ ID NO: 333447 - DNA, 55 bp, Artificial
  Synthetic oligonucleotide
atgagagaggcgcgtggggctagagggcaatatgaggttgcagcggagccagagg

SEQ ID NO: 333448 - DNA, 60 bp, Artificial
  Synthetic oligonucleotide
atgagagatggttgattcatggtggtatgccatcaggctccccatgcaccactgtgctaa

SEQ ID NO: 333449 - DNA, 55 bp, Artificial
  Synthetic oligonucleotide
atgagagccctaaggctttgccgcctagggtgccgagctcgcgatggcttaggtc

SEQ ID NO: 333450 - DNA, 60 bp, Artificial
  Synthetic oligonucleotide
atgagagctaagctactaatcctgttgtgtgcgctttcagctacagatgcagacacaata

SEQ ID NO: 333451 - DNA, 60 bp, Artificial
  Synthetic oligonucleotide
atgagagctcctatcatggcgaaacacttcttatcctgataagtgtctcggggcggtagt

SEQ ID NO: 333452 - DNA, 60 bp, Artificial
  Synthetic oligonucleotide
atgagagggccgctatagatttgattcgcacccatgtcatcagaggcaaaatacgctgtg

SEQ ID NO: 333453 - DNA, 59 bp, Artificial
  Synthetic oligonucleotide
atgagaggtactctaaaattttacgttgttgctcgtgccagttctgattacatgagtta

SEQ ID NO: 333454 - DNA, 55 bp, Artificial
  Synthetic oligonucleotide
atgagagtactgttttaggcagagacatagagcaagtaacaggcaaatctgtttt

SEQ ID NO: 333455 - DNA, 60 bp, Artificial
  Synthetic oligonucleotide
atgagagttcttgattcaatatcagtattgggagtcaaaatcatgccgcgcgcacatgtg

SEQ ID NO: 333456 - DNA, 50 bp, Artificial
  Synthetic oligonucleotide
atgagatacatacgacctgtttgtcgcgaatcgtacagctctgataacat

SEQ ID NO: 333457 - DNA, 57 bp, Artificial
  Synthetic oligonucleotide
atgagatactactgcagccggcacgtttggtattgttgggtcggaaaggaggcggta

SEQ ID NO: 333458 - DNA, 51 bp, Artificial
  Synthetic oligonucleotide
atgagatagctgcatcatcaacgtttaaaaattatgtgtctagattatctg

SEQ ID NO: 333459 - DNA, 60 bp, Artificial
  Synthetic oligonucleotide
atgagatatattcgcgcaatgggcaggaccctttttggtcaggttacaagagacacgcag

SEQ ID NO: 333460 - DNA, 60 bp, Artificial
  Synthetic oligonucleotide
atgagatatcagtgacaggagtacgcggttggacatgtagaggaataggtggcataagtc

SEQ ID NO: 333461 - DNA, 60 bp, Artificial
  Synthetic oligonucleotide
atgagatatctgggtcactgaagtatattgatggtttagagacataccatgaacaactga

SEQ ID NO: 333462 - DNA, 51 bp, Artificial
  Synthetic oligonucleotide
atgagatcaccagtgttcactgacaattcaacgcccccagcggtgcctcag

SEQ ID NO: 333463 - DNA, 55 bp, Artificial
  Synthetic oligonucleotide
atgagatccacgaaccacggagatcacagcgacccagactcactcaatacgccac

SEQ ID NO: 333464 - DNA, 60 bp, Artificial
  Synthetic oligonucleotide
atgagatcgaagctataaacgaagcattaaataagtttcagatatatttggatagagact

SEQ ID NO: 333465 - DNA, 55 bp, Artificial
  Synthetic oligonucleotide
atgagatcgctgaatctctaagagcagttattccaccaactactgcaccagtccc

SEQ ID NO: 333466 - DNA, 60 bp, Artificial
  Synthetic oligonucleotide
atgagatcgttaataatgaaacgactagaatcttgactagtcaaattgaacacagtcaac

SEQ ID NO: 333467 - DNA, 55 bp, Artificial
  Synthetic oligonucleotide
atgagatgctcgagattgctccgctgattgagtctgtttatgcgtctgagctgtc

SEQ ID NO: 333468 - DNA, 57 bp, Artificial
  Synthetic oligonucleotide
atgagatgggttatgctaccttcgttacaaccgtcgcttaaactggcattagaagaa

SEQ ID NO: 333469 - DNA, 56 bp, Artificial
  Synthetic oligonucleotide
atgagatgggttatgttaccctcgttacagccgtcacttaagttggcgttggaaga

SEQ ID NO: 333470 - DNA, 56 bp, Artificial
  Synthetic oligonucleotide
atgagatgggttatgttaccttcgttgcaaccgtcgcttaaattggcgttggagga

SEQ ID NO: 333471 - DNA, 58 bp, Artificial
  Synthetic oligonucleotide
atgagatgtattgggtgtcaggaacaagaactgatgtggtgggcaccgtgtcaaatgt

SEQ ID NO: 333472 - DNA, 60 bp, Artificial
  Synthetic oligonucleotide
atgagatgttcactcgcagctcgagttttcttctaccagccaggtatataccaaacgtcg

SEQ ID NO: 333473 - DNA, 57 bp, Artificial
  Synthetic oligonucleotide
atgagattatgcatgaatatggttacctcctcgggacacacttcaataggggattga

SEQ ID NO: 333474 - DNA, 60 bp, Artificial
  Synthetic oligonucleotide
atgagattgaaaggttactcacatgtggatcgccacatgcatccagatgcttccgtaatg

SEQ ID NO: 333475 - DNA, 57 bp, Artificial
  Synthetic oligonucleotide
atgagattgagttcatcgaaccaatcaaccctaccattaacgtttgagtgttagtta

SEQ ID NO: 333476 - DNA, 52 bp, Artificial
  Synthetic oligonucleotide
atgagattgtccgcaatctgatctcccgtgaggaggtgatgggtaatttgat

SEQ ID NO: 333477 - DNA, 58 bp, Artificial
  Synthetic oligonucleotide
atgagcaaatttggacaccatggagtctaattgactctaatgcttggggagtttggtt

SEQ ID NO: 333478 - DNA, 60 bp, Artificial
  Synthetic oligonucleotide
atgagcaaggtacaatatcgatatatccgtctaaaactgaaattgtatgtggtaatgtat

SEQ ID NO: 333479 - DNA, 55 bp, Artificial
  Synthetic oligonucleotide
atgagcaaggtcgaactctttggagcaaagcaaatgacgctggatcagacagggt

SEQ ID NO: 333480 - DNA, 60 bp, Artificial
  Synthetic oligonucleotide
atgagcaataagacagggtatgtaatcaagcccataagatcataccagagaaagagaggt

SEQ ID NO: 333481 - DNA, 60 bp, Artificial
  Synthetic oligonucleotide
atgagcacagtagagataaattatcatggtcttactgcgataggtaaattacctcagctg

SEQ ID NO: 333482 - DNA, 56 bp, Artificial
  Synthetic oligonucleotide
atgagcacgcgcgagttcagatggatgatagtatagaaagagtatacgatgaggga

SEQ ID NO: 333483 - DNA, 60 bp, Artificial
  Synthetic oligonucleotide
atgagcactgtgagataccattggaaaagttgagacttggggttggacgcagaagctcgc

SEQ ID NO: 333484 - DNA, 60 bp, Artificial
  Synthetic oligonucleotide
atgagcagcaaaacagggtatgtgatcaagcctataagatcataccagagaaagaggggt

SEQ ID NO: 333485 - DNA, 60 bp, Artificial
  Synthetic oligonucleotide
atgagcagccggggtcaaagtactataagatgcgcggtgaatggtgggatggatatgatg

SEQ ID NO: 333486 - DNA, 60 bp, Artificial
  Synthetic oligonucleotide
atgagcagcgccatgatatagcccatgtgggtaaggtcatatgtgtttctgacgtcactc

SEQ ID NO: 333487 - DNA, 60 bp, Artificial
  Synthetic oligonucleotide
atgagcaggggtctggttatgcagctgatcagaagagcacacaaaatgcgatcgacggga

SEQ ID NO: 333488 - DNA, 51 bp, Artificial
  Synthetic oligonucleotide
atgagcagtgtctccgagcttgtgagcctggtagtcgtgcaactccggcca

SEQ ID NO: 333489 - DNA, 60 bp, Artificial
  Synthetic oligonucleotide
atgagcatgtgtgtgtcaacgccaaggatcatgagaaaggtttactcgctcgctgcaata

SEQ ID NO: 333490 - DNA, 60 bp, Artificial
  Synthetic oligonucleotide
atgagccaacatggagtagatgacccggagagagaagtgctaatgtggaagtttgacagc

SEQ ID NO: 333491 - DNA, 55 bp, Artificial
  Synthetic oligonucleotide
atgagccaagtacaacaaccaaacataatgatgcagagaggcaattttaagggcc

SEQ ID NO: 333492 - DNA, 57 bp, Artificial
  Synthetic oligonucleotide
atgagccaagtagccgagcgaagacccgcgagggggaggaatcagcaaccgagaggg

SEQ ID NO: 333493 - DNA, 57 bp, Artificial
  Synthetic oligonucleotide
atgagccaagttccgaacaaggatccgcggggaggacagatcagcgcccgagagggg

SEQ ID NO: 333494 - DNA, 54 bp, Artificial
  Synthetic oligonucleotide
atgagccaagttccgaacaagggtccgcggggggagtgatcagttcccgagagg

SEQ ID NO: 333495 - DNA, 60 bp, Artificial
  Synthetic oligonucleotide
atgagccaatgctgatcgaagatcccgcgaggggaagggtcagcgctcgagaggggatag

SEQ ID NO: 333496 - DNA, 53 bp, Artificial
  Synthetic oligonucleotide
atgagccaattccgagcgaagggaccgccgggggagacgggtcgtcccgagag

SEQ ID NO: 333497 - DNA, 54 bp, Artificial
  Synthetic oligonucleotide
atgagccaccctacctcggtggtaaggatcccagggttaagggtggtccatcac

SEQ ID NO: 333498 - DNA, 54 bp, Artificial
  Synthetic oligonucleotide
atgagccactttataagagaaaaggggggactggatgggttaattcactcccag

SEQ ID NO: 333499 - DNA, 55 bp, Artificial
  Synthetic oligonucleotide
atgagcccagtacggcgaccgtgaagaacatgcatagggatcgttaccaggtgtt

SEQ ID NO: 333500 - DNA, 60 bp, Artificial
  Synthetic oligonucleotide
atgagcccagtactgctactatcaagaacgatctcagggatcgttatcaggtgctgcatc

SEQ ID NO: 333501 - DNA, 54 bp, Artificial
  Synthetic oligonucleotide
atgagccctagttccgggcgaggagaccgcgcggggaagagggaagacccgaga

SEQ ID NO: 333502 - DNA, 58 bp, Artificial
  Synthetic oligonucleotide
atgagccgcttatggcccctctacttaattgtattcatgttgtagttatgtctaattt

SEQ ID NO: 333503 - DNA, 55 bp, Artificial
  Synthetic oligonucleotide
atgagcctaaatagcactgttctctcaaccacctacctttccaagtgtgcacggt

SEQ ID NO: 333504 - DNA, 57 bp, Artificial
  Synthetic oligonucleotide
atgagcctacagggaatggaggatgaagaaagagaagtattacagtggaagtttgac

SEQ ID NO: 333505 - DNA, 60 bp, Artificial
  Synthetic oligonucleotide
atgagcctagcaccgccacagttaagaacgatcttcgtgatcgttaccaggtcatgcata

SEQ ID NO: 333506 - DNA, 60 bp, Artificial
  Synthetic oligonucleotide
atgagcctccactgaacatgaccatccgagatttattcataagcgaatctgagtttcgtc

SEQ ID NO: 333507 - DNA, 60 bp, Artificial
  Synthetic oligonucleotide
atgagcctctggacttgtctgtgtcctcacagacggaatatgaggctttccccctagcac

SEQ ID NO: 333508 - DNA, 59 bp, Artificial
  Synthetic oligonucleotide
atgagcgatctttgagattttatgagttccgacctggcccaattactacagagttccac

SEQ ID NO: 333509 - DNA, 60 bp, Artificial
  Synthetic oligonucleotide
atgagcgctggtgacttggtggatactagggtaatgtgaatgaagatcttcatgtcttcc

SEQ ID NO: 333510 - DNA, 55 bp, Artificial
  Synthetic oligonucleotide
atgagcggaacgacgaagtacgtctcgcgcccgtcctcgccagtcaggaccacct

SEQ ID NO: 333511 - DNA, 60 bp, Artificial
  Synthetic oligonucleotide
atgagcggtactgtccctccaggtttgcactggttgggaagtcgcatcaatctgttcttg

SEQ ID NO: 333512 - DNA, 55 bp, Artificial
  Synthetic oligonucleotide
atgagcgtcacgcgtggatgtccaatggtctgtacgtggatcaagatgtcacacg

SEQ ID NO: 333513 - DNA, 50 bp, Artificial
  Synthetic oligonucleotide
atgagcgtcgggacggcagtgagacctacacgctgcatgggggtgaggct

SEQ ID NO: 333514 - DNA, 60 bp, Artificial
  Synthetic oligonucleotide
atgagcgttcctcaagtgttgtgtgctgttactcgaacggtttctaccgatgctgaggga

SEQ ID NO: 333515 - DNA, 60 bp, Artificial
  Synthetic oligonucleotide
atgagctagggaattggagatggattggtgcagcatcgtttgttaatacgtattcggtgc

SEQ ID NO: 333516 - DNA, 54 bp, Artificial
  Synthetic oligonucleotide
atgagctcacaccatcggaaactaccgttaggcttagagcgtatttcaacacgc

SEQ ID NO: 333517 - DNA, 60 bp, Artificial
  Synthetic oligonucleotide
atgagctcacacccgccgagaccacagtcaggctacgagcatacatgaacaccccgggac

SEQ ID NO: 333518 - DNA, 57 bp, Artificial
  Synthetic oligonucleotide
atgagctcatacctagggagccaaccagctaacaagtaaacaaagcacaaggggaag

SEQ ID NO: 333519 - DNA, 60 bp, Artificial
  Synthetic oligonucleotide
atgagctcatacctagggagccaaccagctaacaagtaaacaagtcaccagctggccatg

SEQ ID NO: 333520 - DNA, 60 bp, Artificial
  Synthetic oligonucleotide
atgagctcatacctagggagccaaccagctgacagccagagaacaaagcacaaggggaag

SEQ ID NO: 333521 - DNA, 60 bp, Artificial
  Synthetic oligonucleotide
atgagctcatacctagggagccaaccagctgacagccagagggagccctggctgcatgcc

SEQ ID NO: 333522 - DNA, 60 bp, Artificial
  Synthetic oligonucleotide
atgagctcatacctagggagccaaccagctgacccttaatcacaagtaaacaaagcacaa

SEQ ID NO: 333523 - DNA, 60 bp, Artificial
  Synthetic oligonucleotide
atgagctccatccagacaaatggacagtacagcccatccaattgcctaataaggatgtgt

SEQ ID NO: 333524 - DNA, 60 bp, Artificial
  Synthetic oligonucleotide
atgagctccggttgtcgcataatcttcaccttcgcgctgagcaccctgacgtgggtattc

SEQ ID NO: 333525 - DNA, 58 bp, Artificial
  Synthetic oligonucleotide
atgagctccgtaccaccaattgagcaagtccacaaattctcgagtgagtttcccgtgg

SEQ ID NO: 333526 - DNA, 55 bp, Artificial
  Synthetic oligonucleotide
atgagctcgtggaggccatggtagagaaaggccaggacggctctgcagtcttaga

SEQ ID NO: 333527 - DNA, 59 bp, Artificial
  Synthetic oligonucleotide
atgagctctcttgatgggttcaccaccggggccgtttggtctgggtgtgaaggatctgc

SEQ ID NO: 333528 - DNA, 60 bp, Artificial
  Synthetic oligonucleotide
atgagctgcagatgcacatactccgtgggccaatacactttcagagacgtgcaatactag

SEQ ID NO: 333529 - DNA, 60 bp, Artificial
  Synthetic oligonucleotide
atgagctgtatggattcgtcaacttggcacgcgacgtcaacggttatcaacagattaact

SEQ ID NO: 333530 - DNA, 60 bp, Artificial
  Synthetic oligonucleotide
atgagcttagctcgatacgcgtttgatttctatgaaatgacttctagaactccaatacgt

SEQ ID NO: 333531 - DNA, 52 bp, Artificial
  Synthetic oligonucleotide
atgagcttcgccgcagggtctacctcggtggtcagtagggatggggcgccta

SEQ ID NO: 333532 - DNA, 60 bp, Artificial
  Synthetic oligonucleotide
atgagcttgtggaggccatggttgagaaaggccaggacggctctgcggttctggagcttg

SEQ ID NO: 333533 - DNA, 53 bp, Artificial
  Synthetic oligonucleotide
atgagcttttcgccgatgattccttccagcagaacaggatctacatgcaccct

SEQ ID NO: 333534 - DNA, 58 bp, Artificial
  Synthetic oligonucleotide
atgaggaaacaagggatcagaaggcgatggctaggattgtaaggaagtatcagaggac

SEQ ID NO: 333535 - DNA, 60 bp, Artificial
  Synthetic oligonucleotide
atgaggaaacagaatgacataggaagagtcaacacctagatgtaaaaactgattcaagaa

SEQ ID NO: 333536 - DNA, 59 bp, Artificial
  Synthetic oligonucleotide
atgaggaacagatccgtaatcacaccattgctttatggcgtgaggaaaacgaggtatgg

SEQ ID NO: 333537 - DNA, 58 bp, Artificial
  Synthetic oligonucleotide
atgaggaagcattcaagcagttgttgggaagatccaaaacagagattgttttttgcgt

SEQ ID NO: 333538 - DNA, 60 bp, Artificial
  Synthetic oligonucleotide
atgaggaattttgtgatatgctaagattgattgactacaacaaggctgctttgtccaagt

SEQ ID NO: 333539 - DNA, 55 bp, Artificial
  Synthetic oligonucleotide
atgaggacaagaagcgctctcagtgcagcttacattgagagttttggttatgatg

SEQ ID NO: 333540 - DNA, 60 bp, Artificial
  Synthetic oligonucleotide
atgaggacatgcaggtgaggagtcccatcttcgtgcaattctctacagattcggatgaat

SEQ ID NO: 333541 - DNA, 53 bp, Artificial
  Synthetic oligonucleotide
atgaggacattaagtcgcggacgtagcctgagtaagcacaatgaatggataat

SEQ ID NO: 333542 - DNA, 55 bp, Artificial
  Synthetic oligonucleotide
atgaggaccaagctaaccacttggtatccgactttggtgagtatgtagctacgcc

SEQ ID NO: 333543 - DNA, 59 bp, Artificial
  Synthetic oligonucleotide
atgaggaccaagctaactacttggtatccgaacttggtaagtatgtagctatatcaagc

SEQ ID NO: 333544 - DNA, 58 bp, Artificial
  Synthetic oligonucleotide
atgaggacccaattgacttttgttgaccacagaggacccgatacagagggtctcatta

SEQ ID NO: 333545 - DNA, 57 bp, Artificial
  Synthetic oligonucleotide
atgaggacccagacctccgctgggctccgagctggttgataaactacaccggagacg

SEQ ID NO: 333546 - DNA, 60 bp, Artificial
  Synthetic oligonucleotide
atgaggaccgccgtgtccttatacgtgggggcctgccctcgggctgtgctgccaccagca

SEQ ID NO: 333547 - DNA, 59 bp, Artificial
  Synthetic oligonucleotide
atgaggagacgagccgtgctaggcggagcgatggtgtatccggagggtcctcctccttc

SEQ ID NO: 333548 - DNA, 60 bp, Artificial
  Synthetic oligonucleotide
atgaggagcattatttaatgcatccagctcaaacttcccagtgggatgacccttggggag

SEQ ID NO: 333549 - DNA, 60 bp, Artificial
  Synthetic oligonucleotide
atgaggaggaggccatatccgacgacggaggatgaggctgagggatggcagatggggagc

SEQ ID NO: 333550 - DNA, 53 bp, Artificial
  Synthetic oligonucleotide
atgaggaggccccgtgtgttttccccctggcctatcccaaatttaggatccga

SEQ ID NO: 333551 - DNA, 56 bp, Artificial
  Synthetic oligonucleotide
atgaggagtcccatcttcgtgcagttctctgcaaaccctaatgaatagtttattcg

SEQ ID NO: 333552 - DNA, 60 bp, Artificial
  Synthetic oligonucleotide
atgaggagttgtggcccgttgtcaggcaacgtggcgtggtgtgcactgtgtttgctgacg

SEQ ID NO: 333553 - DNA, 60 bp, Artificial
  Synthetic oligonucleotide
atgaggatataatcagtttatgggatgaaagcctcaagccatgtgtaaagctaacccctc

SEQ ID NO: 333554 - DNA, 50 bp, Artificial
  Synthetic oligonucleotide
atgaggatttcaatttctcattgggtgagacatgtattcacatggctcgc

SEQ ID NO: 333555 - DNA, 55 bp, Artificial
  Synthetic oligonucleotide
atgaggccgaccatcacatcttgcaccttccaggttgcgtgccctgcgtgagagc

SEQ ID NO: 333556 - DNA, 57 bp, Artificial
  Synthetic oligonucleotide
atgaggcctttctatctcaatgccaggtggacattcccacctggggaactaaacacc

SEQ ID NO: 333557 - DNA, 55 bp, Artificial
  Synthetic oligonucleotide
atgaggcgttcactctcggcggcgagtattgcgcgttcgtcgccagccaaaccac

SEQ ID NO: 333558 - DNA, 60 bp, Artificial
  Synthetic oligonucleotide
atgaggctcatgtgcaacctccagtgacaccgagtaacatactgatcatgctattgttat

SEQ ID NO: 333559 - DNA, 60 bp, Artificial
  Synthetic oligonucleotide
atgagggaacccgtctgaatgttgctctcttgcgacacgtatgtatgtgggtttgacgac

SEQ ID NO: 333560 - DNA, 60 bp, Artificial
  Synthetic oligonucleotide
atgagggaatacaagcaggggtagataggttctacagaacctgcaagctagttgggatca

SEQ ID NO: 333561 - DNA, 55 bp, Artificial
  Synthetic oligonucleotide
atgagggaattggatttatcttacaaccattatggaatgagttaagcttgtgggg

SEQ ID NO: 333562 - DNA, 60 bp, Artificial
  Synthetic oligonucleotide
atgagggaattgtcaattagcttgtagccatcaggtatgataagtggtagtcctggacac

SEQ ID NO: 333563 - DNA, 60 bp, Artificial
  Synthetic oligonucleotide
atgagggactgccagatgagtccctgcagttttctcatgaaagcatatatcagccccctg

SEQ ID NO: 333564 - DNA, 55 bp, Artificial
  Synthetic oligonucleotide
atgagggagacgcgatgacgtttcattcacgcccgaggcctccgatccagcattt

SEQ ID NO: 333565 - DNA, 51 bp, Artificial
  Synthetic oligonucleotide
atgagggatggaatgcctctgaggacgcccttactgcagtgatcactgcgg

SEQ ID NO: 333566 - DNA, 60 bp, Artificial
  Synthetic oligonucleotide
atgagggatggctttcaagttatcaagaagtggtccgcaactgtcactggtgggcaatat

SEQ ID NO: 333567 - DNA, 60 bp, Artificial
  Synthetic oligonucleotide
atgagggcctagcgtggtaccggatgggcatggacctatcccatgagagacacgttagtg

SEQ ID NO: 333568 - DNA, 60 bp, Artificial
  Synthetic oligonucleotide
atgaggggagtgagaatcagtaagatgggagtagatgagtactccagcacagagagggtg

SEQ ID NO: 333569 - DNA, 54 bp, Artificial
  Synthetic oligonucleotide
atgagggggaggggacgggatgtaatggatggttttttgtagaagcagtagtta

SEQ ID NO: 333570 - DNA, 60 bp, Artificial
  Synthetic oligonucleotide
atgaggggggcccacaacatatcgtttgtcaccccaccatctagcagatcctctagccaa

SEQ ID NO: 333571 - DNA, 59 bp, Artificial
  Synthetic oligonucleotide
atgaggggtatgaagaattcacaatggttgggagaagagcaacggctatcctcagaaag

SEQ ID NO: 333572 - DNA, 59 bp, Artificial
  Synthetic oligonucleotide
atgaggggtatgaggaattcacaatggttgggcggagggcaacagctatcctgaggaaa

SEQ ID NO: 333573 - DNA, 60 bp, Artificial
  Synthetic oligonucleotide
atgaggggtggaacgcctctgaggatgcccttactgcagtaattactgcagcctatttga

SEQ ID NO: 333574 - DNA, 60 bp, Artificial
  Synthetic oligonucleotide
atgagggtataaggatgacaacatacgaccagtatctctcacatatacgcgagcgtttac

SEQ ID NO: 333575 - DNA, 57 bp, Artificial
  Synthetic oligonucleotide
atgagggtcctaggttttatacgggtatgcatatacctatacaaattatgccgttga

SEQ ID NO: 333576 - DNA, 58 bp, Artificial
  Synthetic oligonucleotide
atgagggtcctataccaaaactagacattgatgctagtaaggctcttttttcatcaac

SEQ ID NO: 333577 - DNA, 60 bp, Artificial
  Synthetic oligonucleotide
atgagggtctatcagattctggcgatctattcaaccgtcgccagttcactagtgctgtca

SEQ ID NO: 333578 - DNA, 55 bp, Artificial
  Synthetic oligonucleotide
atgagggtgactcgagcgcggggtacaatcatgatgtgtcaattctgcgcgcctg

SEQ ID NO: 333579 - DNA, 60 bp, Artificial
  Synthetic oligonucleotide
atgagggtgcctatgtattcaaaggacgcggtcctgcctcacttgtgcatctagccaagc

SEQ ID NO: 333580 - DNA, 60 bp, Artificial
  Synthetic oligonucleotide
atgaggtactgcaatatccagatgaattctatacggtcgctgtgagtaaatacccagcgc

SEQ ID NO: 333581 - DNA, 57 bp, Artificial
  Synthetic oligonucleotide
atgaggtcagatgtaccaattggcaactgcgtttctgaatgcatcactccgaatggg

SEQ ID NO: 333582 - DNA, 51 bp, Artificial
  Synthetic oligonucleotide
atgaggtctctcaaataggaatttaattcgctatcgatttgagaatgggta

SEQ ID NO: 333583 - DNA, 55 bp, Artificial
  Synthetic oligonucleotide
atgaggtgccaacgctaatagggatagagtgtccgaaagacgaaaaacttccgta

SEQ ID NO: 333584 - DNA, 55 bp, Artificial
  Synthetic oligonucleotide
atgaggtgggttatttatgtgccggaataccgacagacaccccacgggttcaaga

SEQ ID NO: 333585 - DNA, 60 bp, Artificial
  Synthetic oligonucleotide
atgaggtgtcgcaggccctaagtgaccacaagcacccactggccaacagatacactaggg

SEQ ID NO: 333586 - DNA, 55 bp, Artificial
  Synthetic oligonucleotide
atgaggttaatgatactctacagttgcagcggctccagtatgactattacgtgga

SEQ ID NO: 333587 - DNA, 55 bp, Artificial
  Synthetic oligonucleotide
atgaggttagacccaaaatgtccgatgttccaaacgctatacgtcggtacgccag

SEQ ID NO: 333588 - DNA, 60 bp, Artificial
  Synthetic oligonucleotide
atgagtaaaaggctaaagcaacgtgaagtagtgcgatgatctcaaggataaggcatagat

SEQ ID NO: 333589 - DNA, 58 bp, Artificial
  Synthetic oligonucleotide
atgagtaatgatcgaatggtcctacagttaactctaaaacgacgtggttcggatggca

SEQ ID NO: 333590 - DNA, 60 bp, Artificial
  Synthetic oligonucleotide
atgagtaccgaatggttgctctgatgtttatcacctgtatatcggtactcaatatatagt

SEQ ID NO: 333591 - DNA, 54 bp, Artificial
  Synthetic oligonucleotide
atgagtacgagttacagggcccaacccccactaccttcaactttgaccgcaaca

SEQ ID NO: 333592 - DNA, 54 bp, Artificial
  Synthetic oligonucleotide
atgagtacgttgacacaccaaacactgggggcgtatatccttctgatgggtttg

SEQ ID NO: 333593 - DNA, 60 bp, Artificial
  Synthetic oligonucleotide
atgagtagtcacataattacaaatattgaccatctacacatgaccttctatgacgacaat

SEQ ID NO: 333594 - DNA, 59 bp, Artificial
  Synthetic oligonucleotide
atgagtatattcttgacactatggcagacaactttcgtgaactgggtctaaagtacacg

SEQ ID NO: 333595 - DNA, 60 bp, Artificial
  Synthetic oligonucleotide
atgagtattaaatgtttgtctgtgtgaaggtgtgctggatagacgtatgtgataagtata

SEQ ID NO: 333596 - DNA, 60 bp, Artificial
  Synthetic oligonucleotide
atgagtatttcagtgttatgaatgatctgtatgctacattacgtgacaactcaggtggta

SEQ ID NO: 333597 - DNA, 59 bp, Artificial
  Synthetic oligonucleotide
atgagtatttggaggcctccactgcacaatgtcccgggactcgaacacctctggtacga

SEQ ID NO: 333598 - DNA, 57 bp, Artificial
  Synthetic oligonucleotide
atgagtcaattagatggactaaagaccctaggaacacacaggatcatgttcgctcac

SEQ ID NO: 333599 - DNA, 50 bp, Artificial
  Synthetic oligonucleotide
atgagtccattggaactacatgatatcgtcgtgacacgctttgatatgga

SEQ ID NO: 333600 - DNA, 60 bp, Artificial
  Synthetic oligonucleotide
atgagtccccctgtgcgagaatccatatgacgcgcaattaagtcctaaatagtaagagca

SEQ ID NO: 333601 - DNA, 60 bp, Artificial
  Synthetic oligonucleotide
atgagtcgtcagactcagaaaagaatggtcttagcccagatttgcaacaagttgcaaggt

SEQ ID NO: 333602 - DNA, 58 bp, Artificial
  Synthetic oligonucleotide
atgagtcttctaaccgaggtcggagcgtacgttctttctagcatcacgtcaggcccac

SEQ ID NO: 333603 - DNA, 55 bp, Artificial
  Synthetic oligonucleotide
atgagtgcagagtggtcagtggtaaactggtgatgggtttggacaaaatgagcag

SEQ ID NO: 333604 - DNA, 55 bp, Artificial
  Synthetic oligonucleotide
atgagtgcagtttcacgtgtatttcctgatccctttgtagcctattctggtcaga

SEQ ID NO: 333605 - DNA, 60 bp, Artificial
  Synthetic oligonucleotide
atgagtggacgagcacattgtcacagttgtttctgacaaaagggtggccaactggttcag

SEQ ID NO: 333606 - DNA, 58 bp, Artificial
  Synthetic oligonucleotide
atgagtggcatatacggattaccagctgtaaatccaaataataacgcagaatattatg

SEQ ID NO: 333607 - DNA, 55 bp, Artificial
  Synthetic oligonucleotide
atgagtggcttgtaatgccattcggactgaagaacgccccagcggtgttccagag

SEQ ID NO: 333608 - DNA, 60 bp, Artificial
  Synthetic oligonucleotide
atgagtgtcaaggcatacacaattggtggaaggggacacgagactccaaagatggtgaca

SEQ ID NO: 333609 - DNA, 57 bp, Artificial
  Synthetic oligonucleotide
atgagtgtcgtacagcctccaggaccccccctcccgggagagccatagtggtctgcg

SEQ ID NO: 333610 - DNA, 60 bp, Artificial
  Synthetic oligonucleotide
atgagtgtgagacttatagagaactaaaggcacatggggtctcatgcccacaatcccaat

SEQ ID NO: 333611 - DNA, 56 bp, Artificial
  Synthetic oligonucleotide
atgagtgttatgaatgtctattcctactggacgcaaaggcaaggtcacttatctgc

SEQ ID NO: 333612 - DNA, 60 bp, Artificial
  Synthetic oligonucleotide
atgagttaccggcaggagcacgtgctgcggagacttcgccaggacagacacgggaatttg

SEQ ID NO: 333613 - DNA, 60 bp, Artificial
  Synthetic oligonucleotide
atgagttacggcccatagaaaaggtcaagcagggcaagacacgcctgattgagtgtagta

SEQ ID NO: 333614 - DNA, 60 bp, Artificial
  Synthetic oligonucleotide
atgagttatttggtgcaaggattaatagtcatggtaatttagcgatagcttcctccttca

SEQ ID NO: 333615 - DNA, 60 bp, Artificial
  Synthetic oligonucleotide
atgagttcaatgagatagaacaacaaataggaaatgtcattaattggacaagagacgcaa

SEQ ID NO: 333616 - DNA, 60 bp, Artificial
  Synthetic oligonucleotide
atgagttccccacattggatgattcagcttacaagattgagggaacgttgtatgatgtct

SEQ ID NO: 333617 - DNA, 55 bp, Artificial
  Synthetic oligonucleotide
atgagttcccctgtgcgtaaatccatagttgttgcagttaatggataggtaatag

SEQ ID NO: 333618 - DNA, 56 bp, Artificial
  Synthetic oligonucleotide
atgagttccgtgacctaaaagttgcggcgtttaagggggatgattctgttgtgctc

SEQ ID NO: 333619 - DNA, 60 bp, Artificial
  Synthetic oligonucleotide
atgagttctgccatcacaggccattcattctcactgaatggcattgcggaagccattaga

SEQ ID NO: 333620 - DNA, 58 bp, Artificial
  Synthetic oligonucleotide
atgagttctttaagtggccctattcctatatctccttgtcctagccgttcgagcagta

SEQ ID NO: 333621 - DNA, 54 bp, Artificial
  Synthetic oligonucleotide
atgagttggacccccactgcaagcttaacgccctccaatccacggttaataaat

SEQ ID NO: 333622 - DNA, 56 bp, Artificial
  Synthetic oligonucleotide
atgagtttaggggccttgaagcttgtattcaaccagtaaaggcacctaatctgtta

SEQ ID NO: 333623 - DNA, 52 bp, Artificial
  Synthetic oligonucleotide
atgagtttgcgagtgtctccaattgagccccctcaaacttacgctatgcaat

SEQ ID NO: 333624 - DNA, 60 bp, Artificial
  Synthetic oligonucleotide
atgagttttccttatgcgagagtattcccgtcacaccttgttccatcgtgcagagacaag

SEQ ID NO: 333625 - DNA, 60 bp, Artificial
  Synthetic oligonucleotide
atgagtttttccagaagtcctggatctattattcagacagatcagacctcatcgggctat

SEQ ID NO: 333626 - DNA, 60 bp, Artificial
  Synthetic oligonucleotide
atgataaaaaagatgccagatgagatatctggatcactgaagtgtatagatgatttagag

SEQ ID NO: 333627 - DNA, 55 bp, Artificial
  Synthetic oligonucleotide
atgataaaacccacccaggtgagaacggaatagacttatctgtggtagatgagct

SEQ ID NO: 333628 - DNA, 57 bp, Artificial
  Synthetic oligonucleotide
atgataaaactcgggcgggcagtacaccagactctcaaccacagttccaggataacc

SEQ ID NO: 333629 - DNA, 50 bp, Artificial
  Synthetic oligonucleotide
atgataaagcaggctggagggtcacccttgacgtactcaacggcctttaa

SEQ ID NO: 333630 - DNA, 60 bp, Artificial
  Synthetic oligonucleotide
atgataaatgtccaagcagatgggtttagagctatagcacagatggatatggaaagtccg

SEQ ID NO: 333631 - DNA, 58 bp, Artificial
  Synthetic oligonucleotide
atgataacgagccgagtaccgctactatcaagaacgatctccgtgatcgttaccaggt

SEQ ID NO: 333632 - DNA, 57 bp, Artificial
  Synthetic oligonucleotide
atgataacgtatgatacacccaagatgtgggaaatgggaacaaccaaagaactggta

SEQ ID NO: 333633 - DNA, 53 bp, Artificial
  Synthetic oligonucleotide
atgataactcaccctcatctcttcaacaaggactaaaactgctgacctgaagg

SEQ ID NO: 333634 - DNA, 55 bp, Artificial
  Synthetic oligonucleotide
atgataactcgtggaaagatactctctctcagttgtttttaaccaaagggtggcc

SEQ ID NO: 333635 - DNA, 58 bp, Artificial
  Synthetic oligonucleotide
atgataactgtgtccaaggtactatgttggcgtatggacacggacccgactattataa

SEQ ID NO: 333636 - DNA, 55 bp, Artificial
  Synthetic oligonucleotide
atgataagaaattcaatggaacaggaccatgccgtaatgttagcacggtacaatg

SEQ ID NO: 333637 - DNA, 57 bp, Artificial
  Synthetic oligonucleotide
atgataagaacggactaacgtaagtttgtggcggatcctggaagattctatctgcgt

SEQ ID NO: 333638 - DNA, 55 bp, Artificial
  Synthetic oligonucleotide
atgataaggggtaggccagaagaaaagacaatatggacttcaagtagctccattg

SEQ ID NO: 333639 - DNA, 55 bp, Artificial
  Synthetic oligonucleotide
atgataagttgagagtgtccgatcaggaattacaggtcatgacgtcagatctcaa

SEQ ID NO: 333640 - DNA, 60 bp, Artificial
  Synthetic oligonucleotide
atgataataaacgacgaccattacaaactgtgaagatggttgatgactccatgatgaagg

SEQ ID NO: 333641 - DNA, 55 bp, Artificial
  Synthetic oligonucleotide
atgataatagccttgggtacttaatgtgtaaacctttcctgactgggaccactac

SEQ ID NO: 333642 - DNA, 51 bp, Artificial
  Synthetic oligonucleotide
atgataatcccaagcgcgagttactttccactgccatgctatgcctaggga

SEQ ID NO: 333643 - DNA, 55 bp, Artificial
  Synthetic oligonucleotide
atgataatgacttggagcagggtaactctcgggaactatttcatcaacaagagtg

SEQ ID NO: 333644 - DNA, 55 bp, Artificial
  Synthetic oligonucleotide
atgataatgaggtgggcggagctagtgacgttagcggaaaaggaagtgacgcggt

SEQ ID NO: 333645 - DNA, 57 bp, Artificial
  Synthetic oligonucleotide
atgataattcgtggaaagatactctttctcaactatttctaactaaaggatggccta

SEQ ID NO: 333646 - DNA, 56 bp, Artificial
  Synthetic oligonucleotide
atgataattcgtggaaggatacactctcacaattattcttgactaaaggatggcca

SEQ ID NO: 333647 - DNA, 55 bp, Artificial
  Synthetic oligonucleotide
atgataccaactattcaggcttcatgcccaactgcagtaaggtagtagcgtcctc

SEQ ID NO: 333648 - DNA, 55 bp, Artificial
  Synthetic oligonucleotide
atgatacctcaaggcatggtaagaactgtgcatgtcttttggggcagtactggca

SEQ ID NO: 333649 - DNA, 50 bp, Artificial
  Synthetic oligonucleotide
atgatacgccgccgcaaaaccccctgagttttcgcggcgaatgattatag

SEQ ID NO: 333650 - DNA, 55 bp, Artificial
  Synthetic oligonucleotide
atgatacgtttaatctgttcttccctaacgcatatccttacaagagcggggtagt

SEQ ID NO: 333651 - DNA, 60 bp, Artificial
  Synthetic oligonucleotide
atgatagacggctggtatggtttcagacaccaaaactctgagggtacaggacaagctgca

SEQ ID NO: 333652 - DNA, 54 bp, Artificial
  Synthetic oligonucleotide
atgatagataactacggggttgggggtaaaagattggattcgagacttggtctc

SEQ ID NO: 333653 - DNA, 56 bp, Artificial
  Synthetic oligonucleotide
atgatagatccacttgaagaaagtatagtacaccttcaagcgaagacagcagttca

SEQ ID NO: 333654 - DNA, 60 bp, Artificial
  Synthetic oligonucleotide
atgatagatttgtcgaattatgttcaaaaggacatgtctttgcttacaattcatatttca

SEQ ID NO: 333655 - DNA, 60 bp, Artificial
  Synthetic oligonucleotide
atgatagcacgtttgaactatcgcaaatggtacaatgggcatttgaccacgatgtattag

SEQ ID NO: 333656 - DNA, 60 bp, Artificial
  Synthetic oligonucleotide
atgatagccttaacaccggctggatagcagggcttttctatcaccacaaattcaactcat

SEQ ID NO: 333657 - DNA, 55 bp, Artificial
  Synthetic oligonucleotide
atgataggaactgtgacaaagctcagcaggatggggatttttgatttcatgcgat

SEQ ID NO: 333658 - DNA, 55 bp, Artificial
  Synthetic oligonucleotide
atgataggacctgacaccacgcgctgtctcaccggcgaaactcctgactcggtca

SEQ ID NO: 333659 - DNA, 60 bp, Artificial
  Synthetic oligonucleotide
atgataggatcagcgccctcatattggatacatgatgttagacagtactctgactttaaa

SEQ ID NO: 333660 - DNA, 56 bp, Artificial
  Synthetic oligonucleotide
atgataggtctagtcccattggagctttcgctgtgaaatctgggagcttagagtcg

SEQ ID NO: 333661 - DNA, 56 bp, Artificial
  Synthetic oligonucleotide
atgatagtgaagcggcagggacggggttcaccggggataaggccaccaaggcatgg

SEQ ID NO: 333662 - DNA, 60 bp, Artificial
  Synthetic oligonucleotide
atgatagtgcactcaccaataccgctgcttgtgctagtatcaccgaccgcacccatatca

SEQ ID NO: 333663 - DNA, 58 bp, Artificial
  Synthetic oligonucleotide
atgatatcactagcggggataaaaaccctagtaagttgataaggctggagacaggtga

SEQ ID NO: 333664 - DNA, 60 bp, Artificial
  Synthetic oligonucleotide
atgatatctatatagggagtgatttaggactagaagagcacaggggtatcgtgaacgaac

SEQ ID NO: 333665 - DNA, 60 bp, Artificial
  Synthetic oligonucleotide
atgatatctctcatgtcggtaaggtattgtgtgtcagtgatgtaactaggggaggtggta

SEQ ID NO: 333666 - DNA, 60 bp, Artificial
  Synthetic oligonucleotide
atgatatgtggtgaatggagataagtccatccgtaggttcaaggcattgggattggtgat

SEQ ID NO: 333667 - DNA, 53 bp, Artificial
  Synthetic oligonucleotide
atgatatgttggcccacaaactgcgttcattgggggtgggcctcgagtgccca

SEQ ID NO: 333668 - DNA, 60 bp, Artificial
  Synthetic oligonucleotide
atgatatgtttaacgcgttacttcccgatttaatagctggcgctcatcaaaatgcagatc

SEQ ID NO: 333669 - DNA, 60 bp, Artificial
  Synthetic oligonucleotide
atgatattaacaagagatgggaacagtgggggcaatgcaaccaatgagaccttcagacct

SEQ ID NO: 333670 - DNA, 58 bp, Artificial
  Synthetic oligonucleotide
atgatattgtaatacaaaatctttgggagctttctcccttaatatattgagggccgca

SEQ ID NO: 333671 - DNA, 60 bp, Artificial
  Synthetic oligonucleotide
atgatattgtgtcaactaacatgtagtctattagtaaacgtgcgacatagaatagggaca

SEQ ID NO: 333672 - DNA, 55 bp, Artificial
  Synthetic oligonucleotide
atgatcaaacgccaaaagttatcgatgcttgctggtatgccatcgttgagccacg

SEQ ID NO: 333673 - DNA, 60 bp, Artificial
  Synthetic oligonucleotide
atgatcaagtggtcgaattacataaccgagacctccctgctctggtatcgttccagccca

SEQ ID NO: 333674 - DNA, 55 bp, Artificial
  Synthetic oligonucleotide
atgatcaagttctaccacctgatagagacttcacgtttaataaagtcgtttttgg

SEQ ID NO: 333675 - DNA, 60 bp, Artificial
  Synthetic oligonucleotide
atgatcaatctgatgaggatcacgaggttgggggtacagagccagaaaattatatcactg

SEQ ID NO: 333676 - DNA, 60 bp, Artificial
  Synthetic oligonucleotide
atgatcacatccgcaacgacgggagaaagcctaggtgagtcggtcaagcgtgccgtaatc

SEQ ID NO: 333677 - DNA, 60 bp, Artificial
  Synthetic oligonucleotide
atgatcacgcctacactactggctgtaaaggttgcacaacctatcggccaaacgacgtga

SEQ ID NO: 333678 - DNA, 55 bp, Artificial
  Synthetic oligonucleotide
atgatcacggtccaactgtgcggttggcggatgcggtgaatgccacggtccgagg

SEQ ID NO: 333679 - DNA, 60 bp, Artificial
  Synthetic oligonucleotide
atgatcagagctacttaacagatatattttcgagtgaaagcatttattgtctatcatata

SEQ ID NO: 333680 - DNA, 50 bp, Artificial
  Synthetic oligonucleotide
atgatcagcgagtcatcgagatgacaactgaactcctagcagcaatcaag

SEQ ID NO: 333681 - DNA, 55 bp, Artificial
  Synthetic oligonucleotide
atgatcaggggcaaaccagaagagaaaactatctggacttccagcagctccattg

SEQ ID NO: 333682 - DNA, 55 bp, Artificial
  Synthetic oligonucleotide
atgatcaggtgaacttgactgaactacccgccaatcaacacgtggtgaccgttca

SEQ ID NO: 333683 - DNA, 60 bp, Artificial
  Synthetic oligonucleotide
atgatcagtataatcaggctcatccgaactctacgatgttccgtacgaagccatttacga

SEQ ID NO: 333684 - DNA, 52 bp, Artificial
  Synthetic oligonucleotide
atgatcatacatgatccggtatacaaattgtggtatgcttagcgagctaagt

SEQ ID NO: 333685 - DNA, 53 bp, Artificial
  Synthetic oligonucleotide
atgatcatacgagctctcgcaagaccatctgcctctgcgctagctatgccaat

SEQ ID NO: 333686 - DNA, 51 bp, Artificial
  Synthetic oligonucleotide
atgatccaacgtggcctcgactggtttgataacaacggagagatggtgaag

SEQ ID NO: 333687 - DNA, 57 bp, Artificial
  Synthetic oligonucleotide
atgatccaggaacacattttgaatggtctagggtgcccggctccgataactaagtgg

SEQ ID NO: 333688 - DNA, 55 bp, Artificial
  Synthetic oligonucleotide
atgatccagtcttacccgatttaaataaattaggcgaatggttgaccactaggga

SEQ ID NO: 333689 - DNA, 60 bp, Artificial
  Synthetic oligonucleotide
atgatccattggggaaaagaggcggttaaccacttccatcttggagatgacatggatcca

SEQ ID NO: 333690 - DNA, 58 bp, Artificial
  Synthetic oligonucleotide
atgatccattgttaggaattataaggggatgggaacaggatcaatacacctcaactac

SEQ ID NO: 333691 - DNA, 55 bp, Artificial
  Synthetic oligonucleotide
atgatccgctttaattagcttcaatttggccctaatacacccaccggatggggtg

SEQ ID NO: 333692 - DNA, 50 bp, Artificial
  Synthetic oligonucleotide
atgatccgtcacaagttgaccgatggggtattcagcaagtccttccgtcg

SEQ ID NO: 333693 - DNA, 51 bp, Artificial
  Synthetic oligonucleotide
atgatcctgtggggtgcaaatcccccccttaacttgagggaaatcaagccc

SEQ ID NO: 333694 - DNA, 55 bp, Artificial
  Synthetic oligonucleotide
atgatccttgcgagactcttgctaaatatcctagcagggaaagggctcttatgct

SEQ ID NO: 333695 - DNA, 51 bp, Artificial
  Synthetic oligonucleotide
atgatccttgtgggaggcttgcgtcactctggaactttgactgtaagtcta

SEQ ID NO: 333696 - DNA, 59 bp, Artificial
  Synthetic oligonucleotide
atgatcgatacaacctgccaagcccatttgagataacaacgcctgtgaaagctaccccc

SEQ ID NO: 333697 - DNA, 55 bp, Artificial
  Synthetic oligonucleotide
atgatcgccgctaaaaaatgtaaatggataagcgttccactatttaatattgata

SEQ ID NO: 333698 - DNA, 60 bp, Artificial
  Synthetic oligonucleotide
atgatcgctagataggtgaataactatgcatgaaattcaagttaacgaccaagtcaatac

SEQ ID NO: 333699 - DNA, 60 bp, Artificial
  Synthetic oligonucleotide
atgatcgctctactgctgccgaaaatagctcccttaacctagctagatctggtcttgatt

SEQ ID NO: 333700 - DNA, 55 bp, Artificial
  Synthetic oligonucleotide
atgatcggaatactacccgacatgaccccaagtactgagacgtcattgagaggga

SEQ ID NO: 333701 - DNA, 60 bp, Artificial
  Synthetic oligonucleotide
atgatcggcaccaccaagtttacattcacagatcagaggaggcaatcctttgtgttgatg

SEQ ID NO: 333702 - DNA, 58 bp, Artificial
  Synthetic oligonucleotide
atgatcgggatattacccgacatgaccccaagtactgaaatgtcgctgagggggataa

SEQ ID NO: 333703 - DNA, 60 bp, Artificial
  Synthetic oligonucleotide
atgatcgggatattgcctgacatgaccccaagtactgagatgtcactgagggggataaga

SEQ ID NO: 333704 - DNA, 53 bp, Artificial
  Synthetic oligonucleotide
atgatcgtggtatgatcgtgccttataaggaaggtaacagacgggtcttacac

SEQ ID NO: 333705 - DNA, 54 bp, Artificial
  Synthetic oligonucleotide
atgatctagcaaaaaccatggagaatgtggagagcagagggggtttcaagtatt

SEQ ID NO: 333706 - DNA, 55 bp, Artificial
  Synthetic oligonucleotide
atgatctagttcattctggtggtggaaacgcagggttttttagtaagacggctaa

SEQ ID NO: 333707 - DNA, 55 bp, Artificial
  Synthetic oligonucleotide
atgatctctggggtgataccgacgaccgtcgggaaagatttgacttcctgtttaa

SEQ ID NO: 333708 - DNA, 55 bp, Artificial
  Synthetic oligonucleotide
atgatctgacattgtccagagtgactgctgccttagctggttacacttgccaggc

SEQ ID NO: 333709 - DNA, 55 bp, Artificial
  Synthetic oligonucleotide
atgatctgatcagggtatgcatcatggttggagccaatgcttcagacaggatggg

SEQ ID NO: 333710 - DNA, 60 bp, Artificial
  Synthetic oligonucleotide
atgatctggcactccaatctgaatgacgccacctaccagagaacgagggcacttgtgcgg

SEQ ID NO: 333711 - DNA, 60 bp, Artificial
  Synthetic oligonucleotide
atgatctggcattccaacctgaatgatgccacataccagagaacaagggctcttgtgcgc

SEQ ID NO: 333712 - DNA, 55 bp, Artificial
  Synthetic oligonucleotide
atgatcttacaccctgaaaagtgtgagaagactaaggacccaacggcgttcaagc

SEQ ID NO: 333713 - DNA, 58 bp, Artificial
  Synthetic oligonucleotide
atgatcttgggtatgtgaggcttggtgaccccatacccgctatagggcttgacccaaa

SEQ ID NO: 333714 - DNA, 58 bp, Artificial
  Synthetic oligonucleotide
atgatctttgggttcttgggagcagccggaagcactatgggcgcggcgtcaataacgc

SEQ ID NO: 333715 - DNA, 55 bp, Artificial
  Synthetic oligonucleotide
atgatgaaattgacactgtctacaacctgcttgctgccgttaaggccaggtacgg

SEQ ID NO: 333716 - DNA, 55 bp, Artificial
  Synthetic oligonucleotide
atgatgaagacaccccttatggtatcacagtgctaaaccacatgggtagcatggc

SEQ ID NO: 333717 - DNA, 53 bp, Artificial
  Synthetic oligonucleotide
atgatgaaggaaaaagcgtttcctccgtgaacattgccgtggtttacgaagtt

SEQ ID NO: 333718 - DNA, 60 bp, Artificial
  Synthetic oligonucleotide
atgatgaaggcccaacgtattcatgagaatcaatacggcccagatttttcaatggcccat

SEQ ID NO: 333719 - DNA, 60 bp, Artificial
  Synthetic oligonucleotide
atgatgaatacccatggaggcttctgctagggggttatcacatgatgataatgcgaataa

SEQ ID NO: 333720 - DNA, 60 bp, Artificial
  Synthetic oligonucleotide
atgatgacagaacgaatgtccttcatagacgtacgatgttttcagcatctgactcattct

SEQ ID NO: 333721 - DNA, 60 bp, Artificial
  Synthetic oligonucleotide
atgatgacgtttcttggacaagcaatagtatagttactttctgtggactagacaatgaac

SEQ ID NO: 333722 - DNA, 60 bp, Artificial
  Synthetic oligonucleotide
atgatgagataacaggacgagacggagtgactcgaggccgaccaaccttctacgcgctac

SEQ ID NO: 333723 - DNA, 60 bp, Artificial
  Synthetic oligonucleotide
atgatgagcgtgaggtcattccagacgaaactcctagaggtcgccaccttgataaggtga

SEQ ID NO: 333724 - DNA, 60 bp, Artificial
  Synthetic oligonucleotide
atgatgatcacaaagaagtgctggtgtggcggtttgacagctccctggcaagaagacaca

SEQ ID NO: 333725 - DNA, 60 bp, Artificial
  Synthetic oligonucleotide
atgatgatccagacactccttatggcataacagtactaaatcacatgggtagcatggcat

SEQ ID NO: 333726 - DNA, 60 bp, Artificial
  Synthetic oligonucleotide
atgatgatgtcgaccagagtttgatcattgctgccagaaacattgttagaagagcaatag

SEQ ID NO: 333727 - DNA, 57 bp, Artificial
  Synthetic oligonucleotide
atgatgatttacctagtttggaggcggatcgagaacttttctatgccgcagggtaat

SEQ ID NO: 333728 - DNA, 60 bp, Artificial
  Synthetic oligonucleotide
atgatgcacaaaaggattccatctacgcatctgctctagtggaggcaaccaaattttgcg

SEQ ID NO: 333729 - DNA, 60 bp, Artificial
  Synthetic oligonucleotide
atgatgcagtgactgacatttggtcttacaatgctaagcttcttgtgttaattgagaatg

SEQ ID NO: 333730 - DNA, 60 bp, Artificial
  Synthetic oligonucleotide
atgatgcatccaagctttgctgggctcattgatccaggacttcctgcggaggtgttagcc

SEQ ID NO: 333731 - DNA, 52 bp, Artificial
  Synthetic oligonucleotide
atgatgccactgacaccatatctgaggtcacgcttgccgctctgagacccct

SEQ ID NO: 333732 - DNA, 57 bp, Artificial
  Synthetic oligonucleotide
atgatgccgatacaatagttaataaacctctcactgattaaaccgtaaaaatcagag

SEQ ID NO: 333733 - DNA, 60 bp, Artificial
  Synthetic oligonucleotide
atgatgcctcatcaggggtgagctctgcatgcccatataatgggaggtcctccttttttc

SEQ ID NO: 333734 - DNA, 55 bp, Artificial
  Synthetic oligonucleotide
atgatgcgccagtttggggttagcgcaaaagagtcttataacttgattgcacagg

SEQ ID NO: 333735 - DNA, 54 bp, Artificial
  Synthetic oligonucleotide
atgatgctatcatctaagggaattgatcaaaaaatgagagtacttaatgcatgt

SEQ ID NO: 333736 - DNA, 60 bp, Artificial
  Synthetic oligonucleotide
atgatgctgaatgtgtaaacatgatcttacaccctgaaaagtgtgagaagactaaggacc

SEQ ID NO: 333737 - DNA, 60 bp, Artificial
  Synthetic oligonucleotide
atgatggacaggagaatgtgattgtcgatgacttttacggttggatgccatgtgatgaac

SEQ ID NO: 333738 - DNA, 57 bp, Artificial
  Synthetic oligonucleotide
atgatggaccaagtaagggagagccgtaatcctggaaatgctgagatagaagatctc

SEQ ID NO: 333739 - DNA, 60 bp, Artificial
  Synthetic oligonucleotide
atgatggaccaagtgagagaaagtcggaacccaggaaatgctgagattgaagatctcatt

SEQ ID NO: 333740 - DNA, 59 bp, Artificial
  Synthetic oligonucleotide
atgatggaccaagtgagagagagccggaatcctgggaacgctgaaattgaagatctcat

SEQ ID NO: 333741 - DNA, 56 bp, Artificial
  Synthetic oligonucleotide
atgatggaccaagtgcgggaaagccggaaccctggaaatgctgaaattgaggacct

SEQ ID NO: 333742 - DNA, 60 bp, Artificial
  Synthetic oligonucleotide
atgatggaccaggtacgggaaagcaggaatcctgggaatgctgagatcgaagaccttatc

SEQ ID NO: 333743 - DNA, 60 bp, Artificial
  Synthetic oligonucleotide
atgatggaccaggtgagggaaagccggaatcctgggaatgcggaaatcgaagatctcatc

SEQ ID NO: 333744 - DNA, 59 bp, Artificial
  Synthetic oligonucleotide
atgatggacgactaatccagaatagcataacaatagagaggatggtgctttctgctttt

SEQ ID NO: 333745 - DNA, 60 bp, Artificial
  Synthetic oligonucleotide
atgatggagcaattcttccatttgacatcgataagatgtagcttgtgaaaaaatctcctt

SEQ ID NO: 333746 - DNA, 55 bp, Artificial
  Synthetic oligonucleotide
atgatggaggcgaacgttctgatgtacttcgacgactgatcacggcatccagcgc

SEQ ID NO: 333747 - DNA, 60 bp, Artificial
  Synthetic oligonucleotide
atgatggatacatcttcgccttatcaatagacaggtaatcagaggccgaagtacgggcag

SEQ ID NO: 333748 - DNA, 56 bp, Artificial
  Synthetic oligonucleotide
atgatggatgcctgggtatatttggactatctatatctttagcctcaaaaccaacg

SEQ ID NO: 333749 - DNA, 55 bp, Artificial
  Synthetic oligonucleotide
atgatggccaactcacaagacacagagctctccttcacaattacaggtgacaaca

SEQ ID NO: 333750 - DNA, 60 bp, Artificial
  Synthetic oligonucleotide
atgatggctcagctgttgaatcaacattttacccgccaactaagaagcatcttgtaatag

SEQ ID NO: 333751 - DNA, 50 bp, Artificial
  Synthetic oligonucleotide
atgatgggagacaagacatatttgcaggagcacctcaaccaaatcaaaat

SEQ ID NO: 333752 - DNA, 60 bp, Artificial
  Synthetic oligonucleotide
atgatggggaccgtgcagtgattacatacgagggggattctagtgcaggatataaccatg

SEQ ID NO: 333753 - DNA, 59 bp, Artificial
  Synthetic oligonucleotide
atgatggggcccctccttgtacaatcaaatgttggttcactaagtcaggtgaatggctc

SEQ ID NO: 333754 - DNA, 55 bp, Artificial
  Synthetic oligonucleotide
atgatgggtatgcccgatttatggacaccaaccctgacaggtatgggctcctgcc

SEQ ID NO: 333755 - DNA, 60 bp, Artificial
  Synthetic oligonucleotide
atgatggtagagccaggatgtcaatatgtatatcggggccgaacaacaatgcatcagcag

SEQ ID NO: 333756 - DNA, 55 bp, Artificial
  Synthetic oligonucleotide
atgatggtctgtcagatgaaaagttgaagtgttgtgttgtagatgccctcaggca

SEQ ID NO: 333757 - DNA, 55 bp, Artificial
  Synthetic oligonucleotide
atgatggttacacaggcaacccagtgtgcatatgggatgagtttgatgtggacgc

SEQ ID NO: 333758 - DNA, 54 bp, Artificial
  Synthetic oligonucleotide
atgatgtaacgccaataagttggacatatatagatgattacatgagaaatgcgt

SEQ ID NO: 333759 - DNA, 60 bp, Artificial
  Synthetic oligonucleotide
atgatgtagaagctaatgtctctgaatgtctaagcaaaatggggaagatctccaaagctg

SEQ ID NO: 333760 - DNA, 50 bp, Artificial
  Synthetic oligonucleotide
atgatgtagcttttaaccgaggtgttcgtcaggaaagacaacgtagaaaa

SEQ ID NO: 333761 - DNA, 60 bp, Artificial
  Synthetic oligonucleotide
atgatgtatcccttcctccaaattgttgaagtcaaatggttgtatgatcccatcatgtcc

SEQ ID NO: 333762 - DNA, 53 bp, Artificial
  Synthetic oligonucleotide
atgatgtcgttcgcctcaattcaaccgcctaacatttctactccgcctaccgt

SEQ ID NO: 333763 - DNA, 55 bp, Artificial
  Synthetic oligonucleotide
atgatgtctaaacgtcgccgtgtaaccagagcgagtccagatgacatttggcgcc

SEQ ID NO: 333764 - DNA, 60 bp, Artificial
  Synthetic oligonucleotide
atgatgtgggagatcaacggtcctgagtcagtgctggtcaacacttatcaatggatcatt

SEQ ID NO: 333765 - DNA, 60 bp, Artificial
  Synthetic oligonucleotide
atgatgtgggagatcaatggtcctgagtcagtgttggtcaatacctatcagtggatcatc

SEQ ID NO: 333766 - DNA, 58 bp, Artificial
  Synthetic oligonucleotide
atgatgtggtattgggggccaagtctgtacaacatcttgagtccctttataccgctgt

SEQ ID NO: 333767 - DNA, 55 bp, Artificial
  Synthetic oligonucleotide
atgatgtgtaatgtgggaggaaacttgtgggtcacagtctactatggggtacctg

SEQ ID NO: 333768 - DNA, 51 bp, Artificial
  Synthetic oligonucleotide
atgatgtgttatcgtcactgggttgcatgttggtattaagatttgcgtatg

SEQ ID NO: 333769 - DNA, 60 bp, Artificial
  Synthetic oligonucleotide
atgatgttacatatgatgacttagtcaggatgtcaaacgaagtgtttgtgctcaaaaata

SEQ ID NO: 333770 - DNA, 60 bp, Artificial
  Synthetic oligonucleotide
atgatgttcagaaccctcagaacatgtggtctgctagagcaacagttcactatgggatag

SEQ ID NO: 333771 - DNA, 55 bp, Artificial
  Synthetic oligonucleotide
atgatgttggtcagcaagtttgtccaaattatgtcatgcttagatcatcggtcac

SEQ ID NO: 333772 - DNA, 56 bp, Artificial
  Synthetic oligonucleotide
atgatgtttacgatgccgcctttcttaagggggttgggctcaacaagtgtgtgagg

SEQ ID NO: 333773 - DNA, 60 bp, Artificial
  Synthetic oligonucleotide
atgattaaagatagtatggatcaacagccgcttaagatatcgattgacgaggaacatagc

SEQ ID NO: 333774 - DNA, 60 bp, Artificial
  Synthetic oligonucleotide
atgattacaaggagaaccgattcattgaaattggagtgacgcggagagaggtccatacat

SEQ ID NO: 333775 - DNA, 59 bp, Artificial
  Synthetic oligonucleotide
atgattacaaggagaatcggttcattgaaattggagtgacacggagggaggtccacata

SEQ ID NO: 333776 - DNA, 51 bp, Artificial
  Synthetic oligonucleotide
atgattacatgcactagtaaatatttgcacatgctaatgtgttcatgtggg

SEQ ID NO: 333777 - DNA, 59 bp, Artificial
  Synthetic oligonucleotide
atgattacattattgtatagtttgtataactggtcacataaaagcggcgtgatacaaac

SEQ ID NO: 333778 - DNA, 60 bp, Artificial
  Synthetic oligonucleotide
atgattacgccaacacaagactctctgcactagagtagcgcctaggcagcataaaatgtg

SEQ ID NO: 333779 - DNA, 57 bp, Artificial
  Synthetic oligonucleotide
atgattagggggaaaccagaggagaggactagcatttggacttcaagtagctccacc

SEQ ID NO: 333780 - DNA, 60 bp, Artificial
  Synthetic oligonucleotide
atgattatcccttccttgcgcgtgaccctcgattcaaacatcgtatattccagcaactga

SEQ ID NO: 333781 - DNA, 60 bp, Artificial
  Synthetic oligonucleotide
atgattatccgcatcctctctcacactggatatgccccttccttcaccgatctactcaat

SEQ ID NO: 333782 - DNA, 52 bp, Artificial
  Synthetic oligonucleotide
atgattatttcggggaggatatcgaagggtttaagaaaggaacgaacgcggc

SEQ ID NO: 333783 - DNA, 53 bp, Artificial
  Synthetic oligonucleotide
atgattcaacaactgcaattcgtggagcactacagaggctttctgatgagctt

SEQ ID NO: 333784 - DNA, 55 bp, Artificial
  Synthetic oligonucleotide
atgattcagatactctctggggtgatgcatacctagaggacgaaccagagcaacc

SEQ ID NO: 333785 - DNA, 60 bp, Artificial
  Synthetic oligonucleotide
atgattcagcgctagaattggatatgtcagaactagctgatcttattttgaacgaatggc

SEQ ID NO: 333786 - DNA, 60 bp, Artificial
  Synthetic oligonucleotide
atgattccactatgtccgtatggaatcatgaatttccttgttgccagtgctggagatccg

SEQ ID NO: 333787 - DNA, 55 bp, Artificial
  Synthetic oligonucleotide
atgattccttccacacggatgatcgacggtggcttactgctttatcccgattcag

SEQ ID NO: 333788 - DNA, 60 bp, Artificial
  Synthetic oligonucleotide
atgattcctttgcaaatctgggcaatagcaggactaatagtagcgctaatcctagcaata

SEQ ID NO: 333789 - DNA, 60 bp, Artificial
  Synthetic oligonucleotide
atgattcgcatgctggtgctgattgtagttacggctgcaagcccagtgtatcagagatgt

SEQ ID NO: 333790 - DNA, 55 bp, Artificial
  Synthetic oligonucleotide
atgattcggtggtcctctgtagcgactaccggcagagccgcaatgcggcagcttt

SEQ ID NO: 333791 - DNA, 60 bp, Artificial
  Synthetic oligonucleotide
atgattctcactaagtgtgaggaccttgctgtagtgtctgctagtatccgagcctttctt

SEQ ID NO: 333792 - DNA, 60 bp, Artificial
  Synthetic oligonucleotide
atgattctccagatcttgtgatgcagctccataaacctgtgattgattctgatcacgttg

SEQ ID NO: 333793 - DNA, 60 bp, Artificial
  Synthetic oligonucleotide
atgattgacatacgacttgtctgttgcgaaacgaacagctctaattacattattaagcgc

SEQ ID NO: 333794 - DNA, 59 bp, Artificial
  Synthetic oligonucleotide
atgattgaggccgagtcttctgtcaaagaaaaggacatgactaaggaattctttgagaa

SEQ ID NO: 333795 - DNA, 60 bp, Artificial
  Synthetic oligonucleotide
atgattgataagaatgtcagatcactaatgatgaataaagctttgtcacttatgtcaacc

SEQ ID NO: 333796 - DNA, 59 bp, Artificial
  Synthetic oligonucleotide
atgattgatcatctcttttctcgggccctctggaagactccggagctggatttgggaaa

SEQ ID NO: 333797 - DNA, 60 bp, Artificial
  Synthetic oligonucleotide
atgattgcaatcattataatagcgatattggcaacaaccggaaaatcagacaagatctgc

SEQ ID NO: 333798 - DNA, 60 bp, Artificial
  Synthetic oligonucleotide
atgattgcaatcattgtaatagcgatactggcagcagccggaaagtcagacaagatatgc

SEQ ID NO: 333799 - DNA, 55 bp, Artificial
  Synthetic oligonucleotide
atgattgcaggtaacgcggacttctccatgtccgtttgggaaaattacgtgacgc

SEQ ID NO: 333800 - DNA, 60 bp, Artificial
  Synthetic oligonucleotide
atgattgccctaactcgagtattgtgtacgagacggccgataccattctgcactctccgg

SEQ ID NO: 333801 - DNA, 60 bp, Artificial
  Synthetic oligonucleotide
atgattgcgccctccctggtagtggactcaagctgcctgttcatgaacctgcaactaaag

SEQ ID NO: 333802 - DNA, 50 bp, Artificial
  Synthetic oligonucleotide
atgattgcggcagctctcatactcattcttgtgagtgcatggggtttctg

SEQ ID NO: 333803 - DNA, 60 bp, Artificial
  Synthetic oligonucleotide
atgattgctttttacgctcgtatgttgtcactactcaatatacctcaccatctagaatcg

SEQ ID NO: 333804 - DNA, 60 bp, Artificial
  Synthetic oligonucleotide
atgattggacattaaacagaaatcagccagctgcgactgctttggccaacactatagaag

SEQ ID NO: 333805 - DNA, 60 bp, Artificial
  Synthetic oligonucleotide
atgattgggcaaatcttgtttgggagaacagctctcgggacttgctcgtgtcatctacca

SEQ ID NO: 333806 - DNA, 59 bp, Artificial
  Synthetic oligonucleotide
atgattgtccactgcccctctagagatgtgtgtgaaacacaccattgttttttctgtct

SEQ ID NO: 333807 - DNA, 55 bp, Artificial
  Synthetic oligonucleotide
atgattgtctaatgaagattttacggtctccgctgatctaaaagctgatgcttcc

SEQ ID NO: 333808 - DNA, 55 bp, Artificial
  Synthetic oligonucleotide
atgatttaattagagtggagccaattggtatctggatccaaggtgaaccagggca

SEQ ID NO: 333809 - DNA, 60 bp, Artificial
  Synthetic oligonucleotide
atgatttacactcgtcgtgcccttgtgatgcacccttacggcgtgaaatggactggcgca

SEQ ID NO: 333810 - DNA, 60 bp, Artificial
  Synthetic oligonucleotide
atgatttacataagatctgtcagtcgcaaaacgaacagctctaattacattgtttatcgt

SEQ ID NO: 333811 - DNA, 56 bp, Artificial
  Synthetic oligonucleotide
atgatttaccaatcaaaatattgacgggcttaacgccagaggaatacttatttctc

SEQ ID NO: 333812 - DNA, 54 bp, Artificial
  Synthetic oligonucleotide
atgatttatactgattaagtgtccagttaaattgagtcacagcattccaagcag

SEQ ID NO: 333813 - DNA, 51 bp, Artificial
  Synthetic oligonucleotide
atgatttattcccaaagaagacaagagatccttgatctgtgggtctaccat

SEQ ID NO: 333814 - DNA, 60 bp, Artificial
  Synthetic oligonucleotide
atgatttcatgttgtctgctgtgcggaaagaacatgctatcgtttggttcccaaacctgc

SEQ ID NO: 333815 - DNA, 57 bp, Artificial
  Synthetic oligonucleotide
atgatttccaaaagctagtgcaggaccaggggcaaatagacgacttattcgaattct

SEQ ID NO: 333816 - DNA, 55 bp, Artificial
  Synthetic oligonucleotide
atgatttcttcactagctacgaacctgaaaatgtgtacaacgttttggaaaaatg

SEQ ID NO: 333817 - DNA, 55 bp, Artificial
  Synthetic oligonucleotide
atgatttctttaacagactaaattggctggtaaagtcagacggaaatgagtaccc

SEQ ID NO: 333818 - DNA, 55 bp, Artificial
  Synthetic oligonucleotide
atgatttggcactccaatctaaacgatgccacctatcagagaacaagagcgcttg

SEQ ID NO: 333819 - DNA, 54 bp, Artificial
  Synthetic oligonucleotide
atgattttaactcgtggatacgtttgttgaagataggtgctggtttttcaaccg

SEQ ID NO: 333820 - DNA, 57 bp, Artificial
  Synthetic oligonucleotide
atgattttcaactaattcccatgataagcaaatgtagaactaaagagggaaggagaa

SEQ ID NO: 333821 - DNA, 60 bp, Artificial
  Synthetic oligonucleotide
atgattttgatcgaaacgagatgcccgaattgccaggtgtgatgagatcaaattacgatg

SEQ ID NO: 333822 - DNA, 57 bp, Artificial
  Synthetic oligonucleotide
atgatttttacgttcacaacttcgatgtttagttgatgtacaaatatttcccatgtc

SEQ ID NO: 333823 - DNA, 53 bp, Artificial
  Synthetic oligonucleotide
atgcaaaaaaacatgccctattcccgctcccgtccccaggctcctagtaaaag

SEQ ID NO: 333824 - DNA, 60 bp, Artificial
  Synthetic oligonucleotide
atgcaaaaagtgcaagctatgtggcctagtgtatcatccattcacagagtgtggtacaca

SEQ ID NO: 333825 - DNA, 56 bp, Artificial
  Synthetic oligonucleotide
atgcaaaacccaaagcggcattcacatctctatccgtctgtttcggacaaaatagc

SEQ ID NO: 333826 - DNA, 60 bp, Artificial
  Synthetic oligonucleotide
atgcaaaacctatcagccaaagacttctacaaaccatgcagatacaactgtgaaactaaa

SEQ ID NO: 333827 - DNA, 60 bp, Artificial
  Synthetic oligonucleotide
atgcaaaagagcaaacgtgaatgatttcttcaacagactgaattggctaaccaaatctga

SEQ ID NO: 333828 - DNA, 51 bp, Artificial
  Synthetic oligonucleotide
atgcaaaatgttgtccatttatatgtggaaaagctgtggaattcaaagata

SEQ ID NO: 333829 - DNA, 60 bp, Artificial
  Synthetic oligonucleotide
atgcaaacaactcgacaacacaagtggacacaatattagagaagaatgtgacagtgacgc

SEQ ID NO: 333830 - DNA, 60 bp, Artificial
  Synthetic oligonucleotide
atgcaaacatggagtgattggtattatcacagctggtggtgagggtcatgttgcatttat

SEQ ID NO: 333831 - DNA, 60 bp, Artificial
  Synthetic oligonucleotide
atgcaaaccacctgctcatgtggagcacagatcaccggacatgtcaaaaacggttccatg

SEQ ID NO: 333832 - DNA, 60 bp, Artificial
  Synthetic oligonucleotide
atgcaaagacaattgcttgcttgaccccaaagttccaagtagaagtcaataatctcatga

SEQ ID NO: 333833 - DNA, 55 bp, Artificial
  Synthetic oligonucleotide
atgcaaagactcctagacacctacggtataaatctaccattagtaacatatgtta

SEQ ID NO: 333834 - DNA, 60 bp, Artificial
  Synthetic oligonucleotide
atgcaaaggctgctgagagaggaaggcgtaaacaagggaagaagcctcatagcgatgcgc

SEQ ID NO: 333835 - DNA, 55 bp, Artificial
  Synthetic oligonucleotide
atgcaaagtacttcccggagataggcgtgctctcgaaaaccgagaccgggaggta

SEQ ID NO: 333836 - DNA, 58 bp, Artificial
  Synthetic oligonucleotide
atgcaaatatacggagatgtacccattaaagtatggtgttgtttcatcaacgaactaa

SEQ ID NO: 333837 - DNA, 60 bp, Artificial
  Synthetic oligonucleotide
atgcaaatgacgtcagttgctattactggatcattaagacttttcccttcagaacgcgta

SEQ ID NO: 333838 - DNA, 58 bp, Artificial
  Synthetic oligonucleotide
atgcaaatgttactatccctttttctaccacatatcatgtccctatacatacgggtcc

SEQ ID NO: 333839 - DNA, 60 bp, Artificial
  Synthetic oligonucleotide
atgcaaattccctcacacacgctggttggagcactgcttcggtctgcgacgtactacttc

SEQ ID NO: 333840 - DNA, 55 bp, Artificial
  Synthetic oligonucleotide
atgcaacaagatatgtccaccaagcacgggcccgacttcaaccgtctggtgtccg

SEQ ID NO: 333841 - DNA, 60 bp, Artificial
  Synthetic oligonucleotide
atgcaacagctagtttcatttataatgggaagcttgttgatagcattggttcatggtctc

SEQ ID NO: 333842 - DNA, 59 bp, Artificial
  Synthetic oligonucleotide
atgcaacagggctaccgtgccatcacgttcccgccttacgcggggtatgatggtgctat

SEQ ID NO: 333843 - DNA, 60 bp, Artificial
  Synthetic oligonucleotide
atgcaacatgatgaaaagctgcctggttgggcttgggccttatagaatccaaatcgtcta

SEQ ID NO: 333844 - DNA, 59 bp, Artificial
  Synthetic oligonucleotide
atgcaacccatggcgccgacaacgtacagtcaacgctgctgttgcgtttcaaaccgatt

SEQ ID NO: 333845 - DNA, 57 bp, Artificial
  Synthetic oligonucleotide
atgcaaccgaaacagtggagcagacgaacattcccaggatttgtactaaggggaaga

SEQ ID NO: 333846 - DNA, 60 bp, Artificial
  Synthetic oligonucleotide
atgcaaccgctagtttcatttatggtggggtgcttgttgatagtatcggttcatggtctc

SEQ ID NO: 333847 - DNA, 60 bp, Artificial
  Synthetic oligonucleotide
atgcaaccgctggtctaacccacatgatgatctggcattccaatctgaatgatgccacat

SEQ ID NO: 333848 - DNA, 56 bp, Artificial
  Synthetic oligonucleotide
atgcaacgaagcacgaaaaccgcttcttagttcacaaaatcaaacattccggctac

SEQ ID NO: 333849 - DNA, 51 bp, Artificial
  Synthetic oligonucleotide
atgcaacgagcccagggccttaataatggtgtctgttggaataacacctta

SEQ ID NO: 333850 - DNA, 55 bp, Artificial
  Synthetic oligonucleotide
atgcaacggcgctaccttgttgctgtgggacgtacgtagcgatcgagggacccag

SEQ ID NO: 333851 - DNA, 52 bp, Artificial
  Synthetic oligonucleotide
atgcaacgggagtacgttccagaaggactacacaaacctgcctgtctgtaac

SEQ ID NO: 333852 - DNA, 60 bp, Artificial
  Synthetic oligonucleotide
atgcaactaattataggctaacacattgtaatgtctcaaccatcaaacaggcttgtccaa

SEQ ID NO: 333853 - DNA, 60 bp, Artificial
  Synthetic oligonucleotide
atgcaactcaaagactatcacaagcaacctacaactttgtttatgatgcttctacccttc

SEQ ID NO: 333854 - DNA, 57 bp, Artificial
  Synthetic oligonucleotide
atgcaactcctattgaagttataaatttgccaccaacacgctcttattgggccgaaa

SEQ ID NO: 333855 - DNA, 60 bp, Artificial
  Synthetic oligonucleotide
atgcaactcgtacttttgtaataactgctagcacaccaagatcaatggataaagatactt

SEQ ID NO: 333856 - DNA, 55 bp, Artificial
  Synthetic oligonucleotide
atgcaactctgaacacgcatactgctcatacattgccaaagttctcggttctgaa

SEQ ID NO: 333857 - DNA, 55 bp, Artificial
  Synthetic oligonucleotide
atgcaactgacgatagtctgtgtggcgaatgctccgacaattcttccaacactga

SEQ ID NO: 333858 - DNA, 60 bp, Artificial
  Synthetic oligonucleotide
atgcaactgcccattcacttttcggctggttatcgctaacgtgactagtgatcgttgcat

SEQ ID NO: 333859 - DNA, 58 bp, Artificial
  Synthetic oligonucleotide
atgcaactgctagtttcatttacgacgggaggcttgctgacagtattggttcgtggtc

SEQ ID NO: 333860 - DNA, 60 bp, Artificial
  Synthetic oligonucleotide
atgcaactggactcgcggggaacgatgcgaacttgaagacagagatagggctgacatgag

SEQ ID NO: 333861 - DNA, 52 bp, Artificial
  Synthetic oligonucleotide
atgcaagacaactctactaagaagatagatgcacaaatgttcgcttcgagtg

SEQ ID NO: 333862 - DNA, 55 bp, Artificial
  Synthetic oligonucleotide
atgcaagacataatccaattccttccagcaggttagctattatgacaggtgttga

SEQ ID NO: 333863 - DNA, 57 bp, Artificial
  Synthetic oligonucleotide
atgcaagacgtacaaaggacaatagaagtttctgtaggtcctattgtaggcctagat

SEQ ID NO: 333864 - DNA, 58 bp, Artificial
  Synthetic oligonucleotide
atgcaagataaaagttcggctcagaggggagcacttgacagaaggaaattgtttatgg

SEQ ID NO: 333865 - DNA, 60 bp, Artificial
  Synthetic oligonucleotide
atgcaagattacactgtcaagaagatagatgctcaaatgttcgcgagtaacgcatgtaca

SEQ ID NO: 333866 - DNA, 55 bp, Artificial
  Synthetic oligonucleotide
atgcaagattatacaactgagaatctaagcgttatccagaacgcaaagagccagc

SEQ ID NO: 333867 - DNA, 58 bp, Artificial
  Synthetic oligonucleotide
atgcaagattgacggtgcccattccagtggtacctgtttcccgccctcaggcgaagac

SEQ ID NO: 333868 - DNA, 55 bp, Artificial
  Synthetic oligonucleotide
atgcaagcaagggatcgagtactacgggtagacacatactatgaggagatgtcac

SEQ ID NO: 333869 - DNA, 57 bp, Artificial
  Synthetic oligonucleotide
atgcaagcaccataaaggcgcccgaagtgagccaaggacttggattgcctgtgagca

SEQ ID NO: 333870 - DNA, 59 bp, Artificial
  Synthetic oligonucleotide
atgcaagcgggtagcgctcgtagaatttattgatgagctcggcgatttttaattctggt

SEQ ID NO: 333871 - DNA, 57 bp, Artificial
  Synthetic oligonucleotide
atgcaagcgtattcgacggcatacaaaaacgtgtagataattctttttcgagtacca

SEQ ID NO: 333872 - DNA, 60 bp, Artificial
  Synthetic oligonucleotide
atgcaagggctgaatctgccactatattcgcagatattgccactcctcactcagtctggg

SEQ ID NO: 333873 - DNA, 52 bp, Artificial
  Synthetic oligonucleotide
atgcaagtaaggagcaagccatagtgaggaagtttatgaagattaacaatca

SEQ ID NO: 333874 - DNA, 59 bp, Artificial
  Synthetic oligonucleotide
atgcaagtactgtggtaagccaatagtgttggtccccagtgcggaagagagggccaaga

SEQ ID NO: 333875 - DNA, 50 bp, Artificial
  Synthetic oligonucleotide
atgcaagttaagtatgttaaagattgtgtagcaatggttagaatgtataa

SEQ ID NO: 333876 - DNA, 59 bp, Artificial
  Synthetic oligonucleotide
atgcaataagaattggggaagacgctcacatattagtcacaagggagccctacttatcc

SEQ ID NO: 333877 - DNA, 60 bp, Artificial
  Synthetic oligonucleotide
atgcaatacgattgggtgagaacaaggacgtaatagtcacaagagagccttatgttagct

SEQ ID NO: 333878 - DNA, 60 bp, Artificial
  Synthetic oligonucleotide
atgcaatatgatgaaaagctgcttggttggactcgggccttatcgaattcaagttgtcta

SEQ ID NO: 333879 - DNA, 60 bp, Artificial
  Synthetic oligonucleotide
atgcaatcaaatgcatgaagacatttttcggctggaaagagcccaacataatcaaaccgc

SEQ ID NO: 333880 - DNA, 55 bp, Artificial
  Synthetic oligonucleotide
atgcaatcaagggatcgagtgctgcgggtggatacatattatgaggagatgtcac

SEQ ID NO: 333881 - DNA, 60 bp, Artificial
  Synthetic oligonucleotide
atgcaatccaatggacataacgttgtattactatcaacagacggacgaagcgaacaaatg

SEQ ID NO: 333882 - DNA, 55 bp, Artificial
  Synthetic oligonucleotide
atgcaatgaaagaagaatcaaggattgaaggtccatgggagtatggagagttcat

SEQ ID NO: 333883 - DNA, 54 bp, Artificial
  Synthetic oligonucleotide
atgcaatgatactaggaataatactaataccactgaaaatagttgggaaaagat

SEQ ID NO: 333884 - DNA, 57 bp, Artificial
  Synthetic oligonucleotide
atgcaatggcccgattcactttcagagtggacaaggacgcagatcggcaatcaagtg

SEQ ID NO: 333885 - DNA, 60 bp, Artificial
  Synthetic oligonucleotide
atgcaatgtggcccaacaaatctgaggctaatgagcagatttgcttgtacatcctgggtg

SEQ ID NO: 333886 - DNA, 60 bp, Artificial
  Synthetic oligonucleotide
atgcaatgtttaatggatggtgacgtgaagaaactagccgaggtggtagcagaatccatg

SEQ ID NO: 333887 - DNA, 60 bp, Artificial
  Synthetic oligonucleotide
atgcaattaagcatccctagcgtgatatcgatagtgaacggagcatctcctcaaactctg

SEQ ID NO: 333888 - DNA, 60 bp, Artificial
  Synthetic oligonucleotide
atgcaattaatcaccgacaaccactactagccagacgagaagaactacagcgtcacacta

SEQ ID NO: 333889 - DNA, 58 bp, Artificial
  Synthetic oligonucleotide
atgcaattcgtccgaatccgcattcgaatgggccgggcctatagtacttctactagcc

SEQ ID NO: 333890 - DNA, 60 bp, Artificial
  Synthetic oligonucleotide
atgcaattctcttctctgactgtgaatgtaagaggctcaggaatgaggatactcgtaagg

SEQ ID NO: 333891 - DNA, 59 bp, Artificial
  Synthetic oligonucleotide
atgcaatttggaggaggagatccagtagtcttctatagatctttctatagaaggacccc

SEQ ID NO: 333892 - DNA, 60 bp, Artificial
  Synthetic oligonucleotide
atgcacaaaattacggtgttaatttaccaataactggatcaatggatacatcatatgtga

SEQ ID NO: 333893 - DNA, 55 bp, Artificial
  Synthetic oligonucleotide
atgcacaaagtggctagggatttcgtgcgccatttggtgcccacggccgggctcg

SEQ ID NO: 333894 - DNA, 60 bp, Artificial
  Synthetic oligonucleotide
atgcacacatcgccccaagtcgaatgtccatattcccctccagattggagggatggtact

SEQ ID NO: 333895 - DNA, 60 bp, Artificial
  Synthetic oligonucleotide
atgcacaccttaccaaagtaaaaatcagagtgtaccatcgcgctaagcacgtcatggcat

SEQ ID NO: 333896 - DNA, 50 bp, Artificial
  Synthetic oligonucleotide
atgcacactcacaggggagcaccacaatatgatgtcttcaagtggcagga

SEQ ID NO: 333897 - DNA, 60 bp, Artificial
  Synthetic oligonucleotide
atgcacactgacgttaacgtagattataagaagaatactgagctgtatgaacagctccgt

SEQ ID NO: 333898 - DNA, 60 bp, Artificial
  Synthetic oligonucleotide
atgcacagaacagaggagcttatgtcgagatgcacctcccgggctcagaagtggacagca

SEQ ID NO: 333899 - DNA, 57 bp, Artificial
  Synthetic oligonucleotide
atgcacaggatcctgtcattattcccctcacggatggtacccccaccaatgttaggg

SEQ ID NO: 333900 - DNA, 59 bp, Artificial
  Synthetic oligonucleotide
atgcacatactacggggaccactgcacttccaaagacgcgcaatcctgggggcactaaa

SEQ ID NO: 333901 - DNA, 52 bp, Artificial
  Synthetic oligonucleotide
atgcacatagtagggaggttccctagagtgctgtcctgcttagattgtcttg

SEQ ID NO: 333902 - DNA, 60 bp, Artificial
  Synthetic oligonucleotide
atgcaccaactcctgagacacttccagaaggatgcaaaagtgctgtttcaaaattgggga

SEQ ID NO: 333903 - DNA, 56 bp, Artificial
  Synthetic oligonucleotide
atgcaccaacttttgaggcattttcaaaaggatgcaaaagtgctttttcaaaattg

SEQ ID NO: 333904 - DNA, 60 bp, Artificial
  Synthetic oligonucleotide
atgcaccaatgggtgaatgtgatgcgaaatttcaaacacctcagggaggtataaacatta

SEQ ID NO: 333905 - DNA, 60 bp, Artificial
  Synthetic oligonucleotide
atgcaccaattcatgattgtaacacgaaatgtcaaacacccaagggtgccatcaacacca

SEQ ID NO: 333906 - DNA, 55 bp, Artificial
  Synthetic oligonucleotide
atgcaccagctcgtacccggctgagccctcccgctcctgtgccttgaagccgtag

SEQ ID NO: 333907 - DNA, 60 bp, Artificial
  Synthetic oligonucleotide
atgcaccagtatctcagaagaatgatgcaatccttcacactgactaccatgaaaattgga

SEQ ID NO: 333908 - DNA, 52 bp, Artificial
  Synthetic oligonucleotide
atgcaccatatcttgacggagcagacgtatcaacggataatgggcccatttt

SEQ ID NO: 333909 - DNA, 60 bp, Artificial
  Synthetic oligonucleotide
atgcaccccgctgtgttaacagccggcagaatcagtgagatgggtgtctgcttcggaacc

SEQ ID NO: 333910 - DNA, 60 bp, Artificial
  Synthetic oligonucleotide
atgcacccgaataatacggagctccctagtcatccgccacttcctaataactgagatcaa

SEQ ID NO: 333911 - DNA, 60 bp, Artificial
  Synthetic oligonucleotide
atgcacccttggcaattatgagtatgtcgttagttctcaggaactacgatatatgaattc

SEQ ID NO: 333912 - DNA, 59 bp, Artificial
  Synthetic oligonucleotide
atgcaccgaatcatgagggaatacaagcaggagtggataggttttataggacttgtaaa

SEQ ID NO: 333913 - DNA, 59 bp, Artificial
  Synthetic oligonucleotide
atgcacctcccatcccaaaaaacctagtatgcaagtcaaacataactagaatgattcta

SEQ ID NO: 333914 - DNA, 60 bp, Artificial
  Synthetic oligonucleotide
atgcacgagggattcgaagtcggcgacaatcatgcatccttcatgggagtaccctcatcc

SEQ ID NO: 333915 - DNA, 60 bp, Artificial
  Synthetic oligonucleotide
atgcactaagctcgaggatcttccgtgcaatgtggatgagacaactaaggtgtggacatg

SEQ ID NO: 333916 - DNA, 60 bp, Artificial
  Synthetic oligonucleotide
atgcactactgaaacatcggtttgagataattgaaggaagagaccgaacaattgcctgga

SEQ ID NO: 333917 - DNA, 55 bp, Artificial
  Synthetic oligonucleotide
atgcactcaaaccattgattacagcaatgcgaagaattccatatcacccagttcc

SEQ ID NO: 333918 - DNA, 60 bp, Artificial
  Synthetic oligonucleotide
atgcactgggtggcgctcaggaagcgactggtagaacttttcgagaagcatatagagagt

SEQ ID NO: 333919 - DNA, 60 bp, Artificial
  Synthetic oligonucleotide
atgcacttaatgcaatgacccagaatataagaccggttcagagtgtagcctcaagtagga

SEQ ID NO: 333920 - DNA, 55 bp, Artificial
  Synthetic oligonucleotide
atgcacttatacaggacatcggttctaacggtctagtaaacagagacgttcaggg

SEQ ID NO: 333921 - DNA, 55 bp, Artificial
  Synthetic oligonucleotide
atgcacttcgtgcggctttgtgcagatggtccaccgtaaggatgttccgtaatgc

SEQ ID NO: 333922 - DNA, 59 bp, Artificial
  Synthetic oligonucleotide
atgcacttggtgacgcttacgaagctggagttgagcagagaccgcttttaattacgaat

SEQ ID NO: 333923 - DNA, 60 bp, Artificial
  Synthetic oligonucleotide
atgcacttttttataagcttgatatagtaccaatagatggtgataataccagctatatgt

SEQ ID NO: 333924 - DNA, 55 bp, Artificial
  Synthetic oligonucleotide
atgcagaaagagtaaaaggggaaacgggacaagaatttaggatgcaagtaatgaa

SEQ ID NO: 333925 - DNA, 55 bp, Artificial
  Synthetic oligonucleotide
atgcagaaatccttcgtccgacgcggcaaccaagtacgcgcattacgccactccc

SEQ ID NO: 333926 - DNA, 60 bp, Artificial
  Synthetic oligonucleotide
atgcagaaattagatccacaaggcggcggctcaacaaacagctatgcgcgacgttatgct

SEQ ID NO: 333927 - DNA, 60 bp, Artificial
  Synthetic oligonucleotide
atgcagaactgttagttctattggaaaatgagaggactctggatttccatgactcaaatg

SEQ ID NO: 333928 - DNA, 59 bp, Artificial
  Synthetic oligonucleotide
atgcagaatcacataatgtctgggctacacatgcctgtgtacccaccgaccctagccca

SEQ ID NO: 333929 - DNA, 53 bp, Artificial
  Synthetic oligonucleotide
atgcagaatccggagttaaagtcgcgtgtgctacgtggtcgtggcgagtggga

SEQ ID NO: 333930 - DNA, 54 bp, Artificial
  Synthetic oligonucleotide
atgcagactcaaagcttagatatcgctccttcgactataagtacgtgcacatta

SEQ ID NO: 333931 - DNA, 58 bp, Artificial
  Synthetic oligonucleotide
atgcagactgacaactcgctcggtaacaacggactttatacggtgaaacgactgtgaa

SEQ ID NO: 333932 - DNA, 60 bp, Artificial
  Synthetic oligonucleotide
atgcagagacaactggactggaacaaatagacctattctggtaatatctcctaatctatc

SEQ ID NO: 333933 - DNA, 59 bp, Artificial
  Synthetic oligonucleotide
atgcagagaccaagatgagctggttggcagggcaagggtgtccccggggtgcggatgga

SEQ ID NO: 333934 - DNA, 57 bp, Artificial
  Synthetic oligonucleotide
atgcagagaggcaattttaagggccagaaaagaattaagtgtttcaactgtggcaaa

SEQ ID NO: 333935 - DNA, 60 bp, Artificial
  Synthetic oligonucleotide
atgcagagatgaagtggttgctgtcgaattcagataatgcagcattcccacagatgacaa

SEQ ID NO: 333936 - DNA, 60 bp, Artificial
  Synthetic oligonucleotide
atgcagaggatttggcagcagcgcttggggacatggggcctcttattcttgggaatatta

SEQ ID NO: 333937 - DNA, 60 bp, Artificial
  Synthetic oligonucleotide
atgcagagtgcatatagcacggaggcatggaccctgcgagacacgtgcctggagatgtgg

SEQ ID NO: 333938 - DNA, 59 bp, Artificial
  Synthetic oligonucleotide
atgcagatctgagacggcacggagcagggctcgatgaacctgcgttacgaggcattgtt

SEQ ID NO: 333939 - DNA, 52 bp, Artificial
  Synthetic oligonucleotide
atgcagatgaatctgacagctctggcatctacagttattcggaaaatgaagc

SEQ ID NO: 333940 - DNA, 55 bp, Artificial
  Synthetic oligonucleotide
atgcagcaagaatagctcacaagctcagaactgatgatatggcaatacagcggac

SEQ ID NO: 333941 - DNA, 58 bp, Artificial
  Synthetic oligonucleotide
atgcagcaagggagcatggtcttaaaacaataaaccaccacgtggtaccaacatttca

SEQ ID NO: 333942 - DNA, 55 bp, Artificial
  Synthetic oligonucleotide
atgcagcaattcccggggcactgtccccgccaggtgcagatgcttattagagagg

SEQ ID NO: 333943 - DNA, 60 bp, Artificial
  Synthetic oligonucleotide
atgcagcatactctatatccaactggggcttagatggatcagaaacagtctgcctcagca

SEQ ID NO: 333944 - DNA, 60 bp, Artificial
  Synthetic oligonucleotide
atgcagcatagtaatgtaaccgttactatgctgcatgggaatattcacgtcatttctctc

SEQ ID NO: 333945 - DNA, 56 bp, Artificial
  Synthetic oligonucleotide
atgcagcccagagacccttcacccaagttaaaattctacgttgtgtttccgctcgc

SEQ ID NO: 333946 - DNA, 52 bp, Artificial
  Synthetic oligonucleotide
atgcagcccctcagggattaccagtttatgtaacgccaggatctggtcaatt

SEQ ID NO: 333947 - DNA, 55 bp, Artificial
  Synthetic oligonucleotide
atgcagcgagggaacaggcgttggttaagaaatttgtcagggttaacaattatgt

SEQ ID NO: 333948 - DNA, 60 bp, Artificial
  Synthetic oligonucleotide
atgcagcgatggacccggttggttgacattaggaattactggccctgattctactgctgt

SEQ ID NO: 333949 - DNA, 57 bp, Artificial
  Synthetic oligonucleotide
atgcagcggacaagcgtcatccgcttttaatttcaactgccaaaggattaggggtta

SEQ ID NO: 333950 - DNA, 52 bp, Artificial
  Synthetic oligonucleotide
atgcagcgtgctctccgtcgactccatcttgcgtctagtcgggtgattaatt

SEQ ID NO: 333951 - DNA, 60 bp, Artificial
  Synthetic oligonucleotide
atgcagctaactctgggcaattcaacgatcaccacccaagaagcggccaattctgttgtt

SEQ ID NO: 333952 - DNA, 54 bp, Artificial
  Synthetic oligonucleotide
atgcagctaagtattccaagcgtgatatcaatagtgaatggagcttcccctcag

SEQ ID NO: 333953 - DNA, 60 bp, Artificial
  Synthetic oligonucleotide
atgcagcttaggcactgcccgcatgatttattgcagttcatggggtgcggttcaaatcat

SEQ ID NO: 333954 - DNA, 52 bp, Artificial
  Synthetic oligonucleotide
atgcagcttcaggtgatccgacatccccagagaacattgactcaccaaatgc

SEQ ID NO: 333955 - DNA, 60 bp, Artificial
  Synthetic oligonucleotide
atgcagcttgtgctgcctcgtcgtcgcaaagtctcttgtctaaaatggtcacaaccacgg

SEQ ID NO: 333956 - DNA, 60 bp, Artificial
  Synthetic oligonucleotide
atgcagcttttggaaatctgtgcagtagtaggactggtagtagcgctaatcatagcaata

SEQ ID NO: 333957 - DNA, 60 bp, Artificial
  Synthetic oligonucleotide
atgcaggatcagaaatacaggtcgctggattcgactattcatgtgcaattaatgcaccag

SEQ ID NO: 333958 - DNA, 60 bp, Artificial
  Synthetic oligonucleotide
atgcaggcacccaggtagagattgatggaatcaagactgatgttgtagactcatatgatt

SEQ ID NO: 333959 - DNA, 50 bp, Artificial
  Synthetic oligonucleotide
atgcaggcagttcacgattgcttgccgtaggacatccctattactctgtg

SEQ ID NO: 333960 - DNA, 60 bp, Artificial
  Synthetic oligonucleotide
atgcaggcctacttgctaaggcgggaaaggagtatggcctgacgatgacaccagcagata

SEQ ID NO: 333961 - DNA, 60 bp, Artificial
  Synthetic oligonucleotide
atgcaggcctacttgctaaggcggggaaggagtacggtctgacaatgacaccagctgaca

SEQ ID NO: 333962 - DNA, 60 bp, Artificial
  Synthetic oligonucleotide
atgcagggaacctaacttcatctcagctgaatcagagatcagaaatcctgaagatgatgg

SEQ ID NO: 333963 - DNA, 56 bp, Artificial
  Synthetic oligonucleotide
atgcagggagtgctaatgaattacaggacaaagtacccagatggtactataacccc

SEQ ID NO: 333964 - DNA, 60 bp, Artificial
  Synthetic oligonucleotide
atgcagggataactggactgggacaaataggccagttctggtaatatcccctgatctatc

SEQ ID NO: 333965 - DNA, 60 bp, Artificial
  Synthetic oligonucleotide
atgcagggcagcgcgtgataatactagacgacttgagaacggatactctaaactactacc

SEQ ID NO: 333966 - DNA, 58 bp, Artificial
  Synthetic oligonucleotide
atgcaggtacaacaggaattattaaagcgattgagggttgagccggaacgcttgctaa

SEQ ID NO: 333967 - DNA, 51 bp, Artificial
  Synthetic oligonucleotide
atgcaggtgccttcacacacgttggtaggagcactgcttcggtctgcaacg

SEQ ID NO: 333968 - DNA, 60 bp, Artificial
  Synthetic oligonucleotide
atgcaggttcagagattcaagttgcaggatttgactactcatgcgcacttaatgctccag

SEQ ID NO: 333969 - DNA, 59 bp, Artificial
  Synthetic oligonucleotide
atgcagtacggttgggtgagaacagagacgtaatagtcacaagggagccttatatcagt

SEQ ID NO: 333970 - DNA, 60 bp, Artificial
  Synthetic oligonucleotide
atgcagtagaatgtatagacgacctcataaggtcgggaaaggcaagagccgccatgttag

SEQ ID NO: 333971 - DNA, 60 bp, Artificial
  Synthetic oligonucleotide
atgcagtagggccttgacgctgtacagacaactgtgtggttgttttggcatgaagatgtt

SEQ ID NO: 333972 - DNA, 60 bp, Artificial
  Synthetic oligonucleotide
atgcagtcattgacatgctagtgggtatagttaacgatggacgttttatgataaattgga

SEQ ID NO: 333973 - DNA, 55 bp, Artificial
  Synthetic oligonucleotide
atgcagtggccggcccctactgggctgatgtgaaggaagacgtcgtgtgctacgg

SEQ ID NO: 333974 - DNA, 51 bp, Artificial
  Synthetic oligonucleotide
atgcagttgaaaatctcagcattctacagacagcgaaagattcattactgg

SEQ ID NO: 333975 - DNA, 59 bp, Artificial
  Synthetic oligonucleotide
atgcagttgtctaaccagggtgatcaaacgtcgtatgtgaacttcccatcgctcggagt

SEQ ID NO: 333976 - DNA, 55 bp, Artificial
  Synthetic oligonucleotide
atgcagtttaacgcgccagttaaggggacccccattacttatgatggagaaccca

SEQ ID NO: 333977 - DNA, 55 bp, Artificial
  Synthetic oligonucleotide
atgcataaatggtgcactacatgatacgagggaatgggaaaccctccatggccga

SEQ ID NO: 333978 - DNA, 57 bp, Artificial
  Synthetic oligonucleotide
atgcatacaaatttgtcagcacaaataaaaagggagccgtcttcaagtcaaatttac

SEQ ID NO: 333979 - DNA, 60 bp, Artificial
  Synthetic oligonucleotide
atgcatacagatataatcagtttatgggatcaaagcctaaagccatgtgtgaagttaacc

SEQ ID NO: 333980 - DNA, 55 bp, Artificial
  Synthetic oligonucleotide
atgcatacctccaaaagatccacagagggtaccatgggagtcttgatgaccagcc

SEQ ID NO: 333981 - DNA, 55 bp, Artificial
  Synthetic oligonucleotide
atgcatactgctggttatacttatagtaatacattccttactgcatagctagtgc

SEQ ID NO: 333982 - DNA, 60 bp, Artificial
  Synthetic oligonucleotide
atgcatagagatcgttatcaggtgctgaggaagtggcatgcaactgttactggtggacag

SEQ ID NO: 333983 - DNA, 60 bp, Artificial
  Synthetic oligonucleotide
atgcatagcattctcctgaaaaaaagcagagaagaacagaccacatcaagtgcgtagcac

SEQ ID NO: 333984 - DNA, 58 bp, Artificial
  Synthetic oligonucleotide
atgcatagttaccacgcatccgggtgtaaatctatgttatccgtttagaacattccga

SEQ ID NO: 333985 - DNA, 60 bp, Artificial
  Synthetic oligonucleotide
atgcatatgagaagctgtattccgaaacgatttctaagcacgtctctgacggatcgtacg

SEQ ID NO: 333986 - DNA, 60 bp, Artificial
  Synthetic oligonucleotide
atgcatatgtggtccccatatttattgtcgtactgtttgataatgcgcatgaggtccccc

SEQ ID NO: 333987 - DNA, 59 bp, Artificial
  Synthetic oligonucleotide
atgcatatgtgttccccttatatcttgtcgtacccctttgaaatgcgcatgtggtcccc

SEQ ID NO: 333988 - DNA, 59 bp, Artificial
  Synthetic oligonucleotide
atgcatcagttttgaccatatgttaaagcctcattattaccctttcttcaactctcacg

SEQ ID NO: 333989 - DNA, 51 bp, Artificial
  Synthetic oligonucleotide
atgcatcatacgggtacttctgccaaatgcctcaaccaaagctcagagctg

SEQ ID NO: 333990 - DNA, 51 bp, Artificial
  Synthetic oligonucleotide
atgcatcccgtccaaaaccgcgtccacagccgtgtcttcgcttaatgccgt

SEQ ID NO: 333991 - DNA, 51 bp, Artificial
  Synthetic oligonucleotide
atgcatccctgacagctatttccaacaggccgactactgcgataaggtctc

SEQ ID NO: 333992 - DNA, 60 bp, Artificial
  Synthetic oligonucleotide
atgcatccggactcttggtgcaccgaaaaacatacaattgcctaatacagtacaaatcta

SEQ ID NO: 333993 - DNA, 60 bp, Artificial
  Synthetic oligonucleotide
atgcatcggttacaacgaacctaccgatcagtaaatgcaatggtgtatcatcaagggatg

SEQ ID NO: 333994 - DNA, 60 bp, Artificial
  Synthetic oligonucleotide
atgcatcggttagatcagttagttcaactgcatcagcttggacggaagtatctaacatta

SEQ ID NO: 333995 - DNA, 57 bp, Artificial
  Synthetic oligonucleotide
atgcatcttgcgcggctatggatgattttcagttgatcccaatgataagtaagtgca

SEQ ID NO: 333996 - DNA, 60 bp, Artificial
  Synthetic oligonucleotide
atgcatgataaataggtggtggcgtgatcgaatgacgcaaatcattgacctcgaatgctt

SEQ ID NO: 333997 - DNA, 60 bp, Artificial
  Synthetic oligonucleotide
atgcatgcaatgatgaacgatgtgtcaccggaagatttggatcgtgttcgcactgaaggt

SEQ ID NO: 333998 - DNA, 60 bp, Artificial
  Synthetic oligonucleotide
atgcatgccagagctgccaaacagcatatgggagctaccacaatatgcttacataccagc

SEQ ID NO: 333999 - DNA, 59 bp, Artificial
  Synthetic oligonucleotide
atgcatgcgcctcactggcgaaccaggcacttacgacgacaacacggattacaatctgg

SEQ ID NO: 334000 - DNA, 54 bp, Artificial
  Synthetic oligonucleotide
atgcatgcttccattatgttgcaagaggcaatcggcaatttacacactgctgcc

SEQ ID NO: 334001 - DNA, 54 bp, Artificial
  Synthetic oligonucleotide
atgcatggaaaaggcgaggagtaccccgcctttctggctgctagtaagtagcct

SEQ ID NO: 334002 - DNA, 58 bp, Artificial
  Synthetic oligonucleotide
atgcatggaaaagtttagtaaaacaccatatgcatcgttcaaagaaagctaagaaatg

SEQ ID NO: 334003 - DNA, 57 bp, Artificial
  Synthetic oligonucleotide
atgcatggaaagatttcttgaacgaagttaggtgtgaagtggtacctacaaaacatg

SEQ ID NO: 334004 - DNA, 55 bp, Artificial
  Synthetic oligonucleotide
atgcatggagtacaaccagacaagtagcctggaacccagagttgaacggtactac

SEQ ID NO: 334005 - DNA, 58 bp, Artificial
  Synthetic oligonucleotide
atgcatggttattctgtcaatttagatagtatgtatttcgcgccggtttataacttag

SEQ ID NO: 334006 - DNA, 60 bp, Artificial
  Synthetic oligonucleotide
atgcatgtataaggctaacggacatgggagacatgtgctttgacatcaacaacatactgt

SEQ ID NO: 334007 - DNA, 60 bp, Artificial
  Synthetic oligonucleotide
atgcatgtattcaatcgaagcaggctttcacattctcgccaacttacaaggcctttctgt

SEQ ID NO: 334008 - DNA, 60 bp, Artificial
  Synthetic oligonucleotide
atgcatgtttcaatcagcatatgtcttgtgttagatttctacatagaacaatattgccag

SEQ ID NO: 334009 - DNA, 51 bp, Artificial
  Synthetic oligonucleotide
atgcatgttttttcttaggaggggttgcctgagaacagctaggctcctctt

SEQ ID NO: 334010 - DNA, 58 bp, Artificial
  Synthetic oligonucleotide
atgcattaaccgaaaggacttcactcgcgctattaaaacgtatctcagattggttgaa

SEQ ID NO: 334011 - DNA, 60 bp, Artificial
  Synthetic oligonucleotide
atgcattaggaattattcaggcacaaccagacaggagtgaatcagagttagtcaatcaaa

SEQ ID NO: 334012 - DNA, 58 bp, Artificial
  Synthetic oligonucleotide
atgcattatacaaactgatgtgtatgactcaaggaccttacactggtttaccaaaccc

SEQ ID NO: 334013 - DNA, 60 bp, Artificial
  Synthetic oligonucleotide
atgcattatttccgcaagcgcaaccttttcaacatcatgcaacagttggacttacgttac

SEQ ID NO: 334014 - DNA, 52 bp, Artificial
  Synthetic oligonucleotide
atgcattcccaccctcttgccagtttagtgcttatcaccagctggctgagga

SEQ ID NO: 334015 - DNA, 58 bp, Artificial
  Synthetic oligonucleotide
atgcattgtctaggtgttgttggatccctgcaacgcaagctgaagcatctgcctcatc

SEQ ID NO: 334016 - DNA, 51 bp, Artificial
  Synthetic oligonucleotide
atgcatttacaaggccctgaagatcttgcaaaggacctcatacccttggta

SEQ ID NO: 334017 - DNA, 52 bp, Artificial
  Synthetic oligonucleotide
atgcatttccagaaccaccggcttcttcaaaccttatcagtcttggaacagg

SEQ ID NO: 334018 - DNA, 60 bp, Artificial
  Synthetic oligonucleotide
atgcatttgatttctatgagatcacgtctcgcacatccgtccgagcaagagaagctcaca

SEQ ID NO: 334019 - DNA, 60 bp, Artificial
  Synthetic oligonucleotide
atgcatttgcgacttgggaataggtatgagacaatcgagcaactatttaacaagacacga

SEQ ID NO: 334020 - DNA, 57 bp, Artificial
  Synthetic oligonucleotide
atgcatttgtagggacaattggaaaggtgcaaatagaccggtcatcactattaaccc

SEQ ID NO: 334021 - DNA, 60 bp, Artificial
  Synthetic oligonucleotide
atgcattttcacatggtaaacttgatgacgcaagtacggcttttcacaagtctctagcga

SEQ ID NO: 334022 - DNA, 60 bp, Artificial
  Synthetic oligonucleotide
atgccaaaataccattacacagagatgatgagaaagtttacgcagggcatcccattctaa

SEQ ID NO: 334023 - DNA, 56 bp, Artificial
  Synthetic oligonucleotide
atgccaaagaagtcgggaatggttgttttgaattctaccacaaatgtgataacgaa

SEQ ID NO: 334024 - DNA, 55 bp, Artificial
  Synthetic oligonucleotide
atgccaactagcccagattggaacatggacgtcaatttgatcctgagttcaacgt

SEQ ID NO: 334025 - DNA, 60 bp, Artificial
  Synthetic oligonucleotide
atgccaactcacatcacagcacgccaactcgaccgccgaacccgaccccttctctgcacg

SEQ ID NO: 334026 - DNA, 60 bp, Artificial
  Synthetic oligonucleotide
atgccaactgagagcttggtaaagtataggaccaggtgtcgcatgtcgggcgacattaac

SEQ ID NO: 334027 - DNA, 60 bp, Artificial
  Synthetic oligonucleotide
atgccaagaaagagggttggaatcgcaagatcgcgagatctgcttttccttctcaatcgg

SEQ ID NO: 334028 - DNA, 58 bp, Artificial
  Synthetic oligonucleotide
atgccaagaccacgctgaaaggtgacagtgttgcactgaacttttcggacttagttct

SEQ ID NO: 334029 - DNA, 55 bp, Artificial
  Synthetic oligonucleotide
atgccaagagctgtaattgctaatgagcgtgaacattttatgaaaacgagaatag

SEQ ID NO: 334030 - DNA, 50 bp, Artificial
  Synthetic oligonucleotide
atgccaagatatggtctacaacgtaatttgactgatatgagtcttgcgcg

SEQ ID NO: 334031 - DNA, 60 bp, Artificial
  Synthetic oligonucleotide
atgccaagtagacacattgattccaatagatagtgtagaggccaatgccaagaatacaag

SEQ ID NO: 334032 - DNA, 59 bp, Artificial
  Synthetic oligonucleotide
atgccaatatggatgatgctatatggctggttaagctgggtacaacatgttaaaacagc

SEQ ID NO: 334033 - DNA, 60 bp, Artificial
  Synthetic oligonucleotide
atgccaatatgtatgccactttctatgatggatatccgtcttttggaaacataaacggac

SEQ ID NO: 334034 - DNA, 58 bp, Artificial
  Synthetic oligonucleotide
atgccacaccaacaggggctcaatcactacaactaaaccctttcaaaacatctcgaga

SEQ ID NO: 334035 - DNA, 60 bp, Artificial
  Synthetic oligonucleotide
atgccaccacctatggtcacttacattcagacacagataaatgatcctagtcgaactaga

SEQ ID NO: 334036 - DNA, 55 bp, Artificial
  Synthetic oligonucleotide
atgccaccgtggtgctacctgtagaagctagtttcaagcacccgtctcagaatcc

SEQ ID NO: 334037 - DNA, 55 bp, Artificial
  Synthetic oligonucleotide
atgccaccgttaacacaccaaatcatgtacataccacccgggggtcctgtaccaa

SEQ ID NO: 334038 - DNA, 57 bp, Artificial
  Synthetic oligonucleotide
atgccacgacggaaagaaatggatgacaattggagtaacgggccctgattccaaagc

SEQ ID NO: 334039 - DNA, 60 bp, Artificial
  Synthetic oligonucleotide
atgccacgagtcacatatgatttgagatgaattgtagttgtgactacatgtaaccataat

SEQ ID NO: 334040 - DNA, 60 bp, Artificial
  Synthetic oligonucleotide
atgccacgtaccagagaacaagagctctcgtgcgtactgggatggaccccaggatgtgct

SEQ ID NO: 334041 - DNA, 60 bp, Artificial
  Synthetic oligonucleotide
atgccactcgagataacatcaaggttaaaatacgtggaactaggctgagtatgtggcaca

SEQ ID NO: 334042 - DNA, 54 bp, Artificial
  Synthetic oligonucleotide
atgccactggggggcccaaggaaagcttaccctcactgaggtctccggactcgg

SEQ ID NO: 334043 - DNA, 60 bp, Artificial
  Synthetic oligonucleotide
atgccagaagtctatgtgggtcatgttatacgcctttgacagtatttcaatcttggggga

SEQ ID NO: 334044 - DNA, 60 bp, Artificial
  Synthetic oligonucleotide
atgccagaatcgacttcgagtctggacggattaagaaagaagagttctctgagatcataa

SEQ ID NO: 334045 - DNA, 60 bp, Artificial
  Synthetic oligonucleotide
atgccagacggcaacgggtacatacccatagcctacagatttcagtggtacccttgcatg

SEQ ID NO: 334046 - DNA, 60 bp, Artificial
  Synthetic oligonucleotide
atgccagagagtattcgcgcaatgatggatctagcgggacaacattggttcataacagcg

SEQ ID NO: 334047 - DNA, 54 bp, Artificial
  Synthetic oligonucleotide
atgccagagagttttgttagccaagccaccgcacgttgttcagtagatggttct

SEQ ID NO: 334048 - DNA, 59 bp, Artificial
  Synthetic oligonucleotide
atgccaggcgacaaggtatactgaggctaggaatatatcaagtgcctcctacaggggtt

SEQ ID NO: 334049 - DNA, 55 bp, Artificial
  Synthetic oligonucleotide
atgccaggggccttatccagtcatcccgggctcacgctatagtcgcactcacccg

SEQ ID NO: 334050 - DNA, 56 bp, Artificial
  Synthetic oligonucleotide
atgccagtgttgctgatgaagatgctaatgcagcagcctggttaaatagtaaccta

SEQ ID NO: 334051 - DNA, 60 bp, Artificial
  Synthetic oligonucleotide
atgccataactgcattcattaacttcgtgtctgcaatgttgaagatgacagtgacccgtc

SEQ ID NO: 334052 - DNA, 60 bp, Artificial
  Synthetic oligonucleotide
atgccatactggttgcccacatataacttcgaaggactgcaatgcttgcagtgcaagaaa

SEQ ID NO: 334053 - DNA, 55 bp, Artificial
  Synthetic oligonucleotide
atgccatacttgaggacaacgggccagacttgacagtcgtcgttgaacagccaac

SEQ ID NO: 334054 - DNA, 60 bp, Artificial
  Synthetic oligonucleotide
atgccatcatcttactcacgtgtgttgtacacccgactctgatatttgacatcaccaagc

SEQ ID NO: 334055 - DNA, 60 bp, Artificial
  Synthetic oligonucleotide
atgccatcattcactgaactctggactgatgaatttgctccccatgctgcttacgctagg

SEQ ID NO: 334056 - DNA, 60 bp, Artificial
  Synthetic oligonucleotide
atgccatccaagtgtcattacctacaaaaacaatacttgggtgaatcagacatacatcaa

SEQ ID NO: 334057 - DNA, 60 bp, Artificial
  Synthetic oligonucleotide
atgccatcgcgagggttaccaccggcgtgcacaagcccgccgcgcactgcagccgcctaa

SEQ ID NO: 334058 - DNA, 53 bp, Artificial
  Synthetic oligonucleotide
atgccatctgaaaagcaaatcattctgaagggtcaggggacaataactgatcc

SEQ ID NO: 334059 - DNA, 60 bp, Artificial
  Synthetic oligonucleotide
atgccatcttggatctgcgcaccaacactgaaattgacctggttattccgtatgtaaatt

SEQ ID NO: 334060 - DNA, 60 bp, Artificial
  Synthetic oligonucleotide
atgccatgtatggcactgatggcttagaggctctagacttgagtactagtgctgggtacc

SEQ ID NO: 334061 - DNA, 60 bp, Artificial
  Synthetic oligonucleotide
atgccattcacaagtttgaatctcgccgtactcgtgtcagcgcttgtggtcacattgctt

SEQ ID NO: 334062 - DNA, 55 bp, Artificial
  Synthetic oligonucleotide
atgccattgaggttgcatttgcatacaaaatgggcgaaagggcaaccaatcgtat

SEQ ID NO: 334063 - DNA, 57 bp, Artificial
  Synthetic oligonucleotide
atgccatttaaggcgttccaaaataccagtccaactgtgaatagcaccagttagacg

SEQ ID NO: 334064 - DNA, 59 bp, Artificial
  Synthetic oligonucleotide
atgcccacacaagtaattgtgtggacctaatgacctagcccacatcgtcttgccggtac

SEQ ID NO: 334065 - DNA, 60 bp, Artificial
  Synthetic oligonucleotide
atgcccacagacgctacaattcatgaactatacatagttgaccacccctacgagttagaa

SEQ ID NO: 334066 - DNA, 50 bp, Artificial
  Synthetic oligonucleotide
atgcccacatgcagttcctcacgtgtacatatggagtatatttactgatg

SEQ ID NO: 334067 - DNA, 60 bp, Artificial
  Synthetic oligonucleotide
atgcccacctatgctgctccgggtggatgcttatacatgctatggatgcctacatttgaa

SEQ ID NO: 334068 - DNA, 55 bp, Artificial
  Synthetic oligonucleotide
atgcccacgctgtggggagatttggagaaacctagatgattatatggccgaaggc

SEQ ID NO: 334069 - DNA, 55 bp, Artificial
  Synthetic oligonucleotide
atgcccagcaagaagaatggaagaagcggaccccaaccacataaaaggtgggtgt

SEQ ID NO: 334070 - DNA, 59 bp, Artificial
  Synthetic oligonucleotide
atgcccaggtagctgaacttgtgccggtctacgacctgaccctcgttagcatcaaggac

SEQ ID NO: 334071 - DNA, 55 bp, Artificial
  Synthetic oligonucleotide
atgcccagtaccgggttgctcgtgctacaattcgctaccgcccgctggtccccaa

SEQ ID NO: 334072 - DNA, 53 bp, Artificial
  Synthetic oligonucleotide
atgcccatctttgctgctccggatggatgtttatacccgctgtggatgcctat

SEQ ID NO: 334073 - DNA, 58 bp, Artificial
  Synthetic oligonucleotide
atgcccattcagaggtttcttcccgtttcataaggacaatgcaatacgattgggtgaa

SEQ ID NO: 334074 - DNA, 59 bp, Artificial
  Synthetic oligonucleotide
atgccccaaatatgtgaacaaaaggagcctattgcttgcaaccggaatgaggaatgttc

SEQ ID NO: 334075 - DNA, 59 bp, Artificial
  Synthetic oligonucleotide
atgccccaacatacctacctgcggaggtggacggtgatgtcaaactcagttccaatctg

SEQ ID NO: 334076 - DNA, 54 bp, Artificial
  Synthetic oligonucleotide
atgccccacaacgtctcggttacacggtccgcagagaagacccctgacgaaccc

SEQ ID NO: 334077 - DNA, 60 bp, Artificial
  Synthetic oligonucleotide
atgccccacatttctcacgtcaataaaggcttgtgacatggcaatctgttatggtgcaga

SEQ ID NO: 334078 - DNA, 58 bp, Artificial
  Synthetic oligonucleotide
atgcccccaaaactcgtaaggacgcgatgttgggcacgcatatcatatgggacgtggg

SEQ ID NO: 334079 - DNA, 59 bp, Artificial
  Synthetic oligonucleotide
atgccccccaagatatgtcagctctacttgactacacatcttggcctatatttgtggac

SEQ ID NO: 334080 - DNA, 54 bp, Artificial
  Synthetic oligonucleotide
atgccccccctcgagggggaacctggagacccagacttgagcactggttcctgg

SEQ ID NO: 334081 - DNA, 56 bp, Artificial
  Synthetic oligonucleotide
atgccccggttcgagccaaagcgcggctcgtattggccggtttccgcgacaagcga

SEQ ID NO: 334082 - DNA, 60 bp, Artificial
  Synthetic oligonucleotide
atgcccctaattatcactacgaggagtgctcctgttatcctgatgatggcgaaatcacgt

SEQ ID NO: 334083 - DNA, 58 bp, Artificial
  Synthetic oligonucleotide
atgcccctatcctgtcaacaattccggagacttgtgttattagacaacgaggcagggc

SEQ ID NO: 334084 - DNA, 58 bp, Artificial
  Synthetic oligonucleotide
atgcccctatcttatcaacacttccggaatgtactgttattagacaacgaggcaggcc

SEQ ID NO: 334085 - DNA, 58 bp, Artificial
  Synthetic oligonucleotide
atgcccctatcttatcaacacttccggagactactgttattagatcccgacgcaggac

SEQ ID NO: 334086 - DNA, 52 bp, Artificial
  Synthetic oligonucleotide
atgcccgaaatggataaatcggtcgagactatagtaaatcatgtcgtgtacc

SEQ ID NO: 334087 - DNA, 60 bp, Artificial
  Synthetic oligonucleotide
atgcccgaacccaagcacacactgcatgttgtgcaagtggaggccaaacacatggccact

SEQ ID NO: 334088 - DNA, 54 bp, Artificial
  Synthetic oligonucleotide
atgcccgacatgagacaacacagacggaacgcctctgcctgcagcgtaaatgga

SEQ ID NO: 334089 - DNA, 57 bp, Artificial
  Synthetic oligonucleotide
atgcccgaccccgcgcattactcctgtgcctactcctactcaccgtaggggtaggca

SEQ ID NO: 334090 - DNA, 55 bp, Artificial
  Synthetic oligonucleotide
atgcccgagtcccagcacctgccggcgacggacaacccgtccgtgtgcgtgtact

SEQ ID NO: 334091 - DNA, 60 bp, Artificial
  Synthetic oligonucleotide
atgcccgatatcgccggtatatcaacaggtcaagctgcgagtgtcttatcagttcgttaa

SEQ ID NO: 334092 - DNA, 60 bp, Artificial
  Synthetic oligonucleotide
atgcccggaacactgagacccgtgacaataattgcctacgagtcagtggcaacaggcagc

SEQ ID NO: 334093 - DNA, 53 bp, Artificial
  Synthetic oligonucleotide
atgcccggcttaccgtgagccgcctttgaaagaaaggtttacacggactctgt

SEQ ID NO: 334094 - DNA, 57 bp, Artificial
  Synthetic oligonucleotide
atgcccgggacggaacgcgttctcagtgcggtttgcgccgtgcggcgctaccgcgcg

SEQ ID NO: 334095 - DNA, 60 bp, Artificial
  Synthetic oligonucleotide
atgccctaatggaattgccagatgaatcaccaccattcgaaccaaggctgtgggctgtgt

SEQ ID NO: 334096 - DNA, 58 bp, Artificial
  Synthetic oligonucleotide
atgccctacggggtaggaatgaatctgtcagggtgtatgtaccatatgaaaataaatg

SEQ ID NO: 334097 - DNA, 55 bp, Artificial
  Synthetic oligonucleotide
atgccctagagacactgctgtgccggaacacctcactgtgctgccccaactgcgc

SEQ ID NO: 334098 - DNA, 60 bp, Artificial
  Synthetic oligonucleotide
atgccctagctgacgagcgtgtcgagtctcaggctaacgctcacgtgacgtctttcgggt

SEQ ID NO: 334099 - DNA, 55 bp, Artificial
  Synthetic oligonucleotide
atgccctagtaaaagctttcggaatacagtcatactatggaagactgttaggcgg

SEQ ID NO: 334100 - DNA, 50 bp, Artificial
  Synthetic oligonucleotide
atgccctcaccacttagacataataacagggcacagggtcgggcgtcaac

SEQ ID NO: 334101 - DNA, 55 bp, Artificial
  Synthetic oligonucleotide
atgccctcacgcacagctattggaccctacttttagttcccctggtccctcttga

SEQ ID NO: 334102 - DNA, 58 bp, Artificial
  Synthetic oligonucleotide
atgccctcgagtttcccgatgttacttgacatggaaatccgcgttgcaaatgaattgt

SEQ ID NO: 334103 - DNA, 55 bp, Artificial
  Synthetic oligonucleotide
atgccctctggatccggactttagaaagtacactgcattcaccattccatcggtg

SEQ ID NO: 334104 - DNA, 56 bp, Artificial
  Synthetic oligonucleotide
atgccctgttagaatgtgttaagaacagggcattcagttcggacaaatacgaaccc

SEQ ID NO: 334105 - DNA, 58 bp, Artificial
  Synthetic oligonucleotide
atgcccttaataagactagaagtaagcttcatagacttaacagaaccatggctagaag

SEQ ID NO: 334106 - DNA, 60 bp, Artificial
  Synthetic oligonucleotide
atgcccttcatgttattgtatgtgattgtcatgttttatgctgtggattatacatgagtc

SEQ ID NO: 334107 - DNA, 57 bp, Artificial
  Synthetic oligonucleotide
atgcccttttcatctctaatctggtgaccagaacactcagatttaaagagcttttgc

SEQ ID NO: 334108 - DNA, 55 bp, Artificial
  Synthetic oligonucleotide
atgccgaagcgcgatgccccatggcgttcattggcggggacctcaaaggtttccc

SEQ ID NO: 334109 - DNA, 60 bp, Artificial
  Synthetic oligonucleotide
atgccgactgcacagtctactatgaaagctgatgagttaacacctggcagattcaggact

SEQ ID NO: 334110 - DNA, 53 bp, Artificial
  Synthetic oligonucleotide
atgccgagccagagatgtacccgccacttggatatgtgcacctcactgaaagt

SEQ ID NO: 334111 - DNA, 55 bp, Artificial
  Synthetic oligonucleotide
atgccgaggtatggtttgcttcgaaatctacgggataggagtttagcccgctatg

SEQ ID NO: 334112 - DNA, 59 bp, Artificial
  Synthetic oligonucleotide
atgccgagtctgatcaactcggggcggtgcgagccatagagcacggttgtgggtttaaa

SEQ ID NO: 334113 - DNA, 51 bp, Artificial
  Synthetic oligonucleotide
atgccgagtggtttaagatgcagggatgcccagggtagggttgtattagac

SEQ ID NO: 334114 - DNA, 54 bp, Artificial
  Synthetic oligonucleotide
atgccgatacacaaacctatttacatgatgattcaaaagatgagtatgaaaatg

SEQ ID NO: 334115 - DNA, 60 bp, Artificial
  Synthetic oligonucleotide
atgccgattcatcggattgcgcgcaaactcctcacttctgcgcatccgagagccatgtgc

SEQ ID NO: 334116 - DNA, 58 bp, Artificial
  Synthetic oligonucleotide
atgccgcacccgtaacctttgcataacaccctacagattggcaccaaatgcccacgta

SEQ ID NO: 334117 - DNA, 60 bp, Artificial
  Synthetic oligonucleotide
atgccgcagggtaattcacagcgcacgttagctggtgtcactgtgagtgtaggtggcgtg

SEQ ID NO: 334118 - DNA, 60 bp, Artificial
  Synthetic oligonucleotide
atgccgcattcccacagacaaccaagtcttacaggaattccaaaagcaggcctgccttga

SEQ ID NO: 334119 - DNA, 55 bp, Artificial
  Synthetic oligonucleotide
atgccgccatgcgaacggggcggagttacccgagcctgaggcctctcgtttagag

SEQ ID NO: 334120 - DNA, 55 bp, Artificial
  Synthetic oligonucleotide
atgccgccgcatattaacgcacctgtggcgcggtgctagctgactgcggacaacg

SEQ ID NO: 334121 - DNA, 60 bp, Artificial
  Synthetic oligonucleotide
atgccgcctcaagaccatccgtcatggctgtgagagcttacaccattggagggaagggcc

SEQ ID NO: 334122 - DNA, 60 bp, Artificial
  Synthetic oligonucleotide
atgccgcctcctcggccatagccggaacagatataaagcccattgatgcgtcactgggct

SEQ ID NO: 334123 - DNA, 55 bp, Artificial
  Synthetic oligonucleotide
atgccgcgatatggtttggtgaggaatttacgagatatgagtctagcgcgatacg

SEQ ID NO: 334124 - DNA, 53 bp, Artificial
  Synthetic oligonucleotide
atgccgctaccgcgtaattgcggcgcgattgcattgtaagaccgggtgtttag

SEQ ID NO: 334125 - DNA, 60 bp, Artificial
  Synthetic oligonucleotide
atgccgctggtggtagacacgaacagagctgagtgtctaaccgcctgggcgggtgccgga

SEQ ID NO: 334126 - DNA, 51 bp, Artificial
  Synthetic oligonucleotide
atgccggatccctttttgagtccgagtgtacatggctggttaatgcctcta

SEQ ID NO: 334127 - DNA, 58 bp, Artificial
  Synthetic oligonucleotide
atgccggattgtacctgcgagagggtagaggccccttagagcccctgctagcgcccgc

SEQ ID NO: 334128 - DNA, 59 bp, Artificial
  Synthetic oligonucleotide
atgccggccattcaaacatgaggattacccatgtcgaagacaacaaagaagttcaactc

SEQ ID NO: 334129 - DNA, 60 bp, Artificial
  Synthetic oligonucleotide
atgccggctatgcttttcgcagatatcaacacgttaggcgccacgttgacgtatagcgcg

SEQ ID NO: 334130 - DNA, 60 bp, Artificial
  Synthetic oligonucleotide
atgccgggcaattactcactctggatatctccacagaaccattatgtttggaggacgctg

SEQ ID NO: 334131 - DNA, 60 bp, Artificial
  Synthetic oligonucleotide
atgccggtatgaaggtgaatgggtcacattcagggaggtacttgctgcagctgatagttt

SEQ ID NO: 334132 - DNA, 58 bp, Artificial
  Synthetic oligonucleotide
atgccgtaaccactacacactcctggatccctaagaggaaccgctccatcctcaacac

SEQ ID NO: 334133 - DNA, 55 bp, Artificial
  Synthetic oligonucleotide
atgccgtacttcccggtcgatgacggggcccactcgcacccgaagtttctgcgtg

SEQ ID NO: 334134 - DNA, 60 bp, Artificial
  Synthetic oligonucleotide
atgccgtactttgtgcgcgctcaggggctccttcgtgcatgcatgttggtgcggaaagtc

SEQ ID NO: 334135 - DNA, 57 bp, Artificial
  Synthetic oligonucleotide
atgccgtcaggtataaggtcaacgagaaccccctgtatgccgcgaattccgagcacg

SEQ ID NO: 334136 - DNA, 53 bp, Artificial
  Synthetic oligonucleotide
atgccgtcccggttcatatttgggaccggctcatgctttttggtgccactcta

SEQ ID NO: 334137 - DNA, 57 bp, Artificial
  Synthetic oligonucleotide
atgccgtccttaactcaactatttaccgtgttgggagaactgccgagctgatcccta

SEQ ID NO: 334138 - DNA, 54 bp, Artificial
  Synthetic oligonucleotide
atgccgtcggtctttgatcgatgaggtgcctttgaaccctttatcccggggttc

SEQ ID NO: 334139 - DNA, 58 bp, Artificial
  Synthetic oligonucleotide
atgccgtgtttaagcgttcttatgatgttaagcgtaacgcagggagaagacgatctgg

SEQ ID NO: 334140 - DNA, 56 bp, Artificial
  Synthetic oligonucleotide
atgccgttaggtttaggtgacggtatatccatataccggaggagctatgtttccga

SEQ ID NO: 334141 - DNA, 53 bp, Artificial
  Synthetic oligonucleotide
atgccgttatgtccatgcgcttagccctcatgcaaatcgagtccgcctcctac

SEQ ID NO: 334142 - DNA, 56 bp, Artificial
  Synthetic oligonucleotide
atgccgttcgccccaatcgcatcgctgtccgattattctcaggcccctttgacgat

SEQ ID NO: 334143 - DNA, 57 bp, Artificial
  Synthetic oligonucleotide
atgcctaaagacttcccaccctttgcacagaggctacgatttagaaatccaatagtg

SEQ ID NO: 334144 - DNA, 55 bp, Artificial
  Synthetic oligonucleotide
atgcctaactacaatacaagctcaaactcatccaacaactcaaacatcacactcc

SEQ ID NO: 334145 - DNA, 60 bp, Artificial
  Synthetic oligonucleotide
atgcctaactctcaggcttttgtcaaagcttccactgattctcatttcaagctgagcctc

SEQ ID NO: 334146 - DNA, 60 bp, Artificial
  Synthetic oligonucleotide
atgcctaagcacactacaactctgcgtatgcccgacactgctgaccagtggactcgtcgt

SEQ ID NO: 334147 - DNA, 52 bp, Artificial
  Synthetic oligonucleotide
atgcctaaggattttcctccattcggaaaacgtaacctctttatacaaccaa

SEQ ID NO: 334148 - DNA, 56 bp, Artificial
  Synthetic oligonucleotide
atgcctaagtggttcgtcgtggcaactaaccgaggcggtggacgttcccactctgc

SEQ ID NO: 334149 - DNA, 60 bp, Artificial
  Synthetic oligonucleotide
atgcctacacagagcctagtaacattctagaaaaattctggttggtcgctcaattgcaaa

SEQ ID NO: 334150 - DNA, 58 bp, Artificial
  Synthetic oligonucleotide
atgcctacgtcataagtcacgtggggacggctgctgtaaacacggaagtagctgaccc

SEQ ID NO: 334151 - DNA, 55 bp, Artificial
  Synthetic oligonucleotide
atgcctagaagcccgtgaattgtccaaatttaatgtagaatgtgaattgcgcctc

SEQ ID NO: 334152 - DNA, 60 bp, Artificial
  Synthetic oligonucleotide
atgcctaggacatcatgcagtgcctaatggaacaatggtgaagacaatcacagatgacca

SEQ ID NO: 334153 - DNA, 50 bp, Artificial
  Synthetic oligonucleotide
atgcctaggaggagccatcaaaacgcgcgttttgattcggggtctctcca

SEQ ID NO: 334154 - DNA, 58 bp, Artificial
  Synthetic oligonucleotide
atgcctatcagtttccagcgtcgcacaggtgacgccttcacttactttgggaacactt

SEQ ID NO: 334155 - DNA, 50 bp, Artificial
  Synthetic oligonucleotide
atgcctattggggagggcaggccgccatacgggcgtgggacggagttata

SEQ ID NO: 334156 - DNA, 60 bp, Artificial
  Synthetic oligonucleotide
atgcctcaagggcacattcgccggggcctcctacccaaccacatatggcaaggtgatgta

SEQ ID NO: 334157 - DNA, 51 bp, Artificial
  Synthetic oligonucleotide
atgcctcactcagccccgcttggttcgaagctcttaaaatggttctagaga

SEQ ID NO: 334158 - DNA, 55 bp, Artificial
  Synthetic oligonucleotide
atgcctcagcaatgagtctcctctagaggggttgatatactactgggagcagggg

SEQ ID NO: 334159 - DNA, 57 bp, Artificial
  Synthetic oligonucleotide
atgcctcagtacaagaatgggaactacgttttgccttcggcctactcgagagtatct

SEQ ID NO: 334160 - DNA, 60 bp, Artificial
  Synthetic oligonucleotide
atgcctcatcaggagtaagctctgcatgtccatacaatgggaggtcctccttttttagaa

SEQ ID NO: 334161 - DNA, 59 bp, Artificial
  Synthetic oligonucleotide
atgcctctgccgacgaagggaccacagacaaaagtggacctccacccacgaggagcatc

SEQ ID NO: 334162 - DNA, 56 bp, Artificial
  Synthetic oligonucleotide
atgcctcttaaaaagtggtctgattacaataaccttccatgtttattctgtggtaa

SEQ ID NO: 334163 - DNA, 60 bp, Artificial
  Synthetic oligonucleotide
atgcctcttccgttgttatatgtgatcgtcatttctgtgctgttggatccatggttcttc

SEQ ID NO: 334164 - DNA, 60 bp, Artificial
  Synthetic oligonucleotide
atgcctgaactgtatgacttgtgcgatgtaactaatactgtagttggtcgtattgacgtt

SEQ ID NO: 334165 - DNA, 56 bp, Artificial
  Synthetic oligonucleotide
atgcctgagagcctttacagaggctatgaccaggtactccgcccctcccggggacc

SEQ ID NO: 334166 - DNA, 60 bp, Artificial
  Synthetic oligonucleotide
atgcctgagccacatgcagtgttgttcgtcaccagtgagctctctcatatcgttaaagag

SEQ ID NO: 334167 - DNA, 56 bp, Artificial
  Synthetic oligonucleotide
atgcctgagtactttatgaattgtgtggatgaaatatcattagattccaaatttgg

SEQ ID NO: 334168 - DNA, 56 bp, Artificial
  Synthetic oligonucleotide
atgcctgctagattttatcctaatagtaccaaatatttgcccctagacaaagggat

SEQ ID NO: 334169 - DNA, 55 bp, Artificial
  Synthetic oligonucleotide
atgcctgcttagaaagcaacatagagagctcaaagacaaatgtgatgccaggtgt

SEQ ID NO: 334170 - DNA, 59 bp, Artificial
  Synthetic oligonucleotide
atgcctggagaattctttgattatgtacaacttgcccaaattccatcccttgtgaagaa

SEQ ID NO: 334171 - DNA, 60 bp, Artificial
  Synthetic oligonucleotide
atgcctggcccgctcacacgtgcaattgcacgcgccgcttgcgcatagtccactttgcac

SEQ ID NO: 334172 - DNA, 56 bp, Artificial
  Synthetic oligonucleotide
atgcctgggtaaaccggcctatgtacagaaagcccaggatctaccggacgttgaga

SEQ ID NO: 334173 - DNA, 59 bp, Artificial
  Synthetic oligonucleotide
atgcctggttgctgacaaatccatgcaactagttcatagtcgtttctttctactgccac

SEQ ID NO: 334174 - DNA, 59 bp, Artificial
  Synthetic oligonucleotide
atgcctgtagtgaatgtaccacctgaaggagttgataaggacctgttggcggtgtacaa

SEQ ID NO: 334175 - DNA, 54 bp, Artificial
  Synthetic oligonucleotide
atgcctgtcaagtacccttgcaagtcgggctactctggcatgcggaaatgcgct

SEQ ID NO: 334176 - DNA, 52 bp, Artificial
  Synthetic oligonucleotide
atgccttataattctaacggctctacccgtaacacgtgtctatatggcaggc

SEQ ID NO: 334177 - DNA, 55 bp, Artificial
  Synthetic oligonucleotide
atgccttatcatcaggggttcaccaggcacagggaagtctctagcaacaggcatc

SEQ ID NO: 334178 - DNA, 57 bp, Artificial
  Synthetic oligonucleotide
atgccttatgtcccttaccctcgttcaacggaggtgtatgttcgatctatatttggc

SEQ ID NO: 334179 - DNA, 50 bp, Artificial
  Synthetic oligonucleotide
atgccttatgttccataccctcgctccaccgaggtctacgtccggtctat

SEQ ID NO: 334180 - DNA, 60 bp, Artificial
  Synthetic oligonucleotide
atgccttcactcgaccgggcagcgtcccttgccaggcttcagcaagatgccctaactcat

SEQ ID NO: 334181 - DNA, 58 bp, Artificial
  Synthetic oligonucleotide
atgccttcgtttacggcctgcgcgcaaacgctgtacgacgaaggcttgggtatgtcgc

SEQ ID NO: 334182 - DNA, 55 bp, Artificial
  Synthetic oligonucleotide
atgccttgacatctactggccttgaggcgcgtgttgtatccgccggacttgactg

SEQ ID NO: 334183 - DNA, 53 bp, Artificial
  Synthetic oligonucleotide
atgccttgcagaacgtagtaaacatggccatgactgacacgaccccatttgga

SEQ ID NO: 334184 - DNA, 57 bp, Artificial
  Synthetic oligonucleotide
atgcctttaattagactaggagtcagctttatagacctaacagaaccatgggtagaa

SEQ ID NO: 334185 - DNA, 57 bp, Artificial
  Synthetic oligonucleotide
atgcctttccataatgttcacccccttaccattggagagtgccccaagtatgtcaaa

SEQ ID NO: 334186 - DNA, 59 bp, Artificial
  Synthetic oligonucleotide
atgcctttcggttatgttacgcatggacttgatttggctcaatctggcaactatgtacg

SEQ ID NO: 334187 - DNA, 59 bp, Artificial
  Synthetic oligonucleotide
atgcctttggagaaggctgtgttaatgacatacggaggagatgactcgttaattgcttt

SEQ ID NO: 334188 - DNA, 51 bp, Artificial
  Synthetic oligonucleotide
atgcgaaaagtcaaaaggagattacaagagcatatgtagtaactaggatag

SEQ ID NO: 334189 - DNA, 60 bp, Artificial
  Synthetic oligonucleotide
atgcgaaagaaaatcgttagacgagttcgcgctccagatgtgctatcacaagttaacaaa

SEQ ID NO: 334190 - DNA, 57 bp, Artificial
  Synthetic oligonucleotide
atgcgaaaggtcagtcgggttatgccagcaaatgtgcagagttgcggaaagacgtat

SEQ ID NO: 334191 - DNA, 60 bp, Artificial
  Synthetic oligonucleotide
atgcgaaattttcttgcaaacgcactacaagcaggcagcaagtcgcaaagggctaagtac

SEQ ID NO: 334192 - DNA, 60 bp, Artificial
  Synthetic oligonucleotide
atgcgaacacaagagtctgagtgcgtatgccaggatgaattttgttatactctgataaca

SEQ ID NO: 334193 - DNA, 55 bp, Artificial
  Synthetic oligonucleotide
atgcgaacactggcgtagtcaactttgatattcccggatacatccatgacttcgc

SEQ ID NO: 334194 - DNA, 60 bp, Artificial
  Synthetic oligonucleotide
atgcgaagccttttgagcaggacttgctgcgtcattgtaatgtcagtgaccaggcggttt

SEQ ID NO: 334195 - DNA, 55 bp, Artificial
  Synthetic oligonucleotide
atgcgaaggtgactggtggtcagtatgctagtaatgagcagacgttggtgaagcg

SEQ ID NO: 334196 - DNA, 60 bp, Artificial
  Synthetic oligonucleotide
atgcgaaggtgttctcgggtgtgctcagcatcatgagactcacaggggaaggtcctacat

SEQ ID NO: 334197 - DNA, 60 bp, Artificial
  Synthetic oligonucleotide
atgcgaattggatgactactcaatatactgtctcaaaattagatgaagacgtgaataggt

SEQ ID NO: 334198 - DNA, 54 bp, Artificial
  Synthetic oligonucleotide
atgcgacaatacttcagtagtgcaatacaagttcgattactgtgttagtacaag

SEQ ID NO: 334199 - DNA, 60 bp, Artificial
  Synthetic oligonucleotide
atgcgacaatatttaaactcttatgaggatcagactgatttgtggcagtcttatgaaggc

SEQ ID NO: 334200 - DNA, 55 bp, Artificial
  Synthetic oligonucleotide
atgcgaccggctgacgggtgggcctgtctcgttccaggtctccatgccagactct

SEQ ID NO: 334201 - DNA, 60 bp, Artificial
  Synthetic oligonucleotide
atgcgactcactgcttccagcgagatcatggtcctacattgtagaaacaccaaactctga

SEQ ID NO: 334202 - DNA, 55 bp, Artificial
  Synthetic oligonucleotide
atgcgactgcgccatggcgcggacacccggtgcggtcggttaatctgtgggctgt

SEQ ID NO: 334203 - DNA, 58 bp, Artificial
  Synthetic oligonucleotide
atgcgactgctagcttcatttatgatgggatgcttgtcgacagtattggttcatggtc

SEQ ID NO: 334204 - DNA, 55 bp, Artificial
  Synthetic oligonucleotide
atgcgacttatgtaaacaggaaattaattcacatgccccagaaaaactacgaggt

SEQ ID NO: 334205 - DNA, 60 bp, Artificial
  Synthetic oligonucleotide
atgcgagagcaaataggcaatttgcccaaatggcaaagggcatatttgcacgtgcttagc

SEQ ID NO: 334206 - DNA, 60 bp, Artificial
  Synthetic oligonucleotide
atgcgagagctgccgcccttgaagagtcgctgggaggaagagcctggctctctcgtgccc

SEQ ID NO: 334207 - DNA, 60 bp, Artificial
  Synthetic oligonucleotide
atgcgagatcgtgcacggcgcactaggagcttctaaccctccgactcgcgggttcgactc

SEQ ID NO: 334208 - DNA, 60 bp, Artificial
  Synthetic oligonucleotide
atgcgagatggtttatacgtaaccaaagctacaactcctcctggtagtgttgctcgagca

SEQ ID NO: 334209 - DNA, 60 bp, Artificial
  Synthetic oligonucleotide
atgcgagcatgcgctacgctccaagaagcaagaattgtgttagaagccaatgtgatggaa

SEQ ID NO: 334210 - DNA, 60 bp, Artificial
  Synthetic oligonucleotide
atgcgagcatgtgctacgcttcaagaagcaagaattgtattggaagctaacgtgatggag

SEQ ID NO: 334211 - DNA, 51 bp, Artificial
  Synthetic oligonucleotide
atgcgagccgtgccactgcccccattgtccgcgtcaccaaagcaaaagcat

SEQ ID NO: 334212 - DNA, 55 bp, Artificial
  Synthetic oligonucleotide
atgcgagtaaggagcaggcattggtcaagaagtttgttagggttaacaactacgt

SEQ ID NO: 334213 - DNA, 51 bp, Artificial
  Synthetic oligonucleotide
atgcgagtctggtcgagttggcggctcgtgtccaagctctggtcgagaaga

SEQ ID NO: 334214 - DNA, 60 bp, Artificial
  Synthetic oligonucleotide
atgcgagttgtttacctatatgcgctttgacgctgagttcacatttgtcgtagccaaacc

SEQ ID NO: 334215 - DNA, 57 bp, Artificial
  Synthetic oligonucleotide
atgcgagttttcaggtctacgaaaggcaatctcccaagggttgccagcccaactgac

SEQ ID NO: 334216 - DNA, 56 bp, Artificial
  Synthetic oligonucleotide
atgcgatacaagtgatggagcaactggtcaaaatgggggcggacctcaatgctccg

SEQ ID NO: 334217 - DNA, 60 bp, Artificial
  Synthetic oligonucleotide
atgcgatatcatcaaccaatgagatagggccgctaggggctgaaggtctcaccaccacct

SEQ ID NO: 334218 - DNA, 60 bp, Artificial
  Synthetic oligonucleotide
atgcgatgagaacaattgggactcatcccagctccagtgctggtctgaaagatgaccttc

SEQ ID NO: 334219 - DNA, 52 bp, Artificial
  Synthetic oligonucleotide
atgcgatgagtgccactcagtggacgccactaccatccttggcattggaaca

SEQ ID NO: 334220 - DNA, 52 bp, Artificial
  Synthetic oligonucleotide
atgcgatgatgttcatatctgtaaccctgttgcagattcacgtgacgctaaa

SEQ ID NO: 334221 - DNA, 60 bp, Artificial
  Synthetic oligonucleotide
atgcgattagaataggggaggatgcccacatcctagtcacaagagaaccatacctctcat

SEQ ID NO: 334222 - DNA, 50 bp, Artificial
  Synthetic oligonucleotide
atgcgattcggcttcgctctatgtcgcgcacccgggcattaccagacgtc

SEQ ID NO: 334223 - DNA, 59 bp, Artificial
  Synthetic oligonucleotide
atgcgattcgtggtggacgtaatcgtgcgcagacggtgggtactcatccgttgttgtgg

SEQ ID NO: 334224 - DNA, 60 bp, Artificial
  Synthetic oligonucleotide
atgcgattctaaagtgtaatgataaggatttcaatggaacaggaccatgcaagaatgtca

SEQ ID NO: 334225 - DNA, 55 bp, Artificial
  Synthetic oligonucleotide
atgcgattgtggctttgactcgccacacagagaagtgtgtggtggttgacgcccc

SEQ ID NO: 334226 - DNA, 60 bp, Artificial
  Synthetic oligonucleotide
atgcgatttactgctcacagcgagctcatggtcctatattgtagaaacatcgaactcaga

SEQ ID NO: 334227 - DNA, 55 bp, Artificial
  Synthetic oligonucleotide
atgcgattttcggtcccatgtttgcggaacttacgaggatgctgctcgagagggt

SEQ ID NO: 334228 - DNA, 56 bp, Artificial
  Synthetic oligonucleotide
atgcgcaattcgcgccacgtctacgaagatttgcacaggctgcgttcgcaacttta

SEQ ID NO: 334229 - DNA, 55 bp, Artificial
  Synthetic oligonucleotide
atgcgcacatggaattaggccggtggcatcaacccaactgctgttgaatggcagt

SEQ ID NO: 334230 - DNA, 60 bp, Artificial
  Synthetic oligonucleotide
atgcgcagacatggacatccgaattggtacaaagagacacaaggctgaaggactctacgt

SEQ ID NO: 334231 - DNA, 60 bp, Artificial
  Synthetic oligonucleotide
atgcgcccattcaacgcgatgatggctggataatgttcaagtctgtcgggaccacatcag

SEQ ID NO: 334232 - DNA, 56 bp, Artificial
  Synthetic oligonucleotide
atgcgcctggttttctttacaaacgggatatgctcccgcctccacttcaggccgtg

SEQ ID NO: 334233 - DNA, 55 bp, Artificial
  Synthetic oligonucleotide
atgcgcgaaaacggtccaaaacctctttcggctcatataaaagctcagttgcagg

SEQ ID NO: 334234 - DNA, 60 bp, Artificial
  Synthetic oligonucleotide
atgcgcgacaatagagtaattaagaatggagaggttatggtcattacgcgtgatgatgaa

SEQ ID NO: 334235 - DNA, 55 bp, Artificial
  Synthetic oligonucleotide
atgcgcgaggctcaggacttgacgcaggacaacgccgagggcaaggaatgcgtct

SEQ ID NO: 334236 - DNA, 60 bp, Artificial
  Synthetic oligonucleotide
atgcgcgatcgttcagtgtcgaggtcactgcaggattggggttctctgcggaggaacggt

SEQ ID NO: 334237 - DNA, 55 bp, Artificial
  Synthetic oligonucleotide
atgcgcggatcgatattgcgcttgacggtgagtgtctggaggagtcggggagcgg

SEQ ID NO: 334238 - DNA, 54 bp, Artificial
  Synthetic oligonucleotide
atgcgcgggtggtcccggtaccacgagtccacctgggagacccagtagtggtcc

SEQ ID NO: 334239 - DNA, 60 bp, Artificial
  Synthetic oligonucleotide
atgcgctaacgtatgtcgtttgatatgtcaaggcatgtagttctgactcttgtgaatggt

SEQ ID NO: 334240 - DNA, 55 bp, Artificial
  Synthetic oligonucleotide
atgcgctattgttctgttaacggcgatccgtattacgaatggttgttgtcggaca

SEQ ID NO: 334241 - DNA, 55 bp, Artificial
  Synthetic oligonucleotide
atgcgctcttcggtgaacttcgggtacgcctcatggagggcgcgaagcttttcgg

SEQ ID NO: 334242 - DNA, 55 bp, Artificial
  Synthetic oligonucleotide
atgcgctggacctccggtatgcctacaaattgggcgataatctccaggagcatct

SEQ ID NO: 334243 - DNA, 58 bp, Artificial
  Synthetic oligonucleotide
atgcgcttgttgtttagtggttgcgcaagtattcctctgaacgttatacctgggacga

SEQ ID NO: 334244 - DNA, 57 bp, Artificial
  Synthetic oligonucleotide
atgcgctttacgctggtgataattgcgttaaaattgcaagtaagggggctagtctgg

SEQ ID NO: 334245 - DNA, 50 bp, Artificial
  Synthetic oligonucleotide
atgcgctttcaatataccgagctatcgaggaaggggcatctaaactaggg

SEQ ID NO: 334246 - DNA, 58 bp, Artificial
  Synthetic oligonucleotide
atgcgctttccaagatactggagcccaaacttatccacattacgtaggatcctgcccg

SEQ ID NO: 334247 - DNA, 55 bp, Artificial
  Synthetic oligonucleotide
atgcgctttctgaatgcatatgaggtattccagctgaactcgagctactttcgac

SEQ ID NO: 334248 - DNA, 56 bp, Artificial
  Synthetic oligonucleotide
atgcggaatataccagaaagacaaactagaggcatattcggtgcaatagcaggatt

SEQ ID NO: 334249 - DNA, 51 bp, Artificial
  Synthetic oligonucleotide
atgcggaattcttttcttcgtctaagaactctttatagctggaattgggtc

SEQ ID NO: 334250 - DNA, 60 bp, Artificial
  Synthetic oligonucleotide
atgcggacgtggggcagttcacaactgccttcaccacccaagcggcaagtgatgtgttaa

SEQ ID NO: 334251 - DNA, 57 bp, Artificial
  Synthetic oligonucleotide
atgcggacgttcttgtggccctggaaaaccagcatacaattgatctgactgattcag

SEQ ID NO: 334252 - DNA, 54 bp, Artificial
  Synthetic oligonucleotide
atgcggagatgaagtggttgctgtcaaattctgacaatgcagcattcccccaaa

SEQ ID NO: 334253 - DNA, 55 bp, Artificial
  Synthetic oligonucleotide
atgcggagccccaacaccccactgttaccccgcaacgaagtgccagtagtcctcc

SEQ ID NO: 334254 - DNA, 60 bp, Artificial
  Synthetic oligonucleotide
atgcggagttatttggaccgtattcatcggcgtatgttaatatgcatctattggacagcc

SEQ ID NO: 334255 - DNA, 50 bp, Artificial
  Synthetic oligonucleotide
atgcggatcgacgtcatcaatgacgttgtaccaagccgaattgctgtaca

SEQ ID NO: 334256 - DNA, 55 bp, Artificial
  Synthetic oligonucleotide
atgcggatgaagcccaaataaccggggctatggcagcaacggtggatccatcccc

SEQ ID NO: 334257 - DNA, 60 bp, Artificial
  Synthetic oligonucleotide
atgcggatgagacgagttagtctcgaccattttcacacaatggttctgaggggtgcaact

SEQ ID NO: 334258 - DNA, 55 bp, Artificial
  Synthetic oligonucleotide
atgcggatgttgtcggtgtgattttgtcatttgtgctatccgactctgtcggctt

SEQ ID NO: 334259 - DNA, 58 bp, Artificial
  Synthetic oligonucleotide
atgcggatttcccatgcataagatacagaccccgtgtgcgacgaccacaacctgtgga

SEQ ID NO: 334260 - DNA, 53 bp, Artificial
  Synthetic oligonucleotide
atgcggcactgccagaaacaaacggcaaatatcacaatcgcgttgtgttcatg

SEQ ID NO: 334261 - DNA, 47 bp, Artificial
  Synthetic oligonucleotide
atgcggcagaaggacaaagctcggcgaacgtcatgcctaccaattgc

SEQ ID NO: 334262 - DNA, 51 bp, Artificial
  Synthetic oligonucleotide
atgcggcagaggggcaaagctcggcaaacgtcatgctaccaattgcctccg

SEQ ID NO: 334263 - DNA, 60 bp, Artificial
  Synthetic oligonucleotide
atgcggccatgattggggcccatcatgatcgatcaacaactgactggccaataaacgaga

SEQ ID NO: 334264 - DNA, 60 bp, Artificial
  Synthetic oligonucleotide
atgcggcctagtgtatcatccattcacagagtgtggcacgcattgtgtctgtggtgctcg

SEQ ID NO: 334265 - DNA, 60 bp, Artificial
  Synthetic oligonucleotide
atgcggcctgtgttgttcgggaacgattatatgatcgcgcccgtttcagcactcaacact

SEQ ID NO: 334266 - DNA, 60 bp, Artificial
  Synthetic oligonucleotide
atgcggcgatgaatagaacagtgcgcaaattttgcttcacgtggaataattacacggaag

SEQ ID NO: 334267 - DNA, 55 bp, Artificial
  Synthetic oligonucleotide
atgcggcgtatacaagaagaagggatgaggttaggttgttaatgaacgtacccga

SEQ ID NO: 334268 - DNA, 58 bp, Artificial
  Synthetic oligonucleotide
atgcggctaatcccaaccacggagcaggtggctacaacccagtaactggcctgtcgta

SEQ ID NO: 334269 - DNA, 58 bp, Artificial
  Synthetic oligonucleotide
atgcggctaatcctaaccacggagcaggtgatcgcaaaccagcaattggcctgtcgta

SEQ ID NO: 334270 - DNA, 59 bp, Artificial
  Synthetic oligonucleotide
atgcggctaatcctaactgcggagcacatgccttcaatccagagggtagtgtgtcgtaa

SEQ ID NO: 334271 - DNA, 55 bp, Artificial
  Synthetic oligonucleotide
atgcggctttaggctttccaactggagcatatgtctcgccaacagcacgaattgc

SEQ ID NO: 334272 - DNA, 53 bp, Artificial
  Synthetic oligonucleotide
atgcgggaccaatgcccccgcaggctgtacccccctcggaagtaccttgactt

SEQ ID NO: 334273 - DNA, 56 bp, Artificial
  Synthetic oligonucleotide
atgcgggacggatttcgtaatggctgagtccttgcgcggttcgtgacgtatggggg

SEQ ID NO: 334274 - DNA, 60 bp, Artificial
  Synthetic oligonucleotide
atgcgggcaggaggtctaggcgcacaaaccatgataaccctgtggctacatgggtcccac

SEQ ID NO: 334275 - DNA, 60 bp, Artificial
  Synthetic oligonucleotide
atgcgggcatgtgccactttacaagaagcaagaattgtcctagaagcaaatgtgatggag

SEQ ID NO: 334276 - DNA, 60 bp, Artificial
  Synthetic oligonucleotide
atgcgggcatgtgccactttacaggaagcaagaatcgttttggaggcaaatgtgatggaa

SEQ ID NO: 334277 - DNA, 55 bp, Artificial
  Synthetic oligonucleotide
atgcgggctgcgcaggctgtaaccgccgtggtgtgtggcccagatatgatccaag

SEQ ID NO: 334278 - DNA, 55 bp, Artificial
  Synthetic oligonucleotide
atgcgggtatgtgctaccttacaagaggcccgaattgtcctagaacccaatgtaa

SEQ ID NO: 334279 - DNA, 57 bp, Artificial
  Synthetic oligonucleotide
atgcggtatctgtgcgccttttactgtcgcccgtttagagagtcggactacgccctc

SEQ ID NO: 334280 - DNA, 60 bp, Artificial
  Synthetic oligonucleotide
atgcggtccagccctcagcagtttctagtgaatcatcagatgtttccagggtgccccaag

SEQ ID NO: 334281 - DNA, 58 bp, Artificial
  Synthetic oligonucleotide
atgcggtgaattgatcaacccagacgacaaagggcgattcgtggctctcacctttaag

SEQ ID NO: 334282 - DNA, 55 bp, Artificial
  Synthetic oligonucleotide
atgcggtttgcttcgatcactccagagtaattttaccgacagagcgaaatcgggg

SEQ ID NO: 334283 - DNA, 55 bp, Artificial
  Synthetic oligonucleotide
atgcgtaaggatttacgaaccttaaaatcgcaggtttacgagatgtgccagcagt

SEQ ID NO: 334284 - DNA, 60 bp, Artificial
  Synthetic oligonucleotide
atgcgtaccactcgtgtcaagcgtgcggatgggactatcgattatcagggattatcatgg

SEQ ID NO: 334285 - DNA, 51 bp, Artificial
  Synthetic oligonucleotide
atgcgtatacgtgaatttcttgccacgttgtgttacacccctttaaccacg

SEQ ID NO: 334286 - DNA, 55 bp, Artificial
  Synthetic oligonucleotide
atgcgtatgtaacaaaatgatgctctgagtacaggcttgcgtgctctggacgcca

SEQ ID NO: 334287 - DNA, 60 bp, Artificial
  Synthetic oligonucleotide
atgcgtcagtgtcattcaccggtatttctgatggactcactacaaccgcagagtttatct

SEQ ID NO: 334288 - DNA, 60 bp, Artificial
  Synthetic oligonucleotide
atgcgtcattgatggttacgccgaacttgacgaacgagatgctaaacgtcttatcgccat

SEQ ID NO: 334289 - DNA, 60 bp, Artificial
  Synthetic oligonucleotide
atgcgtcatttgatgcacattcgagtctgagactcgatagtataacttccatgggattgg

SEQ ID NO: 334290 - DNA, 50 bp, Artificial
  Synthetic oligonucleotide
atgcgtcatttggtgtaacgaacgccgttgttggtagcgtgactcaagaa

SEQ ID NO: 334291 - DNA, 60 bp, Artificial
  Synthetic oligonucleotide
atgcgtcctgttgtcatcatgatctccggccgacccgggatagggaagacgcatctggcc

SEQ ID NO: 334292 - DNA, 55 bp, Artificial
  Synthetic oligonucleotide
atgcgtcgaatgacactgagtgagcctacgagtgagctacctacccagagacaga

SEQ ID NO: 334293 - DNA, 60 bp, Artificial
  Synthetic oligonucleotide
atgcgtcggctcatggtgctgcacagacccgcctagatcccgattctctggcacgaccct

SEQ ID NO: 334294 - DNA, 55 bp, Artificial
  Synthetic oligonucleotide
atgcgtcgggacaccaggaggtgtcctctcaactttctcatattgcccctgtcct

SEQ ID NO: 334295 - DNA, 59 bp, Artificial
  Synthetic oligonucleotide
atgcgtctaaggaacaagcgatcataaaacggttttggaagttgaatcatcatgtcact

SEQ ID NO: 334296 - DNA, 56 bp, Artificial
  Synthetic oligonucleotide
atgcgtctgcaattatttttggtccctaggctataaataacacgtcacgaggcggg

SEQ ID NO: 334297 - DNA, 57 bp, Artificial
  Synthetic oligonucleotide
atgcgtctgggttgagccggtttagttggttgtaaggcctttcaatggatgcccagc

SEQ ID NO: 334298 - DNA, 60 bp, Artificial
  Synthetic oligonucleotide
atgcgtctggtgcaggatggaggtagctgaatgcgagcccatagtagttaactttcgtgg

SEQ ID NO: 334299 - DNA, 60 bp, Artificial
  Synthetic oligonucleotide
atgcgtgagcatgtcgaatcaacgactcctatgttggactgcttggttttggctagaatc

SEQ ID NO: 334300 - DNA, 60 bp, Artificial
  Synthetic oligonucleotide
atgcgtgaggcatgtgatgcgaccaagcttgatgacccagccacacaagaatggctttcc

SEQ ID NO: 334301 - DNA, 60 bp, Artificial
  Synthetic oligonucleotide
atgcgtgagtgcgtcgagtttgcaatctacaagcggtgggtgcatctggaccacttggcc

SEQ ID NO: 334302 - DNA, 60 bp, Artificial
  Synthetic oligonucleotide
atgcgtgctcagccaacaattcccaccattacatcagcatgggaaaatctggcctggaac

SEQ ID NO: 334303 - DNA, 60 bp, Artificial
  Synthetic oligonucleotide
atgcgtggaacctttcaggctcctctgccgatccatactgcggaactcctagccgcttgc

SEQ ID NO: 334304 - DNA, 55 bp, Artificial
  Synthetic oligonucleotide
atgcgtggatcgaaagacaaaccgttacgcttgttaagccgttatcaaaatatcc

SEQ ID NO: 334305 - DNA, 60 bp, Artificial
  Synthetic oligonucleotide
atgcgtgtcgtttagcaggcactaacttgacaactaggtatgaaggcatacgcgtcccta

SEQ ID NO: 334306 - DNA, 60 bp, Artificial
  Synthetic oligonucleotide
atgcgttcccctgcgcgagaatccatggttgtggcagttgatacttaggtaatagccgca

SEQ ID NO: 334307 - DNA, 59 bp, Artificial
  Synthetic oligonucleotide
atgcgttgatgctttatatggcttgtacccatgctagtaacccagtttatgctacgctt

SEQ ID NO: 334308 - DNA, 55 bp, Artificial
  Synthetic oligonucleotide
atgcgttgttattgtatatggcatgtacacatgcctcaaatcctgtgtacgctac

SEQ ID NO: 334309 - DNA, 59 bp, Artificial
  Synthetic oligonucleotide
atgctaaacctcatatcatgttataatattcgtttcatattataattaaggttaagatg

SEQ ID NO: 334310 - DNA, 60 bp, Artificial
  Synthetic oligonucleotide
atgctaaacttgcagaactccctgctttaccgctcattaagctcaacccagaagagctta

SEQ ID NO: 334311 - DNA, 53 bp, Artificial
  Synthetic oligonucleotide
atgctaaagttaaggccttagtatccacagtgggaatagaaatagctaagagg

SEQ ID NO: 334312 - DNA, 60 bp, Artificial
  Synthetic oligonucleotide
atgctaaatggatgaagtgggcaatcgatgataggatggacattcagccgcttaaaatca

SEQ ID NO: 334313 - DNA, 60 bp, Artificial
  Synthetic oligonucleotide
atgctaacctaacaagcactgagcagcataatatttgggcatcacaagcctgtgttccca

SEQ ID NO: 334314 - DNA, 54 bp, Artificial
  Synthetic oligonucleotide
atgctaacggaagcggccccgaccaacgcccctattgctggcactaccccccaa

SEQ ID NO: 334315 - DNA, 60 bp, Artificial
  Synthetic oligonucleotide
atgctaacggcgcatgtcgttcaattgcctaagatcgactttcaatgacaaatataatat

SEQ ID NO: 334316 - DNA, 54 bp, Artificial
  Synthetic oligonucleotide
atgctaacggttctattgttgtagtcggacccaggtttgaagcagcggttagtt

SEQ ID NO: 334317 - DNA, 51 bp, Artificial
  Synthetic oligonucleotide
atgctaactcatattatgcttctattgacgcttctgcctcctcagtcgggg

SEQ ID NO: 334318 - DNA, 60 bp, Artificial
  Synthetic oligonucleotide
atgctaactttagagtcttgtcgcagcagctttcgcgacttaacaagacgttagcagctg

SEQ ID NO: 334319 - DNA, 52 bp, Artificial
  Synthetic oligonucleotide
atgctaagccaggggtatctccccggccaagggttgggaaaaaataatcaag

SEQ ID NO: 334320 - DNA, 60 bp, Artificial
  Synthetic oligonucleotide
atgctaagctttgttgagaggaacaaggcttggcttacagtagtttcagctgtcaccagt

SEQ ID NO: 334321 - DNA, 57 bp, Artificial
  Synthetic oligonucleotide
atgctaaggaaagagtacgagaggagacagagcacaacccctcttggcttagtggac

SEQ ID NO: 334322 - DNA, 60 bp, Artificial
  Synthetic oligonucleotide
atgctacagcatcgtcagctgtctgacgacctcctctagcagatcgtccgtcgatctgaa

SEQ ID NO: 334323 - DNA, 54 bp, Artificial
  Synthetic oligonucleotide
atgctacaggctaaaaacagtagactaatagtctgcaagaaaaaaatgcccata

SEQ ID NO: 334324 - DNA, 60 bp, Artificial
  Synthetic oligonucleotide
atgctacagtaggactcacacttaggattgaatctgcagtttgtgaatctgttcttgccg

SEQ ID NO: 334325 - DNA, 59 bp, Artificial
  Synthetic oligonucleotide
atgctacatgggtcaagtcagatccctcaatgcaacggtaattactgcctgcgctcctc

SEQ ID NO: 334326 - DNA, 55 bp, Artificial
  Synthetic oligonucleotide
atgctaccccaatgaaggtaaagtagaatgtgtctgcagggacaattggactggg

SEQ ID NO: 334327 - DNA, 60 bp, Artificial
  Synthetic oligonucleotide
atgctaccttcactgtgtgtgttggacccgagacctcgcactcgattggttgcactgcgc

SEQ ID NO: 334328 - DNA, 57 bp, Artificial
  Synthetic oligonucleotide
atgctacgcttaaaatacgcatctatttttatgatgcagtaacaaattaataaaggt

SEQ ID NO: 334329 - DNA, 60 bp, Artificial
  Synthetic oligonucleotide
atgctacggggcgtttcggtggtcatttgtgatgagtgccacagtcatgactcaaccgtg

SEQ ID NO: 334330 - DNA, 57 bp, Artificial
  Synthetic oligonucleotide
atgctactatttgctatccatactgtccaaaaaagtaccttgtttctactaatacga

SEQ ID NO: 334331 - DNA, 52 bp, Artificial
  Synthetic oligonucleotide
atgctactgagctagtccagagttcctcagtgggtaggatttgcaacagtcc

SEQ ID NO: 334332 - DNA, 54 bp, Artificial
  Synthetic oligonucleotide
atgctagacaagatgggatgttatcttgaagagtatggcccacaaatttgtgct

SEQ ID NO: 334333 - DNA, 60 bp, Artificial
  Synthetic oligonucleotide
atgctagatggtcctccagctatagatcgagtagtacagtatacatatgaagtagcgagg

SEQ ID NO: 334334 - DNA, 60 bp, Artificial
  Synthetic oligonucleotide
atgctagcccgctaaaaatcagggcctcaagctacctacctgaagccatcaccacgtgcg

SEQ ID NO: 334335 - DNA, 50 bp, Artificial
  Synthetic oligonucleotide
atgctagcgcatgcagatggaaccccgcatccttattgttatacggaggg

SEQ ID NO: 334336 - DNA, 60 bp, Artificial
  Synthetic oligonucleotide
atgctaggaaaagtgcaggactcattgttggaccccattttgagtgatcataagaacatg

SEQ ID NO: 334337 - DNA, 56 bp, Artificial
  Synthetic oligonucleotide
atgctaggtccctgccgcgtaaaggtgactgccggaaaggcaacgcaaatggagcg

SEQ ID NO: 334338 - DNA, 58 bp, Artificial
  Synthetic oligonucleotide
atgctaggtggttgtcgcaatcaaaagtccgcaactccgtgagttacaagagcatccc

SEQ ID NO: 334339 - DNA, 57 bp, Artificial
  Synthetic oligonucleotide
atgctagtaaatccaaactacaaggctattcaacacctgtcaagagcgttcccctcg

SEQ ID NO: 334340 - DNA, 60 bp, Artificial
  Synthetic oligonucleotide
atgctagtctagaatcagtgagcaagaaagcagtacgtgctttctcatgtgttgattgga

SEQ ID NO: 334341 - DNA, 52 bp, Artificial
  Synthetic oligonucleotide
atgctagtctcgggggattcgcgaagtactctactaatttttccatttacaa

SEQ ID NO: 334342 - DNA, 58 bp, Artificial
  Synthetic oligonucleotide
atgctagttgatgggatttacattccaaagcttgaacctgaaaggatagtttccatct

SEQ ID NO: 334343 - DNA, 51 bp, Artificial
  Synthetic oligonucleotide
atgctagttttagggtacgggcatccccccccttcagtgggggtctcttaa

SEQ ID NO: 334344 - DNA, 59 bp, Artificial
  Synthetic oligonucleotide
atgctataagatttggtgaaagtgaacaagtaatagtgacaagggaaccgtatgtatca

SEQ ID NO: 334345 - DNA, 58 bp, Artificial
  Synthetic oligonucleotide
atgctatagtagtcgatgcggtggcttacgggtctaaccgtgaataagtgtataaatg

SEQ ID NO: 334346 - DNA, 60 bp, Artificial
  Synthetic oligonucleotide
atgctatcagtcataatcctgtctctgcttgtagcagaaatctcttctcagagatataca

SEQ ID NO: 334347 - DNA, 60 bp, Artificial
  Synthetic oligonucleotide
atgctatgagcaaaatcttgcaaactcaaaatggccttttacctgtagtggtatccaatg

SEQ ID NO: 334348 - DNA, 60 bp, Artificial
  Synthetic oligonucleotide
atgctatggcactgagtacctggaggccatagatctgcacaccagtgctgggtatcctta

SEQ ID NO: 334349 - DNA, 60 bp, Artificial
  Synthetic oligonucleotide
atgctatgtggcctcagaatcaggatctccatatgatgacgatgtggtccttgaccgacc

SEQ ID NO: 334350 - DNA, 58 bp, Artificial
  Synthetic oligonucleotide
atgctattgtggttacaccacttacgattatctacaacttcttcaacattatactaaa

SEQ ID NO: 334351 - DNA, 59 bp, Artificial
  Synthetic oligonucleotide
atgctatttcgaagaatgaagtgtggcgtgttgaatgtggtataccttctggattccct

SEQ ID NO: 334352 - DNA, 60 bp, Artificial
  Synthetic oligonucleotide
atgctcaagatggagtctactcagcagatggcgagctcgattattaacacttcttttgaa

SEQ ID NO: 334353 - DNA, 60 bp, Artificial
  Synthetic oligonucleotide
atgctcaaggcctaccatgagtataaaatctcaatggtcattttggagttcgtctccgag

SEQ ID NO: 334354 - DNA, 60 bp, Artificial
  Synthetic oligonucleotide
atgctcaatatggagtctactcagcagatggccagttcaatcattaacacttcttttgaa

SEQ ID NO: 334355 - DNA, 60 bp, Artificial
  Synthetic oligonucleotide
atgctcacaaatgcctccacgacacgcggttccagagacctacgcattcactcgatatca

SEQ ID NO: 334356 - DNA, 53 bp, Artificial
  Synthetic oligonucleotide
atgctcactagtattgcagttccaaaggtgatacactctgatcagggtgcagc

SEQ ID NO: 334357 - DNA, 55 bp, Artificial
  Synthetic oligonucleotide
atgctcactgatccctcccacataacagcagaggcggccgggaggaggttggcga

SEQ ID NO: 334358 - DNA, 51 bp, Artificial
  Synthetic oligonucleotide
atgctcacttttatgacgggttcagtgtggtaccattcaatcaaatagatg

SEQ ID NO: 334359 - DNA, 58 bp, Artificial
  Synthetic oligonucleotide
atgctcataaatatgaatgaggaggccacattcataacactttttgatccactgcagg

SEQ ID NO: 334360 - DNA, 55 bp, Artificial
  Synthetic oligonucleotide
atgctcattacaactgtgtgaggttcatcattttgcacaatcaccttctgaaatc

SEQ ID NO: 334361 - DNA, 59 bp, Artificial
  Synthetic oligonucleotide
atgctccaagcacaaattgaggccactaaaaagttgcaacaggaaatgatgaaagttaa

SEQ ID NO: 334362 - DNA, 56 bp, Artificial
  Synthetic oligonucleotide
atgctccacttgattccatgcggggtcacgtggacttaatggtgggcgccgctacg

SEQ ID NO: 334363 - DNA, 55 bp, Artificial
  Synthetic oligonucleotide
atgctccagcttccaaaccctacttacctcaaccagccccttcgcgaccgactcg

SEQ ID NO: 334364 - DNA, 60 bp, Artificial
  Synthetic oligonucleotide
atgctccagtcagtctttacaaaggtatggagatcccactgcataatctcagacaatctg

SEQ ID NO: 334365 - DNA, 55 bp, Artificial
  Synthetic oligonucleotide
atgctccccatagtttggctggagctctgcgaatagcggagcattatgactgtct

SEQ ID NO: 334366 - DNA, 55 bp, Artificial
  Synthetic oligonucleotide
atgctccgccggtagtatggaagttctctgatcttattaagttgtcagacagttg

SEQ ID NO: 334367 - DNA, 52 bp, Artificial
  Synthetic oligonucleotide
atgctccggggtgtgtcccttgcgttgtcgagggtaacgcctcgaggtgttg

SEQ ID NO: 334368 - DNA, 60 bp, Artificial
  Synthetic oligonucleotide
atgctcctacggactgcaataggccaagtatcaagacccatgttcctgtatgtgagaacc

SEQ ID NO: 334369 - DNA, 55 bp, Artificial
  Synthetic oligonucleotide
atgctcctggctggtgtgggttttactggcattcaactaggcttgctagaaatgg

SEQ ID NO: 334370 - DNA, 60 bp, Artificial
  Synthetic oligonucleotide
atgctccttatgccctttggattccaaaggagtcataggcatggaatcaagtcaccctca

SEQ ID NO: 334371 - DNA, 60 bp, Artificial
  Synthetic oligonucleotide
atgctcgatcagagtctcaataaagtgcgcaaaagactcaggaattcgaataaggtcaaa

SEQ ID NO: 334372 - DNA, 56 bp, Artificial
  Synthetic oligonucleotide
atgctcgcagccaaatgccattccaatgtaaatatgtacaataggaaagcatagtt

SEQ ID NO: 334373 - DNA, 60 bp, Artificial
  Synthetic oligonucleotide
atgctcggctttatatgtgaacgattcatgtccgaggttatgtgcgaatttcttaaacaa

SEQ ID NO: 334374 - DNA, 51 bp, Artificial
  Synthetic oligonucleotide
atgctcggggcaccaccaaacgggaccatggcccaaccaaccaccatccag

SEQ ID NO: 334375 - DNA, 59 bp, Artificial
  Synthetic oligonucleotide
atgctcggttggatcgtgacgccatcgtaactcatgtgaatgtctctcgtcaggcccct

SEQ ID NO: 334376 - DNA, 56 bp, Artificial
  Synthetic oligonucleotide
atgctcggttgtgggggtcgctgtttgaggagtgctactgagtcagtgactataag

SEQ ID NO: 334377 - DNA, 57 bp, Artificial
  Synthetic oligonucleotide
atgctcgtacgctcttgaggtcgacgggcgcacagcgttaaaccgggccgacgtggc

SEQ ID NO: 334378 - DNA, 60 bp, Artificial
  Synthetic oligonucleotide
atgctctaaaattaagcattgaggacccgagtcatgaaggagaggggataccactatatg

SEQ ID NO: 334379 - DNA, 60 bp, Artificial
  Synthetic oligonucleotide
atgctctacctttaatctgggagcgtgatgcaatgtatggccaaccctcaccagaaaggc

SEQ ID NO: 334380 - DNA, 52 bp, Artificial
  Synthetic oligonucleotide
atgctctattgaaaatccttttttgctccttatcctggcttccttaacagct

SEQ ID NO: 334381 - DNA, 60 bp, Artificial
  Synthetic oligonucleotide
atgctctcatgacgggatacactggtgacttcgactccgtgattgactgtaatgtttcag

SEQ ID NO: 334382 - DNA, 58 bp, Artificial
  Synthetic oligonucleotide
atgctctgaaactaagtattgaggacccgagtcatgagggggaggggataccgctata

SEQ ID NO: 334383 - DNA, 60 bp, Artificial
  Synthetic oligonucleotide
atgctctgaaattgagcattgaagacccgagtcatgagggggaagggataccactatatg

SEQ ID NO: 334384 - DNA, 50 bp, Artificial
  Synthetic oligonucleotide
atgctctggagttcggctataatgcaatgtttaatatctaacgagtatca

SEQ ID NO: 334385 - DNA, 56 bp, Artificial
  Synthetic oligonucleotide
atgctcttaaccggttccaatgctaaggcccaagatctcgggaccatcccgggtga

SEQ ID NO: 334386 - DNA, 60 bp, Artificial
  Synthetic oligonucleotide
atgctctttggaggatttaagctacaatctggaccagtgaagcatttataatcatctctt

SEQ ID NO: 334387 - DNA, 60 bp, Artificial
  Synthetic oligonucleotide
atgctgaaagaggcaaactaaaaagaagagcgattgccaccgctggaatacaaatcagag

SEQ ID NO: 334388 - DNA, 55 bp, Artificial
  Synthetic oligonucleotide
atgctgaaatcgaggaccttatatttctggctcgatctgcacttatcctgagggg

SEQ ID NO: 334389 - DNA, 55 bp, Artificial
  Synthetic oligonucleotide
atgctgaaatgcacgagctcaattgtaattacaacatatgcccatactgcgcgtc

SEQ ID NO: 334390 - DNA, 58 bp, Artificial
  Synthetic oligonucleotide
atgctgaactcttggtagcaatggagaatcagcacactatcgatctggccgactcaga

SEQ ID NO: 334391 - DNA, 58 bp, Artificial
  Synthetic oligonucleotide
atgctgaagtctgacgtaaaacctgttgtaactgacacccttcacttggaacgagcag

SEQ ID NO: 334392 - DNA, 55 bp, Artificial
  Synthetic oligonucleotide
atgctgactcgggtactaacacactatataaaccctgagcttgtacttgggagtc

SEQ ID NO: 334393 - DNA, 60 bp, Artificial
  Synthetic oligonucleotide
atgctgactgatcaagtatatatgcacagagatatgctcccagaacctcgacttgatgac

SEQ ID NO: 334394 - DNA, 55 bp, Artificial
  Synthetic oligonucleotide
atgctgagctcctggttctaatggagaatgagaggacacttgacttccatgactc

SEQ ID NO: 334395 - DNA, 60 bp, Artificial
  Synthetic oligonucleotide
atgctgaggaaccacggaaagcatttcaattggtcgaattggctaaagaggcgatgtatg

SEQ ID NO: 334396 - DNA, 50 bp, Artificial
  Synthetic oligonucleotide
atgctgagtttctgtcaactttttttgagggttgtgctgtatcaattccc

SEQ ID NO: 334397 - DNA, 60 bp, Artificial
  Synthetic oligonucleotide
atgctgatgctctgcgttcatcagcatttgtcaagccttcggttcgcaagggagttgtga

SEQ ID NO: 334398 - DNA, 53 bp, Artificial
  Synthetic oligonucleotide
atgctgatgtttttactgacgaccgcttccgtcaaatctcatccctactacgc

SEQ ID NO: 334399 - DNA, 58 bp, Artificial
  Synthetic oligonucleotide
atgctgcacgcgtgttgcccccgaacgtcgaccgggtcactcctctaacgctcgcctc

SEQ ID NO: 334400 - DNA, 60 bp, Artificial
  Synthetic oligonucleotide
atgctgcagaagaagtcgtcaggaaatacaaccctcactcagcggcaagattaggaagga

SEQ ID NO: 334401 - DNA, 53 bp, Artificial
  Synthetic oligonucleotide
atgctgcagcaccgttcacgcaaaagtcccggacgcgcacaaataaaccctta

SEQ ID NO: 334402 - DNA, 60 bp, Artificial
  Synthetic oligonucleotide
atgctgcagctgtagtcagagtaaccgtgggtaccgttgagttcggaattgccgcagtta

SEQ ID NO: 334403 - DNA, 60 bp, Artificial
  Synthetic oligonucleotide
atgctgcagttccaaggtgctggctcctctagaatggagaatggcaacactaataattct

SEQ ID NO: 334404 - DNA, 60 bp, Artificial
  Synthetic oligonucleotide
atgctgccagacacaatggtactttgatcaatccacgtatgtacgccgacatgatcacat

SEQ ID NO: 334405 - DNA, 55 bp, Artificial
  Synthetic oligonucleotide
atgctgccatactgcacacgtcctcagttgctggtagacgttcgcgctgacgcca

SEQ ID NO: 334406 - DNA, 60 bp, Artificial
  Synthetic oligonucleotide
atgctgccccgactggagttgtcccgaagctgacggacatctttgacgtggcctatccga

SEQ ID NO: 334407 - DNA, 55 bp, Artificial
  Synthetic oligonucleotide
atgctgccccgcgcctggagcttgatgagtctgagtattatgacatgccacccct

SEQ ID NO: 334408 - DNA, 60 bp, Artificial
  Synthetic oligonucleotide
atgctgccgaagctaacgagcagatatgcttgtatatattgggtgagagcatgagcagca

SEQ ID NO: 334409 - DNA, 55 bp, Artificial
  Synthetic oligonucleotide
atgctgccgcgaggacattttgagcgtgctaaagggagcgatgcggagaatgaga

SEQ ID NO: 334410 - DNA, 60 bp, Artificial
  Synthetic oligonucleotide
atgctgcctgacactactcctgccaaacttcatttagacttaaccttgactgcgtgccgc

SEQ ID NO: 334411 - DNA, 60 bp, Artificial
  Synthetic oligonucleotide
atgctgctgtgtgacgatggatgatggaactccgatgtactcagagcttaagagtccgac

SEQ ID NO: 334412 - DNA, 50 bp, Artificial
  Synthetic oligonucleotide
atgctgcttctgaattcgtcaaaagctatggcacaagagacaacagagca

SEQ ID NO: 334413 - DNA, 52 bp, Artificial
  Synthetic oligonucleotide
atgctgcttttgtataagccagttctaagcttgtgttattttgggggtggtg

SEQ ID NO: 334414 - DNA, 58 bp, Artificial
  Synthetic oligonucleotide
atgctggacagagagaaagtgtggctgcagtgctataaaagcttttcggaaccatatg

SEQ ID NO: 334415 - DNA, 53 bp, Artificial
  Synthetic oligonucleotide
atgctggccttgttccggcgatccggccgagcttgtcccaacgaagtggtggc

SEQ ID NO: 334416 - DNA, 60 bp, Artificial
  Synthetic oligonucleotide
atgctggctattgtctcactctgctatacactttcatgttagctgttgacgtaaccactc

SEQ ID NO: 334417 - DNA, 60 bp, Artificial
  Synthetic oligonucleotide
atgctgggacgccttaagtatgacatggtgtgaagacccgcatgtgcttaactgtgagtc

SEQ ID NO: 334418 - DNA, 55 bp, Artificial
  Synthetic oligonucleotide
atgctgggcggtttgaggttaaggccggggttaatgaaaatggtcacgcatacaa

SEQ ID NO: 334419 - DNA, 55 bp, Artificial
  Synthetic oligonucleotide
atgctggtcgacactgatccgacgaaacgcacgatcacgaccgaaaaggatccgg

SEQ ID NO: 334420 - DNA, 59 bp, Artificial
  Synthetic oligonucleotide
atgctggtgctagaggtgatgtgcaacagatttttcagggccgtaacgatcccatgatg

SEQ ID NO: 334421 - DNA, 50 bp, Artificial
  Synthetic oligonucleotide
atgctggtggttcagaacgagggatgaacgcatatcgcactcaatcttct

SEQ ID NO: 334422 - DNA, 60 bp, Artificial
  Synthetic oligonucleotide
atgctgtacagggaaactcccgcgaactgttttgccagcaagagagtgaggaaagcgagc

SEQ ID NO: 334423 - DNA, 60 bp, Artificial
  Synthetic oligonucleotide
atgctgtcatcaccctagatagatactcattacaacactatggccaagtgtgcaaatcat

SEQ ID NO: 334424 - DNA, 60 bp, Artificial
  Synthetic oligonucleotide
atgctgtcattattttgtatctgctctgcctgttctgaaactgccttgtcagactcaaag

SEQ ID NO: 334425 - DNA, 55 bp, Artificial
  Synthetic oligonucleotide
atgctgtgttttactgtgctacgccgtgggagtttcacttgtcggtgtctacctc

SEQ ID NO: 334426 - DNA, 50 bp, Artificial
  Synthetic oligonucleotide
atgctgttcatactcatacagctggacaggggcgctagtcacaccatgcg

SEQ ID NO: 334427 - DNA, 58 bp, Artificial
  Synthetic oligonucleotide
atgctgttcgaagcccactgtcgcgccatgcgccgggaccccaacgtccgcgtaccat

SEQ ID NO: 334428 - DNA, 60 bp, Artificial
  Synthetic oligonucleotide
atgctgttgcaacaacacactcttggatccccaagagaaaccggtccatactgaacacga

SEQ ID NO: 334429 - DNA, 55 bp, Artificial
  Synthetic oligonucleotide
atgctgtttagctggttgagtgaagacatcaaatcatcgagatgcactgagtgcc

SEQ ID NO: 334430 - DNA, 60 bp, Artificial
  Synthetic oligonucleotide
atgctgtttggagtagctctgaccccgatattgttattatgaaagtgccaaaaatcgata

SEQ ID NO: 334431 - DNA, 51 bp, Artificial
  Synthetic oligonucleotide
atgcttaaccctgtcaacgtaatcttcgacaaccaccaattgttgactttg

SEQ ID NO: 334432 - DNA, 51 bp, Artificial
  Synthetic oligonucleotide
atgcttacaagaatatagacctggatcagttgaggatacttacatatggtg

SEQ ID NO: 334433 - DNA, 60 bp, Artificial
  Synthetic oligonucleotide
atgcttacagacttggagaattgtctactggtgtgatgaccgaggaggaagttgaagcgc

SEQ ID NO: 334434 - DNA, 57 bp, Artificial
  Synthetic oligonucleotide
atgcttactggataagaattagtagaaagacctttggtgagcaacccaatggctgtt

SEQ ID NO: 334435 - DNA, 50 bp, Artificial
  Synthetic oligonucleotide
atgcttactgtgcttaacgaataggacaagctaggaacggatacgaagaa

SEQ ID NO: 334436 - DNA, 60 bp, Artificial
  Synthetic oligonucleotide
atgcttagaaatcttacctgcgttagcagatgcccacaacgtgaagttgtggatgccccg

SEQ ID NO: 334437 - DNA, 55 bp, Artificial
  Synthetic oligonucleotide
atgcttatgccacaaaaggagtcttgcgtcataatgaaggtcattggtacaggac

SEQ ID NO: 334438 - DNA, 60 bp, Artificial
  Synthetic oligonucleotide
atgcttcaagtggggaatcgggtttgttgccacgtgtgttgagctgcattgcggagaggg

SEQ ID NO: 334439 - DNA, 60 bp, Artificial
  Synthetic oligonucleotide
atgcttcaagttactcctcaattagtgtttcctagtgtcatccctgaaatcttcaacatc

SEQ ID NO: 334440 - DNA, 60 bp, Artificial
  Synthetic oligonucleotide
atgcttcaggatatctctaaactgaaccagttggatgccgcttttggtgtggagtccaga

SEQ ID NO: 334441 - DNA, 55 bp, Artificial
  Synthetic oligonucleotide
atgcttccattgaccattgccacataaggaagcttaatagcaccagtatcgtcag

SEQ ID NO: 334442 - DNA, 54 bp, Artificial
  Synthetic oligonucleotide
atgcttcctaaacccagaaatgggggatccagatgaaaaccttaggggctatag

SEQ ID NO: 334443 - DNA, 60 bp, Artificial
  Synthetic oligonucleotide
atgcttccttacgcaaattgccatcctggtaactactgtaacattgcatttcaagcaata

SEQ ID NO: 334444 - DNA, 60 bp, Artificial
  Synthetic oligonucleotide
atgcttcgagattcgtttccagcaggttgtcatgcacacttaaatattccagtgcctcat

SEQ ID NO: 334445 - DNA, 60 bp, Artificial
  Synthetic oligonucleotide
atgcttcgcaggtgatgacatgtgtgcttccaaaagacttcgattgagtacagtgcattc

SEQ ID NO: 334446 - DNA, 52 bp, Artificial
  Synthetic oligonucleotide
atgcttcgtaatgataccaacgatcagtctttcaacgactacctctgcgctg

SEQ ID NO: 334447 - DNA, 52 bp, Artificial
  Synthetic oligonucleotide
atgcttctctaatcaggtgatcgtcatgtctaaggaggccgattttacaggt

SEQ ID NO: 334448 - DNA, 55 bp, Artificial
  Synthetic oligonucleotide
atgcttgaaggtcaaccaggtggggcacgcttaatagaacaagtcctaggcatgc

SEQ ID NO: 334449 - DNA, 55 bp, Artificial
  Synthetic oligonucleotide
atgcttgacggcgcgaatttcgtgagacaaagatcccgtctgccacatgtacgcc

SEQ ID NO: 334450 - DNA, 59 bp, Artificial
  Synthetic oligonucleotide
atgcttgatccgttcgcacttaacattgattacctgaggccgccagagacaattatccg

SEQ ID NO: 334451 - DNA, 60 bp, Artificial
  Synthetic oligonucleotide
atgcttgcagacagaatagatgatgctgtgactgatgtgtggtcgtacaatgctaagctt

SEQ ID NO: 334452 - DNA, 54 bp, Artificial
  Synthetic oligonucleotide
atgcttgctataaaatacttgcggttggtagaaaatacgtattcccccgattct

SEQ ID NO: 334453 - DNA, 60 bp, Artificial
  Synthetic oligonucleotide
atgcttgctgacacatgccccgtcacgctcaactgtgacagaattgagaataaggggaag

SEQ ID NO: 334454 - DNA, 60 bp, Artificial
  Synthetic oligonucleotide
atgcttggagctggacctgtacgcgagcgtatcgcactacatgccaaaggagaaccccgt

SEQ ID NO: 334455 - DNA, 60 bp, Artificial
  Synthetic oligonucleotide
atgcttggagtgtgtcatgtcctgacctatggtccaacagcaccacacccggtgttggaa

SEQ ID NO: 334456 - DNA, 55 bp, Artificial
  Synthetic oligonucleotide
atgcttgtagttcaggcatttcctgcaaagttaggattcatgtggacgagccaga

SEQ ID NO: 334457 - DNA, 52 bp, Artificial
  Synthetic oligonucleotide
atgcttgtgcgcgtgccacgatattactgcgtggtttttcgagtacaatggt

SEQ ID NO: 334458 - DNA, 60 bp, Artificial
  Synthetic oligonucleotide
atgcttgttgacagtattggttcatggtcccaaaacatcctcaggacccaggagtcagaa

SEQ ID NO: 334459 - DNA, 60 bp, Artificial
  Synthetic oligonucleotide
atgcttgttgctgctgcgcactacacggcccagttgacaacactagatattgacccacag

SEQ ID NO: 334460 - DNA, 60 bp, Artificial
  Synthetic oligonucleotide
atgcttgttttagtgtgaaaaggataccagggaaatcatcatcagtcattaaatgcacca

SEQ ID NO: 334461 - DNA, 60 bp, Artificial
  Synthetic oligonucleotide
atgctttacatcgtatgagactgtatgacgtaatggctgacgaaatatgtatggataata

SEQ ID NO: 334462 - DNA, 58 bp, Artificial
  Synthetic oligonucleotide
atgctttcgaaatactcagcaatccagccgaacacaacaacctgctcattgcttggat

SEQ ID NO: 334463 - DNA, 60 bp, Artificial
  Synthetic oligonucleotide
atgctttgactcaaccgtcactgagagagacatcaggactgaggagtccatatatcgggc

SEQ ID NO: 334464 - DNA, 57 bp, Artificial
  Synthetic oligonucleotide
atgctttgcaatttttggaacgcagagtgaaagtgagggcagatatatcgattggga

SEQ ID NO: 334465 - DNA, 56 bp, Artificial
  Synthetic oligonucleotide
atgctttggaagtcgaagtaggtggacggtatcctataacgctaactgtcaacgga

SEQ ID NO: 334466 - DNA, 55 bp, Artificial
  Synthetic oligonucleotide
atgctttggggagatcacggtctttaaagggtttactctagagcaacaaggcgaa

SEQ ID NO: 334467 - DNA, 51 bp, Artificial
  Synthetic oligonucleotide
atgctttgtggacaaactagttaagagcgtgcccaagtctattatccgtcc

SEQ ID NO: 334468 - DNA, 54 bp, Artificial
  Synthetic oligonucleotide
atgcttttcagtcctaatgggcgtatctcaatgttctcagctgggcacgaggta

SEQ ID NO: 334469 - DNA, 56 bp, Artificial
  Synthetic oligonucleotide
atgcttttctctcgcatgtggcccgttgcaaaactatccggtatcgcttcccttaa

SEQ ID NO: 334470 - DNA, 59 bp, Artificial
  Synthetic oligonucleotide
atgctttttgctttgtgttgttctgctggggttcattatgtgggcctgccaaaaaggca

SEQ ID NO: 334471 - DNA, 55 bp, Artificial
  Synthetic oligonucleotide
atggaaaacctgtcagaccgcgtgttgcaagacaccgccggcaatacggtcacaa

SEQ ID NO: 334472 - DNA, 55 bp, Artificial
  Synthetic oligonucleotide
atggaaaagagtgtggttctttggaaccagaagaagacctggattcgccccttga

SEQ ID NO: 334473 - DNA, 56 bp, Artificial
  Synthetic oligonucleotide
atggaaaagccacttcaagtggaaatcgtcctaattatattggatttcgtgataac

SEQ ID NO: 334474 - DNA, 55 bp, Artificial
  Synthetic oligonucleotide
atggaaaaggatgtttcgagctataccacaaatgtgatgatcagtgcatggagac

SEQ ID NO: 334475 - DNA, 59 bp, Artificial
  Synthetic oligonucleotide
atggaaaaggttggtgatagaagcaggtgttttgccgttgtcatcaagaggcatggtta

SEQ ID NO: 334476 - DNA, 57 bp, Artificial
  Synthetic oligonucleotide
atggaaaatgccaaacctgaagatgtgtctttccaggggcggggagtcttcgagctc

SEQ ID NO: 334477 - DNA, 56 bp, Artificial
  Synthetic oligonucleotide
atggaaaattttatgcgcttacacgtacaaaacatacacgagataagagccaaaaa

SEQ ID NO: 334478 - DNA, 58 bp, Artificial
  Synthetic oligonucleotide
atggaaacacaagtatattatagtctaaacaatatacataatgtttgtacacttaagc

SEQ ID NO: 334479 - DNA, 55 bp, Artificial
  Synthetic oligonucleotide
atggaaacatacgtgaacaaacttcacgagggctccacatacacagctgctgttc

SEQ ID NO: 334480 - DNA, 54 bp, Artificial
  Synthetic oligonucleotide
atggaaaccagagcactaatagctgcacttctgattgtaacaacaagcaatgca

SEQ ID NO: 334481 - DNA, 55 bp, Artificial
  Synthetic oligonucleotide
atggaaaccattagaaatggtacctacaatcatgaagattacaaggaagaatcac

SEQ ID NO: 334482 - DNA, 50 bp, Artificial
  Synthetic oligonucleotide
atggaaaccgtcatggaaagaggtattgctgcaaaagctctagaactgcg

SEQ ID NO: 334483 - DNA, 60 bp, Artificial
  Synthetic oligonucleotide
atggaaactggtggagaacgccagaatgctactgagatcagggcatctgttggaagaatg

SEQ ID NO: 334484 - DNA, 60 bp, Artificial
  Synthetic oligonucleotide
atggaaagaatagtgattgcccttgcaataatcagcgttgtcaaaagtgaccaaatttgc

SEQ ID NO: 334485 - DNA, 60 bp, Artificial
  Synthetic oligonucleotide
atggaaagatgcaactaccattctattttgtgcatcagatgctaaagcatataagtcaga

SEQ ID NO: 334486 - DNA, 60 bp, Artificial
  Synthetic oligonucleotide
atggaaagggagtgggtaaatctaagaccggagcagatcgtgtcgctaatgatggtgcaa

SEQ ID NO: 334487 - DNA, 60 bp, Artificial
  Synthetic oligonucleotide
atggaaagtgcaaatgcctccacgtctgcaacgaccatagaccagttgtgcaagacgttt

SEQ ID NO: 334488 - DNA, 54 bp, Artificial
  Synthetic oligonucleotide
atggaaagtgccatttgcttttggacagagatttttggttttgaaccttgggat

SEQ ID NO: 334489 - DNA, 52 bp, Artificial
  Synthetic oligonucleotide
atggaaagttaaatcgcctcattgggaagccaaatgagaaataccaccagat

SEQ ID NO: 334490 - DNA, 55 bp, Artificial
  Synthetic oligonucleotide
atggaaataaacctgaggaggatgaggtgcgaccgagacaagaaaccattgaggg

SEQ ID NO: 334491 - DNA, 55 bp, Artificial
  Synthetic oligonucleotide
atggaaatatgtatattacctggatggagatgatatgtggcagaaaaccaccagt

SEQ ID NO: 334492 - DNA, 53 bp, Artificial
  Synthetic oligonucleotide
atggaaatccccggtcacccctcgtgtccagcccgtccccgtgtctatggaag

SEQ ID NO: 334493 - DNA, 60 bp, Artificial
  Synthetic oligonucleotide
atggaaatgtgctgacctggttggggataccaagtcgaagaatctgttattcgtgcagac

SEQ ID NO: 334494 - DNA, 60 bp, Artificial
  Synthetic oligonucleotide
atggaaattagacccatgaaaacccacgagagccatctggtgaggtcatgggtgaccgca

SEQ ID NO: 334495 - DNA, 60 bp, Artificial
  Synthetic oligonucleotide
atggaaattgacctgtctgctggcccccctgaattcttggcggaaatcatcacctctcta

SEQ ID NO: 334496 - DNA, 57 bp, Artificial
  Synthetic oligonucleotide
atggaaattgcaccacagggtggatttgacaaccaagggaacacaccatttggcaag

SEQ ID NO: 334497 - DNA, 60 bp, Artificial
  Synthetic oligonucleotide
atggaacaagatctcatatggagtatatcgaatatgtggatgtaaagagataggatattt

SEQ ID NO: 334498 - DNA, 60 bp, Artificial
  Synthetic oligonucleotide
atggaacacaagtaatgcaggtactcgcaagtgcaacggccccaatagcagcactcagtg

SEQ ID NO: 334499 - DNA, 60 bp, Artificial
  Synthetic oligonucleotide
atggaacaccaggatctattacgatacaacgagaatggcgactctcaacaagatgcaagg

SEQ ID NO: 334500 - DNA, 54 bp, Artificial
  Synthetic oligonucleotide
atggaacacgtcgtctttattggactttgtacccccagacaccttatattcgcc

SEQ ID NO: 334501 - DNA, 55 bp, Artificial
  Synthetic oligonucleotide
atggaacactaccgatgcgacgcagctaatcgttacggctcgcccacggtgccag

SEQ ID NO: 334502 - DNA, 60 bp, Artificial
  Synthetic oligonucleotide
atggaacagactatttggaaccactagatctcaataccagtgctgggtatccatatgtta

SEQ ID NO: 334503 - DNA, 60 bp, Artificial
  Synthetic oligonucleotide
atggaacagattgaaagagcatcggataaaattgctcaaggagtgataatcgcttataga

SEQ ID NO: 334504 - DNA, 60 bp, Artificial
  Synthetic oligonucleotide
atggaaccagtctattctattcctgctctatgtcgtctctgtagagtaacgattgataga

SEQ ID NO: 334505 - DNA, 60 bp, Artificial
  Synthetic oligonucleotide
atggaaccatggaggggcttaataccactatcatacttccatgcaggataaagcaaattg

SEQ ID NO: 334506 - DNA, 55 bp, Artificial
  Synthetic oligonucleotide
atggaaccggaaaccctaatccatctctgaggactctggttaagccctctagtag

SEQ ID NO: 334507 - DNA, 60 bp, Artificial
  Synthetic oligonucleotide
atggaacgtgcatgtctccgtacgtgtacttgactatcccttcatacttgatgagcgctg

SEQ ID NO: 334508 - DNA, 58 bp, Artificial
  Synthetic oligonucleotide
atggaactaatacccatattatggctactgaggcttcgaattacgctcagtaccgtgt

SEQ ID NO: 334509 - DNA, 60 bp, Artificial
  Synthetic oligonucleotide
atggaactccaatggatttcggccaggtgttcaacatgttcgacaacgagccaagcactg

SEQ ID NO: 334510 - DNA, 55 bp, Artificial
  Synthetic oligonucleotide
atggaactcggggtcagtgggatgtgatgtgtaaccatgaacctatttgctcccc

SEQ ID NO: 334511 - DNA, 58 bp, Artificial
  Synthetic oligonucleotide
atggaactgccactgttgtgtttgaaacttttatgaaggatgaactgcgaccaaaaga

SEQ ID NO: 334512 - DNA, 60 bp, Artificial
  Synthetic oligonucleotide
atggaactgcccagctttggagtgtctgggattaatgaatcagctgacatgagcattgga

SEQ ID NO: 334513 - DNA, 56 bp, Artificial
  Synthetic oligonucleotide
atggaactggcctgatggggctaaaatagagtacttcctctaagacacagaaaaaa

SEQ ID NO: 334514 - DNA, 51 bp, Artificial
  Synthetic oligonucleotide
atggaacttacgaccataacgaatacagagacgaagcagtaaacaaccgat

SEQ ID NO: 334515 - DNA, 54 bp, Artificial
  Synthetic oligonucleotide
atggaagaattgcaaaaggagatcaatgcccatgagggtcagcttgtgatagca

SEQ ID NO: 334516 - DNA, 55 bp, Artificial
  Synthetic oligonucleotide
atggaagacagaactaacaccagatttagcagatcaccttatacacctaagatac

SEQ ID NO: 334517 - DNA, 51 bp, Artificial
  Synthetic oligonucleotide
atggaagacgcctggcactacaagaagaccttggcaatgctcaattcagag

SEQ ID NO: 334518 - DNA, 59 bp, Artificial
  Synthetic oligonucleotide
atggaagactacagtgtgcctagctgctttaaatacaccttgtctcggaatagaaccat

SEQ ID NO: 334519 - DNA, 54 bp, Artificial
  Synthetic oligonucleotide
atggaagactggcgaacgttttggcgcccattacaagtacggtgcctttcgtac

SEQ ID NO: 334520 - DNA, 60 bp, Artificial
  Synthetic oligonucleotide
atggaagagactgcacactgatagatgctctacttggggatcctcattgcgatgtctttc

SEQ ID NO: 334521 - DNA, 60 bp, Artificial
  Synthetic oligonucleotide
atggaagattttgtgcgacaatgcttcaatccaatgattgtcgagcttgcggaaaaagca

SEQ ID NO: 334522 - DNA, 54 bp, Artificial
  Synthetic oligonucleotide
atggaagcaattacagacccagcagaacaggaaaaattcccctcgcccagtaac

SEQ ID NO: 334523 - DNA, 52 bp, Artificial
  Synthetic oligonucleotide
atggaagcagcaggctacacaagcgaatacttaaaccaatcttcggacgtgc

SEQ ID NO: 334524 - DNA, 56 bp, Artificial
  Synthetic oligonucleotide
atggaagcggccagattacgaccccccggtcgttcatggctgcgccctaccttcca

SEQ ID NO: 334525 - DNA, 56 bp, Artificial
  Synthetic oligonucleotide
atggaaggccaactcgttagagtatagtgttccaaaattgacagccctttacgcaa

SEQ ID NO: 334526 - DNA, 55 bp, Artificial
  Synthetic oligonucleotide
atggaaggcgtggctcaaactacttcggggccttggattccaaggcgaccttgaa

SEQ ID NO: 334527 - DNA, 58 bp, Artificial
  Synthetic oligonucleotide
atggaagggaccagttggcaactttcagttaccatccgcacaaggcaaagacggtgca

SEQ ID NO: 334528 - DNA, 60 bp, Artificial
  Synthetic oligonucleotide
atggaaggtgagggatcaagcagggagaatgagctattactggacactagtagagcctgg

SEQ ID NO: 334529 - DNA, 59 bp, Artificial
  Synthetic oligonucleotide
atggaaggtgcacacgtgctcgccattcaaagcgcagtcgtcgttccatcacagtgcag

SEQ ID NO: 334530 - DNA, 53 bp, Artificial
  Synthetic oligonucleotide
atggaagtcgcaaaaaaccttctacgagaattagaagaaactaccgacagagt

SEQ ID NO: 334531 - DNA, 51 bp, Artificial
  Synthetic oligonucleotide
atggaagtcggcgtggtgagactccggcaggtcgccgaatctcgcctcacc

SEQ ID NO: 334532 - DNA, 58 bp, Artificial
  Synthetic oligonucleotide
atggaagtggaaacaagttgataacagtaggaagctcgaaatatcaacaatcgttcac

SEQ ID NO: 334533 - DNA, 56 bp, Artificial
  Synthetic oligonucleotide
atggaagtggttagatcacaatggacacatgcgttatagtgctcatggccgcgtag

SEQ ID NO: 334534 - DNA, 60 bp, Artificial
  Synthetic oligonucleotide
atggaagttagcacgtatctaacagagttatcaggatcgcatgtcgatacgcagagaacc

SEQ ID NO: 334535 - DNA, 58 bp, Artificial
  Synthetic oligonucleotide
atggaagttgcattatcatcggagtgcaccatccatctgatagtgaaatcataatctt

SEQ ID NO: 334536 - DNA, 56 bp, Artificial
  Synthetic oligonucleotide
atggaagttgtccaacaaacaagagtggacaaactgacccaaggtcgtcagaccta

SEQ ID NO: 334537 - DNA, 59 bp, Artificial
  Synthetic oligonucleotide
atggaatacatggaacgaatcccgatggcaacgtctgagggctttccacatatcttaac

SEQ ID NO: 334538 - DNA, 52 bp, Artificial
  Synthetic oligonucleotide
atggaataccgtaaggcagtctgggggggggccacctcacggattcgacttc

SEQ ID NO: 334539 - DNA, 60 bp, Artificial
  Synthetic oligonucleotide
atggaatactcaaggcctaccatgaatataagatcacgagtatcttattacagttcatca

SEQ ID NO: 334540 - DNA, 60 bp, Artificial
  Synthetic oligonucleotide
atggaatactcaaggcctaccatgagtataaaatctcaatggtcactttggagttcatct

SEQ ID NO: 334541 - DNA, 55 bp, Artificial
  Synthetic oligonucleotide
atggaatcaatttaccaattactggctctatggacacagcatatgcaaattcgtc

SEQ ID NO: 334542 - DNA, 56 bp, Artificial
  Synthetic oligonucleotide
atggaatcattgacctcagatttaatgggaaaacaacaactcaggtagaggttaag

SEQ ID NO: 334543 - DNA, 57 bp, Artificial
  Synthetic oligonucleotide
atggaatcgggtgctctacaaacctcataggaatggggtgctttgggtgcctattta

SEQ ID NO: 334544 - DNA, 60 bp, Artificial
  Synthetic oligonucleotide
atggaatgataatgcccatggggtagggtctgtaccgatgcacacagacttagagctcga

SEQ ID NO: 334545 - DNA, 60 bp, Artificial
  Synthetic oligonucleotide
atggaatgattcatcgatgttatctcgaatccgatacagcaacgtcagtgatccaacttc

SEQ ID NO: 334546 - DNA, 60 bp, Artificial
  Synthetic oligonucleotide
atggaatgcagccaaaccatgacctcaggaaggaaagtgcatgactgggcagccagccag

SEQ ID NO: 334547 - DNA, 55 bp, Artificial
  Synthetic oligonucleotide
atggaatggaggacgaacacagagaagtgctggtctggagatttgacagccgcct

SEQ ID NO: 334548 - DNA, 60 bp, Artificial
  Synthetic oligonucleotide
atggaatggatgatgaggagagagaagtgctacggtggaaatttgacagtcgcctggcac

SEQ ID NO: 334549 - DNA, 54 bp, Artificial
  Synthetic oligonucleotide
atggaatggcatggtttactcctgttggattggcagtggataccccttgggttg

SEQ ID NO: 334550 - DNA, 52 bp, Artificial
  Synthetic oligonucleotide
atggaatggggtcactaataactggaaccaactgtttaaataccccgggtgc

SEQ ID NO: 334551 - DNA, 60 bp, Artificial
  Synthetic oligonucleotide
atggaatgggtgtgtcagagcgtaaaagagatgatagtaaacaataacgaagtacagcca

SEQ ID NO: 334552 - DNA, 55 bp, Artificial
  Synthetic oligonucleotide
atggaatggtctccaaggggtggaggttgctggcgcccatcacggcgtatgccca

SEQ ID NO: 334553 - DNA, 58 bp, Artificial
  Synthetic oligonucleotide
atggaatgttctatcgcccttaaccggatacactgggttaaagctggcattgcaaaca

SEQ ID NO: 334554 - DNA, 55 bp, Artificial
  Synthetic oligonucleotide
atggaattatgcgacgcgttgacgctacatattcgggagacgtatgtcatgctcc

SEQ ID NO: 334555 - DNA, 60 bp, Artificial
  Synthetic oligonucleotide
atggaattgggtctttgagcgaaaagaaggatgctgagaagtagtggagatctatgttgc

SEQ ID NO: 334556 - DNA, 58 bp, Artificial
  Synthetic oligonucleotide
atggaattgttgaggacctacgccggagtatcgcagagcgaatgccaaaatgcatgta

SEQ ID NO: 334557 - DNA, 60 bp, Artificial
  Synthetic oligonucleotide
atggaatttgccggacaattgcaaaggtggtgtgagtatctgtcttgtagacaaacgcat

SEQ ID NO: 334558 - DNA, 60 bp, Artificial
  Synthetic oligonucleotide
atggacaacaccgtgcgtgttggagtttcccgcaacacatccggcgcagctggtcagaca

SEQ ID NO: 334559 - DNA, 55 bp, Artificial
  Synthetic oligonucleotide
atggacaacgtagttataataaacgtacatattctggtaagcgtaccgattggaa

SEQ ID NO: 334560 - DNA, 57 bp, Artificial
  Synthetic oligonucleotide
atggacacaacatacaacatctggaggttcaaaggcctgcgcagtgtcaggtaaatc

SEQ ID NO: 334561 - DNA, 59 bp, Artificial
  Synthetic oligonucleotide
atggacacatctgaaggttatccctatgtgcttgagagaacgcatggggaaaaaggaaa

SEQ ID NO: 334562 - DNA, 60 bp, Artificial
  Synthetic oligonucleotide
atggacaccacagactcatctctcacccgacaagcatcccaaccaatggaggtggatggc

SEQ ID NO: 334563 - DNA, 55 bp, Artificial
  Synthetic oligonucleotide
atggacaccattatcaactgtccagccaaggctaaacgctttgggtttcgttacg

SEQ ID NO: 334564 - DNA, 57 bp, Artificial
  Synthetic oligonucleotide
atggacacccaacttggcgacaacgccattagtggagggtctaatgagggctccacg

SEQ ID NO: 334565 - DNA, 60 bp, Artificial
  Synthetic oligonucleotide
atggacactatcgcagcaagagcgctcactgtgatgcgagcatgtgtctctcatctagat

SEQ ID NO: 334566 - DNA, 60 bp, Artificial
  Synthetic oligonucleotide
atggacactatcgcagcaagagcgctcactgtgatgcgggcatgtgccactttacaggaa

SEQ ID NO: 334567 - DNA, 60 bp, Artificial
  Synthetic oligonucleotide
atggacactatcgcagcgagggcgctaaccgtaatgcgggcatgttcgaccctgcaagag

SEQ ID NO: 334568 - DNA, 58 bp, Artificial
  Synthetic oligonucleotide
atggacactcgaagaatcgagggaggagaattattgctgaaccaacttgccggaagaa

SEQ ID NO: 334569 - DNA, 55 bp, Artificial
  Synthetic oligonucleotide
atggacagagagcacccgtacaggacctggcagtactggggcagctaccgtaccg

SEQ ID NO: 334570 - DNA, 60 bp, Artificial
  Synthetic oligonucleotide
atggacagagcagtcaaactatacaggaagctcaaaagggaaataacattccatggggca

SEQ ID NO: 334571 - DNA, 60 bp, Artificial
  Synthetic oligonucleotide
atggacagagcagtcaaactgtatagaaagcttaagagggagataacattccatggggcc

SEQ ID NO: 334572 - DNA, 59 bp, Artificial
  Synthetic oligonucleotide
atggacagagcagttaagctgtacaggaaactcaaaagggagataacattccatggggc

SEQ ID NO: 334573 - DNA, 55 bp, Artificial
  Synthetic oligonucleotide
atggacagattacgttcgggaactctgaaacgctttccgaattgacaaggctcca

SEQ ID NO: 334574 - DNA, 60 bp, Artificial
  Synthetic oligonucleotide
atggacaggagtcactcaaaatggaggaagcaatgcatgcaaaagagggcctgctagtgg

SEQ ID NO: 334575 - DNA, 60 bp, Artificial
  Synthetic oligonucleotide
atggacaggcatgatagatgggtggtacgggtatcatcatcagaatgagcagggatcagg

SEQ ID NO: 334576 - DNA, 52 bp, Artificial
  Synthetic oligonucleotide
atggacagggcagtcaaactatacaagaagcttaagagggaaatgacgttcc

SEQ ID NO: 334577 - DNA, 56 bp, Artificial
  Synthetic oligonucleotide
atggacagggcagtcaaactgtacagaaagctcaaaagggaaattacattccacgg

SEQ ID NO: 334578 - DNA, 59 bp, Artificial
  Synthetic oligonucleotide
atggacagggcagtcaaactgtacaggaagttgaaaagagagataacattccatggggc

SEQ ID NO: 334579 - DNA, 57 bp, Artificial
  Synthetic oligonucleotide
atggacattaaatgttgcgggtcttatccctaggcgctacagatgtaattaacgaaa

SEQ ID NO: 334580 - DNA, 60 bp, Artificial
  Synthetic oligonucleotide
atggacattattcacgtacgtggtgcaataatcatcatatgaatgtgagtggagatagat

SEQ ID NO: 334581 - DNA, 60 bp, Artificial
  Synthetic oligonucleotide
atggacattgaagccgtcacgggttgtggtaccaatgcaaccctcgagcatgaacacttc

SEQ ID NO: 334582 - DNA, 57 bp, Artificial
  Synthetic oligonucleotide
atggaccaagtaatgggcaggcctcatataagatcttcaagatagaaagggggaaag

SEQ ID NO: 334583 - DNA, 55 bp, Artificial
  Synthetic oligonucleotide
atggaccacgaccaatacatgatggacatcttgcgtatacacggagcgcagtgca

SEQ ID NO: 334584 - DNA, 60 bp, Artificial
  Synthetic oligonucleotide
atggaccactacctgaggataatgagccaagtggatatgcacaaacagactgtgtcctgg

SEQ ID NO: 334585 - DNA, 60 bp, Artificial
  Synthetic oligonucleotide
atggaccagcctcttcatctggccagaccacttgacaacacgagagcttacttagtatta

SEQ ID NO: 334586 - DNA, 60 bp, Artificial
  Synthetic oligonucleotide
atggaccagctgaccaataatttgatcacgaactatatggatccgccggccatacctgca

SEQ ID NO: 334587 - DNA, 58 bp, Artificial
  Synthetic oligonucleotide
atggacccactaactaaagagaacaacatatataaagaaggacagagcaaatgcctac

SEQ ID NO: 334588 - DNA, 54 bp, Artificial
  Synthetic oligonucleotide
atggaccccgagactcgattagagtcagaccgtaccaccgttagtgggtttgcg

SEQ ID NO: 334589 - DNA, 53 bp, Artificial
  Synthetic oligonucleotide
atggaccgatgccctttgttgttgcttgtccctcacatcttctcgtatgacta

SEQ ID NO: 334590 - DNA, 60 bp, Artificial
  Synthetic oligonucleotide
atggacctgctgtagccagtggatacgactttgaaagagagggatactctctggtcggaa

SEQ ID NO: 334591 - DNA, 56 bp, Artificial
  Synthetic oligonucleotide
atggacgaaaaactctctgtgctgaacagtgcgtgtcgtatgacgttacgctcact

SEQ ID NO: 334592 - DNA, 55 bp, Artificial
  Synthetic oligonucleotide
atggacgaataatacttcgtaaaccgaaggcacgacatgtctttgaacgcataaa

SEQ ID NO: 334593 - DNA, 58 bp, Artificial
  Synthetic oligonucleotide
atggacgacaagacatttatgcaggagcgccacaacctaaccaacaccacgaatttgt

SEQ ID NO: 334594 - DNA, 51 bp, Artificial
  Synthetic oligonucleotide
atggacgagtttcggtaactctgcgaaagcagttgcgtccttcgattctgg

SEQ ID NO: 334595 - DNA, 59 bp, Artificial
  Synthetic oligonucleotide
atggacgatatgtgggaacgcagcgcattatgctgtacgcttagagaaaagacaccgat

SEQ ID NO: 334596 - DNA, 59 bp, Artificial
  Synthetic oligonucleotide
atggacgcgcatctgatgggcttcctttcccatttcccatagtccacatgggaaaagtc

SEQ ID NO: 334597 - DNA, 60 bp, Artificial
  Synthetic oligonucleotide
atggacgcgtgaatttattcgatctagatgcatcacctggtgataaagtcgttcattgga

SEQ ID NO: 334598 - DNA, 57 bp, Artificial
  Synthetic oligonucleotide
atggacgctaaactgcttcaggcggaggagcgaaacctgtcagttgcgctgtgtgag

SEQ ID NO: 334599 - DNA, 53 bp, Artificial
  Synthetic oligonucleotide
atggacggtcccgccatacgtatccagcctgacccgttggtgatacggacagg

SEQ ID NO: 334600 - DNA, 60 bp, Artificial
  Synthetic oligonucleotide
atggacgtaaaagatgctcagataatggcacagccacctaaggttaagagtgtgcccgcc

SEQ ID NO: 334601 - DNA, 60 bp, Artificial
  Synthetic oligonucleotide
atggacgtggtagactctggtcctcgtgtatagtatgtcctcgactttgtacatcttgaa

SEQ ID NO: 334602 - DNA, 60 bp, Artificial
  Synthetic oligonucleotide
atggactaccaagagtatcaacaattcttggctaggatcaatactgcaagggacgcatgt

SEQ ID NO: 334603 - DNA, 60 bp, Artificial
  Synthetic oligonucleotide
atggactactcacaatatgatggttcacttagttcaatgttgctatgggaggcagtggag

SEQ ID NO: 334604 - DNA, 57 bp, Artificial
  Synthetic oligonucleotide
atggactaggattatacgacccttggttggccgatcatctacgaaattccaccgcac

SEQ ID NO: 334605 - DNA, 60 bp, Artificial
  Synthetic oligonucleotide
atggactatcgttcacccacctacagctggactcacggcaccgtgtggccacttggctgg

SEQ ID NO: 334606 - DNA, 60 bp, Artificial
  Synthetic oligonucleotide
atggactattctcaatatgatggctcccttagttcaatgttgctatgggaggctgtggaa

SEQ ID NO: 334607 - DNA, 55 bp, Artificial
  Synthetic oligonucleotide
atggactcatctgtgtatgctcacggaacctatcctgattggatagtaaatcaga

SEQ ID NO: 334608 - DNA, 54 bp, Artificial
  Synthetic oligonucleotide
atggactccaaattttcaaggaaccatttataaacctgtggatgttaaaattga

SEQ ID NO: 334609 - DNA, 55 bp, Artificial
  Synthetic oligonucleotide
atggactcgtcgcgaccactgacggtgcagcaacttagtgataagttgacagtac

SEQ ID NO: 334610 - DNA, 60 bp, Artificial
  Synthetic oligonucleotide
atggactcttgaagcagatgagtggaaggtttccaagtgactggtacacacctactacaa

SEQ ID NO: 334611 - DNA, 55 bp, Artificial
  Synthetic oligonucleotide
atggactgaacctgccaatggtgacctatgtgaaggatgagctcaggtcagcaga

SEQ ID NO: 334612 - DNA, 52 bp, Artificial
  Synthetic oligonucleotide
atggactgactctacgaggtgtgacgatgcgcccgacttcgttagcacaaag

SEQ ID NO: 334613 - DNA, 60 bp, Artificial
  Synthetic oligonucleotide
atggactggcgtggtcgcgtatatgcaatcccgatgttcaatccacaaggtaacgatatg

SEQ ID NO: 334614 - DNA, 55 bp, Artificial
  Synthetic oligonucleotide
atggactggggtaatgaaggttagagccatgataggcagggagacctatgtggac

SEQ ID NO: 334615 - DNA, 54 bp, Artificial
  Synthetic oligonucleotide
atggacttaaaagaggtttgaacgactattcactggcaccgtacgctttcgact

SEQ ID NO: 334616 - DNA, 60 bp, Artificial
  Synthetic oligonucleotide
atggacttagtcagatactttggctgcatagtatacctataccctctaaaagacgcagac

SEQ ID NO: 334617 - DNA, 58 bp, Artificial
  Synthetic oligonucleotide
atggacttgcagcaatcacctactcctgtaactattaccgagtattgtaacacctttg

SEQ ID NO: 334618 - DNA, 57 bp, Artificial
  Synthetic oligonucleotide
atggacttgcagtggccagtggatacgactttgaaagagaggggtactccctagtcg

SEQ ID NO: 334619 - DNA, 56 bp, Artificial
  Synthetic oligonucleotide
atggacttgtggacaccttcacaaactcctattccttttgtgagagtgttccaaat

SEQ ID NO: 334620 - DNA, 60 bp, Artificial
  Synthetic oligonucleotide
atggagaaaatagtgcttcttcttgcaatagtcagtcttgttgaaagtgatcaaatttgc

SEQ ID NO: 334621 - DNA, 59 bp, Artificial
  Synthetic oligonucleotide
atggagaaaggacatactaagaacccaggagtctgaatgccaatgcattgacgggactt

SEQ ID NO: 334622 - DNA, 59 bp, Artificial
  Synthetic oligonucleotide
atggagaaagtacgtgccggcaagactcgcattgtcgacgtcctgcccgttgaacacat

SEQ ID NO: 334623 - DNA, 60 bp, Artificial
  Synthetic oligonucleotide
atggagaaccattttccatatacggtagattcttattgacatctgtaggagattgcgcat

SEQ ID NO: 334624 - DNA, 58 bp, Artificial
  Synthetic oligonucleotide
atggagaagaatcgaaaactttgcgatggcgcaaggtaattcgcaacaaacccaagca

SEQ ID NO: 334625 - DNA, 55 bp, Artificial
  Synthetic oligonucleotide
atggagaagagaggtgtggatgcaaaagctgggcaaaccattgcatgctttgcgc

SEQ ID NO: 334626 - DNA, 60 bp, Artificial
  Synthetic oligonucleotide
atggagaagatccaaaaatcgaaactaacaaattcgctgcaatatgcactcacttggaag

SEQ ID NO: 334627 - DNA, 58 bp, Artificial
  Synthetic oligonucleotide
atggagacaaggaaaatactgcacacaagtagaccctgaaacagcagatcagttgatt

SEQ ID NO: 334628 - DNA, 56 bp, Artificial
  Synthetic oligonucleotide
atggagacacgctctccgccttcccctacacttggaaagttgggcgggaggtctgc

SEQ ID NO: 334629 - DNA, 58 bp, Artificial
  Synthetic oligonucleotide
atggagacatctctctcacgtgccgggtgactagtggagtggatcctgcccaaactgt

SEQ ID NO: 334630 - DNA, 60 bp, Artificial
  Synthetic oligonucleotide
atggagacatggtatcatcagatgcgtgtctactccgagtgccatcggggcctaaagtta

SEQ ID NO: 334631 - DNA, 60 bp, Artificial
  Synthetic oligonucleotide
atggagactatggactctagtactcttgaactgagaagcagatactgggccataaggacc

SEQ ID NO: 334632 - DNA, 60 bp, Artificial
  Synthetic oligonucleotide
atggagactattaaaggtattgcagatatggcaacggcagctgctaatggcattgattcc

SEQ ID NO: 334633 - DNA, 60 bp, Artificial
  Synthetic oligonucleotide
atggagagaataaaagaactgagagatctaatgtcgcagtcccgcactcgcgagataatc

SEQ ID NO: 334634 - DNA, 60 bp, Artificial
  Synthetic oligonucleotide
atggagagcatacgaaataatacttacaatcacactgaatatcgacaggaagccttacag

SEQ ID NO: 334635 - DNA, 60 bp, Artificial
  Synthetic oligonucleotide
atggagaggatccaaaaatagagacaaataaattcgctgcaatatgcacacacctggaag

SEQ ID NO: 334636 - DNA, 54 bp, Artificial
  Synthetic oligonucleotide
atggagagttgcgaaaccgcccggtaaccttggcattagaacaatggcaagtga

SEQ ID NO: 334637 - DNA, 59 bp, Artificial
  Synthetic oligonucleotide
atggagatccaaacaacatggacagggcagtcaaactgtataggaagctcaaaagggaa

SEQ ID NO: 334638 - DNA, 60 bp, Artificial
  Synthetic oligonucleotide
atggagatcgatgttgcatcgtatcggaaacgtccaggacgcttgcagcgactcgttgtc

SEQ ID NO: 334639 - DNA, 60 bp, Artificial
  Synthetic oligonucleotide
atggagatggggcatcttgctccttgggatgttgatgacctgtagtgctacacgacaatt

SEQ ID NO: 334640 - DNA, 60 bp, Artificial
  Synthetic oligonucleotide
atggagatgtattacatgtgtggtgaagtggagttgaaaccctaatacatgggtgtgtac

SEQ ID NO: 334641 - DNA, 60 bp, Artificial
  Synthetic oligonucleotide
atggagattgctagtcaggctaggcagatggtgcaggcaatgagaacaattgggactcat

SEQ ID NO: 334642 - DNA, 51 bp, Artificial
  Synthetic oligonucleotide
atggagcacgttcgagcagggcacattggtgtcgggcgtgacgcacccgct

SEQ ID NO: 334643 - DNA, 55 bp, Artificial
  Synthetic oligonucleotide
atggagcagatggctggatcgagtgaacaggcagcggaacgcatggaggttgctg

SEQ ID NO: 334644 - DNA, 55 bp, Artificial
  Synthetic oligonucleotide
atggagcccatgcgcaactctctcaccacctttccctggatggtccccaacgacc

SEQ ID NO: 334645 - DNA, 60 bp, Artificial
  Synthetic oligonucleotide
atggagcctatagaatcaagcaaagagggatttttggatattctcagattggagccggag

SEQ ID NO: 334646 - DNA, 59 bp, Artificial
  Synthetic oligonucleotide
atggagcgatgatggttatgaaactcaatggtccgacggcccctattctatcccttcag

SEQ ID NO: 334647 - DNA, 56 bp, Artificial
  Synthetic oligonucleotide
atggagcggggataattcacaaccctccgtcactatttgacgtacctcataaatgg

SEQ ID NO: 334648 - DNA, 60 bp, Artificial
  Synthetic oligonucleotide
atggagctatagtgaagcaaaatccatcaaaggaagcagtgacagaagtttgccttaaag

SEQ ID NO: 334649 - DNA, 60 bp, Artificial
  Synthetic oligonucleotide
atggagctcacaaaccatggcaggtgatgaccactaacggcacccttttgcactctccta

SEQ ID NO: 334650 - DNA, 55 bp, Artificial
  Synthetic oligonucleotide
atggagctccgattccgtagttctgcctccgacatcttcggacaaaaccgttatg

SEQ ID NO: 334651 - DNA, 55 bp, Artificial
  Synthetic oligonucleotide
atggagctgcgccacccgagccatgcttcctagtcgctaactcacccggacgtgt

SEQ ID NO: 334652 - DNA, 59 bp, Artificial
  Synthetic oligonucleotide
atggaggagattttctttagcgtaattgatagcaccaagcaaataccaaaacagctgta

SEQ ID NO: 334653 - DNA, 60 bp, Artificial
  Synthetic oligonucleotide
atggaggatgcttgttacggtacagagaacttggaagctatagatcttcatacaagtgca

SEQ ID NO: 334654 - DNA, 60 bp, Artificial
  Synthetic oligonucleotide
atggaggcaatacttggctaggaagaacaataagcacagcttctagatccggatatgaga

SEQ ID NO: 334655 - DNA, 55 bp, Artificial
  Synthetic oligonucleotide
atggaggcatagcccccggaaggatctttccgccgcgttttcaacgtaagatctg

SEQ ID NO: 334656 - DNA, 59 bp, Artificial
  Synthetic oligonucleotide
atggaggcatttgtcagaaatgctatttgcctcctggaactccgtgaaagaagtatccc

SEQ ID NO: 334657 - DNA, 50 bp, Artificial
  Synthetic oligonucleotide
atggaggcggcgaaatgcgctaataccgttgcgaccgtgtgtgccgcgga

SEQ ID NO: 334658 - DNA, 54 bp, Artificial
  Synthetic oligonucleotide
atggagggttcgctgttaaagctaaccgttgatgttaacaaccctaagacacca

SEQ ID NO: 334659 - DNA, 60 bp, Artificial
  Synthetic oligonucleotide
atggaggtatatgcatttataatcgtttccatgtcatgtctatttcatcgtaaataccct

SEQ ID NO: 334660 - DNA, 56 bp, Artificial
  Synthetic oligonucleotide
atggaggtattatgattggatctggaacgtgctatgatctattgagacaattagag

SEQ ID NO: 334661 - DNA, 57 bp, Artificial
  Synthetic oligonucleotide
atggaggtgttaagctataccagcgaccaaacaaacctctaacacttgtaggcgaca

SEQ ID NO: 334662 - DNA, 56 bp, Artificial
  Synthetic oligonucleotide
atggaggtgtttattccattgtaattttgagctgagctttgttaaggacctttgga

SEQ ID NO: 334663 - DNA, 55 bp, Artificial
  Synthetic oligonucleotide
atggaggtttgacagccgcctagcattccgtcacatggctcgagagatacatccg

SEQ ID NO: 334664 - DNA, 56 bp, Artificial
  Synthetic oligonucleotide
atggagtaagattttggcgtatgtcaaacctttccttggacagacagcggttataa

SEQ ID NO: 334665 - DNA, 55 bp, Artificial
  Synthetic oligonucleotide
atggagtaccacacaggcatttacagctccatattcctaagtcctcaaaggtccc

SEQ ID NO: 334666 - DNA, 60 bp, Artificial
  Synthetic oligonucleotide
atggagtatgatgctgttgcaacaacacactcttggatccccaagaggaaccggtccata

SEQ ID NO: 334667 - DNA, 60 bp, Artificial
  Synthetic oligonucleotide
atggagtcagtttatgcccgttcagccgataggaagagtgcatggagtaaatcccctcca

SEQ ID NO: 334668 - DNA, 60 bp, Artificial
  Synthetic oligonucleotide
atggagtctccatagagtggagattgagaagatacagcacacaaatagaccctagcctgg

SEQ ID NO: 334669 - DNA, 59 bp, Artificial
  Synthetic oligonucleotide
atggagtgaaattggaatcaatgggagtttaccagattttggcgatctattccacagtc

SEQ ID NO: 334670 - DNA, 60 bp, Artificial
  Synthetic oligonucleotide
atggagttaatgattgcgcatacctaatggatgataagcatactaaaatcagtcatggtc

SEQ ID NO: 334671 - DNA, 60 bp, Artificial
  Synthetic oligonucleotide
atggagttcatgaaaaagagggtcgaaaagagcgcaggcttaatagagcagcacgctggt

SEQ ID NO: 334672 - DNA, 58 bp, Artificial
  Synthetic oligonucleotide
atggagtttaaccaaatatctaatactatcagcatattagattcaacaaagaaattag

SEQ ID NO: 334673 - DNA, 60 bp, Artificial
  Synthetic oligonucleotide
atggagtttcgtgagcttcagaagggtgcttacatcgagccgactggcgccttcctcact

SEQ ID NO: 334674 - DNA, 50 bp, Artificial
  Synthetic oligonucleotide
atggagtttgattggggtttcgatggagagggctttaaatctgtaaagcc

SEQ ID NO: 334675 - DNA, 60 bp, Artificial
  Synthetic oligonucleotide
atggataacctccgtgaatgcataaaccgcaaaagaagactacttgcactaccagatgta

SEQ ID NO: 334676 - DNA, 59 bp, Artificial
  Synthetic oligonucleotide
atggataagcgagacagtttcagggcctgtcgtgatacgaacggattgtacaacaggag

SEQ ID NO: 334677 - DNA, 51 bp, Artificial
  Synthetic oligonucleotide
atggataaggctttcagtgctaatctgtctgtggatgattatggtgaacat

SEQ ID NO: 334678 - DNA, 60 bp, Artificial
  Synthetic oligonucleotide
atggataagtatgggttgaacctccctatggttacatatgtgaaggacgagttgagatca

SEQ ID NO: 334679 - DNA, 60 bp, Artificial
  Synthetic oligonucleotide
atggataatgacgcagacaatgataagccatcatacagcagaagctacacagtttgattt

SEQ ID NO: 334680 - DNA, 57 bp, Artificial
  Synthetic oligonucleotide
atggataatttgcgtttagatacgcagtatttctttgttcctcttcgactgttatgg

SEQ ID NO: 334681 - DNA, 57 bp, Artificial
  Synthetic oligonucleotide
atggatacgaactatcaaaacgtgtctaatcctgaaccgtttctaacatcaacacta

SEQ ID NO: 334682 - DNA, 60 bp, Artificial
  Synthetic oligonucleotide
atggatacgtcatatgtgaacgctactaaagatgaaccatttctaacgtcaacattatgt

SEQ ID NO: 334683 - DNA, 53 bp, Artificial
  Synthetic oligonucleotide
atggatactacaatgttcgtaggggaccctttcaatcccccaagtgacccgac

SEQ ID NO: 334684 - DNA, 54 bp, Artificial
  Synthetic oligonucleotide
atggatacttggtacacttttacgggagtaggtgccccgcgaactctggacagt

SEQ ID NO: 334685 - DNA, 59 bp, Artificial
  Synthetic oligonucleotide
atggatagagccgtcaagctatacaagaagctaaagagagagataacattccatggagc

SEQ ID NO: 334686 - DNA, 55 bp, Artificial
  Synthetic oligonucleotide
atggatagcatgatgatcttagctcaggcacttgtttctgacagaccagtgatga

SEQ ID NO: 334687 - DNA, 57 bp, Artificial
  Synthetic oligonucleotide
atggatagctttggtagagctcctcctctttggtcgcagtcagatttgcctcgggtc

SEQ ID NO: 334688 - DNA, 60 bp, Artificial
  Synthetic oligonucleotide
atggataggagaagatttatggaacactaacagtgcatacatgagaactgtcaagagagg

SEQ ID NO: 334689 - DNA, 53 bp, Artificial
  Synthetic oligonucleotide
atggatataaggtaatagaataaccacgtatgtaacataaatgccgttcaagg

SEQ ID NO: 334690 - DNA, 55 bp, Artificial
  Synthetic oligonucleotide
atggatatcattcgtgctgctgacgttaagacgctgaacacgttgaaggaaaaga

SEQ ID NO: 334691 - DNA, 60 bp, Artificial
  Synthetic oligonucleotide
atggatatccatgggagattcatgtacaattaaggtatgtggattgaacacgcagacatt

SEQ ID NO: 334692 - DNA, 60 bp, Artificial
  Synthetic oligonucleotide
atggatatgatggtgataaatcgtcatctaggtatggtgtttctgtcactaatgatatgg

SEQ ID NO: 334693 - DNA, 60 bp, Artificial
  Synthetic oligonucleotide
atggatcaaacagcctatgcatcccggcgtgctaatcactcatcctcaaagccgaataat

SEQ ID NO: 334694 - DNA, 60 bp, Artificial
  Synthetic oligonucleotide
atggatcaaatatctctacgcaatggcctagtaggagaaatgaaggcgttgtgcaagcaa

SEQ ID NO: 334695 - DNA, 60 bp, Artificial
  Synthetic oligonucleotide
atggatcagactatagatctgacgacagaccagactatagaccagagaaaaattttgagt

SEQ ID NO: 334696 - DNA, 60 bp, Artificial
  Synthetic oligonucleotide
atggatcagattgaacgagcttcagataaaattgctcaaggagtaataatcgcttacaga

SEQ ID NO: 334697 - DNA, 60 bp, Artificial
  Synthetic oligonucleotide
atggatccacaactgtattgtgattataatgtagtgttgatgcgatatgataatacatct

SEQ ID NO: 334698 - DNA, 52 bp, Artificial
  Synthetic oligonucleotide
atggatcccaggatgtgctctctgatgcagggctcgaccctccctagaaggt

SEQ ID NO: 334699 - DNA, 55 bp, Artificial
  Synthetic oligonucleotide
atggatccgacccatccgaaggacacttttgtatctatagattcgatgaaggaca

SEQ ID NO: 334700 - DNA, 58 bp, Artificial
  Synthetic oligonucleotide
atggatcctcgaacgcgtgaagaagtaatacgcatagtactaactcttaccggtgata

SEQ ID NO: 334701 - DNA, 57 bp, Artificial
  Synthetic oligonucleotide
atggatccttccgaaattctagatgacaaatctcactcccttacccggacaaagctg

SEQ ID NO: 334702 - DNA, 60 bp, Artificial
  Synthetic oligonucleotide
atggatccttggcaacccagaatgtgacttgttgctcacagcgaattcgtggtcttacat

SEQ ID NO: 334703 - DNA, 50 bp, Artificial
  Synthetic oligonucleotide
atggatcgaccctgcttcggcgagaggcacttccgttgtcgctcactgta

SEQ ID NO: 334704 - DNA, 59 bp, Artificial
  Synthetic oligonucleotide
atggatcgataatcgagaacggaaacgtagccacacgagacgtcgacgtattcataggc

SEQ ID NO: 334705 - DNA, 60 bp, Artificial
  Synthetic oligonucleotide
atggatcgtgcttgtgtggatgataaggcattaaagttgagtgaacatttaaatgtcact

SEQ ID NO: 334706 - DNA, 55 bp, Artificial
  Synthetic oligonucleotide
atggatctagctattaagacaactacggccggcggtaaagctattaagaaacggc

SEQ ID NO: 334707 - DNA, 60 bp, Artificial
  Synthetic oligonucleotide
atggatctcactggttgtttgcgtaagcttcgacagtgtgatcgacttcttgagaggctg

SEQ ID NO: 334708 - DNA, 60 bp, Artificial
  Synthetic oligonucleotide
atggatctggtattatcatttcagatacaccagtccatgattgtaatacgacttgtcaga

SEQ ID NO: 334709 - DNA, 58 bp, Artificial
  Synthetic oligonucleotide
atggatgaacaggctcatagcctttgcgtccagaggaaaccacgtcgcccctacccac

SEQ ID NO: 334710 - DNA, 58 bp, Artificial
  Synthetic oligonucleotide
atggatgaagattaccagggaagactgtgtaaccctctgaacccgtttgtcagtcata

SEQ ID NO: 334711 - DNA, 55 bp, Artificial
  Synthetic oligonucleotide
atggatgaagcccacttcacggatccagcgagcatcgctgctagaggatacatag

SEQ ID NO: 334712 - DNA, 55 bp, Artificial
  Synthetic oligonucleotide
atggatgaagtctcgcaaattggaatttaattcgctttcgatttgaaggtgatgg

SEQ ID NO: 334713 - DNA, 59 bp, Artificial
  Synthetic oligonucleotide
atggatgaatgtgacacgaagtgtgaaacaccccagggagctataaacagtagtcttcc

SEQ ID NO: 334714 - DNA, 55 bp, Artificial
  Synthetic oligonucleotide
atggatgacctatgggtagggtctcaggaagatgaatacacgcatgatcggttgg

SEQ ID NO: 334715 - DNA, 60 bp, Artificial
  Synthetic oligonucleotide
atggatgagctagttataccaatattctcagcggatgaaatgccttatgcactaataagt

SEQ ID NO: 334716 - DNA, 60 bp, Artificial
  Synthetic oligonucleotide
atggatgagctattcacgctaattagatgtaattttacatatgactacattgatgacgtt

SEQ ID NO: 334717 - DNA, 60 bp, Artificial
  Synthetic oligonucleotide
atggatgcaacttcagttgacaaacccactcatcctgaaacatcatcagacagattttat

SEQ ID NO: 334718 - DNA, 60 bp, Artificial
  Synthetic oligonucleotide
atggatgcaattcctctgcatcatctgactccgtaatggattgggctgggcccaaagtac

SEQ ID NO: 334719 - DNA, 59 bp, Artificial
  Synthetic oligonucleotide
atggatgcagttttgaataggaaagagagggataccctctgcaatctgttagaaattcc

SEQ ID NO: 334720 - DNA, 51 bp, Artificial
  Synthetic oligonucleotide
atggatgcatctctcattacagagatacggaaaatagtactccaattatct

SEQ ID NO: 334721 - DNA, 60 bp, Artificial
  Synthetic oligonucleotide
atggatgccacaacaccgttaaacccctggaagagcacatatcaggcagttttgcgtgct

SEQ ID NO: 334722 - DNA, 60 bp, Artificial
  Synthetic oligonucleotide
atggatgcctgccgtaggtgtttccacttctcgggtaacttactttccatgatctgagca

SEQ ID NO: 334723 - DNA, 60 bp, Artificial
  Synthetic oligonucleotide
atggatgcgtctctcacttcagagatacggaggattgtacttcaactgacacagtcaaac

SEQ ID NO: 334724 - DNA, 55 bp, Artificial
  Synthetic oligonucleotide
atggatgctagtggccagtcaactgaagtgctttggcaacactgctgttgctaag

SEQ ID NO: 334725 - DNA, 54 bp, Artificial
  Synthetic oligonucleotide
atggatgggaaacacagtcatcacaaagaccaccagaacctgggtcctgccaag

SEQ ID NO: 334726 - DNA, 60 bp, Artificial
  Synthetic oligonucleotide
atggatgggctacaatagatgttgagtatagagatccagccccttatgtgcatgcacaac

SEQ ID NO: 334727 - DNA, 57 bp, Artificial
  Synthetic oligonucleotide
atggatgtaaagtctttaacgatctaaaccttgacgccgctatgggcgctttataca

SEQ ID NO: 334728 - DNA, 55 bp, Artificial
  Synthetic oligonucleotide
atggatgtacttttttctatagcgaaaactgtgtcagatcttaaaaagaaggttg

SEQ ID NO: 334729 - DNA, 58 bp, Artificial
  Synthetic oligonucleotide
atggatgtgcatatgagaacagggttagatggtaacagtatatctgttgattcaaaac

SEQ ID NO: 334730 - DNA, 50 bp, Artificial
  Synthetic oligonucleotide
atggatgtgctccaacgggtctctgcaatgcagaatctgcatatgatcat

SEQ ID NO: 334731 - DNA, 55 bp, Artificial
  Synthetic oligonucleotide
atggatgtgtcatatgtgaacgctacaaaggacgaaccattcttaacgtcgacac

SEQ ID NO: 334732 - DNA, 53 bp, Artificial
  Synthetic oligonucleotide
atggattaactccgtatgagatcctgtatggggcgccaccgccccttgtcaac

SEQ ID NO: 334733 - DNA, 53 bp, Artificial
  Synthetic oligonucleotide
atggattcccctctcttgttagaccccacgcagaggggtggtttagtttggac

SEQ ID NO: 334734 - DNA, 60 bp, Artificial
  Synthetic oligonucleotide
atggattccgcaaaaaatcatccagaggttgtattggtggcaagcatgatagaaaaagag

SEQ ID NO: 334735 - DNA, 60 bp, Artificial
  Synthetic oligonucleotide
atggattccgcaatatcattatgtctgacatattactttttgcttcaaatacaaaagtgt

SEQ ID NO: 334736 - DNA, 58 bp, Artificial
  Synthetic oligonucleotide
atggattctttaaaattaagcattgaggatccaaatcatgaaggtgagggaataccac

SEQ ID NO: 334737 - DNA, 60 bp, Artificial
  Synthetic oligonucleotide
atggattgcaaagcactcacaagtacagtgtttctgattgctcgccagggcgagccagct

SEQ ID NO: 334738 - DNA, 55 bp, Artificial
  Synthetic oligonucleotide
atggatttcaagagtcacctgaatccaacaaccctctgcaagagagctggatagc

SEQ ID NO: 334739 - DNA, 58 bp, Artificial
  Synthetic oligonucleotide
atggatttcggacaagtgtttaacatgttcgacaatgagcctagtaccgccacagtta

SEQ ID NO: 334740 - DNA, 60 bp, Artificial
  Synthetic oligonucleotide
atggatttgagtcgaggcatatcgcagtagggacggatgcgtttcagtgtgttcgcctag

SEQ ID NO: 334741 - DNA, 55 bp, Artificial
  Synthetic oligonucleotide
atggatttggatctaaattggattaccctttatttgtggtggttagccaaccatg

SEQ ID NO: 334742 - DNA, 60 bp, Artificial
  Synthetic oligonucleotide
atggatttgtagccaacttcagcatggagctgcccagcttcggagtatctgggatcaatg

SEQ ID NO: 334743 - DNA, 58 bp, Artificial
  Synthetic oligonucleotide
atggatttgtagccaatttcagtatggagctgcccagttttggggtgtctggaattaa

SEQ ID NO: 334744 - DNA, 56 bp, Artificial
  Synthetic oligonucleotide
atggattttaaatctttgcaggccaataaaagtgatgttccgttagatatatgtac

SEQ ID NO: 334745 - DNA, 54 bp, Artificial
  Synthetic oligonucleotide
atggcaaaagcgattttaacaaaacatccggtgaaaggacttagtgaagttgtc

SEQ ID NO: 334746 - DNA, 59 bp, Artificial
  Synthetic oligonucleotide
atggcaaaccagcgtatacatgagaaccagtttggtccagaattcgttatggtccataa

SEQ ID NO: 334747 - DNA, 60 bp, Artificial
  Synthetic oligonucleotide
atggcaaacgataaaggtagcaattgggattcggcattgggatgctcatatctgctgaca

SEQ ID NO: 334748 - DNA, 51 bp, Artificial
  Synthetic oligonucleotide
atggcaaacgtgcgccgccaaactgacgggtccgaaagcatccatattcgc

SEQ ID NO: 334749 - DNA, 59 bp, Artificial
  Synthetic oligonucleotide
atggcaaaggtcctccaatgcaaagcattagtctaagtgctgcataatggaattcagct

SEQ ID NO: 334750 - DNA, 60 bp, Artificial
  Synthetic oligonucleotide
atggcaaatgacaggaaactattgcttgagggactcgatctgcatggatatggtttgccc

SEQ ID NO: 334751 - DNA, 60 bp, Artificial
  Synthetic oligonucleotide
atggcaaattatggaaatagaaggatctaatcaagtagcagaggcccaagcactaaatat

SEQ ID NO: 334752 - DNA, 60 bp, Artificial
  Synthetic oligonucleotide
atggcaaattcagtgaattcctacgacattgtgaggagtatcaattatcctttatattac

SEQ ID NO: 334753 - DNA, 52 bp, Artificial
  Synthetic oligonucleotide
atggcaaccggcacccgaagatggcgcagagtggctaaatggtaagataacc

SEQ ID NO: 334754 - DNA, 51 bp, Artificial
  Synthetic oligonucleotide
atggcaacgctcatactggacgcaatccgcgagacagtaccctcggcagtc

SEQ ID NO: 334755 - DNA, 56 bp, Artificial
  Synthetic oligonucleotide
atggcaactaaaaaccataaatgctatttgtgaaagtggaccatatgtacctaaac

SEQ ID NO: 334756 - DNA, 60 bp, Artificial
  Synthetic oligonucleotide
atggcaactatggaggaattccagagagaaatcagtgctcacgaggggcagcttgtgata

SEQ ID NO: 334757 - DNA, 55 bp, Artificial
  Synthetic oligonucleotide
atggcaactatggaggaattgcagagggaaatcaatgcccatgagggccaactgg

SEQ ID NO: 334758 - DNA, 60 bp, Artificial
  Synthetic oligonucleotide
atggcaacttacatgtcaacgatctgtttcggttcatttgaatgcaaattaccgtacaca

SEQ ID NO: 334759 - DNA, 55 bp, Artificial
  Synthetic oligonucleotide
atggcaagattctatacaatggaaacgccagaagaagaattaagagcagtaatcc

SEQ ID NO: 334760 - DNA, 60 bp, Artificial
  Synthetic oligonucleotide
atggcaaggagccatggacattaacacaaactagtttggagactgtaagaagcgcacctg

SEQ ID NO: 334761 - DNA, 55 bp, Artificial
  Synthetic oligonucleotide
atggcaaggctagggaaaggatacatgttcgaaagtaagagcatgaaactccgaa

SEQ ID NO: 334762 - DNA, 50 bp, Artificial
  Synthetic oligonucleotide
atggcaagggaggtgtatggcgacgattcaactatggaggactacttcgg

SEQ ID NO: 334763 - DNA, 60 bp, Artificial
  Synthetic oligonucleotide
atggcaagtactagtttgaagagtgccctgatgtgtcaggatatggcaaagaattttccc

SEQ ID NO: 334764 - DNA, 50 bp, Artificial
  Synthetic oligonucleotide
atggcaagttacttgactggtacaacgcccagttaacagatagaatcact

SEQ ID NO: 334765 - DNA, 60 bp, Artificial
  Synthetic oligonucleotide
atggcaagttcagtgtacttcttatctgcggcaatttttgaggatagcggcaaaccagaa

SEQ ID NO: 334766 - DNA, 55 bp, Artificial
  Synthetic oligonucleotide
atggcaatacaagaagtatagaacacagattgatcctgaaacagcagacaggatg

SEQ ID NO: 334767 - DNA, 56 bp, Artificial
  Synthetic oligonucleotide
atggcaatatgggccggttattcaatccgtttactacgaatttgctcgtaatggag

SEQ ID NO: 334768 - DNA, 60 bp, Artificial
  Synthetic oligonucleotide
atggcaatcctatcagtattgactgcaaacataaagctccctttcagataaaatgtccac

SEQ ID NO: 334769 - DNA, 60 bp, Artificial
  Synthetic oligonucleotide
atggcaatctggcacaaatgcatctgtgttttggcagcatggacagccataccctagatt

SEQ ID NO: 334770 - DNA, 52 bp, Artificial
  Synthetic oligonucleotide
atggcaattggtgaacggtaccctatatatagtgggtaccaaatggcagaat

SEQ ID NO: 334771 - DNA, 55 bp, Artificial
  Synthetic oligonucleotide
atggcacaacaactgtgtgcaaacaaaagcaggatctggcaacatgacccggagc

SEQ ID NO: 334772 - DNA, 55 bp, Artificial
  Synthetic oligonucleotide
atggcacaatacacgatagaatccctcaccggaccctcttgatgactgagttggg

SEQ ID NO: 334773 - DNA, 55 bp, Artificial
  Synthetic oligonucleotide
atggcacaatacatgatagaattcctcatcgaacccttttgatgaacgagctggg

SEQ ID NO: 334774 - DNA, 59 bp, Artificial
  Synthetic oligonucleotide
atggcacagaagtggtacgccaatggcgacttcgacaaccgtggtcagcgccccaaggc

SEQ ID NO: 334775 - DNA, 52 bp, Artificial
  Synthetic oligonucleotide
atggcacccgtactcatagcgtcaaccgtgcctattgtgacgccgagcgccc

SEQ ID NO: 334776 - DNA, 54 bp, Artificial
  Synthetic oligonucleotide
atggcaccttaccccattggagatcaggtttgaaagttgcccaggaacgaccgt

SEQ ID NO: 334777 - DNA, 55 bp, Artificial
  Synthetic oligonucleotide
atggcaccttgcattgctggatacaagtaacacccaacgtggctgtgaaacaccg

SEQ ID NO: 334778 - DNA, 55 bp, Artificial
  Synthetic oligonucleotide
atggcacgatcaatgcgaccactctgatcgacaagtttcacgacgacattgtgtg

SEQ ID NO: 334779 - DNA, 60 bp, Artificial
  Synthetic oligonucleotide
atggcacgcacgaaatgtcgtgcttgacacgagatgcacgaacgagcaccatatgtgcca

SEQ ID NO: 334780 - DNA, 55 bp, Artificial
  Synthetic oligonucleotide
atggcacgccggctcttcaggggtcgggcattctcggagaacggttggccctacg

SEQ ID NO: 334781 - DNA, 60 bp, Artificial
  Synthetic oligonucleotide
atggcacgggacctggggacaccactggttcaccttccagtcattggtggacagagctga

SEQ ID NO: 334782 - DNA, 55 bp, Artificial
  Synthetic oligonucleotide
atggcacgggacctggggtcaccactggttcaccttccaatccctggtggacagg

SEQ ID NO: 334783 - DNA, 55 bp, Artificial
  Synthetic oligonucleotide
atggcacgtaggcaaatgacacctactatggttacgaaacttcccaagtttgtta

SEQ ID NO: 334784 - DNA, 52 bp, Artificial
  Synthetic oligonucleotide
atggcacgtttacaagtctgagtgcagtattggtcttgatttgcccgataac

SEQ ID NO: 334785 - DNA, 50 bp, Artificial
  Synthetic oligonucleotide
atggcactactcaaccgattaattaacactgctaggaggaatgcctataa

SEQ ID NO: 334786 - DNA, 58 bp, Artificial
  Synthetic oligonucleotide
atggcactcggtgagccatactatagttccaaacctgacaaagacttcaattttggaa

SEQ ID NO: 334787 - DNA, 60 bp, Artificial
  Synthetic oligonucleotide
atggcactgaatacctggaggccatagatctgcacactagtgccgggtacccctatagcg

SEQ ID NO: 334788 - DNA, 60 bp, Artificial
  Synthetic oligonucleotide
atggcactttcagactacttcagcgcagttagttgtacatttgacgaagaagtcagacct

SEQ ID NO: 334789 - DNA, 58 bp, Artificial
  Synthetic oligonucleotide
atggcagacatccacgaaccctagtgtattctggactgagggtaatgcgcccgctaga

SEQ ID NO: 334790 - DNA, 53 bp, Artificial
  Synthetic oligonucleotide
atggcagacttagttcagacgggcccttttagctacaaagacgaacttaaaaa

SEQ ID NO: 334791 - DNA, 58 bp, Artificial
  Synthetic oligonucleotide
atggcagattggtagacataattttgacatgtctaccggtaagggtacaccagttgaa

SEQ ID NO: 334792 - DNA, 57 bp, Artificial
  Synthetic oligonucleotide
atggcagcagcacaacgctcaaggactggtttcggtatcatggcagactcggtggct

SEQ ID NO: 334793 - DNA, 60 bp, Artificial
  Synthetic oligonucleotide
atggcaggaatgagctgcataatcattagcgaattgggcaatgtgttcaggacctttggt

SEQ ID NO: 334794 - DNA, 60 bp, Artificial
  Synthetic oligonucleotide
atggcaggacacagcgagcgacgcgataaatcgtctaatcctagaccaggtggaaaagcg

SEQ ID NO: 334795 - DNA, 60 bp, Artificial
  Synthetic oligonucleotide
atggcaggagggtattttcatgctcggacgcgtgttgctgagatgggagctgacgaaggc

SEQ ID NO: 334796 - DNA, 60 bp, Artificial
  Synthetic oligonucleotide
atggcagtataacagatttgctgtaataacacatggtaaaggtcactatagagtcgttaa

SEQ ID NO: 334797 - DNA, 60 bp, Artificial
  Synthetic oligonucleotide
atggcagtattctagataatctacaatgcactctttaaggtaaacatcatgtctatactt

SEQ ID NO: 334798 - DNA, 54 bp, Artificial
  Synthetic oligonucleotide
atggcagtgtacgttgcaggctacaagatctgtaactatcacttagccacccct

SEQ ID NO: 334799 - DNA, 60 bp, Artificial
  Synthetic oligonucleotide
atggcagtttagttaaatattacagcactacatggtcatgggtgggtgcaaatactaatg

SEQ ID NO: 334800 - DNA, 59 bp, Artificial
  Synthetic oligonucleotide
atggcatacaatccgaagtcacaagcgagaagagacctggtttccatccttcggaagaa

SEQ ID NO: 334801 - DNA, 59 bp, Artificial
  Synthetic oligonucleotide
atggcatacgcacgttatcgctcttccaggtttcgggcaagaaggccaatcaagacttc

SEQ ID NO: 334802 - DNA, 60 bp, Artificial
  Synthetic oligonucleotide
atggcatatataactggctctaccacaggacacctcacgcactgtgcaggctatcaacat

SEQ ID NO: 334803 - DNA, 60 bp, Artificial
  Synthetic oligonucleotide
atggcatatattgcacagctgttgtacgtgacaagcgaccatgtcagttctccgctgtcg

SEQ ID NO: 334804 - DNA, 60 bp, Artificial
  Synthetic oligonucleotide
atggcatatgtccatgcaatggccagcgggagattctcaggattcaccaaatggatatct

SEQ ID NO: 334805 - DNA, 58 bp, Artificial
  Synthetic oligonucleotide
atggcatccaagattggaagatggtactcccgaacgatgtctaaaactgaaagactgg

SEQ ID NO: 334806 - DNA, 59 bp, Artificial
  Synthetic oligonucleotide
atggcatccccgaggcccaagatgtgccgcccttttgcccccgcacgcttgaagagctc

SEQ ID NO: 334807 - DNA, 55 bp, Artificial
  Synthetic oligonucleotide
atggcatccggacgaggataagatagctgggttccttgaaggaaagcacgccttc

SEQ ID NO: 334808 - DNA, 60 bp, Artificial
  Synthetic oligonucleotide
atggcatctgcagtagctgacgcaaatgcagatcttaatgattgcgttgaagaatctaaa

SEQ ID NO: 334809 - DNA, 51 bp, Artificial
  Synthetic oligonucleotide
atggcatgagctggctaacaatcggaatttccggtccagataatggagcag

SEQ ID NO: 334810 - DNA, 60 bp, Artificial
  Synthetic oligonucleotide
atggcatgtacacatgcttctaatcctgtatatgctactttgaaaattcggatatatttt

SEQ ID NO: 334811 - DNA, 60 bp, Artificial
  Synthetic oligonucleotide
atggcatgtcatgtctatgtcataccaattaccctaaaatgaacggcacatatttttcta

SEQ ID NO: 334812 - DNA, 55 bp, Artificial
  Synthetic oligonucleotide
atggcatgtgaagaggagtatacacaaagaagtgctatacaagcatgcctcctag

SEQ ID NO: 334813 - DNA, 55 bp, Artificial
  Synthetic oligonucleotide
atggcattcccaacacgcggtgggttttcggctattcttaatcttcccagcgatt

SEQ ID NO: 334814 - DNA, 58 bp, Artificial
  Synthetic oligonucleotide
atggcattgtatttgttagaatttaagcatgcaaaaagtagagaaaccataaggcatt

SEQ ID NO: 334815 - DNA, 54 bp, Artificial
  Synthetic oligonucleotide
atggccaactgttcgtggacctggacccacttcctcccgtactcccacctggcg

SEQ ID NO: 334816 - DNA, 60 bp, Artificial
  Synthetic oligonucleotide
atggccaagctgatatgcagaaccacgcatacattgaacatggcgatatttcgaaacttg

SEQ ID NO: 334817 - DNA, 56 bp, Artificial
  Synthetic oligonucleotide
atggccaatgcggtttaccattagtcgatattaaaactaggagcatagttggggta

SEQ ID NO: 334818 - DNA, 58 bp, Artificial
  Synthetic oligonucleotide
atggccacacaaataattgtgtgggcctagagacctggcccacattgttttgccggtc

SEQ ID NO: 334819 - DNA, 58 bp, Artificial
  Synthetic oligonucleotide
atggccacagccgtagcgaccggtagagcaatagagggcgcgtataagttgaagaaag

SEQ ID NO: 334820 - DNA, 51 bp, Artificial
  Synthetic oligonucleotide
atggccaccgggtacggaactactcaacgccaggaacgggccgcagatggg

SEQ ID NO: 334821 - DNA, 57 bp, Artificial
  Synthetic oligonucleotide
atggccacgggtaagatgctcatagcttatacacctcctggcggtcccttacccaaa

SEQ ID NO: 334822 - DNA, 59 bp, Artificial
  Synthetic oligonucleotide
atggccactggcaagatgctaattgcctacactccaccgggcggagttaccccagcctc

SEQ ID NO: 334823 - DNA, 60 bp, Artificial
  Synthetic oligonucleotide
atggccagaagtcccacatatctctcaagacagtctcaagtgagttggtgtgtagggagg

SEQ ID NO: 334824 - DNA, 55 bp, Artificial
  Synthetic oligonucleotide
atggccagacgaatcatacggctctccaggtctgggtccactgcatttggtccag

SEQ ID NO: 334825 - DNA, 55 bp, Artificial
  Synthetic oligonucleotide
atggccaggaagttctactctaaggaccgacatgttcccatccccgagtatgagc
